United States Patent Application Publication US 2007/0083945 A1 - sequence listing, part 27

SEQ ID NO: 182723 - DNA, 394 bp, Glycine max
  unsure (1)..(394): unsure at all n locations
gacctataaaactaagctngtcaggaagctatctactctataactagaagcatgtatatcactttgttgaactcngatgaatgaaagtcttatgacatacacttcanagttccacttctctccttcttttattccttcaatttcctgctccccccttctctctctcttttcctccattaaagcatcctcttcaagcttcttatccatggaaattattggtggtgaagctccttcttccttggcttattccctactggatggtgcctcccgtctcctcttctccttttccttccgatgcatctccatggtgtaaaatcaccattgaaggaccccattgaagctcaacgatccagcctccatagaagccccacaagcaaagcttcatcaagtggta

SEQ ID NO: 182724 - DNA, 432 bp, Glycine max
  unsure (1)..(432): unsure at all n locations
gctttctgcagggaagctaagtgtgaagtangtaattctgcatangattggcactgtcaactgggtacccaccaatcatacttccactgttgccacagtgttagtgcttagctctactgagtgtttaaaagattggctaagattttgntaaaacataagcacttaaacaatgaaggaaagctggagttgctgcacatgatgtccaacgttatgtcaaggaatcagatcgggctgcacaatgcacaaggcaagataaaatgtcaaatgaagaattgaagctgcaggatccacgatgtcggatacaatgtccaggacatcctgcccgaaaatactggacacataaatctgttatatctttaacagagtgtgcaggatccacgatgtcggacacgatgtcctgacatccggcccgaaaatactggacacataaat

SEQ ID NO: 182725 - DNA, 366 bp, Glycine max
  unsure (1)..(366): unsure at all n locations
acataaatactaacttgccttggaagctttcgcaaaagcatataaaataatttctttttattngcgaaggttctttggtattgttgaaacccaataccttatgctgggttttaaaattgctatttgcatctaatgaaaataacaattagttcttgacatgcactatgaagattctttcatcaagctaactatcaattcttccaacgttnttatgttcttgcaatgctcatgttttccagcagctgaagtttgaaacattatcatttgggagattctatgaatcttactaaattctgatattctcatgcttttatggataactgcaggcagggaaagctgacaactattaacattctattgattata

SEQ ID NO: 182726 - DNA, 469 bp, Glycine max
ttaagcaccgcggctgcagctttgcactcacccatattggcttgttattaccaaacttaacaccgccgacaacagcgtcaaggaattgttgcaccccggatacaaaggcttctttgagtcactctacaatccttcatacacaggggcatgtgcttgctggaaagactcttgtccaaggtcacgaatcatatcctccaagcgatctcccatttctacatcaaacgattcggattggtgcccactctgcatgtttgtcatttcaccatgccatatccacgtcgtataattcctcttaattctaccacacaacaaatgctctcatatgtcatccaatatttgtcgtcctccattcaaacaattgatgcaaggacaataatatttttcatcttcatccggtcgacctctttctgaagcaaaatgtaagaactgctcgacgccttcctcatattctgggctgatgcgactttca

SEQ ID NO: 182727 - DNA, 415 bp, Glycine max
  unsure (1)..(415): unsure at all n locations
tggtgctntattaccttatctntgaataagaaggtttgaattcaattcatgtaaacactatntttattntcactntatttaactccttactatataaatgtcatgtcagtagtctacataaacgtcacgtcaataccaatatgtcacatcaacatcaatacgttatatcaaagttaatatttgactttggatggttaactgatggtaggataaaaaattgcttattttgaaaaataagaggacttaatgtcttgatttagaaatcaaagaaccgaaattgtagatttaaaattatagagaaaccaaaattataatttagcaaaacaataaaagaatgaagaagaacaatcagttaggggtgccccgattctaacatcaacagtattntatgtaaataatttgaaggatgagttta

SEQ ID NO: 182728 - DNA, 456 bp, Glycine max
  unsure (1)..(456): unsure at all n locations
agctntagggtgttcaattgctccagattgttgtttataatggaaaaggtctgtatggtggtcggcagaggaacataaaccacagagtcttgtgacaggtacaaatttctgattcaaggccagctgggttaccaggttaaccaaggcatctagtttaccttcaagcttcttagtttcagatgatgcagatgagtttgtggctacttcatgcactcctctaatgactatagcatcatttctggtgctaaactgttaggagttggaagccatcttctcaattaaatttctggcttcaacaggggtcttgtctccagggctccaccactggcagcatctatcnaacttctctctatgttactgagtccttcataaaaatattggagaagaagttgctcagaaatctggtggtgagagcaactggcacatagtnntttaaatctctcccagtattcatat

SEQ ID NO: 182729 - DNA, 384 bp, Glycine max
ctcaagctgcccccagctcgcccaggagagcaaggaggcttgctccataagtatccgccttctggaggaagaatctgaaggcccaagtgggcctgattgctatttgcacccacatctttactaaatacacccccttgctctcttttggtgattctttttccgtaacgttacgaaactttatgaatttcgtaacgatgcttgttttctttccgtaatgttatgaaaccttacggattacgtaatcatcccttcttttgccttcggaatgttacggaactttgcggattacgcactaacacttccttttaatttccggcatgtcacagaacttctcggattgtgctacaatgacttcttttgactctcgacatgtcatggaacttc

SEQ ID NO: 182730 - DNA, 465 bp, Glycine max
  unsure (1)..(465): unsure at all n locations
taagtcacctgcggcatgcaagctttatgtaaaggatggactcttactttttaatttgaatttcaacgttcaaaggcactggtaatcgattaccaaaacattgtaatcgattacagctttttgaaatcaattggaacgttgtaaattcatttgaaaactttttcaaatacattttgctactggtaatcgattacaacaatctggtaatcgattaccggagagtaaaaactctttggtaaacatgttttgagaaaaatcatgtgctactcaatttttgagaaaaacttttcatacttatcttgattaagccttctcttgattcttaaatcttgatcttgattcttgagatcttgaaccttgaatcttgactcttaactttcttcttgagtcttgaattcttcttgattctatcttgaactcttgaattttcttgatcacttgagttggctttngaacttatgcatc

SEQ ID NO: 182731 - DNA, 490 bp, Glycine max
  unsure (1)..(490): unsure at all n locations
tcctcccattntcctccatacctagaacttcaaaccttctattctcactcgattcttcaccanatcacgtcccgtaaagcccaatcttcctctttttcactcctctttcacttccaccgatcgaaatccagaaaaacttcatcaaatggcagagccatcaaagaagagaaagggatcatcctccaccgctaccgctgctgctcatcgccgtcacggcccatccggagcacccacagcacctattcctccttctttgtcatctccaagatcatcaacactgttttcatccgatgatcaacgtctacggtacctttctcagttttcttctagaataatcttagaccctaagtacctagacgtagagntctntaatgatgaaacgtttgattgctatcaagtgtttcacaattctggtcttggtgatttcatgtcatttaaattgccatattatcctgaacttgtaaggtcttctactgcaatttaaaaattc

SEQ ID NO: 182732 - DNA, 366 bp, Glycine max
  unsure (1)..(366): unsure at all n locations
ctcatcgataatggntccagattaaacgtgatgcctaacagcactttggagaaattaccattcaatgcctcccacctaaagccgagttcaatggtggtttgtgccttcgacgacacccgccgagaggttaggggagagatcgaccttccagtacagataggccctcacacatgccaagttactttccaaataatggacattaactcccctacagttgtctgttggggcgtccgtggatccactcagtgggagatgttccctctacactccaccaaaatttgaaattcgtagtggaagggcatctggtcatcgtatcaggcgaggaagacatcttggcgaactgcccatcctttatgccttatgtgg

SEQ ID NO: 182733 - DNA, 473 bp, Glycine max
  unsure (1)..(473): unsure at all n locations
tcaggaanaggccaaactctcctacaaatgtgatttctgcttatatatgcggctctgtttgtgcttgtgcgcttagcgcatttctgaaccgcttagcgcgcattagtgaatttcggcttagcgcggctcttctcactcagcagatggaccgaagattggctaagcgagagggtgaaaatcagcacttcaaaacttgcctaattatcctgaaattgagagaaaatgattattaaatacacaaaatgggagtactacgcgtatttattacctatctttaacaaaaagtaattataacactacaaaataaccataaattggaggagtgtcatacaatttacataagttttatacacaaaagttagtcgtattcactaactcaataactccccaaatttacagttntgcttgtcctcaagcaaataaagaatagttcactggtccccaagtgacaataacatgcagtgactatgtac

SEQ ID NO: 182734 - DNA, 479 bp, Glycine max
  unsure (1)..(479): unsure at all n locations
cgacgactntggactgaacatattctctaatgaaatgatgttcaatgtcaatgtgcttagatcgttcatgatgagcacgatttgaagcaagacttatagcagatttattatcacaaaataacatcacagagggcacatcaacttcaaagtgaagaagtaacctgtgtaaccaaacaatttcactagtaacagaagacaagacacgatattcagctttagtggatgattttgaaacagtgggttgtttcttagaacgccaagaaagaaggttgtttcccaaaaagacacaaaagccagaagtggatcttctagtatcaacacaattggcccaatcagcatccgcaaaggcagtgaggttgagagagttctgagcaaggaaaaacaaaccttgtccacgagcaaatttgatatactgcagaagatgatgaacaacatgtaggtgaggaactctangtgctttcataaactgacttaagtga

SEQ ID NO: 182735 - DNA, 306 bp, Glycine max
ctgaggagggcctgtacaagaagtatggaaaactatcccatgctcaacaaaatattttttcatgcaaatgaattctgtaccattatcacttctcacagttataaccttctcgttatattgcctatacgccataacaaaaaaattagttagcgcgccatatacttctttgctatcaattaagagaaaaacccatactgcacgtgagcaatcctcaacaatggtatgaaaatctgactcaccactacaagaaggagttctataacgcccccatgaatcacatatatcacatcaatgttgatagcttga

SEQ ID NO: 182736 - DNA, 319 bp, Glycine max
  unsure (1)..(319): unsure at all n locations
tgcaagctntggaccttgacttgtagggccaatttttattctatcgagnggcccggccccccccccccccatggtatgcgtaggtcgcattatgcgtataccatttcgggaatggggaatggtatgatctttcccgggaccaccacggccaaatggttggcgatgagagacggcaaaatttcctcatatgtccttgggatcggggcaaagatcggtgcctgccttgaagacaagctccttgccatgttgttgcccaaacgagcgttgttggtcgggtgagactgagtctgagctggagtccagagagctcccccctata

SEQ ID NO: 182737 - DNA, 412 bp, Glycine max
  unsure (1)..(412): unsure at all n locations
tattacaagccttatcagaggtaagccactacctatgctcttccattttttattaaaccatacttcctttgcatgattagtttgagtctcctcgaatggtcaaggtgtgactatgttaatagatgtacatgggttaatcgctaaaggtgaaatattctgggagcaaagagttagcatggcaataaattatcattagacatgtgcaatgataattatgacttgagaatgatgtgtttcatgatgagtcatggaaatattttgatgcttgatgattgctggattgattatgacgatggtgtatgatgattgaaccttatgtaatggttaatgaactaaggattattatgagatgtcttgttatgaggattctaagacttatgctntatgtatgaattctacatgctatgtcata

SEQ ID NO: 182738 - DNA, 368 bp, Glycine max
aaatttcaacgattgctatattatttaaacactttatctctcgaacgaaatgtaacggtacctgcgattccgtagttaacaggaatcgtcttctatgacattaagcttgtcaattccattcttatagtaagagacagtagctcggaagcacatcctttaagaaaaaaaagggaagagattacatggaaactcatgaaggaaggagttgatcatataaagtctcgtcacagtttaatactcctccacttcatatatagctcccgtaagaattccaaagtcacaaacagagttagcttgaaaatgtatcaatcatagtttaaattacagtcacagttgctttgcggtgagtaaaaaaacttctatgttac

SEQ ID NO: 182739 - DNA, 405 bp, Glycine max
  unsure (1)..(405): unsure at all n locations
actcaagcttgatataaagagactccgataaagaaagtaataatttgtagcgccgatagcaaaacccaanagggtggatttgactctcttgagttntaggtaaaaaaacaaattagaccaatttagcccaagccaatgaacccgcttgggcctataaaatgcacgtaacacatatcatgaccacactggccttgatactatctaccaggcttatttgggaatcttattcgccaattccgatgatttataaactctatcacttacatctactttcacacactgtattatccaattcttagcatccatgaaactatcaccaatgtctttcatgaactaattataactttatcattgaaaaatttacactcattctcaacttttttttgccgttacatcaattgaaaa

SEQ ID NO: 182740 - DNA, 454 bp, Glycine max
  unsure (1)..(454): unsure at all n locations
agcttccttggggccatttgctgtgttatcttcattnggaagttagttntacaagataatgcttatcttaatacaaaaatgacatgttaatccctctgattttagaacgaactcgtgtaatctatttatgcacacgcgtatgtgtagaatatcctactatttatgccaacatacaaggacatccgacacattctaattgtcacacatacatatgcattttgaaaggaacatacacttttacgctcaaggcattgcgtcaaaatttacacttaattacatcctaaacatttgctattacaaactacctacacatatttgaaatatatatcatacaaacttttattgtttcactcacacttatgcatattggcaagctatttacattatgcacacacttgcattcaaaagggaattctgtgctatcatacattcatttaggaagcgacctcaatat

SEQ ID NO: 182741 - DNA, 476 bp, Glycine max
  unsure (1)..(476): unsure at all n locations
ntgtatgcaaaaatcaccaaatttcttgtaaggtccaatgccttaaacggtcctctntgcttttatcggttaacatggaccgttcaaaagcataaaatcaacatgtaacttttccgcttttgcgagaactacgtatgtctgatttcctcttcgatggaggatacgtaggagcaaaagccctgcttttgtcgacctcgtgagatggttagaggtccaacgccttagctttctcaccaagtaaaatggatcattttaaggtccaaccccttaaatgacccccttccaagtaaaaaagaatcccttgattctctccttttgaaagaactacgtaggtctgatttctttatcacaattgaggaatacgtangagcaagggaaacacccttgtcgaccacaaaaagataaaaaanaataatacaaaagggataaaaagacataacaacgtataagggaagaataaacacattgatgtcata

SEQ ID NO: 182742 - DNA, 385 bp, Glycine max
  unsure (1)..(385): unsure at all n locations
tttgaagccacagaanagcaaccaacttaagcatgtgtgcggaatgcaacacaaaaaaatactgcatctctggctattgctggcaatttctataagctgctattccttgctctggatttatgaaatacaccaatgaaccaggagacttagtcttacaactcagaaattaagaggagattgtaattataaatattaaatttaatctcaaaatcatgaatgaaaacacataaatttcagctgatataaaacaataatcataacattgaaaatgatgccactttcaatattaaaagaagaatggcgttatgggattaaccaaattaatcaatagcctgtcaagcatccagtttataaatcctttataagttatgaattggtatagcaa

SEQ ID NO: 182743 - DNA, 437 bp, Glycine max
  unsure (1)..(437): unsure at all n locations
taacccttggtcactgtcataaagnactttcgagatccagtatctactttgtaaggagcgcgattgggttcctagatctggtggtctctatttctactatggagagatgaaggtggcctcgcttcaacggtggtgatgtcgtatgcggcggcagaaacaagggtcctctgcgctgccagtacacaatagcatttcaaacccagatctgaattaatgcacaacagaacaaaatcccacattcgaaatataaacgctcaacacaaatgagagagaggcttcgttctctcgtgctattctaactcgacacttaacaagacattgccatacaactaaacctacaattttcattaattattaaatgattatcataaatgctactctgaacaagattgggagctccagtcctgatgtctcacgaacttaacgatcagatccct

SEQ ID NO: 182744 - DNA, 242 bp, Glycine max
  unsure (1)..(242): unsure at all n locations
aacctaaagtgaccccaccgagaccctaaaatggaccaaccatcaacatattagattctcacactcaacatttttttaataatgctgcatgaagtggcgtcatttgggttgtgtttattcctgaacgtgaagaattgtgatgatgatttcatgctttgaccacnttcaaccattgaatgtggaatctgtggcgtgggtgcggtggaaagatgacataactattccataattttataatttat

SEQ ID NO: 182745 - DNA, 399 bp, Glycine max
tttcgagcgtctcgatatattttacgcctgaatcggacatccgggttaatagttatgaccatttgaatttgtcgagagcttccgttgctcaatttcgagtatctctatatgtgatgcacctgcatcggacctcctagtgaaaatttatgaccatttgaatttctcgagagctttcgttgttcaatttcaagcatctctatatgtgatgcacctgcatcagacctccgagtgaaaagttatgagcaattgaatctctcaagatcttccaatgttcaatttcaagcatctcgatatattatgcgcctgaatcggacttccgagttaacagttatgaccatttgaatttcttgagatcttcccgtgttcaatttcgagagtctcgatatattatgtgcctga

SEQ ID NO: 182746 - DNA, 486 bp, Glycine max
  unsure (1)..(486): unsure at all n locations
cttgcattggaattgcgaaagccccactccatcattaggattattatctgacatctcaaacaaacaaatcaaacgtaacaagacaattatagttgctgtttgaatacctcacccactcaagtgtatcacacaattatggcttttctctaatgaaacactcttgccttttaccactctaattccccttgagttcttaggcaattcaagagattatggccacaacaaagaacaattcaccaatatgtgtaaggtaaggctagacaaggaaaaggttaaccaagataaaggctaacaatgtttttaggcacaaatgaaggagataaaattcagaatttatgaattcaagtaacaatccttcatgcaaccaatatattaccttacagagtttntttntttaagttcttcaagcatgaaccattcagcccaattctttcttttttaatcttgcttatacgaaattctgttcttttctttttctttttttat

SEQ ID NO: 182747 - DNA, 437 bp, Glycine max
  unsure (1)..(437): unsure at all n locations
gcttggttctacagtttatacaagagaatattttgtttccgattgaaagggaaatcataacaattgcacaaaagattaataggcctaactatcaaaaaacagtccccagtggagtcgccaactgtcgcaacctaccttttgacgagagggcgacgcgagggctcacgggtgcatcttccaagggagaaaggcacgcggagtctccaccaacgtttattcgaggaaaacatcgaaaaaaccaaaaaggtgtggtctacgaactttaatcgtgaaaggttcaggagttttttttttatgcacggngaaggtatttgctccccacgtgtctgtcacaagggacgacaactattagtcgatgaatacgactaacttttgtgtataaaacttgtgtatattgtatcaaacttctcccaattataggtggtctataatattat

SEQ ID NO: 182748 - DNA, 400 bp, Glycine max
  unsure (1)..(400): unsure at all n locations
aatcatgaagagctgattataccgttgttcaagattacaatcatcccctaaccatttatctttccagaatttaattttatccccacacccgaccttccataccatctgctaatggatagagctaaactcaggctgctgatttagctttctgaggtccctccaccactgggaatgccaaactttgtctctaccattactgagctctgaccaacctccatatttggatattaagattctggcccatagctgattttgattagaggataaggcccagatccatctacccatcaaagctgcattgaatttagaaatatccttaatcccgaggcccccatccttcttggngagacaaatcacatcctacttcacccaagggattntcttatgctcttgatctccc

SEQ ID NO: 182749 - DNA, 459 bp, Glycine max
tagcccaattcaattcaatctgaatggggttaagcaagagttcattcgcttagcgcatcatgtttagtggctaagcatggtgcacttatgctaagccctattctttgcagccaaatcaatggtttaattgagctaagcgcaacgcatacgcactaagtgaacttccttgcggcctggatagcgctaagctagcaaccactcgctaagttcatgcccccttgtacacagggtgcagtatattcgctaagtcgactaagagtgcagcttaatgagagttgcaggttttcttatctgcacacgtcgcttagcgtgctgcttttcgctaagcgcacgtttatgtgtaaaaaaaaaattgcgctagcgaaacgacccgctaagcgagcgtgttgagaaaccaaacgtctctcactactgcttagtggatggctcgctaagcctaaattttaaatgggcccatgt

SEQ ID NO: 182750 - DNA, 446 bp, Glycine max
  unsure (1)..(446): unsure at all n locations
tggacacttctccatttcttctctttctttttcttccttagatttaatcatggaactttagatttgatatccatgtcaaaacctaagcctatccttctcacattgttgggtccaaacacctatttttattcctttttttcttctttctatatatcctgtttagtaactctggccttacccccttttcaagaatttgtttgccatgattaatacttgtgttattgtaattcaacattgtattctaaaagttccaaaagacattgcaagttagcctatgttgggttttgttgtgactaanatcatgcaacttttgcatggaaaggtcatgaggaanagaagtaggtcaaggattacccgtatagtccactattaatactcgtaagtatattgatgttgatgagaggaggcttcttgcattttatttttcttttgtngaaatacctaca

SEQ ID NO: 182751 - DNA, 493 bp, Glycine max
ttgcggatatggtcttgaccgacgaaaggatcaaagtgggtatggttagaggcaaatatgatcattccgctatgatgaatgtgaaaactgcggcaaatgaagaggatgagaatgagggagaaacccatgctatgactgccattcctatacgaccaagttttccaccaacccaacaatgtgattactcagccaataacaacccttctccttgtccaccacccagatatccataaaggccatccctaaatcaaaccaccaaacccacctaccacacgagcaatgctaaacaccactttaagcacgaaccgaagcacctaccaacagggaattttgcagcaaaaagcctgtagaattcaccccaaattctcgtgtcatatgctaaacttgctctcatatctactcgataattcaatggtagccataacccttgctagggtttctcaacctccatttttccgaggatacgactctgacgccacatgtgcatatcatg

SEQ ID NO: 182752 - DNA, 312 bp, Glycine max
ttccaatttgctttgaaaaattggttcccttaccgttcccggaggaattttgccaaaggtttccacccgtcctcgacggttttcattccgtcttccatcgtcctcgatccttcatgggtaagtaccctcaacccagcttttcgattcattctatgtaccccgggtggtccacattgtggttcgtggatttttattcctcgttcatttactttttatacccccttttaccttccttaagccattttatttaagtcatttctcgcttaacctaaaaataaaataaatttccaccgactcgttgaattgtattat

SEQ ID NO: 182753 - DNA, 477 bp, Glycine max
  unsure (1)..(477): unsure at all n locations
ngtagaatgggtagacatgatacatgtcagggtttggtttgtttcaaggataaaagggatgccccacattatctccatgacataaatgcaaaaatgatgatttggaaacttcatgcaaaactggtcatgcatgcacctatgcggacactcaagcgtcaaatttttattgtcatgtgatgctagggctcaggattcatttcctctattttagtcaacccaatgtttccaaaatatgctcttttatcaatttgtgcattcatcctagtccatttcgggcgcccggngaaatttcacagcattcacccttcaggtgtagacacatttttcaaaaattgggtatgatcaactgaattttttcatagaaaagtctggaaatcatctcttttcanaagcatgtcnggtgttagctagacaacttattttctctttttcacctttntcttactcgcttctttttccttattgctctctcttctt

SEQ ID NO: 182754 - DNA, 335 bp, Glycine max
  unsure (1)..(335): unsure at all n locations
ttttgtttgtgtttaggtctgagtttgtgtttgaggtttgtgttttggaagacaaactcgaagacaaaggtttgagtttaggtgtatatttctcttcatagagtttggccaacgaaactgttctgagaagtgatgtaggtgattgtgcaatgacatccattctgatattacgttttaatcctactacaaagcaatccaatagagcttcttgtgtaattccttgtactcgattagctaaagacgtgaactgcacgtaatatgactgaactgaaccaatttgagtgagttaaacaactgagatctangacattcacacggtgatgggccaaattctg

SEQ ID NO: 182755 - DNA, 500 bp, Glycine max
  unsure (1)..(500): unsure at all n locations
tacggacctataaaactcagctntacatgcatgttcacaccatatttactatacttcgatcttctgatgcaatctattngattgaaaagataatttatattactcttctaatgtagtcgacaacaaaaaaaaaatataacagaaagtaatgcttaggccaatctaatcaagtcattctgaatctcgtcattactatcatgcatctcaaagagaaggagaatcaagcatcgtaatgcatagcacaacaaaacattaaaagaaaacatgccttccaaagccaaccaaggttaaaatgtattcatatttggtgaactttttcaaaataataacacatatatataaacatggtggaacaatctgaccacatgcacaacacattccacacattatttctganaatgagtggcaagggaatataataaagcattggtattaaaattgtacatgcactaagataacacgggtgtcatgacacaaggaacacattgtgattttaaaat

SEQ ID NO: 182756 - DNA, 411 bp, Glycine max
  unsure (1)..(411): unsure at all n locations
agcttgctaatgtagagtgtgggggataatttcatgtatgcttggagggtgcagtttgtgttttatatggatgttagttcaaggtggtggatttttgggctgtgactaaaatccatatggaagtttattctgttattttttctgttttatcctctgcttatgtaaggcaaggatgccctatattttggataggcttctacttgtatattgcattagtaataaaagctttctattctccctcccatggatgtagccttactcaagggtgaaccacgtaaaatctatggatgttctttctctctttttctccctttcattttgctgcaacattggtgtatgacatttttgttctgttgcatctcctgctatatttcttggttgatcttcatctccttatnnttttttctagac

SEQ ID NO: 182757 - DNA, 408 bp, Glycine max
  unsure (1)..(408): unsure at all n locations
aactatanaaactcaagctctgcctttagggcttgtacctcatcactttcttcctaatctttaacctcattggctctcacagactttagaattgggagccaatccaatccttgtgtccggactctcagccacttatgatagccgccgaagataccattaatggttcccctcaactctctgtgcttttttcacgccgcataccatgccttgcaaactccttggagtacccttgcgttgtagtcactgaaaccccatacaatgagaggcgtgatgctttcgtctgatggcactcctctcatggggtagccatgctgtcttatggcgaggacaggagtataattaatacaaccccttgtttccatcaacggaacatttggacattctctccatgaagatagaatactgatt

SEQ ID NO: 182758 - DNA, 399 bp, Glycine max
  unsure (1)..(399): unsure at all n locations
agcttaacaaaaggcatgcgaagngggttgattcttatagcaattcccttatgttatcaaacataaaaagggaaaaggtaatattgtagccgatgctctttctcggcgtcatgcattactttctatgcttgaaacaaaattgattggtcttgaatgtttgaaaagcatgtatgaaaatgatgaaacttttggagaaatttttaaaaattgtgaaaatttttcagaaaatggtttctttagacatgaaggctttcttttcaaagaaaacaaattgcgtgtgcctaaatgttctactagaaatttgcttgtttgtgaagcacatgaaggaggtttaatggggcattttggggtccaaaagactctagacacattacaagaacatttttattggcctcatat

SEQ ID NO: 182759 - DNA, 476 bp, Glycine max
  unsure (1)..(476): unsure at all n locations
tactcaagcttaacttaacataattcacatcatgttaccaatcattgtgttatatcacttcgcctaaggatgtaatcacaaaatcatattctataccttcacattaatcacatgttcataacagaacatctcaagtacaacacaacatctctcacacacaattcattacccaccatcacgtagcaagtcacaatgatcattacacagacgctatgcaacatatatactaagactcaatcctatattgaatgtgatatcttgtcagtgaaaaataatactagggcacctangagtacataataaaatacaccacacaatgggtaagcaggtcactcttattaaaagaaatcataaggtgatcaattacggttattctgttagtgtgaatgctctaaccatatgagatcaacatatatttataggagcactcacaccaagtgtatgtaccctcaagggctagactctgaagatccatt

SEQ ID NO: 182760 - DNA, 309 bp, Glycine max
  unsure (1)..(309): unsure at all n locations
acaacagccttctggaggaatcttctggagggcccaagtgggcctggttgctatttacacccccatttttactaagtacaccccctgccttttntttggcgattctttttttcataaagttacggaaacttacgaatttcgtaacgatacttgttttctttccgtaatgttacggaaccttgcggattacataatcatcccctttttgacttacggaatgttacggaacctcattaattgtgcaacgatgctttcatttgattttcggtgtgtcacggaaccttacggattgtgcatcaaatatttctt

SEQ ID NO: 182761 - DNA, 411 bp, Glycine max
  unsure (1)..(411): unsure at all n locations
ntgtgtaatcgattacactgattgggtaattgattaccactgattgcttctgaataaatcaaaagatgtaactcttcaaatggtctttgactttttcaaattggttttaagtttttctaaaagatataactcttctaaattgttctcttgaccagacatgaagagtctataaaagcaaggctttgatttacttttcaatacacttttccaatcaatcttatgcaatcctttacaagccttgaatctctttgagcttcttcttcttctttgtgccaaaagctctccaaagttttctggttttctaaaccttgaaaacttgtgctattcattcttttcatctcttctccctttgccaaaaagaacttgccaaggactaaccgcctgaactctctttgtgtctctcttctccct

SEQ ID NO: 182762 - DNA, 462 bp, Glycine max
  unsure (1)..(462): unsure at all n locations
agcttcacaaaagtttgtatggctcgaaacaagcaccgattttgtggtacaagaagtttaatgagtttatgagcaactcaggattcaaaagatgtgacatggaccattgctgctatgttaaaaaatatactaatagttatgttatccttgttgtgtatgttgatgacatgttgattgcaagatctagtatggcagaaattaacaggttgaagcagcagttggcagaaaactttgaaatgaaggatcttggtccagctaaacaaatccttggtatgagaattcttagaaacagatcagaaggaattttgaagctgtctcaggagaaatatatacacaagttgcttgacaggttttaccttggagattctaagaccaggaatacccctttgggatctcatttgaagttttcaaagaagcaatcttngcagacaaatgaagaanaatgttacatgtcaagagtac

SEQ ID NO: 182763 - DNA, 514 bp, Glycine max
acggacctataaaactaagcttgtccatggtagacatgattggtacatgatttgggacttgtatgattcaatttggggaaaattggatgagggaaaaagtggttttcgaaatctgcactttatgcagaattttgtataagtgcagaaaaatgcttgtgtatggctggttgtgaaaagggtagtacatatggggttctggacattttctagcagatcccaacggtcaaaatgtagacttatgtactagagacttccagtaaaattttcgagtcgatccaacggttaacaaattggaacgaagaaaatgttactggggtatttgtatgtgaaaagttgtgattatgagttgtgttttgggcagagtttctgcctttgccctggtttgcttggttttgttagtccatgatgattggatgtggaattaactggatgttgtggaagcttgtgaggattgatggtgaccccgcgttgagagggacgaggataagggctacatgggagtacgtgagctcag

SEQ ID NO: 182764 - DNA, 447 bp, Glycine max
  unsure (1)..(447): unsure at all n locations
catgcaagcattactagcccacccatgcctgccacaaatgcttttactngctctctatcaagacaatattttcttctctcaagtctcaaccatccctttgatcaacacccacaatggaaaacggcaaacgcttaaacgatattctggttactttgctgttaggttcagttcaaattaagtatacagaggcagtgaccaatcccttcctatcaacttcaaccatgtccattttcgtcgcttctatcacttgtcatggcctgacatccatgacagacacgaactcgcaaggtccagtcataatattccacctgtcatgaatggataagatgtgactgccggaactgtctaacaaactataatagataacgttcttatgctaatcttctgaaaaaataaagtcatgacgactgataggataaaacaatttttatcctattctctacgcat

SEQ ID NO: 182765 - DNA, 416 bp, Glycine max
  unsure (1)..(416): unsure at all n locations
atgattgagtggaaatttctaaagaaatatctatcttttcttcatgtttcccttgaaagtcgatataatcttttcatttgattctgaatctgacctttccgatgtagcgctaccatcacacaaaggttggcttcttcttcttcctttatttcttcatcagatgacgtgttgtccagttcttcccatgtgctcatcaatactttcatgtcttctggtttgaagaactttntcatgtgagctgatttatcaagatctggacattttgacttgaactttttctccttgttctttctttctctatgnggnttcttggatcctttctgtgacatcctggaatttctacccggaattttgtaagtattacatntaaataattatatatatatatatatatatatatatatatatatattatt

SEQ ID NO: 182766 - DNA, 447 bp, Glycine max
tattcaagatatgggatgtcagtctgcagatgtttgggaatggaagctcgaatggagaagacaccattttgaatggagaagctagtttctatgtgtgtgtgtgcggaagcttgaatcaagaatctgtctaagtttaatgcagcatccttaggctgcattaaatctcattacaacacatcactacatccaacagatgggaagtcacaaagacaatgggtgggagtggagctttatttggagaaggccattgttttgataatgaaattgatacgactggtgtttttctcaataaggatcaggatatggccattcaacaacatggacctgatgtgtgggaatggactgctgaccctacaaatcagtatacaacaaacaatgcctataatgtaataatgggaggagcagcagcaataacccacgaggaatgttttgtcaattatggagcat

SEQ ID NO: 182767 - DNA, 455 bp, Glycine max
  unsure (1)..(455): unsure at all n locations
gcttctaaacaaagcactatgatggataagatacttcttatctagcanatctgatctaataaaaaggttgcatgatgcaactatattctctaaatttgacatgaagtcaagctattatcaaatttagtggtagaggaggacaaatacaaaactgcttttgtagtcccttttggacattatgaatggaatggactataatgccccaaggcttaaatgcatcaagtgaatttcaaaatattatgaatgatattttctaccaatatatggaattntcagtagtataattagacgatgtactaagtttttcaaaaggaataaaccaatatatctcgcatttacatatatttatagaaataatcaaagaaaaatgagttgtggtcttataaaaaagaacacaatactcaaacaaaactatgttcaaggatatgaatataccaacgacaattaccccatct

SEQ ID NO: 182768 - DNA, 479 bp, Glycine max
  unsure (1)..(479): unsure at all n locations
ntaannattgaattaaaacgttcaataactgctggtaatctattactatatatgtgtaatcgattacacagtgcanattttgaattcaaattttaatagctgttctaaatcatttttggccactggtaatcgattacatcctctggtaatcgattaccagagagtaaatctcttgaaaaagactttttaacttaaatttcctggccaaaccttttgctacttcaattaggaattccctttcctatttaatatacccttcctaagactctagagactgtcttgatcatccatcttgaatatttctaatttctttttcttgaataaagctntgagaaacatgtgatcctttggcatcattaaaacattcagcttgatcgcttgtctacaatctncccctctttgatgatgacaatccttgaaatcaagacaagctatatacaagatgatagcacgttcacacaacccttactgcccctatc

SEQ ID NO: 182769 - DNA, 428 bp, Glycine max
agcttgaaatgctacagagatcggtttagtgttcaaagagctctgcaacatgaaaacttttatttaaatgataactgataggcttgtagataggggcaaattattcctggataattacatttctattggcttctacatataatgcaactcatggttttggagcactgttatgaacttatgatatactatatcagtcactaaatctgattttgttttctcatttttgtgtttggatgcgtaaatataggttaactcatttattgtctattttgctatttatcaccttcttcttgtatttgacctgattgttcttgactcgagtagatagcacttgatttagagctaataactttgagtataattcagcatgttcgcaatgtatcattatattaagctctaaattgtggagctcacaaccattgaagctg

SEQ ID NO: 182770 - DNA, 351 bp, Glycine max
  unsure (1)..(351): unsure at all n locations
tgcgcgctgcgataagcccaaagaattccatgttntaaaatatttgcgatttggagtaagcgcacaagagcaggctaagtgcacatgtgtagactaagcacgtatgggcaactggctaagcttgcatgtcgcgctaagcccaaaaccacttttgttttgtaatatctcaaaatatgctatgcgcgcaagcgcaagctaagcgagccatgcattcttgctaagcttgtgatgctcgctaaacggatttagtaggaagatatctcctacaaaactcgctaagccccatatgacgaactaatcccaataatatgctttggagttgcaatttaggtatttggacttagcacacaa

SEQ ID NO: 182771 - DNA, 454 bp, Glycine max
  unsure (1)..(454): unsure at all n locations
agcttgagttcgatgatgctgccctataaagtctcctcgaacttattttggccccattcttcttttcgggccttctttgtttctcgttctaatgcttcggctgtggctatgttgacatcccttagctcgtcacactctttcctgaccctgatgtctattgtcttgaacttttccttgaccacttgtgttctttcaagttccgctttcaaggcttgcacttcttcgctctcctcagggacatcagcctcttccccacctgaactctttagcttcgggagccaagttatcccttgcattcgagccttcaaccatttatgatatctgccaataacacgcgtgttgcttcctctaagctccttatcctttctttgcaccgtattccatgcttttcggactctatgaagcattnttgcatcggggtcactgaagcctcgtgcgatgaaagacgcgatac

SEQ ID NO: 182772 - DNA, 454 bp, Glycine max
  unsure (1)..(454): unsure at all n locations
tttaaagaatatacatgaacatacttcagagaaatagttgctttttaaacttgtgaaataagcttgatttattttatatattttagaataaattattgacagccatgaagttttgtgagattgcacaaaattctcctttttctttttactgctacactaacactattaattgtttaaaaatattacattatgttatcctataagaaagattgttgtaaatgttaatatatatatatatatatatatatatatatatatatatatatatattataaatctcacaaaaccttaaaaaatgtcattgtgtcagncgaatatattatctggtttattattgttataatcacttttgaagaatgttatccagactaaatatgtgtggcgtttcttttctctatgttttatacaatacaattattaaaatcttgacatataattctatatatattatctc

SEQ ID NO: 182773 - DNA, 460 bp, Glycine max
  unsure (1)..(460): unsure at all n locations
agcttgggtgcatatgacatacatgatccactctatagatggagtattaagattaaacacatactacttccctaattctataaagccaatgaaataacaatggcaggttattaagcttaagctctaactttacaactggacaattgtagtgaagcatctaagtgaaaggcaaaccgcatctatcagctgggaattnttccccaaagtattcaagcaagaactttcttctgcaagttgtcagcacacaatagcgttcagcagcaagcaatgactccataatagcttttctttgtttttcctggtacattggagactcacatgttactaagagaacagggataacttgtctccagaaaatatgcaagaagtcagcaacttcaatcagccaaactttttctgatanatacaaatacacatactgattncacatctncacaataaaagtcacccttggcaaagt

SEQ ID NO: 182774 - DNA, 494 bp, Glycine max
tgcctgttaatggccagaacatgctgcgtgaggtcatatatcttgctggagaatgcgggtctttgtcggagagaagggttggaattccttactgagtagacacggcatgcaagtgaggggagggaatgggatttctgatttgatttggttatatgaaagcggaggcaaattccacaattgtccccataaaacagcaccaaatagcatggttccagaaccaaaaaaggtatttttactcatgctcactaaaccacaagagatgaccattatttcaatctaaagcggccgcagctaaaaactacagatttgactagaatatgattattttcaatgattaatctacattagccttccacaataatgacctcattcaataaagtttcaaatcaatgaaatcatatcaaacttagtcttatttgtcagacataacatacaaagcagcatctctgctgagagattgagatataagtttaatttctacactcaccttgctc

SEQ ID NO: 182775 - DNA, 372 bp, Glycine max
  unsure (1)..(372): unsure at all n locations
ccggagaacgccttaccttatgacctgaagtggtacaacaaaccaccgagaaggtcaagttggtccaaaaacagatgaggactgctcagagtaagaaaaaaagttatcatgataagaggaggaaagatatggaattcaaggttggtgatcatgtattcttgagagtcactccgtggactggggttggtcgaaaattgaaatcccaaaagctcacacctcgctttatcggtcctttccaaattcttaagagaagtggccatgtgtcataccaaatngcattacccccgtctctttctaatcttcacaatgtctttcatgtgtcttaacttcgtacgtatatccatgatccattccatgtgattgaatggatga

SEQ ID NO: 182776 - DNA, 439 bp, Glycine max
taaggatggaatacttactctttggtgatgaataatttctcttaacggaatcgaacaatgcgaaaagtagagatcctatggctgcaaactcgtaaattccgtgggtattgtttttgaatggcgggaagagaagtttttgaatgcaaaaacgtccccttttcttcgttttttatattttggtgcatgggttgctcgcccaggcgagctcagctcacccaagcgagctaacctgcactttatttttttgaggggaacattaaccatgtaccctccttgcttatggcgtagcgttttgcctatttgagcctacttaagttagaattaagcgctaattacttctaaacacatcccatcagtaaagatactgcacatgccaatgatactgtgctgtcttgcgaggaccatctctgctagttagcgcagagaaagtgcaccatcg

SEQ ID NO: 182777 - DNA, 459 bp, Glycine max
  unsure (1)..(459): unsure at all n locations
agcttataagaacaaaattgccttaatcattttctaatatgcatgtgaattaggacgcatcaacaagaatcaagccaaggctattgtgcaagcaatcaatggggcaaaacacaccaaatgattataatgatggatggctcaaattctcacaaaggtaaaatcatcactttcaaattgagctttcaaaactatcatgacatgtaaagaagaatcaaggatttcaagtcacaaaatgtcaagaacttttattttcaaaacaattacccatttcttgaacatatcctataattcaaagaaaaacatgcaaagtcgtacgtgcacacgaaattgacccataatattaaactgaaaatccgacgaaactaacaatattaacaaattaacacaactaacaaattaacanaacctacaaaactagcaaaaccaaagaacactcccnccccatacttaaacaacaca

SEQ ID NO: 182778 - DNA, 465 bp, Glycine max
  unsure (1)..(465): unsure at all n locations
ngacaatgccatgctagatttaggagcctctgttagtgttattcctctgtcgatctttaattctctatctctaggtcccttgtagtcaactgatgtggtaattcatttatctaatagaagtgttgcctatcctgttggtttcatagaagatgtcttagttagagttggtgaactgattttccctgttgattnttatatcttgaatatggaagatggattttctcaaggatcagttcccatcattctaggcagaccctctatgaaaactgctagaactaagatagatgtttatgcaggcacactgtccatggagtttggtgatataactgttcattttaatattctggatgctatgaaatacccatctgaagatctttctgcatttcgtgctgaaataattgaccatgttgttgatgaatacatgactgatctttttctaatcttcatgcctctcactcttcatgc

SEQ ID NO: 182779 - DNA, 412 bp, Glycine max
  unsure (1)..(412): unsure at all n locations
acgctttcgattcattctatgcacctgtatttgtccacattgngnttcgngcatttttattctcattttagttactttttataccccctgttgacatgcttaagccattctacttaagtcggttctctcttaacctaaaaataaaataaacttccaccgaacgcttgaattgattatccactaactttggtttaaataaaatcccaaccgttctggctagcttaaaccaccttggaaatccaaaagcgtttaaatatatttaatatcaaacagctttttttattaaagaaagcggataaacaacgcgccgttctttgtgggtttcttttttaacctcgtcttttatcctggagattttggtaaaatcctcccttgctcgtccccaaaaaggcgtgagattccttttttattt

SEQ ID NO: 182780 - DNA, 375 bp, Glycine max
cggaactatgaaactcagcttaccagactcggctcccggtaaggtgcctttttttttcttttatcagattctgggccaccccctgatattggaggagggccaactgtgcaagcacaaccagagagggaggctatctcacagctactatgcatactggggcaagttttcacccgtgccgctgcaaagagacgagtgcggatcatgcgcaccaacatgaccactcttacacagatataaatgacgttgttacttagcaacattctgcccagtgatcgtaatgctgatcctcccctgcggaagtatcagatggtctgtgccgtcccgacataagtaggtatgcattatttccaactaaattctaatgccatctactat

SEQ ID NO: 182781 - DNA, 308 bp, Glycine max
  unsure (1)..(308): unsure at all n locations
ggacttgtaggaattgaattgagcaagattggatgaggggaagtgtgantttcgaaatctgcacttatgcagaattttgctgtcaaaataagtgcagcagaattttagcttggtgcanaaaatgcttgtgtgtggttggctggggaaagagtactacacaatgagttctggatgtttgctagtcgatcccaacggtcacaatgtaggcttatgcactataaacttccagtaaaattttggagtcgatccaacggttaacgaattggatcgaagggaattgtactggggtctctaagtgagaaaagctg

SEQ ID NO: 182782 - DNA, 447 bp, Glycine max
ttcttgagaaaacttccttgagaagcttctgtgagataactttcttgagaagctagagcttagctacacacacccctctcataactaagctcacctccttgagaaacttccttaagaagattcctaaagaagctagagcttagctacacatacctctctaataggtaagctcacctccttgagataagaagctagagcttaactatacacaccctataatagctaagctcaccctcctgacaaaaaacatgaaaatacaaaaaataagtccttactacaaagactactcaaaatgccccgaaatacaaggctgaaaccctatactactagaatggcccatatacaaggcccagacgaagcagaaacctattctaatatttacatagataagggagctcatacttagcccatgggctcgaaatctacactaagggtcatgagaaccct

SEQ ID NO: 182783 - DNA, 433 bp, Glycine max
ttaagtcacctgcggcatgcaagcttaactgatctatgggtcgaatatgatttttgttttgataactcttctaattctttctttagacaataaatttgttcttttccagaaggctttaaaaatttctaaaagcacaattcaaactcccttcttttgatatatgcctttacaatttggtattagttctcaacctttaagggttaagcacttgatagtgtttggaggtaaagatcttgatggtaggtaacaacaacgattagttcattgttgagggagcatccttcacgatgctgatcattacaaatggagacatacctattcatagaccagaagtagaatggatagacatagaccttgttataatggagctaaacacaaaagctcattatactataacatgtccttcgtccatgaatgagtacaacaagatctg

SEQ ID NO: 182784 - DNA, 376 bp, Glycine max
  unsure (1)..(376): unsure at all n locations
tcacaatattgccactagcaacagagcattatttcatgttatcattattacagtagataaccaaaccctgtgcttaactttaaatgagccttactaacccatatataaatgcattgtcgcttttaaccaacaatgtaaactggaatgtaaaccagttttaccacagcctcatgaattaataactaaactacaaaatagaaatggatgatcccagctcagcattctaaactcaaaaatattccatacacataatgttcaaagcacaagcttcacaatattgtcactagcaacagagcattatttcagtagagcattatttcagtagataaccaaaccctatgcttaactntaaataagccttaaataacccataata

SEQ ID NO: 182785 - DNA, 353 bp, Glycine max
ttggattatagggttgaacccaactcatgcttttacaaaaagggtcatcaagtcaagttgaaatatggaagtaaccgtcttgcaaaattggggcaaaagatgaatcgagtcacaatactgcttcgtctactgccaaacatatttaggattattgatgtccttgttacttccagtttcaccttgacaaagatgtcatggaccatgttgaaaatctaaattgattcaaccccatatcttgcgtaaaaattcgcaatacttcaacgcacatcattcgcatgcattcatgctattgattggttgcattgctcgctgcattcttttcttcgaaaataaataaaatgaacttaatcatt

SEQ ID NO: 182786 - DNA, 324 bp, Glycine max
  unsure (1)..(324): unsure at all n locations
acaactcacgagaatcccagatcaatcaagaaccattccagagttcaagataagaatcaagaagaattccagactcaagaagaaagtctagagacaaggatcaagattcaaggttcaagatctcaagaatcaagatcaagattcaagactcangattcacgaatgaagagaagattcaatgaagatcacgattcacgaatgaagagaagactccctcacaataagtattaaaagggttttcaaaactttgaatagcacatgagtttttgacaaaaccttttaccacagagggtttactctctggtaatcgattaccagattggt

SEQ ID NO: 182787 - DNA, 366 bp, Glycine max
agctaccttgaagaatagtacattgcacggagcgtcaacagtctaattgtgtctatgacccaagggtgcgggggtgccgcgacaatgtaccctacgttgcggtggtgccgtgaacaacactcaacgcgaagataatggggccatgacaatgtacccttccttttgcggagctgacggtggtgtggcggagattgaactcaacaggagacgccgactaataagcacaataattttagacactgaggatgatgagtgttcaattagcgcacaagggggacatatatatatgagaccatgttaacgacagtgtatttctaaaaccctctttgacaagcaagattctctacaacaatggttataaataca

SEQ ID NO: 182788 - DNA, 419 bp, Glycine max
cccgcacatataatgttgagactagcacttggctaaaggaatttcccaatgaaagacaaatgggctaattgctatatgatagatgcttatagtataagaatgcaaagtactcaacttagagaaagtttcattgctagtgtgaaagattatgtcaaatcaagcttggatataatgcaaattctcaaacatttatagcgagctgtggatggcaagcaatacaatgaattagaggctgaatacactagccggaaaaaactccatcggcttaggataaacactcaccattattatagcaggttatgcaaccttacactccaaaaatattaaattcggttcaaaatgaatatgattggagttctgcagcttatcttattccgtcgcaatgagactcatatgtgaatacgtagttggcattcacg

SEQ ID NO: 182789 - DNA, 374 bp, Glycine max
tcatgggataatttcttcatttggttttgatgaaaaccccatggatcaatgcatataccataaggttactgggagtaaaatatgttttcttgttttatatgtagatgatatttcacttgaacccgatgatctgggtttgctacaagaagtgaaacaatttctctctaagaattttgactcgaaggatatgggtgatgcatcttatgtcatcagcattaagatccatagagatagacctcgaggtattgtgggtctatcatatgaaacctatatttacaaaattctatagagatttcggatgatagactattcaccaagtgttgctcccattgtgaaacgtgacgcttaatttgaaccaatgcaccacgaatgac

SEQ ID NO: 182790 - DNA, 277 bp, Glycine max
gggaggaaaaagtgcactgagtgttggtattgagaattgcttctgaaagacatttacccaaagtcactacaggcaaaagatttatgcccgtcggcatgggaccaaaaatcatgcatgtctaaggtgattatgacaaaatgattgcaaaatgctactgccccgtgcggttcacgctcaagtcatgccgaaatgcttgtgggcatcacagtatagcatcacaagatgtggttttccatatccaggttaaagatgttgcaggcactgtgccaaactaact

SEQ ID NO: 182791 - DNA, 254 bp, Glycine max
tcatgaattggctgcttcatggttgccatgtatacattgggtggctctattgcgtattttattatgtctccagatattttgttttggttcactttgttttgaaagattacttatcctccatttagttgaactttctcttaaatctattttcttacaagacaaataaatgtgaaacgtgtcgaagattatgtagcttggttgttgaaataatcacacttattgcaagcctagttatcaatcccacataattgtgt

SEQ ID NO: 182792 - DNA, 268 bp, Glycine max
accactaccctgtcttatgtgcttctccataaccatcagcaagctgagatgaacatgctaggaggtgtcatccaaccaccaccgcctattcgactacatatgcttcttgtacctatatgtgttcctactgctaaatgatcttgtccatctactcaatcattggcatctcagccaccaccacccactcaagaatgacaatatcatttgtttgttagaaccctatattgttcaatgacaaaatgacgaaaatgttaagaaaccttgacgt

SEQ ID NO: 182793 - DNA, 148 bp, Glycine max
actattgacattgtgttccttcagagatagcagaatgtttcttggcttcaccatggacttcgtcatatcaacaataagaggtttttcagctttaatcaatcgccccacatatggatgtccaactcatgacttgggcgattcatgaata

SEQ ID NO: 182794 - DNA, 438 bp, Glycine max
  unsure (1)..(438): unsure at all n locations
tttaattncatcacttctcaagcagaggactttgttttccaaaggggtacctctttttctttatttcggtgccacaagcagggatggttggatcagtaagtgagagattactaataagagctgaatttgagggatatggacaaggaaaaagaggaagaaatcggtagaaaaagaaaaacagtttgaaaaatttgaaggatttaaatgaaattatttgatggtgtgatatttatattttctaaaaacaattcataaaattcatcaaaatctattttagaaaaaaattattaaaatctggaacttttaaatactagaaaacttcttataagttataaaaaatcatattgaatatcaatgaatgttatgttactctttaaaaactcttaataattgtaattgaataccataaaacttatttttatcattctaaaatcttga

SEQ ID NO: 182795 - DNA, 472 bp, Glycine max
  unsure (1)..(472): unsure at all n locations
gatcaattctaccatttctagggtcaagataagcttggtagttataacctctgcactngaataattgggctgcgagtttgggctctgttttgtataattagtttaattaggtagattagatgggcctaatcaaggcccgtaccttccttctgagtagtcactttatatattagtataagttagttagttagttacttcattttgtacaaaagcaaaattaattacttgttgtgcaagctttatgatcaaactattttttctcgattgttcttcattcttcttcctctttttcacttttgtttttccattttcttggacaaaattttgtgccttttccattggtgatgatcatggaaggctaaacacttcatcaatccaaggatccactccaaccaacgctgaatctgagttctgggttagtatttctaatctttgtcaatgttcatctttctcttaatcctattctcgattt

SEQ ID NO: 182796 - DNA, 465 bp, Glycine max
  unsure (1)..(465): unsure at all n locations
ggatcttaaggactgagctgcagcttgggaatatatgtgaaatatttttataaatnttgcggagaccaggtatatcaaaataagacatgttagcgctaaataatttatatgaagcttcactgtctacaaggagttgaatgttgtactggttcaccaattatatcatgcgataatttgaacggtcaaaagctaagacactgcgactttatctatcttgagaagtttgtgaggaacataatgttgttggtgaaggacaaaagaagaccatcaagactttaatgttcattgagggttgtcctacacgtttgggttgcatggtatgccattaccagtaacttagaacttcgcttcttattattctaattttaatcttcaaactattanacagattttcatcttcgtgacactacaagttgttgtgttatgacatattattaaagccatgtcttgatattgacattctat

SEQ ID NO: 182797 - DNA, 471 bp, Glycine max
  unsure (1)..(471): unsure at all n locations
tgcacaacaagttntggataaaatgaaggtctagggtagntttttcttcaatgaaggncgatcattaactaactatctaacactaatatataaagtgttagtagctaaataactacctacctacctaactaactaactaactaaactaattacacaaaacaaaagcccaaacttgcagcccaattcttcaagtgcagaggttctgacttccaagctcaatttgaccttcgagatgacaaaattaaccaaagcttatttgtaaaaaaaattaaagatctttttcttatctttccagggactactcacacgttccatttggagttctttagtgtcttctaggcttgcacaaggcagataggtcaagtaagcacaaaatctaaaatttaactacaattctcaattaagctcaatcatttgccttagaccaaaaccgagttaaggtgagaaaataagggtcaaagagatttcaat

SEQ ID NO: 182798 - DNA, 440 bp, Glycine max
  unsure (1)..(440): unsure at all n locations
agctngnanaatggctagacatgatacatgttatggtgtggnttggntcaaggataaaagggatgccccacattatttccatgacacaaatgcaaaaatgatgatttggaaactttatgcaaaactggtcatgcatgcacctatgcggacactcaagtgtcaaatttttatggtcatgtgatgctagggctcacgattcatttcctctattttaatcaacccaatgtttccaaaatatgttcttttatcaatttgggcattcacccgagtccatttcgggcgtctgggaaaatcttcacagcattcacccttcaggtgtagacacattttccaaaattggttatgatcaatcgaaattttttttaaagaanaagtggaagtcatctcttttcaaaagcatgttggttgttagcttgacaactattttcttttctttttat

SEQ ID NO: 182799 - DNA, 455 bp, Glycine max
  unsure (1)..(455): unsure at all n locations
acttgtaaaaagaataaaaacatatgtattatttttgttgggtatgttagagtaggataaggtctgaaaacccctttcatagacaacttcccatgagggaatatggttcctcaccaactcaatgaatggtgctacaagtatagaaaaatatgggacaaaccttttgtagaagtttgttaagtcatggcaaccccagatttcccttatacttggtggagtgggccaattaggaatgacctttattctcttagggttcgtgggaaccccttgatctttatttaaaaaattaaggaaagtaatgcaataaagcgtacctttttctgtattttcatgttgattattcctacaaaaaaaatacgacaaacctaaggtgtccatatgagcacctaagtttgtattataacccaaaaataggaacanacctacctaatgagtccctatgtacatgaatcatg

SEQ ID NO: 182800 - DNA, 427 bp, Glycine max
  unsure (1)..(427): unsure at all n locations
gagtggcatttgcatagattattgcatcttaatctctatctatctatatgtacatcatgcatcatcatgtaaaggtaggaagattgtttctaaagttagaaaaatcttcagtgcataatactctctattntaatcgattaccacgttgttcgtaatcgattacaaaaattgcttgcagcttgtagagagattatagtttcgatttaatcaatcactagttatctataatcgattacatagttcagttgataccatgtctggtttttcatgagtctctgctttaattgataccaggtgagtggaatcaattactctgttcttaaaagtgttcncataagtcgtcgacggtcgcgtagtgcaccggatcgctcaagtagtataaaacagtgagtgaatactgagtatcgaactctcgagtctcacaaca

SEQ ID NO: 182801 - DNA, 365 bp, Glycine max
  unsure (1)..(365): unsure at all n locations
atgttcagaaactgctggttatctattaccatatatgtgtaatcgattacacagggcagaatttgaattcaaattntaatagctgttgtaaatcagttttggccactggtaatcaattacatcctctggtaattgattaccagagagtaaatttcttgtaaaagactttttaatttaattttcttggccaaaccttttgctacttcaattggaattcccttcttatttaatataccctttctaagactctatagactgtcttgatcatctatcttgaatatcntttaatgctttgtcttgaataaagctctgagacgcatgtgatcttttggcatcatcaaaacatcggcttgatcctttgtcta

SEQ ID NO: 182802 - DNA, 417 bp, Glycine max
tggaagaagagatacaaatgatcgagaaaaacaacacatatgagttagtaaatcgtccccatggaaaatatatcattggggtaaagtgggtctataagaaaaagctcaaccctgatggcaccatacagaaacacaaggcaaggctagtagctaagggttactcatagcaacctgaaattgactacaatgagacatttgcaccagtagctcatcttgataccataagagctctaatagatcttgtgtcacaaaaaggatggagtatccatcaactagatgtcaaatccgcttccttaacggcgtacttgaagaaagatctaagtggagcagccacaaggattcgtgtctgaaggcaaagaaagcataatgttaagactaagaaaagcactctacagtttgaagcaagcacctcgagca

SEQ ID NO: 182803 - DNA, 398 bp, Glycine max
gctatgtatgataaactcactaggcttgtttaacacaggtgtaggaggtcaacattcacttaggatcacaatttcagccagcaattcaatcaccagaactcaaattcaccatagacaaaatcataaggaaacctaaaagttcaagaaaaggttcacaatcaaagactctctatgaaattattcatgaacattttaaggactaattaacatgcgagatttgactcaactcagataataggctgaaaaaatttcatacactcatgaacaaatgagatagacaaagaaacaagataataagatttagcacagcataaggaatcttatgtgacacgtttcatgactagacatgacttctattagaaagatacaatgagtgaacatgtcactctagattttgg

SEQ ID NO: 182804 - DNA, 184 bp, Glycine max
cagcgctggaggcggccagggacaatggtctttcaaataaacctgctgtacatgaacaaacattatatcatgcgctgaccgtgccaaacgaaccagcgaagacatggcatcatggggatactcactatattcaatgtacctgaacaaaatgaatttcaaacacgtgaccgacacatattatgag

SEQ ID NO: 182805 - DNA, 458 bp, Glycine max
  unsure (1)..(458): unsure at all n locations
agcttcatgatgatgaatcagttgatncatgtttttttgttgatgacaaagatgatgaccaaaagctcaagagaatgatttccagattgagtcaacaagttcaagatcaagattaatttcaagtttcatgaaaagaaatcaagaagattcaagattcaagagaagtttgatttcaagattcaagagaagatgaattccagattcaagagaagaaatccagaagacttcacaagggaagtattgaaaagatttttcaaaaaacaaacatagcatagttttgtttttcaaaagagtttttctcaaaattttctaagttaccagagtttttactctctagaatcgattaccaatttcctgtaatcgattaccagtggcaaagtttgattcaaaagctttaactgaaatggaacgtccaattgattttaaatggtgaatcgatacaaatattgggatcgata

SEQ ID NO: 182806 - DNA, 481 bp, Glycine max
  unsure (1)..(481): unsure at all n locations
tctagaacaagtaggtgcactntacagttgttttgaagtgactgctgacataaccattctgaggaacctttgtgataagcatactataaaatcatcaaaatagtcattttgatgtttattgagaatatccatacttgatgatttcctttgatgaaatttatattgatcttttattctgaagtagcatagcttcatcactcttaacacttcttcacaacttcaagcattctgaagttgattacatcagaaagacttattgaaagtttacttgttggtgagttagtgttttgtccaaggtcagactaagtactattcttcagtcctttattttaatgcttctcattagtgcctctcatggacaacttcaatcattcaataatgttggatcttcttatgcagatagntcttactttctaatgtgcccaacgattatggctgtatgtggaaagtgaagaactattatactctagtcttctgatat

SEQ ID NO: 182807 - DNA, 473 bp, Glycine max
  unsure (1)..(473): unsure at all n locations
agctngagaaacacctattgacaaagcaacatattatttatcacgactaaaagcatgtggaagataaattccaacattgggtatggcctgtccttgagacttattgatggtaattgcaaaactaagtttaatatgaaattgcttcctaagaagaacaaaggaaagtctctacattctttgttgtcctgagtttaattctaggtgagaaagttctccttctagcacggtagcatgttaggattttaacgtctaacatattcataaaaaaatcaatggcgtagtagtcttgtcccattacacaggtgaaatttagggtctatgtttcgtaacaacattaaggtgtgccttctttaatctttataatatgagggggcaaatcacctaaagtaatggagtgcacatactattgctgatagaagtcgtgtgtattctcttcaacctcattaaacgataacaaaatatgctcttctcct

SEQ ID NO: 182808 - DNA, 498 bp, Glycine max
  unsure (1)..(498): unsure at all n locations
gacacaagaaactaagcttacgggttgattgccttanggttagtggggaccaagatgttatttattatcgtttgataatggggaagtacggaatggagacatagaggcaaacaaataatttgatacattgtgggccaaaaaaatttaaggtttgaggacttttctttgtggggtaatgcccgtattttgcaaccgtttctctttgagaaagttctcaattttgtgccaccatttttcataaataagagatgaggtacaaagaaacgagtgtgtcatgtgtgtgtttatatatgactccaaagcaaggagtaattcctaaattggttgcttaatcgtttctatggatagacaatgcttgaaagaatcagattcaatgatcaaccaaagagtggaaagattatatgtataaacaaatcgaagagcaagcggattggaatatttaaacagtgcaatttagaacagggatttgcacatatggcaatcattcttaacaccatc

SEQ ID NO: 182809 - DNA, 376 bp, Glycine max
  unsure (1)..(376): unsure at all n locations
acaggaaaaaggggaaaanactatgcgtttctttggtctttctatttgatctttttaaggtaaatgtttatgacccgttatgctagatgagtatgttataacactgattagtcatgggctctgagaaaaagagttaaaaactaagtattagagattattgtgattttctcaaagccctaggtttgctaaaattggagattttgtctaatcccttgttctattatttaaatgcttaggttctatggaaaatactgtggttgaccttcctaacagcggtagaagtcagtgatgcgttatttagatgagtagctaatatacttagcgattttcttaaagttcattatggagaaacaagtacactttcaaaaatatatgt

SEQ ID NO: 182810 - DNA, 442 bp, Glycine max
  unsure (1)..(442): unsure at all n locations
ggcacatactacagaggattgtgattgtcaaacgttgtgtattattatcttgngcatttccctatatttgatttgggtcaaatcactgcagacccatttgctatgcacataagctgcggggctcgtcaaaatgttcaaacaaaaccaacccacaccctatggcgtgaagaatttgggtttacaggagggatagctgccaatgcaactcgttcaagtttcattaccccaccactcaacactcttcgctatttccccttgtctgaaggtccacaaaattgctacaacattaacaaagtgccaaagggtcactactcaatcaggatcttctttggacttgttggtcggtctaaagataccagtgagcctttatttgacatttctatttgaggcacgcaaatatattctctgacacccggtgtgaacaagcagaatgatcaagtat

SEQ ID NO: 182811 - DNA, 447 bp, Glycine max
  unsure (1)..(447): unsure at all n locations
agatgcccgagtcattcatcccttttatatgttgnngaagnatnggcgatcagaattgccattccttggattatagggttgaaccaaactcatgcttttacaaaaaggttcatcaagtcaagttgaaatatggaagtaaccgtcttgcaaaattggggcaaaagatgaatcgagtcacatcactgcttcgtctactgccaaacatatttaggattattgatgtccttgttacttccagtttcaccttgacaaagatgtcatggaccatgttgaaaatctaaattgattcaaccccatatcttgcgtaaaaattcgcaatacttaactgtacatcattcgcatgcatccatgcttttcattggttgcattgctcgttgcattcttttcttgaagaaaaaataaaatgaacttaatcattgttatcaaaaagaaaaggacacgctttac

SEQ ID NO: 182812 - DNA, 130 bp, Glycine max
aaagctcctagatccatccaagaacaacttctgagaatccaagatcgatccagaaccattcaagagttctagagtagaatcaagaagaattccagacttcagaagaaagtcttgagacaaggatccagat

SEQ ID NO: 182813 - DNA, 384 bp, Glycine max
agcttccatcagatctcatctgagtcacttgttcatcagacattagctctgataatgtgataatcaacatgactctcaatcttgctgtctgcataaagtaatgaaatgaactctgcacaaattggagaaccaaaaacaagaatttgattaatatgatatgaaaccaaccaaagtaacaacttctaaaatttaaataaatggaaacataccctcacaagtatttgaagcccgacaactgccctttgcctgatgttttcattttggaaaactgcaagccgaaggagatggaaagtgacttgctttataaaacgatcatttttccttgccatcaaagtgccccatgtaaatcaaacacactgttaaatacaggagaaaatgcttttc

SEQ ID NO: 182814 - DNA, 454 bp, Glycine max
  unsure (1)..(454): unsure at all n locations
taacananagcatgcgaagggggtggaattcctagagcaattcccttatgttatcaaacataaaaagggaaaaggtaatattgtagccgatgctctttctcggcgtcatgcattactttctatgcttgaaacaaaattgattggtcttgaatgtttgaaaagcatgtatgaaaatgatgaaacttttggagaaatttttaaaaattgtgaaaaattttcagaaaatggtttctttagacatgaaggctttcttttcaaagaaaacaaattgtgtgtgcctaaatgttctactagaaatttgcttgtttgtgaagcacatgaaggaggtttaatggggcattntggggtccaaaagactctataaacattacaagaaccattttattggcctcatatgagaaaagatgtgcagaaattntgtgaacattgcattgtatgtaaaaaggcaaagtct

SEQ ID NO: 182815 - DNA, 476 bp, Glycine max
  unsure (1)..(476): unsure at all n locations
agcttcaggctgctcaattgctccaggttgttgtttggaagggcaaaggtctgtatggtggtcagcagaggagcacaaaccacaaacccttgcgacaggtacagatttctgattcaaggccagctgggttaccaagttaaccaatgcatccagtttgccttcaagcttcttagtttcagatgatgcagatgggtttgtagctacctcatgcactcctctaatgactatggcatcatttctggcgctaaactgctgggagttggaggccatcttttcaattaaatttctggcttcagcaggagtcatgtctccaagggctccaccactggcagatctatcatacttctctccatattactgagtccttcataaaaatattggagaagaagctgttctgaaatctgatggtggnggcaactggcacatagtttcttaaatctctcccagtactcatacaggctctctccactgagttg

SEQ ID NO: 182816 - DNA, 494 bp, Glycine max
ctattacggacctataaaactcagcttaagaaaggccaactcccttcaaaatgatttatgcttttatggtggctttgttcgtgctcgtgcgctcagcgtacttctgaaccgcttagcacgcattagtgaatttcggcttatcgcggcttttctcgctcagcggatggaccgaagcggtgcacttagtgggatggcccttcgctcaacgaataggcacaactcatccgtcttccagattcttcctcgtgcttagccgaggattgttgcgcttagcggatggctcgctaagccagtggattggcttagcgagagggtgaaaatcagcacttcaaaacttgcctaattatcctgaaattgagagaaaatgattattaaatacaccaaatagaagtactacatatttattacctatctttaacaaaaattaattacaacactacaaaataaccataaattggaggagtttgatacaatctacacaagttttatacata

SEQ ID NO: 182817 - DNA, 366 bp, Glycine max
cgatttcttcggtccgcgacaccattctgatccggagaaccaggcatatggttttgtgcaacaatcccatgttcttgaagaaattccacaaatgaacctggtgcttgcccatcctctgtgtatctaccataatactccccacctctatctgatctcacgatcttaatttgttttccacattgtttctcaacttcaccctcaacaactcttaaggcatctaaagcttccttcttaaaatgaagtaagttgacatacatatattgtgaataatcatctataaaggttatgtaagtttccgactttttgctctatgtctggacacatatgtctgttgtattgattctaataaataaaccctctttgacc

SEQ ID NO: 182818 - DNA, 406 bp, Glycine max
  unsure (1)..(406): unsure at all n locations
ccacccatcatatctgccggaaccccatacccacgaaatttaagagagaaagaagtccacccaaacctggattttcgaagtgcgactcgtagacacgcacttcacgaccccggaaatgctctcctttcacgatttggggcagaaatgagcaccaaaggttgaagctctgtgtggagcttcaatggagaatgaagaagaagataggcaacgtgagggagagggagagagagagagctgttctgacattgggctgagtgaagagagagagggttgctttttgggttgtaataaaaggggtttctctttgtctattattntatataagcgatgccacatgtctccatttgagtggagcaagaagggcccactttctcttttgactgtgancatactcagtcacaaagga

SEQ ID NO: 182819 - DNA, 300 bp, Glycine max
cctgttgctgccagcaaaagtatgcggtctatgtactgctgctgatcaccatacagaactctggacttctttgtcttaatagggagtccatgagcaaactgaagcctaagctggaaacattcatatgccaccccctctacagctaatccaacctcataatacatttgatctttcagcaccaaatacaatccaccctggaggagatcatccaaatgatgagatgggaaaatcctgcacaacaacctatttctccctccagaacgctgctcggacaaacgcgtgctatgtatctcctccaat

SEQ ID NO: 182820 - DNA, 425 bp, Glycine max
gatgatgaccaaaagctcaaaattcaagaacacttcatgataaccaagatgatgatcttcagaatcaaagaatgagttccagattaaagcaagaacacttcaaggtttaaaaggaaatttgatttcaagaatcaagaatcaagtttcaagattcaagtttcaagaatcaagatcaagattcaagaatcaagagaagactcaatcaagataagtattaaaaaaaaatttcaaaaactgagtagcacatgaatttttctcaaaaccttttaccaaagagtttttactcttggtaatcgattaccagattattgtaatcgattactagtagcaaaatggttttcaaaaagctttcaactgaatttacaacgttccaattgatttcaaaatgttgtaatcgattacaatgatttggtaatcgattatca

SEQ ID NO: 182821 - DNA, 118 bp, Glycine max
  unsure (1)..(118): unsure at all n locations
ctaagctttgatntagtagtttatgaggatagcaaatggtaatgtttttcttaactccacttactagtatggatgctgtttactcagatttgaaaacacgagtgagtggatatttcat

SEQ ID NO: 182822 - DNA, 478 bp, Glycine max
  unsure (1)..(478): unsure at all n locations
gcttcagaggtcatgaccgacagagtgaatggttttatagtgacggcaccanatcnactgagaacgggagagtgagagttcgtgtatagtctgtatacctgtaaacttcaagacagttttgacaaaattgtcattcttagcgtaaaatcaaagatggttttggaaaaattgttctggtaagcttcaaatcaaagacaatttttcagaaatcatcttcaagaagttggactttattaacaaaatgccgccattttttttctacatcagttattcaaaaaccgtcatagattcaacgatgtgaaaacaccattttttagttgagtatatatggccagaatatatgtaattgctaaaccaaccatccacccttcttttatcgttgcttctgtaagattcaaggaatgaactcttaaatntatattctaatatatcttatttataatgaaaaatagggaaaaacttattggtggagtataat

SEQ ID NO: 182823 - DNA, 482 bp, Glycine max
  unsure (1)..(482): unsure at all n locations
actcagcttacaaactactggccctgttccggtagattttatttttttactccattcatcattactatgatgaattcccatatttttttgtcattttttttacagggattgtcgaaattagcttggacaggcctcaagccaaaaatgctatatggaaagagatgctgcgaggcctgagtcatgcgtttgagttgattaatcagaaatcttacgctaatgttgctatgatcagtagttcagttcctggggtattatgtgctggggctgatttaaaggttaattgttaaattatgtatttttttaatctttaaaggaaagggggtcgggtgtttagtataatttgtgaactctatattgttctatggtgattgtgaatctgtgatcataaaccacacattntcaaagcatggctgttggacatagttngatgcactttctaatgggttcttgctggtagtcaagatagtgtggatttaatttac

SEQ ID NO: 182824 - DNA, 419 bp, Glycine max
  unsure (1)..(419): unsure at all n locations
taaactctagcttctcaaggaagttttcttaaagaagctcctcaaggaagttttcttaagaaagcttctcaaggaagttttcttaagaaagcttctcaaggaagttaactagtctataaatagaagcatgtgtaacacttgttgtaactttgatgaatgaaagtcttatgagatacacttcaaagttccacttctctccctcttatattccttcaattttgtgctccccccttctctctttcttttcctccattaaaacatcctcttcaagcttcttatccaaggcaatcttggaggcgaagctccttcttccttggcttattccctagtggatggtgcctcccctctcctcttctcctttgcctgtcgctgcatctgcatggtgaaaaatcaccatngaacgacctcatcgaagctca

SEQ ID NO: 182825 - DNA, 472 bp, Glycine max
  unsure (1)..(472): unsure at all n locations
acacaaaaactaagcttctggtgggacatcttgacttgctttccatctgcattcttctatattctgccttcttctatnttcagattgggaatgcctctaacagcacctttgtcaatgattntcttcatgcctcttaagtgcagatgtccaaatctttgatgccatattttgacttcatcttctttggagactaggcatgtggaggagtaactggtctcttgaggtgtccataagtaacagttgtcctttgatctgctgcccttcattaggacttcactcttctcatttgtcaccaagcattctgactttgtgaagtttacattgaatccttcatcacacaactgactgatgctgatcaagtttgcagtcagtcccttcaccagcagtactttgttcagactatgaagtccatcatggactagctntcccattctagtgatctttcctttagagccatcttcaaatgtcacat

SEQ ID NO: 182826 - DNA, 381 bp, Glycine max
gagatttaacttggaaggttatcctgcccatggatagtaaggatcgagccttgggcaaatggtccccaaattgggaaggaccgtctaaaataattcagatctattcgaatggtgcttatgaattagaggaattaacccctcacaaacgtactttgagtataaatggtaaatatttgaaaaaatataaaccaacattgctcgaagttaaaataagcatagaatagacagaagtaatggaaacatataaatggcgataacagtaaaactgccacgaaagggcatgtgtcaaatttcatcacgagtagaatcgaaatacagaattcgaaataaaaaactatacgttctactaatgcatgactaagtcctcatatagtttcttca

SEQ ID NO: 182827 - DNA, 464 bp, Glycine max
tcctactgtatcgtaaggggaatcacaccctacctcatatattttattgttgaaatgcatcttttcctagataccttactagaggtgctttattttcaggacttctactatttctattcttttgtcaacatatgctaaaattctgatgcacagtcaaccaccagaccctgaattacagaatcaaatatggacaatatttaagaagtgagattttacctctgcaatgttcaatttctattattatgaattttttctatggttttttatgatgtcataggttcttctaatccatttgctcatctttagatatgaaagctcaattgaagtcgaaatacagcaaagatctgttgaatattttgcattgagtacaaaaggtgcagctctaatggatatattggccgaaatgcctacattccctgaacgacaggttgtcttgcaatattgattcacagacaacttatttg

SEQ ID NO: 182828 - DNA, 431 bp, Glycine max
ttaagtcacctgaggcatgcaagcttctttcaatgaatatgaggatagacgtttttttattttattctagtttcgcacttgttggacccaaaccaatgtttgaagctaatgaaagggaaattgaagttgtagtactatctgaagccacgaatgaagataagataaaaaaattttaaaattatttatggaccaccaacatttgataatgtagaagaagtacaagttgggtcaaaacaaaggaaactattgtatacaactgaagaacctatcagactgatagatcttttttctaaactcaattgttgtctgatgaggcaagatcagtagcaagccattgagtggctactttcctcaaggtctttgcaccaccatcacctctaagagttgttcctattaagcctgatgtccatgttagatactaccctggctta

SEQ ID NO: 182829 - DNA, 467 bp, Glycine max
actcaagcttgtcgtgcccatcaccatttggcctagacccattccgggctcatttctatccctcaacataactcgggccaccatcaaggaggcactagataaacgtggttgcactggaggagcttcaacataagcattgttcacaatttctagcgcttgaaaagatgtttccaacaactcttctacagcttccacatagggtgtagaggatggacaactcactagtatatcttcttcccctgacactataaccagttgtccttccaccacaaacttcaatttcttctgcaacattgacgggaccaccccaacagaatggatccaacgccgacctaatatgaaactataggcgaggtttatgtccattacttggaaggttatttggcagcgtgtggcccaatttgaatagggagatcgatctcttctctcatgtcacaccggctaccatcaaaagcccttaccaccat

SEQ ID NO: 182830 - DNA, 331 bp, Glycine max
  unsure (1)..(331): unsure at all n locations
accacagagaggtacctggagatatgtcgcgggggtcacgagaccttggggacgtcaggtggggtgctattgcccaaaaccaagcttgaccaatcccgacccaacccgggcatagtcggtcagtgagaacctgtgatgtacctaaacaggcgagctcctgtcngtcaacagataataggatcaaagaccaccnagctcggaggcttgtggtggctggccacctgcgaattttgtgtgcaatatgggttgtggcctctggtaatccattaccaagggtggcaatcgattacaaggcttaaaaatgaacacaggacgctaatatggcctctgg

SEQ ID NO: 182831 - DNA, 176 bp, Glycine max
  unsure (1)..(176): unsure at all n locations
tattgctctccttaagaagcagtttatgtgtgtaacccactaactccgcttgatcttttgcctatgcctcatgcctctgttcttaagcgttatgaaggtccagcaacggcggactatgtgacaaagcttcgtgagagattcanagatcaaattgcgaggagaaattatagctatgc

SEQ ID NO: 182832 - DNA, 418 bp, Glycine max
cccccgccaaagaaaaaagaaaaggattgccccatcctttataccaaaagctttaccaaacaaatatatttacaactaattaaatcctgcaggtcagtctctcacaagtttctgactttaattatctcacacaacaattctgttgaagattataattataaaaacaaataatcactaatgaaacatacaaaaaggtaatggataatggatcacacagcctatgttgaaaaaaatacaaatggcgtgtgatgaataatggattaccagtcgtttcagtacactatttatcgtcaacctatgaaaaggaaattgtgtggaaatcaagtatgacagactgctcatatccaaccatttaacacgaacacagaccaaaaatattggaccatatagccagatatccacaatcatacaatattat

SEQ ID NO: 182833 - DNA, 479 bp, Glycine max
  unsure (1)..(479): unsure at all n locations
tgaatccgtcgctatcagntaagcctatgattggaattttatttattggacggtcaacgtacgttcagagaaaaattaatcttcagtgtctttagagttgaacgcaattaagttcaaatgtgttggagcggttgtccaccattcatcgatcggcacaaaaatgaaagaaaaaatgtaggaagaacgcttatatatatatatataccactgccacaacaatgaacgtgatcagagccacctcaacatggtgctttttttggcttgaggtttaatatattacaaaattaaagctcctgcatgttgactttttgagattggagaagctactaccaaagcacttgggattgtcacatgacccatacgtacccgagccacctatatagccacactgttctcgtacacgtcttaacatccatgcatctttgaattaatttaacttaacgcgccggagacaactaattagacaaacattattaata

SEQ ID NO: 182834 - DNA, 441 bp, Glycine max
  unsure (1)..(441): unsure at all n locations
agcttcttatccaaggctcatcttggttgttattctctcttctccatggcttattccttaatggatggcgcctcctctcacctcttctcctttgtcttccgctgcatctccatggtgaaaaatcaccattgaaggacctcattgaagctcaaagatccagcctccataaaagctccacaagcaagcttccatcaagtggtaatcagagcacaagagcttcaagtaggtgctccttaaacctccattaattttttttctttaccttctcttccattggtgnttcttcatttttctccatgtatctcctcacatgtcttgttctaaatgttgttacatgattctttagagtttccaccgattaaacttgctatagaagttagatttgattttctatggttcacatttcttgttcttggtcttgaaccatgaattgtgttgagt

SEQ ID NO: 182835 - DNA, 375 bp, Glycine max
cgagatgaggaagtgttgaagggtgaaacttcctgcttttattgttgaccacacactggcacctggagatatgtcgcgggggtcaagagaccttggtgacgttacgtggggtgctattgcccaaaaccaagcttgatcaatcctgacccaacccgggcataatctgtcagtgagaacctgtgatgttcctaatcatgcgagcctctggcagtcaaccgataaaaggataacaagaccactcaagctcgacgcttgtggtggctggtcagctgtgaatattgtgtaatatgtggtatgaggcctctggtaatccattactaacggggagtaatcgattactatgtttaaaattgaggacaggaggcctagatggtc

SEQ ID NO: 182836 - DNA, 288 bp, Glycine max
actcatacgcgattctcctcaaatttcagccaacccgcatcaattagactttgcaccttacgcttaaagggtcatacaatgctcaatggaatgccccggggctcctccatgataagcacacattgcgttcgagtagtattcttggaaaaatggaggctgaggaaacctaccaggggttatggctaccattgcagtattaagtaaataatggagcaagttagcataggacaccagaattgtggtgaattctactggctctctgctgcacaattccttccttggttgggc

SEQ ID NO: 182837 - DNA, 421 bp, Glycine max
  unsure (1)..(421): unsure at all n locations
tggatttgattggtctaacgagggctcgaggtgtagtaatttatgttttacatanaacacacgagcatgattgattatagaaatatatctatatgcatcaacttgtttgttagaaagacccaacatttctacctactgctctcacttttgcttaccttgcattttataatttttaacatacaggtttagtttaaattctgttggaaattatcaatcatacatgttctctcatcaatgcttcatttctgaacttaactcaagctaacattagttccctgtgttcgatactcacattcatccattttaattttttaatacttgacgacctgttgctcttttcggtaaacccccattgaaattctcttgaaacataattgagccaaaagtaactgcaatagggagtcaaccaaagtattatggc

SEQ ID NO: 182838 - DNA, 369 bp, Glycine max
  unsure (1)..(369): unsure at all n locations
ccggatcttaagtcacctgcggcatgcagcttaactactttttagagggggtgctttttatttgttntattgcaagagaagggtgtccaagtataatgagagtaaagacattcagagttcacaacacaaggaggatgaggaaatggctcacaaggaggatttaatgatctttctgggtggagaggaccttacaataggtcaatagcaaccacaaggagtccaattaggacatccatagtttcagaatatcattttttaagtttgttatatataaatttcactatcatagcttacccaaacagtgacaaagtagagacaaacattgactctatcataggttgggatttttttcaggactactattcttta

SEQ ID NO: 182839 - DNA, 486 bp, Glycine max
  unsure (1)..(486): unsure at all n locations
ctggcaagtgattgtcttcaaatgtgttcaaactcagcaactgtattctactntgcacattgccacacaattcctttaagttccttgcttttctattgcttaataaaatttttccaaagatgcaaggcataaaatctatgaggtgcaccaggcatgacttcttgcaaagctggaataagtccctgaaaaaataaagtagtccataacttatgtcattaactgcaattaaatccctaacttatgataataattgcaaatcatttcatgtcataccttttgcatgtctgacatgaaattccacccattctgtacataatccccaagatctttatgcaacaaagttaaaaaacatttccaattntctttgttctccacgtctaccacaacataagcaataacaacgatgtggttattagcatcaaccccaacagtaaagagcaagtttcctccaaatgcactntntatgaaacatccatctagacctat

SEQ ID NO: 182840 - DNA, 417 bp, Glycine max
cttacctctattctaaaaataaataaaacttacaacgattgaaggacttttcaaagataattacctaaaccaaaatacaaaagcataatgaaactaaacgagtctataaaaacaggctaaatgaaaatggtaaattagtaataaataaacatagtttagtctctcaagagtcaagactatagtcaataatatggtataaactttactaaaaaaattgcacctagctaggttagaagttactccctccaaacctaaaaaaaaatctaaacctaaatataaataaatattaataactcttatcttatttaatgttagtatttctattatatccttcatttaatacaaatttatttccggtgaatcagctctatattggattcccaaaagtcttgcagatgaaccacttgttctaatttc

SEQ ID NO: 182841 - DNA, 419 bp, Glycine max
  unsure (1)..(419): unsure at all n locations
aaaactcactacacaatactactttactcattttgataattatgtcgaatagngntgcagacttgcagcgtgctcctgggcgtggaggaagtggcggcgctcgccgatgttgtagcatcgccggggtcgcagcctctcacgtgtgcagagcagcaacgcgctacggttttcagaatttccacggcttcagtgtagcggcgcaaaaatccggtccagatcccgtgccgctccgccgtgatagcggtcatgccaaccgcgacgttgaaccgcgccgctacgtccatgcctgtcgcggatgggggccgcgccgctttgctcttgcgcgatagcggccgcgacgcccacgattgaaaacatagaactcaaattattctatttgctgataattcatagaataaactaatcatgatactgacatt

SEQ ID NO: 182842 - DNA, 468 bp, Glycine max
  unsure (1)..(468): unsure at all n locations
agctntaaatatgtagtaagagtattttttttatgttgatataaataatctaatttatgtcacttcaatcttattaaacaactattaaacaattcttattgtagacattctaacacgtctgccattaatctatatttattgttttcatttgtcataaaagatacttatttctattaaaagtaattttaaagagaaaaataaattgtcaaacacttaagtttatgaaacaaattaggcttaatttaatttaacgaatttccacctctaattacaaattcaaattcttagatgaaaagtagctcactatcccctctacgaattaatcaatacttgacccctatgctattgaatcagagctaaaatgggttacactctctttgatcctattaatcacgcgtgcagtgataaaaaatagaaataaaagcatggtgaacacaagtacctaaatttaatctcacataatatatg

SEQ ID NO: 182843 - DNA, 462 bp, Glycine max
tggtagaatgagtctcgtattggttcaatcgattattgatatctcgtaatcgattatactgttgtttgagacaatgactaatttattcaggattatttattttaattgattaccaagtagattaatcgattacttctctctcgtttaagtgttcagagatgaacaagaacactttaattgattacttaggtcatctaatcaattacattgttcttgagttgtttttcagatgttggatgaacactttaatcgattactttgctaaaataatcaattaccttatagatttaatcaattacagacgattataactattttctctataaataaccagcttgtgttcacatctacacatcaagagatcaatagagaatactcaatagatctcgaaaataacatcttagcctcagaataagcaagaattcgtgttgtcattagtgaataagagaagagaagaaaata

SEQ ID NO: 182844 - DNA, 150 bp, Glycine max
aatacacaacatgttgattttttcttttcgaaccattctcctaatcgcaacccactttacccgcctccctaaaccttttacgttgtaggaaataatattcatgggttttgtattcttgcacccaatctctctatctccttcaaatccctt

SEQ ID NO: 182845 - DNA, 450 bp, Glycine max
  unsure (1)..(450): unsure at all n locations
tatcgtaatcgattacaaaatttgtttgaagctcgcagagttatgtctcgtatcggtttaatcaattacaaccttatcataattgattatgtcgcaacctacccttcagcgggaaggtgaggcgtgactcaagggtgagtcttcctaaaaagaaaatgcgcgggagtcgccaccaacgtttattcaaggaaaatgttagaaaaaccaaaatggggtctatgaattttaagaataagggttcgggagttgtttacgtgcggcgaaggtattagcaccccacgcatctgtcacaagggacagcagcctttaattgagtgcgaaaaatcatgagttcaatgtttaatttattntccctttttatgtttttttacattttgggtcgacaagagcatgnaccttgctcctacgtatcctcaagtgcgatgaggaactcagacctatgtagttctt

SEQ ID NO: 182846 - DNA, 433 bp, Glycine max
  unsure (1)..(433): unsure at all n locations
attctaaaactaaactttgtagatggatctatacaattcacctagcacttgtaaaaagtccagggggctgaaataggatgattatataatgcccaatcttgaaaatattgttgtatgatcgtgctaatcctaattgtattgagaatattgctacatgattgcgctgatcttaattgaatctatttgcattaattctgatagcatgtattaattcttattgtattntaattgtattgtgaatcttgatctcttgaatatcgggatcacttatttttaggatagatagttgtccacatatgttaggaaaaactataagacaaatcttacttaggtggttggatgaccttgtatatatatctatcaatcgtttttaatagacgcagaacaacacggaggaggcgaatcncagctaatgagaatgatactcgagatg

SEQ ID NO: 182847 - DNA, 394 bp, Glycine max
ctaagcttgtgggttaaagtctcacgattgtcacgtgctcatgcatatttgttatctcgggctatacgagacatcttgcccaacaaattcaggttcagcataactcgcctgtgctttttcttccatgctatatgtagcaaagtgattgatccactaatgtttgatgagttggaaaatgaggccgcaattatactgtgccagttggagatgtattttccccttgctttctttgacatcatgattcacttgattgtgcatctggtccgagaaatcaaatgctgtggtcctgtttatctaccgtggatgtacccggttgagcgatacatgaagatcttaatacggtataccaagaatctatatctgtcagaagcatatattgttgagaggtacattg

SEQ ID NO: 182848 - DNA, 452 bp, Glycine max
  unsure (1)..(452): unsure at all n locations
agcttatntcattgtggcagccattgagctttttatctttgctcgctaagcccccatacttagtgaattttctaaatttcatggtgccgctaagcgcaaccctgctgagcttagtgcacatctattgcggcaattattaggcttagcgggcagatgccagctaagccgattatgcagaagcagaattttttgtaacatccgcttagcggttatgtttattttatgaaggcaagctaagcggaccatgtctcgctaagccgctaatgccttttatcagtttttgaatttgaataacttgtgtcttgattaactatttggttcctttatttgcaatggcctctaggaaacacaagagtatcgtttcaagacccacaacttaatatgatacaaggagaattcactctttagatgcatggaaccggtacgtggataatgtatngnggagaaacatc

SEQ ID NO: 182849 - DNA, 488 bp, Glycine max
tctttggagaaacttccttgagaagctagagcttagctacacacacccttctcataactaagatcacctccttgagaagcttccttaagaagattcctaaagaagctagagattagctacacatacttttctaatagctaagctcatctccttgagatgaaaagctagagcttagctacacaccccctataatagctaagctcacccccatgacaaaaaaaaaacatgaaaatacaaaaaaaatagtccttactacaaagactactcaaaatgccccgaaatacaaggctaaaaccctatactactagaatggccaaaatacaaggcacaaacgaaggaaaaacctattctaatatttacaaagataagcgggctcatacttagcccatggactcaaaatataccctaaggctcatgagaaccctagggccttcccttggatctctagcccaatctacttggagtcttctacccaatgcccttgcggg

SEQ ID NO: 182850 - DNA, 478 bp, Glycine max
  unsure (1)..(478): unsure at all n locations
agcttacatggagcttcatcaagttataagtatcttaaatttataaataaacaaatgttatcttattttgcttaatggatttcacttgactatgtttattaggtgtaggctatgttattagaagaaattttatagcatccttcattttatgaccttttctatggtgttaagcctattctttctgactttccattgattgaacatgaatgacttggtcaacaattgaatcctaagactaaaaatttaaattcataaggaaaattatcactatagagtcctgaatgaccagttcacaactctattcagagtcatttctttctgatcactcataactctaaactatnttgctctttcaaaaagaaaaatataccagccatcattttaggtcgtcacatgaaaaataataaaatgcggtcaataaactctnttcaataaagttggttaacactctcttttcaaataacaagaataaacataa

SEQ ID NO: 182851 - DNA, 468 bp, Glycine max
  unsure (1)..(468): unsure at all n locations
ngcaatcatcatatatataattgtctacttttgtcaacagttcatataatcaaattcaagcacacattgtttcacaacttagtgagaagctagatgaatacaacgtgcaagcaaaaagtttcaggatggcataatgtcaggttgaaattgattgctaaccgtgaaaaagatggtcgtacatataatgtacctactgttccagaagttgcagcactaattgtaggcaattttgatgcaaattcaaagagatattattattgaaacccagcatggacaattacaaaggatccatgaattacattctagttatctagctctacaataccctctcctattttcttacagggaagatggatatagacctgatatcctacatagtagtacaccacgtagcaagaaaaggaagagaaatcgtcttacaatgagggagtgatttgcttacaggctataatgcagatcaaatgaatc

SEQ ID NO: 182852 - DNA, 428 bp, Glycine max
  unsure (1)..(428): unsure at all n locations
tgcaagctgacgaatgtgagaaacatcttcttttaccttgttgattccngacttcatctcattgaagcgcatgtccacttgtaactccaaagtatcaaacctttcaccaacaaaggtttgaagaccatcgaacctatccaaaatcttttgaagaagagaggaatcttctccaccatgtaaatgtccttcttcatcaacgggtcgagcaccatttttcacccaagagccatcatgctctttttgataaccaaaggatccaatgacagcaaagcctattaaaaaggatctcttgatgggaacataaggttcagaatcaagagggatgttaaagtgttgaaggaaacggtgactacgtgtggatatggcaatggagcacttaattgcaatgccttatgcatgcgatatcgaactaagtatgcccaatcaat

SEQ ID NO: 182853 - DNA, 397 bp, Glycine max
gctccagcgttcgggggtgatttttcaaagacctttgccccacttgcccgacttgaaaccataaaaatggtgatgtctcttgctgcacaaaaagggtgggttatacatcaaatggatgtgaaatcaacctctctaagtggatacttggaggaagaaattattgttgagcaacctgaagggttcgttgttcaacgacaagaggagaaagtatatcgattaacgaaagctctgtatggtttaaaacaagcaccgccgtcatggtatagcaaaattgatgcacacttggtgaacttaggctttaaaaaaagattaagtgaatctactttatatgtgaagaagaatgatggtgacatgctcgtagtatctctatatgttgatgatctactcgtttcgagaa

SEQ ID NO: 182854 - DNA, 491 bp, Glycine max
  unsure (1)..(491): unsure at all n locations
gatcttaagtcaccgcggctgcagctgataaccctgcattgataggtttattaattatganaagacgggcacaaacacacaattaactaataatcagaatgatcaattccaatatagaagtgaaagcgatagaaaaataaaataactgaataacattgaagaactttattaaaaagaggaacgagagtacatggatatagttacctcactattcgagttctacggggtttaatcaaccatggtcataaaataactaaacaacatacaatattgccttagaaataaaagagatcggaaatccttatagatttggaccccaattgttctccgtgcaattctcctctcaaaactcttgtatgttgtaaaatgtataatgaatttcaaatccatgaaatacaaactccaactttctatttataaactcctaaagatagttattgtaattaggcacactagatacatatnttaatatgatctctaaagataattac

SEQ ID NO: 182855 - DNA, 471 bp, Glycine max
taagaatgggctcacaggtaggggtgagttgcgagatattatctctcgatataattcaacctgcccaaaaaccctcgaacctgcttctccgtgcgtagtttcggcatttcaaggatggccttcactttctcgggatctatctctatccctttctgacttacgataaatcctagcagcttccccgacttcaccccaaaggtgcacttggttgggttcagttttaattggtatttccgcaaccttccaaatagcttacgcagattgacaaggtgttcgtcctcagtccgagacttggcaatcatgtcatctacgtagacctctatttccttatgcatcatatcatggaacaacgccaccatggcacgctgataggttgccccagcatttttcagcccgaaggccatcactttatagcagaatgtctcccatatggtgacgaaagtggtcttctctacatcttcgggtgccatc

SEQ ID NO: 182856 - DNA, 427 bp, Glycine max
aagtctaaagaaaacttaagctttattttatacttatactaagttttcttatgttgcacaaaaatatgtacattgttgaatctacatccctggttttaattagagcaaaccatagtaatgcaaattataaggatgatgagttttagtaatgactaacattctgcttaagtgtttcaatgttaaatgttttaagaaataaatttgtccattcattttgaagtgctaggaaaggttgtcttataacaactctcacaagttgagaacttaaaaagatttcttgaagccatttgcataatgaagaatgctttccctctgagtacttgtgtttgttttttttgcagagtactaaataacaaggccttatatagaagacttattaaagactgcatgatgagcatcccatattagaatggatgtgtatcagtgt

SEQ ID NO: 182857 - DNA, 404 bp, Glycine max
  unsure (1)..(404): unsure at all n locations
tctacttatgtggcanggcgggctttcttcactttcttgtgtctactcgagctctgaccactggccttccttcctgcggtgcttcttttcatgtccgcttgagtgggcttatagcctaaaccatatttcccacgatttccttggggttttatcaagctagttatgccgccattgtctttgcctaaacccatcccgggttcataatcgttccccaacataactcgggccatcattaccgccgcatcggacagacaaggttgcccaaagagggagtccaccgaggaaatggtgaccacctcaaaagactggaaagcggtttctaacgattcttctgcggcttccacataatgcatggaggatgggcagcttaccaagatatctttctcgcctgatacgatgaccaa

SEQ ID NO: 182858 - DNA, 478 bp, Glycine max
  unsure (1)..(478): unsure at all n locations
agcttcttctaaaatataaatcaacttatgttcttactaactnttatagaaacttcttgctcatttaacttctctaaaatttaaggtgcataagttaattttaacttgtggggaaactcaaatcattatttagcttcttattttcttttcctatatggcttagggagaaaatttatcctaacatagcctgcctaaataattataaaactataacagataaaataaattcacacaactaggaactaaagtacatgtgaccgtggtgaaataaaatatattctgcatctgttttgaattttcataaaaatcttgattntgagtaacagaagaatgtcacactaaaggttcaaaacccaagttttggtatcaacttgattagtaccgcaagtcatgaataattcttttgttgctatntatatgttaggcaaagatgctaaacgaatgcttggtgtagatactnngtgtgtcagtgaaattt

SEQ ID NO: 182859 - DNA, 471 bp, Glycine max
  unsure (1)..(471): unsure at all n locations
acacataaaactcagcttgtggactntacatcatgccaaagggcacaagtcttcttttttactatacatcaagctctgcaattgctgcaggaaggcttcgaagctaggtgcagcttagagaggcaaaggatgagagttgcaagaaaggtagcacaggcggatgattgtttaattattattattatttgtaccaatttttattgtgttgacatttgtttagttgatggtgttttttatttacttatttttgtgttcctcgattgtttaaacaacatgcgcctagtagtagcaacaactcttcagttgatttataaaacaaactttcggataaccaacaactaaataaacaatgataatataaactttttttgaaaataaaataaacaaatagagtacgaatgtgataaagtaaaaatatgactacacatatctaacacacatcagagcaatgatcttatcaacaggtcttgc

SEQ ID NO: 182860 - DNA, 401 bp, Glycine max
  unsure (1)..(401): unsure at all n locations
ctcactgccacagattattaaggggtgttatgctcggtcgttcgttcgttctctctcttctgcgcagcgccnaagagaagagaatgagaaagagagacgctgcgagagacggggaaagaaataaaaacccttccctccaccacacccaatggcagggtccctaatttacccttctgctcaaatttaaaaaaaaaatagaagataaatttgtttttaaaaaaaacttttacgtaaaagcatatcatacaaacatatggaaaactgttaatttgattttaaaaaatattcttttaacaataaatgtaaataaatctacccatagatttgcttttacaaaaataacaaattacttatgttattaaagagaatattttgagagaataagtttaaacaaacacacc

SEQ ID NO: 182861 - DNA, 435 bp, Glycine max
ctaagctataagaacaaaatgcctcaacattgacaaaaacgcatgtgtattattacgccacaacaagaatcacgccaaggctattgtgcaagccatcaatggggcaaaacacaccaaatgaatatgatgatgggtggctcaaattctcacaaacgtgaaatcatcacttataaattgagctttcaaaactatcatgacatgttgagaagaatcaaggatttctagtcacaaaatgtcaaaaactattattttctaaacaattacccatttcttgaacatatcctataattcaaagaaaaacatgccaagtggttcgtgcacacaaaattgacccaaaatattaaactaagaattcgacgaaactaacaacatttacaaatttacacaacttacaaatttacaaaacccacaaaactagctaaaccaaagaacact

SEQ ID NO: 182862 - DNA, 437 bp, Glycine max
  unsure (1)..(437): unsure at all n locations
agcttgtggagaaggcgattgagaaggattatgatttttaaatttagaagaaagtgctgcacagaatctaacaggtccaagttctgatatgaaagttgaggttttcgatgttccatccacgaatactgatttggaagatgcaaaagcttttgaaaaaaatgatagatctgccagtcaagtaaatgacagtaggcctctgaagtatacattccaaaggaagcgaanaaaggaatccttgggaaacacagaccaaaacattgattctgagaagcgtatagtgaagaggaggttggaagacaaacaaaatggtgcattataacaccaaaatctagcatatagaggaaacttctacagataatcagcacctggatcaggttgctcatctggtctgtccaattcttatgcatacccataactcttctgattcatcttatgct

SEQ ID NO: 182863 - DNA, 488 bp, Glycine max
  unsure (1)..(488): unsure at all n locations
actaagctttacggcttgaaatatgttcctgaggggcggcttatcttttatgacatcatgtnctttatataaatatatagggcttccaccacagaaaattaaaattgacagaatcattgaaatagcagggatggcaaaacctatcacccatccaaaggtatcttggatgtaggacatgactgtaacacccaataggcttccactacagacaccaaaataccaccactggaagaatagagtttttttgttgcaacttttatcttctttgctacaaggcaattcttcctcctcaccaagttgatctgctccaaaggcttgcagagatgggttgtatccaccttggcctaatgaaattaagtaaagagacacggagaggaatgaagaagacattgatctgtctttgtgatgccatgaaccttctagtgctgttgttgcaatgccgcaagtccctaagaagagaacacacaatagattatagtcaacttatg

SEQ ID NO: 182864 - DNA, 319 bp, Glycine max
attataggttaaattatggttttttttcaaacaaaggagttgggatccagcattttaagaaattgcgctacaatcaactacgctggacacatcaaaccctactgacgtagctacgtatcatatatttatctccatgagaataggtgtgtcaaaaactattaaaagattaaactgcttgatgatggagtcggagggtacaaagataaattaccatctatgcttggactctaagtcaatttaaggagaaaatacttattctgcatctatgcttggactcttagttcaaaatacttaggcatgatattcttgcttcatacct

SEQ ID NO: 182865 - DNA, 328 bp, Glycine max
  unsure (1)..(328): unsure at all n locations
catatggtgatgcaccctcaatacttcattcttatccattgactcttttatggtcatttgcctcagcatctccatttttctccgattgaatgcattttctggattcttacaaaatttgtccattggtccttttttaatcccacactttgtctttgcacttgcagcaacattacaagagtctgcaaactcatcttcttcacttccatcacatccaattggttcaccaaattcaaaatctcttatatttgtcatattaccactgccagaagtacttgtagtggtcccacttttttntgtagccatatattccttcaactcttcgactaca

SEQ ID NO: 182866 - DNA, 431 bp, Glycine max
  unsure (1)..(431): unsure at all n locations
agctngnggtattcacaattngtaaacattttaagttatttgatgaanagttcaggaaacattntgcaattttgcagcagtcattttgttgcattttttgtgtgaaggaatatttgtattttttaactcttatttttctatacacttttcaaaaggggagattctgaatggccaaagctgcaagagaaaccacctattggatgatgtcaacctattcaagaagttaaaaataaacgaggacaagtcaggcaagttcggcatttctcacccttaattctacccttcacatttggctttgttttctttagttttctcattaactnttattgaatgtgtggtctcttgaccaaagatgaactttncaagccttctccctccccttcctaagaaaattcttttcttatctgtctgcatctgcctcaacattaaca

SEQ ID NO: 182867 - DNA, 436 bp, Glycine max
  unsure (1)..(436): unsure at all n locations
tatccttatggcctgcctccggacttcaccccccgtgcctttcttgaagatttaagccaagcccctacttttgaggggcaactcccaccttatgaagactatcccacgcaagacgatggggaaggagatacccatcttggccccctgctccacctcaaagatccatccccgcatgaactaccccagccgaacatagtccgccatatcccagcctcacccacacccgtaaaagaatatgttcccttcgcggaagataagggaaagattgaggcgcttgaagagaggttaagagcagtcgagggccttggcaattacccattctcggatttggcggatttatgtctcgtgcccaacatcgtcatccctcccaagttcaaagtaccagactttgataagtacaaagggacgacatgtccaaaagggcatctncggatgt

SEQ ID NO: 182868 - DNA, 367 bp, Glycine max
  unsure (1)..(367): unsure at all n locations
aactcactttatcagcaaccattttaatattagtggcccttgagatgtgcagatcagaaaggtaggcgatggcttggtctcttaggcacattagttcattcgatttgccaaaggataagctatcttctttggaaagattaagattaactggatgcactagtaagagtttggtaatgggcgtccataggtacaccttctgaaactctatatttgggggttccactttttgcagagggtcctctttgtgttttccaaatagatccttggagatgctgctntgagagatttcttgtcctttaacttttgaagacttgatggaagctcgctggtggaacttctatggaggctggatctttgagcttcaatg

SEQ ID NO: 182869 - DNA, 402 bp, Glycine max
  unsure (1)..(402): unsure at all n locations
actagctcgngaagaagagaaagattgagcaactttggtgagttttggagtttaaaaatgaacttatagaagaaacttactgtatggctcattggattaaggtgntggcttatcttaatcactcaattccgactcatgaatgatcctttctcagccatggaaaactggtatatcactacggaatgtggtgcgcttcacttttgaaaattttacttaaaaatgctaaaataagtgttcttactgttcaccaaaactaataaattctatcctaaatgccttgattattgtgctatctctctaggattacatgtaacaagagtgaacctcacacataggttactttcacacaaagctaaattaaactaccactcagtgtacaatgcacctttgttgtggatggaa

SEQ ID NO: 182870 - DNA, 410 bp, Glycine max
taggaacccgaacttgtagcttcaatgcaaagaaacatgcttatgtctatgaatccaaatttggttttagaattagaaaaacatgaaaattatgatttgcttgtgagaagttttgctcgaatctaggttgccccatgtttgatgctttacataaacgtaccgtggaaaacaccttgcaataatgtgtatacataggtaaatataaggagcatgaaattcctagcaatgtgtgaatgattgtcttcctaaatgaatgtatgatagtgcggaatgccttttgaatgcaaatatgtacatgatgtaattagctttccaatatgcatatcaataaataggagtgaaacagtacacaattgtatggcgtatttcaaatgtatgtaagtagtttgtgatagcaaatgcttatgata

SEQ ID NO: 182871 - DNA, 250 bp, Glycine max
tgaaaagcacaaatgtttggccctgacgattttgtttcaaaaccttattattctaaaaatttctatctggtcatccattaccacaggttgtaatcgatcaccattggccacaaagctctctggaaatgtgaacaaagcattttcatagttttcatagctgtcatcgattaccataactatgttatcattaccaccgcttgaaaacgattaataatgattttgtaagcgtgtaatcgattacacatcatat

SEQ ID NO: 182872 - DNA, 463 bp, Glycine max
  unsure (1)..(463): unsure at all n locations
tgtggatataattaagagccttagagaaactgcacacatttatatattttcagttntgagncgagaacacttcctcaagttgatgatatattaatgtgttttgtttagcaccttatagatatcacgtggttgaggaaatagacacgaccaactaacatgttagtattaaactgtgaatttcagttgtggttcagatactaaaaacgtatgtgagattgagaaacccccatcaactaggtcagctaatggctaactctatttgattctctttgcttgcatggtctttagtgggtccaagctcaaccaggtatcaaagcattcatgaatgcaccacacaccacaatatcttgtccaagctcccgcttttggttgtcatcattgcaggtgatcttaattgtgaactttgtttgtcctgagacaatattctacactctagctggccagctntacccgtacaatgatt

SEQ ID NO: 182873 - DNA, 301 bp, Glycine max
agcttcgaaaataaaatgggtttcaataattttttaataaattaacatgagaaaaataatgcaggttgttttatattagctaatttgattcattaagtacatttagtatatagttgtagctcgaataagattacctcgaaaacaaaaatagctaagttgattaatcattaagtacattgttgtttgagatgataaaagtgactaaatgatgcagtgagacaatgcaaggaggaacaccagtggaagaaacgggtgaggcttaaacagtccctagtggcaattctcttatcccaccatggat

SEQ ID NO: 182874 - DNA, 484 bp, Glycine max
  unsure (1)..(484): unsure at all n locations
actcaagctgccttcgtatctgctccttctacgtgcttgttttttttgctttgaacgctgtgggttcaccctcttccccgtgctgggttcatccaccttcactgccaagtcacaacgtaataataaataattgtgttaaaaattgcaaattgaattgcggaatgcaattgaagaggtaaaaagataagaactttgagacacccatcaatgaatcaatcgataaaccctggtgggtgttgcacaaccaaaccaaacacagagagagagagagagaaacctttgaaagaggtgttattagcagttaagagttcttcttcatcatcgtcgtcgaattcatcttgatgccctttcgcagacctagccatttgtttctccagatgaagagaagtgtaatgtaatctgtacaacctacctagttagtaccagtagtctgaggacacgacgtgttntaactgaatcgatacctaatctaaccaaattcttt

SEQ ID NO: 182875 - DNA, 410 bp, Glycine max
atctaacggaatctgcaggaaggatggtgtgacaccacaggaacgttggaagatgttaagacaaagatacaaatgaggcaagaaggagctttcaaaagggaaagagcaatggcttactctcttgctcacaaggtaacttatcatctgcttgcctgtgttgtcattgggtgaccgcttttgctgaacttaaaattaattttgaagttagacgaactttaactccaaattaatttaaaattaaattaaatatgtagacattgacttaaaatcatgtcaattgacattctaatggattctaaatcatatataatctgagttcaaacaggccacaacagagtacaataaactatgccactctttttcttcttctttagaaagatgtttaacattcttcgttatatgtatatata

SEQ ID NO: 182876 - DNA, 397 bp, Glycine max
aatgttaatagcttataaaatatattttaaaaataaagaactgaatttatatatatatatataatacattgaaattgataaaaatattcatatataaaaataataataacaatttatctctcttaatatcaattattttcggtatttctacatatttataaatctctatattttatttattattttttatacaacatttgtaaagtaactaaattaaaatacatattagcataattctaaaattattcgaaactttattatatgttacacgtgaatcttagcttactaaattttatttattggatttttcttgtatgcatgtaacatggtaagttgacttttatttattacaaactaaagtaagaattacaatcataaaagttatgttgcttataag

SEQ ID NO: 182877 - DNA, 464 bp, Glycine max
agcttctcaaagaagccacgaggaagcttcttgttgaagcctcttaatgaagcttctcaaggaagctacatgaagctgtctcggtaaaaatgctgcccatacttcgttaaccgttggatcttctcgaaggttggtttgcggcttcacaagacacttttccatgatctgaccgttgggatctttgagaagatgcctggaatatgcgtgacgtttccgttcctgagagcattgctcacttgtgcgttttgagccttgtagtccaagtagctaaggaaaaacgccattttcttctccttctttcttccaaaaccatttaatcaatcaattgaatattgatcctagggttcgtccctttcattttgtttaaaaccttctattattctgcacaacaaggaaacataaggctttgggatcgatcgtgcgccccattgaaggatggcaatggattgtcaccctttggtatg

SEQ ID NO: 182878 - DNA, 465 bp, Glycine max
taaataaacatcattatcctctcagactaacatgatcaattgttcgaatcttaaaaataagtaacaacataattccaatgatgaattgcaagtttattctcaaaaagtaataacaagtagtttgcgcaatgattacatggattcattatttatcaaagcaattatctcaccagtcgttcttggtttccttggtttgtacaacagggtaaggatttcatctggagaacacccaaaagttgcattcatcttaatcagacctttggtacttaattctaaatagatgaaaaacatttttcctacatcactgttgtgtttgagttccatacagtcgtatgcaacacaactattacttacatagattgattgacggtaaaaaaaatttattaaaattttgtaacctctgttggcataaaaaattgttttccttaaggcagcaagcgacatgtcctcacttattgtgatgac

SEQ ID NO: 182879 - DNA, 408 bp, Glycine max
  unsure (1)..(408): unsure at all n locations
tctctgcganagacacacacgaaatagatgtctcatgcctggcaaagggcatactctcttatgcaacacgaacatcctctcgctttctttagtaaggtcttctgcccacgattatagagagcctctatttacatccgagaattacatgcgatcaccaccgtggtccgcaagtggcgagaatacctgttacgccacttcttcatcattctaacggatcataagagcctaaaggatctcataggcaaggttatccagatgcctgaacaacaagtctacctatctaatctgttaggtacaactacacaatacaatacaaaactggaaaatccaatgtggttgctgacgcattgtccacaattcctcagtacaccagtgtgcagngactgttgctatccatgcctaacttcg

SEQ ID NO: 182880 - DNA, 451 bp, Glycine max
gtgatgacactccacagtaccacaatagacctatgactattttgcttgcggaatccaatgatctaacacaaaatgaagggaaaaaaaaaaagatattgctagttgtcacacctaataaacacatgctcttctataatcaaagtcacactaaagatcctaacagaatcctcaaattcacttaatttaagcaagggttacccgcaagacaagtttccaagatttagcgcgaacccaaaacaccaagaacctgtggaatcacgaaaaactgctgaactgctagtaagatgttgcagagccttataggacccatctacattagctttgatccatcccacctcaggaaagggtcactcaactgagatcatttgatagtggcccctggtaattgcccgtaatgtacaattagaatacaccttcaccaatgtgagaaaattgcaagaattgcaaatga

SEQ ID NO: 182881 - DNA, 328 bp, Glycine max
aaaaaacgcccctatacatcaggcgcttcgtacctaatatttacacatacttcaagtgatttgtacttacataccacatctccttggctaaaacaccacatgctactcaaagcatttggggcaccaaaaattgcacatggcacatcttgtattttaaacctaacataccaaacttatgatgaacttgatatctacacaaaaagagtacattcatgctctttaagtgttgctacctaaaccgatgcaattaagtatatttctttgtgactaaatgataaaagataattctttgatgatttcttacataacagaacaattattaattttg

SEQ ID NO: 182882 - DNA, 351 bp, Glycine max
atacaaaaagcttatctggtactggatctaaaaagaaattaatgttttaaaggacagatgaattataattgtagatgtgtccgtaaatatgaatacggaacgaaacccgctaaatgtaattttgattctctatctttaaatatcatttagtttttattcaaaaaatttttgatccttttaaaaattatattttattttttttttaataaaatatttatttcagttttaaacatattcttcttcattcaaaacagataaaaaaatttaatggggactttttattacctgacaactaatggtactattttttttaactatcactatcgcaattttggttttaaacataatttt

SEQ ID NO: 182883 - DNA, 477 bp, Glycine max
  unsure (1)..(477): unsure at all n locations
taagctattgattggtcattaactgaaccctgaactttaaggattatttcctattaccttgnnnagattctaggagagcatatggttcaagacaaatttactctaaatatgggggagaaaagttgaaaagaatgaaaagaaaaaggttaagcatcagcacacacaacaaataagttgtatgttaaaaaaaagaaaaaaataagttgtgctgttataataaggtcaaaagcaaattaagaaaagggaatagtgagaaggctatttgtacaaaacaagaaaagatcattgggattagtctaggacttgtgctctcttagaatctaaacctttgaatcctagaacaaccaatgaatatttgtagccaagcctcactacaagcctgagaaagntcttctgattatgtttatacatttctgacttgatggcatgagatgaaatgcacagattggatctcttgttagttgttatcaacgaata

SEQ ID NO: 182884 - DNA, 386 bp, Glycine max
  unsure (1)..(386): unsure at all n locations
agctntaggtacgcctgaaggtgcagaccatctttttaatccataggaaataatntgcaatcagctgctagtgttccaagaaatcctacaagcaaggcttgtgtttcaccaattgcttggccttggtcatcaaaattcacaatgatgcgtaactccctaggtaagctattgactcccctaactttcaccttaatcttcttgatcatttcttcagagtctttaacaataaaagaatttctcaatacgaaaatgtaatatacttcatatgatgataattacaaaaataaaaataaaatacaatacttgtatacctattgccttaacacgtcaacagtgtgtaactcacacccaacatgacgtctagttatttcatcttcttgtggatc

SEQ ID NO: 182885 - DNA, 431 bp, Glycine max
  unsure (1)..(431): unsure at all n locations
cataacaagacttttctaaattggtttaaagatataatctttggtgaccataatgcatctaaaacgttaagaaagttagcagatgggcctaaaagaaatgttataacttggtaaggatacgatatcaacaagtattcgttctaaacgaaatcacaagacaataagagtacaatgcaaaacagtggtgtaagtctaaggcctgaatctcaacactttgctactatacatgatgacaaacccgtgtagcttccatgccttactatggagtcattgaagaaatttgggaggttaattatgtaaaattcagtgtctatttcaagtgtaagtgggtagatagaaataccggtgtgtgaatagatgaattcgcatttactttggtaaatctaaagaagctcgcttatcanaatgagcctttcatcatgaaagaacaa

SEQ ID NO: 182886 - DNA, 476 bp, Glycine max
  unsure (1)..(476): unsure at all n locations
agctntanatgtgtcagaataccctaatattattcctttatccaccattgaatcaaactttgtgagttgatctatagtgttaaggataaaacacttacatccaaatggatgaaagtatgaaataatgtgtcttcttcctttccatagttcataaggagtcttttttatcattggtcttatcaatattttgttttgaacaaagcaagttgtgaaaagaatggtcctagccttttcttgcaaagttctatttttcctttcaactaccctattttcttgaggggttctcggttaagacaagttatgaaaaataccattcctttcacaaaaatggtttaacttagtattctcaaacttagttccatggtcacttctaataaaagaaagacaaaaaccttttntcatttgaaccctcttataaaatatctcanagaactcatgttatgtgcaaggaagtaaacccatgtatatcttgagta

SEQ ID NO: 182887 - DNA, 395 bp, Glycine max
  unsure (1)..(395): unsure at all n locations
ggctttctgtgctgttagagccaaggatttgccctttttgaatcattcatgttatttaatttcttgttcatgaacctttaaggtcccaattagctcttcaatggacatggagtccaggttcttcacaactcttaaggctgtcacttgtggtctctactttcttgataaacttcttagaattntgttaatgttatcataattattaaaagttttgttaagataacataattcatttaaaatattttggaagcgtccaaacatggcttgtatatcttcacctcttccatagtgaaaagttcatacatatgtgttaacaagctatgcttanttacgttttcctatgacaatccttcatacatcanagctaatgtgtcctacattntgtttgacttcta

SEQ ID NO: 182888 - DNA, 462 bp, Glycine max
  unsure (1)..(462): unsure at all n locations
ctgaagtctatataanaagctagaagatgttcatgttattgttttcttattacaagaaaacattctgagacaaaacgaacaagtactgtaacattgttagtccgttggatgaaagaaacttgagtgaattgagtgaatcttagctttgttgagttagagagtttcactgtatccgagcttactgtgtaaacacttcgtaggttttgatggttgtttgttgaatccataaaccaagttaaaaggaagggcaaaatagtcattttccaaagatttcaaacatccattcgcctaggctagcaaccagctcgcttgggctaatcaagtttttgcaaacataaattatcaactcgcctgagcgagtgagtgccttcaaagttaagcaacaaattcgtctgggcaaatatagctcgcttgggtgaatatgtctacacctcttggctcttttctataaatagtcatgtc

SEQ ID NO: 182889 - DNA, 182 bp, Glycine max
acaataagcaagaaagagaagagaaacatgcctcagtcatcacaggaacgaactctcggtacacacacccgcacacagaggagcaacttctcgcgccaacagtaaaattaaaacccgaccacgcagggaaccatcatgaacggccaacacaagacaaatcgctctgcgtgtcagcaagcagc

SEQ ID NO: 182890 - DNA, 475 bp, Glycine max
  unsure (1)..(475): unsure at all n locations
agcntttaatttcaatacagggaagcatgttttattcctaggaatctaagttttggttttgaatgtaaaaaggcatgaatattaggacatgtttgagaggttgttattagaatttaaatttggctgccccatgaggaatgccttgcacctaggtagcatggaaaatacctttcaacggtatgtatatatgtgaatatatatagcatggaaatgccttgcaaaatgttgaataaaatgccttgcagaaagttgaataaaatgccttgcaaaatatgaacatatatagcatgaaaatgccttgcataatatgaatatatatagcatgaagtgcctacaaagtgttggatgggtagcgtaaaagtgtctttcaaaatgtgtgtatttgtgagtaggtaacacaagacgcctctcacaaaatgtgtgtatatatatataggatgtagcatganaaggtttgtcaaaaatatgtcatgaa

SEQ ID NO: 182891 - DNA, 367 bp, Glycine max
  unsure (1)..(367): unsure at all n locations
acctatgaaactcagcttgtggctacctagtgcgaatatggacatacggtgtttatttttttctctcgacgncgccagagggtccgatgtttaattttcaacgtatcgatatattataagcctgacaaggacctccgtgcgaaaagatatgaccattagaatctctcgagagcttccgttgtgcaatttataacgtctctatatgtgaggcgccctaattggacgctcgcgtgaaaagttatgcacctttgatttctcaagagctctcgttggtaaatttagagcctctctatatattatacgccccgaatcgacattccggggaaaagttatgaacatttgaatgtctccagagcttccgatgttt

SEQ ID NO: 182892 - DNA, 200 bp, Glycine max
tcttttatccatctctgtcctaagagagtaattcactgattatctacttgttgaatcataattttcaaagatataattttctttcttatttcttttaacggctatatgattgatatacttaccgccttcttgactatatacaccttcgattgtctatgaaatctactgcaaaatgcaataattaactcgcgccccctttg

SEQ ID NO: 182893 - DNA, 440 bp, Glycine max
  unsure (1)..(440): unsure at all n locations
tcatttcccatcanataactacgtgatgtcttgacctcattaattatgctaagctaagacgacatctcattaagagaaacatgaacaacattgttcacacacgcatcatctacttctttcatgtgaatatcngtgatgttgctatttgggttgtaggggttgttgatatcactatcaaatcctccttcaccaccattggcattgtcatcatcattactttgaggagcatttgcatttccatttccatcttcagatttcttcctacaagagttcttattgttatgcatccacactctgaagacccctcttgagaccccaatgtcattgcaaaactcttggaccaacccgtcatcctctttttgattcttcaccccaatatctctgagaagctatgcatcttctccttctgctccttgctgaacttggtcctagacctcttc

SEQ ID NO: 182894 - DNA, 264 bp, Glycine max
ctcctgttcgaagaccaataattactaaccatggagagcctacatcatttactgctaaatgtaagtctacttgtgtcaacagaatctggtacgccgcaatacatactggaactgatatccgactcaacttgacttcattacttacaataagaagaataaaaccatggtcaaccactgcaagataatttggacccctaatgggttgatcatatatctgcaatacttccatcttgacatcttttgtttattgttctgcacattata

SEQ ID NO: 182895 - DNA, 111 bp, Glycine max
aaacccgcgggcacaggagaagaggttatgtgtatcaggaccagcgaaaagggggaacgacgccggaaaaggccgaagcgcgaaaaaaggaaacacgcagagcaaaagaaa

SEQ ID NO: 182896 - DNA, 225 bp, Glycine max
tttttttttggactcccaaaatcaaggttaacttccacccgtgctcatccaccgcttgatgtcatagcttatttaacacggaggtcttggaaattcaaatggtcttaacttttcccacagagcgtccattgaggcttataacatattgatacgctcgacattaaccactcgatactcttaagaaattccaatggtcataacttttcacacggatgtccgatctca

SEQ ID NO: 182897 - DNA, 423 bp, Glycine max
  unsure (1)..(423): unsure at all n locations
ctctcgacatatatgcgcccgaatcggacatgcgngtgaaaagttattaccattngaacttctcgagaggttccgatgtttaatttcgagcgtatccatatattataagcctgaataggacctccgtgtgaaaagttatgaccatttgaatttctcgagagcttcccgtgtgcaatttcgagcgtctctatatgtgatgcgccctaatctgacatccgagtgaaaagttatgaccatatgaatttctcaagagcttccgctgttcaatttcgagcgtctcgacatattatgtgctcgaatcggacatccgtgtgaaaagttatgaccatttgaatttctcgagagcttccgatgtttaatttcgagcgtctcgacatattatacgccctgatcggacatccgtgtgaagagtatgaccatttg

SEQ ID NO: 182898 - DNA, 374 bp, Glycine max
tattcgcaggccgcgaatgcaactgatacctctactttctctttggtacaacactttcctcgtgtgtattcatctggcatggaagagtcccgatcaatatctaaccttccatcaaaattgggtggggctaaagagcgaccaatgacgctaagccatcttaatctgttgactttgttctatacttgcgaaacttaattgatattataggatggcgcgtgaacttatttgcaaatataaaatttttctgctacgcatgggctcccattattggcccgggataatgccactgctgtagcaagcccgcgaaaacagtctggtgatctcttgacactctggaggtggtcttaccgcactcatcttgtctatagcgttct

SEQ ID NO: 182899 - DNA, 425 bp, Glycine max
catcaacgggtgagaagtatgcagttcaaaaatgaacttcacatgatctttgatccattattacaaacaaacatagtaaattcaacctaactgacaaaagtactaggtacattcatgcagaaacaatgaaaggataacacaactactcttaattaaaatacatataaaaaagctaaaatgcaaactgtgccctcattgcagctttactgaagcaacaaaactccaacacacatgcaagttccccatggaaattaagattcctgcaaatcatttaggacatatgaccatggttaattaagtaaacacattttcagcttacgtttgaatgatgtgtccttacttctgatttgaagtaaaattgccaagaaaaactttgtgctcatgcaagaagccacaaccactttatttaaggaattaacaaaagt

SEQ ID NO: 182900 - DNA, 227 bp, Glycine max
gagacaaacaccggatcccatccggaaccccacccaaacaccggaaaccaagcctcagcaaaccgagcaaaggaatcaacctcacatccacaaggtacagaatcacaatctaacaaagacagaaaaaaaagagcacacaggtccacaaaccatgacaaccactactgaacaaccaactgagaacaaacgctgatattccgaacgctaaccaaaaaaccttactacaa

SEQ ID NO: 182901 - DNA, 483 bp, Glycine max
  unsure (1)..(483): unsure at all n locations
agcttcctcggggccatttcctgcgagaactatatttataagtcaattttacaagataaagcttatcttaacgcaaaaaatgtcatgtcacacacatatatgcatttgaaaagaacatacattctcacgctcaaggcattgcgtcaaaattcacacctaattcatatcctaaacatttgccattacaaaatacttacatatatttgaaatatatatcatacaaatttttattgttccactcacatttatttacatgcatattggaaagctaattacatcctgcacatacttgcattcaaaaaggaattccatgctatcatacattcatttaggaagaaatcattcacactcggcaaggaatcccatgccccttatattttcacatatatctacgtaccattgaaaagcatntcccacgttacttangtgcaaagtatcaaacatggngcagcccaaattccaatataaactctcacaagcaag

SEQ ID NO: 182902 - DNA, 349 bp, Glycine max
aattagggcgggtgatggaactctcttcaatgcaagctttctgcaagacttacggaaagatcatagagttgaccttagcagaggtatccatagaagccattgcatcactcacccaatactacgaccagcctttgagatgcttcacattctgagacttccaattagtacccaccattgaagaatttgaggaaattctatgatgtcctctcgagggaagaaaaccatatctttcatccgggtgtctcccctctttgagcagaattgcaactgtggtcaacgattcatcaagaggtttggaccgcataaaatagactcggaacggcatagcgggcctaccacggaggtacct

SEQ ID NO: 182903 - DNA, 313 bp, Glycine max
  unsure (1)..(313): unsure at all n locations
agcttgtaatcgantacacatatactataatctttttctcatagcagattttcagaaaatattctcaacagtcacatctttttatgtggttcttgaatggctatcaaaggcctatatatatatgacttgagacatgaatttgctaagagagtttttcagaacaaaaaggtcttatcctcttataaagcaaaatcgtttgtatcctcttacaaattccttggccaaattacttgtgattcaataaggaattatttgagtgctcaaattgttcaatctatctctttcaagagagatttcttcttcttcattctga

SEQ ID NO: 182904 - DNA, 411 bp, Glycine max
  unsure (1)..(411): unsure at all n locations
taagctgaagaggaaggtgagggaaactccgcttttagttgatccacagnnggaccnggagatatgtcgcgggggtcacgagaccttgtggacgtcaggtggggtgctattgcccaaaaccaagcttgaccaatcccgacccaacccgggcatagtctgtcagtgagaacctgtgatgtatctaagcaggcgagctcctggcagtcaacagataaaaggaaaacaagaccacaaagcaaggaggcttgtggtggctggccagctgtgaattttgtgtaatatgtgagatatggcctctggtaatcgattaccaacggtgggtaatcgattacaaggctaaaaatgaagacaggaggctgagatggtctctggtaatcgattaccacggggtgtaatcgattaccacgcttg

SEQ ID NO: 182905 - DNA, 340 bp, Glycine max
  unsure (1)..(340): unsure at all n locations
aaacaacncaacgccagcaacctagggacaaaaaaaacaacttaacgactgagtggaactgaaaccggggcaaccaaaagtcacccccaacagccaacaagacagccaccatttgcgcccccaaaaagcggacgcctagggcgccaactgggcccttataacagcttgaacgaaacctaactaaagccctttgaatcgaataacccaaaacatattgttggtcagccaaccttacaaggatcgcgccactattgagacaaactaaacactctaaaaaatgagacaaagggcgcacctaagcctcccccatctgggccaagaaacaacacacaacctcgga

SEQ ID NO: 182906 - DNA, 420 bp, Glycine max
gcgactggtgcctctctttccttcgcagcttgagttcactattgctaccccatagagctccgcgaaatttattccggccatactcttccttgcgagccctcttggtctcttgttcaagggctcttgcagtaattgcattctcttcccgtaacccgacacactccttccgaatgtgtgtagcggccaactcgaacttctccttggcaagtttcgcctttcctaactcgcttttgagagcttggacttcttcgtcctcttccggcgcttcaaaactctcttcgctgacgacttttaacttggcgagccaatctaaacctcgtatatgaactttcagccattcgtggtacccaccaatgatgccattacgaatgccgctgagctcttgatctttacttaacacggtttcccatgccttatgga

SEQ ID NO: 182907 - DNA, 462 bp, Glycine max
  unsure (1)..(462): unsure at all n locations
ctgcagcttcgctttgatacaggttctatcctttcttcctatcctatnnnntttctttggaatttgtctaagttcgtatttttgtccttgttctgttatttgcgctcttgttcttgtttcttgcgtctttcacactttgtgtcaaaaaaaaaagttgcagaaattttgaaaaaaaaagtgggtgtttgatctttgaacacaaaattaaggcagttagattcttctctgaattctgagcgttttgatatatagtgggcctcaaacggacaaccatagcaaaagttatgagcatttgaagtttacttgtcatatctattatcttatgtgttatctatctaatatcttatttggtatcatatctgttacccaaattaaaggtaatctgttatccaaatccaatctaatatattatccaaatcaaatctagtctctatgcaaatcaaatcaatctgctatccaatc

SEQ ID NO: 182908 - DNA, 469 bp, Glycine max
  unsure (1)..(469): unsure at all n locations
aaaactcagcttgaggattatggggtacccatcacatgtggtactatgttgttgtctggcgatggtgcacaacaagtnttccacatccacaaagcgcgcataaacccaccatcccctgttgcccacctccaactgagctcacgtactcccacgtaacccatatactcttttctctcaacaccgggtccccatcaatcctcccaagctttcccaacatcaaagtaaaacgacattcaaacagcacaagctatcacagccaagcaaaacagagcaaaggcagaaaactctgccaaaacaccaaccaaatcacagcttttctcacttaaagactccaataacaattccttcgttccggttcattaaccgatggatcgactcgaaaattntactggaagtctttagtacataagcctacantttgaccgttgggatctactagcaaacatccagaactcattntacattactc

SEQ ID NO: 182909 - DNA, 475 bp, Glycine max
  unsure (1)..(475): unsure at all n locations
agctngaaggcaaattggatgcattggttatcttggtaacccagctggccttgaaccagaaatatgtacctgttgcaagggtctgtggtttgtgctcctctgctgaccaccatacagaccttttcccttccatgcagcaacctggagcaattaagcagcccgaagcttatgctgctaatatttacaatagacctcctcaacctcagcagcaaaatcaaccacagcagaacaattataacctctccagcaacagatacaaccctggatggaggaatcaccctaatctcagatggtctagccctcagcaacaacaacaacagcctgttccttcctccaaaatgctgctagcccaagcagaccatacattcctccaccaatccaacaacaacaacagcgccagaaacagccaacagttgagacccctccacaaccttccctcatagaaactgtgaggcaaatgactatgcagaacatg

SEQ ID NO: 182910 - DNA, 475 bp, Glycine max
  unsure (1)..(475): unsure at all n locations
tgcttgtggggcttctatggaggctggatctttgagcttattaaggtcctttaatggtgattttccaccatggagatgcagcggaagacaaaggagaagaggtgagaggaggcgccatccactatggaataagccatggaagaaggagcttcaccaccaagatgagccttggataagaagcttggaaggatggttcaatggaggaaaagaaagagggagagaaagagagaggggggagcacgaaattgaaggaataaaagagggagagaagtggaactttgaagtatgtctcacaagactctcattcatcaaagttacaacaagtattacacatgcttctatttatagactaggtagcttccttgagaagctntcttgagagaacttccttgagaagcttctttgagaaaacttccttgagaagctagagcttagctacacacacccctctcataactaagctcacctcctggag

SEQ ID NO: 182911 - DNA, 452 bp, Glycine max
  unsure (1)..(452): unsure at all n locations
gacttaagtcacctgcggcatgcagcttaaggcaattggtgcatgagttttcttggtaacccanctggccttgaaccagaaatatgtacctgtcgcaagggtctgtggcttgtgctcctctgctgaccaccatacaaaccttttcccttccatgcagcaacctggagcaattaagcagcccgaagcttatgctgctaatatttacaatagacctcctcatcctcagcagcaaaatcaaccacagcagaacaattattacctctccagccacagatacaaccctggatggaggaatcaccctaatctcagatggtctagcccttagcaacaacaacaacagtctgttccttcctccaaaatgctgctagcccaagcagaccatacattcctccaccaatccaacaacaacaacagcgccagaaacagccaacaggtgagacctctgcacaacc

SEQ ID NO: 182912 - DNA, 461 bp, Glycine max
  unsure (1)..(461): unsure at all n locations
tataaaactcagcttgcttggggcttcatggggctggtctatggcttttatttgttcttcaatggggattntccaccatggagatgcagcggaagacaaacgagaagaggtgagaggaggcgccatccactatggaataagccatggaagaaggagctttaccaccaatatgagccttggataagaagcttggaacgatggttcaatggaggaaaagaaagagggagagaaagagagaggggggagcaccaaattgaatgaataaaagacggagagaagtggaactttgaagtatgtctcacaagactctcattcattaaagttacaacaagtattacacatgcttctatttatagactangtcagcttcttgagaagctatcttgagagaactttctttgaaagcttctatgagaaaactttcttgagaagctagagcttagctacacacacccctctca

SEQ ID NO: 182913 - DNA, 430 bp, Glycine max
gtaaaaagttagataatcatgaaatatcagtaatttcttgcctccaatatcatataaagcatttagtataatatataacaatatatggtgacatatgagagttagaagcttacaaacatacgcttacaaggtcatttcatatatcacaaaattgaagataacattcaatggttcatcatcaaatgttgcatcatattaatatacacattttgaataggcaacacttgcctctcagtcaaaatgcattttcagcgattggatgttatcctctaaaaagttaagattgttcagacttagtagcacattcagcagcatgacaaaagacacaggagaaataatgcaccataggatcaataccaaactggaagagataacttctcagttttaaaggtgaacactattataattggattttgttagcaagataaaa

SEQ ID NO: 182914 - DNA, 422 bp, Glycine max
  unsure (1)..(422): unsure at all n locations
tgagatgangaagtgttgaagggtgaaacttctttcttttattgttgaccacagagtggtacctggagatatgtcgcgggggtcaagagaccttgtggacgtcaagtggggtgctattgcccaaaaccaagcttgaccaatcccgacccaacccgggcatagtcggtcagtgagaacctgtgatgtacctaagcaggcgagctcctggcagtcaacagataaaaggaacaaagaccacaaagcaaggaggcttgtggtggctggccagctgtgaaacttgattgatatgtgagatatggtctctggtaatcgattaccaagggtgggtaatcgattacaaggcttaaaagtgaagacaggaggctaagatggtctctggtaatcgattaccaagggggtgtatcgattaccaggcttgaaaa

SEQ ID NO: 182915 - DNA, 406 bp, Glycine max
attcctctttgatgctgcatatatatcagattttatttgatacatgtatccactcataattgggccactcatccaaaattgatgttacttgccacactaacagaattgtactgtgtcttcaggttcttttcattttaaatacaacattgcatgatcgtgctctttgaactacacttttagacttcaacttaagtaaatgaaaactacatattatgaaagttcaacacaatgcgatatttttttatgcagaacaacaaaatgcactatatcctagaagaatacgaaagaaagacagcgaggaaagaaataacagggtgccctacataaaaatggtatcagaattaagtcccatctgatgaaaaaataatgatgcaatatattacttacgatacgtgtctgatgaaag

SEQ ID NO: 182916 - DNA, 484 bp, Glycine max
  unsure (1)..(484): unsure at all n locations
actcaagctgtacaaatcttatttctgaagagattctctacggtcttactctctatttcaacttgcatatcctaacacccacccaacaaaaccattatcctaaaattattctaacttccatatccttagttaacaaaccattatcttgaaaaggtattgagtactattacagaaggaaatttgcatacatcatgctcataaaacaatttgctagaagatcaaagtatcataaaaaggcctacaacaacaaaaaagaaaccccatttctcaattttcagcaagttcaacttgaacataagtctgatagtgtaaatccaaatgcagactagctaccatagacactatataggaggtaagacgactgaaattcttatgtcataagttcgtataaccttacatagttaccccttttcatatcatgaagcgaacctagaacttgcttccctctataccccatgtgaccctanaacaatgcgatgcaaca

SEQ ID NO: 182917 - DNA, 429 bp, Glycine max
agcttcatgatgatgagtcaagttgattcttgatgttttgatgataaccaaagatgatgaccaaaagcccacgagaatgatttccagattgagtcaagaacaattcacgaatccagagaagttttatttcccgattcaagaaaagatgaattccagtttcacgagaagaaatcaagaagacttcacaagggaagtattgaaaagaattttcaaaaaacaaacatagcacatttttggttttcaaaagagttttcacaaaattttctaagttaccagagtttttactctctcataatcgattactagtggcgaattttgtttcaaaagcttaactgaattataaccttcaattaatttcgaattgggaattgttacagatatggaattgatccaggtgttgacgtgaaatcaattctttggaagagccat

SEQ ID NO: 182918 - DNA, 455 bp, Glycine max
cttggatgtcccgtttcctctataaaagaacgctcttccgtttgaatgaacgcataatattatcatctcctgtcccctctataatattatcatcttccctggtgttgtttcgcttgtgctggtggcgaaaaccttgtgctcccctgtccagtggtttttcaactggtaccttctaatattttttgcgttctgttgttaatattttaaattatttgtttttggtattataaatttgtatgctatatttattttacatatataagttaatattataaaagtattatttgtgttaatattatttgttctaggtattttaagtttgtatgctattatttgtataatatattttatttaatttaatttttgttaattgaataatatatcttgttattcacatatatatatatatatatatatatatatatatatatatatatatatatattctgttatta

SEQ ID NO: 182919 - DNA, 459 bp, Glycine max
  unsure (1)..(459): unsure at all n locations
tagatgtgatttatacatgatttatgacttgtaggatccaatttggtcaaaattggatgagggcaagagggatttcgaaatctgcccaatttgtgcagcaaaaagctgtcaaattttgtgcagcagaatttggctcttgtgcaaaaaatgtttgtgtattgctggttgtggaaagggtagtacatattgtgttctggacgtttactaccagatcccaacggtcaaaatgtagatttatgtactagggacctccagtaaaattttcgagtcgatccaacggttaacgaatcggaacgaagaacatgttactggggtatttagtagagaaagctgtggtattggaatgtgttntgggcagagttttctgcctctgccctgttctcttggttttggttagttcatgatgtttggattttgaactgctttggatgtgtggaagcttggaggggtngatgggga

SEQ ID NO: 182920 - DNA, 476 bp, Glycine max
tactcagcttctttgagaaacttccttgagaagctagagcttagctacacacacccttctaataactaagctcacctccttgagaagcttccttgaaaagattcctaaagaagctagagcttagctacacacacctctctaatagctaagctcacctccttgagatgagaagctagaacttagctacacaccctttataatagctaagctcacccccatgacaaaatacatgaaaatacaaaaaaaagttcctactacaaatactactcaaaatgcctcgaaatacaaggctaaaaccctatactattagaatggccaaaatacaaggcctaaacgaaggaaaaaaaacctattctaatatttacaaagataagcgggctcatacttagcccatgggctcaaaatctaccctaaggctcatgagaaccctagggctttcccttggatctctggcccaatctacttggagtcttcta

SEQ ID NO: 182921 - DNA, 321 bp, Glycine max
gaatgcgtctactaacaatggtatcattttattcttcgacattgaggtgccacttgagctgccacgtctctccacctttgggcgtattcttttgaaagattcatgccccctttttgcacatgttctgtaggtgcatcctatccgaaaacattatactgacactgcctaacaaaggaaaccactaagtcctttcaagaatggactcgggaaggttccaagtttgtgtaccaagtaacacctaccccactaagactttcttggaaggaatgtatcagcaatccctcatctttgagatgcccccatcttcgataatacatcttt

SEQ ID NO: 182922 - DNA, 457 bp, Glycine max
  unsure (1)..(457): unsure at all n locations
tgacatgaagaagtgttgaagggtggaacttcctgctattattgttgaccacacagtggtacctggagatatgtctcgggggtcaagagaccttgtggatgtcatgtggggtgctatatcccaaaaccaagcttgaccaatcccgacccagcccgggcatagtccgtcagagagaacctgggatgtacctaaacaggcgagttcctggcagtcaacagataaaaggaacaaagaccacaaagcaaggaggcttgtggtggctggccagctgtgaattttgtgtgatatatgggatgtggcctctggtaatcgattaccaacggtgggtaatcgattacaacgcttaaaaatgaagacaggaggctaagatggtctctggtaatcgattaccacggngcgtaatccattaccatgcttgaaaatgacgtcangaagccatgatggcttctggtaatcg

SEQ ID NO: 182923 - DNA, 388 bp, Glycine max
  unsure (1)..(388): unsure at all n locations
agctttgagcacaaatcctaactcaccatattctcttgttccagggngagaatgtcaatccttaccctctaaagccaaaacaagagaaggaaaatttccaatcaaagaaaaaaaagagaaggaaaatgtcctatcaaagagaaagcacaaaaaaaaagagagaaggaaaatttccaatcaaaggaaaaagagaggaaaggaaattcccaatcaaagagtgggagaaagcgaaaagaataaaatgaaaattcccaaccaaagagtgggagaaaataaaaggaaggaaagatagcttctgatcaaggatcgaaagaaatcacaagaaatgtgcataaaggtcttggaccggacaatatctgaacaataccgaattgtctcccaattaacc

SEQ ID NO: 182924 - DNA, 486 bp, Glycine max
  unsure (1)..(486): unsure at all n locations
agcttgactaggcgaggtgattctagccttaatttcactatagttattattcttttcaattaagaatgagaaatcccaaagagaaaacgtccgattgatttttcgctctattgtactaaaagggcattttttgattattattttacctcttttttgatttccaacgtggttacggcacgaccgaacggtcggaattcatttaaaccgaaattaacggatgatacgattcaaacgatcagtggaaatttattttatttttagattaggcgagaaatgacttaaataaatggcttaagcacgtcaaaagggggtattaaaagcgaatganaacaagaataataatacatgaaacataatgtggaccaccacgggtacatataatgaattgaaaagctcggttngaggtacttacccgctgaagactgaagaaaacgaagaacgaacgatgaatgttgaagaacggtcgagaatcttcgcgtaattact

SEQ ID NO: 182925 - DNA, 454 bp, Glycine max
  unsure (1)..(454): unsure at all n locations
agcttggtgcatatgatctatatgctctaactttanggggagngntgaatatccttgtagtttagccatttgtagtaacttagttggtagctttttcagagggcaacagtgcattgtcactgtcatagcctctctctctctcttctctccctatcttttgtactctatatatatgtactattttgaattcaataaagtaaggaaaaaggctcccttctggtctccttcaactattatcatcattagtacacaactagatgcttctcagtctaatgatttactgtcccataagttcattgatattatccttggaagtcacatcttatacggcctaaatttggaagttattctgtatgactgattctgtcaagtgtcatcaattgtgtcacttcggttaatgaaaatagagaatgacctatattattgtaaagaaaacctaacacattatggaatt

SEQ ID NO: 182926 - DNA, 403 bp, Glycine max
tagtgatataagtgtaagtgtatatggatctacaaatgcttgttcataacctcaccatgattagacaactatatatggatggtgcaagtgtgacaccctttatcctgacatacatataaatcagaaaaacatataagaatttagaatttaattaaatcaattttattcaaatcacttaagcaaattcatatggataaaagggtcacattcactatactgttacaaaataaaacttatcaaaaacatcttcggctcaaaacaaggtcgtccaaaactccaaagaatgaactaaagactcagcatatgaaatagaatgatacaaactacaagtccataacttcttgaattaacacagaaccctgtggctcaatgtcacgtcctatcagagcattggacttcagca

SEQ ID NO: 182927 - DNA, 372 bp, Glycine max
  unsure (1)..(372): unsure at all n locations
agcttttcgattctttctatgtacccgtggtggtccacattgngttntgggcattttccttctcgttttcatttactttccgtaccccttttgacgtgcttaagccattttatttaagtcatttctcgcttaacctaaaaataaaataaatttccaccgatcgtttgaattgtattatccgttaacttcggttaaaatgaattccgaccgttcggtcgtgtcgtaaccacattggaaatcaaaaaaagaagtaaaataataatatagtaataaaaaaataccttctagtaaaataaagcggaaaatcaatcggacgttttctctttgggattttcattcttaatcgacatgactaataactaaagtgaaact

SEQ ID NO: 182928 - DNA, 456 bp, Glycine max
  unsure (1)..(456): unsure at all n locations
tcatacatgattngntgggtgggattactgcccatatatgttagccttcatgtcaaattaagatttagcatttaatgaacaaagacaaacatatggcacctgaatgtagaattttgactaaagctgttcacttacagttacagatattagatttcacaaacataaacataattaatgattcgtctgcgtaatgattttttctggccttgaatgcataaaataggtccctacaatttatggattcaatgcaagcacaaaaacaaagtttttccctgcaaaatattctttttcacggagaaaaaagaaagggacaaggtgacaagaaggactactaagtcattaatcaacactcaagttgtcattaactaaaatcagctttataaaattctaggttatgtgaagccaggaacaacaattccttgtccagaaactaatgggtattaatttagttattta

SEQ ID NO: 182929 - DNA, 479 bp, Glycine max
tgccaacccatggaagcgcctaatatctcccacactttttgttgtgggccattcttggatggccttgattttctcacggtccacatagaccccatttgtaccaactacaaaccctaacaaaactatattatctacacacaaagtacacttctatatatatgcatagagggagttcttcctaatgactggaagaacttgcctgagatgtcctaaatgatcatctaggctcctactgtacactaaaatatcatcaaaataaacaactacgaaaatacctatgaaaacccttaagacatgatgcgtaagcctcataaacgcgcttggtgcattagtgagcccgatatgcatcactaaccattcatacaaaccaaacttggtcttgaaagcgagcatccactcatcaccctttttcatcctgatgtggtgatacccacttctaagaccaatttttgagaagatatttggaccatgccactcat

SEQ ID NO: 182930 - DNA, 457 bp, Glycine max
  unsure (1)..(457): unsure at all n locations
gcttacagaaataccaagacctagttagtgctatgtggaatataacagnttgaggaagaacatacctgttgaagtgtatgattttactgctgagatttaaacatagctttgactgaaggctcagtcttgaggtttcatggcagggaagagaagaacctcctgtcaccaaaaggacaaaaatagtaagaaactgtgaaaacaaagtaagcttgtcaccaaaatgacaaaagatagtaagaaatcgtgaaaagaaactgtgaaaacaaagtaagcttgtcaccaaaatgacaaaagatagtaagaaatcgtgaaaacaaagtaagcatgcagatgagaaagagcaaaaaccttaatattctgtgagtctgtcagtaacatggtcaaacgatcaattcccaaaccccaaccaccagtaggtggcaaaccatactctatagccgtacaaaatgtttcatcg

SEQ ID NO: 182931 - DNA, 424 bp, Glycine max
  unsure (1)..(424): unsure at all n locations
cacaacaagatttccacatccacaatgcgcgcataaacccaccatgcccggttgcccacctccaactgagctcacgtacttccacgtagcccatatgctcgtttctctcaacaccgggtgcccatcaatcctcccaagcttgcacaacatccaagcaaaacaacatgtaaacagcacaagctatcggaggcatccaaacagagcaaaggcagaaaactctgctcaacacatcaaccaaaatcacagcttttctcacttaaagaccacagtaacaattccttcgatccaattcgttaaccggtggatcgactccaanattgtactggaagtctatagtacataagcctacattatgaccgttgggatctactagcagacatccagaactcattcttgactagactttccacagccaaccacacac

SEQ ID NO: 182932 - DNA, 432 bp, Glycine max
tgcaagcttgtatggtagaaggtgtaggactctctcttgttggctagagcccggagaaggccttaccttatgacctgaagtggtacaacaaaccaccgagaaggtcaagttggtccaagaaaggatgaggactgctcacagtaggaaaaaaagttatcaggataagaggaggaaagatatggaattcaaggttggtgatcatgtattcttgagagtcactccgtggactggggttggtcgagaattgaaatcccaaaagctcacacctcgctttatcggtcctttccaaattcttaagagagttggccatgtgtcataccaaattgcattacccccgctctttctaatcttcacaatgtctttcatgtgtcttaacttcgtaagtatatccatgatccatcccatgtgattgaattggatgacgtacaagtg

SEQ ID NO: 182933 - DNA, 411 bp, Glycine max
taaggatggaatacttactttttggtgatgaataaatgctcttaacggaatcgaaaaatgcgaacagtagagatcctagggctgcaaactcgtaaattccgtgggtatggcttttgaatggggggaagagaagtttttgaatgcaaaaacgtccccttttcttcgttttttatattttggtgcacgggttgctcgcccaggcgagctcagctcacccaagcgagctaacctgcactttttttttttgaggggaacattaaccatgtcccctccttccttatgggttagcgttttgcctatttgagcctacttaagttagaattacgcgttaattacttaaaaaaacaaacaatactataagaaactgctaatgcaaaggatactggtgctgcttgcagcgaccttctctgc

SEQ ID NO: 182934 - DNA, 458 bp, Glycine max
  unsure (1)..(458): unsure at all n locations
agcttataagaacaaaatagccttaattatttttcaatatgcatgngaattacgacgcatcaacaagaatcaagccaaggctattgtgcaagcaatcaatggggcaaaacacaccaaatgattataatgatggatggctcaaattctcacaaaggtaaaatcatcactttcaaattgagctttcaaaactatcatgacatgtaaaaaagaatcaaggatttcaagtcacaaaatgtcaagaacttttattttcaaaacaattacccatttcttgaacatatcctataattcaaagaaaaacatgcaaagtcgtacgtgcacacgaaattgacccaaatattaaactgaaaatccgacgaaactaacaatattaacatattaacacaactaacaaattaacaaaacctacaaaactagctaaaccaaagaacactctccccccatacttaaacaacaca

SEQ ID NO: 182935 - DNA, 488 bp, Glycine max
  unsure (1)..(488): unsure at all n locations
cctataaaactcagctgacatgcctgctagattaggagcctctgttagtgttatctctctgtcgatntttaattctctatctctaggtcccttgtagtcaactgatgtggtaattcatttagctaatagaagtgttgcctatcctgttggtttcataaaagatgtcttagttagagttggtgaactgattttccctgttgatttttatatcttgaatatggaagatggattttctcaaggatcagttcccatcattctatgcagaccctttatgaaaactgctagaactaagatagatgtttatgcacgcacactgtccatggagtttggtgatataactgttcattntaatattctggatgctatgaaatacccatctgaagatctttctgcatttcgtgctgaaataattgaccatcgttgtgatgaatacatgactgatctttattctaatcttcatgcctctcactcttcatgcattgagtctg

SEQ ID NO: 182936 - DNA, 460 bp, Glycine max
ggacacttgaaactaagctgccccagctcgccaggcgagcaaggggctttctctataatcaaccgccttctggaggaatcttctggagggcccatgtgggtctggttgctatttgcacccccatttttactaaatacaccccctgcctttttttggtgcttcttttttcgtaaagttacggaaacttacgaatttcgtaacgatacttgttttctttccgtaatgttacggaaccttgcggattacataatcatcccttttttgacttacggaacgttacggaacctcacgaattgtgcaacgaatgcttccttttgatttccgatatgtcacggaaccttacggattgtgcatcaatactttcttttgatttccggcatgtcccagaacttcacaaattgcctaatgatgggtgcctagcacctcacaaggaccaaacaaaagttgcatgccaccaagc

SEQ ID NO: 182937 - DNA, 476 bp, Glycine max
  unsure (1)..(476): unsure at all n locations
agctttataatgggctttctctttattgcttctataatcaataatagnaacaaacttgtctttcaacatagcaagatcaagatccaaaacgctgatgtgaaattggacttgctcaattcagtcagagaagttaagcccattaaaattgacacatatgatacatgagaattcagtgaattgggaacatgtattgcataataaaattcacataagtgttttgagacataaaacacatgtcatacatataatttattcagataacagccaatgtgtattgatgttctcctttgggtgatacaccaacacacaacatacaaacatgatgatgtaaaaaaattcttaacattatttgacaattaaatatgcaccaattagtagtatctattttctttgcgcatattaataaaactaatgatgcacacaaatttgcaacaactatattcattatatataagaacaactagtcaacctttggg

SEQ ID NO: 182938 - DNA, 365 bp, Glycine max
  unsure (1)..(365): unsure at all n locations
acctcaacacgtgtgagagttgcacgtttgtgaagcttgtcaagcccccgagcctagaaaagtgttgtctaaactgcttcaatcaatttgttcggggtggacatgcttttgggtttgtaggcaagatctaacgagtcacgtgagggaagtctctacgtttgacaactctgcacttttctaaccattggagggtgcattgaagatagacgatacattatgtctgctactataggtgtgtatgacacataggcagtactcttgcatacgtgtcactcatggagtaagcacatactggagtcatggtgtatgggtgagtggagctgcgtcatggtgtgaaattttanggcaccactttattttctact

SEQ ID NO: 182939 - DNA, 475 bp, Glycine max
  unsure (1)..(475): unsure at all n locations
tctagccaaatggacttaccttgacttaattccttttatattcattntgagccttgtttccctttccttgttttgaagctcactacaagccttaagtgaaaaaccatgatatcaccatatccttaaggaattttggagctttggaattgttttgggaataagttcagggggttttatttcattggataacatgttttgttggccatgcttcatgatatattttgagccatacttgatgtacattgcatattggttaaatgttggacatgctgaatgagatgctgtttctcaaaggctacagagtaaaaaaaaataaaaaaataaaaaaataaataaaaattcgaaaaagaaaaagaaaagcagtaaagttgagtgaataagatcttaaatgacaaaagaatgatgaggctcttcggtctactctttatgnttaaantatatctctacttctttttattttcttagttttttctta

SEQ ID NO: 182940 - DNA, 372 bp, Glycine max
  unsure (1)..(372): unsure at all n locations
atctcaaaggagcactcaatctgggtgtattaaactctcaaacctacatntcatanagtccgtccgggcatcttcatcttgattcaggtctaacccaaaaaacattttagtacacagactctatctatgaactggataaaacacacggctcatcataatacttgtcgcgcattaactcattacccttaaagggtcttatagtcgtgtgattgtatgatacatatctcataactcagagcacacaacatctcaatgcacatatatattacaagtcaatacatactcaatttatcacatacacccgatcctcaaccacaatgatataatttcaaagtagcatgttatcacaccctatgaatcataatcatttta

SEQ ID NO: 182941 - DNA, 364 bp, Glycine max
tatgatgtatgttgttggtcttatatatatagatttagctatatatttatttatattaatattttatgtaaataataatgtagtggtgttatagtgcgattccaaaaattattcaagtgttggagttcgagaatattatggttagatttgaggtacatgtgtattgagatgtgtgtattgagttgtgaagtgtgaattatacaataactcgaccagtgttgatgcacagcgttaaaaaaaaagtgtaggtttcctatttaagaaccaatgtttaattgtagcgttatgtgttaaaccgtgttgacacaccactgtgagaacgtgggtatagcataaatcatgagcagcgcttataaatgggata

SEQ ID NO: 182942 - DNA, 434 bp, Glycine max
  unsure (1)..(434): unsure at all n locations
tccccgaatcaattggaattctatgtattagttgaatttaaaaaggacatgtanttgcagtagttgtaacgtaggtaaacagttggaaacttgtgaaatgtcgagtatctcgaagagcattatatatgtttgccacaacatcagggtgtgggcttaagacaccagacttctttatctgtttctttttttttgtacatttctctgtttctttttattttgatacatttctctgttttttttagagtaacttgattcggtaagcattgatactcttgttttgaatttaatgaaataatttttttttaatgtataatataacccgtgttcctatgtttaatacttaattatctaatttattaagaataagaacatgaattaatttaattatgataataaaattatcttacatatatatgtttcacaaaatcattgta

SEQ ID NO: 182943 - DNA, 457 bp, Glycine max
  unsure (1)..(457): unsure at all n locations
agctttntatgaaaggatatgactcttcacatttgattttgaatttcaacatttagatacattggtaatcgatttccaatatcttgtaatcgattacaccattttaaaatcaattggaatgttgcaaattcagttaaaaacttttgaaatcaattggaacgttgcaaattcagttaaatagcttttgaaatcaaactttgccactggtaatcgattataggaaactggtaattgattactataaaagcaaagactttgccgttgatgttttgatgatgccacatgatcatgatgatttgactccttatgaaaatgcgcttctcaagtgtaattcaagagaacaagacacaacatcaagaatatctctagtgttttaggaagggaattccaaattgaaactgtcaaaggttnggccaagaatattaagcacaaaagtttttcaagaatttatttatgg

SEQ ID NO: 182944 - DNA, 477 bp, Glycine max
  unsure (1)..(477): unsure at all n locations
agacactcaagcttctttgagaaaacttncttgagaagctagagcttagctacacacacacttctcatatctaagctcacctccttgagaagctttcttaagaagaatcctaaagaagctagagcttagctacacatacctttctaatagctaagctcacctccttgagatgagaagctagaacttagctacacaccccctataatagctaagctcacccccatgacaaaaaatatgagaatacaaaaaaaaaatgtccttcttacaaagactactcanaatgccccgaaatacagggctaaaaccctatactactagaatggccaaaatacaaggcccacacgaaggagaaacctattctaatatttacaaagataagcgggcttatacttagcccatgggctcgaaatctaccctaaggctcatgagaaccctatggccttcccttggatctctagcccaatctacttggagtct

SEQ ID NO: 182945 - DNA, 494 bp, Glycine max
  unsure (1)..(494): unsure at all n locations
ccttgacgcgaccttaagcacctgcggctgcagcttttatccaggcactctcttggnggtgaagcttctccttccatggcttattctctagtggatggcgccttctctcacctcttctcctttatcttctgctataatcccatggttgaaaatcaccattgaagaacctcattgaaactcaaagatccagcctccataaaagctttttaagcaagcttccatcaataggcttatttggctagtggctaaaagaagaaaggcctaaatcatctcaataaatgcatgtgcaacaaggaatgacaagagaagcaaggaaaaacctagagtaatctagcacgagggtgaaatcacacataaaagaacatgaatggaataatgcaatccatccacaaaatcccaaaanactcacaaggaattatttcatcacacatgagtcacctcataattttcaagcttatttatcacttctacaattgcgacaatgttttcacatc

SEQ ID NO: 182946 - DNA, 477 bp, Glycine max
tctaaggaagctacctagtctattaatagaagcatgtgaacacttgttgtaactctgatgaatgagagtcttgtgagacatacttcaaagttccacttctctccctcttttattccttcaatttcatgctccccccttctctctttcttttcctccattaaagcatcctcttcaagcttcttatccaaggcaattcttggtggtgaagctctttcttccttggcttattccctagtggatggtgcctcccctctcctcttctcctttgccttccgctgcatctctatggtgaaaaatcaccattgaaggacctcattgatgctcaaagatccagcctccatagaagctccacaagcaaacttccatcagacccttcctttggtaattgcattaaaaacaattggacccattccaaaatatttctctccctttaaatggtccttaaagtaagagaattggataagtaattcttgaaat

SEQ ID NO: 182947 - DNA, 363 bp, Glycine max
agcttcttatacaaggcttatattgagggtgaatctccttcttccatggcttattccttaatggatggcgcctactctaaacctctttcctttgcctaacactgcatttccatggtggaaaatcaccatctaaggacctcattgaggctcaaaaatccaccctccatataaaccccacaagcaagcttccatcaagtggtaatcaaaacacagaacttaaactaggagctccttaaacctccattaattgttggaattaccttcacttccatagagggaacttcataagactccatgtatctgcctccatgttttctgctataaggtggtaacatgaatccttagattttcccatataaaact

SEQ ID NO: 182948 - DNA, 432 bp, Glycine max
  unsure (1)..(432): unsure at all n locations
cgacctatgaaactcagcttannatggacatcgcttcatttggtcgccactgactacttcaccaaatgggttgaagcggcttcgtacgccaatgtgactaagagtgtggtggttaggttcatcaagaaagagataatttgtctgtatggtttgcctangaagatcatcaccgacaatgccaccaatctgaacaataaaatgatgaatgaaatgtgtgaggatttcaagatccaacaccataattctatgccttgcatgcccaagatgaatggggcagtataggctgctaataaaaacatcaagaaaatagttcaaaagatgattgtgtcatacaaggattggcacaagatgctcccttttgcgctgcatggttatcgaacctcggtacgcacgttaactgaggcaacctcattctctttggtgtacgggatg

SEQ ID NO: 182949 - DNA, 375 bp, Glycine max
  unsure (1)..(375): unsure at all n locations
ttatacgtgctaagccatttaatgccataactaagggaataaatttttagagtataataatgattacaattactattgtagttgtggttgtaacttatgagtaatcaaccattttagcatgatgtctctgtttttaaatgccttgattgggaattggttgaggattgactttggcataattggttgtttgtgtgaggagtgaatttaaggaaatagtactttctagcaacaatggaagcatcacctttttattangtgcttgataagttgattattgaaagtctaattgtgctaaacatttgtgatatctagtaatccctttacacattcatggtggtcagttggtattggacatatcaaatgtattcattctac

SEQ ID NO: 182950 - DNA, 403 bp, Glycine max
  unsure (1)..(403): unsure at all n locations
gntacttcatcagtcaagttctgcctttgctgctctattttcttcatcagattgccaactgtggtcaaagtaccattgacctgtctcccagcatcagagacagatagactaccacaaagcattggtgtgctcccaccaggtgtctgagatcccatggaagtagcatcttcagaattataaccacgaggcgacacataatcacgtgttacaggctgaactgtagcattctcacgagcaaggctctttctatcagcaacaagactcatctgcattgaaaaagagatcagagtcttttatagaattctaagttggatatgaaacctttgtgcatatgacatgtgaaaaggacaccaaaattgtggcagataagaaaccaacagactctgtaacttatcaagaacac

SEQ ID NO: 182951 - DNA, 461 bp, Glycine max
gatccttaagtcacctgcggcatgcaagctttaagaaataaattaggtgtctacaatcattgaggcaagaaggagatctgttgaaactgtgactacaatgacggcatatgtaaatgttttatttatattttaaaatttaaaattgtctgttgcttagaatctattctttaggaggtataattctgctttttatcatactagaaactgttttaatcatgcctaaaaataagagatattctgttttgtatatttgactctagctctatttaaagagcaaatgaataacagctatgcatccttccaaaatatatatgttcttctctgttgtttcatctaatcttcaacaaactccaacgaagagatgaatcagcaaagcacctaaactaatgggagaagaccttataaacgtgtcgaggaaccttccgaaatatagccaacatgagatcccagttaagagggag

SEQ ID NO: 182952 - DNA, 370 bp, Glycine max
  unsure (1)..(370): unsure at all n locations
tgtctttggaccacgaanagtatctcagacctanaatatattggaggcccaagggtgtaataaggccgaagtctgttcgcatcaccaagacaatntaagtggaccaagaattcaaaggaggtttctcaatttaatatttacatttttattgaatataaattaaataaaaatggaccacaaaatagaaataaaataataatatcttcaacaatttaaacctgataaattattcatcaaatttagaatgactctgataaataataaactctataaccaaatttatgaataaactgtcataaaataagagattaatcaagttgtttatttaaatgcatgtaaagaattaaacaatgatatatatcataataaa

SEQ ID NO: 182953 - DNA, 428 bp, Glycine max
  unsure (1)..(428): unsure at all n locations
tttccttcccttgcatctgttggttattgcttacattccatttgcatggtttttgattgatcatgtcatttctcttcgttctgttttttccctgtttcctgccttgtgtgttctgtttttgcctatttctgctgacttccatgcttccattgcattttcatgcttttcaattcaccacattactactttaaatatatagcattntgctttgactgtggatttcgcgtggaagtttatatcattttcatttagttcctttaacttttttcatattctcttttgacatattacttcttttcatgcattttcttgcattttatattcagacattcatagagatacccctattttaccatgaacaatgggcacccaattacccacacgaagttcggttcaaatacaatggagcaacctacccaatacggatc

SEQ ID NO: 182954 - DNA, 443 bp, Glycine max
  unsure (1)..(443): unsure at all n locations
ttgcttctacacatacttagtatgatcaaaagttattgtttattctgtccatgaacccattaagtacctgttgaataaagctgattccaagcccagattaatcagatngaatttgttgctttaagaatatgatctggttatccaagacaagaaaggatctgaaaatcttgtagctgatcacttatcaagggtagtcaatgaggaggtgactnttaaagagctagagataagggatgaatttcctgatgaattgttgttcatgatgaatganaggccatggttcgctaatatggccaacttcaaggcagctggaatcattccaaaggatctgacttggtagtaaagaaacattcttgctgatgctgatctgtgttgggatacccacacctgttaagatggtgtgataatctgtgcggggtgtgtacaaagagagggagtgtgga

SEQ ID NO: 182955 - DNA, 381 bp, Glycine max
gacacttagaaactcagctgtcaacgctttatttaaaaacattcgacattttttctttataatacaacataagggaagcaattctaattctataagatatgataatcaatcactaaatatcaaagatattcaaagtcaaacaatgcaatcattaaaattttgatctctgcaacttccaaaccttaacacccgactctagaaatacatctgttttgtctacaaaaacataatttattcatagattgacaaggccctctatactataccgtagaaaatgccttacagattaaaatgccatatggtattattcccctacagaatgattattttattaattatacagtatgacatccattatcaggacatcaattactctattta

SEQ ID NO: 182956 - DNA, 175 bp, Glycine max
ctcctatatatacttcttccatctggcctaattcttccacctctttgttcccttttcttctcctccttgattttctttccccaacctgagggaagtccacccatctaagatatcttatataaggtgtttttaattatcccctctcccttaaactctatgaatgaggacccttatg

SEQ ID NO: 182957 - DNA, 458 bp, Glycine max
ctcagctgcttataagctgaaccatgtgatcaatatacacaagttgagtgttatttagaacattagagtttatctcttttatcttagtgagagagattctcctaaattcttgagtgattcaagaacaccctggctgtatcgaaagactctcacaacctttgtgtgttgccctcgctggaaagagtgattctttccttcctttcatcttcacccttgttcattcaaaccacaattccagaaaatccacctctgcccaaaattatctagtggccataactcccattttatgcactcaaattaagtgattcttgaggctaaattgaatttcaaaacgagacctctcacctctgtttggaatcacctcatatggatccatgtagcttcagttattgccatttctatatctctgtgcagccaccacttaacctacgtgttaccatccccatcattcattttat

SEQ ID NO: 182958 - DNA, 433 bp, Glycine max
agcttgggctttatcgagccgttgtatcatagtggtgtgaacgttaacttttgtggttagcaaggaatcaacaacctctactggtgatgatcctaacagataattggggatggacgaaggacgtttgtcgtatgtgacctcaaagggggaaaaatcattgtcaaagtggacgaaggtgttgtaagaccattcctctatggcgaggaatcacagccactatgcaagattgtcatggacgaaggctctgaggcattgttcaaaaatgcgattgaagaccttcgtctggtcgtccattttggggtggtaggaggttctaatctgtaactttttgtcacttaagcggaacaattccaccaaaaatatctgattaataaagaatcacggtccataaccaaactgcgaagaaaactgtgtagtttgcacacaatgtcca

SEQ ID NO: 182959 - DNA, 449 bp, Glycine max
  unsure (1)..(449): unsure at all n locations
ggtagaagaaaaatttctatgtagataatactaaataccttcattgctccaatcacagaanaagaattntattttattttaatggaatattcatcctggtgccagtttatttgtgcatttgcaatctttttaagagatgcaactataaattattttgtgcattcttcaggttgaacctcttgcagttcagttgacttagagggaaggggaactaatacaagagaaggcagaggtgaagaagattgcaaatttttttaagcaggtgaattaacttattttatgtggtgatggaagaagttttattagagataggaaaaaagaagaaaggagtaaagaaatatgttgttagtttatatcttctttatatgcctgcataaaannaattcctttaccaatgctgagagtttagaattatttatacgcttctgaagatgctcagaaatgtgatg

SEQ ID NO: 182960 - DNA, 411 bp, Glycine max
cttgacctggcgcctagcttggaaggtgagttctttattagtatctgcgtttgtttgaattgtagacttagaatctaattcaaagaacaaattatggtttgtttggattgtacgcttggaacctaatttagagaactaatataatggaaattagtgttaaggtccacgaatgaatgcgcattgtcttctgtcaaaataaacttctaattttatggttaaattgcatatgtagggattagttttatggttaaacctactgcccattcaagagcaaggaaacaagtgagtgttatctttcttttgaatgccatgttatagttttttagtttcaagcaattccccttagtaaatatccttaacctgaatgataactataaacaagcttacacaactaaattggagcacaaagtc

SEQ ID NO: 182961 - DNA, 317 bp, Glycine max
  unsure (1)..(317): unsure at all n locations
agcttgtccttggtttagacatgattggtgcttgtattgtgactctgaggattcaatttgggcaaaattggatgagggaaagagtggttttcgaaatctgcactttatgcaaaatttngctggtgaaatgtgcaacacaattttgcataagtgcagaaaaatgctatgtaattgctggttgtggaaagagtattacaaaatgagttatggatggttgctagtagatcccaacagtcaaaatgtatacttatgtactagagacttccagtaaaattttcgagtcgatccaacggttaacgaattggaacgaaggaaat

SEQ ID NO: 182962 - DNA, 480 bp, Glycine max
  unsure (1)..(480): unsure at all n locations
tctacaacatcagccagggcaaaggcactntccaaacctgtatctacttaagatagaacctaaataagaagccaagcacgccttttggtagaaaaaaggtatgtaagggttctgggtctattataacaaaaaagggggagaaacggatttgggatgtgtctatcccacaacctggtgaaatgtaagaccacctacataacctagcccaaaagagtgtaagcgagggattaaaaacctagttgatcacttataaagtcaagtagaaaatattattctattttgattcccaacatgcaaaagtacaaaaccaattaacatagaaattagagtgagttggatggaacctgatgatcttctaggtaaaagggagctatagtggaagctggcgtgggaatagtangagctccagctcgctgaataagccaccattactgtatgaaaagaataatcaatangagaaagatgtgtctcangtgtgga

SEQ ID NO: 182963 - DNA, 430 bp, Glycine max
  unsure (1)..(430): unsure at all n locations
agctttgagccaattcaaacgacaataacgttntactctgatgtcagattgaatcccgtcatatatcgagacgctcgaaattgaatgttgaagctccgagccaattcaaacgacaataactttttactcggatgtctgattgagacccataatatatcgagacgctcgaaattgaatgttgaacctctgagctaattcaaacgacaatagctctttactcggatgtctgattgagtcccgtaatatatcgagaccctcgaaattgaatgttgaagctctgagccaattcaaacgacaataactttttactcggatgtctgattgagtcccgtaatatatcgagaccctcgaaatggaatgttgaacctctgagccattcaaacgacattacgttttactcggatgctgattgagtcccgcattatatcag

SEQ ID NO: 182964 - DNA, 463 bp, Glycine max
  unsure (1)..(463): unsure at all n locations
taaacattcactttcgagcctcacgatatattacgggactcatatcaacatccgaganaaaagttattgtcgtttgaagttgctcagaggttcaacattcaatatcgagcgtctcgatatattacgggactcaatcagatatccgagtaaaacattattgtcgtttgaattggctcaaagcttaaacattcactttcgagcctcacgatatattacgggactcaatcaaacatccgagaaaaaagttattgtcgtctgaattggctcagggcttcaactttcaatttcgagggtttcgatatattacgggactcaatcagacatccgtgtaaaacgttattgtcgtttgaattggctcacaggttcaacattcaatttcgagcgtctctatatgttacgagacccattcagacatccgagtaaaaagctattgtcgttagaattgctcagagattaacattca

SEQ ID NO: 182965 - DNA, 302 bp, Glycine max
atctagatgatcacagagagaaacatgtgttcattgtttatgaagcaagctcataaggctacaaatctgacaatctaaacaatgggaaaacaagtgtgagccaacatgtcgagttctatgaaaaaggctctcggaattgggaggagaatcaagacacttatgatttttttcttcgactttaaagaaagaaatgaaaaagccttgaatccagatgattgaaattctgcacattctccaactaccttaagcaaggaagccacatcatattgtgaagggaattcttgtgaaaggcgcagaatgac

SEQ ID NO: 182966 - DNA, 444 bp, Glycine max
  unsure (1)..(444): unsure at all n locations
atatcaaagagctcgtaccactgtttacatggctcagttcttagaaggggttgattaaaattacaactatttcccaagaaaattctttttaatttcatgcaagtacaagttcccttaaaattgaactcttaaataatgattcaaataaaacaatctgaacataaatgcaaagcaataataaataatagagtttaatggaagagaaagtgcatactcagatttatactggtttggccacacccttgtgcctacgtccagtccccaagcaacccgcttgagagtttcactatcttggaaaatccctctacaagttctgaacacacaaggacaatccttccattgtgttcagatatctttacaacaagagaccctcggtctctcaatcccttntgtgatgcatgctccattggagcttgtaagcctaggatcttcatcatcaatgga

SEQ ID NO: 182967 - DNA, 425 bp, Glycine max
gggatccttagatcacctgcagcatgcaagcttctgcttgtctagagatttttagagagataaaggtctctgttccagagagttttgagattttgctgtgtgaagacctgcagagaacaaagcttgaagaggaagtcgtcctgagagcatgagatgagtctgtgagcgattgtgaggctttagaggcggaggagacatcctcaccgcttggatttcgtcaatccttcatttttctcttttctttgttgtaggaacttgatggttcttcaatcctcaccgctaaatcctctggtggtgcttccttgtaggtacttgatgtaaatacctcggtatctatttaatgatgctttgtgggttcatggtgccatcagaacttcattctaacattgatttgtcttgatcccggaatgcctgtgttgttagga

SEQ ID NO: 182968 - DNA, 482 bp, Glycine max
  unsure (1)..(482): unsure at all n locations
cctatgatactcagctagggatgaagaaccagcttgcctgagcgagctgagctcgtctgngcaaggtatgttacttcaggaggaagtaggaagctcgccggagcgagctgctatgcaacctccacccctcatttgctataaatgagcgtgatgaggctgaacgaaaagggtctcgaagttcctaaggtccataggtccanagagaagaagaaagaagagaaatgaatcggaaagaagagaataaatgtgctacaccgccgaatcatgactgcaatcaatttctacatcgttcttccgtcgatcttcattagttcttcgttcttcatcgggttagtgcttgtcttgaggattcgagcttgatttgtggacccttcagggtcccctttattgtttgaagatcttcatatccttcttcgatcatctgtaatcacctttccttttgtaaagtcaggtataaccgactattgacgccggaagttatc

SEQ ID NO: 182969 - DNA, 396 bp, Glycine max
ttaataacaatattggccaatatatagggtcttatgtgatcaaatacttggcgagacatgatatttataatacactcaataatttgaaataaaaaaggaataaaacattaataattccgaaaaggaatgagtacttatattataacaagggacattactttaagttaaaaataatccttatatattgtcaaaaataaaattctattacgtatacatgaatggagacattttaattcgtgaatgactaattattgccccgattctttcgctaggatatcatcatcctttgggctaattaacttataaaactaagcagttgcaatcatatcctataattactccaccttgatgatcataccattattctctctatgtactatgttccaaacaaatata

SEQ ID NO: 182970 - DNA, 458 bp, Glycine max
  unsure (1)..(458): unsure at all n locations
cacctgcggcatgcaagctnggccccaggcagcatttatctcatctctttcaacctaaacatttcataaaagtgaacatcataatcaaagcttaaatattcaaactaggaagaaaaattattcaattcaagattaagaaaattctctaggataaaaatcattttatgaagggacatatcaaagcaaaacatgagtgcatgtaccacaaagttgaaagaattgacaccatagatttagttatccatattccacaataagttgcctggttcaaaaagcacttcaagacacaattagccaaagaaatttaatattttgttgcaagataatttttttaaataaaagtagctacagtacaagtttatgaacatctatcacaacttataccaagaaattcttgataatgaanacaataatgtagtgtcatttttcagtaacagtaatacgggtataaattcttc

SEQ ID NO: 182971 - DNA, 420 bp, Glycine max
  unsure (1)..(420): unsure at all n locations
atttcccttagagtcctctcattatgtggagggggngccatgttctcagaatgtgcaaaatcagaatgctcagaatctgaatgctcaaaattataatgctcaagatcaggatgttcaaaatcaccaataacagaatgcacagattcaccagttatggaatgctcagaatgatcaaaaggtataaaatgatgcctaactaatctatgaaatgtcctatctatctcangatcaaagggttgtaagtcagatggattgcctctagtcatacactacattcaacatgcacacaactagttgccttgtcatgtaaataaaggtgtaggtttgaactacagctaccctcanatgatatccaaatgacttgataatttgtgagcaaccctatacaatgatgagaagatagcacacaaaatttcagac

SEQ ID NO: 182972 - DNA, 463 bp, Glycine max
  unsure (1)..(463): unsure at all n locations
cacctgcggcatgcagcttaaccaagaggggatggtccatttctagtacttaaaaggataaatgacaatgcgtacaagattgaattgcccggtgagtataatgtgagtactacatttaatgtgtctgacttaactcttttcgatgtagatggagaagccgatttgaggacaaatccttttgaagagggagagagtgatgaggacaaggcaaggaataagggcaaggaacctttataagaactttgaagacctatggcaagggctataacaaagaaggccaaggaaactcttcaacaagtgttaaccatgctatttgaatntaggcccaagttacaagtggagaagcttcagattgttaattgcaccatgttccaagaagagtagagggtgccacttttngtgagtgatctattagcattctgttagttgaaataaaggctcaaacttttgttaagtggttgca

SEQ ID NO: 182973 - DNA, 448 bp, Glycine max
tgccacccagctcgcccaggcgagcagggttgcttcctccataagcaacagccttctggagcaatcttctggagggcccaagtgggcctggttgctatttgcacccccatttttactaagtacaccccctctgcttttttttggtgattcttttttcgtaaagttacgaaaacttacgaatttcgtaacgatacttgttttctttccgtaatgttacggaaccttgcggattacataattatcccctttttgacttacggaatgttacggaacctcactaattatgcaacgatgcttccatttgatttccggtgtgtcacggaaccttacggattgtgcatcaatattttcttttgtttttcggcatgttccggaatttcacaaattgcctaatgatgggtgccaagcaccttacaaggaccaaacaaaggtcgcatgtcatcaagca

SEQ ID NO: 182974 - DNA, 196 bp, Glycine max
ggaatatatatccaccgaacgaaggaactgtgttatccattgacctccgtcaaaagaaactgcgtatgttctgtccagccgtacccgccttggagatcaaaacaaggggagaactatatattatatgtgaaagagacatctgtgtggttcacatatgagcgaggagatgcagtgcacgttctctctttgggattga

SEQ ID NO: 182975 - DNA, 253 bp, Glycine max
  unsure (1)..(253): unsure at all n locations
tgtgtgcacgtgctcacccgctgcagagggatgaattgtttattacatatgaanaacgacggagagcagatggaacctatgtgagattactaaccgattacgtgacagaaacatttcagaagcacctcagcttaaattgacttcatggatacaatctttcctggcggattcgatagatagagaggtgccgaggagctggaccctattcttgtgcacttcctgacgtatttatagcgaactatgggaggtggtt

SEQ ID NO: 182976 - DNA, 361 bp, Glycine max
agctttagatgaggaagtgtagaagggtgaaacttcctacttttattcgttgaccacagagtggtacctggagatatgtcgcgggggtcaggagatatgtcgcgggggtgctattgcccaaaaccaagcttgaccaatcccgacccaacccgggcatagtcagtcagagagaacttgtgatgtacctaaacaggtgagctcctggcagtcaacatataaaaggaacaaagaccacaaagcaaggaggcttgtggtggctggccacctgtgaaacgtgattgatatgtgagatatggcctctggtaatcgattaccaagggtgggtaattgattacaaggcttataaatgaagacaggagac

SEQ ID NO: 182977 - DNA, 466 bp, Glycine max
  unsure (1)..(466): unsure at all n locations
tatcntaatatcacaaaagacttcaaaattctttcataagattagtaacaacttcaagganaacatgaagagaatatagataattcttcaaaaatttccactcaatcatgtgatgactttgaaagtctaaatataacgacaacacagcttcacctttaaaatgaggaaattcgtgaagaaagatctagtctattggaagaccttcataagttgaaaaatcaactagaaggcttacaaaatgagtatatcacactcaataaacttcatgattgcctaaatgagtaaaggtgtaatccattgaatgaatgttcacaagtccataagaattataaaaactaggaggcangtaaacataacttatgggttgaatgtgaaagatataagaaaaacctaatattctcaaatgataaacttgaacaatatgaggttctccaaaaacaaccccaagatgttgntacaattcatc

SEQ ID NO: 182978 - DNA, 432 bp, Glycine max
  unsure (1)..(432): unsure at all n locations
agcttgatcttccaccaccgccgccaccatcatcttagacttatattttaatattagtactttgattntcagccttgtattttggctatattagtatggtatttgaacaatttactatttccttatttgcatagtatgtttagaccaatattaagtatgttatttggctatgtgaagtttataatttatctatgcatggttgtttgcttcatggtttcatggttcttgcttcttgcttcatgatttggtttgatattttttatgaacattgtatggatgtttaaattaaatttatttgatacacactctggctctttgttgatgccaaagggggagagaaatgggattaaatcaagaatttgcatgagtaatcaactttnntttaagataagcataaattcaaaacaaagggggagaaattatgagaagtat

SEQ ID NO: 182979 - DNA, 411 bp, Glycine max
  unsure (1)..(411): unsure at all n locations
tataccttcatcaaattttgcatcaaacttacctaagttgtctttcccgttgtttagcacaaaacacttacatccaaaaacatgaagatgagaaatgttcaattttcttcctttgaacaattcatatggagttttctttaagattggtctaattaaagctataattattatatagcatgcagtattaacaacctcagcctagaaatatttaggaagatttgtatcattaaccaaagttctggctatttcttctaaagatctattttttctctcaactactccattttgttaaggggttctaggtgtagaaaaattgtgttcaatgccattntcatcacanaatgattcaaaatccttattntcaaattcctcctcatgatcactcctaatagatgcaatattgagattttc

SEQ ID NO: 182980 - DNA, 364 bp, Glycine max
  unsure (1)..(364): unsure at all n locations
agcttgtaaacaactgaaatctcctgtagcatctgtagattaagacattaagattagcttaacagtgaggagtttgaatgagattgtaggtttaaatcatgttgcgtgtattattatgcaaagagaatgatgcataaatccaactantacataggtaatggaacacggctttaggtaaacatcacatctctggaagtgttaatactagctgcattggatgagtgctaattggttaatctgtgttttggtttcacaataggaagcatcaaaataatacgtaatactaattatatctctgaaagctataatactacctgcattgaatgagtgctaattggttagtgtgtgttgggtttcacaatag

SEQ ID NO: 182981 - DNA, 443 bp, Glycine max
  unsure (1)..(443): unsure at all n locations
tatagtaaagcatgttgtatcagacataacaataatcttgattattatagagntggaaattagaggatcatgagaagtataagataatgtatggattgtctgtaatcttggagttaagaatttaagaatcttgactttngaatattataattgcccgtcttcattggcattgtgagtgatctttatggaattagtgtaaataaggatgaattcatagaatcgatctccaacttttcaaaggatcttggcaaggatattgccataattgagcaaaaatatactgtgcgattnttctaggaatcattcccttccaagttacaaggatgagaaatggggggcagtctgattnttcgtacaaagatgttcaagttnttgaggttttggggagacaacgtaagaaggtttgacagggtactgtgatatcgtacggtgataattctatt

SEQ ID NO: 182982 - DNA, 444 bp, Glycine max
  unsure (1)..(444): unsure at all n locations
agctngaatatatttcctaatctctatggacttaagcctttatcttattttagacaaaattgaatagctntaggtttgctatccttagcaaacgttgcatactcaaatgatataatgccaaattatcaaaatgttctagaagaccatcaacccacaaatgaactacgctttaagatgatattagtattaccaataaatacttttaaaatctcaggtacaaagagacagccataatcaaagattattcaatagttaaagaaggttaataaattgtaataatcaagaatgcgttaatacgcttcatactctcaaacagaggaactacgcgtttgtgtgaataaatggtatattctttcagtttgcatcgatcactcaaacccccatcaccaaagtatataaggtttataaagcaaaccaacaagagcgtgatgcacatttagcttt

SEQ ID NO: 182983 - DNA, 413 bp, Glycine max
  unsure (1)..(413): unsure at all n locations
atttgaggtgaagatggtggttcctttggctattagggaatntcttaaaggagaaaattgtggaacgcctanaaggaggcaacagagtgatcaaaacccatggtgatggatcctctatcagtaagaagggaaaatttcaaaagaaaccttattctataccctaagaaccacaaggaagttcaactatgccctgccaagaactcaaggcattagatgctttatgtatggtgggcaacacataatgacttatttccctcanaaagagatcgtgtgctatagatgttagaagcccaaccatctttgcagggaccgtcaagattttgtgagaactggaccaatatggagtgcacctaaggctgatgttagtgcctagctctactgagntttaaagattggctcaaattgtaaaacat

SEQ ID NO: 182984 - DNA, 428 bp, Glycine max
  unsure (1)..(428): unsure at all n locations
agcttatcaaaaaatggtggctccatgcatgtntttatagtatcccacgctttgattggaggttggtatcctttatatggcgttatcatgtcttgtcaacaataaatgcatgcacgtatatatagtcattcagttttgtattaacatatcaatgaattcgtcatctgacttgttccaaatgttaaaaatcggagcatcgctctaacaactttaggtaaagctgtaaattggggatatcaccaattatcttcttcttcttctttttttttttactgaaatatcaccaattatcctaggactggctgttcaagagaaacattatatcttagaaattcgtcctttttgacaaaaaaaaaataatggtctctccgcattagaaaagacttatactaacaaacttgtgaaacgcgtgaactttgaaaataaat

SEQ ID NO: 182985 - DNA, 317 bp, Glycine max
  unsure (1)..(317): unsure at all n locations
actaagcttcacagctcggttttaaggagcaagctgcacctgttcctcgtgctgtttctctttcaaagctaacagatagtttcttagatggcacaagcagtgtgtatctggaggagcttcaaagggcttgggaggctgatcccaacagtgttgatgagtcatgggacaatttcttcatgaactttgtggggcaggccacaacctcacctgngatttctggtcagacaattcatgagagcatgangttgttgttgctggtgagggcgtaccangttaatggccacatgaaggcgaagttggatcccttgaatctggaa

SEQ ID NO: 182986 - DNA, 480 bp, Glycine max
agcttagctctatagaacaatcataaatttctctttatttctgtgggaattgacgctaaaactataaatatctgcgattgcgtatagaagccgcatatgtgtctcctcccacactgttgtgtgagcactcaataaaagtgctcagaacgtacagcgaaacacactgaaataatcttaagaacagtacatgaaagtataaatctggaaaacaaacataaatgattctaaaacatacatagagcataattcgaataataccaagatgaaatgcaatccacttagtcatatatcacaaaccataaacatcaagttcagtcataattaactaagtactaagtacttaaaacataaccgatgtttagagaatgaataacataatgtcataaattattcttagaacataatataggcatatgcattaaacaagccataaggtattataacaaaaaacaaatcatttgtctaagtcagtggcatata

SEQ ID NO: 182987 - DNA, 445 bp, Glycine max
  unsure (1)..(445): unsure at all n locations
cttgaanactaaatagttatcaaaatataagaacctttgtggactaacataaagctatatttaagaaataaataattaaagaatacacatacacgttgggtgtatattatctcccttaccatttctcatcaccataccatatacttcgttttcatgtattcacacatcaacaacagaatactccaaactagatgaagctcgagttcatcttaattgtagctcagggttatacactcaacagaacaatgtaggttcgatcacaattatgattgaacaaataactcatcatactcatgctaaacttgtgtcgacatattcaaaatttaaagctcttagaatgtgaccaaaaaaactaccaatgaactctgaagaaaaatttgacagaccatttcatacatgagaagagtatgatagtatcaacacccataagtggcgtgagtgaaca

SEQ ID NO: 182988 - DNA, 392 bp, Glycine max
  unsure (1)..(392): unsure at all n locations
catgcaagctagagaaagnccttctgatgctatatatacattttttttactcaacggcatgagatgaagtacaaagattggagcttttgcgaattgttattaatgaatagcttaaacactgtggtttaagctactttccttgatattcgtcttatgcctaacttcatctaattgtacaggatacattttattcttctctttggataactgcatgccttgtaaaaaacaagtgaagagggcatttttgcttcattctcttatgatgcaatcagtaacttttgttgcatacacctttggtacataatcacagcatgttattgtcacttggggaccagtgaactgttctttatttgcttaaggatcaaccaaactgtacatttgggggaagtgtt

SEQ ID NO: 182989 - DNA, 477 bp, Glycine max
  unsure (1)..(477): unsure at all n locations
tcatgcttaactatgtatggcanaacttcattactgttggtcaagacatacaagtgagcttgtaacaaatcttctacacttggagtgatcacatgcagtcctcttgaacccttaccacccactatgtcatcatgccaacactcaggaagcccaacagctttaatcttctctaagtgttctgaacaaaattcaatggcttcttctgcaatgtacctctcaacaatagattgcttcaaatgatatagattcttcgtataccctnttaagatcttcctgtatcgctcaaccgggtacatccaccgtagataaacaggaccacaacatttgatttctttgaccagatgcacaatcaagtgaatcatgatgtcaaagaaagcagggggaaaatacatctccaactggcacagtataattgcggcctcattttccaactcatcaaacattactggatcaatcactttgctacatatagcatgg

SEQ ID NO: 182990 - DNA, 368 bp, Glycine max
atacacattgccattacacatgcaccacacaactgagttcaggtccaattcaaattgcttcacttgccatgaaactcttagtataacataatttgcttccttgactctataataccatgcaaacctgaattgtggatgatgttgccacacgagtggaatgttggcaacaagacaatggtggcgcttccgtatcatgaatatatagctaggcaagttttgttttgagtaactaacacaaatgggatagttctatttgatatgtaactaaatctccttgagttgacctatgttaagaagaaaggagtcctgggggattaactctatattaggcgcaaaattgaataaaaagttgagcgagattcatatta

SEQ ID NO: 182991 - DNA, 371 bp, Glycine max
  unsure (1)..(371): unsure at all n locations
ttgccactgtctggaacgccggcgagccgcgatggagattttgactctacatgttggtggcgttggtgataggatcaatggttgtgaaaaagagaactatagtaatagtgatagagataatntggtgacacttgcaataacacaaggatatgataataggaaatattaatataataatagtagtggccaaagtaccaatattaacaatgataaatgatgttttttaattgttaaagtacaattttaatctcttttaattctntatttgtgattttagtgcatcaattcttttaaattagttctcttattataagtgcatgttttattcatggaaagtcacattcaacaatattataattcatatttaaata

SEQ ID NO: 182992 - DNA, 344 bp, Glycine max
catcaagtcttgttgaaatatggaagtaaccatcctgcaatataggggcaaaagatgaatcgagtcacatcactgcttcgtctactgccaaacatatttaggattattgatgtccttgttacttccagtttcaccttgacaaagatgtcatggaccatgttgaaaatctaaattgattcaacctcatatcctgcgtaaaaatatgcaatacttcgactgtacatcattcgcatgcatccatgcttttcattggttgcattgctcattgcattctttcgttgaaaaataaaataaaataaaataatatgaacttaatcattgttatcaaaaagaaaaggacacgc

SEQ ID NO: 182993 - DNA, 359 bp, Glycine max
  unsure (1)..(359): unsure at all n locations
tactaagctgggcttgtttntaaatcctaggatatgagcacctttgtgtctgcttgacttgaaaacnaagtgatcaaatacaagcagagattaaaaggactangttgcctcctataatgctttttaacgtctgagctgacgcgtgatggcatgtcngcacggacctatactttgcttaccttggcttggacttggtcgctattggcggcatgggcgaagcaatgctctaaccttttttggatgatctgagtgaacttaaaggatggggtgcgttgtgctgctgcgccatccagctgtgggtgttcccctccctgctgggaccgacttttataaagtcataaagggggctgtgacttgtg

SEQ ID NO: 182994 - DNA, 432 bp, Glycine max
  unsure (1)..(432): unsure at all n locations
agcttgtcagggtgcgtatacaaggatatgatggagcangtaatatgcaaggtgaatttaatggtttcaaaagcttgatattgaaagagaatttgttctacattctatattcattgttttgcccatcaacttcaatgagttcttgttacattggcaaaaaaacatgttcaaattgcattaattgttattcaatttagttgctaatttgtctaatattgttggagcatcatgtaagcactgggatatttttcgaaaaagtcaaattacaatagtgaaagaagcattgcaaaaaggagaaatctcaagtgagcatgacttgaatcaagagagcaggaaacactaaatgaagctcacattatggtacattacttagtctagtttctctttttttcttcatgattgatgtgctcgaaataattgaagaagatgaca

SEQ ID NO: 182995 - DNA, 457 bp, Glycine max
  unsure (1)..(457): unsure at all n locations
tcctcggggccatttcctgcgaaggcaaacatttggaaagttatgtttaccagtgggacactactcttaaaacaaaaatggcatacaacctcctcccataaatacaaacatcaatgtaaatttagagcaagcttatgcgcctatttccttacgaacgttcacttgcacaagacatcctattaactaagaaaaatgcacccatatacaatcaaggcagcttccttacctagattatttacatgtacttccaaggtgtatttgttatttacatcaccacgtctccttggctaaatttacatacatgcatactcaaagcactntggggtaccaaaaattgcacatgtgcacatcttggtatttctaatacctatacatacacaaacttcatgatgaatcttgactatctacacaataaggggctacgtttcatgctctnttcagttttttnttttttttt

SEQ ID NO: 182996 - DNA, 456 bp, Glycine max
agcttggttgggcaaatattgcagaatagttcattaaggcaacaaatttgagatatgaatataaacaattcagaaataggtgagattctttgaaaaaggaatggcaattatgggctaagcttattgggaaggacataggtcttggctgggatggggagaagaaaatcattacacctagtgatgaatggtgggaagccaaaattcaggtatgtgttattaaatgaaaatagagtttttgagcatgccacttttttgttcttttgctttttatgtgtgattcttgactttggggccaaaattgcagttgcagactattttttagaagcttgaattttaaattttagttgataattttagtaccctgagactgaaacagtaccctttatatacccttcaaatctattgacatgttcatccgtggaggaaagcattcttggtcttactttgcttcatctc

SEQ ID NO: 182997 - DNA, 437 bp, Glycine max
  unsure (1)..(437): unsure at all n locations
ngtatggcctaggatgggatttagtatccaaattcattttggacactaacctggaacttgcaacattggtacagctccctccataaacaattaaagagcagagcttaccattaattgtacaactggtgtggaaaatattttctctttcggtgttgtcctatggctgcatctgacttcccaagagccttctcaccattagcatatcaccctgtatggctgcctcctcaagctcttcttccacttcttcttcttcactgatttcggattcactggtgatttctccatctgccttcatgatcatggtcctcctagntggacactcagaagcattatgtcatctacctaagcatttgaagcattttatgtttctagtaccagtgttggatgatgaggcagaattatgcttggtttagccctggacactgatgactttccat

SEQ ID NO: 182998 - DNA, 408 bp, Glycine max
agcttagctgaattcaaatcgtattgaagttatcttatctcaaccttggccagcttagcggaccaaatcaaccttaaatgcaagggtttggcgctaagcgcttgaaactcacagcttatcacataaacagagatgcgcttagcgcgatgcttgcgcttatcgaaaggactatatttcagaaaagttttctaagttatttttcagtcctttttccaagaaattgaaacccttatgttaaacattcaaggataggctgatatactcctatgtacagatcagacagcaagttccaaatgattaaatgcatgaaaaataaagataatagaaattaaaactgggttgcctcctaagaagcgcttctttaacgtcattagcttgacacttttaccacactgggtgatcttatgt

SEQ ID NO: 182999 - DNA, 452 bp, Glycine max
atggggtacccatcacatgtggtactaggtggcggtctttcgatggtgcacaacaagttttccacatccacaatgcgcgcataaacccaccatcccctgttgcccacctccaactgagctcacgtactcccacgtagcccatatcctcgtttctctcaacaccgggtccccatcaatcctcccaagcttccacaacatccaagcaaaacaacattcaaacagcacaagctatcatagccaagcaaaacagagcaaaggcagaaaactctgctcaacacatcaaccaaaatcacagcttttctcacttaaagaccacagtaacaattccttcgatccaattcgttaaccgttggatcgactccaaaatattactggaagtctatagtgcataagcctacattgtgaccgttgggatctactagcaaacatccagaactcattctgtactactc

SEQ ID NO: 183000 - DNA, 438 bp, Glycine max
agcttgtctcagcgtttatgcgagacatagaccaacatgttagctatcatcgccaagtaccaagaagagttaggtctagccacggcccacgagcatagaatcgcggatgagtatgcccaagtatacgcggaaaaagaggctagaggaagggtgatcgactctttacaccaagaggcaaccatgtggatggatcggtttgctcttaccttgaacgggagtcaagaacttccccgattgttagccaaggccaaggcgatggcagacacctactccgcccccgaagagattcatgggcttctcggctattgtcagcatatgatagacctaatggcccacataattagaaatcgttaggaaacttgtatggtctctcagaccttgactaaatatgacttcctttctgaataaaatgaggtggcccatgttctactcaaaagc

SEQ ID NO: 183001 - DNA, 332 bp, Glycine max
  unsure (1)..(332): unsure at all n locations
ttaagcgcgggtctgggagacaaaggtcaagtgtgtctctatatgctaagatgatgttccgagtacattggatttggtacgaccatgccctcctgatttccagctgggaaattggcgagtggaggaacgccccggcatttacgcaacgagcataatgtaaacctttacggttttaaaagctctatagttgggcctaagctttagagtttttccttttgttaaggctctgtgtcttttgttttgaaattataatacaaggatctttctttatctggttctacgtctctacccattctcattcatttgcatggtnatttctttttctgaaaatg

SEQ ID NO: 183002 - DNA, 389 bp, Glycine max
  unsure (1)..(389): unsure at all n locations
agcttgtgaacaactgagatatactgtancatctgtagattaagacattaagattagcttaacagtgaggagtttgaatgagattgtaggtttaaattatgttgcgtgtattattatgcaaagagaatgatgcatatatccaactagtacataggtaatggaacacggctttatgtaaacatcacatctctggaagtttaatactacctgcattggatgagcgctaattggttagtctgtgttttggtttcacaataggaagcatcaaaataatacgtaatactaattatatctctgaaagctttaatactagctgcattgaatgactgctaattggttagtgtgcgtttggtttcacaatagtaaatgttaagagttgattttgcctt

SEQ ID NO: 183003 - DNA, 373 bp, Glycine max
gaggtggaaattagaggatcatgagaagtttaagatcatggctggattggttggaatcttggagttaagaatttaagaatcttgacttttgaatatataatttgcccgtcctcattggcattgtgagtgatccttatggaacttctgtaataatgatgaattcatagaatcgatctccaacttctcaaatgatcttggcaaggatattgccataatcgagcaaaaatatactgtgcgatttttctaggaatcattcccttccaagttacaccgatgagaaatggggggcacgctcgattttcttacaaagatgttcacgttcttgatgctttggggagacaacgtatagaaggttgacagggtactgtgatat

SEQ ID NO: 183004 - DNA, 186 bp, Glycine max
ttgttttgtaaaggaatacgcaaggatgagcaaacatgaaaacaaatggcatgcgattgtgcggataaaaaagtctgttgaacgcatatgcatgatgatgccatgactcatgcgaaatgtgaggctggaatataatgaccgacaaatgcaggatatgtccattatgatgttatgaagagatgctta

SEQ ID NO: 183005 - DNA, 465 bp, Glycine max
  unsure (1)..(465): unsure at all n locations
tcttttaccttgngttagaaatgtgcgtgcgananaaganatatttgtcttaacaatcaatcagagattgaagaagtgcacaagacaatagactcgaacgaatagacaagagaggggttctttggactacgcactgtctaaacaatgtgcataattgtcgaaagaggaaaaagaaagagaatagtcacagcaacttggttaaaacctgaagggtgtgcaaagcaatcacctgcttatttacatgccaaaaatttgtgtacactcttgttccgcgccataccatagagaataggaaacaaaaaggggaaaggccaaaacaaccaaagccaagattcctacccaaaatccaacctcataaagccctattgattcatggagatcgcgtatattctcgttgatctgattggaatcgacttgcanagtcaatctacgatatatctactgatttggaataggatgaaacac

SEQ ID NO: 183006 - DNA, 451 bp, Glycine max
  unsure (1)..(451): unsure at all n locations
agcttcaagaacttggatcaatgctttcagtaataccttactcagaaatggattcaaacaatccaagtatgattactcattgtttactaaaggaaaatgagataatctcatagcaattttagtttatgttgatgacattattctagctagcccaagtcaagaaatcatctccagagctaagacaattctgaaaaagcatttcaaactgaaaaacttgggagatctaaaaattttcctaggcctggagctatctagatcaaaagaaggcattntcatatgtcaacgacattacacattatctatgctagaagattgtggaatgcttgcctgcaaaccatctntgattcctatggaaacaaataacaaattgacagctaactcatgaactaagctggttgatccacgatcttgtagacgactcattggccggcttttgacttaactatatcta

SEQ ID NO: 183007 - DNA, 448 bp, Glycine max
  unsure (1)..(448): unsure at all n locations
agtcccctaatctccctctcatgtcggcgtccaacataatgttgctcganttgatgtccctgtgaataacaacctggtcccaaccgtggtgaaggtagttaagcccctctgccacgtcgacaaggatacgacggcgttgctcccaccccagaagcttctccgacttatcgaaaacccacttgttgagactcccgttgggcatgtaatcataaaccaacataagctcgttcccctttctgcaccaccctctcatttgaaccaagttcttgtgctgaagcctccccatgcttgaaatctccgccatgaattcccgcaacccttgcttcgaatcgtggttcacgcacttcaccgcaatttgcgtatggttcggtaacgtncctctgtacactctctcgaaccctncagaacctaacagcatctnctttcgaaacttccccgtcgccgaact

SEQ ID NO: 183008 - DNA, 427 bp, Glycine max
  unsure (1)..(427): unsure at all n locations
ttaagtcacctgcggcatgcaagcttgaaattgcattcaggcacctattttgaatctcctatgctgnctctacatatataaaacagacccaccatcccaatttcgcagaatcatattcatatatcattggggcatttcagcgagcacttggggggcgcacgtttggacacaaattgcaagagaatggggacaatgtggcatgccccattgcttcagaatacaacataggcctaatgccttctcacacaaaccctcaactcaacaaaacaagcatggattcagatgcaaatngcttcacgaattttgcaaaaaatgagcaactaaagcaccaaaacacgtcaatggagagccaaataaccaagggaaattgcacttacttgtggngagtgaattatagcgtgaaaagggaagcaaaaactcaacaatg

SEQ ID NO: 183009 - DNA, 430 bp, Glycine max
  unsure (1)..(430): unsure at all n locations
tgggtnttttctcataacgagtcccgagacttggacaagaattacttatggcggaagaagagaccaaggtgaaggttacattgcgtcttaccgatgcttttgtaacctcttctctcctcgtggcaaagaacctcaacgttccttggattgcgtttggcctcccatgtcatgcaaataatgctggaaacacaacctttgatttcattcccacgttgcccaacatgtgtgtcaatgatatactacatgatttactcttgttatgagaaagataggtttcgctaagtgaggtgctacctcaagctaagggtgtggtcatgaatttcttcaaggaaacagacccgccttcgttcattaatggcatgagatctaagttgccttgatgtggccatggtagctacacatgaaggggagcttggttgaccatgacatg

SEQ ID NO: 183010 - DNA, 432 bp, Glycine max
gggatcttaatcacctgggctgcaacttgtctgtttgcattctccaggttctgacttattcggaatgggttataaatggggagtatgattggcccccaaaatgctgcctatgccattctgttttggaatagggggatggatctcaaacaactccactgggttgcttgcgtatgtgatcttgcttatgtaacagcaacaacaacaacgccttatgtgattttgcttatgtattcctttgaaaaaatatggctgagcttcactggttacatattataaatttgaatgaaatgtttcccacatattgcttgcctcgcatataaatgtttctcccatactgccctgcagatatgctgtcttcatgtcacttagtagattaccttcagtgattcttctttatataaaattgaagaattttgatgttatgttttaact

SEQ ID NO: 183011 - DNA, 479 bp, Glycine max
  unsure (1)..(479): unsure at all n locations
ctggccctaatttgatcggattgagatttcaatntgtcaacagaataacctaatgtctcatcgagactctgattccaagcgtcgccactccaagttcgatcgagaagcaaggtgctctctcgtctccctattcgcatgcttttcaatttaacctaacacgtaagttacggactgtattgagttagggtttcttactctagaagcttccagaattgcaatcgcgtctttttggattaaactagggttagttcagttttaaaatgcattctgagatggtttcgttgtgggttgattgtagtcccaagagatatagaagggatagtaacagagtaacctcagatggaggagatcggagaaacccaccacatcattctatgcgtgaacccttcgatgctgctcccaagaaatcatattcaaatgatcatcatgagaatccgtcccaacatttgtctcaaccaccaagatctcgctcttatcat

SEQ ID NO: 183012 - DNA, 415 bp, Glycine max
agcttgtgcattcaatatcctgatgagggtgttccttatgttctcaagactgtactaatacatttgctgcccaagtttcatggtcttgtaggtgaaaatcctcataagcatcttaaggagttccatattgtttgtttcaccatgaagccccctgatgtccaggaagatcatatctttttaaaggcttttcctcattctctagagggagtggcaaaagatgggctatactaccttgctcccaggtctattttcagctgggatgaccttaagagggtgttcttggagaaattcttccctgcatctaggaccactgccatcagaaaagacatttcaggcatcaggccacttattagagaaagcttgtatgagtactggtaaagattcaagaaattgtgggcaagctcgcctcaccacc

SEQ ID NO: 183013 - DNA, 453 bp, Glycine max
  unsure (1)..(453): unsure at all n locations
cgcacatgttaaagtttcgacgcccgtcttatctagtttgaaatcaatgaaacagttgatgacaccgcagcaacgctgagaatttgtccgtacttataggaagattttggacttagacatgatagaagtgcctacagtcgccattaccgctttggtccagtattatgatcagcagatgcgatgcttcactttcagagatttccagctagtactcatgcttgaggagttttgaaagattgttggatgccttctgggaggaactaagcctttcttccctttgggacactcttcgtccatacctagattatctaaagtgttaggaattccgatgatngaacttagagagaaggagatgaatatgaatggagttaagagcttcccgaagaaattcatggatgataacgcgggagaatgtgcaagtaaaggatggcggcggtatttcaagagtattct

SEQ ID NO: 183014 - DNA, 313 bp, Glycine max
agctcatgatataatataaggtctcatgtaattaagaatattaacaccagaagggctgggacgacccatataacccatctcattctcaaaatatattgggatcaggtgctttcttagctgtcctttaaaaatctttccccaaacattgcatttaaaagctattgctatcattgcacttttctttcttctgagtgggggtggacatattggacaaatgagtgaggactgaggagtgtctactgtttagttgagtaagatatgagagacatatatcttgatatctaggagctagttgagtaatctctctctttcg

SEQ ID NO: 183015 - DNA, 295 bp, Glycine max
  unsure (1)..(295): unsure at all n locations
aaagaaagagccacattgcttctgctgttgaggtacacaagttgagctgtgaaagctttcccttttcattttannagtgtgtaattttggctaattctgtttgcttctctctgatttgcatangatgctttataagttgcagaatttaaggggtatagcctacgcactcaagattcattgtcctgctggtaccctgactcaattggttttaaccttattgaacatgtgctttgccatattgttaagaatgaaaggtcaggtgcttgtttggcttttatgactggttgggatgata

SEQ ID NO: 183016 - DNA, 417 bp, Glycine max
agcttctaacttaatatttgtattggagtataagtatgagatgaaatctcacatcgaataaaaataaaaaaattaactatcatataattgagaataaaattcataaatctagattttaaggttttgggttaaagtatgatgtcaaattcatagagtgaatggtttaacgtaaatctatagacatgtggatcttttgtattgaaagactttttgattagtgagttcattcacataggtatgattaagttttatgggttactattggatattcatgaagtgtaattgattttacaattttattcgcataaatttcttacactatctaatgcttattaatagggatcagtttacattttgagaaagaacatttttctattattattattgactaataaacgggtgtaatcacattcacat

SEQ ID NO: 183017 - DNA, 468 bp, Glycine max
  unsure (1)..(468): unsure at all n locations
taaagggggtcaactgagttgcactatgaaactttgtattgtaccaaaattctatagaagaaatatactttgaccatttcttgggcaggtcacccgtgacacatcttanataaacttcgagtgctttgttgagggcctcaatttgctcatctgtctggggatgaaatgcagttgaccgcaaaagtttgactgcgtgcttcttcattagttccgtccaaaatgcattcataaatatactatctctatctaatattatttcacttggccatccatgtaacctcacgatgttatccatgaacaactgtgccaaaggttgagctatcttcccataatttctgataaatctcttgtaatatcctgataacccaaggaagcccctgagttctttaactgttgttggcctangccaacgttttattgccactattttatcttcatctggctgcaccccgttaaccgagatcaaat

SEQ ID NO: 183018 - DNA, 426 bp, Glycine max
  unsure (1)..(426): unsure at all n locations
agctngctaggtagatggtcagggctcggactggataccctttgtctatgctaatgacttaagtacctccagccactgtgaggtgaggccatggaggctccctggtaagagaatagggtgacacctctacaaaaggggatcatcaagctaggtttaggtaaaccaactctaatccaacctaccttaagacacttactcttacctctgtgtcgctaacttgagtgtcggtgtgtctgcacatgtacatcttatcattgtgtggggaataacacatacatgaaaactagtgtgggagggaaagcatatctttcactagaaagataaagatatcccctaagatcataagttatttgttatcagaagagagataagataaaatatatccttttgtattacattatcttagagggagattgagatttatca

SEQ ID NO: 183019 - DNA, 469 bp, Glycine max
  unsure (1)..(469): unsure at all n locations
tgtgaattctggcaattgtgagtgtaactgtcgttacacttaagcagttttcgagactgccgcttagcggaccgttgcgctaagcgagccagagagatgtttggtttctcagcgaggctcacttagcggatctgcgtgcttagccgatgtttcaaattcaaaatcagttttttttttttgaacacacaaaaggcttggcttagcgctcggataagaccgcttagcaagttatgcagatcaaaaaacctgtaactcttgctaagccgggctctctgccggcttagctaaaatgatgcattttaagtacaaaggagagaccgcttagctgataaggaatcacttagcgcttacattgtcgcaaggaattcagcttatccgccatgactggcgcttagctccatgaaccccacntatggccgcaaagaaatgagcttggcggaactattcgtgcttagccaacaatacacta

SEQ ID NO: 183020 - DNA, 457 bp, Glycine max
agcttatgtccacatccttggtttgtaagccttatttggagagaaataatcacaatagaagccattgcaagtgttaatttgcaaaattttatattggaattaggagttggactttgaccttgattggaaaatttggatttacatgcattcatgcaaataatatttttttgagtatataaaactattttaaattagtgtaatttcaatacaattataatagtcaattgtcggtcatgataatgagaacaatattgaaaggactgaacaaggacaaatctcaaccatgaacaatgaggaataattattcatttcctccattaacaatattgacaaaacatattgtcctgctatctccaccaaagacaacaagctattataaatattaaagaacatgtctataaatggtatgaataatctaaacttgcaataggatcagaaacactgtcttgcacatgat

SEQ ID NO: 183021 - DNA, 450 bp, Glycine max
  unsure (1)..(450): unsure at all n locations
tggactgtngagtctatagattattacattgtaacgatggatttatgatttcaaaagccaaacttaatcggattttgccacaagagaagatcgaagaaaaataatcatgatagtaatcaagctgaggtggaatgtggatttcacaatatggattctatgattattgtatcgttatgaatcattgaactagtaaggaccaaaagtggaattgttggttggtaaaaagtctttattggcattactatgttaacacttgacattattggagaatagagacaatattcttgaaccattagtattagagacacggngtattttagattcttcatcttaattcctaagattaanatgggaccttgtatacaaggtttgagcctgaagcattcatgtgatcacttactgatgcaattctaattagtgagatttctctggtactatngaaaactccta

SEQ ID NO: 183022 - DNA, 393 bp, Glycine max
agcttaagtttaatcacacttaaaatttctaggtacttcctaatgtatctatatgtacatttattaatataaattgtatatataaaagaaaagttaccataataaataattgtttttattaaatcaaataagagaccaataaaaaatttatccgaaaacacattaaagattaaattattggggtgaataatttttcttatttcattgctataataatataaatatatttttatgataatttttatataaataaaattaatgtttaaaataaatttgtttagacaagttattatttattgttttatttatcatcttcctacttatggaaactggtgatgattatctcttacctacataaatttgaagtttatttatacattgatatctatatat

SEQ ID NO: 183023 - DNA, 377 bp, Glycine max
  unsure (1)..(377): unsure at all n locations
ttgagcacccacgagtgtttcagcaccctagtacctcgctgataagtgacaaagacgaactgtttcagcaccctagtacctagcggaggagtgtatgtagggttttcttcaagccacagtttcaagagtagttgatgtaatcctactgcgcaagggcattggatagaagactccaagtagattgggccagagatccaagggaaggccctatggttctcatgagccttaaggtagatttcgagcccatgggctaagtatgagcccgcttattcttgtaaatattataataggtttttccttcattcgngccttgtattttggccattctagtagtatagggttttagccctgtatttcgaggccatttgagtagtctt

SEQ ID NO: 183024 - DNA, 382 bp, Glycine max
gatcttaagcaccgagctgcagctggataaagactgggagatatatttgtaagagcgaatccaatggatattctgatagattcagtcttcttttctttacagccacaactatagcttgagctatacttgttagtggagctggaccagatgctttaacttttacgtaataattgcttcccatgtagtagagtgtgcaaaagactaacatcaaagccgcaggaattcccaaccctattgcccagctcacgtttgactgtatgtagacaattagtgacaaagacaccatctgagcaaatgtgaaggtaaagaagtaccaattgaagaagctattgattcccttctttccagactcaatgttggggttgaacttgacaactcccaa

SEQ ID NO: 183025 - DNA, 474 bp, Glycine max
  unsure (1)..(474): unsure at all n locations
tggtttttcttactcacgtgacctgttgttttatataataattttgcctaaaagtttctagatttatagttggtggcaaatggatctaacccctaatctctaatgacttttaaattactccctctcatgtataagtaaaaaaaattattttatatctttgactaaactataaataaatctaactaattttatttttatttaataatatcattcctaaaatatttttcatttaattttaattgtattttattcatgatatcaacatttaataaagaatattttagagataacctcttaatatatttttagccgttccaaattatttgtttaaaataatcttatttttacttgaaattaataaaattaaaataatttcaactaatattcttaattagtgcgaatgcaattgttcttgcttatatatgaatattgaggaatttatcntaaaatcaacagattatcaaatgacagata

SEQ ID NO: 183026 - DNA, 376 bp, Glycine max
agcttctccaaagggcattgtaatttctagcttcttaaaaatatccagaaatctagctagatgtctttctttgtcttttatagaaggtaccaatggatatggtacttctttcccttcagctgaagatgcttccttctttttctctctagcacactcactcttgcttttcttcttctctttttttctctctttttctttgtctatttactcattttttttctttttcttcttcaatttctttttctttttctttatttttctcttcatttatttcttgggcactcaaatttatagatgtctccttctttttctcatcttctgcctccaactcttcattagacccactcaaagactctaccacaagatcaagtgctgg

SEQ ID NO: 183027 - DNA, 419 bp, Glycine max
  unsure (1)..(419): unsure at all n locations
gaaatcaagaagattcaagagaagactcaagatatgcaagaaaatcaagaaaaccattaagataagtataaaaagaattnttcaaagaaaagattgaatagcacaatttgtccaaaagagtttttcaaagaaaaatcttttaccagagtttttactctctggtaatcgattaccataagacagtaatcgattaccagaagcccaaaatagttttataactgttttacaaagtagtaatcgattaccatggacatgtaattgattaccaatgtttttgaacgttgaatttcaaatttcaagagtcacaacttgtgataaaacattntcaaacttgtgtaatcgattacacaacatttgtaatcgattaccagtgtttctaaatggtggttttcanatctaaacatgaagagtcacaacta

SEQ ID NO: 183028 - DNA, 270 bp, Glycine max
caatagggcaatatatcaatcttcaaaagtcaaatcaataaactgaagtttgtcggcaacaaagcataaaaaattcacaagaacagcagctcctattgaagtagaactagaggaggtatagttcgaatacccttcttaggaaagcaaaagccaaaatcgaactactcccaaatcactaaatcatagattcatagcatacaagtatgcatctctgaccgctcagttgcatgattccaccaacaatgcgaccaaatgagtcattgtcaaaca

SEQ ID NO: 183029 - DNA, 451 bp, Glycine max
  unsure (1)..(451): unsure at all n locations
tttgcaagccttatcccctctaatgatctggccaaccatgggagtattcccattagcttcctccaactgggcagcagatatccatatagccggctccttggacagcctctccctcgccctattaagaacctttttagcattgtcataagtctccaaccgcgcaagtgcaagccacagttcaacatgcaaaggacaacactccacagccctgtgaagcaaaagcctagcatcctcctcattagcaagctccacaacagccttccacagcctaacagaatcaggaatgtgctccaaccccttccttcaaaccctgctcttatttgcatcatcattctccaactttgaagcctgcatccacagcttcaccgaattaggaatggacttaacaccccgtgcaatcactggctttgcctcatccggattcgccagcctacaagcctncagccacaca

SEQ ID NO: 183030 - DNA, 466 bp, Glycine max
agcttggctcaacgtttatgcgagacagagacctttatgttagctatcatcgccaagtacgaagaaaagttaggtctagccacggcccacgagcatataatcgcggatgagtatgctcaagtatatgcggaaaaagaggctaaaggaagggtgatctactctttacaccaagaggcaaccatgtggatggatcggtttgctcttaccctgaacgggagtcaagaacttccccggatgttagccaaggccaaggcgatggcagacacctactccacccccgaagagatacatgggcttctcggctattggcagcatatgatagacttaatggcccacataattagaaatctgtaggaaacttggatgggctcttagaccccgactagatatgacttcctctttgaaataaaatgagatggtcccatgttcctactccaaaaagaacttgtgcatatcaaatcacctc

SEQ ID NO: 183031 - DNA, 469 bp, Glycine max
  unsure (1)..(469): unsure at all n locations
tagggaggaagctncaatggaggaaaagaatgagagagagaaaggtgtgagcacgacattgaaggagaaaagagagggagagaagttgaactntgaatgatgtagctccatgtggagctngtaggccttggatgttcatcatcaatggagtcctttgcttcttaaagatcaatggtagtgaaatggagaaggaagaaagattattggagacgccacttcaaggagaagatgagtcaagaacaagctcaccaccatatgaagccatggataagagcttgaaggtagaagaagatgagtggagggagaaggagagaatgagcacgacattntatgcctcaaatgaggtctgactctgaagtgtaattctcaaatgatcaaagttccaacaaatgcacacancaggtctctatttataacttaagtgtcacacacacatggagggaaatttgaatatctattcacatttcac

SEQ ID NO: 183032 - DNA, 307 bp, Glycine max
agcagcagcttaaaatcaataaagggaacttttttctcctggaaaaacacaatcaaaaaagactcctaatgaaaccccccagggcgggtataaagatcccgaaatgataatcaaaaaaacagctcctaatgagtcaactcatcgcagaagaactgaaatatacaaatctgagatttgtttaattttccgagaaaaaaaataagggaaaaaaaaaaatgatcgcaacccaaaatagtgtggcgacaacgccaaatcgacccaccccaaattgcaactatcatcaaaacctacttccacaaaaacggac

SEQ ID NO: 183033 - DNA, 396 bp, Glycine max
gcagctgcaacttgcaattgacacgccaagaaagatcttgtgcgcccaaacaaaggaaaatccgaacttcctactaggacgactgagaaaacaggggcaaacgaagagggtgagaaagagggagaaacccacgccgcgaccgccaaccctatacggccaagtcacccacacacccaacgaggacgggacacagccaataaaaaacctcctccttacccaccaccacaatatacacaaaaggcctccctaaacaaaccacaaagccggagtaccacacttctaggacgaacaccacctctaacacgcaccataaaaccacccacccaaaaacgaattctgaagagagaacgcccgccgaaaaaccccaaatgcacgggccaagccggctccgcccac

SEQ ID NO: 183034 - DNA, 199 bp, Glycine max
  unsure (1)..(199): unsure at all n locations
ggattatcttactcaaagatattttgattattctattattattttccaagatactatgattatttgactattatattcggattctttcgggttaatccaccgtacatcctgagcgatccgttatattctgcttcaccagtgatttaacgagaataccacaccaatgattggttgacactcatnttatccattattatgc

SEQ ID NO: 183035 - DNA, 443 bp, Glycine max
ggatccttaagtcacctgcggcatcaagcttgcagattggtcttcccagtgaatgatcattgtgggcccgaaaagaggaaaatttgatcatcctactatgacgactgataaaactggggcaaatgaagagggtgataaagagggagaaacccatgctgtgactgccattcctatacagccaagtttcccaccaccccaacaatgtcattactcaaccaataacaaacctcctccttacccaccacccagttatccacaaaggccatccctaaatcaaccacaaagcctgtctaccgcacttccaatgacgaacaccacctttatcacaaaccataataacaccacccatgatatgaattttgtagtgagaaagcctgtataattcaccccaattacagtggcctatgctgacttgctcccatatctacttgataattcgatgg

SEQ ID NO: 183036 - DNA, 342 bp, Glycine max
  unsure (1)..(342): unsure at all n locations
aacttccaaagaaaaacatccgattggattttttgattattttattcaaagatattctgattattttattattatttttcaagatatcttgattattttattattatcttgctctttttggtttaaccaacgttacagcgtgaacgatcggttatattttgttttaatagtgattaaacgagattacaacacanatgattggttgaaattcattttatcatttattaggcgagataacggcgtaaacaattggttaaagcgcgttaaaacaaaagaaaagaaatccgaaaatgaacgaaatgaagatgccagctcgaaaacatgaaatgaattgaaagtctc

SEQ ID NO: 183037 - DNA, 434 bp, Glycine max
  unsure (1)..(434): unsure at all n locations
agcttaaagtatgcccgggtcatgttgttgatgtattggcgatcagaattgccattccttggattatagggttgaaccaagctcatgcttttacaaaaaggttcatcaagtcaagttgaaatatggaagtaaccgtcttgcaaaattggggcaaaagatgaatcgagtcacatcactgcttcgtctactgccaaacatatttaggattattgatgtccttgttacttccagtttcaccttgacaaagatgtcatggatcatgttgaaaatctaaattgattcaaccccatatcctgcgtaaaaattcgcaatacttcaactgtacgtcattcgcatacatccatgcttttcattggttgcgttgctcattgcattctttccttgnaaaataaaataaaataaaataaaatgaacttatcaaaaagaaaaaaaca

SEQ ID NO: 183038 - DNA, 372 bp, Glycine max
cacttaccatacgatatccctgcgctatgccctacattctatgacccttaaactagacgagctcctccatctactcgctatcccataatcgaacacccgcctcccatcatcttctgctgacgatccacatattgagtcccctcctcgctctcaccggatgaatctcacaggaccacgcttcgatggctctgatcctttgtgccatatctttaagatcacctacttgttagagtaccacttgaccctatagcttgaatgtctgactatcgcttccttttacatgacaaagagagccctcgctgggtttcagtggatgaccagacttgaccgactcacttctttggatgtcttactatacaccttacataccta

SEQ ID NO: 183039 - DNA, 353 bp, Glycine max
  unsure (1)..(353): unsure at all n locations
ngctaaccaataaacgtgaagggcttattcttatacctttatatgcccacagaagagtgctaaatggtaccaaaacaaaaccttctatatcttcacacagagtatggctaaacggcacgaaagacttcagaaaattttaacgaaacagatgttttaatataatcggcaaagtgacttcaatctaataaataaacaggatttgataattaacgaaaatcatatgtgatcacacactatttgcagtattcgggcaatatgaattggaaagaatcccctcttattaattgagcatgtgaactggcatgaaacctgtaaccagaacctcccaccttgaccgaccaatctaagatgct

SEQ ID NO: 183040 - DNA, 366 bp, Glycine max
actcagctgcgttaacaaaaggttataaagataatttctttatctctttggcacaaatgccacaaatcacattgaagcttagtggccaaattactttcatcgcttcacaaaggaccatttcaaagggtttaaaaaattcattttattatttttgggtctcattaaaaaaaacaataagttaccctttcaaagggtaaaaattcattttttattttcagtttcaataaccaaatgagaccgataaaggaaatgaaagaaaaggtccaagaaacatatgctcgctctcaatggggtgttcaagggaaaaaaaaaaaattgaaagaacttgatttgaaagaacatatgacaaagcagggtataatctgt

SEQ ID NO: 183041 - DNA, 441 bp, Glycine max
  unsure (1)..(441): unsure at all n locations
agcntgtaggattatggggtacccatcacatgtggtactacgtggcggtcgggcgatggtgcacaacaagtatcccacatccacaaagcgcgcataaacccatcatcccctgttgcccacctccaactgagctcacgtactcccacatagcccatatcctcgtttttctcaacaccgggtccccatcaatcctcccaagcttccccaacatcaaagtaatacaacattcaaacagcacaaactaccacagccaagaaaacagggcaaaggcagaaaactctgctcaaaacaccaaccaaaatcacagcttttctcacttaaagatcccagtaacaatctcttcgatccaattcgttaaccggtggatcgactacaacattttactggaagtctatagtacataagcctacattgtgaccgttgggatctactagcaaacat

SEQ ID NO: 183042 - DNA, 439 bp, Glycine max
  unsure (1)..(439): unsure at all n locations
ntataagcgcggtttcgggagacaaaggtcaagcgttcacgatatgcgaagatgatattccgagtactttggatttggtacgaccatgccctcctgatttccagctgggaaattggcgagtggaggaacgccccggcatttacgcaacaagcataatgtaaacctttacggttttaaaagctctatagttaggcctaggctttagagtttttcctnttgttaaggctntgtgtcttttgtttttgaatttataatacaaggatctttcttcatctgttcctggtctctacccattctcattcatttgcatgtttacttctttntctgaaacggcagatccgatgacgagtcccncgaaggtactaatacctgngacccgtctatcgacttcgagccagaaatgaatcanacggaagatgaaggaaatgaggatgtggga

SEQ ID NO: 183043 - DNA, 219 bp, Glycine max
agccttgagcaaattctaacgacaatatacttttactcggatggctgactgagacccgtaatatatcgagacgctcggaattgattttcgatgctctgaacaaattcaaacgacaataactttgtactcggatgactgattcatacccgcaatatatcaagacgctccaaatggaataccgaagctctgagcagattctaacaaccataacttttactc

SEQ ID NO: 183044 - DNA, 162 bp, Glycine max
aaaaagaagaattggaaattttatgccaaactggtccttccttgcccttttacgacgcctccaatgccaatttttatgggcctggttctggttttggttaatgcgcggggcgaataagtttatccccccggatatttgttggtattaaaggagaaaaccttt

SEQ ID NO: 183045 - DNA, 455 bp, Glycine max
agcttcttgcaacattatggtcaatgatctgtctattgaggggaaaaagcaattttcctgttataaaaaatatattagccaattttgatgatgctttctgagaattgagaggcttgcctcctaaaagggattgggatcatgctatcattttgaagagggctcaaattcctaatatttgcccccacatgtatatgcattatcaaaaaaatgagatagagaagattgtgaaggatatgctttgtgctgtaaggcccaacactaaccctttcagtagccctgttatacttgtcaagaagtattgtgtgtggagattttgtatagactatcaggccatagacaagtaaacaccggataaatttccaattcccataatagatgaactactatatgtattgggtgatgcagtgaattttgtaaaagaactactcctttgctaacataaattcactcttaat

SEQ ID NO: 183046 - DNA, 473 bp, Glycine max
  unsure (1)..(473): unsure at all n locations
tgttggagattggtaaaaactgtgggaagtttggtttgggttacaagcctacaagtgctaacaaaaagaggattgctttatgaaggaaagagaaaagcttagctcgtttacaagggcgagaaccacaagtggagaggatccctatttgtcacatcaatgagagctttgtgagtgcacggtggatgcatgaagatcaagttgctatgttggatgaagagaccgatcaagatcagccgaattgggtgcaaccatgtccccaaactttgaatagagaaattggcagatcatagagcaacctgagatttatgatttgatgtaattaaacattcccaaatcctattgctatgcctaaagctntaggagtcacatattgtcgggcgtacttttcttttcaattccaatgattgttaataaaatgcatntcaaagacatattcccttctgcatcttttgtgcttccatctcttaacatat

SEQ ID NO: 183047 - DNA, 389 bp, Glycine max
  unsure (1)..(389): unsure at all n locations
agcttgtagtaggccttcatcttatcaagcatccacatggacagctccacaagacacttcacgaataatctgcaagtgtaatcatataaaagatgggaacataggaagtaagacaaaacagacagcaaattgtaaaagaatcctattccatcatttaaaaattgtatccccataaaaaaggaagagaaactataaattttactttgcatttaagaaaatgaaattaaactctagaagaatggattcactcatatatcacaattcgcagcaaggctacaaagaaattaggcgaaaggaaatgttacgaaataattacattcacagaagcaattgcattgaccaaaggaatagatttngttcatagtgaanagacattgagcatatacact

SEQ ID NO: 183048 - DNA, 453 bp, Glycine max
  unsure (1)..(453): unsure at all n locations
ntagcgaaacaccattgtgagcgaggagggaaggcaacaaatatttggatttggaacacgcaattgtgaccaccaacgaggcattntaaaataccacggatgcctgtttcgcatatactgctggcgaaaccaacatggctcatttcgccactactgctggcggcaccctgttgctcctgccccctctgcgtgcctagactgcagcctctacgcccctacactggcctactgcaatgtattgctagtttgactggcgaaataactgaggttactttgcaagtgccagtggcgatttcgctgccacgtggcgcgtcgcatgcatgtttcgccaacatgcatggcaagttacgttaaaaacggacccccgcgtaatttcttagcaaatagacccttttgggaaattagtttgtaaaactaaccccctggggtcaatttgcccatatgtgcatatca

SEQ ID NO: 183049 - DNA, 412 bp, Glycine max
  unsure (1)..(412): unsure at all n locations
tgagcatgcaagctcttaacactttctgcacagaagaggtaaatgatattaaaatttcaattattcgcaccggagagaagaaatatgagaaaaaaattaacaattcctacataatttaatcccaaaatgtgcggatatatatatataacaattatccctatttaagtgcttcgcccatggcatgagctaaaataataactttggggggagggggctctaaacatagttgtatatatcataaaataactttgtttcagcttaaagaagcaggcccttgataattntaccacacacaaaactgtgtctttgagtctttccactacttgagaaattgaaataagaatccgttcccgggcttcagaactctacttccagggaaaagtgaatgtggcacaaaatatgtaacaaatac

SEQ ID NO: 183050 - DNA, 348 bp, Glycine max
  unsure (1)..(348): unsure at all n locations
acacactcactntccgttctttttgtactccccacgtgtcctccatcgccgtccccattcagattttcccccaatcactaccgtccgatctcccgaatctcgaggcctcacccctttataaaacggcactcatcatttcgtgtcctcacacttttccagatctagcattccgttcccgttccgttcaaacagtttgtctttctcacatacactttcttcctttgtttgtcaccgcagtttcaatctcagatccaacattgttcagtccaaattcaacgcattccatggcaaatcctgcatccgcaagattctccgttcttattcttctcgtttctttgctagtcaaca

SEQ ID NO: 183051 - DNA, 461 bp, Glycine max
  unsure (1)..(461): unsure at all n locations
agctggcctaattaactngaaattgagagtttatgtattttaaacacacaaaatgaaaatactaagtttgtgttacctatacttaacggaaaatacttataacattacaaaataaccataaattgggagagtttgatactatttatacaagttttatacacaaaagttagtcgttttcaccgactaacaactcccccaaatttacaattttgcttgtcctcaagcaaaaagagaacagctcacttgtcctcaagtgacaatgacatgcagtgactatgtacaaaggtgtatgcttcaaagtgattgattgtatgataagagaatggagtaaaatgtcttcatcacttgtctttcacaaggtatgcagttatccaaagagaagaataaaatgtaacctgaacagatagatgaagttaggcataagatagatatcaatgagagttgcttaaaccacagtctta

SEQ ID NO: 183052 - DNA, 459 bp, Glycine max
  unsure (1)..(459): unsure at all n locations
tgcaagtgtcctcgatgttcccaaacaggctaataatcttgtttctatactaaccttacacggaatttgaaatgaaatgtacacgtgaaattcaaaattaatattctgattctattattaatagnggnttataggaacataatctttgantttgagaaaacagaatatccttatttatgtatagattaattaaataacctatataaacacgcatccaccatgtattatgacatgatttcatgtattatgacatgatttgcagttcattaccttagccgattttctgtcataattttcctcaatggatgctacaccaatcttctcttgtataacatcattccgtatttgtatgaccacacattcattttaacattctcatttttctactctaacttttctctcaagttgccctttanagctcaacattcactaccatatattatagctgtacgataaaac

SEQ ID NO: 183053 - DNA, 408 bp, Glycine max
tgcaagctgacaagttcaggtgcaggtgcaggtgttgtttctttggaggcacttgaattcggttgctagacctcaaggtgatggcactcacattttttggattctgcacaatctgtgaaggcaatttgtcagaattttgggactgagcttggttcaactgagtagccatttgccccatctgatttgtaaaactctgaatggaggctctcgtctcttgctgaaattgcatattctagatggtcatttgcctcactaactcttctaaggaaggttgaggagaagcctcagctgcttgttgtctttgtggtgattgctgctgctgctgtcgcattggaggaggaacatatggctctgttggaccatcaacattatggaagggagggacatgctgtctgttgtgtggaggac

SEQ ID NO: 183054 - DNA, 450 bp, Glycine max
  unsure (1)..(450): unsure at all n locations
tgcatatgttcgtgttanaaagaggaatcataacagaataatgtgagacatcaaacaagtgttgtgacgctgttagtccactggatgaaggaaacttgatcaaattgagtgaatcttagctnttctaagttagcaagttcatagtattcaagcatactatgtaaaaactcattgagtgataaaaatatattttctatcaaacatatattgtttgtgaaagccaggagtgacttagtgacagagaatacttgggtcttaattcaggggtgtagaagcaagcttcattatgatgaaccaagtaattntgatgatgccaaaagcccaagtaattgattcaagattgattcaagacttcaagatcaatcattaagaatccaatccgagattcaagagaagagatcaagaagcaacaagtcaggacttcatataggataagtattaaaagaattt

SEQ ID NO: 183055 - DNA, 331 bp, Glycine max
taatgaccgcagcagcaaccagggaaacgggacccacaattttttatgggaacgggcaaggccaaatatctctcccacgttctccaggtgaacataagcacaccatccccagttgcccacctttcaactgagctcacgcactcctacgaagcccttatccttggtcctctcaacaccgggtccccgtgaacccagccaatctttcacaatatccaaacaattcaatttcattgtatcatgaaggctccctgaaccaagaaaacatagaagaggcggaaaactctgcccaaaactcattcaaattccacagttgttcctacttaaatacccc

SEQ ID NO: 183056 - DNA, 470 bp, Glycine max
  unsure (1)..(470): unsure at all n locations
taacaattaaaagcatcagtagcgttcaaggcaaggaaagtttatctgtctntaagaatcaaccaccattcaaaagaaagaaatattgcagtagtacgggttaaaaacaacatccatagttatgcataacaattgcatcaatactgctaatagattttaactaatagactttagttgccaatacttttggttagattttccattgaacaaaacaaatatgaaatataaataacaggtttacccaaggaatgaaattaatgtcggcaaacaatattggactgagctcctgaaagaaatgcatcctatgacataattgactgaaaaaaaatcgctagctaatgatggataggaacctgtgtaccaatggaaaacagaagcatcaaatcaatgtgataaagaggaaaaacaaataagaagcataaaataagtatgattgacagggaaatgcaatagtgaaatagaagtaaatt

SEQ ID NO: 183057 - DNA, 321 bp, Glycine max
agctatgcttttacacattcttacaaagaatttatatcggtcggtttgagtcgcgacgcttgcaaaaggttcatctttgacccactttgtgaaaaggtcaacaaccactagcacgaatttcctttgccttggggaccgaacctaaaggtcctaagatatccattcccttaacatcaaatgaccacacaaagataatatgatgtaactctttggccagtcgatgtatcaaatttccaagcttctggcattggatgcatttttcgacaaatttgagcagcctattcttaaagttgtccaataatacccaaccctcaatactcg

SEQ ID NO: 183058 - DNA, 403 bp, Glycine max
  unsure (1)..(403): unsure at all n locations
tgcttctacagatcatgcactacttgaagcaatgaactaatagttttgttactccacccatatctggccttgacattaaccagacttaacactaccgacaacagcatcaaataattcttgcaccccgtatacaaaggattctctgaatcactttgcaatccttcatacataggggcatgtgcttgctgaaaagactcttgtccaaggtcacgaatcatatcctccaagcaatctcccatttctacatcaaatggttcagattgcaactgatggctccccactgcagtcactttttgtgcatttatgtctcaaggaaattntcaatggggaagtttctcattggagagtgcaccgggtcgttcagtatttaaaaataaaatgaatgaatccgagtatcgaacac

SEQ ID NO: 183059 - DNA, 461 bp, Glycine max
gcttataataagacataccagcattttatttgtccagtccaaggaccacaatattgggcccagacacattatacacaccctgttccaccacataaaaaggtccaaagaggaaggccaaagaaaaataaaaggagatctgtatatgaggacaatgtcacaggacataagctaaagaggaaattggctgagtttacatgtggaaggtgtggccaaaccaatcataacattagaagctgtaaaaatattggagttcctattaggccaaagaaatatgttgcaccatcaacttccaatgaggatgaccacctattatctcaagatgaacaagctttgaatgaggctgaagaagctgctgctcatgttcaacaagatccggtggagattaatttatctcagcctcatttgtcacaagatagtgacatggagggccctgcaactattggtccaccaataacaaggaa

SEQ ID NO: 183060 - DNA, 466 bp, Glycine max
  unsure (1)..(466): unsure at all n locations
tagtatggatatttagtcatgatgaggcactcttaatgaactattgtttanngtggactgtcttctcagcttaagtcactntttcagtgcttcagattatgtattcttctattgaaatcatgacatgtgacatttatttactgttctttaaacttatagagaactaaatgatgtttcacaaagaggaaagtagaccttgatctataatgacctacaattttggtgcttcagtgtatgggaagacagccagtaacattagtaggagatattgtatatcataaaagtgaggtggntttgtaatgattttngaatttgattgaccacgtattactgaaattattattatggtaagttacgcagaaggccctactcttattttccattcttttataaaaaaaagaatccacattctatgaaaagataattggtagggtntaagaagggacagagagcttacgagtggaca

SEQ ID NO: 183061 - DNA, 342 bp, Glycine max
cataactaaaagctattagcatgatcttgtgttaaatcatacacttactctcaagggttgatgcaatcctaccccacaagggcattggatagaagactccaagtatattgtgccagagatccaagggaaggtcctagggttctcatgagccttagggtagattttgagcccatgggctaagtatgagcccgcttatctttgaaatattataatgggtttttccttcgcttgggccttgtattttggccattctagtagtataaggttctggccttgtatttcgaggcattctgagtactctttctagcagggaattatttgtatattcatgtattttgacat

SEQ ID NO: 183062 - DNA, 445 bp, Glycine max
  unsure (1)..(445): unsure at all n locations
tgaactagcagtagagaatgacactcaacccaaatttgctcttttgcctgttgacaacaatctcaattgctaaaatagcgtacatcagctntgaaaaaatcaatttccgaagaggataagtcataagtgagtggctaattagctcaatctagggtatagagagagctttcaaaaaaggataaatcaaacaacatctgttcacaacgtgagaccagtatatgtcaaattgacttggacatgagagattntggatgtgtccttagctatggcattgttaggagtccaaagtacacaataacaaaaattaaatgaacggtagcgaagttaataacattttattggagtattcttaaaaaaaacactctntaaaagaggcagatggtgatggagggtcctcagtccagctttatgccaangaatgtagtaagctcctcctacatgttct

SEQ ID NO: 183063 - DNA, 471 bp, Glycine max
  unsure (1)..(471): unsure at all n locations
ngacgactntggactgaacatattctctaatgaaatgatgttctatgtcaatgtgcttagatcgttcatgatgagcaggatttgaagcaagacttatagcagatttattatcacaaaataacatcacagagggcacatcaacttcaaagtgaagaagtaacctgtgtaaccaaacaatttcactagtaacagaagacaagacacgatattcagctttagtggatgattttgaaacagtgggttgtttcttagaacgccaagaaagaaggttgtttcccaaaaagacacaaaagccagaagtggatcttctagtatcaacacaattggcccaatcagcatccgcaaaggcagtgaggttgagagagttctgagcanggaaaaacaaaccttgtccaggagcannattgatatactgcagaagatgatgaacaacatgtatgtgaggaactctatgtgctttcataaactgac

SEQ ID NO: 183064 - DNA, 402 bp, Glycine max
  unsure (1)..(402): unsure at all n locations
agcttgtccctctagtactcagtaaatattatatctattctttctgagcaaaaaaaaaaatatatatatatattgcttctctagctntgtacatgtatatagtttgaaatatgtaacaatatatgtaattgtaatagtattctgtattcttttagaaattatttatatttcttattatcatcgtattaaaaattgcgtcattaacattttgataaatgtattatatcacatatcatgctctatttaattaattattatttaactgagtatattatgcttcaaggttttgtatatttttaaaaattatattactattatcattattattcttcggcccatctatatatataatatactattacacttataattattagatataaaatatcaacgcttgttttg

SEQ ID NO: 183065 - DNA, 460 bp, Glycine max
  unsure (1)..(460): unsure at all n locations
ntagatacacaactcaactcttaagacagaaagaagagaacttcccttctatcaatgntaatgtagntcatgtcatctctagacaattattatcctcagaatgtccttattcttgatcacttaaatttgttatttgtgtttatatctatcatacggaaaatgaggcatcacttgctattctacctgatttgtagatggagcttgatagtatagatgaggtatgccttactattactataatcctctgcatttaacatggtgggaggagtcaatatttgttccttttcgtgtagtacatgagatgctatatgcaactaatacattattcctttctcaagtcaatatatgtaaagtcagtagaagtgacaatgtaccggtgagtttcattttgatgccatgcagaagttaaattcaatatgttagtagtcctttntgcattttggttcatagcgcccctatg

SEQ ID NO: 183066 - DNA, 366 bp, Glycine max
agcttctaaccattttattgttgaaggaaaatatgtttacttatgaatacatgtccaacaaaaagcttggactacctttttattttttggaccccttcctatttattctaaacattttttagaatcttcttatttcttatttttttgtttgcagaagtaatggagactgcaactactatgctaaatatgtgtgtgtttgactagctgaaataaaaaggaactcactagattggcaaaagttgttcaacattgttagtggtattgctcgaggacttctatatctccatcaagactctatgctaaggattattcatagagatctaaaaactatcaacattttactagatgcaaattggatcccaaaat

SEQ ID NO: 183067 - DNA, 440 bp, Glycine max
  unsure (1)..(440): unsure at all n locations
agctttagcaactctatctttttgtttagtcaaaacttctaatgctcttaatctctcctcatctaaatcaaccaactcatctgacatcattttccaataatggtcgattggaatgtccatttgtttttgtaccctggctgattgcaaatgtatttcgaccggaagtacagcatcatgcccataagtcaatcgaaatggggtagtattagttgattccttaggagaatttctacatgcccatagaacttgatctaacgttttattccaatttcttggtttttgggcaatgtgntttttaatcaagttaattaccaatttattggctgcttcgacctgaccattngcttgcgcgtaatatggtgttgaggttaataatcgaaagccagtttcttttgcaaattcttgcattttttcgccactaaaaactgaaccttgatcag

SEQ ID NO: 183068 - DNA, 444 bp, Glycine max
  unsure (1)..(444): unsure at all n locations
tggaaggctctntatcacaagatatacaatattactattactcaattctaattcttgggcttctttntattgatcaattgtttgtatcttatgctaaataaacccacaaaatcctttntttccctaattgcatgttttgtatttgatgtttgagaaaatgtgtgaattgaatcatgttaggagttttcttttaatgttgtaaaatctcactgacattttgatgtcatggattgtttgcctgcttttagaaaaaaatggtacataacggttcatgtcaaccttttcaaaatttgagcaacattttcagcaaagaaggtgatatgtgtcatgaccatgtaattggtattntgggtcaaaggtgaacattttagtgattagcaaatgaatttaggcaagtcaccttcacctttcagccgaaacattcctgtaacanatatttcacgt

SEQ ID NO: 183069 - DNA, 355 bp, Glycine max
  unsure (1)..(355): unsure at all n locations
agccttanatgtgtcagaacactttaataagatccctctatccaccattgaatcaaactatgtgagttgatctattgtgtttaggataaaacacttacatccaaatggatgaaagtatgaaataatgtgtcttcttcctttccatatttcataacgagtcttttttatcatcggccttatcaatatgttgtttttaacaaaccatgttgcgaaaagaatggtcctaaccttttcttgcaaagctctatttttcctttcaactaccctatcttcttgaggggttttcggtctaaacaaatgatgatatatacccttcctttcacaaaaaagggagaaacttaagattctcaaacat

SEQ ID NO: 183070 - DNA, 448 bp, Glycine max
gatccttaagtcacctgcggcatgcaagcttagtgacatccgtgacttgatcttatctaatatttccaagagaatcacgagaatcttccagtcatgtttccaattcagcattgaacactataggcaggggaaggactacccataagggtcagaatggtcgaggcagatcaaagtcaagagggaaaggtccgagaaatattcaaagtgacggtacttgttggaattgggacaaaaaaagtcactttagcaatcagtgcaaggcaccaaagaagaacaagtcgcacaaaaacaataagtgcgatgatgatgaatctgcaaatgcaccaactgatgaacttgatgatgcattatatttgaagttggatagtcctcgtgattcatggatcatggactcaagtgcgtacttccacactactccctctaaagaattattgtctaactatgtgtc

SEQ ID NO: 183071 - DNA, 432 bp, Glycine max
  unsure (1)..(432): unsure at all n locations
agatagagagagtcttgtctcttgatagtggctttattctagaagccgcgtgacatgagccttcgcattcgcccagaacacaggaccaaacttggaatgggcaccacgcgcaaccaaataagcccaattctgttcaaacattctagttccgggtgttgctaggagcacttctgctggggcacccaaacatagtgaaaaaataaaaatctcagttaaatattattttaaaattaaatagtttatgcatgataatgtaaaaatatttctactttcatttaattataaacttctataagtatatcagcaaaaggatgagtagcaacacatttctaacatactctnttctgttgtttcaaatntattgtaaactacaaaatcatgaatntggctcgttaaataagaaaagtaacccacaaaattatgatttcctat

SEQ ID NO: 183072 - DNA, 432 bp, Glycine max
  unsure (1)..(432): unsure at all n locations
agctagagattaaggtgttttatggtaaacatctttcttaagttacgttntgggattctaatagtacccgcctaattagactattaactgttgacctcaagaaattgatgattgaagtatgtcgttatagatctaccaatcacttttattagctttcattacttagttgtattttggactcttgattggctacgatttgcttggaaattgttataggttggtgaagatgacctatgactatatccaaaacacctaaataacatgattggttgtacttcaacctttagggtaaagtatagcatcaagttcaacaattttcctatatcaaggatgggtgatgatctacaactctataatttaattatagaacaacttgattctgattaggtaatcctatatgcaactatacaacttgggacacgctatatattt

SEQ ID NO: 183073 - DNA, 360 bp, Glycine max
aatacgatctgaacgaattaatattgatttcagcataataattacatgtgtttgtgaaataatttggttaatgtttctaaatttctatacatcttataaagaatcggctaattgaccagcacaagtataaaataaaataattactatcagctcaacctggattatggtttgcttggtgcaacaccatgttaatggtctcagttcaagacctaacaaacccttaaacaaataaaataaaaactattatcataagtagtataaacaaaaattaccttcgcgcagaattgtttttgccacgcaggtcgccggaggaagcaccaatctaaagggagactccatgtgatgttttgccacgatgtc

SEQ ID NO: 183074 - DNA, 430 bp, Glycine max
acctgagcatgcagctggcacattggaatacaatatgtttctgttgtcctgtatattaagaacaagtgttatctccttttactcatctgagggcatatatatctagcacaaaataaaagttgcagcagcaaaaaaaattgagggtttcgatattaatccaggctttataacaagagagttgctatgggatctttagaaatccaagtgtgggccaataagcccaccaagaccatgataaagaaggagaaaaatggaggaagaaagaagttttcgaaacaataccaaaatccttgaattttggagggcaccatataatctctctttattatcataagtaacagaggttcgtctgagaatcggaaactaattgaataaccaattggctcccataatatacacgccacagaatattgtgtgaatcttcccctca

SEQ ID NO: 183075 - DNA, 464 bp, Glycine max
  unsure (1)..(464): unsure at all n locations
taacagcgtgggatgagagtgaatgttagccaaccaaagggtttacattggatgtntgtgttggntacgngaggtacaaaaatacaaagaagctaaggatggataaggaggagaaaaatgactgtaagtgaatatcctttttatatataagtcatttnttaaaaaataaaattattaaagttaaaatatattttttgatcttataaaattaaaaatgttcatttttattaatgtaaaatttagttcttataaaattgaaatatgtcattgtgaaatatggagtctagctttacgctaaataatgatatattttaattttatatgaattaaaaatgtattaaaaatattagcgttaattattttgtgggtcatcatatttctatcaaaatnttaattaggtctttgaattttgttcttttaatacggctcttaactttatatatatttaatcgatctttctgtta

SEQ ID NO: 183076 - DNA, 388 bp, Glycine max
  unsure (1)..(388): unsure at all n locations
aaaactaagcctttnntttttttttgtgaaaggattcacggaggctagactcttgttttatggcactaaaagnatctatgcaaaaacttgaggtatggaactcattcatgtataggcgatggccttggtttttctacatgaaacttatttgactaagctgagataaagactgccttagttggcctacaatgtcatgaaataggttgaagaataacaaccaacttacaagtttggtgaaagtcggaaatcttccccataatgagtaaagacacggtagtttgcaaggcatgccattaaacctttcccttcaagcgcatttttgacatattcttattggtatatatatacagatttcacaatttcagcctcatcccttttcacaccctct

SEQ ID NO: 183077 - DNA, 291 bp, Glycine max
  unsure (1)..(291): unsure at all n locations
agcctggcngacaacacagtgcaactgagatatgatatgccctaccacagaacgtgtccaccaagaaacggcgcctatgtggaacaagatcacgccatcaaaggacagaaaggactagccatacaatagatctgacccagcaggcctgagtgaaaagattgaacgtacagcgcagaactaagctaggtaagtgagtcttcaccgactcatcccagatggagaaaagcctcttatgggggggagcaacccgcgcatgatgacgatcctacagcagaatctttcctcgaagga

SEQ ID NO: 183078 - DNA, 468 bp, Glycine max
acctagatactaagcttacaagaaaaaggggtccaatgtaccggctattgtctctcatttagtttgcaaggagaaattgtcattttgtttgaataatcaattaaaccacagggtatttatataaataattcacttaagtaacacagtatcaagtattagttctcatacaagaatttggtaaacaatgttacttaattttgaagcactcatttaagtattcgcattggagatactctatggtttttgactaccttgagaaaagtgaaggtagccatccttccaaacaaatgggaatacatgatgggaatgaactcatagttaagaatattagaatttagaataatgcattttcatcccttcattttctaagagaatttttgctctgattccaagggtatgcgctgacgttggtttttgatgggcaataacataagcgatcaggtttattatgaattttcatacattagc

SEQ ID NO: 183079 - DNA, 433 bp, Glycine max
agcttaatattactaagcattaagattgttaccaacaaacacttaaagaaaatagcatataaagtgggctcaactaccagtttgagaaaactacttagggatgccatagatattagagagatgagcattattgaaaagataacttagaaagacagatgaaatgatcattgttgtgaagagctggttgaaaatttcctggccagggattatactcaacaagaactaaaacttctacaactgcttcatgcaacaaaaagacctaggaaacttcataaacctagaaattatatttgatgccggtgagtctcaaccaacaagtcaccattggaatgcttgtcggtggcaagagaagtcacaatttgttgagaagtcccacatcgcttacctcaattattgggggggcagttatatacctatttggcaacttcacttg

SEQ ID NO: 183080 - DNA, 440 bp, Glycine max
  unsure (1)..(440): unsure at all n locations
tcttagacacctactccggatacaaccaaattagaatgcattcttcatacgaggagaanacgacatttatcactgaagatgccaacttttgttatatggtcatgcctttcggcctaaaaaatgcagacacaacataccaacgactgatggacaaaatcttcaaacaacagatcacatgaaatgttgaggtataggtggacgacatggttgttaagtctcaaagcatatcccaacacgtggcagacctggaagaagtatttgggcaactccgcaaatacgaaatgcaccttaaccctaaaaaatgtacttttggggtaggcaggggaaagttcctcggcttcatgatcacacactangggattgaagccaaccccaacaaatgcaccattatattggagatgcgcatccncaccaacattcaagaagttcagaaactaaat

SEQ ID NO: 183081 - DNA, 415 bp, Glycine max
  unsure (1)..(415): unsure at all n locations
agcttgactaggcgagttgantttagccttattttcactttagttattagtcaattcaattaagaatgagaaatcccaaagagaaaatgtccgattgatttttcgctttattttactaaaaggcatttttttattattatattattattttacctctttttttatttccaacgtggttacggcacgaccgaatggtcggaattcattttaatcgaaattaacgaatgatacaattcaaacgatcggtggaaatttattttatttttagattaggcgagaaacgacttaaataaatggcttaagcacgtcaaaagggggtataaaaagcgaatgaaaacgagaataaaaatacatgaaacaaaatgtggaccaccacgggtacataaaatgaattgaaagctcggtttgaagtcta

SEQ ID NO: 183082 - DNA, 449 bp, Glycine max
  unsure (1)..(449): unsure at all n locations
tcttttggaccttgaacaggcaactaactcctctttttatatatgctatgtgctcgcgactggtccctttcttcctttcgcaacttgagttcactattgctaccccatagagctccgcgaaatttgttccggccatactcttccttgcgagccctcttggtctcttgttcaagggctcttgcagtaattgcattctcttcccgtaacccggcacactccttccgaacgtgtgtagcggccaacttgaacttctccttggcaagttttgcctttcctaactcgcttttgagagcttggacttcttcgtcctcttccggtgtttcaaaactctctttgctgacgacttttaacttggcgagccaatctaaacctcgtatatgaactntcagccattcgtggtacccaccaatgatgccattacgaatgcctctaagctcttgatctttctt

SEQ ID NO: 183083 - DNA, 421 bp, Glycine max
agcttcattgagttgcttgtgttattgaattttatgcttcctaacgacaacatattatcgaagagtcactacgaggcaaaaaaaataatatgtcctgtgggtatggggtaccagaaaattaatgcatgccttaatgattgtattctatataaaaatcagtttgcggaaatgcgcaagtgtctgatatgtggggtatatcgctacaaagtgaatgatggcgaatgcagtgatgatgcatgcataaataacattcctccaacaaaggattgttcgtatcttctaacaataccaaggtttaagagattgtttgcatgtgcagacgatgcataaaaccttaaatggcatgcagatggcgaaataattgatgggttcctccaacatcccgttgattctccataatggaagataattgatcactttg

SEQ ID NO: 183084 - DNA, 477 bp, Glycine max
  unsure (1)..(477): unsure at all n locations
nggagcatgcttattacatggagtagatgcaaccaaaatatttcttctttcaaatntaaaattgtggaggtttgaccgagttatgttcaattttcctcatgtcagctttcatgggaaggaaaataacacattactaattaagtgagttttcttgtaagattcagttagaagactaattaatgtggcaccctctaccccgacatacatatagtgaaaggaaacatagaatagtgggagtaacttagaaagatttacttcacaattcaatataaaacttctcaacggagtaaaggttcacattcacccattaaccaagttaaaacttatcggtaagaatataaaaacatgtttcggctccaaacaaagaccataccggtattataactaanatttcaatgagaaacatagaagtaaatcatgttcaactacatatctcanactagcatatgataaaaacaacatataactctaagcccc

SEQ ID NO: 183085 - DNA, 322 bp, Glycine max
agcttactgatagattcatacacttagttttatttcattttcagacttaacatgatctgtttgtgtttatttacaaaaagaaaaaatatacaatctagacaccctctatttcataattctttacatcaatcaaaattgccaaatttatgaactgattactcttgtgctactattttaaaaatgctctaatttttttggttttctttaccatgtccaaatgcatattatcacccaaaattttggtatttgcagcatttggcatatgctcttggacctttatccaaggagaccgacaaattacttgctaaccataatgaactga

SEQ ID NO: 183086 - DNA, 463 bp, Glycine max
  unsure (1)..(463): unsure at all n locations
cttggagcactactannnaaaatattttttacaacgcaccttctactacggttctcgaanatcatcttagtatataaggcggtgacaattttgtaaataacagatttttcaacaaanatgattntacaaaaatcgtcttagaaactaccattattctgagacgatttcatgaaaaccgtcttagaaaattattattataagacggttttgtaaaaatcgtattcattgaaagtactctctactctttntactctccctctcactccgaccctcattntcattcacaaaccctatgaccccttgttcttttcatcttccactcagtccatcttcttccttgtaaaggccatggtcgtcgctagcttccaaaggaggttcaaagagtacaaaagtgactatccactccatttctttctctcttcaaatatcanacccgtgtcttttgtctctgtcacctcagtct

SEQ ID NO: 183087 - DNA, 417 bp, Glycine max
agcttgatgtcattgcgttaacatcaatctaataatgggggattcacttcaggcacgtcacacattaatcaagttggtattgttactgaacctcacataggtaaagttatttcacttacttgtagcataagcaaagctaagcctagagattggatcttagactcaggagcaactgaccatgttgcttgctctttaaaattcttctccacacacatacaaattaatcccataatagttcaatttcctactagtcaacaagtgatagccatacattcaagaactgtgaaattttatgactctctataccttgaaaatgtgttgtatttgccatgtttcaatctcaacctcatctattttcacattaggtgcaaatctgatatgtcaattgactttttctagtgatcattactcgatata

SEQ ID NO: 183088 - DNA, 426 bp, Glycine max
  unsure (1)..(426): unsure at all n locations
tgatcacatatatattcgccatgcatatatcattttattttttaatgccantcttttaattaagaataagccaaagatttacttccatgtccaattcatttattctctccatcatgataaaattataaaacataattctggaagaagaaacaacctcagttaaaattatcgaacaaattttctggctgtgataggttaatctaagtctttatctcgcgtgttcagctacaattatttggattatatacatactccacgatgaaaaacgacacaccgtcaaatacttaaatttcaagaaaagagggtgataatatatcggaaattcaacacttatatagatggcctattattaataattccatcacctattgagaatatgtttaatatctttaagttaattagaacaaaatacattaatttctttta

SEQ ID NO: 183089 - DNA, 389 bp, Glycine max
agcttccacatacttgatacccattctacattttcagcaaacagatcataactacctccaaggccaagatagagcaaattggagagattcccaatctgagatggaatcttccccatgaatcgagtataagagaggtcgagatgagtcaaggaagtcattgcacaaaggaaagaaggaattgacataccttctccaaggaattcattgcagctcaagtcaagatatcgaagcttagagagattcccaatctgaggaggaatcttcccacggaatccattatcagagaggttgaggtgagtcaaggaagtcattgtcccaaggaaagaaggaattgacataccttctccaaggaaataattgccgctcaagtccaagtaattcaaatgctt

SEQ ID NO: 183090 - DNA, 448 bp, Glycine max
  unsure (1)..(448): unsure at all n locations
ngcagaggtcggtggcagactcaagaataatggaatgtgtattggctntgnctcatacctccattacacttcagttgtacctcagcttgcttccctatttntattaattntgttcatgtttatgtgtgagttgaatcttccccgtgaggaccaaaagataaaaaaaattgtaaatataggaaccaaaataaatgtcttaaactatagggactaaaagaaaaattatcacaactataaggactaaaaaggtagttaaatcaaaataaaacaaactagtgcaaaataatggtggtgtggttagacacttttattcctaaatgtctcgttgtagacatatatacctctacatatgtgtgcattntgcaaccaccaccattagtggaataaaattttaaatgcaaacccttctatggtatatatcctatatanngcattgtagtagtaaata

SEQ ID NO: 183091 - DNA, 443 bp, Glycine max
  unsure (1)..(443): unsure at all n locations
agcttgtatgaagagagagattctactcatgaatcttttctcattnatctatgtatctaaaactgcacaggttattatcgggttcaacccaactaagtgacacctgaatacttcagccagttacttggatcttacttgtttccttttctcattgtgcagctaacaatcacagctatcataacaatgacagttcttatacgtactcagcgggctgtggacttgataggagcaaactatttattgggttcattgtactatacacttgtccgcctcaagactaatggggttgcagagttaatcatgactattactaaactccctgttgttgataagcagaaggaaatctatctctatccagcttgtgcatactgccttccatcggccattctaaagaatccattctcagctcttgactctatagtttggacatcacacacatatta

SEQ ID NO: 183092 - DNA, 447 bp, Glycine max
atcactccacattcttacactgcgtcccttatttctttctcatgaaacctctaccagatattcatattgctgctagttaattgtctgaaatctgaccccattcagccttggtctgaccccctccacctcctgaaatctcttcatatagaactgacggacctcttcttttaccctgctgggatcttctatccaacagccatcaactagcagacctcttagcatactatgtcttcggttcccattaactgagaggtggaagaagtgggagttgcagtccccttctttaagccatttggtccttgacttctgtcgaagcaaggattcatgagagctgactaccacccattattcttcctacagccgcttcttcagtctaatttcttgagcactcaactgtctttcgtctcctttttccagcagagtcagctccctctcagtccttgacat

SEQ ID NO: 183093 - DNA, 343 bp, Glycine max
agcttctcgatatattatgcgcctgaatcagtacttcttttcaaaagttatgaccatatgaatttctcgatatattatgcgccttaatcggactttcgtgtgacaagttatgcccatttgaatttctcgatagcatccgttgtgcaattacgagcgtctagtaatattatgcgcctgaatcggacttccgtgtgacaaggtgtgaccatttgaatgtctcgagagcacccgttgctaaatttcaagtctctcgatatattatgcgcctgaatctgacttaccggtgacgagttatgagcactcgaatttctccggaccatccgttgatcaattccaagcgtct

SEQ ID NO: 183094 - DNA, 417 bp, Glycine max
  unsure (1)..(417): unsure at all n locations
gcttctgattattatgtgcagaatcgacttctgtgtgaaagttattttctntgaatttctcgagagctttgggtgttcaatntccagtgtctcgatatattatgcacctgaatcggacttccgtgtgacaagttatgaccatttgaatttcacgagagcattcgttggtcaatttcgagcatctcgatatattatgcgcccgaatcggacttccgtgtgacaagttatgaccatctgagtttctcaagagctttcgctggtcaatttcaagcttctcgatatattatgcgcctgaatcggactttcgtgtgacaagatatgaccatttgaaattctcgagaccatacgttgttcaattacgagcgtctcgatatattatgcgcctgaatcagacgtccgtcgacaagttataccatt

SEQ ID NO: 183095 - DNA, 267 bp, Glycine max
attctaaatctataactacgtagcttatctctgctcaccttgacaaaatcatagtttctttaaatgatatgttagatcaatctataggtacacgagaatccagatgagagcctacaaggctatagcatggatagaggccggggtagagatggaacactttttgcaacagttagtcagacagtaaatgcttctttcaaaggaataaatagcctcgttggggttatcgtcttttaacaaagagatctccctataagggaggaaattcgc

SEQ ID NO: 183096 - DNA, 497 bp, Glycine max
  unsure (1)..(497): unsure at all n locations
gacctatgacactcagcttggcacatctttctctctgtcgctcacttgaggctatatttaagcatatacttgntnnatctcctaactaataaacttaattgaacatcagggtcttttgttctgaaagtctccccacctatccccctaacaaaggtacctctcaaagtcaatgtgtgaagtctgggagtctaccatagtcatgtccaccttgatatgtgcaagccaactctaaattttaataagtacaatgtataatataattntttgacctacatatattaaaatgaattangaaaagtgtgtttaggcaacttagactttttacaaatatacatcctaaatttaattntgtttcaaatgacccctaaaattatctatttggcaaatagatatcatcaactntaatttgtttcaaccaataccttttaatttgcatataaactttaatgcaaataaatattatattgaataatatntatattgtaccagttgaattt

SEQ ID NO: 183097 - DNA, 175 bp, Glycine max
tatttattctcgtttcattcactatttataccccctcttgacgagcttaagccattttatttaagagagtaatagcttagccgaaaaataaaagaaattaccaccgatcgttcgaattgtattatccgtcaattacagttaaaatgaaggccgaccgttcggtgttaccacaacc

SEQ ID NO: 183098 - DNA, 363 bp, Glycine max
  unsure (1)..(363): unsure at all n locations
aactaactgccctcttatatacgaagtacgaagattagtattgctttctcttttctcttccttccaacccatataaagtgaaatatgcctattctaagggntatggggaattnntacnggaagcactacnngggtgtcccggaagcccccgaaagcccattttttaaacaaaacggggaaggtggttgccacccttaaccaaaaaatgcccaaaacctgcccnaatatgaaaattactattngcaccccccattttacaaaatacaccccttttgcccttttttccataacattacggaacctcacgaattacgtaacgatacttgttttctttccgtaatgtcacaaaaactttgcggatta

SEQ ID NO: 183099 - DNA, 399 bp, Glycine max
agcttattcaggatatgggatgtcagtctgtatatgtttgggaatggaagcttgaatggagaagacacctttttgaatggagaagccaccttctttgtgtgtgtgcagaagctttaaaaaataatctgttttagtttaatgcagcatccctaggttgcattaaatctcattacaacagcatcactacatccaacagatgggaagtcacaaaaacaatgggtgggagtggagctttatttggagaaggccattcttttgacaatgaaattgataccgttggtgtttttctcaatgaggttcaagatatggccattcaacaacatggacctgatgtgtgggaattgactgctgaccctacaagtattatacactaaacaatgcctataaggtataatggga

SEQ ID NO: 183100 - DNA, 443 bp, Glycine max
ttaagtcacctgcggcatgcaagctttataagtgcgggtttaagacgcgattgtttttcacctcgatatgcaaggaggactccccgaggagatcggatttggtacggccatgtcctcccggtttccgactaggaaattggcgagtggaggaacgcccaaacaattgcacgacgagcttaatgtaaccttttgtagctttaaaactctacggttgggcctaggctttagagtttccttttgttaaggcattatgtcttttgttcttgaagttataatataaagatctttcttcatctgttcctacgcctctacccattctcattcatttgcatgtttatttctttatgtttaaaatgccagatccggcgacgagtccctcgaaggtactaatacccgggacccgacccgtcaatttgagcaaaaagcgggtcggatggagagtg

SEQ ID NO: 183101 - DNA, 426 bp, Glycine max
  unsure (1)..(426): unsure at all n locations
tagcctacctgagctaactgcatttcgttgcggcagccattgggctaagcgagcctagctcgctaagctcccatacttagtgaattttctgaatttcatggtgtcgctaagtgcaaccatgatgagcttagcgcacatctgttgcgacaatcgttaggcttagcaggtagtttccagctaagccgattatgcagaagcataattttctgcaacattcgctaagcagccccacatgtcgctaagcagtagtgtatattntgtgaaggcaagctaaacggaccatgtctcgctaagccgacaatgcctttttcagtttttgaatttgaataacttgtgttctgattaaactggttggtccctctatttgtagatggcctctatgaaacgcaagagtatcggntcaagacccacagctcaatatgatac

SEQ ID NO: 183102 - DNA, 413 bp, Glycine max
  unsure (1)..(413): unsure at all n locations
agctntgactcggatatccgatgaggccctaatatatcatcgccctcgaatatagaaatggactgaccacgcaaattcggacagccataacgtttgactcggattcccgaatgaagctcataatatatcgagatgctcttaggataaaaatgaagcccatcgcaaatacaaacggccataacttttcgtctggaactccgaataaggaaagtaacctatcgcgacgctcaaaatttaacatggaagactcgggtgaattccgacgggctaaagttttgactcggatgtccgattgaggcccataatatatcatcgcccttgaaagtagaaatggactgaccacgcatattcggacagccataacgtttgactcggatgcccgatcgaagctcataatatatggagatggtctt

SEQ ID NO: 183103 - DNA, 453 bp, Glycine max
  unsure (1)..(453): unsure at all n locations
tattacggacctatgaaactcagcttgaggattatggngtacccatcacatgtggtactatgtggttgtctggcgatggtgcacaacaagttttccacatccacaatgcgcgcataaacccaccatcccctgttggccacctccaactgagctcacgtactcccacgtagcccatatcctcgtttctctcaacaccgggtccccatcaatcctctcaagcttccacaacatccaagcagaacaacattcaaacagcacaagctatcacagccaagcaaaacagagcaaaggcagaaaactctgctcaaacaccaaccaaaatcacagctttttctcgcttaaagaccccagtaacaattccttcgatccaattcgttaaccggtggatcgactcgaaaattntaatggaagtctctagtacataagcctacattgtgaccgttgggatctact

SEQ ID NO: 183104 - DNA, 445 bp, Glycine max
  unsure (1)..(445): unsure at all n locations
agcttgaactntagtattggtatctctgagttggtcatgcccacnaacacaattgcttaaatttagcaacagagttgccaatacgtttttccaaatttttcaacatttgttacaagagtgaaaaatatgttggaaaagaagagtgaaaaaccaaagatcatgcatgattgtttgttaagcaatgaaaaaaagttggtgggggaagtgagtagggcaaacacaacagcggtatgttgataatcgatctaatctggtgttttattgattttattctctgaattgggttgttcctctgctttagaacagaactttgtgacatttacttagactaacagtctaaatcttctttgtgccaataacaggtgatggatcagtttcgtgaacctcaaaagaagccagttatttgcaatttgttttctggaaaaagaccatatatgctaatggc

SEQ ID NO: 183105 - DNA, 417 bp, Glycine max
  unsure (1)..(417): unsure at all n locations
gtaatttaattgatagacaatcacagttatttttcaatcacaattaatgtaccataaattaatttaatgcaaatatttaattgtaattgtaccctaattcaaagtaatattgaggacttactttgacatctaatttaattgtgattgagacagtaaataagatgtttattataattttggggcattaataacatattttaaattcccattaaattaggaattatctatatngaattttttttacggaattatctaatntaattgtgattgagacagtaaataacatatttcaaaattgactattaaataaaatattatagactaccaaagagaatntcaccggttaatatgaacgttgattattatggaattttgaatgaaagaataatttcaaagtgaaattttatcaaaattaaa

SEQ ID NO: 183106 - DNA, 313 bp, Glycine max
  unsure (1)..(313): unsure at all n locations
agctntgagcanatacaaacgacaataactttttactcggatgtctgaatgagtcccgaatatatcgagacgctcaaaacggaatactcaagctctgagccaattcaaacgacaataactttttactcggatgacagattgagacccgctatatatcgagacgctcgaaatggaataccgaagctctgagcaaatacaaacgacaataacatgttactcggatgaccgactgagtcccgtaatatatcgagacgctcgaaatggaataccgaagccctgagcgaattccaacgacaataactttttactcgga

SEQ ID NO: 183107 - DNA, 436 bp, Glycine max
  unsure (1)..(436): unsure at all n locations
acctatgaaactaagctttacattcatntcgagcttttcgaatattacgggacttattcttcatccgagtaaaaagttatnggagnttgaatatgctcanggcttcggtattccatttcgagcgtctcgatatattacgggactcaatcagacatccgagtaaaaagttattgtcgtttgaatttgctcagagcttctgtattccatttcgagcatctcgatatattacgggactcaatcagacatccgagtaaaaagttattgtagttggaatttgctcagggcttcggcattccatttcgagcgtctcgatgtattacgggactcaatcagacatccgagtaaaaagttattgtcgcttgaaattgctcagagcttctacattcaaattcgagcttctcgatatattacggggactcatcagacatccgagaaa

SEQ ID NO: 183108 - DNA, 295 bp, Glycine max
  unsure (1)..(295): unsure at all n locations
agcttgngctgtgcaaaggaggttaattagtgttccacagngaaaacaagagccatttctatggttgtgaggagtcatatttccattcggtagagttttcttcgtaaaaccatgttgaacaagtttagattaatgttatatacttgtttgagataagagttcgctccaaagtttcccccttctcattttcacttctcaaaccttgagaatccacttaattgaggggtttagatacctagattttgagttgctttggtctgaagctcggcttttagatatgatttatacttgattt

SEQ ID NO: 183109 - DNA, 198 bp, Glycine max
  unsure (1)..(198): unsure at all n locations
ngattattctgcaagcaacatgtagcctgtacttggagatttgtctgtataatatccaggagaaatattcatccgacaatactacgaatagagtaaagatatccttcagcgagggatgtttcatatatacctaatgaaaggccactaatgaacatgaagaaacactaacaaggataaaagaatcatcacttgagcatg

SEQ ID NO: 183110 - DNA, 463 bp, Glycine max
ggatccttaagtcacctgcggcatgcaagcttgcaataataggatcgatatcttttttttcatcttacagttgagcagagtgaagaacgttagaaaaaggtttactagaactgaaagagctaacagaaggtgcatataattcgttgaaagcagagctagtgcggtaatcggaaaggagtaagcccaccacgcaacattgagccttctcatagatctcctgaacagggttggcctgcaaatctgttcaacacatctaaatctaaattatgaatattttatttcaggctaaaggttaagcaatgaatatgataaaattaaaaatatagaaatagtaggggattatatattaacaagttgaaaatatataattcttttattacatgcgagaaacctcttagtagcattactatataataatcataatgtgatagtatataatataatatcatttaataataggttt

SEQ ID NO: 183111 - DNA, 466 bp, Glycine max
  unsure (1)..(466): unsure at all n locations
ctgccaagtttgttggaaagcgtctcaaatcagaatgtgctgtttcttaagcattatctattggatagattcaaactctgccttttcccttgaaattcaatgctcaaacaaagttaacgcttgaaaactatccttttacacttatggcttangcattgtcttctaaatctgcatataacatttatgttgaactgtgatccagcgccaatgattatatatcatttatagtgaatttgctaaacagcatgtataagcaagtattaaagggaatgatgatttgtgatatttgtaacttcttgtctagatatggactagtacactgcaacgaacaattctgacagccactccaattattggatttcccaaggttagtgtcatacttaagtttatggttgtgtacagtcatgttatttatttcacgagaaatatgttgacaaatgtacacattctgacttactatctatat

SEQ ID NO: 183112 - DNA, 371 bp, Glycine max
agcttgtacttagtataacttcttgaatacttattgaaacagaaagttttctaagctacatcaataaaaaaaatgtcatatactaacagaaaaataatgttaagcattaggattaggattgcctctatattagttaacaacatgatatacatacagtgtaaatctattttctatactaatggaatagtccattaacatgagatgatgcatgatgcttttaacatagacctacattctactttgttggaattgaaagtaattccaagaattgaaaaaaaaaggcttttttttcattgccttaaatttatttttatttattaatttttgttgattaaacattatttgttattagatttaaaacatgctacaaa

SEQ ID NO: 183113 - DNA, 462 bp, Glycine max
  unsure (1)..(462): unsure at all n locations
nttgagtcagatntagaaacacataatggcaagacactgaatctatcatgtgaaacctattatgagctaatttatttcaagtttttcccatgaagtaacaaattaatattaaaaaaattagtgtttgatcaagttttttaagaaaataagaatgtactgaaaaaatgatttctgattattttgagaaactactatgagtaatagtttctatttttgttgtttgctatctacaattcaaatttagtgaatttagggttttatatgaggatactatcctagcctctactaaagactgaccatttttcattaatttaattagagtcgtttcttanaatttggccttcatttaattcatcacaacatttattatgatctatatacagtacgggaagattcggngcaatctagtcctacaaataagaattgacaagtatatactttttttagaactaaattacatgg

SEQ ID NO: 183114 - DNA, 454 bp, Glycine max
  unsure (1)..(454): unsure at all n locations
agcttaagcaggcaaactgactatggcttttatgcagccaagtttgaggagttggtgaggtctttccctattatcaagggggagatgatggaagttccaaatgtgtgaagtttctgaacagcttgcaacttgaagtgaagcaagctgtgaattactagggtgtttgtaatttccttcttggttaacatgtgccagatttaggatgaagactcttgagacagggcgagcaattataggagtattggcccaatgaagaaaaaaaaagaatagacctcaacatcagggaaaaccgtactcaatccctcctaagcaatatggtaaccgccccaaaaatcagaggactgttgctctggggtttgcaagtggtagtggtagcaaacccaatattntccccactcagatcacttgttacaaatgtggtaagccagggcacatctcctcanattgtgctgat

SEQ ID NO: 183115 - DNA, 428 bp, Glycine max
  unsure (1)..(428): unsure at all n locations
actccatctcattgaagcgcatgtgcacttgtaattccaaactggtcaacctttctccaacaacggtttgaagaccatcaaacctgtccaaaatctatggaagaagagatgaatcttctccatgatgtccttcttcaccaacatgtcgagcacctttcttcacccaagagccatcatgctctttttgataaccaaaggatgcaatgactgaagtgcctattatgaaggatctcttgattagaacataaggttcanaatcaagagggatgttaaagtgttgaaggaagagagtgactagatgtggaaatggcaatggagcattcaatcgcaatgccttatgcatgcaatatctaacaagatgtgcccaatcaatttgtagacccttatganaggcccacataacaatgagatcttcttcagaaacctgt

SEQ ID NO: 183116 - DNA, 472 bp, Glycine max
  unsure (1)..(472): unsure at all n locations
tcacctgcggcatgcaagcttctatatnagctgaaccattatattattatactctttttgagtnttattcagaaaattacgcccatctctcttatcttagtgagagtgattctcctaaattcttgagtgattgaccaacactctgtctgggacaaaggactttcacaacctttgtgtgttgccctcgccggnacagcgattatttcctttactttcatcttanncttgttctttcaaaccataatttcagaaaatccacttctgcccagaattatctcgtggccataactcccgtttaacgcactcaaattaagtgattcttgagcctaaattgaatttcaagatgagacctctcacctcattttggaatcacctcatctgaagccctgtagcttgagtttctgccatttctaaatttctgtccagccaccacttaacctacgttttctcatctcattattccattttatgc

SEQ ID NO: 183117 - DNA, 394 bp, Glycine max
  unsure (1)..(394): unsure at all n locations
ctaagctgaccatccgaccaacccggcatagagagtcagtgttaactctgtatgtacctanataggcgagctcctgacagtcaacagataaaaggaaccaaaaccacaaagcaaggaggcttgtggtggctggccatctgtgaaacttgattgatatgtgagatatggtctctggtaatcgattacctagggtgggtaatcgattacaaggcttaaatatgaagacaggaggctaagatggtctctggtaatcgattaccacggcgtgtaatcgattaccatgcttgaaaacgaggtcaagaagcttaggaagcctctggtaatcgattacacaggggtgtaatcgattaccacgcttataaaagagactggaaccttgntgaggcctctggta

SEQ ID NO: 183118 - DNA, 422 bp, Glycine max
  unsure (1)..(422): unsure at all n locations
agcttctagaggaagcctcttaatgaagcttctagagattactacatggagcttcatcggtnaccacgcgtgcccagccttctttaaccgttggatcgtctngaaatttggtttgcaacttcaaaagacactcttccatgatctgaccgttgagatctgtgcgaagatgtctggaatcgctccacgcttccgttcccgagagcatctcttatttaagcatttcagcctttgctttcttgtagcttaggaaaaatgccatttcttcttctttctttcttccacatccatttctaaagttccaagtactttctccatcacccacatccaccattagccaccacanaccatcattgttctccattgaatacccacaccgagaggaacccttcaaccgaagcagaatatccaacttggcttgcggt

SEQ ID NO: 183119 - DNA, 463 bp, Glycine max
  unsure (1)..(463): unsure at all n locations
agcttctaaactntatacaagaatgaagctctgatacctcttgttggacaagtggcctcagatacttaaaaagggggggttgaattaagatatcacaacttatttccccaattaaaaattctagttatctttctattccagttataaattcccttaataatgaatttcttaaatatcattcaaatagaacaatttgaatataaatataaaacaataataaataaaggagtttaagggaagagaaaatgcaaactcagatttatactggttcggccacacccttgtgcctacgtccagtccccaagcaacccccttgagagttccactatcttgtaaattccttttacaagttctaaacacacaaggacaacccttcctttgtgtttagaattctttcacaacaagagaccctcgatctcttaatctcttttcagaatgaagaagaagaaaagaagaaatctct

SEQ ID NO: 183120 - DNA, 411 bp, Glycine max
  unsure (1)..(411): unsure at all n locations
acattcacaatgcgcgcataaacccaccaatcccttgttgccacctccaactgagctcacgtactcccacgtagcccatatcctcgtttctctcaacaccgggtccccatcaatccttccaagcttccacaacatccaagcaaaacaacattcaaacagcacaagctatcacagccaagcaaaacagagcaaaggcagaaaactctgctcaacacatcaaccaaaatcacaggttttctcacttaaagaccacagtaaaaattccttcgatccaattcgttaaccgttggatcgactccaaaattntactggaagtctatagtgcataagcctacattntgaccgtggggatctactagcanacattgagaactcattctgcactagactttccacagccaaccacacaca

SEQ ID NO: 183121 - DNA, 451 bp, Glycine max
  unsure (1)..(451): unsure at all n locations
agctatctaaagttntctggtttccaaaccttgataacaagagtgtgctatatatttttcattcctcctctctttgccaaaaagaattcgccaaggactaactgtctgaattttttttgtatctctcttctcgcttttccaaaagaacaaaggactaaccacctgaattcntttgccctcctttctcccttgtcaaagaattcaaaacgacacagtctgagaattcttttgattcttccctttcccataaacaaaagatttcaaaggactaaccgcctgagatatcttttgttttcccttcacaaagtttcaaaggactaaccgtctaagaactttgtcttaacacattggagggtacatcctttgtggtacaagtagagggtacatctacttgggttgttgtgactgagaacaagagagggtacatctcttgtggatcagttcaagtgga

SEQ ID NO: 183122 - DNA, 447 bp, Glycine max
  unsure (1)..(447): unsure at all n locations
agctngagagagtgtcatgcatcttggatctttttcactttaaaagctgattccactggcttcctagtttcagctacctattggatggggatcatggcagttacggtccagctttccatcggggattcagtcacaaaaaaaacttagagatttaggcttgtctgaccacggattattgattctattcctacacagatgtgggaagcacaatctcaggttttgtatttaaaccactctcataatcatatccatggtgagcttgtgactacattaaaaaatccaatatctatcccaactgttgatctaagcacaaatcacttatgtggtaaattaccctatctttcaaatgatgtgtatgggttagaccntttaaccaattcattctctgaatccatgcaagaatttttatgtaacaatcacgacaagccaatgcaattagaaattctc

SEQ ID NO: 183123 - DNA, 412 bp, Glycine max
  unsure (1)..(412): unsure at all n locations
gagtggtatcacagcattgaactaagttgatcgttccaatgggatgatgggtttgattgctgcacatcaagtgtgtgattgtgagattctggtcccatgagtaacagaggtgaggtactctgtgccttcatggttgggatgatgttgcaagcgccggttcgttgttgagagaaaagatgatcagccacgtctcgtgtgtgcataggagagtgtctctgccctctccacaacattagtatcaacaactgacgttagtcgaaacttgatggtgagaatcaaaagagtaaaacactatattcactgagactaaagttgaatgatgtaaactatatngannaacaaaatatagtataactttatgatcaaaaggataataaaccttttattatttattttttgtacggctatatta

SEQ ID NO: 183124 - DNA, 449 bp, Glycine max
  unsure (1)..(449): unsure at all n locations
agctntcattgtctcactgttcagtcttgttatatacctccaccactaccatattaaaaggaggggctttgcaactttcgaaattgcatatattagttaaaacgcaactatgtaattaataattaggagccataaagatgagggagcagaaagataccttangatgctttcgattatgtttggtttaagaaagagatggttctttctttcttattttccgtcacttttttccaatccttaaaggaccacaaatggattttagaccaccttcttcgatgatttaatcgaaaatcctaaacctgcaactgcaagtgtaaccacaaactggcttatagagtttcagaaattcagatgttaaggataaaatagatttttcacttttatatattttttaaagtaattgataagttaaatactggtagaaaatctagtccgtccattatttaacg

SEQ ID NO: 183125 - DNA, 426 bp, Glycine max
  unsure (1)..(426): unsure at all n locations
ggtgaaagggatattccactgctgcaacctctatccatagaaaaatgagacacttacatcacattttcgtgttagagtaggatgattgaaagttaattttgggctgcatggcttggtcaccatgcttcaattagttgaaacactattggaactttatgtcagtagccccaagctacttttatttttattaataaggacaaactgcctttttttattccatgttttctttggtgctcattttagctggttagcatccactagtgtaattattattggttgatggctctntgtaggataaaccaattntcataggactagaaagttgtcaaaatgtaatgttaattgaattggttttggggtgtattaaatatttacaattntatntgatctaccaggaacctagtttaattntagtggtacgatata

SEQ ID NO: 183126 - DNA, 426 bp, Glycine max
  unsure (1)..(426): unsure at all n locations
agcctttacctttcattgtaacccttagactttcccggnccagccaacaatgtcatcataaagcaatgttgatgttcaaaggacactttaaatccctttttaatcaactgacctgcacttagcaagttttggtcaatgttagatacataaagaacatctgatattaattcgatacctgaacacgttgaaattgcaacagttccttttccttttactggaatatagccaccattcccaattctgacctttgagacattagttggcttcaaatccttgaatagagtcttatcatatgttatgtggttcgtacaaccactatcaatcaaccaactttcacttgattcactactcaagaagcatgtggccacanatagttggtcctcctcgtcttgattagcaatctgagctccctcatcatggtgattt

SEQ ID NO: 183127 - DNA, 419 bp, Glycine max
tctcagctgatctagctactgctatgcgctgcttttgcttatttaaattgtgtgtattatgtctgatcgagtggtgatcttgtgtattggattgtgattgaaagcttgattgatgatctaaagtgaattttgaatgataagtgataaataatgggaaaatgctagtaaattgatctggctactatatgctgttttttctctaataggaatgtgataactcactccctgtttgttgtttgtgtttgaatcctgtgatgatcttgaaccttgtgttcgggggagcagatgactaggtgaagtgcttaaaggaaccttgtgctgattgacgtctggacacaatgctctgatatgatgtgacagtgtggcataagttctatattaattgcataatgttagtctatcttattttatctcactga

SEQ ID NO: 183128 - DNA, 421 bp, Glycine max
  unsure (1)..(421): unsure at all n locations
atgtgaattgggccaaaatggattgagggaagtgtggttttccaaatatgctctttgtgcagaatttgctggtaaattgtgcagcagaattttgcacaagtgcagaaaaatccatgcatttgctgggtgtggaaagagtaatgtaaaatgagttctggatgtttgctagtagatcccaacggtcacaatgtatgcttatgtactatagacttccagtaaaattttggagtcgatccaacggttaacgaattggatcgaaggaattgttactggggtctnnttgtgagaaaagctgtgatttcgggtggtgtgttgagcagagttttctgcctttgccctgttntgcttggctgtgatagcttgtgctgtntgaatgttgtatngcttgggatgtgtggaagcttgngaggatngatgggga

SEQ ID NO: 183129 - DNA, 443 bp, Glycine max
  unsure (1)..(443): unsure at all n locations
agctagtgctgaggttgcttttctccgactactcttcaaaggcaggtttctatgaccatccataggacaaggcccagacaaagtgtacggacaatcactttgcagaggggacatctccaactccacagcttgcaaagaatgcattgagaaagcaagccgagatatcatgaatacgtgcaagagtgagaatgcaatgatatggtataacctttgccaagtacgttactcctttcagagctttaaggtcgtggcttatactggaaagtatccgcagcagaataatgaggagaagaaagtatcggatcctataagatttagggaatacttgacatatttaatgagcaatctctcagacgaggctgctttcaatcctgataagaacatgtntgcagctggggaagttgactatcctgtgaacaagacaatatatggcttagtccaat

SEQ ID NO: 183130 - DNA, 437 bp, Glycine max
  unsure (1)..(437): unsure at all n locations
tggctggctagntacttgattcgaggaataaatcattctcttataatttggagatcaatttttggaatgtagttgatgataattntgaaacttatactctgggatcaatttttgaaatgcacgatgtaccggtgtgtgcaaaggagaatgtattttctggcgtatttctgaaaaaataaaaataaaagaggagcgtactagtaacataggatagtggaaataacatgagtttttttcttaaacatttttttgggtcctgggtatttacancctttttcattatgattttaaacttgctgggctcangagatgttgggtaaaaacggtgttggttgtttgaagactaaagtatttctttttctggattggctttattaattccagagctagtttcaaatgttaacaagtggtaggaaaaacattgactaaaacatttt

SEQ ID NO: 183131 - DNA, 106 bp, Glycine max
gatgttgattgaaatgagaaggagggcttgaatatatatgagcaaagggaggaatatggagtatatatatgggccccccccctggaatttttataatttactattt

SEQ ID NO: 183132 - DNA, 403 bp, Glycine max
  unsure (1)..(403): unsure at all n locations
cttggctgggatacatcataagtttcttaatatcaaggattttatttcttatgtttggacaaagtaaatacaatgaatcatatcacacgtttagcaagaagctgctttttgaatttttagattatactttgtatacaaactctaatatgtttttttaatatatttttcttaaaactttgtcatcgcttcttaagttgtaaaattgttcgaaaaaccttttaattaatgcatgtactaagttgagcttgtttgaatcaaaataaatatgcaacatgcacacacatatgagaagcttaaagataaaggatataataaacaaaatttatgctagttcatccatataccttgggttacattcagtccctacactcgtaaaattnttactatgaaaaacaccaattac

SEQ ID NO: 183133 - DNA, 423 bp, Glycine max
  unsure (1)..(423): unsure at all n locations
agcttatgctgattatcatgtgtatcaactcaactacaccatggactcatatttatctaatcaatatattaaatacgaagattcagttttgctgattaccatatttactttatgcactaaacctagatattacaatgagccttgacatactaacatgtttctacagttctttgtgatgatggatctatatttgctctcttaataatgcaggacccaaggttgttaggtgagattcatattgcactgctaacatcaaattataaaagttattgaagatgttgcaagaacaccctctactgggtgaagatgtaaccaacacagtgttacaaactttggtggggggcatccacaggttgaaggggtgagtaattttcttcattcctcgagttttaaatatattatttggtttgttctntccttctc

SEQ ID NO: 183134 - DNA, 274 bp, Glycine max
  unsure (1)..(274): unsure at all n locations
tattattgcttcaagcaacttccctggccttaaggatctccttagccctacaccagcttcaaaaaattttcctatcacaaaaacactaaaaggattggtttcctcatcaacatcatcaccatctcattctgatcttgctcgagagtttgagaagctntcagttgaaagcaatgtcaagttgtcacctcaaggctcttcctcatctccaccttcatgaccatcactctcagattatgtgtttccgacgatggaaatngctgaaaccactgaagaa

SEQ ID NO: 183135 - DNA, 458 bp, Glycine max
agctaggatctaatgatcataaaaaaatgttatgtgtgttattaatcactgagaactctcgatcgaatcggaaaacataaatcagtgacaattcaagttatttaaagaagtattaatgacgacctaaattcactaaaactctccaaatataagagaattgcagggaattgaagttaccacccatgactaattaaatggtagttagtagctgccgttgagtacttgtacttgtgtgaaatttcatttttttttttgcttttcaatcaattcaattcaattccgagaataactatctgctctagttttctctcataatatgatcactactaaaagaaaggctttttactatgtacctttgaggtcggtcgcaatatgagcattgtaatagggaggacatgacacttatgtaaatatcttacattctcaatgattgcttcgtgtaagaccattttcgtatg

SEQ ID NO: 183136 - DNA, 421 bp, Glycine max
  unsure (1)..(421): unsure at all n locations
aagaagtagttcaagtctactaacttctacttttataaccaactatctactactttctaaccattaatgattggcttctaacatagctaatacgtacatcggttattcttgtccctatgtacaatgtgtatggataactaggaattacaaggttttctcttcattctgtcctccttgtagaataatttattatgcacacaatttaatgataaattggttcctaaactttatcgtttaatgtcaaattggtcattgaaaagtacaacttattatcaaaattggttgtgaacattacaattcaataataaaatgatcttataaacttaatggtcagaactaattagtcgcaattttgcacatttagggactaagtttgtattttacattnttcgagatgaatgtgtcaccgcatcacactttc

SEQ ID NO: 183137 - DNA, 456 bp, Glycine max
  unsure (1)..(456): unsure at all n locations
agcttatttattatagttgctggcaaactgtactatatatngagattataattagcggagaaaccaccacatgacaagagagtgtgtgagaagacagattgtgaaacaaagtcactttgttgagaaaaaagtgtctttgtgtgagagtgttatcgttctcgtaaccattgaacgaccactccagtttgcagagtgatacactatttgaggtgtgttacaatcttgtaaccatttttgtgatagtgaaatacttnttgaaactattccatggacgtagactagaaatgtcgaattacgttaaatcattgtgtttattattattcttctatggtataattgttattatgtcctcacgatcctttgtggttgtgagtaattttgtctgcggggacgttgatttctcaataatcaatatcggtgctcaacacatgagtgaattgcacactttctattgca

SEQ ID NO: 183138 - DNA, 329 bp, Glycine max
  unsure (1)..(329): unsure at all n locations
cagccggtcggctcatttcaccctgcacaacatgtattctgggagntgtgtacattgctaaaaaacctttgcatgggcaccacgtccacatgtaatctctaataataattacaaaatcattaattttttagggaaataaattaataaattactatagctaaaaattatgtattatatatatatatataataatataataataaattaagatattgaatcataatctcatataaaactttatatatgtaattataaaacactcaagcaatattagtcctatcttttctctgtgctatcatcttattaaacactgagggttgttgtatgtg

SEQ ID NO: 183139 - DNA, 460 bp, Glycine max
  unsure (1)..(460): unsure at all n locations
agctatgagaatngcccaaactccctctctatttctgatttcaggataaataggtggccttgtcgtgctcgtgcgcttagcgtgaatctggaccgcttagcgcgcattagtgaatttcggcttagcgcgcgtcttcttgctcagcggatggactcaagcgacacgcttagcgggagacacctcgctcaacgaacatgcacagctcgtccttcttccagattctttgtcgcactcagccaaaggactgttacgctcaacggatggctcgttgagccggcagattggcttagcgagcagatcaaaatcaacgcttcacaaaattgcctaattaacctgaaattgacaggaaatgattattaaatacacaaaatgggagtactaattatttattacctatctttaacaaaaagtaattacaacactacanaataaccataaattggaggagtttgatacaatt

SEQ ID NO: 183140 - DNA, 437 bp, Glycine max
  unsure (1)..(437): unsure at all n locations
ttttaccaaggggacactactcttaaaacaagaatggcatacaaccttcttccataaatacaaacatcaatggaaatttaaaacaagcctatgcgcatgtttccttacgaacgttcacttgcggaagacatcctattaactaagaaaaatgcacccatatacaatcaaggtagcttcattacctagaatatttacatgtacctccaaggtgtatttgttatttacatcacacacacctccttggctgaatttacatacatgcatactcaaagcattntggggtaccaaaaactgcacatgcgctcatcttggtatttctaatacccctacatatacaaacttcacgatgaatcttgactggctacacaataaggtgctacatttcatgctttttnntcaagtttactacctanagccgcatgcaaattcaaacatat

SEQ ID NO: 183141 - DNA, 378 bp, Glycine max
  unsure (1)..(378): unsure at all n locations
agctcgccgccacggagtgttccgactattctcttgttttgnggtatataactaccaaagggagagccacgcacccgaacagccaatggttgatacatggactgagatgaaattgatcatgatgaagcggtatgtgccggctagttactcaagggacttgaaaattaagcttccanaaacacacccaaggcaacaagggggttgaggagtatttcaaggaaatggatgtgctcatgattcaagcaaatattgaagaagatgaggaggtaactatggctcgctttcttaatggttcgactaatgatatccgtgatattgttgagctgcacgagtctgtagaaatggatgatttgcttcacaaagcaattcatgtggagc

SEQ ID NO: 183142 - DNA, 193 bp, Glycine max
atgctctctcgcgtatcattactttcttgccgaacaaatgtggtcttgagttgaaacatgtaaagagatcttggaaaattttaatcggaaaattcaaaaaggttcttaacataagcttcttttcaagaaacaatcggtgtcctaatgttctctaaaattcgctgttgtgagcacataacgatgttaatgggca

SEQ ID NO: 183143 - DNA, 448 bp, Glycine max
  unsure (1)..(448): unsure at all n locations
agcttagcgtcagtcgtgcactgagcctgtctgaagacacctgttgcgcttagtgactgatctcacgcttagcgcacggctntgatgctgatgtctgccaaattcttctgtcgcgctaagcgcgctgaagatgggcttagcgggggatgcgcgcttggcccactgatgactaagctcaactgtcacttttggcacttcatgacttagcctcttttcacctgaaattgcacacatttcatcattaaatccaatggacatattctagagacagctttatccataaaacaatttatttacaaaaatcactaaaaaaaataaccataaattggggaaatatacaatttttggaaaatgatttctatacaaaagttagtcgtataaggcgactaacagttgcgacaaggtatnttngtaatatcacatgtattaagtgcactatttgatgtgt

SEQ ID NO: 183144 - DNA, 442 bp, Glycine max
  unsure (1)..(442): unsure at all n locations
aatcaaagatgtgaaatagaaggaacgaataacaacttatttttaatccatttatgttgacctatgggacatggtggaaaatggaaattacattccatataacgatcagttaaacaaaattcctaaaagtcaatggacaaaggagcaatcagattctctcaactcgaagactcgaaatgtgatgctatatgctctatcagaagaggagtacaccaaggtacacaactttaaaagtgtcaaacaaatgtgggacactctagctgtaacgtatgaaggaacgtaacgggtaaagaagaacaaactaagtctcctcactcataagtatgaaatcttctctatggaagaaggcaaagacatacaaagtatgttcagacgctntcagacaattcttaattaattaagatntataggtagaacttatgtatactatgatcatattgac

SEQ ID NO: 183145 - DNA, 453 bp, Glycine max
  unsure (1)..(453): unsure at all n locations
tgcagctttcaaaataaaatgtcataacttttcactcggatgttcgattaggcaatcacttattgagacacttgaaattgaacaacagaagctctcgagaaattcaattggtcataactttagacaaggtggaccgattcaggcacatcacatgtcgagacgctcaaatcgaacaacagaagctntcgagaaattaaaattgtcataacttttcacacggaggtccgcttcaagcacatcacatatggagacgccagaaattgaaccacggacgatctcaagaaattcaaatggtcataacttttcatacggatgtccgattcagctgcatagtatatcgagacgctgattattcaacaacggatgctctcgagaaattcaaatggtcataacctttcactccgatgtctgattcaagcacattacatactgagacgctcgaaattgaacacc

SEQ ID NO: 183146 - DNA, 363 bp, Glycine max
  unsure (1)..(363): unsure at all n locations
agccaagagtgacttattgaccaagaatacttgggtcttaatcttatggggagattaagtgtaatgtcaggagtggcttatggaatactcactgtaaccaaaagtggcatagagaatactttgttgtaatcaaagatttgattagtggaacccttcaaggtttgaaagataatttgatgtaacccaagagttggggtgaactagtataaaatctttgtgttttcattactgcttctatataactagatcttttctttaagtcacttctacgctatcttatncgaagtttgtcaattgcgtttctaagaacaaatttatttcaaaccccatggaggagaccttttgtcattaatattttttttg

SEQ ID NO: 183147 - DNA, 448 bp, Glycine max
  unsure (1)..(448): unsure at all n locations
agcttggaatggagatgcatttattgtcatttactgctcagnccccaacaacngaatcggctgccctacttctgatggaatatttntctttttcttttttcgttatctttcttttattcaatatataaaagcaaattacatacatttatgatcaagcataattaccatagatcctatacgttttttaaaagttatatgatatttttcacaatttttttttgttatcaataaaaatcgaaacaagtaaaaaaatttataataactcattcttcttatttaaccaagttaatcaatttagcttttaattatttgaaatgattatactaatattattagttatntgacattataccacatctgtatgagaagagttactgtactttntntatcataaataaaaaaacagagagacacttcttattgaatttcttgcttaaaaatcatgtga

SEQ ID NO: 183148 - DNA, 360 bp, Glycine max
  unsure (1)..(360): unsure at all n locations
aagaacaaagagatatggtgcgaaaggatctcngtgacgcactcctatattagagaaaagtgatccaaaaccttacccttccaaagcaaactcatagtgggtgtagacatgcaataacaaactagttgcacaaaattgttggggtagccaatgtcttgaagagtntccttcacaaattcccacttgagacaatcataagccttatccaagtccactttaatagtcatccaacctttcttccncttccggcatctcatggaatggaagatctcttaagcaattgtgatgttatcaccactgtgtctattcggaatgaagctaacttgacaggggctcactagcttcntcataagaaactct

SEQ ID NO: 183149 - DNA, 438 bp, Glycine max
  unsure (1)..(438): unsure at all n locations
agcttctaaactntatacaagaatgaagctctgataccacttgntagacaagtggcctcacatatcttaagaagggggggttgagttaagatatcacaaactatttccccaattaaaattttatttcactttctattcaagttataaattcccttaaaaatgaattccttcatattgattcaaatagagcaatttgaatatgaatataaaacaataataaataaaggagtttaagggaagagagaatgcaaactcagatttatactggttcagtcacacccttgtgcctacgtccagtccccaagcaacccgcttgagagttccactatcttgtaaaagcctattacaagatctgaaccacacaaggacaatccttcctttgtgtttagatttctntacgacgagagaccctcggtctcttaatatctttttctgaat

SEQ ID NO: 183150 - DNA, 397 bp, Glycine max
  unsure (1)..(397): unsure at all n locations
acgaagaacggatgaagaacgatgaaaaacggacgaaaaccttcacggatttgcttaccgaaacatctcggaagcgttacggaagcacctcggcttggattttcttcacggaaacaatttttttcacccaaaacagctgaaatacatagccagggggctgagggatccttagaacagcccccttcagcctttttataggaaaaagggggaggaggaagcaacccagcttcaaaaaacgttctggaaggcccaattcaaaatttcgaaattgctatttgcacccncccaattttgatagttcaccccccttctcgtaattacggaaagttacggagccttacngagcatatggactgatttctttttttttcttcatctaccgattaagtatatctat

SEQ ID NO: 183151 - DNA, 448 bp, Glycine max
  unsure (1)..(448): unsure at all n locations
agcttctcaaggaagttttctcaagaaagcttctcaaggaagttttctcaagaaagctctcacggaagctacctagtctataaatagaagcatgtgtaacacttgttgtaactntgatgaatgagactcttgtgagacatacttcaaagttccacttctctccctctttcaccacttcaatttcggtctccccctctctatttctctccctctttcttttcctccattgaagcatccttccaagcttcttatccaaggctcatcttggtgttgaagctccttcttccatggcttattccctagtggatggcgccgtctttcacctcttttcctttgtctttcgctgcatctccgtggtggaaaatcaccattaaaggacctcattgaagctcaaagatccagcctccatagaagctccacaagcaagcttccattataaatgtcttgg

SEQ ID NO: 183152 - DNA, 436 bp, Glycine max
  unsure (1)..(436): unsure at all n locations
gcaagacttacggaaagatcttagagttaaccgtagcagaggtatccatagaagccattgcatcactcacccaatactacgaccagcctttgagatgcttcacattcggagacttccaattagtaccaaccattgaagaatttgaggaaattctaggatgtcctctcgggggaagaaaaccatatctttcatccgggtgtctcccctctttgagcagaattgcaatagtggtcaaggattcagcaagaggtttggaccgcataaaacagactcggaacggcatagcgggcctaccacggaagtacctataagacaaggcaaggggtatggccaatcaaggagactgggtcccgtttatggatgtgttagctttgctaatnttcggggttgtcctctntccaaatgtggatgggttggtagacctagcagcaatcga

SEQ ID NO: 183153 - DNA, 447 bp, Glycine max
  unsure (1)..(447): unsure at all n locations
agctntagtcaaacataataattcaaaatttcaagaattgngtctgaaaagcataacacgactttctctgattgttttaaagatacaacctttgctgatgaaaatgtttcagacacattaagaaagctagcagatgggcctaaaggaaatgttattacttgccacgcgatacgacataaacaagtattccttttacacaaaagcacaagacgacaaaagtacaatgcaaaacagcggggtcaccctaagggctgaatcttaacactttgcaagtgtgcatgatgacaatccttgtgtagcttccatcccttactttgggttcattgatgaaatntgggagcttaactatgtcaaatttattgtatgtgttctcaaatgtaaatgtgcggaccgatgatgtaggatttacgtttgttaacctaaagaaactatgttaccacaatgacc

SEQ ID NO: 183154 - DNA, 437 bp, Glycine max
  unsure (1)..(437): unsure at all n locations
gaccttagaaactacgcttctaacttatacaagaatgaagctctgtactacttgttggacaagnggcctcagatatcttaagaagggggggttgaattaagatattacaacttatttccccaattaanaaaattctatgtcactttctattccagttataaattcccttaataatgaatttcttaaatattgattcaaatagaacaatttgaatacgaatataaaacaataatcaataaaggagtttaagggaagagaaaatgcaaactcagatttatactggttcggccacacccttgtgcctacgtccagtccccaagcaacccgcttgagagttccactatcctgtaaatttcttttacaagttctaaacacacaaggacaacccttcctttgtgttagaattctttacaacaagagaccctctgtctcttaat

SEQ ID NO: 183155 - DNA, 436 bp, Glycine max
  unsure (1)..(436): unsure at all n locations
agcttgtagcaaatgcaaaccacaataactttaaactccgatatccgatgagtcccgtaatatatcaagacgctntaaattgaaaacagaagctctgagcaagttcaaacgacaatagttttttactcggatgtccaattgtgtcccgtagtatatcaagacgtcgtaattgaaaacggaagctcgtagcaaattcaaaaggcaataaatttttactctgacgtctgattgagtcccataatatatctagatgctcgtaattgaaaacggaagctcgttggaaattcaaaccataataactttttactcggatgtccgattgagtcccgtagtatatcgagacgctcaaaatttagaacagaggctcttagcaaattcaaacgacaataacttattactcggatgtccaattgagtcccgtaatatatcgagatgc

SEQ ID NO: 183156 - DNA, 384 bp, Glycine max
  unsure (1)..(384): unsure at all n locations
caaacgacatacttttaactcagatgtttcaatgaaacccggaatatatcgagatgcttcgaattgaaaacagaagctcgtaacaaatggaaactaccataaatttttagtccgatatccgactgagtcccgtattatatcaagacgcttgaaattgaaaacagaagctcttagcaaattcaaacgacaataactttcaactcggatgttcgattgtgtcccgtagtatatcgagacgctcgtaattgaaaacggaagctcgtagcaaattcaaacaacaataaatntttacacggatgtccgattgagtcccataatatatcgagacgctcgtaattgaaaatgaaagctctgtggaaattcaaacgacaataaatttttact

SEQ ID NO: 183157 - DNA, 461 bp, Glycine max
  unsure (1)..(461): unsure at all n locations
agctntcatatggaatgtctccattagcatgctggctactgattttatctctaaccttatgctcacttaggacaactntgtaagcgcttctttcaattttaataaatttcaagttttatcatctcccttcttcatctttgtcgatattgtgcggctctgtcgccgcttctgcttntcgtttttgaaaacctgcgatttgtaagccggtctccgatgtgcctttgataactgttttcaaaatctgcatccttatacttcatattgcatcattcttacttcctatctgtccatttgatctccctccgctgatatccctcctctgatctttggtatcaaagactgatggggaagtaggaatattgtccgtaaggacatatgttaattgatttactggatctgaacttatgtacaataactatttttataaatgtatagtactcttaatctaaacagtattcttg

SEQ ID NO: 183158 - DNA, 386 bp, Glycine max
  unsure (1)..(386): unsure at all n locations
tgaccacatagtggtacctggagatatgtcgcgggggtcaggagaccttggggacgtcatgtggggtgctatngcccaaaaccaagcttgaccaatcccgacccaacccgggcatagtcaatcagtgagaacctgtgatgtacctaagcaggcgagcttctggcagtcaacagataaaaggaacaaagaccacaaagcaaggaggcttgtgtggtggctggccagctgtgaactttgattgatatatgggatatggcctctggtaatcgattaccaagggtgggtaatcgattacaaggcttaaaaatgaagacaggagactaagatggtctctgngtaatcgataccaaggggtgtaatcgattaccaggcttataaacgagatc

SEQ ID NO: 183159 - DNA, 330 bp, Glycine max
agaatttatattttttttaataagctttttggtcaacgtgatcactcgttgtctcattgctagaatctcgatcaagatcatttggcatataccgccccgcccctgtgcgtcatgaaaaagtgtgaaataattactctttattaacagctacacatatattattttaattttgctggtacattagactatgtgaaaaattccgtaacaataaattttgatcccattgcctacaactatcaatacatgtgtccgcccatttgtgttagttataatcaaatagcacgtggaagcctgttatgagtcatggtcttgccaaaattctttgccgat

SEQ ID NO: 183160 - DNA, 380 bp, Glycine max
  unsure (1)..(380): unsure at all n locations
acaccaaccaaatcacagcttttctccttaaagacgccaaatacaattccttcgatccaattctgtaaccggtggatcgactccaaaatattactggaagtctatagtacataagcctacattgtgaccgntgggatctactagcaaacatccagaactcattctgcactatactttccacagctcaccaaacacaagcatttttttgctcaaagacaaaattcctgctgcacctatcttgacagcataanttctgcataagtgcagatttctaaaatcacacttcctctcatctcatcttgcccaaatcaattcctatcagtgccaaattatgtatcaatcatgtctaacccacaataagcttcaaacacatctaccca

SEQ ID NO: 183161 - DNA, 437 bp, Glycine max
  unsure (1)..(437): unsure at all n locations
agctngctctaaatttacattgatgtntgtttttatggtangaggttatatgccatttntgnnttcgagtcatgtcccactaaaactctacttccaaatgcttgccttctcaggaatggccccgaggaatattgcctcaaagaggtccaggaaggacaaggcggccgaaggaactctctccgccccggagtacgacagtcaccgctttatgagcgttgtacaccagcagcgctatgaagccatcaagggatggtcgtttctccgggagcgacgcgtccagctcagggacgacgagtatactaatttccatgaggaaataaggcgccggcggtgggcaccactggttactcccatggccaatgttgatccaaaaatattccttgagttttacgccaatgcttggccaacagaggagggcgtgcgtgacatgagatcct

SEQ ID NO: 183162 - DNA, 378 bp, Glycine max
  unsure (1)..(378): unsure at all n locations
aaatattctcaactgtcacatctttntatgtggttcttggatggctatcaaaggcctatatatatgtgacttgagacacgaatttgctaagagtttttcaaaacaaaaaggtcttatcctcttataaagcaaaatcattttatcctcttacaaattccttggccaaattacttgtgattcaataaggaattatttgagtgttcaaattgttcaatctatctctttcaagagagatttcttcttttcttcttcttcattctgaaaagggattaagagactgagggtctcttgttgtgaaagaattctaaacacaaaggaagggtcgtccttgtngtgttagaacttgtaaaaaggaattacaagatagtggaactctta

SEQ ID NO: 183163 - DNA, 450 bp, Glycine max
  unsure (1)..(450): unsure at all n locations
agcttgccgnggcggaacttgaaagaattttgagtttccaaaataagaatggagtaaaacgacctcctatcttttctatntaatcatttcatttaaattttctaacttttttttctagtttttgaattattntataccgaattccttgccctatcatgctaaaattagaccgacacacctaacgatgacctaatggttgggaaagggtgaagggaaaagggaaaaggggagagggagaagtcacgggtttgaatcctccaactaacatacatttctaacaaaatttaacaaactagcatttgtcaataaaaaaattcatattaatcaacccaatttttttaaaaaaaaaatcagaaaaagttagagaagtttgtagtaaaattataacaacaaccaacgaaaatgaatatatatggacaagactgatatatttagtgaagagtagtacaa

SEQ ID NO: 183164 - DNA, 408 bp, Glycine max
  unsure (1)..(408): unsure at all n locations
ggacgtttgaactgttggacgcagctctttgtcttgagggacaacctcataactggagctgctgggacacctctaggtcctgttcatgacaccagtgtctatatgataaatagggaccttacgtacaatgatgtcgtccacaacattaacaggggcttcaacttgtaaggaaataacttctgccttctcagtggcagcaacgaacaactcttcttctcaagccttcttctctntttgagcatcatgaagcttagtcacataatctaccatccncttttcacttatcttgaaaggattacaagttccttcatatcagatagtatgaagacatacaaggcattggatgaatgaatagtngtcaacatcctttgtgaaacattcacaagggtcatcaaagtgatacttctt

SEQ ID NO: 183165 - DNA, 449 bp, Glycine max
agcttccacttcaagagaaatgactataatttttaatgttcaattctaccaactccatacactcgattcgagattgattgctaaaaccagggtattggtgatatctgttttggtaatcccgtttacttagtggaagaaacattttcttaaataaattgcacagaataactattttcgcacaatcattggagagcccagcaatgatgaataacttcttttggaaatattccaattaatgctaactattttatgtttctgaatgcattttttcattaatctttaagagacatccccatgtgcattaaacccatagtttgtgctccatgttgcaaggcctgaaggaatatgacggcacgtggggcagaagcagtatgttaaatagcactctcagctagatgatcaagtgcaacagtgagtggctcttcaagaaccttgtgttgtgctctggt

SEQ ID NO: 183166 - DNA, 422 bp, Glycine max
  unsure (1)..(422): unsure at all n locations
gtgagaaagtgtggaagagtcagtcatcctacttttattcgttgtccacttagaggtacctggagatatgtcgcangggtcaagagaccttggggacgttaggtggggtgctatttcccaaaaccaagcttgaccaatcccgacccaacccgggcatagtcagtcaatgagaacctgtgacgtacctaaacaggcgagctcctggcagtcaaccgataaaagaacaaagaccacaaagcaaggatgcttgtgtggtggctggccagctatggatcttgagtgatatttggaatatggcctctggtaattgattaccaagggtgtgttatcgattacaaggcttaataatgaagacaggaagttaagatggtctctggttatcgattaccaagggtgtgtaatcgattaccanngcctaaaat

SEQ ID NO: 183167 - DNA, 436 bp, Glycine max
  unsure (1)..(436): unsure at all n locations
agcttgtatgatgacggggttctcctcatttgtggcactaggcggcagccggtcnaggcgcacagcaagtttacacataacagatgacgcataaacccaccatcctgtgttgcccaccgtgaacagaactcacgtactacggcgtagcgccatatgctacgtattctctnacgacgccggggcttcatataatactgccaaggttaaccaacatacaagtaaggcagcatcctgatgctcagaaactaacacactagctaaacatggcttaggcagataactctggccaagcacaactctagatcacggctatggacatacaaatgccctagtaacattttgttctgccaattattaaccgatgatcgactctaaagattactggaaggggctagacatacgtgacattgagaccgcgggtctgctagaaacaaca

SEQ ID NO: 183168 - DNA, 297 bp, Glycine max
ctaactcgcaacgggaataaaagacccatggcgtgcctctacgagcttcaatcaacaatggctactcggtcatataccggagtgcaacaatccattgccatacgttagtggggtatactatgggtgccaaggccttattttctcttgctgtgcaagtaatcaatgttgctgacgatgaaatgggggaaacccctatgatcaatattgcaatggatcgattaaacgtcaaacgactacactgttgcactctgaaatttcacgtgactggacaaaccgtactacactctaaggaatccc

SEQ ID NO: 183169 - DNA, 430 bp, Glycine max
  unsure (1)..(430): unsure at all n locations
agctnttctgtactagtagaggatacaattttggctactagttntgtacttttctaggtttctatagagtggtcctctaatctggcagatgcctttatgtaattagaaagggaatgtactagctgagacctcttccaagaggtgcagcacatatgtacttaagtcagggcttgtagctggtacttaattcatcttgtgtaccagctatgttcaaaatatatttgtactcacagtacctctagtactctttcatctatctaatgcatatctatttttgctgagcaaaaaaaaattatctttgttgataaaaaaaaacaaaaataagtacactgcccctaaaataccaacattatactcactactgttcagcttgccataatttatataaaaaacaatataatcctcatacaaatacaatcatgcaagcata

SEQ ID NO: 183170 - DNA, 429 bp, Glycine max
  unsure (1)..(429): unsure at all n locations
atgancaaaagtccaagagaatgagttcaagattgagtcaagaacacttcaagaatcaagagaaatttaatttcaagattcaagaatcaagaagaggctcaatcaagataagtacaaatttttttttcaaaacattgagtagcacatgaagttntcacaaaagcttttaccaaagagtttttactctctggtaatcaattaccagtttactgtaatcgattaccagtggcaagttttgttttcaaaaagctttcaactgaatntgcaacgttccaatcaatttcaaaatggtgtaatcgattacaatatattggtaatcgattaccagtgtgttngaacattgaaattcaaattcacatgtggagagtcacatctcttcacacaaatgttgtgtaatcgattacaactgattggtaatcgattactagt

SEQ ID NO: 183171 - DNA, 486 bp, Glycine max
  unsure (1)..(486): unsure at all n locations
cgacccggacctctgagtcacctgcggcatgaagcttagactaaagcgacactttatctatgtatccaaaacccctcaatttaatggatcttcaagcgcttgagaagtgaaattgagaatgaggtaaatttggagcaaactctcacctcacacaagtctataacatcaatttaaacttgttcaaactggatttacacctaaactccaccgaaccaaaatttgactcctcaacacccaattttaccctagaaatggctctttgttcactttggtcatttgtttttctctctagcacagcccaaactttctcataagtcctaaatgacatttcaagctaggattaactcactttaacctccaaataccactaaatccagattttggccttccaactctcaaaacctcactctntttccactcataacaccatattctcactttctaaccctaggttaactctacccttcatctctaacaattttcata

SEQ ID NO: 183172 - DNA, 463 bp, Glycine max
  unsure (1)..(463): unsure at all n locations
actaagcttcttagtatanattcccttcaatagaaaattatataanactatatttataatttccgatttcaaaataaaaaaatttaaaaaatatcttaatgaaaacatgggctaaattgaaaaaacttaaattatttaaactaatggtgatgtggcatcaataattgataagtctgtaatttattggccaacagaaactaaggtatgaaaaccctccgaaatgcaaagggtttggagagttgtctaaaaaaatgcacatcatacacatattaaaattgctacacatattaaaatagcatatccctattctcatacctccttgtaggtaaactaggtccatgattaagcctttacatggttaaagacaactttgtggatttacaatttgtttcctcaatcattagtcaatagccttaagcaccatgcaacagcatgccaaattaggtagcaaaatttgcatagc

SEQ ID NO: 183173 - DNA, 395 bp, Glycine max
agcttgagatgaggaagtgtagaagggtgttacttcctgcttttattcgttgactaagagtggtacctggagatatgtcgcgggggtcaggagaccttggggacgtcaggtggggtgctattgcccaaaaccaagcttgaccaatcccgacccaacccgggcatagtcatcagtgagaacctgtgatgtacctaaacaggcgagctcctggcagtcaacagataaaaggaacaaagaccacaaagctaggaggcttgtgtggtggctggccagctgtgaactttgtttgatatatgggatatgggctctggtaatcgattaccaagggtgggtaatcgattacaaggcttaaaaatgaagacaggaggctaagatagtctctggtaatcgattac

SEQ ID NO: 183174 - DNA, 455 bp, Glycine max
  unsure (1)..(455): unsure at all n locations
tatataagaaacatntccccaattagaatctcgtacatatgatgtatcttatatgggacaaagagccatactaatgccaaaaaataaggatgttcaaaaaattaatgacataattatcagccatttcccaagagaagaacatgatttgntatcatttcactgctagaaaatagacttttaagatcgattattaaggactttcaacatttgttattaacggatgttgaaactaccatcgttaaaagtattaacattaacgttggttttagaaaaccgatgttaagctaaaccacatgacatcggttntctaaaaaanacgatgtcatatagtaagaaataaccaaaataatgtaaaacatgtacaaaacaacatcggaatttagaanaatcgatgtngcatttgactcacaacanaaactgatgttggtgagtagaaaataacatcttgattttta

SEQ ID NO: 183175 - DNA, 439 bp, Glycine max
  unsure (1)..(439): unsure at all n locations
agctngaagtctggtgctttgttatctcttttcctaggaaaaacaacctccatcagcacgcctccaacaatttacagagtccgggaagatcactgtcctcatccccctttgcattttccataataaattctataatagatgggtttctataaggagagctgtcaagtntcacgacccaaccatgaccgacattgatccagctccccaacaagcagtgcacagagacccctttctaaagcaaaatcaatctctctcttctccttgggaatataaaccgagggagcattcctcacagttgtaatcttagtctgttgaagttgttggaacaagttatcagcatcttgaataagatgcggctttttacccacaaaagcttgtgcaaccagtgcaagtgcaactccatatgcttcaaaactttcagctggaatagtacttggtg

SEQ ID NO: 183176 - DNA, 379 bp, Glycine max
  unsure (1)..(379): unsure at all n locations
actcatcgatccacatacaggaaatattattaatattgaacatacctatatgaagagatctaacanactaacatatttagattagattcttgaacttcattgatatgaatggtggcagtagtaaacaaagtcgaatatatgtataattaaagcttcatgttatgatatgatgcctagcccgctcgctatatatttatttgcgggctatcatagccattttattatatctggataaagagatcgaacgaagagatatctctgatactatcgagtataatgtgagtgacatattaagatactaagaccgatagtaagattcatctcaaggattataaatgatttaactccactgtcgttattcaattaaagcactttcttg

SEQ ID NO: 183177 - DNA, 438 bp, Glycine max
  unsure (1)..(438): unsure at all n locations
agctagtaggattatggggtacccatcacatgtggtactangtggcggcgggcgatggtgcacaacaagttttccacatccacaatgcgcgcataaacccaccatccnctgtngcccacctccaactgagctcacgtactcccacgtagcccatatcctcgttctctcaacaccgggtccccatcaatcctcccaagcttccacaacatccaagcaaaacaacatacacacagcacaagctatcacagccaagcaaaacaaagcaaaggcagaaactctgccaaaacaccaaccaaaaatcacagcttttcccactcaaagaccccagtaacaattccttcgatccaatntgttaaccgttggatcgactccaaaattttactggaagtctatagtgcataagcctacattttgaccgttgggatctactagcaaaca

SEQ ID NO: 183178 - DNA, 441 bp, Glycine max
  unsure (1)..(441): unsure at all n locations
nntgcaacttttgtccctgacacaattgtcangattcattctattcctgcactggacgagtccaaccaaccaatcccaaacaaggtcatattccatcgactntnttggtcatttaaggcatacattgatgcgtttgcattttgtaaacccattgtgcaaatcgatggaacatggctatatggaagatacaaagggacgttgttagttgcagttgcacaagatggcgctaacaacatatttccattggcatttgccattgtcgagggtgagacagcagatgggtgacactctttttttgcaaaacttgagaaaacatgtgacaccacaacatggtatatgcttaacctctcataggcatgagttaatcaaaagtgcatacaaacgacctggcagtgggtggacaacagacaactcgtcacatgtgttntgtattcagcacat

SEQ ID NO: 183179 - DNA, 430 bp, Glycine max
  unsure (1)..(430): unsure at all n locations
agcttgngccaattcttccatttcaagggttatattgggctangaagtcaaacctctgcacttgaataattaggctatgaaattgggctttgctttgtgtaattagcttaattaggtagattagatggtcctaatcaaggcccattccttccttctacgtatcattatatatattaatgtagttagttagtcagttatttcattttatacaaaaacaaatttagaaacttgttgtggaagttttaggattaaactttttctctcaattgttcttcattcttcttcctctcttcaactctgttataccttttttcttgcataaattccattgctcttccactggtgatgattattgaaggctaaacaaacaatcaatccaaggatccactccaagcaaggttgaacttgagttctagtttagtatttcaat

SEQ ID NO: 183180 - DNA, 458 bp, Glycine max
  unsure (1)..(458): unsure at all n locations
ntgaagatatgagttacgaacctacgcactaacattcatattctttntgtnaaaagttctttgtgtattatagtaaagattgtaaagctctcaaaacaccttaaacaccctagagaaaatactaagtacttagattgtatattcatttgtaagacgattaataattagtcagtgagcaaatcaaatacaaatcttttgatttgtatagagctaataatgacttggtaaaacaaagaatattgngttatttcaagcttggtgtagagcttgagttgtagagccagacgtgacaataacaaacacttgtaactttgtgaagttagtaaaacttggtgattagctatgaactgaacgtaatcttaatggcaaagacgaaccggtataaatctttgtgcttaataacttggttttggttctctttggtttaattgcctagctttgattgatttattgaaact

SEQ ID NO: 183181 - DNA, 462 bp, Glycine max
  unsure (1)..(462): unsure at all n locations
agctatgttctatcgntcactcatctcttttccccctttctttntgaatntattcttaatttaagctttgaaaatataataacttgctttctaaaatacctatttttctctccccctttggcaacatcaaaaaggctaaagtgcgtaaaacataaccaatgttcagtcataattaactaagtactaaatatttaaaacataaaccaatgtttagagaataaataaataacataatgtcataaattattcataaaacataataaaaacatgtgtattaaacaagtcataagttatcataacataaaacaaatcatttgtctaagtcactggcatctagaagtcctaattctcttctaatggtgtagaaggaatctttgggtagtggttntgtgaagatatctgcgaagttgattttggtatctacaaattctagaacacagtatacctttaaaacatgatctc

SEQ ID NO: 183182 - DNA, 482 bp, Glycine max
  unsure (1)..(482): unsure at all n locations
ctaagcttaagcctcttcaactgcacaaggctcttaatatataaagagtatccttgnggatctttcacccgacgaagacactgacaaaaacttattttctcttttttggacaaagtatgacaagctaggggcaagtaaattntcttcccatcagaccttggatgcaactatgatcgtatccccatctcaagtagatcatgacaggtattcaagccatccttcgtcttgccttgaatgttaaggagcttcccaatcacactgtcacatacatttttctccacaagcataacatcaatacaatgtctaatgtctagatcaaacccgtatggaagatcaaagaanatggacctcttcttccatatgcaagtcttacttttatccttcttttgagtctttccaaatacaatattcaggtgttaaacctgctggtatacctgctcactagtgaacgacatcgacacaatatcatgctcttgacttca

SEQ ID NO: 183183 - DNA, 165 bp, Glycine max
cttcattcttgtaaccatgataatcaattatctgcaacaacagctcggaaaaggcaattaaataattggttacagaacaagaaagagttgatgatgacccatatgagaataatggaaccttgagtatatatttataaggggtagtgagaatcgttctgatgaaca

SEQ ID NO: 183184 - DNA, 480 bp, Glycine max
  unsure (1)..(480): unsure at all n locations
tagcgtgaagaanattacagggcgcgcttaggacaaaatctcttgcttagtgcatgacagtctcgctaagcccaaagattagtgcgctcagcccgtgagttcgtgtgacatttaagctaccttaagccaataaaaggagtagaaagttaaggacaaagacacatcgagattcagagctctctattaaatacacctaaagcctgaacatctctcatagggaaaaatgattgattcacaagcttatgttctgaagttattattggcatttaatcctaattattttattgctcttgtcttttaatctcaaattattgcaattctttatctcttgcttacagattggatatttatcgactaaagtacaaaanaatccatatggattcgacactcgaacttttattntaactnttctacttctgacaaattgatacatttgtcaacgagttaacactacggtactgcaagcatcccatattatgg

SEQ ID NO: 183185 - DNA, 458 bp, Glycine max
  unsure (1)..(458): unsure at all n locations
aagtcacctgcggctgcagctgcgttcttggaagcttttgacccttgatgtcccactgctcttattaccctacgcggtttacactaatctattacacacaaatagagatttgggtggtctcttggagactcccaatacacccctgaagaatgtctaaatacaaggaattgctctanacaacaaatacagcactcaattgttctattataacaaatttaacaaagcaattaaggtcttcaaatttgtcttcaatgcttgtttgttctctcaagtgtttcactaaaaatatggtgaggctttggtttcttcaaatccaattgtgctcctaggatggttaacctccaagactcaaatatattccttcaagcaacgcaccaatttcctcttccaatccttattgtaggcaacacttatacacacataaaaaataagacacgcaagataccatatgataaatg

SEQ ID NO: 183186 - DNA, 403 bp, Glycine max
  unsure (1)..(403): unsure at all n locations
atggtctacacttggagtgatcacatgccgtaaaacccttaccacccactctgtcatcatgccgaaactcaagaaggccaacaggtntagccttctcaatgtattctgaacaaaattcaatggcttcttctgcaatgtacctctcaacaatagatacttctggatgatatagattctttgtatacccttttaagatcttcatgtatcgctcaactgngtacatccaccgtagataaataggaccacaacatttgatttctctaaccagatgctcaatcaagtgaatcatgatgtcaaagaaagcaaggggaaaatacatctccaactgacacaatataatngcggcctcattttccagctcatcaaacttgacaggatcaattgacttgctacatataacatg

SEQ ID NO: 183187 - DNA, 460 bp, Glycine max
  unsure (1)..(460): unsure at all n locations
agcttatcaaanaccctaggtccacccttgtttctcatatctccaaaacccaaggtttgtccatgtatgaaaacccaaggttcaaccttggtacataattctacaaaacccaagatactcccttggtccactcacatgaagcaactacgacaaccaccattaaggggtccaagttcctaagcgaattgtcaccccactattaagcaaaacctttacccaggtcgaacctatactcactcctcataaatatcagaggagtacttttgcatgtcaggatgacccaccaacgaattgcatgacaagacctttaattaggtgcagcttacacttactcctcacaaccatcaaaggacgaactcagcaggtcaagcgacctatccactcattggttaggaaagaccttcaaccaagggcaattcaaaacaactcctcacaaccagtctgggagaaactccacaaa

SEQ ID NO: 183188 - DNA, 421 bp, Glycine max
  unsure (1)..(421): unsure at all n locations
gaattaaatctaaccaccggccacgaacacaaagtggtggatgagtatgcccgagtgtacgcggaaaaggaggctagaggaagggtgatcgactcgttacatcaagaggcaacaatgtggatggaccgatttgctcttactttgaacgggagtcaagaacttccccgattgctagccaaggccaaagcaatggcagatacctactccgcctccgatgaaatccacggacttctcagctattgtcagcatatgatagacttaatggcccatataattagaaaccgcttaggaagttgtattgtcactcagatcttgactagttataaactntctgaataaaataagtttatctcacgtttttactccanagatcagtgcgaatcaaatcacnttccgcatttatctctagcatgcattcatc

SEQ ID NO: 183189 - DNA, 374 bp, Glycine max
  unsure (1)..(374): unsure at all n locations
agctatccttggctcgatgtgatgaanaattngataaatatataaaatgtattttaaaaaagaattacttaatgaaatatactagtctataacataattctcatgcatttgtttgatcatgaatgtttgaataacataattctcatgcatttgtttgatcatcacctgtttgaatatgtaccaaatgatgtgtggtaagcgctcataacagttgaagaagcctatattggcgatgccacttgttagaatgatttatcctttgcacctaatatgagctgaatgaattattgatatgatgaaccctgagactatagagtgttatctcttagctccttgacttatgttgtaagagagcatcctacaccgagagtgtg

SEQ ID NO: 183190 - DNA, 443 bp, Glycine max
  unsure (1)..(443): unsure at all n locations
tagttggtgcatgagaaattatgctctattttcatcttccactccaagtaggcctctggatcattctttcctttaaatggaggaatgttgagtttaataccatcaattcggttttgtctaggaacaccatcattccctcttctcctcctttcttcttcattatgatctctattctccatttgattcaacctctcaaggagcgcatcatctcgttgtttcattaacctctccaaatgttgcatcaaagcttgcatttgaaattgcgaaagccccactccatcattaggattagtacctgacatctcaaacaaacaaatcanacataacaagacaattatagttgctgtttgaatacctcacccactcaagtgtatcacacaattatggcttttctctaatgaaacactctngccttntaccactctaaattcccttgagttctt

SEQ ID NO: 183191 - DNA, 439 bp, Glycine max
  unsure (1)..(439): unsure at all n locations
agctngtaattagatggagctatggacatatatgtctaactatgatcacttgatatcacacattgtagtttcctcaatcttatgtaaatttcttttcttttcttattttcttgggggaggggggtataaatgtcttgggatcttgattgataaattccagttccaacactcccccgcctcattgcctctcttaaacttcattttgttctaaattcagttatctggaaatggtttctgtgtgaaatataaanttgataaaggcagaatataatgatgttttatttcaagatatgtttcacaaaccgacctaaagaagtgcattgtgcagttagtaaattgaattgagtcttcaagttgtttaagaattttgtatagatgaggatctattatttaattacacggattgcatatattatggattcaatgcattttaaatttt

SEQ ID NO: 183192 - DNA, 423 bp, Glycine max
  unsure (1)..(423): unsure at all n locations
atctactctaaagatacatgtaataatacccataattataacagtctcaataatnntaaaaatattataattacaaataaatataatattttaaattaaattaactaaagtttttaaataagtcttatattttgggacagtgagagtttaacttgaaagattaaatagctctaacaaaagtaaaaatcaaatccaaagtatacataggctttattgcgtgtaaaataatccatcattcacataaactcaagcataagtatataacagagatgatcaaccagtttgtcaagagctnttggcttggcttanttaagacttaactcgactggacttatttattataaaagtcaagctcaaattcttttaaattctttttagaataaaggtcaatctcaaactatataataaattattaaacttaac

SEQ ID NO: 183193 - DNA, 453 bp, Glycine max
  unsure (1)..(453): unsure at all n locations
gaccttaatgacctgagctgcagctnagtatgtgatattggtattgactttatatttnttcgcnntggaaatatccgatgttgcatttttgccgcaacttgcaaaatcaatataaatttactaaattgtttaagattttatttttcatatatcagtgtaaaaatttatagtaccaatcaattttaaaccccgctaagcatgacttttaagttgattattatacctaacaatctataattgaatgatagagctaaaacatttacattatcagtaacattttaattaaattcataattttattgagtggatttgaatgttaagtaaattttatattttcattttttcacattttattgtcttttttataaacaaattgaaagaagaaaaatctaaaataactttttattagagatttccaaccttagatatagaatgttttaatctctaaaaata

SEQ ID NO: 183194 - DNA, 401 bp, Glycine max
  unsure (1)..(401): unsure at all n locations
atttcgaaacttaaattgattctcaacaatctttcttttaattaaaaatttcaaacttcaccatcattagaaaactttcatttttctcttttgctacataccatcacttgctcgtcttctgaccttcccttctaaggaacaaatattgtcttttttttatgtntgcatgatgaactatttcttcttgcacaccttacaaccttacttggaactaacaaacttgtaacattctccccaccaaagatgttatatntgtgaccacaaaaggcacaaatctcacattatagtttggatgacaccatcgtgaaacttcattctcaaactcttaatattctcaagtgtcaacctcattttttcaccatttccttacctgaatgaacaaacanctccattaatcttca

SEQ ID NO: 183195 - DNA, 445 bp, Glycine max
  unsure (1)..(445): unsure at all n locations
agctttagaagagacaatttgtgntctatgcttcttgaaggtggcagtccatacgaatctccttggaaaagacatctttaaattcctgcaataagggttgaacactaggagaaacataaatagttaactgattagaattatcactctctctcttttgtgtatcacacttctcctcgggtgtatcactcttctttttcatattcctttgtggagcctcactattttctttctcttgttctctcttttctctcattctgatttggtcatcacacacttctctaggggatagaggtttaagagtaaacaaggaagatttggtcaacaaacgttgcatttgtgtagtccacgcgtccagaaataagcgttgagattcatccagttgatgatatacaccaccattgtcaccagctcttgccatgattaatgaacaaagaattctgcagta

SEQ ID NO: 183196 - DNA, 440 bp, Glycine max
atgaccatttttatttcccgagagcttccgttggtcaatttcgagcgtctcgatatatgattcgcctcaatcggacatccgagttaaaagatatgaccattttaatttcccgagagcttccgttgttcaatttcgagcgtctcgatatattaagcgcttgaataggacctccgtgtgaaaagttatgaccatttgaatttctcgagagcttccgttgttcaatttcgagcgtctcgatgtgtgatacacctgaatcggacatccgagtgataagttatgactatttaataatctcgagagcttccatagatcaatttcgagcgtctcgatatatgattcgcctgaatcggacatctcgagtaaaacatatgaccattttaatttctcgagagctttcgttgttcaatatcgagcgtctcgatatattatgcgctttaatc

SEQ ID NO: 183197 - DNA, 447 bp, Glycine max
  unsure (1)..(447): unsure at all n locations
agcttaaaggagcactcaaactatgtgtatttattctcaaggcctanacttggagggttcatcagggcctctccctcctgattcaggtctaacccaaaaaatattttagtacacagactctatctatgaactgtacaaaacacacgattcctcagttgttcttaaaatactcttatctcgtcgtgcttgtggttaaactcgtcgggtcctcatagtggtttccatcacaatactcatcgtgcattaactcatcgcccttaaaaggtcttacagtcatgtgattgtacgattcatagctcacaacttagtgcacacaacatctcaatgcacatatatattacaagtcaatacatactcaatntatcacatacactnggtctcaatcacaatggtataatcccaatttaacatgttatcacacctcatgaatatatacatttacctatg

SEQ ID NO: 183198 - DNA, 249 bp, Glycine max
aaacacaaaacctctatgtgctctcattatcgaacccacatttaacatgacatcaacgaggtggctctatgacagcttatcaaaagacagttgattcgaagaagaatattgtaccatggcatatattactctgatataaaatcagaaatcagatatactcaaattaacaatgtgctactgataaaagatctattgtaccacatcaccaagtgtcacacatgctcatcacacaccacactagcaatatct

SEQ ID NO: 183199 - DNA, 451 bp, Glycine max
  unsure (1)..(451): unsure at all n locations
agcttgccactnaccagtagatatggagcattaagcatattgggctgaggcgttgtaagttttgatgaggctctatcagggtaaacgaggaagctgcatctcttggagttggaagacatgagactgaatgcatatgagtcttccaagctgtacaaagaataagttaatgcttatcatgacaaaaagctgctaaagaaaaactttcgaccgggtgaacaagttctgatattcagttcaagattaaagttctttccaagcaagttaaaatctaaatggtctggaccattcaccgtcaaggatgtcatgccttatagagcagtggaattatttgaccctgcttcacaaactcatgatagaatctggacagcaattggccagagactgaagctataccatgatggaatatcgtgagactgaccaccattctacgattacaggagcgctatatgta

SEQ ID NO: 183200 - DNA, 449 bp, Glycine max
  unsure (1)..(449): unsure at all n locations
tgctcanattcagtccttgaagagagggattttgagagctgcagtgctttatagaagataacattaggggcaaaggttattgatggatcataacagttgtagcctttttgagtaggagagtacaacaacaacaatcaataatttttccttaatagttttcctgtagttntcctcggtctttctttgcctctagtgattggactacttttcatctcctgactgggagttctacatgtcttctccacactcactcaaacaaccacccatggcgagattctaccatcttttctacaatagatgtaatgcaatcctaccccccaagggcattggatagaagactctaagaagattgagccaaagatgcaagagaaagccctagggttctcatgagccttanggtagattttgggcccatangctaagtatgagcccacttatctttgtacata

SEQ ID NO: 183201 - DNA, 447 bp, Glycine max
  unsure (1)..(447): unsure at all n locations
agcttatcggcctgacaaacccaanaagctttcagaagcctcatattgacagtaactgttactactaaagacataaatcttaatgttactactaaagccatagatcattgatgtcatttctttttatgatcaataatagttcactcggataaaaaatttcagacgcaatccaaccagacaaggagccatgcaaaacaaggtaaaagtgtcgtgcatttcagttctgaaaagaacagaagcagcagcacatagaaagaaggccagcaacaccacaacaggacctcacaatcaggctagacagacaatgggatctctttgatctagagatgccaaaagaagacaggttccagcaatacaagtgttatcaatggcatatcacgcaaaatgacaaaccaataacccagtatatcatataacagatagtgttgcaggcaaatagcagaagtc

SEQ ID NO: 183202 - DNA, 431 bp, Glycine max
  unsure (1)..(431): unsure at all n locations
acgtgacctataaaactcagcttgaggcaaactggatgcattggttaacttggtaacccatctggccttgaatcagaaatttgtacctgtcacaagggtttgtggtttgtactcctctgctgaccaccatacagacctttgcccttccatgcagcaacctggagcaatngagcagcctgaagcttatgctgcaaatatttacaatagacctcctcaacctcagcagcaaaatcaaccacagtagaacaattctgacctctccagtaatagatacaaccctggatggaggaatcaccctaatctcagatggtccagcccttagcaacaacaacagcagcctgctcctttcttccaaaatgttgctggcccaagtagaccatacattcctncaccaatccaacaacagcaacagccccaaaaacagccaacag

SEQ ID NO: 183203 - DNA, 435 bp, Glycine max
  unsure (1)..(435): unsure at all n locations
agcntttgtcactccacccgaatctggcctttaggttaaccaaagctagatagctgataacctactaaagcttttgcatccaacatacaatggcgtctgcacatctatntgaagagcatcgtaaatatctgcatgacattcccgaaagccctcttgcccaagaccacgtatcatgtcttccatgagatctccgctttgtagctcaaccggatgaggtggacatgttgctgtatgaccaaccaactcaccatgccatatccactttgtgtacgtcgggctaaagccatcacatattagatgcgatctaatgtcatccaacgaatgacgcctcccgttgacacatttaacacaacagtagaaaaagttggcatctgtgggtgctgaatgtatttgggcaaatgacaaaaactcttcaaccccatgttgatatgcttc

SEQ ID NO: 183204 - DNA, 454 bp, Glycine max
tatccaatgaatgaatggcctttcgtgggtgtgcccgcatatatagtaatatattaatattcttcatcagataactcataacgaaacagtattacattttattttgaacactataataagctaactataactatattttagtataaaaaaacataggaacacgcatgaaccatagaaaatgaagaaatcggcactgacccgtttgcaacccagtacctgttgttcagaaaaggaagaaattccctgcaaccaacattacgaaacatcagccgtaaaagaagttccctcacacttggttattttcaacgccattcttaaagttttaccatttattttataatttgacggcaattgttcgaaagtgtgaactacgcaactgttaaaagtgtaacttcatattatgtcaatgagcgtatacataagacgaacgtaactggggttgtcgagctctaat

SEQ ID NO: 183205 - DNA, 316 bp, Glycine max
agcactgagctcagctgaacataagcactagattttaattctctagggaaccctctacccaccatcctattggtgaaatcacaataccttttgtgaacctatatgtctgacaaataatcatggtgtaattgttctattgatgcacccccctacacgtagactacattgttaaaccatgattttgtccaaaatggcgatattagtaaatctattgaagatatgactgatgtacccaagtggggaaactgataaaacctgataaacaccttatgaactaactgctatataaagctttcaaatcatattttaacaacgc

SEQ ID NO: 183206 - DNA, 136 bp, Glycine max
ctcaccaaacgggaagcaaagggagattttttccaggacggaaaacaaaggagataacgaacaggacatataacggtgagaatccattagaactgttatggaacacactttgcggtttccacactgtggggagcaa

SEQ ID NO: 183207 - DNA, 479 bp, Glycine max
  unsure (1)..(479): unsure at all n locations
ctaagtcacctgcggcatgcaagcttaggttgctcattgactccaaattattgcaaagaaggacatagatatgtatggtgatctcagaagaacatagaccacagactcttacaacaggggcagatgtagatttctgattcatggcaagctgagttactaggttgaccatggcatcaagttttccctcaagctnttttccttagcagatgaagatgaatccgtggccacctcatggactcctctaaggatgatagcatcatttcttgcaccgaattgttgggagttagaagccatcttctcaatcaaattcctagcctcggtaggagtcatatcaccaagggccccaccactggcagcatcaatcatactcatcttcatgttgctaagtccctcatagaaatattgtagaaggagttgctcaaaaatctggtggtgaggacagcttgcacccaatttcttgaatctttcccagtactcat

SEQ ID NO: 183208 - DNA, 291 bp, Glycine max
  unsure (1)..(291): unsure at all n locations
gaagtggaactttggattatgtctcacaagactcttattcatcaaaggttcaaccaggggtacacatgcttctatttatagactaaggagcttccttgagaagctttcttaagaaaactttcttgagaagcttctttgagaaaacattcttgagaagctagagcttaactacacacacccatctaaaaactaagctcacctcctagagaaagctccttgagaagctatgagctagccacacacacccatcctaaaagtaagctcacctncttggacaaatacatgaaaata

SEQ ID NO: 183209 - DNA, 450 bp, Glycine max
  unsure (1)..(450): unsure at all n locations
agcttaaccgagactcgcgctcccggataatgtgccatttttttccttttatcaaaattgnnaacccccctgatattggagggcgaccaactgtgcaagcacaaccagagaggaaggctatcacgcagctactatgcataccggggcaagatttcacccgtgccgctgctttnaacgagtgtggatcatgcgcaccaacatgaccactcttacacagatataaatgatgttgttacttagcaacattctgcccaacgaccgtaatgccgatctccccctgcggaagtatcagttggtctgtgtcgtcccgacataggtaggtatgcattatttccaactaatttctaatgccatctactatttgcagggatcgcgcccacaagacacccagtggacccggaaaagttcaacagggccctgaggtttccagctctggttatgggcctctat

SEQ ID NO: 183210 - DNA, 384 bp, Glycine max
  unsure (1)..(384): unsure at all n locations
aaatccaaatgctcaaaatccgaatgctccaaattataatgctcaagatcaaggatgtcaaaatcacccataaccgaatgcacagattcaccagttatggaatgctcaaaatgatcaaaaggtataaaatgatgcctaactaatctatgaaatgtcctatctatctcangatcaaagggttgtaagtcagatgaattgcctctagtcatacactacattcagcatgcacacaactagttaccttgtcatgtaaataaaggtgtanggtttgactacagctaccctcaaatgatatccaaatgactngaaatttgtgagaaccttataaaatgatgaaagatacacaaaaattcagacaaaattcaagtctactatgaaagctaa

SEQ ID NO: 183211 - DNA, 445 bp, Glycine max
  unsure (1)..(445): unsure at all n locations
agctnaaggaaaggcatatatgtgtgaatcttngagganaagatgtngcanntgtcgagaatcatgaccaccaaagtcaggagatgcgacaacaaatgcaaaaacataatgagctaatgcaaagtatattacaacacttgcatattcagtctatcatgtcagctcctacccatcgactacctcagcggatggaactgagcaccatgttgatgatgctcaggtttatcatcctcatgacatatgaaaggaccatcaactcatggttattgtttattttactttgattatgtcatgttagttatgaatttgaacttcattaaatttcgacattccattttattaaactttgctaactttgaatttgcacattatcaatctttaaattagaactttgttattagatatatctactcattatgaatgtccactctttattatacgtttg

SEQ ID NO: 183212 - DNA, 350 bp, Glycine max
cactcatcatcacttgaagtttttctgatagaatattgacatcaaccttataggctggacttcaagattagtgtactttcaaaagagtaccagcatacctgcaagtcaacacgttcgatgctgtgggaatctgctcggttgatggcgtctatccttgcagaaaatcccaacatcgttgcaggacaaagggtcttggagttggcgtgtggctgtgggggaatctgcttcatgattgctgctagagatgctgatctactagttgcaactgaaggagatggctctacactcgatatcctgaccacagatgttgcatccaacattgagccatcattactgactaagctaaccac

SEQ ID NO: 183213 - DNA, 407 bp, Glycine max
  unsure (1)..(407): unsure at all n locations
agcttctaaggaagctgcctattctatctatagaagcatgtgtaacactggttgtcactttgatgaatgagagtcttgtgagacacaactcaaagttcaacttctctccctttttcttccttcaatttcgtgctccccctctctctttctctccctctatctttttctcctcgaagcatcctctccaagcttcttatccaaggctcatcttggtggtgaagctccttcttccaaggcttattccctagtggatggcgccgcctcttacctcttctcctttgtcttccgctgcatctccatggtggaaaatcaccattaaaggacctcattgaagctcanagatccagcctccatagaagctccacaagccaagttccatcaagtggtaatcagagcacaaaagcttc

SEQ ID NO: 183214 - DNA, 422 bp, Glycine max
  unsure (1)..(422): unsure at all n locations
gacactagactngtattgatgcaaatctaattatgtatgcatgcacctataatatcacagatgtagcttcagaatggaagaacattctggaggttgatatgatgttcattttcttggtgtaagttgcccctattataagaaaaagcggttcaaccactaaatagagaaacatcacttccaaacagcatatggaagaaatcacaactccaacaatgcaagttgcacagcttgagatgaagtgacccaaccgtgagtaagaaattcacttgggcttcagccatacaacgttgtcaatgaagaaaggttaaacttgtagccaanaaagaagttcattattggacaatgacttcggtggagatcatagttttatttgtagacttttanataaaattctaaggtggaactatacattcatgcctctg

SEQ ID NO: 183215 - DNA, 454 bp, Glycine max
agctagaactgtacgagttagtttggtcttatgtaaagctaactaggagaaaccttcacgactctccagtaatttcctgctaaacccagaaaactcctaatctcaaaaatagacttaggactctcccactcaaggataatttctatcttggaggggtctatagctataccacactgagatatcacgtgccctatgaaagtaactttctctaaccaaaactcacacttggataacttagcataaagttgtcagtccctaaaggtctacaacaaaatcctcaagtgttcctcgtattcctctctagtcttggaatataccaaaatatcatctatgaatactaccacaatactatcgaggtaagggtgaaagactctatacatgtagtccataagcacaccaggagcattattcacaccgaagggcatgactagatactcgcagcgaccataatggg

SEQ ID NO: 183216 - DNA, 339 bp, Glycine max
  unsure (1)..(339): unsure at all n locations
catcttgggggaagctccttttcctggcttattcctgtggatggcgccgctttacctttctcctttgcttctgctgcatctncaggtggaaatcaccttaaggacctattgaaactcaagatccagcctcatgaaactcccaagcagttttctcaataagactaatcaataaaatttaaagactaaaatatattatctatatttttaagcttactaatactatggtcacttaatcttctggacgttactcagttgtgaagaatcaagttggtgctactgcttctatatattataataatttatatcaatataacatggtatttaataatatgtatattt

SEQ ID NO: 183217 - DNA, 434 bp, Glycine max
agctagtactggtacaatggaatgggatttctccatttgattcaacatgggaaaatcggctgatatccgcgactcccttcaccttgaggacaaggtgactttcccaggggaggatactgttaggatcgttagaagcaatgacaccagtagcaacgaagcacgttcacgacagctaccacgagacctcgatacttagaagaatacgtatagaaacccttgcatgtatacgttagctatctgttagttagttgtaactactccagcttggtagttagggccgttagatgttcgtcgtatccattgtagcttgtataaaagccataaagtggtatgaggaaggcagatatatcctttcaataaaagctagttccctcatgaggaaccttgacctcgaatcaaggcaaacatcatcttctctttctaaattcttccct

SEQ ID NO: 183218 - DNA, 283 bp, Glycine max
  unsure (1)..(283): unsure at all n locations
gagctttagagaaataacaactaaagtgntgagtttcaccgtgtgcacataggaaccatataaactactactactggtacacacgttggagtaataaaggaatgtacaaaccagctgaggcaaaattataaattatgaaactgtgtctctgaattacctcaacgctggccattttgaaaggacattgagagagggattcgaataaaaatgacaaacgaaagtgaaaggttggagagatgtgtatacgagacagagagaaattaagagtggttgtgatgagtgt

SEQ ID NO: 183219 - DNA, 337 bp, Glycine max
  unsure (1)..(337): unsure at all n locations
cgcgcaacactgatgggttaaacgcaaggaagactctggaagaatatgagctgtacatgttcgctaagcgtatcgcgtcataatactaatcgcaccgtttnccccacccccctaacgagaaaggcactcgctaagccgaaatttactaatgtgcgctaagcggtccataagtgcgctaagcgcacgagctcggacaaggtcacctattttagcctgaaatcatattctaaagagagagtttggactgggattcagaactttgcatgtctagggtttctagagagagaaaggtccatactgcacaaagttttgagagatatggttgtgtgaagatctt

SEQ ID NO: 183220 - DNA, 417 bp, Glycine max
agcttaatcatcaagagtataagctaaaattaatgcttaaccactcaaagaaaagcaaaacaacaattcaatgtttaaccatccatgacaaaaactcaaataatacttaatcaccatgaacaaaagcttacatcaacataaaacatcaacaaatggaataacacacaatctatctttaatggagacttttcacaaatactttgtgaaccaacaacaactcaagcttaaccactaatggtagacattaaaccaatacttatccaccatgaacaaaagcaaacaaatgaacaatatttaaccaccacacatggtagaagctaaaatgatcaaaacaataaaccaaaacagactgaaaacaataagtcaaaacagactaaatattaatgaaacattaagttgtacggtagaaaactggat

SEQ ID NO: 183221 - DNA, 410 bp, Glycine max
  unsure (1)..(410): unsure at all n locations
ntatactcaacgcagatgttccctttttgaacaaggatgatcagaagtaattgtgcctaccccctgtcacatcttttgatatattcttactttaaagtacattgaatcatgaatgttaattgtgatcatgagagtgtaggaacatttagctgaaagtatgctgtttaaagcagttagcagattagataaaaaatttcccccaatttgaaatcctttctatggtttgcccctcctgctgtctttatagatttgtatttgtatcatttaatggtatgttttggacacatgattttttagggaaaaggaaggggtaattttctttgagtcaaatattttttaatattatttttttagaataataggaataaaataatagataatcaatttatcatgaaaccttctaatacaaa

SEQ ID NO: 183222 - DNA, 439 bp, Glycine max
  unsure (1)..(439): unsure at all n locations
agctnggttcgaggtacttacccgttgattatcgaagaacgatgaagaagaatgaagaacgtcgaagaacggttgaaacctttgcgagattcctcacggaaaacgttacggaaacgtttcggaagcgcctcggcttagattttcttcacggaaacaattnttcaagcaaattcgaaagagagagaagtgcctaaggggctgaaccccttccttcttgccttcctcccctatttatagcaaaataggggaggtggttgccgcccagctcgcccaggcgagctcagctcgcccaggcgagcagggttgcttcctccagaagcaaccgccttctggaggaatattccagagggcccaagtgggcctgggtgctatttgcacccccatttttactaagtacaccccccctctgctgtttttggtgattctttttcgtaaagta

SEQ ID NO: 183223 - DNA, 293 bp, Glycine max
cgtaatatatcgacacgctcgaaattgaatgttgaagctctgagccaattcaaacgacaataaatttttactcggatgtctgatatagtcccataatataacgagacgctcgaagttgaatgttgaagctctgagcaaattcaaacgacaataacattttactcggatgtctgattgagtcacgtaatatatcgacatggctcgaaatgaatgttgaagctctgagcaaattcaaacgacaataactttttactcggatgtctgattgagtcccgtaacatatcgagacgctc

SEQ ID NO: 183224 - DNA, 459 bp, Glycine max
  unsure (1)..(459): unsure at all n locations
agcttcttatccaaggcactctgttggtggtgaagcttctctntccatggcttattctctagtgatgatgcctcctctaacctcttctcctttatcttccgctacaactccatgactgaaaatcactattgaaggaccttattaaagctcaaagatccagcctccatagaagcttccaagcaagcttccatcagatctcaactcatctaatatcctatacaaggggtccgtaggagtagaaccctcaccattaacactagatgaagaacgaagactcatngtggttcttaagttgtggttctttcttgttgggggtttgaaaacaaaaggtaaaagaaactacggttgaaactagccaaaataaacactaaaagaggtgtgaaagataaggtaaaaactaattggtaaaaagcaagttatctatgtggtttgacaatggaagataaaggaaatntaaag

SEQ ID NO: 183225 - DNA, 413 bp, Glycine max
  unsure (1)..(413): unsure at all n locations
aaatgccaaaaatagtgatccctaggttgcaaactcgtaaatcccgtgggtattgctttggaatggggggaaaagttntttgaatgcaaaaacgtccccctccttcttctttttttattttggtgcagggggttgctcgcccaggcgagctaacctgcacttttttttttgaggggaatattaaccctgtcccctcctcccttacgggttagcgttttgcctaacttgaacctacttaagttagaattaggtgttgattacttatttaaaacaaacaatagtaaaagaaacttcaaacgcaaaggatactgggctgccttgcagcgacgtcctctgctttgttagcaccggaaggggtggcgcttggtcggtcgcgatcctatccttcattcgcttccatccctaagtacctg

SEQ ID NO: 183226 - DNA, 455 bp, Glycine max
  unsure (1)..(455): unsure at all n locations
agctngattatgattggatgttagatgtggtttcactttgttatnnttccaactcattaaagaacctttcaaagtaaatgaccggttgaaactttattttttgatgattaactgatgttacaacacatatgatctattgaattttattttaatggcgattaaacgagattacaacccaccacgatcggttgaatttcattttaacattgattaagtgtgattacaacttaaatgatcgatcaaaactcgcttaaaacaaagaaaaagatcactgatggtagaagaatgaagatgaagacatgcaaagcagggatggacccctaagggtgcatagaatgaattcaaagcttcaaaatagataactaaccggtcaaagatcgaagaacgataaagaacggacgaagaatggtcacagaattgatcacgaaaacattactgaagcgccttggccttga

SEQ ID NO: 183227 - DNA, 368 bp, Glycine max
  unsure (1)..(368): unsure at all n locations
tactatcatcgtcatcggcttttttcttcattgaggtgccactttgagctgcaaggttcttcacctttgggcgtattctttgaaagatttgtgccccctttttgcacatgttctgtagttgcatcctatccgaagacattatactgacactgcctaacgaaggcaaccgctaggtccttccaagaatggactcgggaaggttccaagttagtgtaccaggtaacagctacccagtaagtctttctttgaaggaatgtatcagtaattccttatcttttgcgcatgcncccatcttccgataagacatctttagatggttcttggggcaagtaatccccttgtacttgncaaagtccagcaccttgaac

SEQ ID NO: 183228 - DNA, 480 bp, Glycine max
  unsure (1)..(480): unsure at all n locations
gatccttaagtcacctgcggcatgcaagcttataatggatccggtgttactgagactattgaatattgggaaactgctctatctcaccgcgccaggccaggtgtttcctttttttgtgagtgatgtgagtcaactccttgagactcaatgagatagccactaagatgcagtaattcgacttttgagatatctctagggttcccacgacaggacatgcagacattgttggttatgtggatgtagactgggcaagttctgctagtgacagaaaatatactacgtgttatgttctttttgttttgtagtttccagatcactcattcatggtgctgtaactatcttgagttttggcctcaattattttgaaggaaatataaacagagttntttgttccgctcatcttattttgtttcgcctttatatattatgtaatgcgaatatccttctccacatttcaggaagtgctggtacgatttgctg

SEQ ID NO: 183229 - DNA, 53 bp, Glycine max
ttggttgcatgtcaccgcagattctaaccaattataccgacagcagagcggtg

SEQ ID NO: 183230 - DNA, 448 bp, Glycine max
  unsure (1)..(448): unsure at all n locations
agctngccccacaagtcatttgtcggtgctctcactctttgcgcccagctcgctaagccaaatttcactaactcgcgcttagcgggccagtctcgctaagcgagccttaaaaatctaaaacgtcaaggagcctttaaaaccctgaagttggcaaaaaaactatgagaggagtcnatacacagagccaagagagaagctagagcgacaaaaacaagcctctaagagagtttagattagaggagtgagattagggttctagaggttgaaggagacatcctcaaccattcttagctattttcttccctcaaaatttatcttttgtgttgaaagttcattacttgtaatggaaggctaaacctcttgttggggagttctgccgaacctttgatgtaaaactctcttactatctatttaatggtgtttttatgtgttcattgcttctatctat

SEQ ID NO: 183231 - DNA, 486 bp, Glycine max
  unsure (1)..(486): unsure at all n locations
ctaagcttatgatgatgatcangatgatcaggagtttgaagatactattatgatgacanaaagtcccagagaatgagttcaagaatgagtcaagaacacttcaagaatcaagagaaatttaatttcaagaatcaagaatcaagaaaaggctcaatcaagataagtaccaaattttttttcaaaacattgagtagcacatgaagttttcacaaaagcttttaccaaagagttnttactctctggtaatcaattaccagtttactggaatcgattaccagtggcaagttttgttttcaaaaagctttcaactgaatttgcaacgttccaatcaatttcaaaatggtgtaatcgattacaatatattggtaatcgattaccagtgtgttngaacatctgaattanattcaaatgtggagagtcacatcttttcacaaaaatggtgtgtaatcgattacaatgactttgtaatcgattactagtgataag

SEQ ID NO: 183232 - DNA, 443 bp, Glycine max
  unsure (1)..(443): unsure at all n locations
agcctttccttccctatcttttgttgatgtctcttaactttagtaagagtattgttacgcagacgagaaaatgtccattctttctnttttagttngggtttatagggnttggaaggtttgggttggtgaggaaagcttttctggtgctcctttgacttacctataaagtgaatcccgatcgcacgaaaaatcatttacttaagctgttgtattgctatgggcaaagtaaactgtcaattcttttaagctaaccaatatttgttgtcatggtttacactttacagaaaaaaaaagttaggttaagacgaaattagcttctctgctgtccttntttcaactgtctctgtgctgtatatgtagttgtgttaatatttaattttatgattcaatattaaaactgtgtggttctcaagggacaacacagagacagtttaaaaagagac

SEQ ID NO: 183233 - DNA, 393 bp, Glycine max
  unsure (1)..(393): unsure at all n locations
taacgggcagaatctctagcacctttctcaatacgaaaattaacgtgttaatgcacactccaactctatgtaacacctacaaagagaaaaagttaacatatgcaatcaaagataactatataaaaagcatgcatggatgaatttagttacttcctcattttctttctctgcttttgatatcactagctttaaggaagcacttaattaagacaaaagtatgcttatcaattatgacaatatttcttgcaactaanatagagaatccatgtttcccccctcacgtaattcatgtcaaaacattctagaatatttagtggttaaaagcttaatatcatgtgaaaaatatatcgcgaatacgatcttatatacaaggggtgtgtccagtgtcacttg

SEQ ID NO: 183234 - DNA, 452 bp, Glycine max
agcttcggaagaaagtgatgaggtacaatttctaaaggcagagcttgaaagagcctggtagtcgaaaagaagttcaagtccatagccatcaaagtctgaaaagagtatgatgaactaagggatgtcaatatggccaccgatgaagccttggaacgagaaaccaaaaatgctcgaaaggaagagcacgtgccagcaaagttttgaggggctttatagggcagcaatagtgagctcaaactccgaagaggtgaaaggaatcatcacgggtcaaaggcatgatcttgaaggacgagctaaaggcttaccttaggtcgaaaagaaatttgtcccaacagttaagcgagactgaagggaatatgtgggccatcattgataagtgcaaagagaagctaaatctagcggcgactcacgagcaaaggctagaggatgagtacgccaagatatcagtagaa

SEQ ID NO: 183235 - DNA, 432 bp, Glycine max
  unsure (1)..(432): unsure at all n locations
gaaagtcgtatctagtcaaggtctgagagaccatacaagtttcctaacaatttctaattatgtgggtcattaagtctatcatatgctgacaatagccgagaagcccatgaatctcttcgggggcggagtaggtgtctgccatcgccttggccttggctaacaagcggngaagttcttgactcccgttcaaggtaagagcaaaccgatccatccacatggttgcctcttggtgtaaagagtcgatcacccttcctctagcctccttttccgtgtatacttgatcatactcatccacgattctatgctcgtgggccgtggctagacctaactcttcttggtacttggcgatgatagctagcatgttgatctccgtctcgcataaacgctgagacaagcttcttttggaccttgaacaagcaactaactactctt

SEQ ID NO: 183236 - DNA, 431 bp, Glycine max
  unsure (1)..(431): unsure at all n locations
agctntctttggtgctctgtgttagacgatttgcctgatagcacgcagagactaacccctctcccgcgccctctcgtaatcgtggccgacaagcccgtagacacgcggagatttacgtcatctttcgcgctcacaagatctgtcatactcacatttgagtcacgctgacggccgcaatacccgagtggttatccgtataagctttcttttttgctctctgtaagacaaaaagcctgatagcacgcagagactaacgttctcttctgcgcccttcgtcaatcacggtcgactagcctgttgaacgcgaagattatgtcattttccgcgctaacaagatctgcatactgacattagagtcacgctacgggcggaaatacccagggtatcggtaaaacatcttttttgtctctgtagacgagagtctgatagca

SEQ ID NO: 183237 - DNA, 329 bp, Glycine max
caaaactctgatgagttgggactaattcaagtgtttggacctcaaccattgaataacaatttgggtgaatatctaatctacaattacatttttttcactacgttgtatttaatattttctaactgatgtctactttggactacctttaaagcaaatatggtttatatcaaatagcttatgcagaaacatcatctagtatttttgtaaaaaattgctaaatacatttaaactacttttttttcttcaataacttaaagcttatacaatttatataagaactgcttggaatggtctatgacagtatttttaaagctctctatttttatatc

SEQ ID NO: 183238 - DNA, 329 bp, Glycine max
  unsure (1)..(329): unsure at all n locations
agcttgttgccattagaagagaatgagcatgtgattgtaattatgactggaattgttcctcagctcgccagattgattgtgaaggaatgcattgaccgtatcccggtgagagtgtgatccttaaattttgagagaaatgactatcatttaatactgatttttgcatgattctctgaagtatggactgaatgcatgaaattgaggatgatgaaggccatgtttgattgggatagccacttatccacgtgnttgaatgatttatcctttgcacctaatttgagctgaatgaattattgattgattgaaccctgagtctatagagtgttatc

SEQ ID NO: 183239 - DNA, 417 bp, Glycine max
  unsure (1)..(417): unsure at all n locations
gtgatagaagccatttgatctttttatgctgatangtcgaccttcatcttgtcttgcactccctcttcattatccatttttctggattgagtgttataggggtgcctttgcgcttttttagttattgtgagttccctaaagaaacaaacaatggtgagtatgccaccaaaacatgaatatgctaatgaatgatcagagcacttggattcacctcaaggccttttatagataacgtgatgagtttcagaacttctctgtttataaaaaggaacaaaacttttatctagccaagatcatacaaaagtgttataacagaacctaacggtttctaattatatgggccatcaaatctatcatgtgttgacagtaattgattagcctgtgaatttccttcggggctgaacacacttcagcgat

SEQ ID NO: 183240 - DNA, 383 bp, Glycine max
  unsure (1)..(383): unsure at all n locations
agcctttcgtcttacagacagttataaatttggntatacggatcaccatcgagtatttccgccagtcagcgtgactcaaatgtgagtatgacagatcttgtgagcgcggaagatgacgtaaatctccgcgtgccaacgggcttgtcggctgagattgacnaccggcgcacaaaacgacgttagtctttgcgtgctatcaggcttttcgtcttacagacagcaaaaaagaatgtttatacggatgaccactcgggtatttccgcctgtcagcgggacttaaatgtcagtatgacagatcttgtgagcgcggaagatgacgtaaatctccgcgtgtcaacgggcttgttggccgcgattgacgacaggcgcacaatacgatgtta

SEQ ID NO: 183241 - DNA, 363 bp, Glycine max
  unsure (1)..(363): unsure at all n locations
tcttanctctntatagcccttgctatagtcatgggcccttctatgccttgtattgggtcttgagcttccttctgggcttangtctggtctttgatatcctcatcacttattcacaaaggaccctaaggttgggtaccttagtttctttttctggggtaggaactgagactgtttgtgaatccttgtaagaattctatatgcataataaaaatctaattcaggttggattagataattggattaccttctcaacagaaaaattggtgtacatcttctcttgatcttatcttctgcttaatattctggtcttgagcaatatactgaacgctaaagaaaatatctttttgaagaatacaattttac

SEQ ID NO: 183242 - DNA, 409 bp, Glycine max
  unsure (1)..(409): unsure at all n locations
agctngatatgccttanagaggccaaaaatatagaagaaagtgaacttcctttctgcgttttttctggaaaatgcgatgaattcgctaagcgtgcatgttgcattaagcgagttcatcaatattgcttgaatatatgcattttcagacgaactcgctaagcgccctacgacgctaagcgagttcatcttttgtggatgaacattcatctccctgatgagttgactgtggctaagcggggctgattcactaaggccaggtaacttagtcaaatttttgttgaacgctgcgcgctaagcccaacctatctaggctaagctcatttcattgcggcagccattgtgctaagcgagcctagcttgctaagcccacatacttagtgaaatttctaaaatttatggtcccgctaag

SEQ ID NO: 183243 - DNA, 290 bp, Glycine max
gaagcatgggttacacttggtggaactcggatgaatgagagttttgtgagactcaactcaaaggtttacttctcttcctcttttactccttcaatttcgtgctcccccctctctctttctctctctctttcttttcctccattgaagcatcctctccaagcttcttatccaaggcacattcttggtggcgaagctctttcttccatggcttattccctagtggatggcgcctcctctcaccttttctcctttgtcttccgctacatctccatggtggaaaatcaccattg

SEQ ID NO: 183244 - DNA, 474 bp, Glycine max
  unsure (1)..(474): unsure at all n locations
gggatcttaagcacctgagctgcacttctgggccatctgcaagcttaattttaaagttatttacaagaaatatacatcattacaaacaaaggccaaacaacacttctcatggcacgagtgtcaacatgcactttataaaataatcatattggggtcgtgctattttatgacacatacgtatttgcacaataaaaattctgtgtgaaacattttacaacacctatccatgtatatatttttttgacaaaccttttcaatgctacatcctatatatatacacacatttttttggaaggcttcttttgttacctactcacaaatacacatattttgaaaaacacttttacgctacccatccaacactntgtaaggcacttcatgctatatatattcatattatgcaagggcatttcatgctattcatattttgcaaggcattntattcaacattttgcaaggcattttattcaacat

SEQ ID NO: 183245 - DNA, 460 bp, Glycine max
  unsure (1)..(460): unsure at all n locations
tgagcgctttcgagactcacagaagtcaggtgggggaaaaatcagaccatgtgcctgaatcttacacccagtgggttattgataggaccaaaagctttggcctaccctaccacttacctagatacctatcggccaccatcccaccatcatccttgcctatcccctttgacactaaggaagagtttcatgaacaattaaccaaagaaaggcaagaaaaagaaacttggaagaggagatgccaggagctcgagcgagagaatgagactntgaaggggaagatagcccaacagagccgtgagctttttatccagaaccagagggtgattgagaaggacgacttgcttcgccggaaagacgctntgctccaccaagatgctagaaggaagaggagnngttatggattgttctcccgtgcacattcagattccgaggatccatctactcnncggagttgagtctg

SEQ ID NO: 183246 - DNA, 317 bp, Glycine max
  unsure (1)..(317): unsure at all n locations
cacctgcagctgcagctcaacattcaggagagggggtgttgtttctgtgcgcaccaccntcccggaaccgcctgcggatttgtnttggtccacatacctttaattttagcgtccattatatctagggacacctcttacctcaatagaagtattgtcgttgaattcccacacctaccgattcatacgaacgtgttatttttcatgatcaatcagacatccgataaataatatgccgttgatatttcaagcttaagaaccaactgaggggaaaaatatttggataaatcgacattcactgaaagatttgtgcctaatat

SEQ ID NO: 183247 - DNA, 429 bp, Glycine max
ccgaatatatcaagacgctctaaattggatggtggagctctgaccaaattcaaacgacgaatactttttagtcggatgtctgattgagtccctgaatatatcgagacgctcgaaaatgaatggtgaagctctcagaaaattcaaatgacaataaactttttactcagatgtcttgatgagtcacgtaatacatcgagacgatcgaaattgaattctgaagctctgagctaattcaaacgacaataactttttgctcggatgtctgattgagtcccgtaatacatcgagacgatcgacattgaattctgaagttctgagctaattaaaacgacaataactctttactcggatgtctatttgagtcccgcaatgatctagaccgctcgaatttaattctgagactcagagctaattcaaatgacaataact

SEQ ID NO: 183248 - DNA, 358 bp, Glycine max
cccatactaattgaacagttcaagtggtgtgcatcaatgcatgattaaataccggcaatgatactttaagctccacctgtatatggtctgggtatctcttatccctacgcccatacctaacctggaaaattttaattctatgcccaccgctgatatctgcagctgcaagagacctcgatcttcatcaccttgttctttacttgtcagcaaaaaccctccctttaaaaattcactccttacacaaactgttaatatcttaactcattaatcgaaagaaaacatatcaatggtgtatttttataaacatccatatttttacccagtccatgatgattgagcacaatgactggatctatgc

SEQ ID NO: 183249 - DNA, 360 bp, Glycine max
  unsure (1)..(360): unsure at all n locations
ggactttgccatataaacatttatgagctggcacaaacctatttcagattattcatagaaccttagtaatcacatgagaaacaaatagtaggtacaatttttaaagacacgaagaagccctctaccaagtttcatctctatatagccatgacatggacagttcctatgttgactccagaatcgtatcatatgaaagagtaccataacccaaacatattaatttaattaatcaaagcaaccataagaattagactgagttaaacatggtccttatcagtaagacttanagcctactctatccacgaaatagtttttcagtgacgagggactgccaaacttataactctatctagtttatat

SEQ ID NO: 183250 - DNA, 487 bp, Glycine max
  unsure (1)..(487): unsure at all n locations
gatccctaagtcacctgcggcatgcaagcctcactcaaagactcatctggaaattttgaaatgtataaattgtngctctgccctaatnntcctcccgcatccacggaaatatttcttcaaaaatttctctaccacttcctcccatgtcttcaagtttgtccccttgaaagattacaaccatctcttagcttctcccgctnnanacaacgaacacaagctcagtctaatagcatcttccggcacccttgctatcttaactgagttacaaatttctatataagttgcaaggtgtgcataagggtcttcattatgcaagccatggaaaagatttccttgaatcagctgaatcaaggagtgtagataagaaatgttgcgtgcttggacttccggccgcacaatgcttgtganaaatagcagtacagtggagttggaataatcctcaagagtcaccctctttggttgatcatctgccataatgtgagcttcc

SEQ ID NO: 183251 - DNA, 398 bp, Glycine max
  unsure (1)..(398): unsure at all n locations
tcgaccctgcccatgttcctgaataacaaaagaattagccataaagggtactgagccatntaaagagccagtcaactgacttaatgagattagattatatggacactgaggaacaaataatacaaaatttaatttcaatgaaggagataatgagacttgaccacttccttgagacgcaactttggagccattaactacggtaacaaggtgagaaatttttggaaaagaaatggatganaaagaagacttcgttacagagatatgatcagaggcacctgagtcaagtattcaaggactatngacttcaatggactgagaaatgcaagctgtcgagaaacatggtaccgatgaagatgatactcgattgctagatntccttgacttgagcttcaaatact

SEQ ID NO: 183252 - DNA, 172 bp, Glycine max
  unsure (1)..(172): unsure at all n locations
tattagaaaattggctattgttttgggaataagtgtggnnttaccacgccccattcgataacgagttttgaaggccatgcttcttgaagtaatttgagccttacttgaagaactttgcatattggttaatatttggaccgtgctgaatatgattgtgcttcttaaaggctac

SEQ ID NO: 183253 - DNA, 452 bp, Glycine max
agcttgccacccagctcgctcatgcgagcattgttgcttcctccaaaagcaacacttctggaggaatcttctggagggcccaagtgggcctggttgctatttgcacccccatttttactaaatacacccccttgccctttttttggtgattcttttttcgtaaagttaccgaaacttacggatttcgcaacgatacttgttttctttccgtaatgttacggaacctagcggattacataatcatccccttttttgacttacggaatgttacggaacctcactaattgtgcaacgatgcttccttttgatttccggtgtgtcacggaaccttacaaattgcctaatgatgggtgccaagcacctcaaaaatgaccaaatacaagttacatgcatccaagccaaggtccccggacgaaattagggtatgacagttgcccctctttacttgtctt

SEQ ID NO: 183254 - DNA, 391 bp, Glycine max
  unsure (1)..(391): unsure at all n locations
tcttacaactcaagctatacaccaagggtgacacaaccctgtattctttgtcctaccaagtcactactagcgcttaacaaataaaaagatttgtagtttgtttgcacagtgactaactcttactcgtcttacagacaaatatataatctactcacttaatcttttctctcaaggtgttcaaggtgtattgagagctttttcaaacttcacaagaatgtacaaagaactntttacaaaaaaaaaatgaatgttagggcataggtttgtgtcccatgtctttaaagattctgggatttatagttcttcatctttaagtgtccgtaacagatataattcttctcttgagcttacatntgatggttgtggtcattagatcaatntaatgatttca

SEQ ID NO: 183255 - DNA, 448 bp, Glycine max
  unsure (1)..(448): unsure at all n locations
agcttcaggttgctcattgactccagattgctgcaaagaaggacaaagatctgtntgtgatctgcagaagaacatagaccacagacccttgcaacaggtgcagatgcatatttctgattcatggcaagctgagttactagattgaccaaggcatcaaattttccctcaacgtccttatttttagcagatgaagatgaatatgtggccacctcatggactcctctaaggacaatagcatcatttcttgcactgaattgttgggagttgaaagccatcttctcaatcaaattcctagcctcagcaggggtcatatcaccaagggctccaccactggcagcatcaatcatactcctctccatgttgctaagttcctcatagaaatattgaagaaggagttgatcagaaatctggtggtgagagcagcttgcacacaatntcttgaatcttt

SEQ ID NO: 183256 - DNA, 384 bp, Glycine max
  unsure (1)..(384): unsure at all n locations
gttttattaattcaatggttagaatttaagagagcacaagtcctagacttatcccaatgatcttttcttggatcatacaagtagccttctcactatttttcttctcttaagtcgcttttgaccttattgaaacaggacacttattcttttcttcctcttttttnttttttacatataacttatttgttgtgtgtgctgatgattaacctttttcttttcattctaattgactttcctcccccaaatttagagtaaattgccttgaaccatatgctctcctagaatctaaacaaggtatcaggagataatcatttaagtntagggttcaattcatgacanaaatcattcagcttatagaaggagcaaaagatacagttatcattc

SEQ ID NO: 183257 - DNA, 435 bp, Glycine max
  unsure (1)..(435): unsure at all n locations
agctagagtcctaacagtcagtctaaatatttttatatatanngacacgcggtnntccccccaccagacaatacgggtgcatactgtaccctatgaacaaacggatactgtttataaataaaaaagacataaaatgactgttcaagccttatgtatctaaagttcacccaccaccacaaaacacttgtttatttctaacaaagagaaatgaatccatatatatgaggaaggaatgactttgaaactcgactatgctttcctcattatcaagatccaatacaaacctttttaccaatagcatggccggtcatgttgtgaaacgtggtatatacattctcaggatcagatagagaagagacatatccttactacactaagcaacacatggaatattgtggcctgttggcagtctcactatacactatactgtgagag

SEQ ID NO: 183258 - DNA, 446 bp, Glycine max
  unsure (1)..(446): unsure at all n locations
agcttgaatctgatgtgttgcctcagcatctttaggtagggaatatgagcgnntgaattatatccagcgaggtcccagcaagcttataaatagactatacaccttattaggaccttccatccacttactacaacaatatgcaactctatgcactaattacttaagacccagccatgaaaataagtattgccagcaatgtgtgttttaaagatagctataagttgatccttaatgctcttgctgccatttttttaatatgctgggattatttttcttattgttaatactgattttctgtacagtgatgtatgcactcatatctatgtctaagagtgtgtcggggaatgtacgtatcgagttatggttgaatctgatggttaaaacaaacagaatttgcatcattctcgagcattcgttaagaggttaacctgtacttgaagggatgt

SEQ ID NO: 183259 - DNA, 406 bp, Glycine max
  unsure (1)..(406): unsure at all n locations
ctcagctgaaagatacagcgntgcagattatctcctgtctggtcagtaaatccgtatttgtgctcccttaatgatcattacaatatcacaagcatcgttggtatctttttatgggggggttcatgtatttacaatggagtgaaacgtttcaattgccgagaggaaagttttgacatcgaaacttgaatgtttattacggttggaagtgtggttatcctagatttggttgctactgagtggcggagagtgtcgctctcattatctgtattatggggaatctagctattaatgtctgtaatccactatccagtgagtattgctgaatgctcatggcgctctctattgcattctcgttatcttagttctacacacggtcatcataattctgtcaacagtcatcaacaca

SEQ ID NO: 183260 - DNA, 439 bp, Glycine max
  unsure (1)..(439): unsure at all n locations
agctnggccacagtcagcatttatctcattccattcaacctaaacatttctcctcgtaacatcataatcaaagcttcaatattcaaactaggaagaaaaaggattcacttcaagattaagaaaattctctaggataaaaattatttcatgaaggaacatannacaccaaaacatgagtgcatgcaccacaaagttgaaagaattaacgccatagattagttatccatattccacaataagttgtctggttcaaaaagaacttcaagacacaattagccaaagaaatttaatattttgtagcaagaggattttttaaataaaagtagctacagcataagtttatgaacatccattacaacttataccaagaaattcttgataatgaaaacaatcatgtactgtcatttntcaatgacaatgatactgtattaaattcctc

SEQ ID NO: 183261 - DNA, 300 bp, Glycine max
tttgggaccatatatacttatatatttttgggtaccattaattttttttaaaactatcaaactttgattacacattacctgctccataacttctattcctataatcaagtaagaacttaattacacattaggtgtgagtcatgtgtccctttatatttttcattgtttttattggctttcctatttctggtaatgattccttttcctttaactctcctattacgtgcctactccaagagcaaagggatattaaagatttaatgtaaagaagacttttaaaaaggcttttaaaagactatc

SEQ ID NO: 183262 - DNA, 459 bp, Glycine max
  unsure (1)..(459): unsure at all n locations
agcttgtatgagtactgggaaagattcaagatattgtgtgcaagctgccctcaccaccagattttgagcaactccttcttcaatatttctatgagggacttagcaacatcgagaggagtatgattgatgctgccaatggtggagctcttggtgatatgacccctactgaactngatttgattgagaagatggcttccaactcccaacaattcagtgcaagaaatgatgttattgttctgagaggagtccatgaggtggccacgaattcatcttcatctactaaaaataaaaagcttgaaggaaaacttgatgccttggtcaacctagtaacccagcttgccatgaatcagaaatctacacctgttgcaagagtctgtggtctatgctcctctngtgaccaccacacagacctttgcccttttgtgctacaatctgaagcaattgaacaaccagaagctt

SEQ ID NO: 183263 - DNA, 418 bp, Glycine max
  unsure (1)..(418): unsure at all n locations
ctctttctttccttcgcaacttgaagtcactattggtaccccacaaaacttcccgaaatttgttcccgccatacttttccttgcgaagccctttggtctcttggtcaaaggctcttgcggtaattgcattctcctcccgtaacccggcacactctttccgaatgtgtgttgcggccaacttgaacttctccttggcaaatttcgcctttcctaactcgcttttgagagcttggacttcttcgtcctcttccggtgcttcaaaactctcttcgctgatgactnttaactnggcgagccaatctaaacttcgtatatgaactttcagccattcgtggtacccatcaatgatgccattacgaatgcctctaagttcttgatctttccttaacggngtttcccatgccttatggattctttg

SEQ ID NO: 183264 - DNA, 473 bp, Glycine max
  unsure (1)..(473): unsure at all n locations
aagtcacctgaggcatgcaagcttacaaggagaaatatacctaccatctacatagtgtttaagctcatcaagacattgtcctgtgttccatcatcattttgcataggtacaagagccacgattatgcacttgaataaatatttgatggatgttgattgattgcaccattctatgttgaggtaatctngatatttaataataagtttggattgtatggcactacatatctattgtctagggctatgtgatttttctcaatatattttccatcattacgcctttcataaactcaatatccatcttggtcaacaacagtttcaggttggccaatttttgaaaaaaaatctagaacacttcccatctttcatgcatggcaactttctgttagcattaccacataggccatgcatcatatgtgatgtagctccatgtggagcttgtaggccttggatcttcttcatcaatggagtcct

SEQ ID NO: 183265 - DNA, 475 bp, Glycine max
  unsure (1)..(475): unsure at all n locations
gctgtgactttgcattttttaaacaagcacttaaaatgtttacttttgaaagaatcttcagaaacaagtcacttgaagaattgtgacttttggaaatgtattttttgaaatcagtcactggtaatcgattaccattaaggtataattgattacacatcaatagatgtgacttttcaatttgaattttgaaaattaaaacatttagaaacacttgtaatcgattacaagtattgtgtaatcgattacacaagtttaaaatgatttaaaactgttgaaatntgaaatctaacattttaaaacactggtaatcgattactaccttctggtaatcgattaccagagagtaaaactctttggtaatgattntgtgaaaacttcttgtgctactcaatgttttggaaaactttnttagtacttatcttgatngagttntctcttgattcttaaatcttgagtcttgagtcttgaatcttga

SEQ ID NO: 183266 - DNA, 418 bp, Glycine max
  unsure (1)..(418): unsure at all n locations
agctaaangaaacagacaaangtataacctttttccataactatttataaattaacgagaagaacacaccctcatgtaaaattggttaacccgtgatgttaacaaatgaataagaagagatgacgatggatgatctaaagagatgaggaatgagatcaataaggataatgaaggncctccccgcaccagagagatttgtggaatacacaacacgcactattagtgagggactggagagagaaattttgagggtttataaaatgaggacggcatgctttgtcattttgaaattttttgaggatataattgtccaagcattgtttacgaaatagattcccgaaaagcaaaatctcataagctgcagatttgaactttatgaaaagatctgcgtatagtctttacttttccaaaagctaac

SEQ ID NO: 183267 - DNA, 357 bp, Glycine max
tcgtgcctcacctcatcaccagaagctggagaacattggttttcccttcttggttggtgcctctgctgggtttctcataaccaatggccagaagtctgcttctggatgggtattttcatagacaaaacatggatgcatgaactgatgaaccctgtaccgagctaactaccgaataattgcaaatatgtgttttacgtatgagccataatatgttatttatactatgaataatttgtaaaatacattgcatatcctcccataagaaagacaaagctattattcattttgtctttatacaacacaatctttatgttttagtacttgtatttagacaatgcatgccttacgttctccatg

SEQ ID NO: 183268 - DNA, 453 bp, Glycine max
  unsure (1)..(453): unsure at all n locations
agcttataatatattattacgctcgaaatttaacatcataagctctcgagaaattcaaatggtctaacttttcacctagatgtccgattatggcgaatcacatatcgagacgctcaaaattgaacatcggaagcccttgagaaattctaatggtcataacttttaactcggatgtcgacccatgcgcatcacatatcgagacgctcgaaaaggaacaacggaagctctcgagaaattcaaatggtcataactttccacactgaggtccgattaaggattataatatatcaagacgctcgaaattaaacatcgaaagctctcaagaaattcaattggtcatcacttttcacacggatgtccgattcgggcgcataatatattgatacgctcganattagacatcggaagctctcgagaaattcaaatggtcataacttttcacacgaatgttcg

SEQ ID NO: 183269 - DNA, 475 bp, Glycine max
  unsure (1)..(475): unsure at all n locations
atgcacgaaatgtattatgaaaatgagatgcccgtttaaactccatatcctagttaaccatgcgttaggtaccatgttcaattattttgtttttaagtgaaacgggtttatgaacccaacatggttggctcctaacacatgaaactaagaatgtagtgtgaagtttcacgcttcccccttctttgttttttgtttgtagaggaaaacgcaaggatgagcaaacatgaaaacaaatggtatgcaattttgcagatcaaaaagtttgttgaacgcatatgcatgatgatgccatgactcatgcaaaatgtgaggctggaatatgataacggacaaatgcangatatgtccattatgatgttatgaagagatgcttatgcgatgcatgatatgaattgcatttacggacacgagagcccggaaaaatatctcttcttacttgcgcatttggnggcgcagtgccccatgtgtacaatta

SEQ ID NO: 183270 - DNA, 390 bp, Glycine max
  unsure (1)..(390): unsure at all n locations
ntaacctcaacccatcattggtgttactatgagcattctccgaattcttttggacataatctaatgcctctgatagagataaaacatccatagcatccgagaagaaatcatccttgtcatcgtcgccatcacaactaccatctccctgatcatgaaatgcatcatcaccacgatcaacatcttcttcgactgcttctttcggaagaaaccaatggcgaggtggtagtcttatgcgcagcgtgccaccgtcttgtgtgttatcactcctctcagtttctttnggcttgcctggtgctttctcccaagaaaatggaaccctttcacttgtattttggactgctccaactgaatatgatgaacatgaagtatctgcaacatttggactaccga

SEQ ID NO: 183271 - DNA, 436 bp, Glycine max
  unsure (1)..(436): unsure at all n locations
agcttctagactcagaagatggctctntgtttcataatgctgctnttgctctttatcgcctcgctgataatgaggtatgatataactcanaattcaaatgaaatgaagatctgtcttaattgcttaaaaatttgttacgttgagacttaattaactatcctctgtnnttgcgccatccattttattatgacccttangataatgcgtctgatttcataagggtaggtggagttcacagactgcaggatggagaatttattgttcaagtaagttttttctttaatacccactttagtttttatttcagggtttctgcttttacccttggatgcctaaatttaagaaaattacaatacttaatgattgcatctgaacattcgtaatttaaagaactggaggaaaatagattcatctttgacctatattgacccttatg

SEQ ID NO: 183272 - DNA, 385 bp, Glycine max
aaatctcttaacctgaagacgagcctattttcttttctttcatccataaattcgaatagagataagccattcttgggaacaaatctaacatgtgagttcttaactctactggaatatggagtgttgcatgcactgtgatagagatggccacaggaaagcctccatggtagcaacagtatccccatgaggtacatgagagcctcacttaacatagcaatataattttatcgtgactttcatcaattgatatctgtgtgtgtgagcgcacgagcatgtaattggatctgtgcatgttttcacttaaacatctcttattcttaagtgtcagctactttctatattgagacaacgtaatctcatccactcataccgtgacatctgtctg

SEQ ID NO: 183273 - DNA, 455 bp, Glycine max
agctagtactatatgaaaagataaaatgatacaagggcaaaaaagtattccttgaaatgatgaagatgttgcctttgtgcaattttttaaagctcgccccaggcatttgtttaaacatgagcttgaagtgctcaaacacaagtttgggcgcacgactctcgatggccatccatacaaacattctatagattgcagtagtattgctttggcttggaacctaaaaagaagccacctattggttcttatcatcattaaattgagtgttgttatcagactttgaaccacttcacttctgcttcactcaagaaactcccttccatgatctattcatggcaatgggatttctatgctacgtctaatcacaccttctcttttatgatgatattttcattctctcgcttcttcttcacccatcatgtagaccccatcattgaagaggttgacttagacactgg

SEQ ID NO: 183274 - DNA, 395 bp, Glycine max
  unsure (1)..(395): unsure at all n locations
tcgtctggagggcccaagtgggcctggttgctatttgcaccccctttttactaaatgcaccccctttctatttttatgtaattctttttccggaacgttacgaaactttacgaatttcgtaacgatacttattttccatccgcaaggttacgaatccttacggattatgtatttactctnttttagctttcgaagaagttacggaaactcacggattgcgcaaaaacacctcttttcgatttccgccacattacggaatttcacgaaccacgcaagcctgcttcttttcgatttctgagacgtctcgggacttcattcactgcatgtcatcaaagaataatccccggacgaaattagggtatgaacagtgcccctctntacttacctctcatcgg

SEQ ID NO: 183275 - DNA, 450 bp, Glycine max
  unsure (1)..(450): unsure at all n locations
agcttctatgaagtatgctcttactatgaatagtnnaacgaggagcttcgaacttgctctacgttgaaggtgaacttccatattagcaattttggggtcattggagaagatataggggtggtgtaaagatttgaatatttgttaaattaccacacaatgaccataccttcgcatatttgggtattctgaacaaagtcaatccaaggaaggaagatatgtggagaccaatcattgaaaaattccaaaagaggttgtgcggttggaagcatagacacttgttcgttgctaggagagtttgtctcattaatttcttcctttcttctctccctttattcttttttaaggctctgcaatgagttatatctacattgatttgtcttcnaaggaatttcctttgggttagttggaggaacgtatgtcatcctacaagccatagagggttggggatac

SEQ ID NO: 183276 - DNA, 446 bp, Glycine max
  unsure (1)..(446): unsure at all n locations
ctattnctagaataagatgaattatttacatctatgccattaatgagtttactgtgaccagataatttttttttgaactatccttattctttctaaactttagcttaaaaactgaagagtttaaccatgctaatatcttatcttctaccattttaataatataaaaatactttccaatcacccaataaagaaataacactatctaccccaaacatatgaaaaagtggaatgatacaatttgcatctccctctttgaaccatgtcaccctagttttttgttggagtagagattcatgcctcctagatttcctccaaaattcccctattaggatcctcctnctccaagccatcctcttcaccaattagatccataacattagatttttccaccaattcctgtgcttgccaatgaacatcctcaaggcactactngttccactttctca

SEQ ID NO: 183277 - DNA, 416 bp, Glycine max
  unsure (1)..(416): unsure at all n locations
agcctaggctaaattaggctatactntctttagctgcttgagctgagtctagtnttccagacggatctgcgaacgaaacttattttaagttagtctaaacctaagagggtcgtctaaattgggcctagtccaacaagagggatctaaggacgaagcttggattgattccctctaacgagggatcgaggtttattaatttaggctacaacatanaacacaagagaatgattgattagagaaatatatctatatgcatcagcttgtttgttagaaagacccaacatttctaccttactgtgtcacttttacttatcttgcattttatagttnttagtataaaagaatagtttaaatcttgtttgaaattatcaatcatacatgttctctcaacaatgcttcatttctgaacttaactc

SEQ ID NO: 183278 - DNA, 335 bp, Glycine max
ctttgagaaaactttcttaagaagctaaagcttagctacacacacccatctaaaaactaagctcacctctttgacaaaatacctgaaaatacaaaaaaaaaatccctactacaaaaactactcaaaatgccctgaaatacaaggcttaaaccctatactactagaatggccaaaatacaaggcccaaaagaaggaaaaacctattctaatatttacaaagaagagtggatccaaccttgactcatgggctcaaaaatctaccttaaggttcatgagaaccctagggccttctttagtagctctagcccaagcctcttggagtcttctatccaata

SEQ ID NO: 183279 - DNA, 433 bp, Glycine max
  unsure (1)..(433): unsure at all n locations
agcttcatgatgaatcatgattgattcatataattttgatgataacaaagtgatgacaaaaagctcaaaggtcaagaacacttcatgataacaaagatgatgatctcaagaatcaaaggatgagttcaagatgttcaagattgaatcaagaacacttcaaggctcaagacgaaatctgatttcaagaatcaagaatcaagattcaagaatcaagattcaaggttcaagcttccaagaatcaagatcaagattcaagatcaagattcaagaatcaagatcaagattcaagaatcaagagaagaattaatcaagataagtatgaaattttttttttgaaaactgagtagcacatggatttttctcaaaacatgtttaccaaagagnttttactctctgataatcgattaccagattgttgttatcgattactagt

SEQ ID NO: 183280 - DNA, 380 bp, Glycine max
  unsure (1)..(380): unsure at all n locations
catgagtttcaaaatataatcatccttcaaaatcttaataatcgtcaatcatctatctttcaatctttttcaacatcatctctcaaacatctttgaatcaatcttttaatatctttctacagaattttctgattcatttctcttcatctttctaaaaattttttatcaacactttctcttccaagaaaagttctttgttcaaaaacttgtgttattcatctttttcattctcttcttcctttgccaaaagaacttcctgaattcttttgagtctctnttctcccttacaaaagattcaaatgactaactgcctgagnaattttttattcttcccttccccttaagcaaaagattcaaagggactaaccgctgagatatct

SEQ ID NO: 183281 - DNA, 446 bp, Glycine max
  unsure (1)..(446): unsure at all n locations
agcttaactgaaattattaatcccttaaatatacatcataaaatgggaaactagtcattcatcttgttagttacttatagccatatatcaacttcgtgcaacatactaaataatcaactntaagattttatgaagaaattctcaaacaaaaaaatagtataatccattctattttaaataataaataattttttagtaaatatatatagaatttactaaataaatataatcataaagaatgaaattcgtgatatttacttcaaaattgtacttaggtattgcccaagtttgcaacttaagtttgtcaaaacgacacccttctacaatgaatgcacgaccataggcccaggtgaggaacacagaccaagccgtcataggccacatcanacgaaggtactcatttggtgtgtaaggtttggaggcagggaaggaaatccaagcctgag

SEQ ID NO: 183282 - DNA, 432 bp, Glycine max
  unsure (1)..(432): unsure at all n locations
tcatcaacaacatcgattntttcaaaaaccgatgttgctggttataaaacaacattggntcttaacaaanaccaatgtctgttatcagaaaacaacattgggttttagtaaaaatcgatcggtttttacttaaaatcaatgttgtttgcatatattaatatcaattttgataaaaaccgatgctaatatgaagatatataactttnttttttataattcttactatataacatcgtaattttatgttaacatcagttttgaaaaatcgatgttaacgatattactttcaatgtcggtactctcaactaaccgatgttaaaagtccttaataaccgatgttgaaaccctattnttagtagtgcaacaaagaattttgggattgttaatcaagtntattaacaatatgaaaacataaaaaattattatttacta

SEQ ID NO: 183283 - DNA, 436 bp, Glycine max
  unsure (1)..(436): unsure at all n locations
agctaatgtgaattcgaagttttataancatagagtcaaaatntattatactacacagctttcaaaaagagatttcagcctagccaacaggtattgttatttaattccaaattgagattgttttcaggtaagctaaaatccaagtggtctggaacattcacatcacgaagttatgctacatggagcaatgataattggaggatccagccaccaaaagaacatgcatcgtgaatggcagtacaatcaaaccctacttatgtcgtgatttcaagaggttgaccactgttgtccaactacaagaggcttgaaccacaacaaggatgtccagcttaaacgatgttaaataagcgctcttgggaggcaatctagtatttttcaactcttctttaatattctttcctgattacgaattgcgtcgtgtaatatctatttgttt

SEQ ID NO: 183284 - DNA, 410 bp, Glycine max
  unsure (1)..(410): unsure at all n locations
ttctccttctttattgaagctctatcaaagctccaaccttcgctcaccattggtgctgcaaatagagaaaggaagccactttcggagtcgtgagtgcacctctacgttgtgggactttaaatttcaggtttgggtagacttctttctcacataatttcgtgggtattgggtgtctgggagatatgatgggtagtcttactaggcttatgccttatgggagttatctgcgaaggaatttgttgaaagcatgctaaacttgccatgtttggtgtgagtcaagcttacccattatgtttcagggtcttatgatgatgctcgcgatgcttgagtgctgaaattgctcgatgganaactgatagagatgaatggtagagttaaacctatggttaaaaagtgagaatgtagtgata

SEQ ID NO: 183285 - DNA, 428 bp, Glycine max
  unsure (1)..(428): unsure at all n locations
agcttgcctgtccgatgcagcagtaatgatggttctagttatgtnggggaacggttacgaacccggaatgggtttaggcaaagacaacggcggcataactagcctgataaatgccaaaggaaatcgtgggaagtatggtttaggctataagcccactcaggcggatgtgaagagaagcatcgcgggaaggaagagcggtggtcaaagctcgtgttggagacaagaaagtgaaggaagcccgccctgccacataagtagaagctctataagcgcgggtctgggagacaaaggtcaagtggccgcgatatgcgaagatgatgttccgagtacattggatttggtacgaccatgccctcctgatttccagctgggaaattggcgagtggaggaacgccccggcattacgcaacgagcataatgtaaacctt

SEQ ID NO: 183286 - DNA, 477 bp, Glycine max
taaatctcagcttgagatgcttcaggctctccaaggcaaaccttgcgtttgattagcctttggagaagcaagactcactaagggtggatcttgggtttgacgagcctctggagaagtgagactcaactaggacagaccttgggtttgacgagcctttggagaagtgagattcaccaaggatagactttgggtttcaaaaacctataagtctcaccaaggacaaaccttgggtttgatgagtccttggaaacacaagactcaccaaggacggaccttgggtttgatgagcctttggagaagcgagactcaccaagggcaaaccttgggtttaacgagcctttggagaggcaagactcactaagagcaggcattgggtgatgagtcttagactatggaatgctcgacttgggtttctgcgaggctcaccaagggcggaccttgggtatgacaagcctttgttctctcatttcgttgtct

SEQ ID NO: 183287 - DNA, 368 bp, Glycine max
  unsure (1)..(368): unsure at all n locations
agcttatttaacttgggccttcaaattagtttgggccttcaacaacaataaatagtcctgataatgtntctgcctgtgggccttcatccttctccactcgggggctatgtccttctacacttgggcctttagcctgtatttggcaagcttcatgattctcatcacgtttttaaaaaaaaattgcgcaatgtcggctggaaaatatcagtcggggatacttaacgaccgatgttgcctattgagtgttctatacaatcccttaatgaatgttgcctgatgtccgcaaggaaatattctatcggtataagcggtgatgcttctttttaaacctccatcagtcatcttttgtggccgacctcaactgccat

SEQ ID NO: 183288 - DNA, 471 bp, Glycine max
  unsure (1)..(471): unsure at all n locations
tctagtcgtccatagacctcctctgtggtacggtctagcttacgttgcatctgtgcattcatcgcatccactaacagacgttgagcgccgtccaactgatggtactcgtcaccaccatggtagacgccacttccagtgaaggaagataagtctgggtagacgccacttccggttaaggaagataagtctgggtagacgccacttccaatgaaggaagataagtctgggtagacgccacaaggattaccttgataagtctgataattggttcaacaaggaacccagagagaaactctcaccaaattttatcaaaatgccaaaagttttttttattcaaaacaaaaaccaatacttatagtgtagctgaacaaaaagataaaaatagacatgggccttctaaacnagttgggccaaaattagaataaaaataaattataactaanaacttatttaacttgagccttcaaatag

SEQ ID NO: 183289 - DNA, 163 bp, Glycine max
tgaagaagagccatggctaagtgcttgctatcaatgagaatctgtagaagaccgtgacaccactctaaaccgtgcatttgaagcgacgtacaatgaaatggcttcttgtcacaggtataacaccctaacatatatctatataatattaataattatgtttgat

SEQ ID NO: 183290 - DNA, 475 bp, Glycine max
  unsure (1)..(475): unsure at all n locations
tataacaaatgctncattgacaagagcttattgaatccattgcttaattaaggggtttactcaaaaacacaccctctatggacttgagttcacctaacaagaagacatgagcagagcaaacaaacacaagcaggctctcccacctcaaaggaatatctcaagtcaaccacaagctaatacttcatgcaacttgcaataatatatgcaaataatagattatcaatccacagaataagacatctgaataaataaataaataagaaagactcaagggcacagctggatagcaagagtatcttgaaacaaactatgaattgacgttntagccagaacagttcccggcccacacctcagatctgaatttatgattattctgagcaagttattcaaccaaaatgctacatttaacagacattgcaatattctactccctgcatatgggaaacaatgtgatgatcacctacaacttggatta

SEQ ID NO: 183291 - DNA, 425 bp, Glycine max
agctttagtcaaggagagtaacccaaatatgaccaagaatagggtgttgaaagagcataacaaaactttcctaaattggtataaagatataatctttgatgaccataatgcatctgaaacgttaaggaagttagtagatggacctaaaagaaatgttataacttagaaaggataggatatcaacaagtattcgttccacacgaaatcacaaaatgacaagagtacaatgcaaaatagtggtgttagtctaaggtttgaatttcaacactttgctattgtatataatggcaatccctgtgtagcttccatgccttactttgcagtcattgaagaaatctgggaggttaattatgtaaaatttagtgtctgtgttttcaagtgtaagtgggtaaataacaatatcggtgtacgaaccgatgatttcg

SEQ ID NO: 183292 - DNA, 452 bp, Glycine max
tgcaccagaacagcagccttgtagacaaacatgccgtacttggttggcacaagctacggtgaacaagagacaatataaataaatgaccaatgtgtttgaccaatgttgaatagtaaggccatcattggataaacttctccatacgtacatataggagaagaaaatatgaaaataaaatgaatcgattttctcctataagctgaaagtgagtttgtttaaactttaaaataagtgttttttatataagcgtttttttaagaaacagaaaggatttgcttcttaaaataagtcaaaattatttttttaagcctaaacaatttagacaaatacactaaaaaaataaaaagctgtttatcttattaaaataagcacttattctagcatatatagttaaacaaactgccctattatgcactttaacttttagagcagctaaatgagactgcttttat

SEQ ID NO: 183293 - DNA, 356 bp, Glycine max
agcttcggtctataatgtcgaagctccttgatatattacgggactcaatcacacatccgagtaacatatggattgccttacgaatttgcttctagcttccacatttaatttcgagcgtgctgatatcttaccgagcttcaatcggacatccgagtaaaatgttattgccttatgaatgtgcttcgatcttaagctttcaagtcgaagcctttgattactacaggatcaatccgacttccggtaagggtttagcccgtgaatttcttaaagcttcaacttcgattccagcgtttcgatttttacggactctatcatacatcccgataaaaagtctttgctctgaatttgtcagagct

SEQ ID NO: 183294 - DNA, 415 bp, Glycine max
  unsure (1)..(415): unsure at all n locations
gaaactaagcttgagcaacttcaacaacaataactttctactcggatgtctgactgatgcccgnaacatatcgtgacgctcgaaattgagtatcgaagctctcatcaaattcaaacgacaataacttgttactcggatgtctgatcgagtcccgttatatatcgagttgctcaaaatggaataccgaagctgtgtgccaattcaaacgacaataactttgtactctcatgtctgagtcagtcccgttatatatcgaaactctcgaaattgaatgccgaagctctgagcacantcatacgacaataactttttactccgttgtctgattgaagccccttatatattgagacgctcacaatggcatactgaagctctgagaaaactgaaaagacaataactttttaatcagatgtct

SEQ ID NO: 183295 - DNA, 315 bp, Glycine max
ttcgattaacaaaggaaaaccccacacaaaaacgcccgatcgattcttcttaatttatctcactaaaagatattttatttttcattacgcgagaaaatgacatcgataaatgactaatgcacgtcaaaagggggtacggaaagtaaatgaaatgaaaataaaagcacgcgaaacaaatgaggaccactacaggtacatataatgaattgaaaagttcgattttcggaacttaccggtttaagacccgacaacgaccaagaacaggttgaaatttttcccaatatcctcccgaaaaccgtccggaagcgctatgga

SEQ ID NO: 183296 - DNA, 405 bp, Glycine max
  unsure (1)..(405): unsure at all n locations
tntagccaaanggactcaccatgaatgaattcctttgattgccctngcgagcctcggctaccttcccttggtatgaagctcactacaagaaataagagaaaaaccatgatatcaccatatccttaaggaatcttggagctctggagattgatttgggaataagtgcgggggggtttttgtttcattggacaacttgtattgttggccatgcttcatgatgtattttgggccatacttgatgtacattgtatatcgcgtaaatgctggacacgctgagtgaaatgttgtatcttaaaggctatagagtctaaacaaaaaaaaagaagaaaaaatccgaaaccaacaaaaagataagatataaagttgagtgaataagatcttatatggcacacgaatgatgaaact

SEQ ID NO: 183297 - DNA, 397 bp, Glycine max
agcttctacttatgtggcagggcgggctttcttcaccttcttgtctccaacgcgaactttgaccattggtcttccttcccgcaatgcttcttttcatgtctgcctgagtgggcttatagcctataccatacttcccacgatttccttgagtatttatcaggctagttatgccgccgttgttttttcctaaacccatcccgggttcaaaaccgttccccaacataactcgggccatcattaccgctgcatcggacatacaaggttgcccaaagagggagttcacggaggaaatgctgaccacctcaaaagactggaaagcagtttctaacgattcttttgcggcttccacataaggcatggaggatgggcagcttaccaagatattttcctcgcctga

SEQ ID NO: 183298 - DNA, 467 bp, Glycine max
  unsure (1)..(467): unsure at all n locations
ttcctacaagtcctaattagcattctagactagaatcaactaactntagactccaatttccactaaccccaaatttggctttctaaccctcaaaatctcacacttttccacctacaacactaccattctcacatttaactctaagttaactctccccatcctctctactagttttctgtctaccttttaagcatacatatatctcaaagcatcattattgtggaagcaaagcttcatgatgaatcataaatgattcaaaggtgttttgatgataacaatgatgacaacaaaagatgatgacaaaggtgatgaacaaagagctcaaaagatcaaacaacaactcaagtgaaccaaagaacaactcaagtgaatcaaagaacatctcaagtgaatcaagaacaagtcaagagttcaagaatcaagaagaattcatgactcaagaagaaagcctactatcaagaatcaag

SEQ ID NO: 183299 - DNA, 479 bp, Glycine max
  unsure (1)..(479): unsure at all n locations
tcttacaaagcatacggctctctggatgcagatgcgatatctattcagatggatcttatatatctatatatctatacatagatatatggacatagatatatagatatagatcatacaatgaagtaccgcacgagtgggtatataggaatccaaatctgccgaatcactcatgttatgatcttctacatcctaagtcttcccgttccttcatctggcttatgttcttcatgtagcattcagactgaatgactctatgaaattacgtcgctacttccacatggtacgggtaacgtatgagacatctctatttttcccggggggaattcttagaattaccacagcttacctntcaattcgcctctgaccatcaaacgaaatgtgaataacccgtcctctcctctttgagactctgaaacaaagggtgcttccggntctggcggtgcttgacacaagtttggcttctccatattactatatct

SEQ ID NO: 183300 - DNA, 290 bp, Glycine max
  unsure (1)..(290): unsure at all n locations
atagtcacctgccgcatgcaagctagaatgaccatcgtgtaggccatggtgtgatgtgcaccancttaccatacgtggatggtttagcttttgaatttttagacagaaatgactaaagcagacatagacaaatatggagtgaatagacaatttagtccctgtcttcgccccacgatgcctactcaatctttatatccaagatcaatacttcgttaagtctctctatatccacaagataaatatggcctcttttttatacgggctggcgcctttttaaatgtcttatttgt

SEQ ID NO: 183301 - DNA, 446 bp, Glycine max
tactaagcttgacacctcttttcgcacctcttcttcattgatgggttgttttctttttggggttgtctgactggtttgtaatcttcctccatcattatcttgtgcatacagtaagcagggctgattcctttgagatctgatgtgtgccacccaattgcctccttgtgtctcttgaggacttctaccaacttgtttttttcttctgctgtgagctcgttgctgatcaccataggcttggtctcgttctcctccaagaacacatacttcaggtggttgggtaggatcttcagcttcagcttgggcttctcggatggactcctgcttttcagttcttcaaaattggtcccccctacatgaatattttcttcatgatctaagtcttccaagcaagcccttagatctttctccttttcactggttagacaatctacaacattgatcaaagc

SEQ ID NO: 183302 - DNA, 421 bp, Glycine max
  unsure (1)..(421): unsure at all n locations
tctaaacgacctgcggcatgcagctngngataccaatgtcatagaaaatctaatcattgacctccggatctggctattgaggaggctctgccttaaacatagctgcctgttcatgaaacaaagttaaatggcctaatttgaggaaccatgaatgaattaatcaaaaacaagaaacatatacgtagagtaaagtacctgcagcgataaagatttgaccatatgtgtnggccaatcaaggaaggtgtgaacgatgccatgagctgccgagtcactttttctgtgatcgactcctctagctagtccctgatatgctcggtcacctgctgcaattcttcatgaggcagggaggaagagctaccggacgtccatggagccgatcaaaatattgcttgatggtgaaatcggtttcataccacggaca

SEQ ID NO: 183303 - DNA, 478 bp, Glycine max
tgccacccagctcgcccaagcgagcaaggctacttcctccataagcaacagcctgctggaggaatcttctagagggcccaagtgggcctggttgctatttgcacccccatttttaataaatacaccccctggctattttttggtgattcttttttcgtaaagttatggaaactcacggatttcgcaacgatacttgttttctttccataatgttacggaaccttgcggattacataatcatccactcttttgacttacggaatgttacggaacctcaacaattgtgcaacgatgcttccttttgacttccggtgtgtcacggaaccttacggattgtgcatcaataccttcttttgatttccggcatatcccggaacttcacaaatttcctaatgatgggtgccaagcaccttacaaggaccaaacaaaagttgcatgccaccaagcaaaggtccccggacgacattagggtatgaca

SEQ ID NO: 183304 - DNA, 427 bp, Glycine max
  unsure (1)..(427): unsure at all n locations
agcttgtacggatgtaagagacatcttcttcgatcttggtgatccttgactccatctcattgaatcgcatgtccacttgtaactccaaagtatcaaaccttacaccaataaaggtttgaagaccattaaacctgtccaaaatcttntgaagaagagaggaatcttctccaccatgtaagtgtccttcttcatcaatggtttgagcaccctttttcacccaagagccatcatgctctttacggtaaccaaaggatgcaatcactgcagcgcctattagaaaggatctcttgattgtaacataaggttcagaatcaagagggatgttgaagtgttgaaaaaagagggtgactaggtgtggatatggcaatggagcatttaatcgcaatgccttatgcatgcgatatcgaactaagtgtgcccaatcaat

SEQ ID NO: 183305 - DNA, 480 bp, Glycine max
tagcaagaaaagtaaaatctaatagtgccttccaagtgttcactttttaactagtaataggattaaaaggggcctttttctcaaatggattgcacttacttttagccccacagaaaggcggttgatttggtctaagttaaaactgcacttttatccaagacagtcaaattaaaattcataaactgtagtaaaaaccaatcaagtaatttgttgtcttctgaaaatgttggagcttactatcccttaatgaacacacatgaaattgaattcaaattctgtcatttttggatggcatcaatccaaaatggtagtgtactatactgatgaagagagagattttctgaattgtggtaacccggatgcacatgactatatatcaaacttttctcaagtgccaaccacagtaatgaaatcacatgtaatactgcttatggcatagattctcttggtcctataaaattaatgatgtctattcactga

SEQ ID NO: 183306 - DNA, 426 bp, Glycine max
  unsure (1)..(426): unsure at all n locations
tgcttatgcaaccaatatatgacatagaacgttttcaaatacctaantctcacgctaacccagtaaattttgtcgacaacactaatgactcatacaaaaatgattcacatcatggggagtaataacccttcaacacattcacaaaatcatatcataatcaaatgaatctacatataggcgtaaaaacaccaagagcactcaattgtatcaaccagtttgccttagggcatcactggtccgtcaaacttaacaatctcgtgcatgattataatcataaaggctgaattacaatacagttaacatctcaagataaacctcaatttgattctctaaggacccctatacatgctcattctaactcaaattgcgataaacttttgtcctaacctcttacgggttcacatgtgatcccggcacgataccaca

SEQ ID NO: 183307 - DNA, 452 bp, Glycine max
  unsure (1)..(452): unsure at all n locations
tgtgctntatgagtataaaactgctacaaatatgactgatcattttgctgttttggctgccatagcctagaaccctggtaaaatccatgatgatgttcttgctaacttttgtagcaagttgctgcctcatttcttggtaaatttccatatttgtgactttgttcttggaattattcttttgatggtacgcatgtctccatatcgattctttgtcaatgtatcccgtgttataaaattacgtcatatgttgatggtgaggttagatttaattgatgatgccatttcataacaatttccagcatgcttctttctaatacctactatagccttgcttaatcttttctgttttgaccttcctggtaatgttgagaatgttcggaacgcataagcaacccncatttgatctacgttattagcgctatgtcaataactcgtggaactcaattcaatga

SEQ ID NO: 183308 - DNA, 424 bp, Glycine max
  unsure (1)..(424): unsure at all n locations
agcttgcttgaggagctggtatggattttttatctctgagcttcaatgaggtcctttaatggtgattttccaccatggagatgcagcggaagacaaaggagaagaggtgagaggaggctccatccacaagggaataagccatggaagaaggagctttaccaccaagatgagccttggataataagctcggagaggatgcttcattgaaggaaaagaaagagggagagaaagagagagggggggagcacgaaattgaaggaaaaaaaagggagaggagttgaactttgagttgtgactcacaagactctcattcatcaaagttacaacaagtgttacacatgcttctatctatagactaggtagcttccttgataagctttcttgagaaaacttncttgagaagcttcttgagaaaacttccttg

SEQ ID NO: 183309 - DNA, 459 bp, Glycine max
acctataaaactcagctaggttatgggcctgatggttcctagaccttttctatcacaacgcaaggacagacgtaacaatgtcaaaattacattcaacatgggtcaggaatcacaacgacaagtgtactcaggaccttacctgaatcaataagtgaaattcatgtcgtacaatgttgaaagatttgcattataattacctaactaatgatttttcggcttcagggcacattggcaacttgttattttgtgtccacgggacaatatagtagtttggttctgttctttgcgtaagaagcctgatgttaacatcaaggctatagttaacaagttatttctcaaatcatcagtcaattaatgttgtcagaccctaatctcgtccggggactatcatttgctaatgtttttatttttgctagccgaattgagctgtttggcaccaattgtggcgcaagacaaaag

SEQ ID NO: 183310 - DNA, 426 bp, Glycine max
  unsure (1)..(426): unsure at all n locations
agctttgtggacatgtgaacactagagcttatggtttgtttccccattcagatcgaaccagcgtttaaaaaattgctcttttatcatgttacgcacacatccaattccatttaggcatttcgggaaaatctttcattgcgttcacccgccaagtgcacatcttttttttttttcaaaaacctttttgtgcttcgatccgtgaattcccaaaagaaaattggcggccgctcttttcaaaagtgtgttggctttttagatttctttctttggggttttttagtttttatagaaaagcttgtaatcgggaaaaattgttacctgaaattacaccttatcaaaggaacaaaaggcgtgtgaatgaaaagacacaatacacacggccctctatatatattatttnttgttttaaactaacagcactaacat

SEQ ID NO: 183311 - DNA, 391 bp, Glycine max
  unsure (1)..(391): unsure at all n locations
gaaaagagacaaccnacacggcgcaaacgggggaagaggggggaacaagaaacacaacaacggatccaaaactaagccgcaagccacaggaagcagggcggccacaaagcgaccgcaactgaggccaaaacatacggccacagcatgacaacagaacattcacctacaccagccccaaacaactgcgcgacggtgcctgacagaaggaagtccgaacatgcagccatatatatcacacaaccggatgaccaacgcgcatgagaaacaggcgagacagaagaaatgatgccgctcccaaacgctacgtgatatggaaacgaaacaatcaggaatccacgcacgagacgagacatacacacacacatgaagaacacgtacattctgacacacc

SEQ ID NO: 183312 - DNA, 478 bp, Glycine max
tatgagaagaagcataagaagaagtaagaggtcaccgatctactattcaagatgcaattgaaggtgaacgaagaaagtcaagaaaataagagaagtcaacgaggccgaggtagaggtcaaggtcatagtcgaggacaggttggacgtggcaatagtgaatgatgttcaaatttcattaacaatagttacaagaaaagaaaaaacaacaagtttgaaacccgatgctataactgtcaaaaaattggcccctatgcttcaaaatgtagattcaccaagaataaagttgagaaggagactaactatgtggagcaaaaagacaagaagtttgaaacagtgctcgtagcacgtggaggcaatgaaggtagtcaagaaaacacttggtaccttgacaatggtgcaagcaaccatatgtgtggaaaaagaagcatgtgttgtggatcttgatgaatcaataagtggcaatgtcttatttgatgat

SEQ ID NO: 183313 - DNA, 425 bp, Glycine max
  unsure (1)..(425): unsure at all n locations
agcttanaaaatcaatgtgatgaatcttgttctttgttgcctcaaatccactcatgcatccaccatttcacgggccgcaaaagaaagaacttgagggaatcttgagtttttcagttgtcaaaaattatctgcctttgtaggaacactattttcagcttcttcgtattgtgttggtgttaataacactaaaataggcgtaataattaacactaaaaaaatcacatgattggaacgtcggaaacattggatttggaacacctcttacaatctttcctcggagttttcctaaaattcatggttgtacaaagtgggtcaaacgtcaaagcatcaaaattagaaatatttaacacaatctaatttatgaaaaaaatccacattattagacttcaatcgtaatggaaccttaaaaaccgacaacatttata

SEQ ID NO: 183314 - DNA, 448 bp, Glycine max
  unsure (1)..(448): unsure at all n locations
tctgcanatccttcccagatcgccttgctaggaattgtgattctgctgagcaattcttatcaataaaacggttattgtaatattcctaggattattacatattaggaattctataaaaaccatgtaataacaagcaaaggcaataagaaaattacaagcttcttctttcttctttcgtgctctgctccttcctcatttctggaggtgctagacctcgaattctagctcttgatactttgcacctaacaaattcggacacagaggtatcaatcactacttctgacacaggttgcagagatttgtcagataacttccttcattcaggtgtataagctagaaccattaagtgacaaaaaatctttggaattgntatgatgtggaaaggcatttctttcgggttttggtggatgctgtacaaaagaatatgaagacgtangtcttgaaatgg

SEQ ID NO: 183315 - DNA, 429 bp, Glycine max
  unsure (1)..(429): unsure at all n locations
agctngcatctatattcctaattctcatgtttctctttataaccctatttccccctgagttattataggggctagagcacatatccttaatgatcttgattgcatcaataaagggttttaacatgaggttacccccacaatcaacatcttaacttgtcctattatgtgaggacactccaccatagaaaatgtgaaatagcctttgttgggagaagccatgatatggacaacttctgatcctttcttataatctctcttaggcttcaagtagactctcttgctctttctgcacaaaattcccaatgtcccttatgtactggtttatcttaaaagagaaatatttccttaagaaggtacttgtgcactagttcaatgtggtgatactgttctctagcactaaacataactcaatccatgcattcgtattga

SEQ ID NO: 183316 - DNA, 467 bp, Glycine max
  unsure (1)..(467): unsure at all n locations
gtgactngagtcatcaagagattataaatatgtgaccatatcatgagtctcaataatcatcaatcatctttgaatcatctatctttcaatcttttttcaacatcatctctcacacatctttcaatcaatctttcaatgtctttctacagaattttctgattcatttctcttcatcattctaaaagttttttatcaacactttctcttccaagaaaagttctttgctcaaaaacttgtgctattcatctttgtcattctcttctccctttgccaaaagaacaaaggactaaccgcctgaattcttttgtgtctctcttctcccttacaaaagattcaaaggactaaccgtctgagaattcttttgattcttccattccccttaagcaaaagatttcaaaggactaactgcctgagatatctnttgtttccccttacanagactcaatggactaaccacctgagaattc

SEQ ID NO: 183317 - DNA, 423 bp, Glycine max
  unsure (1)..(423): unsure at all n locations
agctntgcggatttggtcttcgctggcgaaatgatcgaagtgggtctaaaaagaggcaaatctgatcatcatgctttgataaatgcaaaaaaaaaactggggcaaatgaagagggtgagaatgagggagaaacccatgctgtaactgccattcctatacggccaagtttcccaccaacccaacaatgtcattactcagccaataacaaagttatccaccacccagttatccacaaagaccattcctaaatcaaccacaaagcctaaacacaaccaatgctaaacaccacctttagcacgaaccaaaacaccaaccaaaaaggaattttgtagcaaaaagcctgtaggattcaccccaaattccggtgtcatatgctaaacttgctctcatatctactcgataattcaatggtagccataaccc

SEQ ID NO: 183318 - DNA, 490 bp, Glycine max
  unsure (1)..(490): unsure at all n locations
tattacgtgacactatgaaactaagctntaaactctngaaaaagaagctagtaaccgcactagttatagcggctcctaattgggggcaagaatttgaattaatgtgtgatgctagtgactatacgataggagcagtattatgacaaaaatggaatggaagatttcatgttatccactatgccagtaaggtgctaaatggagcccaaatcaactatgcaacaatggagaaggagatactagtagtgctttatgcccttaaatcaatcatatcatgtaggttcaaagattattgtgcacactgaccatttagctatataatatctactcaccaaagtggattccaagccaagttaattagatgggcccttatactacaagagtttgatctagatatccgagaaaaaaggggtgtgactgtgacaccctctaccccgacatatacataaataaatgaaatatgtaatatatcggtaaacaaatccatgtgggt

SEQ ID NO: 183319 - DNA, 415 bp, Glycine max
  unsure (1)..(415): unsure at all n locations
agcttctttgttaacagttgaatattntaattgtgcaggattctaatgttntaatgtatatgcaatgacatgatcttgaccatgtactctttgtttgaggatgccaccataacctatgtctgatgcatcggttttgacaattttaaatgcttgtggaataggaagatacaaacattttatggattggaccttaagtttgatttctttaactatttttgtatggaggtcagaccaaggagacagatttttcttcagcctgtcatgtgacggcttgacaatattgtttaaataggggacaaattctcctacatataatttaaacaacctaggaatctttgtaactggttttgtctaagatttggttgggaaatctgctagcaaactctattgacctttctattggaatgattgtacc

SEQ ID NO: 183320 - DNA, 442 bp, Glycine max
  unsure (1)..(442): unsure at all n locations
ntgccaatccanaatcagatatcttgcggttgatatctttatccagcaacacattattggccttgatgtccctatgaacaatcttcagttaggactcttcatgaaggtaagccaaacctttagcgataccaacacaaatcctatgccttgtttgccaatccaatctcaattgacatttctcagagtcatcatttttggcttatatggaaattaaacaacatataaatgtaagttacatgaataagatagggttcattattacagaaacataaatgagacttgaaagtagagaaaaaatattaccaaataaagcatgagcaagactattgttttccatgtattcataaatcagtaacaattgatcctcttccatacaacagccgtagagcttaactaaacaagggtgttgcatagcagaaatcacgcctatctcatttacaaa

SEQ ID NO: 183321 - DNA, 425 bp, Glycine max
  unsure (1)..(425): unsure at all n locations
agctggtnaatgctcccctgtattgaatatagttcacaccagtgcctaagcaagatgcaaactctattgtccacctttgggtttatctctcagctaataattatcatcacgttcaaatgacagtaaggtcaagaatcaacacctgctttgatgagtcgcgagcaactatacaatgcacatagtccatgtgtcccttcaataccatttatactttacgagttccctacaaacattaacacatgttagttcctcagcacaagtataagtattaatcaaggtatccgcgaattatattctccttccgagaatacataattacatacaacagacctacgatattgcacacgaatcacctcatgcgcgaaaaacaaatcctcctttaaattaagcactataatatcgacacaaactgaatgttgaaataa

SEQ ID NO: 183322 - DNA, 160 bp, Glycine max
ctgcatttgtgcgcttactccaaatacgaaatattttaaaacatggaattctttgggcttatcacagtgcgaacttttagcaacacaacaaaatgtgcttgttttacgaagacactcgcacttagcgctcttatttattttacacaacaaacaacaacaa

SEQ ID NO: 183323 - DNA, 476 bp, Glycine max
  unsure (1)..(476): unsure at all n locations
atctctataggtcacggttattgtctattaccatgagatagctcgtgttctatgcctcggctatttaaaattattatttttcatttttgaattcttgctatgtcatcacaatttactgattttatccttgctaagtatgtggatcatctaatcatgtcttcttgtcttacacttctctgttgtcatcattgnttttctgtaaactagatcctgctacatcatcaatatgaccatagatcatgtctatgtagccatattgatgtgcattgggagttgaaacttgaaattatgaaatataatttttgcttaattttgcatggagtgaaataattttattttttctgcttaattctgtgcatggtggtgagtgatgaacataccattttgataatcattcatangtgtattatcttttcaaattatctttgaaggcctgaacatcagctntttcacccgtcaacaggtgcgtcgagtgc

SEQ ID NO: 183324 - DNA, 428 bp, Glycine max
  unsure (1)..(428): unsure at all n locations
agcttctatagaaggttcgtgcctaagttctctacaattgcatcacctctcaatgagctggtgaagaagaatgtggcatttacctgnggtgaaaaacaagagcaagcctttgctttgctcaaagaaaagcttactaaggcacctgttctagctcttcctgacttttctaaaacttttgagctagaatgtgatgcctctggagtgggagttggagctgtattgttacaaggtgggcaccctattgcttattttagtgaaaaacttcatagtgccaccctcaactaccccacctatgataaagagctttatgccttaataagagccctccaaacttgggaacattaccttgtttccaaggaatntgtcattcatagtgatcatcaatcacttaagtacattagagggcaaagcaagataaacaagaggca

SEQ ID NO: 183325 - DNA, 485 bp, Glycine max
  unsure (1)..(485): unsure at all n locations
ctaagcttctttgagaaaaacttcttgagaagctagagtttagctactcactctcatctaanaaataagctcacctccttgagaagcttccttgagaagctataacttagctacacacccctataatagctaagctcacccncatgacaaaaaaaacatgaaaatacaaaaaaaaaatcctactacaaagactactcaaaatgccctgaaatacaaggataaaaccctatactactagaatggccaaaatacaaggcccaaaagaagaaaacaacctattctactatttacaaagaagagtggacccaaccttggcccatgggctcaaaaatctaccctaaggttcatgagaaccctaaggccttctttatcaactctagcccaatcctcttggagcctcttgctcatggctctggtaactggtcctttcctagggaggattgcatcaccaaggctctaagtagcttaagggtgtgtctcaacat

SEQ ID NO: 183326 - DNA, 425 bp, Glycine max
agcttaactcttgacaaagaaataacatatttgaatttttttaatatataccagtttactaatgtatatatacttgttttttttaatatgaatacgttagcaagttatacctagatattgtcttaaaatacaccaataatatacctagatattttaattaatatataattagagttatattattattattattattattattaccaaatactccaatatttctatgataaaagcaaatgcactttgacaattaaaaagttacctttcttataaaatatgaattttctatgagtctagcatattctgattaatatataggaaaaaataaaaaaatattagtcaattcaattgaaaactgatgaaaaccataattttattttttggaaaacacatgaattgtccatgtcattggtcaagaaaaccca

SEQ ID NO: 183327 - DNA, 476 bp, Glycine max
  unsure (1)..(476): unsure at all n locations
nggcgataaactntgttgtgagagctaaaagtaacagtgacttatacttgtaacttttgtgaaattagtgaaacttgattgctaaccaaaaactgaacttagtctgaatggtagagacaaaccaatataaatatgggtcttactttctttttagttatcttttgtcttaaactgacatagtatttgaatttgatcttgtttgaaaaacatattctattttttaaaatatgtttccatcgtctaaacttgtttttgcgcaaatttgttatctcgttttattaagttatacttcaaatgataactttaattttcacgaaaaaagacttaagaaaattctaaaattacaatttaaccccttatgatatttctaattgtagttactttttttaagactntacttttgatcacttaataacattgaaattcatagtctattaaatntattattaaataacctaattattgcacaagttttt

SEQ ID NO: 183328 - DNA, 397 bp, Glycine max
ttttaaatattggattggcactagtggagaacaaccacaagttaacatgaacaaattattctaaaaaataaaaaaaaaacattctcctgaattctatattataggaaacagcttttaaggtgaaactggcgtcttataagaaggacgtaattatgagaatacaactgaatgatatgaaagcactgaagaaccgctcagttgcgagacctaaaagcgcgatggagatgtagagataaattagtaattaaaagacaaaaatttgcgatagagcaaaaaattagagataggagattcataaatgttaaaataagagagaaaaacgaaaaaacacttttaatatatacttattatctcctcaaatgagagggaagacaggggtattcttgtacatactcac

SEQ ID NO: 183329 - DNA, 474 bp, Glycine max
  unsure (1)..(474): unsure at all n locations
ngaagcagttaattcaagaatgaacatgaaccctactatttatgggttttcttcacaagatgtaagcctatcaattttgatgttgatcatatcgactaataatattcaattcatttccacttaatattatgtgaaattgtattctgtcagctatggagtactgcagaagaaagttaccctagtgctttgtctggacaattgctaactaagatgatttattttatagtaaattattcttcttgactactttaatttgaaaaatgtcaaactaataggacaaaatgatttgttagtatatggatccatttgtgacatcattctcactgatcggttgagaaagctaaatagaagtcaagttagtatgggacaagagaggaagtgaagaatagaaaggaatcgagagagacaggctgaatcagtgttgaacaggaaaaaacaaagatcagaatgggatagcagaagaatgatgtctgt

SEQ ID NO: 183330 - DNA, 403 bp, Glycine max
  unsure (1)..(403): unsure at all n locations
agctngcttgtggggctgctatggatgctgttatctttagctttaatgaggtcctttaatggtgaatttcctccatggagatgcagcggaagacaaagtataagaggtgagaggaggcgccatccactagggaataagccatggaagaaggagctttaccaccaagatgagccttggataagaagcttggaaggatgcttcaatggaggaaaagaaagagggagagaaagaaagaggggggagcacgaaattgaaggaataaaagagggagagaagtagaactttgaagtatgtctcacaagactctcattcatcaatgttacaaccaagtgtacacatgcttctatttatagactaggtagcttcctagagaaaacttccttgagaagcttctctgagaaaa

SEQ ID NO: 183331 - DNA, 470 bp, Glycine max
  unsure (1)..(470): unsure at all n locations
agtgttggttttcaccttcttgctaagccaatcttctggcttagtgagcgtccgctaagtgcaacactcattggttaagcgcgaggaagactctggaagaagatgagttgtataggttcgctaagcgcaccgcttcatctcactaagcgcaccgcttcagttcatccgctaagcgagaaaggcacgcgctaagccagaattcactaatgtgcgctaagcggtccataagtgctctaagcgcacgagcatgaacaaggccacctatttaagcctgacatcagattttagagagggagtttggactaggatttggagctttgcatgtctagagtttctagagagagaaaggttcaagttccagagagttntgagagattttgctgtgtgaagatctgcagagaccagagcttgaagtaagagctagttngagagcttgagatgagtttgtgagtgattgtgagatcctaaag

SEQ ID NO: 183332 - DNA, 498 bp, Glycine max
  unsure (1)..(498): unsure at all n locations
tacggacactatagaaactcagctttaagggtttaatttcaaattagaattaagagtcttatctatngatgtgtaatcgattacaccttaatggtaatcgattaccagtgactgatttcgaaaaataaatttccagaagtcacaattcttcaagtgacttgtttctgaagatttttcaaaagtcacaactttttaagtgactagttttaaagaaattgccaagagtcacaagctttgacttgagtcatcaagagattataaatatatgaccatggcacgaatttcataaataatctatctttcaatcttctctcaacatcattcaatatctttcaaccctttctacaaaattttctgattcatttctcttcatctttctcaaagtttttgttcaacaattttctcttccaagaaaagttctttgttcaaaaacttgtgctatttaatttttttcattctcttctcccttggccaaaagaatagaaggactaaccacct

SEQ ID NO: 183333 - DNA, 422 bp, Glycine max
  unsure (1)..(422): unsure at all n locations
agcttantntacaaccagattgttgaagctgttaataaagatgaaggtgatatgttttttctctatggatatggaggtacaggaaaaacatacatttggaaaacacttgcaagttcactgagagctgacaataaaattgtaataatgatagcctctagcggcatagcttctctgctattgcctggaggtagaactgcacattcaaaatttaaaattccagttccagtttttgaagactcaacttgcaatatccatcaaggaactcaattagctgaactattaaatcagacaagtctaatcatttgggatgaagcacccacgactcacaaattctgttttgaggcacttgatcacagtcttagagatatcatcaaacacaactcanaggacagtaaaatctttggaggtaaagtcatggtctt

SEQ ID NO: 183334 - DNA, 425 bp, Glycine max
agcttatgctgcaaatatgtacaatataccttctctttctcagcagcaaaatcaaccacagcagaacaattatgacctttccagcaacagatacaaccctggatggaggaatcaccctaacctcagatggtccagccctcagcaacaacaacaacagcctgctccttccttccaaaatgctgctggcccaagcagaccatacattcctccaccaatccaacaacagcaacaaccccagaaacaaccaacagttgaggcccctccacaaccttccctcgaagaacttgtgaggcaaatgactatgcagaacatgcagtttcagcaagagaccagagcctccattcagagcttaaccaatcagatgggacaattggctacccaattgaatcaacaacagtcccagaattctgacaagctgtcttctc

SEQ ID NO: 183335 - DNA, 474 bp, Glycine max
  unsure (1)..(474): unsure at all n locations
tccatcacanattccgcaccagcatgattggagtaccgttcttaagtgtntaattgtgattaggtatccctgatgttttcaatgagtttagaaatttacgtgtcagtaatccgaaagtaggattgagtagttcatcttatttatcaatgttatcagtgctacaatactccttttcgtcattgggtatcaatgataagacaataatttattttgtcaacaatatcttntttagaggcaagaacaactcttttttgcaagtaatctgcgttgctatagttatgtgtcaagttgggatatgttgcatcaacaattgcctggataggatcagtatagtcctttataaggaactcatctgggatggtgatttcgcaacatccatcattatgttgtccaagttttccatcacctatgtctagtagccaatcagataattgtttgagctcttaactgttggtctgtccataagcatttgat

SEQ ID NO: 183336 - DNA, 420 bp, Glycine max
agcttcaagacatggtaggcaaggtggtctttatgatttggaatgcaactcacttaagaccctactatagttagaacctggtagtgtactctttttcctactttagtatttttcccacttgtaaaaaataagggtttttgctgaagaggttttaatgaggtacacctgagtacccatgtaaaaggatgatcccctgtaaagtcagatcattcatgaaatcctcagtttttcatttaatgtggcacacctaaggctttcatgttcatattacatttcatcttaccagcacgtggtggaaaccaactaagaatctgttgttcatcttgagattcaggacctcggttttttccactcaagcctttctccattctgatttatcatagaatttagtcttaatagacatgacaattaattaagaaa

SEQ ID NO: 183337 - DNA, 416 bp, Glycine max
  unsure (1)..(416): unsure at all n locations
nttagtttcgatgcaaggaaacatagcttatgtctatttatctgaattntggttntaaaagtagaaaggcatgaaagttaggatatgcttgtgagagttttacccgaatttggctgccccatgaggagtactttgcaccttggtaacatggaaaaaatctttcaatggtatgtaaatatgtgtgtaaatatacgtagcatggaaaacacctttcaatggtgtgtatatgtgtgaatatatggcataaaaatccttgcaaagtgtgaatgagtagtagaaaaatgtctttcaacatatgcgtacttgaggataggtagcattaggatgacgttgctgctcaccaacatccagcccagcgatcataattctgaccttcccctgccaaagtgtcagttggtgtatgccattctgacacg

SEQ ID NO: 183338 - DNA, 190 bp, Glycine max
taggctgtccttttatttttctccgaagctttaacctcattgtctctcacaacctttagatatgggagccaatccaatccttgtgttcggactctcagccacttatgatagccgccgatgatcccattactgcttcccctaagctctctatcctttcttcacgccgcattccatgccttgcgaactcctt

SEQ ID NO: 183339 - DNA, 466 bp, Glycine max
  unsure (1)..(466): unsure at all n locations
ggtgaagcttcaatggagggtggatcnttgagcttcaatgaagtccttcaatggtgattttccaccatggagatgcagtgaaagataaaggagaagaggtgagaggagcttccttaagaagattccttgagaagattcctagagaagctagagcttagctacacacacccctctaatagctaagctcacctctttgagatgagaagctagagcttagttgcaaacaccccctatagtagctaagctcacccccgtgccaaaatacatgaaaatacaaaaaaagtccctactacaaagactactcaaaatgccctgaaatacaagactaaaaacctatactactagaatggccaaaatacaaggcccaaaagaaggaaaaacctattctaatatttacaaagaagggtggacccaaccttggcccatgggttcaaaaatctaccctgagcttcttgagaaccctagt

SEQ ID NO: 183340 - DNA, 420 bp, Glycine max
  unsure (1)..(420): unsure at all n locations
agctngttaaagaacttagaanaaatcaatatcttgcttgttcgcacatcattcgcgtgtatgacatccactccacaaggtctgaagtaaaggagaccttcaatcctattacgcaacgtggcggaaaaaagtgggcggttaacttgaacggtcattattgtcaatgcggaaggtattctgcgcttcactatccatgttcacatattattgcagcttgtgattacgtgagcctgaactactaccaatatatagatgttgcttatacaaatgagcacatcttaaaagcttactccgcacaatggtggcctcttgggaatgaagcggctattcctccttctaatgatgcgtggacacttatctctgacccaaccacaattcgtgcgaaaggtcggcccaaatcaacaaggataaggaatgaga

SEQ ID NO: 183341 - DNA, 442 bp, Glycine max
tgtagtgatccttgaagttgatctatcgtcatggtttcttaatctttggtttcctcatttgtcacaataatgtgctcaaatttaggatctaatgagagtagtatcttctccataatttgtacatattctaacttctcaccatttctttttagttgattaacgagaattcttgaaaaataatcagaaatggactccgactctttcatatgtaaggattcaaactcacctcttagagtttggagatgcaccttctttactttgtcttctcctttgagagaggtttgaagcttatctcatgcctccttaacagatgttgcatcagaaatcttctcgaatgcatcatcatctaatgcttgatagatgaggaagagagctttcttgtctctctttcttgaatcctttacagtctccttttgttcttaggatagtgaagtctcatctt

SEQ ID NO: 183342 - DNA, 422 bp, Glycine max
agcttgtctcacttagcgagctcgtctcgctaagcaagagtccactttttgtgcttagcgcgacaattcgcgctccgtctgcactaagtctcgctcagcgggctaattctcgctcagcgcaattccctctcgagttggaattgcgcttagcgcgcccttcgcgcttagtgtgacatcaaaagttgttatattcaaaatcccaatggtcagactatagaaacatgtcgtagaaagctgcagacaaaatttgaagatgatccaacggttaacgactccgggattgcaattttactaaaataggtttgggtaaatttgaaatctcataattccaacttagctcaacaaaacaccacataactcaacatccacatcaagaaattcagacatgactaattcaagtcatacctcaactcattaaagtc

SEQ ID NO: 183343 - DNA, 492 bp, Glycine max
  unsure (1)..(492): unsure at all n locations
gacctatcaaactcagcttttgcgtgccgctctgggctcaaaatcccnaaacattttcctcttattactagctattttgaattctttagttcctgaatgtacaaccttcaaattgttgctcgttcccctctttgttttctgcaaaaaagaaaatcaatatgaaacaattcaggctgaattgttatcgttattattactcaaaccataaggaataacatctaaacaagtcatttaaaatgttacttttttattttttggtatttttttaattacaattttacttcaatatctaattttttaatctacttaggtcgttttttaatataaatatgaatttaaaggtgatatacttataatataaattacttgctaatcacaaattacgatattaataaatntataataagttataatttattattggacaacagtataaatttagtgtatagtctttnttttttcctataattatttattaaacatatatattat

SEQ ID NO: 183344 - DNA, 430 bp, Glycine max
  unsure (1)..(430): unsure at all n locations
tgcttgctgactgtacctgtgaccgaacacgttgtttgtttctgtctcngcctaattgtattgcgagctgtaacgccggctcctcttacctaactgtgttgtaggctgactccggggcatcatcctcttttgtattgggaagctccttcatggccgatgaaacagaagccatttgagtcttttacaggccgatgggtcggactgtatatgtgaccgcctccctcttatgatcgcttatcgggatcaagtgtaataaggccgcctctgcccttgattctgtattgagcgtgccctacatattcagacgatcgtgagaatgccacccccaccttattatgctggtgaatgacccgaccacttatgtccatctcaagaatgttaaacaacgagatgagcttctaaacatctcgccttatacaaaggctaaacg

SEQ ID NO: 183345 - DNA, 454 bp, Glycine max
ctaagcttctcaggaagctacctactctataaagagaagcatgtgtaactctatttgtcactctgaagaatgagagttttgtgagacacaactcagagatcaacttctatgtccctttttcttcttcaattttgtgctcccccctctctcttttcctccattgaatcatcctctccaagcttcttatccaaggcacattcttgatggcgaagctccttcttccatggcttataccctagtggatggtgcctgctttctgctcttctccttttccttccacttcatctccatggaggaaaatcaccattgaaggacctcattgaagctcaaagatccaacctccacaaaagctccacaagcaagcttccatcatctagggtcaagggaaattgtcttgtgttaacggagattgatcagtgtccatggttggcacctcgactagcgtacaagttgt

SEQ ID NO: 183346 - DNA, 464 bp, Glycine max
  unsure (1)..(464): unsure at all n locations
taganttagctattctttctaacatcttggctaacaggactattgtttatgagtngaagtcaaatacatgccaaataattctgctctactcactcagcacgtatattagcgacctactgcaaagaacaaaaacgactgaagctcagatcatttcctctcctatgacatctagttgcaagttaaccaagattggttcagatctggtttcggaccctactatgtatcaatcagtagtatgagttctgcagatcactactattacaagacctgaacttagctctgcagtaaacaaagtatgtcagttcatggaaaatcctcatgactctcattgggtggctgctaagaggattctcagatatcttaagggatccttacatcatgggtttcatctaatacctactgtttcaggtattcctatccctgtgatgctgactgtgcatctgatctcaatgaccacagatcaa

SEQ ID NO: 183347 - DNA, 422 bp, Glycine max
agcttatataacaaaatggtacgctcggttgttctaacatataactcatcatcagctggccagtgcccagtaaaattgacaatgcgtatcatcgctaaaaaaaactgaaactcttacatgcccttgaatatgaacatcacttcttttacacaggatttgagcatctcttaaatcatccgctaatcttaaatggattgataaaatataaaaagtgcaaagaaaattcaagatgtatcacgggcattagtgttcaagaataatatatacatatgcatctattaatgtaagtggttactcgcgattgatttgtgggtgaaggcacaagagaagaattcgtcagcgctggaaaaattgaagttgcaaagaatgcgtaaaagataatgaaagaatgtgacctattacaagccaaaataaattaatta

SEQ ID NO: 183348 - DNA, 350 bp, Glycine max
gatcaggtatcaattgtggaagacgcgcagttattttctggaggccacataaacactggaagaaacagtattgagtaatcaaataaacatgcacagacttgcaaagcatagataacacacaatgaaatgtggataaaagtacaaacatccgtaatgatactatctacatagaaccaaccaacatgaggagaatatgtgaaaggcttcacatatcacaatatgcaatcagcggggttcaaaagtagcaagacatataatataatcggtagcaatcacacactgcataatatgtccctatgcagacatacatgccttcccacatccaggtatacataaattcgcttatgtgg

SEQ ID NO: 183349 - DNA, 165 bp, Glycine max
  unsure (1)..(165): unsure at all n locations
ctctagctcgctgtgccagccttagaatcttcctctgggagcgtatgttgtttgctcttttagtctcacagctctgtataaacttcagcgtcactgataacagaagaggaatctattcnaattcataaatctcacaagtgctctctctctctctctgccttcact

SEQ ID NO: 183350 - DNA, 344 bp, Glycine max
ttgtctccacacaactcacgcttgtgctctgatctagattgtgatctgctattgcatgatagctttattctttctagtgggaaaagcccttatatcgcacgaaactcatatggcgattggattcactgttcatgtcttagaatgttttatctgaccattgaatcgtatttgactgatgtgaggagaaaatgtggaattatgccactgttggcctctccactgatatgagcttgacagacatattgtggtgaacagagaaatcttataccccacctattatagacgaagaggccccaacacaagatgtcacttcaaaagatgttcacctgcctgatgatcttcta

SEQ ID NO: 183351 - DNA, 476 bp, Glycine max
  unsure (1)..(476): unsure at all n locations
tcatcagatgctgcatttcggtatcagctcctcttattgttgaacgatatgcacttcttgcattataaatttgctttatcgtggtgcaactgtcggcattgtgttccttcaacgttagcaagatgtttttcggtttcaccatcgactttgtcatatcagcaataattttcttttcttccttagtcaatcgcccgacgtatggatgtccaactaaggacttcgccaattcatgattgtgaatcccacagatcaacttcaccatccaacctttccctccatgcactggtttcccacgaagtctgaagggacaatcacatttcctactcccagtgtcttttctaacgaattctttatttctacacttgtacgtaccactcctttcacacccaattaagacaaatgaacttcttcctctgctaccggtctctgtgtcagacctcataatcactgcaacaaatccattntcatgggcaact

SEQ ID NO: 183352 - DNA, 405 bp, Glycine max
  unsure (1)..(405): unsure at all n locations
agcttgcctgaggggcttctatggatgctttatctttgagcttcaatgaggtcctttaatggtgattttccaccatggagatgtancggaagaataaggaaaagaggtgagaggaggcgccatccactagggaataagccatggaagaaggagcttcaccaccaagataagccttggataagaagcttggagaggatgcttcaatggaggaaaagaaagagggagagaaagagagaggggagagcacgaaattgaaagaagaaaaagggagagaagttgaactttgagttgtgtctcacaagactctcattcatcaaagttacaacaagtgttacacatgcttctatttatagactgggtagcttccttgagaagctctcttgagaaaacttccttgagaagctt

SEQ ID NO: 183353 - DNA, 357 bp, Glycine max
  unsure (1)..(357): unsure at all n locations
atatgctccttgtgatctacttgggaagaaagctttatgggatgagttgaggcagctgaatgcttctaatcctactggaatgtggtgtttccttagggacttcaatatcattataagttctcaggaaagaatcaacttatctcaaagaatggcaaatccttatgacattgcagcctttaatcagtggattgatgatatggagcttcaggaaattaaatgttatgggaatagctttacttggattacgcctaatggctgtgtgaaaagcacacttgatagattcttggtctcacagaattggctatctctttggcctgagagctgccanactgtccttcanaggaacctctctgatca

SEQ ID NO: 183354 - DNA, 430 bp, Glycine max
  unsure (1)..(430): unsure at all n locations
taacacatggaggattttcaattatgtggaggcatgcgactgagtgtttgcctgcatcggtatacacgtcttctgagtttcctttaactgcgactgaatgagtgaatgctcatgtgtaataaaaccgaacaagaaaacctgatgatgtcctaaatactaaatactttttattagaatattggacgacatgactcaagcaacctctactcatgacagcatatgatcttcatggatttgagtggaagtttaagcgtgcatacacatacatatatgggtaaactggttttgatatgagcagtaaatcttagttgcttgttcaaattctgaatgaatgaatgaatattgtgatttgcatcatatgaagaacgctagagacatagtactcatatctgctntattactgtgaatgtttcttatccctttcattaat

SEQ ID NO: 183355 - DNA, 414 bp, Glycine max
gctcgccagtgtcccatttttatcctttattcaaacctttcaaagttagtgatcaggctaaactataaattacagaacttagaaaaactacatccttaattgaaggcgtaggtgacaatcatagcgaattactaaacaagattggtagcttgcttaaggtcattccagacactccccaagctttggaaaatacttcctaaatggtaacaagaagtaccttcacactaattaatgttattaataaagatagtgaccaaaacttagataacacaactgagataggatcagtgtcacaaaagaatataaatccattaaactccaaacactggaaaaccccctccaaattatattatcaacgtccaactgccgctgaccttctattagaagaaagaggtgaacacaatttaaagtttt

SEQ ID NO: 183356 - DNA, 457 bp, Glycine max
  unsure (1)..(457): unsure at all n locations
actaagctttcacacttttccaaaatgcaaactcaaattcttcgcatatgatctaactgantttaatggaattcttatatacaactatgtgattaatatcttttgaagcttaagacacaatcactatatagttattcgttaccaccataaccataaatcaatgaacatcaaaaaatgcaaaggcaataatagagaaagcataataacgtcatacctttttgtcatataaatattaattcaaacataatataattcacaataattacaaagaatatattgatatttaaatattattatgttgcttattttttgtaatttgaattaataaatgtctttgatgggaaaataacatgttttataaaaattaaaaaaataaataaaaatgttattatatttttattcttataaatntgctaagccaacccactagcctttggtaggctaggctaggtcaaaa

SEQ ID NO: 183357 - DNA, 419 bp, Glycine max
  unsure (1)..(419): unsure at all n locations
tctactgatgtggctgggtggggccccttcngcttgttgttccaaccgcgagccttggcctctgttcttcctttctgagatacttttccttttgtcagcttgcgtaggtttatagcctaacccaaacttcccgcggtttcctctggtgcttaccaggctggttctgccgccgttgttcttgcccaaacccattccgggctcgtagccgtaccccaacatcacccgggccaccatcattgccgtatcagacaggcaaggctgcccagagagggaatctacggaggaaatgcttactacctcaaaagattggaaatccgtttccaatgactccttcgtggctttcacatatggcatagaggaagggcaacttaccaagatgtcttcctcatccgatactatgaccaaatgcccctccacta

SEQ ID NO: 183358 - DNA, 430 bp, Glycine max
agcttataaaatgtgactcatggtaaaaatctattgtaaccttaaatttaaatttgtttatttaattaaacaaataaaactaaacgagtaattaacaagtcgaacactaactgctcatttacactctaaaagcatccatgctcctcctcacagccatcaacagtaagaaggatagcctcctccttatatgaatgaatctttaatttgaaaatcccaccttccctagccagctgaacaccatgaagaattgcccacaatttcgaatgcaatatacccatagaacccagattgcagctaaagcctcctaggaatcttaacgcaatagaaaaaactttccattgtgtatgtaccactaccggaaatgcttttctgttaagggcattcatgcgcaaaaatgggatcgaaataacatagtccaatggatcaccct

SEQ ID NO: 183359 - DNA, 457 bp, Glycine max
  unsure (1)..(457): unsure at all n locations
tgagccgggcaatcttgctctgaagaacagtagtgacgattataatcctgttatggtgattcgcggctcggaagcaatggatgacaaatacaagacatatgtttatgatggattgtatgtggttgagacatattggcaggacaggggatctcatgggaagctggtttataggtttcgccttcaaagaattactggtcaaaagcttgctttgaaggaagtgaagaaatctaaatatntcaaaacaaatttccatatgtgctgtgaacaccatagatgatgaaaaaccccattttgttttagtacataactagctggcatgttgatataacccgttatgccatctctttcctacagatggatgtggcgactgcaattgtactaatggatgcttagacttggagaaatgttcatgcttattctcacaaaacactcttggtggttgctgcgctaccctgtg

SEQ ID NO: 183360 - DNA, 424 bp, Glycine max
agcttgcccaagatcgacacaaaatataaattcttactcacctatgcgagtttgcttgcaaaaaaatcccaacaatggtgcaaaaatcgattatgtttcttgcactcaagcttaaacaactgcaacaactttgctttccatgcccgcgatgaaacaatgttcaggcacaaggagaaaagggaaagtgaaatgtgaatgataaaatgatcttaggaggggtgtcatttttatttgattgaaaggcataagagcaattgaaaatcttgtaccccctttccactcagtcttagcggacgtgagagcgtgaagaataacgctctattaattttgaatcaaactggagacaatatgaaccacataatatatgcgtgtgtgtggagacaatatgaggaaaggttgtggatggattgttagggtcaccata

SEQ ID NO: 183361 - DNA, 465 bp, Glycine max
  unsure (1)..(465): unsure at all n locations
ntgataccatgacagaatttgagagagaatgatagatgagtttctctttattctgaaatgaattctacagagttacaaagtaagtattatctatatatagagatcatactatcctaagtcactagagtgaacaacagctgtcacttaactaaccagagaggttagtgactgactcgataaaagaaaaagattacaattgagtcatggagtaagactactctaatattcaggttggacgaaatttggtatcttggaaaattaaaaagcaaaatgaggtaacaagatcaagtgcggaagcaaaatgcagggctatggcaatagtgacttgtgaactcatatggctgaaacagcttctaagggagctcatgtttgaagagactacacggatgactcttatatgtgacaatacctctaatcctgtcttccatgagaggaccaagcatattgagggcaattgccatttca

SEQ ID NO: 183362 - DNA, 445 bp, Glycine max
  unsure (1)..(445): unsure at all n locations
cttggtcaatctaaggagtggtgtcttcatgctgcaaattgatgttttctgagtggaaaatcctaatttggttaagcctgaaattctgcagcatttgcaaagcagattcaaattaattgaagttatgtatgagcactgtagcttttacaaaaataagcactgcaacttatttaaggcacaaattctgcagcatctgcagtttgtgggtggaaaaagggtgggagtggaaatttaaatggagaagacacttgtttgacagagatcttgagatggcagattgtttccgtaatgatgttgctggcagctgtattcagattcacaaaaaagatgactggagaactttgacaaggactttgccttcacctacagctattggtcgtctaacatagcatcgggatttgtcttggctgaataaaaanatgtgggtggaaaaataagcactgca

SEQ ID NO: 183363 - DNA, 408 bp, Glycine max
caagctttaaaagaatggatgagtttgattatttttcatgattagcctctataagagatgtatgcatgcgattctaccccccaagggcattggatagaagactctataaagatggagccacagatgtacgataagaccctatgattctcatgattcttctggtaaattttgggcccatgggctaagtataagcccacttatctttgcacatattaaattaggtttcaattatttttgggccttgtatttagggctccatagtgtagggagggaaccctattaatataggatttttcagcccttgtattcaacggcacctatactagtttttgtattacgggtagttttgtaatttcacatgctttaagcccaatcctattaaatcttaaaccattctaagggggaggt

SEQ ID NO: 183364 - DNA, 419 bp, Glycine max
tctataaaaagaagggcctcattatagagtggaacaggaacccatctagaaatagttggtcactatgtctcccactccttggatgagggacaataatcaacatactccctttgaagctcataaggctctacctgctgatgtaagggaatcctgggacattttttttgaacgtgacctatctatcaaacctaaagaaaatgcaacgttattggattccttctggaactccacaaactaggtgtccactccctgatgttgaaaaagctaacaaacccaaagggaagaaaaacaaaatggcaataacctttataaatttggatacctcttccttatagaacaacatgaatccatccaaaggtactcagtttcaaccatacatgggccaacattacatatttgatgcctatacaaagatatgc

SEQ ID NO: 183365 - DNA, 467 bp, Glycine max
  unsure (1)..(467): unsure at all n locations
tatggttcgactnggtgcccgacttagacgagtaagatgatgtctgtggatccttggcgtgaggattccttatatcgaaagtcttcttggcggatggtccangcggcagcgtgaggatcccttgtatcaaaatccttcttggtagaaagttcaggcaacatgtcccatgggtggagcggtggtgcaagtatctagagcatgtgggctttaatggccaccttggaaatactcatggatgaaaatggcttctgctagagggggagactaccatctggatgacactcacactttacggggagattattggagtacaagtgtgaggtaaagtctcacatcacataggaatgaganagttaaacaccatataagtaaaggaaagacccataaatttgagccttgagactttgggttaaagtgtggtgtcaaattcacttatatggttgtttatgacccgttggtgtcaatct

SEQ ID NO: 183366 - DNA, 404 bp, Glycine max
  unsure (1)..(404): unsure at all n locations
agctncatggtgaatcaaaattgattcatttatgtgccgatgataacaatgatgataacaaaagatgatgacaaaggtgatgacaaaaagctcaaaggtcaatcaaaggatgagttcaagatgttcaagatggaatcatgaacaattcaatactcatgaggaaaggttgaaggacacttcaagattcaagaggaaagttgaatcaagaatcaagatcaagattcaagattcatggttcaagaactcaagagaagacttaatcaagataagtatgaaaaggatttttcaaaaactgagtagcacatggatttttcacaaaacatgtttaccaaagagtttttactctttggtaatcgattaccagattgctgtaatcgattactagtatcaaaatgcttttgaaa

SEQ ID NO: 183367 - DNA, 470 bp, Glycine max
  unsure (1)..(470): unsure at all n locations
tcctcaatcacctcattgagaatacaattccatgatggatgtgtctgtctttgatgaaggctgcttgtctctcatcaataaggtcagatataacattcctcaatctatttgctaataacttaactatcaccttgtacatacacccaatcaaggagattggtctgtaatcatcaaaggtctgagggtgtttaactctgggaattagggccaagaaggaagcattactgcctctagggaagcagccatgcacatgaaattcatctataaatcttctaaagtcagttttcagcactccccaaaattctttaatgaaattgaagttgaaaccatcgggtccagggcatttgtccccaccacaactccacactgcttctttgatctcatgatccaagagaggggcaatcaactcctccctctgnctctgattaatcgaagagaaatgaactccatcaagggtgggtctgcgaata

SEQ ID NO: 183368 - DNA, 365 bp, Glycine max
tcgagcacttgctaagcacaacactcctacgctaagcgcgaggaagactctggaagaagatgagttgtacacgttctctaagcgcaccgcttcatcttactaagcgcaccgcttcagttcatccgctaagcgagaaaggcacgctcagccaaaaatcactaacatgcgctaagcggtccataagtgtgctaagcgcatgagcacgaacaaggccacctatttaagcctgaaatcagattttataaagtgagtttggactgggattcacagctttgcatgtctatgggttctagagagagaaaggtccaagctccagagagctttgagagactttgctgtgtgaagatctgcagagaccaaagctt

SEQ ID NO: 183369 - DNA, 444 bp, Glycine max
ctcccggatccttaagtcacctgcggcatcaagcttatgctcatccactctttcagtgtgtgaatctatatattcaagcaaacaatgtatttgcgaaagccacgagtggcctcaatgactaaacaatacttgggtgttcttagattccaggggagtctaagaagtgtgtcagtaatggtcttgacaatacttgtctatctagcattggcgggttaaaatacttatttttgaatcaattttgataaggtaatacttacagtttatgaaggagaattgacatagcttagtttttgtgaaccactataaaccaagtgtatatgcttctatcttaagctttaacttgtatttcatcaagtcttctttgcgcactttatcaccaagtgttttttaaaagctttaagacaaccttgtgtttacactcattgacatactctttgtttaact

SEQ ID NO: 183370 - DNA, 406 bp, Glycine max
ctcagcttccatcagacccttcctttggtaattgcataaaaaatattgtacccattccaaaatatttctctcccttttaaatggtccttaaagtaagaaaattggataagtaatttttgaaatattaaaagtgaaaataagtagtcttctaagtattgaaaaatgtattaaattagtctatgcatgtaaagatggatgttcttttgcaacataaataatatgaatattgtgatcagaacattgttgactacggaaaaaaaaaattacccttacataggggtgaaggagaaaataaaaaatcttctttttttttttgcaataaccattaatggtgcattaaaaaccacctaaaaagctattcacctaaaaataatatcctttgtgaacaggtaaacttgtataacca

SEQ ID NO: 183371 - DNA, 135 bp, Glycine max
agcttattccatgtttgtccatatctaacaagctttatgatacctaatcgatattttaggatatgcacgttatttgtttgtttttcccttttattgccttagtaccatccttttgcattatctcatattgacttt

SEQ ID NO: 183372 - DNA, 478 bp, Glycine max
  unsure (1)..(478): unsure at all n locations
ntgaaggctgaganattcatcagacattagattccaaatatactctagatttggcaactgacttagaatcagtttcttcaaaggaagagaatgttgagaaggtagtttcatatctactctcatatcttgcacatcaaatattgccttaatagatttgcagttgattacatggatctcttccaagttacaaagaaatggaagtaaataaaaaggaattacattgggtaaatattcgcattccaccacaaataatgatttcaaatttttgaaactatggtcacttggaattggaactacaccaagccaaatctcttctaagggaaggtgatcaccaaatttcaggtactgtatatcacatgtagactnttccacctgtaagagacaaatgaatattaatttgaagagcttaacatataaatatattacgatgatgtttgtaatattattatttacaaaaatgaagatcactttgtacaga

SEQ ID NO: 183373 - DNA, 498 bp, Glycine max
acggacctatgatactaagcttgagggttaaagtctcacgattatcacatgttgatgcatcttttgttagtcatggctatacgagacatcttgccaaacaaagtcaggttagccataactcacctgtgctttttcttccatgccatatgtagcaaagttgttgatcctgtcaagtttgatgagctggaaaatgaggccgcaattatattgtgccagttggagatgtattttccccctgctttctttgacatcatgattcactttattgtgcatctagtaagagaaatcaaatgttgtggtcctgtttatttgtggtggatgtacccggttgagcaatacatgaagattttaaaagggtatacaaagaatctatatcatccagaagcatatattgttgagaggtacattacagaagaagccattgaattcttttcagaatacatcgagaaagctaaacctattggccttcctgtgcctcggcataatgacagagtgggt

SEQ ID NO: 183374 - DNA, 416 bp, Glycine max
agcttcaatggagaatgaagaagaagaatgtttcttgagatagggagagaaacggcttctgaatttctgctttggctgagtgaggagagagaaaagcttttcggttataaaataaaaagggttttcccctttttccattattttattcaagctctgccacatgtccctatttgattggagcaaaagggcccactttctctctttttgactgtgacccatactcagtcacaaaagtgagaaaaatctgacctttgaaacgctaaaatcctgcctcgggttgcgtgtcgtttctctgattccagtttctcgcgtttctctgcgtccgccggggccagttttcgaaagcaagcaatatatatatcaaaacgctcagaatgaaaccctgagcgcggtttacaggttgggttcttaaattt

SEQ ID NO: 183375 - DNA, 477 bp, Glycine max
  unsure (1)..(477): unsure at all n locations
tataagaacaaaatngcctcaatcatttccaaatatgcatgtgtatntttctcatcaacaagaatcaagccaaggctattgtgcaagcaatcaatggggcaaaacacaccaaatgattatgatgatggatggctcaaattctcacaaaggtaaaatcatcactttcaaattgagctttcaaaactatcatgacatgtagagaagaatcaaggatttcaagtcacaaaatgtcaagaacttttattttcaaaacaattacccatttcttgaacatatcctataattcaaagaataacatgcaaagtcgtacgtgcacacaaaattgacccaaaatattaaactaaaaatccgacgaaactaacaacattaacaaattaacacaactaacaaattaacaaaaccaacaaaactagcaaaatcaaagaacactccctcccccccccatacttaaacaacacattgtcctcaatgtagcac

SEQ ID NO: 183376 - DNA, 447 bp, Glycine max
  unsure (1)..(447): unsure at all n locations
ncatgaatggagtccnccaactactctggccccatatgtattgcatcctgctcgcancatgtgaagcacacgacaccgtgcctcatagtgcacaatacccagctgatgtgtttacatcttgccttaccacacctataaagatggcattgccatggtgaagcctctcattaattcctccttactttatcctgcgcagaatgcttaatatgctaaacacctctaaaggtttagcactacctctattttttaaacataatagcattgagcatggacttctaaagcattgtgcatccgattctaaagcattgcgcatcgattgctaaagcatcgtgcacggtctttaaatcatgtgcactccttgcacccgagtggttttagattacccacccaatcgcttaccttatcacaagttatccatagtgaacccttagttaactactcctatct

SEQ ID NO: 183377 - DNA, 429 bp, Glycine max
gcagcatgcacttgtcgtcatagtctgatcatgttatccactcgacacggtcagacaaataggagaccttcatcctataacgcaacatggtggacaaaagtgggcccataactagaatgaccacctattggcaatacggaaagtattctgcactttactatccatgatcacacattattgttacttgtggctacgtgaacatgaactactctcaatatgtagatgttgcttacacaaatgagcacatcttaaaagcatactccgcacaatggtgaccttttgcgaacgaagcatcaattcctccttctgatgactcatggacacttatccttgatccaagtacactccatgcgataggtccgccaataacaacaaggataagcaatgacatggattgtctcaaacattctgagcacccgctacaatata

SEQ ID NO: 183378 - DNA, 475 bp, Glycine max
  unsure (1)..(475): unsure at all n locations
tatcacagactcatctatgaaggagaactttagttttcatgaccaattactttatttcaagggtcgtctattcaatacctgatcatagcttcaagtctagaaacattaacaagggtttatgtgaaatctatgtcttcttgtgggttaaagccttgagctactaacatagctttgttccttactaccttatcttgttcatccaatttatttctaaatgcccatcttgttcccaagatgcttttgttctcaggcttgggaacaagcatcttgacatcatttccagtgaactagtggagttcttcttccattgcaataatccaattattatatgtgattatttcatttatcatcttaggttctatttcaaacatganagcataagacataagatctttaaaatgatgatctggttttgactccttcagtctgatcttcaataatctgatcttaagggtggtagttaacaaatatctta

SEQ ID NO: 183379 - DNA, 415 bp, Glycine max
  unsure (1)..(415): unsure at all n locations
agctttggcaattctgccataacgtttatcaaattaaactaggaagaacctctgcagttgaataatcgagctgtgagtttgggctttgttttgtctaattagcttaatcaggtagattagatgggcctaatcaaggcccatcccttccttctgagtagtcactctatatattagcgtctagtagatagatagtaagtctagtgagttacttcattttgtaaaaaatagaattagtaacttgttgtgcaagttatcggatcaaactcttttctctcttttactctcaacggttctttattattccttctctttagacctctgttcttccattttcttgcaaaaatttactggcttttccattgaggatgatcatggaaggcttanaacttcttaaatccaaggaaccactcaaagc

SEQ ID NO: 183380 - DNA, 462 bp, Glycine max
  unsure (1)..(462): unsure at all n locations
ntaaaagacctgagcctaacctacgataagatttttatgtttgagcctggcctatggcctatcaaaggtttttattttggctcgtactggcctttttaaaagcctagtctggcctgatagcctttttaaaagtctttttcacattaaatctttaatattctagagtaggaacgtaatagaaagttaaagtaaaaggaaacgttgacaggaataggtaagttaataaaaataatgcggaatataaagggacacatgattcacacctaaattgtaattaaagtcttacttgattataggaatagaagttatggagcagtaatgtataatcaaagtgtgctagtttcaaaaaaaaattaattataccaaaaaaataatataagtatatattggtacccaaaaaataatatatatatatatatatatataggttggcctatcaggtttataaggctttttaataag

SEQ ID NO: 183381 - DNA, 199 bp, Glycine max
  unsure (1)..(199): unsure at all n locations
agctcggnncggatgaacaccgtcaatttttggtttaatcgccgcgacataaaaagctcttcaaaagaaatattccatttttctttgtacccggncgtttgtctgttaaatctttccctttcagatgaaatatgatagtgtgatcgtcaccataagcttcacaaaacaggtatttttgattcccctaaaattgaagtaa

SEQ ID NO: 183382 - DNA, 420 bp, Glycine max
  unsure (1)..(420): unsure at all n locations
ttagttgctcacccaccccaatttaaatctgattgtatgtctctntggttgagaatgttgggatccaccaatcanaatcaagaacagaggccactcangtttttggtttcttggatgatgcactcggattttaacaagtgtgttcaaactcattgggatcattttgtttcttggagtgttcatcttaatgactctacgagagaccttcaaaagtggaataaggaggtgtttggtaataattttgtgaaaaagaaaaaattaattaggaagttaagcaagttggataagaggctgaatagtagtaatggggtttatattcctggtctgattcaagaaatgtggagtgagtatcaagatgttttgatgggttttgggcctctgccacaggtgtcatctcgcatatctatgtcaaattcatcg

SEQ ID NO: 183383 - DNA, 406 bp, Glycine max
agcttagaacctggtggcaattattcagatttgtcctttaacattgcacacataattggtgacaatgaagatgatgatggaagaaaaatccttagagagggaccacaattggtacgtctaatatcagccgttaaatttgttgaaaattctatttaggataagatcaatggtggccaacaaggacaggttacctacggggtttgtcaaatttggtcaatattatattcatgagcttagaattttcttttcttggtaatgggaccaaagggggagagaaaatggatgagattatagataaaattggggctagagatataactcacccattctcctactctctagtagaacaaatttatgctaaaccaactgataagaataattgaaagtgagatgaattggatctggg

SEQ ID NO: 183384 - DNA, 469 bp, Glycine max
  unsure (1)..(469): unsure at all n locations
taaagcgccaagaaggatgatgacatcctcgaagccaagtcgccagcacggcagtgacttccccgtcaaaggctgcaccccctgcagcacctgagcacctcaacctatgcctgaagcctacgcctgcaatgcttgaagtcgccgatcaaaccaacgttttcttccaggctggaggcgccaataggagtggcgacaaccactggctgtgtcgccagtgacaatggcaacatgccacatgtcaagccacaaggaaagcgccaatggagctaacgttnttgcatgccctccatgtaaaaaaacagcaccctcatggaataactntcaaaacagtcctagtttgggaataagtttgaaaaaggacaccaaactggtcaatatgccctaactagaaacttcagctgatggagtctcaatcaggattcactgtcatcatagttggcggtgaagcatgctgctcaatntatatcaa

SEQ ID NO: 183385 - DNA, 200 bp, Glycine max
ctaaaccacatccctgtgccacttcagtgagatacgtacctccagttgcccatattttgtttctttcacaccgcgtcccattattcctccaatgcttcacacatttaacaaaacaacattcacacagcataagcttttacagccaagcaaacagagcaatgcaaaaactttgctaaaccccacctaaaatcacagctttt

SEQ ID NO: 183386 - DNA, 467 bp, Glycine max
  unsure (1)..(467): unsure at all n locations
tcattggagcttgtaggcctaggatcttcttcatcaatggattcctttgcttcttggaagatgaatggcagtggaatggagaaaggaagagagagaggagacgccacttcaaggagaagatgagtctagaagaagctcaccaccataggaggccatggataagagcttggaggaagaaggagatgaatgaagggagagggagagaagagcacgaaattttctgctctaaatgagctttgaaatctgaagtttaatattcaaatgatcaaagttaaaaaaaatgcacacacatgacctctatttatagcctaagtgtcacacaaaattggagggaaatttgaatttcaattcaaatttcacttgaatttgaaattgaatntgtggagccaaactttggagccaaaatttcactaattatgattagtgaattttagttatgggtcagcccactaatccaagatcaattc

SEQ ID NO: 183387 - DNA, 428 bp, Glycine max
  unsure (1)..(428): unsure at all n locations
agcttgttaaaatatgggtcatgtatcgcacaagaaatagtactgtggatttcattatgagtaaaacaaaagcgaagctagttctgatactaatgtgctagatgactagtaaatgactgaatacatgtaatcgcgttgattttatattttccttttctgcaaagatttgcacacggatgacaattctatgatctaaactctagacaaagtgaaagatcaggtaacattgttacttgaggcggggagctataatggcaacttcttgaaaattctacctaagagttagagcttattctattaacggaattcaatgtgcattcggtggaaatgaatttttgcaagaaaaaagcatgtaaacacagaatagaaggaaagaacctgctgcaacatgcttgcaaacattagatgcatcanatcataatatctaa

SEQ ID NO: 183388 - DNA, 382 bp, Glycine max
  unsure (1)..(382): unsure at all n locations
tgtgttttgatgatcacggtctgattattttagcatttagctttgtttcaatggattgtgtgatggacaaaatgaatttttttttctttctgctgaacatatttttggtgaattgcggtcgagaaaatataaaataataggttattaaaaaaggcattgaatattattatttaattaatcatctatctgaacagagtaatatgtattttcatgttctctacgtgcaataaaatttgacaaagtgtgccgaacaaattgattactgatttgtcganatcatccgagtgattttatgagttcgccgccacataaacaatagtcaaatattctggtatagaagatatttaggtgggtgttagtgtgtaacagccaccagactcat

SEQ ID NO: 183389 - DNA, 481 bp, Glycine max
  unsure (1)..(481): unsure at all n locations
actaagctgccaacaagtaactaattatttctacaaaatgaattttatactactaactaactaaatccactaatatatagagtgactactcaaaagtagggatgtgccttgattaggcccatctaatctatctaattaaaccaattacacaaaataaagcccaaactcgtagcccaattattcaagtgcagaggttctgacttccaagctcaatttaaccctcaaaatggcagaattggccaaatcttatttgtgaaaaaattgaacctcttgttattagttnttgagggactactcacacgctccatttggagttctgtagtgtcctataagccctgcacaaggcagataggtcaagtaggcacaattatcaattaagctcaatgattctcctaagaccaagactatgttaaagtgagaaaataagggttgaagaggtgtcaattaagccacgaataatagacaaaatactaaactacaa

SEQ ID NO: 183390 - DNA, 421 bp, Glycine max
  unsure (1)..(421): unsure at all n locations
nctggaacgcccaagtgggcccgatagctatatacacccttctttttactaaatgcaccccctttnctataatcttgtaattctttctccgtaacgatacgaaactttacgaatttcgtaacgatacttattttccttccgcaaggttacgaatacttacagattatgtatttactcctttttacctttcgaagaagtcacggaaacttacggattgcgcaaaaacacctcttttctacttccgccacattacggaatttcacggaacgcgcaagcctgcttcctttcgattactgagacgtctcggaacttcatttattgcatgtcatcaagcgataatccccggacgatattatggtatgacaccaaacaaaataatgtatgcgctgtacaaatgactttcgatacaacagaaacaaac

SEQ ID NO: 183391 - DNA, 468 bp, Glycine max
  unsure (1)..(468): unsure at all n locations
ctaagcttggttgctacgcagaacattttgttgcattataggtgcaattgtttacttacgtctgtattcttcatccaaactaacaaaaacaactctcctgccaacaaaacattaaaaatttagagagaaaaaacaaacataacaaaaagtgaaattaaacaaaactctaattaattaagaacaaaaagatcactcgtatctataggaacaatgcttgcgtatctgttcatcatattaatttttattaattggagccattaagtttgatcggataatgtagtacccagaggtgtaccatggatttggaagattacatggatatatcgaacagattcaaggtgaaaatgtaatttacagcggataaattaataatcatgacttaattaaagacgggtgtctaaattctaatccatttgtgaactcgagatgtccaaacctacttgattnttcaagatacataatcatcaa

SEQ ID NO: 183392 - DNA, 430 bp, Glycine max
agcttaaccttgacgtatgaatctaccatatttatgtcttcctgaatgggataggaccacaccttaaatgaaaaagtgagattcatgcatcgaataacttttggagtatcacaaagttattatttatatggatcgaagttggatgaaggaaagtcgcataggccctgtgtatgacgaaggtgtggaacagttcctaaaaattgctttaaacagaagtcgaccgaatgaaaacgggaaattttttttgtccatgcataaattgtttgaacgggagatagaaaatactcgatgacatattggagcatctgttgtgagttaggattaagaagaatttacaatatggatatggcaaggtgaattgacagacatgcagagtgggtcccaatctgaaccgtttgatgtacaaatgggagaatgcttgaaggatatg

SEQ ID NO: 183393 - DNA, 437 bp, Glycine max
  unsure (1)..(437): unsure at all n locations
tgctaacccatggaagctcctaatatctaccatacttttgtgtgtgggccattcttggatggccttgattttctcagggtccacttagaacccatttctaccatctacnaaccctaataaaaatatattatctacacaaaaggtacacttctctatatttgcatagagggtgtttttcctaaggactgaagaacttgcctgagatgccctaagtgatcatctaggctcctactgtacactaaaatatcataaaaataaacaactacaaatctacctatgaaatcccttaagacatgatgcataagcctcataaaggtgcttggtgcattagtgagcccaaaaggcatcactagccattcatacaaaccaaacttggtcttgaaagcgngtttccactcatcaccctctttcatcttgaattggtgataaccaacttt

SEQ ID NO: 183394 - DNA, 315 bp, Glycine max
aaggactaactgcctgagatctctgtgtgactatcttaccacctatccaagataccaagggacgagcgaccgacaaaatgaagtgtctctcctctccgctgaacataaattcggagagacagcagcggaaaaatataaagaaactggccattcactaaggccatagagtactatgagctaacccaccagagaactgaacagagtactatgtatcctcatgtcaacgacgaacaacacaacatgcagagcgagcccaacagacggaacactgtttgggcaaaccatccgagtgatttacgagcgctccgcacaaaa

SEQ ID NO: 183395 - DNA, 474 bp, Glycine max
  unsure (1)..(474): unsure at all n locations
ngaagaaagagtcatagatgcttgtataaaatctataatttatagtttgtaattgcagtaggtatatattattgaactcatcacctcacgaacgaattctattaattattttagtacggttaattctttggacataaaacataacatgcatttgaaggatcaaatcactataaagtaaaataaaggaggtaaataaggagaaattgtttgtctttgaaggacataatgagaaattgttaagaaaataatcaaatactactgcccagttagatactttgacttggtgcccaacagcaattagagtgcaacgacaatttctattttgacttagtgcgcatgtgcaacagcaattatatagctttcaacggtcaaggttctcactaccacattaactattgctgcccaagtggcacttatatatctacaatagtattacacaatataaaaggagtaacgatgacatcctaatgaagt

SEQ ID NO: 183396 - DNA, 428 bp, Glycine max
  unsure (1)..(428): unsure at all n locations
agctntgatgttgttagtcgtcatttggatgtcgagagtgtcatcttgttggattctgagaagaagatcaataaaatcttggtcctctaattcagctccatcttcttttgcaattttgttcttttcttgatgctctctgatgatgttttccaggaccttgtcaacctgcttgtgcaacttcttcaatctggtcatctttccagttaggaaatataagaatggaattgaaggaaagacatcagcaaggtcgaatcctcccccggattctacgatttttcggatcaaagacacaacaaactcatcttgctccttgtatatgccaccgaatgctaccctggaaatagaggcacatatcaatgagaaanatctactggtgagattgataggcgaaccagcagattcgcgaatggagtcgataaactttgctg

SEQ ID NO: 183397 - DNA, 498 bp, Glycine max
  unsure (1)..(498): unsure at all n locations
acactatanaatactcaacctntgagccaaaaaccngactcaccataaaccttgacccagtgtgataatgccaatccctaccctcggaagcaaacaaaataacaaagaggagaaggaaaatttccaatcaaaggaaaaaggagaaggaaaatctcccatcaaagaggaagcacataaaggagagaaagaaaattctccatcaaaggaaaaaagagaggaaaggaaattcccaatcaaagagtgggagaaagcacaaagaaaagaaagaaaaattcccaatcaaagaatgggagaaagaaaaaaagaagaaagctcctggtcaaagaaaccacaagatatgtgccgagaggtccttggaccagacgatatccgaacaatacagaattgtcaccaaatgaacaaaagaaagaaagggaaaccatgacctacaagtggccntctccctttgattaccaaccaaaaatccagtgtgctagcgactcttatcgcccgcactaa

SEQ ID NO: 183398 - DNA, 397 bp, Glycine max
  unsure (1)..(397): unsure at all n locations
agctngcatgatatagattctccccctttttcaagcaaattcttaatncttcttgacatcatcaaaatcttcatgatttacattctccccctttttgatgatgacaaccacctgtaggttaggagcaacaacaaaggaaaaaatatcgatttgcatataatttactcccccttgattttgcaatgattgcttatatgagacagttgaatatttcatatttttcatatgtaaacaaattgtctcataaacaatagataattgttcttactattttatcttttatctttctctccccctttgtcaacatcaanaacaaatcatgaatagagaggagaaagatgttaccactctgtgcaatgtatgacaatcaagtgataccaaaggcattaaaacaata

SEQ ID NO: 183399 - DNA, 469 bp, Glycine max
  unsure (1)..(469): unsure at all n locations
ntnntgaaagacacatctcttcacaccatgttgaaaaggttcgaatggcctatatatatgtgtgtgtatgatttcaaaaggcaagagacatattccaagagaacttcattgccaaatgctctttcaacaactcttgggcaaacacttgcaaatccattaaaagttcatccatgaacttcaattgtaatattcttctctcaaagagagaattcttcttcttcttcttctttctcttcttcttcttaatcaaatagattgattaagggaccgagggtctcttaagttgtaaggattcctgaacacaatggttgggttgtccctatgtggttcagactttgtaaaaggatgttacaaagagaatgaaaaatctcaagtgggttgcttgaggactggacatangcatggggagtggccgaaccagtataattcatgagattccaataaatgaacaacaagtctagaataatca

SEQ ID NO: 183400 - DNA, 421 bp, Glycine max
  unsure (1)..(421): unsure at all n locations
agcttaacgatatgttgttggttcaaatatatgttgangatataattnttggatccactaatgattcattgtgcacggattcttcccttgatatgcaaagtgaatttgaaatgtcaatgatgggagaactaaagtactttctgggattacaaatcaagcaaactcaagaaggtatattcatcaatcaatccaaatactgcaaggaattgatcaaaagatttgggatggatagtgcaaaacacatgtctacaccaatgagcactaattgttacttagataaagatgaatctggtcagtctatagacataaaacaatatcgaggtatgatcggatctcttctttatttatctgctaatagacctggtattatgtttagtgtatgcatgtgtgctagggttcaatccaaccccatacaatcaca

SEQ ID NO: 183401 - DNA, 466 bp, Glycine max
  unsure (1)..(466): unsure at all n locations
acctatgaaactcagctggatgattcagctactgggatcaagttanttattatgctacacatagaacacaaaacatgattgattagagaaacatcttttatgcatcagctgggctgttagaaagacccaacatctctacctactgctgtcaattttacttacttgcatttttactatttttagcctagacttagtttaatcctgttttaaatcatcaattatcaatgtttctttcaacaatgccttatttctgaatttaaccctatcttagactagttccctaagttcgatactcggattcatccattttaattntaaatacttgatgatccggtgctctttttggtaaaccggatttcccttgaacatatttgtataaagaaaaagtgaaccaaaaagtaactgcaggggaaatccaacatgtgttcacgtggctcagntgattgctgatgtcatctatcagtat

SEQ ID NO: 183402 - DNA, 418 bp, Glycine max
agcttgacaatcaaggaccctgtgctcccgtccgacattataaataactaggttccaccttcacttttcattcattctcaactcactcacatacttacttgagcatcagagtccttttttgcagctccctccttttcgttcccctagtggaggacacctataaattcgacctgtgaaatcgaggaacccatctttgctacatcaaccttgacgtcagtttgctctagattttggtaagtacaattggtgcccaccgaggggccatgataaaacttcccctaggaccacccacattcatggttatcacactttctggccttcggcgagagacacccccaaaaaattcatatcctccttcgacaatgaccaagacggaaaatgatgccctccattaacttcaaacccgcatcgcatagat

SEQ ID NO: 183403 - DNA, 470 bp, Glycine max
  unsure (1)..(470): unsure at all n locations
tgaaaatntcanagtgacatgttcaaggaaattctacaactagcacatggttcaggagttggagagaccctccttacctcttgaagaactcacaaaatcttgaaggagaatgaagaatattcaggtttttcaaggtttcctttcatgagtaaaacaagtgatagttccaagttaatagaaaaactagaacaagagaatgaagaggaatcaagtctaggatgaagaatgaagctcatttacctaaacttggtgactcaagtgctcaagaacacaaagaattagcagggaagaagaagaagaagaacaattgatctccctcacctcaagctttaatttcgtgcaaaaaaattgaagggataagactacaaaagaatttttatttgcaaagactcaacccagtgattcttgatgtagtgaagaaggagataaccaagcttttgcaagctggaatcatttatcctatctctgac

SEQ ID NO: 183404 - DNA, 459 bp, Glycine max
  unsure (1)..(459): unsure at all n locations
cggagttgcaatagcgctaaagagtctggttgttctcacttcatatcgncgacaattaacttgcggtcctgtcttcatgattcctaaatataaagtgctaagttgcttcaagcttggtctttggcaagtgtgtacaaatatattcttgacccgctgattcatttgagacgttcaacacctataggatatgaagagacttttattgtattgctaaaatgctgatctcttaatatgatgcaacgctaactcaatgatgtctactccaatatcaatgatatatagtcttgggaaactgatggtttttgcttataaatattcaaatactcataggtctatgtccttaacaatcttggctctatacagactccactctacaagatgaaaagagactcttctcttcaaataaccatattgcctcttacatttgagaatnccataaaagcgcactctttttgttat

SEQ ID NO: 183405 - DNA, 416 bp, Glycine max
cctgcagcttgcaagctagctaaacagatgaccaagaacaattatttatataagtagggacatgcacaaaaattcatgaagtagcacagtctaaagcaaaaattattttatgcaatggaacacacacaagtaatgcaagtgtcatactcaatacatcatagtggaaaattgatggcatgtgatggttacatgctatcacctctttcagcaaaggttgaaagaaagaaatctctaaccgaaagatgttccttttttccagttgaaaatacataatcacaaaaagctttacatagttcacaaagaactctagcaaatacagaacgaccaagtgttaactgcgtactcagaagtccgaacacatatacttaataaccccaaagagtgagccactcataaaagcaacaactctaaagctt

SEQ ID NO: 183406 - DNA, 456 bp, Glycine max
ccacctttcggtcctcctcatagttgttgcatgagacaacattctctattttcatctcccactccaagtaggcctccggatcattctttcctataaatggaggaatgttgagtttaataccatcaattcgtgtttgtctaggaacaccatcattccctcttctcctcctttcttcttcattatgatctctattctccatttgatccaacctctcatggagcgcatcatcttgttgtttcattaacctctccaaatgttgcatcaaagcttgcatttggaattgcgaaagccccactccatcattatgattagtacctgacatctcaaacaaacaaatcaaacgtaacaagacaattatagtcgttgcttgaatacctcacccactcaagtgtatcacacaatcatggcttctctctaatgatacactcttgccttttaccactctaatttcccttg

SEQ ID NO: 183407 - DNA, 335 bp, Glycine max
  unsure (1)..(335): unsure at all n locations
ctgcacttgcaaggcacgccaatggtattcttctaccnccaaatagacaccatccgtccattggaataactgcataacgtttctctggtcctttatggtaatcgtacctcgcactcaaaagactgtccctagtcataaataagaagttgcctccccccacgcccctaaaacctcgaagacgacctgtgtatgtaccgaccagggcctctgtccccccatgtccagatcctctgtagagccatgtctcaccaccttataaaaatctaaatgggaactccacacacacacacagttttattctcaccctccatgcgtgggacccataatcaatggct

SEQ ID NO: 183408 - DNA, 441 bp, Glycine max
  unsure (1)..(441): unsure at all n locations
agcgttaccatccatggacaagagnaacaaacgactgcgcggctctttcggcgttccttccaatccaaaaatcggttgaatgttgccttccatgctcgataatgagaaccatcaaaagaggggaaagggatttgcgccctatccaccactgagacaatgggctcatgagtctcactatgattttcatcctcagctgtgactataggtccgctatgttgggtggcaatcgaaaacatcaatccctcgatagatttctgcatcattgcgaaccaattttgcattgattcttgaagatcaaagatgatcttctcataagaatccatgagcgtgtcaagctcttttgctgtcacaagtcgcacctactaattgccatagttagaaataaatttctatagttacttcactcacctttactcacacacgggaagagaaaacaaacct

SEQ ID NO: 183409 - DNA, 433 bp, Glycine max
  unsure (1)..(433): unsure at all n locations
atgcttatagaacaatatcgcctcaatcattttctaatatgcatgngaattacgacgcatcaacaataatcaagccaaggctattgtgcaagcaatcaatggggcaaaacacaccaaatgattatgatgatggatggctcacattctcacaaaggtaaactcatcactttcaaattgagctttcaaaactatcatgacatgtagagaagaatcaaggatttcaagtcacaaaatgtcaagaacttttattttcaaaacaattacccatttcttgaacatatcctataattcaaagaaaaacatgcaaattcgtacgtgcacacaaaattgacccataatattaaactgaaaatcccacgaaactaacaacattaacaaattaacacaactaacatattaacaaaaccaacaaaacttgcaaaaccaaagaaca

SEQ ID NO: 183410 - DNA, 458 bp, Glycine max
  unsure (1)..(458): unsure at all n locations
tgatcaatacaattatctaatcattccaatccactcaaattatatgattgctcattcaaatcattctcaaacactcatttcatacaaaacaatccactgcatatcattttcaatcaattcattattcaaacacgcttttggtacaagcaaacaactcatagtgctgaaatctaaataattaaaatttaaaataactgaaatataaagcaaactaaatactgataaactaaaatgttcatgctttgcagaaattaaactaaacacaatttaaacatcctgctcatcctgtggctgatcttcattaagatccagtgctacagctgctgatgaatcctggataggctgctctggctccatgactggtgtagatggctgggtcttctcaggaacaagtgcaagagatgactcangtatctgatttatggaaagtctctcctcctgaccatgtgtgcattaca

SEQ ID NO: 183411 - DNA, 414 bp, Glycine max
  unsure (1)..(414): unsure at all n locations
agcttcacacccaatgttattttatatgattataatnngcattaagacggccaatattacaaatgaaatgacacacaccttcctttataaataaatgtatatacgatcaagaaacgaatccaaaataagaaataaggaggaaatagtaagggtactcctgttatttacctaatataaaataagaataatttaattagtatatatcaagtatgagtatgagaacacgcgggtacgtatatattgatttttgtccctgtctctcaaataaacacaatatgtattatccatatcaatatccgggttaagctaaagtgaaaatttttcgcttacagttaaataatcgtgcgggtcgtaattattcacgcccaaactaaactctttttcttaacaattatatatttttctaacaacata

SEQ ID NO: 183412 - DNA, 397 bp, Glycine max
  unsure (1)..(397): unsure at all n locations
tctagtaaactatacactgtatgtaaatgagttgaaaatttactaatatatacactgaanaatctcanagaacaaacgtatttcgtattttttaataaaatggtctaattnttacacaatggatagatttaaaaaaatgcatttcaaccaccatatatttttttcataaattaccaaaatggttgataaagaagtaatttgtagtagtcttttaaccaccacanttaaaaaaaaaaatctaaaaaatgaaataatcttttgaagcacgatnttggtanaaatacatctacatgaatgagatttaaatacgtctgctcttaaatattttaaatctacccattttgatatttacagaaaaaatgcaccatttaataccaaattaacatattcatctctt

SEQ ID NO: 183413 - DNA, 424 bp, Glycine max
  unsure (1)..(424): unsure at all n locations
agctntctgctatagactatagntgtgagcttatatgatttacgctactctcttttcttatgcatattcaccttgtgtttggcggttatttctacatgcatccgttccttacgacctcttttgttgcagatttctgagaagaaagcaaaggcatggtgtgcttcaaagggaaacataccatactttgagacctcaccaaaagaaggatttaatgttgaagctgctttccagtgcatagcaaaaaatgcactcaagaatgaacctgaagaagaaatgtgagcattcctaaactctttttaagttttctttatgcatggtattattcagtaatgatttacaattatttacttctaaaagttccaagtgtaatagtttacattttactcatcacaaagctaaagtgtattttatgttgattgtatca

SEQ ID NO: 183414 - DNA, 475 bp, Glycine max
  unsure (1)..(475): unsure at all n locations
tcgcgagccaagttatgtcaaacatgagctaanatgattgtaccttntaataaaatagtttttattgaaattacacagttaacattatcataatgaataaagcctttatgtttggtttgagggaagtagaaatgaaaggatggatttcttaattttttcttatttggttcaaaactttggagaagaaatggaaatgagaaggcttaaatccttctcatcccattttggtatttcttacagtattggagaatttagagggtatgaaaggtgaattatagtttttgaaccgaacaaattgaattgctacgagattttattttattattcatctcttaggtttattatntatctataaaggtgttctagtgtatcattcatactttccctcccttccgtttataaatcaaacaaggtaactttaatcttccttctattaaaaacccttcttttatttctcttctttaagctagattcg

SEQ ID NO: 183415 - DNA, 422 bp, Glycine max
agcttcaacagcgttcctgagttagtgagttcctctcagagttcgaatcactcgcaaatcgggtggttggtctaccagcaacattcgttctaagttgctttatctaagggttgaatccctccattcatagagaagtgcaggttcgtcaaccagcgtcactggctcaagcagtggcatacgcgcgtctgcaggaggagaaactactggactcacggcggcaacagacgcctcgatcactcgcaacaatcccaagcttgagagcagcaataggaaccacgaacccttcatacacaaatagcttatcacgaggcccgaacccttcgattccattcaaaagattaactccagaagaactcgcgtctcgccgggaaaaaagattatgtttccattgcaaagagaagtactcacaaggtcacaaatgc

SEQ ID NO: 183416 - DNA, 476 bp, Glycine max
  unsure (1)..(476): unsure at all n locations
ntgaaccaaaacctctgacagaacaacaatntcgaatggttatcagtatcatagctcaagtcccacaagcaatacgcattgctatgtttaaggatagacgtgtaaacaacagaaaattatgcaacaaccaaggtatatcaaaacaaaccaagtcaacatttacctgtaagtacttcaactctgacataccctcagaaattattaagaaaagtgaccttaaacctacatttgacaaataacagatggttaaatactaataaatccatgaggaaaagcatcaataattgtctgacagatacacatctgatctgagattatgacacgaatgaacacaactgcgtctccacctccacaaggcagcaaagtagagaaataaagttacaaaataaccacttctgtgcaacgaattctctgttataaaattattcatttcaatacgtnccacacgcaaatngatgaactaccctcgaaaccag

SEQ ID NO: 183417 - DNA, 356 bp, Glycine max
aaacactctcaataaaactatgagatcactggctcgacctttcggcagaagtcgggagaatcaccatgctcaagtttcttcttccacaagaggaccccaccgccaacacatgtcgaatcattcttacctcatcaaagcccgaactaagccaaaattctcatcgccactaacatataaattacatacaatataccatcttgaatctaataaatggcgcctaaaatattctcactagccataaatgacactcatgtatagccctaaaacctaagggcgtaaatctgactaacccaagcttataggcaagataacaaggattacagggttaacaatcctgccatcactagaaagaaaca

SEQ ID NO: 183418 - DNA, 418 bp, Glycine max
tcttatccaagacacattcttggtggtgaagctccttcttccatggcttattttctagtggatggtgcctcccctctcctcttctcattttccttacgatgcatctccatggtggaaaatcaccattgaaggacctcattgaagctcaaagatccagcctccatagaagctccacaagcaagcttccatcacaaatattgaatgactactaatgagtggtaatgactattaatgggtggtaatgactactaattggtggtaatgactactaaatgcattcttgatggtagaatgtctatatatagcatatgtgtttggttcttgagctcacatctttcattttcgtctgatattgacatgtgttttgttttgttggttgtaacctcacatgtttgatacttgagtcttacatttggca

SEQ ID NO: 183419 - DNA, 414 bp, Glycine max
agcttcatgatgaatcaagattgattcaatgtaagttcgacgataacaaaggtgatgacaaaaagctcaaaggtcaagaacacttcatgataacaaagatgatgatctcaagaatcaaaggatgacttcaagatgttcaagattgaatcaagaacacttctaggttcaagaggaaatttgatttccagaatcaagaatcaagattcaagaatcaagattcaaggttcaagcttccaagaatcaagatcaagactcaagatcaagattccagaatcaagatccagattccagaatcaagagaagaattaatcaagataagtttgaacatttttttttgaacactgagtagcacatggatttttctataacatgttaccaaagagttttactctctgataatcgataccagattgt

SEQ ID NO: 183420 - DNA, 461 bp, Glycine max
  unsure (1)..(461): unsure at all n locations
ntgactggagtcatcaagagattataaatatgtgaccatggcatgagtttcaaaatataatcatccttcaaaatcttaataatcgacaatcatctatctttcaatctttttcaacatcatctctcaaacatctttgaatcaatcttttaatatctttctacagaattttctgattcatttctcttcatctttctaaaaattttttatcaacactttctcttccaagaaaagttctttgttcaaaaacttgtgttattcatctttttcattctcttcttcctttgccaaaagaacttcctgaattcttttgagtctcttttctcccttacaaaagattcaaatgactaactgcctgagaatttttntattcttcccttccccttaagcaaaagatttcaaaggactaaccgcctgagatatctcttggtttcccttaccaagattcaaggactaatcgncta

SEQ ID NO: 183421 - DNA, 395 bp, Glycine max
agcttgtcggccgtgattgacgaatggcacttaaaacgacgtttgtctctgcgtgctatcaggctttttgtcttacagacaacaaaaactttatacggataaccactcgggtatttccgccagtcagcgtgactcaaaagtaagtatgacagatcttgtgagcgcggaagataaggtaaatctccacgtgtcaacgggcttgtcggccccgattgacgaagggcgcagaagacgacgttagtcactgcgtgctatcaggcttttcgtcttatagacaccaaaaagtttatacggataaccactcgggtatttccggccgtcagcgtgcctaaaaagtcagtatgacagatcttgtgagcgcggaagatgacataaatctccacgtgtcaacgagc

SEQ ID NO: 183422 - DNA, 466 bp, Glycine max
  unsure (1)..(466): unsure at all n locations
gggtgacacgtggagatntaggttatcttccacgctcactagatctgtcatactgacttttgcttcacgctgacggccggaaatacccgagtggttatccgtataaactttntgcattctgtaagacgaaaagcctgataacacgcagagactaacatcgtcttctgcgaccttcgtcaatcgcggccgacaagcccgttgacacgtggagatttacgtcatcttccgcgctcacaagatctgtcatactgacttttgagtcacgctgacggccggaaatacccgagtggttatccgtataaactttttgctgtctgtaagacgaaaagcctgatagcacgcaaagactaacgtcgtcttctgcgcccttcgtcaatcgcggccgacaagcccgttgacacgtggagatttacgttatctttcgcgctcacaagatctgtcatactgacttttgagtcacgctgac

SEQ ID NO: 183423 - DNA, 270 bp, Glycine max
actttccatccttaaaaaaaaaatctacccgactggtgcacgaggatcactgaacaaaagaatgatgtatggaatgaacacggtcgtgattcggcaaggccctccgtccgttcttcttccttctctctttctccttctttatctctcaattctctcaactcctaaacctttggaaccctttaaacccccccaacatggctatttatagggaaaaagccactttggggtggttgaagctcacccaggcgagttggagctcgcccaaacatg

SEQ ID NO: 183424 - DNA, 436 bp, Glycine max
  unsure (1)..(436): unsure at all n locations
ntagctctaatcctcgtntttttcaatggatttgcattttttcaacacggttttgaacaatgaagggagaataatgtcctccaacatctcctgcctcaattttcacttgatcattatggcagcgtgagagaccgtgtgaatttgaatccctaatttatagttcaaatgtttgttacactctatttatgcttgatgtcataccatgcttttcaaattcatgatttgcattgatgcaacgagattttgggcttgctttttcttgaataagaattgggttttggtgggttttgatttctagagagaaagtgaaggtaggagtgatggcttggaggttccttcaaaggctgtgagtgagtatagagaaagagaagtaggaaaaaaagtggcatcattttcgaaagtcgcctctaatgatagcgcatgccaaanagcaatg

SEQ ID NO: 183425 - DNA, 263 bp, Glycine max
gttaaaaatgaaaatgcctaacttaccaccaggcttgtggaatccgtggcgttagtcaataatatcgggtaaaggacacttcgataaaaaaacagcctatataattagatatacttgactagatcatctgaatccacaaacatgtgagtatggcaggcggctaacttaatcaccccaacatcttaaagctacagacaaagcactcctgagtggaaagagctgaccaaacatgacatgtagataaaaaaaagctactccattag

SEQ ID NO: 183426 - DNA, 393 bp, Glycine max
  unsure (1)..(393): unsure at all n locations
accttgttcatgcagattgctggtagcctgagggtttattgtcaaagtagaccagacattgatttcagtgttggacttgtgagcaggttcatgagtgatcctagacaaccacatttgttagctgctaagagaatcttgagatatctaaagggaactctgggatatggaatcattcttttccatcaaatcaacgaggatgagagtctacatcttgaagcctattctgattctgattggtgtcgtgatttggttgataggaaaagcactatgggacaagtcttcctattgtctggatctcctatgtcctggagctcanagaagcaaacagtggtggcactatcaacttgtgaagcagaatacattgcagcgtgttcagctgcttggtagacacta

SEQ ID NO: 183427 - DNA, 322 bp, Glycine max
  unsure (1)..(322): unsure at all n locations
taaggtggtggacttgatcccattgtttactaaagtaaaacaaattccgtgccgaatcaaaattccgacctctatcatgggtggaatggatgaatgcattcaaagatgcttttgacacanatgcaatatatgaacgcgggagccctgcgaaatgtcttctttttatatacaaccgctctgggtctctaacggcacaacgtttcgtttttagaaagtgacgcggaccctccattgattgtgttacatatgggatcaatacagaacccgcgtgccatgcatatgcgaaatgcgcacactggaatggcatattatgcaatactct

SEQ ID NO: 183428 - DNA, 396 bp, Glycine max
  unsure (1)..(396): unsure at all n locations
ttataggattntcatccaagttgtcttccataggactagtgtgtatccaagcaattctaatttgaaggtgttcgcttccggcaagtgcatcggatcgcacaactagtataaaatggttagaaccgagtatcgaactctcaagaaacttgtgttacttggtaaagctatttcagtgaataggtgtctagtgtgaaaagagatatgtttactatgaacaggtgtgtaacctaactattaaaaggaatatctcgtgagtaatgatgtgtaaagacaaatagacgacacgttggtcttcctaataggtgcctgatgttaatatgatattctctacttaacaacgcttatgcattctatggtggcttctgaaatgctaaaccccgattcctcatgatattc

SEQ ID NO: 183429 - DNA, 477 bp, Glycine max
gcttctatattgtaggccactacttcacacctttctttatgctgttgaatcaatctcttgttttttaaggcatgtttcaaagtaatcattaatagtttagtttagataacttatgatgtggttcttgaaagtttgttatcattaaaacttaagcttatagaggaattttgtttcaatgatgtatattaacaattatgaagtgaataacatcaaaaacttttcttatgtaagggaatctatagtctaatataacttccataaccatagctacaattttacactaacaagaacaaatatgtttagcttaaaagtggtttgtgcaaattgtagtggcctattaccatcagtaattgcaatcactttcatcgccaaaataccagaggtcaattaaaaatgccaaatatcgtttcatggtatcctgccagttattttaatagttgaaaatgtcaattttggcaattatagctaccacaacgt

SEQ ID NO: 183430 - DNA, 445 bp, Glycine max
  unsure (1)..(445): unsure at all n locations
gcttttaagaataaaagataaaacaaacacattgtgttatgattaaaatctctttgtctaaaatgaaaanaatactaaattgttagaacaaaaaatatatttaaatctatcttttatgttatgaaaaattcaaaaagatatattttatatatattggtattgtaattaatgtcttatgatatatagatcaataatatttcgtattaaattatatatgtatacattccccccgggaggggggctggcttagtccctggttgctagctttttcttgttttactctttcatgtacaaagcatgcggttttaaagttggcaaggatcaaattatcatatcacctaatatcgttcaaaatttataccactacactgtatggatttgttgatatatatctggggacaagagtgtataagtctatatcataaaattcaactagtaactcact

SEQ ID NO: 183431 - DNA, 367 bp, Glycine max
  unsure (1)..(367): unsure at all n locations
ctcttattactagctattttgaattctttggttcctgaatgtacaaccttcaaattgttgctcgttcccctctttcttttctgcaaaaaagaaaatcaaatgctgtcaaaacatggatgaagtcctaagaaaatcaatatcaaagaaaacatggatgaaatcacaattaaaaagcacaactacctatctttcagagtcgtttggttaatttgtcttgtctccttatgtggtggggttttgtttaataatcttatacttttgccttccaaaaaaaaattatcactaatccttttttcattaatccaattttgtatgttattgtataaaagatcatgggttctccacctgcctccactactcctnctca

SEQ ID NO: 183432 - DNA, 424 bp, Glycine max
  unsure (1)..(424): unsure at all n locations
tggactggctcggctcactgctggatcgagcggtctcacaatcattaagaagggagntgcatcaattattactagacccttactaattaaaacttacccttcttatgcttttactatgtggttaagaaagttacgaacagagatattaactttaccgagactccaagcggtgattaaggtgcacaaccgagattaacgagtgtatggaagaagaagacaaacactggagttttatattggtgctgccacaacccgtgcctacattcagttccccagcgacctgcagaccttgagatntcctttcaaccttgtaaaagcctttacaagcatagatccacacgggatgcacccttccttgttctctttgaacaacctattggatatacccttcagcttatctgatgcacaggatatgttccctctc

SEQ ID NO: 183433 - DNA, 449 bp, Glycine max
  unsure (1)..(449): unsure at all n locations
actcaagcttctatagaaggttcgntcctaatgtatgtacaattgctttatctctcaatgagctggtgaagaagaatgtggcctttactcgtggtgaaaaataagagcaagcctttgctttgctcaaagaaaagcttacttacgcacttgttctagctcttcctgacttttctaaaacttttgagctagaatgtgatgtctctggagtgggagttggagctgtattgttacaaagtgggcaccctattgcttattttagtgaaaaactacatagtgccacccttaactaccccacctatgataaagagctatatgccttaataagagccctccagacttgggaacattaccttgttccaaggaagttgtcattcatagtgatcatcaatcacttaagtacattagaaggcagagcaagttaaacaagaggcatgcanaatgggtagagt

SEQ ID NO: 183434 - DNA, 327 bp, Glycine max
  unsure (1)..(327): unsure at all n locations
acctataaatactagatgctttgaagaaatgagtaacgaacctacacgctatcattcaaattctttatgtagaaaactctctgtatattcttataaaggttgaaaagctctcaaaacatcttgaatactctaagacaaaaaactaaatgcttagatttcacatttgttggtaagatgattaagatttaatcagttagcaaatcaaacaacatatcttcttatntgtatagaaccaacagtggcttggtaggacacagaatattcgggtgttaaagcttggcgataaactttgttgtgagagctaaaagtaacagtgacaaatacttg

SEQ ID NO: 183435 - DNA, 419 bp, Glycine max
  unsure (1)..(419): unsure at all n locations
atgatatcatctctcaaatattattgatgtgtgttgtctctaactactttttcaccttcaagcagcatctnttggattataatgattgacctgatcttagccctgaagatcgagatatgtggattgaagatctggtaccattcttgaactatttccattctacttaaccaccggtgtttgtaccccaaaagtaaaaaatccactagtttttcagtgtggtagattatctttaaatgtgaatggatagtggatttcctttttctaacacactttatttctattctcatcaatcatattggcttttttaggtgggagagaaaacttcaatatggcagacagatgaacttaggcgttcanaacccactccagttgatgaagctatggcaggtaagctgggtgagtattatatgttagatata

SEQ ID NO: 183436 - DNA, 462 bp, Glycine max
  unsure (1)..(462): unsure at all n locations
tgtgtcatcatctgattagatgctccacaatattattgattcagntacatattctaattagtacttaattgaatcattaatacaaatggaataaattaattatataattaattcataaataatataaactaatttcaagaataaaatatttattggtcgctaaaaaatatatttcattaaaccgtgtttaaaaatatgtttatcaattaattgtggttatttataaaacatatattggtcattaaaaatatgttttaaaataaacaaacacaattcttagtatatttttagagaataattctgttataattaaatntacaaaaataaaaattttaatatatcttcatgcataaattacaaataactatcttttaataaaagtgtttgctctattttaatatgaacattaatgttgaattntcaccaacgatcaattatgtgttacatgaatcataataaagt

SEQ ID NO: 183437 - DNA, 411 bp, Glycine max
cttcctcaaaactgtgctatatcttagttcccaaagtcctattaacaacttccgttggcccatcggtttgtgggtgacaagtggttgaaaataacaatttaatgcccaacttgctccatcaagtccttcaaaaatggcttaagaactaaaagtcccttaactaacatggctccttggcaaacacatggagttctccaattcccttgaaaaacaattctccaatggaaagcatttcacctttttcattggataaagtgacctttttgaaacttatactcccacaaaagggctctcccttggtggttttggtccccaacaaaaatcatggtaatcaatccaggatctccgaattgcatggatatacaaccatgagcttcctagacttgctttacatcaagcatgtcaaaattc

SEQ ID NO: 183438 - DNA, 417 bp, Glycine max
  unsure (1)..(417): unsure at all n locations
ggatccttaagtcacctgangcatgcaagcttataagaacaaaattgcctcaatcatttccaaatatgcatgtgaattatgacgcatcaacaagaatcaagccaaggctattgtgcaagcaatcaatggggcaaaatacaccaaatgattatgatgatggatggctcaaattctcataaaggtaaactcatcactttcaaattgagctttcaaaaccatcatgacatgtataaaagaatcaaggatttcaagtcacaaaatgtcaagaacttttattttcaaaacaattacccatttcttgaacatatcctataattcaaagaaaaacatgcaaagtcttacgtgcacacataattgacccaaatattaaactacaaatccacgaactaacacattacaaataacacgactacaatt

SEQ ID NO: 183439 - DNA, 501 bp, Glycine max
  unsure (1)..(501): unsure at all n locations
cggacacatgaaactcagcttgatgattacatctccctctgtctcaagcaaattcttcttgatatcatcaaaatcttcatgatttacattctccccctttttgatgatgacaaccacctgtaggttaggagcaacaacaaagaaaatatctatttgcatatagtttactcccccttggttttacaatgattgcttatatgagacaattgaagatttcatatttttcatatataaaaagttgtctcataaaacaatagataatttttcttactattttatcttttatctttctcttcccctttgtcaacatcaaaaacaaatcatgaatagagaggagaaagatgttaccacttgttgcaatgtatgagaatcaagtgataccaaaaggcattaaaacaatcattcaatattaatcaagcaaaaacaagtacaataacacatcaattaaacacaatcaaatacaatcaatcatcacatatttcatatcanattaattaatta

SEQ ID NO: 183440 - DNA, 415 bp, Glycine max
  unsure (1)..(415): unsure at all n locations
ttatttctggacccccgttggatagattgaacaacattcagtattggattcccaccccttctcagattctcattggtcctactcagtttttgtgtcatgtgtgctctaagaagttcaacagatataataatcttcaggtatgcaatttgttattgttttccttctactctttattatatataaaaattgaaataataaaataaaatcatggctactttacatacatgtacaatatntttgtttcctttgtgttctctttgatgtaaagacattaaacatctatcttcttcttcttcttctttcttcttcttcacaatactataggtgaatccttctgtgattttgtttgctatccatcccttctgcatggtgttctcgatcttatctacacacatatataatgaacataatttat

SEQ ID NO: 183441 - DNA, 176 bp, Glycine max
atttttatggtattctgctttgagctccattgatacttttggaacctcccctttgttatgtgataactgaccaactttatgttttacccattgataccctgatgggatggttatggtttatagcaatacttagagcggcaattttttctagctgtcatttagtatctggtggtcta

SEQ ID NO: 183442 - DNA, 272 bp, Glycine max
ctgcagcttagacaaatatttttttttttcttcaacatgctcactctcttttttttagacttccttttctgcacaaatttcgtactcttctctgatgatgatgttggaaggctcaacactcaatcaatcaaaggatccactccaggcaagggtaaacttgagtcctagttagtattttcaatacgtgtgaaggtacatatttttctccaatcctattttcgattttcatgattatgaatatgcgtacgatcgaaaaagacataggttatgga

SEQ ID NO: 183443 - DNA, 212 bp, Glycine max
tccttccttccaaaatgttgctggcccaagcagaccatacattcctccaccaatccaacaacaacaacaaccccaaaaacagccaacagttgaggcccctccacaaccttccctcgaagaacttgtgaggcaaatgactatgcagaacatgcagtttcagcaagagaccagagcctccattcagagcttaaccaatcagatgggacaattag

SEQ ID NO: 183444 - DNA, 354 bp, Glycine max
atttgaagcaatatgtgacattcccatattcctataatggattccctgacatttcctttaccttgatacttcatggaaatcaagttctgaaggagagtacttgtttccgtcttatcgctttttgcaaagcgcttttcaatttcagcaaggaattctttggcactagttatatcatctgaaatagtgcccctaaagacctcaggaatggcacgcttaatgaacataagactcatgcgacttgagtgatcccacttctcatgaagtttcctctattcacataagaagggggtttctttctcaatccttactgcaagggctagatccatgcagccaagaaccaattgcatgttcttt

SEQ ID NO: 183445 - DNA, 359 bp, Glycine max
cttcatgaaatgtagaaatagaatgctagtgaaccggctaacaaacataccaaatattattgacaatgcgtaaccttgcactcttccaactaatattacaagaacaccacggacacagctctcaatgaatgatttaacagttacttactctgccgagcgaatacttgacagtggaagatttaggttttgaattgcaacatttcccaattaagtgtttctttcttctgactacacacatgaaaattgagtccttcatcaactttctcaaataataccatccctataattaagaataagggaatgtatgtatatatgtgcaagtttattgaacaatatccatagtaaattgatggcgaatc

SEQ ID NO: 183446 - DNA, 387 bp, Glycine max
ctcgcatgaccctactaatactacggtcatcaaggatagagactatgagctgctccaccttaatctttaaagtcaaaatgggttgctgctggttctgatcaatggatccacggcgttggtgagcctgagcacgtttgaaggctgcaaccaaggcattgtaaagtgagggagtagtattggtggaattatatggaggacttatcaaaagaaggtttggtgtggatgctggcaaacggttgatggaaacgttgaagcaaagttccaatgccttgtattgtatacggtgagagtggcattgaatgcaagctttgctgataacgcctgtggaatagcaagcatgacaatggcaatgtgaagaggtgtcactcgaacatgctctcttcttgt

SEQ ID NO: 183447 - DNA, 449 bp, Glycine max
cgcacatagaatcgtttttttggtatgctcggagtaaactctttacaatcatagttttgttactgtgccgacgattctactccacaccatagacaacaccgtaatagtatgtcacgacagtggctgggaaaggcggcatggcgaagtccgtgaacgagggtttcactagtgaagttggtcgaaaatggcggacatgcaacagaaaaggatgcatgaagaagagaaagaatatatttatatcattgtggcaaaattagttctatgatgtggcgtgccagcgacgatggatgacggtggcactgattatgtgaagcttcatgctaagcatagtgtcgcaatcactattggaacgagggcgtcgtgtgagataaaaatgattatgcttgtgtccggattagaagtataaaataaagtcaagtcaataataaatgaatacaacaactatgtca

SEQ ID NO: 183448 - DNA, 409 bp, Glycine max
  unsure (1)..(409): unsure at all n locations
taaaaactaaggtatttcctaaacaaaaatcaattgatgaagcttcgccaagtatccccattaaaaaacctntattcaaacctttcaaagttagtgagaatgctaaacgaataattagggaacttagaaaaactaaattcttaattgaaggcgtaggggacaccatagtgaattactaaacaagattggtagtttacttaaggtgcattcagatactccccaagcctcagaaaatactttcaaagtggtgacaagaagtacctccaaattaattaatgttattaatgaagatagtgacctaaactcagataacacaactgagataggatcactggcagaaaataatataaatctcatttatttcacacactgnaaaacaccctccaagttatattatcaacgtntgact

SEQ ID NO: 183449 - DNA, 480 bp, Glycine max
  unsure (1)..(480): unsure at all n locations
tccagcacccgcgaatttgtttttaagcatggtatattgattgccttgggcttactttcaaccttcctatgtatgttgaactcactagtattgtttaccatagttttaagagttcaatattcacttaggatcaacatttcagccagcaattcaatcaccaaaactcaaattcacaatagacacaatcataaggaaacctaaaagttcaagaaaaggttcacaatcaaagactctctaagaattttgcatgaacatgttaaggactaattaacatgaaagatttgactcaaatcaaataataggctaaaataatttcatacactcatgaacaaatgagttagacaaagaaacaagaaaataaaattcagcacaacataagaaatcttatgtgacaagtttcatgactagacatgacttctatgacaaaactacaataggtgaacaagtcactctagaattttanggnttcttctactttat

SEQ ID NO: 183450 - DNA, 221 bp, Glycine max
  unsure (1)..(221): unsure at all n locations
ggcgagctgagcaacaaccacctccctcattatggctataaaatttcgtttgtggctgaagggaaggggttcancaccttgggtattcataattcacttaaacatattgaggagaagaagaaagaagggataaatccaagccaaggtgcttccgtatctcttccgtaacgctccgtgacatttccgtgaacaattccgggaatgatcctcatcgctcttca

SEQ ID NO: 183451 - DNA, 408 bp, Glycine max
  unsure (1)..(408): unsure at all n locations
cttaaccagttgtntntggatgctagtattgatcattgccttaattatgttgtaatcaacatgtatatgataataatatataatatctactttaagctagcacacttgtcgtaactaacacaagtgactttgaggtgagttagcttgactagaactagaagttttgaatttttttatcaagacaacatgtatcatgtattggagataatcatgttcaattcatatgggataagatcaccagtgacaaaactctctttatgcaggtatgtacattctaaaattctgaaatcaaatttgttggttaaagtgaaaaattattcaactattttatacacttagtagtataagttgtggatttaagtcattatcaatgaaaaaataattagagaaagtttgatatgcctagct

SEQ ID NO: 183452 - DNA, 387 bp, Glycine max
caagtgccgcggctgcacttttgtaaaattcctgaaagttagctttctctctcacccttcaacaagctacctcctatgagcaccttgacagatccaacaatcttgagcttacgtcccaacccttctatgctacctcactcttgaatgaaagctagagctagcatccccccttataatctcagctcctccctgtcatgatacatgtaatacagaaaagacctcctataagactactgaaatgctctgaatacatgctatacccttactacaatatgggcataaccatgcccaataaggaataccattctatattaccaaaaaccggctcatactatccatggctcgaatttcactaggctgtgagaacctaggcctcctttgtcacac

SEQ ID NO: 183453 - DNA, 434 bp, Glycine max
  unsure (1)..(434): unsure at all n locations
cgacacaataaaaacgctagcttgtccatggtttagacatgaatggtacatgatctgtgactttgttgattcaatttggggaaaattggatgagggaaaaagtggttttcgaaatctgcactctatgcagaattttgtataagtgcacaaaaatgcttgtgtctggctggttgtgaaaagggtagtacatatggggttctggacattttctagcagatcccaacggtcaaaatgtagacttatgtactagagacttncagtataattttcgagtcgatccaacggttaacaaattggaacgaagaaaatgttactcgggtatttgtatgtgaaaagttgtgaatttgagtttgtgtttgggcagagattctgcctttgccctgttttgctcggtttngtagtccatgatgattggatgtggaactaactggatg

SEQ ID NO: 183454 - DNA, 232 bp, Glycine max
ttatatgtcaagaagaacactgccagcgtcaatgactcttaattggaagatatggaacttatgtgtttggcttttgttaacggattgattcttgttatgaaaagtctagagtcgggtccttatataactgagacttgagtgatgtatgatagaatttttctttcttcgggtttgtccgctacctctttatatagttgtacaagtaaggtatggaatgtgttgttatgaaaca

SEQ ID NO: 183455 - DNA, 449 bp, Glycine max
  unsure (1)..(449): unsure at all n locations
cattctcccactgtctcaagcgaattcttatttcttcttgacatcatcaaaatcttcatgatttacattctccccctttctgatgatgacaaccacctgttggttaggagcaacaacaaagaaaaaatatctatttgcatataggttactcccacttggttttgcaataattgcttatatgagacatttgaagatttcatatntttcatatgtaaacaaattgtctcataaacaatagataattgttcttactattttatctattatctttctctccccctttgtcaacatcaaaaacaaatcatgaatagagaggagaaagatgttaccacttgttgcaatgtatgagaatcaagtgataccagaaggcattaaaacaatcattctatattaatcaatacaaaacaagtacaataacacatcgatcaaacacaatctatcatcatata

SEQ ID NO: 183456 - DNA, 410 bp, Glycine max
  unsure (1)..(410): unsure at all n locations
ntgactaactcagaatagataggtcatttcagagacatgtttggtttaagattggagttttcaaatgcttggaagcattcaaaattctcatttgagaagaactccatatctatngaatttgggtctacaatggaacgagaggaaaaaagaattgtgtaccgtatacgctgttcctctgatgagaataataacccatagggaatggagggaggaattggagcttcctgtgacccagaatgccgctgactccgactcgaagttcctttgcgctttttcgatggttttgccatttgaagagtttttcgggatttcaatcggttcatatgaaagagattgaaaaaagatgaagtttgggctttgcggcgagtgatttggacaagaattgagtgagatatggctggaggaaaaat

SEQ ID NO: 183457 - DNA, 321 bp, Glycine max
gttaattagcctaaataatagttgttgcctatcttataaaataatcataatctcgcatagctcatagatctaatatgtgcttgaaagtattatgatattgtttttttctctgaggctgaaagaatgcattgctttgcataaattagatatactcaaacatctatataattaatatatgattatgtcatgaatgtttattttacaatgtgatgtatttatattttagatatgggctaagtagatttctaagatgaagtaagttgtctcgattcaataatgagttccttcaattatgttgtctcctcaaaaaaattactcttc

SEQ ID NO: 183458 - DNA, 476 bp, Glycine max
aaatcccaagagaggaaatggaccaatcacgagtagacagtttgatttttgtttgatgaattgaaggcttgctcaaggtccaaaagaagtttgtctctgcggttatgctagacagagaccaacatgttggctgttatcaccaagtaccaagaagaactaaatctagccgcggcgcacgagcatagagtggcggacgagtatgcccaagtgtacgcggaaaaggaggctagaggaagggtgatcgactcgctacatcaagaggcaatgatgtggatggaccgatttgcccttaccttgaacgggagtcaagagcttccccgactactagccaatgccaaggcaatggcggacacctactccgcccttgaggagacccacggacttctcggctattgtcagcatatgatagatctaatggcccatataattagaagaccgtagggaacgtgtattgtcactcagatcttgactagtta

SEQ ID NO: 183459 - DNA, 431 bp, Glycine max
  unsure (1)..(431): unsure at all n locations
ttcttctagtaatgctgacttacaacagcctcctatccctcttccattcccacctagaacaattccaaacaaaaaaaatggaagaagtggaaaaggagatcttggagacctttaggaaagtaggggtgaacatacctctgctagatgccatcaagaaaattccaagatatgccaagtttctaaaggagctgtgcacccacaaaaggaagctcaaaggcaatgaaaggattatcatgggcataaatgtgtcagcattgataggaaaatttgttcctcacattcctgagaaatgcaaggacccaggtactcttngtataccttgcattattgggaatagtaaatttgagaatgccatgcttcatctatgagcatcagttagggtcatgcctctgtccatttacaatactttatctcttggagccttgcaatct

SEQ ID NO: 183460 - DNA, 405 bp, Glycine max
  unsure (1)..(405): unsure at all n locations
cctatgcaagttgaaagccttggatgaaagagtatgcctatgttgttgtggatgatttttccagatttacctgcgtcaactttatcagagagaaaacagacacctttgaagtattcaaagangtgagtctaagacttcaaagagaaaaagactgtgtcatcaagagaattatgagtgaccatggcagagagttngaaaacagcaagtttactgaattctgcacatctgaaggcatcactcatgagttctctgcagccatcacacctcaacaaaatggcatagttgaaaggaaaaacagaactttgcaagaagctgctatggtcatgcttcatgccaaagaacttccctataatctctgggctgaagccatgaacacagcatgctatatccacaacagagtcacac

SEQ ID NO: 183461 - DNA, 378 bp, Glycine max
  unsure (1)..(378): unsure at all n locations
agctngagatgatgaagttgtgaagggtgaatcttcctgctcttattgttgaccacatagtggtacctggagatatgtcgcgggggtcaggagaccttggggacgtcaggtggggtgctattgcccaaaaccaagcttgaccaatcccgacccaacccgggcttattctgtcagtgagaacctgtgatgtacctaaacaggcgagctcctggccttcaacatattaaaggaacaaacaccacaaatcaaggaggcttgtggtggctggccacgtgtgaattttgtgagatatgtaaagtaatggcctctggtaatcgactaccaagggtgggtaatccattacaaggcttataaatgaagacaggaggctaagatggt

SEQ ID NO: 183462 - DNA, 344 bp, Glycine max
  unsure (1)..(344): unsure at all n locations
gcacgtattgaacgcttaacacaccttaatgaattntggcttaacgcgcctttctcacttatcggatgaactaaaaccgcgcacttaaagagatgataccgtgcacttaaccaacccgtacagctcatcatcttctagattcttccccgcgcctaacctaagaatggtgcgcttagcggatgctcactaaaccaacatattggcttagcgagaatgtgaaacaaccttttccaagcttgcctaattacctaaaattgagagaatatgatattatacacaacaaagaaaatataagatttattacctatactgacagatatacttatacatacaaataaccataa

SEQ ID NO: 183463 - DNA, 460 bp, Glycine max
agcttctgatcgacaaacttcttgaatcctgcattaattacaaacaacaactaaatcttatacacaaacaaatgtctctgtcaaaccttgtcactcacatcatcactaaggataacaacaaaaaggaatatgttgatgcaagggccaaagctttatctgccaaggcaaatatggtgccagacaaacccatccaaaaaaggtacggtcacaaaactgatcacaataagaataaaaattaaaacaaaaatcatttcccatgtgcttctacttctaacccccaccttcaagaaaaagagaaactattttgtttgtgaaaatccaggacattatgcaccacaatgcaggaatctacaaaagataaatgacaatccttataagcctgaggctaacctagctgaagcagatggcataattgttgtgtcatttctcaggaatgtgacacatgggtggaaactctagg

SEQ ID NO: 183464 - DNA, 479 bp, Glycine max
  unsure (1)..(479): unsure at all n locations
tagtgacctataaaactcagctggggttggggcatagcaccccacctgacgtccccaaggtctcctgacccccgcgacatatctccaggtaccactctgtggtcaacaataaaagcaggaagtttcacccttcaacacttcctcatctcaagcttgtaggattatggggtacccatcacatgtggtactaggtggcggtcgggcgatggtgcacaacaagttttccacatccacgatgcgcgcataaacccaccatcccctgttgcccacctccaactgagctcacgtactcccacgtagcccatatcctcgtttctctcaacaccgggtccccatcaatcctcccaagcttccacaacatccaagcaaaacaacattcaaacagcacaagctatcacagccaagcaaaacagagcanaggcagagaactctgctcaacacatcaaccaaaatcacagcttttctcacttaaagaccac

SEQ ID NO: 183465 - DNA, 422 bp, Glycine max
aactcttaggaactgggacctttttttctctagaaacactagacatgcagagctctgaatcccaggccatactccacttctagaatctgatttcaggcttaaaaaggaggccttgatcgtgctcgtgtgcttagcgcacttatggaccgcttcgcccacattagtatattttggctaattgcgcctttctcgcttattggataaactaaagcattgcacttaatgagatgaagcggtgcgcttatcgaacctgtacaactcatcttcttccatagtcttcctcgcgtttatctcaggagtgttgcgcttggcgtctctctctaagccaacatatatgcttagcgaagaggtgaaaataacatgttacaaagcttgcttattaagctgtaattgaagaaatgattataacacacgaaacaaaa

SEQ ID NO: 183466 - DNA, 339 bp, Glycine max
aacttaactaacctgatgaaggtgagccataccagaagaatttctctctatctatccacacatcttaaacatgtatctcgaacaacaccaagctcctgcgagaatatctttacccatagcaacatcttgcatgcttcaataatgacaatgaagtttgcatctgtagtagacaaagctactcacctttgcagcttggactgccaagtcacagctccccctactaatttaatcaaattgctcaaagtggacttcatagaatcaatgtctccagccatatctgagtctaagtaccccaccagagtatgcttatcaccaccaaaacaaagcctcatatcaaca

SEQ ID NO: 183467 - DNA, 367 bp, Glycine max
  unsure (1)..(367): unsure at all n locations
cataaacctttcttttcttatgtgcacccnaacccaatctccaagttcgaagacaaccttctctctccctttgttggcttgtttagcatagcttttattattcctgtcaatntgatctttgactctctcatgaagcttcttcacatagaccgcctttacttgacctctcttatgcttaaaaatagaaacattaggcataggcaaaagatcaagagaagtagggggttaaaacataaacaacttcaaaggagaacaatagtatgctatgaacagcttattgtaagcanactcacatggggtaacaagctcccaagtttaagttctcctcaaacatccaagcaagatccatgtctataacacttcgttg

SEQ ID NO: 183468 - DNA, 400 bp, Glycine max
  unsure (1)..(400): unsure at all n locations
ctaagcttgagggttaaagtctcacgattgtcacgtgttgatgcatcttttattatgccgggctatacgagacatcttgccgaacaaagtcaggttagccataactcgcctgttctttntcttccatgccatatgtagcaaagtcattgatcctgtcaagtttgatgagctggaaaatcaggccacaattatactgtgccagttggagatgtattttcccctgccttctttgacatcatgattcacttgattgtgcatctggtcagagaaatcaaatgttgtgttcatgtgtatttgtggtggatgtacccggttgagtgatacatgaagatcttaaaaggatacacaaagaatctgtattatccaaaagcatctattgttgagaggtacattgcagaag

SEQ ID NO: 183469 - DNA, 375 bp, Glycine max
  unsure (1)..(375): unsure at all n locations
agcttgaagctcatagtgcttcaagtgcccaggaatgttgctccttctttngngcctcgtaacctgatgttgaagttactattcgtaacattcccgcgatcttcaattatcaccttgtcctcaaagagatactgttccttgaggccttcccactcttcccatgatgtttcatctggatgcaagccttgccattgcaccagaaccatgcgtgtaaacccctggtctgtgggaaccatttttcgacccataatggctaaaggtgtcttgagtggttgattgtccacagctcccgcaggaagtgtttctactttcaccgactcagtcgagcccactaatggcttctagagtgagcaatggaacaccgggtgaatgtga

SEQ ID NO: 183470 - DNA, 399 bp, Glycine max
  unsure (1)..(399): unsure at all n locations
tctcccncaattttctataaattgggggagaagtgaagtataatatggttcagccccttatgcacttctctctctctcgaaatagctgaggaaaattagttccgtgaacaaaatccaagccgaggcgcttccgtaacgtttccgtgagtaattacgcaaagattctcgaccgttcttcaagattcatcgttcgttcttcgatttcttcagtcttcaacgggtaagtacctcaaaccaagcttttcaattcattctatgtacccgtggtggtccacattntgtttcatgtatttttattctcgntttcatttactttctatacccccttttgacgtgcttaaagccattatttaagtcatttctcgcttaatctgaaaataaaatatatttccaccgatc

SEQ ID NO: 183471 - DNA, 318 bp, Glycine max
agctttcaagaatcaagatcaagattccaataatcatgatatgtttgaaaaagctttttcaaaactgagttacacatggattgttctcataactcgtttaccaaagagttgttactctctgataatcgataaccaaattggtgtaatccaataccaacatcaaaattgtttttgaaaaagttttcaactgaatttacaacattccaattgatttcaaaaagatgtaattcattacaatgttttggtaatcgattaccagtgtggttgaacgttaaaattcaaattcaaatgtgaagaatcacattctttcactaaaaa

SEQ ID NO: 183472 - DNA, 461 bp, Glycine max
taatagaggcaaacatgaacaagtaaacaattgaccccatctacttttgaaaatcacattctaaaacatcaatcaacctttgtttttttatcaccaattatgagcctataattgacattgtccccctttgatttacacttttattggtattaataggaaatgttacagattgcttaattgtcagaattcaaattcttaaatctaaatgtcataactatccttgtccattcaattaaatattattaaagaaaattcttttgaaataaatattaaaattacaacaatactctgcatatttcaaaagaataaattacatctaataaataaaagataattcctgggtcaacatgaggtataatgcatcggacctagttaatgtaacttcatgtacaacttgtaggccttatatcttcttcattaatagaagtctttacttcttaaagatcaatggcagtggaatg

SEQ ID NO: 183473 - DNA, 334 bp, Glycine max
agcttaatctcgaagagtatgcttgtggatccttcacccaacgaagacactgacaaaaacttatcttcttctttttggacaaagaatggcaagctgggggaaaacaaattttctttccatcaaaccttgtatgcaactgagatcgtatgcccatatcaactatatcttgactgggattcaagtcatcctttgtcttgccttgaatgttaaggagcgccccaatgacactgtctcaaacatttttttccacatgcataacatcaatacaatgtctaacgttcagatcagaccagtacataagatcaaagaaaatggaccttttcttccatatgca

SEQ ID NO: 183474 - DNA, 410 bp, Glycine max
agctttgttgattatggggtacccatcacatatggtactaggtggcggtcgggcgatggtgcaagacaattctccacatccacaaatcacgtataaacccaccatcccctgttgcccacctccaactgagctcacgtactcccacgtagcccttatcctcgttcctctcaacgccgggtccccatcaatcctctcaagctcccacaacatccaagaaattcaacatcccatcatcacatactaacaaaaccaagcaaaacagggcaaaggcagaaactctgcccaaaacacaactcaaaatcacagctgttcacatacaaataccccagtaaaatttccttcattccaattcgttaaccgttggatcgactcgaaaaatttactaggagtctctagtacataagtctaca

SEQ ID NO: 183475 - DNA, 398 bp, Glycine max
  unsure (1)..(398): unsure at all n locations
nggctaactntataggagacatcctataaggggcgttgtatatgggtccagcaccgagtaccaggtctatggaaatcactatctctctctcacgtgataaaccagatatatcctccacgaacacttcaggaaactctctaacaataaagaggtcacccatggaaaccattgtctctacttctatgttagatgagatcatgtacacttgagaatcttcttttaaagatgtcataactaggttggcagagataaacatcctatccttactcactctagaatcatcaaacacaagagttttatcataacagtctaacaagacatgcgtggaagataacgagtccatacctangattacatncaattatctcanaggcaaacangtcagatcaatcaataat

SEQ ID NO: 183476 - DNA, 413 bp, Glycine max
  unsure (1)..(413): unsure at all n locations
agctagtggctctctggctaagcgtgaatgtgaagctgatgaatgccgaatgctgacgcgacacctatacttgttgacttgggaagattcgtancaaaaatatcttatnctttcgtacacattggacacgttcaacaacttggtaacttgactacgcatgctggcgtggatcctaaaatgagagcttcaaaaatcttatgcatgttattgtgggtacctacgttacagctgtattgaactaattgcactgcctcctcctcatgggctcaacttgatgggtttttgatctctgattggccacacttcagtttcctcgcggcttggtgcttgattagctttgtggatccttgaagagtggataatacttgtgttggccataaaaggatgccctttcaccgctcctaggcgtgtgg

SEQ ID NO: 183477 - DNA, 350 bp, Glycine max
atcatcaaccattggcttggctctcggtctatgaaagtgcagcggacagaaaaccgattaatttgtgccttctataggaatcatcgacatgttaaatatgttaagcttacacaaggacaagtgcaccttacacaatagtaataatggactccgaagttctaatgttgaaccccaaggaccaatttatttgcgattaattaaatttattatacttagaatagaattgattagaaatatgattataaacttttgtggtttggtttctttagaaaacacataatctactttaagaagaagttgagtatgataaaactgcttgaggtatgactcactatccaattttcttccat

SEQ ID NO: 183478 - DNA, 348 bp, Glycine max
gcttgaataggaagtgtgaaggtaaactcctgcttaatgtaaccacagagggacctgagatagttcgggggtatgaacactgggacgtaggtgggtgctttgccaaaaccaacttgacatccgacccacctggcatagcggtcatgagaaccgtatgacctaagcggcgactcctgtctgcacagataaaggaaacataccacaacaagaggctgtgggctgccacttgaatttggtatatgggaggggccttgtaatcatacaagctaaaattgagacagagctaaaggctctgtatcataccaagaggtatcgtacctgctgaaacaatctgaaacttaggacctc

SEQ ID NO: 183479 - DNA, 410 bp, Glycine max
tcaacctttggccatcatttctgccccaaatcgctaaatgagggcattttccgggtcgtgaagtgcgtggctaccagtgggacttcgaaaattcaagtttgggtggacttctttctctcttaaatttcgtgggtatggggttttgggagatatgatgggtagtcttgctagttctctgcttcatgatagttatttgtgaagaaacttgttgaaagcttgctgaaattgccatgtttggatgagttaaacatacccattctgttttacggtttttatgaagatgcttgtgatgttcatgtactgaaattgcttatggaaaactgttagagatgaaaggtagagttaacctacggttataaagtgagaatgtggtggtatgagtggaaaaagaatgacgcttttagagttaa

SEQ ID NO: 183480 - DNA, 380 bp, Glycine max
  unsure (1)..(380): unsure at all n locations
agctntgacttggcttgactcatttccacccctattcatatctcattactcttattctatctcatctcctatcaatcaagagggatggtggggattgacataataaaaagaaggatgggtggagtccgtcattgttaatttgtaacgttgtactgcatgctcacacacaacttagattaagttcttagacacaatttcaaatcttgcacccaattgaaatcaggctggtttctttattcgttcccttgtctcaattgatgcatatgggagaaaagtcctccgcatggttgctgggtccaggacatttaaattaagatagatatgatttctgtcgagatcgatcggtcacagatcctaaatttggaattggatgaaatgtg

SEQ ID NO: 183481 - DNA, 410 bp, Glycine max
  unsure (1)..(410): unsure at all n locations
acgagggtttaattaccttttgatatttataattgtaacgatttttttagttggttaaactttaagacattccattttaatatctatagttacagnattntaactttcttgttctcaccgtctaaaattcctaacgctgtcacggattgttttaaattgttaaatataactaaacctgacaataaaaaacagcaaaaacaaattagacagttcttattntacagcggatttaaaacatcatcacttatcatacttatactttctcttcaaagagtcaaatagccatgggatcattntacaataatgaaaggccaatctcctgtactcatttgttgtgcagggcagacaaatcttntaacaacttctaaacacatccaaagaaaaaaggattgatatttgagaacgatttc

SEQ ID NO: 183482 - DNA, 435 bp, Glycine max
  unsure (1)..(435): unsure at all n locations
agctttttgtacaagcagacaaacaactactctactgaaagttaaatgctaaaatgctgaaattnaaagaactgaaacataaaagatgaaatctaaatgacattaatcataaaataactaaaaataaactaaagtgttcagagtgcaaaaatttaaacgccccgctcctcctgtggctggtcttcattcaaaaccagggctggagctgctgatgaatcatggataggttactttggctcaacaactggcgtaaatggctgggtctccttaggagtaatctcctctgctgctggtgctggaactggtggctctgttcgcggccggtaagtgtcccgattacaaaagtttttaaaacggaagaaccgatgtcgaactctcgggaacttgtgtatctggcagctatttccgtaaaaggtgtttggttgaaaaaaattt

SEQ ID NO: 183483 - DNA, 438 bp, Glycine max
  unsure (1)..(438): unsure at all n locations
ttcaattcattcaaggaaactctcaaagaaaaactcccgattgatttttttcattattttatttgaagatatttcaattattttattattattttacccttatttggtttaaacctggttacgacgtgaatgattggttggattttattttatcattgattaaacgatattacaactcaaatgatcggtggaaattcattttattatgtattaggtgagaaaacggcttaaataaatggttaaagcacgtcaaaaaggggtacggaaaataaacgaaatgaagataaaagctcgcgaaacaagtggcgaccactganggtgcatataatgaattgaaagattcaattttgagaacttaccgcgtgaagaccgaagaacatcgaagaacgaactaagaacgatgaattacggtgaagaatcttacgaaatcctcatgaa

SEQ ID NO: 183484 - DNA, 452 bp, Glycine max
  unsure (1)..(452): unsure at all n locations
gcttgcctggtntatttngngataattattaataatgatgttatttatttttattgtagaacttagtacactacttataagttataatcatacactaaaaaattactattaagcttggcattattttcaagaactctattggttcttgtggttggcattttccatttaccattgtgctgtttcaattaagaggcatgtttttgaatggaattgaattcttaaaaatctaggcattgtaatcgattaccagagacagaatacttataggtttttcaaaaagaagtttgaaatctgaattttaagtactgtaattcgataccatttaactggaatcgattcccagcaacgaaaattatataaatttgaaatgaaaagtcatgacccctcaatgtttaactgtgtaattcattaccagtgagggaattctaaaattgttctgaaaaccacatctc

SEQ ID NO: 183485 - DNA, 430 bp, Glycine max
  unsure (1)..(430): unsure at all n locations
acttatgccattaaccgtanggaattaaaaaaaaacttaatggctgagtgtaactgaaattgtggcaaccaaaagtcacccccaacagccaacaagtcagccaccatttggtcttccaaaaggttgatgcctaggttgccaattggacccttattacaacttgaactaaacctactaaagcccttttggttgattaacccaaaacatatttttggtcagccaactttacaaggtgatatgaaccctcatggcacaagggctgacttatgatcgtctangattaaaccttgatggaaaatacggaaattgattatggaaaggatggaaaataaggtgcgtaatttcgtgggtcttaataaggtggttcttggcatataatggatgaatgggatggtaaaatgtagattaagtggtggttggacagaaatat

SEQ ID NO: 183486 - DNA, 386 bp, Glycine max
ctatttatgtatgtgaagctattttaactaaaagaagatgtgttttttcttataaatggttagtgtaacactctctaccccgacatatatattattaaaacataatatcattcaatctatcaataatggtctatacacaagcgctttgcaacaaatatactaagactcaatcctatttgcgatgtggtacacatgttaagtgaaatactctcatcggacacctaggagtacatgacaagacaaaccacacactggtaagtcaggtcactctcactaggtaaaataattgggagaccagccaggagcactctgtctgacaataatgctccaaccatgtgggatcgacacaaatttaatggagcactcaaattgggtgttttactctc

SEQ ID NO: 183487 - DNA, 463 bp, Glycine max
  unsure (1)..(463): unsure at all n locations
tgagaggcatgcaagctcaagctccttcaactgcacaaggctcttattatttgaagagtatccttgtggaaccttcaccctacgaagacactgacaaaaacttattttcttgtttttggacaaagtatggcacgctggcggcaagtaaattttcttcccatcagaccttggatgcaactgtgatcgtatccccatatcagctagatcttgacagatattcaagccatccttcgtattgccttgaatgttaaagagcgtcccaatcacactgtcacaanacattttctccatatgcataacatcaatacaatgtctaacgtccagtatggaagatcaaagaagatggacctcttcttccatatgcaactnttactnttatccttcttttgggtctttccaaatacagtattcaggtgttgaacccgctgatatacctgctcactagtcaatagtatcggcgcaa

SEQ ID NO: 183488 - DNA, 278 bp, Glycine max
  unsure (1)..(278): unsure at all n locations
agctctcacaacaaaatatggtcaagaaactcttactagtgatgttattaaggctaaatttcatactctagccttcggaaagccctggtcaagaattggtcccatattctaaatggagaattntgggtagttggagatggctgatgtagctccatgtggagcttgtaagccttggatcttcttcatcaatggattcctttgcttcttgaggtctgattgcagcagaatggaaaatgagaaagatgaatggagatgccacttcatgtagaagatgagtc

SEQ ID NO: 183489 - DNA, 441 bp, Glycine max
  unsure (1)..(441): unsure at all n locations
agcttttaaactttgtacaagaatgaagctctgataccacttgttagacaagtggcctcagatatcttaagaaggcggttgaattaatatatcacaaactattccctaattaaaaattctaatttgattttaacccacatcctaagattcctttaaaatgaattcctaaataattattcaaattaaacttacttgaatagaagcaataagcactaataaataaaagagtttaagggaagagaaagtgcaaactcatttttatactatttcggccacacccttgtgcatacgtccagtccccatgcaacccgcttgagagttccacctcatcgcaaaaaccctttacaagttctgaaccacacaaggacaacccttnctttgttgtcagatttctttacaacaagagaccctcggtctcttaatccctttttagaagtaaaa

SEQ ID NO: 183490 - DNA, 408 bp, Glycine max
  unsure (1)..(408): unsure at all n locations
gttcatgtanttttattctcattttcatttactttatatacccccttttgacgtgcttaagccatttatttaagtcatttctcgcctaatctaaaaataaaataaatttccaccgatcgtttgaattgtatcatccggtaatttcgggtaaaatgaattccgatcattcggtcgtgccggaaccacgttggaattcataaaagaggtaaaataataatataataatcataaaataccttttagttaagtaaagcgaaaaatcaatcgaacgatgtctctttgggatttctcattcttaactgaattgactaataattaaagtgaaactaaggctaaaatcaaacccgccaagtcaagctccgtcactaaaatatggtttttgaacagttatcatttcagtttcttact

SEQ ID NO: 183491 - DNA, 419 bp, Glycine max
agcttgactagtgaaacccttgatgtgttaacatagtactcatataagggcaagtgtatcctatgtagtattcaagtgatatagttcttcaaatatccaaaaaatatgtaatttccaactatttcactccattaagcgactatatttctacaagacaaaactagtgtccaaatgtgagttctgccaagaaaatgcataaaaatgacacaaactcacacaaaatgtaactcataaagtggtttatcaacactctactagtttgtaaaggagaactagatgtaactctgtttgagtgaatcagtataaacttaagtggttctacttctctctaaaggtaattttattattattctcttgggtggttttgatacacttcatcacacaagtcttcttttgaaaaccctttttgaggactttgt

SEQ ID NO: 183492 - DNA, 444 bp, Glycine max
tgaaccttgatcttgttatctttggaagctaggcttcattgcatgttgtactgatattcaaaatatttgtatctactaccctgactgaaactatgtaataggtagtttttcttgaagttttaaagtttaaaatgagttcttgggtgttaaaacttacggtcaaccttaaatttcacttaaattggagttttctagcaaacgatatgaataaaccaagtttaaggagtgtttgctagatcaaaatctatagcaaaatagaactgaccgctatggatatatggactgtttctatcaaagatttgacttcaaaaatgagtttgttacgtgtgaaaatatatggtagcatataagatttttgagaaaccaattccagagcacctagaacactgaaaataagtgtatgagcaaaactttgtaaaactaagcgacagactattttatact

SEQ ID NO: 183493 - DNA, 365 bp, Glycine max
acatccattagggcaatgagtatatgtagaatggtgcccataaatcatttcatacacaacttccttagaattctcttttgtagactgcatgagctctaaacaaaatcgccacacatggattacatgcattcacaaacacacctgaaatgttttgagctctagctcatcccactccaggtaaggactgctgccttccactattcctgtcccagcatatataaaagcaccatgatcctacaaccgaaacatgacactgttacgattgatgttaaaaacaacatgaataagaatcacataatgagatgtatggaattcatgggaatatatcgtacagatctttccacaatcttaccacagggacaaaa

SEQ ID NO: 183494 - DNA, 481 bp, Glycine max
  unsure (1)..(481): unsure at all n locations
tcttcattcttcaacttatgttcaggagctcgctgtcattaccactgcggggtaaaaatggagacaatatctcctgggccaccatttcaccattcttaccgatcactggagcctcaaggaattgatgacacaggctgtccagactcagaagcaatgatgtatttggtaagattgatcggctatgactattcaatctagtattgatccgggaaatccaatacagcagcaaatgctttatctcgaattccagaaactcccatcagaaaattacttattctgaccttgctaaacttcacattcttacaagaattgaaacaagaattggctcttcatccggactttgtttcattctaacaagctattntgagcaatccgctagatcacccagaatgtgtcattgtgcaagatgttagtgcttagctttactgagttntaaaagaatggctaaaattttgttaaaacataagcacttagacaatgg

SEQ ID NO: 183495 - DNA, 396 bp, Glycine max
  unsure (1)..(396): unsure at all n locations
attcttctccctcatttcaattttgtcttcctttttcttgcagaaattccgtggctcttccactagtgatgatcatggaagactaaacactcaatcgatccaaggattcactccaagcaaggctaaatntgagtgctggtttagtatttcaatcttgtatgaatgttcatctttttcttcaatcttatttttaattttcatgattattaataggcttacgattgaaaatgaattacgtcatggattcatttcctaattttaaatttaatcataagttgttcggatgatattccaactaatctgtgatctcaatgaatatatggattaattcgatcgaactaactctaatgacattgattgagctttcataacatgatcattctttgcagaactatg

SEQ ID NO: 183496 - DNA, 323 bp, Glycine max
tccaggaaggacaaggcggcctattgaactatttccgctccggagtacgacagtcaccgctttaggagtgctgtacaccaccagcgcttctaggccatcaaaggatggtcgtttctccgggagcgacgcgtccagctcatggacgacgagtatactgatttccaggaggaaatagggcgccggcggcggacatcactggttactcccatggccaagatcgatccagaaatagtccttgagttgtatgccaatgcttggccaacaaaggagggcgtgcgtgacatgagatcctgagtaaggtgtcaggggatctcctttgatgc

SEQ ID NO: 183497 - DNA, 325 bp, Glycine max
  unsure (1)..(325): unsure at all n locations
taggaacccaaactttttaagcttcagtgcgagagaacatactcttgactaggaacccaaattgtggtttagaattagaaaagcgtgaaaatagggacttgtttgtaagaatttgggctgccccatgattggtactttgcacctaagtaacgtgggaaatgcttttcaatggtgtgtagatatgtgtgtaaatataaagggcggtaaattcctcgccaaatatgaataaatcgttctcctaaatgaataaatgatgtggaatttcccctcaagtgtagatagatggcatganagtcccttttgaatgaaaaagtgtgtgcataat

SEQ ID NO: 183498 - DNA, 430 bp, Glycine max
  unsure (1)..(430): unsure at all n locations
agcttgaacgaatgttagacacatcttcttcaaccttggtgattcttgactccatctcattgaagcgcatatccacttgtaattccaaagtgtcaaacctttcaccaacaaaggttngaaggccatcaaacctgtccaaaatctttgaaagaagagatgaatcttctccatcatgtccttcttcaccaacatgtcgagcacccttcttcacccaagagccatcatgctctttttgataaccaaaggatgctatgactgaagcgcctataaggaaggatctcttgattggaacatagggttcagaatcaagagggatgttgaagtgttgaaggaaaagggtgactatatgaggatatggcaaaggagcattcaatcgcaatgccttatgcatgcgatatctaacaagatgtgccccatcaatctgtaaacc

SEQ ID NO: 183499 - DNA, 457 bp, Glycine max
tgtaggttagtgtaccagatgactgctggcccacccaaactatcttgaaagaaatgcatcaataacttctcgtccctggaatatgaacccatctttcaacagtacatttttaggtgattcttaagacaagtcatccctttgtacctatcgaagtcaggtaccttgaacttcggagggatgacaacgtccggcaccaagcacaagtcggtcatgtctgcgaacgaataatcgtcgaatccttcaacaacccttagtctctcttcaatgagatcgagcttcctctttccttccgctgtcgggggcaagccctccacggacagaaacaactgctgcgttgggtggattcgaggctctcccctgatgatgggttgaggtagtcagttgggcgccgaccctttagcgggaaacggggagtatgagtcgacgtctccctgagcgtgctctcgaagaatcttat

SEQ ID NO: 183500 - DNA, 352 bp, Glycine max
aatttgatcattctactaagacgactgataaactagtgcaatgaagagggtgagatagagggagaaacccatgctgtgactgccattcctatacggccaagtttcccaccaacccaacaatgtcattactcagccaataacaaacctgcttcttacccaccacccaattttccacaaaggccatccctatatcaaccacaaagcctgtctaccacacaaccaatgcttaacaccacctgtgggcccaaccaaaacaccaaccaataaatgaattttgcagcgaaaagcctgtaggattcaccccaaagttcggcgtgatatgctaacttgcttccctatctacttgataatg

SEQ ID NO: 183501 - DNA, 436 bp, Glycine max
tctactgatgtggctgggaggagccccttctgcttgttgtcccaaccgcgagccttggcctctgttcttcctttctgagatacttttccttttgtcagcttgcgtaggtttatagcctaacccaaacttcccgcggctatctctggtgcttaccacgctggatctgccgccgctggtcttgcccaaacccattcctggctcgtagccgtaccccaacatcacccgggccaccatcattgccgtatcatacacgcaaggctgcccagagagggaatctacagaggaaatgcttactacctcaaaagattggaaatccgtttccaatgactccttcgtggctttcacatatggcatagaggaagggggcacaaccaagatgtcttcctcatacgaactatgaccaaatgcccctgcactaccaacttcagcttttggt

SEQ ID NO: 183502 - DNA, 449 bp, Glycine max
  unsure (1)..(449): unsure at all n locations
agctnggtatgctntaaagctctacgacagttatctttcaatgattgccaagaactatcaagcttgcctcctcagataggaatgttgacttccctaaggatcttgaccaagttctttgttgaaaaagaaaaaggggttcgtatggaagaattgggacctctgatacttaaaggggatcttgacatcaaacatctaggaaatgtaaaaagtgttataaatgccaaagaagccaatatgtcaagtaagcaattgaataagttgcgattgtcatgggacaaaaatgaagaccttaaattacaagaaaatgttgaggagattcttgaagtgctccaacctgatacccaacaactttggagattagatgtggaagaatataaaggtgtccattttccaggatggatgtctagcccttctcttaagaatctaacccttttaaatctgctgaattg

SEQ ID NO: 183503 - DNA, 420 bp, Glycine max
  unsure (1)..(420): unsure at all n locations
aatcctttctccagaaggttatgtctatagtcgtggaacaagagaagatatatgtagtctcttggttatataaacttctccccccaaacactcttatgaaaaagaaataaaagagataaaatgaattgagtttttctatataaaaaaagttaaaattaacttacgcacataagtgaagttctcttgttttcagttcattttatttcttattntgttttcctaatttatccaaatatcaaagtgtattggtagaagaaagactcagttgctctcatatcanagttaatggaaataatagagttctgcctccacttacatgactaattaatgcaactatctttattctaaataatcataatttagaatattttttatgggttatggtttggtgcangtcacctttcagtcaatacaaagaac

SEQ ID NO: 183504 - DNA, 452 bp, Glycine max
tgcaagctaacgcaacttcttgtacactgaggctcgctcagcatgccaattctagcttatcgcaattccctctcgggttggaaatgcacttagcgcgcccctgctcactcaacgagacataaaatgtggttattataaaaatcccaccggtcatactttgaagcaatgtcttaggaggctccagacaaaatctgaagatgatccaacgattaaccaatccgagattgtggttttactgaaatacgtctgggtaaaatttgaaatctcatatattcaattgagctcaacaaaactccacataactcaacatccacatcaagagattcacacattactagttcaagccatacgtccactcattcaagtcaaccatatgatcaaataacatgagcaatatatttaaacatcgatttataattaataatatgttaggggggtacaaattatctttg

SEQ ID NO: 183505 - DNA, 426 bp, Glycine max
catgaatgctccaatatactgcttccggccaaaatgattttgggacatttcctcgtgctaacaaagcttctcaccatgttgaaaatggtcctgttttttctctctgagacaccaattatgttgtggtgtatatgcagatgtaagctctcttcgaatgccatgttatgcacaaaaaatttcaaattctttggagcaatattcaccacctcgatctgtgcaaagagtctttatagacatttttgctctcatttcaacacttgctctgaagcttttaaatgtacaaaacgcttctgattattcctgtagaatataaccccaacgctttcttgaaaaatcatcaatgaagcaaattaagtatctcttacttccattagaagatggtgttattggaccacaaatatcagaatgcaccacgttcaagacatc

SEQ ID NO: 183506 - DNA, 439 bp, Glycine max
  unsure (1)..(439): unsure at all n locations
agcttgttctaactctatgatttgaaaatattttagagtagacttatactaagttggatatctantttgatgaaactcaactngaaaatgaaaacaaggttttaaaagaaaatgttgagaagctatcaaaatatttagctaactttgtagcaggaacaaccaatcttgataaactagttggagtttaaaaaaggtttttcaatagaactggattaggttttaataagaatcatagataatattttcaaaagctggttaggaacaaaaagaaaagaggaaatgctttaactataacaaatggcgacaccagacctcataatattaaagaaatangaacatttctttcagagatgtaataacatgcaaagacgccaaaaacgatgggcacttaagattttacttatttataataaaggagtgtttgttcataacaataaaa

SEQ ID NO: 183507 - DNA, 241 bp, Glycine max
atttgaaggatctaccacgacttgagcgtgggagtgaactattttacaatgtccctagacttatgaaaaaagggcatacatgatcacctttgtttctttagaagaccctgatctacaacttggatggatcaagttggacacttaagctcaaggtccttacgtactcctcgacctgatatctttgacactcactggttttgctcggttacgaaccttggttgcgttatggatcttaatatat

SEQ ID NO: 183508 - DNA, 308 bp, Glycine max
ccttcgacttccttgtcacattacccaatctcactaaatatccaccttacaaccacatgccacaccctatcccgcaaaccacaattcttgttatatattcccccttataaacctaataaatcaccccataggtatgtaaagtgtgataaaatggattgatttggagctagctaagaaactttacacatcacgccatataaaaatgaaattgaaaagaggtcagcacgattccaaaaaagaaatgggggaaaggttatggtatttacactcatataccaaagacatattgatttgtgcacaaaaggtat

SEQ ID NO: 183509 - DNA, 468 bp, Glycine max
gaccgggatccttatatcactctgctgctcgcagctataaatggatgatgggttacttaattatacaagagtgtagaatgagagtaaaacaaacaacataacatcatgggttggatatgatccactgcatatataattgaggaggatgacaggaaaacataaataaaattaaatattatattaatggtgggggtgctattgaagaaagatcatggcaaaggtgaggaaggaatatttatatatggcatgtgtgaaacaaaggtaacgtgtgagaatgaaggcaataagtgagagaaatcacaaactatagaggttttttaatttctctccaaagactatgcatgtttatgacacaacctttctttaagtatgagtatggttatatggagcccaacataaagccttgtctcaaaaatgtttggttggttaatgggaacatctctatgataattctaaactctaaaataa

SEQ ID NO: 183510 - DNA, 437 bp, Glycine max
actggatgcatggtaacttggaacccatctggtcttgaataaaaaatctgtacttgtcgcaagggtttgtggtttgtgctcctctgctgaccaccatacagacctttgcccttccatgcagcaacactggagcaattaagcagcttgaagcttatgctgcaaacatttacaatagacctcctcaagctcagcagcaaaatcaaccacagcagaataattatgacctctccaacaacagatacaaccctggatggaggaatcaccctaatcttagatggtctagccctcaacaacaacaacagcagcctgctccttccttccaaaatgctgctggcccaagcagaccatacattgctccattaatccaacaacaacaacagccccagatacagccaacagttgatggctgctcacaaccttccctcgaagaactcgtg

SEQ ID NO: 183511 - DNA, 413 bp, Glycine max
gatccttaagtcgactgcagctgcagcttttgttataaatagctgccttatgattcttcaggtggccttaagacatctcaatcaatgtgtatgaaagtgacccacttaggtatagcccttaattcacattggtcttctttctcttggatctatagaatcaagcctttcaatgcttgcgtcatcctcttagtcttggaactttgcataagacctctaatctcatgtataggatcattagatgggctggttgcacctctatcatattccaacctaatttgtgatctcaataaatttaggaattaatacgatggagctatctctaatgacattgactaaactctcacaatctgaacatcattcgtagcagctgtgatgatacgaattgcattgtgttggcgaatagaattgatgct

SEQ ID NO: 183512 - DNA, 415 bp, Glycine max
gtctgactcccttgagagatatctgcatagaggtgtatattggatgttgcatcatagtccatatcatatcttttgtgcatcatgcatcatcatgagtcaccagagaacatataatttctaaattagaaaattttatgtagaatgcaaaactcattattttaatcaattacaaccttattgcaatcgattgcaacaagctgtatgaagctcgcaaagttatgtctcatatcagtttaatcaattacaaccttatcataatcgattacacaatagattatgagacaatgactgatttattccagagtaatgtgtttaatccatcaccatgtgatataatcggttatttctctttctataaatagctcacaagtgaacaagaacaacttaattgattactctgagtatataattgata

SEQ ID NO: 183513 - DNA, 448 bp, Glycine max
  unsure (1)..(448): unsure at all n locations
tgcgaagaaagaagacggcggtgtggtggtgaggagcattatcaagttttccatcaagaagtgcctgaagaagtgcttctcaagttggtttcgcgcgaagaccaccacgaagcgatgatcatgttgaaggacatgccgcctgagccaaactggtaccaaaggaagtggaggagggcaaggcacaatgggaacaatgaggagctcaaaggagagaataataacaacaacaatggagttcaaagaaacagaaccattgccttatcanggcctttggatgggaatggaagaataattcatgagaagatggtgaacaacaacaaggtgatgaaactctctggtcctcttgatgggaaaatgaatggtggtaacaatgagagagtgaatgtgtatgcaaatgcaaataaaagcccatcgatgggtgctactactcctactanggctcttgatg

SEQ ID NO: 183514 - DNA, 463 bp, Glycine max
  unsure (1)..(463): unsure at all n locations
atagaaactcagcttgagcaattcaacgacataactgtgactctttgtttttngagnccnctaaatatcgagacgctcgaaattgaatgtttaagctctgagcaaattcaaacgacatataaattttactcggatgtctgattgagtctcgtaatatatcgtgacgctcgaaattgaatgttgaagctgagagcaaattcaaacgacaataactgtttactcggatgtttgattgagtgccataatataacgagacgctcgaaattgaatgttgaacctctgagcaaattcaaacgacaataactgtttactcggatgtctgattgagtctcgtaatatatcgggacactcgaaattgaatgttgaagctgagagctaattcaaacgacaataacttctttctcggatgtttgattgagtcccgtatatgtcgaacactctgaatgaatgtgtagattgagca

SEQ ID NO: 183515 - DNA, 366 bp, Glycine max
agcttgtatagcacttagcagactttatttttttgctatttcttaggcgtaaataaatactatctccttaagcgtatggttggagattcgacttcacaatatatgtatatgataaagcattattcgaataaggacaacattctgaatctctcatgttgggagaaattagtcattaattctcatttgagatatagaattatatatttttttcaaacaaaatactattgtgggcaccactcgaaaagttacatccaaatcatagctcctatggaagtgtagcataagcataacagtattaatgcccaaccactggtgttcttgggctcctactctaaatacctcctggagggactactcccacacttc

SEQ ID NO: 183516 - DNA, 475 bp, Glycine max
  unsure (1)..(475): unsure at all n locations
tatagaagatctaatggacattagagagacaaacgaaatcnctatgtggnttctaagatcatccccaccttgataggaatatatgtgaacaatatgtttagaataagcaacacctgaaatatcaatgaggattaatcaaactctaactccttgcaaaatttgctttgaggcaaacagcagaaacatcacaacacactaaaactcattagaacatactgcagagtgtttcatcatgactccacaccacccgattgactgatgctgagtaatcattggaaagagatgcctatataagaatcagggaattattaatcaccacatgacaacagtcttaataaacaatcaacaaatatgcagcattgaaattttttattttgagagccatacttgtaaagccacagagcatgatccaagttcccatactttataatttctctgtgcgatcctttcacggctgcctatatcccacaccatg

SEQ ID NO: 183517 - DNA, 324 bp, Glycine max
taacactgtgactgttttcctttattgatggattgattccgttgatattagattttgactactaattcatttactacattagagaaataaaacctaggtcttatgaataatcacagtctaaacttttggtcaattagccttattcacacttattatacattatattgacgtaaatattgaagattatttccatcagatttgttgtcaagatcactaatgaaggccatcatgatttgagtcccaagcccacgtcatgttttggtaacaaaagagaaaatcaaatctgataataaagctagtggaaacatgcatatttcctcatga

SEQ ID NO: 183518 - DNA, 402 bp, Glycine max
  unsure (1)..(402): unsure at all n locations
ctagttganntttggaaatgataatacattgtgatatgattttcataggaacctagattgnggaaaattggtaccagtgaatcataattcccgattgctcttaatatcattcaaatatctcttgtgtattttactttgttttcttttaaaaccaaaaccacaaaaatactgcaattcctcttttgattaatccaactgtttagtttaataattttaactaactgagaacacaattgatccttatggttcaatatccaaacttttagaccattgtgtatgatacatttgtccttgtgcgagtattaatttttatgcatcaagcttacacccggnttcttcttgctcttcatcattatcattcactttttataataagaagacaaaatatgaagacaactaaat

SEQ ID NO: 183519 - DNA, 375 bp, Glycine max
cagcttgcatcatgtggtaatcatagctcattatcttcaagtgggtgctccttaaaccttcattaattatcagccttaccttctcctccattgttgtgtcttcatttttctccatgcatctactcacatggcttgatctaaaggtacttaacatgattttttagaatttctatcgattaaacttgctacacacactagatgtgattttctatgggtcaaatttcttgttcttgttcttgaaccatggattgtgtagagattgattccttttacttctgtctttctattttttatggttgaaacctaaaccatgaaattcttactataacattaatagtaatataaacctccaaaatctagagtgtcttgtcacct

SEQ ID NO: 183520 - DNA, 384 bp, Glycine max
tttgatggggcctattccagttgaaagccttggaggaaagaagtatgcctatgttgttgtggatgaattctcccgatttacctcgggtaactttatccgaaagaaatcagaaacctttggaggattccaagagttgagtctaagactttcaagagagaaagactgtgtcatcaagagaatcaagagtgaccatggcagagaatttgaaaacagcaggttcactgaattctgcacatctgaaggcatcactcatgaggtctctgcagccattacaccacaacagaatgggatagtgagagaaaaacatgaccttgcagatgtgctcggtcatgcttatgccaagaacttcctatatttctggctgaaccatgacacgcatgtaca

SEQ ID NO: 183521 - DNA, 442 bp, Glycine max
  unsure (1)..(442): unsure at all n locations
agctatctagtgggcccaagggtctgaatatgcctccaaatgacccntttatccttcttgttgttggatcaagtggcttcaaaataattaagcagggggggtcgaattaattattaatgtgtcttgactaattaaaaaaaaaaattattgttcttaatgttactaaattcaactaggcttttactacaaaggtaagaaactaaagaacagaaacagaaacttaaccaaaagtaaaagcggcatttaaaagtacacagcggaaattaaagagtgtttggaagaagaatacaaacacaagatttatactggttcggccacaacccgtgcctacatccagtccccaagcaaccaacagttcttgagatttctttcaacctttgaaaatcctctacaagccaaagatccacaagggatgtaccctctcttgtttctcttgaacaac

SEQ ID NO: 183522 - DNA, 465 bp, Glycine max
  unsure (1)..(465): unsure at all n locations
tgcttctacactattgcataattgatagatgctttatatattgtgtntaagaacctccacaaatagaacattatcaatagaaggaaggatgaatacttattttacatattctgggtatccttcccttttgatttcctccaaaagtgatcattccaccatatatggaagtaggcatttaaacatacacatttctcttgtcatgtgacgtaagcagccactgtttatgtaccaacatagttgtttgcttcctattatcaaaggcatctgcaacatgaataatctttttcttaagtaaccaaatctttttaagtccttttgtgttatccataaaggtattgattggtaccttcttacgtccatctttacacttggatatcatatgaccaatctttgcacataaatagcaaacatggtgtcttatcataacatatacttctatatatcatttccatatttcgagaactc

SEQ ID NO: 183523 - DNA, 383 bp, Glycine max
gcagcttataaaacagtggaatgatttgagaactgttattattattatttggggattgatatgacctattctctttgttctccaaattttgagaagcattttccacttcactactattccataactggagttcctgtgtcattatgccatgcccctgcaccacatcaaactttcgtataacccccatttgaataatgtgtatatatacatcctttttagttgtgataattacacgggctcatgtaaacaaacaaatgtgtataaatctctatatctctatttaaatatttaataattttgacttgcaggtagcttatacatatgatgcggcgccaaatgctgtttaattgcacgcaacaggaaagctgctacctctttgattc

SEQ ID NO: 183524 - DNA, 451 bp, Glycine max
  unsure (1)..(451): unsure at all n locations
gcttgaacacaatatgggggaaacatagccttattcttgattgaaccaatctaatggctacatattaaaggtcacataaatttagaacggttcaaaaaagttgtaccaacaccaacaaagtttcacaatatgtctagctaccgtgacaatattcaagcttagagaaactaacaaaagacacacaaccccacctagacgagatcttcctccttgtgggtgtgaatcacacaatctgatttcgggtatgagacacatgtcagaaggtaacccttttcaatttgatggtcatcaagaaaggattgatctgcctgatccacagagcctgaaacaacttggccagcacaagtagagcaggcaccagctctgcatgagtaaggtagctccactccagcattntcagccgaatccagaatgtaagtgtcatcaggggcttcaaattcattctcttcac

SEQ ID NO: 183525 - DNA, 436 bp, Glycine max
  unsure (1)..(436): unsure at all n locations
gcttgcccaggatcttagcaacaatgtcctttcgtttctcacacataactntgttgagcgcatcttttcctgagactcttgcttcaattttgggacgtatattgataggtatatctgagtcatcaacaacagtaccaattttgtatttgttcgttttgaagcatactgcatattctacttttctctttttgctctcttcctctaaatcctttacacgcttctgaagatatttcacataatcgatagcagttttaaggacagaagccttatccgtctacacataagaaatgtttcattgtatttatctaataatggaataggtttataatgatatacttggttttcaattataatgaattntacaccagagtttgcgcgaagtattattactaaataaaattcatataataactattatttattnggcatatgtttg

SEQ ID NO: 183526 - DNA, 350 bp, Glycine max
  unsure (1)..(350): unsure at all n locations
actaactattttgaattctttagttcctgaatgtacaaccttcaaattgttgctcgttcccctctgtcttttctgcaaaaaggaaaatcaatataaaaaaaaacatggatgaagtcctaagataatatatatcaaagaaaacatggatgaaatcacaattaagaagcacaactaccaatctttcagagtcctttggttaatttgtcttgtctccttatgtggtggggctntgtttaataatattatactttgtccatccaaaaaaaacttatgactgatcctcttttcattaatcctattatgtatgttattgtataaaagatcatgggttctccacctgccttcactcc

SEQ ID NO: 183527 - DNA, 427 bp, Glycine max
  unsure (1)..(427): unsure at all n locations
agcgccgtaatgccctctaatgtatcgtntattacaagtgaaacacatcccatgctctcgtcggaaagagggttcctccggctgtaagcgtttcaccatgggtggcggacatggtggtgatggcaaaatatgcataattgtggtggaacgagggggtgggggtcacatatgtggaggcagacaaaggattgtcatctgctgctcctgaagcttctcaaggtcggcggcctgtcccacagtcatacgctgatggacctggactgcgtgtctaatcttcggcgtctaacctgatatgatgcaatgcaacaggaaaggggctggctagccgtaattctattagccaagtcttcaactctttagtaatgagcctgaacccgctgatgagttgaaagggcaccgcgggcctacacgtgtgggcaaccggttt

SEQ ID NO: 183528 - DNA, 469 bp, Glycine max
  unsure (1)..(469): unsure at all n locations
gggtgactgcacgcacgcctggcangtttggactgaagtgcatcttttcttcgccacgctcctcacgacgaaagcacgtcagcttcgctcagaattgcgtcgtctctccaaaggtactctcacgattgagtcgttcatggagcgtgttcgcgaaatcaatgaatccttgatctcaattggagatcccgttcctcttcgtaacctaattgagatcgtccttgatgcacttcccgagaaatatgatcctatcgttgctgctgtcaatagtaaggaagatcttagctctttggatgaacttgaatcctgtctccttgcacacgaatcgagattggagaagcatcggatagcaattctcacagaaccagtgtcagtcaatttaacgcaggctcagccgtctgattcgtcttcttcgatggaactgtcgtctcctgctacagagttgtttcccactggcactagtcatgttact

SEQ ID NO: 183529 - DNA, 418 bp, Glycine max
  unsure (1)..(418): unsure at all n locations
agctngtgctgtgtacctttactttctcaaccactgtgtccttctatgctatatcatgcagtaaaaaaaacattgtttccctagctgagagatttttcttatagtaaaacattctatacttcatgatatggttttgaagttctaaggggatattttcctgtggtggtttgcatcttttgcaagtatcagataacactccttcatggggttgggagtgtttggttctgttctggttttggctctcttattcaagcatttggcatctcagcaaccgaatactgatgaattctttgtgtctgagttcttgaagaagatgggtttatcatcttcccaaggctacaacttctctgcttctgtctgttcattggcaggggtttcttgtgatgccaatggagaacatattgttgacttagtcttt

SEQ ID NO: 183530 - DNA, 422 bp, Glycine max
  unsure (1)..(422): unsure at all n locations
tgataaagngatcatactggttaatgtatagtcttatgattaatttatccttcgtctttgtctttatcattgtcttcaattttgattttcttttcttgcttcttctttagtgttatttgaactatgaaaatgttttttctctttttgtttttcatttaaaaaatgccaccttattggagaatgtcccttgaatattntgttgtcttgaagcctttatttggctagtgagcataataatcatcttggtggaaaacacaaagcagtgatacctatgatgacaatgagagtctacagaagaaagccaagaaggtgtggagttgcaagttgtgtcaaattactacaacaagtgaaaaaggcttcaatgatcatattcgaggaaagaaacataaggctaacaaagaattcactagaacttcaaaaat

SEQ ID NO: 183531 - DNA, 394 bp, Glycine max
  unsure (1)..(394): unsure at all n locations
cccgggatccttgaagtcatctgaagcatgcagctatgtatngcactttgtgtccttcctcttctgcatttaattcgnattcattgcaccattttttntaactcttctttgtccttcctaattgctccctcaacgtttatgaagttttaaacattgagctttgtcttttttcttccaaattcaaatgtgtttaattcgtattcaatacttaatttgtttgactcctcttttcttctttcttaatttactcaatgaacgttcctgaagtntattgagctttgtcttttttttcttccaaagtcaatacgtttaactcgtattccatactcaattttatctactctattttttttctcccactttaattgctcaatgaaaaagttttgtagtttaa

SEQ ID NO: 183532 - DNA, 315 bp, Glycine max
  unsure (1)..(315): unsure at all n locations
accttccatacctcaaaccttaacatggatcgatctatgttggtctatggacttgtcatanagatgaacatggatgttggcaccatgatctcttctcagatctctcagatagaccaatccaactcctcgagggtgggcttttcgactctaatcatagctctttgtgaagcccggngggttgtctctaactttctcaccttcgagtccctcagcctgaccattaatctggcctacattcacaagaatagctggaaccccgctgatccatctatcactattttgaggtctcgcaaggccaggactacgactctagca

SEQ ID NO: 183533 - DNA, 384 bp, Glycine max
agctttttgtattataaacatgggaccaactctatttatttcagaaaggaagtcgcatctagtcaagggcctagagaccatacacatgttcctaacgacttctaactatgtgggccatatagtctatcttatgctgacaatacccgagaagcccatgaatctcttcggggcgcggagtagtgtgtctgccatcgcctcggtcttggctaataatcggggaagatcttgactcccgtacaaggtaagagcaaacccgaccatccacatggttgcctcttggtgaaagagacgatcacccttcctctaacctctgtttccgcgtatactagggcatactccaccgcaatcctatgcctcggggccgcgactaaacctaactctttt

SEQ ID NO: 183534 - DNA, 462 bp, Glycine max
  unsure (1)..(462): unsure at all n locations
gtgtgtggagcttaatggtggaggaagaagagagtaatcttcgtgagagagggagaaaaaaggcttctgaattttctgctttggctgagtgaggagagagaaaagctttttggttttaaaataaaagggatctctctttntctattattttattataaactacgccacatgtctccatttgagtggagcaaaaagggcccactttcccttttgactgtgacccgtactcagccacaaaagtgaggaaaatctgacctttgaaacgctaaaatcctgccttggtttatgtgctgcttctcaggttccagattctcacgtttctctgcgtccgtcanggccagttttcgaaagtaaccaatatatatatcaaaacgctcaaaataaaaccttgagcgtggctcataggttggtttcgttaaattctaagtcgcacgcataacgatgatttttagactatatact

SEQ ID NO: 183535 - DNA, 391 bp, Glycine max
  unsure (1)..(391): unsure at all n locations
actttcagccgtaaactggtttgttgatttaatctgcagacttagttggtctttgaccgtaactaaaattttatgtacttatcattgttttctagctaaaaaaactttatcaataggatctttataactggtattagttgcttaatgtcatccttttgttatccttatttggttcttagaaattagagaatgtctgagaaaatagaatttattgattctgatgtaaatgtacaaagtgatcccagttctgttacaagtactatatatattatagatttataacttcagtacctggtcaagctaaactgaatagatttataactgccttntaactgaatagccagctgataactgacagcggtgcacctcttagtaaaccaggataagcaca

SEQ ID NO: 183536 - DNA, 380 bp, Glycine max
gacccgcgaccttaagacaccgcggctgcaactttataaggtatggggactgttgttcataaccaaaatgctctctaatatgaaacaaggagctggggacccctcgtcctaaacacctgttgtggaaataccttaaaggggctaccattaatcaaaacacaaatttaaacctgaatggaagcatgctgatatccaaaacctccattttgggcagaaccccaatctaaacatcatattgcccatgaaagaccaacacactgaatcgtatgcctattcaatatccaccttgaacatcataactggatttttgctgtttcttgcttcctcaaccacctcattgacaatcacaataccatggaggatatgtctaccttcaatga

SEQ ID NO: 183537 - DNA, 453 bp, Glycine max
  unsure (1)..(453): unsure at all n locations
cactttcaacatacagggttgaatatagactgtcgctcacacagagattagggtccagtttctcccattggaatgcttcagcttaagtggactccacccgactgacgaagttatggatcaagtggacatgcttgtccaatgtctgaaaatgacggcttaccaaaccattatgagtaacctttctgatgagcaatatgaagtatcataagaatagtcattttgatgtttgctgacataaaatctatactcgcagtagattcttttgatgaagctcaactgatatgcctttctcaagtaacatagcttcatcaatcttagtgtatcttcactacacaaagcattcgaaagaagattaattcanagctactgagtgaagttacagttggtgtgttagtcgtttgtccatgggtagactatgtagcatcttcagtgttntattctgatgcttctcat

SEQ ID NO: 183538 - DNA, 187 bp, Glycine max
agctccggatatctcctacactatggggggagggccatcttggattggcctgattttctcatggtccactaggaccccttttctaccaactacaaatcttaagaaaactatatgatttacacaaagagtacactcctctattattgccatatagctttgtttcctaatgatcgaaagagcttgcctt

SEQ ID NO: 183539 - DNA, 459 bp, Glycine max
  unsure (1)..(459): unsure at all n locations
ntntagtttcagatgatgcagacgggttagtagctacctcttgcactcctctaatgactatggcatcatttctggcgcgtaactgatgggagttggaggccatcttctcaattaaatatctggcttcaccatgagttatgtctccaagggctccaccactggcagcatctatcatacttctctccatattactgagtccttcataaaaatattggagaacaagatgttctgaaatctgatggtgggggcaactggcacatagtttcttaaatctctcccagtactcatacaggctctctccactgaattgtctaatacctgagatatccttcctgatggctgaggtcctggaagcatgggaaaaattttctaagaatactctcttaaggtcatcccagctcgtgatggaccttggagcaaggtaatacagccagtcctttgcactccctctaatgaatg

SEQ ID NO: 183540 - DNA, 340 bp, Glycine max
tcgacccgagacctctagagagaccgcagtcatcaacttaggagaagatgttttaccttctctctaagccaatctattggctaagcgagcatctgctaacacacactcctgtgctatacgcgaagaagaatccaaacaaaaatgagctgtacaggtttgctaaacacactgcttaatctctctagtgcatcacttcaattcatgcgctaaacaaaattggtgcgctataccaaaaatcactaacatgcgctaagcagtccatacgtgtgctaaacacacgagcacgaacaaggccacctatttaagcttgaaatcagatattgaaaagggagcttggact

SEQ ID NO: 183541 - DNA, 453 bp, Glycine max
  unsure (1)..(453): unsure at all n locations
tatgcaaaattaggacgcatagtggatgtgcaaagccgtatctataacataaatgacaatacctagcaagattgtttccataccaagttctacaactacagaggcatccaagatggctgagtccacttcaaacatagttgcttagaaaccaagagctattacggatgatgctctaactaaatcaacctcacatgaaaccacatctaaagacacaactgctatcattgtccatactaccagctctagacacactacaatcaactttgcccctctagaggtagtgaccaaagccaaagtgaaagagatgattggactggctatgcacaactntgctgagaaatagaaggcttataaggataatttgagatgcaccatgcaattatctatcactacttatgtcaataaacttggtgaatctctgaatctatattgcaacaagcccaaatgcgtcta

SEQ ID NO: 183542 - DNA, 380 bp, Glycine max
gctcacaataaattagaaattattatttttaaataaaagtaagtgcaaaattttattagattcatttaaataaatggattaaacttcactgggtcaaaacttaaattttaagtactcaattttactatttaaagccaccgacacaagtgcccaagtagtcgtttctataataatgggtcctatccgcatgattattggcttggaacgttctgaactggccactcaggtctaccattattaaagcatatagagtgcatcaagaatttaatcaccatcaccttatcctctctccaagagtgctattggttaaatttgatgttataaggggacttgccaattagggcgttggaggagtgatgctataatggcatagtattgag

SEQ ID NO: 183543 - DNA, 368 bp, Glycine max
  unsure (1)..(368): unsure at all n locations
ctatgacaaaaaggagattcaactccatttgcttagatctcaatgacaggatacgagtcaaggagactatgcttagattgtcacggtaaacaaatggggggggggttgtaatangaaggtgaagttcatgcagaagagactgtatccaagaatttctaatgtagtgttggccagatttcaattttcagccctacgtttgagcaagcaacaaaggctgcttgtttgtccacctagaaaccatgggacttgaaacaagtgcaatagtagcccatggtgaagggttcctagcagatacactacagaatacatttggccactttccaatgacctagtagtcgagagagaaattgacatantttgttcacact

SEQ ID NO: 183544 - DNA, 408 bp, Glycine max
  unsure (1)..(408): unsure at all n locations
gaacaattcttcatnctctcacaagaaccctcattgtctttgtgcttcaacacacggtgttatccaagagctcttcgacagtcccgaagagcaccgtggtcgtctccttcctcgcctccttaaatgataatctcggagggatctccagcaggccctccgggacgtaagttcatggtcccagaccggaccggtcgagaatattgttcacaagtatgtaattttcctcggagaggaagccgaaccgattctctcggtcgagcaacatttccttgtagcaaacgcatgcaatgcttggcttgaagcatgcaaattccaccaagaaaattttgttggggtgctcactataaaagttatacagggttgccacctgctaaagctttgtgactgaggacgagctttacggggaac

SEQ ID NO: 183545 - DNA, 344 bp, Glycine max
gtgttgtgggacttctccaccaaggcagatctttaagctttggccactaaccaaccaattgctgtctttggaatggtcctctatctctgttgcttcataaggcttatcatatataatagtaaaaggaccactccatctcaattttaattttttggaaactactttaatcttgagttgtagagcaatatttcttgtccgagtttgaattctttgtggaggatctttctgccatggtacctcttggttctttctttgtaaagcttggatgattcatatgtgttgaggcgcatctcttcatgttcctatagttgtaccttcctcttctcttcagatggtgtagactc

SEQ ID NO: 183546 - DNA, 375 bp, Glycine max
  unsure (1)..(375): unsure at all n locations
ctgcaagcttgaatcatataaagtacatgcacaattatctnttattccctacagagacttctatatctaaaatntgnggcttcctccgaataagtcaagtattttaatacttggcgcggtgctctattaattttcttgtctaaataactgaactttacaatgttgcatccttgcggtgtaggaacagggaaatattatatcagtgcttctggtctcatcgaatattcttgtctcccatctaaacataccattcttagtgatatctatatatggggagatgagagaaacaacaaagggttgtattttacacttctaagatgcatgtgtataatgggttattacgcaatccaagtttaacacctatacatatattat

SEQ ID NO: 183547 - DNA, 503 bp, Glycine max
  unsure (1)..(503): unsure at all n locations
aaactcaaacttggtagnagggggcaattatatcctccgtgaattggactgtgggttgttagtactatcctggtcaaaaacagggaggatggcatgaagtgntatttgcattggatcttggcttgaatgctatcaacttctttaatctctagttgctactgttcttttccatgactgtatgaagatcccttccatagatgagagaatatgaatgtgaataaaattatgggagagagagagcgagaaagaatgtctacaatttataggaatttatagaattatttacgcacgcatggaaagctaaattccatgcccctccgccttataaacatgatctttatcttagaatatcagtcttcagatctgttggatacaactatgccaaaagttatggcttgaactaacaagatggngtgcttacatagacatgtngctgtaactcgccaaatattattacctccgttttacttacatactgcgcattctaatacaatatctcttat

SEQ ID NO: 183548 - DNA, 426 bp, Glycine max
ctttaggctgttcaattgacttagattgttgcacataatggcaaagatctgtgtggtggtcggcagaagatcatataccacagagtctggcgacagcggcagatttctgattcatggcaagctgagttactaggttgaccaaggcatcgaatattcctttatgcgttttatttctagaagatgaagatgaatctgtggccacctaatggactcctctaacaaatatagcatcatttttcgcactgaattgttgggagttggaaaccatctcttcaatcaaattcctattctcagcaggaggctattcaccaaggggctccccactggcagcatcaatcatactcctttccatgttgcgaatccctctagaaataccgccaaggattgctgtaaatctggtgtaagacagttgcaccattttcttga

SEQ ID NO: 183549 - DNA, 416 bp, Glycine max
  unsure (1)..(416): unsure at all n locations
tctctcatcttgacggcatatgtttgcgagaagctgggacacatcttgcccgatcaccatgatgcagtccattgatgctgtttatctcaaacactcgacatcatgctcatcacaagaggtgaaacattgatgagacgttttactaatcaagtaatcatatagcgttacagatattgatacgtacttgttacatgtgaaaaaaacatgagtagtctgcttacaagatcacatggctctatcattagcttggcttgagtttactgcaaccaatgtgaaaaataataatacttataagagtcagctcggtgttctataaatttgagggcgacanatcaagaattagtgctgaaataactttcatataaaactatctggaatttcaccctcattttgtacgcaacactctaatatatata

SEQ ID NO: 183550 - DNA, 276 bp, Glycine max
  unsure (1)..(276): unsure at all n locations
gctacacacgtntcttctttcaaatggcttaagccatagacaaggaatttgtcttatgagacaaagtatagggagcatggtacttgtactactagctatcttggttctaataagatagcgtgcaaagtacaaccgcacgaaaaaaaatagagaggcatttatacctgaggcgttgaagaataagatggttattgctttgcttgacacaacacaatatctgatgcaacaatatctagttggtatcagccactgtgaatccaacttttgcgattacct

SEQ ID NO: 183551 - DNA, 405 bp, Glycine max
  unsure (1)..(405): unsure at all n locations
caccctagctacacctattgtgggtattctcttttaaacacgtgatcacccgtttcaaactctagcagcctctatcgcttatctgtataatattaggtctggatgaccaacatttattaagatctggaagaccattcatacttaccttagattntgatgattacaatgactataaattattgataagttaatgagtttatgacaagtggataggatcaacagactaaactattatctatatatatcgtccacactcaaagaggaaaatgctctgttaattattaactagcatccaatgcgctaaaaccaagagtgtccattcataatattaaccagtggtaaacattgtgtagcactatcattcatgtctagttaagtacgactcatacatacatttcaaatgat

SEQ ID NO: 183552 - DNA, 299 bp, Glycine max
ctttttttaagggcacgcttatagtcagctctataaatgtaacaggctccaattcacaaccataatactctgtgttgtaagactcaagccatgccaatgccattgtgattgtcaaccatattgacaacgtttaattgtgatgccataacctctgcacctcatttggtaatcatataatgcttcttatacctatagaaagcactatcactgtttgcaccaccaatgttctgaaaagccatgttttgtgacttacaaaattcatcaatattcacaggcagatgatgctggagatctaatta

SEQ ID NO: 183553 - DNA, 261 bp, Glycine max
aaacacaaatactttctccggaagaatgttctatcggaaaacttcctgaatgatgctttcctgacatttctggacaaaatattcttccgaaagaagaattgctgaatggcagtctcgccacttcactgtctgctaggtgctccaacaatatagtgggcgaacgcagcaactccctttcatcattagcatgttcattttaccgaacaaacaaacacagttactctgaacttttctttgactagaacacctctcataatctca

SEQ ID NO: 183554 - DNA, 369 bp, Glycine max
ctcttaccaagtttatgtagtattttgctacctctggtcctgtctcatacctatctgctttgtattggatcatccacaggttcccggctctatgagggaaagcagtttctgttgatggattctcagccattcttccaccataagggttgaaatacattactgctttctctaattcaatcatcttcttccaaatccctcccaaccctccttgggtattggtctcttcacatagtcagaattccttttcaagtacttgagagaccaaggttgtctctttagcaaaatctcaactggggttgcaatgttcatgttgtaccaaaacagcacgattgaagccacttgtttgatgcttcagatgcttcaccccat

SEQ ID NO: 183555 - DNA, 447 bp, Glycine max
  unsure (1)..(447): unsure at all n locations
ttaggatatgtgttactaattaatgttgttaaaaacttatatttccaaggtntaagactgttgggattttgataaaaagtatcaaattgatgaagtaacaaaatagtattgtgtgataactagataattaatagtgaattaaatagactatgaagattaagaattgaagtaaccaaaattaaaaggcaatcacattttgttaactgagaaaaattntaaaatttgagcttggaaattttcacaaatattttggtgtgtgcagtaaacaaaatctaaatcaatgaaagaaatttgtcgaggtttaagtttatcaaaccatcctaacatgcaatcactatttttttattcanacaaacatttcttatcatcaacccacaatgttattcaaacctcttggattagtgtaaccaagtactagcattaagtgtananaccctttttacttta

SEQ ID NO: 183556 - DNA, 381 bp, Glycine max
  unsure (1)..(381): unsure at all n locations
atccttaagacacctgtggctgcaagctttgccaagtatggcataacctgctttcntaccctaaaaaacaattcaatggttaatttgctcacaagataacacaatggctgtggtgtgtggttatatcattacgtgatattctcattatctccctttataaagtaatttaggtattctagtcctaccaccaagggtgcttttaacaaataataaaaactcaaatgtcaaacaaacttacctcaccataaatcttatttataaacataaagcaattttgcctactggaaatggaggttcgaagcttctatatgaccaacccatactttcccatgcgcttacaaaactctctagagataaactactgtgcatgggtcatccctg

SEQ ID NO: 183557 - DNA, 432 bp, Glycine max
  unsure (1)..(432): unsure at all n locations
ctatgcaaattatgcgttccatatctaaactcaaagttcttttttcaaattaactgatttccaccacaccaatagcatttgacatttcttcaacaaaaaaaacaaatatcatttagcattaatcatagaaaggtgagataaaaccataaagagtgtaatcaaaacataattaaacaagctaaaggtttagaatattgattaaataattacaactaccaaatgaatgaaaataacaacttatcataataaggagacacggaagaagcctctgaagctcacaattaaaactccataccattcttggagtgaatcttcattgaaaattccataagtacaacactctctcgcactaagaccacatatgatagaganaacgcaaggaatttggtgaaacatcgcaataaatcacaaaagctagaataatttgaaaat

SEQ ID NO: 183558 - DNA, 284 bp, Glycine max
  unsure (1)..(284): unsure at all n locations
agctcttattatgatggagtgccatacgactcatagtttattcaactatatatatatatatatatacctatacatatatctatatacgtacatatatctatatctacatatatatatctctctagagacgagacagagagtcagacagagagaggaaatngatcatcattcaccagcgtgattttgaccacccgctttcaatgctttaacttccagtagaataatatgttcttgaaacccatagttggagtgaaagcgcctctcacaaaggtgacatatggaaa

SEQ ID NO: 183559 - DNA, 428 bp, Glycine max
aagaaagtgatgaggtacaagccctaaaggcatatcttgtaagagcccgggtagtcgaagagaagttcaagtccatagccatcaaagtctgaaaagagtatgatgaactaatggacgtctatatggccaccgctgaagccttggaacgagaaaccaataaggcccgaaaggaagaacacgaccaaagcaaagttttgaggggctttatatggcagaaatattgagctcaagctccgaagaggtgaaaggaatcatcatgggtcaaaggcatgatcttgaaggacgagctaaaggcttgccttatgtcgaaaagaaatttgtcccaacagttaaagcgagactgaagggaatatgtgggccatcatcgatgagtgcaaagagaagctaaatctagcggcgactcacgagcaaaggctagagaatgagta

SEQ ID NO: 183560 - DNA, 400 bp, Glycine max
  unsure (1)..(400): unsure at all n locations
tactganttttttattttactcaatgcaactaaaataaaccataagctcttaaatggcagcaaattatatgtccgtgggccggaagtatatatgcgccagtttattgagagcgtcgggggtgagggtataattatggatatatacggcggcataattattggctaaaatatattggggttctctattgtcaatttgtactgaaactatgtatatttaattggttttttttttttcaaatctttgaaaacaggaaacaaaataaaaataatgcattaaaagtgaaaatagaaaatgtgaagagaaaataaaattgcacgtaaatgctttgaagtttgggttaatgttgcctttttttttaagggggaatcaaggggagaaattcccggatctaataactat

SEQ ID NO: 183561 - DNA, 456 bp, Glycine max
  unsure (1)..(456): unsure at all n locations
ttatttgtcccaatacaagtgagagaaacagagcttaatgtaataatagaaaaaaggaaaaaataaatatagaagtgcacattcacaagtcatacccattattttaaagaaagtgcaggaagtgatagacttattctatcaagccaaattatttctactcgaaaattatgcatgtattatttgtaatggaacattggattacctttatggttacataaataagcacaggaagaaattcatcagctcctggaggattctctctggaagcaaccgaagcattaagcagcaagttgctaataaccctgcaacaattcagaatacagacaagnttatccctgngtgccttgtacatgttgatcttctgcaaatctatctgtgaagctgccttctaagaatgtacaacantatagaattattgaaacaggagtatatacagaaaaccacgaagaagccaac

SEQ ID NO: 183562 - DNA, 379 bp, Glycine max
  unsure (1)..(379): unsure at all n locations
agctagngagctcttcgacctattgtcttctctattaatacctcttgaaactcatcgaactctgtgtggtagattaccatacttcattattggaacagcttcctgtgtacaattatatcagtatacctctcccaagcttcttgagaggtgaacctagaccagtcatatctgacttgggaaggtgtagaaggagccttccttttcttaaatgtcatctgcgaaataattagaacaaaacacaagattaaacaaggcttattctcaacataacaaaaaataaaactaaaattttgactgggcgcttaacgcagcaggctgggcttaccgcgccttataatatttactcatgggctaagcgtagcggacccacgcttagcct

SEQ ID NO: 183563 - DNA, 435 bp, Glycine max
  unsure (1)..(435): unsure at all n locations
agcttgtgactcttggcaatntctttaaatctagtcactntaaaagttatgactttggaagaaatcttcagaaacaagtcacttgaagaaatgtgactcttggaaattcattttttgaaatcagtcactggtaaccgattatcgttaaggtgtaatcgattacacatcaacagatgtgactcttcattttaaattgtgaaaattaaaatgtttagaagctctggtaatcgattacaagtattgtgtaatcgattacacaaagtacaaatgatttgacaaatgttttatcactacttgtgaatgttgaagtttgaattctaacattctgaaacattggtaattgattacatgctcatggtaaacattacaactttgaattacttttgaaatcatgtggctctggtatcgataccgagagaaaacttttgtatgatt

SEQ ID NO: 183564 - DNA, 451 bp, Glycine max
  unsure (1)..(451): unsure at all n locations
tcagttncttgattgctggatcctctagcatcatcaccttgttcttgtccctaaccccaaccatgtgaaggaactcataggcctctttctctttgcccctgaagagaagcctctgctctctgtgctccaaacttgtcaccagcgacaaaatcatttttaattcccctgcgagctatcattgattcacaaattagtaaaacacacactggcggatgatgtctatgctctctatatgcaacaacaacattaacaactactacaacaacaacgccttatcccactaggtgtggtcggctacatggatcaacttgcgccataatggtctatcaagtaccatacttctatccaaatcattaagctcgagatcctttttgataacttctcttatagtctttgtgggtcttcctctgcctcgaattgttgcccttcttacatctgtttactctcttac

SEQ ID NO: 183565 - DNA, 421 bp, Glycine max
  unsure (1)..(421): unsure at all n locations
tatttcattctcaaacatggacgtctaatcaacacacattacaggaaccaataacagtgattcaacacacatataacataagattaaagatggtttaagcttcccttacctatgaaactcaatgagttagttttgagatgaaaaacaagaataaaggggaagattttggattcaagatgaaagctttttttcacttctacagtagttctacatcatccacaccctcaaaccccataaccaacaaaaaacatattaaaaccttgaagataaccactttttggaagctgtgaatagtgttcatggaggacaacgataatgaactcaaagagaagaagaatgagatattacctcgcctaggaatagtcaacaaccactaaaagaaggagaananaactattgttttacatcaccaaactctaag

SEQ ID NO: 183566 - DNA, 366 bp, Glycine max
aactatggaacctttgcacagagctgttgatctattcatgagatgtagtatagtattaattacatattagatatgatgacttatccctgtttaattattggtaaaagagaaactgatactatgtgttctttgcaattgttttcttaccagttatataccctctgttctgtttgagtactagatgtataaaatatgcaattattctggcttcttgggtgtggattgaagtcagataagctattagtattattatggttattctgaatctaattacctgaaattgtgtgtctatgtttgcttcaagggtgacgtatttcaagtatacacctgggcttctggatcatggaagaatgctatgcgccgtga

SEQ ID NO: 183567 - DNA, 360 bp, Glycine max
tctgatcaggctgatctccaaatgatgtgagtagctattgttagctctgaggcttgcaatcaaggcttagttctgagggtgattccattctttaaattcacgtgtatagctataaccaacttattatcaagttcacacagtgtgagagtgagatatgttcatgccaaagtaggaacaggttggtatgtgggaacaaacaagagcaaaagagggtctttggcttcttcctttgtgatatgagagagagagagagagagaaagggtggtgatgttgtctctgatacaccaagaggatcgatggacgatcgtcttctttttacaggtgagttcaatgggaataaagcaggtttaagagagaga

SEQ ID NO: 183568 - DNA, 331 bp, Glycine max
  unsure (1)..(331): unsure at all n locations
agctctaagttattttggagactaaaccttctccaatgtgccttctatcccaacgtaaaatnttatgcaaacaaagcaccaaaaattccaatgcatgaatatatattcatgcagacataatagtctcgaaataaccatattcttacataacatccactatcaaagtgagaatctaacttccaggcacataatttcaaggatgttcttaaacattcttagcatacaaaatcacaggatatagaagccaagaatatcaatcaatcatcatactcacaaatagtgctatacaaaagataggaggagcctccctcaatgtgatgctaaaaataat

SEQ ID NO: 183569 - DNA, 499 bp, Glycine max
tacccgggatccttagagccactgattccttgtagacccggatcttagagcgaccgcggcttcaacttagattaaacgttgactgacacaatatactgtggacgaccatatgtcacgttttgattggatgatgaaaaacaaaatattagaactgactcttgggtgcaccttctcatgtccaattagaatgtgtgacacatgacaatcaattcttctttgtgaccgtcaatgttcaaatctgaactcatggattacatttatagaattggacatcattggaagattaaattcatgaataaatgtaaatgagaattaaaatcaaaattataaacaattagagagaccaacaatgtaattttaccttaaaattaaataacaaaacataaatgcgagcttttaaaagagtttgtagtggtattctccaattataattggagtctcattcagttatctatgctaatccttatgggtaacctgatatgccattactatgtaaaac

SEQ ID NO: 183570 - DNA, 453 bp, Glycine max
  unsure (1)..(453): unsure at all n locations
agtagaaacatgggaccaactcattttattttttaaggaaggcgnatctagtcaaggtctgagagaccatacaagtttcctaacgatttctaattatgtgggccattaagtctatcatatgctgacaatagccgagaagcccatgaatctcttctggggcggagtaagtgtctgccatcgccttggccttggctaacaatcggggaagttcttgactcccgttcaaggaagagcaaaccgatccatccacatggttgcctcttggtgtaaagagtcgatcacccttcctctagcctctntttccgcgtatacttgggcatattcgttcgcaatcctatgctcgtgggccgcggctagacctaacttttcttggtactcggcgatgatagctagcatgttggtctccgtcttgcataacgctgnacaagcttcttttggacctgaacaacaact

SEQ ID NO: 183571 - DNA, 351 bp, Glycine max
gctcccgaatatgacaagccaccgtttatgagtgctgagcaccaacagcgctacgaggccatcaagggatgtgcattccttcgggagcgacaagtccagcttagggacgacgagtataccgacttccacgaggagatagttcgccggcggtgggcatcactggttacccccatggccaagttcgacccagacatagtcctcgaatttatgctaatgcttggcctacagaggagggcgtgcgagatatgcgatcttgggtgaggggtcagtggatcccgttcgatgcggatgctctcagccagttcctgggatacctcttattgctggaagacggccacgaatgcgagtatg

SEQ ID NO: 183572 - DNA, 396 bp, Glycine max
  unsure (1)..(396): unsure at all n locations
ttaacctcatcgtctctcacagtctatagatttgggagctatatccagtccttgtgttcggactctcagccacttatgatagccgccgatgatcccattactgcttcccctaagctctctgtcctttcttcacgccgcatcccatgccttgcgaactccttggagtaccctcgcgttgtggtcactgaaacctcatgcgatgaaaggcgtgatgctttcgtctgatggcactcctctcatgggacatccttcgcatgaagatagaatcctgattcttccttccttctagcgagggaaccatttaacagacgcccctccatgctagccaagagttggtgcacaaaanacaattcttgcgccgctcttttcacatccccggtcgaacgtgtcatacat

SEQ ID NO: 183573 - DNA, 397 bp, Glycine max
  unsure (1)..(397): unsure at all n locations
gcttgaataccaacaagaataagatagactttacaaaggtttatcatgcaagtgtccacaataacaattgtttcatttctataacttgaatttaaaatcaacacatttaaaggtaatatagtaaaaagtacaatcacttatactcaagatgtaactggagttcatatggatgtaatatatagtttttagactaaagaactaattaagatcnattctccaatttttcatgaattnttgtatttaattttgatggaataagtttagatgactctttgtatattttaggtcagtttttatatttttgaagcttaatttcctaaaccactatggtgtgaattggagatttatcttcagtaagaatttaatgtaagtggaatgtttttatgaatcatacctt

SEQ ID NO: 183574 - DNA, 446 bp, Glycine max
  unsure (1)..(446): unsure at all n locations
agcttggaactccttgactagtactagtagcacgaggaactgacgaatngtgaggaaaagcaggtccagataccatggaggctacaagaactggctcctaaagaattattatataaatccaggatcattgggaaaatcaagtcaggagaaaataaaaataggtccccatagtttagatataagttaatagtatagtctcaaggatcttaggtttaccacttttacagtagcaggagccacattcccaccaggaactggttgccggtttggaatagatccattaactaaaaatccatagaaaattcatgtttattataaaataaatcctcaaccagaacatcaacataataagccatttacgttgatataaactgctgaccagtgaccactagacagacaaactatagtaccctaagcaatgtaatgcaagatactcaaaatatttt

SEQ ID NO: 183575 - DNA, 465 bp, Glycine max
tgcttgtgaagcttctatggaggctgaatctttgatcttcaatgagattcttcaatggtgattttccaccatggagatgcagcacaagataaaggagaagaggtgagaggaggcaccatccactatggaataagctatggaagaagaagattcaccaccaagagagtgccttggataataagcttacagaggaagcttccatggaggaaaagaaagagagagagagagagggagggagggggggagcacttaattgaatgatgcgaagatggagacaagttgaactttgaagtgtgtatcacaagactcttattcatcaaaggtacaaccacgtgttacacatagtgtttatctcttgcctaggcacgcttcttgcagaactacttgtgtaaacttccttgagatctagagatatctactccgcccttttatactatgcgcactccttgaaagcttctacatagc

SEQ ID NO: 183576 - DNA, 446 bp, Glycine max
agcttcatgatgaatcaagaatgattcatttatagtttgttgataacaaaggggatgacaaaaagctcaaaggtcaagaacacttcatgataacaaagatgatgatctcaagaatcaaagaatgacttcaaggttcaagaggatatctgatttcaagaaacaagaatcaagtttcaagattcaagttccaagaatcaagatcaagattcaagactcaagattcaagaatcatgagaagacttaatcaagattagtatgaaattttttttcaagaaccgagtagcacatggatttttctcacaacatggttaccaaagagtgtttactctctggtaatcgattaccagattgttgtaatcgattaccagtagcaaaattggttttgaaaagaattcaactgaatttacaacgtcccagttgattctaaatgttgaatcaatacaatg

SEQ ID NO: 183577 - DNA, 466 bp, Glycine max
  unsure (1)..(466): unsure at all n locations
ngaccaatcccgacccaacccaggcatagtcagtctgtgagaacctgtgatgtacctaaacaggcgagctcctggaagtcaacagataaaaggaactaagaccacaaagcaaggaggcttgtgtggtggctggccagctgtgaactctgtgtgatatatgggttattgcctctagtaatcgattaccaagggtgagtaatcgattacaaggcttaanaatgaaggcaggaggctaagatggtctctggtaatcgattaccaaggggtgtaatcgattaccaggcttgaaaacgaggtcaggaagctatggtggcttctggtaatcgattaccaacggggtgtaattaattaccacgcttagaaatgaatgcagcaggtcgtggaggcctctggtaatcgattaccaatttgtgtaatccaatacacagaagaatgggtcactggtaatcgaataccacgtatgtgt

SEQ ID NO: 183578 - DNA, 462 bp, Glycine max
  unsure (1)..(462): unsure at all n locations
gaactaagctagtcaagttttgagtagnctctcttttcaatcatgttcttgtatatgcaaaactcgaatatgagatgctggttaatggatctaaactccgtttcacttgaaccaacataatgttggttgagattcatggtttgaatttatttctagaatgaaaaatttaaaaagaatttaaaacatctattaattaagatattaaattttattgaaaaaattaaacaagtttaggtatacatgaataatatctagaatattaataattgcttctattattgtacatttataataaatagtcagagacatgtccaaacaaatgtttctgatgataaataatactactcattaaatccaataataaaatattaattaactttaagaagaatagtggataactatcagattttaaataacaatattaataaataatgtcagttatcagaatattttaaaattaat

SEQ ID NO: 183579 - DNA, 409 bp, Glycine max
aaagacaatgagcctaatattgtgtatctataagacgttaaactagtatgtttgcatcttaatagaccacgcttgatgttgatttcgtgacctattgaaaggtttggtctaaagtaatttgtggcggctaagcttgcacaaattattatatcctttcaaaaactaattttgggggggttgtaatccaaacaacgtaataaaaactaaggtcatgctatcacttattgtccaaattagatgggaaataactaaagcatatgaaaggaaaatgggtcaaacatggtgatcggttctcgaaaaggttaggaaccaaaaccttaattgcccgaaaatttcaggatgaaaatcatatttacccctatttattacattaattaaattaaatataaatgttttattagtagaatat

SEQ ID NO: 183580 - DNA, 209 bp, Glycine max
acaaactttctccttacccaccacccagttattcacaaaagccattcctaaatctaccacaaagtctgtctaccgcacttccaatgacgaacaccacctttagcacaaaccaaaaacaccaaccaagaagtgaattttgcagtgagaaagcctgtagaattcaccccaattccagtgtcttatgctgactttgctccatatctacttga

SEQ ID NO: 183581 - DNA, 440 bp, Glycine max
agcttggtggagaaagcaatatcgacccattcatgctgcgaagacgaccactgaagctgctcaatctccgcacccgcagtgtacgcaagaatcgggtcaagcccgccctccacgggttgacccatggaagaaaggtcccaaatcagcgcctgcgaatcatcctcggcggtgcatatatggcacgagctatgcggggcccacgcaaccgcgttcacgctcgcctggtgccgctgcagctccaccacagggagcgtggggaagcgaatgtccaacaccaccaccttcgcactgtccatgatgatcgttgccatgtacctcgggtcctgcttgttccacccgagacgcaccagaggcgtgtcaagctccgagctctcgtagattatagtggagtgctctctggcgcggagatcgaaaaccctaacggagccgtcggcggagac

SEQ ID NO: 183582 - DNA, 456 bp, Glycine max
  unsure (1)..(456): unsure at all n locations
cttgtcgatctataaattacctagaggctccatcctaagaggaattntgtcttacaaaagaaggtatgtcacttaagatactccttccatccctatttataaaacatagttttgaatattttttcctttataagattgtcttttaattgtcttgtgcattaattattntttgactaaaatgtcttgaattgtctctctctggttcctatggagattggagaaaatgaatatattcctaataaagtaaggataaatttggaaaaatattataattatagacaaatttaatgataacaactaaattaatcaactttcttaataagcataaaataatcaactatgtcttataattagagacaaacgaagtatgagctaagaagtgtatttgagaagttttcaagaattggtcttatcaaaagagacaaacacaaagtcgacctatgctcatgcctcata

SEQ ID NO: 183583 - DNA, 363 bp, Glycine max
actactcaaacttcaatttgccttcaccaatgaaaatagttcttaaataaaaagaagctatctcctactactacatgtacactcaaaattcagagtaccgaatatatcttgattaaaccctagaaaacacacatatggtataaattgagtgtctagctgctatatcaacgcaatattataagccatgagacggaacatatattagatccttaatatatcagaaaagtcgaggtggacccatcgctaatatgtagaaaagataaagaactcatagtggaacagaattatataggaacctccgatccagatcgaactcatactcctgtggactgggccatttagtcaaatactataaagcggtcc

SEQ ID NO: 183584 - DNA, 478 bp, Glycine max
  unsure (1)..(478): unsure at all n locations
agcttctatagaaggttcgttcctaatttctctacaattgcatcatctctcaatgagctggtgaagaagaatgtggcatttacctgnggtgaaaaacaagagcaagccttngctttgctcaaagaaaagcttactaaggcacctgttctagctcttcctgacttttctaaaacttttgagctagaatgtgatgcctctggagtgggagttggagctgtattgttacaaggtgggcaccctattgcttattttagtgaaaaacttcatagtgccaccctcaactaccccacctatgataaagagctttatgccttaataagagccctccaaacttgggaacattaccttgtttccaaggaatttgtcattcatagtgatcatcaatcacttaagtacattagagggcaaagcaagttaaacaagaggcatgcaaaatgggtagagtacctagagcaatttccatatgttatcaaataca

SEQ ID NO: 183585 - DNA, 478 bp, Glycine max
  unsure (1)..(478): unsure at all n locations
agcttgagaaagtccttctgattctatatatacatttttttactttatggcatgagatgaagtacanagattggagcttttgcaaatttttattaatgaatagcttaaacactgtggtttaagctactttccttgatatttgtcttatgcctaacttcatctaattgtacaggttacattttattcttctctttggataactgcatgccttgtaaaagacaagtgaagagggcatttttgcttcattctcttatgatgcaatcagtaacttttgttgcatacacctttngtacatagtcacagcatgttattgtcacttgnggaccagtgaactgttctttatttgcttaaggacaagcaaaactgtacacttgggggagttgttagtcgatgaatacgactaacttttgtgtataaaacttgtgtanattgtatcacactcctccaatttatgggtattttgtagtgttataagttc

SEQ ID NO: 183586 - DNA, 474 bp, Glycine max
  unsure (1)..(474): unsure at all n locations
gtcacctgaggcatgcaagcttgtagaatggctagacatgatacatgtcatggtttggtttggtttaaggataaaagggatgccccacattatttccatgacacaaatgcaaaaatgatgatttggaaactttatgcaaaactggtcatgcatgcacctatgtggacactcaagtgtcaaaattttatggtcatgtgatgctaaggcttaggattcatttcctctattttaaatcaacccaatgtttccaaaatatgttcttttatcaatttgtgcattcacccgagtccatttcgggcgtccgggaaaattttcacagcgttcacccttgatgagtacacatttgttcaaatactagttatgatcaatagaatttttttcaaagaanagttggaagtcatctcttttcaaaagcatgtcggtttttcagntaaacaacttaattttctttttctttttttttctctttttcct

SEQ ID NO: 183587 - DNA, 308 bp, Glycine max
  unsure (1)..(308): unsure at all n locations
agcttatggatggaatacttacttgttgttgatgaacaaaagcgcanaacggaatcaaaaaatgccgaaaaggatgaccctatggcttgcaaattgtcaatcccgtgggtatggcttttgaaaggggggaaaagaagtttttgagtgtaaaaacgccccccctttcgtcatttttataatttggtgcaggggtggctcgcccaggcgagctaacctacactttnnnttnntttctttttttttttntttttttgaggggaacattaaccatgttcccttccttctcatggattaacattttgcctaac

SEQ ID NO: 183588 - DNA, 464 bp, Glycine max
  unsure (1)..(464): unsure at all n locations
agcttctagtagtcagccttctgagcctgttggatngtctagtcctccttgaagtaacctccagaggattatctgaatatggtggggacattatgggtgttgccatgagcctacagatataaaacaaattcagttaggacaaagttagttatgtaatacgcaataagttgtaaatntaattacaaatttatgcattacaattatgcgacatggaataggtatatggtactttatgcttacgcagttacgtaggaatgttctcctataaaccctcgtcatgatcaatatgatttacatatacatcatcctattgttgttcatcattaatcgaaggcatgtctttggagaaaggcagcatgtcagtgacatcaactgttgaaccatcaagatggtgactgctagaaattgttctcccttgcaaaaccactgaccatctagagtcgtagggatcttctacataaaac

SEQ ID NO: 183589 - DNA, 437 bp, Glycine max
  unsure (1)..(437): unsure at all n locations
agcttaacaganagtaaaagcggaaattatatacacagcggaaattaaaagagtagggaagaaggagacaaacacacaagagtttttatattggttcagcaacaacccttgcctacatccagttcctaagcgacctgcggtccttgagacttctttcaaccttgtaagaatccttttacaagcaaagatctaaaagggatgtaccctcccttgttgtctttgaacctagtggatgtaccctccactagaactgatccacaagagatgtaccctctcttgttctcagtcaacaacccaagtagatgtaccctctacttgtaccacaaatgatgtaccctctaatgtcttaagacanagatctcagacgggtaaaccttntatacttngtgaatggggatacaaaagaattctcaggccgttagtcctttaacactttt

SEQ ID NO: 183590 - DNA, 455 bp, Glycine max
  unsure (1)..(455): unsure at all n locations
agctttaattaatttctacgttaaagagatacatccatgtgcatgcgacgatatgccggcaacgcgtgcaacctacactattaagtattaactaagatccaacattatttgaatttcattttgtgtcaacttgtttgtcgtcttcatgattacatttatccataatcccaccactacanaataagtgtccaaccttgaatgatcatgggatcctctaaaatctataaaataaaaagctgtaaaatgtctcatccgtacaaaatgtttgattatatataatttagaaaatatgtaaatataaatttaattaataagaagaatacagatattgccgccattctacacacacaataataattatgttatgatcactgngtgaactaaaagattacaaataaatgaaattcaagtgatcaccttaatntggacagaaagaatgctattgatcaacaatt

SEQ ID NO: 183591 - DNA, 427 bp, Glycine max
  unsure (1)..(427): unsure at all n locations
agcttcacanatntagtgtntgctggcgtaaggatcgaaacttgcatgattcacattctcccccatttttatgatgacaatcattatcaagtgaattcttttcgacatcatcaaaacctacatgtttcacattctccccctttttgatgatggcaaccatctgtaggttaggagtaaaaaaaatatctatttgtatagtttattcccccttgattttgtaatgattgcttatatgaaacagttgaagattgcatatatttcatatataagaagttgtctcataaacccttactatcttatcttttgtctatctctccccctttatcaacatcaaaaagaaatcatgaacagagaggagaaaaatatttagcaatttataatgaattaaaagagtagagcatgtcataccattcaaagtatcatttct

SEQ ID NO: 183592 - DNA, 328 bp, Glycine max
ctccgccagctatctgaagaatgatcaacgctttcattttaaatgggcgccctttacggagacatttgaggggtttgggacagtcgcccttatcttgcaagccggcctttgacttcggggaatacacatctggtctaagcaagatccgcatgttgcaacggatgtccccaaatcttcacagcctcaatctttctcaggagacgagcttctcctttttcagtgcggggcggccttcataacaaacattgcgggctgcatgtgggtgaggaatgtcctgtcccgcctcgggatcggggaagactcacatcttcacgtatcttaggtcttg

SEQ ID NO: 183593 - DNA, 384 bp, Glycine max
  unsure (1)..(384): unsure at all n locations
gattcatgactccattgtgtgtattgaagtttcagtgatttgtgaaatggtgggacttgtgtttgatgtgtgtattcaagtttcaatgccttaaacaatggtgggactcgtgtgtcaattatctgtgtttaagcgtcaatgatttgcgctattctgatgaattgatctatgttgtatttggctaattagcaatttgtattaagtgtgttgaagtggtctattgtctgttagtgtccactgacccttgtatcagttgtcttattggagaactaattgaccttgttanatgtccgggcatttgtgcattataacaactttttcttcgaatgaagattataattatgttatcttccatcttgtatggcatattgtctactgtaaacc

SEQ ID NO: 183594 - DNA, 497 bp, Glycine max
  unsure (1)..(497): unsure at all n locations
atctctgagtcacctgcggcatgcaagcttcttatatcatgatggaaacatggttatgntataaacttctcatgtcttgttnttctacatatacctataagaaagaatttctgtatgcttgtttatggtgccattntgtgttaatgtgataattagaatatgccttttgcagaatccacggtttctgatgagtttataagattaggcagagaaatggttgcaaagtgtgctggtctgcctttgactatcattgttcttggagggcttttggctacaaaggagagagttagtgactgggatacaatatgaggagaggtacgtgagaagcaaaaattagatgaagtgttggatttaagttaccaggacttgccttgtcaactgaaaccatgtttctctatttaagtcaattccctgaagactgagattccaagaactaaactaattcagttatgggtagcagaaagtgttgtttctcttcaatatgagactaaatggga

SEQ ID NO: 183595 - DNA, 456 bp, Glycine max
  unsure (1)..(456): unsure at all n locations
agctctttggaccttgacaggcaactttctcctctttcanaaccttgctatgtgctcgcgattggtccctctcttcccttcgcagcttgagttcattgctgctaccccacagagctccgcgaaatttgntccggccatactctttcttgcgagccctcttggtctcttgttcaagggctcgtgcggtagttgcattctcttcccgtaatccggcacactccttccggatgtgtgtagcggccaacttgaacttctctttggcaagtttcgcctttcctaactcgcttttgagagcttggacttcttcgtcctctttcggtgcttcaaaactctcttcgctgacgacttttaacttggcgagccaatctaaacctcgtatatgaactgtcagccattcatggtacccaccaatgatgccattacgaatgcccctaaggtcttgatctttccttaacg

SEQ ID NO: 183596 - DNA, 468 bp, Glycine max
  unsure (1)..(468): unsure at all n locations
agcttcatgtacatagcttctgaaggttgcttgcgtataacanactcatttctcccctgcttttgacctaaacaggaataagtttacagtaaggtttaaacataagttgatatttagattaataggcacttgccatcaagataaggaaacatacactctagctaatatttatattccttgtcaaagcattcatactgtgccattaatgaacaggttcctcctgtatgttgcctttcttgtgattatggatcaaagagatgaacccctctaaaaaatttactttctagtgatataaaagttttatgccatacccaaatatttctatttcaaatagaagataattcttaaaatttgagcttagggcctaactcaacctcataaaaccagcttataaggtgagaactgcccaagctntattagctntacttaagccatatctctagtcaatgtaagactaagctacccttg

SEQ ID NO: 183597 - DNA, 484 bp, Glycine max
  unsure (1)..(484): unsure at all n locations
gcttctcaaggaagctacatgaagctgtctctgtaatacgttgcccagccttcgttaaccgttggatcttctcgaaanttggtctgcagcttcacagaacaagtgtccacaatatgaccattgngatctttgagaaattgtcggaagtgtgcgcatagtttccgtttccgagagcattgctcacttgtgcgttttgagccttgtagtccaagtagctttggaaaaatgccatttcttctccttctttcttccaaaaccatttccaacgttccaagatctttctccatcacccacagccaccattagccaccatgaaccgccattgttctccgttgaaaccccacaccgagaggaacccttcaaccgaagtgaaatcttccatctcgcctcgcggtttcggtagagaacgaaaccctaatctgacctttcattctccttcgaggtaaccagtggtctatgattttccttggtagttcaacttgct

SEQ ID NO: 183598 - DNA, 431 bp, Glycine max
  unsure (1)..(431): unsure at all n locations
atgcaancaagtttccaaccaaaacaaactcttctgataactgaaatgtacactaacaagtaaaattactctgtgatcgtgagtaaaaaaaacaacacagtttgtgattcttgattagaaactttacccttcatgatttctttgctttctttatttcctttcttaatatgttcaaactatggctatttatgtggcaacgtgcttaacaaaacacatggaaggatgattgtattatttcaataaaggaatacatgagacaagttcatttatgcaatagctgacctcagatttattgtggaatatactacttgcacgttcctcattcatggaaacaagaaaagggggcatntggctcattatgccangcattcgtctcattctgacaaacttaatgagcaaacttcaaagtgcgatctcattcaattaagctc

SEQ ID NO: 183599 - DNA, 496 bp, Glycine max
  unsure (1)..(496): unsure at all n locations
agctngaactagctggaagaatgatggcttggtccatcaatatgtccaaatatgagcttaattatgaactaagaggcattatctangcccaaggcttagctgactntgtaaatgagttccaccccctacaaccacaattccagcatgaatggtggaccttgcatgtggacaactcctctaatcagcatggaagtggagctaggataattttgaagggacccaaccacataactttaggataatcactacactctgattttcaaagccagatgtaatcaggtcaaatacaaagctcacctagaaagcttaagattggctaaagaagttggaggtcgtagggttaactaccaaagtgactccaagatcgcttccaaatagataaacaaagtcaacgagttggcaaggaccctcaactactaaagtatcatttgagaagcttaaagaaaggtcaatgaaatccaagtaatgcatatcaatcgagacatcaatgacaaag

SEQ ID NO: 183600 - DNA, 456 bp, Glycine max
  unsure (1)..(456): unsure at all n locations
cagcatgcaacttatctatatgagcttttatttgcctntgagacttcctaagagtagtagtcttaggcttcctcgttaggttcacactcttctagtcagactcatccactgattcaaactgacgttgttggggttgcgtctaatgattttgttcagtatcattatgtgcttcagagtgctcgtgatcactatattttcttattgtagggatctcaaactccacctgcttagtgaccttagttgccttgctagaatcttccatagacttcgaatgcagtgtagagagttcatcaaaaccgatatctctactcagaatgacctttcttttaacggagactgattcagaatcctcaactccatctccgtagctcataatgacacacttcttagctctggattctagcttaccttcatttacatgttacgatgccgaacatcaaatcacattcagcattg

SEQ ID NO: 183601 - DNA, 478 bp, Glycine max
  unsure (1)..(478): unsure at all n locations
agctgtaatcaagtgaccagtggtagtggatttcccatagtcgacatggccaatgaccacaatactgatgtgaaccttntccttacccatcttccttaaatctgcaaaaatccagaaaaaaaaaaagttgtcaaaaccataacacatcaacacaccatataaagtaaaaataaaagtttaacaacattaagacctttgtcattacaaaacctttcataagcataaaaagattaagatctaaatacccaccatacaacaagcccaaaaataggtatgctcaatcgtaacgcatcaaactcagtatgattccaacagataaaaaaatagacataacaaaatttatggcactcccatacataagatcgagataaaacaagggcatgtttagcacactgtgacgtatatagatctattcatncagtaaccaaaaacttgagcttgaaccgattaatagtaacagataatagatctattcatc

SEQ ID NO: 183602 - DNA, 494 bp, Glycine max
agctatgcgagattggtcttctccaggatatgggcgaagcggatctgaaaagaagcaaatttaatcatcttgcttggacgaatgggaaaactggggcaaatgaagagggtgagactaaaggggaaacccatgctgcgactgctatttctatacagccaagtttcccaccaacccaacaatgtcattactcagctaataacaacccttctccttaaccaccacccagttatccacaaaggccatccctaaatcaaccataaaacccaccttccacacaaccaatgctaaacaccaccattagcacgaatcaaaacaccaaccaaggagggatatttgcagcaaatagcctatagaattcaccccagttctggtgtcctatgctaacttgctccattatctacttgatactgcaatggtagccataacccctgctaggttcctcaacctccatttttccgaggatacgactcgaatgcaatgtgtgcttatcatgg

SEQ ID NO: 183603 - DNA, 421 bp, Glycine max
  unsure (1)..(421): unsure at all n locations
cagtcttaagctatgtgtggaatactcgaggctaagtgataaacccacttttgagtgatatnttgtgtcagtttttgtactatnnttatgcatnttcttggcagaactcacgtttggagactagttttgtcttgtagaagtatagtcgctcaatggagtgaaagaggttgagatcttattgtttatgaagatttgaagaactttctcactagactatgggcgtggtacattcatcaccgttgtggatagcagtacgactgataactactatttataagtatantttgggaataaattgtaagagaattggtaattttctctcctatttcttcctttttgtgcaataatggttattttacatcatttgagttnttgtgcagaaatattaaaattgatgacttgtgatgttagtgagtaaagt

SEQ ID NO: 183604 - DNA, 409 bp, Glycine max
tacatgcccaactcccttgagtggcatttgtattggttgttatactatacgttgcatcttagtccatatcatatcttttgtgcatcatgcatcatcatgaataagtgagaagaaaattttgtaaattagaaaattttcttcagaaggaaaaactctctgttttaatcgattatagccttatcgtaatccattacacaagttgtctaaagcttgtagagttatgtctcgcatcggtttaatcgattagagccttctcgtagtcgattacacagttttttctgagagaatgactgatttattcaggagtctttcctttaatcgattaccatatgatataattgattacttctctttctataattagttcagaagtgaacaagaatactttaatcgattactttgagtatct

SEQ ID NO: 183605 - DNA, 350 bp, Glycine max
  unsure (1)..(350): unsure at all n locations
gttcgntcctcttgcagaagtatcccgcgtgcttcatatgcaactccgacgaaatggaattcggcgacgttcgttcggccatcgacgatgaccatattctgcaacccggtcagctctatttcgcgcttccgttgagccgcttgaggcacccctngcagccgtacgagatggccgcattggccgtcaaggtcagcttcgcgctcatgaaaaccgccgacatatgctgctctcgccggaaacagaatttgttctctaacgaatatgactctaaccctaagcgcgtgtctcccgcactctcttgtggcggtggaagaggaaagaccaccgctggtgccggtggaatgggggat

SEQ ID NO: 183606 - DNA, 478 bp, Glycine max
  unsure (1)..(478): unsure at all n locations
ctatggacagaagcataacatctcaatgtttaaccatcgatggcagaagcttaacacaatgcttaaccactaccaataaactggccttgctctacattgttaccaagccagagaaacaaacatgaccaataaaatgaacaaacaacaccagaagccttgacttggatgaaccgtctatatttgcgtaaatggaggattgaaaaacccccaaactaacaccaagaaaggaaaaagtagaaatggaatctttaggtgaaaacaacaaaataacagtcaaacaatgacaatttcgacggcaactctagcgatcggtgtgacggctctggcaaaggcaatagcaactgaccactatgttagacttgctaaagggagacgagtacaatggtggcattggtgacaacaaaggcctaccgaagaanagtagatcttgacaagaatagattatgacatgagaagatntaagagaacccactcttca

SEQ ID NO: 183607 - DNA, 449 bp, Glycine max
  unsure (1)..(449): unsure at all n locations
agcttttacaaacgttggccgtaatattttnttacgttagaggatgttgttttgttcgggtttgccataaaaattcacaatgtaggtcggctaggaattttcgttcgagctcaaccgaagttgtgtttcggccgacaccgccatgttttcatttactcggcaaggaaaacatttgcccaccatggaaaaaatatttattcaccgatactgatcgaaaaaaatcctagccgacatcaacaacgaaagtttacagatcgaggtctaaaaagaaaattacctggttacgtcgatcgaacatttcctaatcgacatcatccaaatattattctgggattgaatatacaatacaacagccaacatatgtcgtgaaatatccgcgactgctatcttccagccgacattgtcaggctcttttacaacgttgggcgtatattttttacagataagat

SEQ ID NO: 183608 - DNA, 379 bp, Glycine max
agctatatagacacgaagatgataatgctataggagatggacatgagagtaacagttgatttgtaacaatgaagttgtagtggtgaagatgatgacaataacattcacgtaatgatgtttattgtggtgtagaactgtcaaaattcaagcttatatagtgatgtttattgtagtacagagcacagttaaaattgggccggcccaacaattaggactagaggtacgggtggaatatggttcagttagttccgtttaagagtcgacctgtaaaattcgtgttttaaacgagctggataagtccagttggcaaaacaaatagtcttttttctaaggtttgtatttttcctgcaaaaatctgtagataatctggtccacgaat

SEQ ID NO: 183609 - DNA, 518 bp, Glycine max
  unsure (1)..(518): unsure at all n locations
agtcacctgcggcatgcaagcttcccncttctggagatgcatccaatatagatggattccgaccatgttttttttttttttttccctaaacacatgaatactgtatttattttttaaacaaaatactgtatttattaaacactaaaacacatagattttctttctgagtctttgacactgataaaagcttctttttttttacaacatctgtgtaattttcttttaaaattactaatttatatttctttaaaagaaaaaatgtcaatttagaataagtctcacttgaaaaccatgatttttcttatttttattagtaaatatttaatttaatgattctaaaaatatatattagtattcaattacaaactaatatgtagaataagtttcattaaatttatagtaattattctaaaagatatatctattattatgatttggtgaataaaatatatatccattatatttctagactagtgattaattaaattatttgcactaacaatacatagaatttcagc

SEQ ID NO: 183610 - DNA, 450 bp, Glycine max
agcttcggaagaaagtgatgtggtacattctcctaaaggcaaagctggaaagagcccgggtagtcaaagagaagttcaagtccatagccatcaaagtctgaagagagtatgatgaactaagggacgtcaatatggccatcgatgaagccttggaatgagaaaccaagaaggcccgaaaggaaaaacacgaccaaaacatagtttgaggggctttatagggcagcaatagtgagctcaagctccgaagaggtgaaaggaatcatcacgggtcaaaggcatgatcttgaaggacgagctaaaggcttgccttatgtcgaaaagatatttgtcccaacagttaagcgagactgaagggaatatgtgggccatcatcgatgagtgcaaagagaagttaaatctagcggcgactcacaagcataggctagaggatgaatacgccaagatatcatc

SEQ ID NO: 183611 - DNA, 483 bp, Glycine max
  unsure (1)..(483): unsure at all n locations
agcttcgtcgggactacaaaagaagcttcaaaggctgtgttattggatgcaaacaagttcactaggtctcttgttcttttgtgagtaaacaaagcttgatcagaagcaaggagtcctcttccttgctgaagattcttgtagtattggttatcaaatgtcctangtgtaactgggtcaatgtcaatggctaatctggggtccacattttttggacacacttgcttgagctgttttgcatacgcaggattcagtgtgtgatcaatgcttttccttcttttgaagttgtaaatccgtttggaggactggttgcagcgagagaacccaatagtatgtgctcctcctgtaatcagatttatagaagttctctaatttagattccaataagaaacacattntgttggatgcataagttaatntattagaagtttctcatttaacttgtgagaaaaaacttcatttatcttctttttctttcttagaagt

SEQ ID NO: 183612 - DNA, 486 bp, Glycine max
  unsure (1)..(486): unsure at all n locations
agctntgtagcataagaactatagttggtgacggaggagtnggagtanatgacgaagggatgtcctccgttctagctctntttcttggttccatctttaactaaaaagaactcaaaattccttagaccaaaatcgttcaagttaaacaacaacaataaaggctaaaattaacaatagatgcttagcgggataaagctcactcagcgcgccttaagaaacataacatgttggcttagctgaagctaagctcgcttagcctaaaagttgtagtgatgaaatacgattagctcaagtaaacttggcttagcgcaaggcttacaacacanaatttggttgagttacctgggcttagcggttcagcctcgcttagccataggtagttcagcaagaggatgagtgttcatcctcaaaggatgaactcgcttagcgcggtaagcgcacttagcgagttcttcagataatgcttatacacaatgagtattgatg

SEQ ID NO: 183613 - DNA, 469 bp, Glycine max
  unsure (1)..(469): unsure at all n locations
agcttccacaacatccaagtaattccacatccaatcatcatgaactaacaaaaccaagcaaaataggcaaaggcagaaaactctgcccacaacacaaaccaatatcacagcttttcacatacaaataccccagtaacattctcttcgttccaattcgttaaccgttggatcgactcgaaaattttactggaagtctctagcacataaatctacattatgaccgttgggatctgctagaaacgtccagagcccaatctgtactactctttccacaaccagcaaatacataacattttctgcacaaagccaaaattctgctacacctatttgacagcaaaattatgcataagtgcagaatttcgaattcacactctccctcantccaatttgcccaaatngaatcctacaagtcccaaatcatttatcaatcatgtctaaaccaagtacaaacttcagaccaaagcaactc

SEQ ID NO: 183614 - DNA, 485 bp, Glycine max
  unsure (1)..(485): unsure at all n locations
atccttaagtcacctgcngcatgcaagcttcaaccgagatggagagcccatcttctataatgcatgcaaaacttatctaatatgtgaattccttgattctctgttttccatctacagagctctgtaattaaggtgcaactngtttttctggttttctgttttgtgaagcattgcattttaattgtttctatttatatttgtggtttttattaatgttttgctgttttgttgttttgttgaagttgaaacgtttgccaactgctatgttagggtcacacccaagtccattatgcaacagtccctacttcctaatactaaaaaaatataaaggatactgttggaattacgtttgaaattaggtgaaaacatgggacatgttcaaaataggtgggacggtaattcttggtttgctttatgtggagttgtgatgctgaatattatggatgtattactaattatgttnggcaattaaagtactgggacac

SEQ ID NO: 183615 - DNA, 345 bp, Glycine max
  unsure (1)..(345): unsure at all n locations
atatgcatgttgtcataccctaatttcgtccggtgaccttngcttgatgacatgcnaacttttgttggtcctcgtgaggtgcttggcacccatcattatggcaattgtgaaattccgggacatgccggaaaacaaaagaaaatattgatgcacaatccgtaaggttccgtgacacaccggaaatcaaatggaagcatcgttgcacaattagtgaggttccgtaacattccgtaagtcaaaaaaggggatgattatgtaatccgcaaggttccgtaacattacggaaagaaaacaagtatcgttacaaaattcgtaagttttcgtaactttacgaanaaagaatca

SEQ ID NO: 183616 - DNA, 323 bp, Glycine max
  unsure (1)..(323): unsure at all n locations
ttctttttgttctcctnctcagatagttcattcatatacgtgagcactccttcttctaactcaaaggcctccttcttttcaagtatctcatccaacttggcctttntacgtgcttcattcaaagactacttcttggacttagcaaatgcaacttctgttatcctcaagggagatgaagctagtttgggtgagacttcaaaggtctaaggtggaaggtctanggagggtaagggttgaggtgtagggcttttaagaatcacatcattagattcttggttctttggaggtgaggatgaattgagtttaaatggtgagggaggtgt

SEQ ID NO: 183617 - DNA, 376 bp, Glycine max
  unsure (1)..(376): unsure at all n locations
gtccctaaaaccctctgtgtaatcaaagctntatccctgaaaccctctatgtaaatntgacagcctcgtctctcccttcctgaaaacccactaaaaactgcctaacccccctgttgttactccataatttattctgcaataactgcttaaggcagatacatatgggcctaaatcactacagattcagttacgattaaccctttgttcctaactagggtttcgaaacatcacaacagaggcaaaccattgaacaatggattttcatcattaacatacaacagagacataccttcgatggaagcgcagacacgaactccacaaacgcgaactcgacaatgtggttgcagtgacggaagcgcaacccagtttgcgacaa

SEQ ID NO: 183618 - DNA, 448 bp, Glycine max
  unsure (1)..(448): unsure at all n locations
agctnngtgtcaaaggctgacacanagccaaccggtgtcttctgctccagcttataggttgcaccccacagtgagtcagcctcactagaggtgtacaagtgatcaagcgagacgtgagaggacgaagaaggcgacacaaccgctgccaaaaccacaaaaggagaagccaccaaagacataaagcaaggaggtagtaccatgggagcaccagtggctgccacaccaacacttaataaaggtgtcatgatggtggacacaacaccacagtagaatcaaactaagtggctggcacaatagctttaacagttgcaggggtaacctcttgagcaacaacaacgggaggaggtgaaggagcatgagtagcagcgatagtagtatgagcctcaatggctggtggagctggaggcacatcttgcacagtcaaaagctgactcgcagtaggcatcac

SEQ ID NO: 183619 - DNA, 401 bp, Glycine max
  unsure (1)..(401): unsure at all n locations
agtcacctgcggcatgcagcttccagcggtagaaaatagggtcttaaaatttatcanattctgacaanagccgagaagtccgtggatctccttcggggcggagtatgtgcccgccattgctttggccttggctagcaatcggggaagttcttgactcccgttcaaggtaagagctaatcagtccatccacattgttgcctcttggtgtaatgagtcgatcaccctgtctctagcctcctttaccgcgtacacttgggcatactcgtccgccaccctatactcgtgggccggggctagacttagttcctcttggtacttgctgatgatggctaacatgntggtctctatctcgcataaacactgtaacaaacttctcttggacctcgagcaatcctttaact

SEQ ID NO: 183620 - DNA, 470 bp, Glycine max
  unsure (1)..(470): unsure at all n locations
gatcctctaagcacctgcngctgcagcttaacattcaatttcgagcgtctcgatatatttctggactcaatcagacatccgagtaaaaagttattgtcgtttgagttggctcagaggttcaacattcaatttcgagcatctcgatatattacgggactcaatcagacatccgagtaaaaagttattgtcgtttgaattggctcagagcttcaacattcaatttcgagcgtctcgatatattacgggactcaatcagacatccgagtaaaaagatattgtcgtttgaattggctgagaggttcaacattcaatttcgagcgtctcgatatattacgggactcaatcagacatccgagtaaaaagttattgtcgtttgaattggctcagaggttcaacattcaatttcgagcgtgccgatatattacgggactgaatctgacatccgagtgaaaagttattgtcgtttgaat

SEQ ID NO: 183621 - DNA, 450 bp, Glycine max
  unsure (1)..(450): unsure at all n locations
gctttcaattcattctatgtacccgtggtgtgtccacatttgtttcatgtanttttattctcattttcatttgctntttatacctcttnttgacgtgcttaagccatttgttaaaatcattgctcgcttaatctaaaattaaataaatttccaccgatcgtatgaattgtattatccgttaatttcggttaaaatgaattccgaccgttcggtcgtgctgtaaccacgttggaaataaaaaaaagaggcaaaataataatataataatataaaaaataccttttagtaaagtaaagcgaanaatcaatcggacgttttctccttgggatttctcattcttaattgaattgactaataactaaagcgaaactaaggctaaaatcgaactcgcctagtcaagctcgtccacaaaaatagggttttgaaagttatcatttcagtttcttatta

SEQ ID NO: 183622 - DNA, 473 bp, Glycine max
  unsure (1)..(473): unsure at all n locations
agcttcatgatgatgaatcatgttgattctagtagntntgatgataacagagatgatgaccaatagcccaagagaatacaagagaatgatntcaagaacaagattcaagaatcaagagaagtttgatttcaagattcaagaaaagatgaattcaagattcaagaaaataaatcaagaagacttcacaagggaagtattgaaaagatttttcagaaaacaaccatagcacaattttgtttttcaaaagagtttttctcaaaattttctaagttaccagagtttgtactctctggtaatcgattaccagtttcctgtaattgattaccagtgacaaagggtgatttcaaaagccttcaattgatattgaaacgttccaattgatttcaaaatggtgtaatcaattacaagatattggtaatcgattaccagtgtatatgaacattgaaattcanaatcaagtgtgaagagtcaca

SEQ ID NO: 183623 - DNA, 432 bp, Glycine max
tactatccacagccattcatagatgcacgtcaacaatatttttttcaatctctacaattcgaaaatgatgatgatgtttacacaatgttaatgttaatgtgcaatgagcaatacttgtgtgctgcccctatagaattattatgtaccatcaatagaacacctaatgctatacttaatctgctttaatccaccatcactcctactcacgatgcaattatgtgttacaacgggtagtggaatatactacgtcaaggtggagttatggattactcatctactagaacatatcctataagatttgacattccttcggggatgtaacatggacaaactcatggatttaatcaagcaagttgcacctataaggtgttcgcttatataatttaccaatcacaattggtcagaaaattgtcttctgcaactacgcatgct

SEQ ID NO: 183624 - DNA, 489 bp, Glycine max
  unsure (1)..(489): unsure at all n locations
agctngataacacgcagagactaacgtcttcttctgcgaccttcctcaatcctggccgacaagcccgttgacacgtggagatttatgtcatcttccgcactcacaagatctgtcatactgactntttagtaacgctgacggccggaaattcccgagtggttatccgtataaactttttggtgtctataagacgaaaagccagatagcacgcagagactaacgtcgtcttctgcgcccttcgtcaatcgcggccgacaagcccgttgacacgtggagatttaccttatcttccgcgctcacaaaatctgtcatactgactnttgagtcacgctgacgggcgaaaatacccgagtggttatccgtataaactntttcttgtctgtaagacgaaaagcctgatagcacgcagagactaacgtcgtcttttgcggcattcatcaatagcggccgacaagacccgtgacacgcagagaattacgtcatcttccc

SEQ ID NO: 183625 - DNA, 451 bp, Glycine max
  unsure (1)..(451): unsure at all n locations
agcttgtgtnttcaattacgatcgtctcgatatattacgggactcaatcggacatccgagtaaaaagttattgtcgtttgatttttctcagagcttcagttttcaatttcgagcgtctcgatatactgcgggacacaatcggacatccgagtcaaaagttattgtcggttgaatttgctcagtgcttctgttttcaatttcgagcgtctcgatattttatggggctctatctgacatccgagttaaaagttattgtcgtttgatttgtcttagagcttcccttttcaattacgagcgtctcgatatactacgggacacaatcggacacccgagttaaaagatatntgtcgtttgatttgctcagagcttctgttgttaattacgagcgtcttgatatattacgggactcaatcggacatccgagtaacaagttattgtcgtttgaatttgc

SEQ ID NO: 183626 - DNA, 462 bp, Glycine max
  unsure (1)..(462): unsure at all n locations
agctagcacaacaagtaactgaatctagttttggtactaaatgaagtaactaactaactaacttccactaatatataaagttaatactcagaaggatgggatgggccttgattaggcccatctaatcttccttattaaactgattacacaaagcaaggcccaaattcgtagcccaattactcaagtgcggaggttctgacttccaagcccaatntgaccctcaaaatggaagaattggaccaagcttatttgtgacaacattgaagatattgtgtcttatctttcaagggactacccactctccattaggagtcctttagtgtcctataggccctgcacaagacatatatatcaagtaagcacaaaatacttataattaaccacaattatcaattaagctcaatcattcgcctaagatctaaactaaattaaagtgagaaaatgatgcgcaaagagtttcat

SEQ ID NO: 183627 - DNA, 434 bp, Glycine max
  unsure (1)..(434): unsure at all n locations
agctgtctctctcctatttgtatatatatatgtnatntgaatgaaataaaactaagcaagttagtgaaaagttttcctcctcacatattcaaagcttcaagtggacagactaccaacaaggatgaatctgcataggagacaagtacagattcaggatttgcgttgtcccttttgcaggggtgctgaagaggaggcatctcatctgttcttccattgcatcttgatccaaccaatttggtgggaatcgatgtcttggttgaacttaaaaagtgcctttcctctcgggcctaaacaacactttctccagcatattttcatccangcagaagggttaagggttaagaggtggagatattggtggttggcggtaacttgggctacttggaaattaagaaacagaattctattctcaaatgccagaattgatgctaata

SEQ ID NO: 183628 - DNA, 502 bp, Glycine max
  unsure (1)..(502): unsure at all n locations
agctnggaacgggaagaagccatcagcaaagcacctaagggtctttgtatctatatgctacattcatattccagacttgaagaggcataagcttaaagacaagactatacgaggtatcttccttgggtatagcaatatctctaagggctaccgtgtctacaacttgcaaactaagaaactcgtcatcagtcgagatgttgaagttgatgaatatgcttcatggaattcggatgaagaaaaagtggagaagaatgttcttatacccgttcaactaccttaagaagaagatgaggaagaagacccaggtgaaccaccttcacctctatcacaacaacaagatcaagaactatcatcaccagagtctactccaagacgagtaagatctttggtggacatatatganacctgtaactnggccatacttgaacctggaagctntgaagaagcgtcaaagtaggaagtatgggtcaagggcatggaagaagagatacagatgatcgat

SEQ ID NO: 183629 - DNA, 478 bp, Glycine max
  unsure (1)..(478): unsure at all n locations
cacctgggctgcaagctgggaactggcagctttgtagttgtactttttgtgancataccatgttttatcaaatgttctcaatatttgaattaactattttctaatccgtgaattagcgccaagagtctgagacagctcctgccaagttttatgatgctcctattgatgaagagtacttgataggtaggatataaggtgtgggagctgaagggcgatggttggaatattcaaaaatataatatccatgttctccacattgttctttaaagactatgtaatgattntatctgacagataatagctcttccatggatgctttgctcactctggctgacatgtgtctattggtatcaacatctactatggaatctggcaagaaaggaggttttggtttatgagacatgttcatactcactcgttcacataccaccatagagagtttattatgcatctatattaattcacttagttaagatat

SEQ ID NO: 183630 - DNA, 362 bp, Glycine max
agcttgaatcggacatgcgtgtgacaagtcttgaccatgttgactcctcaagagcttacgttgttcagtgtcaatcctgtcgacatattatgcacccgaatcgtacatcagcgagataagacatgaccatttgaatctctcgagagctttcgatgtttaattgccagcgtatctatatattataacccagagtaggacctcagtctgactagttatgaccagttgaatttgacgagagctctcgttgttcaatggctaatatcactagtgtgtgaggcgccttaataggacattctagttaaatgccatgaccatttgattgtgtgaagagctcccgtagtgaactcatagcgctcgatatg

SEQ ID NO: 183631 - DNA, 423 bp, Glycine max
  unsure (1)..(423): unsure at all n locations
aacgaaagcaatatccatccagatgaccttaatatatcacaaaattgacattttgtgccaaaagaatacacttgcttttaattccaagtaaaatcattaacaaattcctccaacaaaaaaatactgacaatttaatccataaaatttttactgtacgttacgtccaacaatgatttcttatcgacattattgtccaatctaatcagcacgatcacgttggcaatcaatantgtaacaaattttgtccctctgtagacaatctttttaacggttagggaagaaagttaacgacaggatatntntgtcacacttttaacactttcgaggaccaaatattgcattaaatcttgaatgacacatcatctacgactactctctaggaataaaatgatatttcgcaaaaattgaatagacagctctata

SEQ ID NO: 183632 - DNA, 518 bp, Glycine max
  unsure (1)..(518): unsure at all n locations
ccggatccttaagtcacctgcggcatgcaagcttgtagaattcctcatatgtcaatatgttggagcanagtgggtgttcaaaaacaagttggaaaacacaggtaaggttatggngaacaatgctatgcttgttgccaaaagctactcgcaacaggatggtgtagattatatcaacccttgctcttgatgctcttctataagcaatacaccttttactatcctttgttgcccatcatggtatgatgttgtatcaaatggatgtaaaaagtgtgttccttatatttattattaaggaagaagtctatgtggcacaaccccttgggtttgagagttctatctaccttcatcatgtgttcaaacttaataaagccttgtatgatttaaaacaagctcctcgagcttggtatgaaaagttaagttcccttttaactgaaaatgggtctatatgagggaaggtagatactagtctatttcacaaagattatggaaatcaattcctaatcgtccatatatatgtg

SEQ ID NO: 183633 - DNA, 458 bp, Glycine max
  unsure (1)..(458): unsure at all n locations
agcttttgaaaatccttgttagataataaggccaagcttaaactataaaaaanagcttgttaagcttgacaagccggcctgtttaactaacaataataataataataataataataataataataataataataataataataataacaataactttattttatcaaatcttatcttatcctgattttatttcatctagattttattttatccagattttattccatgtagattttattttgtccatattgtatttcatccaatcttatcttatcttgttcagattttattttatttcgtttatgggcttggacttaaaatagatttggtaagcttggggctgaggacctatataacagcaccaaggttttagtttatggagtttttttcggagaggagaataattctaggattttagaattccagtttttattactgttcatgcacactgttcacgt

SEQ ID NO: 183634 - DNA, 451 bp, Glycine max
  unsure (1)..(451): unsure at all n locations
agctaggttatgtgttgaatttaactntggtttcacttatttacttttaatctcattaaaagacgacttgtgaagtaaatgatcggttgaaactttattttacaatgataaaatgagattatggcgcanacgatcggttgaaactctctttacataaagaaatgagatcattgatggtagaagaatgagatgaagatgtgcaaatcagcaaaagggacccctaagggtgcatggagcaaattcaatactttaaaataaaaactaaccggttaatgaacgaagaatgaatgaagaacaatgtaggaatcaatcacagatgcgattcgaaagtgcctcgacctcattntttctttttttttctccttcttctgcttaatttcactaattctttcaatgttgaaagcctgaacccttttccttcagccccctcacgcctatttataggaaatga

SEQ ID NO: 183635 - DNA, 473 bp, Glycine max
  unsure (1)..(473): unsure at all n locations
agctactgggcagtgaagacttccaacttctctatggatcaagctggtgaggaaagaaagttgcaactgagtgagttagatgaaatccgcctagaagcctatgagaatgccaagttctacaaagaaaagaccaagaagttccatgatagcatgatagttaagaaggacttcatggttgggcaaaaagtgttattgtataattctaggcttggacttatgagtggtaagttgaggtctaagtggattggtccttctgttgttactaatgtttttccttatggtacagttgagatcaaaagcgactccacaaacaagagcttcaaggtcaacagacatcgacttaagccattcctcacgaacctttctttagtggacgtagtggtggaagagacttccttactccaccctactcttcctccaccatgacttaggagagttttctttttctatctncttctttgcttctattacac

SEQ ID NO: 183636 - DNA, 456 bp, Glycine max
gctagatgcctcagagtttgtatcttttcccaacgtgcaatcaaacacaacacctgacatgtgtgactaactccatttagaaatcaacctctaaatagtaataatactgttatttaatggttaagcttgttattatgtttaccttctctacactaccaatacaaatgtatccactgttctcgtcctcataacgaatatgatcaattgcgacttctagtgccttctctctcagcatggaaaagggccagcaagttagaagaagctctgccacgtgatgaagagatgcccataacatatcttgaatcagaggatgtgggaatagagatcctcctgaaattgatattgactatatcaatacatcgaacatcaatagtgccttccttacaagtcaaaaattatcaagtttatttagtgaaagctaatcaattctttacttctgataaatgaagatctctg

SEQ ID NO: 183637 - DNA, 447 bp, Glycine max
  unsure (1)..(447): unsure at all n locations
gatgatgcanattgttttgtagctacctcatgcactcctctaatgactatggcatcatttctggcactaaactgctgggagttggaggccatcttctcaattaaatttctggcttcagtaggagtcatgtctccaagggctccaccactggcagcatctatcatacttctctccatattactgagtccttcataaaagtattggagaagaagttgttctgaaatctgatggtgggggcaactagcacatagtttcttaaatctctcccagtactcatacaggctctctccactgagttgtctaatacctgagatatccttcctgatggttgtggtcctggaagcanggaaaattttttctaagaatactctcttaaagtcatcccagctcgtgatggaccttnggagcaggtaatacagccagtcctttgccactccctctaatgag

SEQ ID NO: 183638 - DNA, 402 bp, Glycine max
  unsure (1)..(402): unsure at all n locations
aaacatgctctantttgatctcccactccaagtaggcctccggatcattctttcctttaaagggaggaatgttgagtttaataccatcaattcggttntgtctaggaacaccatcattccctcttctcctcctttcttcttcattatgatctttgttctccatttgatccaacctttcatggagcgcatcatcttgttgtttcattaacctctccatatgttgcatcaaagcttgcatttggaattgcgaaagcccccctccattattaggatttgttcctgccatctcaaacaaacaaatcaaacgttacaagacaattatatgttgctgttgaatacctcacccactcaagtgtatcacacaattatggccacaacaaagaacaattcaccaatatgtgt

SEQ ID NO: 183639 - DNA, 529 bp, Glycine max
  unsure (1)..(529): unsure at all n locations
tcgacctgagatccttaagtcacctgcggcatgcaagcttcagaccaaagcaattcaaaatctatgtatctaatacccctctatttagtggattttcaaggttagagaagtgaaaatgagaatggggtaattttggagcaaactctcatctcaaacaagtctataacattaatataaacttgctcaaacaggttttacgatgaaaactccaccgaatcaaaatttgacccctcaacacccaatttaccctagaaatggctcttgctttcactttggtcactcattttcctcatttgctcagcccaagctntcccacaagtcctaaatgacattttaaactaggatttactcactttagcctccaattaccactaaatccagatttagctnttcaaaccctcaaagcctcacacttttccactcctatcactaccattctcactntttaaccctaggttagctctacccttcatctctatncaatttctatcagcaatttcagcacacaaccatcacanagcatcatcat

SEQ ID NO: 183640 - DNA, 508 bp, Glycine max
  unsure (1)..(508): unsure at all n locations
gtcacctgcggcatgcaagctntcttagnctcgctctcaacaattgtctaagcatgtggaaaattgtttctactaccatatngtccgatggcagtcaaccaagtaccatggtatttgtcagttaaaaatgtctcatctacttgtacaagtggcttgcaatatttgaagtcttcaatgcatggattaaacgcttaaatacacgattaagaatcaccctaggagggtcattgtcaccttcctccattgaagatgaagttnntgtatttagtatggtacctggtacaaagtgtcgagtagctgttaaccatacaggcaggtaattgtatgattgtttccaacttccaaatgccatttcaagagctatttgtttagatgtccatatttttttgtatgacacagtgtaaccaaactattgatgcatgtctgcaatcaaaggtttgatttcgatacccgaatttgtttcactatataacaatattatggcaattcaaaagactctaaccaacat

SEQ ID NO: 183641 - DNA, 456 bp, Glycine max
  unsure (1)..(456): unsure at all n locations
atcgttgcatctcaatccaagctttctataatgagcatatntgtggatcattagagtacaaaaagaaagagctggagttcctttctatgctgagtcaaaaatgaaattaagtaatgaagttgaatccccaagttacgaaatcagatggctacttcatttggagtacaaaacaaaccaatttaccaaatcctgcttaccaattcacaatatgattaattatttaattatttaactaaaaacacgaattttataatatgatgtaattatttcctctttaaaatcattttttcgaagacaaagtntaattataaactgttcgtcttaattaaactttagatttgaagcaggggctgtctgaaagttcacaaattctcacccgtatatgctagaactatataatgatgggtgaaccacattcaaacgtgccgngatcaatgagtcttatttaagcataca

SEQ ID NO: 183642 - DNA, 395 bp, Glycine max
  unsure (1)..(395): unsure at all n locations
gcttatccttatggcttgcctccggacttcactccttctgccgccccggaagacttaagccaagcccctactttcgaagggcaactcccaccttatgacgactatcccaggcaagaagatgaggaaggagatacccatcttggccccctgctccacctcaaagatccgtcccccaatgaactaccccaaccgaacatagtccgccatatcccggcttcacccacgcccataaaagaatctgttcccttcgcggaagataagggaaagattgaggcgcttgaagagaggttaagagcagttgagggccttggcaattacccattctcggatttggcggatntatgtctcgtgcccaacatcgtcatccctcccaagttcaaagtaccagactttga

SEQ ID NO: 183643 - DNA, 481 bp, Glycine max
  unsure (1)..(481): unsure at all n locations
gcgtctcgatatattactggactcaatcggacatccgagtaaaaacttattgtcgtttgaatttgtatagagcttctgttttgaatttcgagcgtttcgatgtattacgtgactcaatggaacatccaagtaaaatgttattgtcgtttgcatttgctacaagcatctgatttcaatttcgatcgtctcgatctattacgagactcaattggacatccgagttaaagtaatttaggtttgcatttgctacgagctttcgctttcaactacgatcgtctcgatatattactgcactcaatcgaacatcggagtaaaaagttattgtcgttagaatttgtcagagcttccgtttcaattacgaacgtctcgatatattacgggtcttaatcggacatccgagtaaaaagttattgtcgtttgaattngttcagagcttcgataatcaaattcgatagtctcaatctattacgagactccatcg

SEQ ID NO: 183644 - DNA, 469 bp, Glycine max
  unsure (1)..(469): unsure at all n locations
agctagaagaagtatngtcttttatgtgttcacctctttgagtggcatttgtattgattattgcatcttaatctctatctatctatatgtacatcatgcatcatcatgtaaaggtaggaagattgtttctaaagttagaaaattcttcagtgcataatactctctattttaatcgattaccaggttggttcgtatcgattacaagagttgcttgtagcttgtagagagattatagtttcgatttaatcaattactagttatctataatcgattacatagttcagttgataccatgtctggtttatcatgagtctctgccttaattgattaccaggagattgtaatctattactttgttcttaaaagtgtcccataagtgttcgacggtcggtaagtgcaccggatcgctcaagtagtataaaacagtaagtgaatactgagtatctgactctcgagtctcacaacatgc

SEQ ID NO: 183645 - DNA, 484 bp, Glycine max
  unsure (1)..(484): unsure at all n locations
agcttgtagaatggctagacacgatacatgtcagggcttggtttggttcaaggataaaagggatgccccacattatttccatgacacaaatgcaaaaatgatgatttggaaattntatgcaaaactggtcatgcatgcacctatgtggacgctcaagtgtcaaatttttatggtcatgtgatgctagggctcaagattcatttcctctattttaaatcaacccaatgtttccaaaatatgttcttttatcaatttgtgcattcctccaagtccctttcgggcgtctggggaaattttcacagcattcacccttcaggtgtagacacatttttctcttcaaaaatcggttatgaatcaatgaatttttttcaaagaaaagttggaaatcatctcttttcaaaagcatgtcgaattttagctagacaacttattttctcttttccaccttttccttacttgctntctttttcttattggtctcttt

SEQ ID NO: 183646 - DNA, 486 bp, Glycine max
agcttgcggtggaaacagatatccatttctccaataattctgtatctcaatcatcaaatgggtactgctcatacctgattgtacaatcatgcagcaccgaacgagctcctacacgtttcggacacccgttgaacatggctgttttagaagcaccaagacaggttttgcagtcagtggcagtcagattaaggttgcaagcagcatgtccataggcaaaggcattaggatatggagaaatgttgtagtaatcgtagtttttcctggttggagtctctgtctccaattctctaacaacataggataaactgacagcaaaaggatcacctgaggtgtacgccccaacgttgcacagaatgacagtgatgttggtgttgggaacactgtcagcaacactccacaagcacaacaaaccaatcgcagccgctgcaatttctgaaggaatgcccatcttcttatggtcttcgattaatttctataacacaacac

SEQ ID NO: 183647 - DNA, 394 bp, Glycine max
  unsure (1)..(394): unsure at all n locations
agctnggccaaggtggatntggaattgtttataaggtattaagatttatcttttcatggaatcacacatatcttgataatattttgagaattacatatggactaaactttgaaatattgtatttagggtacgctttctgatggacaagaaattgcaattaaaagattgtctatcaattctaaccaaggagaaacagaatttaagaatgaaattttgctaacagggaggcttcagcaccgaaacttagttagactacttggattntgttttgcaagaagagaaaggttattgatatatgagttcgttcccaataaaagccttgattatttcatatttggtacgttacaaatttttgctttaattttaccttcactctgatgaaataaagagttat

SEQ ID NO: 183648 - DNA, 456 bp, Glycine max
  unsure (1)..(456): unsure at all n locations
agcttgaaatngaacaagggaagctctcttctactcaaatgatcataacttatcacacggaggttcgattcaggcacataatatatcgagacgttggaaattgaagaacgaatgctctccagaaattcaaatggtcataacttgtcacacggaggtccggttcatgcgcataatatatcaggatgctcgaaattgaacaacgaatcctctcgagaaattcaaatggtcataacttgtcacacagatgtccgattcaggtgcataatatatccagacgctcgaaattgaacatcggaagctctcgagaaattcaaatggtcataacttgtcacacggaaggtcgattctggcgcatcacatatcgagacgctctaaattgaaaacacgaagctctcgagaaatcanatggtcataacttatcacacggaagtccgattctggcgcataatatatcga

SEQ ID NO: 183649 - DNA, 437 bp, Glycine max
  unsure (1)..(437): unsure at all n locations
ttcatcaattatttcaactaccgtaaaagactccaggtaattaattaagaatccacaccattttcaaaatatgcatgatgatacaaattttgagcttaattaattaagaatatgtattgtgggagatactaattgattttctcttatttgggagaaagaaaggagtataatttagattttggaatatgaattgtctctacttgtttttttgaatccaaaaaaggaacatagcctaaaaactcggtgattatatgtaacaaatataattattgctcctaatctcattgacatcaaagattaagcatttntcttgtgatcaggcatggaagaaaaatgtgaagcanaatcttgctactgcggagtattgcacaaatcaacataaagattgtggagatatgatgaagcaagctaaagcgaagcatttgtttaatcacatg

SEQ ID NO: 183650 - DNA, 379 bp, Glycine max
  unsure (1)..(379): unsure at all n locations
ctcaatgccaacaacgaaccacctaatgcacgacaaacaaacctccaaagaaagaaaatgacgtcgagaggagaagaagctcgaacgttgtcgcgaaaacaagcaaacggaacagggaaaaagaatgtatgggatgcgtgaactanagtgttgagtgtataggttttgtattttaagtgaagggcattntcacccattcacttaaaatgctgggtgcaccagcaataatgctaggtgcacctagcaacacccctctctttttcttgagtgggctggacgctactgagcccgacagttgtggcatggtagcaaggaaaaaaggttgtacttgcaccgaaccanaaccgcacggcaataccattcattcagcaacagcgat

SEQ ID NO: 183651 - DNA, 489 bp, Glycine max
  unsure (1)..(489): unsure at all n locations
agcttcacactgatggatgataacgtggcgggcacggcaaggggctttttttattatttccaagcttgttttgattaattttttcgtgtttcattaattttcagtcgttggaatggacaagccagggaagcaactagagtacttcggaacttgacctattaatattatacagtcaaacaataactaatccattttagtgaaaacgatgtccactaatagcaaaaatcaattttcctttttcaagtgaaaaaatatatatccttcaatgactttaatgcatatagatatatagtatatattttaaaattatcatgaagattttntaattttctagaatactagtatgttttaactaaaaggaatgttattgttattttaattttttatgggaaactcttanggaaaatcattcaaaaattgaaacataatatattcttccatgcatgtatatnagtaattatgttaaaatcttctatcttctcttataat

SEQ ID NO: 183652 - DNA, 461 bp, Glycine max
gtcacctgcggctgcagctttagcggttgcagagcctatgcttgaaccaaataggctggtatccaaccaagcctaaatagttcgattgaacacctgtacgacaagacaggatctgtggattcaagtaaaatgaccatatctcgttcacttcttcttcattgtccggatcgacagcaggaaaatagtcagtgaaccaggccgggccaacctctcgactaatgaatggagcatgttggggaagaaacttgtcaaagctcatataaatcctcatgtactttaagaacagtttttgtgggttttgatctaaggtctcgggtgtaatcgaagtgctctctgccttcgacgagcgattccaacttcttagcataatctgtgggattataatcccattcttgtcgaaagggattaaccacatggaaaccactatgcccgcctaaaagaaaccatcttcattcttaacg

SEQ ID NO: 183653 - DNA, 442 bp, Glycine max
  unsure (1)..(442): unsure at all n locations
gctatgaataaactcgtatatgataaattcttatggaataantatttgatngagtnattactcaaacatgttcttaataaaaatatcatttctggcttctggaaatagaaacacgcccccatgcaactgttgaagtggaaatatcagaagatatgcagcttgtgcattttgatatcaataggtacttggctctctctttgtaagagtaatgatgttatctttcccatatactttctgaaagtgattctaattctttcgtatcatacattcaagcgtcagtgatactatgatggtcaaacatctgaacatgtgtcatattcatagcatctttataatagaactggttataattcaaaatcttgtgacttgtatcgttacgtcttactcctgttttcaatctgtacgcactcctttgagtagatgatgataactatgttctcaa

SEQ ID NO: 183654 - DNA, 468 bp, Glycine max
  unsure (1)..(468): unsure at all n locations
agcttcacatggagctacgtcaacaacaaagagggatatggttagcctggttgaaagaaatcatggtactgtaagccaacaaatttatcttgtcccagtgagttgtgtgaacttatttgtgagagaacatctatttttaatttcttaattntgcatcattctcagactgttagattaattacatgaggtggaaatgatcaaggccatgtttctttttatttttagccacatagccaaaaagccaacctttgatgataaattatctcttgcaccttaattgatccaaaattgataattatttttctaaaaagacactaagcctattttttttcttcagatatctatgaccttgttntagggttctaagaaagcataggggttttagtcatgatatacccctaatttgggggagggctaggataaagatcatcttangaaggtaaaaacaacactcaatatggcaccctc

SEQ ID NO: 183655 - DNA, 458 bp, Glycine max
  unsure (1)..(458): unsure at all n locations
agcttagcaaatggacctgagtgttgcccattttcattatatcttccgtaatacttatcacctctatcatatctaataattttcacatttatgtctaattgccattntacttcattgtagtaaatttctaaggcatccattgcctaagaaatctcgggcaataagtagacataaccgtaacgtgaataatcatcaataatggtgataaaatatcattcctttctgaaagaactaacatcaaaaggtccacaaatatcagtatgcacaatttcaagaaactgagtgcttcttgtagctcctttctttgtatgtatagcttgttttcccttaatacaacccacacaaatatttagatccgtacaatctatataagaaagaattcattatttattaatctttccatcctttctctagaaatgtgacctatacgtttataccacaagataacagatcgttca

SEQ ID NO: 183656 - DNA, 473 bp, Glycine max
  unsure (1)..(473): unsure at all n locations
agctntaatntcaatacaatgaagcatgacttacgcctaggaatctaagttttggttttgaatgtgaaaaggcatgaatattatgatatcgttgagaggttgttattagaatttggctgccccatgaggaataccttgcacctaggtagcatggaaaatacctttcaacggtatgtatatatgtgaatatatatagcatggaaatgccttgcaaaatgttgaataaaatgccttgcagaaagttgaataaaatgccttgcaaagtatgaatatatatagcatgaaaatgccttgcataatatgagtatatatagcatgaagtgccttacaaagtgttggatgggtagcgtaaaagtgtttctcataatatgtgtatttgtgagtaggtaacaaaagaagccttccaataaatgtgtgtatatatataagattgtacatgaacagggttgtcacaaaaatatttacatggatag

SEQ ID NO: 183657 - DNA, 463 bp, Glycine max
  unsure (1)..(463): unsure at all n locations
agctagccttaaataatagttaaccatggggtattataaaattgaatttggtgatcaatggaagcattntcatatttccaggcagctttattagccttggcctcaacaaatacatcaaagcttctatagtgtcttcaagtgcaaaagtagcatttggatgccacaagaacctggatgacacgaaaggcagtgacaatgaagatattagaaatatacaattaaaaaccttaaccagaaaatagaatctgganaatgaatatattcacatttttttattttctgaaaaaccaaatccggaacattaaaatccttaaccagaaaatgaattccagagaatgaatntattcacatgtntttatattccagaaaaccaaatccggaccattaataaccttatccaaaaatacaattccggaattatgagaccataattcaggaataacaaatcctgaagctgtccaac

SEQ ID NO: 183658 - DNA, 449 bp, Glycine max
  unsure (1)..(449): unsure at all n locations
agcttcatgatgaatcaagattgattcatagagttntgatgataacaaagataagcaagcctcatgatgaatcaagcttgattcanagagttttgatgataacaaaaatgatgacaaaaagctcaaaagtcaagaatacctcatgataacaaagatgatgatctcaagaatcaaagaatgagttcaagattgaatcaagaacacttcaaggttcaaaaggaaatttgatttcaagaatcaagaataaagtttcaagattcaagttccaagaatcaagatcaagattcaagactcaagattcaagaatcaagagaagactcaatcaagataagtattaaattntttttttcaaaaactgagtagcacatgaacttttctcataaaccttntaccaaagatttnttactctttggtaatcgattactagatggttgtaatcgattaccagt

SEQ ID NO: 183659 - DNA, 478 bp, Glycine max
  unsure (1)..(478): unsure at all n locations
agcttgatgatgagactatgtgacggttgtatttcnttgtagccggcttattatgaccttgcttgcaacagtatgtatgcttaagagggattgacattttacattgagaaattaaaaggtcatctgatattgttgggtatactagaggtcaagtatacaacaatataaaatcgatttgttgattatatgccaagtaaatcctgcgtggatagggaaagcctctctgaatacttgatcatcacatccatctttagaaggaaaattagttgcgctcaaattttcaaagatgacattatgctgtgtgactatctctctcattgattgaaaggcactaatgatatatttcatatcccttatttatgtccattaaatgttgatgaggttttgcccttggttcagcatgtaagttaatatgaggttcttttgtttgcctgctactgcactttgttctgagtcatctaatctttggacatttccc

SEQ ID NO: 183660 - DNA, 391 bp, Glycine max
  unsure (1)..(391): unsure at all n locations
tttcttgactagcatcaaatcagagaattaaacctggacatcttntagaaatgcttgctgaattaagacaggcagaaatccagtgtctccatttgggacaaaaacccattctttgcagcatatatatccaaaaagcccatgagactgagtcataggccttttcaaaatccaccttgaaaaccatagctggccttttgcttctacaagcttcctcaatcacctcattaagaactagtacgccatgcaggatgtgtctgttttttatgaaagttgtctgcctctcatcaataagaccagatatcacttgtctcaatctatttgctaataacttagctatcaccttgtacatacatccaatcaaggagattggtctgtagtcatcaaatgactg

SEQ ID NO: 183661 - DNA, 416 bp, Glycine max
ctatgcaaaatatatatgatcatattcaaaagatacaagagctttcatgtttggttacatctaacctcttactagtgagtcagtcactcatgaccataagcaactccaaaatacacatgaaagggaggaagatgaagatgaacaccaaagaacaaaagacagtttttctcctaatacaatagtacaaatttgcaatacatactagaatgaaggagacttattaccataaatgagggtcaggcctatatatacaaaggcaaagtttatattttaagcgacaactcgctcagccacacttctggcttggctgactgatgtacagattttgcttcttcatcaaatgccgccacatattatacctttaagctttagaatttcataatccagcttcaaattgtttctaaatcttcaatctc

SEQ ID NO: 183662 - DNA, 456 bp, Glycine max
gagctttctgttcattgctactagcattagtaatagtagcaggcttctcttccaatatatcaaggtcaagatccaaaacaccgagatgaaattggacttgctcattccaatcagagaagttaagcccattaaaaattggtacagatgatacatgagaattcaatgagttgggaacaggtactgcataataaaacttcacataagcattttgttacatgaaacacaagtcatacatataatttactcagataacaatcaatgtatattgatgttctcctttgggtgacacaccaacacacaacatacaaacatgatgatgctgataaaattttaacattatttgacaattaaatatgcaccaattagtagtatctatttcctctgggtatataaataaaactaatgatacacacaaatcgcctacaataatattcattaattataagaacaactaat

SEQ ID NO: 183663 - DNA, 428 bp, Glycine max
  unsure (1)..(428): unsure at all n locations
atcttagagtcacctgcngctgcaagcttataagtttctggttttanactcttgaaaacttgngctattcatcttttcattctcttctccctttgccaaaaagaattcgccaaggactaaccgcctggattctttttgtatctctcttctcccttttccaaaagaacaaaggactaaccgccttgaattctttgtgtctcccttctcccttgtcaaagaattcaaaacgacacagtctgagaattcttttgattcttcccattcccttatacaaaagtgttcaaaggactaaccacctgagaattcttttgtatccccattcacaaagtatcaaaggtttaacagcctgagatctttgtcttaacacattggagggtacattctttgtggtacaagtaagagggtacatctcttgtagatcaattcta

SEQ ID NO: 183664 - DNA, 503 bp, Glycine max
  unsure (1)..(503): unsure at all n locations
gtcacctgcggcatgcaagctngcttccatnttcagtcatcgaagtcacctcctctatgccaacaatcttgcttgtgacatggttgcccatcttcaccataccaaaatcctctttttgatatgacaaanaanaaatccttcatgaggagtaacaaggaaaaatactccagagtcaattatccatatacaataatcagatgcaatattaaaataattttcattaccgataaaaaaaaacattttcatcatttaatgacagagaagtagtggttccacctttattcttcttctttgggtcaattcaattagcatggatagttccagtcttctgatctttcttcaagaatctaccctcaaacttcttatgggctgactttccgtaatagtagaaactaaagcctttggggtgagacttggatcttccttgtgatttcccatggcctnctttaccaggtgctcgttctcccttctatttcaacaacatttcattgaagtgactactc

SEQ ID NO: 183665 - DNA, 473 bp, Glycine max
gtcacctgcggcatgcaagcttctcctccttccctactagacctttatactctattatccctcctaacatatttgtgctgaaataatccaatcctcatttaacataccaatacctcataacttcaattttccattgtagaatccaaaatttatacccaaccaaaattcgatcaaatgtaacataagttacataacagcttggttccaatttccataggatttttcatgcacctatctaaaaagctaataatcttcacattattttatcagatcctggaaggatcacaaaccgtattcatccccatttttcattcattcacataagaattaacaacaataaagaatagttcttattatacttcaatttgaaaaattcccaatttcccatgatgaaaaaaagagtgaaatctgaaagataaaggaaaacaaatgggtggaaatgggtacatacattgatgtcatcaccaacggaa

SEQ ID NO: 183666 - DNA, 503 bp, Glycine max
  unsure (1)..(503): unsure at all n locations
gtcacctgcggcatgcaagcttctnaggctaagcttatctaccctattttcgatagtgcttgtgtaagtctagtccaggtggtaccaaagaaagggggcatgatagtcattcggaatgaaaagaatgacctaataccaacaaggactgtcactggctggagaatgtgcatcgattaccacaaactcaacgaagccacaaggaaaaataattttcctttgcctttcatggaccaaatgttggagaggcttgcgggacatacttattactgcttcttggatggattctggatacaatcaaattgcggtagaccccaaggatcaggataagatggccttcagtgcccttntggtgtctttgcctacagatgaatgtcatttgggtttatgtatgcgcttaccacatttcagaggtgcatgttggccattcttgcagatatggtggagaaaattattgaggtattcatgggcgaacttctcatatttgagccctcatttgattctac

SEQ ID NO: 183667 - DNA, 324 bp, Glycine max
gcatcaacagaagaatgcaaagcattcaactcaacttccttaaagtgatctggagaaaaagggtgtgattaagtgctattgaaatagaatctcaatagatagaaatgacaatagatgaaccagaatggggaatggtgtatggtgtacaggaaaagtgagagctagaaactgaatatgtctagattcatgtagagatcatgtgaaaagcatactattattgcataacattacagtcttgtgtatataaacttcaccgtatacacttgcaagagaagaaaagaaagtaaattgaattgcttatgcggttgacttacatagaaactc

SEQ ID NO: 183668 - DNA, 485 bp, Glycine max
  unsure (1)..(485): unsure at all n locations
agcttcaagctgcttaattgctccaggttattgcattgaaaggcaaaggtctgtatggnggtcaacagaggagcataaaccacagacccttgcgataggtacagatttctaattcaaggccaactgggttaccaggttaaccaaggcatctagtttaccttcaagcttcttagtttcagctgatgaagatgaattcgtggctacttcatgcactcctcaaatgacaatagcatcatttttggcactaaattgctgggagttggatgccatcttctcaattaaattcctggcttcaacaggggtcatgtctccaagggctccacctcaagcagcatctatcatgcttctctccatgttactgagtccttcatanaaacattggagaagaagttgcttctaaatctggtggtgagggccaactggcacataagttntgaatctctcctagtattcatataggctctctccactgagttgcctaatgc

SEQ ID NO: 183669 - DNA, 460 bp, Glycine max
  unsure (1)..(460): unsure at all n locations
agctntgcatcacataaagatggtagcatatctggttcatgtagtattntcaccataaaatggtggtgcagtaagttggaaaagtttcaagcaagctatagtggcaaattcaatgactagggtggcgtatatagtggaaagtgagaccgctaaagaagttatttggatgaaaaactcatcattgaactttgtgtggttccttcaataggatgatcaattccactattgtgtgacaatactggagctatcgctcaagcaaaagaaccaagatcacaccaaaagttatcatataattagaaagatcattgaacatgaggacgttaagattgaaaaggtggatggaaagaagaatgtagcaaatcactaaggcattatgcataaaggagtatgacaagcacaagtgggaagtatgcatgaagtacatgagtaattggctctaggcaagtgggaaattgttggg

SEQ ID NO: 183670 - DNA, 459 bp, Glycine max
  unsure (1)..(459): unsure at all n locations
gcttgcaatataaaatagctcagcaacttggaagctacaatagagaaatggtccaattcaagtccagctcaatctaaaattgcatacaggcatatctaagcaacaaccaataggtatcaccaaaatttcgatagaccttgcaaaaattacaataagaaattataaaatttaactatatctgccttatcttaataacaaaatgcctaaagatgtgaagctacaatggccctccatatgcatatccaaatgatataaggctataaaagaattactaagacatgcaacattgaattcttagcatttgataaggatntatgagattaatgtttcttaaattttcatctattnttttagagaaatttaaccttttgtctattagagcattactcttatattgtcagtaatatataattgatagctcaacataagtctgccattttttaatgaaaacatatgtgt

SEQ ID NO: 183671 - DNA, 490 bp, Glycine max
  unsure (1)..(490): unsure at all n locations
agcttgtgcaaatcanatcactcctacattntatctctattatgcattgtatgttagtctcgtcctttgtcacgggaagccggaaggtccatatcaccttcttaattgtacacatggggcactgcgcccccaaatgcgcaagtaagaagagataattttccgggctatcgtgtccgtaaaatgcattcatatcatgcatcgcataagcatctcttcataacatcataatggacatatcctgcatttgtccgttatcatattccagcctcacattttgcatgagtcatggcatcatcatgcatatgcgttcaacaaactttttggtctgcaaaattgcataccatttgttttcatgtntgctcatccttgcgttttcctctacaaaacananacaaaaaagggggaagcgtgaaatttcacactacattcttagtttcatgtgttaggcaccacgagccaaccatgtngggatcataaacccgtttcactt

SEQ ID NO: 183672 - DNA, 422 bp, Glycine max
  unsure (1)..(422): unsure at all n locations
aaaataaaaaaataaaaataataatataaaagatggaacaattgaaccttggaatctccaaaaaaaaacctaaccaatagagtaatctttaattcctggactgtttggttcaaaagaataggggagtaaaaaaagggggaatagttttaaaaataaattatttttatattcttataattttaaagcataagtaaatatattttaatctccttaattgaaatattttaaatcttcttttttcttccctccaaatctcctaacactctagggtagcaaagattagatgagaaataaataatcatatttttttttaattatctctttctttctctccccttcatctccctttaacaaaanaaaaatcttgttaaagtgactagtcctgtataggaaataaggataataatgaatataaccaactc

SEQ ID NO: 183673 - DNA, 475 bp, Glycine max
  unsure (1)..(475): unsure at all n locations
gcttctgatatctggttgtaatcgatttatacaacactgtagtcgattaaaacaaagtttttgcctctgaagaaacttttctaacttagaaatgtttcttcacactaaccatgatgatgcatgatgcaatacagatattaaatntactaagacacaataaccaaggtaacaaccaatataaatgccactcaaggaagtggggcatgtaaaagccaaaaacttcgtcaaaacttcttcaagcttttccttgagctttaagctttagcctttaggttgttcaccatgttgctcatgttgcttatctcatgttgctccccctatctctaacatatnagtagttttcattntgacaattataataccaattctctaaatagctaatgaagtaatatcaaagctatactacacactntnntgataatgtcanttcttctgaaatttaatggtttgtagtcggagaatatactatcaaaat

SEQ ID NO: 183674 - DNA, 385 bp, Glycine max
aaagctctgagagaaggagtctcaagacccctactatggaactcggaataagatgaaaaagggggtctcttcctccttgaagggcttgagaaagaagaaaaaaatgaaggtccaagtcttggctctcgaagaggatacggggcaaataaaaatatctgtaaatcctttcttctaacttggtcaataacagcataaggcctaactagttacttttatggatcatcaaaataacgcatatgttgcctaaactttaggataaagctatcacattcaaatctcaaatgcttatgtaaccgatagagggatatctttaatgtttctattggggaaaagtctatttaaagggctgcaacagttaatacaaaaacacacttcagccatatcc

SEQ ID NO: 183675 - DNA, 334 bp, Glycine max
tatcagtggcatatccaacttagatatgttgggagtcaattctaaatattgggatacaattaatcggcctaattctgattctaacagacaatcatcaatcctaaccacatgctgtctattcatgtagagagaaattactatacacaaatgaataaaacccctctgtgttcccatactcaaaatcatgatgaaaactagatgcagaatgtgaaatcctgtaaatttctacccggaattgttgtacacggtgcattatggatggttatatatatatatatatgagtattattcagcgtatgtatatatgtatatactcactgtagaaacaagtata

SEQ ID NO: 183676 - DNA, 446 bp, Glycine max
  unsure (1)..(446): unsure at all n locations
agctnggttgtgatcgaatagtaaagaagagtgttttatctatttttataagattaacagcaaactcaaatgttgctgaatagccaaaacagttttggtttaaagacccgggaaccatgctgattgtgtacattcttaaaaacaaactcggcttgtattgcgtcaaatctaattgtatgtctgctattggtttaaaagtgggttcatgcaattcgtgcaagatggtatcgtactgaataacactcctcttttataaagcaccacctatgttctaagagagctactatacacagcataagaacttggaagaatttcgtcctaattcaaatgagtgagaaataatactagctacttgacatttaaaagtttataatatcaactattcagaaactatgataagaaactctattatacataataacgtttgtatatatatgaattattta

SEQ ID NO: 183677 - DNA, 471 bp, Glycine max
  unsure (1)..(471): unsure at all n locations
gacacaagaaactaagctatgactctggtctngcaattcctctttatatgaggagattaatggtgtttcatgaaaggtggattggttgggttaaaggatgcctcacatcagcctcaatatctatccttgtaaatggaagcccaactgatgaatttaagcctcaaagaggattgagacaaggggatcccttggcccctttattatttgtcttggatgctgaaaggttaacaggattgatgagggaagcagtgtcaagaaacttatttcacagctttatggtggggaagaacaaggtcgcagtgaatattctccagtttgcggatgacaccatcttctttggtgaagcttctatggatacatgtcgtgatatcatggctatttctaaaagcattgaaatatctactggcctgagaatccaattttctaaaaccaactcggagcaattggcaatctaaatatggatcaaatttc

SEQ ID NO: 183678 - DNA, 450 bp, Glycine max
  unsure (1)..(450): unsure at all n locations
agcttgtccgtanaacatcactaagaatcgtttattgtccaacgccttaagcggccctctttgcttttatcagttaatatggaccgttcaaaaacataaaatcaatatgtaactttaccgcttttgtcgacctcaccaagagatcgttaatggtccaacgccttaacttttctctcctttcaaaatcaaaagatcgtttaatggtccaacgccttaaatgaaccttttgtttgatttaaatatatcttgcgaaaaaaggataaaaacaaacttaaccaatgtttagttcttaaagaactgcgtaggtctaatttcctcatcgcaattgaggatacataggagcgagggaaatacccttgtcgaccacaaaaagataaaataatacaaaaggcataaaaagacataaaaacataaaagaggganaataaaacaaattgaagtcatatttgc

SEQ ID NO: 183679 - DNA, 463 bp, Glycine max
  unsure (1)..(463): unsure at all n locations
ntctcaagttntctggttntccaaacctagaggacaaaacttgtgctattcatctttntcattcctttctctctttgccaaaaagaattcgccaaggactaaccgcctgaattctttntgagtctctcttctcccatttccaaaagaacaaaggactaaccgcttgaattcttgtgtctcccttctcccttgtcaaagaattcaaaacgacacagtctgagaattcttttgattcttccctttcccatataccaaagatttcaaaggactaaccgcctgagaattcttttgtatccccattcacaaagtttcaaaggtttaaccgcctaagaactttgtcttaacacattggagggtacatcatttctagtacaagtagagggtacatctacttgggttgttgactgagaacaagagagggtacatctcttgtggatcagttctagtggagggtacatacact

SEQ ID NO: 183680 - DNA, 452 bp, Glycine max
agcttggacttcctgtgttatgggaacctctcctttctcatgtgtcccaaacccaatcacctggttcaagcacgactttctttctgcttttgttggcttgccttgcatagctcgcatttttcttttcaatttgggccttcacttgctcatacaacttcttcacatactcagctttagcctgtgcatccttatgcttaaacatagcaatgttaggcataggcaacaaatcaagaggagtcaaaggattaaatccatacactatctcaaatggtgaacaattagttgtgctatggatagcccgattataagcaaactcaacatgaggcaaacaagcttcccaagatttaagatttttctttaaaacagtcctaagcagtgtgcctaaagtcctattgactacctcagttagaccatcatgttgtgggtgacaagtagtagaaaacaacaattta

SEQ ID NO: 183681 - DNA, 472 bp, Glycine max
  unsure (1)..(472): unsure at all n locations
ngaaagagcccgggtagtcaaagagaagttcaagtccatagtcatcaaagtatgaagagagtatgatgaactaagggacgtcaatatggccaccgatgaagccttggaatgagaaaccaagaaggcccgataggaaaaacacgaccaaaacaagttttgaggggctttatagggcagcaatagtgagctcaagctccgaagaggtgaaaggaatcatcacgggtcaaaggcatgatcttgaaggacgagctaaaggcttgccttatgtcgaaaagaaatttatcccaacagttaagcgagactgaagggaatatgtgggccatcatcgataagtgcaaagagaagctaaatctagcggcgactcacgagcaaaggctataggatgagtacgccaagatatcagcataaagggaagcatgggaaagggtaattgattcattgcaccaagagacaacaatgaagatggaccgat

SEQ ID NO: 183682 - DNA, 450 bp, Glycine max
  unsure (1)..(450): unsure at all n locations
agcttaagggcccgtatcccattatacactttcttattgaatgatgataatatacgtgttgggctgaacattacaattaatctgttggtcaattacatatcaacatgccccgtaaaattggaaattgaaaacttatcccagtgattcatttactagcatgatcgtctcacccgacaaaattacagccttaaaaatattattattataactagtagtcataaatatattgttttatattaattaaaaattatgagcattaattaaatgatcaaagatacaattaatttaaaaactttnttatttttacttgaattaaaaaactgatttggtttagtatgaaaatctataaaaacatgcattataaatgttcaccaacgaagagtatatataaaataatcttaaagactattagtacgtgttgtattagtaccaacatgccccgtaaacttg

SEQ ID NO: 183683 - DNA, 241 bp, Glycine max
tgttacaagccataccattcactacggaataatccatgggataccgagcttcaccaccaatatgtaccttgtgtagaaacttggacaagatgcttccatggacgaaacgaattagggagagaaccataaatggggtagcatgacattgaacgaatgatcatgggacagatactgaactctgagttgtgtctaacatgactatcattcatcatagttacaacagatcgttcacatgcgtcta

SEQ ID NO: 183684 - DNA, 452 bp, Glycine max
  unsure (1)..(452): unsure at all n locations
agcttctacgtatatattaaattaatgcagtatgtcttataataaacgaagaaaaccttggaacccaagcaagatagaagattgagtaagtaacaaatcanagaaaagaatgcgaatttttagtttatttggttttcacttcatctcataatagattataataaaccagaacctttntcaaagtcccttatgaccactaatgatggcagaaccattaaaaccttataagtcaatccactgtaaccggatccgatcgcaagctgtgtatgggactgaacccagaaaaccaaaaaaaataaaagacaattttttgattgactaacgttaattaaagctaacccagcttttgttgagtatcacgatgattagaatctaacctgaatgaaagacgggtaggatctgccatgaaaaggaagaaaggtttagttggaatattttggattcctagagag

SEQ ID NO: 183685 - DNA, 491 bp, Glycine max
  unsure (1)..(491): unsure at all n locations
tgctttanagctaattacaagaagagaaggtgcatggtttcactccaagctngacctttgtggatattgccatgaatatgcgggtgaacaaaagatatggctagttgtatatggatctagaaattagaanaaccatataaaataggttaggaaaggactctagtagctatcttaggattatattttgaaataggaaactaatttgactgcacagctcatgttatttcgtgtgacttcagtcggagtagaatgttaatgagttcttttggcctgttatcttttattaatattgtcggttgtttcttggtacaacaatggtcggccttacggtttcggtgattaaaagaggatagccgtccatgatccatgatccatgatgaagcagttattttaaagaagggtgcagtgtggtaaggtgaaagaaagattggaaatttaaacactaatatattaacacaccatcgcatatatttagaacatgtagtggattg

SEQ ID NO: 183686 - DNA, 452 bp, Glycine max
  unsure (1)..(452): unsure at all n locations
agctntanaaactgtcattctaccctgtgactttttaacatacttaatactttctctaattttttttacagcaggaccaactactttaaacccctcttgaacattaaggtttaaaatgtgagcacaacatcggatatgaaaaaattcaccaccacttactaaaccattattatgcaaaagaagtctttcattcaaatagtcttgtattttatcattagaagaagcattatccaaagttaatggaaaaaaattccactcaatcccccattcttccaaaaaatcatatgtaactttagtcatctcacatctggagtgtggaggaggaaaatgagaaaaaataagcattttactattcaactttcaatttgcatcaagataatgtacagttaatgaaacataacccttagaagtacaagatgtccacacatcatatgtcaagcttatcctactgg

SEQ ID NO: 183687 - DNA, 407 bp, Glycine max
taccaccataggaggccatggataagagcttggaggaatattgatatgaatgaagggagagggagagaagagcacgaaattttgtgctctaaatgagctttgaaatctgaagtttaatattcaaatcatcaaagttgaaaaaaatgcaaacacatgacctctatttatagcctaagtgtcacacagaattggagggaaattcaaatttcacttgaatttgaaattgaatttgtggagccaaactttggagccaaaatttcactaattatgattagtgaattttagttatggttcagcccactaatccaagatcaattccaagattctccactaagtgtgcttacgtgtcatgaggcatgtaaagcatgaaggacatgcacaaagtgtgactatatgatgtggcaatg

SEQ ID NO: 183688 - DNA, 357 bp, Glycine max
  unsure (1)..(357): unsure at all n locations
cactcacaccanggctcagntttcgacaaataaaatcatcgaggcaatgaacactacaatttgtccgcactctgaatacatctgaacattcgattcttaactcacaacaccttgcaaccttgatttctagtctgagaggctgctaatgcaatgtactagagataaaaacaaacatctatcataaactacacgagtcagtgcacggttctcagtatatcacactgaaatagaaattgaagagctggatagctaagtgcgacgctcgattccaagtagacgcactttacatccatactgaagactatcaaagaatagaaacatgacatcatcgaatctgtctcgatctacgttgtaaaa

SEQ ID NO: 183689 - DNA, 450 bp, Glycine max
agcttgccacccagctcgcccaggcgagctatgtttttttctccagaaggcaccgccttctggtagaacttcctggaaggcccaagtgggcctgattactatttgtaccccctgtttactaaatacatccccttgccttttttgctgattctttttccgtaatgttacggaactttacgaatttcgtaaagatacttgttttctttccgtaatgttatggaaccttacaaattacgtaatcatcccttttttggcttccagaatgttacggaacctcacgaattgtgcaacaatgcttccatttgactttcggcatgttacgaaacctcacagattgtgcaacgatgcttccttttgacttccagcatgttacggaacttcacggattgcctaacgatgggtgccaagtacctcgaagtggtcaaacgagggtcgcatcccaacaaatgg

SEQ ID NO: 183690 - DNA, 464 bp, Glycine max
  unsure (1)..(464): unsure at all n locations
tgcatgaattacattctncccctttctcaagcaaattcttaattcttcttgacatcatcaaaatcttcatgatttacattctccccctttttgatgatgacaaccacctgtaggttaggagcaacaacaaagaaaaaatatctatttgcatatagtttactcccccttggttttgcaataattgcttatatgagacatttgaagatttcatatttttcatatgtaaacaaattgtctcataaacaatagataatttttcttactattttatcttttatctttctctccccctttgtcaacatcaaaaacaaatcatgaatagagaggagaaagatgttaccacttgttgcaatgtatgagaatcaagtgataccaataggcattaaaacaatcattcaatattaatcaaacaaaaacaagtacaataacacatcaatcaaacacaatcaatcatcatatatttc

SEQ ID NO: 183691 - DNA, 445 bp, Glycine max
agcttaaaggaagtgaacgaattatcttgtgcttttatgtctccgcattgattggtaaatctgttcctcaaattcctgaaaaatgcaaagatccaggtacattcagcataccttgtattataggggatagtaagtttgacaatgccatgctagatttaggagcttctgttagtgttatgcctctgtctatttttaattctctatctctaggtcccttgcagtcaactgatgtggtaattcatttagctaatagaagtgttgcctatcctgttggtttcatagaagatgtcttagttagagttggtgaactgattttccctgttgaattttatattttgaatatggaagatggattttctcaaggatcagttcccatcattctaggcagaccctttatgagaactgctagaactaagatagatgtttatgcaggcacactatccat

SEQ ID NO: 183692 - DNA, 440 bp, Glycine max
  unsure (1)..(440): unsure at all n locations
tacagtatgcccgagtcattcatccctatgagatgttgttgatatattggcgatcagaattgccattccttgtattatagggatcgaaccaaacttcatgcttttacaaaagagttcatcaatccaagatgagatatggaagtaaccgtcttgcaaaattggggctaaagatgaatcaagtcacatcactgcttcgtctactgccaaacatatttaggattattgatgtccttgttacttccagttacaccttgacaaagatgtcatggaccatgttgaaaatctaaattgattcaaccccatatcctgcgtaanaattctcaatactttcactgtacatcattccatacatccatgctttttattgcatgcattgctcattgcattctttccttgaaaataacatacaataaattgaatgacttaatcattgtatcaaa

SEQ ID NO: 183693 - DNA, 435 bp, Glycine max
  unsure (1)..(435): unsure at all n locations
agcttgaaccatgcgcttagcgagagcaaaccgttattctttatggtagnggcttancaactgaggataaggctgaagaactctcttcaggcttatcctcaattcgcgcccaacgcgtatgcagctcgctaagcgagatggttgtctcttctacactaagcgcgagataggcactaagccaaatctcacttacttgcgcttagtacaagaatggcgctaagtgcgttttcgcggacaggaagcccttttttaagccctacttgcgaagaatgaagagaggtctggaagagagcgctgaatagctgtcagagcttgaagagtgaaatccacataggcaaagaataatgcagagggagccaagtttcgatctttcacgaagatttgtgagttctggagtgattgtgagactcttagaggtggaggagacatccccac

SEQ ID NO: 183694 - DNA, 417 bp, Glycine max
  unsure (1)..(417): unsure at all n locations
tggtgtcttacctttctggcttctaccgggtcctggagtaattacttgttgaccaagtaggtccatataggtgacatccatcaactgngagcaatccgacttgagaaaacctcgaagacgtctgtggtgggggaggtgagggtctccaagataaacgttcggtgctgatctagtgtcccagtgctcgccaagctggctaaagcatcagctcggttgttctgttccctgtcgatgtagaccatctgctcgaaatgctccaagagttgcttgaccatatggtagtacttttgcatgtctctctagctcggaagaccttgttaaccttctcagtgatgagcttagagttgctcatgcacctcaatgttttacgccaacctcgatcgctagcttcagttctgcaatgagagctttacactc

SEQ ID NO: 183695 - DNA, 454 bp, Glycine max
  unsure (1)..(454): unsure at all n locations
caagctttgaaagggtnggtcttcaccttctctctttttctatctgctggcttagtgtgattctgctaagcacaacactcatgggctaagcgcgaggttgactctagaagaagatgagttgtacaggttcgctaagcgcaccatttcagttcatccgctaagtgagaaaggcacgcactaagccgaaattcactaatgtgtgctaagcggtccataattgtgctaagtgcacgagcacgaacaaggccacctatttaagtctgaaatcagattttagagagggagtttggactgggattcagaactttgaatgtctagagtttctaaagagagaaaggtccaagttccagagagttttgagagattntgttgtgtgaagatctgtagagaccagagcttatagcaggagccggtttgagagcttgagaatgagttatgagtgatcgtgagatcc

SEQ ID NO: 183696 - DNA, 409 bp, Glycine max
  unsure (1)..(409): unsure at all n locations
gaagctccatcaaagctccaacctttgctcaccatttctgctccaaatcgcanaaggaagccattttcggagtcgtgaagcgcacctctacgttgtgggacttntaaattcacgtttgggtagacttctttctcatataatttcatgggtattgggtgcttgggagatatgatgggtagttttactatgtttatgccttatggtagttatttgtgaaggaatttgttgaaatcatgctaaacttgttatgnttggtgtgagtcaagcttacccattctgttntagggttttatgatgatgctcgtgtgctgaaattgctgatggaaaattgacagagatgaagggtagagataacctacgcgtaaaaagtgagaatgtagtgatatgagtggaaaagtgtgatgctttg

SEQ ID NO: 183697 - DNA, 444 bp, Glycine max
  unsure (1)..(444): unsure at all n locations
agcttctttgagaaaactgacgtgagaagcgtttttgtganaacttccttgagaagcttctttgagaaaacttccttgagaagctagagcttagttacacatacccctctcataactaagctcacctccttgagaagcttccataagaagattcctaaagaagctagagcttagctacacacacctttctaatagctaagttcacctccttgagatgagaagctagagcttagctacataccctctataatagctaaactcacccatatgccaaaaaacatgaaaatacaaaataagtccctactacaaagactactcataatgctctgaaatacaaggctaaaaccctatactactagaatggccaaaatacaaggcccaaacgaaggaataacctattctaatatttacaaagataagcgcgctcatacattacgcatgggc

SEQ ID NO: 183698 - DNA, 490 bp, Glycine max
  unsure (1)..(490): unsure at all n locations
tactaagcttgagggttacagtctcatgagtgtcacgtgcttatgcaacatttgttattcgtggctatacgagacatcttgccaaacaaagtcaggttagcgataactcgcctgtgctttttcttacatgctatatgtagcaaagtcattgatcctgccaagtttgatgagttggaaaatgaggccgcaattatattgtgccagttggagatgtattttccccctgctttctttgacatcatgattcacttgtatgtgcatctggtcagagaaatcaaatgttgtggtcctgtttatctacggtggatgtacccgattgaccgatacatgaagatcttaaaagggaatacaaagaatctatattgtccataagcatctattgttgagaggtacattgcataagaagccattgaatattgntcagaatacttagagaaggctaaacctgttggccttctgagtctcggcatgatgacagagtgggtggtaa

SEQ ID NO: 183699 - DNA, 448 bp, Glycine max
agctttagaactagcttagtcacttattgcaatgtatttagtctttttcttccgctatggacctgtatcatacttgctgcaattcaattagctcataggtcaaggatgtgcacatttctttagttgtacacatcatttagattatttggtataataggaaccaagctaggtttgaaagtggcccttttcagtatgagcacattgtccataaagttatgtctactgccttaatctcaggcaactactcaaatgggatggattaagtgcaacattgatggtgcaacaaatagttgtctagggccttcagctagtgggggaatttttcgtaattctaggggtgcttttttgggttgtttctctcactctttggatatttcaattgcctttcatgctgagttgcaagttggatttttagctattgacatagcacaaggcagaggtccggatc

SEQ ID NO: 183700 - DNA, 460 bp, Glycine max
  unsure (1)..(460): unsure at all n locations
tgtaatcgattacacacatactgtaatcgatgaccagaggagtttttttgtaaacattctcaacagtcacatctttgtctctgattcttaagtggccatcaaaggcttatatatatatgactagagacacaaatttaacaagagttttgaagaacaaaaaggtcttatcctcttaacaagcaaaattgttctatcctcttacaaattccttggccaaaacacttgtgattcaataaggaattatttgagtgctcaaattgttcaatctatctctttcaagagagatttcttcttctcttcttctttattctgaanagggattaagaggccgatggtctcttgttgtgaaaggattctaaacacaaaggaaggattgtccttgtgtgtttacaacttgtaaaaggaattgacaagatagtggaactctcaagcgggttgcttgcggactggacgtatgcac

SEQ ID NO: 183701 - DNA, 313 bp, Glycine max
aagactgttctcctcataaccgctttgactctttcacatggcttttaagctcttataataaaaataactcttctgaatggctttcttgaccagacgtgaagagtctgttagagctacgcttcgttttgcattctgaaaccaatcattccaatcttgaacacttttccaactcattctgacaatcctgtacaagccttgaatctctttgaacttcctctctttcttctatgcaccacaagcttcctaaagttttctggttttctaaaccatgaaaacctgcgctattcatctatgtcattctcttctccctttg

SEQ ID NO: 183702 - DNA, 385 bp, Glycine max
acacaacaatgtatcacctacattctggtttatgctgattatatcattataacaaaccactccatctctgtagtccaatgtgtgagttctaaacttcactctttgtatccactcaaagacctacgcgccttatatttcttttctaggcatacgaagctcactatcagcattattggggctcttctactatctcaatccaaatatatcactgatcttctatgccaagtcaatatgcataatgccaaacccttagagacttctctggcccttgggtaacaattgatatggacggacatatgcctttctgacccactctctctgacttgtggtggagccctgcatatgcaccacactcgtcaaatatacttatgcgttataatcttgt

SEQ ID NO: 183703 - DNA, 436 bp, Glycine max
  unsure (1)..(436): unsure at all n locations
agcttgntctcagaagcgtgcaggtggaataatancttttcgagcagaagacatcttcttatgcaatgttgacgtgcgcagatgaacaatgcctataaactcctcatcaatcagattttgcacagcctgaaagactcacaattcaacactggaagttcattgtcaaaattgataatgaaaaatgtgttactattatatgtaacagagattgtccatagttcagataagtgaaaatggaccactgcactacacatatattaggcctcacatgttatggataatcttttaagccattaatatttacttcgcatgtatccaacaagattatggtgcatacacacctttgtcatggttgcagctaccaagatagtctgacaacctaggccatcaggtcttgaagcacgatcttttaatgggcctataaatttgcgtatat

SEQ ID NO: 183704 - DNA, 447 bp, Glycine max
agcttctcgagatatggagagggtataacttcttacacaaatggccgattcagggacataactcatctatacgctcgaaattgaacaacgaaagctctcgagaaatatgaatggtcataactttccacacagatgtccgaatcggggacataatatatcaagacgctctaagttcaaagcggaagctctcgagaaattccaatggtcatgtgttttcacaggatgtccgatttggggacataactcaaatagacgcttgaaattgaacaccggaaaatcacgagaaatttgattgctcataagattacactcggatgttctattcggggacataatatattaatattctcgaaattgaacaacagaagcattcgagaaattaatattgtcataactatttacaaggatgtccgattgggggagataatatatctagacgcacgaaat

SEQ ID NO: 183705 - DNA, 464 bp, Glycine max
actagcttacctaagaacgccttcggtggggaattatttctacaatgcctacaagattgacttgcctattgagtataatgtaagtgccactttcaatgtgtctgatctatctctttatgatgcagatggatgagccttggatttgaggacaaatccttttcaagatggagggagtgatgaggacataaccaagggctaggaccatgaagcacttgaaggtcccatgactataggcagacttaaacaagcccaacacgtcatacagacaaggctagtcatttgtatagctgccattgatgatgattgaaggcccaagtggagagagatgaaggcccagaggcagaagcactaaccaaactactaatggttgttgaaggccctaactaacttgaaggcaccagttaaataagtcttagttatagattattttattgacttttcgcccaactgttataacgccatgt

SEQ ID NO: 183706 - DNA, 315 bp, Glycine max
  unsure (1)..(315): unsure at all n locations
cagcatgcaactnncaacttagagaagaagagtatttatattcttttaccccacagngcggaaccacttgcgctacatcacaaaccaccacccctcttgtcagacagaacagagccaccatgcaagactcaaacagaagctgaaccactcacaccatagaataagacaacccgaccttcacttggaccccccacgacgcaacccaaaagaaccaaccgcgtccatgtcagtccatgaaactcaaaaccaccaccaaaaaacaacacctaagacatatcccactaagcgagagcgcgtacttgaaacacacctaac

SEQ ID NO: 183707 - DNA, 442 bp, Glycine max
  unsure (1)..(442): unsure at all n locations
agcttcagcaggtttgtatgagtaaacatgtnnnttantattacaaatttacgtcaattttattactttgaaaaggatacccactaagaattcaaactaacatgtttaattacttaatatgagagaaaatattaaagaacttgttattagaattagggtgagtgaaggaaagtatattcacatttgtttgtttacgtgtcagacaaagacttgttagttattacgtaaagcattggtttgtgatatgcgatcatcaaatcaaagtgtgattgaagccggtagagacaggaagagacagcaagtgggccatttcagtgtttttttcaccctctatcgtttttctgatttttttcagatctttctctctatcttggtgtttctgatttattattcttatcattatttgaaggagcaccggaattgaattaataatatgataatt

SEQ ID NO: 183708 - DNA, 345 bp, Glycine max
tataaattctttgaagttctcttgtgtgtggtggtagtgacttctatatggccaaatagcctgcattattgtgcatgtaacgaaatttaataatgacgatagataatgagattggttatgatgatgttgtgtgtcgttaaatgatccgtaccttaagggcaccttgatgggccactaatctgccaactgctgtggttgcaccgccagatagaaagcttgagtgttgaaacgtacccttttgttttctccccacatacaaggcccttgtggtgctaagaacaaatatccatttggatttctcatcagtgtccacaagcctaccatcctttttgtaaactagctttc

SEQ ID NO: 183709 - DNA, 427 bp, Glycine max
  unsure (1)..(427): unsure at all n locations
agcttcttgcatagccgctcttggtgctcanaagatcccaaaaacaaatccctcttattactagctattttgaattctttagttcctgaatgttcaaccttcaaattgtttctcgttcccctcttccttttttgcaaaaaagaaaatcaaatgctgtgaaaacatggatgaagtcctaagaaaatcaatatcatagaaaacatggatgaaatcacaattaaaaagcacaactacctatctttcagagtcttttggctaatttgtcttgtctccttatgtggtgcgggtttgtttaataatattatacttttgccttccaaaaaaaacttatgactgatcctcttttcattaatccaattttgtatgttattgtataaaagatcatgggttctacacctgcctccactactactcctcctcctccttc

SEQ ID NO: 183710 - DNA, 480 bp, Glycine max
  unsure (1)..(480): unsure at all n locations
tttaccaaagagnttttactctctggtaatcgattaccagtttactgtaatcgattaccagtggcaagttttgttttcataaagttttcaactgaatttacaatgttccaatcaatttcaaaatggtttaatcaattacaatatattggtaatcgattaccagtgtgtttgaacgttgaaattcaaattcaaatgtgaagagtcacatcctttcacaaaaatgctttatgtaattgattacaatgatttggtaatcgaattaccagtgataagtttgaacaaaaatcanaagatgtaactcttccaatggttttcaagtttttctaaaggttataactcttctaatggttttcttgaccagacatgaagagtctataaaagcaagtccttaactttgcattttaagaacaatcctttancaaccttgaatctctntaagcatcttcttgaattcttcttcttttctttgcaaaagctttt

SEQ ID NO: 183711 - DNA, 444 bp, Glycine max
agcttcctctgagatctacccattctcttgctatttctcgatccaacatctttggactccttcttcgtcatgcaaataaaacgattacccatcttgtcaaattgagcaaagcctcctcggagggttggaggagttgttaagttgttgttgggtatgaatgaaacaacagctcaaagtcttcttgaagccccaactgattttagagattattaaatgcgttacatttcataattcaatttcaacctaaccaacgataataggccttttttaattactcctacttattattgcagagttttttaattaattttattacggtgcagcctagccagtagtcaagacgagacagattgagctgaaaataagcacatgatctgtatacggttttcaacgtgcagtaaagtgcaacagatgtcatcttttctttcttttctcccgttatat

SEQ ID NO: 183712 - DNA, 448 bp, Glycine max
gttagtggtatttgactaattatggtttattgtacttgacttattatggtttagtgttacatgaccaattacggtttagggttatttgaaaagatagggttgcttgactaattgggtttaagggtatttgacaaataagggtttagggttacttgacgaatttggatttaggggtatttgactaatgaggatttatatgtagttgagttaattagggtttagtgttacttggccaattagggcttaggggtattcgacaaattagggttacttgactaataagggtttatgggtatttgaaaattaaggtttatggttacttgacaatttggggtttatgtgtatgtgactaattaagatttataggtacttgactaattaaggtttagtggtacttgactaattatggtgtatggttatttgacacattagaatattgcgatacttg

SEQ ID NO: 183713 - DNA, 448 bp, Glycine max
agcttgaaattgaacaacggaagctctcgagattatctagtggtcataaattttcacacagatgtccgattcggggaaataatatatcgagacgcacgaaattgaacaacggaagctctcgagaaaattgaatggtcataacatttcactcggatgttcgatccggggacataatttatcgagacgctcgaaattgaacaaccgaagctctcgacaaattagaatggtcgtaacttttcacgcgaatgttcgattcggggacataactcatctagacgctcgaaattgaacaacggaagctctcgagaaatttgaatggtcataagttttcacacggatgtccgattcgggaacataatatatcaagacaatcgaaattgaacaacggaagctctcgagaaaatcgaatggtcataacgtttcacacagatgtccgattcggggacat

SEQ ID NO: 183714 - DNA, 331 bp, Glycine max
  unsure (1)..(331): unsure at all n locations
gacctatgatactaagcttcttataagctngaaccatttatcaataaacacaagttgagttttattcataaaattagagtttatctcttttatcttagtgagagtgattctcctaaattcttgagtgattcaagaacaccctggctgtatcaaaggactttcacaacctttgtgtgttgtcctcgctggaaagagtgattctttccttccaatcatctccacccttgttctttcanaccacaattccagaaaatccacctctgcccaaaattatctcgtgaccataactcccattttacacactcacattaagtgattcttgagcctaaat

SEQ ID NO: 183715 - DNA, 446 bp, Glycine max
  unsure (1)..(446): unsure at all n locations
gatggtgtcnagaagaaatcacatgtttgtcttcatcaaaaagggggagaatgtgaatgtatgtatacatgatcttgatgatgtcaaagaagaatctaacaaggctgcttcaaatgataagcatttgcttcaagaataattcaagattgtttcaacaaacaaagccttgttttaagattcactaaagaccaagccttgccttaaaacaaagtactttcaagacatgcaaggctctggtaatcgattaccaggaagtgtaatcgattaccagaagacagggttgagaaatagctgttgaaaaaggttttgaatttgaattttcaacatgtaatcgattaccatatgtctgtaatcgattaccagcaatgaaactttggaaattcaaattcaaaattcataacccttcaaattataactgtgtaatcgattacacaaacattgtaatc

SEQ ID NO: 183716 - DNA, 434 bp, Glycine max
  unsure (1)..(434): unsure at all n locations
agcttaagatagattccatggttttagactatattcctcttcctggagtccccttaaggtaatggagaaatatataggtatcttgtaagtggatttctcttggacagtgcataaataggctcaccaagctaacaaaaaaagtaatatcagaccttgtgtgagacaagtaaatcatatttccaactagacgatgatacatctccttatccacttctgcactgccatcttcattacccaaattaatgtttgaatccatgggagtacctctcaatcgacccatctaccctatantttactgtatacgcccacttgcaacccactggtttcttttctattggaaaagaaatcaactcccatgttttttcttttgcaatgccttcatttctgtatccatggcctgtttccaatttttattggataatgcctcaaaaata

SEQ ID NO: 183717 - DNA, 483 bp, Glycine max
  unsure (1)..(483): unsure at all n locations
tcatgataagcananaaggtaattacattacagcattgacatttgttttcttgcacatataagacacaaatacatagaaaagtcggtcaccgtagtccaaagcagatcttcatgatggaaagtaattaaaaaaagcttatgtaaaggaaacaaattatgcaaatatacagcataccgtgcagcatattctgagaaatgtttcccacgttgtcgctgtcgtaaagtgtgaagatcaccgcccggacaatattccattaccaaacacaagaatcggtcagtctcaaaatgtgtatacaaagttggtagaaacggatggtccagcaactgcaatatctccctctctgtctgtgctctagtcagcttctttctgcttgctagcgatgccttatccataactttcattgcaaaataacacctagttccactcagctctgagagaacacacttccaatataccacatactaagtcgttgagtaacctaa

SEQ ID NO: 183718 - DNA, 410 bp, Glycine max
tctctaaatatacccctcactagaataaaatacacatattttaagtccattttcgtgaaaaccaactaaacataccacaccacataaaccaatcaccgtatttttattaattaactcatttaaaaaatactttaaatttatcaatcacttatttaatataatggtaaatcataaattgaacttttgaacacaatttataagaaagctagctagatataaattactaccatttattgacgatacgaaaataaaaagtatcattttacttgggatactggaggttttaacatttcttgaatgtccaacttttccttttctgcccagaactattattcgaactatgataaaggctatcttctttaattaaccaatagatcttttgatgctcttcttctgtgctaagatcatat

SEQ ID NO: 183719 - DNA, 365 bp, Glycine max
tctcacctgacgaatacgtggctactagatgcactcttcttatgacaataacatcacttctagcactaaattgttggaagtttgaagccatcttctcaatttaatatctggcttcagcatgggtcatgtctccaacggctccaccactgacagcatctatcatacttctcttcatgttgctgagtccttcatacaaatattggagaagaagctgcttataaatctggtgggaaggcaactggcacataactatttaaactctcccacattcatataggatctctccactgagatgctaatacctgaaatatactttctgatggtccgtgtcctcaattaggtgaaaaaatttctataatactctc

SEQ ID NO: 183720 - DNA, 441 bp, Glycine max
  unsure (1)..(441): unsure at all n locations
agctnngacttgcgagtgagaggggagcctttgctattctttaccnattagccaactcaattcagaaagagaaatcccaatgagaaacgtccgatctgatctctttggcttatcttactaaaagatatttttttattattatattattattttaccttcttttggtttccaacgtggttacggcatgaccgaacggtcggatttcattttaacaaaaattaacggattttacaaatcagatgatcggtggaaatttattttatcttttgattacgcgagaaaatgacttaagtaaatgactaaagcacgtcaaatggcggtacggaaagttaatgatacgaaaataaaagtacgcgaaacaaatggggaccaccaagcgtacatagaattgaattgaaagtttgattgcgggaacttagcggttgaagaccgaagaacgac

SEQ ID NO: 183721 - DNA, 337 bp, Glycine max
cttgacgagggacgcacgtccatttgtattctgcagcatacagtgggacgagtatagctcacttatacttgataacactaaattcttgcatgagtctgggcaccctgctctgtggcaaacgacttattcaatctccttccaatacacttgatctaattaccgaggatatcctcaccaacatggaatcagacttttgttctcaatgtactgtcgtaatcctctccatttgcttacattatctctagaccgtagctccattataccttcttgctttcttgatacagaaccaggaatgacttagctcaaacatttacacctattgatacaccacattgga

SEQ ID NO: 183722 - DNA, 342 bp, Glycine max
tcacattatgcgcccaatggacatgcggtgaggttttttcttgaattttcgaagctggcgtgttaattcgagcgtccaattattatatcctgaatggacctcctgtgaaagctagaccatatatattccagaacttacgtgtcattttcagccttctaatggatgccctcatcgactccggtgaaagtaagacattgattttaagacttcgtgttcaattcaccttcgaattatcgcccaatggaccccgggaaagtatgcctttgatttccaagttcgtgtaattcagctacgatattatggccgattgaatccgggaagtatgacattattcacaagtcc

SEQ ID NO: 183723 - DNA, 441 bp, Glycine max
agcttgccttatgtagaagagagatttgttcctttctttaagcgagactgaagggaatatgtgggccatcatcgatgattgcaatgagaagctaaatctatcggcgactcactagcataggctataggatgagtacgccaagatatcattataaagggaagcaagggaaagggcaattgattcattgcaccaagaggcaacaatgaggatggaccgatttgctcctactttgaacaggagtcaagaacttccccgattgctagccaaggccaaagcaatggcggacacctactccgcccccgaggagatccacggacttctcagctattgtcagcatatgatagacttaatggaccatatgattacaaaccgctaggaagtttgtttgtcgctcagatttgactagtatatcttttagaataaatgagcttatccacattt

SEQ ID NO: 183724 - DNA, 381 bp, Glycine max
acctataaaactcagctgcgcgaccggaattacataggggcggatgtctatttatggtttcgcgcatccgtgatttccgtacttcccgaaagcttaaaaaagaaatacatatccgtaggattttaaccttgcgaatgaaataagtatcgtactaaattcgaagtttcgtacgtacggaaaagaataccaataaataaaagggggcattagtaaaatgggggccaatacatttggccaatgggctttcaatcctcctcagatggtgtgctttgaggaacacattgtgctgccaactgattcccggcgacggtggcaacttccctatttcttaaagggaaaagaaaaaaagtaacctttgcctttttttttaaatgtagaaat

SEQ ID NO: 183725 - DNA, 438 bp, Glycine max
  unsure (1)..(438): unsure at all n locations
agcttcatatgtccatgtggatgngataacaggtttattgcctacagttgattccattaggattagaaacagccctgaagaattagtatatgatcaatgtttgcgtactcctgcgtcactacgtgcataaaacatgttttctttttctttttctttttggaaattttggagtagaagagaagcaaggattaaattttcatttctaataaaaataaaataatataataccatagacttaatgtccaatttcttttgcctgggttatgaacattatatataacttttaattcttataaacaaattatacttttttatttttatctaaaactatcaaatatattaagtatcttaattttttttatcataatattatgtatcttgaaaaaatttacaatatttttcttttataaaaacattataattctcttcccactaagt

SEQ ID NO: 183726 - DNA, 464 bp, Glycine max
  unsure (1)..(464): unsure at all n locations
tctactgctattatcctactgtttactcctattatcctacttttcatcaatccaatcgcaaatataacattcgaaaatgttaaaacatacaatacaacgattaaaccatctaagaaaatcgatataacattgtttgttgtaaatattaatcctaaatatcatatcgacgcaattggaacgtgtggctttgcacttacatgactgctgctgctgctgctgctgctgctgctatggctgcactctgattccgtccacgctgcggtggcggtggattcagaagaggaaaactgaaaaaagccctaattctaaaaccctttattttgttcttattattcttaaagggtntattgcgggttaacccgaataaattcaacatgtctcacttaataacccaaccgagaacgggcatttccgacccaataacaatggcccaagtaaatactccatgttctntaacgtggatg

SEQ ID NO: 183727 - DNA, 453 bp, Glycine max
  unsure (1)..(453): unsure at all n locations
agcttcgaattacaaagggaatcttgaacattcatttatgattatatgactaagattaactattctcaccaatcacgtntttactattatataagtccattattttttattttcaaatatttgtataacaatcagtgaaaatagaaataatctgtcaattttgtaatttaaaaatgaaaacaaataaatatgtcctaaacttggttgacacgtattacctgaggggaagaattctcanaggtaatattctcagcaataaagtcccccccttccacaatgatggtgccacaaccaaagattccagtccctatcaccttagcatcctacaagaaaaccacagaactcacaccaaacaacaaaacaagtttaaattttgcaaataaaaaatgggttagatgattaagaaaagaagaaaggaggcaaaggtcgcgggttcaatctctcttgctatga

SEQ ID NO: 183728 - DNA, 481 bp, Glycine max
  unsure (1)..(481): unsure at all n locations
tcattacgtaaacaaaggttgtagtgatataagggtagccaattntctatctccagtccccacattttaatctctattttttagggcgtggagatagccaagaaaataatgtgtacacctgctctctctgtgtaagcctagaaagattgctatctccagtcccttgaagacattattttctttgaatttttatatttcttttgtagcctagcaatctttgacagtaaagttggaaaatgaaagatgaaaggctttatgattgagtgttgaatgttgatatctttatattccaaattccaatacaaccatttgatattntttatttaatttgtcacattgttatactatattatactagtacatatttatgagtaatttatctcccctcttttatctattggttcttggtgtctacgtttattgagaataatntnntttccattttactctatctnttataaatttattagaatacactatg

SEQ ID NO: 183729 - DNA, 455 bp, Glycine max
  unsure (1)..(455): unsure at all n locations
agctntaaaagagaagagaataagagcttatccttatttctaaaagtgcagatgcatgaatctaatggatcgaacaactctgatggatccacaaatgatgaaatgaccctcatgaccaagaagttcaaacaaatgataaaaaagaatggaaagtttcaacactcctacagacgtatagattttagattcaaaaataagaacaataaggaaagcaatgagatcatctgctntaagtgcagaaaacttggacatctgaaggttgaatgtcctcaactaaagaagaaaagataaactggggacaagaagaagataaatctgatggtcacctgngatgactcaaacaatgagaagagtagaagttcanatgatgaacaagccaacatttgtctcatggcagatacaaatgataaggtcaaggtaaaaacctgttctgaatntgatgcctcgtcttgtgc

SEQ ID NO: 183730 - DNA, 492 bp, Glycine max
tgaagagatgagagatataccttatgtgcgtggcggtcgaatttctttttgtaaaaagctattataaattcttctcaagtttagaaaaactctcaaaacactctgattatcttgagagaatagactaagcgttgagattgtatatttgtccataagatactcaaagagtcggtcattgtgcaaacacaaacaatatatctttcatatttgtatagagcctataatagtttggtagaacaaagaatactatggttcaaacttaaggtagaacttgatttgtaagagacaaaagtgattgtgatagaatactcgtaactcgaaaaaattggtgacacttgatagttcgtcgatgtactataaatggtagagacgaaccaatataacttcttgtatatgatctttgtttatctcatacgtgttttaagtgaactaaggttctagaaattacatcggataattaacccatgttacatattatgctctatattaatc

SEQ ID NO: 183731 - DNA, 443 bp, Glycine max
  unsure (1)..(443): unsure at all n locations
agcttgaatggagctcacaccatgtggcatctatagcatcttcatctangtcatgttcttttgcttcctctatgtttttgtttagtcaattcacattaattcctttgtattcatcttattctccatgtatatcctccattgtcttgtggtttggtgctgtttaaagtaaattcaaaatataaaccgattaaatcttagatctacacttgttcttgcatttcaatggttcaaattctatagatctacgctcgaatcatgtttttgtgtcgattttaggttctatcatttttcattcataatattcttgtgctgaacctttagatctaattttttttccaaaatattgattagaataaaaaaacacacacatctaagtgttaatcacttaatccatgttcgcttatagtcatgctcagtcattgtaattgtcacattatgtctaa

SEQ ID NO: 183732 - DNA, 464 bp, Glycine max
gacactaagaaactcagcttctccttctttctttaatggggaggaggaagaatattatgttctaccctcctggtatctgaggttcacttaaaattagtgagaaaaaatttttcagtgaagaaaatccaagccgaggcgcttctgtaacgcttccgtgatgattctgtgggtgatttcgcgaagattctcaaccgttcttcgacgttgttcgttcattcttcgttcattcttcgctcttcaaccggtaagttcccgaaatcgaacttttgaattcattctatgtacgcttagtggtcctcgatagtttcatgtgctttatttttatttcattcacttgtcggacccccttttgacgtgctttagccatttatttaagtcattttctcacctaatcgataatataataagattccactgatcattcgtattataacatcctttaatttctcgtagaatgaattccg

SEQ ID NO: 183733 - DNA, 433 bp, Glycine max
agctaatgaccaacattacgccatgcaagagactcttcttcatatactctgcttaattaatttcctgcttgaactgttcatacatctacatccctcccccgaccattttataatgattcacatagaacaatctatgactactaaactatcaacttaattgagtgctatattacctatcttccaagccttctcttataaagttacaattaactgctgctaacaaactttaatctggtttggctaacaaacaacacaatcataaattataaattttattttcactaatactaatactatctgaaaaaagaaattcttccagcttcttctgcacaatctacttgcatacattatgccacaagatcttaatgctcctctatagtctcatagtcattataaacattaaccggtgataagttaactatcttttttagtt

SEQ ID NO: 183734 - DNA, 390 bp, Glycine max
  unsure (1)..(390): unsure at all n locations
acaactattccttatgagtcttgaattgttcttcattctatcatgaacatatagaactcatactatgattgacctttgagcatattgtcatcacctttgtcatcatcttttgcaaacatcaatgttatcatcaaaacatcgtttgaatcattcatgattcaccatgaagctttgcttctacatattcacccctccttcttaaatatttcaaggccacttgatccaacactcaacgtcctcatcatcatgtttccataggacttaacgtccttgccattattcttcacaggactcaacgtcccttgactttagtttcacaagactcaacgatccctatctttatgcattacaatagactcaatgtcctactcgcttatatntccataggac

SEQ ID NO: 183735 - DNA, 167 bp, Glycine max
ggaccaaagcacccgcgcgcgccaaagggaacagattttttacaaggaaacccgccccgcagtaaggaaaccccacccgacactttatacccctcaacacaaaacaaaatcataactcaaacaccccatcacccacaaacaaacaacaaagcgggaaagacggccaa

SEQ ID NO: 183736 - DNA, 449 bp, Glycine max
  unsure (1)..(449): unsure at all n locations
agcttctttgagaaaactggcttgagaagctagttcttanctacacacacccctctcataactaagctcacctccttgagaggcttccttaagaagattcctaaagaagctagagcttagctacacacacatctctaatagctaagctcacctccttgagatgagaagctagagcttagctacacaccccctataatagctaagctcacccccatgagaaaaaaacatgaaaatacaaaaaaaaaaagtccttattacaaagacaactcataatgccccgaaatacaaggctaaaaccctatactactagaatggccaaaatacaaggcctagacgaaggaaaaacctattctaatatttacaaagataagcgggctcatacttagcccatgggctcgaaatctaccctaaggctcatgagaaccctagggcctttccttggatctcta

SEQ ID NO: 183737 - DNA, 475 bp, Glycine max
  unsure (1)..(475): unsure at all n locations
ttanattcagtactctgctttcgagatgcgtgataagcctactacatctagaagtgagaggttatcctccaagatgttgataaaacttgccaaatacaggatactatgtttactttaggatctaattagaattcaacatatatatgaactaagctaaccactacgactatagtagcagctcctataaataaagaattcaatgttggcatgtttttataaccttataaaataccaaatgagcaccaaaacgcattacgttagattatcaagaggttttaaggaatacctggatccataaagcttgatcaacacgtatcagaatcttacagcggtcacgaacaattggtttaatgaccttcctcaaccaaatcaccttcttccttgtgggaccttcattttctcttcacatatggagaggagaaattgtttttgatatggatgttagcaccataaccatgccttaggtttaacctat

SEQ ID NO: 183738 - DNA, 449 bp, Glycine max
agcttcacattgcgtacctgagacggtggttgttatgactaacctccaatggagttgtttcctgctacgttcatgtgcagattcgcaccagcgttgtttgatttcagcaatgtgtccatcgcagcctctagagtttcgaatcgtgctttgttctcttgcctatcgacttctaacatctcgagcatcttggacatgttcacagaaagctccttaagatgtgtattatctgtcatgttcaaagaatgaaagcaccaaatgtaacagtggtactacatgtagcaagataaggcaatggaaaacagaacttgcattgattaaaatcccctttcagcagtacaattacattaatcttagaaatgaagaacattgagaatgataactgacaaggaaggaggaaatgatatcacttcataactgccccttctctctcacgtattgcttcttaaact

SEQ ID NO: 183739 - DNA, 418 bp, Glycine max
atagactactaattccaagaaattatacaagtggaaaggtattgaattcaccacccaaattggattagacatgtaagcgaagagagaatacaagaatgtaaaaaaaagaatttaaaaagaataagaaattaaatatagtataatgcttgtttgaagttgagtgtgtttagtttcacatcttaagaatattaaacagcaattaatctggtgtacttaaatatatatatatatatatatattcgtggttatatcattagttaacgtgagatttctaatgcaagttaagtctttaccttaatttgcgagatgatgaacatgtgttgagtaaagcttacaaaggcatataaaaataacaaactctgttaaaaaaaaaatatgttgacaaatcacttatgtaaaaaaacatgattgaaaaaaa

SEQ ID NO: 183740 - DNA, 444 bp, Glycine max
agctcgtcttgatctgatctctgctctgtatgcatacaacttcatactaagctcatgaacatagtatgataattcccaatcttgaaagttcatactttctttaggagcctctagaatgatctcttttgtctgaaaagtctctccagacttggaatgatcccaaggaagaacatcattgagggcatatgatgagacccatcaattattgaagatctatgggagtacaaaaagacattttaacaggctcagcgtctctacttttccagacgatgacactaggaggataaacttttgtttttggtggttgatgctcaaaaatcagactgttaggattgggagcaactactggatcccaatctccatatactccaagtgcatactcttcttctttaggaaatgtatcccaagatgaaatactataaggatcaatatctagataacttg

SEQ ID NO: 183741 - DNA, 430 bp, Glycine max
tgtgcattcaatatcctgatgaaggtgatgcatatgttctttttactggacttatacatttgctgcccaagtatcatggtcttgcacgtgaagatcctcataagcatcttaaggagttccatattgttcgttccaccatgaagccacctgatgtccaagaagatcatatctttctaaaggcttctcctcattctctggagggagtggcaaaagattggctatactaccttgctcccaggtccattttcagctgggatgaccttaagagggtgttcttggagaaattcttccctgtatctaggaccactaccatcagaaaagatattctatgcatcatgcaacttaatggagaaagctcgtatgagtactgcgaaagattcacaaaattgtgtgacagctgtcctcaccaccagatttctgatcacttctt

SEQ ID NO: 183742 - DNA, 471 bp, Glycine max
ccggaccttaagtcacctgcggcatgcaagctcttccactgcacatttgactgatatcctgatgatgagcccagctggactgacatggaaactgaagacattaacattgtaagaacccggagagatacttggaaaaaatgtgactactctgttggaaaatgggtttttgatcaatcttaccctctctatgattccaattgtccctatctcagcactgcagttgcttgtcaaaagaatggaaggccagattctgactatgagaagtggaagtggaagccatttggttgttccatcccaaggtgtttatattatctaaacttggacaattgttcacatcgccaccatattattattattattattattattacttttatatgcatgcatgaagaatatattttttttcctctttatttgctattgtaatctcgaaaatagaattactaaagctcacaattcagttgtgaaata

SEQ ID NO: 183743 - DNA, 450 bp, Glycine max
  unsure (1)..(450): unsure at all n locations
tatgtaatatttntatttattaagtatgttattggagtaatgtattattgtcttcaatttaatttttattgaagtgtatatatatatatatatatatatatatatatatatatatataaaatgtgaactcctttctgattgatttattaactgggattatcatctcattataagtgttatttttagagttcgataaagaagcttttgactttgaggaaacttgaagacataattctcttagttatatttattttagcttggttaatactttagaataagacgcgattactttcgttatatctgtagcattcaattagtttacatgcctatgtttaaggataatatttctttatgaaagattatttgatttatcttttatatcgaattgtattgaacgagttatatctactcccattgacttctaaatgtggcacttattgcggattttaa

SEQ ID NO: 183744 - DNA, 445 bp, Glycine max
  unsure (1)..(445): unsure at all n locations
agcttattctactagggactttagacatcatgtatttcattnnttctttacagaatcatacagattgttcgcattcatggtagcaacacgcctagagggtaccttcacatcaggattcaaatattgtaataattctttaaaccttctatgttcaacaatagagaatggaagatcatgctcaataatcatcatagatatcatctcacgtaccgcactttgatttatttttttatttcttaatctcccagcatgatcgagaataatatttccaacatcactattagaacgcatcttcaaatatacatcacatttccccatatgatgttgtaaggttgaagtctcattcttattgtcactacccacacaatctttcacacaatatttgcatttactcctcactttttcatcattatgtataacaggttactcaaaaaaattccacaca

SEQ ID NO: 183745 - DNA, 430 bp, Glycine max
  unsure (1)..(430): unsure at all n locations
tctctganaccgnggatgagagagaacgtagaattttttntttcagtcatccactggctcagcgcgccctgtgcgctaagcgaatcatccttcatgcactgagcgagtcatcactcacgctaagcgcaccaacccctacccattggcggatagggtctcgctaagtgagacaattgcgctaagcccataaacctctatcgaattgcatttaatggaattgtgctaagcgagtcagctcgctaagcgcaacgcatagtctcgctgagcacagttgtgcgctaagcacgcaaacatctctgcctggactcccatattaattgggcccagcgggtcatacctgctaagcccaaatccctctctggaatggcattgcgctgagcaagaccatctcgctaagcacagccccactactacatcatgaggcatttaa

SEQ ID NO: 183746 - DNA, 442 bp, Glycine max
agcttcagtccaatgtgcatgaattttttattacttggaaggaaaagacatagatgcaatcaatactaagcagattttttattatcttagatctataaagattattttgaaaaaagagagacagcaatgagcaagtgcatatgattaggattaataattaatttgtcctctctgcaattgcaataactgaaactaaccatatgaaaccacagtcatgtcccacccacctataccacactttggtgtactgtgatgactcggattttggctaatgagagaaaataaattcttaattactccaaattaggttggtagtgtgattacgaaggaaagacttaagagtgaaaggagaagaaagaaggagtagttggttgaatttttttactaatatttctaacacaattaataaattaatatttattgataagagaatttctcttac

SEQ ID NO: 183747 - DNA, 442 bp, Glycine max
  unsure (1)..(442): unsure at all n locations
agcttngatttcctttgttccggagacctttcttttctcatgtgcacccaaacccaatctccgggttcgaagacaaccttctttctccctttgttggcttgtttagcatagcttttacttttcctctcaatttgatctttgactctctcatgaagcttcttcacatagtccgcctttgcttaaccttctttatgcttaaaaacagaaacattaggcaaaagatcaagaggagttagtgggttaaaaccataaacaacttcaaaaggagaacaattagtggtgctatgaacagctctattgtaagcaaattcaacatggggtaaacaagcttcccaagtttttaagttattcctcaaaactgtcctaagcaaagttcccaaagtcctattaacaacttccgtttgcccatcggtttgtgggtgacaagtggttgaaaataaca

SEQ ID NO: 183748 - DNA, 260 bp, Glycine max
tgtacaatatgctcactgacctatgttttcaattccgagagtctggcattctgacgcagactcattaccacatccaagtctcaagagcttgcattggaaattgctatcagcttcgtttctcaatttcgagcgtctcgacatactactggactctatcacacatccgattatatagatattgtcgctggaaaatgctaggagcaattgtattcaatgtccagcatctcaaaatattaagggactcaatcggacatccgaat

SEQ ID NO: 183749 - DNA, 255 bp, Glycine max
aaactatacctgtgaagaggcatggttatgctttatgccgacaccatacagaccatgacctatatgcaacaacctgaacaatagagcagcctaagctatgccgtaaacactacgatagaccccctcgacccaaacgcgaaatcagccacaccagaacaaatatgacctctacacctataagtacaaccccgggtggaggaaccatcccaaccttagatggcacgattcctcacaacagcagcatcaacaacaact

SEQ ID NO: 183750 - DNA, 451 bp, Glycine max
  unsure (1)..(451): unsure at all n locations
gtgcagatatggccttcgccagcgaaaggagcaatgtgggttctattataggcaaacatgatcatcctactacgaccactgataaaactggggcaaataacgacggcgaggatgacgcataaacccatgctgtgactgccattcctatacggccaagtgtcccaccaacccaacaatgtcattactcatccaatatcatacctcctccttacccaccacccacgtatccacaaaggccattcctaaatctaccacaaagtctgtctaccgcacttccaatgacgaacaccacctttagcacaaaccaaaaacaccaaccaataagtgtattttgcagcgagacagcctgtagaattcaccccaattccagtgtcctatgctggctngctcccatatctacttgataattcaatgcgagccatcaccctagccaaggttcatcaacctccac

SEQ ID NO: 183751 - DNA, 488 bp, Glycine max
  unsure (1)..(488): unsure at all n locations
acctataaaactaatctcaagctntagtcttcatgttgctcatggtgcgtggctgatatctatcttctatgctcacaaaggagagtaaaacatttatcttttcaaaccatccatgttatatttattgacaagtatgacttttgggttcttgataggaaattattatatcaaagatattataaatattaagattgaattacatttgaatgttcatgtatgttggtcatataatctttgaacaattgagttatcatgttaaatatagtatttagtgctgttgtgattgtcctcaaatattggcgatattgcttgtaatcttgtgtgcataataaataacatggggtgattcatgattaggcgataataaacttccatgtttattattaatattactactactactactattattatgattatttatattattattactatataaagggatgcatgaaggtactcaatagcctttatatatcatgcgaatg

SEQ ID NO: 183752 - DNA, 417 bp, Glycine max
  unsure (1)..(417): unsure at all n locations
gcatgcaagcgncacatcatcactaaagggagaggattgtatgctttcataacacacaacgccgccgaaaagttactatgacgtgaagaagatactgcgccgcgaacgcatggagtacgaaaaacattcatgcacgccctaaagattgcatatagcacagacacgagcctgaagcactgcataaatgccccaagtgtgcgggaccacactacatagcgaaggatgaccatgatacaagaattgaaagcacaaacaacggccccctctagtaaaggtgtcatggcatcttcctactatctcaaggactaagcgatcgtctgctaataaagatgatgcaaaagaccttgcactaaccataagacatggccagatgtgctagtacttcacaacctgcctccttggttgtgcatgaagcaa

SEQ ID NO: 183753 - DNA, 331 bp, Glycine max
acaagacggtgatgatgatttacacgcttgaccccaagcactggaaaagctgctgggatatgaacacgcatctacaaaaaggcgcacccatgccaagaattctgatgtttgaaatgttcaactgactcaagcttaataaacgtcgtgatggatatgctagatgatgctgacgtactgttcaatgcaagttattagagattaactattcgccaaatctatgcatccaaccatacttattcgtctgcatgggctgtgttgccatcaatgatgtcatatccagacatctctaaaatcaatatcctaacctctgaatccaatcattctacaccac

SEQ ID NO: 183754 - DNA, 285 bp, Glycine max
ccaacaaaaaccacagaaccctgtgaacccatgagacgagggaattattttgtccaacacataaggccccacattctaaacaacactcaccgcctgatacatcccaaatgtaacactttcctgaactgagagagtaatctgaacttaccatgacccactcctcttaaagattgcttcaagattgacttaatccccatattagggacataagaatcatcctactgaaatcttaccacagaaccaattaacctactgcgaccataaccaagatggaatacctgatac

SEQ ID NO: 183755 - DNA, 443 bp, Glycine max
  unsure (1)..(443): unsure at all n locations
agcttgtcgaacttctccattccattctgcgtgttattatacacctccggcgtaggaatgggtgcagttctatcccagaagaaccacacaatcgccttcttcagcaaacccttctgttctaagctccttcgtgcttccacttatgtcagggagcttgtcgccattaccaccgcctttaaaaagtggagacaatacttattaggcaatcctttcactattctcacagaccaccgtagcctcaaagaattaataggtcaggccattcaaacacctgaacagcaatgctacctggcacgattactaggctatgactatacaattcactatcgtgtcggaagatccaatgcagcagtcgatgccctctcacggtagccaaaagaagccccctttggccaatttnttcttctaaccattccatactttcttttgttttgcaagaactt

SEQ ID NO: 183756 - DNA, 424 bp, Glycine max
  unsure (1)..(424): unsure at all n locations
cttgctaaagaattattggcatttgatacactcatgcatactcgtgtgcatgcatatttgttatcttgtgacaggggtaagatcgttttaagcaatagtcaaataccacgccaaatccaagacagaaatgaactgaggtaagtggtaatgtgaccacgatttgttgcgcaatgtcatttcttgctttcaggtacttggggacaggcatgaatggatgctangcccatgatcaatagatcgttgttccacgtccagctccagacaatcgagaagcgctactgggaggcagactagtatcctttaaattctacctattattatttaagatgatgatcggatgcctaacttaccctatgggtttcgagtaagtgaacgttgtccaatagagagcgcgtattttcttctaaaagaaaaagaatgcaca

SEQ ID NO: 183757 - DNA, 443 bp, Glycine max
  unsure (1)..(443): unsure at all n locations
agctntgacttgactcatcaagagattataaatttgtgaccatggcatgaattncatatcatctttttcaacatctctttcaacaatcaagaaatctatctttcaatcttctctctcaacattattcaactctttcaacaaatttttcctgaatcgtcttctcttcatctttctaaacttttttgttcaaaactttttctttcaagaaaaaatctttgatcaaaaactcgtgttattcatctttttcattctcttctctctttgccaaaagaacgaaggactaaccgcctaaattcttttgtgtctctcttctccctttcgaagagaattcaaaggacctcgactgagaattcttttgattcttccctttcccttaagcaaaatatttcaaaggactaatcacctgagatantttttgtttcccctttacaaagtgtcgcaac

SEQ ID NO: 183758 - DNA, 481 bp, Glycine max
  unsure (1)..(481): unsure at all n locations
tatagagccatngattcgtgtgttatgtagtggtgatattgtattataacatactatgggttttctttactaggctatgtataaagctagagatgagatggttaggaggtttcagagaaataagatgagagtatagccttacttggtggtccttgataggtgttgggatcataacttcacaaagatatacatgcaactggttattggttaaatccaccttgtagattcaatgttgaagaatttgataagcataagaacacccaacctagcattttggaacccattaataggtatacacatgaagatcctgaggtgcaagataaattaaatgaaggcatgaggatatacaaaaatactaaaggagattntgcaagacgagcgactgtacgtgaacagaacacgattatgccatgtaattctagtgtttgatactatgataacattacttacttcgtgattcatcttacttagtcataatata

SEQ ID NO: 183759 - DNA, 443 bp, Glycine max
  unsure (1)..(443): unsure at all n locations
agcttcaatgagtgcaaagaggcatgatgctctttttttcttccgnctcggtcactctttgcgcaataagagtacaagaccatgttttccctatgttcatttcgtcgccttttggacactgtctcttctagaagacaacctaatggatttgctcatttccaagcttgatagcatagcctatctctcatcaccaaaagctatttaattacttgctctagcttcgtagctaggtaggaagttttagttaagatcatagcgtacagcttgttgtacactcttatccctgcacaccacgcatatataaatagttaaactgtcttatttttgtgatcattaatcctatgagattctggtaattaagcttcaatatgcctatatccatcactattggaagaagaaattagcggcaactcgctaagtctattcttgatgaatgatatact

SEQ ID NO: 183760 - DNA, 405 bp, Glycine max
ctatagaaactaagctgattaattgcatgatctgtgcgccaattgacttattggcggccttgacaaggttttattttatattatattacatgacagagttcattccaacagcacaaattctttgaaatgggaacttgactttctttggcacattccatgcgtatatgatcaaaagggtatcgacaaattaagcgatggggggcgtttgtactaggaagagagatcagcatgttgttgaagatgatttacacagaggagtctcggcgaggtattgtagaagtggcagcacaaaatggttgagggccaaaagtttgcgtgctaagcccaatcattgtgcaggagggggaacatgcgcctctctcatggatctgtgcataaagaagatgcgtgaggcgcatgttattt

SEQ ID NO: 183761 - DNA, 447 bp, Glycine max
  unsure (1)..(447): unsure at all n locations
gagcagcactgtcacaatcaagcgaagagaagaatggttatcatgaagatgtacaggaaatntcttgtgcacgagattatacctgaaaggaacattctggtgattaacataaactaatacaagttgagtagaagtaaccaagaaaggccaaatagccagactagaaccacccagagatgaaagcctacgaaaacagtgacaaaaaataagaataggggaactaaatacgaaaattcttacataaaggaaattataaatacttacttatttcttacaaaatagaccttgactcgaggtaattgtgagaacccaggccaaattggttcatatggcgcgccaagaattctgaaaatctgaaagtaaattaataaatgttaataggcctacgccgcttaaagaggcacaaaatgtataacgaccaaagtgagagcaagaacttatacacta

SEQ ID NO: 183762 - DNA, 433 bp, Glycine max
  unsure (1)..(433): unsure at all n locations
ggtcctcctttcatggtctacctaatacgtgttcatgttccaccaattcagcattcaatccctccaagaccacctcccaatcattttctggttgctgatccaacccttcaactagaaccaacacctttacgtcacagtacttgcattcgtaaaccacaagaaaagtatggtttttcgaacctttatctttgacaacaactttaccatatattcctattacttcttcatataaataggcaatggagcataaatgttggtgggatgctattaaaactaaaattcttgcactagagaaaaatcagacatgggacattgttccatgtcctccatcggttaaacctctttggcagtaaattgtattcactataaagctgcattcagatggatcaacatatngatacaaggctagattggtttgttcttggaaataaag

SEQ ID NO: 183763 - DNA, 447 bp, Glycine max
  unsure (1)..(447): unsure at all n locations
agcatgagngatgagngaaagagaggaggcacattatcttatgaatgccgacatggaggtcatgaaagaaataatgaccacaatgacggaagccatgatgagtataagaaaaatgatggaggtcaacacgactacagtcattactgcaagcaccaccattgaggttgacccaactcacccatctagcctcaaccaagtaaatggccccaccttggatatggtacgtcacgaacgcaaagcgttgggaagtgccggcgacccccattttgtgcaggtacagagcaagcataccttcccaccatatggcttgcctcccaactatacaccacccaatattgcacatgctctcgatgagaatgccgataactccactcctatacttactaagaatgacgataacaaccccaatctggtcaggcacaggtccctcaacccatgggggagaca

SEQ ID NO: 183764 - DNA, 463 bp, Glycine max
cttgcggatttggtcttcgccgacgaaaggatcgaagtgggtctgaatagaggaaaatctacatcatcctgcttggacgaatgagaaaactggtgcaaatgaagagggtgagaatgaacgagaaacccatgctgcgactgccattcctacatggccaaacttcccaccagcccaacaatgtcatcgctcagccaatatcggcccttctcattacccatcagccaatcatccacaaaagccatccctaaatcaaccacaaaacccacctaccacacaaccaatgctaaacaccacctttagcatgaaccaaaacaccaaccaagaaaggaattttgcagcagaaagcctgtagaattcaccccaattctggtgtcctatgctaacttgctcccttatctacctgataatgcaatggtagccataacccctgctagggttcctcaaccttcacttttccgatgat

SEQ ID NO: 183765 - DNA, 443 bp, Glycine max
  unsure (1)..(443): unsure at all n locations
agcttaagagaactcatgagtgaaggcattcatatgtctgattatcaccatnnnctcgagaagtagctagggcttgataaccacgatacacatatcattatccgcccatttaacacatgtggcggatgcattattgctagtttaattgaacaaaaacatgtctttcctctatatcgcttaccatgcctcacctatttgttcagggaacgattacgaattaaactcacactctctccctgttttctataaatatcattggctattccatgcatatcctaccaaccatacaaatcatataccgacttatcgcttaattatacataaggcgcacatttggatttacccacatataatttataaaccactccagatatattcatataacaccattagacgctcatgggtggcaaatacgtaaaccgtttcaaatactttatgtgtat

SEQ ID NO: 183766 - DNA, 386 bp, Glycine max
attttattatcagtacatgaagaagaatacgtggccacctcatgttctcctctaagaacaataacaacatttcttgcactaaattgttgggagatggaagccatcttctcaatcaaattcctagcttcagcaagggtcatatcaccaagagctccaccactggtagcatcaatcatactcctctctatgttactaagtgcctcatagaaatattgaagaaggagttgctcagaaatctggtggtgaggacagcttgcacacaatttcttgaatctttcccagtactcatgcaagctttctccactaagttgcctgaaatgtctgttttgatggcagcgtgcctatatgcatggaagaatttctcctagaacaccctcttatggtca

SEQ ID NO: 183767 - DNA, 313 bp, Glycine max
taatggtacaaccacaaataatctgaacgatgcaatcaaccatgtacaaacatagatacatggagaacgtgatacatacgtgttatgacgataacaattatgacaacaaaagatgatgaccaatgtgatgaacaaaacgctcaaagaacaaagagcaactcatgtgaatcaatgaacatcttaagcgaattaagaacaagtcatgagtccaagaatcaaaaacaattcatgactcatgacgagatcctacaatcaataatcaatattcatgaatcaagatctcatgaatcaatatcatgactcacgactcatg

SEQ ID NO: 183768 - DNA, 203 bp, Glycine max
tcaccacacacaaaagtactcacatcaccataactttaccactacaataatatacttcatcctcctacttacctgaccacttctactactccttttcctacccacatgaacagaatgctaaatactactcgttacaaatgcactaacaatctaacaacacacatcattcaacaatcttaatacataccaaccaccccattact

SEQ ID NO: 183769 - DNA, 440 bp, Glycine max
agcttctactgttgacaggatatgtgatacaatcttgtattttcgcccttaaaggttcctgttccatgagccagcagtcccatttaacccatgcaattttcttctgatcaaggccaccaccccataggaacctcctctggatttgggtcagtttttccgctaccctgttaggaattctggaaaaaaaaaaaaagatagaaaataagaatagaggttagagtttcttttatgagggtcactcttcccccataagatagatgtctctgcttccacctagacaatatagattcagtctttcttaggattggatcccataacccacagcgcctttgattagccgcgattggtattcccaaataaaagaaaggcaaaggcatgattctgcaattcagataactggcagcctgcaacttccattgtttagattggcccaacacccc

SEQ ID NO: 183770 - DNA, 432 bp, Glycine max
  unsure (1)..(432): unsure at all n locations
tgcccagttcattgcatgtgatatcatactccatggcttgtgtgttttctttattctatatctatcctcttctttaatattgacattttctaagccaaatacaagacacacacactcatgtgaaacttgaactattagtgttttatataatattttggtgcctgaccaaatcaccccatcaaatttaccattattttcaagagtagtattttttagtgaatgtgatcttttgttaggcttaattaatgagattgatgaatttgtgtcttccgaatgtgcctttgttaaataatcacaatgccctctctttgaggtacatgttgacattttanaatatattattagtccttggttgacggcaacaaaacatggtacagaagatagaaaaagcataatagtataagcataactaaaggcatcagataacattaa

SEQ ID NO: 183771 - DNA, 428 bp, Glycine max
  unsure (1)..(428): unsure at all n locations
agcttgtccatcttcaataggaagttgaatatattatattcntnctngnaccaaatcatacacacaaaacataaataatataggcttgccccatgttttttgcatgctaaaccaatgaccaatttaacttataccaaataaataataaagggttgctccatgttaaccctcacaagtagtcatagccctgatgatgtaactctataaaaaacaccttacccaagcatgtatttctcattagggttatgactttctcatgggataacttgaatattagaaatgttatgcacatttctcagtttaaaccccttatctggcatgggcacaacctcaaatgttagatgtttgctattttgtctttcttttgaatagaatatgccggagatgacaagaatgaaaagaacaccaattgtcttcaagctacatgt

SEQ ID NO: 183772 - DNA, 478 bp, Glycine max
  unsure (1)..(478): unsure at all n locations
ngtttcaatccatatatagatcgttgcaactggtttacttcattacaaccggccaatgatgtgaatccttcaggttgagtcatgtacacttgctttttcaactcaccattaaggaaagctgttatttcacatccattntccatatctcataatcatagtatgctgctatggcaagtagaatctgaattgatttgagcatttccacaggagaaaatgttttgtcataatctattccttcctgttgacgatatcctttagcaacaaggcgagctttataggtatcaacctttacatctactctaatctttntcttgtaaacctatttacaaccaattggttttatatcctttgaagctagctttaactaaagtctatactttgttgaccttcattgattctatttcagaataccatggcttttgccatttcttgcaatccgagcttctcatggcctattcatagctcttaaggtcatcat

SEQ ID NO: 183773 - DNA, 443 bp, Glycine max
  unsure (1)..(443): unsure at all n locations
agcttaggagaaggaagggcagagagttacttatctgaacgcgggatgccccacatgtggaacaattactgatgtgggacttcactccttaaaccctcttcccctgtgccaccatgggaaaaataatgaagaataaaacctataaaaaaatgcttaagggggaagataaaatcaatccattgtaataagccatggagaatatttatgttctacttgtggtgctataactattaatgtatacccatccatgatgtgtcccaatatattaggaaaatgggattcgcatatcaaacttataaatattngtagttaactttagtcagtggatgatcattttttcttcttcttgttaaattaaatgtcgaactgagatcttatcaagatcatcgtatctctacctttatatcggagaagttttatgagacaatactactcccgcctac

SEQ ID NO: 183774 - DNA, 469 bp, Glycine max
tcagcacgaggttcttctcgagtggagcgggcctttcttttgatgcaatttgaatggactccaactctttctgcgtatataggtctcgcaaaagagaccagatgccatagcctgctcaagccacaggtcaaatgcctcttcatcttgatccatcatttcagcatcaaaatcccacgggaatctactcgagtttgcacgttggctattctccatgccaaccatgtctacatggaaactcggtcgatgggtatttggcctgcaagccattccctgcaagaaataaaataagctgtcatgtacataagtggagtataaaatgatgcttcttaatcatgatgtctctatctttagcacacaataaccactaccttacataagagaccaatagatggaactcaatgaatttctattgtcagtatagcaagaattcctaagttttactcttgtaggatgttaggatccttaaatt

SEQ ID NO: 183775 - DNA, 454 bp, Glycine max
agcttgtagcattatggggtacccgacacaagttgtactatgtggcgatcgggcgatggcgcaaaacaactctccacatccacaaatcacgcataaacccaccatccccagttgcccaccttcaactgagctcacgtactcccacgtagcccttatcctcattcctctcaacaccgggtccacatcaatctctccaagctgccacaacacccaagcaatacacaatccaaacatgatgaactatcaaaaccaataaaacagggcaaaggcagaatactctgcccaaaaacacaaaccaataccacagctttccttactcaaataccccagtaacattctcttagttccaattcgttaaccgttggatcgactctaaaattttactggagggccctagtacataaatctacattgcggccattgtgatctgctataatacgtgcagaacccgatc

SEQ ID NO: 183776 - DNA, 449 bp, Glycine max
  unsure (1)..(449): unsure at all n locations
tgtgcanatcanatcactcctacatttcatctctagcatgcattttctttctttacccactcctcacgtttggttntttagggaaaaacaccataactaaacgcgccgcaagggatccctatcgcaccagatccaaatctagaacgatgggtgatcaagaggagacgcaggaacagatgaaagccgacatgtcggctctgaaagaacaaatggcctccatgatggaggccatgttaagtatgaagcagctcatagagaagaacgcggccaccgccgccgctgtcagttcggctgccgaagcagactcgactctcttggcaactacgcaccatcctccctcaaacatagtaggacggtgaagggacacactgnggcacgatggcagccctcacctgtgatacaaccgagcggcttacccttatggattgccgccaactattcaccacccg

SEQ ID NO: 183777 - DNA, 408 bp, Glycine max
  unsure (1)..(408): unsure at all n locations
atcaatattatgggttatgaatgaaaatatttatgcccaattcatagtaatctaatcttatatattcttaggatgattgtatcgcctgatcaggcgcatattgtatttcatactcacatctgtcatctgtccattataggcatgaataacggaaattcaaacatagctgaagtcacaaactaggcattttaactgtaaatacatntttttttttgcgtcacacgaaatgttgctttctgaacgtgtgcaaagctaactaaacgtgtaaatacgtattaaccgtcgtgttggttctgctttacagatgtacattgttgcacaaaattgcgtcaaatacagctaaaggatacataattgtatctntaaattgacgcacgttagagaatattaaacacggaacctgacatt

SEQ ID NO: 183778 - DNA, 411 bp, Glycine max
  unsure (1)..(411): unsure at all n locations
tatattatccnccgagctgagtgatacttgtgttggacaccccatgtctactcgtcactaatttagctagctctcttgccaattcataaaatataaactaatcaaggatacctgacaattagttccccacacaaaatatttgtacatggcgataaaacaatacacattattacggatattttctgtcggatctcaaaaagaaaggcgggacatcgtcaaataaaaatcatttcataaacatataatataacatacaaggaaaagatacaataaacaatatacatttatgaattgcatgcatattacaactttcatataatgctgtgattgcacatagcatataactaaaaccatgctctacgatggaatgataagaaaaggtggaattaccttccatatcttgtgaatgca

SEQ ID NO: 183779 - DNA, 381 bp, Glycine max
acggacctatgaaactcaagctttaatggaagcaagagatgaaaggcgcgggacccttatttgtaaacaaagatcatgactgagtgaaggacattctaactatatttgggaagacccaaaagacggatgcatctgacaagaacatatggaagaaaacgtcaatattctttgatcttccatgctggactgatcttgaagtagaaattatatagacgtgatgcatgcggataaaaatgtccatgattgtttaattgacacccatcttaacatttaaggcgagacacaggatggtttgaagtctcatgattgttaagaaccttgtatctgtgaatgatctgaaattggtatgatcgaaatctcatgattgtcacgtgttaatgc

SEQ ID NO: 183780 - DNA, 290 bp, Glycine max
tctcggcaggatgcttcaatggatgaatagagagagggtgagaatggttcatgtgggcacactcaattcgaggtatcatagtcggagagaagtgtcactctcaattatgtctacacgattctgttcatcatagttacaacaagtgtcacacatgctcatatgtatagactaggggagctttcttgaaaagcattacttgagaaaacattctttagaagcttctatgagaaaactatcttgataaccttgagtctagtgacactcacccctctcataactgagcttacatc

SEQ ID NO: 183781 - DNA, 374 bp, Glycine max
ctataaatactcaaccttatgtgtaacactcttcaagtgatgagaagacagtgtcattctatcatctctccatatgcgaaaaccggcactggcttatagacaaatagatacttgtgacttaagcttagaggcgagattaaggcgattgtcacgagttgcctaaatagtacatgtagcacctacaactgacatattgaattcttggtcatatatcaaagatcctattaatgcaactctccatgtctataatgacaacttgctgtatcccattatttcggatgaactatgataaaacctctagtgttccttactgcatctatatatcactgttttcccaaaatatacaactacactattgctgccaaagtttgtca

SEQ ID NO: 183782 - DNA, 417 bp, Glycine max
  unsure (1)..(417): unsure at all n locations
agctntntattgtaatcttgatttctgaattttttgtgataaaaatggccattgaccactcccttttccatgacttaaccaaattacccagtgacggagtaccatttaaaggtacactgaatgacgactggaaatttgatttctctgcccatgatgcccgccagttggttagcaccaacaatgcggatatgatctgacttcttcttgccagatcattggttttagaaagcctcatctctcactatttaattgtgcgtattctgcttacacagtcttccaaccttgcccatgtttctgaggaagatctaattatcatgtgggcctttatacagggcgtcaacttgactgggcacacttaatcatatatcgcatgcataaggcatttgcgattaatgctccattaccatatccacggct

SEQ ID NO: 183783 - DNA, 444 bp, Glycine max
agctttgtacaaacacgtgtagaataaggtaatgtttattcactctacaagcgttcagtaaaatataataggacaggaacctgttacatgtctatgtgatacaattttctgcactcccaaaaaagtagaatcttgacaagaggctgaaatattcctcatgaagaaataaagacaatgacaaattaccttgaacaaagtcaaaagatgattgtcaatatccaacatatgatcataattgtagaattcattgctgtttcccacatgaaatatatggtgggaaataagtattcgggaagtgaaatcgcaaggaatgtagatcatgagggcacacataagtacctaaggctatcactagggatcatcggctcaaaatcactatcttgatataactgaacatagttgcaatcaagaagactaacgtttctgttttctaccgccaccaca

SEQ ID NO: 183784 - DNA, 436 bp, Glycine max
tcatgatgaatcaacaatgatgtcaaggtgttgtgatgatttctatgatgacaacaaaatatgctgacaaaagtgatgaacaaacagcttaagtgaatcatagaacatccatctcaagaatcatgaatcaagattcaagttcaagaatcaagaagaattcacgactcaagaagaaagcctacaaacaaagattcaagatctcaagaatccagatcaagattcaagatctcaagaatcaagatcaagaatcaagactcaagatctcaagaatcaagatcaagattcaagactcaagattcacgaatgaagaaaagactcaatcaagataagtattacaaagtttactaaaactttgaatagcacatgagtttgtgacaaaacctttaccatagagtcttactctctggtaatcgataccatgttgttgtatcgatta

SEQ ID NO: 183785 - DNA, 449 bp, Glycine max
  unsure (1)..(449): unsure at all n locations
agcttctacattcaatntcgagcggtgcgatatattactgtactcaatcggacatccgagtaaaaaggtattgtattttgaatttgctcacggcttccgcattccatttctagcgtctcgatatatcacgggactcaatcggacatcagagtaaaaagttatcgtcgtttgaatctgctcacagcttctacattctatgtcgagcttttcgatatattacgggactcaatccgacatcctagtaaaaagttattgcagtctgaatatgctcagggcttctgtattccatttcgagcgtctcgatatactacgggactcaatcggacatccaagtaaaaagttattgtccgttgaatttgctcagagcttctacattccatttcgagcttctcgatatattacgggactcaatcatacttccgagtaacaagttattgtcgtttcaattc

SEQ ID NO: 183786 - DNA, 445 bp, Glycine max
  unsure (1)..(445): unsure at all n locations
ntgagcatattcaaacgacaacaacttcttactctgattgtgttctgtttatatcgagacgctcggacttgaatgccaaagctctgagcaaattcaaacgacaacaacttcttactctgatgtctgattgagtcatgtaaaatatcgagacgctcgaaattcaatgttgaagctctgagcaaattcaaatgacaataactctttaatcggatatccgattgagtcccgtgataaatcgaaacgcacaaaattgaatgttgaagctctgagaaaattcaaacgacaataatcttttagtcggatatccgattgagccccctggtaaatcgaaacgctcgaaattgaatgttgaagctctgagaaaattcaaacgacaataactttttactcggatgtctgactgagtcccgaatataccgagacgctcgaaattgaataacgaagc

SEQ ID NO: 183787 - DNA, 450 bp, Glycine max
agcttgtcctttagttattgtattcttgagctagtctctaatacaaagccttgttgataagtaaagcaactgtagtatgtctgtttatatagagggctggagaaaggaagactgcaatggtattgaaagctatttgctattaatccccttacaatagacataatcctttaagttgaaaatatatctagaaagcatagtacagaagctaatttagttatgtataataataaataaaaaataaacatgctccacaatttgtattcaaacataaggttggaagtgcttaccaagggtccaccaatctataccgctagtatgcccagctccagttataatttcctgatatcaattcccttaaaaaccttaaaataggataatgataataatagtaacagataacaacacataaataatgaaatgattctttgtgcgtattatgcttttttaata

SEQ ID NO: 183788 - DNA, 483 bp, Glycine max
  unsure (1)..(483): unsure at all n locations
ntgttattggtgtgctctntgcctaagagttactgtcatttcatatatactttattgcttggaagagactctgtttctcttgatgaagtgcaggctactctgaattcaaaggaattgaatgaaagacaggaaaagaagtcctctataagtggtgaagggctgacaacaagaggtaagaccttcaagaaagatagtaagtctgataagaagaagcaaaagccagaaaaccagaagaatggtgaaggaaatgtcctcaaaatcagatgttatcactgtaaaaaagagggttatacaagggaaagttgtcctgaaaggcaaaaaaatggtggcagtaacaataggagaaggactcacgaaatgctgcaattgttcaagatgatggctatgaatctgcagaggcactggtggtgtctgataagaatccagaaactaaatggataatggattcaaggtgttcatggcatatgacaccaaacagatcat

SEQ ID NO: 183789 - DNA, 429 bp, Glycine max
  unsure (1)..(429): unsure at all n locations
agcttctcgccaattgcatggcggtgcgcagttttatacataccctggntgcaaattatttaataagaaaccctcttaattaattcttaaaactaaacccctttcataaattcgccaaattagtgcatacattgttgtattgataggtagttcatttttctcatcgattccattcaactttgattggcgcgtatatacaacaccatnttgcacgtttctgcactcatgaatgacctaaaggtatccatctctgtctgtctgtttggaacttaactttgattaagagtttaacttatataagctgctagtgtaaaatatttacacataagagttcaccttatcctccataatataatcatacttgattacttttgacctacattttttaaataatgcacatttggctgaataaatttttaaatttaccct

SEQ ID NO: 183790 - DNA, 447 bp, Glycine max
ttgatgcaacatatggagatgttaatgaaacaacgagatgatgcgctccatgagaggttggatcaaatggagaatagagatcatattgaagaagaatggacgagaagagggaatgatggtgttcctatacaaaaccgaattgatggtattaaactcaacattcctccatttaaaggaaagaatgatctggaggcctactctgagagggagattaaaataaagcatgttttctcatgcaacaactatgatgaggaccacaacgtgaaacttgctgtcacggagatttccgactatgctcttgtgtggtggaacaagctacaataggagagagcaagaaatgaagagccactggttgatacatggacggagatgaaacagatcatgatgaagcggtatgtgccggctagttactcaacggacttgaaattcatgctccaaagactaacc

SEQ ID NO: 183791 - DNA, 470 bp, Glycine max
ctcagagtcacccgcggcatgcaagctttaaaactagcttagtgactgattgcaatgtttttacgtcttttcttccgctatggacctgtatcatacttgctgcaattcaattagctcataggtcaaggatgtgcacatttcattagatgtacacagtatttagattatatggtttaatatgaaccaagctaggtgtgaaagaggtccttttcagtatgagcacattgttcataaagatatgtctacagccttaatctttgcaactactcatatgggatggattaaatgcaacattgatggtgtaacaaatactcgtctaaggccttcaactacggggggatattttcgtattctaagggtgcatttttgggtagatactctcactctatgaatattgcaattgcctttaatgctgagttgtcagtgggatctctagctatagacatatcacaaggcaaacgtccggatct

SEQ ID NO: 183792 - DNA, 485 bp, Glycine max
  unsure (1)..(485): unsure at all n locations
cttgaatcgattcacacatactgtaatcgatgacgcagaggagttttcataacacattctcatcagtcacatctttgtctctgattcttaaggggccatcaaaggcttatatatatatgactagagacacaaatttaacaagagtgttgaagaacaaataggtcttatcctcttaacaagcaaaaattgtttatcctcttacaaataccttgtccaaaacactngtgattcaataaggaattatttgagtgctcaaattgttcaatctatctctctcaagagagagttcttcttctcttcttctgtattctgaacagggattaagaggccgatggtctcttgttgtgaaaggattctaaacacagaggaaggattgtccttgtgtgtttagaacttgtaacaggaattgacaagattatggaactctcaagcgggttgcttgccgactgtacgtaggcacaagggtgttgctgaaccgtataaat

SEQ ID NO: 183793 - DNA, 414 bp, Glycine max
agcttattcaaagatgatgcaagctctcttggatcttgtaagcctaagatcttcttcatcaatggattcctctgcttcttggaagataaatggccgcggaatggagaacgaatagagagaggagacccctcttttaggagaagataagtctagaataatctcacctccataagaggccatttataagagtcttgacgaacatcgagatgatcgaatggagacggaaagaagtacccatattttgcgcctaaacgagctctgacatctgaagtcaattttccatgatccatgttcgaaaatagacccacacctcacccccacttattacctaagtgtcaccggaattgcagggacactccatctcactctgatttgaattgaatttgttgaccaaactctgagccttatttacta

SEQ ID NO: 183794 - DNA, 455 bp, Glycine max
  unsure (1)..(455): unsure at all n locations
acctatagaatactaagcttctaaggaggtgagcttagttatgagaggcgtgtgttgtttctaagctctagcttctcaaggaagttttctcatagaagcattctcaggaagttttctcaagaaagcttctcaaggaagctacctagtctataaatagaagtatgtgtaatacttgtagcaactttgatgaatgagagtcttgtgagacacaactcacagttcaaattctctccctttttcttccttaaatttcgggctcccccctctctctttctctccctctttcttttcctccatttaagcatcctctccaagcttcttatccaaggctcatcttggtggtgaaagcttttcttcatggctcattccttaatggatggcgcctcctctcacctcttttactttgtcttccgctgcatcttcatggtggaaaatcaccattaaaagaccncatt

SEQ ID NO: 183795 - DNA, 444 bp, Glycine max
  unsure (1)..(444): unsure at all n locations
agctcaacaaacatttggagtgctggtcatatgttttattcgctacaagntctatttacagaaacatttgttaacggagatcatgtacctcgtgtgagacatatatatatatatacatatatatatatatataatctcgatatactgtacgaagctgctgtgctgtgagtagtgataatctaaatatgaaatattgtgtttatattcaaaagtcattcatatcattgttaatatagaccccttcacgctttagttgtctcataaaataaattcacaaagttatgcttttctgggtaactgttcaaggttatttaccaaagattgataatatctctcaaagagtcctctggcttttcacataaaaaacaatctcctggttgaccgaaataattaaatacgggatttgcagttaattatcactactgttattgtttcattgttcta

SEQ ID NO: 183796 - DNA, 436 bp, Glycine max
  unsure (1)..(436): unsure at all n locations
actatgaatactaagcttgacgcatattgcacgtgtaaaataaagggaaatttttcatgcatataacaaggagtaaaacgcagtaaanaaaaataaggcgtaaaatgatatatatttattaatgtactatttttttatctatcaaataactttaatttgatttttttttcactccattttacttcaaccaaagaaccttactttgtcacctttaagtatatttatccttttttcttacactggctgcctgactataattattataatgtgaccacgaacaacttacttaatttcttaccatgagttaggataaaaattgttgaaaactgttcagatcgtcgttttatccgctgcaacttcctttagtggaacgaacagctttgtaccaaataatatcgaatcaaacgtgaatattctatcttatttgaaaaataat

SEQ ID NO: 183797 - DNA, 445 bp, Glycine max
  unsure (1)..(445): unsure at all n locations
agcttctccttactcacttgatcacacaggatttgattttttttttcaatatgtttactccagccatgtgccacaggatgcttatctaaatcaattgctgatttgttatccatcaacaacctcataggactgtaatttctcaagtttagttcttccattaaagcttccagccatagagcttgacaggctgtcatagcagcaacaatatgttctgcttcacatgttgacaaagcaactacactctacttctttgagcacgtaccaagagattggtgatgttccaaattngaaaacataaccagtagtgtttttcctatcattcttatcacctcaccaatctaaatcactataaccaaacacttctccttctatattcttctaactgtaaggatataaaatgccaagatccaatgttcctttcacatacctcagaatcctctntgct

SEQ ID NO: 183798 - DNA, 447 bp, Glycine max
  unsure (1)..(447): unsure at all n locations
tagcactnggaatctagacactccatcgactagcttgtcgttgttgttcagagggtatgcatcattagggcacgccttgttcaaattggtatagtcagtgcatattcgccatttgccattcacctttttgaccatgacgatgttagcaagccaggtggagtatctgacttctctgatgaagttagcattgaggagctttgcgtctttcttctcccatcttccttttcttttgtgatatcggtttggcttggggatagatgataagcttgtggcagataatgctaggatggattcccgacatgtaagatggctaccaagcaaacaagtccgcatttctgtgtaggacattgatgatgcgtcgatgctcatggctggtgagggccctactgagttgcatacactgcttgggtttatgtctgagcagcaactagacaagctctttgatgg

SEQ ID NO: 183799 - DNA, 448 bp, Glycine max
  unsure (1)..(448): unsure at all n locations
agcttctatatgccaaatagaaggaaatntattatatatttcaaaaacaaggttaataacaacattcggggtcaattacccctgtcaaaacataaagggctaaggggtgttttagattctactaaaaggagacatcattttgaaattccaatcaagccaatgtgattcgggttcaatgaaggtcatgaaaataacatcaattttataacaagataacttttacaatgtctatattttaagggtttttcaaaggaagtgtaaaagtaccctattacagtacccaaaacacaagagacactaagagaaactcaaactaactaagagaaaggcttagaagtcaagattaccttaaagaagccaccaaagacaggattggtggattcttctccactgaatccttgaggtggatattgaggattatgctctaattaaaatgttcctcttggtg

SEQ ID NO: 183800 - DNA, 479 bp, Glycine max
  unsure (1)..(479): unsure at all n locations
tanatagaagcagntgngttcatgtaaggcttaaaatgcaataattggtcaaacttttgtaatttgtaagtcaaatcttgaatttgagcattcagaaattgtgttgtcaagaaatgttctaagaaatgataattgcgtttttcttgatttaaatattctctttcctttcttgatttcagttatttttgtgtttaatattttttttccttttattatggtgctgataccaaaatcattccatctatattcatgccagttgtcctggctgttaacaatctcctcttttttctttttttatctgctgttgacagttcttccaattcccatctttttctttctttcatacacatgcattgcagcctagtcttcccattcagttcatttgggctcagcctcatngttttcccttctatcataaacttgtgcacagggtatatatcanatgtcttctgagacgtactttagaatttgtgtttact

SEQ ID NO: 183801 - DNA, 442 bp, Glycine max
  unsure (1)..(442): unsure at all n locations
agcttgctaacccatggaagctcctaatatctttcactttttnntaggggggccattcttagatggcctttattttctcagggtcaacttggaccccatttctaccaactacaaacccttagaaaactatattttctaaacaaaaggtacacttctctatatttgcatagagggtgtttttcctaaggactgaaagaacttgcctgagatttcctaagtgatcatctagcctcctattgtacactaaaatatcatcaaaataaacaactacaaatctacctatgaaatcccttaagacatgatgcataagcctcataaaggtgcttggcgcattagtgagcccaaaaggcattactacccattcatacaaatcaaacatggtcttgatagcatgtttccactcatcaccctctttcattctgatttgaggataatcactttt

SEQ ID NO: 183802 - DNA, 398 bp, Glycine max
  unsure (1)..(398): unsure at all n locations
ntgatgcaacatatggagaggttaatgaaacaacgagatgatgctctccatgagaggttggatcaaatggttaacagagatcataatgaagaataaagaaggacaagagggaatgatggtgttcctagacaaaaccaaattgatggtattaaactcaacattccttcctttataggatagaatgatccggatgcctacttggagtgtgagatgaaaatagagcatattttctcatgcaacaactatgaggaggacaaacaggtgaagcttaccgccacagagttttctgactatgctcttgtgtggtggaacaagctacaaaaggagagagcaagaaataaagagccaatggttgatacatggatggagatggaacagatcatgatgaagcggtatgt

SEQ ID NO: 183803 - DNA, 441 bp, Glycine max
  unsure (1)..(441): unsure at all n locations
agctngncactatgtataagagngatttttttcnagactnagngaaaatatctgctacgcaatcatttgaattggaggagcggtaatgacttcagattaaatcttctctctaatgaaataacaatcaatggcccactaaactgttaaaaccataatgctaaatcaatcaaaccaaaccctaagggattgtatatagatatgacaaactagtccaatagactccccttgagcaacagatcaagtaagtttctccatataaacctcattgtcaagatcaccaaggagaaaagcattcttggatcatgaatatctagttggagtaacagccatggacaaaaacaagcaaactgaagccattttctccactggcaaggtgtccccttaatctaattcaaaaacctatagattcccttgggctattacacaagccttatgacaatc

SEQ ID NO: 183804 - DNA, 465 bp, Glycine max
tgtgataaggaacttaaagtctgagtggtatgtatggagtattcattactgagaggttctataaatttatttaagcattttgggtcttatttaatgatataccaattatatgttttaaaaatatcattgcgcaagggagttatgtaaaaatagaaagcaatcaaaatattctttctaaataaataaaatgagttagtgaatcgaccagtacgttaaatggtcaataaacattaatgagtgtcattctccgaacagagttaaaattttaatatcgactgaaatattcctctgcaatccaaagcatcgaacaaaaaaaattggtacatattgtcatgtttgtggatacccacattcccacctacctgttagttgtttttctttctcaacttgtatctacttttattattaggtttatcaaatctatttaagcatttcggtcatatataatgagttagcaattatata

SEQ ID NO: 183805 - DNA, 443 bp, Glycine max
  unsure (1)..(443): unsure at all n locations
agcttattgtattaattaattgacaaaaataccatttttttaaataaatnttaacaccgaaatcaattgtatatgatataactgttgaaatttaagaagaaattgcaatgcttcttagatatttatatacttggaaagttcaaaacatgggtggtatttttttgatcatatgtatataactgttgaaatttaagaagaaattgcaatccttcttagatatttatatacttggaaagttcataacatgggtggctattttttatcatatgtattcttcatggaagataattttattcaaatcggataaatattataaataatcatgtttttcttttaagtacttaatacaaccatgattattaaactcttgagttaactcgttaattcttacgacgaatttatgaatccacttgttctctgctagttaactcttaagtaaactc

SEQ ID NO: 183806 - DNA, 460 bp, Glycine max
  unsure (1)..(460): unsure at all n locations
tgtacacacaagaaaatgaagcacttcagctggtttgngatctaanataccgccaaaggtggtgacttttacgtggagattgatcctaaataggttgccattgcgagataaacttcttcagcgcaacatcatcactaatgcaactgatgctttctgtccgcagtgtaatacgacgcaagagacaaggacacatgtgatcctctcctgctcataaatatctcaactctggatggattggtacagacaagagaatgtccaacaactttgccaaactcgatggagactcacctttggtagcacatgttcccaacaagttcaatctaggaggcaagattgagagctatgatctggacaagaatatcatggtgtatatggcgtgcgaggaacaaaaagaatttgaaggcatggatttggatactataaaaatcaacgaagagtcaccctctgacgtgtcatggta

SEQ ID NO: 183807 - DNA, 264 bp, Glycine max
aaagaagacgaaacccaccaagcaaaggaggaaacccacaaggaagaacccaccagagggaaagcaaagaaaaaaaacccccacaaaaggggaagaaaagagagcaaacgaaacccggcaaaaaccaaaaaggcggagcccggccaacaacgaaaaacaacggccatgacaaaaaagagaaccgccaagggcttcccgaaacaccaaaccggccagcagacgcccgctacaacaaagaaagcccacaacaaccgaacccaacca

SEQ ID NO: 183808 - DNA, 496 bp, Glycine max
tgaaaaaagtcatttaagtttcgtagagacccaacactctatccatccaacgacactgtcaaaccaattaagtatacgcgtagggccatagtgaaagaaaaaaacatatgaagcttcatagaatactctctttaaggttcgtagagatcctacggtcatactaaaaaaaaaaaaaaaagatatgaaacttcacagaaacgcaataagattaaggctatatataagtttgcttgttttattagaatggagaccgaaaactcacacaaacctttattcaaaattctgatggctgtgcgatcattctcttacgatgtgttcctcagcttccgaggggaagatactcgttattggttcactggcaatctctacaatgtccttcgcgaaaggggaattcacaccttcattgatgacgacgagctccagataggggaccaaatcacgtcagcacttcaggaagcgaatgagaagtccaagaatttcatcatcgtgctctctg

SEQ ID NO: 183809 - DNA, 462 bp, Glycine max
  unsure (1)..(462): unsure at all n locations
taaacgactgcagcatgcaagctttattctgnatttatacaacaacaaattctctattctatacagtataaatttaccagttcaagcacttattagacacaatttcaaatggcgccaatatcttaacgattcacacagaaagaagcaataaaagagaagaatccgacaattttgatatgacttaattacagaatatacctatacacaatatttatcatggagaaactcccataattccttgtcaaagtggcagtttttcatagctgaaatattttgttcctttacagttgattcttaatgagtcacatgtttctttggttgttaacaatctataaatcttgctgaactcattcctggacaatgcacatatcaaagtttaatgagctgttgtgtaagcttcatatagcaaggttgcattgtccatatacttagggcagaatggtatgttctttcccatataag

SEQ ID NO: 183810 - DNA, 342 bp, Glycine max
  unsure (1)..(342): unsure at all n locations
actctctaatggaggactatcacaacataatatgtcttgttttgtatctacttcacggggaaacactttgcataatatgaatatngcaacaatgcacatttttgatgccatggcttcccatggatataatgttactatctacaagatgatcctaatgatgcctacggagttcaccatgtgaaagtcaatttatacaactcatcttataaccaaacattttatcctttcattgagcatataaagacattgatgatagctcgaactcatatgatttaacatattgccccctatttatgaccagtgtggggagacataattcatttattttaatttgcccctttc

SEQ ID NO: 183811 - DNA, 431 bp, Glycine max
  unsure (1)..(431): unsure at all n locations
ttacagcatatgttaataatgacccactaacctataanttatttctcttattgccattaacctatggaattaaaataaaacttaatggctgaatgtaactgatattgtggcatccaaatgtcacccccaacagccatcaagtcagccaccatttggtctcccaaatagctgatgcctatgttgccaattgagccactattaaaccttgaactaaacctaactaaagccctcttaattgattaacccaaaacatatttttggtcagccaactttacaaggattgggccattatttagacaaactaaacactctaaatattgagaaatagtggtgtcatttagtcctcctccatttgggccatgatacaattcacaacactggacttttcttcttgaaacttgtgctgtattcaaatattatggacagcactt

SEQ ID NO: 183812 - DNA, 493 bp, Glycine max
  unsure (1)..(493): unsure at all n locations
gacacttcaatactcaagctgaaggttgtcatacctcaacaaatatatatatatatatatatatatgtatgttnaggcagaaagataacttatatatgcatgtatgttaacaaaaacacacttcacaaaatatatatatgtatgtttaggtagcaagataccttggatatgcatgtatgtatcaaaataatacctcacaaaatatatatatgtgtggttaggtagcaagataccttggatatgcatgtatatatcaaatatacctcatataaatatacacatgtttaggtagcaaaatacctcataaaaaataagatggaaataatacaaacgagaaaaaatatgaacaaatgaaaaaataaaagataaataagttgtctagctgatatacgacatgcttttgaaaagagttgacttacaacttttctttgataaaaattcacttatcataactagtctgtggaaaaatgtgtacaccttgagggtgaatgct

SEQ ID NO: 183813 - DNA, 434 bp, Glycine max
  unsure (1)..(434): unsure at all n locations
cagctntgacttgagtcatcaagcactatctatatgtgaccatggcatgagttttaaaaataattatcattatctctttcaatcaatctttcaatatctttcatctctttcaacagaactttctggnttcatttctcttcatctttctaaaagttttttatcaacactttctcttccaagaaaagttctttattcaaaaacttgggctattcatctttttcattctcttctctcttttccaaaaagaattcaagaaggactaatcgcctaaattctttntgtgtctctcttctcccttttccaaaagaacaaaggactaaccgccagaattcttttgtgtctcccttttccctttccaagagaantcanaaggacatagnttgaaaattcttttgattcttcccttctccttacacaaaagattttaaaggact

SEQ ID NO: 183814 - DNA, 429 bp, Glycine max
gtacgtggctcattgactccagaatgctgcaaagaatgacaaagatctgaatggcgatctgcacaagaatatagaccacatactcttccaacaggtgtagattttttattcatggcaagctgggttactatgttgactaaggcatcaaattttccttcaagctttttattttcagtagatgaagatgaatccgtggccacctcatggactcctctaagaataatagcatcatttcttgcactgaattgttgggagttggaagccatcttctcaatcaaattcctatcctcagcaggggtcatatcaccaagaactccaccactgacagcatcaatcatactcctctgcatgttgctaagtccctcatagaaatattgaagaagttcctcagaaatatggtggtgaaggcagcttgcacacaatttcttg

SEQ ID NO: 183815 - DNA, 177 bp, Glycine max
ttcaggatattcttaaggaggacctctctcacctcttcttagagtacggtgcatttccatggtggaaaatcaccattaaaggaccccattgaaactcaaagatccagtctccatagaagccccacaagcaacctgtcatcaagacttttcgggaggcatgaacattattataactac

SEQ ID NO: 183816 - DNA, 330 bp, Glycine max
tgagttgtaagagctataagtgacagtgactaattcttgttactgtgagaaattagtggaacttagtggtttacatggaactagaataagtcttagtggttgagacaacaatataattttgtgagtcttattagtatctttctctttttgtgttaagactgacctacggttcgaatttgattttgtttttgaaaatacgttgtgtaaatatattagccatcgtctaatttagtctttagtaaaatatgatacttgtctttcaaagttatcgcaaatgatagctttgtgttttcaaaataatgtttataaaatctaaatcacaatttcatt

SEQ ID NO: 183817 - DNA, 256 bp, Glycine max
  unsure (1)..(256): unsure at all n locations
gttatgtatatgtnccaaaatgcttagagtaatccggatagcctattctggattgcttgttccaaaagctttaattttaaaaaatttcggtctgtgggtttttttgatgtggcgtatcatgtgggtcattgtcccgactttcttcactttttcctgcgacgtaccctaagatcatcagtgaaaatattgatccttgcaatcaagcatccttgtttcagtctttgcaccacttgaattcttcaatacttgagtacct

SEQ ID NO: 183818 - DNA, 251 bp, Glycine max
ctccatcacagtaacttgtgcgtggcgtatgtatctctcctctttctcacatgttattcatcctctctcttaatacattgaaaaactcttggattaatttggagtgaactggattggtgacctatagcgactatgtattaataacaagagattgtggctgtaagtcacttctgcaattgatatgttcaatgtctgcgatagaatattgctacatctagtcagatagtgctataatacatagccattacatg

SEQ ID NO: 183819 - DNA, 427 bp, Glycine max
  unsure (1)..(427): unsure at all n locations
tattcgntgaccatagagtggtacctggagatatgtcgcgggggtcaagagaccttggggacgtcaggtggggtgctattgcccanaaccaagcttgaccaatcccaacccaacccgggcatagtcagtcagtgagaacctgtgatgtacctaaacaggcgagctcctggcagtcaaccgataaaagaacaaagaccacaaagcaaggaggcttgtgtggtggctggccagctatgaatcttgagtgatatatgggatatggtctctggtaatcgattaccaagggtgggtaatcgactacaaggcttaaaagtgaagacaggaagctaagatggcctctggtaatcgattaccaagggagtgtaatcgattaccgggcttataaacgagatcaggaagttaagagggcttctggtaatcgattacc

SEQ ID NO: 183820 - DNA, 451 bp, Glycine max
ccttagttcaaaactgataagagtcttgttctctgtctattagctgatataagcttctaattaactgttctaaattctgtcaaaaataaaaataaactcttccaaatgtctcttatagtgcgtttgaatagaaaattttaactaaggaaactaatttatcagagaatttgaatttctgtaatgtagaattcattgtttgaatgttctttatgaaaaatgtaaaattttggaattttaaaacagaattttgaacaactaataatctggaatttcaatttccttctaaaaggtgagaaattgaaattctcttattacaatcttcttcaagaaacaccgtttagctttgaatatttgatcggtgtgagctataaaacacatttacagcaatcattatattctcctttttttgatacattttaacctcaaatttatttttttaacaaccaaattg

SEQ ID NO: 183821 - DNA, 444 bp, Glycine max
tcttgcgttgccgctcttggtgctcagataatcccaaattcatatccctcttatttccagctattttgaattctttagttcctgaatgtataaccttcatattgtcgctcgttcccctctttcttttctgcaaaaaagaaaatcaatatcaaagaaaacatggatgaagtcctaaggatgccatgtacatgtgtatttttgaagatatagtatttatattccatcaagcatacattgactgttgattacatgtaatagactttttataacatggttgccccaaatcacaattaaaaatcacaactaccaatctttcggagtcctttggttaatttgtcttgtctccttatgtggtggggttttgtttaataatattatacttttgccttccaaaaaaaacttatgactgatcctctcttcattaatcatattttgtatgttatt

SEQ ID NO: 183822 - DNA, 338 bp, Glycine max
accgaagagatgtgagcttttttttctttatgtacaaaagggcttgaatactaaggggtagatacttggactatgtggtttttgacaaccaatgtactctaaccaaccggctagtcgttatgaaacctgaatgtctaaacggcatcctttcatcaagataatgaaacagaccctatcaggagctgtggggctggcacttgatattaaatagtggatagggcttggaaaaatacactggtggtatcataaatgtaaaatgcaagagatgtaaaggttttgtttctgaaaagaggattattcagaaaatacagttgaacttttagctttgatcaataagg

SEQ ID NO: 183823 - DNA, 313 bp, Glycine max
ataaatcttggtttatggttaatgttgtctctacaatatttccattggatttaatgatgaaatctgtgcattttcaggtgaaaaagaggctaagttttgaattgcaaataatagcagttgggctaagtgcatatccaccgctaagcatatcttcagcgcgcttattgcaatggagaattttgcagagcgtcagcatcaaagtcgtgcgctaagggcgagatcaatgcactaagcgcagcaggtgccttcagccaggctaagcgcgagtctggcgctaatcccaatttaacttactcgtgctaagcgcgagggt

SEQ ID NO: 183824 - DNA, 398 bp, Glycine max
ttgatgatattgtcttcaccgacgaaaggatcgttgttgttcttaataaacgcatattaatcattctgcttggacgaatgagaaaactatggcaaataaagatggtgacgatgatggagaaacccatgctgtgactgccattcctgtatggcacagtgtcccaccaacccataaatgtcattacatcaaccacttctccttacctaccgcccatctatccacaaaggccatccctaaatcaaccacaaagtctttctaccgcacttccaatgacgaacaccatctttagcacataccttaaacaccatccaagatatgaattttgcagcgagatagcctgtctaattcaccccaattccagtgtcctatgctgacttgctaccatatctacttgataa

SEQ ID NO: 183825 - DNA, 452 bp, Glycine max
  unsure (1)..(452): unsure at all n locations
gcttgggactaaaanactattaacagctccaatgttctagtttaggtctctcttcgattattggttnttagttntagnctctctctcttcttctctctcctattttcgnttttagttttaggcttttcttagacacttttttgttttgcaattccagttttgacttttcattttagcaataaaatttcgttcttcaatctataatttcgttctctattgattaatggaaggctagattctctggtgttgttccttttgaggacgaagcccaactctctntgaggtttcgcttgcaatgtggtttcctggcagttttcccttcaccagttatcccaatttcgtgaatattaatcagtgcacgcttcgtgttcgattaattgcctctaagcctaacttgcgttcatgcttaatggacgaagggctaactggtgtatgtggtgcctaatcacgga

SEQ ID NO: 183826 - DNA, 482 bp, Glycine max
  unsure (1)..(482): unsure at all n locations
ttcagcanatgtcttcacaaataatcatcacacatcttatacctatctagactacccatcatatctccccaaaccccatacccacgaaaatcaaaggagaaagaagtccacccaaacctgaattttcgaagtcccactcgtagacacgcacttcacgaccccgaaaatgccatcctttcgcgattttggacagaaatgatggccaaaggttgaagctttgcttggagcttcaatggagaatgaagaagaagaaaatggcaacgtgagggagagagagagctgtctgaaaagtgtgggggctgagtgaagagagagaaaagctntttggttttaaataaaagggttttcctctttttctattattgtattataaactatgccacatgtctacatttgagtggagcaagataggcccactntctcttttgattgtgacccatactcagccacataagtgatgaaaatctgaccttngaaacgct

SEQ ID NO: 183827 - DNA, 448 bp, Glycine max
  unsure (1)..(448): unsure at all n locations
atccttaagtcacctgangctgcagcttggccctaatgaggatcgccttctttatatcctcatacctcagccctcttggtaaaactgaaaatagttaacttttactataaaaggaaggctttcatttacaagattatactaatcctatcgaaagacagtaatttcaaacagcttgcctgattagtcttaacagtaagaatgtcatcaccctgctctctaatgggcatcaatgtagcttcttcacttgtggcttgcagatcactaccagaatgtcatgcaaaccaagaataacaagcattatggctaaaaatgaaaaaagaaaacaatatctattatgagtctcacattgagtagaataaactacttatgtgatattaagccttgaggctctcccacttaatgaactattcttatgggttggaactctttttgtgcttacgtcctaaca

SEQ ID NO: 183828 - DNA, 354 bp, Glycine max
  unsure (1)..(354): unsure at all n locations
gctngttacacaaactcaagctgagagagccgctttttttaaatgagtaaagcccacatgtgatacacgagagtataatagctcatatgtgtgcgtatataaagggtgcactatttttatagtacgtaactctataaaaattgtgatctagtgattgaactactatcaacaattagtaatcctgtatttcgaataacttgacgttcacttccttaactatgttccgacctgattttagtcactgaaatagaaacaaagctaaaaaaataaatgtaaggatgaaaaaaagaagacactaaataattccttgaaaagtacatgggctaagagacacaagtctaaaatgtttagaga

SEQ ID NO: 183829 - DNA, 501 bp, Glycine max
atccttaagtcacctgcggcatgcaagcttcttttggtaaagatataatcaattatcataataattaacggcctatttggtttgagaaaacgttttttgtttccatttcctgttttcatgaataaatacaaaaaatatcatattgtttttatttggttttgttctaaaagatttgtataggagatgatgtaaacaagatgttctcaatacaataacagctcgcttctttgaaaattggagcaatattaaatttctccaaccttcaaactgagactaatttgtgatatgattatgaccagaggaaagacaaaggagattacgcatgctgggttgtgtgtgtacgcagaagcatttattcatagtcaaatgatttttcagagatactaacacatgttatagacgtatcttaccgcatcaccatcacgcatgagagaccgcaccaatgtcggagcagtgtagaatattgtcaccttatatttgtcaacaatgtcccaacatctc

SEQ ID NO: 183830 - DNA, 374 bp, Glycine max
  unsure (1)..(374): unsure at all n locations
tcttccgtatganaggtgacttacttacagaagattggtcttccttatgttattacagaagaagttcttctgacagatcatacgatagaaccttcttctgtatgagtaaatcctgtgaagtcacttcatacagaagaagcttcttccataccaatatttttttctacgaaagaacattcttccgtaataaacattttcacaaattttacccatacggaagaatgcttcctctcctcccatggcttctcaaataaacgaagtcttctaccctaattacattgtccctaaactacatcactaatgacactacaagatgatgtgatatgtgatgaactaacctcgacagtggaagaacccggcatagtcaccaatcg

SEQ ID NO: 183831 - DNA, 469 bp, Glycine max
  unsure (1)..(469): unsure at all n locations
agcttgctcgatcaatttctgatccatgtcttttatactgacattnttntcctaaacatttctaagaacgaataagaaactgaaagatatggtatcgataatcaatttatcttaatgataaagtctaggagaatataaagaatttagtctggtatttctttttacctatttaatatttctaaatattatgagttctccatttagttttctattcttcagagacatgtaaacacaataaataaaagacttgccaaagccaaaatcatatttcaactataaataaacaagagttgcgaacacgcgtgtagataaattgaccactaattctggttcgaagaccactaaataaattgacgagtccactaattaaggagtgtctaatcgtctagggagtataatgtatagtatgtttttcaaaattattccacggtttcaacttaccttgcctttanatgaacannaaaaactt

SEQ ID NO: 183832 - DNA, 431 bp, Glycine max
tggcatgtgagccacattgtcataactgctctttgtcttgctgcattacagtacatcaatttcctccaatgcataacctcaccatcatttttcctaagtttcatgtagatatgtgtcatacaaaatttctctttcatcatcatgtcttcccacttcccttggatagacaacactttttctctgttattcaaaatcgctgtcattatccaagccactaaactatttgatatatatatttcatagtataataatatattatatatagaattactacatgagttattcacacatttaattctcaatattaaataaataatagagtataagtaatctaatgaaaaataaatagagagatgcttgcgaaatgagatgaaagagaaagggaatgtatgtttatatctgtcgtaagacaaatattgaaagttattatg

SEQ ID NO: 183833 - DNA, 371 bp, Glycine max
gatatagggcttcatttgctgtctggttagtttgaattaattaacatcttatggatcaaagggtcattatccaagcatataacacttttacagcacttacacataatataaatacaatattatattgtttttgagagaaaaagatacagagaacgtttcatacctttctcggccctttgacaaagataagatatagaacgtgtcatttttttctgatatgagagttaatttaaactgtagtattcgaaaagaaaattaatcattaatttatcttttcagtatactcgttttaaaaagagagaacattacatttatctgatatgggtgtagattgaaatatttgtaagggtcaaaacatattgaaggtgtaa

SEQ ID NO: 183834 - DNA, 383 bp, Glycine max
  unsure (1)..(383): unsure at all n locations
tcttgtggaccttgaacaagcaatcaactcctctntcagttccatgctatgtgctcgcgactggtccctttcttcccttcgcaacttgagttcattattgctaccccatagagctccgcgaaatttgttccggccatactcttccttgcgagccctcttggtctcttgttcaagggctcttgcggtaattgcattctcttcccgtaacccggcacactccttccgaacgtgtgtagcagccaacttgaacttctccttggcgagttttgcctttcctaactcgcttttgagagcttggacttcttcgtcctcttccggtgcttcaaaattctcttcgctgacgactgttaacttggcgagccaatctaaacctcgtatgcgaa

SEQ ID NO: 183835 - DNA, 454 bp, Glycine max
  unsure (1)..(454): unsure at all n locations
tttctggcctatataccatgggaagcagaggagtaattgcggacaagtggtccatgagaattctntgggcatgtgctattggaagtgccgtcagtaagtattcttgaccttttctcagcgatgtcttctttccccagatcttgttatcaaactcagtcttgtagtatgtctccaagtatgttcctttcctcacaganaaattcattcaattacaatcttactttctacttttgataactacaattgtctaggcctgtatatggttgctgtagaaaggcaagcacagaataggcagaggatgctggctgaagaattgaaagcaatggagtcaggggaaagcaacggcaaagatggatgaactgtgttatgctataattttatgaaaaatatgtagtatcaaatagcagatgcagagtttcagatnttctgaaacttatgatgtaaaagggttctg

SEQ ID NO: 183836 - DNA, 478 bp, Glycine max
  unsure (1)..(478): unsure at all n locations
tgagtcatggttccgtgtatgcattccttgagccacagtttcttgcacaatgcatatgataaacgtggtgatatgccgacaatacattgaaacatggcttaaggaatcccaatgagaggtgtacctcggagcttacttgcattagtaagagatgtttaagaataatattgtaaacaatgtttgtgttatatgtatgtaatgtgcatgaaatgcatggccaaatgacaattggttgttttatgtcctatgcaagatcttgtcatttggttctgttcgttgcataagatacttgatattcatatcaaagccacaattatcaggttaagtgataacatataacttaaactgaggtcttattaaatgttcatgcataactatgttgtccttctatatacgttgatgttattttttgtaaccagtgcaatgaacaattaaagatgactntgcatggtgatactaagcaagctagacctaagtg

SEQ ID NO: 183837 - DNA, 318 bp, Glycine max
  unsure (1)..(318): unsure at all n locations
attctacgcttgttccttgttangttcagcttgtctttgcatcttttcttactatagaaccaccattgtatgtttttgcgcttcctttgaaaaaccctagagaaagagactttataaaagttatctttttatgaaatgggtgttattttcgtgaccttcgctgaacctcgatcacattggcgtgatcggaagtttaaaatgatgttccttttgtagaatctgaaacgcccttagccttttcatgtanagacatgagtagttgactcagaatattattgttaaccttatttctgagatccatagtaatctccttcattt

SEQ ID NO: 183838 - DNA, 392 bp, Glycine max
acatgtttttcttattcataagtagcagactatattactgcttggactagaaataatctgaatgaaataacaatatgatgtccaactcattatcatgattcatgctgaaaaccttgaagcagtgaaataacaattttgttcatggagtaaacataggccatatcaagccaaattattcatccatccagagaaacaaaggtccataagatattatatttcatcaagttctagagatgtgaattagtcaaataaaaattgtaaagtatccttagtatatttagatgtacctttactgttttgtcattaacaatttttcatgcattagataaaaatgtgtatgcagactgcacacacagtgcatacaagcttctaatgactgatcataatcatgt

SEQ ID NO: 183839 - DNA, 346 bp, Glycine max
tatgaaccattatcctatgcgacatctggtaaataaccaaaatgagataattaggagtggccatgactatagtcctaatatgagccatgatattaaaagctcttttttgtcaacctaaatacagtttagacaacaaaaattaaagccactactacctaactttatcttctgagcccacttctgtacccaatctttcttcattatatgattttatatcaaagaatcaaatctctccaaaacctgccctgaaatgtgggaattttctctaacctagacatgatagaagacgacgaatatcaataatgacgcatgatattctgcctacacatagatcattatatacctc

SEQ ID NO: 183840 - DNA, 428 bp, Glycine max
  unsure (1)..(428): unsure at all n locations
cttccatggcttattccctagaggatggcgcctcctctcacctcttcttctttngtcttcgctgcatctncatggtggaaaatcaccattaaaggacctcattgaagctcaaagatccaacctccatagaagccccacaagcaagctttcatcaagaggtatcagagcacaagagcttcaagtaggcgctccttaaacctccattaatttttagctttaccttctcttccattgttagttcttcatttttctccatgtatctcctcacatgtcttgtgctaaatgttgttaacatgattctctagagtttccaccaattaaacttgctatagaagctagatctgatcttctatggctcaaatttcttgttcttgttctagaaccatgaattgtgtagagtttaggttcctctgagttctgtcttggta

SEQ ID NO: 183841 - DNA, 332 bp, Glycine max
gctggcatctgtaagctgcttaaatagggttgcattttccagtctcagcccgtcaacctgagaaagtaatctttcaaattttcatattggaaacggaattacaatagaaaacaatatctagtgtcatatcaaagacctacacgattaagatttctaaaataacaaaacggaaaaaaatttgtatataaacataaattatacattgctccattaatatattataaaatgattatttttattataagatattagagtttaagtatataagtttgtaaaaaaaatcgagaaagaagggcaaggactacgcttacccccccttccacatccgttct

SEQ ID NO: 183842 - DNA, 369 bp, Glycine max
actcagcttgttgattatggggtacccatcacatgtggtactaggtgtctgtcttgcgattgtgcacaacatagtgtcctcattcacaaattgcgcattaactcaccttcccctgttgcccacctacaactgatctcatgtactccctcgtagcccatatcctcgtttctttctacaccatgtacccatcattactccacagctttcccaacatccttggtattgatcattcatacaacgccaactatcacagccaataaatcatggcaaaagccggaaactttgccaaacaccaacctaatacatattactcacttaatactacattacatttcttcttccaattattaccgtagggcactcgaaatt

SEQ ID NO: 183843 - DNA, 422 bp, Glycine max
  unsure (1)..(422): unsure at all n locations
acctgcgggcatgcaagctcaagggaagagagagcacatcttttatctcttagcatggtcttaaaagaggagttagctgcttgctcaaggtccaagagaagcttgtctaaacatttatgcgagacagagaccaacatgttagccattgtcaggaagtaccaagaagaattaaatctagccacgacccacgagcacaaagtggcgggcgagtatgcccgagtgtatgcggaaaaggaggctagaggaagggtgatcgactcgttacatcaagaggcaacaatatggatggaccgacttgctcttactntgaacgggagtcaagaacttccccgattgctagcaatggccaaagcaatggcggacacctactccacccncgaggaaatccacggacttctcagctattgtgatgcaatcctacc

SEQ ID NO: 183844 - DNA, 388 bp, Glycine max
tgtatgaggactgggaaagattcaagatattgtgttctttctgtccacaccacaagaattctgagcaactccttcttcaatatttctatgagggacttatctacatggattcgagtatgattgatgctgccagtggtggagctcttggtgatatgacccttactgatgctaggtaattgatagagataatgacttccaacttccaacaattcagtgcaagatatgatgctattgttcttagtggagtccatgaagtggccatggattcatctcatctactaaaataaaagcttgtaagataacttatgccttggcaatctggtacccatcttgccatgaatcaatatttgcatctgcccatgttgcagagtctgtggtctatgttctt

SEQ ID NO: 183845 - DNA, 389 bp, Glycine max
atgcttatggcttaaaacctataatttggttctggaagtaggaaggcatgaaaattaagacttgcttgtgagagtttttactctaatttgggctgccccatgaggggtactttgcacctaggtagcatggaaaatacttttcaatggtatgtaaatttgtgtgtaaatataggtggcatggaaaaaactcttcaatggtgtatatatatgtgaacatatggcatgaaattccttgcaaagtgtgaatgaatatcttcctaaatgaatattgaggtcgctccctaaatgaatgtatgatggcatggaatccctttttaaatgcaagatgtgatgacgtattagcttccaaatgatataaataaatggatgaacaataaagcttatgattg

SEQ ID NO: 183846 - DNA, 409 bp, Glycine max
tctatcacaatggacttaccttgaattaattcctttgattgcccttttgagccttgtttacctttccttgttttgaagctcactactagccttatgtgaataaccatgatattaccatatccttaaggaattttggagctttggaattgttctgggaataagtgtggggggtttttgtttcattggacaacttgtttttttggctatgcttcatgatgtatttgggtccatacttgatgtacattgtatattggttaaatgttggacatgctgaatgaaatgttgtttctcatagactaaagattataaaaaaaaaaattcgaaaaaaaaaattcgaaagaagataaagataagcaatatagtggagtgaataagatcttaatggcacaagaatgatgaaactcttggt

SEQ ID NO: 183847 - DNA, 429 bp, Glycine max
ttggacgcacaatgacaagttgccaatggcccttgaatttgagaataattaactacttataatgcatacattcatttaatgcatgttggaacatttactcactgactcaagtaagggcctaagtagatccctccttgagattccttcacccacgtttcaatggaatgttgacatgcatcacatttatcttttgcattgtgtatggacaaaagcccatggaattcgacacgatactatgacctaaccttatactcgattcatacataaacctagttttatgactacaaagagaaattgttaatcatatatgtcataacgaatattaattattagttaatgaaagcacaccttcaaatagaatttacttacattactcacaactataatatagacatgtgtaaacattcgccacctgatattattcattta

SEQ ID NO: 183848 - DNA, 347 bp, Glycine max
  unsure (1)..(347): unsure at all n locations
tccttggcaatgggatgctcatagacagtaatatccaccactccatctgtgggactgcccaggtatttgttgattacagcaggggagaatctaacacactttcctctgacaaacactttctgatactcatcactctttctggttgttatgtcagagggaatgttgacaatgaattccctgactatgctttcataacaattctccaacttggtgactggtttcagcacgtcagcagccttgatgatgtccatgatcctcttgcaatccaaggcatctcttcccagttctctttccaaggcaagtctgagttgatacacanatttccacctttcacattgccaatggag

SEQ ID NO: 183849 - DNA, 272 bp, Glycine max
agctttctaaagtgttcggctcctctaaactctctgaaaacaaaagtatgctattcatctttttcattcccttctccttttgccaaaaagaattcgcctaggagtaactgcctgaattctttttgtgtctctcttctcccttttccaaaagaacgaaagactaaccgcctgaattcttttgtgtctcccttctccctggtcaaagaattcaaaacgacacaatctgagaattctgctaagctaatctgctggcttagtgagccatccaatgt

SEQ ID NO: 183850 - DNA, 420 bp, Glycine max
ttttctatatataaggggatatgtgaagtttataaagggttcagccacttatgcacttctctctctttcgaagttgcttagaataatagtttccgtgaagaatatccaagtcgatgcgcttccgtaacgtttacgtaacgtttccgtgagtgatctcgtgaatgttttcgaccgctcttcgacgttcttgattcgttcttcatcgttcttcagtcttcaacgggtaagtacctcataccaagctttgtaattcattctatgtacccgtggtggtccacatttggtttcatgtatctgtattctccgtttcatttacttattatacccccttttgacgtgcatataccatgtatataagtcatttctcgcttaacctgaaaataaaataatttccaccgatcgtctgaattggatcatccg

SEQ ID NO: 183851 - DNA, 433 bp, Glycine max
  unsure (1)..(433): unsure at all n locations
ctgaggagtccctcagggcctcttcctcctaattcaagtccaactgagataatattttaacacacanaatctacctacgaaccatgcaatgcacacaactactcaatttttttcaaaatctcaattattttccaaaattattttcactcatcacccctcaagcgatttaactagtcgggttcccaccgtagaacccatcacaactcatcgtgtattaattcatcatccttaaagggtcttatagttgtgtgattgcataattcataactcacacctcatcgcatacttcaattatactcatatatcatgttttacattcatagaaatatttataagacacaacccagtacatacacatcgactcgaataattttcataaacatatcanagcaaagcaacaatataacatattcaatgtcaatcaataataaaa

SEQ ID NO: 183852 - DNA, 380 bp, Glycine max
  unsure (1)..(380): unsure at all n locations
tataaacagcttagaaatcaagtgatcatcatttccaattcttatgnggagtgaacgcgcanatattatgcatatacactgcttgcttgtatcttgatntcaagacttatattgtcatcataaaaaatggggagattgtagaagcaaatggctttgatgttttgatgatgatcatgatgatttgatgcaaatgatgcaaatgcgcttttcaagtttaaattctagacaatgattcaagaatacaagacacaacatcaagatgatcactaatattttatgaagggaattcctaattgatatagcaaatagtttggccaagttatttaagctacaaaacgtttttcaagagatttactctctggtaatcgattaccagagat

SEQ ID NO: 183853 - DNA, 409 bp, Glycine max
  unsure (1)..(409): unsure at all n locations
aaaacgatggaacatgacgaaaccctctattgcttgacctctntgtggtgacattggcagtgtttcctcttccacgaccatactaggaagaaattgctgcatagcttgtaacaatcttgataaatcatggtacgatctttcccagctgccgtagatgttttcaatatccttctgctttgccaataatgttgtgcaatagtggtggtgtatctgtcaatgcttttgatgaatgctatcaagggtggcattgaagttgatgggtcattttcaatcaagttatggatgcctttactaatgagcaagtatgacaactttgcatgatcttgtgagaatgatggatntgaacatgtattggggtccacaaagctttcttatttcccactgcttacttgcaaggatgtatgatgtc

SEQ ID NO: 183854 - DNA, 478 bp, Glycine max
  unsure (1)..(478): unsure at all n locations
agattcttgaccggtcctggtgggaccgtggacgtatgtcccggaaggtctcctggagatccctcccatactaacgttggatgatgcaatgaatgagacggacacggtgctcttctgggccgtcgacgatctcttggagaaaaccggtgttgaagccaaagacattgggattcttgtggtgaatagttgcttgttcaatcccacaccatctctctctgactccattgtcaaccggtacaagcttagagggaacatnttggcctataatcttattggcatggggtgcagtgctggggttcttgctgttgactntgccaaacagctcctacaggttctctctcaccatcatgctgaataaatagtattccatgcattnttgtatttgtttactgccatcacatatatatcttcagttagttaaatatactagttcatatttatattttcaaatataatgtgtatgaatatctcaacaata

SEQ ID NO: 183855 - DNA, 394 bp, Glycine max
tatttgaacatgaagagaattgggactataaatatcttatagtcaaatgcttcaaagactaatcttttagcctctgatatatgttattgttaccttcaggttctttctcttgaactacggcaaattacatggtaggctaccaaactgcagtctctaatattgtgatgtcagtggttgtgttcttaaccctgagattcatcactcctctttcaagtaccctgcaaatgccattctttatacaatcatcatttctattggcatcatccttgtaattctttcttgcattggtgaggatagtaatggccagccttctagacaaagctaaagcatatgcaattatgcatgtgtgcaaaggaacatcttagagaaagatgcttaagcttttattttgtat

SEQ ID NO: 183856 - DNA, 410 bp, Glycine max
  unsure (1)..(410): unsure at all n locations
ttcatcttggccattttgcttctccaaaacatgatcaatgtactntgttttattaaaacatgactacaatcattataaaataataatgagattctcagcagcaatcacatcatgaatgaacaatttatgggatagtcataataggtaaaaggtcattattcttcatcatgatgatctcattttatcataatgagtcttatgaagaggaacctgtcatttaacatcccagaagatcatccaataaaaatagcacacaaactcatgcaattatgccaaataatctggtatccactgaaaagtagttggaaaaataaaaatttgtttaaaaacatatttctaggttaaagaagacaaatcacacatatttgaaaatataatttaataatagtgcatgaaatgtgtgatgtggg

SEQ ID NO: 183857 - DNA, 384 bp, Glycine max
ctataactcaatatcatcacaacaaaagacacaatataaaggtcaattgatataagacttccattgtacaactcacagattgagatgtaccagatatacatgttcatgtggcactattatttgataattcatctattttagtaaaaggtgtaccattaggacaatgaattttaatttttaggagatagtgtgatacaaaaagcataaaatctttcattaatcccatcccaaattaatatattacaattcctctttgttccttgaaaaataccactagctctttcgagcttgtctatgaagcaggtgtgtgcaagcttttgaaagtcatgtaaggataccttttgaacaacatgtagaccactgattgagttagatggtttcttt

SEQ ID NO: 183858 - DNA, 449 bp, Glycine max
gtgaattgtgtaccatcatcggtgacaatggcataagcttttccgtatctgcatatgaacattctcactgaggccttgcttcaatccacttggtgtaatagtcaatggagaccacaaagaacgcaacttgtcttgggcttattgtgactgccctaatatgttcatcccctacatggctaaatgccaatgggaactaaagttatggaagttgacgggtggtgttcatggaacttatggcatcgtaaataccttctggtttattaaaggcgcctaccttaagtgtcggtctaatgttcaatcatgcacttctgtattttacatgatcgcccgctatgtggaggccaatattccttatgttaatctcccatgaatagttattgttggtgtcaagcaataacaacgggtctcaaccattttaatttagtcaatgagataaaataataatcatt

SEQ ID NO: 183859 - DNA, 297 bp, Glycine max
agctgtcgagatattcaaatggtcataacttttcacacggatgtccgattcgggcgcataatatgtcgagaggctcaaaattgaacaacggaagctcttgagaaattcaaatggtcataacttttcacacggatgtccgatttaggcttataatatatcgatacgctcgaaattaaacatcggaaactctcgggaaattcaaatggtcatcacttttcacacggatgtccgattcgggcgcataatatgtcgagaggctcgaaattgaacaacggaagctcttgagaaattcaactg

SEQ ID NO: 183860 - DNA, 430 bp, Glycine max
tctgaagaaagtgatgaggtacaagccctatagtgctatcttgaaatagcccgagtagtcgaagagaagttcaaatacatagccatcaaagtctgaaaagagtatgatgaactaagggacgtcaatatggccaccgctgtatccttggaacgagaaaccaataatgcccgattggaagaacacgtgccagcaaagttctgaagggctttatagggcagcaatagtaagctcaagctccgaagaggtgaaaggaatcatcatgggtcaaaggcatgatcttgaaggacgagctaaaggcttaccttatgtcgaatagatatttgtcccaacagttaagcgagactgaagggaatatgtgggccgtcatcgatgagtgcaaagagaagcttaatctagcggcgactcacgagcaaacgctatatgatgagta

SEQ ID NO: 183861 - DNA, 304 bp, Glycine max
  unsure (1)..(304): unsure at all n locations
atcttaagtcacctgcggcatgcaagctttgagccaaaatcctgatcaccatattccttgtacccaggtgagaatgtcaatccttaccctcggaagcgaaaagaatagaagggaaatttccaatcaaagaaaaggaaagaaggaagatttccaatccaagagaaagcaaaaaagaaaagaaggaaaattccccaatcaaagagtgggagaaagcaaaaagaaaagaaagaatattcccaatcaaagaatgggagaaaagtaaanaggaagaagaagaagganagatagctcctgatcagggatc

SEQ ID NO: 183862 - DNA, 369 bp, Glycine max
cgtgacacttaatactcagcttcacatcatccacttccgggtgctggaacttcttctcttggtcttgatggggcctatgcaagtcgaaagccttggtggaaagaagtatgcctatgttgttgtggatgatttctccagatttacctgggtctactttatcacagaaaaatcatacacctttgaagtattcaaggagttgagtctaagacttctaagagaaaaagactgtgtcatcaaaagaatcaggagtgaccatggcagagagtttgaaaacagcaagtttactgaatactgcacatctgaaggcatcattcatgagttctctgcaaccattacaccacaacataatggcatagttgaaaggaaaaa

SEQ ID NO: 183863 - DNA, 508 bp, Glycine max
gatcttaagcactgggctgcagctgagtttaaagtgttccgcatatgtcataatagcatgaaagaatccaacataagaactaagaagactccaaatgttgttccccgttgaatagaacagttcatacttcaaagcactacatagaaatacttgtaaccatattaaatctacattaagttgattccttacatagaattgcagacattgaaatttttttatcaatgaccaccaaccgggaagcaggaaattctttgagcttacagtgaataggctccacaaatgtcaactctaacactaactttctccctctcacatgaatttgcatatggattataaggaaaattgtaaaggaagaaattattatgacatcattgagatctgaacagcttgtatgttcaactgttcaaggtagttcgggactgagctggattacagagtatcatagcaaagctgaggcgtccaaaaattatcatactccttaagcacatctatgttgaattacatccta

SEQ ID NO: 183864 - DNA, 450 bp, Glycine max
  unsure (1)..(450): unsure at all n locations
tgcattcataatttcagagacccataanatataatgctcttattgatgaagttaaggggaaaaaattcagaaaaatggaagtacccaacgctttcaagaattagactggcttaattaactgcatgaaccttaaacattttcaattcgtcctccatctctgtatatactagtaaaactcgaacctcgaaaaacaccccgtatgattaagaattagtgtaatagggaattaaatatcaacgtattagcattaccgttttagacttcaagttaattaccagtaatgctaaattaattagatcatgacaaactttattaaaaaggtactatcatttaattagatgcgtgtatgcataacaagtgcgaatgcttactattggttcgccatgtgctataaaccaattagtttcttaatggcattcagcatccactttgtgactccatttcaacaaa

SEQ ID NO: 183865 - DNA, 494 bp, Glycine max
  unsure (1)..(494): unsure at all n locations
gatcttaagtcaccgcggctgcagcttacaaaaaatcttgccatctcattatatattagaataaaacaaatattttacaaatttctttcttcccagttggcatgaaaataaaaattgaactctggttactcattctaaatttgatccggattggaaacgggttcaaatttttcctgacttaaaaaaaggaagacgatattaagtatctcacttcttaccccaccttcaagctccttacatgtattgttacatatatttttttataattatattattatattaataattcaggaaaatattattatctctcattgttaattatataattatgtaattgctttatattttatttttataagtattaaaatataaaacaattattctaatacttaaataaataatattataattataatactaattataacanacataagaaatatacatttaatttaacaatataattcattccttatatatgtttcgttatttat

SEQ ID NO: 183866 - DNA, 442 bp, Glycine max
  unsure (1)..(442): unsure at all n locations
attgtcttgaagtattatttactataggaatgatagcttttcattttgaacaagcaaagctgtgtttatggaggatgagtggtatttctttactcctagagacaagaagtatcccaatggagtgaggcctaataaagcagctgcttctggttattggaaggctattgggactgacaaacccattttcacttcttgtgggatgaagagcattactgtcaagaatgcactcgtgttctacaatggtcgtccaccaaatggatcgaataccgactggatcatgcatgagtatatattgcatgattccacgatctccaattcaaagcaagataggtccatgagagtangccaatttcatgaagttcaattttcaatttggtggtttttaatgaccaatagattaaattattgaggaaattctcattgcatttgattgatattgtat

SEQ ID NO: 183867 - DNA, 438 bp, Glycine max
  unsure (1)..(438): unsure at all n locations
agctntgcttctacataaagatccaactctattgtttaggacttantagttngtaggttgtatttctgtgtaggtttagtgttgttaggttagttatggttagaataaacttagggtttcactgtaggagtaatgtactttagtttaggggctattgctgaaaaaggggtgaaaacccctgtggtttttttttttctggaaatagcgatgaacgtgctaagcgccatgctgcactaagcgagttcattgcttctaatgaagatttctaatttccaggtgatcgcgctaagcttgaccctttcacgctaagcgcgttcatcttctctgttgatttcaatgttgagctcgctaagtacatctgtgcactaagcgagagtacgctaagcccatgttgtcttttttttaggttgagctaagcgcgcctgtcgcgctaagctc

SEQ ID NO: 183868 - DNA, 467 bp, Glycine max
  unsure (1)..(467): unsure at all n locations
tcagctnttgagaatgtcgcacacatgacttttatgatgccaaagataagcgcttctcatgtttgatccaagtcaagaattcagaaattcataaaataactccccagagtcacaactcttcagaaaataactcctgagagtcacatctgttcaagagatttttgaatggtcatcaaaggcctataaatatgtgacttgggacacaaaatgaatgagagagattccaagagaacttcattctcaaatgctctctcaaaagaaactcttgggcaaacacttgcaaatccattaagagttcatccatggacttcaattgtaatatccttctcttcaagagagaattcatcttctttcttcttatacaaagagatagattaagggaccgagggtctcttaatttgtaaggattcctgaacacaanggatgggttgtccctgtgtgcgtcaaactttngtaatggattttac

SEQ ID NO: 183869 - DNA, 363 bp, Glycine max
tcattggttgaattaacacatgcgaatttctcatgcatgtttactaattaagggtactgcttttgttgacgatacctgtggtgcctttaagaccattgaagagctttgggatggtgaactctgagcaatatgcttcatagagatgttgacaaattcactggtcctcaagcagattagttctgccttttacctgttagcatcttatagccaccagatatagtgattcaagtatgtttgagattttgagaagtgttaccgttgataatcaggtaaccaagacttatttttcatttataactagcatgtgtacgcacttatcgttcgactgggtgcgtgtgcattacgttatgtattaacagtatg

SEQ ID NO: 183870 - DNA, 478 bp, Glycine max
  unsure (1)..(478): unsure at all n locations
agctngcatntactgattttcaagataaatgttgcatgcatctgcatccccaanaatcatgttcatattaagtgcatagatttctctttatctaccaatttcccaaatctaatgccctagtttacgatgacgggccctctcaaggagacaacctcttgctttctcataaggttaagccctttggtactagtacctattggcttgtttcattggactcaaagttctcgcctctatctttcacaggactcaaagtcctcactttatctttcataggactcaaattcctcactttatctttcacaggacacaaagtctttgcttttatctttcacaggactcaaattcctcacttgtatatttcacaggactcanagtcctcgtctttatctttcataggactcanagtcctctgtctttatgctntcatagggctcaaagtcctctgtcatttacttttcaaagactatcanagtctatt

SEQ ID NO: 183871 - DNA, 404 bp, Glycine max
  unsure (1)..(404): unsure at all n locations
ntctcggtgccattcctgcgaaggcaaacattatgttttaccaagaaatgctacccttaaaacaaaaatggcatacaaccccctccaataaatacaaacatcaatgtaaatttagagcaagcttatgcgcatacttctttacgaacgttcacttgcacaagacattcttataactaagaaaaatgcacccatatacaatcaaggcaccttcgttacctagattatgtacatgtacttccaaggtgtatttgttacctacatcacacacatttcctttgctaaattcacatacatgcatactctaagcactgtggctatcaaaaattgcatacgtgcacatcttggtatttctaatacctatacatacacaaacttcatgatgaatcttgactatctacacaata

SEQ ID NO: 183872 - DNA, 405 bp, Glycine max
  unsure (1)..(405): unsure at all n locations
catggattgcaaactttgtgggagctttgaccttccatcatctaccatagtagaaaactcaaactctcaaaaactgttaaaaagatgactcctagtgtttcctataatggcaatctacttccttgcaaaaattgagcttgttttgntcattatagtcttacagggatcacctcggatgaatgtggcaaatatatgcttcccacatctacctaactagatagctcaaaatattgaaaacttcttaaagagaggatttctcctagtgttttcgagcatggaagtttgcttccttggaataattgagcttgcttcattcatcatatcccaacatggatctaccaataaaaagtgagaacttggtttcccatctctaccaactggtaactcaaatcttgaaactttatg

SEQ ID NO: 183873 - DNA, 326 bp, Glycine max
  unsure (1)..(326): unsure at all n locations
aatcacttctctttagtattttttctgtcgcttattgcgtggagttcttttatttctgcctcgtacatgataagctcattatctttcttagtaactcgatccaccttctaaatcctaggaagagctacgatgatagatgaaactctctaatgccttcactttgtctccatttgatttcaatcttgtactgggaaagtaccattgttctccttctacttcttatgaagaagtttgagtgtgataatctataagtcaacattatcactggtgtcaagcacggtacatgggaagatcatggtgtgacatcagtngtttggataactgtt

SEQ ID NO: 183874 - DNA, 367 bp, Glycine max
  unsure (1)..(367): unsure at all n locations
ctctattcactatattattgtgtttgttttaatcntctaagagattatatgtttggtttgtatctctatcattattattattattattattattattattattattattatttcatgatataagaatttcctatcaagtaataatggcaaatagttactagaaaaagttaactatggatttagtccttgaacttttgtgagttgtcacttttaatgtttgaataaaaaattaatccgtcttaatcattaatcttttattccgtcaacattttttgtacttatcgtcaattcttacaaaatttgtttccccataaattgagttgccgcgcatataattaaataataattaaactagcattacttaacg

SEQ ID NO: 183875 - DNA, 262 bp, Glycine max
tcttcatagaggtaggccaacaacatttttctgaggagacatgtatgtgaatgtgcaatgacatcccttccgatatcatgtattaatcctcccacaaagcaatccaagaaagcatctcgtgaatccctggactcgatgagctaaagccgagaactgcacgtaatatgactgaactgaaccaattctagcgagttgaaacaactgagatctatgacattcatacggcgatgggcccaattccgtctctaaagctcgcgaaaca

SEQ ID NO: 183876 - DNA, 421 bp, Glycine max
  unsure (1)..(421): unsure at all n locations
ttcctcatatatcatactactctgatgtaatatattctctttttgtggagatagcgaataacattatctgtcatgagagtataaagttgatgtgtgaaacacctttctcatttggatcatattgttgagaaattgcttgatgcctacagggttttctttttagtccttcatctaaattcgtagcacaggaatgagtgactttggtgagtctgctatggctcttgatggggggtgtttatggatagatnttacctcgcgggaattatgtcatgtggttatctctctctgtgttggagaatgccacgacctttgctttcaacactcagcttctagcattgttaacactttattgctattttttataagattctgctaatctatcatcaatcttacgagttggtcataatttctaagatgaact

SEQ ID NO: 183877 - DNA, 264 bp, Glycine max
gggaagggaaaaaaaaaaaaagggaatgtccctgccacaaaaaacacgaaaaaacgacgaggaaagttgtacaaaaaacaggggagagggcacaaagaaggcaagaagaaggggaggcgggcaagaaccgcaaagagggagagacccggcgggggaacccggagaggaaaggggcccccaaaaaacgaaagaaaccgcagagagagcggggaaaagaacgccggaggcacagcaggcgagcgccgacgcgaaggcacgggggcg

SEQ ID NO: 183878 - DNA, 258 bp, Glycine max
ttttcatgccttggatgagttacgtattcgtctttacttgaatatgactgagcctaggtacatgtggccactctatctcagagaaattctacagactttgtagtccaccttggcttgatggtattgactcttaaagataataaataccgttgtatcacaataaataagagtgacgatggattacacgttgaataactcttgattactgaatactgcacatcggattgcattattcatgagttctctgcatacatgcca

SEQ ID NO: 183879 - DNA, 473 bp, Glycine max
  unsure (1)..(473): unsure at all n locations
agctntgagaagaacgcctgccaagtactttgttcccaaggaaagttgccatgaaaggcaactaagcttgagagaagccagtggaatcagtaaaatggtttaggcacaacaaaattaaattcattggtacctgtaattgtgtgtttgtgctaaagaatgcttctgtaatggttgtcttccataaatatctagataccaacattctcttttccaaactggttgctgtaaatttctctacaactactcaagtattatgcattttggatgttgatgttaattttaataaattgtatatacttggttccaaattcttgttcatctttgtattctttataaacatcaattagagaagacaataaaaggtaaaatgaattgatgcagccattacttanagaattaacaaattattttttattaaagatgacgttaagatagtacactaaaaatgatcacagcagcacgctaatatcaac

SEQ ID NO: 183880 - DNA, 487 bp, Glycine max
tcattactcctcaattttgtttcacacgggagctttcgttattcatcggtagcctgtgttacacaatttctgagctcataccaggcatatcttgataatagcaagcgaagatgtcttggtagttgttagtcgatgaatacaactaacatttgtgtaaaaaatatgtgaaaattgtatctaactcctcccatctattgttatgttgtagtgttgtaagtactctttgttagatataggtaataaatacatagtactcctattttgtgtatttaataatcatttcctttcaatttcacgtaaattaagcaagtttgttaagtgctgattgtgatctgctcgctaagccaatctgccggcttatcaagccatccgctgagcgcaccactcttgcgactgatcgcatggaagaatctggatgaatgggaactggacacacgcactatacgatggctcatcccgctaatcgcacacgttgttgcattcacta

SEQ ID NO: 183881 - DNA, 488 bp, Glycine max
  unsure (1)..(488): unsure at all n locations
tctaagaagcagnggatgagaaatagtgtacaatattttttgtggtccacacgctaatcgcatcccttgtgctaaacgccatttccttcacacgctaagcaagctgatgttcgcgctaagttccttgacccctgctcattggttggatggtcccactaatcgagtgcttatcgctaatcccaaaaacctctctggatgttaattctttcgaattgcgcttagtgcaaatgctcgctaagcgcaattccttctctggaattgcaattattataattgcactaatcacgaatgacacgcttagtgtgggccactactgcatttaatgagcattaattcgctaagcgtatcctttggtggctaatcgcatgttgcatgaccaatcaaagctacagtacccgctaagcgcaaccttgcgtactaagcccaatagcttctgcggaatcttaacatcttgaattgtgcttaacgagcatacgcgctaatcgtat

SEQ ID NO: 183882 - DNA, 352 bp, Glycine max
tactattacactactcttactttgttttttgttttttattcacttgtcgtatctgtaaaaaattgcaaggggccttctcatttgtcattcggtttagctgaaatctgagatttataactattccatgctggcgtaaaaaagtaattttatttttatatataaaatcatctatatattatagcatgtttggtttaatatttctggtattggattcacgtctctcatgaaataatattttgttacttttgcattttatcttaatcttttgatgcgataaagtaggtagttttatgcaccttcaagatataattaaaatttatactaaaaatattggaaaatatataaatgatat

SEQ ID NO: 183883 - DNA, 343 bp, Glycine max
  unsure (1)..(343): unsure at all n locations
ttgcgganttggtcttcaccgacaaaatgatctaaatgtttttaaaaagaagaacatntaaccatcctactctgatgaatgagaaaactggtgcaaatgaagatgatgagaatgaggatagaacccatgatgaggctgtcattcctacttggccaaacataccaccagcccaacagtgtcattactcagccaatatcaacttccgtataacccgccaacctgtcaaccacaaagcatgtctattgcaaagcctgtctactgcacttccaatgacgaacaccacgcttagcatataccgaatcaccaaccaagaaacgaattttgcagcataaagcctgtagaa

SEQ ID NO: 183884 - DNA, 339 bp, Glycine max
  unsure (1)..(339): unsure at all n locations
agatgatgaanaatagcccaagagaatgatttcaagattgagtcaagaacaattcaagagtcaagagaaatttgatttcaagattcaagaaaagatgaattcaagattcaatagaagaaatcaagaagacttcacaagggaagtattgaaaagattgttcaaaaaacaaacatagcacattgtttttttcaaaagaagttttcacaaaattttctaagttaccagagtttttactctctggtaatcgattaccagattcctgtaatcgattaccaatggcaaagtttgttttcaaaagctttcaactgaatgtacaacgttccaattaatttcaaaatg

SEQ ID NO: 183885 - DNA, 392 bp, Glycine max
  unsure (1)..(392): unsure at all n locations
tgcactctataatgactatggcatcatttctggcactaaactgctgggagttggaggccatcttctcaattaaatttctggcttcagcacgagtcatgtctccaagggctccaccactggcagcatctatcatacttctctccatattactgagtccttcataaaaatattggagaagaagctgttctgaaatctgatggtgagggcaactggcacatnagttcttaaatctctcccagtactcatacaggctctctccactgagttgtctaatacctgagatatccttcctgatggctgtggccttgaagcaaggacaattttttctaagaatactctcttaaggtcatcccacctcgtgatggaccttgtagcanggtaatacagccagt

SEQ ID NO: 183886 - DNA, 294 bp, Glycine max
aaatttttctttctaatatgaattaaacaacacaaactcgtgacatgaggtataacacatataataaaaagcaaaattcataaatactagcttgcctcccatgagcaacttcttaacatctttagtcagacgcatggttgtggttgatgattcgctatcttatcctacataattcttttgttcaatcgtgagcaaatccgatcatggacttatcacctgttggcatatgctctaattgcctcgaaaaaagaatgttaacatgcaaatgtttaaaatgactatactgaccttcct

SEQ ID NO: 183887 - DNA, 481 bp, Glycine max
atatggcttgaaacaagcatcgaagctgtgtgttattatagtcatagagcttatgagcaactcaggattcatcagatttgacatggaccattgttgctacattaagaaatatactaataactatgttatcactgtcgtgtatgctgatgacatgttgatggcacgatctattttggcagaaattaatatgttgaagcatcaggtggcatataactttgaaatgaatgatcttggtccagctaaacaaatccttggtatgagaattcttatatacagaccatgaagaattttgaatctgtctcaagagatatatatacacaagatgcttgataggtgttaccttgatgattctaagactggaaatacccgcttgtgatctcatgtcatgtgttctaagaagcaatcgttggcgacagatggaaaaatatgttacatgtcaagaggaccatatgcatcatcagttgtgagctgatgaatgcta

SEQ ID NO: 183888 - DNA, 429 bp, Glycine max
  unsure (1)..(429): unsure at all n locations
ctctaaagacacaatagttggatactacctaatcccaaagggtagccacattcttgtaagtatacataaacttggtcgtaaccctaaaattntggaatgatgaaccgctcaagttcaagccagaacgtcacctattaataagagagatgtggttttgaccgatcaagatttgaatctcatatcattcagcacaggacgacgttggtgtccaggattcatgctnggaaccacaatgactgtgatgttatntgctaggttactccatgccttcacttggatagcaccacccaatgtgttacacatcaaccttgccgagtcaagccatgatatatctcttgctcacccacctctcgcactatcaaagccaagattaccgccagagctttacaatatatgaagtgtgtgtttaatgtggttcagccgactatg

SEQ ID NO: 183889 - DNA, 441 bp, Glycine max
  unsure (1)..(441): unsure at all n locations
taagctggattcctttantatggaatctatccttcctaagattgttctccagtcccccttattaataactagctcatttcttcctttatttcctttagttacatacacctttgtttggttctctatttggttcctaaccctctcatgcaacttctttacaaactgtaacctaaattccccttctttatgtataataaaagtgtcaagtatgaggggaattatgtctaacggtgttagatgattgaacccatagacaaccttaaaaggggattgcttggtggttctatgaacctccctattgtatgcaaattctacatgaagaagatactcatcccaagacttatggttgctgttcagaagagcccttataagggtggatagagacctattcactacctctatttgcccatcatgttgtggatggcaagtggtagagaaaag

SEQ ID NO: 183890 - DNA, 339 bp, Glycine max
  unsure (1)..(339): unsure at all n locations
tgtctcaacgtntatgcgagactgagaccaacatgctatctatcttctccaagtaccaagaagagttatgtctatccgcatcccacgagcatatgattgcggacgaatatgcccaagtatacgcggataaagatgctagaggaagggtgatcgactatctacaccaagaggcaaccatatggatggatcggtttgctcttaccttgagcgggagtcaagaacttcctcgattgttagccaaggccaaagcgatggctgacacctactccgcccccgaagagattcacgggcttctcggctattgtcagcatatgatagacttaatggcccacataatta

SEQ ID NO: 183891 - DNA, 418 bp, Glycine max
  unsure (1)..(418): unsure at all n locations
ttatgagaacaattttaccttaaccctcccccaaattangggcatatcatgactaanacccttatgctctcttaaaccctaaaacaaggtacaagataattaaagtaggcctaggggttttacaaaagacatgattatcatttttggctcaaataaggtgtaagggataaatttttatcaaaggtttactttttggctaagtggttgaaaataagaagaaacaaaaacagggccttgatcacttccacctcatgtaattaatctaatagtctaagaatgacgcaaaatcaggaanataatnacagacgctctctcacaagttagtcatttctctctttgttgtgaatcatactccactacttgaactaacgctcgccttcatggaaccaacactttcacaanaatggtatgcatcatt

SEQ ID NO: 183892 - DNA, 81 bp, Glycine max
tctgcccgactaaacagcaacacggacagaaggatttttgcagcgaagagaaaaaagaggaccgtccagaagatggaaaaa

SEQ ID NO: 183893 - DNA, 442 bp, Glycine max
tttcttactaatcataatatatgcacaaaggtctattctttcttgttgctatgaatcaaaaaaccacagataggtggtaaatgatgcacatgcaacatctaaacccaacataaaaaggtcgaacctttcgtactaatcatataaaatgaacaaaggtctaaactttgttgtttctatgaataaaaaaaccacaaaatggtagtaaataatgcacatgcaacatcaaaacccaacataccccaatcataatggtacatatcaacaaaccacccaagaaaaatcgaaaatcgtacacaaaacatcatacctgctaactatgccgataacgaacaacatacaacgtttatgatttatgaacaaataagtctaacctttgtggcttgaaataccatcacacctgcatatcatgccgataaataagaacaaacaacgtttatgaaca

SEQ ID NO: 183894 - DNA, 274 bp, Glycine max
tattgtgatgattatattattaagtcttgcaagaaatttggatatcttcgattaccagagagggcgtctccgcatgcttccagactactcacaggtcgggtagcataaatgtgtgtacagataacccttgagcgtctccgccatgcatcgaacttgatcatcactggttaagagagatgagtcttgcgcgtcatcggacttgatcatctctggatgacacacgctaaatctgcaactatcttcaacatgattagaaatggacgaccatcatcat

SEQ ID NO: 183895 - DNA, 485 bp, Glycine max
  unsure (1)..(485): unsure at all n locations
tggttcgaggtatcttacccgtgaagatcgaagatcgatgaagaacgaatgaagaacgtcgaagaacggtcgaaaccttcgcgaaattcttcacgataaatgttacggaaacgtttcggaagtgcctcggcttatattttcttcacggaaacaattgttccaagcaaattcgaaagagagagaagtgcctaaggtgctgaacccttttcttcttcacttcctcccctatttatagcaaaataggggaggtggttgccgcccatctcgcccatgcgagccatgttgcttcctccagaagcaacagccttctggaggaatattctggatggcccaagtgggcctgggtgctatntgcacccacatttttactaagtacacctccctctgcactttttttggtgattnctttttcatanagttacggaaacttacgaatttcgtaacgatacttggtttctttccgtaatgttacgatacactgcgga

SEQ ID NO: 183896 - DNA, 486 bp, Glycine max
  unsure (1)..(486): unsure at all n locations
gcagctaaatatgtttcattcagacgaacttctattatttattcagggattaaaaacttaattaagccatataaaagaaacgagaanatattgattgatnttacctgaacttgctcgcatcccaaccagagaattttgaagcttcgctgagtgcgcggctccacctggacaacgcattttccagatgttctcctgaataatttttttccgcagttgatttcaaaactttgccaaaatcatgtttctcatcacgatgacgcacaacagatgggtcaatgttgtaaaacacgggcagaacactttggccgtaagtttcgttgcattcgatgactttttcaagctcacgaagacaccaagtagattcagtatagcttttggagaaaacaactattgctatctgagacccttctattgcggtcattagttcatccagcttcattcccttgtgtagattctcctcatcaaggaaagtcttgactccagctt

SEQ ID NO: 183897 - DNA, 430 bp, Glycine max
  unsure (1)..(430): unsure at all n locations
acagatcctgcatggttacgatgcttgactacttgaaaggggtattctatgacaaggaaacatgacaatccctgtgtatggctttaggtatttatccccccttaatggaatatggctctagggtgtattttttatnttggccttacactgtgtacacactatnttaattcaaaaatttctattctatttctattttctgtattttcttcctctataccaaatacacacttattatttcctttctcccttcttggaccgcaagtgatgccccttaatcaccactctattattgaccttctcctatgcccctatcaaggtataataccacaaaaaaaatattggatacatcaacagttataacaaaagctctaatgtaaccactttgnataaagaaaaggtgtaactggtgatcattttgcttatacttata

SEQ ID NO: 183898 - DNA, 321 bp, Glycine max
gctgggttgcctcccagtaagcgcatcgttaacgtcattagcttgacgcatattacctcatggatcttgtatttgaaagaagagggttgacctctatgctgtcaccatggtatagctttaacctctgaccatttactacccatgtcctatctggagtctctgactgaggatcgaacaattatactaattcatacaacctgacttccttgattgtaaatggtacataccatttatacttgagctggcctggaaacaatgtcaatcttgaattgatcaacaatactagttgtgctggattaaacttcctcttgagcagcttct

SEQ ID NO: 183899 - DNA, 322 bp, Glycine max
tccacgatgctttttttcatgttcgcctgagtgggcttatagcctaaaccatacttcccacgattcccttgggtttttattaggctagttatgccgccattgtctttgcctaaacccatcccgggttcataaccgttccccaacataactcgggccatcattaccgctgcatcggacagacaaggttgcccaaagagggagtccacggaggaaatgctgaccacctcaaaagactggaaagcggttcctaacgattcttctgcggcttccacataaggcatggaggatggacagcttaccaagatgttttcctcgcctgaca

SEQ ID NO: 183900 - DNA, 376 bp, Glycine max
  unsure (1)..(376): unsure at all n locations
ctttgactcgtatgttcgtttgtgntcccatatatatcgagaagctcgaaattcataacagaagctattcgataaatcaaacgacgattactgtttacagggatgtccgattgagtcccatattatgtcgagacgctcgaaattgaaaacagatgctctgatcaaaatcaaacgacaataacttgttactcggatgtccaattgtgtcccgttatatatcgagactctcgtaattgaatacagaagctctgagcaaatgtaaacgacacacaactttgacttggatgtctgattgagtcctgtaatatatcgagacgctcgtaattgaaaacagaagctctgagcaaatttatacgacaataactttttactcgga

SEQ ID NO: 183901 - DNA, 409 bp, Glycine max
  unsure (1)..(409): unsure at all n locations
tccatgcaaaaacattngaattcattttgttatctgggaaagccattcattgtttttcattctcaatgtttccaaaaatcacttagctgttttctgatcccatcaaaagcaagtttcaaaaacattggttgctgattctttccaaagcatgttatgcccaagatttttttttatataatctacaactaacagaacaaaatatatcaaagcacgcgtaaatcagtcaaaaacacaaactcgcgtaagtttcaagaaaaaatccataaaagtaaataaagttataaagtagtgaagtttaatacaaatatataaataaacataaagaaagacaagttcacanattttttacaatcatggcttaagagctcactctcctctaatgaaattgtcaataggatcttccatatct

SEQ ID NO: 183902 - DNA, 348 bp, Glycine max
ttatacatttatcaagaaactttgatctttcgatacgtcatgaaactaatcctctgttcgaggtttatattgtgagaatgaactccaattttttctaacaaactaaattatacctattgagtaaataaatgcatatctataagtatggtgatagactaagtatcttagtgttaataaatgccaaaatatttaattgctttcaaataaaataacttattgtttaagtttaatgcacttttactctattaactcatggatggatgagatactttggtccatttatttacgtttggtaattttacccttaaattttttatgtatatttggtctcaattttaaatcacattt

SEQ ID NO: 183903 - DNA, 414 bp, Glycine max
gataacaaagatgatgacaaagagcttaatagtcaagatcttgtcatgataaccaaagatgatgacattcaagaatgagttcaagattgagtcaagaacacttctaggatcaagacgaaatctgatttcatgaatcaagaattaagtttccagattcaagttccaagaatcaagatcaagagtcatgactcaagattcaagaatcatgagaagacttactcaagataagtattaaagaaactttcaaaactgagtagcacatgaattgttctcaaaaccttctaccaaagagtttttactctctggtaatcgattaccagattatcgtaatcgattaccagtagcagaatggttttcataaagctctcaactgaatgtacaacgttccattcgattcaaaatataaaattgata

SEQ ID NO: 183904 - DNA, 327 bp, Glycine max
  unsure (1)..(327): unsure at all n locations
cgtgtgatngtggctctatataactatagacacatggtcttcataatgtgcntcctgttgacaacagacaacacgacacatgactgattatgcgtggcaacgcacacatcacaatgtatcactatatatagcgttgggaataattacatacaaaacaattgcctaataccataatttgtacatcgtcaaatttcctatttaccataattaacaatatccatctgcaacatatgtctcatgaccacaacttatgatattttcaatatctaacactgcccctcaagttggagcatataaatcatatgcgcctatcttgttacacatata

SEQ ID NO: 183905 - DNA, 484 bp, Glycine max
  unsure (1)..(484): unsure at all n locations
ctgcagcttgaaaatgtgttatcccttctctcaatccaatctgctggcttcgcgagcgtncgctaagcacaacactcatgggctaagcacgaggaagactttggaagaagatgagctatacaggttcgctaagcgcactgcttcatctcactaagcgcactgcttcagttcatccgctaagcgagaaaggcacgcgctaagccgaaattcactaatgtgcgctaagcnggtgatgtgccattattttctcctatttcttaaccctttttgcaccattttaattactgattagtcttaattgcaaattaattatgcagttgtatcattngggcctactgggataattttgtgtttttaattaaatctcaggagaattataagcaattaagcttgaatccagaattgggtntggacttgaagagagcacactatcttattctaccaacatttatcttatctagactgtatcttatctagatattat

SEQ ID NO: 183906 - DNA, 342 bp, Glycine max
  unsure (1)..(342): unsure at all n locations
gcctttctgaatggcttttttcatnnaagaagatatgtcgaacaaccaccatgttttgaaatattggataagccaaatcatgtgtataaattgaaaaatgctttatatggcttgaaacaagcccctatggcttggtacgagccgttaagtaatttccttttagaaaatgacttgtctataagaaaagtggatactactctttttataaagagaaaatcacatgatattttattatgtcaaatttatgtcgatgacattattgttggatccactaacgaattgttgtgcaatgaattctcccatgacatgcanagtgagtttgacatgtcaatgatgggtgaa

SEQ ID NO: 183907 - DNA, 463 bp, Glycine max
  unsure (1)..(463): unsure at all n locations
agccnatatatattatatgcctctctttgtttctacatcagaaatcgncgtattcgattagccgtttatgaattaatatttccaaatattacatgtgttattgcaccttaaaaaaaagattccatgttgtaatcgtctatcaacttaatatgaagaaaaacattaacgtattaggtatattctctgcaccttaaattaaatatataccttctgtaatccgctattaatttaatatgcagaaaaaatattaacatttcaatatgcaaaacaacattaacatgtgcttcactttaacgtatcaatttttttataatggctgcagcttttgtatactattataacattcgaaagaaaacaattatgtccttagtaataatgcttacatggcacacaatagtgtaatttaaatcatatatatgtatttcaattaagaagaacctctacaacaatcaatttgagatat

SEQ ID NO: 183908 - DNA, 381 bp, Glycine max
atgctttgaccctgaccgtaaccacctaacctgtccttatataattccatcctgcctcgataagatctgcatccctttttcgccggggaccttgttgtgacatgcgacctctttggtccttgtgagggcttgcatccatcattaggcaattggaaattcaggactgccgtaaaccaaataatatgatgccaatccgtagttccggacacatggaataaatggagcatcttgctaataatgagttcgaacattcgagtcaaaagggagattgatcccaggtccgtacatacgaaaaacagtatcgtcaaatctagttccgacttcgaaaagataccaaaagtaagggggtttattaaggggtgaacgtattcattggcctta

SEQ ID NO: 183909 - DNA, 454 bp, Glycine max
  unsure (1)..(454): unsure at all n locations
gcttaacatcataccacttccagtgtgctggaacttcttatatggtattgatggggcctatgcatgttgaaagcactggaggaaagatgtatgcctatgttgctgtggatgatttctccaaatttacctgggtcaactttatcatagagaaatcagaaacctttgaagtattcaaggagttgagtctaagacttcaaagagaaaaggactgtgtcatcaacagaatcatgagtgaccatggcagatagttngaaaacagcaagttcactgaattctgctcatctgaaggcatcactcatgagttctctgcagccattacaccacaacataatggcatatttgaaaggaaaaacaggactttgcatgatgctgctatggtcatgcttcatgccaaaaaacttccctataatctctgggctgaatccatgaacacaacatgcttcatagtcacact

SEQ ID NO: 183910 - DNA, 474 bp, Glycine max
  unsure (1)..(474): unsure at all n locations
agcttgataacacgcaagactactctctcttttttgcggncttagncaatcgcgggcgacaagcccgttgacacgcatagatttatgtcatcttccgcgcttacaagatctgtcatactgagttntgagtcacgctgacgggcggaaatacccgagtggttatgcgtataaactttttgttgtttgtaagacgaaaagcctggtagcacgcagagactaacgtcgtcttcggcgcccttcgtcaatcgcggccgacaagcccgtttacacgcggagatatacgtcatcttccatgctcacaagatctgtcatactgacttctgagtcacgctgacgggcggaaatacccgagtggttatccgtataaactttttgctatctgtaagacgaaaagcttgatagcacgcagagactaacgtcctcttctgcgaccttctaatcgctgctgacagccattgaacgcgggattacgtc

SEQ ID NO: 183911 - DNA, 137 bp, Glycine max
aaaaaaaaagagaggtggggagtgaaatagaaaaagagtgagatggaggagaggataagaggggaaggagagaagaagagagagtgagaaaagggggagaggggggagaagaatgagaagggaagaaaaaagaaggg

SEQ ID NO: 183912 - DNA, 349 bp, Glycine max
  unsure (1)..(349): unsure at all n locations
agctttatggaggtgcatcttttttctctttaaggnccttcaatggngattntnagccatggagttacagcgaaagataaaggagaagaggtcagaggaggcgccatccactacagaataagccatggaaggagaagcttcaccaccaagagagtgccttggataacaagcttatagaggaagctccactggaggaacagaatgatagacagagagataggagggggggcatggaaattgaacgagaataggcacagcaattgaatttcgacgtaggctcacaacgtctcattcatcaatgtttgacacgtgtacacttgctttattatagcctatccatggaagctcc

SEQ ID NO: 183913 - DNA, 207 bp, Glycine max
tcactaagtatatcctacaaattgttgttttgtggaaactaattcagttttcaaatcctccacatttgtgttgtagacataacctgattcagtttacaaaaactacaaataacctggtagtacatatcctctgcaaaaaaacattttgaaaataccttagcaaaccttacaaatatatatcttcaactgaaaagcaacatgcttttg

SEQ ID NO: 183914 - DNA, 108 bp, Glycine max
  unsure (1)..(108): unsure at all n locations
ctcgaccgggatcttaagcgactgcagctgcagcttaaatttgacaccctgctcacattctgctggtaatcgattaccatatatgtgtaatcnattacacagggcaaa

SEQ ID NO: 183915 - DNA, 466 bp, Glycine max
  unsure (1)..(466): unsure at all n locations
tgcttgtggtgcttctatggaggctggattctttagcttcaatgangtcctttaatggtgattntccaccatggagatgcagcggaagacaaatgagaagatgtgagaggaggcgccatccactatggaataatccatggaagaaggagcttcaccatcaagataagccttggataagaagctttgagaggatgcttcaatggaggaaaagaaagatggagagaaagagagaggggggagcacgaaattgaaggaagaaaaatggagagaagttgaactntgagttgtgtctcacaagactctcattcatcaaagttgcaataagtgttacacatgcttctatttatagactatgtagcttcctttagaagctctcttgataaaacttcctttagaagcttctttataaaaacttccttgagaagctagagcttatctacacatacccctctcataactaagctca

SEQ ID NO: 183916 - DNA, 358 bp, Glycine max
  unsure (1)..(358): unsure at all n locations
ctgcctatgtccttancattaatccctacactcttagccgagtccacgatgctgacacaagtggacatttgggattcatgaagacgtataataggttatcctctactttcttttggaaagggatgaaagcagccatcatggcctccattcgatagtgcgatgtgtgttagtgcaacaaatatcaagccatgtccatccgaagattgcttcaacccatccctatttcggaggtcgtttgggatgatatatccatggatttcatcacgggtttgccgtgctcgcaagggtatgaggtgattctatcggggctagaccccgtatctgaagatgcccactgcatttctttaaaacattctta

SEQ ID NO: 183917 - DNA, 382 bp, Glycine max
atggaactcaagaactggtaactgcttgaagcatctttagtcatattctgcatctatgatgactagctttagatgatgagccatttgatctttcatctcataaaccaatttaccttaccctcagttctctgtgaaactctgggttctgggaagatgatcaaatggttcatttccatcattggaaacatctactagtttgcatctagttgctgaggaaagatatcgagggccaatgttctatgacaaagaaatatgaacggcaaattgttgcaaagtatatggccctgtgttgctatacttgtctatgttctcgatgcataaagtgtaacacagtatagtacatcggttcactgggttacttgacatactactcatcgcaatg

SEQ ID NO: 183918 - DNA, 429 bp, Glycine max
  unsure (1)..(429): unsure at all n locations
gttgagtctagtccaacaagagggatctaaggatgaagcttattttaagtaagtctaaacctaggagggctgtctaaattaagcctagtccaataagagggatttgaggacgaagcttggattgattcagtctaactaaggatcgaggtttagtaatttaggatatagcatagaacacaaaagcatgattaattagagaaatatctttatatacatcagttggtttgttagaaagacccaacatctttacctaccactgttaattntacttgcatttttactgtttttagcctagacttagtttaatcctgtgttaaatcatcaattatcaatgtttctttcaacaatgccttatttccgaatgtaaccttgtttaagactaatttcctgagttcgatactcggattcatccattttaattntaaatac

SEQ ID NO: 183919 - DNA, 327 bp, Glycine max
  unsure (1)..(327): unsure at all n locations
tggtggtctatattttagaggactagaaaaacggttattaactcataataagtttaacgggagggtattttcgtaaatgactatataactactttaaaaatataattctagtttaattaattggtgattaattaaagtgtctaatcatatgatgtagaataattaaaataagctagagttgtaataccctatatattacaactcagaccgacagagaaactctgtgttgtgtctctcatgtctgtgagtatttaattgttgtcattatatgcctctaatcanagattttnctgttgtgtgtgtgtgtgtgtgtgtgtgtgattgttt

SEQ ID NO: 183920 - DNA, 422 bp, Glycine max
taggcgtgtccacaataatcagtccggactagttttctaccgatgcgggctattctgttctgctgcaatgccgtgaataatattttggatgatgacgactaggaactgttcggttggcttcatccggtgatgctttttggtatgcctcaactggtaatcttgtcttcttggccgacgtcgcattggattattttcgatcaatgtgtgtgatggaatctttcctctgctgaggacggatacatttttgctagcctattcaattaccgcagtccaatgtcgcccgacaagaaagtctgttgagtgcgcacgatataccattggcgatcttgacggataaactttcgagcgacaatgaattagaatacgttctcgatggttcgaataatattatggccggcgctgatggaatataaatacttggc

SEQ ID NO: 183921 - DNA, 376 bp, Glycine max
actattgggatcatttctttcctcggcatttgagggaaccacttgggctaccaactccctccaccttttgggcgtattctttgaaagaatcatgcgcttttttgcacatgttcttgtattgcatcctatctggagacatatcagaaatgtactgatactgcctaacgaaaggtaccattaggtccttccaagaatggactcgggaaagttcctagttagtgtaccagcgtacagctaccccattaagacttggaagatatgtatcagcagttcctcatcttttgcgtatgctcccatcttccgactatacatctatatatgagtcttgtggcaagatgtcccctagtacttgcaaagttcggtcccttaacttggg

SEQ ID NO: 183922 - DNA, 477 bp, Glycine max
  unsure (1)..(477): unsure at all n locations
nttagaatatataataaaagaactatgactattgaagaatcaattcatgtggatttttatgagactaactctattagcccaagaaaggatatactagatgatattacagatactttagaagatacacatatgcatgaagaagtccacaaagacaaagaagatggatatagtagagattctcaatccaaagaaaatcaaataaacgtggatcttccaatggagtggagaacttcaaggtatcaccctcttgataatatcataggtgacatctgaaaaagggtaacaactcaacactctcttaaagatgcatgcaataacatggctgttgtctctttaattaaacctaaaaacataaatgaagccataataaatgaaaattggattatttctatgctagaagaactaaatcaatgtgaaagaaatcaagtatgggaattagttgatagacctaatgatcatctaattattggaactaaa

SEQ ID NO: 183923 - DNA, 391 bp, Glycine max
  unsure (1)..(391): unsure at all n locations
catcgtcggtgtnctaaaaaccacatttcacccttacagaacgactggaagaaagctntttaatgggaagtcacagagcacaataactgcacccgataccatatgacttgagtagcatggccttcccatcggtgttgaaccacctgaatactcgtatttggagaagacccacaacgaaggataaaaataagatcttgcttgtggaagaagaggtacattctctttgatcttccgtattggtctgatctagatgttacacattgtctcgatgttggataaaaatgtatgtgacagtgtgattgggacgatccttaacattcaaggcgagacgaaagatggtttgaatacccgtcaagatctagctgacatgggtatacaatcacagttgcat

SEQ ID NO: 183924 - DNA, 415 bp, Glycine max
  unsure (1)..(415): unsure at all n locations
agtcacctgcggcatgcaagcttanggatggaacacttcttgttggttatatacacagcgcgaaacggaatcaaaaaatgcgaaaaatgatgaccctagggctgcaagctcgtaaatcccatgggtatggcttttgaaaggggggaaaagaagtttttgaatgcaaaaacgtcccccctttcgtcattcttataatttggtgcaggggtggctcgcccaggtgagctcagctcgcccaggcgagctaacctgcatttttttttttgaggggaacattaaccatgtcccctcctttctcatggattagcgtcttgcctaactngaacttacttaggttagaattaggcgttgattacttatttttactttntaaaacaagcaaatagtaaaagaacactgcgaatacaaaggatac

SEQ ID NO: 183925 - DNA, 340 bp, Glycine max
tctatagaaggttcgttcctaatttctctcaattgcatttcctctcaatgagctggtgaagaagaatgtggcatttacctgcggtgaaaaacaagagcaagcctttgctttgctcaaagataagcttactaatgcacctgttctagctcttcctgactgttctaaaacttttgagctagaatgtgatgcctctggagtgggagttggagctgtattgttacaacgtgggcaccctattgctgtatttagtgaaaaacttcatagtgccaccctcaactaccccacctatgataaagagctgtatgccttaataatagcactccatacttgtgaacattac

SEQ ID NO: 183926 - DNA, 427 bp, Glycine max
cgtattcgattagccgtttatgaattaatatttccacatattacatgtgttattgcaccttaaaaaaaagatttcatgtcgtaatcgtttatcaacttaatatgaaagaaaacattaaggtattaggtatattctctgcaccttaaattaaatatataccttctgtaatccgttattaatttaatatgcagaaaaaatattaacatttcaatatgcagaaaaacatttacatgtgcttcactttaacgtatcaatatttgtttaattgctgcagttttgttatactattaaaacattcgaaagaaaacaattatgtccttagtaataatgcttacatggcacaaaatagtgtaatcaaatcaaaatattattttcaattaaaaaacctctacacattatattgaatatagaaaaataattttatatt

SEQ ID NO: 183927 - DNA, 371 bp, Glycine max
  unsure (1)..(371): unsure at all n locations
gttgacccttgaccgctnaccaccatataccttgacccattgatttaatttccatccctgtcctcggaataaggatctgtcataccctaatttcgtccggtgacctttgcttgatgacatgcgacctttctttggtccttgtgatgtgcttggcatccatcattatgcaatttgtgaaattccaggacatgccgaataaccaaaaataatattgatgcacaatccgtaagtttccgtgacacatcggaaatcaaatggaagcatcgttgcataattaagtgaggttccgtaacattccgtaagtcaaaaaggggatgattatgtaatccgcaaggttccgtaacattacggaaagaatacaagtatcgtta

SEQ ID NO: 183928 - DNA, 474 bp, Glycine max
  unsure (1)..(474): unsure at all n locations
agcttgtaaaaatgaagtctctcccgatctacctcaagatgtnttaaaacttaatgaggagattgatactttaagtcttaatgtcattttcggtccattatattntgtagttgtttctctttggaacatttaagttttaaaagtttcattatggttctttatgttttttgcaatgtatcattttggtccttttttataattttctgttagaaacattaatgttcagttagtttttaaatattataatgagtttatgtcacttttggtctatcatgtgttaaaagtttcattcatcctttgtgttcttgaattgtatcgtttaagtcattntttcaattctttgttagaaacattagtgtttagtgtnttaaactttaaaatagttaagttaacataatgacagctaaaaaccactacttctttctcttattcaaaaaattaaaaataattaagtaaataaagaaaaaatgaatt

SEQ ID NO: 183929 - DNA, 490 bp, Glycine max
  unsure (1)..(490): unsure at all n locations
taagacaatactaatcaaatatgggttaaatgttggacttgctgctgaatgatatgctagttctcaaatgctacttaaaaaataaattcaagtggaatcaattagaaaaagaaaaagaaaagcaataaagttgagtgaataagatcttaaatggaaaaaagaatgatgagactcttggttctactctgtgtatttaaattgtatctttaagttttcttttttttttttcttaatgtgcacttattccccattgctcctctattcctttgggatttagctacttattccatatttttccctaccttttccttggccccattacaaccttaaaagaccttttgatcctcatgtgcttgtgtttatgggttgattgtcaatnttatattcttgccaagcttatgtggtgttggttttcatgggtgctttganggtaaatagtaacctacacacttgagagatagagtggatatcttgtgaagctttatcactt

SEQ ID NO: 183930 - DNA, 219 bp, Glycine max
aggaattttggaatgagaattcgtgcataaataactattaaggcgttgatagtgtggatgggagcatatggtgacctatgaagctgtggatatcaaatgtgcgctctatggaatgaggagggagggagaggaatttttgataacacatctattttatggaaatcgcttaataacaaatcttaacagaagaaatgattaacatattttctttagattaag

SEQ ID NO: 183931 - DNA, 465 bp, Glycine max
  unsure (1)..(465): unsure at all n locations
ngaagaggtgtaattttcctttttaattntatgctattgctattgctaaagtttgagcataattcttggttaattaaaggcagctgcttcactctctttgttttctttttcccttgtattattcttcttgttcctcttatctctctgtctttagctttaattttggtttttcacttgaattttcaatggagacttcangactggctatgctngcccgcatgagtgaagtttgatcccacatccatgaactaatataacatcttgaagccaaagtggatgcaaagaacatgaaatcacaccctttgatagatgagttcattcccactattgaagaagaagatggaatttgttatacccatccatagaagcttccagctgtgagatatacactgtgaaaatatactataaaaaaatatatgtaattcacctcccgttaatgtctaactctcattattctctaacatg

SEQ ID NO: 183932 - DNA, 477 bp, Glycine max
  unsure (1)..(477): unsure at all n locations
agcttaaggatactatacacagacctattttcttattgatagaanaaaaaaaaatacaagaatgcaacatgtgaggggcccaaacaaaactcacataaaacaaaatctatagctaggaagatcaaatttttctctaaaggaaaactctttaatagggtaaactatatctgaccaaataaaactcacctcatgaatacccaaattagctacaccacttgtacaactatttccctctctaaaaataagagacaccacaaaattcaatgaatttgtgtaagaaacaattcatctagcaattcctcaagttccacggcacaatggaaggatccttatatgccaacacaacaagtgaagaatcgaactcaagccatagcttagaccgacctttagatagcgttatttccaatgcgtaaatagctcctataatcccagcttccaaaagatgatttaagacccanatgatgagtanaacatcct

SEQ ID NO: 183933 - DNA, 363 bp, Glycine max
cctcatggtcacatctttactgatgagctaataaactatgtatgacaatatattgatcttgcatgtgatacgctatcatgtctaagtggacagttagccagtttctcacttgttatttaataactctgtttgtaaagtttttgttgagtgaattgaggatacacaacctaatgttttgtaatttgccatgtcttttttacttatttctgacaaacttattgagtgattcataaagcgcatttggttcaatatgataattcacacaacttttggtcttgtgttctgacatggtggtgactcttcaaaggggaatggcatgttatttgtgtacttgtgctacccaaatgattggagtcccttttg

SEQ ID NO: 183934 - DNA, 476 bp, Glycine max
  unsure (1)..(476): unsure at all n locations
agcttgaagaggatgctctccggatgataataaagagagaaggtgggagcacgaaattgaaggaataaaagagggagagaagtggaactctgaagtgtgtctcataagactttcattcatcaaagttacaacaagtattacacatgcttctatttatagattagaaagcttcctttataagctttcttgagaaaacttccttgagaagcttctttgagaaaacttccttgagaagctaaagcttagctacacacacccctctaataactaagctcacctccttgagaagattcctaaagaagctgaagcttagctacacacacctctctaatagctaagctcacctccttgagatgagaagctagagcttagctacacnacccctataatagctaagctcacccccattccanaaaatacatgagaatacaaaagagtgtccctactacaaagactactcacaatgccctgaaata

SEQ ID NO: 183935 - DNA, 354 bp, Glycine max
tgcacaacatccaagtaattcaacatccactcatcacattctaacaaaaccaagcaaaacagggcaaatgcagataactctgcccaaaactcaaaccaataatcacagctttttctcacttaaagacgccagtaacatttccttcgttccaattcgttcaccgttggatcgacttgaaaattttactggaagtccctagtacataagtctacattttgaccgttgggatctgctagtaaatatccagaaccccatatgtactaccctgttcacaaccagccatacacaagcatttttctgcacttatacaaaattctgctgcacatttcaacagcaaaaattcgcataaagtgc

SEQ ID NO: 183936 - DNA, 403 bp, Glycine max
  unsure (1)..(403): unsure at all n locations
gctatagaagaagcccgctcttgattctcgcataacatttacatggggagggataatgaactctaaatgtaacaattaagcctcaacttgagaattaatttcataggccatctntatttgattattttaggattccattctttttcagttctacagattttatagtcgattatgtcaatggttatgttttaatatttctaaaagaaaataggttatgcactaatcgaacataaattatattattattcaatcacatattatcataaaataataagtttattgattttcataataattaatttanaaatcatacaaataataattttctattagtagaacgttagaagttttacacttttctacaaacaggaaaaatgattatacatgttccagagtaccaaac

SEQ ID NO: 183937 - DNA, 411 bp, Glycine max
  unsure (1)..(411): unsure at all n locations
ntagaggtatctctatgaactgtctaatcttgtttttgttcaatcggttcaatgtgaatataaattagatgcacatataccttgttcatggtgtcttgtgtcttcatattgtcactcatgttatttcgttctgagttcctgtatgaacataacagcaatgatacttttgatttatgtcctcattttaaaattattcctctgaaaaagacatgactggttgatgttggctggtttccttttactggatgatgatgtaggaggctaagagtaatggttgtgatgtttatttagacccactattgtacatcttatattcaaatgtaatgtaaaataagacaattcgtactatatttgcgaaaccatggtcaacctagtgttttgaatgcggaaagatgatcaaaggatggtgat

SEQ ID NO: 183938 - DNA, 305 bp, Glycine max
atatgcctcatcaccgtatgaggatcctgtcgacgcctagttcaaactcactcagacgggtttattgctaacatacctgaaggagttccaacactgggctaagtaaataattggtttgccgagctccttcctgctgccttgcttcatcgcggggttgacagcggagatccgccgcacagaccaggtccaccatcctatgactgtggaccaggccgccagccttgcgaagatccaggatcataatctatgcgacctcgtctgactacaccgcggccgtgaccccaccgcatgtgactccaccacca

SEQ ID NO: 183939 - DNA, 502 bp, Glycine max
  unsure (1)..(502): unsure at all n locations
tacggacctataaaactcagcttaacattaacttcagcgtctcgttatatacgactttatttacatccgagtataaagntattgtcgcttgaattggctcagagcttcaacattcaatttcgagcgtctcaatatatgacgggactcaatcagacatccgagtaaaaagatattgtcgtctgaattggctcagagcttctacattcaatttcgagcgtctcgatatatgacgggactcaatcagacatccgagtaaaaagttattgtcgtttgaattggctcagagcttcaacattcaatttcgagcgtctcgatatatgacgggactcaatcagacatccgagtaaaaagttattgtcgtttgaattggctgagagcttcaacattcaatttcgagcgtctcgatatatgacgggactcaatcagacatccgagtaaaaagatattgtcgtttgaatgggctgagagcttctacattcaatttcgagcgtctctatatatg

SEQ ID NO: 183940 - DNA, 285 bp, Glycine max
aaaacatcatgtggtttctttaataaggctaaccatctatttgccaattacaatcatcacggtgctagtgagagaacatgtgatactttacctggcaaaatacagaggagttgaatatcaaagtgtcgagcactatatctgcatctggacgataaaatctcagtatcctcttcccatcaaaagtgaagaccgcaaggacaattagttgatataaacttcgaccaaaaatattcctccacacgggtttggtgataaaattagctgtccttccaacaggaggtctta

SEQ ID NO: 183941 - DNA, 479 bp, Glycine max
  unsure (1)..(479): unsure at all n locations
aattgaagccttggtcaacctagtaactcatcttgctattatttagaaattngcatcagcactggttgcaagagtctgtaatctatgttttctgccgatcaccatacagatctatgtccttctttgcagcaatctggagtcaatgagcaacctgaaacttatgctgcaaacattcataatagaccgcctcagcagcaaaaccaaccaaataattatgatctttcaagcaatagatacactccaggtgggaggaatcatccaaatctgagatgggcaagccctgcacaacaacaacaacagcctgtccctactttccagaatgttgccggtccaagcaagccatatgttcctgctccaatgtagcagcaacagcaacagtcacaatataaacaacaagcagctgaggctcctcctcaacctttcttagaagagttagtgaggcacatggtcatccagaatatgcactttcagcaagagac

SEQ ID NO: 183942 - DNA, 466 bp, Glycine max
  unsure (1)..(466): unsure at all n locations
agctntncgattcattctatgtacccgatgtgtttctattgtgtttcgcgcatttntattctcgttntgtttactttttataccccctgttgacgtgcttaagccattttacttaagtcatttctcgtgtaacttaaaaataaaataaacttccaccgaacgtttgaattgtattatccgttaacttcggttaaaataaattccgaccgttcggtcgtgccgtaaccacgttggaaatcgaaaagaggtaaaaaataatatattaatcaaaaagacatcttttagtaaaataaagcggaaaatcaatcggacgttttctctttgggatttctcattcttaatcgaattgattaataactaaagtgaaactaaggctaaaatcaactcgcttagtcaagctcgtccataanaataggttggtgaagttgtcatttctacttctcactaagtaaaatggcatcatttt

SEQ ID NO: 183943 - DNA, 482 bp, Glycine max
  unsure (1)..(482): unsure at all n locations
tatatcttattgtgtgcaagaggaagagaggcggtagagatatatatctaaaagtgttcatttaagctacatctcaaaataagaagaaaaaaaactaagggtgcagcaaaagggtcttctagcaaaagaaacaaaagaaagatgaagaacttacctattacttttgcaagaagtctagacacatgaagaaagagtgtccaaggtacgttgcatgacatctaaagaaaggtaaatctcttgctcttgtttttttttctaaagttaatttagcttttgtacctaaagatacttggtgggtggatgttggtactactactcacataagtctaaccatgaagggttgcctgtggacctgactgtcgagtgacgatgaaaaattcatctttgtgtgtgactacaaaagggttgcggtggaggctataagaacttttaggttacattnganaactacattntatttggattatntaagactttctata

SEQ ID NO: 183944 - DNA, 274 bp, Glycine max
  unsure (1)..(274): unsure at all n locations
tgactcatcatctgctgaagtnntatttaagttgagctcccataccgaacaaatcacagatactatattgaagcactttgaagacgaggaagctcatgtgagaatatgtttatttaaaaagtgacaaagtgctagacctacttggagagtggtgatatataattgggtaagctttatttatgcttgttccgtgtttgcctaaatctcaagattcatctactcttttctagaatgtcatatatcacttcaccantatcattgnacatttacatta

SEQ ID NO: 183945 - DNA, 264 bp, Glycine max
tgtctcagtgtttatgcgagacagagaccaacatgttagccatcgtcagcaagtcccacaaaaaatatatcttccacggcccacgagcacaaagtggtggacgagtatgcccgagtgtacgcggaaaaagaggctatatgaagggtgatccactcgttacatcaagaggcaacaatgtggatggaccgatttgctcttactttgaatgggagtcaagaacttccccgaatgctagccaatgccaaagcaatggcggacacctac

SEQ ID NO: 183946 - DNA, 420 bp, Glycine max
agcttaactaatcaaatgggacagttggctattcagttaaatcaacaacagtcccagaattctgatagattaccttctcaatctgtccagaatcccaaaaatgtgagtgccattacattgaggtcaggaaagtattgtcaaggaccttaacctgtagcatcttcatcatctgccaatgaacctgcccaacctcactctactccagaaaaagatgatgacaaaaatttaaagagtaagttacctaacaatttctatgcaggtgaatctaaagagaagcaacatatccctcttccattccctccaagagaaatttccaacaaaaaaatggaagaggctaagaaggagatcttggaaacatttataaaagtagaggtaaacatacctctgctggatgcaataaagaaaattccaagatatgct

SEQ ID NO: 183947 - DNA, 483 bp, Glycine max
  unsure (1)..(483): unsure at all n locations
tatgcgcatatttncttacgaacgttctcttgcacaagacattctattaactaagaaaaatgcacccatacacaatcaaggcagcttcgttacctagattatntacacgtacttccaaggtgtatttgttacttacatcaaacacatctccttggctaaatttacatacatgcatactgaaagcattntgnggtaccaaaaattgcacatgtgcacatcttggtatttctaatacctatacatacacaaacttcatgatgaatcttgactatcttcacaaaaaggtgctacacttcatcctttntttcaagtttttgctacctaaagtcgcatgcaaattcaagcatattttcctttgctgactaaaattgtattcaaattaaaaggtatanctttttgtaatatgttntcttcacatagcatgcaacatatntatatatantatttntgtgagacattntgactaccaacaaatatatgtat

SEQ ID NO: 183948 - DNA, 390 bp, Glycine max
  unsure (1)..(390): unsure at all n locations
agctngtccgcaaaaaatcactattaacctttntaaggtccaacgccttaaacggtcctctntgcttttatcggttaacatggaccattcaaaagcataaaatcaacacattactttactgtcttttgaaagaactacataggtctgatttcctcttcgatggaggatacgtaggagcaaaaaccccgcttttgtcgacctcaaaaataaaaagagaaaaaatttaggatacatgatttcacgcaactctaaatctaaagctgttgtcctttgggacaaacgcgagaggtgctaatacctttcttaagcataaacataactcccgaatctggaatattctttatgaccagtttcctttggtttttctaacgttttcctttcaataaacat

SEQ ID NO: 183949 - DNA, 464 bp, Glycine max
  unsure (1)..(464): unsure at all n locations
ntatttgcaccttcttcggttccttctacttcaactacttcatccctagntattccttcaataggacttatgatagtatccaattgaccataaatggccctttccaatttgcacattcggtagtatctaaccgatatagatgaccttcccaatttggagaccacttaccacattctaaatcctttgctcccaaaggcataatcgacttccaagctatgtcacattcgctaaaacattntagctaaatgtgattgttatatgctttttcaacttttcttttgttaagttgaatctggtcaagtgccattagtcgatcctcatttaattcttctaactcatcaagcatggattattgatagttatcgaagcttaacatgttntgcttggctactctcanagatttcatgttgatttctaaaggagaaactacttcatgctcgtatgtcatccgaaatagggtacaa

SEQ ID NO: 183950 - DNA, 473 bp, Glycine max
  unsure (1)..(473): unsure at all n locations
ngatcaaaacaattctctaatttgtccaatccactcatagtatacttttgctcattcaaatcattggcagacactcatttcatacnaaaaaatccactgcatatcatnttcaaccagntcactgttcaaacaagctnttatacaaacaatcaactcaaagtactgaaatttaaataactgaaatttaaagaactgaaacagaaacactgaaatttaaatgactgaacataaatcataaaataactcaaaatactaaaatgttcaaaatgcactaatttaaatgtcctgctcttgtggttgctcctatgcatgctcattgagatccaacaccggagcagctggtgaatcctaagggataggctgctctaactcagatggtatggcatcatcacgtatacgtactgcggatggctctgggatctggttcgtggaagtctccttctctcgagccatgtgtacacctgcatcaaaat

SEQ ID NO: 183951 - DNA, 446 bp, Glycine max
agcttatagcatctgatagcagggtttcattttctttgaactacacacaatcaatgcatactctcatgatcagaaatttgaatttcagacagaaataatcatattacatcaaagtttgtaacttttgctagtaattgatcattcattttctactggcctcaaagcatctttagcggtagatcccaaattgcgagatcttagatcactttttgatagaccccataatgtcatgtaagattgaagacctcttaagatctgttttctttagtgataaatctcattttaagatcctaaacaatttttttaggtctcacatggatctacttttaaaaaaaaatttcctcccctaccctaacagacacttccttcttccaatacaatttgtttttctcttctcccaacatggacgtatctttttgtttctttctttccttctcctcttctct

SEQ ID NO: 183952 - DNA, 469 bp, Glycine max
  unsure (1)..(469): unsure at all n locations
tagtgacatccgngactagatcttaagcgaagattttctctttatagattcacgagaatcttctagtcatgtttccaattcagcattgaatactgaaggcagaggaaggactacccacataggtcagaatggtcgagacatatcaaagtcaagagggaaaggtcagacaaaattttgaagtgacattatctgctggaattgtgacaagagaggtcactttaccaatcagtgcaaggcaccaaagaagaacaagactcacaaaaataagaagcgtgatgatgatgaatccgcaaatgcagcaactgatgaatttgatgatgcattaatttgcagtttggatagtcctgttgattcatgggttatggactcaagtgcgtcattccacaccactccttctaaagatgtattatctaacctatattttagaaagcttgggacagttaccttgcagatggaaaatctcttgaca

SEQ ID NO: 183953 - DNA, 428 bp, Glycine max
  unsure (1)..(428): unsure at all n locations
agcttgcacccttgcactattaattctttgtataccctatcttcatcaccaattgacatctaaggatgcatgtgatttgactcaattggtaatgatgaagaactaaatagtcaacatcaacatatagctcaagcgcaccaataattgttgtttgaaagcattgatcatacacctaacaattgattagttgaaacttcaatttagcatgaatttaaaatatcattactaatacctcggttaatttggatgaaccttttctcactctcaaattaagaattttttttttcaaattaaaatatggggttaatcgtatttttattctctacatcttgtacaaattttacttttagtctctaaacatttttgtatatatatctttgggtgctatanattctttctgtaattgtataattcatgttaccgaataa

SEQ ID NO: 183954 - DNA, 473 bp, Glycine max
  unsure (1)..(473): unsure at all n locations
cttcatgatccatgtagcagcgactctgtgttgctacttggtttgttcttccgaacaagccatacgtttcctttttattattgccaagagttgtgaataatttaacgctagctaattcaaatatgttcgaaatataagttacaaaggtattcttcactaacaatgtgctcacatcatgggcaacagaatanttttatgatctgattcgaagtcaaatattaattttaaattgngcgacgaaccaaaataacttaatttcagagagaaaataatttaactatctaaaaaaataagagaccaggccaaagttacacgtagtccaaactaaagaattatatatatctccttttcatttgcctttcaatttggattggctttgttcactccactaatcaagcattacactggtttagttacagcacatgctacctataatacanatcctctgacttcaagtcctggaaattagtaat

SEQ ID NO: 183955 - DNA, 428 bp, Glycine max
agcttctcacgagagatcaggtctcaaagttacttatcactaaccctgatctgggtgattatacccctctccatcatgcacatgtgcttaatctaacctttcgcccgttattccatgaccatgcattcctattggaggaatcttctcatcatttgttgttggtgaggcctacaaatcattctattccactactccaaaatgttgttcccatcactgtttgcctttacaggtaaccctatgctcagaagttaaagattgaacacaaatagataaattattgggcactgggtggattcagccatgcacaagtttgtgttcttcactagtcctacttctcgagaagaaagacaattcccataacatgtgtgtggagtgttattttatggactattttgttattccaggaatacaagactataaaatgtatc

SEQ ID NO: 183956 - DNA, 344 bp, Glycine max
tgctcaagattgtgtttttgctccttattttcctgctgatgagcctcataagtttgcaaatgtgcacaaagtctttggtgccagcaatgtcaacaagatgcttcaagttcattattaattaaatattcctcttatttgtgcatttcttgttactaattattggagatagtcagaatagatattatattcaaaatgttcactgttttaacctgtttatataagattatttttagaccacaagatttgaacacaatttgcataataaaaataaataaatttagtctctctctatataaaacattttcatattcagaaacaagaatatggatacgatggtgaagaag

SEQ ID NO: 183957 - DNA, 456 bp, Glycine max
  unsure (1)..(456): unsure at all n locations
agcttattaattaatccactagggttgcttgttttcttggtggggatntaaatcatttgtataaagtttaagtttaaatcttggagaatcattagaattgatctggtggttgtgaagaatttgagtaataactaataataaacatataatcacataggttttaatttcaatacgatcactaaaaaaatgatgtcaaaaaatgtgcttatttaattgtaattgtatgagaacaaaaaagataaaatgacttgagttattttataaatttaaagtcagtttatatacttattttttataaaaaaattaatgtgtataaattaattttaacttataaaaaacgcttaatttattctagttttttattttatctttttcacctcataaatagttgtagataaatctttccaagtctaataaaatattatttctgtcaaagtttaaattctaacaatattt

SEQ ID NO: 183958 - DNA, 475 bp, Glycine max
  unsure (1)..(475): unsure at all n locations
tgntcgcacatcgttcgcgtgtatgacatccactccacattgtttgaagtagaggagaccttcaatcctattacccaacgtggcggacaaaaatgggcagttaacttgaatggtcattattgtcaatgcggaaggtattctgcgcttcactatccatgttcacatattattgcagcttgtggttacgtgagcctgaactactaccaatatatagatgttgtttatacaaatgagcacatcttaaaagcttactccccacaatggtggcctcttaagaatgaagcggctattcctccttctaatgacgcatggacacttatccctgacccaactacaattcgtgcgaaaggtcggccaaaatcaacaaggataaggaatgagatggattgtgtcgaaccatctgaccaccgacaaaaatgcagtatatgtggagccgaagggcataacatgcgtcgctgtctaatgcaatntgagt

SEQ ID NO: 183959 - DNA, 379 bp, Glycine max
  unsure (1)..(379): unsure at all n locations
cagctttggntcaaaggtgctgtagaagaggatgattattaaaacactccgtctatagcggggcaaggtcacccgatgatttctagggagcacatggaactctcctaatccagtccatccaacaagtagaggtgagctcacatacatctgtggttatatcgtgatataagcgcatatttgccactagagtgcagcaaatgtcaaggaggcgctagttcatccctccatcttacaacaaatgacctattgacttcaccgcaaggctacatttaacaagtaaagtaatataaacaaaagtatcatatcatgtcatgtgatttgagaatagcgttaaaaattctaacttgttccatagcatgaacaatgcngaaacattcct

SEQ ID NO: 183960 - DNA, 468 bp, Glycine max
  unsure (1)..(468): unsure at all n locations
ctacacctctctggagaacagagcctgaaaggctcttcttctttgaaaataagtaacatgagaagagaagcaattcatgcaagaattgtctaaaaattacattacaagtagtaactgggatacctcttcaaaaacctctttccaagaatcaataaggttgctaacgcttctacgacgattactaaactcaatggctaattggttagcatcacgtatttcaggctcttccttccctttctcacccttctttagtgcatcagtttccacatcgctgctataggccgtgttggaaccacatgaggaacgagcaaccggntctctctccttcgtacttgtggaatcaacgtgctcacaaattggtatgttcgcctcatgatcagtaacctttgatgaagtattaacttggctcatcctctcacaatctataaaatggcactgtgacttcaagctaatgttaccttgtgagct

SEQ ID NO: 183961 - DNA, 322 bp, Glycine max
  unsure (1)..(322): unsure at all n locations
gtacatattaatattgntgagatagacgatgagatttactgtgatttctgcctgctactctcgatataggcctggctaaactataagtattatcaaactattaatggtaagaagtagatcgcggatataaccactctttttttcatatcaaaccgttctctctcagagtcatactcaagggagtgctgactccattcggaatatagatataataatcaacttcttgcaattcctctctcttgccatatttcgtcctgactgtagagagatagctgttgttgcaactgttaaataaccaagtggttaacttgttcataatttt

SEQ ID NO: 183962 - DNA, 389 bp, Glycine max
ggtagaagtctctacagaggccattgcctccctcgcccactattatgatcagccgttgaggtgcttcacctttggggacttccagctatcacccatggtggaagaatttgaagagatcctaggatgccctctaggggggaggaaaccatacctctccacagggttctatccctcattagctagaatcttcaagatagtccaaatctcatcgcaggaattataccacaggaagcaagtcgaaaatggggtggtcggaataccgaaaaaatattcggaggtaaaagcacgaatcttggcagataaaggcgagcgggtcccgtccatagataatcttgcactattgattatcggaggagtcctctttccgaacgtggatgggttggtggacc

SEQ ID NO: 183963 - DNA, 495 bp, Glycine max
aaactaagcttactgaaatgcacactacaatgcgaaaggtgtttgatatctcttatgaaaccttaacccactcttgtagaaacccaccacaagatcctttgagaaacctacttatagacacaaaataatgctaaaaacaagaataaaaggattgatatcacctaatgtgatgagtaaaacaaagtataacacacttagtctcttctcataaactaatcttcaaatatttcttgagagatccactaaaattgtgttgaagtaaaatcaactaatcttcgcttagaaatcaaatttcatagctctagattctctcatgaaacaatagaaaccaatattgacaagagtcattattctgatccttcaattcatgttcgttacaataattgataatttcatttggaatactcaattatttgatcttagaatcacctaggctccacaataagatcaagataatcaaatattattatggataatcacataagtgtgtgacta

SEQ ID NO: 183964 - DNA, 383 bp, Glycine max
  unsure (1)..(383): unsure at all n locations
agcttccatgccacaaatatgtatccaactatctttgtctntttaggacagcacgcatcctgcgcttgttcaaatccttatcttgcctagatgcattgttgtgaacaagctgtgaagcacacaagtgagtgagtctagtccgcgaacaactcatgcgaatcgattagtcacaacaaaagaaataatctcccagatatgatatagacagtcctactaaaataaaatggaaatgataaaattgtagaagatataggtctaaacatgcccatctaacaaaatgtacatcctagagatattggaatgaaaccataaagaaagcctaatctaagagtcctcctgaggctgttgggtatcattagtctatttgcgataatgaaaacata

SEQ ID NO: 183965 - DNA, 195 bp, Glycine max
  unsure (1)..(195): unsure at all n locations
tcagctnaccaccatatgaagccatggataagagcttgaaggtaggatatgatgagtgcggggtcaatgagcccgacagtttatgctctcaatgaggtatgaactctgtagtgtaatgctcatatcatcaaagttgagtgaatgcacacataaggactttatttatagtctaagtgtcgcacgacattggatgga

SEQ ID NO: 183966 - DNA, 493 bp, Glycine max
  unsure (1)..(493): unsure at all n locations
gacctctaagcgactgcagcatgcaactcntgagagaggatagactctccatttgcgcctcctccaagtactattgcgaccgcttcaccacgctcttgtggcgcccataccgttgcatcaacattcatcatgataagtgtgacacattttttttctcataatcgcgctactcactcggtaatcccacagataggaattgttcgcgctcagagaaaccaagcccaaaaccttaacaactttccgcatgatgaacaataagaatagattgggctgtggacaaggggcctcagatatctctaagaagggggggttgaattaagatatcaaagactattccccaattaaaaatttaactctcttcttgaataatcaattacccttaatatgaattactcataagataattcaaagtaaacttgcttaaagaacaagataaatgaccataaataaaagaagtttaatggaacagagaatgcatactcagtctttatac

SEQ ID NO: 183967 - DNA, 446 bp, Glycine max
  unsure (1)..(446): unsure at all n locations
aactcagcttggcaatgcgaccgcctgatgaagggatgacggttatatttcctacacctctcgatgtagctctggggtgagtttggaaacgaatcaactcatgagggcaaaagaagagagacccacaatcttattggctagtcgctcgaactctgttagatacttgttgacgctaccatgttgctggacatggtcagccatgtggtgaggaaactgtttctggacattcactggtactagcacaatgggtgtccttccatatagaacgacgccatcgcgagccttgcgtgatctgggagatcttggtaatcgaagaattgggtaaccttaaagatccaacccatggggtctgtgtcgtcaaatcgtatgacctccaatntaacgggaggtcgataatgacgcggtggcacaggtgttgtacgcgatntgggagacatggaagtggt

SEQ ID NO: 183968 - DNA, 472 bp, Glycine max
  unsure (1)..(472): unsure at all n locations
ntagaaggatggaattctatagtttctcaggcttntttttttggaaggcaaagatataatatattatagaataacaagtaccagaggtactacatattacataacagggggtcctgacaattcaggagatacaacaccctacacaaatgaaaaccctactaacaaaaactttaactaaaagctgtagacatatttgaagaccagctataaaaaggaatctggaagttcctttcccaacccctcaaccaggtccatgaaaggaacagagtgctatctgtcagcctagtgatatcaaaagtttgattctgaaaaatgatatcatttctgagcctccaaatatatattatctgttgactcttgtgtaaatttttgcatanagcactagattggtaatactttatacttctttntagggtacatgcaataatttatacttatatttctgaggtgttccatgtttaaactgccactc

SEQ ID NO: 183969 - DNA, 313 bp, Glycine max
  unsure (1)..(313): unsure at all n locations
actcggatgtctgattgagtgccgtaatatatcgagacgctcgacatngaatagtgaacctatgagtcaattccaacgacaataacattttactcggatgtctggtngagtcccgtaatatattgagacgctctaaattgaaaggttaacctatgagccaattcaaaggacaataacgttttactcggttgtctgattgagtcccataatatatcgagacgctcgaaattgagtgttgaacctctgagccaattccaacgacaataacttnttactcggatgctcgattgagtcgcataatatatcgagacac

SEQ ID NO: 183970 - DNA, 429 bp, Glycine max
  unsure (1)..(429): unsure at all n locations
taaacattcaactntgagcgtctcgatatattacgggactctatcagacatccgagtaaaaagttattgccgtttgaattggctcacaggttcaaaattcaatttcgagcgtctcgttatattaccggactcaatcaatcatccgagtaaaaagttattgttgtttgaattggctcatacgttcaacattgaatttcgagcgtctcgatatattacgggactcaatcatacatccgagtaaaaagttattgtcgtttgaattggctcacagcttcaacattcaatttcgagcgtctcgatatattacgagactcaatcaatcatccgagtaaaaagttattgctgtttgaattggctcatacgttcatcattgaatttcgagcgtctcgatatattacgggactcaatcagacatacgagtaaaaagtt

SEQ ID NO: 183971 - DNA, 226 bp, Glycine max
ccttacgcgcgccacgcacatttatttaactcgcccttatgcgacgataaatggcaacgctcatgttggatgtttctagctctatgacgacatcaaagacgttaagttgtcagaacttggaaagtccccgaacgattcaagttggccctccctaatgatcgaaatcgcaataaattcctgaaatataaacgtatgaagacaggcacttgatccattatttatttat

SEQ ID NO: 183972 - DNA, 484 bp, Glycine max
  unsure (1)..(484): unsure at all n locations
tatanaaactcaagcttgatgaatggtcttcaccgacgataggatcgatgtgggtctganaacaggcaaatctactcatcctgcttggacgaatgagacaactgtggccaatgaagagggtgaggatgaaagagaagcctatgctgtgactgccattcctatacagccgagtttcccaccaacccaacaatgtcattactcagccaataacaaaccttctccttacccaccgcccagttatccacaaaggccatccctaaatcaaccacaaagtctgtttaccgcactctcaatgacgaacatcacctttatcacaatccaaaaacaccaaccacgaaatgaattntgcagcgagaaagcctgtagaattcaccccacttccagtgtcttatgctgacttgctcccatgtctacttgataattcaatggtggccataaccaccaccaatgttcatcaacctccatatcttcgagaatacgactc

SEQ ID NO: 183973 - DNA, 416 bp, Glycine max
agcttagaatcacagttacctcgtataaatctctgaaggtcagattggaggcttcgttctctaacaaaacctcgagataagcttggaagattccgctccaattaaagggttcctctcgatgtgggatttcaacagagaattacggcggtttgtggcggccaccgatggttttgggttgtggagaacaagcttgggatgttgggaagggtcttggggaaaagaaagggaaagaaatggttgcttttccactaccacacgaaaacaaagctcgcaacactcaagtgtttttgctctcgggaaaaggaacatctctcacactccagaagtcatatcgcatatcacaatggtcagaatgtggacagttgtcctatgaacttcctgaacaaatttcgagatgatctcacggttaacaaatg

SEQ ID NO: 183974 - DNA, 434 bp, Glycine max
  unsure (1)..(434): unsure at all n locations
acatcaccaaggttctattttagctctctctctctctcctctctctcttctatttttcgtttttagttttagtctctcttctcattctcttttattttcgttttttttacaattccagttctaacttttagttntatcaataaaatttcgttctctatttgattaatggaaggctaagtccgcagcgttgttttctcttgaggatcaagcacagttctctttgaggttctattattactgataaatactgttcagtttttcctcttcactaattactctgaatttgttgctattaattcatgcatgcttagtacttgattaattgtctctgcgcttaatctacgttcatgcttaatgatccgttatgagtaattggtgtgtgtgatgcttaatcacaaaatgaatgccttatgttgaagttcacttagtaattt

SEQ ID NO: 183975 - DNA, 281 bp, Glycine max
agcttatacataattaatattgtttataatttacatatatatcacacactttgcacacaaactttgaaaaaaaaaaaattcaacttgcctgagcgagcattgtctgattaaaaataaaaaggggggaggggtggttttcctttctctctccacccactctttttacaactatatataagattctacttccctacactcttcatttcttttcaatcataaagcttctctccctcccttcccatactctctgttgctatacccccccacacccccggctttcc

SEQ ID NO: 183976 - DNA, 303 bp, Glycine max
ttcaagatgttgatcaacacaaaaaacgtttgagtgaagtgattaggtttcaaatcctgatctttctcttgtaaggcccaatggaagaatcaaatttagggaattgcatgtacatagtcgtttgaccttgattctctatcagtggaagttttaaggagccttacaacacttgaatgtacgtcttcttaaggatcgaactacgataaattttgtgtgcgagtctctctttctttaaccctcaatcttgatttcaatattggtaagggaattgatcttgaagggccataaaactttatttttcat

SEQ ID NO: 183977 - DNA, 279 bp, Glycine max
tgccacccagctcgcccaggcgagcagggttgcttcctccataagcaacagccttctggaggaatcttctatagggcccaagtgggcctggttgctatttgcacctccatttttactaagtacacccacctaccttttttttggtgattctttttcgtaaagttacggaaacttacgacattcgtaacgatacttgttttctttccgtaatgttacggaaccttgcgaattacataatcatcccctttttgacttacggaatgtacagaacctcactaa

SEQ ID NO: 183978 - DNA, 433 bp, Glycine max
  unsure (1)..(433): unsure at all n locations
agctntngagtcaccatgatattagtgcataatatttatcaaatttgttagtgactaatttctgacaaaaacctaattgactatctttagtgggattntctatcttaatcatgttttttcatctagaatgttcaaatttgagactttacttaagaaatttgagctcagttctatttgaacacatgacattttggtattcattgtcaatatttttttgtaactatgttattagtatggaatatccatcgattntactgatgactaattttcgttgggagatcttggctaaccacatttagtggagctctccccttccaatcatattttttcaatcacaaaatttgaactcgagactttactaaaagaaactgaatctagtattactcataccaacaactttgtggtattcatctnntcaattgataataaaagt

SEQ ID NO: 183979 - DNA, 461 bp, Glycine max
  unsure (1)..(461): unsure at all n locations
tctactttacaatagaaccaagtattatatatcattttgatcatataattagntaatgggagacctctaacatttattcgtagtaagaactaaacatttaaaatgtaaaagttacaagactagacattgttatgatggtttgattacggtctaataacgagtagttctataagttcaacaactattactattggacataaggacatggttccccaatgactagaaaatgagtggtcaaatagctaggtttacaatagactctagctagtaggatcatattaaaattagtatttaagtgtaacctctaaagctaattcctaaagtgagaggtagtctacctatatacacggttttggccattattactactcaacgcagaatctctaatataccctcctcatgtgtgcctctgaagttataaaaatggatgtctagctaccgttgatttataacaagctcct

SEQ ID NO: 183980 - DNA, 406 bp, Glycine max
agcttctacattcaatatcaagctgtgcgatatatttctggactcaatccgacattcggataaagagttattgtagtttgaatttgctcagggcttcagtattccatatcgagcgtctcgattattacgggactcaatcggacatcagagtaaaaagttattgttgtttgaatttgctcagagcttcggtattccatttcgagcatttcgatatattacgggactcaatcagacatccgagtaaaaagttattgtagtttcaatttgctcagggcttcggtattccatttcgagcgtctcgatgtattacgggactcaatcagacatccgagtagaaaagtattgtcgtttgaatttgctcagagcttctacattcaatttcgagcttttcgatatattacgggac

SEQ ID NO: 183981 - DNA, 478 bp, Glycine max
  unsure (1)..(478): unsure at all n locations
ntgagaaaattcanacgacaataactntttactcggatgttttattgagtcccgaaatatatcgagacgctcgaaatngaataccgaagcgctaagcaaattcaaacgacaaaaactttttactcggatgtctgattgagtcccgtaatatatcgaaaagctcgaatgtgaatgtagaagctctgagcaaattcaaacaacaataactttttactcggatgtctgattgagtcccgtaatatatcgagatgctcgaaatggaataccgaagctcggagcaaattcaaacaactaataacttttactcggatgtccgattgagtcccgtaatatatcggaacgctcgaaattgaatgtagaagctctgagcaaattcaaacgacaataactntttactcggatgtctgattgagtcccgtaatatatcganaagctcgaaattgaatgttgaagctctgagcaaattcanacgacaata

SEQ ID NO: 183982 - DNA, 421 bp, Glycine max
  unsure (1)..(421): unsure at all n locations
taaacactatatcattccatntttcataaaataaattacaaataattgtaattaacaataaatagttatatgaaaataatgaggttctgtaattaaataaatagaaagaaatagtcttattaattaaaataataattctaaagtaaataaaataaatatatgttcttgtaaaataaaaaaaatattttatctattcatttgataaggagtaaaatatagaaatgttttataaaataatagaatacaaaatagagtaaataataagttcagagtaccccaactataaatagagacatactaggtcagttgtacatttacgatatgtnnttacgctctataatactcccaattcctcttctcttttcccttgtctgaaactttctctgttttatatacactcacacctgttccataaaactat

SEQ ID NO: 183983 - DNA, 460 bp, Glycine max
  unsure (1)..(460): unsure at all n locations
tgaatgcttcccacatggaattggttcattcccacaacctttatgtctatattatgagaggtatgatgaaagggacaatgatactagaccctgttatttcaaactagaagattagtttattacctaacgaatgtattagcttgaaattaaagaggaagaataaggaaaaggatatgaaatagagaggatattacttactattacaaagatgacctgaaagatggcacaagttntgtatcttccccaataagaatcacttaggaaagcacccactagagagaagatgtaactgtgccagtccatttgctcacactgtttgcagctgcagcattattttgccccatcactcttgtcangaacagcactatgttaacctctactccaaagaatgctaaagttgccagacctctggtcactgtttgatgcaatcaagaaaataagcagtgtcagcattgtgcta

SEQ ID NO: 183984 - DNA, 469 bp, Glycine max
  unsure (1)..(469): unsure at all n locations
agcttctccgaagagcatagttatttccagtttctttanaatatctaaaaatattgccagaagacgatctttttccttcttggaaggtaccacaggatatggtacttccacaccttcatccataactntttcacttttactcttctttgcattcttattattnttttcttctttttcatttttttcattgtctattcctttttctacttctttttctttttcatggtccttcaattctttattcttgaccattatttgctcctctttttcttgattactttcacctctcacctcatttttcttgccatgagtacctttattgtcagcaattttcttcttatgcacaacactatcctcatcctcagcctccacaaacctttcactccttgtcatcacagctttgcattcctcctcgggattcttttctgtattcaccacaaaactgttggatgacttgtcagctatctac

SEQ ID NO: 183985 - DNA, 452 bp, Glycine max
  unsure (1)..(452): unsure at all n locations
ntggagtttccaagtggccaattcgcctcttctttagtccagtcttcttctggcttcaattcatcagtgggctttccttctgtgtccagcatcttgggatgttcccagcctttgatgacagctntccaggttctgctatccagtgatttgaggaaggccaccattcttgctttccagtattcatagttgcttccatcaagaattggtggtctgttcactggtcctccttctttctccatgttcatcagaatttatctccccagatctcactctgtgatttcgagtgttggctctgataccaattgaaattctgataccaggggacagatgtcgtacaggatgtcacgacatcacgcttcagaacatgccagatgtatgtgtccgtatgaacagattaaacaagtaaataacacaagagaattgttaacccagttcggtgcacctcacctaca

SEQ ID NO: 183986 - DNA, 344 bp, Glycine max
tgatgaaagtctgtctgaggagaaaaggaaactacatctcttggatctataagaaatgaggcttattgcatatgaatcttccaagttatgcaagccgaaggtgaaggcctaccatgacaagacgttgctgcagaagaattccaaccaggcaacaagtcttgctattaattcaaaactcaagctatttccaggtaaactgaagtccaatgagctggacctttcaccatcaaagaggtgaacccctatggagcagtggaattgatggattctcaatcacataatccatatagaagctgggtagtgaatggccatacactgaaactgtatcatgtgtgcaacatttg

SEQ ID NO: 183987 - DNA, 145 bp, Glycine max
cctttgatggcacctcggcgggatagtgatggagggaaatcgacattcccattcagataggcccacacacttgcaatgtggtgtttcaagtaatggatataaatcccgcctatagctgctgatgcaaaacaacccctacaaggca

SEQ ID NO: 183988 - DNA, 414 bp, Glycine max
  unsure (1)..(414): unsure at all n locations
agctngagctcgttgctgctgcccgatatatcctctcggaacttggtcctgcttcattcttccttttgggccctctntgtttccccctctaatgcttcaaccgtagtcatgttgacatctcttagctcgtcacactctttcctgaccctaatgactgttgtctttagcttttccttgaccactcttgttctttcaagctctactttcaaggcttgcacttctttgctttcctcagggacttcaacttctttcccacttggaccttttagctttgggagccaagttatcccttgcgtccttgccttcaaccacttatgatagtcgtcgatgacaccattgctgcttcccctaagctccttatctttcctttctactatgtcccatgctttacggattctctaaagtattttcgca

SEQ ID NO: 183989 - DNA, 464 bp, Glycine max
  unsure (1)..(464): unsure at all n locations
tattacaatgggtttgcaaaattatcaactgccttattttacagaaattctcaaaatcttgcttcattgttccctacttgtcaccaccaccaccaatgatatttatgaaaaataatgaaatcccttccatcgaaaattctcaaaatcctcctccgtttttttcctacttgccaccaccaccaccaatgatttttatacaaaataatcaaatccctcccactgaaaattctcaaatgtagaagcaagcttcatgatgatgaatcaggtggttttgatgatgacaaaaatcccaaaagaatgatttcaagattaagtcaacacgttcaagatcaagattaatttcaagattcattagaagaaatcaagaagaatcaagattcatgagaagatgaattcaagattcaagagaagaaatcaagaagcaacaagtcaagacttcacaagggaagtatcanaaagaattt

SEQ ID NO: 183990 - DNA, 360 bp, Glycine max
  unsure (1)..(360): unsure at all n locations
tatgagtaagtatatgctaacaaataccacatgcgctaatagctgtgataatacttttgtcaaaaaaaaaaaaacaagctgtgataatactaacagatgtttacttctttttctgattaattaacggatgtgcactttaatgctttagaatagacctagctgcaaatatgatttgcatatgatacggaacacattattttcataaattggaataatcttggactcacaagtgacacgggatggtattgaaatctggctataaagccaaagtctactnaccctgaaggggagacttgcattataccaagtccttatataaaataagatatttattggaggaactaccactttcttgaaaaa

SEQ ID NO: 183991 - DNA, 331 bp, Glycine max
  unsure (1)..(331): unsure at all n locations
agctnaggagcattagaagcgctatcatgtatagatgacgccgcaaagcattgcatgccctcacatgatccgatacaagctcaacattaactggtctccttgtcatgagtacgataaaggtctgaaattaattggatcccctaacatgagtagataagggtctgaaatacatcgtattccctaatgcgagcagataaggatctaaaatatattggattccttgacgtaagtggataaaggtctaaaatacattggattccctaacatgagcaaataagggttcgaaatacattgtatttataagtgagagaaaaagaagagcgctagaaac

SEQ ID NO: 183992 - DNA, 405 bp, Glycine max
  unsure (1)..(405): unsure at all n locations
gctnggtcattgtaacttcatgagccataaagtgttactagatattacaagttgaccttcttaactccattggattaaattgcatgacctgatgtttcttatccaaaaacttggctcttggcatgaaaaattggtagttggtatattacttgctacttaccaaatgtttttgaccatctgtgcatgtgcttctttgcttggtcagaggggggctctaattggctctgttgcatggcacaatttatagagtggacaacgctttttggtatattgcgtattggtaatactaaagattgaacttgtaacatcctgtgagatactctctcaccaacatggatttttatgttaagcacctgtaaattctcttgtatgaataattgcttatctgggatactatgaatctac

SEQ ID NO: 183993 - DNA, 415 bp, Glycine max
  unsure (1)..(415): unsure at all n locations
agcttataagaacanaatagccttaatcatttccaaatatgcatgtgaattaagacgcatcaacaagaatcaagccaaggctattgtgcaagcaatcaatggggcaaaacacaccaaatgattataatgatggatggctcaaattctcacaaaggtaaaatcatcactttcaaattgagctttcaaaactatcatgacatgtagagaagaatcaaggatttcaagtcacaaaatgtcaagaacttttattttcaaaacaattacccatttcttgaacatatcctataattcaaagaaaaacatgcaaagtcgtacgtgcacacaaaattgacccaaaatattaaactaaaaatccgacgaaactaacaacattaacaaattaacacaactaacaaattaacanaaccaacaaaac

SEQ ID NO: 183994 - DNA, 449 bp, Glycine max
  unsure (1)..(449): unsure at all n locations
aagcntttgttgacaagctgctattagttttcggggagatatgttatttgggtgatgtcttaaaaaagattaagaatttatcaganaaactggaatggttgttatactgactaaattttatttatattttgttaattttataaacaatgttttgtagtttgaataccaattttattatcaattttaaattttttcttgcttcaacattgtaattccttttatatctgtcatgcaaattttttttttctaaatcactagtcagacgacccgtgcgtatgcacgggttgtagactagttacttataatattcattatttcttaaggttttgtgcgctacacaggtactataactagtagagtttttttttccaatcaaatatatttcaattcctaatttggatacaactactcattctaccaaatctcatttatgcatgacctaccatctc

SEQ ID NO: 183995 - DNA, 283 bp, Glycine max
tctaaaagaatcctatattcgttggataatcgatcattacaatttctcaacgagtatatactgctggagttttacaccagtcttgcatcagatatgtatacgacacgctattaagagagagctgtctgcagcatagaaatctctcaattctcattattggtaatgaagagatacaatggtatatacatggtgtttgtatccaccttaacagaatcagtaactaactttattctaactaattgccaactaatctaaccaacctctaactgagaaagctaacttt

SEQ ID NO: 183996 - DNA, 392 bp, Glycine max
gagaggggggagctcaatattgatggaagaataagggagagaagttgaactttgagttgtgtctcacaagactctcattcatcaaaattacaacaagtgttacacatgtttctatttatagactaggtagctcccttgagaagatttcttgagaaaacttccttgagaagcttctttgagaaaacttccttgagaagctagagcttagctacacacacccctctaataactaagctcacctccttgagaagcttcttaagaagattctcaagaactagagcttacacacataccttttaatagctaactcacttcttgagagagagctaaacttactaccacccctatatagctagctaccccctgacaaaacataaatacaaaaaaaagtc

SEQ ID NO: 183997 - DNA, 490 bp, Glycine max
tgtcaggatcaactgcagggtttccctacaaataatcaagtctttttaatcaactaaatttacactctataggccgaaaatgaactgtgaagaaccatcctcttacccaagggacaaaacatcagtgaaaagtattcaacatttacactggaattgtccaactaatttgactaacagttatattgatgcagaagaattccatgaactttatagaaaagtggatatatgacaagtgccttgtataaattgaaacttaaaatgagagagtaccttgatgacagattcattccttcgtttcctgcctcttgaaactgcatttcatttttccccataacatctcagataaatactcacaacatagactgaagtaaaagttggtttttacatattcgcatttggtaataaaccataaagtccttttaatttacaacatatgttacgagaataactatattaaaacaagaaatgcattgagtattcgactgtatat

SEQ ID NO: 183998 - DNA, 378 bp, Glycine max
  unsure (1)..(378): unsure at all n locations
tccttggattatagaggtgaaccaagctcatgcttttacaaaaaggttcatcaagtcaagttgaaatatggaagtaaccgtcttgcacaattggggcaaaagatgaatcgagtcacatcactgcttcgtctactgccaaacatatttaagattattgatgtccttggtacttccagtttcaccttgacaaagatgtcatggatcatgttgaaaatctaaattgattcaaccccatatcctgcgtaaaaattcgcaatacttcaactgtacgtcattcgcatacatccatgcctttcattggttgcgtgctcattgcattctttcttgaaaataaanaaaataaaataaattgaactatcnaaagaaaaaacatgttta

SEQ ID NO: 183999 - DNA, 370 bp, Glycine max
ctataccgtacattgtattatccttaaactagacgagctcctccatctactcgctatcccagaatcgaacacccgctccccatcatatatctgctgacgatccacatattgagtcccctcttcactcttaccggatgaatctgacaggaacacgcttcgatggctctgatcctttgtgccatatgtttaagatcacctcatgtttagagtaccactagaccctagaacttgaacgtctcgactatagcttgcttatacatgaaaggacgagccctcgctgggttgcagtggatgaccagcaatgaccgactcactctttggatgtctacttgcaccttgcaacctatactgcccttctagtatgaacacc

SEQ ID NO: 184000 - DNA, 457 bp, Glycine max
  unsure (1)..(457): unsure at all n locations
tgcagcatgcaagctgcattggaggcataaggacatttttgattttattgggtacgatacaatcacctgaattggtaaagaaaaatcataaactcatacatcctaggcgggctaggcaagtcagttcccaatattatcttatcttgaatttatctttttcttttatatctaaatcatttatctttcttatctttcacttttctaatcttctatctttttctttatcttttaattttatctttaattcttttatcttttcctctatcttctaagtttatctttaaatcctttatcttttctttaccttatgaagcaatcctacccctaagggcattggatagaagactccaagaagactgggccaaagatgcaagagaaggccctanggttctcatgagccttatggtagatttctgagctcatgagccaaggttaggtccaattatctatgtgcata

SEQ ID NO: 184001 - DNA, 468 bp, Glycine max
  unsure (1)..(468): unsure at all n locations
tgttcttgantttttctaagntctttaacaagctgtgaacattattctctcttcatttaattgactctgggcttggcggccacgctcaacaaagtactttcgacacctactatacgttgatttgaccaatgttgttatgggaatgttgcgacaatccttcaaaaccttattgatacattctaagagggtggttgtcatgtggccatatcgacgtccttctctatcataagccatcgtccatttttcctttgaaatgcgatcaatccatgttgctatggctggactcaattcatgaaatatttctacattttgataaaaattgtgcttgtaaagagtgtatgctgcataaanatagttatgaataacaatcttaagtatatatcacaagttaatagacgcgatcatcatatatgatatcttacccaatgtcttcaacatttctttctgttggcattattgaatttctga

SEQ ID NO: 184002 - DNA, 288 bp, Glycine max
atcgattaattgctatataatggcccttttccgcataggaaaaacatctaaacatgtctacggttctttcataagcgtcttgaatagtattctggatccataacggggagttcggcttgactcttttctattgataatttcattggaaataaaaaatggcgatgaaaatgcgtctggtcggattcttgaaaacatcttcagtgaaaatgatttctcaagcgaaccaacaactgaaaataataaaatctcattctcagtggtttctagtgaaacaaagaaccttatttt

SEQ ID NO: 184003 - DNA, 457 bp, Glycine max
  unsure (1)..(457): unsure at all n locations
tctttctttgtggtagacagaacatctaatgttctttatctctcctcggcnacaacaactaactcatctgacatcattatccataatggccgataggaatgtccatttgttttagtactctggctgattgctaatgtatttctaccggaagaacaccatcgtgcccataattcagtcgaaatggggtagccttaatcgatttcttatgagaatttctacatgcccatagaacttgatctaacgtcttattccaatttattggcttctgggcaatgtgttttttaatcaagttaattacgatcttattggctgcttcgacctgaccatttgcttgcgcgtaatatggtgctgaagtaataatcaaaagccagttttttggcatatacttcattttttgtcatataaactgaacctgatactggaattgctctcgatacctacctataatgattaattt

SEQ ID NO: 184004 - DNA, 413 bp, Glycine max
tgagagaccatacaagtttcctaacgatttctaattatgtgggccattaagtctatcatatgctgacaatagccgagaagaccatacatctctatcgtggtggagtaagcgtctgccattgccttgcgcttggctaacaagcggagaagatcttgattcccgttcaaagtaagaacaaaccggtccatccacatggttgcctattggtgtaaagagtcgatcacccttcctctagccttctttttcgcatatacttgagcatactcatccgcgattctatgcttgtgggccatggctatacctaactcttcttggtacttggcgatgatagctagcatgttggttctcgtctcgcataaatgctgagacaagcttcttttggaccttgaacagcaataactcctctttcgaac

SEQ ID NO: 184005 - DNA, 275 bp, Glycine max
cggatcatcaaaaccaaagaactcagcgacaatctccttggacagaagcttctctcgacagaaaagacaatacaatctctatgcgcctacgcctttcgcgaaagacttgggtttgaggccatatgaatagcatcctgatcatcacaaggcacctccatttgcaactcttcacagaacctcaattcttgcaaaaatcgcttaatccacgagttcacaagtaaccatagccatagatcgatattcagcttctgcactggaccgagcgacaacaattt

SEQ ID NO: 184006 - DNA, 388 bp, Glycine max
  unsure (1)..(388): unsure at all n locations
ctcagcttatctacgtgaacacagagagaagaatgccctgtatgctgtttataaaccttctcttcatcctttgcctttttctttcacagaaattactcatttcctcttgattaagtcctccatgtcaatggacggctangacattggggagttattctactgagtactcttgatatcaatttctaagtatcgatctaatgttactttccggtattatctgcttctatctgcattttcttttacatgctggtggcttgatcatccatctgcatgtctagttaagcttttgagtgtcgcaaaatgcttgaaaaccttagaactagatagagcaactacaggtttgtgtgtctacgaatagaatgcacgaatctagtatatcttgtactgt

SEQ ID NO: 184007 - DNA, 365 bp, Glycine max
  unsure (1)..(365): unsure at all n locations
agctngnaagactgatcagtctgatctccttantattngagnaccaaggaatagctttgaggctcgcaatcaaagcttacctctgagggtgactccattctttaaattcacgggtatagctataaccaacttattatcaagctcacacagtgtgagagcgagatatgttcatgccaaactaggaacaggttggtatgtgggaacaaacaagagcaaaagagggcccttggcttcttcctttgcgatatgacagagagagagagagagaaagggtggttctgtcgtttctgaaacacacagaggatcgagggaggatcgtcttctatttataggtgagttcagtgggaataaagcctgtttaagag

SEQ ID NO: 184008 - DNA, 442 bp, Glycine max
  unsure (1)..(442): unsure at all n locations
tacaatggttgtatactagcacagaaatgggccatcatattttttttgctcatcgantncattncgatttctttgcgtgtgtttatatcctccattacaatgaattgttctactaaagattctttttatttttttcatttgcaagcaagaatacatatgccttttataattagctcgatatatatgttttgtgaccaaaacataggctaccatgcaagggttgcaaggtccccacccttggagattgctacttttattgaagggacaatgtattttatacagaagacatggagatgtattggagccattcaaatatgccggctatcccatgttgctgagtgctgctactgtggacaaggatgacaacaattttctttcttcagatagagcacttctccttgttgctgcatcacagcttgtctggctgacgtaaaagattcaa

SEQ ID NO: 184009 - DNA, 448 bp, Glycine max
  unsure (1)..(448): unsure at all n locations
agctngtaggttgaagaggtgagatctaattatggttatggtgaatggtgtttgagagatttataacttaatacaattatagagagtaagcttgaatatgagagctctacaacttatgataattacaaagagtaagaagtgccctaagtgcaattctaacctgagagaaattgcggtaagcgtgaaaagttgtgcttaatgccaaaagtggactccatcttaacgagacacgctcgtcaagcgagatctgcagattataaatatgtttttcagcctgaaaaatacaatttcacgcctctctctctcaaaactctgtccaaccaccctagaaactcctcctccaccacccacgaccaccggtggccaccacgagctgccattgtttgccgctaaaccaccacactgagagggaacatttaatcggagcggaatcctataatccacctaa

SEQ ID NO: 184010 - DNA, 472 bp, Glycine max
  unsure (1)..(472): unsure at all n locations
tcgtccgtaagtccctcttgtaagactaggcttaacttatacagcattatcatcacaacatattcagaaaaccaaaaccccacaatccatccctggtaatgtggttattcagtcctgcttctatcaagttctaaggcaatagtacatttcccaatgctaaagtcacctaactgtacacacaaatggatgatcagaccaagagcatgcaaaaattaagcattgaaagaaacattgaacacataaaacacaattaattagatattaaaataattacatcagttgttccttagaaatccccaacaaaggtgtttagccagccattacagaaaaaccctaacacaaataagattgagagtacaaaataattgttccttacataggaagagggatccctcctcctcttctcaacatctcacaatcactctacaatgcactaatctatctccaattgaaggaccctangcttctctgc

SEQ ID NO: 184011 - DNA, 455 bp, Glycine max
agcttcaatggaggaagagaatgataaagatagatagagagagagagagagagaaagtggcttgtaaaattgaagaaagaaaggtagagaatttgaactttgaagtgtgtcttacaagattctcattcatcaaagttgtgacaagtgttacacatgtttctatttatagcctagccaatgactaaatgaaattttattttcgtttaatgtgaacctaagacgaatattccaaggatatgtgaaaggcatcttagcatattccaagaatatgccaaaggcatcttaacatatttcctttagatgccacaagaatggaagatgtgactctaacacatggaaaaggaatatgccaaaggcatcttatcatattcctttagaagctagaggggggactacacacacccctccaatagctaagctcaccctatgccaaaatacatgaaaatacaaaaaag

SEQ ID NO: 184012 - DNA, 476 bp, Glycine max
  unsure (1)..(476): unsure at all n locations
tgtgcgaatcaaatcactcctacattttatctctagcatgcattctttctttctttacccactcctcacgtttggttgtttacggaaaaacaccataactaaacgcgccacaaggcatccctatcgcaccagatccaaatctagaacgatgggtgatcaagaggagacacacgaacagatgaaagccgacatgtcggctctgaaagaacagatggcctccatgatggaggccatgttaggaatgaggcagctcatggagaaaaacgcggccaccgcggccgctgtcagttcggctgccgaagcagacccaactctcttggcaattgcgcaccatcctccctcaaacatagtaggacggngaagggacacactgtggcacgatggcaaccctcacctgngatacaaccgagcggcttacccttatggatagctgcccaactactcaccacccgtcttgcaagacgatgcgggccata

SEQ ID NO: 184013 - DNA, 395 bp, Glycine max
  unsure (1)..(395): unsure at all n locations
agctagngaggatagatggagacccggtgttgatagaaacgaggatatgggctacgtgggagtacgtgagctcagatggaggtgggcaacaggggatggtgggtttatgcgtgcattgtggatgtggaaaacttgttgtgcaccatcgcccgaccgccacctagtaccacatgtgatgggtaccccataatcctacaagcttgagatgaggaagtgttgaagggtgaaacttcctgcttttattgttgaccacagagtggtacctggagatatgtcgtgggggtcaagagaccttgtggacgtcaggtggggtgctattgcncaaaaccaagcttgaccaatcccgacccaccctgggcatagtcggtcagtgagaacctgtgatgtacctaaac

SEQ ID NO: 184014 - DNA, 477 bp, Glycine max
  unsure (1)..(477): unsure at all n locations
accttataaactcagcttgtgcctcttacgtctggatatgaatgttcatatatatccaaagacccttaggtgctttgctaatggcttcttcccgttccaagcttcaattggagtcttgtcttttacagacttagttgggcatctgttgagtatgtaaacagcagtgtagactgcttcagcccagaatgtgttaggtagtcccttctccttgagcatcgatctagccatttccataactgtcaattctttctctcggacactccattttgttaaggagaatatgcgactgtaagttgtcgttcaatgccttcatcctcacaaaatctttcaaactcgcgagaggtgtactctntgccgcgatcacttcttagtacttttatccattttccactttgattttcagcaagggccttgaactttttgaatactccacagacttttgatgtttcttctagaaaatatacccatgccatttta

SEQ ID NO: 184015 - DNA, 431 bp, Glycine max
  unsure (1)..(431): unsure at all n locations
agctagctgcaacaacatgtatactattttaaaacanaatttccaagagcagtggatatagtaaaccaagtgaaatgaacagtaccaaagaagaacaccatctttngcaatttcaaagagctcattggttgaagggtcaataggaagatatttcttgaggaactcatcttgtgctagatagtgatttatatgtgctacatatgacgctttctcagattcacttattgtgtgaagcaatgtggttgtagctgccttgaggaatgccaacgagttctttggactacttccggttctagaattcacaaatgtttggagtttcaaatagacctgccatcattatgtcacaattacaagtaatccttggatcaaaatttgacttgaccacaataactggatggtcagtatgcgtctactatntttctactctatac

SEQ ID NO: 184016 - DNA, 443 bp, Glycine max
  unsure (1)..(443): unsure at all n locations
cgaaataaacttgatcgtgaacttgtcgactcaatcttgaaatcattctttgggcttttagtcatcatcttttttataatcaaaactacttgaatcaacttgattcatcatcatgaagcttgcttctacataataccaattataacaaaatgaaatatgtttgaatcaaacaattatcgnttcctaattattcttgatattttctaagattatagttgacatcgagtgcatgacgtaatacccacacttagtgcttcctttttgtctattacactaaatacattatcgaaattagatattcaatgttaagtaaaaattagtgtacagaatattaaaataacactagaaacattgtttacatggcttactttacagacaatcacctagcaacagccttggattactttgtggagattatcaagtctttcaagcactattgatac

SEQ ID NO: 184017 - DNA, 427 bp, Glycine max
tctataactaagaaaaatgcacccatatacaatcaaggcagcttcgttacctacattatttacacgtatctccaaggtgtatttgttacttacatcacacacatctccttggctaaatttacatacatgcatactcaaagcattttggggtaccaaaaattgcacatgtgcacatcttggtatttctaatacctatacatacacaaacttcatgatgaatcttgactatctacacaataaggtgctacattctcatgctcttttcaagtttttgctacctaaagccgcatgcaaattcaagtatattttcctttgctgactaaaatgtattcaaattacagggtatacatttctttgtaatgtattttctttacataacatgccacatatttatgtatatcttttgtgagacatttgactaccaaaa

SEQ ID NO: 184018 - DNA, 443 bp, Glycine max
  unsure (1)..(443): unsure at all n locations
agccctattcanggttccttcttattatcttctactataaagtgttcatagaaaagtntatccaaacatggccttaatttaaagctttgtgtgcacatttttgaagatgacttccgttgcaaattcagctgagcctgttttgagctgctttcttatatttctttgtggtttcatgctgcatctgtttgcataaaattatgttacattctatctggctcttcatctgagatgctttctgtatgtcttctaaaattattattntattctcttgccttctcggtaattgaagctctaacgtgggtattttgatgctctgtagaatttatggaggcaccatcaagtcctatgaccctctgaaagggaagcatgtggtaagctgaatgatgctgatttgcctgtagaatctggacaaagttctcttcctgcttctattactattacta

SEQ ID NO: 184019 - DNA, 474 bp, Glycine max
  unsure (1)..(474): unsure at all n locations
tgttctccatccaaatgacnttgcaaatctttctttatattttgcatctaataattaaacctgtggttcacttttttttttactcctctagttcattaaaaaaaaaagactcaaattaatttggaattcgatctggatacaaataaaaaacctaataatttttttttatttagaatatatcaaacttaaatattattcaaataatttaactttaattttaacatattaatcatttgtgtctaatcacatgttggttacttattcattaattgattatttaaccaattataattttgggaatttgattctttcaattgtttttaattcttcttggttacttttctccacacacatccctcccttttttttatagcatccttaaaattgttaggttcaactaattatctatatttatagtcatcatttctcatatataaattcttaatgtttataattatactttaatttcaatta

SEQ ID NO: 184020 - DNA, 428 bp, Glycine max
  unsure (1)..(428): unsure at all n locations
agctncgnctgtatgtcatttgtcccattttatgcgtgcagtctgaaaccaaaaggataatctggaaacttaaaatatacgcgtatttgactcccaatcatgccatttttcattgccaattcagcatatatataatgcagcttcactgtaacgaacgaataatagttaaaaactaaaagagtataatatattaaatttttaaaagtgttttatattaaatctttttctattttcaatatacagagtgctttaaaaatatttatgtagaaattatgaagtacagaaatataataagcacaggtgaatttttctttatcttaactacaagaatcattgatccattntcaaattnattaatngtaattcttttggcaatgctaactactacgttaagagcacgctttattaaaaacatgtcattaatacac

SEQ ID NO: 184021 - DNA, 492 bp, Glycine max
  unsure (1)..(492): unsure at all n locations
acggacctataaaactcagcttacaaacccaaataccactatcttctggtataaacttgctaaccttaaactacatagtgacaatgggattgggtagtacgaatatgactgtgataattgacactggaagcgacttaacctgngtccaatgtgagccttgcatgtcatgttataatcaacaaggaccaatattcaaaccttctacctcctcttcctatcaatcagtttcatgcaattcatcaacctgccagtctcttcaatttgccacaggaaacacaggagcatgtggaagtaatccatcaactngcaactatgtggttaactatggtgatggatcctacactaatggtgagctaggtgttgaacaacttagttttggaggtgtttcagtgagtgaatttgtatttggttgtggtaggaacaacaaaggtctatttggaggagtctctggtcttatgggcttgggaagaagttacctctcattggtatctc

SEQ ID NO: 184022 - DNA, 471 bp, Glycine max
  unsure (1)..(471): unsure at all n locations
agcttncatatttaatcttcatgttggtcatgttgtttcccctatctctaacaataagtagaaaagtgttttcattttatattttgttcacacccctgcactaagacgaaaacatgattctgcatataaaatatgaaatgaaatcatgattccatttcatattttgtatgcagaaacacattttcgttgtgtatttgtttcagcttacacaaatattcattaaaaacatgattatgcgtacaaaatctaaaatagaatcatgattccttttcagagtttgtatgcaaaatcatatttttgttgtgtatttgtttcaacttgaaaaaacacaataaaattataattttgttatgtatctcaacaatggtgaaagaggaaaagaaagggtgtgatgggttcgaactaaaggataaatgttcttttccatggattttaaaagttggtataagaccgataacaattcttgtagct

SEQ ID NO: 184023 - DNA, 510 bp, Glycine max
  unsure (1)..(510): unsure at all n locations
attacggacctatgaaactcagcttaagaaaagatggcctcagcaaattccttatttccagaatggaattctatcaatagacctccaatctttaatggagagggttaccactactggaaaacccgaatgcaaatttttatcgaggcaatagatctaaatatctgggaagccattgaaatagggccttatatacccaccacagtagaaagagtttcaatagatggtagttcatcaagtgaaagcataaccatagaaaaacctagagatagatggtctgaagaggatagaaaacaagtacaatacaacctaaaagccaaaaacataataacatctgccctaggaatggatgaatatttcagagtttcaaattgcaagagtgctaaggaaatgtgggacactcttcgattaacacatgaaggaactacagatgttaaaagatctatgataaatgcactaactcatgagtatgaattatttagaatgaatacanatgaaaatattcagagtatg

SEQ ID NO: 184024 - DNA, 305 bp, Glycine max
  unsure (1)..(305): unsure at all n locations
aaccatatatgcccaaaccaattccataagcaatatcacaaacttatgcacaaatgccattaaggcatttcaccgagcactcggtgggcgcactctcgggcataaacacaaagggaaagggggcaacggggcttgcccaatcatttcagaacacaacctaaggctaaggccatcccctacaaccgcccaatttaatgaatcaaagcccgaatttgtcctatnatggccaaatatggacaatctagaccataaaaaccatctacggacagcctaaaaccaaaagaaaatgtacctacttgtatgga

SEQ ID NO: 184025 - DNA, 259 bp, Glycine max
  unsure (1)..(259): unsure at all n locations
cggagggggggaaacataaactagctgagcaacgtttttatttatgacagaacttncgacatccatccggtataacttgaaacccacaacacaagcataagcaagtagtaatcttacggtctctagcactgctattggtgcataagtctcaccaaagtctataccctatcattggttatagcccttggctactatccttgccatattcctatgtatcaaaacatgttcagcaatttaatcttgaacacccatttagagc

SEQ ID NO: 184026 - DNA, 380 bp, Glycine max
  unsure (1)..(380): unsure at all n locations
agctngaaaatgaagtcaggaagctaggattgcttctggtaatcnattaccaaggggtgtaatctattaccaggcttataaatgaaggcagcatgttgtggaggcctctggtaatctattaccacgctgtgtaatcgattacacagaggaatatgccactggtaatcgattaccagttatgtgtaattgattacacagtgcatttttgcaggtttcatgtcctgaggctgtgtaattcgagtttagcctctggtaatcgatttccagagatgaaaagcctaaagataccccttttacttgcatctagtggttatgagacgcattgtgttgcggcgtacttagattctcgtgaaagagtctacccctttcttttctttctt

SEQ ID NO: 184027 - DNA, 455 bp, Glycine max
  unsure (1)..(455): unsure at all n locations
tagtctggatgttactccccatatctctaacaatctctccccttttggctttgatggtgccaaacttgaattgccttttgagtgcatttggagattcttgagagtagagactttttttaaaaaaacctgaaagtttataatcactaagagaagtgtcaaatcacatcttcatcattaagtagagttgtatacggatgtatgtatacaatgcattacttcctcctaatgcaatgtttctccccttttttccattataaggccaaaaagtcacaactactgatagagtaaacaaaaaaaaatatgatgtgaatagggaaaaaagatcataacatttaattcataaaaaacattacaactattataagaaagcataactacttaatcaaacatcacanagcaagtgatcaaagacacagaaacaaaattaaacataatcagaaaggagaattagatag

SEQ ID NO: 184028 - DNA, 460 bp, Glycine max
  unsure (1)..(460): unsure at all n locations
agcccgnagagtatatgagacgattatcttttcattgcgcacacggcgactgatgctgattgggaaatctaggatctgcagtggagacaccgcaagtgaaggaagtgatgccaattctaaaaaaagttcgttcaaggacagcgctcacttctctactaaggtgtcaatatgcatccattaataaatatcgtgtagcaaatgtgagttttaaggagtatacaatgacaacaaaagccttatcccactatgtgaggtcggctacaaggatcgctcaatctcataggactgggtttgacagcaaatcttgagggatattattcactatgagatccctcctaacaacttcctctaatagcttaatctctagctgtttacagacgactcacaacagtcgatctactcttcgcataagtgctctcagtaaccattttccgtgtgtgcaaaacaccttaaaatattt

SEQ ID NO: 184029 - DNA, 459 bp, Glycine max
actcagcttgtatcgattcacatatactgtaatcgatacttgagtatgatttcagaaaatattctcaacaatcacatctttttatgtggctcttgaatggctatcaaaggcctatatatatgtgacttgagacacgaatttgcgaagagtttttcagaacataaaggtcttatcctcttataaagcaaaatcagtttattctcttacaaattccttggccaaaacacttgtgattcaataaggaattatttgagtgctcaaattgttcaatctatctctttcaagagagatttcttcttttcttcttcttcattctgaaaagggattaagagaccgagggtctcttgttgtgaaagaattctatacacaaaggaaggattgtccttgtgtatttagaactcgtaaaaggaatttacaagatagtggaactctcaagcgggttgctcggggactggacgt

SEQ ID NO: 184030 - DNA, 374 bp, Glycine max
agcttctgatacgggtggttcagtatatgttaattacagcaccacaaccagcaaactcgggccatttgttgctatttgcaacttgcaagtctgaaaggaccaataggaagacaaaaagttgcaaagactatgtttaattcggaagtccaaaccattttccttatgaatattccagatcagtagttagttaagattttgttctttgaaatattctttttttggaaggcagttctttgaaatatatattaataaaagagagggatgaggccaggtgtctttaaatatccgacacagagtttttttattctttctaagtgagcgtaaaacataatatggaataagttactaggtttctaatcacacatttacatcca

SEQ ID NO: 184031 - DNA, 465 bp, Glycine max
  unsure (1)..(465): unsure at all n locations
ctcagcttccaatcttntggttntaagaagatcggaacttgctntgttatttcttaagctgatgggtattccagctctttctttctagcaatattccccaacttcaccaagatccctgagttgtcttcaatatattggtttgaagcttccaaaagatggttttaagaaagtcggaacttgtttttcttaggccgatgaatatctcagctctctttttctagcaatattccccgacttcaccaacattcctgagttgtcattcaaactattgtcttttctagtggagctcaagttttatctttttgttgggaataagatttcttgtaacaagctacagcttattaagcttcagcttgaggaggagtgttgagnaatcagaatatttaatgatagaattattacgatttgagttatcggacacatgtctgattagaggaaactgaatatcctctcatatcagattta

SEQ ID NO: 184032 - DNA, 437 bp, Glycine max
  unsure (1)..(437): unsure at all n locations
agctnccgcatcacccgctacttcgaatttttcctttatcatcctntcgaggcggatagctagctttcggtatttgaacaatttttcaatataaaattattccctaaaatgaacactgcatgaacatgttccaacgttgcaactccacctttaacgtacgcatatattttaatactttgaaaataaaattaaggtgtcagttcatctcttatgttattgcacagtgatattgtgtccataaaagactgcttatcattatagaatatttctattctacatcgctccttgttttatttatagaggaagtacttttctatttcaatgcgttcttgatgtgtgggtatattgctacactataatacatgtacgccgtttgcattgagtaaaaaaaaattggtgcgtgtttatttcttgcttttgacttaaataacaaaata

SEQ ID NO: 184033 - DNA, 471 bp, Glycine max
  unsure (1)..(471): unsure at all n locations
tcatatcttagtaattcgtggaatgctacttctgaataccatattggatgcatggcaatatttccttgccccataaattaaatttcaggataataagtaaatagtttcattttgtctcttttaacaaaactcacttgacaaaataggaagttcacctatcggatctacttatcanttttatgtattcaactaatatattaacctagtaatccacataattatccatacattgtggtggatttaaggtgagtctatcaatatanttttttaaaacattatcattctccaaatttcaagttttcttttttggtatacaatggttattagaaaccttagatcttgtgtatactctctaattaaggggtttgatagaggataaatatttagttttccaaaaattataagttgggaaccttaattntcatatntggtattaatttataaataacattcatgaaaaaaaataatcag

SEQ ID NO: 184034 - DNA, 304 bp, Glycine max
gacccagaagaccgggcagcagcagccggcggattatatccttgatgcccccccgaaccagagagaaggccgcgcaggacgaaaaactagcacaatgtgaccactcaagacgagaaatgaagcaacagctggcctaaaccaccaaaaccacagagatggacacgaagggaacaaacacagaacactccacgaaggacagcacagaaagcaacatagcgccacggaagtaaagagcaaaacccaaaacccgacccaggcccaaacggcaaaccaggaggcccaaaattcaacccgggcaaaaacc

SEQ ID NO: 184035 - DNA, 448 bp, Glycine max
  unsure (1)..(448): unsure at all n locations
cgacgcataaaatacatgacttttttgtcttaacngtttcataaaatcatatagtatctcggaagggaactattactgcacattaccgtcttatatttaccatgatctaacgcgttgtcacaatcacattctcttaactaatatgctaaaaaatggatttagagatggaaggacaatgatcactacaattatattgactaactaacagttcgtctgaattaaagaatgcagtcataaatggtacataaaaattccatcgagcaacatgaacaacgatgtgttctcttcccattcaatcatctaaaaacacaagcatatgaaattaaataaataaataaagctatctttacaaactggagctgtgtttataatttaaagcaatctcattctctacgtgcagcacttgcagcactcaagtgcaccgaaagataagaacctgtacatatga

SEQ ID NO: 184036 - DNA, 428 bp, Glycine max
  unsure (1)..(428): unsure at all n locations
agctagtagtcgagcttgagttaatgagtctanaataacaatgataaatacttgttacttgttgaagttagtggaacttggtgggttgccaagaattggacatagccttgatggttgagaaaaaccaatatcaatctattatgtcttatattatttattttctcttctgctctttaaactgactcaaggtttgaattttatctttgcttttaaaaaactttgtttcttttatatgatctgaaactatcataaaaaaatctaatatttgtttctttagtttttcttcatcagtcaataacgttgttgttttcaaaaaaggttctaagtttagtaaaaatcacatttcaactcttgcttttgggaaaattggaataagaattgaatctcacttattttgatggttnttgagttatgcctctggtcggatc

SEQ ID NO: 184037 - DNA, 302 bp, Glycine max
  unsure (1)..(302): unsure at all n locations
ctgcttgtggagcttctatggatgctggattcttgagcttcaatgaggtccttcaatggtgaattttcaccatggagatgcagcgaaaggcanaggagaagaggataggggaggcaccatccactagggaataagccaaggaagaatgagcttcaccaccaagaattgccttggataagaagcttgaagaggatgctttaatgaaggaaaagatagagagaaggtgggagcacgatattgaaggaataaaagaaggaaagaagtggaactttgaagtgtatctcataagactntcattcatc

SEQ ID NO: 184038 - DNA, 400 bp, Glycine max
  unsure (1)..(400): unsure at all n locations
agctnngtaaagtctctcgctcttagtgtttatattacaaagaaggaataatcgtctagaccatcattaagaggtccgtccaaagcaccaagtgtagctagctcctctaatgaagacttcaaaggacaatctgatgaggacgacgagctagccttcatctcgagaaaaatctgaaagatgtggaagaacaagggtggatctaaatagaagaacttctccaagaaggtgttcaatgaaaagaaagacaaagataaaagctccatcattgctatgagtgcaaaaagcctgaacacttcaagtctaagtgcccagatctggagaagtccaagggaaagcatgaataatacaattccaagggtaagaaaagcctcatgagcacctgtgaggacctggatggacc

SEQ ID NO: 184039 - DNA, 497 bp, Glycine max
  unsure (1)..(497): unsure at all n locations
ttacgtgacacataaaactcagcttcatcctgttttataggctccaatgaatatgaccattgtggggatcacagccttgaacttttatgtttagacatagagtttttttgcttcttatgtgtgatgtgtggtatttatactatgttttttgcatattaattcattaggtttgcattcattttttgtcgtttaggactatttgcatgactatttcctttactttntattacctaagactttntgagggttgttttgtgtttttggttttagaaaggaggattcttgagaaaattgacacggatgcttgaagttctattcttggagttattgtgatttaaagatagagcacttgagaactttgttgaagcttggatcaagcaaagaagagaccgcaagtaactacattgcaagaaaaattgcaaattccacaaccataatgcaccatgggttgngcgtgcaagatgtcaaagggccaattttacaatcagaagtaccac

SEQ ID NO: 184040 - DNA, 448 bp, Glycine max
  unsure (1)..(448): unsure at all n locations
agcttcttacagaagaaggtattccgtgttatgcttatatanaaaggccttacgtaanaagcttatggaagaaggtcttccgtaactgtaaaatgcttcttacggaagaacttcttccgtaagctttttacagaagaccttctttcgtaagaaacattgttttacagctatggaaaaaggtcttccgtagaaagcttacggaaaaagttattctgtaagctaattttggaagaccttctttcgtaagaagcattttacagttacgaaagaagttcttccgtaaaaatcttacggaagaacttctttcgtatgttacatcttacgaatagatctaccaaaatacaagatacccagaaaagccatataatgtgtactctcgctgaagaaaaaacaccactcgtaagagtttatcaaccgaaccgtaactctctcacacttgcgaaaccac

SEQ ID NO: 184041 - DNA, 479 bp, Glycine max
  unsure (1)..(479): unsure at all n locations
tctagccaaatggacttaccttgaattaattccctcgatttttcttttgagccttgtttccctttccttgttttaaagctcactacaagccttatatgaaaaaccatgatatcaccatatccttaaggaattttggagctttggaattgttttgggaataagtgtgggggggttttgtttcattggataacttgttttgttggctatgcttcatgatgtattttgggccatacttgatgtacattgtatattggttaaatgttggacatgctgaatgaaatgctgtttctcanaggctatagagtaaaaaaaaatcgaaaaaagaaaaagataagcaataaagttgaataagatcttatatggcacaagaatgatgaaactctttggtctactctnntatgttaaaatttatctgtacttctttttattttcttattntcttaatatgcacttanttcccatngctcctctattccttt

SEQ ID NO: 184042 - DNA, 187 bp, Glycine max
ctgaatgactgaagtttcaacaccaaacatcctaggacataccttaaggttattaatgaaactaacttaatatcattggacatccataaaataaatgactatgcttaataactacgttaaacatacatcacttggatcaacaaagaacctggatattgaactttgcttatgttaaatttgctactgt

SEQ ID NO: 184043 - DNA, 485 bp, Glycine max
  unsure (1)..(485): unsure at all n locations
ntaaantngaattaaaacgttcaataactgctggntaatctattaccatatatgtgtaatcgattacacattgcagaatttgaattcaaatattaatagctggtgtaaatcatttttggccactggtaatcgattacatcctctggtaatcgattaccagagagtaaatctcttgaaaaagaacttttaacttaaatttcttggccagaacctttgctacttcaattaagaattcccttcctatttaatatacccttcctaagactctagagactgtcttgatcatccatcttgaatatctttaatntcttatgtgatcctttggcatcatcaaaacattcagcttgatcctttgtctacaattttctatttaccacaaaaataatgtaactgtaaatactaatcataccttaatttatagagatgacttagatgttacctcttttgagaatttactgatatttgtgtcgtcgtatgtaacatgt

SEQ ID NO: 184044 - DNA, 397 bp, Glycine max
  unsure (1)..(397): unsure at all n locations
tactcaagcttgccnccatagagctagactccacgacagatgaatgcgcctctctattatatgagtattgcatatggatcatccctcttctaataaatgagcttgaagaaccttggctccgcaacaaaccattctcctttcaaagatactccttcttcatcacgtgaatattgcttatagaccatcttttctcctaagaattgactacgaattattaatttatcgtcgctgttctaattcttatatacaaatctcggtgctctccatactctgagacattaaaggaatttatctgtcctaacttcgcatattaagatggttcgaagagaataatgatagtccaacacctaacataaatccatctatgtcatcttccatgaattgatgatttattttc

SEQ ID NO: 184045 - DNA, 339 bp, Glycine max
ctatatagctataaactgcggctaagacgcatatatgatgatttctttttacttactctctcttctaataggatttcagagtgttaaggtatatcgcctgaatgatgacgggaaatgggatgaccagagtattggacatgtctctattgattatttagagtaaatctcttttattttttatctgaatgaaacttttatttgtgacatgacacacttgggtaatagctatcatcttgatctgtatagcttattacacctggaggaaaaaagcctttgtattgcctcttattgaaacctacattcttatttttagaataattacattttattccatattgc

SEQ ID NO: 184046 - DNA, 474 bp, Glycine max
  unsure (1)..(474): unsure at all n locations
nntggaatgttgtaagaaggttngtgacgctctatacccttctcacatatgtactaataataaaagaaataagaaatcataattaatttaaagttcttaaagcacatttaaataaaatcctttcaaaatggtaaaagactcacattcacttcattattaccagataaacttgtcagaaacattctttgttcaaaacatcatgtaattaagcaaaactcatgccttaatgtcacatcttatcagagcattgtatcccgacgtttttcagcacaaggttccttaaagcaattcacctagtcatctgcttccacgaacacaaagttcgagatcttcacatgatccaaacacaaacaacacactangagtgagttatcacattcctaactaatagagagaaacaagacaacatgtaggtataaatatcatataaacaaaatagaacttacttaaacatagctcacgttatttcaccac

SEQ ID NO: 184047 - DNA, 465 bp, Glycine max
  unsure (1)..(465): unsure at all n locations
agctataagcacaacacancttgtttcttgtccatgaactacaacaacaaatataatgatatcaaggtcaattcaacgctctatatttttgttctgctatcgaanaaaaattattttctatcttgattttctatcaccataaaggaagatggattctgatactggcctttaaataaattccccaattatacctcaccagccctagtgcataacatggtcctcatgtacgcttctttttcactttcatgggctaagtacatgttcctccacatgataaattctgtgtaaataagtatgacttatataaatgttaatcattaaaagagacaatattagagcacttgtctaaataagaaactacttgacaggccatggcaatctaaattcctttttggttttgccctgccacaaccataatgcatcctaatatattantctgaactaaagtgcactcaatttactttt

SEQ ID NO: 184048 - DNA, 476 bp, Glycine max
  unsure (1)..(476): unsure at all n locations
tcttcctaaagtaagaagagtatatatgtctagatatctcttatgattcgaaacatacacagcaggagtatctggaggtggcagattttccaatccctcaaatttttttttggaaggtagaaaatatatagtattattaataagagcaatactaccagtggtacttaagtgcaattntacaacagcagctatgttgccagcctcccaaaaaacacatataaacacatcacaagtccccaccaacagacaaaaacaccccagattaaccaaaggcctccacaagtccccacatttcttccctgaagattagctctagtagggagcctatcctttataagcctccaagtgaaaatggcagcctttgggggagttttaatttccaaataagttgaaagttcctcccatctggcgcaaaactatctagatttgacagaagtctataagtcgatctagtagagtacatcccagtaggatca

SEQ ID NO: 184049 - DNA, 455 bp, Glycine max
  unsure (1)..(455): unsure at all n locations
agcttcgccaagcatccgcatagaataacttttattcaaacctttcaaagttagtgagaaggctaaatgaaaaattagggaacttacaaaaactaaatccttaattgaaggcgtaggtgataaccatagtgaattacttaacaagattggtagtttacttaaggtcattctagatactccccaagcctcggaaaatacttccaaaatggtaacaagaagtacctccaaattaattaatgttattaatgaagatagtgaccaaagctcagataacacaactgagataggatcagtgtcagaaaagaatataaatccaattaattccaaacactggaaaacaccctccaaattatattatcaacgtccaactgcccctgacctactattagaggaaagaggtgaaaacaatnttaagagttttagtgcaaacaacatctatgaatggaacatagatg

SEQ ID NO: 184050 - DNA, 460 bp, Glycine max
  unsure (1)..(460): unsure at all n locations
tctcccccaatttctataaatagggggagaagttataatataagggttcagccccttatgcacttctctctctttcgaatttgcttaagaaaattgtttccgtgaagaaaatccaagccgaggcgcttccgtaacgtttccgtgagtgatttcgcgaaggttttcgaccgttcttcgacgttcttcattctttcttcatcgttcttcagtcttcaacgggtaagtacctcaaaccaagcttttcaattcattctatgtacccgtggtggtccacatttggtttcatgtatttttattctcgtttcattcactttttatacccccttttgacgtgcttaagccattttatctaagtcatttctcgcttaacctanaaataaaataaatttccaccgatcgtttgaattgtntatccgttaacttggttgaatgaattcgaccgatcggtcgtgccgaacca

SEQ ID NO: 184051 - DNA, 389 bp, Glycine max
agctacagacactgaagtttctctcctacttcttcataaatcataaaccttccttcatgattttaaatacggtttcacaattacaattgcagctgtaacgccaaaatatcctaaccgcagttgcggccgcatgaatcgcattataccacgatatacaaattttctaaggtacaacaactgtgatcagaatttaaaacattatatacaacccctcttcacggtttggatttgttcctaattgaaaaaagcataagattgccctcgatgtagccgaaggaaagttatcaaaaggggctaatttttttttcttaatttatcataatgaggataaatcttacattaatatcttaataacaataatgtatagaatatcatacgacttctaccga

SEQ ID NO: 184052 - DNA, 459 bp, Glycine max
  unsure (1)..(459): unsure at all n locations
agcttcacatcaacatcaccatcaatatctttcttattaagtcaacacaacacgccttaattatttttaaaatcttttcacacaaactgcaagtcatttatggaactcttaacagctccaatgctgatgtgtattgttaaggtgagtttggcaaagcatatgtcatatgatcttcttgtacaggttcatgctgaggcttctcttgtgcttcctatatatctgaggcactaacctcaaagttgagaagggtccaaaagatacagtatacattccctgcttgcttctctgcattgttctgctttataacttgaataatgttggtcccattctggtattccatttactctgcacaatgctgtttnttcttccaacactaaccaacgactatgtacttttnntttttctcttcctacagttttttaatatacaccacacctattcttcatttaaatcaattat

SEQ ID NO: 184053 - DNA, 421 bp, Glycine max
ttgtgtttaaactaccaagatcaccttcgcaacagataacttattactgactactcaatcaattcaaggctagaacggattttttatttgctttcttactatcaacgcaaagctataatgtttaaaacaatcttaagtttatgtccctctaaaatttaaataaaacatttattctgcatggctaaattaaataaaccatggctgtttcatcaagaaactatctgcttcatccatttccacctaatgtgttacgatccatctcacatcttaagttctatacaagatatatagtgatatctaccattggtataaatgcccctccatcgcatttcttaataataataaatcaatatccatatatctcactttaacatatctctaaacgagaatgttatattcatgttagattgtgagtatatga

SEQ ID NO: 184054 - DNA, 471 bp, Glycine max
tagtggggaatgctttatgttaaagaaacacctgatcttgtttgtgatcctgaacagagaaagaagctgcagagaatgaagaagaaattaatgaagttaagtgaactcacatggatgcaggcaaacggtgtctagcttcaacggcaagaggagaagttcccattgacattgttcctctcattttaattaactattcacctacaggggcatgctaccatctgaccacctgcacaaaccaataaaacaagctactttaatgaattaatttatcttaacaaaagaaataatggtccaatcaactaatgaaaaactagactagtactcctaaaaacataatatatagagatcaaggtgttcaatagtttatcatgttgaagttgcaaatatatctgaaatggttttcaatgtatgtagatcaaagaagtgaagaagagttgatagactcatataagaagtgcataagtacgaact

SEQ ID NO: 184055 - DNA, 458 bp, Glycine max
agctatcaatctacacctattatcttctattactttatctatagacgatcctgaacgaggctcaaaaagacatgccgtcaaagttcctaccatccacagaaatttgatgtcatcttatgacaataaaaaaaatataacaactgcttctacatccacacaccaagccagtaatgcttattccaatatgacacagctagacatacacagaggtaatttttattcttaagctattatcaaatatctacatgcacacattccatgtattaatacattcttttcagattgtgccctacagtcaacttatatatagaaagccaaattggctgtctattatccagatgaacatgagacaccaactgacactacacaacatgaccaaattgtcggtatgacagctcacatctcatgaggatgatgtaatataaacaagaaaacattcatataggttctaccatcat

SEQ ID NO: 184056 - DNA, 459 bp, Glycine max
  unsure (1)..(459): unsure at all n locations
tgcatttaactaaattatatgaacaaaatgctaattgttaacatcttntattttgcctcaacctgaggactcaactctcaagtacatattaaaaagatagtacagcattatcaaactaacgaccctgtttagttttcctttgcagatttttgtgcatctataaatattttggtctttnttatggagaattataaaggtggagaataaagtcttagttgagtgcaaaggagagatttaatgaaagaaaatcatcttaccgccatatcacccaatgacttgttacagattggacatgtgtagtggctacacgtgtatgcctaanataatataataaaatataagactgaatccacaatccttgagaataggttaccctcgttcggatagggaaatgaaacttataacctaaaacctacaataggtgtgaaatagacttggaaacaagcagaatgcatataa

SEQ ID NO: 184057 - DNA, 455 bp, Glycine max
  unsure (1)..(455): unsure at all n locations
tgcactgccattatgaatgggtcgtccttgtaaccaacttttttaaggtctactcaagtgaatcccattntgtctttacgcacacctgtgtttccattgacccatttacatttgaaaagaggtactctaaattcaccgtaatcaacctcccaaatctctttaatgactccatagtaaggcatgcaagcttcaatgggattattgtcagcagcactacaaaagtgctctgattgaccatcaacactgaccccgctattttgcacactacttttatcatcctgngactttgtgtagaaagaatactgattgatatcatatcccttccaagttggaacattcatatttggacccacggctagcaatcttaatgtgtctgaagcactgtcatcggcgaagaatgtttgtcttaaccacgatatgaaagttctattgcgctcttgcaacaacctcatcat

SEQ ID NO: 184058 - DNA, 432 bp, Glycine max
  unsure (1)..(432): unsure at all n locations
caagcttgagcaaattcaaacaacaataactttttactctgatgtctgattcactcccgtaatatatcgaaactctagatattgaatgttgaagctctgagcaacttcaaactacaataactttttactcggatgtctgattgagacccataatatatttagacgctcgaaattgaataccaaagctctgagaaaattcaaacgacaataagttnttaatcatatgttcgattgagttccgtaatatatcgaaaagctcgaaattgaatgtcaaaactttgagcaaattcaaacgacaacaactgtttactcggatgtctgattgagtcccgtaatatattcagacgctcgaaatggaattccgaagctctgagcaaattcaaacgacaataacatttaactcggatggttgattgaggcccggatatatcc

SEQ ID NO: 184059 - DNA, 451 bp, Glycine max
  unsure (1)..(451): unsure at all n locations
ttctcccaagtcctaaatgacatntcaagctagtattaactcactntaacctccatttaccacagaattcagacttagctntccaactctcaaagtctcactctttttccactcataacatcacattctcactttctaaccctaggttaactctacatttcatctctaacagttttccatgggcaatttcagcatataaacatcacaaacatcatcacaaaaaccctaaaacagtatgggtatgtntaactcatccaaacatggcgatttcaacaagttttcagcaaatgtcttcacaaataatcatcacacagcataaaccttgcaagactacccatcatatctcccanaaccccatacccacgaaaatcaaaggagaaagaagtccacccaaacctggattttcgaagtcccactcgtagccacgcacttcacgaccccgaatatgctc

SEQ ID NO: 184060 - DNA, 393 bp, Glycine max
  unsure (1)..(393): unsure at all n locations
accacagcaacacaaaagctatgtgtttcaaatttcttattcaatgggtctctaagttagaaagttaaattataataaagaaattgaggcaactctacctccaccatccataacatcattagacttgtcaaactggatttacacctaacatctcaccgaatcaaaatttgactcttcaacacccaaatttgccctagcaatggctctttgttcactctggtcatttgtnttctctctagctccacctaacctttctcacatgttctaaatgacatttcaagctagtattaactcactctaacctccatttaccacagaattcacacttagccttccaactctcanagtctcacttcttttccactcataacgtcacattctcactttctaacc

SEQ ID NO: 184061 - DNA, 374 bp, Glycine max
  unsure (1)..(374): unsure at all n locations
gacaccatacgaaactcaagcnnnttggagtataaacacgngaccaactcattttatatggtttagaatgtcgcatctagtcaagggccgagagaccatacaagtttcctaactatatcttattatgtgggccattaagtctatcatgtgctgacaatagccgataagcctatgaatctcttccggggcggagtatgtgtgtgtcatcgccttggccttggctaacaagcggggaagttctngactctcgttcaaggtatgagctaaccgatccatccacatggttgcctcttggtgcaaagagtctatcacccttcctctagcctgtattttcgcgtatacttgagcatactaccccacgatcctatgctcgt

SEQ ID NO: 184062 - DNA, 224 bp, Glycine max
ctgaatacacatagtcatagcatcaaaactcaatctttgctaatcacttgctctcaaagtctaattctttctatggcgtgaaagagctttggtatggtcttttttccacaaattttaaacacagtcccctttttctaaacttatgctattgactttaaccttaccagatgagtttattattatagaaggttttatatcaaacaatttttggaaacaattaatat

SEQ ID NO: 184063 - DNA, 482 bp, Glycine max
  unsure (1)..(482): unsure at all n locations
tctacagaaagttcattcctaatttctgtactatagcatcatctcttaatgagctagtgaagaagaatgtggcatttacctggggtgaaaaacaagagcaagcctttgctntgctcaaagaaaagcttactaaggcacctgttctagctcttcctgacttttctaaaacttttgagctagaatgtgatgcctctagagtgggagttggatctgtatttgtagaagcaaatgcctctggtgttctggaattgatgatcacttgatttctaagctttttctaagcctttctacaccccatttttctccccctttggcaacatcaaaaagccaaagaacttgggaatctaaccatatataaaatgatagtggaacagatcattattaatgtttatgcgtaaccaatcaaactcacaaataagacatatccaaaccataatccgaacaatttaaaatccaaaaccacatagtatcaaagcacaaaa

SEQ ID NO: 184064 - DNA, 467 bp, Glycine max
  unsure (1)..(467): unsure at all n locations
agcttcaggctgttcaatagctttatgttgttgcttanaaaggcaaaggtatgtatggtggtcagtaaaggagcacaaaccgcacacccttgtgacaggtacaaanttttggttcaaggccagctgggttaccaagttaaccaatgcgtccagtttgccttcaagcttcttagtttcagatgatgcagctgagtttgtagctaccttatgcactcctctaatgactatcgcatcatttctggcgctaaactgctgggagttggaagccatcttctcaattaaatttctggcttcagcaggagtcatgtctccaaaggctccaccattggcagcatctatcatacttctctccatattactgagtccttcataaaaatactggagaagaagctgcttccaaatctgatggtgagagcaactgncacatagctttttaaatctctcccagtatcatacaagctctctca

SEQ ID NO: 184065 - DNA, 477 bp, Glycine max
  unsure (1)..(477): unsure at all n locations
ttgattctgtcttctgagccaatcaatgcanggtatacctctaaaggcagttatcctgcattctgtccaatgccacaaccaaagggtaactaattgctaaccctagctccaccctcataagccatattataacaaattaatgttttgcatgtgggtctctcaattaggtgagaatgcagtcaaagtaagttaacaacaaaacttgaggattatgtcttaattttgaaacaaacttgcattatgttattctagtagccaaaatcattatgatgctatttgttaaacatgtaattcaatggaaggtgatatagaaaaagatggtgttgaacaagcagacgaacccactactacaaaaaacagatataacatcggaggctcaacatcggctgtttaataaatctatgttaatgtcagcgcggtggcataatcgtaaataccgtgtatcccttaacatctgntttgtgacaatccgatgtt

SEQ ID NO: 184066 - DNA, 409 bp, Glycine max
agctttactagtctctcaaagaccttgtttttgtttaagtgcactggatttatgttgcttgcttctcatgttattcacattgttggccctatctaccatgctcatagtaatcctaatgcctctctagcaagcgctcacaaatatgtgctttgtgtttctattcttcatcatctttgaattaacaaatgtttatatattttattttttgttttggttcattgtcattacacttgattgagacatttgtattttctaactgattcccatgaatacattgagggttgcaagtgaaaacaacattcagtatatagcatttccaaccatatcatgtggtgtctataggtagtttactacttggatttggcaagcctccatatttggtagtcagtcaagtagactactcggattt

SEQ ID NO: 184067 - DNA, 470 bp, Glycine max
  unsure (1)..(470): unsure at all n locations
taatgaaagagaattgataatgagtgtgctagcaagcgacttctcagaggtcgtaaactgttcatcaatggctntcaatagatctttgaccttatcatgctggtcaactgaaccccggatactagcggatatgttggttnttatgaatataacggacagacgattagatctctcccacttttcataaagatcaacaacatcaggttcgctagtttcagtaatagccggcggctcatccttccttatagcatagtcaatattcatccagcccaaatgaaggagaactttttccttccaaaccttataattatcacctttcaaaatgggaaggtcacaagaaatattcatagattgtgaaactgcaaacaaacacacatgctcattaagaaaatntgagactaaacaaatgtcatgttttgtcaatgcaaatcatgtcttaatatatgaatctagtgacacaaaacttgtct

SEQ ID NO: 184068 - DNA, 337 bp, Glycine max
  unsure (1)..(337): unsure at all n locations
agcnnacaggagataagagaatgaccctttaatctagaanaaacaaacgtagagccatgaatctttggaaataaaattcttataggctgagctgtcacttgaaattgtggcaaccaatattcacctccaacagccaacaagtcagccaccattgggttttccaaaaagatgatgcctatgttgccaattgggccctcattacaacttgaactaaacctactaaagcccttctagttgattaacccaaaacatatttttgggcagccaactatacaaggattgggccataatgttgacaaacttaacacttttaaattagaaaaagggggccacttag

SEQ ID NO: 184069 - DNA, 287 bp, Glycine max
ctcctgctattctttttcccttatagcccccaccaatgactctaatgtcaaacaatcaatccacttatataacaaattctcaaaaatctcaaactcttccttcaataccaccaaacaactttgccatgtttcgtaggcctgccaataatcttagtggtgcacaatcttccaatgatgaatgtgaatagctatctccacaaatctctattcaacttgaggatttaaatatcacattcaaggaatgagaggaatcttctaagataaacacgacaaaagagaacatgagc

SEQ ID NO: 184070 - DNA, 336 bp, Glycine max
agcttgggaagaggcatttctttgttgacttcttcggcagtgggagtgggagtgttgctgctgctgctactttgggtggagggttggtgttgggggattatagagggaaaggtttttcctcctgtggtggtgcatcggtgaaagcggctgggttaaccgcggtgactgtgccgatgtgtcaggtatatgggtgcctcttgtctcttcttaactctaaggattaccaccggatgcacaaggtgtgtgagatgcactcaaacgcttcctaactgtcgtcttatgctttgatcatatgttcttctccccttgatctagtccaaattccttactcttttt

SEQ ID NO: 184071 - DNA, 329 bp, Glycine max
  unsure (1)..(329): unsure at all n locations
cctaatcaaccatatatacattgagttgattntagtcgagtaatagagtcgcatatgctctctgtgttcactctaacgatccaccatgcattaaaagtttaaaaataattaaaatggacaattgtcactctttgagaactgtgattaaagatgcaaccttgaaattttgtctctagcctttaggtctaatctaaaccgaattacaaccatattcggcaatgcaagacgggtaatgtttcaaactaagactaacaatcatgttaattcatctaacttactcaccttaggtgagtttctctcaaacaaacgtaactaataacttactccat

SEQ ID NO: 184072 - DNA, 297 bp, Glycine max
ttctgtcactatttttgacctcaatgatgcttgaatattattgaagatcaaaggattttacatcattagcaatatttggtcgcattgctcacggacctcatcaatccagcttctatctaactaagaaaaagccacattggcctatcaatgggcagctttatatccttgcctcttatcaaaatcaagtttctgacttcctgcctctgtgtccagtctacttgtcttctgctccttaacatgaatgagagagcgacctccgttgtctgatttgattcactcattgtacaactgcatgca

SEQ ID NO: 184073 - DNA, 450 bp, Glycine max
  unsure (1)..(450): unsure at all n locations
agctatgtagatttagtgtttgctggcgataggatngaagtgggtctgaaaagaaggaacattgattatgcttctactacaagttctggtaataggaggcctgtggcgaatatagcaaagaaaaaagagggagaaacccataaagtgattgcaacactcacatggccgagctcttcgcaaacccctcataaccccatgtatcagtatcccccacaccagtaccactatttggccaatatcgatccttccccctgcccaacgcttttccaaccaagagcacctaaccaaccgcagagacctccccaacatcacccacaaaatccattccctatatagcctagaccaaatgcaactcccaatcccaacataaacaataacccgtggaggaatttnccaaaaggaaacctgtagaattcaccccaatcccaatgtcgtacaccgacctactac

SEQ ID NO: 184074 - DNA, 469 bp, Glycine max
  unsure (1)..(469): unsure at all n locations
taaccatcaccttcgacaattgtgtcttgttctactttatgaacaaaaatcacaatatccatgtccttagtgaagatgattccttttccccgatccatgaggaagctaggtcagaaagacctanggatttgaaggatcgccgcctanggaaaaatccttacacccccactagaaaccctagtagagggaagagagagaaaacctttttcttgttgatccttaacatacgtctttcttgctttgacattatatggtacataactntgtatatagtaattgttttctaagcaaaacagagtattgactatgttaattagacctaattagcaatcgaacaaatattgacatgcatgggatgttcacatacattattgaagagctcacgaataattgtttctatcttagtggagtccattttccattcattaagattagaaaaggatntcatgttgtatgaacagtgtttctt

SEQ ID NO: 184075 - DNA, 466 bp, Glycine max
agcttgaaggactcgagaagcttcttcactttattttctttcagacttcatattggttggtttcaaacatgaaatttatttttacctaaaattagttcttcttttgcttattttaattgttgaaatttgttttgcttatgaggtgtttgacaaaatgtttataatagaatcaaggtctttttttgtttaattttttagtttcagtttttgtatattgttccttttttggtataaggcttcactaggttgcatttatgtgtttcatttgaacacgatcttattaagcttgaaggacccgagaagcttattcacaataatttttttcagacttcacaccggtttgtttcaaacatgaaatttatttttacctaaaaaagtcattggtctgtatagatgttcatttttttgcttgcttatcgatttaggtggttatacaccattttggttatatatatatatatatata

SEQ ID NO: 184076 - DNA, 481 bp, Glycine max
  unsure (1)..(481): unsure at all n locations
tgtagaacggctggacatgatatatgtcagggtatnggtttggccagcggttcagggataaaggaatgtcccacattatttccatgacacgcgtgcaacaatgatgatttagaaatttatgcaaagctagtcatgcatgcacctatgcggacactcaagcatcaagttttggggtcgtgtgacactagggctcaggactcaagcatcaatttatgcattcgtccgagtccattttgggtgttcggaaaattccacagcattcacccttcaaagntaatttgctacctaaacatatgcatattttgtgtgtggcatctttgctacctaaacatatacatacatattcaaagcatttttgctacctaaacatatacatatatantttttgtgaggtgttactaccttcctagttggtgcttgcttatataagttcctaggattatgagcaactaggcgtgttcaaccgtggcttaagaaacat

SEQ ID NO: 184077 - DNA, 479 bp, Glycine max
  unsure (1)..(479): unsure at all n locations
agctnttctttcacaatcaatctgtctattgtttattaattctaaatgcaagttcacattcttgttctttctttgtctaacatacacacttgctcaacttcatgaaaggaaacaaaaatctcatcttaagcatgcattcaatttaaaacaatgtcatacacccattttcacaaaataaataaactacttcaatgccataccatcaagagttaagttaaattgttcatgatgctttaagatgagcaactatactactcgtgcacaaaactaacaaaaagtaactaatgtactaacatcaaagttatactaatacttcaaaatcacacaaagaagcataaaatctctagaaatatctacgttcttgtcaaaatggaccacaacttcctcactagtccatccagttagaaaaatctgaaccatcctctaggtagtaggctggtgagtcaggaggagctacaacttcattatctgagtcatcg

SEQ ID NO: 184078 - DNA, 385 bp, Glycine max
gacacttaaatctaagctagtcatgcgcctgtatatacgctcttgtgtctatttatttcttaaatgtcttatatgtcgaatgttgatgtgtagttgatttctctctgaaaatactgtttactttgatatttatgtttttcactatttaatcgttacttcttcggtaataactacaatggtttttggtgtattagttttttgaaacttttgtttgatcgatacccttattattaataccattatgcatttatgtgtctggtcaaattgctgttaatcaatactgctctataatcattacatgttggtaaagtttttgacatttttctttcaatcatatgactgtttatcgataaatgctttttttgactctttggttttgtcgttt

SEQ ID NO: 184079 - DNA, 457 bp, Glycine max
  unsure (1)..(457): unsure at all n locations
agctngtcttgtgcaaaattagggtacatattctttattacaacaacaaaatttttacagcagaattntagcaacattccatagcacaccacagtgcctatttggggaaaacaactntggaggcagcaagaggagctgcttttgcagagatacctaggttttgtaatctcattattgttagggtttcttctgtaatggctggctaaacacctttgctggggatttctaaagaacagctgatgtaatcattttaatatctaattggatgtgtttcttgtgttcaaagcttctcttagagcttaaattatgtatgctcttggtctgaatcaaccattgtgtgcatggttaggtgactntagcattgngaaatgtattgtngccttagaacttgaatgaagcagaattgaaacttattcttacaagagggatcgagcggattaagtttggtttaaatatg

SEQ ID NO: 184080 - DNA, 477 bp, Glycine max
  unsure (1)..(477): unsure at all n locations
tcacatgtctaagtggactcatccattgatcttgaaaggatttctcaagtttaatgatcttcggatagattcttgaaatctcttcgtaggtttttgtaagctattaagagaatagatgagttagatagaagctcatgataagcttntttaaaagattcaaggtcatcgaaatttaccttatcttcctagtctgattcagaccccttagaagttgtatccgccatcagacatatgatggcttcttcatcatcttcatgagacaaggtttcattcaggtctttccacgtgctcataagacctttcttttatatagtcttaaagaatatctntttatcttgacttttctccagatcgggacattcagacttgaaatgtccaggctttttgcagtcatagaaaactatggagctttngtctttatccttcttgtctcatggcattcttcttaaagagtgtctccacttggacccacctttg

SEQ ID NO: 184081 - DNA, 411 bp, Glycine max
  unsure (1)..(411): unsure at all n locations
catgcaagcnntgacatttacactaagactgactcttttcttattctaaaagnatcggacatgttgtttggtgaaaaaatgttaactattaattattaattttttgtttgtatgaaaattgaaatccataacctttctattttgccttcttcactcaccaccaaaacaaacattataaccccaaagtatttgacatattagataattctttctactaaaatattatgttcatattagaacagtttgctcctatcgttgtcacgaacacttcctttaagattcctttacttaccacatgcacgaaatgagtgtcaagtccattcgattgtaagttaaacgcatagctggagcacatgcttcgtccacacatttcgatattttttattggggatccactacattttcttttta

SEQ ID NO: 184082 - DNA, 371 bp, Glycine max
  unsure (1)..(371): unsure at all n locations
acatttaaggtatgtaaggaaacagataattatcttcttgaatgtgagttcatctaactcccataattgttctatatcgaaaagaaaattggntaactgttttatatacttgtcagtgttttcatagttatcctacaaacaattaaataacctgaaacactatggacatataataattatttccaaatttctcttatcatagataactcaataattgtaaaatatatccaccctaatccgaacaaaagaaatataacctcaaactacagatgattccaactattataaggcttgttgataagtacaaaaacctatagaagaaatccatgtaatgaatagtttagctattaatcactatcatactttataaa

SEQ ID NO: 184083 - DNA, 435 bp, Glycine max
  unsure (1)..(435): unsure at all n locations
agcttcctcggagccatttcctgcgaaggtttacatntggaaagttagttttaccagtgggacactactcttaaaacaaaaatgacatacaacctcctcccataaatacaaacatcaatgtaaatttagagcaagcttatgcgcatatttccctacgaacgttcacttgcacaagacatcctattaactaagaaaaatgcacccatatacaatcaaggtagcttcattacctagattatttacacgtacttccaaggtgtatttgttatttacatcacacacgcctccttggctaaatttacatacatgcatactcaaagcattttggggtaccaaaaattgcacatgcgctcatctnggtatttctaatacctatacatatacaaacttcatgatgaatcttgactacctacgcaataaggtgctacatttcat

SEQ ID NO: 184084 - DNA, 447 bp, Glycine max
  unsure (1)..(447): unsure at all n locations
tctggaggaagcctcttaatgaatcttctatagaaagcttcttgaagctgcctcggnnaaaacgctgaccagcctctattaaccgttggatcttctcgaaatatggtctgcaacttcacaagacacttgtccatgatcttaccgttggatctttgagaacatgtccagagtgtgctagaagcctcttaatgaagcttctggaggaagcctcttaatgaagcttctagagaaaactacatgaagctgcctcggtaaatacgctgccccgccttcgttaaccgttgcatctttttgaaacttcttcaagacacttgtccaggatctgaccgttgggatctttgagaagatgtctggagtgtgctagaagctttcgttcccaagagcatctcttatttaagcagttcaacctttgctttcggtagcttaagaaaaatgcattacttcgtc

SEQ ID NO: 184085 - DNA, 456 bp, Glycine max
ctcaagaaaatgaaggccttaacaaatgccttattttcatataggaatactatcaatagacctccaatcattaatggagagggttaccactactggaaaacccgaatgctaatttttattgaagcaatagatctaaatatttgggaagccatataaatatggccttatatacccaccacagtagaaagagttacaatagatagtacatcatcaagtgaaagcatatctatacaaaaaactacagatagatggtctgaagaggatagaaaactagtacaatacaactttaaagccagaaacataataacatctgccctaagaatggatgaatatttcacggtttcaaattgtaatagtgcttacgaaatgctggacactcttccatttacacatgaaagaactacatattgtaaaagatctatgataaatgcactaactcatgagtctgaattattt

SEQ ID NO: 184086 - DNA, 440 bp, Glycine max
  unsure (1)..(440): unsure at all n locations
agcttctagattcatcctaactattcctattagattctaaacaactaacaaaaaggtgtcctagccttctaaccccctgatcatgctcgcggcttctctcgacatgcctcacgcattccattctgcatggcttctgtcgtaaccttctagatacgttggggtggacctttccctttgtggcctagcactccttgcttcctgcacctcccttgctattgacaccccttccttcatctttcccgtaacaacatgtctcaaatgggtagcggaatctggaagcagacaacattgcaacaacattaattacttttagttttgtcatcaccgagttacacactagctttcgctgtgagactgtcattctcttttttttttttttcttttcctgatcctttctttcatttgcngcgccacatccagtgccgcactatgatcaatat

SEQ ID NO: 184087 - DNA, 359 bp, Glycine max
cctataaaactcagcttgcgaagctgaaaacaagttgctgggataataaaacacatgtcttcctaaagaagagaggaggatacaagctgcttatctaaagcttttggaatctgagcaaaggattgctttaaggcatgctgatgtatccaaaagtggcagtaatgctccacatgttgtggatgagaaaatgcctgcaatattgaatgaaataaaatcatctagggctacagatgtgggtgactgggaggatagtgaaagaatggctgacacgatattgacttcagcatcttctgattcgtcaagtgtgaatagggcattggagataggcactaggtctcacttctctatagatttatctt

SEQ ID NO: 184088 - DNA, 452 bp, Glycine max
  unsure (1)..(452): unsure at all n locations
agcttgttacagatgagaaacccttctctttataagactacgtacataaagaaatgggggtgaacttaaggattaattgagacaaattgaaattgggatgcctatgtacacacacaaaaaaaaaaagatttagtttaagaaattattagaacgaaattaaagttatagatatttatttgtaaaagaataaagtttgagcatcttttttaacaagtacacttccgtatactgctccttagacaaatcaatacataaggataataattatgagtcatttccgaaaactgtgagtattttcgtttatttatattggattaaggggattcacatggtacaaatcagatacgtagtctcttgtaaaaaccccaacaagtttcctgtcatctaatatgcatacactgtttattatgttattgtttacatggtgacacacagcanagtaatatattaac

SEQ ID NO: 184089 - DNA, 499 bp, Glycine max
  unsure (1)..(499): unsure at all n locations
ttacgcgacctatgaaactaagcttatacttattgtcaattatgttataaaataattaatgttgttatatatatctaatgcatatntaaatttacataatataatttgtgataattaattttatctcataattcatttatttacatatataaattgtaaataaaaattataggtataataaaattttacatatgtaaaaaaatacaaatttatttaattattaattgttataataaatatttaaatacatcatttaattaaatattatatttgtttaattttcaatcactgtaataaatattcaaatatattattcaattaaatatcaaatctgtttgactattaactactataataaacatctaaatacaacattcaattaaatatcaatatttgtaaataaattaaatgcataaaaaattctaanaaattattaatttttaaaaaaattcatacatacggatgaattacatatgactgttnngattttgttcactat

SEQ ID NO: 184090 - DNA, 389 bp, Glycine max
  unsure (1)..(389): unsure at all n locations
agctngagtagctagtgagcctttaagtgatctattaaaatagggctcaattgctattgagaaatgcttgagctgggactaattcagctcaattcatttccactcctactcggtaatataactcgaaagttgcagcttaaatttgtgctggctattatggattctaatatttgattaatttcagggtaaattatatctgctgcttcttgggaccacagctcttagtctggtatgaaattgtttttatttgtttgaattaacagttactagatttcatagctagctttattgtctttgatccatgcttgattntcaagaaccaaatctatgcaaactttattctgaatggaagttctgaattacctaaacacattgtggacacgacaagc

SEQ ID NO: 184091 - DNA, 475 bp, Glycine max
  unsure (1)..(475): unsure at all n locations
ntatnttcttgtagttntagcatatggtgccaaacatcttatggaaaagagggttacttgctagcaactcctccatgtttcaatagcaacaaggcatgagatgtacataacnttccaaatctatcgattttacttcctcatatgtgatatcttactagttaagttctactgcatacaaatactcaaaatatctggtcataactcttctactttactctcaacactggggaacattaatttttttatccatagaaattaaacttaggtatcggggagttcacgacaactcagacacactactcaactaatttaagcaaacaatatggatcgttcccattatcagttcatcacatatgttcattggttgtcactggtgatgacatgatcaagcaacttatcaataacataataataacagatattgcacaaacaagataccttatcccacaaatggatgagatcaacatcacgttgg

SEQ ID NO: 184092 - DNA, 416 bp, Glycine max
  unsure (1)..(416): unsure at all n locations
nagctnccaacatcctctcttngaaaggatttatatatcaaccaaattacacgcaaataataataatcccttacatatgatttctttttgtttcctttttgcgaaatcccatgcatatatgatttaatgtaaaggataaatcactaacgaaaaagctaaaatacactgctgtaacttctattcattaataatcgatcatgtatgttttattttacgccacatgatgcatttccttatattagcttcccttccaaccaacggctgtaaaaatccaacgcctcccgcggcttatattccggcacggtgtgcccagctccctacaccatatgattcattaggtaaagaagtgaataaaacacaatcacctaattaacaacttgaaaatttactatttcatgttactagtaagttgatta

SEQ ID NO: 184093 - DNA, 403 bp, Glycine max
  unsure (1)..(403): unsure at all n locations
ggacctatnaaactcagcttttattagaaatcatattgaagtttctataatgtctttaaatacaagnccatatatctaaacttatcatgtatatactctattaaacaaaatggatgcatctactttgttgcatgatgaattatacttccttactcaccattgttttgtgtgctctatatttagctcgcttaccactagattagtatctcctctaaaattaataatatattacactctattgggataataaaattgacattgagcgtctatatactcatagtatcagtacattttctatataatttatatgctcacagttctgttgtggaagagagttactaaattagctaaaatcgcgattttttacactattaaaagataacaccatgatattttgttttaa

SEQ ID NO: 184094 - DNA, 390 bp, Glycine max
  unsure (1)..(390): unsure at all n locations
agcttagcagaccaaatcagcctatgatgttatggttgggtgataagcgcttgagactcgtggcttancacatgaacaaatatgcgcttagcgcgaggcttgcacttagcgaaaggactgtttttcagaaaacgttttctaagttgtttttcagtcctttttccaagaaattgaaacccttatgtctaacattcaaggctaagctgatatactccattgcacaaattataaagcaagttcccaatgatctaatgcatgaaaacaaaaattgctgaaattaaaaactgggttgcctcccaggaagcgcttctttaacgtcattagcttcatgcttttacctcattgggtgatcttatgttntggttcttactttcagaacctcttgacctc

SEQ ID NO: 184095 - DNA, 392 bp, Glycine max
  unsure (1)..(392): unsure at all n locations
acggaccttaaatctcagcttttatccaggcacattcttggtggtgaagctccttcttccatggcttattccctagtggatggtgcctcccctctcctcttctcctttgccttctgctgcatctccatgctggaaaatcaccattgaaggacctcattgaagctcaaagatccagtctccatagaagctccacaagcaagccttcatcaagattattccccttttgcttcttcactttcactagaggaaggtgaagtagtagcctcatcttggctactataaatgtcttggcccctcataatcatggttttcttggtggggcattgagaagtaatgtgtccccttccaagacanttaaagcacttcatggagctagtcttctccggcatact

SEQ ID NO: 184096 - DNA, 331 bp, Glycine max
  unsure (1)..(331): unsure at all n locations
agctaggagcgctatctgtatactcatcattatatcagtgggaaagaaatcagactatgtacatgaatcttacacccagtgggttattgataggaccaagagctntggcctaccctaccgcttacctagatacctatcgtccaccatcccaccatcatccttgcctatcccctttgatactaaggaagagtttcatgaacaattaaccaaagaaaggcaagaaaaagaaacttggaagaggagatgccaggagctcgagcaagagaatgagactttgaaggggaagatagcccaacagagccgtgagctttttatccataaccagaggatg

SEQ ID NO: 184097 - DNA, 469 bp, Glycine max
  unsure (1)..(469): unsure at all n locations
gctntttgtgaaacttctcattggttttctattataagnttcttgtaatcgactacacaatttatattgtgaaaggtcatgacttttcaaagtgttttttggagtgtcattgctggtaatcgattacaaacatctggttatcgattacatgattcacatttaaattcaaaaccctttttaaaagctgattttcaaaattgtcttctggtaatcgattgcagtgtctggtaatcaattaccacagccttggatgttggagaaaatgtgttttgaggcaaaagtttgatcaaccaatgaaattgtttgaggccttatctattttttttatcttgttgtggtaaccttaaattaatcctgaagcaatgtgtaacctttgaatgtttgttgaagcaaccttatattaatcttaaagcaatggttaacctttgaattgttgttgaagcaatctttgttgattctactttgacat

SEQ ID NO: 184098 - DNA, 389 bp, Glycine max
agcttgtccgcaaaaaaatcagtaaaaatgatttaaggttctatacctcagtttttctcaccaagtaaaaatgggtcattttaaggtccaacgccttaaaaggacccccttccaagtaaaaaaaatcgcttgattcgcatttaaaaagaactacgtaggtctgattttttcatcacacatgaggaatacgtaggagcaaagggaaacgcccttatcgaccacaaaaatataagaacgtaaaaagggaaaagaatataaattgaagtcatatttgcacatttgattaaaggctgccgtctcttacgacagacgcgtggggtgctaataccttccccgttcgtaaatacaactcccgaacctttcacttaaaattcatagaccacgtcttt

SEQ ID NO: 184099 - DNA, 478 bp, Glycine max
  unsure (1)..(478): unsure at all n locations
tcagaccatagcaactcanaatctaggtatctaagacccctcaatntattggattttcaggtttgagaagtgaaaatgagaatggnngtaatttggagcaaactctcatctcacacaagtctataacattaatctaaacttgctcaaactggtttttacgactaaaactccaccgaatcaaaatttgacccctcaacacccaatttaccctagaaatggctcttgttttcactttggtcactcattttcctcatttgctcagcccaagctttccaataagtcctaaaggacatttcaaactagcattaactcactttaatctccaattaccactaaatccagatttagcttttcaaaccctcaaagcatcacacttttcaactcatatcactacattctcacatttcaaccctaggttaactctacccttcatctctatcagtttttccatcagcaatttcagcacacaaacatcaca

SEQ ID NO: 184100 - DNA, 401 bp, Glycine max
  unsure (1)..(401): unsure at all n locations
tattcagaaaattagagtttatctctttattcttagtgagagtgattctcctaaattcttgagtgattcaagaacaccctggctgatcaaaggactttcacaacctttgtgtgttgccctcgccggaaagagtgattctttccttcctttcatcttcaaccttgttctttcaaaccacaattccagaaaatccacttctgcccagaattatctcgtggccataactcccattttacgcactcaaattaagtgattcttgagcctaaattgaatttcaaaacgagacctctcacctcgttttggaatcacctcatttagagccctgtagctggagttattgccatttctatatttctgtctagccaccacttaacctacantttaccatcccattaatccat

SEQ ID NO: 184101 - DNA, 414 bp, Glycine max
cactcaagctagctgtcttgtggatctctgagacatctcagggctacatttatagtatgtcatcaactcataagccccggacgaaattatggtatgacagctgcccactatgacttacctctgatcggagatgagaggaaagcaaagatttgacactgatttcgaccgtcctgcccttactgtgatgacgactctcgtctccattccttcatttttattctgcataaaacaaaattcaaccattgacaaagaacagggaacatagttcacatatacacgtatactcatactctacgaacgaaccgatctggaaaacaacagaataacgtgcttcccagtcaccagaagcttctcacttgataatggagacacatgaacagcgctaatcaatgacattcatggtactccgaacaa

SEQ ID NO: 184102 - DNA, 441 bp, Glycine max
  unsure (1)..(441): unsure at all n locations
agcttggttnggaaaattaagtcatgttgttcaaagttttgggctgaaatgaagtgaagtagatcattcaatttttttattgccatacatctcccaggaatgtgtctatcttgttgtctatgtgaatacatagttatcacacaaaatggtatagctaagatttccaacctaaaagagtacatgcctagtcattttcagactaaagaccttggaagtcttaaatactttcttggtattgaggtagctcaatcaaaggaaggcatcgtggtctcacaaaggaagtatgctcttggtattttagaagaaacatgcatgactaattgtagacctattgatagtcctatggacccaaatcaaaagttaatggcagaccaaggtgagacatactcagattcaaaagatataaaagactggttggaaagctcatttatctcacaatta

SEQ ID NO: 184103 - DNA, 468 bp, Glycine max
  unsure (1)..(468): unsure at all n locations
ntgcctntagggcttgtacctcatcactttcttccgaagctttaacctcattgtctctcacagtctttagaattgggagccaatccaatccttgtgtccgaactctcagccacttatgatagccgccgatgatcccattactgcttcccctaagctctctgtcctttcttcacgccgcatcccatgccttgcaaactcattggagtaccctcgcgttgtggtcactgaaaccccgtgcgatgaaaggcgtgatgctttcgtctgatggcactcctctcatggggtagccaagctgtcttatggcgaggacaggattataattaatgcaaccccttgttcctatcaagggaacatttggacatccttcgcatgaagatagaatcctgattcttccttccttctagcgagggaaccaattaacagacgcccctccatgctagccaagagttggtcccaattcgcctttct

SEQ ID NO: 184104 - DNA, 446 bp, Glycine max
  unsure (1)..(446): unsure at all n locations
catgcaagctntancctttncccaatattnnaagtgttgtttctactgatcaggtacactagagtgcatgcaatttactttatacagtttcacgagccatggggccagctgatgaagactagttatcaaaactctcgcttgcacatcaggtaaaatttgacttcctttgaaactgtacagaatcaccgtagcaacaggaaactgcactttcagttgtattttttttttccagtcattgctttggtgttagatagcagactaactctcgccaaatgatgccttaatatgataccaatgtgtaaagaacatgttggtaaattatgcatattattatagcccttttccgcctcatatagaagcttgtgaaaatgatggcattctttttccactttcctaatcataagtacaaaactgatctcagtgaatggtaattcgtttaatgatgc

SEQ ID NO: 184105 - DNA, 478 bp, Glycine max
  unsure (1)..(478): unsure at all n locations
cgaaacatcgcattaccatagtatgaatgtttnttgttaatagagtatgaactaatatcttagtatcaaataaattgaatccattctgttgattgaagttcaccaagcaatcccttattcgtttgggatatgttccatgtttggaactgtagttttaaaggaaaaaaaaaaaaagaaagaaagaagagaaggccaatttaatagtttaaaaataaaagataaaaatcttaataatcatataattctcttaattttaaaacaaaaacttgccttactcttcctatccttttaaaatnttacttccaagcaaaagtgttaaactatatattctttgtctatctctttctctaccccaaaaatactggatataaaataattgcacaaatagttttgttgacaaattctttaattcaagccatatcaacattaatcgatgaataattctaaatcaattgtctagcaacatctttctatacat

SEQ ID NO: 184106 - DNA, 446 bp, Glycine max
  unsure (1)..(446): unsure at all n locations
agctgtggctagcatgtattctaaccgattgtggtggtgcgctaaggggaaagaaacatatntagattactattagtgctaataataaaccggctcatgtttttagttacaatcggatatgcaaattcgctgagctattctgactnttcatgctcacttttttcttagctaggtactagtattatttagtaaccgttgattttattctttgaagaatcatgattcatttacagcgaaaaaagcatcatgcatcattcatgcttgtttcactgtaaccccagattttattctggtatcaagatacttatggtggaggcgaacagtttaactgatctgtgcctaccactaaatgaaaggctgcgtgttactgttgactatcacaaaatcaatatgttcgtcattaatttataatatcgttcttaacccctgttctgaaagtaaagcat

SEQ ID NO: 184107 - DNA, 538 bp, Glycine max
  unsure (1)..(538): unsure at all n locations
agcttctctgatgagacgtgatggtagtcttttgacaatgtctactgggcgccctagtgggatgaacccatcaatnnctcaagtacccagtttggcccttanaaaagagngacntntnccacgcaatattaagggtggtactaaagnncattcacagggactanacgaatctnnncttcaagaatcatnnnttgatatgngtntcaattaggcttctaagaatgcnnncttgtccnncatgcgacctcgannttatgnngtattaaactttananntcttttcaatttttnnnttggtattaactggttttnnttttctttcacttttgaccacttaaatggtatgtattaagaaaaaaagatttttttaagaatatcctacttccattatgagtgttggaggcagttattggtatgcagtttatatatccaacgggcattnttatttaatgttaattggttttaacacagaagctaacatggtaacagagatttcacgtgcggtttatattatatatntgttgaacaacttcattta

SEQ ID NO: 184108 - DNA, 469 bp, Glycine max
  unsure (1)..(469): unsure at all n locations
ttngaanaatgaanaatttaagggtcaacttgatgatgctgtaaaaattcatgaggaaatcgaatccttaaaatctacattggccaaatttttagtggaatagaaaatcttgacaaactgttacgataaagtaaatgttcctcgaacaaatctagtaatagatatgaaggaaatatttatgttcatgatgaagacactattatttgttatttttgtggtaaagttggacatttgatgtccaattgcagggatcaacctagaataggtgcgtccaatgcatttaaagctaacatgggaggacccaagaaatttgtgtacctaagaaaaggataattcctattgtagatgtctttgacagcacgaagcatacgcctatcatggtacctagacagtggttactcacgtcacatgatatgagaaagatgtctgttccaatggctgactttcctatatggtggaaccatcactt

SEQ ID NO: 184109 - DNA, 415 bp, Glycine max
  unsure (1)..(415): unsure at all n locations
agctagaagcacccaagctatcacaaggctctttntaaaatagaaaagggggaacatgagattgacatggtatctaaagccatggtaacgcagtctccacttgaaaaagcactgactatactattgaatgtttgacaacggatgaggaaaaagaactgcatagttgtttacatgaattagaatgtgtagaagaaaatcctcttccaagagcagattctgaagaattgaagaaagacattccatcaaaaaaagcttaagtggagttgaagacccttcccagacatctaaaatatgtgttcttaggagaaaatgatgccaatccggtgatcatcagctatttcctaataaaggaagatgaacctcacttggtgaaagttctgtagaaacataagcagctattggatgacatatttct

SEQ ID NO: 184110 - DNA, 471 bp, Glycine max
  unsure (1)..(471): unsure at all n locations
ggacctatgatactcagcttgcataagttgaggctcgggttcttcttgctccatgggttattgtctntagataaattggtcaatcaatgataggtttttaacattctcctagtcctgatagtacattntggctcttctcttttcatagttgaaatatcatgaggctggaaggaagaaagaatacttgccacaagttggtcaatggaacgtgatgaacaaggttatcttatactttaaaagattatagttacagtataatttttttaagtgaaaaaaaattaaaactacttgttcccaaccgaatgtaattctagttatttcaatgcaaaaagttataaacggaagcactgtaagatattgggcatgtaattctagtgttggaatttaaataataggcatgaacttatttgttataatcttatagaccttgattattggtaaattagtattttcactatattctacttttta

SEQ ID NO: 184111 - DNA, 389 bp, Glycine max
  unsure (1)..(389): unsure at all n locations
agctngtggctntgattctcactcttactgttgtgggagaatctagttgtgggaatggatgattctttgacagaactattgggctatcatcgttgtcttccaaagataccggtggatcacccagttttctgcacacagtgcctccattttttttttctctgttggtgctgtctttgatttaccagaggattatttcattgtaaaaaaacttagaacaaaaacaagaaaaagaaaatgacgtccagggagtatacaaaaaaacaaaaaagatatagtaattagtaataattatataataaaaaaaacttatcagaaacgtgtccaatactttgttggtagatttcataatagaagtcaattaaaagaaaaaccttaatttctataccacg

SEQ ID NO: 184112 - DNA, 478 bp, Glycine max
  unsure (1)..(478): unsure at all n locations
tctgcanagttaaattaaaacgcgtgatgccaactgaggattatgaaatatgaactatgataaatntcttttgaactaataaaactgatctaaagaaggtttaccccccctctctttaagatttggattcatcagcactaggcctaaaggcagcaactttggctgtgtaaattgtaattactgctacaaaaacttgattgttttaaacccaaatttaactcatttcgctctcatctttctgttaggagtcagggtgattattcattcatttacacatgaaatttgattataacagagacgcgtccccttcaatcatcagcagctaggatctaagaaaaatcaaagcagaaaacgaaagctgttcgaagtgatgctctgatctgatggaaacgccgcagaccctagagaaggttgggtagaattcgggtcatgggcttggcccatcanagaagcccgaaagaccgatgtggaggcatga

SEQ ID NO: 184113 - DNA, 442 bp, Glycine max
  unsure (1)..(442): unsure at all n locations
cgctttgagccaaaatcctgactcaccatattccttaccctcttaagctaaaaaagaatagaagggaaatttccaatcaaagaaaaagagaaggaaaatttccaatgaaagcaaaaaaagaatagaagggaaattccaatcaatgaaaaaaaagaaggaaaattccccaatcaaagagtgggagaaagcaaaaagaaaagaaaggaaattcccaatcaaagagtgggagaaagcaaaaaggaaagaaagaaaattcccaaccaaagaatgggagaaagtaaaaaagggaaggaaagaaagttcttgatcaaagaaactagaagaaatatgcagagaggtctgtggaccggacaatatctgaacaatacaaaattgtcaccaaatgaacaaaaaaggaaggaaagganaccacaacctacaatggtcttctccctttaatacc

SEQ ID NO: 184114 - DNA, 460 bp, Glycine max
  unsure (1)..(460): unsure at all n locations
ttattcacgacaaagaaattaaagatattcaagatggatgatcaagactgtctctagagtcttaggaagggtatatttaatagaaagggaattccaattgaagtagcaaaaggtttggccaagaaatttaaattaaaaagtctttttcaagagatttactctctggtaatcgattaccagaggatgtaatcgattaccagtggccaaaaatgatttacaacagctattaaaatttaaattaaaaatttgcactgtgtaatcgattacacatatatggtaatcgattaccaacagttactgaacgttttaattcaaattttaaagcttgtaatcgattacacatatactgtaatcgattacctgaggagattttcagaaaatattctcaacagtcacatctttntatttgattcttaaatggccatcaaaggcatatatatatgtgacttgagacatgagt

SEQ ID NO: 184115 - DNA, 439 bp, Glycine max
  unsure (1)..(439): unsure at all n locations
agcttgacntaataaaaattgatcatttgttattaaaaaatattattaattaattaaaaattgtttttatccgggtttatgataaataaatttattatatatgataatttataattacataagaatataaaaatatttatgttttttgagtgagaacaaaatatagtgtaatatttctttaaacaaaaaattatataaattttattaaaaatgataatataaaattaaaaacagtgaaatttaaaagaataatatggataaaattagtatcaacttagtttctcttttctcttgtataattatttacatttatcttattaaaaaagatatcttgtgcaaacaagaattattttttatgggggaagaatatttatttaatatattaaaataaaaaaataattctatcgacataatttgtcatcgcacccaataaatagat

SEQ ID NO: 184116 - DNA, 463 bp, Glycine max
  unsure (1)..(463): unsure at all n locations
agaaccccanacccanaacagattacaaagttgacaattcacaccccagaataccagattactatgcagtgcccaaaccaaaaggaaacgatgaactacatctgcttcccacaatcattggtgtccaaggtgttgttttatgtaaatcgggttccaattatttcccaattcaaggtaattttttcttagatgcaactccgactatgttttatttacaacatttctaatctacgttgtcaataaatgtttattttcatttcttgaaattgaaattaattactaaataccaataatgattggcacatatgactaacacaagtggtaatgacttatatcatttaactaataattaagtgatataaaatntgaatcttgtagattntagttatgaaataaataatattggaaaaaaaaatacccacttatatggtacactagacgggaataaaaagaaagaatgaaa

SEQ ID NO: 184117 - DNA, 431 bp, Glycine max
  unsure (1)..(431): unsure at all n locations
agcttntcggctcataccgggaacacctctatttcatcacccgtgcagcctaaggcacccacccagagggaagctccccaagttccaactccgaacacgactcgcctggccggtaattccaacacgacaggaacttccctccgaggccatttcaagaattcaccccactcccaatgacgtacgaagacctcttgccgtccctcatcgccaaccatttggccgtggtaactctcggaagggtcctccaaccccttttcccaaagtggtatgaccctaatgcaacttgcaagtaccatgggtgggtctcgggacattccgttgaanaatgcttggcccttaaatacaaggtccaacatttgatggatgctgggtggctgaccttccaagaagatcggcccaatgtgatgaccaacccgctcgccaatcatgga

SEQ ID NO: 184118 - DNA, 474 bp, Glycine max
  unsure (1)..(474): unsure at all n locations
ntaactganacactaagtaagttgccaactcaattgcatgctagtcaacctttaccttcatctgttttgcaggttataggttgcacactttgtggtggagctcatgggtcaggctcgtgtattcccactgaagaaacatctcatgaagttaattacatgggaaaccagcctagacaaaattttaatgtaggtggattttctggatttcaacatggccaaccttagcagtagcaaaatcaatggagaactcaccttggtaatcagttcaataaagaccaaggtgggctacctaacaggccacaacaacaagggcctagcttatttgagagaacaacaaagctggaagaaaatcttgcttagtttatgcatgtgtcattgaccaatcataagagcacagagtcagccataaaaaatctagaggtccaggtagggcagctaggcaaatagcttgcaaaanaatcttctagtactttt

SEQ ID NO: 184119 - DNA, 420 bp, Glycine max
  unsure (1)..(420): unsure at all n locations
agctacaaaacctaagtatctctgtaaaggctgcttctcttgcagcctccagagctcttttcccgaaataagcactgtggggtgctgtggaattctgtgccttgggcattgtctaagttgtaccctaattctcacaagacaagctttagataagctctgaattcatgactttgcgcttagcgccaccctcgcgcttagcacgagtaagtggatntgagcttagcactagtcgtgcactaagcttggccgaagacaactactgcgcttagcacactgatctcgcgcttagcatgcgactatgatattgatgccctgcccgattcttctatcgcgctaagcatgcttgaattgcgcttagcgatggatgcgcacttagcccactaatgagctaaactcaactgtcaggtttggcacttcatg

SEQ ID NO: 184120 - DNA, 478 bp, Glycine max
  unsure (1)..(478): unsure at all n locations
ntgganagtgttgcttttcaccttcttgctaagccaatctgctggcttancgagcgtccgctaagcgcaacactcctaggctaagagcgaggaagattctggaagaagatgagctatacaggttcgctaagcgcaccgcttcatctcactaagcacaccacttcagttcatccgctaagcgagtgtcataccctaatttcgtccggggattattacttgttgacatgcaacctttggttagccgctttgagatacttggcgtcctttgttgcacaataaataaagtcccgagacatgtcagaaatcaaaaggaagcaggctagcgcaatccgtgaaattccataatgtgacggaaatcgaaaggaggtattnttgcgcaatccgtgaaattccgtcatgtgacgganatcgaaaggaggtatntntgcgcaatccgtgggtttccgtaacttcttcgaaagctaanaagagtaaatac

SEQ ID NO: 184121 - DNA, 449 bp, Glycine max
  unsure (1)..(449): unsure at all n locations
agcttctagaataagatggtctcaacaatctttcttatttccagaagggaattctatcaatagacctccaatctttaatggagagggttaccattactggaaaacccgaatacaaatttttattgagcaatagacctaaatatttgggaagccataaaaatagggccttatatacccaccacagtagaaagagttacaatagatggcagttcatcaagtgaaagtataacaatagaaaaacctatagatagatggtctgaagaggatagaaaacgagtacaatacaatttaaaagccaaaaacataataacatctgccctgngaatggatgaatatttcacggtttcaaattgtaagagtgttaaagaaatgtgggacactcttcgattaacacatgaaggaactacagatgttaaaagatctattgataatgcactaactcatgagta

SEQ ID NO: 184122 - DNA, 471 bp, Glycine max
  unsure (1)..(471): unsure at all n locations
ngtagactntngactctgtgttgtagccaatgaaaatactctnttctcctttatcgtccaatttcttcctaagttgatctagagcatgtgcatatgctatgcacccaaaaactttaagatgtctaattgatggtcactgtccattctaggctttttctggcgtcttgtcacaaacacttttagtcatgcacctattcaaaaatgtaaataattgtagcaactgcttctgcccataactccttaggcatttccatggccttcgacatgcacctcaccatatccatgattgttctattctttctttcagctactccattctgctgaagcatgtatcttgttgccaattgatgttgaatcccatgctggtcaaggaaagttatgcaagtgagatattctcgtcctttgtcagttcgaagtactttgattctacacccatattgcttctctaccaacacattgaaagcatcacaa

SEQ ID NO: 184123 - DNA, 378 bp, Glycine max
  unsure (1)..(378): unsure at all n locations
agctagcacttgaggagggaaggatattttcttctgatgaacaactatcttaactatgtgtccttgagattataccgggtatgtctgctaatatgtaaatataaatggtattaggaggtnanntaaaacatggtctaatattactgctaagattgctaggggtgaaaatgaccatgtccataagccatatcctatattatttatatttgcgtattaggagaaaaacaatatttctgatcgactaatatttagagtgttgtcattagctgagattctgttccttcttaatgtaactttagggtaccgctgttgtgcttgaacatacaaaacaattcctttttattgctttttcaaactgaaggttgatgtcacctttaa

SEQ ID NO: 184124 - DNA, 475 bp, Glycine max
  unsure (1)..(475): unsure at all n locations
ccttcactaccaagagagtgccttggataaaagcttanagaggaagcttcaatggaggaagagcttccttgacaagcttccttaggaagcaagtgttacacccctccaattgctaagctcaccccatgggaacacacacccctccaatagctaagcttaccccccccccccccaaatacatgaaaatacaaaaaaaattctctattacaaagactactcaaaatgccctgaaatacaagactaaaaccctatactactagggtaccattaaatngtagggtagggtgcccttaatttgtagggtaccttacaaacctaaaatgaccaaaatacaaggcccaaaagaaggaaaacctattctaatatttacaaagaaaagtgggctcatacttagcccatgtgcccaanatctaccctaaggctcatgagaaccttaaggccttctcctacatctctggcccaatcttcttggagt

SEQ ID NO: 184125 - DNA, 393 bp, Glycine max
  unsure (1)..(393): unsure at all n locations
agctggagaatatggggtacccatcacatgtggtactaggaggcggncgggcgatggtgcacaacaagctttccacatacacaatgcgcgcataaacccaccatcccctggtgccccctacaactgagctcacgtactcccacgtagcccatatcctcgtttctctcaacaccgggtccccatcaatcctctcaagctttcacaacatccaagcaaaacaacattcaaacagcacaagctatcacagccaagcaaaacagagcaaaggcagaaaactctgcttaacacatcaaccaaaatcacagcttttttcacgtaaagaccacagtaacaatttcttcgatccaattcggtaaccggtggatcgactccacaatttactggaggtctata

SEQ ID NO: 184126 - DNA, 288 bp, Glycine max
aaatatgaaccccacaaccattgataacaacatcgtaaaataggaaagaaacatgcaccgtccaacttgacattaaagaggaacatgtgactcaacatgacaatgaactctcaatggaagaaaagaacaacgtcaagtatctacgcgcatgctgacatagtcgcgtgggccacgaccgacataccatggatagatccggcctcccattggcatagataattgacatggcgagatgcttagctccatgcttatatgaaaagaaagatgggagaagaaaagtgataggca

SEQ ID NO: 184127 - DNA, 461 bp, Glycine max
  unsure (1)..(461): unsure at all n locations
ntagtcaaacagaataatcccaaaatgtcatagaattgttcgttgaaaaagcataacaattgtgattggtttaaagatacaatctttgcagatgagaatgcttcagaaacattaagaaaactagcagatgggcctaaaagaaatgttataacctggcaaggatacgacataaacaggtattcattttacacaaaagcacaagatgacaaaagtacaatgcagaacagcgaggtcaccctaagggctgaatctcaacactttgcaagtgtcaatgacgccaatccctgtgtagcttccatcccttactttgggttcattgatgaaatttgggagcttaattatgtgaaatntacagtatgtgctttcaaatgtaaatgggttgacaacaacaccgatgtgcgcaccgatgatataggatttaccctggtagatctaaagaaacttggttaccacaatgaccc

SEQ ID NO: 184128 - DNA, 405 bp, Glycine max
  unsure (1)..(405): unsure at all n locations
agctagcaaaccaaatgctctccactgttataggagaagccttcaagttgtttcatataaacctcttcctctaaatcaccattaagaaaggttgcttttacatccaattgttgcaactcaaggtaaaatgagcaactaatgtcaagataatacaaagaatttttcttagataaaggagaaaaagtctatgtgtaatcaattcctttttttcccttagtagtgagtcttgccttgtaactctcaatgttgactaatgaatcctttttggtcttaaagacccatttacagccaatggcctttgccccattaggcaactctaccaggttccaaactctgttactctgcatggaattcatttcatccttcatggcatcataccataaattngactctttacaactcatg

SEQ ID NO: 184129 - DNA, 433 bp, Glycine max
  unsure (1)..(433): unsure at all n locations
tcacaaanagtcactgcaataaaaaggttgtgggggtaatagtgttctaccatggatatgaagcagtagttggtagaattaatgagcaaaaagagtataagtcaccaagagatcaagataggcatggcactcatgcagtagctacggttggaggctctcctatgcatggggctaaccttctaggttatgctaatggcataaccagaggaatggcaccgggtgaaaggattgcagcctacaaagtgtgttgggttggtggctacttcaactcagatattgtgtcagctattgataaaaatgtggctgatggagtgaatgttctttacacctctttgggtggtggagtctcctcttattacagagatagtttatcaatgattgcatttgaagcaatggagaggtgtgtttttgtttcatgttctgctggaaatgc

SEQ ID NO: 184130 - DNA, 403 bp, Glycine max
  unsure (1)..(403): unsure at all n locations
agcttgaaggataacttgatgccttggtcatacctaaaactcagcttcccataaataagaaatctgcacctgttgcaagagtctatggtctatgttcttctgcagatcaccatacanactctgtccttctttgcagcaatctggagtcaatgagcaacctgaagcttatgctgcaaacatttataatagacctcctcaacagcaaaaccaacaacaacagaataattatgatctgtcaagcaacagatacaatccaagtaggaggaatcatccaaatctgagatggacaagtcctccaaaacaacaacagcctgtccctcctttccagaatgttgctggtccaagcaagccatatgttcctcctccaatacagtagtactcacaacanagaccacaagcaact

SEQ ID NO: 184131 - DNA, 468 bp, Glycine max
  unsure (1)..(468): unsure at all n locations
tatatgaacaaaatngcctaaatcatttccaaatatgcatgtgaattangatgcatcaacaagaatcaagccaaggctattgtgcaagcaatcaatagggaaaaacacaccaaaagattatgatgatggatggctcaaattctcacaaaggtaaacttatcactttcaaattgagctttcaaaactatcatgacatgtagaggaaaaacaaggatttcaaatcacaaaatgtcaagagacttttattttcagaacaattacccatttcttgaacatatcctataattcaaagaaaaatatgcaaagttgtacatgcaaacagaattgacctaaaatattaaactagaaacccaacaaaactaacaaaactaaaaaatntaacgcatacaaaactaacaaaactagcaaaaccaaaaccaaagaacactccctccatacttaaacaacacattgtcctcaatgtagcac

SEQ ID NO: 184132 - DNA, 422 bp, Glycine max
  unsure (1)..(422): unsure at all n locations
agcttgtagagttgagtctcgtatcantttaatcaattatagtagtctcataatcaattacactattgtttgagacaatgactgatttattcaggagtctctgctttaatcattaccaagtggattaatcgattacttctctctcatttaattgttcagaggtgaacaagaacactttaatcaattacttagagaatttaattgattacattgttcttgagttatttctagatgttgggaagaacactttaatcgataacttagataatctaatcgattacttcattgaattaatagattactttgtagatttaatcgattataggcgggtataattggtttctctataaataaccagcttgtgttcactccaatacacacaatcaacacatccagagaatactcaatatctcaaaatatca

SEQ ID NO: 184133 - DNA, 441 bp, Glycine max
cgatttccatatatggttaaccaggatcaggcatactctggtgtttcctctcggaacaccttaacattattgacaagggtgaaagtcttcgtctctatattcgtaatgaaagtaacaacatgacaagttatcaagcaatttaacaaggcatgattgaaagataatcaatccataacaagattaacagttgattgactaggatgcaataattttaaatcaagaaggatcattcgtttagaatcaacaacaaatattccaaattaattctagaaacgaaagcatgaccacagtgtacacacatatggagactttaacaatcgtttgattgtgacagaaacatcagtagtaaaatttgtttgatgtaggctcacaacacacagaaagaattatactcgagcttgcaagtataatcgagttacatgacttcagcacgcaacatat

SEQ ID NO: 184134 - DNA, 418 bp, Glycine max
  unsure (1)..(418): unsure at all n locations
agctatgagggtgcgcagcccaccatctttttatagtagagtaccgattatgtgtctaccatcacgattatcgtctccctttccattattgggggtaccacctgngccgccagatccctccaccttttgggcgtttctttgaatgatccgtccccctttttgcacatgttctgtagttgcatcctatccggaaccatatcaaaattgtactgatactgcctaacaaaggcaaccattatgtccttccaagaatggactcgggaaggttccaagttagtgtaccaagtaacagctaccccagtaagactttcttggaaggaatgtatcaacaattcctcatcttttgcgtattcccccatcttctgacaatacatctttagatggttcttgagacaagtagtccccttgtacttgtcaa

SEQ ID NO: 184135 - DNA, 465 bp, Glycine max
tctcatgtccggtcatggaaagactaggcaactgccttcattaggcagtaccaatacaacacggatatggctcccgatcggaaccagctttatagcatgaccaagcgagaacatgagtccattacagaatatgcccaaaggtggagagacctcgcagaccaagtcgttccgcccatgactgatagtgagatgatcacaattatgggagatacgttgcctacgttctactatgaaaagctgatagggtacatcccagctaactgtgcggacctcgtcttcgcccgagaaaggatcgagtccggactaagaaaaggcaagttagaatatgcctccaacgttacccccaacaacaacagaagagccccagtggtgggcacgaagaaaaatgaaggagatactcacgcggtcaccaccagcccaacatggatgatagcgccccagaatatcctaaactcataccagcac

SEQ ID NO: 184136 - DNA, 451 bp, Glycine max
  unsure (1)..(451): unsure at all n locations
agcttattattggctacaaattcatatctattactaaattatgttttctcccacttaatatctacctagaacatgatttgggtatcaaacaaacattgatgcctgtcatttcgacagatattgtgagtannaattttatcaattcgattcaataaacactaaatcaatatgtatctcatctcattaatcgacatcaattatactcattgacaatggatttcaaatgcttatgggaaaattcaacatcattaaaaattaagtctgtcgaatggccaatcttcaattagcacatgagacaagtaacggaaattgcaaaatccgataccaacacgtttatcaagtatttgcactactaatcaatntagaaaagttgtgtcaataaagaaattcaagtaaagaagtcaaataataattgagaaaaacgtaataccaaattctatatattaagcgg

SEQ ID NO: 184137 - DNA, 459 bp, Glycine max
  unsure (1)..(459): unsure at all n locations
ctcagctntttaacagtgtgccttctcaatttgcaggcaattgcatatgtttattgtcaagcaacagatgttcaccttgcaagaagagaagtcaattatgtgaacacagaattggtaagttaagctatgtggaccagtgcatcattttgtgtttttagtcgttttaacatattgaaatgtcagttcgttgtgcattatccaaacatttgttggattccgtcaaccgcagagcatgatattatgaattatgaattatgttgcatttgggcttcacaaatagacttgagcatgctntntgggttactatgaactcctaagaatgtatgttttactaatttatcttaacacaggctgactgaaagagtattgtaacagctcacatgcacaatgcttaaatatattataggttaaactgtgtgcacagcatatggaaaaaacacctgagcatattgaagctga

SEQ ID NO: 184138 - DNA, 433 bp, Glycine max
  unsure (1)..(433): unsure at all n locations
agctanttgaagtagaaacatgggaccaactctatttatttcanaaaggaagtcgtatctagtcaaggtctaagagaccatacaagtttcctaacgatttctaattatgtgggccattaagtctatcaatgctgacaatagccgagaagcccgtgaatcttttcgggggcggagtaagtgtctgccatcgctttggccttggctaacaatcggggaagttcttgactcccgttcaaggtaagagcaaaccgatccatccacatggttgcctcttggtgtaaagagtcgatcacccttcctctagctctttttccacggatacttgagcatactcgtccgcaatcctatgctcatgggccgcagctagacctaactcttcttggtacttggcgatgatagctagcatgttggtctgcgtattgcataatcgctg

SEQ ID NO: 184139 - DNA, 466 bp, Glycine max
tgtcattggagctgacccatcaactgccctaactctttatgattggtgattcctatgttcttgaccttgactcgatagaacctctttttaagcgaaggcgcctgactcgaccccatgttttactaaagtgaaacaaaacccagtgcaaatcaaaactccgacatctatcatgggtggaatggatgaatgcatgaagaaatgcatatgacacagatgcaatttatgaatatgggagctcggagaattatccccttcttagatacaacgtttgggcagcatggcgcccgacgcatgtatttaaaaaggtgacacggaccctccatcggtttgacaaagtgaggggatcaagacggaactcgtgcatgatgcatatgcgaagggcacaacacggggatgtacatagtacggcaatatccacaacacaatataagcaaaggggcacatgacatttatgactacatgcatg

SEQ ID NO: 184140 - DNA, 426 bp, Glycine max
  unsure (1)..(426): unsure at all n locations
agcttngattaatggattgatgccataccatttcatggaatgctattgcaggaccattataggtcacccatcttctatcagttggaataactccttgaaccaagcaaacaagagattcccattggttttcattatggaatcacccaccagcattattctctttcttctcattttacttagaaatcccagtgcatcaaacctgtaggtgtcataaaaaagccaaatttatatgttactttggccaagagtggaattgattactaactaataacctcctaagctctctagttgcaagtaaacgcctatcttccaactgaattttgagctgtagtaattctattttcgagattacaatagccaaaaaagagggagaaaaatatattcttcatgcgtgcatatanaagtaataataatcataataataat

SEQ ID NO: 184141 - DNA, 468 bp, Glycine max
  unsure (1)..(468): unsure at all n locations
tatgatcagttagtcatgaaattatctgatcataagtgtgcatgatgatatcacggtcttgatgtatgatttaactttatgattcccaaaggtttgatgcaacggttacatgttccccctcgtttcttctaatattgtataatggttgcttgtggatttcatcattgcactgttggcattttgacctaaagtaggaagctacaactacaagaggccattatgctacttctttgcttctttggttccacagtttgtcagaatggtttgggagagaaagggtgacgaaccgaacgaacttcataaatgaaaagaagctatttgctttggaaactgacaagtgttgctagcttagaagtgtgctggatctnagtgttatagagttgccatgtttcgttggacatccctcgtattgcactatagatgatatacttcgtacactacacgtggtagttggctctctcctttcat

SEQ ID NO: 184142 - DNA, 449 bp, Glycine max
agctagtctaccataatatatgcgatgacttaaattcatgttttactttattggcgaaggaaatggtgggggagtgtgagaaatcttcaaaattaatgaatagtcatgtggcttcatgaaattatgtgtctatattgtatccaaatatacatacgcaatcgtgtgactctctgcatctataatttccatgcatcaaaagagatggaatctttctcaaacattcccaatttacatgcagaataaacaattgatatagacttcaccaatccttttcattcgaatcgcttcctttctttccttatgcataaagaaaattaatgaaatcattctttcgctaactaccattgacgatatgctttatgtgggtgtgcaaaccatttcaagaaactccattatatctaaaaaagatttgccaatgcaccttattgcatctaatttctatatcaatt

SEQ ID NO: 184143 - DNA, 483 bp, Glycine max
  unsure (1)..(483): unsure at all n locations
tcaaccctttccttaaactcggcaagggacctgagatgttgttcccactcanatccaacaatgtcaaagatctcaaactagtccaattactacgtatcccaccactgatatcattacctcccaaccttatctcaacaagagaatccaactctgcaacagaaggactcaaagtcccactaatattaaacttttccaaaagaatcatgtccaccttcccatccccattgcaccttatccccaaccatggcccatcacaagggtcattcccactccactcatcaaccaaaatccgaggataccccaaccctccaagagactccaacaacaccatcacctcaaaaccacacataaccccgggtttggccacacaaaattcattgttctcaaagctcactttactcgctgcgaaatccgggatcggacccacgaaatggttgntattcanatccaatctatccaacttcattccacccacaccactcg

SEQ ID NO: 184144 - DNA, 380 bp, Glycine max
  unsure (1)..(380): unsure at all n locations
agctaggctcttatagctatctttgnggatttctcggccacatcgaagatcattgttgcaaactattatccatgtcccaagatgatggaaaccaaggttgggggactgctttgctagctgaaatcgacccgatggtggaattggtgtttgatcttacttatgtgacgacagagacataagctcacggaaattttatagtgaagggagacaagggaacaatggcattaatgacaatggttgtgctttcattgccaatccagaggcaagcaaaaattgtattgaatttatggagtatgtgtttaanaactctaaatttggtacacccattatttacaatacaatgattatggagaataaaagcaatcaagagctcgttattg

SEQ ID NO: 184145 - DNA, 416 bp, Glycine max
  unsure (1)..(416): unsure at all n locations
tgtacactngatcaagtcagagtgtccatatctggagatttatcacgatcagaaattctttaagactagaaaagaaggggcttatgtgcatgtacgaacaactggatgacacgctctcatatgaagacgatgaggagacccacatacgccttggctcttgaaggatctgaatcataccaggacgatgagcgtcatatcgatgaacctgagtctcttagagaagcttatcatgaactcttatctaactcattgagtctttgaacagcttgtcataaccaagggaaagatttcaaacatctatccacagatcatctaaagcttgataaaacccttcatgatcaagtatatggttcattggacgagttcgctcaagcatgtagagcttgtgacactcctaaagataaagagtcctagtt

SEQ ID NO: 184146 - DNA, 438 bp, Glycine max
  unsure (1)..(438): unsure at all n locations
agctaaggctgttaattgctcaagattgttgacattaaggcaaaggtctatatagtggtcgtcagaggagcataaaccatagagtcttgcgacaggtgcagatttttgattcatggccantgggttaccaggttaaccaaggcgtctggtttaccttcaagcttcttagtttcagatgatgcagctgagtttgtggctacctcatgcactcctctaatgactatagcatcacttctggtgctaaactattgggagttggatgccatcttctctattaaatttcgagcttcaacaggggtcatgtctccaagggctccaccactggcagcatctatcatacttctctccatgttactgagtccttcataaaaatattggagaagaagctgctcagaaatctggtggtgagggtaactggcacatagntttttaaatctc

SEQ ID NO: 184147 - DNA, 180 bp, Glycine max
tgtgatttgagagtttccttgcttaagacctccctgaactcttcatgtgctcaatggcccagactgctcaagtcgaagcagcgcaagctttcgccgtcaataccttaactgacacccctcaactaggagggttcgacgactcatagcacattctgttcaagatggcccggccatgctctg

SEQ ID NO: 184148 - DNA, 399 bp, Glycine max
  unsure (1)..(399): unsure at all n locations
agctatgggaccattatcatatcaagctctatcaacannttaacncataatacaaactcttggtggaatccatcctaaactactaagaacagttgtttaattggttaccactataaaattgattattcatctccaaggtgcactccatgttgatcattttccttcatatattatgctctccaaagaattccttgaaaaatatacttttttcttctttgtcaaataaagttaacagaatacgaaatctcctgtgccattgagaagataccatcgaatagtgacttaaatattcaggtagccaataatcaattgtacgtgcaaaaaataaacgtatgtgaaaccaagtgagacttctacgcatactcctacatcctcccatcacacaacaatgctaactgt

SEQ ID NO: 184149 - DNA, 412 bp, Glycine max
  unsure (1)..(412): unsure at all n locations
taaatcctgaagcaatggtcaacctttgaatgtttgttgaagtaatcttgaaagtaacattgcttgattattctttgacatcatccaaaccatatattcatacattcacaacacgatatacataagagattcacacatatagttaatcctcttgcatcaataggaaagatatttcctaacgaggatctcattaacaaagttcttagatgtttaagcaaggaatgacaaccaaaggtaacttgcattgcagaatcaagagacctcactaacatgtctcttgcaactctntttggaaagcttcaggaacacgaaatggaacttatgagactaaaccaacatgaagaacatgtcaagaaaaagaaaggaatatcacttatagcctcatcttctattctagaagaaattgacatat

SEQ ID NO: 184150 - DNA, 362 bp, Glycine max
  unsure (1)..(362): unsure at all n locations
agcttaagatctangagagcattcatccttttatcaactattgnncttattaacccagcgttaactactggccttttacattaaggcacctagcctcaaataatagctcacacgaaattattcttgaaatatcctttttcgcttttttcttattttagcagcttatatttactgcttcttgaaaaattcgtgtggttgttatttgtcataccactcttattattaccccccaatctcccccaaatttggggcaaaattgcctttaaccatgatgctttcttactacctacaaaaaggtggatggagattatgaatttacaagctcaaagttcagctcaatcacatcaaaaaaaactcaacat

SEQ ID NO: 184151 - DNA, 465 bp, Glycine max
cctctgaacaatatacttggccttcatttaactgtctttggttttgtcggccacgctcaacaaagtactttcgacacctactgtacgttgatctcaccaatgccgttatgggaatgttgcgacaatcctttaaaaccttattgatacattctgagaggttcgttgtcatgtggccatatcgacgtccttctctatcgtaagccatcgtccatttttcttttgagatgcgatcaatccatgttgctatggctggactcacttcacgaaatttttctaaaattttatcaaaaatgtgcttgcaaggagtatacgctgcataaaattagttatgaataacaatttacagtataaatgaaagtaaaataaacgtgaccatcaaatatgaaatgttacccaatttcttcaacatttctttgtgtatggcattattgaaatatcgattgaagttgcttgctatgtgtcgca

SEQ ID NO: 184152 - DNA, 443 bp, Glycine max
  unsure (1)..(443): unsure at all n locations
agcttcaggctgctcaattgctccaggttgttgcatggaagggcaaaggtctgtatggtggtcagcagaggagcacaaaccacaaacccttgcgacaggtacagatttctgattcaaggccagctggttaccaagttgaccaacgcatccagtttgccttcaagcttcttattttcagatgatgcagatgggtttgtagctacctcatgcactcctctaatgactatggcatcatttctggcactaaactgctgggagttggaggccatcttctcaattaaatttctggctttagcaggagtcatgtctccaagggctccaccactggcagcatctatcatacttctctccatattactgagtccttcataaaaatatnggagaagaagctgttctgaaatctgatggtgagggcaactggcacataatntcttaaatctctt

SEQ ID NO: 184153 - DNA, 436 bp, Glycine max
  unsure (1)..(436): unsure at all n locations
ntataagtgcgggtctgagagacgaaggtcttgtgttctctatatgtgaagatgatgttccaagtacttcggatttggtccgaccatgccctcctgatttccagctgggaaattggcgagtggaggaacgccccggcatttacgcaacaagcataatgtaaacctttacggttttaaaagctctatagttgggcctgggctttagagttttcattttgttaaggctttgtgtcttttgtttttgaatttataatacaaggatctttcttcatctgttcctggtctctacccattctcattcatttgcatgtttactcctttttctaaaacggcagattcgatgacgagtcccccgaaggtactaatacctgtgacccgtctatcaacttcgagcaagaaatgaatcaaacggaagatgaaggagatgaggatgtgg

SEQ ID NO: 184154 - DNA, 382 bp, Glycine max
  unsure (1)..(382): unsure at all n locations
agcttntaacctaatggacattctttgtatttattcctttgatagcccttatgaaccttgtttccctttccttgttatgaagctcactacaagccttaattgaaaaaccatgatataccatatccttaatgaattatggagctttggaattgttttgggaataagtgtggggggttttagtttcattggacaacttgttttgttggctatgcttcatgatgtatattgggccatacttgatgtacattgtatattggttaaatgttggacatgctgaatgaaatgttgtttttcaaaagctataaagtgaaaaaaaaaattcgaaaaatgataagaaaagcaataaagtgagtgaacaatatttaaatggacaagaatgata

SEQ ID NO: 184155 - DNA, 464 bp, Glycine max
  unsure (1)..(464): unsure at all n locations
tatgcgcatatttccttacatacgttctctngcacaagacatttaaccgaaaaagtgcacccatatacaatcaaggcagcttcgttacctagattatttacacgtactgccaaggtgtatttgttacttacatcacacacatctccttggctgaatttacatacatgcatactcaaagcattttggggtaccaaaaattgcacatgtgcacatcttggtatttctaatacctatatatacacaaacttcatgatgaatcttgactatcttcacaaaaaggtgctacacttcatcccttntttcaagtttttgctacctaaagccgcatgcaaattcaagcatattttcctttgcggactaaaattgtattcaaattaaaaggtatattttttgtaatatngtttcttcacataacatgcaacatatttatatatatatantttttttgcgagacatttgactac

SEQ ID NO: 184156 - DNA, 367 bp, Glycine max
agctttggattgagttgcgtccgccattgtatgcaatgaaagaaccaatgttacacttggattttgaggaccaagcgcctccagaagtgcagagaagaagaagatggaagtacgtatattctcattcctttgaacaccttattacaagctatttatacgacaaggttcttaacgaaatctagaaccttctaagaaaaacttctaacagaatcctaacaacattggtgtgacaccctctacccctcacatatatattaataaaggaataaaaattcaaatattaattaaaagtatttttaaaacatttttaaatacaagctcttcaaatgggtaaaaagctcacgttcactttcttctacatcatatt

SEQ ID NO: 184157 - DNA, 464 bp, Glycine max
  unsure (1)..(464): unsure at all n locations
tgaacgtaaattaagcgcagagacaattaatcaagcactaagcatgcatgaattaaaagcaacaaattcaaagtaattagtgaagaggaaaaactaaacagaatttaacagtaataatagaacctcaaagagaactgtgcttgatcctcaagggaaaacaacgctgcggacttagccttccattaatcaaatagagaatgaaattttattgataaaactaaaagtctgaactggaattgaaaaaaaaacgaaaattaaagagaaagagaagagagactaaaactaaaaacgaaaaatagaagagagagaggagagagagagagtctcccgcgagggagagagggcgtccctaaactagaaccttggtgctgttatatatgttttttcagccccaaagcttacaaatatgttttaaatccaagcccataagtnaaatcaaatcaaatctagataagataagataa

SEQ ID NO: 184158 - DNA, 447 bp, Glycine max
  unsure (1)..(447): unsure at all n locations
aacaaatcaaacatagtttttaagttgatggctcattgacattctattttcttacatatagatacaataataagctcaaagtctaaaatctcagtatatacaaatggtttttgggagctagaattcaacttatggattttttacaaagaatttgaatgctaagaatggtttttcgtgtgttggtttctttgactttagcacttcaaatatttagctatttatagctttcaatagaagataaccattgagactaaatgattntcatctttatttgttggtaatggtgtttattggagcatttaatgcaacatttaatgtacgtcaccaacttgtcaaattgatgtgantaaatgactttcttatctttcatttcccacatcccatatcttgtgtcagtagtcaaatatccttttgtgtactcaagtgcattgtaacatgctttagcat

SEQ ID NO: 184159 - DNA, 469 bp, Glycine max
  unsure (1)..(469): unsure at all n locations
gtatggtntgaaacaagcaccaagatcgtggtatgagagatngagcacttttctaattgagcaatcttttactaaaggagaagttgatgaaacattgtttatcaagaaagtaaatagtgagttattgattttacaagtatatgttgatgatataatctttggtgctactaatgaaattttgtgtaaggaattttccagttgtatgcagaaagaatttgacatgtttatgatgggagagttgaacttcttccttggactccaagtcaagcagatgaaacacggaaccttcctatgtcaaaccaaatattgtacataactaattaagaaattcagcatggaaaagtgcaaaanagcatcaactccaatggcaacttcaacctatcatgacttagatgagaaaggtaaatcagtttatgagtcaagatatagaggtatgagtggtttacttctttacttaactacaagtaga

SEQ ID NO: 184160 - DNA, 428 bp, Glycine max
  unsure (1)..(428): unsure at all n locations
agtcacctgcggcatgcaagctntgactccaccttgttggtgaaagaggttatccagtgtctatggtggtaaccctgaccagtataagggttacgggtttgtcaaggcccccccagcttggacaagcgttgtccgagttgtttctgctangtgtctaaggtgaacccacttttcactttgtgagaaaagtcagacgttccttgtgaaaaatccttgtattagacaattctaccctttntttaccgttagagggcacattgaagagaggtgtttcgtttttcttcaaagtgggtgcatgtatacatgcatattgctttttatatatgtgtcacttcataaaagggcacgtcttanagacacgttgcatgggttggtgggattacatcgtggaatgaattttagggtgtcatttaactcatgctaatact

SEQ ID NO: 184161 - DNA, 439 bp, Glycine max
  unsure (1)..(439): unsure at all n locations
tcagttcagcatanaaccatctagaagagaaagagatgtctttgggcttgcatgagttttttgcctttccctgctgttctaagctcctgtattntatcatgtcaaacttggtgcctttatttgtgttcaactcgctntccttgtttcttgtgtcctgttcctgtatattttgttattatcatgaatgaaagttctacgaagctgatcaagaagatgaataggcaattcctggggtatntctacactngtgtacccttcaacaaattgactgaaaaacataacatgtttataccataatcactccggctgaattatatttaaaatcttatacaatatnagttaaaacanatctctatcatatgtacannttgacattgtagtaattgagattctagattatattttttggccctataaagtnttaaaatttttaattttc

SEQ ID NO: 184162 - DNA, 436 bp, Glycine max
  unsure (1)..(436): unsure at all n locations
agctttatgtgaaaggatgcgactcttcctatttaaatttgtttttcaactttcaaaggcactgctaatcgattaccaaaacattgtaatcgattacagctttttgaaatcaattggaacgtntgaattcaattgaaaactttttcaaatccattttgctactggtaatcgattacaacaatctggtaatcgattacaagaaagtaaaaactctttggtaaacatgttttgagaaaaatccatgtgctactcaatttttgagaaaaaccttttcatacttatcttgattaagccttctcttgattcttgaatcttgagtcttgaatcttgatctcttgaatcttgattcttgaaatcttgatctcttgaatcttgattcttgattcttgaaataaacattcctcttgaatcttgaagcttcttgagtctatcttga

SEQ ID NO: 184163 - DNA, 496 bp, Glycine max
tacggacctataaaactcaagctgtggatagttggttcacgacaatgaccattatgcacactacccatgctgatgtagtccttgccaacaacacatactcttcaaggccgaatctaaagtacaaagtttatcaattttatttcacaaacttactcacttgatgataccaacactttgtgtcaacagtctgtaggatctctcatcataaacatagcatgtgctatacaatttatgtgtgtcaaacaaagtacaggaaataacactaccaacatgttaatagataactcactttataagaaaagtaaaatttctctgctgaaattcttgcaagctaatttgttcttctttagaatacttgcaccagagaatagtagataagtaacttgtagttcgaaaactgtagacatcacagaccatgtagcagatgcaaaaaacaatcttcataatcatcatgagtatatgaacattatgaggagtcgccctctcttaatattca

SEQ ID NO: 184164 - DNA, 434 bp, Glycine max
  unsure (1)..(434): unsure at all n locations
agcttattggattatggtgcacccgtcatatgtggtactatttggctatcgggcgaaggcgcaattcaactctcccctttccacaagtcaattataaatacaccctccctagttgcccacctttcaactagctcatgcactcctacgtagcccttatcctcgttcctctcaacaccgggtcccgatcaacccctccaagcttccacaatatccaaacaattcaattccaattatcatgaaactaccttaaaccaagaaaacagagtagaggcagaaaactctggccaaaactcattcaaattccacagttttccctactcaaataccccagtaacaatttcttcgttccgattcgataaccatnggatcgccttgaaaatttactggangtcctagacataaactacatttgacatgggatctgctgaaatatt

SEQ ID NO: 184165 - DNA, 458 bp, Glycine max
  unsure (1)..(458): unsure at all n locations
tgtaggattatggggtacccatcacatgtggtactaggtggcggtctgtcgatggtgcacaacaagtttttccacatccacaatgcgcgcataaacccaccatcccctgttgcccacctccaactgagctcacgtactcccacgtagcccatatcctcgtttctctcaacaccgggtccccatcaatcctcccaagcttccacaacatccaagcaaaacaacattcaaacagcacaagctatcacagccaagcaaaacagaacaaaggcagaaaactctgctcaacacatcaaccaaaatcacagcttttctcacttaaagaccacagtaacaattccttcgatccaattcattaaccgttggatcgactccaaaantttactgggagtctatagtgcataagcctacanttggaccgttgggatctactggcaaacatccagaactcattctgcact

SEQ ID NO: 184166 - DNA, 405 bp, Glycine max
  unsure (1)..(405): unsure at all n locations
ttgagccanaatcatgactcaccatattaccttgacccattgtgttaatgccaatccttaccctcggaagcaaaaaacgaagagaatgaaaatctccaatcaaaggaaaaaggagaagggaaatttccaataaagaggaagcaaaaaaagggagagaaggaaaatttccaatcaaaggaaaaaagagaggaaaggaaattcccaatcaaagagtgggagaaagtaaaaaaggaagagagaaaaggaaagaaagctcctgatcaatgatcgaaagataacagaagaaatatgcagaaaggtctttggaccagacaatatctgaacatatacagaattgtcaccaaatgaacaaaaaaagaatgaaaggaaaccatgacctatagtagtcttctccctccgattacc

SEQ ID NO: 184167 - DNA, 448 bp, Glycine max
ggccacccagctcacccaagcgagcaaggttgcttcctccataagcaacaaccttctggaggaatcttctggagggcccaagtgggcctggttgctatttgcacccccatttttactaaatacaccccctgcccttttttggtgattcttttttcgtaaagttacggaaacttacgaatttcgtaacgatacttgttttctttctgtaatgttatggaaccttgcggattacataatcatcccctttttgacttacggaatgttacggaacttcactaattgtgcaacgatgcttccttttgatttccggtgtgtcacggaaccttacggattgtgcatcaatattttcttttgatttttggcacgtcacggaatttcacaaattgcctaatgatgggtgccaagcacctcataatgaccaaaaacaagttgcatgccaccaagcaca

SEQ ID NO: 184168 - DNA, 436 bp, Glycine max
  unsure (1)..(436): unsure at all n locations
agctagatagtggttaatttatactacgtctttcctatacgaagacncgcacacgtcttgattatctaattgctatacattatagtgatataactgtgatgcaatccattatatggataactatcnaaccgtctttgcgttatgaacaaaaattatttggtgcaaccaaaatcaatcttgcatgtacaatacatcgttggcataatttgcaacacataatgatatgcatgcgtattatagtttgaacgtgacacgacattgacttcttttgaaacatatacacgaaacatgtccactcgatgttctttttaaaacaaaaaaaaaaagtgaagcaatctcgcgtcgataccattgtttatatgatacacggcgacgctaataatcacacatttattgccttacatactctcgaattgatacacaagttggcatttta

SEQ ID NO: 184169 - DNA, 435 bp, Glycine max
  unsure (1)..(435): unsure at all n locations
ntgactaggcccnttgtctcttgaatctctgttatgtatttcccaagcagttcatctgtgaagtctccgtcaaaggtgtctatgtaggtaaaaacccctgtccgtcaagtttttgttttccttcgatgtggttgaatctagtttgttcttagtcgaaagggtgtctatttgttgttttctggaaccgagtgaagagatcgagttaagcttaatgggaatgtgagatatcttcgtttcgctaaggtagcacctggtttgtagcaagtccacttcggtgaatctaattaacaaaaatatataccccaagcaacgataaaaaacatgtcccttcggngacatccgaggaaattgaaagcatggcccttgcgcaaggatgacacgctcttatcaagaaatgtgtccatttatttttccccatgttccttctttcaatat

SEQ ID NO: 184170 - DNA, 410 bp, Glycine max
  unsure (1)..(410): unsure at all n locations
agcttgagcaaatncaaacgacaataacttttgactctgatgtccgattgtgtcccgttggatatcgagacgcacgtaattgaaaacggaagctcttagaaaaatcaaacgacaataactttagctcagatgtccgattgaaccctgttatatatcgagacgctcgaaattgaaaacggaagctctaagaaaagtcaaacgacagtaacttttgactcggatgtccgatatagtctcgtaatatatcgagacgctcgtaattgaaaacaaaagctctgaacaaattcaaacgacaataaatnttgacttggatgtccgattgtgtcccgtatgatatggagacgctcgtaattgagaacggaaggtctgatataaatgtaacgacaataacctttaactccgatgtctga

SEQ ID NO: 184171 - DNA, 424 bp, Glycine max
  unsure (1)..(424): unsure at all n locations
tctgttntcaatttcgagtgtctagatatatttaaggactctattggacatccgagttaaaagttaatgccgtttgaatttgctacgagcatctgttttcaattacgagcgtctcgacatactacgggacacaaacagacatccgagtaaaatttttttgtcgttagaatttgcttagaccttttgttttcaattttgagcgtctcaatatattacgcgattcattcagacatccgagtaaaaagttattgtcgtttgatttgtctcacggcttttgttctgaatttcgagcatctcgatatactacgggacacaataggacatccgagtaaaaagttaatatcgtttgaattttctcagagcttctattttcaatntcgagtgtgtagatatattacaagactctattggacattcgagttaa

SEQ ID NO: 184172 - DNA, 303 bp, Glycine max
agctagatgagcttctacagaaaatggtgtttctcgaatctcacccgccatctcctatctcttcctctactacgccccatgttccttcttcaaccaaccctcaccgaatgaaattggaatcccttattttgatggtgcaaatcctttggggtggatcttcaagattgctcaattctttgagtatcataccacaccaaaacctgaacgccttacaattgcttcattctacatggatgagtcgatgctggcatggttctagtggatgatgcgtaatggtcagttagtgtcctagttggggtttct

SEQ ID NO: 184173 - DNA, 438 bp, Glycine max
  unsure (1)..(438): unsure at all n locations
tgtccttggtttaaacatgtatggtacatgatttgngacttgtangattcgatttgggcaaaattggatgagggaaagtgtgatttcgaaatctgcactttatgcagaattttgtataagtgcagaaaaatgctatgtattttctggttgtggacagagtattacaaaatgagttctggatgttttctagtagatcccaacggtcaaaatgtagacttatgtactagagacttccagtaaaattttcgagtcgatccgacggttaacgaattggaacaaacaaaatgttactggagtatttgtatgtgaaaagctgtgatttttggtttgtgttctgggcagagttttctgcctttgccctggtttgcttggttnttntagttngtgatgatgggatgttgaatttcttggatgttgtgggagcttgagaggattgat

SEQ ID NO: 184174 - DNA, 404 bp, Glycine max
  unsure (1)..(404): unsure at all n locations
agcttccatcaagtggtaatcaaagcacatatatcttctattangngctccttaaacctgcataaaagtcatgtctagtcatgaaacttgtcacataagatttcttatgttgtgttgaatatattttcttggttctttgnctaactcatttgttcatgagtgtatgaaattcttttagcctattatttgatttgagtcaaaactttcatgttaattagtccttaacatgttcatgcaaaattcttaaagaggctttgattgtgaaccttttcatgaacttttaagttctcttatgatatggcaattgtgaaattgagttttggtgattgaatttctggctgaaatgttgatcctatgtgaatattgaacttttaagattgtggtgaacaatcctagtgagttca

SEQ ID NO: 184175 - DNA, 395 bp, Glycine max
tcttatccaaggctcatattggtggtgaagctccttcttcatggcttattccctagtggatggcgcctcctctcacctcttctcctttgtcttccgctgcatctcaaaggtggaacatcaccattaaaggacctcattgaagctcaaagatccagcctccatagaagccccacaagcaagcttctatcatgtggtatcagagcacaagagcttcaagtaggtgctccttaaacctccattaatttttttttctttaccttctcttccattgttgtttcttcatttttctccatgtatctcctcatatgtcttgtcctaaatgttgttaacatgattctttagaagtttcactgattaaacttgctatagaaactaaatttgattttctatggttc

SEQ ID NO: 184176 - DNA, 382 bp, Glycine max
  unsure (1)..(382): unsure at all n locations
agcttcaacacatccaccttttccacaagttatcttcatagggaagtcggntgaggaatgcgagccaaagctggttccaaattagcttagcccagttgaagacattagctttaggaaaaaggagaggtaagattatttggaagagagggagcctgaggggatggagtgccaagcaagtttgtcttctgcactacaaactagaatgacaacctctttaatcgccttagacacaaccaggaattgggaaacaaaaatagaaggcagagagatcaattccattgaccagaaatccctgcctttggccatgagaaggcagtgcaaatgataaggaacactaatcaaatccacaatgggagacccaattcaattttcattccagaaa

SEQ ID NO: 184177 - DNA, 431 bp, Glycine max
  unsure (1)..(431): unsure at all n locations
cgctcggagtttgagttcaagtgcttgattcttgttagttgctactttatgccattntgtgctcatagctctcagtatggaggagtttctttgtcttgctctagtcttttgcttgtttcatggagtttactccatatatatgctgtgtgaagccttgtgtagtgccttttcccattgatctaactctctagctttagttttgctcatttttacgtacgtgtggggctgttactgttcttgtgtttatttattttctttcgtgactttttttggaataatgagataatttcctagtgtcatcatatctcttgaataactgaaaaaaatttcattnttttctgaaatcatttactatttttaatttatttattttcttgctcttctgaatcagtccaggagaaaaaatggctcgaaaaatatatggatttttt

SEQ ID NO: 184178 - DNA, 426 bp, Glycine max
  unsure (1)..(426): unsure at all n locations
caagcttgaatgttcatcattgcaacgagttctttaaaagaatcgaaatgctggaagtaaactaacaagggaaaggtaaattgcagaatttaaaggagcagcgagttcattcnatcaatgaaccatttaaaagacaggaattctaaagtaaaatgaaaaatgcattgcattcgaaatgtaaagtttacagaaacttaaaatggttcacaatcatacatttcccttgcgtactcgtttctctctgcgctgggtactttgagtatataaggattttgtagaaatgatttgcgaccccgaaatctgactaacaactgctatatatagacattttaaaaataaactgtcctaacggtcgaacactatcctaatgccaagtgtcctgctacgtacaccttgcatgcatataactgctccttagaacggtta

SEQ ID NO: 184179 - DNA, 455 bp, Glycine max
  unsure (1)..(455): unsure at all n locations
tttgtagttntggaataattgattattttgacacacaattatatcctaaagtttctagatgcaatctaatcgattacttaatgtggtaatcgattatctcgagccacaaagtctttctttcattgaaactgacttatgcaattgattactgaaactggtaatcaattaattcaatgaaacttgccaaatttcaagtagaagtaagttctattgcttgttctaacactttgtaattgattactaaacattgtaatcaatttcactgtgttgaactcattgcttctaagaaactttaagatcaattcattaatctaccatgtgtgatttctactaagcatgaatataagaaaactaagactaaatcactcatcatgcatagtataaaaacatccaatacaaatgtaacatcttttaaaacctgtttggcattgtaaaatgaataatacanaaaccta

SEQ ID NO: 184180 - DNA, 338 bp, Glycine max
  unsure (1)..(338): unsure at all n locations
ggacttaagcactgagctgcactatttattatagcctaatctttattatttgtggctcttaatagatggattcttcactttggtttttcatctaaaggcttgtggccattggagcatttaatgcagccccttctttatgtagagtccatgcttataggttagcatgttaagcacttcagcagaaagtcatatctttcattagagcagatctacacagcanagcacgccttttgataaagatcaacacttctagatcgtggacttcatttattcttcataggatttcaacatatcctangagaagtgttcctacaagaaagaatctcagacataaagta

SEQ ID NO: 184181 - DNA, 449 bp, Glycine max
  unsure (1)..(449): unsure at all n locations
ngctccagaacaaaatgtttgcttacatgtaatggaaatggtgaaggaggttctgaaagtaaggaccaaaatgggatttcacccatagaggtaaaagcgttaagctaatgacgttaaagaagcgcttcctgtgaggcaacccagttttaatttctgttatttttttttcatgcattgtatgattggaatttgctctatgatcttttgaaaagagggtgtttcagcttattttgaaggatagatataagggtttcaaattccttgaggaagggactaaaaaataacttagaaatttttttctgacaatcagtcctttcgctaagcgcaagcctcgcgctaagcgcatcttttatcatgcgctaagtggagagtctctagcacttagtgctcanaccttgcatctcaagctgatttcgtccgctaaactggcccaggctgagcttaaccca

SEQ ID NO: 184182 - DNA, 394 bp, Glycine max
  unsure (1)..(394): unsure at all n locations
agctngannggtaaagtctcacgaatgtttttgttgatgctacaattgttagccgcggctatatgagacatcttacaaaacaaagtcaggttagccataactcgcctgtgctttttcttcgatgccatattagcacaatcgttgatcatatcaagtttgatgagctataaaatgaggctgcaattatattgtgccagttggagatgtatttccccctgctttctttgacatcatgattcacttgattgtgcatctggtaagagaaatcaaatgttgtggtcctgtttatttgcggnggatgtacccggctgaccgattaatgaagatcttaaatgggtatacaaagaatctatatcatccagaagcatctattggtgagaggtacattgcagaa

SEQ ID NO: 184183 - DNA, 458 bp, Glycine max
  unsure (1)..(458): unsure at all n locations
tctcaaggaagctacctagtctataaatagaaacatgtgtatcacttgttgtttctttgatgaatgagagttttgtgagacacaactcaaagttcaacttctctccctttttcttccttcaatatcgtgctcccctatctctctttctctccctctttcttttcctccattgaagcatcctctccaagcttcttatccaaggctcatctcagtggtgaagctctttcttccatggctcattccttagtggatggcgcctcctctcacctattctcctttgtcttccgctgcatctccatggtggaaaatcaccattaaaggacctcattgaagctcanagatccagcctccatagaagccccacaagcaagcttccatcaataagagtgttatctttatatttcttcaacttataagaacatttctttccctttttattgtttatcatcaaaagttta

SEQ ID NO: 184184 - DNA, 406 bp, Glycine max
gtcacctgcagctgcagcttagaccaagcacgtcaaactttgtagtaaaatttctcatttaaggatttcaggttcgagaatgaaaatgaaaaggggtaattttgggcaaactctcatctcaacaaaactataattaatctaaactcgctcaaactggttttacgacgaaaactctaccgaatcaaaatttgactcctcaacacccaatttaccctataaatggctcttgccttcactttggtcactcattttcctcctttgcacagcccaagcttttccacaatcctaaatgacatttcaaactaggattaactcactttaacctcctgtcgcaacgtgccctttccgggcgagcgagggcgatgctcacaggtgcgctctccaaaggaggatagatgcgtggagt

SEQ ID NO: 184185 - DNA, 449 bp, Glycine max
  unsure (1)..(449): unsure at all n locations
actaagcttccgctccgtcttgaagganctgagactgccttttttacgctttatcagnacaattccaatatggctcccgatcgcactcagctacagaacatggttaaaaaagaaagggagacctttaaagagtacgcacagtggtggagagacctggcagcacaagtgctcctcccatggtcgagagggagatgattgctatgatggtagacaccttactggtgttttactatgagaagttggtaggctatatgccctccagcttcgcggacttggtatttgccggcgagagaatcgaagtacgtttgaagagagggaagttcgattacgtctcctccacaagtaccaatactaggaggatcgaagcaactggggcgaaaagaaaggaaggagatacccatgccggcacttctgtgctcgcatgggtcaagccaccatatacctctcat

SEQ ID NO: 184186 - DNA, 436 bp, Glycine max
  unsure (1)..(436): unsure at all n locations
agcttcaaccaaggggagatggagccatttctatgtgcttgattntatctttgacaatgcttacaaagatgagctgcccggtgagtataatgttagttacaccttcatgtcttgattatctcttttttgtagatggagaatctgatttgaggacaaatccttctcaagagggagagaatgattaggacatgaccaataacaatggcaaggatccacttgaaggacttggatgacctatgacaatggctatagcaaggaaagccaaggaagctcttcaacaagggttgtccatactatttgaatacaagcccaatgttcaaggagaaaagtccaacgttgtaagttgtatcatggcccaaatggacgaggactaaatgacaccactctgtctcaattctagagtgtntattttgtctaaataatggcccaatccttg

SEQ ID NO: 184187 - DNA, 461 bp, Glycine max
  unsure (1)..(461): unsure at all n locations
atgaacaatgctngacaaccttntagaccctgaagatttatctagttttcactccaataataggggcgcctgactggagtaaagagtttgagctcatgtacaacgctagtgactatgcagtaggggtagttcttggacaatggagagagaatgcattccatgccatttttatgctagcaagatcctgaatgatgcacaactaaattatgcaactactaagaaggagatgttggccattgtctatgccttagagaagttccgatcgtacttaatgggctccagggtcattatctttactgatcatgcatcaatcaaatacctcttcacaaatgcagattcaaagccaagactgattagataggttcttttgattcaagagttggatatagtgattacagataagaatgtagtggttgaccacttctccaggttagtcaatgaagaagtaactcatgaggagc

SEQ ID NO: 184188 - DNA, 445 bp, Glycine max
  unsure (1)..(445): unsure at all n locations
agtcacctgcggcatgcaagcttccacgtgaccttgtgtgctaagttatgttggacttgttatgtaattttatgatgatttgagttgcacaagttaacaacaagctgctattagttttttctgttatactgttttacttgattttttttttgatattgagttactacagaatttctaattagttatttaaaagttttaaggcattctgaatgtttggttaatatatacatatggtgaatgatgcaatagcataaaatgcatagatttcatagatttaagttacatttattttaagtttcgcataaaatgcagattttacaacaaacaaaaggctatggtaactgtaaattaatggttcaattttaanaacaagaatttttgctattgcaatggacttttaatccacagctcattgtaatagcaaaacccattgtagaccgacatc

SEQ ID NO: 184189 - DNA, 454 bp, Glycine max
  unsure (1)..(454): unsure at all n locations
tctatggaggttggatctttgagcttcaataaggtccttttatgatgattntttgtcatggagttgcaacagaagataaaggaaaagaggtgagaggaggcgccatccactacggaataagtcatggaaggagaagcttcaccaccaagagagtgtcatggataagaagcttagagaggaagcttcaatgaacgaagagaatgagagagagggagagagagagaggtgtggaaattgaaggagaatatggaaagaagttgagctttgatgtgtttcacacaattttctcattcatcaaagttacaacaagtgttacacatgattatagcctaggtagcttccttgagaagttccttgagaagctagtgttacacccctccaatagctaagctcattcaatgccaaaatgcatgaaggaatcccttgtgaagcaagtgttacacccctccaatag

SEQ ID NO: 184190 - DNA, 419 bp, Glycine max
  unsure (1)..(419): unsure at all n locations
agcttaatacattacgctctggtgcgtcttttataggtggaaaatgcgcggagtcgccaccaacgtttatttgtggaaaacgtcataacaaccgaaggaaactggtcatgaagaatatttntattcgggagatgtatttacgtttgaggaaggtattaacacctctcacgtttgtcccaaaggacaacagccttaaatttggattgtgtgacatattgtacctaaacttttattttttttttattttagaggtcgacaaaagcggggctcttgctcctacgtacccttcatcgaagaggaaataagacctacgtatttctttcaaaagggcgaatcaagcgattcttttttacttggaagggggtccttttaaggtgttggacctctaaatgatccatttctacttggtgagacaactg

SEQ ID NO: 184191 - DNA, 466 bp, Glycine max
  unsure (1)..(466): unsure at all n locations
tcagcttaacatcagacccttgcaggtgctggatctacttcttatggacttgatggggcctatgcaagttgaaagccttggaggaaagaggtatgcctatgttgttgtggatgatttctccagatntacctgcgtcaactttatcagagaaaaatcagacacctttgaagtattcaaggagttgagtctaagacttcaaagagaaaaagactgtgtcatcaagagaatcaggagtgaccatggcagagagtttgaaaacagcaggtttactgaattctgcacatctgaaggcatcactcatgagttctctgcagccattacaccacaacagaatggcatagttgagaggaaaaacacgactttgcaagaggctgctatggtcatgcttcatgccaaagaactttcctataatctctgggctgaagccatgaacacagcatgctacattcacaacagagtcacactg

SEQ ID NO: 184192 - DNA, 433 bp, Glycine max
  unsure (1)..(433): unsure at all n locations
agctgtgagagaaatctaacgacaataacttttaactttgatgtcnaancgagccctgtaatatatcgagacgctcgtaattgaaaacggaagctctaagataagtcaaacgacaaaactttaactcggatgtccgattgagccctctaatatatcgagacgctcgaaattgaaaacggaagctctaagaaaagtcaaacgacaataacttttgactcggatgtccgactgagccccgtaagatatcgagacgctcgtaattgaacacggaagctctgagaaaaatctaacgacaataacttttaactcggatgtctgatcgagccctgtaatatatcgagacgctcgaaattgaanacggaagctctaagaaaagtcaaacgaccataatctttaactcggatgtccgattgagccccttattatatcgaga

SEQ ID NO: 184193 - DNA, 474 bp, Glycine max
  unsure (1)..(474): unsure at all n locations
gcgaccttagaatactaacgctttgcctaaattacgagtgtctcgatatattacgggactcaattggacatccgatntaaaagctattggcgcttgattattcttagagctctccttatctattacgagcgtctcgatatactacgggacacaagccgacatttgagttataagctactatcgtttgaatttgcgcagagcttctgtgttcaattacgagcgtctcgatatattacgggactcaatcggacatccgagtaaaaagttatcgtcatttgattattctcagagcttcagttttcaatttcgagcatctcgatatactacgggacacaatcggacatccgagtcaaaagttattgtcgtttgacattgctcagagattctgttttcaattacgagcgtctcgatatactacaggacacaatcagacatccgagtcaaaagttattgtcgtctgaatttgctcaaagc

SEQ ID NO: 184194 - DNA, 405 bp, Glycine max
agccctcatactggagggcaatatacatagtcactcagtcaagatactccgcataaagaaatgcatatttttctatgataaaaaatcatcgacacatatgataaatcgctagttattaggatagtattgcagatatccaagcttactagttatgtttcacatatcttaaattcacagacaacttccttccattatttttctataaaatttgaacaaacagccatcaaaagttacactcagaatataatattctcctaacatataaggttcttcaaaacatttaatcacatgtatgcatgtgtgcaccttcaaaataattcttactttaatcgagttgactgctgatgaactcattatcactgtgtgattagcatagaaatgtagggatgagatcacactatcatg

SEQ ID NO: 184195 - DNA, 432 bp, Glycine max
ccttaagtcacctgcagctgcaacttgcacccactagttcaggcgacttggtgcttcctccagaacaacagtcttctggaggaatcttttggagggcccaagtgggcctggttgctatttgcacccccattattataaatacaccccctgccttttttggtgattctttttttcgtaaattaccgaaacttactaatttcgtaacaatacttggtttctttccgtaatggtacggaaccttgcggatcacataatcatcccctttttgacttacgagtgttacggaacctcactaattgtgcaacaatgctttcatttgatttccggtgtgtcacggaaccttacggattgtgcattaatattttcttttgaattctggcatgtcccagaacttcacaaagatgcctaatgatgggtgccaagcacctcaca

SEQ ID NO: 184196 - DNA, 435 bp, Glycine max
tcgtctacaaatccctcttgtaagactaggctctatagttgttgtatcaagtggcctcaaaataattaagaagggggggggggggttgaattaattcttactgaacctttactaatttaaaatcgatcccttttaggctctttctataatgttaagaacgtatcgaacagatatataatcttatcctcaaagtaatagcgataatttaacggcacaatagatattaaagagtgtggggaagaaaaagacaatactggttcggcaataacccgtgcctacatccattctccaagcgacctgtggtccttgagatttctattcaaccttgtaaaatcctttacaagccatgatccacaatggatgtaccctcccttggtttctttgtcacaaccaagtggatgtattctccacttcaactgatccacaagagatgta

SEQ ID NO: 184197 - DNA, 392 bp, Glycine max
  unsure (1)..(392): unsure at all n locations
agcttagccgaatgtatgtaaagcaatagttttgtattgtggcacgacganagaaaaaggtgaacagatgatatcttgcacagacaatctttgtaagaaatattatctataaatcaatagatgtacgactcaacagcaaaactaaaagcgtggcagggtatatgctaattgtcagctcatgattgatgatctgaaaagctgacttttatcaagtacttgtggtgcaaaaagcataatattgaaaagtatgcgcattgatattattatatcatcattaaccgtagaatacagagcctcaagcgatgaaatcttaccagtaatcctttttctaggatcaaaagttaacattgtttctgccagatctatagcttcatgatggacatgtgggaact

SEQ ID NO: 184198 - DNA, 419 bp, Glycine max
  unsure (1)..(419): unsure at all n locations
tcttctatgacttacattatgtaccctgctatttgtcttattgtcatcaggaggaatcagcttgctagctgaagtgattattattaacctttgtccatatattgcacactcaaacttcttccatttcatcaatgctaaaattcattaccatatgctttgatattttgctgccatgggtatgcacaaattatacatttgggtgtactgctatagcctttgatacaatcaggttactttcctacttggatatatctagcatctacttacttaaggatgaagattagtatggctcatactaatgattccttatatgcattgtctattatgttctattcattatactcattcataactctgaaaggatctaccatgacttccattgngtacccttctattaggctctgacgaaatatttggat

SEQ ID NO: 184199 - DNA, 392 bp, Glycine max
  unsure (1)..(392): unsure at all n locations
agctnatcatgaacttctatctaactcatttattctctcaagagcttacaaaaacttgcaaaaagattcaaaagaatttatccgaagataatttaaaacttgagaaaactcttcaaatcaagtagaaagttcactggacgcatccacttagacatgtggagcttgtatgactcttaaagaaaaagagtccaatatatgtcttgagattgagacaagtgataaggaaaaagctacttttctcaagaacttttaggtgttggaaaacaaattgaaatatcttcaaaaggatctaaaggagctgaatgaacttcatggttatcatatagacgataggtatgatctatggagagaatgtgcacaagcacacacagaatatgaagatgtcaaaatga

SEQ ID NO: 184200 - DNA, 460 bp, Glycine max
  unsure (1)..(460): unsure at all n locations
ccgcttctatgnaaggctggatcttgagcttcaatgaggtcctttaatggnggntttccaccatggagatgcagcggaagacaaaggagaagaggtgagaggaggcgccatccattaaggaataagccatggaagaaggagcttcaccaccaagatgagccttggataagaagcttggagaggatgcttcaatggaggaaaagaaagagggggagaaagagagaggggggagcacgaaattgaaggaagaaaaagggagagaagttgaactttgagttgtgtctcacaagactctcattcatcaaagttacaacaagtgttacacatgtttctatttatagactaggtagcttccttgagaagctttcttgagaaaacttccttgagaagcttctttgagaaaacttacttgagaagctagagcttagctacacacacccctctaataactaagctcagc

SEQ ID NO: 184201 - DNA, 379 bp, Glycine max
  unsure (1)..(379): unsure at all n locations
agcttgaagcaaactggatgcattggtttacttggtaacccagctggccttgaatcagaaatctgtacctattgcaagggtttgtggtttgtgctcctctgctgaccaccatcagacctttgcccttccatgtagcaacctggaacgattgagtagcctgaagcttatgctgcaaatatttacaatagacctcctcaacctcagcagcaaaatcaaccacagcagaacaattatgacctctccagcaatagatacaaccctggatggaggaatcaccctaaccttagatggtccagccctcgcaacaacaacagcagcctgctccttctttcnaaatgctgctggcccaagcagacatacattcctcaccatccaacac

SEQ ID NO: 184202 - DNA, 460 bp, Glycine max
  unsure (1)..(460): unsure at all n locations
ctntcaaaaatttgccttagagactagacatttcttctttcttttcttggcttcatgtgacaccctctaccccgacatatatatatatatatataaaagaaataagagatcaaatttaattaaatttttttaaaatacatttaaatacaagcctttcaaaaggataaaaggctcacattcacttttctaaccgataataaaacttgttcaaataattaataaatcattttgggtcgtctaaaacttcatacaattaatatagaacctataccctaataccacatcctatcaaagcattgtgttcccgtgtcctctagcatcaggttcttcatagttatccacctattcatctgttcccacgaacacaaggttcgagatcatcacaggatccaaacataaacacacacatagtgagtgagttatcacatgcctaactaatagagaagaataagacaacata

SEQ ID NO: 184203 - DNA, 435 bp, Glycine max
  unsure (1)..(435): unsure at all n locations
agcttgaggttgngaaaataatataggccatctacaccaaccactccttgtagagaatttattagtctcctgagatttcacaagacacaaatgagggtgaaactcaaagaaaacagagttgtctttacaaattgactcatacttaacaagttgtcgcaacgtgcccttttgcgggcgagcgaaggcgaggctcacgggtgcgcttttcaaaggaggaaagatgcgcggagtcgccaccaacgtttatttctggaaaacgtcagaaaaaccgaaagaaaccggtcaaaatgaaaattctaagttcgggagttgtatttaccgttgaggaaggtattagcacctctcacgtttgtcccaaaggacaacagcctatttttaagaattgtggaagttgtgtaccttaacttttattttcttttattttttgaggtcgac

SEQ ID NO: 184204 - DNA, 459 bp, Glycine max
  unsure (1)..(459): unsure at all n locations
tctagagatcatccncttgacaacatcattggtgatatctcataaggtgtaacaactagacattctctcaaatatatatgcaataatatgacttttgtttctatgattgaacctaaaaatttgaaagaaaccataatagatgaacattggataatagccatgcaggaagaattaaatcaatttgaaagaaataatgtttgggaactagttgaaaaacccgaaaactatcttatcattgggacaaaatgggtatttagaaataagttagatgaaaatggcataattattagaaataaggctagataagtagcaaaatggtataatcaagaagaagggatagattatgaggaagcatatgctccggttgctagattagaagtcattagaatgttattagcctatgcatccataatggactntaagctntatcaaatggatgtaaagagtgcattttaaatg

SEQ ID NO: 184205 - DNA, 482 bp, Glycine max
  unsure (1)..(482): unsure at all n locations
ctcaagctagacggagttggtcgcatnngcgaacaagttcactataattttgggttctcaattggacnncctaatntcaacttacctatttggaagtgacatcatggcagttaggccccatctttccattgtggattcagtcacaaaaccaacttcaatatgttggactatctaacacggggattttcgattctattcccacacagatgtgggaagcactttctcaggttacgtatttaaacctctctcgtaatcatatccatggtgagattgggactacattaaagaatccaatatctatcccaactattgatctaagctcaaatcacttgtgtggcaaattaccctatccttcaagagatgtgttttggttagatctatcaagctattcattctctgaatccatgaatgactttttatgttacgatcatgacgagccaatgggagtagaatctctgaatcttgcataatataatttgtca

SEQ ID NO: 184206 - DNA, 378 bp, Glycine max
agctagaagatgtgtagcccaccatctttctctattagaattctggtaatgtgtctactatcattgtcatcatttttttcgtcatttaggagccacttgagctgccaggttctccacctttgggcgtatctttgaaagatccgcgccccctttttgcacatgttttgtagttgcatcctatccgaagccattataccgatgctgcctaacaaaggcaaccattaggtcctcccaggaatggactcgggaagggtccaagttagtgtaccaggtaacaactaccccagtaagacgttcttggaaggaatgtatcaacaatgtctcatctttagcgtatgcccccatcttccgacaatacatttttagatggttcttggg

SEQ ID NO: 184207 - DNA, 454 bp, Glycine max
  unsure (1)..(454): unsure at all n locations
tacanaaccatgcccatatgtcattgaggcatttcaccgttcacttggtgggcgcatgttttggcatgaataatgtcataccctaatttcgtccggggacctttgcttgatgacatgcgacttttctttggtccttgtaaggtgcttggcacccatcattaggcaatttgtgaaattccgggacatgccgaanaaaaaaataacaaaagaaaatattgatgcacaatccgtaaagtttccgtgacacaccggaaatcaaatggaagcatcgttgcataattagtgaggttccgtaacattccgtaagtcaaaaaggggatgattatgtaatctgcaaggttccgtaaacattacggaaagaaaacaagtatcgttacgaaattcgtaagtttccgtaactttacgaaaaaagaatcacaaaaaaaagcagaggggggtgtacttagtaaaaatg

SEQ ID NO: 184208 - DNA, 433 bp, Glycine max
  unsure (1)..(433): unsure at all n locations
agcttagactgagttcagcctaccatcctcatactgatggtttaactgaacggaccattcagtcgttggaggaccttttaagagcatgtgtcttatagcagaagggaagctgggagggttttcttccatgatagagttcacttataacaacagttttcattctaccattggcatggctccctatgaagctttgtatggtagaaggtgtagaacacccctatgttggttagagcccggagaaggcctcatcttatgaccagaagtggtacaacaaaccactgagaaagttaagttaattcaagaaaggatgagaactgctcagagtaggcagaaaagttatcatgattagaggaggaaagatctggaattcgaggttggtgatcatgtattcttgagagtcactccatggactgnggttggtcgagcattgaaa

SEQ ID NO: 184209 - DNA, 497 bp, Glycine max
  unsure (1)..(497): unsure at all n locations
atcactgacctatgaaactcagcttanaacatggtttagatatcttctccctcttccatactaaagagttcatacttacgtgtcagaaggctcaacttgttatgttttacctcaaacaaccacttttgtttagcacttctgaagctgtgaactttggaatactcttcttgagataaagcgcacactagagcatttcttgctcgagggttaagaacaaatctagacttatgttcattcatctatcttttcttggggatcttgtgtctctgagcatctaaaggaatgtgattgcctttttctacaacgtcccgcatatcgatatgagtggattcaaaaaagacaatcattcttccattccaatagtcgtagttggctcccttgaacataggagcttgttcacagcatatccttcttccatcattntaggagtttcctttcctctactttgttaggaggtcaacctagaggccaagctctaataccaactaaagtaacta

SEQ ID NO: 184210 - DNA, 433 bp, Glycine max
  unsure (1)..(433): unsure at all n locations
agcttataaacatcgtgttggaatcctactatattgagttcttgattcattggctcctcctcaaccctacgtatttagatatctttcatctcctttatttctagctcactcactccgctacaacttttcttnttggctttgttagtgttcgacagtgaaattatatatataacgtcaaacatatatatttttaaacattatggtgagtacattagttaacaaatcaataaataaagtttgtatcaaattctatcatggagttggctgcgtaagtattatgtttcttataaaacattctcacttttatttcttaaatagtaatatatatatatatatatatatatatgtaaaagatatgagaaggatataatcgaaaaataattaatattatcttagtctcttaaattaacaattaagagtggataacgtaaat

SEQ ID NO: 184211 - DNA, 479 bp, Glycine max
  unsure (1)..(479): unsure at all n locations
ggccgcccagctcgcccaggcgagcaaaggtgcttcctctataagcatcatgcctttggaggaatcttctggagggcccaagtgggcctggttgctatttgcacccccctttttactaaatgcaccccctttctatttttttgtaattctttttccgtgacgttacgaaactttacgaatttcgtaacgatacttattttccttccgcaaggttacgaatccttacggattatgtatttactctcttttagctttcgaagaagttacggaaactcacggattgcgcaaaaacacctcttttcgatttccgccacattacggaatttcacgaaccacgcaagcctgcttcctttcgatttctgagacgtctcgggacttcattcattgcatgtcatcaagtaataatccccagacgaaattagggtatgacaggtgcccctctntacttacctctcatcggagataagaggaaagcaaag

SEQ ID NO: 184212 - DNA, 434 bp, Glycine max
  unsure (1)..(434): unsure at all n locations
agcttgctaacccatggattcttctaatatctctcacacttttnggggggggccattcttggatggccttgattttctcaaggtccacttggaccccatttctaccaacttcaaaacctagaaaactatattatctacacaaaaggtacacttctctatatttgcatagagggtgtttttcctaaagactgaaagaacttgtctgagatgtcctaagtgatcatctagcctcctactatacactaaaatatcatcaaaataaacaactacaaatctacctatgaaatcccttaagacatgatgcataagcctcataaaggtgcttggtgcattagtgagcccaaaaggcatcactaaccattcatacaaaccaaacttggtcttgaaagcagttttccactcatcacacctgntcatcctgaattggtgataac

SEQ ID NO: 184213 - DNA, 466 bp, Glycine max
  unsure (1)..(466): unsure at all n locations
ngaattaagactagtattctntgttctaccaagccaccactggctctaaacaaatcaacaagaattgttggaagatttcacactaactaaaatttgtgatcattttatagatgaatatatcactcaacgcttttagtcgtttctctcaaggtatacaaggtgttttgaaagcttagtatctttacaagaatattaagaaatccttacaagaaagaatgaaagaatgattcacgtagattgttcatgtcttgtttcttcaaagctttctctatatataatcttcatctccaagtatcagttgtctctcaacggttgaattcttcactctattcttcatctgaggtcttgagtccattggagcatttaatgcttgcattaaatgattaaatgcatgtctctttttcatgcaaacaccgtgcttgtaggataacatgtcttgtacttcangaaaatatcttctttcatc

SEQ ID NO: 184214 - DNA, 355 bp, Glycine max
  unsure (1)..(355): unsure at all n locations
agcttcatgatgatgaatcaagtatngcttaccatatattcgtccggggactattgtttgatggcatgcaacctttggttgaccgcttcgaggtacttggcaccctttgttgcacaatcgtgaagttccgagacatgccaaatatcaaaaggaagcattgntacgcaatccgtgaaattccgtaacatgtcggaaatcaaaaggaagtattgttacgcaatccgtgagttttcgtaacattccgaaagctaaaaaaggagtaattacatgacccgtgaggttccgtaaccttacggaaagaaaacaagtatcgttacgaaattcgtaaagtttcgtaacgttacggaaaaagaat

SEQ ID NO: 184215 - DNA, 466 bp, Glycine max
  unsure (1)..(466): unsure at all n locations
ntatgcttattcattnggttcaaactaatttttggagcatctacattaagaatgaacgattaacattcaaaacaaaagacaacttctcatagattatcccaataaaaaagcaaaatccctttctttggctctcaagtgacaaaggtcataagcttgctcatgtcctcatgggcttgaggcacaagacttctcaactaactaattatgactgtctcacataaatctatcatgcccattttccaacctataatttttggataaagaatgaccaattgactagcaaaaaagaataaaaagaaggtaatttctcataagttattccaataaagaagcaaaacattcttcttcaactagtatctcctttagtaagttcccaatgaggtcaaatgaataagaaattgagcaaaatgaccaaacatctgattatgtgtagcttcatccaaggatataggactacctatagccc

SEQ ID NO: 184216 - DNA, 434 bp, Glycine max
  unsure (1)..(434): unsure at all n locations
agctattcaaagatgtacttaaccgggtctatccttgatatcaaccaggtggtatggctcagcatgtattgtcttaagcggtgggacgcccaaactaaagcacaacacgttctttcaagagggagtaattcatttcacgggccgtgaacttcttatctcaagtgtagacagcgcgctctctcttcccggactcatcatgttgccccagcatacatcccatcgactcgtccaaaatcgtcatatacaagatgagaggccttccgggcactggcggcataagcacaggagggttcatgagatactgtttgatccttccaaacgcttcttgacaatcctcgttccagcaaacggtgtggttcttgcgtaagagtntgaacagcggctcacaaatagcagtgagctgtgatataaatctggcaatataagtcaaacgt

SEQ ID NO: 184217 - DNA, 452 bp, Glycine max
  unsure (1)..(452): unsure at all n locations
tgtgcgaatcaaatcactcctgtattttatctctagcatgcattctttctttctttacccactcctcacgtttggttttttagggaaaaacaccataactaaacgcgccacaaggcatccctatagcaccagatccaaatctagaacgatgggtgatcaagaggagacacaggaacagatgaaagccgacatgtcggctctgaaagaacagatggcttccatgatggaggccatgttatgaatgaggcagctcatggagaaaaatgtggccaccgctgccgctgtcagttcggctgccaaagcagacccaagtctcttggctaccgcgcgccatcctccctcaaacatagtaggacggngaaggaacacgctggggcatgacggcaaccctcatctgggatacaaccgagcggcttacccttatggattgccgccaactactcgccacccgt

SEQ ID NO: 184218 - DNA, 413 bp, Glycine max
  unsure (1)..(413): unsure at all n locations
agcttgatactaaattgttgttttctactttttgttattcacaaactganggtcaaactgaggtagtcaatatgactttaggtacactgcttaggattgttttaaagaaaaatcttaaacttgggggggttgaattaagatattacaaattatttccccaattaaaaattctatttaactttctattcaagttacaaattcccttaataatgaatttcttaaataatgattcaaaagaacaatttgaatatcaatataaaacaataataaataaaggagtttaagggaagagaaagtgcaaactcagttttatactggttcagccacacccttgtgcctacgttcaatccccaagaaacccgctngagagttccactatcttgtaaattccttttacaagttctaaacacaca

SEQ ID NO: 184219 - DNA, 354 bp, Glycine max
tcattgcctaacaggccaacttacaacagcaagccccattaaactcaacataaggatgcacaggccaaagttgagtatgtgaaaagattgtatgaccaagtgaaggtgcaaattgcaaagaagaatgaaagctataccaagcaagccaacaagaaaaggaaggaagtggtacttgaactcggtgatgatcctggacatttgagggcaaatgttttccaagaaggagggaatgatgagaattctaaaactagccaaatacaggctaaaggcccaagtggagaatgacgaaggcccaagtggagaatgacaaagcccccgagtggagaatgatgaaagcccaagtggagaatgatg

SEQ ID NO: 184220 - DNA, 376 bp, Glycine max
  unsure (1)..(376): unsure at all n locations
gatccttaagtcacctgcggcatgcaagcttgtccacaaaaatatggttttgaatgtttatcatttcagnttcttactaagtgaaatggatcatttttaaggtccaacgccttaaaatgatcgcccttcaagtaaaagaatcacttgattacgcataagaaagaactacgtaggtctgatttcctcttcggtggagggtacgtaggagcaaaagccccgcttttgtcgacctcaaaaaataaaaagaaataaaagttaaggtaacacaatttccacaattctaaaaaataggctgttgtcctttgagacaaacgtgagaggtgctaataccttcctcgagcgtaaatacaactcccgaacttagaattttcatttt

SEQ ID NO: 184221 - DNA, 473 bp, Glycine max
tatgcccttgctaaactagaagagtagttcctattaccttatatcatcacccctcccaagttcaaggtgtcagactctgacaagtacaaggggactacttgccccaagaaccatctaaagatgtattgtcggaagatgggggcatacacaaaagatgaggaactgctgatacatttcttccaagaaagtcttactggggtagctgttacctggtacactaactaggaaccttctcgagtccattcttggaaggacctaatggttgccttcgttaggcagtatcagtacaatttcgatatggctctagataggatgcaactacagaacatgtgcaaaaaggggcacgaatctttcaaagaatacacccaaaggcggagggatttggcagcccaagtagcacccccaatgatggaaagggagatgataatggtgatggtagacacattaccaatattctactatgataagatggt

SEQ ID NO: 184222 - DNA, 369 bp, Glycine max
  unsure (1)..(369): unsure at all n locations
agcttaaacaaattntggaagacatgacttactgggaccatgtttnggagggcatgaaacttctcattaattgggaccaagtcattgccactattctatcaattgttatttccctacaatactatctgcaggggccactacactcacctgctatgctatggcagcaacccctatagcagctacggtccacaaagccactataatagcactataatgtgctacttaaaaccctggatgtaaggagactgatattggcatgcacaatttaagatacccttgaaataactaaaatggttttctcccaaacatgaaatccaaaatttaaagggtttggaagaaataanaaccaagaaactaatcccaatctat

SEQ ID NO: 184223 - DNA, 428 bp, Glycine max
ttgagccaaaatcctgactcaccatatactttgacccatggtgagaatgtcaatccttaccctcggaaggaaaaaagaaaagaaggaaaatttccaatcaaagagaaagcaaaaagaaaagaaggaaaatttccaatcaaagagaaaacaaaaagaaaagaaagaaaattcccaatcaaagaatgggagaaagtaaaaaaggaagaagaagaaggaaagaaagctcttgatcaaggatcgaaagaaaacagaagaaatgtgcagaaaggtctttggaccggacaatatctgaacaatacagaattgtcaccaaatgaacgaaaagaaggaaaggaaaccatgacctaaagtggtcttctccctttaattgccaaccaaaatcttgtgtgctagcgactttttcgccccgcactaaaccaaaatagaaa

SEQ ID NO: 184224 - DNA, 147 bp, Glycine max
  unsure (1)..(147): unsure at all n locations
taaactatacaaataacttatccacttttgaaatggcccaatatcttaaaagggggcggggttaataaattccaacatccccattaatnatacttttatcaatacattcctaaaaaacataaaaatatccataattccaattaacta

SEQ ID NO: 184225 - DNA, 469 bp, Glycine max
tgctcttaaattacattgatgtttgtatttatgggaggatgttgtatgtcattcttgttttaagaatagtatcccactggtaaaactaactttccaaatgtttgccttcgcaggaaatggccccgaggaagcttgcctcaaagatgtccaggaaggacaaggcagcagaaggaactagttccgctccggagtatgatagtccccgctttaggagcgcggtacaccagcagcgcttctaagccatcaaggggtggacgtttctccgggagcgatgcgtccatctcagggacgacgagtatactgatttccaggaggaaataaggcgccggcggtgggcaccactggttactcccatggccaagtttgatccataaatagtccttgagtattatgccaatgcttggccaacagaggagggcgtgcgtgacatgagatcctgagttaggggtcagtggatcccgttcgatgc

SEQ ID NO: 184226 - DNA, 422 bp, Glycine max
  unsure (1)..(422): unsure at all n locations
atgactgcaaagacgtgaccttctgagaggttaccaagaatgtcatacaaagattatatactttgtgaaacatgtcagaaggggaaatagattaaaccttattttcaagcaaaatttgtttccacctcaagaccactgttaactcgttggcaagtgtaccaaatcgtcacaagtaggaaagttctcggaagtccgagtgtcgaatccacagggactttgtttgtacttagattaatgcaaacccaatttaaaaccaagagataagaatttaaaataaaagataaagaatgatagaagataaggtaaagaanagataagatatttaaagataaaattagaagagtaaagaaaagataagatattttaagataaaattagaagattaaagaaaaggataaagaattgaagataaaatattagat

SEQ ID NO: 184227 - DNA, 430 bp, Glycine max
  unsure (1)..(430): unsure at all n locations
acactacagaatactgaagactatgtggcacaacaaatatnggagagtgagcaatataagcattccagtcatgctactactgctactgacatcacccgtctatccagaccgctactccatatcccacttcacgcttaacgaactatgttgggggttagtcgccgaacacctcctatcagctagacacgcctcatcttcattgtactgtttgcgcctcatgatgcatcaccactttatgctacatctataccatcaccatacaatcgcacatgacaatcatttacaatcactccttctttctttgaacgccatacctttgtgattactcctgtacagacgttaagtgatacaatcgagggtaggtacactctcgcatgatatatcatgatcagatgatacatatatatatatatgtatatgtcgcatacat

SEQ ID NO: 184228 - DNA, 484 bp, Glycine max
  unsure (1)..(484): unsure at all n locations
tactcaagcgtatattccacactangaatatcaagattgtatctcatcatttacattcttttatcaactaacaatgtgcttatttgaacattaaagtcatgtattatgtaggtctccatgctcccttaatagaggtacctaacgtataatgtgtgaaatcctggagcccatccatactatgtctcctctgattcgggtaagtattaagtcataaaattaatcttactccacagcttctaataattaaaaaatatatgacaaaatattttaattattttttatacatgaagtgttaattatagatattagagttgaacataagataggatggactgttgctcaccaaatataaaatatatgatgcaccggtcataaccaanaaggtaggacagattgtattctctaattataattataagatgtatgcaatctgatcatangcatttctctaatatctatatatatatatatagatgtatctata

SEQ ID NO: 184229 - DNA, 434 bp, Glycine max
  unsure (1)..(434): unsure at all n locations
agctntgatattggtaagtgaatgcctcatttcttctattatatttcctgnnnctgaagnacgttttttctcactaacatctctttttataacattaatctctttaatcctctcatttgtactaattacttatcttacatttttcttccttttcttctcatctccttttctattaaaaaagttgcccgattttgttatataaatgcaatttctcttttcattttaccaaactttatataaagatattttatttgtttcaccacgacatatttgctgctggaactgatacttcagcatcaacactagagtgggctatggcagaaatgatgagaaatccaagagtgagggagaaagcacaactgaattgagacaactcttctagaaaggaaataatcatgaagtgatctagacaacttacttattgagttgggatc

SEQ ID NO: 184230 - DNA, 452 bp, Glycine max
  unsure (1)..(452): unsure at all n locations
agctagcgcattgactgtatattgagggttctttagtgtttattntatttnntcatctttctgtcaggggagtttcattatgtcccatgtcaaccctctaacatggcaactaaaaaatatgagttacgtaaggataggtccttcaagtcttttttctaattgaatctagctagtatcactttcgtacagtatccttcttatcacgttaatacgaagtgatgaataaattaagaggtttttgttttcttaccagggcgattaaattgaatgagtttataataaactaaatattattattttaattntattttgtgagttgtacgtcgtacatacaacttaactnttatcataaaaaatagataaattgtatctaatgtatttttttaattaataataggcttaaatatataaattttgttgtgctttttgaattntggttcctatatattttt

SEQ ID NO: 184231 - DNA, 425 bp, Glycine max
  unsure (1)..(425): unsure at all n locations
agctgtgatatattacaagaagctaattaattatgtatgagtagtttgttatatccgnaaaggtgtttatattatcacttaattataatgtgctatgcatgatatatttgtaatatgaaaattaaacttacataacatgagcgtacatgcacatcatatatttggcattagccaaatgtttactttttttaataccaaaaatgcttacttttcttggaaaactagtttaactgatttgatttggactaaccagaaaggaaaagaaaaacccgagagcagtaaatagcattattctcaagtacattagtctgtgttttactatttaaaagtctcttggtgtataggtatacagtgtggacctcgtgtgtgtacggatttttattttaaaagacaagtttaagaaaagggagaagtanatatgggat

SEQ ID NO: 184232 - DNA, 330 bp, Glycine max
tggcccgtcaaataatattattcattagacacgtattatttttgtgtatttaataataacaaaggttagtcattatctcttgtgaaccctttaaattgggcttgggtggtgaaacaaccggaccctgaacatcagattcatcaaaacaatttgggagttgctacgtgcacccagcattattgctggggcacccagcacacagtgaagtggtgaaactgcccttcagcaattattcttccggaaaaactcacggacaatttccggaagaacgtcatccggaatgtttccggaagaagcttcttccggaagaattccagtgtcttccggaag

SEQ ID NO: 184233 - DNA, 425 bp, Glycine max
  unsure (1)..(425): unsure at all n locations
gaccttaagcacctgngctgcagctcaattaaaatttatgtatcttttaaaaaactcaccttctataataagagatgactctattttattataatagaggatacatatttctacaattatgtttttaaggaactacttttgttcatgtctgtgtaataaacaactatatgaactttgataacatcgaaatacttcttattcctgatcctcaagacactcatcaaataatttcttgcccttgttcagaaactcaattgcatcaacattcctcatctcaggagtgcgaatcaaagccttctccatgttgatgtggcaaggcaagcccagttccacaagcctgccacaacaacaatcagagacgttgtttttgttatgctataagttgtccaacacttcttcttcacaatcggtctctatttcaccac

SEQ ID NO: 184234 - DNA, 462 bp, Glycine max
  unsure (1)..(462): unsure at all n locations
tgtcatggttntgtgttatattcaaacatgtgtgcggtcttttccactccataactntccatgtataagtttttttagatacaattgccctcatataaaaagggcatgggatgtcatcatttcgatttacgcaacaaacaaaatatttttgcgattttgattcaacaactttaaaagtgtggtgcaccttcataacatacttttgcagtgcattttttaatgcatttttgctttcaaattccatgccaacaaataattcttggacaatattgaaggttgatctcatatcgaaaccacaaatgtcttcttcattcggatgactccatttaatgttactataactagaagcagattcccaaaatgcagtctcacttccacctgcaaataaatcttaatatacggttccttctcacaagtatttatgaaaataggcctctcttagtgctatttaatgttcattac

SEQ ID NO: 184235 - DNA, 409 bp, Glycine max
  unsure (1)..(409): unsure at all n locations
agcttgtcggccgcgaatgacgaagggcgcttaaaactacgttagtctctgcatgctatcaggcttttcgtcttacagacagcaaaaaagaatgtttatacggataaccactcgggttttccgcccgtcagcgtgactcatatgtcagtatgacaaatcttgtgagcgcggaagatgacgtaaatctccgcgtgtcaaagggcttgtcggccgcgattgacgaaggacgtagaagacgtcgttagtctctgcgtgctatcaggctttacgtcttactgacaccaaaaaagaatgtttatacggataaccactcgggtatttccgcccgttagcgtgactcaaatgtcagtatgacagatcttgtgagcgcggaatatgacgtanatctctgcgtgtcaacgggcttgtc

SEQ ID NO: 184236 - DNA, 462 bp, Glycine max
  unsure (1)..(462): unsure at all n locations
agctctaaatctacatagatgttcgtatttatgggaggatgttatatgccatttttgctttaagagtaacgtcccactggtaaaactaactttccaaatgtttgccttcgcaggaatggccccgaggaagcttgcctcatagaggtccaggaaggacaaggcggccgaaagaactagttccgccccggagtacgacagtcaccgctttaggagcgttgtacaccagcagcgcttcgaagccatcaagggatggtcgtttctccgggagcgacgcgtccagcttaaggacgacgagtatactgatttccaggaggaaatatggcgccggcggtgggcaccacttggtactcccatggccaagtttgatccaaatatagtccttgagttttatgccaatgcttggccaacacatgacggcgtgcgtgacatgagatcctgcgttangggtcagtggatcccgtt

SEQ ID NO: 184237 - DNA, 217 bp, Glycine max
tatagtttatacagaaatacgaaaatctgcctgtgccagttgagaaagataaccatcgaatagtgacttaaatattcaggtagccaattatcaatcgtacgtgcaaaaaataaaacgttatgtgaaaccacgttgagacttttacgcatactcctaacatgctcgcaatacaaagacaatgctaaactgtctcaagatctttcttgcacacaggaca

SEQ ID NO: 184238 - DNA, 392 bp, Glycine max
gcaatgtttaacctttgaatgtttgttgaagcaatcttgaaagtaacattgtttgattattctttgacatcatcaaaaccatatattcatacattcactacaggatatacaaaagagattcacacatatagttaatcatcttgcatcattatgaaagatatttcctaacgaggatctcattaacaaagttctaagatgtttaagcaaggaatgacaaccaaaggtaactgcaattgcagaatcaagagacctcactaacatgtctcttgcaactcttttggagagcttatgaacacgaaatggaacttatgagactaaaccaacatgaagaacatgtcaagataaagaaaggaatttcacttaaagcctcatcttctattcacgaagaaatt

SEQ ID NO: 184239 - DNA, 125 bp, Glycine max
atcaggaagataactggatgatatacccccacaatcccttaatttaaaaggaagactatcttctaagaaacagcatcactcgactctatgagtcacttctgcgtgtaggtcataaacctatcgct

SEQ ID NO: 184240 - DNA, 341 bp, Glycine max
taatacaacacactagcagccataaacaagaatatgcaagatgtatggtttgctactccttgaatagtccacatggagtattccttacaatgggtcttatgaaagccctatctatgatatagcatgcaatattaacggctttatccctagaatcttttggaagaggagtgctaattgaactagggttctagcaacttcttccaaagacctatatgttctcttaacaactccatatcgatgacgggtcctacgtgcagatagctgtgttcaatgccatgcttatcacaaatatatatatctttattataaactcacaccatgatcactcgaagagaatcatt

SEQ ID NO: 184241 - DNA, 358 bp, Glycine max
  unsure (1)..(358): unsure at all n locations
agcaagcttgaggtggttatcgactctttatttaattggcagagacccgtgatttaggccgaaaaccctcagtgcttgttggacttttccaggtccaatgggtgtcttggaggttcnatcttgcaaattggttaatggcgtccgagattatctgggccacattaatactaacctgagttaagatggcgtagaccagttggcacttcgacaggggaagatcaaaattatgatcaccattgaggatgttgttgaggagcancgtcatccatatctgtgtcacggtggtcatgctagtatgcatgatccacacccgtctcttcatgtcacacgttgggcgaagtcctacctcgagacacat

SEQ ID NO: 184242 - DNA, 468 bp, Glycine max
  unsure (1)..(468): unsure at all n locations
ctcaccttaaaggccatggtgattgtgaaggtggcattgacattcttggaatgtaaacattatgtccaggattgttgccagaaataatttcagctgcaataacatgttttgctagctttgtaactattaatttggtaccattacacagtccctacgtttggtctaagtttcttagcagcatgataggacaaccaatttttagcttgatagaatgacttggcaaaccaaatgtggtgagcgaattaagaaattcagtggtaattgattggaaatggaaactgtcaatactttctgatttgtctacagcatcagaacttaggtattccatgtgttgacctatcatatntatttgaattagcatgcatagagtacaaatattaaatacattgtacttttgtaagtntgttaattgagcagacatagaattaaagaagtagtgttgattggataatatattcatgaatacct

SEQ ID NO: 184243 - DNA, 321 bp, Glycine max
  unsure (1)..(321): unsure at all n locations
agctttctgactttgggctntccagaactgttcttgggcctacgtgcaagtccaagattagggtgagttttttgtgagaggatgggaatgcagaggccatcnatgaacgatgtgtttcaatgctggagtttgcgctgcacctgcaagagtacggagctgcacaacaataccgtcactacccagtgatgggttgctgcagtcttggactactttcttcaagctaggttatggactcaaagccgcctagagtgaatcaaattaatccaacgctctggaaatacataatcataatgattataatgtatacaaatcaagggtttg

SEQ ID NO: 184244 - DNA, 449 bp, Glycine max
  unsure (1)..(449): unsure at all n locations
ntaaatgagaaatgaaattatcaatactgaaacatgtttttatcaaaccctagtgaaatcagcacaacgttgtctagggccacgtcgtccatttctggatggcaagcagctacggtaacctttgctttgtggacatctaacagctttgttgtatctattgcctgttttgccagacacagagagactcacatcatagagcattctggccacatgggaatcaaatgagaactctgattccaactcattgccgttgacaacaacattgtagtggatctgaatgatgagcaacacaatgaggagaccctntcttcatttgtggtgtgtcctcttcttgggaacttcttttctcacggacaaaggaggatatggtttgctagttaagctanggagtctctttataagccttaaaaccttaaaaaaaatctntttcattgtgaacattttgaatt

SEQ ID NO: 184245 - DNA, 412 bp, Glycine max
  unsure (1)..(412): unsure at all n locations
agctttgtccgtataaatcactaanaacctttntaagggccaacgccttanatggtcctctttgcttttatcggttaacatggaccgttcaaaagcataaaatcaacccataacttaccgcttttgcaagaactatgtaggtctgatttcctcatcgcaattgaggatacgtaggagcaaaagccctgcttttgtcgaccaccccaatagatcgttaatggtccaacgccttaacgtttctctcctttcaaaaacaagagatcgttaatggtccaacgccttaacgtttctctcctttcanaatcaaaagatcgtttaatggtgcagcactttacatgaccttntgtttagccaaaatatatcttgcagaaaagataaaaacaacttacccacgttcagttctggaagacta

SEQ ID NO: 184246 - DNA, 457 bp, Glycine max
  unsure (1)..(457): unsure at all n locations
ntaattaaacctgtgntaaagaaattatatatgatcttataaggggaaaaaaccaaatatgtcccatcttcatatatttggatgtaaatgctttgtgttaaataatggaaaagacaacttgngaaagtttgatgcatagtcggatgaaggtatatttcttggttattctttgaatagtaaagcttttagaatatataataaaaagaactatgactattgaagaatcaattcatgttgcttttgatgagactaactctattagcccaagaaaggatatacatgatgatattacaaatactttagaagatacgcatattcatgaagaagttcacaaagacaaagaagatggagatagtagagattctcaatccaaagaaaatcatataaacatggatgttccaagggagtggagaacttcaaggtatcaccctctcgataatatcataggtgacatctc

SEQ ID NO: 184247 - DNA, 379 bp, Glycine max
gcttgcctcaaagaggtccaggaaggacattgcggccgaatgtactatttccgccccggagtatgacagtcaccgctttaggagcgttgtacaccagcagcgcttcgaagccatcaagggatggtcgttcttcgggagcgacgcgtccagctcagggacgacgagtatactgattttcaagaggaaatagggcgccggcggtgggcaccactggttactcctatggccaagtttgatccagaaatagtccttgaattttatgccaatgcttggccaacagaggagggcgtgcgtgacatgagatcctgggttaggggtcagtggatcccgttcgatgccgacgctatcagccagctcctgggatatccgatggtggtgg

SEQ ID NO: 184248 - DNA, 449 bp, Glycine max
  unsure (1)..(449): unsure at all n locations
tatccttatggcctgcctccggacttcacccnccgtgccatcccggaagagtgaagccaagcacctacttttgaggggcaactcccaccttatgaagactatcccgggcaagacgatggggaaggagatacccatcttggccccctgctccacctcaaagatccgtccccgcatgaactatcccaaccgaacatagtccgtcataccccggcctcacccacacccgtaaaaaaatctgttccttttgcggaagataagggaaagattgaggcgcttgaagagaggttaagagcagtcgagggccttggcaattacccattctcggatttggtggatttatgtctcgtgcccaacatcgtcatccctcccaagttcaaagtaccgaactttgataagtacaaagggacgacatgtccgaaggggcatcttcggatgtattgccgaaagat

SEQ ID NO: 184249 - DNA, 439 bp, Glycine max
  unsure (1)..(439): unsure at all n locations
agctntaaaattngaattaaaacgttcaatatctgctggtttattattaccatatatgtgtaatcgattacacagtgcaaattttgaattcaaattttaatagctgttgtaaatcggtgttggccattgtaatcgattacatcatctggtaatcgattaccaaagagtaaatctcttgaaaaagactttttaatttaaatttcttggccaaaccttttgctacttcgattggaattcccttcctatttaatatacccttcctaaaactctaaagactgtctngatcatccatcttgaatatctntaatttctttgtcttgaataaatctctgagaagcatgtgatccatgtgatcctttggcatcatcaaaaacattcagcttgatcctttgtctacaatctcccnctctntgatgatgacaatccctgagatcaagac

SEQ ID NO: 184250 - DNA, 469 bp, Glycine max
ggtcattgacacaagtagcaatcttctcttgagctcgccttgttcgtgtgtgggactcgcggcttccaacagaaccaggcaaccaccgcatcgcattgctgtgtcgtgtgtcgtctagtctcgcgtcatctggtctcggctcgcactctcgcatcgtctgagcagctccaactcgccatgaatgaagaacagggacaaacacaaaatgaacgaagcaaaattcctacactaaagtggagcagtggacacaaagcgacgccatattatggaaattttttttttcaactgaactcgtgtgactcgggccagactcacgagtttacacaagtctaccgtgagtccaccaagcttgcaataaaacgtgttgcttctgagttgactcacagagaccaagtaaactcttaaactcgtaagagtctatgagttgactctagagtttgataaccatgcatgcgccattatctgtttc

SEQ ID NO: 184251 - DNA, 305 bp, Glycine max
gcaacctttttttttgtttttttttatgtgtttttatttttttttatagttattttaattgctttttttttttgcttttaaatttttttttattgttttttagttttttttacgttctgtttttttttttagtttttcttttttttttttttttttttttttttttattttttttcttttttttttttttatttttttttttttgtatttttgttttgttttccttatttttgttttttattttcttttttttttctttttttattttttttttttttcttttttttattttaattttttttatt

SEQ ID NO: 184252 - DNA, 447 bp, Glycine max
  unsure (1)..(447): unsure at all n locations
agctattttnggaccttgaacaagcaatcatctcctctttcttaaccatgctatgtgctcgcgactggtccctttcttcccttcgcaacttgagttcattattgctaccccatagcgctccgcgaaatttgtccggccatactcttccttgcgagccctcttggtctcttgttcaagggctcttgcggtaattgcattctcttcccgtaacccggcacactccttccgaacgtgtgtagcggccaacttgaacttctccttggcaagttttgcctttcctaactcgcttttgagagtttggacttcttcgtcctcttccggtgcttcaaaactctcttcgctgatgacttttaacttggcgagccaatctaaacctcgtatatgagctntcagccattcgtggtacccaccaatgatgccattacgaatacctctaagctcttgatc

SEQ ID NO: 184253 - DNA, 478 bp, Glycine max
  unsure (1)..(478): unsure at all n locations
tggaaggatgcttcaatggaggaaaagaaagagggacggatagagagaggggggagcacgaaattgaaggaataaaagtgggagagaagtggaactttgaagtatgtctcacaagactctcattcatcaaagttacaacaagtgttacacatgcttctatttatagactaggtagcttccttgagaagctttcttgagaaaacttccttgagaagcttctttgagaaaacttccttgagaagctagagcttagctacacacacccctctcataactaagctcacctccttgagaagcttccttaagaagattcctaaagaagctagagcttagctacacatacctctctaatagctaagctcacctccttgagatgagaagctagaacttagctacacacccnctataatagctaagctcacccncatgacaaanaaacatgagaatacaaaacanaagtccttactacaaagactac

SEQ ID NO: 184254 - DNA, 340 bp, Glycine max
agcttatggctattctcaggttttaacatcttgttcttccaactgcatgattgactctgccacacaattctaagccgttattcagtgctgcaattaaattctcccgtttatgacttctaataaaagttgcacaatttttttatcaagagttttaatgatcttatgaaaatgtagaggcaaagattgtacattgaaattaaaagagatattatacagtgtagataagactctgaaagttacatatgaaatcaaaacctgcactttctacaaacatgaaaccaacgtctcttacaaagagaatttccagcaaataaatgcctacaactagataacaatagca

SEQ ID NO: 184255 - DNA, 465 bp, Glycine max
  unsure (1)..(465): unsure at all n locations
tgctaatntttattnttttaatagtatatttaatatcttccaagttntgtaaccagaattggtctgagcaacaatgagatggtgctaatccctctaggaagttgataaacatgacattgatgagcaggaatacgctaataaataagagccattactcagtcccgaacattaaatgaactgagcacaagctcttttatgagtctttggtttcattaccttaaccaagtccagaagatcaataaattgaggaaaggctttgaggttactagtttacaacctcatagtaggaggcctaaaacaatcttcttggcgccttaacttggtaccccaccatattgatgtaatgtcttatatggaaaagaaaacgtttataatggagaagtagacaaagtagcattgaattgttggaatatttgtgtttaatttaaaattataaatatatattaattctattttataaaatag

SEQ ID NO: 184256 - DNA, 355 bp, Glycine max
  unsure (1)..(355): unsure at all n locations
agctatcttattggntgaaaccaaataatatattatgaanaatgatagataccagtaaaagaaaaaacttagatataattctttaggtgtttttaatgttngtcttcaattagaattgaattctaagttagtcatatttcatgcaaattctaagtttgaagtttatggcttttccatttggtctgaatgacatgataggaacaatttcaaaccttaatggcatgacgttctcttataaatgcggcatccaccctatccttcaagtagtcaaccttttgagcaaaataccatttatgagcccgtggtttaatgcagaacttcttatagaatggaacccatttccttgcaaaatcat

SEQ ID NO: 184257 - DNA, 463 bp, Glycine max
  unsure (1)..(463): unsure at all n locations
taggttaaattagtctaaacttacgagggatctaggtttattattntangctacaacatagaacacaaaagcatgattgattagagaaatatctttatatgcattagcttgtttgttagaaagacccaacgctttttacctattactgtcaattgttacttacttgcatttactatttttaccatagtagttatttatgtattaaccatccattatcaatgttgctccaacaatgccttacttctgaataaaactttgtctaataagcaagttccctgagttcgatactcagatcactctgttctaattttaaatacttgacgacccggtgcactttccagcgaattggatttcccttgaacatatttgtataaaggaaaattggaccaaaaagtaactgtangggaaatccatcatggngtctggngtgacaataagtcaatactatggaagggcttcacat

SEQ ID NO: 184258 - DNA, 426 bp, Glycine max
  unsure (1)..(426): unsure at all n locations
agcttaagtagngatgtgaatgcacatgaatgatttttatattacatctctaatactgattaagttccaggttttgatagaataaggttgtggcatattgatgtctaaaaacttaaattactttgtccatgtatgccggtgattnttctattttgaaataattttgagatgaagtctatatcaatcccaaagttcaccaactaaacagttttttatcaatcagaacattcaagattcctcttatcctacttctgtctttcaaacttcctgggcattgatccctaactcacaattctacagcaaaattatattaaacctattaagatcctaatgacttaccttttcttcaggatataaatttgagaaacaaaatagtttccctctaaaaacatttgctgacttcgtgtattgaacactgggagtatg

SEQ ID NO: 184259 - DNA, 465 bp, Glycine max
tgtaagttgtaacgtgtcctagaatattattatgtctttgcttcgacggagaaaagggtcggaaccgggaaagggtccgagccatagttcggaaccgaaggttctaagcgaagaggagacagaagatgataagaataagaaaaataagaagaagaagaacaacaaatggtcgtgcttcgatagctgttgttggggggtggggtgcatttgcactttgtggtggtttcttctgtttctgtatcagatgatgccttcttcgattccccagtatgtgactgaggccttcactgggcccatgccggacccaccgggcctcaagctcaagaaggaagggctcaaggtgaagcaccctgtgggttttgtgccagggattgtcactggtgggcttgaactgtgggagggtcaccagtgtggctgaagggttgtcaggaaacgcttgtggggtgggtactttggagaagtcta

SEQ ID NO: 184260 - DNA, 423 bp, Glycine max
  unsure (1)..(423): unsure at all n locations
agcttgcggactataccttctaccgaacacggccgngtttttgnctaggcccggattcaaggcaggctgcagcaccggctccgcttccctaactgtactggaggcggttgcggnggctntagctctatggttttctggagttttaacatgacctccgagatggaagccatttgatcttttaaggccgacagatcggccttcatctgttcctgcacgccctcttcattatccatttttctggatcgagtgttataggggtgccttggtgttttcttagttatgatgaaattcctaaagaaataaacaacggttagtatgtcaccaaaacatgagtatgcaaatggatgatcggagcacttggatccaccccaagaatnttagataacgtaatgagtccataacttctcatcttataaaaagaac

SEQ ID NO: 184261 - DNA, 467 bp, Glycine max
  unsure (1)..(467): unsure at all n locations
tgttagagctatcatcacatgacgctgtattgtcacagaataagttgctttctagacaacttgagattntaacagaaacacttggtaagttgccaactaaactgtttattggtcaacctacacattctttgtttttgcaggttacaagttgtaccatctgtggtgaggctcatgaaacacgtcaatgtattcccatcaaagaaaacactcaagaagttcactatatgggaaatcaacagagacaaggatatactcgaggaggattctcaggcttccagcagggcccttataaccaacaaggacagtggagatcacaccctggcaatcaattcaacaaggaccagggtggaccttccaacaggccaattcaacaagggcctaacatctttcataggactactaagctggaggagactctgactcagtttatgcaggtaacaatgtcaaattataaaaacactgagtca

SEQ ID NO: 184262 - DNA, 417 bp, Glycine max
  unsure (1)..(417): unsure at all n locations
agcttgaaggcaaactggatgcattggtttattnggtaacccagctggccttgaatcagaaatctgtacctgttgcaagggtttgtggtttgtgctcctctgttgaccaccatacaaaccttgcccttccatgcagcaacctggagcaattgagcagcctgaagcttattgctgcaaatatttacaatagacctcctcaacctcagcagcaaaatcaaccacagcagaacaattatgacctttccagcaacagatacaaccctggatggaggaatcaccctaacctcagatggtccagccctcagcaacaacaacagcagcctgctccttccttccaaaatgctgctggcccaagcagaccatacattcctccaccaatccaacaacaacaacaaccccagaaacaaccaacagttg

SEQ ID NO: 184263 - DNA, 460 bp, Glycine max
  unsure (1)..(460): unsure at all n locations
ngcanggctaagactagtagtttctgcacctgtgtcaattatgtctttacatttctctgatgcaagcatactgttttcgagatcacgaagtgtgccactttcagatatgttcagcagggcttggtttacaccaggaagcaatggagatccccttggaaatacctgcaaagacattagttgaagggctagaaattaatagtaattcttacatgatacattgcctttagctacaaccaattaaaaacttaagcgacatgaaaataatagacaacatagatgcaaattcataagtgattttagtgttctccaatcagaactggagtttcaccttctaacctatgctgatctttagtgtaagcctctatcatgcatattacccggatgagactccaatctttattggagaaaaacacaaaacacacctaagaagttgcatgtagtcttatcctagaataatagt

SEQ ID NO: 184264 - DNA, 391 bp, Glycine max
  unsure (1)..(391): unsure at all n locations
agctngtccacaaaaatatgtttttgaatgtttatcatttcagnttcttactaagtgaaatggatcatttttaaggtccaacgccttaaaatgatcgcccttcaagtaaaagaatcactgattcacgcataagaaagaactacgtaggtctgatttcctcttcggtggagggtacgtaggagcaaaagccccgcttttgtcgacctcaaaaaataaaaagaaataaaagttaaggtaacacaatttccacaattctaaaaaataggctgttgtcctttgagacaaacgtgagaggtgctaataccttcctcgagcgtaaatacaactcccgaacttagaattttcattttgaccggtttccttcagttttccgacgtttccacaataaacg

SEQ ID NO: 184265 - DNA, 364 bp, Glycine max
  unsure (1)..(364): unsure at all n locations
ntatgccttgctaaactagaagagttgttcctagtacccaatatcatcacccctcccaagttcaaggtgtcagactntgacaagtacaaggggactacttgccccaagaaccatctaaagatgtattgtcggaagatgggggcatacacaaaagatgaggaactgctgatacatttcttccaagaaagtcttactggggtagctgttacctggtacactaactaggaaccttctcgagtccattcttggaaggacctaatggttgccttcgttaggcagtatcagtacaatttctatatggctctatataggatgcaactacagaacatgtgcaaaaaggggcacgaatctttcatagaataca

SEQ ID NO: 184266 - DNA, 351 bp, Glycine max
  unsure (1)..(351): unsure at all n locations
agcttgagatgaggaagtgtagaagggtgtatcttctgcttttanttcgtgaccacagagtggtacctggagatgtgtcgcgggggtcaagagaccttggggacntcaagtgggtgccattgcccaaaaccaagcttgaccaatcccgacccaacccgggcatagtcggtcagtgagaacctgtgatgtacctaagcaggcgagctcctggcaatcaacagataaaaggaacaaagaccacaaagcaagggggcttgtggtggctggccaactgtgaattttgtgtgtgggttgtggcctctggtaatcgattaccaagggttggtaatcgattacaaggcttaaaaatga

SEQ ID NO: 184267 - DNA, 460 bp, Glycine max
  unsure (1)..(460): unsure at all n locations
tcttatccaaggcactctcttggtggtgaagcttcttcttccatggcttattccctaatggatggcgcctcctctcaccccttctcctttatctttcgctgcatctccatagtggaaaatcaccattaaaggacctcattgaagctcacagatccagtgatgtagctccatgtggagcttgtaggccttggatcttcttcatcaatagagtccttttcttcttgacgatcaatggcagcagaatagagatggaagaaagatgattggagatgccacttcaaggagtatatgagtcaagaagaagctcaccatcatatgaagccatggataagagcttgaaggtacgagaagatgagtggagggagagggagagaagagcacaaaattctgtgcctcanatgaggtctgaactntgaagtgtaattctcacatgtcnaaagttgaaaaatgcacacacatg

SEQ ID NO: 184268 - DNA, 414 bp, Glycine max
agctatgaatgttcatcattgctacgagttcattaaaagaatcgaaatgctggaagtaaactaacaagggaaaggtaaattgcagaatttaaaggagcagcgagttcattcgatcgatgaaccatttaaaagacaggaattctaaagtaaaatgaaaaatgcattgcattcgaaatgtaaagtttacagaaacttaaaatggttcacaatcatacatttcccttgcgtactcgtttctctctgcgctgggtactttgagtatataaggattttgtagaaatgatttgcgaccccgaaatctgactaacaactgctatatatagacattttaaaaataaactggtctaacggtcgaacactatcctaatgccaagtgtcctgctacgtacaccttgcatgcatataaactgctct

SEQ ID NO: 184269 - DNA, 449 bp, Glycine max
  unsure (1)..(449): unsure at all n locations
cgctttgtagntntggaataattgattattgtgacacacaatgagatcctaaagtttctagatgcaatctaatcgattacttaatgtggtaatcgattatctcgagccacaaagtctttctttcattgaaactgacttatgcaattgattactgaaactggtaatcaattaattcaatgaaacttgccaaatttcaagtagaagtaagttctattgcttgttctaacactttgtaattgattactaaacattgtaatcaatttcactgtgttgaactcattgcttctaagaaactttaagatcaattcattaatctaccatgtgtgatttctactaagcatgaatataagagaactaagactaaatcactcatcatgcatagtataaaaacatccaatacaaatgtaacatcttttanaacctgttnggcattgtaaaatgaataatac

SEQ ID NO: 184270 - DNA, 392 bp, Glycine max
cgctcttgtaatttaatatattttctcatttttgtttctggtatttttttattttaattcttacaaaatatatttggtttattttttatccttaagacactttaaatagtcgttaatggtttgaagagtaaaaaaatgttatctaaagtatttttaaaaaacaaataaaataaacatgttgtggaggactaaaataaaaaaaaataaaatgatgtacaaggacaaaaataaaaaaaaaaatacttatttacaagaaaaaaaagatatttaaacctaaaaacaaatatgtatcacaaaagagaatattcttctatcattattttataaactaagattatgttattttcaatagaaactacttgagtaatatgctttcaattagagataatatt

SEQ ID NO: 184271 - DNA, 276 bp, Glycine max
caaaacaaggtctccacatccataaatcacgtacaaacccaccatcccctgttgcccacctccaactgagctcacgaactcccacgaagcccttatcctcgttcctctcaacgccgaggccccatcaatcctcccaagcttgcacaacatcccaagaattcaacatccactcatcacaaactaacaaaaccaagcaaaacagggcaaaggcggaaaaccctgcccaaaactcaaaccaaaaagcacagcgtcttctcacttaaagacaccacgaac

SEQ ID NO: 184272 - DNA, 378 bp, Glycine max
cttcttttggttgggatgtgtgctctatctcccaagattgcatggtccctaacagtcatattctcaatcaattccatggcttcttcaggggtcttcaattttatttttccccctgtagaagcatctaaaagttgctaggattgtggccttaacccgccaatgaaaatatggagctggattggttttgaaaatccatgagtaggcgtctttcttattaacccacgaaatctttccaaagcctcactcaaggactcgtctagaaattgatgaaaggatgagatgacagcctttccttcagcaatcttggactctgggaagtatttcttcaagaaattttcaaccacttcatcccaagacttaagactattatctttaaat

SEQ ID NO: 184273 - DNA, 381 bp, Glycine max
  unsure (1)..(381): unsure at all n locations
tcttcctatcacttaaatggctaattacggaggaaaaaaacaaaaagcaaacaaatttgtctttgtaataacttttttcaattttgtacaagctcttcattctattttatattttctttgagattttattcttcctagaaaaactttatttttactatatttttttaaaatttgagattatccagcacaatatttatattatatatgtactaataacaatggatataaataataacaatttatattttttaaccaaatagnattaaaattgaatcctaattgattttaaatataaaataaatcgtattaaaaaaaatactcactttggcgtttcccatcttccgtgaaaagtagtttttttatgggtctatttcataccat

SEQ ID NO: 184274 - DNA, 377 bp, Glycine max
  unsure (1)..(377): unsure at all n locations
gtagctaaactctagcttctcaaagaagttttctcaaagaagcttctcaaggaagttctcttaaaaaagcttctcaaagaagctacctagtctataaatagaagcatgtgtaacacttgttgtaactttgatgaatgaaagtcttatgagatacacttcaaagtttcacttctctccctcttttattccttcaatttcgtgctcctcccttctctctttcttttcctccattaaagcatcctcttcaagcttcttatccaaggcaattcttggtggagaagctccttctttcttggctgtattcctagaggatggngcctcccctctcctcttctcctttgccttccgctgcatcttcatggtgaaaaatcaccatt

SEQ ID NO: 184275 - DNA, 334 bp, Glycine max
gtacctggagatatgtcgcgggggtcaggagaccttggggacgtcaggtggggtgctattgcccaaaaccaagcttgaccaatcccgacccaacccgggcatagtcggtcagtgagaacctgtgatgtacctaaacaggcgagctcctggcagtcaacatataaaaggaacaaagaccacaaagcacggaggcttgtggtggctggccacctgtgaatcttgtgtgatatatgggttatggcctctggtaatcgattaccaaaggtgggtaatcgattacaacgcttaaaaatgaagacaggaggctaagatggtctctggtaatcgattacca

SEQ ID NO: 184276 - DNA, 402 bp, Glycine max
  unsure (1)..(402): unsure at all n locations
atcctcttagtcacctgcggcatgcaagccctgtaagtntaagctagcggttttattttgttagtttanctaatgtgttaagctctttgcacaggccaaagttgaaggaacatatgcagtactgtgttgatcatcctgaagagatacaccagctcgcataggcgaaagctcatgtttctgaagttaagggtgtcctgatggagaatattgaaaaggtacagatgcactacttacttgcattaatttaagaggataatatcttataaactgaagagaccacttggtactagaatcatttctgccaataaaataaatatgattgtgactgtttggtggaaaaatatggcccacgccaggggaatatgaaccaaaatcagaaacccatcaagtctccattcacat

SEQ ID NO: 184277 - DNA, 419 bp, Glycine max
  unsure (1)..(419): unsure at all n locations
taagcagcaagtattaaaaaaaattgttagtataaaataaaagtgtgtgtgctgctaattaataaaaagaaaagctaagtgtggaaaaacaagtaatagagctggaataaaaagaaaaaggttgatctaaggatgaatgctctcctanaacccaagcttttgcatcctataaaaaccatgaattgtttgcagcctagccttgttacaagcctagaaaagtccttcggattcagtttgtgtgttcttgattgtaagacatgagatgaattgcaaaaattgagacttatgttggtttgtgattgttgaataagcctaaacactcgtgcttgagtgaaagagtgactgtgaagctttggtaatgatccttcctgatatctgcattcttacagctattcattgtgtcctaatatcatgtcaca

SEQ ID NO: 184278 - DNA, 373 bp, Glycine max
taagtcacctgcggcatgcagcttttgttgatcttacatttatttttatgttccaaaacatactccctaacaaaacagctaaagtagttgagtaaataaatgatagggcagtgtatcgagtattgcgccaataagacctatgttgtttccacaagcaaaccatgcattgtatgaaaaaggaagttgagtattgtgaaggaaaataaaagtctttcgaaccacgggctggagtactcaattttttaacaagttctttgtttcttctgagacagaatgccgaaaaccattatcagtaaccatggtgaataattataataataacaacataaatattgcacttctagcggttaagtgctttctagcatattacttt

SEQ ID NO: 184279 - DNA, 384 bp, Glycine max
gggagcaataagggtcctgtggatgttcttcttacactgacgatacgatattctttggagaagcatctatggccaatgtcaaaattgtgaaggttactctcatgagttttgagctggtttctggattgagaattaattttgctaaaagcaaatttggagctgttggtcaatctgaggagtggtgtcttcatgctgcaaactacctcaattgtgctttgctccaatttcctttctgctatttaggtattccgattggtgtcaatcccaaaagaaaggtggtgtgggatcctataattaggaaatttgaggatatacagaacatgtggaagatgggtagggctgaccaaatcctgttctcggaagatgcttgggctgaagatggga

SEQ ID NO: 184280 - DNA, 381 bp, Glycine max
  unsure (1)..(381): unsure at all n locations
gcctaccactcatcaattatcattaagtgaaaaccttctaaccatgactcacaaacttgacacacttatcactaccctggccactcctaaatcccctataccctcaccttcctcgtccactaccattccatcatcttctccttccttatagccccactgtatgaagttagacgtcccgcgctttgacggctctaatccattgggttggatattcaagataacccaattctttgaatagagaacatgaaagactgaccatcgccttctttcgcttcttttacatggatgaccatgctttaacctagttttagtggatgaccagctacggtcaactcacctcctggcctattttcctccatgcccttcnacccgcttcacacc

SEQ ID NO: 184281 - DNA, 444 bp, Glycine max
  unsure (1)..(444): unsure at all n locations
gcttaacattcaattgcgagcctctcgatatattattatactcaatcagacatcccagtaaaaagntattgtcgtttgaattggctgaaatcttcaacaactaatttccagcgtctcgatatgttacgggactcaatcagacattccagtaaaaagttattgtcgtttgaattaactcagagcttcaacattcaatttcgagcgtctcgatatattacgagcctcaatcacacattcgagtaaaaagttattgtcgtttgaatttgcttaaagcttcaacatttaatatcgagcgtctcgttatattacgggtctcaatcagacatccgagtaaaaagttgttgtcgtttgaattggctgagacctttaacatncaatttctagcgtctcgttatatacggtactcaatcgacatccagtaaaagttatgtcgctggattggct

SEQ ID NO: 184282 - DNA, 388 bp, Glycine max
  unsure (1)..(388): unsure at all n locations
tgcgcgtactgatgggtatcatgangtgtttgctggagtttgacccatgcgggtgttgaagagacggcatgggcatctccttccttcctttttgcccctgttgccccgactcttttggcgttcacgtttgtggaggaaacgtaatcaaactttcctctcttcaatccaacctcgattctttccccggcaaacaccaaatccgcaaagctggacggcatgtaacccactagcttctcatagtagaacactggcagagtgtctaccatcatggtgatcatctctctctcaaccatgggaggagctacttgtgccgccaaatccctccatcgctgcgcatattctttaaagggttcaccctctttcttaaacatanttctgcagtgagtac

SEQ ID NO: 184283 - DNA, 379 bp, Glycine max
  unsure (1)..(379): unsure at all n locations
atatcaagtcggtgatccaaagnaacctgtntacctaccttggtatactgctggagggacgtgcacatttcgaagaagagagtttgttggagaatatgaaaagaaggtctgttgatgaatctacatcatcaggtaattcttatttccttgtataaaaggttgaccagaaggctatttctttttggactttggatgaagtagggggcagcaatttttttaacattttcccttttcaaaattttctggatagtgtaaactgtaaaggaagttgtcttccatagaaccttcctttaacaatgttgaatatagcagaaggagtattgtcaactttgcgatgacatccttcttttctcaactaagaaaggttaactatgttagt

SEQ ID NO: 184284 - DNA, 328 bp, Glycine max
ccccccaaaggctgatgatctaccgcccgactcaacgacgagcgcactgaaacgagagatattgtttttgacacgcctgcagaatgtgggctcatacggtggataccaaaaacgtgggaattgcgatactaccgagatgaaaacaccatccaccgaatgaaacataaacgagccaaacacagacagctggcttcacgcaagttttacgataaacagaaaataccaggtggggaggatttgtaggaaataagaggaaacactgcttttgaacgaaatagcaaaatcatcccgtgaagatttctatccgaaaaggagaatggacaaaacc

SEQ ID NO: 184285 - DNA, 436 bp, Glycine max
  unsure (1)..(436): unsure at all n locations
agctnngatctattgttgtttattttaaatggggattttatcttattttcgaatacgaataacataaaatttgaacaaatccaaacgtaaaatcattccaatcataaaataacattacattaacttaaagagagtggaaagaaataaaattagcatcaaatacgataattaagcgatgctaatnttgcgacaaggacatagacttcgtcatatcagcaataagtgtctttttatctttagtcaatcgcccgacatatggatgtccaactaatgacttggccaattcatgattatgaatcccacaaatcaacttcgtcatctagccttgtcctccaatcactggtttgcgacgaagctcgaagggacacccacattttctagtcccagggtctttctaacaaatctttcttatacacttatactcgccctcctttac

SEQ ID NO: 184286 - DNA, 406 bp, Glycine max
  unsure (1)..(406): unsure at all n locations
agcttanctacacacacctatctaattttatgctcacctncttgagaagcttccttgagaagctagagcttacctacacacacccatctaaaaactaagctcacctccttgacaaaatacatgaaaatacaaaaaaaaagtccctactacaaagactactcacaatgccctgaaatacaaggctaaaaccctatactactagaatggtcaaaatacaaggcccaaaagaaggaaaaacctattctaatatttacaaagaagagtggatccaaccttgatccatgggctcaaaaatntgccctaaggttcatgagaaccctaaggccttctttagtagctctagcccaagcctctaggagtcttctatccaatccccatggggggtaggatngcattaattggagac

SEQ ID NO: 184287 - DNA, 450 bp, Glycine max
  unsure (1)..(450): unsure at all n locations
agcttatgactcttgacaatttctttattattagtcacttaaaaagttgtgacttttgaaaaatcttcagaaacaagtcatttgaagaattgtgacttttggaaatgtatttttcgaaatcagtcactggtaatcgattaccatcaaggtgtaatcgattacacatcaacaaatgtgactcttcattttgaattttgaaaattaaaacgtttagaggctctagtaatcgattacaagtgttgtgtaatcgattacactagtttaaaatgatttaaaactattaaacacaagttgtaactcttgaaatntgaaatcttaacgttntaaaacactggtaatcgattactaccttctcgtaatcaattaccagagagtaaaactctttcgtnatgattttgtgaaaacttcttgtgctactcaatggtttgggaannacttttagctaatatc

SEQ ID NO: 184288 - DNA, 295 bp, Glycine max
acatgatactttggcacattatttcagctttctagttgtgtgcttaagtttccatctatattagttatattttgaaactatttttctctccaaagagcgattttttatttacaaggtcagggatctggagatacattttgattaaaatgtgcttgtcacaacttacactagaatgagaaaccatctttcccctccaatatttgacacatacacattgaaccttcgaccaaaagaggaaataaaaacaatgacctgcattgtgtttacaaaagcaattacacttggtgttgatatg

SEQ ID NO: 184289 - DNA, 384 bp, Glycine max
  unsure (1)..(384): unsure at all n locations
agctngtagcaagggtattattatggataataattggactacatngagagatacattgcgagttgtctataacaatactttttgtaagtataatataatattaatgtgatgatatgaagaatactaataatctattaatgaattgcaaattacaaattacaaatctgtatcaagtttcaccattaatagctgaatgttgtcttttttgttcttgcaaaataattttcctacgcttccttcgttcaacatatatgtncatgagtaattgatttctgcaacaactgccttataattgccaaacaataggacaatcaaatgttgaaattgagtaaaataagttgctgtagtgggctgactttaaaatgataccaacattatagttat

SEQ ID NO: 184290 - DNA, 356 bp, Glycine max
  unsure (1)..(356): unsure at all n locations
acctgtcaaagattcatattttaacggattttaaatttttttgaatatttatctccctatgaaatacttatcaaataatttttcattaatgccaaatctgataaatatgatatgcatgaaaggaactttccatctaatatgagatttaaaataaaattattcaattaaaagttattaacaggtattaaatgatgtaatatgtaatgcattacattcatgtcattggatctctcctatatatttattaatctttatatattaataagactttaatttctatgtgttaatgtacacatatctatactacccatccattacaaattatggtnattatgacttttaaagtgattattaaa

SEQ ID NO: 184291 - DNA, 338 bp, Glycine max
agcttatgtgatatttatcagtatgcaggtctaatatggttgtcctgggatctcaggagcaactttgcattcatgatgaagtgaagttacttctgggaaaaacacaaacaaatgcttggcgattactctgtctaaagcgtgggaagcgtcattgtaaccattttaaaaaagttcctggtaatattgtaaaaattttccatgcatacaatatgggcgcttatattttatgtgtggaccttgtttgacattatgcatcgtgtatcagtaattcatatttaacacttagcatgtatttatttgaatgaatgaatgttctcatatatgttctgtgatcactc

SEQ ID NO: 184292 - DNA, 394 bp, Glycine max
tttaactacccacacccctctaataactaaactcatcttctcgaaaataaaacacggattaaataacaaaataaataacatccaacatcaattataataactaataaaattttagggtgttacaactctcccacccttttatgaaattcgtccccaaaatttacctgactcaaacaaggatggatgagcttctcgcatttgactctctaattcccatgtggcatcttctcctgatgcacctccccagatcaccttgaccaacagaatctctttcctcttaggtgttatgttcgctatcctccgtcctcacaagaaatgtttcatatgtcagattctccttcacttgtacgtcatccaatccaatcacatgggatggatcatgaatatacttacc

SEQ ID NO: 184293 - DNA, 265 bp, Glycine max
ctaccataaaccaagaaaacagagttgaggcagaaaactctgcccgaaactcattcaaattgcacaggtttgcctagtgacataccccaagaacattttcttcgttccgaatcgctaaccagtggatcgccttgaaaattttattggaggttgctagtacataaatctacattttgaccgttgggatctggtataaaatgcctggaacaagagatgtactacccttcctgtgaccagcaatgcacaaccatttttctggactatg

SEQ ID NO: 184294 - DNA, 350 bp, Glycine max
ctccaggagaaggggacagcatatttatatgcccatctctgttctattagaaagaataatacccaatcattctcgggcacccatcatattcaaatgaatcctgaggctggtctgttctaagtcagagtcaccatgattaggttccttgagtcaacctcctcctttttggcaccagaataatttattgaaactgggctccttatatattattctgtaatggagcttgataattaagcctgactgaattagctcctcttagactactgactaaaattattcgaattttttcccaattgtgtcagcttctcgtaccattgataactttagttttagataccccagaataatga

SEQ ID NO: 184295 - DNA, 450 bp, Glycine max
  unsure (1)..(450): unsure at all n locations
agcttgtcaaacgcacgatgaggttaattattactttntaacacatcaatcaaaagattatcataccttgaatggtttgaggagacccatacaaatctgcacccttcttctttgaccatcagatactttatgcaatctccaggaaagatcgatatctaatacctacccaattgaacagcaaaacagaaattaagaaacagtatttccagagacaactatttatgcattcccacaaaaaactttccagaaatagccatgcttaaacagagaaaatgaacatcaagagaccataatggctnntatttggtcaaatctggcactgcaaagctcagtctttatgccatctggcatctaatatcaaattcatggatagatgctggtaacatcttacatgcattcacctcaatgagttagtttccttatatttattaacataaactacataagtta

SEQ ID NO: 184296 - DNA, 321 bp, Glycine max
agcttgagatgaagaagagtataaaggtgaaactttctgcttttattcgttgaccacagagtggtacctggagatatgtctcgggggtcaagagaccttggggacgtcaggtggggtgctatagcccaaaaccaagcttgaccaatctcgacccaacccgggcatagtcagtcaatgagaacctgtgatgtacctaaacaggcgagctcctggcagtcaacagataaaaggaataaagaccacaaagcaaggaggcttgtggtggctggccagctatgaacttgattgatgtgtgagagatggcctctggtaatcgattac

SEQ ID NO: 184297 - DNA, 464 bp, Glycine max
agcttgtaagattatggggtacccatcacatttggtactatgtggcggtcgggcgatggtgcacaacaagttttccacatccacaatgcgcgcataaacccatcatcccctgttgcccacctccaactgagctcacgtactcccatgtagcccatatcctcgtttctctcaacaccgggtctccattaatcctcccaagcttccccaacatcaaagtaatacaacattcaaacaacacaagctatcacagccaagcaaaacagggcaaaggcagaaaactctgcccaaaacaccaaccaaatcacatcttttctcacttaaagaccccagtaacaatcccttcgtcccacacgtagagacgcgcttcacgactccggaaatgccctccttttgcgatttggagcggaaatgggcaccaaaggttgaagctttgtgggcaacaatggtggaggaagaaaagaaga

SEQ ID NO: 184298 - DNA, 386 bp, Glycine max
tacacagtttcatgttaaaagttactgacatcctgctgctaatagacattagacgtagctttactcttagtaagaatattagaacaacacagcaaacaaaacactttctatgcattgagcaaatgtattcaaaaaataattatggattagaactaagttttcacaaatcttaagcaagcatcagtaacatctttacctgcagcactagaaagaacccaattgtcatcataaggaacttgccacacagcatagccaagtaacttattttcccttgcataagaaaccttcattttgacaacctcaacatcatcataacctatccaagtcgatccattggagaagtaattaactacataagtagcattgtacttgacatggcctccata

SEQ ID NO: 184299 - DNA, 440 bp, Glycine max
ggaccttaagtcacctgcggcatgcaagcttataaacctattgtgcaatgttatcctccaatattcagtcgcatctctactacaataccagttatgaaaacaatgcacgaattctaaaatgcaacacttagcataaaggtcaatttgtaaaggtcatatagcaattcaattctaatccaaatataccatattttatatatattcatattccccaagagtctacttttcaaatataattttattttcatcaaacaatatgtgaatcaaacaaagtaaaaaactgtgtgaagtatgtcaaagctgatatttgtaaaacaacatgtgtgcacaaactttaaacaccaaataatatagaaatgactctaagagcccatactcatggaggataacctcccacaccaaaattgacattaaaaaaatagaaactctcaataccttga

SEQ ID NO: 184300 - DNA, 336 bp, Glycine max
tatctcatccaatcaaaacccttttctcaattgtctctctctctgactcactccacaataagtgtcgattcttttctaaataagtgaaagtgtagttacacctttttttgtgtggttaccacttttgagtgccacagagttctgagtttcataggagaaaaaaaatgacagaagaacaaaccaaaacggttgagtcagaatcagtaacaccaccacctgctgctgctgtccttcaaggttcctcctgctgctgaggctgaacatgttcctgatgctccaaggatgtgactgaagagaaatctgtaattccagtgccttcttctgatgacaagcctg

SEQ ID NO: 184301 - DNA, 448 bp, Glycine max
  unsure (1)..(448): unsure at all n locations
ctgcaagctgttgcgttcttgacaacttcggtgtctatgccttctncattgngacacaataggaggcaacggacaattatccttttaaaaaagccacatgatcatacaaaagatggagttagcgaataaatcaatattagcttacaaaagtaaatggtatttttagtggataatatatacttgcacaaagtaatttccactgacaaagccaattgcaatgagacgggacgcaactggtgcaagactcctaagtgaaaagaaggtcaaactttgtagcctagataagtgaatcaatacaacattatatcgactagcaatgacataacccatgtcgtgaatggtcatccacttcacaacgagtactgggtcacgttcaacatacaaagaggtcattaattccaacagtctttttttaagccaaaacattgaacatggagaaaagtgtatg

SEQ ID NO: 184302 - DNA, 379 bp, Glycine max
  unsure (1)..(379): unsure at all n locations
taactggggataattaagggtgattaatggtgatctaaaatccatacaattggaaaaagggtaattaattcataagagtttaaagtggagggcagtttcataaatgactatataactagtttaaaaatagaattctagttaactagttggtgactaattaaagtgtctaattatatgatgtagaataattaaaataagttagagttgtacaccctcaaaaatacaattcanactaacaaacgaaactctatgttgtgttatctggtcatctatgaacttaatttcagtagttatatgtttgtaatcatagaaattcgtactatctatatgtgtgtgatcgacttagtanagcttgaaaaaaatagaaactgtctgagct

SEQ ID NO: 184303 - DNA, 427 bp, Glycine max
attctaaagtaatcactaatcactaatgtcacgtgacattctaagttgagtagtgattaacactttgatttattggattgattatagaactaattttttttaatctcagattcaatcattaaattcagcaactcttaaaagatacttaaatggatcttacatatttgcataacttatttttacttttttttttcttttcaatttaagcacctcataagcacttaatttttctaactaacacctctccttggacaaaaactcagatccttatattttattaataaattatttaaaaaatgaacatccaatcactaaaacatatattttatttaaaaatgagttattggttgtaattttaaaagcataagcacatatacttaaataagcgatcaatgttgttattaaaagaatgccccgatactcatcc

SEQ ID NO: 184304 - DNA, 281 bp, Glycine max
  unsure (1)..(281): unsure at all n locations
cttttattgntgaccacagagaggtacctggagatatgtcgcgggggtcatgacacctttgggacgtcaggtggggtgctattgcccaaaaccaagcttgaccaattccgacccaacccgggcatagtcggtcattgagaacctgtgatgtacctaagcaggcgagctcctggcattcaacagataaaaggaacaaagaccactaagcaaggaggcttgtggcggctggccaactgtgaaacttgattgatatgtgagatattgtctctggtaatcgatta

SEQ ID NO: 184305 - DNA, 367 bp, Glycine max
  unsure (1)..(367): unsure at all n locations
ccttattaatcctcctgtgcttatgccaccagtacctggaaggcctctcatcttgttcatgacaatcttatacaagtcgatggggtgtatgctggggcaacattacgaatccggaaagaaagagcgcgctgtttactacctaagtaagaagttcacgacctgtgaaatgaattactccttgctcgaaagaatgtgttgtgctttactatgggcatcccatcgcctaaggcagaacatgttgagccatactacctggttgatatccaagatggacccacttaagtacatctttgataagccagctctcacgggacgcatcgcccggtggcaagtcctgctatccgagnttgatatagtctacgtcacc

SEQ ID NO: 184306 - DNA, 504 bp, Glycine max
  unsure (1)..(504): unsure at all n locations
tccttatagtcacctgccgcatgcaagcttctacaaagacagtatcctgcttgtctgtttctcccccatttatccttcacagcttttgtataaatcttcttggtttggtgggaggagacaaagtccatctgaattagacatttgcgtatggtgtgtggtataatttgattgagtttcccatgaaattctttaagcttcttgttcttgtacattgcaattgatgataaaattgcaaaaagaaagcttctaattataaggttcaatgatccaaatttagttaaggagaccatctactcttaatgttagctcttttattatcattaaaatgaanaactgtttatcacgttaggtccatatttgttgaatgtgtgctagactattagcatttagcactattgcaataattcctgagctgcagtgagtcaaaactcaaaggggcttcagtgaatcatgatttaaaagaatctcccattgtacgtatattactactgtcttgatactgat

SEQ ID NO: 184307 - DNA, 393 bp, Glycine max
  unsure (1)..(393): unsure at all n locations
agcttgaaagtgcataccccaccatntntttcatagtaaaacattggtaatgtgactactattattatgatcatctccttctctgtcattggaggtgccacttgagctgccaggtctctccacctttgggtgtattctttgaaagattcgtgcccctttttacccttgttctgtagttgcaacctatcccggagccatgtcagaattgtactgatacttcctaacgaacgcaaccattatgtccttccaagaatggactcgggaaggttccaagttattgtaccaggtgatagctaccctagtaagactttcttggaagaaatgtataaataatttctcgttntttgcatatgcccccatcttctgacaatacatctttaaatggttctttgg

SEQ ID NO: 184308 - DNA, 289 bp, Glycine max
ttaagtcaccgcggctgcaactggatattataatccataattttttatgctcaatatgaagagaccaagttataagcgcacacaaactaacacagaccaaagtggttatgtgtcgagaaggttgaagaaattaatgacaggaactgcttcaacaacaggaacaacttcttgaagctcaaggaccacggagagagagaactaaaagtgaagttgcactaacttcactttgaatccgtaatttaaattatttcgtctggggttttaaaagcataggctgctgagaagtgtg

SEQ ID NO: 184309 - DNA, 308 bp, Glycine max
  unsure (1)..(308): unsure at all n locations
gacccaannaccgagcagcagcgnaaacccaaaaggaagaagttacattacacagcaaaacccggacggcaaagaaaacttaaatgcccacgatataccaaaggccccaaaaccagcagaggactatcggaaccgcgaagggaataaaaaaacccaaaaccaagtgagggaccaaaagacaacccgccacacagaaaaaaaggcgacaaacaaggcaactaagaaaccgaaaaagcattggagcgttctctgcagcaaggaaaaccacaagaaaaaaagacatgattaaaaaaggaagaaaaaaaaac

SEQ ID NO: 184310 - DNA, 416 bp, Glycine max
  unsure (1)..(416): unsure at all n locations
agcttatncgcatcaagaatatgatacaaattcagtgtcctcggcgtgtgcatcttcaaggtcccaatgttcctgctcgatagccttacgttctccggcacctccggcatcaagaacatcgccttctccttcgggtcgagcccccaccgcttcatcgccgcgatgaactccttcgtcttcggcttctcggcgaactccgctgcgaagtcctccaccacaacagcactggcgtgagcgctggcaacagcggtggagatggcgaggcgcttctccttgcggttgatcttgatggaccagtcgcggggcttcgggccgaagatgacacctccccggggcggagggcgtgcggttggaccctgcgggcgccaccggtttttctgcgggaaggcttcctccgccgctcgacctttcgcggt

SEQ ID NO: 184311 - DNA, 380 bp, Glycine max
tatctgaacttattcatctttgggatcacaagattgggtttaaaatagttcaattatatgcctcaaagtgtgaaagatttataaaaatatgttttgcatgaaaagttggaaacaacattgtgaataatagctctttgaacacaacattcttaatattgcctaataataataatataagaaaagcttctatttaagtaatcatttttagaacatgagaaaatattcattgacattaagttcacataatcatatcaaatattcaataatgagtgttgtgactaaccacttggagagcttagctatctaagtgcttgaacctctatgtcaagactttctaaacagcaaggtgatcttgagtaaaagttcaaaaggtaaagttt

SEQ ID NO: 184312 - DNA, 321 bp, Glycine max
tatggagctattatggatgctggatttttgaccttcatgaagccttcatggtgatttacacctggagatgcacccgaaggccaatgagaagaggagaggggaggccccctccactatggaataatccaggaagaagagcttcccaccaacaattgccttggataaaaagcttgaagatgatgctttaatggaggacaaaaaaagagagaaggggagagcgcgaaattgaaggaataaaagagggagagaagtggaactttgaagtgtatctcataagactttcattcatcaaagttacaacaagtgttacacatgcttcta

SEQ ID NO: 184313 - DNA, 320 bp, Glycine max
  unsure (1)..(320): unsure at all n locations
agctngctaccattaaaagagtattggatatatattctgttctcatcttccacatagaccaaacaacagccatccaccaagattgccaccttcctcttgttatacctttcacttgcacaaaggagtgttggagaaaatgctgaattggatgacatgggaacacactattgatattcaaccatgatgtggtctcccaccaaataggctgaatatttgagcagtagaaaaaaaagatgggaagcctcctcctccatttctgcccaaacagggcatgatgcattcgggagctgtaatcgccttcttagcagattactttttgt

SEQ ID NO: 184314 - DNA, 419 bp, Glycine max
  unsure (1)..(419): unsure at all n locations
cacctttaacaacatatttaataattgttatactacaaaatgntctctcaagacacatgtcttgtaatgttaacaaacctaacatacctacttagattgtcattacctgatgatataaaattattttatactcttaatatataacctattttttcaaataaaattatcatactttaatgtaatcaactgattattatgatgagaaaactaatataaaataaccctttttaatatgaaattaaccatttcacttacaagaattgatattataataatatattattatatcacagcgcaaaaaaatacaatattcgaaaggtgataacaaaaaggtgtattnttacaatttgtcaacaaatatacaggtaatcatattcataaattaattttaggtctagacgatcccatgatcactagac

SEQ ID NO: 184315 - DNA, 344 bp, Glycine max
tcaagctgcttgtggggcttctatggaggctgtatctttgagcttcaatgaggtcctttaatggtgattttccaccatggagatgccgcatatgagaaaggaaaagaggtgagaggaggcgccattcattaaggaataacccatggaagaaggagcttcacatccaaaatgagccttggataaaaagcttggagaggatgcttcaatggaggaaaagacagagggagagaaaaagagaggggggagcactaaattgaatgaagaataagggagagaagttgagaattgagttgtgtctcacaagactctcattcatcaaagttacaacaagtgttacacatgct

SEQ ID NO: 184316 - DNA, 422 bp, Glycine max
tgctcccttagctctaataaaactgtcaacacaaacggttgcaaagtgcttcaactccaaagattaaactttgtgcttgtgttgaaacaaagccatgtagtctcttttataacgatgtattgagcatatggtcaaccatgtttatacttttctaaaatgatgccttaagttcaatataagtatgttatccattgcatcccaacaagtacataaatctttcatgctatcacaaagcagtttagtgtaatgtcaacataagatacataacaaacaaaatgtgaaacaagcacttacaaaaatgaacctattagttggtgtgtttcaaagatgcatatagccatgcataataaacatactcctgaaatagccatgcaataataaacatgagcccgctatagccatgcataataaacatactcatg

SEQ ID NO: 184317 - DNA, 437 bp, Glycine max
  unsure (1)..(437): unsure at all n locations
agcttctcccnncaatttctataaatagggttgttttttatttgcaaaagggttcagccccttaggtacttctctctttttcgaattagcttggaaaaattgtttccgtgaagaaaatccgatccgaggcgctttcgaaacgtttccttaacgtcttcgtgaggaatttcccgaaggtgttctccgttcttcgacgttcttcattcgatcttcatcgttcttcgatctctaacgggtaagtaccttgaaccaagctgttcgattcattctatgcacaccgtggtggtccacattgngctcccagtatctctattctagttggatttactttttataccccccttttgacgtgcctatgccatttttattaagtcatttcttgcttaaccttaaaataatataatttccccgcccgctgcatcatttatccgtcactt

SEQ ID NO: 184318 - DNA, 318 bp, Glycine max
cgtccgggacctcaagcactgagctgcagcttattgaacctataaacagaactatcctataactggtgtcttcatgcgatgtttgaaaaacaccccaacaataatgtgaatctgttagaaagacgactatggtagtgaaaatatattacgacccaatcatggccgccttattcactataggagtaacatatttggcttcaaagcttggacaagagccccaacaaccataaagaataaatccgtggcggttgggattgccttttattgaggaaactctttcttttctttcagccgctaatagcacacaaggatgctatg

SEQ ID NO: 184319 - DNA, 366 bp, Glycine max
gactggtcaacacatgcacagtggcccaagatgcatgggagatccttgaaaccactcatgaaggaacctccaaagtgaagatgtcccaagtgcaactcttggctacaaaattccaaaatctgtagatgaaagaggaaaaatgtattcatgactttcacatgaacattcttgaaattgccaatgcttgcactgccttgggagagagaatgacagatgaaaagctggtgagaaagatcctcacatccttgcctaagagatttgacatgaaagtcactgcaatagaggacgccccagacatttgcatcatgagagtagatgaactcattggttcccttccacctttgacttcgactctctgatggactg

SEQ ID NO: 184320 - DNA, 312 bp, Glycine max
tcccttcttaagacatacccctttataacacaacaacatatttaagcaacgtagcttccatggcaggtcttgaaccttcctatatctgccacacctaagacaaactcctaccccaccacaaatacactttattcccctggttttcaccctcctatctctaatcatatcctttcacccgtgctggttgaattttattacacgcccaacatggccacaacaaagagagaacaacaaaggctcatgtttcaaaaccacgcctaaaaaacctgctttcttgtcattctactcgatcaaatctaccggtccatcgag

SEQ ID NO: 184321 - DNA, 463 bp, Glycine max
  unsure (1)..(463): unsure at all n locations
ccctcctctcctattctttctttctcttccccacccccccggggctgatctgctacgccccgaactaagcacgagccgcagccgaaacttaggggtatttcttcaagaggaccaacccagcccctcatagaaactanctcctttctacctctattgccgctagtggagaacacaatcggtgggctccctattgggatcttaaccctctcatgcgacgtcttcacaaactatgacctaaaatccacctctttatgtcaaaaaaaagtgtctagcgggaggggaaagaggtctaatggtcgttggggagtgaacccatagacacacataaaaaggggactgcttgggagttccatgaacccccctgttataggcaaacctacatgaagaagatactcgtctccagacatatatgcctctttcataacagaccttaaaaggtggaaaagacctatgaccacctctg

SEQ ID NO: 184322 - DNA, 393 bp, Glycine max
  unsure (1)..(393): unsure at all n locations
gctaacacccatcgtgcgggaatctgtatagttctgtgagggttcngaaagaaaataacccaaaaaaaacaaaaatgaggggtgaacttatcaagctagaggtgtgaatagcaaatttcaaatctgggcctatctagaggattcttgaccttttctttcttcctaactaagcaaccacctcgtctgggcgagctgggcggcaagcacctccctcctttngttgaaaaatgactttctccgtaaaattctcgtaaccctaaataagcatatttcacttaagatggttgagaaggaatagaanaataataaaatccagtcctatatgcttccataaagctttcgtaacttttccataaattacgagaaagggggctgaacttatcaatctgggag

SEQ ID NO: 184323 - DNA, 372 bp, Glycine max
gcttcaacatatattgcatgcgttctggattcttttctaactacaaacccatattggttgatgaagaatacaacaaagagagtttgtttaaagctcctgcagaaaattacctgcatgtattttaacttctcagcagtgcagctcatcagtcaaagtgattatcctgtaatatgagacggggcaggccaaaaagagaagttaataagctatttgaagtaaaagtaaatggaatactgaaaaagaatattgaaattgatatgacaaaccgagtctgaagctctaaaattttgagcagcagaagacgttccctctctgaagctgctgtatcaacctgccgaatgacacaaatgtccaacgacaacatcaagctga

SEQ ID NO: 184324 - DNA, 389 bp, Glycine max
cacctcggctgcaactggagtatttgtgtgtttgtttttgggatggagctggacaccagcgattcaagactataacaagcagttattattaaggaggggataccaaagataccagttgatcatcatggaaaaattcaattgaagaagagattgaaacctatactgctgaagcgcacacgtaaatttattatgcatataatttcactatcatttttgttatatgattttggttcttgggtatggcagattttctaccaaaaaatggggaagaagagaaagcagtgagacaactcatgacgaggcacagccctcaaaggaacaactcatgatgaggcacagcccgaacataaattctttgactagctgtattttgcctttttttcttctaa

SEQ ID NO: 184325 - DNA, 251 bp, Glycine max
ttgctgtgtagcgctaagctagttatccctcaccattaagattgcttccttaacatagccctaccccactatgctgcgaatgccaccaccaccacctcttttatttcatcaggtgtacacgctcccatgcagaagaatgttcaattcactggtttctccccttgcgctatggccccacacgcttcttctttcgtgaatatgtataatgaataggtggcttattttacacaggacaaacctacgtacacacc

SEQ ID NO: 184326 - DNA, 332 bp, Glycine max
  unsure (1)..(332): unsure at all n locations
agcttanagaggaagcttcatgtgggattttattatacacagggacagagagtgtggtgtggaaattgaacgagaatagggaaagaagttgaactttgaagtgtgtctcacaagtttcacattcatcaaagttgtgacaagtgttacacatgtttctatttatattctagggcactaacttttgtgaatttcatttacatttcatgtgaatctaaaatgaatattccaagaatatgccgaaggcatcttagagtattccctttagatgccacaagcatggaagatgtgactctagcacatggaaagcttccttgagaagcaaagaaggtagc

SEQ ID NO: 184327 - DNA, 434 bp, Glycine max
  unsure (1)..(434): unsure at all n locations
gcttctaacttcttttatattacaatctgttacttcttgctttntttagggtatctttattaatttatttatcatgacttaatgttaatggtggacatatttgaaggaacacaacctattactatctatgcttttcctaaaaaatcgagaatgtcagttaagaagttttatacttaaaagagcatattattttataaaattaacacaagttaattcactgttaggtctgactaatgagtcttgtactataagagtatacttacttgatagagttctttcttttcttaagtctttgtgtataggcttaactatagttttctgctcttgtagttagttagctaactaactatagtcagttgacagtcccaactgtaactacctatataagctgaggtgtaactgaatctcatctgggttgagtcttatcaccttta

SEQ ID NO: 184328 - DNA, 459 bp, Glycine max
  unsure (1)..(459): unsure at all n locations
gcttgatagtgcgcagaaagatatagattattgttttttctnccttcaacgctcaatagcatgatgaaatggtaccacgtccatttcctgtaacagctggtaaagtatccttggtactatgtgtgccacaaatcaataacaaaaggcatttcatctcatgatcagctattattgtgaaagctgttttcaaaatctgtaaaagaagttaagtaagtgtaatcaaataaaattaaaaagtatccatttaacagaagaaatgagtatatatatattgttaattaaaccgtatccattctacatataacaagtttaaaatatttagactaattactctctttggctatgaagtatccattctatatatactgcgtcccatatatgaagtactgaagtagttaactcccacgcctccgttgtgagtataaatattntactgctattacaggccaatgcatgaaa

SEQ ID NO: 184329 - DNA, 410 bp, Glycine max
atctcaagcacctgagctgcagcttttgaaacactctttctactggttatgattattatagagtaaaaactctttggtaaaaggttttgtgaaaaattcatgtgctactcaatgttttgaaaaatctttttagtacttatcttgattgagtcttttcttgattcttgaatcttgttcttgattattcttgattcttgattcttgaaaacttgaaacttgaaacttctcttgaatctttctcttgatttttgaattgttcttgactcaatcttgaaatcattctcatgggcttctggtcatcatcttttgtatcatcaaaacaccttgaatcaatcttgattcatcatcatgaatcaatcttgattcatcattatgaagcaatgaagtttgcttctacacaaacaagtttt

SEQ ID NO: 184330 - DNA, 331 bp, Glycine max
atttcaagggtcggctattcaatacctgatcatagcttcaagtctagaaacaataacaagggtgtatgtgaaaactatgtcttcttgtgggtaaagccttgagctactaacataagcttgttccttactaccttatcttgttcatccaatttatttctaaatgcccatcttgttcccaagatgcttttgttctcaggcttgggaacaagcatcttgacatcatttccagtgaactagtggagttcttcttccatttgcataatccaattattatatgtgattatttcatttatcatcttaaggtctatttcaacatgaagcataagacata

SEQ ID NO: 184331 - DNA, 453 bp, Glycine max
  unsure (1)..(453): unsure at all n locations
agcttcctccanaaagcggttgcttctggatgtaatatttctgctcgcctgggcgagctgggcggcaaccaccntccctatttttctataaataggggaggaaagccataacgaaagggtccagccccttaagcacttctctccctatcgaaaatgcttggaaaaatagtttccgagaaaaaaatctaagccgaggcgcttccgaaacgtttcgtaacatttttcgtgaggaatctcgcacaggattccacccgtctacgacggtcttaatacgatcttcatcgatcttcgatcttcaacgggtaagtacctcgaccaagctctttgatcattctatgtacccgagtggccgcattggtttcggcattttttctcgtaagttacatttatccccctgttgcgagctaaccatttacttatcattctcgctacttaaataaataatttcatgac

SEQ ID NO: 184332 - DNA, 81 bp, Glycine max
  unsure (1)..(81): unsure at all n locations
ccccccnccccaggggtgatgagctgcaacccgacnnaaagacgcagagcagcnnggaagggacacgaagttaacccccaa

SEQ ID NO: 184333 - DNA, 337 bp, Glycine max
tcatatactctcaactgtgttatgagctggagttctcctggtaagccaataatagaaatatagatacagagttaattgacattcttgtgcctctatgagtatatataattagtgaaatgtacttatatgattttatttcttggacaggcacattgttcttgtatgctggaagtgccctcttaactattctaatggtagcaaaattaggcccagaaaccaaaagaaaaactttgtaagagatccaggcttggagtagtttatagagataaaagatcaaaaacgcactgcaggacctacgcaaaccattaccacgatttttaaattctttacatccatt

SEQ ID NO: 184334 - DNA, 385 bp, Glycine max
cttaccttgaattaattcctttgatagcccttttgagccttgtttccctttccttggtttgaagctcactacaagccttaaatgaaaaaccatgatatcaccatatccttaaggaattttggagctttggaattgttttgggaataagtatggggggtttttgtttcataagataacttgttttgttggctatgcttcatgatgtattttgggccatacttgatgtacattgtatcttggttaaatgttggacatgctgaatgaaatgctatttctcaacggctatagagtaaaaaaaatcgaaaaagaaaaagaaaagcaataaagttgagtgaataagatcttcaatgacaaaagaatgatgaaacccttggctctactcttt

SEQ ID NO: 184335 - DNA, 360 bp, Glycine max
  unsure (1)..(360): unsure at all n locations
agctntcttcttgagtcttgaatttttcttgattcttatctcgaactcttgaattgttattgattcacttgagttgttctttgattgatctttgattcacttaagttgttctttgattgatctttgagctttttgtcatcacctttgtcatcatcttttggtatcaccattgttatcatcanaacacctttgaatcacctctgattcaccatgaagctttacttctacagtcaaacgatactatgcttaggatctggggcaattgaagaagttgctgcatgttcttttatttttgggtgttcttcttgggttcccccagagattcctgtgcgctgaattttctcgcacaagcttttaaaa

SEQ ID NO: 184336 - DNA, 378 bp, Glycine max
cgccagcgcttaaagcaacatttactttgtttctttctaccaagacacgtattccattttctgcacaaagcccacaaccatctaatatatgtataacaccattccggcccattcctataaagaaacaagctatatcaacgaatattcctttctctgtatcatcagttaaaccatcatagcttatttttaatttctcttgtacttcatcattaggacatttcttgagtttctccaatacatacttccactctgttacctccatatcaaacaaatacgacccaaggacttcaagagcttgtggccatcccgcacaataagcaactacacttgtagaaagtcaataaaatcttctcttggacttgcttgcttaaatgcatg

SEQ ID NO: 184337 - DNA, 468 bp, Glycine max
  unsure (1)..(468): unsure at all n locations
gcttatatagccaagcctcttttatcttccttggacctgaaaggtntgggtgggcttaatttgggagtccaaatctatttctaacttttatagttaggggaatctagaaaaaaatttagaacctgatgttatgtttaccacttaagactctcatttcccaagcaaactattaagacttgagaggaattctcatccactctcttcctattttccaggtgaccatctttgaagtgggagaaaattttgccttatcaagagttagggaatctattttccatgtgaccatagttgaagtaggggacacttttcccttataaaggattacaagatggcagttataatcttctaagcaatttccaatatctctccttctacttactctntaatttattggcctttttattgggaatntggtgtatctgtggaaaagtgaatgagaaaagaatagtgtaatttcttatattttac

SEQ ID NO: 184338 - DNA, 450 bp, Glycine max
ggacctcaagcactgggctgcagctaagcagtcgatctcttataattttatattttcattcactcaaatttcaataagaatatgacttgtgatcgatatcttaagttatgcacccgtacgggcagtttgtacttaaccacaaaacaatctcacgaatcttctcttctcggtcgatcgcatatatgcatgtgtgaattattcagttgcaactgatgaactgttatctctgtatgttttttagcctaatcatatacctgaaacatgacgttgcatgtgtttccttttattgagaatgctttggcatgattatttatagagcgtgtcataagtctatatcctaactatttttatgaaggagtttctactctataccacgtggcgttgtcatttgaaattaaaatgagaacatatcactttctcatacacaatcttattgtggtgagtacttgc

SEQ ID NO: 184339 - DNA, 389 bp, Glycine max
  unsure (1)..(389): unsure at all n locations
agcttttatgtgaaaggatgtgactcttctcatttgaatgngaatttcaacggtcaaagacactggtaatcgattaccaaaacattataatcgattacagcttttttgaaatcaattggaacgtggtaaattcatttgaaaactttttcaaattcattttgctactggtaatcgattacaacaatctggtaatcgattaccagagagtaaaaactctctggtaaacatgttttgagaaaaatccatgtgctactcagtttttaaaaaaactttntcatacttatctcgattaattcttctcttgattcttgaatcttgagtcttgaatcttgatcttgattcttggaagcttgaaccttgaatcttggttcttgattctagaaatcaac

SEQ ID NO: 184340 - DNA, 437 bp, Glycine max
  unsure (1)..(437): unsure at all n locations
gctttatatattaatcaaggatcacacattcttacagttgcatttnttatttcatttttgttctatgacgcattttgccttttctgttttggagatatcttagtctccttttagctcaacttcttgttgtttaatttattctataataccaaaagtttctttcagtatccaaaaataaattattctttatggacatatctggtcaatttctaaataagtttttaactgtttttatttattgtcaaatgttagttgttagtttttgttagcaaagggattcaaaccctatgacctctccctgctttccttctctttttgccaccaacaccaagtcaaccttatatctcctatatgtttagaaatagtataatttttctagttttgaacaataattcaaataatatcccacacgttttgatttcattgtttctggcata

SEQ ID NO: 184341 - DNA, 391 bp, Glycine max
  unsure (1)..(391): unsure at all n locations
gcttctatagaaagatcgttcctattttctctcaatcgcatcacctttcaatgagctggtagaagaagaatgtggcctttacctggggtgaaaaacaagagcaagcctttgctttgctcacaaaaaagcttactaaggcacttgttctanctcttcctgacttttctaaaacttttgagctaaaatgtgacgcctctggagtgggagttgaagctgtattgttacaaggtgggcaccctattgcttattataatgaaaaacttcatagtgccaccctcaactaccccacctatgataaagagctttatgccttaataagagccctcagaacttgggaacattacctcgtttcaaggaatttgtccttcatagtgatcatcaatcacttaag

SEQ ID NO: 184342 - DNA, 432 bp, Glycine max
  unsure (1)..(432): unsure at all n locations
gcttttaattgggggagtttgatttctgttatatatgagttcgttttcataatgaaaatagagttaaaatatctttaanaataattatttagtagttattcacgcttaattattaagaattgatgtttttcttgtttatggcttgcatatataaaatatggagggattaaaagcaaaaagatgttgaaaatacaaaaaaatgaagcatcaggcctaacccaagacgtgctatgcgcgaaaataagcacccgtgctaagcaaggaagcggtgcgctaatcacgaaaataggcacccacgctaagcgagcaaagagtgctaatagtactcacacccaactccaccccaacaattataaaaagggagtcaagccatggagaacacgatcctgtgagactcagagctctttaatgaatacatcctaagcctgagtg

SEQ ID NO: 184343 - DNA, 388 bp, Glycine max
agcttgaaatgcataccccaccatttttttcatagtaaaacattggtaatgtgactactattattatgatcatctccttctctgtcattggaggtgccacttgagctgccaggtctctccacctttgggtgtattctttgaaagattcgtgcccctttttacccttgttctgtagttgcaacctatcccggagccatgtcagaaatgtactgatacttcctaacgaaggcaaccattatgtccttccaagaatggactcgggaaggttccaagttattgtaccacgtgatagctaccctagtaagactttcttggaagaaatgtataaataatttctcgttttttgcatatgcccccatcttctgacaatacatctttaaatggttct

SEQ ID NO: 184344 - DNA, 498 bp, Glycine max
ggacttaagcactgagctgcactttaaagtggaaattatttttatttacaatccaaaagctcgagtttgttaaatgtgaggaagagccatgtgtttacaaaaaggtcaatgggagtgcaattattttcttagtgttatatgtagatgacatattactaattggaaatgacataccacacattgtcaaggcacaaaagatttggctatcacaacaattctccatgaaagaattgggagaagcagtctacattctaggtataaaaatttatatagatataaaaggttgcttggactctcccaatctatgtacattgatactatcttaaagagatacaacatgaataattccaaatgaggctagttgcctgtagatgttggaattactcttagtaaggagaatcgtccaacaactcctgataaaaagaaccgatgagtagagtaccatatgctattgcagtgagagctatcatgtacaccatgacttgtacacatcctatg

SEQ ID NO: 184345 - DNA, 158 bp, Glycine max
catatacaatgactccagtttcagccacattgaggctgctgtcctttctcttgcaacttctcttaaagctttgtcttcaaagcatagaatgattgcacttctaactttaacaatcatctctgattcttctttgagcctagagatcagacatcttttct

SEQ ID NO: 184346 - DNA, 335 bp, Glycine max
  unsure (1)..(335): unsure at all n locations
ctaagcttctccctatntngctataatanggggagaagtgaagaattatttgtgtcagccccttaggcacttctctctctttcgaatttgctgaggaaaattatttctgtgaagaaaatcctagccgaggcgcttccgtaacgtttccgtaacatttccgtgagtaattacgtgaagattctcgatcgttcttcaagatccatcgttcgttcttcggttttcttagtcttcaacgggtaagtacctcaaaccaagctcttcaattcattatatgtacccgtggtggtgcacattggtgttcatggatttttattctcggtttcggttactcttta

SEQ ID NO: 184347 - DNA, 460 bp, Glycine max
  unsure (1)..(460): unsure at all n locations
gcttctatagaggctggatcttcgagcttatgatgttctttaatggtgactttccaccatggtgatgcatcagaagacaaacgaaaagacgtgaaatgaggcgccatccactagagaataagccatggaagaatgagcttcaccaccaatattagccttggataacaaacttgtacaggatgcttcaatggaggaaaaaaatatggagagaaagagagaggtgggagcacaaaattgaaggaagataaagggaaagaagttgaactttgagttgtgtctcacaagactcttattcatcaaagttacaataagtgttacacatgcttctatgtatagactacgtaccttccttgagaagctctcttgagaaaactctcttgagaagcttcttatagaanactctctcgagaagctagagcttatctacacatacgcctctataacataactcacctccttg

SEQ ID NO: 184348 - DNA, 475 bp, Glycine max
gcttaagctccttcaactgcacaagggctcttaatatttgaagagtattcttgtggaaccttcacccgacgaagacactgaccaaaacttatcttctccttcttggacaaagtatggcaggctgggggcaaagtaattttcttcccatcagaccttggatgcaactgtgatcgtatacccatatcagctagatcttgacgagtattcaagccatccttcatcttgccttgaatgttaaggagcgtcccaatcacactgtcacaaacatttctccacatgcatgacatcaatacaatgtctaacgtcaagatcacaccagtacggaagatcaaagagaattgacctcttcttccatatgcaactctgacttttatacttcttttgggtcttcccaaatatagtattcaggtgttgaacccgctgatatacctgctcaccagtcaacggtatcgatgcaatatcatgctcttgtctt

SEQ ID NO: 184349 - DNA, 416 bp, Glycine max
  unsure (1)..(416): unsure at all n locations
tactaagcttctaagttagatgatgcagatgggtttgtagctaccttatgcacttctctaatgactatggcatcatttctggcgctaaactgctgggagttggaagccatcttctcaattaaatctctggcttcagcaggagtcatgtcttcaagggctccaccactggcagcatctatcatacttctctccatattactgagtccttcataaaaatattggagaagaagctgctccgaaatctgatggtgggggcaactgacacatagatttttaaatctctcccagtactcatacaggctctctccactgagttgtctaatacaaccagtcctttgccactccctccagagaatgaggaagagccttcagaaatatgtgatcctcttggacatctggnggtttcatggtggagc

SEQ ID NO: 184350 - DNA, 420 bp, Glycine max
  unsure (1)..(420): unsure at all n locations
ctataatcaatgtacattcttcatcctgtgactgttctggtatgtaatanttcatttcgatcatttcttattactatcattcatcccttttttggaacaactngaataggactaacccatgagatgtatgaaattggatagataaggcctgcctctaataacctaagcacttcttttcttacttcctccttcattataggattcaatcttctttggggttgtcgcacaggcttataattggcttccaaatngattntgtgcatataatatgatggacagattccttttagataaaaaatgtgccaatcaataaccgctttacattgtttcagaatctgcaccagttgatcttcttcttctttcttcaaagaattgctaattataacaggtttggtctcatcttctttcaagaatacatac

SEQ ID NO: 184351 - DNA, 487 bp, Glycine max
  unsure (1)..(487): unsure at all n locations
ctctcttcgaagttctgtttataatgtagcttcctggcagttntcccttcaccaattaacccacattcgttaatattaatctgtgcatgcttcatgttcgattaattgcctctgagactaacttgagttcatgcttaatggatgaagggttaattggtgtatgtgttgcctaatcacgtattgataaccctaagttggttttcacttagtaaattaaaatagggttggattaagtggttaattgttagggatgaattctccataacctangacaagagagtggcttctgaatcagaggaaacaacccatttttaatactattaattntgcattctagttcgcttgttctttatttcacaaaacaaacaaccccgccccncaatcgttactattactgcaagtatattatgaacatttagtttatcattgctcgttggaaaacgacctangatcancttctagttactggattntaatggttatttga

SEQ ID NO: 184352 - DNA, 496 bp, Glycine max
  unsure (1)..(496): unsure at all n locations
tctagttgcctcagttggtccaagtcaggtgtagcaatgtgattatggtgttgatgcatattgtgattaaagattaaattgtcaattttcatgctgatatagttgaggagttggcgaatagcatcagaaactgtgggagccttggccaattagcaaaagagagccgaattgacttcaacatagctggatcggaagggacgtcccctgacataagttgctccacatgagaaaaattatcatcaatgggggacctatctgacaccattgggatagaggaagatggggattaaaagtattcggctatagcttccttagtgacatttggaaaccatnggagcagtgggtgtagcaaatgattcaaaaggaacattggaaggttcttcagcaaaagttggttcctaaggtttataaggcaaaggtaggttagtggacgctatagtgaaatanaaggagaatctatnggcactaaacttatatggacatgagtcgaaatata

SEQ ID NO: 184353 - DNA, 378 bp, Glycine max
  unsure (1)..(378): unsure at all n locations
ttgcattcgggcactcattttattatcctcatgctgtgcctatacatataaaatggtcccacaacccanagctcacaaaaccatgctcatatctcgttgaggcatttcaccgagcacttggtgggcgcatgcttatgcacgaatatcaagagaatggggacaatgtggcatgcgccatcacttcagaatacaccctaggccaaggccattccttacaacccctctatccaacaaaaacaagcaacaatctgaggataaacccctcacgtttcttagcaaacacatgcaatntatagcaccaaaatacatcaacggaaagctagaaagcccaagaatgaggtacttacttgttggagacgaataatagagcaaaacgga

SEQ ID NO: 184354 - DNA, 380 bp, Glycine max
  unsure (1)..(380): unsure at all n locations
tcggaagcgaaaaagaatagaggggaaatttccaatcaaagaaaaagagaaggaaaatttccaatgatagcaaaaaaagaaaagaaggaaaattccccaatcaaagagtgcgagaaagctaaaaaagaatagaatgaaaattccccaatcaaagagtgggagaaagcaaaaagaaaagaaaggaaaattcccaatcaaagaatgggagaaagtaaaaaaggaagaagaagaaggaaagaaagctcctgatcaaggatcgaaagataacagaagacatgtgcagagaggtctctggaccggacaatatctgaacaatacagaattgccaccaaatgaacgataaaagaatgagagggaaccacgacctanaatagtcttct

SEQ ID NO: 184355 - DNA, 372 bp, Glycine max
  unsure (1)..(372): unsure at all n locations
taatctcgcttatgggcaacactggctctataacaattccattggattcaatgatgaaatccgcgcattttcaagtgaaaaagaagctaactcttgaatagcacaaagtagcaactgggctaagcgcatatccatcgctaagtgcagcttcagcacacttagcgcataggagaatctggcagagcatcaacatcaaagttgtgcgctaagcacaacaagtgccttcagccacgctaagcacgagactggcgctaagcccaatttcacttatctgtgctaagcgcaaaggtggcgctaagcacatcatcgcgacctcanggcctatttaaagcctgtcttgccataattagggtacaacctttacaacattct

SEQ ID NO: 184356 - DNA, 405 bp, Glycine max
  unsure (1)..(405): unsure at all n locations
tgatctgcagaagaatatagaccacagactcttgcaacacgtgcagatttctgattcatgacaagctgagttactaggttgactaaggcatcaagttttccctcaagctttttattttcagtagatgaagatgaattctgggccacctcatggactcctctaaggacaatagcatcatttcttgcactgaattgttgggagttggaagccatcttctcgatcaaattcctagcctcaacaggggtcatatcaccaagagctccaccactggtagcatcaatcatactcctcttcatgttgctaagtccctcatagacatatngaagaaggagctgctcagaaatctggtggtgaggacagcttgcacancctttcttgaatctttcccagtactcatacaagctc

SEQ ID NO: 184357 - DNA, 387 bp, Glycine max
ctggtacgtaactaactgcatgtattaaagccaagttcaaacccgtgagaggaatatatgaataatattctccttctgcgcttagaatctctctctctcttgttttccctctagaatattctttcacgagaaaaggttcctcctaacattggtgctttcattgtatcctctccgccatggctgaagctacacgatcgaaaacaagcatggagcgttgggaagatgtgtttgcaaagctctcggcatccatgacttcaaagttcgatgaacttctcagtcgtatgaatcaattagaaaactcccacaccaacactcacgctccgtctgtcgttgcgggcctcgcggtacggccaccgcaacacagcttatcgattgaaattggaggtc

SEQ ID NO: 184358 - DNA, 478 bp, Glycine max
  unsure (1)..(478): unsure at all n locations
tactccttacatgatatatcatccatattgtatcataaaatccatctatgtcaatgagaagatcttataatgttacatcccactttttcgtatataaattaaaaaaaattattaaaaaataaatagagatctagaaaaatattgagtttttataaataaataaataacgagaaataaatttattaaaataataatttgaaggaaaataaaaatgatattttatttattcatttgatacgaaataaaataaagtatttatttataaaatggagtaaataataggctgtgagtaccctaactataaatagaggcatcttaggttagtattgagactaacgatgcttcctacgcgtcctcttcctctcaatatcgttgtcctttctgctcatcccagaaccctctcttattctcgcatactaccgaatntgtctcagataaactacaatctcngactcattcaccagctgatcgtcgtgaa

SEQ ID NO: 184359 - DNA, 466 bp, Glycine max
  unsure (1)..(466): unsure at all n locations
ttgggcctaaattcaaatggcattgtttacacttgttgaagagcttccttggcctcctttgttctaacccttgccatatgtcctccatgttcttctaaaggttccttgcccttattccttgccttgtcctcatcactctctccctcttcaaaaggatttgtcctcaaatcggcttctcgatctacatcaaaaagagttaagtcggacacattaaatgtagtactcacattatactcaccggacaattcaatcttgtacgcattatcatttatcctttcaagtacttgaaatggaccatcccctcttggttgaagcttggatttccttagctccggaaacctctcctttctcatgtgaacccaaacacaatctccgagttggaaaacaacctntttgtgccccttgtttgcttgnttagcatagctctcattcctcttttcaattgngccttgactctctcatggag

SEQ ID NO: 184360 - DNA, 480 bp, Glycine max
  unsure (1)..(480): unsure at all n locations
tgtgcattcaatactctgatgaggatgtcccatatgttctttttctggactgatccacttgttgcccaagtntcatggtcttgcaagtgaagaccctcataaacatctgaaagaattccatattgtctgctccaccatgaaacctccaaatgtccaagaagatcacatctttctgaaggcctttccttattctttggagggagtggcaaaatattggttgtagtaccttgctccaaggtccattactagctgggatgacctaaagagagtgttcttagagaaatatttccctgcttctaggaccactgccatcaggaatgatatttcacgcatcacgcaactcattggagaaagcctatatgaatactgtgacagattcaaaatattatgcgccagttgccctcaccaccaaatgtctgagaaactcctcttcaatatcttatgatgactgataacatgagagagtatgatgatctgcat

SEQ ID NO: 184361 - DNA, 496 bp, Glycine max
  unsure (1)..(496): unsure at all n locations
ctatgcgcatatntncttacatacgttctcttgcacaagacatttaaccgaanaagtgcacccatatacaatcaaggcagcttcgttacctagattatttacacgtactgccaaggtgtatttgttacttacatcacacacatctccttggctgaatttacatacatgcatactcaaagcattttggggtaccaaaaattgcacatgtgcacatcttggtatttctaatacctatatatacacaaacttcatgatgaatcttgactatcttcacaaaaaggtgctacacttcatcccttttttcaagtttttgctacctaaagccgcatgcaaattcaagcatatattcctttgcggactaaaattgtattcaaattanaaggtatattntttgtaatatgttttcttcacataacatgcaacatatntatatatatatattntntntgcgagacantttgactaccaacaaattatatatacatacattcaagta

SEQ ID NO: 184362 - DNA, 459 bp, Glycine max
  unsure (1)..(459): unsure at all n locations
tcacatactgcgtatccgtacccttagatgaatattctgatttatccttaaagaaaggcacaatacccaagagaatgaactngaaatttaactcaaagaaaggaatcgagttatatcttgttccataattccctgctacgacaaggcgacataggtttctttatttcgttgcccgttttcatttcacttcaataataactagaatgacgaaccacgatgatattaaggccatactggagggggcagaggcaccagtaactgacaagtgttgcatctacagagtcccctttcatatccgcaagttcaacgatgatgcatacacaccaaaggttgtttctattggcccttttcatcataaaagccatcctcgcctcaaaatatggaaagacacaaactactttattgcatagcatttctggaacgaacccaaacaagtttggaccagtggatccgctacat

SEQ ID NO: 184363 - DNA, 475 bp, Glycine max
  unsure (1)..(475): unsure at all n locations
cttgatactcagcttaacctcatcgnctctcacagtctttagatgtgggagcctattctatccttgtgntcggactctcagccacttatgatagccgtcgatgatcccattactgcttcccctaagctctttgttctttcttcatgccgcatcccatgccttgcgaactccttggagtaccctcgcgttgtggtcactgaaaccccgtgcgatgaaaggcgtgatgctttcgtctgatggcactcctctcatggggtagccaagctgtcttatggcgaggacgggattataattaatacaaccccttgttccatcaagggaacatttggacatccttcgtatgaagatagaatcctaattcttccttccttcttggagaagaaggtgtgaaaccagccacacatagagagccagtgcacaacaaacaattcttgcgccactctcttcacctcctctgtcgaacgtgtcatacatg

SEQ ID NO: 184364 - DNA, 376 bp, Glycine max
  unsure (1)..(376): unsure at all n locations
gcttttatcgggtaacatggaccggtcaataacatcaaatcaacatattactttaccgctgttaacaacaaagtacgtaggtctgactttcttattcgcattaaagatacatatgagcaaaagcctcgcttttgtcgaccaccccaagagatcgttaatggtccaacgccttaacgtttctctcctttcaaaaccgagaaatctgtaatggtccaatgccttaacgtttctctcctttcaaaatcaaaagatcgtttagtggtccaatgccttcaatgacttttgctcgattaanaccgatcttgcgaaaaagattaaaacaacttatccaaccgtcaattctcaaagaactacgtangtctgtatttcttatcac

SEQ ID NO: 184365 - DNA, 416 bp, Glycine max
gagaagacttaatcaagataaggtttaaaaagtgttttcaataactgagtagcacatgatattttctcaaaaaccttttaccaaagagtttttactctctagtaatcgattaccagattattgtaattgattaccagtagaatatggttttcaaaatgctttcaaatgaatatacaacgttccaattgatttcaaaatgttgtaatcgattacaatgttttggtaatcgattactagtgtgtttgaacgttgaaactcatattcaaatatgaagagtcacatcctttcacaaaaaagctttgtgtaatcgattacactgatttggtaatctattaccagtaataagttctgaacacatcataagaagtaactcttctaatacgttttgactttctacaattgcgtgtaagtgtttt

SEQ ID NO: 184366 - DNA, 429 bp, Glycine max
ggatagagctatcatcacatgacgcatggagggcgttgtattagttgctttctaagcaactggaagattaacaaaaacacttggtaagctgccaactaagttgtctatgggtcaacctacacactcttctgtattgcaggatattagttgcaccatctatggggaggctcatgatacaggacaatgtactcacactgaagaaaacactcatgaaattcattatttgggagatcaatagcgacaagggtatactcaaggaggagtttcaggcttccagcacggtccatataatcaacaaggacagtggaggacacaccctgccaatcagttcaacaaagaccagagtgggccttcaaacaggccaatccaacaaggacctaacatattccagagaactactaagctggaggagaccttgactcagtatat

SEQ ID NO: 184367 - DNA, 229 bp, Glycine max
cccgccccgacccgcccccccccccccccccaccccccgccccccccccccccccccccaacccaccccccccccccgcccccccccccccccccccccccccgccgcaccccacccgcccccccaccccccgcccccccccccccaccccccccccccccccccccccccccccccaccgcccccacccccccccccccccccccccccccgcccccccccccccccc

SEQ ID NO: 184368 - DNA, 456 bp, Glycine max
tgtgtggcttataatcgacgagtttcagagaagagaactgttttatattcgttaataatatagatccatgtgtgggcaaaacttgtgatgaatgaagatcggttcaagagaggcccttaatctcatccacataaattgaattttgctaagttttcgtaattcagttacacttaaatagcaacaaatcttggtcgctaatcaatcattggttgttttacactctataactgatctagtgtcactagacctcgctcactgcttaattaagtaagatccggctccatcgttaagcatactatttaaataaattaacttagaaagagaatgatagtcatccagtgaacaagcatatatactaaaaactaaccattactagctagccagtgcttcttctccagtgatcgatcggtgttcttaattggcctctagtctagtgtgtggttcaccattactagc

SEQ ID NO: 184369 - DNA, 453 bp, Glycine max
  unsure (1)..(453): unsure at all n locations
tctctaggcttcacccttagtagaactagctactagacattcttctctatatgtgggganccctaggctctaagaagccatagtaacttgattgcacttcctagtcctcttcagtaccaccttaactaaacacatacatccatcttttgtattcttagaacttcaaaataagtagtcatatcactactcttttaagttatcttcaatagcacctaacactgcctacgcacaacaactgttgtggtcctttcataccaagtcgcataaatagtataaaatggcaagtccgagtatcatattcacagggacttgcgtaatactcaaaaaaatagagatgttcactaactatggctgttggaaacacaatattatgattggatgcgtaaatctaataacaagagtataaataaccaactatttctgcagtttacaacacatgagtgcataaaagag

SEQ ID NO: 184370 - DNA, 482 bp, Glycine max
  unsure (1)..(482): unsure at all n locations
cggagaanatcttgaaaatggtttgtcttttagttgtttctctcccttgagnggcacttgtattggctgttatattgaatgttgcatcttagtccatatcatatcttttgtgtatcgcgcatcatcatgagtaagtgagaagaaaaatttctaagttagaaaagtttcttcagaaggcaaaactctgttttaatcaattacatccttatcataaatcgattacataagttgtcttaagcttgtagagttatatctcgaattattttaatcaactacggccttctcgtaatcaattacacaggttntgttttgagacaatgactaatttattcacgagtctcttatttaatcgattacttttctttctataaggagttcagaagtgaataagaacactcttatcgattactctgagtatctaatcgattacattattcttgagttgtttcaagttttgggaagaatacttaatctattaaaag

SEQ ID NO: 184371 - DNA, 441 bp, Glycine max
  unsure (1)..(441): unsure at all n locations
ngaatgatccacggttggagaagaaagagaggatgtcgatgatccactgtgtggggaaaaacgcgatggaccaaccagtaaccttaatggatgcgccactcatgaaaccctgagagagaagaacacagatgaaaactaagaacaggggtggtggaaacagagtccaaggccaatccttacaaatgatagtgtagccgagcaaaatcttttcatgggcattcgatgaatttctccatcaaaactttgtggtcactaagattattatgctctcactactaaaaaaacctttgtctacgacgcgctttctaagacagttatacataaccgccttagaatgttacgtggtggcagttntgtaattataaagaatacattttttatgccacacactctaagacagttacacggaactgccttataatgtcctactggaacacacaa

SEQ ID NO: 184372 - DNA, 484 bp, Glycine max
  unsure (1)..(484): unsure at all n locations
ntagcttatgggagagtgtcatatcttacattatcttcaatgattagtttccatatttcctcattatctcttaatattagttaacaacatatttccttatctcatcacgatttgttcacctaattaactagaattaagactaattaactagaattaagattagttaattagtataaatatgagttagtgctgtaagttttacgaacatatcaaacaaaccaatacattggaatatcttagttaatacttaatatcaaattattattttcattttcttgtctctcttcctcctctatccttaagctcantaatttaacatacaacaccaagacaatttcaagttttaaaanagaaggaanaanaatatgatatatagatgtgtcanatagaagtcaatatatacaacaacaaaattatagtccaaaacagacctattttttcctctcatgtcaagatgaaattgattgctccaacctacaatcat

SEQ ID NO: 184373 - DNA, 496 bp, Glycine max
  unsure (1)..(496): unsure at all n locations
ctaagctgagctattgtgctgcccatagcccctcaaacttgtttctgccccattcttccttttaggccgtctntgtttccctctctaacgcttcggccgtagtcatgttgacatcccttagctcatcacactctttcctgaccctggtgaatgtcattnttagcttttccttgaccactctcatcttttcatgctctgctttcaaggcttgcacttcttcgctttcctcagggactttagcttcttcctcacttggaccttttagctttgggagccaagatatcccttgcgtcctagcctttaaccacttatgatagccgttgatgacanccattgtgcttcccctaagctccttatcttttctttccactgtattccatgcttttcgaactctctgaagtatttttgcattgccatcactgaaaccccatgcgacaaaaggcgcaatgatctcctccgacggcgccnctctcatagggtagcctagttgccttat

SEQ ID NO: 184374 - DNA, 438 bp, Glycine max
  unsure (1)..(438): unsure at all n locations
gagagcttctataaattagcttaaatacaatctctcttatcatcattcttttataagnactttgagaaacttataccagaaattcaaaaatacatttgtcgaaacaaacgtaaatgaattntggtttaccttgggagcaccaattccttcttgccttggttctatcacattgccgtgagagtctaatctcttcttgattatatcgtgcttctgagaattacacagcaaaatacaaacaacattgtcatagatataatcaaattacagcaccataaccaaaacactaaacttcttggtactcaccgcannaatgaaaaaataaacttaagaattatntatttacttatttatttattttgattctaacgatgatacatacaacatctagatgctgctctccgctgatgtccattgcatcaagactgagtatggaacatg

SEQ ID NO: 184375 - DNA, 328 bp, Glycine max
tttattactagctatttagaaggctttaggcgctgaatgtacaatcttcaatcggactcgtcccctctttagtctatgccaacaatcaaatcaatatcaaacacaaacatggatagaatcgccatcattattattacttgaaccataaggaataacatctaaacaaggaacttaagaccgaacttgttttattctttggtatcttttaactacaattttacttcaatatctaattttttaatctacttagggggacgatgctgccaagaggagaacgaagaataaaagaaaacgagaataaggaagtgcacatgaatgctcttggtga

SEQ ID NO: 184376 - DNA, 395 bp, Glycine max
aatgaccccacattatagtgcagcacctgacccctatatgctataatggtacaacaaagcagccgctacaccaaaacaaacagtgtttatataacatgctcaaaactaaagtactcaatatgctatagtggtataacaaagcacccgctacaccaaagcaaatagtatttggatattgaaaattttgaaatatcttctctgctcatccctaattgtaccttatttactcgttaggaggatgattggtatcctatacccatgcttctttgaataataagctttaagaagctagggcacgagagaagagataactcattcacttggggatcttttcctgcgtttacttctgcacctcctgggttattattgtattaatcagtctctcatgataatga

SEQ ID NO: 184377 - DNA, 289 bp, Glycine max
aaaaaaaagaatttttttaaaagaaaaaaggaatgaaaaagaataacacccccacccaaataaacaaaaaaagacagaccataaaaaaaaagacagacagaaaaaagaaaagaaaacataaaaaaaaaaaaacaaataaaacaaaaaaaaaccacaacagaaaagagggcaaaaacaaaaacaaaaaatgcaaaaaaaacaaaaacagaaaaacaaaacacgaaaaaaaaaacaaaaaagaaaaaaaaaaaagagggaaacaaaacaaaacaagaaaaaaaaaaaaggc

SEQ ID NO: 184378 - DNA, 270 bp, Glycine max
  unsure (1)..(270): unsure at all n locations
aaaaggaaggggagaaaaaaaaaagcccccccagaaaaagagaaaaaaagaaaaaagaagggncggaaaaaaaaagagaaggagagaaaaaaaagagagaagaaaaaaaaaagaaagaaaaaagaaaagagaaagggaaaaaaagagaaganagagaaaaaaggagagaagaaaagaaaagagagagaaaaaaggaaaggaaaagaaaaaaaagaaagaaaaaaaaggagagagaaagaagaaggaaaaaaaagaggaaggagagaaaaa

SEQ ID NO: 184379 - DNA, 205 bp, Glycine max
ggtagaaaagaaaaagggggggggaaaaaaaagaagggaagagaaaaagagataaaaaaaaagagagggggaaaaaaaagagaagaagaaaaaggagaagaagaaaaaaaaggggaaaaaaagaagagggggaggaaaagaggaaagagaaaaaaaaaaggggaaaaaaaaagagaggaggaaaaaaaagtaagaggagagaaga

SEQ ID NO: 184380 - DNA, 500 bp, Glycine max
tcttggctcatactgggaacgcctctagttcaacaccccgtgctctctaatgcacccacccagagggaagctccccaagttccaacttcgaacacgactcgaccggccagtaatttcaacacgacaaggaatttccctccgaggccatttccggagttcaccccactcccaatgacgtacgaagatcttttgccatccctcatcgccaatcatttggccgtggtaactcccggaagggtcctcgaaccccctttcccgaagtggtatgaccctaacgcgacctgcaagtaccatgggggtgtcccagggcattccgttgaaaaattcttggcccttaaatacaaggtccaacatctaatggatgctggatggctgactctccaagaggatcggcccaatgtgagaaccaacccgctcgccaatcatggagggggagcgcgtaatgcagctgagtccgataggccgcacacgtctaaacctttaatggatgttgcaacccc

SEQ ID NO: 184381 - DNA, 384 bp, Glycine max
  unsure (1)..(384): unsure at all n locations
atgtcaatatagctttgcttattacgtgcagattcagcgactgctgccaaaattcccacctaacgattatcaatcttcttattttgcttcctcacgtttaccaaaaagcttatagttcttatgatggctcttgggaaattaactggcagactccttctataatagtgtcgtgaattataaaatcacggtagagtttggtttggcctatagttctgtcaaagcaataatttatacaatagagctaatcaagcataatatatcagatcaaaatctataatggtacattctgtacaacaaataattcataactatatcatggactgtgttaagttgattgtatacagnanatattgtcttcttcaaaccatccgatagatgataatg

SEQ ID NO: 184382 - DNA, 418 bp, Glycine max
  unsure (1)..(418): unsure at all n locations
taactaatctattgtttggtgaatggaatttaatctatttcataacatgaagtttaaacacaattaaagactcatattagccatcctatccactatcttctttcttggagggtgatataagtaaagattgaaataaaacatcagacacattgtgctatattgaaagtagaaaccaacatcacatcctcgtagtcaaatcagagcaatggttaagcattntctacatcaactaaaccaacatcacatactgtttcaagttcttgtgccattaaaatgcatggtccacaccaagttgcatagaaatcaataataagaggcacttttctttctccctttaccagctcctggatttcctgagctgacaactntntctgcaagtccaacaacanacaacgggatagctatagcatcaaacctc

SEQ ID NO: 184383 - DNA, 437 bp, Glycine max
gctatctattttataaggtaccgtactgatatatttataattgttatcaaaatccattagtagttgcatgcaacacagcaatgcctactgattcactttcctgttatcacattaggaaacattacattgccaatacaagaatgtcccttgcctatgtgcttgctaatccctgacatctaaacaaaaatggagaatgtagagttctgcgtgcattgattctgtagataataaataggaaggtccaaaaagaaagcacgttccagaaaattggtgttctctggctctgattctgatccctactttcttatagacgaaatgaaattcaatgtaaacataaaataatatgaataaataatacatgcatagacaatgtctagagatcttatactatcatccaactttatactacgacagttgttgacttttcagaagctaac

SEQ ID NO: 184384 - DNA, 385 bp, Glycine max
tgccgccacggagtatctcgactatgctctagtggtttttatttattatgccagtcgaagtggacgcttccattgggaaatacaatgataatgtactctgtgatgttgttcctatggaggccagtcacttacttttggggagaccatggcaatttgattaaagagccaatcatgacggttacaccaacaagatctctttcattacttttggtgttgcataaaaaatgtacaatgtacgtcggctacgtttttttgtgcgagctcaaccgacattatgtttcggcctaaactggcatgttcccatctattttggccaggaaaacattaaccctcctcggcatataaatattagctattcgacttcatgcatatctcatccacggaa

SEQ ID NO: 184385 - DNA, 418 bp, Glycine max
acttaaagataggtatatatgaatatacctaattaagtactatgggaatagaccttacccattcccttacgtaaaaaagaatcataagttttaaatgaacctcgttaagaggaatgccttttattctagaagtaatataagactaagcaagtgagtgatggattaacccgaggatagacagggtagagtatgtttatggcacaccttacgccaactcaaatttcggagacaaaattcctaaaaggttgggagagttgtagtaccctaaaaattacaactttgagggtgtgtgcttgtttgatttaattatgattcaattgggattcttttttaaataagaaaatatgttgtgaataattaagtataattagtgattaattgatgttaagcacaaaaaatcattttctaagacaaaaca

SEQ ID NO: 184386 - DNA, 404 bp, Glycine max
  unsure (1)..(404): unsure at all n locations
ccctatacatgaaagngagtgagcccatcgaaggagaaacctttgtattaggtatgttagtagttggtagatggttatggcttgtagtaattatcgatccctgtgactaactcctagatagggatgttagtagttagttaggatcgtaactaacttcctttatgtataaaagttgtacctgtgaatatatcatgcatgttataatgatgccaaaagtttacttgatgagcactgatagaatcatgtcacataacacgatcatgaaaatctatgataaggacttactaaatctgttaaaagaatctcaactcgatagctatagactagcctctaaatctttactgtccaaattcttttattatacataacatactgtacaatctctttttgactactatcgatac

SEQ ID NO: 184387 - DNA, 497 bp, Glycine max
  unsure (1)..(497): unsure at all n locations
catcacggacacaaaaactaagctggacctctcgctctctcagggttcagcctctttcttatttggaatctttggcttcaggagccaagttatctcttgcgttctagccttcaggcacttgtgataagcgctgatgatcccattgctgcttcccctaagtcccttatcctttctttgcaccgcattccatgcttttcaaactctttggagctttttcgcattgaggtcactgaagcctcgtgcgatgaaaggtgcgatactctcttccggtagcgctcctctcatggggtagccaagttttcttatggcaagtacatgattataattgatacaacccctcgttcccatcaaggggacgtttgtaaacccttgacatatagacaaaactctggcccttccttccttccatcgggggaaccaattaacggatgcgcttaccataccagccaagagttngtcccaattgctttcccttctcgacacacatgcggtgacct

SEQ ID NO: 184388 - DNA, 441 bp, Glycine max
ttgaattcaacatttaatagctgtttgtaaatcagttttggctactggtaatcgattacatcctctggtaatcgattaccagagagtcaatttcttgtacaagactttgtaacttaaaattcttggccaaaccttatgctacttcaattggaattcccttcctatttaatataccctctctaagactctatagactgtcttgatcatccatcttgaatatctttaattgctctgtcttgaataaagctttgagacgcatgtgatctattggcatcatcaaaacatcggcttgatcctttgtctacacatccaccgcagataaacaggaccacaacatttgatttctctgaccacatgcacaatcaagtgaatcatgatgtccaataaagcatggggaaatacatctcaactgcacagataattgcgcctcatttccactca

SEQ ID NO: 184389 - DNA, 393 bp, Glycine max
  unsure (1)..(393): unsure at all n locations
tggaacacgctaatttgtccggaatcttgaaacttgttatgaccagacatgaggaggtaatgatacacgaggatacaatgctatcacaatgactctatagaaggtctcactagcgcatatattaaacaacacaatagaggtgtttttgtacatagaaacccacaaaaaatttcttatagttagacatccaanaatgaacatgatgaggatgttgcaagagcacaataaaactatcattaaatggtttagagaaacaatattatctaatgacaatgcttcacanacattaagattgtagttgttgggcaaatctcaatgccctacttggaagggaatgatatcaagcatangatgataacagactgtgcaaacagtggggcaatgttctactga

SEQ ID NO: 184390 - DNA, 450 bp, Glycine max
tcttgaagcttctaatcttttactagaatgaagctctgataccacttgttagaccagtggcctcaaatatcttaagaaggcgggttgaattaagatattacaaactatttccccaataaaaattctatttcactttctattcaagttacaaattcccttaacaatgaattccttaaataatgattcaaatagaacaatttgaatataaatataaaaaaataataaataaaagagtttaagggaagagaaagtgaaaactcagatttatactggctcggccacacccttgtgcctacgtccagtccccaagcaacccgcttgagagttccactatcttgtaaaatccttttacaagttctgaacacacaaggacaatccttcctttgtgttcagaattctttacaacaagagccctcggctcttatcccttaaaattaaaagaaatagatg

SEQ ID NO: 184391 - DNA, 336 bp, Glycine max
  unsure (1)..(336): unsure at all n locations
gtacacatgcttctatttatagactaagtagcttccttgagaagctntcttgagaaaactctcttgagtttgagaaaacttccttgaaaagcttccttgagaaaaattccttgagaagctagaacttagctacacacaccctctctaatatataagctcacctccttgagaagcttccttgagaagattcctaaagaagctagagcttcgcttcacacaccccctataatagctaagctcaccctcttgccacatacatgagaatatatatataagtccatattacagagactgctcataatgccttgaatacaaggctagatcccttactactag

SEQ ID NO: 184392 - DNA, 470 bp, Glycine max
  unsure (1)..(470): unsure at all n locations
tactaagcttcaccaacatgcataattcaccacactggcacacattttatcatntctttctcgggttctgatgccaaatacattatatgctgtatgtgatcgcctccatgccagggatccacgtntacataattacatttacgatcaaatttgagacaacggatctcattttcacttcgcacattctctttttaagacaaaagtggtgcttaatcaataattagaatatcacacattcattcgttaggattggatcgatgctacggaaaacgaatctgaaaagacgaataacaagcgaagaaagttccagaagcattggataacgtttataatccagtttgtgagtaagttagggttcgaattgtgggaaaaaacacacgtggcgatggagaagaagggaaaacgtaccacgggtgatgcacccgcgtctctactagcatctgagctcatagcgaagcctgaagaaacag

SEQ ID NO: 184393 - DNA, 237 bp, Glycine max
gaaagaaacagacccaaaacagaccggagaaaacacgcaacaaaaagaaccaaggacagaccgtccaaacaaaaaacaggagctcccaaccgccaggagcaagaaaagacaaaagtcaccaaagacaggaggatcaaacagcatgaacgtggaaaaggatacacttttgccaacaccacaagggggaagaaaaacccgagaggaaccacaagaacagacaacctagcaacggcacaa

SEQ ID NO: 184394 - DNA, 358 bp, Glycine max
  unsure (1)..(358): unsure at all n locations
ctgagctcacgtactcccacgtagcccatatactcgttgctctcaacaccgagtccccatcaatcctgccaagcttccccaacatccaagaaattcaacattcaaacaacacaaactatcacagcccataaaacagggcaaaggcagaaaactctgcccaaaacaccaaccaaaatcacaacttttctcacttaaagactccagtaacatttcctttgtccaattcgttaaccggtggatcgactcgaaaatttactggaagctctagacataagtctacatttgccgttggatctactagcaacatcagaactattctgcctactctntcacaaccagagaacatagattttctgac

SEQ ID NO: 184395 - DNA, 433 bp, Glycine max
  unsure (1)..(433): unsure at all n locations
ctaagctcgtatcgatacacatatactgttatcgattaccagaggattttttctgaaaacattctcaacaggcacatctctttatctgtctcttaaatggccatcaagggcttatatatatgtgacttgagacacgaatttaacaagagtttttcaaaacaataaggtcttatcctcttataaagcaaaatcgttctatcctcttacaaattccttggccaaaacacttgtgattcaataaggaattatntgagtgctcaaattgttcaatctatctctttcaagagagaatacttcttctcttcttctttattatgaaaagggattaagagaccgacggtctcttattgtgaaagaattctaaacacacaggaaggattgtccttgtgtgtntataacttgtcaaaggaatttacaagatagtggaactctc

SEQ ID NO: 184396 - DNA, 404 bp, Glycine max
  unsure (1)..(404): unsure at all n locations
gggtcgtcacacctctcatgtatacatcagaaaatactagtcttattatataacttgtctcctaattataattaatagtcgaattgagtctcttaattaataaaaggttgaataaagttctccaattcttttaaaacatttcaattgagtattttaattatcaaaaaaaattcaatcaggttctccaattatgtaaaaatactacaaccaaactaaaaaatgtcgctaaaagagtacaattgtagtgattctaaataattgaatgacgtgataaaaactacttaataattgagatacccaattgagattttattttaccaaaatggttgactttataaaactaattgctaaagtgagcatcttacaaaactatttacctaccatggagatattngtcacatata

SEQ ID NO: 184397 - DNA, 504 bp, Glycine max
  unsure (1)..(504): unsure at all n locations
ggacacttaaatactaagcttgaaagaaagatcagatntattgttaatggtggtttgtacatatacaaaatatataattattcatatgtatgtaataattgtttttgggatctagaaaatgaggacaggaaaatggattgaatgaaacttatgtattgttgtgatggataacaaaagtcgtatgctttatacaactcacttcaccctgtcccatcgtattatgctagtctaaaggttcccacccaaggtgtgattaggctaaatttcacaacaaatgagttaattgtaaggtgaacagaatatacctaaaatagagaatcacattttgagtacaataatcacataatacaacttttgagtatttaacataattaagagttaacattgagatcattattgattaaattgaattatgtaagttaaagaaataattaacttaaaataatgtgatgttaattaatttatgctcaatagcgatgtgaggtgtgcttctatgatatttat

SEQ ID NO: 184398 - DNA, 434 bp, Glycine max
  unsure (1)..(434): unsure at all n locations
acctatagatactcagcttattctttctgaaacatcatcatcttcgtcatgcgagatgtttgagnttttgcgagaggagaagatatgacgcataagggtgaatcataagtcacgggagatgcaagaagcataaaacgaggtgtagaagtaaaacaacctaacgggatattaatcaaantcaagattggattggacataattaagccggtgctaggtgcacctatggtgcaccccacaatttaagcgaagcggcgaaaatatctttcacttaaatttcaaaatccctctccctctcattgtcctcgcgcagtctgtaccccatttcgctgcaacgcgcttcgtctacctccttgcctacaagaatattgtcgcgccgcccgcattgtcaccgtctgtagcctctgttgggttcgtcgacgcccgacacaccacca

SEQ ID NO: 184399 - DNA, 499 bp, Glycine max
  unsure (1)..(499): unsure at all n locations
taataggcaccaaactctattatgtgagacatagatgtttttattattttgagggatgaggctcaaggaagcttaattatgatgtatatatattctctgggagtttgaaacattttcctgagatgttactgtattctttggtgatcagctttccgcaagtgcaccggatcgcacaagtagtataaaacggtaagaaccgagtatcaaacactcggagaacttgtgttatttggtaagctatttcagcaaataagcgtctagtgtgtaaaagtaagtgtgaatatgaacaagtgtataaactatttgtgtaaaaagaaagaatatcatgcgagagaaataatgtgtaaaaacaagtagagaacacgttggtcttcctaataggtgcctcatgctaaaaagatattctctatctaacaatgctcatgtgttcttatggtgtctactgagatactaaacaccgattcctcgngaagtctagcctaatcctgatcaaccatcg

SEQ ID NO: 184400 - DNA, 304 bp, Glycine max
  unsure (1)..(304): unsure at all n locations
tacaccggacggactaacctcaatctcccactcaagacattacctttcgcattaaatcttattgtggtcactatgaattcttcagcatcgtaaaacacttctatgcctagataaaaacctatatcttttaaccactctagttgtcaacgagtccctaaggaatgtagcaatacccaaagtaattgatggtgatgggcataacatctggtctatttattggcaccatgtgcaccagagtgtgacacatggtaaatgacgtatatgtattctgacacgaccacacttnttatgtcttgctactaca

SEQ ID NO: 184401 - DNA, 393 bp, Glycine max
gtgaccactgagggaggctggtcctctatatccatctccgccagaagctcattcgctttctcccaccgcccttcatagcacaaactcctcagcagaatgttaaaactcacaacactaggactgaaccctttcacaggcaattcctggaaaagcttaatagcctcttcggttctcccttccttgcacaacccaggtaacaacacattgtaactaaccaaattaggctccccacccttggcaattatatcatccagaagcttcatggcctcatccactcccctctccttatatgccgcttcaagaaggaatgaatacgtgaatgcgtttgggatgagccccttcttcgtcaacctatccaaaagctgcaagctctgggttaaattcccatgcatg

SEQ ID NO: 184402 - DNA, 333 bp, Glycine max
  unsure (1)..(333): unsure at all n locations
gtgcgatcgcccaataactccagaggtaagtatgtgaagaaattctttgcagtccaaagactaatgcccgtgcttaaagttatttacaccagaaccataaggaaanagttaattcaacaaagaaagaatataaaattaccgggacaaacatcgcattgatggggaaatggaggtacccaattgaccaaatgctgaaggcaaagagagaaaatggaagaggacttactatcagctgcagaaatcttgagctgctcaagagcgggggcattatttggagcaaccgatgatgcatcagaggccagagcgtcgcagcgaataaaccctctctgaatg

SEQ ID NO: 184403 - DNA, 319 bp, Glycine max
  unsure (1)..(319): unsure at all n locations
aatgtatcaactattaaagggatagtcatagtgaatgttggtattacagttacaaaggtcttaagttatttaaaagacatagctagtggatccaataaacttggtttgagggtgagacatatngaaaaattgtctagatttaaaagttgaaattgattgagactgaggtagcttagtcattagtgaatctcgtgaagagtaaataagcacaagatttgatgttctactatagngtatagttaaaccaagaatcacgcttgattgatgtctcttggatanatggaaatctaaagttgattatgatttgcttccaagatat

SEQ ID NO: 184404 - DNA, 431 bp, Glycine max
  unsure (1)..(431): unsure at all n locations
tgaataatgcgagatatttcagctacatatatctattaatcaggtaataaagtataaattgttcattatgattagtatataaattataaaatattctcattcaatgtgattgccctgtaaatttgtgcactgttttcttatatatatttttcacgctgaaaaaatatatattataaaaaaattaattatattatcttttttatcgtgttttttattgtatgtgaatatttaaatcctctgttcctttgaataaaaaagaatatcctcttttgcgactttggagagagacaccactcccctctcataaattnttctggtacacaaagagattcacatcctccctctcatgaataactcgtcttattaattgtggctatactggcattactatngtaccaaaatgcccgcgagtgttcacgaatataaaacat

SEQ ID NO: 184405 - DNA, 405 bp, Glycine max
aatgaataaaagagggagagacgtggaaccttcaagagcgtatcataagacctgtcttcatcaaagttacaacaagaggttcacaagcttctattatagactacgtagctgccttgataagctttcgtgagacaactgacttgtaaagctcctttggaaaactcccttgagaaactgtagcgtggctacgcacacccactctataactaagctcacctccttgaaaagcacccttatgaagagtctaaagatgctagagcttagctacacaaacctctcttatagctaacgtcacctccttgagaggagaagctagagcatagctacacaccccctataataactaagctcaccgccacgaccatatacatgatgatacacaatcagtcctactacgaagactac

SEQ ID NO: 184406 - DNA, 393 bp, Glycine max
tcttcttcctatcatccttggatgtgtggtgtggatgattatttatcaacttcatgcacctttccttttcttaaagataacctcatgtagcaccctatcgggtgagaatttgcaattttgccactctcttcacaagagaaaaacaattaatcaagtggtgaaatatgttgcttttttcattcttcagctaagaatgataaaaggaggtttcattaacaagtgtgagacccataaagtaatgaactgcggcatagtcatttcaactttatttacctaactcttccactaaagccacaaaaaataaaaattaaagagtgattacctaattctaccggccaactaataacaaagagatacaacatcaattgtcgcttttcacattatgtccataat

SEQ ID NO: 184407 - DNA, 473 bp, Glycine max
  unsure (1)..(473): unsure at all n locations
ctaatngtctctcttccatcaaagagtagacggagtcttattttagattagccaaatttaacaagagcacaacaaacaacacatcaagaaggcagagttgatgagatgcatacataagacagaatagaataaatcatagcatataaagcaacgggtcagcaatagcaatcttggataaaacctgaattatctcaagatggtataaatttagtagtcttacattaaatcaagccaatgaaataacatgacaacataccttgagacctgcgaaaatatatagctagatataattaatacaaagaaaatatagtatgatggaccttaactaagaataccatagaagtaagaatcaatcaattgagacatagaaacttctaacaaatagaattatgaagctgtaatctttatcactgacacacatggtttaaatacaattatattacatgaataacacacagagatacttcctcctg

SEQ ID NO: 184408 - DNA, 483 bp, Glycine max
  unsure (1)..(483): unsure at all n locations
tgtctattancagcagcaattcgtaatttctgctctctttttaaagggtnttaattaattctttcccaagaataacaaaatttaaaattgccgactacactctgattaacttcttctaacacacttattactattggttaaatttattgaaaattataaaaaccattagtgagactcattaaataagaagtgatacatataatattatgtaattctgaataaatttcatacaataatagagtgtgtgtgttaaaaaagagtgtctttgagggtggtgttagcatttttctcagaagtttataccaggaccaaaaacatagtttccagtactttaagtttcaagctatcaaataaaagtcagaaaaatacaccggattcgtcaattttaccagaaaataaacaaaagctctcatccgttaacagaattaacaaccgatttacaccacacagtcaaatgaagcggaaagaaaatatatcgataca

SEQ ID NO: 184409 - DNA, 325 bp, Glycine max
  unsure (1)..(325): unsure at all n locations
gggatgccccacattatttccatgacacaaatgccaaaatgatgatntggaaactttatgcacaactggtcatgcatgcatctatgcggacactcaaatgtcaaattattatggtcatgtgatgctagggctcaagattcatttcctctattntaatcaacccaatgtttccaaaatatgttcttttatcaattngtgcattcatccgagtccatttcgggcgtccggtgaaatttcacagcattcacccttcatgtgtagacacattttccaaacattggttatgatcaatgaatcttttcaaagaaaagttggaaatcgtctc

SEQ ID NO: 184410 - DNA, 464 bp, Glycine max
tgcaccactcgagatcttgagcagattcattctgtgcaatgtatagtgagttgctagagaactctatctctcactttggtccttcaaacagaaagtgaatcgcatgtgataatgatatttgaggtggagtattatattttgtggttgcggcatctccaaatgcaccaaagtgtgatgcttaatctacacttaagctccatggagagggtttcaagaaggtgaaaagttaagtccatagctggttctgcatggttcatatataaactaacctgtgtctagattcctgcttctttccacacgtttctaacttgttggcagccaaagaagactcgtgcaatggactcctctcctttatattgcaggctggttcttgtacggagaacagcatttaatgtacgccatagaaagtgcttgactttatgtgggaggagcagctgccatacaagcttccagttacctttaac

SEQ ID NO: 184411 - DNA, 476 bp, Glycine max
  unsure (1)..(476): unsure at all n locations
actaagcttgagagagtctcggatctggttaatcaattaccaatttcttataattgattacactattatataagacaatgactaattaattcaagagtctctgatttaatcgattaccaagtggattaatcgattacttctctctcatttaantggtcagaagtgaacatgaacactttaatcgattacttagagcatctaatcgattacattgttcttgagttatttctagatgttgggaagaacactttaatcgattatttagataatctaattgattattttgtagatttaatcaattacaaatggttataactattttctctataaataaccagctagtggtccctctaacatgcatcanaagaatacttcacatctcgaaaatagcccattagactctgaatgagacagatctcgtgctgtcattagtgtataagagaatanaagntatagtaactcataacttcttaatc

SEQ ID NO: 184412 - DNA, 427 bp, Glycine max
agagaattgaccccaaattggatgtggaatatatgaaacaaatggcaaatgtgaacaacaaaaataattataaaacaataagcaaagcggatgtgaatagaccataatatataattgaatgagtcgagctggttggtttctataggtttgagtggcttccctaattgtcgctttaagtggatcatggccacggatggaggctggtagaagttctattttggagcatttttaagtcgtggaaaccatctttcattacaaaaatggacagcttatacagtgtaagtaggagacatatatgacaattgctgactttttattgtcacataaatattaaatggatcgatgcctatcattttctttgtaacacgactgtttcctccacgtgttgatcgatttcatatcgacttacatgatgatatttatttat

SEQ ID NO: 184413 - DNA, 433 bp, Glycine max
  unsure (1)..(433): unsure at all n locations
ctgtcacaggtcttgtgacaagatgtttatgaatctggtcactgagatctaactttttacaccagatctaattttaaacacccatactcgtcaaaatcagttgcangtgcaatggattagtataacttgatgggatgagttggatcctacgtatatccacaacaacaacaacaacaatcacagttcaataaagacttataatctgataaggcacacaattgtgaactttatcattgccttagtgcatatataatgtctatatatttcaaggatcactctgctgttcaggttcccaaagtcaaaatatgcattttctcatctctgcatcccaatccaatagatcaatatggctttagacaacggtaaatggttcactatttcacaccagtcatcatcaaaaagcaggacaattttatatgtgtgtgtgtgtata

SEQ ID NO: 184414 - DNA, 375 bp, Glycine max
  unsure (1)..(375): unsure at all n locations
ggccaccatggagttntccaactatgctcttgtgttgttgtacaagctacaaaaggagagagcaagaaatgaagagccaatggttgatacatgggcagagatgaaaaggatcatgaggaagcagtatgtgccacctaagtactcaagggatttgaaatttatgctccaaaaactaacccaaggcaacaagggggttaaggagtatttcaaggaaatggatgtgctcatgattcaagcaaagattgaagaagatgaggaggtaactatggatcgatttcttaatggtttgactaatgatacccgtgatattgttaagctgcaggagtttgttgaaatggatgatttgcttcacaaagcaatccatgttgagcaaca

SEQ ID NO: 184415 - DNA, 497 bp, Glycine max
  unsure (1)..(497): unsure at all n locations
actatgaaactcagcttcccttggtcaattcgagcgtctcaatatattatgcgcttgtatcagacatccgagttgaatgttatgtccatttgaatttctcgagagcttncgttgttcaatttcgagcgtctcgagatattatgcgcctgaatcggacctccaagagaaaagttatgaccatttgaattgctcaagagcttccattgttcaatttcgagcgtctcgatatattatgcgcctgaatcggacctccgtgtgaaaagttatgaccatttgaattgctcaagagcttccattgttcaatttcgagcctctcgatatattatgcgcctgaatcggacctccgagtgaaagttatgaccatttgaatagctcgagagcttacattgttcaatattgagcgtctcgatatattatgcgcctgaatctganctccgtgtgaaaaggtatgaccatttgaattgctcagagctccattgttcaatttcgagcgtttg

SEQ ID NO: 184416 - DNA, 340 bp, Glycine max
tatatgctgaaattgcccatggaaaactgttagagatgaaatgtacagttaacctatggttggaaagtgagaatgtgatgctatgagtggaaaaagagtgaggctttgagagttggaaggctaagtctgaattctgtggtcaatggaggttaaagtgagttaatcctaacttgaaatgtcatttacgacttatgagaaagcttggactgtgctatagagaacaacaaatgaccaaagtgaaccaagagccatttctagggtcaaattaggtgttgaagagccaaattttgagttgctggaattctgggataaatccacgttgaacaagactacattgatg

SEQ ID NO: 184417 - DNA, 423 bp, Glycine max
cttgcttccacacgtctttttactgaagtgatgtaagtcctgcgtatcttgtaggcctaggatttctggatcatttattcctttgcttcttggaagatgaatggcagctgaatggagaatgaagagagagaggagacaccacttcaaggagaagatgagtctagaagaagctcaccaccatatgaggccatggataagagcttggaggaagaaggagatgaatgaatggagagggagagaagagcacaaaatctaccctaaggttcatgagaaccctatggccttcttcagcagctctagcccaatcctcttggagcctcttgctcatggctctagtgactggtcccttcctagggaggattgcatcatgaacggtggtgtgtggaggtgtcttctttgctattgcctatgcctctctattta

SEQ ID NO: 184418 - DNA, 447 bp, Glycine max
  unsure (1)..(447): unsure at all n locations
cagctttatcttcttcaggggttccttatttgatgaaaccagtgttttttttctcatcgatttgantccggcgaattctcatcaacgcgctggtccttcacctcaatttcttccaagcatgaaaccccacccgctccattatcgaaaacctaccatgccttatcccatctgcgtctccgctcactccgaatcattttcaaaaaccaccatagaattggagaaaaacggtgtgtatcaactttcttattgctgctgcctgcttagataaggtctccatagaattctcttcgtttttttttaaaaacaaaaagaagagaagaacgatatttttgagggtgatgaggcaactgtatattctgtctgtcctcatcacaaggagagcatgcaggtacaaatatgattggatatgtcttcttcgagcttattctttggatttcgcaagtataa

SEQ ID NO: 184419 - DNA, 342 bp, Glycine max
tctataacgaaatgtatgaataagaacatgatgaaggccatcattgtatatatacaagccaattgaccaaaaagcttaccttgaatgataattttatcctttgcaccctttgtgagctaaattacttttttttttcaaaaattcaaccctaaacttgaatgaatatctccatataccttgcttagattctaggagagcatatggttcaacgaaaatttaccccaaatttgggggagtggagttgattgcgatgtaaagaaaaaggtaaaacatcagcacacacaatatataagtggtgtgttaaaaaaataggagaagaagaaaataaatcaaagaacatgt

SEQ ID NO: 184420 - DNA, 409 bp, Glycine max
  unsure (1)..(409): unsure at all n locations
ttacaaattttgcacgggcagaataatgaaacctcaattgaatcttctntaaagaaaagtgattacgaatggattgaaaactaaaacatactctaggatccccaatcaacgaaattgcaacactaagcctcctcttcatccctccactgtatgttccaacttggttatcagcaacttctccatgaaaaagagttaaactcatcaaagattcttctactgcctgcagcaatagactaggagctaaattcacttaagtcttcactgccatataatagctaacacataagttgtcaaattctatgactgctatcgtcttctatatagactcagctcttggtagagaataagcaataaccaataaataataatcgagaacgtgtcgtggaagcaccatactctaatcacttat

SEQ ID NO: 184421 - DNA, 464 bp, Glycine max
  unsure (1)..(464): unsure at all n locations
gacactatgaaactcaagctcttgatcctttattgcgcctgaatgttctttgtttatcattggncnacaaggacagaatcaggtcgtttactctattaggcaaatttcaggtcaatcatctctaatatttctgctagcattcacctagcagggcacatatcgtctggtaccatgacgaactctatgtcagactgtggaattattaagaattttgctattctttctcatctaaggaaaaaagagtccatcaagcaggtcatgtggagacagccgagagttatttggattagatggggcaacgcatggctgcccctgtatggctggcaactgtattttttttcttattttataaacagtgaccttcatttcaaaacaattgtcataatctctgaaacaatgtctcaactactttnnttgccgagactatggcacttgtttggagattgaaaggccatttctacatt

SEQ ID NO: 184422 - DNA, 466 bp, Glycine max
  unsure (1)..(466): unsure at all n locations
gcagcttangcgaattcgcaagataaattatttatcgatcttaactcgctatgaattttataaaaacataaaattaaagagcacagttttaaagatactaggcttcctcctaagagcgcttctttaacatctttagccggattcaaggttgtggttgaggcgtcgccatctcatcctccctaccttgtttccttgatcgtgagcaactctgatcacggacctagcacctgttggcacctgccctaatgctctgacaaagaaagtgttaacatgcaaatgtgaagaaatactacgagatactcgtatcacctttccactttcccctaggcttacccaagttggtgtggtgttgaccatcacttgaaatgactcttcattcattttcccgtttgcaagatactntgatgataagatgcaaatgcatgcatgtttatgatcgaacgttaaacgtaataattaaacatgt

SEQ ID NO: 184423 - DNA, 416 bp, Glycine max
tcgttgtgacctttatagagcacataaatatgcgacctgtttatgagtttcattaacaatcaattttcgagatcttctacactgtctacataattttctaattcatttctcttcatctttctaaaagtttttgatcgacactttctcttccaagaaaagttctttgttcaaaaacttgtgttattcatctttttcattctcttctccctttgccaaaagaacaaaaaggactaaccgcatgaattctttagtgtctctcttctcccttacaaaagattcaaaggactaaccgcctgagaattcttttgattcttcccttccccttaagcaaaagatttcaaaggactaactgcctgagatatcttttatttccccttacaaagattcaaaggactaaccatctgagaattctttgt

SEQ ID NO: 184424 - DNA, 343 bp, Glycine max
acagagaggtacctggagatatgtcgcgggggtcacgagaccttggggacgtcaggtggggtgctattgcccaaaaccaagcttgaccaatcccgacccaacccgggcatagtctgtcagtgagaacctgtgatgtacctaagcaagcgagctcctggctgtcaacagataaaaggaaaacaagaccacaaagcaaggaggcttgtggtggctggccagctgtcgaatttgtgtaatatgtggattgtggcctctggtaatcgattaccaagggtgggtaatcgattacaaggcttaaaaatgaagacaggaggctaagaatgtctctggtaatccattacca

SEQ ID NO: 184425 - DNA, 390 bp, Glycine max
  unsure (1)..(390): unsure at all n locations
cctcgatccgncattttcctggccttttcgactgtcatttttttcgatcaatatcggtgaatatattttttgccgacgtgggctaatgttttcctggccgaataattgggaacatgccagtttctgccgatacgaaacatcggttgagctcgcacgaaaaaacctagccgacctacattgtaagtttttcatgcaactccgaaacaagaaaacattccctgccgtaagaaaaaacattatgggccagcgagcatctttttaaaataaaaaatcgccgaatgtcggctgaaaaatagttgtctgggccatttcacgaccgatgtcngctattgagttttctattcaatcccctgatgaaatttgcatgatgtcgatcccgaaatgtttgat

SEQ ID NO: 184426 - DNA, 298 bp, Glycine max
ttactaatcacggtgatgctacgcatctttattggtccttggtgggtctcatttgtcattcagttgtccacaattaaaaagagtgtaagctcgcgttatccaacttacttgcacactatatagtgctaatggctgactgccaagttagatgtaatggctgactctgatgttacttgctatacacacccacctccgcaccccctactacattctcaaatattattgtaatattgttaagctcgaagactaagtactgacactctttatacacatgataaaaatgatataatatttttta

SEQ ID NO: 184427 - DNA, 313 bp, Glycine max
acctgctatatgttgactcgaccaatgctgctatgggtatgctgcgacatccttcacaccatattcacacatactgagagatcgtgtgtcatgtgaccatatctttcgccacaagtatcggaagtcatgctccattcttcctttgagatgccatcaatccatgttgctatggctggactcaattaacgaatttttctaaactttgatcaaacacatgcttgctaggagtgtcacctgatccagcttgtacccacaaagttgtcgctgattaaagaaaaataacttctttttaataaccctaccatttttgaca

SEQ ID NO: 184428 - DNA, 453 bp, Glycine max
  unsure (1)..(453): unsure at all n locations
taagtcacctgcaagctgcaagctnacatgttatctgcatcaagaggattatttttttctgaaaaatcaaggccacccaagaatggcccatcccatanagtgtgggagatattaagagcttccatgggttatcaagcttctataaaaggtttagttctaatatctctacaattgtctcacctctcaatgagctggtaaagaagcatgtggcatttatctggggtgaaaaacaagagcaatcctctgctttgctcaaagaaaagctaactaaagcacctgttctagctcttcctgacttttctaaaactttttatctagaatgtgatgcctccagagtgggagttggagctgtcttcgtacaaagtgagcactctattgcttattttagtgagagaatcattgtgccaccctaactacccctcctatataaagagtttatgcctaataaatcac

SEQ ID NO: 184429 - DNA, 373 bp, Glycine max
  unsure (1)..(373): unsure at all n locations
gacactatagaatctcactcttattactggtgaacttcnatcatatgggatggccgcttgttattactttctgtttccccatggtgcagttgagataaaaaatgaagttaccgacaaagtattcaaagtgaactgtcatcagctccagctttttcatgagagccctcaagtggaagagaagcttgtggtggacctctctttggtctagccaattatatgtgatgatgtaccttgaatgacgcttgaggagcttctatctcccttatttatatgtagactctgtgtcctcattacattccttgcttacatttaggagtatgtgcacttcaagtgtgcggggaagggtttagaaaagaaaaacatatatgctctc

SEQ ID NO: 184430 - DNA, 430 bp, Glycine max
  unsure (1)..(430): unsure at all n locations
agctagntatatatcacccaagnaaggttttgataaaattcaatgcttgtaagaggtgcgtgttttctcccaacaattaatgttaggagtagcagttagtaatgtcttacatgcaccctccgctttttacaagcattgattatgttaaagattagggtcttgttaattggtaccttggggtcctggttaaagaaattataaaaaaaaaatatttattctgaagattatagaacacaaaataagttttgatgggtaaggtaactttatgcattacaataaaaaaaaactttatattttaagttttgtaacttatatcctaaagacactaattaatattttgttaaaaattaaatcaactaatgagaataatgacttatggagggctatatataaaaggttggtgtatatatacaccttagtaccttacatg

SEQ ID NO: 184431 - DNA, 276 bp, Glycine max
taaaaggggggctaagaattgtttaaacataagcactttcacaatgaaggaaagatggtagtgctgcacatgatgtccaacgctatgtcaaggaataagatcgggctgcacaatgcacaatgcaagataaagtgtcaagtgatgaattgaagttgaaggatccaccatgtccgatacaatgtcctgacatcctgctcgagaatactggaaattgctgtacattgcaagataaaagtcaagtgaagcatttgagctgcagatcccagatgtcggata

SEQ ID NO: 184432 - DNA, 376 bp, Glycine max
  unsure (1)..(376): unsure at all n locations
cgctccggagtacgacagtcaccgctttaagagcgctgtacaccagtagcgcttcgaggccatcaagggatggtcgtttctccgggagcgacgcgtccagctcanggacgacgagtatactgatttccatgaggaaatatggcgccggcgcggggcatcactggttactcccatggccaagttcgatccagaaatagtccttgangtttatgccaatgcttggccaacggaggatggcgtgcgtgacatgagatcctgcgtaaggggtcagtggattccgtttgatgccgacgctatcggccagttcctgtgatatccgttggtgttggaagaaggccaggaatgtgagtatggtcagaggaggaaccggtctgat

SEQ ID NO: 184433 - DNA, 365 bp, Glycine max
ccagagggacgttactcttaaagcaaaaatggcatataacctcctcccataaatacaaacatcaatgtaaatttagagcaagcttatgcgcatatttccttacaaacgttctcctataaaaatgcactccatattacaatcaagggcagcttcgttacctagattatttacacgtacttccaaagtgtatatgttacttacatcacacacatctccttggctaaattcacatacatgcatacccaaagcattttggggtaccaaaaattgcacatgtgcgcatcttgctatctctaatacctatacatacacaaactccatgatgagtcttgactatctacacaataaggtgctacattatatgc

SEQ ID NO: 184434 - DNA, 388 bp, Glycine max
aatgtgaatgtatgtatataagatattgatgatgccaaagaacaatcaaacaaggctgtttaaaaggataagcatttgcttcaagattaatacaagattgtttcaacaaacaaagccttgattcaagatttctttaagatcaagccttgcctcacaacaaagtgctttcaagacattcaaggctctggtaattgattaccaggcagtgttatctattaccataagacagggttgacaaatagctgttgaaaagggtttcgaatttgaattttcaacatataatcaattactatatgtttgtaatcgattaccagcaacgaaacttctgaaattcaaattcataagtcatgacccttcatattataactgtgtaatccattacacaaac

SEQ ID NO: 184435 - DNA, 432 bp, Glycine max
  unsure (1)..(432): unsure at all n locations
gctgaatggnactacattttctgaanaggaagcctatggaccaaagatctctttgaaattgataagaatgcaactntgctttcacacaatctctcactgcataatgccacataaagtaatcaggacaagttaaaaattcaggactaggataaggggaccaataatttgcaacttagtgctaccacgcgaatgaataaaaggacattggttcatgatgtcaaatcatatgaaacatttagattttgatcaatgtaacttcctgtcctactatagaaaacattcttgtcgagtatttcatgattgaaaatcagacatcatggcacttgaactcaagggtctcatactttnttctttnttatntaatcagcaaaaaaatatatctattactatagcaaaaggtacaagtagtaccatcagctccatacagatgat

SEQ ID NO: 184436 - DNA, 425 bp, Glycine max
  unsure (1)..(425): unsure at all n locations
gcttcagacatatcttggagaaaattttctaactgaatactcattattcgtttttggactgaagttcatttgggtggattacttannctttggttgaatacttaatcaatcctatttttccattttccatgtaattttcgtgcttattttttggaataagtacttatgtctttttcatattttctaggtcatattttagtgtgtgtagacttccttcctaagccattatgatgactagtggaacctaacgagccattgtgattgttagtgagaagtaaatgttagtgggccatgaatgtttactgggattgttagtggaaaattacttcctttgttttaaaggcggcttatcatagcctataaataggaacctcttgtaatttcaagataaaacttgctaatcaatcaaattgactatttatcta

SEQ ID NO: 184437 - DNA, 454 bp, Glycine max
  unsure (1)..(454): unsure at all n locations
ntactgagncacaaatgtctacgtatgttgctaacgtgcatattggtcctcattnggtaaccatgaaatcgttcccctgtatcatatgaatcaaagaatgagggtagtttatattatatgcttggacttctggcctcacaatacttgtaaagaattgcggtactgaactactagaataatcctcaagggtaatcctgtgttgatgttctttagccatgacaaaggcttccggtagatctgtagcggattcccttaatgacggtgaatcagatgatgtagagtcagaagattgagcttcttcttctagaatggaagctactatcctatcttgcaacaatttccttatcctttaggcactgttccttcttaaagtagcttcaatttccaagtccagaggaactaaattacctgtaggagatctatgcatacaaaatactgatagaaacaacagtta

SEQ ID NO: 184438 - DNA, 386 bp, Glycine max
  unsure (1)..(386): unsure at all n locations
caatgtttataattnttctctatctaatgttatcccagcttccacccacatctactatgatactctatctttggtttcccgcatgaagagtctaatttatatatttttctctcccaaatttctttgcaaagataaaaacagtaaattgcattaagattaaagatgcataaaataggctaaacaaatctcattatttctagcaatgatttcatttagatgtcctttcccagttcttagaaaataaccatttttcaatgcattatctcctaaacaatacatgagcatgggagatcagaccataatcaataaacaaataagcacaaaaaaagcaatagaaactagattgcattaaatagataataggaaataattacattacaagagtt

SEQ ID NO: 184439 - DNA, 454 bp, Glycine max
  unsure (1)..(454): unsure at all n locations
actaagcttgtgactcgtgactgcacaatgaaganaaattgttatgctcaaattgacagatngaattaaggcgtgtgtttaaagtagtgtaattcaaatgtaattgttcaattttattaagtttgtgacatacattagaggttagccataatagttgggttgttaactaactatggtttagtcttacttagtgtataaatatcatgtaaaccctgtgcaatagtgtgtgatcagtttttttagacattttaattctcattcaaaagtttgttattgttctgttattcaagcttcctccctctcttgtttgattcttccaaaaccacaactaagaagagtagattaataaaactattctcctttgtaagccttgttcaaaagcatcgtacaccaagtgacaaataattgggtctatttccttccatgtttaccattcacttagatgttaattagt

SEQ ID NO: 184440 - DNA, 384 bp, Glycine max
ctgcctctataacattatcattggatttaatgatgaaaggtgaaccttttcacgtgaaaaagaggctacaattttaattgtaaaaagtggcacatagtgtaatctcagcctgtgggctaggcgcataaccaccgttatacgcaacttcagtgctcttattgcaaaggagaatttggcaaagcattagcatcaaagctgcacgctaagcacaagattattgtgctaagcacataaggttccttcagccaggctaatcacgagactagcctaagctctaattcacttacccacgctaagcgcagaggtggcgctaagcgctatgttgcgattatatagcctatttaaagcctgtcttgtgcagaattagataacaacttttacaca

SEQ ID NO: 184441 - DNA, 196 bp, Glycine max
gtggaccttattctaccaagtgagacttacaacagcctcccatccctctggcatgggcagcgtgagcaattcaactcagaaaaaatggctgatgtgggacctgatctccctcacggaaatacatgcgagcatactgctagatgccatccaccatatttcaagatatgccacgtttctaaaggaggtgtgtccccac

SEQ ID NO: 184442 - DNA, 390 bp, Glycine max
tttatcgatagacctcccatccttaatggagagggttaccacttctggaaaacccgaatgcaaatttttatcgatgcaatagatctaaatatctgggaagccatataaatatggccttatattcccaccacagtataaagaggttcaatagatggtagttcatcaagtgaaagcataaccatataaaaacctatagatagatggtctgaagaggatagaaaacgagtactatacaacttataagccgaaaactataatatcattctgcctaagaatggatgaatatcttacggtttcaaattgtaagagtgctaatgaaatgtgagacactctttcattatacacatgaaagaactacagatgttaaaagatctacgataaatgcactaa

SEQ ID NO: 184443 - DNA, 447 bp, Glycine max
  unsure (1)..(447): unsure at all n locations
agcttctgaatctctccaatgcttcactcttatatttatcttgaaactaatgaaatgaagagattgcagttttcccttccgcaatcttggactctgggaacttttcaacaacttcttcccanggttttagactgttacccttgaatgagtggagccacctcttggcttctcctgccaatgaaaatgagaaaaggctgagcctaatagctttgtctggtacactgacaatcttaacagtgttgcatattttaatgaacgttaccaagtgtgcataggggtcttcattaggtaatccttgaaataagttgccctgtattaaatgaattaaagaatgtgggtagttgatgttgttagctcgcatttctggacgtgcaatgctggtgaaaatttgtggtactaaactacttgagtaatcctcnaagggtaatcctttggtcatgctcttct

SEQ ID NO: 184444 - DNA, 310 bp, Glycine max
agcttcatactagcggcgtaaacgccggatgaggatgtattcgcgccccattgtccaccagaacccgcagaaaccgggaaactggaatcgccgaggtgaaccgcaacctgctccagcggtacgccaagcatttccgctgccgtctgggccagaatggtgtagctgccggtgccaatgtcggtcatgtccgtttctacagtaacggtgccgttttgttcgaggtgaacccgagcacccgatttttccagcagattattgcgaaagcccgccgcaacaccgtgggcgactagccactccccgtcgcgcacct

SEQ ID NO: 184445 - DNA, 237 bp, Glycine max
  unsure (1)..(237): unsure at all n locations
ctctggacctcaaatcaaatgatgactggngcattttctatctggcaaaaacgctgaaagttcccgtggagaatgtgcgtattatctccccgtatatcggcggagggtttggcggcaagctgttcctgagaagcgatgcgctgctggcggccctcgccgcccgagcggtgaaacgtccggttaaagtgatgctcccccgccctctatttcccaatacaacacgcaccgccccgcacc

SEQ ID NO: 184446 - DNA, 181 bp, Glycine max
catcatactggtgctactaaatataataatgggtatgcaagcgatctacactatctgtttgttatgcgtaagtattcaacataatatcaataaagtcataagatgcatatatcatgtagaatcaattaaactataccctttcaatgacttatatgtgtatttgtgtctctcatacaacatt

SEQ ID NO: 184447 - DNA, 411 bp, Glycine max
  unsure (1)..(411): unsure at all n locations
ctcaaattcttcaaaggatggcaccaatcctcctttccaattccctatacggcaactcacaaacaaggaaacaaagagacaagctataaccatagaccaaaaaaatgaaatgaaagctaaaccaataaagttctaacaagaaaaattttcaaggattattcaacaattaaagcaatgaaaagcacacaaaagcaagctatgactcaaagagaaacctagaatggctctagagtagagtataaaaactaataaaatgactcaagaaacctctagttntggtacttgttttcacaataatnttcaattgaaatttcagaacttagattggatacaatangcaccaattatagaacatatntcgagccanaacaacaagcacactttcctttcactgttntttctatacactga

SEQ ID NO: 184448 - DNA, 365 bp, Glycine max
  unsure (1)..(365): unsure at all n locations
cgactttgtcatagataaagcaagggggagatcagaggatctttaaattcttttttaatcaactgacctacacttagtaagttttggtcaatgttaggtacataaagaacatttgatattaatttggtacctgaacacgttgaaattgcaatagttccttttccttttacagaaatatagccaccattcccaattctgaccttngagacattagttggcttcaaatccttgaatagagtcttatcatatgacatgtggttcttacaaccactatcaatcaaccaacatgtagaactactcttcatcgaatagcatgttgcagcaaaaaatataatcttcttcgtcttgctcaacaacttgagcat

SEQ ID NO: 184449 - DNA, 312 bp, Glycine max
  unsure (1)..(312): unsure at all n locations
ctctgatttcgaggcttttacactcttatcacccgctctcgctaaaggattgaaatatttngtaatccatatggcatcctcctacgagtctaactcggctacctggagggtcaaaacacccaagctatacttcatttactggcgcgtatcttcgctgccctgttcttacattcattccgcgactggcttaaaactctaatttcgaaatcgtataagtcttttcttactaagttccagagctataaggtgatcagagggttcctccacatgtttataattccaactagaagtctacgaactcatttatgcgat

SEQ ID NO: 184450 - DNA, 441 bp, Glycine max
  unsure (1)..(441): unsure at all n locations
acccaatttattttacatgtggaagttattcatttatgttgcatttaaaacaaagtctagatntccaagtctggctcatactctnggcattttaatctatcaatctaagttgctcatacattctaaatgatggctggacatgcataaagcttatttcacattcaaattccaaaataacacatggaatggtcattgcggcattttatcaaacggttggtgggcacatgtttaagcatgtaaaaagaggaatggagaataacgtgacatgcacatctacaataggatcaaagataggcctaagtccatccattgcagcccctaaccaaagcattcaagtcatggattcacaaataatttatctcacaaacattacagagaatataataaataaaacaccacaatgaagagggtaaattcgatggaaatggaacgtcattgtgt

SEQ ID NO: 184451 - DNA, 340 bp, Glycine max
  unsure (1)..(340): unsure at all n locations
tgactattcccatcatctntgctcctacgggtatgacctctttatgtactacccttattggctgggtcctacatgcattgcacatttattttaaaattaaggtaaaatatataaaaaataaattaagatagaaaaagtatgagagatttggtttttgaaacgagatatgcataattaatttaagtagaattttaaaataatagattaaagaggggtgggggggggggatatgcataaaactatgaacatatgcatcaataatgcataagaatttaaagttataatttataaacaaagaattttacgtgacacttgtgtcgaatattttattgctttattt

SEQ ID NO: 184452 - DNA, 363 bp, Glycine max
tgcaaccactacttgttaaatgacataagacgacagttcttaagcacattcaaagacgattcaaaatcatctttgaagccaacgtcgtcgaaagtcttgtctttcgacaacggttttcaaaaaatcatcttagaaaaatgtatccttctaagacggttattagctaaaaaccgtcttagaagagtacccttctaagatagttgttagctaaaaatcctattctaagatggttttttaaagaaccgcctcacaatgtctttttttaaataaaaaaaattgaggattctaagatagttctctcacaaatcgtcttagaatataaatattctaagatgagttttcaaagaactgtcttataatatc

SEQ ID NO: 184453 - DNA, 455 bp, Glycine max
  unsure (1)..(455): unsure at all n locations
tagtgcaacctgtcgcactacgcgcactttcaagagtcatttatcgtaagggattggcgctagcgcttcctgccttctaagcccagcttaaaagctcaagttatacaatggattgggggcttagcgtangagatcgcgcttagcgctgctacaataaaatttttccagagaagaaggggcgcttaacgcatcatcaacgctaagcccacaggttaaagttcaattaccgcaaagatgtggggcttagcgtagtgatgtgtgcttagctgaactattcagccaaccaatcaggggtatgtgcacttagcataagcaagctcagcttagcgcgtgaagactgagtgcttagcgcaaggtctgcacttagcggatagacaatttcaaaaaatntctacgttttttctgtctatctcttcacacaagttcacaaccccttgttcattactaaataagct

SEQ ID NO: 184454 - DNA, 205 bp, Glycine max
ctctatgccgagaagagacacccattagttaccattctcaaaacttagttgtcaaaacattgtccaatgacaaagaaaaaaagatcttcatcgatttgaaactatcgaaagaaaataataatggttgtcaatcttatccaaaaaaggggggatgcaccctcttttgaaatgattcattgttagaaatatattctattacctttat

SEQ ID NO: 184455 - DNA, 444 bp, Glycine max
  unsure (1)..(444): unsure at all n locations
agctaganggtattctgagtcaatttcttattctcttatgtgtgagtntacttttgaataaatgagggtttttgatgcatgagttctgacttggaagaaatttatttgattagagaactagaataatttcttaaggacaagcaaagctcaagtatggggaggttaataaaccacttttgcagtgatattntgtgctatttgcatgcactntttttggcaaaactcatgtttgggagctagttntgtctttcagatgcatagttgctcaattaagtgaaaatagtgaaaaattacacttttacctgatcaattgaagactctgtcacttgaccacggtcgtagtacatccagcatgatcgtggtgaacatgatggcgctggtaatatgatgatgcccctctgacaatgctcgtagtgaactcactatggctatagtcacatcatg

SEQ ID NO: 184456 - DNA, 294 bp, Glycine max
  unsure (1)..(294): unsure at all n locations
acactatgaaactcctcttgttctctaggaggagtangcaccagatggcacgattttcttctcctaagatggaaaagagtaagagggagcaagatgatgtgatatacattatatatgcttacaaaagagtatgtgagatctttgatttctacctctttggttcacttcttatcatctttccaactttcattaatgctcacagatttgacatatatgactacatggagcatagcaaaatattcatcatcaatcctaccaaaaagtgcttcaataatgaaatgagcgatctatcat

SEQ ID NO: 184457 - DNA, 318 bp, Glycine max
agtcacctgcagcatgaagctttaatttcaagttttaaacctttttttctctctctctgcaacatcaaagagccaaagtacgtggtaagcaacacacggcggaagaataataatcaaatataactaaagttcatataataatcattcataagtcaaaacaccaaatataaaccattcataaaatactaagtgccaaataccgaaatataaccaaagttcagaaaatgataacttaaaaagcatagccaaatacacggcttagaataaaagataataataatctataactaggaaagtggtggaaggtcgaagcactga

SEQ ID NO: 184458 - DNA, 205 bp, Glycine max
gactcctacgctctcgaccagaattgataaacctttctttaatccaaggcgcctgactcgatcccatgttttactaaagggaaacaaaacccactgcgaatcaagactccgacatctatcatgggtggaatggatgaatgcatgaagaaatgcatatgacacacatgcattttatgaatatgggaacctgggaaactgtcgtcct

SEQ ID NO: 184459 - DNA, 339 bp, Glycine max
aatagacgcaccttatccatcaatgggtggatcaattgctcgaataaagaatgataaagtgacgtaattgttcaggaaacacgaaaatgtatgaacagtctatatcaatatattatacataccattcctgtcaggatgattgttgcggcaactgacaccacactggcaactgattcatatgaatgaagaaaattaacgatgttcaatccagagagatatgtgttagattatcttatttgggagaaacaactttatctttgctagttcctacgagagctatggttaaacatacaaacaatcgactattcgtctataattatgacaccaattgacatatac

SEQ ID NO: 184460 - DNA, 167 bp, Glycine max
cattgacgcgatctaatcttgagttacaacactctatctatagaggtatgacgctggttgctatacagctaggcagctttgaagtaattatctacttatcaccaccctcaacacgtcgctataactaactctcacaactgacacaacgcgctaactactcacttgac

SEQ ID NO: 184461 - DNA, 459 bp, Glycine max
  unsure (1)..(459): unsure at all n locations
ntagtgtggcctttgtgatccaatccatttgatctttattgttcgataggtcggccttcatctgtcttgcaccctctcttcgttattcatcttacgtctggatcgagtgttataggggtgcctttgcgcattttaacttatggtgagttccctaaagaaacaaacagtggtgagtatgccaccaaaacatgaatatgctaatgaatgatcagagcacttggatccacctcaaggcctttttagacaagtgatgagtttcagaacttctctttntataaaaaggaacaaaagcttttatctagccaagatgatacaaaagtgttacaacagagcctaacgggttgtaattatatgggccattaattctatcatgtgttgacagtaattgattagcccatgaatttcctctggggctgaacacacttcggcgatgggccttgctttggctagagctcggga

SEQ ID NO: 184462 - DNA, 158 bp, Glycine max
  unsure (1)..(158): unsure at all n locations
ctccttgagacttactgaacgaccttagagtcgacctcgtttatgtctccatagaagccntgcgtgagtgcccatttctacgatttttctntgagatgcttcacattcggagactcccaattagtaccaaccattgaagaatttgacgaatgtctagg

SEQ ID NO: 184463 - DNA, 269 bp, Glycine max
  unsure (1)..(269): unsure at all n locations
catcaaacatataaaggggaaagggaatgtagtggctgatgcactgtctaagagacatgctttacttgctatgcttgaaactaaactgtntggtctcgagtctttgaaagacatgtatgtgcatgatgtagactttgctgaaatttttgctgcatgtgaaaagatttttgaaaatcggtactatacgcataatggattcttgtctaaagcatataaactgtgtgtgcctaagtgttccattacagagttgcttgtgagtgaatcacatg

SEQ ID NO: 184464 - DNA, 371 bp, Glycine max
  unsure (1)..(371): unsure at all n locations
ggcttgaggcgctgttatgcacgctggatctttgacttctatgatgtcctttaatggtgatttccaccatgatatgtattggaagacaaaggagaagaagtgagaggaggcgccatccactanggaataaaccatggaagaaggagcttcaccaccaagatgagccttggataagaagcttggagaggatgcttcaatggagaaaaagaaagagggagagaaagagagaggggggagcacgaaattgaaggaagaaaaagggagagaagttgaactttgagttgtgtctcacaagactctcattcatcaaagttacaacaagtgttacacatgcttctattcatagactaaggaacttccttgagaagctt

SEQ ID NO: 184465 - DNA, 459 bp, Glycine max
  unsure (1)..(459): unsure at all n locations
nagcttagaaccgtcttagagagtttctaatatggttatttatggaactgtcatctattgtccaagcattcaacgatgttagcttcaaagacagttcaaaaccgtctttgaatgtacattacaaccgtcgtaaaacatagtttttgcagtagtgactctatgttttaatcgattacagaattgttgtaatcaattacaacaatatatctaaagcttaagtagttaagtctcgtctcagtttaattgattatggtagtactttaatcgattacactggtgtttgagacaatgactattttttcaagagtctctgctttaatcgattaccagatggattaatcgattatttctctcttgtttaagttgttcagagatgaacaagaacaatttaaccgaatacttaggtcatctaatcacttacattgttcttgagtggttttccaaatgttggatgaacac

SEQ ID NO: 184466 - DNA, 389 bp, Glycine max
  unsure (1)..(389): unsure at all n locations
ctcagctttaactggaattgctacgttcctattgattcttaaatnngnnnncgantaccagtatatctgacgnngnnnccacaattaaattgtgaagagtcatatcttttcataaaatgctttgtgtaatcgattacatggttttggtaattgattaccagtgacaagttctgaataaaaagtcaagagatgtaacttttccaatggttttctcaagattttctcaaggttataactcttccaatgtttttcttgactagacatgaagagtctataaaagcaagaccttgacttgcattcaaagaactttaacaactcttacaacttttagaacttcttgaacaacttttgagaaatcttgaaacctttgcttctcatctttcttcttc

SEQ ID NO: 184467 - DNA, 214 bp, Glycine max
aatgaacccgagagtttatcttcaatatgcaactatggactggactttatttggatgggttacataattttttacctaaaaactaattaagacacattctctaatctccctttaattctcatgtaataacgccagacgagggccgacatcttctaagttagttcttatgtgtttaagctctccaagttattatactgtgtaacgaaatattatt

SEQ ID NO: 184468 - DNA, 397 bp, Glycine max
  unsure (1)..(397): unsure at all n locations
aatggntcattcacctctcaccaactaaattgtaaaaatctcttgagtatttcttcctttggagagtctcttccttattaatttgaagtttggagagatgcaaatgtcctgagggttgcctaagaagcatcacacactcatgtcttgcattaacataaattgttcatgttgggccacatattctacactagttgaagcatccatgtaactgtttccctccttataatcaacatacaacatgtcttcaccatgacaaatccaataattatgcttgaacccatttttgaaaggtgaatcttataactctatcctcaaaatcctatacaatccattaacactagacatctaatccccgcattgcataacatcttgtgactagcttgcttataactcttca

SEQ ID NO: 184469 - DNA, 403 bp, Glycine max
  unsure (1)..(403): unsure at all n locations
ctatacaaaccaagcttgataaacanagcaccacaatcttgtctctctcttatatatgtgcgtgtttngcattntagagagggagagagagagagagagaaaataagctgcatatattgcattttttgttcaaaaaatgcaaaatggttttcctatcaatgataaacattaattaatagttaattactgatacaaaattaaatattccataataattcatctcaaggacacancgtacaacaatttatcatcatcttttcttacatcttagagaaaggatgagagaaaacataaatgattttctcaagagagtacgtgttaatttggaaggtcanaccgcacaactttgtagagcaatggtcatcatgaatcaagtatgttctgctttgattcttaatggtac

SEQ ID NO: 184470 - DNA, 439 bp, Glycine max
agctagcatactttattctgcttgcctgttttcttataaccttctggttgggtcatatagatgtcttcctctaaatccccatgcaagaatgcagttttaacatctaactgctccaagtgaagattctctacagctattatgcttagaataactctgatggtagtcatctctacaactggagagaagatctctgtgaaatcaattccttgtttctgctgaaaccctttcaccacaagtctcgccttgtatcttcttctaccgtcagattcttcctttagcctatagacccacctattctgtaatgccttctttccttctggcaatatagttaaagaccacgtcttattcttctgaagggatgtcatctcatctttcatcgctagcttccactcaatagagtcattcccctgtgtagcctattgaaacatttaggctacca

SEQ ID NO: 184471 - DNA, 280 bp, Glycine max
gacactatagaaatcatgtcttgacttgagtcatcaagagaatagagatgtgccatgtgttgagtttcaagaacaatcaattatcatcatcaatcatctttgaatcatctatctttcaatctttttcaacatcatctctcaagcatctttcaatcaatctttcaatatcgttctacagaattttctgattcatttctcttcatctttctaagagtattttatcaacactttctcttccaagaaaagttgttggtcaaaaacttgggtattcatctcttta

SEQ ID NO: 184472 - DNA, 99 bp, Glycine max
cataacaaacattgggacaaatggacttcaaaaaacacgctgagtttttcaacaaaaattccgcgaaaaaattcgccaggttttaaaaaaacagcggaa

SEQ ID NO: 184473 - DNA, 441 bp, Glycine max
  unsure (1)..(441): unsure at all n locations
gagctttaacatatgtaatgtatataatcattttagttaatngcataattaggtatgtaactttatgggaagtcacctaaaaacaaattattgtttagtaatcacctaattaattatactataagcataattgattatgttatcaataacaatccacaagaataaaaaaggatagaaatatctattatggaaacttctttcttcatgtactataagtgttgcatacaggttactttcactcccattttatttcattttgtgatgaaaacaaaacaccatggaacccacctttatttcaaaactntcacctacctttcacccaaaccaaacattcatatgctacaactgtcatttcttttcagctacaatactntcatcgtttcatctctctaaaccaaacattacnttcagagaagtggggtatagtaatcaaatatacta

SEQ ID NO: 184474 - DNA, 317 bp, Glycine max
  unsure (1)..(317): unsure at all n locations
cactannagaaacncatctttattatagcaggctnggaacaagtgacaaaggagattttntctgtctatttnttccaagaatggatggactggaattgcatccaaatctaacgagttgattggaaagagttattacaaaataaagcttaagaataagtttgataatctcataagagaatgacaagtttggtatagactatttggttaagaaatcggtctaagatgggacaatgccaaaagtagtgctgatgcaagtgatgagtggtgggtgaaaaaacaattggtatgtggtatataaatgtgtatcggaataagtc

SEQ ID NO: 184475 - DNA, 288 bp, Glycine max
  unsure (1)..(288): unsure at all n locations
agtttataatatattatgacgctcganattatcatcacaagctctcgagaaanncagacggtcataacttttcacctagatgtccgattatggcgaatcacatatcgagacgctcaaaatcgaacatcggaagcccttgagaaattctaatggtcataacttttaactcggatgtccgattcaggcgcatcacatatcgagacgctcgaaaaggaacaacggaagctctcgagaaagttagatggtcataactgttcacactgaggtccgattaaagaatattatata

SEQ ID NO: 184476 - DNA, 370 bp, Glycine max
  unsure (1)..(370): unsure at all n locations
actatgaaactcagctntcagaaatagatggtcatactcttcagatganagttctattcagccgcataatatatctagatgctcgaaattgaacgccggaagatgatgagaaatttaaatggtcataacttatcacgcggatgtctgattcatgccaataatatatcgagatgcactaaattgaacaatggagctctcgagaaattcaaatggtcataacttttcaattggatgtccgattcatgcgcatcacatatcgagactctcacaatngaataacgaaagctctcgatgaaatcacacgggcataagtcttcagacggatgccccattcaagtggatcacctattgagacgctcgaaatgatctc

SEQ ID NO: 184477 - DNA, 234 bp, Glycine max
atttgtccaggccaagagacagatccaaagtaagagattgctgacctgcaaaaagaaacttgaacaaagaacacacaaattaataatcaccttgtaccaataaagcgcactatgtaccaaatagtgagattctcagtgaaacaacttgctgagatgcctcatgaataataacctgcaaatggaaaacgaacatactgcctgctatagcgaaaggagaaagaacatatttgataa

SEQ ID NO: 184478 - DNA, 279 bp, Glycine max
  unsure (1)..(279): unsure at all n locations
gagaaattcacagtgaaccgtttttatgatgaagagagatagnaaaatataatattattatctggataacgcaagttttattattttcatgaaaaacaaaagattatctctttatataatcattcaatcacaatttatctattaagttttataaaattatcttaacagtcatatctatatatatatatatatatatatatatatatatatataatatgactcttaattcgataatatcataaaatcattcacctcattctatattatcattccactctc

SEQ ID NO: 184479 - DNA, 447 bp, Glycine max
  unsure (1)..(447): unsure at all n locations
ctgcagctgtaaacggagaaagaaatttttgtgagcgagangaatttgtttgccaaaaaaanagcaagaaatgaattgatattttcggattctaacacttaccagttgaagaccgaagaacgaacgatgaacagacgaagaacggtgaagaatggcagaaaatcttcacggatttgctcacgaaaacgtttcataagcgttacggaagcacctcggcttggattttctgcatgaaaacacgtttttttcaccaaaaacagctgaaatgcataacataggggtcagggacccttgaaactcagcctgctccctctatttataggagaaatggggaggtgcttgccgcccacaggcttctttgtagaagcaagctttatgatgatgaatcaagttgattcaagtagttttgatgatgcacaagatgatgacataaagcccagagaatga

SEQ ID NO: 184480 - DNA, 385 bp, Glycine max
tcatgcaagaatcataggcctatcaagtattgttttaataataaacttcatgcttcgagaaagaaaataactcaatcaaacatataagcacatactcataatagcaatcaattaagacaaacaaataaaattgtgttagtcatcatataaacaagttaattgaaaggaaagtttcaaccaacttaatttaaaagagaatggttttgatgttacctttttcatgatttaagtgcttagatcttcaaagatggaagtcagactttggctttttgcttaatcttcttgagagatgttctcatcactctcatagtccttggatagaaaggtgatctccttctccgaaccatcggatgagtcattgtcatcctaagcaatatacgccttc

SEQ ID NO: 184481 - DNA, 415 bp, Glycine max
gacactatagaaaccaagctttgaaacttgaaaggaggtgtaatatttctacagttattttatcattgataatagagtagtacaactgcttatcttgtttctatagtcttgtagtatccagtgtcctgtgattatgtgctacagatacctgcgaacaaagcagttagtcatatgtttagttgtttactttttgctacataagtttttgagtgaatattggttctcatattgtagatacatatacatactgtagattcaaggcagaggaataatgagctacaattatgctattggcataataaaggaagttattacatgttttctcgaaaaagagaggctagtaaatatagcatgatctcttttcgtatctgaagtagaaatagtaggagataaagcttaaatggcttctgtttct

SEQ ID NO: 184482 - DNA, 266 bp, Glycine max
accgcgaacgaccactagccacatactgtcccagcctaatctatatcaaaaccaacccaaccatatagcgaagatggggagccacatgaccacggacagaggacataaagcctgctaggtgtgttctgggatgctgaaaatggagaatgaccaactagaagataaggtgaccctgaccaacaacaatgtatatttcaagtagatcattactgttgtagaacatctcctctactgagtgaacaggataagcgttgtatgctacagtt

SEQ ID NO: 184483 - DNA, 247 bp, Glycine max
aaactcctatattgattccagcacttttattttctaagaatatgtcgaatttgaccttcagccaaacaaaaaagtgagacggcttgagtcacattcaaaatgatggtaatggaaatactaagtattaggagcttaataaagtagctgaattagcataactttgctttgcatgtttggcacaaggactgttctcttcgagagctgatttaaggtttaaaccctctcataaaatgaccctaaatgttaa

SEQ ID NO: 184484 - DNA, 217 bp, Glycine max
acaatcgtgaataataaataaccgctctcacggggtaacgaaccttcgttgatgcattgatatcgtgccaagagagctcaccgtggtagccttgtaatacgttggtgcctgttttgtcgtgttgacatctgggtgtatgacatggtttcactgttgttaatggttccggttcatgtattgacgtccgttgtgaggttctatactgggtctgttggta

SEQ ID NO: 184485 - DNA, 218 bp, Glycine max
ttcttacactaaattaagagaaatatgctctcccagagtgcttaacccttgcctacagcctcccacactgttgtatagcctcaataagggaggaggttacctgtccactctcccaacgagctagatgcttgcttctaaacaatcttacttgccaggcgagctggttgttcttgctgaatcttcctgacgggcctatacgtgccaagtgctgatgaaca

SEQ ID NO: 184486 - DNA, 403 bp, Glycine max
  unsure (1)..(403): unsure at all n locations
ctttaatctattacactattgtttgagacaattactgtattttttcaagagtctctattttatttgattaccagatgaattaatcgattacttctctcttgtttaagttgttcagaggtgaacaagaatactttgatcgattacttaggtcatccaatcaattacattgttcttgagtgattttctagatgttgtatgaacattttaatcgattacttggataatctaattgtttacttcattgaaatatttgattatcttaaagatttaattgattacagacgattataattattntctctataaataaccagcttgtgttcacatctacagataatgagatcattagagaatactacacatgtcnttaaaatacttcttagtctcaaatgaacaagatctc

SEQ ID NO: 184487 - DNA, 394 bp, Glycine max
  unsure (1)..(394): unsure at all n locations
tagacgggggagcacanattgaaggacactttcatagagattttcaacttcgagnggcgnctcacaagactttcattcatcaaagtggcaacaagtgttacacatgcttctatttatagactaagtagctcccttgagaagctntcttgagaaaacatccttgagaagcttctttgagaaaacttccttgggaagctagagcttagctacacacacccctcttataactaagttcacctccttgagaagcttccttgagaagattcctaaagaagctagagcttagctacacacacctttctaatagctaagctcacctccttgagatgagaagctagagcttagctacaccacccctataataactaagctcacccccatgacacaatacatg

SEQ ID NO: 184488 - DNA, 452 bp, Glycine max
agctactcccctatgttgctataaataggttttataagtgaagaagaattttgttcttccccttaagcacttctctctctttcgaatttgctgaggaaaattatttccgtgaagaaaatccaagccgaggcgcttccgtaacgtttccgtgagtaattacgcgaagattctctaccgttcttcaaggtccatcgttcgttcttcgttttcttcagtcttcaacgggtaagtacctcaaaccagcttttcaattcattctatgtacccgtggtggcccacattttgtttcatgtattcttattctcgttctcatttgctttttatacccccttctgacatgcttaagccatttatttaaggcatctctcgcttaatctaacaataaaataaatttccaccgatctgttgaattgtgtcatcctgctaatctggtaaaatgaatccgaccgtcg

SEQ ID NO: 184489 - DNA, 427 bp, Glycine max
taatgagagccttgttaaacactaaacaagaaatcttactttttctccaaaaagaactatcattgggagaatatatacatttttgaaaacttttctatacaaaagttagtcgtaaaatatgactaatagatagattcttgaaatgttttctcatgtgtttgtaagcctttaagagaataggtgaattagatagaagttcatgataagtttttctaagagactcaaggtcatcgatgtttacctcatcttcctaatctgattcaaattcatcaaaagttgtatttgccatcaagcatatgttggcttgtttgtcatcttcatcagacgaggtgtcatccatattttcctagttactcataagaccctgcttttccttggtcttgaagtatttcttcttttcctgacctttctccagttctagacattc

SEQ ID NO: 184490 - DNA, 341 bp, Glycine max
tctttgaggcattctttaacccgttatatctcccaacttgataagcgctcagcaatatctccatattacactatttggagtcacatgcatctcttttatgaattcaaatgccctttgtaaattgccagagcgactcaaaagatccacaacacatccataatgtttcatttccggtttcagtccataaaccttctccatactttcaaaatattccaatcctttatcaaccaatccggcatgtgcacaggctagcaaaattccaacaaaggctccatgagatggctgcacaacttccctcaacatccgtgaaaaataatcaagtgctgaatctgcaaagccat

SEQ ID NO: 184491 - DNA, 252 bp, Glycine max
cctaatgggcatgttttggtgttgtgtacaaacgagcttcattatcgataatgtgttgtgcgttcctactattgctgaaatctacaacactcgagtggtttaatctctctcattgagatccattaattcatggctatatttaagggagacatttacgtctacctttgtaacaagtcaagaaagaccaaagatggaggccagcctaaagctaattcaacatggacctaacgaaccactcaaaggatacatctc

SEQ ID NO: 184492 - DNA, 369 bp, Glycine max
  unsure (1)..(369): unsure at all n locations
ccacgancaacanaactttcggcccttttatatgttgacttgaccaacgctgntattggaatgctgcgacaatctttcaacaccttattcacacattctgataggttggttgtcatgtgaccatatcgtcgtccagatgtatcgtaagccatgctccatttttcctttgaaatgcgatcaatccatcttgctatggctggactcatttgacgaaatttttctaagttttgatcaaacacatgcttgcaaagagtgtacgctgcatcaaatttgttatcatgataagntatacgtatacattcaagctcaagttaattaatggtttaaataaaccttaccaatttcttgacatctctttttgttccgttg

SEQ ID NO: 184493 - DNA, 377 bp, Glycine max
  unsure (1)..(377): unsure at all n locations
tttattcattgctcaatccaactccttgcggcttggatttccaaccctgattactgccttgtgcaaagcccgaggagtcacctcagattctcttaccttcgagtcactcagcctagccattaatttggcctatattaagaagaattgttggaacctggatgaccctcttgtcactnttccaaagacccaaaaatccagggctataaaatctgaggacccatctctctctgctccccctacttctgctcttccttcaccaccagcagctccaattctttcaagtccctccacttggagctcatagcctttcatgtttatgctacagagcctgcaccacggccagctcctgattatgcatagcttgcaagatgtggccc

SEQ ID NO: 184494 - DNA, 274 bp, Glycine max
  unsure (1)..(274): unsure at all n locations
gatggacctnnnnnttttcttctcctttgccttcccctgcatctccatggcgaaaaatcaccattgaaggacctcatggaagctcaaagatccagcctccatagaagctccacaagcaagcttccatcaccacacatatactaaacaactaaactaataaagcaaaattaacaaaaattaaaagagaggggtagataaggcttcacatangcctgaaaagtcgtcaacatcttctcttatccgttgcacgctcgtcacctacctggacagcgag

SEQ ID NO: 184495 - DNA, 168 bp, Glycine max
agactatgatgatggatggctcaaatcctaacagaagcaaacttctcacattcaaatcgagacgtcatacactccatgacatcgtaacgaaaaacaatgatttcaagtcacagaacgtctagagacttttattttcagaacaattacccttcaaaacaaagaaatggg

SEQ ID NO: 184496 - DNA, 313 bp, Glycine max
  unsure (1)..(313): unsure at all n locations
caacacgctgtacgaaaagatctcctgcgctgaatggtcaattgactggaatgtccttccgagtccccactgtggatgtttcagatgtngacctaacggtcaagctagagaagctcaacaacctatgagctcaataaatctgctatcaagtaagttcctgaacctttgtgaaaatctttgcatttggcaaattcaatcatgtttttgtcccgttgacccaacaactctttgtgttcaaattttaaggaagaatcagatggcaaactgaatggtattttggtatacaccgaacatgatgctgtgtctactgatt

SEQ ID NO: 184497 - DNA, 325 bp, Glycine max
  unsure (1)..(325): unsure at all n locations
cactatagaataccactctttatagatgctcctatgcaaataaatagtgagggcatattgctctcaatnggcttgatnttagctacgacatatcttagatggttaagcaacatatacatcttgttaagtcagaaactcttgagttctaccctctgcttaatagttaaacctgcacttgattaccactttgatgacttcaacttctctcttatatgacggctaagcattgagattcttttttagcctatgtcttgaatagttaagtatcacattcagcttctgctatcgatggacaagcttcagggtttcgcctttattaattatt

SEQ ID NO: 184498 - DNA, 405 bp, Glycine max
agctagtatgtttaagggagaccgatcatatgtggttttatgtggccggcgggcgaaggcgcacaacaagtttttccacatccacaaatcgcgcataaacccaccatcccctgcggcccatcatcaactgagctcacgtactgacacgtagcccatatcctcgtttctttcaacaccaggaccccatcaatcctgccaagcttccctagcatccatgtgatacaacattaaaacagtacaaactatcacagtcaagataataaggcacaggcagataactctgcctcaaagagcactcacatcacaattttttctcacttaaagaccccagtaacacttcctctgttccaattcgttaacctggaggatctgacaaagatcttttactggccggctctagtacat

SEQ ID NO: 184499 - DNA, 254 bp, Glycine max
tacccccgaagcaataaaagaagagaatgaaaatttcccatccactgaaaaaggagaaggaaaactttcaatcatagatgaagctaacaaggagagaaggaaaatttccaatccaacgaaaaagagaggaaaggaaattccccatctaagagtgggagaaagcataaagaaaacaaagaaaattcccattcaaagactgcgagaaagaatacaagagagatgtaaatagaagaaagctcctggtcaaagaaacc

SEQ ID NO: 184500 - DNA, 433 bp, Glycine max
  unsure (1)..(433): unsure at all n locations
agctactccctctattttctataaataggttgtanattttatgtgaanaagggttcagccccttaggcacttctctctctttcgaatttgcttggaaaaattgtttctgtgaagaaaattcaagccgaggcgcttccgaaacgtttccgtaacgtttccgtgagaaatttcatgaaggtttcgaccgttcttcaagattcatcgttcgttctttgttttcttcagtcttcaacgggtaagtacctcacaccaagcttttcaattcattctatgtacccatggtggtccacatcttggttcatgtattcctattcccctcttcatttactttgtatacccccttttgacgtgcttaagccatatatttaagtcatttctcgcttaatgtaaaaataaaataaattctcaccgatccgttgaattgtatcatccg

SEQ ID NO: 184501 - DNA, 311 bp, Glycine max
  unsure (1)..(311): unsure at all n locations
actcatttttaagcgcgggnnggagacgaagnaagngnntttatatacgattataatgttccacgtgcattggatttggtacgaccttgccctcttgatttccagctggggaattggcgagtggaggaacgccccgacatttacgcagcgagcataatgtctacctttacggatctaaaagctgtatatttgggcctatgctctagagttgttcttctggttaaggcatggcgtatctctgtttttaaagttataatacaaggatctttcttcatttgttcctacggctctacctagtctcattcctttgc

SEQ ID NO: 184502 - DNA, 444 bp, Glycine max
  unsure (1)..(444): unsure at all n locations
agctatattcaaacagaataattcgaanatgtcataaaattgggcgnngaaaaagcataacaaatatttctgtgattggtttaaagatacaatctttgcatatgagaatgcttcagaaacattaagaaaactagcaaatgggcctaaaagaaatgttataacctggcaaggatacgacataaacaggtattcattttacacaaaagcacaagatgacaaaagtacaatgcagaacagcggggtcaccctaagggctgaatctcaacactttgcaagtgtcaatgacgctaatccctgtgtagcttccatcccttactttgggttcattcatgaaaattgggagcttaattatgtgaacattacagtatgtgttttcaaatgtaaatggagtgacagcaacaccggtgtgcgcaccgatgatataagatttactctggtatatct

SEQ ID NO: 184503 - DNA, 330 bp, Glycine max
  unsure (1)..(330): unsure at all n locations
taatctcaagctgtgataacctcatctcctttctttagtgtttataggnttacgccccggngttacttgttaatatggatgcgtaaatctaaccggcaagtgtaccgagttgtgcaagtaataatataatggtgagaactgagtatcgaactcacggaacttgtttcatttggaaaacatcattctgttagcaggcatgtgtgcacagaattgattatcatgaattataaacaattgtggtttctattctaatcataacagntaatgtgagcaagtgggtgtgagaacaaatatgtaaaagtgttgggtcctcctacttgaatacttgat

SEQ ID NO: 184504 - DNA, 425 bp, Glycine max
  unsure (1)..(425): unsure at all n locations
agcttgaagaacggnataggctattggccatcattatatacagccatcacagctacgagactggttgcagcaaaaaatgctgatgcaaggaagccaccagctataactgctgctacagccacgcagcctgtcaccactgcaagctcaaccactactctactagatatggaagttgcaactggatgagggtactccggtgttttccccacccaagactgcaacaaaataatttcacagttaaaagaacaatgatactatgatcacccacaaaagtatctatctcattcatgcatcttgccaaatgacttaaactctgaatccctgactacgaactatgtataagagcatacttagaataatgaaaacaaaacttaaaacacgcaacactaattgactttcccctcttacactaacactacctaaac

SEQ ID NO: 184505 - DNA, 466 bp, Glycine max
  unsure (1)..(466): unsure at all n locations
gctntgtcctcagatccctcttatnggactttatttatactaaacaactttattgtaacaacatatttaaaaccaaaacttaatccgcatatccctcttgttggactaagtttcaattctgcttcattcaagttcaaaggcaacaatacagttcccaatgctaaagttacctaactatgcacacaaatgggtgatcagaccaagagcatatggaatttaagcatataaagaagcattgaacacaagaaacacaatcaattagatattaaagtaattacatcatttgttcattataaatccacaacaagggtgtttagctagccattacagaanaacccctaataataataatgagattacaaaacctatgtatctctgcaaaaactgctcctcttgttgcctccagagctcttttcccaaaatangcactgtggtgtgctgtggaattctgtgccctgagtattat

SEQ ID NO: 184506 - DNA, 191 bp, Glycine max
acccacgccccaaaccacaaaacggggccccaaatcaacagcggacggaaaaaccgaaaagcaccctgcaccaggcggggacacaaagggaccggagaatgcaaggggaagaacttgggagacaggggggcacgcgcaaccacaagacaacagaccactccggcaagagcaggaaactggagaccaacagc

SEQ ID NO: 184507 - DNA, 434 bp, Glycine max
  unsure (1)..(434): unsure at all n locations
ctcgggccattcctgcgaaggcattcatttggaaagctaattttaccagtgggacactatccttaaagcaaaaatggcatataacctcctcccataaatacaaacatcaatgtaaatntagagcaagcttatgcgcatatttccttacgaacgttctcttgcacaagacattctattaactaagaaaaatgcacccatatacaatcaaggcagcttcgttacctagattatttacacgtatttccaaggtgtatttgttacttacatcacacacatctccttggctaaatttatatacatgcatactcaaagcgatttggggtaccaaaaatagcacatgcgcacatcttggtatttctaatacctatacatacaccaacttcatgatgaatcttgactatcttcacacaaaggtgctacactntatccctttt

SEQ ID NO: 184508 - DNA, 432 bp, Glycine max
cttgacaccttgaaggcaacgactgagaaacacattctactgagcggaagccatgaagcacatgatcgactcttttagaagcacaataattacaaaaaaatggctctagatatcatcttagaatcttaaaaagctatctcaaggggtgagggttgcctttcacttatatactctaacttggatttatttttagccaatgtgggacttacgcttttcccaatagatctcatccatggcttcaatttgcgatttcgatcattcttctttccctccatctcctccacctctttatgctgatctggcttcatcttttcctctaacgactgggattatgttctcacaccatatcgtacaaaatggacaccaagaactatcttctgtggtgtcagcagcgtgaacctgtaatcaacggacattgtctctcccattatc

SEQ ID NO: 184509 - DNA, 387 bp, Glycine max
  unsure (1)..(387): unsure at all n locations
tttaccattgggacactatccttaaagcaaaaatggcatataacctcctcccataaatacaaacatcaatgtaaatttagagcaagcttatgcgcatatttccttacgaacgttctcttgcacaagacattctattaactaagaaaaatgcacccatatacaatcaaggcagcttcgttacctagattatntacacgtatttccaaggtgtatttgttacttacatcacacacatctccttggctaaatgtatatacatgcatactcaaagcattttggggtaccaaaaatagcacatgcgcacatcttggtatttctaatacctatacatacacaaacttcatgatgaatcttgactatcttcaccaaaaggtgctacactctatc

SEQ ID NO: 184510 - DNA, 442 bp, Glycine max
  unsure (1)..(442): unsure at all n locations
tcttgacacatagntatgccctactgagaaatgcattttactgagcggaagccatganacacatgatagactcttgaagaagctcaataattacaaaaaaatggctctagatatcatcttagaatcttaaaaagctatctcaaggggtgagggttgcctttcacttatatactctaacttggatttatttttagccaatgtgggacttatgcttttcccaatagatctcatccatggcttcaatttgcgatttcgatcattcttctttccctccatctcctccacctctttatgctgatctggtttcatctttctctctaacgactgggattatgttctcacaccatatcgtaaaaaatggacaccaagaactatcttctgtggtgtcagcaagttgacccttaatctaaggacaatgtctccatcattatcttgtgaatct

SEQ ID NO: 184511 - DNA, 411 bp, Glycine max
agttagtggaacttggtagtttaccaagaattggaagtagtcttggtgcttgagatggactagtataatttcctatgtctcatcttgtttattttctcttttgtgctttaaactgacccagggttcgaatttgattttttcatttgaaaatctctaattattttacatgatctaaaactattatccaaatcattttgcaaaaatctaataattgttttcttacatattcaccaccagacaataatgttgttttagaaagaggttctatttttaaaaatctaaattcaaccccccttctcgttgatattgcctctatagtttggtaacaaaactcaatggtttatgcttgagcacctgacaatgtctagagaaaaagaatctaatggtagataataacaacaacggtctatt

SEQ ID NO: 184512 - DNA, 422 bp, Glycine max
  unsure (1)..(422): unsure at all n locations
atataatgcatccatattcttaaagggcacacacttanaagtgagtgccgcttatcgctatacatgctgcaacgaattaagcttagcgggcgtacaccgcacttatccagtgaacacgatgggcttagcgagcgggctctcgcttagctcaatccagatcaaattgaattgggcttagctcacccatggccgacttagcgagccaatcagcttgagatacaggggtttgagtgcttagcgcaggctatcctcacttagcgcatggagaagacgcgctcagtgaggtggtatgcgcatagcgagtggactggtttcatgaaaatggttttaagtgattttcagtccacttcctcaaaacatgtagaaacaacccccaatatctatgacttaatataagcctatattccctttttcaatgatca

SEQ ID NO: 184513 - DNA, 444 bp, Glycine max
agctgatggttttgtatctaccacatgctcgttatcttatgactatggcgtcatttgtggcgctcaactgctgggagttggaggccatcttctcaattaaatttctggcttcaacatgggtcatgtctccaaaggctccaccactggcagcatctatcatacttttctccatattactgagcccttcataaaaatattggagaagaagctgttctgaaatctgatggtgggggcaactgatacatagtttcttaaatctctcccagtactcatacaggctctgtccactgaggtgtctaatacctgagatatccttcctgatggctgtggtcctggaagcaaggaattcttcttctaagaatactctcttaaagtcatcccacctcgtgatggaccttggagcaagagaatacaaccagtcctttgccactccctctaatgaat

SEQ ID NO: 184514 - DNA, 287 bp, Glycine max
  unsure (1)..(287): unsure at all n locations
gtatgaaagaacatgtgtaantggtttatctctgatgaatgagagtcttgcgagacacagctcagagctcaaacttctgtccctttttcttccttcaatttcgtgctcccccctctctctttctctccctctttctttgcctccattgaagcatccttccaagcttcttatccaacgctcatcttgagggtgaagctctgttatgcatgggctgatcctgaatggaaggcgcctactctcacctcttctcctttgtcgtccgctgcatctccatggtgaaaaatcac

SEQ ID NO: 184515 - DNA, 216 bp, Glycine max
tggagagcatggtgtggtattgtcagtgacatccttggccagagtggcgtttgattgggatgacactaatcacataatcacaattgacaatgaagatgcttggttgaatattgcaattatggaatatatttctatttgctattcagtcgcataaatcggctaaactatttccgctcaagggtgcctcaaaactgcgatgatatagtggatttgtgt

SEQ ID NO: 184516 - DNA, 331 bp, Glycine max
  unsure (1)..(331): unsure at all n locations
aatcaagtcttgttttagcccaattcagtgctcaaagatagcgttttctttatcatcttatcatactatatagaatggtgttttctatatactttattggctcagctgatgagatatactnttgtaatgaagtactgagcaacttctttcgttcattaatttctgtatagatgtccagaaatgcttcttaaccactcctttttttttttctgtagagatatgttaaacggcgaaaagtggaatgatggactactatctacacatagagagcgggtattgggtattggattatcacattctcatttcaattggtgttctgatatctgaccct

SEQ ID NO: 184517 - DNA, 359 bp, Glycine max
aatatggcgtgtgagtgcacttcggagaggtcctgagtctttgagactcggaagaacttgtatccttacgtctatctctacaaaaatttcttaacgactctaagagacgtacattcagtcatcactccatcatatgatcttacgttgcatatactgtactgggtattaatcgcagatgctcacatacgttatgctaatgcaacccgatatgcataatatgcaccaatatgaaaatatgcaataatgtatattcttctccttttggcattaacaaggccaaaaatgttgtatatacacataacataacacatacgtagaagagacataaaaccataagtcattaatcatagaacattaca

SEQ ID NO: 184518 - DNA, 363 bp, Glycine max
  unsure (1)..(363): unsure at all n locations
ctgaatgaggctgaagaagntgtgcgcatgtncactttatccggcggtttataatnnatctcagcctcatttgtcacaagatagtgacatggagttgatggtaaatatttgtcacaccaaagtacgtttatctcaacctaatttgttgcagcactccatttttatatattacaattattcatgtttggcatttgcatgtatgtccctgcaactattgttccaccaatagcaaggaataagctaaccattacaagagccaaacaaaggaaggttgctgaaaagatgatgagaaaactgaagaagcattttttgttgattttgaacgttgctgaatgttgctgaacacccattttatgttgcatt

SEQ ID NO: 184519 - DNA, 446 bp, Glycine max
taagctctatattatctgaacgcatttatttttttacacaagtggagttttattcacaaaattagagtttatctctcttatcttagtgagagtgattctcctaaattcttgagtgattcaagaacaccctgtctgtatcaaaggactttcacaacctttgtgtgttgccctcgctggaaagagtgattctttccttcctatcatctccacccttgttctttcaaaccacaattccagagaatccacctctgcccaaaattatctcgtgaccataactcccatttcacacactcaaattaagtgattcttgagcctaaattgaatgtcaaaacgagacctttcacctcgttttggaatcacctcatttggagccctgtagcttccgttattgtcatttctatatttctgtccagccaccacttaacctacgtttaccatcccattat

SEQ ID NO: 184520 - DNA, 188 bp, Glycine max
gacactatgaatacattcttgaccaaatcctgactacaataccttgactatttgagaatgtcaatccttaccctcggaagcaaaataagaatagaagggaaatttccaatcatagaaaaagagaaggaaaattttcaatgaaagcacaaaaagaaaagaatgaatatttcccaatcaaagagtgggag

SEQ ID NO: 184521 - DNA, 340 bp, Glycine max
actgcgagagaacaattagctgcgagttgtaatctttgcatgaatctctgaatcctacgatgaaatgtattgacgagaacatgatgaaggccatgattatacatacacaagcctcttgaccaaaaagcttaccttatatttcaattctatcatttgcacactttttgagctgaacgagtttgtcaataaattgaaccctgaacctaaatgattctctccagataccttgtgtagattctacgagagcatatatgtcaaggataatctaccctacatttgggggagtggaactaattgggatgcaaagaaagagagatagcatcaactcacacaacaaata

SEQ ID NO: 184522 - DNA, 94 bp, Glycine max
tcactacttgtcttaagagaaaaaccatgatattaccatatccttaaagaattttggagctatggaattgctttgggaataagtgcggcgggtt

SEQ ID NO: 184523 - DNA, 255 bp, Glycine max
tgcaagctaggcgctgcaaatgacagtcagatattggctggatgtgtcgccactgtgcattaacaggggcagtttggttgttgtctgccgccgcaaaaagacctgcttgagatcactatatggctgttgtttgtgacagacaagtcattgaagcttctacagtgtccaaaaaagtcattgggaaagcttatacagcttaaacagtgcgctccaacgagaccaattgtcttatacctcgtccaaattttatctttt

SEQ ID NO: 184524 - DNA, 285 bp, Glycine max
  unsure (1)..(285): unsure at all n locations
cgttgaaatcgtcatgcttgcatgagttagacataccattctgttttagggttttgtgatgagtttatatgctgtatattgcctatttaaactgcnagagaagaagggtagagttaacctacggttagaaagtgagaatgtgatgttatgagtggaaaaagagtgagactctgagagttggaaggctaattctgaattctgtggcaaatggaggttagagtgagttaatactagcttgaaatttctttataacatgtgagaaaggttatgcttatatatagagaa

SEQ ID NO: 184525 - DNA, 326 bp, Glycine max
  unsure (1)..(326): unsure at all n locations
agcttgccgctgttaaagatcttctcanatcatcttcaagtggattccaggaactaggtcgactggtgcgaaatgtggcatgctccttggccttgtccttatcattattaacatcaatcactttcttatccacgatgttcacctcatgttctacctccccttcctaatcatcttcttctttgtcctcgtcctgattgtgttgggaggaaagatccgggttcgtgcataggcactactagcttcatataacatggacctatttgacaccttcgcgatggtggaatcctcgtcatccatatcgggactttaaggttatctgttgtttg

SEQ ID NO: 184526 - DNA, 242 bp, Glycine max
  unsure (1)..(242): unsure at all n locations
gtcctttcaagtaacgaagaattctttntgcggcttttagatgaggagaggtaggagcctccataaagcgacacataactcccaccgcatatagaatatcgggccttgtattggttagataccttaaactccccacaagactcttgaagatcgtggagtctaccttctctccttcatcaaactttgataacttcaagccaccttccataggtggtgtcacgggattgcaatcaagcatatta

SEQ ID NO: 184527 - DNA, 405 bp, Glycine max
  unsure (1)..(405): unsure at all n locations
agctagtattctattggagagctatnttcttattcttgggcagagggctcttgatccagttaatgttatcatttatgttgatccttaataaatttaccagttaactaattaataagccatattttgggctggattggattctaatatacaaaataaatagcattccattggttatttgtgtttgatacagttcagtttggttgataacccttcttttgaaactggatctgtacaaacagttgaaaaggttgagaacttaaaaaattgccctcattctacataacaatattntggctagtttagccattaatattagtctttgtgtgcatatatttatatattattaattaatgctaccctaccctgttgaaatgccaaagtcaatctgattgactgatgagtact

SEQ ID NO: 184528 - DNA, 430 bp, Glycine max
acactatgaattcattctcttgttatgtccttcagaatgctaaatcgtatcttatttagagatcgtggtatggtattgtgagtgacatccttggccagagtgggtttgattgggatggcactaagcacatgatcatagttgagaatgaaaatacttggaatgaatattgcactgtaagtattctctaatatattgctatttgttattcaaagcagattgaatttgacttcttttttttttcagtcgcataaatcagctaaatagatttgaatttcatttgaattaaattactttatccaaacaaggaaattaaaatacaagaaattgaattacttcacccgaacaaaatatttacaaaatgaaaggaatttatataacgcaattaaaatgttgtgtatttgaatttcttagacattttaaatccttatct

SEQ ID NO: 184529 - DNA, 243 bp, Glycine max
tatcttggtacctagaaagcacatgcaaatggcaagactttgtattacatgaattttaaacaaagaaggaagaagcatgcataataaaagccagtgacatacatacccggtgatataactgcgtgggagaagaagccatcaagcttcttcaattcccaggtagagctaagggtgtacattgtcagtgccatgcttgctatatgtgttaatgcttcctctgcataacagggatacaatatcagt

SEQ ID NO: 184530 - DNA, 313 bp, Glycine max
catccttaatatgttttagttgtcttaaaatcaactacttcatcaattaagagcacactgtataagaaaaaaatttaattaaaagtcactatatttacacattgtttcaatgtgttgttttcttttgatacacctaaaaaatatttacacacatgctatcacatctttacctactcattctggtcatgtttgataagtatatagttctctttacttgcttcttaaacaacattttagatgttatctcgaagagttttttttaacataagtaagactatgagttatattattattatttcttcttcttcttctt

SEQ ID NO: 184531 - DNA, 410 bp, Glycine max
  unsure (1)..(410): unsure at all n locations
agctagtggactataccgtcgattttacatatccgtgggnctgncncggcgcggatataaagcgggttgcagcaccggctccgcttccctaatcgtactggaggcgattgtcagggcttcttcctctatgggtttctggagctttaacatgacctctcagatggaagccatttgatctttcaaggccgatagatcggccttcatctgttcctcccaccctcttcattatccatttttctggatcgagtgttatatgggagccttggtgttttcttagttatgatgaaattcctaaagaaataaacaacggtgagtatgccaccaaacatgaatatgcaaatggatgatcggagcagttggatccaccccacagtttttaagaacatgatgagtgagaacttcttatttat

SEQ ID NO: 184532 - DNA, 411 bp, Glycine max
  unsure (1)..(411): unsure at all n locations
tcanaccacagaacacagaactatgcgttctctaacctcttaattcaagggggtttctaggtttgaaaagtgaaatttataatgaggtaaatttgaagcaaactctcacctcacacaagtccataacatcaatctaaacttgcccaaactggatttacacctaaagttccaccaaatcaaaatttgactcctcaacacccaattttgccctaaaaatggctcttggttcactttggtcatttgtgtttctctctagctcagcctaacctttctcacatgtcctaaatgacatttcaagctattattaactcactttaacctccatttaccacagaattcagacttagccctccaactctcaaagactactcttttccactcatacatcacattctcactttctaccttggg

SEQ ID NO: 184533 - DNA, 206 bp, Glycine max
  unsure (1)..(206): unsure at all n locations
ctttgatagcccttttgagccttggtttccttttcttgtnttgaagctcactacaagccttaagtgaaaaaccatgatattaccatatccttaagggaatttggagctttggaattgttttgggaataagtgtgggggggttttcgtctcttncacaacctgccttgtcgactatgcctcatgacaggttttgtgacttactttat

SEQ ID NO: 184534 - DNA, 472 bp, Glycine max
  unsure (1)..(472): unsure at all n locations
tagagcaccgcggctgcaagctgagatgaacagacgagatcatcataattcatctctgctgagaagaacttgcttttccgagggtgaccagatcctatagtctttcaccccatcaccataacccatgaacaaaccctttcttgatctaggtaccatctttccttcattgacatgataataagcattgtagccaaatactcttaggtttgagtagnttgctgttttgccattccagatttcaataggagttttaagtcctatagcagtagagggtattctattgatcagaaaacaagttatattgatagcttctccccaaaaacttctgttgagaccaacattaaacaatacacatcttgttctttccaagagtgttctgttcattcgttcagcaactccattntgctgaggagatgtccaaacagtaagctatctagcaatcccttcatctctgcagaatatgtttaattct

SEQ ID NO: 184535 - DNA, 369 bp, Glycine max
  unsure (1)..(369): unsure at all n locations
ctcaagctntgacgatgcgagacacactaacgatcgactgacagatacaattctatatatgttgggtgaacaacagaacacaaggatactatataatgtgcatgaaccataccctaactttctgtcatccctcgaacattaatgggacccaatatctagtatattaagatatcatatagggacactatatacaaccacttagtttttctaacgatcggtttcaaacgcaatagattcgcggtcattcaatgctttaagctatagagaagagatcaagacaagaaatacataggatatgcactacatattaacggcaggcgaaatgaattatgcttccaagataaattatgacggatctcaagtataaat

SEQ ID NO: 184536 - DNA, 472 bp, Glycine max
  unsure (1)..(472): unsure at all n locations
cgacccgcggcatgcaagctatatgggatgatctgaggcagctgagtgcctctaatcctactggattgaggcgcgcgcttgttgacttcaatagcattataagctctaaggaaagaatcagcttatctcaaagaagggccgatccatatgatatttcagcttttaatcagcggatttctgatatggagcttcaggaaattaaatgtgctgggaacagttttacatggatcacgcctaatggttgtgtgaatagcacgcttgataaatactctcatctcaaatatgggcgattttaatcatgatagttgggggtggaacctcaggttgaggaggaacttatttgatcatgaaagtgatttagctatgcaatttatggaggaaatctgttctattcctatacagaggcatattaaagactctatgatgtggttggctgacacccatggtcaatacactactaaatancctacag

SEQ ID NO: 184537 - DNA, 280 bp, Glycine max
ccgagcagctactaagcgcggcactcataggctaagtgcgatgataaattcataagatgatgagctttatacgttcactatgcgcaccacttcatcttactaacgcaccgctcagttcatccgctaagcaataaatgcttgctagtccaaaaatactaaccgtgcgctaagcggagcataaatgcgcttatcacacgagcatgaccaatgtcacctatttaagcctaaaataatattctgtgaaggagtttggatgtgattcacagctttccatgtctag

SEQ ID NO: 184538 - DNA, 430 bp, Glycine max
  unsure (1)..(430): unsure at all n locations
agcttattcaggatatgggatgtcactctgtaattgttgcgaatggaagccngaatggagataacatccttttgacaatgaggtgcaagcggcaaccagtttcttggatgatatctcgcgcggtcatatagatcgctggacatcagactgttgggtttggaaaccagaacctattggctagttttctacaaggagtgcatactgtatgctactagaaggagcagcatatcacactatggatgacgctatagaggacctatggcagctcaaaatccctttaaaaccaacaacatttgcttggtgattgatcaaagatagaatctccactaaagggaatctgtggagaagacagctggagataggctctgcccagccctacaactattggtttagatagttatcaacatcatttcttgattatggtagcagt

SEQ ID NO: 184539 - DNA, 481 bp, Glycine max
  unsure (1)..(481): unsure at all n locations
tcaagaagatcttgaagaagttttggcttttacatgcccgactcacttgagtggcatttggattgaatattgtaatgtgtgttgcgtcttaatttcaataatttcatatgtgcctcatgcatcatcatgtaggattaagaaggaaagtttctaaagttagaaaatttctttagtaggtcaaacctctttgtttaatcaattacaggctgatcataatccaatacagggtcatagtaatcgattacaccaattcttttgagacaatgattgattctttcaagagtctctacttatatagattactaggcgatataatcgataacttatttcttaaaagtggttcacaagtgatcaataacactttaatcagttacatggttcttgagagttttctagtttctgggaagaacancttaattgattgaaatagtaatataatcgattacttcttcaaaataatcaattacattgtatacttaat

SEQ ID NO: 184540 - DNA, 395 bp, Glycine max
  unsure (1)..(395): unsure at all n locations
cgccttgggggctgagaaaaactatatgacagcacctcggtcttagttanggagccccctctctccctcgcgggagactctctctctctctcctctctctcttctatatttcggttttaggattaggctctctcctctttctctgttatatgcggttttttcaattccggtcagacttttagtttatcaataaatttcattctctatctgttaatggacggctaatccgagcgttgtttcccttgaggacaagcacaggtctctctgagggctattattactggtaattctggtagatttcctcttcctaatactctgatttgtgctttattatgcatgctagggtggatatggcttgccgtattacgtcagcttatgacggtatgagaattggg

SEQ ID NO: 184541 - DNA, 315 bp, Glycine max
  unsure (1)..(315): unsure at all n locations
agcttgaaatttaacaacggaagccctcgagtaattctaatggncataactcggcacacggaagttctattctagcgcatactatatcgagacgctcgaaattgatcaacgaatgctctcgagatattcatatggccataacttgtcacacggatgtctgattcaggcgcataatatatcgagacgctcgaaatctaacaacggatgctctcgagaaattcaaatgggcataacttgtcacacggaagtccgattcaggcgcataatatatcgagacgctcgaaattgaacaacgaatgctcgcgagagatttaa

SEQ ID NO: 184542 - DNA, 444 bp, Glycine max
tctcgatatattatgcgcctgaatcagacttccgtttcataagttatgaccatatgaatttctccactgtattccgtgtgacaagttatgaccatttgaatatctcgatagctatcgttgcgcaatttcaagcatctcgatttattatgcgcctgaatcggacttccgtgtgacaagatatgaccatttggatttgtcgtgagcattcgctgtttgattccgagcgtctcaatatattatgcgcctgaatgagacatctgtgtgacaggctatggccatatgaatgtacttagagccttcggtgtcaatttcgagcggctgatatagtttgcgcgtgatcggacttccgtgtgaaagatatgaccattaaattcttggggcttcactagtcattttagctctcattaatatgccttgatgaactccgtttcaagtttgactttc

SEQ ID NO: 184543 - DNA, 306 bp, Glycine max
  unsure (1)..(306): unsure at all n locations
agctacaacattcaatgaggagcgacntgatanatttcgatnctcaaccagacatccgagtgaatagttattgtctgttgaatttgctcagagcttcgacattcaagtccgagcgtatcgatatattacggtactcaaccagacatctgagtaaaaagttattgtcgtttgaatttgctcagagctttggtattccatttcgagcgtcgagacatattacgggactcatatctacattcgaggaaaaagtaagggtcgccgaaaatactcatacgttaaaattgaactccgagcgttttgatatat

SEQ ID NO: 184544 - DNA, 263 bp, Glycine max
  unsure (1)..(263): unsure at all n locations
gagcaacttcaaacaacaataacgtgtgactcggatgtctgantganacccgcaatatatacagacgctcgaaattgaataccggagctcttagcaaattcaaacgacaagtactgtttactcggaagtcagagtgagtctcgcaatatatcgagcggctcataatggaataccgaaggtctgtgcaaattcaaaccgcaattacttattactcggatgggtgatgtaatcccgtaaatattcagacgctccgaatcgaagac

SEQ ID NO: 184545 - DNA, 469 bp, Glycine max
  unsure (1)..(469): unsure at all n locations
gagacacctgcggcatgcaagctactncctatattgctatagaaggttttatattgaagaaganaagggttcagccgctnatgttcttctctctctctcgaaatagctgaggaaaattatctccatgtagataatccaagccgaggcgcttccgtaacatttccgtatcatttccgtgagtaattacgcgaagattctcgtccgttcttcaagattcatcgttcattcttcattttcttcaatcttcaacgggtaagtacctcaaaccaagctcttcaattcattctatgtacccgtggtgcgccacattttgtctcatgtattttttctcttgatctcatttactttctatacccccttctgacgtgcttaagccatttatttaagtcatttctcgcttaatctaagaataaaataaatttccaccgatcgtttgaattgtatcttgcgttaatttcgataaaatgga

SEQ ID NO: 184546 - DNA, 404 bp, Glycine max
tctgcatgtttcgagatttctagagagagaaaggttcaatttccagagagttttgagagctcttgctgtgcgaagactggcagagaagtgagcttgaagaggaagccatcctaagagcatgagatgagtctatgagtgattgtgaggttctagaggtggaggagacatccccactacttgtatttcttcaatccttcatttttctcttctctttgttgtaaaggaagcttcccagatatggagagcgtaatcctctattggttcttccttgtacgtacttgatgtaaatacctctttatgtatttattgatgttatgtgtgttctctgtgctatcaatacgtcattttagtatgctgttgcttcgatcacgtagatgcatgctttgttacgatcatttaacaat

SEQ ID NO: 184547 - DNA, 426 bp, Glycine max
  unsure (1)..(426): unsure at all n locations
agcttacatttgacagaatggtggctntgctatatcacacatgaacttgaaccagggacattatcctttgttcccaagatcctcccaattggaccattgttgagaagacatgatgataatacaaaatcaatgggacaattttgggaagaagatctctctcgcatgagttggctagatcaacaacctcctggttttgttgcctttggtagtttcactctttttgaccaaaaccaattcaatgcttggattggacctcaccaataggcattttctttgggttgtgcgtgaagagaataagttacaataccctaatgaatttttggggactaaaggtaacattgttggttgggctcctcaacaaaaggtgctaagtcaccctgccatagcatgttttgccacccattgtggttggaattctatcatgga

SEQ ID NO: 184548 - DNA, 405 bp, Glycine max
  unsure (1)..(405): unsure at all n locations
tattacgtgacactataaaactcaactattgttggtcctatgacactgatgtggcatccttggatacatntctcttagtggacaatgttcgtcctatataagaaataataaaacaattctgtgatattcttgcattgtatatccccctgctgctgtgtacagagatccatattccattcagttgttttaatttttgcccctctataaataagaattgcatcatcagttgtctaatatactaaatatggagaataaatctctctatatttgccatttattttatagaaaacattatcatctcagaggggagtgattggaaggaatggtctaccaaattnctttaaagcctgatacttttttgttctttattgttgcctttcttactggacaaaacttctagaattc

SEQ ID NO: 184549 - DNA, 317 bp, Glycine max
tgaaaaaacatctatatgccaatatctctttcacccaatgcatgtagacgagacgttatacacccttaaatacacaaagaggtggactatgctgcaatgtgcggaaggaaattctactcagatataattgttaaataggactaagttctcaaccatgagggacataacaagcacaaatgaaaacagagacttgaccagagctgataagatgtgacattaaaactaacaaaatgcggtctaatttgttgcccctactcataactgcatgaaccaactccttgagagtagctccaaccaccactccccagggatacata

SEQ ID NO: 184550 - DNA, 474 bp, Glycine max
  unsure (1)..(474): unsure at all n locations
taagcacccgcagctgcagctggactaaggagaaacttagaagtgtcnttagtagagtaaanaaaactataagaaaagaatcaacaaacctctagctntggccctagtttttcacactaattttcaattgaaatttaggaactaagattggtataaaataggaaccaattatagaataaattttgagccaaaacaacaagcacacttccctttcactttttttttcctggatactgatttttctgccaacttgtgtgatttttagtattttttccttttatccaaatcacttggttctttttttataacttttttccagatgtctagaaaattcggtaaaaaaattcatctcaaaattcgcagtgaccaattctcagtaatttttacaagttcgtatgtccaagctgccaacaccagcgatttcagacttcgaattnnttttagcatggaatattgattgccttgggcttactt

SEQ ID NO: 184551 - DNA, 175 bp, Glycine max
agggcctcactgttgctgttctggggttgtgctggtgtggattggtggatgaatgtattgtctgcttgggccaacgacattttcggaagaaggaacacgctgttgtagtttttcttgaggcttgaccatctgaggttaggtgatttctccatccgggtttgttctgttgctggaa

SEQ ID NO: 184552 - DNA, 452 bp, Glycine max
  unsure (1)..(452): unsure at all n locations
ctgcagcttgatggtgcgagaagagacacangtttgtatcatcaaaaggcgggagaatgtgaatgtatgtatataagattntgatgatgccaaagaagaatcatacaaggctgcttcaaaggataagcatttgcttcaagattaatacaagattgtttcaacaaacaaagccttgattcaagatttcttcaagatcaagccttgcctcaaaacaaagtgctttcaagacattcaaggctctggtaattgattaccaggcagtgtaatcgattaccacaagacagggttgacaaatagctgttgaaaagggttttgaatttgaattttcaacatataatcaattaccatatgtctgtaatcgattaccagcaacgaaacttctgaaattcaaattcaaaagtcatgacccttcaaattataactgtgtaatcaattacacaaacattgtaatc

SEQ ID NO: 184553 - DNA, 471 bp, Glycine max
  unsure (1)..(471): unsure at all n locations
atacctaagctctctgctgaatggtactcatattntcttataaggaagcctatggacccanagatcaccaaggaaattgagaagaatgcaactttgctttcacacaatctctcactgcataatgccacataaagtaatcacgacaagttaaaaattcatgactaggataaggggaccaataatctgcaacttagtgctaccacgcgaatgaataaaaggacattggttcatgatgtcaaatcatatgaaacatttagattttgatcaatgtaacttcctgtcctactatagaaaacattcttgtcgagtatgtcatgattgaaaatcagacatcatggcacttgaactcaagggtctcatactcttttctttttaattaatcagcaaaaaattatctttactatacagaacgacaagtagtacatcagtccatacgatgatgaaataagaacacattttgattctattaaa

SEQ ID NO: 184554 - DNA, 361 bp, Glycine max
ctgatactcaagatcgagggggctgtagttatttgggtggatacttaacttttggtgaatactaacaatcctattttccattttccatgaattttcgtgcttatttttggataagttcttatgtcttttcatatattctggtcatatttagtgtgtgtgacttccttcctaaccattatgagactagtggaacctaacgagccattgtattgttatgagaataaatgtagtgggccatgatgtttattgggattgtagtgaaatttactcttttgtttaaggcggtacatacctataaatgacctctgtaattcaaaaaaactgcaataatcaatgactttatctttggagacttcttctg

SEQ ID NO: 184555 - DNA, 482 bp, Glycine max
  unsure (1)..(482): unsure at all n locations
ttacagtgttacaaatctctatgtatgttgctaagtgtgcataanggtcctcatttggtaatccatgaaataagctcccctgtatcagatgaatcaaagaatgagggtagtttatattatatgcttggacttctggcctcacaatacttgtaaagaattgcggcactgaactactagaataatcctcaagggtaatcctgtgttgatgttctttagccatgacaaaggcttccggtagatctgtagcggattcccttaatgacggtgaatcagatgatgtatagtcagaagattgagcttcttcttctagaatggaagctactatcctatcttgcaacaatttccttatgctttaagcactgttccttcttaaagtagcttcaatttccaagttcagaggaactaatatacctgtaggagatctatgcatacgaaatactgatagaacaacagttatccattctgaagagacaatatgacaa

SEQ ID NO: 184556 - DNA, 226 bp, Glycine max
ctggaagtctcacccatctacactttctcatttcaagcttgtacgattatggggaacccatcacatgtggtactaggatgctggcgggcgatggtgcaccccaagtttgtcacaatcacaatgcgcacataaacccaccttccactgatgtccacctcctactgagctcaagtactcacacgtagccgataactcttattatctcaacaccgggtccccttaaatt

SEQ ID NO: 184557 - DNA, 382 bp, Glycine max
  unsure (1)..(382): unsure at all n locations
aagcttcctggaggaagagaatgagagagagagagtgnatnattatattgtggcncacaaattgaaggagaataaggagagaagttgaactttgaagtgtgtctcataagtttctcattcaacaaagttgggacaagggttacacatgtgtctatttatagcctacgtcactaacgttgtgaatttcattttcatttcatgtgaacctacaagggatattccaagaatatgccaaaggcattttagtatattccctttagatgtcacaagcatggaagttgtggctctatcacataggaagctctcttgagaagcacgaagggagcttccttgtgaagcaaggaagaaagctttcttgtaaagctagagggggcgaagtgca

SEQ ID NO: 184558 - DNA, 118 bp, Glycine max
gacccatatgcggtagcacaagcaaattgcggtcaaatggatgggaagcctccatttgacatcctacagaattatttgctcgttactaatcgatatcacctttggaaatatatccaaa

SEQ ID NO: 184559 - DNA, 298 bp, Glycine max
tctctatataccatccctaaggcaagtctttaatttaacacattacactgccctagagtggtatcccgtgacatatctgacttaagttcttaatcttcacaggttcacacataaaaatatcctcaaggttcacccaagtgcaatgcgtgtcaaatcctccaataccaagccacacaatgggaggaagaactgagctcaaatggttgcacgaacaagcagggcagggaactatgactacagacatcgtactgtgtgctcgcgttcatgtcggggaacagcacctgcactcaaaattgat

SEQ ID NO: 184560 - DNA, 327 bp, Glycine max
tggcacattactcctgccgacagcgagccatcattgatctctgctctagcgtaaacaagaagaggtgtgcacatcatagtacaaagaactacccaatgatagtgaattacgatttcaacggtgtgtttatattaatgagaataaatagaacgagattaagtttgttgctataatacaagagtaaattaatgttgttcgaatgaatagaaattagtgtgaataattgggaaataattgaattaaaggtatttaataagtaaaactgtttgattaatataactaagaggctactcacaatcgttacaaacatatataactcatttgcag

SEQ ID NO: 184561 - DNA, 393 bp, Glycine max
  unsure (1)..(393): unsure at all n locations
agaggtaatcggcgntgttcgatgtcatagctccaactgggcatatcttggtatgaccagccaaagatgtctcggtagttttttagtagggccatcaattcttcacggatgggtgcggtcatacccgcacatatctttactattctttttcccaccgcctgttcctaagtctactagttctctgtctcttcttgatgagaccccatctctcgatcctcctgagcgactatcttctccaactctgggggaagtcccacatcctcatcctcttcgctctccgtctgacccgcttcttgcttgaaatcgatttccgggtcccgggtattagtatctttgagggactcgtcgtcggatctggcattntaagcgtaaagaaataacatgcaaatgaat

SEQ ID NO: 184562 - DNA, 484 bp, Glycine max
  unsure (1)..(484): unsure at all n locations
tagaattatggtgtacccatcacatgtggtactatgtggtggtcgggcgatggtgcacatcaagctttccacatccacaatgcgcgcataaacccaccatcccctgttgcccacctccaactgagctcacgtactcccacatagcccatatcctcgtttctctcagtaccgggtccacatcaatcctctcaagcttgcacaacatccaaactaaacaacattcaaacagcacaagctatcacagccaagcataacagagcaaaggcagaatactctgctcaacacatcaaccaaaatcacagcttttctcacttaaagaccccagtaacaaatccttcgatccagttcgtaaccgttggatcgactccaaaatgctaatggaagtctatagtgcataagcctacattgtgaccggtgggatcgactagncaacatccaagactcattctgtactactctttcacaggcaaccacacacaagcat

SEQ ID NO: 184563 - DNA, 455 bp, Glycine max
agctagtgctattccaagttcattaatcattccttttagccagatggcttccttcactgcgtcagctagggccatgtactctacttcagttgttgaaagagcaacaactgattgtgtatttgctttccaactgattgttgtaccaaacaaagtaaacactgtagaagcaagcttcatgatgttgaatcatgattgattcaagttgttttgatgataacaaagatgatgacaaaaaagcccaagagaatgatttcaagattgagtcaagaacaattcaagaatcaagagaaagattcatcaagaagattcaagattctagattcaagaataatcaagatcaagattcaagactcaaagattcaagaatcaagagaagactcattcaagataatgtttaagaagtttttcataacatttgagtgcacaagacgttttttgcaaaatcattaccaaag

SEQ ID NO: 184564 - DNA, 396 bp, Glycine max
  unsure (1)..(396): unsure at all n locations
ntagccttaagttgctccatgttgcttatgtttctcatattgctccccctatctctaacaatagcttggacaagtatgagggttgttagtttgccaagccccccaacctagacaagtgttgtctattgtcaagggtagtaaccttgacaggtgcaagagtagcatgtctgtcaagcttgtcacgccctccaacctaaacaagtgttattcgagctatttttgttaagttgtccatggtgcatgcactcttcattttgcagacatgtcatgtgagtagaatctctatatttgacaattctacccttttttgatcattggagattgaagatacgtatttatctttgctcttgctgcagctaattgtatcgcacacacactacttctgcatatttgtca

SEQ ID NO: 184565 - DNA, 461 bp, Glycine max
  unsure (1)..(461): unsure at all n locations
agcttccatcagtttcttagtccaatagcgcttattgtggctggcccttngcttcttgactcaaattcttcaagggatggcaccaatcctcctttccaattccctatacggcaactcacaaacaaggaaacaaagagacaagcaataaccaaagaccaaaaaaatgaaatgaaagctaaaccaataaagttttaacaagaaaaattttcaaggattattcaacaattaaagcaatgaaaagcacacaaaagcaagctaggactcaaagagaaacctagaatggctctagagtagagtagaaaaactaaaaaaatgactcaagaaacctctagttttggtacttgttttcacaataattttcaattgaaatttcagaacttagattggtataaaataggcaccaattatagaacaaatttcgagccaaaacaacaagcacacttccctttcactttttttct

SEQ ID NO: 184566 - DNA, 464 bp, Glycine max
atgcaagctattccttgagcttgaagctgtgagccttggtgtagttcaccatgttgctcattgtgcgtggtcttcaagtgtaccggatcgcacaagtagtataaaacaggaagaactgagtatcgaactcttggggaacttgtgttatcaggtaagctatttccgtaaataggtgtctggtatgaaaatatgattatggttatgaacagttatgtaaactatctatgcaaaaggaaagaaaatcacgcaagagaaatgttgtgtaaaaacaagtatctatgttaaaatggatgttctctatctaacaatgcccatgtattcctatgttgtctcctgtactgctagaccccgattcctcatgatagactagcttaatctagatcaagcctcgtccgcagattcctcttggtagactaaactcaaccaggaccgcattaagacacgcatacacaactaagttcttg

SEQ ID NO: 184567 - DNA, 406 bp, Glycine max
gcgaccggcatactgggcagtccacgggctactccgatataccagccgatcatgtgtatggccaggcaacggattatcatgtcactagcatatactaatagcatggaagaataaaaagcatttaatctattacactcaaacaaacatggcttggatgtgccgtatacttcgaatttgaaattgatagtccatccaataaattgctaaattattgtatatatgcatctcaagcctgaattgaaatgaagggacaaccttctggaaacatgcttattttactgagcatagccatatgatcacttacatttacgaccgctgtcccaaagaaactccatatctacgtctctatagacgcgccaaaatcttctattgctttattcttcccagttcactcacacatggactc

SEQ ID NO: 184568 - DNA, 282 bp, Glycine max
  unsure (1)..(282): unsure at all n locations
gagaagaacctacgaaaaatattagtggcgctcatacatttaaagaagagtgaagaactgaggaattatggctaanataccagtggtgatgaatctgagaaggagcattcatcttgagcggcctaagaactaattgatcttggtaactaatttagtagcatatgtacatattatttgcactccgaataagaaattagtttttttattgagattaagaagagagtactttaaatcttagacctaatattgtccttacattaaaaagataaaatctccatcatt

SEQ ID NO: 184569 - DNA, 340 bp, Glycine max
tcctcatcttaaatgcctctcgaacccaataaccaaactgaaccgatgtgtctgctcagcaatgtgctcaaaactaaacagtggcccgtgatttaaaactgcaaaagataaacggttagattgcacgcgtatactctgtctggctggctggacatgtctaataaatacttattgaatacatgattaaaactgcacgaaggccatactgatacaatcgcacttgcaataatagatttgacttaataaagaacccgaaccaaaattctctccatgcgctaaggctattcattcgtaatcaccaatgaggaacactttcagtgcccaatataaaatggcaatt

SEQ ID NO: 184570 - DNA, 486 bp, Glycine max
  unsure (1)..(486): unsure at all n locations
actcagcttggaatcgcataagagtggntgtctcacagtctaataaccaaaaagggtcatatgcggtggtccgacacctgagtgaaattaaacttaccgtgctcgcaagtttggagagcaaaacgcacaaggaacttcaagggaccttcgtttaacagtcagtggaccccctcaccactttgaggtaangggcgtgtggtgagataaccctacgcctgtataaggtaattagagtgatcagaagcacctcgctttcgacaacttatagctcctatcacttgattgtgtattgtgctcgtttatgcatgtgttatgatatgattgattctctgaattgagatgcgactatgttctcgtggtatccgtgtgtaaggatgcctgggggattaaaataaacctctgatggtacgtactatgatgactctacagccacaaccaaagtcagaactacggataagtattgagtgattgtaattctaatgttaa

SEQ ID NO: 184571 - DNA, 237 bp, Glycine max
atacttaccaacctttaattcgggaagcttacgaattaggaacttaaactattctactgagggtgggaatataggatactaaaaatggagttactaagtattcaatctcccacctgaaatcttcaaaggacagaaacctcaattattaagttaagaaatggacaacctaatcaaatggaagacggtaaaaaaaaatcatattcacctgaaacactcaatatttaacgtcatgcctgc

SEQ ID NO: 184572 - DNA, 444 bp, Glycine max
  unsure (1)..(444): unsure at all n locations
gcactcatagatactaagctttggaaatgatttctatcaanaatagttgtatatagcgactaacagtcgacaagggtggtgccctcgctcctacgtatcctcgggtgcgatgaagaaatcagacctacgtagttctctaagattgaaattttggtgggtaaattgggtttatcttttttgaaagattgatgttaaccgagcaatagtcgttaagggtgtggacctcaaatgatctttgattttgaaaaaggagaagtcgttaggcttgaccttgaatgcatcttggttttgaaagaagaatgttaagcatggacctgaacgactctgattttttgataaatgagaagttatagtgggttattgtttttttgctattacctcatccttttaatactgccggtatgacgtaaactttttacttatgaagagttcaccaacatcatg

SEQ ID NO: 184573 - DNA, 451 bp, Glycine max
  unsure (1)..(451): unsure at all n locations
tctatataagctgaaccatttatcagtgaacacaagttgatgtttattcagaagatatgagtctatctctttcatcttagtgagagggatgctcctaacttcttgagtgattcaagaacaccctggctatatctaaggactttcacaaccttggtgtgttgtcttcgccggaaagatagattatttccttcttttcatcttcgaccttgttctttcagaccataatttctgagaattcacttctgcccagaattatctcatggccataactatcggtttacacgctcaaattaagtggactttgagcctaaatngaattgtcaaacgagatcgttcacctccgtttggaatcacctcatgtggagcgcattagcttgagttattatcatttctatatttctggtcgaccaccactgaacctatgattatcatcttcatctcccttttatgc

SEQ ID NO: 184574 - DNA, 432 bp, Glycine max
  unsure (1)..(432): unsure at all n locations
agctaatantcgaacaatgaggagaggatcgattgctctggcctcgaaatacctcgcacagtgtgtgaagatgattgcaaagactaacacgtcgcctatgtgtggtaattgcaacatagcctttaacaacatgactcccttgctgccatatgaaactgtcaagcctagattggaacccacagagccaacaattcttcaacaacctactcatgaatctagctcatcttcttctacagatgcacttgttgcgaattcccaagattctgatgatgatatgaatcaccaaaatgcctctcaaggaaatcataatcatcataataataattatagggggaacaagggcaacaacaatatatacaacataaattcaggtggctatgactatgacaaaagtggatgcgatggcggtggctacaatgcggacaacaacaa

SEQ ID NO: 184575 - DNA, 365 bp, Glycine max
  unsure (1)..(365): unsure at all n locations
aactatanaaactcaagcttataagcccggtctgggagacagatgacaagtggtcacgatatgctaagatgatgctccgagtacattggatttggtactaccatgccctcctgatttccagctgggaaatcgccacgtggaggaacgccccggcatttacacaacaagcatattctaaaccttttccgtcttaagagctctatagttgggcctatgctttagagatattccttttgttaaggctgtgcgcctttcgttcttgaatttataatacagagatctttcgtcatctggtcctacgtatctacccattcgtaatcatttgcatgtttacatctattctgtgaaagcggcagatccgatga

SEQ ID NO: 184576 - DNA, 140 bp, Glycine max
  unsure (1)..(140): unsure at all n locations
tattacgagattataactaanacgttcatactaaanaatnattaattaattaaacaaacggaggtttaacttgcctgggcgagtggctagctcgcctgagcgagtgcatgtctatagtaaaaataaaaagggcggggggg

SEQ ID NO: 184577 - DNA, 447 bp, Glycine max
  unsure (1)..(447): unsure at all n locations
agctacnaaaatagaccgtgtttccnctggatanttgtcccatnanngacacaaaacggggggggtgcccactagtgtgattcatgcacataggcgattcgatatacgaattttgtatgaaaaattattcaaaaaacttgtctatcaaccagaattcaacaatggttacaacttcctctttcataatagcatactcaacacaaacaatctcatccaattgttcaaaaaattaattaatacataaatcaattaatcaccttatcaacatatttggacgctctacactcccctaaaatgcaacgtacataatcaaattgtcccccttctttctaaaccaccttatcaaataaaaccacctccttcagattgacttagggtgtatgcttcaaatattcaatcttttacaaaaccatataaattattgtattgtcaccatatccaaatatg

SEQ ID NO: 184578 - DNA, 436 bp, Glycine max
  unsure (1)..(436): unsure at all n locations
tgaatntgccncaacaatggaggtcctatgggttactatgaatctnttgttgagttttgaagaaaatgggggaagatggtgtgaaatttggcttcacccctcccccctttttattattcatcagaccttgctcgcccaggcaagttgaatttattttttttcaaattttttttgcaaagattgatatatatatttcccttttaaaccttattaattatgtataagcttatgggaattcatgtgataattcaagagaacgaacatgaaattaaagagcaaagttagagatactaggttgcctcctaggagcgcttctttaacgtctttagccgggcactgggtggtgatcgatctgatcatgggcctagcacctgttagtacttgccctaatgcttngacaaagaaagcgttatcatgtaaatgtgaaagcatacta

SEQ ID NO: 184579 - DNA, 454 bp, Glycine max
agctagtgcgaatcaaatcactcctgcattttatctctagcatgcattctttctttctgtacccactcctcacgtttggttttttagggaaaaacaccataactaaacgtgccacaaggcatccctatcgcaccagatccaaatctagaacgatgggtgatcaagaggagacacatgaacagatgaaagccgacatgtcgactctgaaagaacagatggcttccatgatggaggccatgctagggatgaggcagctcatggagaaaaacgtggccaccgctgccgctgtcagtacggctgccgaatcagacccaactctcttggcaaccgcgcgccatcctccctcaaacatattaggacggtgaaggaacacgttggggcacgacggcaaccctcatctgggatacaacctagcggcttacccttatggattgtccgccaactactcaccacc

SEQ ID NO: 184580 - DNA, 383 bp, Glycine max
  unsure (1)..(383): unsure at all n locations
tccttganaagattcctaaagaagttagagcttanctactcacacttctctaatagctaagctcacctccttgagatgagaagctagaacttagctacacaacccctataatagctaagctcacccccatgacaaaatacatgaaaatacaaaaaaagtccctactacaaagactactcaaaatgcctcaaaatacaaggctaaaaccctatactactagaatggccaaaatacaaggcctaaacgaaggaaaaaacctattctaatatttataaagataagcggactcatacttagcccatgggctcaaaatctaccctaaggctcatgagaaccctcaggccttcccttggatctctggcccaatctacttggaggcttct

SEQ ID NO: 184581 - DNA, 416 bp, Glycine max
  unsure (1)..(416): unsure at all n locations
agcttgacagagccncactgtgagtagagattgttttccccgagaggagtcggagtgaggcctctgaccacaacataatacccatcttctgatccttgaagctcatcaagaaccgacaacaaaacctgtgcatgtgcatccaaatcactctccagctaagcaataatacagaaattatcgcatgtatcctcaagttgttaacgaaaaagaacttctagggtacctggttagttgcatgtaaccgaaatctaacataaaacattatttgttacataccataatcaatcataaacaaataaactaataatatcatgatattcctctaactcaaatctgaatctttctcaagtgcagaaagtgaaagataaattaccttagcctctgatttaccgtaaaggtcataatgattgggacta

SEQ ID NO: 184582 - DNA, 436 bp, Glycine max
agcttgagaggattgatggagagcccggtgttatatatacgaggatatgggctacgtgggagtacgtgagctcatatggaggtgggcaacaggggatggtgggtttatgcgcgcattgtggatgtggaaaacttgtgcaccatcgcccgaccgccacctagtaccacatgtgatgggtaccccataatcctacaagcttgagatgaggaagtgttgaagggtgaaacttcctgcttttattgttgaccacagagtggtacctgtagatatgtcgcgggggtcaagagaccttggggacgtcaggtggggtgctattgcccataaccaagcttgaccaatcccgacccatcccgggcatagtctgtcagtgagaacctgtgatgtacctaagcaggcgagcttcctgctgtctacagattaaaggaacatagaccac

SEQ ID NO: 184583 - DNA, 396 bp, Glycine max
aactcaagctctcgcattcgcacctggaaagatctgagaccgcctttctgtattatcttccactctctgtccccagaatggtataatccctagctcaaacctgcacataccatgggggaacctcaggctactcaacaaatatgcttgcctttaaagaaaggcctaacttgataaagcccgagtggtgacttttcaagaagacaggcccaacacatagacaaacctgcttgcccatatggacggggggcggttaatgccatctaggtgagtgattcacacgagcccagacttttgaaagatctaacgacctccagaaagttcatctacagagtgttagagcaggtgccctagatatcttatgacagggcggttgaattaagatattacaaactattt

SEQ ID NO: 184584 - DNA, 454 bp, Glycine max
  unsure (1)..(454): unsure at all n locations
agcttatttcacanaaaagatagatcaactttaatataatgaanatatattacaataccaaaagtgtctaagataataataaactattttcttaaaaaaaacttagatatttggtgttctacctaactcttatntcattaatttatttgtcatggatcttttatctctttatttttgtttcaattcctctatttattatttccaatagaaaaaatatcacaattaacaaacaaaaaaaatcataacttttaacggtcaaaacctatcttaagtgatagataagaccaaattaaaaaataaacacaaaattaaaagacggagccgaaattaaaattaaaaagctaaagtattaattttacctatattttacactgtgtcctataataatcgttgtgtaagaacaaatttgtctaacaataattgtcatttcagttttcaatataatattaattaa

SEQ ID NO: 184585 - DNA, 444 bp, Glycine max
tatttagatgcagaacaatagatgctaaataccggaagaataatggaattggataggtaaaaattacttgtataagtaagaagttttatacattttaaacatatgtcattctacaacactttgtactccatgccactcgtttaggttggtgttaatcttaaatgtagtgcatatcattgtgtttttatatatgaagtatgcaactataaggttgaactgttataatcttccgtgtaaagcatgttatatataaatatctgattatggataaaagaataatcgaaattacttgtcatcaattactcttttatatttgataccaataatataaacaatggatttatctcattttaactgatatggcctaaaattgtgacaactcactatagcagattatatctctaagattgaaatcacatgaaaattgaaaatctaatgaatatt

SEQ ID NO: 184586 - DNA, 432 bp, Glycine max
  unsure (1)..(432): unsure at all n locations
ttagatatttatagctagctcntgcagatngggaattgtgctacaaagccaaagaanatgtattaaacagtattaaagcaagtgacttacaaaaaggtttaaaagttgtataagctttgtttgctactcggtgaaacagttttcctcattaatatggcaatatcactccccccatacatatcatccacaatnttaatattgtgcaacttcaacatgatcttctgctccacctagatatcccaccaacttattgatgcatgtacataattcccttataacctcactatcaaattgcatctgaggatcgtcattgagctctgcattcgacaattggacaaccacatgtaatgggtgatgaagttggatattccatcttcgttcaatgatttcgaacacacaagtatgtgtgcttattgatgtagtcaacatatg

SEQ ID NO: 184587 - DNA, 408 bp, Glycine max
gcctatggaaaatgaatcctcattctttcccccgaagcaaaggacagcggaatcttctcaagggagagcaaatagaatgctaaaaccctatttcccaataaaagggatggggaaggaaaagtgaaaaggatgaaacggatagaaagatcaaagaactacgagatgaaaataaagaaaatgaatacatggtaagtaagaaccaagataatagagatgaatatatagaaaagaacagaatgatcgaaagaacgattcccgatcaaagatcaaaaagaagtgataagggaatagaagcacttctcgatcaatgaaagaaaaaggacaacaattcttcaagccatattgccactcaaaatcattctcgactgaaaatatcccatcccacatgaacaaagaggaaaagaccga

SEQ ID NO: 184588 - DNA, 307 bp, Glycine max
ttctggtggcgttagtgctacagcacacatgttatgtcttttttcactgcagcaacacgtgtgtttcttgttttctccagaacagctttatctctccatatatctctttgcagtgcacacgggaaccttggagaattctaaaatacaaaaaaaaaccggaagttgagagttttttcattgttctttgcatgtctttcgcacgttttctagaaatgtttgactcactttggtggtgtgatttcatggccacctcttagtcccagcatcgctgcggtcatggtattcctctatctctctgtctcttact

SEQ ID NO: 184589 - DNA, 330 bp, Glycine max
  unsure (1)..(330): unsure at all n locations
cgangacagggggagattatgacataggtgaataacaaacagctcaacaaatctaagaacaactcaagagaatcatagaacatctctagtgaatcaagatcaggttgtaatcgatcaccactagcgaaatgagtttgaaaaagtttccatacagaatataaaccgttccatatatttacaaatggctgtaatcgattacaatattatggcaagcgagtaccagtgtccttgaacgttgaaaatacatctaaatagagaagagtcacatctgttcactcaaaagctttgtgtaatcgattacactgatttggtaatcaattaccagtgact

SEQ ID NO: 184590 - DNA, 463 bp, Glycine max
agcgacgcagctgcagctaggggcgaaatagatttagggtgcttgtcggaagaagaagaagattttgtttcatttgccacaccaaaatacacgagtatgatcccctatttatactagaatagagtgactactcacataattgcttattcaagaatactgaatgctcacataattgcttattcaagactttggaacttataactttacaactttcatctttcacaatttaaggctcataaaacttattattatttttctaattaatatctaacatcctcccttaattggaaaaattcttctgcacaccaagtcttgctctgtgtctctcaacctctcctttagcattcttcttgattttgaacacccatttgactccaattgcttcatgacctttgggaaggcttgataactcccaagtgttgttcttctcaatggctttgatttattcttacatggcttgtct

SEQ ID NO: 184591 - DNA, 466 bp, Glycine max
  unsure (1)..(466): unsure at all n locations
tgtaggtgcaaaatgacaagggacgaatgtatttataattntaaanatatgagaatctaacctaagtaataagtttcaagctattaatctatataaatcactcttatatgtttctttntatatttaacagctttagataataattcacaatgtatcacattttcaggtggcgcattcttatttattttgctatttccctcgtcatttgagttcaaacttccttttacttccaaaacaaactaacctttttcagtacgtaacaccctaaccctatcttaaggaagattcaatcgcttgaatattgtcgttgtgtattttaattcaaatataattctatcaagagaatatctcttctttagtcccatcccgtgcggactgtgtcttcctatagagaacatacaatttgctctctcgtgtaatattataaaatatcttttataaaaatattgatacagtaatcactatt

SEQ ID NO: 184592 - DNA, 454 bp, Glycine max
  unsure (1)..(454): unsure at all n locations
gcaggcatgcaagctatantcaaacagagtattgcgaatngtcatttaattgggcgtcgaaaaagcatggcgaatctttctgtgattggtttaaagatacaacctttgcatatgagaatgcttcagaaacattaagaaaactagacgatgggcctataagaaatgttataacctggcaaggatacgacttaaacaggtattcattttacacaaaagcacaagatgactaatattcaatgcacaacagcggggtcaccctatgggctgaatctcaacactatgcaagtgtcaatgatgccaatccctgcgtagcttccatcccttactttgggttcattgatgaatatttggagcttaattatgtgaaatcgacacgttgagtttccaaatgttaatgggttgatatgcacaccggtgtgcgcaccgatgatataggatttaccctggtagatct

SEQ ID NO: 184593 - DNA, 395 bp, Glycine max
  unsure (1)..(395): unsure at all n locations
tctcatcggaataaaaactaacttgtcgcgccgtgcaggtgagagaactctcttctctcaattaanaatataacctaattgaaagcttttcctctactcattatattggtgtctggtgagagacaggtggtgcacgtgcattaccaagaggtggactatgtgcataacagatgctgccagccacacccatatgctcaatatactatcagtcaacctcattagtggatagacatgccgtttataatcataacaaagctgcaatacatgacatctaactagacacgtattaccccactaggcaagaatacacctacaatctcttcacatcatgacccgtcctctgttcactacaatacaggcgaatacgcatttggatccatatcctcgaaataaat

SEQ ID NO: 184594 - DNA, 446 bp, Glycine max
agctaggactgtgctagagagagaaacaaatgatctaagtgaacaaagagccatttctagggcataattaggtgttgaagactcaaattttgagttggtggaattttgggtgtaaatccagtttgaacaagtctaaattgatggtatagacttgtgtgaggtgagagtttgcttcaaatttgtcccattctcaatttcacttctcaaacctaaaaaacccattgaattgaggggtgttgcacacctagattctgtgttgctgtgctttaaagcttgattttggtttagacatgattgatacatgatttgggacttgtaggatttgatttgggcaagattggatgaagggaagtgtgtatttcgaaatctgcacttatgcagaattttgctgtcaaaatatgtgcagcacgattttggctttgtgcacaataatgcttgtgtgtggt

SEQ ID NO: 184595 - DNA, 405 bp, Glycine max
  unsure (1)..(405): unsure at all n locations
tctccnctatnttgctataaataggaggagaagtgaagaatataagggtgtgcagccccttaggcacttctctctctctcgaattcggtgaggaaaattatttccgtgaagaaaatccaagccgaggcgcttccgtaacgtttccgtgagtaattacgcgaagattctcgaccgttcttcaagatccatcgttcgttcttcgttttcttcagtctacaacgggtaagtacctcaaaccaagcttttcaattcattctatgtacccgtggtggtccacattttgtttcatgtatgtttattctcgttttcatttactttgtatacccgcttttgacgtgcttaagccatttatttaagtcatttgtcgcttaatctaanaataaaataaatgtccaccgatcggtt

SEQ ID NO: 184596 - DNA, 444 bp, Glycine max
  unsure (1)..(444): unsure at all n locations
agctaggaaggtagtcatacctcancaaaattatatatatcatatgcaagggagaaagaggccttgtatatgcatgtatgtcacaaaaactaagcgattctcactgacgttggacgaggttttttcagtcacaattcttttgtatgatgtcaaccaaagctatcatttgccgatatcggctaacatattttttatatgatgttggttagggtgatttcctcactgacgtcagtcataggaaattattgttaacgtcagccaaggattttttttgccggtgtcatccaagttttttcagttcatgttgaccaacgatttttttttctaacattggctagattttttctactgacattggtcataactaacttttgagtagacacactgtatggcttttcaaccgacgtcaactatgtgttntccacacacaacactcaaagctac

SEQ ID NO: 184597 - DNA, 384 bp, Glycine max
  unsure (1)..(384): unsure at all n locations
tctttctctcgcaggccaaccttctatactattnacaagaagaaatcatctgaaggatttcaatcaatatcatatgcggttgcacttcttagcgcactgttgcttctatattataggcttcataatagaccgaatgctacttttgattatcaccatcaactgtattggatgtgttatataagtttcatacctaacaatgtacattatatatgctcccagcaaacagaaggtggaaccaacatgacaatctttccttctcaactcttttccatattgctctagataacgatatttaaagtaactgcacaaatatgttcattttgaaactgctctattactgttaagagaagttgtaactgtaactcggaatctaattaccttata

SEQ ID NO: 184598 - DNA, 451 bp, Glycine max
agcttcttgaagaagcctcttaatgaagcttcttgaggaagctacatgaagctgcctcggtaaaaacactgcccagcctttgttaaccgttggatcttctcgaaatttggtccgcagttttgaaacgatctgaccgttgggatctttgagaagatgtctagagtgtgctcgaagcttccgttctcgagagcatttcttatttaagcatttcagcctttgctttcgtgtagcttaggaaaaacgccatttcttctcctttctttcttccagagccatttctaacgttccaagcactttctgcatcacccacaaccaccattagccactacaaaccatcattggtctccattgaaaccccacaccgagaggaacccttcaaccgaagctgaatcttccaacttggcttgcagtttcggtagagaacgaaaccctaatctgacctttctgtttc

SEQ ID NO: 184599 - DNA, 383 bp, Glycine max
tccacaacaattacaagtggtaagttcttctcattcttcttttatgcaagtaaggggatgccacatatgtggatgaacacacgagctatggcaatgcgtagtccaacaagatccttcgagggaagtaaactacatgggcataccaaattggcatggattccaagggtaccaccaagaaggaccattatgattctatcatagagataattttttgcaagaccactattggatatcttatccaggtaataacttcaactaagggggttcaccttatcagcctcctatttattggcggctagtgatcacgccattctttgtgattgcacatatgcaccaacaaagagaagccttttataactcaccactccagatgcaacctttac

SEQ ID NO: 184600 - DNA, 463 bp, Glycine max
  unsure (1)..(463): unsure at all n locations
ttaagcgacgcggctgcagcttctcccaatttctataaagggtgatagtgaagtgaaaaagggttcagacccttaggcacttctctctcttntcgaattgcttggaaaagttgtttccgtgaagaaaatccaagccgaggcgcttccgaaacgtttccgtaacgtttctgtgaggaatttcgcgaaggtttcgaccgttcttcgacgttcttcattcgttcttcatcgttcttcgatcttcaatgggtaagtacctcgaaccaagctttttgattcattctatgtacccgtggtggtccacattgtgtttcgtgtatttttattctcgtttcatttactttttatacccccttttgacgtgcttaagccattttatttaagtcatttctcgcttaacctacaaataaaataaatctccaccgatcgtttgaattgtattatctgttaacttcggttaaaatga

SEQ ID NO: 184601 - DNA, 457 bp, Glycine max
  unsure (1)..(457): unsure at all n locations
agcttagtgcttgtgggagcttggaccatttaatctactcaaccctatgaaggaccaactcgtacttacacacttaaggacttacaccttacaggtttaatgcttttgggactatggatcatccgactaactcataccaatgaatggttgactcgtatataccactcaaatgacattgttagtccgttctaacttgcatttctatttcacacgttcttccattttcttcatttcaagctcagattgcttgcaattttcttcatgggcattgttgaacattctggtaaagttgagcaaagttgtgattattgaagaaaaaacatacattaattagttggcacgaggaaacaattatatagtagtaacaaatattaggactgctagagatgtgattcatagctcttctctttttcataattgaattgtatgacttccatatcnagatgtctgataatga

SEQ ID NO: 184602 - DNA, 381 bp, Glycine max
acactactctgtaagcaaaaagggcatataacctcctcccataaatacaaacatcaatgtaaaagtagagcaagcttatgcgcatatatccttacgaacgttctcttgcacaagacattctattaactaagagaaatgcacccatatacaatcaaggcagcttcggtacctagagtattgacacgtacttacaaggtgtatttgttacatacatcacacacatcaccttggctaaaattacatacatgcatactcaaagcatgttggggtaccacaaattgcacatgtgcacagtcttggaatttctaatacccatacatacacaaaccgcatgatgaatactgacgatctacacaataaagtgctacgatccatgctcta

SEQ ID NO: 184603 - DNA, 361 bp, Glycine max
gatgcaaggagaaaagggctatatatacatgttgtaaacaaaacacttcacaataatatatatatatatatattatgtgtctagtaaaagaacctggatatgcttgtatgaaacaaaaaaacttccaaaataatatatgatgttaggtaaaagataccttggattgcatgttgttacaaaaatacctcacaaatatttttgtatgtaggtatcaagatacctgatatcatgtcatacaaaaatcctcacaagattcacatgttttgttcgaatacctcctgaataggataaactcttcatcgataatatactatcccatgatatatggaaagagaaataaaaatagtgtcttctgaaacca

SEQ ID NO: 184604 - DNA, 307 bp, Glycine max
  unsure (1)..(307): unsure at all n locations
acacatgatacatgtcanggattggtttgtgtcaacgattatatggatgcgccacattatcttcatgacacatatgccaaagtgatgatttggaaattctatgcaaaacttgtcatgcatgcacctatgctgacacttaagtgtaaatatttaggacatgtgatgctatggctcacgattcatttcctctattttaaatcaacccaatgtttccaacaatgattttttataattagagcattcatccgtgtccatttcgtgtactcggaaaattttcacaaaattcaccctttcagtgtgcacacat

SEQ ID NO: 184605 - DNA, 112 bp, Glycine max
ttccccagttacttaaatccaaattttgcatcctaatcaaaaagacaaaggcgggtcaaataaattgagatgttaaactcatcattacgtacatgacctcgtctgtttatgg

SEQ ID NO: 184606 - DNA, 395 bp, Glycine max
  unsure (1)..(395): unsure at all n locations
tgacatctatngatatatcatacaaccagtttgagggcccacttcctaanactgtagccttcaacaatgctaaaattgaagcattgagaaataataaaggcttgtgtggaaatgtcactggcttggagcgttgcccaacatcaagtgggaaatctcataatcatatgagaaagaaagtcataacagtaattttacccattactttgggcattctaataatggcattatttgtttttggagtctcgtattatttatgccaagcttcatcgaaaaaagaagagcaggctacaaatttacaaactccaaacatatttgcaatatggagttttgatggcacaatgatattcgagaatattattgaagccacagaaaactttgacagcaagcatctcatt

SEQ ID NO: 184607 - DNA, 368 bp, Glycine max
aggggaatactctactagaggatccccatgaatccttctttccataacaagcgaattccaccaatagaacgcataccctcggaagctaaggtgagccaaaggaaccttccttttctcacttgtataatggcaaacaaagagtcgctcaaccttcatttctcaatctaaagaaagctctacattgtccttcccatggaagtatgagaggataaagttagcctcttgaggcttactctactttcttctcctatgggagtgaggtctaggatgtgaccaatgcacttctacataatagacactaagatcttcacttaggctcttgcatgagtcaatgactactataggagacatgtctttctttacttaac

SEQ ID NO: 184608 - DNA, 377 bp, Glycine max
gcccttatacaagctcatctaggtggtgaagctacttcttccatggcttattccctaaaggatggcgcctcctctcacgctctatcctttgtctattgctgcatctccatggcggaaaaccaccattagaggaccttcatgtagctcaaagacccatccttcctagaagctccacaagcaagcttccatcaaagatagtcaatcagctcatgaaataaaagtgacaaatgctcacaagatatgcactctatctctcaagtgtctacgctacgaattactcttagagcacccatgaacaaaaacaccatctaaacctgcgaagactcttaaattgacaatcacatcacacacacatgcacctgaggatcaaaaggtct

SEQ ID NO: 184609 - DNA, 400 bp, Glycine max
gcacacaccagagagcttctcaaagattccatcggctcacacatggaaaggtgtctatgtgaagttgcacaccaaatctcgataaattcaacggtttatgaatgctgtgaagcgctcttaccgaaccagcttcctgtatctctatctataagcttcataataaggcctcctcctagctctttgaaaagctatctcaagagacctactttgacaagctagatccttatctatccacactcctctattaactaaattaactttcttaaaactaatcacagaagataattaacgcaacaaataatctaacatcaaacataattactaataatatattgatattttatttatctcggcgtacaactggaattgatctctgatatggggctaaccataccttaat

SEQ ID NO: 184610 - DNA, 347 bp, Glycine max
  unsure (1)..(347): unsure at all n locations
accttagaaactcaagcttgctttggntagatatgatgtatagtcgatttangacttgtctgatccaatntacggcgattttggatgatggcaacagtgattttctaaatctgcacttctatgcagaatctatgctgtctagcgtgcagcacaattttgtgtttgtgcataaaatgcttatgcatggctggttgtggaaagggttgtacatattggcgtctggacgtattttagccgatcccaacaggcaatatgtggacttatgtacttgggacctccactaaaatattcgagtcgatccacctgtgaatgaattgtatccaagtaaatgctactgcgtatttgag

SEQ ID NO: 184611 - DNA, 440 bp, Glycine max
  unsure (1)..(440): unsure at all n locations
gcatgcaagctagtaaaattagagagagagatggagactcattaactcgaccgacagacagaccggggacatttacctactgctgtcaatcatactaacacgcattntcaatattactgttattagcctagacttagattaattctgttataaaccatcaattatcaatgctcctttcaacaaagccttatttctgaatttaaccctatctaatactaaatccttgagaccgaaactcaaattcatccatttcaaatctaaatacttgacgatccgatgtgctttccgacaaaacagagttcccttgaatatatttgtattacgagaaatcggaccaataagtaactgcacgggaaatccattgctttcataatctaataagtgtgttttatgtgatcattgtttatatcgatgcataatttttgcatgcttatggtctg

SEQ ID NO: 184612 - DNA, 378 bp, Glycine max
tattatccttggacctctctaggaggagaagcttctccttccatgtgatatactctagcgaatgacacctctcacctcttctcttttatcttccgatgtaacttcatgactgagaatcaccattgaatgaccttaatgaatcacacagatttagccctcatagaagcttctcaagcaaattcccatcatcctctataaatcaactcgctaatatccacaccaaaactctcatgcctgggcctttctagtgattgtattccaagctaggaatgtctgacatccattcctagcttgaggggcgctcctagcatacattagcttgaggtgggtggttcctaatctgagcatataacttgatgctagattagtacgctatta

SEQ ID NO: 184613 - DNA, 374 bp, Glycine max
  unsure (1)..(374): unsure at all n locations
gggtttatagagtgttgagaggtcacaaccngaataggtggagattacaccttaaaaccagtttgagcaagtctaaatcaatgttatagacttgttgaagatgagagtttatcccaaaattaccaaattcttcattgtcacctttcaaaccttgagaatgcactaaattggtgggttttggatacctatattttgctctaccttggtttgaagcttgttnttggttggaacatgatttatacatggtttaagacttgtaggatccaatttgagtgaaattggatattatcaagcgagaattctacatctgcctaattatgcatataaagctgtgaaaatgagcaccaaattatgccattatgcatagaatggtt

SEQ ID NO: 184614 - DNA, 442 bp, Glycine max
  unsure (1)..(442): unsure at all n locations
tgaggagacgctgaatcagttcatgcatatatccatgtccgaatatangagcacagatgttggatcgcgtggcctgaaaataattaacaatggcgttgaattaattattcctaaacctttacaaactaaacattactcttctaaggctggtactatgcttttaagagaataatggattataatagagacttaccagaccgttagagcgaaaattaatatgcacagctggtagtctaagactatggaagaatgaaacaaacacacaatacgttttatactggttctggaacaacccgtgcctacattcagatcccaagcgacctgcgggccttgagattaantcaaccttgggaaaatccttctacaagctaagatccacaacggatatacctctctctgtctctttgagactatggatgatcctccactaaactgatcacaa

SEQ ID NO: 184615 - DNA, 405 bp, Glycine max
  unsure (1)..(405): unsure at all n locations
agctaatcgcacatattgagagtgaatttatgattattcctaacncccggacatttgcgggatgagctcgagctagatgtcaataggtcttattataggcttaattatcttcttgtctagttatataaatactcagaaactcttaattgtgcttagtgagaaattaaacttgtgcttagagagagcttagcctcttcttcgggttttgattgataacaaaattgattcttatcaaggaagctagtcctttgtggtgaatcctccttcggcttatcgattcttcgtgaattgtggcatcattctgcttatcttcttcatcttatccattttttatgtctatctctactcgagaccttggaaagccaataatggtggctcttgaattagaactggaacaatttaacc

SEQ ID NO: 184616 - DNA, 417 bp, Glycine max
  unsure (1)..(417): unsure at all n locations
tgttgcggatcaagaagatctgcagtaagcatatggatttatcttaaccgngagcttgttgcggatcaaaatacattacgaatcatctcattccattattgcggatcatctcgttccatgtgcggatcatctaaatccaaaactacctctactgcggatgacccgctaaatccctatgcaccctaaaatctacactacaccagcaaacatgggagcacaaaatccatggagaagaacaatggaagaagagaggatgaagaggcttacctcgtcgtcaatggagcagcttgaactgaagaacatcgcgcacagtcgatgagaagaccccaccacatgccgccacaatgtgacaacacacgttcataagaccgtcttacaagcatgccgcagcaataacgcgcacaaggaatcgcattg

SEQ ID NO: 184617 - DNA, 452 bp, Glycine max
  unsure (1)..(452): unsure at all n locations
agcttcatatgtgcctcttattaatctcatgnttataagangatatttaaccaaagcagttcataaataccttgtgtcgtagcccgaaattcagcttcaacactagatcacgctacaacatcttgttttttacttctccaagttaccaagtttcttcctagaaaggtacaatattcggaagtggatctcctatcagttattgatcctacatagtcagcatccgtataagcttcaagtattgtattcccatttcttttgtacaaaattcctcttcctggtgtccccttaaggtaatggagaattatataggtatcttgtaagtggatttctcttggacagtgcataaataggctcaccaagctaacaaaaaaagtaatatcagaccttgtgtgagacaagtaaatcatatttccaactagacgatgatacatctccttatccacttctgcact

SEQ ID NO: 184618 - DNA, 415 bp, Glycine max
  unsure (1)..(415): unsure at all n locations
tatatcagcaatcatccaatatataaactaccttaaccagaaaataggaaaagcaaaaactctgccaaaacacattcaaaatccataattttccctaactcaataccccagtaacattctcttcgttccgattccgtaaccggttgatcgccctgaaaattttactgaagggtactagtacataaatttacattttggaccgtgggatctgctagaaaatgcctggaacccgatatgtactactctttccatgactagcaatgccaaccatttttctgcactatgttaaatanaactactacacaatttngacagcatttttctgcataatatggcagatntcgaaatccaacttgtccacatccaattttgctcaaattggatcctacaagtcctaaatcatgtataaatcata

SEQ ID NO: 184619 - DNA, 458 bp, Glycine max
  unsure (1)..(458): unsure at all n locations
agcttgtgcaacctcagaggtgtttgactccttcataattggataggcagngtccaaacctcatgcaattggtgttcttttacaataaccttcctcaccaaactctgaaggacttgtccctcaattcagtgttctccaacttgaaatctggcttggaagagaccttcactctatggtatcctagtgcaggtaggcttgggccaaatcaaagtgatggcaagctcaatttgtggtgcaacaaccagggtgcagttctggcagaggctgaaacctctgttaaaacatcacaacttggaaacctctctgagtacaatgaattctttgagaagctcgtttataagccagcttttgatgggaatttctcaaacatgcctctgattgttgctcaggtgagacaaacatatatataatctgtgaagaatataatatctaatcgcaattaaatactagaatatata

SEQ ID NO: 184620 - DNA, 450 bp, Glycine max
  unsure (1)..(450): unsure at all n locations
aactaagcttgaaatgctaatgagtcctaagtgaaagaaatattatttatttatntataacatgtcaaattcatggtagtgaagttatgaatggttgtatgcttgaagtgtattatgtataaatgacattgcatatgagtagacatgttaagttagagtattacgtggactctcaatttagagttgaagtttttcatagtggcgaacaaaaattggtctatagaatatatgagttgacaaattcctatagatgtaaggatgcaaaccttttaaagaaagtcaatacccacacgtgtctatgttcgataaaatcatactgtctccataaggtcagctcanaagcctccctacatggtcaagtattagaatcatggtagggaatacggctatgggcgtcacccataatcgtgaaatctcatggagtcagtaacatacattacatgatatatg

SEQ ID NO: 184621 - DNA, 388 bp, Glycine max
agcttccttaagaagatgattaaagaagtcttatgctttctacacacacctccctaagagcgaattttacctccatgagacgagaagctagaacttagctacacaccccctataatagctaagctcacccccatgacaaaaaacatgaacattcaactaatattccttactactaagactactcaagatgccccgaaatacaaggctaaaaccctatactactcagatggccaaaatactaggtcccaacgaacgaaaaacctatcttaatatttacaacaataagcgtgctcatgggctcataatctaccctaaggctcatgataacactagggccttcccttggaactctatcccaatctactaggagcctacacccaacgccctt

SEQ ID NO: 184622 - DNA, 407 bp, Glycine max
  unsure (1)..(407): unsure at all n locations
cactcacgctntaatatgtgaaaggaagtctcgttgttgctgctgtacgtgtccgaatataattgaatctatcaaccgccaaatattccaacaagtagaatgccaaaagatgtgtcttatatctttcaacttggtccctctagtgagtgcacccaactgaataaatagctgggaaatgtcttttatcatctcgaaatccacacctcaccgacacccaaccaagatatcacagcataccaaatcctgtttgagaatgggcaacacaaacacgagtgagttcagtctttcccttctatgcatgtggcttgaggggctattaggtcttcatgtagagagatggccaatatgtgtcttgcatctatcaaagctttgatagaattggactatttcgtggtgaaccacgctat

SEQ ID NO: 184623 - DNA, 379 bp, Glycine max
gaaattgatcattgtaaacagtgagtatcatattgttgctagacaaatgattatttggactcaccagggtcactagtacagacttggctttaacttattcagacagtattataatcaattccatttttcattatccaaagtgatatgaagcacatgaacaaatctttcacaggttttttatcgtacatagattagcttcacatgaatggatagtcctttcaatataaccaatgatcttaattagatatatgttccacagatttcattaatataattcaacatcgttttatttattagaagactctgatgagctagatggagaaactatctgattttttccggtttctaacccacatcgaacaaaacgtaagtgtgtgct

SEQ ID NO: 184624 - DNA, 473 bp, Glycine max
cagctaatcccttgaatattgagggtaggagatatgccctggattcagctaaagactactttccttaacacactaatgttcaatatgttggatttgccctggagatttgccctgaattatctcctttgaaaactattatatttggaaatccttcccaagacaccattgaaccactgatggatgctttggaggaagattatacagatggaaatgagaaaaacaaatcaacgcagtctattgaaggagtattggatcttgaaaagagaatcaatagacttgatacattgacttataaatgaaatataacaaattttgtcattgttgaccaaactattagcttatcaacccaatctttaccatttgtaatatgtttactgattctgatacgacattataaacgacttgatgtctcaaattcaactcgcatgacttgtggattagcatatgtcggtgggataaggatgattttataa

SEQ ID NO: 184625 - DNA, 168 bp, Glycine max
ccaacaaaaatatctgccgacattaatgccttcgtcgtatccttgatttactatgtagagtgattcctagaaattgctttgtttctcagcagatatatctttttgccaaattgttcttttctccaaagatattcattagggcctaatatcctacatgaccattttctc

SEQ ID NO: 184626 - DNA, 428 bp, Glycine max
  unsure (1)..(428): unsure at all n locations
tataagaacagaattgccttaatcatttccatatatgcttgtgtaatangacgcatcaacaagaatcaagccaatgctattgtgcaagcaatcaatggggcaaaacacaccaaatgattataatgatggatggctcatattctcacaaaggtaaaatcatcactttcaaattgagctttcaaaactatcatgacatgtagagaagaatcaaggatttctggtcacaaaatgtcaagaacttttattttcaaaacaattacccatttcttgaacatatcctataattcaaagaaaaacatgcaaagtcgtacgtgcacacgaaattgacccagaatattaaactgataatccgacgaaactaacaacatttacaaagtaacacaactaacaaattacaaaaccaaccaaactagctaaaccaaagaaca

SEQ ID NO: 184627 - DNA, 423 bp, Glycine max
  unsure (1)..(423): unsure at all n locations
agcttgnggagagagagatgggaccacttactttatttcaaaaaggaagacctgtgggggcattgtctgagagactattcatttatcctaacgatttctaataatgggggccattaagtctatcacacgctgacaacagccgataagcccatgaatctcttcgggggtggagtatgtgtctgcctatgccttggccttggctaacaagcggtgaagtttttgactcccgttcaaggtaagagcaaaccgatccatccacatggcagcctcttggtgtaaagagacgagcacccttactctagcctgtttttccgcgtatacttgagcatactcgttcgagattctatgctcgggggcctgggcttgacctaattcttcttggtactttgcgacgattgctaacatgttggtctacgtctcgca

SEQ ID NO: 184628 - DNA, 452 bp, Glycine max
actcagcttatgatgaataagatgattaaggagatttgattatatcatagtgtcgcaacatgcccttttgaggcgatcgaggcgaggctcacggatgcgttttccacaagaggaaaattggtggagtcgccaccaacgtttattttgggataacagttgataaaccaaaggataccggtcaaaactaatattctaagttcgggagttgtatttacgtctgaggaaggtattatcacctctcacgattgtctcgaacgacaactacctatcttttagaatagtgaaattgtgtgatcttacactttatctctatatatcttatttttgaggactacaatagcggggctcttgcttctatcgtctctacattgaagatgaaatcacacctacgtagttctcttttaagggtgaatcatgcgattcttgttacttgcatgtgtcgttttatagcg

SEQ ID NO: 184629 - DNA, 368 bp, Glycine max
tgcttatgcatcaaacctctgccactaaaacttgaccaatatatagcgtgtgaccttcaccaaattcagcacgggcatattatgtagtaccttgaagatatcatatattgtgcctgtctaatttgttgtctgagtaccatacctacgaccacctaggacatgttgtaagctccattttacattagtaatgcccccaatcatacgcttgagtttcctcatctactcccttgaatttctcaagctactgttcaaaccagtgcatagcgtggtgtatatctctgctcaaaattgaattaagtgggttgtccattatttacgatgtgactattatgttgaaaaattacctaattagatatctcctcatttac

SEQ ID NO: 184630 - DNA, 366 bp, Glycine max
gcatcacacaaagatgatacgggaggcatttcaggatattgtttcactctaaatggtggtgcagtaagttggaaaagtttcaagcatgctacggtagcagattcatactactgaagtagaatatatagcggccagtgaagccactaaagaaattgtttggatgaaaaagttcatatttgaacttggtgtggttccttcaatagaagagtcagtcccattattgtgcgacaataatggggctattactcaagctaaggaaccaagatcacaccagaagtccaaacatattttgcgaaggtatcactcgattaaagagataatagaacggggtgacgtgtatgatggaaaggtagatggaaaggagaa

SEQ ID NO: 184631 - DNA, 362 bp, Glycine max
  unsure (1)..(362): unsure at all n locations
tctaaganaaaacgatgntattagtgcntaaccctttgaactacttcacattcacatatgcggcgcctctagaactatgagttaggggggagattactatggcttaattatatatgatgattactcaagactcacatggactttgttctttgaaaccaaagatgaagctttcgatggtgtttgctaactggccatggtctctcaaaaagaagaaaggccttaacatcgattcacttataagttatcatggaggtgaatgcacaatgagcctctcgaaatgtttcgtgaagaagatggaattcaccactaactttttaccctaagaacacctcaacagaatggtgcatggagaggaataatat

SEQ ID NO: 184632 - DNA, 399 bp, Glycine max
aaaaagggggagaatgagaatgttatgtatacatgattctccacgatgccaaacacaaatcaaacaaggttgcttcacatgataagcatttgctccaagagtaattcaagagtgcttcaccaaacatagccttgtttcatgattcactaaagaccaagccttgccttaaaacaaagtgcattcatgacatgcaaggctctggtaatcaattaccaggaagtgtaatcgattaccacaagacatggttgagaaaacgctgttgaaaaaggttacgaatatgaatttcaacatgtgaacgactaccatatgtctgtaatcgaataccagcaacgacaccttggaaatcaaagtcaatgacatacccttctaatataactgtgaattgattacacaacattg

SEQ ID NO: 184633 - DNA, 314 bp, Glycine max
  unsure (1)..(314): unsure at all n locations
cgcatttggaattgcaggagccgcactgcatcattatgattatgacctgacatgctatagaaactgagcgaagcgtacaagacaatgatagttgttgcttgaatacctcacccactcaagtggatcacacatttatggcttttgtctaatgaaacactcattgcctnttaccactcttatgtcctttgagttcttaggcgattcacgagagtatggccacagccaagatcacgtcaccaatatgtgtaaagtaatgctagatagacgaggagaacgctaccattaagaagggttactatgtttttggccaaatg

SEQ ID NO: 184634 - DNA, 448 bp, Glycine max
  unsure (1)..(448): unsure at all n locations
agctaggaactctacatgtattatanccagttgattgcttcngcgangnganaccagcgagaacatttacagggatatcaaccaaatgtcgactttcaccttctatgttggtcttgttctggactagttgaatgtaagagtaatagcccctaatgcaagcatggtcgttaggggtcaaacctgtactgtcccgggcacttttccatgcttcaattcccacctgaacacaacagagataatgttagaaacgtngtatactaaagtgtgttcagtgattcaatcaaggccaatgtaaatatacagaaaaccatgctaactttgctgcacaactacttcgcgcaaaatgatcacgctagagtacatactcgctgataagtcctaaagccatataatccccttgaaaccatcatattgacccaccgatcaaagtcccctcctcatagacact

SEQ ID NO: 184635 - DNA, 359 bp, Glycine max
gtgctgtccacttccatgacacttactgtctaattcctgctaatatacttgggtcccttcaagtaacgcatcaaactatagctggaactccatttgttcggctattgatacagtttaatgaactctatcttcattacatgtaatagaagattagaactggttaccaaccatcgaacaattataattaacggacacaataccatccataaacaactttcttttatccatacaatctagatttgtataaccagactaaactctaaactgcgctgacattacatcttttggcagcctaacattgttattaatggacatcattgatattgtctaaacaaatggggatcagtgctattgattct

SEQ ID NO: 184636 - DNA, 445 bp, Glycine max
  unsure (1)..(445): unsure at all n locations
tatatgctttcatacttgccctgaagacaaatgacgttgaacaaaatttaatggagtgcaatttcatgaataaagtagtggtacaaacaccgagaaacacacaatgaggcaataagctttaataatgattgaaacaaaaaggatcatattatagagcaaaaaagaaagaagaaaaaactcagaaaaaggacatacttccaaaaagcttctcagtggttttgaccaccacttgagaactcctgtcagaggaacatttatatgctgaaaacaatcatcagctataactatntgccgaggactgcgttgcattgcaaatggtgcttgtaaagtatatggtcaactcgacgcaatatattgggatcctttgcaaaccaacctgataagggatgtcagagtgagagattgaaatgcagcaaatgggtagaatagcatccatcacaaaact

SEQ ID NO: 184637 - DNA, 382 bp, Glycine max
ataaaccatacactctggcgacaggtgtatatttttgattcatggccagctgggttaccaggtttaccaaggcatctattttaccttcaagctacttagtctcagctgatgaagatgaatacttggctacttcatgcacttctctaatgacaatagcatcacttttggcactaaattgttgggagattgaacccatcttctcaattaaatatctggcttcagcaagggtcatgtctccaacggctccaccactggtagcatctatcatacttctttccatgttactgagtccttcataaaaatattccaggagaagctgctcataaatctggtggtaagggcaactggcacatagtttgctaaatatctcccactatccata

SEQ ID NO: 184638 - DNA, 469 bp, Glycine max
  unsure (1)..(469): unsure at all n locations
tactaagcttgttaaacctggaaacttcntacctcattagtattcttatgtactatacattcccgaatggcctttaccttttcttcatccacacttatactttnttagctaatgacaaaacccaagaacacaacgaattcatggcaaaaagaacactntttaagattgactgatcgaagccgtacctgaatcaaataaacattaaaatgcaataactaggaagtgatcctagatcatttcccaacgagcaatgataaaccagatgttcataatatactagcagtaacagtaacagtaacaggggggttgtttgttgtgtgaattaaagaacaagtgaactggaatacgaaatcaatgatggtaaaaattgttgtttctctgattcagaaccattctctgtcctatgttatgaagaatcgtccctacagttaccacttaatcaacctatttaattactagcgaaatcatt

SEQ ID NO: 184639 - DNA, 352 bp, Glycine max
ttaagtgaataatattggtgatctaaactccctcgaagatatattgtgacctaaactgtctgatcaaaactctgtttagatactttaataatgttatagatcgagtctctaacatattctattcattatcatccagatatgtaaatgctttactatgtgatttatattaatcgatctaaactgttgatctttaacgcttataatatgtttgggttagtgtgcactacaacatactactaatatcgacctttaatttcgtttggtcgtataattaatatatgacatctaatctgtttgggtcgtacaataaattagctcttaaaatatattatgtctaagacggatataagtt

SEQ ID NO: 184640 - DNA, 337 bp, Glycine max
  unsure (1)..(337): unsure at all n locations
acctaatccattagaggcgttctactnttcaaacctataagccatataccacaatccttactacatccaaccgtatattaagtttgtggtgggaactctactatttccttttatgcacttgtcattttagtataacataataatgactcatgtgatcaatagaaccgattcaatgcaaaaatgcctaatgtataatttcggatagggacctgcaaggaactaacatccaacttggacccgtacatctgaattataaaaaatgatgtttggcgggtttaggcaggtaaatagatttgaatgaattgcctatgcgaaggttactctgcactttgtttta

SEQ ID NO: 184641 - DNA, 321 bp, Glycine max
atcatcccaaggggaatatagttggttagcccagcccaccacataaaatcgggacgatatgcccaacttatgctgacaagatgctaatgacggcgacgatcttttaaccagaggcgccacgagacggatcgatcgtcttcctagacgggagtacaacatcccgatgtatcctaggcaggcatggcgaacctctcccccccaaagaaatggcttcccgtttgcactatgagactcctggcccatatagaaacagtagaactgttggccctaacctgactgaatactcttttgaataaagagtggacctgttctcttcaaaac

SEQ ID NO: 184642 - DNA, 433 bp, Glycine max
  unsure (1)..(433): unsure at all n locations
ctaagctagcaggtgatacaggacactttatagcacccatacctctaggaaagaccttctcaagagtccattggtcaagatcatattggaagttgattagcatataactaccacccatacaccttatcttgcgtctttgggaatatccttctggcctctttatgaatttcaaattgcttgcctataaaacacaactgttancattgtggaatgttgcataatctattgggttttgtaacttgtgagctgcttaattctctcattatgtttatcaagaatctatatacaagctgacgaaacctattcatcttacattggcttggtcaccctgctgataagattaaaacgcggaacgacataaaccctttgccaacttgtgacaccgctttgtctatccaatgcgattggcacgactgaaaagctttatgcttta

SEQ ID NO: 184643 - DNA, 459 bp, Glycine max
  unsure (1)..(459): unsure at all n locations
gctttgtgtggatgccaatgaagcatagntttcaactcttaaggaanagttgacgatcactcctatattagttttgcctaacccaagagaaccctttgaggtgtattgtaatgcatcaaaaatgggtttaggaggagtgttgatgcacaatggtcaggtagcggcttatggttctatataactcaagactcatgagatgaattatcctacccatgatctggagttagctactgtagtttttgatgtaagatgtggaggcattacttgttctgatacaagtttgaagtgtttagcgatcataaaagccttatatatttgtgtagtcagaaagagctcatcatgtgtcaaaggagatggttacagttacttaacgactattatttttagcttaactatcatccttgcaaagccaatgtaatggctgactccttgagtatgatatccctacatatatactgc

SEQ ID NO: 184644 - DNA, 417 bp, Glycine max
  unsure (1)..(417): unsure at all n locations
ntngcctggagggatcagaatacaacgagacatcatatgtgattggactcatcacatgctcagaatcgataactgacaaacatgaaaataagtcatatgtgaagggatgtagttacatgctcagaatcgataactatcaaaaggaagaacagttaatgaacatgttcaggatgatgctaaggctcatacttcatagcatataatatttcatttggatcaaactcgggatgctgtaagtgaaataatggaggatgagatatttataataacagtccgcttatcagtgagttattagaccctgcagtgcatgtctgccacccaaccccttaataaggtgaagtagctggtgcagattgttaacctcaccagaagcccgagatgagaatgagaaaaatcagcattcacaaatccattggt

SEQ ID NO: 184645 - DNA, 440 bp, Glycine max
  unsure (1)..(440): unsure at all n locations
agcttagccctagaggggatggacctntnttgngtttggagaggatcaataacaatgcgctattgttggacctcccagaagagtctggagtcagcaccacttttaacatttctgatttaattccttttgcaggtggagctgatattgaggacgaggaactaacagatttgaggtcaaatcctcttcaaggggaaggggatgatgcaatcctccctaggaagggacctgtctgtcactagagccatgagcaataggctccaagaggattgtgctagagatgctgaagaaagccctatggttctcatgaacctcagggtagatttctgagcccatgggccaaagttgggtccaattatctttgtacatgttagactatgatgtcattatatttggtccttgaattatggctcctattgaggtagggttactataatatagga

SEQ ID NO: 184646 - DNA, 428 bp, Glycine max
tgtcaatgcattcaggaacctaacagacaatacaagatgcatcacttccagtcctgctccaatgaataaatctttataagtaaaacatgtatgtttattctaactcaccccatcttggagcttgtcctctacagcagtggcaccaagaagaattatgttcttctcaatcttatctgatacttcctcaatcattatatcctgatcagcactgactacattcttggccctagagaatttactatcaaactccttgtattcttctgcatcaagttcacgataggccagtataagggttctcagacccgcattagcatactcatgcacatgctccatggtttctcttcaaactccctcctattctcggcaagcctttcacacatggtgctgcatgataacatcactcaaagtgggtcaatatggtgaaacac

SEQ ID NO: 184647 - DNA, 309 bp, Glycine max
tgtttctgacgagttttatttggtaatagtgatgtgaatgtgacccttttacccatttgaaatgcttttatttaaatgtcgttttaagaacttataactaatattggattcatatgtcttctattactattatatatgtgtggggtagagggcgatacaaacaggctggagggtgagggcgctaaatgacaaagatcctttgaaaccattgatggtggcattgtcgtaggcttggaggacgcttatggcggcagatgttgttcgcgctgacggaggcgctcaatatggctttgtatgtgtgtttgggga

SEQ ID NO: 184648 - DNA, 403 bp, Glycine max
  unsure (1)..(403): unsure at all n locations
tgaggttaatctcaaaatttcaaagacatgaccttgtgagaggtttaccaagaatgtcatacaaagatgatttactntgtgaagcatgtcaaaaaaggaaacaaattaaaacctctttttcaagcaaaaactccatttccacctcaagaccacttgaacagtacatattgatttgtttggtccaactagaacaacctttgtgagtggaaagagatatggtcttgtagtagtggatgactactcaagatggacatgagctatgttccttgctcaccaaaattagtcctttgaggtcttctttatattctgtaaaagggttcaaaataaaaagggagtatgcattacttcaatcagaactgatcatggtggagaagttaacaatgagagctttcacttattctat

SEQ ID NO: 184649 - DNA, 449 bp, Glycine max
cgcttgtacctgtgccaaggtgcaatgtatgctaaaattattattgagaggaggtatctgggctgtagaaccatgaattgtaattggtcaaagattacaatatttttaaaaaaattatacgagcacttagaactttgttaataagaaataaaaactaaaaatctaagtcatgcattcttatatgaatgattaagatattaagtctataatcatatatgatacttaaaagagtaattacatttcacataaatatataagtagcgataaacacatccgtaaatcttatcatacaaggtgataacaaatgacggtagttactattgcccctctaatactcgagagtttgttcttctactgacacatttgcgaagtgaacatataatattaacctagagaaatctgcatcttttaatgattccggaatcacatagagaacttgataacctact

SEQ ID NO: 184650 - DNA, 456 bp, Glycine max
  unsure (1)..(456): unsure at all n locations
gagcgacccgcaggcatgcaagctaatgcacaatatagagtgaaacntaatgaataacactaacgcaagacaacaaaggggagctatattagattcaattctgatacattcttgatatcaaagttttcggtattgttagttaatcactcattatcatgttattaaaaaaaattaactccatatattatttcaaaagccacttgctttaaacgatgcactatataatatatgattcaataatgatataattatagccttcaaaattatatgatctatgatattctaaacgtccaatccttttataaatttaatgattatgtataaataatataaaataatattatattattattcaatcacaaattactattaatatgaattttttatatttatttaaaaataataaattatcatacatactatattctattaaataaacgttagaatattcctatt

SEQ ID NO: 184651 - DNA, 383 bp, Glycine max
  unsure (1)..(383): unsure at all n locations
ngtaattttgatcaccacaaggtgaatctgtgctctatggtatggaactcggatagtgccacagtttggacaatacttcagtgaagaaatgtggcggccaatgacattgataagaagaaaggcataccatacatggaagctgtggctcatgtttgttcagcgatcatttttgcatggacaattatgggaagatacatatcttatgaactcatagatacgcgatcaaataaatataaaggctacacctagctactgtaaatggaataaagtggggggataatgcaagttaaagaggctgcaagaatctaccatgtggaatactattctggacccggcctagcctaggtcccgcgaccaacattgcctagacaccaataagcctg

SEQ ID NO: 184652 - DNA, 442 bp, Glycine max
ctgcaagctgaggaaagggatgcatggtattttgtaacccgctggcttgaaccgagatctgtacctgttgaagggcctgtggttgtgctcatctgctgaccaccatacagacctttgccctttcatgcagcaacctggagcaattgagcagcccgaagctaatgctgctaatatttacaatagatttcctcaaccttagcagcataatcaaccacagcagaacaattatgacctctccagcaacagatacaaccctggatggaggaatcaccctaatctcagatggtttagccctcagcaacaacaacaacagcctgctccttccttccaaaatgctgctggcccaagcagaccatacattcctccaccaatccaacaacaacaacagccccagaaacagcctacagttgaggctcctccacaacctctcctcgaagaactt

SEQ ID NO: 184653 - DNA, 251 bp, Glycine max
acggaggaaaatcaaatagcactttgcgacaatggtcttgtgttagagaactgtagagacaatttgttttaagggaggtttacctatattaattaggcgcagctcaaaccaaacaaaactgagcgtgacgatgagtatggggcaagctaaatcgcagtgctcgctgtaaccaaaacgggccaacgcacctcattgacggtcatcccaataaacctgtctgaccaccggccgacatttaaccgggatttctt

SEQ ID NO: 184654 - DNA, 423 bp, Glycine max
agcttaaacattcactgtcgagcctctcgattattacgggactcaatcaaacatccgagagaaaagttatggtcttttgaatttgctcagaggttcaacattaaatttcgagcgtctcgatatattacgggactcaatcagatatccgagtaaaactttattgtcgtttgaattggctcagaggttcaacattcaatttcgagcgtctcgatatgttatgggactcaatcagacatcccagtaaaaagttattgtcgtctgaattggctcagagcttcaacattcaatttctagtgtctcgatatatgacgggacaaaatcagacatccgagtaaatacttattgacgtatgaatttgctgagagcttcaacattcaatttcgagcgtctcgttatattaccggactcaatcagatatccgag

SEQ ID NO: 184655 - DNA, 423 bp, Glycine max
  unsure (1)..(423): unsure at all n locations
actcagcttgaatgcgtggctctacaagatagcccatagatatgctcatcttcttcgctatcatttattcatgtagtgccaccatgtcttgctctttgttactcgctcttggtgctttccactgcaaaattgtatgagtataataataattatcatctgccaagctgtatatgctgacttgggagtatatgccccttctttccttccttccttcgattctttactgcatgaacttcactcatcaatgatcgaaagggttaaatctattgattcacacgcatgacacatcaattaacagctattntgtgcccgtcactgtcttcactcgtatactaactagcgcatattgaagtggaaagtggggaagttcttctaataaatattggtgttatattttgcaaacacatgtatcagtcactcaac

SEQ ID NO: 184656 - DNA, 324 bp, Glycine max
  unsure (1)..(324): unsure at all n locations
cggcatgcaagctntgatctttatatgggtgaacagaggttttttctccacacgcgcgaacacgggggagttctttcaagctggccttcttggtgaaccggtcgggtataccagatccatctcctactttgtttcgcatagaagcccgaagaacacactccagctttgatttttatcgcaaaaaaagcgaagatttttatcacccaggtgcaccatttgggtaagtgttgggtgttcctctagaatattatttatctgtcactgccacttatccataggtattgaggtgggggctgtgctacatctactacgtgggatgaaggc

SEQ ID NO: 184657 - DNA, 361 bp, Glycine max
tgggattcgtgatgaacgcgctaagcacgcctgctgcgcttagcctgttcatcgcaactggtaaaatttttcagacttctgatgatcgcgctaagcagaccatgtcacgctaatcacattcatctgggctgttgaaccataacgatgcagacgctcagagtagttcaagcgctgagctcagctgtgctgagctgattgccacttaggttctgattctttacctttgaataaggcttagcacgcctgagtgctaagccttactgtctttctggagaagctgagctaaacgccaacatgctgttctaagccccaatcctctacgtgatactaaaattgtagacatacgctaaccgcacctgtg

SEQ ID NO: 184658 - DNA, 386 bp, Glycine max
gcccactacacaagccgcgggctatttagataaaatgcgcaccgccatctcatggcccactgacaatctaggaacactacagcaatgtctcaaaggcacgttacatgcaacatataatgggaaccacaggggtaatagcggactgtggccatcaaataaccgacgaagttgctgatatgataaatccaacacaaggtggtgatagagagggttaggctgaaggtagtgggaaggcgcatggatactaaacgtcttaattgtcacagcaagagatgccgttacttttaagctcattctccagcactacacatttggagaagcgaagtgaaaaaaaaatatgttttgacgctgtctatttaatagactcggcctcccacatcaatata

SEQ ID NO: 184659 - DNA, 433 bp, Glycine max
agctgaattcagattgaatcgaagatagcttagctcatccttggccaacatagcggaccaaatcaacctcacatgcaatggttgggcgctaagcgctcaagactcgcagtttatcgcatgaacagagatgcgcttagcgcgaggcttgcgcttatcggaaggactatctttcagaaaatattttctgagttatatttcagtccttgttccatgaaattgaaacccttatgttaagcattcaaagattggctgatatactcctatgtacaggttacatatcatgttccaaatgatttaaatgcgtgaaacatatataaaatagcagaatgtaatactgggttgcctcccatgacgcacttctttaacgttattagcttgacgcttagcttaataccttcaaggtggcatgaaagtacaaagaacacatcttcct

SEQ ID NO: 184660 - DNA, 453 bp, Glycine max
  unsure (1)..(453): unsure at all n locations
agctagccacccagctcgtcgagggagaatcnngttccccagctcgcccaggcgagggaggttgctttctccataagcaccatccttctggaggaaggatctggaaggcccaactgggccatattgctattcgcaccccctttttactaaatgcaccccatctattattttggtagtcttttttccgtatcgttacgaaactttacgaatttcgtaacgatacttattttccttccgcacggttacaaatccttacggattatgaatttactctcttttggctttcgaagaagatacggaaactcgcggattgcgcaaaaacacctctcttcgatttctgccacattacggaatttcacggatcgcgcaagcctgcttccttttgatttctgacacgtctcgggacttcatttattgtgcaacataggacgccaagtatctcatagcggctaa

SEQ ID NO: 184661 - DNA, 81 bp, Glycine max
gaaagggccacggggaagagcataactaccaaaactttaaaaaactaaactgtagattttccgaccgatgatatcttcgga

SEQ ID NO: 184662 - DNA, 341 bp, Glycine max
  unsure (1)..(341): unsure at all n locations
tgcggntacattgacaataacatcttgngaacacgggtttattacttgaattgccatagtactatcttgataatggtcaaaatagtaataagtattgcgcttggcatatcttgtgctaaagatattttttttttcttttgccttctgctgataacaaaaaaaatattttggtaatggttggatggataaagttcaatgatgaaaacattcataataatgagtactattaatgcgcatggaaataattataaacaaactgtatgaaataattcatatacttatggaatcaagttaaacaactcttccattgaattaaaatttcaaacttattgagaaaaatt

SEQ ID NO: 184663 - DNA, 454 bp, Glycine max
  unsure (1)..(454): unsure at all n locations
agctattngactcctgattgtgtggaactatcntaactcttgcttctttggaatcatggaaataatattggaagtcattgcttccacactacctagttggaattatggtatctaagttgatgcttgatagcctctattttcataaaaaaaaaaaatagatgtgatcatactaccgctataaaacatattgagtttgtaaagacaaataatcaattgccaatacgatgtatagataaccacactaaaatttacataaaacatattgagtttgcaaagacacataatcaattaaccatatctacattaaaatttatattttgtaattaattttagttcttaacaaccaaatatattgcatgtgtgacacaatccacactagtatgtaaaataaccatatccgcattaaagtattatgaaatatgcttgaattataaaatagtaatttaatcaaaag

SEQ ID NO: 184664 - DNA, 365 bp, Glycine max
atttatatcctgtttggaattaataaacaggccttctatatttaatggagtgggttaccattattggaaaacctcgctgcgcatttttataaaggcggtaaatataaatatctgggaagccatagaaatagaggcctgcattcccactatagtggtaggaaatacaaccattgaagaacctatggaacaatggagcgaagatgaaatagattagtcaatacatcctaaaagcccacatataatacatctgcttaggatggtgagtactttatggatcaattgtaagtcgtaagaatgtggaaccctcattaccatgataccatagtgtataaatctagacaaacattctctgattgactattaaa

SEQ ID NO: 184665 - DNA, 457 bp, Glycine max
  unsure (1)..(457): unsure at all n locations
agctatttccttctcctccaagtgtttccttttcatcccaaccaccctatttctatttggtttcacttggtctagctcttgtgccgagatcttgaccactttcgcttctcttgccatagaggggtagagtccggaaaacagatacggcttccttcctcctagcaggcatcccaagatcccttcaaactcttctatggttggcgccaactgaaagtccccaaacgtgaagcaccttagcaactggtcataatactgagtgagggatgcgatggattcaacagacacttctatcatggccaaatcccatattttcccatatgccttgcggaagacttgacattgagctaggttcatccgctgccctaactctcgtaagctagttagttctaggctcttgactntgacatgatagaacctttntttaaagagggcgctggatttgaccccatgtttgcta

SEQ ID NO: 184666 - DNA, 433 bp, Glycine max
  unsure (1)..(433): unsure at all n locations
tganagaattgacgagccaggccattctaacatctgatgaacaccatatttggcacgattgttaggattcgattactctatccaatatcgaataggaaaaccaaatgtggttacgaacgtgttgtcgcggtgctcagagttacccagtgcttcatgtttcatcctctcaatgccacattttgtgtttcttgaagatctctataatgagttgcagtcgcataacgacttcatcactttaagggagaagatccaggcgaaccccgcagattaccctgatcacgtgttaacacccaatattgtttgcatcgagggcgcatctggctaccttcagactgcaaccttatcaaggctttgctcacgaaatttcatcanacaccaacacggtggcatatgggttttctaataaacttgaatcgaatagtgaaaacttaca

SEQ ID NO: 184667 - DNA, 165 bp, Glycine max
  unsure (1)..(165): unsure at all n locations
cccggatccttnagtcgcctgcggctgcagcttctacattcattcgagcagtgtttattactggctcaatcgcatcactcaatcagcactccatgtagaaagaaatcgtcgtttgaattgcttaaacctcaccttcaattccagcatctgattgtgcggactgaa

SEQ ID NO: 184668 - DNA, 180 bp, Glycine max
  unsure (1)..(180): unsure at all n locations
ggcatgcannagctnntgagccatgaatgaaaattgaggttggtatatttaaaagttagtccagcataatttatctaattgattgagtgtgacaccctctacttccacaatttataaataagaaaaacattttacaatgggaaattaattaaattaattttattcaaatcacgtaaataa

SEQ ID NO: 184669 - DNA, 133 bp, Glycine max
  unsure (1)..(133): unsure at all n locations
gacccagagcaccgcggcagcaaccngggaaccacagaaatatatttttctaaacagaaagaacatgaactttcaaggtacttggaattatactcacctctaaaaaaagcctaaaatcaagtgtgtcgacccc

SEQ ID NO: 184670 - DNA, 108 bp, Glycine max
gcggctgcaacttggaaagagggaacacattttttctataacgacaacaataccaaaacccacagaattgtttactcaaactacagggtgggtatccatcataacacc

SEQ ID NO: 184671 - DNA, 389 bp, Glycine max
  unsure (1)..(389): unsure at all n locations
acctctaaaacgacccgcggcatgcaagcttctatactctatacaagaatgaagctttgataccactcgnnagacaagtggcctcagatatcttaagaggggagggtcgaattaagaaattacaaactatttccccaattaaaattctatcaagtcataaattcccttaataatgaacttcttagatattgatccaaatagaacaatttgaatatgaatataaaacaataatacataaaggatttaaaggaagagaaagggaaaactcagattatactagttcggccacacccttgtgcctacgtccagtcctcaagcaacccgctggagagatccactatctngtaaatcccttttacaagttctaaacacacaaggacaatcctttc

SEQ ID NO: 184672 - DNA, 429 bp, Glycine max
  unsure (1)..(429): unsure at all n locations
agctggagaggatgcttcaatggaggaatttatagagggagagaaagagggagggggagcacgaaattgaaggaagaaaaagggagagaagttgaactttgagttgtgtctcacaagactctcattcatcaaagttacaacaagtgttacacatgcttctatttatagactaggtagcttccttgagaagctttcttgagaaaacttccttgagagctagagcttagctacacacacccctctcataactaagctcacctccttgagaagcttccttaagaagattccttaagaagctagagcttagctacatatacctctataatagctaagctcacctccttgagatgagaagctagagcttagctacacaccccctataatagctaagctcacccccatgacanaaaacatgaaaataacaaaaaa

SEQ ID NO: 184673 - DNA, 305 bp, Glycine max
tgatcatctctgtcatgaaactaacagaggtgaagtgctccttcgtgtgggcgttgctaataatatttgtgctctattacgaataaaatgacaggccgttcttgctgtttcatctacggaggcgaacaatgtgacaaacacacttgtgagatggcgtttctttacatccctcatgattaaatcttggtcttcacctattgggattatatcttctctagtttttactcataccttattgcaattttcgccctcttacttactcttgataccatatatatatatataaggggcatatcaagtgagag

SEQ ID NO: 184674 - DNA, 245 bp, Glycine max
caaaaagggtggaataaatgcgataaagaatgacaagaatgagctatttcccacaaggaccatgatcggctggaaaatgtgtattggttactgccttcccaatgaggcaacaaggaaagacaatcctctttcttaaggacaaatgccagaggtagctaccaagacttttatcgctttctggatggatactcagggaataaccaaattcttgttaatccagaggaccaagagaaaatagcattcac

SEQ ID NO: 184675 - DNA, 347 bp, Glycine max
  unsure (1)..(347): unsure at all n locations
ccgggaaccgagccgcagcggctgcgaggattctaaagaagtcgagcttatctcacacaccagncgaggagctgggcacacctactggagaggagaaactggagctaagcgacgcaccccctataatagcgaaggtcacccccacgaccagtcacatgaaaaggcccaaaacagcccctacgagacggactacccggaaagactgaaaatacagggctaaaaccctataccatggaatggccaaaccacaaggcctaaacgacggaaaaacctattctatattttacggagataagtgggatcatactcagcccctgggcgcgaaacctaccccaaggctgatgaga

SEQ ID NO: 184676 - DNA, 423 bp, Glycine max
tctactgatgtggcaaggtggaacctctcttgcttgtggtcttggatgcgggcactggcccttgttcctcctttccaagatgtttttccttacatcaacctgcgtgggtttatagcctaacctgaatctcccgtggcttcccttgatgtctactaggacggccatgccatcattattcttgcccaaactcatttcgggctcatagtcgtgccgtaacattacctgggcaccatcattgccacgccagacatgcggtgctgcattgggagggattctacgatagcattgcttaccacctcaaaggactggaaagtcatttccaatgactcttccgcagcttccacatatggcatagaggaggcgcagctcaccataacatcttcttccctcgatacaatgaccaaatgccctttcaccatgaat

SEQ ID NO: 184677 - DNA, 353 bp, Glycine max
atgctgccgcccagctcgcccaggcgagctttgttgcttcctccagaagcaacagccttctggagggcccaagtgggcctggttgctatttgcacccccctttttactaaatgtaccgccccttctattattttgtaattctttttccgtaacgttacgaaactttgcgaatttcataacgatagttattttccttccgcaaggttacgaatcttacggattatgtatttactcttttttagctttcgaataagttacgaaaactcacggattgcgcaaaaacacctcttttcgacttccgccacattacggaatttcacggatcgcgcaagcctgcttccttttgaattctg

SEQ ID NO: 184678 - DNA, 452 bp, Glycine max
atcagcttacctgtaactatcaatgtatcctatgcaccctatgtgatctgaattatattatcaaatcgaaccctgaacttgtaatgaatatcttcagctaccctgtgtaaattctacgagggcatatggttcaaggaaatttaccccaaatttatgggagttagttaggatgtgaagagtcataccctaattttgtctggtgaccattgtttgacggtatgcgaccttcgttgaccacctcaaaatgtttaacacccatcgttgtggaatccctcaagttcctagatgtattgagaagaaaccggtcaaaaacacgataacgagagtgtatttagcaaagaggggtgtgtgtaaatatactgtcacactctaatttcatccgaggaccattgttgatcacttatgaaggcttaacactcataactgtggaatccataaagattcttgagaat

SEQ ID NO: 184679 - DNA, 358 bp, Glycine max
cgggacctgtaagtctactgcggcctgcgagctcatgactggggaagtgcacatattctttttgttttgaaaatatacagccgtacgcctgcggatgaaacagaatggtccaccacatgacaccaaaaacaatttttgcaggcctcctaagctaccttagggatactttagttatagccgggaattcccgaaaatatctatcaaaccaaaattgaaggaaccagaaagggctgcccaccgccaatgtttcggcatgtattcattttggtgagcgggccaaaaagagaatcccaacaaggtgcaagaaaataaggacctatggcaactttcctgccaaacatgttgtgcatagtgctaa

SEQ ID NO: 184680 - DNA, 364 bp, Glycine max
agcttattgtgatattgtcattttttttttttacaaaagcttattgtcattgaaattgaattatactacattggtgtattataacatcaattactaaataagttaattaaattatttccgaatgataaaaaaaaattaattacaatgttaaagaaagcaagatataatcctattctaccaattaaataaatgaaatgtcacatcaatgtttgtataaaaattactaggtcggtaacaagtttatatgaatgctaggcccatttactaaaaataaaataagttattattttttgaaagataaataagatacgtgaatttaaaggatgaaaaatctaatccaataaatatggctgaatcactattt

SEQ ID NO: 184681 - DNA, 394 bp, Glycine max
cagtcctttctatccaagctgtgcatggttgacatttatcaaccctaaactcacggtggtggggctgttacctgatacgttgccacgtgtatcagttagttaaaacagtttattatatgcgcatgtatctgttaatagttagctccttgtatataaaccaagtttgtaccattactgactcattcattcagagtttaatgaatcagtttctcacttcatattttactctcaaccttctttgttttcttctattactgcgaaagaacacctgagtgcatttggtagctacttattcattttctacacaacttcagcctcaacaaacaccagctcattttatcccatagaccccggaatttgacctggaccttagcttaattctaatgtgacataa

SEQ ID NO: 184682 - DNA, 453 bp, Glycine max
  unsure (1)..(453): unsure at all n locations
agctnccttaagaagattcctaaagaagctagagcttttctcacacacctttctaatagctaagctcacctccttgagatgagaaactagagcttagctacacacccnctataatagctaagctcacccccatgacaaaatacatgaaaaaacaaaaaaaagtccctactacaaagactactcaaaatgcctcgaaatacaaggctaaaaccctatactatagaatggccaaaatacaaggcctaaacgaaggaaaaacctattctaatatttacaaagataagtgggctcatacttagcccctgggctcgaaatctacccttaggctcatgagaatcctagggccttcccttggatctctagcccaatctacttggagtcttttatccaatgcccttgcggggtatgatngcatcacaaagggaaacaacatgttttaattctgtattttct

SEQ ID NO: 184683 - DNA, 389 bp, Glycine max
  unsure (1)..(389): unsure at all n locations
gcttagggatggaacacttacttgttggtgatgaacacaaacccaaaacggaatcaaaaaaatgcggaaaaggacgaccctagggctgcaaactcctcaatcccgtgggtatggcttttgaaaggggggaaaaaaatgttttgaatgcaaaaacgccccccctttcgtcattcttataatttggggcaggggtggctcgcccaagcgactaacttgcacatttttttttttttttttgaggggaacattaaccatgtcctctcccttctcatggattagcatcttgcctaacttgaacttacttaggttagaattaggcgttgattacttattnttttactttttacaacaaacaaaaagtaaaagaaagcggcanaatacaaaggata

SEQ ID NO: 184684 - DNA, 272 bp, Glycine max
gctgaaccacctgcactttgaggatctcagtcttggcacaccctggtactattctgggctcaatcaactcattctttgcacatgaaaaatctagtaatttttctaataacataaacatgacgatgagctttagccttcattgctttaaccctattcttttaaaggtccaagatacctcgccactactgaagaattgacagaaaaaaaattccaaacaattcatttacaaaagataaccgattatcatcaaaattttcaaattgatttatcaa

SEQ ID NO: 184685 - DNA, 462 bp, Glycine max
  unsure (1)..(462): unsure at all n locations
tctctatacaaaagttagtcgtataagacgactaacacctatctaactaactatcttgatcattctcgctactcctttggctatgtatttggatcaccgcctcatcctcctttgggaaatcaatctccttccacttctacatgatcttgtgaatgtatgaatacaacgttttgatgatgccaaagtataatcaatcaacaaggttgtttcaacaaacattcaaaggttaacattgctttaagattaatacagggttgcttcaacaaacattcaaaggttaagcattgcttcaagaataattcatggtcaaagaacacaagatcaagagaaagataacgcctcacacaatctcattggttgatcaagcttttgccttataacacattgtttccaacatccaagactctggtaatcaattaccaggcagtgtaatcgattaccagaagacaattntgaaacaaa

SEQ ID NO: 184686 - DNA, 386 bp, Glycine max
atatcttccacacttattggtgtgggccactctaggatggacttgagtatctcttggtccacttggaccctctttctaccaactacataacctaatataactatattatctacacacaaggtacacttatctatatttgcatagacggtgtatttcctaacgactgaaaagaacttgcctgagatgtactaagtgatcatctatgccctactatacactaaaatatcatcatataaacaactacaagtctacctatgaaatcccttagacatgatgcataatcctcatataagtgcttggtgcattaattagcccaaaaggctctacttaccattcatacaaaccaaacttggtcttgaaagcatatttacactcattaccctctt

SEQ ID NO: 184687 - DNA, 422 bp, Glycine max
  unsure (1)..(422): unsure at all n locations
agcctntacttatgtggcagggcgggctttcttcactttcttgtctcaaccgcgagcttagaccaccgctctttcttcccgcgatgcttctctttatatccgcctgagtgggtttatagcctaaaccatacttcccacgatttcctttggcatttatcaagctagttatgccgccgttgtctttgcctaaacccattccgggtgcgtaatcgttcccaacataactcgggccatcattactgctgcatcggacaggcaagcttgcccagagaaggagtccacggaggaaatgcttaccacctcaaaagactggagagcggattctaatgactcctctgcggcttccacataaggcatacaggatgggcagctcaccaagatgtcttcctcgcctgatacgatgaccagatgcccttccacta

SEQ ID NO: 184688 - DNA, 447 bp, Glycine max
  unsure (1)..(447): unsure at all n locations
tctaacaagcttgagtaataggacatctgattaagatcgatgcttaccgactgaatgaatttcttcagactccagtggtgttagaggagggggaatctttacccacctactctagatnttgcacgttgaggactaaccaccaggagattaaagataggctttgtattccccgcaaggggtttgatttgaatgctaagggctagccatggaaacttctcataaaagattgatgacactggcctaaacatggagtgtcttctcttactccaacctatctcccacatcccacacctcagaattgaatatggatagagctacgttggtctatggcttagtgactaacatggacatgaacattcgagcccttatattatgtcagaattcttctattgctcagagtaactcctctatgcttggatttctagcactgatacttgccctatgcag

SEQ ID NO: 184689 - DNA, 422 bp, Glycine max
  unsure (1)..(422): unsure at all n locations
gcttgtctttatattgaaggtaataatatgtttntattcctatcaaagcttgatctccatgacatgtttctacctctacgtataattaatctttcatagattaatttaattatatactctaagtcattagtaacattttaaaaccctgccaatgtctactcagacgaagcattctacgcagaagattttaaataccctcccaaaatgaattacacaacgctgcaaactcgatatccaaactcaagtttatttaattattttcaacaacaccattttgttttgaaacagaatttcaagaacaccaaatcctaaaccaaacaggcactacttgaatntctgatgtgttgaaataaacaaaagcaatgcgttatgacttatgatggccgcgctctatttgcataactggttaatgaatagtggaa

SEQ ID NO: 184690 - DNA, 448 bp, Glycine max
ttgggtagagcatgcatgtgtaagagccaaaaatggctgtgtaatatacttgtaactgcgaaaagattatggaaacttgtgtggtttccaagaactggacatagtctccggtttgataccaaccggtataattctttgtgtgcttctttttattgctctaactaacacagggtttgaatctgtatataagtcttatatcttgttttattatacaaagaatattgtcttttcattgtctgataaagtctgatctctaattgtttctctccataatgcttatctacatcagacgataaatgtatgttcagtcttagaaaaagtttataattttaaaaacacaattcaacccccttcttgtgttatttgtttctatagtttggtatcaaagctcatcatataaggtgtgagctcttaacaatgtgtagaggaatatatccaaatggcagat

SEQ ID NO: 184691 - DNA, 455 bp, Glycine max
  unsure (1)..(455): unsure at all n locations
agcttcttagtctcagctgatgaagatgaattcgtggctatttcatgcactcctctaatgacaataacatcatttctggcactaaattgttgggagtttgaaaccatcttctcaattaaattattggcttcagcacgggtcatgtctccaagggctccaccactggcagcatttatcatacttctctccatgttactgagtccttcataaaaatattggaaagaagttgctcagaaatctggtggtgagggcaactagcacatagtttnttaaatctctcccaatattcatatatgctctctccactaagttgcctaatgcctgaaatatcctttctgatggccgtggtcctgaaatagacaatatggaattctttcagatgtttgtgcgtgtcttcacctgcaaggccatgatactttggaagcatatggatcacgccacgtttaagaacatat

SEQ ID NO: 184692 - DNA, 423 bp, Glycine max
  unsure (1)..(423): unsure at all n locations
ntcttgagaaaacttcctggagaaactcctttgagagaacttccttgagtttctagagcttanctacacacacccatctaataactaagctcacctccttgagaagctagagcttagctacacacccctataatagctaagcttaccccccataacaaaatatatgaaaatacaaaaaaaaattcctgctacaaagactactcaaaatgccctgaaatacaaggctaaaacctatactactagattggccaaaatacaaggcccaaaagaaggaaaaaaaccaattctaatatntacaaagaagagtagatccaaccttgacccatgggctcaaaaatctaccctaaggttcatgagaaccctatggccttcattagtagctctgtgccaagcctcttggagtcttctatcctatacccttgg

SEQ ID NO: 184693 - DNA, 453 bp, Glycine max
  unsure (1)..(453): unsure at all n locations
agctnnttnggagaagaaacatgggaccaactcattttatttcaaaaagncgcatctaggcaagggctgggagaccatacaaggttcctagcgatatctaattatgggggtcataaaggctatcatatgctgacaatagccgagaagcccatgaatttcttcgggggcggagtaggtgaccgccatcgcctaggccttggctaacaatcggggaagttctgactcccggtcatgggaagagcaaaccgatccatccacaagggtgcctctgggagtaaagaagcgatcacccttcctctagcccctttttccgcggatacttgagcatactcgtccgcgaccctatgctcgtgggccgaggctagacctaactcttcttggacttggcgatgaagctagcatgtaggctccggctcacataaacgctgagacaactcctttgggacctagaca

SEQ ID NO: 184694 - DNA, 402 bp, Glycine max
  unsure (1)..(402): unsure at all n locations
ttaacctataatgcagaagctattaatcacaccagggtacctttttgctcctgtactacggaatataaaactcagcatnttggccgctcatataactccatgcatatgttatgccttacacaccaggttgataaatcagaactgagagattggcaaatcccaacgctttaaaccttactctccattgtaggggaagatcttctcacaatgcatgcacaaaaagatgacgtgctcaggttgacttcttgaatgcggataaaacttgcacttttgcaatatgtcaaaacacccctacatatgcacttatggaataatgtcttaaaataacaatatgacaaatattaagtgtatgcatctcgcacaactaataatgatataaatacctttgatggcgacatatgt

SEQ ID NO: 184695 - DNA, 402 bp, Glycine max
agcattcatgacgctactgtgatctttatcttgagcgcccttcgccggtcttcatctgttcttcgtcgattggcgatcttcaaccggttatgttccacgctagaaggtctgaattcactctatgcacccttaggggtccactctcgctttgtatgttttcatcttcatctcgcctactttcagcatgtttttccttccttctaaccgagctcaaccaatcgtttgagcgcgaatctcacttaatcaatattaaaatgaatttcacgcgaccatttgtgccgcattctcggttaatcgcctataaaaacacaatcaactgaccgtgcacgtgtgaacctcactcagtcatcaaaaggccaagtccaacccatacttactctggaagccctttttaatgagttg

SEQ ID NO: 184696 - DNA, 358 bp, Glycine max
  unsure (1)..(358): unsure at all n locations
acacaagcttgtgcctattgacgtctgggaatatgagatgacgcatatattattctatgaccccttaggtggcttngatgataacatgtatatcgatacaagcttcaataggagtcttgtcttgtacagacttatcatgacatctgatgagtatgtaaataacagggtagactgcttcaacccataatgtggtaggcattcccttatacttgagcatagaccagccatctgcataactggcgattcgtgctctctgacactccattttgttgaggagaaaatgcgactgtacattgtctctcaatgcctttatccttacaaaactttcacacgtacgagatgagtacactatgccgct

SEQ ID NO: 184697 - DNA, 348 bp, Glycine max
actaaaataacagcttgcatatcactccataccaactgtggatttattctgatcgaggattctccatgacttaagaaacatcattgacgtgacaatgggagggtaagacaataggtataaggtctcctacaagtccggaaaaacaacttatatactcgctggcctataatacaaatcttagattatactacttgttttattacagacacaatctaccaaatcggatttggtgccctgcaatgaaaatgcaatactgttatcgaacacctatctccaagatcagatgctttcaacgtgcaaccgttgaactcactctcttgtactacttcagtatcggctgtgagactt

SEQ ID NO: 184698 - DNA, 415 bp, Glycine max
  unsure (1)..(415): unsure at all n locations
agcttantaacagttacaaaagtctttattttcgttaataacaatgatcatttctaccttacctattttccatcatggccttggtttgtgggtttaaattgccaccagagtcctaaatagacaatatctttcattgcaagtttgcaacagtcccaaaacccaatttttgccgaaaccaagtgtcatgatttctataataccaattttgctaactgtgatgttgcatcatagttttgctatgtcatctacctttggtctcatctctttaccttacaatttaggcaattctatcattagcctttntcaatatatagaattggcaacatgtaaacatatctaatccagaaagtccaccacttatagccagcctataatccataaccaatgaagccccccatctccaatttattccata

SEQ ID NO: 184699 - DNA, 332 bp, Glycine max
tcaagaagcataggactccattgatgaagaagatcctatgcctacatgctccacatggaggtgcatcactcattttcaagggttttttataggaagtgtgaaaacaccctatttcaatacccacatcacatgagacactatgagaagctcacaataattagcacaaaggcttataagtcatgattaccttccagaagcttctaaagaaagaatttgagggattgttctcaccaaatccttgaggtggattctgaggattctgctccgattaaaacattcctcttggtgtggtgggtcagaggcaagcaacaatggctcgtggtgaccaccca

SEQ ID NO: 184700 - DNA, 466 bp, Glycine max
catgtcattttataacatgttacagaaaatagtattatgtacaagatgtatctcatatgcaattattgcccaatttgcttaaacacagtgtatgattacccatgcggataattggaaaatttgaaatgagcataacatcttggaattgacgtacaccatattgcatataaatatagacttgttatcgctatctctattgtttggcttaaatggaaaaagagtattcttcttctgagtgttcttgcacggctatgcatatgggtgaggttgatgaactcactcataatgggaccaattcggcaataacggaaccacacatatatatggtgtatacgcaatatatgcgcttcaaagtgatgctaagatatcactctttttacatgtatgttactaagcgagtattgcatatgtttgttatttctatggctagatacaaactttatcataatattacatttcgcactct

SEQ ID NO: 184701 - DNA, 394 bp, Glycine max
tttctctacaattgcatcacctctcaatgtgctggtgaagaagaatgtggcatttacctggggtgaaaaacaagagcaagcctttgctttgctcataaaaaagcttactacggcacctattctagcttttcctaacttttctaaaacttttgagctaaaatgtgatgcctctggagtgggagtggagttgtattattacaaggtgggcaccctatcgcttattttagtgaaaaacttcatagtgccaccctcaactaccccacctatgataaatagctttatgccttaataagagccctccaaacttgggaacattaccttgtttccacgggaattgtcattcatagtgatcatcaatcacttaagtacattagagggcaaagcaagttaaaca

SEQ ID NO: 184702 - DNA, 406 bp, Glycine max
  unsure (1)..(406): unsure at all n locations
agcttctaggatggactntattatctncatattttgccatgcagcttcaccaaagaatatggtgtcgtctgcatactgcaaaatgttaactggtatgttattctttcctacgagaaagctactgaagaggtttttgtccaatgcttctctcatgaggccagttaatccttcagcggcaatgttaaacaaaagaggcgctagtgagtcaccttgcttaagcctctgtgaggtatgaactcatttgtggggctgccattgaccaatacagagatcatggctgaagtaagacatccttcaatccatcttatccactttgaacaaaaacccattctcctcatcatgtatgataggaatgcccaccagactgaatcgtatgctctttctattgtcactttaaacaccatac

SEQ ID NO: 184703 - DNA, 408 bp, Glycine max
  unsure (1)..(408): unsure at all n locations
tgttaantccatatgaagctacngacaatgtggcatccgactgctctcttctaccgactatggcatcactcgctagtgcataactgcggggaattggatgccaactcctcacctgaatacactggctttgcgaaaatacgtctccgatggctccatcaccggcacattctataatagctttctctatgtaccggagcgctcataaaacaatcgtatatacaactgattgagatctgatggtgatggaaactgacgacatttttttatnatgtatctactgaatggtacaggctctcatcactgagttgctttatacctgagatatccttgctgtaggctgtgtgccatgaaacctggaaaatctttgctgagaaaactatctacatgtcatacctactcgtgatggac

SEQ ID NO: 184704 - DNA, 485 bp, Glycine max
  unsure (1)..(485): unsure at all n locations
agctctagagacgtgagcatatacagatcaaagctgattggacccttttatttaatattatctagattcacatattatctcttcaccatcaaagttgatagtgtcatcaagatggtgatcttcatcatctgaacttgtgtctaatgctgattcatcattactggtggacgcataaaccattagacatagatcggcttcttcctcactgttctcactatacgatgaatcgtctggtcctcctaactgctcatgacgcttttctttttggactcaaagaaaatcctcttattatcctttggcctttgaaggtaacgacattctggcttgaagtgcccaccattcttgcactcataacatattattggactattctctctcttgtagaaggatctcttggatgaattgttgaacctacacgagttcttgttctttcacatctntctgatctttctggtgatcagacattactcatactcttggtcatt

SEQ ID NO: 184705 - DNA, 175 bp, Glycine max
acactttatctttttcatacttacctggatgtttatatacacttaaaaatcctcgaccagtactctaatataccatcagatatccgcaaaccctacttctttttacctacaccatagtgtgttgtaagacacgatctataatctctacggcccatatccctttgataaatatgga

SEQ ID NO: 184706 - DNA, 442 bp, Glycine max
  unsure (1)..(442): unsure at all n locations
tgcaacttataaanatgaattattcaagaaatttacaatttcactgattcattgatatatttccttccacatcacaaaattcatgacttaccaaatataaacaaatcaataacaacagccgtcacacactatgatttaactttgcaggtttaccatgcatattgtactgaaaaaaaaataataaaccaattagggcttgccttatccttttctcacatttagttataacagtaaaaactgtttgctagaataattccacaccagtcagcaatcaatttctcatccaaaagctagtaagttttgaaatttctttccaaaacaagttagaggttttctcatcattttcttacggtttgatcttgtacaacctctcccacaattctacaccctattggccttctctatgccttgcaccatcctcaatcagctatctgagcaacct

SEQ ID NO: 184707 - DNA, 368 bp, Glycine max
  unsure (1)..(368): unsure at all n locations
aatagacatgctcatatctttgaaaatactgcatatcaccgngaaaggttgttggttgaagcattgcttagtcttctctgttcatgtgattgatacatttgaaacaaacacaattttggttaaccattgttgattcctttcacttgaggacaagtaaatgttatttctttgcttgaggacaaacaaaattgtatattcgggagagtttgtcagttgctattcatgagttagtcttgcattggaaattggaaagacaatagcaatgtgcctccaattatggttctttgtggaaatgatatatatttcccttggtgattatagagtaaaactcattttggacctatttgaatcactcatttgtagccaaa

SEQ ID NO: 184708 - DNA, 440 bp, Glycine max
cttcatgtcttagcaaagctactatgccccatcttttgttgcaactttaaaaatcttttgatattgagtgtgatgcttcaaatgttgggattggggctgtattgatgcaaaaaggccatccaattgcttattttagtgataagttaagtggtcctacccttaactattcaacttatgataaggagttgtattccttattacgggctttcaaaatatggcacactacctttattccaaggaatttgtcattcatagtgaccatgagtccctccaatatatcaaggggcaaggcaagcttaacaaaaggcatgcgaagtgggtggaattcctacagcaattctcttattgtttcaaacatcaaaagggaaaaggtattattgtatccgatgctctttctcggcgttatgccttactttctatgcttgatacaatattgattg

SEQ ID NO: 184709 - DNA, 470 bp, Glycine max
tgttctggccatgaagtgcatggaacttaaggagttctgtctcctatgtattggcattccgtaactctgatataattgcgttttccacttgagtgtaaatatgataatgtacagctggcagtctagataaggaatcagcaacataatttgtgttctcgggacggtagacaatgtcaaattcataccccaagagattcataagatagtattgctagtcgggagttgtatcacttgcgacatcaactctttcaagctcttatgatctattttaatggtgaattatcttcctaataagtaatgttgccatctcgcaacatcctgcgtaatagcatagagttcacgcgcataactagatgcgttgctcatgcggcgtgaaagcttcttactaaagaaagccaatggatgaccttgctgagtaacactgcaccaatttctgtagtgctatcatcagtctcgacctcaacggaagc

SEQ ID NO: 184710 - DNA, 170 bp, Glycine max
accaacccggcccctacaacaagcaagacaaggggaaccccccaccagcgggcacccccaaacgaccggaaaacaaggcccatgacgataggacccacccacaacagagccggaccccctttatgggaaaaccacgccccgaagaagggaaacgccccacccagcaaagc

SEQ ID NO: 184711 - DNA, 311 bp, Glycine max
ttgtaaaggatgagagaccgagacatcaccacattttttattttattttatcgggtaaaatgattttttttttccaattttttcaaatatgtgattttacctttctattttttaattaattgacacatctcatttatttaaaaaaatttacaattataatcccctttggcattttaaaattggcgagggggaatatttaataaattaagtttggaaataattaaataatttaaaaaaatattttcatttggataataaacaacctcataaaaaatctaacacaaataaacgataaattaagtttacctatt

SEQ ID NO: 184712 - DNA, 269 bp, Glycine max
  unsure (1)..(269): unsure at all n locations
actatataaactctagcctaacgtttaaactaataacatcgcgtgagaagacaattctattctccacanaacatggatagattcctggtcccatgttagatatccctatctgcggcaaaccaacgatttaattcatgtgtcacacgaacggtttcatgaccaaattttccctcacacaatctaatgtgatgtttggaagttgtaacaaatatttttttcggaataataaaatatattttatttcttcaaatacatattcgcactgagct

SEQ ID NO: 184713 - DNA, 457 bp, Glycine max
  unsure (1)..(457): unsure at all n locations
tcgacccggatccttaagtcacctgcggcatgcaagcttgccgccacggagttttccgactatgttcttgtgtggnggaacaagctacaaaaggagagagcaagaaatgaagagcctatggttgatacatggacggagatgaaaaagatcatgaggaagcggtatgtgccggctagttactcaagggacttgaaattcaagctccaaaaactaacccaaggcaacaagggggttgaggagtatttaaggaaatggatgtgctcatgattcaagcaaatattgaagaagatgaggaggtaactatggctcgatttcttaatggtttgactaatgatatccgcgatattgttgaattgcacgagtttgttgaaatggatgatttgcttcacaaagcaatccaagtggagcaacaattaataaggaacggagtggctaagaggagttttaccactttggt

SEQ ID NO: 184714 - DNA, 337 bp, Glycine max
tcatatgtatcatatcttatacacacatgttcgattcatgcgcataatatttcaagacgctataatatgaacatcaaatgcactccaagaattcaaatggtcataacctgtcacactgatgtccgattcatgcgcataatatttcgagactctcttatattatacatcgaatgctctttagaaattcaatggtcataactcgtcacacggatgtctgatacacgcgcattacatatcgtgacgcattaaattgaacacctgaagccctcacgaatttcaaatggtcataacttgtcacactgatgtctggctcaggcgcatcatatatctagactct

SEQ ID NO: 184715 - DNA, 383 bp, Glycine max
  unsure (1)..(383): unsure at all n locations
tatgatggtttcatttttcaattatgatttccttagctggtcaaaaatttcagagtacatgtcaatttatggcaaatgaatgcaggactgctaaagagaccatgcaaaggtttaatgccatcacttgaatgtcttcccaattttgccagatcatctagcctctgcatcttaagtcttaaccaagaaagacttggattttctttttagtgtcaaaaataaataaatgatgaggtatataggttactataggaatatttcattaagaagaaaaaaaaaaggcctgttcatgccaaagggcctgagacaccaacgtgaacctcattatcgtcaaaagaaagcatagcacacgtantgtaaattgcttcagtagttcacttcagtaa

SEQ ID NO: 184716 - DNA, 460 bp, Glycine max
cacattctggtcctttcttctttctgacgcacaaaaccctaacagagcaatcagaggaggagctctagagagcaccagagacgccaccattgctaacagagaacatttaagcgactacctcgaggtaagggatgagttactcacgcttggagattataatgaacatgtgtagggatccctagaggatcaatttttgggttattttgggggtttatgaatttaattatgttttcatgtttaatcacggattgagtgtgtttgatgaaccaattggtgttctgttgcgagtttgttgtagaattgatgtgttctgttgcgagtttgttgtacgaatgatgtgtttctgtgttacgtgtgtaccttacgaattagaattctttataattagcatacaaattgtgtggtggtgaatttgtttataccatatatgatggcctttcaatcttgttcctgtgctaat

SEQ ID NO: 184717 - DNA, 248 bp, Glycine max
  unsure (1)..(248): unsure at all n locations
tcagttgcttactgctntgataatgatatgcgtgttatatcttattatgtgtgtttctaagattgatcattctgtccataataaccaagacactaattaggagtcaaccattttatttaacatcatggacaatttagtaacttacctactatttgttttttccaactcccattaaccatctatgttctttagacaatcttatgtcatactgaagccctgaattataagtatgattctcatctttgact

SEQ ID NO: 184718 - DNA, 434 bp, Glycine max
agcagcaagctgagcttaaacttcatctatgagcttttctttggagacgcgcacaaccttatcctcacaaacagagaagccgttttctggatttgaattcatgaccttgaaggacacaaacctacaacctctctccattgcttcaaggcttaccagctaccagggaagctagtataagcgcgcatctggaggagttttattcacagcttatttgaactaacttagaacataaaaacttgtgtaagtgatcaagagggcttacgaaaacaacatgacatgtatatatactcggttcagcctattccaatacactctactggatagtttatgaaaacaacttaaaactcggatgacacataactcgtgccataagtgggaccgcgaaaaacaataattcacaagcccgtcccagtgcctatcaaaccgcacctcaa

SEQ ID NO: 184719 - DNA, 332 bp, Glycine max
ctttacaacgatgtctgattctggggccacctatacctttatatcctgttagtgtgtacgaaaacataagctttctatgtcttctttaaataaagatctaatactacagaccactactactggttctgtgataactttcgatgtgtgttcaaattgttctgcggagaatttaggaataaattttttattgatttgatctgttgcctttgagccacaatgagttaatattggtatggacaggctatcttccaaccatgtcttattgaactgtcttgataacagtgtcgcgcttgaagatcctgcagcgagtaacgatatgatgctattttttg

SEQ ID NO: 184720 - DNA, 410 bp, Glycine max
  unsure (1)..(410): unsure at all n locations
agcttatagatattntcctgattgcgccttcagttttgtttanttntcatacatccaaagttgaacttccatgctattcgagtaatagatgagatgaagacatttacatctctagaacgatatttgcagccaaaaaatagatatgatgatcaaaagtgaaacttccatgcttttttgggttagaattatatgtacaattctgtttgagttgaatatctttagaatatgataagattaaatttgctagtgagtttcttttttccatatagttcaaatctatgtgtgtgtgtgtgtgtgtatttgataaatgtcatatccatgaatgatttaggtaaaaagagaaccagaggttatacacatatgctagatgtgtgggactcgctagatggagaattcatacttgttgaagt

SEQ ID NO: 184721 - DNA, 447 bp, Glycine max
tataagctatagagaaagccttaatggaagaatagaatgagagagagagacggggcgggaggcaccaaattgaaggagaaaaagagggagagaagttgaactttgaagtgtctctcacaagtttctcattcatcaaagttatgacaaggggtacacatgtttctatttatagcctagggcactaactaaatgaaagctttcttgaaaactttcttcagaagctagagcttagatacacacacccttctaatagctaagctcactcccttgagaagctttcttgagaagctagggcttacctacacacacccctctgatattaagcttacctcctcgagatgagaagctaaagcttagctacacacacccctctaatagctatgctcaccctcatgccataatacatgaaaatacataaaagtctctactacatagactacttcaaat

SEQ ID NO: 184722 - DNA, 414 bp, Glycine max
agcttaaactaccaaggaacaagcttagatttcctgttacctcgaagaaaaccatgaaggtcagattgtgcttcattctcaaccgaaactgcgaggcaagtttaaaagataccgctccgatggaaggattcctctcggtgtggggtttcaacggagaactactgccttttgtggtggctactggtggctgggggtgatggagaagaagctaggacatcccaaatggttttggaagaaggaaggagaaggaaatggcggttttccaaggctacacgaaaagcagagtctgaaacactcaggttctcctgctctcgacattggaagctttgatcacacgactgacatcaaatcaaagatcacaacagtcatatcgtggaccgctgcctatgaatctgtgactgaatttcgagaaat

SEQ ID NO: 184723 - DNA, 307 bp, Glycine max
  unsure (1)..(307): unsure at all n locations
atgagcttcacatactctctcctttgagtatgcacgtcattcctcacaagctcttatgttccacgcaatcgctacccacaccacaatacatcgttcgntgtccttgttgggtagtgagaagtgatcatgaaggcgcatacctgcttccggcgagatcgggaaaaccgattttatgcccaactaccaatagcaagctttttatactttcaccactgccttgtgtgtgagaaaacaccgattcatggtctcttcacacctattacaaaaaacacacttgcgatcctcttcatctacaatgacatgtctt

SEQ ID NO: 184724 - DNA, 447 bp, Glycine max
agcttcacacggtgtcatggggttatgatttttcttcttgaaggcaagatttgggtggagtgacaaaagcttcactgaattgtttatcgtgttgaagaagatgcttcctaaagataacacattgccaaaaaatcaccacaaagcaaagaagatattatgtcctatgggtatggagtaccagaaatacatgcatgctttaatgattgcatattatacaaaatcagtttcccaaaatgcgcaagtgccccatatgtgagttatcacaatacaaagtgaatgatgacgaatgtagtgatgatgcaagcacaaacaatggtcgtccgacaaaggtgtgtcggtatcttacaataattttaaggattaagtgattgtttgctaatggagatgatgcaaaaaaccttatatggcatgcagatggcagaacaagtgatgggattctttgacatc

SEQ ID NO: 184725 - DNA, 382 bp, Glycine max
ccatgccctcctgatctccaaccgggaaattggcgagtggaggaacgccctcgtctttacgcatcaagcataatgtcaaccttcacggtcgaaaagctctatagatgggcctaggctctagagatttcattatgtgaacatcagtgtctatttgtacatgaagttataatacaaggatcttacgtcatctgttcctagactccacccactcacagtcatatgcatgctcacttcattttctagaacggcagattcgatgacgagtcccccgaacgcactaatacccgcgacccggctatcaacttccagccgaaatgaatcaaacggaccatgaatgagatgaggatgtggcactatcttccgaactagagagaatggtcgc

SEQ ID NO: 184726 - DNA, 149 bp, Glycine max
caaaaagtttcttacaaggcacctaccagtgtcgcccccaggaaacgttagagcacgcagagcgtggtatacaaaaacctggctaaggcccaacgaatgagaaagtgccaaccagaattaagcagactcaggcaggcaaactcgagcgg

SEQ ID NO: 184727 - DNA, 355 bp, Glycine max
tacttataattcaccaacgccatgcaataattgttttagtacgatcaaactaattttccttgttgatttctctcaatgatatgtttaccatctaggtcgcctttggtatttcgtgggaactcaaccgcctatgtgttatggtcaactttggcctgcgctgtgttaagagcatatataaatttatcagagcttggccgcaaaataaaaattcctcgtacaacttggattatatacaatattatccgacatctgccataaaagattaccggttgctgtttccctataagaattaccggatgatgccattcgaacattttcttatcacatcatccaaaaattattcatggattgaaca

SEQ ID NO: 184728 - DNA, 362 bp, Glycine max
ctgatcatccaccatctgcgacaccatcttaatagttatttttcttattataatattataagcactttgagttctagccgtgaatttggctatattattataacatttgtacaatttagtatatctttatttgcatggtgtgttcgaataattatcaattatgttatatcgactatgtcgatatgttctatatattctgatctatatatgtttcttgcttcatgactggttattatttccatgatcgatgtgtgaatgctaagctgcatatgtatgttacaaacatgttacgcacttagcgcttttgtagatgccaaatggggagagaacaatggattaaatcaacaactcacatgagtgat

SEQ ID NO: 184729 - DNA, 456 bp, Glycine max
acggacactaaaacactcacgctgataaatattaatatttgagtgttgaatattgagacaatttataagttatattcagaagggtactaaatccttcccttgaagatttgctcattcaatcatgtgggaggctagaatccttacctcttcattttctccctaaactaaaggtcccgtttgttatacaaatgcgatatgcttaatctgcctgtgaacattgaaagcacaattctaagatggaggctaaacttctgtatctggagcatattccaaggcaacaggcatagcctcattggatacaaggtgctgctgacactgtgcaaacgttgtgaattttataatgtcatagccctacaatgcttcctgaatggttgacaacaatgactcgtcttaagacgctccatatatgtaacctgtgctcaactggtgtatctcccagtgacatgcatcacctca

SEQ ID NO: 184730 - DNA, 361 bp, Glycine max
  unsure (1)..(361): unsure at all n locations
aaatctactatctcattagatacattgacattgaaatagtcaatgaatcttgagtctagcataacatacaaaaactcataatcaactaaccaaaaactcttcaactcgatgtcttcaatcaaaagtacccaattcatttgaataccagattttagaccatacatatttgtaaatcatcgtcactcacctgtgcatgattgctagacctcgatgtgagaatgtaggttatgaggtacacgagcattctgtcttcagcagttaaaccacctacacctaggtgattccttaaattcctcgttgggtcaaggagcatacatanttaagtttgcatcttggtgtactcatcaatagattcttcaaa

SEQ ID NO: 184731 - DNA, 348 bp, Glycine max
tgaaatatgtagaacatgattatcaatcacgttatatgtaaatactaagtttataggcactatgctttatagaagatacttatcacatttcaaaataaacatgggatgtgagagcttgattcaatatgtacatgttttatgcacaaaacttagtccttttgaccgactaacaatccgcgcatggattgtctgtatcacacccgatctttatgtatgctggtctctcaccactctcttcatgaaagttgacctgactgtacgatacaaggtcaccgcatgtgtgttgagaacgggatagcatatagggaacaactctttgctgggatggttagggcatccgttcattgg

SEQ ID NO: 184732 - DNA, 342 bp, Glycine max
cgctcagggagaatcccgcgcaaagctggcgaaagacgccatattgctaagcccaaatgtcgccacactcaatgcatgagcactaccatacttgctaagcccagaagggaacgcttagcgcgagggtgcgtgaatattaagccaccttaggcgtataaaaggagtaggaagtaaaggagaagacacaccgagacccaaagctctctattgaatacacccaaagcctaagcatctctaatagggaaaaccctgtgtctttagacattcgtccctccgctcacccattatacatccatcttattcttttatctccatcaacccccaaagagtaaagcctctcat

SEQ ID NO: 184733 - DNA, 358 bp, Glycine max
ctacgcttagcaaacaaatgaagacatctatatccagacacacctatcttatatcaagctctcaacacataatcacgccattcgtcttcaatgaagagatgcgaaatataacgccctgtctcttgaaatatttacatgtatgccactgacctacatccactttctcttggatcataatagcgagttttacattctaagcaaaattaagaatggagatgcaaggtctccatgtacatagtctcatgagaaataaaactattaacaacagaatgattttatactatagcatacaacgcggaatacgtacaattcagaaatcattaaacagcggggatatcataactctttcaatataact

SEQ ID NO: 184734 - DNA, 364 bp, Glycine max
tctccacgacgtgatctctactatgataccggtgcgtgtatcttatctctatcgttacagtgaagtattctcaattaagcttattaaggaagttctctcaagaaagctgctcaaggaagctacctaatttataaatacaagcatgcgtaacacttgctgtaactttgatcaatgagagtcttgtgagacacaactcaatgttcaacttctctccctttatctttcttaaatatcatgctcccccctctctcttcactccctctttctttctctccattgaagcctcctctccaatcttcttttccaacgctcatactggaggtaaagctccttctccatggcatattccctagtggatggcacc

SEQ ID NO: 184735 - DNA, 357 bp, Glycine max
gaaggttatcctgcccatggatagtaaggatcgagccttgggcaaatggtccccaaattgggaaggacccgttaaaataattcacatctattccaatggtgcttatgaactagaggaattaacccctcagaaacgtactttgagtataaatggcaaatatttgaaaaaataaaccaacattgctcgaagttaaaataagcctagaataggaagaaataatggaaacataaaaatggcgataacagtaaaatcgccacgaaagggcatgtgtcaatattacatcgaaaagtagaatcgaaatacagaattcgaataaagaaatcataagttctactaagtcatgacccaatccccata

SEQ ID NO: 184736 - DNA, 481 bp, Glycine max
  unsure (1)..(481): unsure at all n locations
ctcccattcatggatcgtattagtctaagcagaggcaaccactttgaaatgcttgcattgatcaattcttcaaagatgactcatagtcaagcaatgccttaaaatgtgggatgaaataaagctggggagtgacaatccacttgttcaaatataaagctaatcccaaaatgacaatgctgtcctcacaaacttgatcattgacaacaatttctaatcaatcccatcatggccatgaaaagtgttagtgacttattctgagcacacacaccatccgtgaaataggtacattcaatattcttcacagttgactctaattcaagcaatgccgtaacaaatgttgtggaattccatgttaatgactgttgtatgtgaaacctgtgtgttagaataatagaagtgccaactntgttgtttgaccacaacacactacttaaacttcagttctcatttatcccaaacagaatattatctctctctaaaa

SEQ ID NO: 184737 - DNA, 496 bp, Glycine max
  unsure (1)..(496): unsure at all n locations
aactcaagcttctccaagttcgatgaatgcacgtcaaggtcttgcttttatatactcttcatgattgataaaaaaaaccattggatgagttataaccttgagaaaattatgtcaagagctacatctcttgacctgttattcaagacttgtcactggtaatcgattaccataaccatgttatcgattacacaatgcatattatgaaaagaagtgacctttcacaatcgaatntgatctcaatgttcacatacactggtaatcgattaccaatatattgtaatcgattacacaacttaaagatcatttggaacattgcacatttagttaaaaaccttctgagatcaaattttatcactggtaatcgattacaggagactggtaatcgattaccagagagcaaatactctattaatttacaaaaatctgagaaaactcttatgtaacacagaactgcgctatggttggttattgaaaaatcctttcatacttccctgtg

SEQ ID NO: 184738 - DNA, 461 bp, Glycine max
tcttaccgtgaagatcgaaaatatttatgatcgtctaagaacggtctacacctttgcgacattcctcacggaaacgtttctgaagcgcctctgcttgaattttcttcacggatacaatttttccaagcatattctaaagagagagaagtgcctaaggggctgaaccctttttcacttcacttctccccctatttatagaaaattgggggagagcttgccacccagctcgcccaatcgagcagggttgtttcctctagaagcaacagccttctggaggaatcttctggagggcccaagagggcatggttgctatttgcacccccattcttactaagtacactctcccctgccttttttggtgattctgttttcgtagagtacggaaactaccaattcctaacgatacttgtattttttcgtaagttacggaaccctgtggatacatatccatccctattgac

SEQ ID NO: 184739 - DNA, 398 bp, Glycine max
  unsure (1)..(398): unsure at all n locations
nagctttataagctatactgtaggcatatctttagtcaatgtgagactaaccaccacctttgagggtgcaattaaggcatccccaaagaggccacaactaaggtgggctaggggcgaccacaattaaggcaaatttctaacaaatctcaataagctaacacactttcatgctatntcttcgcatatgagagtggaaatatactcatgtgggcccactgtatttaaaaaaaaatctctcctctgaattctcgcttaaccaaacaagtgaaatatgctgcctcacacctatatctcttcctcttcgccatttctttactatatcagacataccatacagagtgttaatgtattaaactaatcaaaaacctttctccttcatcatattcgaaactcgctgg

SEQ ID NO: 184740 - DNA, 264 bp, Glycine max
gacctccatggaaaaactacagggataatacgtctaatactataccaggttatatagttcatgcactgccgcagaatgtagacaatatatttgtctgttaatgagatcctacatacaagagtgacaaagagatgtaagatatatatgaagaaaattatcaacctttgcaggtaatattcgtatcctcacttatgcatgttgaaaacttcatatattcttgatatccttcaacttggggtgaagcctaccagatgtgacatacat

SEQ ID NO: 184741 - DNA, 421 bp, Glycine max
  unsure (1)..(421): unsure at all n locations
agctntttggtcaaaaggcttgtgtatgttttatcatggccttcatcatgtcctcatttatacatttcattctaaaatttagagattgatgcaaagattattactcacaactagtcgttcactcacagtttaagttcacactctcaccggttttggttcgagcttttctttctcaattaatttgtctactgactaacaattctaattgcagttcacattcttgttctttctttgtctaacatacacacttgttcaaactcatgataaggaacacaactctatcacaatcatgcattcaattcaaaataaaagcatacaaccattttcacaaatcaataaaagtggttcactgccatatcattaanaactaagttaaactattcaaaatgcttcagaataagtaaatcaactaatcataaat

SEQ ID NO: 184742 - DNA, 304 bp, Glycine max
ccatttttattgtcattatcagactgagaacatccgttcctgcgatctaatattgccatatttataatgcgcataccgaaaccctgatttaacgggcggtagtgacgcttgcctggcttgtacaatcggaatctgactccgtcagcaagcaacgatctccctggtgctctgggtaaagcatcacttctctactttttcgggtactggctctccccaacctatctgggcgggtaactaattttcgactgcagaagtactgggtctctcctaagcgaacactctttgactgacgcacaattcttca

SEQ ID NO: 184743 - DNA, 430 bp, Glycine max
agcttaacttctgcatcaagcagtttcttatcaaccgccaaagacttctcttcaattccatcaaccaatgcattagcttcagctagctttgtatgagagaaagactggacttgggcatgctcttcttgtattgcacgcagagctctctcaagctgcaattgattgatttccaaaacatcaacatcaaatcaaggaacatctaaacagacgtctcaagcacaaccttaacaaatccaaaaatgccgtacaaatcttgtcataaaattgaaatagaaataaattgataaggtattgaacaacatgaaaatccataagagaacatgtatcaaggtaaaaaatttaaggcctacttggtttaagaaaataaggtgacacttttctgattattagtataggcaggagccaagaaacaaaaacagataaaattatg

SEQ ID NO: 184744 - DNA, 475 bp, Glycine max
  unsure (1)..(475): unsure at all n locations
taaaaagtctagtttataaactcattaaagtataaatttatttcgtgtntaaaggctttattaaaaaacttttaaataggttatcatgaatatatattaaaccttaaaaataaatttattatacattagttagattaattcgactcttttatagtctaacctacttatttccaccacatctcatgccttaagtaataatagtgttgatattcatacttatagtttgttttgtataaaagaatttttcattaacaaattagtcgattactttatttaggaatacatgacatctatataaaatttttaacaaaaactagacatttaaatatgctatcatcagttagacttttaaaaaaatcaagtaatacttgagcttaaaattttntaagaataaatagtcagtttaatatctaaatntatatcttgttgtcatgttaatacatgaaataacaaattaaaatgagtgtttgaaatt

SEQ ID NO: 184745 - DNA, 411 bp, Glycine max
agcttcaagtatacaactaatactaacattgccatgtgaactcacaccgatgacgcatgggtatggcattgaagatttggtcacttcaacactcaagctttgatgttgctgcctcaaaataatatgatgagagatctaccatgcctatatgactataatgaagctcgtgaaggatgtcttcttaaaaagcaacaaaattaccattttcaactaacaaacatgtagagctaaagactcgtcagagttaatccacactaacatttgtggaccaatgaggacatcgtcactatacaacaacaggtatttcatcctctttattgatgacttctctagaatgacttggtctacttctttatagaaaaatcaaaggtctctggaatgatcaagaattcaaagctctggttgagaaac

SEQ ID NO: 184746 - DNA, 456 bp, Glycine max
tgcaaccatctgcctaagattcctattattatgtggaggttgagccatgttctcagtatgaaaattagtattcgaatgctcaatatcataatattcacaatcaccagcatcataatgctcaatatgatcaggatgctcaaaatgcacagaatgaccaagctgcacactatgcctaacttatctatgaaaggttctatctatttcatgatcaagggttgtaaatcacctggattgcccctatacatgcactatatgcagcaaataatgtgtttctcaacaagcacctaacaatggggtaaaactatatctatgctctaacgatatcaaaataagctgaaattttgtgaggaacaccctataatcatgacaagatagcacagagaatgttcaacaaaaattcaagtctgactatgagaactacctaagcaaagtttataatcaatacgacaataatac

SEQ ID NO: 184747 - DNA, 440 bp, Glycine max
  unsure (1)..(440): unsure at all n locations
caagtcacctgcagcatgcaagctttgaaggggcataacccaccatttnttcatattatttcaccagccacgtgtctactatcattgggataatctctttctctgttattgggggtgctacttgagttgccaagtctctccatctttgggcgtattctttgaaagatctgtgcccctttttacacatgttctgttgttgcatcctatccggaaccatatcaaaattgtactgatactgctaatgaaggcaaccattaggtccttccaagagtggactcgagaaggttccaggttagtgtaccaggtaacagctaccccagtaagattttcttggaaggaatgtatcagcagttcctcatcttttgcgcatgcccccatcttccgataatacatctttagatggttcttggagcaagtaatccccttgtacttgtcaaagt

SEQ ID NO: 184748 - DNA, 492 bp, Glycine max
tcagcttcagttcacgattccgataatggccgcgggtgatataactattatcgtagtgagcttaattaaggaaaccatctttatgagccttattagagaaattatctttagggatttaattagaatatatcattacagtgttcctaattaaagtaattatctttaggaatctaatcaaaatattatctatagtgcgcataattaaagtaattatctttatggatctaattagaaatttatctatagtacacctaattaaagtaattatcttcagggatctaatcagaatacttatctatagtaaacctaattaaagtaaattatctttacaagtctattaataagatgttggattctgtactttagaagattcataattcattatttagtttatgttttggagagctttgagagtgtattgagcatttcttaagcgtggaaaacacagtgaagaggaatcatggtcatcgttcctttcctacatgtatgtca

SEQ ID NO: 184749 - DNA, 437 bp, Glycine max
  unsure (1)..(437): unsure at all n locations
agctnttccaaggagagatgatcatgaatgtatgtggagccaaaataaggaatatgatcatgaagaagaanaaccaatcaggagaatacctattcaaaataataaaaggaggtatggaaatcaaggagatgatgacctggagtgaaaattcaacttcttgaaactcggagtgaaaaatgtgcgtagattaaattttctcatgtcaaagctattaaaaggataaaaggtgaaacttgcaactcttgaatttactgattatgctcttgtttggtgggatcaaatgtagaaagagagagctagatattgagaacattctctaagaacttaggaggagattaaataaattataaggaggcgatgatgtagcatatgcaacaaagatgtatcattatgtggagcttaagagatggttattaacccatcaactggacaacaat

SEQ ID NO: 184750 - DNA, 452 bp, Glycine max
  unsure (1)..(452): unsure at all n locations
actcgacatgcctgtgtaagaaacttctttatgcattcaatattaactcanaataaagaacctaaacatcaacatcaaccttagctatatatgcacaaacgtatccttattccccacacataatttgcagaaatgcatcctcattccccatatataatttgttgaacttacaatcgtttagatagacatgtacctctttccaataacgagcacttgctaaacttagaaacacgtagacaatgctccatccatccaacacattattaattttgacgtagcaaggacatgttaagatataatttatagtatgaattagttcaaaaattggtaataaacacaaattataaataacatcttcatatgaacatacatgaatgtagttgtggaacctcatatttcttgatgtcaattgggctatcattggcactatggacattctcagctacacaatg

SEQ ID NO: 184751 - DNA, 389 bp, Glycine max
gtcgatcagcgggcttagcacgaaggagaatttggcagagcatcatcatcaaggccacgcgagggtgtcttcaacccagctcagcgcaagactggggctatacccagacccacttactcgatctaagcgtgagggtggcactaagcgcaacgttgcgatttcagaacctatttaagcctgttttgtgcagaattagggtagacacactttttgatattttgtgctcagacttggcacactattctagacccgcctcttcttaaggaatgaccaacccttaattgcctaaaacaacgcttgtggtctccttcggaccgatggtgtcaactctacgtccttgggggctgaccgaaccatttcacggatttttcttgctttagtggaacttt

SEQ ID NO: 184752 - DNA, 437 bp, Glycine max
  unsure (1)..(437): unsure at all n locations
actgactcacaccagacatgacacgtttagcatgctttctcttatatcttcacaaataactaccatgaggcataaacctaataaaactacccatcatatcttccaaacacccaatacccacgaaattatgtgagaaagatgatgcaatcctccctatgaagggaccaatcactataaccatgagcaagaggctccaagaagattgggctatagctgttgaagaaggcctagggttctcatgaaccttagggtagatttctgaacccatgggccaaggttgggtccaattatctttgtacatattagactatgatgtcattatatttggtccttgtatttagggctccatattgtaggtagggtaccctataaatatangatntttcagcccttgtattttgggcacctagactagtattgtattagggtagttatta

SEQ ID NO: 184753 - DNA, 322 bp, Glycine max
tcctgacccccgcgacatatctccagggaccactctgtgtgccacaataaaagcaggaagtttcacccttcaacacttccttatctgaagcttgtagaattatggggtacccatcacatgtgggactaagtgggcggcgggcgatggtgcacaacaagctttacaaatccaaatgcgcgcataaacccaccatcccctgttggccacctacaactgagctcacgtactcccaccgtacccatctccttgtttctctcaacaccgggtgctcatcagtactgtaagctttcacaacatccaagcaaaacaacgttaaacagca

SEQ ID NO: 184754 - DNA, 243 bp, Glycine max
gcttcatgaagaatctataatgattcaccgagatcttgatgatatcatttatgatcacccacgatgatgacctacagcctcctgggtgatcaaagaatgtgttccagatattctcgatataatctataacacttcttgattccataggaaagttgatttctccaatccagattcacgattcatgagatcaacatttccgaatcaacattccagagatcaagattctatatctattattcttaa

SEQ ID NO: 184755 - DNA, 378 bp, Glycine max
  unsure (1)..(378): unsure at all n locations
tttttataacaccatgtgattcttgtctactttgaaagtgaccttcaagggaatattccatggaatccttatattctcttctatactgncattttcttaaattcaaacattatctattcaaatgtaagagaggcaaatagaatttgaataaaatagtacatgtgcacttcccttttttggatactcaacctttgagactagatgcatgagtttaccttatagcactgtgttacactgatatgtacaggagtggatgctcactgaatatagcattgttgcatgctaggttaaaacatagcatgctctcgatagtcgtagatgatatttaatggtgtacatccctttaacatagatatcatgtctactcgtccaaactca

SEQ ID NO: 184756 - DNA, 428 bp, Glycine max
ttccgctcctgagaatgacactcaccgctttatgagcgctgtacaccagcaacgcttctaggccatcaagggatggtcgattcttacggagcgacgcatccagctcatagacgacgagtatactgatttccacgaagagatatggcgccggcggaggacatcactggctactccatggccaagttcgatcacaaaaatagtccttgagttttatgccaatgcttggccaacaaaggaaggcgatcgtgacatgaggtcctgggtaacgggtcagtggatcccgttcgacgcatatgctatcggccatctcatgggatatcacatagtgctggaagagggccatgactgcgattatggccataggaggaaccggtctgatgggttctatgacgatgccatcagccaactgctatgtatacccgggcaag

SEQ ID NO: 184757 - DNA, 407 bp, Glycine max
agcttgtagcaaattcaattatgaataaccttttactcggacggccgagtgtttctcgtagtatataaagacgctcgttattgaaaacagaagcctgaagtaaattcaaacgacaataactatttactcggatgttcgattgagtcccgtaatatatctaaacgctgggaattgaaaatggaagccttgtacaaagacaaacaggaatactttctactcggatgtccgatagggtcttcgaagttatcaagcgctctttattgaaaaccgacgctcatattaaaattcatcaacaataaatttttattcaatggtcgatcgggttcccgtatatattgagatgctctaaattggaaacggaaagctcctgctaatgcgaaccacaaatacttttaaatcggatttcc

SEQ ID NO: 184758 - DNA, 346 bp, Glycine max
gctgcaactgacacttggacgacaagctttaatatatgttacacgcaatggcttaatcgtcatgagagcagattgagcagacttatagagattattatccaaataacatccagagggcacatcacttaaagtgagaagtacctgcgtaaccaacaatttactagtacagaagacagacacgatttcaactcagggatattttgaacaggggttgttctttaacgccaaaaagaaggtgtttccaaaagaccaaagccgagtggacttctatatcacacactggccaacacatcgcaagcgtgagtgaagatttgacaggaaaacaactggcagagcaattgattct

SEQ ID NO: 184759 - DNA, 494 bp, Glycine max
  unsure (1)..(494): unsure at all n locations
actaagcttttaaggaggccactccctaaatgaatgcatagggtgcatgtatatcactntatcaagttcacactgtctaatatgaagactgactgtatcattagaggtcatcaatacattgcagcactgacggcggggagcaatcatctgtcataaggacccaataaggcaacataaagttaaataactagaatatgaatgcagacaataccatacaaacacaaaataatcaaaaattcaaatcatccatttctaggattgctgtaacaaaacctgttcattattaagctccagcttctttgaaaaaactatgatctgcttgagcagtgtatattcatagcagttcccaacaacatgtccactgtaattgctccaaatgccccttttatcagatgcaacacttttaaagaaaatatagaaggcttttaaaggatcttacgatagtctctggtgtaaacataancatgcattaacttactacccctcttcatggc

SEQ ID NO: 184760 - DNA, 305 bp, Glycine max
  unsure (1)..(305): unsure at all n locations
agctcgtagcaaatgcctttttgtttatcttctttctgagctgaccatgcctttctagaagtctaaagagacgctcgtggacgtaatccgactctctaagcaaaataaacgcctnaacctttaaagtcgtctgcgcgaaagcttaccggatattaacataacgcttgtatgcgcaaaagaaaacaagtggagagaaaaattacaaaattttttacccccaagatacactgataatttaaccccaaaatacgctcgtaattagcagcaatcaacttcttccaagcaagagagtcatagggtgcaaa

SEQ ID NO: 184761 - DNA, 455 bp, Glycine max
  unsure (1)..(455): unsure at all n locations
actcagcttagaagataatgcacgacatcacaggtcactacttctatttatctctttaagtcaactatatgacactttttatgatgactttcaaccatctttgaatccaccgcctgggaaagtcaatacttttgacgatgattattaaagtgttctagaatctacgtttttacattgatttttttagaaaatgtcctagaatctttgactttctgtttgaataatatttataaaactaatcatttttaagatgagtttcagacaactattttaaaatatttactctctaaaatgatatttaagaaaatcaatattacttctaatgcttatattgttttacaattaatcctttctaagacgttaacaatatgtattattggttacatnccacgcggataaattgattgacaccatactcatctttgtcaacatctttatgctataaatctatctat

SEQ ID NO: 184762 - DNA, 449 bp, Glycine max
tgcccacagaaggagtccacacaggaaatgcttaccacctctttttatctgtaaagcggtttctaatgactcctctgcggcctccacataaggcatagaggatgggcagctcaccaagatgtcttcctcgcctgacacgatgaccaaatgcccctccactacgaatttcaacttttggtggagtgtatagggcacaactcccattgagtggatccacggacgccccaacagcagctgtagggggggttaatatccattatttggaaggtgacttgacaggtgtgagggcctatttgtactgcgagatcgatctctcccctaacctctccgcgagtgccgtcgaaggcacgaaccaccattgaactctgctttaagtgggaagcattgaatggtaatatctccacagtgctctttggcatcacgcttaaactggaaccattatcgatgag

SEQ ID NO: 184763 - DNA, 296 bp, Glycine max
tcaaagaaacttctattgatggatcttctctgatcatgcctgttaatagaataacaaaattaaaatgaccattaacgcaaaagtggcataatatgaacataaaatacgtacccactacacaaggggcaatttaatctgaatcaagcttcttgtgatcttgtgtcatggcatatcgagacatgtatatggcccaccccattgtgtgactttccatgaataaggtttttaaataaaatagccctcatataaaatgggcgaggacactctgcgctttattaagcaacaaacaacatact

SEQ ID NO: 184764 - DNA, 389 bp, Glycine max
  unsure (1)..(389): unsure at all n locations
atctccccggattggatcttattgctagaaagccaccttaattgtggtccctctagcctgccttagttgtggcctctatgggaactgccttaaattcatccttaagggtggtggtggtttagtcccacatcgattaatgataataccaaaataacttatataagtggaagacaactcaacttacaaactgattttgaaaggttgagttaggcccaaaacccacattctaagacttatcctttctcatgtagttgcgcatccatttcaacattctcatttgtggttatattnttctcttgtttctttaaagcccaacattcaataccattgaatataaccgcacgtatagcaatttgataaaactttcttgagttcggcaaatacattct

SEQ ID NO: 184765 - DNA, 366 bp, Glycine max
aactggagaaaaggatggatagcacaacgagacggtccgcgcccagttaaaagaggagtggacactggttacgtttgacacgtcgcggtgagcgatcatatctgtatagagatgtctctcaccttaatcggaaactattcttcaattattaatgaataaagacaatactattaaatactagtacgtcttattcaataatgcagagtacttcaaatagcaaccgttctatgactctcatatatttaatataatacattccattataataagaaaattacactccgggttacttaattgatgtcttacaaaactatcacttatctcaatgaatacctaattacaccagctaataacattattttatga

SEQ ID NO: 184766 - DNA, 444 bp, Glycine max
  unsure (1)..(444): unsure at all n locations
agctttggagtttccaagtgccaattcttcttcntttttattccaggcttcttctggcttcaattcttcagggggctttccttctgtgaccagcatcttgggatgttcccagcctttgatgacagctttccaggttctgctatccagtgatttgaggaaggccaccattcttgctttccaatattcatagttgcttccatcgaaaattggtggctgttcactggtccgccttctttctccatgttcatcaaaatttatctccctagatctcactctgtgaattcgagtgttggctctgataccaaatgaaattctgataccaggggacagatgtcgtacaggatgtcacgacatcacgctttaaaacatgcagattatatgtggtcgtatgaaccgatttaacatagtaatcacacaagagaattgttacccagtccgggcttc

SEQ ID NO: 184767 - DNA, 465 bp, Glycine max
tactcagcatgggagacctgaacaattatgcaaggtcatgttttattattgatcactaattcatccatcaagaacctagagatacaaatgggacaattagccacacaaatggctaagagacccactaacaactatagatccaacaccgagaaaaaatccaaagagtagtgtaaggtaatattcactaggagggaaagtgctaataatgaaaagagaattgaggaggactgcatgatgatgaacgagaaaagaaagaacagggagaaaaagataagagcaatgaaagtggtgatgaggtctcaaccactaacaccaagaccaagagccagttagcttacgaggctagatgagaaatacctccaacctcatcaaaagagacatcgtaccctctggtgccatcaaagaatgataaggaacactatgtcaagaggttccttaacatattccattagctagagaatacta

SEQ ID NO: 184768 - DNA, 290 bp, Glycine max
  unsure (1)..(290): unsure at all n locations
agctnggatcattgacacaccttgttcaattatcttattccngacaaacttttattggctgtggttgtatgcagaggtaaataccctcttcccattccctttgaagatcattgtattttccttctggacacccaggggttatgaaagagctcatttttggatttaatgccgtttaatttttttgatgggctggcgacctgcattgtggtggctaaatggtagtgagaaaactctcaccttcaatccagagccctctccttttcctttcttcctctcaaagtttttttctt

SEQ ID NO: 184769 - DNA, 491 bp, Glycine max
actataaacactcatgcttctcgaatgagatcagtatattcattggcatagattttattatgaagatgttatacattataacttctggtgtcatcctgatgcaatgaagttatgcaatgcctgtaatttggtatttttgatagataatacctaccaaataaataagtacaagctctcgttacttgactttgttggtgtgacactaacggggatgacattctctgctggatttgcctatttggaggaaaaggagtaaataatgtggtatgggctctagaatggtttcaaggtctttttctaacatgtgatgccttccctagagttattggtaccgacagaggcctagcattaatgaatgcagttgaaactgtattctctgagtgtactaacttgttgtgtaggtttcacatcaacaagaacgtcaaggcagaatgtacatccctaaatagtcataaaatgcatgggattatgtcatagatgcctagaggagt

SEQ ID NO: 184770 - DNA, 376 bp, Glycine max
  unsure (1)..(376): unsure at all n locations
agcttgaagatctgtctgaaatagcacacattggtcnttgncncaacaactctggtatacaattgtggattctataagtcaattcacactattggttattacctaacttattattttaaattcatacataatttactttatgttaacaacaataggcatatgactgaaacaagtttgcgaacggggaataccaatgtgtatggattcctcgagcacaatccatccagagatctggccaatcacaatttgaattaaaaagttacattaagaactgaatgcagaattcaaaacgggatgtgtaccaaggagcctacctgaatgggtaagttaaaccaaacacatgaatttaaataatgtataatgctataataaccta

SEQ ID NO: 184771 - DNA, 439 bp, Glycine max
  unsure (1)..(439): unsure at all n locations
gacacataaaactaagcttgtgggttaaagtctcacgaatgtcatgtgctcatgcttttatttgttatccgggctatacgagacatcttgccaaacaaagtcaggttcacgataactcgcctgtgctttttcttccatgctatatgtagcaaagtgatngatccacttattgttgatgagttggataatgatgccgctattatactgtgccagttagagatgtaattttcccctgctttctttacatcatgattcacttgattgtgcatctggtcagagaaatcaaatgttgtggtcctgtttatctacggtggatgtacccggttgagcgatacatgaagatcttaaaacggtatacaaagaatctatatcgtccggaagcatctattgttgagaggtacattgcataagaagccattgatatttgttcagaatactt

SEQ ID NO: 184772 - DNA, 390 bp, Glycine max
ccatcctaagacatgcctaagaatgagtctgtagtttataaagaggagccacccaaaaaaacaatcttaatactaagctctgtgaaaatatataaacccctatttatatttctaaaactcaccgttgtcaagctttaactatcttaagacctgcctaaaattgattttgcagtcaaaagaaggacttacctacaaaaaccatcttaaaaccaagctctacgaaaatttataaatccctctatatatttctaaaactcacgtttggcaagccttaactatcttaagaattgcctaaaattgaatttgcagtaaagagaaggacttacctaacaaaactatcttaagagtaagctctatgaaatatataaatcgttatttatatttctaaca

SEQ ID NO: 184773 - DNA, 399 bp, Glycine max
aggcattctgaagcagatgtacatacctgaccaggccactgcttatccctctaaactccacattagtagatgcattgacatcaagatggtgcgggacagaacctacccaaggctacctatctatgatgaggggaagaagggcttcaagctctacttcaacaaagaaattccaacaaaggtcagaaggtatagttagtcaactacccatgagactagaagcctatcttccaaggtcaaaagctcatcaaagagcttgatgttgatgatgttgactttatggaatcaaaccatgtggaataacaccaagggtgcaagctcgtccaactctgagcacatgcctactaaaacccagtataccacttgaaatgcatagggtctggtttacagttgctacactca

SEQ ID NO: 184774 - DNA, 458 bp, Glycine max
  unsure (1)..(458): unsure at all n locations
actcagctaacgngatacataatgacgaataagtattgagtttatgtccccaaacgcctgcgttgagtgatgcagttcaatctcattaccattattacattcacaatgcgacgaaaactatttatacctaaaatgaactccgagaggtgttaattgttataaaaaaatgacgaggtgggactttgtggaaacccaaaattataaaaatggagtaaatatgatttggttcttgtattttggccaacttattttaagttcttgtcttttaaattgattaatttggtcatgtacttttaaaaaataagtgtattttattcatgcactgatgcacactaacatcaaaggaacaaataaaaactaaattatttacttactttttaaagtataagaatcaaattgattgatttaaatctataagacctatacctaattaaatttgacagaagatacaatgacta

SEQ ID NO: 184775 - DNA, 397 bp, Glycine max
  unsure (1)..(397): unsure at all n locations
ctattaatactaagcctttcctgatgctcgataagggccttttctttatatattattgagaaagaatgaagcctccattccactgtgcgatgagtatttctcctctcctagacattattttgcaaattacaacggcgaagatgtgcagaaattaatcccaaaccacatatataatttttacgacaatccaacggtttacgaatctgtgaatatagtnttaccgagacagttttggtttctgcgggaaaagaaaagactacaatgcgaagtgtatttctctcaactctgacatgatattgaaattttccacggtgagaatgctccaaaatgaatcgcaaacctgtctctcanattcacaatgatccaaccgtaaacgagtctgagatcgacatttttc

SEQ ID NO: 184776 - DNA, 346 bp, Glycine max
  unsure (1)..(346): unsure at all n locations
tatacatactcaagcttacacccactattacccacaccatacaccagacctatcaatgtttttatttgacatcggcagaaatgcagttgagaagggaaaggggcctantctatacttgcgatgacaagatttcccctagccatcgttgtcctaataagcaacattttgttctacagtgggaagaagaggatgatcctgcactacaaccagatccaccagacgacgttgagacagttggtgacccagcattcaaactcatcatttgtcttataatgctctaaaaggctcatcatgtcttggaataatgaagtgcacatcgcgagcgcatattctactacatagtggg

SEQ ID NO: 184777 - DNA, 482 bp, Glycine max
  unsure (1)..(482): unsure at all n locations
tactaagcttcttcatagatcagtgtgttctatatctganaagggaaatctatgttgtactgaaacctgcttcatgatatctctagttagatatttttctaaattagaattatacacagagaagttagctacactaagatctcatctcctttaaatctgaacaaataaaaattactctttacagagatatagaacatacttaccgagaatctctgtttttatttaacaaaagaaaaacaattgcctaatactacccctataaataccagtaacataggcttaagagatgctgcagaatttgtgtgggttctcatatgtaatgcatggtcaagattttctaagagaacctctcctgttgaaagtacaaaaagagaggatccaaaatcatacataatagtgataggtgattactcatcgtgagtgagttgctcactctatcggatacagacgccttaatcctgatcagactaaattagtaactg

SEQ ID NO: 184778 - DNA, 396 bp, Glycine max
  unsure (1)..(396): unsure at all n locations
gctttaaattgaattaaaacgttcagttactgctggttatcgattatcatatatgngnaatcgattacacagtgcaacatttgaattcaaattttaatagctggtgtaaatcatttttggccactggtaatccattacattctcgggtaatcgattaccacagagtaaatctcttgataaaaaacttttttaatttaaatttcttggccaaacctttgctacttcaattggaattcccttcctatttaatacacccttcctaagactctagagactgctttgatcatccatcttgaatatctttaattcttttgtcttgaataaagctttgagaagcatgtgatccatgtgatcctttggtatcatcaaaacattcagcttgatcctttgctacaa

SEQ ID NO: 184779 - DNA, 379 bp, Glycine max
  unsure (1)..(379): unsure at all n locations
ntanagcccctcactcatgcgattaacgcggaaagatactttatttntacatttcagtctcctatcactgaaatgcggagatatagtatgatgcaaagtcaagtactcaagtaaaatttgtaaaggatttacgatatagacaactaagctctaaacattccaaaactcgtgtgggaagagaatcagcaaatgttcaaatgcatgaagagacattcgatgatagcataaaaacaagaacgcgaaaaaacatctacgaacaggagcaccaagtgttcaaatgcatggagagacatctgatcataccctacaagacaagagagccaacaagaaatcaaaacttgcgatcaccacaaagaacaaagatctagctggaagtgga

SEQ ID NO: 184780 - DNA, 387 bp, Glycine max
taaataaatcgtcaaaaaaatgcataataattgaaaagttttaatcttttatgaatattggtatgctataaaaaatatttaaatttttaaacacctgaaatagaaaattcatcaggggtggatttcattcctcttgctctacccggaaaatgcagtataatcaagaatataatttttatattaataatttaaaaatatacactatcatttaattagtaattacaataaatacagggttgaatattttatttataaaaatcaataaatttataatacaaataatttactgtataattaattaatgtgaaaatcattccatacacatcgtgattacagaaataattaaatttcggggcagaagcatccaagtccaatcatagaaaggac

SEQ ID NO: 184781 - DNA, 336 bp, Glycine max
  unsure (1)..(336): unsure at all n locations
ntgcttatatacatatgaatattctctacaatgcgtgttctctgtgatttcttgatcttatcaagatgcgtttaaatcacgcattcttgacatacgtcagttctggccttcacgaatagtatatctgattcctcaataaagtactttcaaacttattatcctgtgtaaaagagtatgtgaaacagttctatgaaacacatactttatattactattttcgagatcattacatcatctctttccctatagaggtctctcgactcttccaagatattatctcctgtgtagacggaacctgcgagacctatggcttttcctcccactatcagattatac

SEQ ID NO: 184782 - DNA, 403 bp, Glycine max
caagcttaactccaagaacagctttattcttgttacctcgaagaaaaccatgaaggtcagattgggcttcattctcaaccgaaactgcgaggcaagtttaaaagattccgctccgattgaaggattcctctcggtgtggggtttcaacggagaactaccgcactttgtggtggctactggtggctgggggtgatggagaaaaaactaggacatccgaaatggttttggaagaaggaaggagaaggaaatggcggttttccaaggctacacgaaaagcaaagtctgaaacactcaagttctcctgctctcgagaatggaagctcttatcacaccacacacatcaaatccaagatcacaacagtcagatcgtgggaatatgtcctatgaatctgcagactgaatt

SEQ ID NO: 184783 - DNA, 403 bp, Glycine max
  unsure (1)..(403): unsure at all n locations
atctctcctcttaattatcatatttttttgtttttacaatttcactcttntttttatctccatttttttttcttttctctcctttcatgtttctctctctttgtatcaaatatgatgttctcttcttttctctcttgtgctcttttcactcttatatatatttgatcctcacaaacctcacttggagacaaaggtgtgagggtaacctctttcctttatgtataaatgaaaaattgtttgtgacatcgttatgaacaacatccttatcatactgccaaggctttctcagtaagagatggctatcctccatatggactgcatgaaatagtatctcatcagcatacttttcaatggagaagcatatcaaaacttgtctatctacaactagctcctcattctcact

SEQ ID NO: 184784 - DNA, 400 bp, Glycine max
  unsure (1)..(400): unsure at all n locations
agcttgacgagggatcgagggtttattaatttatgctacaacatataacacaagagcatgattgattagagaaatatatttctatgcatccgcttgtttgttagaaagacccaacatatcaacctactgctgtcattttctttactttgcatttttatagtttttagcatacaagtttagtttaaattctgcttgaaattatcacttagacatgtctctcaacaatgcttcaattttgaacttaatttaggctaacattagtttcctgtgttcgatactcgaattcatctattttaattntaaatacttgatgatccggtgcgctttctggtaaacccccattgaaatttccctaagacataaatgcacanaaagtaactgcaatggggagtgatcatcg

SEQ ID NO: 184785 - DNA, 479 bp, Glycine max
tactcttcttctcggtccactagggtgtgggaagatgactttgtaaaggcactcgctggacaactagagcaatctctcaaggtctgcatttcaaaagaagaaacaaccaaatgcaggaaaattgtgtgtgatccatcatatatgtctgataaggttagatttctatgattacaaggactgtgagctacgttttctcaagtgttctatttagttattagacatcaagtttacaattacatgaatgtctaaaagtctaaaaacatgaattgcagcatagagtgatcttcactccatctgacgccattttattcatccaacacgttcagaatgttggaaaggttgcttgtgcaatatgtattatgagtcatcctattccagacaccaaagactcttactcaacacatgtcattctgccacagaagcagcttggtcgcaagtcagacatgtaagatttctttgatctgttgcgatgctctcac

SEQ ID NO: 184786 - DNA, 349 bp, Glycine max
  unsure (1)..(349): unsure at all n locations
accttaagacaccgcggctgcagctttatttcatttcggagtttcgattatttcgaacnccccggacatcccagaaaaagtattgccgncggatctgctcacagcttctgactaaatttcagcgcttgatatactccggacaaatcggacatccaataaaaatttatcgttctttgaaattgctaccaccatcggttttcacataatagcgttttgattctacggggcacattcagacatcctgagaaaaagttattgtccgttgaacttggccaaagcttccggtatccattagatgcgtctagatgtcttacgggattcattccgacttccgcatcaaaagttattg

SEQ ID NO: 184787 - DNA, 426 bp, Glycine max
  unsure (1)..(426): unsure at all n locations
tatccgagaatctcattatggaatttagatgctctgagctaattcaaacgacagaggcttattactcatatgactgatggagtcctgcattatatcgaaaccctcgaaattgaataccgaagctctgatccaattcaaacgacaatatctatttactctgatgtctgttgagtcccgtaatatatctagacgctcgaaatggaatatcgaagctctgaacaaactcatattacaataactttttactcggatgtctgattgagtctcgtaatatatcgagacgcttggactagaatgccgaagctatgagcaaattcaaacgacaataacttgttactctgatggctgattgagtcctcgaattnatcgagacgctctcaatggaattccgaagctcttatcaattcaaacgacatacacttttac

SEQ ID NO: 184788 - DNA, 374 bp, Glycine max
  unsure (1)..(374): unsure at all n locations
agcttataggttgctgcactgaatgttaatatagaatgttgatctatgaatacatgcaaaacaaaagcttggactatctttattttggtaagaggctttacatattatatactaagatatctgtttgaatcttccatttcttatctatggtcttgaacacttacaaagtctacaagtggnatgctaatcatgtgtatgcaattgactacatgaactataaggaatttggtagattggcctaaaccatttaacattatttgtggcattgctcgaggacttctttatctccatgaagattctagattgaggattgtacatagagatctgaaaactagcaacactttactagatgataatttcaatccaaaaatatc

SEQ ID NO: 184789 - DNA, 485 bp, Glycine max
  unsure (1)..(485): unsure at all n locations
tctncacattnttattccttgtgatgtgtggcgcatgttgtgaggcataattnttttcatgtcaagaactgaagaagcatcacattacaaccatattctttagcaaatttcaatttgcaattcttgtcttcaaaggaccctttgcttatttaatgctagtgtttggatacatgaaacaaagataaaagatacaacaaaagctcgaaataacctgttcactaactaatatgtatgattaaataaggaatatatcccatatacgaagacgaatctttaacattttctaaccttcccttcctgtcttccatctaaggttgtgatggaaagttcattaactgagcacaagttgtgattngattcaaatttaacatctatttcagtgtaaaaccctggaaccttggcgtttggcaataatttatcacctttcaacattaaaaccacagatgacatctctggcctatctccgggcctttgttgcacgcata

SEQ ID NO: 184790 - DNA, 359 bp, Glycine max
agcttgtctcagtgtttatgcgagactgataccaacatgctagctatcatcgccaagtaccaagaagagttaggtctatccacggcccacgagcatatgatcgcagacgaatatgctcaaatatacgcggaaaaagaggctataggaaggttgatctactctttacaccaagaggcaaccatgtggatggatcggtttgctcttaccttgaacggagtcaagaacttccccgcttgttagccaaggccaaggcgatggcggacacctactcctcccccgaagagattcatgggcttctcggctattgtcagcatatgatagacttaatggcccccataaatagaaatcgctaggaaact

SEQ ID NO: 184791 - DNA, 458 bp, Glycine max
  unsure (1)..(458): unsure at all n locations
tccttaagaagattcgtaaagaagctagagcttagctacacatacctctctaatagctaagctcacctccttgagatgagaagctagagcttagctacacaccccctataatagctaagctcacccccatgacaaaaaacatgaaaataaaaaaaagtccttattacaaagacaactcaaaatgccccgaaatacaaggctaaaaccctatactactagaatggccaaatacaaggccttgacgaaggaaaaacctattctaatatttacaaagataagcgggctcatacttagcccatgggctcgaaatctaccctaaggctcatgagaaccctagggcctttccttggatctctagcccaatctacttggagtcttctaaccaatgcccttgcggngtaggattgcatcagtataagttagaacttacttcataatcattagacatgggtatatca

SEQ ID NO: 184792 - DNA, 387 bp, Glycine max
  unsure (1)..(387): unsure at all n locations
tctntgagaaaacttccttgaaaagctagagtttagctactctcacccctctaataactaagatcacctccttgagaagcttccttgagaagattcctaaagaagctagagcttagctacacatacctctctaatagctaagcttacctccttgagatgagaagctagagcttagctacacaccccctataatagctaagctcaccccatgacaaaaaacatgaaatacaaaaaaaaaagtccttactacaaagactactcaatagagtggccaaaatacaaggcccagacaaaggaaaaacctattataatatttacaaaaataatcgggctcatacttagcccatgtgatgcaatcttaccccgcaagggcattggatagaaaat

SEQ ID NO: 184793 - DNA, 354 bp, Glycine max
gcagagcaagggaagaccgttgcagcaacagagacaaccctggatggaggagacaccctaacctcagaggaggcagccctcagcaacaacaacagcagccggctccttccttccaaaaagctgctggcccaagcagaccatacattcctccaccaatccaacaacagcaacaaccccagaaacaaccaacagttgaggcccctccacaacctaccctcgaagaacttgagaggcaaatgactatgcagaacatgcaagagcagcaagagaccagagcctccattcagagcgcaaccaatcagacgggacaattagctacccaattgagagaacaacaggcccagaaatctgaca

SEQ ID NO: 184794 - DNA, 127 bp, Glycine max
ggcgcacgcaaaaggggagttagcgatagcccgcagcagcgcacaacaaacaaaaccaccccgagaaaaaaccgccagccccggagaacgccgaaccacacccaagcgacagcagccaagacaacac

SEQ ID NO: 184795 - DNA, 358 bp, Glycine max
atgctagaccatcgagttgtggagcgtacggtgctatgacttcacgttgaatgccacatttctaaccgaaatcttcaaactccctaaaggtatactctccaccaccatgtgtcctcaaaacctcgaacaattctacttcgtctttcaaccattgctttgaaccttctgaaaacttcaaacacttcacttttagcctttatcaagtgtagccatatcattctattatgttcatcaataaaagagacaaacgatttgctgccaccacgtgttaaatgcttgagccccacatgcaactttaatgaagacatctttcaatgtgaactcaacaccagacataaactatgaagcttatcttacc

SEQ ID NO: 184796 - DNA, 429 bp, Glycine max
  unsure (1)..(429): unsure at all n locations
ttgaacttagaccccatgtgggagaatagcgcgagttttttggtcttagcncctccatcccacatcgcttgtgttgtaaaaacatgtatctcgctagtgttatatatagagacaccttgtaagcttcaaagtgtgcaagtaataaaaagttttcttagtgtagttgctgacgtaagtatatatatcgagtgctgaaccacgttaaaactgtgtcttctctcttttctctatattcctttctcttcttcttattgctctatactaacatattggtagagtgtgttgatgatgagtgactacaaagagggttgtgttttacgatttaaatataaaggagactacttttatataaattgggtcattataatcgaactgttgcattgtgaatttgtcattgactacatatacataagaatgcctccttgattc

SEQ ID NO: 184797 - DNA, 113 bp, Glycine max
caaaaaaaaggggaagcagagacagataagaccaaccaaccccccacagaaagaaacgaccaaaacaggcaacaacacgcaacgcgccccaacacgcagaacgaaccacccac

SEQ ID NO: 184798 - DNA, 415 bp, Glycine max
actcaagcttcccaccactatgaccctgaagtccctacacttacttatttttcttctacaactaaagagcagcgcttatgcattgttcgcatcctctattcccataaccacctttgagttgtcaatgcactatacggtatgggcactgcttggatggagagagctattggtggggagtttgtaaggctcaagttttttaaaaccattttacatcgattagaaatataactaacgtaaaataacactttttacctaacaattgcttccaagtcaatgttattattggatacaaaaaatattgacttaacgttttaagtcagacatgctccccataacaattaggcatgacctccatctcgttggagatttacattaggctattgtgttcctttctacggaatacttcatcctatgg

SEQ ID NO: 184799 - DNA, 174 bp, Glycine max
caagacaaaacgaagaaagggacaagccaacgcccaccacaacggaaagaagaccagaggccaacaaggaggggaagcaaaaaacagagagcgcagaacaaccagaggaggaccgaggcgaacgcgccccggagagtccgagacgcacagagggaggacagccaccaaagagag

SEQ ID NO: 184800 - DNA, 439 bp, Glycine max
tgtaggccttggatcttcttcatcaatggagtcctttgtttttgaagatcaatgacaatggaatggagaaggaggaaaggtgattggagactccacttcaaggagaagataagttgagaacaagctcaccaccataggaagccatggataagagcttgaaggtaagagaagatgagtagagggagagaagagggagaatgaggtcttaactttgaagtctaatttctcaaatcatcaaagttgaaaaaatacacgcacaagggctttatttatagcctgagtatcacacaaaattggagggaaatttgaatttctattcaaatttcacttgaattcgaatttgtggagccaaaattttaataattatgattagtgaatgtcaactatggttcagcccactaatccatgatcaaatccaagattctccactaagtgtgct

SEQ ID NO: 184801 - DNA, 286 bp, Glycine max
aagcgatcagccaagaatcaagcccaacgctattgcgcaagccatcaatggggcaaaacaccccacaacaatatgaggactgacggctccaattctcacaaagggaaacttatcacttccacattgagctttccaaactatcatgacatgtagaggaaaaacacggatttcatatcacaaaatgttgagagacttttatttcaaaacaatacccattactcgacatacctaaatccaagaaaaatgcaaggtgacatgcaaaaaaaatgactaaaaatcaaactag

SEQ ID NO: 184802 - DNA, 441 bp, Glycine max
  unsure (1)..(441): unsure at all n locations
ctcccgctttagtgcacataacatttataagnggaactatatatttctaaacggagcacaatataatgaatacactccaacacatgaccatggtagctacaacctaccaaatgtcccatgagtgttcggaagaaaccattatagatatcttagtggcaggattttctggacaattaaaaggttggtgggataattatctcactaatgaagaaaaatccaaaatttacaacgtagtcaagacggatctcaatgaaaaagtcattactaataacgataataaggagattcctgacgctattaatacactgatattcacaatagcccaacattttattggagacccatctctttggacagataggtctgcagaaatattatcaaatcttaagtgtagaatcttagccgattttagatggtacagagatacctttctaaccagag

SEQ ID NO: 184803 - DNA, 364 bp, Glycine max
gaagaacgaacgaagaacgccgaagaacgggtgagacctttgcgagattcctcacggaaaacgttacggaaacgtttcggaagcgcctcggcttagattttcttcacggaaacaatttttccaagcaaattcgaaagagagagaagagcctaaggggctgaaccccttccttcttgccttcctcccctatttatagcaaaataggggaggtggttgccgcctagctcgcccaggcgagctcagctcgccctggcgagcagggttgcttcctccagaagcaaccgccttctggaggaatattccggacggcccaagagggcctgggtgctatttgcacccccatttttactaagtacacccccct

SEQ ID NO: 184804 - DNA, 446 bp, Glycine max
agctttgctctgagcttagcgactttaatcttgagcttctttagtctttcttctctcaattatgtaacgaatcctcatcttcatttattgggcacaagattgcctattagcaagaatcctgcaaacacacaatattccaaatccaatccaacatcagtgcatcaaaccaataattttcccacaatccaaacaccccttagccaatggtgtaataccctaaggagtattactcttattagctctacattttaaccatcaaatgcggataataaaaaatacattattcttaagtaacttcatcatattcatatcaaaggacatttctcaacatagggaaccatataccaaaagaataactacataactaagcatctcaaatgtaataagtgaaagacattctaattcacacaatatagcattttcatggaggccaagagtcttcattt

SEQ ID NO: 184805 - DNA, 375 bp, Glycine max
cttaacacaagcactacgtaattttttatcatactgctaattctatttgaagccatctctttctatgtgagacgaagccgcaagcagaactggaaatgaggtgagactttctaaagatagccttcctaactaaattctttgatgggaacttctttagctgaacctgagttcgattaaagatggcctgcacctaagaataaccatttttgacctcctccattgttcgagctacttcgtaacctcttcttcaaggatagaagctagaagcagatagccgccctatggagtggtattcaatcgcttgcttgtaaaggagtgacaatgcttgtagaagactaaagtcgacaaatatggaaaggctagcacatgccatga

SEQ ID NO: 184806 - DNA, 433 bp, Glycine max
taagctctttcaactacacaaggctcttaaatttttagtgtatattgaggaaccttcacccgacgaaaacactgacaaaaacttatcttctccttcttggacaaagtatggcagactgggggcaagtaaattttcttcccatcagaccttggatgcaactgtgatcgtatacccatatcagctagatcttgatgggtattcaagccatccttcgtcttgccttgaatgttaaggagcgtcccaatcacactgtcacaaacatttttctccacatgcataacatcaatacaatgtctaacgtcaagatcacaccagtacgaaagatcaaagaaaatggacctcttcttccatatgcaactctgacttttatccttcttttggggcttcccacatacaatattcaggtgttgaacccgctgatatacctgctcac

SEQ ID NO: 184807 - DNA, 326 bp, Glycine max
ccccccccaggagaggatgtgccgtgcgcaccaaaaacagcccacgagcccgaaaaagacaattgttctctaaggacagccacccaacggcactcaagacacccacaaaaaagggcacgcaaggcggaacagaacaacacgacctgagaacacccaatagcaggaaatcccagccaggcccccgaaaaccgacccggctacaacaggggaaggggagcccccccccaaaatgcacgtcagacgcgaccgggaaagggccgccaaccacggggggaaagacacatgaaacgacagcagaaccccccgaaagaccagcgccgaaagac

SEQ ID NO: 184808 - DNA, 382 bp, Glycine max
atagtttaaagaaaattatttggtcaaagaatggtcaactcattaatggcctacatggtaataattggattttggtcctaaaatagataatagaaagtttgagagaagaaaattattaattaatgttagtcaggttagaaattaagcgggcataattaacgctgattatgacgatctagattctatagaattagaaaagggttattaattcaccagcgttaaaagcggagggcattttcataaatgattatacaactagtttaaaaatagaactttagttaattagctggcgactaatttaagggcttgattatatgatgtagaataattaacaatatgtttgactcgtacaccctctgaaaatattacttctactaatgga

SEQ ID NO: 184809 - DNA, 434 bp, Glycine max
  unsure (1)..(434): unsure at all n locations
tctgacagtaggacanagaagaagattcttcagattgtttttagttctggaggtagcnnaaatctgacttgactatgaaatgggcacttgcagccgacaaggacggtgcggacgacattgtctgtgaaaaatatagcattagctaggagaaatggacccagttttgtcagacccgcagagacccctcatgggagatatgtactttgtcattttacttgttgtccacaacaaaatcacttcttataatttattgtaataatcattttcattaatgttaaacttttgcaggatgtgcgaaaaaaggcacagacctgccagaagcaaaacactgccccccacgtattgtctcgtgggggttatgaatattcagaagaaaaactcatggctgagaagacaaagaaaagactggaagaagctgcctagtctggaagtac

SEQ ID NO: 184810 - DNA, 435 bp, Glycine max
tgacacatatgatctatatgctctagcttgaatgtttatgttgagaatgaatattgatattatgcattcatggtaataaatatagtttataggcacataatcactaatttaaaggaaatcaaatatccttcatttgtttgtaataagtgcaataagcctatataaacttacaatcgtgttgtatttagacacacgatttcaatctcaatatgcctttattctttctcctttaacacaaacaaacatcaaatcttttgatttgctggagccaggaattgcttggtacgtagtaaaagaaaacttgggttgtttaaagcttgcgataaactttgttgtaagagccagaagtagttggaaacaatatttgtaactttgttaaagttagtgaaactttgtgggttgccaagaacaatatataatcttagtggtagagac

SEQ ID NO: 184811 - DNA, 355 bp, Glycine max
acttttgaaaaattctttaaaaccagtcagttcaagaattgtgacttttccaaatgtattttttgaaatcaagcacttggttatcgattacccttaaagtgtgatcgattacccatccacagatgtgactcttcattttaaaattttgaaaatcaaacgtttagaagcttctggtatcgattacaagtgtgggtaatcgatacacaagttaaaatgattaaaactgttaacacaagttgaactcttgaattgaaatctcaccgttaaacactggatccgatactacctttggtatcgataccaagaggaaacttttgtaatgattggaaacttttggcaccaatggttaaaactt

SEQ ID NO: 184812 - DNA, 432 bp, Glycine max
  unsure (1)..(432): unsure at all n locations
tgtagaatggccagacatgatacatgtcanggtttgttttggttcaagggtaaaaaggatgccccacattatttccatgacacaaatgcaaaaatgatgatttggaaactttatgcaaaactggtcatgcatgcacctatgtggacactcaagtgccaaatttttatggtcatgtgatgctagggctcaggattcattccctctattttagtcaacccaatgtttccaaaatatgttcttttatccatttgtgcattcatccgagtccattttgggcgtctggggaaatttcacagcgttcacccttcgggtgtacacacattttttccaaaaaccagctatgatcggcgaatttcccaaagaaaagttggaagtcatctctttcaaaagcatatcggtggttagctaaacaacttatttttcttttctttt

SEQ ID NO: 184813 - DNA, 315 bp, Glycine max
ctttgaaaaaaaggaacaacccagggcgggaaaccaaggaaaaaaaaaccacccggagaaacccgggcaaacacgacccggacaaaaaaaacacagggagggcaaccggaacaaaaaaaaccctcggaggacccccccccgaaacatccacaggataaaagaccccaaaaaaactgccacccgctgaagcccagaaatcaaaccccaggacacgggggaagaagtacacaaccctggggaccgcacaataacccccgagcctttgacaccggagaaaaaagcccatcctaaaaaaaacaaacgccggaagggccc

SEQ ID NO: 184814 - DNA, 420 bp, Glycine max
  unsure (1)..(420): unsure at all n locations
atcctcancagcgcagaaaancttttttactgaaaactcgctaacgggttcctttttatgaactcggcccccattgttgcctttgggagaaggcaaccatggtgtagagaacctccaattcattgcatattagaaaaataagttttaaggctttctaacaaactattttgtgaagatgtggcattttcatttgcatgcatgttttcttcccttatttttgctttgttcttgtcttggaagaaatcctaatacaaatgagacactatcaaatttttcttacatgtttaaaaaaaagctttgattttcaaaatttggggctatgataagggagaggttggctggcagactatgttctctagagtagtctcactgattcaagtctataataaaatctacctattggattgtatttaatttgtc

SEQ ID NO: 184815 - DNA, 382 bp, Glycine max
ggacacataaaactcagcttgaaggggattcccacaatgaacccataccagtctattttcttacgtaagcttgggctccacttctccattgaatagaacatcggtgagcttctatcttgtcccccatgcataatttgttcttcatcctcttcactaaggccaagaagcagaaccaaatcatctcctatgtatttaggggctattttcaatcctatctcccaccagagatcatcctccaatctgtcaaaagtagctgggtttctgaggcgtcctacccacgcacccttcagccatttagtgtcttcaggttcgatgtcgatgtggattgaagaaagtgggttatggcggctatggctttggatatcgggattcgttcactgac

SEQ ID NO: 184816 - DNA, 350 bp, Glycine max
attgccaaggctgctcataagcgcaaactgcctgatggcgcatgcactcacctccgatactattgacccttgctcaaactgcttcattattccaccaaggaggacctcactttgcccttgcctttaccagctacctccactggcaaataacccatcaatactcctttagtgatattcaacactcattatgatcctgacttcgtagactccaagctctaggtgtcggtccactgggagggattatcacccgaggatacttcatgggaagaccgggactagcataaatccacctatcccctcgaggacaaagtgattatggaagacgtatggaacgctacgaaggacgaacc

SEQ ID NO: 184817 - DNA, 422 bp, Glycine max
  unsure (1)..(422): unsure at all n locations
aaaactaagcttagggagagcgcattancaaatttctttatattacttcacctgcatgcatacagcccatgagtgaggctaancaactatgccttcctgtttgtattctgatctaaatacctttagtttggtaggagatcatgtctgcagctgcagatttcaaccattatcctattaatctaaggtttttatctaaatagctctgagtaagtatttgacaaaggttgagtcttaattaaattggtgaaggagatagttattcgagagatattgtgttaatgggctgcatacttgatctcttatttatgacttgattaccatcgaccaatgccataatcaagagcttaattagaatttagaagctaatttatctcagaccaataatcagtagctaacttgtgcgttgatcaatctatcatata

SEQ ID NO: 184818 - DNA, 326 bp, Glycine max
gaatctataatgcaatcccaaatcaattattacatagtaaagtccatgaaatatttcaatcaacttaaacattgaaaccaagtgaagatgctgaattaatttggtctcaacctatgcttttgtttccagcactatcaaatatcaattcatcatgatgtaagcaacaaaagcaaacaacacactataaaagcaggcaactaatcaaaaaggtctgccaaacctttaaagaagagaatttagtatcaatgatctgcaatttagtcctccagtcagtatgtgcttcctcacagcatgtatgaactgcgatttagtggatgagaaatatg

SEQ ID NO: 184819 - DNA, 428 bp, Glycine max
tctagagaaaactacatgcagctgcctctgtaaattctttgcccggccttcgttaaccgatggatcgtctcgaaatttggtttgcaacttcacaagacacttttccatgatcggaccgttgggatctttgaaaagatgtctggagtgtgctagaagcttccgttcccgagagcatatcttatttaagcatttcagcctttgctttcgtgtagcttaggaaaaacgtcatttcttcttctttatttcttccaaagccatttataaagttccaagaactttctccatcacccacagccaccattagccaccacaaaccatcgttgttctccacaccgagaggaacccttcaaccgaagcggaatcttccaacttggcttgcggtttcggtagagaacgaaaccctaatctaacctttcgttttctttcga

SEQ ID NO: 184820 - DNA, 184 bp, Glycine max
acaccgggggcccaacaaggctcccaaggcgccacaacaaccaagcaaaacaacattcaaacagcacaaactaccacagccaagaaaacagagcaaaggcagaaaactctggcaaacaccaaccaaaaaacaagctgtccactaaaagacaccagcaagaagacccccgaaccaatcgggaacc

SEQ ID NO: 184821 - DNA, 221 bp, Glycine max
cactagaaaaaggcatctgcggtggctctcatcgccaacattgcctgtagaccacgctatccctggcgacacggagcacgcgcaacccacacagaacgggcaacccgcaaatgaagcatcagcgctcgagccgcgaatggggcttaactcatcgtgcatgacactcacacggtgacatgcacactaacttctacaaaacatggggaagactcccgcaagag

SEQ ID NO: 184822 - DNA, 397 bp, Glycine max
  unsure (1)..(397): unsure at all n locations
ccggtgagagtgtgaacttaaactgttattttacttttatctgcngncgcaacctacccttcggcgggagggcgatgcgagactcccgggatgcgtgctccaagaaaggaatacgcgtggagtcgctcaccaacgtttatttgaggaaaacgtctgataaaccggaaaagacgcgatctacgaacttttaagttgaaaggttcgggagttgtatttacgcacggggaaggtattagcaccccacacgtccgtcccaagggacggcagcctttaatcgaatgtgcaaacatgactttgatttttacgttcccttttatgtgcttatattctttataccctttatattattatcctttttttgtggtccgacaaggtgtttccctttgctcttacgtat

SEQ ID NO: 184823 - DNA, 342 bp, Glycine max
tgatttgtgaattgattttacccttaggggcacttttgttattattcacaccactcaaggaagctggctaagaagaacgcccgattgcaatctctaaactactctatgcaaagagatcttgattatttcattatatttcttcaaatctatctcgatgattttattatatccttttcacagatacttcgattattcgatcatgattgtttccttgcccgacctaaccgaggttacaacatgaatgatcagttggattttattctaaccgcgagttaacgacattatgtcacctctgattgggtgcaattcatttcatcacctatttggcgagatttcggctta

SEQ ID NO: 184824 - DNA, 434 bp, Glycine max
taagacaacgacggatattaatcaatacccgtcgttgcttttatgtttacgacaactgtcctaaagtgggtctgacgttgccattttttattacaacgacgagtatgggtgcaccgtcgtaatcgttgtcgggatacaacgacacctgaagcaaagacggtgcctggcccaacgtagaaataccatttcgaccaatgtagatccttacatttctagcagtgtttgcatagtgggtcaagggtgtctggtttagttggttgagcaaagtatgtgagttattttaaatccattgaattgtcttcgattcctatggataaaaaattattttgtacaatgaatatataatgcaggaaacatctagttggtatattgatttaattttaaaaaagtataaaaatttaatgtaaccatgtgcatatatatatatatgaaag

SEQ ID NO: 184825 - DNA, 183 bp, Glycine max
acccccaccaccccccgggttgtcctgccgacaaaccgcggcgacccaagtttttcgaaagcgggaggagaaaagagaacaccggaaagacgaacccccaagccggaaacgagcgaaagaggcagggagagccgattacccagagacggaaggacaagacaggaaaccccggccaaaccaggc

SEQ ID NO: 184826 - DNA, 436 bp, Glycine max
ctaagatccacgaaccataaatctcaacaggcttgattttctttttgctaacatcaattaattaatttacgtaaatacttctcgattcaaatttcaaaagcactctgtgggagcgggaatatttcaacatcgagtatatatcattcctaaaataagtttttatatatgtttttataatattactttttattttttcttatttctgtttatcgtacaaatttctataaaaagaaattatataaggataataagactttaataatcacgtagaatataaatttttttatactgtaaattaattaaaaattattcttttgatgggataacattgtcaacatattttaattaaattcattatataaatacaatctctttaaaatataaaggtcacataatagaatagacttgttaggttaagtctatacccatctcagct

SEQ ID NO: 184827 - DNA, 370 bp, Glycine max
cttaacctggataccaatcctgtgctacatatatcgcacccaatggcatcttatatgaaagacgctctctctttgggcgtggggtaggtgacaagaataactcccaaggagcctcttcaccattaaaagatcacctctctcataagggtaaacctcttcaatatgcttattacccttggcatcaccctcacttccacttgaagaatgagaagaagaagccccttcttgccaaccatagatgtcttgacccctcatgatcatggatttctctgtgggcactgagaagcaatgtggcatttcccaatacatccgaagcacttaatggtactagttctcgtttgtgaactagccttggagagaatcccctatg

SEQ ID NO: 184828 - DNA, 437 bp, Glycine max
ttagatagcttgttgtaatcgattacgacaattctgttatcgattaaaacagagagtcttgcctcttgaagaaacttttctaacttagaaacttttcttcacactaatcatgatgatgcatgatgcaatacaaatatcaaatgtactaagatgcaacaaccaagataacaaccaatacaaatgccactcaagggatttaggcatgtaaaagtgaaaacttcttcaagcttttctttgagcttcaagctttagcctttaggttgttcaccatgttgctccttctatctctaacactgcactccattccatcccaccatgtgtgtccttaaccacgaataacgactctgttatcctttgtgtagaccaagcaatgaagtacataaaatttgggataaatatacttggacacctactaagagagagagagagagagagag

SEQ ID NO: 184829 - DNA, 66 bp, Glycine max
tggacgttgtttgacggacaggggacagaggcgagcctatgggggaacctggacaaaagagcaata

SEQ ID NO: 184830 - DNA, 375 bp, Glycine max
  unsure (1)..(375): unsure at all n locations
tnggatatattggggggcttacatccatgtcggtgttttggtgacagacaggacataancttgctttttcctcgcgcccactactgaggctcatctgatggagatgggggccgaaatggcagcatattcaaacaagcacttttgtaacacgagattaatcctttcttcgacgaagacgagatccgcaaagatagatggcatagtacctatcagctcttcatattagaacgcaggtaacgtatctaccataattgagatcatctctctacccgtgatgggcggcatgacttgggctgcgatatctctccatcactgggcatatgccctaatggactcatgctctcgaataatcataccctgaagctggtttcgatc

SEQ ID NO: 184831 - DNA, 365 bp, Glycine max
  unsure (1)..(365): unsure at all n locations
gtggagttggcattggggctgnnntgaacaaaagaaaagggttatatgttatttttcggagaaattgggatgagccagattgaactattgtccctatgactaagagttctatgccattgtgagagctcttgatcattggaatcattatttgcgttctaatcactttatatcgcattcagatcatgagtcattgaagcatatcaatgggcagcataatgttgagtccaatgcattgcttaactggtgctgaatattctctctattcttttaaatttctctttaaaatacaaggatggtaagagtattgtgtgggcttgattcaccttcaatgaggatgccttaatttaattcttgaactcgctact

SEQ ID NO: 184832 - DNA, 343 bp, Glycine max
  unsure (1)..(343): unsure at all n locations
aatatatggctntaaatcgattcacggcagatattggttgtgctttataaatggcatataagacttaataactcttctgtgtaccgtaaagagtatttttaaatttgaggaaaatattatgaataagtttttttaagtgaataaagataattgtatatataggctattatattcctcttctcagaaaaatgtgagtattacattatacaaattacttcatttaaactaacattattaaagaaaaaaatggtatccttttcgtttggtcattatgtcgatgagggagtggggtatattgagagtcggccacactctccataccatctattcacaactgggtccc

SEQ ID NO: 184833 - DNA, 278 bp, Glycine max
aacccaacatggggaggaacgacattatatacatcaacgctgcagctgcccgaaaccaatcaagaaagattgaacaacaaaaggggaaatgacaccccagcccccgcggtcgaacacacctcagacataccaaagagcaaacggctctcactcaaatcaaacatccccagaaacagtcacacccaccagaccccttctgtagacggatccccaagaaaaccaaaggtggcccagaataaaaaaaggggccaagaaaccccctcgaccccacacagggg

SEQ ID NO: 184834 - DNA, 436 bp, Glycine max
  unsure (1)..(436): unsure at all n locations
acctaaaaactaagcttgcctttaggcttgacctcatcacttcttcctatttntaacctcatngtctctcacagtctttagatttgggagccaatccaatccttgtgtccggactcttagccacttatgatagccgccgatgatcccattactgcttcccctaagctctctgtcctttcttcacgccgcatcccatgccttgcgaactccttggagtaccctcgcgttgtggtcactgaaaccccgtgcgatgaaaggcgtgatgctttcgcctgatggcactcctctcatggggtagccaagcggtcttatggcgaggacgggattataattaatacaaccccttgttcccatcaagggaacatttggacatccttcacatgaagatagaatcctgattcttccttccttctagcgagggaaccaattattagac

SEQ ID NO: 184835 - DNA, 446 bp, Glycine max
  unsure (1)..(446): unsure at all n locations
actaagctattaggatcttgngctatgcatttatcactctcatattttgctcttaggagcttcaaacaagaggtccacatgattacaaaaaaggtgttcacctaatctctaaaatggcataccaaatccagtggaaagagaaggttagtgtatgtatgtgtctacacagaaagcatgtgtggccactgcaacaagaggactagtttctcaagactacctatatatatatatatgctagaagttttcaagagcgttatagactttgcaaactattccattgtattagtgctttcaaacgctctcttgtaatctcaatattagaaaaatctagagcttatatttgtatatccttcttataagatgattacgattgtatcttacgcttaaccaaatctttgtgattggttgaagcctaaagatgcttaatatcaagaatatacttggga

SEQ ID NO: 184836 - DNA, 435 bp, Glycine max
agcttcaagaataatggcctcatcaaacttcttattctcatatagaaattcaataaataggcctcctttttttaatggagagggttaccacttctggaaaacccgaatgcaaatattcattcatgcaatatgcttaaacatttgggaagccatagaagttggaccttatgtatccaccatggtgggtggaaatacaacaatagagatacctacagaagagtggtctgaataagaaagaagattagtgcactacaatttaaaggctaaatatatcattgcttctgccctaagaatggatgaatattttatggtgtcaaattgtaagagtgctaaggatatgtgggacactcttcaagttacacatgagggaacaactgatgttaaaagatctacgataaatactctaactcatgagtatgaaatattacgatgaaa

SEQ ID NO: 184837 - DNA, 149 bp, Glycine max
aaaaaaatttttttactctaagtaaattggcaaacccatggattaatacggtaatagtcctttttcgaaagttggaattttcacgttgaatgatcccgacgttgataaaagaaaagtctttcaggtttaaatttaagatacttttaggt

SEQ ID NO: 184838 - DNA, 396 bp, Glycine max
caccatcaaaggtatgactgctgttttacatatcttccaccctcaacaataggtccctcccaaacagctagatttgaaaacccacgaggaaattccaataagttacagacaccttagaaagttggaacttctcatactactgtgaaagggaatttctattcataatgaaatattatcatatagacaaaagaaacaatctcacacttagcaagactagccatgccataccaccctacattcgggaaatattatgactcattagtccattgcaaattaagggcactacggcagtatcagatcatggtttcaatatccaacaagttacaaagatccatacgagattcaataaacatactaacaaacaccagtcaattggtattattaagcatgtgctac

SEQ ID NO: 184839 - DNA, 354 bp, Glycine max
atgattgcaagaattgggcctcaacatgatgagactcggatatgaagctataaggcaatccttaattgccttattaaaaattctggagggatataatattcctttgatgctgaaggatgataattttttgcctagtggtatactaatgagtgtcaacaagaaacgggtctggcctaaatgataatcctaaccaacactaggcccttttatttttggattcaatccaaaagaaatcaaatcgatgaagactagcacaggccttttctttttcttttatctagctctctgccaagtatattgttttactcaaataaggaggaattaactccatttttaaataatggggtattttaa

SEQ ID NO: 184840 - DNA, 439 bp, Glycine max
  unsure (1)..(439): unsure at all n locations
tgcaagtgtagtcaaattacttgacttaagctcacgactcatagaataggtngcattagaaccataaggtacggtcaaaacaatattccttatgaaatatatcttgatgcaggtcatcaaactataaggcattaacatcgctacgaacaaggaattgcaaacatccatacaacaaacatacataaacttataggttcctaccacaagcatatatcgtgcatacaagaaataagaatcaagctaccattaatggtgtattactgaatcgcaagcttcaacaaccacattcatgactacacacaaaagaagagagttaagtagccgtgtgtttacacatcaagaaaaagacactcatccaaggcatatataaggttcacaaggttntcacaacactaatccacacatcaagagagaaataagcttattaacaacatacacg

SEQ ID NO: 184841 - DNA, 418 bp, Glycine max
  unsure (1)..(418): unsure at all n locations
tggcgaagcagntgaatcttaggccacgacaagtttatgttttgttccagaacacgagagccaggtaaatatatatattaattatattccatgataaaagtgattatatgtaaaatttattgaattttgtgattaatatttgtttttttgttatttgtgacgcacaacaaagctgaagcagacagaggtggactgcgagttcctaaagaaatgttgtgagacattaacagacgaaaacagacggttacagaatgagcttcaagagcttaaagcactgaaactggctcagcctctgtacatgcctatgcctgcggcaacactcaccatgtgcccctcttgtgagaggctcggcggcggcatcaacggaggcggcgtgggttcccctaagacaccattctccatggcttctaagcctcac

SEQ ID NO: 184842 - DNA, 418 bp, Glycine max
tggactggtcaaccactaatacaaggttgagtgtttttctgtgtatcacaagatgatatcagttttcttttgctactggttaaccaagttttaggactgctattttattttttagttacttattagtagtttaagatggtggctattttaggaagattgctattgcttttaagattttcacctgttacaaaatctgtatttaaatcgataatattttatataaaaaagtacaacattcctctacatccttgtgagttacaattattttaatcaacaaaatttcattccatgagagcaacttttggcacctaaattgttatgtttatcaaatattttagttaaaataataattcattcccattgttttcttgtaatgaagtcacaagacactatctgacattcgccttaaatgcttaag

SEQ ID NO: 184843 - DNA, 416 bp, Glycine max
  unsure (1)..(416): unsure at all n locations
attaagatcaatggcctttattctttttataacnacatatatacttatatagtgggagaatagtgtctatcagagttttaatattttgtactgctttaattacaaagacttcatttatttttttttaaaaaaaagttgattcatggattattttaaaattcacaagtaaatgatttccactcataataccaaggaataatagtaaatgaaggaaatatctattctctatttctataattaactttagaaaaaatttattaattaaactagctatacctgttattattgttttgacccccttcttttgatagactagtttcttatttgtgtgtcagcaaaatcaaagatatattaagcaagggtccagagatgtacccagatagaatacaaggttaagtccatcccttggtactcta

SEQ ID NO: 184844 - DNA, 387 bp, Glycine max
agccaaaccaacgcaccatgaacctagactttatatgagtatattcgcctcgcccggggaagaaaaccaccgatacaacacaagatcggaagaaaacgaaaaaagagcgagagaggaaaacccccgatcaagatcagaagaaaatgaaagaatcatacagaagggtctgtagaccaaacaaatatccaaaatagtcacaaccaaataaggaaaataaaggaaaccatgacttgaagcggtcctttccctttgatggccgaccaaaatcctgggtgctggcaactttctcacctcacactagacaaaaagagaaagggaaaaggccaaaacattcagagccaaattactcaccaaaacaccattcccgagaaggcctatcgaccatga

SEQ ID NO: 184845 - DNA, 225 bp, Glycine max
  unsure (1)..(225): unsure at all n locations
aaaaaaacanncaccaagcacgggactgctccgccaccgggaacgggcacgcccaaccgcacagcaccggcaaaagaaaaaggaagagaggcgcgccccacgcaccaagacctcaaccccagggggacgaagccccaggaacacacacggcaaacgagggaagcagcccacaaacgaacacaacaacgccaaccccaaagcgagaacaacccccgacaccaaacg

SEQ ID NO: 184846 - DNA, 399 bp, Glycine max
  unsure (1)..(399): unsure at all n locations
tttatcttcttattnttattccttgtttaactcccttctctttcattagtttctataccccttttcaagggaaaagtcccttatggctatgagaggctaaaatccttaattatggcctgacaagcctaaaaatccataagatgtattgtatgcttcatatttatcaatgcaaatagatgttttctttcgtattatcctttcttacttaaatttcatgtatcattcatccttgcatcatctttaggggttaggtgctcaacatagggtaatccttaatagaaatacaaggaaggtcttacatgcattatttttagggattagtccctcgacagagagntagttctaatagaactataacgaaaggatatcttaataaaatcatcgctagacatagagtga

SEQ ID NO: 184847 - DNA, 437 bp, Glycine max
  unsure (1)..(437): unsure at all n locations
ttaatggtaggctctgggaaatctgatggagaatggatttttgattttgggtgancgctccatatgacaccaaataagccctggtttgagaagttcactgagctacagggagggtcagtgttacttggaaacaataagccatgttaaattcaaggtattggaccaatcagattaaaattgcacgatgggattgagaagattattcaagatgtgagatttgttcctcatcttaagagaaatctaatttctcttggtgaaatagacagaaaaggttatctattcagagttgaaaatggaacattggaggttatgaacgactcaatgattgtcatgaagagtgtgaggaagcatggcttgtactcattggaaggagaggtagtagttgggtcagtagcttaagtttctgtaagagacatgtcaagaactgagttatggca

SEQ ID NO: 184848 - DNA, 397 bp, Glycine max
  unsure (1)..(397): unsure at all n locations
aaagcgcggcgcagcgagacaaaggacaagaggtcgttatatgccaagaagaagnnccaagcacagaaggataagcgacgaccatgcccgccagcactccaaccgggagatcggcgagcggaggaacgccccgacatttacgcaacgagcacaaagcaaaccgttaccgggggaaaagcgctaaacgagggcccaggctgcagagggccaccctcagtcaaggacaagtggcgtccgtggtgaagggatacaacaaggagcggtcgtcagcagatgccacgactccacccagtctcaaacagtggcaagtcgatatctgcctccgaaaacggcagaaccgaagacgagggccccgaacggacaaaaacttgggacccgcccatcgacgtcgagcaag

SEQ ID NO: 184849 - DNA, 353 bp, Glycine max
  unsure (1)..(353): unsure at all n locations
aacatcttatgctacgaaccacaattggttttacgattaataaaacatgaaaatagggacttgttgttaaatttgggctgccccatgattggcactttgcacctaantaacgtgggagatgctcttaatggtgtgtatgtttatatgtgatatatatggcataaaaatatgttgccaagtgtgtgaatatatggcataaaaataccttgcaaagtgaacgaatagtaaataatgcatttcaaaaatgtatatttgtggataggtagtgtaaaatgcacttcacaagtatatttgtggatagggagcgtaaaaatgcctctcaacatatgtatatttgtggataagtagccgta

SEQ ID NO: 184850 - DNA, 436 bp, Glycine max
aaaactaagcttgcgtggaccaccataattgcctaactttttattggtgattcctaagctcttgaccttgacttgatagaacctctttttaagtgaaggcgcctgactcgatcccatgttttactaaagtgaaacaaaacccagtgtgaatcaaaactctgacatctatcatgggtggaatggatgaatgcatgaagaaatgcatatgacacaaatgcattttatgaatacgggagcccggggaattgtctccttcttagatacaacattctgacagcatggtgcccgacgtatgcatttaagaaggcaacatggacccaccatcggtttgacaaagtgagaggatcaagacgcaatccgtgcatgatgcagatgcataatgcacaacacggggatgtacatagtacgacaatatccgtgaataattataagcaaa

SEQ ID NO: 184851 - DNA, 306 bp, Glycine max
ctgcactgaaaactgaagtcaattttgcttggaaacatgacgagggaatgacctcagggggaagaaaagcctatatataatgcaaaaaaacagggctaaaaaccacctttgggctggctaaatctgtctccaaaaaaaacctaagcaattggacctcaccaaacttatcaaaggtgacggatgatttctctgcaagacaagacctggacactggctaacaaattcatataagaagaattagtttcttgcacatctgaactgaacgccactaaaccaagtttcgaccaaaaaaataacttgtctctc

SEQ ID NO: 184852 - DNA, 270 bp, Glycine max
  unsure (1)..(270): unsure at all n locations
gaccttagatactcaactggangtaagtaaggatgttgaaggaattttttatgtctaccgagagggggaagcccaatgtgattttctttgaaacaccaaggacgatgtggatggggtagaggatggtgcacttgaagtactggattatgaaggggggttataagggattagactttggggctgtgggagtggatgcctacgggaagaagaggagggtgaaccacagggttgggccttccatgaggagccaagctaagagggggggggtga

SEQ ID NO: 184853 - DNA, 255 bp, Glycine max
cccccccaccgcgcttgtctctgcccacaacacgacacacagcttagaagaatttctttccacaaacgggggatcaggcccaacatgtcaagttggggaacacctgtattcctagattcttctaaacccagccccacctcaccaaagtataaagccccgacaaaagcactcgcaaaacaggtcactggctgaacccaaaacataaaacccccccccacatggacgaccgcgacccctatccccagacagctgtcg

SEQ ID NO: 184854 - DNA, 439 bp, Glycine max
  unsure (1)..(439): unsure at all n locations
tatgcgcatacttctttacgagcgttcacttgcacttgatattcttataactaagaaaaatgcacccatatacaatcaaggcacctttgttacctagattatttatatgtacttccaaggtgtatttgttacctacatcacacgcatttcctttgctaaatttacatacatgcatactcaaagcactttggctatcaaaaattgcatacgtgcacattctggtatttctaatacctatacatacacaaacttcatgatgaatcttgactatctacacaataaggtgctacatttcatgcttttttcaagtgtttntactacctaaagccggatgcagattcaagtataatttctcttgccgactaaaattgtattcaacataaaaggtatctttgtaacgtatgttctttacataacatgcaacatatatatatatttt

SEQ ID NO: 184855 - DNA, 433 bp, Glycine max
tggacaataaaaatatataacaaatcttactcaacttttgtaagactgaacccaaccaaatacatttctacccctaatgctataattaagatataaggataccatattaacaattttttgattgcatagaatgaagctaatttgcagggcatgaaacgtattctttctaaataagggtgagaataaaaatgatcatacccttactatcattttacaaatggaaaaagggggaaaggctaataaatttgagcttcttgagtaattaattcagaataaaggataaatttctattgatttaacaaaagcatgtagcaaaatatcaacataaatgttgatgatgacaaatttatacctgcttcacagcttcggctagctattgaatataatggtgcaatataattcaaggctctaaatgtccatgtattaagctagg

SEQ ID NO: 184856 - DNA, 365 bp, Glycine max
cgggggagcacgacaccgacggaataatacaggcatagcagcggaacttcgaaggatggctcacaagactctcttcatatagcacaacacggggacacacgcatatatctacagactagggaactcccttgagaagcttctatgaaaaaacttcctggagaagctagagctaagctacacacacccctctcataactaagcgcacgtccctgagaagacgccttaagaaaacacccaacgaagctagagcgtagctacacatacctctctaatagcgcatgctaccaccttgagaggagaagctagagcttagcctcacacaccctataagagctaagctcacccccacgacaaaaaacatgaaa

SEQ ID NO: 184857 - DNA, 350 bp, Glycine max
tccaaatacctcccccactggaattaccgaaagaccccttctgcgtaattcctcattcaaaagtatagcaagctccctgtgaatcttcacccttatagatccctttgtttggcatgtgtcaccaacggctgcagtcctctgtaccaatcaataactccaggaccaccttggcaactggacaatgccactgaactttctcggtcatttatctgttcaacagacaagccatccaaaatctcaaaaaacttcttaaaccattcgattttcttacgtgtctcatgactcttttgactaacatctgaatcatagtcatcactcatcagatcatcatccggatcttcaaagcatca

SEQ ID NO: 184858 - DNA, 324 bp, Glycine max
ataatctaatgcacattaaatcaaagcttgaaactctgtagtataccttattcaccaatggtgaataagatttgaatgagaatcattaattcaaacctaatagtaccttcaggctttttttgcagccagctaggagaaaaaaaataagtgtattctatatgcatttactatcactatatatagatgctgcttcctaactgtgtagatacttaaatgttatgaagcagttaaaaatgaaaatcaattcaccataatggcaaactgattgtgaggaagtagcatatgttggattaaaagtcactgaggaagctggaatgtgagtat

SEQ ID NO: 184859 - DNA, 392 bp, Glycine max
  unsure (1)..(392): unsure at all n locations
ctaagctgtttgacatcgctcgcgtgatgacatgcaactaataatgtnttatttanacgagacactcgatcctattactcaacgaggcggacaaaagtgggcagataactcgaacagacattattgtcaatgcggaaggtattctgcgcttcactatccatgttcacatattattgcagcttggggttacgtgagcctgaactactaccaatatatagatgttgattatacaaatgagcacatcttaaaagcttactccgcacaatggaggcctcttgggaatgaagcggctattcctgcttctaatgatgcatggacacttatccctgacccaaccacaattcatgcgaaaggtcggccaacatcaacaaggataatgaatgagatggatt

SEQ ID NO: 184860 - DNA, 415 bp, Glycine max
  unsure (1)..(415): unsure at all n locations
nctatagaagggttggtcctaatttctctacaattgtcattatctcttaatgagctactgaagaagaatgtggcatttacctggggtgaaaaacaagagcaagcctttgctttgctcaaagaaaagcttactaaggcacctgttctagctcttcctgacttttctaaaacttttgagctagaatgtgatgcctctagaatgggagttggagctgtattgttacaacgtgggcaccctattgcttattttagtgaaaaacttcatagtgccaccctcaactaccccacctatgataaagagctntatgccttaataaaagccctccaaacttgggaacattaccttgtttccaaggaatttgtcattcatagtgatcatcaatcacttaagtacattagagggcaaagcacgtaaa

SEQ ID NO: 184861 - DNA, 282 bp, Glycine max
aacacaaaagggaccggagttgatgagcccgacaaaaagacgccaacagacgggaacccgacacaacaacacaacacccgacgcggagcagacgagcccgcaaaacgagagcacgaaagaaggcgacgcagaccaaccaacgacaaaagcacacccgagccgaaaagcccgcacaaacggacgcccaagagaagggaacgcgagccagcaacgaagaacacataccgacgcggaagagcccgaacaaacacacgccaaaagacggggagcccgacaagcaac

SEQ ID NO: 184862 - DNA, 392 bp, Glycine max
  unsure (1)..(392): unsure at all n locations
ggacttaagncacgcagctgcacttgatgctgaagaaccaattataatagcccgctgcaccacacaaagtacaccttccatccaaataaaataaatatctaacaggagctaccagccataacactaatatttatcccaatatatagctatcaaggaaaagagaaaaaacatatatacaaatgctaatactcattgattagaaaaagaagatcaaaataaactaacattaataaattctatgatttgtaaaagagtcacgtatcaatatcattactctaaaaacaaaagataacatcttatttaaagaataagagtacacattatcttattctactgaaaaaatatcatgctatacgtcgtattacaataaatgaatttttttaaaacaaaaa

SEQ ID NO: 184863 - DNA, 441 bp, Glycine max
  unsure (1)..(441): unsure at all n locations
gaccttaaatctcagctctttagcaagttangggaaagaatgaagaattgttatttcttttttgaaagagaacgatgtgagcaactggagcacgcatggggaaaggactagcgcttattttgagagggtatcgcagctcttgaactggacggacttgtttcccgaatggatagacgaggacgaagagaatgatgtgccatcatgttcagagatacctatgccggagtatgcacaatacggaagcatggacgtgatcgtggctaagctgccatgcaggtatcccgaagaagggtggaagagggacgttttcccgctgcaagttcatcttatagttgcgaatctagccgtgaagaatgggaagaacgattggagagggaagacaatagtagttttttggagcaagtgtagaccaatgcttgagctgtctccatgcgacaactt

SEQ ID NO: 184864 - DNA, 238 bp, Glycine max
gaacacgccaaccacccaaacagccaccatgcaggaaaacaaaagcggacaggaaacccagccaccaacctaccaagaacgcacaacacaaaagaagcacgacaaaccccgacacccccaacacgaaaccaacaagtgcccacaaggagaagacacacaaaaaaaacgaacaacaaaaagcggaataacacacgcccaaaatcgcaaacggaaaagaagaaaccacggcccccacacg

SEQ ID NO: 184865 - DNA, 357 bp, Glycine max
ctccctcaaagaagcgggatgtcatcctttcaatatcttcacaaagagaatcatgtaataagaagcagctcataatgtatgttgggatggattgtactacaaattttatgcgcatttctctccttgcctttgataaagccttcttcttcttcttctagcctttgccttcttccatactccttccttaacaaattggaacacttgactcctacaagtgttttcaactcatcaattctgggactaggcacatttcggctgcaagagagttctgttttgtggggatatatcatctggcttgaagccaattcataacactgtatgaagccttaatatgggtcgttcttttggtgagctcta

SEQ ID NO: 184866 - DNA, 372 bp, Glycine max
gcagcttatgatgatgaagacagtttattttttagtttgatgaagacaagagcccaaaagaactcataagatgatttcaagaatgagtcaacacgttcaagatcatgattgattttcagattccggaagagacatcaaaatgaatttcagattcaagagaagaaatcaagaagcaactagtctagacttcacaagggaagtattgaaaaggatttttcaaaaaccaatcataacacagttttgttttacaaaagagttctcctcaatctttttaagttgccagagtatttactctctggtaatcgattaccaatttcttggtatcgataccaatgttgaaatatgatttcaaaaagctgtttatttgaatta

SEQ ID NO: 184867 - DNA, 430 bp, Glycine max
  unsure (1)..(430): unsure at all n locations
tacctatagccacattgcctttcaagatttcttctttcttatatttgncttttcttcccatatttgattatttctcaatttatacttcctcattggaatatttatctttacagcccttaaaatagagtgcatgctacattgtccactaatataaggagcacaaaaatgaatccttcttttctattaaccaggaccatgatcaaaatctaacaagatctataacccctgtgacatcagtccatccattgttaaaaatgatattatttttctgaatcttcttcacttgtatggattatacgcttatccatccatccgaatcttctttgcttgtatggattctacatgacagctacagagaggctcttggtttatcactacttgtcaaatggcagagttgcttcctatctacaaggtaatggcgatcgaggca

SEQ ID NO: 184868 - DNA, 360 bp, Glycine max
acagcattagtgtgacactacttataccaaacttatccgtagtccctcttgaagactaaggttcaattctacttcattcaagttctagggaacaatacatttctcaatgttaaaatcacctaactacgcacacaaatggttgatcagaccaagaacatacaaaatttaagcactgaaagaagcattgaacacaagaaacacaatcaattagatattaaagtaattacatcagttgttctttagaaatccccacaagggtgtttagctagccattatagaagacaccctaaccattatgagatgacaacacctaggtatctctgaaaagctactctccttgctgccttcagagcatctttt

SEQ ID NO: 184869 - DNA, 433 bp, Glycine max
  unsure (1)..(433): unsure at all n locations
tgttgaggttgacgacgatgttgaagagatgatgatgatggatagggctagaatcctcatcaggaccccatggaaaccgttctttcatcacgcggtttcagtcaccataggcgaggagcttcatcaagtggttattgtcgaggagggggcgagtaacgatgggtggcatttttcctcgggtcgaagaccgtcatactcatcggaagagcttgattccgatgatatcgacggagagtcagtgatatccccacactcgtcctggtacgacctccgacgtcaaccaaacaacccatacgatgacccagaagcagtcgtagacaatgatggcggtccccacatangcaccggcatacctatcggaagagcaacaaacccaccggaagcgaaccactccgtcgactctggcggcaaccctctgaaggcggctcatgtg

SEQ ID NO: 184870 - DNA, 387 bp, Glycine max
ccccgcactggctgtacaactaaaacttttttttttcttgtatcgactatacggcattttatgatgagtacgttccgcaatccgataaggcgttttctgctcccgtgatgagctgtaatatcacaaactgagttgacattcaactatcttttatacccctcgggcttttaatgcatggtttgattcacaaaaaccttggtcctatctacttgatccatctcccggagaaaattatgtccctctcttttcatcgcatcaaacacatgcttatcgtgcctatgtatgtcgataacctttcgtattagcataatcacgatagacaatttgtcactcaacacttaatttgggtggcattgtcgcatgctcatatgacccgacaaaaacaaa

SEQ ID NO: 184871 - DNA, 330 bp, Glycine max
atcgcgaccgccacccccccccccccaagagttgtgacctgaagcccaaaaaaaaccgagccgagaaagagagacaaattaccgccaacagaaacgggcggccaacaacaaacgacaaagaacgctccgacccccataagagagacccaccgccagaaacaaaacacgcaaaaccaacaaacgacaaaacgaacgaaaaaaaggccggagcaaggccgagcgacccaaggcccccaacaaacacacgcaaaccaccgagaggccccccacgcaaagacacccaaccaacaaacgcacccacccgtgggtccggacccacaaacccacaac

SEQ ID NO: 184872 - DNA, 445 bp, Glycine max
tactcagcttgcttgtgggcttcaccgaggctggatcttagatcttttatgaggccctttaatggcgatttcttaccatggagatgcagcggaagacaaaggagaagaggtgagaggaggttccatcctctatggaataagccatggaagaatgagcttcaccaccaagatgagccttggataagaagcttggagaggatgcgttaatggaggaaaagaaagagggagagaaagacagagggggggagcacgaaattgatggaagaaaaagggagagaagttgaactttgagttgtgtctcacaagactctcattcatcatagttaccacaagtgttacacatgcttctatttatagactaggtagcttccttgagaagcttctttgagaaaaacttccttgagaagctatagcttaactacatacacctctctaataactaagc

SEQ ID NO: 184873 - DNA, 125 bp, Glycine max
acgaaaaacaaagcccccaccgaaaaacacaaaccaagagacggacccaccccaaagaaccccccaaggacggggcaccaaaggacggaaaaaaaaaccaagctccccaccaaaaaccccgacgg

SEQ ID NO: 184874 - DNA, 403 bp, Glycine max
  unsure (1)..(403): unsure at all n locations
tactcagcttccatcaggagcacattggtgtcttcttaccaatcnctctattgcattctgtaatgtttgcccttcccaacccatagaattgccccaatgatctactttaataagtatgaattctccatctagcaagtcccacacatctagcatatttgtataacctctagtccttttttttttacctaaatcattcatggatatgacatttatcataaaaggaccgaaaattataattacctttaattgaactttcacttgcacttccaagagaagtataagactcaacatgactttcttcttgtatgtgttgttctatttgtgattggtgagttcgtaataaaaaaaattattactaaattccatattgaataatgaaattaagttataaagatcttatacc

SEQ ID NO: 184875 - DNA, 434 bp, Glycine max
  unsure (1)..(434): unsure at all n locations
ntggaagaaagtgatgaggtacaagccctaaagtatatcttgaaagagcccgggtagtcgaagagaagttcaagtccatagccatcaaagtctgaaaagagtatgatgaactaagggacgtcaatatggccacagctgaagccttggaacgagaaaccaagaaggcccgaaaggaagaacacgaccaaagcaaagttttgaggggctttatagggcagcaatagtgagctcaagctccgaagaggtaaaaggaatcatcacgggtcaaaggcatgatcttgaaggacgagctaaaggcttgccttaagtcgaaaagaaatatgtcccaacagctaagcgagactgaatggaatatgtgggccatcatcgatgagtgcaaagagaagctaaatctagcggcgaatcacgagcaaaggctagaggatgagtacgcc

SEQ ID NO: 184876 - DNA, 375 bp, Glycine max
ttgagaagaaaatattttttgcattgtttgaaagctgctagctgatctgaaacctgcatgtttcagcaacaagccaaaaagaggatagttatttaaacatctgattgcacttctgagctttggaggagttccaaatgaattcttcatggatttacttcggagtaacatggaagatgcaaaccatgtctactccaacaagcgttctgcactcagaggtagttgatcaatgcttcttttggtaatttttcatcaaaacctgttctttatttggacacaggtctatatgttctgcttcccgaaatctacttggttttgcctcttgttgattaactcacagcattcatcaactgtggcgagaaggatgaatacaatgca

SEQ ID NO: 184877 - DNA, 436 bp, Glycine max
actcagcttcagctgcttggcttgtcaccctatatatgtacacttgtcgtgcttttctggggtaccacaaaccaactagacttgtcatctctcaacatcacctttttttttttttttttctcttcagccaataagaatttcccagtttgaccactcaatttcccgtaacagtcaactatgacttgattaatgagaggtaataaaaatagtttttttttttataggggaaacaaaggtatattttcttgccaaagtcaagaactaattcctttaaggatttaacctcttcaaacaaatatttattcatatacgttgatccgaggatcaaacttctgactaaattatttatggaggtatcaagattcttctaatggtttgaccacttcaaacaaatatatgttcatatacgtgaaccactgaggattgaacttttgac

SEQ ID NO: 184878 - DNA, 258 bp, Glycine max
  unsure (1)..(258): unsure at all n locations
cttttttgcccttgcatcaagcgacagccatacttgcgaatcccatggtatcgcaccctntggaacaaagcagcgagccgggaccgcaagactaaatctcattgtactttccagagggaacatctcccgccaactgcaaaaagctcgttgcatccgtagatcaaggtccgaagcatgcaggactatgtgcattgcacctcccaaaagcacattttcgccgaactgaaaaaagctcgtcaccatagaccagggccggag

SEQ ID NO: 184879 - DNA, 429 bp, Glycine max
tctggtgggacatcttgacttgctttccaatctgtctttcaccacagattctgccttcttctattctcagattgggaatgcctctaacagcacctttgtcaatgatattcttcatgcctcttaagtgcagatgtccaaatctttgatgccatagtttgacttcatcttctttggaggatggacatgtggaggagtaactggtttcttgaggtgtccataggtagcagttgtcctttgatctgctgcccttcattagaacttcattcttctcatttgtcaccaagcattctgactttgtgaagtttacattgaatccttcatcacacaactgactgatgctgatcaagtttgcagtcagtcccttcaccagcagaactttgttcagactacgaagtccatcatggactagctttccattccagtgatctt

SEQ ID NO: 184880 - DNA, 443 bp, Glycine max
  unsure (1)..(443): unsure at all n locations
actatgaaactcagctataaacctatccatgataaaatgttttatattctttagacaaagctgctntttgaagcttataaatgtgtctatacttttattttttatcattcaaaaaagaaaaaaagtgtttatactattaatcaatcaatactcgcaaaaatataaaaaaaattatgaaaatagaaaatattatttgtcagcttaattatttttaattgcactaatttatccaattactttaattattgaaactataaactattaagaaagtacatttatctaaaattttggattttaaacctgatgataatatcagttccattcgaaaatgaaatgaaatgaaatgaaaatccaaaatcttattttaaatttcttgtattttacttaattcttaaacagaaaaagacaaaaaggcagacagggttagcctcatcctgctaaat

SEQ ID NO: 184881 - DNA, 430 bp, Glycine max
  unsure (1)..(430): unsure at all n locations
tgttcgcacatcgatcgcgtgtacgatatttactcttcnttggtngaagtagaggagaccttcaatcctataacgcaacgtggcggacaaaaatgggcagttaacttgaatggccattattgtcaatgcggaaggtattctgcgcttcactatccatgttcacacattattgcaacttgtggttacgtgagcatgaactactaccaatatatagatgttgtttacaccaatgaacacatcttaaaagcatactccgcacaatggtggcctcttgggaatgaagcggcaattcctccttctgatgaggcatggacactaatccctgacccaactacaattcgtgcgaaaggtcggcccaaatcaacaaggataaggaatgagatggattgggtcgaaccatctgaccaccgacataaatgtagtagatgtg

SEQ ID NO: 184882 - DNA, 197 bp, Glycine max
gagcgatgaggacataaccaaagaccatgaagcactggaacgtcccatgaccagaggcatacttaaacaagcccaacacgtcatagagacaaggctggtcatatgtatagctgccattgatgatgattgaaggcccaaatggagaaagatgaaagaccacatgcagaggctctaccaatactacttaattgttgctg

SEQ ID NO: 184883 - DNA, 409 bp, Glycine max
tcttagtctcagatgatgcagctgagtatgtatctttctcatgcactcctctaatgactatggcatcatttctggcgctaaactgctgagagttggaagccatcttctcaattaaatttctgacttcagcaggagtcatgtcttcaagggctccaccacaggcagcatctatcatacttttctccatattactgagtccttcataaaaatattggagaagaagctgctccgaaatctgatggtgagggcaactggcacataatcttttaaatcactcccaatactcatacaggctctctccactgagttgtctaatacctgagatatctttcctgatggctgtggtcctggaagcatggaaaaatttttctaagaatactctcttaacgtcatcccagctcgtgatgga

SEQ ID NO: 184884 - DNA, 254 bp, Glycine max
  unsure (1)..(254): unsure at all n locations
atggaaacgtcattggagtgcctccgccctgattttctccctctttcttcttctcctcactaattttaagggaaatttggataccccaggtggtgaacccctttccctcaacccccaacgttcatttatagaaaaaatgggggaggggaggagggttgttttccctctctcccagctaactggatgctntctctataaccaacatgctccccagtcaatactgtgttccttgttaaacatcttctggcatatat

SEQ ID NO: 184885 - DNA, 372 bp, Glycine max
  unsure (1)..(372): unsure at all n locations
atgaaattcttctattttttttaaaattaatttactttggcctcttagatatttttttcctaaaatctttatatttttatttttacaattattttgcaaattgaattaagtgtccaaataaaagatgtagaaaaatatagagaagcaaggcgaataagagcgataaagaggcgtgttatttcacttagatatgaatataatacgagtaaatatcaacgggcattacataagatattatcttccttatgagattgttcgagcgatattttctanagataaacaaatctctcgtaggtgttgaattataagttctttgtcaccttgaaatgcagagtatctatcactcttattgatgactaatctctattgaat

SEQ ID NO: 184886 - DNA, 290 bp, Glycine max
  unsure (1)..(290): unsure at all n locations
ttacacacaanaacatccccatgagatgcatttttcaccacagaaccatgcacctcttgtcctagtagaaatgaaggtataacacaacatgctttaagaacagaaggttgaaaaattgtccacttcagtgtatgtcccacgcatataggccgtagatattccgcgcatctgcacggcagttgctcttgatgtaagatgttattacgaagctatgaactgctgcattgctataataggattcaagtgctgcaagagggactcgataactgcaattggaactggatctgaag

SEQ ID NO: 184887 - DNA, 380 bp, Glycine max
atatgtgtcagtatgaactgaatctgatgacaaacactacaaacaaccaaatttgcactaaatcataaaaacgaatgttacattactaggatttacacatatttcacgctggcatgaagcatgtgagtgaaacgatggaaaacatggacaagcataatacaagaagaccggatgcaatcgaaaacactaactatacaatgttgaaggccatctgcgacttcgtaaagcatgaccacactgagtcaaccaaatatggtatggacgatgtcaaaatgagtgcaactcacaatacttctctgaatgatgatacactacattgactaaaccctaagaagccgctgtcgaccccgacttgtaagtcaatgagaaacgaagcatat

SEQ ID NO: 184888 - DNA, 356 bp, Glycine max
ttcaacgttcaaaggagctagtaatctattaccaaaacattgtaatcgattacaactttctgaaatcaattggaacgttgtaaattcatttgaaaactttttcaaaaccactttgctactggtaatcgattacaataatctggtgatcgattaccagagagtaaaactctttggtaaacatgttttgagaaaaatccatgtgctactcagttttggaaaaaaccttttcatacttatcttgattaagacctctcttgattcttgaatcttgagtcttgaatcttgaatcattgatcttgagtcttgaatactgatcttgattaatcttgaatctcgaaacttgaatcttgaatctt

SEQ ID NO: 184889 - DNA, 385 bp, Glycine max
tactcaagcttctaggaattgggtctctcttggagaagagaagagaatgttattcacttgcaaatgcaaatatgaattgtgatggttaaagaatggtttatgacccttacaattcttcttttatatttaggcttcctctaagaacacccaccccctaacatacatcaaggtccatctactcaggcccaaactcactacagctcaatatacacacactaacataagcatgacgtcgccacgaaaataattaatttatatcaggcacttaaattaaatttaattgctcttgtaatttaataaaagccacttaattaggcattatgaaaaacacaatgttacaccttgggtaacaaaggttgcacattcgaaacagaagtaaggatgg

SEQ ID NO: 184890 - DNA, 224 bp, Glycine max
attggctaacccttggattatacggctatatgtcgctcgaaatatcagtattttatccgcaaaaaaatatcatttctctgtaataaaatcgatttataaacttttgacagtaattcaggccttaataattaaaacatttggattaacccacccttttaaagatgaaattttggggtaaagccccgttagaaaacaagtacttgtttactacacccctcatctaa

SEQ ID NO: 184891 - DNA, 431 bp, Glycine max
  unsure (1)..(431): unsure at all n locations
tgcacaactntgatctaacaagtgcgagagctaatttgtcctctcgagaagcgcatccaactctagtttgttgaaaaggagtctatgaatgccctaaccacatggatcgaagcctttaatgaacttaagcgtagtcattttattctatctactaaatcttcatcctttgtggattcttgaacaatgttttattattttcttttgatattttacaattcatgtaaactccttttgaacaaattgcactctaaatttctacattatgcaaatttttagtttagttatcattggtctatgtgttgttaagtactttccatttatcgaaccaatataatgggtcggatttacttctcaaatcgcatcagcatttcccgaaagaaaaccttttcgataacatatgtgccatcccaatttgggaccatttaccaaga

SEQ ID NO: 184892 - DNA, 409 bp, Glycine max
acactatagataactcagctttcccaattatcttgatgatgccagagactctagttaattttctagagtcacaacaagtgtgggagaatcaaagagtcctcaatctcaaatcaagattcatgtgaagattccagagaagactcaagatatgcacgaacttctcgaaaagcatcaagattagtctgaaaagatttttcttccaaaacccactagacagttctatcttacacaagaattttctcaaattctctaaagttaccagagtgattactctctgttaatcgattaccagttggcagtaatctgattccagtgaccatattggtgttcaacaattttcaaggatttgtcccgtccgtatacttttccatagtgtattgatacacttcttagaatcgattccagcgaa

SEQ ID NO: 184893 - DNA, 446 bp, Glycine max
  unsure (1)..(446): unsure at all n locations
agcttctttgagaaaacttgcttgagaagttttagcttanctacacacacccctctaataaataagctcacctccttgagaagctttcttgagaagatttctaaagaagctagagcttaactgcacacacctctctaatagttaagctcacctccttgagatgaagagctagagcttagctacacaccccctataatagctaagttcacccccattccaaaaatacatgagaataaaaaaaagtccatactacaaagactactcaaaatgccctgaaatacaaggctaaaaccctatactactagaatagctaaaataccacgcccaacagaagaanaaacctattctaatatttacaaagaagagtggatccaaccttgacccatggggctgaaaatctaccctaagggtcacgagaaccctaggggcttctttagtagctttac

SEQ ID NO: 184894 - DNA, 382 bp, Glycine max
tattcaaatgagttctgtcataattatctttgcattaactaatgaaatgcaactaaaagagtgtaataacaaatttggaatttacagctggcaaaatctggatacttttaatttaaatagtaatgacacatgtacctatagacatggattggtaagattgataaggaacttcatatcaactatgttgcgagcaatataagtagggttcattcattgataaaatatttagcctcagcttctttaaagtcatatcttgtataatatttaaaaagttaacgacattacatgatgaatacatgacagccatatttgtttcttcttgtatacatgcggaactggataccagattttggctgatacatatgataaattgacttaaatt

SEQ ID NO: 184895 - DNA, 274 bp, Glycine max
cactttcggtgagtcagaagattttaccttatgcactgttaagtcattttgctgcaccttttataaaaatgattactatcaggagggatggcatatctcctaagtctgggagggggtgaataatataaacatgttgctccctaaaatactttgatgtatgaacactatttaaccatctacaggactctattacttagagtccatgatgtaaatcactatataacttcttctactaatctagatatcattatcttcttcaccctatggggtcaaa

SEQ ID NO: 184896 - DNA, 426 bp, Glycine max
ttcagacaatatcacaaccatgtaataattctatttcttatataatatacaaatctatcgttcttgaattcaaatatttggattctcaatgttgatattttcctctcatgttaagtatatctggtttgaaaatcttcaaaacatgataacaaagatttcataaaattcattatttgaaatctggagatgtttgcagtgatttatcaaacaataagcttattggaactattccatcctatttttctggtcttccacgtcttcagaagctgtaagttgtcttctttttctttttctcttcatcctttcttctcctacaccaacaagtactgaataccataaaccaaacgatataaacgtttaagtctatatcaccttatcttacaaatcatatcgtgttattcctaattaatatatttttaatttata

SEQ ID NO: 184897 - DNA, 400 bp, Glycine max
  unsure (1)..(400): unsure at all n locations
agctntgtgtntgggggagcagatgactatgtgaatcattttaaggaacattgtactaaaggacgtcgggacacaatgctctgataggatgtgacattggggcataagtttatattaattgcatgatgttagtctatttcattntacctcactgatttaacaaaacattntgtaaattttgatggccttgtttcgagccaaatatatttntaataagttttaattgataatagtgaattgaatgtgaaccttgtattcacgtgaatnntgttaccacattttttatatattntattatgtatatatatgtcggggtagagggtgtcacatcgctagccaagcctataataaaatcacattggacaagcctaaagtcatgcttggcaacctanagtcatgt

SEQ ID NO: 184898 - DNA, 445 bp, Glycine max
  unsure (1)..(445): unsure at all n locations
agctntangtacaaagaagaagaagaagttcaaagtatattctngcttgtaaaggattgtttgaataagtgtaaaaagtatgaaggaattaatttaatttgcaaaacaaagccttggttttatagaatcttcatgtctggtcaagaagaccatttagaagagttataactttttagaaaaacttaaaaccaatttgaaaaagtcaaaaacctttttgaagagttacatcttttgatttatcagaaacggtcactggtaatcgattaccatattagtgtaatcgattacacaaggcttttaagtgaaaggatgtgactctntacatttgaatttgaatttcaacgttcaagggcactgataatcgattaccaaaacattgtaatcgattacagctttttgaaaataattggaacattgtaattcagtttgaaaacttntcaactca

SEQ ID NO: 184899 - DNA, 411 bp, Glycine max
  unsure (1)..(411): unsure at all n locations
gcttgtanaaaatgtatatgaaagacatattgtgtatggtanaggtgcattcattctcatggagaaattgaaggcatgaaatcttccatgaaagtttggaaccatgaccacttttggaacattcaccaaaacatatcttagatagaaaaagaaatgaatgatcttgataagaagaatgagtgtgtgaggttgtctgaggaagaaagggaatgtagaaggagcttgcaagaagagttttggagaaatgttgtgtttaaagtgtctcttttaaaacaaaaatctatgtccaattggcttattgaaggagaatcancatcaaaattcttccacattatgggaaactggaggaggaagaatatgattagaggagtgaatattaatggtctttggaggaggagccacatgatgtga

SEQ ID NO: 184900 - DNA, 392 bp, Glycine max
  unsure (1)..(392): unsure at all n locations
gaccttagagtcacctgaggcatgccagcttctcgacaacatcgatcagggtgaggtagctgtgcncgaaaaactgaaccagctgaagagaactcccagcgcgaagaaaacagagagggaaacgcgggttcgcacattgatgtccatgaggtaaaccaattgagattttgatttttttttcatccacagagccataggcagcaaaacaggggtattatagtcattttactctggactgacgtgattcaacgggacagtgtttttcccgttcgctttgcttgcgtcttcggcttgaagttgcaagacattattctctagtttcgtnttactaactttcctgttggaactttcttgattattagtgttccgtgatagatatatccatcattttc

SEQ ID NO: 184901 - DNA, 351 bp, Glycine max
  unsure (1)..(351): unsure at all n locations
agctttgaatgctcaattcgagggaggggacaagatttatcttagactgagcaacacatgtacagnggccaaggatgcttgggagactctcaaaatcactcatgaaggaacctcccaagtgaagatgtccagattgcaactattggccacaaaattcgaaaatctgaagatgaacgaggaagaatgcattcatgacttccacatgaacattcttgaaaatgccaatgctcgcactgtcttgggagagaagatgacagatgaaaagctggtgagaaagattctcagatccttgcctaagagaattgacatgaaagtcactgctatatacgaggcgcaacacatttgctacat

SEQ ID NO: 184902 - DNA, 263 bp, Glycine max
  unsure (1)..(263): unsure at all n locations
ttggatgagggaaagtgtgatttctaaagacctgcactttatgcataatgtntgctgtcaaataagtgcagcagaactttggctttgtgcaaaaagtgttgtgtatttgctgggccgggaaagagtagtacagattgcgttctggacgttttctatcacatcccaacgggcataacgcacatttatgcgctagacacttccagtgaaanttttgagtctatcacacggttaacgaattggaacgaagagaatattactatggt

SEQ ID NO: 184903 - DNA, 342 bp, Glycine max
agcttcttagttgcagatgatgcagatgtttttgttctacctcatgcactcctctaatgactatggcatcatttctggtgctaaactgctgggagttggaggccatcttctcaattaaatttctggcttcagcaggagtcatgtctccaagggctccaccactggcagcatctatcatacttctctccatattactgagtccttcataaaaatattggagaagaagctgttctgaaatctgatggtgggggcaactggcacatagtttcttaaatctctcccagtactcatacaggctctctccactgagttgtctaatacctgagatatccttcctgatgg

SEQ ID NO: 184904 - DNA, 360 bp, Glycine max
accccaattaacaatcaatcacactgttttattcataagacgccggagtcttgattcactatgctctgcaatttgaatttgaaacccaaacaattttttgcattgggatggatttgaattttcaaaccaaacactttgatttcttaagatgaatttgaccaccacactaaagcatgcgacatcttctttgtaaaagttacatatttttatatacatttgattcatatgggtcaactagttatcaatgatttaaccaatgactgattgatccactacatagactaacttgataaccgggtcatttgttataacatctgtacacgatgattcccaaaagaatgatatgttaacactaacaaa

SEQ ID NO: 184905 - DNA, 351 bp, Glycine max
  unsure (1)..(351): unsure at all n locations
agctntgtgtaatcgattacacttatttgtttatcgattaccagngactgtttctgataaatcaaaagatgtaactcttcaaaaaggttttgactctttcaaattggttttaaagtttttctaaaagttataactcttctaaatggtcttcttgaccagacatgaagagtctataaaagcaagactttgtttttcatttcaagaatcttgaacacttatttcatacaatcctttacaagccttgaatctctttgaacttcttcttcttctttgtaccaaaagctttttgaagttgtctggttttccaaaccttgaaaaaatgtgctattcatctcttcattctcgtctccc

SEQ ID NO: 184906 - DNA, 225 bp, Glycine max
aacataaatatgactgaatctacacaaatttgttaaaatgattcttcaacccatgcaactgaacacaaaagcgcttcactggcatagaagcacatattcatcgatcagcttccagaattgacctcaactttgcatagctagaccggtatactcaagccaaggcatgccaaattgtcaacctccgtgccaaccgtcattctaatggtgataccagacttttgaaca

SEQ ID NO: 184907 - DNA, 429 bp, Glycine max
  unsure (1)..(429): unsure at all n locations
atccttaagtcacctgangctgcagctntcctgatgtaatgactngggctaatattatttaactgtatgcatggtaaatgtagctccaattattgctgataaatcacactcttagatgtgaaccattgttattcaggttgtgattgctgatgagtcgcattctctgaaaaatgctcacgcaaagaggacaactgcttctcttcctgtcataaaggtattagttcttgaaagccacaatcacatgcgtacctctntctaaagttcatgcttaacagacatataaaacatatatggaaaagataanagatgaccgaagagaattgaaaggatatgttaacagaagagaaaaggaaaaaagaagtccattgtgtgtacagaagcatctgccaagggtctagtgctctaaagtctacacccatgttcctctcc

SEQ ID NO: 184908 - DNA, 424 bp, Glycine max
  unsure (1)..(424): unsure at all n locations
gcttcgaacattacggagagagacatgtatctgttacgtaatccgtaaggttccgtaacgttacggaaaatgaatcatcaaaaagggggcaaaggatgtgtattaagtaaactatgggtgtaaatagcaattcgagtctaggccattctagaacattttggaagttgggttgcttaaggaggaagcaactgggcggcaagctcctccacgttattgaaaaatggtttccggcgcttccgtaatgcttccgtaaagtttccgaaaaccttggataagaatatttcacttaacattggtgaaagggaagagaaaaaacaagaaagttaaggcatatatgcttccgtaagggctcaataacttttccgtanattacgaangaaggggtgaacttatcaagataatggtgtaatagcattttgagtct

SEQ ID NO: 184909 - DNA, 427 bp, Glycine max
  unsure (1)..(427): unsure at all n locations
agcttagtgagacaccagattcagcacttcacaaaatcttctttntcacctgaaatagaattgaaatntacattaattacaagtggaacattataatgagtaatgatcaatttattaaccaaaagtatttacaatcctacaaaaagaactgcaacttggaggaattctatataattatcaaaagtttctatacaaaagtttgtcgtataaaatgactaacaccaaaccatagctaaaattcactaatcataattagtgaaattttggctccataaattcaagtgaaatttgaatagaaattcaaatttccctccaattttttgtgacacttacgctataaatagaggtcatgtgtgtgcatttttcaacttcgataatttgagagttacacttcaatgttcagacctcttttgcagacaaaattcat

SEQ ID NO: 184910 - DNA, 411 bp, Glycine max
  unsure (1)..(411): unsure at all n locations
agcttctgaagttcacccttgatgcctgacttctntgtatcagacaaggtctagtaccggttgagtcaaaagaaggaagagttatttatacaaaacaatgcaaagacaaatatgaacttatcatgctaaccaatacagctgtcaccaaaacgaacacaacataggtgagctgtgaaggcttaacatcataaaatcaatacaatgcctcacatccaggccatacctactcaattaaatcacaagttcatcaacagaaatgataatattcatatcagataaaacaaagcaacaagaaaatgttttctcaaatataattgattatcaattaatttaacgtatcttcatatctaaactgatttttattttaatcaatgttttcagggtaatatctctacaattttaatctccatt

SEQ ID NO: 184911 - DNA, 382 bp, Glycine max
ttgatgttgatggaaggaaattattattaaaactgtatggaatcaaattaaatgaacgtttggttaacggaatgactaatagaaaatagactatgctaatataaaatacaatcatttaattataatctatgatgcaagataaatctattgacttttataaaattatctatagctaaaaaatcatatcaatggtgatgattctttgtgagtggatgatcatacatcacctttaaactcaggatcgaatactataaaaatatatatgctcgcaagaatgattatatggttagtcagtcaagaaatggaggacaacactacaggcttgcattctgaagccatattgatacatgtctcgcgaggcctttccattaagaatcacttg

SEQ ID NO: 184912 - DNA, 406 bp, Glycine max
  unsure (1)..(406): unsure at all n locations
agctngtactttgaagattatggtgtattgtatcaatttacagtttagaatccgctgaactggcgatcactcccatttctatttatccacgtatacannntagttcatgagggttggcggtacgaacatgggcgttaccttgtctgtttacantttgaggggtagacaacagacaatgacacgataggggttttaaggtttgcttggtgttgaaagaacgaaggcgaggagaggtcatgggtttgaatccccaatcaaaaaactaacaactaacaattaacattggcggatcaagaaaaaaataaagaccatgacagatattaggatgttaatgtggccgctgtgtagtgtccagcatgtctttctctgcgcatgtatatattttttgttgtccagggtcatttaa

SEQ ID NO: 184913 - DNA, 180 bp, Glycine max
tcctacatcaacactgtcatgatcaaccccactacaagtgtgatcctccacctgcagaaagtcgctaacaataaaatatcttctagagcgggaggaaatggcttaacgcccgtctggacattttcttaccaaaccatctttcttggggatcaaaagaaccactcccccaagaaaaatctc

SEQ ID NO: 184914 - DNA, 415 bp, Glycine max
agcttgcttctacagagcgtcagtaatgttagattatgatttatacatgctaatcttattaggatactaagggtatgaacaatgaaatccaatcctatgttgttttgaattaatttaaatcgtttccgcaatttctgtatttcaacgcactatatttcgtattttccgtatttccgatatttccataaatccggtggttttacttttcttttactttaaggtgtctttagtcaatcaaactaaaaccaatgaaattcgattaaatttgtacataactattaaactaataacctttatccgaatgaattaagtaaactcaagtccctgtgaagacaaatctttttatacatgtgaaatctatcacaacaatctgtacgcgttgcaaaagtcttaacaaggttttggcgccactttt

SEQ ID NO: 184915 - DNA, 340 bp, Glycine max
  unsure (1)..(340): unsure at all n locations
agcttgctagactggcctcttctatgctgtattgngcagntgtggaatacaaagatctttgaacatctcctttactacatttttgcaacacctacccctttctctctctctctttcactcatcctagggttgattttttcttctctcaattcccaacctcgcatcttccattattttattctcaaaccacgacaacaaaagcacaaacttggtttctcaatttcttcctctcgatcctacccgagttaaattaaaaactagaggagagaaaacaaaacagaacataatanagggttggtcttttgaagtgggagtgaggaatcacacaatctggttgggt

SEQ ID NO: 184916 - DNA, 400 bp, Glycine max
agcttgaattattaaatgttttcataagtctttttaagaattcgatttgactgtttataccctaagtaaaagttctcatatctactttaaagttagcttaactaaaaatagacaacttcttttgatgtctctgatccacaatatccaatatcatctaattctcaaacctaattcctaatcagcggggaagaccctaaaagtgttacaatcttttgatggttcttttgatttcttattggtcgatagtataccattttttttacggtgatacagtacacaaccagtaaatttatataggtttttaggtttacatggttgtgtaactgccacctgtccaaaaatcaattcaccaagagatgcataatcttgccatgtattttaacactcattaggcaggaca

SEQ ID NO: 184917 - DNA, 334 bp, Glycine max
  unsure (1)..(334): unsure at all n locations
agcttgtngaacatactagacttttaagaaaacattatattaacattgtaaagatttatatcatataaataagtcaattcagaatttaaatntaagaaataagactgcttttataggctattccaactaacctgtaaactnttgtgggaaatggcttcggcccgtttgtcaaatgtctgcgtgggcagcgttgcacacatggacagatgccatggtaggttacctaaggtctaagacaaacagaaaacgtagcacaccgacgcattaatccctaatcaaattgngacttgggacccacttatgtggcacanttttcaacactcaaacttctaca

SEQ ID NO: 184918 - DNA, 414 bp, Glycine max
  unsure (1)..(414): unsure at all n locations
agctntaaataggttcagaattcgngaccttgtgcttancgccagtattgcgctaagcctggctgaaggcacctgctgcgcttagcacactgatcttgcacttagcacgcggctttgatgctgatgctctgccagattatcctttgcgctaagcggtggataagcgcttagcccaactgctgagcttagcccaattgctactttttgcaattcaaaacttagcctctttttcacctgaaaatgcacaaatttcatcattaaatccaatggaaatgttctagagacaacgttaaccataaaacaagatttatttacaaaatttactcccaaataaccataaattagggaactatacaagctgtggaaaatgatttcttttcaaaagttagtcgtataatgcgactaacaaactgc

SEQ ID NO: 184919 - DNA, 427 bp, Glycine max
  unsure (1)..(427): unsure at all n locations
agcttaatcttcatgttgctcccgctatctttagctcaaatataacatatttcaattttgaggaccaaaaaggactcaaaatttcgcaaggacaaattccaaacatttggatatttattgggacaaaaaacatattttagcctataatttaagtttaaaaaatatcacgtaggctcagattcatcctagcctagctctaggccaaaaaaataatacatttcaattttaagaggaagaaaaacatattgaaaattttgcagggacgaaaaacatatttaaattaattagacctttggatcatataatttccctntttatctctcttttccattaactaaaatacttcatnttgttgtttatgtctataatgtttcacacttcagagggataggataatacctcttaatatctcataaccatatcatgg

SEQ ID NO: 184920 - DNA, 237 bp, Glycine max
  unsure (1)..(237): unsure at all n locations
agctcgcgagaggagaagagagcgcagcatcaccatttgtggcggaaaaagcaantcgacattcaacagttgttgttgtattgtcctctcacaactacgcttcttctacaccgcgcttggaagagcctctcaacttccttcggtcctcccacgataaccgttcaccggatctgacggtgttctattacgacgatccctccgacgtgggacttcagaccgtgatctatggataatccc

SEQ ID NO: 184921 - DNA, 362 bp, Glycine max
  unsure (1)..(362): unsure at all n locations
agcttgaaaattattaggcggttgtatctataagaatttgacacaagctatgtgggattcacagaagatggagcaaattggctagtggagaacactgacattaaacttgtgggtaaggctttggggtttgggttgctnttatcccaatatcacagattntaggtcacgtagttgattttttttccttttcctaactaacacgacctaattctaagcagtatagattatagactctatgtgcccttatattaatgttgtctccggtgctgacagagcagctataaaagagtcatcccaaatcctagtggataatnntgttaccatttcattttgtggttttttgcaaatgatcgagtactctg

SEQ ID NO: 184922 - DNA, 317 bp, Glycine max
ctaaattcatattttatgggtaacacttgctgaagagctttcttggccttctttgttctaacccctgccataggtcttcaaagttcttctaaaaggtccttgcccttatttcttgccttgtgctcatcactctctccctctttaaaaagaatttgtcctaaatcggcttcttcatctacatccaaaagagttaagtccgacacattaaatgtagtactcacattatactcaccgggcaattcaatcttgtacgcattgtcatttatccttttaaatacttgaaaaggacccttccctcttggttgaagcttggattt

SEQ ID NO: 184923 - DNA, 436 bp, Glycine max
agcttctctacgtagtgtgtgagacttatagatagtattatattaagtccaatcttaacaaaaggcatttctttaatatatcttcttaaaaagctgtttccttataacttagaaaatacactaatacttgaattacgttattttaaagttaaaagcagaagagaaaaacattaaatatagtggaaaatctacaaaatttatcatttttactaaatttaaaccaatcatacgcagaaagacaatattcaaagagaagagggatgtgcttcaaaggtttagactctctctcaattaatacagataggaagggtggcgagagtaaaggtcagtacaatctatatactcttacgcacctcaattgtcaaagattaatataacatatatggcagctcagaatcaataactatggtagacacttgcaaacattgaagccatt

SEQ ID NO: 184924 - DNA, 349 bp, Glycine max
  unsure (1)..(349): unsure at all n locations
agcttagagttgcaatagtgctaatgtttcttgttntagctactccatattggcgacaattaacttgggttcctgtcttcatgatttttaagtttactgtgcaaagtttgttcaagtttggtctttggcaagtgcgtacaaagatattcatgacccgctgattaataagaaagattcaacacctataggatatgaagagacttctggtgtactgctaaattgctgatttcttaatatgatgcaaggctaactcaatgatgtctactccaatatcaatgaaatagagtcttggaaattgtggggttttgcttaaanaattcacatattggaaggtttatttccttatatc

SEQ ID NO: 184925 - DNA, 311 bp, Glycine max
agcttcttgcgtagacggtcttggtgctcttattattccaaaaacaaatccttcttattactagctattttgaattctttagttcctgaatgtacaaccttcaaattgttgctcgttcccttctttcttttctgctaaaaagaaaatcaaatgctgtgaaaacatggatgaagtcctaagaaaatcaatatcaaagaaaacatggaccaaatcacaattaaaaagcacaactacctatctttcagagtcctttggataatttttcttgtctccttatgtgggggggttttgtctaataatattataccttc

SEQ ID NO: 184926 - DNA, 408 bp, Glycine max
  unsure (1)..(408): unsure at all n locations
agcttcaagaaagatcttaagaatacatatgcttgttgtggtctattacaatatggatcatggacaaaattgagcctgaagttgcagacgttgatctgcttggacaacttgacatgtgtgtagtaatttgaagactgctagagaagctaagataaatctatacatctttcatgaagaagtcatgagataatatggcttatatcttggaggaaattgatgatcaagataaatatgttattttgtcctcacaatataatagaactgcaatgcattgaacatttattatgatatagtggtccaaatgacatgagaccagngcctgagtgtcaagggtataactctctacaactctcatgaagacatcataatccatgttagctattcagagggtctaagaancaaaatagt

SEQ ID NO: 184927 - DNA, 246 bp, Glycine max
aaccccccccccccccccccccaacccaagcccttgagctttaactcaccccaacaccgagctgcactgagagaaaagcaccccgttttcatgttttccccacaaccacatacagcacatggtacttagcaccccccctcgtaaaggagccccggaccaactacacaccatgcacccttctgcgcaccggaccgccgccaaacgcccatgcaacatacagccacacatgaagcccccaaacgcacc

SEQ ID NO: 184928 - DNA, 410 bp, Glycine max
  unsure (1)..(410): unsure at all n locations
agcttangtgatgttgcgcgtactgatgggtaccacgagaggtctgcggnggcttgacccatgtgggcgccgaagtgacgacatgggtatctccttcctttctttttgccccagntgctccgatcctcctagcattaatacttgtggaggagatgtaatcgaacttccctctcttcaaacctacttcgattctctccccggcaaataccaagtccgcgaagttggagggcatatagcctaccaacttctcatagtaaaacactggtaaggtgtctaccatcatggtaatcatctccctttccaccatgggaggggccacttgtgctgccaggtctctccaccgctgtgcgtactctttataggtctcactctccttcttaaccatgttctgcaggtgagtgcgatcggga

SEQ ID NO: 184929 - DNA, 325 bp, Glycine max
  unsure (1)..(325): unsure at all n locations
agcttatgttctcaatttcaagcgtgttgatatattacaggactcaaccggacattccacttaaaagttaatgtcgtttgtatttgctacgagcttccggcttccattacgagcggctacatatattaccggactcaatcanacattctggtaaaaagttattgtcgatagaatttgctcacaccttccctcttcaattaccaacgtcttgatatattacggggctcatttggacatcccacctaaaagtgattgtggtctgcatttggccagagcttcttgtctaaattacgagcgtgtcgatatactacggggcgacatcgga

SEQ ID NO: 184930 - DNA, 388 bp, Glycine max
  unsure (1)..(388): unsure at all n locations
agcttgcggactataccttcgaccaaacactgccgtgtttctgtctcggcccggatttaaagcgggttgcagtacccgctccgctttcctaaccgtactggaggcggttgtccgggctttatcctctatggttctctggagttttaacatgacctccgagatggaagccatttgatcttttaaggccgatagatcggccttcatctgttcctgcacgccctcttcattatccattnttctggatcgagtgttatacgggtgccttggtgttttcttagttatgatgaaattcctaaagaaataaacaatggtgaatatgccaccaccacatgagtattgccaatgatgatcggagcacttggatccaccccaaggttttagatacgtg

SEQ ID NO: 184931 - DNA, 415 bp, Glycine max
  unsure (1)..(415): unsure at all n locations
agcttggccaattaagcgtacattgcatccatatgagactttagcaatacagattccatgtgggtgctcagaaagtgagtctcaagtagttgtcacctatacngtccaactgaacgatacaccaatgatgattgctaatctcctaaattctacattgctgacatgcagaacatgaacaaggttctggctccaaacatgaaattcatagattttgattacgtgctatttgttcctaaggaatccaatgggctactactactacctagtgctactaacacagaaggtggtttctctgccctaagccctcaacgaaaaatgattcccttatgtatggtatctacttatttacttatgtaaaatttgtgtcaaaaattatcattcagctatatgctgctatttgcacaatattaggaat

SEQ ID NO: 184932 - DNA, 365 bp, Glycine max
agcttgtctgcttctgagacgcgaggcatcttatgtttactaactctctctcgagctgtctgtgttttctcttcttcagctgtcttatttgagaagctaagactggagaaacgttcttcaagtgaaaaattaattcaacacaccaaaggccatatttctggagagaatgaaccagctagtagccatgttgggattgttaacagattatagtccacctatggtcggctgcctactgtgaataactcccctctacacatggaactggatgaaatcgctgcaacaaagataatcggaactccgtgagtctacatcgattatttgacatatatgatcttgcttgacgaggagtgtgaaatatatgaatt

SEQ ID NO: 184933 - DNA, 416 bp, Glycine max
  unsure (1)..(416): unsure at all n locations
agcttgcttcaacttacatgtttacatgtctcgtaagaagatagttgtgataccactttgtcggttttattgaagaanagaaaaataaaattgaggagcacacccgagaggaatgccgtgaatatttgaagaagggatggaatgatcaattttattcattagcacccagacatttataataattcaaataaaatagaaaactatcatgtacccagaatttgcaatccgtggataacaacctaacttgctcctaaagtgtaggaaccacttattaacttaaacagaaacttanaaattgaagataaagattaaagaggcccataatgcattccacaagcagataattaacacacgacctctatggcttgttgtttactgaggagatatgctctcttatgcaattattatggtttgat

SEQ ID NO: 184934 - DNA, 366 bp, Glycine max
  unsure (1)..(366): unsure at all n locations
gcttgggacgctggtgttatattgtctaccagacgcggcctcttnttcgccaccacgcgccggccgcagcacagtcgcggactcaccgtgatccggctcccgcctccttncatatctcagcgagcgaaagagacctccgccgccggcactctacgccgcaccgagcgcgggaaaagcctaaatccggcgagaattttaccgcgaacaacggggaatttanggttcggagagcgctggtcgcaaagtgcttactctgactctcttagttcaagttntcgatctggttttcaaattcttggaagggaaaccggagagattcaagaaaaagaacacaagagagaatgcaactatttttacgcgagagac

SEQ ID NO: 184935 - DNA, 409 bp, Glycine max
agcttccatcacctctccaaatgcaagctcttttttaaggcgtacggaaagattttagatttgaccatagcagagatatccacagaagtcgttgtatcactcacccaatactatgaccaacctttgagatgctttacgtttggagacttccaattagtaccgactgttgaagaatttgaggagattctaggatgtccttttgggggaaggaaaccgtatcttttctccgggtttcttccctccttgagcaagattgtagttgtggtcagggattctgctagagagttggatcgtgtaaagcaaactcgaaacggcgtagtgggcctaccacggaagtacttataaggcaaggcacatgatatggcgaatcaagaggagtgggtccccgttatggacctattaacattgc

SEQ ID NO: 184936 - DNA, 246 bp, Glycine max
tgtccaaagaattcaagaggtaagccaattcccaagattcaagaatcaagtttcaagaatcaagattcaagaataatcaagatcaagattcaagactcaagattcaagaatcaagagaagactcagtcaagataagtactgaaaaagtttttcaaaatgttgagtagcacaagaagttttcacaagatcattaccaaagagttttactctctgataatcgattaccaggaggtagtaatcgattac

SEQ ID NO: 184937 - DNA, 201 bp, Glycine max
gagagctttcgctccttcagcttcttagagctccggtttttctgaaaaataacatgagtaattgctttaaaaaacactgataggtcacaccatcattgaaacttttcacacacgatattagtagcacaccttatacaatcatccacctcggattcctcggcatatagactatcaacttctgcctgtatagaaccaaactgg

SEQ ID NO: 184938 - DNA, 430 bp, Glycine max
  unsure (1)..(430): unsure at all n locations
agcaccgagctgcagctttagacagggggagtacagtctttattttgatttttctaagcttgccaaccctttgagcaatctcttgaacaaagatgtataatntcatattgatgaattgtggctacaagcttttgatactatgagacaaaaactgattattgcgcccataatcactgccccacactagacacttgattttgaaataatgtgtgatgctagcgattgtgttgtacgagtagcttttggtcacaggaaaaactaaagtttccatgttctacatcatgccagccgcgcgttatatgaacctcacagtaattatgcgacatctgagaaagaatcgcttgtggtatggtatggtttgganaaacactcatcttatttgataagaactaagattattggttgtactgatcatgtcactatacaatat

SEQ ID NO: 184939 - DNA, 293 bp, Glycine max
gcgacaaaaggccaataactcgcaaggccactattgccaatgcggaacgtattctgcgcttcactatccatgcgcacaccacattgcagctcgtggtcacgcgagcatgaactactaccaatatatacatggtgccacaccaatgaacacatcttacaagcatactccgcacagcaggggcccctagagacagaagcggcaattcctccatctgatgaagcatggacactaaatcccgaccccactacaattcgtgcgacaggcgggccacaaccaccacgataatgaacgag

SEQ ID NO: 184940 - DNA, 338 bp, Glycine max
  unsure (1)..(338): unsure at all n locations
agcttctcttacnacgaggagagagagatattgttttatttcgaaccacacgcggcgaggatatctccttcacctctataaacctcataatcactcagaccctcatctaatactccgcatgataactctctcttcaatctctgctgcccctgaggatcttcacaccacaaacgctctctgtcactcagccactcagaagaatgctttccagaacggaaaaaatgccaaacattgagaactctcttccatatctgatttcaggctctaaatattgtcgctgatctttgggcgttcgatcaaccatattttgcgtcacttatccaaattaacagacattt

SEQ ID NO: 184941 - DNA, 266 bp, Glycine max
atgcccaagagatgacctaacttactactccagacacatattgatgtgacgactactccaatgagataaaaacataccgactagaatggctgaccttatcctatctactctatcgaagagacgaattaagaccgactcggtctgccacaagaataaaactgaagcaacctctttaaatgagcgacttgcgcttaactcgattaataaacagtgagccggatacccaactttatctccaccacacatcatgacgcatgtgttcagac

SEQ ID NO: 184942 - DNA, 278 bp, Glycine max
ttacaccatgtaatattctgtgtgaagatgctgatgtgttttaagagtatatgggaaaccaccattttctctcaaatggctgctcttgttaagagggttgtgcacgatatgatacaacaaaaaggaacttgaggaagagaaatatcttattacaccccgcagactatgtgtgtcccttttgtcatctagaggatgaacctatggagcatttgatgttcatctgtacattttcatcaagcatctggaataagcgctatgcttggttggcgatacatact

SEQ ID NO: 184943 - DNA, 290 bp, Glycine max
agcttgacaaaccagcgtgtggaagtgatatatttaataataataactattattattattattaaataaaaaaacttctaactaatcaaatatttgaggtaatctaacaatagttgatgagtgatctattacatagagattactacagttatatagcccaaacgtaatatattacaaagtttttaattttcaagaaaaaatttcaacataattttgataccaaaggcaaacataataatgttaagaagtcatacatcgtccgtatcaactctcggagtgcagcatatata

SEQ ID NO: 184944 - DNA, 404 bp, Glycine max
  unsure (1)..(404): unsure at all n locations
agcttcttagtcttacctgatgaattcatttctacttcttgcactcctctaatggcaatagcatcacttctggcactaaattgctgggagtttgaagccatcttctcaattaaatctctggcttcaacaggggtcatgtctccaagggctccaccactggcagcatctatcatacttctctccatgttgctgagtccttcatataaatattggagaagaagctgctctgaaatctggtggtgagggaaactagcacataattttttaaatctctcccagtattcatataggctctctccactgagttgtctaatacctgaagtatcctttctgatggtcgnggtcttggaagcacggaaaatttttttctaagaatacttcttgagtcatcccacctttgatga

SEQ ID NO: 184945 - DNA, 323 bp, Glycine max
  unsure (1)..(323): unsure at all n locations
agcttgctgaaggttgtgagtnttggggaataaatggggtgaaaatggcttcacccttcccctttttatgttttctcgtcagacctcgctcgcccaggtgagctggccactcgtcgaggcgagctaatttttttttttagcaaaaaatcctttgcaaagatgtgttattcattgctatattttctctctaaaaatcctataattgcatataaacttaggcgaattcaggatatagttcaagacaacaaacaagtatgaaataggaaattntaaaaagcaaagctagagatactaggctgcctcccaggagcgcttcttaaaca

SEQ ID NO: 184946 - DNA, 377 bp, Glycine max
atcctaatcttacttagtggtatagtgataatattggtaacaataataaggaaagttactaaagaaacaaaagtacgttttcctatagcaatgatatactaaaagggattagcatgttacataagaaagaaagcacaatacctaaccagacatcccaaatctcaaataaaaattcagaaactgaacattggtatataaagaccaagtcatggactagccactttctggtacataaaattataccatttatcacaaattaccatgccaatcagatcactgagccattacagtacatgacattaccttataatttcatgtcatatgagggccagattacgaccaaacatataaaatagaaacccactcggattctgata

SEQ ID NO: 184947 - DNA, 332 bp, Glycine max
  unsure (1)..(332): unsure at all n locations
agcttgtcagttgagtatagcccacctcagctgtctccttatgaggggtatgnggcattttcaaagtgcatgatgaacaagttgaagcattccaaaatagtaacatctagagcaaaatctctaagtgagaaatcaatatttttgcttcaaccctctctgtgagagcaacccacttctgtattgtgcttacaaatctgtcatattctttagatagaagtgagagatttaataccagagtggaattcctctttcaggtgaagatttgtattctgtgcagtaaagcatacatcctttcttctattgtaagttcagtactagatgggcaagctgaa

SEQ ID NO: 184948 - DNA, 407 bp, Glycine max
agcttcagataagctatatatgggtagataatctttatttgatatttatatcacatcaatcttttcctatcaatctacaatattggcaacagtggactgaataagtccaaaactttgttctccactaaattgacatagaatgctactagatgcctgtatataggtaagagcgagaaaaatgccataatatgaaaataaaaagaatgacagggatggcagaaataaatagtaactctagcattcatttgaatattgcatcgcaactttaaaaatgtataggcatcaagactaaaaaaatagtatagatacataagaagatcaatttctataatatgatcaagatcaagatcacaaaattattaaggtaaccattctcttcatgagttctggttttgagaataaaaaaa

SEQ ID NO: 184949 - DNA, 401 bp, Glycine max
  unsure (1)..(401): unsure at all n locations
agcttatgctgcanacatttacaatagagcttctcaatctcagcagcaaaatcaaccacagcagaacaattatgacctctccagcaacagatacaatcctggatggaggaatcaccctaatctcagatggtctagccctcaacaacaacaactgcagcctggttctttctttcaaaatgctgttggcacaagcagaccatatatttctccaccaatccaataacagcaacagctctagaaacaacaaacaattgaggcttctccgcaacctttcctcgaagaacttgtgaggcaaatgactatgccaaacatgaagtttcacaagagaccagagcctcattcagagttaactatcagatggacaattggctccaattaatcacagcgtccagattttacag

SEQ ID NO: 184950 - DNA, 407 bp, Glycine max
  unsure (1)..(407): unsure at all n locations
actttcatcggaagtagtcagattctgatatgaacttctggatcactaaaggtgtctccatttgaggagttcttcccttaacactctgtttgagactgaaatgtttgttataaacttcctatcctacaaataaggacacaattacattatatggcattagtggaggcttcttttcactgaaaatgtaattatctttcttgttctattatggtcctcaaatgtggagcataaaaacgagaatttcatgggcgcacatgaataaatcatctatattttaaataaagaatcatagatgaaaagtctagagcatagtggagaatattttactagtccacaaaagttggattggcaaaagctttgtaacaanattagaattttcaataatatctgcactcgaattttaatta

SEQ ID NO: 184951 - DNA, 305 bp, Glycine max
  unsure (1)..(305): unsure at all n locations
agcttcaagaattaatggcctcatcaaactacttgttccccgaaggcaattcaattaatacgcctnctatttttaatggagtgggttaccactattggaaaacccgcacgcaaatcttcatagaggctatagatttaaacatttgggaagccatagaaatagggctttatattcccaccatggttgctggaaatacaacaatagaaaagcctacggaagattggagtgaggaagaaagaagactagtacaatataacttaaaagccaaaaacataattacatctgccctaagaatggatgaatac

SEQ ID NO: 184952 - DNA, 378 bp, Glycine max
  unsure (1)..(378): unsure at all n locations
agcttggtggtgcgatgaatcaaataaccacaaaaagctagtaaatgatgcacatgcaacatcaaaacccaacaaaccctgaccaaaatggtacataacaacaaaccactcaagaaaaatcgaaaagctttgtatacaaaacaacaaactcatgataaaatgcaaaaaggtcgaaccttttggcttgaaataccatcatacctgcaaaccaaaccgaaaacgaacaacaaacaacgtttatgaacaaaaaggtcgaaccttgtggcttgaaataccatcatacctgcaaaccaagccgaaaacgaacaacaaancaacgtttttatgaacaaaaaggtcgaaccttgtggctggaaataccatcatacctgcaaacca

SEQ ID NO: 184953 - DNA, 372 bp, Glycine max
  unsure (1)..(372): unsure at all n locations
agcttgcatggcttaggatgtgcaatagtctttatgttgagtttagtgtccatcctcttgcttgccacattaatgcaactcccactatcaatgataaaagaacaaacctttctttgagtgagacatctagtatggaaaatattttatttttattgggactttgttatgacttgacatcccaaaagtcttcttactattaacaagtctccatctagagcataggcttcatcatactcttcttctncttcacttgttggtggggaatttggacatgagtcattatagatgcttctatttctcctccacaccaatggtcttatgtttgggcattgtgacactatgtgtcactttctcaaacacttgaagcacttg

SEQ ID NO: 184954 - DNA, 249 bp, Glycine max
acaaaacacacctataaaatcaacagacctatcacccaacctataatgagatcaacatacaaaataacatttacactccgaacaaagccgcttaaagccaaaattacataacctaatatcctgagaacaagaacgcttaaaaaaccgcgtcaagatacttctacacaacaaatctacttcaaaatatatgcccaactgaccacaaaaccggacgctaaatccgccatgctatacctcaaaacccatccc

SEQ ID NO: 184955 - DNA, 380 bp, Glycine max
  unsure (1)..(380): unsure at all n locations
gggatccttanagtgacctgctgcacgcagcgtgacgcgaggaggggttcttttattcaacgaacctcccttgaacagtggatatttgagaagctcgatgttccctatgatatctttttcaggcttgaaaaagcaatgtcttcaattgtcaaaatccaacggacctatataacaattatgttccaacccttttgttttgctcacactttactcgtcagatagcaaccttggttcagcgccatggcgccgaaccaaagtgttctcctcacacttgttattgccagacacacagctaccacttnaggccattgtgatacgccgcgaggggttcttcaccgatgcatatgatntcatctgcatcactgtgagtttacgctcat

SEQ ID NO: 184956 - DNA, 419 bp, Glycine max
agcttcaacatcagaccacttccagggtgctggaactacttcacatggacttgatggggcctatgcaagttgaaagccttggaggaaaaaggtttactgaattctgcacatctgaaggcatcactcatgagttctctgcagccatcgcaccacaacagaatggcatagttgagaggaaaaacaggactttgcaagaggctgctagggtcatgcttcatgccaaagaacttccctataatctctgggctgaagccatgaacacagcatgctacatccacaacagagtcacacttagaagagggactccaaccacactgtatgaaatctggaaagggaggaagccaactgtcaagcacttccacatctttggaagtccatgttacattttggcagatagagagcaaaggagaaagatggat

SEQ ID NO: 184957 - DNA, 346 bp, Glycine max
  unsure (1)..(346): unsure at all n locations
tgacaaattcattcttgaaagtgtcacgtaagttctttcattaacggacgagagttaacggataaatgaatttgtcacacttttttcactttcggaaactaaaatttgaattttcatctttgagaaacaacatcccaaattcttgttgagtgaactagcagacatcgtgattggcagaggatggctatttaatcggaccatgtatgcatgtaacagaaaaatggattaaattctgagttcattcttttaatagatattaaataggtctacttattaggtaatgttctccatgttgatatatctgaactcattttnttcttgggtctagacttccaatttggcaact

SEQ ID NO: 184958 - DNA, 368 bp, Glycine max
  unsure (1)..(368): unsure at all n locations
tgcagctttgagcaatcaacgacagtactttttacttgatgncgaatgggcccgaatatatcgagacgctcgaattgaaacggaagctcttgaaattcaaaaataaatattttactcggatgttgatgagtcccgaatatatcgaaccctcgaattgaacagaactcgtgaaatgcaaccacaaacttttactccattctgatgagtccgttatatatcgagacgctcaaattgaaacgaagcttgacaattcaacgacaataattttactcgattcgatggtctcgagatatcgagacgctctattgaaaccgagtcgtacaattcaacacaataattgactcgatgtcgatggtccgaaatatcga

SEQ ID NO: 184959 - DNA, 423 bp, Glycine max
cctgaggctgcaagcttgcaaaggggcatgtttctttgattttctttttgggactcctgtttgatgcatctgggtgcatcacatgacatggaaacatgtttgacggtggaggagctgttacaacaactgatgaaccaatgccggtttgagatcaatgaagggaacaagggagaacaacacgtgtgcatgtagtcagtggacaaagaaagcctcgctaaacccaagcctttggtgatacacttaaccagggatgtggcctctcagaaacctcaagattcttgacctattccaggtaccaaacctatcccctttccttatcaaagcgacaaggctatcccgtggagatacactctataaaagcctagcgaaaagaaagaggacgccgccgacattgacttactttctgtctaagttaccaacatc

SEQ ID NO: 184960 - DNA, 401 bp, Glycine max
  unsure (1)..(401): unsure at all n locations
agcttcatcctcagatccgtgttggtggactangtttcttttagacgaccctcttaggtttagactaacttaaactgagtttcgtccggagaatcctcttgtgagactagactcagctcaagcagcttacgaaagtttagcctaatttagcctaagcttcatccacaggtccctcttgtaagactagacctagactaaatagcattattgtaacaacataattaaaaccaaaacttaatccgcagatccctcttgtaagactaagtttcgattctgcttcaatcaagttctaagggaacaatacattntccaatgctaaggtcacctaactatgcacacaaatggatgatcagaccacaagcatacaaacattaagcattgaaggaagcattgaacataac

SEQ ID NO: 184961 - DNA, 433 bp, Glycine max
  unsure (1)..(433): unsure at all n locations
agcttggngttgtccttggcgctgctacttcacttgtaccttgtccaccatccctggcgaaaccccagggtatgttttttcatggacttcagtatttagtatgtttgggtgacctgttttaaatgtggtcttacattttgtttttgtagggatcttttgagaaagttgcacttgtacaatatcgagagaatgaataatgtgtcccttggtgcgacattctcagcatgccctactctctttgatttggaaattgttaggctgtaagtttatttccttcaacttttttcattataagaatattcagactgctagtggatacgaatatgagaatgtcattggttaaaatgtgttgaaattttttgtagctccctattattctttagaatctgggatcaatccatataatatgtatggatatcattgtcatggtaag

SEQ ID NO: 184962 - DNA, 376 bp, Glycine max
  unsure (1)..(376): unsure at all n locations
ttctgtcaaagaaaattaacgttttcctgggaccaaaaatatgtgtcactgaattaatgcccttagaatagttcaaaggtcaagttgtgttgacgagtttgctcccttttactatatgtattattagccagcttttaaattttcgaagaggcaaattatatgaacagggtacatggccgtagcatttggtgttgtcaagtgatcaatacaaacaagaaacattgactcatttaggttcataaaatgagaagcttaattttgcaattttcttcatatgcgatattgcttgatgcctgaataatcttatttatgcactntaattaattaatatttccttctttgtttttgggagactaatgtactatttattatttcg

SEQ ID NO: 184963 - DNA, 414 bp, Glycine max
  unsure (1)..(414): unsure at all n locations
actntgtttccacacctaattgctgctatttacatctagaatatatcagggtaacactaatacctaataacagtgctttttaaatgtccataacatgataacattaccaatcattcggtacataaaagagatatctctacaaaaatgaaaataaacatctagtctgtagaagcaaagcttcatggtgaatcaaaggtgatttaaaggtgttttgatgataacaatgatgataacaaaagatgatgacaaaggtgatgacaaaaagctcaaagatcaatcaaagaacaactcaagtgaatcaagaagaattcaagagttcaagataagaatcaagaagaattcaagacttcagaaggaaagtttagagtcaagaatcaagattccagggtcaagatctcaagaatcaagatcaaa

SEQ ID NO: 184964 - DNA, 423 bp, Glycine max
  unsure (1)..(423): unsure at all n locations
ctgcaacttactttaaagcgtgggaaactctcttacaagaatncattcataattctattcatgaaattntattattttagtattgaattctaaagtacttatatggaatatgattggtgatttaattggttatgattccttttattattattgaacgcgattaaagggatagattttttaattgttaacgcaaatgtatatgatcgattggttntggcttggaacctaactcgcaagaatgctacaaatgttggtagcaataagtatgtgtaggtcatgtatctatttggaattaaatatatgatatatttgttagtcattaacctgattaaatctttagagcatttatgaatcgctcagagattgatcacgtgttcttattattaatgaatataattgtagaccacttatgtatatgatata

SEQ ID NO: 184965 - DNA, 349 bp, Glycine max
agcttcatcagagaatcacaataacaacactattgttttaagttaaatgtgaggtgaaatcccatatcggataaaattagaaaagctgaacatcatataagcgaggagaaaactcataaatatgagtcttaaggttttgaattaaagtatggtgtcaatttaagttctcgtatgtgatggctccacttttatatatatatatatatatatatatatatgtctcatatgactctcctctatatatgtttaacagaggattatttaatgtggttaatgtaacttaatttctttcattgacgccaatttttctcttctttcttttccgcctgatataatttcccacttcgac

SEQ ID NO: 184966 - DNA, 412 bp, Glycine max
agctctcaacaaatgtctgtacaaataatcatcatacagcagaaacctagcaagactacccatcatatctccccaaaccccatacccacgaaaatcaaaggagaaagaagtccacccaaacctgaattttcgaagtcccactcgtagccacgcacttcacgaccccgaaaatgctctcctttcacgatttggtgcagaaatgagcaccaaaggttgaagctttgtgtggagcttcaatggtgaatgaggaagaagagaatggcaacgtgagggagagagagggctgtctgaaattttctgttttgctgagtgaggagagagaaaagctctttggtcttaaataaacagggttttccctttttcattattttatttatgccaaagccacatgtctccatttgagtggagcaag

SEQ ID NO: 184967 - DNA, 377 bp, Glycine max
agctttgccacacatgactttgtcatttctatactagagcattcacctttggtcccttccttcctcccttgctccttcagacagggatttggctcgaagtaccacgcatgataaggtgcttgtaccatatattgtgacttttatcaattgtttgaggcaagtactttattgtgcaagtgtattcatcaaattccttttatatgcgcaacgataacttactcaagttctgggggtggcattaggcttgataaggttctgatgtataatctcataagaaagcttctcactgtaagcgtgaagacatatttttttgttagtgacaatttaatttaaaattttaaccttccacatttaagtccctcccattatttttactg

SEQ ID NO: 184968 - DNA, 376 bp, Glycine max
agcttaagcttcgaagagccgagagaggatcttttagagtcgaagacatgatattgggagacaagttgaaggcttgccaaaggtccaaaaggagtttgtccgagcaattgggcaagaccaaagaaaacatgtgggccatcattgaccaatacaaagaaaagctaagcctagtagaagcccatgaacaaaggctagaggatgagtatgcaaaggtatccgtcctgcaagcgaaaagggaagcgagagagagagagagtaatcgattcattacacagagaagcaatgatgtggatggataggtttgcattcaccttgaatggaagtcaagagcttccgagattgctagccaaagccaaggtgatggtggatgtatact

SEQ ID NO: 184969 - DNA, 282 bp, Glycine max
  unsure (1)..(282): unsure at all n locations
gcttattccctagaggacggcgccctcctctcacctnttcccccttagcttccgctgcatctccatcgcggaaaatcaccattaaaggacctcattgatgctccaagatccaccccccacaaaagccccaccagccaactttcatcaccctgagcagcttgacgtggaagacaattgttgcttggatcccgagggcgcatgcctcatactcaaccatgctgntagcccagaccaaacccaccctcgccacgaaaggtatgcactgattatccggagagaaca

SEQ ID NO: 184970 - DNA, 356 bp, Glycine max
ggctgtaagctaatcataaagcactaaattacaaggtgccttttcttttttacttaaatggattttttactctcaagttcttcttaacgaattttatttttaataaattaaattgacatattttacctacaattttttaagaaacttacaaattttactttttatcatttatctatcaataagcttaaaaatcagggacaaaatttgcacaagagtaaaatgtttaagggaaaattcactaaaaaataaaattgagtgccaaattttggaaaacaataaaaaagtaagggtcaaaagtgtttctaaattcggccaaccaccattgtcacacccaacatcacaccaaaatataaacc

SEQ ID NO: 184971 - DNA, 265 bp, Glycine max
ctatggaggctggatctttgaactttaatggggtcctttaatggtgattgtttaccaaagagatgcagcggaagacaaagtataagacgtgagaggaggctccatccattaaggaatcaagccttggaagaaggagctttaccaccaagatgagccttggataagaagcttggaaaggatgctttcatggacgaaaagaaagagggagagaaagagggacgtgggagctacgatattgaaggaagaaaaagggacagaaattgaa

SEQ ID NO: 184972 - DNA, 428 bp, Glycine max
  unsure (1)..(428): unsure at all n locations
agcttatcaagagtccatggagggaacctgaaccatttatcantcaagtaacttctagccacagccttatggtgactgaacacatcaaaggagaagtttccatggtacttgccaaatccaaattcaccaactcctccaaatggtagggtatctgctatctactacataaagatgtagactagttagcattcaatcacaagcaggctatgcataatgcatgcgcttatggttattacgactgaaaaatggtacaatgcaaccaacaaacatatcacatctntgtataaccctttccgtctttcctcctatgcctttcctccaaacctggtacctaccaagagtggtttcttcattaactattggttccactgcctctgttcaaggatctttgcatcattgatctcaatggccatttatcgtataacaaa

SEQ ID NO: 184973 - DNA, 378 bp, Glycine max
  unsure (1)..(378): unsure at all n locations
agctttgtccttgagtgaaattgntgtggtattgatcataagagatatttcccaccaacaaagatgttctcatccatggctgcaactaactcatcattaacaatgcattcttctagttcatgcacaatcccacatctatgacatgttgggagtgaaagtgtagtgataggacttgagctctcacgagtgtctaaatcttcagtgttagagcttgcatctactttcctaattcaatttggggaccatctttcttcacctggttgatgtctctcttcataatccttctatcccttgagttgttatagggggtatagcacatatcttcaatgatcctgatggcatcaatagggggttttaacatgaggttaccctgacaag

SEQ ID NO: 184974 - DNA, 341 bp, Glycine max
aaaaatatttaaattgagtagagctattattctttccatttctttaatctcacgagtaaatatctcgtacaatgcaacaactttttttaaaaaattaaactaaaaaattagaaactctgatcttgagaaaaaagtaaatttaaaaaaattgataattctttaaaatataaaataagtgtttagtaaaaataaaatagcgtgtcatactgaaaaagagaatataataaaaacaattaaagactctaatttataatctaaagaataatatagttttacactctccgtctttgtaatgtacttacaagaatggcatttaaattaatttactttacagaaaacac

SEQ ID NO: 184975 - DNA, 417 bp, Glycine max
agcttatatcctgtgggtgtgcatatttattctttataaaagatatttatgttttaaatgtggttagatatcataagtgggcagctttttctaagaaaatttgaaccttaatttccagtcttgtgagagattaatatttttttattggaccaaatgtcattgttaaaagaggtaaaaataagttagactctcaactctttgacctaatccatttaaggcctaatatagtttaccctattcagcaaaaaaaagctgatattaagttttttttaaaaaaaaacattctttagttcagcagactataattgtggattttcagaaaagcttactagtgatatgtttaaaaataatattacttttaattaaaaaaatatattaatacttagtatataatataatatcatgacttttacaact

SEQ ID NO: 184976 - DNA, 403 bp, Glycine max
agcttgtagggataaagtgtgacaattgtcacgtgttaatgcaacaattattagctatggctatacgagacatcttgccaaacaaagtcaggttagccataattcgcctgagctttttcttccatgccatatgtagcaaagtcattgatcatgtcaagtttgatgagatggaaaatgaggccgcaattatactatgcccagtggagatgtatttctcccctactcttcttgacatcatgattcacttgattgtgcatctggtaagagaaatcaaatgttgtgatcctatctatttgcgggggatgtaccccgtcgagcgattcatgaagatcttagaagggatacaaagaatctatattatccaaggcgtttattgttgagaggttatacataagaagccttg

SEQ ID NO: 184977 - DNA, 362 bp, Glycine max
agcttatagaatatatgatcaaagaacaattacttttgaagagtctatacatgtttcctttgatgagtctaatgccattcttccaaggaaggattttttagatgatatttcagattccttataagatacacatattcatggaaataactctaaagaaaaagatgaaggaagccatgaagattctcaagataatggggctagaggaaataatgaacttccaagagaatggaaagcctcaagagatcatcccctcgacaacattattggtgatatatcacaaggggtaacaactagacattctcttaaagatttatgccataatatggcttttgtatctatgattgaaccttaaaatataaaag

SEQ ID NO: 184978 - DNA, 404 bp, Glycine max
agctgttgcgagctggagatatttatcctatctccgacagccaatgggtgagtcccgtccaggtagtcccgaaaaagactggcctcacagtgatcagagatgagaaggaggagctgattcctactctggtgcagaacagttggagagtctgcattgactataggaggctgaaccaggttaccaaaaaggaccattttcccctgccattcattgaccagatgcttgaacgcctggcaggtaaataccactactgtttccttgatggtttttctggttatatgcaaattactattgctcctgaggatcaagagaagaccacattcacctgccccttcggcacttttgcttataggaggatgcctttccgtctgtgcaatgcccctggtacctttcagcggtgcatg

SEQ ID NO: 184979 - DNA, 353 bp, Glycine max
tatgtcaaatgcgccgaccatataaaagatattctaaaactaatatgatggtcaacggatcaattccacgaaagtaacgtcacatattttatttggtctaacacgtctcacctcctacatcagtagcgagtgtataatactgctttcactaatgtctcccctcgcgaaatgcaagactgccatgctaaagaaacatgtgtcggatgtctgtgcgatgctgcacatggatggatcacaacactacgattagaattattgtcctcacaccatacacacgctttacctaccgacacgcttttcccactcacttggtggttgatacaactactgctaaaactgaactgccacgcctg

SEQ ID NO: 184980 - DNA, 299 bp, Glycine max
  unsure (1)..(299): unsure at all n locations
ttatgtagatcaatgtgcgaagacatattcttttgtggagnacatgtcaatttatgttagtgaaagtggttgctgatgtatgctatggcgtgcactaaaccacattcgacacatgatgtaagccaaatctacaagtttggcacgtaagagggtgatccttcatctgtgggatatgtggattgtgactattatggtgatctggatgatagaaaggtgtaaaacaaggtatgtcttaaaagtacattatttagtcgcttgtggaaatgtcaacaactaaagcagagtacatgacaatatta

SEQ ID NO: 184981 - DNA, 341 bp, Glycine max
actggatgcctttatgttattgaaccatcttgaaagtgaaatcataggtgatccaacaaatcatgttcaaactagattgtcattaaaaacacaaggacacactacattgatctctgagatggagcctaaacacattgacgaggcaatgcaaaacaacaactaggtgaaagtgatgcaagaatagctcgaccaatttcaaaagaatgatgtctggaagctcattgaactaccaaaaggtaagaaggcaactggagcaaaatgggtattccgcaacaaactggacaaatatggtaagggtgtgagaaacaatgcaagattagttgctaaaggttactcacaac

SEQ ID NO: 184982 - DNA, 298 bp, Glycine max
  unsure (1)..(298): unsure at all n locations
tggatagaaggaggcgaaacaacgatggataaatattatcgtggctctcggttatttaggcccactgatctttcaatatgttagatacaataactctcgctcttacattaattttttagctgtntggcctgtcgcaataggtatttgttttatcaatactctaattggactagtcacgtcctttatgtagatatttcaggtgtgcgatgtctgagggattaccaaaaacatcttatttgttaaaactatttgtgtggcgcaattcctagaatgatggacccaatattgatatgtatat

SEQ ID NO: 184983 - DNA, 431 bp, Glycine max
  unsure (1)..(431): unsure at all n locations
catatcctgatgagggtgttccatatgttctattactggactaatacatctgctgcccaagtttcatggtcttgcaggtgaagatcctcataaacatcttaaggagttccatattgtttgttccaccatgaagccccctgatgtccaagaatatcatatctttctaaaggtttttcctcattctctggagggagtggcaaaagattggttgtactaccttgctcccaggtctattttcagctgggatgaccttatgagggtgttcttggagaaatatttccctgcatctaggaccactgccatcataaaagacatttcangcatcatgcaacttagtggagaaagcttgtatgagtactgggaaagattcaagaaattgtgtgcaagctgccctcaccaccagaattctgagcaacctccttcttaatatt

SEQ ID NO: 184984 - DNA, 339 bp, Glycine max
aggattgtattgtaaaggttgttcaagagaatggtttaaatgcacaacaaagtcttgcttttatagactcttcgtgtctgggcaagagaaccattagaagagttatgacttttagaaaaactataaaccaatctgaaaatgtcacaaaaccctttcgaagagttacatcttttgatttattcagaaacaatcactggtaatcgattaccaaatcagtgtaatcgattacacaaagcttttatgtgaaaggatgtgactcttcacattgaatttatattcaacgttcaaaggcactggttatcgattaccaaaacattctaatcgattacaagctttttg

SEQ ID NO: 184985 - DNA, 447 bp, Glycine max
  unsure (1)..(447): unsure at all n locations
ctggagtntccaagtgccaattcgtcttcttctttagtttcttcttcttctggcttcaattcctcagtgggctttccttctgtgtccagcatcttgggatgttcccagcctttgatgacagctttccaggttctgctatccagtgatttgaggaaggccaccatccttgctttccagtattcatagttggttccatccacaataggtggtctgttcactggtcctccttctttctccatgttcatcagaatttatctccctagatctcactcagtgatttcgagtgcctgctctgataccaattgaaattctgatactggggacagatgtcgtacaggatgtcacgacatcacgcttcagaacatgcagattgtctttgactgtatgaacagattaaccaggtaataacacagagaattgtgacccagtttgtgcaacctccctaca

SEQ ID NO: 184986 - DNA, 402 bp, Glycine max
gtcacctgatgcatgcaagcttatccctttggaccaacatgtgcgagtttactaccaacgccggcctcggtcctccgttggataacgtcaacggcgtcttctccgacaccggctggtacgccaccaaccagtttgccgttgacgtcatcttcagcaacagaatgaaacaataccaatgcctcactcgcgatccttcctcggccgcgggtttttgttccttttacccagtttgacatctttgcttcctttgggatacaacatctaatgcccgagctgcatcgttgaccttggatcggtcatgatagaccgagtggagatcataacgggaagaccattttttttgcggtggacacttgggatttcggaacatactataagatcgattggggacaagctttgttt

SEQ ID NO: 184987 - DNA, 414 bp, Glycine max
cattctaactggttatgaaactaatctatttcttaactcaggcgaaaaaaaacttaaatatcattcatttttggtcggagggaataaaattcaataaataagaagtaaaatttacaaaacttaatgatttttaataaattttatttaataattgttatctctgttataaaaaaattatagtagtatttgagagaacatatgcaattttcgataacaactatttcgataggaaggaataatgaaaagataaaattcaatgacaatacttgttatacagagataaaatgacaacatttttattgaaatatttcgataaagatgatttttcgacaaactattacgcacgtgaaggaaagaagcgcccggaaagaaagttaaaatttattaaatattctcaagcccatatggaagttc

SEQ ID NO: 184988 - DNA, 243 bp, Glycine max
  unsure (1)..(243): unsure at all n locations
aacccccaaatcantatttttttttttgtacctctcccataatcataaactagaaacatccaaaggttcaaagagtaaataaacctatacattaaaatgcataggagtggtgtgtttgttattactgaataaatgaaaatgtatgatctattatctgaaattttacacaacgaactaatattataacaaatattatcataacgatcagagattacattaaactttctaacttagtttttgaca

SEQ ID NO: 184989 - DNA, 263 bp, Glycine max
tattaatgaatctcacatgacatgccacgtgagagtttgtctaatatatatatttttattataaaaaacacatttggcatgaaactaattatctagacttgctacattgaccagagagtttgactttcattgcttacgtgacatggatccttatgaggcatgaaactaactaattggtgtaaccaactgtggagaggtatgccaatatcacttaactatgttggaagaatataaacccttgaacattcactgagtgtctatac

SEQ ID NO: 184990 - DNA, 437 bp, Glycine max
cttctttttcttgtaaccaaggcaagacatatgattctttacctaagagtatccaaatgagatccaagtgtaatttatcttcttaactctatcgtgaggattcttgttgaaacaacttctctccactactttaacggacacctctcctctttattgctaattaatccattatcattcattaaaaactacagtgggttatgggaatgttgtaaaagagttaagagtccataatgattgacaaccgatcattaccaagcttcaaattcgtggatgctgcgacaactaatatgaagggaagtcacggtcatctttcataaatgacattgaatgaatcaatagttggatatattaatgatgtccataatttaataacacattaattgtatgacattaataatatgagcctactacacattcgaagaattaatttatcacat

SEQ ID NO: 184991 - DNA, 370 bp, Glycine max
  unsure (1)..(370): unsure at all n locations
ttaagtcacctgcggcatgcaagcttgaattctagatgagtgcgtaaatgcagttcttaaagntatcattctatgtctagcaatgagtttcttatattatctnttcttttgttctattagaagttaccctttgtcgagcgtctaacccctaaaactaatgcatgcacaccttctttaaatcttatttagaaggtaccctccgtcgagcacctaacccctaaagaatgttaagataaatgcatgggagataaatagaatagaacatttgatagaaaaacacatgttgttgcattgataaataatgaagagtacatcatacatcgctttggctttaggcctgccagaccctaactaggggtttaacctctca

SEQ ID NO: 184992 - DNA, 440 bp, Glycine max
  unsure (1)..(440): unsure at all n locations
tagaccattcaagagattccatttcacattttttttctaaagaactcgaaacctctaaacatgagaagaagaacaaaaacaccaatatgcgaatcacgtgacacaatacataattcctttaaattgcattgattcatataaaatcataaattgataaaattactgatccaactctactactactaattgataaaattactgaagaagagaacgcaggacacctatttttccattgctcaaaaattcaacctttatggtgcgaagctatgtcatggataaatataaaaggagctgctcccctcaccccaaaaatgaatgtcaatcaacatatgggactccaagttgatggtgttaggagcaatangtggcagtgctggtggctggccctaacctggtccatttggaagacaggaatagtatagtattctctaatgcctctt

SEQ ID NO: 184993 - DNA, 239 bp, Glycine max
ctactatattgtatcatttttctcgcattggggcgctcttgactgcatatcctccaccttggcgtttcattgaagatcggctcttttgccatgtctgtattgcatctttagaccatttaaaatgatgttctgctatgaagcaccattagtctttcagaatgacttaggaaggttcgaatatagtctaggtccggtgcgccagtagaatttcttggaagaaatgcataacaattttcatc

SEQ ID NO: 184994 - DNA, 396 bp, Glycine max
atgatattccgagtgctttggatttggtgcgaccatgctctcctgagttccacctgggaaattggcgagtggcggaacgccccggcctttacgcaacaggcagactgtatacctgtacggttttaaaagctctatagttgggcctatgctttagagtcttcattctgttcacgctttgtgtcttctgttttcgaatttataatacaaggaactttcttcatcggttcctggtccctacccattctcattcatttgcgtggatactgctttctctaacacggcagattcgatgacgagtcccccgaaggtactaatactcgggacccgtctatcaacttctagcaagagatgaatccaaccgcagatggaggagacgacgatgggggacctccttca

SEQ ID NO: 184995 - DNA, 441 bp, Glycine max
  unsure (1)..(441): unsure at all n locations
agcctngaaaccgacacatatctatagttttcttctccttcggttcacgggttngtcagtcaaatttattataattgtgaacaaaatatgtaaggatgtatgtttcttcatcccaatatattttagacctcttaagacatgtattcctcctcacattctttaaaacaacttggtaataattgcgtaccaatttctaaaaccaaaaaggtaattccatgaataattttcgcccttcattgcatatattttaacacaattatttgaaactaacactgtggatgaaaagggcgtcaattaaaacgctctcaaatacagtgatcttatataaaaacatttataacaaatttcaatattaaatatatgcgcctattataagaagataacacgactataaatttctatttaatacgcttaaatcttaattttttctgtctaccatca

SEQ ID NO: 184996 - DNA, 452 bp, Glycine max
ggtccctttcaccctctcaagcagacgcattgttgttatctacccaactctgccatggccttcactcgtaactagtaacaaaaaaacaaaagttgttgatctttgcttctcagcatgaactagctagtgttacagcttcttgtgcaagttttctcgggacaaattctctctcttctcgtatttatgacagctatactcatcatcctatttaatacctgagaagagaaagtgaaagaagcataaatatcataaagtgataataaaaaagttgaaagtggtgtttatattccactcctcttcgctgcaatattcattgatttgacactcaccacctctttgaaatcggcttttgtgagatgcatgttgcagcactaggcaccaacgtaagaaaataaacatgttaacacggagattccagaataatagaaaataattacctgcgtaatatgctc

SEQ ID NO: 184997 - DNA, 464 bp, Glycine max
tttaatttcaatacaagagagcatgacttacgcctatgtatctaagttttgggtttgaatgaaaaaaggcatgaatattatgacatgtttgagaggttgttattagagtttaaatttggctgccccatgaggaataccttgcacctatgtagcatggagaatacctttcaacggtatgtatatatgtgaatatatgtatatagcatggaaataccttgcaaaatgttgaataaaatgccttgcaaatgttgaataaagtgccttgcagaaagttgaataaaatgccttgcaaaatgttgaataaaatgccttgcaaatgttgaataaagtgccttgcagaaagttgaataaaatgccttgcagaaagttgaataaaatgccttgcataatatgaatatatatagcatgaagtgccttacaaagtggtggatgggtagcgtgaaagtggttctcaaatatgtgta

SEQ ID NO: 184998 - DNA, 422 bp, Glycine max
tttaaccaagggcaagaggtgggggctttttttcctgtgaccaatgcactattgaatattgatttatatagcataagattaccattagtgtattttctgattcagttttgatgagctgctggaattaagttatcgggggaacaatagagcggtagatatgcttgttggagatatttatggtggaatggactattctaaggtatgactggtgaaagtttatgttccttttcctgtttaaaattataagacagtctttctctgtgttaccatttgatggttcttcgaaatttgaatagcttttgtaaaagtgattgttcaaatggagaataatgttatctagttattctaatgatcttttgctggaatacatcatatatgtttcttttattgataacagataggtctttcatccactgcaatag

SEQ ID NO: 184999 - DNA, 299 bp, Glycine max
gatccttaagcaccgctgctgcagcttaagaaaatggcctaacaaaatatttattcttagaaggaaattcaataaataggcctcctatttttaatggagagggttaccactactagaaaacccgaatgcaaatcttcattgaggcaatagacttaaacatttgggaagccatataaataggaccttatgtacccaccatggtggctggaaatacaacaataaaaaagcctttggaataatggagtgaggaagatagaggacgagttgaatataaatttaaagccaaaatcctaattaca

SEQ ID NO: 185000 - DNA, 426 bp, Glycine max
  unsure (1)..(426): unsure at all n locations
nttgattgatgcggaagggaggaatggtaaaaaaattaatgtttggaagctntaagtaacgaaaatgagtggagttcttatcctagttntagaggtataaatagaataagaatgggttaattgcttttagtggtataaatggaataagaaggagttaatttcttttccttcgtcaaactttnttctacaaaggtttaagtcaatttgttggaaagccactttaattgttgttacccctaacttgcctattagagttggttgccaatgtctcggatagagctacctatgaagggtctgactagaaagcctgagtgaagtgtcgtagtgtgtagccactaaaatgacttttcgcgggttgaggtccctcgtcgattagagataaggcgtaagtagtacttataaagctcgggcaattcttaccatatg

SEQ ID NO: 185001 - DNA, 162 bp, Glycine max
  unsure (1)..(162): unsure at all n locations
tgctctcgaatnacttgagctgatcaacagcatatttatcaatggcctctaccatataaagaacctcctattcctttgttcttaccaaaatctgaaaatgcggcctgtcangatccatgtgaataggttccaaactttacacatcagcttggagatgtgcct

SEQ ID NO: 185002 - DNA, 445 bp, Glycine max
  unsure (1)..(445): unsure at all n locations
tcaagaacaagctngntctcttatcgttcgcgtgtatgatatctactcgacaaggtttgaagtaaagaagaccttcaatcctataacgcaacgtggcggacaaaagtgggcagttaacttgaatgaccattattgtcaatgcggaaggtattctgcgcttcactatccatgttcacatattattgcagcttgtggttacgtgagcatgaactactaccaatatatagatgttgtttacaccaatgagcacatattaaaagcatactccgcacagtggtggcctcttgggaatgaagcggcaattcctccttctgatgaggcatggagactaatccctgacccaactacaatntgtgcgaaaggtcggccaaaatcaacaaggataatgaatgagatggattgtgtcgaaccatctgaccaccgacaaaaatgtagtagatgtgga

SEQ ID NO: 185003 - DNA, 244 bp, Glycine max
  unsure (1)..(244): unsure at all n locations
agacttgaaagtgcctaatagatggctcttctactagactngacggcctaccaaactcatccaaatcgatgtcaaaagtgttaaaatggagaatattctagtgaatatggcagccactcaaacaactctttctacttcactacaaactttggtaaccttcttctcttcagcacttttgttctcgattcggatgaatctggaaggaggcttaggctggcataaaagcctttttcaaccacttttg

SEQ ID NO: 185004 - DNA, 461 bp, Glycine max
  unsure (1)..(461): unsure at all n locations
tatgcacagaanatgtgattatgaaattgagatgcccgaagaaacatcatttcctagttaaccatgcattaggtaccatgttcaattattttgtttttaagtgaaacgggtttatgatcccaacatggttggctcgtggtgcctaacacatgaaactaagaatgtagtgtgaagtttcacgcttcccccttctttgtttttgttttgtagaggaaaacgcaaggatgagcaaacatgaaaacaaatggtatgcaattttgcagatcaaaaagtttgttgaacgcatatgcatgatgatgccatgactcatgcaaaatgtgaggctggaatatgataacggacaaatgcaggatatgtccattatgatgttatgaagagatgcttatgcgatgcatgatatgaatgcattttaaggacacgagagcccggaaaattatctcttcttactcgcgcatttgggg

SEQ ID NO: 185005 - DNA, 335 bp, Glycine max
  unsure (1)..(335): unsure at all n locations
caacgacatgcacaacagttgatcttcaatgaatttctaattgtcataacatatgattcatggatacaatctacgccttctttctttctttacattttaagccattggccaaatagctatcccaatatatattatatttgccattttgcagccccttgtgccaaacacttatatttttcgaacactaaccttggataaaagatttctaccttaccttatgttacgagagcaagggtgttnttgatggggaattctatcatttggcggctcatatgaagtgaatactctgttctttgggtgtcaatataactaaatatttatcataaaataaagga

SEQ ID NO: 185006 - DNA, 460 bp, Glycine max
  unsure (1)..(460): unsure at all n locations
cacatagaaactacgcttgaccaaataataatgagtgggtttgtaagcgatcattatcttaacaactgatataacttttctgaaactttttgttttcaagcttgtctatgttatgtaaagggaccaacaaaacaggtcttgattcacgacttaatcctcgacaattatttattttattttaaattcttttcctactttagtttttatgtggctaaaatgtaatcaacctcacctctagtgtatacctatcatgtttagtttcctccaagaaaactcctcctaacgaaagagctacaagaaatccacattcagacaccgagcatacaattctgaatacatgcatgatcaaagcaaaatagttaaccacaaaagccacttttttaactagttgttagttgattntatgactcctttcatgttctaagcctataatttatatatacttttcaaattgggagag

SEQ ID NO: 185007 - DNA, 298 bp, Glycine max
ttttttatcttgttttctggaagtcaaagcttcaaacacttgacctattggaaaaaaactagggataatttaatcctcttagacaaccctattattcctgttctactccaaccaataatattttttgatgtttatagtcaacagagactggataggaccaagaatattgtgtgttgatcaagtttggggtaaagcttggtttgcagagttagtcacaagtgactgtgacaaaatacttgtaactagtgagaaagtagtgtcatctggtggtttgcaagaattcaacgtccataaactt

SEQ ID NO: 185008 - DNA, 471 bp, Glycine max
  unsure (1)..(471): unsure at all n locations
atactcagcttacaaaagntatatggcttgaaacaagcaccgttgcttgtgtctagaagtttaatgagtctatgagcaactcaagattcaacagatgtgacatgggccattgctgctatgttaagaaatatactaatagctatgttggccttgtcatgtatgttgatgacatgttgattgcaggatctagtatggcagaaactaacaagttgaagcagcagttggcagaaaactttgaaatgaaggatcttggtccagctaaacaaatccttggtatgagaattcttagaaacagatcagaaggaattctgaagctgtctcacgagaaatatatacacaagtngcttgacatgttttaccttgaagattctaagaccaggaatacccgtctaggatctcatttgaagttttcagagaagcaatctttgctgacagatgacgaacaatgctacatgtcaagagtaccatatg

SEQ ID NO: 185009 - DNA, 273 bp, Glycine max
ccttcgacagcccttatgagccttgattccctttcctatgtttgaaactcaatacaagccttaaatgagaaccatgatatccatatccttcaggaattttggagctttggaattgtcttgggaataagagtggagggttcttgttcattggacaatatgtgtgttggctatgctttatgaattattcttgggcctacctaatgtacatcacatattggttaaatacttgacatgctgaatgaaatgctatttctcaaatgtttcttgtttcta

SEQ ID NO: 185010 - DNA, 388 bp, Glycine max
cgaaattattcattaataactttaacagacgaattggatccattctttcttctctactcatgattaaaattgctgcaagaattgtgttaaaagtgatcgtaaatggacaaataaatatcctcacacaaacacaccctcatgtgtttacactcaacattttttttgctttcgtgtttcactctttctggctttttccctctgatagactcaccactcgacttctccttatgagcatgagctctcaagtaagagcctttggggttgattatacaagacaacacacaacatgggatcaatgagaactttactgaatgagaacaaacaaacaagggatttaagaatagtggttttttaaggagaataagaccgaaggaagatgaatagaaca

SEQ ID NO: 185011 - DNA, 420 bp, Glycine max
  unsure (1)..(420): unsure at all n locations
agcaagcttattcaagacagagcagttaatgatattcangatggacgaacaagacagtctatagagtcttagaaagggtatattacataggaagggaattccaattgaagtagcaaaaggtttggccaagaaatttaagttaaacagtcttttacaagatattactctctggtaatcgattaccacaggatgtaatcgaataccagtagccaaaactgatttacaaacagctattaaaatttgaattcaaaatgtggcctgtgtaatcgattaccatatatggtaattcaaattttaaagcttgtaatcgattacacatatactgtaatcgattaccagaagcagatttcagaaaatattctcaactgtcacatatttttatgtggttcttgatcggcatcaaggcctattatatgtgac

SEQ ID NO: 185012 - DNA, 376 bp, Glycine max
  unsure (1)..(376): unsure at all n locations
cgcctcanagaggtccaggaagggcaaggcggccgaatgaactatttccgccccggagtacgacagtcaccgctttaggagcattgtgcaccaccagcgcttcgaagccatcaagggatggtcgtttctccgggagcgacgcgtccagctcagggacgacgagtatactgatttccaggaggaaatatggcgccggcggtgggcaccactggttactcccatggccaagtttgatccacaaatagtccttgagttttatgccaatgcttggccaacagaggagggcgtgcgtgacatgagatcctgngttaggggtcagtggatcccgttcgatgccgacgctatcagccagctccttggatatcctatggtattg

SEQ ID NO: 185013 - DNA, 442 bp, Glycine max
  unsure (1)..(442): unsure at all n locations
agctngcttctacatgattgatatgttattctactctgnactcactntttgcttatgatatggtaatttgatggattaagctaattatgcaagatcatgtagggatgcaaatcaagaggtattaaactttgtggggcacttgctgcagctggaatgattgttgcatgaacctctaaatgtcttcctaattattcaaagagagaagaatgttgtantaacacttgtggattgccgctcgcttcatgatccactccttcccagtaaccatgctggtaagccatattttgtaggtcatttttgttgttttattatgctgctgctgctactttggcatcatgcctaattggtttacttgatgcatgctcttcttttttcacgttgtgtccttcgtgtaacagaaatatatcatggcctcaaccaccagataatcaattagaagaac

SEQ ID NO: 185014 - DNA, 466 bp, Glycine max
  unsure (1)..(466): unsure at all n locations
tcttatttcttcctcanaaaagcagtcattatccattgtttcatcttgtatgggcttgctagaatcattttcagcaattttcatctccaaaaaatccacggcatcactccattcttgcaatttaatccaaatatatctggcagcatttattaacccacacactctaactatggcaacatcatcagaactatccggacataattcagttgccttgaaccgaaaaagtaattgcttaaagaaataccagaggaatcttcctgcagtaaatctaataaattgtgcacgtaataaactggatggcatagtttggcagcgctcaatcatctcccagataattntaagaaaaaactctgcaataggtggagctttgtgatcttcgacagtcaatagcagatactcttgctcagtgtcaatcccagatatgcatttcttagaagtcatccatgctttctcctctatcagttcg

SEQ ID NO: 185015 - DNA, 304 bp, Glycine max
  unsure (1)..(304): unsure at all n locations
attggccacctgcctctatttcagtggaaatggcagtggggacccccgcttatcacagcatatgtaaccttacgttaaaactcatattggccatgcttaaagtttttattttgtaaagctttgtgcctcttgcttttgaatttataatacaaggatctttcttcatctggttcctggtctctacccattctcattcatttgcatgtttacttctttttctaaacggcagattcgatgacgagtcccccgaaggtactaatacctgngacccgtctatcaacttcgagcaagaaatgattcaaac

SEQ ID NO: 185016 - DNA, 428 bp, Glycine max
taaagtatgcccgagtcattcatgcctatgatatgttgttgaagcattggcgatcagaattgccattccttggattacagtgttgaaccaaactcacgcttttacaaaaaggttcatcaagtcaagttgaaatatggaagtaaccgtcttgcaaaattggggcaaaagatgaatcgagtcacatcactgcttcatctactgccaaacatatttaggattattgatgtccttgttacttccagtttcaccttgacaaagatatcatggaccatgttgaaaatctaaattgattcaaccacatatctggcgtaaaaatttcgaatacttcaactgtacatcattcgcatgcatccatgcttttcattggttgcattgctcggtgcattctttcctttgaaaataaaataaaatgaacttaatcattgtta

SEQ ID NO: 185017 - DNA, 326 bp, Glycine max
  unsure (1)..(326): unsure at all n locations
gagctagngannggcttctgcctcttttgttggagtctataagnaggactaatatgtctcaccatgctgcggatatgttgaggctctactaatgatttcctggtcttagttatagataattaaattgttaagacctttattatagtgaatttcaatgactatatagagagtgtcaagtgagaattcttcactattttcattaatcaaaataatgaatatttagtactcgatgatattcgagggggacaattagattcacttacctttacttagnttaggaagtcttcatagattctacttatgatatcgatctccattgtacaagt

SEQ ID NO: 185018 - DNA, 428 bp, Glycine max
cagtaatgatggtccgagttatgttgtggaacggttacgaacccgggatgggtttatgcaaagacaacggcggcataactagcctgataaatgccaaaggaaatcgtgggaagtatggtttaggctataagcccactcatgcaaatataaagagaagcatcgcgggaaggaagagcggtggtcaaagctcgcggttgatacaagaaagtgaaggaagcccgccctgccacataaatagaagctttataagcgcgggtctgggagacgaaggtcaagtggtcgcggtatacgaggatgatgttcctagtacattggatttggtacgaccatgccctcctgatttccagctgggaaattggcaagtggaggaacgccccggcatttacgcaacgagcataatgtaaacctttactggttaaaagctctat

SEQ ID NO: 185019 - DNA, 386 bp, Glycine max
  unsure (1)..(386): unsure at all n locations
aactagntccgctccggagtatgacagtcaccgctttaggagcgctgtacaccaacagcgcttcgaggccatcaagggatggtcgtttctccgggagcgacgcgtccagctcaagacgttaaagaagcgctactatgaggcaacctagtaccttttaaatttctgcctgctatttgatcactttttataagacgacgcacctagttgctcatgatcctgngaatttaaataaaacacgcgcaagctcggaaggtagtcataccttacaaaacatatatatgtattgttaggtagtgaaaataccttatatatgcatgtatgtaaacaaaacaacacttcacaaaatatatatatgtatgtttaggtagaaagataccttatatatg

SEQ ID NO: 185020 - DNA, 437 bp, Glycine max
  unsure (1)..(437): unsure at all n locations
tactcttcagttgctgtatcaaagaaaacattgcctatggtaaggatggggcaacaaatgaagaaatcagagctgccactgaagttgctaatgcagcaaaattcattgatagatttccacatgtgagttcgcactttcatattttgaaatttccattgttctgcctttgcaacaatattaatttcaaatttcacaatacgaagactactacagcatcaggaaccaggaaaagtgaactgtttgtggctgatgtcaacacccagttgaagaacaaaaacatcactactgatatcaaataattattcaacagggaggataatagacaatgctaagattcttgcttggagttttagtgattcaaattttcaattggtgatgcattagtgacagannaattgccttcattngttcatcataaaaagtgggttcctggagca

SEQ ID NO: 185021 - DNA, 305 bp, Glycine max
gttttagcctcaaaaggataatgttagcacaatcaaatacctttctacaaaataagctatgaaatagtgtttattcgtctactgatttagagagtttgctcacgtatttcttggatctggtctatattctcagtacttctgaggagagaccttataaccttaggaggatctttcggatagtgcaatcctaaaggcatggctaccttgaaataagggactgctccttaagggaaaagatctggcaacacacatggctttgtcttggaaacaccttatggaatatttgggaaacctttatctcttta

SEQ ID NO: 185022 - DNA, 416 bp, Glycine max
aatttccttttatgaatgatgctctcctacaacctaagacaaggtagaaggagataaactgtacaagctcaaggttcaataaaacaatcatactttcagctcaaaatgggtgcaagggataaatcaatcatgcacaaggtaagctttttagctaagtggctatcttcaatcaaaacatggccttcatcatcttcaatttcacacattcattctatactcggagattcatgcaaaaatcattactcaatgttagtcattctctcacaattaaagatcacactctcactgggttacgactaatgcgttccttcacaatcaacctgacaaaccaactaacattttcagtcatgatcctaattccatgttccttctcttctaatgattgcatgctcattcaaggcacatgatctacgcat

SEQ ID NO: 185023 - DNA, 57 bp, Glycine max
tgagcagccagctaacaaacctagagggagttggtttctttgcgtaaaccgagcgcc

SEQ ID NO: 185024 - DNA, 342 bp, Glycine max
taacaagtgcggaggcatatgagatgacttcgcaaaatgattgatgccagcgtttacgaaaaccgtgataaatgctcatgcccaagctgatccgacaattctacgtcattagattggtgaccatgaccgccatgggagatgtggacttggagagaaactcgcaccgattcgactcacgcgaatacctgttactctgcgaccgtatgcacattgtaattcttgcactgatgataatcgaactgacatggttcgtgtatctctataaagcttaactaagccaaactgtatctctctctctcacacacacatagctcgaaattctttggtctcaacttattacta

SEQ ID NO: 185025 - DNA, 470 bp, Glycine max
  unsure (1)..(470): unsure at all n locations
gatcttaagtcacctgggcatgcagctgaacttgaggctgtgtctattacttgtttggacaangacnatgctgagccgntttctacctgtaatgtgctgaatactttgatacttgatgggtgttccgtgcataaagatgcaaaattcctctttatatcaaattctagcctctctagtttgaccataagtggtagctntgaaagaggagcttacaaaattgcgctttctatctcaaaccttagttctctcacagtcacgggtaataataatcacacaatctcctccgcatgcaatctttcttttcttgaagaaagtaccattgacaccctcggttatacactttttccgaatacagacttactcatcataagctggctgcaagttctcaccaatgtaaagatactgaggctctattctggacccttctgacaaacacggttagtactatgcttctctcttactctttattt

SEQ ID NO: 185026 - DNA, 429 bp, Glycine max
acttgacttcagcacgcttctcatgaataggttgcactacaattagaaggtactctcaaagagtattctttatgaaatatatctcgatatgagtaatcgaactatagagtatccatattgcacagaacaagaaatcataaacaaccatattatctatgtaattaagggagaacatcatattacaagcatgcatagaattataaggttcctataacaagtatataacgtatatataagaagttagagttaaacagttaataaggttgtattaaggaattacaaacttcaacaactacattcacgactacacacaaaataaagggagttaagtagtcatgcgtttacacatcaagaaagacatactcatccaacgcatatatatatacgggtcaaaagggtttcacaacactaattcatacatcaagagag

SEQ ID NO: 185027 - DNA, 416 bp, Glycine max
  unsure (1)..(416): unsure at all n locations
gatccttaagcacctgggctgcagctttgaatcaactttgaactggtaatcgattacaggaacctggtnatcgattaccagagaggaaaaactctggtaacttagaaaattttgagaaatgctcttttgaaaaacaaaattgtgctatgtttgttttttgaaaaatcttttccatacttcccttgtgaagacttcttgatctcttctcttgaatcttgaattaatcttctcttgaatcttgaaatcaaacttatcttgagtcttgaatcttcttgatatcttctcatgaaacatgaaatttatcttgatcttgaacttgttggctgaatcttgaaatcattctttgatattttggtcatcatctttgtcatcatcaaaattacttgaatcaacctgattcatcatcatgaagcttg

SEQ ID NO: 185028 - DNA, 450 bp, Glycine max
  unsure (1)..(450): unsure at all n locations
tttcaccttctcgctaagccaatctgctggcttagcaagcgtccgctaagcgcaacactcatgggctaagcgcgaggaagactctggaagaagatgagctgtacaggttcgctaagcgcaccgcttcatctcactaagcgcaccgcttcagtccatccgctaagtgagaaaggcatgcgctaagccaaaattcactaatgtgcgctaagcggtccataattgcgctaagcgcacgagcatgaacaaggccacctatttaagccaaaaatcagattttgtgaagggagtttgggctgggattcagagctttgcatgtctagagattctagagagagaaaggtccaagttcaagagagttttgagagattatgttgtgtgaagatctgcagagactagagcttcaagcaggagtcgatntgagagcttaagaatgagtttgtgagtgatatg

SEQ ID NO: 185029 - DNA, 422 bp, Glycine max
  unsure (1)..(422): unsure at all n locations
gcttaagggaatttgtctgaagcatgggattgattccacgagtngctcaaaagttgtccacaccatgggttcaaccagcagaggataatgcacatattttatggtggagtgccctcccacaataggacaagccttgatgctacatgtcaaggcaatatgatgatgaagccaccaattgatgccatctagatcatagaggacatgcgcttcattctctacaacaacttccaggataagagaatcatgaagataacagttaaccaagtggaggatgaaacaactacttctagattnggacaaccaattcanattgagaacttaatggatcgcgcaagaagcgttgattcaatacatcctccaaaatgatcagcgcatgaagcttgtggagacccaactntcttccatacactctctctttgtac

SEQ ID NO: 185030 - DNA, 331 bp, Glycine max
ctctgaaattctggggttgagtgaagagagagagagtgttgctttttggctaaaaaaaaaagctgctctcttttctattattacattgttttcagaaacacttggcacttgttccatgttgagtggaacaaaaagggcccacctttttctgttgatgtgactcatgctcagccacatgaagagaaaaatctgaccttttgaaatgctaaaatcttgcctcgggttgcgtgccatttctctggttccagtccctcgcgtttctctgtgcccatccgggccagatttctaaaggatgcaatttatatatcaaaacgctcacgatctaaccccg

SEQ ID NO: 185031 - DNA, 76 bp, Glycine max
caccgtcacgaaaaagggtgttacgctaccaggagatagagggcccagcgctggaaaagaagtgttcaaaaaaaac

SEQ ID NO: 185032 - DNA, 79 bp, Glycine max
ggaacatctttatctggtgtaccaaccaagaggtgggtgccatcccaactaacatttagtcgttgaagttctgacaaaa

SEQ ID NO: 185033 - DNA, 471 bp, Glycine max
  unsure (1)..(471): unsure at all n locations
agcttctggaagccttcgattgcattatcttggattggttctgcacgaggccacgacgatggtccgaatcgacgcgatggagtttctgttggcgcgctatgatgacgagctagaggtggatgtggtagactccgaggggaggaaaacgatccacgtggcggcgagggaggggcacacgagggttatccagttctgcatcgcaatggaggaaaccctaatcgcatggattcgaaggggtggaccccactccactacacggcatggaaggggcacgtgaaggccgctgagtgtttgttggaatgctccaacatgaagtgcgcgagggatagggaggggagaatggcattttctgttgtagcagagagtgagcacgaacaatctcacgcgcgcacgtgcttggtcgatttgctgggttggagcgacacgctgttgcgtgcggtgagagttgacaatgtcatgacatganaaatg

SEQ ID NO: 185034 - DNA, 484 bp, Glycine max
  unsure (1)..(484): unsure at all n locations
ggacctatgaaactcagcttaggtcatccttggtgttcccattttcagtaagcatgtcttatctgtaacatcatcatccaagaataaattcagataatagtgacaaggattagagcactttggttggagagaacattttttattttcatcttcaatcttttcatgttacatcactcaagtataaattcagacaatagtaacagtagagctttttagttggagagaaaaatattttattttaatttttaatgtttacatgtgattacatccaagtcactttattttcaaagattgtataaaattcagggaaacgacatattggtcagtcttatcatttgttaaacaaatcttcatagaaattaacaggaatgaatacaaatcttcaaagattntaattagaatacagtcagcgtctatcatccaatcacagatagctataaaattaaagattattcacttttataataattattntaaaaatcat

SEQ ID NO: 185035 - DNA, 369 bp, Glycine max
  unsure (1)..(369): unsure at all n locations
agcttatcttacctatctatctgccagatgtctttgcaaagattcaatggataataaacatgaagttctaattcaagatgttttctttgttgcatgggcataatgcaatcactctatgtctagcaatgattttattaagatgtccctacctttgagttctactaaaaattatcctctctcgagcgactaatccctaaaactgatgcatataaaaccttcaatgtatttctactaaggattaccctctttcaagcgcccaaacccttaagatgatgcaaggatgaagcatataatacatttgttgggcatttaggcctgccaagccctaactaaccggnttacccttcattgcatgaagactttacactt

SEQ ID NO: 185036 - DNA, 387 bp, Glycine max
  unsure (1)..(387): unsure at all n locations
tacccncactattacccacaccatacaccaaacctatttatgttaagaaaatgacatcggcagaaatgcagttgagaagggaaaggggcctaagctttacttgtgatgacaagttttcccctagccatcgttgtcctaataagcaacattttgttctacagtgggaagaagaggatgatcctgcattacaaccagatccaccagacgaggttgagacagttggtgaccccagttttcaaattcatcatttgtcttataatgctttaaaaggctcatcaggtcttggaataatgaagtgcagattgtgagtgcaaattctactagatagtgggagttcagataacttcctccagcctagactagctcaatgcctgaagttacctgtag

SEQ ID NO: 185037 - DNA, 406 bp, Glycine max
  unsure (1)..(406): unsure at all n locations
ntgagtcaatttacgggagagaaaggttgtccaatatctaaggagtttgtctcgtgttgagggagacttgcttgatgttggggtagtaaccttgacaagaaggagggttgtgagtttgttgagtccccaaacatgaacatgagttgttcggtgtcgagagtggacaagtgcaagagttgctggtcagtgaggcttgtgatgcaagctccattggagcttgtaggcctaggatcttcttcatcaatggattcctttgcttcttggaagataaatggcagcggaatggagaaggaagagagagaggagacgccacttcaaggagaagatgagtctagaagaagctcaccaccataggaggtcatggattagagcttggaggaagaaggagatgaatgaatggagaggg

SEQ ID NO: 185038 - DNA, 345 bp, Glycine max
  unsure (1)..(345): unsure at all n locations
gtgaaaagggttcagccccttaggcacttttctctctttcgaatctgcttggagaaattgtttccgtgaagaaaatctaagccaaggcacttccgaaacgtttccgtaacgttttcatgaggaatttcgcgaaggtgttcgaccgttcttcgacgttcttcattcgttcttcgatcttcaacgggtaagtcccttgaacccagcttttcgattcattctatgtacccgtgcgtggccacattgtgtttcgtgcatttttattttcgtttcatttactttttatacccccttttgacgtgcttaagccattttatttaagncatttctcgcttaacctcaaaataa

SEQ ID NO: 185039 - DNA, 452 bp, Glycine max
acaacattcagacagcacatgctatcacagccaagcaaaacagagcaaaggcagaaaactctgctcaacacatcgaccaaaatcacagcttttctcacttaaagaccccagtaacaattccttcgatccaattcgttaaccgctggatcgactccaaaattttactggaagtctatagtgcataagcctacattgtgaccgttgggatcgactagcaaacatccagaactcattctgtactactctttccacagccaaccacacacaagcattttctgcaccaagctaaaattctgctgcacctattttgacagcaaaattctgcataagtgcagattatgaaaatcacacttcctctcatccaatcttgttcagatcgattcctacaagtcccaaatcatgtatcatacatgtctaaaccaaagccaaacttcaaaccacagtgacacaaa

SEQ ID NO: 185040 - DNA, 428 bp, Glycine max
tcttctattctactcaatgaatttatgtctatgctaccacattctaccatcaataatggtaggaaaatgcacattgttgattcagatgcttctggttctgcacctgaaattgaagatcattgttctgagctgatgacagccacaggcacgaaccaaacacaagataattttgccaatgttgctttagtgactagcaattcaaatgagaaagcaaacgaccaggtaagcaaatgaaatttgtcaatgttgagctgaattatctacattgtgatttttcttgcatattgccggatattttcaatgagtttatctctaagacatgattttctaggatcccaagcactggtttgagtatcagtactcatatgatgcattatactagcatatgaacaagtgcactgttaaatcatataaacatccttttcaca

SEQ ID NO: 185041 - DNA, 249 bp, Glycine max
  unsure (1)..(249): unsure at all n locations
ttaagtcacctgcggcatgcaagcttaaggaagtcaacctcgggttgtagaagtacatctctatgtncanaagagtgaacaacctaggggcttgcttcaaatgcgaaatgagcaacaaggttatggttcagaacagtgaactcaaatgcgagagcaattagggtgttttgaactaaaattcttttttttatttgatgtacgacagtttctaatataaactggcataaatttataacacaaaacattcta

SEQ ID NO: 185042 - DNA, 447 bp, Glycine max
  unsure (1)..(447): unsure at all n locations
ntgatagcagatgatatgatccttactaggagtggatcgcttgatacaggtcatagagtttggatgatgctacttccagagagggaagataagtcaggatagacaccacaagaattgccttgataagtctgagattggttcaacaagaaacccagagagaagctctctctaaattttataaaatgccaaaagtacttctattgaaaatgaaacccatacatatagtgtatctgaatgaaaaaaatataaatagacaagggccttcaaataagtttgggccaaaattacaacgaaaaaattataaataaaaaatagaacatattttgcatgggccttcaaattagtttgggccttcaacaacaattaatattcttagtagtgcctctgcctttggaccttcatccttctccacttgagccgcgttaagtatgtctgttaccattttgt

SEQ ID NO: 185043 - DNA, 447 bp, Glycine max
  unsure (1)..(447): unsure at all n locations
gctttagctgcttcaattgttcccacaagtttctcttcncatcaatancacatggggcatagacatttacaatgtacagattcatatnttccttaatccatctccctaccaacattaaaaaattcgtgcctttcaccctcctatctacctcaaaggctagattattccacatgcatagaagacctccagcagtgtgaattgaaggaacactgtcccaagacacattatcatcttcccatatattctgacaagcaagcttagtgataatttctttctttgtttcctgtaagcaaactatgtccaccttatgctntaagttgagctttcgaatagcagcccacttcacccccgtacccaagcctctgcaggtatatgagaagaatatcattaataccattatcatctgccttctctgctaccatgtcactatctctctgtccatgtcta

SEQ ID NO: 185044 - DNA, 136 bp, Glycine max
  unsure (1)..(136): unsure at all n locations
ctttctcttcaaaatcaaatatattntagatttctttacataccaacatatcaatattatatgatgcagcaggagggcgtgcttgtaaaagttcaaaggtaataaattaaaggaacttggggggggggcgtcccct

SEQ ID NO: 185045 - DNA, 208 bp, Glycine max
gaagctgccaccaatattaaagtatttagtacatttccggcttttggtgatatgatccattctggagtgataatttccggatttagagtaaaaagaaatggggtggtaggggaatgcactgctaacttacaaaagttttatagaaaatagagctataatgtaaataatgttacttttaatgagtgtttagataatgaccatcttgggc

SEQ ID NO: 185046 - DNA, 296 bp, Glycine max
tcatgagttaccagaccttgggcatgtcaaattgtttggcaccattatgagccgctctgagttactcacttctgccttttatgctacagaacactgtatgggatttgcaaactatggatcgcctactggtgttcactggttgagctctcagatatagccgacattagtggaccggaagtgacctacgtatcaacctttttacatcgataagcttttctcggattccacccaccaactctgaaccatcttttgttcatcacacacattgtgatgcatctataatgtccaactgaatt

SEQ ID NO: 185047 - DNA, 164 bp, Glycine max
tgcaagctctgggttggcggctgtataaatgtcattgagggattctaattggcttgcccctactaagttgactcgtaagaatgagaagcttgtctggaatgagaagtgtgatcaaagtttccaagagctgagaggccggtgacgacagcttcagtgttaatttt

SEQ ID NO: 185048 - DNA, 449 bp, Glycine max
ttaaaactcagcttaggtatcgatacactgattgggtaatcgattaccattgttagtttctgaacaaaagcaaaagatgtaactcttgaaatactttttgactttttcaaataggttttatgtttttctaaaggtcataacatttctaatggctctcttgaccagacatgaagagtctataaaagcgacgatttgttttgcatttgaaaaatctatcttttccaattcattctttacacaagcaattgttccacattgatttctgaggctctatgaacttcttcttcttcttccttttgccagaagctttccaaagttttctgttgttccaaaccttgaaaacttgtactattcattcttttcattcccttctccctttgtcaaagagaattctccaaggactaaccacctgaattctattgagtctctcttctcctttttccaaagac

SEQ ID NO: 185049 - DNA, 316 bp, Glycine max
  unsure (1)..(316): unsure at all n locations
agctttctccgcgaggtacgtaggtcttctttttngttgctaagnnntcgngggtgttcatgttttattgatgataataataataataataataatacgtcttcagttgcagtattgctgattgaggtacaaggaaagcttaaagtttcatgccattttgtagaactcactgccattgccactgtttgggttgangggaagctcatctatatttatctgtagtttacttaagaaacatgttgaaatctgtctctgttaaatatataaactgcttggagcaccagtagagataactattgataaggatcctgttatt

SEQ ID NO: 185050 - DNA, 367 bp, Glycine max
gtaaggtttgaggtataagcagatgaaggagggtattatctgatattcaacacaccctcatgcgaaatcctttgggcttcatgcatgaacaatgcactggctcatttttatcatgtgctgaaatttaacttatatgtacaacaataaagcgcaaggaaggatctaacttgacaccacttggtgaaggaggttcgaatattgttacatgaacccactctcctaatgcatagctctgaagtgtaaccatatgatcggggcattatgattcttgacagggatatattcgacgaagaaatccttaatatattactacctctaaatgctatgaatttgcaagtaatttgacccggtaaccaatattattata

SEQ ID NO: 185051 - DNA, 67 bp, Glycine max
tcttcgtccggatccttacacgcgctcactgttgggagtcaaacgtctattctgagcggggatcagc

SEQ ID NO: 185052 - DNA, 326 bp, Glycine max
  unsure (1)..(326): unsure at all n locations
gtctagcttttcgttggcgtatattgatcttctatntgtgctctatagngagggaatgtgctcaaatatgtggggcaattatggttagccttcttgcttgattggcgcggatagcgggcttgtatgggatggccctaagcctataatgcattttgaaacaatgggacatgccacattgaccccgttctcttgctattgacacctaaacacgcgcccaccaagagttctgagaaatgccacaatggcataaccgcgtgacttttgtaaggaaccaacccatgtagcattcccgctagtacatattctctatgaaaagggacgagcat

SEQ ID NO: 185053 - DNA, 453 bp, Glycine max
ttaagtcacctgccgcatgcaagcttaagcaaggctagactctcgtgcatgcagaggattctttaagaaaaatgccaaactcctacaaaaaatctgatttcaagcttaaataggtgggttggtccatgcttgcgcgcttagtgcaaatctgaatcgcttagcgtgcataagtggattgtggcttatcgcgcttttctcgcttagcggatgaacttgaagcaatgcgcttaatgacctgtagcggtgcgctcagcgaacctggcagctcattttcttctggattggtcctcgcgcttagccactgagtgtcgcgcttagcgaaagctcgctaagccaatatgttgagagaaatttcctaattaacctgagattgagagaaagtgaaaacaatactttttctcaatttgcctaataacctgaaattgagagagattgatcattaatcacacaaaa

SEQ ID NO: 185054 - DNA, 457 bp, Glycine max
  unsure (1)..(457): unsure at all n locations
tgctgaatattccaatgtagaatatcggttgtataatttaaatgtagaaaacaatggagaggaagtattgaagtaacactaactaataaatatttcttgagcaccattgcagatactcccaagtcccaccatagatgttggtcaatcttgttgctttctaactagtctcaaataacatcactcaatcaaataatcaaatgaaaaatcaactcatatctcatgcatattaatttttcacttcaccgtatacaattataaaatccttttttttcataagctataaatcaaatacttatatatcaattgaaaatatctcataaggtaaaatctaatccaacctttaccataagctttgtttaagcaagccagacacaaatatatacttgttttgtgctctgcattattacacattattcctatcggntgttaataacatagcaccacacatacacaccac

SEQ ID NO: 185055 - DNA, 186 bp, Glycine max
  unsure (1)..(186): unsure at all n locations
agcctggtgctcgtgtgctgtatgtgtgattatatgngnggagggttcaatgcaatctgtatttatagtagttgagcgtgactgctggtccttatttttagggtttgtgtagcctttgcagattattcccgacctgtagataatagccaaaagcttatagataattgtagagaaaaacatttgctt

SEQ ID NO: 185056 - DNA, 457 bp, Glycine max
  unsure (1)..(457): unsure at all n locations
tccatcactggccttgaggatcgaggatagacgaactattcacctaagaaggaaggaggttccattggtcaaggtgacctgnggaggtacatcangagaagatgccacgtgggaattagagagtcagatgcaagccgcctatccatccttgtttgagtcaggtaaatttcggggacgaaatttctaaaagggtaggagagttgtaacaccctgagatattataagttatatatcgatgtttaattgtatttattgtgttatttgactatatgatagacttgaatgagttgaagtatgccttgaactagtcatgtgtgaatttcttgatatggatgttgaattatgtggagttttgttgagctaagttgaaagtatgaatatttagatnttaccaaaacctagttcaatgaaatcacgataccggattccttaaccattggatcatcttcaaataata

SEQ ID NO: 185057 - DNA, 135 bp, Glycine max
ctaatttcccccaggatttccggccgttgtatcttttggtacgatctttcaaagaaatgaacatggatttgaggcttttagtccttacgttaatttcacacccttgcgtaatttgtgaacccctaaccccttccc

SEQ ID NO: 185058 - DNA, 422 bp, Glycine max
agagctcgcgttgttcaattacgagtgcctgtatatagatgcgcctgaatcggacatccgagtgaaaagttatgaccatttgaatttctcgagagctttctatgtttaattttgagcgtctcgatatattatacgcctgaatcgaacctcagtgtaaaaagttatgaccatttgaatttctctagagcatccgttgttcattttcgagcgtctctatatgtgatgcaccttaatcggacctccgtgtgaaaagttatgaccatttgaatttctcgagagcttccgttgttcaatttcgagcgtctcgacatattatgcgcccgaatcggacatccatgggaaaagctatgaccatttgaatttctcgagagcttccgttgttcaatttcgagcgtctcgacatattatgcgcccgaatcgga

SEQ ID NO: 185059 - DNA, 232 bp, Glycine max
  unsure (1)..(232): unsure at all n locations
cttgtcctaaggggatatgcttcaaaccatggctaccaaagtaatgtcaggatcccaaggtctatttcgacaaattgcactcggtttatcagttgagcataatgcaaaggcaattgattggagcttgtatgtggccatgatagtcccataaagagggacaatgctgaataacttgtngaaagaaatggtggtgcatttcaaattctggccgttgcaaccatgacccgcaatg

SEQ ID NO: 185060 - DNA, 374 bp, Glycine max
  unsure (1)..(374): unsure at all n locations
tttttgggggtgttctacctctcatttggttgctacatgagtacaggttctgtgttgaagaacaaatgtgtcattntttttcgtaattntcttttttcaaaaaattatcttctctcatctttgctacaagagttgttgctgatttctctttgtttctcttctaattcttttttgtttttttttttaaaaaattatcttctgccatttttgcttcaaagagttgttgcttatttttacatcctctccatcttccattttcgttcctctccattcctcttcatattcatattccattttatttctatttttgttttgggttcattttcgtttatctcactgcctgttcattgtttttaatgaattgctattgtatg

SEQ ID NO: 185061 - DNA, 395 bp, Glycine max
actaacacctcattagctatcattacaccatggaggatatgcctgcctttgaggaaagcaatttgtccttcatcaaataagtgaggcagcacaagagccagcctattagccagtactttggacataattttgtagacacaccctatgagagagatgggtctatagtcataaaagattgcggggctttgttttggggacagggctatgaaggatgcatactatctttggggaactgccataatgaagattcatcaaacaatatgataaatcaagttttgatgttcccacaactgcttgagaaattgaaattataccatccagccaggactttatctccccgcagcccaactgcgacttgatttcactcaagaggcatcacaggcttccttctcctt

SEQ ID NO: 185062 - DNA, 395 bp, Glycine max
  unsure (1)..(395): unsure at all n locations
cctgagtctctatggcagattccaaatctttcagctgggtccctgatgctgttgaagatacccaagatgcacccaagagtccccgatagtgaatgattcggctgctatacctgatcccacaatgctctcttatttagtattatgcatggggaatacattgtgagtatattgatttggagtgcctacctaatacattctgctctcacgaaaataaaaccactactgataactttcgcttgaagataaatgttttatactccaaagcataatatatcaactgttgtgttattagcgggttgcatataccaactgacctcagcatctccccacagngagtgacacatacgtttatcgattgactctttcttctgctcctgagacaaatcatgaccaca

SEQ ID NO: 185063 - DNA, 317 bp, Glycine max
acttaatcaagcatccaagaaaaaatttattgtcgtttgaatttgctcaaagattcaactatcaatttgcagcgtctctgtatattacgggactcaatccgacatccgagtaaaaagttttcgtcctttggattgtcttccactttcacattcaattcaaccgttcggattgttccaaactcaatcaacctctagtaaaagctttgtccgttgaattgctcaaaaattaacattgatcttcagggcttcaaatttatcggactcataaacatccgaagaaagttttgtcgtttgattggtcaaagtcaacattaatt

SEQ ID NO: 185064 - DNA, 316 bp, Glycine max
  unsure (1)..(316): unsure at all n locations
gcacatggatttgatggcgcccanacaaggcgaaggcctcggaggaaagacgcaagcctatgcagaagtggatgacctctccacaatacccgcggaaacattatcagagagaaatcagaaacccgtgaagtatacacagagatgagactgggactccaaagagagaaagactgcgtcatcaccagaatcaggagcgaccatggcagagaatctgaaaacagcatgagcactgaatactgcacatcagaaagcatcactcatgagttctgtgcagccattacaccacaacagaatgggatagatgtgaggaaaaacc

SEQ ID NO: 185065 - DNA, 319 bp, Glycine max
  unsure (1)..(319): unsure at all n locations
aaaaccccnnccaaaagaaaaaagagacatttgcaccaggacaacaggcaagcaaaaaccgccacacacaccaaacaaaacgccgacaaacaccaaaagaaggacagcaaaccaacgcggacacccaacaacgaaagccagacaaacccaacggacgagggacacagcaacaccaaaaaccacaaaaagcccaagcacaaccagcaacgcgaactggcaaaaggcgacaaaccaggaaaccccaaagccagacaaacaacgacacaccaccggccaaaaaacaaaacccacagagaacagcaaacagcaacctaaccac

SEQ ID NO: 185066 - DNA, 355 bp, Glycine max
tccaatagaaagcacacgttactaacagaaactacggtgtgtttggattagcgtggacaccactctgaacagagaaattgcctgttccaacgcaaagaatttcaagtagctatgctgcaactttcataatagatgcttcgttgggttcaattgctgaccaaacacacaccacgtcaaaacagagttgcattacctgctctgacaagggggcatcaacatccaagctatgagaggtcactttttctccataagagggccatttgattcaagtatcatgcttcacggaaaaatacctactcttaaaacattaattaagcttatctgggacagaaaaattgtgacagaaatatatgca

SEQ ID NO: 185067 - DNA, 391 bp, Glycine max
  unsure (1)..(391): unsure at all n locations
tgacattcaccacagaatctgccttcttctatattcagatagggaatgcctctaacagcaccttcgtcaatgatnttcttcatgcctcttaagtgcagaagtccaaaatcattgatgccatattttgacttcatcttctttggagaatagacatgtggaggggtaactgggttcttgaagtgtacataaggaacagtagtcctttgatctgctgcccttcattaggacttcactcttttcatttgtcaccaagcattctgactttgagaaggttacattgaattcttatcacacaactgactgatgctgacaagttccagtcagcccttcacagcagtacttgttagactaggaagtcttcatggctactttccattccgggtcttcctta

SEQ ID NO: 185068 - DNA, 453 bp, Glycine max
  unsure (1)..(453): unsure at all n locations
gcttcttgacattaattcttttggaagtgtatcaagtcttcttgcttggcttttacccaactttgtgtagaagcaaagcttcatgatgaatcaagattgattcaaagatgttttgatgataacaaaaatgatgacaaaggtgatgacaaaaagctcaaaggtcaatcaaagaatgagttcaagatgttcaagatagaatcaagaacacttcaagattcaagaggaaatttgatttcaagaatcaagaatcaagattcaaggatcaagcttccaagaatcaagatcaagattcaagaatcaagagaagacttaatcaagataagtatgaaaaggttttttcaaaaactgagtagcacatggatntttctaaaacatgtttaccaaagagtttttactctctggtaatcgattactagaatattgtaatcgattaccaatcagcaaatgggattg

SEQ ID NO: 185069 - DNA, 272 bp, Glycine max
  unsure (1)..(272): unsure at all n locations
actnngaaacccagcagggctgttagtcttagtgtaaaanngaaaacaaaaagtagagtagttccttacttggattgctgagctcagaagcaaaatggaagcaatgtgaatttatatgcatggagtgcaagaattgcaatgatgacgaatgatataaacatttgtacaagagaaacttgccagagcaaccaatacttttattttggaattttcaaagcctcacataacgggggccactcccttagggatcacttaacgactttagaatttta

SEQ ID NO: 185070 - DNA, 402 bp, Glycine max
  unsure (1)..(402): unsure at all n locations
taaaactacctgctctaatacnagagtagatttaggttttttgttatatgccaccccggctttaagagagatgtcccactggtaaaactaactttccaaatgtatgccttcgcatgaatggccccgacgaagcttgcctcaaagatgtccaagaaggacaaggcggtcgaaggaactagttccgccccggagtacgacagtcaccgctttagaagcgttgtacaccagcagcgcttcgaagccatcaagggatggtcgttttttcgggagcgacgcgttcagctcatggacgacgagtatactaatttccaggaggaaatanggcgccggcggtgggcaccactggttactcccatggccaagtttgaccacagatagtccttgagttttatgccaatgctt

SEQ ID NO: 185071 - DNA, 59 bp, Glycine max
  unsure (1)..(59): unsure at all n locations
agctcatgagagagtcaaagatcatattgattattgaaaatanaagttatgcttaacaa

SEQ ID NO: 185072 - DNA, 423 bp, Glycine max
  unsure (1)..(423): unsure at all n locations
tccccaacatcaaagtaatacgacagtacacagttttttcttcacagctgagcaaaacagggcaaaggcagaaaactctgcccaaaacaccaaccaaaatcacagcttttcacatacaaataccccagaaacatttccttcgttccaattcgttaaccgttggatcgactcgaaaatgttactggaagtctctagtacttaagcctacattgtgaccgttgggatctactagcaaacatccagaactcattctgcactacaatttccacagccaatcacacacaagcattnttctgcacttgtgcaaaattctgctgcacaatttcacagcaaatatctgcacaaagtgcagatttcgaaaaccacacttncccccancaatcttgccaaattaaacctacaagtccaatcatgtatcaatat

SEQ ID NO: 185073 - DNA, 60 bp, Glycine max
  unsure (1)..(60): unsure at all n locations
acccccggggtgtgccggaccccnnnnnccnccgaccccaccagggggggagttttcccc

SEQ ID NO: 185074 - DNA, 297 bp, Glycine max
  unsure (1)..(297): unsure at all n locations
agcttctaccacactccagacatctttttaatgatcttaacagncagatcatgggcaagggtcttgtgaagttgccaaccatatgtcgagaagatccaacggttaatgaaggctgggcagcctttttaccaaggcagcttcatgtaattctctctacaagcttcattaagaggcttgctccataagcttcattaaaggcttcctccacaagcttcatttagaggcttctagcacactccagacatcttctcaaagaattcaatggtcagatcatggaaaagtgtctcgtgaagttgc

SEQ ID NO: 185075 - DNA, 428 bp, Glycine max
  unsure (1)..(428): unsure at all n locations
tccatcanaactggtatctttaacgtatgcacaaagatttcctttggcattctttactggtaactctcaaaatcaaccatcatctacttcttctggtaaagtacaaggaaaacccctccccagaaaatccattcccatctttactccaaaatggacaagatatgactatgagcacacactatctgaagcttacaaggctctctccttagatgttatagttcatctcgagtctccttaatggacacataagatttttccaatgtaattaagatgcaaccacactggatggctactggaacacaatagtgcgtacgtccatcaatagaagtatcacctganaactctttgggaaaatcttatgaagtcaaaagagagaaacaacaattgaaacaaaattctcaagaatggatccttctcaagaagtaaca

SEQ ID NO: 185076 - DNA, 414 bp, Glycine max
  unsure (1)..(414): unsure at all n locations
agcttatagggagaattgagtagtataaggttagaagtgtgagactattaaagggaaagaaacaaaaagagtgaaacatgagtgaaaaaaaaattattgagtggtaacatgtgagagagtgtttgtgtgaggatatttatntttccatttacgatcactttaaagttgtttggtataacaatttcaaacattaaacttgagattggataggttacaatctccattaaatctacatgtaatagacaatcattggagaaaagaagaggagaggactattcgatgcagaaagtatgaaagaggtgattggtgaccaagagaaaaatatttnggagccttaaagacatccttatgttaagacaacgacctgattgtttttaggggaagaagttgacatggttgattctatatatctga

SEQ ID NO: 185077 - DNA, 416 bp, Glycine max
  unsure (1)..(416): unsure at all n locations
tatttgaaaagaatgaagatctttgtcttatttttctatggactactcacatgctctatttggagttntgtaatgtcctctaggccttgcacaagacagatagatcaagtaagcacaaaatctaaaaattagctacaattctcaattaagctcaatcatttgcctaatatcaaaactaagttaaggtgagaaaataagggtcaaagagatgtcaattgagctaagaagaatagaaaaataataaactacaaattctcaattagtgtgtctcttatatagtatactcttgggggcctttaatgggagactttctcgtcgtcaacctattttgacggcgtagatttcatgtttcagatgtcctccccggagatgtggcatcgttgtgggcatgatgcactgataacaactatcaaatc

SEQ ID NO: 185078 - DNA, 347 bp, Glycine max
  unsure (1)..(347): unsure at all n locations
gatgctgttcgttgaatgagtatattcccctacaatcccttgtctctgcacccaaatcaataaagaacgagctatacaatttcgtgattgttgaagttaaatattnttaatgcattgacaatgcccttgggggtcttttttataataatgtgataaattactttattatggacctctttagaagactaaattaaaattattctttggtcaaactaaatttaaatgaaatctatgttccttaaactacagaataaaaagaataaaatatttctcatatccattcagatgggttaaccctgatcaagagattgcacttcaatggcatttccctgaaatggatctgacct

SEQ ID NO: 185079 - DNA, 409 bp, Glycine max
  unsure (1)..(409): unsure at all n locations
attaacctagggaattaaaataacttaatggctgagtgtaactgaaatggtggcaaccaaaagtcaccctcaatagccatcaatcagccaccatttggtctcccaaaaggctgatgcctaggttgccaattgggcccttattacaacttgaactaaacctaactaaagctctttaattgattaacccacaacatatttttggtcaaccaactttacaaggttgggccattatttagacaaactaaacacttcttaaatgagacaaagtggtgtcatttagtcctcctccatgtgggccatgatacaactcacaaccttggactattcttcttgaaactgngcttgtattanatagatggacaacacttgtgaagactttcttggtttcttgctctacccttgcattgtc

SEQ ID NO: 185080 - DNA, 402 bp, Glycine max
  unsure (1)..(402): unsure at all n locations
ctcgcccaggcgagctaggttgcttcctccataatcaaccgccttctgaaggaattttctggaaggcccaagtaggcctgattgctatttgcacccccatttttactaaatacacctcccttgctctttttttggtgattttttttgtaacgttacgaaactttacgaatttcgtaacgatgcttgttttctttacgcaatgttacgaaaccttacggattacgtaatcatcccttttttgccttccagaacgttacggaactntacggattgcacactaacacttccttttaattctcggcatgtcacggaacttcacggattgtgctacaatgctttcttttgacttccggcatgtcacggaacttcacgaattgcctaacgatgggtgccaaatacctc

SEQ ID NO: 185081 - DNA, 118 bp, Glycine max
atgactcctctgcggcttccacataaggcatagaggatgggcagctcaccaagatgtcttcctcgcctgatacgatgaccagatgccctttcactacgaaattcaacttttggtggag

SEQ ID NO: 185082 - DNA, 412 bp, Glycine max
  unsure (1)..(412): unsure at all n locations
ttctccatacaattaatccacgaccagagtacaagtactgcatcgtccagcactctactcccattaaacgttgggttttggaacactattttatttctatggttccaaattgaccaagtcaaagcaacccaccaacatttccatcttgtaaggttccttactccacctgacccgagtgtgtgctgtangaagtggtctcttgatgtgttaagatatcatttggatatgatattgatgtgttaggataccatttggatattgtagataattacagaaattagacagaatcatgcgattctgattgtacagctataaataggatttgctattatttctttcctttcttagatacaacaattatagggattttggttcctgattcttagctctatattagtgtgcagaatcagtc

SEQ ID NO: 185083 - DNA, 416 bp, Glycine max
  unsure (1)..(416): unsure at all n locations
ctaccacngaggcattacatccataaatatgagcatatggaatgagaacccaatacatggaaagcggcgaggtagttttcaaaatcactctactctttcataataatcgtcgcgcaagaagtaaaatttgtttcaaaaaaaaacgtctatttttcacaacatcaactaaatatctatgggaattcattattctttataatagtaacgcaatcgaataaaataacaaaaaaattgattatttacgataagactaattatggaaaacaattattctatatatttataaattttcttgcgggaaaaaaaacttagaaacaattggataaaacgggggagtcaacgaataattttatggatgccctactattgccattgaggatcaatatattgccttacaagtcaacatgggctatata

SEQ ID NO: 185084 - DNA, 436 bp, Glycine max
  unsure (1)..(436): unsure at all n locations
tgtgcacatatgatactataacatatcttatactttagtatgtggngaaattcgtgcataaaaaatgaagtgggatcagccataatcagatggtaaaatttgcatatatgtgatgttatatgggtgtatatagcacattaatgaattattttacatgataaaattctattttgttttcacttagaagaagggaaaaaaaaggtgtacctgaatttcaaggagaacgaaagaatatgaataggcgaaggctatgttaccaagagcttggaaaacaccccatactttttgggcctctgtcacagttccaatgcttattccagtgaggctacccttgaaagttcccgtctctattacaaaaccaattaaacataacaggctaaaatgtaagaatccattttaattataggtcaatcatacacaatacccctatatcatg

SEQ ID NO: 185085 - DNA, 451 bp, Glycine max
agcttggttcgaggtacttacccgttgaagatcgattttgacgaagaacgaatgaagaacgtcgaagaacggttgaaactcttgcgaaattcctcacggaaaacgttacggaaacgtttcggaagcgcctcggcttagattttcttcacggaaacaattttttcaagcaaattctaaagagagaggagtgccaaaggggctgaaccctttctttttcacttcctcccctattatagcaaaataggggaggtggtgccgcccagtttgccatgcgagctcatttcgtccaggcgagccaggttgcttccttcagaaacaacatccttttggaggaatattctggaggggtcaagtgggcctgggtgctatttgcacccccatttttactaagtacaccaccctctgtcttttgtggtgattctttttcgtaaggacggaacttacgaattcg

SEQ ID NO: 185086 - DNA, 442 bp, Glycine max
  unsure (1)..(442): unsure at all n locations
ctattgatntgtcaagaattgaaccctgaactctaaatgattatctcctaataccttgtttagattctaggagagcatgtggtttaaggcaaatttactctaaatttgggggaggaaagtcaattagaatgaaaagaaaaaggttaagcatcagcacacacaacaaataagttgtatgttaaaaaaaaagaaaaagaaaataagttgtgttgttacaaaaaggtcgaaagcaacttaagaaaagggaatagtgagaaggctatttgtacaaaacaagaaaagatcattgggattagtctaggacttgtgctctcttagaatctaaacttttgaatcctacaaaagccagtgaattttttgtagccacaacctcactacaagcctgagaaagtccttctgattctggttatatatttctgacttgatgacatgagatgaaatg

SEQ ID NO: 185087 - DNA, 336 bp, Glycine max
  unsure (1)..(336): unsure at all n locations
gactctggatattccaaactcatgcttcttaatgccaagagaaatgtgggtgttttattaggtgagcaccacactttccttctgatgtggatctgcaagaacctcatctaataggctcagaggattggcagtgaacattgaaactttatgtcggctattacatctgatcatgacttggctttggatcccctacttctctccacactttataggggcattntctatcttcttaacaaccttgaaggtgatcgaacttagtacaatattctttctagtgcaatttggtttttgatcccttgngcacgactatattttccatattgcctttatcctgga

SEQ ID NO: 185088 - DNA, 434 bp, Glycine max
  unsure (1)..(434): unsure at all n locations
nctcaaggaagctacctagtctataaataaaagcatgtgtattacttgttggaactttgatgaatgagagtcttatgagacacacttcaaagttccacttctctccctcttttattccttcaatttcgagctccccccttctctctttcttttcctccattaaagcatcatcttcaagcttcttatccaaggcaattcttggtggtgaagctccttcttccttggcttattccctagtggatggtgcctcccctctcctattctcctttgccttccgctgcatctccatggtgaaaaatcaccattgaaggaccacattgaagctcaaagatccatcctccatagaagctccacaagcaagcttccatcaagctctttctcagtagtagtataatacgcttgggcagcatgtacagtcctagaagcataatata

SEQ ID NO: 185089 - DNA, 114 bp, Glycine max
  unsure (1)..(114): unsure at all n locations
ggatcttaagcactgggctgcagctngaggaaagtaggtgcatngtttatattggnaacccaactggccttgattagaatattgatcctgtcgcaagagtctgtgaattatgct

SEQ ID NO: 185090 - DNA, 243 bp, Glycine max
gatgaatgcttccccttcatgaccttcttcaccaatattcctagcacccttcttcaacccagagccatcatgctccttcatataaccaaaggatgctatgactgacgcgcctatcaggaatgatctcttgagtggagcatatgtctcctaatcaagagggatgtgtaagtgtcgaacgaaaagggttacaacatgaggattatgaaatggtgcattcaatctcaatgccttatgcgtgctata

SEQ ID NO: 185091 - DNA, 225 bp, Glycine max
  unsure (1)..(225): unsure at all n locations
ggatccttaagtcacctgcggcatgcaagcttctagccaaatggacttaccttgtattaattcctttgatangccccttgagcctatnttcccctttctttgttttgaagctcattacaagccttaagtgaaaaaaccatgatatcaccttacccttaaggaattttggagctttggaattgttttgggaataagctgggaataagtgtgtgtgggggggggggg

SEQ ID NO: 185092 - DNA, 448 bp, Glycine max
  unsure (1)..(448): unsure at all n locations
ntgaatgctctattcaatggagttgacaagaatatctttatactgatcaacacttgcacagtggccaaggatgcgtgggagatcctgaaaaccactcatgaaggaacctccaaggtaaagatgtccagactgcaactattggctacaaaattcgaaaatctgaagatgaaggaggaagagtgtattcatgacttccacatgaacattcttgaaattgccaatgcttgcactgccttgggagagaagatgacagatgaaaagctggtgagaaagatcctcagatccttgcctaagagatttgacatgaaagtcactgcaatagaggaggcccaagacatttgcaacatgagagtggatgaactcattggttcccttcaaacctttgagctangactctcggatagggctgaaaagaagagcaagaacttggctttcgtgtccaatgatg

SEQ ID NO: 185093 - DNA, 174 bp, Glycine max
taactagctatcttatacttatcccaagtttaagaatttctacacctagaccactccttgaaacacttcttttttactctaactttgctttgaacattctcattccaccaccacgattctttacccctatgtccaaaacctatagattcaccgcgaacggcctttaaccacttt

SEQ ID NO: 185094 - DNA, 366 bp, Glycine max
gaggtgatgctttctatgttagagagagcgattctcctaaatccttgagtgagtcaagaacaccctggctgtatcaaaggactttcacaacctctgtgtgcagccctcgctggaaagagtgactcttgccttcctttcatcttcacccttgttctttcagaccacaattccagaagatccaccacctctgcccagaattatctcgtggccataactcccattttacccactcaaattaagtgatgcttgagcctaaattgaatctcacaacgagacctctcacctcgtattggagcaccctatttggagccgcggagcttcaagaattggcatctctatatttctgcccgccaccacttaacctac

SEQ ID NO: 185095 - DNA, 296 bp, Glycine max
  unsure (1)..(296): unsure at all n locations
cggacacaaaatctaagctagggaagaacgtggaaccttcgaatattcagagatgtgtgaaaccctctggaaccttctgaaangaactgaagacagtagaagactgtccacactcctaccatgtgtggagccattctcataattagtctccaccctgggatgcccgtatattacaccattcgttgttgaagtggaacaagacaaagagaggtaagagccttctttactatccgtccatgacagtagtgaatccatttattttagtgagagatagcctctctgagagagaagataaa

SEQ ID NO: 185096 - DNA, 404 bp, Glycine max
  unsure (1)..(404): unsure at all n locations
agcttgaactaacacgtgataaatgtcttctcaatgtgaaaaaagncaggcagaaagnttaccctagttcttaaggaggatgccttgccctctaaattaaggcccatactctcttttctctctccctacctcaactcgtctcttctctctctccttccccaccatcagcgtctgtctctaacatccaatgtaaattgctagctaattgctcttgcataataaatacaaattaacaatccaagggtccattcattttaaaattgagaaaattaatttaattaatcattaaatgtagtttgaaaccaataaatgcatatatttttaggagaattataaaatttcttacagcaaattttataatattttcttgttgcagcacattattcatgttattctaaaattaa

SEQ ID NO: 185097 - DNA, 348 bp, Glycine max
  unsure (1)..(348): unsure at all n locations
agctgtaaggcttcgngaaacaatactctgctagagtctgttttgcttanagaatacgagtggggttgcttgtagaggcaagaagggaatattgagtggaaccttcaaatgtttaaaataatgggttatggttttacctgcgaaggaaagcaaacaatattaagaggaaactatataggtttagaatactagattgtggttttcatggcgaaggcgagcaaagaatactgagtggaacctacatagatttataatattggatatatgagcctatgaagacttcacaagacagaatatcttagttctgtgcttggtcttattggagaaagtctacaagtataggaatta

SEQ ID NO: 185098 - DNA, 142 bp, Glycine max
gatgtcccacatatttttcatgacaacaaatgcaaaatgatgattaagaaaatttaatgcaaacaagtcatgcatgcacctatggggacactcaagtgtcaaaattttttgggcatggatgctaaggctcatgatcatttct

SEQ ID NO: 185099 - DNA, 454 bp, Glycine max
cggttattaaatagcttagttcgtccaataatatcttattctactacacatttccaaatgttaataagaatatcattagggcaaataattctaccattatttgtgctcttaaaatctcaacttaccactctaaccagaattttgtgatagaaagacattttatttgtagcattatattttttattattttgtttcatgttgatacttgctcaacaatgaaaagcttataaaaatagttctctcatcttccttgaataccttgatctataattcttagaaataagaaaaatatttttttagcatagcgttgaggttgtaaaaggaaaaacatttgtatatcatattccatctcttactaacccaactctctcatctcataaaatttaaaataatgaagggtggataagctaacatgatatgcatataatatattggttcttttgataaaaaagtt

SEQ ID NO: 185100 - DNA, 218 bp, Glycine max
  unsure (1)..(218): unsure at all n locations
ggatcctctaagcacctgcggcatgcagcttcgaccctgtccagcctatctctgttctcaactttccactggcgtttatccggtcgccgtaagcattcattcatttcctttcactctttcccactcgatnttgatcttgtgctgctggctaatcaaagaacccataaaaaccgctggcttattattttttctttcatatttagtggaattgccgaata

SEQ ID NO: 185101 - DNA, 376 bp, Glycine max
  unsure (1)..(376): unsure at all n locations
tctcccncaattttctataaatagggggagaagtgtagtataaaagggttcagcccctttggcacttctctttctttcgaatttgcttatgaaaattgttttcgtgaagaaaatccaagcggaggcgcttccgtaacgtttccgtaacgtttccgtgagtgatttcgcgaaggttttcgaccgttcttcgacgttcttcatcgttcttcagtcttcaacgggtaagtacctcaaaccaagcttttcgattcattctatgtacccgtggtggtccacatttggtttcatgcatttttatttaagccattttatttaagtcatttctcgcttaacctaaaaataaaataaatttccaccgatcgtttgaattgtatta

SEQ ID NO: 185102 - DNA, 427 bp, Glycine max
atctggaccacattcattcaactcctaattgttcacaaaatctattactaatacatatcaatctatctggaatgattataacccttttcttaattcactcgcaacccatgttaattttagaaagaatttcttgttttattataaactaaattaaaatatattttctataagatatatttgttcaaagccatcaaacttgacaatttatataaatctatgagaatctcatatactcgacttgtgaacgcaacttatagactctaagaattcacttcatataaagataataataaaatatctataaataacctatcaagtcaatatcttaacaatataataaagtgaaatagttaatcatatacttcacagtacttaaataatcaaatctagatatgcatcattaccagaaataatttgctatgtatag

SEQ ID NO: 185103 - DNA, 178 bp, Glycine max
tgccgagggttgggttagaacgccattatgacagacgaattatgactcataatagcgggtttcgagctgagaaatggtcagaaacctgtagcacgtataattatggctctgatgatggtcctattgcctgatatattatacttattaacagagagcaatgtgcattgagcgatccgta

SEQ ID NO: 185104 - DNA, 375 bp, Glycine max
  unsure (1)..(375): unsure at all n locations
aattataggagagcacaaatcctaaaattaaccatcttttcttttccatttacattctnttcaactcaactcacttgccctttgtacttagctntattctaatagcacacacacctcttatttaaaacttactgtgtgtttnntttaaattacaatctaattacctattnggtgtgtgtgcctagtattcttacctttataacttggctacccaacaaactcccccaaatttgaggaaaattgcgttgaatcctattgctgtcctataacctaagataaggtatatggagatgacatcttaaggcttgagggtcatcttaaacaatacaatatcttagctcatatgtgggtgcaaacgatataacatcaatgtat

SEQ ID NO: 185105 - DNA, 406 bp, Glycine max
cacccctgataaccgtgtgtagtttatgtatctgagatataatggcttcttagaataaatatctaattcttcacaatatggtgcatgtgcttgcctaaaaacctcttgtccaagatcacgtaacatgttttctatacgatcaccgacttgtacatcaactgcatcagtcagaggggttggtgcatttgtggtaactcacaatgccatatccattttgtataagtaggactgataccatcacatataagatgtgttataatgtcatccaatgattttcgtcgcccatttaaacatttaacacatggacataaatatactccacccatttctggtgcattttcttgggcaaattgcaagaaatcctcaatgctgttctcatactggtgacttatgcgtgcttttttca

SEQ ID NO: 185106 - DNA, 278 bp, Glycine max
  unsure (1)..(278): unsure at all n locations
aactttnccattcttttcttgaaactgggataatcaactcttagatgtccaagttgattacattcatagcactttggaacagaaggagagtcttctccttttttctttggattgaaatttgttcttctttgatttcctttggtccctagaaacctgttgaatctttttttgaagaaactaaaaatcattatcttattcaatttatttcaagtcttcctcgccactttctttttaatagaagatacaaattgaagtgaaattcctttcttttattggca

SEQ ID NO: 185107 - DNA, 378 bp, Glycine max
tatcattatattcatagtaaaacaatatcatttaattttttctttaatttttgtagcgacacttcagattggtcatatgcataaaaattaaaatttggatggtaaaatttactaagaatatatattatatagttaaattgttaaatgataaaatatgcgaccatgtaaaaaataataataaacagaatgagaaaatttataaaaataataaaaatttacgattgtttgcggtgggaacatgataatgaaccactgttgtgacagaaaaagtacacgaaatcagaagcgaaagagacacctgagacggttctttaaacaacctatttttgttctttgataaaacccaaagccactcaagaatcaagatgctttcaacgt

SEQ ID NO: 185108 - DNA, 338 bp, Glycine max
aggaggatgctcatatcctctggagagcaaaaaggagtcgtgtcttcgttctatctctttaaagtgcatggtttatcacgttccacagaagaaataaaggaaagagtcttaaagttgaacattaaccaacctggtagggttatggccttttgggacttttgcagggttagtctcaatcatgcattctggggactcccagaattttatgtggagaagattccgttctataggcacattgggagatcttttctcttgacaaacggtctctaatttaccacattatcctctccatacattatatatcaagctgcaatttcttcttctgctgcgaacatcct

SEQ ID NO: 185109 - DNA, 438 bp, Glycine max
  unsure (1)..(438): unsure at all n locations
tggaatggtggaattatggaagtcttcccctgaccatttttggataaccaataggctcattacaagacataggccaccacctatagcaatggtggctatacgatctttagcaatttcccacacattatcaacacggtaacttgatacagttatcaaattgaaagtcaagagaaatatcataacaccatagtcataattcttcttgatatgggggatgaacctcacataagtagtcgtagctcctgccaaccaaaaataatggctcagcaacaacatttgggaatctccaatcacaggacaaaatacttgattacaagttctttactctttgaagatgaggattacaagttatcacatacatgaggagaanaaaacttgattaccagttctcaatntgtaaaggaggatttccattttagactatggcattgtttctca

SEQ ID NO: 185110 - DNA, 422 bp, Glycine max
  unsure (1)..(422): unsure at all n locations
gtcacctgcggcatgcaagctngcttagcggagtatcacgtactcttgtcattttgacatgctcgctgagtgagccttcatgtgttgagaagaccaagagcatttaaaacactgaggttggcggaactcaagagacacaaccggtcaagagccataaggagagtgtagctttgtgaaaaaatagagagaattagggctgagaggctgganaaaacattctccaacatcttctatcattttttttcaccaaaaatagtttctttctcatattttgaagctttgctttgaatggaaggctcctctntgttggggagtaactacagaaactctcgatgtaagagacttaggctcattcatgtgaagaatcaccgtctgagtatcttctaggtgtaagaacactagactaacgttcaatagagaaa

SEQ ID NO: 185111 - DNA, 407 bp, Glycine max
  unsure (1)..(407): unsure at all n locations
atgttccaagaagagtagattttctcacttttgttgagtggttttattagcattntgttagttgaaataaaggcccaaacttgtgttaaagtggctttcaattctcttgggatttgcaccacctatgggcttgttttaatttatagaaattaacgtttaataaggtgaaaactctagaattgtggctgcctcttggctgaccaaggagttgcataattatccatatgtttatgtgtcttaattctagttttaattaggtataatgacaccatcaattgttgttatcaattctagttttaattaggggtaatgacactatcaattgttgttattggtgatcatttcacttgtgtaatcaacttgatgtcattcctatatataggctgcatattttctaataaaaaaat

SEQ ID NO: 185112 - DNA, 275 bp, Glycine max
  unsure (1)..(275): unsure at all n locations
atatggnnngaggcggacatagaccaagtcacctggctggagatggacatcccgacggtggcggtcagcatggttcttcattgccatctgcgctctcaatagacgactatgtaacttagtgtgtagagcttgtcgggtggacaagatagagtctgcagcttccaccggcgaggtgccttgtgtatatggtggaaaggctgggggtggctttgcctacgtgatctcttacggggagaggccggtaccgaagtgagtggaagtgttatagctccatt

SEQ ID NO: 185113 - DNA, 463 bp, Glycine max
tagcaacagtcccaaaacccaattgttgccgaaaccttgtgttatgatttctatattaccagatttgctagctgctaatgttgcatcatagttttgttatctcatctacctttggcttcatttctttaccttacaattcaggcagttctatcattaccctttttcaatatacagaattggcaacatgcaaacatatctaatccaggaaattccaccactaatagtcagcctataatccataaccaatgaaatgccccatctccaatttattcaatcttctaattttattggagtttctgcagatttaaaataaacgtttggttattcctttcaacataaatctattgtttagtttataattcactcaattctgcctttagtcattgtcaacatgcagaactatcaacatgcaaagagatctgattcttgcaaagccaggatcaacagattacgtattatgccg

SEQ ID NO: 185114 - DNA, 395 bp, Glycine max
  unsure (1)..(395): unsure at all n locations
agcttgccgccacagagttgtacgactatgctcttgtgtggtggaacacgctacataaggagagagcaagaaatgaagagccaatggttgatacatggacggagatgaaaaagatcatgaggaagcggtatgtgccggctagttactcaagggacttgaaattcaagctccaaaaactaacccaaagcaacaagggggtngaggagtatttcaaggaaatggatgtgctcatgattcaagcaaatattgaagaagatgaggaggtaactatggctcgatttcttaatggttngactaatgatatccgtgatattgttgagctgcaggagtttgttgaaatggattatttgcttcacaaagcaatccaagtggagcaacaataaaaaggaagggag

SEQ ID NO: 185115 - DNA, 428 bp, Glycine max
  unsure (1)..(428): unsure at all n locations
tcggtattcaatttcgagcgtcttgacatattacgggactcaatcagacatccgagtaaaaagttattgttgttttgaatttgctcagagcttcggtattcaatttcgagcctctcgatatattacaagactccatcaaagacccgagtaaaaaagatattgtcgcttgaatttgcttagagcttcaacattcaatttcgagcgttgcgatattttacaggactcaatcggatagccgagcaaaaagttattgccgtttgaatttgctcagagcttcggtattcaatttcgagcgtctggatatattacgggtgtcaatcagaaatccgagtaaaaagttattgttgtttgaagttgctcaaagcttcaacattgaatatcgagcggttcgatatattacgggactgaatcanacatccgagtaaaac

SEQ ID NO: 185116 - DNA, 435 bp, Glycine max
  unsure (1)..(435): unsure at all n locations
agcttctgaaagataaacagagaatcttattattaaattaatatatgaaggggagagggggatacataagcttctgaaagataaacaacaaagacagtggtgatacatatgaaaattgaaaagtaccatagaaattatgagaaatacacanatttctggacttgattaagggatgaacaaagaaaggcaaccaaccggagatattaaggttggttagactttagtgctaaagggagaagggtgggagccggcgaggaatacgtattggttttgaatcccccgcttaacaaaanactaattaactaacgacgaacattngcccatatagaaaaaaaaaaaaaaccaaacattgcttaaatcaataactagtttgtgaaatcatactacttcactggtacatnatcaatcaccaattcaccatgataaaaaactcac

SEQ ID NO: 185117 - DNA, 454 bp, Glycine max
  unsure (1)..(454): unsure at all n locations
tcttgctgtccttcctccattctcatctgcaaaatttatgttcagcaaaagtaaaattcacaaaggaaggaagaataaacatataccataactcaactatatgtgagtgtttctcttttaaattaactaattagtgttacgtaagttgttcagttccccatttttcgtttgagaggagacattcaaatgtcaaaacccccattgcttcagttaaagaattaaagagctttaatggttggtgttttcttaaactgattttctattgtaattntaatatttatttcaaaacattttttaaaagattaatcacaaataaaggcaatactcacacaaagagcgagagagagaacttgtgaattaaattctttagcccatatcgctccaactattgaacaaggtgaacaatatacagcacaaagtgcaagaaataaccttaacaaatggctcctcaatt

SEQ ID NO: 185118 - DNA, 175 bp, Glycine max
  unsure (1)..(175): unsure at all n locations
ctgcaagcttaaactatgatgatgtgtatatctctatcgacacagaannaagatacttaccaccactttcttccaacaatataaggaacctcctcccactatatgaggaacttaccttaaaataataggaacctctcattactatgagtagataactagtataccccctatgaac

SEQ ID NO: 185119 - DNA, 373 bp, Glycine max
  unsure (1)..(373): unsure at all n locations
tgtgaattaaatggagtctaaaagacaaaagaatactctttatataaactataaataacattnttacactctcatacttgatgaaagattcaagtaaaaaaaatgcttatttgtaagcattattgttaaattagacccatgaataatatttaggaaaaattgcaattgcaatggcacttttaatttataaaaaacattcacctccttttgaatgatttttttaagattatgattttttaaatgacgagtcagtaaaaaataattgtgtatgatttttaaaaaatttaaaaatcaacaaacttttattataattcgtaatttgatatcattgcatatactaatagacatttatactttattatgaagaatttat

SEQ ID NO: 185120 - DNA, 290 bp, Glycine max
  unsure (1)..(290): unsure at all n locations
agctttacgtaagaaccgtgtctgttcaatgtgatgacaactgccaagcggcatntataaggatcaagcgattcctcatgaatcctcctatgcttgtgccattggtacccggaagaccccttatcttatatatgaccgtgttggatgagtcgatggggtgtatgttggggaagcatgacaagtccggaaagagggaacacgcttttatttctttatcagaagttccagcatgtgaaatgaactactttttgttcgaaagacatgttggccctgtgtgggtagctcatgct

SEQ ID NO: 185121 - DNA, 378 bp, Glycine max
  unsure (1)..(378): unsure at all n locations
tgtaattattcttctatactctctctctctatatatntcttgtacacatacaactaaacgtaccgaataaaatctttagtttatccatcttctatataggatcaaataagcctataatttcatagtcctctctcagaaactattcatggcttcctcacttctggaaataaccactgcatccacccttcccatcaaactcactgcccccagtcaaatgactcattgtagaagcaaagcttcatggcgaatcaaaggtgactgaaatgtgttttgatgataacaatgatgataacaaaagatgatgacaaacgtgatgacaaaaagctcaaagatcaatccaagaacaactcccgtgaatcaagaacaattccagagttc

SEQ ID NO: 185122 - DNA, 353 bp, Glycine max
aaaagattgaacgtgacctttatagtaaacaagccgaaccgaattgctaggctcattttcatccctaggcactatggttcacatggtgactcctcggcttcatattcacggacagactctgcgccttcacattgactatgatacactgtaaatgtcatgctgtcaatcaactctcgtactaatgcattgttatgctcaacaagcctgtcaacgtttgcaactctggcttgaagctgatctgtttcattcttaacctctgtcatcactcttgctaatacatcaaactcttgtgaatttacccactccattgatgaagaagatgagcaaccatagcaaagacttgttgccattac

SEQ ID NO: 185123 - DNA, 133 bp, Glycine max
catcccatctgtttatggttttgtatgatgttgggatgttatatgctgaaattgctgaggaaaactattatagatgaagggtagaactaacctatggtgagaaagtgagaatgtgaatgttttagtgggaaaa

SEQ ID NO: 185124 - DNA, 321 bp, Glycine max
tcatgatgatgattcaagtagttgtgatgatgtgtatttgcccacaagaatgatgtcaagattgagtaagccagttcgagatcaagatttaagaaaagacgtccagaagaatccagattcaagagaagatgatttcgagattcaagagaagaaaccagaaagcagcaagtcaagacttcacaagggaagcatttaaaaagatttttcaaagacctaacatagcataggtttgttttacaagagaagttttctcaaatttttctaagttgccagagtatttactctctggtaatcgattaccagtttcctgtaatcgattac

SEQ ID NO: 185125 - DNA, 130 bp, Glycine max
taattccactcccatatgaccttaataccaaactgccttgcacttaattctggaagttcgcaaaacttattttcttagttttcaagaggtgctcaaattcaagttatgcaaatttatatcaaactatgtt

SEQ ID NO: 185126 - DNA, 409 bp, Glycine max
agcttcgccaagtatccccattgaaaaacctttattcaaacctttcaaagttagtgagaaggctaaacgaaaaattagggaacatagaaaaactaaatccttaattgaaggcgtaggtgacaatcatagtgaattactaaacaagattggtagtttacttaaggtcatttcagatactccccaagcctcggaaaatacttccaaaatggtaataagaagtacctccaaattaattaatgttattaatgaagatagtgaccaaaactcagataacacaactgagataggatcagtgtcagaaaagaatataaatccaattaattccaaacactggaaaacaccctccaaattatattatcaacgtctgactgcccctgaccttctattagaagaaagaggtgaacaattt

SEQ ID NO: 185127 - DNA, 442 bp, Glycine max
  unsure (1)..(442): unsure at all n locations
gagcaagactgcgaggtcactaaccatagaacttagacaccgctgttngtccaaacaatatataaactcagtattagggacattagacctcactcattcaaacaagcggcttatatcacctccgtgtgttatatatacagcaattttggaaacgcattatattctacgctatatattgaaaatttatgcatttgtccaatagaattcaattcattaaaatacacccaggataagttttttttacatcatataatcataaaatgcagaataaaatgcagggtttgattaactttcacatgccgaactgcagaaaccaaaatcaaaagctcaaacaatataataaatgaagttcaattgccacacatctaccgagatgagaaaatatagattgcaaagaatatatatagcaacgattctcatgcatgatagaatctacactcac

SEQ ID NO: 185128 - DNA, 410 bp, Glycine max
  unsure (1)..(410): unsure at all n locations
tctatntcatgtgagatctcattctatccatcacttgtagaagataactccagtaggttctatcaaattctttgctggtgttgattttgaaatccatgtcacttgtcttgccttttgttttccatctcttatggtgaataaattcagaggaaatcaatgcattattaagaatggatctgccttcaaccaaagaagattgctcattggatatacattttggaggagtggtctaagtctactggctaaggttttagagatgatcttgtacaagatgttgcaatgggaggcgagtctatagtctctcatgattttcggattatttattttggggataacgacaatggaattatggttttcttgtagtgggataaaatcttgtcaagccaagatgtagctactgaaaaaatatc

SEQ ID NO: 185129 - DNA, 180 bp, Glycine max
  unsure (1)..(180): unsure at all n locations
agcttccttggggccatttcttgtggagagttgttttaagcgtganaagggaagcaaaaactcaacattggaagcttgggggctgctgctctcgtagttcccgtgagcttgggggtttttgaagtgagggggaagagttttgggtgaagaaaacgttccccctccacccctttatatttt

SEQ ID NO: 185130 - DNA, 353 bp, Glycine max
ccacctttgctatgacctgtattgcactatatgtatatttctttttcgcttgaggaaacactggcgcagatcctcacttggcgattttgaaagaccggccccttttgacatgtctgagtgctcttcaaccatatctgcctgctacaaggcaccataggtccttcctagaatggactcgggaaggttccaagttagtgtaccaggtaacagctaccccagttagactttgttggaaggaatgtatcaacaattcctcatcttttgagtatgcccccatcttccgacaatacatctttagacggttcttagggctagtagaccgcttgtacttgtcaaaatccatcgccttgaac

SEQ ID NO: 185131 - DNA, 304 bp, Glycine max
  unsure (1)..(304): unsure at all n locations
agctnggnngatttgggatggcaaagtaggtggatctcaagtgaggactcacagaataggggtggtggggacatatgggtaccttgccccanaatacatcaacgaaggtcgggctagcaaggaatcagacatttatagttntggggttgtggctcttgaaattgcttcttgaagaaagacttatcaagatggggagtttcccggcctctcatgaactgggttggcacctgatatggagggaaagtctggatgttgttattagagaagaacacgagttgatgtggataaatgcaagctgatcttg

SEQ ID NO: 185132 - DNA, 461 bp, Glycine max
tggtgctaaaatctgtgtccaacagcacattagctgacttattatccctatgaagaacactctgctctgcatcctcatgaagataacgaagggccaaagctaccccatatgctaccttgtacctgtgaagagaattgagaatataaaagagaattaagaataattgtgaataataatgtttaatttcactagcataagctaattccatcacaagagacagaactgtatatacaaagcataaaaaaaaaaaaaactaagaaaataatggttaccctatttggataagcctccttataagcacttaaatatatatataaaataatcttcttgcataaggtcaagttaagttatgcataagttaaaattgtctttgtatttgcatttactggtagagtgttatgaaacacaaacacaagtgaaaaacccctgagggatcataaataatataatacatacaagaa

SEQ ID NO: 185133 - DNA, 386 bp, Glycine max
  unsure (1)..(386): unsure at all n locations
cactcaaatcatacaattgctcattcaaatcattctcaaacactcatttcatgcaaaatgatccactacatatcattttcaatccattcattgttcaaacacgttgttggtacaagcaaacaactcaatgtgctgaaatttaaataactaaaacttaaaaactgaaaattatatgactaaacataaatcataaaataactgaaaataaactaaaatgttcaagatgcacaaatttaaatatcctgctcctgtgcacgctcattgatgtccaacacctgagcaactggtggatcttaagagataggctgctctaactcagatgctggtgcagatggtatggcatcatcacgtatgggtgctggggatggctctanagtctagtctat

SEQ ID NO: 185134 - DNA, 429 bp, Glycine max
  unsure (1)..(429): unsure at all n locations
ttatggattcaggtattccttagaaccttttgtttatctgacgtaatgtgttttggtgctcatttgatattntataaggtttattaaaaattccaacaagtggtattagagccaccattactgttagattattgggatttaaagttgtttgatatgtattatatctgaatcattntagttatatgaaccccaattttattttggggagaaactattttgatcaataaaattgtaaaacccgtaaatttctgtgttatggttgtaaattttttcttttttttttcaaatgaataaaaggcctctgcatttaatttatgggtttgtacacaatttttgtttgtgtcgcgtgtgcttacatattattttatttgggataaaggttatacgtatctggcgttggttttcttgaacaatatatatttcatgaac

SEQ ID NO: 185135 - DNA, 402 bp, Glycine max
aaatggctacattgactccaatgttgatgtcgaaagtgactggtccaactctgcaaggcatgtggttgcttgctgcatatgaaaaaattctgaaggcgaggtggatttaccattttccaacctaaaagccctacactatattcatttgaaacctatttatccaactccggtaaacaacacccttcaatatccaaagcatattaacatgaatgttgcattccctcattacactttattcttcccaattcaaatctttcctttcttccattctaaacacattcataatgttggttggaaaaaaaaatgttatggcacgctttttttccaactctcctcaccacaaatctaccctcttatatatattttcccccgcaaatttatcatcccttaccatactcctat

SEQ ID NO: 185136 - DNA, 422 bp, Glycine max
  unsure (1)..(422): unsure at all n locations
tgacataattaanangaatgagagggacttctggtttctttaatnngccaaggaattgcagttctgattttgatctcctctcattttacattctacgattgcaagttacaagggccggccaataagttaaatcatccaaagaaggacaaaattcatttaaattgaaaacttatttattttagctgagattaattaatcctctggattcgcgacatggcgtgtaaatatagtatagataaagcaagtctaaaatggaaaaattgttgctgtcaatcgcgcaactcaagctactaattaattaaacctcacatggatcactctttagttgcaattgttggaccatacgaatatgagactgaaagaataatgtatttggtgaggacgcccacctgagtccacaccccggggaaagatggtttcta

SEQ ID NO: 185137 - DNA, 143 bp, Glycine max
  unsure (1)..(143): unsure at all n locations
ncntgcagctttcgtcttacagacagcagagagaatgtttattcggatgaccactcgcgtatttccgcccatcaacatgactcaaatgtctctatgacagatcttgtgggcgcggaagatgacgtaaatctccgcgtgttaac

SEQ ID NO: 185138 - DNA, 430 bp, Glycine max
  unsure (1)..(430): unsure at all n locations
ntacagcagaatttagtaatgacccactaacctagtaatttatataacttaatgccactaacctagggaattaaaaaaaaattaatggctgagtgtaactgaaattgtggcaaccaaaagtcacccccaacagccaacaagtcagccaccatttggtctcccaaaaggctgatgcctaggttgccaattggacccttattacaacttgaactaaacctactaaagcccttttagttgattaacccacaatatatttttggtcagccaactttacaaggattgggccattatttagacaaactaaatactctaaaattgagacaaagtggtgccatttagtcctcctccatttgggccatgatacaattcacaaccttggacttttcttcttgaaacttgtgctngtattcaaatagtatggacaacactt

SEQ ID NO: 185139 - DNA, 370 bp, Glycine max
  unsure (1)..(370): unsure at all n locations
ttagagtcacctgcggctgcagcttaaaggtgtgagtgagcctacgatgaatcttngaagnctgagccttgtttatagtctatcaaagacttttattttaacttgacctacctttttaaaagtcattaattataggaatagaagttatagaatagtagtatataatcaaaagtctgatagtttttataaaaacaataatttgtattaaaaataaatttttatattggggttcaaaagaaatatattatatatatgtatattatatatgatatatatatataaggcggccatcgaagacttttataagttaagccggctatctaataaaagctgagtttaccttttattaaaggtcagttagaccgactta

SEQ ID NO: 185140 - DNA, 397 bp, Glycine max
  unsure (1)..(397): unsure at all n locations
ttgaagttatctatcaaatcagggctctcatgtggtcctttagtcaaaancatcggccaataatgtcgttatccttcttgacatttgggcctgttgctggataaaatcaaccatgcatcatataaaatacatatatgtttaattaaaattttaaaattgaatagagaaatattatcctaaaaaaatataatataccataagaaaaaacatgctcaaagggagataatggtttctttataagtagatatgaatactgtctaaggaagagcgtaattaagaaaatatttaaaacatatagtaaacaatatttaaaatataaatatcttatttgaagacaaacacatctactatattctaaaatatattcagaatttatcttctcattaatcaatatatt

SEQ ID NO: 185141 - DNA, 377 bp, Glycine max
atgtgcctgagcatggtgtccaatccaacataaggcatgtaatcaaaggactctatgtgacgcttggacagcactcgcagcgcctcaaagtccgggatcgaaccctgtttaaccaccatcttcgctgctctttaatgataaagagctggctctcgctggtctatgctagaatgagtaggacctctggtcctctgtttttaagatacttataccctcattacggtaataaataaacaatattgattctggacatgcgaccgttggggccctcctgcaccggccccaacaaatgtatgccatcatctcgccgtcttaagaatcttttgggtaaattgggaaaaaaaattaaatatttgggattcattaaaaaaatttgt

SEQ ID NO: 185142 - DNA, 344 bp, Glycine max
cgcgaaccaaaagggcaccatagctagaggacaagtgtttatgttggttcatagaaaccaacggctgccactcaccattaagaagagacgtcttcacattcatttgttgcaactcttggctcaaatgagcaactcatgcccacataatacaaacaaaatctttcttataaaaggagaaaaagtatcttatgtaattgattccttccttccgagtaaatccctcagcaatgactcctgcctcgtatctctcaatgttgcctaatgaattccttctggtcttaaagacccatttacagccaataacctttgccccattagcgcactctacattgtgccaaactcta

SEQ ID NO: 185143 - DNA, 358 bp, Glycine max
  unsure (1)..(358): unsure at all n locations
agcnttgaatcttgaattatatgggtttactcatcgactaatattttggaccagatgtgaaattgagcacatatgtatttaattaatagtgaaatatatcacactaaaatttatattatttctatagagatntatttaattatgcttctacttctatttttggtggggaggagaaattttgtaggtcatcattctcattcatcctcatactgttgtgagaatatccaattttcatgtctgctgcagaaaattaaagtaactaaagatattcataaaataacaaagaatgtagagacatcttggattcctatgtcattggtatttaaaatttcattgatcttgctttctgcatctcgac

SEQ ID NO: 185144 - DNA, 455 bp, Glycine max
  unsure (1)..(455): unsure at all n locations
tgaatgaccattngatggccattgtgggtgtgcccaatgtgtgtataagtangtagttttgcttttgaattttttaacccaaaatggataaagtaggcttaaacaaaaacggtaaaaattgcttttgctaaaactgataaatcttatcctaatcttctagattagtgtgctaacctcccttgggatatgtgtacttagagtgaaacttgcacagagtctactcacacaaagacaaattacactgcgactcaatgcacattgtaattcttgcacagatgaaaatctaactcaaattgttttggttctctattaagctntactaaaccaatctctctctctctctctcacacacacatagcacaaaattctatgattaaaacatataactactaaaattaaatttgtcatgcacaaatgcccaacacagttgtctctattagtttgagtagtaattt

SEQ ID NO: 185145 - DNA, 490 bp, Glycine max
  unsure (1)..(490): unsure at all n locations
ggatcttaagtcacctgggctgcagcttggaaacgtctctcaatcaagttcctattnaaagaaagaaagcagaatggtgtaataaaaatactgaggttatgttgaaagtgtgcatagaataggtgaatgttgggcaaatattgcacaaaacgtcaataaggcaacaagattgaaatatgaatataaacaattcataaatatgtgggattctttgaaaaagaatgaccattatggttaagcttatggcgaaggacacacgtcttgactgggatggggagaagaaaaccatcgcatctagtgatgaatggtgggaagccaaaattcaggtatgtattattcaacgaaaatagaagttttgtgaggccactctcttgtttattatgtgtgaatcttgactttgcgcgcaaaattgaaagttgcagaccggtnttttagatcactagtcgtctaaaatttcagctgataattaggttgggtattactctggtac

SEQ ID NO: 185146 - DNA, 404 bp, Glycine max
  unsure (1)..(404): unsure at all n locations
ctgngggtgtgaccggcaccctatagaactgattgagttctgtgatgaatactggaaatcctaatgccctgttggacttttctgggtccactgggtgtctcggaggtgcgatgcctacatctgttttggccttttcgcgcccccgtctaagggttggttgcgacagttggcgactccactatggactattagagagttaggtcattcattcagtgtgcgatgcttttatcatgacttcttctttatttatgttccattttcccttttatcttttgtccatatttgtatataacctttgctatgttgatgtgtggggtgtgtgtttgtctattgattacattcatagntagaaatattttttttacacacacatggcacctactagtcgcacacacattgagata

SEQ ID NO: 185147 - DNA, 356 bp, Glycine max
  unsure (1)..(356): unsure at all n locations
tgtagaatggctagacatgatacatgtcagggtttggtttggttcaaagataaaaagggatgccccacattatttccatgacacaaatgcaaaaatgatgatttggaaattttatgcaaaactggtcatgcatgcacctatgtggacactcaagcgtcaaatttttatggtcatgtgatgctagggctcaagattcatttcctccattttagtcaacccaatgtttccaaaatatgcttttttatcaatttgtgcattcatccgagtccattttgggcgtccgggaaaatttcacagcattcacccttcaggtgtgcacacattnttgttaaaaactaagtatgatcagtgaattt

SEQ ID NO: 185148 - DNA, 402 bp, Glycine max
gctttgagcccaaatcctgactcaccatattattttgacccagggtgagaatgtcaatccttaccctcggaagcaaaaaaagaattaagggaaatttccaatcaaagaaaaagagaaggaaaatttccaatgaaagcaaaaaaagaaaggaagggaaatttccaatcaaagaaaaaaagaaggaaaattccccattcaaagagcgggagaaagcaaaaagaaaagaaaggaaattcccaatcaaaagaatgggagaaagtaaaaaaggaagaaaaaaaaggaaagaaagcccctgatcggggatcgaaggaaaaacagaagaaatatgcagagaggtctttggaccggacaatatctgaacaatacagaattgtcaccaaatgaacaaaaaagaaggaaagg

SEQ ID NO: 185149 - DNA, 453 bp, Glycine max
  unsure (1)..(453): unsure at all n locations
tctcccgcaattntctataaatagggggagaagtgaagtgatttaaggttcatccccttaagcacttctctctctttcgaatttgcttggaaaaatcgtttccgtgaagaaaatccaagccgatgtgcttccgatacgtttccgtaacgtttccgtgaggaatctcgtgaaggtttcgaccgttcttcgacgttcttcattcgttcttcatcgttcttcgatcttcaacgggtaagtacctcgaaccaagcttttcgattcattctatgtactcgtggtggtccacattgtgtttcgtgtatgtttattctcgtttcatttacttnttatgaccccctttgacgtacttaagccattttattgaagtcatgtgtcgttaaacctaaaaataaaataaatttccaccgatcgtttgaattgtattatccgttaactttggtcgaaatgaattcc

SEQ ID NO: 185150 - DNA, 403 bp, Glycine max
caagcttctttggaccttgaacaagcaatcatttcctctttcagaaccatgctatgtgcttgcgactggtccctttcttcccttcgcaacttgagttcattattgctaccccatagagctccgcgaaatttgttccggccatactcttccttgcgagccctcttggtctcttgttcaagggctcttgcggtaattgcattctcttcccgtaacccggcgcactccttccgaacatgtgtagcagccaacttgaacttctccttggcgagttttgcctttcctaactcgcttttgaaagcttggacttcctcgtcctcttccggtgcttcaaaattctcttcgctgacgacttttaacttggcgagccaatctaaacctcgtatgcgaactttcagccattcgt

SEQ ID NO: 185151 - DNA, 467 bp, Glycine max
tactcaagcttgtctcatcgcttatgcgagacggagaccaatatgctagctatcatcgctctttaccaagaagagttaggtctagccgcggcccacgatcatatgattgcggacgaatatgcccaagtatacgcggaaaaagaggctagaggaagggtgatcgactctttacaccaagaggcaaccatgtggatggatcggtttgctcttaccttgaacgggagtcaagaacttccccgattgttatccaaggccaatgcgatggcagacacctactccgcccccgaagagattcatgggcttctcggctattgtcagcatatgatagacttaatggcccacataattagaaatcgttaggaaacttgtatggtctctcagaccttgactagatacgacttcctttttgaaataaaatgagttggtcccatgtttctactccaaaaagcttgtgcatatcaagtcac

SEQ ID NO: 185152 - DNA, 289 bp, Glycine max
ttttaaaataacttaatgccattaacctaaggaattaaaataacttaatggctgagtgtaactgaaattgtggcaaccaaaagtcacccccaacagccaacaagtcaaccaccatttggtctcccaaaggctgatgcctatgatgccaattgggcccttattacaacttgaactaaacctaactaaagcccttttagttgattaacccaaaacataattttggtcacccaactttacaaggattgtgccattatttaaacaaactaaacactctaaattgaaacaaagt

SEQ ID NO: 185153 - DNA, 404 bp, Glycine max
  unsure (1)..(404): unsure at all n locations
gatggaatacttacttgctggtgatgaacaaaagcgcataacggtttctataaatgcgacaaaggatgaccctatggctgcaaattcgtcaatcccgtgggtatggcttttgaaaggagggaaaagaagtttttgaatgtaaaaacgccccccctttcgtcatttttataatttggtgcaggggtggctctcccatgcgagctaacctgcaccctntttttttttgttatattattttgcttctcgaggggaacattaaccatgttccctcccttctaatggattagcaatttgccttactcgaacttacatttgatataattaagccgtgtatactatttgattaatactcttgtgcttgttaaacaaacaacagtaaataaacctgcatattacaagatact

SEQ ID NO: 185154 - DNA, 407 bp, Glycine max
agcttgtcccaacagttgagcaagaccgataaataattgttggccatcatcaacgagtacaaggaaaagctagacctatcagcaactcatgagcaaaagctagaggacgagtacgctaaggtgtcagtcttgcaagcggaaagggtgatcgattcattccacggggaagcaatgatgtggatggacaaattcgcctttactttgaatgggagtcaagatattcctcgattgctagccaaggccaaggcaatgtcgaatgtgtactcggcccccaaggaaattcacgggctcctcaattattgccaacacatgcttgaactgatgtcccacataattagaagccgctaaggcaattgtatcgtcgccttgattttggctagataaacctttttgttctctaataaaaa

SEQ ID NO: 185155 - DNA, 475 bp, Glycine max
actcagcttgatgtaaactagatgccttggttaacctggtaacccaactggccatggtgcttaaatatgcacctgtcgccagactctatggtttatgctcctctgccgatcaccacactgacctttgcccttctgtgcaacaatttgaagcaattgaacagcctaaagcttatgctgcaaacatctataacagacctcctcaacctcagcagcaaaatcagccacaacagaacaattatgacctctctagcaataggtacaatctcgggtggaggaatcatcccaaccttatgttcaaaatgatgctgtgccaagcagaccatacgttcctccaccaatccagcatgcaacaacaacaacatccccagatataccaaacagttgatgcccctccgcaaccttcccttaaagaactcgtgatgcatatgactatgcaaaacatgcagtttcaacaagagaccagatcctccattca

SEQ ID NO: 185156 - DNA, 409 bp, Glycine max
  unsure (1)..(409): unsure at all n locations
agcttagctcgncaaacatggcgagttctttatgttttcaacaaatctcttcacaaataactatcatgaagcagagacctagcaaaactacctatcatatctcccaaaacccaatacccacgaaaatcaagtgagaaagaagtctacccaaacctgaaatttcgaagtcccacacgtagagatgcgcttcacgactccgaaaatgccttcctttcgcgatttggagcagaaatgggcaccaaaggttggagctntaatggagtttcaatggaggatgaagaagaagataaagcaacgtgagggagagggagaaagcttatgaaatgtgggctgagtgaggagagagagagtcgctttttggttttaaaaaaggttttctcttttcctattattttatgtaagctatgcc

SEQ ID NO: 185157 - DNA, 227 bp, Glycine max
gcatagctcgaatgttatctaacagggggaaagctagatttctgctaagatgatcaaagaagggttatattctatgctaagttcttaagactactttctgaattggtacacataaataataatgctattggaatgatgcccaaaccattcaaaaagaagattcactagaaacgttcccattgaaacatacccaactaggaaaagaaaattattgtttttataatacc

SEQ ID NO: 185158 - DNA, 72 bp, Glycine max
tactcacgcttcttatccaacgcgtgatcttggtggtgatatctccttcttttcatggcttataccacaagt

SEQ ID NO: 185159 - DNA, 399 bp, Glycine max
  unsure (1)..(399): unsure at all n locations
ancttggaaaggatgcttcaatggatgattattattttaggagagaaagagaggggggagcacgaatttgaaggaagaaaaagggagagaagttgaactttgagttgtgtctcacaagactttcattcatcaaagttacaacaagtgttacacatgcttctatttatagactaggtagcttccttgagaagctttcttgagaaaacttccttgagaagcttctttgagaaaacttccttgagaagctagagcttatatacacacacccctctcataactaagctcacctccttgagaagcttccttaagaagaatcctaaagaagaataagcttagctacacatacatctctaatagctaagctcacctccttgagatgagaagctagagcttagctac

SEQ ID NO: 185160 - DNA, 269 bp, Glycine max
  unsure (1)..(269): unsure at all n locations
tcgcaagatggcttcctcgtcaagctcatctatctctcgttctctccatagccaacactaaaagataattctctaaaaagctcacccnccattttcgaattcgagatttcaactttaaataggcaatcctattggctgtcgcgtgcttatcacgagatggctcgcttagcgcacataagtggtttttggcttaccgcctgtcttctcgttaataccacatgatgtacgcggtgcgctcatcgtagtgtcactccctctcctcttatata

SEQ ID NO: 185161 - DNA, 400 bp, Glycine max
agcttgatgtcattcaaaagacactatgtttactttaatgaagactaaacatgcattgtttatgtaattgtattcattatgcgatataatttgttgtaacccattactaaccaattaatattatttaagtactcgtttggttaagcaagaaaattgttggtccaacaaaaatcatttacgcgtgtagcatacatcattgtcataattgacaacacataatgacatgcatgcgtattaaagtttgagcgcgacaacacactgactgacttgactacatattctgaaggaaacataaacacgaaacatgttcacgcatgtctatttttttgtaaacaaagttaagcaattgctcggtcacaaccatctatatatatagctgacacggctaataaatcacaca

SEQ ID NO: 185162 - DNA, 462 bp, Glycine max
  unsure (1)..(462): unsure at all n locations
tctcacgaataacatgaagaatctcacaatgaatgactgttttactttgaaagacaaacatttatcggaaaataaaaaaaaaagaaaaatggaagttgatgcaattaatacaacattcgtgttcttttcacgaaaaccatttggtaacttttaacattttcctaagtgaatatctcccaagttcaataatggcctacaccttcaaggctacttctcatcctaaacaaataatgcacttcgaccataagtactccatgttatttatttatactttgtaaaacgaaaatgactcttagaagtggtactagcataccccgaaactgcaaatgcagccacatgcagcatcctctttatactgtcaccctgttcataaacaaaaatatcatgaatgtgaaaactacaagcttcgaatattntactacatacagtcatactcgtactttatgtatagcataaacactg

SEQ ID NO: 185163 - DNA, 286 bp, Glycine max
ctattactttcttatccttatctatcgactaatcgcataaccaactttgattaatctatgattcgtcgtgaaagtagatatatccaaggcctccattaaaaatatactaaagttgcgggagttctaaatttaactttccaacaagtatctcttcctcttttatttaaaggaggttcgagctcatcaaataatgcctacttataattaactattcgaacacacgtgatcgatgtgtccaagttaattttaaattatttagatgacatcggaattcgattcttaaaaa

SEQ ID NO: 185164 - DNA, 450 bp, Glycine max
tataccttggtgtccgaaactgtcatccgcttagctgattattattcttttcattgtgaggcaatgaaaactgtcatccgcttgttgatcacaatatgagcatattgaccaagcatttaagagtcatgctttacatattacaagtgaaatattcttccatactagtgaaactgccaatgctagtaaacatcttaatataacccaatatagttctcattggcagttagacctgtaacagtcttactttagtcatcttgagaatataagctgcacatggtcttattaagtgatttaatgataaacgttggatcacagtcaaacccaatgataaagttactaaaagttgcattctacgctcactagcataattatgtgctattaatattagtatttatacaggaaaaagcctatacattgacaaaatatcattgtattagaaaagacccacta

SEQ ID NO: 185165 - DNA, 406 bp, Glycine max
  unsure (1)..(406): unsure at all n locations
agcttgatcaaaacaaacatcgaattatttctttccactcaantcatacattttctcattcaagtcattcacaaacacttcattcataagaaatcacaccactgaatatcataatcaataagttcactgttcaaacatgcttttgtacaagctatcaacactcaaacaacaaaaatttaaaagactaaaatttaaagactaataaagcataaacaaataattgacatgaactaaataattgataaaagaaactattcataatttgcaaaattttaaaaactatgtagaatttaaaactcatgatcatcctactgctgatcttctgcatgctcgttcagatccagcattggagcagctggtggatcctgtgaactaggctgctcttactccaatgctggtgcagatg

SEQ ID NO: 185166 - DNA, 460 bp, Glycine max
acttgagggattggtctgtgctagtgaaaggatcaatgttcttctgataaaaggcaaatttagtcatccttcttggacaaatgagaaaactggggcaaatgaagatggtgagaaagagggagaaacccatgctgtgactgctattcctatacggccaagtttcccaccaacccataaatgtcattactcagccaataacatacctccttacccaccacccagttatccacaaatgccatccctatatcataccacaaagcctgtctaccgcacttccaatgacgaataccacctttatcacaaaccaaaataataacaccaacataaaggaattgtgcagcaaatagcctgtatggttcaccccaaattccgttgtcatatgctaaacttgatcccatatctacttgataattcaatggtagccataaccctagccaatgttcatcaacctccatttctc

SEQ ID NO: 185167 - DNA, 394 bp, Glycine max
  unsure (1)..(394): unsure at all n locations
agctntggaacgagaaacctataatgttcttatgaaaaacaccaccaacgcaaagttttgaggggcttttagggcagcaatatgagcttaagctccgaaaaggtgaaaggaattattacgggtcaaaagcatgatcttgaaggacgagctaaaggtttgccttatgtcgaaaagaaatttgtcccaacagttaaacgagactgaagggaatatgtgggccattatcgataagtgcaaagagaagctaaatttatcggcgactcacgagcaaaggctataggatgagcatgccatgatatatcaaaaaggaagcaagggaaagggtaattgattcattgcaccaagaggcaacaatggggacggacctgattgctcttactttgaacaggagtca

SEQ ID NO: 185168 - DNA, 402 bp, Glycine max
tgtgcaaatcaaatcactcctacatttcatctctatcatgcatattctttctttacccactcctcacgtttggttttttagggaaaaaacaccataactaaacgcgccgcatggtatccctatcgcaccatatccaaatctagaacgatgggtgatcaagaggagacgcatgaacagatgaaagccgacatgtcggctctgaaagaacaaatggcctccatgatggaggccatgttaagtatgaagcagctcatatagaataacgcggccactgccgccgctgtcatttcggctgccgaagcatacccgactctcttggcaactacgcaccatcctccctcatacatagtaggacggtgaatggacacactgtggcacgatggcagccctcacctgtgatac

SEQ ID NO: 185169 - DNA, 396 bp, Glycine max
  unsure (1)..(396): unsure at all n locations
agcttcatgatgaatcaggagtgatttttatatgtttngatgaatacaaaagatgatgacaaaggtgatgacaaaaaactcataggtcaatcaaagaatgagttcaagatgttcaagatagaatcaagaacacttcaagattcaagaggaaagttgaattcaagaatcaagattcaagagatcaaggttcaagactcaagattcaagaatcaagaaaaggctattcaagaatcaagaaaaagcttaatcaagataagtatgaaaaggttttttcaaaaactgagtagcacatggatttttctcaaaacatgtataccaaaaagtttttactctctggtaatcgattaccagattattgtaatcgattaccagtagaaaaatggatttgaaaaagtt

SEQ ID NO: 185170 - DNA, 303 bp, Glycine max
acaagctttttgaacgatcttatcaaaatactaacaactgcattagagcttgcgttttgcaattcgccatgttttggatcagcctactgactgagataaaattcgtgacttattgtcacaagacaaatttgaagcatgaaactaattgctcatcttgtgcactgtgacatcaccttttttttgctttcacctcgggattaaattggttgacacaaagagtatgaacatatgtaagaatcttaaagacatacaacaatcatgatacaggtttaaatactacaaaatttcatattactttaacat

SEQ ID NO: 185171 - DNA, 399 bp, Glycine max
ctgagctgcagctttcaaagactggaatcaagcttattttttatttcaatcaaaataaagaatttttatatatccggggtgttaaaaaatatatccataactcctcctagatttttttaaaaaaaaaaattgtctatttttaaaagtctaatatcacctcctaaattatatttctctacttactcattttatttaaaaatatatataataaatctttttaggctaaatactttcttctttacataaattatctatttagttattatccggtatggcccaaaaataccacctaccacttctttaaaaaataaataacaaatatttctttctttactattgcgcataattatacaaatggttgaggactcaaccatggccaaattagacgcctctaaaggc

SEQ ID NO: 185172 - DNA, 419 bp, Glycine max
  unsure (1)..(419): unsure at all n locations
ggtgcacaagaagttttccacatccacaaatcacgtataaacccaccatcccatgttgcccacctccaactgagctcacgtactcccacgtagcccatatcctcgtttctctcaacaccgggtccccatcaatcctcccaagcttccccaacatccaggtaattcaacatccaaatcatcacaaactaacaaaccaagcaaaacagggcaaaggtagaaaactctgcccaaaactcaaaccaaaatcacagctttgtctcacttaaagaccccagtaacatntacttcgttccaattcgttaaaccgtggatcgactgcgaaaatgtactggaagtctctagtacataagtctatattgtgaccattgtgatttactatcaaacatccagaactcattctgtactactctntccacaat

SEQ ID NO: 185173 - DNA, 394 bp, Glycine max
agcttctctgagggaatctatacttctaagtttttctcttagataggaggagtttcttttagtgcctctcgtgttttgggtactataatatggtctttttacacttcctttgaaaaacccttgagaatgaaacattgcaaaatttatctttctataacatacatgttattttcgtgaccttcactaaaccccggtcacattggcgtgatgggaattttaaaatgatgtctccttttagtagaatccgaaacacccctcagcccttaatgttttgacaggggcatttgactccaaatgttgtcattaaccttggttctgaaatctatactaacattccttcaatttggtatgtagaacctttgctttggactaacgaacgtgaacgagagaggtc

SEQ ID NO: 185174 - DNA, 454 bp, Glycine max
tgcgaaagaccccctccatcattaggagttgttcctgccatctcaaacaaacaaatcaaacgtaacaagacaattatagttgctgtttgaatacctcacccactcaagtgtattacacaattatggcttttctctaatgatacactcttgccttttaccactctaattccccttgagttcttatgcaattcaagagattatgaccacaacaaagaacaattcaccaatatgtgtaaggtaaggctagagagacaaggaaaaggttaaccaagataaaggctaacaatgtttttaggcacaaatgaaggaaataaaattcagaatttaggaattcaagtaacaatccttcatgcaaccaatatattaccttaaagatattgttgttaaagatcttcaagcatgaaccattcagcccaattttgtgttgtttaatttggcttatacgaaattctga

SEQ ID NO: 185175 - DNA, 434 bp, Glycine max
cgttcagaaactgctggtaatctattaccatgtatgtgtaatcgattacacagtgcaaattttaatagctgttttaaatcagttttggccactggtaatcgattacatcctctggtaatcgattaccagatagtaaatttcttgtaaaagactttgtaacttaaatttcttggccaaaccttttgctacttcaattggaattcccttcctatttaatataccttgtctaagattctagagactgtcttgatcatccatcttgaatatctttgatttctttgtcttgaataaagctgtgtgaaacatgtaagcctttggcatcatcaaaacatcagcttgatactgtgtctactatctccaccttttttatgatgacaatccttaaatcaagacataccatatacaagatgtatgcacattcacacatgccttac

SEQ ID NO: 185176 - DNA, 408 bp, Glycine max
agcttcatgaagatgaaacaagttgattcttttttctttgatgatgacaaagatgatgaccaaagacccaagagaatgatttcaagattgagtcaacaagttctagatcaagtttaatttcaagtttcaagagaagaaatcaagaagacttcacaagggaagttttgataagattcttcaaaaaacaaacatagcacaggtttgtttttcaaaatagtttttcttaaaattttccaagttaccagagtttttactctctggtaatcgattaccagtttcctataatcgattaccaggggcaaagtttgatttcaaaagcttttaactgaatttgcaacgttccaattgtttctttaaatggtgtaatcaattacaatatattggtaatcgatcaccagtgtatctgaa

SEQ ID NO: 185177 - DNA, 439 bp, Glycine max
tgcttattatgctctccaaaatctagttgttacctatgatctcaatcagacactatgctagatggcacaccatgtaatctgacaatcttgctaatatacagggaggtcaacttctccaaggaaaatctgatattaatgggaataaagtgagcagacttggttagtctgtcaactgtggaagcaatgccttccaaggttattttgatgattccaaagattcaagaatgaagttttcaagaatcaagattcaagaataatcaagaccaagattcaagactcaagactcaagattcaagaatcaagagaagaatcaatcaagataagtattaaaaaagtttttcataacattgagtagcacaagaagtttcacaaaatcattaccaaagagtcttactctctggtaattgattaacaaaatgtagtaatcgattaccagtat

SEQ ID NO: 185178 - DNA, 399 bp, Glycine max
  unsure (1)..(399): unsure at all n locations
agcttgcctaagtccataaagagacttatttattttgcaaacaagtcctagtttaggtgatttgtaaccttgaggtaaatccatgtagacttcctcaaatagatttccattgaggaaagcattattgacatctagttgctgcaagcaccaaatcttagcagtagccacatctaaaagtactatgatagaagtaagtttggcaacatgtgaaaaggtgtctgaaaaatcaatgccaacttgttaagtgaagcctttaaccactaatttggctctatatatatccctagttccatttgctntgtgtttgagcttataaacccatttgcatccaatacaatgcttattagcagggagagggacaagagaccaagtgttgttggcctccaaagcttaaacttc

SEQ ID NO: 185179 - DNA, 455 bp, Glycine max
  unsure (1)..(455): unsure at all n locations
tatgtttatgatattgtgttaactaaagtggtactttntttcttctttcttcattnttcttgttcaaaatttgtatggttaaaatttggtaatcatttttacatcaagcgagacaacttcctcatgggtttatggaggcgtgcaaatcaagtatgtgtttaattgttggatttcttcaactttatttattttatatcacctcctgtaattgatgtatccttttccaatttgcctctttttagaggtatatcattgactttggccttgctaagaaatataaagacaccactacacatcagcatattccttacaggtgcttttatgacatctgtacttttatttgattgtattcactatgattcgtaaagttcaacttcaaattggtttccgcttctatgaatngngactagtatctattattatggcaaatcctatatctagatgttataaagtag

SEQ ID NO: 185180 - DNA, 259 bp, Glycine max
tatttgaacatcactctttggcgctttcctccgggccagggattttgcctaatttcttttaatgcattaaattcatatttacttgagaagcatttattaatattaaattctttaacaaaattgatgttgaagtttttataagacataaattatatttaaccattaaaaataaatttattccttctaaaggaaatgaattcttctgaaaaaacctaaaaaattgcgtttttttatacccccatttcttccggaagtaact

SEQ ID NO: 185181 - DNA, 399 bp, Glycine max
agcttcaaaggatataaaactaagtggttgttaatgagtttactagtaaaggattggagcacatgggaaggttgagacctattgagcttgccttgttgccaagggatatcgtcaaaaggaaggtatagattatgacaaaacttttctcccgtggcaaagctcaaatcaatttgaattcttttttctatatcagcatactatgatcatgaaatatggcaaatgaatgtgaaaaaaactttccttaatggtgagctaaaagtggattgtatatgacacaacccaagggattcacatccttgtttgatcataataaagtttaaagttgcaatgatccatttatggattgaaacaaggttccaaaagttggaacattcactttaacaaaacaattgaaatttt

SEQ ID NO: 185182 - DNA, 435 bp, Glycine max
  unsure (1)..(435): unsure at all n locations
tccatgtccaagtttcttatgccagacccaatgatcttgtttgacataaagtaagcaagattntgatttgataactctcttagtctaatcttataaagatttccttttctcttagcagaataaagtaaagacacatttttgttctggatgatacattcatccttgttaaagaaaacatcatatccattgtcacataattgagttatgctcagtagattgtgtttgagccatttaaaaaataagaaattatcaataggaggatatggatgtatacctatcttacccactcttgttatttgcccttttttattccctatgaaagtgatggttccaccatgataaggagtcaaacattggaacatgcacctttctcctgtcacgtgccatgagcagccattatcctattattatgataagtgtgtgcttcctgctatc

SEQ ID NO: 185183 - DNA, 395 bp, Glycine max
agcttggtagaagccaggggtgttttttttagaggacagacccaacattaaaacaaacttgcttgccaatcatggagaaggggtgggttaaatgccatcgaagtgagtaggttacacgggcccaaacatttgaaggacataacgacctccaaaaggtttatctacaaaaccttgcaaaaagtgggcatgattccccacggcgggcgcaaaaaagaatcttgcttaatgcatctgggtgaactgcatgacatggaaacatgtttggcggtaagagatctattacaatagatgatagaccaaggccggcttgaggtccgcattgaaggggaggaggaacaacatgtatacatgcagtcggtagatgaaaaaggtcctaaaaagcctaaacttttggt

SEQ ID NO: 185184 - DNA, 451 bp, Glycine max
tggaaggatgcttcaatggaggaaaagtttatggagataaagagagaggggggagcacgaaattgaaggaagaaaaaagggagagaagttgaactttgagttgtgtctcacaagattctcattcatcaaagttacaacaagtgttacacatgcttctatttatagactatgtagcttccttgagaagctttcttaagaaaacttccttgagaagctttcttaagaaaacttccttgagaagtttctttgagaaaacttccttgagaagctagagtttagctacacacacccatctaaaaactaagctcacctccttgagaagcttccttgagaagctagagcttatctacacacacccatctaaaaactaagctcacctccttgagaagctttcttgagaagctaaagcttatctacacacccctataatatcttagctcacccacatgac

SEQ ID NO: 185185 - DNA, 344 bp, Glycine max
aatggttgcggaatgaagaaaaaagaaagattattggagacgccacttcaaggagaagatgagtcaagaagaagctcaccaccataggaagccatggataaaagcttgaaggaggagaagatgaggggagggagaaagagagaaggagcacgaaattttgtgcctcaaatgaggtctgaactttgaagtgtaattctcaaatgattaaagttgaaaaaatgcacacacatgacctctatttatagcctaagtgtcacacaaaattggagggaaatttgaatttctattcaaatttcactggaatttgaaattgaatttgtggagccaaaatttcactaattatg

SEQ ID NO: 185186 - DNA, 441 bp, Glycine max
  unsure (1)..(441): unsure at all n locations
tctccgaagggcatggttatttccagattctcttaaatatctaagaatctcaccaaatgacggtccttctccatcttggaaggtaccacaggatatggtacttccataccttcgttcacaactttatcacttctactcttctcttcattctcatttttttcatcttttttcaatttttttattttctttttctttttcttggtcactaaattctttnttcttgaccattatttgtttctctttttcctgattgctttcacctctcacatcatttttcttaccatcaatacctttcttttcagcagctttcttcttgtgcacaacactcctcatcctcagcctccacaagcctcttattactggtcatcacagcttcgcattcctcgttgagattcttttctcgtatttccacaaaattgttggatgacttgtcagctatct

SEQ ID NO: 185187 - DNA, 395 bp, Glycine max
agcctgtatagttccccaatttatggttattttggagtaaatttgcaaataaatcttgttttatggtaaccctgtctctagaacattttcattggatttaatgatgaaacctgtgcattttcaggtgaaaaagaggctaagttttgaattgcaaaaagtatcagttgggctaagctcatctgttgggctaagcgcaaggtcacaaattctgagcctatttaaagcctattttgtgcagaattagggtacacaccttttgagacttcgcacagaattttcagaggcatcggtgcatagcatttcatagtgcctattttgggaaaagagccctataagcctacaaagaggaacaacttgtgcattgaagcctaggttgtgtcatttgagagagatta

SEQ ID NO: 185188 - DNA, 321 bp, Glycine max
tgcctaattaacccgcaattgttagaaaatgtattttatacacacaaaaggaaaatactaagtacttattgcctatacttaacaaaaagtacttattacattacaaaatgactataaattgggagagtttgatgcaatttatacatgttttatacacaaaattagtcgttttcaccgactaacaatggtacctataaaacatatatgtacagactcccactacttgactatgttggtgtgacactgtcgcaacctacccttcggcgggatggcgacgcgagactcgcatgatgcgtgttccacgaaaggaatacgcgcgga

SEQ ID NO: 185189 - DNA, 299 bp, Glycine max
gctgcagcttaataatttacaggacggttttttatttacatagggaaggggggaggaaaaaattatattctgacgataatggattaatcaaagagtcactaccaaagtccccagctgttattttcctcacacgaatacccattagcattggactaaaatgaccgggcttgatgaattttatggaaaactgtttgacagaaatgaattggctcgttcctaggagacaagacaactcacacacaattgcttgggataaaaagacataggattaccactcaccctcattgttggagaattct

SEQ ID NO: 185190 - DNA, 475 bp, Glycine max
ttgcttctacactatccacatagcacaccaacaccttttcttaaacccctgtttcacccttctctgaacccatacatcttctgctctctaaccctttgtctcctcttcaagatgttaagcaatccttgaagagcatagaagaaagcaaaaacattgaataggaagcaaggataatgttcataggctgctattaaccatttggacatatggttcacaaataaaagcaagaagaatgactacaagatgatatatgctataaaaaatgttagggtgccagggtatttagacttggaatggttctttcaacaagggttcaactttcccaatctgctggaagtacaagcactatcaatgctagtgctgatgaaagaaacattttatccagagctagtctacacttgtgctcgtgttgaccatgaatgtaacttcttctacactattaatggagtagatatggacattgatgttgttgtat

SEQ ID NO: 185191 - DNA, 398 bp, Glycine max
  unsure (1)..(398): unsure at all n locations
agcttgctctgcaagtcttagaaacttagtttgcaagtttgtacaaattgctatgcaactctcataggtctctataaaatgtacaatgtaactaaaaatgtttgggaatgaaattaaatgtcacacttccgcaaattttacgcaatgctctctttctcttactctctatttctctctccttctatcttttagtttcaattcatttctaataaatgtcatccctctctttttgtgtactcaaagtcagaatctgtaatgtacagtctaatatatgtagaggatatcatagtcactgcaaatgactctaaactgatttaaaaactagtttacctatnttccttaaaagatcatggagatcttaattatnttttgcgaattgaagcagctaattaagttga

SEQ ID NO: 185192 - DNA, 478 bp, Glycine max
  unsure (1)..(478): unsure at all n locations
tactcaagcttgagatgaggaagtggngaagggtgagacttcctactgttattcgttgactcacagagtggtacctggagatatgtcgcggtggtcaagagaccttgtggacgtcaggtggggtgctattgcccaaaaccaagcttgaccaatcccgacccaacccgggcatagtcagttattgagaacctgtgatgtacctaaacaggcgagctcttggcagtcaaccgatataagaacatagaccacatatcaagggggcttgtgtggtggctggccagctgtgaatcttgtgtgatatatgggatatggcctctggtaatcgattaccaagggtgggtaatcgattacaaggcttataagtgaagacaggaagctaagatggcctctggtaatcgattaccaaggctgtgtaatcgattaccaggcttatagataggatcaggaagtcgagatggcttctggtaatcgattacca

SEQ ID NO: 185193 - DNA, 331 bp, Glycine max
ccttttaaaccaatgttatcatatcttgccaaaatccatgatgcaccacagcttttgcgtctctgaacctgaagtgtaatttgagtcatactcatattgaagccacaagaccaagaaaaattgtcccctggtagaaaaaatttaatcagctgcattaacaagttctcttgacacctatgcgtcccacagcaaaggacatcttgccactgcattcatgacttgctacagctataacaggtcaaagatgcaagaaggataacctttatcttaacatgctgtctaatacattttatattcaaagacatactaccatggaacacaatcaagagac

SEQ ID NO: 185194 - DNA, 460 bp, Glycine max
  unsure (1)..(460): unsure at all n locations
gtgtagactataccttcgaccaaacacggatgtgtntctgtctatcccggatntaaagtgggttgcagcaccggctccgcttccctaactatactggagacggttgtcgtggctttatcctctatagttttctggaattttaacatgacctccgagatggaagccatttgatcttgtaaagccgatagatcggccttcatctgttcctgcacgccctcttcattatccatttttctggatcgagtgttataggggtgccttggtgttttcttagttatgatgaaattcctaaagaaataaacaacggtgagtatgccaccaaaacatgaatatgcaaatggatgatcggagcccttggatccaccccaatgttgttagataacatgatgagttcagaacttctcattgtataagaagaacanagctntcatctagccaagaatatacataggtattacaa

SEQ ID NO: 185195 - DNA, 406 bp, Glycine max
  unsure (1)..(406): unsure at all n locations
agctntataagtgcgggtctgggagacgattgtcttgtgttcgcgatatgtgaagatgatgttccaagtacttcggatttggtccgaccatgccctcctgatttccagctgggaaattggcgagtggaggaacgccccggcatttacgcaacaagcataatgtaaacctttacggttttaaaagctctatagttgggcctaggctttagagttttcgttttgttaaggctttgtgtcttttgtttttgaatttataatacaaggatctttcttcatctgttcctggtctctacccattctcattcatttgcatgtttacttctttttctgaaacggcagattcgatgacgagtcccccgaaggtactaatacctgggacccgtctatcaacttcgagcaagaaatg

SEQ ID NO: 185196 - DNA, 443 bp, Glycine max
tgtagagttcagtctcatatcggtttaatcgattacagtattctcataatcgattacactgttgtttgagatgatgactgatttattcaggagtctttgctttaatcaattacttctctctcacttagttgttcagaggtgaacaagaacactgtaatcgattacctagagcctctaatcaattaaattgttcttgagttatttccaggtgttgggaataacactgtaatcgattacttagataatctaattcattatttcattgaattaatcgattacagtatagatttaatcaattataggcagtaataattttttctctataaataaccagcttgtgttcacatctacagatcaagagatcaatagatgatactcgacacatctcataaataacatcttatcctcagaatgatcaagatttcatgttgtcattagtgaat

SEQ ID NO: 185197 - DNA, 136 bp, Glycine max
ggcttttttttaaggcctcgacgttcggctctgtacattaggctcaatctttacgttgggacattacatgcaccggcaactgttactgccaggtgcccacggcgccgatagacctcacttgaaacggggctgaggg

SEQ ID NO: 185198 - DNA, 403 bp, Glycine max
  unsure (1)..(403): unsure at all n locations
gacctttaaactaagcttgactgtagctcaagaatatatattgtaccattgtctgagttcaaaaacgacaatcataattntaatcatcttgaacatctatttttaatcatcttctttaacatccttgaataatgttcaacatctctcaatatcttctttcatctctttaacactttcacagaaactttaattatttctttcatcttctaaaattttgtcacacttttattcaagaaagtcttgttcaaacttggctattatcttttattctcttctccttttcaaaaacgaagactaaccgctgaatctttggccttctttccttgctaataacgaagatacccctgaattttttgcttcttctcctacaaaattaaaagctaacgctgaagtctttgatctt

SEQ ID NO: 185199 - DNA, 396 bp, Glycine max
agctttgagatttgatgaggaagccatatgctttctgctgtgcattccgggacagaactttgcacgaagcgtgatgggaaagcgagtgccgatcatgccccctatcatgaccaccttcacacagatttggatgacattgctcctcagcaacatccttcccagcgatcataattctgatctctcgctgccaaaatgccagttgatctatgctatcttgacccaggtcagtgttcatgtggcccaactaatctcagattccatttaccaatttgtagggatcatgcctccaagacaccctgtggacccagaaaagtccaacagagcactgggatttcctgccttgatcataggtctctgccagttctatggggtgccgattatgcccacgaagctcat

SEQ ID NO: 185200 - DNA, 448 bp, Glycine max
  unsure (1)..(448): unsure at all n locations
ntgtctaagcctttctacaccccatttttctccaccttttgcttcatctaatagccaaagtacttgggaatcaaaccaaatataataatgaagtggaaacagagcaatatcaaagtataaggcatagccaaccaaactcacatattagacagaaccataccagaatccaaacagttcataattcaaaaccacatagtatcaaagcataaaagtctgaaatccaaatactacaagataaataaagtactgaacatattaatctaagtagcatagccaaaatacacggcttataagaaacatagaattagaaactaaattctaagaaggtggaggtggtggtggaagatcgaaactctgacgaatataacccacatcctcttcaagttgtgtgaggcgaatatccatgccagcaaaacgtgtatccaatgagtcgatacgttcaccaaca

SEQ ID NO: 185201 - DNA, 396 bp, Glycine max
catgcactttgaactccaccatatcttgttttatattaaccagacttaaaactgtcgacaacagcgtcacaaattcttgcaccctggatacaaaggtttctttgaatcagtttgcaatgtatcatacacaggggcatgagcttgctgaaaagactcttgtccaaggtcacaaatcatatcctcaaagcgatctcccatttctacatcaaacggtttggatagctgcccactctgcatgtctatcatttcaccatgccatatccacgtcgtataatttctctaattctatcacacaacagatgctctcgtatgtcatccattatttgtcgtcttccgtccaaacaattgatgcaaggacaataatattttccatcttcattcggttgacctctatct

SEQ ID NO: 185202 - DNA, 443 bp, Glycine max
  unsure (1)..(443): unsure at all n locations
ntatcctgatcatggtgccattaatgttttaccctacatgtaccctcatcaccaaaaagaagatattgaaaagcatgtgtcagaactgttgaaagctgaagtcatacggccgagtatgagttcattttcaagtcctgtgttattagtcaagaagaaagacaagagctggagaatgtgtgtagactacagggccttaaatatagctacaataccagattagtacccaatccctatagttgatgagttgttagatgaattatatggagctactatgttctctaaaattgatctaaaatctggatatcatcaaattagagtgcatgaggatgacatccctaaaacggcgtttagaacacataacggccactatgaatatttagtaatgcctttnggactaatgaatgccccagctaccttccaagccaccatgaatgaacattttc

SEQ ID NO: 185203 - DNA, 398 bp, Glycine max
  unsure (1)..(398): unsure at all n locations
tagcttanagaggaagcttcaatggaggaatatatttagggagaaagcggcctgaaaaaaatcgaaggaagaaagggagagaagctaaactctgaagtgtgtctcacaagtttctcattcatcaaagatgtgacaagtgttacacacgtttctatttatagcctacgttacgtcactaactaaatgaaattcattctcatctcatgtgaatctaagaggaatatttcaaggatatgctaaaggcatcttaacatatttcaagaatatcccaaaggtatcttagcgtatttcctttagatgccacaagaatggaaggtgtaacctaccacatgtgaaaggaatatgccacaagaatatttcaagaatatggcaaagacatcttatcatattccttgaga

SEQ ID NO: 185204 - DNA, 450 bp, Glycine max
ggagaactctcccttagggaattctttcttctctgtcatttttttctattccttttttccatcccttctcctccatgagttcctataccccttttctagtgtaaggtcccttatggctatgagaggctaaactcttatttagagtttgacagacctaaaaagtcaaaagatgtattgtatacttcatatctatcaatgcaaacaggtgttttctttcctattattatcctctcttacttttaattacatgcatcatttgtgtttgcatcatctttggtggttatgtgctcgacagatggtaatccttaatataaatacaatgaacggtttgcttgcatctgatctatgaattagttgctcgatagaggacaatttctaattgaactaacaggaaagggtatcttaataaaaacattgctagacatatagtcgattgattatgcccatgca

SEQ ID NO: 185205 - DNA, 404 bp, Glycine max
  unsure (1)..(404): unsure at all n locations
cagcttcataacacagcagcacagaatttatgtgttcaacacccctccattcaatgggttttctaggtttgagaagtgaaattgagaatgaggtaaatttgaagcaaactctcacctcacacaagtctataacatcaatttagacttgttcaaactggatttacacctaaaatctcaccgaatcaaaatttgactcttcacacccaaatttgccctagaaatggctctttgttcactttggtcatttgtttttctctctagcacagcctaacctttctcataagtcctaaatgacatttcaagctaggattaactcactttaacctccatttaccacagaattcagacttaaccttccaactctcaaagcctcactcttntttccactcataacatcacattct

SEQ ID NO: 185206 - DNA, 451 bp, Glycine max
tccttctcctctcaaccctgttccttctcttgtagcttcaatttctaagtccagaggaactaaattgcctatggtagatctatgcatataaaatactaacagacacaacagttatccaattcaataagagaagataaatatgaataaaaaacaaatattcacagataaacaaagaataatgaataaagaatagacacctaaaaatgaactaactttccaaataaaaagaagttccccggcaacggcgccaaaaacttgtatgctttcatcgagtgtaccggatcacgcaagtagtataaaacggtaagaaccgagtatcgaactctcggggaacttgtgttacttggtaaagctatttcagtaaacaggtgtctagtgtgaaaagagatgtgtttatatgaacaggtgtgtgaactaactattaaaagggaatagtcacgtgaaaatgatg

SEQ ID NO: 185207 - DNA, 390 bp, Glycine max
gcttttgaacatatgcatgctctatttcttttgatccaaataataaactatgtgatagccttatatcatctaaagatttcttttcttattccataacttttacttcaagtctaacccacttaatttggctatctctacttctaatgaatgttttcatttgaaattcttactataagaaaagtttaaattatacatcacaaaatttactttctttcctcttcatatattggtgtttcacattattctatggcaaccatataaaaaactttcgcataacttgggagaaaccttcctctgcagtgtcaccttttattcttttaaatattctattccatatttcacaaacttgattttttttttaagagtgaaaggggcttaacaccagattac

SEQ ID NO: 185208 - DNA, 328 bp, Glycine max
tcatagtcaccaattcgtggtatgttggcctttatcaattatgtattatattgtctgtctgaaagtaactgacactaattacttatgtgtcctccgtttataccactcagttgggtatttactacttcatgtcaacgtaaccataacatgggatgttggtatctttcaatatatgtttatttccttggatagctaacatattatctcacacgtatttctcagcgatttaacatcagattttttgtagactattgtataataaagtggagatgtgcggatgaagatacaaactcttatctatttatcccagattctattatggctgtga

SEQ ID NO: 185209 - DNA, 398 bp, Glycine max
agcctataatatatcgatacgctcgttatttattatcggaaactcttgagaaattcaaatggtcttaacttttcacacggatgtccgattcgggcgcataatatgtcgagaggctcgaaattgaacaacggaagctcttgagaaattcaaatggtcataacttttcacacggatgttagattaaggcgcatcacatatagagacactcgataatgaacaacggaagctcttaggaaattaaaatggtaataacttttcacactgaggtccgattcaggcttataatatattgatacgctcgaaattaaacatcggaagctctccagaaattcaaatggtcataaattttcacacggatgtccgattcgggcgcataatatgtcgagaggctcgaaatt

SEQ ID NO: 185210 - DNA, 422 bp, Glycine max
  unsure (1)..(422): unsure at all n locations
ntacagcagaatttagtaatgacccactatcctagaattaaaataacttaatgccattaatctagggaattgaaaaaaacttaatggctgagtgtaactgaaattgtggcaaccaaaagtcacccccaacagccaacttcagccaccatttggtctcccaaaaggctgatgcctatgttgccaattgggcccttattacaacttgaactaaacctactaaagcccttttagttgattaacccaaaacatatttttggtcagccaactgtacaaggattgggccattatttatacaaactaaacactctaaaattgagacaaagtggtgccatttattcctcctccatttgggccatgatacaactcacaacactggactgttctccttgaaactngtgcttgtattcaaatagtatggacaa

SEQ ID NO: 185211 - DNA, 360 bp, Glycine max
cgagctgcacttaccaaggcgtacctgatttttcttgataccctttgagcctcgttccctttcttgtttgaagctcactacaagccttaagtgaaaaaccctgatatcaccctatccttaaggaattttggagctttgggaattgtttcgggaaataatggggggggtttttgtttcataggacaaattgttttgctggctatgcttcatgatgtattttgggccatacttgatgtacattgtttattggttaaatgttggacatgctgaatgaaatgttgtttctcaaacgctatatagttaaaaaaaaaaaattcgaaaaaataaattcccaaataaaataaaacataacgttgagtg

SEQ ID NO: 185212 - DNA, 424 bp, Glycine max
tgtcgagggatcgaaggactaattatttatgctactacatatatcacatgagcacgactgattagataaatatatttctatgcattagcttgtttgttagaaagacccaacatttctacctactgctgtcattttatttaccttgcattttataggttttagcataaaagtttagcttaaattctgtttgaaaatatcactcatacatgttctctcatacaatgcttcatttctgaacttaattcagactaacattagttccatgtgttcgatactcggattcatctatttgcatttttaaatacttaacgatccgattcgctttctggcatcccgaatttcccctgaatatatttggacgaacaagaaatataacatatgtggaatataatgtaactgtatgggaagtacacatattatttat

SEQ ID NO: 185213 - DNA, 400 bp, Glycine max
agcttctcatttgaagggtcataaagtttatataaaagcttgagattctctcttgacttctcaggaggaggaatagggcgcaaatcctgattcattgagcaagttataagtaacaaatccatgtcagttgtagctcacttagaagggtagggaagaatatatatgttttaatggtcacaaccatactatccaggaagaccaaattactgagtaaatcattacctgccccatttctagttccaaaaataacttcagctctgcattatttgctttagtggaaacttcttttagcagtccaacctacaattgccacagcacaaacatatcacacaaatcattattagaaaaataatcacaaaatatacaggatatatgagaaagcactttaaaaaatgaaact

SEQ ID NO: 185214 - DNA, 459 bp, Glycine max
  unsure (1)..(459): unsure at all n locations
ttactggagctatatcatgtggtatcaagagcattntcatctatgtgatgttcttttgattcctctatctttttgtttggtcaattcactntaattccttgttcttcatcttcttctccatgtatctcctcaattntcttgtagtttggtgttgtttagtgtagatcaaaaaaaataaaccgattaaatcttagatctacacttgctcttgcatttctatggttcaaatnttatagataaactcttgaatcatgtttntgtgttgattntaagttctatcattntttagtcataatattcttgttttgaacctttagatctcaatattcttgcaaaatattgattagaaaagaaaacaaataaatccaagtgtaaatcacttcattcatgttgtcttagagtcatgtttagtcataataattgtcacattatgttctaagttngaattcaatcttgatt

SEQ ID NO: 185215 - DNA, 405 bp, Glycine max
  unsure (1)..(405): unsure at all n locations
agcatgcagcttctgatatccttatatagcttttattgtttaantaggaagaaaaaacaaaaaataaagtggtctaaacccggtgcattcaaatcaacaacctgactataaatatggccaattcctgaggattcaattcaaccccatgaacacataactacctctactgtagccttgaggattcaaattcaagcacacatgtcggtttcttgtgctaaaaacttcttccagaggttctggcaagatgaattccaaacgggaaatattccccatggaagctttttggccaatgatgatctccttccatctcttggagctagattaaaccaggaaactagacttagaagatacataatctcccctttcaatcctcgctataggtgatgtgatgaacctttacatgta

SEQ ID NO: 185216 - DNA, 458 bp, Glycine max
  unsure (1)..(458): unsure at all n locations
aacacatgtatcatgaaaccttataatgacctacatgtgtgctaccctccttgagcagccactanggtttgggttccaattgacttggtcatttaccgtgcatggcatacacctttactttgcttgatgatcgagtttaaatatagttacatccaacaccaagatggtgacattagattgtgtggcacgcatatttttattaaaattttattccaaaaaccattggaaaataaaggttcatcaatttatagctcatgcatgtgtttaatgttatttacacttctgcttcggtgctgcttttgaaaatcactaccggatcttttggactgatcaatgataaacttggttgtcttgttgatttatctacaataatataatgttagggaacaataattcgtggtatacaacactggaaaaaagcgttgtcatcattttcgaattggtagaattaatatctc

SEQ ID NO: 185217 - DNA, 404 bp, Glycine max
  unsure (1)..(404): unsure at all n locations
agctnttgaatcatgaaaactcatacctcgttnnaatctgttctcttccaattctcaaaagagtcgaccctgtggcataccaaatggtgttacccttgtctctttctaacctccacaatgtgtctttcatgttcctcatctccttaaatatatccatgatccttctcatgtgaccgaattagatgatcttcatgtaaagcagaatttgatgatgacaatggagtggaccatgggttcattctggttgatggggatgatgcctttgaatattctgtcggtgaatgttacaggagagaagtttctcaatgactatatgtcgacgcagttgatgtcaattaatctggtggcatggagatgactattttgagactagctagatagtcctcaataagaaaatccacccc

SEQ ID NO: 185218 - DNA, 460 bp, Glycine max
ttgattttatggcacttgagagatgggattgtaagttatctacacatctttcttacagagctaagtgtatggctcttgaaaaaataaaaggtgcaactataactcaatatcatcacaacaaaagacacaatatataggtcaattgatataagacttccattgtacaactcacagattgagatgtaccagatatacatgttcatgtggcactattatttgataattcatctattttagtaaaaggtgtaccattaggacaatgaattttaatgtttaggagatagtgtgatacaaaaagcataaaatctttcattaatcccatcccaaattaatatattacaattcctctttgttccttgaaaaataccactagctctttcgagcttgtctatgaagcaggtgtgtgcaagcttttgaaagtcatgtaaggatacctttgtaacaacatgtagaccactga

SEQ ID NO: 185219 - DNA, 410 bp, Glycine max
cagcatgcaagctgcactgccaattaggatcgcaaaatattcttgcctgtcctggagaaaatattggtcaacaaatgcataatgctcattttgcttaccgcagctgggttatttaaattcccatatcgcatcatatttgctggggccactttgaattccttggacatttatgacactgagagcacctctccgatagctggattaactggccttcactatgccgcaataacagatattacctggtaaaatttagttgctagcaattccttttttggtttgagaactaacatgaatttttagggaaaggtttaactctaactcgtatttgttcaataagtcatctgatgctcaatatatggcattgccccacaagatggttccgctctttggtggaattagaaaatgaccaa

SEQ ID NO: 185220 - DNA, 457 bp, Glycine max
tatgaattgtcaaggattatgaaatcaattgttcagtgatattgaaatactattacacattattttgataaaatgaacatattttaatttcaagtatcacaaaaatctgcatagtcggttatttgatcttattgatttcattaaatacctggaatcagtcctcataaagctataatgacacgaaaacttaagaaagaaatcacaactagcaaaaatgtataattatgatgaaggtgaagaagaatgtgaagaggtcaaacagtgccttcaaaggctgtggaattgattatcagaagagttaaacagcttgaaatggatgcatggttagtaatgaatataacatcacagcccaagtattgttacagttctgaagacaaaattccatcttcagaaacataagacacaaaaatgtagtagaatgtagaaaataaactatacagatggtgggatatcagct

SEQ ID NO: 185221 - DNA, 122 bp, Glycine max
ccccccccccctgtctcatccccccactaacactggcacccgagccaaagctttttacccgcccgaacaggatgaaggaagaaaagaacggaaccatcaagaaaagagaacactccccaaga

SEQ ID NO: 185222 - DNA, 430 bp, Glycine max
tctacttatgtggcagggcgggcttacttcactttcttgtctccaacgcgagctttgaccaccgctcttccttcccgcgatgcttcccttcatatccgcctgagtgggcttatagcctaaaccatacttcccacgatttcctttggcatttatcatgctagttatgccgccagtgtctttgcctaaacccatttcgggttcgtaaccgttccccaacataactcgggccatcattactgctgcatctgacaggcaatgctgcccagagaatgagtccacggatgaaatgcttaccacctcaaaagactggaaagcggtttctaatgactcctctgcggcctccacataatgcatagaggatgggcagctcaccatgatgtcttcctcgcctgatacgatgaccagatgcacttccactacgaatttcaac

SEQ ID NO: 185223 - DNA, 397 bp, Glycine max
agcttactccacacaatggagacctttttttaattatacggctattcctccttctgatgatgcatggacacatatccctgacccaattacaattcatgcgataagtcggccaaaatcaacaaggataaggaatgagatggattggctcgaaccatctgagcactgacaaaaatgtagtatatgtggagcagaatggcacaacaagcgtcgatgtccaatgcaatctgaccgtgggagttgttcatttaattgatttatgtatgctacacgagtgacttgtattggtttaagtagtcttgaatgtatttactttgtggtcttcaatgaactcgttagttagaaacattacttattgtggtttgtgtagttcagttatttttttaacattacttatttt

SEQ ID NO: 185224 - DNA, 459 bp, Glycine max
tagccagttgcccatacgtgcttagtctacacatgtgcacttatcctgctcttgtgcgcttactccaaatacgaaatattttaaaacatggaattctttgggcttatcgcagcgtgcaagcttagcgcaacaaaacaacatgtgcttgctaagcgaacacatgcacattgagcgcatagcatattcatacaactaacaacaacaaacatttgcacttaaatcaactaacacaaatattcatagagtcatgagcataaccaaaatcaacctatcatcaacacacaaaccaactaacacaattattaaacatgttacatgaaaagatgagaaagacacaaaccatctaacacaattattaaacaagttacaaaaaagaggagataaagggtagaaatactgtgttgtctcccactaagcgtttctttaatgtcattagcttaacgggtcaaatgacttcaa

SEQ ID NO: 185225 - DNA, 405 bp, Glycine max
agcttgaagcaaaacaatatatattaccattttgttttgcatggcaaccctattccttttgtaagaaagaaagaacaaggtctgtatgtacagaaaaaagctgtgtatccacgaaaagctgtttatcacaaggcaacaaagggataaaaaaatacagaaaacagaattagtagtctgaatacaaataccaaaacagaaagatctcagttaatatagaaattttttatcatctaaataacgcaaattagacaaaacaagcttaaattgatttgagaatgcaaccataatatgcatatgttcaattgactttgaaaaatttgcttctcattaaacacactcgtgttctcacacatacttatgggttggtgcatctaataacaataaaatcaggtttgtcattgctgg

SEQ ID NO: 185226 - DNA, 452 bp, Glycine max
tatccttaccaccagtgatcatgcacattatagactggttctgctgccggcccaacgagtctccaacaaaagccagagttttgttttgcatcctgaatgcaaaaattaatcatacgtttattgactttttctgttgaacccaataacaggccaataaaaagaactgaaaatgtagatgggaagttggggagtggggggggattttgttttctaatcataagaaatcctcaagagtataaaaagcatctcaaaaagcacagtcttgtcacctgaacaaaatagactaaattaagtagcatgactaccatgcttacacatgacctcatccaattctgaccaacccccttggaagtcaattgagatgcatgctatggctcaatcattttaaatgagtctatgggtaaaacgggatggaaaatcacaatgtgcagcatctaagtgtacgtcaattc

SEQ ID NO: 185227 - DNA, 302 bp, Glycine max
gcctatgcaagttgaaagccttggcaggaagacgtatgcacatgacgccggggaagaattctccaaataaacctgggtcactcttatcagtaagaaatcacgcacctttgaagaaacaaagagtgagcctaaactcaaagaaaaaaactgtgtaccaagagaatcatgagcgacctcggcagacagtacgaaaacagcaagattactgaataccgcaaaactgaaggcttacacaatgagtctttgcagccactacaccactacaataatggcatagttgaaaagaaaaacaggactttgca

SEQ ID NO: 185228 - DNA, 480 bp, Glycine max
tacgtgacacttagatactaagctttgaacttcttcttcttctttgtaccaaaagctttccaaagttttctggttttctaaaccttgaaaacttgtgctattcattcttttcttctcttctccctttgccaaaaagaattcaccaaggactaaccgcctgaattctttttgtgtctctcttctcccttttccaaaagaacaaaggactaaccacctaaattcttttgtgtctcccttctcccttgtcaaagaattcaataagacacagtctgagaattcttttgattcttccctttcccttatacaaaagtattcaaaggactaaccgcctgagaattcttttgtatccccattcacaaagtatcaaaggtttaattgcctgagatctgtgtcttaacacattggatggtacatactttgtggtacaagtagagggtacatctacttgggtttgactgataacaagagatggtacatctc

SEQ ID NO: 185229 - DNA, 415 bp, Glycine max
ttaagcacctgcagctgcaactgtagatatggggacccttttttgtggtactagggggcggtcgggtgatggtgcacaacaagttttccacatccacaatgcgcgcataaacccaccatcccctgttgcccacctccatctgagctcacgtattcccacgtagcccatatcctcgtttctctcaacaccgagtccccatcaatcctcccgagcttccacaacatccaagcaaaacaacattcaaacagcacaagctatcacagccaagcaaaatagggcaaaggcagaaaactctgcccaaaacaccaaccaaatcacagcttttttcacataaagaccccagtaacaattccttcgatccaattcgttaaccgttggatcgactccaaaattttattggaagtctatagtacat

SEQ ID NO: 185230 - DNA, 442 bp, Glycine max
  unsure (1)..(442): unsure at all n locations
ggcttctacactcttgcactntntgatgatgacaacttctgttatctagatacacactcacacattttttcctagtcgatcactcacataaatttccattctccccctttgtttttgagtttatgcttctcttgaaattaagttaattacttatgtgagttcttgatttattccctatttctctccccctttggcatcaacaaatagccaaagtgcgtaacaagtataagacaaacatatactattaatcattcacaaggcatacattgaaggatataaaccaatcatgaagcaagaaacatgaatagatcaaatatataaaaaacacagtcatatagcataattcataattattcagtcatactaagcaaatattaaaaagaaataataagtgctcaaatgtcataaaaacatagccaaatacaagggattaaatcaaaat

SEQ ID NO: 185231 - DNA, 392 bp, Glycine max
  unsure (1)..(392): unsure at all n locations
agcttcaatgtgacatgggttgcatcatcctttttntccttggcgnataatgctcaaatctcaaacttgattgtccactttttccttggtgtataatgctcaaatctcaaactctaagcagaaaattttgctttattagtttgtcattcacagaagtacctcaccatgtcttgaatccatctacaaaccgtggcgcatttcatatataaatcttctgataaattggtgtcctaaaatgacttctataggaagggcagagagctgttgtcccctgaagaggcacaaaaatttttaggggagagaactcttatgaacttatgctacatgttatttacctaacttttaagcaggtatgacatatggcctatacagcagccataggaagtcacgtt

SEQ ID NO: 185232 - DNA, 438 bp, Glycine max
tcgacactaccataagtaattatcgcatgttgccttagttttctatgcaaacaaacacatgaaccctgttctgcaagcacaaggatgcaagtatactatgaagagtgctatcaacacacttctaacacgatctttacttattaaaaattataaaatcattaataaatctcattaactactagtcaataatagaaaatatgttcaaaatagagtattataaagtgtgttactaataaatacaagataaatctttagattaatagacaaatagatgatagataatacctgaattgaatatttcttttttccagactttgaaaacaatgcaagttggttgagcttcaaagtgctttaagtgtggctaatgtgggtgttggggaaaggtagttgagaatgatgcctcatgctcatatcacaatgatgtgtatgaattcattc

SEQ ID NO: 185233 - DNA, 400 bp, Glycine max
  unsure (1)..(400): unsure at all n locations
agcttatgcataagataaaaattatcttttttagaagttatatgacagagcttttaaagatcatcatcaccctaatactaaatttggtccctgaactaaacgaaccacttcattcactgaacaaaaacgggcaacacaagtcaatcgccaccacttcattcattgaaaccaaaaaacagcacaaactctaaactatctataatgtgaaaaatgttctttctttttttttntttttttgcaccttaacttggcgaatggcttcgttcaaatcaagcggaggcggcttctcgattttcttgggcttaatcagcagcgggaaaggcaccttcattctttcatcctcgggggccttggccattcgcatcctcatttcattctccgcctcgatcatccttctctc

SEQ ID NO: 185234 - DNA, 452 bp, Glycine max
  unsure (1)..(452): unsure at all n locations
tcttcataaagcttcgtatgggcagaaacaagctcctanagcttattacaacaacattgatgcttactttatcagtcaatgttgtaggagtgaaaatgatgcaactctctatgctaaaaggttgttggatggtggctctttaattgtctctgtgtatgttgatgattttctaatgactagcaatattcaacaagaagtgcaacaactcatattggagatgcataatcagtttcagatatccaacttatgagaaatgaattattttctatgcttggaagtgcatcaaagtgaagttggtatttttctgaatcaagaatagtatgcttatgaaatcttgaagaagttcagaatgaaaagttgcaaatttgtccctactccttccgtgcagaatatgaaactatccaaagatgatggagctgtaaagatgggcgattctctttatagaaatgtga

SEQ ID NO: 185235 - DNA, 404 bp, Glycine max
gcttatggggtacctctttcaaacctattgctattaatatctatgccaataatccatgatgcaccaacagcttttgcgtcctctgcaacctgtaagtgtaaattttgagtcataactcatattggaagccacaagaccaagcaaaaatttgtcaccctggtaagaaaaaaatatttaatcagctgcatttaacaagtttctcttgaccacactatgcgttcccacaggcaaatggaacaccattgtccactagcatttcatgacttgcttacaggctatgaacagtgtcaaaatgatgcaaagaagggataagcactttatacttaacatgcaatgtctcaatacaattttcatattacaaaaggacataacttaccagttggaacaccacatccaaggagaca

SEQ ID NO: 185236 - DNA, 449 bp, Glycine max
ccttcgaccaaacacggatgtgtttctgtctcagcccggatttaaagtgtgttgcagcaccggctccgcttccctaactatactggagacggttgtcgtggctttatcctctatagttttctggaattttaacatgacctccgagatggaagccatttgatcttgtaaagccgatagatcggccttcatctgttcctgcacgccctcttcattatccatttttctggatcgagtgttataggggtgccttggtgttttcttagttatgatgaaattcctaaagaaataaacaacggtgagtatgccaccaaaacatgaatatgcaaatggatgatcggagcccttggatccaccccaaggtttttagataacatgatgagttcagaacttctcatgttataaaaagaacaaagctttcatctatccaagattatacataggtattacaa

SEQ ID NO: 185237 - DNA, 403 bp, Glycine max
  unsure (1)..(403): unsure at all n locations
agcttgtccacaanaaatcattaaagaaggtattgttatgtttattatcccaanttttcttacaaagtaaatggatcatttttaaggtccaacgccttaaaatgatcaccttccaagtaaaaagaatcgcttgattcacccttaaagaagaactacgtaggtctgatttcctcttcgatggagggcacgtaagagcaagagccccacttttgtcgacctcaaaaaataaatagaaataaaagttaaggtaacacaatttccacaattctaaaaaataaggctgttgtcctttgagacaaacgtgagaggtgctaataccttcctcaaacgtaaatacaactcccgaacttggaattttctttttgagccggttccttccgtttttccgacgttttccacaaat

SEQ ID NO: 185238 - DNA, 438 bp, Glycine max
  unsure (1)..(438): unsure at all n locations
agtggtatcagagcacaagagctccaagtatgtgctccttaaacctccattaattnttctgctttaccttctcttccattgctgtttcttcattcttctaatatatatgaccgagaatgaattttttgcattgacctattaacaaatcatactaccatttttatctaccactattaccccttgatttattaatgtcatgtgaagtataattctggatcaagattatttatgtgtcaactctaacaaatactttggccataaaaaagagagtatatactatggacataaaaaaattatatactatataaacgaacaaataacgaatggatggatcaaattatgcttattactaaatatgctcggcttatctgttaagtgggaatgatggatcaagtttatcccttctggaaacaataatttgcctttactgatgtagtg

SEQ ID NO: 185239 - DNA, 344 bp, Glycine max
ttgggccaacatggattaaggaaagagtggttttcgaaatctgcactttatgcaaaattttgctgttgaaaagtgcaacagaattttgcataagtgcagaaaaatgttatgtatttgctggttggggaaagagtagtacataattagttctggacgtttgctagtagatcccaacggtcaaaatgtagactcatgtactagagacttccagtaaaattttcgagtcgatccaacggttaacgaattggaacgaagaaaatgttactggagtatttgtatgtgaaaagctgtgattttcggtttgtgttctgggcagagttatctgcctttgccctgttttgctt

SEQ ID NO: 185240 - DNA, 461 bp, Glycine max
ctggatgcattggttaacttggtaacccagctggccttgtataataaatctgtacatgtcacaagggtttgtggtttgtgctcctttgctgaccaccatacagacctttgcccttccatgcatcaacctggagcaattgagcaacctgaagcttatgctgcaaatatttacaatagacctcctcaacctcagtagcaaaatcaaccacagttgaacaattatgacctctccagctacagatacaaccctggatggaggaatcaccctaacctcagatggtccagccctcatcaacaacaacagcagtctgctccttccttccaaaatgctgctggcccaagcagaccatacattcctgcaccaatccaatagcagcaacaaccccatatacagccaacagttgatgcccctccacaaccttccctcgaagagcttgtgaggcatatgactatgcagaacat

SEQ ID NO: 185241 - DNA, 146 bp, Glycine max
cgcgacacggcaatgagagaaacgtccaaacgcccacaaacgcccaaggccaaatgctaagcaaaaagtatgtgcggaagaaagaccaaaaccggacctgcacaccccgcaagaaaccgcaaacccaaaattcacaccacgtacaa

SEQ ID NO: 185242 - DNA, 439 bp, Glycine max
tgaatgcaaactggatgcattggttaacttggtaacccatctggccttgtattatatatctgtacatgtcacaagggtttgtggtttgtgctcctttgctgaccaccatacagacctttgcccttccatgcagcaacctgtagcaattgagcagcctgaagcttatgctgcaaatatttacaatagacctcctcaacctcagtagcaaaatcaaccacagtagaacaattatgacctctccagcaacagatacaaccctggatggaggaatcaccctaacctcagatggtccagccctcatcaacaacaacagcagtctgctccttccttccaaaatgctgctggcccaagcagaccatacattcctccaccaatccaatatcagcatcaaccccagaaacagccaacagttgatgcccctccacaaccttccctcgaa

SEQ ID NO: 185243 - DNA, 391 bp, Glycine max
  unsure (1)..(391): unsure at all n locations
agcttctagacttaacacacgggagtctttgttttggccgcaggggntaatacatgctttatctgcggatgtaaggcttccatctgctatatatacacgaagaagaattatttatatacatctttaaccgcaataatatatggatgatgataaatttaaagtgcttgttgaatctctagaaaaaacagttatgaaaaatttagtaccactataattcatataatttcatgcctttacctttgtctttcatacttatggagaaaaaaattggtaaactggaactgtaccttctagacccgtccctaatactaaacatggtgactattcctatttatgctagacacattgggaaaccatacttgactttaattgggagtggaatcacctaaac

SEQ ID NO: 185244 - DNA, 453 bp, Glycine max
actttctaagatggtttcatgtaaaaaccgtcatagactctgtaaattttttttttataaatgttaaaaaaactcagcatttaaagatggcattcatttagaagaccgtcttataaaagtgtagcttctaagacagtttcttgtaaaaatcgtcttagaagctagatttattttaagacggttttttcatgaaaaccaatgttattagttgtcttttttgtatgattgcaacatcaaattgaaatgatttatgcttttctcttagacattcaatcaagtgaagaacagaaaggcatgaatcatgtacaactctccaagcatcgccactctgcttgacagattcctcctcgagaatgatgtcaagtgccaattcaacattagaagattaataagggtttgcgtttgtatctggactaacccagattatacttgcatagctaatgcgcatgacta

SEQ ID NO: 185245 - DNA, 353 bp, Glycine max
cccttatgttatcaaacataaaaagggaaaaggttatattgtagccgatgcttctttctcggcgtcatgcattaacttctatgcttgaaacaaaattgattggtcttgaatgtttgaaaagcatgtatgaaaacgatgaaacttttggagaaatatttaaaaattgtgaaaaattttcagaaaatggtttctttagacatgaaggctttcttttcaaagaaaacaaattgtgtgtgcctaaatgttctactaaaaatttgcttgtttgtgaagcacatgaggaggtttaatggggcattttggggtccaaaagactctagaacatttcaagagcattcttattggcctcatat

SEQ ID NO: 185246 - DNA, 432 bp, Glycine max
  unsure (1)..(432): unsure at all n locations
tgtatgaagttcacacaacaataactgttttctaagatgtccgattgaatcgggtaatatatcgtgacgctcaaaattnggacttgaagctctaagaaaattgaaacgacaataactttatacacggatgtccggttgagtcccgttatatatcgagacgctacaaaatgaaaacggaagctcttataaaattcaaacgacaatagatatttacacggatgtctgacagagtgccgtaatatatcgagacgcttcaaattgagaaaacaagctcgtaggaaattcgaacgacaatatgtgtttactctgatgtccgattgagtcccgtaatatataatgacgctcataattgagagcagaagctctgagcaatttcgaaagacaataaacttattcttcgatgtcctctgtagtcccgtaatatatcgagat

SEQ ID NO: 185247 - DNA, 402 bp, Glycine max
agcttttcaagaaacctactcttggtgattttttttaagagaagatctttttggttgaacactgaacacaagggaccaactgttcttgggttcattgcaagaaacaaaatttgcttcttggttgatcactagactcaaaagactaactgtggaagcaaagctaccatgatgattcaccaagaatgtttgatgatgtcaaagctcaaagagttctttcaagattaaagaatcaagcattcaagattccactccaagattcaagaatcaaatgaagaaatcaagaagcatcaagccaagtcaaagtaggtagtaaaaagtatttttcaaaaaaacatcaaatagcacactttttgtttgaaaaaaggattttcttaaatcttctaagttaccagagtttttact

SEQ ID NO: 185248 - DNA, 467 bp, Glycine max
tcaataactacattcacgactacaaacattatatagggagttaagtagtcatgcatttacacatcaagaaagacacactcatccaagatatatatatggtccaaaaggttcttgcaacactaatccacgcatcaaaggagaaataagctaactaacaacatacacacaggatgataaaggttcattaacacattatcaatcaatatcaagactacttgcatcacccaatggcttgccataatgtccaaccgcacttcgcaattatagagatggccagtctcataactcatgactcaacagtggatttatggtatagcagacattaaggatgcaaggcacatacaagcattattattaagtcttatttaatcatgtaagagaaaatacatataataattcaagcatgctcaacaaaagtactcataagtaaccacacagagtgcacaccagaatatggtatgcacatt

SEQ ID NO: 185249 - DNA, 357 bp, Glycine max
  unsure (1)..(357): unsure at all n locations
gatcttaaaagacctgtgctgcagctagaagacacatgacaactttttttttttgagaangtcatgttattgagcgattcccgtcaatactcctgtgggccaagagtaatccctcttatatcgccatgcaaaactaaatgcatatacatttgggatcattgtcaaattcttacactgacaaaaaaaacatgtgagtgctatcaaatcctgttgcccattccaatagcgacgacccccaacaattgtctgattgtgtactatacataagcgatgacaaactttgggaacctaatgatggatatcacgaaatcacctccaacatatttattgttgacgcaccttatccaaacttattac

SEQ ID NO: 185250 - DNA, 456 bp, Glycine max
  unsure (1)..(456): unsure at all n locations
actcaactgagattccagcctgtgtttggctatgttaacgcctcttgtctctggacnaaactcgtaggttcgaagtagtatgggcattcctccatactgtgagtctcgttacatcgcaatatgcatatgtccgtatttcgttatatgataggtacggctcctatgcatggtccctggatactccatggatgaacacagtccattggttgataatgaactattatgagtttgtgtcttgatacaataagtgcggtacgtatataatataagctaaagctattggctagattaccttgaggtttggtatgggtgtggagataatttataaaggaaatttgacgtggtgtatagttaaagactatagagagacgccgatgcttaatttgtggccggtaaatggttatttaatttgattactactgatcctgctttctaagtgactcgtcatttattcat

SEQ ID NO: 185251 - DNA, 402 bp, Glycine max
  unsure (1)..(402): unsure at all n locations
tgacactgtctagaactctatcttgtcgtctcagccatggaccacacggatgatgaactctgtttctactccatcangtgggtgctgctccactatatgctcgatcgcgggtcggagcacggtcactgcagtggagaccttgatgaagcgtcagatgcctctatgactgacgacacgctttccttgcctttggagatgcccacttcgtgggatgggaaggcaacggtgcgtaggctgacgtggggaaacgactgcgaatgatatatcgttgctgaggatgtgtatataaggcgtggaggccccatatgataatacgtgggttgcctaattagggatcatcgacctgctgtgttgatgaatgatgataaatagtgaatcattcatttaattttattcgcgtca

SEQ ID NO: 185252 - DNA, 406 bp, Glycine max
agcttccgaatcacatttttgaaaaagatattgttactcaataaaccaagaggaggtgaattggttttcaaaacaaaatataccttttaaaaatagagttacaaaaaaactttttgtatggatcgtatcacaaaataaatatgaattgaacgtaatcaatacataattaatcattccttaaacataatctttcattaacatcttttctttcacaatcataaaacttgaatctttatgaaaaacttgattaaaacttgaatgagttgattaaaccttgaatgagagaaaaaaatataacaagagaagaatgacacaatcttttatactggttcattctttatttttagagaagctaatctagttatctaatccacaacttgtagattttcattatacatcaagaatc

SEQ ID NO: 185253 - DNA, 454 bp, Glycine max
  unsure (1)..(454): unsure at all n locations
acttttgagataaagtaagaaaacgaacttgtgttcatggtgtttggagataaaaatcgaagctttttgagataaaaatgaagttttagaagaaacaatgaacatgtagtgaaaaaacaaaataccaaaatataaaacgcatacaaaatcgaagctttttggagaaatgaaatacatcacaaacttgtcctccaaatgtcggacaatatttgttttcttcgttgttgcagtcggtcacaaatatacccattgctacagatctgtacccattatgcatgattaccatgagataacaacatcagagaaggctcatgaacaccaaaaaatttaagctgtgacagagaaagcaagcacacgaacctgtattcatggagtgtgaagataaanatcaaagcttttgtcttgcaaaggaagaacaatactcaaccacaatataataatgttgatgaacaca

SEQ ID NO: 185254 - DNA, 339 bp, Glycine max
aaagggggagactcagtcacattttagtgggatgcactgtaatactgcgtcttctaactcaatgaatgactctacatgcagcgtctcggaccgggggtagtatataggcaatctcttggctccttccagcaaatgtggctctccaaatccgagtaattatctactagtcaccaaacttgtgattattagttcattaatgtcaatatatatttcactttgcctatcttgtttcccccctctatcataaaagctaaactgccaaacagggctttcattaaggataattctacactgaatcatttcaatgcatttctgacaggtacgaagagcatggagctt

SEQ ID NO: 185255 - DNA, 313 bp, Glycine max
  unsure (1)..(313): unsure at all n locations
ctaaacatttttcaatngacggagcttcgactagtgtccccattgatattgaatacccttattcaaacctcttaaagttagtgagaatgcttaacgataaatttggaactctttaaaactatattcttcactgatggcgttggtgacaatcatagtgaattactaaacaagattggtagtttaccttaggtcatttcatatactccacacgccttggaaaatacctccaaaatggttacaataataacctcaaattaattaatgttattaatgaagatagtgaccagaactcggataacacaactgatgataa

SEQ ID NO: 185256 - DNA, 398 bp, Glycine max
agcttgaaagaaagaccgaagttttgaatattaccctgctatttggacaaaaataaataaacaaataataataaataaataaaagaatgaccagaagtgttacattttccaatcaaaatgccaaagaaaaattcttccttctaacctttcagggacattgagattttttgtttcctagttccgtagataaatatcttataagattcccttctccttcagtaatttcaaagtaattataatttatataatgcatataacatgctttttagtgctaaactgctaaccaagattagtatgcaagttcggaaaaaatggtaattcacaaagcagacataacatattctcaattatatgtaaccagaaaaaactaaaattcccaacggatgaataataagact

SEQ ID NO: 185257 - DNA, 447 bp, Glycine max
tgtcttccaagtcctatattgtatatgtctttttcagttaatcaactgatgaatttctgttaaattatatgaatagggaggtaatatgcattcccatcattcacttaagtctgaattaagagagatcatttgaataaataataaccttccctttagtaagaaaaatgttacataccatgccattaataattctgtagtactcagcaccacccacaagaactatctcatctacaacagcaagaatagattctaaatgtggacacacacacacactcacacacacatatatacatataggacaatcccgaaaattatgatattgaagagctaactggaaatgaatcggtagtgaaatggtcagtgtcagtcactctgttatctctctttgtatatcaataatccctctacctacctggctatatattactaacttgaattagtgaataa

SEQ ID NO: 185258 - DNA, 161 bp, Glycine max
cagaaaaaaacagacacagcagaacaggcatcaaaaaacaaacagcagagcataaacaaaaaaacggcgcacagacgaagcatagtgaaaaaatataggccaaaaaacacgaaaagaagaaaaacccaacaacccagggaaaaagtccgagaaaacaaagt

SEQ ID NO: 185259 - DNA, 410 bp, Glycine max
taagacattcatgtgtcacaagcctgcaattgtgtttcgcgaaccacttgatccaatcagtggtgagaagattggtaaagtaaggccaattgcaccataagactcgatcaatatagccggcctctcccaagtacctgacggtgtatcttcgtggcacgttgctgttagcaagtttacagattcgccgttgctttctgcagcattgccagtttgggattcttctaataaaagcattgaggcagttgtgggtgtcacaactgcactttacagtgtggggcagctcatgaaagagctagttgagaagcatagtggtcacatgtatttgacctcccaagagggtcacttacttgctacttccacaaatgctcctctactatcaaattctaccaagcctactaagcttatgatgg

SEQ ID NO: 185260 - DNA, 392 bp, Glycine max
agcttgaaattgaacaacggaagcgctccattaactcaaaaggtcataacttatcacacgaaggtccaattgaggcgcataatatatcgagacgctcgaaattaaacaacgaatactctcgagaaattcaaatggtcgtaacttatcacacggaagtccgattcaggtgcataatacatcgagacgctcaaaattgaaccacgaatgctctcgagaaattcaaatggtcataacttttcaaacggaagtccgatttaggcgcataatacatcgagaatcttgaaattgaacaacggaagctatcaagaaactcaaatggtaagaaattgtcacacggaagttcgattcaagcgcataatacttcgagacgctctaaattgaacaacgaattc

SEQ ID NO: 185261 - DNA, 484 bp, Glycine max
tactcaagccttgatttcacttgttccggatacctttcttttctcatgtgtcacccaactctatctccgggttcgaagacaaccttctttctccctctgttggcttgtttagcatatcttttatttttcctctcaatttgatctttgactctctcatgaagcttcttcacatagtctgcctttgcttgaccttctttatgcttaaaaacagatacattaggcataggcaaaagatcaagaggagttagtgggttaaaaccataaacaacttcaaaaggagaacaattagtggtgctatgaacagctctattgtaagcaaattcaacatggggtaaacaagcttcccaagtctctaagttcttcctcaaaactgtcctaagcaaagttcccaaagtcctattaacaacttccgtttgcccatacggttgtgggtgacaagtgtgtgaaaataacaatgtattgcccaacttgctccacatagtct

SEQ ID NO: 185262 - DNA, 358 bp, Glycine max
tgaattgcccaatacaaaactcgttaattgtagccacgaaaaccacaacaatgtgtagacagctgtgaagcacaacaaattatacatcgtttatcagcagttgatgaaaatttaaataaaatcatacatggctaactcaattgacaaacaagatttatgataataaagtgttgaaccatatacagaggtgcatagttttatggcaggagatttgtaagatgaaactgcaaataacatgacttggtattgacttgtttgtgttagctaattatgctgtatatataccatgtctctgtcatttcttgctagttattatagacatagtcaatgtacataacaaagaacaattgtactaaac

SEQ ID NO: 185263 - DNA, 369 bp, Glycine max
  unsure (1)..(369): unsure at all n locations
tctatctattatccctctttaagttaccccaaagaatagttgatagactggtttctctgcaaaggaattttatgtggggtggggggcatgatcaaaagaagattccttaggtcaaatgggatgaaatntgtcttcacaagaaggaaggcggtttgggaatcaaaaatctgatcaaatttaatgctgctctcatgggaagatggatgtgggaatgacattctaagcagaatcagttctgggtcagggttataaattcaaagtatgggggatggccagccttgcagaatggcatagttcattgctgggactcccattggtggagagatctcangaagatatatcagcacaatgacttcaagattattcatc

SEQ ID NO: 185264 - DNA, 395 bp, Glycine max
  unsure (1)..(395): unsure at all n locations
cggatccttaagcaccgcggctgcagcttaacataattcgagcgtccgattattacgggactcaattggacagccgagtaaaaagttattgtaanttgaatttgctcagagcatcagcattcaagtccgagtaaatagttgttgtcctttgaatttgcttaaagtttcgacattcaatttcgagcgtttcgatatattacgggactcaatcggacatccgagtaaaaagttattgtcgtctgaattggatcaaagcttctgtattcaatttcgagcgtctcgatatattgcaggactcaatcacacatccgagtaaaaagttattgtcgtttgaattttctcagagcttcggaattccatttcgagcgtctcaatatattacgggactcaatcag

SEQ ID NO: 185265 - DNA, 451 bp, Glycine max
tctgggagacaaatgtcaagtgttcgcgatatgcgattatgatgttccgagtactttggatttggtacgaccatgccctcctgatttccagctgggaaattggcgagtggaagaacgccccggcatttacgcaacgagcataatgtaaacctttatggttttaaaagctctatagttgggcctatgctttagagtttttccttttgttaaggctttgtgtcttttgtttttgaatttataatgcaaggatctttcttcatctgttcctatgtctctacccattctcattcatttgcatgtttacttctttttctgaaacggcagatccgatgacgagtcccccgaatgtactaatacctgtgacccgcctatcgacttcgagcaagaaatgaatcaaacggaagatgaatgaaacgatgatgtgggacttcccccagaactagaaagaatg

SEQ ID NO: 185266 - DNA, 408 bp, Glycine max
agcttaaggaaacactaaaccaattcatgcttatttccatgtccaactacagaagcacagagtcatccatcaagaacctggagatccaagtgggacaattagccaagcaaacggctgaaagacccactagcatctttggagctaacacagagaagaacccgaaggaggaatgcaaggtagtgttgactataagccagaggaaagcacaaggagagaaagagaaaattgaaggagaccattctgaggaaggaagggcggaaaaagaaggagagaaggaggaaaaagagttaaaggaagaagagaaagaagaagagaagaaggtcttaacctctaagaccataagcctgctatcccgagaggctaggaaagaagagccaccaacctctctaaaggaacccccatattctt

SEQ ID NO: 185267 - DNA, 476 bp, Glycine max
cttgtgatggccaagattccagttaccaaaaaatagaaattttccaccctcctaaactgctcaaaaagtgacttatgcaagaaagaagcaagagtgtactttgtggagctcacagaattatcagcataactcctaatcccagcctcaaagctctctggctcattgcataacaccaccctggaataccctctccctccaatctgtgaatagtcctccttgagtgattgtttcccacatgcaaatgaatagatcttactaagatgcaacttccttctcctctcacccctcattctcctcctccccaagttcaccattcaatccaccaatatccacaatcacaaagaataagaaagtataaaacccttagagagaagaacactacttgctccaacacacctaaacaccatccaccatagacatcaagtaccaatactaacaacctcaccaagtccttgtcatacccaagctcactcctc

SEQ ID NO: 185268 - DNA, 81 bp, Glycine max
cgctgcacggctagaaattttaaactactgtcatatctgagtcgaacaaaatgtacttacctggttttgcgcctactttat

SEQ ID NO: 185269 - DNA, 341 bp, Glycine max
ggacactttaaactaactgtgcaataatactccgcatgttcttacatgcattttcttaccatcctcacgttgtgttttaggaaaacaccatactaacgcgcccatgcatcctatgaccgatccaatctaaacaggggatcaaagagacacgggacagagaaaccacatgtcgcttgaaaacaaatggttcatgatggaagccagtaggaagtgcactatggaaaaacatgcacgtgcgtgtcattcgtgcgaacaaccacttttggaacgccacatctcctaacatatagacggaagacaacgggcacaggtcctattgggacaccacggttaccttgatg

SEQ ID NO: 185270 - DNA, 397 bp, Glycine max
agcttgtctacattcatttgttaagtgcctatattagcaggtctgagaacagatgttacaagaagtgaacaaactttctttctctccttgtgctatgaacctatcattctttggacaaaacttatcaaacttaaatagttgatcctttcttatttataagatcatattggtttttttttctttcaaaattaacatggaagaatccttgtttgtaatcataattggttagtggaaccattcgtgttgaaggagaattgggcgtagtttaaattaacttaacccatgtataactggtgttcttttttgcttatgtttcccctcccatttttacttagtttatcttgttaaaaacatagttttgcaaaaggttgtctcaaaatcatatacagattattca

SEQ ID NO: 185271 - DNA, 462 bp, Glycine max
  unsure (1)..(462): unsure at all n locations
ntctaaaaaatataatcattaattatttattaataaatgtaaatagtttttattgtgctatatatatatatatatatatatatatataatgtttaacaaaaaaatattttatattttatgttctatatatatagcttaattatttaataaaaaaatgggatatttacattaggttctatacatataatgttatttaataaaaaattattcaattaaatggaatattattttcaccaaaaaataattataattataatataaaatattattcatctataaataagtgagataattgtggttgaaaaaaagaattttataaatactcttttatctttgaagagaacggaaaagttaaagtttctcttttaaccttaaaattatgagtggaanaatgattaaaaaaatattctgtatccttaaaaagtgcggaagaattgaaattataaatntatcctcactttt

SEQ ID NO: 185272 - DNA, 401 bp, Glycine max
agcttcttgcaggatcagcataagctttattctaatcaagctgagctttgacttgtacctggcttattttgtatccaatcaactgagccagtattctgtgcagtagcaattgattcccttcgatggtcctatattcttacagaaattagccatatacctcactctttattttttttcccacgcagtcagagaaactcaattatgaaaggctatgacctacagtttgggcacaaaactatactaaatagataaatgatacttcgtttttctgatgatgtaagagagtataattcaagaagcatggttttaagcatcatcttggactctactccgtctttagtgcagtgtacttgaaagctttttgtgatgtgtatttgtgcttccctattcttaacatttaa

SEQ ID NO: 185273 - DNA, 435 bp, Glycine max
gaataaagttctgcagcctcactgttataacaattcgcatagtgttctaggtattcagccaaatattgaaaatgattctaatgccacatatcacattagaaaagagagtaatgaagcaagaattcaaggatagagaagttagaactattacaccatttcaaccttgcaacaaagtccttgaatttattatctaactacctttgtcttccctcagaaaccaattgtaccagatacaaactcttctcatcgtgcactacatcctacaacctgcattccacacatacaccaatgatagtgaggaaatgactaagagacaaataacattatgacaacaatgtatgaactaaatgaagcaacataattaaaggaactaaagtcaacaagttttcttggccattcaatcctaattggcatacataacaccccacaagcatg

SEQ ID NO: 185274 - DNA, 357 bp, Glycine max
aaacggcatgtatttgatgcaaactaaacttgttaattttttttacaaaaataacttgttagtctgtcaccatattatagatttaattgattttgttaattacaattatccaacattcaactatagttgaataatataaaaaaataactttttaatgataaaaatgaaagttttgtattaaaataataataataattaatcagttttattttgcaaatgccaaacctttattttgttcacgaattatttaaaaattgaaaaaaaggatagaaagaatacatctttaaggaaaggatgattaatagaatcgggataaataaaaaataatggatgggaaaaaaaaaggaaagttagaac

SEQ ID NO: 185275 - DNA, 405 bp, Glycine max
tgattggttgtttaatatatcttactgcatccagacctgtcattttgtttgcagtaagtatactttcaaggttcatgcattgtgctagtgaagttcatcttcaagctgccatacgagttattagatatgttaaaggcactttaaactatggtataatgtactctcattctcataattttaagctccatggatattctgatagtgactgggtaggttgtattgatgacatgagaaacacctctggttattgtttttcctttggatctggagtcttttcttggtgttctaaatagcaagaagttgtagctcaatcaactgtataagcagagtatgtatctgatgttgctgcagtgaatcaagctctgtggatcatgagaattatgacagatttgcatatgatacaag

SEQ ID NO: 185276 - DNA, 221 bp, Glycine max
  unsure (1)..(221): unsure at all n locations
cttcgatactaactgcggatcatggaggcaaacggtttttaattttttanttaccaaagaagccacaccgactggtagccaaattcttttatatatgacttaacagtgcagtccaaatctaattgaaccttttttttttgttctcaattgtggggaacagggacttttttcttcatatcagagataagcagggttatgaataggttggaagattttaacat

SEQ ID NO: 185277 - DNA, 399 bp, Glycine max
  unsure (1)..(399): unsure at all n locations
agcntcttaatctgcggcggagtaatatactttaattgaaagttatttaggtatttactaaagatgacatcgtgcaaagcttcctttaaataaaataaatagcccatagatgtaaataagtaactcacagcatatttcatatcatcataatttgtgtaatccacaataccggtagtacctgcaagccaataattatacatcaaagaatccagcagacaatataaactaaaatctaacaaaaaaaaaactcagactctttgtaaatactcaaatgccatctctcaaaaaaagaatcgagacaagagaagaaaggactaaggaggcagaaaaatagagcagtttaaaaactgataaactaccaatacattcaagcaatagagtattattaagaaccagaaa

SEQ ID NO: 185278 - DNA, 432 bp, Glycine max
acacttgaatctcagctttacttcacgtaaaatattttgaattattactatcatttaatgtgcgcgtatctgtcttataactctaaatatgagcttttaattcaaagcatccttcgagttagagttgtttctacgtctttaacttttagattcatgaagcatctcttgaaagaataaagtacaaaaatgggggtccaaaactactagttacagattatataaaatgtgatatttattaagtaatagggacaaaaacataaattctattcattatacgacaattatatggaggaaaataatgaatgatcgccacgcataccgacttccctgtctgtctctgtactatataaactcagctcttatgatcgactcaacacgtcacatactctcatgcatttttgcacttgcaaactccatattcactctgacagt

SEQ ID NO: 185279 - DNA, 396 bp, Glycine max
  unsure (1)..(396): unsure at all n locations
agctttgattcctatagagttatgtatgattctctcttcctagctcggtcctggttaaaggctatagagaaagacttcaacaacagttttaaccactggtcttccaatatctcggattcctttggttagtttgggtggggtttccctgtacttgatgggttagcttgggttttttattttggagggcaggacctttggtgcattgtactttctttctatggtacccctggtactgttatgtttatctaataatatatatttactgccttcaaaaaaaaaaaaaaagaaagcatctgtaggaagatttttgggcagcagcccaagctcatgagtctgctaaccaacaacattttgattgcaactctntgggataggctaatgcattagagactatcg

SEQ ID NO: 185280 - DNA, 447 bp, Glycine max
tgaaaagctctttgtcgaacgagataatcgattacccatgttcgtaaccaattatctataacagattaataagcagcgaataacccctcaatgcaaggataaaaaccatatgtcatccataccaaagaaataactccactataatcaatgaagatacaagataacctccaacaagtgcactaaaacatactacaaatagtcaaatcaaaacaaactcctaatttttcccctctcaaataagtctctctcactgtatctcaccctctaatctgacccctctccacttaaataagtgagacatacgagccttctcatttgtgtctttactcaacatatgaagggagtccaacaaatccaacatttagtctatgaaactattcaaataagttactcccctccaccaaatgatccacccaaaaatatcacatatgttgtcttaccattctc

SEQ ID NO: 185281 - DNA, 401 bp, Glycine max
gcaatttagttatatgagcaagatgaccaaaaggtgatatataattctcacgaacgtaaagggagaaaataattctttgttgatggctttttataacccaaaattaactttgctatggtcatgatgacatttctctgcataaataatgctactggtgtcacatccatcacctaccataagaacgatgctggtgtgatatgttgagcctttatgtgaaagtcacgtttcagtacttctacttgtcaaatattcgttaattgtcacaatggaataataaacagataagcatagtttacatatctcatgggagcagtaccatgtacaattgtatatcataacgtgtgtgttaaagaataagagaagtatctgtgtaccaatacatattatttcttccactcccc

SEQ ID NO: 185282 - DNA, 405 bp, Glycine max
gcttcatgcttaagtatgtatggcaaagtttcatttctgttgatcaagacatacaagtaagcttgtaacaaatgttctacacttggagtgatcacatgcagtcctcttgaacccttaccacccactctgtcatcatgctgagactcaggaaggccaacaggcttagccttctcaatgtactctgaacaaaattcaatggcttcttctgcaatgtacctctcaacaatagatgcttctggccgataaagattctttgtatacccttttaagatcttcatgtatcgctcaaccgggtacatccaccgtatataaacaagaccacaacatttgatttctctgactagatgcacaatcaagtgaatcatgatgtcaaagaaagaagggggaaaatacatctccaactgg

SEQ ID NO: 185283 - DNA, 395 bp, Glycine max
gcttgtagggttaaagtattacgattgttttgtgtttatgcaacaattgttagccgcggctatacgagacatcttgccaaacaaagtcaggttagccataacttgcctgtgctttttcttccatgccatatgtagcaaagtcgttgatcctatcaagtttgatgagctggaaaatcaggccgcaattatactgtgccagttggagatgtattttccccctgccttctttgacatcatgattcacttgattgtgcatctggtcagagaaatcaaatgttgtggtcctgtttatttgcggtggatgtacccggttgagcgatacatgaagatcttaaaaggatacacaaagaatctatatcgtccagaagcatctattgttgagaggtacattgcag

SEQ ID NO: 185284 - DNA, 458 bp, Glycine max
  unsure (1)..(458): unsure at all n locations
tgtgatanaatacgtaaaaataaaaaactggattgataatttttgtaaaagtttaatggtaaagtatataattaaagatattcttttttaagtntaataagtatgcattgatagagataagttgttttacattcattcagtttttttcttttctttttacttcattaaaaaagaaatgacaaaactacaaggtgtggcaacgatgctgatgttgttgcccattgcctatccaatgtatgagctcgtcagtctattgccttttgtgtttcggatgttccctcccctgatatttctaccctccttttgaggttttgttcattattcttgattgaatagtgttttaatatattgactacaattattctacatgaagtatgcaatgcaaggtgcgcgttggggatggatttgatnttttccatcctcaaaagaggtgggacaagattaggtttgagtataaa

SEQ ID NO: 185285 - DNA, 373 bp, Glycine max
  unsure (1)..(373): unsure at all n locations
tgttgccctaacatttaaagaattttttttctgctttccctgctctggncaagttaaaatgtatgcaaaacttatatttgttccatttgactaaatatttaaattatccttatttcacttaaaataaacctctttactggttgaactattttataaacctcaaacatgatgcattgttatttgagtatgattgatccagctgatagtttcccccattgatggtacagattatatgtcgtcattacaacatttgtgttaatgttttccctgtaactgcatccccgcactcgttgtcattgacactgaacatctttcgaggtatgtctctatttttaaaaagtggtatgattgtaacaatgtcgtgtccaaatat

SEQ ID NO: 185286 - DNA, 469 bp, Glycine max
  unsure (1)..(469): unsure at all n locations
gaacaatatactngtccttcatttaataggggtagttcttgtcggcctctctcaacaaagnactttcgacacctactgtatgttgatttgaccaatgctgttatgggaatgttgcgacaatccttcaaaaccttattgatacattctgagaggttggttgtcatgtggccatatcgatgtccttctctatcataagtcatcgtccatttttcctttgaaatgcgatcaatccatgttgctatggctggactcagttgacgaaatttttctaaattttgatcaaaaatgtgcttgcaaggagtgtaggctgcataaaattagttatgaataacaatgttaagtgtatatgaaacttaaataaacgtgaccatcaaatatgaaatcttacccaatttcttcaacatttctttttgtttggcattattgaatttgcgattganatngcttgctatatgtcggacgcactaaa

SEQ ID NO: 185287 - DNA, 376 bp, Glycine max
tacgtgacacttagatactaagctatgagatgtcaagatgacaaccaatctggttatgattgacttaaaattgggtctaagtcctgcagtcaaattgccctaaagggggtatttttacaaagttattccagaaataggtctgttttcaaactaattccacaatggtgctattttctacgtaaagtgcatgcaaaaaccatgcaaaccaccatctccattggtgcgtttgctgtggctgtgacacgtggcgaatacaccattgccactagcatgttccatggtgtcgccagccccattggcgatttcgccatgcaagggggagtatccagtcaaactggcgagttccaagcacatggcacatgcttctcagcctttt

SEQ ID NO: 185288 - DNA, 270 bp, Glycine max
  unsure (1)..(270): unsure at all n locations
agctngaatcaaagtgtaattgcgtcataaattgtttagttgcaagttcagattgcccttataatttgtgccggcatttcttctcttcctgttggcttatatatacaccagaacagagcttagccaaatgcttgcgcatttatggctttaggtttatggctggttgggataatagccaattgctatttgttggttccaatatatatattgtaagatatgccgctttgtggttgacataatcggaaaagtaatttattccctttctttttt

SEQ ID NO: 185289 - DNA, 365 bp, Glycine max
cacattgcaattttaagtgtatctttggaagaagaaaaaatgtttttttaaataaaaatattatttctcatacacgagtgagaaataacacaagttcttgttcccctttttatttatattgcgtgactgtgacttatccgcacatgcaacagataatgaagagcaacgtcatgccttcactgttcaatactgcttggattcagaaaaaaaaaagagtgcaaatattcctgttctggagggagtggaggtttcacctgattagcagtttatgttcggcgaaacagccagatatgatacacagtgaatggaaataggacaaagaataatacagaataaaataatgataggaaatactcgtatgatga

SEQ ID NO: 185290 - DNA, 362 bp, Glycine max
taaaagggtgggagtatgaatagcgggggcaagatacgcgggttagactaattaaggaagagaaatccataactgggaggttatgggttaattcttaattaattagtttaaaaatcatcattttgcgtgcaacttaaaatttaacgaaaccaacctctgaaccacgctcggggttttattctaagcgttttgatatatatattgcttgctttcgaaaactggccccgacggacgcagagaaacgcgaggaattggaaccagagaaacggcacgcaaaccgaggtcaggattttagcgtttcaaaggtcaaattttcctcacttttgtgactgagtatgggtcacagtcaaaaagggacagtg

SEQ ID NO: 185291 - DNA, 461 bp, Glycine max
  unsure (1)..(461): unsure at all n locations
tcagctcccactccttcaagaccttactcagttagctccaatactttacctgccatgttgcagatccttcataaatgccatgtcatcatcatgcagagcctatatagctcatgcctgcaacctatcatgagcatggaaaagttcattaaccaggtggattgaccatgagtccaaccttctcctttgggaaggggtgaggcctacgcagcccaatatcctgtgcccgatgatgatgacgagtctctcccccctgagcctttcatttatgatccagacacatagattgctcatgatgaggcaccatcaccagagcttattcctcagtcatcaccatcaccagctttagtccttgaagacccatagccatctgcaccatcaccgatacctgatcagcctcttgctcatgaccctctagctgcactaatggtggacttgaatgagcatgcatangatcactcaca

SEQ ID NO: 185292 - DNA, 404 bp, Glycine max
  unsure (1)..(404): unsure at all n locations
agctnnganntcctatgaggcggaatctctttcttttctcatgngcacccaaacccaatctccgggttcgaagacaaccttctttctccctttgttggcgttgtttagcatagcttttatttntcctctcaattcgatctttgactctctcatgaagcttcttcacatagaccgcctttgcttgaccttctttatgctcaaaaacagaaacattatgcataggccaaagatcaagaggagttagtgggttataaaccataaacaacttcaaaaggagaacaattagtggtgctatgaacagctctattgtaagcaaattcaacatggggtaaacaagcttcccaagtttttaagttattcctcaaaactgtcctaagcaaagttccaaaagtcctattaacaac

SEQ ID NO: 185293 - DNA, 460 bp, Glycine max
  unsure (1)..(460): unsure at all n locations
tagcttgagccaattcatacaacaataactgtttactcggatgtctgattgtgtcccgtcatatatcgagacgctcgataatgaatgttgaatatctgagccaattcaagcgacaatatctttctactcggatgtctgattgagtcctttaatatatcgagacgctcgaaattgaatgttgaacctctgagcaaattcatacgacaataactttttactcggatgtctgaatgagtcccgtaatatattgagacgctcgaaattgaatgttgaatctctgatccaattcaaacgacaataacgttttactcagatgtctgattgagtcccgcgatatatcgagacgctcaaaattgaatgttgaagctctgagccgattcaaacgacaataactgtgtactcggatgtctgattgantccngtgatatatcgagacgctggatattgaatgttgaacctc

SEQ ID NO: 185294 - DNA, 389 bp, Glycine max
agttatagacaattttgttttttgtaatactccgttactttctagattctacaatgtgtattgtgttacaaggatagatgatatcttataagtgtaaaacttttttgctttagttatgaacccagtgaacaaaagagaattacaactttttttttcttaaaaagtgagtacaaaaaaaacatggcttgatgagctgtcattcatcatgaaaataagcatgcccaaaagcaagcaaaaagtactatatagcaacttttacataatcaaagttgggtcaccattgatccaaatgtatgattaatcgttagatgcatatttgtgtgcaccatgttaactttagaatgaatgtgtgatatgcatgagtccatgaagtataagttgaaatggat

SEQ ID NO: 185295 - DNA, 450 bp, Glycine max
tcttcttctgaccgctccttgaatcaagtttaacaattatcccatctccatgtattcagtcaccattgacaagcgtgggggctttgtgcatgcaccgagaaataagataactgcataaaataagataacagatgctatcaaagaaatcatgctacatgagatattcttacgacaatatatgcacaatatcattcttagaatttcaagcaaggaagaatttggtaataattccagctgtcaaaaatatctagaaacaaaatgtgcaagatatcaatagtgaaaagacccatataaataactagttaggatgttagagagtaccattatgatgtcggagccggctggaagataaagacaaataaagagactggtggtcagcatatgctggatgtaacatataaatgcttacaacagcatatcaatgtaaaacctgagaatggtatctcattg

SEQ ID NO: 185296 - DNA, 362 bp, Glycine max
ttcatcaggggcaacttagacacttggatatgcaaaaagcaatgccctattgcattatccactactgaagtagaatatatttcagctactagttgatgctctcaattattatggatcaagaagcaactagagaggactacaacatccatgagagtaacattcttatctattttgataagaaaaaaaaagctactatccagctatctaaaaatcctacattgcatttaagggaaaacatatagaaattaaatattagtttataagaaaccatgttcaaaatcaacttgctaatatatttataaaacccattactaaagaataaacttggaatggactttataaaggaatgattcattatctat

SEQ ID NO: 185297 - DNA, 92 bp, Glycine max
ttttttgaagagtgggggtggagcctcttcatcattctacctagccgggtatatttcaacagctgaacactggcggcgctcaatcatacgtc

SEQ ID NO: 185298 - DNA, 402 bp, Glycine max
  unsure (1)..(402): unsure at all n locations
agctttacaacagattntagttatgaccctcttacctagaattaaaataacttaatgccattaacctagggaattaaaaaaaacttaatggttgagtgtaactgaaattgtggcaaccaaaagtcacccccaacagcaaacaagtcagccaccatttggtctcccaaaaggttgatgcctaggttgccaattgggcccttattacaacttgaactaaacctaactaaagcccttttagttgattaacccaaaacatatttttggtcagccaactttacaaggattgggccattatttagacaaactaaacactctaaaattgaaacaaagtggtgtcatttagtcctcctccatttgggccatgatacaactgacaaccttggacttttctccttgaaactt

SEQ ID NO: 185299 - DNA, 441 bp, Glycine max
gtgagcaaattcaaacgactattacgtttcacttcgttgtctgactgagtcccgtaatatatcgagacgctcgatattgattatcgaagctctgagcaaattcaaacgacaataattttttactcggatttctgatttagtcctgtaatatatcgagtttctcgaaatcgaataccgaagctctgagcaaattcaaacgacaataactttttactcggatgtctgattgagtcccgtaatatatcgagttgctcgaaatggaattccgaagctctgagcaaattcaaacgacaataactttttactcggatgtctgattgagtcccgtaatatatcgagtcgctcaaaatggaattccgaagctctgagcaaattcaaacgacaatatatttttactcggatgtctgattgagtcccgtaatatatcgagtcgctcaaaat

SEQ ID NO: 185300 - DNA, 359 bp, Glycine max
attcatgtttcctttgatgagtctaatgttatttctccaagaaaggatattttagatgatattgtagaatctttagaacaaatgcacattcatggacaagattctaaaggaaaaggagaaggaagcaatgaagatcctccagtagaagtcaaagaaaataatgatcttccaagagagtggaaagcttcaagagatcatccccttgacaacattattggtaatatctcaaaagggataacaactagacactctctcaaagatttatgcaataacatggtttttgtatctataattgaacctaaaaatttaaatgaagccataatagatgaaaattggataatagctatgcaggaagaact

SEQ ID NO: 185301 - DNA, 441 bp, Glycine max
  unsure (1)..(441): unsure at all n locations
ctaagcttntggagtgaaactgggaccaactatttatttataaaggaagtcgtatctagtcaaggtcttagagaccatacaagtttcctaacgatttctaattatgtgggccattaagtctatcatatgctgacaatagccgagaagcccatgaatctcttcgggggcggagtatgtgtctgccatcgccttggccttggctaacaatcggggaagttcttgactcccgttcaaggtaagagcaaaccgatccatccacatggttgcctcttggtgtaaagagtcgatcacccttcctctagcctctttttccgcgtatacttgggcatattcgtccgcaatcctatgctcgtgggccgcggctagacctaactcttcttggtacttggcgatgatagctagcatgttggtctccgtctcgcataaacgctgagacaagct

SEQ ID NO: 185302 - DNA, 399 bp, Glycine max
gctgcagcttgggaaaactgattgtaatctttttttttttgtgataaaatacttataacttgcgataagttagtggaatctggtggtttgctgataactaaacgtagtctcagtaacgaagatgaactattatgatttcttgtgtctgatctttgtttatatcctatatgctttaactaacctaaggtttgagtttaatattggtattgaaaatctttattaatttcgttttataagataatcatagcaattatcattgaaaagttgaaaattaaacatttattgaatctagtgtacattcttttgttgctttagaagaaaaaaaaaagtaaaaaggagaaaatcctaaaaattaatgtcatttattctcttttcttttaataaaaaagtctatcatta

SEQ ID NO: 185303 - DNA, 481 bp, Glycine max
  unsure (1)..(481): unsure at all n locations
actaagcttataggagaattgtgcgtaactgcatatgaccctatatttgttatctactttaatatnnngcagggaaaaaaacactggtaaacaaatcaaaatttaaaaaggcatcttgtatatctcccatgggcaagagctacaaacgttatttttattagagctaacaaaaagggaacaaatcatgtagacaactttgaaaaatattatattaacttgcatctttacccgtcgagaagaagttcaaacaacatttttatggtttaacctgaacatcaattaatgtaagaagatgtttttaaagtaactccagtttcataataatatggaaatgtattaccaatatctttaaagccaatataatgtagaaccttttaactcgtttggtacaccaatgccccattacttttctaataatgttaaaagaaaatgataattggatatgaagctaaagaaaatagtaacctatgtttctcaatat

SEQ ID NO: 185304 - DNA, 394 bp, Glycine max
  unsure (1)..(394): unsure at all n locations
gagctatgtcgaggctttgtgaaccttttatgatcaccaagcgcaaagcttgggtttgacgagtcttatgttcagcacatgtgttgtgctcttgcatacttggcacttttggataagtggcctcaataacttaagagagggggggaattaagttcaaaaatttccaactaatagattttaatcccctctttaaatgaaatatggtagatttataatgcagaagaaaaagcagcaatcaatttaattgatgttctttaaaagttcaagacaaaatcaattgcaataaaataaatgagataagagaagagagaattgtcaactcgnattatacttgtttggccacttcctgtgcttacgtccagtcctgaagcaactcacttgagaatttcactat

SEQ ID NO: 185305 - DNA, 405 bp, Glycine max
  unsure (1)..(405): unsure at all n locations
ctccctaagagtcctctcacattgtggaggttaagccatgttctcagtatgaaaattaatagccaaatgctcataatcagaatattcagaatcaccagtatcagaatgctcaaaatgatcaggatgctcaaaatgcacatatatgaccatgatgcacactatgcctaactaatctatgaaaggttgtatctatttcaggatcaaagggttataaatcacctggattgcccctagtcatgcactatatgaagcaaatcatgtgtttctcatacaagcacctaacatgggtgtaaaactacagctatacttaaatgatatccaaatgagctgaaatattccagaaaaaattaaagtctaacttanaactgctaagaaagttaaaaatagacataatactaaaataaa

SEQ ID NO: 185306 - DNA, 342 bp, Glycine max
agctttgttactggggtggctctttttctattgaattttcgaataatttggtttgttttcctcaacttgtgctctttccactgcttccaccttttgatcaatgctcctactactaccaccgcaagaattgtgctcaccgccaccaccacattcttccttatccttcaccaatgatagcccaatcaagatcacagaaatttgataattcatgtgtatcaatttgtccgaaaaaaacaaaagtgcttgggggtatgaaaaaaaatcaaaataactgaaatccgttaatgtagtatacatgaaggaaccagtatcaagggttgaaagtgtttgccacctgtatgg

SEQ ID NO: 185307 - DNA, 435 bp, Glycine max
tctgatgaccaagcccagtttgttgagagatgtatagatctatgctatgaagtttcaggcaagaaaattaatgagtagaaatcctttatatttcttttcaaactagtcaacaaggataaagttgaccacttgagagtcatgctcaagattccagttatttctaccacaaagagctattgggtttccccattcttaattagaggaaaacaaccaattaattttatggtatcattgataaaatcaggtaaaagttggggagttggaagtcttgaaagatgtctcttgctatgtgtataactttagctcaatcctcatttttgagcatgtctgggtacattatgcaatcaactctccttttggcttctgttggtaaagctattgagaaattatgcaaagatttcatatgggactcttctcatgataggaaacaatttg

SEQ ID NO: 185308 - DNA, 418 bp, Glycine max
  unsure (1)..(418): unsure at all n locations
ggcctgtccgatgcagtagtaaggaaggtccgagttatgttgtggaacggncacgaacccgatatgggtttatgcaaagacaacggcggcataactagcctgataaatgccaaaggaaatcgtgggaagtatgggttaagctataagcccactcatgcaaatataaagagaagcatcacgggaaggaagagcggtagtcaaagctcgcggttgagacaagaaggtgaatgaagcccaccctgccacataagtaggagctttataagcgcgggtctgggggatgaatgtcaagtggttgcgatatacgaagatgatgttccgagtacattggatttggtacgaccatgccctcctgatntccagctgggaaattggcgagtggaagaacgcccccgcatttacgcaacgagcataatgt

SEQ ID NO: 185309 - DNA, 231 bp, Glycine max
agtgaccctcatccatgatgttcattatcatggtaactaatctactttgttgggagccaaagataagtattttatacaatggaacataaaatgggaagatcatattaaattaaatacctttatccgagttgagaatgaaacaccatttcaatttgaagtatttaacccaaagaaggttatgtggtctttacacaacatattagaaggggctacctttttatttgcctaaaa

SEQ ID NO: 185310 - DNA, 444 bp, Glycine max
cttgagttataatatgtctcacctaaattttgttagattctattcacatgcgtcagggttcttattttcctgatatactatagcaagaattaatgagtcatggtaggttgtgccaattcacgacgaaatatgtcaagtagtttatgaaaagttgttttggactgggcttttatgcagacccaatcatatgggcaacttaacaagaatgtacattaataaaattaggaggtataataacaagtacccatcaactaaacaacaacctctttcaaaactgattgtaagcccatattgccacaagcccaagttttataaatgtgtatgtttaggtccaaacaacaacaatgattatatatttattatggacattatagacttactgtcattgcatgaagtgaaaatattaggtatgtttggtctctctaaaaacttattgcaagtatt

SEQ ID NO: 185311 - DNA, 403 bp, Glycine max
  unsure (1)..(403): unsure at all n locations
agcttcttcttccaatcgacgctgtttttgttgttgcaacattctttcaanctcttcttcttctcatatattcaaaggtagagcagttgaagacgctagtggggagggagctagcaatatcaatggggtccaataatcatggcaactcaaaggagtttctagaactcataaagtccatcggtgagtcccgatccaaggccgaggaggaccgcattgtcctccgcgagattgaaaccctaaaacgccgtatcaacaacgccgacactccgaaatgcaacattcttgcagtcatcttggacagtttggattgtgttgcggtgaacaatgtctntgaattgttgttttgtggtgatgttcatgcagccctgtgagatccactcatttctgaagccgcaggaggagc

SEQ ID NO: 185312 - DNA, 436 bp, Glycine max
  unsure (1)..(436): unsure at all n locations
taagtcatanaaatgtatcttatgcatctcaatggatctattatgaggcaactatgatgcaaatttctcacccatgattaccttttgtttcttctgcagttcctcagttataatatattcccatttcttttgggcctcctccttggagtctctgagccaatctagtataggtcttgtgagatcaatagtagacggatccctcatatcatgacataatacatcctacaaagaaatagcttcttgttagattcaaaaaagaaataattaccaccttagcattatgaatgtatgtaattaagcatacttcaatgagaaaataactagaaggatcatgctgcccaactgtgtgcatcacctggtttgttgagcataagatcttgtccctcagagcatgtaatgtctgacctccaagaattaacaactctcggatctactc

SEQ ID NO: 185313 - DNA, 401 bp, Glycine max
  unsure (1)..(401): unsure at all n locations
agcttattgtagaactgctcaccaaaatatttattgaatnttttatgtacaaacttattcaaaagaaacttggacaatgacaaagtacaaggaaataagaatgtactgattattcacctctctccttctctcagctcgttcaccacacttaaaactgaatccataatttggaagtgttcccaccctttgaggtttggcatcttctgtgttggaacttctaggaggattaaggttaaaacacaatatacacagcaccacactcaataataaatttaaataatagagacccagtagttccagattttcactcataaatatacaaacccaaaaaaggatacaaggaagattctgcttctccttgaactttatcaatgggttcttctctcgataattatggtttt

SEQ ID NO: 185314 - DNA, 462 bp, Glycine max
tctattccatggcaacatggaccaactcctctgcattgtgtccaaaatggtctctgtatctgagtccacatacctctctgatcttgtaacacttgacccattacagtgaattgcagtgctagtgctactgctgctgctactgcttgtggttgtagtggtggactcatcagatgagtcatctgaatcacacacagataactcatccgattcataagaactccattgctcaacttgatcatcaactttcccattatttttctccccaaggcatgtcactgtgtctacaaatgctctatgcaagtcatcatgaaaatttctcaatttcaataagctcaatgaaacctgctcatcaaaagtattactaatcaattaattatccataagagttgcagagttcggacacataaaaatgaaataaaaaactaacaaacagctaagagatcattatgtatgttcttaacg

SEQ ID NO: 185315 - DNA, 176 bp, Glycine max
cccactgaacaaaaaacaatacactgtttgtgtttgtaaaaagtgaagttcaaaaaaacatggcttgagtaagcagttcttctactatgaagataaccatgcccaaaagcaagctaaaagagctataacgcaacttttacataatcaaaggtgggtcaccattgatcccaacgtat

SEQ ID NO: 185316 - DNA, 388 bp, Glycine max
ctattaaactaagactgacaaggtcagacgaaacctgtgtatatgtgttacacacccctaacgcctaatcgcaccatgattctctatgaagcattcaacctatatgcacccattctgctaccccaaacaaaacctcccatgctagggtcaagcgcaaccaaatactgtacatatcaccatggtattggtcacaacaccgaagacttttgagtcctaaaggacaagatagaagaacttatacatgctgggtacttatcctagtttgttaagagaccaaacggtcaccaagtatgagcaagacctataggacaccaaaatgagcaacatatgaaccaagaagcagacataagaagagcagaagacagaggctgacaaagacgacagccat

SEQ ID NO: 185317 - DNA, 387 bp, Glycine max
  unsure (1)..(387): unsure at all n locations
agctngaactacccgagcactcgtgcttttattcaatgtttcattggtcccttctaaagccctttattggaccactagacacggtgcagattgagaaactgccaccaagggcggttgataatcagccagttcccatacccttggctattctgggccacaagactctcccgactaaccacgggccaaagcagctggtcttagtgcaggggcagggacttcaccctgacgaaacgtcgtgggaagactggtcacgctttaggagctttatcaccttgaggacaaggtgttgtttgaagcacgcgggaatgttacaagtagcagctatgaaccgcaagcaaccaggcccaacagtgataacagcaaggagttagtagcaggaaggcccaa

SEQ ID NO: 185318 - DNA, 447 bp, Glycine max
  unsure (1)..(447): unsure at all n locations
ntatggttggggtaanaaacatagaaggttaatatcacattccttgttacgtgtctatcagacattgacatgtgacagtcaacgtcagtgcctaacgatcaatgtccaattgtgacatgtggaaccaacattgcaagattttacaaaataggaggacgaaattcgtgaattaaaaaactgggggaccatatccgaaactgcagataaagtgggggacaaattttgcaattttgcctctaagaattatagcaatgtttaaagtgaaattattgatacgactacactctctttttggtaggtagagataataaataaaaaataaaatgaagaanaagttttttttatgtggtactatttaatttaacagacaataatttgtttctatctggatatttgtttaaataanaaattaagaagtacattattaactattaaaatattgtatta

SEQ ID NO: 185319 - DNA, 352 bp, Glycine max
  unsure (1)..(352): unsure at all n locations
gattcaangaatccaacattgtctttgaatatcagtaaacggttttgcttctcagcagcatccttatatacttttccatattttttcatccattgctcatgtcttacggacatgcatggatgcctcatggaggttgcgggacattacttgggaaatgcagattgggagaaggagcacaagagctaaaatgtgctgctttttgccaatggaagccatgtcttttcttcacaatgtgtaactctttattaattgattgtatattgagttttgtgtttggaattaatgtggcaatatgtatgctctgaatgcaatgtttctaatggtatttataggagtgagcatattttgaacc

SEQ ID NO: 185320 - DNA, 436 bp, Glycine max
  unsure (1)..(436): unsure at all n locations
tgaagtcaattctacacctgtgtttcttcactctaaattcttttgctaattttaaccttgcaatcacagtctcatagtcaacttgattgttagaagttttgatattaaaccttaatgattacttgagtgagatatctccaggtccttcaagggtgattcctattccactaccattgtggttactatctccaacaacatatatcatccaccaatcacctctgtcactactactcgatttagatggaagctctaccatgaagtaaaccatacattaagctgtaatgggtccttgtggctagctccatggaccatgcaaccattcttccatcaagctctggcttttgaagcacttgtctaatatgatggttggtcttgactttgatcaaatgactntggatgtatgggtgcaacctncttgtagaagtcactagtgata

SEQ ID NO: 185321 - DNA, 397 bp, Glycine max
  unsure (1)..(397): unsure at all n locations
atctctaagtcacctgcagcatgcaagcctctagctgcaaggtgtgtatatgtatattttcacatcactgctcctgaaaagctccctaaacccatgaaattctcaaggtcatttcatttaatcagattatcttatctaagtataactcgtgttcttctttactaattaaaaatacaatcattttggtttgcttcacccacaaacacgttgagatcataatntactattataacttgtcttgatttttgttagacctccttatacgtatcttttacttgattgacggtagggttgattgttggtacggctaagtgataccaatggtttctaatatcgcagactataatttgtagtagtatttttctctggatccttttattctctggtagccgacctc

SEQ ID NO: 185322 - DNA, 378 bp, Glycine max
  unsure (1)..(378): unsure at all n locations
tccagggccaccgagcatacaactngcaaactaagaaactcgccatcagacaagatgtcgaagacgaagagcatgccccaaggaattgggatgaagaaaaagtggagaagaaagttcttatacctgcgcaacaacctcaagaaaaagctgaggaagaagacccaggggaaccaccttcacctccaccacaacaacaagaacaagaactatcatcaccagaggccactccaagacgagtaagatccccggcggacaaagaagagacccgaaaccgggccatacatgaacttggaagccttgaagaagcgccaaagcaggacaaatgggtcaaggcaacggaagacgagaacagatgagcgagaaaacaacacacgggag

SEQ ID NO: 185323 - DNA, 398 bp, Glycine max
  unsure (1)..(398): unsure at all n locations
gcttaacatgtagagattggaacacattatcttatgtatcccaaaaggtatgtgttcggttctgccagttaacgatgtcgaagtataacttctcaatggttcttttgaaaaaatgcatttgcacgtgcaagaaagaaaaggactacctatataagcatgaagattaaccgccttcaaaagctgggacttggctntgatatgcttatgaaggatagggacgcaggctattaaaactagtgtcgagcaagagtaatgttataaactattgtgcagattatcttcatgtattcattatgaatagaaagggttcaatccttagtgacaccctgatattcgaatattagaaacgtgtaatttgctaagaagaaattccatcctcacgatatttcatctatgcc

SEQ ID NO: 185324 - DNA, 353 bp, Glycine max
tatgtacaatttgttgcgctactttaagtcttttaatccagaaacggaaactcggctaccatcgtagaggtatgcggataaatgaaaatccttttgggtgttatacgcatgagtatatcgatgcttgtttgcaaccttgacttattcagaagtacctaccacatagagagcggctatgcaacgctggaatgcatcacgaaaattcacactgtgtgattgcattctctggcgccacagctcatgcgttgaaaactactacataccctaaacacatgcgcataaacacattacctccattaatgcatgacacagttctttattggaaatgtgttctttactctggcctgcaggac

SEQ ID NO: 185325 - DNA, 388 bp, Glycine max
agcttgtcaagccttttgcatgctaacattatttgtatgttttgattggtggaaaatgatggaatatatttttttttttggtttaaaacaaaggtgccaaatttgactagtttgtatgatattattaatttaagaatttaatgtgatattcacttataagataagttatttaatcataaatcattattgatatgattttaaagattgttattataaaagaataaatttatcatatcgtgatttatgatttgatgataatgtaaaattattttacattatcattatataatttttcttctctaactctacatcttaatgcacaaaatggacagaatataattattatcattttcaatttttcaaaacaattatttttttatcatttata

SEQ ID NO: 185326 - DNA, 411 bp, Glycine max
ttcttcaatattccttgtcgatatcacttctattttttaattattgactaggatttgtgaaacaggttcgagttgccgatccaacttttttaggttacttcattgataaaggtgttgctactactgcaaaagttgtcctcaaggtaacagatcaattaactaattcatattgaggtaatcattatatataatttctgaatttgagaggtcaagttatttattgcttatgtttgccatctctgtgcgaagaaataaaaccaatatgtttaagaaatgatagcctaggaaaagagcggaggcatgcattaaatatatatacctatggtattgttcaactctaatatgtttagagttctatatcttattgggatgttcggaatattcagaatcataaattatgaaaattgcacg

SEQ ID NO: 185327 - DNA, 383 bp, Glycine max
  unsure (1)..(383): unsure at all n locations
agcttgttccaggtgcaggtgcttctctagatttggcttttcgtaagcccaataaaaattgcggaaacactccttccagaaatatcatacctaacattttgcttccaaaatgaatgttccaaaaaaagcctattctagaacaccttttccttaagcttattttttccttatggaaatatcattccaggaacatcttttacttatgaaaaggtcattttggaaacatttttgcttacgaaaagaccattctaagaacagtttttgcttatgaaaaggtcattatgaaagcatgtnttgcttacgaaaatttcatcaggggtattattgtaaatgggatgtgcaaggtacacaaaggaaaaggaaggtacaggattcaagtcccc

SEQ ID NO: 185328 - DNA, 398 bp, Glycine max
agcttagattgaatccaaagctagattgattatgtttaaggacactcaaagaagatgctgagagtagtgttttaaaacccaaaccgaaccgataggtcagattggtccaagataaagcctttcgattgtagcttatcaccagaaagaattttccagtaataatttctagagaagaaaagaaggagaaggtggaatggcttggttccaattcttcatcccaaggaaccttatcatcacaaggataataggtatgacttaattccgaatctccaaaaacatatcaggaaaccaagcttctagagatgctggaagagactaagaatttcctgagataaaatcttctaccttagcttccaacaagctacgtaattgatatggaatattacaaagattcacaa

SEQ ID NO: 185329 - DNA, 424 bp, Glycine max
tgaactagtagggaggatggttgcctattccatagaactttcagagtttgatctctaatacgaaccccgcggccccatgaagacataattcatggcagacttcctggtagaattcactgggaatgaccaaaccaccccaaactggtggaacttctacattgacgggatatccaacatgaagggaagcgggacaaaaatcatcctcgaaggacctgacaatgtcactctaaagcaagcccttaagctcaacttcacagcctcaaacaatcaagccgagtatgaaacactcattgtaggtctaaaattggtaagagaagttggagtcaagaagctatgatgctacatagacccacaacttgtctaggggaaagttaccaatagataccagaccaaggaatagtgttgctcaagtactaccacatta

SEQ ID NO: 185330 - DNA, 389 bp, Glycine max
  unsure (1)..(389): unsure at all n locations
agcttttggttaagagttgtctntgttatatgtcaagaagaaaatactttgtccaaaatgggtcatggtcacttgatgatttcctatgagtcaatagaaatctctaagttctgttcatccagccagtatatgtgggttcaccagatcttggttatatgtaataaaatgcatgttgtcattactgtctagcagctcacttcaccataagactacatttaaagtaaattaacataagcaatattgatgtgttatatcatgtcgcgtttatttgagaacagtcttgaaattcctaacctgatccttaatatgaactgtgttgaacatttcatctggttttctattaatcttcatcattgttgtaaccattttattttaatcttttgatcttc

SEQ ID NO: 185331 - DNA, 379 bp, Glycine max
cgtagaacaataaacatcactttatataagaaacgaaaagctggagtgagagtttaattcatgttatatggccaagtgaaagatgttgttctctacacaaatttgtgttatcttaagcacagttgataacttaattatgatatctgtatttttagttcacttgacatgataatgacaaatgtcttttccctcctccatctaggttcctttggtcttgatcactaattacctccaaaataaatacagaaactcaatggtatgcctctaaagtgtcatatttaagaactttggtctattaatgaggtatcttataaaccttcaacgtgatttattcgtttttaattgctcatttatgcatgccacgttggaaatatgattt

SEQ ID NO: 185332 - DNA, 395 bp, Glycine max
agcttctaaactttgttttatggctgagttattgaggagagagagaacgcggctttgtgttttaagaaaaggcttttctcttttttttttaaaagatgtgccacatgtcttcttttgagtggagcaaaaagggcccattttttctcttgatgtgactcacactcagccacaagaagagaaaaatctgaccttttgaaatgctaaaatcctgcctcagtttgcgtgtcgtttctctggttccagtccctcgcgtttctctgcacccgtcggggccagtttttgaaagtaagcaatatatatatatcaaaacgcttataatgaaaccccgagcgtggttcagaggttggttttgttaaattttaagatgcacgcaaaacaataatttttaaactaat

SEQ ID NO: 185333 - DNA, 416 bp, Glycine max
tgccacccagctcgcccaggcgagctaggttgcttcttctatatggcatcgccttctggggaacttcctggaaggccctagtgggcctggtttctatttgcaccccctatttactaaatacacccccttacctttttttgctgattctttttccgtaacgttacggaactttacgaattacgtaacgatacttgttttcttttcgtaatgtcacgacaccttacggattacgtaatcatcccttctttagcttccgaaatgttatgaaactttacggattgcgcattaacacttccttttgacttccgacatgtcaccaaacttcacggattgtgcaacaatgcattcttttgacttccagcatgtcacggaactccacagattgcctaacgatgggtgctaagtacctcgaagtg

SEQ ID NO: 185334 - DNA, 385 bp, Glycine max
  unsure (1)..(385): unsure at all n locations
nagcttgtcctttcgtttgattccaatatttctaatttgcttaatgttcactgttgtacaagctcaagtgcacacatttttcatcaagcaaggtgccacaatggtacgttccatangaccacatttccaagtcccaccancatcgctccaaggcctagttggagtcacaatactctttgctgtgccattctatgaccgtgtctttgtgccactagcaaggaaaatcacagggaaacccactgggataacagtgctacaaagaattggggtaggacttttcttgtcaatccttaacatggttgtgtcagcacttgtggaggccaaaagggttggtgttgcaaaagagagtggcctaattgatgacccaaaagcagtgttaccaatc

SEQ ID NO: 185335 - DNA, 377 bp, Glycine max
tgcaatcctagagccaagcatggcaaatggtttcttcttttaccctgtactggcatcactcaaagttaatcactttccatatatgcccccacatcccaaaccccttctagatattatttacttggcagatgatgggtgctgcactctgggttttctgttcaaaggtctatgattttaggtaactataaaaaagtgtttgggtgctgcactctgggttttctattcaaaggtctacttttggagttttctactcaaaggtctatgattttaggtaactctaaatttgttccaatcattatttcagtcacaacattatctatttggaatctttgtgaataaatacattgactatatttgtctataattcttctataata

SEQ ID NO: 185336 - DNA, 408 bp, Glycine max
  unsure (1)..(408): unsure at all n locations
gaccncagagtcacctgcggcatgcaagcttgtaatcgattacacatatactgttatctattactagagcaaattttcagaaaatattctcaacagtcacatctttttatgtggttcttgaatggctatcaaaggcctatatatatgtgacttgagacaccaatttgctaacagtttttcagaatagaaaaggtcttatcctcttataaagcaaaatcgttctatcctcttacaaattccttggccaaaatacttgtgattcaataaggaattatttgagtgctcaaattgttcaatctatttctttcacgagagatttcttcttttcttcttcttcattctgaaaagggattaagagaccgagggtctcttgttgtgaacaaattctaaacacaaaggaagggttgt

SEQ ID NO: 185337 - DNA, 398 bp, Glycine max
agcttacaaatctgttttaaatcctatctccataaataaaataaaatctagataagataagataagatctagatgaaataatatctagataagatcaaatctaaataatatctagataagataaaatttggtagaataaaatagtctgctctcttcaagtccaagcccaatgcttcattaattcctgaaattagattaaaaacatcaaattagctgaatgagcccaaataatgaaactacctaattaatttgacaattaagactaatcagtaattaaaatggtgcaaaaaggtttaagaaataggagaaaataatgacacatcaaaatccctcatacttagccttttgcactcctgggaaaaatgaaacaaagaacaaaatccaaggatatcaaagag

SEQ ID NO: 185338 - DNA, 417 bp, Glycine max
tataaatctcctcttgtttactggccatgtttgaatgagtaatctttctctttctgtttacggtttttgtgatgacgtttgcgatgtttatatgctgaaattgctgatggaaaactgttatacatgaatggttgagttaacctacggttataaagtgagaatgtggtgctgtgattggaaaaagagtgaattttttagggctggaatgcctcatctggattctgtagtatttataggttaaagtgagttaatcctaacttgaaatgtcatttaagacttatgagaaagcttgtactgtgctatagaaataaacatatgaccaaagttgaccaagagccatttctcggcaaaattgtgtgtgaagagtcaaatttattttgtgaatttatgctataccattttgacaatctaattgtg

SEQ ID NO: 185339 - DNA, 378 bp, Glycine max
agcttccatgacaatgagaggttatttttcttttgttgggaacttgctaaccaactactcttgatgtaatttatcttcctatctatttatgaatattaaatttgcattatcttttcttgtgcttaatattattgcttgtcgcttgatcacccacttgcatggtaagttttaagggtagcattgggaaacgttattctctaatagaaatgagaaattatatctaaataaagtcatcactaacgatatgttgatttttgtttagcttgctatatatttctattcttaatgtaatttactatttgagctctgtacagggatttggaagagaaaatatataaattaggttctttcatgcgacagaccaaagttagagtatat

SEQ ID NO: 185340 - DNA, 263 bp, Glycine max
  unsure (1)..(263): unsure at all n locations
gaaaataaaactccgctaaaagatcagtgagaacagttgttatgttttngaatgaggcacctgtacgtttaagccacaaaggtttaatatgctgattgattgccacattgatgttgtagaagataagatcatttcatggggttagttccgccacaaagaacctatgtagggtatcacacatttctgccgaaatattacgattggactgttgggccacaggatcctcggcacagtgatataaagtgagacattcgtttcaacat

SEQ ID NO: 185341 - DNA, 397 bp, Glycine max
  unsure (1)..(397): unsure at all n locations
agcttgaaggcaaactggatgcgctggttatttttttaacccagctagccttgaataagaaatctgtacctgtcgcaagggtttgtggtttgtgctcctctgctgaccaccatacagacctttgcccttccatgcagcaacctggagcaattgagcagcctgaagcttatgctgcaaatatttacaatagacctcctcaacctcagcagcaaaatcaaccacagcagagcaattatgacctttccagcaacagatacaaccctggatggaggaatcaccctaatcttagatggtccaaccctcagcaacaacaacaacagcttgctccttccttcctaaatgctgctggcccaagcagaccatacattcctncaccaatccaacaacagcaacaacc

SEQ ID NO: 185342 - DNA, 418 bp, Glycine max
cgatcgtcgctcagatcttgactagtgataactttctgtttataatgagcttgtcgcatgtttttactccaaaagtcagtacgaatcaaatcactcccacattttatctctagcatgcattcatatcatgcattgcacaagcatctcttcatggcatcataatatatgttcctgcatttgcccgttatcatactccagcctcacattttgcatgagtcattgcatcatcatgcatatgtgttcaacaaactttttgttctacaaattgcataccttttattatcacgttttctcatgcatgatccttgcgttttcctctacataacaaaaacaagagaagggaagcatgaaaattcatgatgcattcttagttgcatgtgttaggtatcattagccaactatgttgcgatcataaacc

SEQ ID NO: 185343 - DNA, 419 bp, Glycine max
  unsure (1)..(419): unsure at all n locations
ttaagtcacctgcggcatgcaagctattctagntcagatagatgcgtattcnttttttattgcggncaatgctataaagattacaccttttggtgatggggtttgtgaatacatggaggggtcatcaaggactttcgtataactattggactacatcaaggatacgtgtgacaaccatgtcataagtaggatccaatggtatctgattgtgtactgcatcaaggtcccgatttgagtccagctagagtaaccaccatgaaaaactgacagcgttgcttgtaaaaagtttctgcatcagtagtaaagggcataagagtaaaatattctgcgatcaagcttaccaaggtatgccttggaaattatgaccgacgctggaatgcttgattgtcgcccgagcgacacttatatggatcctaatg

SEQ ID NO: 185344 - DNA, 267 bp, Glycine max
  unsure (1)..(267): unsure at all n locations
aaaactcagctttgaatagtagtcttaacaactatagacttcnatgattcatnggtctagagttcaatcattactgtctccattgtgcatggcccacacttcatatctaaaggacttgtgttgggggagtgttaaatataaaaatactcgtgacttttctcaaaatcttaagctttggggatggttggcttatcctaacatcttttaaaaaaaaattaaaggagcagggaaaaaagaggggggggggggggttgaaattaccatttt

SEQ ID NO: 185345 - DNA, 384 bp, Glycine max
  unsure (1)..(384): unsure at all n locations
agctnttctcaatcgtctgtaaggatgtttttttgttagaaagcggcgatgcctactgtagactgtttttctgtcatgtttaagttttatgtaacttgtattttcttcaaagatggggcatgcatggtgacccttaacactgtaaccggtgagattcccatatgctggaaagtcattaatggtacaaaaaagcattgcaagcattttaaaggtctccttgcgaaacgcatcaaacactacaaccccctacaactttctcatatcttcaaccaactgacttagataaacatcaatgtcatttcctggctatcttgggcccgatatcatcatagacaacatcatgtattttcgcttcatgcacaaccaaggagggaaattttaaat

SEQ ID NO: 185346 - DNA, 351 bp, Glycine max
actggatgcattggtgaactagagattcttgctttctttgaatcagaaattagtacctgtagcaagggtatgaggattgtgctcctctgctgaccaccatacagacctttgcccttccatgcagcaacctggagcaattgagcagcctgaagcttatgctgcaaatatctacaatagacctcctcaacctcagcatctaaatcaaccacagcagaacaataatgacctttccagcaacagatacaaccctggatggaggaatcaccctaacctcagatggtccagccctcatcaacaacaaccgctgcctgcttctttctctcaagatgctgctggcccaagcagaccata

SEQ ID NO: 185347 - DNA, 405 bp, Glycine max
cctgcatgcatgcatgcttgcacaacatctcaaggaattcaacattctagcatcatgaactaacacagccaagaaaacagggcagaggcagaaaactccgcccaaaacacaaaccaatatcacagcttttaccatagtaatattctccttgttccaattcgttaaccgttggatcgactcgaaaattttactggaagtctctagcacataaatctacattatgaccgttgggatctgctagaaaacgtccaaaacccaatctgtactactcttttcacaaccagcaaatacacaacactttctgcacaaagccaaaattctgctgcacctatttgacagcaaaattctgcataaagtgcagattttcgaaatcacactttccctcatccaattttgcccaaattg

SEQ ID NO: 185348 - DNA, 417 bp, Glycine max
  unsure (1)..(417): unsure at all n locations
ntgcagaattggtcttcgccagtgaaaggatcaatttgtttccgaaaagaggcaaatttgatcatcctactaggacgactgagaaaactggggcaaataaagagggtgaggatgagggagaaacccatgctgtgactgccattcctgtacggccaagtttcccaccaacccaacaatatctttactcagccaataacaaactttctccttacccaccacccagttatccacaaaggccatccctaaatcaaccacaaagcctgtctaccgcacttccaatgacgaagaccacctttagcacaaaccaaaaaaaacaccaaccaagaagtgaattttgcagcgagaaagcctgtataattcaccccaattccagtgtcctatgctgacttgctcccatatctacttgataattcaatg

SEQ ID NO: 185349 - DNA, 401 bp, Glycine max
  unsure (1)..(401): unsure at all n locations
caagcttctcccncaatttctataaatatggggagaagtgatgtgaaaaagggttcagccccttaggcacttctccctctttcgaatttgcttggaaaaattgtttccgtgaagaaaatctaagccgaggcgcttccgaaacgtttccgtaacgtttccgtaaggaatttcgcgaaggttttgaccgttcttcgacgttcttcattcgttcttcgatcttcaacgggcaagtacctcgaaccaagcttttcgattcattctatgtacccgtggtggtccacattgtgtttcgtgtatttttattctcgttttatttactttttatacccccttttgacgtgcttaagccattttgttaagtcatttctcgcttaaactaaaaataaaataaatttccaccg

SEQ ID NO: 185350 - DNA, 430 bp, Glycine max
tcctttgtgcaccttctgtttcgttgttatgcatttctttcatcttcacaagtaagagacatctccatccaattttaccttttccttggggtattttggcgctttatttgctatcttctttgcaatgtttgtgagataaattgtttgtgaatccaagactggaatgctttggttgggggctgtaatggatggccctacgcctatcgttgatcctattgcagatttgcatgtcatgttgttctccatgactcatatttacatgcttaaacatgcgcccaccaaccgtttgataaaatgtcgtaatcaccatttcatgtgttgttttggaatttgaatgtgaaatgagctttatgcatgtccagccatcatttagaacgtatgagcaacttacatcgatagattaaaatgccaagagtatgagatatgatta

SEQ ID NO: 185351 - DNA, 358 bp, Glycine max
ataataagatactagtataataaaaatgacatcaatattaaaatatttatatctataattcttaatttataataaaaagcaaatgaacgttaatattctacaagactaacaaaatactcttttcataagctattttttttttttaatacaatgagggtcaagtgctaactccaacacaggaaagacacactgagaagatcatctaccaacacaggaccacaccctaaccattgggttgtcatagaaataataccctataaggcataagcatagaatgggatgatacagggagtcaatccgctattttctttttccttgtcaaagacaatgaaaattacgaacattctagctcatatgc

SEQ ID NO: 185352 - DNA, 394 bp, Glycine max
agcttgtaggttgcccaccaaattactttttttattgtaccatcaactcggtgaatcaagtacatgacacacctgaaagttcaccttctgttcaggcaccacctttcacagctactgagtgtcaacaattgatctatttcttaaccaatcatatgaaaattgaaaccacaattgatgcagtagccacaaatgttatagttatctgtatgaatgatgccttcaataatgatcaccacacttggatcattgatactggggctacctctcacatttgttgtttcaaagaattgtttaattcatatactgccactttcaactcgcatgtcctactgcctaattccacgaaagttaaagtataaggaatagacagtattaagattaagaaagacatttt

SEQ ID NO: 185353 - DNA, 78 bp, Glycine max
acccccccacgtcaccgcgtaaagaagaaaaaacaagacggggtggctgagcccgatgaaaacgcacggaagggaacc

SEQ ID NO: 185354 - DNA, 382 bp, Glycine max
  unsure (1)..(382): unsure at all n locations
agcttgaagctcaaggctacagtttgaataagttttagaagaagttttggcttttgcatgcccaaatcttttgagtggcatttgtattggttgttaacatgatttttgcatcttagtacatttgatatttgtttttgcattgtgcataatcatagggtgagtgaagaaaattttctaaaagttagaaaaactttttcagaggcaaaaactctctactttaattgattatagagttgtcgtaatcgattacaacaagctatttgaagcttaaagagttaagtttcgtatcgctttaatcgattacagtagtattttaatcaattactctgttattttagacaatgactgattnttcaggagtctctgctttaagcgattacca

SEQ ID NO: 185355 - DNA, 416 bp, Glycine max
  unsure (1)..(416): unsure at all n locations
tncgttcccgagagcatctgttatttaagcatttttctctttgctttcttgtagcttaggaaaaatgtcatttcttcttctttctttcttccaaatccatttctaaagttccaagtactttctccatcacccacatccaccattagccaccacaaaccatcattgttctccattgaaaacccacaccgagaggaacccttcaaccgaagcagaatttccaacttggcttgcggtttcggtagagaacgaaaaccctaatctgatctttcgttgtctttcaaggaaaccatggttctatgcttgtttctagacagcttcaccctaggtttttatcgtgtctaactttgccaccgccattgcatgtcttatgcttcctttgaaaaatcttagacaaagagactttgaaaacattaggc

SEQ ID NO: 185356 - DNA, 385 bp, Glycine max
agcttcttatccaaggcacattgttggtgtgctattctccttcttccatggcttattccctagtggatggcgcctcctctcacctcttttcctttttcttctgctgcatctccatggtagaaaatcaccattgaaggaccttattgaagctcaaagatctagcctccatagaagccccacaagcaagcttccatcacctatacccgggttcatggtgacataagtagtggaggttgatctgtggtcatgctgggtctccaactcgcttgatgacagtgaagcctcatctagagtttttctcttcgatgatacattgtcgctggtagtccttaccgccacaatgcttgatatcaaagaggatggtatctctataaaccttcgaaag

SEQ ID NO: 185357 - DNA, 403 bp, Glycine max
  unsure (1)..(403): unsure at all n locations
ngcctgtccgatgcagcagtatatgaggagcctttttttgtttgggaacggctacgaacccaaaatgggttnaggcaaaaacaaccgcggcataactatcctgataaatgccaaaggaaatcgtgggaagtatggtttaggctataaccccactcaggcggatatgaatagaaacatcgcgggaaggaagagcggtggtcaaagctcgcgttggacacaagaaagtgaaagaagcccgtcctgccacataagtagaagctatataagcgcgggtgtgggagacaaaggtcaagtggtctcaatatgcgaagatgaagtgccgagtacattggattaggtacgaccatgcccatctgatttccagctgtgatattgccgagtggaagaacgccttcgaatttac

SEQ ID NO: 185358 - DNA, 80 bp, Glycine max
  unsure (1)..(80): unsure at all n locations
agcttcaatggagaaagaaagatatgagggggggggggagaanccncatccccttataacctctatatctcttcctcctc

SEQ ID NO: 185359 - DNA, 373 bp, Glycine max
taaaacacaaactcgtgatttattcataacataaaggatgaaattaggagcacacgcacaagaaacttacttgttggtggcttacttgacaaggttggaatagacaatgccaaagcacatattcaactgaaaacctgtacgtattcttcaaggtgcgatctatgaaagaaaaactggcacgacctgttgtgataaaaaaaattaaagcaacaaacatgagtgagttccaataaccacttgctattacacaacattgaacactgttttcataaataagatagacacacacatgcatatacttgttctattgttaatatattggggggcacaacttcgtgaaactaacacaagcttcaatgatatgtctttaagg

SEQ ID NO: 185360 - DNA, 389 bp, Glycine max
  unsure (1)..(389): unsure at all n locations
agctngctcgctaagccaattatgttctttgagtcaagttgggctaagcgcctgctggcaataagcctatgtagcgtgtcgcactaagcgagtttgtctcgctaaacgcaattagctctctattagagaataaggcttagcgagccatgctcgcttagccattatgctgtgtaagctaagcgagtgtgtctcgcttagccagaatccttatttttatgttgtcgcgctaagcgcgccctgtgcgctaagcgtatcctgtttttttctgaaggcgcgctaagcgagtctgcctcgctaagcgcccagtctatttttctgttttatttttctgcttttagttttgaataacacctggctaatttcaattcttgtgattcttttgatgcaga

SEQ ID NO: 185361 - DNA, 406 bp, Glycine max
acccagagtcacctgaggcatgcaagcttccttaagaagatgcctttagattttagagcttagctacacatacctgtctaatagctaagctcacctccttgagatgagaagctagagcttagctacacaccccctataatagctaagctcacccccatgacaaaaaacatgaaaatacaaaaaaaagtccttactacagagactactcaaaatgccccgaaatacaaggctaaaaccctatactactagaatggccaaaatacaaggcccaaacgaaggaaaaacctattctaatatttacaaagataagcgggctcatgcttagcccatgggctcgaaatctaccctaaggctcatgagaaccctaggaccttcccttggatctctagcccaatctacttggagt

SEQ ID NO: 185362 - DNA, 320 bp, Glycine max
gccaggaacccacaatatggttctagaatcagaaaatacacgaaaactacgatttgcaagcgagagtccacgctcgaaagagggctgacccacgcttgatactctacatagagggaatatggaaaacacctcgcactagtgtgtatacatacggaaataccacgagcatgaaattcctagcaaagtgtgaaagaatgacttcctaaatgaatgcatgacagtgtggaatgcctttttgactgcgaatacgagcaggatgtagataaccttacagtacgcatataaataaatctagactgaaacaataagaagatatccgg

SEQ ID NO: 185363 - DNA, 393 bp, Glycine max
agctttggctcttgcatttgaatgaattttttgtatctctctttaactctattttcatatgtttttacatattgttgcaacatatgcatgagtctttataacatgctagaataaaggtttctagtttgacactaaggataggtgtctcttaggcttatattcacaaggaccctagggttgggttccttagtttcattttcttggtagaatttgaaattgattgtgatatcttgtaagaactcattgtgtagtggaaatctaattcaggttgaattagataagtggagtagcttctttagaaatagagagcgaaccagtataaatcttgttgtccatcttctcttgaatcttatttatctccattgcattctttatcgattttttgattatata

SEQ ID NO: 185364 - DNA, 435 bp, Glycine max
aaaactcagctttttaaaagatcctaaagaactagagcttattatctatacctctctaatagctaagctcacctccttgagatgagaagctggagcttagctacacaccccctataatagctaagctcacccccatgacaaaaaaaaaacatgaaaatacaaaaaaaagtccttattacaaagacaactcaaaatgccccaaaatacaaggctaaaaccctatactactagaatggccaaaatacaaggcctagacgaaggaaaaacctattctaatatttacaaagataagcgggctcatacttagcccatgggctcgaaatctaccctaaggctcatgagaaccctagggcctttccttggatctctagcctaatctacttggagtcttctaaccaatgcccttgcggggtaggatagcatcagagtctttgt

SEQ ID NO: 185365 - DNA, 396 bp, Glycine max
agcttctccaaaaggatgtaaactttgttcttgaccagccttacaaagaggcatttgaaaagttgaggaagaggcttaccacctctcctatcatgcgaccacgagattatgatcttccctttgaactcatgtgtgatgcctctaactatgtccttggggctgttttgtcacagagagttgataaatatcccatgtcattgcttatgcttcacacactttatatgtagccaaagttaactacaccaccactgagaaggagcttttagctattgtttttgctttagataaattcaaatcttaattgttgtgctcccatatcactgtcttcattgacaatgcagctttgacgtacttgttgaagaagcttgatgctatacctagattgatcacgtggat

SEQ ID NO: 185366 - DNA, 421 bp, Glycine max
  unsure (1)..(421): unsure at all n locations
nttaaaagaatgagaaaatcaaatgtcagtcctatttttacacttttgcagccgtaatttctgcctgtgcaaatcttgctattgctaaatggggggaacagattcatggccatgtattgcgtttaggtttggtagatgctttgtctgtggcaaattccattgttactctttattcaaaatctgggctgctaaagtcagcttctctagtgtttcatggtataactagaaaagatattatctcttggagcactataattgctgtttattctcaaggaggttatgcaaaagaagcttttgactatctatcatggatgagaagggaaggaccaaaaccaaatgaattcgctctttctagtgtgctgagtgtttgtggaagcatggcacttcttgaacaaggaaaacaggtgcatgctcatgtact

SEQ ID NO: 185367 - DNA, 386 bp, Glycine max
agcttgaatacaatgaaataactttgcttatcaaataatgaatggctgaagcacgagagagtatcatccaatgtcttgtaaggaatgtcaattgaaaatatctttcttgtttttcttttttttttttcttgtgttaatagtaaagcttgagtcacctttaatagacttcaatgaagaaatttgtaacatcccaaacgaatcacaccaaaatgagagagatccacaggttgtacaagtatgggaatgtacagttaaggatgacttaaaggaattaattggtactacttataccaacaagatgcatctactttcggtagcccatctcttaagaactccagagttaaatgtgcttaacttggagcaattatgggatgggtgtgttggat

SEQ ID NO: 185368 - DNA, 419 bp, Glycine max
  unsure (1)..(419): unsure at all n locations
tctagaagatacctactctatcgntgngcctttgatctctcccgtgaatacttaagcttctagcacgtaatctttcagatagctacgagtgtggcttcctcttttaggccttccctctactaacttcttgctgtcatcacatctgggcctggttgcttgcggttcatagctgttacttgtaacactatgggcttgtcaagatgtaaatttccctattagtagagtaagaatatggataattaaaatagaacccatagtataaattattattgatattacattcttctttttaggtgattaacattcatttgaggcatcagttaaggttcttatttctaaatttctacctctaaattattattgatatccatgggcattctgctcgaaagggtgatgggtcgaacctcaagtactttatc

SEQ ID NO: 185369 - DNA, 388 bp, Glycine max
agcttcttgagatgtgaactgagacagatcatatctgacttgggaaggtgtagaaggagccctccttttcttagatgccatctgcaaaatataagacaaaacacaagagattagcacaggttattttcacaaaaacatcaaaataaaactgaaattttgactgggcacttagcgcagcaggctaagcttagcgcaccttaaaaaattttactcagctgctaagcacagcagagtggcgcttagcctgaagacacaaaaattattttttttgaagattaggcttagcgcaatagctgagcttagcctaagtctacaatttttcaaaatagaagagagtcatagcttagtgcagcatggcgcgcttagctcagcctcatcaaaatgacac

SEQ ID NO: 185370 - DNA, 417 bp, Glycine max
ctgatgaatcacggaccatagttaggaattaggcctttttgtttgttaaaggataccaccaagaggatagcattgactatgatgagacctatgtccctgttgctaggttggaagctattagatatttcttgcttttgcttgtataatgaatttttggttatatcaaacggatgtgaaaagtggatacattgaagaatagatatatgtgggagaaacctccaggttttgtagactttaatcatcctaatcatgtacacaagttggaaaagacactatatcgattaatacaagaacctatatcttggtacgaaagattgagcaatttttctagtgggcaatcttttgtaagagatcaagttgacaaaacattgtttatcaaacgatcaaacaatgagtttgtacttgtgcaaatttatg

SEQ ID NO: 185371 - DNA, 403 bp, Glycine max
agcttgtctcagcgtttatgtgagacttataccaacatgttagccatcgtcagcaagtaccaagaagaattaaatctagccaccgcacaccatcctctcccaaatgcggtaggacgagaaaggagcacactggggcacaccagcaacccccatttgggatacaaccgggtggcttacccttatggattaacacctaattacacgccaccagtcatgcgtgatgacgcgggtcatgtcccttccactgtccttgaaggggaacctcctcgacaatcggatgaggttcacgaggatcatagagagtatgcccaaggagacgtcaatttctaccacccggtccccgtcgaggggccgacacccaacatattgcctcagaccaaactcccagcacaaccaatattct

SEQ ID NO: 185372 - DNA, 421 bp, Glycine max
  unsure (1)..(421): unsure at all n locations
tcttanaaagacatagtatttgtgcttgaccagttctttttgagagaaattttgaggagttgaggaggaggcttaccacctctcccatcatccagccaccagattgggagctttaatttgagctcacgtgtgatgcctccaattatgcacttggggttgttttgtcatagagagttgatagactatctcatgtcattgcttacgcctcacgcactttggatgcagcccaagtcaactacaccaccaccaaaaaggagcttttagctattgtttttgcattagataaatccagatcttatttgctttgcacccatattactgtctatattgaccatgcaaacttgaggtacctgtcaaagaagcccgatgctaaacccatactgataaggtgaatgcttcttcttcaagagtttgatattga

SEQ ID NO: 185373 - DNA, 391 bp, Glycine max
agcttgaacttagttaagatggtttgttatgtgttgttgggagcaagaatgttgttattggagccactaatactcgcaccaagagagtcccttctgcccaagggtactccccagcttggtccaccggtctgcagagattataaataaggcttgatcactaagttttgatagtcaaatatcaagataagggtaccagagtgcaaaataaaaagaagatatttacaagaacagtggaatctctagcagctagagccaaaatgtcagcacatgacactgtatgtggacattccttctctagtgcagatttaatttcatcaatgacttcaaatcctcgagctgaatcacggttcggatttgacctcttttactgataatagttccactgctatct

SEQ ID NO: 185374 - DNA, 392 bp, Glycine max
agcttttccaaaaaaagttgcattttttatgaagaaaggaggtaggggcaattttggcatttaaaaactttgttgggtgcactagcaaaaatgttgggtgcacctagcaacgctcttaatattatctattgcaataatttgatataaattatatgttatgctttgacaattcactttaaattaattataaaatactcccaatagaggtaccgaaagcttgataatataaaaaatacataacaaaaagagaaatataatatgaatcaggaaaggtgagacaacatcctaaatagattatattatattgtagcaaaaattaaaaatattttaaattttaagagagcttgattatataaaaataaataagacaaagaaaaaatagaaatcttact

SEQ ID NO: 185375 - DNA, 385 bp, Glycine max
agcttgagatgaggaagtgttgattgtgtgaaacttcctgcttttattgttgaccacagagtggtacctggagatatgtcacgggggtcaggagaccttggggacgtcaggtggggtgctattgcccaaaaccaagcttgaccaatcccgacccaacccgggcatagtcggtcagtgagaacctgtgatgtacctaagcaggcgagctcctggcagtcaacagataaaaggaacaaagaccacaaagcaaggaggcttatggtggctggccagctgtgaaacttgattgatatgtgagatatggtctctggtaatcgattaccaagggtgggtaatcgattacaaggcttaaaaatgaagacaggaggctaagatggtctctggt

SEQ ID NO: 185376 - DNA, 396 bp, Glycine max
tctgcatgcctagagacttctagagagagatttgttcttttctagagagtgttgagattctgctgtgtgaagaccagcagagaaccaagcttgaagaggaagtcgtcctgagagcatgagatgagtctgtgagtgattgtgaggttctagaggtagaggagacatcctcaccgcttgtatttcttcaatccttcattttctcttctttttgctgtaaaggaagcttcccaggtatggaaagctaaatcctccgatggttcttccttgtaagtacttgatgtaaatactcgtatatctatgtaatgatgtgttgtgtgttcactattgtcgcaacctacctttcggcgggatggcgactcttgactcgcgggtgcgtcttccaagaaaggaatacgc

SEQ ID NO: 185377 - DNA, 384 bp, Glycine max
  unsure (1)..(384): unsure at all n locations
agctntgcttggagcttcaatggataatgtttgataaggaaaaagcaacgtgaggaagagggagggagagagctgttctgaaattgggctgagtgaagagagagagagggttgcttttttgggttttaataaaagggttttctctttttctattattttattcaagctctgccacatgtccctatttgattggagcaaaagggcccactttctcttcttgactgtgacccatactcagtcacaaaagtgagaaaaatctgacctttgaaacgctaaaatcctgcctcggtttgcgtgtcgtttctctgattccagtttctcgcgtttctctgcgtccgccggggccagttttcgaaagctagcaatatatatatcacaacgctc

SEQ ID NO: 185378 - DNA, 399 bp, Glycine max
  unsure (1)..(399): unsure at all n locations
agctntaaggagagactataaatatttttttttttattataaaatttagtaactaaattgtacgaattcaaagactaaaaattagatttaacaaaaatataggaactaaaaataatttttattctaaaaaaaataaatagaaaaattctacacctgtaaccccaagtggatggtgacaaccaaaatctcaacgataggtactgcttatatcttttgtcagggaaatttcagtagacaaagtgctggatagcactttggaagctctgtcttggattccatgtgctggtccccttttttttccatgtctcaagtctcaacatttgatttgatttaataaaatacagtgatggtcatcaacattaaaaataaaatgttcattgcgctaattaactaaataaa

SEQ ID NO: 185379 - DNA, 385 bp, Glycine max
  unsure (1)..(385): unsure at all n locations
tatagaatatataataaaagaacaatgacaattgtttattctatacatgtttcctttgatgagtctaatgccattcttccaaggaaggattttttagatgatatttcagattccttagaagatacacatattcttggaaatgaatctaaagaaaaagatgaaggaagcaatgaggattctcaagataatggagttagaggaaataatgaacttccaagagaatggaaagcctcaagagatcaccccctcgacaacattattggtgatatatcaaaaggggtaacaactagacattctcttaaagatttatgcaataatatggcttttgtatctatgattgaacctaanaatataaaagaagccatagtagatgataactggatca

SEQ ID NO: 185380 - DNA, 380 bp, Glycine max
  unsure (1)..(380): unsure at all n locations
agcttgcntgaatggaaacatatgttattatgggtcctattttaaacatttgtactgcatctaataaacatttccacaaaatatttcaagcatttggcctcttaaagagagtagagaaaggtgtttgcaagtggtactaccctcaacatcttaacaatttgacttttgatgtggctgcccttggcatggctctccgtgaaccattagattctgttaggttatacttgtcaagagctaccctggtagttgttccagcaaacttggttgatcattggaaaacgcaaatagaaaagcatgtgaggcctggtcaatcgcgggtttatgtttggactgatcatcaaaagccatctgtgcattgtcttgcatgggattatgatgtt

SEQ ID NO: 185381 - DNA, 364 bp, Glycine max
tgacgcctactactgatgtatagcatcgaacatacattaaactatctagagagaataaaaattgctgataatagtacactccataggtagtcacgatgctgaaaccactactgcaagaaaacactgtatattatagtattagctataaattctctgtggttgtcttgatcatgcttggcctcacatgactgacatgtggcgaatccatctgcctatatagacccttccccataacttcctttcttactacttcttaaaaaaatttctaattggaaacatgtgatgaaaattaccttgagacttccatggctgagaatgaagggtcagctaaagagagttattgtgtaaatgtggttaaaaagta

SEQ ID NO: 185382 - DNA, 382 bp, Glycine max
agcttgtgtattggtgcattctactaatatatggaattgcccactgctttgcctgagaataacaattgcttgaccacaacagcgctggaggcggcaacggacaatggtctttcaaataaacctgttgtacatgaacaaacattatatcatgcgctgaccgtgccaaacgaaccagcgaagtcattgcataattgttacactaactatattcaatgtacttgaacaaaatgatttccaaacacgtgatcgacacatatgatgcggtggccagaagagtcaggtggtggttgacttctaagagggaaaaatgtcatgctttgttgttgggacaacgatacaaggattacgttataccgtgaagcaatcacatatcccatgtctg

SEQ ID NO: 185383 - DNA, 410 bp, Glycine max
tgtcgacaattgagttatgttctatctaatccaatgacataacatggattatcaactccaagcacaaggtaagagccttcagtttctcgtgttgtaaatatcaatattctggctgctagtggaccccaaaacaaccaagaatctgaaagacaaataccaagcagtgtacttcagtttattaaggacattctttcctggtggagaaattcacgtggaagattctagtgtacaaggaacaactgcaggttctaccttagataatattcttaagatcgtattattactcacagcatattttattaataaggatatatatttttattaattattatatatttattaaagccttttaaagaaagaatactaatatcgaattaattcggagagaaagtatttcatataataattac

SEQ ID NO: 185384 - DNA, 396 bp, Glycine max
  unsure (1)..(396): unsure at all n locations
agcttccaccaccccacaacgtgaatgtgtttattaatctttttggcacacgctagtttttgttgaatgttcatacaatatttctctaagattgccaaacccctcaataatntacttgttaaagagaaactgttccacttcaatgaagaatgccttcaagctttcgacctcttgaaaaaaaagctagtaactattccagttataatggctccaaattgggggcaagaattcaaattaatgtgtgatgctagtgactatgtggtaggagaagtattgggaaaaaagaggaatggaagatttcatgctatctactatgccaacaaggtgctaaatggagcctaaatcaactacacaacaacggagaaggagaagctagcagtggtgtatgcccttgaa

SEQ ID NO: 185385 - DNA, 424 bp, Glycine max
tgtttctttctctggcaaatatgccaaaattctctttctaccatggcaagtgtttcacatgttatttgacatataacccatcttgtaaatgtatgtatacatgattttgatgatgccaaagaagaatcaaacaaggctgctacatttgcttcaagattaatacaagatttcttcaacaaacaaagtcttgattcaagatttcttcaagaccaagccttgtctcaaaacaaagggtttcaaagtcatgcaaggctctggtaatcgattacgaggaagtgtaatcgattaccagaagggaagtttgagaaattgttgttgaaaagggttttgaatttgaattttgaacatgtaatcgattatcatatgtttgtaatcgattaccagcaatggaactctggaagttcatattcataagtcataaccc

SEQ ID NO: 185386 - DNA, 399 bp, Glycine max
agcttcttatccaaggctcatcttggtggtgaagtcttcttcttccatggcttattccctagtggatggcaccgcctcttacctcttctcctttgtcttccgctgcatctccatggtggaaaatcaccattaaaggacctcattgaagctcaaaagatccaacttccatagaagccccacaagcaagcttccatcaagtggtaatcagagcacaagagcttcaagtaggtgctccttaaacctccattaacttttttgctttaccttctcttccattgttgtttcttcctttttttctccatgtatctcctcacatgtcttgtgataaatgtttataacatgattctttatagtttccaccgatttaacttgctatagaagctagatttgattatctat

SEQ ID NO: 185387 - DNA, 411 bp, Glycine max
  unsure (1)..(411): unsure at all n locations
ttatagcacagcaacacagaatctaggtgtccaacacccctcctttcaatgggttntctagggttgaaaagngaaatttagaatgaggtaaatttgaagcaaactctcacctcacaccagtccataacatccatttagacttattcaaactggatttacacctaaaatctcaccgaatcaaaatttgactcttcaacacccaaatttgccctataaatggctctttgttcactttgggcatttatttttctctatagcacagtcctagctntttcaatagttctacatgacatttcgagcttgtattaactcactttaaccttcatttaccacagaattcagacttagccttccaaccctcatagcctcactctgnttttttcactcataacaccacattctcactttcca

SEQ ID NO: 185388 - DNA, 383 bp, Glycine max
agcttgaccaatctcgacccaactttttttagtcggtcagtgagaacctgtgatgtacctaaacaggcgagctcctggcagtcaacaaataaaaggaacaaagaccacaaagcaaggaggcttgtggtggctggccagctgtgaactttgattgatatgtgggttatggcctctggtaattgattaccaagggtaggtaatcgattacaaggcttaaaattgaagacatgaggctaagatggtctctggtaatcgattaccacggggtgtaatcgattaccacgcttgaaaacgaggtcaagaagctaaggaagcccctggtaatcgactacccaggggtgtaatcgattaccaggcttaaaaagggatctgggagatgatag

SEQ ID NO: 185389 - DNA, 317 bp, Glycine max
aacatgagattatctccttaacccttgtgagagtgactcttctacatgcttgtaggaatgacgaacaccctggctgcatcgtaggacatttacatcctaagcgagtggccctctctggaaagagagatagtttcctttctttcgttttaccctcgcgtctctaccacaattccagaatatccaccgctgcccagatttatctcgaggccatgtcgcccattttacgcactctaattaggtgattcttgagccgagattgaaatagcaaacgagacctatcacctcggcttggatccacctatatggagcgcgtttac

SEQ ID NO: 185390 - DNA, 387 bp, Glycine max
agcttattgtcaattatgtcaaatgttttttacaattaagagtttctgagtatttatagaactaggcttaagaagataactaagcctctaatatggatttttttcatcaagctcaagcccattacacgattaaacaaaaattaggaatttttgtaaattcacactgaaggtgtgcgctatgcctgacagctcatgctaagcccaatttctcctcgggttggaattgggctaaaccagatagctcatgctaaaccagacaactcacgctaagcccgacagcttgcactaagccctagtgctaagctagacaactaatgctaaccccaatttctcctcaggttggaattgggctaagccagacaactcgcgctaagcccaagcgcgcaa

SEQ ID NO: 185391 - DNA, 243 bp, Glycine max
tgaatgtaagctggagtcgcgacacatgcagtctgacattatgtctaggaatcagattggactgcacaatgcacaatgcatgatataccgccgtatgaataactgcagccgctcgatccacgatgactgatacaacgtctatgacatcctgccatatagatacggacacataaagctgtcatatcttgtacagaataatgtgcaaatagcatacaaagtaagacgaatcatctttaagaacga

SEQ ID NO: 185392 - DNA, 392 bp, Glycine max
agcttagtaaagctaagcactaacacctttctataagtatcatatacccttttgcttatgttcagtgaatattgtcataatgtgtgcattcccgcattgtgtcttttgcataggcatcgcatatgggttctgtcttgatcccttctgtaaacaaaccaacggagggtccgtgtcgccttcttaaaaacgtacgttggggcactttgctacccctaggcgttgtgtctaagaaggggacgaatcccccggaccccctgcattcctagattgcatctgtgttatatgcattccttcatgcattcatccattccacccatgagatatcggagttttgatttgcaccagcttttgtctcactttagcaagcatgggaacaaatcataccggcaaga

SEQ ID NO: 185393 - DNA, 429 bp, Glycine max
  unsure (1)..(429): unsure at all n locations
tgtaggattatggggtatccatcacatgtggtactatgtgttggtcgggcgatggtgcacaacaagttttccacattcacaaatcgcgcataaacccaccatcccctgttgcccacctccaactgacctcacgtactcccacgtagcccatatcctcgtttctctcaacaccgggtccccatcaatcctcccaagcttccccaacatccaagtaactgaacattccaacaacacaaactatcacagccaagaaaacagggcaaaggcagaaaactctgcccaaagcaccaacacagcttttctcacttaaagaccccagtaacaattccttcgttccagttcgttaaccgttggatcgactcgaaaattntactggaagtctctagtacataagcctacattttgaccgttgtgatctactagcaaaca

SEQ ID NO: 185394 - DNA, 395 bp, Glycine max
agcttagggttcatccaaacctaacttattatgaggcacattaacatcttagacaagaatatggtgttgcacattgatgaaagaaagatgtttatggctatcaaagaggcttggttactggttgaaggaagtatccaattgcaatatgctaagctttgggactattcacatgagttaacaagaagcaatgaaggatcaactatgaaaattaatggcattcatcattcccatacctagatctcttccacaattccatcaaatttatatatgtttagatgcatgcaagcaaggattcaaggttggctacagacattatattggtcttgaaggttgttttacgaaagggtactacgacggtcatttgcttgtagtagtcggacaagatgccaacaatg

SEQ ID NO: 185395 - DNA, 403 bp, Glycine max
  unsure (1)..(403): unsure at all n locations
ntcctgtgtggagcactattactcatgaacatggtttatgaataaccgtcttcgcctatgaattctgatgttgttaagcaatactatgcatgatattgggagcagtttgaaggttcactgtttgggcgtccccaaggactcattaggatcttcatgttttaggttatcattgtaaacaataatcacaacattaataaatatggattgatgtttcgtatctctccctctcgtgtgtcttttgcatttatttacttattttttttttattttttgctgggtatgaatgtatgctctcattttgctcgctcacatgacccgcactccagagccaatggtcaagtctacccgatcagaagtcgcacattcaacatgtttggtgggggtgctgtaagcgttgagtaaa

SEQ ID NO: 185396 - DNA, 392 bp, Glycine max
agcttgcttgtggggcttctatggaggttgtatcattgaacttcaatgaggtccttcaatggtgattttccaccatggagatgcagcggaagacaaaggagaataggtgagaggaggctccatccactagggaataagccatggaagaaggagctccaccaccatgatgagccttggataagaagcttggagaggatgcttcaatggaggaaaagaaagaggaagagaaagagagagtggggagcacgaaattgaaggaagaaaaatggagagaagttgaactttgagttgtgtctcacaagactctcattcatcatagttacaacaagtgttacacatgcttctatttatagactacgtagcttccttgagaagctctcttgagaaaactt

SEQ ID NO: 185397 - DNA, 373 bp, Glycine max
gtaacctcatcgtccctcacagactatagatttgttattctatgcaatccttgggttcggactctcagccacttatgatatccgccgatgatcccattactgcttcccctaagctctctgtcctttcttcacgccgcatcccatgccttgcgaactccttggagtaccctcgcggtgcggtcactaaaaccccgtgcgatgaaaggcgtgatgcttttgtctaatggcactcctctcatggggtagccaagctgtcttatggcgagaacgggatgataattaatacaaccccttgttcccatcaagggaacatttggacatccttctcatgaagatagaatcttgaatcttccttccttctagcgagggaacc

SEQ ID NO: 185398 - DNA, 388 bp, Glycine max
agctttaagacactagtccttggccaactttgttttaacaccaaggcaattaccatggctgttcataaatccatatttacagaacaaaattggggcatggggctcaatacaaatcaaaaacaggttctaaatgtgtattatactaacaacggcaaccaattagacaaagagagacttagtgctctaagaatcaaattcgcatgcaaattgaaaattataggattaggaaaatcctcaccttttcccacctatctttattcttcaaaaccgaaaatgattcgaactcttgtcttctccttagagagaaatacatgaagaaaggatggatgaagattattcctgcacccaaatggagattctaggagcttaaaaattcactctttaaagt

SEQ ID NO: 185399 - DNA, 409 bp, Glycine max
tgccttgccccttgatatatttgagggactcatgtgtcttatgaatgacaaattccttgggataaaggtagtgttgccatgttttcaaaccccgtactaaggcatacaactccttatcataagttgaatagttaagggtaggaccacttaacttttcactaaaataaacaattggatggccttcttgcatcaacacagccccaatcccaacatttcaagcatcacactcaatttcaaaatatttttgaaagtttggcaacgcaagtatgggggcattagttagcttttgcttaagaacattgaaagcttcttcttgtttctctccccatttgaaaccaacatttttcttgagcacttcattgagaggtgctgccaatgtgctaaaatccttcacaaatcgtctataaaa

SEQ ID NO: 185400 - DNA, 380 bp, Glycine max
  unsure (1)..(380): unsure at all n locations
agctntctggcaataatcatatacttgtgtatgctctctntaatgcactttgccgcttttgctctgatgattggtaagtcacctaactctatgtatcaaatgagaggccccatccaagaatccatctctgcttggaggaacatgacctatgcatcagcaaaagcaatacttggtcactctagagtttcctggatgatcgtctgattttcgtgcttcttggaactccccaatgttggatcaagtggcctcagaataattaagaagggggggggggggtgaattaattattaatgtgtcttgactaattaaaagattgtccttcttaaatttactaaattcaattaggctttactactaacttataaaaacgtatgaacata

SEQ ID NO: 185401 - DNA, 419 bp, Glycine max
ctctttgaataattaaccaatagttagattacatatttttatggtgggaagaattagcaatcattgacagctcattagagaaatcagaaatgttgggcctggagtattgatggatattgttttggcagcataacttatgctaggaagaattgatggttaatattaaaccactggaaattctttttctgatcgagtcttacaaatcaaatacttagaatatgagtaaagcttaccctttcaggaataaagataccatatagatgggtgttaagcgggtaactgtgttagctgtatgactggttagtcattattggctctctttgggttcctaacttttattattttgtgtttgaataaattatgtttccatacattcaaatgttatcttaagcttcattgagccatgaagtactcttttg

SEQ ID NO: 185402 - DNA, 380 bp, Glycine max
agcttgaaattaaacaacggaagctctttagtatattaaattgtcataacttttaactcggaggtccgatacaagcgcgtaatatatcgagacgctcgaaattgaacaatggaagctattgagcaattgcaatggtcataactcttcacttggaggactgtttcaggcccataatatatcgagactctcgaaattgaacaacaagaagctctcgagaaaatcaaatggtcataacttttcactcggaggtcagattcaggcgcataatatatcgagatgctcgaaattgaacaaccgaagctctcaagaaattcaaatggtcacaacttttcacacggaggtcagatttaggcgcataatataacaaaaccctcgaaatt

SEQ ID NO: 185403 - DNA, 383 bp, Glycine max
gtggtatcagagcactttatcttcaagtaggttgctccttaaacctccatttatttttagctataccttctcctccattgttgtttcttcattttctccatgtatctcctcacatgtcttgtgttgaatgttgttaacatgattttttagaatttccactgattaaacttgctatacaagctagatttgattttctatggcacaaatttcttgttcttgttcttgaaccatgagttgtgttgagtctacgttccattgagttttgctttgctattttttgtggctgaaactgatgagaatcctgaaactggccaaatacatgctataggcccaagtgaagaaggatgaatgcccagaggcaaagacactatcaagactattaa

SEQ ID NO: 185404 - DNA, 399 bp, Glycine max
ctagtgtggagcttctttgagaagtgaacacagttgttttttcgagaagctagaacctgaggtactcacacccctctattaactaaactaatctccttgagaataatattacggataaagatgtcacatcaaatataagtcaacatcatatatatatcactagttatctgtagatatatatcagggagaaacactcccttacttacgaatgataatatccttatcagaaactgcgttgatcctatttatatgattattttctaatttttacacactaagtatcattgctacatactcttaggtgattattctctctccgaacatcaatgacaatgcattacgtggatacaaagataagaaaatgatatttctgaaataatataaaactaatagacttat

SEQ ID NO: 185405 - DNA, 387 bp, Glycine max
agcttgatatgacggataacaatttcttttttcaagtgcaataattaattaatctgcaagataaaaataactgacaaagggtacttatgctcaactgaccatgaaaacactttgaaagcaactttaattttgcaaccactgtaaccaatacagtttctgaacaattggactctactaataaaaaaagaaaaagaaaaagaaaaactccttttttctgtaaaaatcagatttagcttaatggtttacaattgtatctgcatgttcctgcaccactttccatgccatgatgacatgtgttttctcagttaaagttgctcctatggcacacctaataacgaaagcccctccaacaattgcatgagtcatgtacacaagtcctgaaccatt

SEQ ID NO: 185406 - DNA, 388 bp, Glycine max
agctttatgtaatcgactacatgttttttttattcgattaccaatgacaacgtttgaataaaaatcaaaagatataactcttccaatggttttcaagtatttccaaaggttataactcttctaatgcgtttcttgaccacacatgaagagtctattaaagcaagactttgacttgcattttaacaataatctcttacacaactttttcatatattcttttcaacctctgaatctctttgaacatcttcttaaacttcttcttcttcttcctttgccaaaagctttctggagtttctgtcttccaaactctattctttcacaaaaaacaaaagggtgctatctttttcattcccttctccctttgcccaagagaattctcctaagacta

SEQ ID NO: 185407 - DNA, 179 bp, Glycine max
cacgagcaccaaacacaactccgaaccgaatagcgcgcatgaatgaatgtgcggcgcaacacatgcgtttctagctcagcgaacgcgcacaacccagactttttccagaagcatactcatgcgtgagctgatgcatgtagaagcttgcggatggcacactaagccagcacattggctga

SEQ ID NO: 185408 - DNA, 392 bp, Glycine max
agcttgcctaataaacctgaaattgatataaaatgattattaaacacaaaatgaaaatactatgtatttattaaccatacttaatagaaaatacttataacactacaaaataaccataaattgggagagtttgatacaatttatacaagttttatacacaaaagatagtcatttttaccgactaacacctacccgcaagggcattggataaagaagactccaagtagattaggccaaggatacaagggaaggccctagggttctcatgagccttagggtaaatttcgggcatatgggttaagtatgagcctgctaatctttgtaaatattagaataggtttttccttcttttgggccttgtattctggccattctagtagcataggggttta

SEQ ID NO: 185409 - DNA, 394 bp, Glycine max
tggatttccttttagtagggaatctatcctttctttatggtgccaaacccagtcaccctcattaagaactagctcttttcttcctctattgcctttagttgaatacacctttgtttggttctctatttggttcttaaccctctcatgcatcttctttacaaattctgacctagattccccttctttatgtataaaagaagtgtccagtgggaggggaatgaggtctaacggtgttaggggattaaacccatagacaacctcaaaaggggactgcttggtggttctatgaacccccctgttgtaggcaaattctacatgaggaagatactcatcccaagacttatggttgcctttcagaagagcccttaatagggtggataaagacctattcact

SEQ ID NO: 185410 - DNA, 385 bp, Glycine max
agctataatgtgttctcccttgttatttactaactgcagtaacaggtgcagtccaactatccggtagtgatgacaatagaatcaatgccttcacctcatcctcaaatttaatctgcattgattccaactgggcaagaatagtattaaattcattaatatgatcagttacagagataccttctcccatcttgaggttgaacaatcggcgcatcaagtatactttgttggcttccgacgacttctcatacatatctgataacatcttcattaagcctgcagtagtcttctcatttacaatgttgaacgtgacgttcttggctaatgtcaatctgatcacgccaagagcctgttgatccagcaaagtccattcttcttgcttcatgtc

SEQ ID NO: 185411 - DNA, 302 bp, Glycine max
  unsure (1)..(302): unsure at all n locations
ataaatgagctgaggcaggagtatttttctctttttctaagaggngagaaagcatgctggcagtttttacatgataaaacacgagaaatgctaggaacacacacactctcttgttgaaatgtattgaaaatgacaatattgtggctcccacaccatatctaatgagtttgtgtcctaattgtgcattttgagaaaaaattaacccataacagagcgtattggaaataatgtggatctaacactcctggaaaagacaaattctaacgagatagtcgcatgtgttcatgtaagacaaactacat

SEQ ID NO: 185412 - DNA, 338 bp, Glycine max
  unsure (1)..(338): unsure at all n locations
cagcatgcaagccncnagacggcgggcacttaattctcaccgcccccaacggcggacgagtatggtagaacttcaattcccccaccgacacagggctcccccggaagaaccttacacgcctcaactctattcactcctggcgaaacgaaaccgacccatccccgggactatactctcatacgctagaaaccaccgatctacggcgaggacgagcccgccgtcaacaacaccgatcaccatggggccaccggcaactggaccaacggggcatccctcaacagccccgagaagtccatcccctacgtatacaaacatccactacatcagccctgcacccc

SEQ ID NO: 185413 - DNA, 379 bp, Glycine max
  unsure (1)..(379): unsure at all n locations
tggccttggtttagatgtggtttatacatgatnttttgtcttgtatgatccaatttgggaaaaattggatgagggcaagagtgatttcgaaatctgcccaatttgtgcagcaaaaagctgtcaaattttgtgcagcagaatttgactattgtgcagaaaatgcatatgcattgctggttgtggaaagggtagtacatattgggttctgcatattttgtagcagatcccaacggtcaaaatatagatttatgtactagggacctccagtaaacttttcgagtcgatccaacggttaacgaatcggaacgaagagaatgttactggggtatttgagtatggaaagttgtggtattggaatgtgttttgggcagagttttct

SEQ ID NO: 185414 - DNA, 393 bp, Glycine max
  unsure (1)..(393): unsure at all n locations
tagcttctcaacatccaagcaaaacaactttttantttacacaagctatcacagccgagcaaaacagagcaaaggcagaaaactctgccaaaacaccaaccaaatcacagcttttctcacttatagaccccagtaacaattccttcgatccaattcgttaaccgttggatcgactccaaaattttactggaagtctatagtacataagcctacattgtgaccgttgggatctactagcaaacatccagaactcattctgcactagactttccacagccaaccacacacaagcatttttctgcacaaagccaaaatcctgctgcacctattttgacagcaaaattctgcataagtgcagatttcgaaaatcacacttcctctcatccaatcttg

SEQ ID NO: 185415 - DNA, 393 bp, Glycine max
tgcttgtggggcttctatggaggctggatcttttttctcattgatgacctttaaaggggagtttccaccatggagatgcagctaaagacaaatgagaagaggtgagaggaggcaccatccactacggaataagccatggaagaaagagcttcaccaccaagatgagccttggataagaagcttggagaggatgcttcaatggaggaaaagaaagagggagataaagagagaggggggagcacgaaattgaatgaagaaaaagggagagaagttgaactttgagttgtgtctcacaagactctcattcatcacagttacaacatttgttacacatgcttctatgtatagactaggtagctttctggagaagctttctgagaaaaattcttgaaa

SEQ ID NO: 185416 - DNA, 256 bp, Glycine max
ccacagaggcggacccggagatatgtcgcggcggacaagagaccaaggggacggcaggcggggggctacctcccaaaacgagaccagaccaaacgcggcccaaccccggcgacggccggcagagagaacctgggaccgacctaaacaggcgagctcccggcagccaacccgcaaaagaaccaagaccaccaaacaaggacgcccgcgcggcggccggccacgcacggaccgcgagcgacagacgcgaaaacgcccc

SEQ ID NO: 185417 - DNA, 379 bp, Glycine max
atccaaggaacattcttgatggtgaaactctttctttcatggcttattccctgtgggatggcgcctcctctcacctctactcctttgtcttctgctgcatctccatggtggtaaatcaccattgaaagacctcattgaagctcagagatccaacctccatataagctccacatgcaagcttccattaagaaccttgaaggatatatatatttctttgctaggttcctcgtattacaacatactttcattctcattagatttgcaccactccacctttcacacagtaatgaaaacctttggagtccatggctcccatctagattacattcttcttaagctataaaacatgaaaacattggtgaaagatataacaatacca

SEQ ID NO: 185418 - DNA, 396 bp, Glycine max
agctatgagccaaaatcctgactcactatatttcttgacccagggtgagaatgccaatccttaccctcggaagcaaaaaaaagaaaagaaggaaaattccccaatcaaagagtgggagaaagcaaaaagaaaagaaaggaaaattcccaatcaaagaatgggagaaagtaaaaaaggaagaagaagaaggaaagaaagctcctgatcaaggatcgaaagaaaccagaagaaatgtgcagagaggtctttggaccagacaatatctgaacagtacagaattgtcaccaaatgaacgaaaaaagaaggaaagggaaccacgacctaaaatagtcttcttccttggaataccaaccaaaatcccgtgcgctaacgacttttttttctcgccccgcacta

SEQ ID NO: 185419 - DNA, 425 bp, Glycine max
  unsure (1)..(425): unsure at all n locations
tgaaggagtgtaacccaccattgtgcatagtagattattgtttatgtgtctactatcattgtcatcatttttcgtcattgaggtgccacttgagctgccgggtctctccacctttggacgtattcttttgaaggattcgtgccccctttttgcacatgttttgtagttgcatcctatccaaagccattatactgacactgcctaacgaaggcaaccattatgtccttccaagagtggactcgagaaggttccaggttagtgtaccaggtaacagctaccccagtaagattttcttggaaggaatgtatcagcaattcctcatctttcacgtatgcccccatcttccaataatacatctttagatggttcttgcggcangtagtccccttgtactcgtcaaagtccagcacctccaacttgggagg

SEQ ID NO: 185420 - DNA, 397 bp, Glycine max
agcttgctaacccatggaagctcctaatgtcttccacactttttggggtgggccattcttagatggccttgattttctctgggtccacttagaacccatttctaccaactacaaaccctaagaaagctatattatctacacataagatacacttctctatatttgcatagagggtgtttttcctaaggactaaaagaactttcctgagatgtcctaagtgatcatctaggctcctactgtacactaaaatatcatcaaaataaacaactacaaatctacctatgaaatcccttaagacatgatgcataagcctcataaaggtgcttggtgcattagtgagcccaaaaggcatcactagccattcatacaatccaaacttggtcttgaaagtggtttt

SEQ ID NO: 185421 - DNA, 433 bp, Glycine max
gttgaatcctagaaaatccatgaattgttggcagttctttccccattacatgcctagaaagtccttcggattcaattctgtgtgttcatttctgtatgatatgagatgaaatgcaaaggttggaacttgtgttgactgtttaagatgaaataagcctaaacacttgtgcttgagtgaaacaatgactgtgaggttttggttgatgattcttccttgatttttgtcatgcttactagcttatttcagttgtgactctaatgtgtatgctcctatcttttaaaagctgcatgcttgtcagaagtgattgatttaagcattccatgatattcagttcatgtggttgaattcctctatgaatcagacaccactttcttttgattgaccactgtctttgtcacttgaggacaagtgagctagtctttctttgcttgac

SEQ ID NO: 185422 - DNA, 385 bp, Glycine max
agcttgcttgtggtttttagttttgtaattttcagaattttagctttcagtagaattcccatgaatctcataaaaagggttgttacataatgaattttgatatgaactaattctttgaacaattcccatgaatccgctaattagaatgatcatgtgttattctaagtgattatgacttggtttagtctatagaatgatcatatattctaagatagaagcagtctagcagattttgaggaaatgacataaccttttagattttacgttataaggatatcatcaactatccattatacaagaagctcaagtacaagaggaggaagtcagcgaatatattgtactatgcaattaatttttcatcctaaatcttgtttttggactatac

SEQ ID NO: 185423 - DNA, 382 bp, Glycine max
tataaaatgaaagttcttgtgcaagctttattctttctatagacatatgccaaatggccaaatagccaaatagtttggaaaggtcacagtcacttagtgcagattttatatactcatataatcatgattcattcttaacgaaaagataatttcttctataacatcaggacttttttgtcaaaatctttttggagattccaaaataacttattaataatcttatactttagttgcaacaagagagtctaactcttgagattgataaatactattttgataaaatgaaacgactgtacagttttcagaaataataaatatgtattaattaattattattattatattaataggtagaaagagattacgtatataaatacgagag

SEQ ID NO: 185424 - DNA, 383 bp, Glycine max
agctccctttgggtgaagaattcttattttaaaaaagaaaaaaatttgccaggtcatagtgtatcacggcttttttatcagaagggagccatttttttcaaaactaccaaataagattagattttgaataaaataatcattcagggataagtcataaatgaatcacgaaaaaagttgtaaattatgctattatcatttgatttttaaaaaaaaaattcatagaacttataaatcattacttttaaaataattattatataaaagtcaacgaaactgtattacggattttctcatttactttttcaattatatactccatgactcccaaaatctattttattctctatcgcgcaagactgcatctactatattcacactatagc

SEQ ID NO: 185425 - DNA, 362 bp, Glycine max
gaccaagcgcataaggggaaatgatatacattccacctttctttcaccttattggaggatcgattctcctcacatatctatgtcttatgtacatataatataatccaccaccccaatatttgataatgaaatacattataggcaatcattagtcaatactcgatataccatgtccatttcttctgaggctatatccattctcatcaaacttctgaaccttgatattatagaataacatcatctttgagacaacatcattccttcctgaagctatccccatctaatccagatgaatctctctatattttttaagacaacataatcttgagcaaatacaactgaattttttcttcaaaaaaaaa

SEQ ID NO: 185426 - DNA, 389 bp, Glycine max
  unsure (1)..(389): unsure at all n locations
agcttctccgaaagacatggntatttctattttcctgaaaatatctaaaaatctcaccagatgacgatctttttctttcttggaaggtaccacaagatatggtacttccacaccttcatccacaactttttcactcgtactcttctttgcattcttattattattttcttatttttcatttttttcattttctatttctttttctacttctttttatttttcttggtccttcaattctttattcttaaccattatttgttcctctttttcttgattactttcacctctcacctcatttttcttgccatcagtactttttttgtcagcaattttatttttatgcaccacactatcctcatcctcagcctccacaaaccttttactccttg

SEQ ID NO: 185427 - DNA, 423 bp, Glycine max
tctacttatgtggcagggcgggcttccttcactttcttgtctccaacgcgagctctgaccactgttcttccttcccgcgatgcttctttttatgtccgcctgagtgggcttatagcctaaaccatacttcccacgatttccttgggtttttatcaggctagttatgccgccattgtctttccctaaacccatcccgggttcaaaaccgttccccaacataactcgggccatcattaccgctgcatcggacagacaaggttgcccaaagagggagtcaacggaggaaatgctgaccacctcaaaagactggaaagcagtttctaacgattcttctgcggcttccacataaggcatggaggatgggcagcttaccaagatatcttcctcgcctgacacgatgaccaagtgcccctccactacgaa

SEQ ID NO: 185428 - DNA, 391 bp, Glycine max
  unsure (1)..(391): unsure at all n locations
agcttangctaaattaggctaatctttcttaagctatttaagctaaatctagtccaataagagggatctgaggatgaagcttattttaagttagtctaaacctaagagggctgtctaaattgagcccactccaacaagagggatttgaggatgaagcttggattgattcagtccaactagggatcgaggtttagtaatctaggctatagcatagaacacaaaagcattatcgattagagaaacatccttatatgcatcatttggtctgttagaaagacccaacacttctacctactgctgccaattatacttgcatttttattgtttttatcctagacctagtataattctgttttaaaccatcaattatcaatgtttctttcaacaatgc

SEQ ID NO: 185429 - DNA, 370 bp, Glycine max
tgtcttcctcgtgaccatggttattgagctcttctttcttctacttgagcttttttcggtcttatccttctctaggcgcatttgctgcaccatttccagcattttcaacaatatttcttttgcaaaagattgtcgcttctttgaatcttggtttatatgttaaggatcaacttgtgccgctttttctcatgatggcgaaattagagtggctatgttgatgctgcacaaaatgcgcctataaataccgtgtacttacaatatgactttaatggccatccaatcacaccctagaattactgcgtattactcgatgttaacatcattttggttcacaaatcctaaaaaaacttatcttgaactcactctcata

SEQ ID NO: 185430 - DNA, 342 bp, Glycine max
acactttcatcacgggcaccaacagacaggacgagcatctctgtaacgagccactagcacgggcaacacaactgcgcggaccaacagcaacgtgccacgcgggagagtccacacccacttcaaggaacaatcctactacagccaccaccgcgcgatacgcgcccccgtgccaaccaacaacatcaacctctcaaaacgaaaaagtaaaaaggctcacagggcccactacaaccagatggcagaaaaaatccgagcacaggacaaaataaaaaaaaagaccccacgccaagcgagagcgacaaagaaaaccaatcacccaaaagagcaaccccccaaaaacgc

SEQ ID NO: 185431 - DNA, 376 bp, Glycine max
agcttcttgaggaagcctctttattattcttcttgaagaaactacatgagctgcctcggtaaaaatgcttcccagcctttgttaaccgctggatcttcatgaaatgtggtctgcagcttcacaagacacttgtacacgatctaaccgctgggatctttgagaagatgtctagagtgtgcgcgaagcttccgttcccaagagcatttcttatttaagcatttcagcctttgctttcgtgtagcttaggaaaaatgccatttctgatgcaatcctaccatccaagggcattggatagaagactacaagaatattgggcccaagatgcaagagaaggccccagggttctcatgagcctcatgatatatttcgggcccat

SEQ ID NO: 185432 - DNA, 345 bp, Glycine max
  unsure (1)..(345): unsure at all n locations
tatgcgcatacttctttacgagcgttcacttgctctagacattcttataactaagaaaaatgcacccatatacaatcaaggcacctttgttacctagattatttatatgtacttccaaggtgtatttgttacctacatcacacgcattatctttgctaaatttacatacatgcatactcaaagcactttggctatcaaaaattgcatacgtgcacattctggtatttctaatacctatacatacacaaacttcatgatgaatcttgactatctacacaataaggtgctacatgtcatgcttttttcaagtgtttntactacctaaagccgcattgcaattcagta

SEQ ID NO: 185433 - DNA, 378 bp, Glycine max
  unsure (1)..(378): unsure at all n locations
agctttgaggtcggtgntatattgtttcctcngaatgtttctgctaaacgtttcatatgatgaggcaactcaatctgctttttcaaatggaaagttttcttccggcgtgaatatagtttgtagatactacaaagtattttaaaccttggtgtgagttagactaatatagatacactatagtatttgatgatacactgcaagtgaaatggacatccatttattgctttattaatgcactcacaatgtctttacatgattagctgaagatttgtctatatgatttgtgcttctagactacgccttgtctctgttatattctcaaggatatctttgatactccttcaatcctcttttaacacttgatgatcacttgttttt

SEQ ID NO: 185434 - DNA, 415 bp, Glycine max
  unsure (1)..(415): unsure at all n locations
tcagatgcaagttcataggagaattattatctgttttaaacaacaaacacttgaaaatgaaaacctataaatactagatgcttcgaagaaatgagtaacgaacctacacgctatcattcaaattctttatgtagaaaactctgtgtatattcttataaagtgtgaaaagctctcaatacatcttgaatactctaagacaaaaaactaaatgcttagattcacatttgtttgtaagatgattaagatttaatcagttagcaaatcacacaacatatcttttgatttgtatagaaccaacagtggcttggtaggacaaagaatattcngttggtaaagcttgatgatacactntgttgtgagagctaaaagtaacttttgtgaaattagtgaaacttgattgctaccaaaaactgac

SEQ ID NO: 185435 - DNA, 390 bp, Glycine max
agcttaatacatgtattctatctattattataatatttttataaatatatctataattatagacacaattcaccttaaacctatacctagctataacttaaaataaatctatcatattcaattgttttttgatgattgggtttcttcttgtcaaataacatttgtagagaggaagaggattgtgaagatgccaaactaaaacccaatgatagaagtttgaggacctacttaagcaatggagagatagacgcaaactctaaaattgattcttctgaagtaaggtttcactcattggggctaggagccttggaatcactttggcttgtttatgtatcctggtctacaaaataaaaaataacttttcttttctgtctgaacattctttctttg

SEQ ID NO: 185436 - DNA, 357 bp, Glycine max
aactcagcttcccaacaactacaagcgagaagtccttctcactattctgttatgcacgtagggggatgccacatatatggaggaacacacgagtttgggtaatgtatcccaagaagattcttccaggggtataaactatatatgaactcaaaatttccatggattccaaggctacaaccaaggaggaccaccgggattcaaccaagggaggaatttcacacatggctcaagctggaggaatcatccacggaaccatttcaataagcagcaaggaagtcaaccaacccggaactccaaccaatggatggatctctatgaaaagactggtaagcttgaggagacactgaattaattcat

SEQ ID NO: 185437 - DNA, 390 bp, Glycine max
  unsure (1)..(390): unsure at all n locations
agctntgtcaacctttacgaatgaatgtttttatatccaaggttgaattcgaggcgcaagaaattaaaagcaacatcacttttaataaaacaaaataaaaaagaagaaatttcgacgatgagggcattatccacaatctcacgcagtaaagttctcattgaaaggccaagtgatttttaattatgttatttgcagaaatagagtagtcgttcaaaattgatcataaattaatgtgtcaattgtcatgtaagggacgaatacagcaaatcaattccgtttaaaagcacacccatttttactttcgttagttatagggcaatagtttgcttgaaggtgccaattttatgtctctaaaattgaattaataaatgatgtctaatatgaatgaat

SEQ ID NO: 185438 - DNA, 417 bp, Glycine max
  unsure (1)..(417): unsure at all n locations
taatatcattcgagtcaagtcaggcatgtatagggtaaattctttcaaatcctatnttgtcattcacaagactcaggtttgagactctcctgtcacttaaactaacagacctcggtaaaaaattatttcttttaattttcttcacgaaattgacaaaaaaaaaaacagtaatttacatcttcaggtacaattacgagcaatttaccatcaccggtagataattcataatgaaaacatcaaaagtttattgctttatggttagattagaaccagacatcagtaaccatacttctaataccattacaggaacacaaattacattcagttcataacaaggggcatgaaacctagtcaaatttcgttcaatcacgatgctttcgggtgaaaactagggccaatcacaacgaagaacacaaa

SEQ ID NO: 185439 - DNA, 392 bp, Glycine max
  unsure (1)..(392): unsure at all n locations
agcttctaataagttgtgagcttgnggtctctacatgatgagtttgtctatttatacttagaagatcgagcacgctgaaaacacacgaaaaatcatgattgtatgtgagaggccactaacatgtggcaggtgtgtgtgtaacccttacagatacattgcatgattttgacaggtcaattattcattcctcatacgcgctaagcaggttttatcgttaaaggagggtcaataatttgttgtccctatgtcttactgttactgtaaaatattaatatatgattgtctatgcaatccggcaatgtgcatggttttcttcttgaagtgaaggttgctaacaaccaaaacttttggattggcccataaacgaatattgattgcctgatgatttcttt

SEQ ID NO: 185440 - DNA, 442 bp, Glycine max
cgacctataaaactaagcttgtacaatcagattcagattccgcataaaacaaattttattgtgtcttatttaatttattctattctttgccgcaatgtcaggcattttaatcatggaggatttgaaagtttgcctgtgaggccattaattaactcctacatactttgtggagtctagtattaatatatgaaaaagcaatcatttgaaaaaactcaaattaaaaactatccaaaataaactaaccttagcctatgtagattttatatagttcatttttagttacaagctgagaaacgcactaattctatgttaaactgtctaaaaggtcagttcaaaacttcaaatattcaaaatgagtatcaggcagaagctgcatagtgttccggaccagcctagatttggaacaaaatttcggtaattttttagtacttaatctcttcta

SEQ ID NO: 185441 - DNA, 395 bp, Glycine max
agcttcaagatatttacaatgtaatttcttttctagttaagagaatgatttaagtctttcaacactaaacaaaaaatccaaaaatttcccacatgtaagttatactgcttaaatcttcttttaagtgagccaatttcttatctacaatctataaaaaagggcttcaatacattttcaatcgttggaaatttagcactttttagtttttcgtccttacaatttttaatatacaatatataaaaaagccaacgtagttagttgatgacaaagtgggcgtcggtagcaatcaactgacaagattagccaatattgtgatatctatattagctaacagggcgataaagggcaaaattgttaaagcaattgggaagagcctattatttgaacatgctatg

SEQ ID NO: 185442 - DNA, 428 bp, Glycine max
  unsure (1)..(428): unsure at all n locations
tggattgattcggtctgacgagggatcaaggtttattttttntggttacagtatagaacacaagagcatgattgattagagaaatatatttatatgcatcagcttatttgtgagaaagacccaacatttctacctactgttgtcacttttactttgcattttatagatgtagcataaatgtttagtttaaattctgtttgaaattatcaatcatacatgttctctcaacaatgcttcatttctgaacttaattcaggctaacgttagttccctgtgttcgatactcggatttgttagtcgaaaattttaaaacttaattcacccccctcttaagttattgagaccacttgttcaacaattatcagtatggatatggaattcttagaagcaatcacaatcaatctcaattcctaccccagaaaaaagag

SEQ ID NO: 185443 - DNA, 394 bp, Glycine max
agcttgtggactacacctctgaccgattttattgtgtttctatctcggcccatgtttattgcgggctgtagcaccggttccgcttccctaactgcattggaagcggtcgtcatggcattatcctctatagtgttctggagttttagcatggcctccgtgatagaagccatttgatcttttaaggccgataggtcggccttcatctgttcttgcacgccctcttcgttatccatttttctggatcgagtgttataggggtgcctttgtgctttcttagttatggtgaattccctaaagaaacaaacgacggtgagtacgccaccaaaacatgaatatgcaaattaatgatcggagcacttggatctacctcaaggttttttagataatgtgatga

SEQ ID NO: 185444 - DNA, 338 bp, Glycine max
cgagatgaggaagtgttgaagggtgaagcttcctgcttttattgttgaccacagagtggtacctggagatatgtcgcgggggtcaggagaccttggggacgtcaggtggggtgctattgcccaaaaccaagcttgaccaatcccgacccaacccgggcataatcggtcagtgagaacctgtgatgtacctaagcaggcgagctcctggcagtcaacagataaaaggaaaacaagaccacaaagcaaggaggcttgtggtggctggccacctgtgaatattgtgtaatatgtgagatatggcctctggtaatcgattaccaagggtgggtaatcgatta

SEQ ID NO: 185445 - DNA, 385 bp, Glycine max
agcttgtgcacacgtttgcagtcttatctttattaggcatgccactggttaaaatgtcggctatagcggttctgcaagcgtacaaaagaccgctgcaatttttgtagacaagttatgctataagatgcttgtaatacatatgctacgtcgacacaaatttttgcatggaaaaaaatttctgtaacaaatctcaggctcagcacctatggctgtacgtgtttgtacattcgtattgaaagattctagttatataactgtagctatgtccgattagcttcaagtcctagaaatttaaatgtagtactttaccatgcagtttagatttatttgtataacccacaaattgtcactcgattcagtttttgggttaaatcaagaatttgtt

SEQ ID NO: 185446 - DNA, 385 bp, Glycine max
agcttgaatgatttacatctccttatttctcaagcaaattcttcttgatatcatcaaaatcttcatgatttacattctccccctttttgatgatgacaaccacctgtaggttaggagcaacagcaaagaaaatatctatttgcatatagtttactcccccttgattttacaatgattgcttatatgagacaattgaagatttcatatttttcatatataaaaagttgtctcataaaacaatagataatttttcttactattttatcttttatctttctctccccctttgtcaatatcaaaaacaaatcatgaatagagaggagaaagatgttaccacttgttgcaatgtatgagaatcaagtgataccaaaaggcattaaaacaa

SEQ ID NO: 185447 - DNA, 389 bp, Glycine max
cagctatgagaacataggtgcagttttttgtaatatgggccacatttgcccattcctagctatcatgacatcaaagttccactcttgaagaaagaagttgaatatactgaaaatttgatgaaaggccatagggagcaatgggtcaagtatggttgtactattatgtccgatgcatggactgatcggaaacaaagatgcatcattaatttttttattaactctcaagctggtaccatgtttttgaagtctgttgatggctctgattctgtaaaaacaggtgaaaagctttttgagttgcttgatgccattgtggaggaagttggagaagagaatgttgttcaagttgtaacccgatatgggagcaactatgtcttagcgggtaagttgtt

SEQ ID NO: 185448 - DNA, 432 bp, Glycine max
gacactaagaaactcagcttaacctcattgtctctcacagtctttagatttgtatctcaatccaatccttgtgttcggactctcagccacttatgatagccgccgatgatcccattactgcttcccctaagctctctgtcctttcttcacgccgcatcccatgccttgcgaactccttggagtaccctcgcgttgtggtcactgaaaccccgtgcgatgaaaggcgtgatgctttcgtctgatggcactcctctcatggggtagccaagctgtcttatggcgaggacgggattataattaatacaaccccttgttcccatcaagggaatatttggacatccttcgcatgaagatagaatcctgattcttccttccttctagcgagggaaccaattaacagacacccctccatgctagccaagagttggtccc

SEQ ID NO: 185449 - DNA, 388 bp, Glycine max
  unsure (1)..(388): unsure at all n locations
agctntacagctaagaagtaacttgttctattctgtattgccatatcttttatatgttataatggttgccatttttgtggataaccctctgtgatgacattctacccttatagttttgacccccattccagttttgaatgctatacaagcattgtaatgagctttaaaagtaacttcgatgaatgatgatcggagatatgaacatatgaaagaaagctagttgagatccatatggaaatcaaatatgtgtttaaaggctttataattggcccctttgctttaatatgatatcatattatgctttttcagttttgctaagattttttctccttgcatatgctagttggctgtccagatattgggacaaactttttttctttccatattc

SEQ ID NO: 185450 - DNA, 425 bp, Glycine max
tggtgcaacttagtcttggtgtaacacctcatatttttttctgaaatatagctttaaaattatttaaataataaatattgcagaaaatgtgtcattaaatctagtttctatttctaaattgataaaatatctcaatgtattttttttagaaaagaaggaacatttatacatatatattgtgcttgattaaagcatgtatgtataattaaaatactcttgaataaagggtattgtccaaatgtgttctctataaaaaaatcattccgaaagttatcatttttcttttgtccttatacaacactataataaagtacgaactataaagaaataacttgcacaaaattcaatgatgataaactggaggaaatatgtaaacatacatattgagcctcagtgacccttaaaatttaaacataaatgtactg

SEQ ID NO: 185451 - DNA, 413 bp, Glycine max
taacctcatcgtctctcacagactatagatttgtgttccaatgcaatccttgtgtccggactctcagccacttatgatagccgtcgatgatcccattactgcttcccctaagctctgtgtcctttcttcacgccgcatcccatgccttgcgaactccttggagtaccctcgcgttgtggtcactaaaaccccgtgcgatgaagggcgtgatgctttcgtctgatggcactcctctcatggggtagccaagctgtcttatggcgaggacgagagtataattaatacaaccccttgctccatcaagggaacatttagacatccttcgtatgaagatagaagcctgattcttccttccttcttggagaaaaaggtgtgaaaccaagcacacatatagagccagcgcacaacaaaca

SEQ ID NO: 185452 - DNA, 330 bp, Glycine max
agctatacaaaatatacagctgtttttattcctatttgcacaatacattacataattactagatttctaacaatatacatcaaatacttaactatattttgttatactttctttctggtggcagatgtgtgctaggacttggggcaagtgccctctctaccttaaaatttctttgggaatatgcattattggtccactacatattttaaattgccctcactaatcaataagttatataaacatggaaaaaaaaattctgtttcctgcatacttcaagaccacatgtgttattgtttttgaaccctacacctaagaaacccccaaactgtt

SEQ ID NO: 185453 - DNA, 360 bp, Glycine max
atgttcttttttaaaataagaagttcttatcttattcgttatctaaaaaccttggggtggatccaagtgctccgatcatccatttgcatactcatgttatggtggcatacacaccgttgtttatttctttaagaatttcatcataactaagaaaacaccaaggcacccctataacactcgatccaggaaaatggataatgaagagggcgtgcaggaatagatgaatgccgatctatcagccttaaaagatcaaatggcttccatctcggaggtcatgttaaaacttcataaaaccatagaggataaagccaccgcaaccgcctctaatactattatggaagcggagccggtgctgcagcc

SEQ ID NO: 185454 - DNA, 388 bp, Glycine max
agcttctagaggaagccgtttttgaatcttctagagaaagctacatgcagctgcctcggtaaaaacgatgcccagccttcattaaccgttgaatcttctcgaaatttggtcttaaacttcacaagacacttgtccatgatcttaccgttgggatctttgagaagatgtctcgagtgtgctagaagcctcttaatgaagcttctagaggaagcctcttaatgaagcttctagagaaaactacatggagctgcctcggtaaaaatgctacccagacttctttaaccattggatcttctcgaaatttggtttgcaacttcacaagacacttgtccatgatctgaccgttgggatctgtgagaagatgtctggagtgtgctagaagcttccg

SEQ ID NO: 185455 - DNA, 388 bp, Glycine max
  unsure (1)..(388): unsure at all n locations
agctntntattctaatttagaaatccatgaatgtaccctaatgtatgaagtttatggagctttttattctaatttcgtgtctattctctctttcgtgtttcactcaatttggagtgtttcttagtccaatagctcttaaggtggttggccccttgcttcttgactcaaattcttcaagggatggcaccaatcctcctttcccccctatatggcaactcataaacaaggaaacaaagagacaaacaataaccaaagaccaaaaaaatgaaatgaaagctaaaccaatagagttttaacaagacaaattttcaaggattattcaacaattaaagcaatgaaaagcacataaaagcaagctaggactcaaagagaaacttagaatggatat

SEQ ID NO: 185456 - DNA, 415 bp, Glycine max
tgtggaataaagcctggacaagtatttatctttgttttctgttttgcagtccattctcctgcagagaatgggattttcaaagttttaacatagtgttattgcaagcataattatgccagcttttattgcctttcttgatgaaaatattgactttaaaaactatcctgcttcaggtggaagtgagtgatgctgctcttcttataatgtgtggttttatcaatgactattaatctctatttgaggataaataatttatatataatgatagtataatttctctagcagcaatctctttctcaatttattgctttccttgatatatcactatatagctcttattctttttttttatgtaatatatctcttcaaatggaagcttaagcagattacacccaagatggcatttgtgatttct

SEQ ID NO: 185457 - DNA, 402 bp, Glycine max
cagcatgcaagctagcaaaaagatactatgggcccttccgtttcattgaaaggatcgggccgacagccgacaaacttcaattgcctaaagaagctcgaatccacccagcatttcattggtctctactcaaacccttccatccaccacaccctggtgacaaatcttccactgcaactctaccagggctcacaggtgaagatcaccttatcattcaacctctagctatcctgaacacgtgcaaaccatatgactccacactggaagttctaattcaaaggcaagggatatcattggaagatacttcatgggaagactggaagtaacttcaagctaactatcaccttgaggagaaagtgcttttggatggcaaaaggaatgatagcactacagcgaaccaaaaac

SEQ ID NO: 185458 - DNA, 422 bp, Glycine max
tggagtgtgaatggtatctctacacttccaaaagtattatctataagttagttataactactagtattgttaggactattatcactttgttagcaattgttagcaaaactgttaaagcatattgtgattctgttatgctcagtattcatgaaataaagtgtttaaaagcaatgatagaggaataaaatggggagacaaatttactcaacttcagtagctcgcaggagacacttggacctcaaatccaagaaactctatcctctgctcataattattggtctgacctaccgctcttcaatggtggacgccgaacttttcaccgcttgcatggaccgcctctaggccgccatggccaaactcgtcgcagaccaagctttcatggattccaaacttgatgtcattctcctgaaattgaataccat

SEQ ID NO: 185459 - DNA, 394 bp, Glycine max
agcttgttgaattgggatttgaaagatatgcttttatacaagctcttcaattattcaatggaaatgaagaacaggcagctgggtttctttttgggggctagaaacatttgttttggaaattgattggatttattacttgaaactatttttacttttaggcaattccattacaaattctgaattacagacgtgatggcatttattgtgagttgttcatactgtaaggaatgtttttatttaattgaaaaactaacttattggtactcaatgtctatcatgtaacctttaatagaggttgaagaaatctagtttagtagactttaggatatgcattaccgcaacagatgtggctccattgggaacgtgattccaagatggggtcaaattatataat

SEQ ID NO: 185460 - DNA, 379 bp, Glycine max
actatgacaagactgtgggagaagagatttataaagatgaagcctattggagggagaaataccattagattgggcattttttgtccagcaagtatgatgtcccattctgaggaaacgacatatgataagtcgtcacatacacggacgatggaatatactttattcatattctacgctcactaaaactgagagttgaaaaaaacattatctatctcttatgagatgcacatttgaatatatcacgggtatatatttatttataaagatcatactcaagtcctatgacagtgtatgcataatatgatgtcccttcaaaatatttgatacaagcacatgaccctaacacaaacattaaattcaattgaagacatgtcacacg

SEQ ID NO: 185461 - DNA, 384 bp, Glycine max
agcttccaattgaacatacttccaattttcaagtccttgtgggaaatggaaactcattagttactgaaggtttggtgaagcaactagaagtcatggttcaaagtcattctctcatattacctgtgtacctcctaccaatagctggtgttgatttggtacttggagccacatggcttgctcattgggtcctcatgtttctgattatagccagcttaccttgaagttctacaaggacaatcagtttgtcacattatatggtgatcatcctaaattaccgggccctgcttaatttaaccaattaaggagaatgaatcatacacatgctatagctgaagtttttaccttgtagtataagcaacaagatgtgccttacctgaagatatg

SEQ ID NO: 185462 - DNA, 412 bp, Glycine max
  unsure (1)..(412): unsure at all n locations
tggattaattcagtctgacgagggatcgatggtttatttatttangctacaacatagaacacaagaacacgaatgattagagaaatatatttctatgcatcagcttgtttgttagaaagacccaacatttctatgtattggtgtcattttatttaccttgcattttatagtttttagcataaaagtttagtttaaattctatttgaaattatcactcatacatgttttctcaacaatgctttgattctgaacttaattcaggctagcattagttccctgtgtttgatactcggattcatccattttaattntaaatacttgacgatccagtgcgcttttcggtanactcccattgnaattctttgagacatanatgaacaaaaagtaactggcatggggagtcaacattgac

SEQ ID NO: 185463 - DNA, 389 bp, Glycine max
agcttgctagagctttcttcacaatattattgttggcacaaaacaagctgctagctaagcaactagaatcattgacggaaacacttagtaagctgtcaacctaattacaagcgactcaaccttcacattcagcagttctgcaagttggaggttgcagtatatatggaggagcacatgaatctggttgctatataccccttgatgatgctacaaagaaggtgaattatatgggaaatcagcaccgaccaggatttaatgcaagtggatttttaggttatcagcaaggttcccattctaatcagaatcaagggcaatgaatgtctcatcttggaaaccaattcaacaaagaccaaggtggaccatccaacaggcctcaaaatcaagggctt

SEQ ID NO: 185464 - DNA, 406 bp, Glycine max
  unsure (1)..(406): unsure at all n locations
ccgnnagcgagaaaancgcgaaaccgaaancatttttcctcttaaggnatagaggccactngagcaacaatttgtatcaggcgactcacagattatggtttgcaaacttatggtctgaaacacgcttcccgtcaatggaattacaagttccatcaagtcattaccttatatggttttgaggcaaatgcaattgatgattgtgtatatcacgagttcagcgggagtaaatacttattcttggtatcatatatcgataatggactactagctagcggtgatataggctcattacaaaagactaataaattcatgacgaaaactttctaaatgaaacatcttgggacagcctcttttgtgttacgtatcaatatactaaaacatcgctctcaatgatcctaaagtctca

SEQ ID NO: 185465 - DNA, 394 bp, Glycine max
agcttgagctactatttctttattgctttatacagctgcatcaaacaaatacagaaacatcctaatattttttttccccaaaattcaacagagattcatcctagtaagtgaagaaccgtatcaacattcacccagaaaaacccagaacatcaaagaacattcatccttttctagattttattaaaattgttgacattaatattttcacacaaaaatatttggacatactccttatgatcttaagaacaaaaaaaaataattatctctccaaaaatcgtcagagaaaaataatgatcgatccagagcacgaacaattgctagaggtaaacgttcacactttctaaccatttcaagacctacgtcttcatattcttttggacatcatccaccaaaa

SEQ ID NO: 185466 - DNA, 403 bp, Glycine max
tctcagctgttctatggggactaaaaggttacatactgttttacagttcccaaatcttgtgctactgtgttatcgcaactccatgttgactaatgatgcattgaggtcactaaaaaatatgccaaggttgttgttcctcattctaagagacaatgcttatgaaggtgaaactttgcattctcaatgtggagggttgcagaaactaaagcaactgaacctatgaagtatggatcaattgaagtgcatccttatcgacagaggagcactgtgttctgtggaagaaattgttttagaaagcctctcccaactcaaaacagttccctgtggaattcaacacctggagaaacataaagatctctatatcaactgcatgccaactgaatttgaacagcgcattgcttct

SEQ ID NO: 185467 - DNA, 311 bp, Glycine max
tattttaagccattatttctggttcccatgtaaaaccggggataataatttggttaatagattttcattatactgcccccaccagcttaaataaaaacaataccccttgtcgattttgttcatcagaataaaaaatccatttgcatcattaaacccctcaatactgtggaaaacatgtttatgaatgccataattatgggtcttttaaatactcttttaatgcaatccatgagaataattagaatattattatcctttctaatctccaactgcatatacatgccagcctaaagagtttgtcaatgcaaaaa

SEQ ID NO: 185468 - DNA, 398 bp, Glycine max
  unsure (1)..(398): unsure at all n locations
ntcctgctcggagatcttttatggcttattctctttctcgccatacaaggacaccaggttgaaagactcatggttaaaccttcgcattgcatcttcttgatgctcgaagcatggtagcatcttctttgattatggccatctcttggacttcatccgatgtctcgagttctacccttatggtttcttcattttgttgtttctggaacaatattctccttgtcgacggttccccaactttgatgaggatcatggcgtctgtgccatatgtaagttggaaaggagtttcattggtggttgtctatggtgaacaatgataggcccagagtatactgtggaggttctccttccatagacccctagacatatcgagtctagtgtgcattggcctaaagatgact

SEQ ID NO: 185469 - DNA, 382 bp, Glycine max
agcttagcgcgtgtttctggtggatcgttgtcttaacgcacgtgttgcaagcttagcgcgtgcttctgttggatcgcgggcttagcgcctgtgctttctggcccgcttagcgcgtattggactgggcctgcttcagattttctttttttcttcaatttttctggcctttttgcttgttacacctccagtttttatatctgcagccaaaattcaacaaaacatcaattctttaatatttaagcacaaataactgctaaataattatttttaaagacaatattgccttattttctattatcaaaatacaattatttaacagttatcaaaatcccccaaattaaaactttgtttgtcctcaagcacatcaaattaaaaagcacgc

SEQ ID NO: 185470 - DNA, 390 bp, Glycine max
  unsure (1)..(390): unsure at all n locations
ngattgccaacaagacagcgtgacaattgttattgtgtcacagagattccatgttattgagattgatcaaacatctaaggttctgaagattgcaaggttggatttatggaatgacccttgtactgatgagtatagcgatgtcaagttggattctgatttcttcaactacacttccaatgatgatgagtatactttgttatatgattgtggtcgtcctgttttaaacacgtctagagtgaacattgaaggaacaataccattcacttgtcccataagtggtgagtttacaaatgcattttgtctgttaagtaaagatgtgggtaatttgaaaggtctggggtgcaagaatagaatcaatgattctcgtctaagagaggctatgaaagatgc

SEQ ID NO: 185471 - DNA, 430 bp, Glycine max
  unsure (1)..(430): unsure at all n locations
agcttgctcaatggtgatgggtgggttaagttcatgtgtgcttggagggagcagtttgtgtcctatatggatgttagttcaaggtggtgaattattgggctgtgacctaaatccatatggaaggttattctgttattttttttgttttgtcctctccctatataaggcaaggatgccctgtattttacagataggataagcttccacttgtatactgcaaccataataaaagctntttgtttctcccttccgtggatgtagccttactcaaggtgaaccatgtaaatctggttggtgttctttttctctcttttgnctctttttcaattctgctgcaaaactctgtgtgtatgatatatttgttctgctgcatctactgctgctgttcttgcttgttcttcatcacttccataacatatatatatatata

SEQ ID NO: 185472 - DNA, 433 bp, Glycine max
agcttagcattgaaacttaaggctaacataactttgctggatttaatgtccctatgaagaacacactgctcccattcttcatgaaggtacaacactgccaaagccaagtccatagcaatgttgtacctcatctgccatgtcaagatgctttttccacgatataggggggaatctaagctaccattttgcatgaactcatatataaggaggagatctttcttcatgtggcaccaaccaattaattgtactaaattcctatgcctcaagtggctgatgatcttaacttcagctgcatattcctttataccttgcctagattctcttgatatcctctttatagcaacaatggagtttagctttttcaaataacctttataaacaccaccaaaaccaccttgtccaatcttttgcgcctctgcaaagattatttgtg

SEQ ID NO: 185473 - DNA, 399 bp, Glycine max
gttgaaagtttttgaatttcaacaccagaccaataaaaaacataaaaatcacttcaattactcaactcactaactcaatatcaaattgatcagtagttttctttcatcttccgaccctctcttatctaatgtcgacacagcgtatctggagtttttattttttatttatatttttttgacggggcgtatctggtgtctttgtttaaattataaaatgtgttcatcttttgtatttggttttatttattcataaaagacgatgtcctattatatagatcttcatgaaacttcctataagtctgcgaagaaattgattaacatcacaaataaacttgcggtgattagatgcattttagtaaaacttaaaaaatgaagtgtatcaatgtaaagtatactgat

SEQ ID NO: 185474 - DNA, 426 bp, Glycine max
agcttagtagcaaccttaataaagcaagcagtgttattttcttttatattgattaggtaaccagtgactcaacgagtaaaggtctctttcgcgaacttaatggagggtgaactaactccctggccaataccaccaataaaaacacgaaaggcaatatgaacaaacttttaaaaataattctaaaagtaaaagtaactttttaataaataaaagttttatattaattccagagagagagagagagaaactaaaagaaaaaacggagttaaacattacaagttaaaaaaagttcctaatccagaagcagagtggaatactgaaatgtattaagaccaaacaaattagcaacttgcctctgcaacatacaggaggttcaacatgacataataaatcgaacaaccttcttgagggccccaccgagttaaa

SEQ ID NO: 185475 - DNA, 459 bp, Glycine max
gcacagaaactctagtgagtgtgttggagagaatcactatacgacatagaatttgatggcctatgttgctggagaaaattccaattttctcaaactcaagaagaagaaagctgagggaaaaggaaaacaatcatgtttcagtccaaaacaagagaggacgcaaatgagagttgagattcgctcgagtgttgttcaccaaaaagaaattactgtaatctattgcatagaatgaaattcagaaattactaaatcaaatggaagttgtaaggtgacatgtaccaaatcaataaaataaaacggctgataggtgaaacccaattctggttggagaacagtaacaagtactttatatactgcgtataatttaaatctgattgaacgtttattaaggttgggacagaattatttcacaggcagacatatggatatcttattaatgaccacgaaaggaaatggtca

SEQ ID NO: 185476 - DNA, 429 bp, Glycine max
  unsure (1)..(429): unsure at all n locations
agcttgattcagatntaattgccacttatgtattatgtacgtattntatattcatattatcctacttttgcgttaattgtcatataaattttgttattttattgaaaggcatgatcagggaagatccaccaataaaagtttctttgattcaagagaggattaacagtgaattttcctacaaggtgtcatacaaaaaaacttggttggcgaaacaaaaagccattgcaatagaatatggcgattgggaagagtcatatgcaaaactttcatcgtggttaacacacatgcaaaatcattctcttggatcatattttcaaatactacatgacgattntattattgggaatacggttagtcgtgaacaccgccaatttcatagagtgttttggacttttggtcaatgtaaagaggctttcaagtattgtaagc

SEQ ID NO: 185477 - DNA, 461 bp, Glycine max
ctaagcttataggcttagcacgcaactggtgcttggcgcaacaaattatatgcaaacattgaagaacgctagggcttaacgcgtaagtgcgtgttaagcctattgtgcactaaaagtacaagaaattttgactttttttttgcgccctaagcccgaagttgtgtgctaagtccaaataattaaattgcaactccaaagatattattgggcttagttcgtcatatggggcttagcgagttttgtaggaggaaatttcctactaaatccgcttagcgagcatcacaagcttaacaagaatgcatggctcgcttatcctgcgcttgcgcgcatagcctaatttgagatattacaaaacaaaagtggttttgggcttatcgcgacatgcaagcttagccagttgcccatacgtgcttagtctacacatgtgcacttagcctgcacttgtgcgcttactccaaata

SEQ ID NO: 185478 - DNA, 424 bp, Glycine max
  unsure (1)..(424): unsure at all n locations
agcttagaacaataaacttggccttgtcttatttttctttgttcttggngaccacgaacaacaaagtactttcggcacctactatatgttgacttgaccaacgttgttattggaatgctgcgacaatctttcaacaccttatttagacattctgataggttggttgtcatgtgaccatatcttcgtccagatgtatcgtaagtcatgctccatttttcctttgaaaatcgatcaatccatcttgctatggctggactcaattgacgaaatttttctaagttttgatcaaacacatgcttgaagggagtgtacactgcatcacatttgttaccatcaaaagttgtacgtagatatgaaactcatataaacttaatttataaaataaaccttacccaatttcttgaaaatatctttttggttcgcg

SEQ ID NO: 185479 - DNA, 348 bp, Glycine max
  unsure (1)..(348): unsure at all n locations
gcttggtctctgcagatcttcacacaacaaaatctctcanatctttctagaacttggacctttctctctctagaaactctagacatgcaaagctctgaatcccagtccaaactcttcctctaaaatctaatttcaggcttaaatagatggccttgttcgtgctcatgcgcttagcgcaattatggaccgcttaacgcacattagttgaatttggcttagcaagtgcctttctcacttatcggatgaactgaagcggtgcgcttagtgagatgaagtggtgcgcttaacgaacctgtacaactcatcttctttcagagtcttcctcgcgtttagcccatgaatgttgcg

SEQ ID NO: 185480 - DNA, 429 bp, Glycine max
  unsure (1)..(429): unsure at all n locations
agcttctacttatgtgacagggcgggtcttttttactttcttgcctcaactgcgagctttgaccaccgctcttttttcccgcgatgcttctctttatatccgcctgagtaggcttatagcctaaaccatacttcccacgatttcctttggcatttatcaagctagttatgccgccgttgtttttgcctaaacccattccgggttcataaccgttccccaacataactcgggccatcattactgctgcatcggacaggcaaggctgcccaaaaaaggaatccacggaggaaatgcttaccacctcgaaagactggaaagcggtttctaatgactcctctgcggcctccacataatgcatagaggatgggcagctcaccaagatgtctntctcgcctgacacgatgaccaaatgccccttcactacgaatt

SEQ ID NO: 185481 - DNA, 418 bp, Glycine max
  unsure (1)..(418): unsure at all n locations
ggactcctttaagggcgaattttcatttcttgcactgaatagnngggagttggaagccatcttctcaatcaaattcctaacctcagcaggagtcatatcaccaagagctctaccactagcagcatcaatcatactcctctccatgttgctaagtccctcatagaaatattgaagaaggagttggtcagaaatctggtggtgagggcagcttgcacacaatttcttgaatctttcccagtactcatacaggctctctccactaagttgcttgatgcctgaaatgtcttttctgatggcagtggtccaagatgcagggaagaatttctccaagaacaccctcttaaggtcatcccagttgaaaatggacctgagagcaaggtagtatagccaatattttgccactccctccagataatgg

SEQ ID NO: 185482 - DNA, 433 bp, Glycine max
  unsure (1)..(433): unsure at all n locations
agcttctaaactttatacaagaatgaagctcttattccactngttggacaagtggcctcaaatatcttaagaaggggggggttgaattaagatattacaacttattttcccaattaaaaaattctatttaactttctattcaagttataaattcccttaataatgaatttcttaaatattgattcaaatagaacaatttgaatatgaatataaaataataataaataaagaagtttaagagaagagaaaatgcaaactcagatttatactggttcggccacacccttgtgcctacgtccaatccccaagcaacccgcttgagagttccactatcttgtaaattctttntacaagttctaaacacacaaggacaacccttcctttgtgtttagaattctttcacaacaagagaccctcggtctcttaacccctt

SEQ ID NO: 185483 - DNA, 441 bp, Glycine max
  unsure (1)..(441): unsure at all n locations
nggaattaatacgatccatcacataggcaaagtcttgacttgtaactctaccagacaacatagtgaatccaatatatttccctatatttgtggtgtggacaaatacagtaataaaggagaacttggtaatcttcctattagaaatattctttgacccccatgaaaaaagacttttgaagattgattttcaaacctgaggctagacagaattgttaaatagtatccttcaccaatcttacttgaacacaaatagctttcacaaaaaagagacaatcatcaataaagaaaagatgacagataattggaccatgtttggaaatttgaattggttgccaagcatcatcactttgaatcttttcctanatcaataaagcaagttttccatgcaaataagaggtaaggtgataaaagatctccctgtcgtggacctctttgctgagt

SEQ ID NO: 185484 - DNA, 438 bp, Glycine max
  unsure (1)..(438): unsure at all n locations
cggatcttaagcaccgcggctgcaactgaatgagaagagagaagttgtttctttctgctttnattccangaccacagagtggtacctggagatatgtcgcgggggtcaagagaccttggggacgtcaggtggggtgctattgcccaaaaccaagcttgaccaatcccgacccaacccgggcatattcagtcagtgagaacctgtgatgtacctaagcatgcgagctcctgacagtctacagataaaaggaactaaaaccacaaagcaaggaggcttgtgtggtggctggccagctgtgaactctgattgatatatgggatatggcctctggtaatcgattaccaagggtgggtaatcgattacaaggcttaaaaatgaaaacatgaggctaagatggcctttggtaatcgattccaaggggtgtaatcgataccagac

SEQ ID NO: 185485 - DNA, 448 bp, Glycine max
  unsure (1)..(448): unsure at all n locations
tcgcactcgataatgcagaacacatgatcagcgctaggctatgacattcatggtgctccaagcaaaggtggagtatggaggattgccttgagagtccacacttatgcaatcatgaaactcagctccaaactcgaaagtgaaggacacatgaacaaccctaagcaagaacattcaaggggctccggaaaaagaccgagaatggaggattgccttgagggtcctctcttatgcaatcatggaacacaactccaaactcaaaagtggaggacacatgaacagccctaagcaataacattcatgtggctccggaaaaggatgagaatggacgattgccttgagggtcctctcttangcaatcatggaacacagctccaaactcgaaagtggaggacacatgaacagccctaagcaataacattcatgtggctccgaaaaaggatgagaatgg

SEQ ID NO: 185486 - DNA, 427 bp, Glycine max
  unsure (1)..(427): unsure at all n locations
agcttatcanaatatattgtttctattcttcttatataacaatgaaagctaagcatgcactaattggaggcccacttgttagtgttttcttaagaaaaaattacttttttaactaattaataaaattatattagaaatatccataaaatttttgttgtttttcttatcaaaattaaaaaaattatactcaacaatggccattgataatgagagttgttgaatcctcacaagccttcttggcagcctcagcctccctgaaagtcaccttttatatatatatttaccacaaagattacaacattaattgattaacatttctgattactatagctagctagctttcaatatatgaatcatgaattaattaatttaattacttacaaagccatagcctttggatttgcagtgcaccattcagtgtagctag

SEQ ID NO: 185487 - DNA, 452 bp, Glycine max
  unsure (1)..(452): unsure at all n locations
nttggtttggttttgtggcgaaaaagtaaaataccatctttcatgacttaccaagccaaaaacgaagcccttgtttcttacatgcgaaaacgaagcccttatttggaaaaatgaaaataaaaaatggagagaaagaagagagaaatgggagagaacagtaagatggtggaataccaaatgggggagagaaaacagtggagtaccaaatgacagagagagaaaagaagaaatgcaatgcaataaatttgaaaacgtaataaaaaggatgcaactgaaatagggagaggaggaaaatgaaaggccttgcattggtattggtactgcctcggtaacgccaaagcatcggtaataataataatataataataataattaataataataaagtatgatgtgatgtttttaagcgagaaattgaatagctggctgtgcgacacgttagccctggcaat

SEQ ID NO: 185488 - DNA, 411 bp, Glycine max
agcttgtacatgaataactctgcagctgttctgaggtggaagagtgatttatcatctttcaatttggaagaatcaacttctttccctttgacaaagtcaatgtttccaagatggaggattgcagctaccacacggaagatcgcatcctgtgaaggaaaattttatttgatcaaatgtttggataaaatcaaaccactgcttcattagaacgtgatgcacttatgcacttgtccaatacctgctcttcttggctaatgcctacaatatccattgcattttttatctccaagtattcttttgcatcatccacattcgacacttgataacagtttgattgattaagatagtggaattgccttggatcccctaacttgtacttcttgacatcctatcaagaaacttttaactatt

SEQ ID NO: 185489 - DNA, 454 bp, Glycine max
tctaatgtgtactcatgtattgtcaataagtacaatatgttagaagcaatatgaagaataaaacatggagcatggaaactgcattgttgcctaaacaagtagcaaaaatataacacctcatctttgagaagtgcttactgttttctcttcctcagtgacgagaaacttcccctctgcaaaatcacaggctgcaattggtattgctagctgcttctgcaatttctttacaacaaacacttctgactcttcacatatggttaccactgtaccattcctacctagccgaccagttcggccagctcggtgtgcatagtgaattgaatctgtcggtaagtctagattaaccacaagatcacattctgccacatccaaaccccttgctgataattcatttgtaaccagaactctcacctcaccattcttgaatttcttcagagttgttgacctagctagc

SEQ ID NO: 185490 - DNA, 416 bp, Glycine max
  unsure (1)..(416): unsure at all n locations
agctntacgaatattgtaactatgcttgttttctttccgtaagggtacgaaaccttacggatcatgtaatcatcccttttttttccttccggaacgttacggaactttacggattgcgcactaacacttccttttaatttccggcatgtcacggaacttcacggattgtgctacaacgcttttcttttggctttcggcatgtgtcgaaacttcacaaattgcctaacgatgggtgccaaatacctcgaagtggtcaaacaagggtcgcatcccaacaacggatggtccccggacgaaattagggtatgacaacgtctacacatcagagcaaaaccatatcatgatttcgcttgtataggataccctcgcttaaaaagaaaccaggtgccaacctctgtaacatcctcttgtcattg

SEQ ID NO: 185491 - DNA, 440 bp, Glycine max
tgtgcatccaataccctgatgaggatgtcccatatgttcttaatactggactgattcatttgcttccaaagtttcatggccttgcaggtgaagacccgcacaaacatttgaaagaatttcacattgtctgctccaccatgaaacccccagatgtccaagaggatcacatatttctgaaggcttttcctcattcattagagggagtggcaaaggactggctgtattaccttgctccaaggtccatcacgagctgggatgaccttaagagagtattcttagaaaaaattttccctgcttccaggaccacaaccatcaggaagcatatctcaggtattagacaactcagtggagagagcctgtatgagtactgggagagatttaagaaactatgtgcgagttgcccccaccatcagatttcagaacagcttcttctccaatat

SEQ ID NO: 185492 - DNA, 425 bp, Glycine max
agcttatcattctcctgaagaatctgcacttaatgatctaaaagataaagttttatcttttagtttttatcttcaatctctaatccctgaacgaaactattcaagtttgtaattcaatctttaattatcttttaattcgttcctaaagatagagctcctaatctgttgctgactgcacattaatctgttaaagatataacagatttatgtgtccagtattttcgggcaggatgtcctggacattgtatccgacatcgtggatcctgcagcttcaattcttcatttgacattttatcttgccttgtgcattgtgcagcccaatctgattccttgacataatgttagacatcatgtgcagcaactccagctttccttcattgtctaagtgcttatgttttaacaaaattttagccaatcttttaaaa

SEQ ID NO: 185493 - DNA, 469 bp, Glycine max
  unsure (1)..(469): unsure at all n locations
gaccttagaaactcaagctgaggattatggggtacccatcacatgtggtactaggtggcggtcgagcgatggtgcacaacatgttntccacatccacaaagcgcgcataaacccaccatcccctgttgcccacctccaactgagctcacgtactcccacgtagcccatatcctcttttctctcaacaccgggtccccatcaatcctcccaagctttcccaacatcaaagcaaaacaacattcaaacagcacaagctatcacagccaagcaaaacagagcaaaggcagaaaactctgccaaaacaccaaccaaaaccacagcttttctcacttaaagaccccagtaacaattccttcgatccaattcgttaaccgttggatcgactccaaaattttactggaagtctatagtacataagcctacattttgaccgttgggatctactagcaaacatccagaactcattctg

SEQ ID NO: 185494 - DNA, 440 bp, Glycine max
  unsure (1)..(440): unsure at all n locations
acctgcggcatgcaagctttgcacgagatgcttgatctccctctttcttactttctccgatctctgncaccgacaacccttcaacctcctctagtggaatatctctttttcaaaactatcataatctgatgagatgaatttgtgatttggggttgtgatttgtggttctttacttgttttaggttatgttcttgttctgggttatgaattatgttcttcatttggattcttagatgttgttcttgcgtttacaaaataaacatgtttaaagaaaaaaaagtattttgtgatgacttttaactgctaatggagctagatttgtcttgacggaagaattgttttgaaccttttagttaagataaataaccaaagtgaacttgttttaaaaaaaataaacttaacttgaaaaaaaagataaaaaaatcaaattagttatttat

SEQ ID NO: 185495 - DNA, 425 bp, Glycine max
agcttgaacgtttaattgctgattataacactctcttgccctttacgagtgacacaaagacatttaataagaagcacatccagttctttatggtccttgtccttgctggtcggagattcctttgctcttgtctcgcattcttctaattgtggtgggcgaggcaaaggtcgtggtggtcaatgatgttccattcattgcaactattgcaacatttatggtcatattaaagtcgattgttgcaacaagacttgcgatcaagcgaagtcaatgaatgtggctcaagttgccttccctgcccaggctgcagttgcctctcctgccttggttgcagatgttactatttcttctgctgggtacattcagcttcgagcagcccaacatcctgcattacctgttactgctatggcttagtctagtaatcatgt

SEQ ID NO: 185496 - DNA, 462 bp, Glycine max
atgtcaatgatacacagatgaagtattgcaaatttctacgcatgtatatggtgttgaatcaatttagatttttgaacatggttcatgacatcttggtcaaggtgaaactggaagtaacaaggacatcaacagttctaaatgtgtttggcagtaaacaaagtagtgatgtaactcgattcatcttttgccccaacttttgcaagatggttacttccatacttcaactcgacttgatgaacttttttcgaaaaagcatgagcttggttcaaccccatatcccagggaatgacaattttgatcgccaatacttcaacaacatttcatatggatgaaagactcgggaatactcatactacgcatactagcaacaatatgttttcaaagagaaaaactctatatgagggttcactgtaatcaagcaagtcggagacctatcatgatcacagattcacttccactcct

SEQ ID NO: 185497 - DNA, 424 bp, Glycine max
  unsure (1)..(424): unsure at all n locations
agcttgaagagaagaaagtactactctatcttgttttttttactcattgancaaatcccacttgaaaaaaattgaatttttatgatgaacaatcttctgtggtgttgtgcaggagagcaaatttttgaagatcttgggatttatgtggaatcctctgtcatgggttatggaggctgctgctataatggctattgcgcttgcaaatggaggggtgagtacacttagttctcgaaagtttatattgacaatgaaggtgagtttgtatgttgattatgtggacttgtttcttataaatttgtgcaggggaaggctcctgattggcaagactctgcgggtatcattaccttgcttctcatcaattcaactatcagcttcattgaggagaacaatgctggtaatgccgcagcagctctcatggctcggc

SEQ ID NO: 185498 - DNA, 469 bp, Glycine max
  unsure (1)..(469): unsure at all n locations
gctcgtccagctgtcccanacatggtgtacacaatccttttattgcaccagagaggtatgaccagattatcctttgtatctattcattntctttatagaaatagaagcatataataatcttttttctttgttggattaatgtttgtcataaacgtcaaagaacgaaaaaaaaaatgataggaacctcatcctcaacataaacatttatgccttatgttgtccattataggagactgttgcccaaatgggattttgctgcggatgtaagcataggtggattatctagattaaccctagaggtttcagccttatttttgtaaataatacagcagttttctggatagcaaatgacacgacagtttagtttttcatttttcttttgaaacagaacattaggtgattttcagatgattagtttgctaggtgtgaatggaacggaagtgcttatccttttcgggtgtgtttcaat

SEQ ID NO: 185499 - DNA, 390 bp, Glycine max
  unsure (1)..(390): unsure at all n locations
ttacctgnggtgaagaacaagagcaagcctttgctttgctcaaagaaaagcttactaaagcacctgttctatctcttcctgacttttctaaaactttagagctagaatgtgatgcctctggagtgggagttggagctgtattgttacaaggtgggcaccctattgctcattttagtgaaaaactttatagtgccaccctctactaccccacctctgataaagagtgttatgccttaataagagccctccaaactctggaacattaccttgttttcaaggaatttttcattcatagtgatcatcaatcacttaagtacattagagggcaaagaacattaaacaagaggcatgtcaaatgggtaaagtacctatagcaacttccatatgtta

SEQ ID NO: 185500 - DNA, 436 bp, Glycine max
  unsure (1)..(436): unsure at all n locations
agcttgggggctcgaggatagataaatgtctttcaatacattcacaagncattnaccaaaaattaaaacaacaacaacatatacacaagtcttgtactctgtttctagcactcatcgcatactaataaagctaagggcagtagttaattactaacaacaacaaagaaaagaaatcaaagatgaaatttgggagttaaaaagcgaaaaatgattgatgtcattggtgaaaaggaagagaaaagttgaagcttcttagatgaatttattatatagcttaatgaatttattatatagcttaatgtaatataactggcaaagtaagcaaaaaaagtaagcaaaccttatactggacctcagtcttaccaattaaccacaagtgtacttactacttacttggtagcctcgatatatccgtatcctcatgtgaaataatgtc

SEQ ID NO: 185501 - DNA, 473 bp, Glycine max
  unsure (1)..(473): unsure at all n locations
taagctctagctgtgttatgacaagctgaagtcaaagcactaattatatcacttgatataacggctntgatacttaagtggaacaaaattttggatttctcaaagggaaatgttatacaggttgagttttaatcatgtagagcgagtgacgacatattatacataaaaaaatgatcgaatttggaatatgttgtaatttcaggcaaatcctgcttacctgaaggattccacggtagtacttccagttcagattaatggcaaaacaagaggtaccatccaggttgaagaaacatgtacagaagaggatgcttttgtactagcatctatggatgaaaaactatccaagtatttggatggtcaatctgtcaaaaaaagaatttacgttcctggcaagattttgaacgttgttgtggaccgtataaacattaaggatggtgtacagtagctgctatcactcgtgtccgtttctactg

SEQ ID NO: 185502 - DNA, 423 bp, Glycine max
  unsure (1)..(423): unsure at all n locations
agctttgtgtgggatgcccagtctgttctantttccaaacccttaaggaaaagatgacaaccactcttgtgttagttttgcctaacccaagagaaccctttcaggtgtattgtaatacatcaaagatgggtttaggaggagtgttgatgcaaaatggttatgtagtggcctacggttctagacaactcaaggctcatgagatgaattatcctacccatgatctggagttagctgctgtatattctgctcttaaaatgtggaggcattacatgttcaactccaagtttaaagtgtttagcgatcataaaagtcttaagtatttgtttagtcagagagagctcaacatgcgtcagaagagatggttagagtttcttcaagactatgattttgagcttaactatcattctgtcacagcaatgttgt

SEQ ID NO: 185503 - DNA, 455 bp, Glycine max
  unsure (1)..(455): unsure at all n locations
gtgtagacaataggtgaggagaactctaccttatggnctattgcttaatctgattggaagggttgtttatgcttcaaagcatgtttgatttttgtgggttggtggaatttggtgttgggtttcctttaaagtccttgccccttgtatgcttttgatttgggaattcttgatgaaatcttgtatatgtctaattgatggttgatttatgtttttttggacttgtgttgagtattgggatggttttgaatcatttgtgagtgtttggagaggtagagagtaatgaagatacgtttgggtttgcgagaaccttgaaattgcgagttatagagtttgtagactcattgngtgagacaagcttgtcgtgtattatgtgaatttttagagcattactcactatgtgagcctaaccttgttgggcgagtcgtgtgaccctatatgggatctatgtaacaccc

SEQ ID NO: 185504 - DNA, 430 bp, Glycine max
agccttacagacctatactggtgggtatgtttataattcatgaaacgaagagaaagaatttcaaaccaacagctgttaggaattcttctaaaccaagaacaaaacataaaagaaaaaaaaaaatcaaagaacaatggaaagcaactattaaagctctaaccgatgtttcaaaatttttttattgagtaaaaaagtaaagatacatcgtggggcattttatttttcgtgaaatatatcaagagtaaatatgtatcagcttcgattatttatatgccaaaatctttacttaatcaggcataatttatgtttataatttctttataaaacaacagagtaagcatatatttaaaatagttttttatatttaatatttgtaatggaattttttaatttatttgctttagtaattttctttaattaaagcatacat

SEQ ID NO: 185505 - DNA, 453 bp, Glycine max
  unsure (1)..(453): unsure at all n locations
tganatgaggaagtgtggaagggtgagacttcctactnttattcgttgaccacagagtggtacctggagatatgtcgcgggggtcaggagaccttggggacgtcaggtggggtgctattgcccaaaaccaagcttgaccaatcccgacccaacccgggcatagtcagtcagtgagaacctgtgatgtacctaaacaggcgagctcctggcagtcaaccgataaagaacaaagaccacaaagcaaggaggcttgtgtggtggctggccagctgtgaatcttgagtgatatatgggatatggccactggtaatcgattaccaagggtgggtaatcgattacaaggcttaataacgagatcaggaagctaagagggcttctgctaatcgattacaaaggggcgtaattgattaccaggcttataaatgggactggaatgttgaaggggcctctggt

SEQ ID NO: 185506 - DNA, 382 bp, Glycine max
ttttcttctaaaaggatagggatgatgcaaagcttttaatttaaagcaatgggtcttgtgcagtgaattgtacttgtggaagctgaataacatgataaaattcacattttaatctgcattaattgctttggtttttaaaataatagtttgttgttgaaatccatgacatctttataacttgatgcaaagttgatgaatccataatattttagcaattcaatattgttacttccaagcatatcttatataaagattaaatgtctatatatcacactatatatcacattagagaagctctcttttttcctttttatgaccaagaaactatctttgttcctgacttgatgaggatgttgtatagcacaaagttgtcgtgtggaaa

SEQ ID NO: 185507 - DNA, 448 bp, Glycine max
  unsure (1)..(448): unsure at all n locations
ttgcaaggaanaagaataaataatatatattcttatatctttataagcattaataaaaaaataataaaatattagaataatttaatcaattgaatcttttttttaatgtattcatgacattattctaaaacttttattaataactaatgttcaaagtataaaatgtgtgacgatcacttttagtgttntttttaattattttttttttcatatgtaagattttaattccgaatcatatttaaaaagatagaataagtattgtatggactaaccaccttattggtaatcgatcttataaaaatttcattaagagtgtgtttggatggaggaatttaaaattctaaggaattttaaatcttaagaattttaaatatttaaattgaaattcttttattttcaaaattttgtgtttggataaaaaaaattaaagttatgagtgtgaaaaaaa

SEQ ID NO: 185508 - DNA, 433 bp, Glycine max
  unsure (1)..(433): unsure at all n locations
agctntcttctctagagcaacaagtgaaacataattggaggaaangaaagggacagcatacctgcctcactgatatangaattctattgtggtgacaaggtgccaatactggtctcatatcaattggcaatcgggcctactcacaataacagaaagaagtaacagtgaacagccatatacaatttctcacaacataaaaggtaaaataaacaattgcatagaaaactaatcagatcatttacatacaagaacaggataatttcctttaaaaactgcattgtcttcctgatttccatttgctgtgttcccacttgtggcagctgttttcctcacaagaacttccaacgcccattttcttttatcactcttcatacaaccagatttaaggtccatctcttttgtgctagttttggcaccagctgatgaaactgat

SEQ ID NO: 185509 - DNA, 382 bp, Glycine max
gggaagtagacatatgccccaacttaggagtgccacatttatgatataagtttgtttcatgatcaaaacaattggatctctatttgtgtgggtcaatggcgctagccacgacggatgcaaatgtttaccaacatctgtccacaaagcattaatagtaagatgaacccaagcggatttaaaagagttttaatgatttattacacattctctgtcatttcttgttagtagaatctttgtcattatgaatattgtccactgcacaccaagttgttcctatcttcataccttggaacacgatccaagtttttttataaaaaaaaatattctttttaaccatttatgaataccaattcttgcaatagattagtgtataccttattaa

SEQ ID NO: 185510 - DNA, 411 bp, Glycine max
agcttctggatcttgatgataaagaatgtgtggccaaagttattgagctaatatatatcatgtggaaagcaagaaacactcttatttttgaaggaaataacatacctctattacagctcttggcataagcaagttacctacatgtccaacaaaatagttcaaggattgataggagccttgctaggttgtgctggaaacctctgcaacaaggtcaaatcaagcccaattttgatgcatcaatgcaatcaggttatggtactgggctggaagttgtgtttagaaatgacaaggggaaagtcatggcaacaaccacatattttgaaatgtacttaaaatgactcctacttacaaatgctcagtgttggtaaaattctaaaacatttatacctataatttattggtgtagataaa

SEQ ID NO: 185511 - DNA, 420 bp, Glycine max
agcttgtatttaaaaatgttttaaaaatacttttaattaatatttgaatttttattcctttattaatatatatgtgaggggtagagggtgtcacaacttgcctaaacatgctgatgcaaacactactggaaaaacaaagcggtcgtcataattggtcaatgatgctactacgacggttacccactcgtcttagaaagtcaacgattctaagacagttatgcaaccaaccatcttagaatgatttatgtactaagacgggtattgatcaaaacccttcataatatgtatgacattctaagacggttttgtcctataatcgtcgtagaaagccatacatacttgttggatcaagtggcctcagaataattaagaaggaggggttgaattaattattaatgtaccttgactaattaaaactta

SEQ ID NO: 185512 - DNA, 449 bp, Glycine max
tatccttatggtctgcctccggacttcaccctccgtgctatcctggaagagttaagccaagcccctactttcgaggggcaactcccaccttatgaagactatcccgggcaagacaatgaggaaggagatacccatcttggccccctgcaccacctcaaagatccgtccctccacgaactaccccaaccaaacatagtccgccatatcccggcttcacccacacctataaaagaatctgttcccttcgcggaagataaaggtaagatggaggcgcttgaagagaggttaagagcagtcgagggccttggcaattacccattctcggatttggtaaatttatgtctcgtgcccaacatcgtcatccctcccaagttcaaagtaccagactttgataagtacaaagggacgacatgtccaaatgggcatcttcggatgtattgccggaagat

SEQ ID NO: 185513 - DNA, 433 bp, Glycine max
agctttagaaaatgatttctatacaaaagttagtcgtataaagcgactaacaaactcccccaaatttatagttttgcttgtccttaagcaaagaaaaaacggttcacttgtccacaagttacaaagagagtggccaatcaaaagataatggtgtttcattcatcaaggacatcaaccatataaattgattaccatgaaatgcttaaatcaattagttctcacaagctgcagttttttcgaagataagaacacaagtattagagtcacaactgaaataagctagtaagcatgactgaaatcaaggaaagatcatcaaccaaaacctcacagtcattgtttcactcaaactcaagtgtttaggcttattccatcataaacaaccagcacaagttccaacctttgcatttcatctcctatcatacagtaatgaaca

SEQ ID NO: 185514 - DNA, 436 bp, Glycine max
agcttgagatgaggaagtgttgaaggatgatacttcctgcttttattgttgaccacagagtggtacctggagatatgtcgcgggggtcaagagaccttggggacgttaggtggggtgctattgcccaaaaccaagcttgaccaatcccgacccaacccgggcatagtcggtcagtgagaacctgtgatgtacctaaacaggcgagctcctggcagtcaacagataaaaggaacaaagaccacaaagcaaggaggcttgtggtggctggccagctgtgaattttgtgtgacatgtggattgtggcctctggtaatcgattaccaagggtgggtaatcgattacaaggcttaaaaatgaagacaggaggctaagatggtctctggtaatcgattaccaaggggtgtaatcgattaccaggcttgaaaacgaagtcagg

SEQ ID NO: 185515 - DNA, 473 bp, Glycine max
  unsure (1)..(473): unsure at all n locations
gctcggagatgntttatcttttacatatccaactcctttgaatgacatttgtattggttgttatatngaatgttgcatcttagtccatatcatatcttttgtgcatcatgcatcatcatgagtgagtgagaagaaattttctaaagttagaaaatttcttcagaagaaaaaactctttgttttaattgattacaaccttatcataatcgattacacaagttgtcataagcttgtagagttatgtctcgtatcggtttaatcaattacaactttatcataatcaattgcatagttgttcttaagacaatgactgatttattcaggagtctctgttttaatcgattaccatttgatataatcgattacttctctttctataagtgttttagaagtgaacaagaatactttaatcgattactttgagtatctaatcaattacattattcttgagttgtgtctagattttggaaaga

SEQ ID NO: 185516 - DNA, 425 bp, Glycine max
  unsure (1)..(425): unsure at all n locations
agtgagacatgacagaataagacttgttcttttaaattatcgatttctattgagnaccacgaattggacattatctctcaggttgagatgaaccagtataacttattgtgtcctatcttgtttatattcttttatgtgcattaaatcgactaacggttcaaatttgattcttgcatttgaaattctctgtttgttttacaatatctgaaactatgtttgacaagttacatccaatcccaatatcaagaggattatctactcattgtggtgagaacgatcctatacaatcaatgaatgagagaaaggcttggaaaatgattgttcgtccctaaattctcgatccttgcactctctcctatgaagctctctgttcttaggctctatttttctcactccactttcgtttcccttgtttctttatctta

SEQ ID NO: 185517 - DNA, 403 bp, Glycine max
agcttggtaaatacttcagtttgatcaatattatttattctgggaaaatctatttcgaccaaaatatgtaagcttttatttttctttgtattacaaattatgggaatacaatccatgttttgtagtgtcataagcccacttgtgtgttcttcaaaaaataaattattcctgtttttctcaaaatttttgtagagaaaatctatagttttttccatcttgtttagtctgatttccaaaggggaaatcctatagttcataattttatatccagaatcattttctttcttaaaattgggaaattccgttttcaaaactgtttgtacacaagttttgcaaaagttcttatagcatatactatagtgagttcttaacgttctgcggggatatcttttacaaaattgac

SEQ ID NO: 185518 - DNA, 383 bp, Glycine max
  unsure (1)..(383): unsure at all n locations
tcagctgtacaccgattcttgtttaccagccctgtgacttatactttanaagatggtgggtgttgccattgactaactttcatcgcttcaaacaaattacaaccttagcacatagcttttctctcaagaattcaaagtatttggagctattctaaactttacaaaatttacaaagagctttttacaaaagaattgaatatgagcgctttttttagtcttcatgtctttaagctttggtattataggctttcttcaacaaatgcctatggctctaaattcatatggaaaccactcttttatctatcggtgacacttaacaaaaaaccacttctttacgttaacaggatgctagcaaagctttttgagggatagcgattaaaact

SEQ ID NO: 185519 - DNA, 430 bp, Glycine max
  unsure (1)..(430): unsure at all n locations
aaatcctgctttaacttggctatgtnnagattatatttgtgtgttttcatttcttaatccaacgcatngncaacacaagtattcaaatccatatactttcctaaaaggaattttatgggtgctgacttaagtaacaacccatcatattctaggcaaagcatattgttttccaaaatggtgttgaaagaatgtgtggcgtggaagttatgaaatgacgagaatgttaatgtttgagaagaatcatggttgaagcataacggtcatgcagtgattctaacaccacttgttaatggcttgaatgatttaaaagtggaagttttgatggataaagagacatttgtgtggaatacacctcccttcgaaaaattttcaagtggaggatgttgaggccatattgagaacaaaattattgaatcttgattaacaaaac

SEQ ID NO: 185520 - DNA, 395 bp, Glycine max
  unsure (1)..(395): unsure at all n locations
gaagaagatattattccctcttcattgatgactacacctgaatgatgtgggtgcactttatccaacaaaaatcagatgcatactctaactctcaggatgacaatgccttattggaaaagcaaagtggtcattcccttcaaatcttgagaacaaatcgtgggggagaatacaatgggcacatattcatcaatatttgctatgatcatggcatcaataatgaactgactgttcgtacacttcacaacaaaaaggtgtctctgataggaacaatataaccattgtggaaatggcttgattgattgctacacacaagatcctgccaagaaactatgtgcgagagctgntagcatagctatatacattcttaaacggtcttctacttaaaacatcttata

SEQ ID NO: 185521 - DNA, 426 bp, Glycine max
agcttctcaaggaagttttctcaagatagcttctctaggaagccacctagtctataaatagaagcatgtgtaacacttgttgtaactttgatgaatgagagtcttgtgagacacaactcaaagttcaacttctctccctttttcttccttcaatttcgtcctcccccctctctctttctctccctctttcttttcctccattgaagcatcctctccaagcttcttatccaaggctcatcttggtggtgaagctccttcttccaaggcttattccctagtggatggtgccgcctcttacctcttcttctttgtcttccgctgcatctccatggtggaaaatcaccattaaaggacctcattgaagctcaaagatccagcctccatagaaactccacaagcaagcttccatcagaatctctctattaa

SEQ ID NO: 185522 - DNA, 456 bp, Glycine max
  unsure (1)..(456): unsure at all n locations
tcttatccaaggttcatcttggtggtgaagctccttcttccatggcttattccctagtggatggcgcctcctctcacctcttttcctttgtctttcgctgcatctccatggtggaaaatcaccattaaaggacctcattgaagctcaaagatccagcctccatagaagccccacaagcaagcttccatcacataagtctatggcactttcgtatgggacatccttccctcgaaagattacgggctatgcagtcctattatccatttttgaacagcaataaagatttcatatgtaatacatgccattatgcaaagcataaaagattacctttctcttctagcatctctcatgcaccaactaaatttgaacttttacatatcgatatttggggaccatgctcgaagacatcaatgcatgggcaccgctatttntaaccatcatagatgacttctctcg

SEQ ID NO: 185523 - DNA, 421 bp, Glycine max
  unsure (1)..(421): unsure at all n locations
agctacngatctacaccgtacgaagcgttctattttctatctatatccgccttgaacggcactcgttgctacaaaatgctttctctcctctgcacacaccaatacataatcaaatcattagtccaaattaaaacccataaccaaggtgttaaatatctgtatcatcgcctctattgataataaactgcgtgcggtgtaaatcatggtggcaaaccgctttttaaaactttggctataactaaaaaaaattgaataaataataaataaaatgatcaaattttgagcaaagaatgactttgaaattttaatttccaagcacctggacatgtatatgtctctgccatcgagattctttcggcaccagtgacacgaacttagaaaattccacgtgtgatatgactgttcatcttcttcaattaaa

SEQ ID NO: 185524 - DNA, 456 bp, Glycine max
actaagcttagtttttatggggtaatgagggtggggcattttcttactaatgatatttagtaaaatagttaaattaaaaattttaaaattcagattattatacaaaatagatatttactaaaataaatatattattatacaaaattcaaattttaaaacatatattcacccaaaaaatatcttagataatttaaataatataacaaagatacttaaatctaataatatcattttcttaataacaaaattgaattataaaataatattacatagattaatttaataaataaataattttaaaatcaattaagaataatgttatataatataatatttaatcttaataatatataaacttatttataaaaaaaaaaggaagaagggaagtcggtgtgccaaattccaacttccgtgaagagcttgaaacaggtgtagtttgggaaaaaaattctcaaa

SEQ ID NO: 185525 - DNA, 332 bp, Glycine max
agcttgttcgagttgtgttacacatctggtatgttcaaagtaacaaaccatcagaagagctatttatttgtgaaaatttataaaccttatataaactatgatgtcagagacttagagaagaggtgggaaaagtttgacaattcagatttgaacccagacatgatcaagatggggagaagatcacgaacccagtacagatatacaaccatttgaaatcgaccaattttattatgatacagattcatatggttaaataataaagtaaagccacatgggtagtattgttcagattcacaattctagtataacaaatgttaatggggggggggggg

SEQ ID NO: 185526 - DNA, 454 bp, Glycine max
  unsure (1)..(454): unsure at all n locations
cttntcaagcaaatcaaggggtcattntgcatttgcggaatctacattaataacatcttatcgtgtgattttttaatttggtagactataaagtggggttaaagtttaataatttgtcacctatatgctcgtactgtaacaggtgtagagtcagctgaaaaagtagagaaaaaaattgaattggagcgcatatgggtaaggctcctctcaattactggaagtgtccagcagtgactaaaataaattaacaaaatataagaggcgatgctttttttttctccctaaaatcttgtgtaggttactaatgcactgtaaaaaaaacgtgtatattagaaaactatacctagntttgntttttttcctctaattnttagttttaaaataaatttatcttaaaagttttctctcttttgtatcaagccattatcactatagtcaaacctatgactattga

SEQ ID NO: 185527 - DNA, 419 bp, Glycine max
agccttgacttgagtcatcaagagattatatatatgtgaccatggcatgagttttaaaaataattatcattatctctttcaatcaatctttcaatatctttcatctctttcaacagaactttctggtttcatttctcttcatctttctaaaagttttttatcaacactttctcttccaagaaaagttctttattcaaaaacttgtgctattcatctttttcattctcttctctcttttccaaaaagaattcaagaaggactaatcgcctaaattctttttgtgtctctcttctcccttttccaaaagaacaaaggactaaccgccagaattcttttgtgtctcccttttccctttccaagagaattcaaaaggacatagtttgaaaattcttttgattcttccctttcccttaaacaaa

SEQ ID NO: 185528 - DNA, 424 bp, Glycine max
agcttgttacagaacttaggaaaaatcatgtacttgcttgttcgcacatcgttcgcatgtatgatatccactcgacaaggtttgaagtagaggagaccttcaatcctataacgcaacgtggcgaacaaaaatgggcagttaacttgaatggccattattgtcaatgcggaaggtattctgcgcttcactatccatgttcacacattattgcagcttgtggttacgtgagcatgaactactaccaatatatagatgttgtttacaccaatgagcacatcttaaaagcatactccacacaatggtggcctcttgggaatgaagcggcaattcctccttctgatgaggcatggacactaatccctgacccaactacaattcatgcgaaaggtcggccaaaatcaacaatgataatgaatgagatgga

SEQ ID NO: 185529 - DNA, 447 bp, Glycine max
  unsure (1)..(447): unsure at all n locations
tgtcaataactaattctccttacagataacctctcttatgtgaaaggccatgaatggttttatatctaacgcaccttgtaagcaaaagaatctccagtttgaagtgtagacaatgcacaaacccaatttactgtatcctaaaatttactttaattatgaagaacggtggtgacaaggattgaattcttgaccacttggtcgtaaaatccttggtaagagccaactcttctaaaagtttaagctcttaggtagaggtttattcatttgtagcactaaatgatgtttataagtcttatttatggtgcatatcgatgttggtaactacataccgaaaacttgatttggtgcaaacattcttgattatttgagaattggccatatttgcttatcttcttgtaaggagtaacacaaaataaacaataatntatatagaattatgcacttttc

SEQ ID NO: 185530 - DNA, 429 bp, Glycine max
agcttgtcaggaagctgtcttggtaaaagtgccctcctacattcgttaaccgttggatcgtctcgaaatttagtctgaaagttcagaggacagatgtccacgatctgaccgttgcgatctgtgatatgtcttcggttgtgtgagaaacttctcttttcccaacagcagaaacacttgagtgtttcaagtcttgtttttcgtgtagccttgacagccattcctttctccttctttcttccaaaacccttccccaatgtcccaagcttcttcttcaccacccacaaaaaccagtagcttccatggacctccgttgttctccgttgaaaccccacaccgagaggagcccttcaatcggagcggaatcttccaagcttgtctcgcggttttggtagagaatgaagcccaatctgaccttcacagttttcttcg

SEQ ID NO: 185531 - DNA, 430 bp, Glycine max
  unsure (1)..(430): unsure at all n locations
agcttaagaagatctatcattgtgaaagtctcttatgtatattaatattacaagcttaagaatgctatacaaatgttngaggttttgatatataactttntatgatatgctctgaattaatagttgcaaattgccacatttctcatgtcaggtactcgtatgctcccataaataaataaggcttcttctgtctcaatttattttacttctaaagcaacaatttctttctttctcatttttattgtaccctctgatcagatcgtaatccgatcctcaagccttagcctctacacactttgtgctcgaggctcgatgattgtatatgcttctgaccggactgtattctaatctggtggtggatcccaatctgatctgataacctccacagtattgtgcacattataacactgacgtaaggttaccatgtacc

SEQ ID NO: 185532 - DNA, 435 bp, Glycine max
  unsure (1)..(435): unsure at all n locations
ccatagagtcctgaaccaggagaaacttatctggtcttattatgcgatctatctccacaaccacatcaacaatgtcacatctggcaaaaagattattattgcaaactgtgagaatcataatcaacacgtttatgctacatataggagtactaaactaatggagttctaaataataaaaagacaaagcactagacacataaagtaagttctaggcattagtttcctcaatatgtatacctttgcataagatgtttgaagataaagctagcatgaacaagatcataagtccaaggatatgtatttaaggactcacaccaatcatggtacattcctattagccctctgtcaaatatagttgtaagagtatttggcatgtcaatgggtactacattcatcacctagattgatagataaatgagtgatgcagcanatctg

SEQ ID NO: 185533 - DNA, 463 bp, Glycine max
  unsure (1)..(463): unsure at all n locations
tcatgtaacccagtaaattagcatgatagtacctctactatttatatgatgaccaattgtgttgatatcaatacacttccaaagcaatcagattaagatcatctgcagttaactgcaatgttattaacaaatctacaagttgtaacggcttcatgacatctactttttgcacaatttcatacataacaaaattcacctcatcttcatcctgctaagcttgcaacatgagttctttagatatggtttatttatttggtttcaatgtaagactacatgtgtttgttagttactatgtgcaatattgtattaacagtgtaagagtttggtgttgctcattgaattaaacatcattgttgtatgactaattaaaatcaactgatgttgtgatgcagcaagatcattcaacctcgagggttcaattntacacttgatgcatgtatacttcatgcaatggttatactta

SEQ ID NO: 185534 - DNA, 471 bp, Glycine max
actaagcctgatatgtgctctgcgcgcacatgcaaagtacagttgtctttgtgaccatgcgctaagtcttcaagcgcgcgcttagcatccatgctcaatacaactggcttccagcttggctttacatgctgagcatgcactggcgtgttgaacgcactgttctaattctttaacatcttccaaacctctatttctatgttgaaactctataaaaaaaatagaaccaaaaacaatgtaaattcactaacttaggcattctcaggataacaacttagaagaagctaatttccttttttttaggtcaaaagaagcattaaaagagaagaaattagataatttctatgtaatttaaatgtacaaactaagtatgcatagcaattatcagtgattcgtcggggtgttacacgaatcaagtataaaaagaactcttcttgaatggaataggacctcacctttatgaaataaagtgag

SEQ ID NO: 185535 - DNA, 440 bp, Glycine max
acctgatgcatgcagcttaaccaggggagatggaccatttatgtgcttgttagaatcattgacaatgcttacaaagttgagctgcccgatgagtataatgttagttccaccttcaatgactctgatttacctctctttgatgcgaatggagaatccgatttgaggacaaatccttctcaagagggagagaatgatgatgacatgaccaaaagcaagggcaaggatccacttgaatgacttggaggacctaagacaagggcttgagctaataaagccaaggaagctcttcaacaagtgttgtccatactatttgaatacaagcccaagtttcaaggagtaaagtccaaggttgtgagttgtatcatggcccatatggaggaggactatatgaaaccactctgtctcaacttttagagtgtttagtttgccaaataatggcc

SEQ ID NO: 185536 - DNA, 460 bp, Glycine max
ggaagacaagactatacgaggtatcttccttgggtatagctttatctctaagggctaccgtgtctacaacttgcaaactaagatactcgtcattagtcgagatgttgaagttgatgagtacccttcttggaattgggatgaagaaaaagtggagaagaacgttcttatacccgctcaactacctcaagaagaagctgaggaagaaaacccaggtgaaccaccttcgcctccaccacaacaacaagatcaagaactatcatcaccagagtctactccaagacgagtaagatctttggtggacatatatgaaacctgcaacttggccatactcaaacctggaagctttgaagaagcgtctaagcatgaagtatgggttaaggcaatggaagaagagatatatatgatcgagaataacatcacatgggagttagtaaatcgtccccatggaatagatatcatt

SEQ ID NO: 185537 - DNA, 377 bp, Glycine max
cacaggacaccttctatcctataacgcaacatggcggacaatagtgggcagttaacttgaatggccaatatagtcaacgcggtaagcattctacccctcactatcacatgtctacacattatagcagcttgaggatacgtgagcatgaactactaccaatctatagatgttgtttacacaaatgagcacattttaaaaacatactatgctcagcggaggcctcttgggaatgaaacagcaatacctcctttttatgatgcatggacacttatccttgacgcaactataatactgtgcgaaatgtcatccaaaatcatcaacgactacgaatgatatggattggctggaaccatctgaccaccaacaaatatagtatt

SEQ ID NO: 185538 - DNA, 407 bp, Glycine max
tgtggcacgagttacacaacaacactttatggtcactatggttatccttcctaagaatcctggagtcgtgaaatctcttcactttctccttggcaatcttggagttctcatcagcgtataagaggacctgctcaaggtcttgctattaaagcttcctttccatacctgcttcatcaaacgccatgttacataccttcaccgcccaataagcacagcgctcaatctccatcaaaaggtggcatgccttaccaaaaaccaccttatagggagacatcctcaaaggtgttcgataagcgatcatgtgggcccatataacatccttaagtagctcgcttcaatccttgctattgggttgcactattttctgcaacacttgcttgatctctctattaataaccttcgcttgt

SEQ ID NO: 185539 - DNA, 429 bp, Glycine max
  unsure (1)..(429): unsure at all n locations
agcttcaagcccactccagacatcttctctaagttctttacgggnagancatggaaaattagcttgtgaagttgcaaacaaaatttctagaagatccaacggttaacgaaggatgggaagaatttttaccgaggcagcttcatgtagttttctctagaagcttcattaagaggcttctagcacactccagatatcttctcaaagatcccaacggttagatcatgtacacgtgtcttttgaagtagcagaccaaatttcaagaagatccaacgtttaacaaaggctgggcagcatttttaccgaggcagcttcatgtagttttctctagaagcttcattaagaggcttcctccagaagcttcctcgtggcttctttgagaagctttctcaagaggcttctntgagaagttagatccttatctatccaaac

SEQ ID NO: 185540 - DNA, 455 bp, Glycine max
  unsure (1)..(455): unsure at all n locations
ntntggagtagagacatgggaccaactcattttatttcataaaggaagtcatatctagtcaaggtttgagagaccatacaagtttcctaaggatttctaattatgtgggccattaagtctatcatatgctgacaatagccgagaagcccatgaatctcttcgggggcggagtaggtgtctgccattgccttggccttggctaacaatcggggaagttcttgactcccgttcaaggtaagagcaaaccgatccatccacacggttgcctcttggtgtaaagagtcgatcacccttcctctagcctctttttccgcgtatacttaggcatactcatccgcgattctatgctcgtgggccgtggctagacctaactcttcttggtacttggcgatgatagctaacatgttggtctctgtctcgcataaacgctgagacaagcttcttttggaccttga

SEQ ID NO: 185541 - DNA, 426 bp, Glycine max
  unsure (1)..(426): unsure at all n locations
agctnggaggtttgacaaacttggtgaacttttatctttacatgaatgacattgtggctgaaacagtgaatctatagttgtagacagatttttgaaacgttgttctgttgacttttttcattttaatttaattcattttactaagcctggtattattaaaatttaaaactaaaactcttacaagttaattataaactttctctagtttactttgaaggggtaatgctctatcatacaacccctttactttcatttttgtccttttgtgtcatcattttgcttagcgaaattcttgcttagttgatattagtcactggattaagattgcatgccttcaaagatcatatttattactcccgtggctagaagaagcaaacttgtgtgacatggaatgtttgggttatgatttgatttaccttctattat

SEQ ID NO: 185542 - DNA, 443 bp, Glycine max
tgtcagttgtgacaaattaacactcttattagagaaatatcaaaatataaagcgggcttcataaaatttggctgaaaaattaactcactaatattggagtctgatatatgagtattgctagaaagatattgtagccgggtttctggattgataatttttcctccttatttgtctcctataaatgcttgttgagaagtttatctaagctggacctaaattaataatctactatatggtgagtcaaaatactatcccagtagtcctatttgtagcatgtttttgtcagctgagttcaacttgcattttttttcttttcatgatttgactcaacatttcttttgttacaatctgaagtgctttgaacatctgatatttctcaagtggtatgatggattatttatattgcggtattcttctcatgttaaagttctggttcttcaagt

SEQ ID NO: 185543 - DNA, 416 bp, Glycine max
  unsure (1)..(416): unsure at all n locations
agcttaagatcactcgacggatcgtgccttctaaatgtgggacgtccaatttcatatggggccaagaaggggatggtgaagttagtatcggaaaggaagaaggaaaggtagggacaatggtcatagtagctaagcgttcaagaatagactcgaacttagcgctcatggtggcttggatttgagcaaggttttgtgctagagaggactggccctggttcaagcgagtgaccgcctcatccaagcggtcaatggtggcctgcctggtattatgctctggcggcagcataagggaaggtcggaccagttgttacgatcctatactatgagaagtaagactacaaaggtaaatggggaaaaaanttgttttgccttcattatcattcatactcccttatttacacaaagaattttgcacc

SEQ ID NO: 185544 - DNA, 443 bp, Glycine max
  unsure (1)..(443): unsure at all n locations
tagagatgatatcattntccatagtcaatccttttttttttttttttgatcagcaaagataaaatatattatatatatagtgagtaccagaggtaccaaacagtacatgtaattagattagcttgccagcaacatggttccaagctcagactaatagcagtctcgcaaggaaccaaagctaggtattacaaagacctacaacacccactgtctatggtttctacccccctgaaaatacaaatcctgctgctatgttagacgaccaatagctgtaagtgagagcaaagtccttctcaaagttcttcagccatgtccataatgtaaaaatagcatcctccattaatttgtttccatcaaaagtttcatttgagaagatgattntattccggtgctgccacactgtccatgtgagggctagccaccaacttctccatcggttaata

SEQ ID NO: 185545 - DNA, 428 bp, Glycine max
  unsure (1)..(428): unsure at all n locations
agcttcccaatgcttcttcattcccaggagtatgatctggttgcaactcatcattgtcatcatcatccatttgtaacagtaagtattgcctgttaggacacctatgggaagaagtggacttttcatcacaagtgtaacacatacctttctctctacgaatctgcatctcagatggtgacattctttttatatttccagatttttgggcatttgaattgtaatttataggagtagaaagtaagggaggtaggcttgtggatttgacggactangaagagggtaggtttgtgtttaggcttgtgttttgggcatgatttgggtacgaattttggaatggtttgtgtttaggtaaatatttttcttcaaataacttggccaatgagacacaacaaagtaaggtggtaggagattgggctattacatcacat

SEQ ID NO: 185546 - DNA, 445 bp, Glycine max
cttcatctttggtccctctcatatttgttgcatgagaattttgctctattttcatctcccactccaagtaggcctccggatcattctttcctttaaaggggggaatgttgagtttaataccatcaattcggttttgtctaggaacaccatcattccctcttctcctcctttcttctttattatgatctctattctccatttgatccaacctctcatggagcgcatcatctcgttgtttcattaacctctccatatgttgcatcaaagcttgcatttggaattgcgaaagcccccctccatcattaggatttgttcctgccatctcaaacaaacaaatcaaacgtaacaagacaattatagttgctgtttgaatacctcacccactcaagtgtattacacaattatggcttttctctaatgatacactcttgccttttaccactct

SEQ ID NO: 185547 - DNA, 430 bp, Glycine max
agcttcttttggacctcgaacaagcaattaacttctctttcataaccatgctatgggctcgcgactggtctctttcttcctttcgcaacttgagttcactattgctaccccatagagctccgcgaaatttgttccggccatactcttccttgcgagccctcttggtctcttgttcaaaggctcttgcggtaattgcattctcttcccgtaacccggcacactccttccgaacatgtgtagcggccaacttgaacttctccttggcaagttttgccttccctaactcgcttttgagagcttggacttcttcgtcctcttccggtgcttcaaaactctcttcgctgacgacttttaacttggcgagccaatctaaacctcgtatacgaactttcagccattcgtggtacccaccaatgatgccattacgaat

SEQ ID NO: 185548 - DNA, 432 bp, Glycine max
agcttgtatgatggaccagttggggaatttccatgttaacacttgggcaaaatgcttaattcctacttttataaacttagcaggtatattgaattcaacttgagtattttgaacttccttctgatgaacatgtatcagtaacaatctgctttgccatatttcatgttacttggagttcaactttctttgtttcacataactttgcagttaataacaataggtcatatagagaaagatatttcatcaatttattattagtatttttaaatgttgtttgtcattattttctctcagaaaataggaatggaatgatgttgtcattctaactgttgcaccggtgttatctaatacattgactctacagtttacgtaaattacactgttacatgattttcctgatgcatatatttttctatctcccttgcagatgta

SEQ ID NO: 185549 - DNA, 461 bp, Glycine max
  unsure (1)..(461): unsure at all n locations
ntataaaaaatgagttntatttgtttatatgatatacattcaaagtataatatgatatttttgataacttggttaaaaacatgttttgcaataaaacctttgaataagacataaatttagctttcaataaccttataagtttaaacttggctcttcatattggtcaacatacttaacattttaaaagatttttatccataggaattggaaacaaatattaggcataagaatcaaacacatgtgtaaaagtatttataataatctacatgattggttaagagagaaggaggaatctttctcactaacaaattaacaactaatattaattaaaaaaaaaaacaaattttacacacactattcaatagatgtgaatatgtctgaaaaataatcaaaggagtattagcaacagacttttaacgattctttntattgattacatgtntaaatattataagcactga

SEQ ID NO: 185550 - DNA, 434 bp, Glycine max
  unsure (1)..(434): unsure at all n locations
agcttctgcattggcagttcctagtcctacctctaaatctattaaacaaantacaggatttaattaaaacacgggactatttgctatataagtcgggttggatttgtaggaggaagtaagaaaacacaacacgaatttcattgcagagtgttattttgagtatcagcatcaatggctccaattgcagtgggaaacgtgattccagacggcattttggcttacttggatgaagaaaacaaaccccaaactgtctccattcactctctcgccaccggcaagaaagtcatcatctttgggggtcccggtgccttcactcctacttgcaggtctttactttcccttttcaccataaactaaactgaaacagattcatgggtacttgagattcagcattcttacccccaaagtttttattgttaaattagatatgaact

SEQ ID NO: 185551 - DNA, 460 bp, Glycine max
  unsure (1)..(460): unsure at all n locations
acaacaatgtcttatttctacataaaggagagagattgtatgaaaagataaagtattcttagataactaattataacaatgtcatattttctacaaaatgttgtgaaaaatcattacttgttataatattttgcttttaggactttggtggtagtaaaaaaaaaacaagatgcctccgggcttatggcaactgacatttttntaatatactaatgaaaatcaaactcaaatcctcaagcatctaatccaattttttcattactaatggatatctctatgctatgcacaaaagtacgcaaattcaaacaacggctgatttgtgatttccttcaaatttatcttttatcttttcctttctatttaatcattagccattanaatagtgtttcgtacctttcggggttgtatagacattatagaattgtttgtgaaaaagatattcatatttatcctatactca

SEQ ID NO: 185552 - DNA, 408 bp, Glycine max
  unsure (1)..(408): unsure at all n locations
agcttctcgccaacttcaataggcggacccatcatataacagaccctggntgcaaattgagtaaaaagagaccctctttggaaataagatttaataactactcccctttcataaatgtgccctatttatacaattgacattcaactgaaatgcataaagtctgttgcaacataattattcatcaactgcaaactaatcatcaactgcctgagctaacaactgctgaggagatggcgttctattgatacccacatcacacatagtcctgcaggaaagtaagctacacgataaccctctttggcctgctgtgtgatactgagttgtccccttgttcctagtgattgccttctgcattggaatcaacatacactgataccacaacaacacggggtcgttcatgtaaaatga

SEQ ID NO: 185553 - DNA, 466 bp, Glycine max
  unsure (1)..(466): unsure at all n locations
agctngcacttgtagagaagaatcattaacgtactcaacgtagagtctacaaaatattttgtatcatatcgatatgggtcataataatacgctagctagctagcagtatatgtagtaaatatgacccatgcatgctacacgtaatatatgtgtgcacaactaaaacaaacttttataacgacagctatattgaacttttaatgatggttgttagtcgtcgttgtcgccaatatcgttaaaagtgaaacatgtttaacgatgattctcgaaataaccgctataaaaaatgtgaggtttttaagacgattattgtctcataaccgtcttaaaatgtatatgtcctcaaaacattagtctttgttgttcacatgaaactataatctcatatttttactttcgtgatgtgttgtggtgtgatgctgttgttgagcgagatatagaaagaataatgggaagaacaccatgt

SEQ ID NO: 185554 - DNA, 449 bp, Glycine max
gtgacctgcggcatgcatcttaagaatcaagatcgagatcaagattcttttttttagattcaagaatcaagagaagacttaatcaagataagtatgaaaggacttttcaaaaactgagtaacacatggatttttcacaaaacatgtttaccaaagagtttttactctctggtaatcgattaccagattattgtaattgattaccaatagcaaaatggatttgaaaaagttttcaaactgaatttacaacgctccaattgattttaaaaagttttaattgaccacaatggtatggtaatcgattaccagtgcctttgaacgttgaaattcaaattcaaatgtgaagagtcacatcctttcacataatagccttgtgtaatcgattacactgatttggtaatttgattaccagtgatttgtttctgaataaataaaatatgtactcttcaa

SEQ ID NO: 185555 - DNA, 466 bp, Glycine max
  unsure (1)..(466): unsure at all n locations
cttgatgttngtgttgaatgcattaaagataaacagacatttataggctattttatacaccttcatggaatggtcaacaatattttatatcattcatagacgattactctagatatgcatacttgtttcttatacatgaaaagtcacaacctttggatgtgttcaaaacatttaaagttgaagttgaaaatcaacttaacaaaagaatcaagagtgtcagatctgatcgtggtagtgaatactatggcagatatgacggtttatgtgaacaacatcaggggctttttgccaggtacctagaggaatgtggaattgttctacagtacaccatgccaaggtcacctatcatgaatggtgtttctaaaagatgaaacacaactcttaatgatatggtagaaagcatgagttgtcattcttacttaccagagtcactctgggcagaggcactatagaatgcagcttacat

SEQ ID NO: 185556 - DNA, 428 bp, Glycine max
agcttcacaaatatagtgttggctggcgtatgtatctaaacttgcatgattcacattctcccccatttttatgatgacaatcattatcaagtgaattcttttcgacatcatcaaaacctacatgtttcacattctccccctttttgatgatggcaaccatctgtaggttaggagtaaaaaaaatatctatttgtatagtttattcccccttgattttgtaatgattgcttatatgaaacagttgaagattgcatatatttcatatataagaagttgtctcataaacccttactatcttatcttttgtctatctctccccctttatcaacatcaaaaagaaatcatgaacagagaggagaaaaatatttagcaatttataatgaattaaaagagtagagcatgtcataccattcaaagtatcatttctt

SEQ ID NO: 185557 - DNA, 457 bp, Glycine max
  unsure (1)..(457): unsure at all n locations
ctggacaaaaaatagaagctaacatgcctagagatatgatgtttgtctattcacatcctccaaatctaatcattggagaaacatcttctggagtcaaaacaagagcatccttgaataaaaaaagaggaatgatggatcttctctcatccattgagcctaaaaacattaatgaagcattgagtgaagattcttgggtcacaacaatggaggaagaattgagtcagttcactaagaacaaggtttagaatcttgttccccctcctaagaattagttagtaattggaaccaaatgggggttcaaaacaagcttaatgaagaaaaagtagtaaaaaacaaagctagactagttgctcaagataaaattaaaagaggggattaactatgaaaaaacctttgcaccagtagcaagacatgaagccatcanagtaatcttagcttatgttgcacataaagacat

SEQ ID NO: 185558 - DNA, 450 bp, Glycine max
tgagggaaaacttgatgccttggtcaatctagtaactcatcttgccatgaataagaaatatgcacctgttgcaagggtctgtggtctatgttcttctgcagatcaccatatagatctctgtccttctttgtagcaatctggagtcaatgagcaacctgaagcttatgttgtaaacatttctaatagaccccctcagcagcaaaaccaacaacagcagaataattatgacctttcaagcaacagatacaatccaggttggaggaatcatccaaatctaagatgggcaagtcctccacaacaaaaatagcctgtccctcctttctagaatgttgttgatccaagcaggccatatgttcctcctccaatgcagcattagcagcaataacaaagacaacaagcaattgaggccccttctcaacctttcttagaggagttagtgaggcaaatgac

SEQ ID NO: 185559 - DNA, 410 bp, Glycine max
  unsure (1)..(410): unsure at all n locations
agctncaagcttctttcctgcgtgcaaattttctgtttttcgattntatttattctcttagactttatttctttatttctttggtaaacattagaatgtgaactaattctcggtttctcgtggaatgacagggatgtggttgaataagagatgttgctagtgccgagcttgaataattcctcactggcagaaaggttagtgttttctgctactacctggtgcttataatctggccgtccacgtggaactgagttgtgagaaccgttggattaagcgagctgtgttttttgcttcgaagggaactaatatttgcccttctgtcagatccgatctgaaatatctgaaccgttgattaattcttctatcttaggagcttattttgattattattattactttacttcggtgtc

SEQ ID NO: 185560 - DNA, 312 bp, Glycine max
actcaagcgagctgatggaggcaccattgctatgaggctgatgagagtttgtttcttcttagacgacgcttcttgcatgactggcataaagcaaatgaggaagattcaccacgggaatttgattccttagaaagctttttatctggggcagagaggggagaagctccttacttatgactacctgcccctcaaagccctacatgatctgttacatggggtgcacaatacaccacccttccctattgcattaccatcagtggcgtgcagtgtcacaatcatacactggaacaatggcggtgcaaaatgcaccgc

SEQ ID NO: 185561 - DNA, 430 bp, Glycine max
  unsure (1)..(430): unsure at all n locations
agcttctacatgtctaggggtttctagagataatttgtccaagcnccaaagagtttgagagattttgttgtgtgaagacctgcagagaatcgagcttgaagaggaagccgtcctaagagcttgagatgagtttgtgagtgattgtgaggttctagaggtggaggagaaatcctcaccacttgtatttcttcaatccttcatctttctcttctatttggtgtaaaggaagtttcccagttatggagagctaaatcctctgttggttcttccttgtaggtacttgatgtaaatatctttttttttatctatttaatgatgtnttgtgtgttcactgtgctatcataacttcattctaccatgcttttcccttgatcacatagatgcatgtgttnttaggatccttcaacagtggaaactggtcttattctta

SEQ ID NO: 185562 - DNA, 452 bp, Glycine max
  unsure (1)..(452): unsure at all n locations
ntattcacacaacatacactactgacactgaatntcttgtattatatatgcagaaatgtcttcaattcgatctgccttattagctatcacaagctagttggcctcttcataaggtactcacctacacaagttttggcatgttaagttatttggtttgtgcatagtgttatttcatttattaagtggatgttcatatttctttttcctttctgtttatagaaacctaacttgaatttgatgtaggcattgctatcttgtaactaagaataatattgagcaatgatttgactagaacctgtaagtgccaatgaaatntgtagttaggcttataggataaggtatgtaatcaaggatcaagaaatgtacatactttgtaatgaatcaaatcacctttagagtgtgtttggatagaagaatttaactgaggaaagtaattatcacggaatttaaat

SEQ ID NO: 185563 - DNA, 423 bp, Glycine max
agcttgctatgatgaatttagaagactgcttattgctcaaaactctaccaagtaacatggagatgagttccctgaaatatttaaatctttctggttgttctgaatttaaatatcttccagagtttggggaaagcatggaacaattgtcattgcttattttagaggaaactcctataacaaaactaccctcatcacttggatgtctagttggccttgctcatttgaatttgaagaattgcaagaatcttgtttgccttccagatacctttcataaattgaaatccctcaaatttttggatgttcgtggctgctcaaaattatgtagcttgccagatggtttagaggaaatgaagtgcttggaggaaatttgtttaagtgcagatgatagtgtagagctaccttcatctgcctttaatctggaaa

SEQ ID NO: 185564 - DNA, 438 bp, Glycine max
  unsure (1)..(438): unsure at all n locations
tttgtcagcggatcatagttatgtcactactcgagtgattgggacatttgggttagtatggtttaactaagcattttcctatctatattgccaattataattaatttcagtacttgtaagagcaaaatgtgttattagttattattactctcaaatttatggtactcactcattggttttctccctttctctttctgcagttatgttgcaccagagtatgcgtgcactggaatgctgactgaaaagagtgatgtgtatagtttcgggatacttatcatggaattaattactggaagaagtcctgtggattatagtaaaccacaaggagaggttagaaatcatcacctacacactcaacagttttgagattgttcattttatacttatctatgcagntctttctctcgtttctcctaactgtgaaaagtggaattattg

SEQ ID NO: 185565 - DNA, 423 bp, Glycine max
  unsure (1)..(423): unsure at all n locations
agcttcatctagttttatgaatgagctcattattgacagggnggaaataagcgggccataagcgatacgcaaaagaaatttattgaagagaaacttagtcacttctctttagtattttttttgttgcttattgtttggtgttcttcttatttctgcctcgtacatgataagttcattatctttcttagtaactagatccaccttcaaaatcctaggaagagctacgatgatagatgaaactctctaatgccttcactttgtctccatttgatttcaatcttgtaatgggaaggtacattgtttctccttctacttcttatgaagagttttgagtgtgataatttataagtcaacattatcactggtgtcaagcacggtagatgggaagatcatggtgtgaaatcagttgtttggataactgtt

SEQ ID NO: 185566 - DNA, 425 bp, Glycine max
  unsure (1)..(425): unsure at all n locations
gacacttanaaactcaagctaacaaactggaaaaaggagatattaggctttttgttgatgattatgaaaaacngagaaagcttgcnggaggatttgtatcgggcagcgaactcaatcaaatatatatccagacaaaggcaagatctatatggattaatgaaagggattgcaactctaggtattttcacttgacagtaaataggaagcaatgctacaatatgcttataggagtgtacgttggtgggtgctgggtagatgagccaagcagaattaaagaggaaaccagacttttcttcaaaaggaaatttgaggaaccaaaatgggagagaccgaggctggatggggtcagattcaagtctattgatcagtaacatatcgaactgttggtggctcaatttgaagaggagaaagtgacggcaacactc

SEQ ID NO: 185567 - DNA, 434 bp, Glycine max
agcttgcttctacatcaagaaccttgatggccactatctcattgagtggaatcttctgtattaagagcaaatcttttctccaaaacatgctccatttttcttcttataccataacatcaatatgtttattattaaatgcaccactgaaaaaatagaccacatactggagtagtgaaatcaatgttataatacttccaggttgctagcatttccccttttcttaaaccaaactagaaagtacattcaaaaactttacaaagatgctttttccccaaaccaaaatgttcctttcaactccactgataatgtaattgacaaatgctctcattcaatgctaattaatatcgcaaaactttaaatttgagtatattgatctacttattattcaacatggtgtaacaaattaaacaggcactattagatgttacacaagt

SEQ ID NO: 185568 - DNA, 436 bp, Glycine max
cttaagtcacgccgctgcagctttgctataggctaaaagccttcattgggagggatctaatgcagccccgcaagcagaaattgagtttgatggacaccattttcgaagcaacgagcatcagtgccgtttcaaagcgattaaggattagtctttcctcaaagaatgacgggtccagctagcagaaggagagtacacagaattccaagcggaggtttctataaggcattagacccaactgatagagcccatggctaagtatcaccctgaaatagccatggagttctacgtaaatgcctgaccaattgaagaagagttatggataagcattcctatgtgcggggccaatggatcccatatgataaagatgctatcaaccaattcctggggcattcgttgatcttagaagagggacaacattgtgaatacgctgaaagaa

SEQ ID NO: 185569 - DNA, 467 bp, Glycine max
  unsure (1)..(467): unsure at all n locations
ctttccaaagtggtctttggcatcacattcaaacttgatctattgtcgatatgtacctntgcgacaacatggtccacacatctcaccgacacatgtagagccttgttgtgtcctctcccctcaacgggaatctcttcttttgcaaacgcgatataattattggtggttatatgattaacgatgccttcgaaaccctccattgagatatcgtgggctacatgggcatcgttgaggacttttatcaacagcgcacgatgaggctcagagtttatgagcagttcaagcaacgagattcttgctggagttttactcagttgctcgactaccttaaactcgctttgttggaggaggcggaggaactcatgggcctcttccaaagtcactgtttttccttgaagaccctctntcttttcagccnctcttactaccggaggatgtacttctttcgagggggtagctacatctgt

SEQ ID NO: 185570 - DNA, 435 bp, Glycine max
  unsure (1)..(435): unsure at all n locations
agcttcctacaannggacaagagaggagagcctctcttcatcaccacccaagtagtgtttgattctgctgccattcacagtctctgtcctctttgtggctggatccttcaataccacaactccatgtggaatgacttcatttaagatgaatgatctggaccacttagattttagcttccctggaaacaatctcaatctataattaaataacaaaacctgttgtccaagcagaaattttttatcaaaagctttttatcatgacaaactttaactctttgcatataaagctcggaattctcataatcttgaaaccttaattcctccaattcatgaagttggagcttcctatgttcaccagctctgtttatataataattcaaaaacttctatgccgagtaggttgtgtgctccaacacaacatgtaagcgacaatat

SEQ ID NO: 185571 - DNA, 447 bp, Glycine max
tttctatacataggtggagaagtgaagtttatatggattcatcccctttttcacttctctctctttcgaatttgcttagaaaaattgtttccgtgaagaaaatccaagccgaggcgcttccgtaacgtttccgtgagtgatttcgcgaaggttttcgaccgttcttcgacgttcttcattcgttcttcatcgttcttcagtcttcaacgggtaagtacctcaaaccaagctttttaattcattctatgtacccgtggtggtccacatttggtttcatgtatttttattctcgttttcatttactttttatacccccttttgacgtgcttaagccatttatttaagtcatttctcgcttaacctataaataagataaatttccaccgatcgtttgaattgatcatccgttaactttggtgaaatgaattctgaccgatctgtcatgcc

SEQ ID NO: 185572 - DNA, 359 bp, Glycine max
tatgaacaaatcatgatacccactaaccccacaaattgtcaatcaatcaatatatagctgatccatatatctatgatttccaacaaaaggtaagggtagaatgactcttttccctttatatgacccctgattttaggtctgaacataacactactgcaaattcgtgtatttatcaactcttaattattttttgtgagtcccgataaaatacaatctttcggacatccatcatgcaatatctgacatctacaaattgttgaaaaagtttcctaaatctcaacattagccttcatcttctctggtatgaatacgacaactaaaaaacttctttatagtatgcgtattcttttattgcattt

SEQ ID NO: 185573 - DNA, 331 bp, Glycine max
tgctatggtgttcagctttcataaggaacacaacattatttgtccacatcacatacaatgcgtagatctatagtggacacagatacgtttcctaaggaccgtctgcatatggatactcctacccatagcatacacacatcgttgtatctaatgaactccgatccagccctaggatagccatacgtgggcgcacacataactaggattgccgctacggcgctaacatatatgcctttccatgtggtgacatcaatgcgttaggcacttgatagattaccccaatttgacaatactcgcaatgcttgcgactgcgaatgtcactaagcacacg

SEQ ID NO: 185574 - DNA, 347 bp, Glycine max
ctgaaaaaagaaactgaataggacgcccgcctaagagcttgatatcaatgaagccctgactagggggttatctaacgggaattaaaaacctgatgaccagggacactacaaccctgaaacagacggtcaatgtgatgcaaacgaaccatgctagactagaataatccatactattgtcgacaagccttcgccactcgtgacaagcatcacactgaattcatgtataattgtactcaaaacagtgacctctatgcttcccaagcgacttgttttgagacacatgagatgtaacatctaatgcatgctttgctttaattaatccttcaccaatttctagttccttggaa

SEQ ID NO: 185575 - DNA, 473 bp, Glycine max
  unsure (1)..(473): unsure at all n locations
cactcaagcttgnngaatgcaatgatcaaattcatgtgatgagcaagccttgttcctttgtttgaatttgctaacaaagatttagtatttaaaagagtgttacttttgtgtatgatgtatttgggcacttttaattttggtattgtggaagggtgttttaagcctgtaacaccatattcctttgtatctagattgatgatttgctggtcaatatcacaaagcatgtgctgcagccaaagtatgagatactcactgatgatgagaagaaagcactgctcaccaagcataatttggatgagaagcaggtaatacatgtttctaaacatgtcctgctaaaaaaatgattagtttattaattgcatgttgaaactaggctctactagcataacaacaatataatggccaccttaagagattgatcaagtggaacaagacaaagtctcttatgtgataggtcgcatgtttgaaccccg

SEQ ID NO: 185576 - DNA, 335 bp, Glycine max
tgtcaatgacgttcgaaataacactaattttttcttgctcacttgtcacaacacaaacctttttcttagcgactaaaacaattttaaatgctatattacccaaaataatttcaaagtatccaccgaaatagatttccatctcaagaaggctctcagaacgtacaaattttagtgaccaaaattaatgcattcgacattctgatattaacagtccattattactaatacttaaccattaatatcaataatatttacagtattccatatataatgaaaatactaaataataactgagtaatcataaaataatttgtagaagcacgcttcatgatgat

SEQ ID NO: 185577 - DNA, 420 bp, Glycine max
  unsure (1)..(420): unsure at all n locations
agcntcatgatgaagaatcaggtagattcttgttttttgatgataacaaagatgatgacaaaaagcccaagagaatgatttcaagattgactcaacaagtttcaagaatcaagagaagtttgatttcaagattcaagagaagatgaattcaagattcaagagaagaaatcaagaacacttcacaagggaagtattgaaaagatatttcaaaaaacaaacatagcacagtttttgttttcaaaacagtttttctcaaaattttctaagctaccagagttttcactctctggtaatcgattactagtttcctgtaatcgattaccagtggcaaagtttgattcaaaagtttcaactgaattgcaatgttccaattaatctcaaatggtgtatcgatacaagatattggaatcgattactaat

SEQ ID NO: 185578 - DNA, 448 bp, Glycine max
  unsure (1)..(448): unsure at all n locations
tgctcggngtctctataaaggactctattagcttggctatgagcttgttttgagctaataatgtgacttgggatgtgatctcaagaaggctcttctttgtaagcgtgtaagcttaatcacaaaggatggcatggtcactggctgccatattttcaatcagctccatagcttcatcaggtgtcttcagtttgatcttcccaccagtggaggcatcaagtaactacttcgaatggggtcgcaagccatcaatgaatatgttgagctgaaccggctcgttgaacccatgggtgggagtcttccggagtaaaccgtggaagcggtcaagagctctccacctttccctcggcagtcttggactctggaaaatatttcttcaaaaatntctccaccacctcttcccatgtctgcaaactatttcccttgacgagtgcagccatttttttgcttc

SEQ ID NO: 185579 - DNA, 431 bp, Glycine max
agcttacccttatggcttgcctccagacttttctccccgtgccgctccggatgatatgagccaagcccctaccttcgaggggcaactccttccttatgccgataattccctgcaagaagacgatgtaaaagatgcccgtctaggccctctactgccgctcaaggatccggccccccatgaatagccccaaccaaacatagtccgccatgtcccgtctccacccgcacccgttaaagaatccgttccctttgcaaaagataagggaaagattgatttacttgaagagaggctgagggaggtagaatgcctctacaactacccgttctcggatttggcggatctgtgtctggtacctgacatcgtcatccctcccaagatcaaagtaccagatcttgataaatacaaagggacgacatgtccaataagacatc

SEQ ID NO: 185580 - DNA, 443 bp, Glycine max
  unsure (1)..(443): unsure at all n locations
tgtncattttagttgaaattgtcaattttacacatgcaatcttaattctcaacacactntntggatgagtcttccaaggattgtgttgccttctctaacttttcttccttttccagcgataaggtaaagctacaaaattgagtctcccaatgtttgatataagttttgtaagaccatctttaattcgaacaagtggcttaaaggtgtaaatgcactgtccttccaagcgagcaactcagaggtgtaacaccatcttagaatttcgtatgagcatcttcattgaaaatggaagacttgaacgaaaatggttggcttgctccttattgttctgggaatagataaggatctatataatgagtgcaatgtatgaaggatggaaaaactccaatttatgtaatcccaggttaagacttgtagttcacactaatcaatgactaagaagc

SEQ ID NO: 185581 - DNA, 239 bp, Glycine max
tatctgtttgcctaatgccatgtcctagctaaagataatctttatgtttatgtctgatagtgtctatatatataccatcctacgtcttttaatgccacggtgtaacaatgagactgcgctacaactgacttttctgatattgacactggtgattgttttctactcttacgaaaactcccttgcattagtgtagacatgcatgttttaacccttgtcaccactttgtcttggtgtacctt

SEQ ID NO: 185582 - DNA, 417 bp, Glycine max
  unsure (1)..(417): unsure at all n locations
agcttctcaaggaagctacatgaagctgtctcttttaaaatgctgcccatacttcgttaaccgttggatcttctcgaaggttggtttgcggcttcacaagacacttttccatgatctgaccgttgggatctttgagaagatgcctggaatatgcgtgacgtttccgttcctgagagcattgctcacttgtgcgttttgagccttgtagtccaagtagctaaggaaaaacgccattttcttctccttctttcttccaaaaccatttaatcaatcaattgaaatattgatcctagggttcgtccctttcattttgtttaanaccttctattattctgcacaacaaggaaacataaggctntgggatcgatcgtgcgccccattgaaggatggcaatggattgtcaccctttggtatgtg

SEQ ID NO: 185583 - DNA, 437 bp, Glycine max
tcctttcaacaaagagaagagaaagatgaaagattgattatatacaagtggtggggatgtctcctccactgctaggacctcacaatcactcacaaactcatctcaagctctcaagacggcttccttttccagctctagtctctacagatcttcacacaacaaaatctctcaaactctctagaacttggacctttctctctctagaactctctagacatgcagaagcttcaagaaaaggccaaactcctctcaaaaatctgatttcaggcttaaataggtggctttgttcatgctcgtgtgcttagcgcaatctgaaccacttagcgcgcattagtgaatttcggcttagcgtggcttttctcgctcagcggatggctcgaagcggtgcgcttagcgggatggccctttgatcaacgaacaagcacagttcatccttc

SEQ ID NO: 185584 - DNA, 426 bp, Glycine max
agcttgtgtcttcttcacagatggggcatgcactatggcccttaacattgtaaccgctcaaattcccatatgctggaaagtcattaatggtacaaaaaagcattgcacacatttgaaaagtctcattctgaaacccatcaaacactaaaaccccctcgtcccaaaactttctcaagtcttcaatcaacggacttagataaacatcaatgtcatttcctgattgtcttgggcccaatatcatcatagacaacatcatgtatttttgcttcatgcacaaccaaggaggcaaattgtaaattactagcaaaactggccatgaactgtgttgagtgcttaaactgtcatatggattcattccatcactagctagtccaagcctaagatttcttgcctcttagccgaaatccggatacaaactatcaatct

SEQ ID NO: 185585 - DNA, 454 bp, Glycine max
  unsure (1)..(454): unsure at all n locations
gcgctggcttctatacaccgtcatatgtagaataagtgatcacttattctctggatncacgatttacactatgccattctcgacgcctctatcatctgaaggatcatgattgttgcacccgcggagctatgctttctacgaccatcacaatactctatggctaactgctgttaacgctcgagcctatgtgacggccattaccacccctgagtcagctgtagcacaatatataatatcctaatggtaactgcttgtgatgacttgctttatctctcctgaaatgaactcgaaccctctaatgtgccacacaccataatggcattgcacatctgttgcttcttacttcgcttacatggtatccactcttttgtgtatactctaattatagcaactctctctgttccaaacactctttatttgggtgacattctcggcgaatgacactaagtgaaag

SEQ ID NO: 185586 - DNA, 429 bp, Glycine max
  unsure (1)..(429): unsure at all n locations
agctntgaaaggcctaagcctagcctactttttatctttgaggcctgagcctggcctatagcctatcaaaggcttttattttggctcggcctgacctttttaaatgcctggcctagcctgatagcctttttaaaagccttcttctcaataaatatttaatattttatggagtaggaacataataggaaagttaaagaaaaaggaaagtcaatcaaaataatgaggaatataaaaaggaacatgactcacacctaaattgtaattaaagtccttgattataggaatagaagttatagagcagtaatgtgtaatcaaagtctgatagtttcagaaaaaaattaattgtatccaaaaaataatataagtatatatatatatatataggccggcctatcangcttataaggctttntaataagcctaagcctg

SEQ ID NO: 185587 - DNA, 449 bp, Glycine max
  unsure (1)..(449): unsure at all n locations
tccttgagaagctagagcttagctacacacacccatcttataactaagctcacctccgtgagaagctntcttgagaagctagagcttagctacacacccctataatagctaagctcacccccatgataaaaaaacatgaaaatacaaaaaaaatcctactacaaagactactcaaaatgccctgaaatacaaggctaaaaccctatactactagaatggccaaaatacaaggcccaaaataagaaaacaacctattctactatttacaaagaagagtggacccaaccttggcccatgggctcaaaaatctaccctaaggttcatgagaaccctaaggccttctttatcaactctagcccaatccacttggagcctcttgctcatggctctggtaactggtcctttcctagggaggattgcatcaacaaccacagagaagactcaacccg

SEQ ID NO: 185588 - DNA, 431 bp, Glycine max
  unsure (1)..(431): unsure at all n locations
agctttgacttgagtcatcaagagattataaatatgtgaccatggcatgagtttaaataatcatcatcaatcatctttgaatcatctatctttcaatctttttcaacatcatctctcaaacatctttcaatcaatctttcaatatctttctacataattttctgattcatttctcttcatatttctaaaagttttttatcaacactntctcttccaagaaaagttctttgttcaaaaacttatgctattcatctttttcgttctcttctccctttgccaaaagaacgaaggactaattgccttaattcttttgtgtctctcttctcccttacaaaagattcaaaggactaaccgcctgagaatctttcgattcttctcttccccttaagcaaaatatttcaaaggactaaccgcctgagaattcttttgat

SEQ ID NO: 185589 - DNA, 426 bp, Glycine max
agcttgctaaggaggaatatgttatcattcttctatttataatcataaactccgctgcactcgacatattattttgcatctttatgatcaattcctctcgtgacataacttgtaatgtaaaatttgtggctgaatttaatttactcacacatcttatttatgttcaataattcaaaataaaatatcaagatcaattaatcaactttaaaacagaaaggatgatcctatgttgatgttcatctatcaataaattttcctccttgcaattaaagctccaatagggagaaaaggaaattctaaaaacaaagaatgttgacctatgaacatttatggttgagcttcttcttttccttcattcagcgcatgtcttttttgttcttcatgtgtgaagtttctaattgcttttaactcctttatatattcatt

SEQ ID NO: 185590 - DNA, 434 bp, Glycine max
agctttctctagttttctcccatggcagccatggatgtttctcttcctctaagcattcattcttccgataatcccggattgatgcttgcttctctcatcctctgtctggagacaattatagttcttggaaaaaggcgatgaagatggcacttcttggcaagaacaagttcggttttgtatatggttccattccagaacttgctactggatccgctactcattctctttggcatcgcaacgataacgtagttgcttcttggcttctgaattcactttcgaaggagatgtaggttagtgttttgcattgttcttcagctaaggctatttggagtgatcttaaggagctgtttgagcaacgcaatggccctcccatttatcagctgaaacgcgatcttgtttcactgcagcaggggccatgtcagtttcttcttatt

SEQ ID NO: 185591 - DNA, 365 bp, Glycine max
gctatagacatatttgaagaccaactataataaggaatctggaaatttttttttcaacccctcagccaggtccataagagaaacagagtgctatctgtcagtctagtgatatcaaaggtttgattctggaaaattatatcatttctgagcctccaaattgaggttgtaactgctatccaccacattgtccttcttatgttagcatcctttgaaactgttgaggagaaatgctgaagaaaattgtccaaaggtctgcagtgaaatgcgagacagtgggatattcaactattgatcatcaaataactaagtgtactaattttatccatatatattggatttattgattaacactccctccccccccc

SEQ ID NO: 185592 - DNA, 410 bp, Glycine max
tatgtatggacatttttgtatttattagagaaacaaatcttgttgtatgggtaacgctgactctagaacattaccattgaatttaatgatgaaatctgtgccttttccagtgaagatgacgctaagtttcgaattgcaaaatgtaccaggggggctaacctcaagagctgggctaagcgcatatccaccgcttatcatagcttcaacgtgcttaacgcaaaggagaatctgacagagcatcagcattaaaggccgcgtgctaaacgcgagatcagtgctgctagcatagcaagtgccttcagccatgctaatctcgagactggcgctaagcccaatatcacttactcgcgcttaacacgagcgtggcgcttagcgcaacattatgattttagagcctatttaaagcatgc

SEQ ID NO: 185593 - DNA, 440 bp, Glycine max
  unsure (1)..(440): unsure at all n locations
actattcaaagaataaccaagaaatatacattcatcatatctgtgcatcatacttgtccaagcagncatttccattatttaacacaaagcatttacatccaataatatgaagatgggaaatatttggttttctccttttatatagttcatatggtgttttctataaaataggtctaattaatgctctattcattataaaacatgcactattaatagtttcaaactaaaaatatctaggaagatttgtatcattaagcatggttcttgctaattcttctaaagatctattttccctttcaactactccattctgttgaggggttctaggtgtagaaaaaatatgttctattccatcttcatcacaaaataattcatagtctttatactcagattcccctccatgatcacttctaatggatgcaatattgagatctttctta

SEQ ID NO: 185594 - DNA, 428 bp, Glycine max
agcttggaggctactaaactgaggtgattgcattgtgaactttgttttcaacagaagaactggtttaataagttcatcaaaatcgtccaactgtaaatccaaggagtcattgtcacagaaagttgctggctcaaatgattgatcgaccgtgtctaaaacttcttcattcacatcatctaggctgatgtagtcagaaagttcctcttcaagttcaccactctgtctatgtcgctttggagccaacatcatcccagattcagaaacattagcaggaatagaaccaaaataacgccctctactgttgttttgatatgcagttctcttccttttctttcccttgctttgttttttggggtgatgaagtttacatttggttccttgagtacaggttcctgtttcttcaaaagtaagacagacatagctgtgct

SEQ ID NO: 185595 - DNA, 482 bp, Glycine max
gctattacgcgaccttagatactcagcttggaataattatttttattactctccctacaaccaagcagaagcatgaaactcccgatacaaactaactgagaatgatgctttcaacagagcatgttagctcaagcaagcacaagcagccatagagaacaattcttgatgttgaatataaaacaaaacaaagaattagaaatgggttaagctttccgatgcaaaggatctagccaatgaaaaatatcacgacagtggggcatttcatcgaacaacattagtgcaccacaaaacatgttctcatgggaaccataaccccacaaacacaaaatcaaaattagacccaaatcacatgtgaacacaatctccatatcccataaactaaaacataaaatttggagaaatgttgtaaaaatgtgaaactgcgagaatgagagaagaagtgttacaatgaaattgttgaacttgagaagggaggagcaagc

SEQ ID NO: 185596 - DNA, 433 bp, Glycine max
agcttcaggctgctcaattgctccaggttgctgcatagaagggcaaaggtctgtctggtggtcggtagaggagcataaaccacagagtattgcgacaggtacagatttttgattcatggccagttgggttaccaagttaaccaaggcatctagtttaccttcaagcttcttagtttcagatgatgcagatgagtttgtggctacctcatgcacccctctaatgactatagcatcatttctggcgctaaactgttgggagttgaaagccatcttctcaattaaattcctggcttcagtagaggtcatgtctccaagggctccaccattggcaacatctatcatacttctctccatgttactgagtccttcataaaaatattggagaataagctgcttcaaaatctggtggtaagggcaactggcgcatagtttt

SEQ ID NO: 185597 - DNA, 457 bp, Glycine max
  unsure (1)..(457): unsure at all n locations
tctntgagaaaacttcattgagaagctagagcttagctacacacacccatctaanaactaagctcacctccttgaaaagttagctacacacacccatctaaaaactaagttcatctccttgacaaaatacatgaaaatacaaaaaaaaatccctactacaaagactactcaaaatgtcctgaaatacaaggttaaaaccctatactactagaatggtcaaaatacaaggcctaaaagaaggaaaaacctattctaatatttacaaagaagagtggatccaaccttaacccatgggctcaaaaatctaccctaaggttcatgagaaccccagggccttctttagtagctctagcccaagcctcttggagtcttctatccaatacccttggacgataggattgcatcactttctaaaatacacagaagtagagagcacctctagtttctttctcccaac

SEQ ID NO: 185598 - DNA, 431 bp, Glycine max
  unsure (1)..(431): unsure at all n locations
ntgcttccacanagataaagtggttatccttggagttgtatcatcagagaagaagtgcttggctggagatgggaggccatggagtggatctgaaaaaagtctagagtacattaaaatgacatcattttctttgttttttttaaaaacaatccagcatgtataaatagtaacaccaaaggttacacgtgacacgacacatcacactcctatgtgtccagttaatggccacataggtagttaacgattacggactaacgataaggacctaaggcaaaatttttgaaatattagggacccaatccgaaagaaaaatttactaaggagcaaacacaaaaaacgtgtatttatcaggaaacaaaaacatacttaagaattacaaagagttgagtttttatattgatgaaatcctacccncaagggtattggataga

SEQ ID NO: 185599 - DNA, 402 bp, Glycine max
  unsure (1)..(402): unsure at all n locations
agcttgttcgtaagtctcatcccatatcgttggctcaattntcttgagtggtttgttaaatggcttcaccttctcagcaagcttcgggaggaacctagacagggatgctagcctaccatttagtttttgaacttcttagtcgttgatcgagttgtgcatctccaatatggcagtgtatttatgggggttagcttcaatcccctggtaagtgatcatgaagccaaggaacttgcctccgcttaccccgaaagtacatttttcagggtggaggcgcatgtcatatttgtggagttccccaaagacttcttccagatccatcatgtgttaggctatgctttgagacttgatgaccatgccgtccatatataactcgacgtttcatccaatctgttgtttaaatac

SEQ ID NO: 185600 - DNA, 431 bp, Glycine max
  unsure (1)..(431): unsure at all n locations
tgaagcaagagccggnttgagagcttgagatgagtttgttagtgattgtgaaatcctagaggggaaggagacatcgtcaccacttgtanttttgcaatctttcatcttgttcttctctttgttgttaagaaggcttcctggtatggaaagctaaatcctctgttggatcttccctgtaggtacctgatgtaaatatatttatacctatttaatgatgttttgtgtgttctctgtgctatctacttttcattccagtatgcctttaccttgaacacgtagatgcatgctctgttagggtcattcaatagtggaaactggtctgactctaaagtccttgatagtgtagggctgagttgtcgtgctttcatgaggaatcggggtgtgataattaagttntgtatgtgtgtcttaatgcggtcctggttgagttt

SEQ ID NO: 185601 - DNA, 420 bp, Glycine max
  unsure (1)..(420): unsure at all n locations
agcttggaaggatgcttcaatggaggaattttttagggagagaaagagagaggggggagcacgaaattgaaggaataaaagagggagagaagtgaaactttgaagtatgtctcacaagactctcattcatcaaagttacaacaagtgttacacatgtttctatttatagactaggtagctttcttgagaagctttcttaagaaaacttccttgagaagcttctttgagaaaacttccttgagaagctagagcttagctacacacacccatctaaaaactaagctcacctccttgagaagcttccttgagaagttagctacacacacacatctaaaaactaagctcacctccttgacaaaatacatganaatacaaaaaaaagtccctactacaaagactactcataatgccctgaaatac

SEQ ID NO: 185602 - DNA, 447 bp, Glycine max
  unsure (1)..(447): unsure at all n locations
tcaggttgctcatngacttcagatnggtgtttataaggacaaagaattgtatggtgatttgctgaagaacatataccacagactcttgcaataggtgcagatgcagatttttgattcatggcaatctgagttactaggttgaccaaagcatcaagctttccctcaagctttttattttcagtagatgaacatgaatatgtggccacctcatggactcctctaaggacaatagcatcatttcttgcacttaattgttgggagttggaaatcatcttctctatcaagttcctagcctcagcaggggtcatatcaccaagagctccaccactggcagcatcaatcatactcctttccatgttgctaagtccctcatagaaatattgaagaaggagtngctcagaaatctaatctagtggtgaggacagcttgcacttaatttcttgaatc

SEQ ID NO: 185603 - DNA, 431 bp, Glycine max
  unsure (1)..(431): unsure at all n locations
agcttgtatctggggattcactnttgatctcaactgtaccataaggaaaaacattagtcaccacaaaaggaccaatccactttgacctcaacttaccactcatgagtccgagcctagagttttacaataagactttttgtccaaccacaaagtccttcttagctatcaagctgtcatggaacttcttggtcttctctttgtagaatttggaattctcataggcttctaaacggatctcatctagctcacttagttgcaacttcctttcctctccagcctggtccattgagaagttgcaagtctttacagcccgataggctttgtgctctatctctacaggaagatgacatgtcttgccaaagacaacccgataagtaaacattcctatgggtggcttgtaggcagtcctatgcgcccaaagagcatcatct

SEQ ID NO: 185604 - DNA, 350 bp, Glycine max
tctgctcgttaaaaaaaccaatcaagtctaacatcaaaatccccggccgaagcaatggtggctgactacatgttcagactcaccggaggaagacaagcaccatggtggtagtgggtgcacctacattgcaccggagaggaatagatctgacaaaacgtgaaaagatttaaaaagatggccagagaaaggggcggcacgtggcaactccgatggcgccgaagaaaggtgggcttgaccgaccatgaagagacgagtctgatggtgctagcagcgacagcttctgcacagcgaaatatggttcaccggataacaacactcgccagaaaagttgctggaaaacaaaaactgtt

SEQ ID NO: 185605 - DNA, 441 bp, Glycine max
  unsure (1)..(441): unsure at all n locations
aagagacaccanggacgcgagtactancatatttgaccaggcttttttggaanaacaaaaggctttagttggtgatatgggcctcacctatggtcaggaaacccataaggtcatggacttcatgatccagttggagcagagagacaaagctgaggcagtcgagagaggtatcatgaatcatcactaatgattatcctatcatacaattgtagagggctgggaagggggatcaaatggactgctttaaggagaatcaatctaattcacaagattgatcttgtttgtattcaagaaacaaaaagggacaaatttgataaaatcatttgtcaatcaatgtggggggattccactgtctcttgagacagtgtaccctttgttcatgctgatgggggccttctttgtctatggaacaactcagcttttcaagtggagaagacaatt

SEQ ID NO: 185606 - DNA, 448 bp, Glycine max
  unsure (1)..(448): unsure at all n locations
aagcgaccgagctgcagcttttggagaaagaagagaagcggattgttttgcattttctcnagcaacaanagcgaaggtattgtgagaagtctaaaaacaaaataaaaaaaatttaaacttttgtattatcagaagtcacaaaaaagacaaacttgcactcacagagttttgaaataaaaatgtcaagtttggtgtgttctttacatataaactttggtgtgttcttccactcagaccacgatatagaaatgccgacctggagaggaatgcaaatatgatatcgttgtcatggaatctgagataaaaatcacagctctggtgtaaaaaatcatagctttagatgtaaaaaaacgcagaataacggggagaatgaaaaaatgagaagaatgaactaagaatgtggagatatctattgttgagagagaaatgagagaaagtgaaaatggtt

SEQ ID NO: 185607 - DNA, 224 bp, Glycine max
tatgcatgataatagaattgaacattaaaggtatggagaataattatgatcttcacctttcttagaggggacaagatcttccacaactttatggcctattggagactataagaccatgtattcctaacttaatcactagtagattattcccttcaaaggttaatctttaatgatcttaagttgacaaggaattctgtagttcacaattttcttggtgaatggat

SEQ ID NO: 185608 - DNA, 442 bp, Glycine max
  unsure (1)..(442): unsure at all n locations
cctgcngcatgcaagcttcctaggctctccctttagctcagagcctctctcccaaaaccctaaccctctaatcattgtcattagcggccctagtagcatcggcaaggatgccttcatcgtgcgcctccatgactcccgtcgcggccttcatttcattgtcactgccaccacacgcccctgccgtcatgccgaggtcgacgagaagggctacatctttgtctccaaggaagtgtgttctcaagatgctggatttgtctgcacttgattgatttttgcccaacatcagttgttctcttcccataattctcaatgaatcaggatctgtgagtttctcttattgtctccttctttttttacaattatttccataattgctccatgtttttatttctgtgacctaattcagctcatgtgtagtctacacatggcatctaaatcctct

SEQ ID NO: 185609 - DNA, 462 bp, Glycine max
  unsure (1)..(462): unsure at all n locations
tctatgatgaattcncttaattccagacacacaaaaagatatggtggcccattntgtgagagataatgaaaggaattatttaaattttctcttgaaaatgaaaaaaaatacaccgtgcaatcatgggttggttgttagaaaatcaatttcaggtgttagacacatctcaatctaatcattctctcaaaacacagtgaacaacattgtatgtcaaaacacagtgacacaaacattcaaagaatcacagcagagacgtacctcaatcacagtgactgagaccgaatggaaagacacagcttcaatggcagcttcaacggtagtggtaccttcagcgcagcttcaatgacagtggtagcatgaagaaagatgacaaatgacaaanggcaatgtgtttgagcgcgatgagaaatgtcgaatgagaaagctctgatcacgaggggcctatattttaatttgcatgtg

SEQ ID NO: 185610 - DNA, 450 bp, Glycine max
  unsure (1)..(450): unsure at all n locations
cactatnaatactcacgcttattcactccacccatatctgacctgactttaaccatacttaacaccgcggaaaacaatgcaatgaatagttgcactccgaatacaaagaggctcctctgaaacagtttgcaatgtaatatacatttgtgcgtgtgcttgctgaatagactcttgttcacaatcaataatcatatactctaagtaatctcccatttctacatcaaatcgacttagaatagggaccttttatgcattgttgtcaattcactatgccatatcaacaatgtataataactcttaatcctatcaacacaatgatgttcctgtatgtcatcgagtatttggtgtcttcctttccgacaaattatactacgacaaaacaaaaattgtccttatctgatagacttgtgtcaacatcacaattgaagaaccaactcaactccttcttat

SEQ ID NO: 185611 - DNA, 456 bp, Glycine max
  unsure (1)..(456): unsure at all n locations
taacaagttgtgttcacagctggactggcccctctgcgtttctttattgttaattgaatnttcttatgctaacacataaagacgcttaccctttacatcttcttgtgtttgtgtttatatattgagcaattgagtgcttaatttatatcatcaaagtggatacaaatgagcaatatgtagaaaagaacgataacaatatgtaaatcaactctcaatttttatttttaatgccaaataaatcttacacaataaaagagacgaaatacaaatttgatttaataaattgtatataaatttatttaataataaaatatattatttatatttcttaaaatcgtataaatgttcagttaacatcactcattttttaaattttatgttcaaacaattgttcttgatcttttgcgcatgtgattatttgctagcagacaaaaattactttcattaatgtgctac

SEQ ID NO: 185612 - DNA, 415 bp, Glycine max
tatggggtatagaggcattcacgatgttgtgtgatctcatttagctccgaccagctcaagtttgccatgactaacgctcccatgctagctttaccagatttcacataacccttcgtgattgaaatcaatgctatcgagatggccattgtagcggtgcttatgcataactgacaccctctggcctacttcagtaagggccatggtcctcgactaatccatgcctccacttatattcaagagctccacaccatcattaaggcagcgcgaaaatggaggcaatatctcttgggacgatcattcaccattctcacagaccacaatagccttcgcgaggtgatgacacaagttatccatacctcggagcaacattattacctctgcaagttactacgatacgattattctattcagtaca

SEQ ID NO: 185613 - DNA, 431 bp, Glycine max
  unsure (1)..(431): unsure at all n locations
agcttgaataatttggggctgaatggctttctttttatgcaatngggtggcccttctacgaaagcactgctcccatgcccacccctgaggcgtccgtctccagggtaaaagggagggagaaatctaacaacataagaacaggagctgaggttagagcctcctttagggtcttaaatgcttggtcagcctcgaaagtccattcgaaaggatccctagtggtgagcttgaccaagggggcaacaatatatagaggcatacccttgaataaaccgacggtaaaaatcggcgagacccaaaaaacttcatagagatctcgtggttttcagaatgggccattggtggatagtgtggactntanaagtgactggtgtaaccccttgactcataaccacatgccccaagtactccacctgttgctgcgcaaaaaaaca

SEQ ID NO: 185614 - DNA, 413 bp, Glycine max
  unsure (1)..(413): unsure at all n locations
tgcctcaaactcggctatttaactctgtttcatgaacaggtnactgtgtctcctgcaaaaccacctccgaagcccgatcccgaggtcgatgatccgctttatctgatgacattgagcatcccagagcttttcttgaggccttagtaggttacatgggatgccaccgtgctctgggtctgtaatccaaaattgcgactctacataaagcacgaatacctgtctgaaatcgcacacagtggacaatgcctcatcatataagagatacagatatggattcttgaagtctttatataaaaggcttttcatcacctaagatatggctttctattcgttaatatataactctgacttaacatatacaagcatctcactgacacatgtatgcgagtggggacatatgatatctattgatt

SEQ ID NO: 185615 - DNA, 420 bp, Glycine max
gcttgacattaataaactttgtttttttagtgaacttaaataattcatcaataattcaactcatttacgtccttatctcaagaaaaagaatattaagtagtatgctttttatgaagtttgaacaagaaaaaaaaaaaaaagagcaactaagtgtgtatttggattagttgtgaaaaacaaattattttaataattagttatatcaaataaattttatatttagatatattaagtgaaatttgttctaagataatctatttagtttgggttgtactgtgtgaataatcattattaagagtttgaaaatacttttagtaattaattttatatttaaattaataaattgtttcgtataaaatagaaaaagcaaaaggtagcccaaaaaatattttatatattaggttctaattacaatcttca

SEQ ID NO: 185616 - DNA, 447 bp, Glycine max
  unsure (1)..(447): unsure at all n locations
tgcactaaacctttacgtgtacgttgtgtttgtctaatttttattatacgacaattttattaattcaacatatgtttagaaacacatgtggttcctgcatcttcaatcatgattgatcttttgagcctgaatgagtcactcggatcttaaagacgaattagatgcggtagtacctctatattaatggcgcacataaataaataaaaaaactgataaaataattcaatttattaaataatcatgcaacatacataattcgaaatcactatttgaataaaattaaatagtccatgtacttgttagccaaatataaattgtcatatgtgattcttttaaaaaaatattatattataagntttttaatctttataataattaatcttttcacacacaaatanttattattatagctttgatttgaacacaagttgtgtcaaagtctatctg

SEQ ID NO: 185617 - DNA, 415 bp, Glycine max
  unsure (1)..(415): unsure at all n locations
agctngcagtgctcttggaaacatgtgtctttatatcgcctatttttatagntcacttgtaagtattataagtaatgctatttatcgctagagtactttataaacataacggaaattaaaaggaagaaacaatgatatttttgtttgatgaaagctacttcctttttcatgatttaccctacatcagcccttttttcatccagttaatattttttggtttgctgttaagcaattatttctttttcaagtcctagatatatacaattttgtaaactagatttatactgcggctgctatctgtaaggaaaaataactgttcctttctagatgacagagcacacattacattaaggtttctgatactctgctttctgctgttctcctattttgaattctcttatttacaattgggatt

SEQ ID NO: 185618 - DNA, 440 bp, Glycine max
  unsure (1)..(440): unsure at all n locations
tgtgggagtttgtgatagtggatttgccggttatgttgatgatagaaaaagtactaccggatttgtattntttgtgggtgattgtgtttttacatggagttctaagaagaaaggcattgtgacactttctacttgtgaagccgagtatgtagctgcaacttcttgcacatgtcatgccatttggctaagaagattgttggaggaacttcagttgttgcaaaaggaaagcacaaagatctatgttgataatagatctgcacaagagcttgccaagaatccggtgttccatgaacgaagtaagcatatagatacaaggtatcatttcattagagagtgcattaccaagaaagaagtagaattgactcatgtgaaaactcaagatcaagttgcggatattttcaccaagcctctcaaatttgaagattttcgaagattgcgag

SEQ ID NO: 185619 - DNA, 432 bp, Glycine max
agcttttttgtgaaaggatgtgactcttcttatttgaatttgaatttcaacgttcaaacactctcgtaatcgattaccaaaacattgtaatcgattacaactttttgaaattaattggaacgttgtaaattcagtttgaaaactttttcaaatccattttgctactggtaatagattacaataatctggtaatcgattaccagagagtaaaaactcttttgtaaacatgttttgagaaaaattcatgtgctactcagtttttgaaaaaaccttttcatacttatcttgattaagttttttcttgattcttgaatagccttttcttgattcttgaatcttgagtcttgaaccttgatttcttgaatcttgattcttgaattcaaccttcctcttgaatcttgaagtgttcttgattctatcttgaacatcttg

SEQ ID NO: 185620 - DNA, 444 bp, Glycine max
  unsure (1)..(444): unsure at all n locations
tccttatgtggtggctcgtggtccacaggtgtaccccttttatctccctaacattntattaggataagcaacataatagttttttagcactaacatgttgtttatggtggtgtatgggagacaaggataagtttcctctttttgtaaacgtcattacgtactctttatttatattcactaacaatataacatagtaattaaccaaggggagatacagcaagacataatttgtccaaacatggcagtaaactaaattaaatacactntatatgagtaaagcaaaacacaatttgtccaaacacaatttgatatgagaaatttgtctaaacacaattttaaagtagctcaattaaattagcttgttttatgaagaaaaggccaaactgagaaataaaagagcttctgctattaagaagttaaataaagggcaaacactcccctagt

SEQ ID NO: 185621 - DNA, 465 bp, Glycine max
  unsure (1)..(465): unsure at all n locations
agcttctaaactttatacaagagtgaagctctgatacttcttgttagacgaggggcctcagatatcttatgaagggggggttgaattaagatattccaaactacttccccaattaaaatctatttcactttttattcgagttataaattcccttaataatgaacttcttaaatattgattcaaataaaacaatttgaatatgaatataaagcaataataaacaaaggagattaagggaagagaaaatgcaaactcagatttatactggttcggccacacccttgtgcctacgtccagtccccaagcaacccgcttgagagttccactatcttgtaaattccttttacaagttctaaacacacaaggacaatcctttctttgtggttagaattccattacaacaagagactcacnggctcttaatcccttagagaatgaggagaagaagaagaatatatctctcta

SEQ ID NO: 185622 - DNA, 302 bp, Glycine max
ttgatttcattcaccctttcaaattttccacaaaaagcaaacgagatttattttgcaatgcttcttgatatctggataatcattaaggtttcacgaaaggttaaatcatacgaagtggctaacctctgatcacccatatttgcgaaaccccacctcggtgttaaatatttcacacactattaaatccacagtgcaaaccactactgcagcataattgaaagcaaccttctactctatctaattagttcgaacacaacttagcacttcccaaaatacattaatgcttatatataattgttgct

SEQ ID NO: 185623 - DNA, 391 bp, Glycine max
aaaaagaagccttaaaataaacaagctaaccctttaggaaaatcttctccgtgcttgctggctcgaaagaaactaagttgaaaaaaggaccgtgaattattttacaacataaaaatataaattactagataaatgaatgaagatcgtgagagccggggaagacaacctcgagatttgggaactgacagtgattgttggtcgcacggtaacagtgtttaacttcatggcaatgatcgcgtgagggtatcacgtgaatctcatgatctgacaccatgcgttgactgttcatttccttaaaaaccgtggatagtttttgttatgatcgtgacgggaatggcggtgaaatggaactggcgttattttgatataagggacgtttgtaatggaactg

SEQ ID NO: 185624 - DNA, 458 bp, Glycine max
  unsure (1)..(458): unsure at all n locations
cttaagtcacctgcggcatgcaagcttgtaggattatggggtacccatcacatgtggttcttgtggttgtcgggcgatggngcacaacaagttttccacatccacaatgcgcgcataaacccaccatcccctgttgcccacctccatctgagctcacgtactcccacgtagcccatatcctcgtttctctcaacaccgagtccccatcaatcctcccaagcttccacaacatccaagcaaaacaacattcaaacaacacaagctatcacagccaagcaaaatagggcaaaggcagaaaactctgccaaaacaccaaccaaatcacagcttttctcacttaaagaccccagtaacaattccttcgatccaattcgttaaccgttggatcgactccaaaatattactggaagtctatagtacataaacctacattgtgaccgttggatctactagcaaca

SEQ ID NO: 185625 - DNA, 361 bp, Glycine max
  unsure (1)..(361): unsure at all n locations
acagncgccgcccaactatccgaaagggatgacaatataatcaatgtcctcatctcatcctcaaattaaatctgtactaactccaactgggcaagaatagtattaaattcattaatatgatcagttacagagataccttctcccatcttaaggttggacaaccgacacatcaagtatactttgttggctatcgacagcttctcgacatatctgataacgccttcattaagcctgcagtagtctatttgttacgatgttgaacgtgacgttcttgactaatgttaatctgatcactccacgagccttgtgatctaacaacgttcattcttcttacttcatgttatttgcctaacccctgata

SEQ ID NO: 185626 - DNA, 401 bp, Glycine max
  unsure (1)..(401): unsure at all n locations
ttctattttaagaaaatgtcttataattaattagcatttcctttaatttttataagaaaaattatttgacaattaatccttgtttttcaagacatgaaattaagaatagtctaaaagcttatagctacatgtattttattggctcgtattggtttaattttgattttcaaagataggagaatcatactatgtgttcttccattatatatatatatatatatatatatatatatatatatatatatatatctcgatgctcctctgattgatgtgaagtttatgtcttgtctaatgccttatgtctgngtttgaatcaccttcacacgtgcatatgaactacgaatttattcttcgtgtgtgtgtgtgtcgtgtcagcactttcctcaagatgtatatatcat

SEQ ID NO: 185627 - DNA, 437 bp, Glycine max
  unsure (1)..(437): unsure at all n locations
gatccttaagtcaccgcggctgcagcngncattatatatgtgagtctgttttttaaataggccaacatatatgatctagtgatctatagtttataacacaaacatttaccaactccaataataataaattttattttacgcacccattttattgtatttttataaaatatctatgggcacaattaatataactcaatcacatataacaacaaatatttgttcgacataagaattcttccttaaaacctcgacactaacaataattcctacaatctgaattatttatgcatcctcctatacagatgtaggcaactccaatatattgttttgttattggttctgcagtgagaacaaagttcacaatatttggataaaaaaattgatgtgaagttcattctaaattaacctgaatataattatttttttttggttccttt

SEQ ID NO: 185628 - DNA, 463 bp, Glycine max
  unsure (1)..(463): unsure at all n locations
agctnggaaggatgcttcaatggatgttatgattaagggagggaaagaaagaggggggagcacgaaattgaaggaataaaagagggagagaagtggaactttgaagtatgtctcacaagactctcattcatcaaagttacaacaagtgttacacatgcttctatttatagactaggtagcttccttgagaagctttcttgagaaaacttccttgagaagcttctttgagaaaacttccttgagaagctagagcttagctacacacacccctctcataactaagctcacctccttgagaagcttccttaagaagattccttaagaagctagagcttagctacacatacctctataatagctaagctcacctccttgagatgagaagctagagcttagctacacacccnctataatagctaagctcacccccatgacgaaaaacatgaaaataacanaaaaaagt

SEQ ID NO: 185629 - DNA, 451 bp, Glycine max
agcttttaatgtggaggacaggttacttttatagagagttatgcactttttttaattctaatgtgattatgcatgataaatttattaatttttaaaataattattttatagttattcaaataatgattagtgattagatgataatgtaaaattggttttacattgacagtgcatagacattaaactcacttttaaattataaaatgaataaaaacattttcttgtcctactaaatatgaaattgttcaaaattcaatatatattttcgttattgtaaaattgaaatgtatcatttttagacctaaaacaagattcagatatctaaacatatgtattatttttttttacgttggttataaatgtcatatttatatgtataatcaatataaaaaatgttacaattatatcggttatttgtatcatcaatgtaaaaaactgttattgtagattc

SEQ ID NO: 185630 - DNA, 447 bp, Glycine max
  unsure (1)..(447): unsure at all n locations
agcttcaagagaaatggcctcaacaaacttcttatttccagaaggaaattctatcaatagacctccaatctttaatggagggggttaccactactggaaaacccgaatgcaaatttttatcgaggcaatagacttaagtatttgggaagccataaaaataaggccttatatacccaccacagtagaaagaattacaatagatggaagcacatcaagtgaaagcataacaatagaaaaacctagagataaatggtctgaagaggatagaagatgagtacaatacaatttaaaagccaaaaacataataacatctgccctgagaatgaatgaatatttcagggtttcaaattgtaagagtgctaaggaaatgtgggacactctacaattaacacatgaaggaactacagatgttaaaagatctnaggataacacactacctcatgaata

SEQ ID NO: 185631 - DNA, 469 bp, Glycine max
agcttagcaacagtcccaaaacccaatatttcctcaaaccaagtgttatgatttctatattaccaattctgctagctgttaatgttgcatcatagttttgctatctcatctacctttggtttcatttctttaccttacaattcaggcagttctatcattaccctttttcaatatacagaattggcaacatgcaaacatatctaatccaggaaattccaccactaatagtcagcctataatccataaccaatgaaatgccccatctccaatttattcaatcttctaattttattgtagtttctgcagatttaaaataaacgtttggttattcctttcaacataaatctattggttagtttataattcactcaattctgcctttagtcattttcaacatgcagaactatcaacatgcaaagagatctgattctgcaaaagccaggatcaacagaaaacgtattatgcagca

SEQ ID NO: 185632 - DNA, 435 bp, Glycine max
  unsure (1)..(435): unsure at all n locations
agcttaaaggggggaaggaaataactctatcataacacttacagggagagaaattntgataaaattagtggttcattcaacatccacttatgtgatgggttgttctctcttccctcagttcatctatcaagagataaaaacgttaattgctcacttcttttgggggggtgacttggatggaagaaaaatccactggttgagttggaagaaattgtttgaaattcaaaaagaaggagagacaagcttttagtttgttagagcattcaacatctcactcttaacaaagcaatgatggaggatgatggttcatgaaaagcacatgatgcaagagtggtaaaggcaaggtacttcccaaacactcctataagcaaagcaaaaaggagcttcaaaccaagctttgtgtggtcgagtatttcggaagcaaaatgtgtcatg

SEQ ID NO: 185633 - DNA, 456 bp, Glycine max
  unsure (1)..(456): unsure at all n locations
atccttaagcacctgcggcatgccaagctttattacttccagtttcaaataatgattaatatgcattntataagctgttagagaggtctgattacagatagtgtagtctaacctttctaatcaattcttcattaagtgttaacatatcctcgtaaggagtaaaggtcattttcatgtctagttgggtgaactcaagttgtctatcagctcttaaattttcatcacggaaacatctggcaaaaaagtaattgcattttatccaaaaagaaaaacggttggaagaaaccaaaagataaataacgaagtcatgccttcttcccctcagtttcccctttgattgttggtgacagcatggcatcatgcctttacaatacagaaaagcatctttctcaagtagctttaggacagtatatgttctgcgttccttcaaagctgacaatgaacagtttatgttct

SEQ ID NO: 185634 - DNA, 440 bp, Glycine max
  unsure (1)..(440): unsure at all n locations
agcttcttgngcaagnctacacatgttaatattatatgttaaaattgtatagnattggcaatgtaaggataatatttccatctagcccacattaagagataacattgtgttacaataacctcaaaggttaatcatggaaagttttaattagcaatattttctattttattttttgtttgcaatgaataaatgctagcgtagtcatttatcaagaattgggaaatgatgtatgcgttgtctttgatgttccatgcattttcggcattggaaacaatgatccatgcacgtacaaagtttaattatcaaaaataaaaataaaaataaaaataaatacgacatcggttatgtaatgagaaatgtcttacaaactagagttctctaagatgtgtttggcgacaaaactgtcttagaaaactttatttacaagaataatttcacat

SEQ ID NO: 185635 - DNA, 468 bp, Glycine max
  unsure (1)..(468): unsure at all n locations
agctngttaaaagcggaagagaagagaattgtatgtgtacaagatttttatgaaagcaaacaaaacacgaaatgaattaaaagtctcagattcgaacacttaccggttgaagaccgaagaacggacgaagaacggtgaagaatggcggaaaatcttcacggatttgctcacaaaaacgtctcagaagcgttacggaaacacctcgacttggattttcttcatggaaacacgttttttcacccaaaacaactgaaatgcatggcataggggtcaggggtcaatttacatagcccccttcccctatttatagccaaaatggggaggttcttgccgccgagaggcttcttgaggaagaattctgagcgcaccccaattactaagttcaccccctcttttatactttacagaaaagttacgaaagccttacagaagccattcaaactgtgatttcctattttttctcttcct

SEQ ID NO: 185636 - DNA, 328 bp, Glycine max
atcatgtcttgggagggaaaaaaatttcttttccagctactaagaatttccagcagagagagagaaaaacataaaaacataaacactctgtgctaacacacttactagctgccacatctttaaatgttggagaatcatattggatgacggatgtactaattgagggtgtgagttttacatccaactaattcttggtttattggatcggtccatcttaaaaataagtggtatacattttcaatcgtaatttcatgtttaagttgaaaatctaattaagactttagttaaggaatataaatgtgaaactatctacgtcaattctgtggta

SEQ ID NO: 185637 - DNA, 465 bp, Glycine max
  unsure (1)..(465): unsure at all n locations
catgcaagcnncntatgcgaagaagaacactagatatttantttattcgnangacacacaacaacaatataccaatgctcttaggtagacttgttaactcaatcattctcttaaagcctttgatacatnttacttactgattcaagtaagctcttaagtagacatgtcgttgtgattccttgacccatgtttcaatgtaaagttgacattggttgcatctatcctttccattgtgcatggatngaggctcaaagaatccatacaccataatatgacccaaacttgtactccagtcatccataaacctatttggaatagttttaatgtaaattgttaatcaaataaaacataaaaaaaattaattattacatagtgaaaggagactatgaaattgaaattacttacatcatccacaatggtagtatagagatgttaaacattctcacctgatattatttattacat

SEQ ID NO: 185638 - DNA, 268 bp, Glycine max
agagaaggaaaaccttcctccaatccaaactgtcgccaaccccaaaaaactaccaacattctatgttccgccagaggaaaaagaaaaaaactaccgctgccgtataagctaaaccgatcagctcaaacacaggtcatccagaacccatttaaaagttcaatcaattatcactcaagatggccaagacgttcactcccaaacaatgaaccccaaccccacacgcaacggggcacggccccacaaagccacattctcccatgggctacaa

SEQ ID NO: 185639 - DNA, 401 bp, Glycine max
  unsure (1)..(401): unsure at all n locations
agctngccacccagctcgcccagcctagctcttctcgcccagccgagctcagctcgcccagccgagcagggttgcttcctccagaagcaacagccttctggaggaatcttctggagggcccaagtgggcctggttgctatttgcacccccatttttactaagtacaccccctgcccttttttggtgattcttttttcgtaaaggtacggaaacttacgaatttcgtaacgatactngttttctttccgtaatgttacggaaccttgcgaattacataatcatccnctttttgacttacggaatgttatggaacctcactaattgtgcaacgatgcttccatttgatttccggtgtgtcacgaaaccttacggattgtgcatcaatattttcttttgttttc

SEQ ID NO: 185640 - DNA, 451 bp, Glycine max
  unsure (1)..(451): unsure at all n locations
agcttaaagtatgcccgagtcattcatccctatgagatgnngnngaagtattggcgatcagaattgccattccttggattatagggttgaaccaagctcatgcttttacaaaaaggttcatcaagtcaagttgaaatatggaagtaaccgtcttgcaaaattggggcaaaagatgaatcgagtcacatcactgcttcgtctactgccaaacatatttaggattattgatgtccttgttacttccagtttcaccttgacaaagatgtcatggaccatgttgaaaatctaaattgattcaaccccatatcttgcgtaaaaattcgcaatacttcaactgtacaccattcgcatatgttagtgtttagctctactgagctttaaaagaatggctaagattttgttaaaacataagcacttagacaatgaangaaagctggagttgctgcacgtg

SEQ ID NO: 185641 - DNA, 449 bp, Glycine max
  unsure (1)..(449): unsure at all n locations
agcttcaagagatctgggaatacttcagctgctaataactcagtgaataacattcttgatgttgcatcaggagaacaaagccaatcttggtctcaacaacaatgccagcaagttcttgccctccttcaagctcaaatggcacagctgcctagtgcctctcaacaagactcctctgacagacatgtattgaaatcataggcatgtcaaactctactttaaattcccctttccaagcacctaatgcttggattgttgattctggagcaacaactcacattacttgctttcctgaatttctctttaacttcaaattcttgaaaaacaagtttgtgcttctaccaaatggaactagagttcaagtggttggaactggttctgttaggataaattctcgcattgtttngcataatgtcctttatattccctcttttcatgtcaatctgatttct

SEQ ID NO: 185642 - DNA, 462 bp, Glycine max
  unsure (1)..(462): unsure at all n locations
agctngcttctacagtagatcatggagcgacccgagatttccgtgtcaaatccaatgtaatcaagtagtttgaaccctattgttgggcctaggctttagggtctgtgttggatttcccatgtgattactttttgtaccactttttcttcgtacaaatatatttaagggaaatctggtttgtcggaaagcgcactagatcgtcatgtatttaaaaattaaaatgaatggatccgagtatcgaacacagggaactaatgttagcttgagttaaattcagaaatgaagcattgttgagagaacatgtatgatggataatttcaaacagaatttaaactaaacctttatgctaaaaactataaaatacaacgtaagtaaaagtgacagcagtaggtagaaatngtgggtctttctaacagacaagctgatgtatataaatatatntctctaatcaatcatgctctt

SEQ ID NO: 185643 - DNA, 467 bp, Glycine max
  unsure (1)..(467): unsure at all n locations
agcttaacatcagaccacttcagggtgctggtactacttcacatggatttgatggggcctatgcaagttgaaagccttggaggaaagaggtatgcctatgttgttgtggatgatttctccagatttacctgngtaaattttatcagagagaaatcagaaacctttgaagtattcaaagagttgagtctaagacttcaaagagagaaagactgtgtcatcaagagaatcaggagtgaccatggcagagaatttgaaaacagcaggttcactgaattctgcacatctgaaggcatcactcatgagttctctgcagccattacaccacaacagaatgggatagttgagaggaaaaacaggaccttgcaagaggctgctcgggtcatgcttcatgccaaagaactttcctataatctctgggctgaagccatgaacacagcatgctacatccacaacagagtcacactgag

SEQ ID NO: 185644 - DNA, 441 bp, Glycine max
  unsure (1)..(441): unsure at all n locations
agcctttctncnngggntgatggagtctgtcttatantttggcatgatcactggctaacatgttctcaattagctcagttgcttcttctagggtcttcagttttatctttccccctacaaaagcatctagaagttgcttggtttgtggtctcatcccatctattaacatattcaattgaattggctcggaaaacccatgggtgggaattcttctcaataaacctctgaacctctctaatgcttcactcaaagattcatcacgaaattgatgaaatgaagaaatntcagttntcccttccgcagtcttagactctgggaaatatttctttatgaacttttcaaaacttcttcccggttntaaactattacctttaatgagtgagccacttttggccttctgccatgaaatgaaatagctgatctaatgcttcattgcacacc

SEQ ID NO: 185645 - DNA, 459 bp, Glycine max
  unsure (1)..(459): unsure at all n locations
agctggccnngnnnnactttacttaggggctccttctttcttcttaaatncactaaatcagccaaggttgcttcaggttgaagcaacagctcgcctgggcgagctaggggtctaaaaaagccttaaaatgaccattttgccccccttttaggtattttccataatcttttctgaaacgtcgaaaaacctttcggattgtgcggcaattggtgtcaagcagctcaattcggttatcaaggatcaaaatgttagcaaacgatcgtccccagacgaaattagggcctgacaacttcaaaccgaacttattgctagaagtggcaaaatatgaaagaggccatagagaaacacttcaaaaccattctccaataattcaacaggaaaaacagtaaactcaacctctatccagaggcaataaaatatcaaactgtccacatagaaacacttcaaacagatattttc

SEQ ID NO: 185646 - DNA, 426 bp, Glycine max
  unsure (1)..(426): unsure at all n locations
agctcnttcttgacctttggcaagcttttaacttgtctttcaagatcatgccttcgactcgcgactgatccctttcggttcttcagagcttaagctcactactgctgccccacaaagctcctcgaaacttgttttggccatgttcttcctttcgggccctcttggtttctcgttccaaggcttcagcaatggccatattgatgtcccttagttcatcgtactctttccggactttgatggctgtggacttggacttctctttgactgcttgggctttttcaagttctgcctttagggtttgtacttcctcactctcctccagagttntagtctcttcctctcttgcacctttagctntgggagccaatccaacacttgtgtccgggctctcagccacttatgatagacggcgatgatcccattact

SEQ ID NO: 185647 - DNA, 460 bp, Glycine max
  unsure (1)..(460): unsure at all n locations
agcttaatgaaacaaacaagaggattaccctattccataacaatncanaatttaatgagaagaaaaagaaattaatgaagaattggttaacctgtgatgctaacaaaggaagaagaagaaatgatgaaggatgatcgatagagatgaggaaggagatcggaaaggatgaggaaggagattgaagcatgagagagaattgaggaaggcacagcacgcacgggttgtgaggggatggagagagaaaatntgagggtttagaatatgaggagggcattctatgtcattttgaaatttcttgaggatataattgtccaagcattgtttagggaatagattcctgaaaagcaaaatttcataagctgcatatttgaacttcaggagaagatctgctcatagctttcacttttccaaaagctaaaaaatattaataaccaaacacttttaaaaaataaaaaagatc

SEQ ID NO: 185648 - DNA, 425 bp, Glycine max
  unsure (1)..(425): unsure at all n locations
agctntacaagatccgaagtggattgtgctatgaaagattaattngangctcttgagaggaacaatacctggtctctagttcctttacctcaaaacagatctacaattggttgcaaatgggtattcaaaattaaagaaaattcttatggaagaagtatcaacaaatataaggctaggctagtggcaaagggcatcaactaaaaatttatgtttcatttccataaagactgccaattcatgtcttctcttgagattcattggactgttgtaaaatgaattatgaggtatcttaatcacggattggttcttataattctcctctttatcaagctttctctattagagcattctgtgatgatgattgagctgttaaccctgatgacagaaggtctacttctggggttgcaattttgtgatnttgatag

SEQ ID NO: 185649 - DNA, 461 bp, Glycine max
  unsure (1)..(461): unsure at all n locations
agcttcctttacaacagagagaagagaanaatttatgattgaagaaatgcaagtagtgaggatgtctcctcaacctctagaacctcacaatcactcacagactcatctcatgctcttaggatagcttcctcttcaagctcagttctctgccagtctttgcacaataaaagctctcaaaactctctagaacttggacctttctctctctagaaatctctaaacatgcaaaagcttcgagaattgcccaaactcctcttccatttctgattataggcttaaataggtggccttgttggtgcttgcgcggttagcgcaactctggctcgcttagcgggcataagtgaatttcggcttagcacctggcttctcgcttagcggatgcatgcaagcggtgcgcttagcatgatgagctctcacttagcgcgtgtgtccagctcatacttcttccagattcttcctca

SEQ ID NO: 185650 - DNA, 438 bp, Glycine max
  unsure (1)..(438): unsure at all n locations
agcttganatcagttgtccttaaagcaagttttagttgtattaccaaagatataataactatataaggaaaaaagagaaatgctgcaccttttctcccaaagactacatctagtccttaactacttaccaagaatttaactaccaatagaattacaggaaccattacaccacactattacaataattggaaggtatacgttacagtatgttgaagctctcttgttctatatccttcatactntgtgaacattggtgccttaaatactacatgtaatgccttttatatatcaactagtcacgtaagatttgataaatcgtactactgcttatcttcctttctcggtattgataatataaagcacgttatcatctcttattttcaaagccaagtactctctcccttcactattataaaaaatctttcaaggattattctg

SEQ ID NO: 185651 - DNA, 392 bp, Glycine max
  unsure (1)..(392): unsure at all n locations
agcttagtccaagaggagatgaactcttttttttcttggagaggancaataacaatgcctataggtttgaccttccaaaagagtatggagtcagcaccacttttaacatttatgatttaattccttttgcaggtggagataatactgaggaggaggaactaacagatttgaggtcaaatcctcttcaaggaagctttctttctctagcttcccaaggaagcttcccatgtgctaggttatgaatagaaacatctgtaacacttgtcataacttcgatgaatgacaaacttgtgagacacacttcaaagttcaacctctctccctaatctccttcaattcccacgcccccctctctctcattctcttcctccattgaagtttcctctctaaac

SEQ ID NO: 185652 - DNA, 451 bp, Glycine max
  unsure (1)..(451): unsure at all n locations
agcttgtgactcttggctatttctttanaactagtcacttaaaaaggtgtgactnttgaaaaatcttcagaaacaagtcacttgaagaattgtgacttctggaaatttatttttcgaaatcagtcactggtaatcgattaccattaaggtgtaatcgattacacatcaatagatgtgactcttaattttaaattntgaaaattaaaacctttagaagctttggtaatcgattacaagtattgtgtaatcgattacacaagtttaaaatgatttgaaaatgtttaaacacaagttgtaactcttgaaatttaaaatcttaacgttttaaaacactggtaatcgattactaccttctggtaatcgattattagagagtaaaactctttggtaatgattttgtgaaaacttcttgtgcctactcaatgtntgaaaaactttnttagtacttatc

SEQ ID NO: 185653 - DNA, 358 bp, Glycine max
  unsure (1)..(358): unsure at all n locations
atctactctaaagatacatctaacaatacccataattataacaaagataaaaaaataaagatccatgttcacatggttgaacaaaaaaaaaatctatcctaaaaattgaagattagagagagagagagaggagagaaaatcgtcccaaaacttttccaaaacaggaaaaatgaacaaaagaattaacaactatatccaaattgttattacaagggcttttaaagaggtactaattcagntatttttttgccacatcatcattcgctgcatgaatccttacttcttcacaaaagatctttttcactcagaatcttcatgtctttgaacgcttttggccttgatgatatatacattcact

SEQ ID NO: 185654 - DNA, 461 bp, Glycine max
  unsure (1)..(461): unsure at all n locations
gcttgcttctacatcttagctttacacgatctgtcttattntggtntacccagctcataactctcacttaggttcaagaaattataatggttccactctaaggtttcctcctgatactaactgggtgctaacagaataatcaaaacataccacttctcacttctgtaaatttgttcaaacttaaggtttacggctacaggaatttcaccaaaaagcttaaacttactcaagtcatctttaacaaggattaaggttaattcaaggaatcctaaaacaactttctggtccggctgctagttaggncatttcatcttaatcttaggtttcctctcatctcaaaacaanttctacccaagaaggatgtaaagttatctctcacctagaagtagcatactctaagggtcatcatcatctaactaaaatgcataacaaaactcttagtaccaaacatgattcccaag

SEQ ID NO: 185655 - DNA, 346 bp, Glycine max
  unsure (1)..(346): unsure at all n locations
aaaaagaaatngacaggacatctctcatcttcttttcgttccaatcggactaggatcaaagattctctctttttttttaggtatcatttaatgcgagtttgatgttctccataacacacagataaactttaatagttgctaataaaatatgataatatcatcttacttatcttatcggctagcctaaagtatttttttttaattgagagaatatagttggactataaaacattaaggacataagctacttaccttgggttgagtttgggacaattcaagattcaatcaaacgagtttattattcttcgttaagcaatgttttcactcaatctaacttgattttaat

SEQ ID NO: 185656 - DNA, 309 bp, Glycine max
  unsure (1)..(309): unsure at all n locations
agcttcaacattcaatntcgagcgtcgcgatatattattagtctcaatcaaacatccgagaaaaaagttattgtcgtttgaatttgctcagaggttcaacattcaatttcgagcgtctcgttatattacaggactcaatcagacatccgagtaaaaagttattgtcgtttgaattggctcaaagcttaaacattcaacttcgagcgtctcgatatattacgagtctcaatcagacatccgagtaaaaagttattcgcttgagtatgctcacagatgctacacactattttgagcgcctcgctatatttc

SEQ ID NO: 185657 - DNA, 463 bp, Glycine max
  unsure (1)..(463): unsure at all n locations
agcttattaatatataaattatatataaatatatttaatgaaaataacattnttctgcaaaatcaagtaggcattacctaaaatcctattaacagttaattnttttggattaaattaattctatttaattcattatcatattagtacaatataaattataaattatttcttaaacctagaagaaattaatttttctcttatattgtgatactatataagtaaatttagtaatataaatcatgcatatatatcatgtataaaatcaaactcttggtatgaatattttcattaaattaagaatgcaaaattatacttaactcatgggaaggaacaatttacctataattgcattaaaatttaaattattagagtttaattaatgttattttattttattntattggtattatacttctaatataaaaataaattatcttgcttaataacatgtgacttaattaac

SEQ ID NO: 185658 - DNA, 419 bp, Glycine max
catgcaagcttggaaagtgttgtttttcaccttctctttaagccaatctgctggcttagcgagcgtccgctaagcgcaacactcatgggctaagcacgaggaagactctggaagaagatgagctgtacaagttcgctaagcgcactactttatctcactaagcgcaccgcttcatctcactaagcgcaccgcttcaattcatccactaagaagaaaaggcacgcgctaaaccaaaattcactaatgtgcgctaagcggtccataagtgcgctaagcacacgagcacgaacaaggctacctatttatgcctgaaatcagattttgtgaagagagtttggactgggattcaaagctttgcacttctagggtttctagagagagaaaggtccaagttccagagagttttgagagaatttgct

SEQ ID NO: 185659 - DNA, 443 bp, Glycine max
  unsure (1)..(443): unsure at all n locations
gaggatgaagcttttgaatgcttgtactatctatttttgctttggataaccaaggtccttaagacataaccttgagtagcaatgaattagaggcaacacaacatatggaatctcaatccacaagcgacaactttcncataatgtcttcaattagcaatacccaattcatctaatacttgatttagaccataaagaatttgcaatcatcatcagttacctgagcatgattgcttgaccttggtgtgagaatgtaggtgatgaggtataccagcattttgtcttcagtagttaatccaccaactccaaggtgaattctcaatatccttgtaggatcaagaagcattcctttataggtntgcatctttgtgtaaccatcaacgtgttcatcaaacttgcggactccaccaatgtccagactaataacttnctttcacacaacagca

SEQ ID NO: 185660 - DNA, 435 bp, Glycine max
  unsure (1)..(435): unsure at all n locations
ggctgcaagcttaacaactggtttgagcgattacttttgtgttgaancgattaaaacaaagagcntttgtctctngaagaatttttttaacttaaaaaattttcttcacacacactatgatgattgttagttctttggcaagtgtaccaaatcgctcgtagtaataatttctcgataagccgagtgtcgtaccacatggattttgttacacttatatgaagtacttttcagtttgcaaattgtaaatttagtgtataaaattaaagggaaatttaaatctaagaaaaactcaagcaataaataaagaataaagtctataaaatattactaaatctaataatcctaaatacctactcctaaataaaataggggatactacttctaaganaacccaacaataaaataaggaataactacttctaagaaacccaacaa

SEQ ID NO: 185661 - DNA, 476 bp, Glycine max
  unsure (1)..(476): unsure at all n locations
ggatccttaagcaccgcggctgcagcttgaacaactggacgacgcataaacttttttnnttgggtcctggagatttcttaacaaagtttctctgaaagttatgtgattattgagttgcaaacacatttgagataaagagaggtccattcaatcaagtcttttgttcttgcatttgaattgtaagggtgtatctctccttgactatgtttcatatggtttttacacattgttactgcatgtgcaagcgttttagtgcatgctagaataggtggttataatctgaagctaagagtaggtttctcttaggcttagattcactaaggaccctgggttgtgtgcctaagtttcattttctaggtagaatttgaaattgcttgtaaaactcacattgcctattagaaatctaattcacggtgaattagataactagaataactttgatatacatacgtcatatgaatatttaaatcacatag

SEQ ID NO: 185662 - DNA, 456 bp, Glycine max
  unsure (1)..(456): unsure at all n locations
agcttttcgattcattctatgtacctgtagttgttcacattgtgtnncgnngcattttattctcgttttgtttactttttataccccctgttgacgtgcttaagccattttacttaagtcgtttctcgctcaacttaaaagtaaaataaatttccaccgaacgtttgaattgtattatccattaacttcggttaaaataaattccgaccgttcggtcatgccgtaaccacgttggaaatcaaaaagaggtaaaaaaaaataatataataatcaaaaagacatcttttagtaaaaataaagcggaaaatcaatcggacgttttctctttgggatttctcattcttaatcgaatggattaataactaaagtgaaactaaggctaanatcaactcgcctagtcaagctcgtccacaaaaataggcttttgaagttcgcatctcaattttcactaagaaa

SEQ ID NO: 185663 - DNA, 453 bp, Glycine max
  unsure (1)..(453): unsure at all n locations
agcttagctgtgtggctatgtagttattcattatcaaacatggccttcatcatcctcaagttcatacatccaatccatactttagagattcacgcaaaaatcagcactacatgatagtcgtttctctcaaaattntaaagatcacacactcactgggatacggntaatgcattccttcataatcaatctgacaactgacgtaacatttcagacataattccaatcatatgctcattctcttctaataacggcaaacttgatcaaaacaatcatccaatcatcccaatccattcaattcatacatttgctcaatcaatcatttcctaacactcattccataccaaacaagccactgcatacaatgttcaatcaattcactggtcaatcaagcttntttgacaagaaaacaaacaactatactactgaaattaaaagactgatacacaaaagctg

SEQ ID NO: 185664 - DNA, 453 bp, Glycine max
  unsure (1)..(453): unsure at all n locations
agcttataatcctgttgagtgacttataactatcctaagnntgcttcaattggtgttctttacaaaatttggcttttctgaacacatttaagcaaactcatcagtaggcataaacacaaaatgcttatgatttgtgtccataagaattgtcataattaaaataccaagggttttggactcaacaagcctaatctagcccactttatatttctataaccccagcctgacttgttaccctcatgagcctatttattagacctgaccctagcttttctagaagcccttttgttaacctatttaaaggcttggttcatataagtgttgtgtaaaaatacaattattgtataataatanaattattatgcgttgaaatattagagtgtgaacaatgactntcaatgtattcctatattacttaaaattggatgtgtgaggattctttcttcttttttt

SEQ ID NO: 185665 - DNA, 427 bp, Glycine max
  unsure (1)..(427): unsure at all n locations
agctngcacttcttaactctcctcaggaatntcagcctctttcccacttagactntttangcttgggagccaagttatcccttgcgttctagacttcaaccacttatgatagtcgctgataatgccattgctacttcccctaagctccttatcctttcttcctactttattccacgctttatggattttctaaagtatcttcgcattggcttcaatgaaacctcgcgcgatgaaaggcatgatgatttcctctaatggaatacctctcatagggtagcctaactgtcttatggccagcatgggattataattaatacaacccctcatcctcatcaagggggacattggggatccctcacatgagcataacactcctacccctccttctttncatcgtgggaaccaactaatggacgctcncgtcatg

SEQ ID NO: 185666 - DNA, 457 bp, Glycine max
  unsure (1)..(457): unsure at all n locations
agctnntatcactttcattcttgagctgatagtctatnttgncatgtatggcgtgcttggatgattttcacaaatgtcttgactctttggatctcttcgtgttagatgttacccattcctttcattccttgatgttcattgagaaatatgtaaatgtttttgcttatctctctttgatatcctatgattttgctctttatttcattttgcccaagagtgcaaaaggctaagtatgggggggtttgatgtgtcattattttctcctatttcttaaccttctttgcaccattttaagtattgattagtcttaattgtcaaattaattacgcaggtttattatttggcgccattaagctaatttgatgtttttaatctaatntcacgaattaatgaagcattgggcttgaatcagaattgngcttgacttgaagagggcagactatttattctacaaaat

SEQ ID NO: 185667 - DNA, 415 bp, Glycine max
  unsure (1)..(415): unsure at all n locations
agcttgattngngagtagattatagccttggtttcactttggttatnannnaattaattcaaggaaactttcaaagaanaacgtccgattgattttttttattattttttttcaagatattttgattattttattattattttgctnttttggtttaaccgaggttacagcgtgaacgatcagttagattttgttttaatagtgattaaacaagattacaacacaaatgatcggttgaaattcattttatcatttattaggtgagaaaacggcttaaataaatggttaaagcacgttaaaaacggaagaaaagaaaattgaaagtgaacgagatgaagatgaaagcaaacaaaacaagntgggaccactaagggtgcatataatgaattgaaagattcgatttcaggaacttacc

SEQ ID NO: 185668 - DNA, 461 bp, Glycine max
  unsure (1)..(461): unsure at all n locations
agcttgcaggaactagctcagcagaggccaattatgatttgttatcaatncatngagaagggggcctagcctgtaacccgaccttctttcgtacggaataatgaaagttttacagcccaggcacctcaacagcatgagctagaactagaaaatgatcactcatctgaagccatcatccctggagctggtgatttttcaaaaagaaaattagagacgagatccaatgaggctgctcatcctggaccagtgcccataccagctaactcttccactcctatcttagaaatacttgagggccagaccatactagtccttggtctgggcactttttctccaactactccagtattgcaccaaacagataaggaggatgttcaggcttaggacatctatgactagtaacaggaaatttgattnctgaagataccttttgctttttaatttatatatatattattttg

SEQ ID NO: 185669 - DNA, 458 bp, Glycine max
  unsure (1)..(458): unsure at all n locations
agctntagccttaggtaaacatgttgttcatgttgctccccttatctctcacatgtatttcgggtttctgataaggaaaaatctaaccctccctttggaaggaaagttgtggtattaggaggagattttagaaaaatacttccaatcattccaaaagaaagaagataaggtgttgttcatgctagcattaattcataatattttttgcctttatgtaaggttcttactttaacaaaaaatatgagtcttcaatcaaggtcttctaatgaacatgtttctcaattgaaagaatttgtaaattgtgtgttggatattggaaatgaaactattggtgagattcatgacaaagaaaatgccattgacattccatcttatatgcttattgaaaattcaggtgatcctatgtctactattggtaatagcacatacccatcactttntggagaatgagggacaca

SEQ ID NO: 185670 - DNA, 471 bp, Glycine max
  unsure (1)..(471): unsure at all n locations
gatcttaagcaccgcggctgcaagctatgcagagttgtgagttcttattcttagtcaatngnnccttggatatagcgaagaattcattttgcagccttgagatgagtagtggttggagtttccatgtatcgactgatgagtccagtagcatatagaatgtctagtcttgtgcacatcaaatatcacaaactatgtaccaaactcttgaaatttgtagcatccaccttttttgcttcgtcgaactttgataacttcatttagcactccacttgtgtaccaactggcttggagctatccatcttgaattttttgagcatctccttngcatattttttgtgtgaaatgaagattacatctttcttctgctttacctcaatgtcgacatagtatgacattagtctaatagtggtcatcttcaactttttgatcattgttttcttgacttttcaaactactgcgattccttccata

SEQ ID NO: 185671 - DNA, 418 bp, Glycine max
  unsure (1)..(418): unsure at all n locations
agcttgagaaatgaaggaagtacatttaattcttatntccaaaatgttataaaatccccaacaaggaactacaaacaccacacatataagagccataacacaaacaacacccattgatgccattcaatatttggcctttcaactccaaaactaatggagccattgaccttctaagtccaaaacgtatagaccactattaaggagttaatcatagctttttaattaaaaatttattacattctcccacttggtccaaacgttttgactcattgactaaaataattcaatgctcaatttccttaagaaataaacatgtaaatcatagtgatagttcctcttttaacgggtaatatcatccatgtattacgacatgctcaatttcccaagtagtatacttaatgttgtaataaaacttgat

SEQ ID NO: 185672 - DNA, 405 bp, Glycine max
  unsure (1)..(405): unsure at all n locations
gcgagagctntccgttgtcaatttcgagtgtcactatatgtgatgcgccaaaattggacattcgaattaaatgttatgaccatttcaatntctcaagagcttccggtgttcaattctgagcgtctcgatatgtggtttccctgaatcggacatccgtgtgaaaagttatgaccgtttgaatctctcaagagctatcgttgttcaatgtcgagcctctccacatattatgcgcccgaatcggacatccgtgtgaaaagatatgaatacttgaaattcccgagagataccgacgtttaatttcgagcgtatcgatatattataagcctgaatcggacattcgtgtgaaacgttatgaccatcttaatttcactagagcttcccgttgtcattttcgagcgtctctat

SEQ ID NO: 185673 - DNA, 396 bp, Glycine max
  unsure (1)..(396): unsure at all n locations
tttcgcncatcgnacgcgcgtatgatatccactccacaaggtttgaagtagaggagaccttcaatcctataacgcaacgtggcgaacaaaagtgggcagtcaacttcaatggccattatcgtcaatgcggaaggtatttngcgcttcactatccatgttcacacattattgcatcttgtgggtacgtgagcatgaactgctatcaatatatagatgttgctacacgaatgagccattttaaaagatactccgcacagggtggctcttgggaataagcggcaattcctcttctgatgatcatgacacttatcctgaccactacaattatgtgaaggtggccaaatcacaagataagaatatatgattgctggaaccatttacacgccaaattactta

SEQ ID NO: 185674 - DNA, 344 bp, Glycine max
atttggaaaggtagttttaccaagaaatgctactcttaaaacaaaaatggacaaaacctcctccaataaacacaaacatcaatgtaaatttagagcaaactcatgcacatacttccttacgaacattcactcgcacaggatattcttctaactaaaaaatgcacccatgcacaatcaaggcaccttcgttacctagattatttatatgtacttccaaggtgtatttgctacctacatcacatgcatttccttggctaaatttacatacatgcatactcaaagcatcttggctatcaaaaatgcacacgtgcacattctggtatgtttaatacctatgcatatac

SEQ ID NO: 185675 - DNA, 447 bp, Glycine max
  unsure (1)..(447): unsure at all n locations
agctttggaaaaggctattttcactcttctcttaagccaatctgctggcttagggagcatccgctaagcgcaacattcctgggctaagctcgaggaagaatccataagaagatgagttgtgcaggttcgctaagtgcaccgcttcagttcatccgctaagcgagaaaggcgcgcaaagccaaaaatcactaacgtgtgctaagcgcacgagcacgaacaaggccacctatttaagcctgaaatcagattttgagaggggagtttggactgggattcanagctttgtatgtctagggtttctagagagagaaaggtccaagttccagagagttttgagtgattttgctgtgtgaagatctgcagagactatagctcgaagcaggagccggtttgaagcttgagatgagttgtgagtgattggagatcctagaggtgaggagactccta

SEQ ID NO: 185676 - DNA, 440 bp, Glycine max
  unsure (1)..(440): unsure at all n locations
agctngctctaaatntacattgatgtttgtatttatgggaggaggttgtatgtcatttttgttntaagagtagtgtcccactggtaaaactaactttccaaatgtttgccttcgcaggaaatggccccgaggaagcttgcctcaaagaggtccaggaaggacaaggcagccgaaggaactagttccgctccggagtatgatagtcaccgctttaggagtgctgtacaccagcagcgcttcgaggccatcaagggatggtcgtttctccgggagcgacgcgtccagctcagggacgacgagtatactgatttccaggaggaaatagggcgccggcggtgggcatcactggttactcccatggccaagtttgatccagaaatagtccttgagttttatgccaatgcttggccaacagaggagggcgtgcgtgacatgagatc

SEQ ID NO: 185677 - DNA, 306 bp, Glycine max
ggtatggttttgtagtggatcctggccaaagggattgattgggatggcctaacacatgatccttgaaatgaacagcttggaagaatttgcctgaagtttctttatatgttgctatttgtattcaagttattggattgactttttattttgtcaatccataatcggtaaaccgtttattcagggcttcaaattggatgaatttggatttggtgctaagaagaccccggcatgaactgaactgcttgatctgataacgatgagagagaacaaatgaagcggatcatgggttgggctctgccataatta

SEQ ID NO: 185678 - DNA, 431 bp, Glycine max
  unsure (1)..(431): unsure at all n locations
agcttcacatggagccacgtgctgaggtatctttagcttcttcgtccangnganggtcttttgcttcctctatcattntgttttggccattcacgttaattccttgatcatcatctaattctccatgcatatcctccattgacttgcgttttattgtcgcttagagtacattcaaaaaaataaaccgattaaatcttagatctacacttgttcgtgcatatgtatggttcaaattttatagatctactcttgaatcatgtttttgtgcgattttaggctctatcattctccaggcataatcttcttgtgctgaacctttcgacctaaattttacttcacaatattgattatataaaaacatataaatctaagtgtgaatcacttaatccatgtagccttagaaacatgtttaatcataatatatggcacat

SEQ ID NO: 185679 - DNA, 445 bp, Glycine max
  unsure (1)..(445): unsure at all n locations
agcttttaactgaatntgcatcgatggaatttattttttaatggngtaattgattacaagatattggtaatcgattacctttgtaactgaacattgaaattcaaaatcaattgtgaagagtgatatcctttcataaaaagctttgtgtaattgattacatggttttggtaatcgattactagtgacaagttttgaatgaaaagtcaagagatgtaactcttccaatggttttcaggtgtttctcaaggttataactcttccaatggttttcatgaccagacatgaagagtttataatagcaagaccttgacttacatttcaattaactttttcaattaacttttgaacatctctttgaacttctactacttctttttcctttgccaaagctttcaaagtttttggtttctaaccttgtttttataaaaaaaaaagtggctattca

SEQ ID NO: 185680 - DNA, 400 bp, Glycine max
  unsure (1)..(400): unsure at all n locations
ttctnctataaaggtaacgttgtatgtataaatacatctttagttgctattccctttcttgcatttggaccccttctgaatctgaatatgaataaaccatttttcttcttgctttttgttacgagcaaagggaatagggggccttggattcgaggtcaaggtaacctcaaactatgaaaattgtactgaaattcaaattgtttatttcctccctctcattcatgagttatttatacaagctaataactgtttgaaggaatcatcaagcacaattatcctaatagaattgttccctgcaattctctaacaaaatatgttatggcctatatgccgttatgtcccccagtgtagtgttattccgttacaacttgtcccctagagctagtgctaagtgtcataa

SEQ ID NO: 185681 - DNA, 377 bp, Glycine max
ggatgccccacattaatttcatgacacaaatgcaaaaatgatgatttggaagccttatgcaaaactggtcatgcatgcacctatgtggacactcaagtgtcaaatttttatggtcatgtgaatgctagggctcaagattcatttcctctattttaaatcaacccaaatgttccaaaatatgtactcttatcaatttgtgcattcatccgagttcatattgggcgtccgggaaaatttcacagcattcacccttcaggggtatacacatttttttcaaaaatggttatgaacaatgatttcttctaaaaatagttggagccatctttttcaaaagctgtcggttttcgcagacaactattttcttttcccaccttttc

SEQ ID NO: 185682 - DNA, 319 bp, Glycine max
  unsure (1)..(319): unsure at all n locations
aaaccaaaaaccgacaccacncaaaagggaacgaggtgtttaactccccgaacccgaaaaaatacaaaaaagcgaacaagcccaacaaagaacatgccatcccaaaaaaaaaaaacaaggaactacacgccacacaaaagaacacgacaaacacgcaaaggaatgccgtccaccccgacaaaaataccacaacccaaaaaaccacccacgacagtccccaaaacagcagcacaacaaaaaaacacgaaacaaagcaagaaacaaacacaccccaaagggaccacaaaaaccaaagcccaaaaaccaccaaaaacaacac

SEQ ID NO: 185683 - DNA, 467 bp, Glycine max
  unsure (1)..(467): unsure at all n locations
agctttccgcaagatatacggaaagatcntatatttgaccgtagcagagatatccatagaagccattgcatcactcacccaatactacgaccagcctttgagatgcttcacgttcggagacttccaattggtaccaaccattgaagaatttgaggaaattctaggatgtcttctcgggggaagaaaaccatacctttcctccgggtgtctcccctttttgagcagaattgcaactgtggtcaaggattcagcgagaggtttggaccgcataaaacagactcgaaacggcatagcgggcctaccacggaagtacctanaagataaggcgaaggatatggcaagtcaaggggattgggtcccgtttatggatgtngttagcgtgctaatatttggggtcatcctctttccaaacatagatggtttggtggacctagcagcaatcgacgctttccttgcataccaccata

SEQ ID NO: 185684 - DNA, 453 bp, Glycine max
  unsure (1)..(453): unsure at all n locations
agcttagctgaattcaaatcatatcgaagttatcttagctcaaccttggccagcttagcggaccaaatcagcctcagatacaagggttgggttctaagcgctcaagactcgcagcttagcgcatgaacagagatgcgcttagcgcaaggcttatgcttagcggaaggactattttttcaaaaagattttctaagttttaaacttagtcctttcccaagaaattggaacccttatgttaaacattcaaagattggctgatatactcctatgtacaacttacatagcaagttcctaatgatcaaatgcatgaaaaacaaacacaacaaagattaaaactgggttgcctcccaggaagcgcttctttaacgtcattagcttgacgcttttacctctctgggaaatctncatgtttggttctccccttcagaacctcttgaccttctcccattacct

SEQ ID NO: 185685 - DNA, 415 bp, Glycine max
  unsure (1)..(415): unsure at all n locations
agctgtaaggaacaaagttatggttnntttgatataatggatacccagtaacgaaatatccttaanaccccttgagtattcagaacccaaacaaaattaaaaatgatgaatccgcgaaaagtattcaaatttgctgaagattggcgctaagaggaatactcgcacctagtgaagaatactgaatgggaaaaatagaataattgtagagcaaccattgaccaaaagaaagatgaagaacagtggaacgcagtaaaagtgcaaggaggagcaccgtggcgtgggaaggagataacagatgagatattcttttaccgaaacgacgtagtttctgatgtgggtcgataaacgggaaaggttgtgaaataatgggctcgtttttagggctcaatatacgtaatgggtctatatctatatg

SEQ ID NO: 185686 - DNA, 463 bp, Glycine max
  unsure (1)..(463): unsure at all n locations
agcttgtcacanaatatgtcagaggtactatatttattatataactaatttttaccgtgcagtgcatgcagtaaacaatntgtcatgtaattttaggttaattttatgttaaataacatagttgtatagctaaaaaaattattgaaattttttattgaaaaatttgctttgacatataataagtcaaataataaataaatagttcaatctaataaatgtaagatgacatgtgttattgttaacaaaacaattatagttattacaaaatgttgtaaatgtatgtaaattgttgaaaaaaatacgtaaattttcacttatttttcatatgtctcanatacctaatcaaagaaaataaagataanaataatttagcattatattaaaaatatacatgtaaaattggtgaataatataacaatatatatgtatattaatatatgatttatatataagaatatttgat

SEQ ID NO: 185687 - DNA, 422 bp, Glycine max
  unsure (1)..(422): unsure at all n locations
agcttttaaccggttatttaagccgctttctcattctaatattngataaaaggaatttcaaccgatcatttgtgttgtaatctcgtttaatcactgttaaagcaaaatctaaccgatcattcacattgtaacctcggctaaaccaaaaaagcaaaataataataaaataatcaaaatatcttaaaaaataataataatatagtcaaaatatcgtgaaaaaaataatactaaagtaatcaaaaaaatcaatcggacgtttttctttgaaagtttccttgaatgaattgactaataatcaaagtgaaactaaggctaaaatcaactcacaaaccaagcattgtccgcaaaagtcactcaaaactgttttaaggccaacgccttgttggatcaagtggcctcagaataattaagaaggggggggg

SEQ ID NO: 185688 - DNA, 398 bp, Glycine max
  unsure (1)..(398): unsure at all n locations
attaagaacaaaatgagttattcagacttccactcctcttctccttcctcggatgtgggcaattggtactcaggtggcccttaccttggtagttaaagcaagtcacctctctatatgtgcactcatgagcattatgcccaagcctaccacacttcctacacctgagtggtgtagtaacaatagcaggagcaccactaccacctctaccagcaggctgagacactctgttaactaactgagaactcccaccagctaggtgatgtcctccactggtcctntgtcccccataatggttntcatattcgagaggggcagaatatggcttagcacgactgtgagtcatangtttcttctctttcccatgactagcattggcattcttgtaaatgcaccttctc

SEQ ID NO: 185689 - DNA, 318 bp, Glycine max
  unsure (1)..(318): unsure at all n locations
agcttgtaatgatattctctgtcatgaaacttacagagttttagtgcacctgcgtgtgggtgttggtaataatatttgtgctctattacgaagaaattgacaggcggttcttgttgtttctcctagggaggcaaacaatgtgacaaacacacttgtaagatggggtttctctacatccccaatgattaaatcttggtcttcacctattgngattttagcttctctagtttttgactcataccttagtgtaatttttgcctctcttacttactcttgttaccatatatatatatatagggggcatatcaagtgagagga

SEQ ID NO: 185690 - DNA, 487 bp, Glycine max
  unsure (1)..(487): unsure at all n locations
ctgagagtnacactgcggcatgcaagctngnnnaacaataaagaattaaggaatagttgtttattaatacataaaagacaatgctaatcaatgtttacaaaatatatacattaatatttaaatacgaagattaaaattataaattttttaaaaatcaaaatcaaaatatctcaatgagactaacattgaaaacttttaaaaataagaaatagaatatgtcaattaaaaaattaaagaattaaaatcataaacttttaaaaatagataaagaaaatgccttttagcctgtgttaatcgatggatggagttttgttacatcgcttcccaaggagagtaactctttctttaatctaccaatacaagattaagacgtggaagtcattctaatctcagtctctctcatccattatagactntagcatctgttccaaatgtgcctcttatatatatatatatactactcgtgggtattaaatggtcattgttg

SEQ ID NO: 185691 - DNA, 442 bp, Glycine max
agctttcaaaacataaacacaacagatatgatttatttctttaaaatctgattaccaaacatgatcccatggaagaaatggatggatttatctgacacaaaagaggatatgttgtattcatttcaattagttgattcatctaaatagattgagttggttattaattaagcttaagtttttatatttgattgttgacatactttggctaggccttatttgtcctgtacttcaatcaagtcattactcattgctactgtgtctttctcattaaaaaggggaaaccgttgtggcttgtgagtgtgggggcattaaacgtaaacatgccataaaagaatgcatgagcatgttaaatgcaaggggaatttaaatcctacgtggttaaacccacggaccacagtaaaagtttatcgttgacagacgttggtcatgccttatttgtcct

SEQ ID NO: 185692 - DNA, 458 bp, Glycine max
  unsure (1)..(458): unsure at all n locations
agcttccccaaacagtggacagtccattatattcttgtggtngacgaccaccaaaatcatcaaaagcacaatcaacatagttgactaggaaatgatttctttcagcatcatcaactgactcctgctgcaccctaaatcaaactcacattacaaatcatagtaaatttcccacagcatttacatgacaattacaaaatcagaggtttaatgattatgcagtcacatgtctattccccttcttattttccattntgcatatctggttacaagactcaggcagattggcatgcctatttactaattggaaatgacgcaaataccatgcaactacaagtaataacacagcaacaaaatacttcccggtcgtcccaaaatctcccatttagaatgtccttcaaagagggtttaacaacatacaattttaaaaaaaaaaaaggaatcttttatctactgtattg

SEQ ID NO: 185693 - DNA, 280 bp, Glycine max
ataccccctggtgacgtgcctaagccattttacttaagtcgtttctcgcttaacttaaaaataaaattaatttccaccgaacgtttgaattgtattacccattaacttcggttaaaataaattccgaccgttcggtcatgccgtaaccgcgttggaaattcaaaagaggttaaaataatatattaataaaaaaaaacatctgttagtaaaataaagcggaaaatcaatcggatcgtttctctctgggatttctcattcttaattcgattgattaataact

SEQ ID NO: 185694 - DNA, 433 bp, Glycine max
  unsure (1)..(433): unsure at all n locations
agctngaagctcaaggaaagctggaagaaattttttgaagaagntnnggcttttacatgcgcaactcccttgagtggcatttgtattggttgtttcatcttaatacaattgatatttgggttgcattgtgcatcatcatagtgtgtataaagaaaagtttctaagttagaaaaatctcttcaaaggaaaaaactctctgttttaatcgactacagcttcattgtaatcgattacaataagctgtctgaagcttttagagttgagtcttgtatgagttcaatcaattaccgatatctcatattcgattacactgttgtttgagacaatgactgatttattaagagtctgctttaatggaattaccaatgtattaatcaattacttctctctcgttctagtgttcaaaggtgaacaagaacactcttattgatat

SEQ ID NO: 185695 - DNA, 454 bp, Glycine max
  unsure (1)..(454): unsure at all n locations
agctgtaagtttccacttctttaagtgcacatttatcttttataattnntttaaaaagaaggagagagagagagagagagagagagagagagattgatgtaacgactcaaatctcattaaaattttttcgaaaactatttttcaatcatggcaaaaattatgacgcacatttctcaataaaaactgaaatgtttttgtctttttgaacacgtccctccttctgtctatacacttcaacaaacattagtcccaactgattaatgaaaataaagtaagatgatgctatcgtctaaaaagaaatctctttaatccgataaactagtcatatttaaatgttcccttatatagacgaaccatntttcaagcaaaggcttagtgaagataccaaaaacatctttttgcacataatcatgaatgaaatgatatcttatctcaatatgcttagcccttaaat

SEQ ID NO: 185696 - DNA, 406 bp, Glycine max
  unsure (1)..(406): unsure at all n locations
aaacaccaacacatgtcatgtcccttctctttactcaaccgcgtgctcgcctataaaaaggacccgatttgtttgcaatgctcattgaagcaccaaatgaaggttattaattaattatcctcaactttagtagctttcctatccacttgcttttctatctcttagaactaaagctaaattgcggataaatctctcaattacgactcataaaacaaattgaattaaacttctctcataatatagcaaaataacactttgaagaaattaataagaaaacttctttaattaattcattggctaacttaattcattgactttctaatcttcttctcctataaaaattcgctctatagggtattcaaactgaaccttaataaccctcnttattacatgatttaccatttaa

SEQ ID NO: 185697 - DNA, 441 bp, Glycine max
  unsure (1)..(441): unsure at all n locations
agcttatgcgcatattttcttactatcgntctcttgcacaagacanaaaaaaaatgcacccatatacaatcaaggcagcttcgttacctagattatttacacgtacttccaaggtgtatttgttacttacatcacacacatttccttggctaaattcacatacatgcatactctaagcattttggggtaccaaaaattgcacctgtgcacatcttggtatttctaatacctatacatacacaaacttcatgatgaatcttgactatctacacaataaggtgctacatctcatgccttttttcaagtttttgctacctanagccgcatgcaaattcaagcatattttcctttgctgactaaaattgtattcaaactatatatatatnttttggaatatngtctttttcacataaacatcaacatatntatatatattttttt

SEQ ID NO: 185698 - DNA, 476 bp, Glycine max
  unsure (1)..(476): unsure at all n locations
gaccccaagtcacctgagctgcagctgttacacaagacagctgcctttatttttctatattaanattacttccaaaaaatttaaataatgttgttcacgagaagactacaacacattcaatcagcacatgtatatatcatagctatcaatcttggattgcaacctgccaagcttaagctactgctaaccagtaacaaaattgctatggaagtagagcaaacagtggaatggctgcgatgccaaagttntagataaaacataaaaattatttattatttatgatatacatatatacatgcttacaagcccaaaaacaaaaaagacaattataattgaaaagatatacacaacaagagaaaggaggttgaattgtgttgtgttatattttttctacaggtcaaaagctttgtatgaaattcctttatagactgttgcaacaanaggttttggcaccagatgaatggatggatcttgac

SEQ ID NO: 185699 - DNA, 235 bp, Glycine max
ttattttacatcaaatgctctacatatttgaatcatgattatgaagttatgttaaataataagtttattatcaatgatcacttctaacttaaacattattatctaataaagaatacttgtttcataaagaaataaaaccatcttatcaatatattacatttgaaccgaataaaatataaaattcttttgttttttaatacatgaatatttactattacttttggtataattcttt

SEQ ID NO: 185700 - DNA, 456 bp, Glycine max
  unsure (1)..(456): unsure at all n locations
gaccttaagtcacctgcggcatgcaagcttgacgcacatcgtcgcgtgatgagttgctcttctacaagttngaagaaaggagagcttcaaccctattacgcaacgtggcggacaaaagtgggcagtaaacttgaatgatcgtcattgtcaatgcggaaggtattttgcgcttcactatccatgttcacacattattgcagcttgtggttacatgagcatgaactactaccaatatatagatgttgtttatacaaacgaacacatcttataagcttactccgcacaatggtggcctcttgggaatgaaacggctatatctccttctgatgatgcatggacacttatccctgacccaactacaattcgtgcgaaacgtcggccaaatcaacaaggattagaaatgagatggattgggtcgaccatttggcaccgacaaaatgcatatatgtggaccca

SEQ ID NO: 185701 - DNA, 447 bp, Glycine max
  unsure (1)..(447): unsure at all n locations
agctgtgatatcaaggttatttattatggtcatatattgnntntaaaaatcctaatatacccattaaacaacttcacttaatattaaataattgtaaaatgaaatttagcatatttgactgctttgaaggcttgtggaggggattctacatgaaaatggaggacaaaacctttgtatgttgatccaactattgtgaggtttatataagagttccatttcttatgcgaataatacattgttattggttggcagtgctgcaatttatatcatgtgatgattgcgaaattgaaagatatataatgacatgaggacaagattgcaccaactgagaaaaacaaaaggagaattagtatttggactacatatttggttgcgcctgatattagtaataacaactactcccatttgacgtgcgatattatgcaaagttatgattctatttgacca

SEQ ID NO: 185702 - DNA, 433 bp, Glycine max
  unsure (1)..(433): unsure at all n locations
agctngcatgaggagcttctatagatgctggatctttgagactcaatgagggccttcaatggtgattnttcaccatggagatgcagcggaagacaaaggagaagaggagaggggagacaccatccactatggaataagccaaagaagaatgagcttcaccaccaagaattgccttggatcagaagcttgaagaggatgctctaatggaggaaaagaaagagagaaggggggagcgcgaaattgaaggaataaaagagggagagaagtggaactttgaagtgtatctcataagacattcattcatcaaagttacaacaagtgttacacatgcttctatttatagactaggtagcttccttgagaagctatcttgagaaaacttccttgagaagctagagcttagctgcgcacacccctctcataacttagctca

SEQ ID NO: 185703 - DNA, 351 bp, Glycine max
caaagcaagaaaccctgatagttctacaagaagcctataatcttacttacaagaaattgaatctctatccgataacaaatgagaacacaaaaaccatcatatcaatacatcttatcgcttcctgaagcataaggagaacgcagaatgcaattaatcttatccaaaacaccaagaaacagattcagaaagaaaggagaaggactaattcttacaaattcgactaaaatctctttcttcctcacacaagtgatatctaagtactttgtgctatttcctagcttcaaccgacacaaggcttgaactatgaatttcagaagcaggtgctctcttcgccacagagtagcttctact

SEQ ID NO: 185704 - DNA, 313 bp, Glycine max
  unsure (1)..(313): unsure at all n locations
actcatgccagtgcagncctataataataataactgcgcagaaaagaaaagaaaagataagaaacacttttgcctcaatgtatgttcatccccgacaccacacactcttttcttttcttttgcggaatcgcgatgagattaaaatttcgttggggatatttcgcaagcgccttatctgtaatgaggaaagaagcgtgcagccttagcctgaaatttcgtcgtgtgtgcttcggcggagtgcgcaactagtgttgtttgtgtggccaatttttttctctactactggcgttcggtgaaaccattacgtaagaga

SEQ ID NO: 185705 - DNA, 348 bp, Glycine max
ccacactcaacaaaacattcttaaccggaaaaacatacattatggtcgaaatctcctggtacaaatcatggaagtgagcagatatggaatggttctgaaccaagagccacaacttactctattgggcgcagtaatcgatgagaattttggatcggtagagcaagaggtagagctccttgagacatagcaccgtcgtgggtggaagacacgaacaacgcgaatttaaatcacgcaaatactccaaaagcaactgataaacttcaacttttcggatcagagaccgcgagttcttgcgctggaagaataaacacccttctaaaaacaagacacaatctctttggcaacgga

SEQ ID NO: 185706 - DNA, 395 bp, Glycine max
  unsure (1)..(395): unsure at all n locations
agctatatggacaactgctcaagctcatgaattcttgctccgncagaaggctagatctagatggatcaaggagggagattgtaattctcgctactttcacttgttgatgaatactaatcgcaggaataattccttataggggatcatgctagatggcatgtggactgatgagccacataaggtgaaggaggcagttagatctttcttcttgcaaagattccaagaaccagattttcaaaggccaaggctcgatggtatcaattttcgatctatcagtcaccaacagaatagtttgttgtcggcaccttttcaagtggaggaggtagagcaggctatacggtactgcgggagtgataaaagcccaagtcccgatgggctgatatttaaatttatta

SEQ ID NO: 185707 - DNA, 451 bp, Glycine max
agctatgatgcattgatgctttctactccacttttgctagcgcatattccttgtgagcattaagatatgacaatgatcccataaattgatgcgttaagtgtgacatgaacaatgtctgaatgacttctccttggaatgataggtaacatttgttgaaagtcgcctccaaaagtaacaactctatcactgaagattgagtcacttgccattatattccttagacttttgtctagtgcttaaaaaaacttatatgcgatcaacacttcatcccatatgattaactttgtttatttcaataactctacaagctcacttccttgatggatgttgcaaattgagttttcaactgtgggaactggaatttaaattagagtgggttgttcttgctgtacgaacaacaaagatgttattcaactataatctatagtaagtacaatctgatgttcagatc

SEQ ID NO: 185708 - DNA, 455 bp, Glycine max
  unsure (1)..(455): unsure at all n locations
agcttagatatgttntatgtttatgantaaattatctttnncttttcagaaattaacccacaagtttaagtgtgtgtttggatgatggataactttagttaaaattacttttaaaatcatattatttatatttgaatatttttattataaaagcttagatatgttttacgtttatgataaataattgatttttgtttcagattcctaataaaaaaacttgtcgaattaaatcatgatatatcaaaatntttgttttgaattttaatcatcaattaaacaatgatgtgatacaattggaatcacttataaaataatcacggttaggaacaaaacatattttagtctattataaaattaagttaggagtaaaacttaatataaaattatagattttacacaaacaatatttataattatctcatctcaagatcaactttaaactcagaattaattta

SEQ ID NO: 185709 - DNA, 304 bp, Glycine max
catggtagatatgtaaaattctaaaactaaactttttagttggatctatacaattcacctagcagttgtaaaaagtccagggggctgaaaaaggatgattatataatgcacaatattgaaaatattgttgtatgattgtgctaatcctaattgtattgagaatattgctacatgattgcgctgatcttaattgattctatttgcattaattctgattgtatgtattaattcttattgtattttaattttattttgtatcttgatctcttgattattgggatcacttatttttaggatagatagt

SEQ ID NO: 185710 - DNA, 363 bp, Glycine max
tccatcaagttgaatccttgtttgttcggattccccatataattcacttcctatgcagcatcatcaaggggtatacaacaactagattcatatgctcctccacatatactacaacctccaacctgtattactactgaatgggaaggttgaactacttgcagttgggttggcagcttactaagtgtctctgtcaatgattccagttgtttagctaacaacttgttcagtgccaacagtgcatcttgtgaagaaatctctagtaggcttctctttgtgggtacatgagttctatcacacagaatagcatgatcactattagccatattctcaataagttccatttcttcttcaggagtctttaat

SEQ ID NO: 185711 - DNA, 452 bp, Glycine max
  unsure (1)..(452): unsure at all n locations
ntgaaccccntgaannnctttgatccctgatagagccgggatgcttacagtccacctgcaggtaccactctggtattttcgaccgtcaacgagatttatttgtgagtatgacacaccatgtgagcgcggaagatgacgcctatctccgcgtgtcaacgggcttgtcggccacggttgaccaaaggcgcacaacacgaccttagtcttttgcggctgtcttgcttttcgtctacagacagcacaaaagaccgtctatacggattaccacttgggtcttttccgacgtcagcgggactcaaatgtgaggctgacagaccttgcgaacgcggaagacgactaaatatgcgcgctgcaccggcttgcggacggggtgaaaagggccctaaaaacgcgataattccttgcgcgatttggctttccgcttccaacagcaaatacaggggctctcggcc

SEQ ID NO: 185712 - DNA, 356 bp, Glycine max
ggagctgcctcggtaaaaatgcttcccagcgctctttaaccgttggatcttctcgaaattaggtttacaacgtcaaaagacacttgtccatgatctgaccgttgcgatctgtgagaagatgtctggagtgtgctagaagcttccgttcctgagagcatctcttatttaagcatttcagcctttgctttcgtgtagcttaggaaaaatgtcatttcttcttctttctttcttccaaagccatttctaaagttccaagaactttctccatcacccacatgcaccattagccaccacaaactatcattgttctccattgtaaacccacaccgagaggaacccttcaaccgaagcggaat

SEQ ID NO: 185713 - DNA, 332 bp, Glycine max
agcttgggggagccttgatgctctcatagggaggcttagggctgcttatgaggaaaatggtgggtccccagagactaacccttttgcaagtggctccatcaaggtgtatctcaaaaaggttagggagtgccaagccaaggcaagaggtatcccttacaagaagaaaaagaaggcctcaaatcaaagcaagggaaatgatgaatcatcctccaccatgcacttctcttgaacaacatcttcagtatcgatccctttggacctttcaagtcatggtaattaattaattaactaatcttgcttgccatcacactcatgatcataaactatgctta

SEQ ID NO: 185714 - DNA, 379 bp, Glycine max
  unsure (1)..(379): unsure at all n locations
tgatttattgtgttatgtacagaggatgaagaagccaatggaagagggtatgcaatatatagagaaattgtaggcaagttgcatcagacacagcaaggtagtgatggagatatatattgaaaagagagaaatgcgagagaaaaaaattgtaccaactttcaaacatgctgctccgatccatacgtgctttttactttttaaagtttttgggagctactttggaagaaacctttgagataaaagatgagatgggtcaccgagaagttgacacttatcactaaatatatggattaactcacctaanattattttaacttgagtttgaatcttaaacatataattatattaaatatttaaataaaaaatttatcatttataa

SEQ ID NO: 185715 - DNA, 342 bp, Glycine max
agcttgtaggattatggggtacccatcacatgtggtactaggtggtggtcgggcgatggtgcacaacaagttttccacattcacaaagcgcgcataaacccaccatcccctgttgcccaccttcaactgagctcacgtactcccacgtagcccatatcctcgtttctctcaacaccgggtccccatcaatcctcccaagcttccccaacatcaaagtaatacaacattcaaacaacacaagctatcacagccaagcaaaacagggcaaaggcagaaaactctgccccaaacaccaaccaaaatcacagcttttcacatacaaataccccagaaacatttcct

SEQ ID NO: 185716 - DNA, 280 bp, Glycine max
tatactaaccggaacatactttaccattagaactgccaatacctactggggttcgctattggaaggaattgatttagctcaatttttctctattcatatgcaccataactccataagcattctctttcttttcagtcctattcattattttttacacatttgtgagtaggtgggtggattttgctcgatggggtggagtccaaaagataaaagattgaacattattttttgccatacttgaaaccttaaactaattctccattggtattagaatttgaca

SEQ ID NO: 185717 - DNA, 270 bp, Glycine max
  unsure (1)..(270): unsure at all n locations
agcttatcatcctttnttagtgactcatgatagccttaagtttacttcaatagttgttctttacagaaattttcatttctgaatacacttaagctaactcatgagtaggcataaacttaaaaggctcatgattcctgctcaaaatgtgtttcataaataaaacacctctaattttggactcatcagttctttaattttgacacactcataatgatgctcagaaaggtttatagagcaactaccagaattgagaacttggaataattcttg

SEQ ID NO: 185718 - DNA, 308 bp, Glycine max
tatcggattatggggcacccgtcatttgtggtactatgtggcgatcgggcgatggcacaaatcaactatcccatttccacaagtcaagcataagcacaccatccccaattgcccacctttaaatttagctcacgtgcacgttgtagccttctcctcattcctctcaggcccgggtccccatcaacccctccaagctttcacaatatctagacaattcaattccatttgtcatgaaactaccttaaacaaagaaaaataaagtggaggcagaatctttgcacaagaatcattcaaattccacagagttt

SEQ ID NO: 185719 - DNA, 354 bp, Glycine max
  unsure (1)..(354): unsure at all n locations
tagagcttagctacacacacccctcaaataactaagttcacctccttgagaagcttccttgaaaagattcctaaagaagctagagcttagctacacacacctctctaatagctaagctcatctccttgagatgagaagctggaacttagctacacaccccctataatagctaagctcacccccatgacaaaatacatgaaaatacaaagaanagtccctactacaaagactactcaaaatgcctcgaaatacaaggctaaaaccctatactactggaatggccaaaatacaaggcctaaacgaaggagaaatacctattctaatatttacaaagaatagcgggctcatacttag

SEQ ID NO: 185720 - DNA, 412 bp, Glycine max
  unsure (1)..(412): unsure at all n locations
gtaaccccccttntaaatgataggcttagaatgcagattaagacgaagaagaagaagaagaagaagaagaagacgaagaagcaatcaatttaacaatgttcttttaaatgcgtaagatcaaattgattgcgataaaataaatgagataagggaagagagaaatgcaaactcaatttatactgggtcggccacttctcgtgcctacgtccagtcctcaatcaactcacttgatattttcactaacttcgtaaaaaaacctttttacaacttctgaacacccaaggaatccctttcccttgtgttcangaaactcacaattcaagagacaaccagtctcttgattacaacttactttctgagatgaatataaagatttctctcctttagagtggataatacaacttgatgttct

SEQ ID NO: 185721 - DNA, 384 bp, Glycine max
  unsure (1)..(384): unsure at all n locations
agcttcctttacaacanagagaagagaataatgaaggattgaagaaatacaagtagtggggatgtctnctccacctctagaacctcacaatcactcacagactcatctcatgctctcaggatggcttcctcttctcactctgttctctaccagtcttctcacagcaaaagctttgaaaactctctggaacttggacctttctctctntagaagtctctaaacatgcaaaagctttgataatttcccaaactcccctccaaaatctgatttcaggcttaaataggtggctttgtttgtgctagcacgcttagtgcaactatggaccgctcagcgtgcattagtggatttcggcttaacgcgtgcgtttctcacttagtggatgga

SEQ ID NO: 185722 - DNA, 360 bp, Glycine max
  unsure (1)..(360): unsure at all n locations
tgaatntggtttagacatgattgatacatgatttgtgacttgtatgaattgatttgngcaagaatggatgagaggaaggtgtgatttcgaaatctgcacttatgcagaaattttgctgtgaaattgtgcagcagaattttgcacaagtgcagaaaaatgcttgtgtgtggttggctgtggaaagtctagtgcagaatgagttcttgatgttngctagtagatcccaacggtcataatgtaggcttatgtactagagacttccagtaaaaatttggagtcgatccaacggttaacgaattggatcgaaggaatngttactggggtctttaagtgagaaaagctgtgatnttggttgatgtg

SEQ ID NO: 185723 - DNA, 336 bp, Glycine max
agcttgtgcgaatctttcccttttgttctaatgatctccatggttaagatagaattcattaatcaaggcaaggttgtttggttttgtctttatcgggtacccaaattgtcgtcgagcgagaagcgggttgtagctaattccgccacgcatacccaaaagaggtacgttgggatattcaccacaactcacaataatctctccaacatcactagctgcttggtaccaaacaatgtcagatgggtcaagagtcatgattcggcgaggccaagaaagcttatcatcattggtcttgaaggcacgggattgaggtaagtggaaggtaaaccactgatagag

SEQ ID NO: 185724 - DNA, 371 bp, Glycine max
  unsure (1)..(371): unsure at all n locations
taataaaaaaagcatttccaaatattccaaatcatcattagctatatttgatgtgcctaacatcagtgacgtagtcgataaatttgcttctattacgacttagttaataatagggaagatagaaataagaagcaatcacactctctatggcttctattangagtgaaagaaagagcatttacccaacaatatctctactcttatgccacatttcatttaggaatctggttgcttcttttttgttacaactattgatgataatatntctggatgagacaagcatctcagtaggtttataaaacatggctcagacagacctcagccagtaaaccaggttaaacgcttctaatagactagagattataacagac

SEQ ID NO: 185725 - DNA, 383 bp, Glycine max
  unsure (1)..(383): unsure at all n locations
agcttttgtcactccacctatatttggtcttcacattaaccaaacttaacaccgctaacaacaatgccaatgacttcttgcaccccggatacaaaggcttcttcaaatcattttccaatgtatcatacataagagcatgtgcttattgaaaagattctcttgtccaagatcacaaatcatgtcctctaatcgatctcccatttctacattaatcggttcaatttcggaccctctcaacatgtctgtcaattcatcatgccatatccatgtcgtataatttttcttaatcccaccatacaaaaaatgctcattcatgtcatctaatacttgtcaatctccattcaaacagnttatacaagaacaaaaattttttcatcctcatc

SEQ ID NO: 185726 - DNA, 338 bp, Glycine max
tgaaaggtcaaaataagactcatagtgtcattggatgatgagaaaaactttaagctatgagaagtaattagcaactaaaggacacgaaaaatgttgcaggcctgaagaattgcataatgaacatgacatgaagaacaacattgctgcaacacactcaacttttatgaacaccgtcggggctgaaacaacctaaatcatggacaaaattaagcttgaagctgcaaatgctaatatgcctagatagcttaatatgtgtgtagtaatttgaagactacttgagccacataagggaattgagatgatctcactggttggggaaagttaaaagaatatataca

SEQ ID NO: 185727 - DNA, 286 bp, Glycine max
agcttatcatccttttttagtgacccattatagtcttaagtttacttcaattgttggtctttacagaaattttcatttgtgcatgcactaaaacaaactcatcaattagcatggtgctaatgggctcatgactcctgctcagaatgcctttcataattaaaacacctataattcagcactcaacagttctttaattctgacacactcataatgatgcttacaaggcttagagagcacctaccaatattgagaacttggaataatttttgaagcccattaatatgat

SEQ ID NO: 185728 - DNA, 261 bp, Glycine max
ctcagcttgtggtagaatggtagcatagtcagtcaaattataagtttggtttgaagttcataccataaggcctgtcaaagggaagctcttagttgacctcattgtcgaattccctcctagtgaaagcaacaacgaagggtggggattttttacgtagatgaagcttcaaacaacaaaagtagtgatgttggagttactttggaaagaacaaatgacatctcaacaaaacagtcatttgaaggttgattggaaagattcaaa

SEQ ID NO: 185729 - DNA, 335 bp, Glycine max
  unsure (1)..(335): unsure at all n locations
cacctgcggcatgctgcttggcaaggcataagcatatgatcctaagtgggtaaaggcgcacgatctatgtgccgaanagggtttaaaactacagggtgggttaggctattttaattatatgctatcttgctattttgaattttcttcgaattggtatttttgttttgatatttgaaatagctcatctttgaagagtgatatgtacaaaccccaatttgctgggtttgtagatgtggatttggccgcagataagaacatttttcttaagagtttggtatgtgaaaattcaattcatttggtgcttatatatagccattatgagctcgaanatacta

SEQ ID NO: 185730 - DNA, 400 bp, Glycine max
  unsure (1)..(400): unsure at all n locations
tgtgagcaagctntcttggccttcatgaagactattgccatgccgccagtcctaagtcgactcaagccaggagtaccttcacttctatacctctcagtggctgacaaagttgtaagcttaaaccttgtacaggaggacgggaaacaccagcttcccatctattttaccagtcgtatccttcatgatgctgaaaagtggtaccagatgatagagaaggtagtgctggcactcataacctcagatcgacgcctcaggttgtacttccaaagtcaccaagtggtagtcaagacaaactaccctgtcaaacaggtgttgtgaaagcctgaactggaggaaatgatggtattatggtcctaagtcgacccaagctaggagtacctttacttttatacctctcaat

SEQ ID NO: 185731 - DNA, 239 bp, Glycine max
agcttatggtatccatggggctttccaaaccactaacttcttatgcaagaaatagttaatccattgggagttacatcccgaaggatatgatcaaatagctaattgggtcattctatctcagtaccaactctattttgttaaatgggtttttttttatggataatcgattctggtgaattgggaagagttacttcatgtataatgccttctatttcacaaactcattaaataaaacatat

SEQ ID NO: 185732 - DNA, 375 bp, Glycine max
  unsure (1)..(375): unsure at all n locations
ttttaccctgtttctgacttcaattgtgaaatttctgaatgtatatttttcttgttttgcatccataacattgctgagctccagtaattagtatttggaatattgctgagtctaatctctagggaggtagcatccttatgtagagaaaaataccttctttccaagttgagagaggataacaaggaatnnttctctcttttttatggttcaacttcaagccatgtcattcaggatgttgatttcttatttttccttttccttttcttttttcttttcttttatctataaagtagatgctctcatttcacacagtncaacaatttcttgtaatntgttagtggtgtagagaataaattgcaagtgcatgatgaatga

SEQ ID NO: 185733 - DNA, 273 bp, Glycine max
catgccagcttgtaccgatcccatatggttggattattctcaaagacttgtcttcctatgattttacctaatgagagtgacctaacttaccaacgtgtgatctgctttatcatgtactcatgggcacttgacgaagtttttcactaacatggtaccacattgcatataagattgagtcttagtatatttggtgcataacgcttgtgtattgatcgatattgattggttgagtgatgttgtgttttgatccttgagtacgtgaatgatgggaaa

SEQ ID NO: 185734 - DNA, 412 bp, Glycine max
  unsure (1)..(412): unsure at all n locations
tgcaaccactgtgactcatattcagtaaaggaactctgttggtatgtttttactntcagaatcttcactgacagagcaaaacttaactactgaagttgtagtccctaattcccatgagagttatagtaagactaatagttctgactccttactcctaattcctgaactcttccaatcttgagctttttatggtgtaaaattgtttaatgctgtgctttgtgtttaatatatctagaactttagatgattcttagagtcaataagagattgatctatgttatatggaggagtgaagtatctattataaaatatgtaacatgaacaaaactacaaagttaccctgtgcatgccatggacaacgggtccatgaccccccatagccacatcagtcctttgagttgcagaaatatta

SEQ ID NO: 185735 - DNA, 319 bp, Glycine max
agcttaatgttttgtgatggtggttagcttgtaagggttcacttgtatgagctcatgagccatatgagtcatgtatgtaaagatcattttacacgaggtagtaatctaatcttggaatcaccgttagttcacatttgtgatctaaagctttcaaccattgaattaatttcacacaacaaattcaacaaacttgatcgaataacacatccatcatcttttccaatcatacgagacctttgaagaagaagaattttcaaaaatcaaactctgattttgaatgcaaacatgaaacgattatcaccgaatggctttgaacaca

SEQ ID NO: 185736 - DNA, 327 bp, Glycine max
  unsure (1)..(327): unsure at all n locations
caagctttaaactttgctaactaaataaattgaaatataaaacttaaactaaaacattaactgaacataaaatgtatcaaaagcagaaaaataaatggtaatcctgtcatggctcttcctgtgctgctgtgggctcatcctgaggtaaggagggagcatcctgngctggctgagggatatccttagctgtaacaggccatggatcccaaagtgtttgcgctactaccatatctgctacataatctatatctgcagcgccatactcctcatctgagacctctacccctggtgtagtaactgaagaagtctgcggggtggtctctggag

SEQ ID NO: 185737 - DNA, 205 bp, Glycine max
agcttttcagcatatatctagctcgaaatatttatctacatgtatgacattcaatccagtcctatatgtccaaatgctgaaacctgacactactaatatataaactgttgcgtgtcactcttgttaggaagaataaataaaataatgaaacataacttcttcggaggcatgaagatgacgataacttcatgtcacaaaaacaatt

SEQ ID NO: 185738 - DNA, 365 bp, Glycine max
tgttagaagccgtgatgtgaaattcatggaagaccaatttattgaagacattgagaaggtggaaaagtatacatctaaggaagacaatggtgtggctgattttgaaatagttcaatcgcctattcagaatctgaatattgatgtttagaatgatgttggtgtccaacaacttggagatgaggtaaatgttcctactgatgatgatgaagaggagcatgacatgttacaagatgaaaatcttggtaatgctactgaaccaccttaagttcaactcaggaggtccaacagggagagataaccttctaggaggtattctcctaatgagtatgtgatcctaacagatgatggagaacctgagtacttta

SEQ ID NO: 185739 - DNA, 316 bp, Glycine max
gctacctgaatgcccgcatcgagaattaatatgccaagagagatttttctgtctttgaagaaggatgtgcggctctcatcaatgaggacctgtataacatgcctcagcctatttgctaataacttagcgatcaccttgggcatacacccaatcaaagaaatggggttgtgatcatcaaaagactgatggtgattaactgtgggaagtaaagccaaaagagaaacattactgcctatagggaatcttccatgcacaagagaatcatgtacaaatcttctggagtcaattattaccactccccacaattacttaatga

SEQ ID NO: 185740 - DNA, 196 bp, Glycine max
ccattcatgctggccgaacaacaccaacccctccgaactgaagctaggggtttcaaactagcgtatgaaacaacgaactctccctcgtgcttttcgattcccttcaatttttcatgtttccaactgaacaaaattaaggtttaacttggtgtgtgtgatgaaaattgagaattggatgatggagagtgtgtatgga

SEQ ID NO: 185741 - DNA, 458 bp, Glycine max
  unsure (1)..(458): unsure at all n locations
tgaaacccttggaagncccttgaataccttagagtccaccgtggatgctctacagtctacctgcaagcatgcaatctgtgcaactggaatgtacgaagatatccaagtaatcctgtaatggaacattggaaaggtgcaaagaaagatctgagatacttacagggaacgaaagatcacatgcttacatataaaaagtcaaatcatattcacgtgattgagtattcacactcatactttgttggatgtggggatataaaaaaaaaccctcttttctatgactttcttttaaccgaaggagccatatcatggaagatttgccaccaatgcggtgttgctgcatcaccctgggagatgatcttgtggccgtcaaagctacatgtaatggaaatggtgagcaccctatgcatagccttcattggcttcagactttatgtgaataccctaaacaggcgtggacc

SEQ ID NO: 185742 - DNA, 286 bp, Glycine max
agctcggagaggatgcttcaatggcggaaaagaaagagggatttaaagagagaggggtgagcactaaattgaaggaagaaaaagggagagaagttgaactttgagttgtgtctcacaagactctcattcatcaaagttacaacaagtgttacacatgcttctatttatagactaggtagcttccttgagaagatttcttgagacaacttccttgagaaagctttttgagaaaactttcgtgagaagctagagcttagctacacacacccctctcataactaagctc

SEQ ID NO: 185743 - DNA, 291 bp, Glycine max
  unsure (1)..(291): unsure at all n locations
nagcttcaatttgcagcttgtttgggtttacctatttcgcgtggtttcattggaaaatggagtgaacctttcgccccgttaatgccaccacaataattattaacctggaggtaaagggcttgcaaatggtgaataaaaccggaccaattttgatttacatggagcttgttgatggatgtgttgtcaatcaaggcgcgcaatgaaaagccganaacatagtgttagcactcatgaactaccacatggtttcatttatgattgcgtgagctagcatgaaaagcttgactgaaa

SEQ ID NO: 185744 - DNA, 399 bp, Glycine max
  unsure (1)..(399): unsure at all n locations
tcagcctgattgctaagcgacatcttatccttggcttagcgtgacccagtgtcgccaagcgcaattccttacagccataactggggttcataaagctaagcaccagtcatggcagctaagctgaattccttgcagcaatgtgagcgctaagcgaggcctgatctgtagaagcacagactatgagcttgatgctttcatgatgccatatgaacatgcgtttcccaagttaagatcaagacaaaaatccaagagattcaagatacatcatcaagaagatctctagtgatttacggagggaagttcaaaatgaaacaacaagaggtttggccaagaanattaagctaaaatgtccttttcaagagaattactctctagtaatcgataccagaggatgtaatc

SEQ ID NO: 185745 - DNA, 305 bp, Glycine max
  unsure (1)..(305): unsure at all n locations
agcttgtaagtgttatgctntgatctgtgcgtgtatgcttctaacatgtcttcattgtttcttttataagcagtatgctttgccctttgtctttctgctgactggggtcatttctgatcatgaaatgcttgatttgttggacttggctttatcaactgacacttcaaatacaattgtgagagcccaggaactcgtcaggacaaggatagatcctttacaacttatatcacaattggaaaatcttattatagacattcttgtangtcaatgtgaacttggtgatttttgaaatcaaacaagatttt

SEQ ID NO: 185746 - DNA, 364 bp, Glycine max
  unsure (1)..(364): unsure at all n locations
ttaatctagcttgactagcattcttagtcaatggctattctaatcagtcctattcagcttacttactctctaaaaaaggttaacacgtattagacttttatatcgtataaccgaggtaaaagcatcgacgtttaaaataatatcggtaacatcggctcttcagaaccgatgttaatatataaatacaacatcggttattgaaataaccgatgttatataataagaaatataaaaaaagtaatatatcttcatatcaacatcgattgttatcaaaattgatgttaatatatgcaaacaacatcatnttttttggaaaaactgatgnttgatgtctatattaatatcgggttaaaaccgatcttac

SEQ ID NO: 185747 - DNA, 247 bp, Glycine max
  unsure (1)..(247): unsure at all n locations
agctttttgaaaacaatttttattatcattaagttntgnaacatatgactttgtgacattgagagattgagcctaatacttaaaaatagttcanaaggtgaaatgaacgatagtantaatggtgtatatagatccgttttggtatagaccaaatatcaaaatgatattattttcttatataaaattacttatatttctttctttaaaaaatattgtttattatcataagaataaaatttactaactt

SEQ ID NO: 185748 - DNA, 353 bp, Glycine max
agcttacccattcagttttagggtttttatgatgatgcttgtgatgtttatgtgctgaaattgcttatggaaaactgttagagatgaagggtagagttaacctagggttagaaagtgagaatatggtgttatgagtggaaaaagagtgaggttttgagagttggaaggccaaatctggatttagtggtatttggaggttaaagtgagttaatcctagcttgaaatgtcatttaggacttatgagaaagtttgggttgtgctagagagaaaaacaaatgaccaaagtgaacaaagagccatttctagggtaaaattgggtgttgaggagtcaaattttggttcggtgaaatttt

SEQ ID NO: 185749 - DNA, 359 bp, Glycine max
  unsure (1)..(359): unsure at all n locations
tgaaggcgtgtaacccaccatcttctcatagtagaacatcgataacatgtctactatcattgttatcatctccctctccatcattgggggcgttacttgagctgccagatgccttcacctttgggcatattctttgaaagattcatgctcctttttacacatgttctgtaactgcattctatcangaaccatattaaaattgtactgatactacctaatgaaggaaaccattacgtccttccaagaatggactcgggaaggtttcagaatactatactaggtgacagctgccccagtaagactttctagtgtcataccctaattcgtctggggatgatcgtttgccacatttgatcctt

SEQ ID NO: 185750 - DNA, 318 bp, Glycine max
  unsure (1)..(318): unsure at all n locations
ntccctctntgaacaaatacctctcagccaaatagaattcatcttgtgcctttttcccacaactcttgtaaatgggagagaaatgttcatctaaagcatacaagtccctaatgttatcaaatcctaaaatttgagctcctatggagcaaaacaatgtgtgtctcctaaagagggcatcaactacaacattttgttttccctttttgtatttgataacatatnggaaatgctctangtactctacccattttgcatgccttttgtttaacttgctttgccatctaatgaactaaatgattgatgatcactatgaatgac

SEQ ID NO: 185751 - DNA, 340 bp, Glycine max
agcttattgaagtttgctaaaaaccgtgttaggtttggtctgggttacaaccatacaaaggctgacaaaaggaggatttttttggaagggaaaaaaataagttaacccaattaacaaggtgggggcccacaagtgaagagggtcctaattggtcaaatcaccaaaagcttaatcagtgtaggatggatgattgaagatcaagttgctgtgctagatgaagaaaccaatcaagaccagcccaaatgggtgcaatcgtgttccccaagctttgaattgaagaaattgcaaatcatggagcgactcgagatttttgtgtcaaatccaatgtaatcaagtagtt

SEQ ID NO: 185752 - DNA, 342 bp, Glycine max
  unsure (1)..(342): unsure at all n locations
tcttagagatccactttntctttgctgttttgtttttgaaaactctagcacatgagtgttcactatngaaaagttttgactttggaaacattttttcaccttttgttccaagaacaaaaaatcttccacttacactcttgttccttacacttcgctctaaccctttcacgatcattcttctttcaaacanattcccttcctaggtgaattgtgtagtctctaagcgcatccttaaacaagtcaagggtttcaaattccatccccaactctaggtgaacttgaccaaaggttgaatttggattaaaaattgggaaaacaaccttttcatcatcctcatcatct

SEQ ID NO: 185753 - DNA, 346 bp, Glycine max
  unsure (1)..(346): unsure at all n locations
atgatagcctggagttaacttcaatggttgttcttggaagaacttgtcattttttatacactaaagcangctcatcaagatgcataaactcagaaggctaaggattatgttcagaaggtnggcataattaaacaccaagagtttggactcaacatgaatgacctctacnctggtatgataaacacatgagccatagggacttctgatgtacctatgagacacaatgaactcattgaatcttttgtaccactactttggtgatttcttcagcccataaagagacctcttcaatctacagaacaaaaatttcctttctttcaccttcaaacccttacaatgttgcatt

SEQ ID NO: 185754 - DNA, 337 bp, Glycine max
tgtgaaccaatttaaaaaatctttgtaatacagtatgacacgtattaattattaaacctcatccttaaaattaatattggaggaccaaacttattatattcaataggggcttttaatgttcttccattaaatggtaaaagttcattttagtaatttctttaataaatggttgcattcaattaccaaagatgaactcttattatgattagagaacaaaataaaaattcctatagaaatccttcacacaacaacttatgccattcatagacacaaaagtctagatattgtgctatctacattctcacatgtctctagcttgtcataatctctgaaacac

SEQ ID NO: 185755 - DNA, 156 bp, Glycine max
tggaagtcaaccgataaaagaacaaagaccacaaagcaaggaggcttgtgtggtggctggccaactatggatcttgagtgatatttggaagatggcctctggtaatcgattacaaaggatgtgtaatcgattacaaagcttaaaaatggggtcaag

SEQ ID NO: 185756 - DNA, 426 bp, Glycine max
  unsure (1)..(426): unsure at all n locations
agctcataagaacaaaattgcctaaatcatttccaaatatgtatgtgaattangattcatcatcaagaatcaagccaaggctattgtgcaagcaatcaatgtggcaaaacacaccaaaatattatgatgatggatgactcaaattctcacaaacgtaaacttatcactttcaaattgagctttcaaaactatcatgacatgtagaggaaaaacaaggatttcaaatcacaaaatgtcaagagactttattttcagaacaattacccattacttgaacatatcctataattcaaagaaaaacatgaaaatttaacacaacaaaactaacaaaaattaaactagaacccaacaaaactaacacaattaaactaatttaacacaactaacaaaaccaaaaccaaagaacacactccctcctatacttaa

SEQ ID NO: 185757 - DNA, 285 bp, Glycine max
  unsure (1)..(285): unsure at all n locations
agcttgagttctacataagccttccaatttctactagcaagntgttttcaccttatggagaaatgcctgatttgaaagagaagcatgaacagcttaaacttttcaggataaatgtcaagttggtctcaaagatcaatgggaaggagttgagtaattacttgagcaacgagggtgatgattggattccacttccacaggattatctgcatgctttggatgtagttcttagggaaagtccaactgagaaatgcatacctgtagggaggtcattctattcaagttcaa

SEQ ID NO: 185758 - DNA, 408 bp, Glycine max
  unsure (1)..(408): unsure at all n locations
gaaaaatctagtctttgtgggtgtcgtggatctaatttgttttncttcctgtgttgaaaatggagctntgcaaattagaggaaaaatgaactttatggtaatgcaaaggactaaagcaaggaaagttgtacatccttctanggtccactataacaggctctatcttaactatttcacaagctgggagccatgcgtccaatgataatttgttgtgacatctgtgtctagcccacatgagtgaaaaaggactggaaattatgagcaagcgaggcttacttggaaatcacaatgtggaacctctttagttttgtgagcactatgtctatatgaagcaacatcgaaagaaattcccaaagggtttgtagactaccaaagtcacattggactattgccattcttattgttggg

SEQ ID NO: 185759 - DNA, 94 bp, Glycine max
catgcaagcttctaattacgagcgtctcgattattacgggactcaaactttcattccgaatttatgttattgacggttgaatttgctcagagca

SEQ ID NO: 185760 - DNA, 167 bp, Glycine max
tcaagcttaagaaaagtcaacgataataacttttggactcgttgtttcattgagtctcgttatatatcgagacgctcgtaattgaaaatgggagctctaagaaaaggtaaaccgggataacttttgactcagaatgtcgattgtgttccgtaggatatcgagacgct

SEQ ID NO: 185761 - DNA, 198 bp, Glycine max
agctctggccaatctgatctatggaagctataggcagctaattatttgaattgccgtttgctggctctcccttttacttacctgggaatacccttaggagcaaacccgaagagatgtaatttgggggcaccctatatccacaaatgtgaaaaaaaggtagcgaggtggaaacataaacccatatcttttggggggaga

SEQ ID NO: 185762 - DNA, 396 bp, Glycine max
  unsure (1)..(396): unsure at all n locations
agagtttttctattgatcaagagggtttgtagcaatttgtgttttgtaccctgtaactaaatggatttggaagntgaaatttaatgggacttccaattatatctgatgaaagtagatctttgcacttttattcttggaactattaccgggattttggagcaacaccgggctaaataaagcctgttgcttggggaaaattactaatcttttctttccccacacaccttttcattctccaaggtgcttctaaatatgtctccagaactataattgagaatttaacagattaaatatggacggcttgatgtacgcacaaagaaagcgttccagcttgggcccaagaagtcaaaccctctatgtaggaccatcacaacttctcagctctttcattgaacn

SEQ ID NO: 185763 - DNA, 95 bp, Glycine max
gcctgaagctgcccggggcatgcactctaattatgtaacaactgactgccttagtgttgatataattaggattaaaactgggatcactgtgctcc

SEQ ID NO: 185764 - DNA, 286 bp, Glycine max
gctcgaagacaagactatacgaggatcttccttaggtatatttatatctctaagggctaccgtgtctacaacttgcaaactaagaaactcgtcatcagtcgagatgttgaagttgatgagtacgcttcttggaattgggatgaagaaaaagtggagaaaaacgttcttatacccgctcaactacctcaagaagaagatgaggaagaagacctaggtgaaccaccttcaccttcaccacaacaacaagatcaagaactatcatcaccagagtctactccaagatgag

SEQ ID NO: 185765 - DNA, 369 bp, Glycine max
  unsure (1)..(369): unsure at all n locations
tcttgactgtcactaagngacaacatggccggacattctaagaaacatttctgatgggcattctggagaaccatgctaatactcattgggatgcttactgaaaatgacaccatgcttgttgaatatccttgctgaagctcatattgatattttattctaaagccacacatcttcatcattcataacacttattcacaactcttaagcattctaaggctgattactttacaatgacttaatgaaagttcactcattgacgtgtaatcgattgtccatgctagactcagcagnggtctcaatcctgtggacctatgcttctcatcggagcttctcatggaccacgacttcattctttaacaatcctgtatc

SEQ ID NO: 185766 - DNA, 402 bp, Glycine max
  unsure (1)..(402): unsure at all n locations
aggttgcttagtattaggaagtattgtgnacttaatttttatggatcaacagatactccgaggttagggtaacttgtatgaaactgttatccggtcgttgtatatcctattaagacttatatacgtgatagatacatatatacatatatatgatactctaatgatgcacacgtgaataaccactaccacgatcaacatgtacatacgtttactcgtgcatggatactctgacttattgaagggacttgtttgttgacacaagcaataacgatgcttccattctgtacctttaaattttacgtgacttttgatgactatggcatatacatgaggacctgccgacttgcttatctatataatagatgcgctgagccccacatatagactaaggaaacgacgaag

SEQ ID NO: 185767 - DNA, 326 bp, Glycine max
  unsure (1)..(326): unsure at all n locations
agcttctgtattcaattttgagcatctgtatatattacgggtactcaatcggatattcgagtaaaaattaattgtcattagaatttgctcagaagatttattttcaatgtcgagcatctcgatatattacgagactcaatcagacattcgagtaaaaagctattgtcataagaattgcacagagcttctctttttaattntgagtgtctcgatatattacgggactcaatcagatatccgagttaatagttattgccgtttgcgtttgctacgagcttccggttcaattactagcggctcgatatattatggcactcaattggaca

SEQ ID NO: 185768 - DNA, 333 bp, Glycine max
  unsure (1)..(333): unsure at all n locations
tccgttgctcaattgcaagcgtctcgatatattatgcttctaaatcggaccttcgagtgacaagttatgatcatttgaatttctcgatagcttccgttggttaatttcgagcgtcttgatatnatacgcgctggaatccgacctacaagtgaaaagttaagaccatttgaatttctcaagagcttccattggtcaatttaacccgctcgatatttatgtgcctgaatcggacctccgcggtaaatgttatgaccctttgaatatctcgagagcttccattgtcaattgcgaccgtttctattgtgatgcgcctgaaatggaccaccgagtaaa

SEQ ID NO: 185769 - DNA, 301 bp, Glycine max
  unsure (1)..(301): unsure at all n locations
agcttgatgtgagaaagcgtggaagagttagtcttcctactttngnnttgtgaccacagagtggtacctggagatatgtcgcggnggtcaagagaccttggngacgtcaggtggggtgctattgcccaaaaccaagcttgaccaatcccgacccaaccccggcatagtcagtcagtgagaacctgtgacgtacctaagcaggcgagctcctggcagtcaaccaataaaagaataaaggccacaaagcaaggaggcttgtgtggcggctggccaactatgaatcttgagtggtatctggaaa

SEQ ID NO: 185770 - DNA, 312 bp, Glycine max
agcttatgctgcaaacatctacaacagacctcctcaaccttatcagcaaaatcagccacaacaaaataactatgacctttcctgcaacaggtacaatcctggatggaggaatcatcccaaccttagatggtcgaatccttcacaacatcaacaacaaccttattttcaaaatgttgctggcccaagcagaccatacgttcctccaccaatccaacaacaacaacaacaacagccccagaaagaacaaacagttgaggcccctccacaaccttcccttgaagaacatgtgaggcaaatgactatgcaaaacat

SEQ ID NO: 185771 - DNA, 107 bp, Glycine max
catgcaagcttctaatgtataatcactactattatgtaacaaatgaaatcattattgttggtataattaatattaaaaaaataatcactgtgctccagaattgattg

SEQ ID NO: 185772 - DNA, 305 bp, Glycine max
  unsure (1)..(305): unsure at all n locations
tgaactnggcaccttactagtcttaactggtccctgtttgtcctgagtaattagagccatgtttggattggtttattttgaagaaataaattcactttttttaatcttgaaagagccttataagaaaaagttattcttttcccataaataatccgaacttaacatgcattcaatctgttggcaacaaaaaacaactattcatgcaacaaattataatacagtgcttaccttaatctcaaaatgctccattttaatcaacaacgtatgttacagagaaagagaggtccactgaaagctctgtaaaa

SEQ ID NO: 185773 - DNA, 381 bp, Glycine max
  unsure (1)..(381): unsure at all n locations
agcttgaagaaagagtcatagatgcttgtataanatctataatttatagnttggaattgcaataagtattattgagctcatcacctcacgaacgaattctattaattattttaatacggctaattctttggacataaaacataataacttgcattttacatgcatttgaaggatcaaatcagtataaagtaaaataaaggaaggtaataaggagaaattgtttatctttgaaggacataatgagaaattgttaagaaaataatcaaatactactgcccagttagatactttgacttggtgcccaacagcaattagagtgcatcaacaatttctattttgacttagtgtgcatgtgcaacagcaattatagctttcaacggc

SEQ ID NO: 185774 - DNA, 298 bp, Glycine max
  unsure (1)..(298): unsure at all n locations
ggacactatgaaactcagcttgcagngattgctgttatgaggattctttctttttagtatttatctttctgtcggggagtttcactaggtcccatgtcaaccctctaacatggcaactaanaaatatgaagtacgtaaggataggtcattcaagtctttttctaattgaatcaactagtatcacttcgtacagtatcctcttatcacggaatgcgaatgatgaataaataagactttttgtttcttacaagggataacatgatgagttatataactaaatatataatctaatttgttt

SEQ ID NO: 185775 - DNA, 302 bp, Glycine max
  unsure (1)..(302): unsure at all n locations
agctttgatgcaacatttggagaggttattgaaacantgaaatgatgtgcctcatgagaggttggatcaaatggagaatagagaacatagtggaagagaanaggaggagaagagggaatgatggtgttcctagacaaaaccgaattgatggtattaaactcaacattcctccctttaaaggaaagaatgatccgaaggcctacttggagtgggagatgaaaatagagcatgttttctcatgcaataactatgaggaggaccacaaggtgaagtttgccgccacggagtttccgactatgctc

SEQ ID NO: 185776 - DNA, 311 bp, Glycine max
  unsure (1)..(311): unsure at all n locations
agcttgctccanaacacaatgtttgcttacttgaatggaaggagatcaagagnttttgaaagtagaaccaaaacataagatcgcccagtgaggtaaaagccgtcagctaatgacattaaaaaagcactttctgggaggcaacccagntttaatttctataatttttggtttcatgcattaaatcattgggaacttgctacataatctgtacataggagtatatcagcctatctttgaatgttagatataagggtttcaatttgttgaggaagggactgaaaaataactcaaaaaatattttctaaaaaatc

SEQ ID NO: 185777 - DNA, 409 bp, Glycine max
  unsure (1)..(409): unsure at all n locations
tcaagcttgtgcaaatcaaatcactcctacatttcatctctagcatgcattnntnnntctttacccactcctcacgtttggttttntagggaaaaacaccataactaaacgcgccgcaagggatccctatcgcaccagatccaaatctagaacgatgggtgatcaagaggagacgcatgaacagatgaaagccgacatgtcggctctaaaagaacaaatggcctccatgatggaggccatgttaagtatgaagcagctcatagagaagaacgcggccaccgccgccgctgtcagttctgctgccgaagcagacccgactctcttggcaactacgcaccatcctccctcanacataataggacggggaagggacacacntgggcacgatggcagccctcacctgggatac

SEQ ID NO: 185778 - DNA, 297 bp, Glycine max
agcttctagccaaatgcacttaccttgatttaattcctttgatagcccttttgagccttggttccctttccttggtttgaagctcactacaagccttaagtgaaaaaccatgatatcatcatatccttaaggaattttggagctttggaattgttttgggaataagtgtgggggtttttgtttcattggataacatgttttggtggccatgcttcatgatatattttgagccatacttgatatacattgcatattgggtaaatgttggacatgctaaatatgatgttgtttctcaaa

SEQ ID NO: 185779 - DNA, 394 bp, Glycine max
  unsure (1)..(394): unsure at all n locations
ntaatgtttctttgccatcatcaatagctccaatcatattaaaaactcagaatcatgactgacaacaaaactttaatgaataaacataataaggaacgaaaagaatatgataaaaaatgcaacctcaaatacaacaacagttcagaattcttcatgcaacatgtcatatggaccagggaaaaaaaacaaattcatttaacaatcaagtcacataaagagataagaagaaaattaagaaatgcagaattaaatcgtattattgttgaaagcacaggagacataaaggtagtaatgaatagttgtaccttggaaatcgcataaactaatgcaatgcgttgttgatgattggaattnnttactaagttattgtggaatttgattagtctggaatatg

SEQ ID NO: 185780 - DNA, 349 bp, Glycine max
  unsure (1)..(349): unsure at all n locations
agcttgactttgcgagttgattttagccttattttcactttagttattagtcaattcaattaggaaagagaaattccaaagagaaacgtccgattgattnttttggtttattttactaaaagataatttttgattattatattattattttacctctttttgngttccaacgtggttacgacatgaccgaacggtcggatttcattttaacagaaattaacggatattacaaatcanatgatcggtggaaatttatattatttttttattagacgagaanatgacttangtaaatgactaaagcacgtccaaagggggtacaggaaagtaatgaaatgagaataaaagt

SEQ ID NO: 185781 - DNA, 333 bp, Glycine max
  unsure (1)..(333): unsure at all n locations
atccgacaggatgaattagattctcattactatgagatgtacaaaatataaaggcacttagaaccctgggctgattatccaagaatgctctaatgattatttttttcttcccaaatacctatttttttttcttttctaagtaatttcaaaagcaacactttcgcttagcaaaaattaggtctcactaaagaaaaagtcaccttgaggcgaaaggagtttgaaggactcctcgctcaacaaaaaagaagggtcgttgagaaaaagcattgatacacgcanacttaattaagacattctcattgagcaaagtgataattttgcttagcaaaactg

SEQ ID NO: 185782 - DNA, 140 bp, Glycine max
agcttcgatctttatgacatatggaagtttcatgtcggctagtatttgtttattgccggatgctgcctgtcccttttacttacataagaacacccttgagaacaaaactggaggagaactcataagggggaccacacact

SEQ ID NO: 185783 - DNA, 167 bp, Glycine max
tgcacccgaatcagacataagtgtgaaaagtcatgactatttgaatttctcgagaggttcgcgtgttgaaagcttagcgtctatacatagaattaccctgatctggacctgagagagaatagttgtgaacatgagaaatggacgagagcttccgaggttcttttata

SEQ ID NO: 185784 - DNA, 381 bp, Glycine max
  unsure (1)..(381): unsure at all n locations
ctgactggagacattttatgaccaaanatgtttgtgcatggcgaggcatcaacaatgaaacaagccaaggctattgtgcacgccgtcaatgcggcataacacacctttcgactctgtttacggagaggtctaaattttcttactgtcatctttctaaaagatttggccaaaccttctcttcaaaaagaagtctttgtcaaaaactgtggaatcatctttttaatctctgctcctttgctaaaaaacaaagactaacggcctgatcctttgtgctctcttctccttacaaaaagccaaagactaccgcctggaattcttgggtctccctcccttaacaaagattctaagacaaccccctgaaatttttgttctttacaagat

SEQ ID NO: 185785 - DNA, 303 bp, Glycine max
agcttgcatatataaattaattaaggataatccatgcatgatgcctaaactggcatagcaagaagggctctcttcacttttatgtagcagccattgtaatcaatattgatcctcatcaccatgcagaagtactgcaaaccaaagaaaacaaaaaggattcaaatggtatctatagaactaacttaattaagaaaaccaaaagatggtgattagagcttgccttcaatgtcatgaaaaccatccaagagagagagaaagtaacaggaatttgaaaatccaaaatagtatgagtgagctagcaaa

SEQ ID NO: 185786 - DNA, 361 bp, Glycine max
aagctggaatcatttattttatctccgatagtctatgggttatgtccgtccaggtagtgccgaagaatactggcctcacagtgatcataaatgagaaggaggagtttattcctactcaggtgcagaacagttggagagtctgcattgactattggaggctgaaccaggctaccaaataggaccatttctccctgccattcattgaccagatgcttgaacgcctggcaggttaatcccactactgtgtcctgatgagtttctggtatatgcaattactattgctctgagatcacgaaagaccacttacctgcccataggactttgctataagagatgccttctgctggcatgcccctgtcct

SEQ ID NO: 185787 - DNA, 317 bp, Glycine max
  unsure (1)..(317): unsure at all n locations
ggcccgggatccttaagcacctgcagctgcagctgatttttttagtaggaattatccttcctaagatggagccaaacccagtcaccatcattaagaactatctcttttcttcctctatagcctttagntgaatacacctttgtttggatctctatttgggtcttaaccctttcatgcaacttctttacaaactctaacctagattccccttctttatgtataaaagaagtgtccagtgtgaggggaatgaggtctaacggtgttaggggattgaactcatagacaacctcaaaaggggactgcttgggggttctatg

SEQ ID NO: 185788 - DNA, 356 bp, Glycine max
  unsure (1)..(356): unsure at all n locations
tcgaatgggcatcgtttcatcttatttgccaatgatatctttaccaaagggtggaaaccggcctcatatgctaacctgactaagaatgtggtggttagaattcatcagaaggagataatttgcagatatgggttacccaaaaagataatcaccaataatgccaccaatttgaacaacaaaatgatgaacgagatgtgtgagggattcaagaaccaacaccataattcgacgccttatcggcccaagatgaatggggcagttgaggcttgccaataaaatatcaagaagattattcagaagatgacaatgtcatacanagaatggcatgaaatgctacccgtcgcattacatggtta

SEQ ID NO: 185789 - DNA, 387 bp, Glycine max
  unsure (1)..(387): unsure at all n locations
agctntntgttgtttttgaaaaatttattccagacttcggataaactttaatttatggctaattcaagaccaactttttgatatatttcttgctaggactatccctaatcctagggataattagtaggaccaaataaatggaggttgtcgaattataccacatgatttcagcaacaacaaaagttgcaataaagacaacaatgatattttttttattgcaataaagacaacaatgatatttatggacattatcaatgtttcccatgtgtaatcctttatataaaccttgagctggtcacacagtaagatgaaagagaccccgntaatatattatctaacattctgcaatgatgataaactatttctcttcttcttcaaaaaaaaaaa

SEQ ID NO: 185790 - DNA, 366 bp, Glycine max
  unsure (1)..(366): unsure at all n locations
tgaaggtgcgtagcccaccattttccctaggagaaacttggtaatgtgtctactatcaatgcaatcgnttttttcgtcattgaggtggcacttgggcctgcacggtcctcacctttgggcgtattcttttgaagaatcggggccccttttttgcacaaaatttggaggtgcatcctatcccaagccattataccgacactgcctaacgaaggcaccattaggtcctcccagaatagactcgggaaggtccaattagtgtatcnggtaacactaccccagaagactttcttggaagaatgatcaacaattctatcttttgcgatgccccatcttcgacatacatcttagatgctcttgggcaagtac

SEQ ID NO: 185791 - DNA, 462 bp, Glycine max
  unsure (1)..(462): unsure at all n locations
atgacnaccgtgctcggacccgcggancnntaatttgatcctttganngccagcnnngangatagaggcctcaccgctgtataagacaaagtatgtctctaacgaggctatatttgatcatcacgcctctacacactgccaaaaacacctcggtccgacgatgagggtgagaatgaaggtagacttccatgctgacgttgccatttctatacagtcatgtttcccaccaacccaacaatgtctttactctgcctataacaaacctgttccttaccctccgcctaattatttacaaagggtatccctatatcaaccacaaaatatgtctaccctacttgcaatgacgaatacccactctataccttcctaaaacaccaccaacaaatgaattctgctcaacaaagccttataaatatcccatcatcagcgtcccatgctacttgctccctatcactagaaact

SEQ ID NO: 185792 - DNA, 188 bp, Glycine max
tgtgcaaatcaaatcactcctacatctcatctctagcatgcattttctttctttacccactcctcacgtttggttttttagggaaaacaccataactaaacgcgccgcaagggatccctatcgcaccagatccaaatctataacgatgggtgatccagaggagacacacgaacagatgaaagccgaca

SEQ ID NO: 185793 - DNA, 327 bp, Glycine max
  unsure (1)..(327): unsure at all n locations
agcttatttattcagttgaagttgcacatatctttatgattattgagatgataggtaaaatgggaacccagctttggccaaccatttgggccagccttaaccataactttccttgatgggccctaaaaatggattaaaaagtggaaggctctaattataaacctttaaaatataaaaaataaattaaaaaaatctcaaataatttagtaatgtaagattaatcanaatatagtcgtggaaaagtatatgttcttacaatcttttagcgatggatatatttatattaacttaattgaactnatcttttatatttatatcgatatcaaa

SEQ ID NO: 185794 - DNA, 338 bp, Glycine max
  unsure (1)..(338): unsure at all n locations
ntgatgttatttttttatgcatcgctntgattttntgttttaatgttngtgctagtccaaatttttttttaataattttcttttaataaaactcatttcatgatattttgcaaagtgatgcatatcaagctattggctactaaaatttcttacctcaatgattattcaagtcaatagtgaaatagcaatgggtgcaaccatttccccaattctgcataccgaaactcccagttcaatattagtgtacttatctggaaggataatcccaagaatcttcctagtgattaatctgcaaatggaaaccagcctttaagcatctggggtctcatctcattatt

SEQ ID NO: 185795 - DNA, 351 bp, Glycine max
  unsure (1)..(351): unsure at all n locations
ggagggttattccacccgctcttatggatgaccacagagtgtgacctgaagatttttgactgggctatccattattggggaaccacgagagctgctatggacaaaatgcacggtagacatttccgacccatcacggggtagacgggccgacgcaacctgggatgggcctaaacggaccagcttctggcacgtaacagaggttaggaacaagaaccacttggctgggaagcgtcgcggggatggtcatcttagaatttttggcggaatgaggactatatgctatggttcatcatcacaagcctaatacatgaagactaacgcgttgccgggctcttgcgatngttaccaaan

SEQ ID NO: 185796 - DNA, 337 bp, Glycine max
gctattcggtgacactatgatactcagctgttgatagcaggacggcagctaagtactatttacttcgcacttcttgaaagcacaggatatcctttccatatagtgagcattgtcggcatgaggagcaaacccctaaaacttgctcaccaccccaaaaaacttcatccggctaagggctgcccattgcagacttcctagactgttcagtgtatcatgcgtggctatgcttgagactgacaaccatgtgcgatgaacctcacgttcatcgatctgctgttgaaaaccaccataatcttagatgagcgctaatttcaacgcaagggctgaccttacaaag

SEQ ID NO: 185797 - DNA, 330 bp, Glycine max
  unsure (1)..(330): unsure at all n locations
ttgcatgcaagctntatacaattaattaagatcaatggccaatatacaattaattaattacatatatacttatatagtgggagaatagtgtctatcagagttttaattttttgtactgttttaattacaaagacttcatttatttttttttaaaaaaaagttgattcatggattattttaaaattcaaaagtaaatgatttccactcataataccaaggaataatagtaaatgaaggaaatatttattctctatttctataattaactttagaaaaaatttattaattaaactagctatacctggttatattgttttgaccccctttttt

SEQ ID NO: 185798 - DNA, 382 bp, Glycine max
  unsure (1)..(382): unsure at all n locations
tgtgcggtgaactaacctcctttaacatggaattgttgtgcaattgtgatttgatacatattgatttaactaggaagggcaggaaaaataagggaaagatcatatttgatgtggacatccncacagatagtgttttcagattatagcttacacagaatgttagcataaatatagttcaaatggctgaaatattttacttcttagaattcattcattatattattactaatttaaggatcctggtgacaaatatgattgttttaaatgacatcaaaagtggatgaatttgaggtgtaaatctatattgtatgtttgacttgaaattggtgagaacgacaagaggggtcatgtgataaatattggcttttcactattgatagat

SEQ ID NO: 185799 - DNA, 345 bp, Glycine max
agcttttatgtgaaaggatgtgactcttcatatttgaatttgaatttcaacgttcaaaggcactagtaatcgattaccaaaactttgtaatcgattacaactttttgaaattaattggaacgttgtaaattcaatttgaaaactttttcaaaacaattttgctactggtaatcgattacaacaatctgataatcgattaccagagagtaaaaactctttggtaaacatgttttgagaaaaatcatgtgcaactcaatttttgagaaaatttttttcatacttatcttgattaagccttctcttgattcatgaatcttgagtcttgaatcttgatgttgattctct

SEQ ID NO: 185800 - DNA, 355 bp, Glycine max
  unsure (1)..(355): unsure at all n locations
tttcgattcattctatgtacccgtagtggtccacattgtgtttcgtgcatttttattctcgttttgtttactttttatacccnctgttgacgtgcttaagccattttacttaagtcatttctcgcttaacttaaaaataaaataaatttccaccgaacgtttgaattgtattatccattaacttcggttaaaataaattccgaccgttcggtcgtgccgtaaccacgttggaaatcaaaaagaggtaaaaaataatataataatcaaaaagacatcttttagtaaaataaagcggaaaatcaatcgggacgtttctctttgggaattctcattcttaatcgaatngattaataac

SEQ ID NO: 185801 - DNA, 335 bp, Glycine max
  unsure (1)..(335): unsure at all n locations
agcttttaagtgcgggtttaagacgcgtatgccaagtcatcgcgatatgcggngatgactccccgaagagatcggatttggtacggccatgtcctcccggtttctgactaggaaattggcgagtggaggaacgcccagacgtttacgcgaaaagcataatgtaaccttttgtagctntaaaactctacggttgggcctaggctttagagtttcctttttgttaaagcattatgtcttttgtttttgaagttataatataaagatctttcttcatttgntcctgngcctctatccattctcattcattttcatggttatttctttactcttaaagc

SEQ ID NO: 185802 - DNA, 334 bp, Glycine max
  unsure (1)..(334): unsure at all n locations
tcataatgaatcaagaatgattcanagagttntgatgataacaaagatgatgacaaaaagttcaaaagtcaagaacacttatgataacaaagattatgatctcaagaatcaaagaatgagtttcagattgaatcaagtacacttcaaggatcaagaggaaagttgaattcaagttccaagaatcaagatcaagattcaagaatcaagagaagactcaattaagataagtattaaaaagttttttcaaaaactgagtagcacatgaatttcaaaaccttttacccaaagagttntactctctggtatcgattaccagtagcaaaatggtttcaaa

SEQ ID NO: 185803 - DNA, 358 bp, Glycine max
agcttgcttctacaatctccccctttctgatgataacagccctgttatcaagaagcacatacacacagcttgtgctagacgatcactcacttaactttgcatattctccccctttgtttttgagtttatgcttgacttgaaaataaggtaaatacttatgtgagctcttgacgtaatccctatctctatccccctttggcataaaaaaaagcagacaaagggtgtaacagatattacacatatataaattactaattattcacaagacgttcattgagaaatctaaaccaatcatgaagctagaaacatgaataaatcagatatattaaaactacataggcgtataacataatgcata

SEQ ID NO: 185804 - DNA, 414 bp, Glycine max
  unsure (1)..(414): unsure at all n locations
nttggacncccctagctattttgagaccttgaatactcagcttgtncattgtagaccttgccctggataatagccaaaaaatgttataatatgacccttttccgaagtactggcttttaacctttggagggtattaataagggtagaagttgggggttctaatttatggggtgagcttaatgagtcttaagcccacttttgcttttggactgatttaatacaatcatgagaaccatggatgtatccgtcttcaaaaaacacataaaacagaaatttgaccattaatcattacccaccaaaaactgatagtagaatcattcnattaatttgaaaagtggcgatattgcagtctgcaaaacaatagcatgacttacagacaaagttgacagatgatggttgacagacagcatagtt

SEQ ID NO: 185805 - DNA, 206 bp, Glycine max
  unsure (1)..(206): unsure at all n locations
agctntgatgatgtggtcttcaccgatgaaaggatcaaagtaggtctaaaaagaggcaaatctgatcatcatgctttgatacatgccaaaaaaaactagggcaaatgaagagggtgagaatgagggagaagcccatgctgtggctgccattcctatacagccatgtttcccaccaacccaacaatgtcattacttagccaataaca

SEQ ID NO: 185806 - DNA, 82 bp, Glycine max
cgggttcgggagacaaaggtcaagcgttctcgatatgcgaagatgatattccgagtactttggatttggtacgaccatgctc

SEQ ID NO: 185807 - DNA, 285 bp, Glycine max
agcttgtactccattgaatgccccattgtgcttttcgatctgcctcctacttccacaatcctgctcccctcctatcttcctccaaatcaaagtccatagagtgctttaacatggagaagcctatttcaagctacatttcacttccttcacttgaaacacgatctttgtcagatctataactacccctgttacaaccacaatggtttaccactagaatggtatcctccacaattcttactaaatgaatcgtgacattgatcattacccttaacgatgaaaatatca

SEQ ID NO: 185808 - DNA, 381 bp, Glycine max
  unsure (1)..(381): unsure at all n locations
tataatcgactcttctctttcactttctaattgcgaataaaaatgtaaaataaattctctcataattttcactcttcatatccacaggtttccaaacaagataatgttaaatgcattcataatcttcaattctttgaacacatttctgaatatttttgttctaacaaagactcttaagtctgaagaaaaaaaaataagaatgacaaaaaaaaagactctattttccttctttagacgtcatcaaacgaaatcaatttttctttttttatcctggaagagccgaatcanattgtanaatattacataatgacccanaggtcanaatcaggttntgctgggaacatannttacgaatctactacaataaagactatctaacgc

SEQ ID NO: 185809 - DNA, 307 bp, Glycine max
agcttgaggagggtaaatgagaaaaaatacatttataattggtgcctgcttttagtagataatgctaccaaggcttgtggttaaactaatataatttttgtgtgctttttcttttctttaagcttctcgtgtgtagttactgcatatttattttaatttatgaaaaatcttcatgttaaaacaagactaacttagttcatgcaagaaaagatttttcatagagtattcagctccagaagcagagcctacgttttttataatattaattaaagaaaaaaaaattgaacttttgaaaaagcagttctta

SEQ ID NO: 185810 - DNA, 387 bp, Glycine max
  unsure (1)..(387): unsure at all n locations
taagccaccagctcgcttngcgtgctgagcatgccgtggtgagctgggtggcaagctcctcctccatttttcctataaaatggcattggaggctgaggggaaggggtccaacacctttggcaattagatttcacttaaaattagtgaggagaagaagaaagaaggagaaaatcaaggtcgaggcactttcataatgcttccatgacgttttcgtgatcaattccgtgaacatttttcggtcttcttcgttcattattcggccgtcggcgatcttcaaccgattagttttcgatttcggagctttgaattcattcttgcttttgattgtntcattttcatctcgtctacttttagtattctttttcttcgttttaagtgagtttcaat

SEQ ID NO: 185811 - DNA, 304 bp, Glycine max
agcttcctcggtgccattcctgcaaaggcaaacatttggaaagttagttctaccagtgggacattactcttaaagcaaaaatggcatataacctccttccataaatacaaacatcaatgtaaatttagagcaagcttatgcgcatatttccttacaaacgttctcttgcacaagacattctattaaccgaaaaaaatgcacccatatacaatcaaggcagcttcgttacctagattatttacacgtacttccaaggtgtatttgttacttacatcacacacatcttcttggctaaattcacata

SEQ ID NO: 185812 - DNA, 246 bp, Glycine max
  unsure (1)..(246): unsure at all n locations
attcagaagattagagtttatctcttttatcttagcgagagtgattctcctaaattcttgagtgattcaagaacaccttggctgtatcaaaggactttcacaacctttgtgtgttgccctcgctggaaagagngattctttccttcctttcatcatcacccttgttctttcataccaccattccagaaaatccacctctgcccagaattatctcgtgggcataactccaatntaagcactcaaata

SEQ ID NO: 185813 - DNA, 302 bp, Glycine max
agcttaagcctttcatttcatcaaatagtgataacgctttcttcacctcaccaatcttgtgaagagaatccataaaaatattatatatttcaacactaacatgacccttttctttcaattggccaaatgtctctaatgccattatcggtcccttcttctccaccaaaacagagaagaatttggagagatcagcaataacaggaaaacccaacttctgcatctgctcaagcaacttgcaaaattcttccattctattcgcttcagcatatgcaaccaacaacggtttcacccgtaagaagtct

SEQ ID NO: 185814 - DNA, 340 bp, Glycine max
tggagggaggtccctcactcgtatctgtcaggtgatagtggcacccataagaaagtattcatgtgaagcacctgatgacaagtctcttttatatgaaattacatatacaatccactatcttatcaaaatatggcaatcctgtagtcattaattctccaatccttcagttaggttataatatctgaaatgctagctatgaccagattcttcaactcaggggaatatgataatgtggaattcattttaagaatgcttcgtgcattcggcactggcatcacataattggaatgccgttgatgatgcccgacagtagcataaataaactaacgctagcagaatt

SEQ ID NO: 185815 - DNA, 344 bp, Glycine max
agctttatgaagttttctggttttctaaaccttgaaaacttgtgctattcatcctcttcattctcttctccctttgccaaaaagaattcgccaaggattaaccgcctgaattctttttgtgtctctcttctcccttttccaaaagaacaaaagactaaccgcctgaattcttttgtgtctcccttctcccttgtccaagaattcaaaacgacacagtctgagaattcttttgattcttcccattcccttatacaaaagtgttcaaaggactaacccgctgagaattttttgtatcccagtcacaaagataaaggtttaacagccgagattttgtttaacacatg

SEQ ID NO: 185816 - DNA, 303 bp, Glycine max
tcttcctcgatagccctctccttgcacctccacccctctgacgcacttcgggtgcacctcctgaactcttcttcgtcacctggttcgtccattatcaaacaccaaaatcaaaaatgtcaacggcaaattgttgaaagttgaaactctctctaactctgaatcataaacacggaaatcgggatgatggtgctaaggaacacagccatggactgaagaacaagacagaaacaaattaattaaggtgatggtagtagcattagaagagtgtgggatgaaaggggaaaacgcagtgtgtcagtggag

SEQ ID NO: 185817 - DNA, 295 bp, Glycine max
agcttttacaaaaaggttcatcaagtcaagttgaaatatggaagtaaccatcctgcaaaattggggcaaaagatgaatcgagtcacatcactgcttcgtctactgccaaacatatttaggattattgatgtccttggtacttccagtttcaccttgacaaagatgtcatggaccatgttgaaaatctaaattgattcaaccccatatcctgcgtaaaaattcgcaatacttcgactgtacatcattcgcatgcatccatgcttttcattggttgcattgctcattgcattctttc

SEQ ID NO: 185818 - DNA, 298 bp, Glycine max
  unsure (1)..(298): unsure at all n locations
tgtgcttgtttttttaaattcctaggatcatgagcaacctggtgtgtcctgctatgacttgagaaacaaaagggatcaaataacaggccgaaattaaaaagtactanggttgcctcctagtagtgctttctttacgtcttgagctggacgcgtgatggcatgtccgtcacggacctagtactttgcttacctttggctttggacttggtcgcctattggtcggncatgggtcgtaagcaatgctctaacctttntttggatgatctgaggtgaactctaaaggtgatggcggtgcgtc

SEQ ID NO: 185819 - DNA, 315 bp, Glycine max
  unsure (1)..(315): unsure at all n locations
agcttctaaagtctaacctaataaaagcatacctgccagcatcttcaggttcatctaactcaaaagcatcaaactcaaatctttctgggttagtaacaggcatacacaacgtttccacacatactaagccttccttgttgatgaaaaatttgttgattttgacgagaacctcaatacaatcttcaagcacatattcaacctttttatagaatgttctgatagtgccaaaaagaagttagccaagcactctgtaggatacagcatcaatttcttgcaaaatcttgtctgcngaaggtaaaaatgaaatgaaaataa

SEQ ID NO: 185820 - DNA, 78 bp, Glycine max
  unsure (1)..(78): unsure at all n locations
tcaatggaggaagagaataccagagangaggtgtggttttttccgcgggccnnngttccgctctgccgtttttctctg

SEQ ID NO: 185821 - DNA, 360 bp, Glycine max
agcttagctaagccaaagtcagagatcttggcattcagatccttgtcaagtaagacattggttgccttaatgtccctgtgtactattttcaaccttgactcctcatgaagataagccaatccccttgctatccccacacagatcttcattcttgtgggccaatacaagtgcagcttctgttcatgttcacctacgggaaatgcggggggaaaggaaataagctttttctgttatatattgattttgaagcagaaacatacacacacaaacacaaggtatatgttgcccgtaaagcatttaccgaaaagtgcacgagcaagactggtggtctccatgtattcatatataagtagcaactgg

SEQ ID NO: 185822 - DNA, 342 bp, Glycine max
  unsure (1)..(342): unsure at all n locations
gtattgctggtataatttgcctgttccattattctcttaatgnctttagaggttacttcctcattgacatcttttgtcttgaatggaattgccatgacaggcttattgttactgtctttgatgttcggcagttgatattgtgttgcgggaggtaattccgattggattaactcaccatccttcacttgccaatttgttatgacaatttgtgttggatcacctatgatgtcttgtttccaaaggtaatctatatccattctgatggcataagcatgaaaccaatcaaaaaaaaggacattaattttgactctttcgacgaattcgtagaacttgtcttggatt

SEQ ID NO: 185823 - DNA, 304 bp, Glycine max
agcttgcccagagaaggagtccacagaggaaatgcttaccaccttataagactggaaagcggtttctaatgactcctctgcggcctccacataaggcatagaggatgggcagctcaccaagatgtcttcctcgcctgacacgatgaccaaatgcccctccactacgaatttcaacttttggtggagtgtagagggcacaactcccattgagtggatccacggacgccccaacagacagctgtagggggggttaatatccattatttggaaggtgacttgacaggtgtgagggcctatttgtact

SEQ ID NO: 185824 - DNA, 407 bp, Glycine max
  unsure (1)..(407): unsure at all n locations
tttggtacaaagaagaagaagaagttcaaagagattcattgcttgtaaaggattgtaagagatttttcaaaatgcaaaacaaagccttgcttttatagactcttcatgtctggtcaagaagaccattcagaagagttatgacttttagaaaaacttaaaacccatttgaaaaagtcaaaacctttttgaagagttacatctttagatttttcagagacaaacactggtaatcgattaccaaataagtgtaatcgattacaccaaagctttgagtgaaaggatgtgactcttcacnattaaatttgaatttcaacgttcaaggcactggnntatcgataccanaacattgtaatcgattacagccttttgaaatatttggaacgttgtaaatccagtttgaaatcttt

SEQ ID NO: 185825 - DNA, 377 bp, Glycine max
agcttgctggttagtttgggagcacatatgtagtttgtttatgtgtaatttgcagtcttacttgttgttgatttacccatggtttgattgctataaattgaagagaaaatttcactatttagtgtggattctacactttttttttttactttaatccaaatatttcttcttgattttatttcattttcttctcttcttctcaatcaaaacataactgacattcatatctaattgactcaactagtataggctagtttgacttttttttccttcttggataaaagaaatcaaattcatatataatagaatttaaatatcattacaagatcaattattaagtttctaactaagaaatggtattattgattctatcattt

SEQ ID NO: 185826 - DNA, 281 bp, Glycine max
  unsure (1)..(281): unsure at all n locations
atttgattttttatcataaattatgtttataaaatatataatatttctcttgagtaaagatataatatattattttcttatcgntgataaaaaaaaattattttcttaatctcactggatatattttcccgaactggctctatcaactctttaaaaaagtgacactgttaaagtctcaccttaagttgaataagaaatttaatgtgacactcaatcacttggacattgattcttgattcttaaatggagaatgaacaccatgtttgctataaattctattt

SEQ ID NO: 185827 - DNA, 317 bp, Glycine max
  unsure (1)..(317): unsure at all n locations
agctagcccaggaactaattatatctatgcctttaagcaggccatttttatatcaaccttatctgcggaatcacttcttactaatgaagaggctagcatagctgctgccgcatccgaaactcttgctcttgctaaagcagctgtgcaggttgcaaaggatgcagttatactaagtaaaaggaagcctccagcagatgcagangttaaatcccatgtttcttccaaatctgatgatttacttctcaaatggtttcatcaaatggaagcggaagatggtgtacacaaaagtcatgggtgctggagcaaaataatggaag

SEQ ID NO: 185828 - DNA, 222 bp, Glycine max
agcttgaccaggaattatttgtatgggttggatgttgaattccggttgttcctggtgcggagatgatggtacagcgggtgaaccaaaagcggaagtttcttttggtgaggtagccatggaaaagcagagcgtttggaatgatttcgtaaatctcagaaggctattgggaaatgctggtaaaaacacgaatgccaagcagatataaatttgaatgaaaaatgt

SEQ ID NO: 185829 - DNA, 152 bp, Glycine max
tctgatcatcgtggtccgaacatgcgcaataggaaaacaaaaaacaccggggccagacgaaaagatgaaaaagggggacaaacctatgctgggactgccattcttataccaccaagattcccaccaacccaactatgttattactccgccag

SEQ ID NO: 185830 - DNA, 237 bp, Glycine max
gagacccgccaactgccaaacaaagcctcgctaatatagactctacaggtgtggtcaagaggaccattcgtaagaggcctgactgttgataaaactcagagcccattagaaacggtctagcctccttgaagagctacctgcttatattgaacggagacgaacactggccaatgtatgccaaatacgcgtgagcgaccacacactgctccggagggatggggcgagactctccacatt

SEQ ID NO: 185831 - DNA, 195 bp, Glycine max
agcttgctatgcaaatgacatctgcccttttctttttaagatttagctgcgacgacgaagccatgagttgaatagaccaccatactgtcttacctttccccattgtctagcacatactttcagcccatatgcaaataacactcgattattccatccagattaaaggatagtttgctacgatttgcataatttgag

SEQ ID NO: 185832 - DNA, 358 bp, Glycine max
agcttgtccaagaggttcttcacctcagtataacctgcatcaaccaatttcagatcatgtagtaaacacatcgatctgctatatcattaaatcgagagtaaaccatcaacttcatccctaaactaatactctctctgttaaatagtccctaaagtaaaacaaactatgaaagtgtttgaaatcatattaagtagtcaccaaactactaaaaaatccttcagttggtccgtaaacttcactaaaatacgttaacagagggactaaactaaagtgatggatattcaattctttaaagattacttaaacaacttcattactttaaggatcatttgagagatcaacagtttaacgacaaaat

SEQ ID NO: 185833 - DNA, 386 bp, Glycine max
  unsure (1)..(386): unsure at all n locations
agaatactaagctttctccctttcttttagaaatccaggcttcgaactgtttcttacactcataacaaatggcaattttattcccttttccgtttgggtgtaccaaagcttttaagaataaggtgggggcaccaagtcttttttgaatcatttggtaaattggctgaattcattttaaaaattttatggaaagacagatatttgtttgataacattttttaccctgngtgcttgactgatagcttatgcatatagctgaatatatattattacatctgaactccagatgccatacacaacaatttagagtaagcaaccatcatttaacaacaatttagagtaaggaaccatctttaagttttaatatcaacaacgaaatttattct

SEQ ID NO: 185834 - DNA, 296 bp, Glycine max
  unsure (1)..(296): unsure at all n locations
agcttctatgatccgtcaaaatttcaatgtggtgccccaataggtattgcctccacttcttaacagcagtggtaatggcagctagttcacgaacataggtgaaggagctgagtaacttatggcaaaactgtttgctaaagaaagctattaagtgtcttcctttgtgacaacactgtgcccattcctgagtcggaggcgcctgtttccaccacgaagggtttggtgaaatcaggaagtgctaatactggngaattattcacgacattcttcaagttttggaaggcaactgtagcttc

SEQ ID NO: 185835 - DNA, 290 bp, Glycine max
  unsure (1)..(290): unsure at all n locations
atttccaaatatgcatgtgaattangaagcatcaacaagaatcaagccaaggctattgtgcaagcaatcaatggggcaaaacacaccanaagattatgatgatggatggctcaaattctcaaaaaggtaaacttatcactttcaaattgagctttcaaaactatcatgacatgtagaggaaaaacaaggatttcaaatcacaaaatgtcaagagacttttaatttcagaacaattttctcatttcttgaacatatcctgtaatttcaaagaaaatatgcaaaagtgtaca

SEQ ID NO: 185836 - DNA, 76 bp, Glycine max
agcttgagatgaggatatgttgaagggttatacttcctgcttttattgttgaccacagagtggtacctggagatat

SEQ ID NO: 185837 - DNA, 382 bp, Glycine max
  unsure (1)..(382): unsure at all n locations
tccatcaacatgtagaggagaatcaaggatttcaagtttcaaaatgtcaagaactttttttttcaaaacattaaccctttcttgaacatatcttttatttaaagaaaaacatgccaagtcgtacatgcacacggaattgacccaaaatattaaactgaaaatccgacgaaactaacaacatttgcaaattaacacanctaacanattaacaaaaccaacaaaactagcaaaaccaaagaacactccacccatacttaaacaacacattgtcctcaatgtagcacaattaanagattaaaaacaattaaatcatcaaatagaatccgacaagtgtaataaaagcaaagaaggagataggaanagaanaaactcctaagtcatg

SEQ ID NO: 185838 - DNA, 127 bp, Glycine max
agctttacagcagtatttagtaatgacttcttaacctagaattaaaataacttaatgccattaacctagggaaataaaacaaactaaatgactgagtgtaactgaaattgttggcaaccaaaagtca

SEQ ID NO: 185839 - DNA, 139 bp, Glycine max
gacactataaaactacgcttggggagtcataataatcgaaaaggtgtgtctttgattaagcctcacccacggacatgaagagaacaccctaaaaggagagcataagtgtgggcctcagcaggatgcaagtaaaagaact

SEQ ID NO: 185840 - DNA, 279 bp, Glycine max
  unsure (1)..(279): unsure at all n locations
agcttcagagtgatgctntgcgtgaagccatttcangaatcatggcttattcccaggagaagaatcgcaaatttgtggagaccatcgaactccaaatcgggttgaaaaactacgatccacagaaagacaagcgtttcaagggctctgtcaagctgccccacattcctcgccccaagatgaaaatttgcatgcttggtgatgctcancatgttgaagaggtctctatttgccatattcatcaagactcttaatggatcataactatttcatgataattag

SEQ ID NO: 185841 - DNA, 328 bp, Glycine max
tccggtcttgcgttcacttcattggtctgtaacattgtctcaaaatcagtttcttgttggtagggaaaaagttctggccatccaaggcctagaaactgaatgatcaattagggttgtcaactttttaatttacctttctttggccaggatgaactaattttatatataccaataaactatgagagtttaaatcatttattttaactctatacatttataaactaaaaaatgtacatcaagtttaagggaaggatgcccgataaaaaataaaaaaaaaggttaagtatgaaaatatgacagggaaaccggttatgggaattctcacaat

SEQ ID NO: 185842 - DNA, 333 bp, Glycine max
agcttgccacccagctcgcccaggtgagctaggttgcttcctctataagcaaccgccttctagaggaatattctggaaggcccaagtgggcctggttgctatttgaacccccatttttactaaatacacctcttgctcttttttggtgattcttttaccgtaacgttatgaaattttacaaatttcgtaacgatgcttgttttctttccgtaatgttacgaaaccttacggattacgtaatcatccctttttttccttccggaacgttacgaaactttacggattgcgcactaacacttccttttcaatttccggcatgtcacggaacttcac

SEQ ID NO: 185843 - DNA, 397 bp, Glycine max
  unsure (1)..(397): unsure at all n locations
tgtggaatagggttgcttagcctgctgctgaagttggcataaatttgtattttacagagcagtaccacacactggatttcctataagactgaaaagcatgagggacacatcaaaaaatcaggcattataaatgaaacagcatacagagaatcagattgaagtctagaatttttctcacatcaatatatttttgtattgtgaacggagtgtcactgaggaaatctcattgtcttgcaaatctacaagctgcaatttgggacaaatgttgtcacccatgtccaatgtattgntcaatgcatttgttcgtagtttcctgtgaaaatatgaaaattatgatgactatcattctattgttggataactacctatgatcaacataaaagttagggacttacac

SEQ ID NO: 185844 - DNA, 329 bp, Glycine max
agcttttgtctaatatctcttccgaaacctcacttagacttaattattatatagatcactaaacaccgcgaaatcctcactaatttggggttgacgcctagctcacatattaattctctggttgaacgtatagcccaactccaccatgataaaggattagcaaataaaaattgaattcaaaaattgtaaatggagattttagattcttagtcgattgctaagataacttatatgtgtgtatcagtgatataagaaataaagcgaaacgaaaatatagactctatagagattttgatttaataacaaagcaaccgatcgactaattactc

SEQ ID NO: 185845 - DNA, 173 bp, Glycine max
agcttttatcttgcgaaaaatcataaattttctaaaaaagtgggactttcttagaaggctgaggttcacaaaaaaatttaagcttttgtattgcgagaaataatgaaccaaacataatgtcgtccgagaatcacttaaaacaaacttgtttgacataaaaatcgaagcttttt

SEQ ID NO: 185846 - DNA, 188 bp, Glycine max
  unsure (1)..(188): unsure at all n locations
gtttttaaaaatggaattgttttgcaaaaaaaaattataggccaatgttaatttgtagttttttttggtagccaccaggattgaatcgccaagcgggacctttcccttcttccctttcttcttaaacacnccaccaaccttatatctcctggnnttgtaggttggtaggttttttaaaaaaatggaat

SEQ ID NO: 185847 - DNA, 347 bp, Glycine max
  unsure (1)..(347): unsure at all n locations
agcttcacttgcaatttcaatatactaaataaacaattacctgcatcagaactataactagaaggtacctcctgctgatgaactgatggatttgtcggcaagttcccttgttcaaatgaaacagtcaaatctcctatgtcggtcccatctctagcactgtaagaatgcccatcttgagtatatgatgtctccaaactgacagatgcaggctcctgggaatgtcctgaaatccgctgcacagatgcatccaagtaagaaaattgttgatagcttgctgatggatgggattggttntgaacatcaatataatgtgagtcaacagattgctgatactgatcatgataatg

SEQ ID NO: 185848 - DNA, 340 bp, Glycine max
  unsure (1)..(340): unsure at all n locations
gctgaaacatgccccacaagtgtcccttttgccctctctttgaatattttgcacatttccttccgaaatgtcacataaccttacggattgcacagtaattagtgttaagcagctcaattcggctggcgagattccaaatgttggcagacgatcattcacggacaaaattagggtatgagaataccctacccatattgcagcgatggtcatccctagacattagtcactcatagcacacaaagctaatagaaaactacgaaatggtctacaccacaaaattgatgtaacaaatgtactgcataacattcttcttttangttagaaatagaaagcaatgcct

SEQ ID NO: 185849 - DNA, 208 bp, Glycine max
agcttacatgtctaagaagataactgtattgttctgaatctgaaaattccttggttttcttcccagctacaatctcctgtactatcacaccatgactacagacatatgatttcattgagactagcttactatgaatcatatcacatagagactagcttactatgttccagccacccctattgtatttgccttcacttgatctcccaaa

SEQ ID NO: 185850 - DNA, 374 bp, Glycine max
tcatgcaacgaacttcaataaatttgggaatatttcatatgtgagattatagaggactcagaagcatgccttcatgtaatttggtactggtccaatgcttgaaatatcttcatcttgcattataaaaaaaaactagtaatcattgtttttaattctttttatctttccatataaaaaaatattttatctaagaaaactcttaactaataattagtgattggccctgcaaacagcttttgtgataagacattaatggtcacctgaattagaagagatacactctgctcaatattcttggacctgtggcagcaggttcaacactgctcaatattcttggagaggtctattttgatagcatcttcatacccttatac

SEQ ID NO: 185851 - DNA, 326 bp, Glycine max
  unsure (1)..(326): unsure at all n locations
agctntataatttatatgaagttagacactttctcatgtatagtaatcgtattnttatcattaattcaaaatatttcatttttggaatatgaaaaactaatattcacttacatttaagaaatatcatataaatatgctgatagaaaaattagcaaactccttcataaatatttttctatctttataactctactataattgatagatttaatatcacatggctaacatcggtatttcaaaaaatcaatgttaacacgagcacggtggcattttcgtaaataaactgagttaattcacatcgattgtgaaaaaatcaatgttaacta

SEQ ID NO: 185852 - DNA, 386 bp, Glycine max
  unsure (1)..(386): unsure at all n locations
tcaaacttgcaacaaaggagttgagcaggtaaaaaagattcgtcttcaaactcttagaggtgactntgagcgtttgtttatggaggaatccgagtcaatttctgaatatttttctcgagtattggccgtagtcaatcaacttaaaaaaaatggtgaaaatgttgatgaggtgaaggtcatggaaaaatacttcgaactttaaatccaagttttgacttcattgtaccaacattgaaaaaacaaggattaaagaccatgactattgagcaactcatgggttccttacaagcatacgaagagnaataaaagagaaaaattaaacaaaatgaggctactgagcaactactacaactcaacgtaagggagcaaactatgcaaattacaag

SEQ ID NO: 185853 - DNA, 209 bp, Glycine max
agcttgaatctctatcaacttcttcttcttcttctttgaaccaaaagttttctgaagttctctggttttccaaaccttgaaaacttgtgccattcatcttttcattctcttctccctttgccaaaaagaattcgccaaggactaaccgcctgaattcttgttgggggtctcttctccttttttcaaaagaacaaaggactaaccgcctg

SEQ ID NO: 185854 - DNA, 276 bp, Glycine max
  unsure (1)..(276): unsure at all n locations
tcttctgtaatgtgtttcacttcatgttcggcctcaatcagaaaaagataacgttcgaggttcacataaatacaataaaatacgtcaccaacgcctatatatagccagccaaaccaacaaatatntttgaggcaaggagaaccgtgtaatatccaatttcatataccatttatttcatccaccctttgttgaaataaataaactaataattcgtataacacattttttaacatgatagttgaataatattgtgttaaaaaataatatttgataaat

SEQ ID NO: 185855 - DNA, 291 bp, Glycine max
agcttgtagggaaacccgctgagttctttgttagcaccgatactctaggaggaggccaagaaactactgtgtaagattttctttttttccttgttagtgttcttgatttgtgaatctcacttaaattttgagcttaatatgtggcatgcattgtgaatcacatttttaatctttatcagctaagttgagttgtttatgtattgtgtaaggcctttcaaggagaaacgaagcaatgagcttaaattctaatagctcaaaatcacatataattttcacatttgtcattgagtc

SEQ ID NO: 185856 - DNA, 266 bp, Glycine max
  unsure (1)..(266): unsure at all n locations
tgtggtggtcattctctacgccattttcatcgctgccgcatgtaaaatgacggtcaaggctcttaagacagcaatgtaaagatgtanggtatgataatagcaaggcaaattgaaatagaatatgtatattggtatttcattgatcctttgcatgatatatataatacatgtacaagaatgttctataccaaattctaaggcatgacagacgtgatccataatcagtggcatctgatttattctatgcatttataggtaaataaata

SEQ ID NO: 185857 - DNA, 350 bp, Glycine max
  unsure (1)..(350): unsure at all n locations
agcttctcgatggccaaggtcactaagtgtgattatggcggaaacccacaacacaacagcctcggaaccaccaacgccggtggtggagaatgacgnccgtcgttctgcctcccgcaagaacggcgataggctcatcaccaaatcgcgaagcgtcatgcgttcgtagatatgcggaaaaggaaagatatagaggagaatgtagagcgatttgaaagaaaaaaaataatactttttcgtattggaaatgaagggtccaatttcatcanagaaaaattccatgattaanaggagtaagganactggcccacgaacctttatttgcactgaatgtgattttggatccctgaatg

SEQ ID NO: 185858 - DNA, 198 bp, Glycine max
tatcaaactttggtctaacctatttaacttctatatttttacggccttcttctagctagctcaaatacccaatggcaattgttttaattagctacatcttatgatgatacaatgcagcttatcatctttactatttatttatgaaccacaatactatcctagacaaaaataatcctcaccgactcttgtaaattatta

SEQ ID NO: 185859 - DNA, 314 bp, Glycine max
  unsure (1)..(314): unsure at all n locations
agcttgcatgcattntagtcctataaaatgattatgttttgattntagntcttacaaaanaattctttttttttattcttttaaacnttaaaattattgattttaattctatagaatcaacataatttgttttgggttccataaaatatttttggttgcgtttatgggctcaaaatttaaaattactaattttnttcccctaatctaaagtttttttttttatcanaacctaaacctttaattgtaaggtagataaataacattttaagaatctagattttttttacggtattacataatggcattataccata

SEQ ID NO: 185860 - DNA, 364 bp, Glycine max
  unsure (1)..(364): unsure at all n locations
tacctgaaatattagtgggcccgttttcttgcttccgtgagaaaattaatagcggaaaagtgaacgaaaggattacaataataagatgaccacccttatgtttgcttggataattctaaccgcaaatccgcgttaataaaggaaacaaatagcttcaaaaaaaaaaaaaagaaattagagcttttgataaaaatgcataggaagtgtgcttttgcacaattaaaaatatctaatgcaattaatacgagtgatgatattacaccacatagaggagcacttttgtctttctctgnttttacaccacatgtnagtccaatatgaatatatgattagaagcgtgtatatgggtttctatttggggatc

SEQ ID NO: 185861 - DNA, 210 bp, Glycine max
agcttgttctgtgtgttaaaaaactgttatttgataaagtattggcccatttcctgtgaactagagagcacaaccgcgcgcccgaacattggtgcttggatcacacgggagatgtccatactttactgtaaagtgtttttttactgcctacaaagttatttaaaatgatttaacaacttatgatagtatgtacctacttcttataaagta

SEQ ID NO: 185862 - DNA, 330 bp, Glycine max
  unsure (1)..(330): unsure at all n locations
actcagctgttctgcggaaatttttaggtactttcaagtatgaaaggagtttccgacatttatatactttcacttcaatccacattaatggaccagaataaaactttttactgaaagaaaaaaaaaacttttacaccacacacactcatgaanttatttctcataaatatttataatgacacaggttaattaattatgaggactggtaagttcactctaaaatgaaacccattgaagtagaaaaggagaagatactcaaagaaaagagatatatggtgatgtatgaaaaagacaccgattttagaaaatgaaaatgaaatcagatgagtg

SEQ ID NO: 185863 - DNA, 310 bp, Glycine max
  unsure (1)..(310): unsure at all n locations
acaaacattttgggatgttaggtttacaagataatgcttatcataacacaaaaatgacatgctaatcccttctatttagaatgaactcatgcccacttttaatataaaatatttatgcccatgcgtatgtgtagaatattccactatttatgtcaacgtaccaagacattcaacacattctaaatgccatacatatatatgcattntgaaaagaacacacattctcatgctcaaggcattgcgtcaaattcacacctaatcacattctaaacacttgctatcacgaactacctacacatatttgaaacat

SEQ ID NO: 185864 - DNA, 335 bp, Glycine max
  unsure (1)..(335): unsure at all n locations
agcttatatatagcaaacaatgtactcttatggaaggaagcaatattataaaaaagttcctcttcttaatctccccttttttggaggcctcctaatccctcaattctaggatcataattgttacctgctgcgcttgttgctgaactttgagggtcagcacctcccgaacacaaagaggaagaaagagaagataagttggtttcgaggttacagtgccttcagaggaagaagacagccgaaagaagagtaattcgctaatttcattcatgattgattcttgtattacataggcatatatatactgnattctaattttggcattctgtgatttctaa

SEQ ID NO: 185865 - DNA, 459 bp, Glycine max
  unsure (1)..(459): unsure at all n locations
nttgatacccttgcatnatggacccttagaatactcaagcttgtgtttagcaagtttgaggtatctaagttgctgagtgatgacaatgtgatatgtaaatggagcatcanggaaaggtctacaagggtgggtgcctcaagccaatggtgaaggtgggtggcaagtaaaagaaaattgtgttggagcaccctatgaattgtagaatgggaaatggttggtgctaggaaaagatgaattntgatgctgaagttgagacccaaggggaagatcatgcacaagaaatattatgaaggtgtgttgtgggtgtttgttgcaacaagtgaggatcacgaggctctttggtttatgaatatatgccaaatgggagtttgcttatttgttaaaggtacaacaaaagtcttttgatttccccctacgtaaaaaatgctgtgatgctgctgagggctttctattttctct

SEQ ID NO: 185866 - DNA, 239 bp, Glycine max
cagctatgcggatttgtgcctcgctggcgaaatagatcgaagtgggttttaaaagaagcttttctgatcatcgtgctctgataaacgcaaagattggcgcatatgaagagggtgagaatgatggagaaacccatgctacgactgccattcctatacgggtgagattcccaccaacccaacaatgtctttacttaatcaataacaacccttgttcttacctaccacccaattattcacaa

SEQ ID NO: 185867 - DNA, 274 bp, Glycine max
  unsure (1)..(274): unsure at all n locations
tactcaagcttctttcgaattcaaactgccataactttctgctcggatgtttgattgcagaccataatatttcaagatgctcaaaattggagatggaagtcccagataaattcaaactgccacaacttttgactaggatgtctgactgcggcccatcatataacgagaccctcngaaatgattatggaagctccgagcanattcaaattgtcataacttttgaatcggatgtctgactacagaccatactatatcgagaaactcgaaatgaaca

SEQ ID NO: 185868 - DNA, 300 bp, Glycine max
gccgccagcatgaatggcggattgtacgtaaatatcacattctctccgttatttcttttgaaacagaccccatcccgtaaattgtgtttaaaaggaaccctctttcgtaaattagccttcatagatgtctttctgaatttcacaatattttaatgcatttgaagctatataaattatgaaatgaaaataaaaaatgaatagcccatttaattatttcagtggatataacattttagaaataaataaggattaatagtgatctttatctctaatactgacaaattcgtccgcaaaagatga

SEQ ID NO: 185869 - DNA, 247 bp, Glycine max
gaatctcagcttatacttttaataaagcttcaatttcattttagcatctatgagttggctctggaggccccataatttggttcttcatattcttaaaatattagactggacatagacattaggaaaggtacaatatagtggatgcttttctaatatggataatactttatctattttacagattctttaaagtacattttattacgtagaaactgtttatacggattggatgtttataaacacgtgt

SEQ ID NO: 185870 - DNA, 371 bp, Glycine max
  unsure (1)..(371): unsure at all n locations
cgggatccttaagcacctgagctgcagcttatgcttattatgtatggcaaaacttcattattggtggtcaagacatacaagtgagcttgtaaaaaatcttctacacttgaagtgatcacatgcaatcctcttgaacccttaccacccactctgtcatcatgccgagacttangaaggccaacaggtttagccttctcaatttattctgaacaaaattcaatggcttctttagcaatgtacctctcaacaatagatgcttctggatgataaagattctttgtataccctttcaagatcatcatgtatcgctcaaccgggtacatccaccatatgataacaggaccacaacatttgatttctctgactagatg

SEQ ID NO: 185871 - DNA, 374 bp, Glycine max
  unsure (1)..(374): unsure at all n locations
ctgacttgagacattttatgaccatanatgtttgtgcattgcgaggcatcaacaagaatcaagccatggctattgtgcacgctgtcaatgcggcataccacacctttcgactctttctacggagaggtcaaattttcttacttgcatctttctaaaagatttgttcaaaccttctcttcaaaaaaaagtcttgntcaaaacctgtggaaccaaatttcaatacctgctcctttgcaaaaaacaaagactaccccctgattcttttgggcacctttccctacaaagagcaaaggctaccgcctaaattcttgggtcttccttccttaacaaagaattcaaggactaccgcctgaattttttgtctttacacaacn

SEQ ID NO: 185872 - DNA, 311 bp, Glycine max
  unsure (1)..(311): unsure at all n locations
agcttgagggatgagagttcagctattcttattcttcttccttgcagggtctttgcgttcttgatcccttgagtcaccaagtttaggtaaatgagattcattcttcatcctaaacttgatttgccttcattctcttgctctagtttctccaataacttgtaactgccattntgtattacccatgaaggataactttgaaaaacctaaatattcttcattcttccttctaaatttcgtggagtctacaagaggtaaggggagtctctccaactcttgaaccatgtgctttgtgctgaacttacttgaacatg

SEQ ID NO: 185873 - DNA, 348 bp, Glycine max
  unsure (1)..(348): unsure at all n locations
ggactagtcttaagcatagatgaatttatgcttaagcatgactaagcttaagcatatgtggatctagcttagcatagttgctgtcaatttccttggtgcatttaaacttgattcatgaaccaaatgagctaaagttgcattaaaaattgagctcattatataaatgagttgaacttcagctgcatataattcgacctcgttagattcatgaatagactngacttatatatatatatatatatatatatatatatatatatacatccaatttcgcgttggttttgactttgatgacatgtcgaagtggaagattacttcacacaaggttagtgactttttgtgttgtgg

SEQ ID NO: 185874 - DNA, 185 bp, Glycine max
  unsure (1)..(185): unsure at all n locations
aagatgctggctatctcgtcaccaatgaatcaccttgctcgcggtgtcaccctccatgcttacagatcccgctatacgccgccattntagttagattgctggagatcaaagtcacagcgggtcataatcactcgctcgtctcagacattgcggttatagaagaacgagtgattgatcacagagag

SEQ ID NO: 185875 - DNA, 155 bp, Glycine max
actgacatggtcccttgagcactggcaataaggtctacgctctcaatgaaccaatcttcctgaagggcacaatgggatggaaactgcaatggtttacaactggatcctaattatgaaaaggttgggaaagctatatgactcttctactccctctc

SEQ ID NO: 185876 - DNA, 378 bp, Glycine max
  unsure (1)..(378): unsure at all n locations
tctccccctttctcaagcaaattcttaattcttcttgacatcatcaaaatcttcatgatttacatatatatatatatatatatatatatatatatatatatatatatatatatatatatattgggaggcatgactaactcttgagtttgtgctttgtttatttaaattcctaagatcatgagcaactacgtgtgttctactatgacttgaaaaacatcatgatgtaaactccattttagctctgatgcctaagatcttcctcattaatggataactttgctccttggaacatgaatggcagccgaatgtgaaaaagacatcaaaaagaaactcctctttctcgggaagatgagtcttacataatctcccccccatacn

SEQ ID NO: 185877 - DNA, 267 bp, Glycine max
agcttgcttgagaagtttctatggaggtcgaatctttgagcttcaataaggtccttcaatggtgatttttagccatggagttggggcggaagataaaggagaataggtgaaaggaggcaccatccattatagaatgccatggaaggagaagcttcaccaccaagagagtgccttggataaaaaacttataaaggaagtttcaatggaggaagagaatgggagaaagagagaaagagtggcgttgaaattgaaggagaatatggagag

SEQ ID NO: 185878 - DNA, 355 bp, Glycine max
  unsure (1)..(355): unsure at all n locations
ntgacacgtgctttactggctgtgacntcgggacctatgatactagctcaacccaacaccaaattagttccaaccttcattatggattcagtttgagagtgaatgggaatggataattggagcaactctacctacacagttatacataattaactgttaactggttaccctanattcactgatcaaattgactctcaacccaatttacctagaatggtcttgtcagttgccatttgtatttcttagccagccaacttctatagtctaatgacttcactagataatcacttactcaatccctaatcgattggctccactttaaatactcttttcctatacacataattactttacg

SEQ ID NO: 185879 - DNA, 72 bp, Glycine max
agcttgtgaaagagaagggcatttcacatctatggattgagactgattctacttcagcagtggattaatatt

SEQ ID NO: 185880 - DNA, 149 bp, Glycine max
  unsure (1)..(149): unsure at all n locations
nttataactaaatttagtgatcttacaaagatcaagaataatcattntaaatttcagatggataaaaataaaagaataatttaaaggcaaaaatcaaaattacctcatttaacanaaactaaaacccatattaattatattaattaata

SEQ ID NO: 185881 - DNA, 377 bp, Glycine max
  unsure (1)..(377): unsure at all n locations
agcttgggggagccttgatgctctcatatggaggcttanggctgcttatgaggaaaatggtgggtccccagagactaacccttttgcaaggggcttcatcaaggtgtatctcaaagaggttagggagtgccaagccaaggcaaagaggtatcccttacaagaagaaaaagaaggcctcaaatcanagcaagggaaatgatgaatcatcctccaccatgcacttctcttgaacaacatcttcagtatcgatccctttggacctttcaagtcatggtaattaattaattaactaatcttgcttgccatcacactcatgatcataaactatgcttaactaggatgattaactcaatgcggtgctaggatctagttttttt

SEQ ID NO: 185882 - DNA, 381 bp, Glycine max
  unsure (1)..(381): unsure at all n locations
ttaaggcacaaatagtgatttattgtgttatgtacagaggatgaagaacccattggaagagggtatggcatatataaagaaaatggtagccagttgcatcaaacacagcaaggtaatgatggagaaatatattggaaaggaaagaaatgcgagagaaaaaaaattgtaccaaccnttcaaacatgctgctccgatccatacgtgcnttttactttttaaagtttttgggagctactntggaagaaacctttgagataaaagatgagatgggtcaccgagaagttgacacttatcactaaatatatggattaactcacctaaaatattttaacttgagtttgaatcttanacatantaatatattaaatatttaaataaaaa

SEQ ID NO: 185883 - DNA, 256 bp, Glycine max
  unsure (1)..(256): unsure at all n locations
agcttcatcaaagctccaacctttgcacaccttttctgctccaaatcgcgaaaggaagccattttcggagtcgtgaagcgcacctctacgtgtgggacttcaaaatttcacgtttgggtagacttcttctcacataaattttcgtgggtattgggttntgggagttatgatgggtagttttactaagttcatgcctcatgatagttatttgtgaagaaatttgatgaaagcatgttaaacttgtcatgttttgtat

SEQ ID NO: 185884 - DNA, 273 bp, Glycine max
tgtcgaaattgccatgtttgggtgagttagacatacccattctgttttagggtttttgtgatgatgtttgtgatgtttatatgctgaaattgctaatggaaatctgttaaagacgaagggtagaactaacccaaggttagaaagtgagaatgtgatgttatgagtggaaaaagagtgagactttgagagttggaaggctaagtcggaattctgtggtaaatggaggttagagtgagtcaatactagcttgaaatgtcatttagaacatgtgag

SEQ ID NO: 185885 - DNA, 265 bp, Glycine max
cacttggagtgatcacatgcaatcctcttgaacccctaacacccactctgttatcttgccgagacttaagaaggccacagggttagccttctcaattattctgaacaaaattcaatggcttcttcaacaatgtacctctcaacaaatgatgcttctggatgataaagattctttgtataccctttcaagatcatcatgtatcgctaaccgggttcatcaccatatattaactcgacaccacatttgattctctgactagatgcac

SEQ ID NO: 185886 - DNA, 397 bp, Glycine max
  unsure (1)..(397): unsure at all n locations
ctacctctgcaatgcattaaatcagcatcatttatataacacaaatcagtgtatacacacacacacacacacacacacacagacaactgactgacttccaagaatcaatataagatttacctggctggacatatgtagcccaagcaggcaccctctccaacggtccatttgcagtgttgaagtagaccctgtacttgctgccatgaggaatgccaggactatactttntcatccaagccttcctacctttacgtgtctcaaaccagtacagtacaggaggttccagtgcacgaattntctcttgccattgaggatcaactatcacattatatatgtcatactccttgccactatcaatcgcagcagtatgggaaggtccatgctctgcagcccatgc

SEQ ID NO: 185887 - DNA, 308 bp, Glycine max
  unsure (1)..(308): unsure at all n locations
acattggaaagctacaaagaaagctctgagatacataaaggaaacacacgatcacatgcttacatataggaggtctgatcaccttaacgcgatcggatattcagactcagactttgctcgatgtgtggatacaagaaaattcactcttgggctttgtattctcttagccagaggagcaatatccgnggaagagtgcacaacaattgtagaagaaagcttcatgatgatgaatcaagactgattcaaggagttttgatgataccaagatgatgacaaaaagaccaagagaatgagttcaagattgaatc

SEQ ID NO: 185888 - DNA, 319 bp, Glycine max
  unsure (1)..(319): unsure at all n locations
agctntcactccactatggactttaagaaagtgttaaaaatgaggtttaaaaccctgaaaggacaaaaataatgaacaggataaaatattaatatttgaaaattcatagaaaaaaaataggggatgaagtttatggaattttatggagaaagagagaacgttgggaaagttaaaataagaagttatatgctttcctagcctcttcaganattaaaagcactaaggtaggcatgccttccccttaaatggatattaattagaaaattatgcagaataccttctgtttgttgaaaaacatatagtatattgtttaatatca

SEQ ID NO: 185889 - DNA, 424 bp, Glycine max
  unsure (1)..(424): unsure at all n locations
tattgganaattgaatctctntattggttaatatattacctatttaggatctacattattctgatttgtattctgattttatagttatatttctttggttccttattcactttatccttcgttactgtataattaatgcaaattgtgaggaaaggtgattgccttgcacatgcatgcagaatgtatggtggagcacaataattatccgtangagggtttcaaagggattatgttgcatgcaattgccaaattaacatgagatataattgcataaattatgataagattcagagggattgtctgagaactttaatgagtagcagactggaattatatattttgtgtgtttgtctgtcacaagtagtgatcattgaaaagtattcattattgccgctacggcgatgagattgaccatctctttttg

SEQ ID NO: 185890 - DNA, 419 bp, Glycine max
  unsure (1)..(419): unsure at all n locations
agctntcttgaaagaggaacctcttgngctagttaaccatcaaattatcatntttttacttcaaatcttctagaattaaattagttaaattgttttaaatcatcttctactcaaaacacattattcaaagcatcaaatttcatataaaatagaaaattctcaaatttttcagttccaaccatattcttatatcctataaaatccttcagattatatncaatttttcatataaatctctgactgttaaacttataaaactattaacctcaaatccatcataaatccctaatattggatataaaataataactcgaaggtttgagatgatcttttttttttacaaggcaattntatnttttcttatctaagaagatgccagatgagtagaggaagaatactttggtccccaattttaataa

SEQ ID NO: 185891 - DNA, 343 bp, Glycine max
  unsure (1)..(343): unsure at all n locations
tgtcactggtcaactgaatggagaatatcataccaaagatccccanatgacaaggtactactatatggctactcgactcttntccaaaattgagcttcaacataattntaaagaaattaacgagctagccaacttgctatcaaagcttgctagtacaaagaagaagaaacaacattgaacgatcatccaagaaataatattagaaccaagcctagacaaagttgtggcgagtgtaactcttattgaaagcgaatggatgactaagatttacgactttctagagaaaggcccactcttggaaaatccaacaatcgtataaaggcttaagagaagtgtaactatt

SEQ ID NO: 185892 - DNA, 231 bp, Glycine max
agcttgctttcatttgaggacttggttcttcgcaagatactaaacaacgaggccttaaataaaagattcatcaaaggctacatgaagagcattatggtttagaatgaagctatgtagagtctacatcaaaataatgaagaccttgactctaattttctaaacaccataaagacttagaaagataagaatgcatcacttgaacaatatcaatagaatgaaatttgactattc

SEQ ID NO: 185893 - DNA, 409 bp, Glycine max
  unsure (1)..(409): unsure at all n locations
ntgagggtgcgcagcccaccatcttttcatagtagagtaccgataatgtgtctaccatcacgattatcgtctccctttttgcacatgttatgtagttgcatcttatccggaaccatatcagaatagtactgatactgcctaacgaaggcaaccattatgtccttccaagtatggactcgggaaggttccaagttagtgtaccaggtaacaactaccccagtaagactttcttagaagaaatgtattagacgttcctcatctttgcgtatgcccttatcttccgacaatacatctttcgatggttcttggggcaagtagtccccttgtacttgggaggggtgatgatatngngtactangaacaactcttctaggtaacaaaggcataatctttacttcttcaatggcct

SEQ ID NO: 185894 - DNA, 323 bp, Glycine max
  unsure (1)..(323): unsure at all n locations
agcttatggtatgatctgggacctaaccatggcagaggtctccacggaggccattgtctccctcgcccaatattatgaccagcctttgaggtgcttcaccttaggggacttccagttaacacccacgtggaagagtttgaagagatcttgggatgccctctgggaggaaggaaaccatatctcttctcgagattctatccctccttagctagaatttctaaaatagtcaaaatctcgacacaggaattggaccgcgggaagcaagtcanaaatggtgtggttggngtaccgangaaatttttggaatcaaggcgagagtcttg

SEQ ID NO: 185895 - DNA, 201 bp, Glycine max
tacctgatatctgatgccttgacctgttccttctgttgactatacagctaggaaacagattacttctagatttgacttgatgttggatatggggagttgttatgcactgttgtgcatctatgagattggctactagcatgattgtaagtgactcaagaagtgtttaagctaaaaaaaaaaaatgaaaaattgaaaagaaaa

SEQ ID NO: 185896 - DNA, 99 bp, Glycine max
agcttcttgatgggcctagatgggcccaatgctgaacggcaccccctaagttggtcagatcaccctcattttgagttctatgctcctttcctgttgaaa

SEQ ID NO: 185897 - DNA, 122 bp, Glycine max
  unsure (1)..(122): unsure at all n locations
tcaagaaaaggccaaactcctctccaaaatatgatttcaagcttaaatangtggctttgttcgtgcccatgcgcttagtgcaattctgaaccgcttagcgcgcattagtgaattttgactta

SEQ ID NO: 185898 - DNA, 314 bp, Glycine max
  unsure (1)..(314): unsure at all n locations
agctggcttaaagacgtctttgatcaattaattattntanaacctagtgaaatattaactaaaaaaagaaacttataaaatttagtatgagtaatgtacaaatccaaaaataattgataaacaaaatcatattaaattcaagtcattaaaacacaaagtatataaaaaaaatgaacaaaagagagcataatattaaaaaatacatacaaagacaaggaatgactntaactangatgggtaagactatttggtgtagatacaagaacttagagaaagaaaatgaattaaaagagtgagaatgcanagggatgtgt

SEQ ID NO: 185899 - DNA, 347 bp, Glycine max
  unsure (1)..(347): unsure at all n locations
tacccatcacatgtggtactangtggcggtcgggcgatggtgcacaacaagttttccacatccacaatgcgcgcataaacccaccatcccctgttgcctacctccaactgagctcacgtactcccacgtagcccatatcctcgtttctctcaacaccgggtccccatcaatccttccaagcttccccaacatcaaagtaatacaacattcaaacagcacaaactatcacagccaagaaaacagagcagaggcagaagactctgccaaaacaccaaccaaaatcacagcttttctcacttagagaccccagtaacaattccttcgttccaattcgttaaccgtggatc

SEQ ID NO: 185900 - DNA, 258 bp, Glycine max
  unsure (1)..(258): unsure at all n locations
cactaagcaatcactacgcatagctctcaactcgaaggtggaagacacatgaacgataacgcaattcatggggctccgaaatgatngagaatggagaatggcactaagcaatcactacgcatagcttcaaaatggaaggtggaggacacatgaacgaaaacgcaattcatggggctccgaanaaggttgagaatggagaattgcactaagcaatcactacgcatagctccaaactcgaaggtggaggacacatgaatg

SEQ ID NO: 185901 - DNA, 439 bp, Glycine max
  unsure (1)..(439): unsure at all n locations
agcttggtcactctaatgtttggggaccaacatctgtatcataagttggtgggaaacaatactttgtgacttttgtagaaggtataagtttactttctaaaacacaagtcaaaattatttaaggcttttaagatctaaaaagccatggttgaaaatgagacagggttgaagatcaaaacgctcaaaactgacaatggtggtaaatatgaagacacaaaatttaagaggttctgctataagtatggaatcaaaatgaaaaggatngtatcacgtactcctcaacaaaatggtgaagctaagcatgtgaacagagaacattgacctaaagaaacagcctcagaagtgaagtgttgaggagcaacnaaaagctcggcacgagcccgagcttggcttaaagaaacagccttagcaacaacattcctattgcggcatctggtgg

SEQ ID NO: 185902 - DNA, 459 bp, Glycine max
  unsure (1)..(459): unsure at all n locations
gaattctgatatgaagctgcatgttcaaacagatagtaaaatatgaaaaatgtgaacacaaaaggaagcaattcatggaaaaaaaaaagcaagaacaaagtaaataaaaaaatagaggatacacaacaaaaaaacttatttcagaaatagaatttagaaaccaaatcattatcatgtcatgatttttaattgcgtttcataacaatgataacaacaattgtgcctgcattccattacagcatagtagtatacataatatatagtcaatcaagtaatctaatataaatttgccaaattcatggcaggatagccaatttacccacttgattcattccaccttgtagctcaatttagcagcaagtcattacttgatacatattcaattcacaattaattcagccccatatgatacatnattcagcttcgtaaacaacanataacataaatcatcatcaaatc

SEQ ID NO: 185903 - DNA, 191 bp, Glycine max
acattcttccacaaactattccagaacgagccaccccaaaatcgaaagggaatcttgggatttcaatccatttatttgacacaaaatcatatatttcttccgaattccgaagcttattccaagaatccagaccttccacagctattcacaaaaatcttttactggcctttgagcctgaatgcgtacttttt

SEQ ID NO: 185904 - DNA, 313 bp, Glycine max
  unsure (1)..(313): unsure at all n locations
gcttacagtttttcttcttctganatatatgtattaaaatggagttccttccgaccgcagcatggtttttatcttgactttgttttggtttcaaggacatgtcttattttttttttacgtttttgcttcccttacctaccgtgtctgtggagggatacctggtaattggtattggacttaaatatttnttatttatctatatgtttgaaccggaattttggaagtgggaccttttccatcgggttatcaattccctgattttcaaaattactcttttgcccgtgtgtcatgtgctgctgntcccatttcttat

SEQ ID NO: 185905 - DNA, 424 bp, Glycine max
  unsure (1)..(424): unsure at all n locations
actgatatataatcacggcgctggttctgataagaagcanagataacaaagcagtcatagatatattntatctattgaacagaactatcaaagatagtagtcactatataataatctgaactacatctcacctgaaagtcaatgaagtaagcatgctgtataaaagtgaaagtaaaacataattacaaagtcagccaatttattatcaatgaaatgaaataatagttntaacggcctcaaatccactaacacaaagtaaacttgattagtacctcccaaacatcaatggtaaggagtggctgcaagaaataaaaatganaccttgtcaggcattctaaccatgatgcttcagccttaccctagcactcatgtntgaaaacatanaatgaataatggatattataagtaatcctttactacttac

SEQ ID NO: 185906 - DNA, 404 bp, Glycine max
  unsure (1)..(404): unsure at all n locations
agcttatttgaaatgaggaattcataatacaatgtttactctaacatactactgagaaaatagggataaaatgtgtgaatttacctcttttaatgaagtaataagtaaaactggttacaacgatgtctttattttagcactttcttcgtcactagcatgatgtaacctgagcatgcacttgtgtgcacatattcaaaatgtggttngaaaaaaatatcactaagaatgtacgtatgcatatttattttaacagaagaaaaaatatcagacatcttgctatgaatatgcattgaagaatcaaagttgctagctagtttattggaatctgtggnggaattgctgaactatcttccattggggcatttgaacatctatttgtacatcccaattntcataaatgatga

SEQ ID NO: 185907 - DNA, 491 bp, Glycine max
  unsure (1)..(491): unsure at all n locations
tatgtaatctctaagctttagttngttngagagaaaagttatcaaattattccattaaacattcattttaaaanaatatatattattggataacatttttataagtgtgaggcattgattaatgatagaaaggtgataaagatatttaaaaagtagtaataacatttcttgaannaaaattgaaaatgaaatgtggcaagagaaccaattgaatttgtttatgacatggctaattaatctcagataaagcccgttaaagatttgcataatgggagcagctattcacacccncaaattntctattacacccncacatgtgctttanattnntattttctaaaatgtcctttntgtgaaatcatgaattcattgacanaatacacaatgaaattatattttccgtgtgtaatgggagtgcananaaataaacactaaattcttggattcgtccctcatatatagacatcttatgggtgactaaataaatatac

SEQ ID NO: 185908 - DNA, 247 bp, Glycine max
  unsure (1)..(247): unsure at all n locations
agctntgatgccaacattggagaggttaatgattcaatgagatgatgtgctccatgagaggttggatcaaatggagaatagagatcatagtggagaagaaaggaggagaagaaggaatgatggtgttcctatacaanaccgaattgatggtattaaactcaacattcctccctttaaaggaaagaatgatccgaaggcctacttggagtgggagatgaanatagagcatgttttctcatgcaataac

SEQ ID NO: 185909 - DNA, 308 bp, Glycine max
  unsure (1)..(308): unsure at all n locations
nttccctcattctcacgtagctcttcttctncccttctcattcaccattgaagcctccattaaagctccaaactttgctcaccatttctactccaaattgcaaaaggaagccattttcagagtcgtgaagctcacctctacgttgtgggacttcaaatttcaggtttgggtagacttcttctcacatgattttcgtgggtattgggttctggggagatatgatgggtagttctacctaagttatgcatcatggtagttatatgtgaagggaattcgataaagcatgctaaacttgtcatgttgatgtg

SEQ ID NO: 185910 - DNA, 289 bp, Glycine max
agcttgtgagcaattcaaatggtcataactttacactcggtggtccgattcatgcgcataatatctcgaaatgctcgaaattctacattggacgctcttgagcaatatatatggccataactattcactgggacgtgcgattcaagcgcataatatatcgagatgctccaaattgaacaacacaagctctcgagaaattcagacggtcataacgtttcactcagaggtcggattcaggcgcctaatatatcgagacactcagaattgaacaacgaaagctctcgagaaa

SEQ ID NO: 185911 - DNA, 206 bp, Glycine max
ccccaagagactcagcataaggatgcacagaccaaagttacgtatgtgaaaagattgtatgaccaagtgaaggtgcaaattgcaaagaagaatgaaagctatgtcaagcaagcccacaagaaaaggaaggaagtggtacttgaacacggtgatgatcctgaacatttgaggacaaatgttttccaagaaggagggaatgatgagaa

SEQ ID NO: 185912 - DNA, 401 bp, Glycine max
  unsure (1)..(401): unsure at all n locations
agcttgccacccagctcgcccattcgagcagggttgcttccttcagaagcaacagccttctggaggaatcttctagaaggcccaagtgggcttgatttctatttgcacccccattttttaataagtacaccccctgcctttattttgtgattcttttttcgtaaaagtacggaaacttacgaatttcgtaacgatactttgtttctttccgtaatgttacggaaccttgcggaatacataatcatcccctttttgacttacgaaatgttacngaacctcactaatagagcaacgatgcttccatttgatttccagtgtgtcacggaaccttacngattgtgcatcaatatttccttttgtttcccggcatgtccggaatttcacaaattttctaatgatgg

SEQ ID NO: 185913 - DNA, 347 bp, Glycine max
  unsure (1)..(347): unsure at all n locations
ctgagttntctggtttccaaaccttgttctttcacagaatacanaagngtgctatatcttttcattctcttcttcctttgccaaaaagaanttgacaaggactaaccgcctaaattctttttgtgtctctcttcttccttttccaaaagaacaaaggactaaccacctgaattcttttgtgtctcccttctcccttttcaaagaattcanaaagacacagtttgagaattcttttgattctttcctcttccttaaacaaaagaattcaaaggactaaccgcctgagaactttgtcttaacacattagagggtacatcctttgtggtacaagtagagggtacatctac

SEQ ID NO: 185914 - DNA, 311 bp, Glycine max
  unsure (1)..(311): unsure at all n locations
agctttaagcagaagatgacatcacatataatgtctntntttaagtgaggggatgaaaggatattttaactntaatgtaaggaaaaaataaaatgattaaaattaaattgtattaaaatgtcaagaatgaatatgtaaaaagcaataagaacatgtttgaatacaagtcaaaagtatttttaagaagttatctactaaaaatatataaatgtttctgataaaaaagctttcaaagcactttaattcaaaccttgtattcaacatacccaaagtcgaaaaataagtaatacattaattatcaaactttaaac

SEQ ID NO: 185915 - DNA, 325 bp, Glycine max
  unsure (1)..(325): unsure at all n locations
tgtcggngaagagagaagagaagaagcttttgcggaagagacacagtgaanaagagagaatgcttccgggaaaaaaatgctnntttattttttaaatgaagggcaaaattgacctttcattgaattgctgggtgcaccagcaatattgctgggtgcacctagcatatccctaaaacaataaagcanaagaatcgatcttatgaaaaaaaatatcgatccaatgggccattgctagattctgattcatgaagcttcaggcactcacgtctgttgaccttaataaagggaccccatacgcataaatgcgagatggcgacaataatat

SEQ ID NO: 185916 - DNA, 418 bp, Glycine max
  unsure (1)..(418): unsure at all n locations
tgatatgtncggtgagactnaagtaggtgaattgattggaaaaattgaatcatacgcagaagtgtgtgaacttatacatttgcattctggtcagaccactacagtgagatggaacaacaagcccaaaagaagaatggatccgaacaaggatagaattcggtagttggtaggaatgcccacctctttgatgacaagtccgatggtaacgacatttgcaaatccttcaactaacactatgtctaccatagtgcctactggtactacaacttatgagatacccacaattatgactactttgttcctctgacacaactagaattgggaatacatgatataatgtatcaactatcttgacaacctaattgaatagatataactagatcgcggtgtaatatggatttatatatgaaatactttg

SEQ ID NO: 185917 - DNA, 496 bp, Glycine max
  unsure (1)..(496): unsure at all n locations
ntggatnttgattgtttgattttttaagtgaaataggaatacatattgatgacccagtccttaaggatggtcatctctttcttgcnggccggtttggatgattcttggacccaatgggtgtggaaaatctaccctcttgaagggattttgcatggtggtggtcatctttttgcttcttttttttttgctgggtttttttatggttgcttttggaacgactcatggtctttttttttatggtgtggaccttcacttttagaattcaggtgtaagttaaaaaaaaaaagtggtgattttataactctgctggcaggtagcaaaaaggtggtggttttttacaactctctttgaaagcactttggcaacnactatntatttatctcaatttttaaatttatatataatggggtgcatcttgagtgtgctcttttttgtctcatatgctatggggttttgctactgatgtanggtctgagtggggccaaaaataaggttn

SEQ ID NO: 185918 - DNA, 419 bp, Glycine max
  unsure (1)..(419): unsure at all n locations
atgcgcttagtcgcgagtttcaatcacttaacacccaacccttgcatataaggaagaattggtccgctaagatggccaagggttgactaaaccaacttcaattcaatttgaattcagctaaactgcagcctgatcgctaagcccatcatacaccttggctaagttcgagtcgttgccgccaagctcatttctttgcggccagaactggggttcatgaagctaagcgccagtcatggcgtctaaactgaattccttgcgacaatgtaagcgttaagaaacagcttatccttagctaagcacaacccattatcgccaagcttaattccttactgccagaactaaggtggatcccacctccttctctgagctngagatattatnctctccaccagatccctgctcacctctgataatcatct

SEQ ID NO: 185919 - DNA, 323 bp, Glycine max
  unsure (1)..(323): unsure at all n locations
gggttcgaggtacttacccgttgaagatcgaagaacgatgatgaacgaatgaagaacgtcgaagaacggtcgaaaccttcgtgaaattccttacggaaacgttacggaaacgtttcagaagcgcctcggcttagattttcttcacggaaacaatttttccaagcaaattcgaaagagagagaagtgcctaaggggctgaccctttttccttctcacttcctaccctatntatagcaaaataggggagatgctngccgcccagctcgcccaggcgagcagggttgcttcctccagaagcaacagccttctggaggaatcttctg

SEQ ID NO: 185920 - DNA, 429 bp, Glycine max
  unsure (1)..(429): unsure at all n locations
agcttataaaattntccaaccgcanatggaaaaagtagtgttagcagggatgttcactntgtggaagatgaagaatggaattgggataatccaaggatgataaatcaagcccctggacatttgaacttaaactttcctgcaccaagttcaaaaaattggcaagatgagcttgttgatgatgttctagtaagaggtactagacttctctctgatatttatgacaggtgcaatattgttgtatgtgaacctgaaaactatgaagaagccaagaaaaatcaaatttgggttgctgcaatgaaggaggagctctcaatgatagagaaaaatcaaacttggcatcttgtagaaagaacctcagacaggaatgtgattggagtcaaatgggtatatagaactaagcttaatgctgatgggtctattaataaacat

SEQ ID NO: 185921 - DNA, 572 bp, Glycine max
  unsure (1)..(572): unsure at all n locations
cgttgcgtgactctacntgngtcatntctcactttgtcntcgctttattaatnttataatctntatcccannccatgctcgagacnggttgaaccctgttganatcgctgctagtaacgagtgaaactgcacgcatgacagctttgtggcatgcaaaactatataacagcattatagctctagtttatctacctcttctcactctctctctgttctctctttcttctatttttcattcttctacaattcaagtacagacttttaggtttatcaataaaattgcgtatctatctgattaatggaaggctaagtctccagcgtagtttctcttgaggagcaacacaggtctctttgacgtttattattaatgaaaattatgttcaagtctttttcctcatactactactctgaattgatgctataatcatgctgctaaggcttgataatcgcgttgccctcacttacctcatcctaatgatcgtatgagaaacggcgatgtgagcttatcaataacgaatgcttatgtcgaattcgcttacatttaattatgcgtgataagcgttgatcgatag

SEQ ID NO: 185922 - DNA, 347 bp, Glycine max
  unsure (1)..(347): unsure at all n locations
tctacttatgtggcagggcgggcttccttcactttcttgtctccaacgcgagctttgaccactactcttccttcccgcgatgcttcttttcatgtccgcctgagtgggcttatagcctaaaccatacnttccacgatttccttgggcatttatcaagctagttatgccgccgttgtctttgcctaaacccattccgggttcataaccattccccaacataactccggccatcattactgctgcatcggatagacaaggctgcccagagaaggagtccacggaggaaatgctgaccacctcaaaagactgganagcggnttctaacgattcttctgcggcttccacat

SEQ ID NO: 185923 - DNA, 378 bp, Glycine max
  unsure (1)..(378): unsure at all n locations
tctaattatatgggccattatatctatcatatgttgacaatagccgagaagttcgtggatctcctcgggggccaagtangtgtctgccatcgctttggtcttggctagcaatcggggaagttcttgactctcgttcaaggtaagagcaaatcggtccatccacattgttgcttcttgatgtaacgagtccatcacctttcttctagcctccttttccaggtacacttgggcatactcgtccgccactctatgctcgtgggccgaggctagatatagttcttcttggcacttgttgatgatggctaacatgttggtctctgtctcgcataaccggtgagacaggtttctttataccttgatcaaaccttcaactcatct

SEQ ID NO: 185924 - DNA, 448 bp, Glycine max
  unsure (1)..(448): unsure at all n locations
catgcaaaatacagaacctttcacattttatgccaaagtacccgcatattcaaatctacccatattttgtatccatntacaacttcagtaggcttaatgattggaattnttctaagcattactattctttagtttttctatagtgatgtattgtgtgttggttcaaatcttcatagtgcttatttgtgtgtgacttanaacagagttacctccttaaaaatttcatccacgcaaacttttagaggagagtatacggatttaccaacaaaaactaattggaaatatgagctgtccagttcattgattgattgaagcagaattacagcaaaatatttatatnttgttgcataattactcanatagaatcaattntatcctcnaaataaataccatacttttctcttaacttcataanagacacaaagaatgagtgttgttcatcacaatt

SEQ ID NO: 185925 - DNA, 325 bp, Glycine max
ttagaattatattttaatattattactactttgattctcagccttgtattttggctatattactatggtatttgaacaatctaatatttccttatttgcatgggttggctgaacaagtatgtcatttgactatgtggattatataagttaatctgtttatgattgttacttcatgttgtggctaatatttttatgactgttgtattgaatgttaaaatatatttgcatactttaactctgatacgcactttggctttttgttgatgccaaatggcgagagatatacggataaatccagaactcacatttatatttaagataagca

SEQ ID NO: 185926 - DNA, 333 bp, Glycine max
  unsure (1)..(333): unsure at all n locations
ctatacaacaaatctttctctataacaccaccaagaaatgaataactcattaattagtcatcaactacaaaatacaaatacatcagcatgcactaccttcgccgaacttggtgtgtagcttcatcaatgttatctgaaaatggtcgtcacgtccatgaggatcgacaagttatatatattgcaaactgatatgatgtgtacggtacgctaaaataattgctttcgatgtgtaattaggggtgagaataggacagaccggcctaaagggacctacgacctaacctacataaagtctgacttgaactgacctatntaattaaaagcctattaaat

SEQ ID NO: 185927 - DNA, 452 bp, Glycine max
  unsure (1)..(452): unsure at all n locations
agctntgtagagattgttccaactcccaacaagctataacagcttccatggcatgaacacggacatgttgttgcaattgttctttgaaagcacagagcagtataacataatgcgtctacaacgaaaataagagcaaaacttgtaaattaaggagcatcatgtgaaataattgagcccattgtcctgaaaactaaattcaatcatgggaattcatgaaaattagagaaattctaacaataaaaacacaattttagtgaattcacctctcatttaatgagttttcttaattntatagttntcaatggattnntaattattgatcaaatattgccttgctagccgtccttttaagaatatccaaaccaacattcagaagaaaggaactggagtatatgatnaacagataaccatgagtgctaacttaacaataatctttatctattttttttttt

SEQ ID NO: 185928 - DNA, 338 bp, Glycine max
  unsure (1)..(338): unsure at all n locations
tgagatgaggaagtgttgaagggtgaaacttcctggctttattgttgaccacagagtggtacctggagatatgtcgcggnggtcaggagaccttgtggacgtcaggtggggtgctattgcccaaaaccaagcttgaccaatcccgacccaacccgggcatagtcggtcagtgagaacctgtgatgtacctaaacaggcgagctcctggcagtcaacagataaaaggaaaacaagaccacaaagcaaggaggctttgtggtggctggccagctgtgaatttgtgtaatatgtggatggtggcctctgngtaatcgataccaagggtgggtaatcgatta

SEQ ID NO: 185929 - DNA, 394 bp, Glycine max
aaagacaatcatgtgctttttattgtagatatcaaaacatgcaagttggtctggatgcttctacttccggatcatccaatcagcccttgctgccataggagctccagaggaccttgttgaggtgataacagggtacggccatttgacttaccattcctttttcctttttgttctatggttgtgtttatcacctatgacattgattggatcttcttccaggtttgctgaaacaggaaaagcattagtatcttctgttgataaagtcatatttgttggatcgcctggtgttggtaagatggtatgattcttctcgccaattgaatgggttcactctgctttcacctggaattgtatcataattcaatggcttcaatcattgtcatatactccattc

SEQ ID NO: 185930 - DNA, 321 bp, Glycine max
  unsure (1)..(321): unsure at all n locations
gcttatgctacttctcaatcccaagctatgtttttttattctaataggntagagtagtggccatcctgctacctgctatagcattctataattctgtgccaacaaatatattcaaatttggtgggggttgtgacaccaaatatgatcattgaactgttctctcttgggattgacaactatgctttctatgctcactgtcagtgtgtgtcctgacaagtaatatgaatatatctggcatttattatttacaaacaacaggaagatatttggtaattattagaaaccccttaagaaagaaaccattatcctgctgttttactt

SEQ ID NO: 185931 - DNA, 361 bp, Glycine max
  unsure (1)..(361): unsure at all n locations
tgctctctacttcanactgngactctaatgntatggatganaatgattcctctagtttctctatggacaaagctgacttctctaattctatttctttagtatctagttcctggatcaagaaaaaatgctttgaattggatcttttcagctcctcccttaatctgaaaacctnctcttgtaaatcttccatcccctctaatttcaattcaaggctgcgaatatgctcttccaggtagttcacctctgtattgcttgcactgagttgatcctgaagataatctgtataaagtaccaacaattaagccagtgagagagagctaaaaacctctaaattttagtgcagcgttacaactattacaat

SEQ ID NO: 185932 - DNA, 432 bp, Glycine max
  unsure (1)..(432): unsure at all n locations
actcatgagatctcaagcccaagtccccatcactacaccttcattcccaacctatgatagatgtgggattatgcatgggccaagaaagtgcattggtgatgacaagctaactgcagccatggatgagatcaactttgtgggggagaaaaaaattcttacaatcaataccccaacaatttcaatcaaggacaaggcttcaggcaaagtcaagggatgtatagacatcaaaccatacaaaattaggggcctagacaagaggagagtcaacctactcttcaagagaccatgcttcaatatatggctcagaatgatcagagaatgaagctggtgaagtctcaacttgtgggcatcctaattaatgactgggttnaatagtaatattanatacaaaaccatgtnaaattttttcttctttccctttatatcttctct

SEQ ID NO: 185933 - DNA, 608 bp, Glycine max
  unsure (1)..(608): unsure at all n locations
cacgcttcgcganngctctgactntcncatgtcacctanttacngatncgttcactcngatanntgtgtnntccannactagcacgacgccagtttgtganactgttgagacccctctaganaccctgagacctntacaggcgacccgcagcatgctagacttttcacactcgaacacttagtactgtttctacgnttccttctctcgcaacggctcagtggggcgatatctctttatattatcaatgccctacggacaaataatggtaggttagggatgccaaatttaatatgatatatatactactactccagttccctacacatggccggttcacgccctagaaagtgtcattagcctcagctgtgcccagctgctcaccattcaaaccaaaccaaaccccatcctttattgcgtgtgtgttaatgactacctgaatctatgcgcatttgaaaggactgaaaggtcatcgctcaccaaacgggacctcagaacgtgtgccaaccatctgcggatgggttcacaagcaagctcttagttagggcctagtgtcaccctctggcgtaaactccaaccgcattctttccttttcctctacttaagcacg

SEQ ID NO: 185934 - DNA, 142 bp, Glycine max
tggagatcactggacgaaaagccatccttagaagaatcctaacttatcgcggcagcacattttattacaagtttgctgcaggacaaacaaacacaatccactatccacgtggcacatttataatatttgatgataccacgac

SEQ ID NO: 185935 - DNA, 382 bp, Glycine max
  unsure (1)..(382): unsure at all n locations
agcttcccaacctatgtgacctaaactccaaatgtcaccttnggatattcttacgaaagtagtcagggtctagctaggtttatggatgaatcagttaaaagtatctcatccaatcacgatggtttttgtgaaattgtcttagacaaatatcattttaagatggtttttgccaccgtcttagaaagctaccattctaagacggtatttgtaaaaccatcttcgttgaaaaccttatatttacaaaattgccaccaccttatattctaagaaggttntgtaggtgtaacatcctatgtttcgtaaataaattaaaaagttttttttagttaaaaattagttntagataatgatgagggttttataattaaataaataaggagaa

SEQ ID NO: 185936 - DNA, 326 bp, Glycine max
  unsure (1)..(326): unsure at all n locations
tactaagcttaataaggggagcgaaacttatgaaaggtcaaaaagagaatgtgatagttggcaaaaaaggagaaaacttaacgtaaacacaagaatgaaattgaagtataataaatctggttaagttttaccttagataggactaacctatcttctagaactttgtatagaaaaaatgtttattntttaaatgcatagacaaccttctggtctcaataaaacccgatatttttatttaattttttctagtcttttaagataaagataaatttctttactctccgttatcaaataacaatattaattaatgatataacaactatatt

SEQ ID NO: 185937 - DNA, 365 bp, Glycine max
atatatagggggagaagcgaagtataaaagggttcaacccctttggcacttctctctctttcaaatttgcttaagaaaattgtttccgtgaagaatatccaagccgaggcgcttgcgtaacgtttccgtaacgtttccgtgagtgatttcgcgaaggttttcgaccgttcttcgatgttctttattcgttcttcatcgttcttcagtcttgaacgggtaagtacctcagaccaagcttttcaattcattctatgtacccgcggtgggccacatatgagttcatgtatttatattctcgtttcattcactttttatacccccttttgacatgcttaagccactttatctaagtcatttctcgctta

SEQ ID NO: 185938 - DNA, 325 bp, Glycine max
  unsure (1)..(325): unsure at all n locations
atatagtttgagagctagtactaggtgcttgtttggcatcagacatagcatgagaaactggatntacaatggaatcagaaatttgtgcattagaactactagaaacaggattaacaacagaatcaacactggaatttgaaagtaagcaggttgcctgaagtagaatctgagtacaagatgtggaaacacatagagaccatcaggatccagtgaaccttgaagtaggactttattggntccctgtgattcacagcacaatgggtaggataaaactcaaagaaaacattggtatcctttagtaattgctgacactaatcaagtttta

SEQ ID NO: 185939 - DNA, 274 bp, Glycine max
  unsure (1)..(274): unsure at all n locations
tagcggtgtaggtcgtcnggtgtgaaaaggaaagaatcgtgctcggctgtgccggttgtcgctggtggagatagagtgggcgaaacagtgtcgttttagggtgaattgtatttcaggaggaagagaaaaagaatagaggagaaaagtggacatagagagggtgatagtgattntaataacaagagtaacattggttttttaagaactgatgttgtaaatgcttcgacaacatttgttatttaatagctgatgttaaaatcgcaccgttaatatc

SEQ ID NO: 185940 - DNA, 429 bp, Glycine max
  unsure (1)..(429): unsure at all n locations
gctataccctaccgggatgaaaaagctttaatagaagtcaagagcatgaaagtgtaacgataccgttaactagccagtaggttcttgggcgggttgaggacatcaatagtatatttggaaagaccaaaaagaaggaaaaaaagtaaaacttggatatggaagaagaggtcgatattgtttgatcttccataatggtttgatctaggtgcctgacattgtattgatgttatgcatgtggagaaaaatgtgtgtaatagtgtcatcgacatgttttttaacattcaaggaaagacaaaggatagtttgaatactcgtcaagatctagttgagatgggtgcatcctctagcttgtcatactntgtccagaanagagaagataagtttttgttagtgtctgtaacatgtgaaagtgtcacaaggatactcttc

SEQ ID NO: 185941 - DNA, 156 bp, Glycine max
agcttcttctcaataggatcatagaacctgtgactaaattcattctcaccataaccaatgaagataccactgccttgactttgcatccaacttggatctcttatcctttggaacatgcacaaaagccttgcagccaaaaactcaaaagtgatcaca

SEQ ID NO: 185942 - DNA, 410 bp, Glycine max
  unsure (1)..(410): unsure at all n locations
gcttgaaaatatagganagaggctgagaattgaattgacatttagagttatatatatatgaattcatgggtntgaattgttagaagaagcccaatgattcatggttctgaatttggtcatttcaattatttggtttcgctaaccgatagtatatatatttggttggtcacatcaattagtttctttcctttctagccaacttgcttagttgccctttcaacttcagcttctctatttgctcttcccttcaccaatttcactaaataacttgataaataaaataagagactcanataactngagagagtgcttcgtcactccctactactcatatatattaatctntggttcattcttatcttaattatcatnttntttcacttttgctaattttctcattcaattcatgt

SEQ ID NO: 185943 - DNA, 396 bp, Glycine max
  unsure (1)..(396): unsure at all n locations
atgcaagctntataagtgcgggtctgggagacgaatgttaagtgtttgctatatgtgaagatgatgttccaagtacttcggatttggtccgaccatgccctcctgatttccaactgggaaattcgcgagtggaggaacgccccggcatttacgcaacaagcataatgtaaacctttaccggtttaaaagctctataattgggacaaatggactgtatggtttgacggagcgtcaaacattctatgtcatggcgttggggcagtgttgatctctccggacaatcaatgtgtacctttcacagccaggctatgattcgactgcaccaacagcatggccgaatatgaagcatgtgccctagccgtccaggcagcaattgactccgatgtcaaactactc

SEQ ID NO: 185944 - DNA, 358 bp, Glycine max
tgtggaagagtcagtcttcctacttctatttgttgaccatatagtggtacctggagatatgtcgcgggagtcaggagaccttggggacgtcacgtggggtgctattgcccaaaaccaagcttgatcaatcctgacccaacccgggcatagtcagtcagtgagaacctgtgacgtacctaaacaggcgaactcctggtagtcaaccaataaaagaacaaagaccacaaagcaaggaggcttgtgtggtggctggccagctatggatcttgagtgatatctagaatatggcctctggtaatcgattaccaagggtgtgtaatcgattacaaggcttataaatgaagacagaaagttaata

SEQ ID NO: 185945 - DNA, 127 bp, Glycine max
gagtcttccacaatagcagcaacaacaacagtagcaactgcaatagccctagaaatagcaaatagttgaggctcctccgcaacctttccttgaagaacttgtgaggaaaatgactatgcaaaacatg

SEQ ID NO: 185946 - DNA, 274 bp, Glycine max
  unsure (1)..(274): unsure at all n locations
agcacaatcggcgcgctaagcgcatntccaagcatttcanaagcagtaagggattggcgcttaacgcatgctgccgctaagcccaactcgtgaaagttcacttccagaatggatatggngcttagctcangacaatgcacttagcgctgctacaaaagaattttccagagatggagtggcgcttagcgcatcatctctgctaagcccactgcttgaagtttacttccagtgaagatgttgggcttagcacagtgatgtgcgcttagctgaacta

SEQ ID NO: 185947 - DNA, 387 bp, Glycine max
  unsure (1)..(387): unsure at all n locations
agctggcactaagaattctgattcaagttcctaatgtatcgagacattggttattgaacaatggaaactcccgagaaattaaaatcgtcattacttttcactcggatgtccgattcaggcacttcagatatcgagacgctcgaaattgaacaacggaagctctcgagaatttaagatggtcattactttacacatggaggtncgattcataaacatcacatgtcgagatgctcgaaattgaacaacggaagctgaagagaatttcagatggtcataacttttcacttggatgtccgattcaggcgcatcatatatcgaggcgttggttattgaataattgaaactctccagaaaataaaatggtaataactttcactcggattccga

SEQ ID NO: 185948 - DNA, 286 bp, Glycine max
  unsure (1)..(286): unsure at all n locations
atggcttattccttatgcgcctgaatcgaacatccgagtgaaaagttatgaccattctaatttctcgatatcttccgttgatcaatatcgagcgtctcgatatgtgatgttcctgaatcggaccttcgngtgaaaagttatgagcatttgaatttctcgagagcttacgttgtgcaattacgagagtctcgacatgtgatgtgcctgaatccgaccaccgtgtgcatagtatgaccatttgatattctcgagagcttctcgccgttcaattgcgagggtctcgata

SEQ ID NO: 185949 - DNA, 326 bp, Glycine max
  unsure (1)..(326): unsure at all n locations
gataaaagggaatgtccaccattatttccatgacacaaatgcaataatgatgatttggaaattttatgcaaaactagtcatgcatgcacctatgtggacaccaaatgtcaccattatttccatgaggtattttgctacctaaacatatgtatatttttgtgaagtattttgctatatacatgcgtgtccaaggtatcttgctacctaaacatacatatatatgttttgtgagaatattttgctatatacatgcatatccaaggtatcttgctacctgaacatacacatatatattttgtgaggtatctntgctacatacatgcata

SEQ ID NO: 185950 - DNA, 323 bp, Glycine max
  unsure (1)..(323): unsure at all n locations
cattctatgtacccgtggtggtccacatttggtttcatgtatatttattctcngtttcatttactttttatacccccttntgacgtgcttaagccatttatttaagtcatttctcgcttaacctaaaaataaaataaatttccactgatcgtttgaattgtattatccgttaatttcggttaaaatgaattccaacccgtcggtcgtgccgcaaccacgttggaaataaaaaaagagggtaaaaaataatataataatcaaaaaataccttttagtaaaaataaagcgaaaaatcaatcggacgttttctctttgggatttct

SEQ ID NO: 185951 - DNA, 350 bp, Glycine max
agctgtggaaatagctggtttctccttctcgcttagccaatatgctggcttagcgagcgtccgctaagtacaacactcctaggctaagcgcgaggaagactctggaagaagatgagctgtacaggttcgctaagcgcaccgcttcatctcactcagctcaccgctttagtttatctgctaagcgagaaaggcgcgctaagccaaaaatcactaatgtgcgctaagcggtccatacgtgcgctaagcgcacgagcaccaacaaagccacctatttaaacctgatatcagatattgtgagtgagattggattgcgattcagagctctgcatgtcttgggtttctagagagag

SEQ ID NO: 185952 - DNA, 290 bp, Glycine max
  unsure (1)..(290): unsure at all n locations
tagtanagctaggcactaacaacacttaataaattcattatatgggaaatcaatagcgacaagggtatactcaaggaggaatttcaggctttcaatanggtccttataataaaaaaggatagtggaggtcacaccctggcaattaattcaacaaagaaccaggtggaccttcaagcaggccaatccaacaagggcctaacatcttntagaggactactaaactggaggagaacttgactcggtttatgtaggtaacaatgtcaaatcataaaagcactgagtcagcactg

SEQ ID NO: 185953 - DNA, 384 bp, Glycine max
  unsure (1)..(384): unsure at all n locations
agctnttcctctagttgctctggtaaggtttccaaatgttagagaatgaaaagagattgaagccttcattntgtactgtcttcgtgcgattcacttttctctcttgataaatagtatttcgtaaatcccaacggtagaagtgtttacaattgaatcgggaaccaggtgtccaaatttcatgacgatccaatggttaatgattccgggatcgtagttttactggacaggttttgagtctccgtgggaaaagagaaagctacaatgcaaaggagatttctcttagctccgacattctttcgcaatttctgatggngagaatgctcggaactgagttgaaatcagtgctgaatatacaacgatccacggttaaaagttgagatcgtg

SEQ ID NO: 185954 - DNA, 376 bp, Glycine max
  unsure (1)..(376): unsure at all n locations
tcctcagggccatttcctatgagaacaagcatttagaagttatttntacaagataatgcttatcttaacgcanaanatgtcatgctaatccctccggtttagaacgaactcatgcgcacgtttaaagtaacacatttatgcacatgcgtatgtgtagaatatcctactatttatatcaacatagaggccatccaacacattctaattgtcatacatatatacgcatttgaaaagaacacacattctcacgctcaaggcattgcgtcaaaatttacacttaactatgtcctaaacatttgctatcacaaactacctacacacactcgaaacatatataccatacaaactntcatttggtcactcacacttatgcata

SEQ ID NO: 185955 - DNA, 439 bp, Glycine max
agcttctaaactttgtacaagaatgaagctctgttaccacttgttggacaagtggcctcagatatcttaagaaggggaagttgaattaagatattacaaattattttcccaattaaaaattctatttaactttctattcaagttattaattcccttaataatgaatttcttaaatattgattcaaatagaacaatttgaatatgaatataaaacaataataaatgaaggagtttaaggaaagagaaagtgcaaactcagatttatactggttcggccacacccttgtgcctacgtccagtccccaagcatcccgcttgagagttccactatcttgtaaattccttttacaagttctaaacacacaaggacaatccttcctttgtgtttagaattctttcacaacaagagaccctcggtctcttaatcccttttcagaat

SEQ ID NO: 185956 - DNA, 406 bp, Glycine max
  unsure (1)..(406): unsure at all n locations
ntataattgaattgtgaatatttgattggaatcattctatttagaaattgatttaagtaaaatatgtaattcaattaagttgatttataaaagttagtaatataaaagagaaatattntactcaaaaaaaggaaaatattctttgaattaaggttaatatataatactttaattgttattattattntatttattaaattattaacatgtaatcaattaatatttatttaatgttaatactaatagtaatagtaacatattattctgattggaatttatttttaattattttaattattattgaatcaaataatctaacataatgattcaacatctaaaaaataatgagttttgtataataatngatattatatataacaattcattaaatattaatatacacata

SEQ ID NO: 185957 - DNA, 404 bp, Glycine max
  unsure (1)..(404): unsure at all n locations
agctntgcggatttggtcttcgtcggggaaatgatcgaagcgggtctgaaaagaggcaaatttgattgtcctgctttgatgaatgataaaattggggcgaatgaagaggatgagaatgagaaacgaacccatgttgtggctgccattcctacatggccaaacttcccactagcccaacaatgtcatcgctcagccaatatcggcccttctcattacccaccacccagtcatccacaaaggccatccctaaatcatccacaaagtttgctggccgcacatccaatgccaagagcaaaccaaaacaccaatcaagaaatgaatttggcagcgaanaaagcctgtagaatcaccccaattccggtgtcctatgctgactngctcctatatctactcgataatcaatg

SEQ ID NO: 185958 - DNA, 505 bp, Glycine max
  unsure (1)..(505): unsure at all n locations
ctacttatgtggcatggcgggcttncttcaccttcttgtcttcaacgcgaactttgaccattgntctttctttccgcgatgcttcttttcatgtcttgctgagtgggcttatagcctaaaccatactttccaccattaccttgggtatttatcaatctagttattgccgccgttgttttttctaaacccatcccgggctcataaccgttccccaacataactcgggccatcattaccgctgcatcggacagactangctgcccaaagagggagtccacggaggaaatgctgaccacctcaaaagactggaaagtagtttctaacgattcttctgccgctttcacataaggcatggaggatgggcagctnaccaagatatcttnctcgcctgacacgatgaccaagtgcccctctactacgaattttagctttnggtggagcggagaaggcacgactcccactgagttgatccactgacgcccccacaagcagctgtagggggatn

SEQ ID NO: 185959 - DNA, 271 bp, Glycine max
agcttccatcaagttatgaccatttgaatttctctgagatcttccgggttcaatttccggcgtctccatatgtcatgtgcctgaatcggaccttcgtaagaaatattatgaccatttgaacttctctagagcttccgttgtttaatttcgagcttctcgatatctgatgtgcctgaatcggacatccgagtgaaaaggtgggacaatttcaatttctccagagcttcccgtgttcaatattgagcgtctcgatatgtgatggtcctgaatc

SEQ ID NO: 185960 - DNA, 279 bp, Glycine max
tcattgcctaacaagccaacttacaacagctagccccaagagactcagcataaggatgcacagaccaaagttgcgtatgtaaaaaaattgtatgaccaagtgaaggtgcaaattgcaaagaagaatgaaagctatgccaagcaagcccaaaagaaaaggaaggaagtggtacttgaacccggtgatgatcttggacatttgaggacaaatgttttccaagaaggagggaatgatgagaatcatgaaacaggccaaatacagtctaaaggcccaagtgga

SEQ ID NO: 185961 - DNA, 561 bp, Glycine max
  unsure (1)..(561): unsure at all n locations
ccgtaactcccttcgataatccctctttgtgattataacactatttacanaccgcacggnaatttgaacatgtananccgtagaccctagcactgcagcatcaagcttgaacagnagatggacggctcgttgttttcctattttatgngagttaacgagacaccgcatcaatcctcaagaattactgtggctgtggtgctaaaaggaaaaatgggactataacagagaacagatgacttaaaacacccagcctacgggatcgtatgcagcggcggataggcatgccactttccctggctgcgtctccgtgactcaatgtgactgattctggatgatggataaaagcagggccagttgctcctcgtactcgaagatatataccagaacatttatgaacctatatacctgttgtcatcatgcgaatgaaggcacaaatttttcctataatctctattacccgactattcctttccttacatattttactaccgaatactcaatctgacgattgtgactccccacccccacaccccttatgcatgttcggataatcgttgcccg

SEQ ID NO: 185962 - DNA, 503 bp, Glycine max
  unsure (1)..(503): unsure at all n locations
cgaccacagttggagccacttgaanaccgttagactatctttcganctgcggcatgctatctagtgggactttgtgagagagacttggccttatatggagattatagaaattgtactacggggattgcaggctgatatggctgactgtgtttttacatggaggttaagaagcaagcatcgtgacactgtgtactctgtgaagccgagtatggtactgccacttattgcacatgtcatgtcatttggctaacaagactgatggaggatctccgattggtgcacatgaaagctcagagatctatgtcgacaatagatctgcacgcgaacttgtccaaagtccggtgtccatgatctgactaagcatatacatacatggtatcatttctttttagagtgcgtaccgacaaaaagtctattgaatcgtgtgaaaggaagacaacgtaagatattggagcaatcctctacatcagagattttcagatgcgacacgactgtgtgagagg

SEQ ID NO: 185963 - DNA, 320 bp, Glycine max
ctgagtgaacgatccatgatatcaccatattattgtatctcttccatgcttattgcaaaggatgggttatgactggttgtgagatagttccatccacaaattcaaccttgttatttgcactcagagtagtaagcattgaacgactcccacgattatcattccttggatccatatatggagatacaagcgttattgctgaactttcactacggtgaaggttatacgaactatgaacattcaaagattggtcagtgtctgtgtgcatgttcaatcaatagagtagagattcttttgtattgatgatgatagaaagaaatttc

SEQ ID NO: 185964 - DNA, 399 bp, Glycine max
catgatttctataataccaattttgctagctgtcatgacattcgtctcatattgtgaacctattccgtgccatccagatttataacaaacttctcttactgtatttcaaaatcattctactatttaccttacaactcactcaactctatcattaccctttttcaatatgcagaagtaccaacatgcaaacatatctaatccagctaatggcagcatcaataggcaagctatgatccagaagcagcgagatgcctcatctcccatttctttcatcttataaattcattgcaccttctgcagattaaaataagcatttggtccttgatttcaacatgaatctactgttaacttatgatgcactcaattttgtctctagccattatcacatgcagaactatc

SEQ ID NO: 185965 - DNA, 344 bp, Glycine max
  unsure (1)..(344): unsure at all n locations
ttctatgtacccgtagtggtccacattgtgtttcgtgcattactattctcgctntgtttactttatataccccctgttgacgtgcttaagccattttacttaagtcatttctcgcttaacttaaaaataaaataaatgtccacccgacgtttgaattgtattatacatgaacttcgggtaaaataaattccgaccgttcggtcgtgccgtaaccacgttggataatcaaaagaggtgaagaataatataataatcacaaagacatcttttagtaaaataaagcggagaatcaatcggacgctttctctgtgagatttctcattcttaatcgaattgatgataac

SEQ ID NO: 185966 - DNA, 506 bp, Glycine max
  unsure (1)..(506): unsure at all n locations
gcacgcacggttgggaccactcgaacccgtgatacacaccacgtcaactgcangcatgcaagctttgctaacgtagagaacgaaagagtgaatcttatccaatatctggtgccatgatgcttgccttagctccgaaatggtgtccaagaattcaaaagctcacgaggcaataagcttgattttgcttgcacgaaagaatgctgnaagttcgatggatgatatttgctggatgtaattgttaatatcagtagggaacaaatgaaagtcgggaaaaactgtgtacagagtggttctaagcgggctagctactacctgatgcctaggcgggtaaataatgttaaggctgagactattacacaataacccctagttgctgtaatatatcttatcttcttcgctggcctcaatttcactagtaggagtttggctcattttacatcatcactagaacctatctctcattccattaatagaaactggataattacaaagcgtgcatccgatcn

SEQ ID NO: 185967 - DNA, 338 bp, Glycine max
agcctgacgctggagctgacttttcaactattctatctctttcagaccggcgactcctatgctcttgaccttgacttgataaaacctcttttaagcgaaagcgcctgactcgattccatgttttactaaagtgaaacaaaacccagtgcgaatcaagactccgacattatcatgggtggaatggatgaatgcatgaagaaatgcgtatggcacagatgcattttacgaatatgggagccacggagattgtccccttctatgtactcattcatgtagcatggcgctcgatgtatgcatataataaggcgacacggaccctccgctgttcatgacaaagt

SEQ ID NO: 185968 - DNA, 135 bp, Glycine max
ctttaaaaaatacactcagcggtggagagatttggcggcacaagtagcttcttccatggttgagagagagatgatcaccatgatggtagacactctgccagtgttctactatgagaagctaataaggtacatgtc

SEQ ID NO: 185969 - DNA, 527 bp, Glycine max
  unsure (1)..(527): unsure at all n locations
cggacagtttaaacctttganacccattgtagacccgtcgagcnccgagatnctctgcaggcgagctgcctgcgtgcgagcatgtgcgcatattgggtactcatcgcatgtggtactccgaggcggtgaggcgatggcgctcaacatgaattgcacatgcacatatcgcgcattaacgcagcatcccctgttggacacctccgactgagctcacgtactgccacgaacccatatactcgatgatctgaacaccgggtccccatgaattctcccaagcttgcgcaacatgcaagtcatacaacatttatacaccataaactatcacagccaatgcaaacatggcgaaggcatagaactcttgcgcaaacaccaaccaatatcgcagctattctcacttagagacccgcaggacagattcctatcttccagatcgataaccgttggatcgacatcgaaaacttactagaaggctctagatcataagcctacattntgaccgttgggatctactagcatacatcctgacg

SEQ ID NO: 185970 - DNA, 343 bp, Glycine max
  unsure (1)..(343): unsure at all n locations
attaataatggccgaacagttcatgtcaaagaacaaacttatattggttcgtaaacttctagtttacgacttgttttttcaattttaataataaacatggagtacaaattttacattgatgctatgccttgtgtgaatcattataatattagcgagaaatacaaaatatatatcanaatatatcctatttttcttgatattgttcactgtaaaatacacaccacatatcatgtatgcatgtntataaaccaataaaatcattcaaaaaaaaagttgtgaccttaatacatgtaagagctattatanatagcctatatgagttcattcatgtgcaatacacaac

SEQ ID NO: 185971 - DNA, 396 bp, Glycine max
agcttgtagtattatggggtttctatcacatgtttgtactacgtggcggtcgggagatggtgcaaaacgattcttcacattcacaaatcacgtataacccaccattccctgttggccacctccaactgagctcacgcactctcacgtagttcttattctcgttctcttaacgtcgggtcccatcaatcctcccaagcttccacaacatccaggtaattccacatccaatcatcatggactatacaaaccaagcaaaacagggcaaaggcagaatactctgcccaaacacaattcaaaacacagctgtttacatacaaataccccagtaacattttcttccgtccaattcttaaccgcttgatcgactcaaaaatttactggaagtctctaatacat

SEQ ID NO: 185972 - DNA, 305 bp, Glycine max
  unsure (1)..(305): unsure at all n locations
gacaatggagaattcaaacacagtttgataagttataagcaatgactttcaatcccataggttacaagatacagtagcacacaaataatacatgaggtacatgcctagctcacgcgtagttgtggctggcacaatttatttatacttttaagatatacaattgatggcattaaggggtaagtaagccccataagtcatcacattttatttttcgcatagaaatagcctaggacatagcatttntatattggcattaatttagttacgggttttgactaaggtaagtatcaatttggttgttcatc

SEQ ID NO: 185973 - DNA, 340 bp, Glycine max
  unsure (1)..(340): unsure at all n locations
agctttgagcaaattcaaatgacaataactctttactcggatgtctgattgaaccccgtagtatagcgagatgctcggacttgaatgccgatgctcggacttgaatgccgatgctctgagcaaattcaaacgagaataactttntactcgtatgttcgattgagccccgtaatataccgaaacgctcgaaattaaatgttgaagctctgagcaaattcaaatgacaataactttttcactaagatgtcttattgagtctcacaatatatcgagacgctcgaattccataccgacgctctgagcaaactcaaacgacaattactttntactctgatgtctg

SEQ ID NO: 185974 - DNA, 224 bp, Glycine max
  unsure (1)..(224): unsure at all n locations
tgtagaatggctagacatgatacatgtcatgggcttggttgtgttaaggataaaatggatgccccacattatttccatgacacaaatgcaaaaaatgatgatttggaaattttatgcanaactggtcatgcatgcgcctatgcggacgctcaagtgtcaaattnttatggtcatgtttctgtttntgtttaatgcggggcgaaaaaatcgctagcgcacgggat

SEQ ID NO: 185975 - DNA, 344 bp, Glycine max
  unsure (1)..(344): unsure at all n locations
agcttttagctaattntacgggcgaaagaggttgttcaatgctgaaagggtttcatcctgtgttgagggagtttctgccatgtcgagggagtctatcagatgtcggggatggtagtcttgacaagtagagggtgacgagtttgtcaagcccccaagcttggacatgtgttgtccgagctgcttctgtcaagtggtttatgatggacgtgtcaggtgaggtaagtcatcaaatttgacaactctgcccttttcctgatcgttggagagtgtatttaagatagtccataacgacctacctgtgtaacacgtgagtgcagcatacacgcaatactcttgcatacgtg

SEQ ID NO: 185976 - DNA, 311 bp, Glycine max
ttcaatatgattagaattgggctaagcgagagtacattcgctaagcacatcatgtttactcgctaagcacagtgcacttgcgctaagccctattctttgcggccaattcactagtttaattaagctaagcgcgacccattcgggctaagcgaaattccttgcagcctggatagcgctaagctagcaacccctcgctaagtgcatgcccccctgtatgcaggatgcagtatattcgctaagctgaccatgagtgtggcttagcaagagttgcaggttttcttatttgcacaattcgcttagcgcactccttt

SEQ ID NO: 185977 - DNA, 591 bp, Glycine max
  unsure (1)..(591): unsure at all n locations
catcccactacanttctcacctcagtatcactgatctattagttcttctatttttctacactcnnncaagcccgcgtacgttgaaacctcttgancaccgttaactctcagacnacctgcacgcatgcaaacttggaccacgaaacatatacaccagatttttgtggtggttggatacatgatagacatggacgatgacgtggaggagaaacagacgttggataaagcaacggtgctctgcatgactccatggacgccaaccatccaacataccatagaccgcttcatcggtggggaaatattcatggcgcatgttgacgaagagagtgggggtgggtttcttgaatgcctcgggaaagcactgagaatcgggggctcatcataggagatcgcctctgacgatagtcagcctgagggctaatcgtctacctcgatagagaacatgctgtcagaatacctcattcgcacatcaccggaaggatcaccgatagaatatggtacccgaccagacgactatagatttattctgaaggcgttgttaccacaaaaacccactgtggtacggtgaaacctcgggtatccttgcgaacg

SEQ ID NO: 185978 - DNA, 367 bp, Glycine max
  unsure (1)..(367): unsure at all n locations
gtatcttgtgcatctatattgattcaatttaaagctctaaaaaatcatgaagcttacaaggaaggaaaaaataatgttattccaaaaggccgtagttaataatcatatatcaacatgaagttaaagatcaaattgtgaaaagcttgaatcaactcaaaggaaaatctatgacaacccagaacacanttttatgtcattatttttaatatgccaaagtcatttatcaactatcataatccttcctatannatngaatttctagctaataatatttcacctttgaacaacttgctattgcaaataaaaatanggcaaggaggtagatatgaaacacattaanttttganactattcctcatatttggga

SEQ ID NO: 185979 - DNA, 456 bp, Glycine max
  unsure (1)..(456): unsure at all n locations
tgtaataatcaattattgtttcaaagacaagtttgaattgatataatcacataaggcttactctcatattcaattattggcttgataaaagtgttccatagaggaacttgacgaataaagattatcctaaaagaaatttaactttttttgaaaaccttaattatatttttaggtttcaaaatatttttaagccaatctangttcaatttgaagccttaatatttaaacgacacttagaactttcctcgttttttggcanatagtcaaacaattcattatatttagtcattattaattggaattatgtttctatganaatttgaatatattctcacaccattgattaaataaaatagtgatatttaatccaatgcaatatatatgtgcaccaagaagcttcgtggacaagaaaatatcatcctaaactatattctcttctaaattactataacctat

SEQ ID NO: 185980 - DNA, 435 bp, Glycine max
agcttggaccacgaaacatatccagcagattactgcggttgtgggagacatgatagacatggacgatgaggtggaggagaaacggaggttggatagagcaagggtgcttgtcaagactccatggaggccaaccatccaacataccattgacgtcttcatcggtggggaaattttcaaggtgcatgttgttgaagagagtgggggtgggtatcgtgaatgcagtgggaaggcacggagtatggggggctcgtcagaggagatcgcctctgacgatagtcaccttgagtgcatatcgccgacctcgatggagaagatgctgtccgaagaccgcatgcgcaactcaccggagaggatgacggagaagtcgatgttcgcggaccagcggacaatagaattatccagaagtcttgataccacaaaaacccactgggtaat

SEQ ID NO: 185981 - DNA, 403 bp, Glycine max
  unsure (1)..(403): unsure at all n locations
agcttagctccaaactctntgggtggaggatgaatgaacagcgcttggcaatgacattcatgggtctccgaataaaagtggagaatggagaattggcgtatagagctaggcaatcacattcgcggngctccagactcgaaggtggaagacacatgaacagcgctaggcaatgaccttcatggggctccgaaaaaaagtggagaatggaggattgcactatagggtccacacttaggcaatcatgaagcatagctcaaaacacgaaggtggaggacacatgaacagcgctaggcaatgacattcatggggctccgaataaaagtggagaatggagaattggcgaacagcgctaggcattgacattcgtggggctccacactcgaaggtggaggacacatgaaca

SEQ ID NO: 185982 - DNA, 367 bp, Glycine max
  unsure (1)..(367): unsure at all n locations
aganagagggagagatagagagaggggggagcacganattgaaggaagaanaagggagagaagttgaactntgagttgtgtctcacaagactctcattcatcaaagttacaacaagtgttacacatgcttctatttatagactaggtagcttccttgagaagatttcttgagaaaacttccttgagaagcttctttgagaaaacttccttgagaagctagagcttagctacacacacccctctcataactaagctcacctccttgagaagcttccttaagaagattcctaaagaagctagagcttagctacacatacctctctaatagctaagctcacctncttgagatgagaagctagaacttagc

SEQ ID NO: 185983 - DNA, 143 bp, Glycine max
  unsure (1)..(143): unsure at all n locations
gcttcaatttgcagctgtttggtttaccattttgcgtgttttcattgcagaatgcantgatcttttcgcccgtttaatgcaacaacattagttattagcatgtagttaaagtgctgcaaaatgctgaataaaactgcaccatt

SEQ ID NO: 185984 - DNA, 322 bp, Glycine max
  unsure (1)..(322): unsure at all n locations
ctcagcttagcctgattgctaagcgacatcttatccttggctaagcgtgacccagtgtcgccaagcgcaattccttacagccataactggggttcataaagctaagcaccagtcatggcagctaagctgaattccttgcagcaatgtgagcgctaagcgaggcctgatctgtagaagcaaagactttgactttgatgctntcatgatgccatatgaacatgcgtttcccaagttaagatcaagacaaaaatccaagagattcaagatacatcatcaagaagatctctagntgattagggagggaattccaaatgaaacaaca

SEQ ID NO: 185985 - DNA, 187 bp, Glycine max
  unsure (1)..(187): unsure at all n locations
agcttgtaggattatggngtacccatcacatgtggtactaggtggcggtcgggcgatggtgcacaacaagtttttccacatccacaatgcgcgcataaacccaccatcccctgtaggccaccttcaactgagctcacgtactcccacgtaagccatatcctcgtttctctaacaccgggtccccatc

SEQ ID NO: 185986 - DNA, 404 bp, Glycine max
  unsure (1)..(404): unsure at all n locations
gtggcattagagcacaagagcttcaagtaggtgctccttaaacctccattaattntttttctttaccttctcttccattgntgtttcttcatttttctccatgtatctcctcacatgtcttgttctaaatgttgttaacatgattctttagagtttccaccgattaaacttgctatagaagctagatttgattttctatggttcaaatttcttgttcttgttcttgaaccatgaattgtgttgagtttaagttcctttgagtcttgtcttggtatatcttgtggctgatgttagtgtttggctctactgagctntaaaagaatggctaagaatttgttaaacataagcacttagacaatgaaggaaagctggagttgctgcacatgatgtccaacgttatgtca

SEQ ID NO: 185987 - DNA, 412 bp, Glycine max
  unsure (1)..(412): unsure at all n locations
agcttgtgtttcanaanaacattaaacagagcattgatatatccaaataatgagtatatggtgtgagcaagtgattatgtaaagcgttgtttctaaaaaaataaaaaaatcaaagcaatgaaacaacagtgtttagagtgagtgacagtgcatatggtttatttagtgggactccctcagattcttttacattagcaatgtaagttaatctaaaatttcaatttctttaataaaaaaatggaaaaagataagccaaaaagaagaggaaaaaaaaactgaaccattgaatgttgcagttggtatcaatgaaactatgataatataaatgttttttctctctttttttagcttaactaatttttcaaatacttgtgttatttattatagagaacatgagtaaatataatgaatg

SEQ ID NO: 185988 - DNA, 547 bp, Glycine max
  unsure (1)..(547): unsure at all n locations
cgggtttgataccatctnttgaatcgcttcattacggacctatgaatctaagctctagnggagctagtgtgaagttgcaattctcacatgatcggtgctgctaactgggtacaccccaaccatactttcactattggcacaggatcgggtgacatatctgtatgctgttggaaccaagtccaaacttaatgatggaaactatattcttgatcaactgcaatcattataatacttgctgctagatacccattgcctgtcctactgtattatgtggcataatgtcgagtcaacatgccaatatgttaaactacactgactctgtgatgaagagagaatctcctctatccctgcattactaagctgttgaggtgacacatgtccctgacattgtctcgacatctgtctcgacatcatggaaagctgctgcttcangtgctgtgtacaaagatgctctgatngctgatctcanagacacatgccatgtgctggaagctccatcatgccacctcgtgcacacgatgagctatactgctgtcacaggctctaa

SEQ ID NO: 185989 - DNA, 121 bp, Glycine max
acttgtgttgatatgtttgaactaatctatcttcatcactgtattagtgacaagatgaagatagacatccatgctctgcaccttggcttactgtgtttctgacactatggcatttggtttc

SEQ ID NO: 185990 - DNA, 348 bp, Glycine max
  unsure (1)..(348): unsure at all n locations
ngganacttagcaagaacaaagctgattaatgcctcatcttaagataactgagaaacagaatgacgtgtattgccagggactaccttgaatctaaaggccaatctttttcccaatacacgattaaatgcttcaggtatatctattggatcaaaaactccttcctatgtaattaaatatatgaaaccattaatatggcactacaatattatctgtgcaaaaggaatattgacacatgatggtagatataatatgttttacctcataaataattatctgcttaatgtcagtggcagtctcatttatcagagcataacattcacgatcccagagtgtaaaaatggcatatt

SEQ ID NO: 185991 - DNA, 368 bp, Glycine max
agcttctccctctttttcctattaatagggggaggagggcagaacaaaaatgttcaaccctcttggtatctgagaatcacttaaaattagtgagaaaatttgtttccgtgaagaaaattcaagccgaggcgcttccgtaatgcttccgaaacgtttccgtgggtgatttcgcatagattgtaaaccgatcttcagtcttcaaccggtaagttcctgaaatcgaacttttcaattcattctatgaatactcagtggtccccacttgtttcgcatgcttttattttcattgtcatttactttacatacccccttttgacatgctttagtcatttatttgagttatgttctcacctaatcaaaaataaaat

SEQ ID NO: 185992 - DNA, 267 bp, Glycine max
  unsure (1)..(267): unsure at all n locations
tgtagtgagggtnnggctacaaaattcattggtttttatagaattcaaaggtttagattntaagagagcacaagtcctagacttatcccaatgatcttttcttgtatcatacaagtagccttctcactatttttcttctcttaagtcgcttttgaccttattgaaacaggacacttattcttttcttcttctttttttnnttttacatataacttatttgttgtgtgtgctgatgattaacctttttcttttcattctaattgactt

SEQ ID NO: 185993 - DNA, 425 bp, Glycine max
  unsure (1)..(425): unsure at all n locations
cgcttggtaaaatagagaatggatccatctcatttgagatattcacatgtgaagagagcatcctatctaagatatttgtttcattctgccatatgaatatatcatgtgaaagtctatatatgatcaattaccggtcaaatatttgaagccaaaaaaagagaaagggaaatggtaacaataacgcacctcaatttgatcaaatgaccttaatcttctaaaacaaggagaatggctaatttcataatttgtgtgcaggttgctaaagaaagtgcagatgtcataattctggatgataatttctccacgatagtgacagtagccaaatggggacgttcagtttacataaatattcaaaaattcgtacagttccagcttactgtaaatgtgngtgcattactggtgaactnctcatcagcatgcatgac

SEQ ID NO: 185994 - DNA, 355 bp, Glycine max
  unsure (1)..(355): unsure at all n locations
ggctgaaagtcggaaatntattntattaaatcataaatgttttgtaaaattatatattgaagtagctaaaaaatgtaatattacataatgggcatatntatgtaatgatttatacaaattnntaattgattnntgtgacaaaatatattttgtagtatttataattttggtattaaattaattttaaacacttgtagctttttatttataaaatatccaaagaataaacaaaaactacataaacttattatatatcattatcactatcatatngttnttttatanattcaatatcatatataataaaagggtaaaatgagtaatcatatatatgtaaaaaggataaaataataag

SEQ ID NO: 185995 - DNA, 368 bp, Glycine max
  unsure (1)..(368): unsure at all n locations
actctcagtcacctgcngcatgcccgcttttannaaaccatttgctactggtaatctattacaataatctggtaatcgattaccagagagtaaaaactctctggtaaaaggttttgagaaaaattcatgtgctactcagtttttgaaaaaactttttaatacttatcttgattaagtcttctcttgattcatgaatcttgatcttaattcttggaagcttgaatcttgaaacttgattcttgaaatcaaatttccttttcaaccttgaagtgttattgattcaatcttgaactcattctttgattcttgagatcatcatcttctgtatcatgaatngttcttgatctttgagctntttgtcatcacct

SEQ ID NO: 185996 - DNA, 254 bp, Glycine max
  unsure (1)..(254): unsure at all n locations
tctagccaaatggacttaccttgaattaattcttttgatagtccctttgagcctattttcccctttctttnttttttgaagctcattacaagccttaagtgaaaaaccatgatatcaccttacccttaagggaattttggagcttggaattgttttgggaataagctgggaataagtatggnggggtatgtttcattgtgatgtgccatcattttcttctattttctaaaccctttntgcaccattttaattac

SEQ ID NO: 185997 - DNA, 431 bp, Glycine max
  unsure (1)..(431): unsure at all n locations
agctgangattatggngtacccatcacatgtggtactaggtggcggtcgggcgatggtgcacaacaagttttccacattcacaaagcgcgcataaacccaccatcccctgttgcccacctccaactgagctcacgtactcccacgtagcccatatcctcgtttctctcaacaccgggtccccatcaatcctcccaagcttccccaacatcaaagtaatacaacattcaaacaacacaagctatcacagccaagcaaaacagggcaaaggcagaaaactctgcccaaaacaccaaccaaaatcacagcttttcacatacaaataccccagaaacatttccttcgtcccatttgtaaccgttggataactagaaattttactggagtctctagacatgagcctacattttgaccgtggatctactacaacatc

SEQ ID NO: 185998 - DNA, 354 bp, Glycine max
agcttatcgacacattaacactgtttaattatataatacgtgctacaaatattttgcaagtcaaaattgcgattttgatcatcaaaacaaaacggtgcaagtaattagttgattcattttaaaaatagtttgtaaaagtaattcaaatgagtcaatcaacctctctctctctctctgtctctctctctatatatatatatatatatatatatatatatatatatatatatatatacactataaattgttatgagataaaatatacgcgtcaccaagaagtatattcgtatactaatatatattataaataaaatctattgagcaataagtataaatattccaatgaaatattat

SEQ ID NO: 185999 - DNA, 375 bp, Glycine max
gatcactataataattgaacatgtaattatgtggagtatatatatagtttagaaatgacataatattattgtggtaaattaaaggaggaaagagttaggaatgttacaatgtgaaaatcgggaaagaacgtggttagatgatagagaagagagcgcgtggggtacaagagaatgccataatttttagagtgagagagaaagagacgggcgtatgagcgttgaggaatgaggaagaggactgtttcaaacctctttgatgagacacagcaactttgaagttgaagcaactccctattatcattattcttacgaatatgtaaagataatttcaatatgttctctacgattatgtaaaatttgtgattaaaactttat

SEQ ID NO: 186000 - DNA, 284 bp, Glycine max
taagcttgggttttcaactgcaagtccaggtggtatttgcatatacacttcttcttcaagctctccatggaggaacgcattgttgacatccaattgtcgcaagtgccattgattttgcgcagccaatgccagaagaacaccaaccgtagtgagttttgccaccggagagaatgtgtcgaggtaatctaacccctccatctgagtgtaacccttggcgaccaagcgtgctttatacctttctatggaaccatcagcccgatatttaatcttgtaaattcatctgc

SEQ ID NO: 186001 - DNA, 399 bp, Glycine max
  unsure (1)..(399): unsure at all n locations
ctgtctntgggcttggcagccacgctcaacaaagtactttcgacacctactgtacgttgatttcaccaatgctgttatgggaatgttgcgacaatcctttaaaaccttattgatacattctgagaggttcgttgtcatgtggccatatggacgtccttctctatcgtaagccatcgtccatttntcctttgagatgcgatcaatccatgttgctatggctggactcagttcacganatttttcttaaatttgataagaaatgtgcttgcaaggagtgtanggctgcataaaatagttatgaataaccaatttaagtataaatganagtaaaataaacgtgaccatcaaatatgaaatcttacccaatttcttcaacatttcttttttgttggcattatt

SEQ ID NO: 186002 - DNA, 178 bp, Glycine max
  unsure (1)..(178): unsure at all n locations
agcttgacatttctttgaaattggtgaaaggtctcatatgaagttttgtcatcaccttcgttctcagtgtccccttgtgttgggctctacttctcttactcaagcattacaaattaanaaatatttgaaagtaaaatggaaaagtaaaatagtaaattttggttctaaccattaattt

SEQ ID NO: 186003 - DNA, 358 bp, Glycine max
  unsure (1)..(358): unsure at all n locations
actctacaatgcanaaagtgatntcattcctaaatccanatccacatagaacatcaaaagatgaatcatagttgaaggagagagagagaaagagagaanaaatattgagaatttatttttgcaagtcacaaaaatgaactaaaagctnctttacaatgatgttacaagctcttatgtagaaagttgaaatcgcattattttttttttgcacaaaagattctcatttgagcaagaatacatctcactacaacgaatntacaatattcacaaaggacttctncacttaaatcttcatgtttctaatccttgctcgttggtgtgagagaatgactcactgtgacaagtttctacttaactc

SEQ ID NO: 186004 - DNA, 410 bp, Glycine max
  unsure (1)..(410): unsure at all n locations
agctntcaagagaagggatgattgttgggttggatccaatcaattttataactttagcaacaccacatcttggcgtgagaggaaagaagcaggtctattctggacaatataattttgtagccgtatatattgacttctatttgaaagattgtttttccatataattatcaggttatagttccaagttttactaaaaagcatgcatgtgcccttgtttgaacctctgcggagaatatttttgtggaggatgagcctattctaagatctgcaatggacgggcataatgtgtgtgcttttgcctatggtcaaacaggcacaggcaagacattcaccatggttagtcaattaaacattgtgttgctatttgtgcatgtgctaaacactcttattacttnactagtattcttaat

SEQ ID NO: 186005 - DNA, 461 bp, Glycine max
  unsure (1)..(461): unsure at all n locations
ngaggagaagctctngactccattgaccctataaataaaaacatatgggtgagtcttnttggtttgccaatcaaaatacaaaaaaaaaactaaacataagttaaaacacactagactagcaaccactacgatgtggttatctatcgaatctcatatgcatttctaaggtgtcaccttttcactaattcaacatatatgtttatatatgacattggtaagctaccactggaactcccagaacttagtagtcttacgaaactntagtttgaactgtcgggagggcaccttatgccatggtatgatggcaaggctctcaccgactggttatngccttgcattgtcgggaattccaagtggcactgtggaaatgcgacacanctcagtgcatatcctaataatacaagcagtgacgtaacgagtacactctataggcatctactcangactactctcacactcta

SEQ ID NO: 186006 - DNA, 397 bp, Glycine max
  unsure (1)..(397): unsure at all n locations
agcttataagggaaccactattatgcagttattaagaactcagaaggttcagaacttgtgatgatgtatatacctgctaaagtatccagagggacccattattgccaagagttgccctggattagcataaagtatcagaacttgtgatttgctagctgccattaaatttttgtaccatacccgaaggacatcacagtgactctggaaatattacagttaatataagcaattgattntattaaaatattatacttaataaaataaagaaatattaaaanattataatatttttatataatgcatatataacatggggagaataagaactggtagaaagaagtatgtggctagcatcaacaattaatctaatacgtaactacagcaattcttctcacct

SEQ ID NO: 186007 - DNA, 359 bp, Glycine max
  unsure (1)..(359): unsure at all n locations
tattttgaagaaataaattcactttttttaatcttgaaagagccttagaagaaaaagttattcttttcccataaataatcccgacaaaacatgcattcaatctggtggcaacaaanaacaattattcatgcaacaaatcataatacaggtgcttaccttaatctcaaaatgctccattttaatcaacaacgtatgttacagagaaagagagttcaactganagctctgtataaagaggtggtaatgtaactttgaagtatgacagatagaagtcagtgtcttatttgctaacagcatgcattacccatcaaataatttggtgatctaatcaatcattattganggagttcataccttct

SEQ ID NO: 186008 - DNA, 148 bp, Glycine max
  unsure (1)..(148): unsure at all n locations
acgctctgcaggcntgctggctgcctgcaagagtgcatacttataactcctgtgatgcagttatcgaacggtactgcgcatgatagaccgcaacgacccatacccacgtaaatcttgagagaaagaagtccacccaagcctgtatttt

SEQ ID NO: 186009 - DNA, 309 bp, Glycine max
  unsure (1)..(309): unsure at all n locations
ggagattcggtcctatggttgctaatggaggagttggaatggatgatggagggatgtcatctgctctagcccattttcttgatgccatctgtaactaaaaagaactcaaaattccttagaccaaatttattcaagtttaaaaatagaaataaaggctgaaattaatgatggctgatgcaatcctactccgcaagggcattggatagaaggctctaagaagaatgggccagagatgcaagagaagaccttanggttcccatgagccttatggtagattntgggcaaatgggctaagtatgagcccgctta

SEQ ID NO: 186010 - DNA, 379 bp, Glycine max
  unsure (1)..(379): unsure at all n locations
agctngcaccaacattcattagtccaatacacactcaacaaatagtcatcatccatccacaattccaatcattcatgctcaatatgatgcatgcacctgacctcaactctcatatgcaatgtggtaccatccccaaggaaatagcctaagcgtgtccacacgacactctcacttangaaaactangcagtaagtgtcgaggtcaccctgccgtgcacagacaactcccccccccctcacgttgattagcctgagtctcaagagagttccaaaccgagtgacatancccctagtataagtattcctcatcacaagaaactacaagtacttactgacaaagtttatactatttccatgtcatatgaagtatgaaacatggg

SEQ ID NO: 186011 - DNA, 329 bp, Glycine max
  unsure (1)..(329): unsure at all n locations
ntgcgagattcctcancggaaacgttacggaaacgtttcggaagcgcctcggcttagaatttcttcacggaaacaagttttccaagcaaattcgaaagagagagaagtgcctaaggggctggaccccttccttcttcatttccttccctatntatagcaaaataggggaggtggttgccgcccagctcgcccaggcgagctcagctcgcccaggcgagcanggttgcttcctccagaagcaaccgccttctggaggaatcttctggagggcccaaatgggcctgggtgctatttgcaccccattttactaagacaccacctttgctgtt

SEQ ID NO: 186012 - DNA, 383 bp, Glycine max
  unsure (1)..(383): unsure at all n locations
agcttctatatgcagagggttcttcaagtntctcagcatcattcatagaattnttctcactttatgctagcaaagttggtacttctttgcatgattctaacttacacttgagattgttaacaaataacaacatattttatttgtaaataaatataatcgaggcacattggaatactttcattccaacaaagtaattcatgatgccaaagatcaattgcctcaaacatgtcttccatttccattttgaacttggtcagcaaaggtaaattacttcctatcacaagcatgtcatcaacataaagtgacactacaagttacaaaccacaatcatttatatcaaatatagactttgttgattttcactcctgaatccaagttggata

SEQ ID NO: 186013 - DNA, 280 bp, Glycine max
  unsure (1)..(280): unsure at all n locations
ngctgtatgctagctatcatgatttcattngtattcctcanaatgtattctttgatatccttaataaaatgacatgaatttgtttccttaaaaaaaatttctatagtgccatgtaactaatatgaaagtcacaagaggtaaagaatagtaaagagaaggttaaaaagtggttgttgaaactgaggtttttcacaagaggtttttcattaaagcacaaaaggtgcagtatttgcttgcagtaactagcagaaaacttgtattatactctntggcacttctc

SEQ ID NO: 186014 - DNA, 362 bp, Glycine max
gttagtcgtataaagtgactaacatgtacaaaacacacgacttaacaatagttctagaataatgttaacacatcgcgccccaaagtgattgtacttgtcgggttcccaaagtggatccccatcatgatactcattgcgcctcacagtgattaaacttgttgggtttccatagtggatcacatcacaatacttatcgcacattaactcatcacccttaaagggtctacagtcatttgattgtatggttcatagctcacaactcaatgcacacaacatctcaatacacatgtgtcttacaatttaacacatagtcaatctatcacttacacacaatctcgatcacaaaggaagaattacaatac

SEQ ID NO: 186015 - DNA, 131 bp, Glycine max
  unsure (1)..(131): unsure at all n locations
gcttatggtgagtcgaagatgaaccnnctggtgcactctctattcttcttctgtgaagccatacagagaaaattaaaacaagggtgtgaacattttcttttgcacaaattaaaataacaatgccgaaattt

SEQ ID NO: 186016 - DNA, 118 bp, Glycine max
agcttcctcgttgctactgtgagaaactttctcaacaggggtctattgaaagctagatccttaattatccacacccctctattaaataaattaaccttctttagaataattgctgatg

SEQ ID NO: 186017 - DNA, 304 bp, Glycine max
  unsure (1)..(304): unsure at all n locations
tgaaccanaaaccggtgagagtgtgaccttactctgtgagtgaacgactaactgtgagtaatgatctttgcatgaatctcgaaattttagaataaaatgtataaatgaggacatgatgaaggccatgattgtacatacacaagctcttttgaccaaacaacttaccttanatgataattgcatcctatgcttcctttttgagttgaatgatattgtcaaatatttgaaccctgaacttaaatgattatctcctaatacctcgttagattctatgagagcatatggttcaaggtacatttactct

SEQ ID NO: 186018 - DNA, 451 bp, Glycine max
  unsure (1)..(451): unsure at all n locations
agctnggtgcttcctttccattgcctatcaaggctcaaccacctttggtcagtatccacatcaactcctcaaaatcatcattcccttcctcttttttcccatgcaagcaggcccattgaatgaaaaaaaaaaaaagaaagtcacataaaaggaaaagaaaaaagcctcttcaagtaatcataaatcctattatatactatagttttgttnttcgtcaaaaggctagcattaaggctcctctctttatgaccaactaatgattctggttgctaatatgatatacataggaattgtgccttaagagataacttaagagcattattttgcttcttttcttcatttcttttagctcataaagatagcttaccatacctttctcagacccctttcatcatgtgggatggaaatgcattataattgtagagaggtagtatctcttgctgaaattttt

SEQ ID NO: 186019 - DNA, 364 bp, Glycine max
agtcacctgcggcatgcaagcttgttacgtgtctttctacagattaaagcttattatgatgtgtatatgtcaatccagagatatcttattgcgaagatcctaaaatgcttgccttgaccgaaggtggtcatcaaatccacatagcctctggtctctaccatctcacttgtaaagtcaaggaatggaccggcatgaggatggacaatgttgggggagatgtctctggaaagtttttcaatataggatatcaatagaactaccctggtcgataaggaccctagacaccatgaagtttggaataatgatggagacaaccacgaggtcgtcttggttgatgggggtgatacccttgaagtccctatct

SEQ ID NO: 186020 - DNA, 117 bp, Glycine max
ctaagcttgacgctacatactataacatggtaacccactggtcaattgggtcatggggttgaaaatcctcgcccttctccctcaatcccacataattctcagagagtcaatagtccc

SEQ ID NO: 186021 - DNA, 388 bp, Glycine max
  unsure (1)..(388): unsure at all n locations
agctntgatggtgttgagaagaaatcacatgaatcacatgtttgtcatcgtcaaaaagggggagaatgtgaatgtatgtatacatgattntgatgatgtcaaagaagaatcaaacaacgctgcttcaaatgataagcatttgcttcaagaataattcaagattacttcaacaaacaaagccttgtttcaagattcactaaagaccaagccttgccttaaaacaaagtgctttcaagacatgcaaggctctggtaatcaattaccaggaagtgtaatcgattaccagaagacagggttgagaaatagcttgtgaanaagggtttgaatttgaatttttaacatgtaatcgattaccatatgtctataatcaattaccagcaacgaaact

SEQ ID NO: 186022 - DNA, 400 bp, Glycine max
  unsure (1)..(400): unsure at all n locations
gctttaaaattaaattcanatttctaaaatctgttacaaacagtttaaacttttggtaatcaattacataccttgtgtaatcgattataggcttttaaattcaaattcaaaattttcaaattgtttcagaaatcaatttagccactggtaatcaattacatcctctggtaattaattaccaaagaggaaatatcatatttttgaaaacataattgttcttaaaaaacttttttgtaaatatttcctttagccaaatctatgcagcatcaattaaggaattctttctaagatcctagctaagcacatcattcttcttgcatttttgaattcttgacttgaatcacgctcgtctttggcatcatcaaaacttcatatcatatatgcttctatangtaaaact

SEQ ID NO: 186023 - DNA, 295 bp, Glycine max
  unsure (1)..(295): unsure at all n locations
acattcaatttcgagcttttcgatatattacgggacttcaatcgacatccgagtaaaaagttattgaggttgaatttgctcagggctnctgcattccatttcgagcgtctcgatatattacgggaactcaatcgacatccgagtaaaaaagtattgctgtttgaatctgctcagagcttctgattccaattcgagcctttcgatatattacgggactcaatcagacatccgagtaaaagttattgtgtttgaaattgctcagagctcagtattccatttcagcgtctcgatgtat

SEQ ID NO: 186024 - DNA, 284 bp, Glycine max
  unsure (1)..(284): unsure at all n locations
actcggatgtctgattgagtcccgtaatatatcgagacgctcgaaattgaataccgaagcgctgagcaaattcaaacgacaataaccttttactcggatgtctgattgagtcccgtaatatatcgaaaagctcgaaatcgaatgttgaagctctgagcaaattcaaacgacaataactttntactcggatgtctgattgagtcccgtaatatatcgagacgctcgaaagtgaatgtcgaagctctgagcaaattcatacgacaataactttntactcggatgtc

SEQ ID NO: 186025 - DNA, 532 bp, Glycine max
  unsure (1)..(532): unsure at all n locations
cgcacacggttttganccccatttgngngnccccttttgatgatccgtgtatgaaacgaggcgacctgaggcatgcccgctctttannaaaccatttgctactggtgatctattacaattattggggactcgatcttcttccagagtggatatattttataaaacccggccagaaagggaaccctttgctcctcttggtgaagccatacttgaattgatgataagaaaatggacctttccaagttcccattggtatcgtgaaacaaacacagttgctgactcggtgtctaaatatgcgcatactactgcttttggtcttcatgtgctcgatggacctactcatgggtgtataaaatacttaactgatgactctactggagattatatacttcgtactggacgtgttattgactcatgaaggacatgctcctccttgagagtggaaaaagctatatgggcactatagatcgttttcaagaaataaccttgaatattcatgatatatggtggagtaatcttctcacacctgctg

SEQ ID NO: 186026 - DNA, 274 bp, Glycine max
  unsure (1)..(274): unsure at all n locations
ttataactaaatntagtgatcttacaaagatcaagaataatcattntaaatttcagatggataaaaataaaagaataatttaaaggcagaaatcaaaattacctcatttaacaaaaactaaaaccatatttaattatattatttaatattaaaacactagtcaaactttcccttgaatcaatctcaatgagcatggntggatttcttgtatcatgaattgtgctttctctcattcaataaccatcactacgtctaaacaaatacataaatcaat

SEQ ID NO: 186027 - DNA, 418 bp, Glycine max
  unsure (1)..(418): unsure at all n locations
agcttgccttacctgcaaagtctttggctaaatgttattaaaacaacaggctggcgtccaccaccatactcaatttctccacttgattcttgtgctatttgtcttatatgttgcaaggcctgcatagttaatttcacaattgtcactcactaagttttgaaaaagttaaacatatctaattcatttaacaagcaactaattaatcttacaacaattgtcaacttttgagtcaagaattctgatgattcatacagaagcctgagtacttcaagtacactctagagcttcattcaataagtcaaacaattgagggactataggtctacaatatnaaattcacaaaatgacttggatatatattacacatctaaatcaatatgcatttaacaagtactagttatttagttctcttcaattc

SEQ ID NO: 186028 - DNA, 371 bp, Glycine max
  unsure (1)..(371): unsure at all n locations
ctcagcttattcaataacgcggatttcaatattggcttcaaaaggtaacacgaagctttttttttttttttctaagatttcattatcaatctctgcaccttcagggaagcagcaatgtccatgaaagcaatgtccacgagacatggtcagagatggcggtggcaatgctgttctagcgcggtgatggaatgtcatcgttgcattgatcgacgaatcagtggctgagattggacatttttgctcgtagtgatgagcangcacgtggtgtgcgaatggacctccatggcaattgcgtcccagtccttgaagccatggcagttcacggtgcatagctaccaacaactcctccatgtgcnnccatgcttcgtatg

SEQ ID NO: 186029 - DNA, 491 bp, Glycine max
  unsure (1)..(491): unsure at all n locations
ctgtgatgcattacgtcaactttatcagctncatcatacttgctaaatatgtccttttggcttattggagatgtagagctttagcagtcctacatatgaaacttcttgaagattttccttgcgtacttctttcggcgaatgaagattgcatcatgatcttgattacccttccttccccataagaaactcgtccagccaagatctgtcatgttcaatgctataaacatttcagctttagactcctttatgagtttctcatcacttcttggacttttgactaatccaatatcttgaagatgatcatctatgctgctgtccaagccctatgatgcctgttagaccatataatgccttttcagctgtaaactaattgctctctcctttgaatcgaaccccctanggttctctacatacaatctctctgcatgtaacctttagacaggcagattacatctaatgatgactgtcaactttatgtgcagcaggcaggt

SEQ ID NO: 186030 - DNA, 429 bp, Glycine max
  unsure (1)..(429): unsure at all n locations
agcttcttaagccttcatggtcttaagcaacatatggatgatgattgaaaggagacgtcacatgcgagtataagacatgtcactctcaccaaccatggatacgactntgctctagtcaagaatgcccagtgaggtccacgaatcctctaaactacctggaaatgccctcggtcgggttatcaccactcaacatcccaagtgtctttgaatcgttcagaccgtctcctagtgtacctatattatatctcatccatcttctcttaacgaatcctcactcatacttcatgatgagaagcatcgatcctcgaacgatggtcgtgtcagtacatgtgaatagatgtaaagagtgtttccataagagaggtcatgccccaactctcaaacaatactttctactctacacatctcgtactcatcattcgtcttttc

SEQ ID NO: 186031 - DNA, 320 bp, Glycine max
  unsure (1)..(320): unsure at all n locations
tcttagtttcagatgatgcagatgggtttgtagctacctcatgcactcctctaatgactatggcatcatttctggcgctaaactgctgggagttggaagccatcttctcaattaaatntctggcttcagcaggagtcatgtctccaagggctccaccactggcagcatctatcatacttctctccatattactgagtccttcataaaaatattggagaagaagctgctccgaaatctgatggtggnggcaactgacacnatagtttttaaatctctcccagtactcatacangctctctccactgagttgtctaatacaa

SEQ ID NO: 186032 - DNA, 390 bp, Glycine max
  unsure (1)..(390): unsure at all n locations
agcttctcaaggaagccacctagtctataaatagaagcatgcgtaacacttgttgtaactntgatgaatgggagtcttgtgagacaaaactcanagttcaacttttctccctttntcttccttcagtttcgtgcttgcccctctctctttctctccctctttcttttcctccattgaagcatcctctccaagcttcttatccaagggtcatcttggtggtgaagctccttcttccatggcttattccctaggggatggcgcctcctctcacctcttctcctttgtcttccgctgcatctccatggtggaaaatcaccattaaaggacctcattgaagctcaaagatccagcctncatagaagccccacaagcaagcttncatcaactacg

SEQ ID NO: 186033 - DNA, 373 bp, Glycine max
  unsure (1)..(373): unsure at all n locations
ntctccactaagttgcctgatgcctganatgtcttttctgatggcagtggtcctagatgcanggaagaatttctccatgaacaccctcttaaggtcattccagctgaaaatggacctangagcaaggtagtatagccaatcttttgtcactccctctagagaatgaggaaaatcctttagaaagatatgatcttcctggacattanggggcttcatggtggaacanannatatggaactccttaagatgcttataaggatcttcacctgcaagaccacgaaacttgngcagcanatgtattagtccagtcttgagaacatatggaacaccctcatcangatattgaatgcacaagctttcataagtgaaatca

SEQ ID NO: 186034 - DNA, 200 bp, Glycine max
caagctgagatgttctgatatgttgccaactcttaattgagtggcgatattacgtaatgctaacatgacttacatttaatatattgccaagatctattttctatctattattggaggaatgaaggggaaaacccgacatctatatttaattaattaataatttgtccgaaaacctatttatttttaatgtatacatccta

SEQ ID NO: 186035 - DNA, 349 bp, Glycine max
  unsure (1)..(349): unsure at all n locations
ttctccggtttctattataagtncanaattattttatcgaagaaaattcatactcaagacaagaagaggacaaaagacgttgagtgttaattatattgtcttgtgaaaggcagaggaaaatgcccaaaactgaacattgcgtgataacccaatatatattacatcagcattggcagccagagaaataacatgaggaactctatcacatattcttaattgtctctatgtagggataaatcatcatataattagacaacacatccgtaacttgttcccttctcgcaatgtatgattccacttcagagaaccttccttgcaggcatagtccttaatatcttggatcatacta

SEQ ID NO: 186036 - DNA, 489 bp, Glycine max
  unsure (1)..(489): unsure at all n locations
ntaacctcatcgtctcttacagtctttagatttgggagccaatccaatccttgtgtccggactctcagccacttatgatagccggcgatgatcccattactgcttcccctaagctctctgtcctttcttcacaaccgatcacatgcctngcgaacttcttggagtacctttgcattggggtcactgaaaccccgtggtgaggacaggattataattcatacaaccccttgttcccattaagggaacatttggaaatccttcggatgaagatagaatcctgaatcttcctttcttctagcgagggaaaccaataacagacgcncntctatgctagccaagagtgggtccaaatcgtctntctttnttcgacgcacgagcggtgaccttgtagcggatagacgagcctacctttcttgagaaaacggtgcgaaaccagcacacatagagagccggtgtcaacaacaattctgcgccgctctttacatcttg

SEQ ID NO: 186037 - DNA, 132 bp, Glycine max
  unsure (1)..(132): unsure at all n locations
agcttagcctatcatattatggttataactaatcctaacaaacttttagttagttagttaaaacagaanattgaacagagagcaactaggtagaacccagtgcgtacactggcattcccccgtcaaactcat

SEQ ID NO: 186038 - DNA, 308 bp, Glycine max
  unsure (1)..(308): unsure at all n locations
atgtctgctgcaggtactcactgatatttttggtgtgtttggtaaaattagcttataagctatctgaaaagctggaaagttataagctagaagctagttaaaggagcttataagcttcccgaatgccttaccaaacacaccgcactggtnntaattttaatagagtttaattntcatgtaccgagtgtaaatatntcgagcataaatcatggtagatgtgactnttaaaataatgactataaaactcgacaangttactactatacatgactnatttgtgtgtatagatgacagtgtanaaatctttt

SEQ ID NO: 186039 - DNA, 458 bp, Glycine max
agcttcatcagatgttgcatttcaagattgcttcctcttatggaagaacaaaatgcacttctttcattgtatatctgtttaatggtcgtacaactattggcattgtgttccttcaaagttagcagaatgtttcttggcttcaccatggacttcgtcatattagcaataattgttttttcagctttagtcaattgcccagcatatggatgtccaactaatgacttcgccaattcatgattatgcactccacaaatcaacttcaccatccagccttctcctccaaccactggcttgcaacgaagcttgaagggacacccacattttctagtcccagtgtctcttctgataaattcttttttcctacacctatactcgccactcctttcacagccaattaacacaaacatagtccttcctttactacttgtgtgttgtccgaccttaaaatcaccaccaca

SEQ ID NO: 186040 - DNA, 274 bp, Glycine max
  unsure (1)..(274): unsure at all n locations
gcccccacacttgccacgtggtgcttcaagagatggatattaatgccgcctatagctggctattgggaagaccttggattcatgccctgagagtggtcccttcaacgcttcaccacatagtgatagtcgcagtgggaggacttatattgatagtgtctngcgaagaggacatgttagtgagctgaccctccttcgcaccgtatgtagaagctgtggaagaatcattggaatcggctgtccaatcctttgaggtggtgagctgcgcctcggtgga

SEQ ID NO: 186041 - DNA, 206 bp, Glycine max
  unsure (1)..(206): unsure at all n locations
tgagctttgagacccttttattgttttaacaacctantacctcacggaaaagtgacaaacacgaactgtgttcgcaccctaatacctattggaagagtgtatgtagggtattgttctagccatagttccaaaagcagtgtataattntcttcgacatggggttctgttggtttgaaccaacggttttcggttgttttgcaaacaat

SEQ ID NO: 186042 - DNA, 310 bp, Glycine max
agagaagaacacatgatcaaaatgattttatagctctttctagggcaaaattgggtggtgaggagtcaaattttgattccgcggaattttacgtgtaaattcagtttgagcaagattagattgatgttatggacttgtgtgaggtgagagattgcttcaaatttacctcattctaaatttcacttttcaaacctagaaaacccattgaattgaggggtgttggacacctatattctgtgttgctgtgctttaaagcttgaatttggtttatacatgattgatacatgatttgggacttgtatgaattgat

SEQ ID NO: 186043 - DNA, 438 bp, Glycine max
  unsure (1)..(438): unsure at all n locations
agctngagttcctatgactaagtcacaattgagcatttaccctaacttccacaagctacccacacatccaataatggcacccatgtatgcacaaaccaattctataagcaaaattcacaaatttatgcgcaaatgccattaaggcatttcaccgaacacttggtgggtgcacttttgggtataaacaggaagggaatgagggcaatgcggcttgcccaatcatttcagaacacaacctaggcctaaggccatcccctacaaccccccaattcaacgaatcaaagcatgaattttccctaaaatgtctcacgaaattggtcaactatgtacaatttagagcataaaaaggcatcaatggaaagctagagaccaaaggatagtgtacttacttgcatggagtgatcaaggacactaaaatggaagcaaaaagcacaaaat

SEQ ID NO: 186044 - DNA, 427 bp, Glycine max
  unsure (1)..(427): unsure at all n locations
gggagaagtgaagtatagagggttcattcccttaagcacttctctctctttcgaatttgcttacgaaaattgtttacgtgaagaaaatccaagccgaggcgctttcgtaacgcttccgagatgtttccgtaagcaaatccgtgaaggttttcgtgcgttcttcaccgtactatatccgttcttcgctcttcaacgggtaagttttcgaatccgagactttcaattcatttcttatttttttaagctttcatctttatttcgttcattttcgattgcttttctttcgtctataacgcgctcttactgtttatttaagccgntctctcacctaataaatgataaaatgaacttcaaccgatcatttgtgttgtaatctcatttaatcacttttaaaacgaaatctaaccgatcgttcatgctataacct

SEQ ID NO: 186045 - DNA, 433 bp, Glycine max
agcttgaatggctagtttgtggagtcctcaatgcttgctcatttcacttggcgctacagagcagggacactttccccagaagtaatgaagggcctatatttcagaacatcatcctttacccattcaaaaccggcaacggcaagggggacgagggcaacccaacactatggctacattgcacacgagggaacgccttaacgtccccgccaccactaggggaagaatcatggtgaccagaacaagttcccaaactggagaagtagtggaaggttgcaccctcccgcggaggtgagaagtgcctccaccagcacgacacaagaccgtcacactctttgaggaagcggacttgctatcgaaagccccatggcgagtctcctccgaggaggaaccgccgatggagacgacccttatagtcactatcgcccaagcatat

SEQ ID NO: 186046 - DNA, 472 bp, Glycine max
  unsure (1)..(472): unsure at all n locations
ctgcctgagaatctgactcgataatcctctatcttaagcaagttgcaaacctttgttaattccccagagttctgcatgactaacagaacaaatccatatactggttgaaaatccaacaataaaatggaactatgatcatgcaaaagttctccatagaaagccttaccattcaaaccattcactgctacatctaaattgacttctntaaaatgattttctggcgggaatcacttaataatcgaatcattatgcactccacgttaaaagaaatggatgatcaactgagtccaattgatgatttcaaaagcagaagcctncatagcacgcaatatggtgaaaaaaaaaatagaatcattcctcctttataaaataaaatcatttctccttcgcaattaaaatcataatcttaactctgtttttcctttctttcctttactaccttttggctcctttttctcgaatcatactcgct

SEQ ID NO: 186047 - DNA, 457 bp, Glycine max
agcttatgctgcaaacatctacaacagacctcctcaaccttatcagcaaaatcagccacaacagaataattaagacctctccagcaacaggtacaatcccggatggaggaatcatcccaaccttagatggtcgaatccttcacaacagcagcagcaacaacaacagacttattttcaaaatgttgttggcccaagcagaccacacgttcctccaccaatccagcagcaacaatagcaacagccctagaaacagcaaatagttgaggcccctccgcaaccttcccttgaagaacttgtgaggcaaatgactatgcaaaacatgcagtttcagcaagagaccagagcctccatttagagcttaactaatcagatgggacagttggctacacagttaaatcaacaatagtcccagaattatgatagattaccttctcaatctgtccagaatcccaaaaat

SEQ ID NO: 186048 - DNA, 449 bp, Glycine max
tatgaggagaagcataagaagaagcaagagatcaccaagctactctttaagttgctactgaaggagaaggaagaaagtcaatgaaatgaaagaagtcattgacgccgaggtagaggttgaggtcacggtcgacgatacgttggaggtggcaatagtgtacgaggttcaaatttcatcaacaatagttacgagaaatgaaatagctcaagagaatgtggaaaaggctatacaagcacaaggcatgataaatctcaaactcgatgttataaatgtcaaaagattggccactatgcttcaaaatgtagattcgccaataatagagttgaggaggagactaactatgtggagcaaaatgatgagaagtttcaaatagtgctcctagagtgtggaataatgaacgtagccaaaaaacacatggtaccttgacactagtgcaaacaaccttatgt

SEQ ID NO: 186049 - DNA, 457 bp, Glycine max
  unsure (1)..(457): unsure at all n locations
agcttcatcagatgttgcatttcaagattgcttcctcttatggaagaacaaaatgcacttctttcattgtatatctgtttaatggtcgtacaactattggcattgtgttccttcaaagttagcagaatgtttcttggcttcaccatggacttcgtcatattagcaataattgttttttcagctgtagtcaattgcccagcatatggatgtccaactaatgacttcgccaattcatgattatgcactccacaaatcaacttcaccatccagccttctcctccaaccactggcttgcaacgaagcttgaagggacacccacattttctagtcccagtgtctcttctgataaattctnttttcctacacctatactcgccactcctttcacagccaattaacacanacatagtccttcctttactacttgtgtttgtgtccgacctttaaatcaccacca

SEQ ID NO: 186050 - DNA, 483 bp, Glycine max
gactgtgctagagagaagaacaaatgatccaaatgatctttgagctatttctatggcaaaattgggtgttgaggagtcaaattttgattccgtggaattctacgtgtgaattcactttgagccagtttaaattgatgttattgacttgtgtgaagtgagagtttgcttccaatttacctcattcttaatttcactttttcaacctataaaacccattggattgaggggtgttggacacctagattctgtgttgctgtgctttaaagcttgaatttgggttatacatgaatgatacatgatttgggacttgttggaatagatttgggccagactggatgatacgaagatgtgattatctaaatcttgcccttatgcacaacttttggttgcttacttgtccaacgaagttctcatggtggcgcagatatgctttggaaccgattttttccacaaattgttcttagccagactgccttgtattct

SEQ ID NO: 186051 - DNA, 439 bp, Glycine max
  unsure (1)..(439): unsure at all n locations
agcttctacttatgtggcagggcgggcttccttcactttcttgtctcaaccgcgagctttgaccaccgctcttccttcccgcgatgcttctctttatatcttcctgagtgggcttatagcctaaaccatacttcccacgatttcctttggcatttatcaggctagttatactgccgttgtctttgcctaaacccattccgggttcgtaaccgttccccaacataactcaggccatcattactgctgcatcggacaggcaaggctgcccagagaaggagtccacggaggaaatgcttaccacctcaaaagactggaaagcggnttctaatgactcctctgcggcttccacataaggcatagaggatgggcagctcaccaagatgtcttcctcgcctgatacgatgaccagatgcccttccactacgaatttcaacttttg

SEQ ID NO: 186052 - DNA, 214 bp, Glycine max
ggaactacacgtgactatcccacttgagcaagaactaactgatgttaaggacctcagcgaagtgagagtttgcttcgaacttacctcattctatagttcactttccaaagctataaaaaccagtgaattgcggggcgttggacacctttaatctgcgatgctgcgctttaaagcctgaatttggactagacatgattgacacaagacttgggac

SEQ ID NO: 186053 - DNA, 357 bp, Glycine max
agcttctttgttagacctctatcggtcatctttccaggccgaggtcgaccgtcatttctttctatccatttcggtgaataatatttttttgccgagatgggctaatgttttcctggccgaataaatgggaaaatgccagtttcggccgaaacgaatagtcggttgagctcgcacaaaaaaacctagccgacctacattttaaatctttcatgcaaccccaaaacaagaaaacttcctgtgccgtggaaaaaaaaaaaaaacattacctgacagcgagcgttttgaaatacaaaattgcgcaacgtcggctgaaaaatatcagtcggggcttcttcacaaccgatgtacggtattgag

SEQ ID NO: 186054 - DNA, 348 bp, Glycine max
tcaccggatgacgccgatcgaacatttcctaacctacgttatgcaaatttcgttcagggattgaatcgaaaactcgttaggcgacatctgtcgtgaagtagcgaccgatatttttcagccgacattgcacaattctttttagaaaagctcgctggtcgataatggtcgttttacggcagagtaaagcttcttgtattggagttgcatacaaaagatactatgtacttccgctaggttattcgagcgagtttcaccgacatgttgattcagccagaataacattagcccacctctgcagaaatatatttgctaacccgcttcatgcgtatatgattcaacgattgaata

SEQ ID NO: 186055 - DNA, 415 bp, Glycine max
  unsure (1)..(415): unsure at all n locations
tagctgcctgagaatctgactcgataatcctctatttaagcaagttgcanatccttgttaattccccaaagttctgcatgactaacagaacaaatccatatactggttgaaaatccaacaataaaatggaactatgatcatgcaaaagttctccatagaaagccttaccattcaaaccattcactgctacatctaaattgacttctttaaaatgattttctggcgggaatcacttaataatcgaatcattatgcactccacgttaaaagaaatggatgatcaactgagtccaattgatgatttcaaaagcagaagcctccatagcacgcatatggttgaaaaaaaaaatagaatcattcctcctttaaaaaataaaatcatttctccttcgcaattaaaatcatattcttactct

SEQ ID NO: 186056 - DNA, 345 bp, Glycine max
  unsure (1)..(345): unsure at all n locations
agcttgccgccacggagtttttcgactatgctcttgtgtggtggaacaagctacaaaaggagagagcacgaaatgaagagccaatggttgatacatggacggagatgaaaaaaatcatgaggaagcggtatgtgccggctagttactcaagggacttgaaattcaagctccaaaaactaacccaaggcaacaagggggttgaggagtatttcaaggaaatggatgtgctcatgattctggcaaatattgaacaacatgaggaggtaactatggctcgatttcttaatggtttgactaatgatatccgtgatattgntgagctgcaagagtttgttgaaatggatg

SEQ ID NO: 186057 - DNA, 80 bp, Glycine max
taaactaaggattaaaacctattctgatatttacaaagataagtgggctcatacttagcccatgggctcaatatctaccc

SEQ ID NO: 186058 - DNA, 366 bp, Glycine max
  unsure (1)..(366): unsure at all n locations
gctttcttaccttctgnctcaacgtgaactgtgaccattgttcttccttcccgcgatgcttcttttcatgtccgcctgagtgggcttatagcctaaaccatacttcccacgatttccttgggtatttatcaggctagttatgccgccgttgttntttcctaaacccatcccgggttcataaccgttccccaacataactcgggccatcattaccgctgcatcggacagacaaggctgcccaaagagggagtccacggaggaaatgctgaccacctcaaaagactggagagcagtttctgacgattcttctgcggcttccacataaggcatggaggatgggcagcttaccaagatatcttcttcgct

SEQ ID NO: 186059 - DNA, 274 bp, Glycine max
tactcgttgctcttattgtgcaacatggaccgtccacaagcatactatcgacacataactttaccacttgtgcagaactacgtatgtctgaggtcctcatctgaattgatgattcgttggagcaaaagccccgttatgggtgaccacctcaagagatcgttaatggtccaacgctgttacagttcgcttctctcaaaaaccagagatcgttaatggtcaacgccttaacgtttctctcctttcacatacaatagatcgttaatggttcaacgtc

SEQ ID NO: 186060 - DNA, 362 bp, Glycine max
  unsure (1)..(362): unsure at all n locations
taagcaccgcggctgcagctagcctggagtgaccancactttattgccgcgagctatcacttcctgagggtcggagtactcatcgcccctgagctggacgcgtctctctaggtggaacgaccatcctttgatggcctggaaacactactggtgctcgacgctcctgaaacggtggctatctaactctggggcggcactggtccatcagccacggcgtccctcatatatattttcgcggaaagctttctctgagccattttctgcggggatgaactttggaaagtttgtttacaagaaaacgcttattttaaagcatatactgcatgctaatctcttccattgagaacaaactttggcacaca

SEQ ID NO: 186061 - DNA, 269 bp, Glycine max
  unsure (1)..(269): unsure at all n locations
agcttgtagggttaaagtctcacgattgtcttgtgttgatgcaacaattnttagccatgactatacaagacatcttgccaaacaaagtcaggttagccataactcgcctgtgttttttcttccatgccatatgtagcaaagtcgttgatcctaccaagtttgatgagctggaaaatgaggccgcaattatactgcgccagttagagatgtattttccctctgccttctttgacatcatgattcacttgattgtgcatctcgacagacaa

SEQ ID NO: 186062 - DNA, 113 bp, Glycine max
catacccattgctctgacacgactagatgcgaacgcaaccattatcatgtcccaactttgctgtccttacctatcaaaaacctctgctcggccaatgttcacgactgaagggc

SEQ ID NO: 186063 - DNA, 416 bp, Glycine max
agctttcttcaatcgacgatacgggtgatatgctgtcaaatttcttcggtgtctactatatgctgatttctttccatgtttcagttggatgaagctggtgtttgtctcacatacagggcatgcataatgtcctttcacactatatccacttaaattttcatatgttggaaagtcattaatagtacaaaacaccattgcgcgtaacctgaagatctactacaaatttgcatcccacacatcaactccatcttcccacaattttgtcaagtcttcaatcaacagactgagatacacatcaatatcattcctaggttgccttggacccgctatcattagacaaaacataatgtattttcgcttgatgcacaaccaaggagggagattgtaaatcatcatcataacacgccatgaactat

SEQ ID NO: 186064 - DNA, 444 bp, Glycine max
tgtagcggataaaattaaagatacccattcttgatcctacttatccacccctacccattcctctaacactcctagtaccaaacgcaacccttcccctttcccaaattcccagtccttacccatcaaacgcctttcctcagccaatgttcaggattgaagggcacatgacctttgttattactatgatgaagagtttattactggtcataaatgtgataatggaagatttttgttgctgattgaggttgatgaggatcccttaataagctttttggaggataatcacacccttacttaaatctttggagaacttgagcccattcacctctaactctctccccaagcattatttggacaaccctcaccaaaatccctcaagttccaaagtaggattgcaggtatttctattatgatccttattgatacatgcgattctcacaacat

SEQ ID NO: 186065 - DNA, 313 bp, Glycine max
  unsure (1)..(313): unsure at all n locations
gatccttaagcacctgcggctgcagcttagctntttaggaatcttctaaggaagcttctcaaggaggtgagcttanttatgagaggggtatgtgtaactaatctctagcttctcaaggaagttttctcaaagaagcttctcaaggaagttttctcaagaaagcttctaaaggaagctacctagtctataaatagaagcatgtgtaacacttattgtaactttgatgaatgagagtcttgtgaaacataacttcaaagtccacttccctccctcttttattccttcaattncgtgcccccccctctctcttttt

SEQ ID NO: 186066 - DNA, 442 bp, Glycine max
  unsure (1)..(442): unsure at all n locations
aaaggtatttttatcactacaatgcatccaattatttttttttacaatgcanaacatgaaagagatgagcttcccttgcatctatataagcaaaaagagaactttgtagagaaaaaggaaaaaggaatgagctntggggacaaggaaaaactttcctccactcaaacaacaagcccatcatagcaacatcacccanaacccaaaatcgatctcaaacagaattaanaatccaaaaaaaaatcatgaactctcatggatactctatgagaaaaacacaaatggatttgaagggaggaagaagattaagccaaacaacatcaaaggaaaaggaaaaaagtctcctttgatcaccaatattaaacctcaatcttttaggatttgactctctcttcgagaagaanaagaaaaagagagcatattacaaatgcaaatttaaaattaa

SEQ ID NO: 186067 - DNA, 384 bp, Glycine max
  unsure (1)..(384): unsure at all n locations
agcttgcttgcttgcctgaataccaattttattagtcacatgtggacccaagtcggttgttataaacgagcgataaacaattatttgttaactaaattaactttgctatcacgacaatagttttatagaatgaaattaatttcattattttttgtcgntgctctcttctatatttcttcaattaaatatttattattctataaaatatttctttatgacaaatttatatctcagtaaaggttctttatttttaaatttcttaacgagcttttagaatttaattgaaaagacgccgaaagagacattaaaaaaaaacttgattcttaactctttagttctaatgttttatatgttggaaaaggaagattaacttttcaactactc

SEQ ID NO: 186068 - DNA, 161 bp, Glycine max
  unsure (1)..(161): unsure at all n locations
ataacattaccaaancaaagaaaagaaataattatagccgccacagtgcggcgaaagctgtattagaagaagagaacacgagttacgcacagtcccggagccggcaccaccaccattgggttcagtcaactaatggcgaccacttttacttcaatccaaac

SEQ ID NO: 186069 - DNA, 478 bp, Glycine max
  unsure (1)..(478): unsure at all n locations
agtcacctgcggcatgcaagcttatcccgactatccaaattctcattaatccatcacccctagctcgttgagaaaaaaactaacaggtaactagaacaaagatcatgccatatgggaacaacacaattggaatctcacaaaatatgaaactgtgcctcaacagcctggccacacaaagggcaaaatcacttatcatcatatattgatcaaaccaaaagctatttgtcagaagacctccatgtaaaactttctagaggaagcatccatcacgagaatgggatatggttttccaaatcttcctccaagtatcactataacccccccccccccctcacgagacttattcaacaggtcaaaagtcattntttgtggtgaataccccatcaaaaaagtaattccacaaaacacaacccatccccaaagcttcttgcggcaacaaaactcctctaatctcataaacgaacctttagggaataac

SEQ ID NO: 186070 - DNA, 356 bp, Glycine max
tgctgattacatctccctgtttctcaagcaaactcttcttgatatcatcaaaattcttcatgatttacatcgaatgtgaatgtatgtatacatgattgtgatgacgccaaagaagaatctaacaacgctgcttcaaatgataagcatttgcttcaagaataattcaagattgcttcaaccaacaaagccttgtttcaagattcactaaagaccaagccttgccttagaacacagtgctttcaagacatgcaatgctctggtaatcgattaccaagaagtgtaatcgattaccagaagacagggttgagatataactgttgaaaaaggttttgaatttcaatttctacatgttatcg

SEQ ID NO: 186071 - DNA, 412 bp, Glycine max
  unsure (1)..(412): unsure at all n locations
gagctgcacgcatgcaagctactacttatgnggaggtcggtgctttcttaccttcttgnctccaacgcgaactttgaccatnggtcttccttcccgcgatgctccttttcatgtccgcctgagtgggcttataacctaaaccatacttcccacgatttccttgggtatttatcaggctagttatgccgccgttgttttttcctaaacccatcccgggttcataaccgttccccaacataactcgggccatcattaccgctgcatcggacagacaaggctgcccaaagagggagtccatggaggaaatgctgaccacctcataagactggaaagcagtttctagtgattcttctgcggctttcacataatgcatggaggatgggcagcttacaaaatattttctcgcctgaca

SEQ ID NO: 186072 - DNA, 374 bp, Glycine max
  unsure (1)..(374): unsure at all n locations
tcatccatgattntgacagcattgaatatgtccgcagtcaagataatgttgctccgctgctgccaaatagaccatgtcaacgctagccaccaacacttacaactgttgacctttacagcctcagccaccccatatatatgatgaaagaaatgatgatatgtgttatgcgggagaagacccacgcaattcacccaagacatcgattcccaccacagcggactgattttgctgcaatgaacaaacgcatgacctgtattatcctccagattactgcacaacacgcaactcgtatcatataattccacctgtcgtctgtgaaggtttgcccttgtaagtagtcgatctctaagtaacctccatgcgaaagctaatac

SEQ ID NO: 186073 - DNA, 374 bp, Glycine max
  unsure (1)..(374): unsure at all n locations
agcttgtctttctctgtcacaatgtcctctatcctgccagccaagttttttttccttcctgcaagttcttgcattgtttgaatagctcatcaccgtccaacctggttcgtaataacttggccaacacacggccaacttatagttggtggttcgatctcatagcctcaacaagagcaatgatggcactagctaccttagagcgttccactctccagatagtgcaagcagtcaccttctattggcaacttcagcctccaaggatgccactttttttaacgcctcttagtgttgctgcccattttctttaagaattgctagacttcacttaanaaagaccttggcagaatccatagcatgttggaacttgactgacc

SEQ ID NO: 186074 - DNA, 347 bp, Glycine max
agcttccaaaccggctcatgcttcaagctttggtctctatagatcttcacacagcacaatctctcaaaactctctggaacttggaccttctctctctagaaaccctagacacgcaaagctctgaatcccagtccaaactccccttctgaaatctgatttcaggcttaaataggtggccttgtttgtgctcgtgagcttagcacacttatggaccgcttagtgcacattagtgaatttcggcttagcgtgttcctttctcgcttagcaaatgaactgaagcggtgcacttagcgaacctgtacatcttatcttcttccagagtcttcctcgcgcttagcccatgagtg

SEQ ID NO: 186075 - DNA, 164 bp, Glycine max
tgaatgccttgtgcttacattttatgttttactccattaccatacgaatgtatggaaatgtgtatcgccgcctcactgccgtgaaggcggatataaagcattacaacacgagtttctctctatcccggagccgccaccaccaccattggtatctatcaactgat

SEQ ID NO: 186076 - DNA, 439 bp, Glycine max
  unsure (1)..(439): unsure at all n locations
agctntgacttccctggtctccattntcctgtgtttgttgtcttacactcctataattggtgtcatcaccattagaagattgggacctcacagtttcatattttcgtgttcctctaaattcctccttgcatcctaccacagtccttacaagttcaaattgcaacaatggataattttgcctaagatacttcaaaccatcagattgcatcacggctgcaatagacagaataatcaaataaatgatatgagaatcaagtcttatgcatcttaattaagtgagtttttcaaacaacagatgatgcagacaccaaaatgatgggaacatatattacttgccataatgggcgagttaagctagaaaattaaactaaccgcggaggttntgaacagaatacttttgacacatggacttcaattcagcagcacgataacaatcaac

SEQ ID NO: 186077 - DNA, 318 bp, Glycine max
ttcagagcgtataatttgagctgagtcttttattgaaggaacagcaattcaagttagcttcattatcccccgcgatttggaacgacaatatctgcattgtatgtaatgatctagtgtttgatgcagtcttgaagtctgctccaccattatagtgccggttctctatttggggacatgagtattgacagctacatgctgtgaacatgtgcatctagttaagactgatagtcattgctgatagtgtgcaactgaaacaacctagccatatgttctatatatatatatatcaagcatgaccactcgatttatacgtttcat

SEQ ID NO: 186078 - DNA, 448 bp, Glycine max
  unsure (1)..(448): unsure at all n locations
agctntctcaaaatccacttctcaaatgagactagctttattccctctcctagaatcatccaccatctcatttgctacaagtacactatcatgcatgtgtctcccccccaacccaccccacaattgcactctgcttatcatcaataattttttcaagcaccatctccatccttttggcaaacactttggatataattttgtaaacacacccaatcaaggatatatgccgaaactccacaagctcttgtgcgttgtctctttttggtatcaaagcaatgaaggaggaattaccacctcttggaatagcatcattctcccaaaattcatgcatcatactcaatactcctagtattaacagttcccaacatcttttaatatttattgataatctaacgaactcattaaattaaatcatcttatttaacccatctaattgtaaataataata

SEQ ID NO: 186079 - DNA, 183 bp, Glycine max
  unsure (1)..(183): unsure at all n locations
gttttaaccggatttaatatagacatacaacatcaggttttacacaaagaaatgatggtggttgcatatattaacatcaattgtgataaaaatcgatgttgatatgaagatatattactctttttataactcttattatataacatcggntatttcaataaccgatgttgaaatttatattaa

SEQ ID NO: 186080 - DNA, 351 bp, Glycine max
  unsure (1)..(351): unsure at all n locations
agcttatttcanactgcttatattcaatcttgtgtgggccatatggtatgaatggatgtttaaagaacgtaaggcaggctaaaccatacagaaatggtagcaaataagattgtgtttggttaaaaaaaagttactaaagatggaaatggaatgactacatttggtttgtgcgattttggagacagtcaagttacaaatttctctcttcccaattatagtaaaatcgattttttagccaaaagaatcaatatttaggtataaaaacgattttctacacacaaaaatcgactttcttacacaaaaaatattatttatcacctatttatcctagatcaaataacacaacatatt

SEQ ID NO: 186081 - DNA, 118 bp, Glycine max
cttcacctttggtaacgcctagttaactcccacagtcctagagtttgaagagatcctgggatgcactctgggacgaaggatacatacctctcctatggattctgcccctacttaacta

SEQ ID NO: 186082 - DNA, 399 bp, Glycine max
  unsure (1)..(399): unsure at all n locations
agctnttcgcanaacttacggtaaaatttgttacctagccatgataaaagtctccacagaggccatttcctccctcgcccaatattatgatcagccattgagatgctttacctttggggacttccagctgtcacccatggtggaagaatttgaagagatcctaggatgtcctctagggggaaggagaccatacctcttctcagggttctatccctcattagctagaatttcaaagatagtccaaatctcggcacaggaattagaccatggaaagcaagtcagaaatggggtggttggaataccaagaaaatgtttggaggcaaaagcaagaaccttggcaggtagaggcgaatgggccctgttcatagacattctcgcactattgatcttcggaggagt

SEQ ID NO: 186083 - DNA, 126 bp, Glycine max
  unsure (1)..(126): unsure at all n locations
agctngactggatatactactcttgacccattctcctagacttattatgacttatggccgtaaacctctggattgaaaacacactatatggctgactgcaaccgatgttgtttgaaaccataactg

SEQ ID NO: 186084 - DNA, 491 bp, Glycine max
  unsure (1)..(491): unsure at all n locations
gctgatcttgcatgcccnccgttcgatacgacctcgcgntattgtaaacctcgtcctatcaagccgagtttattagacgccttgacttatctcctctagttgagaccgagatagagagagctccagatctgggaaccttgatataacgcccacattcgaatggctttgacagaagctgggctgtccttagggatgaacgacacatcccgatcctcgggatggggacactactattctatgattcctaagagttacagcgtcttaacgcaagtattgtactcttatgggcgagtacgaataccggctgtaggtgtgcctatttatgatgagaacctaatgcaaattatatgggtatttaagcgatgcatcccgtcacccacataatggtctctgagatcaaggtggtatatgtcaaacctgatcgaacttgaccagacgctctaggctatgtagcaatcccaactcgggcagccgtgaagcaccctcaggcg

SEQ ID NO: 186085 - DNA, 449 bp, Glycine max
agcttagtagttacggtctttggaggtaaggttaatgttactatctggacatcattattgttattctttttctttatttggaacgcaatctgttcaagttgcggaacgcagaatccaaagcacacaagaatagccgtagggaccgtagtggaaggagttgtcgcgaaataaaggaacgttcgtaatgcgcatttacgtgaggattctctccttttttggttcttgaggctcttcttcaaaaagaaagattttcttatgcccaatggatagagacacaagtttcttgtgaagttgactttttcacaattggcaagtagccaacagttgaggaaacctgaagcacctgttcgtgtgacactctaaaatgtatatttaacgaatgaaaagtagaacaaataggtatgaactttgatgggatgatggtttggttgtgtatcccacatactata

SEQ ID NO: 186086 - DNA, 120 bp, Glycine max
agatatcatgatctgatcgcgttgctatgccggatatgtacgaacgtcataggctctagctccactctccatagggatgaatcatagcgactgaaccgccgcatggggagaccacccttt

SEQ ID NO: 186087 - DNA, 458 bp, Glycine max
  unsure (1)..(458): unsure at all n locations
tctctaagcactctgcaggctgcagctttcaggtcaactggccaaggatgtgatttctaacgctctataacagcagtagntatagctttaagtattgaattattaaagcgtctctggtgttcaaaaagaccaattcttgcatcagtatgatacttataattaagtataagaagcagtggttaacttatatagaataatcgaaaaaactctttctctctgaaccctgctggaatctgtatttgtgagttgttattcacaatttgattatgatactatgctagaattatatatagagttaaccaagtttgcttcataaaatatattatatacaatcagaaattttggctgatgcatgattattcgcctaattatattatttatgtaactatgttttctctttatgtttgttacaacattacctaattgattttatacttttcttttttatggttcatata

SEQ ID NO: 186088 - DNA, 161 bp, Glycine max
aaactccatatacataaatcgaaatgcgagacgtgtcattaaatattcatttccttgtatatacaaagagtcattgagtatattgcccaccagttaccgggggggaactatgctctaatatcaaaaacgactttataaataaaaaatttatctacaaactg

SEQ ID NO: 186089 - DNA, 473 bp, Glycine max
  unsure (1)..(473): unsure at all n locations
tcctagttagtacctcaataaactnttgttctcataaagagtcaatcatcaatgaaaaaattaaattaaagatcattctaaacctaatagttcttatatggatgatcaattcactataaagtataacaagcctgtttttataaggttcagaaattttatattaaactcaaaataatccttgtaagccgaaaggaaaaagctataaataatcctgatgttaaggaatactatcataataacagacagtgagtttatttttgcaaattattatcaagtcctgtgacttgcagcacattagaaggctagcaacagctagacttacttgcatattgcctataagcaatgcaaaaagcaccaatccaagaactgcaatgatcacagcaaaattgatctcttgcaacacgtgtgccagtaagagattctgtcccacagagctgcaaatttggcatattattggttagaatatcacaaac

SEQ ID NO: 186090 - DNA, 100 bp, Glycine max
agtttgagcgcagcgcggcctgcacatggttgtcttgtggggcaaagagtcaatcacactttcgttagcctctgttgattatatacttgaccgtacttac

SEQ ID NO: 186091 - DNA, 373 bp, Glycine max
  unsure (1)..(373): unsure at all n locations
tgcggcatgcaagcttccatggagctacatttcattgtaatacaagccacttgaccaaaagcttacctgtttattaacgatgatatcatttgcacccatctttgagctgaattataattgtcaaattgaaccctaagctctgaaattattatctccattttctagactcatcttctccttgaagaggcatctcctctctctcttccttctccattccgctaccattcatcttccaagaagaaaaggaatccattgatgaagaagatcctaggcctacaagctccaatggagcttacatcaccattgtatatacaagccacttgaccaaaagctcacctatntattaacgatgatatcatatgcacccatcttt

SEQ ID NO: 186092 - DNA, 487 bp, Glycine max
  unsure (1)..(487): unsure at all n locations
cacgtcttttanacgatcgtttctttcgaaatacgaatatgatgagtacaataagattttaactcaactagcagagagagagagagagagatatcaggatcagttcctcttgatataaagtatatatacgaatgtcattgactntagtaaaactatgtatagggatttacaacagcacatgagcagcagcagggggagacgactattttattaatcctaaaagttaaagtgaattaaggaaatttttgtataattttggtagattaagtttaccaactntaggtgtgatttatttatgatgagaacataatgtaaattattagtgtctattaacagaaaacataaaaatcacccaattaaattatttcaggtgaacaaatcttcatatatagttaagaacttatccgaacttcaactaanatgcatcgcaggtttaggtaagtatattcacaatctgtcctaatcttgctataagcaacacctacag

SEQ ID NO: 186093 - DNA, 418 bp, Glycine max
ctgcagctagcagatataatttttagatggaatatactttaacataatttatgcaggtatccatcacaatccagaagaacattgatgcttctattaaagatctagaagttcaagttggacaactgtaaaaatagctatctgaacatggaagtggatctttctcagcaaccacacaggtcaaccaatatgaacattgtaatttaattacaacaaggtgggggactgtggttggtttgaaggataataatgagaaaaagaataaagaatgagttgaaaaggaaaacgagaaaaatgatgatgtggtgactagtgaaaaagtggtaagtgaagaagacagaagacatctatgaacaaccactaataaaagtgatctatagtaaatcatccaccattgagcatctttcttatccacatgctc

SEQ ID NO: 186094 - DNA, 410 bp, Glycine max
gttttttaattaataaagggggtttctttcgcatatactgaaaaagacatggataaacgcttataaatactatgacctatatcttacgattatcttctattaagcctagggatggggaacctataacactttctacaactgctataaaagattataaagggggccactttcctaccgaggttgtaaatataaatcatagtaaccccttaaacttctcctgagcttataatataagacactatggttctacaacaaaccactttaatcatctatgattttttggagatggttcaactagcatgggatatattaggaacatgatttgatctttcatactatatgtacaacgacgtctcaccgtgattgagatattacgcaatgtgaatattctcaacagaacaaacaatgct

SEQ ID NO: 186095 - DNA, 470 bp, Glycine max
  unsure (1)..(470): unsure at all n locations
atggacagtgatgcctcgtttcccagcacctcttagccacctgccgctgcancttncctccctgtcttttcccctttttttttnnctacacccccatnctcggcgtaatcgacactcccagaaagagaccttcctggttcttnttttcgttcttctcctaactcctccttgcatactaccacattcttttcctgtccatattggatcgttcncaaggttggggcaagactctcgggtccttctcttttcttcccggctgctatagacatattattccctagaaagagggaagaattaagttttattctgtttatgctagtaagtttctaaacaacaaactatgcccactcctaaagtctatcaacaattatttttagctataacggtcgctctctcataaaagtcacctctcccgggaagaactcacaaaatctctcacgttggttcctccggtgaacaaaaaaataacg

SEQ ID NO: 186096 - DNA, 147 bp, Glycine max
  unsure (1)..(147): unsure at all n locations
ggaccttcaaactaagctaaggtaccttcaagccgaaatatgcgcctgctctcattaacggccgatcagcactgaanagactcacttttataccacgcgattcctactgacaattctatccatgatcaaaacgatataaagcttgac

SEQ ID NO: 186097 - DNA, 424 bp, Glycine max
  unsure (1)..(424): unsure at all n locations
agctntagcacgagtattcatgtttcatctatgccttttgagtatgtgcattcaaatttatggggatcatctagagtgaaaactcatggtggaagctcatactttctcactatcatagatgatttctcaagaagagtatggttgtatgttttgaaaaataagtcaaaagtttttcaaaaattcagagaatggcatactctagttggaaatcaacttggtacaaaattaaaagttttaagaactgacaatggcctagagtttttttcagagcagttcaatgagttttacaggaaaataggcatcaaaaggcataaaatagtccctcacactccacaacagaatggcttggcagaaagaatgaatatgaccattntggaaagagtgaggtgcatgcttctaagtgtacgactgccaaagacctttt

SEQ ID NO: 186098 - DNA, 294 bp, Glycine max
  unsure (1)..(294): unsure at all n locations
aatttcatatgctggatagtcattgatggtacaaaaaaccattgcacgcaacctaaaggtctctcgcagattcccatcccacatatctaccctgtgttcccaattttttgtcaagtcttctatcaacagagtcaagtagacgtcaatatcattccctggatgtcttagatccgctatcatcatgcacagcattatgtacttttgcttcatgcacaacgaangaggaaggttgtaaatcattatcaaaacaggccatgaactgtgattgctgcttaagttaccaaatggattcat

SEQ ID NO: 186099 - DNA, 374 bp, Glycine max
agcttatcattcaagaatttctgaaatctttttgtgttattcacattccacccaaagattatgtttactcattttgaggtctccataatctttgtgggcttgtgaactttctctccatagatcatatctttattctttctgataattgaagatcattcagctccctcacatccttttgaagatcttttatgtttttttccaactcctgaaagctattacagaagagtggattttatgtttgtgcttcgactcattcttaagacaaagcttggactctttttccttgagagttacacaagctccacatgtctgagtatactcattcagtgaaacatctacttgatcttgaggattcttcaagtgtaaatgatctt

SEQ ID NO: 186100 - DNA, 131 bp, Glycine max
attagcatgccgacgaggattactcatatatgttaatagggcgctttttatcataaggtagttctaggtagatatgataaataaaatttaattcgtgtgttatagttttatacactacatttattcttaga

SEQ ID NO: 186101 - DNA, 375 bp, Glycine max
agcttgaaagaaaattattaattaatgtattttaagttagaaattaagtggggataattaaggttgattaatggagatctacattccatagaattagaaaatgggtaattaagtcattagagtttaaagtgaaagaatcttcataaataactatataactagtttaaaaatagaattgtagtttaactagttggtagctaattaaagtgtctaattatatgatgtaaaattattaaaataagttagagttgtaacatcctgaaaaattacaactcatactaatagaggaaactctgtgttgtgtcatctgtgcatgtgtgaatttaatttcaatagttatatggttttaatcatagaatttcatgttatatatat

SEQ ID NO: 186102 - DNA, 150 bp, Glycine max
tagcacaataggtagcatcttttcagtagcattgtgtttgaagctgtatgcgatgagttacgtgttccaagacatagttcttaaatgtgaacacataacatctaccatatgctgacgaggatggcgaaacaactgagaaaactgcgtggc

SEQ ID NO: 186103 - DNA, 449 bp, Glycine max
  unsure (1)..(449): unsure at all n locations
agcttaatggaagagaattgcataatgagtgtgctagcaagcgacttctcagaggttgtaaactgttcatcaatggctttcaatagatctctgaccttatcatgctggtcaactgaaccccagatactagcggatatgttggtttttatgaacataacgaagagacgattagatctctcccacttttcataaaggtcaacaacatcaggtttactagtttcagtaatagccggtggctcatccttcctaatagcatagtcaatatccatccaacccaaatgaaggagaattctttccttccaaaccttataattatcacctttcaatatgggaaggtcacaagaaatattcatagattgtgaaactgcaaacaaacgcacatgctcattaagaanaattgagactaaacaaatgtcatgtttgccaatgcaaatcatgtctcaatatat

SEQ ID NO: 186104 - DNA, 357 bp, Glycine max
gctctagcttctcaaggagagtttttaaagaagcttctcaaggaagttttctcaagaaagcttctcaaggaagctacctagtctataaatagaagcatgtgttacacttgttgtaactctgatgaatgagagtcttgtgagacacaactcaaagttcaacttctctcccactgttccttcttcaattatgtgctccccctctctctttctctccctcttttcgtccattgaatcatcctctccaagcttcttatccaaggcacattcttggtggcgaagctccttcttcatggcttattccctagtggatggcgcctcctttctcctcttctcctctttcttccgctgcatctccat

SEQ ID NO: 186105 - DNA, 363 bp, Glycine max
agctgcttgctgggtgaatcaaagggtggtttcattgcttttaatatacacttcacacaacctgctgcatggaatgatgctgatcttattgcacctttgtgcaaggcgtatcgtcttgtatttaaactgactacaatatttttattgcttaatctatatgtgggtacactatacgggttttcttgaatccttcgcggaggatatgagtccacattggatggtgaatcatatactaattggtgtagcaaacgttcttcctaagactaagttcctttcctaataggatgaggttaaagatagtttatttagagatgtgaactatataaatctgttgagtgtataacatattgcttgtattatctt

SEQ ID NO: 186106 - DNA, 296 bp, Glycine max
aatttgatcatcctactaagacgactgagacaactggggcaaataaagagggtgagaaagagggagaaacccatgttgtgactgccattcctgtaccgaccaaattcccaccaacccaacaatatctttactcagacaataacaaactttcttcttacccaccacccagttattcacaaaggccattcctaaatctaccacaaagtctgtctaccgcactttcaatgacgaacaccacctttagcacaaaccacaaacaccaacctagaaagtgaattatgcagcgagaaagcttg

SEQ ID NO: 186107 - DNA, 440 bp, Glycine max
  unsure (1)..(440): unsure at all n locations
agctngcctcanagagatccaagaaggatatttcagctgaaggaaccagttccgctcctgaatatgacagccatcgttttaggagtgctgagcaccagcagcgcttcgaggccattaagggatggtcatttctccgggagcgacgcgtccagatcagggacgacgagtataccgacttccaggaggagatagttcgccggcggtgggcatcgctggttacccccatggccaagttcgacccagacatagtccttgagttttatgccaatgcttggcctacagtggagggtgtatgagatatgcgatcctgggtgagggggttagtggatcccattcgatgcggatgctctcagccagttcttgggatatcctttagtgctggaggagggccaggagtgcaagtatggccaaaggaggaaccgggccgatgggtttgatga

SEQ ID NO: 186108 - DNA, 428 bp, Glycine max
  unsure (1)..(428): unsure at all n locations
catgggaccaactcattntatttcttataggaagtcgtatctagtcaaggtcttagagaccatacaagtttcctaacgatttctaattatgtggaccattaagtctatcatatgctgacaatagccgagaagcccatgaatctcttcgggggcagagtaggtgtctgccatcgccttggccttggctaacaatcggngaagttcttgactcccgttcaaggtaagagcaaaccgatccatccacatggttgcctcttggtgtaaagagtcgatcacccttcctctagcctctttttccgcgtatacttgggcatattcgtccgcaatcctatgctcgtgggccgcggctagacctaactcttcttggtacttggcaatgatagctagcatgttggtctccgtctcgcataaacgctgagacaagcttc

SEQ ID NO: 186109 - DNA, 318 bp, Glycine max
agcttgtgcaaatcaaatcactcccacatcttatctctagcatgcattctttctttctttacccactcctcacgtttggttttttagggaaaaacaccataactaaacgcgccacaaggcatccctatcgcaccagatccaaatctagaacgatgggtgatcaagaggagacacaagaacagatgaaagccgacatgtcggctttgaaagaacagatgacttccatgatggaggccatgttaggaatgaggcagctcatggagaaaaatgtggccaccgttgccgttgtcagttcggttgccgaagcaaacccaattt

SEQ ID NO: 186110 - DNA, 477 bp, Glycine max
  unsure (1)..(477): unsure at all n locations
tattcaagtcatggntgtcanaatcatgatctgtcttattttatcatttgattntaacatcaagcaccccttgacaatctgaatcttgagttgaatcgctggagagtaggatcacagagggattgcttttgtccatgtttaatcatgggatcatttatcctggtgaggcagaagacggacaaaatcacaaggttggggtcatatgatccagtttgggcaaaacccctttttctccttcaaacaatttcctttccatatgtgactatgtgacttctctaacctaatctccatcaattgttttttgaattgtgtgccattggacctctttcacaactgttgaagctttaccttgtgccactattgctactgcgggttgtgagtagttntggcactgtcaattgcacctccattacctaacatgtttctttgtgggtctctcttactcagtcactctcatataatactcggattatctga

SEQ ID NO: 186111 - DNA, 421 bp, Glycine max
ttaagcaccgcggctgcagcttgaacattggtaacctttcatctaatcttcttatggagttaaaatctcccaaaatgcaccacagccatgcatccattgaatgtctcagctgttttactgttttttttgaactgcaaagataatttatatcaaagtaggaaaagtaacagaggtactacaagatacataggataataaaatcctgtaagaacagaaaaaacaacccaacaacaagccacaaccctgccctacaagaaaaacattaactaaaaactagaggcattgctgaggaccaacaatgaaaaggaacattgaagtccctttcccaccctttcatccaagtccacataaggaaaagagtactatctgccagcttagagatatcaaaagactgattatgaaatatcatttcatttctgag

SEQ ID NO: 186112 - DNA, 362 bp, Glycine max
  unsure (1)..(362): unsure at all n locations
catatgctggaaagtcattaatggtacaaaaaagcattgcacacatttgaaaagtctcattctgaaacccatcaaacactaaaaccccctcgtcccaaaactttctcaagtcttcaatcaacggacttagataaacatcaatgtcatttcctgattgtcttgggcccaatatcatcatagacaacatcatgtanttttgcttcatgcacaaccaaggaggcaaattggtaattactagcaaaactggccatgaactgtgttgagtgcttaaactgtcatatggattcattccatcactagctagtccaagcctaagatttcttgcctcttagccgaaatccggatacanactatcaatcttc

SEQ ID NO: 186113 - DNA, 416 bp, Glycine max
agcttacttgagacactttcttgagaagctttcttgagacacttccttgagaagcttgcttgagaaaattcctagagaagctagagcttagctacacacacctctctaatagctaagcgcacctccttaagatgagaagctagagcttagctacacaccccctataatagctaagctcaccccatgacgaaatacatgaaaatacaaaaaaagtccctactacaaggactactcaaaatgccctgaaatacaaggctaaaaccctatactactagaatggccaaaatacaaggcccaaaagaaggaaaaaactatttaaatatttacaaagaagagtggatccaaccttggcccatgggctcagaaatctaccctgaggatcatgagaaccctatggccttctttagtagctctag

SEQ ID NO: 186114 - DNA, 65 bp, Glycine max
agagggcgacaaatagggactaacccatgttgtgactgacactcgtgtaccgcccattgtcccac

SEQ ID NO: 186115 - DNA, 432 bp, Glycine max
  unsure (1)..(432): unsure at all n locations
agcttataataacaaaattgtcttaatcatttactaatatgcatgcgaaatacgactcatcaacaagaatcaagccaaggctattgtgcatgcaatcaatggggcaaaacacaccaaatgattataatgatggatggctcaaattctcacaaagggtaaatcatgactttcaaattgagctttcaaaactatcatgacatgtagagaagaatcatggatttcaagtcacaaaaggtcaagaactattattttcaaaacaattacccatttcttgaacatatcctataattcacagaaaaacatgctgagtcgtacgtgcacacaaaattgacccaaaatattaaactgaagatccgacgaaactaacaacattgacaaatntgcacaactaacaaagtaacaaaaccgacaaaactatctaaactcaagaac

SEQ ID NO: 186116 - DNA, 451 bp, Glycine max
  unsure (1)..(451): unsure at all n locations
gatatactgtgcgtgtagtcgaattaagtagccacatttacagaaatatctatggacccatagctgagtagattagcgccgcgttacaattcgggtagggacangaatcgcgaaatccttaatatccacttggaatactactaatttaatcaaattatgagtatttctatatctcatcccataaagttttaaacctagtcttttggatggtatccacctctgcttaggagtaagttaaataaagacaattgaatttatatttagttaattagtcccaccccgggaaaaaaatatgaggtgccaaaaaacttccaacccagtgataattagtgaaatttactagaaatattcttaccatattcagaatctatgatcccatcgttaataagctcggggatcgtgtacatccacgtaaaaagacgtgatgatgcaggacacaanacagcttctt

SEQ ID NO: 186117 - DNA, 355 bp, Glycine max
caatctaggccaggcattagagaccatgcaagattactaacgaaatctaatgatgagcgacgcattaagcgttatgtgctgaccatagccaagaatcccatgagtcattctggtgacgcagaaaatgtgcgccatcacctggatcgtgcttacaatcggggaaggtcttgactcccgttcagtgtaagagcaaaccgattcatccacgtggctgcctcacgttgtaagcagaatatcacccaaccgctagccgcattgtgcgcctgtgcacgggcataaccaatcgcgaagctatgctcgtgggccgtggctacaccgaacgttccttgttacttggcaatgatagctagcatgt

SEQ ID NO: 186118 - DNA, 322 bp, Glycine max
agcttcttctatatatagcctatatcttcaagtgtttgttgtctctcaacgaatggattcttcactctagttctttgtttgatgaattatggatgttggggaatttaatgcttgcattaaacacacgtcccttgttcatgttgataggttagcatgacaaacacttgaatagaaagtcacttcttccatcagtgaatgtttgaacaacagagcgtgctctttgatgaagataatcactttcagaccgtggactttatttattcttcataggactctgatggatcctacgagaatgttttctacaaaatataatctgggacat

SEQ ID NO: 186119 - DNA, 458 bp, Glycine max
catctaatcattccagtccactcaattcatacatttgctcattcaagtcattcacaaacactcatttcatatcaaacaaaccacagaaacatgattcaatcatttcattgttcaaacaagctttttgtacaggcaatcaacactaaaataactagaatttaaatgactaaaatttaaagcaaatacataactaataactaaattgctcaaaattttcagaagtttaaacaaaaaaaaaattaaacatgctactcattctatggctaatcttcatttaaatttagcactggagaagctggtacatcctgaagaatgggctgctctggctccatggctggtgctgatggctgggaatcctcatgaatgggtgctgaagagatatgaactggagaagtaggctcctgagttgttgcttactgctgagcaactggatcagtctcatagataaatggcttatg

SEQ ID NO: 186120 - DNA, 440 bp, Glycine max
agcttattggttcatgacctttcctcattacataagtatatttagcagcgctatctaatggtgaatttatttaaaatctgtgccactgatatgcctttgatctgaggacttgatactgatcaacagattaaaaaaaatctttataatttcctgatcatttgtccaaggttattactgaataaagtggattattagatcaagtattattctgatcttacacttgagcatttcataattaactttgtctataggttactggaagggctctgcaggaatcagtacgaatagtgactaagttttctgagatggaggagacatattcttctcttgggtctcttgggtaatctataggttaagctttttgaaatatattctcctttagactcggtattttctcttctttgtgcatctgaatactacactatatttgacataatata

SEQ ID NO: 186121 - DNA, 561 bp, Glycine max
  unsure (1)..(561): unsure at all n locations
ccatatctctaatacttcttttacttttnnnnncnnnnaanccaccgtatgctcatgacncnctgaacatagaaacctagcttactatagagactgagctgtccatcgcttttttatttatatgtaagggtcccagcactagccatttatgactcaaccacctgatgggctccctacctctttgttgccgagcgcgacacaaagattcttcacttctagtgctagcgctaataaccaaagggcttgcttgatatttgcctgctccacataatcgaaccaaaaacagccatatactagaattcataactagccagagaattcatcttaaaaccgatctgggaatacgacgcacaataatgaaaacttgcattgacacagataatatctatgctcttagattgaagtttcaactgctatgccacatggcaccaacgacgaacatgacaacccagattgcatatggcctaaccttcttagaatttcacagccactatagaaggtcagntcacaaaacgtgttaaatccaagtaaagatgttggcacattataactctcgactgg

SEQ ID NO: 186122 - DNA, 308 bp, Glycine max
gctgcctgcatgcatgcttactaagaccaacgatgttattattatgtatatagaacccccgacatgactggatgtccagagtctgagaagtgataatgagcatacacgtcattgtggagcaacactccaaatgacacaagtcgatgagggctctctataactttcacagactgagcatgacacttatattgcgctccgaatcaaaatttgaccccctaacacccaatttacgatatcaatggctcttgtggtgacaacggtcacttattaacatatattgcttcaccgaaccgttcctgtatttcaaa

SEQ ID NO: 186123 - DNA, 481 bp, Glycine max
  unsure (1)..(481): unsure at all n locations
ctgttcctcaatgcgngccttgcgatacgagccttgtagcaactcaggctggcattgagttcctcaccgcgcttgtatatactaagtatgcttatcacggagggaatgaaaataggactcttgacgcccgattgtggagtaatggtgtggaagcagcattcccttttgctgacacattgggagaacggtttatctcaatgacatagattctttatctaaattcatttgctgcccccacttttatgaacgtgcttgtatgcgtatacctagcataggcgtctcttaatatgtggaagttatcttgtacgatcagcttctctttatgaacatggacaattgtatgacacaatctctagctttcacctcacaccacacctgagatctttattctgtcttgaggataagatactcagatgctcctgtattgtgatcaggtgcatattgagtaatattaccatatcttctttgcactctaatttgg

SEQ ID NO: 186124 - DNA, 292 bp, Glycine max
  unsure (1)..(292): unsure at all n locations
agcttgaatcggaccttagtgtgaaaagttttgaccanttcnntttcgcgtgtgctttcgttgttcaatggcgagcaccncgacacgagatgcgctctaatcggacatccgtgtgaaaagcnatgaccacncgagagtctcgagagcttccgtggttcaatttcnagcatctggtcatattatgtgcccgaatctgaccttcgngngaaaaaggatgaccatttgaatttctcgagagcctccgatgtttaatttcgagcgcctcaatatattgtaggcccgcctcggagct

SEQ ID NO: 186125 - DNA, 415 bp, Glycine max
tctatagaaggttcgttcctaatttctctacaattgcatcacctctcaatgagctagtgaagaagaatgtggcatttaactggggtgaaaaaccagagcacgcctttgctttgcttaaagaaaagcttactaaggcacctgttctagctctgtctaacttttctaaaacttttgagctagaatgtgatgcctctggagtgggagtcggagctgttttgctgccaggagggcaccctattgcttattttagtgaaaaacttcatggtgcgacccttaactacaccacctatgataaagagctttatgccttaataagagcactccgaacttgggaacattaccttgtttccaatgaaatggtcattcatagtgatcaacaatcacttaagttcattagacggcccatcaagttaaa

SEQ ID NO: 186126 - DNA, 323 bp, Glycine max
agcttgagagctgaggactatatctcacaatgtagtcataagccacagcatactcccgccagcttgaagcactccgccaattggaggatttgctcactccaccataatgagagaaacactatcactcagtttccctccctaagctagtttggttgaaaccttgagagatagggatgactattgtgtagacactgttgataggagctgaataccatgtgattatagagagaactggctctaaagaagcaatgaaatatgtgtgaacttgcattaaataactctcctggtgaatcacaatatgagtcgagccacacctaagagta

SEQ ID NO: 186127 - DNA, 449 bp, Glycine max
agcttgtgcgaatgtaagagacatcttcttctaccttggtaatccttgaatccatctcatcaaatctcatgtccacttgtaactccaaagcatcaaacctttcaccaacaaaggtttgaagaccatcgaacctgtccaaaatcttttgaagaagagaggaatcttctccaccttgtaaatgtccttctccatcattgggttgagcaccctttttcacccaagagccatcatgctcttttcggtaaccaaaggatgcaatcacagcgacaccaattaagaaggatctcttgattggaacataaggttcagaatcaagagggatgttaaagtgttgaaggaagagagtgactaagtgtggatatggtaatggagcatttaatcgcaatgccttatgcatgcgatatcagactaagtgtgcccaatcaatttgtcggtctgtgtgaaaagcc

SEQ ID NO: 186128 - DNA, 315 bp, Glycine max
atgctcttccgtgcgagccctcgtggattcttgatcaagggcttgtgcatcaacttcattatcttctcgtaaccggacacactattttcggacatctatagcgaccaacttgaatttttctttagcaagtcttgcttttcctagatcgggtttagaagccggacttcttcatcttcttatggagccttggaactatatgcgctgataatctctaactaggcgagccaatctaaaccccgcgtcaaactatcatccattcatgataaccaccaatgatgccattacgaatgcccctaaacactttatctttcctta

SEQ ID NO: 186129 - DNA, 352 bp, Glycine max
  unsure (1)..(352): unsure at all n locations
cttaaccaccgttgctgcagcttacatggagctacgtcatgtggtattattagcatcttcgtttaagtgacgttcttttgcttcctctatcattttgtttggtcaattcactctaattccttgctcttcatcttattctccatgtatatcctccattttcttgtggcttggtaatgtttagagtacattcaacaaaataaactgattaaatcttagatctactcttgaattttgatttttgttgatagaattctagatacatncgagcatgtattcttgtcattcttagaatatcttttgaattttgagagcaactcatgcctgctatttaggacataacatgttctcaatc

SEQ ID NO: 186130 - DNA, 456 bp, Glycine max
  unsure (1)..(456): unsure at all n locations
tgcgtggtccaccatcttttatagtacaatttctataatgtgtctaccatcacgattatcatctgcttttccatcattgagggtaccacttgggctgccagatccctccacctttgggtgtattctttgaaggattcatgctcctttntgcacatgttctatagttgcatcctatccgaagtcattatactgacatcgcctaacagaagcaaccattaggtccttccaagaatggactctggaaggttccaagctagtgtaccaagtaacagctaccccagtaagactttcttggaaagaatgtgttagcaattcctcatcttttgcgtatgcccccatcttccgataatacgtctttagatggttcttgcggaaagtagtccccttgtacttgtcaaagtccaacaccttgaacttgggaggagtgatgatattatgtactangaacaactctcc

SEQ ID NO: 186131 - DNA, 442 bp, Glycine max
  unsure (1)..(442): unsure at all n locations
agcttgtgcaaatcaagtcactcccgcattttatctctagcatgcattgtatgttggtctcgtcctttggcacgggaagccggaaggtccatatcaccttcttaattgtacacatggggcactgcgcccccaaatgcacaagtaagaagagataattttccgggctctcgtgtccgtaaaatgcattcatatcatgcatcgcataagcatctcttcataacatcataatggacatatcctgcatttgtccgttatcatattccagcctcacattttgcatgagtcatggcatcatcatgcatatgcgttcaacaaactttttgatctgcaaaattgcataccatttgttttcatgtttgctcatccttgcgttntcctctacaaaacaaaaacaaagaagggggaagcgtgaaacttcacactacattcttagtttcatgtg

SEQ ID NO: 186132 - DNA, 498 bp, Glycine max
  unsure (1)..(498): unsure at all n locations
ggaccttaaaactcagcttctcaggaagttctctcaagaaagcttctcaaggaagctacctatgtctataaatagaagcatgtgtaacacttgttgtaactntgatgaatgagagtcttgtgagacacaactcaaagttcaaattctctccctttttcttccttcaatttcgtgctcccccctctctctttctctccctctttcttttcctccattgaagcatcctctccaagcttcttatccaagggtcatcttggtggtgaagctccttcttccatggcttattccttaatggatggcgcctcctctcacctcttctcctttgtcttccgctgcatctncatggtggaaaatcaccattaaaggacctcattgaagctcaaagatccagcctncatagaagctccacaagaaagcttccatcaagtggtaatcagagcacaagagcttaagtaggtgctccttanacctccattattnttntctttaccttctctt

SEQ ID NO: 186133 - DNA, 421 bp, Glycine max
  unsure (1)..(421): unsure at all n locations
agctngcctcanagagatctaggaaggatatttcggctgaatgaaccagttagccaccgttttaggagcgctgagcaccagcagcgcttcgaggccatcaagggatggtcatttctccaggagcgacgcgtccagctcagggatgatgagtataccgacttccaggaggagatagttcgccggcagtgggcatcacaagttaaccccatggcaaagttcgacccagacatagtcctcgaattttatgctaatgcttggcctacagaggagggcgtgcaagatatgcgatcctgggtgaggggtcagtggatcccgttcgatgcggatgctctcagccagttcctgggataccctntagtgctggaagagggccaggaatgcgagtatggccagaggaggaaccggtccgatgggtttgatg

SEQ ID NO: 186134 - DNA, 456 bp, Glycine max
  unsure (1)..(456): unsure at all n locations
acaacattcatacagcacaagctatcacagccaagcaaaacagagcanaggcagaaaactctgctcaacacatcaaccaaaatcacaggttntctcacttaaagaccacagtaaaaattccttcgatccaattcgttaaccgttggatcgactccaaaattttactggaagtctatagtgcataagcctacattntgaccgttgggatctactagcaaacattgagaactcattctgcactagactttccacagccaaccacacacaagcattnttctgcacttgtgcaaaattctgctgcacaatttcacagcaaaaattctgcataagtgcagatttcgaaaatcacacttcctctcatccaatcttgcccaaatcaattcctacaagtcccaaatcatgtatcaatcatgtctaaaccaaattcaagctttaaagcacagcaacacagaatct

SEQ ID NO: 186135 - DNA, 516 bp, Glycine max
  unsure (1)..(516): unsure at all n locations
gtgatcgtcatgcaggccttaaatctaagctgagctactgttgtggccacatgctggaagaatttgtcatgaccatgcattttcctgcgagcactcgtggtattttgttcaagggcgtttgcaacaactgcattatcgtgtaagtacccgacacactcttttcagacatctatagcgaccaacttgaatttttctctagcaaagtatcgctttatgctaacgtcggatctcagagcccggactttttcatcttcttatggagcatggaaactgactgcggtggatatctttaactaggcgagccaatctaaaacaccgcgtacgaacgtatcagccattcttgataaccaccaatgatgccattacgaatgcccctaaactctttatcattcgttaatgggctgcccacgccgtatggactctttgataaccttgaaattttgcgcgccaaaatctatcacatggaaaagagacaggctttctttcgtcagtgctcccctcatagggaccctaacn

SEQ ID NO: 186136 - DNA, 384 bp, Glycine max
agctagaagaagagcttgattaatctttgttgtttacaagcgcaactaacttgagtggaatttgtattgattgttgtattatgcgctgcatcttagcctttgtcgtttcatatatgtatcatgcatgatcatgtaagagtaagaagaaagtttctgaagctacaaaatttcttctaatgtcaaaactttctattttaatctattacagccttactataatcgatacacaagttggtttaagctggcagagaagtgtctcgtataagtctaatcgattacaagcttgtagaaattgattacttattttttttttgagacaatgattgatttatacatgaatctctgctttaatcgatcaccatgtgatataattgattacttctc

SEQ ID NO: 186137 - DNA, 137 bp, Glycine max
  unsure (1)..(137): unsure at all n locations
tctagtcgcagggccacgccttatccatgctgtnatcttacgccgacactcgtcagtatattacaaccaactaaggccaacgaactccttccgctactacctatgtgtgagtctgaccttataatgagtgccacaaa

SEQ ID NO: 186138 - DNA, 271 bp, Glycine max
agcatcgcgctataaggtaagctaaaggcttgttagaggtccaatacaagcttgactgaacagtcgatctatatacaatagaatatgttgataatcatcgaccaatataaagagaaagtgaacctatctactagtcatgagcatatgctggaagatgaacacgccaatgtatcggctctgcagattgaaacggaagccagagaaacggtgataaatgtcgtacatggtgaaaatatgaaatggatgagtacatttgctcttactttgaatg

SEQ ID NO: 186139 - DNA, 531 bp, Glycine max
  unsure (1)..(531): unsure at all n locations
acgtagtccttcgatngacagngacgctatacaatactanagcctncgcttggaacgtatcatcgagaaagctaatcaaggaatctcccttatctatatatggaaacagacgtaacacatgtatgtactatgatgaatgacagaatgtgcgacactaactcatagttcaaatattataccttattctttcctcgattatatgctccacctgtgttgttatatatactcatatttatctgcatctgagctacctgctaccacactttatccaatggacatgggtggaggtgaagctacattgatccatggatgtatatcatactggaagagcacctccatctacctctaatgcatatgaattccgatgcatatgcatggtggaaaatcaccgatcaaagacctcatcgtagctcatataaccttgcaacattgtagcatcacatgagtgcatctatcatgtggtaatcagagcatcgcagcatccatatgtgctccttaccctccattagtaccatatcaccggctcatccn

SEQ ID NO: 186140 - DNA, 437 bp, Glycine max
agcttgtattggatgccatgatgcaggtggttacataatacaaccggtgagtatccccttatgcatgacatttctttattttttttttctttttaaactgaaattaatttgttctttcttccttattcttcctattttaacttacaaggggcaactctatttacaaaggatttacagaggtaaatggagtaaacctaagcaccctcatgcagtgaattgaaaatatggaatagaaagcactgaaatttttaaaggataaaagtcttagttgaaattaaaaaattcagagatcatttctttcatacttaatgaagaatgaaaataatctatcaagtatcaactgtttcctatgcaagttattgcaaactgctcttgcctaagttgaaggcatgaatcaatatatctttgttgtaaattgctagcttagcaagttcttt

SEQ ID NO: 186141 - DNA, 427 bp, Glycine max
  unsure (1)..(427): unsure at all n locations
gcatggacactgganaagactaatttctattntcaaaattgtactaactggtttctctgtctcagggagttatgccagggaccaagggtacaggtggcttcggtttctttattntatccaccaaaatagcttgagtagttagaatgacaccagcaacagaaactgcactttgaagagcacatcttgcaacacgactaggatccgctactccagcattcaaaagatcttcatacgtgcctgtcattgcattatatccagttctccaatcatgtgttctagtcttccggacaacaatgtctccatcaactccggcattagttgcaattgattttgcaggttcaaggagtgcctgcaacgattcatgtgcaaccgcttacatatgttaaaagcactccagagtccagacaaagtcatacttcatatggaa

SEQ ID NO: 186142 - DNA, 442 bp, Glycine max
  unsure (1)..(442): unsure at all n locations
agcnttctttggaccttgaacaatcaatcatctcttctttcagaaccatgctatgtgctcgcgactggtccctttcttcccttcgcaacttgagttcactattgctaccccatagagctccgcgaaatttgttccggccatactcttccttgcgagccctcttggtctcttgttcaagggctcttgcggtaattgcattctcttcccgtaacccggcacactccttccgaacgtgtgtagcagccaacttgaacttctccttggcgagttttgcctttcctaactcgctctagagagcttggacttcttcgtcctcttccggagcttcaaaattctcttcgctgacgactattatactggcgagccaatctaatactcgtacgcgaactttcagccattcgtgtgtcccaccaatgatgccatcactaatgcctctaatctc

SEQ ID NO: 186143 - DNA, 416 bp, Glycine max
  unsure (1)..(416): unsure at all n locations
acacccacattgtctagtcccagcggctcttctgatnaatgcntgtttcttacgcctatactcgtcactcttttcacaaccaattaacacaaacgaagtccttcctctactacctatgtttgtgtctgaccttataatcactgccacaaatccggtttcatgagcaatggatcgagcccaccgcaaaacatcctctcggctgtcaaacacctacaaggcaatcaacataatttaagtttaagttatctaccagtattcattttattaactcactcacatacatgaacattataacctgagaagtattgaacgcatcgatacaatcagtcatgtgatccattcgcaccacatgcttcttgattttgataattcatatccgcttcttcagacattatactctcatacattcactgatc

SEQ ID NO: 186144 - DNA, 416 bp, Glycine max
agcttatgcagcaaatatatacaatagaccttctcaacctcagcagcaaaatcaaccacagcagagcaattatgacctttccagcaacagatacaaccctggatggaggaatcaccctaacctcagatggtccagccctcagcaacaacaacagcagcctgctccttccttccaaaatgctgctggcccaagcaaaccatacattcctccaccaatccaacaacagcaacaaccccagaaacagccaatagttgaggcccctccacaaccttccctcgaagaacttgtgaggcaaatgactatgcagaacatgcagtttcagcaagagaccagagcctccattcagagcttaaccaatcagatgggacaattggctacccaattgaatcaacaacagtcccagaattctgacaagc

SEQ ID NO: 186145 - DNA, 265 bp, Glycine max
  unsure (1)..(265): unsure at all n locations
agctntatgacctgttttgccacaaacatagtactcaccctttcttttctgaatcttgttatcacctttgttgatattagtgtgtgttttcttttgtccttttttctgaaatcgtttttcttttccttttgacctgtgttgatcagcaaactcaacaacattagcattaactgaatttacagaatgtaaaacatacttatctttaagtcggntggcctcctctgtcttcatatgatttattaattcttgaagagaagtccctctt

SEQ ID NO: 186146 - DNA, 581 bp, Glycine max
  unsure (1)..(581): unsure at all n locations
cgcccttgtctgnttctannntanttnaatttangttnaantcgnnnncannnnnnnnnnnnaacgcgtgattcttgcattgcanaacctgtcactatcgacactcgaccgtgcacgagtatcatgcaccacggaacgaantctctatattagttgatttcaataggcctcctagcgttcagcttacctatttggatgtgggatcatggcagtcatgttccacctcttcatcgtggattcaaccacaaaaaaaacttcaatatttacgcatgattaccacaaggattatggatcctatacctacacctatcgggtgaagcacaacctacagggtttgcatcaaaaccccactcataagcatttccaaggtgagcttgtgactacattaagaaattcaatatctatctcacctgataatctaagcacacatcacttatgtggtaaagtaccctattcttcaaagaggtgattgaggttgacatttcaaccagcttttctgaaatcaatgctgattatgtatggaacattccgacttcccatccattaaaatttacaactggtcaaaaatttgtcgagaaacc

SEQ ID NO: 186147 - DNA, 403 bp, Glycine max
gcttctatccaggcaattgttggcggtgaatctccttcttccttggctgataccctagtggatggtgccacccctctcctcttctccttttccttccgctgcatctccatggtgtaaaatcaccattgaaggaccccactgaagctcaaagatccagcctccatagaagccccacaagcaagctttcatcaagtggtatcagagcacaagagcttcttgtgtcgagggaaggagcccacagtatgaagaacctcgggatttgaggtcaaatcctttgcaagacggagaggatgatgcaatcctaccccccaagggtattggatagaagattgtcataccctaatcttctgcgaggattattacttgatgacatgcaaccttcggttagccgctttgagatact

SEQ ID NO: 186148 - DNA, 583 bp, Glycine max
  unsure (1)..(583): unsure at all n locations
ccgcttctttttnntttnnnntaatanaattttatancnnnntaanncnnnncnnnccggcgtgatgatccattgcanccgcgacctataganactcacgctgaaggagcattatgcacaactgtaccagccacttgagtttgttctactcctacacgacggagctgtgggcgaaactctgtggatgtgagaccaagcctaacagggccgtgctaaacgtgcctaatcctacatcaaggatctgctgaagaatcatggatgttttgcctgacgagggatcgagggattactactttaagctacgacatacaacatcagaacgcgattgtatacagaaatataatcctatgccttagcgtgcttgtgacgaagaccaaacatacctaccctactgtcgcagtngatctacactgacatctattatgtggtacataacactatagttcaaatgctgtgtgagagtatcatcattacatgatcccataccgaggcttcatgcttgaactttaatgaggctatcatgacgtgccctgtgcacgacactcagattcatccagttcaatataaatgcctgacgatcccg

SEQ ID NO: 186149 - DNA, 425 bp, Glycine max
gaatggctagacataatacatggtggcgtttggtttgtttcaaggataaaagggatgccccacattatttccatgacacaaatgcaaaaatgatgatttggaaattttatgaaaaactggtcatgcatgcacctatgcggacactcaagcgtcaaattattatggtcatgtgatgcgaagtctcaggattcatttcctctattttaaatcaacccaatgtttccaaaatatgttcttttatccatttgtgcattcatccgagtccatttcgggcgtccggggaaattttcacagcattcacccttcaggtgtgtacacattttttttttaaaaattggtatgatcatgaatttttcaaagaaaattggaagtctctctttcaaagctgttggtttatagcagacacttattttttttttcacatt

SEQ ID NO: 186150 - DNA, 432 bp, Glycine max
  unsure (1)..(432): unsure at all n locations
tacaaatgtgatncataatgcgctataggaagtcttcgttattctctgcaacttttaacagcgcaggggaatgcanatatcaaagttatccaagttacatacataatatggttcactgtgtcttgtaaatgaggtatttgaaacacgtaatgatggttaacattgtttcttaagtggatatgttaatagttaacctaaccatgtccttctgcttgagcttgattatttgagaaggaaaagaaaaatgcattaaccatatgttagaatcattggaacatttttcaagaaactattttcgacgatcattcttttgattattgcttacatagttgaaggattcatactctatcggagaatatgatttccaccatactgcaagtattagagcataatatcgaatgtcgaaagtatatgttttgatttaatataaca

SEQ ID NO: 186151 - DNA, 427 bp, Glycine max
agcttgaccagggaggagtggtcagagacgattaagacgcattataagggatgtgttgccgacagcgaatgaaggtcgtcggcgtggcggtgggtggtgccgactaaatttgatctgaaaaagaaaaaagaaagtccaggcaacgcacgagagacgaaaagagcataaaaaatacttttaataattttcatttcatttttaaaataaaaaaagcttttattttttattttttgcttccggtaaataacctattatcacaggtcattttacttcctcaccacaaaaaaaacaaaaaagatatcaagtacttgattgcttgaacggaacacgtccatggctcatgaaatgaaacaaacctaattatctaaatttcaagggttgaagtttcaacttataaacaccagctggatttagataaagatataca

SEQ ID NO: 186152 - DNA, 409 bp, Glycine max
aagccaaaggtacacatgcaaaaattaatttcagggcataaaggctacatcagagagactagaagtaacaagaagttacagtctcttctactggattttacattatctgggcagcaatttgattagttccacttccacccatcatgtttcatagctcaacagaggcatatgcagttgtcaatgtagtaaaatggtttatcaaatcatgcatcatgtttcatagctcaacagaggcatatgcagttgtctatgtagtaaaatggtttatcaaatcatgcatcatgtttcttaatttatttctcattaattgcatgtcttcctattcattgcagatatgcacaatgccaaccttctaaatggcagtaaaacgcacaaagctgggataaactacataggcctacccccatga

SEQ ID NO: 186153 - DNA, 166 bp, Glycine max
tttgtatgtttgacatttataataatattttccattctacgcttatatcacttattgagctgtataccatctgtttatggactcaaatctgtcttaaaatattaactccgcctgtactcatgcagtacagggaatcactatattcttcgactgaagcattctattc

SEQ ID NO: 186154 - DNA, 266 bp, Glycine max
tacagagtgatccaatactttgaaatggatgtccactgaacttattaatagaccgatagagatatcttaatgacgaaacgtttcaaaatgatcttggaagagcaccaccaattaagtcggtggaaaaatctagcatgccaatagctttaaaagccccaatatgatctgtcagattgcctgaaagttgtgaactccgaactgctagtgttgtgagtccatgggaaatacagtgagcaggaattctcaaagtcgataacccgcggtct

SEQ ID NO: 186155 - DNA, 411 bp, Glycine max
tggcttcctagttttcagcttacctatatggatgtgggatcatggcagttaagttccaacttttcatcgtggattcagtcacaaaaaaaacttaaatatttaggcatgtttaacacagggattattgattctattcctacacagatgtgcgaagcacaatctcaggatttgtatttaaaccactctcataatcatatccatggtgagcttgtgactacattaataaatccaatatcttatccaactgttgatctaagcacaaatcacttatgtggtaaattaccctatctttcaaatgaagtgtatgggttagacctttcaaccaattcattctctgaatccatgccagatctcttatgtaccaatcatgacaagccaatgctattagaaattttaatcttgcatcaaata

SEQ ID NO: 186156 - DNA, 431 bp, Glycine max
  unsure (1)..(431): unsure at all n locations
agctntaggcctataaaaaaaattatttgcttttagttnttagaaaacaaagaggccttatatgttgacaaggagtctatttatgttggcaaaaaagacctactatatagctatcacgtttaaagtaagatgtttatcttaaatttttctttagcctttactcatcattggaccagtcctgcacttccacacagtacaacttgcaatggacaggctatgctgattgccaagcgtggaaaaggccttcccggagaaccatgaatttagctagtaatgtgctttctggcctatcttaattggcaaaaagcttttaactaaggctattttaaggtgttntaaatttttactttttaaaaaaaaaatccaataataattaatcacgttaagaagggctactatgagggaggtaaggaattgtgtggaagggcaat

SEQ ID NO: 186157 - DNA, 307 bp, Glycine max
tctctcctcttcgcctaattattgttatgacttccactacatttttatttatttgccttcatgttgttcttatatattattattgcgtcccaatcattcgtttaagggtcccaactacttgtcttgacttattacgcctcgtcctgcagttatcgtacatgtgttgatttcttactttttcttgcgtacttttccttttcacattgaggtactatccgtttctctcttgcattagtatcccactcctttttatacatctcgcttatgtttaaacgatgttaccttttactctcattaacttcttcct

SEQ ID NO: 186158 - DNA, 261 bp, Glycine max
  unsure (1)..(261): unsure at all n locations
tacatcagagagactaaatgtgacaagatgttacagactctactactggattatacattatctgggcagcgattagattagctccacttccacgcatcatgtatcatagctcaacagacgcatatgcacgttgtcaatgttataaaatggtctatcaaatcatgcatcatgtgatatagctcatcagaggcatatggaatngactatgtaataaacacggttatcaaatcatgcatcatgtttcttaatatatatcttatt

SEQ ID NO: 186159 - DNA, 446 bp, Glycine max
actatgctcaatgatgcgtggataacaaactaagctgaagggtgagccaccatctttatagatttactggaaggttttactatattatcatgttctccgcattgaagtgcacttgagctgtctgactctacacttgggcgtattctttgaagatctggcccctttctgccatgttatgtgttgatcctattcggaacctataaaattgactgatctgcctaagaaggcaccattatgtcttcaagagggactcgaaaagttcagggtaggaccaggaacagctatccacaagattttttggaggaaagatcacgaggcttatctttaccctgccccatcttcgatatacatcttagaggtcttgcgcaagaggctcttatacttgtcaagtcaccaccttgacttggaggggatgattgggtctagacactcttatgtacaaggct

SEQ ID NO: 186160 - DNA, 446 bp, Glycine max
agcttctaagttctaacagggtgatggagagtataatttctgaatgtgaaccacaagtataaagttattataatacactgaagctccattaaaaactgaaccatgagtacataattattatactacattgcagctgcattaaacatgttattgttatttaatttcaggacctaaaggaccccttcccttatttttgagaaaactagcttaatataatctacttctataattaactaaggagttgagagaagctaacccaaaaacgcaatatcaccttcttatgtttgttcacaaagttcaattagagaatcttgataaagagaatagtatataatcactaattaatagtaaatattatagaggttcaaacctagttccagctttcacaatgattgcgagggtttcccaaaagcaagcagtagacaagatggcttcaacttatgata

SEQ ID NO: 186161 - DNA, 326 bp, Glycine max
  unsure (1)..(326): unsure at all n locations
ctattctaagagaatgtcttataattaattagcatttcctttaatttttataagaaaaattatttgacaattaatccttgtttttcaagacatgaaattaagaatagtataaaagcttatagctacatgtattttattggctcgcattggtttaattntgattttcaaagataggagaatcatactatgtgctcttccattatatatatatatatatatatatatatatatatatatatatatatatctcgatgttacctcgtgatgatgtgaaattacgtcttgtctaatgccttatgtttgtgtatgaaatagctatacacctg

SEQ ID NO: 186162 - DNA, 376 bp, Glycine max
  unsure (1)..(376): unsure at all n locations
gagcttctccttcctttttctataaataggggaaagagggaagaacaaaaatgttcaaccctcctggtatctgagattcacttaaaattagtgagaaaaattgcttccgtgaagaaaatccaagccgaggcgcttccgtaacgtttccgtgggtgatttcgcgaagatttgcaaccgttcttcgtcattcttcgtttgttcttcatcgttcttcagtcttcaaccggtaagttcctgaaatcgaacttttcaattcatcctatgtacccttagtggtcctcatttgtttcacgtgcttttatttccatttcatttactttccgtactcccttttgacgtgctntagtcatttattgaagtcattctctcgcctaat

SEQ ID NO: 186163 - DNA, 487 bp, Glycine max
  unsure (1)..(487): unsure at all n locations
ctgtgatactactgcttcgataagcgagagctaaactctacaccttcatctatgttctacgcagaccttcttgagatgctagagcttctcttcacacatcgctgtaatatctatgctcacctgcttgctactacatgctatagcgtagctgcacgcccctagaatctctaaacttcacggcgaatgagactcctatgtattctgaagataactatgctgacgatcaatgatgatgacttaggttatgaaccatgagctgagttaatatttggcaactcaggngaatcacgagctagtcttgagttggagattcaacaggaatcctagactcctacgatagcctataataagaatcaagattcaagattctagatctcactagtcaccatcttgattcttgagtgtagactagacttaatcaagataaatattcgcacgggttatcaaactgtgaataacaaatgagtttttgaaaaacccttaccag

SEQ ID NO: 186164 - DNA, 448 bp, Glycine max
acctgctgcatgcaagcttatgatgaatggaatataaaacttcatgtgtttaagcatgggagggttatgcacaagatagagtttgtagctccactcttgtatcttatcaaaattcaaaagtgaacaagtgaaaatttccactaatcaagcaattgatgattcaaagctgctgaagaagatcatttacagcaaggagatttgactatatagaacaagcaaccatcagttcagcctcccttccatggagtaacatcttcaatgcaacaatgagcatatgtagactgttgtttctaacagtcgcctctaaacattttgaatattgcaccaaaatctcagccatacaggtgaccttaatatagaaagattatataatatgttgaaaacattttaccttctctttggaatttcacaagggaagcacatgctcagcagcattcctttgtcttct

SEQ ID NO: 186165 - DNA, 283 bp, Glycine max
  unsure (1)..(283): unsure at all n locations
acaagtgctagggaaagagatactcttctcaagaactttcacgatttggcgcagaaactgaacgactcttaaaggatntgaagaagctgaatgaacttcatgagtattaaatagaatatagatatgatctatcaacggtataagcaagcttcatgaagagttccgattgcttctaagaggtttgatgataacaatgatgatgacaacaagctcagaagtcacgaacacttcatgataacgaagatgatgatctccagagtcaaagagtgagtttaagatcgaa

SEQ ID NO: 186166 - DNA, 439 bp, Glycine max
  unsure (1)..(439): unsure at all n locations
acctgttgcatgcaagctntgagccaattcaaacgacaataactttttactcggatgtttgtttgagtccggtcatatatcgagacgctcgaaattgaatgttgaagctctgaaccaattcaaacgacaataactttttactcggatgtctgattgaggcccgtgatatatatcgacacgctcaaatgatagtggaaaatctctgtgccaattcacaacacaatctctttacactcatgtgtgagagagacgcccgatatatatcgacactctcgaatgagagtgtggaatctctgagccatctcacgagactatcatctttctctgagatgtgagagagacgcgcgtatatatcgacactctcaaatttgagtgtagaatctctgccaatcttaaacgacattctttcatctagatgtgtgagagaccctgcatatat

SEQ ID NO: 186167 - DNA, 487 bp, Glycine max
  unsure (1)..(487): unsure at all n locations
gcttaacattcaattcggagcgtctcgtaatattacgggactcaatcagacatccgatatataatttattgtcgtttgaattggctcagagcttcaacattcaatttcgagcgtctcgatatatgacaggactcaatcagacatccgagtaaaaagttattgtcgtttgaattagcttagagcttcaacaatcaatttcgagcgtctcgatatatcacgggactcattcagacatccgagtaaaaagttattgtcgtttgaattagctcagagcttcaacattcaatttcgagcgtctcgatatgtgacgggactcaatcagacatccgagtaaaaagttattgtcgtttgaattggctcagagattcaacattcaatttcgagcgtctcgatatatgacgggcctcaatcagacatccgagtataaagttattgtcgtttgaatnggctcagagcttcaccattcaatttcgagcgtctcgatata

SEQ ID NO: 186168 - DNA, 431 bp, Glycine max
agcttcttagtttcagatgatgcagatgagtttgtggctacctcatgcactcctctaatgactatagcctcatttatggcgctaaactgttgggagtcggaagccatcttctcaattaaattcctggcttcagcaggggtcatgtctccaagggctccaccactggcagcatctatcatacttctctccatgttactgagtccttgataaaaatattggagaagaagctgctcagaaatctggtggtgagggcaactggcacatagttttttaaatctctcccagtattcatataggctctctccactgagttgcctgatgcctaaaatatcctttctaatggtcgtggtcctggaagcagggaaaagttttctaaaaatactctcttgaggtcttcccagctcgtgatggaccttggagcaaggtaacat

SEQ ID NO: 186169 - DNA, 425 bp, Glycine max
  unsure (1)..(425): unsure at all n locations
gatgttgcgcgtactgataggtaccatgaggtgttagctgtggtttgacccatgcaggtgttgaagagacggcatgggcctctccttccttcctttttgcccctgttgccccgattcttttggcgttcacgtttgtggaggaaacgtaatcaaactttcctctcttcaatcccacctcgattctttccccggcaaacaccagatccgcaaagctggaccgcatgtaacccactagcttctcatagtaaaacactggcagagtgtctaccatcatggtgatcatctctctctcaaccatgggaggagctacttgtgccgccaaatccctccatcgctgcgcatattctttaaaggtttcaccctctttcttaaacatattctgcagtngagtacggtcaggagccatatcagaaatgtactgatac

SEQ ID NO: 186170 - DNA, 438 bp, Glycine max
agcatgccagcttgagataaggaagtgtagaagggtgaatcttcctacttttattcgttgaccacagagtggtacctggagatatgtcgtgggggtcaagagactttggggacgtcaggtggggtgctatttcccaaaaccaagcttgaccaatcccgacccaacccgggcatagtcagtcagtgagaacctgtgatgtacctaagcaggcgagctcctggcggtcaacagataaaaggaactaagaccacaaagcaaggaggcttgtgtggtggctggccagctgtgaactttgattgatatatgggatatggcctctggtaatcgattaccaagggtgggtaatcgattacaaggcttaaaaatgaagacaagaggctaagattgtctctggtaatcgattaccaaggggtgtaatcgattaccatgcttgaaaat

SEQ ID NO: 186171 - DNA, 164 bp, Glycine max
tataccctctagcagcattcattgttaaatgtgccattgcccaagaagctctacaagtttgctcttagtacatggaaaacgaaaaatctatcgggttttctcagtctcgtcgtaacaaatcattgggaggtaaagattcatcggggttataggttgctaccatg

SEQ ID NO: 186172 - DNA, 524 bp, Glycine max
  unsure (1)..(524): unsure at all n locations
atccggtcctttacantttgttntatccaatacaatannaaaaggaaacagattggcctgatgcctgataccccgannccaagcgaccgcagctgcaactttgggagacacttttcttgctctttaatctgacattcaccacagaatctgccttcttctattttcagattgggaatgcctctaacagcacctttgtcaataatatttcttcatgcctcttaagtgcagatgctcaaatctttgaagccatattttgacttcatcttctttggaaaaaacacatgcggaggagtaactgcgttcttgaggggtccataggtaacagctggtccttgaactggcggccttcataagaattccctcctcctatttgtgcccaagcattctgactctgtgaagtcaacattgaatcttcatctacaactgactgatgctgatcaaagttgcgacagtcctcttccaacaagaccttggtcagactaggaagccaacacggaaaacctttcacatcaggactttccatt

SEQ ID NO: 186173 - DNA, 553 bp, Glycine max
  unsure (1)..(553): unsure at all n locations
cactagatgtctnntatttactctatttgtcggtgtattttttatatacganncnncnccnnnnggcgtgatgttgcattgcaagncgtgtactatcaaaaactcgagcttctcgaatcatactatgagcccggagaggtcctctttagttatacgagctgtttgagtcacagatactctacttttgataccccctattgacgcgctaaactgttagacttaataggtttcgctaactgaaaaacaccgtggaatcgattaaccgttgacatcagctaataaaaagttccgaccgatcggacgtgccgtcaccacctgtggaatgaggttgaggttaacaagtatgatgtcgtaagctcaaagcctcctttggtaaataagcggagaaaagatcgacttgtctatgtggattctcgatttattcgaacgttcatagctcaagagaacgaagtctgctcgtccataataaaagtttggaagttgcattaaattctcactagcaaatgagattcttaggccacgcctcaatgtcacactatgtaagatgacctcg

SEQ ID NO: 186174 - DNA, 384 bp, Glycine max
  unsure (1)..(384): unsure at all n locations
agcttggaaaaattattcttaagataaanactcttttggccaatcattngtgcttttcaaaatcttttctaatagtctatcttaagacctatcttaattcttttcttgagacctttgcctttgcttgaaatattgctttcttcattcttgaatgatttttataattccttggcatcatcaaaataattcttggagctgtgcttctacacttgggggcttatgcactgtccagggtccacaaaatgcatgtggcatcctaagtggcacttcaagacatgtgtcaaccctccatgtctgccctggcttaagagtaaaaacgttcggcccctaggagttgggctcctcaccaacaagtatctttacctttaatatttaatatgttgt

SEQ ID NO: 186175 - DNA, 275 bp, Glycine max
ctcctggaacgctatgatgaggccgcatgtgcaaatggggcacccgcttgatgttctcaacttgaatggtaaatgctcgggacgggtcggaccctgcctgacaaattcacatacccggctgctataaaggcttggggtgacttgtctttgattgatgcgggcgatggaattcatgggcagacctttaagattggatatgattccgacacatttgttccaaacactgagctggcaatgcatatgaatgccggggagaatgaacctacacaactggg

SEQ ID NO: 186176 - DNA, 417 bp, Glycine max
aaaatttcgatcttatttgcttggtacccacattattgtttatattgaccatgcagctctaaagtacttgttgaagaaggttgattctaagcctaggttgatccgatgggtgctctggctccaagagtttgacttggatatctgtgataggagcagagcacaaaatttagttgctgatcatttgagtcggattgaacgggtaacagatgcagattcacccattcgggatgatttcccggatgatcatttgtatatactgtatagtatttctagctctctttctactccctggtgtgctaacattgtcaattatttagatgcttctggttttcctcccttagcatctaaagcccaaaaagatagaaataaaagtgatgctaagcattgtatatgggatgacctctacttgtggaaatg

SEQ ID NO: 186177 - DNA, 194 bp, Glycine max
  unsure (1)..(194): unsure at all n locations
tggtctttgccagtgaaaggatcgatgtgttgtctgaaatatgcaaatntgatcatcctactaggacgactgagaaaactggtgcaaataaacatggtgaggatgatggagaaacccatgctgtgactgccattcctgtactgccaagtttcccaccaacccaacaatatctttacttcaaccaataacaaacc

SEQ ID NO: 186178 - DNA, 433 bp, Glycine max
  unsure (1)..(433): unsure at all n locations
agcttggtcnttgcatatattcacacatcataatctctgaaaactctctagaacttggacctttctctctctagaaaccctagacatgcaaagctcggaatcctagtccaaactctctttctgaaatctgatttcaggcttaaataggggccttgttcgtgctcgtgcgcttagcagaattattgaccacttagcgcacattagtgaatttcggcttagcgcgtgcctttctcgcttagcggatgaactgaagcggtgcacttagtgagatgaagtggtgcgcttagagaacctatacagctcatcttcttctagagtcttccttgcacttagcccatgagtgttgcacttagcggacgctcgctaagccagcagattggcttagcgagaangtgaaaaacaacacttttcaaagattgcctaattaacctat

SEQ ID NO: 186179 - DNA, 408 bp, Glycine max
  unsure (1)..(408): unsure at all n locations
tgtgtctaccatcacgattatcgtgtccctttccattattgggggtaccacctgngccgccatatccctgcaccttttgggcgtgttctttgaatgatccgttcccctttttgcacatgttccgtagttgccttctatccagaaccatatcaaaattgtattgatactgtctaacaacggcaaccattacgtccttgctataatggactctggaagattccaagttagtgtaccacgtaacagctaccccaataagactgtcttggaaggaatgtatcancaattcctcatcttttgagtattcccccatcttctgacaatacatctttagatgggtcttgagacaagtatgtcccttgtacttgtctaagttcagcaccttgaacttgggaatgaccatgtttgggt

SEQ ID NO: 186180 - DNA, 331 bp, Glycine max
agcttctacattagtgttccatatgaccgttgccccagctaggctatcttggaagaaatgcatcaataacttctgctccctagaatacgcacccatcttgtgacaatacatttttaggtgattcttgaggcaagtcgtccctttgtacctatcgaagtcgggtactttgaactttggagggatgacgacgttcggtaccatgcatatgtcggtcatgtctgcgaacggataatcaccgaacccttcaatagccctcaatctttcttcaatgagatcgagtatcccctccttttccgctacccgggatggccttcccacgggcagaaacgtc

SEQ ID NO: 186181 - DNA, 470 bp, Glycine max
atggaagattatggggtacccatcatatgtggtactacgtggcggtctggcgatggtgcaccatcagtattgcacattcacagattccgcataaacccaccatccactagtgcccacctccaactgagcttacgtacttccacggtgcccattatctcgattctattaacaccgggtcccatcaatactaccagcattcccaacatccatgtaaaacaacattcaaatagcacaaactatcacagccaagaaaacagggcaaaagcataaaactctgcccaaaacaccaaccaagatcacagctgttctcacttaaagaccccagtaccaattgcttcgttcaactttggtaaccggtggatccactcgaaatattaactggaaggctctatacataatcctacattctgacgcgtggagtttataacaaacataccaaaatatattggctcttttattttcaactaaag

SEQ ID NO: 186182 - DNA, 412 bp, Glycine max
  unsure (1)..(412): unsure at all n locations
acctgcagctgcagctagagctacacctaccgctctcctttatctagagatctctattatgagcctcactttgagcctccagatctgctatgaccttcttcagttgtgcttcttgccgaagaaccatctcactattgacgcgtaatgctctatccgatgtaacaagctcatcaaaagtgatgtgcactgtctgtatcacttgaatcttcagcagactctaatctcccagtgagtgcatgcacatcgctgacagagtcgctttattgttcactctctgcatcggatcgacgtacaaaaagtcctttcctccgcttcttgagatgagcgggacattcatctgtgatgtgcccatgggcttcacacccatggcatagaattcacttgctgtgactgangtttacatctgaccttt

SEQ ID NO: 186183 - DNA, 249 bp, Glycine max
agcttgtgaagtggttgaatgaaaccatttttgatgagttaattgttggctgttttgtgagaattggcatagggaagttagaaaatgtacctgtctataggctctgcattgttcagagagttgatgggggtgacccaaataagcattacaaggtatagaatagagtcactcacaagtacctagtttgtgtgtggagcagcgataactctgctaaaatgttttagatggctgtagtttcatattcttcac

SEQ ID NO: 186184 - DNA, 260 bp, Glycine max
tcttgtcagaatcaatctaaaccccttcttaccaagtcgatgtactttgtctattcagttacatctaacgagctatgcatgctaataaacaataaatatcgtgtattcttctatattaaccaccacacatgttctcaatatataaaaaaattcacttcattctttgtgtgataattattttaacatgcaaacaaattagactataattataaacataatcatggtccagctcccgccatctttcttaacgctctgcctct

SEQ ID NO: 186185 - DNA, 420 bp, Glycine max
cagcttctatataagctgaatcattatatcaataaacacaagttgagttttattcagaaaattagagtttatctcttttatcttagtgagagtgattctcctaaattcttgagtgattcaagaacaccctggctgtatcaaaggactttcacaacctttgtgtgttgccctcgctggaaagagcgattctttcctttctttcatcatcacccttgctcttttaaaccacaattccagaaaatccacctttgcccagaattatctcatggtcataactcccattgtacgcactcaaattaagtgattcttgagcctaaattgaatttcaaaacgagacctttcacctcgttttgaaatcacctcatttggagccctgtagcttcagttattgccatttctatatttctggccatccaccac

SEQ ID NO: 186186 - DNA, 347 bp, Glycine max
  unsure (1)..(347): unsure at all n locations
agctnttaatatgttcttacgagtgaactggtctatacaaatgttattcactcaacagttgtgtcttgattcaccaattgtcattaacaagttccctttaggttgaacatcttgacttcatttgacttttagaaatcttttataaaggcttgctatatatgccggttattctctgatataccactggaaaatgtaaagggttttcctcatataattggttcatctaaatttctcaagaagaagtttgggaagtggttgctcaactggttggcctttctttatgcatactgattctggtaaaacacataaattttctggatggctttattacttgataccaaaacact

SEQ ID NO: 186187 - DNA, 402 bp, Glycine max
  unsure (1)..(402): unsure at all n locations
agtatgtgaagctttgacaatattggacttttgtattatattatactcataatcttacaagagtggagttgataaatattagactcataatcttacaagagtgtgagnttgaatcattgctaatataaaaatcttattgctagacaatctgttaatatgtccataagcattcaataagctttgaagcatgttgtgaaccttagaatccgactcactctcactccattgngaaaaaaataagcttccactgaaattagcatagttgacttaaaggcaatntaatattttgattctgcaaaaagtcaccgacaatattccattttagtaatgtgtgtttaatattttctctttgacatactttttatttttagttttagtactaaataaaaattcattgaaagc

SEQ ID NO: 186188 - DNA, 278 bp, Glycine max
cagcttctcgacatattacgggactcgatcagtcatccgagttttaaagtgattgacgacagaatatgctcataacttcaacattcaattttgagcgatgtgatatattacgatactcactcggacatccgagtagcaagttattgtcggttgaatctgatcaaagcgtttgcattcaagtccgagcctctcgatatactacgggtctctactcgacatgcgagtaaagggatatagtcgtttgaatttgctcatagcttagatattctatcccgagc

SEQ ID NO: 186189 - DNA, 166 bp, Glycine max
cgacaataactgattacttggatgttcgattgtgtcccgtaatatatcgcaacgcttgaaattgaatggtgaagctctgatcaaactctaacgacaataactgttttactcggatgtcagagtgagacccgtaatatatcgagacgctcaagattgcatactgaag

SEQ ID NO: 186190 - DNA, 364 bp, Glycine max
  unsure (1)..(364): unsure at all n locations
atcatctcagctttccttatcaagtaaatggatcatttttaagggccaacgccttaaaatgatcacctttcaagtgaaaagaatcgcttgattcacgcttaagaaagaactacgtacgtttgatttcctcatcgatggagggtacgtaggagcaaaagccccgcttttgtcgacctcaaaaaataaaaagaaatanaagttaaggtaatacaatttccacaattctaaaaaataggttggtgtcctttgagacaaacgtgagaggtgctaataccttcctcaaacgtaaatacaactcccgaacttagagatttcattttgatcggntcccttcggtttttctgatgtgttccacaaataaacg

SEQ ID NO: 186191 - DNA, 519 bp, Glycine max
  unsure (1)..(519): unsure at all n locations
cgtgcctgatgcgcctttaaacggccttggantctcnactaggtgtgatgacaatgaggtctgtatttatgggacgatgttgtatgtcatttctggtttaagaatagtgtgccactggtaacactaactctccaaatgttngccttctctggaaatggtcncgaggaagctcgcctcatagaggtccactattgacaacgtcgctcaacggactatttccgctccggagtatgatatctaccggttttggagcgcggtacaccatcaacgctcacaagccatcaaggcgtggtcgcttctccgggagcgacgcgtgcagctcatggacgactagtatactgactgtgctgangatataaggcgccggcggagggcaccactgattacttccttcgacagtatgattcttagcttgtactcggatttcgtgtcaagctatcaatcttcttcaactgcaacgaatatnncgatgacanagcatccatcgaggttctcccattcgatgccatgtangggctt

SEQ ID NO: 186192 - DNA, 438 bp, Glycine max
  unsure (1)..(438): unsure at all n locations
agctntatgacccatttgttttaactaagagtgcaagtaacactagtactcactattattggttgaaatttttttaaaactacaaaatcaggagagagactcattagataagaaacgggagccacatatttgtgattttcaataaatttgcgacctatttctcattcatttgtctatagtttatgcattttcaaaaatcttcaatccatatttggactgtggatctcactaatgctatgacctgctttggtttcaaaatgcagtggttacttggcaccagagtatgcaatgggtggccagttaaccatgaaggctgatgtatacagttntggggttcttatacttgaaataatcagtggcaaaagcagtgcaaggacaaactggngagggtccaacaaatttctattggaatgggtatgtaactttcagcttcccata

SEQ ID NO: 186193 - DNA, 220 bp, Glycine max
  unsure (1)..(220): unsure at all n locations
atactgctttaacacgagtcaacattatnttgtgtaaaataagtggtgtcagaataagttgtatggcctcggccttttggattgtgtcagtcatgcatagaaactcgacgagctagtcactgtatataaaaataagggaggtgtgtagttcaatatctacaccaacctatggtcttcaccattttaataaaaaactgaatcttctgcattattttttaac

SEQ ID NO: 186194 - DNA, 240 bp, Glycine max
  unsure (1)..(240): unsure at all n locations
attgcgggaatagttttcctcctcttgggctcgaggtacangactgcgccgaatgaaaagacccttatgaccccctggaggaacttgtccttttgtgacaacagagctgtggaggaccccatctgtgcctcaagctgttcccaacccaccaaacactcttcttgtaccaagaggttgattgttacgcgctttggtgatgctcaaacgtaaaaaaagatgagaatggctccattcaacatt

SEQ ID NO: 186195 - DNA, 112 bp, Glycine max
acttagctcgaagctctaaagagcacacgaactctgtgtcagactttactgaactctagaaaactcatggagcttcacagcataagcatcgctcgttcgttgccgaggatct

SEQ ID NO: 186196 - DNA, 442 bp, Glycine max
  unsure (1)..(442): unsure at all n locations
agcttcatgatgatgaatcatgtatgattcaagtagttntgatgatgacaaaaagcccaaaagaacgatgtcaagattgagtcaacaagttcaagatcaagattaatttcaagattaaagaaaaggcatcaagaagaatcaagattcaagagaaggtgaaatcaagattcaagagaagaaaccaagaagcaacaagtcaagacttcacaagggaagtattgaaaaagatttttcaaaaaccaaacatagcacagttttgttttacaagaagagttttctcaaatttttctaagttacctgagtatttactctctggtaatcgattaccagttttctgcaatcaattaccaatgatagaatttgatttcaaaaagttntaactgaattcgcaacattccacatgatntttaaatggtgtgatcgattacaatatattggtaat

SEQ ID NO: 186197 - DNA, 272 bp, Glycine max
  unsure (1)..(272): unsure at all n locations
tctgggaggatgtatcagctgattntatcacagggttgccttggtcgagaggctatgaagctattctggttgttgtggacaggctgaccaaatatagccattttgttccattgaaacacccttatacttgccaagggaattgttgagattttcgtaagggaagtagtgaggctacatggagttccaaaatctctcgtgagtgatagagatcctttatttatgagtttgtttggaagggaatttttaagttacaagggaccatgctcaagatg

SEQ ID NO: 186198 - DNA, 421 bp, Glycine max
agccttggagtttccaagtgccaattcgttctcttctttagtccagtcttcttctggcttcaattcatcagtgggctttccttctgtgtccagcatcttgggatgttcccagcctttgatgacagctttccaggttctgctatccagtgatttgaggaaggccaccattcttgctttccagtattcatagttgcttccatcaagaattggtggtctgttcactggtcctccttctttctccatgttcatcagaatttatctccccagatctcactctgtgatttcgagtgttggctctgataccaattgaaattctgataccaggggacagatgtcgtacaggatgtcacgacatcacgcttcagaacatgcagtttatgtgtgtccgtatgaacagattaaacaagtaataacacaagag

SEQ ID NO: 186199 - DNA, 418 bp, Glycine max
  unsure (1)..(418): unsure at all n locations
gacactatgaaactcagcttaacattcaatttcgagcgtctcgatatattacgggactcattaagacatccgagaanaaagttattggtcgtttgaatggctcagagcttcaacattcaatttttagcgtctcgatatgttacgggactcaatcagacatccgtgaaaaaagttattggtcgttgaattggctcagagcttcaacattcaaattcgagcgtctcgatatattacgggactcaatcagacatccgagtaaaaagttattgtcgttggaattggctcagagcttcaacattcaatttcgagcgtctcgatatattacgggactcaatcagacatccgagaaaaaagttatggtngtttgaattggctcagagcgttcacattcaatttcgagcgtctcgatatgttacgg

SEQ ID NO: 186200 - DNA, 316 bp, Glycine max
agcttctagccaaatggacttaccttgaattatttcctttgatagcccttttgagccttgtttccctttccttgttttgaagctcactacaagccttaaatgaaaaaccatgatatcaccatatccttaaggaattttggagctttggaattgttttgggaataagtgtggggggttttttgtttcattggataacttgttttgttggctatgcttcgtgatgtattttgggccatacttgatgcacattgtatattggttaaatgttggacatgctgaatgaaatgttgtttctcataggctatagagtaaataa

SEQ ID NO: 186201 - DNA, 320 bp, Glycine max
tagcttaaagacctaatattaaacttttataatgtacacatatatctaaacagttgcagataatgtataaccggtcttcttattcaagctattgtataggattatagagatacaacccaagttgctttcttggtatattgctacgtgctccatacaatatataatgaaactgtcatataatgaccaatagagttgtcatataatcaaaagctattggaatttatgagaagtactttgacaagcacatttaaagtgttatcctattggtttaaaatctttatgcttaacatatatcagaatcaaatttaaataattatggg

SEQ ID NO: 186202 - DNA, 268 bp, Glycine max
  unsure (1)..(268): unsure at all n locations
tctcanagaagcgacgaggaagcttctggaggaagcctcttaatgaagcttctagagaaagctacatggagcttcctcggtaaaaatgatgcccagacgttgttaaccgatggatcttctcaaaatttggtctgcaactccacaagacactnttccattatctgaccgttgggatctttgagaagatgtctggagtgtgctagaagcctcttaatgaagcttctggaggaagcctcttaatgaagcttctagagaaaactacatgaag

SEQ ID NO: 186203 - DNA, 289 bp, Glycine max
  unsure (1)..(289): unsure at all n locations
agcttatgaccatatgaatttctcgtgtgctttcgttgnacaactttgagcgtcgtgatatattatgcgcctgaatcgggcctccgagttaaaagataacccaaatcgcattttatgagagctttcgtctgttaatttcaagtgtctcgatatattatgcgcctgaatccgaccttcaagtgacaagttacgaccattagaattgctcgagagcttacgtggaacaactgctagcgtcacgataaattaagtgcctgaatcggacttccctgtgacaagttattacgat

SEQ ID NO: 186204 - DNA, 274 bp, Glycine max
actacatgaagctgcttctgtatatacgttgaccgcctgagatagacgaaggatcttgtcgagatataagtcgctgctgccgaggcacatgtccatgacttagacgaggatatgttggagatggtatttgtagtgtacgataagctttcattcacgatagcttctattattgaagcatctcaagataatgtttattagggcttacgagcacagtgaatgataaatctcaatctctatcgtatacatgtctaaagattcgactatttgcttcata

SEQ ID NO: 186205 - DNA, 438 bp, Glycine max
  unsure (1)..(438): unsure at all n locations
agcttaagtntttatactagttgatggattaagcccttaaatagatcaataaatgcataatatcaatatattataattaaaacataataaatataataattattattatttatatttattgaacaaattagtttgccatgtttgaaagactttctaaattacttaaacaataattttttaatttaataaacttttaaaaaggtcctaacttaatgtagattagagtatagtgacttatctccatccttaatgatgctacataaataattatagaacgatgtatcaagcatgggtgtctaaaatcataggtatcatatcaacgttctcacggaaacagaaacgtgaaggtgcctatgggctataagcgtggttgtcatataaaaaatagtgtgggtcttatctaaattgtgtgtactgactaattattctcaccactct

SEQ ID NO: 186206 - DNA, 442 bp, Glycine max
  unsure (1)..(442): unsure at all n locations
ttcaagcaaacatctattcctgtctgaagatcatgtgcctgaacaaccctactgaaggcagctgaacaaagatattctgttacataatgccttccagccaagactgtatttagcacaatgggcagctccttgttttcttcaaatccagtcctgtatgtgcaataatggatgagagcaaattatactcacatacaatgcaagtctatttaaaatacctaaagagccagagtgaaaagccaaaattcacattccacaataaataaatactgagtcaaaatcaccatgcaattagttaaaggcaacacatncaatagttgacggctcaacaagtaaaagccaacaaagttgccattaatttcaaaaattactaattcctgatctcctacacattcagaatcaactcattcaccagcattaacaggaatatttggagaaatgaaag

SEQ ID NO: 186207 - DNA, 386 bp, Glycine max
agctttaagctgctcaatggctccaggttgctgtatggtaaggctatggtctatatggtgggcaacttacgagcatacaccacagactcttgcgacaggtacaaatgattgattcaaggccacctgggttaccaagttgaccaatgcatctagtttgccttcgagcttcttagtgtcagatgatgcagatgagtttgtagccacctcatgcactcttctaatgactataacatcattatttgcgctaaactggtaagagttggaagccatcttctcaattaaatttgtggcttcaacaggagtcatgtctccaagggctccaccacaagcagcatctatacatacttctctgcatattactgagtccttcataaaaatatgggaga

SEQ ID NO: 186208 - DNA, 424 bp, Glycine max
tattcatcggtataattcgcctgttccattacgctcttgatgtctatatatgttactccctcggtgacatcttttgtctcgaatggaattgccatgacacgtttattgtcactctctctgatatttggtagttgatattgcgttgcaggacgcaattccgattggattaactcgtcatccttaacttgccaatttgttatgacatgtgtagttagatcacctatgatgtcttgtgtccaagggtaatccatatcctttctgatggcatatgcatgacaccaatcaaagaacaggatattaatttcgactcgctcgacacattcgtagaacttgtcttggattcgctttctgtttgtacccttgtaatgtcggaaaaaccatctccttcgaggttcatctctcggagaatagaaatatttcctaa

SEQ ID NO: 186209 - DNA, 366 bp, Glycine max
  unsure (1)..(366): unsure at all n locations
ttgctacagtttacttcaaacactgtttataaaccgttggacgacaatctttgtgaacttataattattcataaaatcatctccattgcaaaaatatttcacagattatctaccatactattcaaccccccttctagtatgatttattgtattttagttggcatcaaagcctctaggattgagtattctagaagatatagaggaagatcctgataaacgaaagaaattgaagaaaggtactccaccgacaagcctttcctattcaaaggagcaaaatatgattactagaaggaatgtatgataactcactttgagtctattcatatcaacctctgggatgtggtagaaaatgganactacattcca

SEQ ID NO: 186210 - DNA, 438 bp, Glycine max
agcttctctgcaatagagttagggaacaactgataaatgagatttgacatagcagaagccatgaaagcacataacaggaccttgaagaaacacagaattacaaaaaaatggctctagataccattttagaatgttaagaatgtgagttggctttatttttagtcgatgtgagacttgagtttttcccaacacatcccctcacgcccagcacttcttgggcttggtgcatgaacaacaatagtgaatggccctttggattaatcttgaatatgctctgataccatttttgataaattgagaggaaagtagagacataacagagaaaaaggaaaagaacaaagctaattctattgatctgaaaaacaagttagagatagttacaatctaggtatttataaacctctatacaacataactaactataactaactctaacag

SEQ ID NO: 186211 - DNA, 340 bp, Glycine max
tcagccccttatgcacttatctctctttcgaatttgcttggaaaaattgttcctgtgaagaaaatccaagccgaggcgcttctgaaacgttttcgtaacgtttccgtgaggaatttcgcgaaggtttcgaccgttcttcgacgttcttcattcgctcttcatcgatcttcgatcttcaacgggtaaatacctcgaaccaagcttttcgattcattctatgtacccgtggtggtccacattgtgcttcgagtatttttattctcggttcattcacttcttatatccccctttgacgtgcttaaaccattttatttaagtcatttctcgctaaccctaaaat

SEQ ID NO: 186212 - DNA, 421 bp, Glycine max
agcttgccacccagctcgcccaggcgagcagggttgcttcctccagaagcaacagccttctggaggaatcttctggagggcccaagtgggcctggttgctatttgcacccccatttttactaagtacacccctgcctttttttttttggtgattcttttttcgtaaaggtacggaaacttactaatttcgtaacgatacttgttttctttccgtaatgttacgaaaccttgtggattacataatcatccccttcttgacttacggaatattacagaacctaactaattgtgcaacgatgcttccatttgatttccggtgtgccacggaaccttacggattgtgcatgaatattttcttttgtttcccggcatgtcccacaatttcacaaattgcctaatgatgggtgccaatctcctcaca

SEQ ID NO: 186213 - DNA, 300 bp, Glycine max
  unsure (1)..(300): unsure at all n locations
actcctctaatgactatggcatcatttctggcgctaaactgctgagagttggaagccattttctcaattaaatttctggcttcagcaagagtcatgtctccaaaggctccaccactggcagcatatatcatacttctctccatattactgagtccttcataaaaatattggagaagaagctgctccgaaatctgatggtgagggcaactagcacatagttntttaaatcgctcccagtactcatacaagctctctccactgagttgtctaatacttgagatatctttcctgatggatgtg

SEQ ID NO: 186214 - DNA, 433 bp, Glycine max
acttaggctgatactagtatacgaagttattgagtacactcatcttgaggagggagtgcatctttcttcagccattgaccattccgatccttacgatatccaaaggaagttactgcaccagcaccaattgcaaaggaatgcttgacttgaacaaatggttcatcatcaagcggaatctgaaaatgacgcagaaataaagctatcaattgagggtaagggagaggtgcattggcccgtaatgccttatgcattcggtatcgaaccaagtgagcccagtcgatctgacgactggttaggaaaacccacattaaaatcaaatcctccctagaggcttgtggccaatttgaagaccgaggaagcaaaattctaacaattatataatgcatgatgcgattatcaaatgtcaatgacgcggccagcaatctaccatcat

SEQ ID NO: 186215 - DNA, 268 bp, Glycine max
  unsure (1)..(268): unsure at all n locations
cgcatttccgaacttcgccactgttcttcgtgaacccaagctctcactcactgatcctatcagttaccaaacccttcgtaagaatcatcctctctcagatttacaatgtcgcaaggacaagcagttccgtttgctgggaaatggcaccgttttacagtcatgaacgacggagagaatgtggttccagaaccacaaggtgacgccgaacacacagaaacctgngaatcggaggtgatgatcccctttgctgtagaaaggacagtttacg

SEQ ID NO: 186216 - DNA, 407 bp, Glycine max
agcttcaatagcaagaatcattactcaaagtatgcacatcaagtatcaaaattttgcaaaattaacaaacttaaataaaaaaacatgaagaagaagaaatataaacagtgaataagaggagggagaggagtcgctagaataagaacaacagaacttcgacaatgatagcataacgccgacgccatcaacgctgacgccatcaacgcctctgatggacctgtgtacacaggcactttgactccggtgtaagaacaacacactccgactccgatggacttgtgcgcacaggcactatgactctgatgtttctatgcacactctggtggattcgtgcgactgtgatgtttctgcacacactttgacaacctagacagatttgcgcacactcacatggtaggaattttata

SEQ ID NO: 186217 - DNA, 356 bp, Glycine max
  unsure (1)..(356): unsure at all n locations
ggcgctcgtgcccatccagtgggaggccccctaagctctggctccaaccccgactcgcctggccagcaatgcccactttggcatcggttccaacgtgataaggaactttcccccgaggccaactcaagaattcaccccgatcccaatgacgttcgaagacttcttgccatccctcatcgccaaccagatggctgtggtatctccctcatcgncaaccagatgggtgtaattccccgcggtgggcacaagaaggtttcctgttgatgcatcttggcgcgccacatagcatggaagcatgtttagcagtaggaaacctggtgcaacaaatgatagaccaacgccggctggaagttgat

SEQ ID NO: 186218 - DNA, 425 bp, Glycine max
  unsure (1)..(425): unsure at all n locations
agctntataagcgcgggtctgggagacgaaggtcaaatggtcgcgatatacggagatgatgttctgagtacattggatttggtacgaccatgccctcctgatttccagctgggaaattggcgagtggaggaacgccccggcatttacgcaacgagcataatgtaaacctttacggttttaaaagctctatagttgggcctaggctttagagtttttcttttgttaaggctttgtgtcttttgtttttgaatttataatacaaggatctttcttcatctgttcctatgtctctacccattctcatccatttgcatgtttacttctttatttttgaaacggcagatccgatgacgagtcccctgaaggtactaatacctgngactcgtctatcgacttcgagcaagaaatgaatcaaacggaagatg

SEQ ID NO: 186219 - DNA, 304 bp, Glycine max
  unsure (1)..(304): unsure at all n locations
cattcaccaccaccacatccttaggattcacagcaacagaggccactcgatgggagctgttgcggttactgttaacattggcatcaaagtccacttccatcacaaaaatatcattcaaaggcttattctgcacgggctgtgcccaagcaagattatacaagcccgatgcatagccgcgacatatagtagggtactttgagtaaagatcatgaacagcccanaccctagcatcacttccattgggcttattggtattatntaacaacttaacatcttgcttattgaaatcctcggctgaaatctc

SEQ ID NO: 186220 - DNA, 431 bp, Glycine max
  unsure (1)..(431): unsure at all n locations
agcttctccccaattntctataaatagggggagaagtgaagtgaaaaagggttcagccccttaggcacttctctctctttcgaatttgcttggaaaaattgtttccatgaagaaaattcaagccgagccgcttccgaaacgtttccgtaacgtttccgtgaggaatttcgcgaaggtttcgaccgttcttcaagattcatcgttcgttcttcgttttcttcagtcttcaacgggtaagtacctcaaaccaagcttttcaattcattctatgtacccatggtggtccacatttcgtttcatgtatttctattctcgttttcatttactttttatactcccttttgacgtgcttaagccatttatttaagtcatttctcgcttaatgtaaaaataaaataaatttccaccgatcgtttgaatcgtatcatccg

SEQ ID NO: 186221 - DNA, 388 bp, Glycine max
gatcacgtgacgacaatttcttttctttacttaaaatgttagtatggcctttgatttcatgttagaaaattaattttaaatgtagaatttattttaaatatacttttatatgcttgaattcacgctaaaaaaatttaaaattaattctcggtttagaaataattataggttaaaataactttaagaaggttctgtgttaaatttaaattttatagtgaattctatttttaacttgatgttataataaaaatatctaaaactaaattatattactctaaaatcaactttaactaaaattaattttatacaaaatcaattatactcacatccattcaaacacactacaacgatctacaccacgtctagttaattaagagacatgagtcgc

SEQ ID NO: 186222 - DNA, 408 bp, Glycine max
  unsure (1)..(408): unsure at all n locations
agcttcgggttgctcaattgctccaggttgctgcatggaagggcaaaggtctgtatggtggtcagcagaggagcacaaaccacagacccttgcaacaagtacagatttctggttcaaggccagctgggttaccaagttaaccaatgcatccagtttgccttcaagcttcttagtttcagatgatgcagttgagtttgtagctacctcatgcactcctctaatgactatagcatcatttctggcgctaaactgctgggagttggaagccatcttctcaattaaatttctggcttcagcaggagtcatgtctccaagggctccaccactggcagcatctatcatacttctctccatattactgagtctttcatanaaatattggagaagaagctgctccgaaatctgatg

SEQ ID NO: 186223 - DNA, 346 bp, Glycine max
ctttcgacacctactgtatgttgatatgaccaacgctgatatgggaatgttgcgacaatccttcaaaaccttattgatacattctgagaggatggttgtcatgtgtccatatcgacgtccttctctatcataagccatagtccatttttcctttgaaatgcgatcaatccatgttgctatggctggacttagttcacgaaattattctaaatcttgataaaaaatgtgcttgcaaggagtgtaagctgcataaaattagttatcaataacaatgttaagtatataaggaagttaaataaacgtgaccattatatatgatatcttacccaacttcttgaacatttct

SEQ ID NO: 186224 - DNA, 388 bp, Glycine max
  unsure (1)..(388): unsure at all n locations
cctatactggtggtagacatgaactcactntatcaacaaatcttttgagattcattgagatgtgccgatcgggaaggtacgcaatggcttggcctttcaagtacatctattgatgcaatttctcaaaggatgaacggctctcttgagggagattgacactaaactggatgccttgagtacaagattggtgataaagtgttcaanagggcaccttcttcttgaaactcgatctttgagggttccacttccttcaaagaggcatctctattgttggcaatagaatcctaaaagcggtgcctagtaaccccttttatcctgaattttggagaatgccctggctggggagacggaaccttattggatgaacgaccactgtgtagatccaacg

SEQ ID NO: 186225 - DNA, 338 bp, Glycine max
  unsure (1)..(338): unsure at all n locations
tcctctaatgactatggcatcatttctggcgctaaactgctgggagttggaggccatcttctcaattaaatntcttgcttcagcaggagtcatgtctctaaaggctccaccactggcagcatctatcatacttctctccatattactgagtccttcataaaaatattggagaagaagttgttctgaaatctgatggtggggcaactggcacatagtttcttaaatctctcccagtactcatacaagctctctccactgagtagtctaatacctgagatatccttcttgatggctgtggtcctggaagcanggaaaattntttctaagaatactctctt

SEQ ID NO: 186226 - DNA, 418 bp, Glycine max
agctttaactatcaattaaatatttcaatttatattaaattatgcaaataagaagtaaatgttctgtaaaaataaatactactaaaaattctattattaatataattaatattgatgttatgatgatcaattttctcctatatttaataccattaattaataattaatttataggatgaaatatttacaatgttatctaattatttattttatttttttaaatacataactcaaattaaattaaaattatgacagtaaaaagttgttctcttattgcttttagatttttaggtttgaatttatatcgacttaataaaaatataacaaatttaattatattgctgaaactaatttcccgtattcctcacacactttgttatagtaactttttatttaatttgtgtgaatacataaagaa

SEQ ID NO: 186227 - DNA, 364 bp, Glycine max
gtagtttcctcttccccatgtctaccacacagcttgcggtggacataaaaggtcttccaagaattatgggaatgtcagcatcttcttcaatgtctatcactattgaaatcaacttgtgatggagcgattagccaactggagggtcatgcgtgtgggcattatctctatctctccaagtcatcgacacatagagagaggcattaaattgatactaggtcccaagtctatgagagctttacccacagcaacattgccaatagaacacagtatagtgacacttccatggtctttgtgcttcacgggaaagatgcgttgaatgacagcactacaatttccttccacaactattgtgtcactgtgtatg

SEQ ID NO: 186228 - DNA, 426 bp, Glycine max
  unsure (1)..(426): unsure at all n locations
agcttctatgattagtcaggattataaagtggtgccctaaaagatactgtctccattttctaacagcagtggtgatcgcaacgagatcacgaacataagtggaagaggtgagtaacctgngacaaaactgtttgctaaaaaaagctatcagatgtcttccttgggacaacaccgcacccatacccgaacccaaggcttctgtctcgaccatgaaaggttttgtgaagtcaggaagtgctaagaatggagaatgtgtcatagcatgcttcaatttgttgaaggcaacgtcagcttcaagggtccaatggaactcttccttggttagcaggcttgaaagtggtgctgccaaagtagcgtagctccttataaatcttcgataaaagccagcaaggccgaggaacccacggagggctcgtgtcatgcgtg

SEQ ID NO: 186229 - DNA, 374 bp, Glycine max
  unsure (1)..(374): unsure at all n locations
cactggttatgtgtctactatcattgntatcatctcccttttcatcattgngggagctacttgagcttccaggtccctccacctttgggcatattctttgaaagattcatgctctcttttacacatgctctgtagctgcatcctatccgaagccatatcagaattgtactgatactgcctaatgaaggcaaccattaggtccttccaagaatggactcgggaaggttccagattaatatactaggtgatgaatgccccagtaagactttcctggaagaaatgcactcagcaattttcatctttngcgcacacncccatcttccaacagtacattttcaggtgattcttgnggcaagtagtccccttgtacttat

SEQ ID NO: 186230 - DNA, 435 bp, Glycine max
agctttcaataatttatctatagaagaatattattctgcattatcaataaaatatttaaacaatggtaattgactaaggaaaaatttaagaggatatatttagacaattgtttctgttatgatcatgttgtcggcaaagtccacatttttttctacttggtcgttcattgtcgtctttgtccatctaagtaagaatgcgagttgaaacgggacgatcatttgcagtcctctttctccttggatcaggaccccactgatctccttcatattcttgccacattgattcgtgtggcaataaaccaaaggagttgtcgtaaatgtgcaaaatgtgttgtaaagtgaataacattgacacataggtcatgggatcaacattgacagatttacaggtagccatgacgtaagaacacggtcagtgtttagcttgatattcac

SEQ ID NO: 186231 - DNA, 457 bp, Glycine max
  unsure (1)..(457): unsure at all n locations
taagtactctgcctaatattaaagcttaatttgtgatggacttgaagtcaacctaagaattgagtactcaacttaatgcatgtttaaaaatcaagtgaaaaagtatttttaaggcaaaaatgatttttgtgaaagaatcatgattcatgatctttgcttttgtttttatttattcattaaatctatattgaaacgtatacataatattttcagcttcaatccaaacatgcacttagaacttagaatttaagtttgacctatgatagacttgaggttggcttatatgctgaagacaatctagcttgaatggaacaaaatgaatcttaaagatcccctaaaattaatgacattngtgcaaagaaaaacatatatatttatgccaataaataattntaaaaaaatggttttttttctttattacattaacacttatattaaaattgactcatcgctctca

SEQ ID NO: 186232 - DNA, 442 bp, Glycine max
agcttgccagccagcttgtccagtcgagtagggttgcttcctccactggcccaagtgggtctggttgctatttgcacccccatttatactaaggacacccgctgcctttattttggtgattcttttttcgtaaagttacggaaacttacgaatttcgtaacgatacttgctttctttccgtaatgttacagaaccttgtggattacataatcatccgctctgtgacttacgaaacgttacagaacctcactaattgtgcaaagagagcttccatttgatttgcggtgtgtcaccgaaccttacggattgagcatcaatattctcttttgtttgccggcatgtcccggaatttcacaaattgcctaatgatgggtgccaagcaccttacaaggaccaaacaaaagtcgcatgtcatcaagcataggtccgcggacgaaattag

SEQ ID NO: 186233 - DNA, 406 bp, Glycine max
  unsure (1)..(406): unsure at all n locations
aggtgtgtgtagcttagctctagcttctaaggaagctntctcaaagaagtttctcaaggaagttttctcaataaagcttctcaaggaagctacctagtctgtaaatagaagcatgtgtaacacttgttgtaactttgatgaatgagagtcttgtgagacacaactcaaagttcaacttttctcccttttttttccttcaattatgtgctccccccctctctctntctctccctctttcttttcctccattgaggcatcctcgccaagcttcttatccaaggttcatcttggtggtgaagctccttcttccatggcttattccctagtggatggcgcctnctctcacctcttctcctttgtcttccattgcatctccatggtggaaaatcaccattaaaggacctca

SEQ ID NO: 186234 - DNA, 439 bp, Glycine max
  unsure (1)..(439): unsure at all n locations
agcttctaaactttatacaagaatgaagctctgataccacttgttagacaagtggcctcaaatatcttaagaaggggggggttgaattaagatatcacaaactatttccccaattaaaattttattcttctttaatgataatgtcaatgttcccttattatgaattactataattcaattcaaactaaacttccttaatgcaaaagataaataacaataaataaatgagtttatggaaagagaaagttcaaactcagttttatactggttcggccacacccttgtacctacgtccagtccctaagcaacccgcttgagagttctactatcttgtgaaaaccctttacaagatctgaaccacacaaggacaacccctcctttgtattcagatcgctntacaaaaagagaccctcagtcccttaatcactntccttaagta

SEQ ID NO: 186235 - DNA, 599 bp, Glycine max
  unsure (1)..(599): unsure at all n locations
gtccactctccggttgtgtagcgctgtgatatagttgtgatgtctcatgtgacgtgcttgtctcgctgcgaccgctcagctcaccgctgtggacatgtttgcctgttcttagcgcacttggcatctacgctgcgctggcaatttcggngtgttnttgttatacgccagaatcggaactccgtgtgaaaagttatgaccattcgaatttctcgagaccttccggagtacaattttgatcggctggatatattatgcgtctgaatgggacctccgagtgaaacattatgaccatttgaacttctcgtgaactttccggtgtacaatgtcgagcatctctctgtgtgatgccccgtaatcggtcatgcgagttaaaagttatgaccactggagattcttaagagcgttccgctggtcaatctcgcgaggcttgatgtgtgttgcgcctgacatgagactccgcgcgataaggtatggccatttgaatatttcgagatcttgcgcagtcacgtatgagctctcaataattatgcgcctgatactgaccgncggtgagaagtgtcgccatttgagttctcaagacgctcggatgtcgactcccg

SEQ ID NO: 186236 - DNA, 438 bp, Glycine max
agctttgaaatcaaactttaccactgttaatcgattacaggaaactggtattcgattaccagagagtaaatactttggtaacttagaaaaatttgagaaaacttttcttgtaaaacaaaactgtgctatgtttggtttttgaaaaatctttttcaatacttcccttgtgaagtcttgaatcttgaaatcatcttctgttgaatcttgattcttcttgatgtcttttctttaatcttgatcttgaacttgttgactcaatcttgacatcattcttttgggctttttgtcatcaacaaaactacttaaatcatactgattcatcatcatgaagcttgcttctacagtccacttggcacatttgatggaaacatgtcttgaaaatcctgcaaaagagttttaacactagaaggcacttcaaaatcatcaaaagtgttagtg

SEQ ID NO: 186237 - DNA, 327 bp, Glycine max
tgagaaatccccaagagaaaaatgtccgattgattttccgctgtattttactaaaagatggtctttttattattatatgatcttttacctctttttgatttccaatgtgattacggcacgaccgaacggtcggaatttattttaaccgaagttaacggataatacaattcagacattcggtggaaatttattttatttttaagttaagcgagaaatgacttaagtcaaatggctgtagcacgtcaaaagggggtattataagtatatgaaatgagaataataatacacgaaacacactgtggaccaccatgggtacatagaatgaat

SEQ ID NO: 186238 - DNA, 222 bp, Glycine max
  unsure (1)..(222): unsure at all n locations
nagctagaacaaaggcttgattaagtgacgctattgctaatttcaaagttaaggtactatacctcattgcttaatcgcccaaaacaacacacataagcgaggtggctaccacactatgatcctctcacaaacctgatgacaagtccttatgggtggctcgcttatgcgtgcaatgtattgcgcttaagtgacgcatatcaacaacacccccacaatcatatt

SEQ ID NO: 186239 - DNA, 244 bp, Glycine max
ttcattaacagtcttagggcttggcggccacgctcaacaaagtacttttgacacctattgtacgttgatttcaccaatgctgttatgggaatgttgcgacgatcctttaaaaccttattgatacattctaagaggttcgttggcatgtggccatatcgacgaccttctctatcgtaagccatcgtccatttttcttttgagatgcgatcaatccatgttgctatggctggactcagttcacgac

SEQ ID NO: 186240 - DNA, 394 bp, Glycine max
agcttattaactgtactttataagatataaaagcatcattaaaaatataatgcccaattgtttagtaaacataaattagctagaattaaggtataacaacatttataaccaaccaaatagtgtttatatgttagttaaaaagttgattctgtcatacattaaaaaaaaaaaacctttgattgttataagaaatcattataaactttttaaaatttctcgattgaactatcttaccataaaaaaatgttatactaataatagcatattcctgtattaaagagaaaaaaattatgaaacatatagcaaatatgacaacttatttatttatagttaatggaacatttaaaatgttttcactatttagatacaaaatataaagattattcttaaattt

SEQ ID NO: 186241 - DNA, 327 bp, Glycine max
  unsure (1)..(327): unsure at all n locations
tggcggtcgggcgatggcgcaagacaattctccacatccataaatcacgtataacccaccatcccctgttgcccacctccaactgagctcacgtactcccacgtagcccttatcctcgttcctctcaacgctgggtccccatcaatcctcccaagcttccacaacatccaggtaattccacatccaatcatcatggactaacaaaatcaagcaaaacagggcaaaggcagaatactctgcccaaaacacaactcanaatcacaacttttcacatacaaataccccaataacatnttcttcgttccaattacgtaaccattggatcga

SEQ ID NO: 186242 - DNA, 327 bp, Glycine max
cataacagtggtcaagtggagcaatgccctcagtgtggtgccaagttatcctcagctactactttggtggaccatgtgcaaaaagttcacgagaggagtggcaaccgatctggagcgaaggttacaattgatgtttgtccaaaatgtagtataggatttcgagatcctgtggccctattggaacatgttgataacgatcacggtggaagttctacatcataggtatgagccgatattgattattgaatgaattatgacttgcagaaatttcatatttatcgctaattaacctggaacaatatagtttttataaacatgaatacattg

SEQ ID NO: 186243 - DNA, 288 bp, Glycine max
tgtttacctctacttttctgaatgtctcgaagatctctttctctgcctcttccatttttttgttggaaactgctcttggagggaatggaagatgagggatgtgctgcttctgcaaatcggaattaccagtggaagattcaccttgcacataaattgttagggaaatttttgtcatcacctttttctggagtagagtgaagtttggcaagttcatttgcagatgaagaaggtgctacaggttgaggtccatgacattgctttcccgacgtcaatgaaatggcactgaca

SEQ ID NO: 186244 - DNA, 401 bp, Glycine max
ctcggatgttcgattcatgcgcatatatatattgagacacttgatattgaataacaggaagcttctcgagaaattacaatggccataacttttcacaccgatgtccgattccggcgcataatatgtcgagacgctcgaaattgaacaacggaagctctcgagaaactccaatggccataacttctcactcggaggaccgattcaggcgcataatatatcgagacgctctgaattgaacaacggaagctctcgagaaatcaaacggtcataacttttcactcagaggggccattcaggcgcataatatatcgagacgctcgaaatgaacatcgaaagcttctagaaactcacatggtcataacttttcactcggaggtccaattatgcgcataatatatcga

SEQ ID NO: 186245 - DNA, 416 bp, Glycine max
  unsure (1)..(416): unsure at all n locations
agctntgcatccaataagatgttgctggcttttatatctctgtgaattattcttgttttggagttctcatgtagataaaccaatccttcagctgtcccgatgataatttcatatctattttcccagttcaattctttgcccttgtttttatcttccatgtataaattgagaaatattatatttagttcacattatgatgaattgataatcacttttagtgacccaaatgaggtgttataggtgaaaagggtagtcaagcgtactgcatcagttcagtaattaccaaaaatgtagcggtcaagacttcggttgggtagaaattcatatacaagcaggctttcaggtcctgaacaactgcatcctaacagtctgactagattcttgtgctccacgctactaattatgttgacttcatt

SEQ ID NO: 186246 - DNA, 581 bp, Glycine max
  unsure (1)..(581): unsure at all n locations
gcgcacgtactgcggggtatcaccgtaacgtgtgtgatggattcctagtgtcntaattcgcggtcaaaancggtgggcttgttcctcttcttgnaaccagctggaaaacgtgcaggttgcagtgcggtgntnttagcagagctgaacatatgatgtcctaagaggtgtcggaaggaacacaatgctaatcgtcattctgcgtgacgaacactccctggatagtgcaagacacatgaccaattcgattgcttgcagctntaccaccagactaaacggttgatggtaatcattagcatacttgtggtggtagcctcttgcaacaatgtgagctttgtattgggaattataaccatcagtgatacattctagtcagaagacccatttgttcttcatgacattgagattaggctatggagggacangtgtncaagttccattatcaatgaacgcatcgaattcttcggacatggcttctttacacttaaagtggtgcatggcttgtggacacatgttggctcactggacaagaacgagatatttggaggtaagtgacttgtgtggttggaattaattctagaggg

SEQ ID NO: 186247 - DNA, 289 bp, Glycine max
agcttataagaacaaaattgcctcaatcatttccaaatatgcatgtgaattaggaagcatcaacaagaatcaagccaaggctattgtgcaagcaatcaatggggaaaaacacaccaaatgattatgatgatggatggctcacattctcacaaaggtaaacttatcacttccaaattgagctctcaaaactatcatgacatgtagaggaaaaacaaggacttcacatcacagaatgtcaagagacttttattttcaaaaaattacccatgtcttgaacatatcctataat

SEQ ID NO: 186248 - DNA, 258 bp, Glycine max
ctatcaaactttcctcaatagcaaattattctcctctttggtatgttgcgtttgtgttaggtgctgattggattccttttgcttattgattcattgttaaattactggttattacgtaacgctttggattatgtaatgaaggtgtgaataatgactcctctatacaaagacatcaatactataagaatgttaattgtttaacatataactatcattacaattaataaagtaaagtacacagagaaatgtcatgaagta

SEQ ID NO: 186249 - DNA, 158 bp, Glycine max
gcccgagcgccctacctattcactctgacgaccgattaacgcgcaatttctgactcatcactccatatacacctattacctctctacaaccacacttccaagaccttttatctgcttacaaacaagccctccacttccatacccccaatctgacctcc

SEQ ID NO: 186250 - DNA, 431 bp, Glycine max
agcttcgaccaagagaggatggtccatttcatgtacttgaaaggataaatgacaatgtgtacaagattgaattgaccggtgagtataatgtgagtactacatttaatgtgtcagacttaactctttttgatgtagatggagaagccaatttgaggacaaatccttttgaagagggagagagtgatgaggacaaggcaaggaacctttagaaggacttggaggacctatggcaagggctagaacaaagaatgccaaggaagttcttcaacaagtgttaaccatgctatttgaatttacgcccaagttacaaatggagaagcttcggattgttaattgcaccatgttccaagaagagtagagggtgccacttttgttgagtggttttattagcattctgttagttgaaataaaggctcaaacttgtgttaaag

SEQ ID NO: 186251 - DNA, 370 bp, Glycine max
  unsure (1)..(370): unsure at all n locations
atattttgagaaaatttagagatggtttataaccataccaagcctcatatggtgtctgatccttaactgcttttgagaggagtctattttgcaagaaaatggctgtatgagctgcttctgcccaaaacttcttgggtagatttttttcatgcaacatgcacctagtcatctctaggatgtatttgtttctcctttcactcaccccattctgttgtggagtatanggagtggttagctgatgctcaatgtcagcttcctcacaaaactgattgaattttattgaggtgtactccttgccattatcagatcttagaatctgaatttgcttgccactgtgattntctactgcctttttgaattccaaaaagct

SEQ ID NO: 186252 - DNA, 440 bp, Glycine max
agctttgagaagtgttgtctttcaccttctcggtaagccaatttggtggcatagagagcttccactaagcgcaacactcataggctaagtgcgaggaagactctagaagaagatgagccatacaggttcgctaagcgtaccgcttcatctcactaagcacaccgtttcaattcatatgctaagtgagaaaggcacgcgctaagcaaaaattcactaatgtgcgctaagcgcacgagcacgaacaaggccacctatttaagccttaaatcagattttagagagggagtttggactgggattcagagctttgcatgtctagagattctagagagagaaaggtccaagttccagagagttttgagagattctgctgtgtgaagatctgcagagactagagcttgaagcaagagccgatttgagagcttgagatgagttagtga

SEQ ID NO: 186253 - DNA, 389 bp, Glycine max
  unsure (1)..(389): unsure at all n locations
actcactgagaacaccaacaaattctgtgggcaacaattaagtacaaaaatgaatgcaacaaacgaagacaatttaattgccagctatgcaagctgattcagtcggcaacacaatcaattatttcacaaagtaagctacagtgtatccatgccgactaaactaatttctgtcacaaccacttctaactaacaccatctagcctttcaaaaacacatgcgagaaaatccataattacaaaaccccgagatcagatcattgctcanagattccatcacaagagaaaattgggtggtaggaaaaaagtttacatttactggccaatatatttgtaccatccaattcaaacanatattactagattagacacacaccatatatcatagtcatg

SEQ ID NO: 186254 - DNA, 363 bp, Glycine max
ttatgttaagattgatctagctgatcattcatatgcagaacagattctgtacgtcggcagagtcattacctcaacaaaataattcattcttgcatctcctcccctgtatctgcgattcatgttatttctagttaattctaaattctgaatctatcagtatcagactacacttaatcttcccttgtttttcattattatttttattggagttgtacattggaagcagacgacttgaggttacgaacactctctatattgcattcttcctcacactcgaaatcaacgtatgcaaaacccttgagattggtgccttgtcttctgttccagtaacaccttggactatatcatttatgccaggaatcc

SEQ ID NO: 186255 - DNA, 441 bp, Glycine max
agctcgatgaagctaagggaaactgagtaccatatcgttgtaacaagttttcttatatctaccttttggacatgtcttaggtttatgctcttttatttagcagaaatttgttttcaatttcagctttgaataattgtaattacatcttttgaatttagaaatgaattacttattatttatttccatatgttggatggagagtttagaaatggaaaactcatttgagtgtaacattctgtttttttaaataaataaaaaagagttttattaaaaataaataattttaggaaaaaatagtgtttttgtaattaaataaatgactgaaaaaatgattttattaattaaaataataagttttgaaataaataaaataaacatatgttttagaaaataaagagatattttaatgggatatttatttatttatttaaaagaagttaa

SEQ ID NO: 186256 - DNA, 363 bp, Glycine max
gtaaagcaaacaacttggaatatgtgcatgcatgagtgggcctctgcttagaattatcgaaaaaaagcaacgtaatctgatttttcttcgccaacacacgtaaaggatcgacctagacttttatattgtttcgttagtgggaaattacacgggggtagtgcgggtgggtgggtgaaataagaaaataaagagggtaaaatctccttttactcttttactttcctttgtttaatttctgaacattattttcttacattccgtttatgtttagaagaactagatatggaggagaaatacttgagatgttaaacaaacttaattaattatgattaacttatacaaacgagcttataaatgattata

SEQ ID NO: 186257 - DNA, 433 bp, Glycine max
agcttcctcttttcttcggttgcgcggggcggtccttacatggacaaaactattggttgtgtcgcgatgttgggttgaggcaacgtgctgggtgccggcccttcggggatcgggggatagaactcgacatccctttgtggacctcttcgggctgttgaggaggctctctttcaaggacgggagaagtaatatggcccgcatcgtcttgcaagacgggtggtgagtagttgggcggcaatccataagggtaagccgctcgattgtatcccaggtgagggctgccatcatgccccagtgtgtcccttccccgtcctactatgtttgagggaggatggtgcgcagttgccaagagagttgggtctgcttcggcagccgaactgacagcggtagcggtggccgcgttcttcttcatgagctgcctcattcctaacat

SEQ ID NO: 186258 - DNA, 297 bp, Glycine max
ggatccttaagcacctgcggcatgcactatatgccatgactcttgcgcgcttgcaggataattgaatggcaaattatcacaataactaataacctatttatgatgatggttacttaggctgtgaaattttgaagccgtcaatatattgtgagtttgcccaaccaacttaacacttatttacaatgatgatgctatatttgatgaagaccttctaatttttaaaactcgtataatgcctggtggtgctaagtcttatttatacagaactacttacttttgatattcaacttacttata

SEQ ID NO: 186259 - DNA, 236 bp, Glycine max
attggatgaaataaaatctggataggataagatatgataaaataaaattgtctgttctcttcaagaccaagcccagttgcttataattctcctgaaattaattaataacacaaaattagtcaagtaggcccaaatgataaaactgcataattaatttgacaattaaggcctaaccaataattaaaatggtgacaaaaagggttaagaaatatgagaaaataatgatacatcaatga

SEQ ID NO: 186260 - DNA, 410 bp, Glycine max
  unsure (1)..(410): unsure at all n locations
agctnttcatttccgaggcaaaaatatttgatggcccttcagcatatcctattattgccaactgggggattcgaggatgaattatttgtctgaattggtatagcacaagtaaggtttagaatctttatataagaaaataatagaaaacaatcagtttatgcactaataatataaaaaatatatgttctttcgtctaatcataaatggtcataaaagtttgctattcttttttataattatcttaaaaaacatgcaataattattttaaattagtactcctggcgtagaaattaaattcataatatttttatcttaaaagtaatagtaacgaagacttaaatatantttttctttactttgctaaataaatttgaattaagttgtataatatattctcttatttaactcta

SEQ ID NO: 186261 - DNA, 364 bp, Glycine max
actttcattacttacaaattccatagccgggaagtaggcggtggctgcatatctcactcgttttggtcaccaaattatgaacatatggatgaattaacagttaaccattgaaatgacgaaccgcaatgtataatgcaacctactctcaagggattagtttctgtagttagtttatggagtggccagttaaaaaattgggatcggtatacgaaggtaactaaacaagaacggcaatgcatgatcctgaaaatttccaaagatcattattgacgcttcctttgatacagtgaataaccaacgagggcagacatcagaaatgtccatagaacctgcccacagtatcaaaataattaaaacaagataa

SEQ ID NO: 186262 - DNA, 424 bp, Glycine max
agcttgtcaagcattgttttaagtccaaagtcatcaagtacagcaccaaatttattcattgtattcggacgcatgatccgaaatttagtttcattcacccacttctcaaaattttcaatctagggagaccacaaatacattttaacatacacaaaacataagtatacaaacagccatctgcttacaatttccaatttaaaagatgagatactgcttgtatcataggtaatgatagttaaaatgatgaagtacctcagatagcaataactcacaaaagtgggtctgaaatatgtcaaatataaaaatgcctggagagggctcagacactatacttctaatactttgttccgtattatcattaattgctctcagaaatgtggggacaaagaatgtagcaggatccacagagtacaactcccgatgt

SEQ ID NO: 186263 - DNA, 338 bp, Glycine max
tccgaacattaatctagatgctctcactctactactgacttgttacaagattattattaataaatgaagatcaaagtatataataaaacagaatcaatccggactcaagataaaaccttatctcacgcaagacacaatcattatagtcttatagactgatgcttcatatagaaacatgaaagataaaaagggtgcgcttataatttataagaatatcttgtgtccaccggtgcatcaaaaaactaaaattctgaatatattatagcctatattacgtatctaatacaatgatcgcgcaagattgcagagtatagatgcttttataattatatttcagt

SEQ ID NO: 186264 - DNA, 415 bp, Glycine max
agcttcggaagaaagtgatgaggtacaagccctataggcagagcttgaaagagcctgcgtagtcgaagagaagttcaagtccatagccatcaaagtctgaaaagagtatgatgaactaagggatgtcaatatggccaccgatgaagccttggaatgagaaaccaagaaggcccgaaaggaagaacacgaccaaagcaaagttttgaggggctttatagggcagcaatagtgagctcaagctccgaagaggtgaaaggaatcatcacgggtcaaaggcatgatcttgaaggacgagctaaaggtttgccttatgtcgaaaagaaatttgtcccaacagttaagcgagactgaagggaatatgtgggccgtcatcgatgagtgcaaagagaagctaaatctagcggcgactcacgag

SEQ ID NO: 186265 - DNA, 391 bp, Glycine max
  unsure (1)..(391): unsure at all n locations
aagctacctagtctataaatagaagcatgtgtaacactcgttgtaactctgatgaatgaaagttntatgagatacacttcanagntccacttctttccctcttttattccttcaatttcgtgctccccccttctctctttcttttcctccattaaagcatcctcttcaagcttcttatccaaggcaattcttggtggtgaagctccttcttccttggcttattccctaatggatggtgcctgccctatcctcttctactttgcctttcgctgcatctccatgatgaaaaatcaccattgaaggacctcattgaagatcaaagatccagcctccatataagctccacaagcaagcttgcatcaagttatgaccatttgaacttctcgagatc

SEQ ID NO: 186266 - DNA, 402 bp, Glycine max
  unsure (1)..(402): unsure at all n locations
ggcaggaccgaatgtccaccgagttttttcacttaanaaggagaacatgctttagcaatgaaaaataaatcattcacgagagcaccatattttagagaaacaatatactcatgccaaaagtaattttccttgtaatcgaaaatgaagggcaggatgtcaacatttagcttttaaatgaacattcaggggaaacgtcgggtcaaactgaaactaggaataaaatcactcatagtgtataaaaactcacacaggtaagtgttttaccctaatcccaaaccatagctgcaccatgactttattttgcacatgatttcctatcgaaccaaaagatcacacgcacaatcatggatcaataggattttctcgagggtagtgtttttggagaggaagttgggtgtttcg

SEQ ID NO: 186267 - DNA, 204 bp, Glycine max
agcttgagtctcatattaagtataaaaatataatttaagcaacatataagtaaaaagacgcataaacctaatgttctatagttttagattaaagcgtaatgtcacttcacttgtgagatgtgttcatggtctatcgacataaacctccttagtgtttatccatattcaatgcacaacactcggtataaaacccatagttcgact

SEQ ID NO: 186268 - DNA, 253 bp, Glycine max
acatctttttacttgattcttgaatggctgtcaaaggcctatatatgtgtgacttgggacacgaatttgctaagagtttttcataacaaaatagtcttatcctcttaaaaagcaaagtcgtttatcctcttacaaattccttggccaaattacttgtgattcaataagggaatatttgagtgctcaaatggttcaatctatctctttaaagagagattacttcttttcttcttcttcattctgaaaagggatc

SEQ ID NO: 186269 - DNA, 377 bp, Glycine max
agcttgaagaagttatgacgatagttttggcttttacatgccccacttccttgagtggcatttatattggttgttaccttggttattgcgtcttagtaaatttaatatctgtattgcatcatgcatcatcatggttagtgtgaagaaacatttctaagttagaaaagtttcttcagaggcaaaaactttgttttaatcgactacagtgttgtcttaatcgattacaacacgctatcagaagcttgtagagttcagtctcatatcggtttaatcgattacagtactctcataatcgattacactgttgtttgagatgatgactcgattattcaggagtctgtgctctaatcacatacttctctctcactttagtgttc

SEQ ID NO: 186270 - DNA, 286 bp, Glycine max
cagccctcctggtaattcgagatcacttgaaattagtgaagagaattgtttccgtgaagaaaatccaagccgagacgcttccgtaacgtttccgtaacgttttcgtgggtgatttcgcgaagattttcaaccgttcttcgacgttcttcggtcgctcgtcggcattcttcagtcttcaaccaggaaggttccgacatcgaacttttcaattcattctatgtacccttagtggtcctcatttgttttcacgtgcgtttattttcatttcatatactttccggacccc

SEQ ID NO: 186271 - DNA, 442 bp, Glycine max
agcttaaatacttatgtcttgctagttaataatataataaataaaaacttaaagacttaagtaactttgaataatgacaatcattttctagctcgagactaatattaatttaattccccaatgaaatgcactttttccgagaattaattaactaaaattgtatatgcagttttttttttcctttctcaaattaagcatgtacaacagaaaaataatcaaagtgcacccaaaaatatttaagcatatctgaatcgaatataaaactaatatagagataggaacccaaaaggagcagagaatgtgtttagtggctcatattttttgtccatcatatcaatatatattatttggccatgattatatgacataccaccgactagataacgagaaagagaaaggtcgctactatactacttatcataacctaattataagatttcac

SEQ ID NO: 186272 - DNA, 388 bp, Glycine max
acagcaaaatcagtcacaacagaataattatgacctctccagcaacaggtacaatcccgggtggaggaatcatcccaaccttagatggtcgaatccttcacaacaacagcaccaacaacaacaacaaccttattttcagaatgcttctagcccaagtagaccatacgctcctccaccaatccagcagcaatagccccagaaacagcaaacagttgaggctcctccgcaaccttcccttgaagaacttgtgaggcatgactatgcaaaacatgcaatttcaacaagagactagagccttcattcagagcttaactaatcagatggaacaattggctacacagttaaatcaacaacagtcccagaattctgacagattaccttctcaatc

SEQ ID NO: 186273 - DNA, 442 bp, Glycine max
  unsure (1)..(442): unsure at all n locations
agcttgtaggattatggggtacccatcacatgtggtactaggtggcggtcgggcgatggtgcacaacaagttttccacatccacaaagcgcgcataaacccaccatcccctgttgcccacctccatctgagctcacgtactcccacgtagcccatatcctcgtttctctcaacaccgggtccccatcaatcctctcaagcttccacaaaatccaagcaaaacaacattcaaacctcacaagctatcacagccaagcaaaacagagcataggcagaaaactctgccaaaacaccaaccaaatcacagcttttctcacttaagaccccagtaacaattccttcgttccggttcattaaccgttggatcgactccaaaattttactggaagtctctaatacttaagcctacattntgaccggtgggatctactagcaaacatcca

SEQ ID NO: 186274 - DNA, 263 bp, Glycine max
aacacactatcttgttatcacacacatgatttagttcatatatgtcattttacaaaacaaataagcttgttatgaaaactttcttatttatgcattatgatatctatcattttgatgctcaaaacgttctaatgcaaatgcaatatatatgacaaccaataagtttatgtaaaaatgaagggaaaaggaggattcaacacatggatttttatactatttcaccccaaccttggactacgtctagtcctcacccaaactaatga

SEQ ID NO: 186275 - DNA, 429 bp, Glycine max
agcttgaaataaaaaatggagagagagtttgggcaattcttgaagcttttgcatgtttagaggttctagagagagaaaggtccaagttctagagagttttgagagcttttgctctaagaagactggcagagaattgagtgagaagaggaagccatcctaagagcatgagatgagtctatgagtgattgtgaggttctagaggtggaggagacatccccactacttgtatttcttcaatccttcttttttctcttctctttgttgtaaaggaagcttcccagatatggagagctaaatcctctgttggttcttccttgtaggtacttgatgtaaatacttgtatatctatttaatgatgttttatgtgttctctgtgctatcagtatgtcattttagtgtgctttttgacttgatcatgtagatgcatgc

SEQ ID NO: 186276 - DNA, 245 bp, Glycine max
  unsure (1)..(245): unsure at all n locations
attggtgatagatgtgcttataattgaactntatcatccatatcatcattggactcaacttttttcttcttcatgatgggaataacctcaggtcttctaaagcttctttcaaactattggatggtggaattctattctcgaatgggaggaaactcaatggggtgaggatcatgagcaacaatgggatcagcttgctcgttcgctggatgcttggtcctttgtgcaccctttttcactctcttgct

SEQ ID NO: 186277 - DNA, 439 bp, Glycine max
agcttaatcccatgaaaattgagggtaggagatttgccctggattcagctagggactactttccttagcacccttatgttcaatatgttggataaataaaaatagtttttttgttttgctatatgcatgagagtttcaatgctagttgtcacacaaatgtattacgcaaatggataaataaaagatttttacttacaaatggatggatagtgtagataaattaatgaaattttaagatactattagtatttaatttgaatttagtgtttactcatattttaattgccattgtcggcttctacaccctcctcttcgccttctgatacactgagtttgtcgtcgacatgcccgacaccggcgacgccttcagctacctccgcgtcacctttggtccgtgctttctaatgacaccgtcgccagaggcttgacgacgtaccta

SEQ ID NO: 186278 - DNA, 315 bp, Glycine max
  unsure (1)..(315): unsure at all n locations
aaacaaaaaaaggtacatgaaccttacaattccaccatctgtgtttcttccccccttncaatcctacattggatctcatgacaaccttgagacatcttacatgacattcgcaccatgtttcaaaatataatgcttcagttggaataaccataaaatgtgataataccaaagattccatataattactagaatagccatttgaagatccctcgtcaggatacttcgaattcgaagtggaaaatctcacattttccagatcagctcgtggcntccccaaaacccttccatctcacttctctctcattcggccaatta

SEQ ID NO: 186279 - DNA, 427 bp, Glycine max
  unsure (1)..(427): unsure at all n locations
agctntcattttaatcacccacccaaagaaaatccctcacaaccaaataaccacaaaggttggaaaggttgcagagtcggaaaggaaacaattattatttcacttcgataaagaaaaggctcccttacaaaaataggaaataaaagaacaattattattcaattattgttacctgaaaataatgcatagttggaaaggacacagtagcctccgtgaggactgtgacgaggaggtccacggattcagatgaatagacacaaacgcacaccttcgacggacaagggctcgtggagtctgaacaggccgttttgaaattaattattagtggagtggattcaagttaggtattaataatctcatccctgacctcgaacccaactttgcctgttggggaaaatttgaacccaaccctgatcctggtcaactt

SEQ ID NO: 186280 - DNA, 364 bp, Glycine max
tagctttgcagcaaatgccactctactctaaattgttgaaagatatgttaacaaggaagcataaatatattcatcaggaaaacatcatagcggaaggatgttgcaatgctgtgatgaaaaagatccttccacccaagcataaagatcttggtagtgtaactattccttgctcaatcggagaagtcaatgtgggaaaatatcttcttgacctgggagccagtctcaatttgatgccactatctatgtgcacaagacttggagagttggatatactgcccactcgaatgactatacaattagttgaccgctccattaccacgccatatgcagtaattgaagatgtgctggtcatagtataacattt

SEQ ID NO: 186281 - DNA, 241 bp, Glycine max
aatgcacccatatacaatcaaggcaccttcgttacctagattttttacatgtacttacaaggtgtatttgttacctacatcacacgcatttcctttgctcaatttacatacatgcatactcaaagcactgtggctatcaaaaattgcatacgtgcacattctggtatttgtaatacctatacatacacaaacttcatgatgaagcttgactatctacacaataaggtgctacatttcatgc

SEQ ID NO: 186282 - DNA, 426 bp, Glycine max
agcttgtgggaatttgtgatagtgattctgccggagatgttgatgatagaaaaagtactaccggatttgtattttttatgggtgattgtgtttttacatggagttctaagaagcaaggcattgtgacactttctacttgtgaagccgagtatgtagctgcaacttcttgcacatgtcatgccatttggctaagaagattgttggaggaacttcagttgttgcaaaaggaaagcacaaagatctatgttgataatagatctgcacaagagcttgccaagaatccggtgttccatgaacgaagtaagcatatagatacaaggtatcatttcattagagagtgcattaccaagaaagaagtagaattgactcatgtgaaaactcaagatcaagttgcggatattttcaccaagcctctcacatttgaag

SEQ ID NO: 186283 - DNA, 365 bp, Glycine max
gagagtttccgatgtttaatttcgagcgcatcgatatattataagcctgaatcggacatccgtgtgacaagttatgaccatgtgaatttctagagaggttccgatgtttaatttcgagtgtatcgatatattataaacctgaatcggaccttagtggtaaaagatatgaccatttgaattcgcgagagcttctggtgatcaattcgagtgtcactatatgtgaagcgccaaaatcggacattcgagttaaatgttatgagcattcgaatatctcaagagctaccaattgttaatactgagcggctgatatgtgatatgcctgaatggacatccgtgtaaaagtatgacatttgaattctcaagag

SEQ ID NO: 186284 - DNA, 431 bp, Glycine max
  unsure (1)..(431): unsure at all n locations
agctgtcttgaganaactttcttgagaagcttctttgagaaaacttccttgagaagctagagcttagctacacatacccctctcataactaagctcacctccttgagaaacttccttaagaagattcctaaagaagctagagcttagctacacatacctctctaatagctaagctcacctccttgagatgggaagctagagcttagctatacacaccctataatagctaagctcacccccatgaaaaaaaacatgaaaatacaaaaaaaaaagtccttactacaaagactactcaaaatgccccaaaatacaaggctaaaaccctatactactagaatggccaaaatacaaagcccagacgaaggaaaaacctattcttaatattacaaagataagcgggctcatacttagcccatgggctcgaaatctac

SEQ ID NO: 186285 - DNA, 598 bp, Glycine max
  unsure (1)..(598): unsure at all n locations
cctccgcgatccacaatctcgggtgtgttagctaattactgtatcgagttaacanacgtcacgccgcaacatactacgtggnangnngttgaaccatctatcagcgacactatagacactcacgctcctaactatagaacggcctgacatgacccctgaagcgttgcgttggttcaacgataaataggatgccccacattatttgcatgacacacatgcaaaaatgatgatttggaaactttatgcactacaggtcatgcatgcacctatgcgaacactcaagagtcaaatatatatagtcatgtgaatgctgggctcatgattgctttcctctatattaaccaaacctatgattacaaaagatattcctttatcactctatgcattcattcgagaccattctgggcgtccggggaaatatcacaacattcacccttcacgtgtcgacgcagatttcgaagattaggactatcaatgaactctttacctaaatgctggaagacgttattatcaaacaagctgttcacacctagacaactattatgactttctgtacccttctcttacttaccctcttccctatttgccgctattctan

SEQ ID NO: 186286 - DNA, 427 bp, Glycine max
  unsure (1)..(427): unsure at all n locations
agctcgcctcanagaggttcaggaaggacaaggcggccgaaggaactagttccgccccggagtatgacagtcaccgctttaggagcgttgtacaccagcagcgcttcgaagccatcaagggatggtcgtttctccgggagcgacgcgtccagctcagggacgacgagtatactgattttcaggaggaaatatggcgccggcggtgggcaccactgattactcctatggccaagtttgatccagaaatagtccttgaattttatgccaatgcttggccaacagaggagggcgtgcgtgacatgagatcctgcgttaggggtcagtggatcccgttcgatgccgacgctatcagccagctcctgggatatccgatggtgttggaagagggccacgaatgcgagtatggccagaggaggaaccggtctga

SEQ ID NO: 186287 - DNA, 626 bp, Glycine max
  unsure (1)..(626): unsure at all n locations
ccactactacccaaccnactgtattagctantgtaataaactactgttatgcgtnctntattgtatctactctactcgcctaactcacacctacacacatatgnantatatgaaccantctttataacccctcgtcattacgcntcgtatatngacganccttcagtcgtataactaatagtataaagaataacttaagaaagcatattaattgaagaaagaaacgcttattaatgaaacaagactaatngtagaaagcatggcttattaaagaagcacaatcattaaagaaagggtatctaaatatagttaccactaaggatacatngatatttggttaacttgttatacatctctattcttaatgcaatctactattttagcttttgcaaaaggacttgtgagagacaataaattaattaagctctttctggtggggaagcaaattagagtcagagtatcctactnaatgttggttgaattataatatttttaataaaaatatatcttcacatttcatctaaaatgaccctcggaagagcaatcacaacatcttaataatttcttctacaatatgagggatttctcatcttttatctccataattaaattaaatctaatcaccg

SEQ ID NO: 186288 - DNA, 428 bp, Glycine max
  unsure (1)..(428): unsure at all n locations
agctntaatcttcattactcaatagtttaattattttgtttccattttggattatatgtcctcaaattttaaaaactgtgctataaagacatgcatctctgctgaggacaaattgtatcccaataaatgttactatttatgtaaattactaagaaaaaggaaaatgcatatttctttcctagtggcaagatatgaccattgtatactcattatatacatctgtcatgagtaataaaaagaaaagaagagagaaaatataactaatactaacaactctatcttcttgatactatcttttcaacgtttttttattaattagttgtttttttaaattaaaatgaatcttgtatctaaattagaagagagaatcaataaatgataagattaaaaaaaatttggtaatttttaataaattttaaccaatcata

SEQ ID NO: 186289 - DNA, 349 bp, Glycine max
  unsure (1)..(349): unsure at all n locations
gagacaaggaggancnnngagtctctgagcaccctgcgactctcgaaacactcgcaatgaagccgaaagagaaagagtgtatcatcaatgaccttgtgaagttcaagagtgggaaaacttattatgccaaaattgggaaagcttggaaaagaaggtacttgctgtatggccctccaagtaccgggaaatctaccatggtcgcggctatggctaatttcatgaactatgatgtgtatgatcttgaatagacagcggggaaggacaattcagatntgagacagctgttgattaacacttcaagtaagtcgattatggtgattgaagacattgattgctcccttgatctcac

SEQ ID NO: 186290 - DNA, 374 bp, Glycine max
agcttcaacctagaggagacggaccattccaagtgttggagaagatcaacgacaatgcctacaagattgacttgcctagtgagtataatgtaagtgccactttcaatgtgtctgatctatctctttttgatgcagatggaggagccttggatttgaggacaaatccttttcaagaaggagggagtgatgaggacataaccaagggcaaggaccatgaagcacttgaaggtcccatgaccagaggcagacttaaacaagcccaacacgtcatagagacaaggctggtcatttgtatagctgccattgatgatgattgaacgcccaagtggagaaagatgaacgcccagaggcagacgcactaccaagactactaa

SEQ ID NO: 186291 - DNA, 280 bp, Glycine max
ctactgcatcaatattcccagggttcactctgattgctccacttaaagatggggaacagccaatgaattcagacacaactaacatgcttttcttcttatgggaggaagctagacccaaaactttatccaaggtttcatttccttgacgactgatgatatattcatacggtatgagattcattccatcccttactgcagtgactaaacaacactccgcgacaacatagtaagcaactctctcataaaacttgagaggctcctcgatcagaatgacgggatc

SEQ ID NO: 186292 - DNA, 323 bp, Glycine max
  unsure (1)..(323): unsure at all n locations
agcttatgcatggaaaatgtaattatgaaattgagatgcccgaagaaacaccatttcctagttaaccatgcattaggtaccatgttcaattattttgtttttaagtgaaatgggtttatgatcccaacatggttggctcgtggtgcctaacacatgaaactaaaaatgtagtgtgaagtttcacgcttcccnctattttgttattcgtttgtaaaggaaaacacaaggatgagcatacatgaaaacaaatggtatgcaattttgcagatcataaagtttgttgaacgcatatgcatgatgatgccatgactcatgcaaaatgt

SEQ ID NO: 186293 - DNA, 439 bp, Glycine max
agcttatataagtaatgggggagtttatcagataattatatatcaggtaaaattttatattatttttcttatgtaaatatataatacattattttcttgtcacggataaaaaaataacattttcttgcccccactaaacaatttttctagattcgtccatactcatggttgcctttgtttatgtttctttaattattttgttggtatacatttataaatcattgattgatatttaatgactatggctggcatttttttttttaaatcattcctataataaatacaaatattaatttattcttggaatatcttaatgtagtaaatatgtattttgtgtcagtttggccgatgctaactcgagtgaaaatattctttaaagtgtattaagtgtgttggagttaggggtaggaataggccaggtcaggctttaaaaggcctg

SEQ ID NO: 186294 - DNA, 313 bp, Glycine max
  unsure (1)..(313): unsure at all n locations
cgagcggnttatatcgagacgctcgaaattaaccaacggaagctctcgagaaattcatatggtcataacttgcaactcggaggtccgattcacgcgcataatatatcgagacgctcgaaatagaacaacggaagctctcgagaaattcaaatggtcataacttttcacacggaggtccgattcaggcgcatcacatatcgagaccctctaaatntaacaacggaagctctcgagaaataccaatggtcataactnttcactgggacgtccgattcatgcgcataatacattgagacgctccaaattgaacaac

SEQ ID NO: 186295 - DNA, 368 bp, Glycine max
  unsure (1)..(368): unsure at all n locations
agctntgcgttggatggtaggaatgaagaattgacaatggatacttcaaggggatcagtctcgtcaagacagcaagaagaaggattgcgtgaaggttcaacacaagacatgtattcatccacgccttctccaccttcttcaaatgcaaggagaagaaaaggcattcctcatagggcaccttttggctcctaattaatcccaatggttattccttctatataccctccaagttggtacatattcaatattcagcatcatctacatttttttttacttgtaatatacaaccctctctggtgggaagcctcgtgattataaaaattttcaataaaaataatgaaaaagaataggagcctttggaggggggg

SEQ ID NO: 186296 - DNA, 299 bp, Glycine max
ttgagtttgaatatatcgagacgcttgtgatggaaaacagaagctcgtagaaaatgcaaatcgcaataacttttaactcggatgatcgattgagtcccgtaatatatcgagacactcgaaattgaaagcagaagctctgagcaaattcaaacgacaataactcttgactcggatatccgattgagtcatttaataattcgagacgctcaaaattgaatacagaagctctatgcaaattcaaatgacaataacttttgacttcggatgtccgaatgagtcattatataatttgagacgct

SEQ ID NO: 186297 - DNA, 435 bp, Glycine max
agcttctcaaggaagttctctcaagacagcttctcaaggaagctacctagtctataaatagaagcatgtgtaacacttgttgtaactttgatgaatgaaagtcttatgagacacacttcaaagttctacttctccccctcttttattccttcaatttcgtgctcccccctctctctttctctccctctttcttttcctccattgaagcatccttccaagcttcttatccaaggctcatcttggtggtgaagctccttcttccatggcttattccctagtggatggcgcctcccttctcctcttctcctttgccttccgctgcatctccatggtgaaaaatcaccattgaaggacctcattgaagctcaaagatccagcctccatagaagctccacaagcaagcttccatcaagtggtaatcagagcacaagagct

SEQ ID NO: 186298 - DNA, 437 bp, Glycine max
  unsure (1)..(437): unsure at all n locations
agcttggcattgatagagtacaaaatttatgaaaccgatggattggcagatgcttcaactaaaactaaaactttggagtatctgattagagctgatgctagtaaagtgaacaactttaggattctggaggaggagggcatgcatatgtcgaccaacacgaggatgaaagcttcaaatttgcttatgcaactgatctcatgtggctcaatattagtgaaaaaccatagttttggccttattccttcctataagcccatgttttatagttcaaaatgtcctttcttttgtgttgggggagtttgattgcttagtgattgagcatttgtagtttaatatttttctattctttttatctcaattgacatctctttgacttttattttttcaccttaactcagttntggtctaaggcaaatgattgaggttaattgagaact

SEQ ID NO: 186299 - DNA, 436 bp, Glycine max
  unsure (1)..(436): unsure at all n locations
tcccttcaactatccattgtaagatacttttcctgaacaggaagaatgagcacttggattggatggaaaaagaacaccagttctcaaagacttcccatcagacacactattgctcccaatctaaatagtctaatctttgagcataggccaactaaaaggaagggttatccctctgatgccaccatatggagaggcatggaagcaaaactttttaagatgtccttctccactccactagacctccaacaacttcttaagtgatgtacttgatgaatgtagttcttccttaagacaaaacaaagattgaagaaattnttctgccagaggatatcactttggaggatcctgaatatagtcaaagggtttcagaatgggagaaaactgactatgaacctgaactgagaatgaagttgtcatgcctagcattttcttatgt

SEQ ID NO: 186300 - DNA, 441 bp, Glycine max
agctctagaaccacaaacaaaaaattatttgttattagctttttgtttaacaaaaaatatgacatatgttaataaaaaccatttcatacactctgcaaaaccatttcatacagtatttgtagtgtactctcaatggaaatacacttatgagataacctctaatatttttttatcagtgaaaaactctataaaaaaaggtaaaaccaaaagacagaaactccaaggaccttataagtccaatcagctgagcccactgagcatcaacagtactccattgatccccctcaataaccaaaaaaatatgaaatacggcatgtgagaatagggtcagagaggataacattagcacagaccatgatatcaaagatggttgacagacacgaaatcttgtttgcaaacaagataaaagattactacataaataaaagacataactagtta

SEQ ID NO: 186301 - DNA, 449 bp, Glycine max
  unsure (1)..(449): unsure at all n locations
cacaccgcggcaagacacggngacagcccaaaattctgttgtccncaacatgcttcatttgctacataaaaaacatggctcggagaaatatccgagcacatgtgagacaaggtttgcttaggatccactgatatgggaatacttatgacgaattggagcaagcgctacaaactttatttgtcctaccttcagtgccatccactgtggttgcgccatctatacccattcctttagtacgcattatggatcgcataccagaacttgttgcagagatgttaacgctctagcatcagtggtgtaaaaatgcttctatagtaccccactacaatgttgggcttcaaccaccttaagaatgatgcatgtcaccctcttattgtccactgtttgtactgaacagtggatatctgcggccattgcctatgctttagctgataagacattgagccccc

SEQ ID NO: 186302 - DNA, 225 bp, Glycine max
agcttgctctaaatatacattgatgttcgcatttatgagaacaggtcgtatgccatttttgttataagagtagcgtcccactggtaaaactttacaaatgtttgccttcgcatgaaacggccccgaggaatcttgcctaaacgaggtccatgaaggacaaggctgccgaaggaacttaattcgctccggagtatgacagtcaccgattcaggagcgctgtacacc

SEQ ID NO: 186303 - DNA, 407 bp, Glycine max
  unsure (1)..(407): unsure at all n locations
aaatataccgcatcataaaattttggagcaaattagctcataaaaaaaatccgcatcaaaacagccattatgattcactacttttaataacagcatattttgttgggggtggggcattattatctctagacaaatatttgcttattcatataatagtacagtgtcaaaatatgatccaaggattttgctgcatacttcagaaaccaggaatatcttatcttccttttctttatatttaccttataataaaatgtcttcttttaccatatctaagaaatccaaatgcaaaagaagatttatgtgtaattgccacttactntagtaaagactctcgccaagatgggttcaggtagaagctgtagttcagatccacatctttgagcgtagtactctcatcaatntctatc

SEQ ID NO: 186304 - DNA, 412 bp, Glycine max
agcttctgttttcaatttcgagcgtctcgatatattaccggactcaatcagacatccgagtataaagttattgtcatttgaattttgtgagagcttctatattcaattccgagcgtctttaattattaaatgactcaatcggacatttgagtgcaaagttactttcgcttgaatctgctcagagcttctgttttcaattttgagcgtctagatatattacgggactcaatcggacatccgagtaaaaagttattgtcatttgaatttggtaagagctcctgcattcaattttgagcgtctcaaattataaaatgactcaatcggacatccgagtcacaagttattgtcatttgaatttgcttagagcttctgcttcaattttgagcgtctcaaattattaaatgactcaatc

SEQ ID NO: 186305 - DNA, 277 bp, Glycine max
tcacttgagcattctgattgtgacgataataagtgcattccaacattggtttctattggtgaaccttctcgagatgctaaacccaccttccataaccaacacaaacattgagtagcttgtgggcaaggttcctccactactttcatttggtacctttttccattgatcagaatgcaagcataatttagcctacacaagtttgtcatatcctcatccagagcaacaaaagtaccataagagcacacaatttttgcaaaacattggtttacccacaagt

SEQ ID NO: 186306 - DNA, 406 bp, Glycine max
  unsure (1)..(406): unsure at all n locations
agcttgtaaaactgcagtaaaacatctggcagtgaaaaagaataaccaatctcattgtccagttggtgttgtaggttgtaatgagcaatctttgattcaagctgggctagttgctcttcctcccaagaaaacaatgctctcctctagtcccagttccaattccaaactctgttttgaattcatccagaccataaagtatctttatctgttgagatactgaataatctagcaaacatatccttcaatttccctttatctatccatttttgtttccagaattttgttgacagaccgttcccaattgatttcttgaactgttggttcaaccagcttcattgttctcctttggactcgtccaatttgacaaaactacctagcctttngcaccacaaccttaaaaccacag

SEQ ID NO: 186307 - DNA, 428 bp, Glycine max
agcttgagatgaggaagtgttgaagggtgaaacttcctgcttttattgttgaccacagagtggtacctggagatatgtcgcgggggtcaggagaccttggggacgtcaggtggggtgctattgcccaaaaccaagcttgaccaatcccgacccaacccgggcatagtcggtcagtgagaacctgtgatgtacctaagcaggcgagctcctggcagtcaacagataaaaggaaaacaagaccacaaagcaaggaggcttgtggtggctggccagctgtgaattttgtgtaatatgtggattgtggcctctggtaatcgattaccaaaggtgagtaatcgattacaaggcttaaaattgaggacaggaggctaagatggtctctggtaatcgattaccaaggggtgtaatcgattaccaggcttgaaaac

SEQ ID NO: 186308 - DNA, 373 bp, Glycine max
  unsure (1)..(373): unsure at all n locations
ctatgcactcctntncctcacatagtgtttcgtgcattnttattctcgctttggttactttgtatacccactgttgacgtgcttaagccattttacttaagtcatttctcgcttaactcagaaacaaaatcaatttccaccgaactgttgaattgtattatccgttaaccttcgataaaatgaattccgaccgttcggtcgtgccgtaaccacgttggaaatcacaaagatgtgaaaaataatataataatcaaaaaaacatcttttagtaaaataaagcggaaaatcaatcggacgtgtttttctctttgggatatctcattcttaatcgaattgattaataactaaagtgaaactaaagctgaaatcaact

SEQ ID NO: 186309 - DNA, 429 bp, Glycine max
agcttaagagttttccgcctctcaacttgacctctcttcaaacacttgaactttctcaatgttccagtcttgaatattttccagaaataataggagagatggaaaacataaagcatctttttttgtatggccttcccataaaagaattgtcattttcatttcaaaatcttattggactccgttggttaaccctgaggagctgtggaattgttaagttaccatgtagcttagcgatgatgcccgaactgtttgaattccatatggaatattgcaacaggtggcaatgggtagaatcggaagaaggtgaaaaaaaagtgggctcaataccatcttcaaaggcacatcggttttcggccaacgattgcaatctatgtgatgatctttttttaacaggtttcaagacctttgctcgtgtaagacatttaaatc

SEQ ID NO: 186310 - DNA, 440 bp, Glycine max
  unsure (1)..(440): unsure at all n locations
atgctgtaatttgaatatctagaagataaaaatgctcaaatttccatcgtgaaattaaattaatcaagtagtgaaatgtgtgtatattcaatttttgacaatattcaaatttcaatccataatcacgataacatttatcatgtctttgatccaagagaaactcgttgaagtctctaaattaaaattgtaaattaagtcttgtagatagaaaaagtataattgaaagtgaagacctattataagtgattaagttctcaaaaaagattattcttgaacataaataatagatatttcacactaataagtaaaaatattatagtaatatttagaatcttttgttgttttaaaaattctagatgtaaagagataatcactctcttattaattagtaatcaagagtcattntcttaacatagaatacatcattacagatgaagtat

SEQ ID NO: 186311 - DNA, 412 bp, Glycine max
  unsure (1)..(412): unsure at all n locations
agcttcaatacagtgacactagtgttgcaacaaaggagctgacaaagtcttttggatgggatacatatgattctttcatgcagcatgatgttcaagaactaaatcgggttctctgtgaaaaacttgaagacaaaatgaaggtatggcaagagatttggaatgtttgttcatgattcttcttgatgagtgatcataccaaatggttgttgtatgttatttttcttcacgaaactgttgttgagggaactatacaaaagttatttgaaggacaccatatgaattacattgaatgcatcaatgtagactacaaatcaactagaaaggagtcattntatggtacttncttatgcattttgaattcaattatatggttagttcttctttgtatgaattctatttagttttgcatatg

SEQ ID NO: 186312 - DNA, 150 bp, Glycine max
gattatgatgatggctcaaattctcacagagggtaacttatcacttccaaattgagctttctaactatagtagcgactgttatttcaaacattactcttacttacatatctataataaagaaaattgccagtgtcaagcaacaaatgact

SEQ ID NO: 186313 - DNA, 287 bp, Glycine max
agctttatagaaggaccatcaattcccgtcaacggtgtcttaaattaaggacccaatgaagtatattaattagtgagacatttaatataaaatagattttaatacacatttattattagttattgcgagaagaataatgaggtttaataatgtcattagtgaatatttgacttcagcttttcattattagatgagtatgcattcatttatccaaaatatatttggccttgatatttaaataagaaaaagcttatatatatatatatatatatatatatatatatata

SEQ ID NO: 186314 - DNA, 439 bp, Glycine max
  unsure (1)..(439): unsure at all n locations
agaatccaatttatttagtcgatgcaaagattagataacactataacaatcatgaagctctcataataaaattacctcttttatttatggcagatactttactatcaagcaaacaagataaataaaattagaaagatacccaagaaagatgaagaaacacttgagaatttcgtctagaactaattcgtataagatttgcactgctagatcctcaaacaaccaatctttccagaaaaatcattaatgatttaccattcttatttaacaaatattaaagttaacttttatgaaccataatcatggatcatgttatttgaaacaaaatttataccatcatcaagaaagagaatgatactcttataatgatacttcacatggaccatcanaagggcattttaagttcgagtgattgaaaatgtgcagaagattaatgtagtct

SEQ ID NO: 186315 - DNA, 437 bp, Glycine max
agcttctacttatgtggcagggcgggtttccttcactttcttgtctccaacgcgagctctgaccactgttctaccttcccgcgatgcctcttttcatgtccgcctgagtgggtttatagcctaaaccatacttcccacgatttccttgggtttttatcaggctagttatgccgccattgtctttgcctaaacccatcccgggttcataaccgttccccaacataactcgggccatcattaccgccgcatcggacagacaaggttgcccaaagagggagtccacggaggaaatgctgaccacctcaaaagactggaaagcggtttctaacgattcttctgcggcttccacataaggcatggaggatgggcagcttaccaagatatcttcctcgcctgacacgatgaccaagtgcccctccactacgaatttcagcttt

SEQ ID NO: 186316 - DNA, 368 bp, Glycine max
gcacttagtacttatggctgatgctaccatttgttctctggaattagcgacttgttaagagagaacggttcgtagtgccattcataataggaggcctactactttgaagataccgcccactgatattcataatgaagggaggagtactcattctctatatgtaacttcatttgcctatttgcatttttcattagcagcctatgattattcaacaataaccgtagtggacctctaatagactggttgagagatgagctcagtcaaatctgatcttacattcgagacattaaatagtcgcaccctactcatctctaatatttgaagtggacccattgtgcatacgatcataggatgggccttacgtccaa

SEQ ID NO: 186317 - DNA, 444 bp, Glycine max
agcttagaattgcatttgggcacccatttcgaatcctctatgctgtccctatgtatataaaacagtcccacaatcccaatcttacaaaaccatattcatatgtcattgaggcatttcaccgagcacttggtgggtgcatgtttaggcatgaatagcaagagaatgggggcaatgtggcatgccccattgcttcagaatacaacataggcctaaggccatcccctacaacccctcaactcaaaccaatcaagcatgaaaacaatccaaaactgccccacaaattcgagcacattctcacaatttagagcaccaaaagatgaacaagatgcaccaatggaaagctaaaaaactcaaggattaaatacttacttgttggagtgagtaggagtaccaaaaatgaaagcaaaatgcaaccaaaggtggcttgggggagcaaaaatcatg

SEQ ID NO: 186318 - DNA, 442 bp, Glycine max
  unsure (1)..(442): unsure at all n locations
acggtgaaattcagataacactattggacacgactataatatctggttagtcagttgttggtaagcctatggtgttaacgaaaaaggaaccattcttcaatttggaagtcatatggtgcgacaaaagataagaggaaggtggtgatgagttttctagagaatatgctcaattcaattaaggatgttacgggcaatgattttgtgaaaagctttttgctttacgctatatgaacatttcttgcttccaacaatgagaaggtgaattcgtggttcttgcactttctcatgatttcgtggttctcgtgaaaggtaaagcacaagcaataaatggacaattagagtcttatacagggacggngtaatattaactgagaagtgtagaaatatattatcttaatagataacatttatcgagaatataaatttcttgattataaatatg

SEQ ID NO: 186319 - DNA, 440 bp, Glycine max
agcttcaacatcagaccacttccagggtgctggaactacttcacatgtacttgatggggcctatgcaagttgaaagccttggaggaaagaggtatgcctatgttgttgtggatgatttctccagatttacctgggtcaactttatcagagagaaatcagacacctttgaagtattcaaagagttgagtctaagacttcaaagagaaaaagactgtgtcatcaagagaattaggagtgaccatggcagagagtttgaaaacggcaagtttactgaattctgcacatctgaaggcatcactcatgagttctctgcagccatcacaccacaacaaaatggcctagttgaaaggaaaaacaggactttgcaagaagctgccagggtcatgcttcatgccaaagaacttccctataatctctgggctgaagccatgaacacagca

SEQ ID NO: 186320 - DNA, 286 bp, Glycine max
  unsure (1)..(286): unsure at all n locations
atgacagctaaaataataagatatgaattggaagtctcggattcaaaaacttacccgttgaagaacgaagaacggtgataaacgacggaaaaccttcanagatttgctcacagaaacgtcttggaaacacctcagcttggagtttcttcatggaaacaatttttcttcacccaaaacagctgatatgcatagccaaaggagttagggatattaggaacaacctcccttcgcctatntataggaaaaaagtggaggacgttgccgcccagctcgcccaggcgatctg

SEQ ID NO: 186321 - DNA, 421 bp, Glycine max
  unsure (1)..(421): unsure at all n locations
agcttctaagtctcactgatgaagatgaatntgtggctacttcatgcactcctctaatgacaatagcatcatttctggcactgaattgctgggagttggaagccatcttctcaattaaatttttggcttcagcaggggtcatgtctccaagggctccaccattggcagcatctatcatacttctctccatgctgctgagtccttcataaaaatattggaaaagaagctgctctgaaatctggtggtgagggcaactggcacataattttttaaatctctcccagtattcatataggctctctccactgagttgtctaatacctgaaatatcttttctgatggttgtggtcctggaagcagggaaaatttttttaagaaactctcttaggtcatccagctcggatggccttgaacaaggtat

SEQ ID NO: 186322 - DNA, 410 bp, Glycine max
agcttgacggccatgagccatgggcgcttgtatcaacaaagaatgaagaatgtgtttgacaagaaggtgcgcttgcacaagttccatgagggggaccttgtgctgaaaaagatgtcccacgctgttaaagataatcgagggaagtgggccccgaactacgaaggacctttcgtcgtgaaaaaggcttttttcggaggggccctagtgcttaccaacatggatggcgaggagctacctttacccgtaaactctgatgttgtcagacgatactatgcttagaatctggggcaattgaggatatcgctgcatgttcttttatttttatgtgtgttcttcttggtttcccctagggattcctgtctgctgtatatttcttgtcacagacttttaaaagaagagaacatgagttt

SEQ ID NO: 186323 - DNA, 427 bp, Glycine max
  unsure (1)..(427): unsure at all n locations
agcttatagaattttttttatttaaattagaaaattgttattgaattgaatgaccttgtttttaatgaagaatgttttccgtttaaattgaaaaatagtgggggttctacttataatacacctgtttatacacatgattctactaatgtttttttttttaatgaaccttaaagaagtaaaaaagtaatgttttttttaatgaaccttaaagaagtaaaaaagtacatgtacctaaggattttagtcctaattttatacttataacgttgaggaggatcctcctttatttaggaggctttgacatctattggtgtcaaaatggactaataaaacatgggaattagtagcgttaccttcgggatacaaaataataggatgtaaatggattcttaaaataaactangaccaaatagaacacacgacaagt

SEQ ID NO: 186324 - DNA, 435 bp, Glycine max
  unsure (1)..(435): unsure at all n locations
agatgcatcgtatagatgaacttttaatgtccaaagtttcagctacactagtcgatctaaacatgctcatatatctatagtgggttgcaacaaaccaaactattaatagattgctagaaaaatcaaactcttaacaaagacaacttgaagatgtttcctaactaaactagaaatgaataagagaccaagcttacctataacccatactgtgacaatggcagtgagatctataacaatggcgcagagacttgaagctttcctcgtaccttgattaggtcaccacgaaatgtacctatggtttaccaaaacaacacagacctaggttagacgaaatgaagcttagacatgaagctaacttacatcttagtaacctttggtcgttaggtctatctattacattntagtaattcatgctcatagtatataactatggac

SEQ ID NO: 186325 - DNA, 428 bp, Glycine max
agcttgtagccatcacataccatcaatttaacacaatcttacttattctatggatcaagctcgttgagagcatgttgtattgtctatgacacttgcattacttgtgttccattgcatatactaatttttgctctggactctactatttcatgaatttatttgcatgtccatactatatctttgatagcatcattttgcatttattattacgtggtcatctgtttatgtaagcttcttatgttttctcgttgaaatttcaattaaaggggcaatattttggccgagttcctcattcatggagatccttatagtgttttaaagaagtatgtgaaggagtagcaagaaaaggacccagaagcagttgaactgtgcaaatcactagcaactcactactctaagaaactatatgagatttacaagaacaaaga

SEQ ID NO: 186326 - DNA, 341 bp, Glycine max
  unsure (1)..(341): unsure at all n locations
aatctctatgggtggagatattagtggtagcagcaacaaaggattgctcacctgctggacgcttagttctttgaccaactattttctatcgcttgctagtgcaaggatgagttgggggaggtggacacagntgagttggtctaaccttcttcatttaaaacacaatgctctcatctgaatgtgatgcaactttcctctttctaaacactaacccatcttcaccattagcagtctcactgagttcccttatgcattctgcagaggactatggctgttgcttcttgggtgcaggccttgtgaacacatgaagcatcttaaatatcttttcatcttaagaagtt

SEQ ID NO: 186327 - DNA, 412 bp, Glycine max
agcttggagatgctccaacacttaagatacttatctcgcacttccttagccaatcttatgtcggctaaacggacttcatacttgacttgattgttcatcgtcccaaacttgaaccttagggattgctctaggattatttcatttgggctttctaggatgacaccagtcctactccctttttcattggatgaacccatctgcatacaaattccaccactcggattgtagttctgtagtcgctgtcaattccacgatgaagtctgctaagcattgagccttcgttagatcccttggtttgtacttgatcccaaactcgaacaactagaccgactaacatatcattcgcgttgcaagttctgggttcatcatgactggtaagatatggtgcgttggttaaactatcatttgatga

SEQ ID NO: 186328 - DNA, 573 bp, Glycine max
  unsure (1)..(573): unsure at all n locations
acgtctcgtctggtcatatcggctggtagattgctgtcttcctgatctcggggcgagaccctgggctacttaggcttgtttagtgaccttaaaactagcttgagtaacgtggtgggatcgncatactttaatggcttacggattgtgtgatgccgtttttaccagagatgatcgcactggaaacatgtgtctttgttcacacctgttccatttgaatcccctgaagttggtttctgccaaggagaaaatcctactagtggggatgcttgaaacgacaggttgtgtgaccatgtggtgcattggaagatcttgtaaaggttcatctattttgtgtgtgggaatattatacgacaaatgtggcccatcgccgcatattcctaatgttattcagagggtttaaagagagatctttatgttggatgcaaactccttttgcttatgtgctatgaaccttttgttacccaccagccagatacttgttgttctggacttgtgcccanacaatcttaatcacacttttagagggtcatcgtagatattcatgcagacctacctcactccgagggctatttn

SEQ ID NO: 186329 - DNA, 405 bp, Glycine max
  unsure (1)..(405): unsure at all n locations
agcttataagaacaaaattgcctcaatcatttccaaatatgcatgggaattgggacgcatcaacaagaatcaagccaaggctattgtgcaagcaatcaatggggcaaaacacaccaaatgattatgatgatggatggctcaaattctcacaaaggtaaactcatcactttcaaattgagctttcaaaactatcatgacatgtagagaagaatcaaggatttcaagtcacaaaatgtcaagaacttttattttcaaaacaattacccatttcttgaacatatcctataattcaaagaanaacatgcaaagtcgtacgtgcacacaaaattgaccgaaaatattaaactaaaaatccgacgaaactaacaacattaacaaattaacacaactaacaaatttaacaaa

SEQ ID NO: 186330 - DNA, 415 bp, Glycine max
  unsure (1)..(415): unsure at all n locations
agctntccaagtttgaaggagaaggtaagtgaagggtattatgacccaattcactgtgctagttcttcaataggagggcatgtcttctattttggagcataaggatcattttctctaaaatttcacatcagttcaaactcataagcgaagaataatcagtatcaacacctacattttttgcactccaacatcgaacaaccctcagatcgcttatgagtttaaactcctggaggtcaatgattattctttgcttatgagtttaaagtcatcgacaccgaacaaccattttctgattacacagtgttttcaaacttgaagaaaaattatcataatatagaacgaaaagaacaagacaaaaaacatactcgtagaagacggtataaacttgaacagtgctctaaaaacctactcacat

SEQ ID NO: 186331 - DNA, 384 bp, Glycine max
  unsure (1)..(384): unsure at all n locations
agaatttagaggagataagctcttataaaccctaatttgaggaagaagaagcaagtgacctgaagaagctttataaacacacactntagtgccacgtttgatagtctacgtgacactaaaattgtcaacaatgcaccttactaacggtgntactttcaaatttaacggcaaagactattctgcaacactctgcacagataggaattatcttttacatttcacaaggatagggactaatttacaaaatgactacaaagacagggaccaaaatgcctattcactctctaggaatatgaattttccattagaatagtatcattctacactctcccttttttatanttgaaattntntggttacatgtatgttatcagtgaagtgatg

SEQ ID NO: 186332 - DNA, 341 bp, Glycine max
  unsure (1)..(341): unsure at all n locations
gtctctacatattgcctcccttgcccagtattatgaccagcccctaaagtgcttcacattcgaggactttcagctagtgccgactgtgaaagagnttgaagaaatcctgngatgcccactgggaggaaggaagccatatcttttctctgggtctatccctccacgacaagagttgccaaggtagtgaaaatctcagcacaagaagtgaaccaggtaaagcaaaataagaatggggtagtcggagtatcaaagaagtgtttggaggaaagggcaaaagccttggaaaatcaacgcaaatgggctttcttttattgacatcttggcgctcttgatctttggag

SEQ ID NO: 186333 - DNA, 426 bp, Glycine max
  unsure (1)..(426): unsure at all n locations
agcttcttagaccttgcttttcttttntgctacttnttgtccaattgggtaaggcattggcgatgacgtatcatattcttcaccttcaatgggattctctgggttagaagatgatgagtaatttccaccagcaaaaacctttcttctttttgaatactttgacataaattctgcatcgaatttgagttcatctttcaacaacaaccaagcatgctcaacctcaaattttttaccaatatcctgtgagtaaatcatataagcatcaaccaaaacatccttctctgaactttcacttctcctatgtttatttgcttgtttgtagcacccattaaaattttgaattggagggtggatcctgctctaccgagatttcaattgagtccaacttctttcacaaaattgtccactttgatgcacatcgtcatt

SEQ ID NO: 186334 - DNA, 425 bp, Glycine max
  unsure (1)..(425): unsure at all n locations
cacacatcctttctaatagctaagctcacctccttgagatgagaagctagagcttatctacaccccccctataatagctaagctcacccctatgccaaaaaaacatgaaaaaaacaaaaaaagtcgttgctacaaagactactcaaaatgccccaaaatacaaggctaaaaccctatactacttgaatgcccaaaatacaaggcccaaacgaaggaaaaacctattctaatatttacaaagataagcgggctcatacttggtccatgggctcgaaatctaccctaaggctcatgaagaaaaatgcctaaaattattacacacaaatggaagtttggaacctattggaagtcctaacacacttccatganaaggcctttgtacaaacttgaagcatgaagtagtaattgcaataaaaatacaacac

SEQ ID NO: 186335 - DNA, 444 bp, Glycine max
agcttcactccactcggtggccgaaaagctgttgcaacaatgggtataacattgcttacagctctataagacttggcaattgggcaagttcctttcgccaaccattcatttccaagtgccttgtgctttgataaatctccgttctgaaatgaagctcacccgagtaagaaaaatgagtgcaactcatgttttggaagttacttaaactagttcacaataattagtaagcaaccaggaaaagaaaatcatgaagcacatcaaaattttgtcctgtgatcaccaacactaacaacaaaataattgcaaacaagatgggtgtaaatttatcaaaatgatagacaacttgattaagattctattgtgcctataacaacataacattctccctagcaggaactaactttatgatgaaattgcacaagctcaaaagcacctagtacgtat

SEQ ID NO: 186336 - DNA, 351 bp, Glycine max
  unsure (1)..(351): unsure at all n locations
attgagaaaaccacttaattacatcattttgttcaatagaaagacccgacgtttaatcatttggttatctctcatatttagatagntaattttgtagctaacttaaaaactgtagacacaacttctctttttatatttactggctttatacaaatgtttacctattgaatgaatgctccctgaatgaaacaagttccctatggacttgacactcgatcttaccattttatatattacttgtgcgactcggtgcactagtcgattagcatcgctgaccagtgaaacaagtattttagcgagaagcgaacatttatccattgtggatttcatcaacacttgggtgccacattg

SEQ ID NO: 186337 - DNA, 439 bp, Glycine max
  unsure (1)..(439): unsure at all n locations
agctntgaaaggggacttaagattcagttaggacacctaacctaattgggtcataatccaagtgagattaagaaccactatgggggattttcttctctctcatgcttgtcttgtgttgatggtgttggaatccatgttgggagtcatggatatttattttagtctttggaaaattgttttgctaagtggttcaatgtcataaatgatgcacacaagttgtttaatagttttctgcaatgacatgtctcacgaaattgtatactgggaattattggaactttgtgtgatgaaaataaaattatattatgaaagtagaaatatggggcttataatttgatgtatgaaacgtaaattttgagtaataaaggaaattaatataaattgtgcaaaatgacctttgtgttgaatgtctagttgtgacctttgttggcatcttgat

SEQ ID NO: 186338 - DNA, 307 bp, Glycine max
agctgatgacagtcgtgaagagctcaacatcatgtattataaggcgtgagctgccatgtttaatgaataacattgacagtttacttgactataacatgctttctcagcatatgaataatcagatcttggtgacttgctggtatattgggccatacctgtcctattatatattggctcgcgttgatcatcacgcattcacatcttacaatggatatgaaacgtattgaccgttaatctgatgatactctgactgaaatgatcttgcttgcgcgagctgtacgcatctcaatcattgatactggtatga

SEQ ID NO: 186339 - DNA, 461 bp, Glycine max
tagagccgcctgctgcatgcaagctttgacttgagtcatcaagagattataaatatgtgaccatggcatgagttttaaaacaatcaataatcaattatcataatcaatctttcaatcctctctcaacatcattcaatatctttcaactctttctacagaattttctgattcatttctcttcatctttctaaaagtttttgatcaacactttctcttccaagaaaagttctttgttcaaaaacttgtgctattcatctttttcattctcttctccctttgccaaaagaacgaaggactaaccgcctgaattcttttgtgtctctcttctcccttacaaaagattcaaaggactaacagcctgagaattcttttgattcttcccttccccttaagcaaaatatttcaaagaactaaccgcctgaaatatcttttgtttcccctttacaaagattcaaaggact

SEQ ID NO: 186340 - DNA, 624 bp, Glycine max
  unsure (1)..(624): unsure at all n locations
acagtacactactagntgctgtgctatatatgcttgctggcgagtacgatatctgttgngtctgatatgcgtctcgtgctcgaaccagatannctganngcatggatgagttcatctctttatactgtatcttgctcaagctagtgtaagtagcatgctatcctggggancggtttcatgactcacatatctgcacctgtcgcaagactctatggtttatgcttctctgacaaccactatatatacctttgcgcttctgtgcagcaatcttgagcaattgaacagccctaagcttatgttggcaacatctacaatagacctcctcaaccttatcagcagaatcaaccacagcagaacaattatgacctctccagcaacagatacaatcccggatggaggaatcaccctaatctcaaatgggctagccctcaacaacaacaacagcaggctgctcgtccttcaaaatgctgctgtgcaagtagaccatacattntcttcagtgcaacacaaccacacatcaacagaacaacaatccactactgtggccctcctcaccttctgggaagattagtgagcaatgacatatagacatgcaggtcagccgagacagagctccatccatgn

SEQ ID NO: 186341 - DNA, 430 bp, Glycine max
  unsure (1)..(430): unsure at all n locations
agcttgctctanatntacattgatgttcgtatttatgggaggaggttgtatgccatttttgttttaagagtagcgtcccactggtaaaactaactttccaaatctttgccttcgcaggaaatggccccgaggaagcttgcctcaaagaggtccaggaaggacaaggcagccgaaggaactagttccgctccggagtatgacagtcaccgctttaggagcgctgtacaccagcagcgcttcgaggccatcaagggatggtcgtttctccgggagcgacgcgtccagctcagggacgacgagtatactgatttccaggaggaaatagggcgccgacggtgggcatcactggttactcccatggccaagtttgatccagatatagtccttgagttttatgccaatgcttggccaacagaggagggcgtgcgtg

SEQ ID NO: 186342 - DNA, 435 bp, Glycine max
  unsure (1)..(435): unsure at all n locations
agtgtctaagcaagatgcaaactctatagtccaccttcgggtttatttctcagntaataattatcatcaagttcaaatgacaataaggtcaagaatcaagacctgatttgatgagttgcgagcaactatacaatgcaaatagtccatgtgtcccttcaataccatttttactttacgagtttcctagaaacattaacacatgttagtccatcagcacaagtatagttataaatcaagttatccaagaattatattcaccttccgtgaatacataattacatacaacatcccaacaatattgcacaagaatcaccagatgcggtaaaaacaaatcccccttattataaacaaaaaatattgcacacactgaatctgaataacaacaaatattgtgcaacactcaaaacaatacaacatgagtgtgcagaatacata

SEQ ID NO: 186343 - DNA, 424 bp, Glycine max
  unsure (1)..(424): unsure at all n locations
agctntggttcctaggcctaaggtatatccaaggcaatcaatctaaccctcatggagctgcccacatgctaaaaaatggcacacatactcacacccacttgttccatgggtcactcctctcaaaatcatgtgccaatgccattggggcatttcaccgaacacttggtgggcataggttcaggcgtaaatacctagggaatgggggcaatgtggcatgcccaatcctttcagaatacaactgaggccaaaggccattgcctacaacccttcaactaaaaaaaaatgagcaacaattcaaggataactttgctcgcattttttttttaccaaaacatgtaactcaaatcaccaaaagcatcaatggaaagctagagagaccaagaatgaggtacttacttgttggggatgatcaacaatgcaaatc

SEQ ID NO: 186344 - DNA, 423 bp, Glycine max
agcttcaggtaaatctgaacatacatataacatttttggtggttgtaaatctaggaattaaaagctatcacaaattacagtaaagccaccactaattgcataaaacttgtcacaatttgcattttttattttttctgcaatttatggtgatttttctataatttgtggcagttttttatcctaaaaaatatcaggtaattttagattaggcatttttgaataccaaaagttttaggtgtaggaagcaatgatccaaactgtaagtatgcatcaacaaaaataactggaatgatcaaatagcatcataagaatcaaaatagtgtgagaattttgaatcatccatcatgggaaggtgagaaaaaactttgactatttatccaaaatttgagatccaagaaattaatctaagatggtgtttatgtg

SEQ ID NO: 186345 - DNA, 422 bp, Glycine max
  unsure (1)..(422): unsure at all n locations
ttagcttttacaattgacaacaacgagtcaaagaatcacagctcattgattctccccttcttcttccaataaaaaacatattcaatgatcaaacgtgatgaaaaaaggttgataattaatcacaccgcaccaagaaaagcttatccttagcactctcaaaatcaccaattcacgcaacaagactcattacttctgcccaactgaatccatgcctgcaataaatagcacatttatctcctccaacaattcagctactgaacataacagcatgtggtgatccaaattccattaaatccttacccacctgtaacatanaacacctacacatatttctcttcacaaaagtcacaccatcagaattcaaataaaaatagaatcanaacttatgactctctcaattctcaattccaccaccaacttat

SEQ ID NO: 186346 - DNA, 424 bp, Glycine max
agcttcggtccaaaggaccggttatgagactaatcttcagttcgggacttagtaacaattaaagctcttcactcctccccaagactgtattctgcggcgatcaaactcaagtcctctcccacaaactcagcgtgtattgccaaatgagctatatccattgggtataaattagtattcctgatagtgtatgaaaaatgatactcagtcactgctgttttacagagcaacgtgtccttaattgatatatctgaaaacttgcattaatgaactcccttaatcacatgtcaaataattatttattttggcctaaaccatgagggaaatcagctggagcagacaggaaaattcattcaagtaccgggaataattgagagtgtagcacacacaacataaagaattaacagtaagaaatctggcagaaatt

SEQ ID NO: 186347 - DNA, 360 bp, Glycine max
agcttgagtgagccaccatatggtgactcaatccaagtagagagcctctcatagagagaagataaatagcttgagaagtctctatcctcaagcttgagtgagccaccatagggtgactcaatccaagtagagagcctctctgagagagaagataaattgcttgagaagtctctatcctcaagcttgagtgaaccactgtagaatgagtcaatccaatgagagagcctctctgagagagaagaaaaatagcttgggaagtctttatcctcaagcttgagtgagccaccatagagggagtcaattttgtaaacacatccttgtaaccctactatcactttggatagtggaagaatctccata

SEQ ID NO: 186348 - DNA, 349 bp, Glycine max
  unsure (1)..(349): unsure at all n locations
atgtttcaccatctaataataggaacttttatattgtanataggagttagaaacgatgaatgaagatcaaaagaattggaatgaaatggctaagacaatgatgaaaatcgacacaaaaccagaggaaatgttcaacacaattcatattaaggatcaagttaggagtttcaagactattctcatatacacaaacatgacatgatattatacatcagtattgcttatattaagttactttaaatgtagccgcatggtgaagtgagtaagtgctttgttgtaagatggaatgaccaattagagcatacttggcatctgctagacagtaatgacaacatgcactatgttacgt

SEQ ID NO: 186349 - DNA, 415 bp, Glycine max
agcttagccctagaggggatggaccttttcatgttctggagaggatcaataacaatgcctatatgttggacctcccagaagagtatggagtcagcaccacttttaacatttctgatctaactcctttcgcaggtggagctgatattgatgaggaggaactaacagatttgaggtcatatcctcttcaaggggaaggggatgatgcaatcctccctaggaagggaccaatcactataaccatgagcaagaggctccaagaagattgtgctagagctgctgaagaaagccttagggttctcatgaaccttacggtagatatctgagcccatgggccaaggttgggtccaattatctgtgtacatattacactacgatgtcattatatttggcccttgtatatagggctccatattgt

SEQ ID NO: 186350 - DNA, 295 bp, Glycine max
  unsure (1)..(295): unsure at all n locations
gcccctactttcgaggggcaactcccaccttatgacgactatcccgggccagacgatgaggaaggagatacccatcttggccccctgctccacctcaaagatcccgccccccatgaactaccccaactgaacataatccgccatatcccggcctcacccacaccccgtaaaaaatctgttcccttcgcggaagataatggaaagattgaggcgctcgaagagaggttacgagcagtcgatggcctnggcaattacccattctcggatgtagcggatttatgtctcgtgcccaaca

SEQ ID NO: 186351 - DNA, 407 bp, Glycine max
  unsure (1)..(407): unsure at all n locations
agcttgggctaagcgagtcaatcttgctaagcctaaggtaattcagttgttttgaattttgttcatgcgctaagtaagtcatgctcgctaagcacaatttcttctctgtttttgaataaggcttagcgagccagtcttgctaagccaattatgttccaatggtcaagctaggctaagcgcctactggcgctaagcctgtgtagtgtgtcgcactaagcgagcctatctcgctaagcacaattagctctctgttagagaattaaggcctagcgagccatgctcgcttagccattgtgttgtgtccactaagcgagtgtgtctcgcttagccagagtgtttatntttcagtagttgcaccaatcgcgccttgtgcgctaagcgtatcatattantttctaaaggcatgc

SEQ ID NO: 186352 - DNA, 617 bp, Glycine max
  unsure (1)..(617): unsure at all n locations
cgtacagtcactcgcgcgcgaggatagatggatggtgtgaggggaagcgataatgcgtgactgcangtatnggtantcgtggggatatcagaagtgagactgcattagcgacctaagatactcagctgggagagatcagcgctcgagataaatagcttggtgngttnaatagtagtagtcagcagtgggctctcgcccatctccattacaagcctttctctttcctgaacacacatggtcattgattcaatgataaaccatttatctttatgggttataagaaatcttaaatgggccatattcatgccgaagggtgttccaaatgaaatgcactaggaaagactcagacatatccacctctattttcttaaggtgagctgaaatatctcgcattttcatgatgtactcacgcacacctttcacactggtgagccgaagagaaaaaacttcatgatcaaagagcgtggtaaagtcttatcctgaagtgatgaactggncatcaatggtcttaagcaggctcggacctttatgctggtcacagatacacgatcccagcgagatttagtctaatgaacatacgctgagccggtggatcgctccagcagtatataacgcan

SEQ ID NO: 186353 - DNA, 424 bp, Glycine max
  unsure (1)..(424): unsure at all n locations
ctacgcttctagaactttggatgctgcccaagcaaattacactaccacagagaaggagctattagcgatagcttttgctcttgagaaatttcgttcatatttgcttggtactcgtgttattgtttatactgaccatgcagctctgaagtacctgttgaagaaggctgaatcaaagcctagattgatcaggtggatgctttggatccaagagtttgatttggagatccgtgatcagagcggtacacaaaacctcatggctgaccacctgagtaggattgagcgtgcgcctgaggactcacccattcgggatgatttttcagatgaccatttgtacattctgtataagatctctgattccttccccactccttggtttgctaatattgtgaattatttggttgcttctgttcttcctcccttagcn

SEQ ID NO: 186354 - DNA, 361 bp, Glycine max
  unsure (1)..(361): unsure at all n locations
ggtgcttctctatttcgntttattaaaggaaaagggtaaaaactagctttccatttttgttttgcataatggaattaataacaacattgcttagcccacttgaagtagataaattntagataaagagaggctcaatatgacaaatagaaactggcagggaaagaatctgaaaatgtagacttttattgcaagaacaagctcatccaatgtgaaggagaatgaattaaaatcttagaatgtataagcttcttaggattacagaagaatcctacgatcacaagattgtataaatctttcctctctatttgataaaattccccgacccctcactaaacaccctctacctttatntatatacaac

SEQ ID NO: 186355 - DNA, 442 bp, Glycine max
agctctgacgatttagatagattataagattaattcttagtccgatatttaatcaaatttaaagctttcaaattggtttcttattgtctttattgtacacaaaaatattattaagatataaatttatgatataacctcgcatgaaaacttattaaataagtatttaattaaatttagggttggccaacattattccaatgcaaactttggagtgagcttttacaaaagttttatattttgatttacgcttaaatgtaattttaatcatcttatcttatttaatatgtaatcttgattcctttattttaaaatagatatttggtctccttattttaaaaaataactaattttaatctctctattctaatatataaacatttggtcctcttactttaaaatttttataatttttgtcaaatctttaattctacatatattttat

SEQ ID NO: 186356 - DNA, 294 bp, Glycine max
ttcaaagcaatctgctacaaggtatggcagggaatgggaactaatccatgagtacgatattaatttggtgccttaaacaagaagacacactacgcgggtgtgatctatggtgtgtaaaaatagcaactatgtctatgatcactgatggctatcaacatgcttgatatatagggagaacaactagacatataggaaatgagatctttatctgtgttaataaaatgtaattcgctcttgtattatgatatgctagagccatttctacatcattttcactttgcaagatgttttcta

SEQ ID NO: 186357 - DNA, 440 bp, Glycine max
  unsure (1)..(440): unsure at all n locations
agcttgcattccctaaggatccattaggaaattacttgtgaaagagagccatgagggtgggctcgtgggccactttgggatagacaagacccttgtcttacttaaagaaaagttttattggccccatatgaagaaagatgtccataagcattgcactagatgtgtggcttgtttacaagccaagtctagggtgatgcctcatgatctatacacacccttacccatcccatttgcaccttgggtagacattagtatggactttgtccttgggcttcctagaacccaaagaggtgtagactctatctttgtggtggaggataggtttagcaagatggcacactttataccatgccacaaggtggatgatgcttcctatatctcanaactcttttttagggaagttgtgagactccatggtttgcctaggaccattgtgtcag

SEQ ID NO: 186358 - DNA, 332 bp, Glycine max
  unsure (1)..(332): unsure at all n locations
ctttcagcaagagaggcctttggaaaatgaaatanggaccttctgataggacctgattcaatcctcttctgtctcaaacttaaacaccaggcatccattntcatgagttgaatatgaaactttacaccccacttttgacagcattccattaatgttntctatcctggagaccggccaaccacataacctataaagctgtgaccccatgcctcttccaaggatagcaaatcatcatcgttcagcagcacgtcaccttcagaagattgaggtcgattgcatttgctgatgccatgggaactagtttcccttcataggtcttttcttgctttctc

SEQ ID NO: 186359 - DNA, 458 bp, Glycine max
tcttaagtcacctgctgcatgcaagcttcactcataatatattaaaagtaggttattcataaattaaaatcttttttcttagagaagctaaaatcatttagtaagccatccgatgaatgttgatcaaatttttgaatataattaattttgattaaaattgatttcaaagtaacgtgatttacgtttgaatgtttttattataaaatcaagttaggaataaaatttaatacaaaatttttaattcaacgaaaaattactcataattgtttctatttgtgatcaattttaaatttttctccaatgtaaaatcaaacatgtaaaaatttatccaaaattaattcctctgaaatcaaacacacacttgtattaaatggagaacctagcgcaacctcgccggctggcataccttatcacagtcacagagagcaaaaacatgttacgcactatcaggagtcact

SEQ ID NO: 186360 - DNA, 269 bp, Glycine max
cattagtacatagaacaccaacattggttccaatcccttggctgcattgacttcaacaaagcgcacaccaatcccaaccccagaacacgaagaccaagactcttcttcatcaaaatgtcttcttttcttcagcaccgactcttggtcttaaccccattttcctcttaccacaaagccctcttcatcactctcatcctcatcacctctatagccttatcaacatccttcgccttcgcctgtctctacttctcttcaaaaccatcaccttc

SEQ ID NO: 186361 - DNA, 362 bp, Glycine max
agcttttcgattcattctatgtacccgtggtggtccacattgtgtttcgtgtatttttattctcgtttcatttgctttttatactcccttttgacgtgcttaagccattttatttaagtcatttctcgcttaacctaaaaataaaataaatttccaccgatcgtttgaattgtattatccgctaacttcgattaaaatgaattctgaccgttcggtcgtgccgtaaccacgttgggaaatcaaaaagaggtgaaataataatataataataaaaaaaatgtcttttagcaaaataaagcggaaaatcaatccgacgttttctctttgggatttctcattcttaattgaattgctaataacta

SEQ ID NO: 186362 - DNA, 279 bp, Glycine max
  unsure (1)..(279): unsure at all n locations
cctgtgctcccaacaacctataaagttggcttgcctttgctagcgtgtttattatatattagggctcattagtctttaaaactaataacaccatgttactttgatcaacctgcggntgcatactatctattgttgtttggttctatcttccatgtctaatattttgtagctccagaaacaagtatagttgaaccttatttcaactctgtatataccaaaaaagctagctcttattaaaaaaaaattaagaattctgcatccgttctgacaagaccgatg

SEQ ID NO: 186363 - DNA, 344 bp, Glycine max
agcttgcttctacattgtcgtctgttacgaacacgttcttggtgccattcccggggaattgctctccacttagatagtataatctagtgcggaaacatttattcttttttctttgactaatgcctgtgaatagatagaattcactgtctctcttgatctggttaacagctgccctgtttagccgcttcttgtctgcgaggtgcttcttcagcaaggaatttatctccactacatttggagattgaagctacttgcacgagaaactgtgcacataggaggagatgagctttcgcctagaggatagcacatccaagttgcaagggaactcgatcatccgaatcatc

SEQ ID NO: 186364 - DNA, 400 bp, Glycine max
  unsure (1)..(400): unsure at all n locations
ctctcgtatgggccaagggtgcgtcttccaagaaggaaaacgcgtggagtcgccaccaatgtttattcaaggaaaacgtcagaaaaaccaaaaatggaaaaggtcaagggtctacgtattttgaaaatgagggttcgggaatcatttangcatggggaaagtattagcaccccacgtgcccatcacaagggacgacaacctctaattgagtgtgcaaatcatgacttcaaaattgtatattttcccttttatatgttntttgagtattttccctttttatgttctttttttattttttggcctttntacgctctttacttttttgtggtcgacaaaggttttccctcgcttctacgtattcttcaattgcgatgagaaaatcagacctacgtagttcttt

SEQ ID NO: 186365 - DNA, 421 bp, Glycine max
agctagaccattttggtcacgtttccaacacttagaatccttgtttcttgtactcaagggtttgagtggatcaccaaacctgattgttagctttcttagggtgggagtaatttaagtgttgtgtgttcaagagttctaaagcatcctgagtttacatcaataatttcttaagatttaacacattttttcaataatagattaggacaacataactaatagattggggcaaatttttttttccacattcatgagtttttagaaatatcgccaagatctcatacaagtgattccacttgacactcatataagtaatatcatcatgtgtatgatacaaatcacacaccacccataaaggacatgaaaatcattaaaaacttctgaattgtgtcaagcttcctcacaacataaagcttaactaaat

SEQ ID NO: 186366 - DNA, 418 bp, Glycine max
agcttttatattttgagccactatttgatacttatctgtgaggttcatcagagtataacctttttttaaatgacaaacatattcctgtacaagctttcttttttcattttatctacaagaggaacaagtgcaatggcctcaatattgtctcttcaatttaagttatgttaaaatcaagaaataataaataagtcacttaaatttatatttgtctctttttgccccattcagccttgtcaaagtttgaaatgaaatgtctcatggtggttgattagagatttaaattaatatgattaggtcaataaaattgatgtatatcattatgaaaatgcatcatatttgcagaacttttggattggaatcatgtatatgatgtatgatagttaatttagagaaggcagctttatgacttctgagc

SEQ ID NO: 186367 - DNA, 313 bp, Glycine max
  unsure (1)..(313): unsure at all n locations
ttcatgactaggaaagatctaagtctctaactcaacccacactctgttcttttgctgcattgagtcaacaaagaggttagggaggattatttcatttcttaggacccatactatgttactagttgctagaatttcatttatttgacgattttagatgttaaacactaatgccataactcttttattgtggcattgtgaatgatgaacatagaatctgtgaattccgggcttagagttgagttccttgaccccaaaaacatangaaagcataaactatgtctcatttggatctatgtagcccttgggaaatgaa

SEQ ID NO: 186368 - DNA, 437 bp, Glycine max
  unsure (1)..(437): unsure at all n locations
agctntgagccaaaatcctgactcaccacaaaccttgacccagggtgagaatgccaatccttaccctcggaagcaaaaaaaagaagagaaggaaaatttccaatcaaaggaaaaaggagaaggaaaatttccaatcaaagaggaagcaataaaggagagaaggaaaatttccaatcaaaggaaaaaagagaggaaaggaaattcccaatcaaagagtgggagaaagcaaaaagaaaagaaagaaaattcccaatcaaagaatgggagaaagaaaaaagagaagtgaaaaagaagaaagttcctgatcaaagaaactataagatatgtgcagaaagatcttttgaccagatgatatctgaacaatacagaattgtcaccaaatgaacaaaagaaagataaggaaaccatgacctaaaagtggacttctccctttgatt

SEQ ID NO: 186369 - DNA, 307 bp, Glycine max
agaagactcaatcaagataagtgtgagaatgtttttttttcaaaaactgaatagcacatggatttttctcaaaacatggttaccagagagtttttactctctgcgaatcgattaccatattattggaatcaattaccagtcggaaaatggattcgaaaaagttttcacatgaatttaccatgttccaattgatttcaaaaagctggaatcgattacaatgttttggtaatcgattaccagtgccttcgaacgtcgaaattcaaattccaatgttaagagtcacatcctctcacataagagctttgaa

SEQ ID NO: 186370 - DNA, 281 bp, Glycine max
agctttaacctcatcgtctctcacagtctttatatttgggagccaatccaatccttgtgtgcggactctcagccacttatgatagccgtcgatgatcccattactgcttcccctaagctctctgtcctttcttcacgccgcatcacatgccttgcgaactccttggagtacctttgcattgtggtcactgaaaccccgtgtaatgaaaggcgtgatgctttcatctaatggcgctcctctcatggcgtagccaagctgtcttatggcgaggacatgattat

SEQ ID NO: 186371 - DNA, 607 bp, Glycine max
  unsure (1)..(607): unsure at all n locations
tccgacgctcgcttcgcgctgacatgtgtggcgtgtattggatccgcggggtcgtcgtgtacttgttcacgcacgatccgtacatgcgagctgngcttgcttcatngctcttanactcacaaccatgcggagccacccggctctgtggcccctgncncggcnngcgcagtaactgcattctcaactcgtggcggagtaacagatgataccctctgttcgtcccagaacctcacttccattcaatccaccatttctgcaactatcgattctcagtcgttcttttgtggtaccggtnatactctctttaattagtatgcataccaacatttcatctcttgtacaaaatattggtagtgtcaacaccatgtcattaggagacaaaatatctgaatgaaaacaaaataggctctattgatttctataataattacatttaaaagaaaatcatatntaagctactgacactaacttttcactgacttttgtttctctcgattgatanaactagaaagggcagcgaggacagataaacacaagctatgtatgaataattagagatattgtaatgaagctatacgcatgttactatggaggaaggcgtgtaaga

SEQ ID NO: 186372 - DNA, 169 bp, Glycine max
gtcatctgttgctgaaatcgcatatcatgtatgaccatttgccatactaactctgctaacgaacgctgatgatgagtcatacatgcttgttagccatgctgtgactgacgctattgatagtgctgaataggagggggaacatattgctcgcatggaccatctgtattcg

SEQ ID NO: 186373 - DNA, 415 bp, Glycine max
  unsure (1)..(415): unsure at all n locations
gccaaaagaatgatttcaagattgagtcaacaagttcaagttcaagatcaagattaagatcaagattaatttcaagattcattagaagaaatcaagaagattcaagattcaagagaagttgatttcaagattcaagaaaagacatccagaagaatcaagattccagagaagatgaattcaagattcaagaagcaacaagtcaagacttcacaagggaagtattgaaaaggatttttcaaaaaccaaacatagcacagttntgttttacaaaagagttttcttaaatttttctaagttaccagagtattgtactctctagtaatcgattaccagtttcctgtaatcgaataccagtgataaaatttgatttcaaaatggttttaactggaattgaacgctcaaatgattttaaatg

SEQ ID NO: 186374 - DNA, 360 bp, Glycine max
  unsure (1)..(360): unsure at all n locations
agcttaatgaccctcaatctttcaatgattatagacccatctccctcatagggtgtgtctataaaatcgtggctaaagttctggccaagaggctggcccttgtgttacctcaacttatacatgaaaggcagacgactttcatgaagggaagacacattcttcatggtgttttgattgccaatgaggctatagctgaggctaaggctaaaaataaaccttgcatggttttcaaatcggatttcgaaaaggcgtatgattcggtttcttggggttttgtcaactacatgctcatgaggatgggcttttgtganaggtggaggaaatggattaatggttgtctgtccattgcaacccatatca

SEQ ID NO: 186375 - DNA, 316 bp, Glycine max
attcaaatcatacaatagctcattcaaatcattctcaaacactcatttcatgcaaaacaatccactgcacatcattttcaatcaattcattgttcaaacaagaatttttgtacaagcaaacaactcagagtgctgatatttaaataactaaaatttaaagaactgaaattaaaatgactgaacaacaatcataaaataactataaataaactaaaatgttcaagatgcacatatttaaatgtcctgctcatcctgtggctgatcttcactaagatcccgtgctggagctgcttatgaatcctggataggctgctct

SEQ ID NO: 186376 - DNA, 379 bp, Glycine max
ctgaggtatcttgagttttccggttgtcaaaaattgtctgcctttgtaagaacaactattttagcttcttcgtattgtggtggtgttaataacgctaacataagcgcaataattaacactcaaaataccacatgattggaacgtcgaaaacattgaatttggaacacctcttacaatcttccctcattgctttcctaaaattcatggttgtacaaagtaggtcaaacttcaaagcatcaaaattaggaacatttaacacaatctaatttatgaaaaaaatccacattgggcttcaatcgtaatggaactttaaaaacccataacatttacacgaagtatatgcttacgaccctataaaacaccaagttaatttcttctt

SEQ ID NO: 186377 - DNA, 439 bp, Glycine max
ttttagttagacaaattgcacctcatttataatttggctttgcctaatcaccataagggtcaatatcatcaaagatggataagtataccttgtttgcccatgaacaactctctacatcatcacacatagattcattcccttcaatgtaatctttaccatgcttggttatgttacagtgtatctacatgagtgggttatttactagtgtctttatacttccatgcattgcattgcttctaaatctatctttcaagaagcttcttgtttatggttaaagttagattccaaaactcgagaactatgactttagatcaaataaaagattatctgtaaactccaaaacatgattggcaccacctaaattaatcctcaaaagaattttacattcattccaaaatagtgaaaaatggtacaatgtaatctcgtaagcaaacataac

SEQ ID NO: 186378 - DNA, 399 bp, Glycine max
  unsure (1)..(399): unsure at all n locations
tagagacatgacacatcatctctggtaaaatgaganctgtttcttgcctgaggactttcggtcaattctaattttagtcctgtagttctaaattcatcaacttgattcttatcctttaaaaatatagacgaattttgttcttttgcattaaaaaataagtggacttggttcttatttagttccttgatttgcaatgcataaggattaaattaacttattttttaatgtatagggacctgattgatcaattaataattagtgactaaaataaaagttgactaaagtgataagaattacaaatatattgtatcccatctttgtaatataaatgttttcaaaaaactataaaaggaaattcatggaataagaaaaaagaattatttttaatgatgtttaact

SEQ ID NO: 186379 - DNA, 445 bp, Glycine max
ctcaagaaagcttctcaaggaagctacctagtctataaattgaagcatgtgtaacacttgttgtaactgtgatgaatgagagtcttgtgagacatacttcaaagttccacttctctccctcttttagtccttcaatttcgtgctcccccctctctctttcttttcctccattgaagcatccttacaagcttcttatccaaggttcatcttggtggtgaagctccttcttccatggcttattccctagtggatggcgcatcctctcacctcttctcctttgtcttccgctgcatctccatggtggaaaatcaccattaaaggacctcattgaagctcaaagatccagcctccatagaagctccacatgcaagcttccaccaagtgatatcagagcacaagagcttcaagtatgtgctgcttaaacctccattaattttttgcttta

SEQ ID NO: 186380 - DNA, 429 bp, Glycine max
ccatgagatcctgttctttctgcaagtttgtttctcatattcttgcttagtaaatgtggattatttggctttgttatcaattggttcttgaatcttgatttagtattttctgctggtccataattctttaatataattgagaacctttttgtaacaaaaccaataaaccatgtgatgtaacattaatggcggctgggaaccattgaagtgttttttttttttttttgcttatgctacattattgtgtttcaccatttcttttcttgcatgtttttaggacgtgtttaacctgttaccaaatctcaatgttgttgatcttttataaagctttggtatagggctccagaacttcttttgggttcaactgaatatggattcaacattgatctctgtagtgcatgatgcctatttgctgagatgcttgttgga

SEQ ID NO: 186381 - DNA, 431 bp, Glycine max
  unsure (1)..(431): unsure at all n locations
taacaattatatgattatattttcattactatagtatttgttttgtaatgaacatgcttaaattgaaaacttaagtttgaatagagggatgaaaaacctagctataggaataattgtatcgctttctacaatatatcaattaccacatcttttaacaccttgtttaattaaattcctcattccagagctcaactcaaatttggcagcttcaatgtttgttcatgcaattgtgaatatgtccaccacattttagaagatatcctctagaattaccgtagcattggtatgtgcttgtgtcctcctaatttgacaattaatctatttgaattctgaattcgcaaggtatttttgaactaattanggcactatnnttgtgtgtctgtgcacgtgtggcanggtttgataatccatcttcaatctgcttgatatta

SEQ ID NO: 186382 - DNA, 426 bp, Glycine max
  unsure (1)..(426): unsure at all n locations
acccagcttgtgtatggttaanttattatcttgttcgaagggtctttgttttctatatactttgttgattacggatgcatgtatgggtgtatatttcttacgcactttggctttttgttgatgccaaagggggagagaaaaatggatattgtggaaatcaagatattatattttcaaaactctaaaattaagtataaattcaaaaagaaagggggagaaagggatgagtgaatggtaaaacaaaacttgtatgcattctcttgatttcaggattgtcatcatcaaaaaaggggagattgtggaagcaatggcttccaaggttattttgatgatgccaaacaatcaagagttaagctaagtgtcaagctaagaatcaagaatcaaggttcatgattcaagactcaagaatcaagggtctgaatcaac

SEQ ID NO: 186383 - DNA, 353 bp, Glycine max
  unsure (1)..(353): unsure at all n locations
atgccttttactgacccttaattgatcaatgcaatcagntgctattttcctgaatagatgattgaggaatctatgtctttctaattccaaattttgggcaggttccttaacaaagtacttgtcatgataccaagtcagtgcacccaaaagcatagtgacaacactaacaataatgaaaaatgcttgttcaagttcttcttactcttcttcatctcttttacgttttcttgaagcagccgaaacatcaattatactactttccatttcttgactatccacactatataactaaaagaaaagtaatataataacaaatgatgtcattaacttttataagttgttcacataagctc

SEQ ID NO: 186384 - DNA, 470 bp, Glycine max
tgacacttataatactaagcttgttaactaaatgagctaagttatattttaatataatgttgattcatttagttcatgataaagaatgaattgtactcacaatatttgtgtgttacacgtacatattaaaggtggggcaggagaggagaggaaacttacaaaagaataaattaccatatgtttataaaatataattaacttatttcaagttttctataatttataacgacaatttaatcttattcggttgtttaaatatagaaatgatttatataaaaacatgtatatatgataaacattaagtgtttaattaaactatttatctaagcacataaacatcaaatgtaaaaattaattaacctttaaaatcaaccgattaccagactagttggtcatttgtgtcgcgttctagtaattctcgactaggagtgcgtttagtaagcactttggagagttattaattatttgac

SEQ ID NO: 186385 - DNA, 418 bp, Glycine max
ctatgcttaaattgaataatacgttaataactactggttttcgattaccatatatgtgtaatcgattacacagggcaaatgttgaattcaaaatttaataacttgtgtaaatcatttttggccactggtaatcgattaccagagagaaatctcttgaaaaagactttttaacttaaatttcttggccaaaccttttgctacttcagttaggaattcccttcctatttaatatacccttcctaagaatctagagactgtctcgatcatccatcttgaatatctttaatttctttgtcttgaataaagctgtgagaagcatgtgatcctttggcatcatcaaaacattcagctcgatcccgtgtctacatcatgaggttatttctttttcctataaagcatgtgtgatgttgtcgtaatg

SEQ ID NO: 186386 - DNA, 417 bp, Glycine max
  unsure (1)..(417): unsure at all n locations
tgagatgaagatgtgttgaanggtgaaacttactgtgtttattcgttgatcacataagggtacctggagatatgtgacggtggtcaagagaccttggagacgtcaggtggggtgctcatgtgcagacacaatctggaccaatcccgacccaacccgagcatattcagtcagtgagaacctgtgatgtacctaatcacgcgagctcttggcagtcaacagataatatgaacaaagaccacaaagcaaggagtcttgtggtggctggccaaatgtgaactgtgattgatatgtgggttatggcctctgttaatcgattaccaatggtgggtaatcgattacacggctgaaaaatgaagacaggacgctaagatgagctctggtaatcgactaccacgaagtgtaatcgattaccatgct

SEQ ID NO: 186387 - DNA, 430 bp, Glycine max
gcttgtcatcgtgagacatcagaggctagtatgtgaataatttttggtaggaaaaattctccaattgatagagaaaaatctaaaatcatacatcttatgcaaataaagcatgctagcccccaacattattgcattttgattccatctttggacattcaaattgttgtctatttttcctgttatcttttcctttgccttagtctaaatttcaaacttacaattcggtatctctttcttcttttgtttctcctcatttcttaataattggatttgcatcacttaagtacaaccaaagtccctctggattcaacagtggaacttcaatctcaatctttactacttgtgattaaattaggacacttgtcaatctattaacaagcttttggtgcctgtgatggagaacttggttttcttacttgtttgtacaaat

SEQ ID NO: 186388 - DNA, 433 bp, Glycine max
tcagactaaagcaaaacaaaatcttgtatccaaaacttctcaatttaatggatgttctaggtttgagaagtgaaattgagaatgaggtaaatttggaacaaactctcacctcacacaagtctataacatcaatttaaacttgctcaaactgtgtttacacctaaaattccaccgaatcaaaatttgactcctcaacacccaattttaccctagaaatggctctttgttcactttggtcatttgtttttctctcttgcacagcccaagctgtctcataagtcctaaatgacatttcaaactatgattaactcactgtaacctccaaataccactaaatccagaattggccgtgcaactctcaataactcactctttttccactcataacaccatattctcactttctaaccctatgttaactctacccttcatc

SEQ ID NO: 186389 - DNA, 376 bp, Glycine max
cgtggaagagtccgtcttcctacttttgtttgttgaccactgtttggtacctggagatatgtctcgggggtcaagagaccttgtggacgtcaagtggggtgctattgcccaaaacaaatcttgaccaatcccgacccaacccgggcatagtcagtcagtgagaacctgtgacgtacctaaacaggcgagctcctgacagtcaaccattttaagaacacagaccacaaatcaaggacgcttgtgtggtggctggccagctatggatcttgagtgatatctatatttggcctctggtaatcgatcaccaagggtgtgtgatcgattacaatgcttaaaaatggagacaggaagttgagatggcctctggtaatcgatt

SEQ ID NO: 186390 - DNA, 408 bp, Glycine max
gataatttttttgtgggtaaatagtcattttcatccttgaatgtgtaaggcactgacaaattcattcttgaaagtgtcacgtaagttctttcattaacggacgagagttaacggataaatgaatttgtcacacttttttcactttcggaaactaaaatttgaatgttcatctttgagaaacaaattcccaaattcttgttgagtgaactagcagacatcgtgagtggcataggatggctatttaatctgaccatgtatgcatgtaacagaaaaatggattaaattttgagttcatgtctttaatagatattaaatatgtctacttactagttaatgttctccatggtgatatatctgaactattatttttcttggttctagacttgcaatttggcaactagccatttt

SEQ ID NO: 186391 - DNA, 388 bp, Glycine max
gtaatgatttaacaattgacttgtttgatttgcccacgtcatggttggcatgcactgccgctttgccacgtggaatgttgaaactcgaaatttattatgaaaatattgtaccctataataacagcgtatgctaattgaattgtttaaaattaaattgtgattgtgtatataaaaaattatcattacatattgttaaatttaaatccattcaaaataaaaataaaaaatgactcaaaaaactaaaagttaaaataaattatttcttgtttatgttgaaaatcaaaccaaatcgtaacacttatatgaatatttattatgttaatgtatgggtgattattaattttaatatatgtttatgtgatatgtattgaaattatatatatatttt

SEQ ID NO: 186392 - DNA, 452 bp, Glycine max
  unsure (1)..(452): unsure at all n locations
gcttctttgtatgattgatctttgaacttcaataagggccttctatagatattatctttcatggaattgcagnggaagattaatgagaaggggtgagaggaggcaccatccactatagaataagccatggaaagagaagcttcaccaccaagagagtgtcttggataagaagcttatagaggaagcttcaatgcaggaagagaatgagagagagagagggtgggaattgaaggagattaaggagagaagttgaaatttgaagtgtggcttacaagtttctcactcatcaaagtcatgacaagtgttacacatgtttctatttatagcctagcacatgggaagcttccttgggaagctagaggaagaaaacttccttgagaagctagaggggggctactcacacccctctaatagctaagctcacaccatgtcataatacatgaaaatacaat

SEQ ID NO: 186393 - DNA, 391 bp, Glycine max
tgaagtgaggaagtgtggaattgtgagacttcctacttttattcattgaccacagagtggtacctggagatatgtcgcggtggtcaagagaccttggggacgacaggtggtgtgctattgcccataaccaagcttgaccaatcccgacccaacccgggcatagtcagtcagtgagaacctgtgatgtacctaaacatgcgagctcctggcagtcaaccgattaaagaacatagaccacaaagcatggaggtttgtgtggtggctggccaactatggatcttgagtgatatttgggatatggcctctggtaatcgattaccaagggtgggtaatcgattacaaggcttaaaagtgaagacaggaaggtaagatggtctttgggtaatcgata

SEQ ID NO: 186394 - DNA, 422 bp, Glycine max
  unsure (1)..(422): unsure at all n locations
tacttgagaagattgctatagaagctagagcttagcttctcacacctctctaatagctaagcacacctccttgagatgagaagctagaacttagctacacacccccaataatagctatagtcacccccatgacaaaatacatgataatacataatataagtccctactacaaagactactcataatgcctcgaaatacaaggctaataccctatactactataatggccaatatacaaagcctaaacgaaggaaaaaaacctattctaatatttacaaagataagcggactcatacttagcccatgggctcaaaatctaccctaaggctcatgagaaccctanggccttcccttggatctctggcccaatctacttggagtcttctatccaatgcccttgcggngtaggattgcatcacaaa

SEQ ID NO: 186395 - DNA, 344 bp, Glycine max
  unsure (1)..(344): unsure at all n locations
gggccagatatacttatccttcacatatatgagngatttatcttataataataaataataaataatctacatatacccttttaacaggtcattttgaaactgtttgtctagaaaatgatcttgaatataataaccagaaaagaaggaagttaaccatataaaaccataaaagttaagacaaattaaaatacaaataaataatgcatcatgtacattacccttaaaaaaatttatcaagagattcaatggtgaggaaggaatatatgagatacatatccaacccctctatggttcccccattgagctttgtaatacaatgccgttgtgtttccttgaaagccctg

SEQ ID NO: 186396 - DNA, 258 bp, Glycine max
attggaagtgcgggagacagactttgtggtagatttagggaatgcccttgcggataaccgggtggggggtaaggagaaaattcgttattggctgagtaaagatattggtgggttggggggaaatttggcccttcatgaatggcaacacagcttgggtttttccctttttttcacccttttcatttgccccaagtttctcattcgtccaagaaggatgaataaaattgccccttttcaaacccacttcgatccttttgt

SEQ ID NO: 186397 - DNA, 429 bp, Glycine max
tggaacacactatgaaagccaattagtcatttcaattcttgcaatagatcatacaggctacaaaaactggatgggtaagcaattccaataaaatggaatgctacccatctaaagttctacttcaggtaaaccattgcaaaaaatgtactcaattaaccacatggaataaaattctacctctcttcacttttataattttgttgtgccaactctacaaaggcttgttaaacccaaggttcattgttggtaagccttgacaaaacccatgacaggcgcatccctggtcgcagctccaaaggctcgtcaaacccaaagtctatccttggtaagtcttacagttactaaagctcgtcaaacccaatgtctatccttagtaagtctcgcttcttcaaaggatcgtcaaacccaaggtccattcttggtgagtct

SEQ ID NO: 186398 - DNA, 229 bp, Glycine max
ggagaaaaaggacgaacagaaaagcaaggaaagagggcaagggcagaagaacgaggaaggaagaggaggggcgaggaggagaggaagaagggcagggagagggggcgcaggaaagaacgaagggggaaggaaagagaagcgaggaaagaggggagaagggggggggaaggaagggaaagaggaaaacggagggaggcagggggaacgaagagggggaaagacgggagag

SEQ ID NO: 186399 - DNA, 397 bp, Glycine max
tatatatttctatatcattgttcattagaattgccttttgttactaattactcactaatggaatgtgtcattttgtgcaatgaatttttgctacagatattgtctaacggattctagttatgcttgtacccctaatgtgaaacatgtcctaatttgccaatcttctattccatgtgagcctcttctttctctattgttgttataatacgtaatgattgagataagaaggctttgtgatggccctcttggatcttcattttgtctgcacccctgtattgtatggctggacctatgtttctgtctgcacccctatattgtatgcctgcagctctgtttcttgtttttcgtttactgctcaattgtacttatcacttatatcatgatttctttattagca

SEQ ID NO: 186400 - DNA, 404 bp, Glycine max
  unsure (1)..(404): unsure at all n locations
tggtggtgaagctacttcttccatggcttattccctagtggatggcgcctcctctcacctattctactttgtcttccactgcatctccatggtggaaaatcaccattgaagctcaaagatccagcctccatataagccccacaagcaagcttccatcatgttattaaagctatcctgatgactttcgaactcgcaccaggtctcaaaattaactttgcaaaaagcatgtttggagcaataagagtgcctgatcagtggaagcaacttgcaaccaattacttgaattgtaatttgttggccattccttntgtgtaactgtgcatacccattggtgcaaacctgatgcgatgtcagttgtatgatcccatcattaattaagtgtgagagaaaattagctaagtgga

SEQ ID NO: 186401 - DNA, 419 bp, Glycine max
gcttcttagtttcagatgatgcatattggttgtgagctacctcatgcaactccctttttgtttgtgatcatttctggcgctaaactgctgggaggcggaaaccatcttctcaattaaatttctggcttcagtaagagtcatgtgtccaaaggctccaccactggcagcatctatcatacttctatccatattactgagtccttcataaaaatattggagaagaagctgttctgaaatctgatggtgggggcaactggcacatagtgtcttaaatctctcccagtactcatacatgctctctccactgaatggtcttatacctgagatatccttcctgatggctgtggtcctggaagcaaggaaaaaattctctaagaatactctcttaatgtcatcccaactcgtgatggaccttggag

SEQ ID NO: 186402 - DNA, 419 bp, Glycine max
gtataatgagaatctgtccttccacaggacttgctatttggcatctgaagtctgggagctctgggcagatgggtctgctaaagctagaagtggggctgaagtagaagatgcaaggatgccagctattggtgcaaaggaaaagggaacatcatctgctctgagcttgctcttccttgcctctggaaaattaactgtttggtcattcgcattccaacagttctttatgatataggctaagtcaatgaccggtcttaagttcttgtatgatgtaagagcatcagatccaactcccctcaatctacacaaagctgtgattaatgctgggaagcctaagcgagaagagttagactgagccatcatggtcatttgtccagagatcaaaccgacaatgttcatgtccattcttgtgattaatccat

SEQ ID NO: 186403 - DNA, 274 bp, Glycine max
  unsure (1)..(274): unsure at all n locations
accatcatcgcttctaggccatcaagggatggtcaatttttccggagcgacgcgtccatctcatggatgacgaatatactgatttgcaggaggagataggtcgccggcggtgggcatcactggttacccccatggccaagttcgatccataactacgccttgagttttattccaatgcttggccaatataggatggcgtgcgtgacatgatgtcctgtgtgaggtgtcagtggatcccgttngatgcagatgttatcaaccagctcctgggata

SEQ ID NO: 186404 - DNA, 361 bp, Glycine max
ggacactatcaaactttctcatcagataattgaaaggtggttaaatatttttcacatgattttctcaaaactgtgtaccaaagagtttttactctctggtaatcgattaccaaattattgtaatcgattaccagtagcaatatggattttacaaacccctcaaactgaacttacaacgttccaattaattttaaaaagctgtaatcgattacaatgttctggtaatcgatgaccagtgcctttgaacattgagtatcaaatcttaatgtgatgagtgacatactttcacataaaagccgtgtgtaatagatttcactgatttgtaatctattaccagtgattgtttctaattgaatataag

SEQ ID NO: 186405 - DNA, 339 bp, Glycine max
  unsure (1)..(339): unsure at all n locations
tctatagagcctttttctttgagctgtaataaggaaccttcgnntggngattcctaaccattagagctggcatcggtagataaattgataagaggtgagacgatgcgccatccatttgataataagccatggaacgataatctttaccaccaagatagtgccttggatgtgaatcttatacatgaagcttcattggaggaaaagaatgagagtaagagagaggggggcgtgtgaatggtatgaaaagacagagagaagttcgaactttgatctgtgacttacgaggctcacatttgcatatgctgtgatgcgtgtttcgacgttctttatttatacact

SEQ ID NO: 186406 - DNA, 468 bp, Glycine max
cgtgaccttaaatactaagcttcttgataacacttccttgagaagctagagcttactactcacacccctctaataactaagctcacctaccttgagaagcttccttgagaagattcctaaagaagctagagcttatgtacacacacctctctaatagctaagctcacctccttgagatgagaaactagagcttagctacacaccccctataatagcttagctcacccccatgataaaatacatgaaaatacaaaaaattccctactacaaagactactcaaaatgcctcgaaatacaaggctaaaaccctatactacttgaatggccaaaatacaaggcccaaatgaaggaaatacctattctaatatttacaaagataagcgggctcatacttagcccatgggctcgaaatctacccttatgctcatgataaccctatggccttcccttggatctctggcccaatct

SEQ ID NO: 186407 - DNA, 453 bp, Glycine max
  unsure (1)..(453): unsure at all n locations
tgtaccatgatcgtcatcaagtgatgagagctacttgtctttatataacatgcanattccaactctttcactcaattaagaggctatacttctacaagacaaaactagcatccaaacgtgagttcggccaagaaaatgcatgatactgacacataaactcacacaatatattacataaaagtggtttatcaacaggcacgaaccacacgagcaataacacaagggtgagcttataaaaacaaacatactaaatcaacaatacaacttatcaatgcaagcctaaccacatactataacaacaatacaacttatcaattaaagcctaaccacataccatcgtatatagaacataacatgcagaagtcatgtatgaaacataaatcttagaatttacataatagagtatttcataataatcatcagttcatcaaccatcaaacccagattcaatca

SEQ ID NO: 186408 - DNA, 395 bp, Glycine max
  unsure (1)..(395): unsure at all n locations
actcagcttgttagaccttccactacattcaactgtaccaatcattctctggctgcttatatcctaaatcaagcacgaattataaaagaaggttaactagcaattcaatgaanaaaccaattgtgatataaagattaaattgaaattgaaagatggcaagtatagcacatcttctaagtgtaaaaactcatgagagaaattattgttggcagccaacaaagacataagtgcttgatactattgttgagtgattttaatgtcatggccattatcactagtctctgaacttgaaacattttcttcttccttaacagtgttattaactgaaactccttgaagtttatagaatttgtgactaggtggataactgtgcgtcttatagcactcatccactg

SEQ ID NO: 186409 - DNA, 231 bp, Glycine max
  unsure (1)..(231): unsure at all n locations
atatatatgtgatcngaatgatagatgngngngtttttctttcctagctacctcatatactgaggtggtatcagagccaggttccgaccgctggcatcttcggccgccattgtgtgcaacgatcctagggttcgaaccgcccttgatcgcgcgacccaaccctgcttgttgcgatcgacattgaaatttgtcacgcgccgtcacagcttctcgcattgtccggagtgtgtg

SEQ ID NO: 186410 - DNA, 343 bp, Glycine max
actcaactgccctaccttggaatgatctatataaattgccaaatcaactccctctagttcagttgtatagaaagaaagatacccacatattaaacatatcctcctatgaaagcaccatagtgataatgaaataacctaccatagcgaagggaaccatgaaatgattttaccaaccttgggtgcatgaatattgatgttaaaaactttgatgacctgaaactcactcaaagaggatctcatacagcttgaagtaagataaccggcccacaagcaaaatatgagcaaacataaggatcattgcttgctgctatgagacaaatagattatgaaagcaagcttgatt

SEQ ID NO: 186411 - DNA, 444 bp, Glycine max
  unsure (1)..(444): unsure at all n locations
tgttgaagtgtgatgaanatcgtgtgatgtatggtctatgttatgagcctacatatgttgacaagaggaggatttctttagaaaagaaagaaagaaagcttagacttgtttacaagggtgaggaccatatatggagatggtccccatttgtcacatcatcataagctttgttagtgcatgatggatgcatggagatcaagttgccatgctggacgaagaaaccaatcatgattagccaaattgggtgcaaccatgttccccaagctttgaattgataaattggcaaatcatggagcaacccgagatttctatgtcggatccaatgatatcaagtagtctggaccctatagtatggctgggctatatggtctgctcctcttgttgagcatacttttctttaatggttcagtgactacttaatataccacaatttattgatatgtc

SEQ ID NO: 186412 - DNA, 404 bp, Glycine max
gcattttttctcgtttgagtaccttttataccccctgttgacgtgcttaatccatgttacttaaatcgtctctcgcttaacttaaaaataaaataaatgtccaccgaacgtttgaatcgtattatccattagctgctgttaaaataaattccgaccgttcggtcatgccgtaaccacgttggaaatcaaaaagaggtaaaaaataatataaaaagacttttttagtgaaataaagcggaaaatcaatcgggcgttctctctttgggatttctcattcttaatcgaattgattaataactaaagtgaaactaaggctaaaatcaatccacctagtcaagctcgtgcacagaaataagcttttgaaggtcgtcatttcattttctcactaagtaaaatggatcatt

SEQ ID NO: 186413 - DNA, 422 bp, Glycine max
tgctgaaactgagtatgtttgaaatgcaggcttcgcattttctgtcttttagttgtaagtttcccgacagacttaaccacatgtccaactttagttattactactcatcaactaacctcgttaagggcacatgccctacaattcaacaaagggatcgaggaatctcctatatgtgaccaaattgacatacgactgtctctggtagatacgcacaatagtggttgccaagtcgaaggataccagaaaagtatggcatctcgtgaaacacctgcaactatttatgatcctcaaatgacatcatctattcagagagagtacatgatctccctctagggctcaaaatgtgcaaatcccctgtcttccatctacaatcatgatgactttgtgtaatggcggaactacagtcatgtgatggtgtgcac

SEQ ID NO: 186414 - DNA, 301 bp, Glycine max
taatccaaaggacataaactatatcggtcattctttgtgttcatgcaactaatatatatacttcaagatgttttgacctttgttgatgaatctttaatgttactttgatactgattttaattttattttttcaagcctgatatgttgcaaacagatgatgaaggaatatcagaggatattattatgttggaagagctttacctatgacaggtactgattgatgctgttgctagctatactttattatttgtcaaaatctgtttcccataactattattgggtatgtgatattagccatatt

SEQ ID NO: 186415 - DNA, 240 bp, Glycine max
atcgacatttatatgccgacttttttgttcctatccctatcccgtataggagaatcttcacccaatttggtcaccgtaactgggtccaatccccgactcagactctgactctgactcactccaactcggacatgtgaactccctacgatgctcgccaagtcgaatacctcgaccccgccgccgccgacgaatccggttatcctgccaccatgcctcccgccgttcgcccccattttatcc

SEQ ID NO: 186416 - DNA, 420 bp, Glycine max
tgctgctgtgtgagagtcttattttgagaatagaaacttgtgtctaaagggtaaagagaaattttgaccattaatgggcaattttttttttaatttaccaaacgggaacaatttttgaatgatttaccaaatgtcataagtcatatgaaatgctactaccatgttaaatacaaaaatgtgatattctatagacttttattttttaataaagtcgtatagtcatcatgactcttcctatatttgtttattgaaaaacatacaactttatagtcatgtcttgtactataacttcaaagtcgagtgttgcctatgactataataatatgcaattatttattttctattttctatttttgcaacttatgttgtttctaatattatgaattattatttgcaaagttttttttcctaaattatgaa

SEQ ID NO: 186417 - DNA, 413 bp, Glycine max
tatgacattaaacaagcactattctggaggcaacccattatatgtatccattcatttacgctttggcgtttatttagtttttcagtttcaacatttctgttcaattattatttcagtaaattagtttagttcattttatttcagtcttttatttttgttcttattctttttttatgcattgaggacactacatgtattaagtgtagggaggggtattattaatcccctaactctaagctctctgtgatatatgtgatctctttcattcttctgggtctagtgttatgaaaatcccgggtgtagaattttgagtttttaagtattccgctgataaaaaattgtgtgtgtatattgggggaattggtgttttgttcaagaggggaacatggcatgcatgactatgaactgttctt

SEQ ID NO: 186418 - DNA, 302 bp, Glycine max
attaaactaactcctgtgatccgcattctacattgaagtaatatacagggacgtactttaacaaaaggcataaactctccgtaatacaacataagaaattaagaagctatgcgcatcttcttaatagtctttgccaagaattctttaccgaaaatgcaccctatcgacaagcactcgttactaatattacacgactcaggtgtattgtacttacatcaacattcttggtaatcacatcatgcataccaagatttgggtccaaaatgccagtcactctggattctatactatctaccaaactt

SEQ ID NO: 186419 - DNA, 454 bp, Glycine max
gacacttataatactaacttgtaacaattaaaaatgtatttatatattatccttggataataaacaaacacgtgtctatcaacttttacataatatttaaatcaacatttgaaattcatcacaaggatgcaaattacgaattttgtaaaattgaaaaatcaaatatctcaattaaaaaataaaaaaactaaaaacacaagataaatataacaataattacattttaacctatttgatttttggtatccttacattttttattttttttatttctcacactttattgttttattaaaataacaaaacatgataataagctgtttttattttcaaaatttaattaaggaaagataatatgttttgtactttcacgttaatccctactatcatcagaattcctctcttacgcttaaatctcttggaagaaaatcttctttcccttaaacctcttcaa

SEQ ID NO: 186420 - DNA, 343 bp, Glycine max
ttgcttctacagattggaatttacaaagaaaaatgagattcttcgatcatagatgtttgtccacataataaaaagggggacccctaatggtagatagatcacattcaatccataaaaataaaactaacagacggtcatacgatgagcacagaacaagaaaacgaagtatggaatgatcgcgatcgcaattcagtagcacctcggctttgtttcctcttctttattcttcttctttcttagttctctcaattccctccacttctgaaccttggaaccctttaaaacacccccatgatgcctatttataggcaaaatgccaccctgtggtggttgcagcttgccc

SEQ ID NO: 186421 - DNA, 359 bp, Glycine max
gcacgtatcattcaagtgtatggaccatgtcagactcttgtgctcatcgattttggttccagtttaaacgtgatgcctaagatcactttggagaaattaccatttgatgcttcccacttaaagccgagttcaatggtggttcgtgccttcgactgcactcgccgagaggttaggggagagatcgatctcccagtacagataggccctcacacctatcaagtcaccttccaaataatggatattaaccccccctacagctgtctattggggcgcccgtggatccactcattgggagttgttccctctacactccaccaaaagttgaaattcgtagtggaagggcatctggtcatcgtatc

SEQ ID NO: 186422 - DNA, 450 bp, Glycine max
  unsure (1)..(450): unsure at all n locations
gcttgatggtgtcaagaagaaatcacatgtgtgtcatcatctttatagagggagaatgtgaatgtatgtatacatgattttgatgatgtaaaaagaagaatcaaacaatgctcatttgcttcaagattaatacaagattgtttcaacaaacaaagccttgattcaagatttcttcaagatctagccttgcctcaaaacgaaaggtttcaagtcatccaaggcatacataatcgattaccaatacatgtaattgattaccaatgcacatgcaattgattaccaatacatgtaatcgattaccaatggtttgaaagtgtgtaattgattacacatcatatgtaatcgattaccagagactctgaacattgngaattcaaattttaaataaagagtcacaactgttcaagaaaaataactgtgtaatggattacactagtgttgtattcgata

SEQ ID NO: 186423 - DNA, 256 bp, Glycine max
ttcatgtgcggctgaatgggcttatagcctaaaccatgcttcccacgagttccttgggatttatcatgctcaacatgtcggcggtgactttgcctatacccatcccgggttcataacacaggcccaacatatgtggggccatgattaccggtgcatcagacagacatagctgtccaaagagggaagccacggaggatatgctgaccacctcaaaagactggaaggcggttctaacgattcttctcgggtggaaata

SEQ ID NO: 186424 - DNA, 420 bp, Glycine max
  unsure (1)..(420): unsure at all n locations
tgcttcattgattcaattattttatttaagntnggttcttgttcgtttaaaaatatttagtttgatctcttgtttaactttttttatagcttaaccgtttttgttctccctttattggacttcatcttgaataattgttaagtttattaaaccgtagacattgtaatgctggatgaagaagtaaaaaataggaagacaaagttatagatctgcgaaatgcaagtaatgataattctctaaataaaattacaatttactaagtgataaaaatatgtacactattattattatgatgatgatgatgatgatcatcaatactatctttcttatctaaatattttttgtgattgtgtctgacacatacactcactcacatgcgtttctgagatattcacgaaccacaagcctttaattataagc

SEQ ID NO: 186425 - DNA, 399 bp, Glycine max
cttgccactttttatcgattacattattctggtcatcgattaccagagatttaacactctggtaacatagaaaattctgagaaatactcttttgaataacaaaattgggctatgtttgtttttttgaataatcttttcaatacttcccttgggaaagcttcttgatatcttctcttgaatcttgaattcatcttctcttgaatcttgaaatcaaacttctcttgattcttgaatcttcttgatttcttctcatgaattctgaaattaatcctgatcttgaacttgttgactgaatcttgaatcattctcttgggctttttttcatcatctttgtcatcatcaaaactacctgaatcaacttgattcatcttcataaacctgcttctcacattgatctcc

SEQ ID NO: 186426 - DNA, 304 bp, Glycine max
tcgccttcaaaaggctacgcgccctcaccttcataagactattcgccatctctttgatatggctacacgtcctcaccttcagaaggctacacgtcctcaacttcatatggctacatgtcctcaccttcatagggctacacgcactcaccttcaaatggctgcacgccctcgtctttataagactacgcatcctcactttcatagttctacacgtcctcaccttcatatggctacacgccctcaccttccgaaggctgcacgccctcgcctttatatgactacacgtgctcacctttagagggct

SEQ ID NO: 186427 - DNA, 426 bp, Glycine max
  unsure (1)..(426): unsure at all n locations
tatgacatgcttgtatatcgaaagagagttatnggtttgctatttatntataaaggagggctctcagtcaaatgatcctgatctctcactgaggcaaaataaagttccagattatgccgatcgtttatttaagaagcagatgcgtgctgcttggttatttcgagaggcagctattaagcatggtggggtccatattcagggtgatggcggcgatatgtatggcccacagactgatgattctgaatgggagacagctagtgaaagtgatataggaaatgatggacgggatgacatgggcgaagacgacgatggtgattggaataatgatgatgagaggaaaaattatgacaaaccctcgatgaaaggtatgttcactgataatttcctatttatatgcgttattaataatctccattattatgtgat

SEQ ID NO: 186428 - DNA, 359 bp, Glycine max
gtgaggaactttgtctgatcctcaaggtgcatcatcaatcaaactttatcgaagacaatatggaccgcaatagtagaataagttgtgtagctcttcaatagtcgagaatagcaaaatgcattatcgtctacagaacatgtcttgaaaagtttatccaaagctcttaaagtcactattcatctaatgatgaatctggaaaagactcggatgaagatgagctaacctttatttcttaaatattccgttagatgtggagaaacgaatgtggctccaatgagataaattccttttgaagaatgcccgaagaaaaaaaagattgggatcagatgcgcttgattcgctttgaggcaaaaagccta

SEQ ID NO: 186429 - DNA, 402 bp, Glycine max
tgattgctctgttatggtatccaagcgttatatcaaaggaaaatggtttttaacctccattgtattgtctccgtgagaaggacgtttccttctctaagaaaagtatttcataaatcccaatggtgaatctatgcgaaagtgaatcttaaaccttgtttctaaatttcataatgatccaacagttaacaagtctgggatcatagttttactaaaatagggttgagtgtatgcgggaaaaagaaagttacgctgtcgaaagtaactgaaacaagtcttctcttcagtcatctatgctttcaaaatactacaatatcttcatttacatttcaaaaacatcaatgtcttcagtcatttacactttccaaagactacaattgatggcatcctaccccgcaagggcat

SEQ ID NO: 186430 - DNA, 356 bp, Glycine max
  unsure (1)..(356): unsure at all n locations
aacagcttcttattatttatgcgtgggatttgtttgtaatttttccctcaaatatacatggaaactcactttggatcattaaaaataattaattactatttggaagataaaaaaagacttaatatgttaaaaataatcacacattaataaaaaaaaacttagcatgtttaaagcaaaaaaaagaaattaattaaaattcgcatcaaatctcacttatggttggatcctctcctgcctatttagatacacatatggcgtgcgtgtcttacaatcttggggcatattccttgttccaactagtataactcttttaagatataanaatagttgataattggcatgtacagatttggaat

SEQ ID NO: 186431 - DNA, 197 bp, Glycine max
ctgcaacaagctggcttattaagtgtgcatctttcgctaaatgaacgtgatcatcgcaaggattttgattaatgtgttatagaaaagatatagaataatagatacagttggacaacattcttgatgaaatggaccgaatgtatgcacaaatgataatcatcggcttaagctaaatcatattagcttctttaaaaagc

SEQ ID NO: 186432 - DNA, 406 bp, Glycine max
tctagccaaatggacttaccttgaattaattcctttttatcccctttgagcctattttcccctttctttgttttgaagctcataacaagccttaagtgaaaaaccatgatatcaccttacccttaaggaattttggagctttgaaattgttttgggaataagctaggaataagtgtggggggtatgcttcattggaagatatgatttttggccatgcttaatgttttatttttgccatgcttgatgtatatatatattgcctagttctttctttaatcttcaatttcgtactgttcaatcaaaaaataaaatataaaaaaaatgaaaaatgaaaaataaaagataaagatgacgatgaaaagaagtgaagttgaataaataagggctcgatatgagaaacttgatt

SEQ ID NO: 186433 - DNA, 357 bp, Glycine max
tcctatctataaaagaacatgtgtacacttgttgtaactttgatgaatgaaaagcttatgagacacacttcatagttccacttctctccctcttttattccttcaatttcgtgttccccccatctctctttcttttcctccataaagaattctcttcaagcttcttatccaatgcacattcttggtggtgaagctccttctttcatggcttattccactgtggatggtgcctcccctctgctattctgctttggcttccgctgcatctccatggtggaaaataacaattgaaggacctcattgaagctcaaagatccatcctccatagaagttccacaaaccaggcttgcatcaagt

SEQ ID NO: 186434 - DNA, 421 bp, Glycine max
  unsure (1)..(421): unsure at all n locations
gacactataaaactcaagcttctacatggctaagcatgcatcttattcaacatctcttntgtcacctacttttctcatgtttattgaatggaaataagtagcaagcctgacactccccttatgaaccttcacggtggcaattttatatgttcatacatgagaaggaagatcctttaacactctgaccacttcttccattcttttcatgaacacatcgacatcgtaaatgtcctcaaagttcatgagacataactatattatgtacatgcaagtgcatctgtaaacacaataaattagactgatttcaaattaagttcaattgtcagctatttaacaatgtcatcagaatatagcattgtcaaagtaaactacatgcaatacaagcgggcaatactaacatagcataaaagtgtttgcattt

SEQ ID NO: 186435 - DNA, 210 bp, Glycine max
ataatcttctgctagctataaagacgttgcgctgatggctcttacctgcttcgatgatgtaactagcttatgatgaagcccatcttttacacgacgtgatcttcttcaacaggtctcttcattggcagttctgcgagacctttgttgtcgtccattgcataactattctaagcaccgcgactgcgtgaaaatctctcttgctccgctcga

SEQ ID NO: 186436 - DNA, 315 bp, Glycine max
  unsure (1)..(315): unsure at all n locations
gtgagaaagcgtggaagagtcaatctttcttcttttatttgttgaccacaaagcggtacctacagatatgtcgcggnggtcaagagaccttggggacgtcaggtggggtgctattgcccaaaaccaagcttgatcaatcctgacccaactcgggcatagtcagtcagtgagaacctgtgacgtacctaaacaggcaagctcctgacagtcaaccaataaaagaacaaagaccacaaagctaggaggcttgtgtggtggctggccaactatggatcttgagtgtgatctggaatttggcctctggtgatcgattac

SEQ ID NO: 186437 - DNA, 419 bp, Glycine max
atgcacttgatgcaagagaattttccagaactagggttcaagagagaagattgtgctgagatgacatggatgacattagcatttgttacatatacaaaaccaaatatgtgaatgcacctaacaactaaaatctgtagccaagttggtgcttggcatggtatcatagcttctatgatcaagtgcctaacattgcagttaaaagggatactatttattgatattcaacatccaatcagttccaaaatttatcatccatataataatttatcagaagtatctacaaatctagtaaagaaaatattgatgaacaagagcttatgctcaccaatgacctggagcagtctctgtgctggtgtgttgtctatattacccagtatttaatgaagcttcacaacctacatttaaaagacgacaatata

SEQ ID NO: 186438 - DNA, 421 bp, Glycine max
agcttgtgtattcaacacacatgtgagtgtgagtgtgtgatttggaatcaatctggcagaatcttaagattttaaaatacaacacaaacatatcaaatgttttattgcatttggcatctcactagtacaacccaaggttctgtttgatgcttcaaacattttatacagctctgtactatagatcgagatgggttaaattcattatcaatcattatatgcctaaattgctgctgttagattagaaaccaccaatatatatacagctggtatctagagcaaaagagaagtgcaggtgtgtacaactctgtgttgtgcccctaactaataaaaatccacaacattgtagcctgtaagctcaattgtaagcataaagaagtttgcatgtaattggaacttcctctgttggaatttataattaact

SEQ ID NO: 186439 - DNA, 438 bp, Glycine max
  unsure (1)..(438): unsure at all n locations
ggatttgatgctctcccacttctcccatgaagtgtcttctacaagtaatcccatccattgaactaggactagtaattgtctgcctgatgctgnctgntctcatcttgtgtcaaagattgggaggggtttaatgaggggttggttatcctctgacagagcgggtaattctagagcaggtctatggtggtggactggaatggttttaataagtaacaatgaaacacaggatgaatctttaaagttggcagcaattctaatttgtacgcaactaccctgattctntgaattatgcgaaagggaccatagaatcgtttcacaagtntagaatatttgcttctggtggctggcgtctaccggcggngccttaatctaaccaacacccagtctcctacttcaaagttcaagtcacagtgttgtntatctacgtataccttcatc

SEQ ID NO: 186440 - DNA, 442 bp, Glycine max
  unsure (1)..(442): unsure at all n locations
agctnttattntttggctaaaatgctctctggtaatcgattaccatattagggtaatcgattacaggcagttatntttggctaatatgctttctggtaatcgattaacatattagtgtaatcgattaccatgcgtccctgcacctatatatacaaatttcaaaatcagaaatttgcaacctctcttattttcaaaaaccctcgttcccaattttctcttctgccatatctcactcatttcttgtgcaaatcactccccacaaagcccaaacttctttttttttcattctctttcatttgaaccgattgaaatttcaaacaatctcttctaatggcggaaccatcaaagaagagaaagggttcttcaagtcggagtcaatggcatttcgagactcaagaaatgccgattcctttctctattccctcctgctcattggtttctt

SEQ ID NO: 186441 - DNA, 421 bp, Glycine max
  unsure (1)..(421): unsure at all n locations
ntgcctntagggcttgtacctcatcactttcttccgaagctttaacctcatcgtctctcacagtccttagatttgggagccaatccaatctttgtgttcggactctcagccacatacgatagccgccgatgatcccattactgcttcccctaagctctctgtcctttcttcacgccgcatcccatgccttgcaaactccttggagtaccctcgcgttgtggtcactgaaaccccgtgcgatgaaaggcatgatgctttcgtctgatggcactcctctcatggggtagccaagctgtcttatggcgaggccgggattataattaatacaaccccttgttccatcaagggaacatttggacatccttcgcatgaagatagaatcctgattcttccttccttctagcgagggaacaaattaaca

SEQ ID NO: 186442 - DNA, 413 bp, Glycine max
  unsure (1)..(413): unsure at all n locations
agctntgcttctacactccaccactggcagtatcaatcatactcctctccatgttgctaagtccctcatagaaatattgcaggaggagttgctcacaaatctggtggtgaggacagcttgcacacaatttcttcaatctttcccagtactcatacaagctctctccactaagttgcctaatgccttaaatgtcttttctaatggcagtggtcctagatgcaaaaagaatttctccaagaacaccctcttaaggttatcccagctggtaattgacctgggagcaaggtagtacaaccaatcttttgccactccctacagagaatgaggaaaagcctttataaagatatgatcttcctggacatcacggggtttcatggaggaacagacaatatggaacttcttaagatgcttat

SEQ ID NO: 186443 - DNA, 429 bp, Glycine max
  unsure (1)..(429): unsure at all n locations
ngctctanantacattgatgtttgtatttattggaggatgttgtatgccatttttgttttaagagtagcattccttggtaaaactaactttccaaatgtttgccttcgcaggaaatggccccgaggaagcttgcctcanagaggtctaagaaggataaggcggccgaagggactagttccgctcctgagtatgacagtcaccgctttaggagcgctgtacaccagcagcgcttcgaggccatcaagggatggtcatttctccgggagcgacgcgtccagctcagagacgacgagtatactaatttccaggaggagatagggcgccagcggtggacatcactggttactcccatggccaagttcgatccagaaatagtcctcgaattttatgccaatgcttggccaacagaggaaggcgtgtgtgacatg

SEQ ID NO: 186444 - DNA, 408 bp, Glycine max
  unsure (1)..(408): unsure at all n locations
agcttagaacaatatacgtggccttcgtttaattggctttgggcttggcgaccacgaccaacaaagtactttcggtacctactatatgttgacttgaccaacgctgttattggaatactgcgacaatctttcaacaccttattcacacattctgatagggtggttgtcatgtgaccatatcttcgtccagatgtatcgtaagccatgctccatttttcctttgaaatgcaatcaatccatcttgctatggctgganctcaatgacgaaatttttctaagttttgatcaaacacatgctcgcaaggagtgtacgctgcatcaaatttgtaccatcaaaagttgtaggtagatatgaaactcaaattaactctatgtgtaaataaaccttacccactttctttgacatct

SEQ ID NO: 186445 - DNA, 487 bp, Glycine max
ggacctataaaactcagcttattatttcacaaacccatgtgcttctcttcttctccacgcttaccaagctcaaatccattttcttttcttctccacactacatgacaactgaaaacaaagctgcaaagtgattctcttccgcgtcgacgtggttcttcttcctcgttgatggttttgcaggccatcttcaacggcgccttcttctcgacgacggattcttcttcaacagctctcttcattggcagttctgcaagtactcttgttgtcgtcgattctcgtcatcatcggttcccatcagtgttgttttcagccactcttgcaagcactcttgttgtcgtcgattctcgtcatcatcagttatgcaagttttcaaccagtatggtgaattagttcatgtgaagattccacttggcaagcgagggtggattgccaatttgcggacaggaataaatatatcagacataccccatgtgtgatagcatttata

SEQ ID NO: 186446 - DNA, 134 bp, Glycine max
  unsure (1)..(134): unsure at all n locations
gcttctgccgcatttgtataaatggtgtaaaaatgaaatanaaaagggttcagccccttaggcacttctctctctttcgaatttgcttaggaaaattgtttccgtgaagaatactccaaccgatgcgcttccgt

SEQ ID NO: 186447 - DNA, 461 bp, Glycine max
  unsure (1)..(461): unsure at all n locations
gtccttctgattctgtttatacattnttgacttgataatatgagatgaaatacagagattggacctcctgttagttgttatcaatgaatagcttaaacacttgtgcttgagtgaaacagtagccatgagactgtggtttgagctactttccttgaatctgtcttatgattaacctcatctaattgtattgttcacattttgttctcctttttgtctagttgcatattctgtgaaaacaagggataggtacacattgcttcatctttctcatcatgcaatcaatgaattttgatgcatacacccctatacataatcactggcatgtttaccacttgaggacaagtgagttgttatcttttgctcgaggacaagcaaaactggtaaattggnggagttgttagtcgatgaatacgactaactnttgtgataaaacatgtggnntgtttgaatactaaaagtac

SEQ ID NO: 186448 - DNA, 416 bp, Glycine max
agcttctgcggatccagaagcgcaccgacgttgctcacgtagatcttcttctgtgtgtactccgaaaccgacgacgaccgagccgccaccgccggcggtgccgtctgcggcgggttgctaacccgaccgatggatgccagctggcacgccgccatgcggttggcgatcttcttttgcggctccttgagggcgctgcgcgcgccgcggcgggtcttgaagagaatgaaaccgtagcccttggacttgccggagaccttgtcagtgacggccttgcagtcctcgatctcgccgtactggcggaacgaactgattatggttccggcgggtgtgtcccagcccacatccgggacaaatatctttccgtgcaccggatcctcgtgcggcgcccttcgatactctcagacacgtattggtgc

SEQ ID NO: 186449 - DNA, 456 bp, Glycine max
  unsure (1)..(456): unsure at all n locations
ntataatcgtatgtggcttgggaatnggtatttttttcttatttttgcgttgtgccagtcacaattctttggttntttcttgattcgttaaattcatcaaaggttagaagtaggtgtggttgggtgctacacttgatcagatgtatgtttccagatatgaaacggggaattctccatcaattattctacatatattcatttgatgaattatatttcgatgcggtacctttggaacaaaaaccggtaaaagaaatgcaaataggacaatagaaatagcttgatgcaaatgtatattagcactccgaaacctcaacttattcctacaaagccaaataacccataatgaatcattgttgaaaaaacaacttttattcgtatcttataagttnngacattggaattggcatatcaaaatttgttttgatctanagcttatggtgtacttacaagagagat

SEQ ID NO: 186450 - DNA, 345 bp, Glycine max
agctattatttatttaacagtctagtgtaatatgcacagtgttgtgaatttcgactgtgatgctaccatgacacctcctgcagtaaaagaggtagagggtaaattggaattattaactttgatttaaacatagcatttatttcattacgtaaagtgatcattgaacaccaacatgagacactacatgaaaacctcatagcataaactacattagacatgaatcatgccctgattaccaatcttgtttgaatttgtttcgtgggatggagacatgttacttcctttatgtctacaagaggagtcaggatcactatcatgatttttgactaccactctcgattcatt

SEQ ID NO: 186451 - DNA, 358 bp, Glycine max
  unsure (1)..(358): unsure at all n locations
agctcatactgtggatgctctgttatggtttccaagcgntaaacagaagaagaaaagattggagcctcaattccactgtctctgtgcaaagagaatttctctctctacagacattattttgcattctccaaccgtggaaatgtgagaaaataagcgttaaagaaggtgtccatatttcatgtcgatccaacgggtaaagagtctgggatagtagttctattgagacacgcttgggtgtgcgcacgataaacagagagttttgtgataggaagaaggcagaacaaatctgcgaggaacagagagcgtgtaaacatattctcaatgtacaaaatgacctcacatgtctctattatagcta

SEQ ID NO: 186452 - DNA, 474 bp, Glycine max
  unsure (1)..(474): unsure at all n locations
actcagcttagaccaagcactcaaatctaggattctaaccttaatcttaaggattntcaagggttgagaagtgaaattgagaatggggtaaatttgaagcaaactctcacctcacacaagtctataacatcaatttagacttgttcaaactggatntacatctaaaatttcaccgaatcaaaatttgactcctcaacatccaaatttaccctagaaatggctctttgttcactttggtcatttgtttttctctctagcacagcccanactttctcataagtcctaaatggcatttcaagctaggattaactcactttaaccnccaaaataccactgaatccagaattggcctctcaactctcaaaggctcactctttntccactcataacaccatattctcaccttctaaccctnggtaactctacccttcatctctaacagtttccataagcaatttcgcacataaacatcac

SEQ ID NO: 186453 - DNA, 415 bp, Glycine max
  unsure (1)..(415): unsure at all n locations
agcttgaaatcatattttctaagggagtttatcactcttcttgagaatctctgcatgcacgaaggttctagagagagaaaggtccaagttccagagtgttctgagagattttgttgtgtgaagatctgcagagatgcgagttcgaagcggaagccgctctgagagcttgagatgattttgtgagtgattgtgagatcctagaggtgaaggagacattctcaccacttgtggtttttcagtctttcatctagttcttctctttattgtaaagganggtttcggactatggaaagctaaatcctctgttggatcttccctgtaggtacctgatgtaaatatatttctacctatgtaatgatgtgtaggtgttctctgtgctatctgcttttcattcagcgtgcttttacattgatca

SEQ ID NO: 186454 - DNA, 475 bp, Glycine max
  unsure (1)..(475): unsure at all n locations
tgtagaacggttggacatgatatatgtcagggtgttggtctggttcanggataaaagggaatgtcccacattatttccatgacacaaatgcaacaatgatgatgtggaaattttatgcaaaactagtcatgcatgcacctatgtggacactcaagtgtcgaaattttttttggttatgtgatgctagggctcaggattcatttcccctattttaagtcaacccaaagtttccaaaatatgttcttttatcaatttgtgcattcatccgagtctattttttttgttttcaggaaaattttcacagcattcacccttcaggtgtatacacattttttttttcaaaaactggttatgaatagtgaaannaaaattcaaagaannagtggaagtcatctcttttcaaagcatgttggttttcagctagcaacntttttcttcctctctttntatttttcatcattggttaattcttttc

SEQ ID NO: 186455 - DNA, 415 bp, Glycine max
  unsure (1)..(415): unsure at all n locations
agcttcttttggaccttgaacaagcaatcttctcctctttcagaaccatgctatgtgctcgcgactggtccctttcttcccttcgcaacttgagttcattattgctaccccatagagctccgcgaaatttgttccggccatactctttcttgcgagccctcttggtctcttgttcaaaggctcttgcggtagttgcattctcttcccgtaacccggcgcactccttccgaacgtgtgtagcagccaacttgaacttctccttggggagttttgcctttcctagctcgcttttgagagcttggacttcttcgtccttcttcggtgcttcaganatttcttcgctgacgacttttaacttggcgagccaatctaaacctcgtatgcgaactgttagccattcgtggtacccaccaat

SEQ ID NO: 186456 - DNA, 471 bp, Glycine max
  unsure (1)..(471): unsure at all n locations
tgacactgagagtagacgtttatcatgataaanaatactatgtgctacatatacaattatgctaaattcaacatacttatttctatttttcttaaatattctttgttcactagtggagtcaaactcggtttcttggttacaattactattcgaagggagagaacgggtttcttgattgtttgtatatttttctcttttgtgcagcaaaacaattgctcacagttcttgaagcaacaaaaccaatcctgagtcagaaagtaaagatacatgatgaaaatccataaaggcattgaaagtctggaaaaacttcaatatcatcacagattccaaacgtcaaagaaacatttagacaagtgaagagaaacttacctcaagacatgcaacatgaaccatcangccattgctcgaaaatggtgattgacacataaatggctgctgcctttctatgcattcgtcacataataagtcata

SEQ ID NO: 186457 - DNA, 301 bp, Glycine max
  unsure (1)..(301): unsure at all n locations
agcttgcttgtggggcttctatggaggctggatctttgagcttcaatgaggtcctttgatggcgatcttccaccatggagatgcagcgaaagacaaatgagaagaggagagaggaggcgccatccactatggaataagccttggaagaaggagcttcaccaccacgatgagccttggataagaagcttggagaggatacttcaatggagganaagaaagagggagagaaagagagagggggggagcactacattgaatgaagaataatggagagaaggtgaactttgtgttgtgtctcaca

SEQ ID NO: 186458 - DNA, 494 bp, Glycine max
  unsure (1)..(494): unsure at all n locations
tgtatactactaanataataggttntaacaacgctctcttatcattggttatgatgcaaatcaatgttacaaaatacgcagtggcatttttgtaaatacaatgtcattgttaacatcggttttagaaaaattgatgttaacagggcaatgttaacattggttatttaaaaatcgatgttgtcaaagcactcacaacattggtttttaaaaaaatcgatgttaacatgacgattttaagatcgattatttaaaaaccgatattgcctaagcactcgcaacatcattttttttaaaaatcaatctttcttttgttattcattgttcaccaaaatcagtttttaagaactggtgatgtttatttctatattaaaatcactatcaccctccctctctctccacttttctcctctattcttcttctcatccttctgaaacacattccccttttctcttcttctcgccatgcaccanaaatgtcattcaacagcaaactg

SEQ ID NO: 186459 - DNA, 446 bp, Glycine max
  unsure (1)..(446): unsure at all n locations
gcttgcacataagtttagtgcttggcaagataaatttatgaaccataacagtgncacaattgagtctgacattccttgtatttgtaaacagaaacaatataagatgtcatatgttaactaaacacacttaatagttcaagaaaacaggacaagataccgattatagtacaaaatgtgaatatatctttccttctctcaaccctttcctgattttcttttaaattagggcttgaatccattatctacaaagggaaatagcacgttcactgcatgtctaatgtaaggggtagaaaatcttcaccatacagaaacagcttacaagtaccagctaacttaggtgttgtcatgtgtgaatgtgtacaagaagcattctactggacgtgcccaaatagctgccctctctctttgttttgttcggcatcagatattctcatattaagaaattc

SEQ ID NO: 186460 - DNA, 439 bp, Glycine max
  unsure (1)..(439): unsure at all n locations
actaagcttacagccaactcttatacttggtggtcatggaggatagattttgtgttatgctatgctggccctgcgtgagatggttcaaagcctcttcaaggcggtccgtggtggtattgtgggtgttgtgtttggacatggcaggaggcagaccaaattgttaggtgccattactatgctaagataaactaaggaaatagatgataatactctccactgttttattcattttcggtggtatttaaaaggttacaatagaaggataagcattgtcaatcaatggccagctgcacaaggatacaaattgcaggggaataaagcataacaaaactgagcaaatatcctagngttgttctaaccaactgctgccagtgcaagaaggaatattcagtagctcagcagccttgtccttatcctaaacttgattcacacgaaatca

SEQ ID NO: 186461 - DNA, 448 bp, Glycine max
tctcatcgtctctcacagactatagatttgggagccaatgccatccttgtgttcggattctcaggcacttatgatagccgacgatgatcccattactgcttcccctaagctgtctgtcctttcttcatgccgcatgccatgccttgcgaactccttggagtaccctcgcattgtggtcactgaaaccccgtgcgatgaaaggcgtgatgctttcgtctgatggcactcctctcatggcgtagccaagttgtcttatggcgaggacgggattataattaatacaaccccttgttccatcaagggaacatttggacatccttcgcatgaagatagaatcctgattctttcttccttctagcgagggaacaaattaacagacgcccctccatgctagccaagagttggtcccaattaccctttcctttttcgacgcacgagcggtgacctt

SEQ ID NO: 186462 - DNA, 239 bp, Glycine max
ttgaaagagcctacgtagtcgaagagaagttcaagttcatcaccatctaagtctgataagagtattatgaactaagggatgtccttatggccaccgatgaagccttgttatgagataccaataatgcccgaatgggaaaacacgatccaagcaaagtttttaggggctttatatggcagcaatagtgagctcacgctctgaagaggtgaaaggaatcatcactggttagatgcatgatc

SEQ ID NO: 186463 - DNA, 486 bp, Glycine max
  unsure (1)..(486): unsure at all n locations
tctggtttcaattacgagcgtctccatctattacgggactcatgcggtctaccgagtaaaaatttattgttgtttgattnttctcagagcttcagttntcaatttcgagcgtctcgatatactacgggacacaatcggacacccgagttaaaagttattgtcgtttgaattggctcagagcttctgttttcaattacgagcgtctcgatatactacgggacacaatcggacatccgagtcaaaagttattgtcgtttgaatttgctcagagcttctgttttcaatttcgagcgtctcgatatattacggggctctatccgacatccgagttaaaagttattggtcgttgaattttctaagagcttcccttttcaattacgagcgtctcgatatattacgggacacaatcggacacccgagttaaaaggtactggtcgttgaatnttctcagagcttctagtttcaattacgagcgtctcgatatat

SEQ ID NO: 186464 - DNA, 299 bp, Glycine max
atccaccctttgacccacgagcaatagctatttgatagactttctcaagcatacgcctagaacgaagcaagagggagggtgatctgatgcattgtatcacaaccgaacatgtcaatggataggttccccttgacctttaatggaaataaagacctcccactactactaaccaaagaacaggccatggccgatgtatgttcacgcccacaagaaattcacgggctcatccattactcgctacacatgatagatattatggcccatattattacaaccgttatgctcggtgtacacttttg

SEQ ID NO: 186465 - DNA, 461 bp, Glycine max
  unsure (1)..(461): unsure at all n locations
tatagaaacaaattgcctcaatcatttccaaatatgcatgtgaatttttactcttcaacaagaatcaagccaaggctattgtgcaagcaatcaatggggaaaaacataccaaatgattatgatgatggatggctcaaattctcacaaaggaaaatcatcactttcaaattgagctttcaaaactatcatgacatgtagagaagaatcaacgagttcaagtcacaaaatgtcaagaacttttattttcaaaacaattacccatttcttgaacatatcctataattcaaagaagaacatgcaaagtcgtacgtgtacacaaaatngacccaaaatattaaactataaatccgacgaaactaacaacattaacaaattaacacaactaacaaattaacgaaaccaacaaaactagctaaaccaaagaacactcctctcccgcccatacttaatacacacattgt

SEQ ID NO: 186466 - DNA, 258 bp, Glycine max
gacacccacgctcaaccagggcctctatatctcattgggggttgaattataatatcaccaacatattgctaagtaaaaatatctattttgattataaccctaataccaagattccatcgcaaatgaattcctaaataatttagcgacaaaacttactgaatggaagcattaagcactatataaatctactagttttatggaagagaaagtgcaaactcatatttatactatgttcgggcacaccctttgtgccatacg

SEQ ID NO: 186467 - DNA, 353 bp, Glycine max
  unsure (1)..(353): unsure at all n locations
tctctgaacgctgggatgaggaaagaacttattatatgttatttatccaacacgctcagcgagccccatgcgctaatcgagccataacctatgcgctgagcaagtagcatttgtcgctaagcgtgccaaccaccatccattggctgctgtggtctgcctaagggacacaatcacgctacgcccaaagatctctcagggcgtgcatgtagtaaaatatggctaagtgaggtagcgcgctgatgcatatacgagctctatgatgagatanaattgaatcaaagatgcctgacgatcacacggatgatgacacaacgctcagtagacgccaacgcttcatgataactaagatgatg

SEQ ID NO: 186468 - DNA, 377 bp, Glycine max
agcttgagatgactgtttctatgaaagcttttgataaatatgtataatactagcctcattgtcctcatcaatatatgtctaatagacacaagtatgcattctaattagtagaataagttaatgtcattggcataactatccaatgtgaatgacttaatgcctaattgcttgtagattaagtttgattcgtgagcgctcggtattttattgacaaataaatagtcctatggagtagtatgtatgtatgtttttcttttcttaacattaaaaaacatgtggatgctggcttacttctcatagtattaatcaaatacgaggctactattcctgacctgttccatttcaaagagaccaagaaagaaacagagcatgggcct

SEQ ID NO: 186469 - DNA, 486 bp, Glycine max
  unsure (1)..(486): unsure at all n locations
actcaagctgggtagagtttgtcttgcgcagtaagaagtggccgtgtttaaattctcataattntgagaaagttattgaaacttggttactagctaagaactgaatgtaatctcagtggtagaaacaagccaatataattttgtcttatgtactcctacttataacttcgagtttgattttttttaaatctctattaattagaaaaattagttttcatcgtctgatcgtgcttttttttcttttgaaaatctgttatctgtcttatgcaatgtttctttatataacacttttgttcttttataagaaagggctntaaaaatntataaaattacaattcaagccctttattggtgttattgtctttataatattaaaaaaattaaataaaaattcaaagcctaattgtaaaaataaaanatacaaaatccaaaaatttatgaataccaaaaataaatcattatgttctattntttcatttattttgt

SEQ ID NO: 186470 - DNA, 373 bp, Glycine max
  unsure (1)..(373): unsure at all n locations
ttaattttcagcttaccttctccttcattgttgtttcttcatttttctccatgtatctcctcacatgtcttgtgctatattgtgttaaaattatttcttataatttccaccgcattaacttgatttataagctagatttgaatttctatggttcanatttcttgttcttgttcctgaaccatgaattgtgttgagtttaagttcctttgagctctgttttgctattctttgtggttgaaacctaaaccattatagtcttaccataacattgtagtcgaagaaaacctcacaaatcttgagcgactcgttcacctattgcagtttgtcataaagctctgtctagtcatgaaactcgtacataagatctttatgt

SEQ ID NO: 186471 - DNA, 456 bp, Glycine max
  unsure (1)..(456): unsure at all n locations
tgactaggcgagttgattntggccttagtttcaccttagttattagtcaattcaattaagaatgagaaatcccaaagagaaaatgtccgattgattntccgctntattttactaaaaggtatattttttgttattatattattattttatctctttttgatttccaacgtggttacggcacgaccgaacggtcggaattcattttaaccgaagttaacggataatacaattcaaacgttcggtggaaatttattttatttttaggttaagcgagaaatgacttaaataaaatggcttaagcatgtcaagagggggtataaaaagtaaatgaaacgagaatagaaatacacaatacacaatgtggaccaccacgggtacatagaatgaatcgaanaacttggttcgaggtacttacccgttgaagatcgaagaacgatgaagaacgaatgaagaacg

SEQ ID NO: 186472 - DNA, 438 bp, Glycine max
  unsure (1)..(438): unsure at all n locations
agcttatgaatcatatgataggngctgaggtgctgactaagtacgcgcttaaataagctgtgaacctcaacaaacccttgattattacataacgaatgggagtaataaatacacacgagataattgttctgattactaccttagctgggcatactgaactttgtgactagactgaacttagacataatgatacacggttcgaatacaagtcataattgatattctgagaatataatgatatacttggaacaatcatatcaaatggctataccagaggatcccttttataaagaagctgctgagtgctctaccattcgttttaacggatattgttacccacatatagcttgcaggaaacactctggaaggaagtaatacatatttcgagctctaaaatagatccacatatgctggattgttctctatcctcatttaacc

SEQ ID NO: 186473 - DNA, 486 bp, Glycine max
  unsure (1)..(486): unsure at all n locations
tatccnccaacaatggaggtatttggaaaatattcatgctttacgttgggatatctggcaccacatacttaataagaacttttctttcagccatatatatcaccataccactccaagaattaatcttctatcccattttgtctttaataaaattaaatacaacttttttgttctttcctacaacagatgggaaccctaaatatttatcccttcctccttcctccttcacactaagcataggagtaataatattcttcaagctaggctccatgtttttgctatatataagtaatttcagacttgtgaaaattaatcaactgacttgatattgtttcatactcctagaggattctcctgaccaccatagcctctctttcattagctctaaagaanaagaaattgtcaactactaataataagtgggatattataggaggactccttgcagatntcatctcatgcagttcacacttcctctcaacatca

SEQ ID NO: 186474 - DNA, 485 bp, Glycine max
  unsure (1)..(485): unsure at all n locations
tatgaaaaatctagtctctatgggtgcaatggattcaatantgttttattgggggtttaaggtggagttatgcaaatcagagggaaaggaaagtttgtgctaatgcagcaaaccaaaaaaggaaatttgtacatccttcaagggtccaatgtgataggctctattttaacagtttcacaagttgggagccatgcacccaatggctcgtccaataataattctttgtggtatctgtgtctgggtcacatgagtgtaaaaaaaactggaaattntgagcaagcaaggcttacacggaaatcataagggtggaacctcttctgtttgtgagcacggtatctaacgaaattcccaaaggttgtgcacactacaaaagccatattggactatgtccattatgactgctangggcctttgagagtccatcactgngagagtgcanngtacttcatntncatcatcaatgatttactcangatgacatgggt

SEQ ID NO: 186475 - DNA, 412 bp, Glycine max
  unsure (1)..(412): unsure at all n locations
ttatataagacatgggaactagtttgctagcaactttgtgatcaaaacgagtttggtggactgggttggatgtatcttctgtgtattacatttgccacattgcatcaaattttaacaaagagtttaaaaatgttgagttaaaaaaataagtcattaacatgggntaagctttaacaatttcatgcattattacgtgtttaacatatttattactcattgttntgccttttgccgtaggatatgatgcaatcctacccctcaagggcattggatagaagactccaagaagattgngccagagatgcaagagaaggccctaagattctcatgagccctatggtagattntgggcccatggactaagtatgagcncacttatctctgacatattagattacgatttcattatttt

SEQ ID NO: 186476 - DNA, 317 bp, Glycine max
  unsure (1)..(317): unsure at all n locations
agctntgataaacatgtaactgtacaatattcatattgtatttttaactcctttgtatatcagacctcgtatagtcttttttataaatgtaataaaaaaatggatttgatagacttactactctatttatttgatttcttgtgtcttcttatcaatgtattgaagacagataattgaagtttgttaacaacttgtaggagctgggaataagcaattgtgacattgtttatttattcttccttgatatctcctcttcaacataaaaatttgaggtcctgtgtttgcataatttaaacacgcaatttcaccaagactgc

SEQ ID NO: 186477 - DNA, 486 bp, Glycine max
  unsure (1)..(486): unsure at all n locations
actaagcttatcaccattgaatcatntgatcattctgtctcaagttttgtccattagcctgatatataaggtatacattaaattctctnttccaatcacaccacaaactatagttatagatacagcaatgattaaaaaacaaaagaaactcaccaagtcatatgcttgtcttgccaacaaaaccttctcagtacaaagactcaatgcactatcctgattcacctcgatttctttccgcattttctcaatagctgcatcatcgtcctcattcccataattgttattataactgtgattacccttcttggagccatgtgatgagaaccccatagtgtacttcgtctgctgcctggtctgcgttatcatagcttccatcacaccacaacacanaattaaaattaatatacgttaaagaaaatcaattaatagatacattgatgtaaacataaaaaagagtaaaaaatcacttatcaacanacaacatat

SEQ ID NO: 186478 - DNA, 417 bp, Glycine max
  unsure (1)..(417): unsure at all n locations
atgcaagcnttganagggtgtgttcaccgtctcgctaagccaatatgcatgcttagcgagcatccgcctagcgcgaggaagaatccagaagaagatgagctgtacagattcactaagcgcaccgcttcatctctctaagcacaccgcttcagttcatccactaagcgagaaaggcacactaagctaaaaatcactaacatgtgctaagcggtctatacatgcgctaagcacacaagcacgaacaaggtcacctatttaagcctaanatcagatttggtgaagggagtgtggactatgattcagagctctgcaagtctaagggttctagagagagaaagggccaagttctagagaggtttgagagatgttgctgtgtgaagatctgcagagaccagagctctgagcaggagccgggtt

SEQ ID NO: 186479 - DNA, 496 bp, Glycine max
  unsure (1)..(496): unsure at all n locations
tcttgaacanatacccctcagccaaatagaatctatcttgttgcctttttccacaactctcataaatgggagagaaatgttcatctaaagcatacaagtccctaatattatcaaatcctaaaatttgagctcctagggagcaaaacaatgtgtgtctcctagagagggcatcagctaccacatttgtttttccctttttatatttgataacatatggaaattgctctaggtactctacccatttttcatgcctcttgtttaacttgctntgccctctaatgtacttaagtgattgataatcactatgaatgacaaattccttggaaacaaggtaatgttcccaagtttggagggctcttattaaggcataaagctctctatcatangtggngtagttgagggtggcactatgaagttnttcactaaaataagcaatanggtgcccaccttgtaacaatacagctncaactcccactccagaggcatcacattctag

SEQ ID NO: 186480 - DNA, 375 bp, Glycine max
caatcaatggggctataacacaccaaatgattatgatgatgtgatgctcacattctcacagaatgtaatactcatccactttctaaattgtaggctgttacaacacctatctcatgactatgctagaggaataatcatatgattctcatatcaccaaagtgtcaagaaacttttatttttaaaacaattacccatttcttgaacatatcctattatttaaagaataacaagcagaatcgtacatgcacacagaattgacccactatatttaactagaaacccaacgaaacttactatcttatcaaattaactaaaccgacataactagaaatactcaagacacctcctccccatacctaaacacacattgtctct

SEQ ID NO: 186481 - DNA, 238 bp, Glycine max
  unsure (1)..(238): unsure at all n locations
actaagctccatgcccttaganntttagtttggtgtgatagttgttttatgtctatcatgtntaatagatgataaatttatattagatgttttagactacgcatgtgtgatatagtcttagttcttttgtttcatgcttagtgatttatcaaacatgaagtgaatgaagtattcttattctctaagtttcttaagaacttacttctgcttcgaaattgtctagtagcatcaaattaat

SEQ ID NO: 186482 - DNA, 450 bp, Glycine max
  unsure (1)..(450): unsure at all n locations
gatccctaagtcacctgcggcatgcangcttctacccccaccagggagatacagggtgttggcatcatatgcattggaggctggcatctaacaggatcgacaaagtttaacaaatttaagccatcttttcatgtgcatctacttacaactagttcgaaacagattaactaaagaatttataagcctatatgatcaacttaagaataccattctcataaaatctatattgagaaaatgcttttgcttctcacatcatatggacagaaatgaatgatataatgaaaaaacacaaagtcctgtcgcacgtacaaatttccacaacatcaattcatatnttgcatagtgtgaacacttttcacggttagagactcaatatattgaaaatactattcccggacctctgacagatgcaatgtgactgtttacacgactaatatacttgagacaaca

SEQ ID NO: 186483 - DNA, 496 bp, Glycine max
  unsure (1)..(496): unsure at all n locations
ccttgaaactcacctatctagttcatatgccagagttcattattatttgtttccatttactgtngctgctttatcctttagttcaattgaaacgatgcattgggggtttagttttctataactcattaatatatgcaacaagccagctgcttatggtcaagcatgtttttcctgcgttcagaatgtatttccctgccaaatgttntatttgcattactagcaaaataaaaggaaaaaagaacaatatactcaggcactacttccacatgctaagctagtttattccattgaaaatccattggcttaagatgtgcttttctgctaaaaggctatgcagaattcgtttaacctgcagtagtaatgtacctttaatgacactaactctgttgtggtgcacattatctgatcaaccaaatcctgctggatatgaagctaattctgtggataaacgtgccagaagatcagatgatgatccagaacatttgttacaggtact

SEQ ID NO: 186484 - DNA, 392 bp, Glycine max
taagctggttcgaggtacttaccccgtgaagatctataaacgatgaagaacgaatgaagaacgtcgaagaacggtcaatacctttgcgaaatccctcacagaaaacgttaccgaaacgtttcggaagcgccttcgcttaaattttcttcacggaaacacatttttccagccaattcgaaagagagaaaagtgcctaaagggctgaacccctttcttcttcacttcctcccctatttatagcaaaataggggaggtggttgccgcccagctcgcccaagcgagcctagttgcttcctccagaagcaacagccttctggaggaatattctagagggcccaagtgggcctgggtgctatttgctccaccaattttactaagaacacccccctctg

SEQ ID NO: 186485 - DNA, 460 bp, Glycine max
  unsure (1)..(460): unsure at all n locations
nntttattttagtagatgaagatgaatatgtggccacctcatggactcctctaaggataatagcatcatttcttgcattgaattgttgggagttggaagccatcttctcaatcaaattcctagcctcagcaggagtcatatcaccaagagctccaccactggcagcatcaatcatactcctctccatgttgctaagtccctcatagaaatattgaagaaggagttgctcagaaatctggtggtgaggacagcttgcacacaatttcttgaatatttcccagtactcatataagctctctccactaagttgcctgatgcctgaaatgtcttttctgatggcagtggtcctagatgcagggaagaatttctccaagaacaccctcttaaggtcatcccagctgaaaatggacttgggagcaaggtagtagagccaatcttttgccactcccttcagagaatg

SEQ ID NO: 186486 - DNA, 380 bp, Glycine max
gcttcaccaccaagagagtgccgtggatgttatacttatataggaatttcttatggaagaagagaatgagagagagagagagagataatgaggcatggaaaattaaaggaagaaagggagagaagctgaacttttaagtgtgtctcacaagtctcctcttcatcaaagttatgacaagtgttacacatgtttcgatttattgccaccacatgggaagctttcttgagaagcaaggaagttgtcttccttgtaagcctaagatcttcttcatcaatcgatttctttgcttcttggaagatgaatggcagtggaatggataatgaagagagagaggagactccactttccgagatgatgagtctacaagaagcttcacacca

SEQ ID NO: 186487 - DNA, 485 bp, Glycine max
  unsure (1)..(485): unsure at all n locations
actcacgcttcttggttctccaagctcgattngcgccagggattcgatcagataataatggctgtgtctgacattccaaaaaccgcatttcgaacacatcatgggcattacgaattcacctaacaatgatcccatggtagtcaaactggagatttctaactttatagtgtgcagagtcttgattgaccagaggagctcgaccaatattctctattggtctaccttcaanaaatttgatattccaacaagtcagatcaagccattctctgaacaactcataggcttcttgggagagacaacttacacaatgggacatgtcaacttgctaacgactntcagaaacgagaagtgttccaagaccataatgatcaggtatctnctagtcaaagcactcatttcttataatatattnaattggtgggtgcacttaataaatcatgggctattatttcaactccctatcaagggatgaaatttctgagtat

SEQ ID NO: 186488 - DNA, 462 bp, Glycine max
  unsure (1)..(462): unsure at all n locations
cactataagaacagaatgtcttattatttncaaatatgcatgtgaatgaggaagcatctacacaaatcatgccatcgctattgtgcaagcaatcaatgtggcaaaacacaccaaatgattatgatgatggatggctcaaattctcacaaagttaaactcatcactctcaaatgagctttcaaaactatcatgacatgtagaggagaatcaacgatttcatgtcacaaaatgtcaagaacttttattttcaaaacaaatacacatttcttgaacatatcctataattcaaataaaaacatgctaagtccgacatgcacacaaaattgacccaatatattaaactaaaaatccgccgaatctacaacatttacaaattatcacaacttacaatgtaacaaaaccaacaaaactatgaaaacctaataacactcgcccctcccatacttatacaacacattatcc

SEQ ID NO: 186489 - DNA, 451 bp, Glycine max
  unsure (1)..(451): unsure at all n locations
acacttaaatctcagcttgtgttgacttaggatggctggtggattttgtgttgtatgtaacgacaagggttgttattggctgagtaatgacattgttgggttggtgggaaacttaaccgtataggaatggcagtcgtagcatgggtttctccctcattctcaccctcttcatttgccccaattttngcatttatcaaagcatgatgatcagatttgcctcttttcagacccacttcgatcatttcgccagcgaagaccaaatccgcagagcttgaaggtgtgtaacccaccacttttcataatacaacactggtnatgtgtctactatcattgttgtcatttctttctccgtcattgatggaaccacttgggctgccaggtcctctcacctttgggcgtattctttgaagatcatgcacactctgcattgctctatattgcatctatccga

SEQ ID NO: 186490 - DNA, 383 bp, Glycine max
  unsure (1)..(383): unsure at all n locations
agcttaccaagggcgtaccttgtgtttttgaagaagtgtttaccaagggcggaccttgggtttcctgtgttcctacaaagataagacttaataataaagaagctcactgggtagaactttgtgtaccctangttcttgggaagatgaaacttggcaacagagaggctcactaagggcagaccttgtgtttaacgagccttggaccagggatgcattcaccctatgttttgggcgagctcaccaaggacaaaccttgngtttttcgagcctttggagaagcgagactcaccaagggcagaccttgagtttgatgagcctttggagaagcaagactcaccaagggcagaccttgtgtttgaaagcctttggagaagtgagactca

SEQ ID NO: 186491 - DNA, 433 bp, Glycine max
  unsure (1)..(433): unsure at all n locations
tgcaattcctgatccttagataacatatgtggttaggttgggactggaacgagtcaccactggctgtcttgaggagagagacatgatagagcggatgaattttactgtgagatggaagatccaacttattagctacagcacccacctagtttaacacttgtgaaggaccatataaccgaggggagagtttttcattaatccttttagccaaggatcttcttctgtaaggttgcgtcttcgagaacacccaatcactgactgcatattctatgtcccgacggcgtttgttgacatttgctcacgtgatatcttgagacttcaacagattgtgtcttagagtagccaataattcattccgagcaatngttagcttattgacttcttcaaggcaggaatgaatggtggatcccttgagaatgtgagggggatcatg

SEQ ID NO: 186492 - DNA, 269 bp, Glycine max
  unsure (1)..(269): unsure at all n locations
gatccttaaatcacctgcngcatgcaacttgagggctactattccttctattttcttttgcaatggggttctcgagtgacgagccggggggaattctttatcacacttcttcatttctctcactctatcatcatactccactttatctactccctcttctctcacttcacttcttatccaactctcctatctactctctctcatcaccctttcccactccaatacatcatccttccttcatttaactactactctcacctccattatta

SEQ ID NO: 186493 - DNA, 445 bp, Glycine max
  unsure (1)..(445): unsure at all n locations
tatggtaagatctgggacctaaccatggcagttgtctctacggaggccattgtctccctcgcccaatattatgaccagcctttgaggtgcttcaccttaggggacttccagttaacacccacgtggaagagtttgaagagatcttgggatgccctctgggaggaaggaaaccatatctcttctcgagattctatccctccttagctagaatttctaaaatagtcaaaatctcgacacaggaattggaccgcgggaagcaagtcaaaaatggggtggttggggtaccgaggaaatttttggaatcaaaggcgagagtcttggcaagtctagacaaatgggccccgttcatggacatcctggcacttttgatcttcggggtggtcctctttccaaatgtggatggatnggtggactgggcagcgattgatgcttttctcgcctttta

SEQ ID NO: 186494 - DNA, 144 bp, Glycine max
gcttcatcccgtgctacggactgttgtccaccgtgccagagatgcctgactctcttaaaataaagagaagccgcagatagatatcccacagagtagtgctcatatgacccgtcttgctatcccaaatgcagtgggagacacagc

SEQ ID NO: 186495 - DNA, 462 bp, Glycine max
  unsure (1)..(462): unsure at all n locations
gaccttagaaactacgctagccaataactattatactagataaaaatggagattatgtttgtgctctagatatgggtggtagtgagagactaagtggttgaaaaatttcttggttaacattcctttgggaatgaaaccaacactattactgtctatgcatngtgattctcaatcagcaatagctatggataagaacaaaacttacaatgaaaaaatgaacatatacaattgaaacatgatgtggtaaaacaattgctaaagaatgaaacaatattcatatattatgtgaagttataaggaaacttggcagatcctctgaccaaacccttggtggaaatatgatattaaaaacatcacagtgaatgagacttaagccaatcgaaagcaaacaatgatggtaacccaacctctgtgattggagatcccatgaagaaggttcaatgggaaaaaacaagtcatttg

SEQ ID NO: 186496 - DNA, 409 bp, Glycine max
  unsure (1)..(409): unsure at all n locations
cacaaaactggtgatcctggtggtactatgggattgtatggtcctggaagtggtggtcgtgtggcgattttcctgatcgcgatgccggacgtattggtggtggctctggttgaggtcgtggaggtggccaatttgcctactttcagtgcaaatttgccttaagtacggacatactgccaatgtcactttcggattgatattgagtttcagtcccatgaatcactcacctgtcttgagtcancacacttctaccgattccctacttctctggttctgccagaactgtcaatacctagattaatcttcagttcaagactgctggtccacatccaaataacccagtgcttgctcttcaattctctctcatgaaatgggcctgttgctccactgtattccaactctggtgcac

SEQ ID NO: 186497 - DNA, 444 bp, Glycine max
  unsure (1)..(444): unsure at all n locations
tatccacttctcaattcttgctcatgattattganggaatctttcnaaacgcacgggatctattattgtgcacttatatatcagttaaactaactctacctctttttttataaatacacactctgaatttcaatgttggtttaaataagttctatttatttataaattttggctctcaaattgatgttgtttagcaccatttaaatttagacattttcaatatcatgttctaaccgatataaaaaggattcgctgaatcgctgtagtagtgtacttacaatactctattggagatattctttctctttttgaccgttgtagaggacaaatataatatagaaacgaaaataataattaacctatagatatcttttaaataagtatgattgagtcttttctaagcaatagcaccacaaactactcatgattcaagactcttatgtg

SEQ ID NO: 186498 - DNA, 443 bp, Glycine max
  unsure (1)..(443): unsure at all n locations
agctntacaatgcagcagcttcanaacgattgaagtattcataaaggagaatacagagaggcaaatataaagaagaaaagaaatggaaaatagagtactttggtgaagaacaggagctttcctccttcttagtttgtctcacaacaaaggtaagatccttaatatccttatcggttacttgcgccccgtcttttaatttatccattgctgaaatgaatgcttgtaaataaatatatttgcatgataaatatgtctgttcctagcttctttntttttattatcaatttgatacccacaatatattaaaagattcaatttgacacccaaaatatattaagaattttaattctatctcaatctttttttaaattaatttaattaccaatcatgtaaaacacgccaatataatctgtctcgtccattaagttatcgtagaataacaa

SEQ ID NO: 186499 - DNA, 430 bp, Glycine max
  unsure (1)..(430): unsure at all n locations
tatccctgatggagcacattggttactctggtgtcccatcttgactaanaaatgctcttaaattataataattgtcaaacattcccttcaattctaaattctaaataaaattttaaggcacaatgaggaatttggatttagagggattaggggacgacagacgttaaattaataatccatattatatttagcagggctatatcttttttaagtatgccacacatcttacaatatcactctccatttatgtctcactatatgacttaccttttcagctgacataactgcttcatcttcttcattgctcctttctccggttccgaatgtttttagcttctcgttacattcgtctacttccaacttcttcaattntggacactctataggatgtctccccctgtagaaatgctggatgcttcgtangtcatat

SEQ ID NO: 186500 - DNA, 278 bp, Glycine max
  unsure (1)..(278): unsure at all n locations
catgcagcttctggaagccatggnnngggactcgctggatgggaattgtggcgggattcataacctgaattgaccctcattactcggacatcatatnctncccatatgactaacgctgaaagacctcacgctgatatgacaaagcaatgggaaccacaaactttctgcttactccgaggacacnncccaatagtctacgaccattaactaattacaatgccagagttgaaaccgtcctccataaannnntgatactaaatgagcatctaagaaacttc

SEQ ID NO: 186501 - DNA, 500 bp, Glycine max
  unsure (1)..(500): unsure at all n locations
tgtacacagtgaagatgttgttagagatatatggtgatcttattcttattttcataaagctattaaattcatttctaacagtgttaatatgtggtgttataagatgaacaattttggggacaaaaggttttgaggatgttcatcttataagtaatattacatatcgacaccacaatccacatttcaactttaaaataatctaaattaataattgagatgttaacaccaaaatccacacttcgactnttatactagacccgtgttttatcttttatatattacaatagatagataaacagatatgactagtacctaaaatcggtatgagagatatcaaactgcatgcaatacttagaacctgaaacacattgaccaacagactacctttagagaatatagtaagcacagaaagaactcagcgtaatacaatactttgtgcctcgaaaagaannaaatggtttcaacatttttatacaggaatattntgtactaatggttac

SEQ ID NO: 186502 - DNA, 425 bp, Glycine max
  unsure (1)..(425): unsure at all n locations
agcttcacgagcctgtgatgcttatgatgatgtgcataggatcatanacactttgtcattgtgaaacgtgtgctgttggatgctgacgagaagcancnnnttgcttgaatggctcaggcagattcaaaacatatgcttcnatgttgaaaatgtgttggatggatatgagtgccaaagtttgcgagagcgcgtcgtcnnnnnttnatgcancacccacatgaatgtaggccactttttttcaaaggttaattctcttggttttcgtctcaggtgngnnngttnaatcaaacatgttaggcgtagattggaatcgtttggtcttagaggatgatttgatacagacttggcaaagagagaagnnntatctcgcttaatctccagtggatagatgggtgcgaaggagaaatttagctttgtcacctccc

SEQ ID NO: 186503 - DNA, 492 bp, Glycine max
  unsure (1)..(492): unsure at all n locations
tttgtatcaccatataccgggagatggttatgagatatctatgcaattcttttcaatcttctaatgcaagtcgtggttatggtctgaaggtgaatgggatgagatggttgcaacttaatagttatcatttacaatattataaaaatttatggtagacccaatagaatttatttaaatttactgaaatccagttttcaacacaactacctgaaccacttgttctaattgttgaggaagtctgcaataagccaataagaatttttaagcaacacaaaccacactcgcagtattttacatggaaatttgtaaaaggatggtaacatctatttaaactcatccagaaataaattcattaatgccgaattgaaatgctaataactctgtagcaagaccttacagaacgacanatctagctcaaggaagctcaacacaactttgtgtgtaaagggacatcacatgtccttttttatagcggctgtgaacttgatgtgc

SEQ ID NO: 186504 - DNA, 432 bp, Glycine max
ttaaaattgggaaagaaatcccacacctctgcttcgaactcctcatgagactctagtaatcaattccctttacgtagctaagatagacccttagatacaaaatgatggagtgctattttatgaaaaaagaagtattctgctctccttgagcatgcccttagattcttgacttttctcgccataaacattcctgaaaacgcataactgtttgcagctccttttgtgccagagcttcttgattaaataatgcatccgagtatcccacattcacaatctggtgttggatactgtccaccttattggtagcttaaagcacaagctggttggacattcccaccacaatttctatcccacgttttaattaacagttttacatattcagctcttgttgcaaacaactatgtgacaaccttggcatgacactacaacttc

SEQ ID NO: 186505 - DNA, 442 bp, Glycine max
  unsure (1)..(442): unsure at all n locations
agcttaacanaaggcatgcgaagtggggtggatattcctagagcaattccttatgttatcaaacataaaaagggaaaaggtcatattgtagccgatgctctttctcggcttcatgcattactttctatgcttgaaacaaaaatgattggtcttgaatgtttgaaaagcatgtatgaaaatgatgaaacttttagagaaatttttaaaaattgtgaaaaattttcagaaaatggtttctttaaacatgaaggctttcttttcaaagaaaacaaattgtgtgtgcctaaatgttctactagaaattntcttgtttgtgaagcacatgaaggaggtttaatgtggcatcttgggatccaaaagactctagaaacattacaagatcattttattggcctcatatgagagaggatgtccagaaatttgtgaacattgcattgtatgt

SEQ ID NO: 186506 - DNA, 454 bp, Glycine max
  unsure (1)..(454): unsure at all n locations
tctataatgatngaagattganaaattagcaactggtaatacttctttccccattgtccagaggctcttcgctatgcgaaggtatggnggagggatgatgtacgcagccttacccttgcatatgcaaagaggctgtttccggattcgaacccatgaccaacaagtcaccaaggcacaactttaccgctgcaccagggctcgccctcgaaaaattagcaattgtaactcaagtaattgtacagttttatgtcatcagaaaatataaaggggatggtaattattaatattatttaagaagtctttggctcttataaattaagaacgctgtaatgtagttgactntgtcattatctcaaactaccttgttgaaattaaataaattccacctttctttaatttgttgccatataatatattaaaatcttaatgcatctnttatctttttagttatata

SEQ ID NO: 186507 - DNA, 379 bp, Glycine max
gtgtagcccaccatctagtatatgtgtctactattattgtcatcatctttgttttcgacattgaggtgccacttgagctgccaggtatctccacctttgggcatattctttgaaagaatcgtgcccccttcttgcacatggtttgtagttgcatcctatctgaagccattatactgacactgcctcacgaaggcaaccattaggttcttccaagaatggactccggaaggatccaagtgagtgctccaagctataactaccccagtatgacttctttggaaagaatgaatcagacattcctcatctttggcagatgcgcccatcctccgacaatacatcattagatggttcttggggcaagaatccccttgtactcgca

SEQ ID NO: 186508 - DNA, 180 bp, Glycine max
atactcagcttaatgacaataaatttaatacttatcatttggtttttattattcactccccggcctatgccattgactggtatgaaacctcgttttctctatgcatatatcgcagaacggtctccaccttgatcaattactgatcgtcgcattcttcgtctttggagcacttctaatctc

SEQ ID NO: 186509 - DNA, 388 bp, Glycine max
  unsure (1)..(388): unsure at all n locations
ctcttagacacaatcctaagagggtcctcagtggcctatctccacaaacacacagccaccctgtgcactacaggaatagcatncntcaaagtggtgtcttccttcacgattgcagaattcaattcgtcacaaatcatatcaaaagtctctcttcccatcctaaaagccttgtttaactgttcttcaagaagatcctctttgttgcatccatcccaccatgcccctgaacgatccttcacccacagncttctctgtgagcctgccacaccagagttcaccccttcagcactaccaccaccaccctctccctctctttcgcacactaccacacgcaccgaacgtggcctgccgcgtgacttcgttctcttcacactctctgactctcgac

SEQ ID NO: 186510 - DNA, 494 bp, Glycine max
  unsure (1)..(494): unsure at all n locations
tgtcaagatccatcctcttctctggggggnttatgntcttttatttgntatgaattagatcacataaattctgtaggacaacaccatgtgacatattgtatgaccttatgctccataggtcctctgactcttatcttatacactaattgttgaagtagccaacagtttgttacatatcctttcatctatatatattgatggctgcaagaacttatgaccgaatcgtccatgtcttgagatatttgaaattcaaacactttcatgttatatttgcttagtttttttattatctgtcttggttcagtgctgcaagtcatcttaacttgtaccaaaataaaagactaaacaatttaaataaaaaataataaaatatgtntagtcttcgtacttatggtgaaacttggttntagtcctcgaaccttaacatataagttctgatgtaaaggagaaaatactctcacaatattagcatgttatgattcttaaatagcacg

SEQ ID NO: 186511 - DNA, 481 bp, Glycine max
  unsure (1)..(481): unsure at all n locations
taatatgtgacgagtcctcttatggagacaaattaccttattggtggttgattgctcaagaatgcttgatgtgaaggataaattacatgaatatgtgattctgatcttgtcctttacaaataggggtggttattaattatcattgtattaaattaattattttaaaatttagatactaacattgttaagattaaattgaccaaaagacggaaatagattnttaaaaacataaaaaatcaaataaaacttttaaatataaagaactaaagtagaaaagaaaaaaataacatgaaaacataaaagatcaaaataataatttaattnttttaattcaaaatttcaaagatcttaatataattntaaattttattatctttcaagcgatatgagattntgtaattntgagtatctgatcaattattattataattttcaaacttttgtacttatagttacttaatatttgttagaagtataaatt

SEQ ID NO: 186512 - DNA, 368 bp, Glycine max
  unsure (1)..(368): unsure at all n locations
agcttgatgaggaagaagaagttgccaactctatagggggaaaaagtaaatagatgaagaatgcagcccaagcagaagatgcacaacgctggggggcgcatcatctgaggggaagatttatcttaaatctttaaaatctaatgcttttcttattcatatattatctatgtaatatgctttttatgaataaaatgagatttttatgatgaaaggactttatctcaaactcttatgatgtgtgatgttttatactttcttatattgcatctcataagactgacattgcacttaaaatgccattatatatatcatatatatgtcttcaacttntacatgtgtgtttgtttgacatcatcaacaaggggaga

SEQ ID NO: 186513 - DNA, 499 bp, Glycine max
  unsure (1)..(499): unsure at all n locations
gacctataaaactcaagcttaaattgaataaaacgttaataactgctggtattgattaccatatatgngtaatcgattacacagtgcaaattttgaattcaaattctaatagctgttgtaaatcatttttggccactggtaatcgattacatcctctggtaatcgattaccaaagagtaaatctcttgaaaaagactttttaacttaaatttcttggccaaaccttttgctacttcagtagactttagacactgtcttgatcatccatcttgaatatctttaatttctttgtcttgaataaagctttgagaagcatgtgatcctttggcatcatcaaaacattcagcttgatcctttgtctataatctccccctttntgatgatgacaatccctgaaatcaagacaagctatatacaagatgatagcacgttcacacaacccttactccccctatctnttggcatgtatgcctaactntaaggattgattttaatgata

SEQ ID NO: 186514 - DNA, 246 bp, Glycine max
cacttggagacttaatacagcctattaattgtattattctacactcaatggacgtcgatacttgttataagaaccttataattcttagaatataactgaagataggtgttctccttaatagtatagaacttatgggtgcgcgagatacatcgtcttagatgaagttaaacttctagtaggatgattcatatcaatctaaatttcataagggatactcttaagagcgtacctgctaaatctagagca

SEQ ID NO: 186515 - DNA, 477 bp, Glycine max
  unsure (1)..(477): unsure at all n locations
actaagcttgagcgtatatngagtctcatggctacattcacagtttcttcctttcttgncacgactatagtgcatgcctttgtcctacgagacctctttcccaatgaccttgccattgccacaagtgagagatagcaaaaaccacgcacgaaatggctcccatttaagacttgggagccatgatcacgccgaaaagactgacaataaataacttgaaagttngtgaactcggataaaaatgatttagtttaggagcttattcgagaatcacacactccaatagttcaaggaatacatcatgtatgttaatacatatacgtctcatatgaggaagaaaataatgaggcaaccaacattcttactgaaaaccttcagtggtcagacatgggaggggcatgagtgaaagttctagatttttcttggtaaacccattctagtccctgacatggaatgctgatatttagttctaatttatga

SEQ ID NO: 186516 - DNA, 347 bp, Glycine max
agcttatgtagccactgcatttaagaaatttgcgacttcttgttgtgggtgctaaatatttaatttttgtataaacaccctttttctaacaaggaaaaacatattaagtaccaaatattattctacgaatctaatgttctgaaaattgttcttttaccaataacttcaagaaccacatgaaatcatgccataagtttattttctcaaaagtttccaaagcaaatgaaggttcttcagtaacccaaagaaaagaaaagttttctgcggtataaaaaaattggcacttaaacccattttccactctaacactgcttaaagctaatacttattttttctcctctcttaac

SEQ ID NO: 186517 - DNA, 428 bp, Glycine max
  unsure (1)..(428): unsure at all n locations
tcctaaactaacacgcatatgaaagtgttcaatgactaatctgattttaaaagcattgttcaaaactcacaaatcaaattattaatatttgctatctcacatttgtcctaaaatatattctgggtagaatagagatttgagagtttcgtgacaagaaaaaatagatgaaagaatttgattatcttaattctaaaaaatagagaactaaatttgaaccaaaagaattagaatactataatttcacattgatcattaatgcaattaaactaaaaatatcctcaagagagggttattttgaagacccaaaattctgcatgtaagaacttacttatacgcaacaattntggttgcagtagtgtctcgagagcgaacaatcttaatcacactagcctttanacacaatatccacatacataataaatcttact

SEQ ID NO: 186518 - DNA, 401 bp, Glycine max
agcttccttatccgaaagatccaactaatattgataaggagagacaatctgcatgtttccttgatatcttcaatatgtttatgatcaatatcccattctcagaagccttggagcagatgcctacatatgataaaatcatgaaggagatcctaacaaagaagaagaagtacattgccaaggataccattaagctagagccaaagtgtagtgcactctgtcataaaatgttgcctgctaagcacaaggatcctggtagcttcgccattcctatcactattagaaatctctctattggtcaatcattgctttatttatgggcaagtatcaattggatgcccttatctatgttggaacaagttgacgttgttgaggtgaagccaacctgcatgacactgcatctt

SEQ ID NO: 186519 - DNA, 482 bp, Glycine max
  unsure (1)..(482): unsure at all n locations
tctaatgctntcttcctctggatcataggtgtcttcgcttacgctcattccatagaggaggaccacaagtggaggatcatggggaattgttcaccggaacacaaaggttaactaggatgcacaaaacggngacggaacatatacgggtacggaaaaatgataaatttagaaatatcaagattagaaaatgattnttttaatatttttattattaaaaaaaataaaaaaatatgaaaaataatgatgtttttattagcattttcattatttgtttttattttttaaaaattgttttcatttttaaaagattaaaantttaaaaatatatttcatttgacttattggtttctctaattttaaataataaaaacattaaaaantacattttaaaacaaaatgtatttttaaatttactttgtcatcccattctctcanaatgagatnttttatttcaactgacaataaaatatattatntcaatc

SEQ ID NO: 186520 - DNA, 452 bp, Glycine max
  unsure (1)..(452): unsure at all n locations
agcttgtccgaacatggtcctgttctactcttgaacttggcttccatcatttccatgtatctaattgtttgctacaatgttaattagtggggtgctggctttgcaacattttggtacccacgagggtcaagaaatagtagagctgccttattgccatggcatgtgttctttggtatctatatctattgcttggctatagccacaactgctactggtattctagaanaagctacattccttcaggtcaacaacatcatatcacgctattccaatgaggcacttctggtcaattccttatgcattctgatagtcattttaggtggctttgtgattcttggaattgttactccagcttatggtanagctgatgtcataagggcgaaacgagtgaccatcatctatatgattcaaaattgaagaacattaacacttgtatcatctntaatacaacg

SEQ ID NO: 186521 - DNA, 461 bp, Glycine max
  unsure (1)..(461): unsure at all n locations
ntagaacatttaaactacatgcagtgaanaaaaaatccgttaaaacgcatacaaatgcaaatacaggtaaaaagaaaacgtagaagaagatagggaggcaaaaatcaaagctttttgggataaagcaagaaaatgaatctgtattcatggagtttggagataaaaattgaagcttttggagataaaaatgatagctttagaagaaacaataaacatgcagtgaaaaaaataaaaaaaagcacatggagagggaaaacgaagcacattcatggagtttggagataaaagtcgaagttttttgagataaaaatggtagttntagaagaaacaacgaacatgtagtgaanaaaataaaaaaaaagcacatggagagggaaaccgaagcacattcatggagttnggagatacaaatcaaagctttttgagataaanatggtagctntagaagaaacaatgaacat

SEQ ID NO: 186522 - DNA, 335 bp, Glycine max
  unsure (1)..(335): unsure at all n locations
agncttatgtgctcgctggatgccttctcatctatgttctgaaatctctatacccaatatgccttgtgttccatntcaactggtaaatgacatgatcttccctacacccacttgaaaaggagatagaccaattggagttatgtatacacgtctgtaagcccatagtgcatctttcaatttggctgaccaatcttttctgattgacggccctgttttctctagtattctctttaaatctctattggatacttccacttgcccattagtttgagggtggtagggagatgccactctatgattcacatgatattgactcaacacccttcgaaggtgag

SEQ ID NO: 186523 - DNA, 450 bp, Glycine max
  unsure (1)..(450): unsure at all n locations
actaagnttagacaaagattatagggattctagtnggataaatagggtgtatttttatccatgcggacgacacgatcttctttggggaggcaacactggacaatgttagagcaattaaagcaatattgagggcttttgagcttgtatcgggcctcaaaattaattttgctacaagtagttttggtgctttcggggttccggatcagtggaaaatcgttgcagccaattacctcaattgtagcttgatgtcctttcctttcacatacctcggcgttcccattggagcaaatccaagaagaagtcagacttgggaccctattattagcaagtgtgagagaaaattagcgaaatggaagcaaaaacacttatctttcggggggagagtgactctcataaagtcaatgctaacatccattcctatnntatttcttntctttttcagggtaccta

SEQ ID NO: 186524 - DNA, 438 bp, Glycine max
  unsure (1)..(438): unsure at all n locations
agctttgaccccataattcgcccagatgtgggcnaatttgctttgaaccacaattccttttatgaatgatgctttcctacaacctaagacaaggtagaaggatataaactatacagacttaaggctcaatcaaacaatcatactttcagctcaaaatgggtgtaagggataaatcaatcatgcgcaacgtaagctntttagctaagtggctatcttcaatcaaaacatggccttcatcatcttcaattcaacgcattcattccatactcagagattcatgcaaaaaccattatttaacattagtcgttctctcataaataaagatcacactctcaccgggttgcggctaatgcgttccttcacaatcaaccctgcaaaccaactaacatttccagtcatgatcctaattccatgttctctctcttctaatgattgcat

SEQ ID NO: 186525 - DNA, 474 bp, Glycine max
  unsure (1)..(474): unsure at all n locations
aagcattaactgcctcaattcttcccacaaatctctcattccatttagaggtcttggagcatatacattgacaatgaacaacttctaattgtccttaatccatgcccctacaagcattaaaaaatttctgcctttcaccctcttgtccacctcgaaatctgaattgttccacatgcaaagtaagcctccaactgtgtgtactgatggaacactgtcccaagagacattaaaatctccccatatgttctggcaaatgagcttggtgaaattatccttctttgtttcctgtaggcatacaagatccactntatactttaaattaagctttataaaagcagcccacttaatccacttcatcttataacaattaaagggtctgacagtttgctaatacaacatattcaacaacccatctaattttcttaaacacaaaataactaaaagaagaaaaaaagtaagcatgcataatcaaca

SEQ ID NO: 186526 - DNA, 196 bp, Glycine max
gggggagtcccaaaatcctaaaagtgattctcacacattatcaatctactttaacataagccttttcataaatccattttgaacatgacaaacccttttttccctttcttcttcttatgcatatgatgaactatctcctgagttattaacacacttgggacagcgttgaagaggacgttacacaagcttatgtgtc

SEQ ID NO: 186527 - DNA, 477 bp, Glycine max
gaagtgaaccatttggaaagaaattgtagaccagagctcgatggtttcctttcgcacaatagccaagcaaacgaaccacattgatgtggcggaatttgcccataatatccacttcattgatgaactctttcccttctccctctgtattattgaggattttcacagccaccagaatctcatttgaaagttttcctctaaatacagccccatgagctccttcccctagcttctctttaaaaccaccagtgattcttttcacatcagcataagtaaatcttgcaggcttttctgccctgtattcctctaagaacttctccacccttgcttggtcctctttgttctgtctaaaatggtatatgatcttataaacgacaataaccgcgaaccccaaagaatcaacctgcataacaacagtagagagttattaaaaagaaaaagatgcaaaaactaagtgaagtgtgtaacgagttgatctac

SEQ ID NO: 186528 - DNA, 462 bp, Glycine max
  unsure (1)..(462): unsure at all n locations
gtatgaataggtgctaggcccatgatcggtctatcattattcagcgtctggctaaagatgttaaagaagtgcttctaggaggcagtctagtatctctaactatgcttgttaatttcctgtttcatacttgttcattttcttgaattatatcttgaattcgcctaagtttatatgcaattataggaattttagaaagaaaatataacaatgaacaacacaattctgcaaaagatgttttgcaaaaaaaaaaatgaaattagctcgcatgggcgagcatgattgatgggaattttaaaaagggggaggggtgaagccattttcaccccattccttccccanagctcaaaaaccaccaacgcttacgggagccacccttggcagtagccccaagccctccattgtgcacttgngctttctnttttcacattttcttttatctcctacaagtatgtaccatctccc

SEQ ID NO: 186529 - DNA, 407 bp, Glycine max
  unsure (1)..(407): unsure at all n locations
cagcgtgggcctcttcgcgtgtggaagatganttgttgcatatacanccaaagacccttacgtgatttgctgatggcttcttcccattccaagcttcaattggagtattgtcttttacagacttatttggacatctgttgagtgtgtaaacaacagagtagactgcattctaccaaaaacgtgttatgtagtcgctttctcttgagcatcaatctagtcattttcataactgtgagattctttctctcagacactccatcttgttgaggagaatatgcgatcgtaaggtggcgctcaatgccttcatttctacaaagtcatttaaacttgtactctgtgttgtgaacacatcttagaacttttatccatgttcactttgatatatcacagggccttgaccttttgat

SEQ ID NO: 186530 - DNA, 465 bp, Glycine max
  unsure (1)..(465): unsure at all n locations
ctaagctntattaaaaataatcttaactcctcaactgactgtgccatctaccattttgtttagaangataattaccagcttgggtgtattcgagtcggagagaaatgccctctttaactaagtttttaacttagtcacaaatagaatttgaatagttagtgccaagttcaaatgggtaagaattcaaagcgacatcttatcaactattacgtccatttcaaactcatttaatgctttcacatgttttcgaaaaaggggcaatgattgcatcctttgcatttcaaaaccttgttgagaaagtcaaaaggtcgcgcccttccctagtcgttgatctacctcttcacggaaatattttatggttagaatggatctgtccttctagccactagaagcttccagaagactgataaaaggtgaaataactcttcttcttctactattgcttatgtagtctcttcctcgacc

SEQ ID NO: 186531 - DNA, 413 bp, Glycine max
ttatactctgaaagaagtaaaactgtgcttggtggcagaatcttttctacatgctccgtctgccaaatggtgcatggaaacacccttgtaatttgaacatatggtctgccaaaaatttaaacaggtatctgtgtaagaaaaaacaatttatgaatttggtcttacaatgtttaattggtttttgttgttatttaagattaagttcctatcttgtatatatgtgttgatatcagtctcaatggagcatatccacaccgaaacatgtaacccatctctgtctcagacatcatcaaaccaggagccttgatagataaacatccctgaatgacgacaattgcagctttcgagaagccaatgattgtgccaaatcccaacacaccatgcttcctgagaagttaattagtagtgtatcg

SEQ ID NO: 186532 - DNA, 289 bp, Glycine max
aacaactcgttagccgcactccgccctctcattattattctcccaactcctcctctccgccgttactccttcgccgccacttctatgttcatgacgctatcttcttccaagtcaaatccgcggtaaccgctaacgtgcgtgtcgtcgtagaatcgccaccgttcatcggcggccatccacggcgaatcttgccggagatccgggtgggagttgaaactcctgagcctgttaaacgatttgtacggcggcgttcgatctgattcctcgtaccatggtcgcagtgttggag

SEQ ID NO: 186533 - DNA, 372 bp, Glycine max
aaaatatacctaatcatcagcttggctataatacgttactggatagcggtctcatctgacatgctcatgttagaataattattttatctgatcatagcgaattaaattaccctttcaaaagtatcgttgggttaattaagtctattttaattaacaacaaaacatgtaccactcatattcataatatgtaacgtgagacattttttcgaaactaccaaaataacctactccatcatggttaaattgctcgttgattttttaaatgaaaatgtaccaacacacattgtccttattaagtttgatatgaaattttctgaaatcaatacttacgcacacggatcgtctgatttgtggaccattgatgttgttatt

SEQ ID NO: 186534 - DNA, 449 bp, Glycine max
  unsure (1)..(449): unsure at all n locations
gacactatgaaactaagcttccacaatgggctctatcatnaaatagggtgtctgttcttcatctttgttaangangnnntgattcttggatcctaatcccttagtgttagcttagtgctaacattttggtgatttcattgagaaaaatgtcaaacaaaaccaacaaggaattggaggagtccattttggccatgtcttgtcgagcgcaaggctctccaacacaagcaagacaatcaccatgagtagctccaaaacagagtggatgctcataacgataacctccatggtgttctctctatgatcttgtataagttagccaacatttcaatggcactgccaatntcctccactaggcctacacctactgttagagatagggggagcaacatgaagattatgtcttagagcttgaagaagctntgtcttttacatgtccaactctcttgagt

SEQ ID NO: 186535 - DNA, 478 bp, Glycine max
  unsure (1)..(478): unsure at all n locations
tgtaggattatggggtacccgccacatgtggtactangttgtgtcgggnganggngcaagtcgactatccagatccacaaatcacacatgaatccaccattcccaattgcccaccttcaactgagctcacgtactcccacgtagcccttatcctcgttcctctcaacaccgggtccccatcaatccccccaagcttccacaacatccaagaaatttcaacatccaaacatcatgaactatcaaaaccaagcaaaatagggtagaggcagaaaactctgcccaaaacacaaaccaataccacaacttttcttactcaaatacccgaataacattcccttcgttccaatttgtgtaccggtggatcgactacgaaatattactggagggtcctagtacataagtctacatcttgaccgttgggatctgctagtatatttcagaacccatatgtacaaccctttcccagccagtcatgcct

SEQ ID NO: 186536 - DNA, 55 bp, Glycine max
  unsure (1)..(55): unsure at all n locations
gagcttgtaggattatggaagtacccatcacatgtggcactangtgagcaatacg

SEQ ID NO: 186537 - DNA, 329 bp, Glycine max
ctatgccaagctatattataggaattcttaagcttattaaatatggactttcagggaactacctgaacggaacagatgcccaatagggcttgtcataggatcatcgagatacttactctcgatcggcaaaaactgtataatcagaccttgatgatgactcaggactgagtgatcaatgttgtgataattacatagatgatatcactagatgatgacactagtgatgacaaagctctcgaaagtcgatcttagaatgatgtcaagatgttcaagatagaatcaattcacttcaagatgccagaagaaaggtgtttcatgaatctagaatc

SEQ ID NO: 186538 - DNA, 328 bp, Glycine max
  unsure (1)..(328): unsure at all n locations
agcttgacaattcacgagttgaattgcagtatgataaccttgcttataacaggtaacaagacatatagacaacatgtccaaatgcaatcaaaatcaaatactgcatgatagaatcatcaacatatagcgaaacggacatttacaaattgtgaaaagcaaaagcagaaaaaaaactgtatntaatttaataatctatgaactacaccacttctttggagatgatagccaactcccctggcttaatgccctgtttggaagactacctcaccgcataaccttgcaatttcgaaaaaagtaattagcaacagtatctgaaaatgtcaaacac

SEQ ID NO: 186539 - DNA, 449 bp, Glycine max
  unsure (1)..(449): unsure at all n locations
ngaatggaataatcaatgattntaagttctggttccatgtgattgngatttgatgatnntngncaatggacttctttcaagtgtcaacttaaaaaatttaggctaaatgcaacattaagtagtaactacacaagagacaggtgaaacaaaatagtgaaggtacttcttggccctagatttctctctaatattttccttttccattacctgtgttttttgagttccaaacaatgtattcacaggaaacaaactagcagatcttaaatatgaccatctttggataaacttctccataaacttataggagaaaaaaataaaacaagcttctccggtaagctaaaatntaaattgtccgtgtttcatgatgtaaatgaatttataagaccaatctatcatcaacttangtatttattcgtgagtacagatgattaaacaaccaacttgatatg

SEQ ID NO: 186540 - DNA, 447 bp, Glycine max
agcttgtaggattatggggtacccctcatatgtggtactaggtggcgatcgggcgatggtgcaagttgactctccacatccacaaatcacacataaagtcaccatccccagttgcccacctttaactgagctcacttactcccacgtagccttatcctcgttcctctcaacaccgggttaccattctcggtctctgaaggtctttgcacaacaaaatctcaaaactctctagaacttggacctttctctctcaagaaatctctagacatgcagaagcttcaagaaaagaccaaactccattccaaaatctgattccaggcttatataagtggctttgtatgtgcttgcgcgcttagcgcaattctgaaccgcttagcgtgcattaatggagtatctgcttaatgcgtgcttttctcgtcataactcatccttctttagattcgtctc

SEQ ID NO: 186541 - DNA, 419 bp, Glycine max
  unsure (1)..(419): unsure at all n locations
gacctatgaaactcaagctgaagtgtgtaccaccatcttttctagtagaatattggttatgtgtctactatcattgtcatcatttgttttctccgtcattgaggtgccacttgagctgccaggtctctccacctttgggtgtattcttttgaaagatccgtgccccctttttgcaaatgttctgtagttgcatcctatccgaagacattatactgacactgcctaacgaaggcaaccactangtccttccaagaatggactcgggaaggttccaagttagtgtaccaggtaacagctaccccagtaagactttcttggaaagaatgtatcagcaattcctcatcttttgcgtatgcccncatcttccgataatacatctttagatggttcttggngcaagtaatccccttgtacttgtc

SEQ ID NO: 186542 - DNA, 378 bp, Glycine max
  unsure (1)..(378): unsure at all n locations
agctntgaatctctatgaacttcttcttcttctttgtaccaaaagctttatgaagttttctggttctccaaaccttgaaaacttgtgctattcatcttntcattcttttctccctttgccaaaaagaatttttcaaggactaaccgcctgaattcttttgtgtctcccttctcccttgtcaaagaatacaaaacgacacagtctgagaattcttttgattattccctttccctaatacaaaagtgttcaaaggactaaccgcctaagaattcttttgtatccccattcacaaagtatcaaaggtttaaccgcctgagatctntgtcttaacacattgnacggtacatcctttgcggtacaagtagacggtacgtctac

SEQ ID NO: 186543 - DNA, 482 bp, Glycine max
  unsure (1)..(482): unsure at all n locations
cttgaatgctctattcaatggagttgacaagatcatctttagactgatcaacacttgcacagtggccaaggatgcatgggagatcctgaaaaccactcatgaaggaacctccaaagtgaagatgtccagattgcaactattggccacaaaattcgaaaatctgaagatgaaggaggaagaatgtattcatgacttccacatgaacattcttgaaattgccaatgcttgcactgccttgggagaaaagatgacagacgaaaagctggtgagaaagatcctcagatccttgcctaagagatttgacatgaaagtcactgcaatagaggaggcccaagacatttgcaacatgagagtagatgaactcattggttcccttcaaacctttgagttangactctcggatagggctgaaaagaagagcaagaatctggctttcgtgtccaatgatgaaggagatgaagatgagtatgacctggatactg

SEQ ID NO: 186544 - DNA, 384 bp, Glycine max
cagctgccagatacttgtagaaactccttatactggcatggtagtacaggttatcattaaatctcttatggaactaattgcaaattctctgtcataatacacaatctatcttctctctcttatatggtcctatcacacaatccttataaatcttcaattaaatcatctctattttatgttgaataaaccaccacccttgaagattcaattttgcaacccccaaagaagctgcatctaacggaggctgggggcgacttctattagtgcacattccaaccatttctaagcatagtcttataatttgctttggacctactcaccctacaaaccggtttgtatgggaagatgcttcaattataacactctctggcctatctgaatgat

SEQ ID NO: 186545 - DNA, 487 bp, Glycine max
  unsure (1)..(487): unsure at all n locations
tacagtagtccataaccacatgtcactgcacttacaacattgcattttatacctgttaaaccttggtattgatgaaaatttcacattcataattgattcactagcttcttttcagttgtgtcaaacaacccatggacaaatgttgcaaataagaaactaaatagcatgccttctgcaagctataacccatgtgacacttatcatcttctgaaagctataacctttataacaagtgcaacatgcctttttctccacaaaatggtacggcaattgcaacatattgtggctctgaagttgttatttatttatttatttataaagaaaaaaggagttgggttaacagaagacaaagattgatatggagaaaatgcgatctattccacaaattctgatagttaatgcanagcaattaatgatactagctagtatatgtagntntaaaaaagaaatataactgttccagtgtcagaatttctatgtaccagca

SEQ ID NO: 186546 - DNA, 338 bp, Glycine max
  unsure (1)..(338): unsure at all n locations
atcctctgagtcacctgcggcattgcagctgcacaaagtgctgcttgtctatgcttcatcttttntgcatcgacgaccaatctctgcccttgtcaatgcccaaaatgttacatgtctcattgttgtgacgcgttctgggagtcatgtgattgcttcgagatttgctcataatgttgtgagatatgacatcacgtgccatgaaatttgctgaaagtcacatattaaatacaagtgccatgagacttttgtcacaccgctgtgagagttgatagagtacttttattttggtcccccatcattccatggatgtttgggactaaaaaaataatatttttagt

SEQ ID NO: 186547 - DNA, 488 bp, Glycine max
  unsure (1)..(488): unsure at all n locations
tgccacccagctcgcccaggcgagcagggttgcttcctccataagctattgtcttctggaggaatcttctggagggcccaagtgggcctggttgctatttgcacccccatttttactaagtacaccccctgccttttttttgtgattcttttttcgtaaagttacggaaacttacgaatttcgtaacgatacttgttttctttccgtaatgttacagaaccttgtggattacataatcatccccttcttgacttacggaatattacggaaccttactaattgtgcaacgatgcttccatttgatttccggtgtgtcacggaaccttacggattgtgcatcaatattntcttttgttttccggcatgtcctggaattntcacaaatgcctaatgatgggtgccaagcacctcacaaggaccaaacanaagttgcatgtcatcaagcaaagggtcccggacgaaattanggtatgacacatattaagaac

SEQ ID NO: 186548 - DNA, 68 bp, Glycine max
  unsure (1)..(68): unsure at all n locations
agcttgctcctaagaagacttaatatatgtntgagccttatgatattccataagaggaagatctatga

SEQ ID NO: 186549 - DNA, 464 bp, Glycine max
  unsure (1)..(464): unsure at all n locations
tgaatcgccaattggctaatattaattttttatatagatattgggcctctactcaaccctgtattaaatttcaaggaatagcaacatcatcgacaggaagacagctatatactcaggatgcgagaacgaaatacgaactaatgatgtaaaatagacaaactgaaagacaagaaatagtcactagcatagactctaatgtcacactgccaataaaaaatgacaaaaacttaaggatgtgtctttacattcgtaacatttattagcatacatctgaaattaatagctacagaagggaaccattatttctacacgtaaataataaggaaaaatgatatttgtactttgaaagaatattgaanagatgggaagaacagacccattctctcttatattcgttttaaaacttatttcaccacaatctagtgtgaccacgtgtgttctctacatgcagcttatcttacata

SEQ ID NO: 186550 - DNA, 395 bp, Glycine max
  unsure (1)..(395): unsure at all n locations
atacacggatgttctgtttattcccgaatatatcgagacgctcaaaattgagactagaagctctgagcaaattgaaatgacaataactntatacacggatgtccggctgactcccgtaatatatcgagacgctcaaaatttagatccgaagctctaagaaaattgaattgacaataactttatacacagatgtccgattgaatcgagtaatatatcgagacgctctaaattgagactagaagctctgagctaattgaaatgacactaactttatacacggatgtccggttgagtccccgaatatatcgagacgctctcaattgagactagaagctctgagcaaaatgtaatgacaataactctattcacggatgtccgcgtgagtgccgtatata

SEQ ID NO: 186551 - DNA, 365 bp, Glycine max
ataaacattttcctgatatctggttttaatatggaaataccatatggtataagttttggataaactccttgtcgccctactgtcacatcccactatttggatgagtaataagtttcaagacacttaaggggctattgcttgtaagatgaacacaaccctgtattgaccactagtgcgtctggatatttttttaaaaaaaatctccttcctgttggtttgattcttatgaaatatttattggagtttgtgatacacactctttgcttactctttcgatggccgatgagacaatcacgagcctcacggggattcttccttggaccacatgtttttgtcttcttaggttaaacacaatgttactgggg

SEQ ID NO: 186552 - DNA, 417 bp, Glycine max
  unsure (1)..(417): unsure at all n locations
agctacactattgcggacgacacagcctaatgtgtcagcataccgncttcnatatgatatccacgatgcccgctatgaactcacgcaagaaactctggtgcaccgaaagacaaaaccattcattatgcctgacaaattccactggcacaatatcacctaagcggtcgtatctcttttttcggtctgaggcatatggggcggatggcgacagaaaaagacgggaaattgagtgcgacccacatgtcctacactatactatacttaaaaaaactcccttgtatttgcatcctctctatttacatcatgtgtgccaacagaacatatatgacctcatctggacactgtggacattcaatgtagaaaatggcatattgacaaactctcacaatgatctacgaagatacacctcattgtctg

SEQ ID NO: 186553 - DNA, 152 bp, Glycine max
actctctcaaataggtcgttatttatgatgtgactattgttttactctataaagctcttattcaatacattttaggaataatctagccttattgaattgtatgctaatgacagtgctggataataattcattatatcctaactgtctccttt

SEQ ID NO: 186554 - DNA, 420 bp, Glycine max
  unsure (1)..(420): unsure at all n locations
gcctgatacaaagtgttcttttgcaccatataaattgtttcttcaatgtcaccttttaataacgtagtcttaacatccatctgatgtagctctaaatcataatgagctactagggtcattattgttctaaaagaatcctttgaagatactggagaaaaggtttctttatagtcaatgtcttccttttgactaaaacctttagtgactaaacaagccttatacctctcgacagtgctctttgaatcccttctggttttaaatatccatttgcaaccaataggtttcacacctttaggaaatttgacaagattccaaacatcatagncttgcatagaattcatctcatccttcatggcatcgatccaagtttgagagttagaactatgcatagcttgacagaacttgattggatcatcctct

SEQ ID NO: 186555 - DNA, 208 bp, Glycine max
actgaccacacgagcgcacgagagagtctactctgactctagtgccgcaatcaaaccacgaccatgtatgataagcttccaagtgctgacaagggatgaggaaaccaaccacgcttgaaacacaactgggagaaagttatgagcagcaacaggggactcaggagagatacctggcttaggcctagacaacctgtgttcttagcacacc

SEQ ID NO: 186556 - DNA, 423 bp, Glycine max
  unsure (1)..(423): unsure at all n locations
gggccttcaaagaacaagggatagcctgctttgttatttctgcgntagatagccaactccctggcacattctctatagttgcggttttgtttaattctaccccaagtgtgcctgatgatgtgctcacacatgccttccagattgatactcaagacgttgacaagatcaagaacagtctttcctagctcaaacaacaatgcatatatatgcagtcaaacgcgccaacatttagtattctcaaacatgcttttttgtttcctacaataattctggaatcacttttngtatttgacattgcggtttacccgttgatacaaaggaaagaacaaaaatacactttcttattctgcattncaatttttgcacctaagcactctanttttcctaccttattactctaaattaagggattaacctctccct

SEQ ID NO: 186557 - DNA, 454 bp, Glycine max
  unsure (1)..(454): unsure at all n locations
actaagcacactcaagctngcaaggaagtnttctcaagagagcttcttttggttttctcctantctataaatagaagcatgtgtaatacttgttgtaactttgatgaatgagagtcttatgagacacaactcaaagttcaacttctatcccttttttccttccttcaatttcgtgctcccccctctctctttctctccctctttcttttcctccattgaagcatcctttccaagcttcttatccaaggctcatcttggtggtgaagctccttcttccatggcttattccctagtggatggcgcctcctctcacctcttctcctttgtcttccgctgcatctccatggtggaaaatcaccattaaaggatctcattgaagctcanagatccatcctncatagaatccccacaagcaagtctctatcaagtggtaattagagcataagagcttcaa

SEQ ID NO: 186558 - DNA, 453 bp, Glycine max
  unsure (1)..(453): unsure at all n locations
ggcttgtggggcttctatggagactggatctttgtatcttaatgatgtccttnaagggagatnttccaccatggagatgcagcggaagacaaaggagaagaggtgagaggaggtgccatccactatggaataagccatggaagaaagagcttcaccaccaagataagccttggataagaagcttggagaggatgcttcaatggaggaaaagaaagagggatagaaagagagagggggagcatgaaattgaatgaagaaaaagggagagaagttgaactttgagttgtgtctcacaagactctcattcatcaaagttacaacaagtgttgcacatgcttctatttatagactatgtagcttccttgagaagctttcttaagaaaacttccttgagaagcttctttgagaaaacttccttgagaagctagagcttatgtacacacacncctctca

SEQ ID NO: 186559 - DNA, 388 bp, Glycine max
  unsure (1)..(388): unsure at all n locations
actaagcttgcaagctggcttgttaactaataatnggttaactaatattaataactttattttatcaaatcttatcttatccagattttattctatctagattttattttattcaaattttatttcatcacatcttatcttatcttatcttaattttattttatttcgcttatgggtttggacttaaaatagatttgtaagttttggggccgaggacctatataacagcaccaaagttttaggttagggagttttttttcggagaggagaataattttaggattttagaatttcagttnttattactgttcatgcacactgttcacgtagaataaaattcattttctaccaatcatctctaatccataccatttttaatattatgctc

SEQ ID NO: 186560 - DNA, 351 bp, Glycine max
atatggctggcagtgcaaaacattgctttgttatattaataagaaaccctcctaacaaattgtgcactcaccattaatccttaagtgctcatacaacccaaataagaaaaaagaaaaaaaatgttatttgaactagatccctttgttgacaaaaagaagcttagtttgacagatgattgtcactttcatatatgctagagcatgggaaaacattctgatggacacactatcaacttcaatgttcaaacttccaatggcatttgagtgggccattgtggtaattgataaagtgccaggggtgcttgggtcactcacactgcgtgaaaaatgaaacagactataatgtttgga

SEQ ID NO: 186561 - DNA, 327 bp, Glycine max
tcggctcaacttatatctaaatagcaacaaaacaacggaggagaaaacagatagctaataagtttattttaccttgaggtaaaggagctaaattatcgtagagaactacggttacgtcgaccttatccaaataggtcttgcccttgcccttgcgcggagcttcttccatttgagcatcaatatacggataggcagcatcatacttggccttctcgtgaagcaaggttttggttatcaatatacagaacatataaacgaattgtacataatgattggcgggaacaggataggcaatgcgcttatagacgtcgaggggcatggcggagt

SEQ ID NO: 186562 - DNA, 428 bp, Glycine max
  unsure (1)..(428): unsure at all n locations
agctntatggtagataacaagcacaaggtctaagtatgagcccgcttatctttgtacatatcatattaaggttaaagttttttaaaagcaaatcacagccttgctattatagactctttatgtctagccaagaggaccatttataagagttataacttttagaaaaactcaaaaccaatttgaaaaagtcaaaaaccttctgaagagttacatcttttgatttattcagagacaatcacaggtaatcgattaccatattagtgtaatcgactacacaaagcttttatgtgagaggatatgactcttcacatntgaatttgaatttcaacgttcaaaggcactggtaatcgattaccaaaacattgtaatcgactacagatctttgatataattgaaacgtgcaattcaatttgaaacttttcaaacaa

SEQ ID NO: 186563 - DNA, 285 bp, Glycine max
tgtcaaggaagcaacggcgtccaggacttgcagcctgtgttacacgtcgtcgaacttccttgagagacagactcgctagacacaactttgagagacactactgtgccttaggatggctctaattgcgagcttactcccatacatgaacctgctgattgattttacactgatggcatcgtcctctgctatgcatacaggcgaaggatatctgccggaccaatcgtcttatacagtggctgatcatgcgcacgatggtgaccactctgacccacatgtgtatgactt

SEQ ID NO: 186564 - DNA, 361 bp, Glycine max
cctgactctataacaccgagctgcaactttatcggattaggaaaagaagtgacaaaaccatagctggaaagaagatatgatcgcggcaacgacatctcaactatctttgggagagacccacaaagaagccataactctgagcgcatacattttggtaatcacgaggggcgataattcgttctatcctttcatatcaacgcttgatctctgatgttgagacattcgtataaaccatgatgcatgcggagcaaaatgtcctgactgtttatcgacccccttcttaacattaaggcaatacaacagatggcgtgaagtgtcgtcagacctcgttcaaatgggatacgagagctcagcgtatgat

SEQ ID NO: 186565 - DNA, 441 bp, Glycine max
  unsure (1)..(441): unsure at all n locations
gcatcagatcaaaacatgaattatacagaaagggacctaattcttatatttattacacctatgaaggaagaaagcaatttcctattctatggttgtgcgtttggaggcatcccagattgattaccagactgcaaaaaataaaacaagaattaatttcccttcagaattggaccgtccacttcacaaaacaaattaattaggaatatgatcatataaccactggcatcacacatccaacaaatttaatttatgtactaagcaatggcatgtctcaggaaaattagataatggtcctatttggtacaatgtaatgtcactagaaaaatcatcacggtaaattaagatctcatagcacgtcaacaccaagatgaggaaaaaatggtanaagatgtcaggattgagtgtaattcataaaagctggaatcattctcctttgagaat

SEQ ID NO: 186566 - DNA, 207 bp, Glycine max
taagtagagctaacattttatgtgtgtgacacaccatgtgtgtcaataattctatggctaactattcgttggcccaagtatggacctttatttaaataaatattataagagcatgcattgtcctatttaatgagtgcatgcgcccatatcaacttatattatatatattaacaatgacctaacatgcccaacagttgcataccccaa

SEQ ID NO: 186567 - DNA, 429 bp, Glycine max
  unsure (1)..(429): unsure at all n locations
gcatgtagtactcttaaaagagtatcttataaacaaaaaaaaaaatctttatgagctatggagaaaaagagaaccaaatctgaaatatcttaaagtgtggtggtgtctattaaaggttaatatccctattaataagaaaagaaaaattgaaaaaaaaaacattaattatattttgttggatatttgttacataatactacttatagattcttagttattaattcagaagtatctgaaatttctaatgttactattatggagtctagacatgtgactttctttgaaaatnatttttcttgataaaatataatagtaaatctttgtatggtttgaaacaagctacaaagcattgacacaacaagttgattaagttattcttttgtatgattttcacatcaatgatagtgataaatgcgtgcatgtgaaaat

SEQ ID NO: 186568 - DNA, 431 bp, Glycine max
  unsure (1)..(431): unsure at all n locations
ctgcgctgcagctataagcgttactagaaactttatcatggtatactcatctcgntaagcccaatgacgggataacaactgataggaagctatcaaatcttgaggatgttttgcagatatgttaattggtccgtcgactgcacccaagttagatgaagtcaaacagtctgataatattcttcctcagacatgagagccatctagccaaaaaccttagacgaaggactacacaatttgttaactaccaccccttagatcaaactattggagataagacttaagggatcaaactcagatcatcattcaaacatattatgtctcacgctcttgagtctaaaatagaacctatgacaattgatgatgactaaataatttcaatggaagaagaactccaccaactcacctgagatgatgtctacacactcgttatc

SEQ ID NO: 186569 - DNA, 428 bp, Glycine max
  unsure (1)..(428): unsure at all n locations
gaaaaacattgcgtagactgatggttctgccttgtcaaatggttggataagggataccaatcccacatggagtcccactttttgaagtatgcatagacatcgnatgtatatgtgtatatatatatatatatgaaaaaggggttaacttgacaaaacatcttcaaactattacatgctacagggagaggtggagtcattatcggtaaagcaatgttcttgactacccctgctcctccaagattttatgttgaatgagaggaatatatttctggagaacttgaagtggtttcattcgtcacccacgtgcccgcaaagaggaatagtgtaataaagttgttggacccttgaacaaagccatacttgagtgaatgaccatattagattttcttattgaaaagtatttctccctaaaataaaggccaacatga

SEQ ID NO: 186570 - DNA, 460 bp, Glycine max
agcttaagaatattttgaagatgtgaaaaaaatacttatttttttaaaccctcaatagcatgtttcttaaatatatataattatttagattcttgataggaagggtttagaatcagtggaactctataagttttatgtggttggatggtatttgattatacatgtatactgcgtatcattgcttaaatggttaaattattctatttatgaataatttgattttcaagacgattattattgcctggactctagcagattttcatgatattggtagctattctttgtgcgcatagtgacgtgattggattataaacgggacccattacctctatgctcttctttgtctcctttctattcgagtaagtttcataacaactcaacctttagatggacatactcttatattcaaatattccattattattgttgaacctcataatgtggccacattgagactcat

SEQ ID NO: 186571 - DNA, 474 bp, Glycine max
  unsure (1)..(474): unsure at all n locations
tggagtcatattcacaaatgatgcttgaacacccttattccacgcatatctgcaacccttgagcaatggcaagcaacttcgcattcagactcattgtgaagcggcaacaaccaaaaaaactgagaaatcaattacccaaattatcacgaatcaatctgtcaattccagcctgactcggattgcctaaggagcttctatcagtgttgagtttgtaatcaaaatcaaccggaggagaccaacacaccatacgactaggaagacttgagatattgtgatgagttgtttctgcatgaatggttcgaaggagagacttagtcttgtcaatttgacaagccagggtggccacgcttcatcattgaagatttcaatattccttgaaagccaaataaactggcagtaaatagcgaacttttgaccttgaggagctctaagattcntgaaaatccactcatcaacatcatgaatgaataattc

SEQ ID NO: 186572 - DNA, 117 bp, Glycine max
tagtatgaaaggtttctcaaaattgaataacaatgatttttttaaacatgttaccaagagttttactctttggaatcgaattcccgcgcacaatctttgtgaaggtttaagtggatt

SEQ ID NO: 186573 - DNA, 432 bp, Glycine max
  unsure (1)..(432): unsure at all n locations
aactcaagcttgtcactgctcactaaagaaaaagaaagccctaccaagtgacgctattattattaagaggccattagagtttttcaaaaaagctagaggaaaggaaaggctatgggacaaagatgttntatctgcaatcggtcaagacactttgcaaagaattgtccaaagaaatcaataaaggtcgtcaagctaatttcttatcttcagattagtgaatatgatgatatagaatctatgtatttagaacagagcgatcgaaatgaagaaactaagtttgtcttacatccataaattcttctatgaagattttcaacctctcctatcccatattctctatcaagaagagaagtcataaggcctgcatccctcaacttatttgagttcaagtgtagcaacaagttaaaaacctatcaagtcatacttgcactg

SEQ ID NO: 186574 - DNA, 409 bp, Glycine max
  unsure (1)..(409): unsure at all n locations
agcttcttaagaagagtgctgaagaagttatagcttaactacacacacctctctagtagctgagctcgccttcttgagttgagaagctagagcttatactacacacccccctactgatatgcttaggcctcacctctcgatgacacagaatacgatataaagattacacaaanaaggctctctacgtacaagagagctatctccaaaatggcctctaaaaatacaagggctaatacctatactactagaatgaccaaaatacaaggctcaaatgagaaaaaacttattctaatatttacaaagataagcgggctcatacttagcccatgggctcgaaatctaccctaaagcttgtgagaaccctaaggccttctcttggtctattggccaatctacttggagtctacta

SEQ ID NO: 186575 - DNA, 466 bp, Glycine max
  unsure (1)..(466): unsure at all n locations
ntcgagcccttcttctttccctaatagaggttttctgtgtgtatcagnctcttttctttgttcactttagagggaggatttgaggtctttttgttgaacatcatttgacctagtgtagctcatgtcaaaagtgtatattggcattagagaagtagattgtggaagagacgatgttgtgtccattgttaggttagccttagatgtagacaaatcctttgaggatacagaaggaggaaattcagacatgccatccgtatctatttatccggaaaaaaatttaaagttagatatcacttatcatcagtataattacaaccaagctttttttattaaaaaaaaatagcaagatctaaggtaaaaatgataaaggatacacacttgtggggacatttgaatatgatggaataatctctnttcaattaatatagtggctaatgcctaacgatcaaagagattatctcatcat

SEQ ID NO: 186576 - DNA, 380 bp, Glycine max
ggatcttaagcgactgtgctgcaactaaaacttaagtctgaatcttcagaagatcattcccccaattatcccaaaacttatacagaataaccatcttcaaacccacaagcagctgtctaaaccctataaaactacagaaatgcagtatcttaaatatcatctacagaccagtctaattatctccaattacccccaatgaactactctgtaagaagatttcagatttcagccgcaagaaaatcattttggagctaatcccatccctctcactttagctaaaaaaatcccccccatgagaggcttttttgttaccctccgaccataaagctctaattaatgctccgatcaatatccctaaagtaaaaaaccttgcatattaa

SEQ ID NO: 186577 - DNA, 367 bp, Glycine max
tgtccatgaattcaataattaaagcttgcaatgtatatcttatcggctaaacatcacctgagccttatacaaaggggaatacaaattaaagcaaaaaaacctatggtttacgcatgataacaacaatctaacctcggtgaacctgtcaaactgctcctgcgacgtgccgttaggaggatccaaccgcagcacgtggatgatcttctcgaagtagtgcaagtaaacgactagcgcggtgccgtgcgccgcggcggcgactgaaccaatggccatgaggaaccaatcgaagcggtcggcgcatgcgaagagctgctaatacagaaccgcggcgggcggcggctcgatctcctacggctcctcatctcct

SEQ ID NO: 186578 - DNA, 391 bp, Glycine max
  unsure (1)..(391): unsure at all n locations
agcttgngcagagcagataagaaaataatgagtgacaatgtgaaagaaaagagccatttcttgggtgaattgggtgttgagaggtcaaattttgaatcggtggaattttcaccttaaaaccagtttgagcaagtctaaatcaatgttatagacttgattgagatgagagtttaccccaaaattatccaattctcattttcactcttcaaaccttgaaaattcactaaattgaggggtgttggatacctatattttgatatgccttggtttgaaggttgcttttggtttaaatatgatttatacatgatttaggacttgtaggatccaactagagcaaaaatggatttcgaaatctgtcatcttatgcagaacaatgcttgcacaaatgtgc

SEQ ID NO: 186579 - DNA, 473 bp, Glycine max
  unsure (1)..(473): unsure at all n locations
ntataagtgcgggtctgggagacgaaggtcaagtgttctctatatgtgaagatgatgttccaagtacttcggatttggtccgaccatgccctcctgatttccagctgggaaattggcgagtggaggaacgccccggcatttacgcaacgagcataatgtaaacctttacggtttttaaaagctctatagatgggcctaggctttagagttttctttttgttaaggctttgtgtcttttgtttttgaatttataatacaaggatctttcttcatctgttcctggtctctacccattctcattcatttgcatgtttacttctttttctgaaatggcagattcgatgacgagtcccccgaaggtactaatacctgngacccgtctatcaacttcgagcaagatatgaaccaaacggaagatgaaggagatgaggatgtgggacttccttcggaactagaaagaatggtcgcccatg

SEQ ID NO: 186580 - DNA, 413 bp, Glycine max
  unsure (1)..(413): unsure at all n locations
agcttgtaggattatggggtacccatcacatgtggactatgtggcggncgggcgacggtgcacaacaagttttccacatccacaatgcgcgcataaacccaccatcccctgttgcccacctccaactgagctcacgtactcccacgtagcccatatacttgtttctctcaacaccgggtccccatcaatcctctcaagcttccacaacatttcagcagaacaacattcatacagcacaagctatcacagtcaagcaaaacagagcagaggcagaagactctgctcatacaccaaccaaaatcacagctttttctcgcttaaagaccccagtaacaattccttcgatccaattcgttaaccagtggatcgactcgaaatatataatggaagtctctagtacaataagctacatt

SEQ ID NO: 186581 - DNA, 491 bp, Glycine max
  unsure (1)..(491): unsure at all n locations
ggacctatgaaactaagcttatgatgaatcaagatcgattgaaagagttctgatgattactaacatgatgacaaaaagctcaaaaatcaataacacttcatgataacaaaaatgatgatctcaagaatcaaagaatgagttcaagattgaatcaagtacacttcaaggatcaagaagaaagttgaattcaagaatcaatagtcaagtttcaagaatcaagatcaaaattcaagaatcaagagaagacttaatcaagataaatattaaaaagttttttcaaaaactgagtagcacatgagattttctcaaaaccttttatcaaagagtttntgctctctgttaatctattaccagaatatgggtatccattaccagtagcaaaatggttttcaaaaagcattcanactgaatttataacgttccaattaatttcaaattgtgttatcgattacaagtatttggtaatcgattaccagtgtgtgtgaacattg

SEQ ID NO: 186582 - DNA, 412 bp, Glycine max
  unsure (1)..(412): unsure at all n locations
agcttacagtatgcccgagtcattcatccctatgagaagctgntgaagtattggcgatcagaattgccattccttggattatacgttgaaccacgcttatgcttttacagaaaggttcatcaagtcaagttgaaatatggaagtaaccgtcttgctaaattggggcataagatgaatcgagtcacatcactgcttcgtctatgccaaacatatttaggattattgatgtgcttgttactttcagtttcaccttgacaaagatgtcatggaccatgttgaaaatctaatatgattcaacctcttattttgcgtaaaattcgcaatacttcaacttgacatcattcgcatgcattcatgctattattgggtgcatagctcgtgattcttccttgaaataaataaaagaactatc

SEQ ID NO: 186583 - DNA, 336 bp, Glycine max
  unsure (1)..(336): unsure at all n locations
ttgagcatctgaatatggtaggcatgggacctgctttttttctgcanacngcgnaacacatggcccaatgacaaaatatgaagaataccaaaaagatgtggcccacaggagcctccattaaaacaccaatgcacaaataaaaaccatgaagcaactgcatggacattaagaaggggaacttgtaacatgactctgcacaatttgcaaagatgaacactcatcttataaatctattcacattagtagaacattcttcaccttgagtgccattccaataattgcaagagggaagccataagttaacattatagctgaccattccgatccagggagaat

SEQ ID NO: 186584 - DNA, 364 bp, Glycine max
  unsure (1)..(364): unsure at all n locations
attaatatattgttaganattaagtgagagataattaaggttgattaatggcgatctaaataacatggaattagaaaaatgagtaactaagtcataagagtttaaattggatggtatttttcgtaaatggctatacaagttgttatttaaaaaaaattagtttaattaattggtgactaattaaagtgtctaattatatgatgaataataattaaaataagttatagttgtaacaccctgaaaaattacaactcaaaactgacagagagaactgtgttgtgtcatctatgcatatatgaatataatttccatattataagttttaatcatagaatcttgcgcttgtatatgtgcgtgcatgatg

SEQ ID NO: 186585 - DNA, 427 bp, Glycine max
  unsure (1)..(427): unsure at all n locations
tgatcgaggcgggatggccgacattctatgatgatgggtctaacgtaaagaccaactcacttgccaatcacggaggactggtcgtgaacacagtanaggtgtgtcgatcacaacagcctaagcacttggaaaatgtgataacctcgaggaggtttatctttgaagccctgcaagaggcaggcatggttccccccagcgggaacaaaggggacccctgcttgatgcacccaggtctaccgcacaacatagagatgtgcgcgacagtagaagagcagttgcagcatatgatcgacctcgggcagctggaagtcaatgattggagcaaggatgaacaacatgtctgcatgatatccgcagacatggaaactcccaagaagccaaaacccatagtgatacagtttacccaggtttctacaccccaacagcg

SEQ ID NO: 186586 - DNA, 330 bp, Glycine max
  unsure (1)..(330): unsure at all n locations
agcttgaagcangagccagtntgagagcttgagatgagtttgtgagtgattgtgagatcctatagatgaaggagacatcctcagcacttgtatttttgcaatctttcatcttgttcttctctttgttgttaagaaggcttcttggtatggaaagctaaattctctgttggatcttccctgtaggtacctaatgtaaatatatttctatctatttaatgatgttttgtgtgttccctgtgttgtctgcttttcaatccagtatgcctttacctttatcatgtagatgcatgctntgttagggtcattcaatagtggaaactggtctgactc

SEQ ID NO: 186587 - DNA, 443 bp, Glycine max
  unsure (1)..(443): unsure at all n locations
nggaggggttgatggngaccctattctgatatgaatgaggataagggctacgtaggagtgcgtgagctcaatttaaagatgggcaactggggatggtgtgcttatgcctgacttgtggaaatgagataattgatttgtgccatcgcccgatcgccacctagtaccacatatgacgggtgcctcacaatccaataagcttgatgtgagaaagcgtggaagagtcagtcttcctacttttgtttgttgaccacagagtggtacctggagatatgtcgcgggggtcaggagaccttggggacgccaggtggggtgctatttcccaaaaccaagcttggtcaatcccgacccaacccgggcatagtcagtcagtgagaacctgtgacgtacctaaggaggcgagcttctggcagtcaaccaatataagaacaaagtccacgaaagca

SEQ ID NO: 186588 - DNA, 347 bp, Glycine max
acatgcatggcacaccatattattatacttatatcaactgatgcaatctatttgattgaaaagataatttatactactcttactatgtagtgtacaaccaacaatataatataatctaaaatagtgcttaagccattcaagtcgagactttttgatctcataattagatcatacatctatatgtgtcaaagagaaggagaaacatgcatggtaatgcgtaacacaacacaacattataagaatacatgctttctaaacccaacacaggtaaaaaagatttcatatttcatgaaatagcatggcttcctatggctgaacaatgataattaattggcgagtaagtcttg

SEQ ID NO: 186589 - DNA, 494 bp, Glycine max
  unsure (1)..(494): unsure at all n locations
nttacatgcatgtgcacaccatatntactagtacttgatttactgattttatctattnganggaaaagataatntatactactcttctaatgtagtggacaactaaaattaaaataatataatagaaaatactgcttaagccattcaaatcaagtcattttgaatctcactattagtatcatgcatgtcaaagataaggagaatcaggcatcgtaatgcataacacaaccaaacattaaaagaaaacataaagactcccttcatgatattagcggcttaatcgttgaaccaaagcctcaaaatttttcccatgtctctatgtcttttcctaagaaaataatataattgagattaactgcaacctaactgacaatgttttaaaataatcccttctcaaccttccattttgtaatggaagaaaagaaatcaaaattatgcaatgatataaatcaaggaaaacaacaactccatatagtcttaatgaaattaaaatc

SEQ ID NO: 186590 - DNA, 326 bp, Glycine max
  unsure (1)..(326): unsure at all n locations
catgaatgactttcgggaagactagtgtcgcttcaatatagcagagagacattaaagatcttctgtgagccttatggctctcttttcttctacagagcttggccatcatatattcttatctaaaattgtgacgtcctattaaagtgcttccttttttaagcatcatctcccaactgtngttaggtcgtgagccttcagggtcctgtcactctctgtcttgattgtgttttgaatgaatgatgtgttcttattctcatgtatttctacatattcccttcataagntacccgattgaatatgtacattttttgtacggcctcgtatct

SEQ ID NO: 186591 - DNA, 422 bp, Glycine max
  unsure (1)..(422): unsure at all n locations
attgatggagaacaatattccttgactctctctctctctctgcaaacagacacatccaagccagcctttcataacagtactcttatggccccacgttcaatatcacatgttcatgtgctgtctgagagagactntccagtttccaagtattggtaactctcatatatataaccattggatgataagtttatttagtgacatcacaaaacttatattagctacttaatttttcattgatgtttacattagttgaacatatatgcaattntcaccatttaaacaagattaaattgtatgtgcatatctatagaagtatagaagagtacttttatttgaaagcaaaatagaaaanaaaaatagtgaaagttaaaatagaaaagtcatgtnaattcaagttaacttcaagtcatgtaacgtaatca

SEQ ID NO: 186592 - DNA, 294 bp, Glycine max
  unsure (1)..(294): unsure at all n locations
agtcgacggaggatatgcttactttcttatatactggnaatcagtttctaatgactgctctgccgcctccacaataacgcatagaggatgggcagctcaccaagatgtcttcctcacctagaacgatgaccaaatgcccctccactaccaatttcaactttcggtggagtgtatatggtcctactcccactgtgtggatccactggcgcctcaacatacacttgaagggggggttaatattcattatttggactgtgacttgataggcgtgacggccaatttgttctgtgagat

SEQ ID NO: 186593 - DNA, 397 bp, Glycine max
  unsure (1)..(397): unsure at all n locations
tagagagagtatgtggaccacaaacattntcttcaacatatcttcagagaagtacaacttgccaatgtctccttatgctcagagctaactttaagtgtacaaatcaaatataatgttaacaacataagataaaaagaattgagaatgtcaagacaagacaatntaactcttcccttgtatgtgctatgacacaaattgcttattgaacctatggacgttactttctgatgattacttttagtacatgaggatcaagtagttgttccactgcggttgtactatgagccaagtgctaaagcacttgtcttcctatgacttgacgctgaagcagtatcgtccaatgactaatactttagctatcatccaaagcctcttctgtcatgctttcttcttgatc

SEQ ID NO: 186594 - DNA, 378 bp, Glycine max
gctatgctagagagaatgaccatttagatgctcctttccacaccacctcataattcggccttgctagtttgggaggaatcatagcttttatatgatcacccgcccccataaggaagaattgtattcaacttttgtacatcccatagactatcatgggttttaagcctttgtatttcacgctttgatttaagagtgattattgtttttgacaaccaaaaatttcaaacactcaatcaacaatttcattctctctatatatttcatcttatcacatttcattatccatcacaataaatatttatttctcatttttccctctttctctctatttgtaaacaactctaaatttttcacgaaatgctttttataattatatat

SEQ ID NO: 186595 - DNA, 480 bp, Glycine max
  unsure (1)..(480): unsure at all n locations
ttgaatattcttcatcactcagcctctggtgcacttttgtttncctttatngatatcccattntcagagcaatcacggacctcaaagtcatgcctggccacacctgctaagacaagcaattccttcttctagataatcttccctgttaatccaaaactctggtgcatcctgagttttaaaatatgtcaatagctttcacatctacattgacagataagcctatgcctagagaaaaaccaaaacattaacaactaactcataccttcattattcctgcaaggacagcacctccaaggtacaccatgtgcttcctacgtggtggatcctcaattcttagtcgtaatttctgatcaccatcagagcagaaaagatgagaataagggaacaatgagttggcctaattcatgattacaaaatctcaaacatcacacactgtgtctctntcttctttaaagcacatttatttccttaacttatatg

SEQ ID NO: 186596 - DNA, 427 bp, Glycine max
agcttaattaataaacacattgtccacatactctagaagtggcatgaaagtttagatcaagctctctggcttattgaaattcactaaaaagggctactagtgctactccctttaaattggtttatgggcatgaagtggttttgcctttctaaataaatctaaattcaattgaaattcaaaaacaaaatgaaatccctggtgaagattattgtgatatgatgtatgatgagtcgaatacctagatgaagacagtataattactctagaatacattcattcgtgaaaaagaaaacggtgctaaacactacacataataaagtcagaaacaatattcttgaattggagatttggttttgaaagtttattacctatggataataattgacatgcttggtaatgggcccacattggatggacatatgtattg

SEQ ID NO: 186597 - DNA, 393 bp, Glycine max
  unsure (1)..(393): unsure at all n locations
ctaatgtctntaactcccaatcctcccctttctctagcagcacatacttgactccaagccacccaagctatcttcttcccttcttggttaccaccccaaagaaaatttctttgaatggtagtgagcttgttaatcgctgctgaaggggccctgaaaaaagacatgtaaaacaagggcagagctgttaagacagcattagttaaggtgattctaccagccattgatatgcttctctgcctccatttgttcaatctagcctcgaatttattgataataggttcccacaccaccctccttctcggattaacacctataggaaaccctangtagcagaaaggaagctgcaatggtccacagttcaagaaatcagcagcacatctagtccactgttca

SEQ ID NO: 186598 - DNA, 328 bp, Glycine max
atgatcatttctgaattaacattagtaaggtcaatgccaagaacatgtacttagagagaaacactctttatacagaaggacttacaggaatattttgagctctcacacttgacaatgctttgagacaacctttctgatcttaattataagtatcttataatgacagaacatctttgctttctaatagatataacactaaaacactaatgctaaatgttaggaatcactataacccatcatccttacaatcatcatagctaatggcgtgctctaatgataacaacggatgcagattcaacaatcttgccctctcttatgatgactaaca

SEQ ID NO: 186599 - DNA, 482 bp, Glycine max
  unsure (1)..(482): unsure at all n locations
ntaccaagtaaaacaagttccccaagagtntgtttctcgttattcacttatcgnnttatactacttgtgcgatccggtgcacttatcggccgtcgaacactctcctgcgccaccgtgtgaagacctctcaaactctccttatctccccaaacaaatcttctacagactttatccaaatcattataaaggattcatgaaataaaggaggattgcatggtgtaagatggaagggcatttaagaccactttagtcaaagtaacccttcctacaaaagacagggttctcttcttccaagcattcagtcttgagttagctctatcaataacatgtgggaaaaccttctatttacgctttcatgatggatacttacacccatatacttccctatgtcatatgttcttccaaacgccatataatgactgatttagtcaaggacctgcacccccacattcttcgagaaacacaccttcatcttctctctg

SEQ ID NO: 186600 - DNA, 437 bp, Glycine max
ctctaagtcgactgcagcatgcagcctggtcttgcatctctcttgaatgtgataaacatgtattatcattatgactgatgaaacattctgtctgctccacataaacaaaatgtggtttgagtcgccataatgcaaattggtgattggtttgtaaaagtgcaaatcttcatcgagatttttgggtgctctactcctgtcatcatcttttatagactcaaaatcttgacttgaagtaattgattgatatcatcggctcgaaatgtttaaatcccccctccctcccttttgacttaaactatatattaataagatgcctgatcacaggccaacctttggttatgcatgtgaatataaatacatttggttagaatggtatagttggaggcgttcggagactgcaataatcatattcctaattgcgaattcttgtgctactt

SEQ ID NO: 186601 - DNA, 474 bp, Glycine max
  unsure (1)..(474): unsure at all n locations
gttgcataaactntggaatgggttaacactntaatatcatctctaacagatctaaacgaattccgtgcttgtgcagtagagcacaaacatgaaagagtgtaaatatagaggctcctaccaaactctgtgatagtaatggatatctacgcaaggatgcaacttgacagaaaagaatgttgcctcaacaaccattttgtcactgaattgctactctaagatcttcagacagcttttctgcttttgcaatagcctctgacaaaccaaaaagcttttactttggcatacaaccaaagtgatatgacttacagaagcccagtgaagataggactctgttttctgtagccccaaatacttgtctgccaaaagattagctctgtattttcgtctccagctgatggtttaattagtaatcttaattctcaactcttcttttgaagccttatacaatacaagccatacacagttgatcacatg

SEQ ID NO: 186602 - DNA, 446 bp, Glycine max
  unsure (1)..(446): unsure at all n locations
tcgacccggatcctctaatcacctgangctgcaagcttagaaaagataaggaaattaagttattattatatacgacaagttagtattatatatatatatatatatatatatatatatctgaccgtaatagccaatatagaaaaagcacatgaaccacttattttttggagcaagtgtgctataaatacaagccgaaattgcttgcatctatgccaaatggaatcaaaagtatatgctaattccaatgggagatacttggcgttcaattaaacgataacagtatatgcttataagttccaaatgagattttctaactcgtgttcttatcaagttcaaataggggtacttttataaatcgtaaaagaaaaaatattaagttggagccattatttgaaatggatatcttatttctacactatatgcctgatagaatagttttatattga

SEQ ID NO: 186603 - DNA, 360 bp, Glycine max
  unsure (1)..(360): unsure at all n locations
aagatgcaactcctcccaaccgatctccattgacatgctttcacctcatgtcatccatgtgacatctagccaaaacgctccattgcagaatattgaagcaccgtatattagacatgcatctcgccatgttgcagaaaacgtgcggtgtgaatgttcactatgatcncaacagcatatcaagctttattgaatggtgtcagaaatacatatatacaagagggtggatagcttgttgaaggagcctgataggtggttacaacagaaatctaactaacctatcataccatctaactaactattctaactaactatcgtaatgctgctaagaggcccccgacagctgggaatggatattcatca

SEQ ID NO: 186604 - DNA, 389 bp, Glycine max
  unsure (1)..(389): unsure at all n locations
agcagcattataatgagctttctgttcattgctactaacattattaatancagcacgcttctcttcctatataacaacgtcaagatccaaaacaccgagatgaaattggacttgctcattccaatcagagaagttaagcccattaaatattggtacagatgatacatgagtaattcatgagttgggaacaggtaccgcataataaaacttcacataagcattctggcacatgaaacacaagtcatacatattatttacttagataaaaatcaatgtatattgatgttctcctttgggtgacacaccaacacaccacatacacacatgatgatgcttataaagatttaacattatttgacaaataaatatgcaccaattagcagtatcta

SEQ ID NO: 186605 - DNA, 472 bp, Glycine max
  unsure (1)..(472): unsure at all n locations
cagcttgactcggatatccgattgaagcccagaatatatcatttnccttttatatagaacaggactgaccacgcaaattcggacagccataacgtttgactcggattcccgattgaagctcataatatatagagatgctcttaggatgaaaaagaagcccatcgcaaatacaaacggccataacatttctgctggaacttccaataaagaaagtaacctatcgcgacgctcaatatttaacatggaagactcgggtgaattccgacgggctaaagctttgactcggatgtccgattgaggcccataatatatcatcgctcttgaaagtagtaatggactgaccacgcatattcggacagccataaccgttgactctgatgcccgattgaagctcataatatatggagatggtcttaagataaaaatgaagcccatccgatatacaaacgaccataactttctccccggatct

SEQ ID NO: 186606 - DNA, 398 bp, Glycine max
  unsure (1)..(398): unsure at all n locations
agcttgttacatattaacacaattgangttttctctaatagactcgttgaaagtattagcatatgaggtaaaaagggggaggatgaggaaaatacttctaacctaccatagctaactatccaaatgccattaggaaattgcaatcaatttgcaatatctacaacttatctctttatatgttaattcctgtcgatgagattctccacgatgtagccgaccccacctagtgggataaagcgttgttgttgttggtgagattctccacaacacaattccattcttgaatgtcaattatgccatctcgaatgtataaataaagcatgatattatacatgagtatctcttctctgtccttatgcaactatcttttcttgtaaaagaatagcacggctgtggtt

SEQ ID NO: 186607 - DNA, 192 bp, Glycine max
atgtgaatgttggtttctgccttgaacattctaggagtttcttaaagggcttataagcctatttaaagacatgtagttaaggtaacccaaattttgaaagggatattataaagttacatcttccaaattatttcttttaacaccttgtggggtctgacaaaatctgcctccctctatacaaaatcaatcttt

SEQ ID NO: 186608 - DNA, 409 bp, Glycine max
  unsure (1)..(409): unsure at all n locations
agcttgtctcaacgtttatgcganacagataccaacatgttagccattgtcagcaagtacccagaagaactaaatctagccacggcccacgagcataaagtggtggacaagtatgcccaagtgtacatggaaaaggaggctagaagaagggtgatctacccgttacatcaagaggcaacaatgtggatggaccgatttgctcttactttgaacgggagtcgagaacttccccgattgctagccaacgcctaagctatggcggacacctactctcgccaccgaggagatcacggacttctatctattgtaacatatgatagactaacgcccatataatagaacacgctggaagttggattgcactcacacttgctagtatacttctgataaatagttatctggtttactc

SEQ ID NO: 186609 - DNA, 356 bp, Glycine max
  unsure (1)..(356): unsure at all n locations
gatgtgaaacaatactacaagatgcttgcattacctttcacctgcccctagtgcttacccaaattggtgtggtgttgaccatcactcaaaatctttctttattcatctnccgannngnaggaacccagatgacaagatgcaaatgcatgcatgtttatgatcgaacattaaatgtaataattaacaggtgttatcgtgttcaattttacttaaccgcttatggcaccccgtttatcgagccgaatggctntgtatttagtgagcaagatcgagagtgtatgttcttaaagacaataaaaagtaaaggacacaacactggaagtagagatgcaaatcattaacaaatatttattaat

SEQ ID NO: 186610 - DNA, 371 bp, Glycine max
agctgggaatgtgctgcacccgacaccgttgtttggtgatatggccagcgtttaaccaagacctaatctccgatatgaaactcgtgatctcggtgatgaccatccacaatagctttcatatgttcttgagctttaagcaacttttgacgtaataacgtgaatacgacttctctttgactcagcaattcatctactgcttctactcttgcaatgccttccatatagtgaggataatttggcgggttacgaccaaaggttacctcgaacggagtcaatcctgttgctgagtgaatggaagtgttgacgaccacttcgccacaacagaatcatccccagtcgtggggtgcgatgacaaaggtgccaaatactgt

SEQ ID NO: 186611 - DNA, 429 bp, Glycine max
  unsure (1)..(429): unsure at all n locations
ngtggtaaagtntataaaaaagaatacttttgctcgatttgtggtgcctcggattttgattagtgatggtggtttgcatttttgtaatgctcagtttcaaaaggtgttgagtcaatatcatgtgcatcataaggtggcatcaccctatcaccctcaaactaatggccaagctgaagtatccaacagagaattaaagaagatattagagaaaacagtggcgtcaaacagaaaagattggtcaataaaattggaagatgcactgtgggcttatagaactacatacaaaaccccaattggcttatctccttttcaactggtttatggaaaattatgtcatttaccagttgaaatggaacacanagcatattgngctctgaaatttctgaattttgatgagaaggcatctagagagcacangaagattcaact

SEQ ID NO: 186612 - DNA, 437 bp, Glycine max
  unsure (1)..(437): unsure at all n locations
gatttagagacttactggacttacttccactcatggctntgaatattttctccaaatcaacatattcctagatgtagatgcaaatgtctttggtgttttgatgatgatcatgatgaagaanagcaaatgatgcaaatgattcaagaatacaagccacaacatcaagatgatcactagtacattaggaaggaaattcctaattgatatagcaaaaggtttggccaagtaatgcatgttaaaaagtgtttttcaagagatttactctctggtaatcgattaccagaggatgtaatcgattaccagtggccaaaaatgctttacaacagctactaaatatttgaattcaaattttagactgtgtaatcgattacaccatattggtaatcgattaccagcagttaataaacgttttaattcaaatattaaagcctgtaatc

SEQ ID NO: 186613 - DNA, 266 bp, Glycine max
aggaagctacctagtctattaatagaagcatgtgtaacacttgttgtaactttgatgaatgagagtcttgtgagacatactttcaaagttcacttctctacctcttttatttcttcaatttcgtgctcccccctctctctttctctccctctttcttttccttcattgaagcatcctcttccagcttcttatccaaggctcatcttggtggtgaagctccttcttccatggcttattccctagtggatggtgcctgctctcacctc

SEQ ID NO: 186614 - DNA, 438 bp, Glycine max
  unsure (1)..(438): unsure at all n locations
gctgtangaatatggggtacccatcacatgtgtgtctaggtggcgagcgggcaattgtgcacaacaagntttccacatncacaaatcgcgcataaacccaccatcccttgttgcccacctgcagctgagctcacgtactcccacgtagcccatatcctcatttctctcaacaccgggtccccatcaatcctcccaagcttccccaacatccaagtaaatcaacactcaaatagcacaaactatcacagccaagaaaatagggcaaaggcagaaaactctgcccaaaacaccaaccaaaatcacagcttttctcacttaaagacctcagtaacaattccttcgttccagttcgttaaccggtggatcgactcgaaaattntactggaagtctctagtacataagtctacatctggagcgttgggatctactagtaaaca

SEQ ID NO: 186615 - DNA, 348 bp, Glycine max
gacaacagcagcataactagcctgataaacgccaaaggaaatcgtgggaagtatgggttaggctataagcccactcaggcggatataaatagaagcatcgcgggaaggaagagcggtagtcaaaactcgcggctgatacaacaaggtgaatgaagcccaccctgccacataagtatgaactctataagcacggggctgggggacgaaggtcaagtggtcgcgatatacgaagatggtgtccgagcacattggatttggtacgaccatgctctcctgatttccagctgggaaattggcgagtggatgaacgcccaggcatttactccacgagcataatgtaaaccttta

SEQ ID NO: 186616 - DNA, 331 bp, Glycine max
tctagcacacgccaagcattcttccaactcctaaatgacatgtcaagctactattaactcactttaacctccatttaccacataactcagacttaaacttccaactctcaaagcctcactctttttccactcataacaccacattctcactattcaaccctaggttaactctacatttcatctataacagtctctccatgggcaactttcgcatacaaacatcacacacatcatcacataactctataacagaatgggtatgtctaactcatccagacatggcaatttcaacaaactttcaacaacattcttcacaaataactatcatgaa

SEQ ID NO: 186617 - DNA, 351 bp, Glycine max
  unsure (1)..(351): unsure at all n locations
acacaaagaatgatccaaccaacaatgaccttccagtttcatttgatcttgaaactctgtatattccaccactaacaaagttctaccaccaagttttttggtttgccattgccaccatttttgaagattgatatagttcctgaagcatttcaaggaaacattaaccaagaatctggcaagggaaaacatataaagtctggagattatgctccaacttcaaaggattgtgcattatgtgtacaacttttagtgagcctaatacataggtggctataattttgtttcagcttttcctctgagaaagtaagccgaatgctattntagagaaaactcttgataaaagtaacttat

SEQ ID NO: 186618 - DNA, 380 bp, Glycine max
  unsure (1)..(380): unsure at all n locations
taagctagtttcacatcgnntttaataaaaaacattgttatgccctatttttacatcngngctgacgtaggcaccgatgtagtaagactagtntctacatcctttcttaattaagaaacgtctgtgatcccctattgtctacatcagtattgacgtaggcaccaatgtagtaagactagtttctacatcgtttgttaattaagaaacgttgttgatcccctattttctacatcggtgctgacgtaggcaccgatgtagtaagactagtttctacatccttttttaattaagaaacgttgttgattccctattggctacatcggtgctgacgaacgcacacgaatattttatgtcgccctttcatagcctatttcttatta

SEQ ID NO: 186619 - DNA, 372 bp, Glycine max
  unsure (1)..(372): unsure at all n locations
cgaaanttatttttttgtatgctgcatggatagttggtaattactgtcagtaatgctttcgaatgtataggtgtttgtcatgactcctgcaatattgctgaattgcttgaggcattagctctctttgaaactgatatttgataaagggtttgataatggatgaatgccatcatgctaggggtaaacacccttatgctagcatcatgactgtaagtatataatctctatgattttctagtatctgggttgtgtctttgaatttcttattaattcttatcatcattatatatttgagttgtgacttctttgtaatataactttatacaaatctcagaaagagacagaatatcactaacagaattgaggtgaaga

SEQ ID NO: 186620 - DNA, 473 bp, Glycine max
  unsure (1)..(473): unsure at all n locations
ctaagctntgtagggtttcatgcctgattctagagaagcagttctgtactttttattatctcttaaanntcaacattggtcagttagttaattctgtctttcatattaaggccataaaaaggattaatatagatgacattcgttgttcttatgaaccaatgtggggtgttatgcattcttatgaactaatgtttccagtgtcaaatttcttataattgaaaagcagccaatccactcattctataaatttgtgatagtggtagagaagaatgtttaacaaaacctacatgagatccatattccgcatgaagcatattatagtgctgatttcctggccgagttaaaagtagtctggatgctgaaatggtttggagcatcccgcctccatattgtctttcttttgtngctctttttctcttgtacatttcgcttacttccctacataccacaaaatgaaggatgtataacaaaat

SEQ ID NO: 186621 - DNA, 275 bp, Glycine max
cccttacgcacttgtctctctttcaacattgcttaggaacatcatctccgtgaagaaaatccgagcctgggcgcttacctaacgttggcctgaggtattacgcgaagattctccaccgtgcttcaagactcgtcgctcgatcttcggttacttcatcttcaaccggtgagtacctcagaccaagctctctactacattatatgtacccgcggaggaccgcatgtgcgttcatgtattttaatttactgtgtataccccctttcgacgagcgtaag

SEQ ID NO: 186622 - DNA, 375 bp, Glycine max
ataaatacagaataagcattggttgatacaagtttttttgagggatgatttttggcgctttctttttgtaaaatggtttgggtaccccttgtacccatgttattataaatatgtgtgtattaaaaaaaaaacaaaggttaagtttgcaagatggcaacacaccaaatgcagaagccaagttttggccattatatgttagtatagaactatagattaaaaaaaagtcctcactgaagagttagccctaggaggccttggaacactgctagctcgtgcacccatgccaaagaaggattcaagatcattttcattcttttgttggttcatccttgcagcagctgctgccctttctcgggcctcggcagcagccctttt

SEQ ID NO: 186623 - DNA, 381 bp, Glycine max
tctctatacagctactcgagatggttggattaaaagattgcgcacgaataatggaaaatgggagaattggaagcatatagatagtcatactttgctagtaatcgcaacagcaaaagaaggtggtctcattgcttgtgatacttccaaggtaaaataaactcttgaacacaagaaaaagtgaaactgtttcaatagtagataatgaacatatattatggtttaggatattcaatagcaagaggagcatgcatgcatgctcacatttttacttaaaaatatgacattcattgctatcggttggatcttttacttagaaatatgacattgttattttcaacgatatagatatttttcgtaattttcgtctataatgaatatata

SEQ ID NO: 186624 - DNA, 464 bp, Glycine max
  unsure (1)..(464): unsure at all n locations
atggactttgaatccaaagaccctgaggtacaatatcatccattcacattcacctactttgattntctgccctatatatcaagatcactcttgaatattaaattaaagtgataatccatgttttaatttgtcgaaaattagtcacaagcgaatagatgtttggcatcaatattgataacaaaattaaagctgtaccaaaaaaattaatcggccttttcatctcttaaaagataatattaataatactgatctttcatgggccaaaatggtattttactataaaagaaaaatatatataccgacgatgaggtattattctctttgatcttgggcatttaaaaatctttccaatcagctaactatattttctattataaccaaacattctaacttagtctctaaacttacaatgatgatcaatctagttcttgaaactattaacaatattatatatattaatttct

SEQ ID NO: 186625 - DNA, 366 bp, Glycine max
gaacgatgtaatttgttaattcacctgatagtgaatggtaatctctttacatacaaatattttcagtttgacgaaaaaattaaaattttatagtttatagaaattaaaagattaaatatttttagtttaaaataataaattaaaactttatttttaaataaaataccaaaattaagaattttataaaataaaaagacaaaatgcgcattcaagtggagagattaacattagcttgggtaacagaagagatcgttggctttggttgtatattcctttggatgcttggcggtttggggcacgatgtccatgcgactctgtggctgagggttcctggtttcttatttggtatggatattgtttattgac

SEQ ID NO: 186626 - DNA, 362 bp, Glycine max
  unsure (1)..(362): unsure at all n locations
ttcacttgggtttcgatttccctcgatttggaagcagcaatntggaagcatccaatntggaagcagaaaatcaaagggcttgccttgtcacatntagttaaagctcacacaacggcgattaagcagccatatttctggtcaacaccaagctgtcttaagttcccttcagctactctcttggtctaatttgataggaacctgtctcagaccaagcctataggttaattccatangcccaaaagggcaaatgcgtcctangtgaaaagaaagtagttagagatgagacaatgtgagtgaggtgtctgttatatgggagggggtgaggctctgtaggggtatggatgaattttgaatgtgaattg

SEQ ID NO: 186627 - DNA, 387 bp, Glycine max
  unsure (1)..(387): unsure at all n locations
atacttaaaactttttacttctttctaagaatgtattcgtgtgaattgaacttaagtcatctctccttctcactttctcttctacaagcatggttcttccatatcctccattcttttcatgtaatatgttgcacctccattgcttcttttccgacagcattccattttgccacgaataagacaaaaaaactagttcatgttatgtcaactttgttaagatacaaaacagtcataacaaaaacttccaatgaatattttgataaaattttgacattntcgtcaagggtatttttatcaacaacaaanaagtgagatgggaagttcgaaatcgtcagtatcatgggccatcccaaatatataaacctctataaaactaaacagccatat

SEQ ID NO: 186628 - DNA, 409 bp, Glycine max
  unsure (1)..(409): unsure at all n locations
ctttatctgtggattcgctntggatctgaattgtaccatattgtataacattagtcaccacanaaggaccaatccactttgacctcaacttaccactcatgagtccgagcctagagttatacaataaaactttctatccaaccacgacgtccttcttagatatcaagctgtcatggaacttcttggtcttttccttgtagaatttggaattctcataggcttctaaacggatctcatctagctcacttagttgcaacttcttttcctctccagcctgatcaatagagaagttgcaagtctttacagcccagtaggctctgtgctctatctctacaggaagatgacatgccttgccaaagacaacctgataaggagacattcctatgggtgctttgtaagcagtcctatg

SEQ ID NO: 186629 - DNA, 426 bp, Glycine max
tctattaacagaaaagggacagatgattaccaggacttttgttattgtcttgactctccacaacaatctgaagttcctctcaaatcacaagatagaatctccctctcaaccccttttcttgtttaagcaacatgccttgtttgtctaactaactcagcccctaactaactaagtaactaactctctaattattcaactaactatgggggttacatattaatactctaccccctaaagattcaccttgtccccaaggtgaataacagtggttgctgcaaacaaaggttcatcgggattccaactggttgaagaacaatgatgaagacaacctcacctgcagctcaaaatagccttcaatccacctgggtcaaacacaaacatgtgaatgcccccatgctcctctaatgtgctgtttatgtggcattt

SEQ ID NO: 186630 - DNA, 431 bp, Glycine max
ttttatgcaagcttgtctctacagaagatttattcaaaaataagagtttattcattgtagataattctttgcagtgatcaagaataattatgaaccaatcaatcaagaagtataaattgaaaattgatcccacattctaaaaatggtcatctcagtgcttcaaaaaaatttcccaaaagaaatagaaagtacaaaatcatacataaaagcttagaagcaaagtttgagggttttatcttacttttgatatcctgtgtccacacctttgctggggatgaaccaatttcttcatctccctgagtgttattccaattggcactttctttcttcaaatgaccaagctcgctcaacaaatattcagcattgatgtaatggcattccctccgagtcttccagagaaggagttccacaaacaagaggggttgcttttt

SEQ ID NO: 186631 - DNA, 429 bp, Glycine max
  unsure (1)..(429): unsure at all n locations
tcttgggcattccatttgnggacaacgatgtagaaatggtacaattcataataagggtcataatttcaggaggaaacccaaaatccataagagtgattntcaagacattcaaatccactcaatcataggctttctcaaagtcaactttaaaaataacaaaccccgtcttccctttccttttatgcgtatgatgaacaatnttttagtaaccataaattatcaaaaatgcctctcttagggaagaatctactctaaagatgcccaaacaatttgtcaagatgaagcctaattctattgactaanacctttgagatgggccttaaaaggacattgcanaggcttataggtctgaaatctcaaaaagagaaaggagcatccactttaggaataggaacaatgagagtttctgttagaacatgatcaaaagtt

SEQ ID NO: 186632 - DNA, 430 bp, Glycine max
  unsure (1)..(430): unsure at all n locations
ctaagctctgtttcaattcagcatctcgaatataacgggttgtatntatacatactagttaaaagntattgtcgttggaatttgctcagagctttttgtattcaatttgagcgtctcgatatattacgggacttaatcggacatccgagttaatatttattgtggttngcaattgctatgagcttctgttttgaatttcgagaatctcgatatattacgggattcattcagacatccgagtaaaaagtaattgtcgttttaatttcctcagaagcttatgtttgaatttcgagcgtctcgatatattacgggacttaatcggacatccgagttaatatttattgtnggttgcaattgctatgagcttctgttttcaatttcgagcatctcgatatattacgggattcattcngacatccgagtaaaaagt

SEQ ID NO: 186633 - DNA, 373 bp, Glycine max
  unsure (1)..(373): unsure at all n locations
aaaagaaaagagaaagaaagaccctcaaggtcggcatgttatggtcataggaagcacaaatcattcatagaaagcaaacatatcttttggaaacaagaaactgacgctaagagtttattttccaaaataaccgacataagaatggatggattcgttgaaccaatgaaagaacataatttggaaacgttgggtctacttgcataaatcccaagccttagtatcccaatgccataaactagatgcttgagtacccacctagccgtatgcatgacntaatttgcatgttatttccaaatcatcngtgttacgcgtgcctcgtggagatgatattggaagttaacccaaaaccgacgccctgacagatngaatctgt

SEQ ID NO: 186634 - DNA, 474 bp, Glycine max
  unsure (1)..(474): unsure at all n locations
ctaagcttcacttatgtggcanggcgggcttccttcaccttcttggctccaactttaactntgaccactggtcttccttcccgcgatgcttcttttcacgtccgcctgagtgggcttatagcctaaaccatacttcccacgatttccttgggtatttatcaggctagttatgccgccgttgtttctgcctaaacccatcctgngttcataaccgttccccaacataactcgggccatcattaccgctgcatcggacagacaaggctgcccaaagagggagtccacggaggaaatgctgaccacctcanaagactggagagcagtttctaacgattcttctgcggcttccacataaggcatggaggatgggcagcttaccaagatatcttcctcgcctgacacgatgaccaagtgcccctccactacgaatntcagcttttggtggagtgtagaaggcacaactcccactgagtg

SEQ ID NO: 186635 - DNA, 330 bp, Glycine max
cgctcgcttgccgatctgggattgacagcgcaaaatggccccccatgcagatcaatgctcgagcctgccccgtacatattgcttggatgctggcaattgcagcgtgttcaagtgcatgaggtggggtgaagccataccgctgacccacacgagccagaaactctgcagacggttactcggagataccgacggatcaggcgccctgtacattagagggtccacgtagtgggcagatacccgcaccaggcttgccaatgttacctttcatcaacaacagattgaccaattgctgtacgttctggagtccatgttcgagctgagcgatcccca

SEQ ID NO: 186636 - DNA, 427 bp, Glycine max
  unsure (1)..(427): unsure at all n locations
gcatatagagctacatacatcttggaatagatacatacggacatttgtgggccatttcatacgccttcatggaatggtcaacaatattttatatcattcataaacgattactccagatatgcatacttgtttcttatacatgaaaagtcacaatctctggatgtgttcgaaacatttaaagttgaagttgaaaatcaactcaacaaaagaataaagtgtgtcagatctaaccgtggtggtgaatactatggcagatatgacagttcaggtgaacaacatccagagccttttgtcaggtacctagaggaatgtggaatcgtcccacagtacaccatgccggtgtcacctatcttgaatggcgtagctgaaagatgaaacacaactcttaaggatatggtnagaagcatgaattttcattctaacttac

SEQ ID NO: 186637 - DNA, 427 bp, Glycine max
catgcactgaagcaactggatgcgtggcaatttttgtacccagctggcgctgaatcatttatcgtacctgtcgcaagggtatgtggtttgtgctcctctgctgaccaccatacagacctttgcccttccatgcagcaacctggaacaattgagcagcctgaagcttatgctgcaaatatttacaatagacctcctcaacctcagcagcataatcaaccacagcagagcaattatgacctttccagcaacagatacaaccctggatggaggaatcaccctaacctcagatggtccagccctcagcaacaacaacagcagcctgctccttcctttcaaaatgctgctggcccaagcagaccatacattcctccaccaatccaacaacagcaacaaccccagagacagccataagttgaggcccctccac

SEQ ID NO: 186638 - DNA, 428 bp, Glycine max
  unsure (1)..(428): unsure at all n locations
tatctaacagactcagcctaatgtagatgagaatgactgttttatatagtattaagacaacctctcctaagattgaaagtgctaaagagtttattgggttagtgggagagcgctctcaaaaaactgataagtctctcgctggaacattaatgagtacactgacaccatgaagtttgatggttcacgtactatgcatgagcatgtcattgagatgagaaacattgtagcaagacttaagaccttgggaatgactgtgaatgagaacttccttgttcaatntattctgaactcgttatcgtttgaatatggcccgttccanatgagctataaaaccatgaaagaataatggaatgtgcatggatggcatagtatgttagttcacgaagacataaggcttagaatcaaagaagtcactcagtccattatgt

SEQ ID NO: 186639 - DNA, 421 bp, Glycine max
  unsure (1)..(421): unsure at all n locations
ctttagtagggaatcttttctttctaagatggagccaaacccagttcccctcatttttatctagctcctttcttcctctattgcccttagttgaatacacctttgtttggttctctatttgggtcttaaccctctcatgcaacttctttacaaactctgacctagattccccttctttatgtataaaagaagtgtcaagtgggaggggaatgaggtctaagggtgttaagggattgaacccatanacaacctcaaaaggcgattgcttggtggttctatgaacccccctattgtaggcaaattctacatgaggaagatactcatcccaagacttatggttgccttttagaagagcccttaaaagagtggataaagacctattcactacctctgtttgccccatcagttgtggatgacaact

SEQ ID NO: 186640 - DNA, 445 bp, Glycine max
  unsure (1)..(445): unsure at all n locations
ctaagcttctcgggcctntcctgcnagggcaacatgtggaaagatagttttaccaagaaatgctactcttaaaacanaaatggcgtacaacctccttcaataaacacaaacatcaatgtaaatntagagcaaactcatgcacatactttcttacgagcattcattcgcacaagatattcttctaactaagaaaaaatgcacccatgcacaatcaaggcaccttcgttacctagattatttatatgtacttccaaggtgtatttgctacctacatcacatngcacttccttggctaaattacatacatgcatactcaaagcatcttggctaccaaaaattgcacacgtgcacattctggtatttccaatacctatgtgtcataccctaatttcgtccggggattattacttgatgacatgcaatanatgaagtcccgagacgtctc

SEQ ID NO: 186641 - DNA, 206 bp, Glycine max
  unsure (1)..(206): unsure at all n locations
actctttctctttgagtaaaccctttggcaacaagncttggcttatgccaagcactggtttcccgagagcctatatttgattgaaagacccacctacatccgatggcttgtacacctttagccaactcgacgacatcctagacttggttagatgccatagaatccatttcacctttcatagcattgtaccacaagtttgattcctt

SEQ ID NO: 186642 - DNA, 392 bp, Glycine max
  unsure (1)..(392): unsure at all n locations
gcttctttttgtgggaatatgagtccgatcacacaagatggcatgatcacttgcagccatgntctcaataagctccatggcttcttctggggtcttcaatttaatttttcccccagcagaagcatcaaataactgcttggactgtggccttaacccatctataaaaatgttgaactgaattgngttctgaaatccgtgagtcagtgttttccgcagcaagctatggaatcgttcaagtgcttcgcttagagactcatccagaaactggtgaaatgaaaagatnggtgcttntccttctactggcttagactcggggaaatatttcttcaaacatttctccaccaattcatcccatgtctngagactgttcccttaaatgaatgcaatcatct

SEQ ID NO: 186643 - DNA, 445 bp, Glycine max
  unsure (1)..(445): unsure at all n locations
ctcagcttcgacaaatggcgccgccttcaagctatagtgatcccaatcatgtngaattctatacttcgggccgcacttccaatgaagctgcctttctttatcagctntttgcccgtgaatacgggagcaataactttcccgactgctccaacatgtgccatgaaccgacaagcgtgggtttggcagcgagtatcggtgtaggtaaagggaccgtgttgctggaagactntgagaagtgcgatttagtcatttgcattgggcataaccctggtacaaaccaccctcgcatgctgacttcgttgcgcgctntagtgaaacggggagcgaaaatgatcgccatcaatcctctacaggaacgtggcctggagcgatntaccgcaccgcannaacccgttgaaatgctgacgaactctgagactcagttggccagtgcctactataacgt

SEQ ID NO: 186644 - DNA, 389 bp, Glycine max
tcccttctgactcagaatttttatcatatatttcaacatttaaaccggaggaacaattgtttagaattttcttcttcctccagaagtccttttggaaaataaagctccatgggtatctcagtccatacatccttggaagaaccttcaagatgagcagagcttgaatggtcttatcattcacaagacaaaatggaaagagaatacttcacagtaaaaaagagaaaaggcttaaatatatttgaggtccctaataaatggccgatttttgttttttgtccctaataaaaaaaaatttgttgcatctggatctactgatatattcaaaacattttgttattgaggtccctatcaacacgtaatttatccaatcacttgaatagtctaatcac

SEQ ID NO: 186645 - DNA, 322 bp, Glycine max
  unsure (1)..(322): unsure at all n locations
atcaatcgtaatctgcttgatgtgtgatatttggtcccaacactctccaacttgcggcttgtattttatgcataattcatcacaatctttgattcgcaaatgttcaaaggcagtgaggcgatgcatgccatctggaagagaccgcagctttagacaaaaatcaatattcagttctcttagattagttagcattggcagccaatcaggaagcacctcaagatngatgcagtatgatagatgcaaggatagtaatgtgttaccacatccttgaacccaatgaggtagaatctctagctgtggcattatgacaaatgttacttct

SEQ ID NO: 186646 - DNA, 359 bp, Glycine max
  unsure (1)..(359): unsure at all n locations
aacagtcaatgcttgagagttattttgaagcaaatacatccaagtatatatagagaatgcatcaatgaatattatgtgaaaacaagatcaagaggactagcgtaaacatactgagaagtaaagaaaggaagctggcgtgccttccccatacaacatgattgacaaagcagagaagtagctaaatgattacatggtatactacaataactaagtacagatctaacaactntaagagaggcatgagcaagtcttgaatgccaaagctccaagactgtgaatgaagaatctgttgtagaatggaaagcagaaatgtggttntaatgctgaaggttgggacagacataaagacccttgtaaac

SEQ ID NO: 186647 - DNA, 467 bp, Glycine max
  unsure (1)..(467): unsure at all n locations
tatacaatagttagcattactattcacatagcagaagcatatcttanaggctaactccctaatctgtgaattgtgaggcataagccagaacaaggctagattatatagacccccttgttgtgcagtatgtgattacctctaagttagtgtctgtctagaacttgtgataaaatgcatgtatgtattaattgtctgcttgcatgtgaaaatttggggattgttaggatttcttcttcttgacctttagagtttgtgtttcatatcatttcaccagtctatgatgagaagtgatataaaccctcatgtcctcatcaagaaggcatgtcctcaagaaataagagccgctattgctgaatcatgggatccttcactcccaccttttctcttcataaaaaagagagagaaatattgccaataaagtgatttttcagtgttgaacaataaattagaagaatgaaaccagagag

SEQ ID NO: 186648 - DNA, 416 bp, Glycine max
  unsure (1)..(416): unsure at all n locations
agcttctggtagcgatccttatatgntctttgagtnggcgaataagctgatggaattaagaaacaaggcaattaaggcaaacgattttggagaagcagctaataactttagacgtgctctcgaaatcaggttccgttaattttatcgtaaaatacattctccaattttttgttttaacagttcaatcgtgcgtgattttttttttttactaaaagattctgaattatgttggagaatttatcatttgcgagcatatgttctctctattatgctatccatcgaatgtgtgcatggtgaacttggaaatggtagctaatttgatatttctaaccttcattttgctctatacataatgttttgaaatataatttgaatcaaaacagagtggcgcattatggagaacttgctcctgagtg

SEQ ID NO: 186649 - DNA, 271 bp, Glycine max
aaattacttccaagagagtctttcttttatataaggaaaaggtctctcttgaatcgattccttctctttgagtgaatcctttaacaacaagtcttgccttatgtctatcaatgactccttgtgagactttttttgtgttgaagacccatctacctccgatggcttttacaccatcaggcaactcaacgagatcccaaacttaattagagtccatacaatccatctgatctctcatagcattataccacaaatttgattccttagaactcat

SEQ ID NO: 186650 - DNA, 390 bp, Glycine max
  unsure (1)..(390): unsure at all n locations
tgtgcatccaataccctgatgaggatgtgccatatgttcttaacattggactgattcattngcttccaaaggatcatggccttgctngtgaagacccgcacaaacatatgaaggaatntcatattgtgtgctccaccatgaaacccccagatgtccaacaggatcatatatttctgaaggcttttccttattctttatagggagtggctaaggactggctgtattaccttgctccaaggtccatcacgagctgagatgacctgcagagagcattcttatagaagatatntcttgcttccacgaccacagccatcangaaggatatctcatgtattagacaactcagtggagagagcctgtatgaatactgggagagatttaaaaaactat

SEQ ID NO: 186651 - DNA, 362 bp, Glycine max
  unsure (1)..(362): unsure at all n locations
cctatggggaagtgacatcatggcaaatacgccccagctttccattgtggattcagtcacaaaacaaacttaaatatgttggactatctaacacggcgattttcgattctattcccacacagatgtgggaagcactntctcaggttttgtatttaaacctctctcgtaatcacatccatggtgagattgggactacattaaaaaatccaatatctatccgaactattgatctaagctcaaatcactngtgtggtaaattaccctatctttcaagtgatgtgcatcagttaaatctttcaagcaattcattctctgaatccatgaatgactttttatgtaacgatcaggacaagccaatacta

SEQ ID NO: 186652 - DNA, 377 bp, Glycine max
  unsure (1)..(377): unsure at all n locations
atcctttcaacaaaatatttcatctttggaatntattcttgacattgacttttgagtttcaatggtgtagtactaaatattgcatttatttctaatgtgttcttttgtgcattcagttgaaggaagttcccacaatggtagaaagcaggggacagatgaaacggccacagctaagaatagagaatcttatatcgggaagagaatgttagaaaagttggttgcagttgcagggcttctaatttggctttcatgagcttaactcanatattacctatatattaccactttcatatcacgttgaaatgtacaccattgatgagttgatagtgtaaaaaataattacactctcgagtgtattaaatctctgacagactcac

SEQ ID NO: 186653 - DNA, 299 bp, Glycine max
cattactaaacgaaaaggtatccagtggacgataaattcttcttaaggattttcaagacttagaagaaaggttgaaatccttaaccatgactcttgaaaattcagaagtagaacacaaggaaccccacagacaaatctaatcatggtttcaaaggcaaaaaggttgtgcatggtgaagaagttactatttgttatttctatggaaaggtgggtcatgagactcataaatgcaaggacttctctaaaagggcaacccatcaaagggttcgttcaatgcttaccaacacccatgagctaac

SEQ ID NO: 186654 - DNA, 458 bp, Glycine max
  unsure (1)..(458): unsure at all n locations
tatgtggatgtgatgttctgacaaaggaaaaccaaacacatggcaaggaaagcaccaccatcaagggaatggggatcaacaaacaaacagaggagcagtataggcctttcgaaggactttgactattgtgaaaagcccaagaagagttaaaaagggggaaagagaagaagtgacaagccagggaatatatcaacaaaaaataggatcttgatatgaccttctaagggaccaagagggaaatgttgagctggacatgcaacannaatagtatatggatcggaatggtgagtcaaccaagaggacaatgcggtatagtcttgtaaaaaattctaatccctacatgaagcanaagaaagatggccatggcacaaagaccaacatggngaataacatagttatagcaacaaatagtgggacaggtaatgtcgagaataatatttgaagtaatactagtggat

SEQ ID NO: 186655 - DNA, 330 bp, Glycine max
  unsure (1)..(330): unsure at all n locations
agaagnnagttgacttccgagttgaaatggaatcaatntggtcatgagttctgagcaaaaatgtgagatttctaaatgttctccggaacccgaatttcatgagagttnntgcattttttttttaaattaacttggtcatcatcagttatcacaaatttctttcattgcatcaatcttaactatccatgcttttactgatgtgtttgttcattagtcattaccacataaggttcatgaatgactttatctttggaattcactgaaacagcagcttgagctccacttttggtggcatctttgtgttgtcctgaagaaattgctatatatgct

SEQ ID NO: 186656 - DNA, 399 bp, Glycine max
agaaaacttatcatccaaccagaaattggtttggttttatttaaacaaagtaagtaaaaaaaaatatcacaaactaaaatatgacacttcttatatatttgtcatttagggcataaataagcgttttacagatgtgcatatatacttgacacacttattcaaagtaaatagatataggagcatatatatatatatatatatttctgttagtatcaattagttgaaactaagttggtatttaggtgatttatcaggattgaagagaccaaaatgacgctcagtttcagcaccttgcttctggtgttcgtcaacatggcgaacaagtaagtctctatagactcaccaggcctctttggagtttcattcccactcgacgcatgacgaatcaaattagcatag

SEQ ID NO: 186657 - DNA, 461 bp, Glycine max
  unsure (1)..(461): unsure at all n locations
ctctattcaactgatagaagcatcttctagatggttcttttcttctgtcactgcattcaaagaatcttctaattcctttcctctttcattagccgcttgcagagtagtttcgagggttgaggctcgtgctcgaattgcctcaagttctgatgtcagattagatacatcatcaaggtatttattggcttgcccttctgaagcaccacgcttctcttctagtgtgcttatntnngtgtctagttcctgaattctgtatttctctgcttcaagtaacaactccaactcactcacctttntatcagaatcttccaatntggagtgagagctctggattaaatcttccagttcttcgctacgctcatggttcatactggctcggtcttcgtgctcggcacattnttcgttgacattcttcaactcctcttctaattgtgaactccgcanagatgactgatttaagt

SEQ ID NO: 186658 - DNA, 364 bp, Glycine max
  unsure (1)..(364): unsure at all n locations
cacaaaccacaaacccttgcgacaggtacagatttctgattcaaggccagctgggttaccaagttgaccaacgcatccagtttgccttcaagcttcttagttntagatgatgcaaatgggtttgtagctacctcatgcactcctctaatgactatggcatcatttctggcgctaaactgctgggagttggaggccatcttctcaattaaatttctggcttcagcatgagtcatgtctccaagggctccaccactggcagcatctatcatacttctctccatattactgagtccttcataaaaatattggagaaattgttctgaaatctgatggtgggggcaactggcacatagtttcttaaatc

SEQ ID NO: 186659 - DNA, 417 bp, Glycine max
  unsure (1)..(417): unsure at all n locations
ctaagcttacnattcaataatctacaaatacaaaagatagaaagatagactgagagtntatnnatgatgaacaagctctgaatcagtgaacaacagagccaaaacacacgatatcaatgttgattcaatcatcaaactttcttgtaacccttttaacaagtgcatgcgtaagtaactaggttcaatcatatatatatatatatatatatatatatatatatatatatatcactccttgatggagcactcatatagcaaaaactaaaaagacatcagatcaagaatttattctataagataagagaccctagtaanacaaaaataaagtttaaaatttgactnttagcgatccctttgaaacaccggacgatcaagctaactaaaacctcataaatttaaaacacttttaaaaaaaaa

SEQ ID NO: 186660 - DNA, 348 bp, Glycine max
aatttgtcttcaatgaaaatctttcacaaacaatttgggaatcaacaacaatcaaagcttaaccattcatggcagaagctaaaagaatacttaaccactatgaacatatgcttaaaatcatcaaatcaagcctaaaaggctgaaaacaataagtcaaagtcttcaaaatcttcaaaagcatctaatcaaacaccttgtcaacaaaaactggcgtcgtgtctgagagcgtgactcccagaagcttgcgagcactttctcaagacacatagttaattggaaaattgcacgaccaagctctgataaaaaaaaacacacacacactatagagagagaaaagaaagaataatg

SEQ ID NO: 186661 - DNA, 396 bp, Glycine max
  unsure (1)..(396): unsure at all n locations
atttaccttgcttatgctgaacgcatangatntcttttcgttttctaactcatccttgctggcagaatcatgaatttcattatatttaaaactgtcataaaactccccattgtcactactttggtcagtataccctccattggtgagtggaaaaatataaaggtaacgcctccatttggcagagaaattaggatgaaagacacgtgacacctacaataagtcacaccttatcagattaactattttgcgaagtgtgaagatcaaagaactcaattctgcaagccactattttattttcgttctcttatttctttggattcaaggcaattgataattctattgaatattagcttcacatcgcagattacttaaggatattacctcagaaactgatat

SEQ ID NO: 186662 - DNA, 401 bp, Glycine max
  unsure (1)..(401): unsure at all n locations
tctccagaccgggagccatgctaagcaccttgtttccatgatcatggtcatacaaatcccttttctcagttgggtggcccataccagccggatcacgaccaacaatatagaaatttgcacctgcatttatccgtgcctttgcatgccactgtacttcagttggaccagcataatgcataggtgatggaaatatggcaactatggtagtctcaggatcaagaactccatcttctaggacctaagaagaagcaaagaactttataggataaaattccatggattgtgcaattacaaaatgagtagaatactgaaatngaatgacagttcaatcactttttgaggtcatctttgaacatatattgttgtagcacatgcacattatgattaccctatngtttttg

SEQ ID NO: 186663 - DNA, 363 bp, Glycine max
atgtcaatccctacccttggaagccaaaagaatagaagggaaatttccaattcaagaaaaggaaagaaggaagatttccaatcaaagagaatgcaaaaacgaaaagaggaaaattcccaatccaagagtgggagaaagcaaaaaagataagaaagaaaattcccaatcaaagaatgggagaaagtaaaaaaggaagaagaagaaggaaagaaagctcctgatcagggatcgaaagaaaacagaagaaatgtgcagaaaggtctttggaccggacaatatctgaataatacagaattgtcaccaaatgaacaaaaagaaggaaaggaaaccacgaccttacggttatccgcacctctttgtcat

SEQ ID NO: 186664 - DNA, 367 bp, Glycine max
  unsure (1)..(367): unsure at all n locations
actcagcttgccttanggctnngacgtcatcactagcttgcgaagctgtattctcattggctctcacagtctttagaattgggagccaatccaatccttgtgtccggactctcagccacttatgatagccgccgatgatcccattactgcttcccctaagctctctgtcctttcttcacgccgcatcccatgccttgcgaactccttggagtaccctagcattgtggtcactgaaacctcgtgcgatgaaaggcgtgatgctttcgtctgatggtactcctctcatgggacatccttcgcatgaagatagaatcctgattcttcctccttctagcgagggaaccatttaacagacgcccctccatgc

SEQ ID NO: 186665 - DNA, 363 bp, Glycine max
tgaaattatagttgcttaattggttattgaatggtgataatgtaaaagtattcagtttttttaaaattatggtttagggtttttaaaagcattcagtgtttttcaaaattatgataaaattttaaaaatatatgaataattattttcattttttaatatttgttttaaagaaattagtaaattccagacaacgtaaaacagaaaagaactgttgaaagggcacatatttataaacctttttttaaaaatcatttttttataatgttaaaatcaacacgtaaaaattaatttatcaccatttattttttaaaagtaatcattatgattctaaaaaatcctctattccgataaaaaaaataaaaa

SEQ ID NO: 186666 - DNA, 293 bp, Glycine max
tctatagaagggtcgttcctaatttctctacaatggcatctcctctcaatgagctggtgaagaagaatgtggcatttacctcgggtgaaaaacaagagcaagcctttgctttgctcaaagaaaagcttactaaggcacctgttctaactcttcctgacttttctaaaacttttgagctataatgtgatgcctctggagtgggagttggagctgtattgttacaaggtgggcaccctattgcttattttagtgaaaaacttcatagtgccaccctcaactaccccacctatgat

SEQ ID NO: 186667 - DNA, 369 bp, Glycine max
  unsure (1)..(369): unsure at all n locations
aattgggggagtgtgctcaaatatacggggcaattttgatttgttttcttgcttgattaggttgaattaggggtttgtatgagatggccctaggcctataatgcattttgaagtaatggggcatgccacattgtccccgttctcttgctattgacgcctaaacgcgcgcccaccaagtgttcggtgaaatgcctcaatggcattagcgcgtgatttttgtagggaaacaacccatggngcgatttggtttgcacatatttttgggacatgcattcattttcgaaagagctagagtaattgccccacatatgtcctaggcctaggaaccaaagtttttatgcaaaagtacacaaaaggaggtgcatattg

SEQ ID NO: 186668 - DNA, 426 bp, Glycine max
  unsure (1)..(426): unsure at all n locations
tactcagcttctcctatttgctataatagggggagaagtgaagaagaatttgttcagccccttaggcacttctctctctctcgaatntgctgaggaaaattgtttccgtgaagaanatccaagccgaggcacttccgtaacgtttccgtgagtaattacgcgaagattctcgaccattcttcaagattcatcgttcgttcttcgttttcttcagtcttcaacgggtaagtacctcanaccaagctntntaattcattctatgtacccgtggtggtccacattntgtttcatgtnattttattcttggtttcatttgctntttatacccccttttgacgtgcttaagccatttatttaagtcatttctcgcttaatctaanaataaaataaaataaatntccaccgatcgttngaattgtatcattc

SEQ ID NO: 186669 - DNA, 371 bp, Glycine max
ttgaagcagaaccactcgatcaaccacaatagcaatcctccgctgttctgcaagccattttccactcaccttaccagctaaacaagatatcaaaaacctccacaaacaatgtataacatcatcatatcctcatgttagagaaataacataaaatgcacaaatcagtcaactaaaaatacatagtcttgaatctaataaccaaataactctcatggatataatatgaatcaacaatgtattatatcatacaataagcgccacacaaaacatatattatggggagaaataattaactgcggttgaagcatgccaatcttattctcagagaaaatatgccacactgacctcaattgaccgtcctttccgaccac

SEQ ID NO: 186670 - DNA, 341 bp, Glycine max
  unsure (1)..(341): unsure at all n locations
atatgggtggtatttatttaaaattataaagggtattttcgctctcctttgctctctgccctttctctcatttaaaaaatatatattgaattagatttatttgcaatatatatttgatgcctcttcaaataataatatatttgagtaagaaacaatggggtggggatgggtttatggtttcccatccttatatccgattctccaagggcatcctcatccttgtcttcgataggtatgaaatctctttcccattccaatttctgatggggatcgggtataccctccncaatctatccccacccaataattttaaaaaatatatattttctacaaaaaaatca

SEQ ID NO: 186671 - DNA, 467 bp, Glycine max
  unsure (1)..(467): unsure at all n locations
gcctccaccttctactagccactgttgaagccttatttacaagtttatatataaataagtgaaacaaagctattttgggtaaagcatgattcatgcctnttgaaacaccttcaatacaacaatccctcacatattacaaaaggaaaaagaataacattttaagacacacttcgagcatctatgaaatcaaaagactcattttgcacgggatggtctaaagctaaaacaacaccttgaagctctagagcatttcttaggaataactctngaagaanaggttgtatntccttaaatgcatggttcttttattatctcatttcccccctccttcatcatgtgtttaaaccttgtacatatatgtttgataagaaaatagagattgtaagccttacccttaaccaattcttagtgatcttggttgaagctcgaagagaacttgtagaaaagaacactttggttgttttctt

SEQ ID NO: 186672 - DNA, 466 bp, Glycine max
  unsure (1)..(466): unsure at all n locations
tctaactntatacaagaatgaagctcggataacactcgatagacatgttgtctcagatatcttaagaggggggtngaattaagatattgcaaactatttcaccaattaaaattctatttcaatttcaatgcaagttacaagttcctttaaaaatgaactcttaaataatgattcaaatagaacaatctgaatataaatgtaaagcaataataaataaacgagtttaagggaagagaaagtgcaaactcagatttatacaggttcggccacacccttgtgcctatgtccagtccccaagcaacccgcctgagagtttcactatctttgtaaatccttttacaagttctgaacacacaaggacagtccttcctttgtgttcagatttctttacaacaagagaccctcggtctctcaatctctcttgaaagaaatagaattgtcaatctgagcacttaattaattccta

SEQ ID NO: 186673 - DNA, 433 bp, Glycine max
  unsure (1)..(433): unsure at all n locations
ggatgtgactcttcacttttaaatttgaattccaacgctcaaatacactggtaatcgattaccaaatcattggaatcgattaacaacaattngaaatcaattggaacgttgtaaattcagttgaaagctttntgaaaaccattttgctactggtaatcgattacaataatctggtaatcgattaccagagaataaaaactctttggtaaaatggttttgagaaaaattcatgtgctactcagtttttgaaaaaactttttaatacttatcttgattgagtcttctcttgattcttgaatcttgagtctcgaatcttgatcttgattcttggaacttgaatcttgaaacttgattcttgattcttgaaatcaaatttccttttgaaccttgaagtgttcttgattcaatcttgaacacattctttgattcttga

SEQ ID NO: 186674 - DNA, 338 bp, Glycine max
  unsure (1)..(338): unsure at all n locations
tatctatatacaattggttgttgcttgcttgaatcttgatttcaggtattgtattgtcatcataaaaaagggggagattgtagatgcaattggctttgatgttttgatgatgatcatgatgatgtgttgcaattgatgcaaatgggctnttcaagattaaaattcaagacaatacttcaagattacaaggcacaacatcaagatgatcactagaatattatgaagggaatttcctaattgaatagcaaaggtttggccaagtgaattaaaataaaaagtggttttcatagggtttactctctgngtatcgataccagaggatgtaatcgattaccagt

SEQ ID NO: 186675 - DNA, 426 bp, Glycine max
gatcttaagtcacctgtggtctgcatgcttgattctacaaatttgaggacaaatccttttatgggggagggcatgatgcaattctagcccctcttggcattggatagaagactccaagaagattatgccagagatgcaagagaaggccctaaggttctcatgagctgtagggtagattttgggaccatggactaagtatgagcccacttatctttgtacatattagattagggtttcattatttttggacctcgtatttagggctccacagtgtagggagggtaccctagtaatgtaggatttttcagcccttgtattttagggcacctacactaagttttgtattaggggtagttttgtaatttcacatgaattaagtgcactatttgatgtgtgtgttgggagagaaattaatcgaattgggag

SEQ ID NO: 186676 - DNA, 475 bp, Glycine max
  unsure (1)..(475): unsure at all n locations
agtctntgtatgactngaaacagtcacctagagcatgtgtttagagtattgcccagcttattaagaagctgggatactctcggtgtcagagtgatcacaccatgtttgtgaaacactcttctaaaggaaagatggctgtattgattgactatgtggatgatattgtaattgccggggatgattatagagaaataaataatttgaaggcatctcttgtgggtgaatttagattaaagacctcggatccnnctaaatatttttgggaatggaggttgcaagatcaaaaaaggagattgtgtgtctcaacagaagtatattctggacctactcaaagaaactgggatgatgagttgtaggcaagcaaatactccaatagacctcaaccaaaaacttcagagtgaaggcaaaggaggcccaatagacacaatcccatattaaagattagtggggaggtgtaattatctatcccataccc

SEQ ID NO: 186677 - DNA, 309 bp, Glycine max
  unsure (1)..(309): unsure at all n locations
catgcgtgccaaacttttcgataattatctccatccttagccagctttaaacaaaacaaaagtgtaaattcactctgctgaaacattatccttcctataaacttagtttattagcaacactaatgggggggctctcactccttagctaggaactctatatcgacccttctctgatccccatatatctccggaaataccttactgaatncaagatatcatcgcagtggagttgatatgatcttgctgctcctgcaataaagaataataatttcatttaactagtattttacttctaatgctaagataaat

SEQ ID NO: 186678 - DNA, 310 bp, Glycine max
attgcgtgtgtcttcctctctgaatctgatgaacacatctatggatgcatgggaacgtgttgtctcagcctctattataatataaaagtttatcatgataatggctgatatgctaggagtgtagaatcattactgtaccatagaataatgagaaagaaaacacttatttgcattctttgaaggtgtacaggtgaatataagggacaaaataattttatagaataggagaatattatttctcctacctgagatatgtgtgtggtcctcacgtgaatattttctccttcacctctttataaatgcgggattg

SEQ ID NO: 186679 - DNA, 424 bp, Glycine max
  unsure (1)..(424): unsure at all n locations
gcttggagatgatgcttcagatggaggatatttatganggagagaaatagaaaggggggagcacgaaattgaagggagaaaagagggagagaagcggaactttgagttgtgtctcacaagactttcattcatcacagttacaacaagtgttgacatgcttctatttatagactaggtagcttccttgagaagctttcttgagaaaacttccttgagaagcttctttgagaaaacttccttgagaagctagagcttagatacacacacccctctcataactaagctcacctccttgagaagcttccttaagaagattcctaaagaagctacagcttagctagacatacctctctaatagctaagctcacctccttgagatgagaagctagagcttagctacacaccccctagaatagctaagctg

SEQ ID NO: 186680 - DNA, 459 bp, Glycine max
  unsure (1)..(459): unsure at all n locations
gggagcaccaaatcgaaggaagaaaaatggagagaagttgaactttgagctgtgtctcacaagactctcattcatcaaagttacaacaagtgttacacatgcttctatttatagactatgtagcttccttgagaagctttcttaagaaaacttccttgagaagcgtctttgagaaaacttccttgagaagctagagcttagctacacacacccatctgaaaactaagcttacctccttgagaagctttcttgagaagctataacttagctacacacacccatctaataactaagctcacctccttgacaaaatacatgaaaatacaaaacaaaaagtccctactacaaaaactactctaaatgttctgaaatacaacgcctaaaccctattctactataatgaccaanatacaagggccaaaagaaggaaaacctattctaatatttcaaagaagagtg

SEQ ID NO: 186681 - DNA, 349 bp, Glycine max
  unsure (1)..(349): unsure at all n locations
gcatgcacgagagtctggccttggcttgaagctttngcatgtgtaggaagttctagagagagaaaggtccaagttccagagagttctgagagaatttgctgtgtgaagatctgtagagacaagagctcgaagcggaagactntctgagagcttgagatgagtttgtgagtgattgtgagatcctagaggtgaaggagacatcctcaccacttgtatntttgcaatctttcatcttgttcttctctgtgtngtaaaggagggtttcggactatggaaagctaaatcctctgttggatcttncctgtaggtacttgatgtanatatatttttatctatttaatgatgtttt

SEQ ID NO: 186682 - DNA, 335 bp, Glycine max
ttgtcctatgcatacgggtggcattgggatgaaaagaattcctatcaaaaaagttaatgtatcaaccagaacttcatgattgtcaggcaagttcctgatcgaatgaacaagacacctaatatatggtttcaccagaaaaaagaagccaaaatagaggggcaatgttaacatgctatattcaatgcaatcattagcatgagtagatctaggatattcttttgcaggactcatttcataatattttcatagaaccaatttagcagtttcactaaccttcgcacacaaatggcgagcctgatcccaaactatatcatggtatggtactgtataaagct

SEQ ID NO: 186683 - DNA, 353 bp, Glycine max
  unsure (1)..(353): unsure at all n locations
cacccttctttcctttggaatggtcttcccagtcacaagggccaatcagaatctgaaatcaaaccaaaacaaaccagttttttggaaagctccattttgtaaatagaggcacagcttcatttntaaagtaactcttcaaaaattataattaattctggtcaaaaattataaggatatacaatgtgaatttaacatgatttatttcatatttaaggtcaagaattgaattcttacactatttgattaanagatacaatatcactttctttaattattnttatacatttaatccctgatattatatgtactgatttaacctttcactatattaaagatttacttaagtcttcaat

SEQ ID NO: 186684 - DNA, 358 bp, Glycine max
  unsure (1)..(358): unsure at all n locations
tttctcgatgtatctccctttattgttgtcatattggttctttgatgcagaattaacatataagactatattgttggaagcattggtgggtgagtgagtgatgaaaatttccctttgagcttcttcttgaaggattagggagaaaacattaccaattgaaggcaaaggattagagagaagaatcggacctcggatttgagagaaagaatcattcaagcccataaaaaatgacattacatactcagatntcgtgtgagtgtggagttgttgaatacctccgcaagtgcatgggaaagttggtttgtaaccgaccaatttttctcaaattgacttaagttttgtgtaatacgtgctgata

SEQ ID NO: 186685 - DNA, 419 bp, Glycine max
  unsure (1)..(419): unsure at all n locations
nagctgtgaagacataagttacgaacctacgtgttatcattcaaattctttctttaaaacgttctctataaatatttgtatgggtggaaaaagctctcaaaacacctttaacactttgagagaaaagacaaagtgttgagattgtatatctatctattagacgattaagagttagtcattatgcaaacaaacaaatatgttgatttgtatagagccatagtggcttagtagaaaaaagaatattgagttgtatcaagcatataattatagagccagaagcaacagtggttaatacttataactngttgaaattagtgaaacttggtggtttatcaagaactggatgtagtctcggtggttgagacaaatcagtataaactctttgtgtctatntatattcttgctctcctatcttttaa

SEQ ID NO: 186686 - DNA, 418 bp, Glycine max
  unsure (1)..(418): unsure at all n locations
tatctntatggatctaaatgtgacgtgtntagtgtctcataagagccttatatancctgttgataagagagaacttaacatgagacagacgagatggttatagttccttaagggttacgaatttgagcttagctatcacccaggtaaagccaacgtagtagttgataccttcaataagaaatccctttacgtgtttgctttgatggttaaagagttagatatcttatagtgatttagagacatgagtttagcatgtgagatcacctttggtagcattaagatgggtatgttgatagtcactagtgagctcttgagcgagatccaggagggtagaagtctgacccattcttgttagcccagttagagtctatagctatatggagagagagtagttttagagtgtgacttgatggagtct

SEQ ID NO: 186687 - DNA, 428 bp, Glycine max
  unsure (1)..(428): unsure at all n locations
ttgcatgcaagctttaactgaaacactatttaagtngccttttatatgcatgctggacaaccttcaccctcttctaatttgcagggtgcagattgtgttatatatgtggagcacatgattatggttgctgcattcccatagaagatacatcacatgtagtgaactatatggggaaccaaccaagaacaacctttaatgcatgtggatattctggatttcaacatggccaacaatataatcagcaacagggatagtggagaactcaccctggtaattagttcaataaagatcggggtgggccatctaacaggccacagcaacatgggcctagtctctatgacagaatgacaaagctggaagagactcttgctcagttcaggcaagtatctatatccaatcaaaagagcacaaagtcagccatcaagaat

SEQ ID NO: 186688 - DNA, 377 bp, Glycine max
  unsure (1)..(377): unsure at all n locations
gctccaaatgtatttcaagattcaatggtgatcgcctagtaaatgtgagctacattcaaattgggaaatatctatnggttataatgatgaaaggaaaaactctaaacaagatcctttattgttagtttcatatctactgcgtgtgtctatatgtattcgattgttagtaagaagttgttctaaatatattaatgttgaacaagatgcacaaggtggtctcacaggaagagaaattctaatggaattcttctaggggatgtcttgttctttaattaggccattatgttgttttatgactttggtttcagattggcaagactcttgtgaggatgttactatactgctttctcatttttttaacagcaaggaagaaatga

SEQ ID NO: 186689 - DNA, 414 bp, Glycine max
ttggcaacatgcaaaaaccatagaactcgggaatcaacacagatataataatggagtagaacgatttaaatatcagagtataaaacacaataatccaaactcacaaacaagatataatcaaaccagaatccaaataacttaaaatgtcaacaaccacaaaatatccaagactgaaaattaaaaaaccacaagataaataagctaagtacttagcataataatgtaaactctaagaaactaaaagccaaaatacatggcttatagaagacatataatcagaaactaaaatctaagaagacggaggtggtggtggaagatcgaaactctgacgaatgtatccaacatcctctttaagctgtgtaaggcgaatgtccataccggcaaagcgtgaatctaacgaatcgaagcggtcac

SEQ ID NO: 186690 - DNA, 457 bp, Glycine max
  unsure (1)..(457): unsure at all n locations
ctaagctttctccttcacgngctttcttcttcttgttctcaccattgttgccttcatngaagctccaaattcctcttcctttctaccccaaattgcgaggaaaagcccttttcggagtcttggagcatacctctacttcgtggggctttaaatttcacgtaagggtggacttcttctcacttgaaatctgtgagtgttgggtttttgggagctatgatgggtagatctactacgttattgccttagggtagttatttgtgaaagaatttgttgaaatcatgctaaacttgacatgtttgatgtgagcaaaactacccatgctgatttannggtttataatgatcctttcttatatatgtatgcttaaaatattgatagaaaactggtagagatgatggggagagttaacttatgcgtaaatgtgagaatggtagtgttgtgagtggaaaagtgtgag

SEQ ID NO: 186691 - DNA, 448 bp, Glycine max
  unsure (1)..(448): unsure at all n locations
gcttcttatccaagacactcattcncttgtttttgaagcttcttctgtgcatggttattccctagnggatggngcctcttcgcacctcttctcctttatcttctgttgcaactccacggttaaaaatcaccattgaaagacctcattgaagctcaaagatccagtctccataaaagcttctcaagcaagtttccatcaagtggtatcagagcacaagagcttcaagtaggtgctccttaaaccttcattaattttcagctntactttttcctccattgttgtttcttcatttttgttctccatgtatttcctcacatgtcttgtgttgaatgttgttaacatgattctttaaaatttccatagattaaacttgctatagaagctagatttgattttctatggttcaatnttcttgttctcntcttgaaccatgaattgtgttgagttt

SEQ ID NO: 186692 - DNA, 390 bp, Glycine max
  unsure (1)..(390): unsure at all n locations
caacttaccgggagatactataatatgctatagntacataataatatcaattacatataactgtgttgtattgtaactaatcagtcatgcttagttacctcaacgcccttcttctcaagactgctgtgtaactcttgaaaggcttggatgccacttgtgtctatgtcggttaacggctgctacaaattatgacgaaacaattaataataataataatttaaaagctgaatgatacgttctactgcaggagttgtatgttaacaaaggacaaacatacagagtctcacgtgacatttcgactatgataaactggattattgtgcggcagnctcctttttcttgttcttcttcgtccatgaaccatcttaatgtcctgcaagagaatagttc

SEQ ID NO: 186693 - DNA, 195 bp, Glycine max
  unsure (1)..(195): unsure at all n locations
tgactacataatgacttgaatgaaatgctatgatcttttccaaagtcacatcatatgttcgtctggcttgactctaacagtactcgtgactttatggcctngatatgccacaaggggtagaaacattgcattaggaagaaggagtgcatcgcatatatacttaactctactctatgatgatgatgatgaggatat

SEQ ID NO: 186694 - DNA, 354 bp, Glycine max
tccacatggaatatagcgaatctttcatctttttcaactgaaatacaactgaacaaatcagtataagcgcataacctcatgttctttaagcttatttcattattgtaataacgccgtccacaaatatggggcgccaacgttgtcgggatgtcaactatattgtgggggtggcacgtgccaacgtttgtaggatgtctatcaccaaccatacaatatgccctttatgcttacttaccttatagcatttttcattatcgacaatttaaacaaaatgaggtatgtagaaatattatttggtatccactcggatttaagcacccttaatctggttggcattgacttgtgttataacca

SEQ ID NO: 186695 - DNA, 209 bp, Glycine max
  unsure (1)..(209): unsure at all n locations
gatnaatattaagaataagaacttttactaaatgttaagcaaagagaaacatacatcttaaagaaaaatgacaagaaagggcttgacttcagccgcaacattcaggtttttagaagctctgtggccgaattatgactgcatcaaccgcatttataatgcaacaaaaccaccactgcgaccgtaattaagaccttaattgcattggcatg

SEQ ID NO: 186696 - DNA, 370 bp, Glycine max
tccatgggctatatttgatattacagttgatcatgtgtatggacaggtaacagatgatcatgccatattgtcattacaatataatagcatggaagaaaaaaaacatttaatctattaaactcaaacaaacaaacatgccttggatatgttgaatatttgtaatcgatagttactccaataatttgtcaattcattgtattgatgcatctctagtttgaattgaaatgaagtgacaaccttctagcgacatgccaattatactgttagtaggcatataattatttacatttccaatttctgttgtaaagaaacttcaaatctaatatggtttagatgtgctaaaatcttctattgtttgtttttcctggtc

SEQ ID NO: 186697 - DNA, 306 bp, Glycine max
  unsure (1)..(306): unsure at all n locations
atagccttccaattactagggatatagtactgggccacatntgacaagtgctccataatattgaagtaagcggacctaacaaaagaacactttatccctactcaacttccaaaacatcctatcatcttctatatctttgcaaataggaaattgcataaaggactatatatctctatcttgcatgtaagtaataacaagatcaaagtcccatcctcctctatcgtgggggaacaaaccagcaacacataagtcatgcataccataaaggtggaagactatagacaagaattatcgacactcttcaac

SEQ ID NO: 186698 - DNA, 307 bp, Glycine max
  unsure (1)..(307): unsure at all n locations
tgaaatgaagacgcaattcacccattgtataacatacttggccatgcatgtttttaagcatacactgtccgagatgatgaccggtgttatgaagcattgggaatatttatatcctaaaaagtagtccaactccttcactactcttgcaagataaaggcgagctatttttccatgtatattattatcattatgccaagtgcaaaacactcaagccaaacacccaaatacttcttataaaanattttcaagttcacaactcatgaatggaagtgaaaattttgaagtgagagattgcaaacacttactg

SEQ ID NO: 186699 - DNA, 220 bp, Glycine max
gaaactctaaactacaatccgaatcaagcttccgcgaggggtcgggtccctttcttccgtttttctgtgtcgcgtgactttcacgggacccacggggaaaagtgttgggagggaatgaccggcaataatatgggctcagagatttcctaaataaccaaaacgacatgcacacttggatacgctaccatcaccgcatcacatgggaacctacgcgtctcat

SEQ ID NO: 186700 - DNA, 303 bp, Glycine max
gagtcttttgctttctttcatatcaagaatcatttgaagtacaagttttcctaagatatgatcaggcttccaccctaatgtggacttatcatttactaaaagaataggattccgacaagagaaattacaccatatacatcttgtgaacacccaattttgcgaatataataaaaaagatctattaaaaataaaagagtttaggaaaaatgagatttcgtattaataataaaaaaataatttataataaataatgattaagaaaaaatatatatgtctataaaaaaagaaattaatattcttgat

SEQ ID NO: 186701 - DNA, 382 bp, Glycine max
gatagtttatattactcttctaatgtagtcgacaactaaaaaaaatataacagacagtaatgcttaagccattcaaatcaaggcattttgaatctcatcattactatcatgcatctcaaagagaatgagaatcaggcatcgtaatgcatagcacaacaaaacattaaaagaaaacatgtcttctaaagccaaccaaggtaaaaatgtatttatatttgcgaactttcttcaaatataacacatatataaaaacatggtggaacaatctgaccacatgcacaacacattccacacattatttctgaaaatgagtgggaagggaatataataaggcattgttattaaaactggacgtgcactaagataacaagggtgtcatgac

SEQ ID NO: 186702 - DNA, 324 bp, Glycine max
  unsure (1)..(324): unsure at all n locations
acaataaaattatttaataagtagttattaaataacgtagtaataattaaagtagtttatttggtattggctaaacgttaagacaccaaatttcaactttcacatgttcctattttcggtacctacactatggtattatttatttatttattatgttattgacatggagtattgattaattttgttgctaattgattttgattganaaatttaactgaatatnntaatgtggtttttttttcttcacttatgtgttttatcctcaaatttacataaaattttattaaagataataatattacgcctttggcacatgctcttact

SEQ ID NO: 186703 - DNA, 386 bp, Glycine max
  unsure (1)..(386): unsure at all n locations
tcttccatggcttattccctaatggatggtgcctcccctctcctcttctcctttgccttctgtngcatctccatggtggaaaatcaccattgaaggacctcaatgaagctcaaagatccagcctccatagaagctccacaagcaagcttccatcaagtggtatcaaagcacaagagcttcaagaaggtgctccttaaacctctattaattttttgctttaccttctcttccattggtgtttcatcatttttctccatgtatctcctcacatgtcttgtgctaaatgtttataacatgattctttagagtttccaccaattaaacttgctatagaagctagaattgattntctatggttcaaatttcttgttcttattcttgaatca

SEQ ID NO: 186704 - DNA, 404 bp, Glycine max
  unsure (1)..(404): unsure at all n locations
ggaagctagagcatcacacacaagccccactaatcgccatanacaaacacctaactccttaagaaactatattagctatacgagttcacacattgcaactgccattgcttgatgtcagcttcttctttcccaagatatcagattaactccaaaatgaaagcagtatcttgaggaagaatgcctaaaggagaacctgccgccggatcagcatcgtcatagtcatagagtaaccatcttcctatagctcttttatgtatctaagacctgaacagtggcatcctagtacgagtcacatgtaggatgaaagaattgactcaacaatgtcacatcaaaagaaatatttgacctagttattgggagaaagttcagttacccaatcattcttcaatattatttangatctg

SEQ ID NO: 186705 - DNA, 334 bp, Glycine max
  unsure (1)..(334): unsure at all n locations
gagctatcctaagcgcttcccatctcttgtgtagatatcttgtgctattacaatgagacaattgtataaccatgagtctttaggtgtaaatgagggataacgagcccactcctactntcccaacttcagagcgcttctcaccaaaggctcctatttgatgtgcaagactacatgatacgaccaactgtttcctcctctacatcacataatgggcatctataacatagtatagccacctgcctccttctcaagttacccttagatggcaatctgattatgaagagtctcccagagaatgcacttgctcttggaggcaatttcaccgttcacatac

SEQ ID NO: 186706 - DNA, 371 bp, Glycine max
  unsure (1)..(371): unsure at all n locations
ctaatatatacactganaaatcttaaagaacaaacgtatatcgtattttttaataaaaaggtctaatttttacacaatggatagatttaaaaaaatgcatttcaaccaccataattttttttcataaattaccaaaatggttgataaaaaagtaatttgtagtagtcttttaaccaccacatttaacanaaaaatctaacaaatgaaataatcttttgaagcacgattttggcaaaaatacatctacatgaatgagatttaaaatacgtctgctctttaatatttctaaatctacccatcttgattatttacagaaaaaattgcaccattttaataccaaattgaacatatttcatttctttgagggaatt

SEQ ID NO: 186707 - DNA, 182 bp, Glycine max
  unsure (1)..(182): unsure at all n locations
acactattaatctcagcttctagccaatgaaccacctagaatgaaggccgttgttttctttctgagcctatgttccccttcctttggtttgaagctcattacaagccttaagtganaaaccatgatatcaccttacccttaagaaaatttagagctctggaattcttttgggaataagtgtg

SEQ ID NO: 186708 - DNA, 377 bp, Glycine max
  unsure (1)..(377): unsure at all n locations
agctttagcataaccatattttctacagcnaattccttaggaagtctcttctcatcaacatatttcttcatcagctgctgagctctttgtaaataacacttcaacttagctaaagtagcatctctaagcatgagctgatcttgcactgaagttgaatcttgcaaattaggagtgtatctcagtagttgaggaggttctctaccatataccacctgaaaaggagtcataccaatactagtatgataagttgtgttgtaccaatattttgcccatggtagtaacttataccactcctcagggctatcaaatatgaagcatctaagatacatttcgaggcatttattgacagcttctgattgaccatctgactgtggatg

SEQ ID NO: 186709 - DNA, 467 bp, Glycine max
  unsure (1)..(467): unsure at all n locations
nnctttaactgaattgcaacgnttcaattgtatataaatggtttattctattacaatatatngataatcgattaccagtgtatctgaacattgaaattcaaattcaattgtgaagagtcacatattttcataaaatgctntgtgtaatcgattacatnggtttggtaatcaattaccagtgacaagttttgaataaaaatcaagagatgtaactcttccgatggttttctcaagattttctcaaggttataactcttctaatggttttcttgaccagacatgaagagtctataaaagcaagacttttgacttgcatttgtgtacttgatataactcttacaacttttgaacatctctttgaacttcttcttcttcttcttcctttgccaaaagctttctaagttttctggtttccaaaccttgttcttcacagaaacaaagtgtgcttatttttattctcttctgct

SEQ ID NO: 186710 - DNA, 352 bp, Glycine max
  unsure (1)..(352): unsure at all n locations
catctagcatagaaaaaattgttggtttgcatagcgtatgattcatattactactcatatcatttgtttttatttagctttcatttcagttattaatntatgtgcatactcactagttttttctcagaagatcataggttnttcttagctattttgtgatttctttcaattttaatggattacgcttcgttttaatttattactgtatgatatctatttggtaagtttttcaaaacctcatgttttaattgatttcgccatgttttaaacattacaactaggcttaagaacatagaaactatgctatcccttagtaaccttctgaacccacatgaggatgaggcgtacttgt

SEQ ID NO: 186711 - DNA, 365 bp, Glycine max
  unsure (1)..(365): unsure at all n locations
ctaagctcggtactcttaagaaaagagccaagctggtgcgggatgtatattactgccagcgggaaagctactcttcaggagttgaaaaagaaactaanagatcttcataaagattngaaggatctgaatgaactatgtgattatctaaacaaagaaagaaatgatctttggagagaatgtgcacaagcacacaaagattatgaagacctcagaatgagtaagcataatctttgggtggaatgtgaggaacacaaaagatttgtgaaattcttgaatgataagcatatagaatcaagaatttaatggtcaacctcaagatgttgtcaaacttcatgaggacattaattagaaccttacaaactact

SEQ ID NO: 186712 - DNA, 376 bp, Glycine max
  unsure (1)..(376): unsure at all n locations
cctanagaagctagagcgagcgaggcgcagttctctaatatctaagctcacctncttgagatgagaagctagaacttagctacacaccccctataatagctaagctcacccccatgacaaaatacatgagaatactaaanagaaatccctactacaaagactactcaaaatgcctcgaaatacaaggctgaaaccctatactactagaatggccaaaatacaacgcctaaacgaaggaaaaaacttattctaatatttacaaagataagcgggctcatacttagcccatgggctcaaaatctaccataaggctcatgagaaccctagggcattcccttggatctctggcccaatctacttggagtcttctatccaa

SEQ ID NO: 186713 - DNA, 386 bp, Glycine max
tacaaagacttttctagcggaggtggatgcttcacgagtgggggtcggagctgttctcatacaagatcaccattccatagcctttataagtagaagcttatatgttcagcaacaatccatgtcaacctataagaaggagttactagctgtggtgtttgttgtacaaaagtagagacattacttattacctaagcagtttgtaatcaaaactgatcacaaaagtctcaagtatattcttgaccagagaactttcacagctttccaacaaaaatggttggtaaaacttatggaatttgatttcattattgaatacaagtagggaagtgagaaccaagctgctgaagcactttcaagagttgaatgtgctactatgtccactcaccaac

SEQ ID NO: 186714 - DNA, 393 bp, Glycine max
  unsure (1)..(393): unsure at all n locations
agtactaagtatttattacctatacttaatagagaatacttataacactacaaaataaccataaattggaagagtntgatacaatntacacaagttttatacacaaaagttagtcgtattccaagtcccccaaatttacaattttgcttgtcctcaagctaaaaaagaacagctcacttgtcctcaagtgacaataacatgcagtgactatgtacaaaggtgtatgcaacaaaagttaccgattgcatgataagagaatgaagctttatgtactcatcacttgtctttcacaagttatgcaattatccagagagaagaataaaatgtagcctgaacaattagatgtagttagacataagacagatatcaaggaaagtaacttataccacagtc

SEQ ID NO: 186715 - DNA, 436 bp, Glycine max
  unsure (1)..(436): unsure at all n locations
gcttctntgttagacctcgatcggcatctttctattccgagtgtcgaccgncatttttttcgatccttttcggngaataatatttttttgccgagatgggcaaaatgccagtttcggccgaataaatgggaaaatgccagtttcggccgaaacgaaaagtcggttgggctcgcacaaaaaaacctagccgacctacattttaaattntttatgcaacaccaaaacaagaaaacttcctgtgccgtaaaaaaaaaacattacatgacagcgagcgttttgaaaaacaaaattgcgcaacgtcggctgaaaaatatcagtcggggctttttcacgaccgatgtcggctattgagttttcaattcaatccgagaacgaaatttgcatgatgtcggttaagaaatgttcgatcggcatcatcctgtgaagtttctttttt

SEQ ID NO: 186716 - DNA, 452 bp, Glycine max
  unsure (1)..(452): unsure at all n locations
tcaccggatgacgccgatcgaacatttcctaacgcgacgtcatgcttatttcgttcanggattgaattgaaaactcgttaggcgacatctgtcgtgaagtagcgaccgatatttntcagccgacattgcacaattctttttagaaaagctcgctggtcgataatggtctttttacggcagagtaagctntcttggtttggtgttgcataaaaaagttacaatgtacttcggctaggttnttcgtgcgagttcaaccgacattttgtttctgccaggaaaacattagcccacctctgcaaaaaaaatatttgctaaccgtcttcatgcatatttcattcaacgattgaatagaaaactcaatagccgacaacggtcgtgaaatagtcccgactgatatttttcagccggcattgcgcattctttttaaaaaacgctcctggcagatatgtttt

SEQ ID NO: 186717 - DNA, 310 bp, Glycine max
atagaaagagggacttaatcccttgcgacttcaagtaaagagcaaacaatatttggagaataaaagcatagaagagacgccacgccacatgagatattgtatcaattacaaacaaaacaactaaaacaagcctcaagacaaaaccaaatagcattttccaaattcaaccgtactctacttcagactaaaagcctcataactaaccctaaacactaataaaaaccattgttcataaattataaagtttctaaaattaaaataaacgattacgtatcaagttaatacgcatgaagcttgcggatcaacttga

SEQ ID NO: 186718 - DNA, 402 bp, Glycine max
  unsure (1)..(402): unsure at all n locations
ctaaatattggggtntttttactttcattgntgcacattgattgaacaacacactgcattatttcagcttcatgtaaaatgccaaaatggtgcagttttattcagcattttctagcactttaactgcattctctgcacctaatgttgttgcattaaacaagatttttgcaatttgcaatgaaaatgcgaagcaaaatggaaaaacaaatgcagcttgaagtgcatgttgaagtcaagaagattcaaacgactttaaagtcgttgaactgcctatgacttcactattcatggatgaatggtgtagattcaaccatggaggaaatgaagggtggatcttgtttgccaaagttgttgaacatcacatgacctcactattcatgtnttaatatattatatatatta

SEQ ID NO: 186719 - DNA, 331 bp, Glycine max
  unsure (1)..(331): unsure at all n locations
ataaaacaatatgatacaatttttnttgtatgtacaatggtcacactanggtttgaacttatgacttcatgcattctactccaactccccaccataaggccaaccctagtgggttngatgcggatatactttgtttataataaaatctcatcaattattttttttggaatattatttttatttatgttatattggttttaattntctaaacaaaatttcatattgcactaaatggatgaatgatngnggaaaaaggatttgtangaatttccagaaccaaatgatgcttgtagaagagaacttgaagctactcatgtttctattgatgatc

SEQ ID NO: 186720 - DNA, 320 bp, Glycine max
tccaaattggttctaggttagaaaagcatgaaaatagggattccttcgtaagaatttgggctgccccatgattggtactttgcacctaagtaacgtgggaaatgtttttcaatggtgtgtagatatatgtgtaaatataaagggcatgaaattctttgtaaagggtgaaggaatatcgaggtcccttcctaaatgaatgtatgatagcgcgggattcccttttgaatgcaagtatgtgcataatgttaaatatcttgccaatatgcataagtgtgagtgaaacaatgaaagcttgaatggtatgtatattttgagtgtgt

SEQ ID NO: 186721 - DNA, 375 bp, Glycine max
  unsure (1)..(375): unsure at all n locations
tctatanaaagaagcatgtgtaacactttttgtaactttgatgaatgaaagtcttatgagacacacttcaatgttccacttctctccctcttttattccttcaatttcgtgttcccccccccccttctctatttcttttcctccattgaagcatcctctccaagcttcttatccaaggcacattcttggtggtgaagcttcttcttgcatggcttattccctagtggatgtcgcctcctctcacctcttctcctttatcttccactgcatctccatggtggaaaatcaccattgaaggacctcattgaagctcaaagatccagcctccatagaagccccacaagcaagcttccattataagggggcacattactt

SEQ ID NO: 186722 - DNA, 348 bp, Glycine max
  unsure (1)..(348): unsure at all n locations
attcaaatcattctcaaacacacatgtcatacaaaacaatccactgcatatcattntcaaccaattcactggtcaaacaagctttntgtacaagcaaacaactcaaagtactaaaatttaaagaactgaaacataaaaactgaaatttaaatgattgaacataaatcatataataactaaaaataaactaaaatgttcaaaatgcacaaatntaaatgtcctggctctgtgcatgctcattgagatccaacacctgagcagttggtgaatcgtgagagatangctgctctaactcagatgtggatgcagatggtatgacatcatcangtgtgggtgctggggatcgct

SEQ ID NO: 186723 - DNA, 419 bp, Glycine max
  unsure (1)..(419): unsure at all n locations
agtcttttatttatcagagcaggacgatcaaatttgcctcttttcagacccacttcgatccttttgccgacgaanactaaataggcaaagcttgaaggcatgtaacccaccatcttctcatagtagaacaccagtaacgtgtctactatcattgttatcatctctttctctgtcattgggggcactacttaagctgccagatccctccaccgttgggcatattctttgaaagattcatgctctttattatacatgctctgtagctgcatcctatccggagccatatcagaattatactaatactgcctaatgaaggcaaacattaggtccttccaagaatggactcaggaaggttccaaattagtataccaagtgacgactaccttagtaagattttactggaagaaacgcatcaataa

SEQ ID NO: 186724 - DNA, 459 bp, Glycine max
  unsure (1)..(459): unsure at all n locations
ntcacttaanattgaaatgtcacattatagagttagtgatatcttattgacgaggcgggtcgttacagaggaagttcgaactcgcggtggttgttccattgttggctactatactactagatgttatgttactcattgtcatcctgccattgatctggtagcaaccatgctctccttaatggatagggaagttttacttgggccccatggtgggctccaaaatgtacctacaacgggtagacatgtaactttcttccttaggatatcttctttcttcataatctactactaggcagtctgaagggtggggtacctacaagaggcactccgatactcaagtaagatcttggtcgagagaaataaatgagaatgaaaaatatcttacatcgatattctcgtagctatttatacatgccttagtgggccttggatccatgggcccttgtctatcattaccta

SEQ ID NO: 186725 - DNA, 377 bp, Glycine max
  unsure (1)..(377): unsure at all n locations
ttagaaagttgataaactgagaaaagaaccaaaacagacttaataataagacattttgcggatcttcaaagagcatggcccatgttgcacctttaggccattttattccagcatggtcatgctaaattttacaaaaatttcttaatcaacgtcttgcatctaagtacgaccatgctactaataacacaacccgtgttgctccaaagccagaattgggaatcagcgtaaatccgagcacaaccatgctactaacaacacaacccattccgctcgagaggcaaaattgagaattagtgtcaatttctcgaagaaggccatgttgccctcaacacgatctattgtgacttagtactactcgagtngacctccacgttgca

SEQ ID NO: 186726 - DNA, 334 bp, Glycine max
  unsure (1)..(334): unsure at all n locations
acctttctctntctagactttatttcatgtcgaccactctaaggctntgtagcctctaaacccatgatacaatctgatgtggagattangatgaatagttacgtctagttgcttctaaatagatggtcttgaaggtaagatccattctattgctcattgtagatcgggcctcatcagtcttctgtcaagcatagtgaagagttctatcactctgataggctcttcagccaacatcgtgatctttntttgctctagacgcttagttatgacccctatggagacaaattctgatgcttcatttatctcttctaagtgtctgagtctttcaatgtct

SEQ ID NO: 186727 - DNA, 430 bp, Glycine max
  unsure (1)..(430): unsure at all n locations
ctgttgcatgcaagctgtggatgcatagaggttgtttagctcttttgattcatgatnggnttacagtggcagcacaaaccacatgaccaaaagctattataagtgcttgataaaactatcatttccaaagtcaaaattggacatggtgaatttattcaaatcaaggtcaaagtaaatcaagttgtagacatcttaacaagtttgaaatatatttctgatgctttataagtgcttgacattgaccaaaacctacttagtgttggaaagttgattgaaaaaggttttgcggtcatatttgaaaacatggtaatggtgcctaattaaagatgcaaatggtagagatatattcaaagtgcaaatgagggcaaaaagctttgctctaattctaatggtggaagaacaaagagcattctaagcactgtaagcaatg

SEQ ID NO: 186728 - DNA, 379 bp, Glycine max
  unsure (1)..(379): unsure at all n locations
gtctcacgattgtcacgtcttgatgctacttttattagtcatgaccatacaagacattntgcctaacaaagtcaggttagccataactcgcctgtgctttttcttcaatgccatatgtagcaaagtccttgatcttgtcaagtttgatgacctagaaaatgaggatgcaattatactgtgccagttggagatgtattttcctccgttctttctttgacatcatggttcacttaattgttcatctggttagagaaattaaatgttgtggtcctgtttatttgcggtggatgtacccgattgagtgatacatgaagatcttaaaagggtatacgaagaatctacatcatcccgaagcatctattgttgaaaggtacattgc

SEQ ID NO: 186729 - DNA, 438 bp, Glycine max
  unsure (1)..(438): unsure at all n locations
atgactcataggctcaagaacactattatactttttggatgaagaagaagcttttcttactgcactccctcaagaaggaattcatgcacaatgaagggatgaaagctccaataaatttttttctcacaaataccaataagctacggtgtatgcttaaattcacaaggctttgtgacacttgaatggccccctttgttgccattttgaatgtaccactccatgccatagatagttagttttgctttttgcaaactagcaaaagtggaagggataggatttgccaaaaataggtatatttgttntttacaaaactaataaatcttatcttaatgcctaggttgttgcgttaatctccctaagaatatgtgtacccagagtgatcctcacacagagttaaattacattgtcgctcagtgcgcggttgatgtgccatcattt

SEQ ID NO: 186730 - DNA, 391 bp, Glycine max
  unsure (1)..(391): unsure at all n locations
gactttgagcgtttgtttatggaggagtccgagtcaatttctgattatttttctcgagtattggccgtagtcaatcaacttaaaagaaatggtgaagatgttgatgaggtgaaggtcatggaaaaaatacttcgaactttaaatccaagttttgacttcattgttaccaacattgaagaaaacaaggatttaaagaccatgactattgagcaactcatgggttccttacaagcatacgaagaanaacaaaagagaaaaattaaacaaaaggaggctacaaagcaactactacaactcaacgtaaaggaagcaaactatgcaaattacaagagccaaagaggacgaggtcgcggccaaaatcgtggacgtggacgaggacatggaggagaag

SEQ ID NO: 186731 - DNA, 454 bp, Glycine max
  unsure (1)..(454): unsure at all n locations
tttttagatatataaatcctaaggatgaaattattataatataaatgtgatattgatttatatcgacatatgttaaaatttcttttaaataattatactctaaataatttacttaatgtaaacatttactgctagactgatatgaaaataaaaattatttagttatatttntcattttaattaaattaacactgataataaaattacttaatagttattactcaatgatatatgggatcaatggaagtgatcgaagaagatacatttaaataaaattattgaataatgtggtgtagtgtaaatttataattttctaaatntttntattgatttgatgtcacattcaaacttatattntaatgtgttaaaaaaatattacaacatattaaattatgacagaaattgacatntttctaatttatgattaactatatatatattaaaataacatatt

SEQ ID NO: 186732 - DNA, 350 bp, Glycine max
  unsure (1)..(350): unsure at all n locations
atancgagacgctcgagactgaatgttgaatctctgagccaatccaaacgacnaataacttttactcggatgtctgattgagtcccgcaatataacgagacgctcaaaattgaatgttgaagcttagagccaattcaaacgacaataacttcttactcggatgtctgattgagtcccgtcatatatcgagacgctcgacatttaatgttgaagctcttagccaatcaaacgacataacttnttctcagatgttgattgagtctgtatataatcagagctcgaaattgaatgtgaagctctgaccaatnaaacgacaataacttttactcgatgttgatgagcccgcatat

SEQ ID NO: 186733 - DNA, 351 bp, Glycine max
tctatatgctggcttattcattttaatatgggatcacagctcttctaacggagagatctgctgcgcatacctttcttcctctcttctcaaccatccacaatgaacgaagcttcaatcaataacacagaaagctacctataccttcatccaagcgagaacccggccatagctcttgtttccccagtattagactcaaccaattaccattcatggagtaggtccatggttactgtgctgagtgccaagaactaggtggaattcatagacggaagcacacctgaactgttaagatagaagaacctatggagctcggcgtccgtcaaaaatatggtcgcacgcgatagtcactcc

SEQ ID NO: 186734 - DNA, 387 bp, Glycine max
gccatttaatgccataactaatgaagtaattttttagagtataataataataataattacaattactaatgtagttgtggttgtaacttgtgattaattaaccatttcagcgtgatctctctgtttttcaaatgcctagatcggaattgtttgaggattgactttgacataattggttgttttatgcggggagtgtttttaaggtgatagtattttctagtaagattggaagcatcacctctttgatagggtgcttgataagttgatttttaaaagttatattctaattatgctaaacatttgtgatatctagtaatcccttcagacattcatggtggtcagttggtattgcacatgtcagatgtattcattatatgctgtctctac

SEQ ID NO: 186735 - DNA, 99 bp, Glycine max
  unsure (1)..(99): unsure at all n locations
tctctaaccttgaccagtcactaggatctcacttcatattacctacaatggaaaatgtgtataacattttctttntctaactacctaattagggctttc

SEQ ID NO: 186736 - DNA, 338 bp, Glycine max
  unsure (1)..(338): unsure at all n locations
acctggagatatgtcgcggnggtcatgagaccttggtgacgtcatgtggggtgctatttgccaaaaccaagcttgaccaatcccgacccaacccgggcatagtcgggcagtgagaacctgtgatgtacctaagcaggcgagctcctggcagtcaacagataataggaacaaagaccacaaagcaaggaggctcgtggtggctggccagctgtgaaacttgattgatatgtgagatatggtctctggtaatcgattaccaaaggtgggtaatcgaatacaacgcttaacaatgaagacagggggctaagatggtctctggtaatcgattaccaggggat

SEQ ID NO: 186737 - DNA, 348 bp, Glycine max
cttactcgacgaagacactgacaaaaacttatcttctccttcttggacaaagtatggcaggttgggggcaaagaaattttcttcccatcagaccttggatgcaactgtgatcgtatacccatatcagctagatcttgacgggtattcaagccatccttcgtcttgccttgaatgttaaggagcgtcctaatcacactgtcacaaacatttttctccacatgcataacatcaatacaatgtctaatgtcaagatcacaccagtatggaagatcaaagaaaatggacctcttcttccatatgcaactctgacttttatccttcttttgggtcttcctaaataccagattc

SEQ ID NO: 186738 - DNA, 430 bp, Glycine max
  unsure (1)..(430): unsure at all n locations
tgacttatactcctaanccatttaattgcctatgatctttgttctcttgcatatttaaaagtttttggatatgtaatcgattataaccacctgtaattgattaccatagaaaaaaggtggtgtaatcgattactagaagcagttaagcagttactcagcactattgtaatcgattactgagagctataatcgattaccagtcatccctgactatagatacaacttttttctctctccctctctctctaagcgcagaacctcgacttctctctctctttctcatggcttcagaacctctctaatcttctaatccttataacttcatttcttcaccaaaccgcatcaaagaaagtgtgaaattccttcttttcaatcctctacaaaccccaccaatcaaaatttcttgagaattccttcaatgacagaatca

SEQ ID NO: 186739 - DNA, 380 bp, Glycine max
  unsure (1)..(380): unsure at all n locations
canatcaactctcccacatccacaaatcacacatgaacccaccatccncagttgctcaccttcaactgagctcacgtactcccatgtagcccttattctcgttccccttagcaccgggtccccatcaacccctccaagcttcctcaatatctaagaaattcaatatccaaacatcatgaactaccctaaaccaagaaaatatggcagaggcagaatactcttgccacaaacacattccaataaataccacagctttccttactcaaatactccagtaacattctctttgttccgattccttaaccgctggatcgactcgcacaattttactggaggtccctagtacataagtctacattntgaccgttgggatctactat

SEQ ID NO: 186740 - DNA, 365 bp, Glycine max
tgatcatcctactaggacgactgagaaaactggggcaaataaagagggtgaggatgagggagaaacccatgctgtgactgccattcctgtacggccaaatttcccaccaacccaacaatatctttactcagccaataacaaactttctccttacccaccacccagttatccacaaaggccatccctaaatctaccacaaagtctgtctaccgcacttccaatgacgaacaccacctttagcacaaaccaaaaacaccaaccaagaagtgaattttgcagcgagaaagcctgtagaattcaccccaattccagtgtcctatgctgacttgctcccatatctacttgataattcaatggtagccata

SEQ ID NO: 186741 - DNA, 335 bp, Glycine max
  unsure (1)..(335): unsure at all n locations
atagaagcatgtgtcacacttggtgtactttgatgaatganatgtttatgagatacacttcacagttccacttctttccctcttttattccttcaatntcgagctcctcccttctctctttctttgcctccattaaagcatnctcttcaagcttcttatccaaggcaagttctggtggtgaagctccttcttccttggcttattccctagtggatggtgcctccactatcctcttctcctatgccttccgctgcgtctccatggtgaaaaatcaccattgaaggacctcatcgaagctcaaagatccaggctccatagaagctccacaagcaagc

SEQ ID NO: 186742 - DNA, 474 bp, Glycine max
  unsure (1)..(474): unsure at all n locations
ccttgatgttgtgttagatgcattagaggtgagcagacattatgtctgaaattaggtgcatataaagctacagacatcttggaattgatacatacagacatttgtgggccatttcatacaccttcatgtaatgatcaataatattntatatcatttatagacgattactccagatatgcatacctgtttcttatatatgaaaagtcacaatctctgaatgtgttcaaaacatttaaagttgaagttgaaaataaactcaacacaagaatcaagagtgtcagatctgactgtggtggtgaatactatgacagatatgacnagtcatgtgaacaacgtctgaggccttttgctaggtacctagaggaatgtggaatcgttccacagtacaccatgtccgggtcacctatcatgaatggtgtagctgatagacgaaattaactcttaaagatatggtaagaagcatgatttgcattc

SEQ ID NO: 186743 - DNA, 384 bp, Glycine max
  unsure (1)..(384): unsure at all n locations
agnctgttggattatgaggtttctcgtcatatgtggnactagggggcgantgggcgatggtgcaaatcaactctcccactttcacaaatcaaacatgaacccaccatccctagttgcccaccttcaactgagctcacgtagtcccacgtagcccttatcctcattcctctcagcaccgggcccccatcaacccctccaagcttccacaatatccaagcaattcaatacccaaacatcatgaactaccctaaaccaagaaaatagggtagaggcagaaaactctgcccaaaacacattccaataccacagctttccctactcaaataccccagtaacaatctctttgttccgattcgttacccgtggatagactcaaaaatttac

SEQ ID NO: 186744 - DNA, 420 bp, Glycine max
  unsure (1)..(420): unsure at all n locations
tcataatgaatcaagaatgattcagagagttttgatgataacaaagatgatgacannaagctcanaagtcaagaacacttatgataacaaagattatgatctcaagaatcaaagaatgagttcaagattgaatcaagtacacttcaaggatcaagaggaaagttgaattcaagttccaagaatcaagatcaagattcaagaatcaagagaagactcaattaagataagtattaaaaagttttttcaaaaactgagtagcacatgaatttcaaaaccttttaccaaagaagtnttactctctggtaatcgattaccagtagcanaatgggtttcanaaagctttcanaatgaatntacaacgttccaattaatttcaaaatgttgtaatcgattacaagtatttggtaatcgattaccagt

SEQ ID NO: 186745 - DNA, 328 bp, Glycine max
ccagaaattcgaatctctggtaacccctcatttgcttgagtcctcactttgctatctaaccacaccacccctcttgtttgattaggcttccaccacacttttatgtattcttttcttatgtcccacaaattggatgaagcagctatcccaaaaacaatgtgtttgagcttcgtgtcttgtctttgagataactggtcaagggaacttcttcttcttcttcttcttcttcttcttcttcctcctccttttcattgttgccctcttcaacatttgatctttcaattggttttgtagttgaggatatattaccactcatctcaagatgttc

SEQ ID NO: 186746 - DNA, 414 bp, Glycine max
  unsure (1)..(414): unsure at all n locations
tccatttgaggagttcttcccttaacactccgtttgagactgaaatgtntgctataaacttcctatcctacaaataaggacaagattacattatatggcgttagtggaggcttcttttcactgaaaatgtaattatctttcttgttttattatggtcctcaatgtggagcataaaaacgagaatttcatgtgcgcacaggaatataatcattatattttaaataaagaatcatanatgaaaagttagagcgtagtggaaaatactttactagtccacaaaagttggattggcagaagctttgtaacagtataagaatttcaatagtatctgcactccatttaaagtagcaagaagcttttgtntgaacaagtatttaggtagccatgagcccatgacatacattgataaacagt

SEQ ID NO: 186747 - DNA, 433 bp, Glycine max
  unsure (1)..(433): unsure at all n locations
agaaagtgtggaagagncagtttttctacttttattcgntgaccaatttgtggacctggagatatgtcgcgggggtcaggagaccttggggacgtcaagtgggatgctattgcccaaaaccaagcttgaccaatcccaacccaacctgggcatagtcagtcagtgagaacctgtgacgtacctaaacaggcgagctcctggcagtcaaccgataaaagaacaaacaccacaaagcaaggaggcttgtgtggtggctggccagctatggattttgagtgatatttggattatggcctctggtaatcgattacaaagggtgtgtaatcgattacaaggcttaaaaatggggtcaggaagttgagatggcctctggtaatcgattaccaaggggtgtaatcgattaccacgcttataaatagagacagtatgttga

SEQ ID NO: 186748 - DNA, 475 bp, Glycine max
  unsure (1)..(475): unsure at all n locations
aagactgaagtggagagtcaatagttctctcaagtttcaagaatcaaagagtcgttcaatcaagaatcaagattcaagtgaagtttcaagagaagactcaagatatgcaagaacttcaagaaccattaagatgagtataaaaagattttnttcaaaatattgaatagcacaattttgatcaagagagattttcacaaagaaaaatattttaccaaagagttttactctctggtaatcaattaccagaagacagtaatcgattaccaatggccaacattcttttcaaactgatttacatagctgtaatcgattaccaatggtttaaaatattacatttcaaaattcaagagtcacaacgtgtgataaatacatttcaaatcatttcaaacttgtgtaatcgattacacaatatacgtaatcgagtaccagtgtttctaaacattttgattttcaaatttaaacatgaagagtcaca

SEQ ID NO: 186749 - DNA, 395 bp, Glycine max
  unsure (1)..(395): unsure at all n locations
catttttgagtggtgaccagaagnacctccaaattaattaatggtattaatgaaaatagtgaccaaaactcaaaaaacgctgtagaagcaaagcttcatgatgaatcaagaatgattcaaagatgtcttgatgataacaaaggtgatgacaaaaagctcaaaggtcaatcaaagaatgagttcaagaaagatagaatcaagaaagaatgagttcaagatgttcaagatagaatcaagaacacttcaagattcaaggatcaagcatccaagaatcaagatcaagattcaagactcaagattcaagattcaagaatcaagagaagacttgatcaagataagtatgaaaaggtttntttaaaaactgagtagcacatggatttttcttaaacatgtta

SEQ ID NO: 186750 - DNA, 248 bp, Glycine max
tccgctcgaattgagacacaacctagctatctcctctatggggcgacccaacatatggggggaacgcttcatcaggtctactagaggagccggagagataatcgttctatgctgctctcgagggcgggatcgaaatattgaacattaatcatggtctaaatagccccgtgaaggaacttcgccattactgacctcacggtacctcaactgaacaaatctgtcattactatccacacccaaatgacaaa

SEQ ID NO: 186751 - DNA, 379 bp, Glycine max
taaaccccttgaactacttcacattgatttatttggcccctctagaactatgagtttaggtggaaattacgatggctcggtaattgtggatgattactcaaggtttacttggacctttattttgaaaaccaaaaatgaagcttttaatgttcttttcaaacttgccaaggtgattcaaaatgaaaaaggtctcaacattgtttcaattagaagatcatggaggtaaatctcaaaatgactctcttgaaaacttttgtgaagaaaatgtatttcaccacaatttttcagccccgtcagcacctcaacagaaaggtgttgtggagaggaaaaatagatcccttgatgaaggtgaaagaacacttctatatgaaacaaggtt

SEQ ID NO: 186752 - DNA, 450 bp, Glycine max
  unsure (1)..(450): unsure at all n locations
ctaagctttgatanggagctacannaatttcatgcaggtggaccttcttctagtagctctgacttgcagcagcctcctatccctcttccatttccacatagagcaattcccaacaaaagaatggaagaagtggaaaaggagatcttggagaccttcatgaaagtaaaggtgaacatacctctgctagatgccatcaagcaaattccaagatatgccaagtttctaaaggagttgtgcacccacaaaaggaagctcanaggcaatggaaggattagtatgggtagaaatgtgtcagcattgataggtaaatntgttcctcacattcctgagaaatgtaaggacctangtactttctgtataccttgcattattaggaacaataaatttaagaatgccatcgctaaattangagcatcagttagtgtcatgcctctgtccatgtggtgattc

SEQ ID NO: 186753 - DNA, 432 bp, Glycine max
  unsure (1)..(432): unsure at all n locations
ntacatggagctacattatgaggtatgagagcatctttatctatgtgangnncttttgcttcctctatcttttgttcagtcaattcactttaattccttattctttatcgtcttctccatgcatctcctctattgtcttgtgatttggttctatttagagtagattaaaaaaaaaccaattaaatcttagatatacacttgttcttgtatttctatggttaaaatttcatagatctactcttgaatcatgtntttgtgttgattttaggttctatcatgtttcattcataatattcttgtactgaacctctagatatcaattttcttgacaaatattgattagaaaagagnacacaaaaatctaagtgtaaatcacttcaatcatgttatcttagagtcatgtttagtcataataattggcacattatgttc

SEQ ID NO: 186754 - DNA, 340 bp, Glycine max
aaaaagagaggaagaagagaaacggacaagcagggaagccattcctgaaataattctgatggtgatgctgacttggatgcacaatgagtaattttatttgcaaatagatgtagtttaaaattatgtatcctttgcactagctaggtggtggatagaggctcaatcacttcaagctgcaaattttgttttatgataaatggttgaatttagtgtttcttagttcattcatgcattgatggcataaagtctgatttatagattgtgtataaaaaccaattagactttgaggttgtcagaaaaaaatttgtatttctttcctgaagggaaaaaaaaaatctta

SEQ ID NO: 186755 - DNA, 259 bp, Glycine max
  unsure (1)..(259): unsure at all n locations
tactgcatcaatattccaggggttcactctgatngctccacttaaagatggggaacagccaatgaattcagacacaactaacatgccttttttttaggggaggaagctagacccaaaacttatccaggtttcatttcttgcgactgatgaatatcatacggatgagatcattcatccttactgcgtgactaacacactcgcgacacaagtagcactcttcataaactgaaggctctcgacaaatacggacataccggtt

SEQ ID NO: 186756 - DNA, 426 bp, Glycine max
  unsure (1)..(426): unsure at all n locations
agcttttcgctggagctgacccattaactgctctaactcctttatactggnnggccctaggctcttgaccttaacttgatagaacctctttttaagcgaaggcatttgacttgatcccatgttttactaaagtgaacaaaaatcggcgtgaatcaaaactccaacatctatcatgggtggaatggatgaatgcatgcatatgacacagatgtaatttaggaatgcgggagcccgggaaattgtctccttcttagatacaacatcttggggtagcaaagtgcccgacgtatgtattaaagaaggtgactcgtaccgtccgttggttttccaatgtgcgtgatgcatatgcganaggcgcaacacgggaatgtacagtatgacaatattcacaaaatacaagcaaaagggtacgtgacacttatgcat

SEQ ID NO: 186757 - DNA, 449 bp, Glycine max
  unsure (1)..(449): unsure at all n locations
tcctgaccccaactcggcatattcagccagtgagaacctgtgacgtacctaaacaggcgagcttctggcagtcaaccaataaaagcacaaagtccacgaagcaaggaggcttgtgtggcggctggccagctatntatcttgggtgttatctgaaaaataccctctggtaatcgattatcattcatgggtaatcgattacagggtttaaaaattgagacaggatgttaagtagcttctggtaatcgattatcaattgtgtgtaatcaattacatagtgtgatagggcactggtaatcgattaccagttgtgtgtaatcgattacatagtgttacctgttactggtaaatcgataccatttatgtgtaatcgattacacagtgtaacttttagattccattgtgcaaagggtgtgtaattcatttttggggcactgtaatcgattatatac

SEQ ID NO: 186758 - DNA, 398 bp, Glycine max
  unsure (1)..(398): unsure at all n locations
cgagcctgcttagaggtaagggatgagtctattgcaattggggatataatggacatgtgtacgaatacttatatgattaaattgaggtctgctttgagataattnctatattttaattcttcctttaccattacaattgtgggattgatgtgtttagcggaccaactgatgccttgatgtgaattagctgataaaattgaatgttcttggtgtgttcatatttttgacctactattatgatgtctctgaattcgatatgattatgtgaaattatttgaggtgactaatcatatgaacattacatattgatattattactatccgacatatatatgatgcatgacgtgtgaacacactttatcctaggattattgaagcgtgatgaacctatgtgtagt

SEQ ID NO: 186759 - DNA, 429 bp, Glycine max
  unsure (1)..(429): unsure at all n locations
agctttataatgagctntctggtcattgcttctatcatcagttatagnagcaggcttctcttccaatataacaaggtcaagatccaaaacaccgagatgaaattggacttgctcattccaatcaaagaagttaagcccattaaaaattggtacagatgatacatgagaattcaatgagttgggaacaggtaccgcataataaaacttcacataagcattttggtacatgaaacacaagtcatacatataatttacttagataaaaatcaatgtatattgatgttctcctttgggtgacacaccaacacacaacatacaaacatgatgatgctaataaaattttaacattatttgacaattaaatatgcaccaattagtagtatctatttcctttgggtatataaataaaactaatgatacacacaaatc

SEQ ID NO: 186760 - DNA, 406 bp, Glycine max
  unsure (1)..(406): unsure at all n locations
ctcttgtgtttcttgatcaaataaaacatcggggtagacattgtcatctagttgttgttgtaaggattccactatctacnttgcttcggaaacttaaaggtagacatctctaaacatggttttgttccatgactttaactcagccttcaatagatttaaacttttggctaaccacaaacattgggtagccatagataggttntttccatgcatcctccacaagtcacctgcaatcaaggtgacccaaccacatgctcataaatttaaaggatgatgggaaaagtctagtattgttctagaaagagcaatgaagatagccttaattttaacaatcaatttcttgttgactctcactagacttttcctaattaaggttatcatcattgcaaacaccatgatctagtgg

SEQ ID NO: 186761 - DNA, 417 bp, Glycine max
  unsure (1)..(417): unsure at all n locations
agcttcagattttgggcctcttcataggtgttancatgagaagatatgctctatcttgagctcccactccaaatatgcctccggatcacttttgcctttaaagggaggaatgttgagcttgactccttcaattcggtttggccttggaccaccaccatttcctcctctcctttcttcctcatgacgttcacgattctctaatcgctcaattctttcatacaactcctcgttgttctctctcaatagtctttgcatttaagcattgagagcatccaacaagaatctttgtgtcccatccaattgatattcaccaccacctgacatgttcaaaataaaaataataatagttataaagaaaatagaacctcaccacactcaactgtatctcttaaatatggctttttcttaaaaaaattg

SEQ ID NO: 186762 - DNA, 446 bp, Glycine max
  unsure (1)..(446): unsure at all n locations
nngcattggactngcgaaatcgccactccatcattaggattattacctggcatctcaaacaaacaaatcaaacgtaacaagacaattatagttgttgtttgaatacctcacccactcaagtgtatcacacaattatggcttttctctaatgaaaacactattgccttttaccactctaatttcccttgagttcttaggcaattcaagagattatggccacaacaaagaacaattcaccaatatgtgtaagggtaggctagagagacaaggaaaaggttaaccaagaaaaaggctaacaatgtttttaggcacaattgaaggaaataaaattcagaatttaggaattcaagtaacaatccttcatacaaccaatatattaccttanagagatnttttttttaaaaaaaagtcttcaatcatgaaccatttagcccaaaattttttaa

SEQ ID NO: 186763 - DNA, 409 bp, Glycine max
  unsure (1)..(409): unsure at all n locations
agctgtcgtattatgtgaggacacttcactatataatatatggaccaatctatgttgagtaatggcatggtgtggacaacttttgataatatcttgctaccttttccattcttcaggtagactctcttactccctctacacaaagtttccaatgtccccaatgtactattccgtcttcatgggggagaaatacctcctgaagaagacactngtgcactagttccatatattgatgttgttctcaagtagtgagtacaaccagtcctatgcctttccattaagatagaaaggaaacgacatagagtctgatgtactttgttggtacatggtttggtctcattgtgttggtcaacttgatgaacttcctcaggtgttacataggatntccatgggcaccaccactacatgg

SEQ ID NO: 186764 - DNA, 445 bp, Glycine max
  unsure (1)..(445): unsure at all n locations
acagatcanaagctttaattaagtgcatataaggctacagacgtcttagaattgatacatacggacatttgtgggccatttcatacaccttcgtggaatggtcaacaatattttatcattcatagacgattactccagatatgcatatttgtttcttatacatgaaaagtcacaatctctggatgtgttcaaaacatttaaagtagaagttgaaaatcaactcaacaaaagaataaagtgcgttagatctaactgtggtggtgaatactatggcagatatgacggttcaggtgaacaacgtctggnggcctttgccaggtacctagaggaatgtggaatcgtcccacagtacaccatgtcggggtcacctagcatgaatggtgtggcttanagatgaaacaaaactcttaaggatatggtaagaaacatgatttgtcattctaac

SEQ ID NO: 186765 - DNA, 340 bp, Glycine max
tttcatgcaagcttgataagtgtagcccttttttgtgtttttggctgatttctttccaaaatgtcgtggtactttatggattacacggtgatgggtgttaagcctctcaaagtgatcaaccaaggtccacatgccgacaacaattgtccctggatgaaattagggtatgacaccataacataaggataaaagagaaaagggcacataaataaagcaaaagttaagaataaaaagcacactgaccaaatggcttaaatctctaacaactccctagtggagtcgccatctgtcgtaacctaccttatgacgggacgctaaaagaaaataaaagaaagcactt

SEQ ID NO: 186766 - DNA, 356 bp, Glycine max
  unsure (1)..(356): unsure at all n locations
tccctttttcatgacttaaccaaattacctaatgatggtgtaccatttgaaggtacactgaatgacgactagaaatttgatttctctacccatgatgcccgccagttgatttgcaccaacaatgcggatatgaccggacgtcttctttgccggtcattggctttngaaagccgcatccttcactatntaattgtgcgtatttttcttccacggtcttccaaccttgccaaggtttctgaggaagaatctaatatcatgtgggcctttcatacanggcatcaacttgactgggcacacttagtcagatatctcatgcataagacattgcgattaaaatgctcactaccatatccaca

SEQ ID NO: 186767 - DNA, 316 bp, Glycine max
  unsure (1)..(316): unsure at all n locations
agcttatgactatggcagtcaagctgcacaaaagcgagactatagattttttgngngatganccggaaccccggcctgtatctaaaacacaataatgcgaaaaacgaccacaaatccaactcatattttgttcaagcgatttacaccaatcattagatatacgaactatataggaaaattgagcctatgaatgtgggtgcacaagctgcacaaatcttatacctttagaggctgggtcgtgaagacactaaatcattgcctgtattgtaagataattatgctaataactaccactgctttaaaggcttaatcctac

SEQ ID NO: 186768 - DNA, 474 bp, Glycine max
  unsure (1)..(474): unsure at all n locations
gaccttagaaactcagcttttatccaggctcatcttggtggtgaagctccttcttccatgtcttattccctagtggatggggcctcctctcacctcttctcctttgtcttccgctgcatctccatggtggaaaatcaccattaaaggacctcattgaagctcaaagatccagcctccatagaagccctacaagcaagcttccatcaagtggtaatcagagcacaagagcttcaagtaggtgctccttaaacctccattaatttttttttctttaccttctcttccattgttggttcttcatttntctccatgtatctcctcacatgtcttgttctaaatgttgttaacatgattctttagagtttccaccgattaaacttgctatagaaactagatttgattttctatcggtcaaatttcttgttcttgttcttgaaccatgaattgtgttaagtttaagttcctttgagtttt

SEQ ID NO: 186769 - DNA, 465 bp, Glycine max
  unsure (1)..(465): unsure at all n locations
ctttaacatcataagaagttccttgctctcttctttgttatttcattgaactttaggatagagaaccttagattaagttttatatttttagggttttactgttttagtagtagttaacattttaggacttttcacatgttttgcattatgtacattgtactgagggttgtgcatgtttgatatgcctgtttgaggcccgaaaaaaggaagataacgagctgcgattttttggaaaacgtgatgaactcgctaagcgagcatgctacgctaagcgagttcatcaatattcattgaatatatgagttttccggaaaaactcgctaagcacgcctaccgcgctaagcgagtttatcttttgaggatcaatattcattctcttgatgaagtacctatggctaagtgaggctgattcactaagcccaggtaacttagtcaaaaattntgttgatagtcacgcgctaagtc

SEQ ID NO: 186770 - DNA, 241 bp, Glycine max
tttttggatttccaacgcgggtacggcacgaccgaacggtcggaacacatctcaaccgaagttcacgggaaatacaaatcaaacgagcggtggaaaacaaatctattcttaggttaagcgagaaatgaccgaagtaaaatggctcaagcacgtcaagaggggcgataaaaacgaaatgacatgagaataaaacaacacgaaacacaatgcggaccaccacggcgacatagaacgagccgaa

SEQ ID NO: 186771 - DNA, 383 bp, Glycine max
tgagagaccatacaagtttcctaacgatttctaattatgtgggccattaagtctatcatatgctgacaatagccgagaagcccatgaatctcttctggggcggagtaggtgtccgccatcgccttggccttggctaacaagcggggaagttcttgactcccgttcaaggtaagagcaaaccgatccatccacatggttgcctcttggtgtaaagagtcgatcacccttcctctagcctctttttctgcgtatacttgagcatactcgtccgcgatcctatgctcgtgggccgaggctagacctaactcttcttggtacttggcgatgatagctagcttgttggtccccgtctcgcataaacgctgagacaagcttcttttgga

SEQ ID NO: 186772 - DNA, 439 bp, Glycine max
  unsure (1)..(439): unsure at all n locations
tataaaactcagctgagaaatatggcctgataccacaagcatgtcnnttgatgttgagaaaccaaggcctaagagagagcccacattatactccttccccaaagtgggagaatttctagggacatccacacattttattatgatacccaacaacacagtaaaagaattaaaatattcttcatcttttttatggatcgacaatgtgtatgatttatacggattgacaatttatatgactcatacagattggtgatccgcatgacttttttttaactcttacagattgttgatctatatgagtcatatgaatttgcaacaatccatatgacttatacggattaacaatntatatgagtttctcttaattatctttaaaaaacaaataataaagctcacaaggattattgatccatatgagtgcctctgttatctaacaata

SEQ ID NO: 186773 - DNA, 454 bp, Glycine max
  unsure (1)..(454): unsure at all n locations
gacctataaaactaagctttaaccctcttttaaatgatatgcttcaaaggcatattaaatagcaacaatcaatttaataatgttttttaaacgtgcaagacaaaattgattgcaataaaataaataagataaaggaagagagaattacaaactcgatttatactggttcgaccacttcccgtgcctatgtccagtcctcaagcaacccacttgagattttccactatctctgtaaatcctttacaaactttgaacacaccttcggatccctcacccttgtgttcaagattctccaagagacaaccaatctcttgattacaattctcacaatccaagagacaaccagtctctcgattacaattgagttcaagatgaatataaagatttctctcctttagagtagactatacaaatngaagatcctagaagaattcgcaatagaatttgcaatttt

SEQ ID NO: 186774 - DNA, 381 bp, Glycine max
  unsure (1)..(381): unsure at all n locations
tctcacctaaagctcttatgtaggcatacttcaaatagcattgctctagctctttcaaggatagttttgttgaaccttttagtcaatccattctattgaagggttccaaccatagtcttatcccttgctatgccttcatcatcacataattttatgaactccttagacaaagactctaatccattatttttcctaagcttctccacttccttttcagtttgattttcaactacgtttctccaatgtttgaatttctcaaatgtattatctttggtttntaatagatgaatccaaagtttccttaagaaatcatcaactattgacatgaagtatctagctactccctttaaatgcccccataagttagaatgaatataatcc

SEQ ID NO: 186775 - DNA, 407 bp, Glycine max
  unsure (1)..(407): unsure at all n locations
aacgagacaaacccaacaatttaatggcacacaaagctaacgactatgcactgaacatgacattacaattgatatggctatatattaccattttgaacgtcgattatgctgagagagtgacaaggaccagagatagaagcgctggatcaacatatacactatgacataaaatgaataaaataatgatgcttttgacaacagatctatgtatcggaaaattagaatacacaggttaagatacaaagaagataggttaagaaggctctgaattatttgattagaagacttataatgaacctgttcaatcccctaatttgacatttataccctacctaattnaggtggcaagttacaagacgaatgacaataccacattaatgtgctatattgttgacacaaatgtacat

SEQ ID NO: 186776 - DNA, 442 bp, Glycine max
  unsure (1)..(442): unsure at all n locations
cttccttgacaactccgtgtaatttattngccgctttatcaagagataacaatttagagagtgatcgaagactttcaaatggatttccactgaatttattgatagagagatcgagatatcttaatgatgaaagttttccaaatgatctaggaagagcaccaccaattgagttgttgtaaaaccgtagctgctcaatatttttaaatgccccaatatgatctgtcagattgcctgaaagtcgtgaactctgaactgcaagtcttgtgagtccatgggaaatacaaggagcaagaatttctaaaagctcattaacctgttggttgagnttgagatatgataaatctatcacccttaagttgcagagattacccaaagaagttggaatgtttcctttcagttgactatatgacaaatcaagttcaacaagagaagtcaaattacc

SEQ ID NO: 186777 - DNA, 472 bp, Glycine max
  unsure (1)..(472): unsure at all n locations
ggaagaggatgctttaatggaggataagaaagagagatttggtgtcatgaaattgaaggaataaaagagggagagaagtggaactttgaagtatgtctcacaagactctcattcatcaaagttacaacaagtgttacacatgcttctatttatagactaggtagcttccttgagaagctctcttgagaaaacttccttgagaagcttctttgagaaaacttccttgagaagctagagcttagctacatacacccctctcataactaagctcacctccttgagaagcttccttaagaagattcctaaagaagctagagcttagctacacatacctctctaatagctaagctcacctccttgagatgagaagctagagcttagctacacacccnctataataactaagctcacccncatgatgaanaacatgaaaataacataaaaagtccttattacaaagaaaacttcaaat

SEQ ID NO: 186778 - DNA, 354 bp, Glycine max
atctagatatatgatgcgcccgaaacaaacatccgggtgagaaattatgaccaatagaatttctcgagagctatcgtcgttgattttcgagagcctctatattggatgcgcctgaatcggacatctgagatagaagttctgactagtttaatttatcaagagctttcgttgcccaactctgagcgtctagatatgtgagtcgcatgaatcggacatccgtgtgaaaaggtatgactaaatgaatatgtcaagacctttcgttgtacagtattgatcgtcccaatatgtgatttcgccgaatcgaacactcgagtgagaagttatgaccgattgaaattctccagagcattcgat

SEQ ID NO: 186779 - DNA, 370 bp, Glycine max
cttatttagggttatgggaattttacggaagcactacgggtgtcccggaagccccgaaagcccattttttaacaaaacgggggaggtggttgccaccttaagcaagaaaatgcccagaaacctggcccaaatttgaaaattactatttgcaccctccattttacaaaatacaccccttttgccccttttttccataacattacggaacctcacgaattacgtaacgatacttgttttctttccgtaatgtcacaaaactttgcggattacgcaaccatcctctcttcggcttatggaatgttacggaactttatcgattgcgcaataatgtttgcttttaacttccaacatgtcgcgaaacttcacggat

SEQ ID NO: 186780 - DNA, 200 bp, Glycine max
aaaaaacatttgaagactgacttcttttaaggatacaaaaaactatcaggaactttatgaaatacaactttgaagcttaaaaaattagaaatggattcctgaactaaatatggacctataatcttgatgttaaaagctggttatacactttatactatgaaaaatcatgtagtattaagacataacaatgttctttctca

SEQ ID NO: 186781 - DNA, 192 bp, Glycine max
cgacacgagagaacaaacggcaagaagagaagaggaaacccgcaacgcaccaccgcaaaccgcgcccacagcagaaaccaaacagccccaccaaaccacagcaccacacacaccgcccgcaccggcaacccaccaagaaagacaaccgagaaacccaacagcaagcacgccaaaacgcagcagaccacccgc

SEQ ID NO: 186782 - DNA, 89 bp, Glycine max
atggataatctttagcatctcgatatattatgcacctgaatcgggcctctgagtgaagagctatgtcatatgagatagccgagagcttc

SEQ ID NO: 186783 - DNA, 422 bp, Glycine max
  unsure (1)..(422): unsure at all n locations
tagacatgatacatgtcagggtttggattggttcaangataaaaagggatgccccacattatttccatgacacaaaatgcaaataaatgatgatttggaaactttatgcaaaactggtcatgcatgcacctatgcggacactcaagtgtcaaatttttatggtcatgtgatgctagggctcaggattcatttcctctattttaatcaacccaatgtttccaaaatatgttcttttatcaatttgtgcattcatccgagtccatttcgggcgtccggngaaatttcacagcattcacccttcatgtgtagacacactttccaaaanatggttatgatcaatgaacctttttttggagatcgtctcttttcataagcatgtcgttntttagctagacaacttatattctttttttctncctctt

SEQ ID NO: 186784 - DNA, 311 bp, Glycine max
aagccaccccacaagatttcagatgaaatccttcaggtaagctggttttgcgcaagtccttttgggcctgttctgttctgtttgcaccccctgctggtcactttctgattgtgctcctttttctgattgcacccactgatgtctaacaaatatcatcacagttttgactttaatgaaaccttttctcctgtagttaaaccagtcaccattcgattgattctcaccctagcactcagtcaccattgggttctacatcaactagttgtgaacaatgcatttcttaatggtttgcttgacgagactgtctacat

SEQ ID NO: 186785 - DNA, 403 bp, Glycine max
  unsure (1)..(403): unsure at all n locations
tttcgagcgtctcaatatattattggcctgaatcagacatccgaatcanaagttatggctgtttgaatatgccatgtgcttccatggtcaattttgagcatctcgatatattatgcacctgaatcgggcatctgagtgaaaagctatgccatatgagttagccgagagcttcggtgttctatttcgagcgtctcgacatattattggcctgaatcggacatccgagtcaaaagttatggcaggttaaactttccatgtgcttccatggttaattttgagcatctcgatatattatgcacctgaatcggacatctgagagaaacgctatgccctatgagatagctgagagcttccgctgtttaatatcgagcgactcgatatattattggcctgaatcggacat

SEQ ID NO: 186786 - DNA, 443 bp, Glycine max
cttacagcagattttagtaatgacccactgacctagaatttatttttcttaatgctattaacctagggaatgaaaacaaacttaatggctgagtgtaactgaaattgttggcaaccaaaagtcacccccaacagccaacaagtcaaccaccatttggtctcccaaaaggctgatgcctaagttgccaattgtgcccttattacaacttgaactaaagcccttttagttgattaacccaaaacatatttttggtcagccaactctacaaggattgggccattatttagacaaactaaacactctaaaattgaaataaagtggtgtcatttagtcctccatttgggccatgatacaactcacaaccttggacttttcttcttgaaacttgggcttgtattcaaatagtatggacagcacttgttgaagagcttacttggcttttc

SEQ ID NO: 186787 - DNA, 482 bp, Glycine max
  unsure (1)..(482): unsure at all n locations
taaatacaactcccgaacttagagatgtcattgtgaccttttttcttcggntnttccgatgttttccacaaataaacgttggtggcgactccgcgcatctttcctcctttggaaagcgcacccgttagcttcgccttcgctcgcccttaaaagggcacgttgcgacacctatcaacaacaacaaatatggaatccttaccattacttgttctaggcagccctaaaacaaagtccattgataaattaatccatggagaatccgaaattggtaaaggggtatacaaaccataaggcattacctttgacttggcctttntgcaaacaatacaacgctcacaaaatttctgcacatccttcttcatgttaggccaataaaaatgctctttcaatgtatctaaggtcttctggaccccacaattccccatccacccaccttcatggggttcacacacaagcaagtttctagtagaacacttgggcac

SEQ ID NO: 186788 - DNA, 191 bp, Glycine max
cacatgctccatgcggatgactttagcgtcctataagtcctacacaagaaagataggctaggtaactgcacaatcaaaaaataagcaaagatactcaattaagctcaatcattagcctaagaccaaaactaagttaaggtgggaaaataggagtcaaatgttgaacaagcggcctcaataacttaagagcg

SEQ ID NO: 186789 - DNA, 361 bp, Glycine max
  unsure (1)..(361): unsure at all n locations
ttggaggcgccncctctcccctcttctcctttgtcttccgctgcatctccatggtggaaaaccaccattaaaggacctcattgaagctcataaatccagcctccatagaagccccacaagcaagcttccatcaagtggtaatcagagcacaagagcttcaagtaggtgctccttaaacctccattaattttttttctttaccttctcttccatttttgtttcttcatttttctccatgtatctcctcacatgtctggttctaaatgttgttaacatgattctttagagtttccaccgattaaacttgctatagaagttagatttgaaattctatgggtcacatatcttgttcttgttcttg

SEQ ID NO: 186790 - DNA, 468 bp, Glycine max
  unsure (1)..(468): unsure at all n locations
ttagttagatgttcttgaggagatcccatgcggtttctatcaagctgactcattttaccatgataactgctacgattcttttgcgtgatagtttaaattttgttttgagagaaatttttgtgaagttgtaacttttttttgctattcagccaatacatatttgtgtatagtctaatgacttttttcacatgcctcgcataaataaaattttcatcatttatgcttttatctttttctgtacactgccatggttctgacttgcgttctcgtgctgtgtccaaactggtcagtgcacgtaacttctgcataagttttagtataaattttcacatttttgtaataagataaatgcacacatgggccaagatcccctgatcttaaataaagaacatcacaatatcatactgagacaatatataaaaatgaaatgaaatgtactgtagacanataatggtcaagtctatcgaa

SEQ ID NO: 186791 - DNA, 443 bp, Glycine max
  unsure (1)..(443): unsure at all n locations
tatgcgcatatttccttacaaacgctcncttgcacatgtcattctattaaccganaaaaatgcacccatatacaatcaaggcagcttcgttacctagattatttacacgtacttccaaggtgtatttgttacttacatcacacacatctccttggctaaattcacatacatgcatactcaaagcattttgggggaccaaaaattgcacatgtgcacatcttggtatttctaatacctatacatacacaaacctcatgatgaatcttgactatctacacaataaggtgctacatttcatgctcttttcaagtttttgctacctaaggccgcatgcaaattcaagtatattttccttcgctggctaaaatngtattcaaattaaaaggtatacatatctttggtaatgtatcttctctacataggcatgcacatatttatgtata

SEQ ID NO: 186792 - DNA, 444 bp, Glycine max
  unsure (1)..(444): unsure at all n locations
actcagctatacctagttaacctgcctctataccattgttgttatatgaattgtgatnaacaccgaggaaattttacaccaataggccatgaacaatcaaataaatgaacttaatatcacactttaacccacaacattaaggctcgagtntatgagtcttcttctcgtttatatggtactcaactttcctagtctccctttaagcgatagtcatatttaatctatgagtatccaatggtggcccgtagagtttaattgtggctactctgaccgttcataatcattgctgtcaacttgctctagtactttgcaccactgcaactcctatatgactcactatctccatacatggactcacttttcaagaagactttcgatatacaggatcctaatacatgagatcttcatgtccatggatcaaattgtcgcattatactcgcctat

SEQ ID NO: 186793 - DNA, 460 bp, Glycine max
  unsure (1)..(460): unsure at all n locations
acctataaaactcaagctgaccatagataaaaaattattggatgtgtatttttttcccatttggccctcgaaaatgtggtgcatgcacagaataatatctagatgatactttttttattgtgtttacaatataactcttaaccggggttaggttaaaactagataggataagaaactaccaccttgtgacctatacactaccatcacgagccactccccacagccaccatcatcaccatttatagatgtactacttagtacttactactaaaaccattttcacctccacccactactctcccttgaaaagatgacacttttatctaagtggatatttgtctataccattagatattatggggacatgcgcagtttgcaataaacttaacaagaatttatcagttntatatactacctcctagcctgatcccttgtcttgcaccattatttatcatgctca

SEQ ID NO: 186794 - DNA, 376 bp, Glycine max
  unsure (1)..(376): unsure at all n locations
ctaaatgaatgactacgacgcacaaggtgagagctgcactcccaatctggcagtaccaacagatgttccccttccaatcagtaaaaaatcaagacaatcagttgcagcaagagtcaccatccaaacagtttaagatcaaagcaaccaatgagtcactcattactcgctgccagtgtgcaattaacaaaagaatgcgtcatgaaaataggaatcattntccagcccatgcttcagtcctccggcacggaaagtcaaaggagggttccttgtgcacacatcataattgtttgaagcatcgtgtgacaattaaataattaatcagtacggaatgacatatggaagagcaaaaacatctgctggctctatgtgcagagct

SEQ ID NO: 186795 - DNA, 430 bp, Glycine max
  unsure (1)..(430): unsure at all n locations
tctaaggaagntttctcaagaaagcttctcaaggaagtctcctagtctataaatagaagcatgtgtaacacttgttgtaactatgatgaatgagagtcttgtgagacacaactcanagttcaacttctctccctttttcttccttcaatttcgtgctccccctccctctttctctccctctttcttttcctccattgaagcatcctctccaagcttcttatccaaggctcatcttggtggtgaagctccttcttccatggcttattccttaatggatggcgcctcctctcacctcctttcctttgtcttccgctgcatctccatggtggaaaatcaccattaaaggaccccattgaagctcaaagatccagcctccatagaagccccacaagcaagcttccatcaactagtacccaaggtgccaccctta

SEQ ID NO: 186796 - DNA, 424 bp, Glycine max
  unsure (1)..(424): unsure at all n locations
cgtacttggnttagacaagacctatacatgatttaggacttgtatgattcaatttgtgaaaaaattggatgagggcaagtgtggtttccaatatctgcactctatgcaaaattttgctgtccaatatgtgcagcaaaattttggctatgtgcagaaaatgctgtgtatttgctggttgtggaaagagtagtacagatggggttctggacattttctagcagatcccaacggtcaaaatgtagacttatgcactatggacttncagtaaacttttcgagtcgatccaacggtgaacgaattggaacgaacgaaatgatactgcggtctttaagtgagaaaagttgtgatattggtttgtggtgggcaaagttttctgcctctaccctgttttcatggttctgatacctcatgatgtatgggatgt

SEQ ID NO: 186797 - DNA, 415 bp, Glycine max
  unsure (1)..(415): unsure at all n locations
ttaaatactcaagcctcggtcaacagttccaaaaaccatcacatggctcagacttttctttctttctgttcgatttgcccccaccacatttaaatggtgaatatcgtttactggagctctacagacataaaggttgtgaactgacatacaagtgagaattaaaattatttaatnttgaccatacaatcatttatatatggtctaacactgacattctaatcttatcacattaaaacttacaaaaataaaaacctccgggtgatcagaaattatgacatcttggcatgacttgaagaataacttgaatgaacctcaattgaaaaggacacaaaccattctcaaagagaagtgaaagaacatgtatatatatgtgtatttggagacaacttcttttaaatactcataagaacaatat

SEQ ID NO: 186798 - DNA, 411 bp, Glycine max
  unsure (1)..(411): unsure at all n locations
gcggatttggtcttcgccagtgaaaggatcgatgtttgttctaaaagaggcatatttagtcatcctgcttggacgaatgagaaaacttgtgcaaatgaagagggtgaggatgaagtataagcccatgctgtgactgccattcctatatggccaagtttcccaccaacccaacaatgtcattactcagccaataaaaaaccttctccttacccaccgcccagttatccacataggcaatccctaaatcaaccacaaagtctttctaccgcacttccaatgatgaacaccacctttagcacaaaccaaaaacaccaaccaagaattgaatcttgcagcgagaaagcctgtagaattcaccccaattctggtgtgctatgctgactngctcccgtatctactcgataattcaat

SEQ ID NO: 186799 - DNA, 420 bp, Glycine max
tgcatggcacccgagcagtggtgttttataatgtactatgaatgtcaactaaacgctcttgattaatgtgaaacatagcatccatcttctgaatcataagttacttaaaaggactccattgatgcgcaagctcttgcggagcttcagctttagcttcttcatccatctgatccatgtttcttgctgatggaggctctccaaccataatccactcatgttcaacaagcctcatcccaagattcttgagatgcccttccgcgatctcactagatgctctggttaaatccactatcttattagatacattgacattgacatagttaatgaatacttacgcaagacaacatactgaaattcatagtccaccaaccgacgactctataacataatgtcttcaatcaaagtagccaattcatcttg

SEQ ID NO: 186800 - DNA, 464 bp, Glycine max
  unsure (1)..(464): unsure at all n locations
gctgatacattaatatagaacctatatgctaatgttacattctatcagatctttgtgtcccgngacctctagcatgaggttcttcataatcatccatctattcatctgctcccccgaacacaagttcaagatcatcacacgattcaaaaacaacaacacacagggagtgagttatcacattcctagctaatagagaaacaagacaattaaatatacatattatataaatgagataccacttgcttaaacatagctcacgtaacttcaccacttcgtcattcaaaattcatttttcaatcatcaatcacattacacaagaatctcatacttcgatcaagatataataacacatcaattagcaagcatatgcaacagttatgctaagactcaattctatatgcaatgtggtaccatgtcagngaaaaaccaccctgnggcgcttatgaagtcatcacaagacacac

SEQ ID NO: 186801 - DNA, 471 bp, Glycine max
  unsure (1)..(471): unsure at all n locations
ctcagcttatgatgtgaaccagaaatgtaataatgcctaatgcccaagtgattgattcaagaatgattcaagacttcaagatcaagcatcaagaatccaatccaagatataagattcaagagaaggaatcaagaagcaacaagtcaagacttcatataggataagtattaaaagattttttttcaaaaaccaaatagcacagttttgttttacaaacaaattntctcaaattttctaagttaccagagtgattactctctggtaatcgattactagtgaccagcttgtttttcaaaatgttttcaaatgctctgcaacgttccaaaatgattttcanatagtgtaatcgattacactatattagtaatcgattacaagtgaatctgaatggtggaattcaaatccaattgtgaagagtcacaacttttcataaaatgcattgtggtaatcgatacacctttgtggtaatcg

SEQ ID NO: 186802 - DNA, 425 bp, Glycine max
taatctctgcctgaaagagtcctatctacctaataaagatggactgcttgcttgtgccttaatatggtgaacgacagaacgcacggcgcctttcaaaccatttctcattagatcgggtaacctgcactaataagtcaagccacattttatataaaaattcaggatcctaggaatgtcgtacgagtcattcatctaagtccaagggggcttcccgactcaagcctatgtgaaataagaccacaattcctactcactgagtgtaaacgactctctttcgctttccgtccctttcaataagaatggtcacagccctaactcaggcctggccttgatcaatgatctatatccaaacaaccataagtgattgcgtcacgactacatagaatgagagtctcgcttcttacttctaatatcattgcttaacc

SEQ ID NO: 186803 - DNA, 318 bp, Glycine max
ttggtatcatacctgtgggaacgtactttttgttttttaacaagagaactcttaaggtttgactttaaatggttaatatctaaatatactttctaaatggtgctgacaaagaaagcttaaacaggttatttgctttaatcattgaaacttcatcatcctacaccttacagcctgaacttgaactctctcttctcttgccaaagcttctaagtttctggtttcaactgaaactggtatcattttatcctttccttgcaaaaattcaagaaatgcaatctttggctccttcctttaaaaaaagatacccgattttggtcc

SEQ ID NO: 186804 - DNA, 213 bp, Glycine max
gataaagtaggaacatttattgccctcaactactaatggtgcatctgttgctatagagcgataattaaatgagcttggtaccaaacgtctcaggtttgtatgcttgaaattacacattgggtctgttaccaaaacaacatcactattacaaaaaaactaagctttcaatgacggttttgagaatacctttctttgaaagtcacttttgatgat

SEQ ID NO: 186805 - DNA, 461 bp, Glycine max
  unsure (1)..(461): unsure at all n locations
ttaacaatntatntatatatgaacattatactacgtcttcatattaaatattcaacaatgacattagnctaagggaaaactaagatgaggatacattaggacaattatttatgctatgaccatgttgccggcaaagtccacatatttttctacttgctcgatcattttcgtcttcgtccatctcagtangaatgcgagttgaaacggtcgaccctttgcagtcctctttctccttggatcaggaccccactgatctccttcatattcttgccacattgattcgtgtggcaataaaccaaaggagttgtcgtagatgtgcaaaatgtgttgtaaagtgaatatcatcggcacataggtcatgggatcaacattgacagatttacatgcagccatgacttgagaacactgtaaatgtgtagcctgaaattcaccacaatcacacttttgggattgaacattac

SEQ ID NO: 186806 - DNA, 470 bp, Glycine max
  unsure (1)..(470): unsure at all n locations
tgcctttcgtaatcttgctccttctacgttgctcggtttctgtaatgcttgaacgctgtgggttcaccctcttccccgtgctgggttcatccaccttcactgccaagtcacaacgtaataataaataattgtgttaaaaattgcaaattgaattgcggaatgcaattgaagaggtaaaaagataagaactttgagacacccatcaatgaatcaatcgataaaccctggtgggtgttgcacaaccaaaccaaacacagagagagagagagagaaacctttgaaagaggtgttattagcagttaagagttcttcttcatcatcgtcgtcgaattcatcttgatgccctttcgcagacctagccatttgtttcttcagatgaagagaagtgtaatgtaatctgtacaacctacctagttagtaccagtagtctgaggacancgacgtgtttaactgaatcgatacctaatcta

SEQ ID NO: 186807 - DNA, 468 bp, Glycine max
  unsure (1)..(468): unsure at all n locations
tagagcgagttcagcatactctcgtgttaacccacgtgcgttatctgaanataaaccaaaaacaaagacagtctcattctcatagtacttgggagtcacacggccggttctcttctctgtcactttgcctacccactaagaaaaatcgatcctttcttctcttccatacgcttctttctcttctcttcattcatttcaatatgtggtgttagtgaaataataatgaaggggtagttgaacattcaaacaacccatgccctcatttttatgtgtgggtatgttctcattatcttcaacaaatacatagtacaattactacaatgctgtatctgcttctgcgtggntcttactcaatttcttctctttcttcccttctttctcgatctcaatctttccaactggattttgctctctcggggggaggggtaaataactcaatacccacgagacttgcttactttcgttgaa

SEQ ID NO: 186808 - DNA, 482 bp, Glycine max
  unsure (1)..(482): unsure at all n locations
ntanagcacagcaacacagaatctaggtgtccaacacccctctattcaatggcttttctaggtgtgaaaggtgaaatttagaatgaggtaaattcaaagcaaactctcacctcacacaagtccataacctcaaactaaacttgctcaaactgaatttacacctaaaattccaccaaatcaaaatttgactcttcaacacccaattttgccctagaaatggctcttggttcactttggtcatttgtttttctctctagctcagcctaaccttcctcacatgtcctaaatgacatttcaagctagtattaactcactttaacctccatttaccacagaattcagacttagccttccaactctcaaagtctcactctntttccactcataacatcacattctcactntctaaccttaggttagttctacccttcgtctctaacagaattccatcagcaatttcagcatataaacatcacanacat

SEQ ID NO: 186809 - DNA, 378 bp, Glycine max
  unsure (1)..(378): unsure at all n locations
aatctcgactcaaagaaaatcatataagtctcataccattaatataaaacctatatcctaatgccacatcttattctagccgtggtgctcccgtgtcctctagcatgaggttcttcatattcattcacctattcatctgctcccccgaacacaagttctagatcattacaggatccatacacaacatcacacagggagtgagttatcacattcctatctaatagagaatcacgacaattaattatacatattatataaacgagataccacttgcttatacatagctcacgtaacttcaccactntaatattccaaattcacttgtaattatcaatcacattatacaagaattccacacttcgttcagatataataaca

SEQ ID NO: 186810 - DNA, 475 bp, Glycine max
  unsure (1)..(475): unsure at all n locations
tactaagcttcaacaaacgncttcacacagaaatagggtgttattttttattgntattgngcatgcgatttccttcatttttttgacagntaatgtgcacacagtaacgttcactgtgtgcaaagtgacattcattgtatacacagtaacgttcattggaggctgtatagggggaagaaggaagaagtgtacaagcaagcttcatgataatgaatcaagattgattcaaggagttttgatgataacaaagatgatgacaaaaagcccatgagaatgatttcaagattgagtcacgaacaattcatgaatcaagagaaagattcacgagaagtttcaagtttcaagttttaagaatcaagaataatctagaacaagattcaagactcaagattcaataatcaagaaaagactcattcagataagtactaaaaagtntttcaaacattgagagcacatgaagtttccaaaagcttta

SEQ ID NO: 186811 - DNA, 465 bp, Glycine max
  unsure (1)..(465): unsure at all n locations
tcanaaacgacgactagaaagtgtgagtcgttttagctttgtttaaatcattgtttaaagcgaaaacacaaggtgactatttatagagaaaatagttacaaccgcctgtaatcgattaaattaccaatgtaattgattatctcacagaagtaatcaattagattctcatttcaatcaattaaagtgttattcccaaaacttggagagctttcaagagcaatgtaatcaatttgattcttgacttaatcgattaaagtgttctcgatcacttctaggagcacttcaagaatgatgtaatcgattactatacccacataatcgattaaagcagagatcctaagacaactaagatggtctcaaaagaacagagtaatcaattacggataaggagtaatcgattaaaccaacatgaagatctctctgcaaacttctcaaaagacttatgtaatcgattacggatagcat

SEQ ID NO: 186812 - DNA, 471 bp, Glycine max
  unsure (1)..(471): unsure at all n locations
tgtgatgttgcgagccnagatcaggcaacttcatgttttctaatnattttctgnnncgcataacctattgctcttgcaggctcttcttcaaatgcaagatattcattctgcagttaatgctttgcaattttatgcaaatgtccagccaagcataaggtataaatagattatttactttctcttttaaatattttttattgctttgtatacactacctctaggcctaattataagaaacatagcccacttgcaaatgcatagttgccaatcttagtgtttgaacgtgtgcatcagtagctgtgatattttattttttattttcatgtttaatttatttaccaagttntaaggagtttgttgttaggttttctgactattatgtaccaatcatttagtggcttatgcttagttgctgaagcttagctagttagttgctattttctattttcagnntttaactcagtctattta

SEQ ID NO: 186813 - DNA, 395 bp, Glycine max
  unsure (1)..(395): unsure at all n locations
accttaaaactcagctnacataatgtgtcnatatggctgtctgtttcatgctatctgtttgaaacganacaattcanaattgatatctactatcacaataagataaaggaaaatgttgtgggaatatcataatgagacaacacacagttatttcttttgaatttgaaatattattttaaaacatgtgtttaaaaaggataataaataaataaaattaaagataattatacacaatttctttacttatctaattttctattatttttaagagattttaagctatatattttatattttaacccggtatgtcctcaaaaaatcaattctataatattagctagaatgacatatattatttatcttatttctaaattttaactgggatttctatttat

SEQ ID NO: 186814 - DNA, 376 bp, Glycine max
tggccctctttcttattaaagagatctttgcaaaaatactaattataccctgccatgttcatatatcttaaactcctatggctgcaaataaaataggcacattcgaatataatttaagaaattagacgaataaataaataaagtatgaaatttcaaaggtactaggctgcctcctagaagtgcttctttaacactttgagtcggacacgggatgatggttgattgaccatgggcctagcacccgctcgtgcctgcccctaagctttagaaaaaggaaaatgacatcacgcagtacacatgtaaatcaacaccactaaatactaataccaccttctgcttaactctgtctagatttagtgtgatatcgatcactact

SEQ ID NO: 186815 - DNA, 485 bp, Glycine max
aaaactacgctaacttataactatcttcaaattccgctcgcgcaattacttttatgacttgctttattgaggcatgtcaatgtatcttgggtgtgattctgacttggcttgcttaagcacatagtatgcaacacttaagcgagaagagcttggtttcttcaataacttttcctgcataaactccacacaaacatcataaaagtcctaaaaaaacctaaaattctagagttccaatgtgattattcaaaattcaccccaatcttaaggtaaaacaaggctccatgtattagaaatgttccataatcacctacaatcatatgtcaaattaaagtatattcgacgattaccaactatcaaagtatttgtcatttattaatagcactcattattacaaattatacttaaaatgcaggatgttatatagacaaatctctacctataatatacatattagaagaattaatacatttttaaattcctaactt

SEQ ID NO: 186816 - DNA, 457 bp, Glycine max
  unsure (1)..(457): unsure at all n locations
aaactaagctttaacactggcacctnttgaataagagaatttgattttgtaactcgatttcaccatatagccaatacatttatattgaaaaagaaataaaccaaagttaactgtgtgaataaaataaatacaaaaagtacacgcaaggaagttgtaatgtacgataatcataatgagtaacaatactttaatgaagcaactacaattaagtgatgaacaaaataaatggctagaaacctgaagcatggtgaatttcattttgacaccttgaaactcaagttccaatacagtatcctgaaaataatataaagattaaaatcataaattgcaatgaattttcttgatcctaataaaatagttatgaggttttcaattttattctttctcatttctacctcacaataaaatgcatatgtataatgtaaattnaaattatagtacaaataaggatataata

SEQ ID NO: 186817 - DNA, 464 bp, Glycine max
  unsure (1)..(464): unsure at all n locations
aagctgagtcttngggccatactagcagtgtatcatgcactgtgagngtacattacaccacnnnaaagccaggagagcacactcagaatngnactatccatacaaaactaagaaagggaggagcagatgagagccctactgaggtccacgatcaaagtatttggaccatttacatgtcttaaacatggttcttctccatcatggaggggagacgcaccatgttcctacccaggatggacaacccgagtctagcattgggttgggaatgctcgatcacgctcttatgggggtaggcctaggagtagcactacactccttgtccaaattctcctttctttccccaccagttggagttttgttggctacctgtaaagaggatgtatcatgtgtacctgcagtgcacgttgcggcatcaataaccgctactgatcaaattgaatatctattgttgaataaatatggac

SEQ ID NO: 186818 - DNA, 359 bp, Glycine max
caagaccaggcagccaacaccaatatacacggagggccgcagacacgacaaacagacgaccataaaaaaccactaaaccgagggaagaacgatacaaacaagaggggggaggaaaaaccgcgacaaaaaaacacagagaatccagaagacagtcgcgctaagaacctgggacaagcaacgagaaccaaagcaaaaagggcaaaaagcacgcgtaagaatagataacacaagagaagcaacgcccgacgaacaatccatgcagcggacatcacaagacaaggaaacatgacatcgacgcctcgtgcaactgcaaaggccaacaacgtggaacaacgaaaaacagagaagggaaaccggaa

SEQ ID NO: 186819 - DNA, 446 bp, Glycine max
  unsure (1)..(446): unsure at all n locations
actaagcttttatccaggctcatcttggggtgaagctttatcttcttggcttattccctagaggatggcgatgcctcttacctcttctcctttgtcttccgctgcatctccatggtggaaaatcaccattaaaggacctcattgaagctcaaagatctatcctccatagaagctccacaagcaagcttccatcaactacaatcaacaactgttaggtactagcaatgttgagtacaccgaggagttcgtgggcttaatatagctcatagagagagtgagtatggccctacacggtaatgcaaattacactttattgaccaaatgtagtgccctttaccatagactatttattgacatgttatatcccatgggaactctcacctcatgcanagctctaatactatgatgatactcatttgtatctcagattgaaagagccacgttct

SEQ ID NO: 186820 - DNA, 355 bp, Glycine max
  unsure (1)..(355): unsure at all n locations
tggaaagtggagttgaagagaggcccaaacaagaagaatatgtacatattcctccgggatatattnttcattaattgagctccctaaaaaagtaattttttgaggaaagtccaagcatcattaagtttctttgtcttcagtccaaagattcattggaaggtttcaatttacagaatgaatgttctaaggcttagatagagctacaagaacagaacaagtgcatccagaggctcgcactggagcgtgataagaccactcaatttggtgtgagaataactgaacagaccagacaagtttttcctaatttctatagaggacacgactattatgctntatgtcacttactctagttttg

SEQ ID NO: 186821 - DNA, 466 bp, Glycine max
  unsure (1)..(466): unsure at all n locations
ccataaaactcagcttttatccaggctcatttgggggaagccttcttcatgtgtttattcctattggatgacacctcctctcacctcttctcctttgtcttccactgcatttccatggtggaaaatcaccattaaaggacctcattgaagctcacagatccagtctctgtagaagccccacaagcaagcttccatcatttgaggtggcaaaacaggtcaccatgtattactaataatccacaaaaatatttttttatataaagttataattaatataaaattataattacgtaaaatatattgtttataaaaaaattatatcaaaattatataatggatttctagttataaactttaaattataatttgagtagagacttctgacttantaatttggcttaaatcataatttaaaaatntctatctaaaattcaaactgagtataagtagttatgtagttatgata

SEQ ID NO: 186822 - DNA, 413 bp, Glycine max
aggagaacgggaattgtctcaatttaatgttaaaatgatataaagctaactcaaccatgattaataataatgttgaccataaaattgattagttaacaaagtgtaacactgaatctctcaagcatgtccattaagatttaattcttaactgaatgcgtataaatattttattgaaagagataaaatatctttagtatacacaataaagaaaagaaaacattgaactacaatctcatgctaaatttacttttaacgccgaatttaagttttaaagttgtcactttaactaaaaaaaattgtcagtaatggattgttcgatttaaaggatgagaggagggaaaataaatttaatggagaggaaacgggagggaaatggaacgaatgggacgaatcttacttaagaaaattttttt

SEQ ID NO: 186823 - DNA, 284 bp, Glycine max
cttcttaagaccttgggtgaacatatttcacttaacattggtgaaagggaagagaaaaacagatgaaaatcatatcaaaaacacttccgtaaggcttctgtaacttttccgtatagaacgaaaatggagggtgaacttattaactggggtgcccgtagaaatcttcctcaagaagcctctaggcggcaagcacctccctttttccctataataggggaggggaggggggactgcttccaaaagttctgacccctatctatacatttcacctatttgggccaaaa

SEQ ID NO: 186824 - DNA, 484 bp, Glycine max
  unsure (1)..(484): unsure at all n locations
actcaagctttaactaactcagaatagacaggtaatgtcatagacatttatttgtttgantggagnncncaaaggctcggaagcattcaaaattctcattagagaagaactccatatctatgaattttgggtctacaatggaacgagaggaaaagaggtttgtgtaccatgtacgttgttcctctgatgagaataatgacccatacggaatggagggaggaatntgagcttcctgtgacccataatgtcgctgactaggactcgaagttcctttgcgctttttcgatggttccaccatttgaagagttttttcgggatttcaatcggtttaaatgaaagagattgaaaaaagatgaagtttgggctctgtggggagtgatttggataacaattgagtgagatattgctggaagaaaaatagtcggcgagggttntctagagaatgaatggtncacgtttcagaatttgaaatttgaatatatag

SEQ ID NO: 186825 - DNA, 353 bp, Glycine max
  unsure (1)..(353): unsure at all n locations
aattgggaagaagttgataccaatttataccaagttttatacacaaaagttaatcgttttcaccgactaacaactccctcaaatttatagtttttcttgtcctcaagcaaaaagagaacaactcacttgtcctcgagtgacaatgacatgcagtgactatgtacaaaggtgtatgctacaaagtgactaattgcatgataagagaatggagtaaaatgccctcatcactcgtctttcacaaggtatgcagttatccaaagaanagaatataatgtaacctgaacagataggtgaagttaggcataagacagatatcaatgaaagtagcttataccacagtctcacggctacta

SEQ ID NO: 186826 - DNA, 422 bp, Glycine max
  unsure (1)..(422): unsure at all n locations
tctcccttacatggtaatttgtgcaagccaccaacaagatcatgactattgtggctaagtctcacccaagtgtggggaaggaagaccctccaagaaagaaagtcattccaaaagaccttggacaaagtaagagaaagggaaaggactatgaagtggatgattatactgaaggatcaatgcaaaaagggaaaatcattttgttcgagggtggttgatctttntccctatttaatctgttaggctagtgacgttaaacaagtgatttttcggaggcaacccatgactcgaggtttattttctttttccttgatttcattntagtttcatattaagttggcttttcttttcattntaagttggttttagntttcagaattntattttcatagtcaatatttcattctagggtgtcttttattttt

SEQ ID NO: 186827 - DNA, 463 bp, Glycine max
tctccttccttttcctatatataggggaaggatggattatctttatgttcaaccctcctagtatctgagattcacttaaaattagtgagaaaaattgtttccgtgaagaaaatccaagccgaggcactttcgtaacgcttctgtgacgtttccgtgggtgaatttgcaaagattttcaaccgttcttcgtcgttcttcattcgatctttgtcgttcttcggtgttcaaccggtaagttcctgaaatcgaacttttcaattcattctatgtacccttagtggtcctcattggtttcgtgtgcttttattttcatttcatttactttccatacccccttttgacgtgctttagtcatttatttaagtcattttctcgcctaataaaaaataaagtaaatttccactgatcattcgtattgtaacatactttattttctgttaaatgaatttcgaccgttcgatca

SEQ ID NO: 186828 - DNA, 378 bp, Glycine max
  unsure (1)..(378): unsure at all n locations
cccagtcaccctcattaagaactagctcttttcttcctctattgcctttagttgaatacacctttgtttgattctctatatgggtcttaaccctctcatgcatcttctgtacaaattctgacccagatcgcccttctttatgtataaaagaaatgtccagtgggaggggaatgatgtctaacggtgttaggggattgaacccatagacaacctcaaaaggggactgcttggtggttctatgaacccccctgttgcaggcaaattctacatgaggaagatactcatnccaagacttatggttgcctttcataagagcccttanaagggtggataaagacctattcactacctctgtttgcccatcagtatgtggatgac

SEQ ID NO: 186829 - DNA, 444 bp, Glycine max
  unsure (1)..(444): unsure at all n locations
tgcttaagtagcttctatggaggctatatctttgagcttctatgangtccatcaacggtgattttccactatatagatgcaatggaagataaaggagaagaggtgagaggaggcgccatccactaagaaataagccatggaaggaggagctacaccaccaagaaagtgccttggataagaagcttagagaggaagtttcaatggagaaaaataatgagatagagagagagtgatgaaatcctacctccaagggcattggatagaagacttcaagaagattggactagagatgcaagagaagaccctatggttcttatgagccttatggtagaatttgggcccatgggctaagtgtgagcccacttatctttgtacatattagattaaggtttcattaatttcgggcctcgtatatagggctccataatgtaggtagggtaccct

SEQ ID NO: 186830 - DNA, 393 bp, Glycine max
gtatcgaatgacacggataagatctgattaatcaatagtcaatctccgcgccaaatccaggacagagacgactccaggtatgtggtaacttcgccacgacttgctgcgcaatgtcatttactgctgtgacgtacatggagacagacaccaatggaggctatgcccatgatcaacatatcactgtcccgcgttcagctcccgacaatccgaaagcgctactgggaggcagaccagtatcctttaaattcctacctagtattgcttggtataccgcatagtgcgcccaccaattgctcggtgaaatgcctcaatggcatgtgcgcataacttcgtgcatattgcgtatatatctaggacagtgcatatatggttgcaattattggatgtgtggac

SEQ ID NO: 186831 - DNA, 441 bp, Glycine max
  unsure (1)..(441): unsure at all n locations
tgtccaagggttctagctacttgtcttattctatagatntaaaacttataaacttgtaatgagttcaaaacatttcgattgaggaaatggtgttctactttttattccccacaacactccattagtttggataagatccaaaaaatggactttagtttcatcaaggtgagtttgcataatgaaattcccaaaagccaactctgttacaacaaacatatgaaatacttgcatattgtttccctaggatgtgtaacactaatgtttattaagaaagacaaatatttaatttgcaacaaaattataaagaaataaatacaatgataagaggataacaggtttcattattttagaacaaatgtagagtcatgtcttcatttaaatcgcacatcacataagatgaaatcataaaaaaaatggaataatcaagaaaatatgtgagtg

SEQ ID NO: 186832 - DNA, 478 bp, Glycine max
  unsure (1)..(478): unsure at all n locations
actcagcttctacactaatgcctttcagcacaaaacatacgaacaaggtctttatctatnngtttaatacagnggcacgggcaacaaatgttattaacagaaccaaatactgaatttcttgtcagctatgtctctgtccaaccccattgccacatgctaaaaggctatattttttacttgactaaagttataaatttttattttattaattataaaatattcaaaattcatacaactccacaaaacggcacaggccagaatcttatttaagaaagatttcttgatcaggcttttacttcaaatgaaatttctatcgaatcctatcaaagcatgcaatcgatactagcaccagataattaagataaaaaaatctcaagagataaggaaacatctactcacaatcataagccaagaaacccaagggattagatatatagaagtccttaaagccaccaatgctgttctatgcccagatgca

SEQ ID NO: 186833 - DNA, 437 bp, Glycine max
  unsure (1)..(437): unsure at all n locations
actcagcttctaaaggctcgtgaaatgggagtgttcccatattgatggcgacatgcatgtgcatgtgtttcgctaatggtgatggcgaaacccatggtggactcgctggcaggaatggcgacatgcatgggcatgtgtttcgccaatggtgatggcgaaacccatggtgtttcaccaatgtggatggcgacacacatggcactcacgtgaacctactacgctgacatggatgcatgcactgttactgcgtgttacgctggaaggaatggagaaataaatgtttcgccaataggaatggagaaacccttaccaaacccttacaaaatataccccccaaggaaaatgtttgaaaataaacccctctcgggaataagtttctaaaagaaaccccctgcggtcattatgccgcttaacacacacaccaaccacnagaagaa

SEQ ID NO: 186834 - DNA, 420 bp, Glycine max
tatgatatgcacaccataaggacactatgaacaaggaagaccacttctagcctgataggataccctttcaaatggagttttgatgtcaaaacacgcattccaaagcagttttagcaggagcaaaaacaattttgcagtagtgtaacagagattcagacaaactcttcatcccacagagataaaatggttaatagcaagaaattatcccaaaactctatcattcctctctaaccataagcaccaagtaataacatacatacaacatcgacaacaacaaatgccttatcccactaagtgggattggctacatggaccacacaatgtcattcagctcgattgaagaccaaatttcaaagatataatctaccatgagatccctcttaacaactttccctaatgtccttcttaggctccctctct

SEQ ID NO: 186835 - DNA, 467 bp, Glycine max
  unsure (1)..(467): unsure at all n locations
ntcatctgaataggggaaattgtgttggaggtttggtgttgctacttcttctagcatggattcatcgaaagtgtttgtttctaagttgggactttgtagagtgtcaaagttgaagtatgtgcttagtgccatcgtaacaaaacaacctgcaacatggaaaaacaagttcaatttagttgaaagttaaaaccaatatagaaatagaagaaattgtgcattaattgataattctataaccaccatagaatagaagaaatgatgcattgattaataattctatattattacatatatacatgcacatgcaagcttgcctagtgtaataatggtctaatgcatgtatatgtagacgaaggaagaacataagagacaagaacatgaagtttagttatgcatgtgcatgccacacggcacaagaacaagaatctntgctatagataattgtagcttctagctatagtatctta

SEQ ID NO: 186836 - DNA, 479 bp, Glycine max
  unsure (1)..(479): unsure at all n locations
aactcagcttgctcctgtgatgtgaaacaaacattcggttataatcttctaatatgtttttgggaatttttgctatcacaggagtcttggtcaaataagagattgtgaagaggatctggtgaatgtttcaaaagaggaagttgaatctttgctattcatgtcccaaccatcttgaattaagttgagaagtgaaatcaaattaatcttactaaaaatattggtgtatatataattgaaattttgttgtgtagagtagactggaactacatattatttcttcaattccacaatcttagggatatcaagattgaaaaccacattagtgattgttgggtgattcttaatcactacataacctacaaaataataattgataatagttaagattttctttttcatagcaggaaaataatattgtgaaagagaactaatganacaacatataatcattaggtcagataattgcataatgtattatt

SEQ ID NO: 186837 - DNA, 478 bp, Glycine max
  unsure (1)..(478): unsure at all n locations
actcagctttaacaagntccttcacaaatagatattacactgcttattactaacaaaaccacccatcatatcttccaaaaccccatacccacgaaatttaagagagaaagaagtccacccaaacctggattttcgaagtcccactcgtagccacgcacttcacgaccccgaagatgctctcctttcacgatttggggcagaaatgagcaccaaaggttgaagctttgtgtggagcttcaatggagaatgaagaagaagaaaggcaacgtgagggagagggagagagagagagctgttctgaaattgggctgagtgaagagagagagggttgctctttgggttttaataaaagggttttctctctctctattnatttatataagcaatgccacatgtctccatttgagtggagcaagaagggcccactttctcttttngactgtgacccatactcagttcacaaagtgaggagaatctg

SEQ ID NO: 186838 - DNA, 450 bp, Glycine max
  unsure (1)..(450): unsure at all n locations
ggacctataaaactaagctnttgttgagggccaattgctcttttgattcttgatttaataaaacatcggggtagacattgtcatctagttgttggtgaaggattccactatctactntgcttcggaaacttaaaggtagacatctctaaacatggttttgttccatgactttaactcagccttcaatagatttaaacttttggctaaccacacacattgggtagccatagataggttttttccatgcatcctccacaagtcacctgcaatcaaggtgacccaaccacatgctcataaatttaaaggatgatgggaaaagtctagtattgttctagaaagagcaatgaagatagccttaatttttaacaatcaatttcttgttgcactctcactagacttttcctaattaagggtatcatcattgcaaacaccatgatctagtgggtaaat

SEQ ID NO: 186839 - DNA, 417 bp, Glycine max
  unsure (1)..(417): unsure at all n locations
tgccaatggagtcgcgcatcattcaatttgttggatcgtctgtttacagaccancaccacgcgctggattaggaactcatgactgatgttgatgcagtgggcatcactgccatctggatctggattctgattatatgttaagactaaaacaattctgcaatgcctcataacactaacatttgcttctgatgctgangatcacgaggatagatcattcacgacgtagcactatttgacgataactgaaaggttaagtgtctttttacccgtaaaatgcttacctaattatgagcttaatctctgatattgtctctatgtaagctcttatttgataaaaatatacaatattaatctagctcttatcgtatcctatatttacttaatgagaatgttatatctactataatgaatgaatca

SEQ ID NO: 186840 - DNA, 436 bp, Glycine max
cacgttgatgcatgccatgtgatttttttatattgctatcaatatatcgactctgcgtctctccgttttcatagtctttcatcatgatactcaaacttatgattttattctctgaatcacttgaagaatctatgacattatcttcccaagtgatgtatcctttgttttctttcttctctttgaaatacctcttgtcagatatttcattcttcttttgaagacaggacaattgaatctcatgtgcctagattgatcgcattcagcattttggggctaaagaggaatcttcttctttcttctttcatcatcatcttctttcttctcaagtatttctttatgtagttgcattactctctaccattatgggaattaaggaatcaattcaatggcttccatatctctaaatctttacttctttaagatctgcttcgagttt

SEQ ID NO: 186841 - DNA, 370 bp, Glycine max
  unsure (1)..(370): unsure at all n locations
actcagcttgttggacggaacccctctttagttaaggagcttatattcttccttattgtgagangngaatcaattgagtaaggacatggaagaatattgcacgaactgaggaacaatctgctcaaggctcaagatcaaatgaaaagatttgtgaacaagcatataatggagctatgcctgcaggaaggagattgggtctttttgaaactgcaaccttatagaatgaagtctctatcaagaaagtcaaatgagaagctaagtccacgattttatggaccctacaaagtgatacagcgaattggggaggttgcttataaactggaacttccacaggatagcaagatacatccagtattccatatatccctgc

SEQ ID NO: 186842 - DNA, 280 bp, Glycine max
accaataagaagggccgacacatagaaccatgaccactcccagctcaaaaagtctcatctacttgtacaagtggcttacaatatttgaagcctttaatgcatggggtaaacgcccaaaatacacgaataagaatcaccctatgagacgcatccccacctttctccattgaagaagagagtttgtagtttactatgggatctagtacaaaatgttgagcagctggcaatcatacaagcaagtagctgtatgagtggtcccaacttccaaaagtcatttcaa

SEQ ID NO: 186843 - DNA, 218 bp, Glycine max
  unsure (1)..(218): unsure at all n locations
caaatgttaactaatttgaaaaaaatatattattaaaaagtgttgttaatgcactctgacgcaattnttaataaaaaatttatatttattaattctttaaacctatgtttaatctttataagatctcacttatttgatgtctataacgaaatatgtaaaaaaacctacacacaaccttgtcatttgaaattatatttaataattaatatttttaatta

SEQ ID NO: 186844 - DNA, 394 bp, Glycine max
  unsure (1)..(394): unsure at all n locations
tgacaagctaagtccaatagaataattacataatcttcttacctcaacgactacgtttgaagaagaaaggtgagaccagttgaggctaccttctagaagttccttgcttgatattgtctactcctaggggacaatgtggagaaattatgttatggccaaatattcctaggatctttctgttactatgaagtttataaatactaatgtagataacaagcaaggcatgaataaaatttccaattacctcactctttccctctctgntcttcttcttccttattgaatttttggaggtactaattcctcgaaaaccagcttattgcgtcctaacacatgttcaaaactggtaagcaacagttatgacccttgtatatgctctctagatcataaacct

SEQ ID NO: 186845 - DNA, 435 bp, Glycine max
  unsure (1)..(435): unsure at all n locations
gcttggaaggttccttntaccgaaatacaatatcacctgctctgtctcttattnttctatacaaaanagccgcnagaaaatatattttaaaattttaaattatgtgtaggaatgttggaaaatatttgtgttttaatttaaaattgataaatatatattacttatattaattctattttataaaataaaatatttaatttagattttcttaagattttgtcttaatgagtcaattagtttattacgtttattttgacaactgtagatgggtttccaacgatcatatttccaacggncatattntgntgatgcataaatgcctatatatatctctttcctcatttctaaaaaagacacaagtagagatagtctcgtttctttctcccaaaaaaaaaattttctctttcttttcctatgnaaaataactatttcttg

SEQ ID NO: 186846 - DNA, 464 bp, Glycine max
tgcagcatgaagctagacgaccttgttaagccgagatgtctttattatttatttggacaaatttgaatatgatgcagaagaaagtaaatttgagcctttaacccctttgaaaggctaatatttaaatttttttttaaaaatacttttaattaatatttgaatttttattcctttattagtatatatgtgaggggtagagggtgtcacatggaggattatgatagcgagataaacaccaacgaggccaccatgcagcccaatgagacacccatgcagcccattaatgccacaggaaccaaggaagcacgtggaacttctcgaatccactagaggcccacacatctgcgtgattacgtgttaagttagttaagcgtgttgggggtagcgagacaagctatatttgttataatagaatagtatttggttccctgtaattccactatatatgtatccgccatatgaat

SEQ ID NO: 186847 - DNA, 414 bp, Glycine max
  unsure (1)..(414): unsure at all n locations
atgacagggtgatattctntgagaaatctcttatgcctagtgtatactatccttattccatgcttcagttgcacgaagcttatttgtttttcacaaattatgcatgcacaatgccctttaacactatatccactcaaattcttatatgttgaaaagtcattaatggtacaaaataccattgcatgcaacttgaaggtctactggcaatacccatcaaacatgtcaatctgacccacaactttcttaagtcttcaatcaagagacttatataaacatcgatgtcatttcctggttgtcttggacccgaaatcatcatagacaacataatgtattttcacttcatgtataatcaaggaaacaagttgtaaatcattagcaagacaggtcatgaattgtgattagtgcttaagttac

SEQ ID NO: 186848 - DNA, 383 bp, Glycine max
ctttataaacttctctctggagaacatctgaagccaaggggctgttgcttttgcacccctttttactaaacactcccattgctttttggcgattctatttcagtaacgatacataactttactaatttcgcaaggatacttgttttcctttaataagttaccgaaccttacgggtaatgtatatactcctttgttagctttccgaatgttacggaaactcacagattgcgtaacaatacttccttttgatgttcagcacattacagaatcttacggattgcgtaacaatgctttcttttgacatacggtatgtctccgaacttcacgtattgtgcaacaaaagtagctaattaccttcaagctgtcaaacaaatgttgtatgc

SEQ ID NO: 186849 - DNA, 445 bp, Glycine max
  unsure (1)..(445): unsure at all n locations
cctcaagctcaaactggcaatctatatcatcagaaccgtgcntagcttttgatcngttttgatcttttccggctaaaaatacctggttaaatgagatctacgttttggtattactgaccttgattcttctctttctgattttcccttctctgaatttttttaaactccactcccctgcccaataaactacaagcaaaagattgcaagagttatctactttctagcacttttgttctctccaagatccaaagagtcccattatcttcatgaacatgagaaaaaaatgaaataaaataaaatttatataattataaatatatgctccaggagagaaaactcgatacctgtctttgttcaaaatctgactactgcagagccttggccccaaaaactataaaccaacagtatttaccatcttgcgtgacctatgatgtaaccacatcac

SEQ ID NO: 186850 - DNA, 440 bp, Glycine max
  unsure (1)..(440): unsure at all n locations
agcttctacctcaaccagttctgtttaatgtattcagacntccattagcgcactgtcttaacagatataagaaaaggtgaccttcaatgcattgatgaagaataatttattgtttgcatgaggcttaatttgataactatgcactcaccttgttcaggtaatttaactgtgtaatgatacatatgacagtgacggtaagaaaaaaccaagtctgaggatatgttaattgacttgttccctctaatgtaagcttgattgcgatccctatggcttttgtgctcataacctgaacagtttatttagtttgtgaagtataatataaatatgaagcttccatcaaagtgattggcgaaaacaaaaagtaccaaaagtgagctcaataatgagcataattccaagtaaaccagcatatttgtctgtccgtagcgaggttcataatg

SEQ ID NO: 186851 - DNA, 325 bp, Glycine max
  unsure (1)..(325): unsure at all n locations
ttgaatatgatcgaatcccactgcatgatactgataccttttgtctaacatgtacaccgcaatcggtggtcctactgtgaggtggacaacccgtaaccgggccaggtcacgtgggcgcatttgatatgttccaccactctgcttctctgtggggtctgctcacgtgcttctcttccacgcgctccaacagtgggctccgccgcactgtaacttcttcggnctcttttctattatcctctcatgtgaaatgaatccttcataatattgatatattaaactaaaatctatcacattttgtttaaatgggttatatctcttttttgaa

SEQ ID NO: 186852 - DNA, 445 bp, Glycine max
  unsure (1)..(445): unsure at all n locations
agctatataagcgcgggtctgggagacaaatgtcaagtggtcgcgatatgcgaagatgatgttccgagtacattggatttggtacgaccatgccctcctgagttccagctgggaaattggcgagtggaggaacgccccggcatttacgcaacgagcataatgtaaacctttacagttttaaaagctctatagttgggcctaggctttagagtttttccttttgttaaagctttgtgtcttttgtttttgaatttataatacaaggatctttcttcatctgttcctacgtctctacccattctcattcatttgcatgtttacttctttntctgaaacggcagatccgatgacgagtcccccgaaggtactaatacctgggacccgcctatcgacttcgagcaagaaatgagtcttacggaagatgaaagaaacgaggatgtgggac

SEQ ID NO: 186853 - DNA, 383 bp, Glycine max
  unsure (1)..(383): unsure at all n locations
tgtaagaagtatagtaatataggagaatgtntttggttgattgataatgtcttatattttaatcatgggttaaggagttgtacaactgatggagatatattacacttagttagggatgcttttgaaaatgagaatgagataaatgtttattttcatcatgaagtagatccaattttagaagaagtcccacaaatgttgtacttggaatgtgatccaattcgaaaagctgttgagaatgaggatgatttagatgatgtacctgttgctggccatgaggaaggtaagtttaattcatctgtacttggtccgacatggttaccataaattaataatatgattaaattttactttatgaccattgatgcanatgttggtgcttgaga

SEQ ID NO: 186854 - DNA, 438 bp, Glycine max
catcaagctgcctatagagattctgaaagaaatgctgttgaaagaaccagttccgctcccgaatatgacagccatcgttttaagagcactgagcaccagcagcgcttcgaggccatcaaaggatggtcattcctccgggagagacgcgtccagctcagggacgacgagtataccgacttccaagaagagatagtttgctggcggtgggcatcgctggttacccccatggccaagttcgacccagacatagtcctcgagttttatgccaatgcttggcctacagaggagggtgtgcgagatatgcgatcttgggtgaggggtcagaggatccctttcgatgtagatgccctcaaccagttcctgggataccttttagtgctggaggaaggccacgagtgcgagtatggccacaggaagaaccacgccgattggtttgat

SEQ ID NO: 186855 - DNA, 442 bp, Glycine max
  unsure (1)..(442): unsure at all n locations
ctggtggttacaagtatattataatattgcctaattaattttatattntcatgtaatggcataactttacattaattaatatttacgaatgtaggtgacttgtggaactattggtctttctacagcaacagtaaaacttgttaatattgatggtagcacacatgttgcttgttctattggtataagagcagtggattcaacttacaaggccattaatctcgttgtgaaggtttgtaatttacaaacatttttcactattaagtccttttcattttaagagctttatcgaacatatttcaacctatataaacatttagcccctattgtgatatgatatcttatctatcctacaataatctaagagtttaatttctatggactacaagtttaanaatttcatagtatcaaatcaataaaacaatatactaggtatgattgtatc

SEQ ID NO: 186856 - DNA, 399 bp, Glycine max
aaccttgttctatgcaagtgaaaatcctgcagaagacacaagtgcggtatatcttttcattctcttctccctttgccagaagaacgaaagactagctgcctgaattcttttgtgtctctcttctccctctgccaaaagaacgaaagactaaccgcctgaattcttttgtgtctcccttctccctttccaagagaattcaaaggaccccgcctgagaattcttttgattcttccctttcccttaagcaaaagatttcgaaggactaactgcctaagatatcttttctttcccctttacaaagattcaaaggactaaccgcctgagaattctttgtcccaacacataggagggtacatcctttgtggtacaagtagagggtacatctacctctgggattgt

SEQ ID NO: 186857 - DNA, 319 bp, Glycine max
  unsure (1)..(319): unsure at all n locations
agcggctgaagattctagttccgctcccgaatatgacagccactgttttaggagcgctgagcaccaacagcgcttcgaggccatcaaaggatggtcatttctccgggagcgacgcgttcagctcaaggaagacgagtataccgacttccaggatgagataagttcccggcggtgggcatcactggttacccccatggccaagttcgacccagacatagtcctcgaattttatgccaacgcttggcctacanaggagggcgtgcgagatatgcgatcctangtgaggggtcaagggatcccgttcgatgcagatgctctc

SEQ ID NO: 186858 - DNA, 450 bp, Glycine max
  unsure (1)..(450): unsure at all n locations
agctagatcntttagttatgttatctttaatctttaatccctgaacgaactattcaagtgtgtaattcgaactctaattatcttttaattcgttcctaaagatagatcgccaaatctggtgctaactgcacattaatctgttaaagatataacagatttatgtgtccagtattttcgggcaagatgtcctggacatcgtatccgacatcgtggatcctgcagcttcaattcttcatttgacattttatcttgccttgtgcattgtgcagcccaatctgattccttgacataacgttggacatcatgtgcagcaactccagctttccttcaatgtctaagagcttatgttttaacaaaattctagccaatctnttaaagctcagtaaagctaagcactaacaatctcnccctttggcaaatgttgtctaaaacatacttagacacttgctg

SEQ ID NO: 186859 - DNA, 429 bp, Glycine max
taaacattcaatttcgagcgtctcgtttattacggaactcttatcaacatacgagaaagaagttattgtcgtttgaatttgctctgagcttcaacattcaatttctagcgtctcgatatattacgggactcaatcagacatccgagtaaaaagttattgtcgtttgaattggctcataggttcaacattcaatttcgagcgtctcgatatattacgggactcaatcagacatccgagtaaaaagttattgtcgtttgaattggatcagaggttcaacattcaatttcgagcgtctcgatatatgtcggaactcaatcagacatccgactaaaaagttattgtcgtttgaatttgctcagaggttcaacattcaatttcgagcgtcccgatatattaccggactgaatcgaacatccgacgtaaaaagta

SEQ ID NO: 186860 - DNA, 425 bp, Glycine max
agcttcaagaatcaagattcaagaacaatcaagtttcaagaatcaagataagtactaaaaaagtttttcaaaacattgggtagcacaagaatttttcataaaatcttttaccaaagagttttactttctcgtaatcgattaccagaaagtaataatcgattaccagtagccaacattatttttcaaactgatttacaaagttgtaatcgattaccatgagcatgtaatcgattaccaatgttttaaaacgttagatttcaaatttcaagagtcacaactagtgataaaacattttcaaatcattttaaacttgtgtaatcgattaaacaatacttgtaatcgattgccagagtttctaaatattctgattttcaaatttaaacatgaacagtcacattcgttgatgtgtaatccgatacactatg

SEQ ID NO: 186861 - DNA, 337 bp, Glycine max
ccttgatactcagcttctaaggaggtgagcttagttattagaggggtgtgtgtatctaagctctagcttctcaagaaagcttcttaagtaagtttctcaaggaagctacctatgctataaatagaagcatgtgtaacacttgttgtaactttgatgaatgagattcttgtgagacacacttcaaagttcaacttctctccctcttttcctccttcaatttcgtgctccccttctctctctctttttccccaattgaagtttcctctctaagcttcttatccaagacactctcttggtggtgaagctccttcttccatggcttattccctagtggatg

SEQ ID NO: 186862 - DNA, 438 bp, Glycine max
  unsure (1)..(438): unsure at all n locations
tgcatgtgttgcactatctatgctggcaagatagtcctgaaacgtgaagntgtctaaatattaacgagaaattgataagccagatcaacatatttcccctttaaaatttaaagaagataacatacaacagtgctggtcagagcattgttctcatcccaagtgctactttcatggttttctaccttgaaatccttgaaattactggtcaaaaacaatgtatcaccattgacctgaaagataagtacatagcacaattaatttctgcaatttaatattaaataattntaacaagcttttacttattcacttggataagatggtcggccattagtacaataaaaaatgaaacttcacaagatactatataaagaatcatccacatataatttactataagtccaagaaaactggctgcatgacttgacctaagtatccaag

SEQ ID NO: 186863 - DNA, 385 bp, Glycine max
ctacctacatcttggaattgatacatacagacatttgcgggccatttcatacaccttcagggaatggccaacagtattttatatcattcatagacgattactttagatatgcatactttgttcttatacatgaaaagtcacaatctctggatgtgttcaaaacatataaagttgaagttgaaaatcaactcaacaaaagaataaagtgtgtcacatctgaccgtgatggtgaatactatggcaaatatgacgatttatgtgaacaatgtccggggcctcttgccaagtacctagaggaatgtggaatcgtcccacagtacaccatgctaaggtcacctaacatgaatggtgtggctgaaagacgaaacacaactcttaaagatat

SEQ ID NO: 186864 - DNA, 413 bp, Glycine max
  unsure (1)..(413): unsure at all n locations
agctacctagtctataaatagaagcangtgttatactngnngttactnngattaatgagagncttgngagacacaactcanagttcaacttctctccctgtttcttccttcaatttcatgctcccccctctctctttctctccctctntcttttcctccattgaagcatcctctccaagcttcttatccaaggctcatcttggtggtgaagctccttcttccatggcttattccttaatggatggcgcctcctctcacctcttttcctttgtcttccgctgcatctccatggtggaaaatcaccattaaaggacctcattgaagctcanagatccagcctccatagaagctccacaagcaagcttccatcactatctctctcacactctttaattaatttctgtcgatgtctt

SEQ ID NO: 186865 - DNA, 393 bp, Glycine max
tgaggaagaacatgaacactctatcttagacatggagcgttcattccttttctaacctcattcttagctccaacacatctaatgtcaccttggatagagccaagttgatttatggtattattatgaagatggatatgaacttagggtacctcatctcccaccagatctctctgattccacaacatgatacatccaaacttggattccctgccttgatcacagctctatgcaaggccagaggagtccagtcagattctagatccctagagaacttgagccctgccattaacttggcatatattaagaaaaaatgttggaatcttgatgatccaacagtgacatatagagggccaaagaaagccagaggtaacagatcagatgtcctcactactt

SEQ ID NO: 186866 - DNA, 461 bp, Glycine max
  unsure (1)..(461): unsure at all n locations
tgcactgagtctatacatcacaaagtgatctgattctacgggctttgaggtctccgatttatttgattgcttgcttccttgcttgccctggtccctcttttgtatatgttgaaatttgtggaatgtttattcaaaggaaaaaaagtgtttgagagccttgacttgtggtcttggcattcaccattttgtctggccatttaaagcacttataaacttcttgttgtatactaggcattatactttcagtttggcatcaagttgaacaacgtagtggatacccaggtgagctttcttgttactaggctgcagctttccctgttttttctttcccaatcttataatgtcccgttaagttggcagaatgaatagttttcacttccaaaatagcacatatttcttactaatggactcaatacaattntccttgagcaatagttgatattggagtgcaacattgtata

SEQ ID NO: 186867 - DNA, 426 bp, Glycine max
gatgtgtgtgctgtatcacaatattgctttgtctctagcaatcatattctcaatcaaatccatggctttggcaagggtcttcaattttatttatcctcctgcagaagcatctaaaatcttctaagattgtggtcttaacccgtcaatgaaaattataagctagattgggtctgaaaattcatgaatgggcgcctttcttaataacccacgagatctttacaaagcctcactcatggactcgtctggatattgatgaaagaatgaaatggcaacttttccttcaataatcttggactctgggaaatatttcttcaagaaattttcaaccacttcatcccaagtcttaagactgttacctttaaacgaatggagccatcttttcatctctccagaccaagaaaatgaatacaagcttaattaacagca

SEQ ID NO: 186868 - DNA, 402 bp, Glycine max
tttatccagaaaacgacagtgtatctcttttagcttagtgagagtgattctcctaaattctcgagtgattcaacaacaccctggctgtatcaaagactttccaacctttgtgagttgccctcgctggaaagagtgattctttccttcctttcatcttcacccttgttctttcaaaccacaatttcagaaaatccatctctgcccagaattatcttgtggccataactcccatttacgcactcaaattaagtgatttttgagccttaaatgactttaaaaacgagacctttcacctcgttttggaatcacctcattcggagccccgtagcttcagatattgccatttttattatttctgtcccgccaccacttaacctacattttaccatcccattcattcat

SEQ ID NO: 186869 - DNA, 447 bp, Glycine max
  unsure (1)..(447): unsure at all n locations
tcaagcttgccacccagctcgcccaggcgagcaagggtgcttcctctatatacaacagtcttctagaggaatcttctggagggcccaagtgggcctagttgctgtttgcacccccatttttactaaatacaccccccttgcccttttttggtgattcttttttcgtaaagttacgaaaacttaacggatttcgcaacgatacttgttttctttccgtaacgtcacggaaccttgcggattacataatcatccccttttttgacttatggaatgttacggaacctcactaattgtgcaacgatgcttccttttgatttccgatgtgtcacggaaccttatggattgagcatcaataccttttttngatttccggcatgtcccgaaacttcacaaattgcctaatgatgggtgccaagcacctcacaaggaccatacaaaagttgcatg

SEQ ID NO: 186870 - DNA, 391 bp, Glycine max
  unsure (1)..(391): unsure at all n locations
agttgaaaagtagactcacttagcttatatttataggccttttacacattattcatatatacacaatacaaggcttaatgagaagacagtttgatgggacattacaatgctgtcttctgaaacaagctaaacataaaataccagcaagcatgaatacacataatttgacatagaagtgttctcatctaacttctctaaagactgaagtgcatagattgattttaacttatgagagttcagttcattctaccttcttggtttttttttctcctataagngtttatggagaaatttatcaaaacaggaccttaatctttataaagagttgttaatgggctatattattgtgattgccacaatgaagatgagaaggtgcttggattatatgtta

SEQ ID NO: 186871 - DNA, 433 bp, Glycine max
  unsure (1)..(433): unsure at all n locations
agctagtgcgaatcanatcactcctgcattttatctatagcanagcattttntcttnttttacccactcctcacgtttggttttttagggaaaaacaccataactaaacgcgccacaaggcatccctatcgccccagatccaaatctagaacgatgggtgatcaagaggagatacaggaacagatgaaagccgacatgtcggctctgaacacaactcgcccggccggtaattccaacgcaacaaggaacttcccttcgaggccatttcaagaattcaccccactcccaatgacgtgcgaagacctcttgccgtccctcatcgccaaccatttggctgtggtaactcccggaaaggtcctccaaccccctttcccaaagtggtatgaccataacgcaacttgccagtaccatggggggtgtccggagcattcca

SEQ ID NO: 186872 - DNA, 307 bp, Glycine max
  unsure (1)..(307): unsure at all n locations
tcgaaattntagttttatttttctatttctgtgaaaataacctgtactaatctcttgggttggcttatattttgcatatggcatctaagaagaggaaagcaccctctacacttacccaagccagatttgatagatccagattcacatcccanaaggcttgggagagatacacagacatagaggtgccgcgaaagctactaccagagaggaatgtggtagtctattatatagagtttgacgagttcaaggaggcactcgagagacgccattgngatgagaagctgacttgattttctgaaaaaaatat

SEQ ID NO: 186873 - DNA, 430 bp, Glycine max
  unsure (1)..(430): unsure at all n locations
nagctaganatcagattttagatagggagtttggactgcgattcatagctttgcatgtctagggtttctagagagagaaaggtccaagtttcagagagttttgagagactttgctgtgtgaagatctgctgagactagagcttgaagcaggagccgatttgcgagcttgagatgagtttatgagtgattgtgagatcctagaggtgaaggagacatcctcaccacttgtatttttgcaatctttcatcttgttcttctctttgttgtaaagaaggcttcctggtatagaaagctaaatcctctattggatcttccctgtaggtacctaatgtaaatatatttctatctatttaatgttgttttgtgtgttctctgtgctatctgcttttcactccagtatgcctttaccttgatcatgtagatgcatgct

SEQ ID NO: 186874 - DNA, 457 bp, Glycine max
  unsure (1)..(457): unsure at all n locations
tatgaaaaaatggctctgataccattttctataactatgtgagagtgtgtgatatagaaaacgaaaaaaaataaagctgatattattgctcagaaagaaaaactcaatgagttaaatacaacaaaggtatttaaagagttctgactagacaaactaaccacaactaactctaactacctctaactaacttctaacagaatgtaaactaactctaactacctctaactaacttctaacagaatgtaactacttgggtgcagtttagtgaaaactaacagtccttacaacatatacactgttgtctaatatgaaacaaaactatttacacggntatgtatttacacactcatactccaatacctctanaacctataattntgttcattgatagaagaactcaaacctacccatctttaagcaatctagaattcctgaaattgtaagacctctaacaact

SEQ ID NO: 186875 - DNA, 429 bp, Glycine max
agctaccgttgttcaatgttgagcgtcttttacgtgatgcgcctgaatcggacatccgagtgaaaagttatgaccatttgaatttctcgagagcttccgcttctcaatttctagcgtgtcgatatattatgcgcctgaatcggacctctgtgtgaaaagttatgaccatttgaatatctcaagagcttccattgctcaatttcgagcgtcttgatatgtgatgctcctaaatcggacattcgagtgcaaagttatgacccttttaatttcttgagagcttccgttgttcaattttgagcatctcgatatattaagcgcctgaatcggacatctgactgaaaagttatgaccatttgaatttctggagagcttccgttggtcaatttcgagcgtctcgatatgtgatgcacctgaattggacatccgagt

SEQ ID NO: 186876 - DNA, 404 bp, Glycine max
  unsure (1)..(404): unsure at all n locations
tctntttaaagctcggtcggtcgtctattctggccgactccgactggcatttttttcgatcaatatcggtgaataatattttttttgccgaggtgggcttatgttttcctcgcccgataaatcggaacatgccagtttcggccgaaacgaaacatcgcgtgaactcgcatggaaaaacctaaccgacctacattggttagtttttatgcaacaccgaaacaagaaaactttccctgccgtaagaaaaaacattatcggccagcgagcgtgtttttttaaaaaaaattgcgcaatgtcggctgaaaaatatcaagcggggccatttcacgaccgatgtccgctattgagtattctattcaatcccttgatgaaatttgcatgatgtcgattacgaaatggttgat

SEQ ID NO: 186877 - DNA, 447 bp, Glycine max
agcttcgagcaatcccaatgtttcttctcttcgagtaacacattatagtcaaaggcagatatatgcattaatgtataaggtttatcaactactcaaggcgatattaatactaaagaaaagtccttataaacacagaatggccagagttgccaatctcaaagttgggataaccatatatataggttatctttccatatctttatatatcttgagtacctagaaaataagaaccttgctcttaattagaatatgggtatgtttcatgttacttaatttatgttatgaaaaataagtacgaatttttttttacatgtaaattatttattatgcttcaactattgatatatcttgtatagacaaaagtgttaaacagtaattactttttaaaataaactaaatctattgacctctatatcatacaagaatgtttgcatgctcttattgtga

SEQ ID NO: 186878 - DNA, 457 bp, Glycine max
tactatgacttctataaaaaaagtgataatgagaaaagttatgtcaaaatgattatatcatgccttaattatatataggaaacaaactaatgactcgttactgataaacttctaaacaattatatatctaatagaggtgatggaagagaaagaaaataataaatgtgtttgaggatgagatgagataaaaaaaaaaaaatagaactaaagtggacataaaaattgaagtatgaaattaaaaccttcaataataataattaagttggagaaatatacaaaatgccagaaggggagtcttttattatcgaacgaataggattaagaaacccaagtactgtaaatatattttaaatttaatatttctaattttctgtcgaataacattttaaggatattaattaaaaattaataaataaaaggagcttaaatatcttgtttgtccattaaagctatcttg

SEQ ID NO: 186879 - DNA, 301 bp, Glycine max
agcttaaacattcaatttcgagcgtccctttatttacgggactcaatcagacatccgagtaaaaagttattgtcgtttgagttggctcagaggttcaacattcaatttcgagcgtcccgatatattacgtcactgaatcggacatccgagtaaaaagttattgtcgcttgaatttgctctgaacttcaacattcaatttcgagcgtctcgatatattacgggactcaattagatatccgagaaaaaagttatttcctttgaaatggatcgtaaggtcaacaattaattttgagcggctcga

SEQ ID NO: 186880 - DNA, 429 bp, Glycine max
  unsure (1)..(429): unsure at all n locations
gtaagccaattcatactacaataactgtntacttggatttttgtttgagncnccgaatataacgaaacgctcgaaattgaatgtttaagctttaaaccaattcatacgacaataactttttactcggatgtctgattgagtcccgtaatataacgaaacgctcgaaattgaatgtctaagctttgagccaattctaacgataataactttntactcggatgtccgattgagtctcgtaatatatcgacacgctcgaaattgaatgttgaagctctaagcctattcaaacaacaataacgttttactcggatgtccgattcagtgacgtaatatatcgagacggtcgagnatgattgttgaacctatgatgccaattaaacgacaataactntttactcggatgtctgattgagtcccatcatatatcga

SEQ ID NO: 186881 - DNA, 428 bp, Glycine max
  unsure (1)..(428): unsure at all n locations
tgcatgattnacattctctccttctctcatgcaaaatcttaaagctaccggacatcatcaaaattttcatgatttacattctccccctttttgatgatgaccaccacctggtggttaggagcaacaacaaagaaaaaatatctatttgcatataagttattccccttggttttgcaatgattgcttatatgagacagttgaagatttcatatttttcatatgtaaacaaaatgtctcatagacaataaataaatcttcttactatttgaatctttatctgtctcttcccctgtatcaacattaaaaacanatcatgaatagagaggagaaagatgttaccacctttcgcaatgtatgagaaatcagtgataccaanaggcattaacaacatcattcaatattaataagccaaaacaagacacttacac

SEQ ID NO: 186882 - DNA, 377 bp, Glycine max
acaaaggtgatgactaaaagctcaaaggttattcacagaatgagttcaagatattcaagatagaatcaagaacacttcaagattcaagaggaaagttgaattcaagaatcaaagaatctaagattcaaggatcaagctttcaagaatcaagatcaagattcaagactaaagattcaagaatcaagagaaggcttaattaagataagtatgaaaaggttgtttcaaaaactgagtagcacatggttttttctcaaaacatgtttaccaaagagtttttactctctggtaatcgattaccatattgttgtaatcgattaccagtagcaaaatgaatttgaaaaagttttcaaatgaatctacaactgtccaattgattt

SEQ ID NO: 186883 - DNA, 460 bp, Glycine max
  unsure (1)..(460): unsure at all n locations
cccctaattgaggaagaagaagcaagtgaagattataatatttgacaactctttatattntgtatcaaagtccagtctacgtgtcacaatctgagataatttgtcacgttggatagtctatgtgggattaaaattgccaataatgtacctcactagcggtgttactttcaaatttaatggcaatgactattttgcaaaacttatccaaagatagggactatttttaacatttcaaaaagataggggctgcaaaaagggtcaaaagtcagggaccaaaatgtctatttataaaattatttctagtgtgtgacgttaccttttgttgggattagaaattttaaaattctagggaatntgaaatgtntagaatntaactngctttgatttaatttcatttatttttacatgctttgtttggataatcaattcaaattcttcaatttaaagttttatttggata

SEQ ID NO: 186884 - DNA, 363 bp, Glycine max
agccccctggaagaatcttctggaaggccccagtgggcctggctgctatttacacccccattattactaaatacaccccctgccttttttgtggtgattctttgtctgtaacgttacgaaattgtacgaatttcgtaacgatacttattttcctttcgtcagggtacgaatccttacggattatgtatttactcttttctagctttcgaagaagttacggaaacccacggattgcgcaaaaacacctcttttcgactttcgccacattacgaaatttcacggatcgcgcaagcctgctgccttttgatttctgagacgtctcgggacttcatttactgtgcaacaaaagacgccaagtatctc

SEQ ID NO: 186885 - DNA, 465 bp, Glycine max
  unsure (1)..(465): unsure at all n locations
ctttactcactgattctaccagttaacaaacccttcgcatatgtatcccttttcagatttcttacgatgtcgcaaggacaagcagttccgtttgctgggaagtggcaacactttacagtcaggaatgatggagaaaaggtggttccagaaccacatggtgacgcagaacagacagaaacctgngaatcagaggtgatgatcccttttgcagtggaaagaacggtttacgcttttggtggacccctgccagaccaagcatcactttcgagtaaaatgagtaaggtatttccctgctaccaaacttgcgaacctaggatttttgatagtgagccttacaactntaattgtttaagcaaacccaacaaactctttcgatccgccccgtcaatagcccatatggattacctgccttggcttgatcgagtcgaacaagcgtatgaggatttcttgaagacatatggcatc

SEQ ID NO: 186886 - DNA, 275 bp, Glycine max
tatgtgcggacaagaaggcatgagtcctaatgggatttcacctgaatcacggagacaagaaataggaaagagctcatcataggaatacctggagaggactccccccatagagcctggataaacttgaagagctcatggagaaaaagagaaaaaaagaaggggaccaaatgaagaaaaaaggaaaatgacttagtggttacaacttatatcaatcacaggtcaagcttcatttaacagagtcctgaaactttgaaactctaaactcttgaaactct

SEQ ID NO: 186887 - DNA, 365 bp, Glycine max
acaaactctttcaataggtgcagatgcagatttctgattcatggcaagctgagttactaagttgaccaaggcatcaagttttcccttaagctttttattttcaacagatgaagatgaatccgtggccacctcatggactcctctaaggacaatagcatcatttcttgcactgagttgttttggagttggaagccatcttctcaatcaaattcctagcctcaacaagagtcatatcacgaagagctccaccactggcagcatcaatcgtactcctctccatgttgctaagtccctcatagaaatattgcagaaagagttgctcacaaatctggtggtgaagacagcttgcacacaatttcttgaat

SEQ ID NO: 186888 - DNA, 443 bp, Glycine max
  unsure (1)..(443): unsure at all n locations
atttccttttagtagggaatctatccttcctaagatgtgtccnaacccattcaccctcattaagaactagcttgtttcttcctctattgcttttagttgaatacacctttgtttggttctctatttggttcttaaccctctcatgcaacttctttacaaactctgacctaaattccccttctttatgtataaaagaagtgtctagcgggaggggaataaggtctaacagtgttaggcgattgaacccatagacaacctcaaaaggggactgcttggtggttctatcaacccccctatcgtaggaaaattctacatgaggaagatactcatcccaagacttatggttgcctttcagaagagcccttaaaagggtggataaagacctattcactacctatgtttgcccatcagtttgtggatgacaagtggtagagaaaagaagt

SEQ ID NO: 186889 - DNA, 446 bp, Glycine max
agcttcggaagaaagtgatgaggtacaagctctaaaggcagatcttgaaagagcccgagtagtcgaagagaagttcaagtccatagccatcaaagtctgaaaagagtatgatgaactaagggacgtcaatatggccaccgctgatgccttggaacgagaaaccaagaaggcccaaaaggaagaacacgtgccagcaaagttttgaggggctttatagggcagcaatagtaagctcaagctccgaagaggtgaaaggaatcatcacgggtcaaaggcatgatcttgaaagacgagctaaaggcttaccttaagtcgaaaagaaatttgtcccaacagttaagcgagactgaagggaatatgtgggccgtcatcgatgagtgcaaagagaagctaaatctagcggcgactcacgagcaaaggctagaggatgagtacgccaagatatc

SEQ ID NO: 186890 - DNA, 403 bp, Glycine max
gcttcaatggcttagtgaggatggagaggtgcaagtaaggaatcaagcggagttttatatttccattggaaaagtacaatgataaggtgctttgtgatgttgttcctatggaggccagccacttactcttggggagaccatggaaatttgataagagggctaatcatgatggtttcaccaacaagatctctttcacgtatcaaggcaaaaagatagtgctcaaaccattgagtccacaagaagtgtgtgaggatcaaataaaaatgagagataaaattcttcaagaaaagagaaaaaaagaaaaagagagcccaacacttgagagttcaaaaagtgaggacaaaaagagggaaacacatgagaggaaaaagatgagtgaaacacttgaagtgaggggagaatt

SEQ ID NO: 186891 - DNA, 443 bp, Glycine max
  unsure (1)..(443): unsure at all n locations
agctatacaatgtacaaaagagactatgtttatttatatgatgattgaaaatgtacctttgaatgactggtcgttttgaatttgaatctgacattagaattatttgtctttgtttatttgttatgttaacataaaaattattagttaattgttgttttttcaaaaataaaataaatggtgcaactaaaataaagtacgcatgtatgataaatcgttgtctgagttgacaatacattgggaaatgtaagcctattatcataaaacatgacagcacactataagacttgactacagattgngaaatgcaactgtgttaacataaagcgtgacaggacactgtaagacttcactaaaaattgggaaatgaaagcgtgttaacataaagcgtgttaccatgtcacgtcattggtgtgattcacaacacagacagaaaccatgtgcac

SEQ ID NO: 186892 - DNA, 393 bp, Glycine max
acactacatgggagccgttggatacactactccggtcttacaaccttggggacaaagttggtttggttgagggagggtgatgatagcaattcagatatcttggaatgggaagagcataagagcaccaaggaattggaccatagcaggcccagaagaaataccataaaacccacacgctctaatgactgtgtttgaggttgttaagcaagtactaaaagctactttgttatgcccattacctatttccactatccctcccatttagttagttattataataaaagaaaatacatgctgttatgaatctgttggcactgtgagccattagtttgtataactctggtgcagaatctctgttaataaggagttgaatataataaacagacatattta

SEQ ID NO: 186893 - DNA, 436 bp, Glycine max
  unsure (1)..(436): unsure at all n locations
agctagcaagaagaagaataaacagactcctcttctcttgattaacttgngcataacaattgagaatgaaggttccaagttcgattttaggagaaataatgagataaagcttaaggttagttgacaagatcaaattgacaacatgaatgaccatttgatagccagggtggacttgccaaatgctgccatatatgcatattttgccttctgaatttttaatcagaaatggctaaagtagacttaagcaaaaatggtaaaaattactttggctgaaattggtaaaacttatcctaatcttctagattagtgtgctaacttcctagattaatgtgcaaacctttcttaagatatgtgtactctgagtaaacctcacacaaagtttatacatacagagacaaagtacattgtgactcagtgcagaatgcaattcttgtat

SEQ ID NO: 186894 - DNA, 450 bp, Glycine max
acttcaaactcagctgtcttgattttctaaatcttttattatgcttgatctatatacttgcccttcatttaactgtctctgggcttggcggccacgctcaacaaagtactttccacacctattgtacattgatttgaccaatgctgatatgggaatgttgcgataatccttcaaaccttattgatacattctgagaggttggttgtcatgtggccatatcgacatccttctctatcataagccatcgtccatttttcatttgaaatgcgatcaatacatgttgctatggctggactcagttcacgaacattttctaaattttgatcaaaaatgtgcttgccaggagtgtaggctgcataaaattagttatgaataacacatttaagtatatctgaaagttaaataaacgtgaccatcaaatatgaaatcttacccgatttcttcaacatt

SEQ ID NO: 186895 - DNA, 449 bp, Glycine max
agctagacagatgagttaaacaatatcattttgtatagataattatataatacatgagctgatctatagccattatatctgcatgtaaccctgattatagtggtagcaattaaatcattattcgctagaagtaattacagtatattcataatgtgattgtgtattaccaagtttttcatcatctattatccacaatagtggtggttccaaactgaaatgaatttgtctcttctctggacattattgaagcaagtaatcttctcttcaggcgacggaaaaaactaatacgcatatatgctttgtccattatcttgagtatacaatagtataacatgctaatacatatgcattctgcaggtaggaatcaaccgagacattcaaaatattaatactgtggcagacttgaatcatgtcgcagtactatgcatgatgtcaatggatcatacaaa

SEQ ID NO: 186896 - DNA, 412 bp, Glycine max
  unsure (1)..(412): unsure at all n locations
tattagagtattaacacactctctgtattacactctncattgttggnngaaanntattgagaattataaaatcataataatgactcatcaaatgagtagggggacctgccaaatttgtgaattttaaaaaatttgagccaacaaaaaagagtgtcgtcaagagaatgtgttagagactatgttgctaccatttctttatttaagaatggggtctgtagttattagtgaaaatagaaatagaatatattttccttatgtcagacaggctcctgatttcaatttcctcaaacttgtgttgcatgtgcgatagcaacatgctccctgctatgacatttgtcatggctggattttcacgtaaattcaatgcatcatcacttaaggtaagctctatcctaattctattcattcgtac

SEQ ID NO: 186897 - DNA, 377 bp, Glycine max
  unsure (1)..(377): unsure at all n locations
atgaagcttagattaagttagtctaaacctacgagggctgtctaaattaagcctagttcaacatgatggatctgaagacgaaacttggattgattcagtctaactatggatcgaaggttaatatattatgctacaacatataacacaaaagcatgattgattagagaaacatctttatatacatcagcttgtttgctacaaagacccaacatttttacctactacaggtaattntacttacttgcattttaattcttttagcctacattgtattttaaagtctgtatcaaccataaacattaatgtttctttcacaaagccttagttctgaatgtaacactgattaatattaattccctgagtttgatcttcgattc

SEQ ID NO: 186898 - DNA, 442 bp, Glycine max
agcttcacccaataatgaatggtaccactcttgtcatgagcgtggacaaaaggtctccagtttgagccctgactatctaccaagcatgcctggatgacgaagtcgatgtagactcgtgcgaagacacttctaatagaggcccaaagcctattgatgatgccaaagaatcaaggattaagcaaagtttcaagcaaagattcaagaatcaagtttcaatattcaagactcaagtttcaagaatcaagattcaagaataatcaagatcaagattcaagactcaagattcaagaatcaagaagaagactcagtcaagataagtattaaaaagtttttcaaaacattgagtagcacaataagttttcacaaaatcttttaccaaagagttttactctctggtaatcgattatccgaaagtagtaatcgattactagtagccagcatt

SEQ ID NO: 186899 - DNA, 390 bp, Glycine max
  unsure (1)..(390): unsure at all n locations
tgagatgaagaagtcttgaagggggaattcttctgcttttattgttgaccatagagtgtacctggagatatgtctcgggggtcaagagaccttggggacgtcangtggggtgctattgcccaaaaccaagcttgaccaatcccgacccaccccgggcatagtcagtcagtgagaacctgtgatgtacctaaacaggcgagctcctggttgtcaacagatcaaaggaacaaagaccacaaagcatggatgcttgtggtggctggccagctgtgaattctgtgtgatatgtgattatggcctctggtaatcgagtaccaagggtgggtaatcgattacaacgcttaaaaatgaagacaggaggctaagatggtctctggtaatcgattacta

SEQ ID NO: 186900 - DNA, 426 bp, Glycine max
agcttgaatgtgcgtaccccaccatttttttatagtaaaacactgataatgtgtctactatcattgttatcatttctttctccgtcattgagggaaccacttgggctgccaaatccctccacctttgggcgtattctttgaaagatccctgccccctcttgcatatgctctgtagttgcatcctatccggagccatatcagaattgtactaatactgcctaacgaagtcaaccattaggtccttccaagaatggactcgggaaggttccaagttaatgtaccaggtaacagctaccccagtaagactttcttggaagaaatgtatcagcagttcctcatcttttgtgtatgcccccatcttccgacaatacatctttagatggttcttggggcaagtagtccccttgtacttatcaaagtctggca

SEQ ID NO: 186901 - DNA, 447 bp, Glycine max
  unsure (1)..(447): unsure at all n locations
gacctataaaactcagcttctctaaattacattgatgtntgtatttaggggaggttgttgtatgccattcttgttttaagagtagtgtcccactggtaagactaactttccaaatgtttgccttcgcaggaaatggccccgaggaagcttgcctcanagaggtccaggaaggacaaggcagctgaaggaactagttccgctccggagtgtgacagtcaccgctttaggagtgctgtacaccagcagcgcttcgaggccatcaagggatggtcgtttctccgggagcgacgcgtccagctcanggacgacgagtatactgatttccaggaggaaatatggcgccggcggtgggcaccactggttactcctatggccaagtttgatccagaaatagtcctttgagtttatgccaatgctttgccaacagaaganggcgtgcgtgacatg

SEQ ID NO: 186902 - DNA, 406 bp, Glycine max
acattatatagctcgcgtgtgcttcttgatctcacgtttgccatcatcaacaagggagagattgtcgaagcaagtttcatgatgatgaacccagcactcttgatgatgccaaaagcctaagtgattgattcaagacttcaagatcaagcatcaagaatccaatccaagaatcaagattcaagagaagaaatcaggaagccacaagtcaagacttcatataggataagtattaaaagattttttcaaaaaccaaatagcacagttttgttttacaaaagaatcttctcaaattttctaagttaccagagtgattactctctagcaattgattaccagttatcagtaatcgattaccataaaccagagtggtttcaaaatatttctaaatgaccagtgaccagtctgg

SEQ ID NO: 186903 - DNA, 401 bp, Glycine max
aagcttctgctcaagtggagcataagagtcacatattagtacacatatcagagggttcacttcatttctgaagaacattacattaaagatacatatcatgataagaggtaacaaaaaaataaataaaacacagtgcctcagaactccatcagctacgcttgacgggatcgaaattggaaacaccgatcacagcaccaataatggcaacaacaacaactccacctgccgcgatgctgagcaagaagttcttgagagaaggtgtaacggcagcctcagccacatcaggaaccatcattgaagctgtcaatgcagctgcggtgagccccgtcacaactttctccttcatggaggccctcacttgaaaccttccattgagttttgatgctgtcactgccttggaa

SEQ ID NO: 186904 - DNA, 433 bp, Glycine max
ggaaaataataatagaaagattatttacagccccttaccaaagctttgatggaagatacatcaagagcacttgtatgaagcttggaaaatgaagaagaatggcttcctctccctcttggtgaacttgtgcaaatgaagaagaaccacgttccaaattggtttttaaagaaacatgaggatgcagtttaaggctgtcaaaaggaaacttgattaagcttatgttgacaagcttcattgacaacatgattgaccacttggcagcccaagtttaatgtgccaagctatgccatttaagagttattgttgctttagaaattttaaccaaaaatggccgaagtaagtttaaaccaaacatggaaatttttgctttcgctaaaacaagtcaattctatcctaattccctagatagacgtgctaaacttccttggattat

SEQ ID NO: 186905 - DNA, 453 bp, Glycine max
  unsure (1)..(453): unsure at all n locations
ntgatgatgtcgaanagaaatcacatgtttgtcatcatctttagggggagaatttgaatgtatgcatacatgattttgatgatgccaaagaagaaccaaacaaggctgcttcaaatgataagcatttgcttcaagaataattcaagattgcttcaacaaacaaagccttgtttcaagattcactaaagaccaagccatgccttaaaacaaagtgctttcaagacatgcaaggctctggtaatcgattaccaggaagtgtaatcgattaccagaagacagggttgagaaatagctgttaaaaaaggttttgaatttgaattttcaacatgtaattgattaccatatgtctgtaatctattaccagcaacggaactttagaaattcaaattcaaaagtcataacccttcaaattataactgtgtaatcgattacacaaacattgtaatcgattac

SEQ ID NO: 186906 - DNA, 290 bp, Glycine max
tggcctttgtatctcaactgcgcttccaaaagtactcctgcagccacttagccacatttgggcttcaaaaagttatgcctacgttgccattgggccctattacactcggactacctaaccaagccctttagttgataacccaaacatattttggtcaccctactttacaggagcgggccatatttagacaactaaacactctaaattgaacaaaggggcattcgtcctcccctttggccagaacaactacaaccggactttttctgaaatgggctgattcaaaataggac

SEQ ID NO: 186907 - DNA, 447 bp, Glycine max
  unsure (1)..(447): unsure at all n locations
cagcttccgctntaagtttcaagcgtctcgatatattatacggcttatttcgacatccgagttaattgttattgtcggttgacttttcttagagctcccgttntcaatttcgagcgtcttgatatattaacaggctcaatcggaaatccgagttaaaagttattggcgtttgacttttcttagaacttctgctttcaatttcgagtgtctcgatatattacagggctcaataagacatccgagttaaaagttataatcgtttgacttttcttagagcttccgttttctatttctagcgtctcgatatattaaagggctcaatcggacatccgagttaaaagttattggtcgttgactcttcttagagcttccgttttcaatttcgagcgtcgtgattattacagggctcgatagacatcgagttaaaattattgtcgttgattttct

SEQ ID NO: 186908 - DNA, 415 bp, Glycine max
attgaacgaaattacggagaaatcgaactttgaagtgtgtctcacaagtctcactctcatcaaagttatgacaagtgttacacatgtttctatttatagcataacacatgggaagcttgcttgagaagcaaggaaggtagcttccttgggaagctagaagaagaaagcttccttgagaagttagaggggggatactcacacccctcaaatagctaagctcaccctcatgccaaaatacatgaatatacaatggggagcttccttgagaagcaaagaaagtagcttccttgggaagcaaagaagacagcttccttgagaagctagaggaatgatggaagcttgcttgagaaactttcgtggaggctagatcattgggcttcaataaagtccttcaatagagattctcagacatgga

SEQ ID NO: 186909 - DNA, 449 bp, Glycine max
  unsure (1)..(449): unsure at all n locations
gcttctcttatggaacagatcnagctatatgctggcttttctgccatttgtagtttcctcttccccatgtctaccacatagcttgcggtagacataaatgatcgtccaagaattaagggaatgtcaaaatcttcttctatgtccatcactacaaaatcagtcggaaagatcaaatgtttgaccctaaccaaaacgtctacaataactccataggatcttgtgatggagcgatcagccaactgtaaggtcatgtgagtggacattatctctaactctccaagtcatcgacacatggagagatgcattaagttgatactggctcccaagtcaacgagagccttacccacaggaacctcacgaatagaacacgagatggtgacacttgatctttgtgcttcgatggaaggatgcgttgaatgacagcactacaatttccttccacaactatc

SEQ ID NO: 186910 - DNA, 442 bp, Glycine max
agctagtatactgaattgagtatggcacacacattgcatgtctgatatgccttttagaggcttgaaaagtgcgagaaaatgagctgtgttttctggaaaacgcgatgaactcgctaagcgagaatgttgcgctaagtgagttcatcaatactcattgtatataagctctatctgaagaactcgctaagctcgctgactgtgctaagcgagttcatcctttgaggatgaacattcatcctcttgctgaactacctgtggctaagcgaggctgaatcgctaagcccgggtaacttaaccatttttttttgtgatagccacacgctaagttgagcattctggagccaagcgcaattggttgcggcatccgctgagctaagcgagcttcactcgctaagctcccatgacttagtgaaattttggctcagtttagtgtcgctaagcg

SEQ ID NO: 186911 - DNA, 369 bp, Glycine max
  unsure (1)..(369): unsure at all n locations
ggcttaagtatgagaggggtgggtgtatctaagctctatcttctcaaggaagttntctcaaagaagcttctcaaggaagttttctcaagaaagcttctcaaggaagctacctagtctataaatagaagcatgtgtaacacttgttgtaactttgatgaatgagagtcttgtgagacacaactcacagttcaacttctctacctcttttattccttcaatttcgtgctcccccctctttctttccctccctctttcttttcctccattgaagcatcctctccaagcttcttattcaaggctcatcttggtggtgaagcttcttcttccatggcttattccctagtggatggcgcctcctctcacctcttc

SEQ ID NO: 186912 - DNA, 320 bp, Glycine max
  unsure (1)..(320): unsure at all n locations
agctatgcctttaaggctttgtcctcatactttcttccgaagctttaacctcattgtctctcacagtctttaaaattgggagccaatccaatccttgtgtctggactctcaaccacttatgatagctctttgtcctaagctctttgtcctttcttcacgccgcatcccatgccttgcgaactacttggagtaccctcgcattgtggtcactgaaactctgtgcgatgaaaggcatgatgctntcgtctgatgacactcctctcatggggtagccaagctgtcttatggcgaggacgggatataattaatacaaccccttg

SEQ ID NO: 186913 - DNA, 322 bp, Glycine max
tacctgtagaacggttgtggtttgagctcttgctgaccaccataccacctttgccttaatgcacaacctggacaattgacaccctgaagcttatgctgcaatattcacattacctcctcaacctcagcagcaaataaccacagcgaacaatttgaccttcagcacagatcaaccctggaggaggaatcaccctacctcaatggtcagcctcagaacaacacacctgctcttcttcaaatgcgtggccaactaccataattctcacaatcacacagacaacctaaacagcacagtgaggcctccaccttccctataactggag

SEQ ID NO: 186914 - DNA, 439 bp, Glycine max
agcttagtaatgattctgctggcttcataatatgaacgttgtatttagcatgcttaaaggtatttggtaacaactttagtatcattaacattgtttcttcactcattctgcatagacatttgatgtgatacaaattgaataagaaggaaagttttgaatgtttatcctaccattcatacaaactttgttctccatccttcattaactccaaaagctctgtaatatcatctagcattgtttggcttgcttttggagacatatctttgtcttcctccatatcattgttatcaggataaggcctaaatgcatcattaaccatgtcacatatggaatcattactatgaactctatcttcatttggttatggcattgtaagtgtttcaaccatagtatgtagagtacttctcttccaatgtctaagccaaattgtatacccttt

SEQ ID NO: 186915 - DNA, 454 bp, Glycine max
tatagagatgacattttccctgactttacaagcttagaatagactgatctttctagccaactttaataaaatctcaagaacaaaccgtcttcttgggggtgcaatggcatcgtttgcaagagcatcactatcattggaatgcataatggcaactgcaagatcaaatatgtcatctttaccacctctgagcggatcctgtgcagcatggttgagaattagaacttcaataggcaaaacaaaaagatagcacatagttgaactctgacaagaaatactgtaaattagaaaatgatgaggaaagcaaagtcatagagcatatttccagttgaaacacttccacaaggatcctccatgaatctctgttaccggccaattttttttcttttctttctagatctacatatatgctacatgggtttctttttcagctatgcttacacggataattgaaatg

SEQ ID NO: 186916 - DNA, 446 bp, Glycine max
agcttaaataagtggccttgtttgtgcttatgcgctaagcgcacttatggaccgcttagcgcacattagtgaatttcggcttagcacgtgcctttctcgcttagcggatgaactgaagcggtgcacttagtgagatgaagcggtgtgatgtaagctccattggagcttgtaggcctaagatcttcatcaatggattcctttgcttcttggaagatgagtggcagcggaatggagaaggaagagagagaggagacaccacttcaaggagaagataagtctagaagaagctcaccaccataggaggccatggataagagcttggaggttcatgagaaccctatggccttctttagcagctctagcccaatcctcttggagtctcttgctcatggctctagagactggtcccttcctatggaggattgcatcacggtgcgcttagcgaa

SEQ ID NO: 186917 - DNA, 438 bp, Glycine max
ttgatctttttataaaatgagaagttcttggtttcatcacgttatctaaaaaaccttggggtggatccaagtgctccgatcatccatttgcatattcatgttttggtggcatactcaccggtgtttatttctttaagaatttcatcataactaagaaaacaccaaggcacctctataacactcgatccagaaaaatggataatgaagagggcgtgcaggaacagatgaaggccgatctatcagccttaaaagatcaaatggcttccatctcggaggtcatgttaaaactccagaaaaccatagaggataaagccacggcaaccgcttccagtaccgttagggaagcggagccggtactgcaacccgctttaaatcccggccgagacagaaacacagccgtgtttggtcgaatgtatagtccgcaagcttattcttatg

SEQ ID NO: 186918 - DNA, 440 bp, Glycine max
  unsure (1)..(440): unsure at all n locations
agcttaagcttcttcaactgcacaaagctcttaatatttaaagagtatccttgtggaaccttcacccgacgaagacactgacaaaaacttatcttctcctttttcgacaaagtatggcaggctgggggcaagtatatnttcttcccattagaccttatatgcaactgtgatcgtatgcccatatcagttagatcttaacgggtattcaagccatccttcgtcttgccttgaattttaaagagcatcccaatcacattgtcacatacatttttctccacatgcataacatcaatacaatgtctaacttctagatcagaccagtacggaagatcagagaagatggaccttttcttccatatgcaactcttacttctatccttcttttgggtctttcccaatatagtattcaagtgttgaacctgccaatatacatgctcacc

SEQ ID NO: 186919 - DNA, 452 bp, Glycine max
  unsure (1)..(452): unsure at all n locations
tgttatttagtgataattcccaaggtggttgcacataattttctaaagttactagaganatcatcccctttgatatcaaacattgtggcggtagggactaccagcgacaatgtatcatcaaagagaaaaactctagatgaggtttcactgtcatcaagcaagtcgacgacttagcatgatcacagattcacctccacttcctatgttcccatggacccaagtgtagggcccttaataactcacagtgtgtgcaaaaagtgcaggtgtcgtgtatgcataaaatgaacaaatatttatcaatgcatgtattaaataaacaactacacaaaatataaaagcatcaaaagagttacatgaatacaagaacataaaagaaagaaagggaaacacacaaaagagaaagtcatgatatanatgcacacagattaaatggcttaactctctaaaaagtc

SEQ ID NO: 186920 - DNA, 405 bp, Glycine max
ggaaaacaatgcatacactatatgatattagtccatttgattcattaagtatatttggtttctgatcgcatcccgaacaactttttcttgaaaaaatattagccaaattgatttcattaagtacattattgtctgagatgataaaagtgtctaaatgatgcagtgagacattccaaggaagagcattggtggaagaaactggaaaggctcaaacagtccctagtggcaattctctcatcccaccatggatgcttcatatctgactagttacgctggcatgattctgccaagcatgtgacatgtgatattatgacaaaggctcaactatatatatatgttagaacttataatacccaattatatgccgatcgagcttaataactgctcaaacttctcgcatgaacc

SEQ ID NO: 186921 - DNA, 298 bp, Glycine max
tttaattataaattatctaaaacaataataaattataattcgactaaattaaaaatttgcttatatgaaaaaaattctctaatataatattcggaatgattataaacattttaaaaataatgaaattgctcacatactatatctgtttggggcctgcacctgaaggggaagtacctgatatcactattgaaatgcatacatcatatggaaaatcatttatagcgataaaatatgtaagttaactatatttgtaatcatatatagatatatagttggtaaaaatattgtcataaaaaga

SEQ ID NO: 186922 - DNA, 430 bp, Glycine max
  unsure (1)..(430): unsure at all n locations
agcttgtatggttaaagtctcacaattgttacgtgctcatgcaacaattgttagccgtggctatacgagacatcttgccaaacaaagtcaagttagccataactcgcctgtgctttttcttccatgctatatgtagcaaagtcattgatcctgtgaagtttgatgagctggaaaatgaggccggaattatactgtgccagttggagatgcatttccccctgctttctttgacatcatgattcacttgattgtgcatctggtcagagaaatcaaatgttgtgatcctgtttatctacggtggatgtacccggttgtgcgatacatgaagatcttaaaagggtatacaaaanatctatatcgtccagaagcatctattgttgagaggtacgttgcagaagaagccattgaattnntgtcagaatacattgag

SEQ ID NO: 186923 - DNA, 447 bp, Glycine max
  unsure (1)..(447): unsure at all n locations
tgggccaatctgctatattcagtatcactatgaacaatttatanttttcttaaagtattagattgaaactattgagctaattgatcgctttatgttaatataaattattaagtatgataagatgggttacttttattatattattttagttaaattattcagtagattcctaaattatttgcaaaattttaagtccctaaaccatgcattgttggaactaaagacgtacgaagtatccagtaaaaaatatcatatttggctatatatttatgaagtcacttttctttctttgtctcttcaataaccaagttacaatttaacaaacactattaacacacaaacatgtaaatgaaagtaaataaacacatttagtacctaagaagttattttgtattacatttataagcttactataatcgtgtaatattaaaatcacacaatgaagag

SEQ ID NO: 186924 - DNA, 370 bp, Glycine max
agaatcttgtggaggagccaaatgggccttaatgctattacgcacccccatttttactaagcacaccccctgcctttttgtggcgattctttattcgtaaagttacggaaacttcaccactttctgtaacgatacttgttttctctctgtaaagttacagaaccttgtggataacataatcatcccctttttgactcactggaacgttaccgaacctcaataatcgtgcaacgatgccttcatttgatttccgatgcgtcaccgaaccttactgattgtgcatcaatatatttcttttgatttccaccacgtaccatagtttcacatattgtctaatgatgggtgccacgcaccttacaaagaccataca

SEQ ID NO: 186925 - DNA, 150 bp, Glycine max
gctcgggatcaaggtcaagggcgcgttttaaagtttcaagtttggaagctcaacatcagacaactcggacaagacataagaataaagagaccacaatcgttaaatttttaacttgatacctggtttacaaccttaccaaagtctctcttg

SEQ ID NO: 186926 - DNA, 462 bp, Glycine max
  unsure (1)..(462): unsure at all n locations
gaccagagcaaaagggaaactcttgctaagaggaaatgtttcanatgaatttttctttacacccagaaatacagcaattggtgccgctgcagctgctgctagaccggggttaggtgcactgtatacaaactggaagggggaaaagacatgagcaggaaattaacatattatcctgttgacaatttgaaattttgaaaatggaaatttccacatagccttcaagctaaaaatgtttgaaaaagtgtccagtgtttgttaataataaattttgagcacaaatcatgctagtttaatttttatgtactcctcatatagaacaagtttacattgctccgatgatgtattctcatatcctttcatgaagttgacaactcatatcattaaactcaggtatcacatcattttggatgggatttaaatcaccggtcaaacttttgagtctcaattcctgccccatcaatg

SEQ ID NO: 186927 - DNA, 305 bp, Glycine max
cccctttttaaccctgacaactttttttctctttccctttatctaatatggccccctgctcttttaaatgtagaattggactaatccataagtttttgctttaactgggacaaggatctttagcagggttgatataaagctaacccacttataaggtcacccacacacacagaaacattactggaccctccacaaaccacaacaccaggggcaaccacacattatatcaccagggtaacacctattcatcaccagggaagtaaaatggatagggaagacctggaactccacctcaggacgactgg

SEQ ID NO: 186928 - DNA, 431 bp, Glycine max
  unsure (1)..(431): unsure at all n locations
tagaatgttggctataatgttttaacttgatgttaacaaagtcaccaattgtgaaactcctatcacccatgtgtttttcaacttgttgagacatgtgattctgagccctcgggagatgaaattgcaagatcttgatgacaacctctcgagcatttaaagttctatccactatggaggactctctgagaagataaggaaggtgaatggaaggtagcgggccataaactacttcataaggggtagtttgaattgctaaatggaaattggtattgtaccaccacttagctaaagataaccacttagactatgaggaaggcttctcggaacacatacaacagagatatgtttcaaggcatttattgacaatcttagtttgcccatcanattgagggtgatatgtagtagatntatttaagcaaacttcctgaagc

SEQ ID NO: 186929 - DNA, 438 bp, Glycine max
ataataaaagagacgcgactactaagtcattattattggaccagtatattacattatgatagacaaaatgattctgacaacctccaagttcagtatctcctctatgaacattgctctcaagcattgtttttgttacaacctataaaaaagaaatgggtaaagaagttggaaatgaaacaaatcaagatccacaaaaaataagagttggatcaaatattgcttcatattatttgaagaaaagaaaccaaagagattagaattaccttaaagatagctggttcgttcatatcattccatataccatcaacaccattgggaatgaagtctttaactaaatttgcccaccatgcacgaactctatactgcgtatagtcagggaagacacatagtccaagccacacctcctctgaggatatatatatgggataatgcatcaca

SEQ ID NO: 186930 - DNA, 380 bp, Glycine max
gaaaccagcttcagagtatgaccaagcgagaacatgagttcattaaagaatatgcccaaaggtggagagacctcgcagcccaagtcgtcccgcccatgactgagagggagatgatcacgattatggtagatacgttgcctacgttgtactataagaagctgataggatacatgccaactaactttgcagacctcgtcttcgccggagaaagaatcgagtccggactgagaaaaggaaagtttgaatatgccttcagtgttgcccccaacaacaacagaagagccccagtggtgggcacgcagaaaaaggaaggagatacccacgcgtgcaccaccgccccaacatggatgaaagcgccccaaatgcccaatactatacta

SEQ ID NO: 186931 - DNA, 365 bp, Glycine max
  unsure (1)..(365): unsure at all n locations
cccccacccctttccgctcaccgtcctagcgcctcccccccccgcaggcgccgtgaactgtgacctgctncccgacgcgcagcaccccggggcaggcgcaaattcttggatttccacagagagctagtacccaaaagaccgctaccccccgggtagaacgacgcatgcgccgctaaagaacacatcacgccatgcgacgtgaagaaatccactatgatgcaacaacaagacaccacacatcgaaaagccaacacatggcacctgaaagacacaatcccaggcaagcgtgcgcaactctacaccaagaacctaatattgcagcacaacaccacacaatggaaaatatacaacaaggtaggggcact

SEQ ID NO: 186932 - DNA, 449 bp, Glycine max
  unsure (1)..(449): unsure at all n locations
gcttatgcgcatatttccttacgaacgttcacttgcacaagtatttctattaactattataaatgcacccatatacaatcaaggcagcttcgttacctagattatttacatgtacttccaaggtgtatttgttacttacatcacacacatctccttggctaaatttacatacatgcatactcaaagcattttggggtaccaaaaattgcacatgtgcacatcttggaatttctaatacctatacatacacaaacttcatgatgaatcttgactatctacaataaggcgctacatttcttgctcttttcaagtttttgctacctaaagccgcatgcaaattcaagtatattttcctttgctgactaaaatngtattcaaattaaaaggtatatanttttttgtaatgtattttctttacataacatgcaacatnattatantatatattt

SEQ ID NO: 186933 - DNA, 181 bp, Glycine max
gatagaactcccaaaacgctatctttgtctcacaaggattacattcacaagatacttccgaggtttggaatggctaactctaaaccaatctacactcccctttctaaaaatacaagctgcctgctatgataaagattcaagctcacgctgatcacgattatatgtcaaacagtttcatact

SEQ ID NO: 186934 - DNA, 444 bp, Glycine max
  unsure (1)..(444): unsure at all n locations
agctttcaaaagnnagtgtttttcaaaccttgttcttttacagaaaacaaaagtgtgctattcagctttttcattctcttctccctttgccaaaaagaatttgccaaggactaatcgcctaaattctttgtgcgtctctcttctccttttagcaaacaaacgaaggactaaccacctgaattcttttgtgtctcccttctcccttttcaaagaattcaaaacgacatagtctgagaattcttttgattcttccctttcccttaaacaaaagatttcaaaggactaaccgcctgagatatcttttgtttccccttcacaaagtttcaaaggactaactgcctgagaactttgtcttaacacattggagggtacatcctttgtggtacaagtagagggtacatctacttgtgtttgtgtaactgagaacaagagagggtacatctc

SEQ ID NO: 186935 - DNA, 430 bp, Glycine max
agctatggacctaagaaatgttattcaactttatcctaaccctggcgaagcaattcctaccattactaaccgcacttgcctcaaacaaaaatgaccaacgaattgtcagttgacaaaggctcatcacaccaactcatacgggaagtctcatcttaaatactagctatatataactttgctttacactccgaatctaggtatattgggctgatctcccggtcaatcactactacaccaagagagggtggttttagaattgtaatcataaacaatttttcactcataaaacctgtcaactaaagtaattagccccataatcagcaagcaaggaagttcacagcgctaaacctcggattctaaaacacatactaactcactctattttgttaaacgtcttgtcatttctatattggaggaaataatgtagact

SEQ ID NO: 186936 - DNA, 369 bp, Glycine max
attggaagctagcacccgaagaagtgttacgtggagcattcaatgcctacatactccaacagaaaatcatgtgtcttttttttatcggagtaaagtctgtcacataaaataaatcttttgataatgcttgaacttgaaagcattgatgggtcttttatgctccttacgatttcatcaaatcctaagaaaaatgtttctaacataatttttataatacgaatattcaaacaaagtatttaatgaagtcttaaataagatcttgaatattacattagatcataacataatttttacatgagtggcataagaagcaaattcaacaattgatctaattacatctaaccaaataattgagaaccctacttatct

SEQ ID NO: 186937 - DNA, 441 bp, Glycine max
catgcaagcttaagttatggatcaatgtatggttttctttaacctcattgtatacacaacgcagaggacaaacgccgagaatgtaaacaatacattcaaacatgggtcaaagaatcacaacgacaagtgtacctaagagcttatcaaaatcagtaagtccacttgatgttgaacaatgttttgaaaatacattataattgcgtaactaatgttttttgtcttcagggcacattggcaacttattgttctatgtccacaagataatattgttgtttggttatgttccctgcgtaaaaagcctaatgttaacatcaagggtgcaattagcacgttactttgtaaatttaaagtcaaatagtgtataacaattatagtggttaaacacaatgttcttgatattatatacgttactaagtatttgaaactagtgcaatgaagaca

SEQ ID NO: 186938 - DNA, 451 bp, Glycine max
  unsure (1)..(451): unsure at all n locations
agctagngaaactngcatatataggtaaaataagcttgatttgttactgaagtgtaaaaattagttggttacatgctgttatggtagctatatatacataagttagttggaataactaactaactagagttctaaccattaaccatgatcaagctaaactaagcatgtgactatgctaagattcattaaagatatcatcaccactatttgtcaaaaaaaattggaagaatcaaggattagatgatgttaatcactcgagtttcattaaaccatttttttcattttaattgtgtactaagtttttatattgatacttttaaatattggaagattattttttattatgttgttgacattgagtattnttgttatttttgaaatttaattgttttgtaagatttatatattagtatattttttatgatgcanaatatattatgcatgtgatata

SEQ ID NO: 186939 - DNA, 452 bp, Glycine max
  unsure (1)..(452): unsure at all n locations
ggggctcttgcctcactcaccgcctttttggtttcatttctagctatcttatacttatcccaagtttcagaatttctacacctagaccactccttgaaacactccttttttactctaactttgctctgaacactttcattccaccaccacgattctttacccctaggtccaaaacctctagattcacccaacgtctctttagccactttaataatctcttgggacgtcttgttccacatatcatttgcacttccttgtgattgtccacaccatccctcccatatcttttgttggaagattccttgtttctcacccttcaagtgccaccatttgatccttggtgctaccataggacttcttctctttgccctatctctaattcttacatccataaccaaaactctatgttgggtagtcaagctctcttccgggataactntacagttcaagca

SEQ ID NO: 186940 - DNA, 438 bp, Glycine max
  unsure (1)..(438): unsure at all n locations
agctatattatgtgtntggatggagaatttatagatntctaggaaattcaaattcatagcattttgattgccttgatttaaattcctttcattttgtaaatattttgtttggataacgcaattcaatttcttgtattttaatttccttgcttggacaaagtaattcatatcaatgaaattcaaattttcatttttaaatatttatttaaaaattaaaatttcaatattgaatgaaaataaacatgagtcattttttaaatagttaaatattcaaaataaatttaatgttataaaatatataataataaattttttaaatatttaataattaaataatcaaaataattttaatgctaaacaattttgaatcttatacaatattcttgtagtaacacaacaaaaaaaacttggattaaataatactgcaaaattaaaaga

SEQ ID NO: 186941 - DNA, 366 bp, Glycine max
  unsure (1)..(366): unsure at all n locations
ntactggtcacccttttcacttgacactacttataattttggtttgcttatgtttacacataggattgttagtcattaatttgagtttcgcgtattatacttctgtatgccttgttaaattttattattttagttgttttttattaaaatttctgagtctgagagtgcaatttttatttgttgtggtctgaattgggtggtctcaatgaacgaatactggttgcaaaagaggcatcttgtgtggtaggtacttttttctttaatttgtggttgtaaagggcgtggtgtggcaactctggtgtttctgtgacacgaagtatgacactcctttctggcattggtaatttctatattggtttttgatat

SEQ ID NO: 186942 - DNA, 323 bp, Glycine max
  unsure (1)..(323): unsure at all n locations
cgtatacgcaattccagttctcgaccttttcgttgtagcaatcaaatctcgctctctatttgattaatggaacgctaanctccccaacttttgctctctctataggatcacgcacagctcccttcgaggcgctataattattactaagtcgctgtctattttttcctcttcactaatcactctgaatgcgttgctattaatccttgcatgcttattgcttgattaattgtctctgcgctcaaattacgttcatgcttaatgatcgtctaagatctattggtgtatgcggtgctcaatcacataatgaatgccttatgttaaac

SEQ ID NO: 186943 - DNA, 415 bp, Glycine max
  unsure (1)..(415): unsure at all n locations
gacatgcacaaagggtgactatattatgngactattatgtgtagcattgtttatgcttatctccccctctaaaatttaattggattggacttctcccaattcaattaaatttatttcttaacacacacatgaaatattcacttaatgcatgtgaaattacaaactacccctaatacaaaaactaatctaggtgctttagctgaaaaatcctacatttctagggtacctacctacattatggagcgctaaatacaagacccaaaaataatgaaatcctaatctaatatgtacaaagataagtgggctcatacttagcccatgggcccaaaatctaccctaaggctcttgagaatcctaaggccttctcttgcctctttggcccaatcttcttggagtcttctatctaatgaccttg

SEQ ID NO: 186944 - DNA, 326 bp, Glycine max
ctatacagacatttgccgaacaaattacgtaacgatactgtgcctgtgcctttcttccattctatatgtaccaacgcactgacccacccctgttcatgaattgaaaaagagcccgcatattactggccactggagatgaatttctccctgcttctttgactcataaatacttgatgagcatctggcagaaaatcaaagtgcggtctgttatccatggggaggcccggtgagcaccatgaaatctataaggatacaagaactattcaccaaacatcttattgagagacatgtaaataaccatgatttgtcaaaactaagaagctacc

SEQ ID NO: 186945 - DNA, 453 bp, Glycine max
  unsure (1)..(453): unsure at all n locations
ctgtcagaaacgtgcatttgtgtgcaatacacaatncctgtttcatcacatctaattggtgnatcagaaaggcgtaatagaactttaatagatatggttaggagtatgttaatcaattagactttacccgtatctttgtggatgtatgccttgaaaactgtcatgtatttgttgaacagggttcctagtaaggcagttccaaagacaccttttgaactgtggacaaataggatacctagtataaggcacctgtatgtttagggttgccagacagaaataaggatttataatccgcaagaaagaaaattggatgcaagaacaatcagnggatatttcattggttatccagaaaagtcataagggtatatgttttattgtcctaatcatagtatgagaatcgtagaaactgganatgcactgttcattgaaaacggtgaaatcagtgggagtaca

SEQ ID NO: 186946 - DNA, 204 bp, Glycine max
gaacaactctgactgaagcaaacctcattagttacacaggattacctgacgagatatcggagctacataaaacatgctctctacctgacagagagatctagacacactatctattgagaacaaacaattaacctgactctctggtgaaactggagaaatacgaacttggctgaatgtgatggaagctacctgaatgctgaggaa

SEQ ID NO: 186947 - DNA, 236 bp, Glycine max
tggggtttaaaagaacctcctatgacattaggctgattgcctctataagtaataataaaggcaacaagctttttgtatgggccgcaaatgagaggactaacccatcccgaataagagcgaatcatgtacttttcttgattggcattatgaccagaaggagctaacatacataagccattacttaatattgttgggaaaaaattataattctgcgtttagaaaaaaaaataattttg

SEQ ID NO: 186948 - DNA, 379 bp, Glycine max
cgagcctccctcttacatctccagaatgtggaatactggcttatacttgtctaagttgacttcctgactcattacattaaaacgaatcatggatcctacctgacaaaagcaaggaagtgagtaattattcaagtaaaatatctccaaaatcaaaattgtcaacgttctttgcaacctgaatgcaaattagcctcagaatcttcatctttcagacaaaggattaaacaacacatacatgggcaacagttataaccttcagaaactaaagagaaaaagtgaaaacactcatcatataacatagccagcaaaaagtctaacttaaaccaggttgcatgattagtgcacaattgaagggaaacacacatagtggcatgaaaaa

SEQ ID NO: 186949 - DNA, 455 bp, Glycine max
  unsure (1)..(455): unsure at all n locations
tggacctgngtgttgcccagtttcatcatatcttcttttatacttatcacctttatcatatctaataattntcacatttatgtctaatttccattttacttcattgtagtaaatttctaaggcatccattgcctaagaaatcttgggcagtaagtagacgtaaccgtaacgtgaataatcatcaataatggtgataaaatatcattcctttccgaaagaactaacatcaaaaggtccataaatatcagtatccataatttcaagaagctgagtgctttttgtagctcctttctttgtatgttttgcttgttttcctttaatacaacccacacaaatatttagatctgtaaaatctagataaggaagaatttcattctttattaatctttccatcctttctctagaaatgtgacctanacgtntatgccacaagaaagcagatcgttcattcacta

SEQ ID NO: 186950 - DNA, 406 bp, Glycine max
acacggctcaccagaatgtcattggtatctgtatttcttgttgacaggttggctggtatttcatcaaagtaatttttaatgcaatatcagcctttggccatgtgacttgggagctcccaatatttctagctgattggcttaaatgaagatgaaatgcttgaagggactatcgtctataatattttcgctatctgtcattaatttcctaaaaagactttaattggaattggagtcttacaagtatcgtgttgcttctgctacagaataaattattatactaatctttgatttttggcatgcgcattgtgataaaattacctgtcacttattttcacagaaaccacagcatagacgtatggaagccctctaatttggttgtctaagacacctcatgcacgactgtata

SEQ ID NO: 186951 - DNA, 383 bp, Glycine max
  unsure (1)..(383): unsure at all n locations
tcgaatgtcacaagacaataagttgagtggtcatgaatgactgaaactcacctctattggcttagtcatatgaagatcccacaaatgtcgcatttccaaatcagaagtgttggagattatgccttcaggttatgcatgatttccaccacgcctgcactgattttactaagcaaaatataagcgtcaaagttgaacattccaaacagtagataatcaatggctcaaatactttcttatttacgtgctgagtaagagaatgaaccttcgcatngtcatttcccaaattcttggtgttcatttctcatcttaatagttctcgaggataaaaccaaaactattatattacatgttcaaattttggaggatcctaatcccttttcatc

SEQ ID NO: 186952 - DNA, 445 bp, Glycine max
  unsure (1)..(445): unsure at all n locations
agctactcctcctcctcattagcttaagtataatatanattcattccaagatacttgtctttcgaatntatgaagcttatttgttggttacaatttggtttctactagtgggaatgccagactctaattctgttcgggttccatgaaaaaagaaaacaaaagaacaataatgaaataaaaaaaataagaacaataataaaacaaaaaaaacaaaaaaagaacagtaataaatgaaaaaaaaaacaaaaagagcccaaagggacctaatggactctctttaagagccaattatctttgaaagcccattatatcaagagggaaggtctgtgcattaattacacattaaagaggcacgaatcctggaggaggcgaacgaaccaaccacgttgcgacatttggcaccgtagccagagaaggaggatgggtcttgcaagtaacccctcat

SEQ ID NO: 186953 - DNA, 404 bp, Glycine max
  unsure (1)..(404): unsure at all n locations
aaagaaaatctggaatgtcttatccttaaacaaataccccactgggtatacctcatttagaagaattaggctcaggctgcctgagtaaagtgaagacaacaatattaaatagtagaaaagcatgcatgaaaaatatgatgtggacacaatttaaatgggttcttttttcatattatgtatttaaaaacaatatatacactttgggaaaaacaggtgcaagagaaaagtacgaagttccctattttatgagctgctactgtaaactgatcacgtgcagatgactagaccaatacagctctttttatcgaaaagtacttactgtcatcagatgacaggtntantcaaatttcatgtgccctgtcttaagagcatccatcctaaagctttgcatatacttacacaat

SEQ ID NO: 186954 - DNA, 445 bp, Glycine max
  unsure (1)..(445): unsure at all n locations
agctaggaaggatgcttcaatggaggattttataganggatattaagagagaggggggagcatgaaattgaaggaataaaagaggtagagaagtggaactttgaagtatgtctcacaagactctcattcatcaaagttacaacaagtgttacacatgcttctatttatagactaggtagcttccttgagaagctttcttgagaaaacttccttgagaagcttctttgagaaaacttccttgagaagctagagcttagctacacacacccctctcataactaagctcacctccttgagaaacttccttaataatattcctaaagaaggtagagcttagctacacacacctctctaatagctaagctcacccccatgacaaaaaaacatgaaaatacaaaaanaaaagtccttactacaaagactactcaaaatgccccgaaataca

SEQ ID NO: 186955 - DNA, 450 bp, Glycine max
  unsure (1)..(450): unsure at all n locations
tccatcacccatataacatggngtactatctttcanatgtattttatcctgattaggtcacttttttaaagaccaccccaatgccacaagaaaaaaaaaagaaagttatttccaaaatgtcaagatggggtgagaaatgatttgtgatgcaatcccaccccccaagggcactggatagaagactccaagaagattgagccagagatgcaagagaaggccctaggattctcatgagccttagggtagatttcgagcccatgggctaagtacaagcccacttatctttgtacatattagattaatgtttcattatttttgggcgttgtatttagggctccataatgtangtagggtaccctagaaatgtangaattttcagcccttgtattttanggcacctagactatgtttttgtattanngggtagtttgtaattcacatgcattaagt

SEQ ID NO: 186956 - DNA, 446 bp, Glycine max
gcttgaagttaagtcttacttctgctttgtctgcattgggttggtaattctctcaatagcctccaaaccttcttgtgaaagacgaagttctctgtgattaggatcaagttccacgatgggaaagctgtaaatacagaaattgggcaggaataagcgaagcttgccccaacttgaagtataaagcactttacagaatactaaagatactccagcatacaaagccctagaagagatcactaaaaccatgcctatgaacagaatatgcagtatataatagaagcaataaagaaaacttgctcactattcacaccaataacaacaaacatagttccagactcaaaatacacctaccttcatacaaatagaaatagaaatatagacacagtacaatgttatcattggcaccattctaacatatagagaataccgcactgaatctacacata

SEQ ID NO: 186957 - DNA, 377 bp, Glycine max
ttggatatatcataaaaaaggtgtaagaccatgagagctctaaaattatatctgaatatacttacacgtacattatatatattaggtcttttttcattggcatacattttatattatattatacacggggtttaaactttatgctaaatcaacttctattattaattttacaaatccataaaattggcagaaaagctacgtcatctagttaacgaagttttttatgcttcaaggaatttgaaattcactatataaacaggcctgatcaattgtcatttgttatttaatttcacgtaaccaattaattaattaacacaacgaatgcctgtttattaaagactgacgtacggtggaagcatggcttcaccccttctttc

SEQ ID NO: 186958 - DNA, 424 bp, Glycine max
cgctagagatgaggaagtgttgaagggtgaatcttcctgcttttattgctgaccacagagtggtacctggagatatgtcgcgggggtcaagagaccttggggacgtcaggtggggtgctattgcccaaaaccaagcttgaccaatcccgacccaacccgggcatagtcagttagtgagaacctgtgatgtacctaaacaggcgagctcctggcagtcaacagataaaaggaacaaataccacaaagcaaggaggcttgtggtggctggccagctgtgaactttgattgatatgtgggttatggcctctggtaatcgattaccaaaggtgggtaatcgattacaaggctaaaaaaatgaagacaggaggctaagatggtctctggtaatcgactaccacggagtgtaatccattaccaggcttga

SEQ ID NO: 186959 - DNA, 415 bp, Glycine max
  unsure (1)..(415): unsure at all n locations
gtgaacttcaaactcagcttgccttggttacacatganngattcttgttttaggacttgtncgattctatttgggaaaaattggatgaaggcaagagtggttttcgaaatctgcactatgtgcagaattttgctgtgaaaatgtgcagcacaattttgcataagtgcagaaaaatgctatgtatttgctggttgtggaaagagtaatacaaaattagttctggatgtttgctagtagatcccaacggtcaaaatgtagacttatgtactaaagactaccagtaaaattttcgagtcgatccaacggttaacgaattggaacgaacgaaatggtactggggtctctaagtgagaaaaagctgtgattntcgtttgagttttgggcagagttttctgcctttgccctgttttgcttg

SEQ ID NO: 186960 - DNA, 448 bp, Glycine max
  unsure (1)..(448): unsure at all n locations
agctatatagagggaatnttcatctcactgttattatttccccctgnnaacaattaanaccaacttgccaaccttgtcccaactttcccagaggtatatttaataaccatgtcaaaagatgaggacagctcaaaattgagaagaaacttacaaatgtttctcctttttcacagaatccttctccaaaaagtaaccagaagctccataaatatcctgcatctgcacattgaaccaagcttttgtatcattatcttatacctcagaaatcggaacatgttgcattttatgtagattaaaatgaaaaataaaaagataaaaatttagagagaacagaatgaaaatatggctgtcctcatccaaaaaaaactaacattctttagacataaaatccaaatgcaaaccttcttatccagccagacaagatattgcacaactgctgcaccatccc

SEQ ID NO: 186961 - DNA, 418 bp, Glycine max
  unsure (1)..(418): unsure at all n locations
tagtacactgacatgatcagaagagcttttcttaatgattctgttctgcaaaggaaagnctatacacataccaatgaagttcaacgtgatacgaattatttcagttgatttcattgaatttgtaatatgttgcttaaaagccagatatgccaaaatgacggaaatcaaaaacccattcaggcagtcgtgaacatgtatcgaacttctctgtcgagcccaaacctaaatcaatgaagacaagcaatggtttcagtgttccattgtacaattattattcattgaatctcacacataaatactcccgaaaaaatcatatatcaaaccttaagcacgattaaagcctctcttagttccttccatccaagaaaatagttgttgataaattccacatcttctataaaccatgtcttccaaatac

SEQ ID NO: 186962 - DNA, 371 bp, Glycine max
tatgagaagctagcgaaacttggtgatttgccaatcattaggcgtagtctaaatggtagagataaatcagcataactctttgtggttgatatttacttgcttttcttctactttcaactgatctaaggtatggatttgttcttagacatttgaaaacatctagtgctcaatgtgtttgttttccatcatctggttgtgttttttaaaatatttgttatctatttttgcaaagttttttcctcagaccaaaactttgtttgattgcaaaaaaagctttaaaaatctctaaaatcacaaatcaatccctcttgtgatatttatctttatacattcacacacttcacttgaagactctcttttgtgatggcgca

SEQ ID NO: 186963 - DNA, 402 bp, Glycine max
  unsure (1)..(402): unsure at all n locations
gtagccaattcaaactagaataaagtttttcttggatttcctattgagnccngcaatatattaagaagctcgaaattgaagacagaacctccttgccaattcaaacgataataactttttactcacatgtccgatcgagtcccgtaatatatcgagacgttcaaaatttaaaatgaaaacttgtagcaaattcaaaagacaacaatgtttaactcggatgtccaattgagtcccgtaatttatcgagatgctcgaaattgaaaacagaagctctgagcaaattctaacgaacaataacttttactcggaagtccgattgagtcccgtaatatatcgagacgctcgaaattgaaaatagatgctctaagaaaattctaacgacgataaatntttactcggatg

SEQ ID NO: 186964 - DNA, 321 bp, Glycine max
caagattcatggtctcgcaagtgaagatcctcatacacatcttaaggagttccatattgttttgtccaccatgaagcctcctgatgtccaagaagatcatatctttctaaaggttcttcctcattctctggagagagtggcaaaagattggctatactaccttgctcccaggttcattttcagctgggatgaccttaatagggtgttcttggagaaattctttcctgcatctaagaccactgccatcataaaagacattttacgcatcatgcaacttactggagaaagcttcgttgagtactgggaaagattcaagaaatt

SEQ ID NO: 186965 - DNA, 363 bp, Glycine max
cccggtgttgagagaaacgacgatataggctatgtgggagttcttgaactcacatggacgtgggcaataagggatggtgggtttatgcgcgctttgtgtatgtgaaaaaattgttggggaccatcgcctgaccgccacctagtaccacatgtgatgggtaccccataatcctacaagcttgagatgaagaagtgttgaaaggtggaacttcctggctttattgttgaccacagagtggtacctggagatatgtcgcggcggtcacgagaccttggggatgtcacgtggggtgctattttcccaaaccaagcttgaccaatcccgacccaacccgggcatagtcgagcaatgagaacctgtgat

SEQ ID NO: 186966 - DNA, 466 bp, Glycine max
  unsure (1)..(466): unsure at all n locations
gctccttgagaagctagagcttagctacacacccctataatagctaagctcaccttttatgacaaaaaaacatgaaaatacaaaaaaaatcctactacaaagactactcaaaatgccctgaaatacaaggctaaaaccctatactactagaatgacaaaaatacaaggcccaaaagaagaaaacaacctattctactatttacaaagaagagtggacccaaccttggcccatgggctcaaaaatctaccctaaggttcatgagaaccctaaggccttctttatcaactctagcccaatcctcttggagcctcttgctcatggctctggtaactggtcctttcctatggaggatngcatcacctcgctaagtgagctagagagatgcttggtttctcaaataagctcgcttagcagatctgcgcgcttagccgacgtttgaaatncaaaatcaatattttttagcat

SEQ ID NO: 186967 - DNA, 109 bp, Glycine max
gggtggggcagaaggcgctaaccgtgctttgggctaggttagaccagacttataataatttatatactatgctctcagctgggtgttccataaagttctcataaacggt

SEQ ID NO: 186968 - DNA, 362 bp, Glycine max
atgatagccgccgatgatcccattactggttctcctaagctctctatcctttcttcacaccgcattccatgccttgcgaactccttggagtaccctcgcgttgtggtcactaaaaccccgcgcgatgaaaggcgtgatgctttcgtctgatggcactcctctcatggggtagccaaactgtcttatggcgaggacgggattataattaatacaaccccttgttcccatcaaaggaacatttggacatccttcgcatgaagatagaatcctgattcttccttccttctagcgagggaaccaattaacagacgcccctccatgctagccaagagttggtcccaattcgtctttctttttccatg

SEQ ID NO: 186969 - DNA, 416 bp, Glycine max
  unsure (1)..(416): unsure at all n locations
ctcgagnccaagtcttcttctagtttttctctctgaactcacgttntctcactccctgcgagttccttcgagctcccaaaggtcacgcgtatcgcggaggttccctaaccctcgaaagctaagtatcagagccccataatatatcatggcgctagaaagtggaaatggaatgcccacgcaaatttgaacgaccataacttttgactcggatgtccgatagatgtttatgatatattaatatgctcattgttgaaaaatgaagccaatcacaagtacaaacagccacagcctttcctccggattttcgcataaggctggaaacctattgagaccctcagaattaaacaaccaagactcgggcaaattccgacccggcaacgttttgtctctgatgtccgattgaagcccataatata

SEQ ID NO: 186970 - DNA, 448 bp, Glycine max
  unsure (1)..(448): unsure at all n locations
atgtcgtttactttganaatgctatattctgatgacattgntaattatttgactgtngaacttaatttgaaatcagtctaatttattgtgtttacatatgcacttgcatgtacctaatatagttatgtctcaggaactttgaggacatttacgatgttgatgtgttcatgaaaagcatggaaggagtggtcagagtgttaagggatcttccttctcatgtatcaacacataaaattgccgccatgaaggttcctaatccggttacaaaagactacatagcttaacatgttgaacctatttatagatcaaaggggacgtgtagtcctctgcagatgagggcgtgtagtcctttgcagatgagggcgtgcaaccctctgatggcgaggacgtgtagtcctctaaaggggagggcgtgcagtcctctgatggtgaggacgtgtagtcctct

SEQ ID NO: 186971 - DNA, 353 bp, Glycine max
  unsure (1)..(353): unsure at all n locations
atattaaaaacacttgtcatctccttcttttgaatcctcctcatggtcaaatattaaaaacttcattattccatttaaaacaacaataaagtagaggtattctaataacttttaatcacaattgactattaattaaactcagatttcacaattaaccgtaatacgaacccacaaatcaaaaacatttatctttatatgtttctttaattattttgaattcctcaaatattatacaaaatcagtctctacaagaagccactgagaaaaagatacaaaaaatgaaacacacttggtgttggnttaaactttgaagggaacgaatctaatgggaatcgaataaatgtattcgaaac

SEQ ID NO: 186972 - DNA, 446 bp, Glycine max
  unsure (1)..(446): unsure at all n locations
tgctcaccttacagtcgaagncanngggtgttgttgagtttttttctaagnncaaannataagagacatgcatagctggtatatgatgtaaaagaatagggtgatgctgggtttcgatcagtgtaacacattgcagtcctggattctcaatggtgggtttcaagtatttttttatggaattattatctttattttttgttttacttgtattggcccacatattttagtctgaaacaatgatacaaatcaagcattttaccataaatatatactggataatggatacatcagaataacttcaatttaccaattgaatgtgtgattattctattttaaaatgtctaacaatgtatctgtacatatattaatagtgtgtcgtgtttaagcattctttgatgattatttgtattatactaaagatgcttgctgtaacttataattagagt

SEQ ID NO: 186973 - DNA, 448 bp, Glycine max
  unsure (1)..(448): unsure at all n locations
nagcttagccaactaatcttttactttgtttttatataagaagtgcataaagatgaacatgagggactccttcattgatgagtaacaatgcantttgagaatccgactcaagatgatggaagtgtagccagtatcatacgcgatgcaaagcctatgataaatagcaaacaatttttcattcaaattaatatttaatgtaaatccacaattatcattactagttaatcactattgttgatgctatatgagttataagattaacgtgatgatggttgaaggaagaaagagaaaaataattgtaggtttaaatacatttatttaactaaaactatcaaattaacaactataattaatattaaaaaaaaatactattatcgatgttattactagcaaatgaccattacaatgatcacaattttcatcatagccatcatatattattattact

SEQ ID NO: 186974 - DNA, 450 bp, Glycine max
  unsure (1)..(450): unsure at all n locations
tgtcaccacgtgcgtgggagagacagtcattggcgccgcttcgttcaacgacagggccccatccactttcgcggcagcggttaacaacttggccccatccactttcacggcagctcgcatccttcgcaaatgcttgagcccacactctcttccttcttcaactaccccaaccgctcttcccttacccccgtgtcttccttcgaccccgcttcatcagtgaggggcccgctgactccttcgtcgtcagccccaatagccacgcccacctccgcagagtctccggctccggatctgtcgccgccgtggccttcgctgctgcggccgccttgatgatgtagattcggtattggaaccataaactctgcagtaagatgtcttnntatttgatgactttaaaagatgacatgtnttgctttctggtccttcttaccccaaaataattattttttt

SEQ ID NO: 186975 - DNA, 409 bp, Glycine max
gcttcttgcgtagccactcttgggctattattatcctattacaaaccctcttattactagctattttgaattctttagttcctgaatgtacaaccttcaaattgttgcttggtcccctctttcttttctgccaaaaagaaaatcaaatgctgtctaaacatggatgaagtcctaagaaaatcaatatcaaagaaaacatggatgaaatcacaattaaaaagcacaactacctatctttcagagtcctttggttaatttgtcttgtctccttatgtggtggggttttgtttaataatcttatacttttgccttccaaaaaaaacttatcactaatcctcttttcattaatcccaatttgtatattattgtataaaagatcatgggttctccacctgcctccactcctcct

SEQ ID NO: 186976 - DNA, 434 bp, Glycine max
  unsure (1)..(434): unsure at all n locations
gggaagatntcgctctgattgaagggttcctcttggtgttggttttcattggagaactacngcggntcgtggtggctactggttgttgtgggtgatggagaagaagcttgggacgttggaaatggtgttggaagaaagaatgagaaagaaaatggtgtttttttccaaggctacacaaatcacaaaggccgaaacactccattgcttcttctctcgggaaaggaagattgtctcacacgccagacatcanatcaaagatcgcaacagtcagatcgtggacatcggtcctgtgaatctgcaaaccaaatttcgagaagatccaatggttaacaaaagtaggagggcactttgaacgagacagcttccttgagaagcttcattgagaggcttcctcgagaagcttcctcgtgaggcttctttgagaagctttcttg

SEQ ID NO: 186977 - DNA, 448 bp, Glycine max
  unsure (1)..(448): unsure at all n locations
agctatacgatgnacanaagccatgttgaatttatttatgantgaaaacgcacctttgaatgactgatcgttttgaatttgaatctgacattacaattatctgtctttgtttatctgttatgttaacataaaaattattagttaattgttgttttttcaaaaataaaataaatggtccaactaaaataaagcgtgttatcataaaacgtgacaggacactataagacttgactacacattggaaaatgcaactgtgttaacataaagcgtgatacgacactgtaagacttgactacacattgtgaaatgcaagtgtgttaacataaagcgtgttaccatgtcatgtcattggtgtggtttacaacacagaccgaaaccatgtgcacgcgtatgtatttattttaaaanattgaatcaatgatcctgaaactcatctatatatatcaca

SEQ ID NO: 186978 - DNA, 156 bp, Glycine max
gcttccaagtttgtttagcataagaagtcacaagcgcttgaaaactctgaaagcaaacaatggagaaataaacttctacaccacaaggaaaaaagtgctcaacccgaatggtggtgccgaaaaaaaagtcgacaagaatcactcccaggaaggcct

SEQ ID NO: 186979 - DNA, 435 bp, Glycine max
  unsure (1)..(435): unsure at all n locations
agctatgatcttccaccatcttcgccaccttctttttagtttttctcttattntaatattattagtactttgatttctagccgtgtatctggctatattattattacatttgaacaatttagtatttctttatttgcatggtgtgtttgaataattatcaattatgttatatgactatgtgatttttctatatatctgatctattcatgtttcttgcttcatgattggtttatatttttccatgattgttgtgtgaatgcttagttgtatttgtatgtttcaaacttgttacgcactttggctttttgttgatgccaaagggggagagaaatagggattaaatcaagaactcacatgagtaatcaacttaattgtaagagaagcataaattcaaaaacaaagggggagaatgtgaaattatgtgagtgatcgact

SEQ ID NO: 186980 - DNA, 433 bp, Glycine max
agctagtgtcggctagtgtttttacactgtaatcctcttcaatggagcccttcctggactgcttcgtggggagcttcttcgtaaccaattctaggttgcctcctagtagcgcttctttaacgtcttgagccagatgcatgatgacgatttgtcgatcacggacacaatacctgctggtacctgcccgggtggttggtcgcctactggtcggccatgtgtcgtacgtaatgctccagcctttgtagatgagctgaggtggactctgcaagtggtggtggtgcatctgttgcccgctactgtgatgccttgccctgtgcctgcctaggggcgtagtacttctcgatgaaagccctgttaataggggcctgatgaccctgctgggggcgatgggcactctatagaactgacagaagcacgttatcagagctggaaa

SEQ ID NO: 186981 - DNA, 356 bp, Glycine max
  unsure (1)..(356): unsure at all n locations
gcggcataactagcctgataaatgccaaaggaaatcgtgggaagtatgggttaggctataagcccactcangcagatatcaagagaagcatcgcgggaaggaagagcggtagtcaaagctcgcggttgagacaagaaggtgaaggaagcccaccctgccacataagtaggagctntataagcgcangtctggnggacgaaggtcaagtggtcgctatatacgaagatgatgttccgcattggatttggtacgaccattgccctctgatttccaactgntgaaatggcaagtggaagaacgcccttgcatttacgcaacgaacataatgtaaacctctacggtttaaaagctctata

SEQ ID NO: 186982 - DNA, 332 bp, Glycine max
  unsure (1)..(332): unsure at all n locations
tgagatgaggaagtgttgtaaggtgaatctttttgcttttattgnngaccacagagtggtacctggagatatgtcgcgggggtcacgagaccttggggacgtcaagtggggtgctattgcccaaaccaagcttgaccaatcccgacccaacccgggcatagtcggtcagtgagaacctgtgatgtacctaaacaagcgaactcctgtcagtcaacagataaaaggaaaacaagaccacaaagcaatgaggcttgtggtggctggccacctgtgaaatttgtgtaatatgtggattgtggcctctggtaatcgattactaacggtgggtaatc

SEQ ID NO: 186983 - DNA, 347 bp, Glycine max
tatgctatataccgttcagacataaaaccacaagttcagtcgaatccacacatgattcatacaccccgtcttttttaatcataatggtgcgcagtggaaccaacattcttgatcactactagcctacctattatcagaccgcagaacttttaagtactactttttttacttcttttagctgctatgaccaagcggattggcctaaaaagaaaaggttttgcttatcacgagagcttttagtattaactctcgctttagaagtgaataactgtctacatacataatcatttgagccctcgaggctgagaatagcgctgtctaccgaagatgcgaccccaacaaaataa

SEQ ID NO: 186984 - DNA, 391 bp, Glycine max
  unsure (1)..(391): unsure at all n locations
cctgagtctctcccatggatnntgtggtatgttacgggttttcttatagcgtttatttaatgagntcttctctaatttgggcattttgtttgatatgtgagcctttggatggaaatggtgcgtgtttgttgtttccggggagctagaaggggaaaaagagattattattattcttcgaatgagctaattggaatagtgattgtgtgaattgaaggatgcgtttgcgtttctctgttgttgaaaaccaatgttaatgggttacgatcttacgttctggaatatgggtatgttaatgaatgtgttggggcatacttgagttcctatatgcttgccttgctcttggttgtgtaaattttcgatttgatgtcaaggacattgttgatgtgtcctt

SEQ ID NO: 186985 - DNA, 68 bp, Glycine max
tcagcttgatgcctgcggtgactctaagatcgcggactttctcaattttcctatatgagccgatacag

SEQ ID NO: 186986 - DNA, 453 bp, Glycine max
actgcctcagttcttcccacaaatctctcttcctagcaagatgacatggagcatatacattgacaatgaacaacttcaaattgtccttaatccatgtccctacaagcattaaaaaatttctgcctttcaccctcctgtccacctcgaaatctgaattgttccacatgcaaagtaagcctccagctgtgtgtactgatggaacactgtcccaagagacattagaatctccccatatgttttggcaaatgagcttggtgaaattctccttctttgtttcctgtaagcatacaagatccactttatactttaaattaagctttctaatagcagcccacttaatccacttcatcttataacaattaaagggtctgacagtttgctaatacaacaaattcaacaacccatctaatttccttaaacacaaaataactaaaagaagaaaaaatgtttgtg

SEQ ID NO: 186987 - DNA, 448 bp, Glycine max
  unsure (1)..(448): unsure at all n locations
aagcttgtaaagaatccaacctctcatggtagaagcnaacacatataaacaaggttttactatcttanggattaagtgaacaaagagaaactgaaagtggagtactgctgcacatttgatcaacttgctgatattttaaccaaacccctcaaaggggagaggtttaaaatgttaagggacagaattggattgatgaacctacgagatcagaattaagggagggcgtgagagtttaattttgttttgtgtggtgtagatttgattgtacattgaatataagagagtaacagaattttaaaattctgttataagtgcctagcctaagtgtgaagggttgttgctctattttgcttgtataaaacgacatacatacatcttattaagtagaggtgtttcattctatcattattctcgctctggtgctattcctagtgtgtaggtatgcaat

SEQ ID NO: 186988 - DNA, 419 bp, Glycine max
  unsure (1)..(419): unsure at all n locations
agctagtttaccccatgtttattttgtttacaatagagctgctcatagcaccactaattgttctccttttgaagttgtttatgggtttaacccactaactcctcttgatcttttgcctatgcctaatgtttctgtttttaagcataaagaaagtcaagcaaaggcggactatgtgaagaagcttcatgagagagtcaaagatcaaattgagaggaaaaataaaagctatgctaaacaagccaacaaagggagaaagaaagttgtcttctaacccggatattgtgtttgggtgcacatgataaaagaaaggtttccggaacaaaagaaatcaaagcttcaaccaaagtgagatggaccatctcaagtgcttgaaagaatcaatgacaatgcttacanagttgagctgcccggtgagtata

SEQ ID NO: 186989 - DNA, 355 bp, Glycine max
ggacattactctttaaagcaaaaatggcatataacctcctcccataaatacaaacatcaatgtaaatttagagcaagcttatgcgcctatttccttacaaacgttctcttgcaccagacatgtaaccgaaaaaatgcacccatatacaatcaaggcagcttcgttacctagattatttacacgtacctccaaggtgtatttgttacttacatcacacacatctccttggctaaattcacatacatgcatactcaaagcattttggggcaccaaaaattgcacatgtgcacatcttggcatttctaatacctatacatacgcaaacttcatgatgaatcttgactatctacacaat

SEQ ID NO: 186990 - DNA, 439 bp, Glycine max
  unsure (1)..(439): unsure at all n locations
agcttcgagtaacggagtctattggagatttggcggtnagggcggaggcgcacgtaaaccccatcgccaacttgaaattgcacgtcccggcgatgacgatcagcaaatgatttcatggctgtctgggctttcagtagacgtcgttgtagtttgcgatgaaggtcctggcgggtaaccaacatggagtccgctgcctccacgggagaggttccggcgacgtagtgtggcaatgctgggggaggtttgccatatgtgacttcgtatggagagagaccggtaccagaatggacagaagtgttgtaactccattctgcgagagctaaaaaggaggaccataatgcagggcggtcatggacgaacaatcgaagatattgttcgagaatgcggttaaacacctcggtctggccatcggttcctgggtgataagcggtactgtatc

SEQ ID NO: 186991 - DNA, 431 bp, Glycine max
  unsure (1)..(431): unsure at all n locations
ttgacaactcgtaagtttttntatgcacgattngcaacctatatgaaccggtggattaataagaccgggtctgatcatgcctataggaatcataatttttgttggagctgctgaagttaaaggcagaccaagaataacgaggaagaaatgagaaactattctccttaatatttgagtctatgttatgaatgggaagaaaaacacagaacattatgcagcaacagaacaatatgcagaatcaaatgatgcagcaaaatcagagcatgaggtagaaccaaacaaggaagaatgccaaaggccaaaaagggaaattaacaagccttattaccttaatgactttgtcagcaagtagtggagtgagcatggttgacttggaggaggtagtgcacacccaaggattcccctgtcggctgagcagtacaatgcccgta

SEQ ID NO: 186992 - DNA, 443 bp, Glycine max
agcttgtgtgttagagaatatttgagatttgttctccttgtgggtcaaattgttccaaaagatacttcttgtctagtgaatgtactaagaatgctgatagagtttgcactgcttgttctctttgtcagaacagctcttgttttaatgtttgtggacttcactcttcatcggggcttcatttgcattggcattggcatgatttacgtaaatgggtggtgatagttgggtgtccagttttggggtttttggttattttgctttgtgggtgtcttcttatggttagaaagaggtctaagaagcaatccaagtcttgcatgggaaaaccggatcaagaggatgatcatgtgaatgttgctcttaactctacaccttcagttaattcttgccccggtgtgcctcaagttttcaagctttctgagctgaaagatgctactaatgggttc

SEQ ID NO: 186993 - DNA, 445 bp, Glycine max
  unsure (1)..(445): unsure at all n locations
tgaagcagacatggtgtcatattttcccaatttaatactttatacatttcatacatgtattatcatacacaaattataatcttcctcgntcatcatcttttcatctttttttatttctaaggtaaatgaccatgttgattaatgagtaaattcttaacaatttagttcctaaaaattaaaaacttgaatacttaaataatgtataaaaagtatgataattatatcttatgatatgatttaatgtcaaattaattggtaaattttatgaaataaattgtttccttcaataattcattaagcactattcgtttatatacaagattacaagctaaagatatataagcaaaagatatgactaaagataaatctaatagaatgactaaagataaattcaatagatattacaactattaaactgaagataagcctaatagttaaaaatata

SEQ ID NO: 186994 - DNA, 423 bp, Glycine max
agctatgtccgcggaaaggtcatttgatatcattttaaggtccaacaccttaaatggtcctcttcacttttatcggttaaaatggaccgctcaaaagtgtaaaatcaacacaccgcataactttcttgctttcttaagaactacataggtttgagttcctcatcgcaattgaggatacgtaggaacaaaagccccacttttttcgaccccaaaagagatcgtctaaagtccaacgccttaacgtttctcacccaaaagagatcgttcaaagtccaatgccttagcatttctcacccaaaagagatcgtttaaagtccaactccttaacgtttctcacccaaaagagatcgttcaaagtccaacgccttaacgtttttcacccaaaagagatcgttcaaaggtccaacaccttaacagttctct

SEQ ID NO: 186995 - DNA, 458 bp, Glycine max
  unsure (1)..(458): unsure at all n locations
tgcttgtggggcttctatggaggctggatctttgagcttcaatgggatcctctaatggtgattttccaccatggagatgcagcggaaaacaaaggaaaagaggtgagaggaggcgccatccattaatgaataagccatggaagaaggagcttcaccaccaagatgagccttggataagaagcttggagaggatgcttcaatggaggaaaagaaagagggagagaaagagagaggggggagcacgaaattgaaggaagaaaaagggagagaagttgaactttgagttgtgtctcacaagactctcattcatcacagttataacaagtgttacacatgcttctatttatagactangtagnttccttgagaagatttcttgagaaaacttctttagaagcttcnttgagaaaacttccttgagaagctagagcttagctacactcacccttctcataatt

SEQ ID NO: 186996 - DNA, 443 bp, Glycine max
  unsure (1)..(443): unsure at all n locations
agctatgaataaagctgttttcaccttctctctaagccaatatgctggcttagcgagcatccgctaagtgcaacactcctgtgctaagcgcgaggaagaatctagaagaagatgagttgtacaggttcgctaagcgcaccgcttcatctctctaagggcaccgcttcagttcatccactaagcgagaaaggcgcgctaagccaaaaatcactcacgtgcgctaagcggtccatacatgcgctaagcgcacgagcacgaacaaggctacctatttaagccttaaatcagattttgtgaacagagtttggactgggatttagagctctgcatgtctagggtttctagagagagaaaggtccaagttctagagagttntgagagatnttgctgtgtgaagatctgcagagactatagcttgaagcagaagcatgtttgagagcttg

SEQ ID NO: 186997 - DNA, 436 bp, Glycine max
  unsure (1)..(436): unsure at all n locations
tcatcaagtcttntatctttacacagtctatctatcataatatntacgggtatgatattagagaataagccagcctctttcgtggagtcccgaactttcagagcaacttcaagttctcctgccttacaaagcctgtcaattaaaatattgtatgatgtaagattgggagctgcatccattttcattgcttcaaggattctcaatgcttcctcaacttttccctttcttctaaagcaagtcacgatgcaattatatgcaattacattaggtatacatccctttctcttttgcctctcaagtaagttgtatgcttcattccccactaaaccataacccattatcatggtattataaggctaaacacaanggaacactgtgttgttgtcgagttcttgaaacaactctatagcttcatccaactctacagcttcatcca

SEQ ID NO: 186998 - DNA, 373 bp, Glycine max
  unsure (1)..(373): unsure at all n locations
agcttcatgctgctcaatagcttcangttgctgcatggaacggcaaaggtctgtatggtggtcactataagagcacataccacacacccttgcgacaggtacagatttctgattcaaggccagctgggttaccaagctaaccaatgcatccagtttgccttcaagcttcttagtttcagatgatgcagatgggtttgtagctacctcatgcactgctctaataactatggcatcatttctggcgctcaactgctgggagttggaggccatcttctcaattaaattcctggcttcaacaggagtcatgtctacaaaggctccaccactggcagcatctatcatacttctctccatattattgagtccttcataa

SEQ ID NO: 186999 - DNA, 358 bp, Glycine max
tgaaaagaggcaaaattaatcatcccacttggacgaatgagaaaactggggcaaatgaagagggtgagaatgatggagaaacccatgctgtgactgccattcctatacagccaagtttcccaccaacccaacaatgtcattactcaggcaataacaaacctttttcttacccaccgcccagttatccacaaaggccatccctaaatcaaccacaaagtctgtctaccgcacttccaatgacgaacatcacctttagcacaatccagagacgccaaccaagaaatgaattttgcaccgagaaagcctgtagaattcaccccaattccagtgtcttatgctgacttgcttccatgcctac

SEQ ID NO: 187000 - DNA, 423 bp, Glycine max
  unsure (1)..(423): unsure at all n locations
gtagagtgtccttctgttaaggctgtgtgtctttngctcctgaatctataatataaagatctttctttcatctgttcctacgtctatacccattctcatccatttgcatgtttacttctttatgtttaanactccagatgcgacgacgagtccctcgaaggtactaatacctgagacccacccatcgactttgacctcatcaagaagagacagaactagttgacttgggaactggcagtggaaaaagggaagtaaagataggcacgggtatgaccacgcccatccgcgaagaattaacagccctgctaagagactaccaagacatctttgcttggtcgtaccaagatatgcccgatttgagttctgacattgtacaacaccgattaccgcttaatcccgagtgtccccaataanacagaaact

SEQ ID NO: 187001 - DNA, 264 bp, Glycine max
  unsure (1)..(264): unsure at all n locations
gaaaattggatttcctgggaagatgtatttcaatggttatantttttccgaccattcaatgcggtccagaatgcgggattccttttgaccaatagaattgtttttcaatatattacataaaaattgtgaatcttcattaacttgctaatcctagaacttatttagcatgttcctcaatatgcatgagtttatcgggtatttctgtatttcatggtgcacatttctttatagagctttgactagtgcaatttatttgattaaaga

SEQ ID NO: 187002 - DNA, 462 bp, Glycine max
tatgtgcctgcctagtttatttctttctttactgaaattatttgtgttttgtgctgaagagtgtgctgtaagaaactttgaatttggtgatcataacatacccaataatctattttgaaaccaggaaaaaccgagtccatggatccaaattcaacaattattgttcctgaagataggcatggactccatgcaattgacattttggaccctgacttggtatgcttgttttaaactgagttgcttgaattgcaatgcaaatagccaagcaatttattcatgaatcctgtataattcttttgagcagatgtttggaagtgattctgtgtattatttccatgacatgatcgttgaaatgcgtaagtgggggtctgaagagggaaagacgctctttggttttggatatgattttcgccaaagtaacacgtacctaattaattaaagctggagcaatttacaaatcat

SEQ ID NO: 187003 - DNA, 403 bp, Glycine max
atacacaataaacacaaacaaatacgcagcttcaagaaccttgttccggagtagtagtaataataataataacccaaaaacaagaagagaggctcaagaaagctaaacaaaactgtcctatacaagacattcctaagaaagagttcaacatagaacaaaaaacatacaatcacaagacataccttgatggtcgcaactagtcccaacctgaaaaaccatcaacctcatcagtcaatccctcaatcataaacattacaaacaattgcatttcacaataaagattaaataaaaacttgcatcacaagacaacattaatctttcttgaaaaaagttatctcgcaaagccacattatttaatccacatcaataacaaagccgcgacatcatcatactcctatcacaa

SEQ ID NO: 187004 - DNA, 464 bp, Glycine max
  unsure (1)..(464): unsure at all n locations
tacaatactcaagcttngacttgagtcatcaagagatatgaatatgtgaccatggcttttatttcacatcaccctctccaacatctgtttcaacaatcaagaaatctatctttcaatcttctctctcaacatcgttcaactctttcaacagatcctttctgattcatcttctcttcatccttctaaaagttttagttcaaaactttttctttcacaanagttctttgatcaaaaacttgtgctactcatcttttttattctcttctccctttgccaaaagaacgaacgactaaccgcctgaattcttttatgtctctcttctctctttccaagagaatccaaaggacctcaactgagaattcttttgattcttcccttccccttaaactaaagatctcacaggactaaccacctgatatatcttttgttttccctttacaaacattcaaaagactaaccgcctg

SEQ ID NO: 187005 - DNA, 386 bp, Glycine max
aagcctacagcacttgtgaatagaggagtttccttctaacctacaaataagctatgttggcaatgaatgttcatgacacaggcaatcattgaggcctttagcaagcacaaatatctttgtatatctatacaatgcatattagaaaatctcagaatatctttagtggatggagaaaattatccaaagtacctaatatatctaaaaaatatatcttagtcattggtaggataggtccatattctcataactatgagtatactagatctattaaattagacctgactacgttacataaagggaaaagcttggtgcacacataatatacgagcaaaaatgacatttggtactaacattttggctcaaccttaattaaagacagaatgcac

SEQ ID NO: 187006 - DNA, 362 bp, Glycine max
cgaagaggcacatctcttcaaaactaactgtgtaatcgatcaccacatttatgtaatcgattaccagcaaggaacttctagaataactcccaagagtcacaactggacaaaactttgttgaacgaccatcacagactgatacataggtgacttggggacaaaattccctacagcctttctgaaaagaaagtgccttatcctccgaaaaccaaattgtcatattctctcaaaatattccgtaactaaacacatgcgtattcaataaggaatcgcgagcgatcttcacatccgcatatcctactatcacagagagaaatcccttctcctaattcaaagagaagtggtaagagaccatgagcctc

SEQ ID NO: 187007 - DNA, 442 bp, Glycine max
  unsure (1)..(442): unsure at all n locations
tgggatgaaaacattatcaccaacatttttgccagaaatgatttcagctgcaatgacatgtttggctagtctagtaactattaatctagtaccattacagagtccttgcgtttggtctaagtttcttagcaacattataggactatcgatttttagcttgatacgatgatttggcagaccagatgtgtttagtgaattgagaaattcaattgtgattgattggaaatgccaactgtcaatggtttctgacttctctatataatcagagcttaagtattccatttgttcacctattaaatttattgaggtaccatacaaagttaaatagagaataatactgagtagaccttagtttttgtaaatntcagatgtgcattaatacttggaatcaatgaatgttataatcatcgcctcttcactgtttatagtggagctatatgct

SEQ ID NO: 187008 - DNA, 458 bp, Glycine max
actttctggcgttatatgttaacacgtatatattgttgtgatgaacttatttgcgttgtttatattatgtaaagtttgagtaatgcatgtttagaatatttgactataatttgtttggaatgtatttgatgcttaattgtattgttaagaaaatacattataacttgtgatgaacttgtttgcttgtggtatgtatgtgattgtggtggtgactgttttacaggggcaaatgaataaaaatgcagctcatattcaaaaagaaaataatacttttaagatctgttaataccaaaacagatgtagaaagttttttatattggattgtgcaataatcgatgtaaaacatgaactttttatatcagttaatgaaacaaccgatgtaaaacttttacattagttataaggtaaaatcgatctaaaacaggtgtttgtagatcagctaatcacagagtcgatgt

SEQ ID NO: 187009 - DNA, 442 bp, Glycine max
  unsure (1)..(442): unsure at all n locations
agctngctagtcaactttctctatcaagctctatttttctattaacatcatatgacccaacaaatatgtacattaaggtaatcatgagatgttattttcagactattatattcaaaaaaaataagcaagatcttaccattctctcctggtttgagacgaccacctgtgagtttgcagaatgtgtttccaacttgtagaagaagtatataaggatgattgtgctcttgtagaccaaagatagcttttagacaaaaccatgaaaggactaacccaagatttgttaattgccaaactaatgattntttgggtcaagatctcaatactcagtagccagacaaaaccatgaaaggactaacccatatttaccttactagacaataagcttctagacactacctttatgctnttgttcctcaatttgaagataaagacagaaccgaat

SEQ ID NO: 187010 - DNA, 474 bp, Glycine max
  unsure (1)..(474): unsure at all n locations
actaagctgggattnctttagagggaatctatccttgctaatatggatcctatcccagnccncctcattaagaactagctcatttcttcctctattgcccttagttgaatacacctttgtttggttctctatttgggtcttaaccctctcatgcaacttctttacaaactctgacctagattccccatctctatgtataaaagaagtgtaaagtgggaggggaatgaggtctaagggtgttaagggattgaacccatagacaacctcaaaaggggattgcttggtggttctatgaacccccctgatgtaggaaaattctacatgaggaagatactcatcccaagacttatggttgccttttagaagagcccttaatagggtggataaagacctattcactacctatgtttgccatcagttcgtggatgacaagtggtagagaaaagaagcttagttcctatcttagcccataat

SEQ ID NO: 187011 - DNA, 244 bp, Glycine max
atgccccacattattttcatgacacaaatgccaaaatgatgatttggaaactttacgcaaaactggtcatgcatgcacctatgcggacactcaagtgacaaatttttatggtcatgtgatgctagggctcaagattcgcttcctttattttaatcaacccaatgttaccaaaatatgttcttttatcaattggggcattcatgcgagtccattttgggcggtcggagatattcacagcatcacc

SEQ ID NO: 187012 - DNA, 336 bp, Glycine max
  unsure (1)..(336): unsure at all n locations
ctcttgacancatcaaaagctttatgatttacatgaagagcctccggcacgggctgaaaagcttgagtgaagtgcctataggcgggtaccgcgggacgattactgcgacttaagccacgcaagcatcgaagtgacggcgtgtgcatttccctacttcctctgtgcaccagctattccagatcctctatggctggtaccggcaggggagaacgaatcaaaattccctctcttcatacccactcccatcctttcttcggaggataccaagaccgcacagctggagggcatgtaccccactaacttctaatactagaatacccacaggcgatgcactat

SEQ ID NO: 187013 - DNA, 348 bp, Glycine max
  unsure (1)..(348): unsure at all n locations
agcttactatcgagtgaatgagtcttcaatttttttaaattagaccaaaatgaaagncattttgggttgtnttttatctgtttagtgctcaacataccttcattatgtatatgagtaggtggtggccttcccgatttcatttgggaaaggcacacgttgtaatngcatgcatgtaaggagttcaaagtgctcgaaattgtccgcaatcacacagccattcattcaatttgacatgtcatacctttatctttcttagaatgtgagtttttggcctaactcaaccccaaaagctagctcaaggggtgagggtttcccctcacttatatattctaatntgtctctatctct

SEQ ID NO: 187014 - DNA, 361 bp, Glycine max
  unsure (1)..(361): unsure at all n locations
agatactcaagcttgacattgctattggaaacgagactgtggaccagttntattatttagaaaancacaattgttgcatccacaattgtagtcaaaatcgtggccacaattgtggttgtgctgcagctcgggacgcccccaaaaccttgacgttgcattccaaattgcagttgtagatttttttaaaaccttggtaacaactaaccaagtagttattttttggttgacttaaactgtgtattggtgattatcctttaaactaacgtttgggtgagtgcgacgatggcgtgcgggttatgtcttacaactttgactcttaacattactcaggagtgggatggcctacagaatccttatggga

SEQ ID NO: 187015 - DNA, 356 bp, Glycine max
  unsure (1)..(356): unsure at all n locations
tgcaagcttctttaaatcacttactntatcaatctatctacctatccccaacctcggagttagggtgtggagtatcgtcaagttctttcaaagcactggtgaatacaaggaacattacaatattgatgttgctgagtaatgctaatgcaaatgtattggaaaacaacactggcctgttaattattcctttaaggtagttgtttggcctattatgcaaggaacaaaaccagacaacaagattttccttatgcaaaatgacaaccatttgctagtgtgcactgcaatggagaccaatataggttattgtagtattatacattatttaaattcatttgttcagttatacttacccattc

SEQ ID NO: 187016 - DNA, 463 bp, Glycine max
  unsure (1)..(463): unsure at all n locations
tagctacacacccctataatagctaagctcacccncatgacaaaatacatgaaaatacaaaaaaaaaacctactacaaagactactcaaaatgccctgaaatacaaggctaaaaccatatactgctagaatggccaaaatacaaggcccaaaagaagaaaaaaaaacctattctaatatttacaaagaagagtggatccaaccttgacccatgggctcaaaaatctaccctaaggttcattagaaccctaaggccttctttatcagctctagcccaatcctcttggagcttcttgctcatggctctggtaactggtcctttcctagggacgattgcatcatcccctcccccttgaagaggatttgacctcaaatctgttggttcctcctcctctatatcagcttcacctgcaaaaggaattaaatcagaaatattaaaagtggtgctaactccatactctctt

SEQ ID NO: 187017 - DNA, 394 bp, Glycine max
agcttgctctagatatacatagatgtttttatttatgggaggaggttgtatgtcattcttgttttaagaatagtatcccactggtaaaactaactttccaaatgtttgccttcgcaggaaatggccccaaggaagcttgcctcaaagaggtccaggaaggacaaggcagcagaaggaactagttccgctccggagtatgatagtcaccgctttatgagcgcggtacaccagcagcgcttcgaagccatcaaggggtggtcgtttctccgggagcgacgcgtccagctcagggacgacgagtatactgatttccaggaggaaatagggcgccggcggtgggccaccactggtactcccatggcaagtttgatccataaatagtccttgattttat

SEQ ID NO: 187018 - DNA, 380 bp, Glycine max
  unsure (1)..(380): unsure at all n locations
tttttgaaactgagctactcataccccctctataactaagctcacctccttgagaagctttcctaagaagattgctaaagaacctagagcgtagctacacatacctctctaatggctaaactcacctnccttgagatgagaaagtaaggcttatctacacaccccctataatagcttagctcacccccgtgacagataacatataaatacaaaaaaatagtccttattacaaagactacttaaaatgccccgagatacaaggctaaaaccctatactactagaatggcaaaataccaggcccagacgaaggaaaaacctattctaatattacaagataacgggctatacttagccatggctcgaatctccctaagctatg

SEQ ID NO: 187019 - DNA, 445 bp, Glycine max
  unsure (1)..(445): unsure at all n locations
agcttccncaagaggcatagntatttcatgtttcctgaaaatatcaaggaatctcgccagatagcggtccttgtctttcttggaaggtaccatgggatatggtacttccgtatcctcattcgaagctttttctttcttcttctctcttgctttctcacttctactcttttctttcccttctttatttttttcaactttttatttttcttcattttctttttctacctctatntctttttngtggtcatttatttctttctcctcgacaattattggtttttcactctcctgacttgtcacatctattacctcctctttctttttctcaatgccatcctttacaacaatttgtttctccaaagccaccttatcctcatcctcaactaccaaacacttctttgttcttgtcatcacaacattacattcctctttgggattcttttct

SEQ ID NO: 187020 - DNA, 362 bp, Glycine max
cttgaagcttcacatactacagacgccccttgatgaactcttaatgctgcacaaaacactcgtaaacgggagcccactcgagtgacaaactatttgaataaacaaaacccaagggactattgtcaactcatgactaagtagagagtcaatctaaggaacctttctgatgagcattatgaacggtcatcaaaatggtgatgttgatgatagctaagaatggatcaatatgaaagtggatccttatgatgaacatcaactcatatggctatctgaagaaacatagcttcatcactcttaacacaacttcacaacgcaaagcatttctaatttcatcgcttccatcataagacaatgatagacaa

SEQ ID NO: 187021 - DNA, 227 bp, Glycine max
atctccttgctgctcggagcttggcaccttcttacctgatcctcgccatatcatggacttcgtctgtggtttcgagggctaccttcataatttcttcattttgctgtggatggaacaacaatctccttattgacagttccctgtcttcacaatgatcatggccgttgtgccatatgtgagtcagtaaagaatttcattggttgctatctggcgtgaacagtggtacc

SEQ ID NO: 187022 - DNA, 463 bp, Glycine max
  unsure (1)..(463): unsure at all n locations
aactatnaaactcaagctcgctnantataataggaagcaccgagattatatatttttatgcctactattgacatatagcattgaacatacattaaactagctagagagaataaaaattgctgataatagtacactccatatgtagtcatgatgcgtaaaccactactgcaagaaaacactttatattatagtattagctagtaatttttgtggttgtcttgatcatgctnggcctcacatgactgacaggtggcgaatacatctgcctatatagacccttccccataacttccttttttactacttcttaagaaaatctctaataggaaacagtagaagaaaattaccatgagacttccatggctgagaatgaagggtcagttaaagagagttattgtgttaaatgtgcttaaaatgtatgaggtattattcacttcatatcaacttgtgtaatgagagccta

SEQ ID NO: 187023 - DNA, 408 bp, Glycine max
  unsure (1)..(408): unsure at all n locations
ggttgcgagnttggattttggtttgtgtaattagtttaattagggagattagatgtgcctaatcaaggctcatcactttattctgagtattcactctatatattagtggaagttagttagctcattttgtaaaaaacaaaattagttacttgttgtgcaaactttctttattctctcttttttttctcaactgttcttcattcttcttcctcttttcacttctgttcttccaatttcttgcacaaaatttcgtgtcttttccattggtgatgatcatcaaaggctaaacaatntatcaatccaaggattcactctaaacaagggtgaatttgagtttcgggttagtatctctaatctttgtgaatgttcatctntctcttcaatggctatttcgattttcatgatatg

SEQ ID NO: 187024 - DNA, 456 bp, Glycine max
  unsure (1)..(456): unsure at all n locations
taaggtcgttgtttctaccccataaagcccctcgaaacttgtttcggccgtgttcttcctttcgggccctctttgtttcccgttctaaagctttggtcgtggctatattgatgtccctcagtttatcgcactttttcttgaccttgatggccattattttgaacttttccttgactaattgtgccttttcaagtttctcttttaaggcttgcacctcctcaccctcctcaggggtttcagcctcttcctcgcttgaaacctttagctttgggagccaatccaactcttatgtccgagctttcaaccacctatgatagccgccgatgatcccattgttgcttcccctaagctctntatcattcctttgcattgcaccccatgctttgcggactccttgaagtatcctcgcattgtggtcactgaaaccccgtgcgatgaaaggcgtgatactttcct

SEQ ID NO: 187025 - DNA, 353 bp, Glycine max
  unsure (1)..(353): unsure at all n locations
tcaacaagtggtattaaagcagtattcttgtataaagnttaaaaacttcaagaataattatggcctcgtctaactttccatttcctgagggaaattctattaatagacctcttgtgttcaatggtaagggttatcattatcggaaaacctgaatgcagatctttatagaagccatagatttaaatatatgggaagccattgaaattggtcccttcattcctacaatggtagtgagaaatgtgattatagaanaacccatagaagaatgggatgatgatgaaagaagacaggttcaatacaatctaaaggccaaaaatataatcacttctgcattaggcatggatgaatatttt

SEQ ID NO: 187026 - DNA, 378 bp, Glycine max
aagctgcctctagaacatttacattgcatttaatgatgaaatctatgcattttcaggagaaaaagaggctaagctttgaaatgccaaaagtagtacctgggctaacgagaatctggcagagcatcaacatcaaagccgcgcgttaagtgtgagatcagcgcgctaagtgcagtaggtgccttcagccaggctcagcacaagattggcgctaagcccaattacacttactcgcgccaagcgcgagagtggcgctaagcgcaacgtcatgaattctaagcccatctaaagcctattttcgagcagaattatggtacacacctctcgagactcggcacagaattttcacaggcactcgtgcacagcattccacagtgccta

SEQ ID NO: 187027 - DNA, 334 bp, Glycine max
ccacagcacgtaggcctccagatcaatcttttctcaacacggaggagtgctgacctaatagcacaatacggtttcgtctaggaacaccaacattccctcttctcctcctttcttcatcagtatgagctctattctccattagatccaacctgccctggagcgcatcatactcgttgatcattaacctctccaaaggcggcattaaagcccgcattcggaattgcgaaagccccactccaacattaggataagtacctgacatctcaaacaaacaaatcaaacgtacaggacaatgatacgcgctgctagaaacctcacccactcaagcgtatac

SEQ ID NO: 187028 - DNA, 377 bp, Glycine max
  unsure (1)..(377): unsure at all n locations
tatcatatgcgtgtcatggaaatgaattaagggcgttccctttatctttgagccacttgctagataaatatcccgacatacattaggtacaaccttctgcaggccttttgaacccaacctcaaactttttggccataaacctagacctatgatggatattccaaccctacatttggaaaggagaatataaggatcagccaaaataaacttcntttgccttagagtttaagtgtgcttcataagaaaagacgcgaataaggagagaaacaatacagccgccattcataattaagaaaacgagttttttttgtaaaaataaaagtttttgaccacacatgtctaacatgcgctatatgcctaacacaaaagaaagtaca

SEQ ID NO: 187029 - DNA, 357 bp, Glycine max
gacacttccaaactcaacttgaatgaggaatgtacaaggggaaacagactgctttattctttgaccacagagtggcacctgcagatatgtcgcgagggtcatgacaccttgaggacgtcatgtggggtgctattgcccaaaaccaaccttgaccaatcccgacccaacccaggcatagatagtcagcgagaacctgcgatgtacctaaataggcgagctcctggcagtcgacagataacaggaacactgacgacgaagcacggaggcttgtgtggtggctggccagctgtgaactctgattgacatatgggatatggcctctggtaatccatcaccaatggtgggcaatcgattaca

SEQ ID NO: 187030 - DNA, 411 bp, Glycine max
agcttgctacatggatgcatactgactatgtcatcttcgattgtggcaccttaaatttggaggcttaaagtttctatcaaagaagaagatggtgagagtactaccctctattaaccaccctaatcaactttgtgaaggatgtttacttaacaagaaattcataatgagttttccaaaggagtcaaactcgagctaagaagccactcgagctaatacatgctgacgtctatgggccaatcaagccaagctcactatgtaaaaaaattatttcctccttttcattgatgaattttcaagaaaaacatgggtctatttcgtaaagcaaaaatcagaagtcttttctgccttcaagaagttcaaagctacagtggagaaagaaaatagtcgaaaaatcaaagccatgaggattga

SEQ ID NO: 187031 - DNA, 472 bp, Glycine max
  unsure (1)..(472): unsure at all n locations
actcaagcttttggttgntganatacaataaggcatgatgagtgagagcatgtttttgacgtntccccttaacgccaacacttggttcgggctgcaccatgtcttccttgtgcctagatagtgtgaaaatgtccttcaccatgtacatgtgtatgctgaatagctagctaaatgctttgcaaatgtgcatatctgctgaaaacggtacgaaaatgcatctcacagtacgaacatatgatatgaaactgcctctcaagaatgtgaataagtagtacagaaatcacttttccaatgaaggtgcaatatgaattcgctttcaaattatggtatacatgtgcgaacataacatgaaattgcctctcaatcgtatgaacatgtatgtgaatgacatatgaacatatagcacaaagaatggggtatgtggttagccagactcttganaatatgtatggatagcttgactcataccgta

SEQ ID NO: 187032 - DNA, 163 bp, Glycine max
gacatttattctttattctttgattagaatttgtgaatagttagttagaatttattttctcttgatttggttaattgctattttgtttagtacttcttgtctgttataaagaacatggagattcaagtaggacagctagcgaagcagatagttgaaaattcat

SEQ ID NO: 187033 - DNA, 457 bp, Glycine max
  unsure (1)..(457): unsure at all n locations
ggtgcttaagtaagtaagacatgtgcctgagatgcatttaaaccttatctaacaggaaagctagctaatgttgggatgataaaccagttcggtgttggcaaatggaagcttagtagaggaagcatagtcgttactcgaggtaagaaggaaggctccttgtacatcatgtagggaactatatgcaaaggggagacaaatgttgctcaagatgcagccaaagaattatggcacaagagattgggtcacatgagtgagaaaggtttggagtttctagcaaaggatcactttccaaacataaagtgatgtaagctccatgtggagcttgaaggcctangatcttcttcatcaatggattcctttgcttcttggaagatgaatggcagcggagtaaagaaggaagagagagaggagacgccacttcaaggagaagatgagtctagaagaagctcaccaccat

SEQ ID NO: 187034 - DNA, 351 bp, Glycine max
  unsure (1)..(351): unsure at all n locations
tgcacaacaaagtttccacatccacaatgcgcgcacaaacccaccattccctgttgcccacctccaactgagctcacgtactcccacgtagcccatatcctcggttctcttaacaccgggtccccatcaatcctcccaagcttccacaacatccaagcaaaacaacattcaacagcacaagctatcacagccaggcaaaacagagcaaggcataaactctgcttaacacatcaaccaaaatcacagcttttctcacttaaagaccccagaaccaattcttccatccaattcggtaaccgttgatcgactcanaatttactggagttatagtgatagcctacattgtgacgt

SEQ ID NO: 187035 - DNA, 462 bp, Glycine max
  unsure (1)..(462): unsure at all n locations
cttcgcacagcttacggtaaatatctgggacctttcctgtgttaagtctccacagaggccattgcctccctcgcccagtattatgatcagccattgaggtgcttcacctttggggacttccagctatcacccatggtagaagaatttgaagagatcctacgatgttctctatggggaaggagaccatacctcttctcagggttctacccctcattggccagaatttctaaaatagtccaaatctcggcgcaggaattagaccgccaaaagcaagtcgaaaatggggtggttaggaataccgagaaaatgtttggaggtaaaagcaagaatcttgacaggtagaggcgaatgggccccattcatagacattctcgcgtngtgatcttctgaggagtcctctctccgaatgtggatgggttggtggacctggcagcgatcgacgtcttctcgcctatcataaca

SEQ ID NO: 187036 - DNA, 464 bp, Glycine max
  unsure (1)..(464): unsure at all n locations
atcctctagtcacctgcggcatgcaagcttcacacaggcaagatgtntcattctttattctctatcacatatatgtcataaatggatgttgcaagtcatttcccatcaaataaaggataatgtgcataatcatcatggatcaataggattntttaagatcggacttgtaggaaattttggatttggttgctttggtctttttttttgtgtgtgtgtgagtaggagagtatgcacaaagatttggttagtaacttaaacgggcgatcacttcctatcccttcacgtcttgaccaagttactatcgtttcccttcctttntactctttaccacaactctgtacatgagttatacatttgttgttccaaagaactcaatttcttttccattcctattgtcttctccatttgatgatttcctctctcctttttttctctttcttcttttacttcttggcttttttttt

SEQ ID NO: 187037 - DNA, 464 bp, Glycine max
  unsure (1)..(464): unsure at all n locations
tgaaatgaggaagtgtggaagggtgagacttcctacttttattctttgaccacagagtggtacctggagatatgtcgcgggggtcagaagaccttggggacgtcaggtggggtgctattgcccaaaaccaagcttgaccaatcccgacccaacccaggcatagtcagtcagtgagaacctgtgatgtacctaaacaggcgagctcctggcagttaaccgataaaagaacaaagaccacaaagcaaggaggcttgtgtggtggctggccaactgtgaatcttgagtgatatatgggatatggcctctggtaatcgattaccaagggtaggtaatcgattacaaggcttaaaaacgagatcaggaaactaagagggcttctggtaatcgattacaaaggggcataatcgattaccaggcttanaaatgggactggaatgtggaaggggcctttggtaatcgattac

SEQ ID NO: 187038 - DNA, 422 bp, Glycine max
tatttttacgcatgggctcggcttagcgcgaggataagaccgcttagcgaggtttgcaaatccgaatagctgcaactctcgctaagccaggctatggctggcttaactaaaataatgcatcttaagtacagaggagcatgcacttagttgataaggcctcgcttagcgctcacattgctgcaaggaatttagcttagctgccatgactggcgcttagctttatgaacctcagttatggccgtatggaattgcgcttggcgacactgagtcgcgcttagccaatgataaggtgtcgcttagcggccaggctgaagcttagccaaattcagatcgaattgaagttggcttagcttatccttggctagcttagctgaccaaatcaccctcagatgcaaggggtgggcgctaaacacttgagactc

SEQ ID NO: 187039 - DNA, 448 bp, Glycine max
  unsure (1)..(448): unsure at all n locations
ntaggaganaccattaaggctaaggtaggtcctaaacaataatgaactgaggaagcttcgccaagtatgcccattggaaaacctttattcaaacctttcaaagttagagagaaggctaaacgaaaaattagggaacttagaaaaactaaatgcttaattgaaggcgtaggtgacaatcatagtgaattactaaacaagattggtagattacttaaggtcattccaaatactccccaagcctcgaaaaatacttccaaaatggtaataagaagtacctccaaattaattaatgttattaatgaagatagtgaccaaaactcagataacacaactgagatagaatcagtgtcagaaaagaatataaatccaattaattccaaacactggagaacaccctccaaattatattatcaacgtccgactgcccctgaccttctattagaagaga

SEQ ID NO: 187040 - DNA, 297 bp, Glycine max
aatcaactcaatgacacacccgaaagttcaacttatgctcaggcaccaactataactgctactcagtgtcaacaattgatctctttcttatccaatcacatgaaaaccgaaaacaccattgatgtaatagccacaaatagtacaggtatctgcatgaatgttgattttaataaagattaccgcacttggatcattgactctagggatacttctcacatttgttgccataaaagctgtaagattcatatactaccattttatactctcatgttctactgcctcattccacgaaagtta

SEQ ID NO: 187041 - DNA, 462 bp, Glycine max
tataagaacgaaaatgccgaaatcatggcaaaatgcttgttatttacgaagcaccgacaagaatcaagccaaggctattatgcaagcaagcaatggggcataacacaccaaaagattatgatgatggatggctcgaatcctcacaaaggtaaacttatcactttcaaaactatcatgacatgtaaaggaaaaacaagaatttcaagtcacaaaatgtcaagagacttttattttcagaacaattacccattacttgaacatattctataattcaaagacaaacatgcaatatttacacgacaaaactaacaaaattaaactagaacccaacagaactcacaaaattaaactaatttaacacaactaaccaaacctaaaccaaagaacactcctccctacttatacaacacattgtcctcaatgtagcacaattaaaagaatacaagtcattaaaccatccaa

SEQ ID NO: 187042 - DNA, 101 bp, Glycine max
tctgatagaccatacaagtttcctgacgatttctaattatgtgggccattaagactatcatatgctgacaatagccgagaaacccgtgaatctttgtcggg

SEQ ID NO: 187043 - DNA, 389 bp, Glycine max
  unsure (1)..(389): unsure at all n locations
gtcacctgcngcatgcagcttgagctcaaaactgctttgtttatatagaagcttatttaaacacattgaaaatgataatcttcgattgctgcagaaattcaggaaaagaattgacaagtaatcatttctcttttagattcgctctctttctctctccctttgtagcataaaagaatagactaacattctgtaaatattcgatgctcaagagtggtatagttaggtaatttaatgaggagacataaggttggtcaaaaggaaggagaggtaacttggtttaaatcttttcttatatttctcatgtggaatcctttgggcctaaatacatgaattagattcatgtaatgctcatttactcgtttctggtcaaaaaccaaaaaactaaaaat

SEQ ID NO: 187044 - DNA, 370 bp, Glycine max
  unsure (1)..(370): unsure at all n locations
tcacattngtaattgtagtgtcaaacaggggtctcatctgataaggtagttgaattcagcattgaaattaaacaatgagtactcccttttttttaaaaaaaatattgctaaaaaatttagagaagaatggcaactattttcatatttcataaggaaaataccattccacataagctgtccaaaatcgtcagggaaaagtatcgcagctttagctcagcatttatgttttcccgagtcttgggcttcaccgaatcaccgattatgtatgccaatcggcttgatggctttttaaggtcagaacgagccacaaatgtgcaagcctgcacacatataggatgataagtaacatttttttttcatttggnggggg

SEQ ID NO: 187045 - DNA, 443 bp, Glycine max
  unsure (1)..(443): unsure at all n locations
ctctttcttgctcattcgagctnactttagcatatacttgctttgctnttctcacacatattcatacttgagcatcatagtcatttgttttgcaagtccccctcatgtcaaaaaaggtacctctccatgccgacgtgtgaagttcgggactccactcagccacgtccaccctcacgtgttagggttctggattttggtaagaacatttggcgcccaccgtgggctacggtaaaacataccttgtagcttgtcatcaatcctctcacattcatccattgttagcactcggtctggcctcagacgtgagaccccccttatagactctcatccttgtctggcagctatgatagacacaaacattctacaacaacttcaataccacattccacagatggaacgactccatgaggaagggttgactaaaaaaaagctgccatgactac

SEQ ID NO: 187046 - DNA, 297 bp, Glycine max
tacattgcctcctggatctatggttcacaatgtcttctatgtttctcagttgaagaagtctattggtactgccacttctgggaactttatgccttcacctttattggatacctctcaaaaggaacctaaagctatcattgacaaaatgatagtccagaagggaaaacatgttgccacccaaagttttggtcaatggaaacatcaacttactaaagatgccactttgcaatttttgtatgaactcgaaccaaaagtttcttccctttattccttagggacatggttccttttggtggg

SEQ ID NO: 187047 - DNA, 484 bp, Glycine max
  unsure (1)..(484): unsure at all n locations
gcttcatacaattaatatagaacctatattctattatcttatcccatcagagcactgtgtcacgacgtccttcagcacaaggttccttaaatcacttcacctagccatctgctcccccgaacacaaggttcaagatcatcacaggatccaaacacaaacaacacacagggagtgagttatcacattcctaactaatagagaaaaataaaacaacatatatgtataaatatcgtataacaaaataccatttacttgagcataactcacgttatttcaccacacgtctcattctgtttcacaacattcgcatactcaatattcaaaacacaatatcatcaaatcaatcaatatagaacaatacacaagcgttttgcagcagatacactaagactcaatcctatattgcatgtggtaccatgtcaattgaaaacctcgtcggcgcctagagtacatgacangacaaccacacactacaagtaagtcc

SEQ ID NO: 187048 - DNA, 460 bp, Glycine max
  unsure (1)..(460): unsure at all n locations
tcagatgcacttgcgagagattccctgggttgagggaatatagaanattattatgatgaacaaggctcctctagaataggtactgcactatcctgtaagatttttctttgcctttctacgttgtttcttctgcaagtagcttcaatctctaagtcaaaatcaactaaatcacctgcagaagatctacggtgcatacaatacactagcaagaatagcggttaaccaattcaagagaaaaaacatattctgcactaactaaatattcacaaaaacaaataattaaagagtaaagaattaatgcctacaattgagctagacttcccaaatggaaagaagttccctggcaatggcaccaaatacttgttccacccctatactacttgttattatggatgcgacatcttattggcaagtgtaccgagtcgtgcaagttgtaacaaaacggtaagaacccgagtat

SEQ ID NO: 187049 - DNA, 479 bp, Glycine max
  unsure (1)..(479): unsure at all n locations
atccttaaagtacctgcggcatgcaagcttgtacgcgtagttctacaaggatttatttatgcanaatgagccttccctgtttggagatagctntccttttgagttgactttcatggcatctccttggagcctccaaaccaaggcattgggcttgaagctacatttcttgagctttgagatgcatttccaagttattctttgtttgcaggcattttcttgaattcatggttcacttctgacttcctcagtcaggtccaacttcatcgccaatgattctgagttgttggccacgttgaccatgcttctgctgagtgaaggttcgccaatttccataagtatcatagcattggtgttgtagctaacttgaatgtgtgttcttgtgtggtagactggggagtacagtggtatccccataacatgctcgggagctcgtctacccacatccccttaagaaatatagacgttcttttgtgaagctt

SEQ ID NO: 187050 - DNA, 368 bp, Glycine max
ctaaatcctccaacaaagccagcaaagtctgaccttttctcataaatacccttgcgtgtaaaggtctaaagaagaccgtgcattcattttagcaaggtaggggacttgaatatcctctttatgcctatacgaaatgcacatatcttcttcaaatagttagaacaacgaagtaacccttgctttattccttgaatatatttaaaagtttactagtataaggaccacaaatagtctcttcaccaaattcaactgctatacaactgagtactgaacaattctatgctgatgaagttattgacataactacgacttgatatatcttgataataggatcggctaattgcggagcgaatacatcttatacctct

SEQ ID NO: 187051 - DNA, 253 bp, Glycine max
aatataacctcaaccaaaagcatatatatgcttagttccttataaggatgaaacctcatcggccgtccgaattaaatatagggattaaaggccaatactcctcttatagggatcaaaattaaaaaagtactaatcccagaatctaaaaacatcatgaaattgaaccattgaactctaaatcaagccgaattaaatccattcggcctgaatgaaccgaccgaaaaaaaactaccaatcaactaactctaaaaac

SEQ ID NO: 187052 - DNA, 320 bp, Glycine max
tcaaaaagaaagagtgggagaaaaattattatagtgggaaaaaagctctataaagaaacattgaagacattttaaccgcgggtgaaggcacatccaccataaaaccgtctttagcaatcctcctataaactcaaatgggcagtctatctcatcccacatcttttcacttttccacctctgatccaccaatactacaaatggttctccggtgattctaaattctctcatgcttgtcctttatcttacatgccagccgataaacttggcccacagccattggaatatcccccgtgaattcccttccccaaacaattgcatat

SEQ ID NO: 187053 - DNA, 334 bp, Glycine max
  unsure (1)..(334): unsure at all n locations
tgcaagcttgaaaagacatgactcttcagaaatatttctatgcaancgaataccagaatcccgcaattgattaccagtgagaaaatttcaaagaaaactttgtgaaaagacacatatctgccaactatcttgaaaaggcacaatgggcctatatgtatatgtgtctgacttcgaanagtacaagagagatttttctaagagaacttaattaccaaatgctctctaaacaactattggccgaacacttgccaatctattgagaattcttctaggaacttcaatttgtatcatctactctaaaagagagaaatatggttgtgcatatcataaactc

SEQ ID NO: 187054 - DNA, 381 bp, Glycine max
  unsure (1)..(381): unsure at all n locations
gcttgggacattnattgggtgatttgcttttagacaggcttgttttgcttttaagacttaagatttgcttttaggatttatgtttcgcttcttttatgggctaacgaaacctgacgagatttgggttataggggtgctccttctgtacctcaagttcgatcttaaactaaagctgagcatgtggctcctattttattattagcctgccattattaccatacttatatgtctacttgtgtgtcaaactatcatacttcctaatgacacacatattggtatcttatgcatgatctgaaactattctcacatttcaagatagtgattcacatatgttattactcgaactcgaatgttacctatgtacaatttaaggcagtcttc

SEQ ID NO: 187055 - DNA, 467 bp, Glycine max
  unsure (1)..(467): unsure at all n locations
tgcagcttatttgagtatgccaaagaatatgcttttgtaaagntctctagttaactcatcctttctatttcctttggttgagatgtacagatttgttttcttcacaacataagtctgttatccctttcttgagaggccacctttatgtcctcattcttgatctcaatttggaggctttccacgagtataagtatgcttattgcagcaggtgctaggtagagcattgatcatcacccttctttcttctccacatttctcagccttcctgtcttctatttggtgaccatgggcaaagtctaatttcctatgtttcactgttggaaaatctaacattagactcctacttttcttcacttagtacaagtgtacaacaactactacttcactagaggttggttgctcttctttccccaagattagaattctgacttgatcaaattcacgattcaagcgaaggaaatcatatt

SEQ ID NO: 187056 - DNA, 165 bp, Glycine max
  unsure (1)..(165): unsure at all n locations
cttgcgccgacaagatgatcatattcagagtgaagaatctttgttatggangatgagcttcccatgctcaatggtgttctattactgataaccatanggctgtcactttcaagggaatttcaatcaatttcttgatagccttactcggttttgacatataaacca

SEQ ID NO: 187057 - DNA, 426 bp, Glycine max
  unsure (1)..(426): unsure at all n locations
gatccttagtcacctgaggcatgcagctgatcttgcacatggattcccgaataagtttttatcaaganctccacactgttttccaaagttgtctatgtgaagaatggaaagagaggcacaacactgtgagggatgatgcttcttctaaatntttagatcttccattcgtgccacttgagctgcctcagcaacaaaatgcatacgattgtggcagtcttttgctccactatgtggaacgtttnctggaaaaagctccaatcaactttaaccgttccctgataaccaacttcagttcttggttccctccactaaatgcttctctgaaacgatctcatatacagaaactatttataggtatgaatctgcgtacttaccaattaattcgttgcgttcatttcctgctctttacacttgtgttttttattt

SEQ ID NO: 187058 - DNA, 462 bp, Glycine max
gacacatgaaactaagctacctgctaagagtatgcttgcaccatcttttagtatgcccaccgaatgtgaatgagaagtgtttgagtcaacaatcccctctcctgtatcttttacacgatcaacctctccctgactttctttgccaccaccagacatagctctaacatatgaagttgttgctccactataaaaattcagtgcacatccatgagtaagtgcacaaatagcatagaaaaaacatttagcagctatcatattcaataataaaatggaaattatggttctaaatcagagtactaacattgtgggtcgtctcaaattatatcttgattcaccagcagcttgtgcggggggagcagcagccttctgtcgccttctcttgcgctgtcctggaattagactatcagaatgtccttcactggcatcgccaccatgcccacttacagtcattcgagatgatgt

SEQ ID NO: 187059 - DNA, 283 bp, Glycine max
ctttattcgttgaccacaaagtggtacctggagatatgtcgcgggggtcaagagaccttggggacgtcaggtggggtactattgcccaaaaccaagcttgaccgatcccgacccaacccgggcatagtcagtcagtgagaacctgtgatgtacctaagcaggcgagctcctggcagtcaacagataataggaacaaagaccacaaagcaaggaggcttgtgtggtggctggccagttgtgaatcttgattgatatatgggatatggcctctggtaatcgatta

SEQ ID NO: 187060 - DNA, 465 bp, Glycine max
  unsure (1)..(465): unsure at all n locations
tcgtccgtagatccctcttgtaagactatacttagactaaacgtcattattgtaacagcatacttaaaaccaaaacctaatccgcagatccctcttgtaagactaagtttcgatcctgcttcaatcaagttctaaggcaacaatacatttcccaatgctaaagtcacctaactatgcacacaaatggatgatcggaccaaaagcatacaaacattaagcattgaaggaagcattgaacacagaaaatataatcaattagatattaagtatttacatcagctgttcattagaaatccccaactagggtgtttagccagccattagagagaaagcctaacaataatgagcttacaaaatctaggtatctctgcaaaagctgctcctcttgctacctccagagctcttttctcgaaatagacactatggtgtattgtggaattntgtgccctgggcattgtaccctaa

SEQ ID NO: 187061 - DNA, 354 bp, Glycine max
agcttatactatatcgagacgctctttatttaacatcgaaaactctcgagaaattcaaatggtcataactttttacacggatgtccgattcgggcgcataatatgtcgagagtctagaaattgaacaaccgaagctcttgagaaattcaaatggtcataacttttcaaacggatgtccgattcaagcttataatatatcaatacgctcgaaatataacaacggaaactctcgcgaaattcaaatagtcataactattcacacggatgtccggttcgggcgcataatatgtcgagaggctcgataatgaacaacggaagctcttgagaaattcaactggtattacctttcacacc

SEQ ID NO: 187062 - DNA, 341 bp, Glycine max
ggaatcggacctcagtgtgaaaagttatgaccatttgtttttctcgagagcttccgttgatcaatttcgagcgtgtcgacatattatgcgcccgaatcggagattcgtgtgaaaagttatgaccatttgaattcctcgagggcttccgatgtttaatttcgagcgtcttcatatattataatcctgaatcggacctccgtgtgaaaagttttgaccatttgaatttctcaagagcttcggttgttcaattttgagcgtctcaatatgtggttcgccggaatcggacatccgtgtgagaagttatgaccatttgaattcctcgagggcttccgatgtttaat

SEQ ID NO: 187063 - DNA, 398 bp, Glycine max
ctcttagaggtaaagatctctaatttgcgttagtaaatacacaaatacccatttctgttgtaagcctagtagtggctgacaaagatgaaatccagcggtgtaattgttctacttgatgcaaggttggaagtcaagcgggagtactatcagtttgttgaaatccagtgatttttagtccagtaatggttgattatgttagtgaaatctcatctagaaggatgatgactggatgtagccctaggttggggttaactagtataaaagctttgaataaacaactctttgttgaactcaactagctttcatcaaagtctttacataatcaatattttttatacaacgcttaaattgtaaaaaaaccttttgtttcataattgctgctttcatttaacacttga

SEQ ID NO: 187064 - DNA, 389 bp, Glycine max
  unsure (1)..(389): unsure at all n locations
gcttcaccaataagcaaccagctcgcctttgctatctcggcggcaagcacctcctctatttttgttataaataggggagggaggttgagtattaagggttcaacaccttgggtattcagaattcacttaaaattagtgagagaagaaagaaggagaaaatccaagccatggtggtttcgtgacgtttctgtgaacaattccatgaacgttcttcaccgttcttcgttcgttctttgtcgttcgtcaatcttcaaccggttagttttctgattcaaagctttgaattcattctatgcacccttaggggtccattctatctttgcatgatttcatcttcatctcgcataatttcggtattatttatcttcgttttaagcaaattntgaccg

SEQ ID NO: 187065 - DNA, 461 bp, Glycine max
  unsure (1)..(461): unsure at all n locations
ngagattaagttatgggtnggctttgaatattgtctatgtggtatataacatgaagggccattaaaagtcatagaagcgaaaatttgtgacataaaattgtataactactgcgatcaaagttgtttcaccgattgcttcaggaaatatgggaagaaagtattacctctgtgcaatgaatggggtcaatgcatatgccgttatcgatgctaagtgtttgacattttgtccaacatccttatgaatgctagattatgtagcaacaactcttaattcaaaaaaaaaataaagttactcttttgttatttttatctattcatttatcttttccttatttctttttagagtatgaccattcattcaattcataattacaatttaatatgtcactactacaaaaaggatatttatcgacgggtaaaacagacatttaacgacaattgtgaaccgtctctatattgag

SEQ ID NO: 187066 - DNA, 295 bp, Glycine max
ttcatagaatcgggcgtgactctatctttaatatggatgcttcacgatcttcacgtggattattgggtgctactggattatccccacgctcaattgtacgacctaatatctcacatataatatattcattgaaagggcatcatcgcttcttgttctcgtctcatcatctttgtttatgctactcccaatcgatctaaataagatttggaccatttggtgtacatggcctacttggatgcctccatcaatgacacttggctagctttacgtgatcttaattcctatctgatatctt

SEQ ID NO: 187067 - DNA, 260 bp, Glycine max
  unsure (1)..(260): unsure at all n locations
tgcaagctnggtgctttcttcgagaaaacctcatatacagctgtttatttggcttaatgttccaaagctaagtcttggagtcaataaagaaaatatagtttctggagagttgaagaaaatggaatataaacctttccaccaaagggtcgaggtggtcctttgatatgcaagaatattaacccacttgactattttgtggcagtggattatgaagagaaaatgatattagtgaaggatataatggttgaatattcaatatg

SEQ ID NO: 187068 - DNA, 472 bp, Glycine max
taggaggaataaggaatattatctgttagcatttctgctatgacgttgttaacagaatgtctataaaatgtaagaaagcgctcgtgaataataacagacaaagcatttcctcagtttccctttctctctctcgatatctctctctcctagaggttacttgggcctcgaaagccaagtctaacattggtgctttcattgatttctgccatggccaaagctacacgatccaaaaccaatgttgatcgttgggaagatgccttcgtgaagctttctgcgtctattacttcaaagttcgacgagcttcttaaccgtatgaatcagttggagacctcgcataccaatcctcaggttacaccagcgtttgcaagtccgtcagtcgccgcaaccaccaaatttgcttatcggctgaagctggaggtttctcactttgatggatcaaatcctgaaggatggatattcaagattatgcaat

SEQ ID NO: 187069 - DNA, 231 bp, Glycine max
catgcctggggtatagagtctttacttagtgtctcaccaacctttgttgtatactacgattattattggctctggcatttgcattgacactattgagaaacaaagtaagggttcattgatgagtctcacacccacacaacggtgctagggcatatccacaatcctcatcttattaactacatagagagggatgggttcacattgacacgtacccatgtaaaccttgaaagt

SEQ ID NO: 187070 - DNA, 417 bp, Glycine max
tatagaaactcaaccttatgaaaggaagcttagaaaagagaaaaatagctttttagaaaacatagaccttgaaaagaagatgagcttaaaagctatgatatatcatcgggttccgataagacaagaccactaaaaacagtaagctcttttaccaaattttaacagagctatacttttctaactgaaacgtaaaattactggttaaaccataaataattcattccttgaagaaaagtcatacaaccttctcaatcattttcctcatataccaactttaataccttgccaaatatgggtgaaagctacttgggattgggctcgatatgtcaaccccctaaattagtatctgagaacaagatgcctctacaattaccggacagcgaatctattaaaggcaagccgaccaaagaaaatatg

SEQ ID NO: 187071 - DNA, 241 bp, Glycine max
tgcctatatcgggatacgccaaatgctgcatcatctcagcaaaaaatcaagattaactaccggcctttttttgtttaacttccacttgtccacttgtaactaccggactttcatattacgtgcactctttttttctatcttgtacaacctttccctgcaaagtgttaatgtgagaggtcaaccccaaaagttagctcaaaggtgaggcgtgctcccacttatatatcaatgtgagatattt

SEQ ID NO: 187072 - DNA, 440 bp, Glycine max
atccttagtcacctgcggcatgcaagcttgatcggacatccgggttatgtttgttctttgaatttctcaagagcttccgttgttcaatttcgatcctctcgacatattatgcacccgaatcggacatctgtgtgaaaagtcatgatcatttgaatttctcgagaggttccgatgtttaatttcgagcgtatcgatatattataaccctgaatcggacctcagtctgaaaagttatgaccatttgaatttgacgagagcttccgttgttcaatttcgaatatctctgtatgtgatgcgcctaaattggacattcgagttaaatgttatgaccatttgaatctctcaagagcttccgttgttcaattctgagcgtctcgatatgtgatatgcctgaatcggacatccgtgtgaaaagttatgaccatttgaatctctcaaga

SEQ ID NO: 187073 - DNA, 287 bp, Glycine max
ctcggacatacacgttggaagctctgggcaaattcatatcgccagagctttccacgcggatgttcgagtctggcgcattatatgtcgccaggctcggacttgcacgacgcaagctctggccatattaaactggcgagagctttcgcacgggatctccgagcggatctatatggtaatcgcctcactcgcagatgtccgatgaaagtttttaccatatcgatactctcggaacttccgatgggaactctgtgcaaattcaaatggttatcgcccgaacacgacatgcc

SEQ ID NO: 187074 - DNA, 409 bp, Glycine max
  unsure (1)..(409): unsure at all n locations
gccatcctcttctggaagagcgcataatccactgggcgcaacatgattggctgagcgcatagaagaatctggaaaaagatgacctgtacaggtgcgttgagcgagagtcaaacttgctaagcgcaccgcttgcacctccaggctgagcggagaagaggcgcgctaagccaaatgtcacttatattggctaagcgaaccagaatgtggctgagcgaacgaccaaaaatcagcaacactatttaaagtctgaaatcagaaatggaagagagttctcnaattttggtgttttctctggtcttggaagcattcatctgagtggctgagtggtggagagaacttctggtgtgaagatcttgagggacaatatgagatacagagggaagtttcatgtggagtattggatgagagt

SEQ ID NO: 187075 - DNA, 464 bp, Glycine max
tccttgagaagattcctagagaagctagagcttagctactcaaacccctctaatatctaagctcacctccttgagatgagaagctagatcttaggaacttacaccccctataatagttaagctcaccctcatgccaaaaatacatttaaatacaaaaagtctctactacaaagactactcaaaatgccctgaaatacaaggttaaaaccctatactactagaatgaccaaaatacaaggcccaaaagaagaaaaaacatattccaatatttacaaagaagagtggacccaaccttggcccatgagcttaaaaatctactttgaggttcatgagaaccttagggccttctttagcagctctagcccaatcctcttggagtcttctatccattacccttgggaggtaggattgcatcatcctctcccccttggaaaggaattgacctcaaatcctgaggttcttga

SEQ ID NO: 187076 - DNA, 301 bp, Glycine max
ctctacaacctatatttttaatgatcaagaacaaatatttgatcattcagaaattgaattgtaagcacatatgatacgatacgatactataccgatgtggtctgttgcaaaaagccttcggagggcagtaatgtggccatctgccaagtccattacatggatatagtcccggatctgcagatatatttgttgtagctgaacaaggaaggaagggaggaagaaaagataattgaagacaataatgtgtgagtgagtgagtgacccgcgtgccatccttattgtgataacatgaccataacat

SEQ ID NO: 187077 - DNA, 445 bp, Glycine max
  unsure (1)..(445): unsure at all n locations
ntacccactcatcaatgctgcagatgcaaaagctgttttttaaccagttgaaaacgcgtaagaactgctttcaaatatcctatttaacagacgtgtgtaaaaacttcccaatgatttatcatattaaaagtacaatatggtgtaattaacacatgctcgtccttgtgcatgtgagactctctgtatgcgaggaacaattgaccctgagaaggcgaggggcaaaatattagtttgccttataggtgtcactgcaagagtggaaaagagcctggttgctttggaggccggtgcagcaaggatgattctttgtaatgatgagcttagtggcaatgagcttattgctgatcctcatcttctgcctgcatcacaaattaattataaagatgggctcgcttgctatgccttcatgaattcaaccaagttactcttcaagcattttaattct

SEQ ID NO: 187078 - DNA, 468 bp, Glycine max
  unsure (1)..(468): unsure at all n locations
tganatcagattntntgagagagcttggcattctttctttatatacctgtgcatgcacaagagtctggccttggcttgaagcttantcatgtgtaagaagttctaatgagagaaagatccacgttccaaagagttttgagagattttgctgtgttaagatctgcaaagatgatagctcaaagcgataccattctaagacgtatagatgagtttgcgagtgatattgagatcctagaggtgaacgaaacatcctcaccacttgtattttcgcaatctttcatcttcttctattctgtgttgtaaaggaggttttctgactattgaaagctaaatcctctggtggatctcctctattggtacctgatgtaaatatatttctatccatgtgacgatatcttgtgtgatctctgtgctatctgctactcgtatctagatgcctatacctcgatcactgagatgcatgctttg

SEQ ID NO: 187079 - DNA, 407 bp, Glycine max
cctctacttcctttaacatggatgggtacaaagtttgacaaaccaagtttgaaaatttcaaaaaagatcaccatgctaaaagtatgaaattgaaaactgagctttcctaccttaaagatctgattggaaaattaaataaaggaaataatgatcttaatcacatgcttagtatgcaaaagcatactatagataagactggattgtgatacaacaagcaaaccgccttttcaaagagaactcatgttgtataaaaggtttgaatccaaataaggtctcaaaaaggaagaacatggttgtatttaagaaaaatgcaaaaacatgtcattattgcatgagaaagggtcacacttcatattattgctatgttatataagttgagattcctagaagaaatatcatgtggattc

SEQ ID NO: 187080 - DNA, 271 bp, Glycine max
  unsure (1)..(271): unsure at all n locations
tgcctatccgatgcagcagatatgatggcccgagttattttgtgtaatggttaccaacccggaatgggtttacgcaaagacaacggcggcataactagcttgataaatgccaaaggaaatcgtgggaagtatggcttaggctataaacccactcangcagatataaagagaagcatcacggaaagatacagcggtggtcaaagctcgccgttgatgcacgaaagtgaacgaagcccgcccttgccataagtataaccttataacgcggtct

SEQ ID NO: 187081 - DNA, 208 bp, Glycine max
acttgaccccttcttaatcggatgaagtactatctgagtcaatgcgctagtcctttctgatagacttgaccttggcaacagattgcttcagattgccagaaaagatagcctttcttgtgaaacccacattgctataagaccttaagctatattctccttactgttcaccacagcctgactcttctgtgtatggaaaagtcatgcggct

SEQ ID NO: 187082 - DNA, 462 bp, Glycine max
  unsure (1)..(462): unsure at all n locations
cgcttgatgttctatccanagacatagtaagaaagtagcttctttctttcattcagatgcttctcatcaatatttgtcatggacaacttcttcattcaacaatattgcatatttttatgttgatgggccttcctttctaatgtgtggcaacatatggaagttgaagaactgtcataacttagtcttctaattttgttcaactgacgcattctgactcttcttgaatcattctgaagtccaaaaactcaaagtcaaagtcttcatcattctgatgttgactctatatagcttcattataaaccatgacgttcttcatgtaacctttaatgaatcttctatataaggtattgctattcagtatcctgccaagaactaattactcacagggaagcatacatcatcattctgatgggcttccaaagatattctgagatctcaacttcgacaacaattctttgaacc

SEQ ID NO: 187083 - DNA, 311 bp, Glycine max
ctaagacgatggcttcctatctgtcgctgaacgtgttaactttcaacaacgtgggcttctatgatggtcgacaaccgacgtagtatgctatcttttaccgatgtagataacgatgtttttagtagtgtttccctaataactaacaatatgaatgatggattaatccctgaacaaaccctaccttgttgtgtcacgaccttatcaactattgtatgatagagactaattagatcaaataatgtagactaacatcagatttgtgatatgtatagaagcataagaatctatctattaaattataaagaacacaa

SEQ ID NO: 187084 - DNA, 328 bp, Glycine max
ggttgggtttgaaaaaaccataactcaactcaaccacatttgaacatgttgataattaaaactcaaaccaaacaaatcttatatcgtgaatgaggtgaatcggatttaattgggtgaacgagtcaaaacatttaaatttatgtgctattttttaaaatataatatattatataagatgaatcttttattaaatggaatactaaatatatgatttataattggcacatgcgatcaaatagtggaagataagatgacgaatcatattatcattatcatcagacatacccacaaatatcataaactataaaaacaaaactattataacata

SEQ ID NO: 187085 - DNA, 416 bp, Glycine max
tgtgacccattcctgtactcgtggggcttgacttcctggtcatatacccaataggactctttgtttgcagatattgcccatacagtcacgtcgcaccctccgtgtctcgacatctttggtcgtcgccgtctgagctctgaggataatcctcctccgacgggtctgtttctagtggactaccttcaatcgccatttgcatccttgtacactgtcactatcgtcggaacttatttccagagtgtagcatgtgtcttcatctatatgcacattgttttcaaccccattaattcatgccgagaccctgtgctgattaatggttgcatggtgcttactaattccacccctgtcagctatggagttatccatttgcatcacctcaccattctccaccgtgtatatatgtctatatctccagt

SEQ ID NO: 187086 - DNA, 345 bp, Glycine max
gcccgaggtatgttgcgaaacggctaccaacccggaaagggcctacgcaaagacaacagcggcataactagctggacaaatgccaaaggaaatcgtgcgaagcacggaccaagctataaacccactcacgcagacataacgagaagcatcacggagagacacagcggcggtcaaagctcgccgccgatgcaacaaagcgaaggaagcccgccccgccacataagcagaaactctataagcgcgagcctgggagacgaatgccacgcggtcgcgacagacgaacatgaggctcgcagcacagcggagtgggcacgaccatgcccacctgactgtcatctgggaaat

SEQ ID NO: 187087 - DNA, 255 bp, Glycine max
caacccacgaggggtatacgctttgacatcaggagcttatctatactagaaaacgcctgaacgaaatcgctaaaggaagatttatagattaatccttctcgaaccagatataacagagaaaacactccgggaatcgagcacagatgatggattcgcgctcaccggatgatgcaccaaaatgaatgaagcaagctgtgcattctaggtagaaaatatattatcagcggtcaagtagacgaaggacatgtgattgag

SEQ ID NO: 187088 - DNA, 483 bp, Glycine max
  unsure (1)..(483): unsure at all n locations
agctntaaaatgtttaaaagacatgttcttccttgtttatttcactcaacaaaactttaatatataatataaccatgttggttcaaaataagatggacttaaaataaattgtaagagtatttttttcattaaataaaaaaattatatattacatctttttattaatatacataacctttttattaacatatatgcgatttttttattaatgaaactaaagcttagaatttaattattttattcttcttccatgacaaccaatgcttgaaaaaagactttcacttgtttcatgttggggttcagacataacattaacactaggtgatttggatgggatagattcacgaagcgctggcaatgccacttcagaatctaagcctttgctctaatatgccagtctggtaacacattatatatgacactcgacccgcaactaactacngggtgctatttaatttaatctcagtctcgaccattccactg

SEQ ID NO: 187089 - DNA, 296 bp, Glycine max
cttctctacgagatcatattatatgttatttgttttgtaatgcaatcaaagtctgaagaaccattcaattatctattccaatactaaatatgagtgcgaaattttcaatcatttgctatcgatctccaaagagatctacgttctaatatttgttgagtaaatgtgttagtgaaaacttagtcctggaaatcatgggaaattaaagtatgctgtcatcagtagtctaagctgggctccttctcctgcgacgaggccatgccaattgggctggtatgactctgccggctcacagttgt

SEQ ID NO: 187090 - DNA, 294 bp, Glycine max
caaaacatagaaaacctaaaaatcaaaagctacagttaaagtcttctaccctaaagttaagacaagaaaaagagaaaaaagatcaaggaacttacttggacggtgtatgattgatgcttcaaagtcgaaaatgcacaaagagagtacaaatgcaaaatgtgcaaatttttggagagagagaatgtagaggcgaggtttctgtaatctggaaaatgtgagtgtaactgctgttacattcacttaagcagtttcgatactttcgcttagcggaccgttgcgctaagcgagcaagtg

SEQ ID NO: 187091 - DNA, 457 bp, Glycine max
  unsure (1)..(457): unsure at all n locations
ntagttattggtgtactttgtgcatcagcttgtttgttataaaggtgtgtaccctaattctgcacaaaacaggctttaaataggcttagaattcgcaaccttacgctttgcgccaccctcgcacttagcgtgagtaagtggaatcgggcttagcgcaagtctttcactgagcctggctgaaggcacctactgcgcttagtgcactgatctcgcgcttagcacgcgactttgatgctgatgctctaccagattctcctttgtgcttagcacactgaagctacgcttagcggtggatatgcgcttagcccaattgctactttttgcatttcaaaacttagcctttnttttacctgaaaatgcacagatttcatcattaaatccaatggaaatgttctagagacaactttaaccataaaacaagatttatttacaaaattaagtccaaaataaccataaa

SEQ ID NO: 187092 - DNA, 458 bp, Glycine max
  unsure (1)..(458): unsure at all n locations
ntagnnacttttctcatgtgtatgtgcaatcatctactttntttttcatatacagtcgtaccctgaggttgtgcttgttactttactcgacgaaaacacttatgcatatttatatatattttatgaacttcggatgcgttatttctttctttttgttttaattatttgagaagtaagtttctaaatgaaaccatgctatgcttcttttaaaaaatgttaataagtattttattgattacgtgaccttgatctttgaaagtaactaatgaaagttttaaaaattcactaaaattctcattcatgttttcttagttttatttgattgtgaaaattaaatggattaacacgctttataaaataaagaaatggattaattaaggtattatcatagtcttagaaactagggtgttacaatactaatgtactccgatatccaaaggtacctaacatttactaca

SEQ ID NO: 187093 - DNA, 417 bp, Glycine max
  unsure (1)..(417): unsure at all n locations
acagccctcctagggttagactaacttaaactaagcttcatcctcaaatccctcttgttggactagacttagcttaaatagcttactaaagtttagactaatttagcctaagctttgtcctcagatccctcttgttagactagacttagaccaaacaacattattgtaacagcatacttaaaaccaaaatttaatccgcagatccctcctgtaagaataagtttcaattctgcttcattcaatttctaaggcaacaatacatttcccaatgctaaagtcacctaactatgctcacaaatgggtgagtaaaccaagagcatccgaaattaagcaatgatagaagcattgaacacangagacacaatctattagatattaatgcaattacatcagctattctttagaaatccccaacaa

SEQ ID NO: 187094 - DNA, 479 bp, Glycine max
  unsure (1)..(479): unsure at all n locations
gcttgagccaattcaaacgacaataacttgtttctctgatgtctgaaggagtcccgccatatatcgagacgctcgaaattgaatgttgaagctctgagccaattcaagcgacaatatctttttactcggatgtctgattgagtcctttaatataacgagacgctcgaaattgattgttgaacctctgagcaaattcaaacgacaataacttttttctcggatgtttgattgagtcctgtcatatatcgagacgctcgaaatngaatgttgaagctctgagccaattcaaacgacaataactttttactcggatgtctgattgagtcctgtcatatatcgagacgctcgaaattgaatgtngaagctctgaaccaattcaaacgaaataaacttttactctgatgtctgattgaggccccgcatatatcgagacgctcgaaattgatgttaagctctgatccattcaacgacaataactt

SEQ ID NO: 187095 - DNA, 476 bp, Glycine max
ctaagcctgccttgccccttgatatatttgagggactcatggtctctatttatgacaaattccttgggataaaggtagtgttgccatgttttcaaagcccgtactaaggcatacaactctttatcataagttgaatagttaagggtaggaccacttaacttttcactaaaataagcaattggatgaccttcttgcatcaacacagccccaatcccaacatttgaagcatcacactcaatttcaaaagatttttgaaagtttggcaacgcaagtatgggggcattagttagcttttgcttaagaacattgaaagcttcttcttgtttctctccccatttgaaaccagcatttttcttgagcacttcattgagaggtgctgccaatgtgctaaaatccttcacaaatcgtctataaaaacttgctaagccatgaaaactcctcacctctgtcacggacttatgtgaaggccattcttg

SEQ ID NO: 187096 - DNA, 273 bp, Glycine max
  unsure (1)..(273): unsure at all n locations
tgcttatctaacgcaaaaaatgtcatgcacatttctttaatatagaccagactcatatgatccattcatgcacacacgcatgtgtaaaaataccctattatgtacatcaacatactaggatatgcaaaacattctaattaccacacatattatttcttttggatagaatacttacacgcatgctcaaggtattgagccaaaattacatatgtccatatcctaactattngctaccacaaactaaccacacatatttgaagtattttattaaca

SEQ ID NO: 187097 - DNA, 443 bp, Glycine max
  unsure (1)..(443): unsure at all n locations
gcttgaacacccagtttgcaacttagaactcctatgttgcaacttagaaatattaattatgcttgtaaaactaaaaaaaaggaaaaaaaaaggcacaactatatttgtatatttattgggcttttggaaagggtgaaaatggaaggaatggatggaaacaattttgtgtcattgaattaccttacagccatatgaaaaatgtgtgtttcaattttttttgttgcacaactgtaatcttgctgtgctattaaatatgaaattattcttaatttgtaggtaccgactgctacggattggcaaaaagtacttgccaacttcagtgttactgcaacaaatactgtcatactgctcatcttcngaggtatgtatgtcattcttaanactgttgtggtaactattattatttcttgcccctgatgtaagtattggttattattacattc

SEQ ID NO: 187098 - DNA, 468 bp, Glycine max
ggccaatctattgttaatgagtattcaatagcatcataaaatgtgtttaaataaaagaggatcagaatacaatcaacaagaaatcaaagcccaattctaaaccaacttgagcctattagaaccaacaaaaatagccaccagtcaatgctcaaactcttctactccaagacaaaaatactcactagccctaacccaatcctaagccttaaacattggactagagctggtttaagtggtttgtcaaacaaaatacaaaacttttgctttcttttgttcataatttggagggtatagtctcaaagatattcaaaattcatgtgtaaactatcttccatttttcccaatgtctttaggcttttaattaatttctaattttgattttcttttcaatgtgcagccttccttatttctttctttacatcttacctaagcctgtttataaaacccaaaaaccatgaaccaagccat

SEQ ID NO: 187099 - DNA, 427 bp, Glycine max
  unsure (1)..(427): unsure at all n locations
agcnttgagccaaaatcctgactcaccatattctttgtcccaaggtgagaatgccaatccttatcctcggaagcaaaaaaagaggagaagaaaatttccaatctaaggaaaaaggagaagaaaatttccaatcaaagaacaagagaaagaaaatttccaatctaaggaaaaaaaggaagcaaagaaattcccaatcaaagagtgggagaaagaaaaaaagaaaagaaaggaaattcccaaccaaagaatgggagaaagtaaaaaagaagaaagctcctgatcgaaagaaaacagaagatatgtgctgagaggtctttggaccggacaatatctgaacaatacagaatttgcaccaaatgaacgaaaaaggaaggaaaggagaccacgacctcaaatggtcttctccctttaattaccaaccaaaatc

SEQ ID NO: 187100 - DNA, 468 bp, Glycine max
  unsure (1)..(468): unsure at all n locations
nnttggagtagaaacctgggaccaactcattgtattttataatggaagtcatatctagtcaaggtctgagagaccatacaagtttcctaacgatttctaattatgtgggccattaagtctatcatatgctgacaatagccgagaagcccgtgaatctcttcgggggtggagtaggtgtctgccatcgccttggccttggctaacaatcggggaagttcttgactcccgttcaaggtaagagcaaaccgctccatccacatggttgcctcttggtgtaaagagtcgatcacccttcctctagcctctttttccgcatatacttgagcatactcatccgcgattctatgctcgtgggccgtggctagacctaactcttcttcgtacttggcgatgatagctaacatgttggtctctgtctcgcatagacgctgagacaagcttcttttggaccttgaacaagcaatcaac

SEQ ID NO: 187101 - DNA, 268 bp, Glycine max
tgtcgcgggggtcaggagaccttggggacgtcaggtggggtgctattgcccaaaaccaaacttgaccaatcctgacccaacccgggcatagtcggtcagtgagaacctgtgatgtacctaagcaagcgagctcctgtcagtcaacagatataaggaacaaagaccacaaagcaaggaggcttgtggtggctggccagctgtgaaacttgattgatatgtgagatatggtctctggtaatcgattaccaagggtgggtaatcgattaca

SEQ ID NO: 187102 - DNA, 57 bp, Glycine max
ctctcgctatctctgtgcggacggttttttcccctacttccgacgctccgttttcac

SEQ ID NO: 187103 - DNA, 468 bp, Glycine max
  unsure (1)..(468): unsure at all n locations
agcntcttgttcatcgcgttctatatgtctttttagtctcactcaanacataagaggtaaatatatgttgttctttgtgtgtcttgtttctatgtagatgttctttttggtgttgagtcctgattttaacaatataataatgggcttgttaaaggcttgtggcaaagattgatctctaatggatntgaaaatcattcactcaccgcctaatctgttttgctgttacgttttcgtgttaagcttgtggcaaatcattcactgcttaaactgtttcactgttgggtttttcttaagagatggagaatgttgaattgtggggatttgggaattaaagaagaaacattgataaagaagcatcatgtttttgtgttgacagtaaatggtaatggttactttatcagacaagcgaatggtatttgcacagtacagaggatgttggttgaatatgattcgttgttttgtctatat

SEQ ID NO: 187104 - DNA, 443 bp, Glycine max
  unsure (1)..(443): unsure at all n locations
tttcgcanagcttacggtaaaatctgggacctagccattgcttaagtctccacagaggccattgcctccctcgcccagtattatgaccagccgttaaggtgcttcacttttggggacttccagctatcacccatggtggaagaatttgaagagatcctacgatgccctctaagtggaaagaaaccatacctcttcttacgattctatccctctttagctagaatttctaagatagtccacatcgtggcgaaggaattataccacagaaagctagtcgaaaatggggtggctggagtaccgagaagatgtatggaggcaaaggcaagaatcttggcaagtagaggcgaatgggccctgttcatagacatcctcacactgttgatctgtggaggagttctctntcctaatgtggatgggttagtaggcctagcaacgatcaacgc

SEQ ID NO: 187105 - DNA, 468 bp, Glycine max
  unsure (1)..(468): unsure at all n locations
ggtccactcaatatttcttcaaatatagtaagtcatattcatgttcacgaatttcaagaagctcatatttttttacaatagctccttttgtaaagaacaacctgtatggatgcttgcaatatttttttttgtcaaaatctctttagtgtttccacacatggatcattttaacacaaataggaaggaagaggaaaaagtattaacacctataggaaggcaatgtaattttcctaaaataaattagttgtatgaaccatagtatatttacctgtgggtccttcatatgaatgaccatctttggattaacatgacgttcttgctttatgtcaacaaactgatcaatcacatttgcttaaaaaaagaagataataaatctaaaattgtcccccacaagcatacaccatattntattctataatgagtaatatgcanattagaaattacctactaatagcatcatttttacct

SEQ ID NO: 187106 - DNA, 385 bp, Glycine max
  unsure (1)..(385): unsure at all n locations
tgtagcaaattccaaccacaataacggttttcttgtatgtgcgctagagcccgacagagatcgagacgctcgagatagagaacataggctgctatcaaattctgatgacgagacactctttactcaggatagtccgacttgagtctctgtagtatatacgacatcgctcgaaaatctaataatagaacgctcttacgccatatgacancgacattagaataatttcttcggatgtcctgactgaacatccgtgaaatatcgagacactgcttactgaaaatggaagctctcagctaattcaaacgacaataacgattcactctgatgtgcgattgagtctctatatatatcgagacccgtgcacattgaatgaggacgctctcac

SEQ ID NO: 187107 - DNA, 391 bp, Glycine max
agcttctagattagtgtaccagatgactgtctgcccaaccaagctatcttggaagaagtgcatcaacaacttctcatccctagaatgcgcccccatcttgcgacaatacattttgagatggttctgaggacaagtcgtctctttgtacctatcgaaatcaggtaccttgaatttcggggggatgacaacgtccggtactaagcaaagattagtcatgtccacgaacggatagtcgccaaagccttcaacagccctcaatctctcctcgatgagatcgagtttcctcttttcttcagctgccgggggtggccctcctaaggacaaaaatattggctgtgttggggggtttcgaggttctcccgtgaaggtgtgctgatgtaatgtgttgggt

SEQ ID NO: 187108 - DNA, 431 bp, Glycine max
  unsure (1)..(431): unsure at all n locations
tataagaaacaaaatgccttaatcatttccaaatatgtatgtgaattangacacatcaacaagaatcaagccaaggctattgtgcaagcaatcaatggggcaaaacacaccaaatgattataatgatggatggctcaaattctcacaaaggtaaaatcatcactttcaaattgagctttcaaaactatcatgacatgtagagaagaatcaaggatttcaagtcacaaaatgtcaagaacttttattttcaaaacaattacccatttcttgaacatatcctataattcanagaaaacatgcaagtcgacgtgccacaaaattacccaaatattaactaaaatccgacaaacttacacattacnaatacatacttacaataacaaaccacaaactacaaaccaagacactcccccatactaacacacatgtct

SEQ ID NO: 187109 - DNA, 395 bp, Glycine max
  unsure (1)..(395): unsure at all n locations
acaaacaacaattcaatcatgcaacaacatcgcaataccaacaaaccaacaaaaacaattaatagcttcaaagggaacgcacaacttacctgaaagacggaacaaccaccaccaccaacgaacaacaaccaccacgaacggaagacaaagcagaagatcacgaagaagacgaaccacaaccaccacacacgaacggacgtagcgaagaagatgaagaacaacatgaagacgaggaacaagaagaagttgaagaagtagaagaagaggaaaagaagcgcgccgtaggaacgtatgaagcaaatgtacggacgtctaaatnttggaatttatataagtagggttaagggcattttcgactnttcgccctcgatgctgggtgtttcaacacaaatgtt

SEQ ID NO: 187110 - DNA, 475 bp, Glycine max
ttagcacgcctcaactcattctcaagagattccaaggattttcttatatgcggcttgtccaaaacagggtttttttccctcaagtcattgaagattggtggcaatttctcaaccaacatggcaaactcagcaaaaatatccacctcaatttcagagttcatagcaatagaagaaacctcatcagccaaaactatcagctctgacaacaatttagaaaattttctctcttccatgacttccatcttgtcaatcaaaactgagtttatgcagcaaaagacatatcagtcatccctcatcagttacagaagatcctcaatcaattgggaaacagtagatatctagaaaaaaaactgctaacaattaatgaatacacaaacaaacaaaatcatacaaataacatatatagacaagaattagaaaaaaagggtgaattgaacctgctgagaaaacgcacggatgcttgaagtaaacagat

SEQ ID NO: 187111 - DNA, 494 bp, Glycine max
  unsure (1)..(494): unsure at all n locations
agcttaanagaaagggtactatcatcttatttttgtttcccaggtgaaattgttttctacttatcaatttccctatgtgagttctttgcacaaaccttaagatgtcttagcatgtttgtggctccatgattcatgctacaagtattatgagttccatttgcatcttgctccttttaagccatgtattctgaagccaagttgcacttctgaaattttgaaatcaaagtcaattatgacaganaagttcatgtaaataaataaataaaatggaagaaaatattggtaaatataaataaaaagaattcttgtcaaagacactcacccaattaattacttatgcagacattaactatctgttattacagtattctctttccccattcatgtcaaactattatttattctttcgactntgtcagtgcgattaagagatatntactgttctgtgttattctttacagtgggttctgggatacaatgaatcattgaattgg

SEQ ID NO: 187112 - DNA, 491 bp, Glycine max
  unsure (1)..(491): unsure at all n locations
cattacggacctataaaactaagcttctttacacnagaaagagaaaatgaagattgttttttacatgtttggggatgtctcctccacctctataacctcataatcactcacaaactcatcttatgctcttaggatggcttcctcttcaagctcagttctctgccagtcttcgcacagcaaaagctctcaaaactctttggaacttggacctttctctctctaaaaatctctaaacatgcaaaagctcaaggaaaagcccaaactccctctccatttctgatttcagacttaaataggcggccttgttggtgcttgcacgcttagtgcaactctggctcgcttagcgcacataagtgaatttcggcttagcgcgcgtcttctcgcttaacggatgcatgcaagcggtgcacttagcgggacgagccctcgcttagcacgtgtgtccagctcatccttcttccagattcttcctcaggctcagccgcaagagt

SEQ ID NO: 187113 - DNA, 346 bp, Glycine max
  unsure (1)..(346): unsure at all n locations
gtacctgaggctgcaagctccttgagaagctagagatagctttttttctcttttatacnaagctcacgtctgaaggacttcctgaaagattcctaaaaagatagagcttatctcacacaccttttaatagtgatcgcgtacctaaagttagaagctatagcttgaagctcccttcttgaatgagaagttgagcttattaccacccctatatgctcagctaccccttgtcaaatcatgaaatataagaaagtcctactccgtactctcaattgtctgaatctagggtttccctatactttcgattgcaaatacagaccgaggaggaaacctattctatttacaagaa

SEQ ID NO: 187114 - DNA, 386 bp, Glycine max
ttggctttcaagttaggaaattggaacacaacagattgggttatttcatttcattatatgttgagtctggtcctatgaatatgattctccgtaatgcgcaacaaattaacacaagacacgttaccaattgtagaaaaaacacagagagccacggcacctccatgtataggcatccctataaaagaaaaaaacgacaatgagttgcctagccaagtaatgtcatcaacggaaaacgcattattttcctaccacattgaattgtctgtcacaattttgattacacttgtgactcgtgcttagtaagtgagtggccacaaactttggggagactgttcttcgtgtgctgagactcagagaccacatcaatgacatcataagttcgtttt

SEQ ID NO: 187115 - DNA, 392 bp, Glycine max
  unsure (1)..(392): unsure at all n locations
ctctcatgatggacttgatccttggcaaaacaaaatgcatttaaacagtggcaaaaaatgatagccttttttttgggaaacccaagattgctaattagacccttcagccaagttcattcctttactggttcttccaacgccatgtactctacctttgtaatggataaagccaccatgggttgaagtgtagtcttccaactgagtagagtgttgcttcccatgtccttcatctcaaattcactacttagtattgacttctacttctaaattgccaacaaatattgagatgctatgagaatgtcatcaacatagagtagtagatagataaaggaatccgcctncaccttgttatgataaaaacatgggtcatgacgacttttgatgcaatccta

SEQ ID NO: 187116 - DNA, 418 bp, Glycine max
  unsure (1)..(418): unsure at all n locations
tctctntatggacttaaacatgcaccgatgtcttgtgtatgtgttacttanaaacttccttcttgaacaaaaanttgagagaggaaaagttgataaaacacatttcattaaaaagttctctcataacattttactcatgtaagtttatatggatgacatcatttttggttctactaatcgatctctttgcgaagattctgtacacaagatgcacgaggagtttgaaatgccaataatggggggggggattaaattactttcttggtctctatgtgaagaaaatcgaccatggaacatttctctatcaaacaaagtattgcaaagaacttctcaagaagtgtaagatggacaaaagcaaggaggatgaaactcctatggctactaatcgctaccttaatgcagatgaaaatggacagtc

SEQ ID NO: 187117 - DNA, 484 bp, Glycine max
gatccttagtcacctgcggcatgcagctttgctagcgttatgcgagtcggtttacctcatgctagctatcatcgccaagtaccaagaagagttaggtctagccacggcccacgagcatagaatcgcggatgagtatgctcaagtatacgcggaaaaagaggctagaggaagggtgatcgactctttacaccaagaggcaaccatgtggatggatcggtttgctcttaccttgaacgggagtcaagaacttcctcgcttgttagccaaggccaaggcgatggcagacacctactccgcccccgaagagattcatgggcttctcggctattgtcagcatatgatacacttaatggcccacataattagaaatcgtaggaaactgtatggctctcaaccttgataatacactttttttgaaaaaaatgattggcccatgttctactccaaaagctgtgcaataaatcatcctacgttcatcttacat

SEQ ID NO: 187118 - DNA, 421 bp, Glycine max
  unsure (1)..(421): unsure at all n locations
gacctatgaaactcagcttagccatanaatacctaaggccgattgaattcctacttttagacagcctctttgctgnattggttaacgtggactttcgatagcctagagtcaacatgtaactatggcactactttcaaaaaccaagagatcattaatggtccaatgccttaacgtttctctcccttcaaaaaaatcataatgtcatttaaatggtccaacgccttaaacgactttcgttgtggtcaaaatatatcttgcaaaataagataacaataacttaaccaaagttcagttctcgaagaactacctaagtatgatttccttatcacaatcgaggaatacgtatgagcaaggaatacacccttgtcgaccacacacagactaacaatatcatacgcataacatctcttaacaagcgtaa

SEQ ID NO: 187119 - DNA, 402 bp, Glycine max
tcatagaccaatatgcaaggtggatcgctttttattggttgcttgacgaggtcatctgcatgtttgataactaatattcgctatcaaacgcgtctattgatctaagggaggccaatggccattattgaaatgctgcctttgatttacttatccgagtgcatttgatgtacttagctgataaccacaaccctggcattctacggtgggaagagtgcctgctgacatggcggaaagggagacatctgatcatatgaatgaaacgctgatgggcatggtatgaggcagatactatgcctttgctgacgtggaatagttatgcctactggccgacgtggtcattcctccagcgtctaacgcgtcagatgttgatgctatcagggaactacttgcactagaatacct

SEQ ID NO: 187120 - DNA, 483 bp, Glycine max
  unsure (1)..(483): unsure at all n locations
gatccttagtcacctgcggcatgcaagcttttaccaaagagatgttactctctgtttatcgattaccaattcactgtaatcaattaccagtagcaaaatttgttttcaaaagcttttaaactgaatttacaacgttccaattaatttcaaaatggtgtaatcgattacaagattttgataatcgattaccagtgtgtttgaacgttgaaattcaaattcaattgtgaagagtcacatcctttcacaaaaatgctttatgtaatcgattacaatgatttggtaatcgattaccagtgataagttttgaataaaaatcaaaagatgtaaatcttccaatgatttttcaagttnttctaaaagttataactcttctaatggttntcttgaccagacatgaagagtctataanagcaggaccttaacttgcatttaaacattcattaagaacaattntntacaatcaattacaatcctttacaatct

SEQ ID NO: 187121 - DNA, 464 bp, Glycine max
  unsure (1)..(464): unsure at all n locations
taatacacaaaatcacatctacaggaccaaggttctttatataaaatttctagacaagaaagacttcacatcatttatgaattgcatattactaccaaatatcaatatgtcatccacatacaaacataaaatgacacatccattatcatcaaattgtttcacatacacacatttatcagtattattgatttgaaaaccatacgaaagaacaacttgatcaattttttcgtcccattgctttggagcttgtttcaaaccatataaagatttaacaagtttgcaaactttcttttccttccccggttctacaaagccttcaggttggctcatataaatttcttcttctaattcaccatttaaaaaggcaatttttacatccatttgatgaatttctaaattaanaacacaagcaagtgcaattaagaccctaatggtagtaactttagaaacatgagaatatgtat

SEQ ID NO: 187122 - DNA, 333 bp, Glycine max
agcctgaggtggcggacgtgtgtcctctctttcttgcttagcggagggctcgctgcggtgtgcttagtgagaagaaccggcgcgcctaccgcacctgtgcatctgataattctatccagtcgtggtcgcactgaccccatgacagttgcgctgagcggatgctcactatgccatctgagcggttcatccggtaagtgtaaattacacttgcgcaacctcgcctcgtttaccggcacctgagacagactgattattatttccctccgccgtgccgcctatcgctgtattgccgatactcatcagacattacttctacctgtacgccatcaccat

SEQ ID NO: 187123 - DNA, 397 bp, Glycine max
accttaaatctcagcttgctgtctggacgtttagagagttctgatatttctgtctggtgaagatctgcagagatgcgagttctaagtggaagccgttctgagagcttgagatgagtttgtgagtgattgtgagattctagaggtgaaagagacatcctcaccacttgtgtgtttgcagcctttcatcttggtcttctctttggtgcaaaggaggcttccgaactatggaaagctaaatcctctggtggatcttccctgtaaggacctgaggtaaatatatttgtatctatgtaatgatgatgtgagtgttctatgtgctatctgctgttcgttccagagtgcttttaccttgatcacgtatatgcatgctttgataagggccttcaacagtgggaac

SEQ ID NO: 187124 - DNA, 439 bp, Glycine max
  unsure (1)..(439): unsure at all n locations
agcttttatgtgagaggatgtgtactttcttgttngaatttgaatttcaatgttcaaaggcactggtaatcgattaccaaaacattgtaatcgattacagctttttgaaattaattggaacgttgtaaattcaatttgaaaactttttcaaaacaattttgctactggtaatcgattataccaatctggtaatcgattactagagagtaaaaactctttggtaaacatgtcttgagaaaaatcatgtgctactcaatntttgagaaaaacttttcatacttatcttgattaagccttctcttgattcttgaatctngagtctggaatcttgaatcttgatcttgattcttgagatcttgaaccttgaatcttgattcttgactctaaactttcgtctcgagtcctgaattccntcttgaatcttatacttgaactcttg

SEQ ID NO: 187125 - DNA, 464 bp, Glycine max
  unsure (1)..(464): unsure at all n locations
tctgccagtcaatcttctgagccaggtagtttgtctagtctntccttttgtagntgcgcttggagcatttgaaggtggaggggaactcggcggtgttgccatgggtcctgtaaaaaaacaaaaatagaaatgaaacactagttaattacaacaacatgtaagtatgaaattctaaataaagacagttaattgtaaataaaccaaatataattttccaacatgttaaatattatttaggtatataccgcagttacgtagctgtattctcccataaaccttcatcatgatcgttacgatttgcatgtatatcatcctcctcaatttcaacatttatggaaggcatctgtggggagaacgtcggaatctcgttaacatcaagagttgaagcatcaatatcgtaaaggataccacttgttttcccctgtagaacaactgaccatcttgagtcacttggatcttgaaca

SEQ ID NO: 187126 - DNA, 448 bp, Glycine max
  unsure (1)..(448): unsure at all n locations
gttgagagacatgtaaccctatggcatcatcaaaacattcagctggatccttgggctacaatctccccctttttgatgatgacaatcctgaaatcaagacaagctatatacaagatggtagtacgttcacacaacccatactccccctatcttttggcatgtatgcctaaatttaatgattntaattgatttctaacccaagttttgttctctccccctttggcaacataaaaaagaactaagcaagacaatcaatagcgaaaacaaagccaaacattaaaccaaaataaatccatacattgtcataatcaaccaaagcaaagtcgagaaatataataatagtgtaagattatgataactagagcaacaaaaagccgaatacatggcgattaaacanagtactaataatacttaatccctaataatacgtagtcataataataacata

SEQ ID NO: 187127 - DNA, 484 bp, Glycine max
  unsure (1)..(484): unsure at all n locations
cttcactacatcatgatatctcncggttgagtcttctctgtggctggcttactggtttagccccatcctttatatttatccgatccatacatgtggatgggctaataccaggaatgtccgccaaggtccaggatatagccttcttatgcttcttgagaactgataacagcttctcctcttgctcatcagcaagggaggaagatataattactgaaaaacttttgctatcatccaagtaagcatattttaaatttgatggcagaggcttcaattcttgtgtgggcggctggataatggtagaaagagatggtttctcagcctgtatctcataaagaaagtcaaaggtatgtgtactttctgaaacatgagtagttctatctgactctagaanatcaatctcaagaggttaaacatcaccagacatgttatcaatatcaatttcagattcactctcagcatcaaattcagacatatgatcaagtac

SEQ ID NO: 187128 - DNA, 364 bp, Glycine max
actcaactcgagcgtgtatttgcatgtcatattcatacttcacgtgccaatcttattcttgaccagcccgcctatgagctatcgcgacccagagcaccgaacctgctcacattttacgagtgggggagtccatcaaaggaatactatacgcctggagaggtacagcaaataggacctgagacagcactctgaagcttcgatagattctgctcacgcaccacgacatattaattgccggcactcctaacataagcgtgttgtagggccaacgactcctgtgtggatctcaaatacggaaaatcctttgagagactagtgacctcaacaaaatcagatgactaaggcgtggtggagactacaagtg

SEQ ID NO: 187129 - DNA, 456 bp, Glycine max
  unsure (1)..(456): unsure at all n locations
attaaanaataaattaagatcatattagttaaataaaaataaaattaaaactagattcatatagttaaataatgattctcaagaatgaatcagatcaaccagntgaattggatgaccctccaaaagaaccaataaaaaatgagtggaactagttaaacaattaatatcaatggtttcactagatggattaattcaacaaaattcaagttttttttaccttttaataaagaatgataattatttttggctcaatattttcaaacttgaatcaatcgtcaatttggtcggagtactaagtcactgagttaagatcaatgactatgacttagtaatggatatgcatgattcgatttatattaaaaaatatttaaagttataacttatgagctgttatactctcagtatcgttagagaagataatcaaatcatagtggatttaataaaatataattatat

SEQ ID NO: 187130 - DNA, 470 bp, Glycine max
tggacgaataaagtgatgcacttaggagacacaacaacttatttgttgaaaatgttcaagtttttctattagggttgatgaattgatggattttaattattgtatttgtttattgctttttgtgtattttaaatgtagggttgagtatgatactaggctactccacatcagaagggacatgtgccggtggtgctgctggtgccactgggacctcagggatatgtggctccacatatgtgtcatcctgcgtcacaagtggatgtctggtcagatcagtaggctgtgccggtgtcatgaacggatgagaaatcctgaagaaccactacatgttatcggatgcacattgtcttggcacaacacatagcttgcccgctactgtatgatagtcagagtaatgcatccacttgtcatcaatatcttcacatggaacatggaactcgtagtctgtggaggaatggtctgaacatatc

SEQ ID NO: 187131 - DNA, 431 bp, Glycine max
  unsure (1)..(431): unsure at all n locations
gcttgtatgcaaataattactggaatttaatataattctgtaatccaaaaaatacgaaaaaaanttggagactccaaaaaatatatagaagattgtgggaacattagtttggtctaatctaatttcctcctaattaactattaaaaattattttaccaactaataattattaaaaaaattaaaataatttttatggtcaatagaccagcttgcacgaaaatcatgtgggttaaataaaagttcacaaattcttaatataatgaattntgaacaaaaacttaaataaaaaggcttaattctcttttatattgaccaaattcacttgtttccccntttctacctcttcttactttgcagaaacacactctccctccctctccatgacttccttgtaaagtttcttctctcaattttcatcacacataacactt

SEQ ID NO: 187132 - DNA, 463 bp, Glycine max
  unsure (1)..(463): unsure at all n locations
ntgtgtggagctgcaatggagaatgaagaagaagagaatggcatcgttagggagagagagggctgtctgaaatctctgttttgctgagtgaggagagagaatagctttttggtcttaaataaaagggtttcctctttttctactattatatccaatctctgccacatgtacctattagattggagcaaaaagggcccacttactctttctgactgagacccatactcagccacattagtgagaaaaatgtgacttttgaaacgctaaaatcctgcctcggattgcatgccgtttatatggttctagtgactcgcgtctctctgagctcgacggtgacctttctcgcatgttatctatatatatatcaaaacgctcagaataaaacctctagcgtggtacacaggttgctttcgttcatatctcactcgcacgccaaacaatgatgattaacctaattacttac

SEQ ID NO: 187133 - DNA, 189 bp, Glycine max
cgtgcgagccagtaattattttacaataacagtttatacaacatatttctttccaggtgctcaaccctatagctaatcatccatggatcccactctctgcagagaataagatgcaaccatatatcatgaatgaggaattgaacagatgtacggatcttttaaaccagggatctatgctagaatatgaac

SEQ ID NO: 187134 - DNA, 287 bp, Glycine max
  unsure (1)..(287): unsure at all n locations
agcttccataagtggttatatatcctatatcttcaagnangggctccttaaacctccattaattttttttgctttaccttctcttccatttntgtttcttcatttttctgcatgtatctcctcacatgtcttgtgataaatgttgttaacatgattctttagagtttccactgattaaacatgctatagaagctagatttgattttctatggttcaaatttcttgttctttttctcgaaccatgaattgtgtggactntaggttcctttgagttgtgtcttgttatt

SEQ ID NO: 187135 - DNA, 451 bp, Glycine max
tcttgattgggaagcaaaatgtgcctattaacatactgtcttatgctgacgacacagtctttgttggagaggcttcttgggataatatacttatgctgaagtccatgcttatgggctttgaaatggtttcgggtttgagaattaattatgcaaaaagccaatttgggattgtcggttttcagaccaattgggctcatgaagcaccccaattccttaactgtagacagttggacacccctttccattacttatgcatgcctattgctgttaaagcctccaatagggtggtttgggagcctttgatcaacaagtttgaagctaagctctcaaagtggaatcagaacactctgtctatgggtggcaaggtcaccttgataaaatatgtcctgaatgcacttgctatatatcgtctatctttcttcaagattcctcacagaataatggatatact

SEQ ID NO: 187136 - DNA, 363 bp, Glycine max
  unsure (1)..(363): unsure at all n locations
atatttatatatgtagaaataatttatttaataaaaaaatccatatttaaatttcacaatgtgaaaaaattctttntgataaactataattatgtactacaaataagattattttctgaagtaatgagttgaaaaatattgtctctcatctagaaaaaaaatattgctaataagaagtatgtagatcacttgggtgagtctagtggtaggaggctgaaatatatgtataaagatntgattaattatcattgccataattgtacaacaggaaaaaaaaaactaaggagaagcatataaaaaaatgatactaagaggaaagtgacactntttataataggatcgcatgacattattaatctcatc

SEQ ID NO: 187137 - DNA, 455 bp, Glycine max
  unsure (1)..(455): unsure at all n locations
ntgtattctgcatgtcatattcttaatagagtgccttatatataatttgaanaaaccccttatgagctatggagaaaaagagaaccaaacctgaaatatcttaaagtgtgggggtgtctagcaaaggtaaacattcccattaataagaaaaggaaaattggaccaaaaactgttgattgtgtttttgttggatactctatgcatagtactacttatagatttttggtagttaattcagaagtgtctgaaatttctaatgatactattatggaatctagagatgctactttctttgaaaatatttttcctttgaaaaataaattgtctaaatctgtttgtgatacttcttgttctaatttgtctacttgtagtaatactaataaggacattgtgtctgaacctatgaggagtaaaagatctaaacaagttaaggatctcggttctgaactttgctc

SEQ ID NO: 187138 - DNA, 417 bp, Glycine max
  unsure (1)..(417): unsure at all n locations
ggagatgaaaagagtgaacgtaacgttatatcttgcatataccttgtcttgtatcttgatttcaggaaataaattgtcatcatcaaaaagggggagattgtttaaacaatatcaaagactttgaatttgatgttttgatgatgccatgtggtcatgcacttctcaagtttaattcaagacaaaaatccaagaaatacaagatacatcatcaagaagatctctagtgatttaggaagggaattccaagttgaaacaataagaggttcggccaatggatttaagctaaaatgttntttcatgagatttactctctggtaatcgattaccagtgatcaaaatgatgtataacaaccattaaaagattgaatttaaagtttacactgtgtaatcgattacacatggatggtaatcgatacc

SEQ ID NO: 187139 - DNA, 468 bp, Glycine max
  unsure (1)..(468): unsure at all n locations
tctntgagaaaacttccttgagaagctagagcttagctacacttactccctataatagctaagctcaccctcatgccaaaatacatgaaaatataaaaaaaagtccctaatacaaagactactcaaaatgccctgaaatacaaggctaaaaccctatactactagaatggccaaaatacaaggcctaaaagaaggaaaaatctattctaatatttacaaagaagagaggacccaaccttggtccatgggcttagaaatctaccatgggattcatgagaaccccaaggccttctttagcagctctagcccaatcctcttggagtcttctatccaatacccttgtggggtaggattgcatcaccaagtctctcccacattcaccgtcctgcagggcgagctactcatcgacacccctttgttaatcgcatcatggaaggcgacatacctctgggttggaaaccactcaac

SEQ ID NO: 187140 - DNA, 426 bp, Glycine max
  unsure (1)..(426): unsure at all n locations
gcttatcctatcttgtgaaatctttcttttaactccctcagagtatatgttccgtgtgatttagtcacttgacccattcttgagtgaccgctaatgtgagcaccgtttgaaccgtttatattcaaatccactttgaaattctttagaggtctggttccccccccctttntntnntgtntaatacaccatcgacgaggtaagatacttttgatctgcccctatgttcacttgatgctcatgcacgatgcccctcatttgcccagtgtaaggctttgaggtaccaatcgttgtctttcgtcatgaccttgtagatgggaacatattgggtgggaacttctaatctgaccctatgttcacttgaagttcatgcacgatgccccttattgcctattganggcttgaagtataacgttgtctgtttcacaa

SEQ ID NO: 187141 - DNA, 466 bp, Glycine max
  unsure (1)..(466): unsure at all n locations
gggagaggatgcttcaatggaggaaaagaanaagggagagaaagagagaggggggagcacaaaattgaaggaagaaaaagggagagaagttgaactttgagttgtgtctcacaagactctcattcatcaaagttacaacaagtgttacacatgtttctatttatagactaggtagcttccttgagaagctttcttgagaaaacttccttgagaaacttctttgagaaaaattccttgagaagctagagcttagctacacacacccctctaataactaagctcacctccttgagaagcttccttgaaaatattcctaaagaagctagagcttagctacacacacctctctaatagctaagctcacctccttgagatgagaagctagaacttagctacacacccnctataatagctaagctcacccccatgacaaaatacatganaatacaanaaaaagtccctacta

SEQ ID NO: 187142 - DNA, 447 bp, Glycine max
tatacccactcagtggaggacaattgctccaattattgttcgtacccttatttttctgtacaggttacaaaattgtacgttgttggtacatgaggcagtttatggtagtaaattgatgaagtgaatgaagtctcagaaaatttgtaatgagtcggatttcttagaacacaaataattgaataataaaaatttgtatatcatatgggtattattggattcctaaaaaaaataaaaaatatatagagataaaagcttctagcaataatttatttaaatttataatcactgtatatttgatttacgtaaaagttgaaatatataaattagataatagaattacagagagaatgtacggatttaactcaagatatttaatgtgtatctcttttttcattaatagtcgttttttttaattctgtgaatactgtcctaagggcacacattgat

SEQ ID NO: 187143 - DNA, 453 bp, Glycine max
  unsure (1)..(453): unsure at all n locations
ataccattcattcctttgaattaaggaaaataatgntgatcaatgtatatatctaaaggtccatgggagtaaggttatttcttctaattctgtatgttgatgatatcttgcttgcaactaatgatcttggtcttcttcatgagactaagaagattctctctagaaactttgcaatgaaagatatgggtgaggcatgctatgtgatatggatagaaatattccgaaatagaccacaaggattgctaggcttatctcagaaagcatacatcaatatagtactagagaaattcaggatggaaaagtgcccagcatcacccgtttcaaatcagataggagaacaaattagtctcgctcaatgtcttataaatgatntggaatgaacacaaatgaaatcacatttgtatgcatcagtttgtattgcatctaccattganagctgaatttgtacattgt

SEQ ID NO: 187144 - DNA, 445 bp, Glycine max
  unsure (1)..(445): unsure at all n locations
ctatttgttgagttaaagatgtagaacttggattttatttatatttatgaacaaatttaattttcgtttatgagtatgacgtgtaccgagttactgtttctatataattatgtatatagacttaagtaatggcgcgttgttggatgaatgtatgttgtgacaaaattacttctattttataagcaaaaattaaggtagtgctttttataaaaattgaaatcatcgcatattggagtgttgatatcatagcgacgaggcgggtcgttacatggcatacttgggacactctttcttcatgtgtctagactttttgcagaagtagcaggtaaattcctcatccttcttttttggtttcttttgctaagaaaacccttcagcaggacccttagttntctttcttttcttattctgagaggtgaagcttatatgagcactttcagatcta

SEQ ID NO: 187145 - DNA, 393 bp, Glycine max
  unsure (1)..(393): unsure at all n locations
aactaaaaataaaattaaattccaccgaacgtttgatattggttatccattaactttggttaaaatcaattccgaccgttcggtcgtgccgtaaccacgttggaaatcaaaaagagggtaaaaataatttaataatcaaaaaatatccttttagtaaaataaagcggaaaatcaatcggacgttttctctttgggatntctcattcttaatcgaattgattaataactaaggtgaaactaaggctaaaatcaactcgcctagtcaagctcgtccacaaaaataggcttttgaagtttgtcatttcaattcctcactaagtaaaatggatcattnttanggccaacgcctaaaatgacacctcttaaattaaaaagatcacttgatagaaagac

SEQ ID NO: 187146 - DNA, 460 bp, Glycine max
tgagaatggagaaatgcactaaacaatcactacgcattgtttcaactcgaagatggaggacacatgaacgaaaacgcaattcttggggctccgaaaaaagggttgagaatggagaattgcactaagcaatcaatgcgcatggctccaaactcgaaggtggaagacacatgaacgaaaacgcaattcatggtgctccgaaaaagggttgagaatggagaattgcactaagcaatcactacgcatggctccaaactcgaaggtggaggacacatgaacgaaaatgcaattcatggggctccgaaaaatgggttgagaatggagaattgcactaagcaatcattacgcatggctccaaactcgaaggtggaggacacatgaatgataacgtaattcacggggctccgataagggtgagaatggagaattgcactaagcaatcactacgcatggctccaaactc

SEQ ID NO: 187147 - DNA, 426 bp, Glycine max
  unsure (1)..(426): unsure at all n locations
ctgcagcttacaacagatttgtttacttttatgacgaccctaatgggtctttattcaaactcacaacgcggagatgttcagatgtacctggtggagtttaagcacttggccaaccggattgtgggtttgccgccacagttcctcttgagctgttttgtctcaagactctaggccgacatccgctgtgaggttcaagctttgcagcccctcaccttggtccatgcagcggggttggcccgtctccaggaggagaaattgtttgacggtcgtcggccaccacgccctcgatcatctttcttttcttcaccaacacctcccgcgcccccggtggctgtggcactttcttcggtgccgctagcgtcaccttcgattccgtctcagctcgcagttctcatcaagcgcctatctncggaggagctgacattg

SEQ ID NO: 187148 - DNA, 462 bp, Glycine max
  unsure (1)..(462): unsure at all n locations
gtagaggttccttctgttaaggctgtgtgtcttttgtttctgaatctataatataaagatctttctttcatctgttcctacgtctctacccattctcatccatttgcatgtttacttctttatgtttaaaactccagatgcgacgacgagtccctcgaaggtactaatacctgggacccacccatcgactntgacctcatcaagaagagacagaactagtagacttgggaactggcagtggaaaaagggaagtaaagataggcacgggtatgaccacgcccatccgcgaagaattaacagccctgctaagagactaccaagacatctttgcttggtcgtaccaagatatgcccgatttgagttctgacattgtacaacaccgattacccctaaatcccgagtgtgcgccaataaaacagagactgagaaagatgaagcccgagacatccttgaagataaaag

SEQ ID NO: 187149 - DNA, 274 bp, Glycine max
gaaaagagaaaacgagcagaagggagcgcggagcaaaagaactatagaaaagccacagcaggccattggataagggggggtggcaacttaatcaccaattcgactctgaaagaccctgctcacctggaaaacggacatcactacaaaaggagggctcactctgaatctcacgcaaaaggcaaagagagctaccaaaaaggattctactgctttaccaaaactagcaccgtctagaatacgcgaccagagaaatcgatacaaagacaatacatac

SEQ ID NO: 187150 - DNA, 329 bp, Glycine max
cttcatcggaaaagtgttcttcagatgaacttctctgactcgatccctgaggactgctgggtccaatacctagaccttcaccctgttcctcaatattcactgcatccagctcaagagcaggagaggctcgagcacatgagggtatttcttctacagaaacattaggttgtacctgattcaaattgtcatggagaacgttaacaaatagcttcgtatcagctatgattaaaatcatattaacaatgatacctcgacggtagggtgatctagagataagtccggttgttcgacaaggctgcccatctcagcaatagaaagagtactttcta

SEQ ID NO: 187151 - DNA, 388 bp, Glycine max
  unsure (1)..(388): unsure at all n locations
atggngttatgcaaagtgttatgattctattttaattaaattacaattttctactatataacaatggcatagacacagagtgttcatgattttgtttccgttacagcaatcgcaaagccacatgatgatcgagagcggttattttttaaagttttaaatttcatataaatcataattgagatttgtgattctatttatgcacacacataaattntatataagtcataaatgagatttaatttgcagttttcatgtgattatggaggattttaaatttccgtttcgagccattaaatttcctctatttcatgaaaggaaactctccctcaaattgtgcataaaaaggttacctgttatctaattaaaccaattcgatatcaagatggcc

SEQ ID NO: 187152 - DNA, 367 bp, Glycine max
  unsure (1)..(367): unsure at all n locations
aacaaaaatcngaccgagcaaagaccttcaaccctccttcattaagatttatagctcctaaacaagcttcaaactcctccacaatggtgagcggatgctcacgcataagcacccaatgggcaactccctttctcatcttctcatgatcataatcggcactcgacttcaataagaaatgaagtggcgcatcataatgagatgcaccatgaattaaggtcttttgttcaaactaaatgtatcacaaccccctacatgtctctttgaacgagcggtagcccaccctcctagcacataggccgtcctataacgacacaaacaactgtaatgtccatgtgaacaccaatctcatgaactcttccaacattga

SEQ ID NO: 187153 - DNA, 335 bp, Glycine max
ggctaaaaagagaagaaagaaaggagcctgatttactgcaccttttcacagactctgccacagaaccaattcccaagagaacggcgtcgatatagctgcagctccattgcccacgcacccaacatgatccacacaagcctgacaaagacgacaccaggcttacacatgcagacaacaatatactcaagagagccacgcacggacaaaatatgaaagtaaaaaaagagagacacaacctacacttatgtctcactgaaagcaagaagaactagacacctctcacctccgcaatgtcgcttggcacacaccacacaactgaaggcaaaccagcacca

SEQ ID NO: 187154 - DNA, 429 bp, Glycine max
  unsure (1)..(429): unsure at all n locations
acttataagccaagacttatatatttatttttatcataacccgctccctcacgtccatgcccgagacaagacattagagtgagaacaaatattgacaacctagtggcaacccttatgcatgaaaaataggcaatccactaatagatttagcgtaagctctgatatgatttttgaatttaggtataagaactaattcaacatcataaaaccaatttgtaccgtgagaactgtgcaaacgttataagaactacatttgatttatttctagtccatgtgaaatctcaattaccatttattccttatcctgcctacatatcttttttggtatgtaatgcttcctccagctttggtgtctgcaggagttgaatctagcaaagccaaagaaagttaacttgttcctggattttcttgcagcatgcactntcatag

SEQ ID NO: 187155 - DNA, 433 bp, Glycine max
  unsure (1)..(433): unsure at all n locations
agctntcataggtgaaatcaagagcagccnanttccttagagtcctctcacggagtggagggtgtgccatgttcttagaatattcaaaatcagaatgctcaaaactataatgctcaaaatcaccaataacagaatgctcaggatgctcaaaaggtactaaatgatgcctaactaatctatgaaatgtcatgtctatctcaagatcaaagggttgtaagtcagatagatttcctctagtcatacactaaattcagcatgcacaattagttgccttcttatgcaagtaataatgtaggtttgaactacagctaccatcaaatgatgtccaaatgacttgaaattttgtgagcaaccttataaaatgatgagaagatagcacataaaattggtaagttaagacaaatatgagaaaacaacttggaaaataaaaaat

SEQ ID NO: 187156 - DNA, 358 bp, Glycine max
ccgagtaaaaagttattgtcgattgaatttgctcataacttcggtattctatttcgagcgtctcgacatattacgtgactcaatccgacatccgagtaaaaagttattgtcctctgaattcgctcagaggttcggtattctatttcgagcgtctcgacatatcacgtgactcaatccgacatccgagtaaaaagctattgtcgtttgaattttcttagagcttcggtattcaatttcgagcgtctcgatatattacgggactcaatcggacatccaagtaaaaagttattgtcgttggaatctgctcacaactttggtattcaattctgagcgtctcgatatattacgtgactcaatc

SEQ ID NO: 187157 - DNA, 438 bp, Glycine max
  unsure (1)..(438): unsure at all n locations
agctagttgtagtaaaaaaaaatgctaataatattattttttaattattataaactaaactatatatatatatatatatatatatatatatatatatatataacttaaatattttaatatatataatattgaattgaccatttattattttattaattataaaaaagataaaaattggccaatatgctatctcaactcatcacaaacctgcccaatttgtgctcgtaaaaattggagtggagcgagatcaaaataaggttaggcttaaattttcactttatacctttaccttaactcgaattctcactttatatttgattatttgttcgaatccatttagctcgtagcaccaccagcggtgatctagctgcgtcaccaacggttntgattggacagtacagccaaaccatgaaattgtcagatttacagtcattcatt

SEQ ID NO: 187158 - DNA, 415 bp, Glycine max
  unsure (1)..(415): unsure at all n locations
agcttccttgagaaaattcctaaagaagctatatcttatctacacacacccnctataatagctaagctcacccccatgccaaaatacatgaaaatataaaaaagtccctattacaaagactactcaaaatgccctgaaatacaaagctaaaaccctatactactagaatggccaaaatacaaagcccaaaagaaagaaaaaccaattctaacatttacaaagaagtgtgaatccaaccttgacccatgggctaaaaaatctatcctaaggttcatgagaaccctatggccttctttagtagctctagcccaatccttgtggagtcttctatccaatacccttggggggtaggattgcatcatcccctccaccttggaaaggaattgacctcaaatcccgaggttcttcatactct

SEQ ID NO: 187159 - DNA, 430 bp, Glycine max
  unsure (1)..(430): unsure at all n locations
agcttgaccaagtatgtccataacctgtcttatttaccctagaaaacaattcaatggttaanttgccaacaagaaaacacaatggttgttgtgttggttatatcattacgtgatattctcattatctccctttataatgtaatttaagtattctagtcctaccaccaagggtgcttttaacaaataataaaaactcaaatctcaaacaaacttacctcaccataaatcttatttataaacataaagcaattttgcctactggaaatggaggttcgaagcttctatatgaccaacccatactttcccatgcccttacaaaactctctagtgataaactactttgcatgtgtcatccctganaacaaaaagaaaggcatattgataaaggcatcanagtatgaatgcacaaaccaaccttttcaacatagca

SEQ ID NO: 187160 - DNA, 388 bp, Glycine max
gacttgagtctcaattttactatctccgagcaagaagcatttctctctagctcgctctctctctctctccatatatatatatatagacactatttcctaaattccaactgtgagaatgtacaaaaatgagttgtgaaggtggtgtgtaaatttcatgacgatccaaccgttaataaggtccggatcataattttactaagacaagttcagatatatgtgaaaaaagagagaatttttggaaaataagaagaaccaactactctgatagataggagagcctatatacatagtaaaatgtaaaaattaacccaatatatcactgtttataactagagtacttaacctattatttactctattctctttatttattatttagaaaaaaaac

SEQ ID NO: 187161 - DNA, 374 bp, Glycine max
  unsure (1)..(374): unsure at all n locations
tcaaatatcttaagagggggggttgaataaaatattacaaactatttccccaattgaaattctactttgatttcaatgaaagttccaagttcccttaaagatgaaattctaaataatgattcaaattaaacaatctgagtataaatgtgcagcaacaataaataaaagagtttaagggaagagaaagtgcaaactcaaatttatactggttcggccacacccttgtgcctacgtctagtccccaagcaacccgctagagagttccactatcttgtaaattccttttactagtcctgaaccacacaaggacaacccttcttttgtgttcatnatgtcttaaacaagagacccttggtctcttaactcccttttga

SEQ ID NO: 187162 - DNA, 441 bp, Glycine max
  unsure (1)..(441): unsure at all n locations
gcttgcttgaagacaagcagcgagaagaattatgcttttgttctacaggggcatgtgcgctgcgagcagcaccctgcctgattacatttccaaccttattacagaacgccattatgattgtttcctgatacacaaaatgaaaggatcaatataataaaaacacatcatcgggatagccataacaactgaatgacaaattctaaaaaggtcacatgcttcactacacaaaaaaaaaaaaaaaaactttcaagacatcgtactcgccatttggaagacataaaaacacacaaagtaaggaaatcctaatgcaatctcaacaaaagcactcaatcatcacaaagctcaaagcattatccgtctcaccaacccagtagcatgattagntgtacctaaaccctaaacccacatttcagataagcagatttgcacctcgagccaaaa

SEQ ID NO: 187163 - DNA, 392 bp, Glycine max
  unsure (1)..(392): unsure at all n locations
agctngtgaccaaccgcattcctcaagttcactcctttccattcttctatcctaccagnattagctataattaaatctacactattaaacattaaaacataaaaataaatgttaaaagagtaagaaagttgggttgcctcccagtaagcgcttctataacgcactagcttgatgtatgtcacctctaggggtcttgtaaatgtaagatggtggttaacctctcaatgcttccaccatgataaaattttaacctttgaccattcactacccagtttctctctagagtatttgattgaggatgcaccaattccactgctccataaggctttacttcttgatggtgaaaggtccaaaccacttggacttctacttgcctgggaatagcttgagtc

SEQ ID NO: 187164 - DNA, 285 bp, Glycine max
atgtgtgatgagttggaaaatgacgccgcaattatactgtgccagatggagatgtatcctccccctgctttctttgacatcatgattcacttgattgtgcatctggtcagagaaatcaaatgttgtggccctatttatctcatggggatgtacccggttgagtgatacatgaatatcttaaaagggtattcaaagaatctatatcgttcacaaccatctattgttgagaggtacattgcataatacgccattgaattctgttcacaatacttagagacggctata

SEQ ID NO: 187165 - DNA, 395 bp, Glycine max
  unsure (1)..(395): unsure at all n locations
taaccatctntgaatgtcatgcctaagatagctntcaaagacgattatntgctattaactgtctttgaatgtttcaacctttaaagacaattattataataatcatcgtaaaaaataatttcgttttaacgttgttatctacaatgacggttcacaactgtcgtgaaaaaccctttttttagtagtgagtgaaaagttgccaccgtttcttggagacttgtgaatttgtttgtaatagaaatggtctaatctaactcatttattaaataaattaagactgattttaaaacacttgtttaataaaaaaaagtcaaatattaaataatgatcaatattaaagttaataaattagtttatttaaataaatataaataatgcaataatgttatattaat

SEQ ID NO: 187166 - DNA, 429 bp, Glycine max
  unsure (1)..(429): unsure at all n locations
ctgcagcttcttgaagattatagagagtattatttattattcacacccctctaatagttaagctcacctccttgagatgagaagctagagcttaactacacacaactcctataatagctaaattcatgccatgccaaaatacatgaaaatacataaaaatttctagtacaaggactactcagaatgtcctgaaatacaaggctaaaatcctatactattagaatgaccaaaatacaaggctcaaaagaagaaaaaatctattctaatatttacaaagaagagtggacccaacattgacccatgagctcaaaaatctatcctgaggttcatgagaaccccagagctctttntagcagctctaacccaatcatcttggagtcttctgtccaataaccttgggagaaaggatngcatcaacttctccctcga

SEQ ID NO: 187167 - DNA, 391 bp, Glycine max
  unsure (1)..(391): unsure at all n locations
acaacagatgaagaagtatgcagacaagaaaagaagagaattgcagtttgagataggggaatgggtgtttttaaagcttagacctcacaggcagcaatcagtggtcaagaggattaatcagaaattagctgctcgtttctatggtccttttaagattctggccaaagtgggtgcagtagcttacagattacaattaccggctcagtctagaattcacccagtattccatgtttcattgcttaagaaggctataggtgattatcatgtacaaggtgatctgccacaagagctagaggtaacaaatgatgacagctnttatcctgagatggtatatgatctagagtgaatatgcagggtggtgtttccgttccacaaagtttgattaagtgga

SEQ ID NO: 187168 - DNA, 333 bp, Glycine max
  unsure (1)..(333): unsure at all n locations
ccccgcagccnacagcgcccacgcagagggaaccatccccagtgacaactccgaacacgactatgaccggcccgtttcttcaacacgactaggatcttccctccgaggccataaacggaattcgcccccctcgccatgactaacgacgatcttctaccttccctgataaccattatttggacgtgagactaacgaagaggcctttcgcacttctctaatcggttgaccctcacgcacgtgcgccaccgggagcgacctggcaacggtctacagcgcgtctaaaacaaagcaactaaatggtgcgaggagcttgcagagatcgccatggaacca

SEQ ID NO: 187169 - DNA, 428 bp, Glycine max
agcttcaagctgttcaatagtttcagattgttgtttttaaaggcaaaggtctgtgtggttgtcggcaaaagagcataaaccacagagtcttacgacaggtacaaatttttgattcatggccagttgggttaccaagttaaccaaggcatctagtttaccttcaagcttcttagtttcagatgatgcagatgagtttgtggttacctcatgcacccctctaatgactatagcatcatttctggcgctaaactgttgggagttggaagccatcttctcaattaaattcctggctttagcaggggtcatgtcttcaagggctccaccactggcagcatctatcatacctctctccatgttactgagtccttcataaaaatattggagaagaagctgctctgaaatctggtggtgagggcaactggcacata

SEQ ID NO: 187170 - DNA, 436 bp, Glycine max
  unsure (1)..(436): unsure at all n locations
agctagtggcaatgatgtcaaaatatctaataattttgttgttaagnatagcttttgttattgtctctgcaatacatagatgtttcatgtttcacatggaaattgtcgataaattaaaattcagttgatacatagattatttattttccaaacttagtgacagatatgagattaatctatggaacctacctatgcgtgagaactataaacacgtgccatacctaattctcattcatccatgttgggaaatcaacgttctgataccactagtaggtaatcatcgctttgataccactgttaggtaatcaacgctcttacaaataaaattattcacactcacaaagaatcgtgagaacacacacaaagatcatactgtaggaanaataataacaaatacaagaatttaacgttgttaaacacttttgcttacgactat

SEQ ID NO: 187171 - DNA, 427 bp, Glycine max
  unsure (1)..(427): unsure at all n locations
agcttcctcggagccattcctgcgaatgcttttatttggaaagttagttntaccagtgggacgttactcttaaagcaaaaatggcatgtaacctcctcccatcaatacaaacatcaatgtaaatttagagcaagcttatgcgcctatttccttacaaacgttctcttgcacaagacatttaaccgaaaaatgcacccatatacaatcaaggcagcttcgttacctagattatttacacgtacctccaaggtgtatttgttacttacatcacacacacctccttggctaaactcacatacatgcatactcaagcattgtggggcaccaaaaattgcacatgtgcacatcttggcatttctaatacctacatacgcaaacttcatgatgaatcttgactatctacacaataaggtgctacatttcatgc

SEQ ID NO: 187172 - DNA, 307 bp, Glycine max
  unsure (1)..(307): unsure at all n locations
aacgccntaacgactaacacccttgtaataacgaaactcactgcctagaaaacaactacagagaaaaagagcgcaacagatataagcagacatcaaacataattagtcacatgatatagatacaggggagggagatagacccgtgacaagaagccatggcatggtacggcgcctcaaatgcaccgttgagagagagggcacggtctcctaaaaaatctcacggacagcaagcactcagccagagcgctacttcactcttaccgagctgccgtagaaaatgctagaacagggacgcggcgcgaacctc

SEQ ID NO: 187173 - DNA, 341 bp, Glycine max
tcaagattaaatcaagattagtctcaagattcaagaaatgacatcaagaagaatcaatattcaagagaagatgatttcaaagagaagtattgaaaagaattgttcaaaagccaaacatagcacaattttgttttacaagaaaagtttttctcaaaattctctaagctactagagtttttactctctggtaatcgattaccaatttcctgtaatcgattaccagtggaaaagtttgatttcaaaagcttttaactgaatttacaatgttccaattgatttttaaaatggtataatcgattgtgaagagtcacatcctgttataaaatgctttgtgtaatcaa

SEQ ID NO: 187174 - DNA, 393 bp, Glycine max
ctgcgcaaaaattacactatgcattgagtcccaatgtaatttgtctatgtgtgagtgaactctctacaaggttcactcttagtacacatatcccaagggagtttagcacactaatctagaaagttatcatactaatctagaagatcagaataagatttaccagttttagcaaaaacagtttttatcattttttggaaaaatttgactttatccttttatagttagttttggaaaagtgtaagaagtcatataaggcatggctgagcttgtggagagcacctcaagggatatccaagctatcaattagtcatattaatggttattcaaagtgcttagattaagaagataaagattaggccttgcaattccattggtccaagcatttcacctaca

SEQ ID NO: 187175 - DNA, 357 bp, Glycine max
  unsure (1)..(357): unsure at all n locations
tgcaatagatgcaaacactaaggcatggagaacaacatagaaatacccacgtgatgccattctattactatgcaatcaataactgatcaatatgcaatatagtatatagtactatagttagatgacaatatcgcctacagggaaatgataaagctatattatgtatttctatcatttggattgctatcgccacattgctgtatttatagagactctgagacgcgtgctgtggaanaaaataccatttgttattgttggtccatagaaaaatataccaattaactgcaccgtatcatagcaagtgatgtgtggactgaccccatgaaaaagacatttcacctccaaaggttctatata

SEQ ID NO: 187176 - DNA, 441 bp, Glycine max
  unsure (1)..(441): unsure at all n locations
agcttgtcgaacctggattatatggatgatgaatgcttanggaaagcgtcctcccatcggtcagtacttgttttcgaacgagtgccgtcagccatggcaacgatgatgaaagcaccaatgttagcagctggtcttcgaggcccaacaacctcctcaaagggaaagagagataagagagagagatagaggaaaagagtattatttattcttatttttgcaaagcgctttcaaacatttatcgtttattacaaaaggaaccaagctcaacgcctataacagaaagcctaactgccagttagttattctaacagaaagcttctaatggttgtattcttctcgaagctgcttgcctatttcgtgtacatgcatggcttaactatcaagtatgtagtcctttaggcgcaggggagtattactttgccttttgagctttgttatttg

SEQ ID NO: 187177 - DNA, 393 bp, Glycine max
tctaaccaataaccacttttggtcctaaaattctaacgtttaagtagagtgcaggttgttgcaattctgcgtaatcaagttatcttcatcaaccattaatcggagcacctcatcttccccttttccttttattcttatcctagctaggaatgggattagaatttcggacttctctggttttacaatgtccttttgctactcggatttgaaatgcaaaatccttgatcattcttttgctactcagtaggtcacaaattaagttgattacaactcatacaaaccttgttgactctcaaacttttgtttcagccttcaaatctccccctattgtctattgagaacataaaagcaggtggaacaacatattagttttgattagtaattaataacatg

SEQ ID NO: 187178 - DNA, 340 bp, Glycine max
  unsure (1)..(340): unsure at all n locations
atccttaagcgaccgcaggctgcagcttcagccattcagccgacaattctttgnttttggacngcnganngagncccggaagataacgagacgcncganagngaatggggaagcgcagaactagcacagacgacaacaacgncacactcggaagggggagggagccccggaatacagcgagacgcgcgaacaagaaagaggaagctcagagcctattcaaacgacaataacttcttactcggatgtctgattgagtcccgtgatataacgagacgctcgatattgattgttgaagctctgagccatttcaaaggactgtaactctttactgggatgtctg

SEQ ID NO: 187179 - DNA, 429 bp, Glycine max
  unsure (1)..(429): unsure at all n locations
tgcaagcttcttggggttggcaggctattatattaagttttattgaaagannnnctaaattggcattacccctaactaagttgactcgtaagaatgagaagtttgtttggaatgagaagtgtgagcaaagtttccaagagttgaagaggcggttgacgacagctccagtgttaattttgcccgaccctaagagaacatttgaagtgtattgcgatgcacgcgggcaaggcttgtggtgtgtgttgatgcaagagggaagagtagtggcgtatgcttcacgtcaattacgtcctcatgaagttaactatccgactcatgacttggaactagcagcggcggtctttgccttaaagatttggaggcattatctgtaccgtactcgttttgaagctttcagtgatcacaagagtctcatagtcttgttctatc

SEQ ID NO: 187180 - DNA, 437 bp, Glycine max
  unsure (1)..(437): unsure at all n locations
agcttagaaagttcatcaaagagaaagaattttattgtgagatcgaagaaataggtcctgtgttggagaaaggaaagtaaaattatatcaaattggcatggcgagtaatgtagatccgggatgttgagacgtccaagcaccaaaaacctttgtgcatactgctatatccaagaaagatacatggaatactccgtggtgataatttatgaggagcataatctcgcaaacaaggataaacccgacaaccaaatgggtgaaagtgagcataatttggagaaacatcatgtaagagctcaaaaggagatataccttttaacaagggagtaggtaaccgatttataatataaacaacacaacaaanagcatctagccaatacgtagtgggcatgtgggaatgaataagcatagcaagacctgtctcagtaatatggcgatgc

SEQ ID NO: 187181 - DNA, 431 bp, Glycine max
  unsure (1)..(431): unsure at all n locations
agcttcttatccaaagctcgatctggtggtgttgctctctnttccatggcttattccttaatggatggcgcctcctctcacctcttctcctttgtcttccgctgcatctccatggtgaaaaatcaccattgaaggacctcattgaagctcaaagatccagccttcatagaagctccacaagcaagcttccatcaagtggtaatcagagcacaagagcttcaagtaggtgctccttaaacctccattaattttttttctttaccttctcttccattgttgtttcttcattcttctccatgtatctcctcacatgtcttgttataaatgttgttaacatgattctttagagtttccaccgattaaacttgctatataagttagatttgattgtctatggatcaaatntcttgttcttgttcttcaaccatgaa

SEQ ID NO: 187182 - DNA, 430 bp, Glycine max
agcttcaagttgctcattgactccatattgcttcattagaaagacaaagatcagtatggtgatttgcagaagaacatagactacagactcttacaacaggtgtagatttctgattcatggcaagctgagttactaagttgaccaaggcatcaagttttccttcaagctttttattttcagtagatgaagatgaatctgtggccacctcatggactcctctaagaacaatagcatcatttcttgcactgaattgttgggagtcggaagccatcttctcaatcaaattcctagcctcagcaggggtcatatcaccaagagctccaccactggcagcatcaatcatactcctcttcatgttgctaagtccctcatagaaatcttgaagaaagagttgctcagaaatctggtggtgaggatagcttgcacacaa

SEQ ID NO: 187183 - DNA, 390 bp, Glycine max
ttttgaatttatctataagaagaccaatccaataaaaacattaagtacagaaacaacaatataaagaactcaagatgaagtattgaattgatagaattaaagcgaaacagggggcatcctttcttctcttaagaggaaagaattgcactcacaaaaataatacaatgaaacctagagggtctaatggaataatggaggtgtctagcaattgaaagtctaaaatataattataagaatgacttgggggcttctacactataacaatgaatgcctagcctcctaattataaaatagtagctaggtttaattaagaaaataacacaagagattacaaacaaataatatctctaattaagtcaagtaattgttttctccttagctgggttatcc

SEQ ID NO: 187184 - DNA, 321 bp, Glycine max
caaacgacaaaactcgccatcagccgagaagatgaagctgacgaatatgcttcatggaaccgggaagaagaaaaagcggagaagaacgctctcacacccccttaactacctcaagaagaatatgaggaagaagagccaggtgaaccaccgtcacctacatcacaacaacaagatcaagaactatcatcaccagaggctactccaaaacgagtaagagctttggcggacatagatgagactggggactaggccacacttgaacctggaagcttcgaagaagcgtcaaagcaggaagtatgcggccaggcactggaagaagag

SEQ ID NO: 187185 - DNA, 440 bp, Glycine max
  unsure (1)..(440): unsure at all n locations
agcttgtaagcacccttacttgagaagggatntttctcttaagagaatttacgcttagatctagatgctgtaaacttgtaagcttccctagttgagaaggtattgctccatcaagagaattccatttaagatcaagatactccaactttgagagattccccaattcataaggaattctcccaccaaacctcgaccatgatagatcaagatattttaagttggtgaacgagcccataaatttttggatgtgactcccttcaaaatcattatggctaagattcaaatattcaatattttgcaagtcaatcaatgaagaaatattgattacacctgacaaacgttgtgggtagtgaccatgaagatcaagcatgtagacgtgatctgtttcattattgcattgaagacctttccatttgcaacaatctctgttattttcatca

SEQ ID NO: 187186 - DNA, 428 bp, Glycine max
  unsure (1)..(428): unsure at all n locations
agcttgagctacaattactctgagagagtatgtcttcttcttatcatnaataatgccattcaaccatacttctttagttgtcaataacttgccatcaacttttttagtcaatcattttgaatttgtagtcttgttattgaagaccctcccacacgtgtgcttccgttcaaatgtcttcattttgaatgttgtgttgttttccacttggcttaccaaaactttaaatgaacaacctnttgacttacacataactctaactctaattttgtcattttttgggaacctaacctccattctaataagaatcaaatactctctcattgcatccttaaagtcaactaaagagttaaacttcatttccaactgaaatttgaagttctctcctaattcttctttcttaaacttaggaaattaatcctgtctacctc

SEQ ID NO: 187187 - DNA, 411 bp, Glycine max
  unsure (1)..(411): unsure at all n locations
agnctntatgtgagaaaatgtgactcttctcattttaatttgaatctcaacgttcaaaggtactggtaatcgattaccaaaacattgtaatcgattacagccttttgaaaataattggaacgttgtaaattcaatttgaaaactntttcaaaacaattgtgctactggtaattgattaccagagagtaaaaactctttggtaaaaggttttgtcaaaaactcatgtgctattcaaagttttgaaaaactttttaatacttatcttgattaagtcttttcttcattcttgaatcttgagtcttgaatcttgatcttgattcttgagatcttgaaccttgaatcttgattcttgattctaggctttcttattgagtcttgaattcttcttgattcttttctagaactctagaa

SEQ ID NO: 187188 - DNA, 430 bp, Glycine max
  unsure (1)..(430): unsure at all n locations
agcttccatcaaaatcttcttctcatcaaccnttttnatttcttcccaactatccaccaagggttcttcatatcttngcccttttcctttgaaattggttccaccagatgagagtatagtcagtgaattccatggctaccaccttcatctttttatcctcggtgtaattatggcatgcaaatagttgtttaattttcatttcccactccaaatacgcttttggatcactttttccttgaaaaggggtattttcaactttactccttcaattctatcctctctagaatcaccctcactatttctccatctcctccttctacctccaccatcatcaccatttccttgattntctagttgttcaattctcctatatagctcttcggtatgttctgtcaacattcattgcatgtgggttataatggcatcaatc

SEQ ID NO: 187189 - DNA, 147 bp, Glycine max
accagttggatcatcagatgtcgccgacgcaaatcgcgagagaagagcacgaaggatagtcggccaggacgataactggccgtagcgatgcatccaaagaaaccaggccaaagcccgaccttccctgaaaaacgacacgagcggtaa

SEQ ID NO: 187190 - DNA, 392 bp, Glycine max
  unsure (1)..(392): unsure at all n locations
acttttattcggtgaccacagagtggtacctggagatatgtcgcgggggtcacgagaccttggggacgtcaggtggggtgctattgcccaaaaccaagcttgaccaatcccgacccaacccgggtatagtccgtcagtgagaacctgtgatgtacctaaacaggcgagctcttggcagtcaacagataaaagaacaaagaccacaaagcaaggaggcttgtgtggtggctggccagctgtgaactttgagtgttatatgggatatggcctctggtaatcgattaccaagggtgggtgatcgattacaaggcttaaaagtgaagacagaaagctaagatggcctctggtaatcgattaccaaggggtgtattcgattaccaggcttanaaacg

SEQ ID NO: 187191 - DNA, 430 bp, Glycine max
  unsure (1)..(430): unsure at all n locations
agcttctcccncaatattgtataaatatggtagttaagtgaagngaaaaagggttcagccccttaagcacttctctctcttttgaatttgcttggaaaaattgtttccgtgaagaaaatccaagccgaggcgcttccgaaacgtttccgtgaggaatttcgcgaaggttttcgaccgttcttcgacgttcttcattcgttcttcatcgttcttcagtcttcaacgggtaagtacctcaaaccaagctnttcgattcattctatgtacccgtggtggtccacacttggtttcgtgtatttttattctcgtttcatttactttttatacccccttttgacgttcttaagccatcttatttaagtcatttctcgcttaacctataaataaaataaatttccatcgatcgttcgaattgtattatccgttaact

SEQ ID NO: 187192 - DNA, 409 bp, Glycine max
gagtgactgaaactccatagatttgttttatgcccgtgatcaaagcaagaaaccccagggccctattggacttctctgggtccactgggtgtctaagaggtgtgatccctgcaaattgatatatagcgtttgagatcagctgggccatatggatactcacctgagttaggatggcatacaccagctgacactttggcaggtcgaggtctgaattatggtcgctagagagaatgttgttgagcagcaacgtcatcccaatctgcgtaagggtagttatattagtgcacatgatccacacctgtcttcctgccacgctccgagaaaagtcctgccccacaatgcacaacagctggctgatggtcttcttatcgaaccgcgaggcctgactcctcctctggctaaactcata

SEQ ID NO: 187193 - DNA, 378 bp, Glycine max
  unsure (1)..(378): unsure at all n locations
agattcttttaacaaataanactaagccttatctttctcggtcttgttttcttcatcttgaatttaaacttgaagtaactttagacttgaagccatcttgttcttttagcatcatcaaaacttgtatacactcattcacatgaagatcaaaagaattggaatgaaatggctaagacaatgatgaagattaatagaaaactagaggaaatgttcaacacggttcatattaaggattaggttatgaatttcaagactatgttgaaccataagcttatcctaaatggcactcattgtaacaccaaattcctaactcaatgacttttacagtcctgatgaatgagtacaaagtgacttgcagtagtttggtgagtaactcaa

SEQ ID NO: 187194 - DNA, 390 bp, Glycine max
gagaaagagagaggggggaacacgatattgaaagaagataaagggagagaagttgaactttgagttgtgtctcacaagactctcattcatcaaagttacaacaagtgttacacatgcttctatttatagactaagtagcttccttgagaagtcttctgaagaaaacttccttgagaagcttctttgagaaaacttccttgagaagctagatcttagctacacacacccatctaaaaactaagctcaccttcatgataagcttccttaagaagctagagcttagctacacacacccatctaaaaactaagctcaccttcttgacaaaatacatgaaaatacaaaaaaaaaagttcctactacaaagactacccaaaaagccctcacataca

SEQ ID NO: 187195 - DNA, 431 bp, Glycine max
  unsure (1)..(431): unsure at all n locations
agctagtgggaatttgagatagagattctgttcgtatatgttgatgatagaaaaagtactaccagatttgtatnttttatgggtgattatgtttctacatggagttctaagaagcaaggcattgtgacactttctacttgtgaagccgagtatgtagctgcaacttcttgcacatgtcatgccatttggctaagaagattgttggaggaacttcagttgttgcaaaaggaaagcacacagatctatgttgataatagatctgcacaagaacttgccaagaatccggtgtttcatgaatgaagtaagcatatagatacaaggtatcatttcattagagagtgcattaccaagaaagaagtataactgactcatgtgaaaactcaagatcaagttgcggatatctcaccaacctctcaaattgaagatttcga

SEQ ID NO: 187196 - DNA, 437 bp, Glycine max
  unsure (1)..(437): unsure at all n locations
gatctctaagtcacctgcggccatgcaagcttggaccttgccgtgtaaggccatatatttttctatcgagtggcccggcctcccgcccccntatggnatgcgtaggtcgcattacaggcataccattttgggaatggggaatggttgatctttcccgggaccaccacggccaaatggttggcgatgagagacggcaaaagttccttatatgtccttgggatcggggcaaagaatggtgcctgccttggcgacaagctcctagccatgtgtctgtccaaatgatcgttgttggttcggtgagactgaatctgagctggagtccatacagctccctcctatatgggtgcagacgcccttgttgggtgaacacccgatcatatagacctcgcgccagctataaactcggtgatgttgccatattgtggtaccctaggggt

SEQ ID NO: 187197 - DNA, 429 bp, Glycine max
  unsure (1)..(429): unsure at all n locations
agcttgagtccttactgaagttgacaaattcatagttcaattgatttggggaaataattattgtgggatttntttctcagtccaattaggccttataggtgttacccttcatatggatgatttacaatgttagtgtacgtgataccaatgatatggatgatttaaaaaaaaattgtagtgtgagaatttgaagcttgacatcaatattttcttaagaaataaattgcaaaatggaatatatagatagatagattaagatcaattatgcatatatttctagtcaatttggattgattaattaacttgtaaagtattagtagttgtatgttaaaagtttaagtgtgagtgacaaaactttatatgtaccgataagaaatgggtttagtgaggattaaataagttagaagattcactcacttattcactaaa

SEQ ID NO: 187198 - DNA, 426 bp, Glycine max
  unsure (1)..(426): unsure at all n locations
agctttcaactatcagcgtggtagtaatttttaattntcagttaactttttaactnttaactaatttttcagttaattgtaccgaatataacatatatctaacgtatatatagccatttccagcaacaaattttcatctttcaaattgttttatcaccttatcaacaaataatggggtacctacatggctacatctttatgcatccttgtcaagaaattctgggtctcccagtaacgattaaaacaataacaagtataaaaagaatccaataagaaaattatagtacaaatcgaataggaaaaaaaaaagtgaaaaaattggccattgaagagaaaggaagcaaccactgcactgagcataaagttgcatcgatgagatcaattgtcttcataagccaaacggtgaacaatggttgattcgatacc

SEQ ID NO: 187199 - DNA, 421 bp, Glycine max
  unsure (1)..(421): unsure at all n locations
agctagaagngctatacactaacttgatcttatcctttataatgatacatctgccactacttctgtttttgtggaaaaatgattatgttttctacaatttttaattcattttagatctggaacattttgtcatgtgcttatttattattttttttcatgtatgcatatagggacatcaaaggggctaacttgcttgttgactctgctggagttgttaagctagctgattttgggatggctaagcatgtgagttccaagtctccctctctctttgatttacattttctactcagtccttttgcattgcagagaatgcgttatcttcttccattgagtctctgtatatctacttgctaatatgattatctatttatggttgaacaattccctacaagaaattggcattataaaatacacacac

SEQ ID NO: 187200 - DNA, 434 bp, Glycine max
agcttgtatattaaatgaacccataagtcatatcatttattattatcacaactatttgtatctttaatatcttgctaacaaagtcaagtttgtgtgtaaattgttccagctgttgctcccctaaaaagctttgtcaagtaaaacttctatcaacataaatgacgcaccgttaatcataaatcacctaatcaaaatttcatatagatatggctttgttaaatcgaagtatacgcgattaaattcattaacataactaagtggcacacaccagttcctacgaaagtaaagcatgtcacagggcatgcactaagcaactacaacttgaatttatgtggtgaaatacatccactggctcactacctatgactacataccatgtttgtatagatgaaaagaacatatacattagaatccgataaaaaccaattgagatc

SEQ ID NO: 187201 - DNA, 237 bp, Glycine max
  unsure (1)..(237): unsure at all n locations
aagcgcgactatncaaaagagtgaacgcaaacgagacatggccgccataaatatctcacgaacaccttttatatatatacatatatatagagacatactaaagctcacgcaaaccaatcacatcacatagcacaccacatagcccgcacacaaaagaaagactgagaatacaaaatggaaacttgatacaagaccaccgacctcgcgcacagggacatacagactcccctgactctg

SEQ ID NO: 187202 - DNA, 385 bp, Glycine max
gctcgcagcacatggcaacagttaactctgtgggtcttcctgaaagtcgacatcaccactcacgacaaggtaaacgtacatgtggatacaatgttgtaacaatgagtcaatatcaggtatcacaagcatatttctatatattaaacaatacagcagaggtgttaccatacatagaggctcacaaaaaaaatgtgacagatactcatccaaaaatgaacatgataaggatgttgcaagagcacaatataatttcatcaagtggtttacacaaacaatatttgttgatgatagtgcttctagaacactaagattgttagctatcggcccaaatcacaatgtctctacttggaagggatatgacatcacatattattcgctctacacc

SEQ ID NO: 187203 - DNA, 367 bp, Glycine max
ctgataccctcccaaaatataccaaaacaatcacctgtgttgtaacttctgtgaagcagctgggcaggggaccataacatttcttattcggatataaaacattgagaaaagcccttctaagaaagaaaaatccaacagtatcaaaagaaaagttagtttgttagactttggaaaggtcccaatttccgcgaagatgaaagtggccctctggtttatctataaaacttaagcctatgtatgttatcttcaatgcctcattgtcatgtcttttccattagaaattaagaactcggacaaccattgctcatgctcttgctcttgctcttaaaaatccacaatatccacgtaccacaatttgattcaacct

SEQ ID NO: 187204 - DNA, 431 bp, Glycine max
  unsure (1)..(431): unsure at all n locations
agcttggcttctacataggcatcgcgctatagatatncttcgcacgaccacttaagacacgcaagatgtttggttgaaaacctgttgctactccactcataacacatgagaaactacagaagaatgatggagcaccagaagctgatgcatccagcaaataccgaagtctaattggaaaccttctatatctgacaactacacaacctgacataatgtatgctacaagtcttctatcaagattcatgcaaagcccaagtcaaatacactctggagcaagaaaaagaattgtatgtatctacaaggaacaaaagacttcattntatggtatactaccgaaaccaactcataattacttggctacaccgacagtgattgtgcaggttcggtagatgacatgaagagttcctctgctatgctttctcacaggatcg

SEQ ID NO: 187205 - DNA, 436 bp, Glycine max
  unsure (1)..(436): unsure at all n locations
agcttgttgaagtttgctgaanaccgtgggagttttgctctangttacgagcctaanaatgctgacaagagaaagattcctttgggaaaaaaaagaaagaagtttagctcgtttacaagggcgaggaccatgggtggagagggtccctatttgccacatcaacgagagctttgtaagcgcagggtggatgcatgaagatcaagttgttgtgttggacgaagaaaccaattaagatcagccaaattgggtgcagccatgttccctgtgctttgaattgaaaacttggcagatcatggagcgacccgagatttctgtgtcaaatccaatgtaattaagtagtttggaccctatagttgggcctaggctntaaggtttgcttctcttgttgggcatactttcctttaatgatccaacaattattaatatacaacctttt

SEQ ID NO: 187206 - DNA, 375 bp, Glycine max
  unsure (1)..(375): unsure at all n locations
agctntctccactaagttgcctgatgcctgatatgtcttttctgatggcagtgatctagatgcaaagaagaatttctctgagaacaccctcttaaggtcatcccagctgaaaatagacctgngagcaaggtagtatagccaatcttttgccactccctccagagaatgaggaaaagcctttagaaagatatgatcttcttggacatccgggggcttcatggtggaacaaacaatatggaactccttaagatgcttatgaggatcttcacctgcaagaccatggaacttgggcaacaaatgtattagttcagtcttgagaatatatggaacaccctcatcaggatattgaatgcgcaagctttcataagtaaaatc

SEQ ID NO: 187207 - DNA, 419 bp, Glycine max
  unsure (1)..(419): unsure at all n locations
agcttccattattgagtctcctttctctcnttaattataattcaaaaagacacagtttgagaattcttttgattcttccctttcccttaaacaaaagatttcaaaggactaaccgcctgagatatcttttgtttccccttcacaaagtttcaatggactaaccgcctgagaactttgtcttaacacattagagggtacatcctttgtagtacaagtagagggtacatctacttgggttgttgtaactgagaacaagagagggtacatctcttgtggatgagttcaagtggagggtacatccgctaggttgttcaaagagaacaaggaagggtacatcccttgtggatctttgcttgtaaaggctcttacaaagttgagaagaaatctcaaagaccgcatgtcgcttggggactggatgt

SEQ ID NO: 187208 - DNA, 391 bp, Glycine max
attatctcctaataccttggttagattctaagagagcatatggttcaaggcaaatttactctatatgtgggggagaaaagttgaaaagaatgaatagaaaaatgttaagcatcaacacacacaacaaataagttgtatgttaaaaaagaaaagagaaaataagttgtgttgttacaataaggtcaaaagcaacttaagaaaaaggaatagtgagaaggttatttgtacaaaacaagaaaagatcattggaattagtctaggacttgtgctctcttagaatctaaacttttgaatcctagaaaaaccagtaaattttttgtagccacaacctcactacaagcctgagaaagtccttatgattctgtctttatatttctgagttgatgacatg

SEQ ID NO: 187209 - DNA, 384 bp, Glycine max
  unsure (1)..(384): unsure at all n locations
agtactaggcagcatttttttattaattttangngattacagaacttgtattttcgctgggagtattttttgaagttatttttcccggttccctcatgttttgggattggctgggggtttccccttgcgctttgtacactgatacacctctttttttctctccgtaatttaattttttcccttgcagtgttatataacgcctgttcatgctgttctccatttaaagaagttaattgcagcttgacaggtggtagttgcttgtgtaattgtgcggtaagtataaataaatttgcagttgatgtccttgtaattgctgctgaggaaattatgacagttggcttctttgccagatttttcttgcgttttgctttcgagaagctcgag

SEQ ID NO: 187210 - DNA, 266 bp, Glycine max
tcatgcactcctctaacgactatgacatcatctctggcgctaaactgctgggagtaggaagccatcttctcaattaaatccctggctgcagcaggagtcatgtctccaagggctccaccactggcagcatctatcatacttctctccatatgactgagtccttcataaaaacagaggagaagaagccgccccgaaatctgatggtgggggcaaccggcacatagcatcttaaacctctcccagtactcatacaggctctctccact

SEQ ID NO: 187211 - DNA, 382 bp, Glycine max
tgttctacaaaggaaaaccaaaaatcaaacaaaacataagcaattaaaccaaaagcaacaaagaaacaaattataccaacaacaaaaaattgaaaaaccctagaaaatgaacgcctcaatcaaacgcaatgtcacaaaaaagaaaagcagaacctggcggagacgcttttgttgttccccggcgagtaagttccctgctggtagcggtcgatggtgggcgcggagcttgacgcccttgtcgggcaaattcttgccggtaacgtcgagggtcctcttcttgctctgaatcgactccctgagcttgtgatcgggaatagcggagaggtcgtcctgatcggcggacgacatgacggcggaggccggcacgacgtcgtactcgcgc

SEQ ID NO: 187212 - DNA, 380 bp, Glycine max
  unsure (1)..(380): unsure at all n locations
agcttgttacagaacttaagaaatatcaagttttatcttgttcgcacatcgttcgtgtgtacgatatccactcgacaaggtttgaagtagaggagacctttaatcctatcacgcaacgtggcggacaaaaatgggcagttaacttgaatggccattattgtcaatgcggaaggtattctgcgcttcactatccatgttcacacattattgcagcttgtggttacgtgagcatgaactactaccaatatatagatgttgtttacaccaatgaacacatcttanaagcatactccgcacagtggtggcctcttgggaatgaagcggcaattcctccttctgatgaggaatggacactaatccctgacccaactacaattcgt

SEQ ID NO: 187213 - DNA, 426 bp, Glycine max
agcttggaagaaggatgggtcaagttcttttgcagagcttgaaagagcccgagtagtcgaagagaagttcaagtccatagccatcaaagtctgaaaagagtatgatgaactaagggacgtcaatatggccaccgctgaagccttggaatgagaaaccaagaaggcccgaaaggaagaacacgtgccagcaaagttttgaggggctttatagggcagcaatagcaaactcaagctccgaagaggtgaaaggaatcatcacaggtcaaaggcatgatcttgaaggacgagctaaaggcttaccttaagtcgaaaagaaatttgtcccaacagttaagcgagactgaagggaatatgtgggccgtcatcgatgagtgcaaagagaagctaaatctagtggcgactcacgagcaaaggctagaggatgag

SEQ ID NO: 187214 - DNA, 382 bp, Glycine max
  unsure (1)..(382): unsure at all n locations
acatactcatgactaggaacccaaaatttggttttagaattagaaaagcatganaatagggacttgcttgtaagaatttgggctgccccatgattggtactttgcacctaagtaacgtgggaaatgcttttcaatggtgtgtagatatatgtgtaaatataaggggcataaaattcctcgccaagtatgaataattgttttcctaaatgaatgtatgatagcgtggaatgcctttttgaatgcaaatatgtgcaggatgtaattagctttccaatatgcatataaataaatatgagtgaaacaataaaatttgtatggtgtacttcaaatgtatgtaagtagttagtgatagaaaatgtttaagatataaattaggtgtaaa

SEQ ID NO: 187215 - DNA, 432 bp, Glycine max
  unsure (1)..(432): unsure at all n locations
agctntcatgttgtgacctcagaagatttgtttttataccctgattcccattagcttcttaaatagtttatttccaaagattgaactactctcgaccaagagaaaattcaaatcaatatactatgtggcatggaaaagtcagctcattttgactttgaatgaagtaagtggacctgaatgttctcaagctcaaaagaatttactgattgatggtcttgatttccacccatgcaccccccctcatttcattgtctttatgggcaacaaactttgcttgtagataatatacttcaatattctgtgatataatttattgatgacatgtaaaagtattcttaattgaatggcaatgatcactcactgngatcagcatgactccgcatctacatggctacataatttatatacgttttgcatttgtaagcatgaagt

SEQ ID NO: 187216 - DNA, 427 bp, Glycine max
  unsure (1)..(427): unsure at all n locations
agctntgcggtattggtcttcgccggggttaatgnctattcagatctgaaaagaggcaaatttaatcatcctgcttggacgaatgagaaaactggggcaaatgaagagggtgagaatgatggagaaacccatgctgtgactgccattcctatacggccaagtttcccaccaacccaaaaatgtcattacttagctaataacaacccttctccttacctaccacccagttattcacaaaggccatccctaaatcaaccacaaaacccaccttgcacacaaccaatgctaaacaccacctttagcatgaaccaaaacaccaaccaaggaaggaattttgcagcagatagtctgtagaatgcaccccaattctggtgtcctatgctaacttgccccattatctacttgatactgcaatggtatgcataac

SEQ ID NO: 187217 - DNA, 410 bp, Glycine max
  unsure (1)..(410): unsure at all n locations
agcttcaagtgtatgagacagactgtgtttgttgtatacccaagacgagtgaagtagngcatgtggataatacaagaacaatcttcctttctgactgtagagacaaagaaggtcgaattgaaattgggatagcacttcacaagactcaaacgaatagatttattaccatttaggaagagcacctaacaaaaattgcagttcttgactgagaatctccattcatatgcacatgttcattaatcttcttcaatagtcatgttattgtcctctatggagcaaggctattggacgaccatgttatggtatattagactaggatcacagacaccaagcctcgcgtataatgacttcgtgacaatgtcacagatataantagtctgatggtagaactatacaaaaatgttatgctg

SEQ ID NO: 187218 - DNA, 425 bp, Glycine max
  unsure (1)..(425): unsure at all n locations
agcttcaattgacttttctttgtagagttattatnttaggtcattggcactaaagaatttacggtgccagaggcacaaataccatatttctatactctaaatctctaattcaggttacgagtgtttgacaaattaaagagttcttgaaataattttaaaactattgatataaaaaaatatttattgtggaactaaatttgctagtaaattcacatgaaattttatcctaattttcctaccacattattataatattaataaattttacctacaaatacatgtccacaagaaaatcgtaggtatttcctggaaattatatatccctataaaatccgcaagtatttcctattgattntcttcaaataaaaattagtaggaatttcttgtggattatttctcacaaattaattcaaaagaaattatca

SEQ ID NO: 187219 - DNA, 435 bp, Glycine max
  unsure (1)..(435): unsure at all n locations
agctntacagaccagatgagctcccactcagttatattaccctaatgggtctctattcaaactcacaacgcggagatgatcagatgtacctggtggagcttaagcacttggccaaccggattgtgggtttgccgccacagttcctcttgagctgttatgtctcaggactctaggccgacatccgctgtgaggttcaagctttgcagcccctcaccttggtccaagcagcggagttggcccgtctccaggaggagaaatagtttgacggtcgtcggccaccacgccctcgatcatctatcttttcttcaccaacacctcccgcgccctcggtggctgtggcactttcttcggtgccgctagcgtcaccttcgattccgtctcggctcgcagatctcatcaagcgcctatctccggatgagctgacattgtggtgcg

SEQ ID NO: 187220 - DNA, 184 bp, Glycine max
actgtgtggtcgattacaccatttggttatagaaagccgtcggagaaattataatgcatctatcagcattgcattctacctgcatagaccattaagtctagtaagcatggtttctcctcctagaaacataactctgacttgaaaacctggaaacatgttctatatatcagaattgatgaattca

SEQ ID NO: 187221 - DNA, 279 bp, Glycine max
tcatatatcaaatgtgaagagccactacactttagaaaacatctgtgtgatcgattacaccatttcggaatagattaccattgatgaattttctaaaataactcccaacagcacatcttttcaatgattttgaatggcatcaaggcctattaatatagtgacttgggacccaatttctggcaaagtttcttactgaatgcttatctctaaaaagatacttggctatacttcatatcaatacgatttgactattttatgaatacctcttaaaaggaactc

SEQ ID NO: 187222 - DNA, 389 bp, Glycine max
  unsure (1)..(389): unsure at all n locations
actaggcgtgaaacccanaacagaaaccaatatctgatgtactgccatatatccattatccacaaaaaaaaagctcactctatcatgccaatgccccccacaattgagaaggacccaaaagataaactatttttttaaaagaaccaattacttgcagtgaatgtcatgaaaatattttgaacccaatttcaaattcaaataagaggcacataatgccatagcacgccgaagaacacataatttacactagataaccgaatagtgcattgggtagagacaactaatttcatatcccacatacagtagacaatgcaatgaatgcatcaacaattatttacgagcatatggaggtatgaacaaacatcaaactcatagagaatcattattga

SEQ ID NO: 187223 - DNA, 200 bp, Glycine max
aacactttagaacacaactgtgtggtcgattacaccatcttggttatagagagccgtcggagaaaagataatgcaactatgagcattgcattctacctgcatggaccattaagtctagtaagatggtttctcctcctagaaacataactctgacttgaaaacctggaaacatgttctatatatcagaattgatgaattca

SEQ ID NO: 187224 - DNA, 455 bp, Glycine max
  unsure (1)..(455): unsure at all n locations
aaactcaactgcactgccattgtgctgaaattagtgagatcattattgttgctctactttttttgaataaacagaaaatagacctttggcatttatgcctacgacatccctcacatgatagattagttgtcataaaacaatcgtttcttaatattttcagtaataaatcttttgtttgtgacacttgccactatgccaagcaaaagaaattaccatttctgaacagcacttccctttcccctaaaccttgttctttaattcatgtagacatatggggcccttctcacattctatgaatgaccacacatattttttgacaattattgatgatcattctacatatgtatggtttatattaatgagcacaaaaagttgaacacaacaacacctcagatattattacacttatcgangagcagtttgacacaaacattatagcaattcaaagtgataat

SEQ ID NO: 187225 - DNA, 447 bp, Glycine max
  unsure (1)..(447): unsure at all n locations
cattacggacctattaaactcagcttccacacatccaagcggagtaacatgcgttcatcatgaactatcacaaccaacgaaaacagggcagaggcataaaactctgcccaacacataccaatatcacaacttttctcacttaaagaccccagtgacatttccttcattccaaatcgctcaccggtggatcgactcgaaaattttactggaagtccctagtgaataagtctacattctgaccgctgggatctgctagaaaatgttcagaaccccatatgtactactctttccacaaccagcaaatacacaacattttctgcacaaagccaaaattctgctgcacatatttgacagccaaattctgcataaagtgcagattatcgaaaccacacttgccctcatccaattnttgcccaaattgaatcctacacgtcgtgaatcatgtct

SEQ ID NO: 187226 - DNA, 395 bp, Glycine max
tcataattgggtgatgtgccctacatgtcgacagcatacttattgtgtaaacattgcttatgctggtgatgcacagcatgaatcttccgatccttcactgctgcatccaattgacagcagtgaaacatttgaagcatccattagtgttaaagggttcatatgtgaaccaaacgcttctattctatacaacaacttaaattctattgataccctcaagataaatgagcatacttcttttctacatgttctcctgccactaccctgggatacactattttgtcttaattctgaactggcattggtttttacttaattttatactgccttacttggagattttacttgttattcaatggataaacctcgtatggtgtctgagaactattcaatgtttg

SEQ ID NO: 187227 - DNA, 341 bp, Glycine max
ctacttgatacttagctatgcttttgtcacacaacaaataatagggagggaacgaaatattggagagtggtatgacgctatgaatgtgaaatttgagtcactggcaaatgaatatataaagcggttggctttgctgttttgttaaagattcaaatgtatgcttgtgctttactgctctaattctttgaaataaatgctacagaccacaatgagcttgacgtgacatactatgtgtcgaaaacaaggtttaagaacatatacgcactaatcattaattaagagactaactcacttgcctcttctagtgacatctttcttttcgcccactatatattattaac

SEQ ID NO: 187228 - DNA, 409 bp, Glycine max
  unsure (1)..(409): unsure at all n locations
gtgagcanatattgtcctanatctttttcaagctcagaactttggacttggccttcaattagagagggatccatcaagctaatagctcccaaaaccagttcccaaaccagcaatggactcattacgaggctcaacacatatcatagcagttgggagttcccccatactgttgatatggaaatagaagattatttatgtggttatctatgaacngcgtgtaaacctcattggagtctatacacccggttctccaacaactttgaaaaataatacatttgtgctcataaaaatgacatataaatctggtcactgtaacactaaaaatattcttgctgacctcacgcttactctgggacatatcatatggcctataaattaccttataattgatacaatgaataaaaattgc

SEQ ID NO: 187229 - DNA, 449 bp, Glycine max
cacggcatttcttctcttcttttttttgcgattctgttggcactggcaccgcatggacgtaattctcatcaatcgattgttgtggtggacaatctgtggatggtatatctatgttcggcggtgtttctggttgaggaagttgatttaagactaacatttcacttgcagcagttatggtcatgtgcattataattaaggtggatgccaagtcttataacaagataatagaactggggaaacctgttggtgatattgctgcttctgttgtgagtaacaaaagataaacgatggcgtaagtttggtatagcaagtgcatgtgcgttgtggccttgctaagttgcaatatttataagagactcctagattctaggacttacttggaaatggcatcaacgagtttacaattcaaagaaagaccgcctaagtgccattcaaatcttagtcaacta

SEQ ID NO: 187230 - DNA, 366 bp, Glycine max
ctttattctctattagaaaatatgagaactgttatattgttttctacaaagactatatgtctttaatatacatgaggacatttaaaatgcccattttcatccatattgtgaaatatgatctatagctaatactctgtaagactctgataaagaaaggacattcagtatgctgatttaacatattgcaaacttcaaattgttaactggtgtatgactatatctaactccaatcatacatgtcatctatatatgtatcaccacagtaaaattaaaataaattcaagtccattggatggaaacttaaataagtcgagagttatcataagcccaagctccatccttgagcatgatttacatggaaatctt

SEQ ID NO: 187231 - DNA, 430 bp, Glycine max
  unsure (1)..(430): unsure at all n locations
ttgacttggcttgactcatttncacccctaatcatatcttatttctcttattctatctcatctcctatcaatcaagagggatgggtgggattgacataataaaaagaaggatgggtggagtccctcattgttaagttgtaacgttgtactgcatgctcacacacgacttagattaagttcttagacacaatttcaaattttgcacccaattgaaatcaggctggtttctttattcgttcccttgtctcaatttatgcatatgggagaaaagtcctccgcatggttgcagggtccaggacattaaaattaagatagaatgagtttctgttgagatcgatcggtcacagatcctaatattggaattggatgaaatgtganaagagaagataaatgtaaaatttgatagaagatgaatgaaatcaactatttt

SEQ ID NO: 187232 - DNA, 445 bp, Glycine max
ttgtgaaggaaccactcttttctaaagtgctcctatacctatatcttgggtaaatgatacttttcctttcctttgtttgcatacttcgtatacccttatattttcttctcaatttgggccttgactttcccatgcaacttcttgatatattctactttaacttgcccagacttatctttaaattgagaaatgttaggtaaaggcaacaaatccaaaggagtcaaaggattaaaaccgtatacaatttcaaagggtgacatctgagtagtactatgtacaaccctattataagcaaattcaacatgtggtagacactattcccaagtctaagaattttgttaataatgactctaagaggagtagaaagagttctattaatcacctccagtttcccattggtgtgggatgacatacttataacaaaaattagtttcgatcttaccct

SEQ ID NO: 187233 - DNA, 457 bp, Glycine max
  unsure (1)..(457): unsure at all n locations
tccaaaatatcagaaaataatgacactgattatcagctatatgctataaataatgatcaataagatgaaaacacatccatgtaacaattattcaaattacaaaaacaattgggtcgggggtgggggtatctcgatgaatggaagcctcaatataaagactacaatcaaacaaaagtaaaacaaaactatttacaaattattgctacttgttcattcattttcatcattcctctttcaaaacaaatccgtgccaattgcagaaagaacataatacctcatacagggcttcgaggctnttgaccaccaggacggngaataaacaagacagctatgagtccactggcaatggctgcaacagctgccacaccaaatgctggagagtntcctccaccaaatagctgataccatggtccacttnccagggaaaccaccatctatttcanacattggtatacat

SEQ ID NO: 187234 - DNA, 272 bp, Glycine max
taactactgtgcatttagggtaactttttctttattaacaatctataataaatttacattatgtagctaaaaatattatatgatccttaaaaaatgtttaaatgatgtaaaaacaggattaaatattcaatttttctttccaagcaacaaaggtatcttgtacttatagataaacattcatggaaaataagaatattagttttattatgtaatattctacagagctacggtatttgaactttctgacaactataataaaattctgtatctaa

SEQ ID NO: 187235 - DNA, 374 bp, Glycine max
  unsure (1)..(374): unsure at all n locations
tggactgtgctagagagaagaacacatgatctaagngatatttgtagccatttctacggcaaaaatgggtgtggaggagtcaaattttgattcggtggaattttatgtgtaaattcagtttgagcaagtttagattgatgttaccgacttgtgtgaggtgagagtttgcttcaaatttacctcattctaaatttcacttttcaaacctagaaaacccattgaattgaggggttttggacacctagattctgtgttgctgtgtattgaagcttgattttgggttagacatgattgatacatgatttgcgacttgtacgaattgatttgggcaagattggatgagaggaagtgtgtatttcgaaatctgcactttg

SEQ ID NO: 187236 - DNA, 278 bp, Glycine max
  unsure (1)..(278): unsure at all n locations
tatctaattccttaattgaatgatatttgtacatacatataacatacaactttgtcacaggtgcttactcatactggactttggaactccatgacctatatgctacactttcaggcgagacttttaacatttntttcctgattattttcagctgagataagcaagttttcactataatatggggatgacttgtcaatatattaagcatgttttatcataattctgtatcaattatcgatcttcactgggttaagcatatgaacctacgaatactttta

SEQ ID NO: 187237 - DNA, 415 bp, Glycine max
  unsure (1)..(415): unsure at all n locations
tccttgagaagattcctaaagaagctagagcttagctactttcaccttcctaataactaagcttacctccttgagatgagaagctaaagcttacaaaaaaagtccctacaacaaagactactcacaatgccctgaaatacaaggcttaaatcctatactactagaatggccaaaacacaaggcccaaaagaaggagaaacctattctgatatttacaaaaaagagtggatccaaccttgacccatgggctcanaaatctaccttaaggttcatgagaaccctagggcattctttagtagctctagcccaatcctcttggagtcttctatccaatacccttggngggtaggattgcatcacaatcctcatctcctcctttctcggattgagtatttaattgctaaaatcaacatcc

SEQ ID NO: 187238 - DNA, 313 bp, Glycine max
atagatccattactacatagcaacgggaataattataattctggtcattacgcactacattatgatgttcgaagaggtccacacagtgttgggtctcatgtacgccaagctgctgcatatgtatgtcgggcgcttggacgtgcattttatcatacacatatgaggagcctcttaaaagaagttgcccgacacctcctaacagtggcatgctatgaccgtgagggccttatatcttttatggccttctcatgacatgattggtttagactattcacttcatgtgtaaagaatcgcttactaacctgtgatactt

SEQ ID NO: 187239 - DNA, 434 bp, Glycine max
  unsure (1)..(434): unsure at all n locations
aaaatgtatctgtgttggtgttagtgatcagtcaaattcatataaattgtattatcctaccactaaaagatcattattagtcgtgatgttgtttcttatgaagaaagattttgggaaaataacatatatgaaacaaagtaaattcttgcaaactttgatgaagataatgaagatgaagagttgcagacaagggagctagaagaacaacaaattccaacaatcacaattgaagatgaaagacctcaacgagcaagaagaacgcctgcatggatgtttgattatggcgtaacagaaattgagaatccgattactcattttgctttgtttntagattgtgaccctacaacctttgaaagtgttgtcaaagaagaaaaatggaggaaaatgatggatgatgaaattgactcattgaaagacatgatcttgcgagttgt

SEQ ID NO: 187240 - DNA, 385 bp, Glycine max
tcacctatgcttctccatattttgtgaatcttttgcgaaatgaacgagagcccctctccataggagtcttccttagaaccatcattatatgaatcctcaactttaagagacttggacaaacttctcgagacttattctctagacgatgatgccttcttgttcttctgactgctaagagcctaagactttttgcttttacgtccttcgtcttggtgaagttcttgctcatgaaccttgagggtaccaacaaattcctcaacaagattctttaagggtcttagcgcaattacttgcggtcttcactttctaaacaaacttctcagacatgtatcaatataatcatacttatcataagttctgcttaaagatcttggttcattgagaa

SEQ ID NO: 187241 - DNA, 279 bp, Glycine max
ggaataactaatgactttatttgagtgaacgagtgtaatgacgtttatatttggtgaactgactaacgcattggaagtcactcattatacaattgggtcttaacgacaattgtgaccacgtaatatatatttttattctaacaagctacattaattatttgttttattcattatgatctaaaggtatgttattttatgtcgaatatattagaggatgcctcaccactgtccgatattcgcttggaagaaattcgcgttcagtgggctaatatcttttta

SEQ ID NO: 187242 - DNA, 339 bp, Glycine max
  unsure (1)..(339): unsure at all n locations
cctaaatagttcgattgaacacctgtacgacaagacacgatctgtggattcaagtataatgaccatatttcattcacttcttcttcattgtccggatcgacagcangaaaatcgtcagtgaaccaggccgggccgacctctctactaatgaatggagcatgttggggaagaaacttgtcacaactcagaaaaatcttcatgtacttgaggaacagctttatggggttatgatcgaaggtcttgggtgttaatcgaagtgctctctggccttcgatcgagcgattggcactacttcagcataatcttgtgggataataaatccatctcttgttcgaaaat

SEQ ID NO: 187243 - DNA, 398 bp, Glycine max
tgtgtagccgatcatcttgtatagtagaacactggttatgtgtctactatcattgtcatcattttttctacgctatttgagggtcacttgagctgttatgtctcttccacctttgggcgtattcttttcgacaaatcactgcccaccttttgctcatgatcttgacgtcgcatctatcccaacacattattctgacactgtctaacaaatgcaacccctatgtaccttcaagaaaggactcgggaaagtccaagctagtgtaccaggtaacaactaacccactaagaacttcttgcgagcaatgtataagcaatatctcatcttttgagtactgccgccatctacgactatacacttttagatggatctggtgcgagttaatccttgacttgtcaaat

SEQ ID NO: 187244 - DNA, 381 bp, Glycine max
acaatcttctcaatctgaattgcaaaaaaaaggatgtgattgaaagttgatacaaatttgcaacatacaagattcccaacaaaatacctcataaacacaggttgataaccgttatggttcattctactcagataatcacattcattcatataaatatattcagaatcaaaattgggcattaaaagctatggaaaggttcaaccttcattcagaattgcagaactaagcattcaactaagaaaacagaaaacctgattatccaacattcgtgagaaatccttgagtacatgtccgcgatctatcgttcaagttgaatttgttggcatactgcttactcgttcttatgagtttgagttatgtaatattatacaaaatgaaaaa

SEQ ID NO: 187245 - DNA, 437 bp, Glycine max
  unsure (1)..(437): unsure at all n locations
tattggtaaagaaataagtntgtatcttgccagagtatatttttatgtgtgataaatgagtccatttgcaaactcataatcactttacgattgagatgaacgattgcgcacctggaatatttaattgatttaattcagctttttgtaacttttcaggtttgtaactacgttctatttgacatatatggacaactaaaccaatcgcgatgcgaagatagtgcgtacatactcattctttgcaagggaaatattacagtcaactaaaagtttacaactcctccccaaggcagttgcacccattcttttgtcatcaattcaatagccaaattgtttgaagtaaaataagacaaggcgtggctgaagattttcccagatgtcacttgtctaaatgggcacaagtatcatatgaactgtatgatcccatgtntgaaaaatta

SEQ ID NO: 187246 - DNA, 407 bp, Glycine max
acatataaacctcctcctctaaacacattaacaaggtgttttcacatcatttgttgcaactcaaggcccaaatgagcaactaatgccacgataataccacagagaatctttcttagatacaagagaaaaggtctttgtgtaagctgaatcattctattttagtaaatcccttaacaatgagtcttgtcttgtatctctcactattgcccaatgaatcttttttggtcttaaagacccatttacagtcaatggcctttgccccattacgcaactctacatggtttcaaacatccgtactatgcatagagatcatctcatccttcatggcatcataccataggatttgacttattaaaactcatggctcgatcaaaacgtttcgattcatttcagctccaatatatact

SEQ ID NO: 187247 - DNA, 457 bp, Glycine max
  unsure (1)..(457): unsure at all n locations
tttgtgtantcgattacaaggatttggtgatcgattaccagtgacaagttttgaacaaagatcaaaagatgtaactcttccaatggttttcaggtttttctaaggttataactcttccaatggntttcttgaccagacttgaagagtctataaaagcaataccttgatttgcatttaaaaaaaacttacaactcttacaatccttacaaacaacttatccacatattcttttacaaactttgaatctcttggaacatcttcttgaacttcttcttcttcttcttcctttgcaaaagctttctaaagttttctggttttccaaaccttgaaaacagaagtgtgctatatactttattctcttctccctttgccaaaatgaattctccaacgactaacccgctgaatatttatgtgtctctcttctcctttatccaaagaacaaggactaaccgctgat

SEQ ID NO: 187248 - DNA, 459 bp, Glycine max
  unsure (1)..(459): unsure at all n locations
ntagtatgttgtgtctggtgtaatgaatatgacgattgaatcattgtggcgtttaaaccctaaattgagtcaccattgtttcttctaccgtcgtagcaatcttaactctcctttcgcacctcctcgcattttctctcttcatcccaccaccacttcctttctcgcattcgcagcttcgaataaagtagaaggaggaatcgaacttgaaaacaacaatgataaccgcaccggagccgaagaagaatcatgatagcaagctctgggcacgtttcgagaacaagcctcgaagattcgagaagcttctcaagaagcgctgagagtggtgttgaagaatgccacagaagagttgaggtgggcggcaatgatatcggcgatgaaggcaaacaatatctcacagtaattgtcgagaattcgcctgatgtcaaggaagtcgttcaaacattcgtctcttccaatcgc

SEQ ID NO: 187249 - DNA, 421 bp, Glycine max
tgctggaactacttcactggacttgatggggcctatgcaagtttaaagctcttgaggaaagaggtatgcctatgtggttgtggatgatttctccagatttacctgggtcaactttatcagagagaaatcagacacctctgaagtatttaaggagttgagtctaagacttcctagagaataagactgtgtgatcaagagaatcacgagtgaccatggcatagagtttgagaacagacacgttactgaatactgcacatctgaaggcatcactcatgagttctctgcagtcattacaccacaacaagatggcatatttgaaaggaaaaacaggactttgccagatgctgctatggtcatgcttcatgccaaagatctaccctataatctctgggcttgagccatgaacacagcaagctacatt

SEQ ID NO: 187250 - DNA, 398 bp, Glycine max
  unsure (1)..(398): unsure at all n locations
tcaaaataatcttggaagtcattgctttcacaatctccctcttttttatgatgacaatcctgaaatcaagaggatacatacaagtattggtctaccattcactcatctctttctccccctttctttntgaatttatgcttaatttaaagctttgaaaatataatatcttgatttctaaaatatccatttttctctcccctttggcaacatcaaaaaggccaaagtgcgtaaaacatgaataatttaaaacatacacaaaacataatttgtgaaacacacataaatgattctaaaatatacataaagcataatctgaataataccaaattgaatatataccactcagtcatatatcatcaaaataaccaagttctagaataaaacataaacatctaagc

SEQ ID NO: 187251 - DNA, 351 bp, Glycine max
catgaactatcctaaaccaagagaagagggcagatgctaaaaactctgcccaaaacacattcacatataacagctttccttactccaataccccagagatattctgttaggatccatgagaagctcgaggtgtgctacacacacctctctcagagcgtaaggcacctccttaagatgagaagctagagcttagctactcaccacctataatagataagctcacgccatggacaaaaacatgaagatacgcacaaagatctctctgccatgacgaaaaattatgctgcgcaatacaacggcaatactctgcataatagggcagagttcgaaattcatcttgcccacatgcta

SEQ ID NO: 187252 - DNA, 404 bp, Glycine max
  unsure (1)..(404): unsure at all n locations
actccgcttgggttaattttttggcagatgatctanctggcttgacagacgcaatcttatcctcctactttgatgagtgagaaacgtgcggcgaatgaagagggtgagaatgaatgagaaacccatgctgcaactgtcattcctacatggtcaagcttnccacccgcctaacaatggcattactcaaccaatattagctcttgttattgcccattacccagtcatccaccaaggccattcctaaatgaatcacaaagcctgtctatcgcacgcctaatgcccaaacaccaccttttgcgaaaaccaaaaaggaagtttgcagcaaaatgtctgagggattcaccccaaaattccgtgtcatatgctaactcggtcccatatctacttgatattgcaacggtagc

SEQ ID NO: 187253 - DNA, 419 bp, Glycine max
  unsure (1)..(419): unsure at all n locations
ccgcttataaagataaattgggtgcttagatgatactacttttatctctacaaaggagattcatacggagaatgtataatcttcatttgtggaattacatagtttccaaaacaggcatggtcaagctagatggtgaaaaataaaactaaagtgtagttgttacttttgacaaatgaaaaggcttgctgaaatgtatgtacagaccacgagccacgagggtctcaaatagtttcttcaacagttagattgatctatgaagtaacaagcatggttgcacattatttcttcatggacggaaagaagggaggtttccttttatgaagaccaacgagagaatctacatcacgaggaatgatttgtgcatataagcacatatgcatggtctgatgaacatatcactaccatgatatgtncatatg

SEQ ID NO: 187254 - DNA, 421 bp, Glycine max
  unsure (1)..(421): unsure at all n locations
tntaccttctcctccaagcacttccttagtatcccaaccttcccatttctattttgcttcaactagtctagctcctgttccgcgatcttgaccactttggctattctttccatagaaggatagaacccagaaaaaaggtatggcttccttcctcctagcaggcatcataagatccattcgaactcttctatggtcagagccaactaaaaatctctgaaagtgaagcatctgagcgactggtcgtagtattgagcgagggatacaatggcttcaacaaacacttctaccatggccaaatcccagattttcccatacgccttgctgaaggcttgacgtcgaacttgatccatccattgtcctagttctcacaagctagctagttctaggttcttgacgttgacatgatagaacctctttttaa

SEQ ID NO: 187255 - DNA, 371 bp, Glycine max
  unsure (1)..(371): unsure at all n locations
tgaaggtgtgttacccaccattntccatagtaaaatactggtaatgtgtctactattattgacatcattattttctccgtcattgaggtgccacttgagctgccaggtctctccacctttgggcgtattcttttgaaggattgtgccccctttttgcacatgttttgtagttgcatcctatctgaagccattatactgacactgcctaacgaaggcaaccattangtccttccaagaatggactcgggaaggttccaagtgagtgtaccaagtaacagctaccccagtaagactntcttggaggaatgttcagcaattctcatctttncatatgccccaatctttgataatacatttagatggtctcgggc

SEQ ID NO: 187256 - DNA, 347 bp, Glycine max
  unsure (1)..(347): unsure at all n locations
ataatgtgtctaccattacgatcatcgtgtccctttccatcattgggggtaccaactgggccggcagatacctccaccttttgggcgggttctatgaaagatacgtcccactttttgccaatgatctgtatcgcatcctatcctgaaccatatcaaaatatgactgatactgcctaacaaggcaaacattagtgtcttctcaagaatggacttcgggaagaatccaagttagcgtaccaagtaacagctaccccagttagacttatttggaaggaatgtattaacaaatcctcatatnttgcgaattccccatattctgacaatactacttaaatggttcttgggaa

SEQ ID NO: 187257 - DNA, 424 bp, Glycine max
  unsure (1)..(424): unsure at all n locations
ctgatcttggatangactccattagtgaatctatattaaaagttacgagaagagcaactttaaatcacaaagtctcctctctagctttttcatcaaggaaaaatcaatttgtggggtaagggaagctaaactatgattgattctatgatttgtatgatccttgaatgtcaaatgcttcctttttacctttcttccttttccctttcttgattttgcttcattgtggttgttttacggattgaaatcttaaacccccaatatttgggaatttcttttatataaattcacatgattcgcgaattatttaatgttggtttggtgtttagaaaatgtatggatcatttacattcatttgaatagcttgngtaacaattaatggtgtcaaaatcttggatttgtggagaaatattcatgcagatttttc

SEQ ID NO: 187258 - DNA, 351 bp, Glycine max
tggaatctgtgtgctagatggtgctaatcttttctcttattaaaactaattcctttcttcttcttggctttagttaacacacctttgtttggtcttaaccttctcatgcaatttctttacaaactctgacctagaattaccttctttttgtataaaagaagtgttaagtgggagggtcatgaagtcttatggagttatgggattgaacccatatagaacctccaaatgggattgcttgggggttttatgaacccctatgttgacgtaattctaatgaggaagatactctcccaagacttatggtgctttcaaagacccttaaagggcggtaaaaaccatcactcctctgtt

SEQ ID NO: 187259 - DNA, 317 bp, Glycine max
tctatggaaatctatctctctggggaaaccacattatccttaggacacttctgaaactctctgcaatgggaggtcaccatggaaaccttgtctctacttccaataaacagatctgtcacttgagcatcttttttaaatgtcacaacttggtggagagataaatcctatcttcttactccatatctcagacccatatttttgaaacgttacagacaggtggagaaacaatcataccagatacataattggtcaaggaacaatcgatcatcagaagttctccaaagtctccgacatcaacccattatgtacacaaacct

SEQ ID NO: 187260 - DNA, 239 bp, Glycine max
aggtgtataacaatatcaactacttatcaccccattggaaaaaccatatccgcctctacctggaatattttgctaatctttagagacacaaccagggatttttagttgactgtaactgtctgacggcgagtagtaccttaaatgcctccaatagttttctagtctaatcattgtatcatgacaaatttattctctcttactgtctttctacacattgtatatgttcagatgaaatgaaa

SEQ ID NO: 187261 - DNA, 306 bp, Glycine max
gaaactggtgatggcctactatcattgtatcatttgatatccgcaatgatggccacttgagctgcaggactctcacctttgggcgtattcttttgaagattcgtgcccctttttgccatgatctgatgtgctttctatccgaagacataatacttgacctgctaacgaaggaaccactatgcctttcaataacggactcgggaaggatccaagttgcgtactagtaacagttaccccagaacgatttcttggaggaatgtatcagcaattctcatcttatgatatgctccatctttcgatatacat

SEQ ID NO: 187262 - DNA, 354 bp, Glycine max
gtgcgtagcccaccatcttttctagtacagtatttattatgcgtctaccatcacgattatcgcctccctttacatcattgagggtaccacttgggccgccagatccctccaccttttgggcgtgttttttgaaagatccgttcccctttttgcaaatgatctgtagttgcatcctattctgaaccatatcacaattgtactaatactgcctaacaaaggcaaccattaggtccttccaagaatggactcgggaagggttcaagttagtgtaccaagtaacagctaccccagtaagactttcatggtaggaatgtatcaaccattcctcatcttttgcgtattcctccatcttct

SEQ ID NO: 187263 - DNA, 419 bp, Glycine max
gttttgccaactctcttatcatacaaaagcatgctgatatcttactctagccatcacaaataagttgaaacctatatatatgaaatgatgctcaaaagataatgactaagaaaacaaagaaaaagagctgggttgcctcctagtaagcgcctttttaacatcacaagcttaacgcattttacctctaagggtcttgtaattgcataatggtggtcagtctctcgatgttctcaccatggtatagctttaatctctgaccatctactattcatgttctgtgcggagtttctgactgagggtcaagtaattccacaactccatatggcttgacttccttcatggtgaatggtccagactatatagacctttatatgctttgaaacgactttaatcttgagttgaacagcagcacttgttgt

SEQ ID NO: 187264 - DNA, 386 bp, Glycine max
  unsure (1)..(386): unsure at all n locations
tctttaatggagagggttaccactactggaaaacccgaatgcaaatttttattgaggcaatagatctaacatattgggaagccatagaaatagggccttatatacccaccacagtagaaagagtttcaatagatggtagttcatcaagtgaaagcataactatagaaaaacctatagatagatggtctgaagaggatagaaaacgagtacaatacaacttaaaagccaataacataataacatctgccctgtgaatggatgaatatttcacggtttcaaattgtaagagtgctaatgaaatgtgggacactcttcgattaacacatgaaggaactacagatgttaaaagatctangataaatgcactaactcatgagtatgaatta

SEQ ID NO: 187265 - DNA, 347 bp, Glycine max
  unsure (1)..(347): unsure at all n locations
tgtgctangcaaagatcagcactggattatttttctcatatttatatannaatgcttagctaatgatggacatatgttcaatatttctgagctactaatctttacctgcgtactatctatttaaaatgaattctatactacgatgcgacaatcatacaatagatatagattaggtgagaaaaaaaaaatgaaaaaacaaggatgcataagaggaaaagattgacaatattgatatttgttataaactatttcattgctattcgaatataaaataaaataaaaggtttttgctttattctaatgttgaataaggaagaagaaacatgggtggctgggagagtgaaaat

SEQ ID NO: 187266 - DNA, 420 bp, Glycine max
  unsure (1)..(420): unsure at all n locations
aataatacattactaaatatgttgtttctttaagtgaacaatactaaatcaaggtaggtaataacaatatcattttcctttttaagtatttaacattgtatactcaaaacttaaatttaaaaaaatattgattaagttaaaatagttttgtgctagttaattcatgcccctcaagaacttaattcaatttgacaagtatattttcactcaatgaggttatctatcttggtttcaaatccaataaatcacaatataattgtactattaatttactttttaatgtttgtgacttatgatgatgaatttcacggcgggcagaatatgatgtgccgtgggctctgatccgatccataccgaatgatcttggtctatattacatatcaacctaangtcttcctctttcatactatatatcaatgt

SEQ ID NO: 187267 - DNA, 412 bp, Glycine max
  unsure (1)..(412): unsure at all n locations
ctcttgttctatgggaattctccccctaacgaattgttagagaggtctacataactcagtgaagttccattacagaaaagtgatgggggaatctctccctcaagatgattgcttcccaagttaaggtagtacaagttgtgaagtgaaccaaactcggatggaatgtgcccttgaagaaaattcccagacaaactgagttgtccaagctgaaccaaatagcctagttcctttggaatgtgacccacaaaatagttgccagaaaggtcaagaatttgcaaggaagatatgttagcaagagcaggggaaatggtgcctcctagtgaccctccactgagatcaagctcaattatcatgtcacttgcattgntgcatcttacacctgaccaatcacaaacatgaacaccccgtgact

SEQ ID NO: 187268 - DNA, 430 bp, Glycine max
  unsure (1)..(430): unsure at all n locations
ttgtcagaagtctataccgctgatttaatgtaattagagcctatagatntcctttctcttttgttttctgaaatctacctcattaaataaacaaagagatcttgtttcatctgttcttgcagttccaccttttctcatatcattttgcatgtttttgattctttggtcttgtttggtatagatatgagggtcgattctttgaggatcctaacaacgagggtttgacaatcgattttgatagagatataagccaaacgatatacgaggaagaggaagaggacgtcctgtcaccagagttggagaggttggtcgctcatgaagaacgtgatatgaagccttaccaataagataccgcattggtaaacatggtgaccacggaggataagaaagaagtaaaggtatgaaccgatatgatcgcgcctatccgtca

SEQ ID NO: 187269 - DNA, 434 bp, Glycine max
ctcagcttcacttctgaactggaaggcaataatagatcttttggcagaacttgttcatacctcataaatacattttcttcatatgttttgaaatgaattacttttcttgctgtatgtaactctgatattaaatgttctcaaaatattttctctagtgaactagtttaagaatgattttcaataaattatcatgttaatctacatggaaaacttagtttttgacttgaatgtgttcttttctttctctgatcttcttgtagtatttgatcatttgatattagaaactgggttaggttgctactatctagtgatatatatgattgagacttggtattatgaaccacaaatttaatatttcatacttgaagtgttgagtataaatataatttataaatatttgctttctagctcgccaaatgagatggttatacata

SEQ ID NO: 187270 - DNA, 291 bp, Glycine max
gtgtgtatctaaaccccaacttttcaggtaagattctcaaaaaacttctaaggaacttttcttaagaaagcttctcaacgaagctacctactctcataaaagaagcatgtgtaacactctgtgtaactttgatgaatgaaagtcttatgagatacactttcaaattccacttctttccctcttttattccttcaatttcgtgctccccccttctctctttctttcctacattaagacatctcttaagcttcttatccatgcaattcttactggggaagctccttcttcctg

SEQ ID NO: 187271 - DNA, 340 bp, Glycine max
  unsure (1)..(340): unsure at all n locations
tttttaacctccacttaccactgaatccagatatagcctttcaactctcaaagcctcactctttgtccactcataacaccacaatctcactttctaaccctaaggtaactctacccttcatctctaacagatttccataagcaatttcagcacataaacatcacaagcatcatcatgaagaccctaaaacttgatgggtaagtttaactcacccaaacatggcaagctcaacatgtattcaacacatatcttcacaattaactatcatgaagcaaaaaccttacagaactacccatcatatatnccaaaaccgcatacccacgaaaatcaagtgagaaag

SEQ ID NO: 187272 - DNA, 400 bp, Glycine max
tggagcttctatggacgctggatctttgatctttattgaggaccttcaatggtgatttttcaccatggagaagcagcggaagacaaaggagaaaaggtgagaggaggcgccattcatttatgaataatccatggaaaaaagagcttctcaccaagatgagccttggataataagcttggaaggatgcttcaatggaggagaagaaagacggatagatagagagaggggggagcacgaaattgatatgaagaaaatcggagagaatgttgaacttctcgttgtgtctcacaagactctcattcatcgaagctaccacaagtgtcacacatgcttctatgtatagactaggtagcttccttgagaagttttcttgagataacttccctgagaagcttctttg

SEQ ID NO: 187273 - DNA, 381 bp, Glycine max
  unsure (1)..(381): unsure at all n locations
cgatcttcatcatcagtagtgacatcgtatattttcaagatctagaatcagtntattattcatatccaattgttctcctactgatctatcttcatgcattttaaacgaatacaaagactgttttacgtaaagatgatttactaaagatttggtcatgttcaaaccttcaagttttgaccaaaccccaccagcagttgtttccttagagacttacctcagcaccttgactccgagactgaggataattgcagagtgtgccttctacagtattgcttcctatccccatcagccatcatcttttcagtttggtttctcctcaagtgcttcaccacgccctgctgcacaaaagactctcatttcaatcccatatccaaatcattt

SEQ ID NO: 187274 - DNA, 342 bp, Glycine max
tcattatgctcagccatttcccaaatatggcgaaatttattcttaggcaaatccctatttctaagattaccaaggatttttcacagacaaattcctcaagagggtcacattggacattatggcaagcctaaagaatgtaagccaactttgtagagaatctctcatcactcataagggcccacacaaacttgtccattccaagggcactactatgacggaaatacaaccataatctcatgcaaaatcatgttattggaactgcactcaaaaacttggctatgtccttattcactcttttattccattctcagtcaaacgctcctatgaatggaaaatatgatg

SEQ ID NO: 187275 - DNA, 359 bp, Glycine max
  unsure (1)..(359): unsure at all n locations
taactcatccaaacatggcaagttcaacatgctttcaatttattgcttcacanataactatcatgaagcagaaaactagcaaaactacccatcatatcttccaaaaccccatacccacgaaaatcaagagagaaacaagtccacccaaacctgaagattcgaagtctcacacgtagacacgcacttcacgactccgaaaatgccctcctttcgcgatttggagcaaaaatgggcaccacaggttgaagctttgttggagctttaatggagaatggaggagaacgaacaagcaacgtgaggaagagggagagagagctttcgaaaatgtggggctgaatgaggaaagagagagatgcttt

SEQ ID NO: 187276 - DNA, 430 bp, Glycine max
  unsure (1)..(430): unsure at all n locations
tgagctactatgctgcccacatgctcacgaattttttagccatgctcttccttgcgagccctcttggtttcttgttcaagggcttttgcaataactgcattctcttctcgtaacccgacacactctttccggacgtctgtagcgactaacttgaatttttctttagcaagtctcgcttttcctagttcggttttcagagcccgaacttcttcatcttcttccggagcttcgaaattctcttcgctgataatctttaacttggtgagccaacctaaaccccgtgtacgaactttcagccattcatgataaccaccaatgatgccattacaaatgcccctaagttctntatctttccttaatgggctgtcccacgccttatggaccctctgtataaccttgaaatatgcgcgccaaatctctcacaagaaag

SEQ ID NO: 187277 - DNA, 351 bp, Glycine max
caaagctctgaggaaaatcacacgaacattacttttgactcagagtccaattggtccagtcgatattagacgctcgaaattgaaaacagatactctgagcaatttcaaatgactataacattttgttagtgtttaacactactgagcttgtaaaagattggctgcagacatttgttaacaacattaatccacttatgaccatagaagggaaagcctgtagatgctgcacatgatgttcatacgtatgtcaaggaataatatcgggctgcacaatgcgcactgcaagataaaatgtcacttgataaatgaaattgcacgatcacgattgtcgatacaatggcctgacattct

SEQ ID NO: 187278 - DNA, 379 bp, Glycine max
atgcacccatattgctgtctccttgtttttgccacaaaccatcaaacgaccttgatccattatccattgcaacaaaatctttggcactgggcatgcctctacgtcacgtgctgcccccgggtgtaccaagcagatgtttccctcacccccatcatagcaaatgatgtccgactcgcgcaacgccttctatttaaacctcctagagggtaccacaagtttcatttacttcgggccctaacggacacactcctccactgcattaaccactgtgcccctatgacttgcaagaggattaggcattacgtttgggccctcctcttggaacgtcagccatcccacattgatcaaactttggacattatgttgaggccacacactg

SEQ ID NO: 187279 - DNA, 189 bp, Glycine max
agcatatatagacatgcttaaggttttctaaatgctgccatagaacttgactggacatggaaataccttatgatgtttgattaaatagagctgaacaccttcaggatgatttggaagcgggaagaactgccatggatatgcaaaaatgcctttacatatctattgagtggacttaaccttaaaatgcct

SEQ ID NO: 187280 - DNA, 379 bp, Glycine max
tgtgacctaagcatttgtgccataatgctcctgagttggtattatcaattctatgcttagaaccatgcaattttacattaaaggattcaccacaggagactgcaatatcaagtaaatatggattatcattaacctagagtgaatcagttccacaatatctgaattaaaagacaatctgaacacattgtttccaaatgaacaccaataacccagtttgttcttataagacactgaaaccaaattccgtctaaatgacggtacaacaaaagtgtctctctaattcaaataaaaaccagtacatattaataatttaaagtgccctatagctgtcactctcactgatttaccatcttcaacatagatccatcttcataatcga

SEQ ID NO: 187281 - DNA, 269 bp, Glycine max
agaccttttgtacgatgggcattttgaattttgaataaaattaactgctgtatcacttacgcccatgctcgtatctattaccacagaggagttttgaaaaattatgcaacagtccaatttttattggatttcgaatgccatcaaggcattatataggtgcttggtctgaatttcttctagtgttactgttccaaagacatattcttcaaacaaaatgtctatcttaaaattcctcgctagaccttggttgttcatatgaaataacggtt

SEQ ID NO: 187282 - DNA, 436 bp, Glycine max
  unsure (1)..(436): unsure at all n locations
tgctctanatttacattgatgtttgtatttatgggacgtatgttgttgccattattgttttaagagtagtgtcccactggtaaaactaactttccaaatgtttgccttcgcacgaaatggccccgaggaagcttgcctcaaagaggtccaggaaggacaagacagccgaaggaactagttccgctccggagtatgacagtcaccgctttatgagcgctgtacaccagcagcgcttcgaggccatcaagggatggtcgtttctccgggagcgacgcgtccagctcatggacgacgagtatactgatntccaggaggaaatanggcgccgacggtgggcatcactggttactcccatggccaagattgatccacaaatagtccttgagttttatgccaatgctttggccaacagaggaaggcgtgcgtgacatgagat

SEQ ID NO: 187283 - DNA, 428 bp, Glycine max
  unsure (1)..(428): unsure at all n locations
nttacaatgcatccaatagatcttcacctatctaaaattatctacctctcttggaaacgtccatgcacaaatgcatgcgagagatcaagccatttnctattctcctggactgcacatctcaagggccatcaatgtcaagatcgttgctgacaaaatatgtccatgactacctatgtgggatgttgccaaanaagaaaggcttcaagttgtactacaatgaagagattccctcaaggcagatgaaggtggaagtagtcaactacccttgaaattggagttcactattcaatgggaagaaactgtttcgcactcctgatgcttatgatgccaagactttctagaatcagatcgtgtggatggacactctannagcctacacctctggttatgatggaagtgaaacattgtgcaccatgacgtcattcatg

SEQ ID NO: 187284 - DNA, 417 bp, Glycine max
cgttcctaatatctgtagcaatgcatcacctttctatgatcttgtgaagaagaatgtggcatttacctgtggtgaaaaaaaagagcagcctttgctttgctcaaagaaaagcttactaaggcacctgttctagctcttcctgacttttctaaaacttttgagctagaatgtgatgcctcttgagtaagagttggagctgttttgttacaaggtgggcaccctattgcttattttagtgaaaaacttcatggtgccacccttaactaccccacctatgataaagagctttatgccttaataagagcactccgaacttgggaacattaccttgtttccaaggaatttgtcattcatagtgatcatcaatcacttaaagtcattagagggcaaagaaagttaacacaggcatgcaaaatg

SEQ ID NO: 187285 - DNA, 337 bp, Glycine max
gaacactacgagaaacataaaatagtaactgattagaaatatcactctctctatcttgtatatcactccatctctcaagtgtatcactcttcctttttctattcctctgtgatgcctactattgactctctcttgttctctcttttctctccttctgaattggttatcacacacttctctaacggatagaggtttatgaataaatttctggtcatggcgctggaaagacatcttgttggtgaagccatcatgcattgctttggtgtcctctttcaatgtggccctcactagtgccatctacatctccttgttctcaacaagtcaacttccttgggat

SEQ ID NO: 187286 - DNA, 379 bp, Glycine max
  unsure (1)..(379): unsure at all n locations
gatgacttgcctaatgagtataatgtaagtgccactttcaatgtgtctgatctatctctctttgatgcagatggaggagccttggatttgatgacaaatccttttcaagaatgagggagtgatgaagacataaccaatggcaaggaccatgaagcacttgaaggtcccatgaccagaggcagacttaaacaagcccaacacgtcatagagacaaggctagtcatttgtatagctgccattgatgatgattgaaggcccaagtggagaaagatgaaggcccagaggcagaggcactaccaagactactaattgttgttgaaggcccanactaacttgaaggcccaagttaaataaggtcttagttataatttaatcttat

SEQ ID NO: 187287 - DNA, 379 bp, Glycine max
atatcctgctaagcccagaaaactcctaatctcaaaaatagatttaggacactcccactcaagaatgacttctatcttaaagggatctatcactatagccctttgagatatcacatgccctatgaaactaactttctctaaccaagactcacacatggacaacttagcataaagttgtcggcccctcaaggtatgtagcataatcctcaagtgttcttcatgttcctctctagtgttggagtataccaaaatatcatttctgaatactaccacaaaactatcaaggtaagggtgaaagactctattcatgtagtccataaacacactcggagcattagtcacaccacatggcatgactagatactcatagtgaccataa

SEQ ID NO: 187288 - DNA, 371 bp, Glycine max
ccctctaataactaagctcacctccttgagaagctctcttgagacactttcttgagaagcttacatgagaagattcctagagaagctagagcttagctacacacacctctctaatagcctaaggcaccctcttaagatgagaagctagagcttagctacacaccccctataatagctaagctcaccccatgacaaaatacatgaaaatcaaaaaaagtccctactacaaagactactcataatgccctggaatacaaggctaaaaccctatactactagaatggccaaaatacatggcccaaaagaaggaaaacatattcaatatttactagaaaagtggatccacctggcccatgggtcagaatctacct

SEQ ID NO: 187289 - DNA, 430 bp, Glycine max
cgaaggacatgcacaaagtgtgactatatgatgtggcaatttggtgtaataagcaaatgctcacctcccctctaaaatttaattggattgggcttctaccaattcaattaaatttatttccaaccatacacatcaaatattcacttattgcgtgtgaaattacaaaactacccctaatacaaaaactaatcttggtgccctaaaatacaaggactgaaaaatcccatatttctagggtaccctacctacattatggagccctaaatacaaggaccaaaattaatgaaaccttaatctaatatgtacaaagataagtgggctcatacttagcccttgggcccgaaatctatcctaaggctcatgagaaccctacggccttctcttgcatctttggcccaatcttcttggagtcttctatccaatgcccttg

SEQ ID NO: 187290 - DNA, 387 bp, Glycine max
acacaaatacgttgttccataatttcgaagatcacccttgactctagctgacccacaagtccatgacctatatgtggataccatcccacatattttcttacattgcaaaagaagtgaccacacttttattaatgaagtgtgccgtgagtcggactattctcacttctttaccatatataggcatgaacttcaacattctttctctatcatatttgcttactttctttgtcttcaaatatctgcttccaaccccataagcatgaactcaagtagcatataaaaaatcaaacacttatttcttctttatggcttaagttccaccttttccattagattttgggagaaattcaattgagcccaatattagtagtaccttgcacatgtcag

SEQ ID NO: 187291 - DNA, 387 bp, Glycine max
gggaagaataatagatcatctgtttcaagttggacttaaaatgcgttgaattcgtctttatagctttattagaatagagattcataaaataattggaattgctagaaaatcatttaactaaacatgttgaatatgataaatataatactaatgcaacaacaataaaaatagataagtccatataaaccaactatccttccagttccaagggaagggaaacatagtattcgagcatttggattggtctcatcgtaaggccaatgcgagaaaggagggaaacactatggggtaggcccaagctggagggaccacagtggtgagaacggtgatatactcactttccagagacaatacaagtggtggacttgtggaagaattattgtaaat

SEQ ID NO: 187292 - DNA, 432 bp, Glycine max
  unsure (1)..(432): unsure at all n locations
cgcctttggtacatagaagaagaagaagtacatagagattcaatgcttgtaaaggattgtaatgaaatgattggaaaagtattcaagattcttgaaatgcaaaacaaagccttgcttttatagactcttcatgtctggtcaagacaaccatttagaagagttataacttttagaaaaacataaaaccaatntgaaaaagtcaaaaaccttttgaagagttacaccttttgatttattcaaaaatagtcactggtaatcgattaccaaattagtgtaatcgattacacaaagcttttgtgtgaaaggatgtgactcttcacatttgaatttgaatttcaacattcaaaggcactggtaatcgattaccacaacattgtaatcgattacagctttttgaaaataattggaacgttgtaaattcaatttgaaaac

SEQ ID NO: 187293 - DNA, 396 bp, Glycine max
ctctcttcgtagcatttgaatggctggtatatcgaatgttacatcttagtctttatcatatcatgtgtgcatcatgcatcatcatgagtgagtgagaaaaaaatttctaaaggtagaataattcttctgagggcagaactctctattttaatcaattacaaccttatcgtaatctattacacaagttgttttaagcttgcagagttacgtcttgtatcgatttaatcgattaaaacttaatcgtaatcgattacacatccttttttgagacaatgattgatttattcatagtctatgctctaatcggataccgtgtgatataatcgaatacttctctttctataagtgtttcaaaagtaaacaataacactgtaatcaataagtttgagtatctaa

SEQ ID NO: 187294 - DNA, 385 bp, Glycine max
gtgacttttcgaagaatcttcataaacaagtcacttcgagaattgtgactcttggaaatgtattcttcgaaatcagtcattggtgatcaattaccattaaggtgtaatcgattacacatcaacagatgtgactcttcattttgaattttgtaaacttaaaacgtttataaaacactcggttattgattacaagtattgtggtatcaattacacaagtttgaaaatgtttgaacaccagttgtgacacttgaaatatgaattcttaacaatttttaacactcgtgatacattccacagagtagaactttctcgtatgatctgtgaaacttcttgtgctttcatcgtttggaaactttatatactttctcgatgagacttccttgat

SEQ ID NO: 187295 - DNA, 308 bp, Glycine max
ggtctgatagagtcaaaccgaaaatatgacacataatgaccttttgacaataatattgtctaaaaaatatttcaccaaaaaagtatagtgacgtatttaaccaacaaatgtgacctttgcaactattcaccaaaataatatacaggtttgtttatgacattattttgtcatatagtgaaaaatgtcatcctaagtgatactctttagcgagaggttttttttatctttacattattataaatataacgagaaatgttctttatatggcgtatatatatacatatatatatatacgtatacatatatat

SEQ ID NO: 187296 - DNA, 352 bp, Glycine max
  unsure (1)..(352): unsure at all n locations
tacattcaaaatgccgttcactcatagcaagagagtcttacagcatatatctaaactgagatatcatcatagatgttggtctcaattaaccaaccaacatgacatgagatatttatgaatgaaagattgctattcgccttttctttgtaaagacaggagatggtaccccaattcaaagaagaaaataattctttaggctcaaagaacattcctaaaagacttacatttgtctcaccccgaaaagacaattcaaacgagcaaagacttaatactataacctgtttgatgcaagaccttatcttgttccatctgactaatatcttgangtaaaagaatgcgatatgtgtgcata

SEQ ID NO: 187297 - DNA, 429 bp, Glycine max
  unsure (1)..(429): unsure at all n locations
acacctgcggcatgcaagctntgaagctgaagcagaggagaacaaagtttgttttccttttacagaggagagatatggattgtcagaagcttgtgatcccttccaaagctgtcagctttcaaatctagaagaggagaggctgcttggatgagctgaaacgagctctaatgcgagcactgtgcagaaagcaaagatgcaattgtttaagatgtttgaacccccagccttattgggttttaatcacacctcaaaacgcctgacaaagcatgttgttttttggtctgaaatgggtggattgtagacttgcacaatcaatctttaactcccaagtctatgtgattttgtccaatcctacacaagtttgacagatctgcttgtctgagattgtagctaaactcgatgggttacaagtggcatgtgatttgacac

SEQ ID NO: 187298 - DNA, 304 bp, Glycine max
  unsure (1)..(304): unsure at all n locations
atcaacaacaagaaatatgggggnntgccaatgactaattcttaatcatcttattgatgaatatacaacctcaacacttacttttttctatcatggtgtattaagagtgttttttttcaactatacatgaaattatagaaaactttctacataattgtttctaataatagctcataggttcgcatccatttcttcatagctttgggtatatatagacaaatttaatgttaacaactaatttaaccaactttcataataaatgtgaatagccaactatatcttataattagagatggaggtagta

SEQ ID NO: 187299 - DNA, 319 bp, Glycine max
tcaattgctaattacaacttcctttgacactgaaaactggcacccgatcaagactactctgaacactttctatgttctatacaaaggagcatgcgctggatgaaataaaacttatccaagatcgcgcatcatgttttctatacaatctcttatgtcttcatcaaccggcttagtgcgagatactatagggatgtccggcaattgcccatgtcatatccattttgtgtaattcaaaatgatcctgtgacgtataagatgagatcttatgtcatttactgactggcgtattccgttcacacacgtcacacatggatagaaa

SEQ ID NO: 187300 - DNA, 236 bp, Glycine max
  unsure (1)..(236): unsure at all n locations
tgatgttgacaaagangangacaaanaactcaagagaatgatttcaagattgagtcaacaagttcaagatcaagattaatttcaagtttcatgaaaagaaatcaagaagattcaagattcaagagaagtttgatttcaagattcaagaaaagatgaattcaagattcatgagaagaaatcaagaagacttcacaagggaagtattgaaaagaatcttcanaaacaaacatagcaca

SEQ ID NO: 187301 - DNA, 392 bp, Glycine max
gggatcgaaggcgtaataattttttgcttctacatagaacacaagagcacgatggattagagaaatatatttctatgcattaacttgtttgttagaaagacccaacatttctacctactgctgtcattttattgaccttgcattttatagttgttagcataaaagtttaatttaaattctgtttgaaattataactcatacatgttctctcaacaatgcttcatttctgaacttaattcatactaacattatttccatgtgttcgatactcggattcatctatgttcatgtttaaatacttaacgatccgattcgctttctggcaacccgaatttcccctgaatatatctggacgaagaataataataacataagtggaatataaagttact

SEQ ID NO: 187302 - DNA, 286 bp, Glycine max
  unsure (1)..(286): unsure at all n locations
gagttctccattgtcataccctacatgtgaaagaaaaaagatacaaggctacaatatatatctcaccataggaagtcgagagaggtatggtgtatctcatttgaaccaaatgccatgatggttcttgatcaagctccataactgaaatattaccattagaatttgaatgtcaaatgttcctacacacacaattacatgctcataacttacaaagctttacttcatagctcgttccanatgagacgtactaattgcatagaggcagaatgactataaaggaagtgat

SEQ ID NO: 187303 - DNA, 295 bp, Glycine max
  unsure (1)..(295): unsure at all n locations
caggcacaaatggatgacgggaagtgtggttttcgaaatctgcattgtgtgcagatatttgctgtgaaattgccaacaagactttgcacaaatgcagaaaaatactatgcatatgctggatgtggaaagagcagtgcagaatgaggtctggatgtttgctaatatatcgcaacggtcgaaatgtatgattatggactagagacttccagtaaaaatgtggagtcgatccaacggctaacgaattggaacgaatgaattgttactggcgtctntattagagaaaagctgtgatctt

SEQ ID NO: 187304 - DNA, 328 bp, Glycine max
tctgaggagaggtgcactctcgcagcaaatatcttgaattgtggtcctctgcagttcccatttatatacctagggatgcctataggcgttaatcctagaaggaaggtggtgtgggagcctctaatcatataattagaggccaaactgaacaaatggaaccagagaagtctatctatggctggcagaattactttatataatgttgtcttgacagctttgcctttgttctatatgtccttgtttagggcccctacagcaatcattaagaggctcactgctatccaagacatctctttgggtggaacttaaaagaaaaagatacttgggt

SEQ ID NO: 187305 - DNA, 364 bp, Glycine max
aactctgcggccgcctgggctatataccacaaactttccctttattactagactatttgaatgctgtagtacctgaatgtacaaccttcaaattattgctcgtttccctctttcttttctgcaaaatataaaatcattatcaaagaaaacatggatgaagtcctaaggatgccatgtacatgtgtattcctgaagatatagtattgatattccatcaagcatacattgactgttgatacatataatagacgttttataacatggttgccccaaatcacaattaataagcacaactaccaatctctcggagtcctttgtgtgaattgtcttgtctccttatgtggtgaggctttgtaaataatat

SEQ ID NO: 187306 - DNA, 294 bp, Glycine max
  unsure (1)..(294): unsure at all n locations
ctcaaccancaattaatgcagctggtggaattgtgtgcatatggagtgacataaccttttctctagaaagtaaggtcagcggaaatggatttataatgttaacagggaagtggattaaggaagcacaatctgttcacatcatcaacatttactccccttgtgattctcaaaacaagcgggtgttatgggacaagattaagcagctgataagctcaaacacaggaagtttatggtgcatattgtgtgacttcaacactatcataacaccaaaagaacgagtggtggtcaatcaaa

SEQ ID NO: 187307 - DNA, 419 bp, Glycine max
  unsure (1)..(419): unsure at all n locations
tgatattttgtgtgtcaaatatatgttgatgatataattnttggatccactaatgattcattgtgcaagggagtttcccttgatatgcaaagtgaatttgaaatgtcaatgatgggagaactaaagtactttctgggattacaaatcaagcaaactcaagaaggtatattcatcaatcaatccaaatactgcaaggaattgatcaaaagaattgggatggatagtgcaaaacacatgtctacaccgatgagcactaattgttacttagataaagatgaatctggtcagtctatagacataaaacaatatcgaggtatgatcggatctcttctttatttatctgctagtagacctgatattatgtntagtgtatgcatgtgtgctaggtttcaatccaacccccaacaatcacatctaag

SEQ ID NO: 187308 - DNA, 439 bp, Glycine max
  unsure (1)..(439): unsure at all n locations
acactttaatctcagcttctccccattttcataaatggggttgaagtgaaganatattatggtcagccccttagcacttctctctctatcgaatntgcttaggaaaattgtttccgtgaagaaaatccaagccgaggcgcttccgtaacgtttccgtaacgtttccgtgagtgatttcgcgaatgttntcgaccgttcttcgacgttcttcattcgttcttcatcgttcttcagtcttcaatgggttagtacctcataccaagcttttcgattcattctatgtacccgtggtggtccgacatttcgttcatgtattattattctcgtttcatctattttttatacccncttttgacgtgcttaagccattgtatttaagtcatttctcgcttaacctatanataaaattatattccaccgattcgttgaattgtattat

SEQ ID NO: 187309 - DNA, 481 bp, Glycine max
  unsure (1)..(481): unsure at all n locations
agctttgccactgtgcatataaaagcatgcattctcagaaagttaattctaggttgtcggaaggtttcatttccaaagcttctagaagaagtcagtgactatatttcggtgttgaagatgcaagtacaagccatgaaggctctcgtcgatgtccttgccactagtgcttcgtcgccagctccgatcggtntgagcaaatgtaatcacaaaaatattgtgtacttcactactttatatggtcatatttatcttaattgaactttaatttctttctatcctatacacattggttatgttcaatcataatttacattatgccttcttcacattcagcataatagatgcaataaacaggagtgatatttgatgaaataaactcattgccctaatggataaggaaatgtgtactcttgatgccaagttgtaaaaatctagttattttttatattatgttcccctagaaaatagtattgagataatt

SEQ ID NO: 187310 - DNA, 296 bp, Glycine max
cataagcatcgtttttgcatgaggcactgactgacagtcttcacctggcgattttgaagatcggccctttaccgtctttgtgctctatcggaccaatataatgactgaacgctatgaagaacatatgccttcaaatgatcataagtaatgtatgaccagaacagtacccatagattctgaagaagttacaatctatttttgatgccctttcatatcatcttaatgtctgggcattccctgtctgtaagacaacctaactggaggtgagaatggtcagacactttttgtacaagcta

SEQ ID NO: 187311 - DNA, 439 bp, Glycine max
  unsure (1)..(439): unsure at all n locations
cttatagtcacctgctgcatgcaagctngttctctatgctgatgccaaactcctttgcatagggattattctcataatngttttgttgaattgtctgcaagtaaatagggaagttctagataaataaaacaggccaaacacaaatttttgtttgatgaggaagagcttatatgactattaaaggatgaaatcaccatgattgcaatttaatacatggcaaggacctatttaaactatataatgtccaatccactgaaaaaaaaataaggatcagtaagggaaggatggagggtgagaccaataacccatgataatatgacctgcanaatgtctgtctcttgttcgcggtgcctttgacatgagatcttcancagagaagttatctgcttctcatttagcccttttgatatctctggccccgactatcttgcatgctggg

SEQ ID NO: 187312 - DNA, 504 bp, Glycine max
  unsure (1)..(504): unsure at all n locations
ttgagtgaacaatgtgactcttatatnntaaattgaatttcatcgttcaaagacactggtaatcgattaccaaaatattgtaatcgattacagccttttgaaaatatttggaacgttgtaaattcagtttgaaaacattttcaaacttattttgctactggtaatcgattacaacattatggtaatcgattactagagagtaaaaactctgtggtaaaggttntgtcaaaaactcatgtgctattcaaagttgtgaaaaaaaattntaatacttatattgattgagtgttttcttcattcttgaatattgagtcttaaatcttgatcttgattcttgagatcttgaatcttgattgtaggctntcttcttgattcttgaattcttcttgattcttgaactcttgactngttcttgattctcttgagatggatgttctttgattcacttgaagtttttgttcatcaactttgtcatcatctttttgtgcatgattgtatcataaa

SEQ ID NO: 187313 - DNA, 381 bp, Glycine max
  unsure (1)..(381): unsure at all n locations
ttagtttatatgctctagctttanggggtgttataatataanctagntntatcantttgtcgaagtaatcttgtaaaggtttcaaaaatgttgtttttgtgtactctgaaaagcctaagtaggagtaggttcccttagtctgaacttatcttttcttcttgcttattggattctttttcttatatatattatttggagctgatgagcaataagacacttaaacactttcaacaaatatagtccataattttaacagtaatgaaagaattagtcattaaattggagctagttatttagcgcatttgaacattgattcaatgtgtgagaataagattgtgagagtatgtgatttacgaatgaagaattagaggatcttgatct

SEQ ID NO: 187314 - DNA, 403 bp, Glycine max
  unsure (1)..(403): unsure at all n locations
taaaataaattgatatgttaacttattaatattaaatgacacaaaaagatatatttaatatgtttaatatttgacatttattttaataatctatcatcgtagtacaacatgtttgtattttaaaagaatagttaagatttagtggtgttactcattatgtaanatcaattgttaataaattaatattgttttaaatgacgttgtccttttttaaaaaagtataattaaattaaataaactgtattggttaaaatcaatgtttaataccaacaagtcattggtgtgaatcaatctggactcaatctttttaagtatagtctctacaaaaatgtaattcttaatgttgaaattttattaataatattatgttaaaacagaaaatataaattatttggtcttcaca

SEQ ID NO: 187315 - DNA, 372 bp, Glycine max
  unsure (1)..(372): unsure at all n locations
tgtttgcatcttgcctcctttaaatttgatcgcatacttcttttgatcaagttgttaggtgatgtttctcataattatttcaggcgtcctttcagatttatgacttttttttatcactcattntgattttaacagggtggttagagataattggaatccatctacgtcctgaaaatatgcacaatttttgtgatgctctacagaagtggaataagaaggtgtttagcaatatatttactatgaagaaaggttgttgaagactttggataatattaatagacgaatttcttctaaatgctctcataacttggaagtcactttgcatagagtttggagagaatatgaggaaaccttacttcaagaagagctttt

SEQ ID NO: 187316 - DNA, 376 bp, Glycine max
  unsure (1)..(376): unsure at all n locations
catcctaatgtaaccaaggtaatattngggcctttattattttctntgtgttatccatgtttctccttatgtgctgtcattttccactattaatcgaatcagatataagaatggaaagtagataaacaaaaataaggaaaggggaaaggtaaatgacaaagaagattgtgagatttaatgtattccttgaggcaaattttggaatgtattccaggtggaaatattggaaaacattctatgacgcaaatattgccaaaacctcagaatgttgtctcttcatagtatgattgtgatagctngattctggtcacatttggatcaaatgaatntttgtgaaggtttattttctgatgtgctgtttcctttctgtattttg

SEQ ID NO: 187317 - DNA, 409 bp, Glycine max
  unsure (1)..(409): unsure at all n locations
ctatgctttaacactgactgtgatctgataatacaggtactcttgcttttaatatttcaatttttcatctgggtatgcttntttgcaacgttatacgaaatgggtattgtccaaaattgcttgttgaaaaaaagtgttgtgttgggttaactgtgaggtagtatgagacaacgggatggttgaaaatatgataaaaaaaatcgatattagcttttggagaagccaaaattcttaataaacactagtaagaaggaaaattgaattaaggttctcctgtaagctcaaattatctcanaattcttaataaattgcaggtactcttgcttaaaattntcattntttcatctgggtatggtttttgcacgttagatgaaatgggtattgtccaaaattgcttcttgttgaaaaa

SEQ ID NO: 187318 - DNA, 237 bp, Glycine max
atcagaagcactcaactattgaaccttgcatctcaaagatctagtaaatcaccttttcaattcattctggtggtcatcaaaaaatataagaacccgattaaggtccgaaatcccgtgtttcttcatcacgttgggccaatcaacgctcccaaaatccacaaagtccttcccagcataatacgtgcagttaccgtcaacataagcaggtccctttttcaggtacttttctggatgcct

SEQ ID NO: 187319 - DNA, 508 bp, Glycine max
  unsure (1)..(508): unsure at all n locations
gctggctctttattcatcaacaaatgatatacaacaatgtatctatatatgtataaaggtctattaataaaaaaaaaatgaataagcattgttcttacacaatcttaagtaagataaccaattatgtatggatgttaactgtctaattntgactatttagcatcatcatttaatcctttatcaatatatatatatatataatatctttttgtacatcctctatcaatatatatactattgaaaaacaaattacccggcttaatatggtaatgaaaactttgaataatacgattacaagtgtaaaaacgtctatgaaataaatacgttaaaagtaaatgattgtgtgtatattcaatattatgtatcaattaccaatttcaatagtttaatacaaaagggcgattccgcaattatcgggaatggatggtggtgagtggtggtttgattgtagtgaaatgatttggaggtgtgtggatcacattacaactctaataatgccaattattgt

SEQ ID NO: 187320 - DNA, 397 bp, Glycine max
  unsure (1)..(397): unsure at all n locations
agctagcttcacatatgattttacttatctttgtacatattanactaatgttncattatgtntttgtccttgtatttagggctccataatgtaggtaaggtattctaaaaatgtaggaattttaatcccttgtattttacggcacctaaattatgttttgtattaggggtagttttgtaatttcacatgtattaagtgaatatttgatatatcttggtaaataaatttaattgaattgggagaagcccaatccaattaaattntagagggggaggtgagcattttcttgctacaccccattgccagatcatatagtcacactttgtgcatgttcttcatgctntacatgcctcatgccacctaagcatacttagtggataatcttggactttgatct

SEQ ID NO: 187321 - DNA, 356 bp, Glycine max
  unsure (1)..(356): unsure at all n locations
ctctaacttctcaaggaagttttctcaaagaagcttctcaaggaagctttctgataaaagcttatcaaggaagctacctattctataaataaaagcatgtgtaacacttgttgtaaatttgatgaatgagagtcttgtgagacacaactcanagttcaacttctctccctttgtcttcctttaatttcgtgctcccccctctctctgtctctccctctgtcttttcctccattgaagcatcctctccaagcttcttatccaaggctcatattggtggtgaagctccttcttacatggcttattccctagtggatggcgcctcctctcacctcttctcctttgtcttctgctgcatc

SEQ ID NO: 187322 - DNA, 403 bp, Glycine max
  unsure (1)..(403): unsure at all n locations
agcttgctatggacaagttatctggttcttgnacatcattccttgaaancattctagttattattgcatagccttgatatagacttcatccctcaaagcttcatctatcatctttggttccatttatgaatgcaaagcaatgtgagcttgttttttgaatgttgatttgattctaacctttatcacaggacttcgtataatttggtaatatagataatagctttcaattgccaattacttttggtatctaacttccatatcatattttaagtgaagaggttcatgaaacatgtaaaattatataccaattaanaatagattaaattacatggattcctccctaagatctattcttattacactttctcaggaggtcaactcaacttactcataaaaataatat

SEQ ID NO: 187323 - DNA, 400 bp, Glycine max
  unsure (1)..(400): unsure at all n locations
cacatccacaatcacgtataacccaccatcccctggtgcccacctcaactgagctcacgtactcccacgtagcccttatcctcgttcctctcaacggcgggtccccatcaatccgtccaagcttccaaaacatccaagtaattgaacatccaagcatcatgaactaacacagccaagataacagggcagaggcagataactctgctcaaaacacaaaccaacatcacagctgttcacactcaaataccncagtaatatgctcttcgttccaattcgttaaccggtggatcgactcgaaaatttactggaagatctacacataaatctacttatgaccgttggatctgctagaaacgtcagaaaccatctgactactctttcacaccagcaatacacacac

SEQ ID NO: 187324 - DNA, 407 bp, Glycine max
ctagttgttcatcatgttgctcatgtggattctctgttctctaacatacatagtttttaaccattacaataatcttccttgtagagtgtgctgatgtaatatataacgaggtgtctgtgtaatgttttcaaatgctaatgaagtgttagtgtaattttttcaaacataaaagtaagttagtgtaggaatagaaaaaagagtggtgttatgtgtaatttgaaaaaagctcatgatgtgcaagtgtaatttgctcaaaaaataactagatttttaagttttcaaattgaccaaaatgagacaaggtttgcatcttggatcagtaaataaatacctaaaaataaaaaataaaattgattcataaggataatggtaactcatatttgagaattaaaagtaccaaaatgaat

SEQ ID NO: 187325 - DNA, 420 bp, Glycine max
agctgtcatctagccaatatttacaaaggtgttacatgagaacctatcgattcctaattatatgggccataaaatctatcatgtgttgacagtaattgattagcccatgaatctcctcaggggccgtacacactacggccatggcttttgctttggctaataaacgcgggaggtcttgacttccattcaaggtcaaggcgaacctatccatccacatagtcgcttcttgatgcaatgcatcaatcaccctccctcttgcttctttctcggcgtacacttgtgcaaaatcctccactagctcttgttcatgggccacagactgggtcaactcttccctgtattgccctatgatagctagcatgctttgctacgtggttccaagtgttagccaaactccttttggacctagcgcaacaacta

SEQ ID NO: 187326 - DNA, 428 bp, Glycine max
tcttatgctgcatacatctacaatatacctcctgtacctctgcatctgtatcattctctacataataattgtgacactctgcagcaacaagtacaatccctggtggttgcatcatcccaaccttatatggtcaaatcctctacaatagctgcatcatcaacaacagccttatttttcagaatgttgctggcccaatcataccttacgttgctccaccaattcagcgtcaacaactgttacatctacagccccatatacagcaaacaattgaagctcctgcgctaccttcccttgaataacttgtgatgcaaatgactatgctaaacaagcagtttcaacatgagaccacagccttcattcagagcttaactaataatatgggacaattggctacatagtttaatcaacaacatgtccataattctgac

SEQ ID NO: 187327 - DNA, 319 bp, Glycine max
  unsure (1)..(319): unsure at all n locations
gaacacggaaggggctgncttgagatgcatgtnggagctgtaaaacctantgagcatgctttagtggttgaacgtttgattgcaacaaatggaacactttgtgtagctatggacttgtcatgtgagcaaattctttcataaatggacatttattatatcatatcagattatagtatgacattggttttacattgaatatattttaatttttttataaaaaaatattctaagacgattcttttaaaaatcgtcttagaatcctcaattgtttcttttaaaaaaaattttaagacggttctttaaaaacccgtcttataat

SEQ ID NO: 187328 - DNA, 392 bp, Glycine max
tgatggattcacgacctacattatatgttgtgatcataagttgactgaagagattgtctctgctggtcctatattctgatgagagcatttcctatttagcgaataataatatgaagtccataagcattcggttgattatttctacttaaaggttttcactgtatttagcttgctcgactattaaacgatccctttattattgacacttccgagacaatacacaaatctgttattttgcgagcgtttaattattgaatatttcggacttgtcaagctacagtcccttattgttttccttataacattcatcccctcttcaattcgagatggatacttgctagttttcagttgtcactgctttcgtttaagaatggctatcccacataatggta

SEQ ID NO: 187329 - DNA, 421 bp, Glycine max
  unsure (1)..(421): unsure at all n locations
agcttattccaacttattagagttgaggctatttgattgttctctntcatatacaaatattcaatctctgttttattcaccttccaacttttccactgctcttacaatccttgatctttcttcaaataagctgacatcctcaacatttcaactgttgtcaaactttagccttaatcttcaggagctttatcttcgtgataataacattgttttggcatctcctctctgcacaaactttccttctcttgtgatccttgacctttcctataataatatggcatcatcagtctttcaaggtggtttcaacttcagctcataacttcagaatcttgatttgcgaaattgtagtcttacggatgagaagtttcttgtgtcatcttctttcaatatgagtcatcatcttctcttgttcccttgatct

SEQ ID NO: 187330 - DNA, 442 bp, Glycine max
  unsure (1)..(442): unsure at all n locations
gtcacctgcggctgcaatctttacagatattgaaaaggagattatctgttcacacctcatcaattatcatcaatctcaacaactactcattgttccaccatggcccctctcgatttaatattgtccatgggaaacagcttatttgaaacaaatctcgaaaaactatatcacgttatttaaagattttatgataataaagtaatgcctcgaaaattaaaacaacgttatatttgcattgaaaaataattttttaacattggccatattgattgttattattataatattttaaattacataaaatattttaatacataaaaatcaaattaaaaacaattattatatataaaaaaacataatgttcttttatataaaatactagtattattattctctacttaaatngaaataagcacatatataaaatctaaacattctttat

SEQ ID NO: 187331 - DNA, 400 bp, Glycine max
tctttctttattgtttattttcttttaaactataacaattcatgttgagaaattgttattttccagtacattatacttatgagaagtctatcactgaacatttcaaaataaagcctataaaggtattctaaaatgatttcaaagaaaatatctatggttatagtgtcttaactctgtttgctattccaaaacaacgaaatcagataacagccattacaagtgcccaaaaaaaaaagagacataccgtaagtacattcttctcagaaaaaaaatatatgtgattctagcaaattgatccgcatcaaaagattttctatgtgcataaataatctgcatttaagcatggcataagatggaatcagtttaacagatacattataagacacgactgactgagtta

SEQ ID NO: 187332 - DNA, 485 bp, Glycine max
  unsure (1)..(485): unsure at all n locations
atcctcttagtcacctgcggcatgcaagcttctaattatggctgcttgggcactgttgtaatctgtggtggccaaaagttgtgacaaccggtcacttagatcatcaacctctctgtgcaagcttttgatgtagttgcaagtctcctgcaacaccttggaagctgaaacctacaacaagaacgaaattataattattataaaaaaaacttaattttaatatttgccacattttgcatttaatggcactaaagtatagtcaatgatggcaaggaatatccaagtcccacaacattacaagttgtgggtaaaaaaacattaaagggagggcacaagcgtgacttatctagcaaggccaaccaaagccacagaaaatctctggttttgtgtctggtgcactgaatttgaataatataataataataatgggatatatcactatattanntatatcatcatatatnnatatatataggggaccttgctga

SEQ ID NO: 187333 - DNA, 467 bp, Glycine max
tctagaagaaaacccaggtatcaaaatttcgaaatatcaactcatcactcctattctttgctcttaagtttcaattgcgtcaccgcaacatgcatatgcacaataatggcttataaacaaaagcatgcataagctaatccacaattaattccgcatgaaggataactcacagcaagatgaagaaagaaaatatgggttaacgttttggtcacggcaattaaataaaatataagtttttttataataattttatgctaattttttagttgtactataattgtgttctacaattgttatactcttgtcttatcatggagtcttaatttatcatattgaattcgatcgtgtttcatgttgtatacatgaatttatgttaaattgttgtgattatgtgacagaaccattctgttggctgcatactgctgctgccatgcacagcaatgtatactacattcttgtatttgaat

SEQ ID NO: 187334 - DNA, 394 bp, Glycine max
  unsure (1)..(394): unsure at all n locations
aacaaaanctttcttcctacacctatacacaagtctacataatcttttagtgcacaccatatcatcaaaactaaaattcatagtcatatatatcaataaacaaaaaccctatattagtccttccatatactgtatattgtaattccattttagtccttaccatcaaaatttgataaatatcatcaaaataaattaactacatatatattagcaagtaatacaaataaattgataatttataactaatttcaacctaaataattaaattatatacttatactatatataattgttaataactaaataattcatatctccaaaaaaaagttacactatagggactaanagaaactatcaaactatagggaccanatcactaatttaacatattaat

SEQ ID NO: 187335 - DNA, 402 bp, Glycine max
  unsure (1)..(402): unsure at all n locations
taatttctgttcttgtttcattgtcttttctaatagtaatcgccacatgtcccatttgaagtggagcatataggcccacctttttcccttgatgtgacttcatactcagccacaaggaagaaaaattggacctttttggatgctgaaatcctgcctcggtttgcgtgccgcctctctggttctagattctcgcgtntctctgcacccgtcggggcccgttttcaaaagtaggcaatatatatatcaaaatgctcagaatgagaccctgagcgtggttcaaaaggttggtnntgtatgatttaagttgcacgcataacgataatttgtagactaattaattgcgaattaatctataaccgttcggttatggggtactcttcgctaattagtctaacccgcgta

SEQ ID NO: 187336 - DNA, 400 bp, Glycine max
  unsure (1)..(400): unsure at all n locations
gcttctactgagcanatataaaaactaaacttgattatntactatcctaccaaaaagaacaataaattaggagaaatatatacattnttgaaaacttctctatacaaaagttagtcataaaagacgactaacacatacctttccatccatgaacaccatttcaaggtggctagacttttcacacacatggtcaaactttaggtccacaataaaaaaaatgcaagagaggagcaagtgcagtaaaagtaaaaaaaaaaaaaaaacacaaacaacaacaatagttgcagtcaatagtaaaaaaagaagaaaactccaagcttcaatgtttctttgctatcatcaatagcttcaatcatatcaaaacttggacacatgaccacacacaaaactntaatgaata

SEQ ID NO: 187337 - DNA, 437 bp, Glycine max
cttgtggggcttctatggaggctggatcttatagcttcaattttgttctttaatgttgattttccaccatggatatgcagcggaagacaaatgataatatgtgagaggaggcgccatccattaatgaataagccatggtagaaggagcttcaccaccaatatgagccttggataagaagctcggagatgatgcttcaatggaggaaaagaaagacggagagatagagagaggggggagcacgaaattgaatgaataaaagaggtatagaagtggaactttgaagtatgtctcacaagactctcattcatcatagttacaacaagtgttacacatgcttctatgtatagactatgtaacttccttgagaagcgtctttgagataacttccttgagaagctagagctaagctacacacacccctctcataactaagctc

SEQ ID NO: 187338 - DNA, 337 bp, Glycine max
  unsure (1)..(337): unsure at all n locations
ttatattncattnaggagtgagactgctcttattaatccttttgctataagcacctaaggccatgaaatttntagatgngtactattatcctcctagttaagaattttctatctacaatatttgctagggcactactttttctttatttgggcatttgattccctactttgaatganaatgctgaggtgcgaagccttgcgtatacatctatatgcatgataatatcaatatctgttatggcatatttcagtatgcaaatgactcacaatgtactggatgtgtagtctgtagacctaggatctcttatatttaattgctttgcacacttttttttct

SEQ ID NO: 187339 - DNA, 333 bp, Glycine max
tgagattctggcacaatataacgttaaccatgttcaatgaatgttaaatacttaaattattactctaaacatacttgtttttttacagataatctaaagatacatgtggtattgaacgggtcttaaaaatctagacatcaatattaaatggatcctctatagagatgccaacatggtgagtctagactgagttaaggagaaagattggagttggatgtccttttataggatctgtctatgtcagtctagcttctgtgactttgtttcgagtttcccatgtactcaacaaaaaaaaaaacagttttggacatcaatactattgttgtatatata

SEQ ID NO: 187340 - DNA, 313 bp, Glycine max
gatggaagcttctcaaagggtctatcttttctccatttcttgcccttgaatttctgagctaaagcctccacattgctggaagggccaaacaataacttctctgtggtcttgtcttgcttcaaatataacagcctcccggatcttagtgtaaatgaagaattcacctgcaatcttccactcttaccaactttgtcatgaggccagtcctgaccattcatgacagagagtccagggtcagagttgaatgaaagattatctctcaattttgattctcttgtcacagtcaatgcacatcccaactattacacggaga

SEQ ID NO: 187341 - DNA, 480 bp, Glycine max
  unsure (1)..(480): unsure at all n locations
aatactcaagacttatatgatgtgttagtaggtaattcttaatatgcatattaatcttgatataataaataagttggtacttcttatgaaataacacaagataatttactatgttcatgctacttattngttaatacttcttacaatatcgtcttatttgttaatactttttacattgacttccttttcacgtgtttgccttactatttttatcttatgaacatcaacctttgttgcactctatgggttgcaaatgcaacgcatttgtcatattttatagaaaaacatgaaactgaacctatcgttattatccttagactagcctagatatatgacacaataggctagaataagattcttagttattgtctacctgttgaaacagtacttcgacatgggaaacaaatatcatttcgctattatgtaatatactattatatgcattcacctatggttaaaactctcatcaatcaaatattg

SEQ ID NO: 187342 - DNA, 444 bp, Glycine max
  unsure (1)..(444): unsure at all n locations
ctaagcttacaatttattcgtaggttatattatagcgttttcgatttcttatgananacaatagagcattatgggcttcttttacaagtaccttggtacttttaacctttgtctgacctaaaaaaaaaccagttcccttagtcttagtctcaaattttgattaaattatggtataattaaacatgacatttctaatataattttaaaaagcatattgtttttattacttagaaagtataaatacaatatttatttgtttagaacctagaattatttttactcaccaccatatggcattgtaagacaatgtacagaatccaattactctggacagtgtaatattaacttaatcactttaattctatcagaccatgatagttcacactatctataagtcttattcaaatcgatccattaacattataatccaaaatgtactatgtg

SEQ ID NO: 187343 - DNA, 374 bp, Glycine max
  unsure (1)..(374): unsure at all n locations
accgcggctgcagctaaaggacccaggtggtgtgggcttctatcatganagattctttgttgtgaagaaggcattttcaggaggggcgttgttgcttgccagcatggatgatgaagagttgccttcgcccgtgaattccaatatcgtcaagcgatattatgcatagtacctagggcagctagaaggttcaatacatgatttttctccatggactcattgggatttccaaagtcttaaaatccctagtaaaccatgatcgcagtattaataaaaatgggattaatgatttgcatcttaacttactgttntgtgtcttttacatacactctcgaccttactcactaaatccagagccattnggctcaattaatggg

SEQ ID NO: 187344 - DNA, 463 bp, Glycine max
  unsure (1)..(463): unsure at all n locations
ntcatctagcacagattatacaaaggtgtgacaagatatcctatcggtttctaattatgtgggccatcaaatctatcatgtgttgacagtaattgattagcccatgaatctcctcgggggccatacatactttggccatggcttttgctttggctaatatacgcgggaggtcttgacttccattcaaggtcaatgcgaacctatccatccacatattcgcttcttgatgcaatgcatcaatcaccctccctcttgcttctttttcggcgtacacttgtgcaaaatcctccactagcttntgttcatgggccacagactggttcaactcttccttgtattgccctatgatagctagcatgctntgctccgtggcttccaaatgttgagccaaactcctttctatcttgcgtacgcagctaactcttcttttaatatcatgccatgcacccgtgaccagtctctt

SEQ ID NO: 187345 - DNA, 350 bp, Glycine max
  unsure (1)..(350): unsure at all n locations
agagtctatacatgtttccttngatgagtctaatgtcattcttccaaggaagggatttttagatgatatttcagattccttagaagatacacatattcatggaaatgactctaaagataaagatgaaggaagcaatgaggattctcaagataatggggcaagaggaaataatgaacttccaagagaatggaaagcctcaagagatcatctcctcgacaacattattggtgatatatcaaaaggggtaacaactagacattctcttaaagatttatccaataatatggcttttgtatctatgattgaacctaanaatataaaagacgccatagtagatgataactggatca

SEQ ID NO: 187346 - DNA, 399 bp, Glycine max
attccctagtggatggcgcctcctctcacctcttctcctttgtcttccgctgcatctccatggtggaaaatcaccattaaaggacctcattgaagctcatagatccagccttcatataagccacacaagcaagcttccatcagttgggaattgtgaaaatatgtcggagctgagagaaaaccctgtttatcgaacttttttttcccgtaaaacccaaaacttatattataactcgatcacaactcgtaaccgtggattgcgaaaattggatatgggttgaattaattcgcacaccttatcgtgaatttgcaataatgtatgggagagaaaatgattgctgaacatacaaatgggacccatccttcttttgtgagttggaaccttaacaataagaaactg

SEQ ID NO: 187347 - DNA, 294 bp, Glycine max
  unsure (1)..(294): unsure at all n locations
tgatcaccatggcaactttntcattgatcagacatctagtgtggaatagtagttttctttgactatcctccatagacttcaatcgatggccatctaatcccctaatcattaacaattctcccttcgatgttatttccacttcctcctcatcattctcactctctttcccctattcaactactcattcactaatgtactctccatatctaaaaatcatgactttctctgtaaggcactcatatgcataaatgtccaagccttggcaccacatcacttgatatccaatctttttta

SEQ ID NO: 187348 - DNA, 378 bp, Glycine max
  unsure (1)..(378): unsure at all n locations
acacaataccgccccagaaaccagngatggctcttaatagtttgtacctcattgtagtcacactcctcttccatgtccgagttattttcttcagtatcttcctctgcttcatcatcatcaatgggtatccaaattaaaccaaacattggaagaacgacaaggagaactttatcaattttatgggtgctccatttgttcagaatctccaaaaacaatgatggagctacaaccaatcctgctccaacgccaaaacccactcctattgatacataagtccagtcaaacttaactccaaaatctgtatgtacttcaagcactttgtcttctgcattgctcatatcagaacaatgtttatgcaaatgaactccacataattct

SEQ ID NO: 187349 - DNA, 382 bp, Glycine max
  unsure (1)..(382): unsure at all n locations
taaaaacttgatcaaactgaagtaattttacaagcgttggtagatacagttgtacttttacttccatatgcanaagtgttgtatcccaacataattattttagaggtaatataataactaacatcagaacaatgtctggagacataattactaatgatacaaaaaccagaaattttactatccaattatctacaaattgtgatatctttggcaacaaaatctttataaataaagcagatgttgtagaattgcaaccagccaaagaaaaaaagatttaggactagactttatcgtacatgataacatatcagtcaccattacaaaagaatacttattaatttctacaaactcacaaatgtcacctataatagacgaacttaca

SEQ ID NO: 187350 - DNA, 374 bp, Glycine max
tctcgtgcacaacaataggagaatatacgttccatgcttgctttttcttggaaaaacgaggagatattatgctctatgcttgcttcacatgaaacttgggtaggcttattgttgacaagatccaattgatatcatgtatatccatttgatagccataatgctgccatatatgcatattttgcctcttgattttgtaactagaaatgactactgtttactaatccaaaaatgggtaaatactcttgttgttaaactgataaaccttatcctaatcttctagattagtgtgcgacatgccatgggatatgtgtactcatattgtaacctgcacagaattcattcacacaattacatattacattacaactctatgc

SEQ ID NO: 187351 - DNA, 392 bp, Glycine max
  unsure (1)..(392): unsure at all n locations
agtttatactcaatttttctaacataanaagttatattagcatgcccttaatccataaatgtggaatgtgacaaaaaagtaatatattaaaattcatcataaataaaattgaccgagttagtatatcttttaaaattcctggtttattcaaaataataatctgacagaagaaaggtattaggtatatgtcagactagcaccgcgatcgaacttgtttgcttgctgattagggggctaattactttagttgacagcttttacgggttaaaatttgtttacgattccaattccaatacccctctcttaatataaggtccgttaaaatcttaattttcgttttaacattctggaatgtcaagaataagctggctggtcttgggattctggaatct

SEQ ID NO: 187352 - DNA, 424 bp, Glycine max
cccaaccctctctgtagcttgttgtgatcttgactcttgtgtcttggttagcactcttgtattgcttattgtgagagagagtgagatttgctatattttgccttcttttgtttcctacattgtgttctcatcgaaccatgacatatgtgactctaaacttttctttttcagccatgacctctctccaacgtcttttgtccacaaccatggaggacatgaacacgtttcaattgcagctcaatcatgcccttgtcttggttgaaccagaagaagaagaagaaggagaggaagaggaaatgtgtccagagctttctctgtagatgtatctcgacaaagaaaggtgcaacagattgagataatgaagaaaaaaaattaacattcaaatgacgtcgtttgtacttttttaaaatattgtcacgtgtat

SEQ ID NO: 187353 - DNA, 390 bp, Glycine max
  unsure (1)..(390): unsure at all n locations
agcttgtcattgtgcacaaataanaccaaggttggcataaaacaacaataatgtaatcttaagcacgagacgtgcagaatatgcagtgaaaacacatgcttataataaaagggactaatttaaatgacatcatcacaacttacatgacaacacatggtaaaatnttgacaatcgcaacaactcgtgtttaaagagccacaagattttattactccaaggttgcaaacaaagtaatggagttaactatacaatcaccaaataaattagaaactcaagagctagatttgtaaaacaatgttttcatatcaaaactcanaacatcatcaacataggctaaaagaaagcattgcacaactaaccttgaacacctctacgtggtaacagtggcat

SEQ ID NO: 187354 - DNA, 355 bp, Glycine max
atgccacacctttattcaacatgttgcttatgggtctaacaatctttgaataatccttgatgaatctcctgtataaccctgcatgccccaataaacttctgacacctttaatattcagtggtggtggcagcttctctataacctctatctttgcccggtcaacttcaatccctctatctgagatcttgtggcccatgactatgccttctctgaccatgaaatgacacttctcccaattcatgactagattattctctacgcacctctgaagtaccatctctaggttcctcaagcaactgtcgaatgatgatcccaaaaccgagaagtcatccatgaacacttctatgcttttctt

SEQ ID NO: 187355 - DNA, 425 bp, Glycine max
  unsure (1)..(425): unsure at all n locations
gcttatgcaccggaaatgtaatatantattgtatgcccgattaaacaccatttcttatttaaccatgcattaggtaccatgttcaattatttntgtttgttgttgtgtgttntttttttatttttagaaatgggtttatgatcccaacatggttggctcatggtgcctaacacatgcaactaagaatgtagtgtgaagtttcacgcttcccctttntttgtttttgttttgtagaggaaaacgcaaggatgagcaaacatgaaaacaaatggtatgcaattttgcagatcaaaaagtttgttgaacgcatatgcatgatgatgccatgactcatgcaaaatgtgaggctgtaatatgataacagacaaatgcaggaacgatatgttcattatgatgccatgaagagatgtgtatgcgatgcatga

SEQ ID NO: 187356 - DNA, 477 bp, Glycine max
  unsure (1)..(477): unsure at all n locations
gagacagaatctaacttgtgtctacccttttaacaagctttaatgctgcaagaaaagagactaacacagagtggaaagaaatgaaaaatacaatgaattaagatgaaaattcttaattaaagtagagtgtaaaagtatgaatcctatattattttattgtatatttctcatatttgtcactctctttctatgcaaagtggcacaccctatatctgttaaaagcatagggacataaccaagttgatagccagcactttgtgttcaatattcaaaccaaaaaattgtattaaaaagttctcaaaattgttagagggcctacaaagatcactaaatgtcaagtctacatcactnttgtangggtgttgatatcttgaaattctaaatccaaaaatgtataagttattcaaaatggtgatataatacgagtgttgatatgatgaattacagcaacttgtggatctagagatctcattattt

SEQ ID NO: 187357 - DNA, 467 bp, Glycine max
  unsure (1)..(467): unsure at all n locations
ttaagtcacctgcggcatgcaagcttctaattatggctgctggggcactgtgtgattctgnggtggccaaaagttgtgacaaccggtcacttagatcatcaacctctctgtgcaagctnttgatgtagttgcaagtctcctgcaacaccttggaagctgaaacctacaacaagaacgaaattataattattataaaaaaaacttatatttaatatttgccacatnttgcatntaatggcactaaagtatagtcaatgatggcaaggaatatccaagtcccacaacattacaagttgtgggtaaaaaaacattaaagggagggcacaagcgtgacttatctatcaaggccaaccaaagccacagaaaatctctgtttttgtgtcttgtgcactcgaattgtaataattataataataataaatgtgaatattatcattantattattnatattaatattactattaat

SEQ ID NO: 187358 - DNA, 346 bp, Glycine max
aatatcaactcatcactcctattctttgctcttaagtttcaattgcgtcaccgcaacaagcatatgcacaataatggctaagaaacaaaagcatgcataagctaatccacaattaattccgcatgaaggataactcacagcaagatgaagaaagaaaatatgggttaacgttgtggtcacggcaattaaataaaatataagtttttgtataataattgtatgctaattttttagttttactataattgtgttctacaatttttatactcttgtcttatcatggagtcttaatttatcatattgaattcgatcgtgtttcatgttgtatacatgattttatgttaaa

SEQ ID NO: 187359 - DNA, 419 bp, Glycine max
  unsure (1)..(419): unsure at all n locations
catgcaagcttcttgcgtagccgctctggggctaaattatcccaaaacaaatccctcttattactagctattttgaattctttagttcctgaatgtacaaccttcaaattgttgctcgttcccctctttgttttatgcaaaaaaaaaatcgttattattactcgaaccataaggaataacatctaaacaagttatgcataaaatgttacttttttattttttggtatttttccatatttgattacactgttcacagttgagacatgatggaatgttgtacaaggaattatatgatggaaagaatggaggttaatatatatacacgctctgtacacaacaaaactttaagatagaagaaaattaaaagagtaagcaactttaanatatatataataaanttatcaccagaaaaaaaaact

SEQ ID NO: 187360 - DNA, 457 bp, Glycine max
  unsure (1)..(457): unsure at all n locations
acatcaccttcaatgtcaacaatattntgtttctttgagggaggcagaggaaggtcatgcaaagacttataacgagtctcaatgttataacttctacatttgttggttggtttaagtttgttcctccaaatcaccttcttcttgtcactaccgcttacaacatgaatgactacaaccaagatgagcttctccacttatttccccatgaccaattctgcanattaaaacaaaaaatggattgttagtattaatcctacttagactcaagaaaagaaaatattacacatacaacttagacacacctaaaattgacttctagtcttcatcaacaattngcaaaatcaatttacaagggatgaaatctctaatcttgtttaccaattcaacaatataatgtcgagaagcaagttcttcttaaggtaattctttntcatgcctnccatatgaactgacatgt

SEQ ID NO: 187361 - DNA, 360 bp, Glycine max
  unsure (1)..(360): unsure at all n locations
aatctctaagctccaccactagcatcaatcctttactcctcaacanaaatctcaccctccccaccttctccaacctcttctacttcctcaatctcatccttcacatgcgccacttccaacaccatctcctcagcctcttccctttccaccgcttactcttccttgagctccaaggacaggtccttctccaacaagttcctctggtcgtgctacaaggacaaccctcacatcatcactcgcatcaactcactcagggattccagctctctctccttcatgccacctactaaacctaatagatagggtgtaaacataaacccttcaccacccaaacccaacttagcaacactgaagcagtct

SEQ ID NO: 187362 - DNA, 387 bp, Glycine max
tatatcatgaggcacacacagcttactagcatacacatgcattagctttacaagttcaacaacgagcaaaccactggctgcactcaaaatattagcaactgcatacgcatcttcctgaacaccattcctaaacattgcactgataagattcaccgctttcacctcctcaccagtggacacattacacttaataatcgaattccacagcacatcacacggatcaaccttactatcaaaaacacttattgcctccctcattctgccagcattggcataaccagatatcaaagctgacaaagagaactcatccacatgcctcacataactcacaatgcgagcagcactatccaaatcaccacacttgccatacaggttaatcagagagct

SEQ ID NO: 187363 - DNA, 301 bp, Glycine max
agtgatccacattatgcatgtatgatagcatagactgagatgatgtgccaagttgaaaattttactatgtaagttgttataattcaaacacttttaccgagacactagtaggatagagagaaacactacccttgggaggatagaagtttggtgattattcctagtgatgtgtcattcttgctaaccatatcatatgaagtacatcttgttctactcctttcatgaacttatgacaattgtaaactcgagaagtgaccaatgaagctctttggaatgtatgtagtcatctcatgaattgtga

SEQ ID NO: 187364 - DNA, 195 bp, Glycine max
ctacagacatttcaggtccatgcagattataacttccattacggcccctaaatatgaaaaactgcttatcatggagcacgccaaatcttactccagctatacagtttcatggtgcaatccataaatctcgtgtgtgacaacaggaaatttctaaaaccctagctccgatgagcctgtcagttcaccgctcatctt

SEQ ID NO: 187365 - DNA, 268 bp, Glycine max
aggttaatgcatgtcgcctatcattgccctaaggtatggctctaacgaatacatcattgatttgttttctcaaccttgcaccatggaagaatgaaagaagcggtcgcattatccgcaaatagaaattttcaaggacgacaaatagttgaaggatttcttcaattgacagatcaagtcgaatgactcctattcttgataactcacttctctctaaaaagacaaacgtttcggagtgataatatgaggtcacatatacgtctatatttac

SEQ ID NO: 187366 - DNA, 444 bp, Glycine max
cacgccatccccaaattgagcacatcatagtcaacaacatcaagcgtaagtgactcaaatatgttccaattgcttagctttcgtttgacggcaatccgatatcatcagaataactatttaagaatgtttactgtccatgtattattaatactacacgtaattaataatcacttgaactatttttaagatttgatccaataattttgaaattaatcgctcacaaattaaaagttgtttgataaaatattcaaaaaattaaattcggttaatactaattgtctcactcgataagagattacatgtatgaaaataataaattaatgtaatcaacctaaatttattgtcaatattaagaaatcatatctaatagttttataacttgacattcaaagcaataatttaaatgttcaatatttaataataaatcaactctgtttatattat

SEQ ID NO: 187367 - DNA, 437 bp, Glycine max
  unsure (1)..(437): unsure at all n locations
taagtcacctgcggcatgcaagctagaaattgaacaacgtgttccctcgagttatatcaaatggcataacttgncacacggaagtccgattaaggcgcataatatatcgagacgctcgaaatctaacaacggatgctctcgagaaattcaaatggtcataacttgtcacacggaagtccgattaaggcgcataatatatcgagacgctcgaaattgaacaacgaatgctatctagatattcaaatgagcataacttctcacgaggaagtctgattcaggcgcaaaatatatcgagacgcttgaaatctaacaacggaagctctcgagaaactcaaatggtcataccttgtcacacgaaagtccgattcaggcgcataatatatcgagacactcataattgaacaacgaatgctctcgagcgattcatactgtcataa

SEQ ID NO: 187368 - DNA, 430 bp, Glycine max
atcaataaacacatgttgagttttattcatataattagaagatatctcttttatcttagtgagagtgattctcctaaattctcgagtgattcaagaacaccctgtctgtatcaaaggactttcacaacctttgtgtgttgccctcgctggaaagagtgattctttccttcctttcatcttcacccttgttctttcaaaccacaattccagaaaattcacctctgcccagaattatctcgtggccataactcccatgttacgcactcaaattaagtgattctggagcctaaattgaatgtcataaccagacctttaccgcagtttggaatcacctcatttggagccctgtaacttcagttattgccaattctatatttctggtcagccaccacttaacctactgtttaccatgccattcattcattttatg

SEQ ID NO: 187369 - DNA, 346 bp, Glycine max
  unsure (1)..(346): unsure at all n locations
taagtcacctgcggcatgcaagctgtgcactgtcatggatattctcatggctttatcgnnacagcaagactganaagacaaaccaatatccatcactacaaagacacgcatttgtaaaatggtggacacaatttgactcatccaaagcggatccagaacaagtaaaactatggttccaatcccatccagaagtcctcanagcagctgatccagagacttcttgtgttttgaaccaaaagtctcatctggcagcatttttagcaggatcgacatcaaaggaggtcttagctaaaaatctgaaggaagttctacaaatgttacaacaggaagaagaagcttcatcctc

SEQ ID NO: 187370 - DNA, 346 bp, Glycine max
  unsure (1)..(346): unsure at all n locations
gtctaatttactagacatnanttctagaggatccacagaggatgaattatttctcacgtccaagaagttcaaacatatattgaataagatgggaaagttttagcactactctagatagaaagacaccatattcaagaaaaagtacaaggaagaaaacaatgagatcatctactgtcaatgcacaaaagctagacacatgaaagtggagtgtcctaagctaaatataagatattctggtgacaaatagaataagagtctattggtcacttgggatgacttacactgatattatagtagtatgtcatatgatgaacatgttagcatctatctgatggcaaatacaaat

SEQ ID NO: 187371 - DNA, 448 bp, Glycine max
gacacttgaatctatgctttacggatttgaaattgaacctgtatttaagattaatgtttgttaattattacattcgtatgtattgtcattttgcatattaattgtttatacgtgtagaatgatatagggcttgtgcattctactaatgatgagttattgtgactgatagttaaagattaagtgtattatatgtatagtgcaattactaatcatgagttattatgtagaagtttgtattatatgtatagtgcagttaagtgttgtatgtctgtgttgaaatttatgattgattgttaagatggacgaagatcaatggatgtatgacactataatgtctgaagaagttgatatgaatgatcaaaatgaacaacaatgtgatgtgaattgattgttctgatgcgttcaatacttctcatgtaataatgttcttaatgtgagagattaataa

SEQ ID NO: 187372 - DNA, 370 bp, Glycine max
gcttctggaggaagcctcttaatgaagcttttatagaaagctacatgaagctgcctctgtaaaaatgctgcccagcctacattaaccgttggatcttctcgaaatttggtctgcaacttcacaaaacacttttccatgatctgaccgctgggatctttgagaagatgtctggagtgtgctataagcctcttaatgaagcttctagaggaagcctcttaatgaagcttctagagaaaactacatggagctgactcggtagaaacgctgcccagccttcgttaaccgttggatcgtctcgaagattggtttgcaacttcacaagacactttaccatgtattaaccgttgggatctctgagaaaatatctgga

SEQ ID NO: 187373 - DNA, 280 bp, Glycine max
catccctccctggacaattggcaagctagggcagtgggcttattccatcatacattggctgcaattgagatgctacgcacatatcggctagatcttgacggaccattcaatgccatacatgatgcttgacttgaatgctagtgaacgtcccgctcacgctattacttacatgttcctcctcatgcacaacatcgacacactgtctgacgttctgatcagacaagcatggaagatcaatgaaaatggacctgtcattacatatgcatctgtcacgttcata

SEQ ID NO: 187374 - DNA, 368 bp, Glycine max
  unsure (1)..(368): unsure at all n locations
gccacatctatnttttgtgtccagagcataatacatggctgttattgccttttagaggttgacctgaaactttgtctcatttggagcaaccatttgagggtgttattcttaggacaaaagagttttcaaactgttgaggtcagattatcttaggacaaatatctcttggtatgatgtcgcttgatggacttagaatgattaccttagaattgaaaccctctggacgaagtagatatgcattgccatatctgattcctatctactcataaattaactcatcagaatactacacattattcatttaatcatttgttggcgaaccttcttatctctacaatgttttgtgcgcattaatacttggctatttt

SEQ ID NO: 187375 - DNA, 358 bp, Glycine max
atgctcaatggtgttctattactgataaccatatgtctgtcactatcaggggatcttcaatcattttcttgatagctttactcgcttctgacatataatcaatcaacgagagctcctggaacttgatttggtccttgttaattggttgatgacaacataacactctgagtaatgaaaatcggataatgctcttattaggtgctcacctgatattagttatgtcatcgctgcatcttctttggggaaatgctaggaggtgttcgggtgagaaaatggatttctggcggaaatacgcgaaaggtgagggcagaaagatagataatgcgcaccaaataccttgtgacgtacgtcgaaattt

SEQ ID NO: 187376 - DNA, 428 bp, Glycine max
agcctcgtttccctttccttgttttgaaactcactacaagccttaagtgaaagaccatgatatcaccatatccttaaggatatttggagctctggaattgttttgggaataagagcgagggtttttgtttcattggataacatgttttgtgggccatacttcatgatatatcttgagccatacttgatgtacattgcatattggttaaatgttggacatgctgaatatgatgttgtttctcaaaggctacagagtaataaaaaaatcttaatagaaaaagaatagcagtaaagttaagtgaataacatcttaaatgacaaaataatgatgagactcttgtctcactctttatgttaaaatttatctttactctctttatgttctatgctggctaaatagccctattcccattgtccttatactttgga

SEQ ID NO: 187377 - DNA, 302 bp, Glycine max
  unsure (1)..(302): unsure at all n locations
acaaagataaggagtgttgtgatgatgtccctatggaagccatcacacttactcttggcgagaccatggcacgttagataatgagggctaagtcatgatgagttcaccagcaagatctcttcacgtataatgcaaaagatatggctcaatccattgattccacaagaagtgtgtgaggatcaaagaataatgagagagaaaatgcttcaagaatagagagaataagacacagatgacctcacacttcgagagtgcaaanatgcgaggacaaataagagaaacgcacgagacgaaaagatgag

SEQ ID NO: 187378 - DNA, 237 bp, Glycine max
gtatttttttttttttttttttttttgttttatttttttttttttcttttttcgtattattttttcttttttttttttattttttttgtgtttttaattttttttttttttttttttctttttttttttttatttttttttgttttttttttttttttttttctttttttttactatttatttttttcatttttttttttttttttttttttttttttttttttttttttttttttt

SEQ ID NO: 187379 - DNA, 341 bp, Glycine max
aaaagagggcgggggaaagagaggagggaattagtgtgaaaaaaaaaaaaaggaagaggaaagggggaaaggaggaagaaaggaagaaaaaaggaaaatgaaggaggagagaaggaagaaagaaaggagggagggaaaaatgaagagaaaaaacgaaggaagaagggagggcggaaggagagaaggaagaagaggagggaaagaaaaagaagggggaaaaaaagaagcaaggaaagagaaaaagaaggaaagaagggggagggaagaaagagagagaagagggggggaagatgagaaaaaaaagggggagaaaagggaaaaaagaagggaaggaagaaaga

SEQ ID NO: 187380 - DNA, 323 bp, Glycine max
taatcttcgcataaatctctaatttatataatgaaatgtataaatgaggacatgatgaaggccatgattgtacatacacaatcttctttgaccaaactgcttaccttgaatgataattgcatcctttgctccctttttgagctgaatgatattaataaaaatttgaaccctaaacttgaataattatctcctgataccttgtttatattatatgagagcatatggttcaaggcaaacttactctaaatctgggggagggaagtcaattataatgaatagaataaggtttagcttaatcacacacatcacatatgctgtatcta

SEQ ID NO: 187381 - DNA, 357 bp, Glycine max
  unsure (1)..(357): unsure at all n locations
agcttcagtcctattctattgctaanatngtgtacttaggctaagcgcacctgtgcgctaagcctattctgcagaaaanaatgttttatgtgtcttcaagctaagtgccaactcgctgcgcttagcgcttgtgttaatttcataaggcgcgctaagctcagcatgctgcgctaagtgcccaattctgttttcagttttcttgagaataaacctatattaatctcttgtgttttgtcttatattttgtagatggcatcttagaaaagaaaagcccttgcctctgcatcttctcaaagtagatatgatagacactaattttcatccncagaagcatgggatcgttatacaaacaatatc

SEQ ID NO: 187382 - DNA, 384 bp, Glycine max
cctgatgcccttgctggatgtgtcttgctctccgcaaaactgacagagacccgtaattagagctggtcaactccaagaccctgttgtacttctccgggtccactgggtgtcttgtgggcgcaatccctgctaacaatatatgacattataaatcaattgagccatgtgcatacttacctatgtattgatgacgtgaccttgccgggggaaacggacacccttgttgactacagatgcccgttaccagagctggaaaccccatggccctgttggacttctcctggtccactgtgtgtcttgtgggcgcgatccctgcatacaatagatgacattataaatcaattgagccatgtgcatatctacctatgtcatgatgacgtgacc

SEQ ID NO: 187383 - DNA, 329 bp, Glycine max
  unsure (1)..(329): unsure at all n locations
agcttcagaccanatgtcgttatgatctaactgtttcgaaggctgggcagcctttttaatgaggcagcttcatgtagctttctctagaagctccattaagaggcttcctccagaagcttcctcgtggcttctttgagaagattcctcaagaggcttctttgagaagctagatccttatctatccacacccctctattaactaaattaacttccttataaataattacggatgacaatagcgcaacaaataatcaaacatcaaacataattactaagaatatatagatatatatatcacggtgttacatatggcaaccaaacttgaattt

SEQ ID NO: 187384 - DNA, 439 bp, Glycine max
  unsure (1)..(439): unsure at all n locations
tcttgtcactcttatgagtcactcatgacaggcctaagtttacttctattggtgtctntatagaacatgtctattcttaatacacttaatcaaactcataaattaggattaattgataaggcttatgatctgtgttgataaggcttgtataattaaagcatcaacggatgtggactcaacatatttcccatttaatatgatgcaaaaacaattatcaatgagacattgtagaacatctccatacattgatagagagcacatatgaactaatcaaactgaatggtacacagattgatatcatatgggactaaacaataaatatctatacttcatataaccgagtaatatgacctgctacaacaagtctatgttgggattcatcgtgcactgaccatgtcataacatttctaaaacctatgatggggagaaggggttacat

SEQ ID NO: 187385 - DNA, 387 bp, Glycine max
  unsure (1)..(387): unsure at all n locations
agcttggatcttccttggtcgaacacatgagtatatgcaatgctcccanagactntaagatgatcaactcttggcttcattccaccctacgcttcttcaggtgtttaacctttgatattctttctaggagagcagttatacaaataaactgcacatgaaatagctttggcccacaactcattgggcatagaataagctttcaacatacatctagccatattaagaatagttatattttttttctctccaccacccattntgttatgacgttctatgaaccattagaaggcaacaaatcacatttatttcacaaaactcattgaattcttgtgatggtgaatctccttctctatcggatcttagagccatgattgcatagccgctctc

SEQ ID NO: 187386 - DNA, 442 bp, Glycine max
  unsure (1)..(442): unsure at all n locations
gatctntgagcacccacgactggtccaagagtattgtattgttttntcgacccacacagttccaacagcagtgtatggttttcttcgacttttcttcgataggaggttctgtgggttccagctagcggttttctacaatatcgaaatgaatgtggggcaatgtgggtgtctaccgagcggtttctggcatatttcaggtgggaggagatagagaatcgagagtgcggaatggttctcgagcgcgtgagttgtgaaatttcaacacgttttaacttattaacataacaacatcaacatcggttgtttaaggataaccgatgttaggatgaatactgtaacatcgggtttctacaaaccgatgtttacttaacaatgtaacatctgtttctaaaataccgatgtcattcaactcctaacatcgtgttgacaaaccgatgtaaca

SEQ ID NO: 187387 - DNA, 361 bp, Glycine max
tcgattacacaagtctgtgtattgattacctaaggagttttttcagaaattatttccaagagtcacatctgttcatatgggttttacatggccatcataggtctatttatatgtgactaggaacacaaatttgctgagagttgttgtaaagaacaaaaaggtattattctctcaaaaagaaaaatcttcttatcctcttaaaaattccatggccaatacacttgcaattcaataaggaattttttgagtgctcaattgttcaatctatctctttcaagagagatttcttcttctcttcatcttacttctaataagggattaagagaccgagggtctcttatcgtaaagaaatctgaacaca

SEQ ID NO: 187388 - DNA, 381 bp, Glycine max
  unsure (1)..(381): unsure at all n locations
agattcctaaagaagctatagcttanctactcatacctctctaatattctaagctcacctccttgagatgagaagctagaacttagctacacaccccctataatagctaagctcacccctatgacaaataacatgaaaatacaaaaaaaaattccttactacaaagactactcaaaatgccccgaaatacaaggctaaaaccctatactactagaatgaccaaaatacaaggcccaaacgaaggaaaaacctattctaatatttacaaagataagcgggcttatacttagcccatgggctcgaaatctaccctaaggctcatgagaaccctatggccttcccttggatctctagcccaatctacttggagtattctaccca

SEQ ID NO: 187389 - DNA, 434 bp, Glycine max
  unsure (1)..(434): unsure at all n locations
atcccgacccaacccgggcatagtcagctagtgagatcctgtgttgtacccgtgatagtgaaaactggtactgcacaatcgaatgttctgtataatttgacagctgttctgcatatatttgcagattttaaaatctaacttatatacatccaattccactcatatttaatcctacaagtcctaaaccatgtataaatcatgttcaaactaattacaaacttcaaacaaagggtaatcataatatatgtatccaaaaccaacaaaatntagtgagttctcaaggtttgaaaggtgaaaattagaattgggtgattgtggggtaaactctcatcttcatcaagtctataacattgaattagactcgctcaaacgggatttagagtaaaatctccacctattcaaaattggacctctcaacactcaatttacactat

SEQ ID NO: 187390 - DNA, 354 bp, Glycine max
  unsure (1)..(354): unsure at all n locations
acaagctttttaatattcgaccaacaataagctagtgaaagtgttcggttagaaatatttcttgtaaaaactaccccaacttgaaatattctatttttatgttaacagaagtagcgtctgacttataagagtggtatattctacccttgttaactctataaaaaaaaataataaacaacaacacctacgtgacgacttatttactaaatattttcaattcaataggtcaccttatcagctnttagtttttaattctcaactattaactccttgcaattttatttgtcttactttcaagaactttgcaactattaaacaaaattgaaataccttcatacacatgaaaagctgacg

SEQ ID NO: 187391 - DNA, 450 bp, Glycine max
  unsure (1)..(450): unsure at all n locations
ctgacaacttctgttcgtgtgtgttttctttatatanacacagatgcttgatataataatatgaggaaggctgcttctcgggcacattccggtgacaactatttatactgtccaagggttgtaaatctacaggatgaggatgtaatgcactttcagtggcattggtaaaagggggagcctgtcattgacagcaatgtgcttgcaaaaacatctggtttaagctgggaaccacttgtcatgtggcgtgcattccgtcagatgactaataccaatcatgaacaacatttggatgtgaaggcaattgatcgcttatataggtgtgaggtgtgtttaatttctcaatcttgaacttcgagggaatattgcacaaattccatagctcatgttcattctcatgaagcctatagttataattgttatatgtgggtacttattttaactgggaccact

SEQ ID NO: 187392 - DNA, 352 bp, Glycine max
aggcgagctattttgcttcctctttaagcaaccgccttctggaggaattttctggaaggcccaagtgggctggttgctatttgcacccacaattttactaaatacacccccttgctcttttttggagattctttttctgtaacgttacgaaactttacaaatttcgtaacgatgcttgttttctttccgtattgttgcgaaaacttacggattacgtaatcatcccctgtgtacctttgggaacattatggaactttacggattgtgcactaacacttccttttaatttccggcatgtcacggaacttcacggattgtgttacaatgcttttttttgactccggcatatcac

SEQ ID NO: 187393 - DNA, 432 bp, Glycine max
cctattttatggcgcctaccttctcctcttctactttgccttccgctgcatcttcatggtgaaaatacaccattgaaggacctcattgtagcctatagatccagcctccatatatgctccacatgcaagcttccatcaagtggtaatcagagcacaagaacttcaagtaagtgctccttaaacctccattaatgttttatctttaccttctcttccattgttgtttcttcatttttctacatgtatctcctcacatgtcttgttctatatgtcgttaacatgaatctttagagttacaccgataaacttgctataaagtagatagatttttatggtcacattcttgtcttgttatgaacatgaatgagtgaggtaagtcctctgattttgtctgaatttttgggctgaacctaacataaattcgacaaaaca

SEQ ID NO: 187394 - DNA, 343 bp, Glycine max
acaccatagctctgcactttatgactctagtatgtatatactcgtactgatttatttgctataatatataatacatacatattttgcctatcaaaaaaaaatccttgactttctcaggcaagtcttaaaagaaagtatcacacgggctaccttgtgttaagaaatacctcaatataataaaccacactaagtcttaccttggcaacagcataaacaccaaaaagacccgtgtccttgtaattggtgttgaaagccataatgctctcagcaacttcattaatgccaattcgctgtgctaactccgaactgttatagtcaaaatgcattcagctattatcaggga

SEQ ID NO: 187395 - DNA, 458 bp, Glycine max
  unsure (1)..(458): unsure at all n locations
atcacatgtggtactaggtggcttcgttctatggcgcacaacaagtattccacatccacaaagcgcgcatatacccaccatcccctggtgcccacctccaactgagctcacgtactcccacgtatcccatatcctcgtttctctcatcaccgggtgcccatcaatcctcccaagcttccacaacatccaagcataacaacattcaatcagctcattctaccacagccaatataacatagcataggcagaaaactctgccataacaccaaccaaaatcacagcttttctcacttaaagaccccagttagaattccttcgttccaattcgttaaacgttggatcgactntataatattactagaagtctctagtacttaagcctacatggtgacacgtggatctactatcaaacatgcaatactcattctgtacttctctgtgcacagacaatcacacac

SEQ ID NO: 187396 - DNA, 235 bp, Glycine max
ctcatatccacgccctaacatcacacaggccaccattaaagcggcactacatgagcacggttgcaccgagggagactcgacatatgcattgcataccacttccaaagcttggaaagatgtctctaaggattatactgtggcttccacatatggggtataagaaggacaactcacaagaatggcttcctcctcgaagactattgattactacccttccacccaaatttcaaccttt

SEQ ID NO: 187397 - DNA, 449 bp, Glycine max
  unsure (1)..(449): unsure at all n locations
ctaagcttcttataagctgaaccattntatcaataaacacaagtagagttttattattaaattagagtgtatctctgttatctgtatgagagtgattctcctaaattcttgagtgattcaagaacaccttggatgtatcaaaggactttcatatccttcgtgtgttgcccacgccggatagagtgattctttcattcctttcatcatcaaccatgttctttctaaccacaactccacgataatccacttctgcccagaattatgtcgtggccataactctcgttttacacactcataataagtgattctcgagcctaaattgaatttcaaaacaagacctttcacctcgttatggaataacctcatttggagcccttgttcttgagttattaccatatctatatgtctatccagccaccacttaaccttcgttttctcatctgattatt

SEQ ID NO: 187398 - DNA, 292 bp, Glycine max
  unsure (1)..(292): unsure at all n locations
tctatggaatgttcttaatccaattgccgcaatggtggtgtttgtatgtattcacaagtactaggaatatatatatattaagtgtaatgatgtaattngagtcttagtgcggtcatgttgttatctacttgaatgcttctaatcaatttgatgtaatgctaatataaggaatgttatttcgttgtcttatgaaaatataaatttggtgaaagacagaaacaaacgtgaatgattttgtatttggaatttgtgtagataagactgctaaatacaagtatgacttggtcaatta

SEQ ID NO: 187399 - DNA, 378 bp, Glycine max
taagctcatagagtcttgctctaagacgagtggttttgttgtttttaaacacagtgtaactgttcacccataatggtaagtttcccttctcttgactcatctaccattccataactgtgcggatcttctctcgcactccttttgtgaggaaatatcgactatgattgcactcaatgcctcatcctacaattcttcaactgcgaaggtggctcttgcccgatcactttgatattttatcgtttccctttgattcatcaaggcttgacttttgatactccaagattgatgttctttaaaaaaaccctgcattctaaaagttcatgaaagttgagaccgtgtctcatggagggtctatggcctaacgtcgtattactcata

SEQ ID NO: 187400 - DNA, 386 bp, Glycine max
  unsure (1)..(386): unsure at all n locations
gcaagcttcctagagaagattcttagataagctatatgctagctacacacacctctctaatagctaagctcacctccttgagatgagaagctagagcttatctacacacacctctctaatagctaagctcacctccttgagatgaaaagctagagcttagctacacaccccctataagctaagctcacccccatgccaaaatacatgataatataaaaaaaaagtccctactacaagactactcanaatgccttgaaatacaaggctaaaaccctatactactagaatgaccataatacaaggcccaaaagaaggataaagctattccaatatttacaaagaagagtggacccaacctgggcccatgggctcagaaatctatcttg

SEQ ID NO: 187401 - DNA, 293 bp, Glycine max
ctggtcctatgtaaataactatgcgttggctattgtggtgagtcctgtgactcatgcactacccagttgggtccatgtacttgacagtcttcatagcttgggcctttataaggtgtgcacaattcatgaattgtgctagcttttggtactgcaggtatacggaaccttctccctatattgagggaccattgtggggtaactggacgctcctggggagaatatcatttaacttccgtacatgtggcggctttattgctgcattgacttccatatgggaactatttaatgtttga

SEQ ID NO: 187402 - DNA, 379 bp, Glycine max
  unsure (1)..(379): unsure at all n locations
agccacgaaccatgattcccaatctgtaccctttttcagtcctcaacattgaatgctatcatgcctagtnntccttcttttagttctgtatttttcctttttttagtgacggtgggggaaataaaaatgggacctctagatggcgctttttcttttcttttctttttctggattcgattctgatatacatggcacggtggtgtggtttgttgatggagctgtcttttatctttctaaaaccccttataagatgttgaagttgaagctgtaatactaagtctttgtggtttttattttaggggtgcattgctgtttatcaaattctgggggttgtttaaaaaaatccgtgtcttaaaatatgagattggtgatccttgga

SEQ ID NO: 187403 - DNA, 423 bp, Glycine max
atgggccatgggccaacctattattacatggctataatcacttactataaccttctattcaatagttttgatatatttgtaaatgatttacatatatatagttgaccaaaacatatgttaatacatttgtaaatatatcgagtctttatcattaataaatgaatcatatgctgacttgtttaaatgttaagaattttattgttaaaattttatgagccattaaaagactattattatattatgacatgaattcatatgaaatatatatgtagccgtggcttcatttgtcaagcatctgggattgaatacaatacatattgatgattgactataatgcttctgtcatttttattaaccgaatgactcgtgcatttgcttttaaaaaatgttggtaacaatggactttttttcttcttttaatat

SEQ ID NO: 187404 - DNA, 340 bp, Glycine max
  unsure (1)..(340): unsure at all n locations
agctatgctttacaatatttagtatanctatgtgtgaatntaactgtgcttacatcagtntnttgaaagactaacttctaggattagatgaaatggtgtactacccagttaccaactaaactagttggacttgtccaatccattagactagtctagtcttatgttaataatatagaagatatatatgcgttatttggagggattatcccagaattgtgtttggggttttgcaaattaaacgatgtacaaaatttgttctttttggcttttgcgaccacgaatatttgttgatgcatcatcttcctattatgggaatggatcggtaacttacacttcacta

SEQ ID NO: 187405 - DNA, 468 bp, Glycine max
  unsure (1)..(468): unsure at all n locations
atctaactagatcctangagcaaatcatacttttaggggtcatataaanancgattggaagatcacatggcaacataaaagtctctttggatcaaaactataagagtctctcgtagtgtctctactaagaaaatatatattatgtatattaaatctttggatacaaaactatgatagttttacaatgtaattagtacctattttctcaaaagctgttttaacttgtatctaactaaatcctaaatctaaatcatacattagtgattatgataaaaatgtatttaatgatcacatggcaacttataaaagtcacatgattgttgtcattgatatatgatcaacacactagaaaaggtgttgaatagtgagttagacaaactttggaatcttgttcatacatgaaagttgtacacaagtgtttatataagacgtttaaaacatgcacttgttaatcgtcaacaaccccaa

SEQ ID NO: 187406 - DNA, 386 bp, Glycine max
  unsure (1)..(386): unsure at all n locations
agttcatgcagtaacagttttactattcgtaaaggtgtgtcatcagcaccagccctatacaacattagaaaataaaaagtggttctagttttattctataaggaaaaaaaaaaaagaagcagtaactctatccaacaaagttatataccttctcctaatttcctccattcccaagtcttgcaggtacaaatggatgctntgaagtatgcgatcaaggtcaacatcatatatagtgctctgaagaacctgcagcacaaacaaatacatgttaatactgaacaaaattttaatgaataaaacatatcaagagagaatttggcaattctaactctgcttcttgacaaagaaaaataggtaacaatggattcgtaaattgaatatctaat

SEQ ID NO: 187407 - DNA, 276 bp, Glycine max
  unsure (1)..(276): unsure at all n locations
acaacaacatgagcagagggaaggagcgataaggttaccctgtattcgtcaccgaattgaatttgaaaggcgtcacgaatggcttcagcggaagctctgtgaccgccaccagtatcactcatgagaatcaacacgttttttgtcctctccgcgccaatctccatgagttccatgcctccatcgctgtcatcatcgtgggcctcactgccacgtnttttgtggctggtgttcccattatagtaacctccgaataccttctccgctatggaccttctc

SEQ ID NO: 187408 - DNA, 470 bp, Glycine max
  unsure (1)..(470): unsure at all n locations
acagcatatcactatgtggaatttactcangccatttgttcttgaaattgtccaagtccttagaggtagtgtattcgaaaggatgtgtacatgttgtatatagatactgtcttcaactgtaccgcataagtggcctgaaacattaccagttttgaatcttaataaacaatcaatgtcatcctataattttgtttgtcgatttactcttgatntatattcatgtatccctataattgcatgctntgattcagttatttctggataagtaattgtttatttttaaagctctctcaagaaggtaacagaaatgctgttgtcatcagaaggtaaatgagaatctgacacccatacatacttatcatgaactacatattgcaattcacaccctggtgttgttatgtgcacccagcattttntaaaaatgtcaaaactgctcctgcattttcttcgcatttgtgatgcgtgtgcgt

SEQ ID NO: 187409 - DNA, 341 bp, Glycine max
  unsure (1)..(341): unsure at all n locations
agcttgcctgtctgatgcatgcagaatgattttccgagttatgtngggaaacgattacgaacccggaatgggtgtatgcaaagacaacggcggcataactagcttgataaatgccaaaggaaatcgtgggaagtatggtttaggctataaacccactcaggcggatataaagaggagcatcgcagaaagaaagagcggtggtcaaagctcgcggttgaggcaagatagtgaaggaagcccgccttgccacataagtagaagctttataggcgcaggtctgggaaacgaaggtcaagtggtcgcgatatacgaagatgatgttccgagtacattggatttgg

SEQ ID NO: 187410 - DNA, 347 bp, Glycine max
atctccaagtacacgacatataagcggtgtgatttattccctgacaatcaagtatgcactcagagaactagaaatgcattgtactgaaatttcatcaaattcaacaaaataatcttaaccttaacgcatgaatctaccatataaatatgagtctgcccatactgtccaaacggacaattcaagattcaatgcaatgattaatgcaaatgtctccaagaatcattgtatttaatctcaaacgagaatctaaggttcactcatgatgaacataatttgtataacatatatcaattctcattaatggcagtgaacatgtaataaaaacattggtgtcaagcaacaacatc

SEQ ID NO: 187411 - DNA, 394 bp, Glycine max
acccatcacaatggtactaggtgtgcggcgggcgatggtgcacaacaagttttccacattcacaaatcgcgcataaacccaccatcccctgttgcccacctccaactgagctcacgtactcccacgtagcccatatcctcgtttctctcaacaccgggtccccatcaatcctcccaagcttccccaacatccaagtaactcaacattcaaacaacacaaaccatcacagccaagaaaacagggcaaaggcagaaaactctacccataacaccaaccaaaatcacagcttttctcacttaaacaccccagtaacaattccttcgttccaattcgttataccgtggatcgactccaataatttactggaagtctctaatacacaagcctacatttt

SEQ ID NO: 187412 - DNA, 441 bp, Glycine max
  unsure (1)..(441): unsure at all n locations
tcactcgcacaagatattcttctatctaagaattatgcacccatgcacaatcaatgcactttcgttacctacattatntgtatgtacttccaaggtgtactacctacaccacatgcatttccttggctaaatttacatacatgcatgctcaaagcctcttggctaccataagttgcacacatgcaaactttatgatgaatcttggctatctacacaataaggtgctacatttcatgctttattcaagtgtttgtactacctatagccgcatgcaaattcaagtatattttcttgtgccgactaaaattgtattcaaattataaggtgtttttgtagggattttcttacataacatgcaacatatctatatatggttgtgagacattttgacaaccatatatatatgtacatacatccagtatttagctaccatatcaagtg

SEQ ID NO: 187413 - DNA, 282 bp, Glycine max
  unsure (1)..(282): unsure at all n locations
gactngaataattcagctgctaatttaagcttcgctttgtcgaattactttaataaggtagattatatggtcctaatcaaggtctatcccttccttatgagtacgaaagttatatattagcggaacttagttagttagttagttacttcactatgtacaaaaacatatttagttactagttgtgtaagctttaggatcaaaatcctttctctctttatctctcaattggtcttcattcgttctccactattcacttctattctttctttgtcttgaaaattt

SEQ ID NO: 187414 - DNA, 418 bp, Glycine max
gataatgtctataagaaatcacatttgtgtcatcatcaataatgtggttaatgtgaatgtatgtatacatgattatgatgatgtcaaagaataatctaacaatgctgcttcaaatgataagcatgtgcttcaagattaattcaagattgctgcaacaaacaaagccttgtttcatagattcactaaagaccaagccttgccttataacaaaggaatcaaagccatgcaaggctctggtaatcgattaccatgaagtgtattcgattaccagaagacagggttgagatatatctgttgataaaggctctgaatttgaatcttccacatgtaatcaattaccatatgtttgtaattgattaccagcaatggatctttggaaattcatattcaatagtcataacccttcacattataactg

SEQ ID NO: 187415 - DNA, 264 bp, Glycine max
ctaacgcctccattttgatgaggtgatcaaccggtgcattggcattatacatatactatgttctggcttatgagctataaagaaaggactctgatacggattacagatatctcgacatagatattgtctaaaaatcaagatacgtagatatatatatccgtgcactaattgagagactgcagtgaaatgtatcatgagtaacacatacctaacatgttaattgacgatattgttttaaaaataatatatgaattttgttatgtg

SEQ ID NO: 187416 - DNA, 371 bp, Glycine max
atactcagctttattctctaatatagaaatggaatagaagtggtatttttgtaaatatggatgtgaaagataagggacactgttataacttattattatgcacttatagtagtgtgtttcgtatgtgtatatgacatgatggcgttgtttggacagtagagggatgatgaaagtactgctctctgtactgtatattgatatgaagtgtctaataccaatttggatggtacgcagacttgttaaacattcatcgcttcataatcgtatgctctcgatctatattgtatcgttcgtgatattaatataacatatgttgggctatagataaaaagtgatatactttcttctaagctatattcactgtattcata

SEQ ID NO: 187417 - DNA, 450 bp, Glycine max
  unsure (1)..(450): unsure at all n locations
cttaattaatatgagantctcaacacgagatagtgtatatgtttatatccactanaaattattaactacgggtaatgtgtatttcattaaataagacatatgacctatgtaattgtttatttcaaataaattttaataatggtaaagagtgtgtggctagtatctgtcatgttaaagatcgatcttatgatgaaaaacaataattatagtgaagaggacatcaaatctaacaaaagatgagacaaggaatttggtgcggaaaatattaagggatgagactcaacctcttatataacatacaattaagatcaccaatggtggaatcgtaactaacactttagtacgtggcatctaatcatgatatcaataataaaaattcataagatgtaaaaatggtatcaataaagtattgcgaacagtacctaattcgatcaacccttataatacgat

SEQ ID NO: 187418 - DNA, 84 bp, Glycine max
gcttcttctctgaaacattccggatgacgttcttccggaaattgtctgtgagtttttccggaagacacaaattattcttccgga

SEQ ID NO: 187419 - DNA, 467 bp, Glycine max
gtctctgcgcatatatcacccaacttgcgaaatgttaatgacgaacggctcataatttgtctctgcgcgtctatcacccacctcgctgctattgaatgataaaaggcacaaaatatgtctctgcgcgtttacctactcagcttgatattcctgaatgataaagagcgcattatctgtcactgcgcgtttacccactcaacttgttgttcctgaatgataaagggcgcaaaattcgtctatgcgcgtttaccacccaacttgctatcctgctttgagtcttatagatagcaaaggaaggttttaaacggataaccactcgggtatcttcgcaagtcaagtgactccaatgttatgatgacagatattgtctgcgcgaagatacatatatctacgcgtgtaactggcttgtggccgcattgactaagggcgtaaacgagttagtcttgctgcatcatgcttgatcttaa

SEQ ID NO: 187420 - DNA, 211 bp, Glycine max
aaaaaaaaagaagtgatctgctcaaacggacaaaaccgcgatggagatacaaaaggaacttgttaacacacaggactgatcagaccaactgtcacacaatcaataaacccccgcagcacaaagatacatggaaatccgacagcaagaacaaaaagacgataaccaactaagcaccactatgcttggaccaaaacaagaaaaaatgatcggg

SEQ ID NO: 187421 - DNA, 315 bp, Glycine max
ctatatatagaagtatgtgtaacacttatggtaactttgatgaacgaaagtcttgtgagacaaacttaaaagttcaacatctcttcctcttttcttccttcaatttcgtgctcccccctctctctttctctctctctttcttttcctccattgaagcaccctctccaaggcactctcttggtggaaagctccttcttccatggcttatccctagtggatgatgccttctctcacctctttcctttgcttccgcggatctccatggtggaaatcaccattgaggacctattgagctcaagatcagtctcataaact

SEQ ID NO: 187422 - DNA, 204 bp, Glycine max
  unsure (1)..(204): unsure at all n locations
attttaagaatttaaagataaaaataatatttattattattaattataatagtggaatgtgtgtttttatatgagatagttaaaataagattaattagatagtagtaagggtgtgttggagtttattaatttattattttanttaattaaaaatataatatttaagagaagattgttaatatatatatatatatatatatatta

SEQ ID NO: 187423 - DNA, 433 bp, Glycine max
  unsure (1)..(433): unsure at all n locations
gagtggacctcattcattgacatatcatctctattgagtgttggaactatactatttctgaatgtagacgggctattggacctaacatcgatcgacacctatcttgcttatcaccatagcaagcaaagcctggtcatcaccattttggcagatacatatgatacactcgacttgaggtgcgagaagagcagtgcatgaattatctattgtacgcctactctctatgtgtggttggtctaccatgttttcgtcatgaatgtatgcctatatgtcctctacaaggtcatcgcatgtgcaccgaatagggaaaagataattgtgaagaactctcgacaagtatggtaggaacgttcattaaccggcgtccccgatgganataaagaagagcaagagtgttatgctcgtgtgaaggattcccaaatgtcccattgat

SEQ ID NO: 187424 - DNA, 304 bp, Glycine max
cttctccttccaaggcttattctctagcggatgacacctcctctcacctcttctcctttatcttctactgcaactccatggctgaaaatcaccattgaaagaccttattgaagctcaaagattcaacctccatagaagcttcttaagcaagctttcatcacacatactataacacaacatcattctatgctacatcgatctacaatacctagctcattcctaataaagaagaacctatctctagcaagaggtttaataagatgtcactagttgatgtcactatcaacaactcaatgtacaatca

SEQ ID NO: 187425 - DNA, 444 bp, Glycine max
  unsure (1)..(444): unsure at all n locations
cctgcgaaggcaaacatttgtgaagttattttacaagaaatataacaatcatgacaaacaatggccaaacaacacttctcatggcacgagtgtcaacatgcactttataaaataatcatattggggtcgcgctattttatgacacatacatatttgcacacataaaaaaaaaaaanttgtatgaatgcattttcgacacctatccatgtacatattttgtgacaaaccttgtcatgctacatcctatatatatacacacatttnttttttggaaggcattctttgttacctactcacaaatacacatattttgaaaaacactgttacgctacccatccaacactctgtaatgcacttcatgctatatatattcatattatgcaaggcattttattcatcattttgcatggcattgcatgctatattattacatatatcataccg

SEQ ID NO: 187426 - DNA, 382 bp, Glycine max
gaatatgaaaacaatggaggattgatattgcatagctaaaaacgtatgtcgtcctaagtatagtatacacgtggaaagctgctggtgcttgaagtttttgtaacgtacaaactttacagtgtcatattcgagtgaacttcattttagttctcatatatagttttatagaaacatcatgcgtacgtggtattagtattttctaatagacgattatcacatcatccgttaataatgacaaggaccagaatcgttatataataaatagtgacaacaacgataataaaataatttatcaaatataaaatgataatggtactacttaagtttaatttgaacaaaattataataacattcttaagatgtggcaaaatacatatatatt

SEQ ID NO: 187427 - DNA, 304 bp, Glycine max
ttggtttggtgtgaagctatggtactaactttctgtctttgtgcttgtgcacatcatttgctttagtctgtaatgaaattatggtccatccatgtatgttctttgggttacgaactgtccaacgtaaattgctagcgtttttctgctcttgtgctggtagctttatgcagtactttgaggaattcgtgctatcacttttctctgctttggtacatttcccatattagttatgaactattcatatggtccttgaccactgtgtaaccattaagcactctgtatggtttgtaaataatcacatgat

SEQ ID NO: 187428 - DNA, 430 bp, Glycine max
actaagcttgacctttataagaaggaccattgtgactcactcattttactttttttatttattgccaagatgtgaaatggtttttatatgattaactaattcttgatttgtctgttgaagataatacatctctacatgtaggcgaaaaagactacaacttatgaatggtatataattaaccctctcttacatcaatgactcattgtgttacataattgtattactcattattagcttttcttaattcagattatataagtatatttattcactatttgtaatatagatatcttattactcattgttaggtgttatcaattaatggtacttcatcatattcattgatgattaaaaatataaataaatgttagaactgattcttagttgtgatatgttaacgaatatgacatcaagcatattgattactatg

SEQ ID NO: 187429 - DNA, 371 bp, Glycine max
  unsure (1)..(371): unsure at all n locations
catgcaagcttgatcctcatatcaatagtgacatagttattttcaagatctagaatcagnttattaaacaaatccaatggttctcctactgatctatcttcatgcattttaaatgaatacaaagactactttgggtaaagacgattaactaaagatttggtcatgtacaaactttcaagtattggccaaaccccagcagcagttgtttccttagagacttgcctcagcaccttgtctccaagactgaggataattgcactgtgtgccttctgcagtagtgctttcttatcccatcagccataatctttacaaggttgggcttctcatcaagtgcttccaccaggccctgttgaacaagaatagctctcatc

SEQ ID NO: 187430 - DNA, 328 bp, Glycine max
taaatgtgaagtttcatctgtatccaacatattgatgttaaacgaacaagaaacagaactcggtgacaagtctctgacacatactaattaggtaaattgtatcagcacattactgtagaagatagcgaattctgatataaaaataaatggtaattcagacaaaaattttcacacatactccggacatgacgagaagcaattgaatcatcaagccaacaaaatttctctatctcattacataagagatatctgagaaatcttgtacgtacacccaattcttttaattttaaggtctgattatgaatcatttaatattttgtataaatac

SEQ ID NO: 187431 - DNA, 273 bp, Glycine max
  unsure (1)..(273): unsure at all n locations
tactaagcgagctgtttcgatcttcaacctttctcttcaatgtntttatcttcacgtatttacatcaaatttttctccaaaacacgtgtaatgtttgtctttttttctgaatcctattggtgaaaaattaaaatctttattatttactaaaaacaatagtgaaagataagaattttattcattcttaatcaagattgactattaattatatccgaattccgcagatatcggggacatatttttaaggtttgattataagacaatgattctata

SEQ ID NO: 187432 - DNA, 443 bp, Glycine max
gcttctacaattcccaatgcatcatgacacttgtctcacggagctgcgccaagtcgtcttacaccctatacatcaaagtcaagaatatgaagtggaaggcagagaaatgaggtgcaatttaatatatttcagacaaataccctgctgacatccgtaaattctttgaataagtctatgttcgtagcccatgcatcatcatgatcatacccaaagcctgtcactagaagagatcgttccacctaaaacaaaggaagattacttattaaaacatacatacaacaatcatgaagcactatataaatagtatttcagaattcagattgtttcataaaatgctgcaacaatcataaacccatgattgctgtcactttcagtatcaatggtggatcaaagctgaaccctctagttgcttgataatttgaatgccaacatgtatatggatg

SEQ ID NO: 187433 - DNA, 392 bp, Glycine max
tcggagacatatgtcaagcgttcgcgatatgcgaatatgatattccgagtactttggatttggtacgaccatgccctcctgatttccatctgggaaattggcgagtggaggaacgccccggcatttacgcaacatgcataatgtatacctttacggttttaatagctctatagttgggcctaagctgtaaagttttccttttgtaaggctttgagtctttgttttgaatcataatacaaggatctttcttatctgttcctgtctttacccattctcattcatttgcatgtttacttctttttttgaaacggcagatccgatgacgagtcccccgaaggtactaatacctgggacccgtctatcgacttctagcaagaaatgaatcatacgga

SEQ ID NO: 187434 - DNA, 280 bp, Glycine max
ctttagctccttcttccatggcatatatcctagtgaatgacacctcctctcacctcttctcctttatcttccgctgcaacttcatggttgataatcaccattgaaggaccttagtaaggctcatagatccagcctccataatagcttctccagcaagcttccatcaacaacatcggacttgatcgtctctggatggaataggagactaatatagtcttgacaacaacaagagagaatgaccatgatggtctccgcatgccatcatacttgcttgtctatt

SEQ ID NO: 187435 - DNA, 298 bp, Glycine max
gattgtgcgtatttcattcatatccgctgatattcatatcctatatttagcattcttgtaacagatatgctccacatcatgctatggaatattacaataacagatagcagataaacgtgtcttctatcaacactacataacatcactgcaatgtcccactcccatctcatcctctattctgtttccttttgggccttaactggactgtttcttctttctgcaataccttctttctatcacttgacacaccttatccatgatacatgttattatcagataatactcatacaggacccat

SEQ ID NO: 187436 - DNA, 245 bp, Glycine max
  unsure (1)..(245): unsure at all n locations
cttcacttgtcctaaggatttaatcacanaatcatattctatacctccacattaatcacatgctcataacaaaacatgtcaagtacaacacaacatctctcacacacaattcattacccaccatcacgtagcaagtcacaatgatcatcacacagacgttatgcaacatatatactaagactcaatcctatattgaatgtggtatcttgtcagagaaaaataacactatggcaaatctttccacc

SEQ ID NO: 187437 - DNA, 456 bp, Glycine max
agcttcacgtgattaattgggtagtcttattttcaattattttgtcacgtaaatgatccaaattttcatttccatttattctttcgatgcaaataaagtataataggaaaagaaaaaatctatcatgaaagtagttctgttgctctacattcattattgctaatattttgcagcaatgccatcaagtttacccatgaaggcagagttggaataaacctttacgttgtgtcaaagcctaattttgcaaaagcagaagacatccaaatgatgactccaaaccaatcaactatgtcagtgaatggtgtaaaagaagaacaacatctctcaaaacctcaaagtggcaatgatggaaatcttcttgatggttggcaaaaacatgacgaccatcccagtcaaaaccatgcattcaatgacgaatgtggatctccggccaaaagtgaatgctcaatgaatgga

SEQ ID NO: 187438 - DNA, 479 bp, Glycine max
  unsure (1)..(479): unsure at all n locations
ctcaatttgtctatcttttatttaatcagaattctcaattgatgaanaaccaaattgccgcctttgatcccatcagacaaaatctaattgaaaagaattaggctacttgaacccacttcacacaaataaatggctataaatactgaaacgaanagtagaattaggggttcaaaaataatatttgaaaaataaaaagagagagcttgtgagttgaagcagtaacaaatagagcagtccagcaagaagaatggaaattgaaactgaaaaagtgattgatgtcaggaatgagtgagtgaattattagcatcatttcattgtacacatcgcttttccatcatatattgtaatacccgttcgccggcaaaatatgtaacaagtgatgataaaaaaattatntngttgtaagacaaatatgcaccaaaacattaacanatgtgaatatagttagacatactgtagagaatattacccaaaagtct

SEQ ID NO: 187439 - DNA, 419 bp, Glycine max
  unsure (1)..(419): unsure at all n locations
atcaccgcagctgcaagctgcttggtnagaatgagtatacttgatttgtacttgngcganccaattngggcaattttggatgagggcaagagtaatttccaaaatctgcacttctatgcagaaatttgctgttaaagtgtgcagcagaattttgggtttgtgcagaaaatgcttatgcatgactggctgtggaaagggttgtacatattgggttctggaaattactagcatatcccaacggtcaatatgtagacttatgtactaggaacctccagtaaaattttcgagtctatccaacggtaaacaaattggaacgaagggaatgttattcgggtatttgagtaacaaagttgtggcattggtttgtggtttggcagaattttctgcctctacctattttgcttggtttgatagtcatg

SEQ ID NO: 187440 - DNA, 381 bp, Glycine max
  unsure (1)..(381): unsure at all n locations
attctgaggtatattatgtgctctctattagattgtcggattgttgttgatgtcatttattgattatatagtttgcatatttcacggtgatcaaattcatgctatttgtaaatcggaccacctcaagtcttggagaacatatttgaaagagaattgcacttatgttatgcataatttcaaagttgttaataatgatggtcaatttatagtgtgcgaacatgagtacaagttattttttattggagtgacggtagttagaaacctaattgcatgaactgccttatagggaattggattgatgatttcaaatgatgtgctggcactttgcgtctgcctgtggtggtgagtcagcacgattgncttcattttatatacatcttg

SEQ ID NO: 187441 - DNA, 325 bp, Glycine max
  unsure (1)..(325): unsure at all n locations
gaacaccctttgtttttcattaatccattcgaactgttttacagaaaagctacttatttgtcaaccaactacaggtgtttgcacagtaccctgcgagatcataggatacaaaacacgtcaacttgcaatgttgcccgtaactattccttactacanatgactgaaagcacatattttcaaatatgagtgtaacgcattaatatcatttatactctaatatgttactataacattattcattgataccattctcaagtgcatcctattcatgagactttctagacaagaagccaaaatgtcttgccactagaccagcacgaaaaga

SEQ ID NO: 187442 - DNA, 455 bp, Glycine max
atcacctgcggcatgcaagcttgaagggagaaagtgtggaagaggcgttttcttttcttttattcgagaccacagaagggtacctgtaaatatgtcgcgggggtcacgagaccttggggacgtcaggtggggtgctattgccctaaaccaagctttgccaatcccgacccaaccggggcatagtcagtcagtgagaacctgtgacatacctaaacaggagagctccttgcagtcaaccgataaaagaacaaagaccacaaagcatggaggcttgtgtggtggctggccaactatggatcttgattgatatgtggaatatggcctctggtaatcgattaccaggggtgtgtaatcgattacatggcttacaaagaagacaggaagttaagatggtctctggtaatcgatcaccaagggtgtgtaatcgatcatccagcctataaatggggacagga

SEQ ID NO: 187443 - DNA, 314 bp, Glycine max
  unsure (1)..(314): unsure at all n locations
gagtaccacagncaccgctttaggagcgctgtacaccaccaccgctctcaagccatcaagggatggtcgtttctccgggagcgacgcgttcagctcagggacgacgagtatactgattttcatgaggaaataaggcgccggcggtgggcaccactggctactcctatggccaagattgatccagaaatagtccttgagttttatgccaatgcttggccaacagaggagggcgtgcgtgacatgatgtcctgcgttatgggtcagtggatcccgttcgatgccgacgctatcagccagtttctgggatatccgat

SEQ ID NO: 187444 - DNA, 463 bp, Glycine max
  unsure (1)..(463): unsure at all n locations
ttaagtcacctgaggcatgcaagctntacagcagaatttagtaatgacccactttctatatttaaaataacttaatgccattaacctagggaataaaaaaaaaaaacttaatggctgagtgtaactgaaatggtggcaagcaaaagtcacccccaacagccaacaagtcagccaccatttggtctcccaaaaggctgatgcctaggttgccaattgggcccttattacaacttgaactaaacctaactaaagcccttttaattgattaacccaaaacatatttttggtcagccaactttacaaggattgggccattatttagacaaactaaacactctaaaaattgagacaaagtggtgtcatttagtcctcctccatgtgggccatgatacaactcacaaccttggacttttctccttgaaacttgggcttgtattcaaatagtatggacagcacttgttga

SEQ ID NO: 187445 - DNA, 341 bp, Glycine max
  unsure (1)..(341): unsure at all n locations
agcttaacacacagtngcactctattgttcgttctttaagcggcaacaccgcaaggatttacataacattttcctgaacaatagctctatttctgaccatttctttcgaatccaaacaattattgattctctctcgtccatcggagaacgtgtgtctaaatctgatcatgttgacattgttcttgatggtttaccagatgagtttgagttgctgccactcttgtgagcgcgcaagttgagtgctgcctattgatgaagtcgcaactctcctattggctcatgagactcgaatcgcttgcaagaaatcacttgcctcatctgtaccttccattaatctctct

SEQ ID NO: 187446 - DNA, 391 bp, Glycine max
  unsure (1)..(391): unsure at all n locations
aagcgaatcttattttttatgttatgcgcttggatttgagaaaatttggtatctgttattgcaggaaccacaaaaatatgcaaagggacaagagccaagatggatccatccactgcttgttcctgaatgccttttacatctcaaaacattctgcctaagagagtatcaaggattggaaactgagctggattttgtagggtatattatgcaaaatgccagagtgttagagacaatgacaatctacatatcaagttccttaggttcagaggaaaagctccaaattcgcaggcatttatctatacttcaaaggaaacttgaaacctgtcaaatngtattccattgaatcttatgtcttagaggtatatattttctttctttttgaaacttttat

SEQ ID NO: 187447 - DNA, 457 bp, Glycine max
  unsure (1)..(457): unsure at all n locations
actaagctttgggtcttctagtattaaacagagcccatttgagttttatctgttattacacacccggataataatgaagaatcaaataggtcacacgaagtgctataaaaaatcatgtatacaaaaagatagagttcccatggctcaaaatatctatgtgcccataatacatagcaaattattgtatttatactttttaataatgaacagttgttgtggagaagtaagataaaggaaaaatagtttgtacatcacagtgatgaatgagcatgcggttattgaaaattatgaaggtattgagggttatgaagtgttgtagatgatttatattaccttcaagagagagaagacattatgagtaatgagaaacagaatcataagaactatggaagtcaagatntttcgttggattggttgatgtatattttctattgagacgtccgatcacatctatact

SEQ ID NO: 187448 - DNA, 435 bp, Glycine max
  unsure (1)..(435): unsure at all n locations
agcttccatcaagtggtaatcagagctttgttctttctgtggnngttcttaaacctccattaaattttttgctttaccttctcttccattgttgtttcttcatttntctccatgtatctcctcacatgtcttgtgctaaatgttgttaacatgattctttagattttccaccgattaaacttgctatagaagctagatttgattttctatggttcaaatttcttgttcttgttcttgaaccatgaattatgttgagtttaggttcctttgagttttgtcttgttattttttttggctgaaacctaaaccataaaattcttacaaaaatattaaattagaagaaaacctcaaaaatctagagtgacttgtcacctattgtagtttgtcatagaagtctgtctaatcataaacttgtccataagatttctatgtctg

SEQ ID NO: 187449 - DNA, 316 bp, Glycine max
  unsure (1)..(316): unsure at all n locations
gacacataaatactcagcttcaaactntgacaagaatgaagctctgagaccacttgttatacaagcggcctcagatatcttaagaagggggggggggggggtgaaatggcatatcacgcacagatggcacgaggaaaaatgccctcactacgaacgacctntgagagagcacatggctacaatctgaggggacattaagctaaccaacacggctggagaagaactatcaatccccaagaattccgcggtagtaaggcaagactatgctcacaatcagtggcacactgggacagccacgcccgagcgcatactccca

SEQ ID NO: 187450 - DNA, 472 bp, Glycine max
  unsure (1)..(472): unsure at all n locations
gggaccttagagcacctgcggctgcagctatgctgcanaaatacaatagacctctcatctctaacagcaaaatcaaccacagcagaataattatgacctctccagcaacagatacaatcccggatggaagaatcaccttaatctcagatggtctagccctcaacaacaacaacagcagcctgctccttccttccaaaatgttgctggcccaagcagaccatacattcctccaccaatccaacaacatcaacagccccagaaacagcaaaaagttgaggctcctctgcaaccttccctcaaagaacttgtgaggcaaatgactatgcaaaacatgcagtttcaacaagagaccagagcctccattcagagcttaactaaccagatgggaaaattggctcacaattaaatcaacaacagtcccagaatttgacaagctgccttctaatcttgtcagaatcccaaaatgagagtg

SEQ ID NO: 187451 - DNA, 345 bp, Glycine max
  unsure (1)..(345): unsure at all n locations
tttctgagtcgngaagcgcacctctacgttgtgggacttcgaatttcaggtatgggtggacttcttctcacatgaaattcgtgggtattgggtttttgggagatatgatgggtagttctactaggtttatgccttatggtagttatttgtgaaggaatttgttgaaagcatgctaaacttgacatgtttaatgtgagtaacgctacccattctgttttagggtttcatgatgatgctttgtgatgtttgtgtgctgaaatttgtggtagaaaactggtagagatgatggggagagttaacctanggttaaatgtgagaatggtagtgatgtgagtggaaaagtgt

SEQ ID NO: 187452 - DNA, 354 bp, Glycine max
  unsure (1)..(354): unsure at all n locations
accttaagncacctgcggcatgcaagctttgagtttcaagcgccaattttcnttttttttagtccagtcttcttctggcttcaattcatcagagggctttccttctgtgtccagcatcttgggatgttcccagcctttgatgacagctttccaggttctgctatccagtgatttgaggaaggccaccatccttgctttccagtattcatagttggctccatctaagattggtggtctgttcactggtcctccttctttctccatgttcatcagaatttatctccccacatctcactctgagatttcgagtgttggctctgataccaattgaaattctgattccaggggacagat

SEQ ID NO: 187453 - DNA, 448 bp, Glycine max
  unsure (1)..(448): unsure at all n locations
ttcttaaacannaacaaggccggcgtttctttttcaaataatttctcctttcattaattatcatttgatttgctattttttcttccctaaggtacgattatatgatttgtcttatttttctaatatatcttttctttatttgcaggtgcacaaaaggattcaaaggaaattctaaaaataataacaattctctcatgttataaaaataaccttactcattcataccaaacatcttaaattttaactaaaacaatattttgactaanatcatattaaatcaaactctaattacaatgattcatatccaagatattacagttaaactataatgcttatacaagtaacaagaataatagcatataatttgcattaaatcatccaaatattaaataatattttacattcctatctattactaaactacttgatatagaacaattaagtgtcg

SEQ ID NO: 187454 - DNA, 445 bp, Glycine max
  unsure (1)..(445): unsure at all n locations
agcttctggtgggacatcttgacttgctttctcttctgacattcaccacagattctgccttcttctattttcagatagggaatgcctctaacagcacctttgtcaatgattttcttcatgcctcttaagtgcagatgtccaaatctttgatgccatattctgacttcatcttctttggaggatagacatgtggaggagtagctggtttcttggggtgtccataggtaacaattggcctttgatctgttgcccttcattagaacttcactcttctcatttgtcaccaagcattctgactntgtgaagtttacattgaatccttcatcacacagctgactgatgctgatcaagtttgcagtcagtcccttcaccagcagtactttgttcagactaggaaagtcatcatgaactagctttcccattccaatgatcttttctttagagc

SEQ ID NO: 187455 - DNA, 369 bp, Glycine max
  unsure (1)..(369): unsure at all n locations
tcttcactgganaattccttcccggattggcgcttatgctgttatnggagatggcggcaggacaagattgtacgggaaatgagttatgtgtgggagacctttatggttgagcagacaacctttgtttgattgtgagtgtttccaacattagccgagaagctnggtgggtgtggtgaatattggtaagtggggttgtgaggggtttgcttgggtttacgccatctaggagttgaagttacaacataggtgtctccgtccttcttcttggcctcgcttgctccaaatctttattgcttgtgctggcgggagcagcataatcaaactttccccttctcaagcctacctcaatcctctcgcccacaaatacca

SEQ ID NO: 187456 - DNA, 350 bp, Glycine max
ctcttgagggctggtctagaaaccttgaagcctgttggtaagcaagttaacccttcactctagccttgttcattcttcttcatcacttgaattttctctcatgttcttgagttttgttgaagcttgttttttactcaagagacttcattcttggttgtacctttctctttcacatggagactacaagaggtaaggggggtctctccaatctttgaatcctaaccatgtgatgcatggaaacttagcttcaaaaatgtagttgtggtgttcttgaagttttcgtgcttgctgccatttcttggaactatatgctaggctatttttttctttgaaatttgatgccaaatatg

SEQ ID NO: 187457 - DNA, 355 bp, Glycine max
  unsure (1)..(355): unsure at all n locations
acagagtggtacctggagatatgtcgcgggggtcaagagacttggngacgtcagtggggtgctaatggccaanaccaagcttgaccaattccgacccaacctangcatagtcagtcagtgagaacctgtgatgtacctaaacaggcaagctcctggcagtcaacagataataggaacaaagaccacaaagcacggaggcttgtgtggtggttggccagctgtgaatcttgtgtgatatatgggttatggcctctggtaatcgattaccaagggtgggtaatcgattacaaggcttaaaaatgaagacaggaggctaagatggtctctggtnatcgattaccacagggtgtaatcg

SEQ ID NO: 187458 - DNA, 456 bp, Glycine max
agctttgcacaccgaaatgttgtcatatattatttgatccaaattaaaagttttctaattttcttatcaatagaatttgtgacacataccgaataattgatttaatttcatatgattgaagcttgtgtaatttttatacaactctcaaatggattatgaacctccattcctcgagacctacaaggcccttgttcaaaaccacgtcgatgattcaaagaatgactcctctttggtggagagatgtgaactaccagtgatcgatcttggcaagttcaactacgagagagacgaatgcgagaaagaaattgcagaagctgctaataaatggggtttctttcaagttgttaatcatgggatttcacaggagctgctgaagagtcttgagtttgagcaaaagaaattgttctatcaaccatttgtgaataagtcctgcaaaattaatttctctagtttatc

SEQ ID NO: 187459 - DNA, 353 bp, Glycine max
  unsure (1)..(353): unsure at all n locations
tttatcatgtccatgcaaaaacatctaaattcatttggtatttgggaaagtcattcattgttnttcattctcaatgtttccaaaaatccttttgttatgctctgatctaatcaaaagtaagtttcaaaaacactggttgttgattctttccaaagcatgttatgtccaagaaaaaaaattaagtcccaaaaagagttatatataacctataactatactaacataacataatatatcagagcacgtgtaaatcagtcaaaaacacaaactcgcataagtttccaaacaaaaataaaaaatagtaaataaggtaataaagtactttaaaattaatacagnagcgataatgaaca

SEQ ID NO: 187460 - DNA, 419 bp, Glycine max
  unsure (1)..(419): unsure at all n locations
cttaagcacctgcggcatgcaagctggtagcaaatgcaaacggcaataacgttttacttgtatgttcgattgagtcacgtaatacatcgaaacgctcgaaattgaaaacagaagctctgtgcaaattcaaacgacaatacattttaactcggatgtccgattgagtcccgtaatatatcaagacactcgaaattgagaataaaagctctgaacaaattcaaacgacaataactttttactcggatgtccgattgagtccagtaatatatctagacactcgaaattgagaatagaagagctgagcaaattcaaacgacaataactttttactcggatgtccgatggagtcccgagcgtctcgatatattatgcngcctaaatggacatccgagttaaaagttatgacacatttaattgct

SEQ ID NO: 187461 - DNA, 458 bp, Glycine max
  unsure (1)..(458): unsure at all n locations
aactcggatgtccgattcaggcgcataatatatcgagacatantatttgaataacagaagctctcgagagattcgaatggtcataacttttcacacggatgtccgattcgggcgcataatatgtcgagacgctcgatattgaacaacggaagctctcgagaaattacaatggtcataacttttcactcggaggaccgattcaggcgcataatatatcgagacgctcgatattgaacaacggaagctcccgagaaattcaaatggtcataactnttaactcagaggtccgattcaggcgcataatatatcgagacgctccaaattgaacatcgaaagctctctagaagatcaaatggtcataacttttcacttggaggtccaattcacgcgcatcatatatcgagacggtcgatattgaacaaccgaagctctcgagaaattaaaatggtcataacttt

SEQ ID NO: 187462 - DNA, 421 bp, Glycine max
  unsure (1)..(421): unsure at all n locations
acctgaggcatgcaagctntcagatagnngngtttctatccactctttagattatttctataatcgactctnttcaagtctggctttggttactaattactcgaatggaataattccaatttccagctaataagttccattattattcaatttgtcatttccacttcacttattatattttcatcactcagcacaacacagaattttgaagttacttgtcaacaccatttatgacgttacgttacttatatgttagggggaaatgaattcagtgtagtcatgcaatcacacgatcagtgatttgtaaactatgtgataaacatcagatgattcacatatcaaatttgcgttttaaatctgatttattggataaagtgagtgactcgatcttcatctaatggtttaaactgctgactgctta

SEQ ID NO: 187463 - DNA, 353 bp, Glycine max
attgaaacacatagtatatattatatagtatatgatcaataagatttcattcttcctctaagatatttaggtatccatatttaaatactaattaccattagaaattggagtaaagaaagattaaattattatcttttaagttaccggtagggtattactctttcaagacagtgggtttaagcccctattgaagaatttcccatgaatttggctccttatgtgtataaacttaaaaagaaaatggtgaatataaatttataattatctaaatttaaagtcattaaacgtttgcattataaaatatttataacataatttgtgtatgtataatttatataaataattcattataa

SEQ ID NO: 187464 - DNA, 443 bp, Glycine max
  unsure (1)..(443): unsure at all n locations
agctngtagaatggctagacataatacatggttttgtttggtttggttcaaggataaaagggatgccccacattatttccatgacacaaatgcaaagatgatgatttggaaattttaagcaaaactggtcatgcatgcacctatgcggacactcaactgtcaaatttttatggtcatatgatgctagggctcaggattcatttcctctattttaaatcaacccaatgtttccaaaatatgttcttttatcaatttgtgcattcatcctagtccattttgggtactcgggaaaatttcacagcattcacccttcaggtgtacacacattttttcaaaaactagttatgatncagtgaatttttcaaagaanagttggaagtcatctcttttcaaaagcatgttggtttttaactagacaactattttcttttttttgttgtttt

SEQ ID NO: 187465 - DNA, 489 bp, Glycine max
  unsure (1)..(489): unsure at all n locations
gcttttacgccttgtgcggntntcctctattcgattagacccatgttgtnttttctaatgctcctttagaaatgaaatgcaagtgtcttaaatctcatttttggtcatgagaaattctattngtatgctntcattcctccttcatcgcatttttttatataaaaaaatgtgtgattgatctgatcggtttgggggtttgtttctttaccaagcgtgttcgcattttagtattttagtgaaaacttttagagacttcaatgtcttcagtctttacattttcaagacttcaatgtctccagtctttacatttcaagacttcaatgtcttcagtctttacatttcaagacttcaatgccttctgtcttttacatttcaagacttcaatgtcttcagtctttacattttacagacttcaatgtcttctgtcttttacatttcaagacttcaatgtcttcaatctttatatttcaagacttcaatgtcttctat

SEQ ID NO: 187466 - DNA, 402 bp, Glycine max
gcggcgcctcaagacatatctcgacagaatgatgttccaccttacagacacacaaatgatggcaactttatgattaaatccttttacaaagcatttgtggctcataaagatgataatggcctttattacgcactatatgaaagctccgatggcctgaaagaatgagagaattcattcatggaaagttgatagacaagcaatgctcaccaatgaatcaagatatagaaagggtctaacatatttgaacttgtgtcctctttgtcaggagtcgaaagaacctatcactaatgtccttcgcgactgcattttttcccaacctgtgtagagcaaacttcgaatgaattgacaacatctcaatctttcatgaacaacttctcgacgtgatgcattgaaccatcacca

SEQ ID NO: 187467 - DNA, 264 bp, Glycine max
tgtggcacgttactgtgtagacagaacgtgtgaggataacaatcatcttctacaatgtatcttcaaagacgtacatcttgccagagttgccttgtgctcataccttacattataaagaatgtcaagacaagacaattcaaaactttcctcttgcgtgctaaggcatgaattgcttactgaaccatggatgctaccctttgatgatgatcgacgccgtaccctaatcaaataaacatgaatatgcagtaactaggaagtgatcct

SEQ ID NO: 187468 - DNA, 396 bp, Glycine max
aaatagtgagttataagataaatggttcaatcagggagtcaataattgattcggtttgatccgatatatattaaaaaaataaaattatatataagtatataattcagattatttgtgtaagagaaattcttttatacaccaaaatctaaaataactattaataataacaagatatcaaaatggcgtggtagagatagttttgttttaaaccaaccgggtcggactagtctaactgagattgggtgacctaaccgatcaggttgtgttgggtcattccaaattaattgtgtgatcgatccaataatgaaactgactcaattaaaccatcatatcccacttgaaccaatttaatcagctcaattacatcgagtcttacaactatgatttaaatatata

SEQ ID NO: 187469 - DNA, 358 bp, Glycine max
ctaagcttatgtgaataagaccgttcaagaggaggattattttgagatgacaaagctcaaagttagaacactcctgatacacagatatgatctaagaatcaagaatgagttaagatgaatcaagtcacttcaggatcatggaaagtgattcagaataagttcagatcacgttcagaatctgattctgaatcacagaaactcctcagatagtttaaagtttttaaaactgagtaccatgattttctaaactttccaagagtttactcttgtattgataccaatatgtattgatccatacaaaggtttaaaagctcactgattacactccattgttcaaagtatatcatacatgattgta

SEQ ID NO: 187470 - DNA, 423 bp, Glycine max
  unsure (1)..(423): unsure at all n locations
agctntcttggaagagaggcattaatatcntttcgtctctggagnatgcctccatctttcgacagtacatttttaggtggttcttggggcaagtagtccccctgtacttatcgaaatctggtaccttgaacttcggggggatgatgacatcaggcactaaacacaactttgccatgtccgcgaatgggtaatcaattagtcccttagcccctcctcgatgagatccaatttctcccttccatccactaccggaggcagtctccctatggggaagtgtaaaggttgcagcgggcgctgttgagggccccccgcaacattggcttgaggcataccactacacaccggaccctcgacggtgaacatagggtatggttcaaagttaccctaaacatgatcccgatgctcttcacgggcgtcccctac

SEQ ID NO: 187471 - DNA, 419 bp, Glycine max
cagttatgtgtgctggagcacttacatagaaaatatatggcttctaccgactatgacggagcggcacacatgtgggatgtagacactggtcagcctttgtctcaatacatggagcaccaaaagagagcttggtctgttcacttttctttgtcagacccataagagagcttggactgttcacttttctccaatggtgcgtagatggtatgctgattggtctgttcctaacatatggctttcaaatttgaaatgtccatgtgggatgactggcttggtgaatagaattcaggagcagatgcaacagaccaacaatgttcctctcaatcttaacgtgaataagcctgtgagggttaagcttggtaagatgaagctcttgaaagtcaagttgagggtcagttgtagtggttatagctctacta

SEQ ID NO: 187472 - DNA, 464 bp, Glycine max
  unsure (1)..(464): unsure at all n locations
gtcacctgaggctgcaagctaaaggacactcaaccgagtgtatttcnccttttgcctacacnccaaagagngcgncagggcctctccctcctgatttaggtccaacccagaaaacattttagcacacagactctatctatgaactgtacaaaacacacgactcctcaatagttctcaaaataattttatctcgtcacgcttgtgattaaactcgtcgggcccacacagttgttcctatcacaatactcattgcccttaaagggtcttatagtcgtgtgattgtacgattcatagctcacaactcaatacacacaacatctcaatgcacatatatattacaagtcaatacatacttaatttatcacatacactcagtctcaatgacaatggtataatcccaaagtagcatgttatcacaccctacgaatcgtatacactctacctatgaaccatgcaatacacac

SEQ ID NO: 187473 - DNA, 240 bp, Glycine max
catgtcatagaaccctcctcacacctcattgcaaaggtacaccgatgatggtgctatatgctgtgtgatgactacgggttgcgtcaccctatgcatgggtccctcctacgcttttgggctaaatatttaaaatatagaaaagccttcaacctccaacttcatcttcacctttattcaaataatagattattattctagcttttttaaaccaaaagtatatgatattttttatttgacaac

SEQ ID NO: 187474 - DNA, 341 bp, Glycine max
  unsure (1)..(341): unsure at all n locations
agcttaatagaacaataaaaggaagaattttttggtttatcattagagggttntccttccaggttcttttatctgcttttctttcttattctgcatctcagtctttattttctgttagtctttactccactcgggagagggtaaagcctaattaagggtaaggaatgattgcgtgaatctgttttaagggttagttcactcaggagagggtaacgcttattagaacaataaaagaaaaaaatcacagggttagcattgacccgatgcccatactttagcaaacatatagaaattaatcttaatgcatcttagttattgagtctttgcaaagggcatttgga

SEQ ID NO: 187475 - DNA, 389 bp, Glycine max
  unsure (1)..(389): unsure at all n locations
acattctaacttccttcgagataatgcggcaagcttggtggatgcttgcccaaagtgatctcataaggtgtcttccttgtgacggagtgagtcgatgtattgtatgaccactctgcccagatcaagaatcgtccctatgtagacggcttttgatgcacaaaggctcttaaatattgctcaataacgcgattcatggcctccgtttgttcgataaattgaggatggtacgctgagctcattcggagcttggtaccactcattttgaatagttcctgccagaaacggctaacaaatagtgtgtccttatcggagaccagactgtgtggcatgccgtgaaactngccgtanatatccatgaacaatagagcaacgtccgaagctgtgtgatg

SEQ ID NO: 187476 - DNA, 383 bp, Glycine max
  unsure (1)..(383): unsure at all n locations
ngcttatgctgcaaatattgattatatttcttttcaacctcagcagncaaatcaaccacagcagaacaattttgacctttccagcaacagatacaaccctggatggaggaatcaccctaacctcagatggtccagccctcagcaacaacagcagcctgctctttccttccaaaatgctgctggcccaagcagaccatacattcctccaccaatccaacaatagcaacaaccccagaaacagccaacagttgaggcccctccacaaccttccctcgaagaacttgtgaggcaaatgactatgcaaaacatgcagtttcagcaagagaccagagcctccattcagagcttaaccaatcagatgagacaattagttacccaattga

SEQ ID NO: 187477 - DNA, 359 bp, Glycine max
gattcatgtcgctgggaaacatatacaattagcatagcaaaagatataagaacctgctattggccaatatgcgatatctaagcctttgcctgccaagaccaacagcacctgaagttaccaatatgacttcatacccttgactgcttagttctttaagctgcaacaatttcaaaggaagcacaacttttagtcacatatacacacacaaatacatgaaaagtaaggaatatacaagatatagggttttgatgcccttatggtactggttaaggaatcaaaaggagaaaattttactctgaaattataacgagcggagatataaaatctgggagagaatttacgtatcaataaaaacttta

SEQ ID NO: 187478 - DNA, 449 bp, Glycine max
  unsure (1)..(449): unsure at all n locations
agctngaactccactcatctataaacctattatatacattngaaattaanaaagataatcatgtatatcataatgaatattaattaatagtgaataaataaggaatatacttacatcatcaacaattgaagtacatatatgttcaaatatttatcacctgatattatttcactaacatcgatatatgttaccaagatcgatgtagctacacctccaatcccaaattctatgccatcaaacataaattgtacaggcttctcataaatatcacaaagcctcctaatcagcccacgcaagggatcatctgcctccacattaaatgactntgtttcacgtgcaaccacattgtttggagtaagttgtgcatcctatatggttaataaaaataaaaatttaactgatgttggtaacttatttacgtctaatctatgattgtgtaattcatgtac

SEQ ID NO: 187479 - DNA, 351 bp, Glycine max
  unsure (1)..(351): unsure at all n locations
ngctctaaattacatngacgantgtatatattttatgaggttgatgccatatttgttttaagggtagcatttcttggtaaaactaactttccaaatgtttgccttcgtaggaatggccccgaggaagcttgcctcaaagaggtccaggaaggacaaggcggccaaagggactagttccgctcctgagtatgagagtcaccgctntaggagcgctgtacaccagctgcgcttcgaggccatcaagggatggtcgtttctccgggagcgacgcgtccagctcagggacgacgagtatactgatttccatgaggaaataatgcgccggcggtggacattactggttactcccat

SEQ ID NO: 187480 - DNA, 441 bp, Glycine max
  unsure (1)..(441): unsure at all n locations
aagtcacctgaggcatgcaagcttctaaactntatacaagaatgaagctctgttcttcttgttagacaagtggcctcagatatcttaagaaggggggggggttgaattaagatattccaaactacttccccaattaaaatctatttcactttcttttcaagttataaattcccttaataatgaacttcttaaatattaattcaattaaaacaatttgaatatgaatataaagcaataataaacaaaggagattaagggaagagaaagtgcaaactcagatttatactggttcggccacacccttgtgcctacgtccagtccccaagcaacccgcttgagagttccactatcttgtaaattccttgtacaagttctaaacacacaaggacaatccttcctttgtgttagaattccttacaacaaagacccacggtttcttaa

SEQ ID NO: 187481 - DNA, 431 bp, Glycine max
  unsure (1)..(431): unsure at all n locations
gtgttgtttntcaccttctcgctaagccaatctgttggttttgctagtgtccgctaagcgcaacactcatgggctaagcacgaggaagactctggaagaagatgagttgtacaggtttgctaagtgcagcgcttcagtccatccgctaagcgagaaaggcacgcgctaagccaaaattcactaatgtgcgctaagcggtccataattgcgctaagcgcacgagcacaaacaaggccacctatttaagcctgaaatcagattttagagggggagtttggactgggattcaaagctntgcatgactagagattctagagagagaaaggtccaagttctagagagntttgagagattntgctgtgtgaagatttgcagagactatagctngaagcangagccggtttgagagcttgagatgagtttgtgagtga

SEQ ID NO: 187482 - DNA, 426 bp, Glycine max
  unsure (1)..(426): unsure at all n locations
agcttcttatccaaggctcatcttgagggtgtttctctttcttccatggcttattccctagtggatgacgcctcctctcacctcttctcctttgtctcccgctgcatctccatggtggaaaaccaccattaaaggaccttattgaagctcaaagatccagcctccatagaagccccacaagcaagcttccatcaagtggtaatcagagcacaagagcttcatgtaggtgctccttaaacctccattaattttttgctttaccttctcttccattgttgtttcttcattntttttctccatgtatctcctcacatgtcttgcgataacatttgttaacatgaatctttagagttcccaccgattaaacttgctatagaagctagatntgattctccatggttcaaatatcttgttcttgttcttgaa

SEQ ID NO: 187483 - DNA, 378 bp, Glycine max
accacagagaggtacctggagatatgtctcacgggtcatgaaaccttgtggatgccaggtggggtgctatcgcccaaaaccaagcttgaccaatcccgacccaacccgggcatagtcagtcagtgagaacctgtgatgtacctaagcaagcgagctcctggctgtccacagataaaaagaacaaagaccacaaagcaagggggcttgtgtggtggctggccaacaatgaatcatgagtgagatctgggatatggcctctggtaatcgattaccaagggtaggcaatcgattacaagcgctaaaagtgaagacaggaagctaatatggcctctggtaatccattacaaagggagtgtaatcgattaccatgcttaaaaa

SEQ ID NO: 187484 - DNA, 322 bp, Glycine max
  unsure (1)..(322): unsure at all n locations
gtcgatctcttgctttctcataagggtgaaccctngtgtactagtacctatcaccttcagagggcttcacgccttcaccttcataggactacacgtccttaccatcagagggcttcacgccttcactttcagaggactacacgtcctcaccatcagagggctacacgccctcaacttcagaggactacacgtcctcgcctttagaggaatgcgcatcctcatcttcagaggactacacgtcctcatcttcagaggactacatgtcctcaccttcagagggctacatgctctcatcttcagaggactacacgttctcaccttc

SEQ ID NO: 187485 - DNA, 455 bp, Glycine max
  unsure (1)..(455): unsure at all n locations
gtcacctgaggcatgcaagcttcctcngggcttctaagagaagctntctctagatgattctntgagaagttaaagctttaactactaacacccttttaataactaaactcacctccttgaaattaattgcggataaaataacacaacaaatataattaaacatcaaacataattattaataatatatagatatatatcatggtgttacacatgaaggcaccactgatgtgaatcgattacaacgcttccttggtgcttataaattcaaatttcagaattcatgaaattgcaaattcgtctctcttgcgaaacccttaattcccaaatttctttctgccataacttactcatttcttatccaaatcacgtcccacagagcccaaaattcatcttttttcatcctctttcatttcaaccaattgaaatttcgaataagtctctcaaatggtggaacc

SEQ ID NO: 187486 - DNA, 446 bp, Glycine max
  unsure (1)..(446): unsure at all n locations
tctanactntatacaagaatgaagctctgatccacttgggtanctgtggccttagatatcttaagaagggggggttgaattaagatattacaagttatttccccaattaanaattctatttaactttctattcaagttataaattcccttaatgatgaatttcttaaatattgattcaaatagagcaatntgaatatgaatataaaacaataataaataaaggagtttaagggaagagaaattgcaaactcagatttatactggtttggccacacccttgtgcctacgtctagtccccaagcaacccgcttgagagttccactatcttgtaaattccttttacaagttctaaacacacaaggacaatccttcctttgtgtttagaattctntcacaacaagagaaccctggtctcttaatcccttttcagaataaagaagaagaga

SEQ ID NO: 187487 - DNA, 390 bp, Glycine max
aaataaaaacaatactataaaagatggaacaattgaaccttggaatctccaaaaaaaaacctaaccagttgagtaatctttaattcctggactgtttggttcacaagaataggggagtaaaaaaagggggatagttggaaaaataaatatatttctatattctcataattttaaagcatagagaaatatattataatctccttaattgaaatataataaatcttcttttttcttccctccaaatctcctatcactctatggtagcaaagattacatgagaaataaataatcatattttttgttaataatgtctttctttcactgcccttcatctccctttaacaaaaaaaaaatcttgttaaagtgactagcctgtttggaaataaggat

SEQ ID NO: 187488 - DNA, 371 bp, Glycine max
ctaagacatgcgttgctagtaaataatactagtattgaaaagtgaagagtttaaactctaaaggtaattgcatgaattaagtccaaatttcccgcatcatggtcgaatagagaaaaatgttacgtctttggttgcaagacattggcaaagagggtgaaccggccatcataattgaattgaacttgttccacgttattgaaatacaggagccacctctgcccctcttaacagtagtattgttaaaaataaagattcaaacagggcagtagtactcttaagatgtagccgcccactcgccctaataaaatcagtacctaataccctcgtctcacacgtgacttctcttatttgaccctgggcttatcatgaca

SEQ ID NO: 187489 - DNA, 339 bp, Glycine max
  unsure (1)..(339): unsure at all n locations
agctngatccactggatgcagagaatatgacttatntttcgggcttgcccctcatgtatcacaagaattatatgtaagaaagcacttgttaccacactaaagacgcttgtctcgcatgacagagagagtccgcaatcgtacgcgaatcatgattcactttgcccaaattacatactcttggcgacgcagattagcaagtgaggctaagaaatctatgcgagaacctctatagatgcggcatcaataatataattcgcatcttcaaagtctagagccaatggaggctgtggtgttgcaaattgcccgaaagacaatgggattaccatagggattcggaaa

SEQ ID NO: 187490 - DNA, 178 bp, Glycine max
aaaggctataactatttgacacacggaagccggatatgtgataagatgaggctaatgactactctatccgacgcaccgctgtcctgtgatgcggtggaacatgtgcacctgcgaaacatatcaatcctgaaagacccttatgaccttgaacgacttaccaaccggctagctatatcag

SEQ ID NO: 187491 - DNA, 401 bp, Glycine max
  unsure (1)..(401): unsure at all n locations
gcttcatgattatgaatcaagtggattcaatttgttttgatgatgacaaanagcccaagagaatgatttcaagattgaatcaacaagttcaagatcaagattaaatcaagattaatttcaagattcaagaaatgacatcaagatgaatcaagattctagagaagatgatttcacaagggaagtattgaaaagaattttttcaaaaaccaaacatagcacaattttgttttacaagaaaagtttttctcaaaattttctaagttaccagagtttttactctttggtaatcgattatcagttttgttgtaatcgattaccagtggcaaagtttgatttcaaaagcttttaactggaattgcaacgttccaattgattcttaaatggtgtaatcaattacaact

SEQ ID NO: 187492 - DNA, 380 bp, Glycine max
  unsure (1)..(380): unsure at all n locations
ctaagctttntagcaactgaacttgctggacagaaggctgttatggtatataattctccacatcattcaactcctgctgaatgttcttcatcttgttacacatgtctgctgcattntctttactccataatttcagtctagcttttaagatcttgagcttattttttaagacaaatccaccccacccaaatagctagttggcagcccaacagtccctcaccactttctggtactccttgttattgagccaagtatcaataaccttgaaaggctttggaccccagtcgattctcttagatttcataataatagggtagtggtcagagtagttcctctctagattacattgngagctatctggccatttatgcaatttatta

SEQ ID NO: 187493 - DNA, 438 bp, Glycine max
  unsure (1)..(438): unsure at all n locations
agctntatataaacatgtgagaatcaatcttttatgtcccatctgnnaaagggctggagaaaaagagtaacatggtggtgataaggaagaggtgcatttgcccgtaatgccttatgcatacggtagcggacaagatgagcttagtcaatttgatgatcagtttgaagggcccacaatagaattaaatccttctctgaagcttgagaaagaattgtagaatagggaagcaagacacggcacaaaatatagtgcatgatacgacattcgaaagtgaatgagccagcaagcaaacgacccttcatatcagcattttcattccaaaccattttacgagcatcatgactatgaataaatattttccagtcatcaacgatggtgccctcaaaaggacaccttgactacttaattttttcggggactanatacggactggatcat

SEQ ID NO: 187494 - DNA, 345 bp, Glycine max
  unsure (1)..(345): unsure at all n locations
tctacttatgtggcatggcgggcttccttcacctatangtttcaacgcgaactttgaccatggggcttccttcccgcaatgcttctattcatgtctgcctgagtgggcttatagcctaaaccatacttcccacgatatccttgagtatttatcaagctagttatgccgccgctgttttttcctaaacccatcccgggttcaaaaccgttccccaacataactcgggccatcattaccgctgcatcggacagacaaagttgcccaaagagggagtccaccgaggaaatgctgaccacctcacaagactgganagcagtttctaacgattcttctgcggcttccaca

SEQ ID NO: 187495 - DNA, 332 bp, Glycine max
cccatagcccaacaacttcccacgtgttttggacattttaacagctgaagataatatggaagctatctcaaaattgtcataacattaacaacaagtagaagagcacgtgactcccttggtctgaagcctaacacgagttagagggaaggttctaaaaacacacctaataaatgctttaccttgggtagaacttgtaattcatgataggttcaatttctagctcctttagtggtattttggattattttccatgaattgcgtaacttgattgaagttgactcccattgcagttatctcctatgatttatcatcactctatgtcacaggggtgg

SEQ ID NO: 187496 - DNA, 365 bp, Glycine max
  unsure (1)..(365): unsure at all n locations
gacactatgaaactaagcttctaaatagtttctcacaattgtatcacagagcaagtaatcttttatcatgggttaaacacaaagacatcaagagcactcaagtntatcaatcaattctcataaggacatcaatnggtacatataacacaataatattgcattcataatcataaagaanaattataattcaattaacatcctacaataaacccaaatatagttctctatggatccctacacatgttctcactaactcccaattgtgaataactcatcccttacctctgaacggactcacgtgttttcagccagcgatagtaacatttctagcggttccatgagaatcttccattattcctctgact

SEQ ID NO: 187497 - DNA, 412 bp, Glycine max
aaacataaagctgtttcatgttcaattatagaaattaagaaatcggcaaacctaaaatgataagggtaaccataaatatttgtgcgaaagaaagcttatccatctctaacaactatagtatcacccacaacgagggttattcttaatgcttagttgtgtactaaaacataaatatttgtctatatatagactaagtagtttatcaggaataagatataaactgtatcagtgcaatgaaaacgtctatgaaatgttaaaaaataaaaattacacggttaggtcaatggtcaattatgtgagttacaggtcaatagtcaattgtatgattatattcttaataagatgcaatataagtataaatacgacatacaacggttatttttaattattaataatgaaaaattcaatatat

SEQ ID NO: 187498 - DNA, 287 bp, Glycine max
ttgaacacttgcctggatcaaatgtttgtatcataccaaagtagacttggactaaaaattgaaaacttttgaaacaatgtcttgttgtttgaaatcttcatcttcctggaagcttgatctttttgatttgattcattctctgattgaatcactctctgtcttgaatcttgatctttcatgaactgaaaactgacttgactgtgctcatctgaatatttgactttgctatcactctgatactgatatatatgactgtttcaggtattggtattactgcgatcattcta

SEQ ID NO: 187499 - DNA, 471 bp, Glycine max
  unsure (1)..(471): unsure at all n locations
ggatccttaagtcacctgcngcatcaagcttataaaacaaattgttatttcattttcaatatgcatgtgaattaagaagcatcaacaagagttaagccaaggctattgtgcaagcaatcaatggggcaaaacacaccaaaagattatgatgatggatggctcaatctttcctgcttggttgcacaatcttctctaaaattctcttgatctccctgttagaaatttttgcctgtccattggtttgggggtggtatggtgtggataccctgtgtacaatcccatactttataagcaaggcatgcattgattngttgcaaaaatgggttccttgatcaccaacgattgctttaagtactccaaacctgcaaaacaaaatatatctgaccaaatctacaacaaccttaacatcattagttctagtgggcttggcttccaccctatatgaaacataattcactgcaaggagaatgt

SEQ ID NO: 187500 - DNA, 385 bp, Glycine max
agcttaaaattgaataaaacgtgcatatctgtttgtatctattccatatatgtgtaatcgattacacagggcaaattttgaattcaaattctaatagctgtcgtaaatcacttttggccactggtaatcgattacatcctctggtaatcgattaccagagagtaaatttcttgtataagactttttaacttaattatcttggccaaaccttttgctacttcaattggaattcccttcctatttaatataccctttctaagactctaaagactgtcttgatcatccatcttgaatatcgttaattgctttgtcttgaataaagctttgagacgcatgtgatctattggcatcatcaaaacatctgctggatcctatggctacaatc

SEQ ID NO: 187501 - DNA, 422 bp, Glycine max
  unsure (1)..(422): unsure at all n locations
cgcaagctgggtcgaggtacttacccgttgaagatttattaacgangaagaacgaatgaagaacgtcgaagaacggttgaaacctttgcgagattcctcacggaaaacgttacggaaacgtttcggaagcgcctcggcttagattttcttcacggaaacaatttttccaagcaaattcgaaagagagagaagtgccaaaggggctgaaccccttccttcttgccttcctcccctatttatagcaaaataggggaggtggttgccgcccagctcgcccaggcgagctcagctcgcccaggcgagcagggttgcttcctccagaagcaaccgccttctggaggaatattccggagggcccaagtgggcctgggtgctatttgcacccccatttttactaagtacaaccccctctggtggttttt

SEQ ID NO: 187502 - DNA, 405 bp, Glycine max
  unsure (1)..(405): unsure at all n locations
tgctctanattacattgatgtttgtatttatgggaggaggttatatgccatttttgctttaagagtagtgtcccactggtaaaattaactttccaaatgtttgccttcgcaggaatggccccgaggaagcttgcctcaaagaggtccaggaaggacaaggcggccgaaggaactagttccgctccggagtacgacagtcaccgctttaggagcgctgtacaccagcagcgcttcgaagccatcaagggatggtcgtttctccgggagcgacgcgtccagctcanggacgacgagtatactgattttcatgaggaaatatggcgccggcagtgggcaccactggttactcctatgaaccaagttgatccagaaatagtccttgagtttatgccaatgcttggccac

SEQ ID NO: 187503 - DNA, 451 bp, Glycine max
  unsure (1)..(451): unsure at all n locations
agcttcttattagtggccagtcagggatgaatttcctcctcacccccaccctctattttttaaattatacatgtaattnttagcctcctggctcatcattttgacttctacataaatttatttaaatgcaattatgcatgcttaagctttcagccgcacttcagatgttttctggatgcatcccttgcaagattgcatcattcatataaactgttacgtctacttgagggatgatgtcattttatagtctgtcaaatcaagtgcatgaaacatacaaaatggttttttccctttatccatatatttaaggcacaatccattcaaatcctagtttacatgtgtgtgcttacttcggagcatggctttctgaacaacattctnagttgacgaaagagtttgctactggcatnttaacatttgaatgttgaaattgaacagggacggtgtaagt

SEQ ID NO: 187504 - DNA, 394 bp, Glycine max
  unsure (1)..(394): unsure at all n locations
tactcagcttagcatgatgttgacccattcgaggatgnatatnnattgtaatttttatncgangaanaaatnnatatatatatatatatatatnttttttttacgtaaaattcatttggatagcattaatctacgatgaaatagattaagatatctgaaatctcaaatataaaaaaaaataaaaacgtatagttataaggataagagaaggaagattagttgtgaataattaagacagaaacatacgtggcagcttagggttcaccccaagtcctaaaaaagccctcccagccttcccccatttccccccaacccaaacgctgaacaacaaccacactctctacaaaattgatggtcccaccgacgagcgggtgccggaatcggaggccatgaa

SEQ ID NO: 187505 - DNA, 454 bp, Glycine max
  unsure (1)..(454): unsure at all n locations
agctntanaatntgaattaaaaacgttcaatatctgctggtaatcgattaccatccaagtgtaatcgattacacattgtaaaatttgaattcaaatttctaatagctgttataaatagtttcaactgctggtaatcgattacaatactcatttaatcgattacatgctttcaaaagtatttaaaatcattttaaaagcattttaggaagtattttggccactggtaatcgattacatcctctggtaatcgattaccaaagagtaaatcttttgtaaaaacattttagcttaaattctttggccaaacctcttgttgtttcaacttggaattcccttcctaagcctctagagaatatcttgatcatatatcttgaatntcttggattcttgtcttgaattaaccttgagaagcgcatgatcctcttgaattaaacttgagaacgcatgatccttc

SEQ ID NO: 187506 - DNA, 456 bp, Glycine max
  unsure (1)..(456): unsure at all n locations
acccaaaactcagcgtggaagcttgaaaagtttgaataatttggctttatatgtctatctcccttgagtgacatatgtattggatgttatcttggttgttgcatcttagtacatttgatatttgttttgcattgagcatcatcatagcgtgtgtgaagaaaagtttctaagttataaaaattactttagaggcaaaaactctttattttaattgattacaacctcattgtaattgattacaacaagctattaaagcttgtagagttaagtatcgtatcggtttaatcgattaccgatatctcataatctattacactattgtttgagacaatgactgatttatttaggagtctttgctttaatcgactaccaagtggattaatcaattacttctatctcgttcaagtgttctggngtgaacacgaacactctaatcaattacttacggtatctaat

SEQ ID NO: 187507 - DNA, 277 bp, Glycine max
  unsure (1)..(277): unsure at all n locations
agcttctccatgtntttgaaaaatggtttcctgttgcttcgttatgctntcgtaaaatttccgaaaatcttgggtaagcatattccacttaacattggtgaaagggaagagaaaaaagatgaaaatcaaatccgaaacacttccgtaacttttccataaaatacaaaaagggggggggggggtggggtgaacttaataattctggtgcgctcaaaaatcttcatcattaaccccttgggcggcaagcaccttccctttttntcctattaatacggga

SEQ ID NO: 187508 - DNA, 225 bp, Glycine max
tcattggaagtgcgcgaaacaggctttgtggttgaattagggatggcctttgtggataactgggtggtgggtaaagagaaagtttgttattggctgagtaaagatattgttgggttggtgggaaatttggccctacaggaatggcagtcacaacatgggtttctccctcatcctcaccctccttatttgccccacattctctcagcctcctattaggatgaacaa

SEQ ID NO: 187509 - DNA, 471 bp, Glycine max
  unsure (1)..(471): unsure at all n locations
ttaagtcacctgaggcatgcaagcttcttgctgaacaactgcttccatgtatgtntttctcactgacggattggtcatagtgtcaaccttaattgaaggatgcataatggtacaaaaacctgtaatcacaatcatttcatgtgaatatcaagtgatatatattatgatacacgtggcataagcagtatgcagctttggggtttactttgtttttttttttatattagtgtaatatttcattagtttgttagtgaggctttaaattcgtatcttaggattttgagatttattgttgtattcagttcaagtgttggttagatttggggttggaaagttcttaaggcttttgaggtatgcaagttatgttgtggtattcttcggttatgagtcatagttgtctcgcggactctntgtaatcttcctaaaattttggcactccttgcgctgtngtgttaagctttatcaatataa

SEQ ID NO: 187510 - DNA, 311 bp, Glycine max
  unsure (1)..(311): unsure at all n locations
tctttaatgttagatgcatatttcttttcttcaaatcattagattttaatgtaactacaattcctatgtaagtcttcatctacctttaattattggatcatcatccttttggtgaactctaagtgaaaccatataaaaaggaattcgatgtgaatggaattttcaagattgtccttgacaggacattatggctgcttataatcccttgaactntgttgtngttattatagaattccatttgaaattggaaatttagtagaacatctgacttgccaatgatttagtttccagatgttaaggtgctttactca

SEQ ID NO: 187511 - DNA, 382 bp, Glycine max
  unsure (1)..(382): unsure at all n locations
gcatgcacgccttgactagttcagaataaacaggtaattttagagacatatatgtaataagancggagttttcaaatgcttgaaagcattcaaaattctcatttgagaagaactccatatctataaattttgggtctataatggaatgagaggaaaagaagtttgtgtaccgtatacgttgttcctctgatgagaacaatggtccacagggaatgaagggaggaattggagtttcctgtgacccagaatgtcgctgacttcgacttgaagtgtctttccgcttcttcaatggttccgccatttgaggagttctttcaagatttcaatcggttcaatgaaaatgagtgaaaaatgataaagtttggggtttgtggggagtgat

SEQ ID NO: 187512 - DNA, 329 bp, Glycine max
  unsure (1)..(329): unsure at all n locations
acatagaccacagactcttgcacaggtgtagatttcttattcatggcnaggtgagtaaccatggtgaccgaggcatcaagttttccttttagctntttattttcagtagatgaagatgaatctgtggccacctcatggactcctctaaggacaatagcatcatttcttgcactaattgttgggagttggaagccatcttctcaatcaaattcctagcctcagcaggggtcatatcaccaagaacctcaccactggcagcatcaatcatactcctctctatgttgctaaagtcctcatagaaatattgaagaaagagttgctcaaaatct

SEQ ID NO: 187513 - DNA, 392 bp, Glycine max
agcttatcaaggagatacaatgtctttttagtttaggaataacagaaaacccaatggaagagctactcagagtttacaaattcaatgcactatatatttaccaaatgtcaaataacctataactataaagctaccttactcattgcgtctgaaacataacactttatcatatcctcatataaatcagctaatcgatgtatttctggtgcatcaggcgaatgttctaggaccaaataagcatattcacagaaagtgggagtttcaggagcaaagaatatagggtagtggagaaattttggaaattctgctgagagaaaaaacacacagcatagagagagaaaatgaagtacctacatagcaaattgcctagttcctcctgccacaactgtaac

SEQ ID NO: 187514 - DNA, 414 bp, Glycine max
  unsure (1)..(414): unsure at all n locations
gcggatatggtcttcgacggcgaaacgatcgatttgngttatatagaggcaaatctgatcatcttgtgttgataaatgcaaaaaaaaaaaatacactggggcatgtgaaaaggatgagaaggagggagaaacctatgttgtgactgccattcttatacgaccaagtttcccaccaacccaacaatgtcattactcagccaataacaactccttctcattacccaccacccagtcatccacataggccatccttataatcaaccacaaagcctacctaccgcacttccaatgacaaacaccacctttagcataaaccaaaacaccatccatgaaatgaattttgcagtgaaaaagcctgtagattcacccaattccattgtctatgctactcgctccatatctactgataattaa

SEQ ID NO: 187515 - DNA, 383 bp, Glycine max
tttaacatctctaacttaaattttttgcttatgcaacttataaacatcatgtatgaattataggcataaataatagtacaccaaactgtagacaaaattaacattacgcatatatcaaaccataatgtagacaaaattgtcattggccattatacaatagtatatcaaattatagacataaacaaaataaagaaatagaaccaaggtgtcattggccattagaaatacaaaaccataccgaactttcaaacctaattaaacataaaccaaagtcattgcccaaaaactatcaataacatagtagccaaaataacctcataatcccaaaacaatacaattattaataccaaaatatatttaaccccaactaaattgtatgtcac

SEQ ID NO: 187516 - DNA, 446 bp, Glycine max
  unsure (1)..(446): unsure at all n locations
tgaaacacttatctagccttatttctacaaattattaaactttcaaccttatgcaccanngaatatatttaatcatttgagaaaactttaactcttagaaaaagttggattttactcaaaaagtcattagcggcgacatatcaacaattccttgattatatcatgcaatagaggttcggaatgttctcattntctgttaatgatatccatatgcagctttcacgattctctgttgtagattaacatctctggctctgatgatgaatatgtcatgttaatcgtcatagagcacattctgttatttgaaagaatttccagtattgatggagaaaacaaagctcgtgttttcatcctcactttttgtcaaaaaaacattccanagtacattaactttattgtaaatgaaaatatgaanaatgtagaattatgaatgtgaaatgggaata

SEQ ID NO: 187517 - DNA, 421 bp, Glycine max
  unsure (1)..(421): unsure at all n locations
cagcaagcnncggaaggaaccggagcctgttattttataactataaacgaggcgtccaacactaaagattcctctaaagaaaaaatacggtaaaagatgcaactttaggaactaactccaggtaccataaggtgggataacatcttcatatgctacaccaacatggcataagcaaattacaacctttattgccaacttacggaactagaatgcaggaaaaaaaatgctaacgtggcctttaacgtcaacgatactgaagaggatagagttggacaatattcctctttctttggctctatgagaactgaaacaaaatgggattaccgcggccttatttcttaaaaataataacatgctcaggcaatcaaatattagataccttgaaaaccaacaatataaatattctctccatcaattccca

SEQ ID NO: 187518 - DNA, 470 bp, Glycine max
  unsure (1)..(470): unsure at all n locations
taatacannagaagggttttcctcagagttccatgtttgtattatttgcattatcgagcattgctagtgtatctggatgttgtcaggtaatttgatatcctttaggttcaaaggtaaatatttttcttctctaaatatttattaattgttctgatattatgacttacatatataggctgttaaattatttgcaggttacaattccattaggataacatgatgattgttctctttctatctcattcgtctcatttcatggagctgataaatttcttctagacacgatcttggatatttattcaactcttcaacagcaagttagtgttggttcctattcttttccattacctaatatcaatggcaacaaggaaacttctgaacttttataagagaacgatagatatctctgagcatttcttaaaagtttttcagtttagttatctggaaattctgtgatttacactgatgtc

SEQ ID NO: 187519 - DNA, 277 bp, Glycine max
cataagaggagtacaccaaggtacacaactttaggagttccaaataaatatgggacattagctgtaacatacgagggcacctcatatatacaggggaataaactccgtctcttcacccgtaaatatgaacttttttccatggaagaaaatgaagacatacaatgtatgttcatacgttgtcaaaccattcttaacgaactaagatccttaggagaatttatgataattatgaccacatggataaagttttataggtctatctaggaagtggagacta

SEQ ID NO: 187520 - DNA, 498 bp, Glycine max
  unsure (1)..(498): unsure at all n locations
ctaagcttaatggaggaagagaatgagagagaangagaatgttttatgtggcatgttattgaagngaaaacagggagagaagttgaactntgaagtttgtctctcaagattctcattcatcaaagttgccacaagtgttacacgtgcttctatntatagcctaggtagcttccttgagaagcttccttgagaagctagtgttacacccctccaatagttaagctcacccccatgccaaaatacatgaaggaagaaagcttccttgagaagcttccttgggaagtaagtgttacacctttccaatagctaagcccaccctcaagggaacacacacccctccaatagttaagctcaccccctccctccaatacatgaatatatcaaaagagtccctactacataggctactcataatgccctgaatacaggcttaaacactactataaggacccttatcttgatggtatgtcccttaattgacaacctaaatggcaaaac

SEQ ID NO: 187521 - DNA, 446 bp, Glycine max
gcttagcatgatcaacatctatctgttattcttgagggagggtgttgagattataactagtaaatactttacttgtaattagattagcttgcaaattacttgtaactagttagttgtagtcttgtttagtagtagcttgtatctgagaatataaatactttgtaacacacactttacaaatctatcaatcataatattttctcttctttcatcttcattctctatttttttctctcctctgtaactgaatcctaaccaactcaacagcaacattacttaataatcccaaatcatgtaagattcatattccaaatggtgcaccttaagctcagcatggttcaatgccccccctttttttttaatctttctattgtgaaatcactgaaatgtaaacgggtggtgtggcttagtgctcttacctggttaatgaagctgggtcccactga

SEQ ID NO: 187522 - DNA, 356 bp, Glycine max
tcaataatggaaaagtggcgcgtgattttttctttttgctacttatatcatcatctctgctttgcaattttctggtcctttctcttctcctctttgctgatatcctttcatggtcccaacctccctttcttagtgaagccatccaagaccataagtgtcacagattcctgcattggccgctatgtttacattcaccaactcccctcccgcttcaacaattactttcttaagaattgccagttccttactagaggcactgacaaacccaacatgtgtccttacatgcttaacatgggtttaggccctcagattcctaactctcaaggtcttttcttcaacaacacttgctatgccac

SEQ ID NO: 187523 - DNA, 448 bp, Glycine max
  unsure (1)..(448): unsure at all n locations
agctgagcattcaatatcctgatgagggtgttccatatgnnctcaagaatggactaatacatttgctgcccaagtttcatggtcttgcaggtgaagaccctcataaacatcttaaggagttccatattgtttgttccaccatgaagcccccggatgtccaagaagatcatatctttctaaaggcttttcctcattctctggagggagtggcaaaagattggctatactaccttgctcccaggtctatttcagctgggaccaccttaagatggcattcttggagaaattcttccctgcatctaggactattgccatcagaaaagacatttcaggcatcaggcaacttattggagaaagcttgtatgaatactgggaaagattcaagaaattatgtgcaagctgccctcaccaccagatttctgagcaactccttcttcaatatttctat

SEQ ID NO: 187524 - DNA, 416 bp, Glycine max
  unsure (1)..(416): unsure at all n locations
ntagtcaaacagaataatccgaaatgtttaagatttngtgtttaanaagcataacangactttctgtgattggtttaaagatacaatctttgcatatgagaatgcttcagaaacattaagaaagctagcagatgggcctaaaagaaatgttataacctggcaaggatacgacataaacaggtattcattntacacaaaagcacaagatgaaaaaagtacaatgcagaacagcggggtcaccctaagggctgaatctcaacactttgcaagtgtcaatgacgccaatccctgtgtagcttccatcccttactntgggttcattgatngaaattgggagcttaattatgtngaaattacagtatgtgttttcaaatgtaaatgggtngacagcaacaccggtgtgcgcaccgatgata

SEQ ID NO: 187525 - DNA, 449 bp, Glycine max
  unsure (1)..(449): unsure at all n locations
gcttacggggtacctcggagtttagactcttatctctatccgttatttgtcagccaattgtggagggaactcttcgaattaagtggcactcacctccgtatgagctctgcctatcacccgcagagcgatggccaaaccgaggtcctcaatcgtgttattgagcaatacctccgcgtgtttgttcatcatcggccacgatcatggggaaggctgcttccgtgggcagagtggtcccacaatacttcgtgggttgcagccactggcaccactccttatgagctgacctttggaagaaaacctcccaattttcctaattacctgcagggttcattttccattgctgccgtagatgagtngctaactgaccgtgaggaaacttntcgtgctattcgtaagaaattactaaagggccaggccttcatatagcctatgctgacactaacgacgag

SEQ ID NO: 187526 - DNA, 440 bp, Glycine max
  unsure (1)..(440): unsure at all n locations
tgcagaggtcggtggcagactcatgaataatggaatgtgtattggctttgtctcatacctccattacacttcagttgtacctcagcttgcttccctatttttattaattntgttcatgtttatgtgtgagttgaatcttccccgcgaggaaccaaagataaaaaaaattgtaaatatatgaaccaaaatgaatgttttaaactataatgactaaaaaaaaatgatcacaactataaggactaaaaggatagttaaatcaaaataaaataaactagtgcaaaataatggtggtgtggttagacacttttagtcctaaatgtctcgttgtagacatatatacctctacatatgtgtgcatttaccaccattagctggaataaaatttaaatgcanacccttctatggtatatatcctatantaggcattgtagtagtaaata

SEQ ID NO: 187527 - DNA, 415 bp, Glycine max
  unsure (1)..(415): unsure at all n locations
agcttatccttgggaatatgaagacatccgattttngtttgtagttattcctctttgacgctgcatatatatctgnttttattcgttacatgtatccactcataattgtgccactcatccaaaattgatgttacttgccacactaacagaattgtactgtgtcttcagttccttttcattttaaatacaacattgcatgatcgggctctttgaactacacttttagacttcaacttaagtaaatgaaaactacatattatgaaagttcaacaaaatgcgatatttttttatgcagaacaacaaaatgcaatatatccaagaagacgagggatagaaagaaagcaaaggaaagaaattaccaggttgccctacgataaagatggtaatcagaattcaagctcccatcatgattgaa

SEQ ID NO: 187528 - DNA, 482 bp, Glycine max
  unsure (1)..(482): unsure at all n locations
actcagcttatcgccctggacgtaggatgactgctgctgcctngtggtttataacaccctggtcatgtccgcgttgctggagcatgtgtcgcaatcaaacaatactttggaccggcttcaacgacctcctacacatcttcgtccatggctcctgaagacctggagtagctgacacaaaaaattatggaccagctggaggagttgatcacataaaaagtgactcgacaactaatgatatccttcaatcagatgcagtcccagtttcaatcgtatatgcaatcacaaggacttgcactgtctcctgaagttgaggttggtccttctgctgctcatgtcagcacanagaaaagttntgttgatccctcaacgcatgaaccagaaatgggtgactcagataaatgtgggctgtatgtcaatgaaaatactctccgtctggttgtccttggaagacttatgaanggtgacacccgtcacaacatcac

SEQ ID NO: 187529 - DNA, 391 bp, Glycine max
  unsure (1)..(391): unsure at all n locations
acctgcggcatgcaagctttgtcttgagggcctgtacctctatgtctttttcggatcttcaccctccatctccttagaggtcctcaaactcgggagccaatccaaaccttgtgcgtaggctttcaaccacctatggtaaccgccgatgggcccgttgctacttcccctaagttccttgtccttcctttgcaccatttctcatgccttgtggaccctctgaagcacctccgcgttggtgttattgaaacctcgtgcaataaaaggtgtgaggccttcctctgatggtgcccctctcatatggtaaccaagttgtcttatggtgaggacggngttgtaattgatgcaatccctcgtccccagcaagggaacattgtgaaattccccgcatgaa

SEQ ID NO: 187530 - DNA, 291 bp, Glycine max
  unsure (1)..(291): unsure at all n locations
cttggggacgtcaggtggggtgctaantcccaaaaccaagcttgaccaatcccgacccaacccgggcatagtcggtcagtgagaacctgtgatgtacctaagcaggcgagctcctggcagtcaacagataaaaggaacaaagaccacaaagcaaggaggcttgtggtggctggccagctgtgaatcttgtgtgatatatgggttatggcctctggtaatcgattaccaagggtgggtaatcgattaccaagggtgggtaatcgattacaaggcttaaaaatgaagacagga

SEQ ID NO: 187531 - DNA, 432 bp, Glycine max
  unsure (1)..(432): unsure at all n locations
agcttaaatcttgacacatgaagaaggagtgtttntttatattaatataccagnccactaaggtgtatatacttggtttttttaataggagtacgttaacaaatcatacctagatattatcttaaaataaaccaataatataacttattaacacacttaaaatacaccaataatatacctagatattttaattaatatataattagagttatattattattattattaaatactccaatatttctatgataaaagcaaatgcactctgataatgaaaaatcacctctcttataaaatatgatctttctatgagtctagcatactatgattaatatataaattcttgtaattcataaatatcaaactggcaaataagttataacaatccagtgctcagttgactaagttacaccataaatgaatacttttcct

SEQ ID NO: 187532 - DNA, 501 bp, Glycine max
  unsure (1)..(501): unsure at all n locations
taagctntaccaccgtatgcactattgtaatctcaatcatgagttggattttatccgcaaagtggattggagggaaaatgtgacaggttgatgtctacggaaacatgagaaaagtataagagcaaaacacaggcgtattttgataagtctgagttattagtaaggccacaaaagagatacgtcaggataatttttaaaggaatttccaagccaagaggacaatgccttgatgcaccaaagaagtaatgcataaaagaagaccaaagagggattaaatgaatgaccaaagcctcaaggataaatagatagagcataatatcatcattcaaaatattacacggtaatattaagggtttcaaaaggaccatctaattcacatgataatctaacacaataaagaagaaaaattaaaaactatactatctttacgtggttcaatatgcctgtgcacatgaactagtggtacttcttgacaaacagtatccagaggtcacatgatat

SEQ ID NO: 187533 - DNA, 371 bp, Glycine max
  unsure (1)..(371): unsure at all n locations
atgttagttntaccaccgggacgtgactcgtaaagcaaaaaaggcatataacctcctcccataaaaacaaacatcaatggaaatntagaacaagcggacgcgcaaataaccttacaaacgacctccggcacaagacattctattaaccgaaaaaaatgcacccatatacaaacaaggcagctgcgtgacctagattatttacacgcacttccaaggcgtatttgcaacttacatcacacacaactcctcggctacaatcacatacatgcatactcaaagcatctgggggaccaaaaaaagccacgtgcacaactcggaattcaaaacctaacagacacaacctcaggagaacccgacaactaccaaaaagg

SEQ ID NO: 187534 - DNA, 405 bp, Glycine max
  unsure (1)..(405): unsure at all n locations
atggtgcacaacaagctntccacatccacaatgcgcgcataaacccaccatcctctgttgcccaccttcatctgagctcacgtactcccacgtagcccatatcctcgtttctctcaacaccgggtccccatcaatcctctcaagcttccacaacatccaagcaaaacaacattcaaacagcacaagctatcacagccaagcaaaacagagcataggcagaaaactctgctcaacacatcaaccaaaatcacagcttttctcacttaaagaccccagtaacaattccttcgatccaattcgataaccggtggatcgacccaaaattttactggaagtctatagtgtataagcctacattgtgaccgttgggatctactagcanacatccagaactcattctgcact

SEQ ID NO: 187535 - DNA, 380 bp, Glycine max
tcccggctcctccccctctgaggcggatagcaagctaggacgaagaacaccatccactcaaaggaccacatactcacacccctaacaaccatagctaatgggcacgccaaagataaacccttacccccaacaacaacgtgtgtgcactgaaaaaaccaaaaaaaaaacgcagggccagaagctagttgaacgctacaagagcaagcaagtccaggcccccaactcagaagcaactaacaaaagaaacaaggccacaggggaagccatagccaccacaaccagatcatgggtgtcaaaggccaaatccacaccaccaccaccacaccaccaccacaacaacaacaaatccagcaatgcaaaccacgagtcctctccagccc

SEQ ID NO: 187536 - DNA, 205 bp, Glycine max
caaaagaacgaaagcagcagtcccagaaaaatgcaagagaaaaagcggcccaacaaaacaacgcaacgaacaagaccaagcgaacaactcaaggaccaacgggacggagccaacccaacaaagacatccgaaacagcggcaccaaaaaaaagtatcaatggagccaacctaaaagaccgaagtcccaaccccacccaacacggaa

SEQ ID NO: 187537 - DNA, 311 bp, Glycine max
  unsure (1)..(311): unsure at all n locations
agctntagngcatataacatctatgaatggatttattatgcccaaacagaatacaatattatgaatacactccaactcatgaccatggtagccacgacataccagacatcccatgagtgttcggaggaaacaatcatggatatcctagtggaaggatcttctggccaattaacaggatggtgggataattaactcactaatgatgaaaaataccacaattacggtgcagtcaaaacggatctcaatggaaaagtcattaccaatgatgataataaggaaattctgacctatcatattcttatttacaatac

SEQ ID NO: 187538 - DNA, 425 bp, Glycine max
  unsure (1)..(425): unsure at all n locations
tctcaaggaagttntcttaagaaagcttctcaaggatgctctctagtctataaatagaagcatgtgtaacacttgttgtaactttgatgaatgagagtcttgtgagacacaactcaaagttcaacttctctccctttttcttccttcaatttcgtgctcccccctctctgtttctctccctctttcttttcctccattgaagcatcctctccaagcttcttatccaaggctcatcttggtggtgaagatccttcttccatggcttattccctaattgatggcgcctcctctcacctcttctcctttgtcttccgctgcatctccatggtggaaaatcaccattaaaggacctcattgtagctcaagatccagcctccatagaagccctacaagcaagcttcaatcaagtggtaatcagagcacaa

SEQ ID NO: 187539 - DNA, 405 bp, Glycine max
  unsure (1)..(405): unsure at all n locations
agctngnngcatcaagtgtccataatctcttttattatcatcccaacaaaatcaaagtatcaaacatccctacaccatgaaattaattagcttcaagttcccccatagactctttcataagcctttaaattaacccaaaaagacctaccttccttgaagacacataggaaggtggtaaccccaaagcttggtcatagcaaaccgctttgcatgccacacatgagttctcagcctcttggttccatccccagaagtgcaaaaaccattctctgggtttttctttagttcatatctgcgacgaacacaccgaggaagcttctttaggtgattctcctccaaacctgatgcggcaggggcttatcaattattcccagtttctgcctctttcttctgcacccttttctt

SEQ ID NO: 187540 - DNA, 411 bp, Glycine max
  unsure (1)..(411): unsure at all n locations
tgccactctactctaanattattgatttatactttaacacggaagcatanatatattcatcaggaaaacatcatagtggaaggaaactgtagtgctgtgatccagaagattcttccacccatgcataaagatcctgggagtgtaactattccttgttcaattggataagtcaatgtgggaaaagctcttattgacctgngagccagtatcaatttgatgccactctccatgtgcagaagattgggagagttagaaataatgcccgctcanatgactttacaattagcttatcgctccattaccaggccatatggagtaattgaagatgtgttggtcagagtaaaacattttatcttcccagcagactntgtggtaatggatatctctaaatatactgacatccctgtaaca

SEQ ID NO: 187541 - DNA, 328 bp, Glycine max
agcttaactaatcaaatgggacaagtggtgatctcttttattcaacagcagccccagaattctgacagattaccttctcaatctgtctagaatcccaaaaatgggagttccattacattgagatcgggaaagcaatgtcaaggacctcaaccagcaacatcttcctcatctgcaaatgaacctgcccaacctcactctactccagaaaaagatgatgacaaaaatttaaagagtaagttacctaacaatttctatgaaggtgaatcttccactggtaattctgattacaaaagcagcatatccctcttccattcccttcaagagcaat

SEQ ID NO: 187542 - DNA, 371 bp, Glycine max
  unsure (1)..(371): unsure at all n locations
tgcgtgagctcaattataggtgggcaactgtggatggtgtgcttatgcctgggcttgtggaaatgggatatttgttatgcgccatcgcccaatcgccacctagtaccacatatgacgggttccccataacccaataagctcggtgtgagaaagtgtggaagagtcagtcttccaacatttattagttgaccacaaagcggtacttgaggatatgtcgcggcggtcaggagaccttgnggatgtcaggtggtgtgctattgcccaaaaccaagcttgaccaatcccgacccaccccgggcatagtcagccagtgagaaccagtgatgtacctaagcatgtgagcttctggcagtcaaccaataaaggaacaa

SEQ ID NO: 187543 - DNA, 397 bp, Glycine max
  unsure (1)..(397): unsure at all n locations
agcttgcggactataccttctatcattcactttcgagnntctgnctcggcctggatttaaagcgggttgcagcaccggcttcgcttccctaaccgtactggaggcggttgccgnggctttatcttctatagttttctggagttttaacatgacctccgagatggaagccatttgatcttttaaggccgatagatcggccttcatctgttcctgcacgccctcttcattatccatttttttggatcgagtgttataggggtgccttggtgttttcttagttatgatgaatttcctaaagaaataaataaaggtgagtatgccaccaaaacatgaatatgcaaatgaatgatcggagcacttggatccacccaaagggttttaggtaatgtgatgagtc

SEQ ID NO: 187544 - DNA, 423 bp, Glycine max
  unsure (1)..(423): unsure at all n locations
tgacttggagttcttgttaactccggtgtggtacaaaaaatatggcaacgctcttaactaccgcatgagccaatgggcatagctaaagttatcaaggataaaggagaccattctaatatgatgctcgaggagaattaggagtacaaagaactatngtgtcaaatagagccttcattngaggagtatgacaatcttcccgaggacatgttctagatacaattcggtactntaaggctggtagtagtatgctctggtcttaagttttttttccttattttgatgtatattaagggatggtttctccaagtgtatgcattntgttgtacagctatgtataacttttcattactttagacactatgagttgatctgtattatctactgtacttactatgtacatattatgctgagacaatacatatt

SEQ ID NO: 187545 - DNA, 444 bp, Glycine max
  unsure (1)..(444): unsure at all n locations
agcttatctgcatcatagtatgttcttttcttatnttatactcacatgttctatctcttttttttgtctatttttatagcgcccaagctaaaaatatgattaatatctttatttgtactaaaaatgttctattttttatatgtatctttccttattaattatcatttttcctatatacttattatttatttattcatgtattaggcgtgtctttcctgtgaacatttgttcaagtgtatgagagagtattagaaagatgatttataaataataaaaaaacatttaaggaatctccatgttttcttcaagcaacaataattgctttctttaatttatggtagaggggattcaataaaaaaggagacaaaaaaaaaaaaaaacatagccaacactttaaatgcacgggctaacaaccaacacttatatttatctcatcttttttct

SEQ ID NO: 187546 - DNA, 448 bp, Glycine max
  unsure (1)..(448): unsure at all n locations
agctttacaaattcaaatataattctgaaatttcttataatattaatgataaaaaaattgtgaaaaggtttgcacggtccattatcatatgcgcagggtggcaaatctacaaatttgcactatggaaaacccatgtgacccaagctcttgttagccactttaatagcctatatcacaaaatggtatataagccaatgagccaaatgtgttctaggaaatgtgagactttgccttttgtaatacccatcaaaactacaacaatcccccacatattacaaaagtcttcaaaaatattttcaaaaggtttaaaaaggataaaagaagaggaaagaaagtgtcggacctggtgtagtaagctatgtgaaccattcttttactggtaggacttaacacatagcgtagttggtgtggcaagctatatgaaccaaaaacacttntagtatgtagt

SEQ ID NO: 187547 - DNA, 402 bp, Glycine max
  unsure (1)..(402): unsure at all n locations
tggcaaagatatntgtcttagcaaatntctcttttcttttgtttttaaagtaatagacgaagctgntgaaatcatggatgttctagggaagatgaaacacataattggccccttatggatagtctaactttggttgaatgctattttggctaatcacattactcttgaaagagacatcttgactggtatcgaacacaagatagaggaaactcaactgacttaccttacccacagtaaggaattctgcacttatgaatgttataggaagtacatcaaagcttttctcaatntcaatcatttcgatctcaatttggctccttttctaaattccaagctaactaggcaatcctagttaaaacaaagaattccttgtgagacccttggccaacaatcagatttagt

SEQ ID NO: 187548 - DNA, 460 bp, Glycine max
  unsure (1)..(460): unsure at all n locations
ttaagtcacctgcggctgcagcttaaagcacatgtggggaatttttgttatcttttgatngannncggtccctagtcattaaatcttgaatttgtccttcgtaacgaatgtgttattatttttnttgttgagaaagtgttgggtttcattgttggaatttgatgaatttttcaacaagatatccgaagtctattttaattcattagattaatttattgtaaaatcaaaggttattggtttttttattttttattgtaccctcttcttctctctttctttctccccgttttctttatcccctctggttctttgccgtgcttccaccttcactacctttgccgcaagtgatctctctctccctcgtagccttttccatctacaaaatttaatataatccaatctcttntaaaaaacggccgaacaagtccgtgggcttggcccgttgacacctcttccccac

SEQ ID NO: 187549 - DNA, 479 bp, Glycine max
  unsure (1)..(479): unsure at all n locations
aactcagcttacacctctcattcttattactttctcaatattgaaaaagttatactttttttaataaaaaggtcgnctgatctaaaaccccaaccaattatgaaatcccctatctcccacttcacaccttggaacgcaccattcttatagagagaggcgctgtcacatcttcttatttagaagttttctgcctttcctggacacatacaaaaccaagcacaaaactcagtcctaaacttctaaatatgtcaccatataaactacttgagacttatccttgaacattcaagtttagtcctaagggattcaattgtattcttggtttgagccttggtcatagtgcatgccaactggtttccagagctgcaattaactaaactaacttattattctccctcttgggttgcatganatataaacaatatatatctaagggatgttcagagatggtnataccttatctattgcataaccacaat

SEQ ID NO: 187550 - DNA, 433 bp, Glycine max
  unsure (1)..(433): unsure at all n locations
agcacctgggctgcagcttctccccaattttataatagggggtgatttgtttttanaagggntcagccccttaggcacttttctctctttcgaaattgcttacgaaaattgtttccgtgaagaaaatccaagccgaggcgcttccgtaacgtttccgtaacgtttccgtgagtgatttcacgaaggttttcgaccgttcttcgacgttcttcattcgttcttcaccggtcttcagtcttcaacgggtaagtacctcaaaccaagcttttcgattcattctatgtaccacgttggaaaccaaaaaaaagaggtaaataattatatattaataaaaaaatcaaaaaatacccctttagtaaataaagtgaaaaatcaattggacgttttctctttgggatttctcattcttaatcgaattgactaataactaaag

SEQ ID NO: 187551 - DNA, 456 bp, Glycine max
  unsure (1)..(456): unsure at all n locations
aactaagctgctgggggctgatcttgagcttaatggggcctnatttggttttttccaccatggagatgcagcggaagacaaaggagaagaggtgagaggaggcaccatccactagggaataagccatggaagaaagagcttcaccaccaagatgagccttggataagaagcttggaaggatgcttcaatggaggaaaagaaagagggagagaaagagagaggggggaacacgaaattgaaggaataaaagagggagagaagtggaactttgaagtatgtctcacaagactctcattcatcanagttacaacaagtgttacacatgcttctatttatagactaggtagcttccttgaaaagctttcttgagaaaacttccttgagaagcttctntgagaaaacttccttgagaagctagagcttagctacacacacccntctcataactaagctcac

SEQ ID NO: 187552 - DNA, 389 bp, Glycine max
  unsure (1)..(389): unsure at all n locations
taaaaaattattatcattaattattagaggatatcaataaattatctttgtattaattaattaaataccccttcagtttttgcattgtttaaggcttttgcacagtttaataaatactatttaatttatacaaaattgatttaactatccttaattatttattacttctttctgtctttaatataagacactttgaaaataattacacaaaccaataaatagttaattttatgatttttttaaatgttatcaatataccaattttaccttattactaatcattaacttgtcaagtattatgtatccctatcaataaaaagcacaaatactttgattattaataagagnaagtagtaaaaaaattatatacttcaaaagattattaaatg

SEQ ID NO: 187553 - DNA, 370 bp, Glycine max
aaaaaactgggactgtcctaaagattgaggctctatacatccttggagaatactaagatttgtcaaacttaccttgacgaacttgaaatgctttgctgcccaagagcaaaaagaaaatgagggctgatgattctgtgaaggagcattgcagctaaattacaaattaaccaggagagaaaacaagtggagaaatcaagaagaaaatttcaccacaagaacagcggcaacactacaacaaaagggagacaacaacaaggatttctcttgcagcctgggcaaatgggcatctctgtaaatgtgagagacccatgttatggaaagtgacaagtgtggatatggaaattgaaagcatcttacaaaaatgagctag

SEQ ID NO: 187554 - DNA, 376 bp, Glycine max
  unsure (1)..(376): unsure at all n locations
acctgcggcatgcaagctnnacaacctaagattagtggggacgttgctttctttgactctaaacaaatcanaagatttgttgatgtttgttttgcacacaatcttatagtcttaaagacgggtttacaaatgaagcactaagttttttctctcaaatttaccaggtgttttgatagttttgtaacttaagaagttacagagagtaagcttgaaaaagagaaagaatatggatttcaaattttgacttgtattctcgtgaccacaactcttcaaagccttcttgtttttatagccaacttcaaaaaggatattttgtctctaaatgggcctcatcacataattttttattattctcttactttcatgtcctttaact

SEQ ID NO: 187555 - DNA, 462 bp, Glycine max
  unsure (1)..(462): unsure at all n locations
actaagcttcttacaagatgaanagagaaatgaaagataggatgttcttttgtgaggatgtctccttcacctctagaaacctcacaatcactcanattctcatccaatactccgcatgataacttcctctttaatctctgttgtccctcaggatcttcacactagaagttctctccgccactcagccactcagaggaatacttccaagaacagagaacacgcaaaaaattaagaactcccttctatttctgattctaggatttaaatagtgttgctgatttttggtcgttcgctcagccacattctagttcacttagccaaattaagtggcatttggcttagcgcgcctcttctttgctcagcgtggaggtgcaagcggtgcgcttagcgagttgattcttgctgagcccatcatgataactcatatgcttccaggatcttctacgcgcttagccatgaact

SEQ ID NO: 187556 - DNA, 359 bp, Glycine max
taaaatcggatgtgggcccaacgatgtacactttactttacccaaagttgcataaccatacaaaaaacgtgtcatgttgatgcaaatcttgatatcttccaaactatatacatctataaattaatggaaaccttaccacgaaattaattcaagggttgagcaagaccacttgtaaaagcatcaagatgttttgctcgacaaacaaacttttgacgatgttccattgcgcattgaaacactcatcttacagaaaatgcaaaaggcttcttggttataagagaaatagtgttaccaagactaattcatcctcatcaggatatgaaccacatctgacttgtctatatagaaggaatcacttc

SEQ ID NO: 187557 - DNA, 371 bp, Glycine max
  unsure (1)..(371): unsure at all n locations
ataggtataggaatnatatctaataccaaaaaatattatagaaactagtgggtagattatgaggtacactaccacccactacacattacacgtcacctttaatcacattgtttgtctataacacttagttaaaatgttattacaaaattttgataaattcttgtagttaattataattgataatattactcatattntgatagtaagaactaaaataaaattaaaatataaaatatagggactaagaagaatactttcaaattatatggactaaaagagaattaaaataaaaattattatggataaagaactcacttttaagactatatggactaatagagaattaatatataattatcagactaaaatac

SEQ ID NO: 187558 - DNA, 340 bp, Glycine max
catagctaaagaagaaataaacttttttctttcttttttctacaattgattaaccaaaaaaacttgacacatttagatgtaacaacttacatgcttatgcacattaatgtttttttttttaacgagtacttgttaaacaatacgtgcgttttctaacgaataccaaattgtttgttgatcaattgcatctatgtttgcgcacagaaaatgagtgatctccaaaatgttattgtaagttattttgaacctgcaaacaggttcgggtatatatagaagctgtttacacttaccagttagaaatgcaatctcttactacctacttaacccgatagggtctgtc

SEQ ID NO: 187559 - DNA, 380 bp, Glycine max
  unsure (1)..(380): unsure at all n locations
actaagctttgcactcaatacccataacaaggttttgattcttagcttatcanaaccgaggaaagatcacacacatcccaaagtgaccagatgtccataaatgcatttaaacaactaaaaagtgaaaccggcatgtatacctaacatggaggaacacagattacggttgtgaaccaccttctggcccatccacacatgatggataccactcaaaaggaaatgactggtttagttatgcgctaaaacacctggcatctacattaatgttgtaataaatgggttgttcttcggaatatatttcaaagaccttttagttcgacattagagcgatgaactatgacaatgctgcagaacgtacatactgtcattaaatatagcaa

SEQ ID NO: 187560 - DNA, 406 bp, Glycine max
  unsure (1)..(406): unsure at all n locations
gagaagagacaaggttgattatgctgcttcaatgaataataagcctggggaaaacaaagagaataagaaggagggaggaacccatgctatgactgtcgttcctacatggtcaaatttcccactagctcaacaatatcaacactcagccaatataagttcttctcattacccaccatcctaccagccaagaatacgcaatcatccacaagggctgcccccaagtctgccaaaaatccgcttgctgcaatccgaggccaaataccactcttaatacaaaccaatacattgaccagggaaagaattttcccaaaaagaaacttgtagaattcatcccaattccggtgtcgtatgctaacttactctcatatctactcaataatgcaagggtnaccataatcctagcaaa

SEQ ID NO: 187561 - DNA, 362 bp, Glycine max
  unsure (1)..(362): unsure at all n locations
gctgacaggcggatcatgctgatatatatcaataagttaaatctgatagtgatactgttgtatatattaaactacattgagatttggcaaaagcaaaaagctattaaacattgtcttgtgttgcattctcattcaggaaacatgtttcaacttctgtacaaaacagaaatttcttacaataaaagaagacggcttctgttcaaatttgcctcatctgatctgtctgtgtctccattagcatgatttacaggtcattcaagtgacacgtgacagttaggaactcatccttcttacatggtatngtgagaccacccatcgtgtgctcatacccgaattctatctcagcttgattcaacatatca

SEQ ID NO: 187562 - DNA, 367 bp, Glycine max
  unsure (1)..(367): unsure at all n locations
agctngancaaatcagagncgatacatttatttcacttttttcatacaacnctcattcaagtcattcaaaacactcatttcatatcaaacaaaccactgatacatgattcaatcatttcattgttcaaacaagctttttgtacaagcagtaaaaactaaaataattggaatttgaatgactgaaatttatataactgaaacataaagcataaactaaataaactgatcaaaataaattgttcaaaatgcaagacaagaagataaagatcctgtcaatcctactgcgggtgatcctctgcatgctcattaagatccaacactggagcatctagtggatcctatacagaaggctgctctggctctgatg

SEQ ID NO: 187563 - DNA, 290 bp, Glycine max
  unsure (1)..(290): unsure at all n locations
attataccatgnaaanncacgcggcttanatttactctcagcacgattaatttgaattatacaatgatctatctaggtaattcacaccattacctatgttaataattagctaaaaatttacttcatttggtataaataaaatttctatttatgcttataagattactgtagacaattactagtcttttacccgtgcgacgcccggcttcatactcctatgtgaatattactaacacatgtgcaaagttcaataacgatgtttatttgtatgataataatgttgagttatg

SEQ ID NO: 187564 - DNA, 362 bp, Glycine max
  unsure (1)..(362): unsure at all n locations
ttaattcacctgcggcagcaagcttgaatcgatacacatatacttatattttttttctagagancnncagaaganattctcaacagtcacatcttttcatttggctcttgaatggccatcaaaggcctatatatatgtgacttgagacacgaatttgctaagagtttttagaacaaaaaggtcttatcttcttaaatagcaaaatcgttttatcctcttacaaagttccttagccaaaacacttgtgattcaataaggaattatttgagtgctcaaattgttcaatctatctctttcaagagagatatcttcttctcttcttctttattctgaaaatggattaagagaccgagggtcttttg

SEQ ID NO: 187565 - DNA, 339 bp, Glycine max
  unsure (1)..(339): unsure at all n locations
tctcagggtccacttggaccccatttttaccaactacaaaacctaagaaaactatattatctacacaaaaggtacacttctctatatttgcatagagggtgtttttcctaatgactgaaagaacttgcctgagatgtcctaagtgatcatctangctcctactgtacactataatatcatcaaaataaaaaactacaaatctacctatgaaatcccttaagacatgatgcatatgcctcataaaggtgcttggtgcattagtgagcccaaaaggcatcactagccattcatacaaaccanacttggtcttgaaagccggtntccacttatcaccccttt

SEQ ID NO: 187566 - DNA, 411 bp, Glycine max
  unsure (1)..(411): unsure at all n locations
agcttattgctaatcacaagttctattttngttagtgntgannncgcncataacgcncgccggacattngtcagaactgaaagttctaactctctgctgtaattattttgttgaacctaaggtatgcgtacgctgtagcatcagctttgcacggtgttcggcatattcttcatgataacttcatgctccaggtttgtttatctgtgaatggggtgttgcatctttacttgaggaagtaacatttatattaatgacatgcatcattggaatgttgcanccaccatgggactttgatgttgagaacaagtttataatccattatacttatgcatgtgactacaacttataggttagttgatttttctagctttctatttatattatgtaaggagcaagaatggcgtccttgat

SEQ ID NO: 187567 - DNA, 328 bp, Glycine max
tgtttgcatatagttcacatgccacagctcacagatccctattatgtttagtacaattaatgactccatgtccatggtttgaaaattgatatcaacgcttaaagcaattcatgtaattcagaaaccatcttctcctctgcacgatcataaacaacattaaagttagatttctgcactcattctatactctgactctctcttactcactttctctcctttctaaatctgagatcagtacaacatcatcactgtattttaaaaaatcagcacgctcatgaatctgtcctcaattatacaaaattaattagttactaatttgacaattgat

SEQ ID NO: 187568 - DNA, 412 bp, Glycine max
  unsure (1)..(412): unsure at all n locations
agcttcttgatcccatcaattttgtttttcctanttanaaganggaggcgccatttgaaaacagacgagcttgcaacgggtttgatctcgatgcaatcgaaggtagtgcatgaagcgagtttatgtgtagttgcagtgacgcgtgaggtttcggtgagcacacatacaacggcatccaaaattgtgcgacatgtgagacatggttttttgggtggagggagtagcaacgtgcttcatctgaggaagaaagaggggcacaaggtttattgcatgaactacaatggaggtttattgcgtgaactacaaaggtgatttattgcgtgaagtgtgaaattagaaatgaacctacctgtaatttttaattgatgtgacatattctaattggagtaacaagatgtgatcagacacattg

SEQ ID NO: 187569 - DNA, 351 bp, Glycine max
  unsure (1)..(351): unsure at all n locations
tttcttattctccgcaaaacaagcttaaaaaagggcttcctgtncgtgaaggcactcttagcgccattctcgcgctaagtgctagtaagtgagaattggcttagtgtcaatctcgtgcttagcgcataagagaaaactgtctcgcttagcgagctgcaaacgcgctgggcgcatgttggcatggaagaactctcttcaggcttatcctcatctgctaagccattggtgtcttgcttagcggtttggtctcgctaagcacatggttcaggcttagcgagacaacaactnttgcttcttcataatattctccttttcacctcgaattgaggtgaaatttacattaaattcata

SEQ ID NO: 187570 - DNA, 398 bp, Glycine max
  unsure (1)..(398): unsure at all n locations
aaacttaatgcacccctcttaagttattgaggctactcgttcaacaagtggtatcaaagccanaaaatgaagtgaggaggaaaagaagttagttcaatataatttacaagccaaaaatataattacatctacattaggaatggatgaatactttagggtgtcaaattgcaaaaatgcaaaaaatatgtgggataccttacaagtaacccatgaagggacaacaaatgtgaaaagatctaagataaatactttaactcatgaatatgaattatttagaatgaatcctaatgaaagcatacaggacatgtcaaagagattcacacacataattaatcatcttgcattcttaggaaacatctttccaatgaagatcttatcaataaaggttgagatgctta

SEQ ID NO: 187571 - DNA, 468 bp, Glycine max
  unsure (1)..(468): unsure at all n locations
aactcagctggtatctcttttactactaagaataccgggntgttacttctctgtggctgtcttactggnatagcttcatcctctaaatatattcgatgcatacatgtggatgggctaataccaggaatgtccgccagggtccagcctatagccttcttatgcttcttgagaactgacaacaacttctcctcttgctcatcagcaagggaggcagatataatcactagaaaactcttgctatcatccaagtaagcgtatnttaaatttgatggcagaggcttcaattntggtgtggtcggctggacagtggtagaaggagatggtttctcatcctttacctcataaagaaagtcagaggtatgtgtacttcctgaaacatggttagtcctatctgactctataaaatcaatctcaagaggtaaaacaccaccaccagacatgcaaacaatatcactctcagattcactc

SEQ ID NO: 187572 - DNA, 255 bp, Glycine max
  unsure (1)..(255): unsure at all n locations
catgctctaaatgaccaatcttgacgcggagggacatgtcttaanaaggctcacattgattaggaacatggctcaaatactccttgtaagaaatgggcaaacctcccctcttgaactacctattgagagtgaggctggctcacactcgatattggctcttttgttccgtatactggatattaattactgtttacccttacatgtcatttgcatattttgcgagcgcatgtgcgtgcttggcgggacaacattcct

SEQ ID NO: 187573 - DNA, 447 bp, Glycine max
  unsure (1)..(447): unsure at all n locations
aaactaagcttgnatagctgcatatacatattaagaacgcagctttttagttttatccannaganaaaaaagaacatttttaatacttagagaaacattcctcggcatataaccgtaggatgatcattcttatcaatgagtgcttcaacaacatgaagcatatcaccagcacgaatgggggagacaacatataacccaataaatcatataaagatctgtctctccattaattacataacaaaatctagaattcatcaatcaagagccatgacttgttactaaaccatgcaaaatatatcataactgatcggtggaatattcgccttcagaatcaattccatattaaaattatcaatcatcaaaagagattttcagaacaggatgaccatggttataatcgataagattcatctaaaagaagcatctcattctacatatgctcaacat

SEQ ID NO: 187574 - DNA, 411 bp, Glycine max
  unsure (1)..(411): unsure at all n locations
gcaagcttntccctatcatgtgttataagcatctattatctaagtaccagctncaaccttggcctttttctaccaaggatatttgcaacaggaacaatctaagactttggtacccaaatctttttgggcccataggcattagtacccttagacatttttttcttcttatggatgcatctaaacttgaaatttccagacttaccatagaagtcacatttgtctaagacaaattgtgacttagaagatgatgctcctttttctagtcttagaccaaacttatcatggggatgttgattgaatattaaaatcatggttaaagtgttagagctttccaaanaattcccaaagtcttttgtaaacaagtgatctcctttcttagttttttaattatagaggattcgtcagtcttat

SEQ ID NO: 187575 - DNA, 443 bp, Glycine max
  unsure (1)..(443): unsure at all n locations
tctgtctacctanatatgacatcaaggattgaagaacgatgttatcattaatctaaaaggaagataaaagaaaaacatttgttgagaaacacactgagttaagagagtccattcttcgtgatatacaaggtacttgtgagagattataacttcattgtaaatttactcgttgagtgttgtaaataatatttgattctatatcaaacttttgtttgtgaaagttaggagtggcctagtgacaaaacaatacttgagtattcttagattcagggggagtctaggtgttgtgctagtattggccttgagaatacttgtaagccaaaagtggcaggannaaaatacttttataattaagtttgattaatgggaaccctttgtgattggtaaggagaatagacatagatcaagttgatgaatctgttaaaaanagtattttactattc

SEQ ID NO: 187576 - DNA, 419 bp, Glycine max
  unsure (1)..(419): unsure at all n locations
tcacctgcggcatgcaagcttaccatgcctgngagcaacatgagncaattttttctcttttgcttcaatccgccgcttctgcttcgatgctttgcaagttcataagctgcacaaattcttggtcactatgggatagaattctcaattaatttcatgctcatacaatgcgagagcgaggcagctgcgtactgatcttcgccaaatctccttgaaggtcaatctgtttttgcaatacaaaacattgttgactctcttgctgctattggtgatctgatttttgtgaaagaacacagacatcattattgatgagattgaaacagtgcttcttgcacatgaatctcgtaaaaaaatgttgcttctataacattgcctcatttctactgctccttgaatttaattcagatctatcaagctaattt

SEQ ID NO: 187577 - DNA, 366 bp, Glycine max
  unsure (1)..(366): unsure at all n locations
gaagattcccgctctacgatccaatggtcctttcttctctctctctcttttcagatgttgactttatctctcttttttgtttaactccaggacatttcgtcatctntcatttgatttgtggtaggggttttctcatttcttgctttaaaatgcgtcagtttcgttattttacaatgtggatttcatggtaataagctccctgcttagtgcttagttcaattgccctgtcgttttatctgaactgagttcgtatgtgtacttctaattgtgattacactatcatgaatacataccagatataatttatttaattacttaagaaataagataaagttcttgcatgaagtgtatgggatatgaatttat

SEQ ID NO: 187578 - DNA, 256 bp, Glycine max
agagacggcaccgggggccggcaaaggggaagcggataacccccaaaagcaggagaaacagcgaccacccagacaaaaaagggcgaaaaaacagaacacgggcaccaagtgcacaccgaaaagaaggccaacaggcgaaggaaccaaggcgcagaaggtcgcgacgaaccggcgcacggcccccacgggaaacgcccactaccacagcggcgcaatatgcgcggaacagacgacggacgcaaccggccgggacgcg

SEQ ID NO: 187579 - DNA, 385 bp, Glycine max
  unsure (1)..(385): unsure at all n locations
ctgagcgaacacataaaanatgccacctccatcagcaaccacattggcagtgagcaaagaaaaatgcagaagaaaagaaattatcctgtaagtaagcagccaagcaggatgaattccgttaagacatgtactccatgcttcatactcataaagtgacccagccgtttctcgctgcctttctcttctctcattcctcgatttattgaattcttcatacttccatatcaaaaatgaagccaggcccatagttaataaaataaatcgtgcacagaggaagaacctccaattcaaccaattaactaaggcagattatcttgggccatcgtgtgccgccaattatggcttggagaatctgttaataataagaaactgatgagttacttat

SEQ ID NO: 187580 - DNA, 383 bp, Glycine max
gcaagcttgagaggattgatggggaccctgttttatagataccaggatatgggctacgtgggagtacgtgagctcagatggaggcgggcaacaggggatggtgggtttatgcgcgctctgtggatgtggaaaacttgttgtgcaccatcgcccgaccgccacctagtaccacatgtgatgggtaccccataatcctacaagcttgagatgaggaagtgttgaagggtgaaacttcctgcttttattgttgaccacagagtggtacctggagatatgtcgcgcgggtcaggagaccttggggacgtcaggtggggtgctattgtccaaaaccaagcttgaccaatcccgacccaacccgggcatatttggtcagtgagaacctg

SEQ ID NO: 187581 - DNA, 374 bp, Glycine max
  unsure (1)..(374): unsure at all n locations
ntctcgagagtcttctttgagaagctagagccttatctccttttatgcatgggttgagcgctaagtgcttgatactcacagcttancgtatgaccaaagatgcacttagcgcgaggcttgcacttagcgaaacgactggttttcagaaaatactttctaagttatttttcagtccctttctcaagaaatttaaacccttatatctaacatttaaggataagctgatatactccaatgtaaagattataaagcaagttccacatgatataatgcatgagaaacaaagataacacaaattaaaactgggttgcctcccagtaagtgcttctttaacgtcattagctngatgcttttacctcaatgggtgatatcat

SEQ ID NO: 187582 - DNA, 421 bp, Glycine max
  unsure (1)..(421): unsure at all n locations
agcttgcagagttcttcttcatcaaattctgttgctatcttaaaagttgaaataagctggaagaatgcctttgcttccaatgaatttccattggcagcatcagtatctgctctagctaagttgggcctccactcatcagcaattgctttggcatgctgcttggtttgagggttcagaaggtgatctgcacctggatcagcccttgccaataaggtggccatggcttccaaaattataatacaggatttgcgcatgccctgtagggaagcaccagatttatcttttagttgggaagtttcattggtggggtaaaacccctccagtaaatccagcaccaaacatgctggatcagttgcactttgtaatgcaacagaaatttcttcacgattaacaaaatttntttttttattctccacaatat

SEQ ID NO: 187583 - DNA, 384 bp, Glycine max
  unsure (1)..(384): unsure at all n locations
tcctcgggccatttcctgcgaaggcaaacatntgtaaagtttgttttaccaagggatgctactcttaaaacaaaaatggcatacaacctcctccaataaatacaaacatcaatgtaaatttagagcaagcttatgcgcatacttctttacaaacgttcacttgcacaagacattctcataactaagaaaaatgcacccatatacaatcaaggcaccttcgttacctagattatttatatgtacttccaaggtgtatttgttacctacatctcatgcacttccttggctaaatttacatacatgcgtactcaaagcattatggctaccaaaaattgcacacgtgcacattctggtgtttctaatacctatgcatatacaaacttt

SEQ ID NO: 187584 - DNA, 285 bp, Glycine max
atgatcctatctgtgatctatcatatcagaacatccatatcttgtcgccaccaaaatgaaagaacaagatagctcgaaatccatgaattggtcacatttctctgtctcaatcctattcaaaaaaacatctaaaaatttttaaaaaaaaagaagacagaaaattctattttagaaagacaacctgataattactgcctattttattcaagaactcaatactcacggtatcagacatcaatatccatttgtcaccaccaacctattgattgttcacaacaaaatata

SEQ ID NO: 187585 - DNA, 396 bp, Glycine max
tacacttggatagataaactgttattattgccctatatatgatgacgttattttcctagccagtgcaataaagacattaaagaccatcgtggatcgtaaaaatgatcaaggtcctcctaagtggatcgaagtaaatgttagtcatttaattaatgcttatttcaaactggtgatgtttacatggtaacttcatagttgttagatacaattatctttcatattaaatgtagattcatgttccaagcgaacgttatgagtgtgactattatgtcatgcattggatgtgaacatagtaagctggaattaaagaataatcgagcatggatattactcgaacacttaaatattagtgatatcactttatcattatatgacggactattgaattcaatttga

SEQ ID NO: 187586 - DNA, 376 bp, Glycine max
  unsure (1)..(376): unsure at all n locations
agcttgagaaaaanagatttctctttgaattttctgtctgggactatacctgtgcctttggggggtcttttggagcttgaggagtttatgattagtaataacaatgtgtctggttcaatcccttccagtctttcaaatgctaaaaaccttcagcagttgcaagttgacacaaaccagctctcagggttgattccaccagagcttgggcagttgtcaagcctcatggtgttctttgcttggcagaaccagcttgagggaagcattccctcctctttggggaactgtagtaaccttcaagcactcgacttgtcgcgaaacacgctcaccggtagtattccttgtagcctattccagcttccaaaccttacaaaactac

SEQ ID NO: 187587 - DNA, 451 bp, Glycine max
  unsure (1)..(451): unsure at all n locations
tgtcaaggaccacaggtctcttgtggactggttgtatgcacgggttgttgccgaatcagtataaaactcttgtgtgtttgtcttcttcttccctactcttttaatttccactctgcactttaattactgcttttacttttggttaagtttatatttttgttctttactttcttaacaacatagtaaaagcctaagaagggtaaatnttaattagtaaaggttcattaataattaattcaaccccccttcttaattattctgaggccacttgatccaacaaacacaacaaaaaaattaggcccatctaataattacaatgtccaaaataccatgtcagacataaaataaatccagagttgcgaaacaattcacttaccacaatacgaatngtaatngatactgcataaattngcatgaaagaagaaattattaatcagattaaaataatact

SEQ ID NO: 187588 - DNA, 461 bp, Glycine max
  unsure (1)..(461): unsure at all n locations
gatcttaagcaccgcggctgcagctttcattattcatgtttcgtggtttacacattgngtttcgggtatttttattctcgtttcatttactttttataccccccttttgacgtgcttaagccattttatttaagtcatttctcgcttaacctaaaaataaaataaatttccaccggccgtttgaattgtattatccgttaacttcggttaaaatgaattccgaccgttcggtcgtgtcgtaaccacgttggaaatcaaaaaagagataaaataataatataataatcaaaaaacgtcttttagtaaaataaagcggaaaatcaatcggacgttttctctttgggatttctcattcttaattgaattgactaataactaaagggaaactaaggccaaaatcaactcgcctagtcaagctcgtccaataaaataggtttctgaagttatcatttcaatttctt

SEQ ID NO: 187589 - DNA, 294 bp, Glycine max
taaaattctctaggtgttgaatattcttttctgaactgtatgttctctcacaattatgttgcatttatgtctctctgtgaatctaatctttggatgacattttctcatccgaactacatgcaaaagtgatggaagcttgcttgtggggcttctatggaggctggatctttgagcttcaatgaggtcctttaatggtgattttccaccatggagatgcagcggaagacaaaggagaagaggtgagaggaggcgccatccactatggaataagccatggaagaaggagcttcacca

SEQ ID NO: 187590 - DNA, 384 bp, Glycine max
  unsure (1)..(384): unsure at all n locations
ngctngaagatgtgaacccattatttttcatattagaccactgncaatatgtctactaccattgtgataatctctttctctgttatagggggcgctacttgagctgccagatccctccacctttgggcatattccttgaaggattcatgctctcttttgcacatgttctatagttgcatcctatccgaagccatatcagaattgtactgacacttcctaacgaaggcaaccattaggtccttccaagaatggactcgggaaggttccaagttagtgtaccaggtaacagctaccccagtaagactttcttggaagaaatgtattagcagttccttatcttttgtgatgcccccatttccgcaatacatttttaatggttttggg

SEQ ID NO: 187591 - DNA, 425 bp, Glycine max
  unsure (1)..(425): unsure at all n locations
tcgtanaacttacgatanaatctgttacctatctctggtttaagtctccacagaggccattgcctccctcgcccagtattatgatcagccgttgaggtgcttcacctttggggacttccagctatcacccatggtagaagaatttgaagagatcctacgatgtcctctagggggaaggagaccatacctcttctcagggtcctatccctcattagctagaatttctaagatagtccaaatctcggcgcaggaattagaccacaaaaagcaagtcaaaaatgggatggttggaataccgagaaaatgtttggaggtaaaagcaggaatcttggcggtagaggcaaatgggccccgttcatatgcactcttgcacttgtgatcttcggaggaaatctctttccacatgtggatgggttggtggatct

SEQ ID NO: 187592 - DNA, 379 bp, Glycine max
tacagatgatcgagaaaaacaacacatgggagttagtaaactcgccccatggaaaagatatcattggggttaagtgggtctataagacaaagctcaaccctgatggcaccatacagaaacacaaggtgaggctagtagctaagggttactcacaacaacccgtaattgactacaatgagacatttgcactagtagctcgtcttgataccataagagctctaatagctcttgcgtcacaaaaaggatggagtgtccatcaactagatgtcaaatccgccttccttaacggcgtactttgaaaagagatctatgtggagcacccacaaggattcgtgtctgaagcaaataagtaaagtgtaatactaagaaaatactctac

SEQ ID NO: 187593 - DNA, 479 bp, Glycine max
  unsure (1)..(479): unsure at all n locations
ttaatntactatattctgaaagtcacatatangccggatttctttttgcatcgtccaatngactcacgggantaattactttaaaaggttaatcactcttatattaatggtgccaaaaagaatttgatgaatgattgagagaatctaaaagtgtctaagagcatttgaaaaaggctatgagcatgaatcaatagatgaaacttcttttattccacacccaagcaactaaacatataaagccatgatatgatttctttatgcatttatggtgattttgctttgtagattttgacatttgattgttgcttccgggaagacttcttttgtcaaattctacaataaacaaattcaaatgttntaaattattaactaagttaaatagcacaaggtacgaaacttatccttattggtagaaattntttctatatattgacaatctacaatattttacacagtcatttactatgtgataaattatt

SEQ ID NO: 187594 - DNA, 257 bp, Glycine max
cctgttgtattctcaccggttacaacacacccctgcttttatgtgaactaatccgtacaaacggacttacaatacgaaagaactcgttccttcgaatgaacgaaccttaggatacaactcatccttttgctttcaaagtacgacctacgataggaacaagttcttgatagaggagtacaccttgggatggaaaagtcatttatttgcagtcggaaagcgatggccatgggcagaattgaggcaaaaagtgggccaaa

SEQ ID NO: 187595 - DNA, 451 bp, Glycine max
  unsure (1)..(451): unsure at all n locations
aacaccccggctgcgctgatgatttttgagagagtcaagtagatttgatgcanaacagaacgtgggagtgccgtgtgttacaaattntatgttcatgattgaatattcaatatcaggacgttaataaacttctgatgttcagtagtaaacaagactttgcttcttggagccaaagcatcgatctaataaaacgctttttacctttcaatgatcaattctagtaagtacatcgatcagtgcccatgtcacggacaaacattaaattgaaacagcatatctaatgattaatgaacatgatactcttgtagacttgtacatgcgcaacacgaatctaanaccagagggatttggatccttttcatttctttttctttccatttctcttattattaagcttttgagaaaataaattgtacttcccataaagagtgcatcatcttcatttgattta

SEQ ID NO: 187596 - DNA, 498 bp, Glycine max
  unsure (1)..(498): unsure at all n locations
actagcttttgccgctccacaattcgagttaaaataagaatgtgcttcttntctntttaagcaatatgagtaacttttagctgatggcagagtactaaattttacgtctaaggagtgtttaagcatacactaattaaatgctcgagggatgaacaatcataatgtttttttcccttctagattccacgaacttttccttccctcaaaccaccttaattagttgctttaagattaattaccaacgctaaaacacatgagaacttggttaagaaggaataacacgtgtaaaaacatcttaaatttatcaagactactcaaaagaccggctgaaaccaagaaaccattaaacatgtgcagctataagcacaatatacctagagaaacacatatcatacctcangagataatttagagttctggtcccctattaatctagagaatatacatgaccaaactcacacacattattcttcacacattgataaaagctataataat

SEQ ID NO: 187597 - DNA, 401 bp, Glycine max
  unsure (1)..(401): unsure at all n locations
agctggagaaagtaatgcagctaagggatctatttttgtcatgtaagagtatttgaaaccattcctatgcaatgatgtctaaagagtcctacacaaagaaaatgacctggaattgatttatatatagtccatcaacaaaaacagtatattttgatatggaaaactgttgcatggaaagccaaaaggcaagtcaggaacctgatttgacaaacaccagatattgtacctgttgctagatactctggtgctgcatatccatgggttcccatgaccctagtagaaacatggcttntatcaccagttggtccatctctggccagcccaaaatcaaaaagtttggcattatagttctgcaaaacataagtcaatcaagcagcttagtgagtgcatgctaaatcgta

SEQ ID NO: 187598 - DNA, 412 bp, Glycine max
  unsure (1)..(412): unsure at all n locations
taatctttnnccttatggtacagttgagataaaaaaacgactccacaaacaagagcttcaaggtcaatggacaccgacttaagccattcctcacaaacccttctttagtggatgtagtggtggaagagacttccttactccaccctactcttcctccaccatgacttaaggagtttntctttcctatctccttctttacttttgttacattgtttcgattctatntgatggtctaattgcttttaatcttttaattatgctacattgaggacaatgtgttgcttaagtatatgggggagttctttggttttggtttgctagatttgtaattttgtagtattgtgcgttctagttaatatttacgtcaatctgttgcatgacactttcataatttctataatataggaatgtc

SEQ ID NO: 187599 - DNA, 433 bp, Glycine max
  unsure (1)..(433): unsure at all n locations
agcttagacatatcacacatatcaacttattttgggtgtataaaacaataattgcatgatctactggacaaaattaatgcacaagtacaaagtttaccttgtggattttcagaaatatttcttcaacaaatacttaaaatgatatgcgttagtatcaattgtttgactttatccttgacaattgattgtgtgttatgttgtcttgtttcatgccaggtatgtccttgttttagtgtgattattgaggtatatgatatgatattattactttaaattntgaatcttatcatttatgtgtttatttctttggttctattatattttagattctgttatagacaacttgtttttaaaagctgagatgtgatgtttttttatctaaagaaaattttagtttaatttgaaattaatctttaatattcatcaaatcaag

SEQ ID NO: 187600 - DNA, 477 bp, Glycine max
  unsure (1)..(477): unsure at all n locations
taacaagcactgaaaataagactgcgccaactgatctanttttctaccatcagaaanaaggcaaaccanaatgagaggagcagacataaaataaaaaaaactaaaactgataagcaacagtagtgaacaagtagagcaaacgaaaaagtagttgccagggtcacaataatggagcttccataagcaaatgaataataccacaaacgaaacaagagtgacactaaagataacaaggtgcgtcaagcgcaatattctgttatgggaaagccaggtgtgagtggatgaacaagaagtgactgtattgtgtgaggtgctgtttgttgagaaacagaaagagtgtgaaataacacattntaattgtagtaccatgtttcaaaagtacttaattaaattaaatttcaaaagttctttaacttaaacaaaatttattacanatcccacgagctagcatacataaaatatacatatacacgatta

SEQ ID NO: 187601 - DNA, 446 bp, Glycine max
  unsure (1)..(446): unsure at all n locations
agcttggctnntgtcaatttgattcttaaagttcatattattntatatngngnggctatngttatacagtttattgcagaattaaaaactatcatagggatagntttactaaaaaaattcaaagtagtttccacaacatgcaatatcagcagcatcaggagatattttgttccttgcatatacttgattccatcctactagccaattaggtatcaactttattctgttctgcccttacaatgattatttcttttattctgcttgattttcattttaaatcaacctcttttaagtttataattgccatctctcaattgcaatctcaggcacactgatgcaaaatgactttctgatatttactgttatattaaagttagagccattctagtgcacaactttcttatgcattcttgaacagtatgttgaggcattagctgttaactacc

SEQ ID NO: 187602 - DNA, 342 bp, Glycine max
  unsure (1)..(342): unsure at all n locations
atcataaactcatacatcctaggcaggctanggcagtcagttcccaatattatcttatcttgaatttatctttcttttttatatctaaatcttttatctttcttatctttcactnttctaatcttctatctttttctttatcttttaattttatctttaattcttttatcttttcctttatcttctaattntatctttaaatcctttatcttttctttaccttatgatgcaatcctacccctaagggcattggatagaagactccaagaagaatgggccaaagatgcangagaaggcctanggttctcatgagccttagggtagaattctgagctcatgagc

SEQ ID NO: 187603 - DNA, 399 bp, Glycine max
  unsure (1)..(399): unsure at all n locations
gaacaatatacttggctttcatttaactgtctttgggcttggcggccacgatcaacaaagtacttttgacacctactatatgttgatttgaccaacgctgttatcggtatgttgcgactatccttcaataccttatttatacattctaagaggtttgttgtcatgtggccatatcgacgtccttctatatcataagccatggtccattttttctttgaaatgcgatcaatccatgttgcaatggctggactcagttgacggaattttttaaattctgataaaaaaaaatatgcttgcaaggagtgttacctgcctgatactagttagcaaccacatatttaagtatacatgagacttanattaacgtgaccatgataaatgagatcttacccaatttct

SEQ ID NO: 187604 - DNA, 482 bp, Glycine max
  unsure (1)..(482): unsure at all n locations
ctagatattttacttctacatgtcattcttctaatctctttagccaatattctcacctttacaagttcagtctacccaagtattgtttcataagtttatctaagttttttactatacaacaatcatgttgcaaactcacaactgactcaaacaattatttcgctagcctctctaggattnttacacttgacacaagctatcatattggaatagtaatatatttcttttggagctcgtgatgtctagcttgtttagatcagtcttattagttttctcatgattcattgttatctcgttgacaagtgtaccanattgtcacaagtagtaaagtactcagaagtccgagtgtcgaatccacagggactttgattgtacttagaaataatgcaaacccaaataaagggcatagataaagaaattannataagatacgaaatatatagatagataagaattgaagaaagataaagaattagataaaa

SEQ ID NO: 187605 - DNA, 422 bp, Glycine max
  unsure (1)..(422): unsure at all n locations
agctnttcgattcattctatgcacccatggtgtgctacatngcgtttcgggcatatttattctcgttttgtttactttttataccccctcttgacgtgcttaagccattttacttaagtcatttctcgcttaacttaaaaaataaaataaatttccaccgaacgtttgaattgtattatccgttaacttcggttaaaataaattccgaccgttcggtcgtgccgtaaccacgttggaaatcaaaaaagaggtaaaaataatataataatcaaaaaacgtcttttagtaaaataaagcggaaaatcaatcggacgttttctctttgggatttctcattcttaatcgaattgattaataactaaagtgaaactaaggctaaaatcaactcgcctagtcaagctcgtccacaaaaataggctttt

SEQ ID NO: 187606 - DNA, 483 bp, Glycine max
  unsure (1)..(483): unsure at all n locations
tccatcaagtggtattagagcacaagagctgcaagttgtgttttttaattctccattaannnantcgctgtaccttctcttccattgttgtttcttcatttttctccatgtatctcctcacatgtcttgtgctaaatgtttttaacatgattctttatagtttccaccaattaaacttgctatagaagctacatttagttctctatggatcaaatatcttgttcttgttcttgaaccatgaattgtgttgagtttaggttcctttgagttttgtctggttattatttgtggctgaaacctaaaacataaaattcttacaaaaacattaaagtagaataaaacctcaaaaatctatagtgacttgtcacctattgtagtattgtatagagtcatgtctagtcatgaacttgtacataaattctatgatggctgaattaatttctcgttcttatctactcattcgtccgactgatgaaatattta

SEQ ID NO: 187607 - DNA, 342 bp, Glycine max
  unsure (1)..(342): unsure at all n locations
agctngnctcagagangaggtatgnattgacatttacatgctagctatcatcgccaagtaccaagaagagttaggtctagccacggcccacgagcatagaatcgcggacgagtatgctcaagtttacgcggaaaaagaggctagaggaagggtgatcgactctttgcaccaagaggcaaccatgtggatggatcggtttgctcttaccttgaacgggagtcaagaacttccccgcttgttagccaaggccaaggcgatggcagacacctactccgcccccaaagagattcatgggcttctcgggtatttgcagcatatgatagacttaatggcccacataat

SEQ ID NO: 187608 - DNA, 455 bp, Glycine max
  unsure (1)..(455): unsure at all n locations
tccatttcaattacaagcgtctaganatagtattgtacacattctgacatccaagtaaaaagttattgtcgtttgaatatgctcagagcatctgntttcaatttctagcgtctcgatatattacgggacttaatcggacattagagatataagttatggttgcttgaatttcctctcaacttctattttcaatttctagcgtctcgatatattagagcactcaatctgacatctgagttaaaagttattgtcgtttgaatttgctacgagcttctgttttcaagtacgagcatctcgatatactacgagacacaatcgaacattctgagtaaaaagtattgtcgtttgaatttgctatgagcttctattttcaattacgagcgtctcatatactatggtcacactccacatccgataaatattattgtcgttaatttgctcgagctttgtttcat

SEQ ID NO: 187609 - DNA, 342 bp, Glycine max
ttaaaaaaatacataataattccatattcaaatttggcacaataaagttaattaagttcacgttatatatatataagaaaaaaacatacagtgttgcatacaactttcataattcaaaataaagacgcaaaaaaaagtaaattaaaagaagacaacttttatcaaagttcttttactttttttttacagcaatcttttaaaaaaaaaactacttattttactctttttctttacaaaaaaataaacttcttatttgtttaagagatttaatatatagaaagtggaaatcaacttaattcaggattatttggtttagaatgattcttattctcatcatttatt

SEQ ID NO: 187610 - DNA, 419 bp, Glycine max
agctggtctcagcattgatgctatatttgtatctcatgctagctatcatcgccaagtaccagaaagagttaggtctagccacggcccacgagcatagaatcgcggatgagtatgctcaagtttatgcggaaaaaaaggctagaggaagggtgatcgactctttacaccaagaggcaaccatgtggatggaccggtttgctcttaccttgaacgggagtcaagaacttccccgcttgttagccaaggccaaggcgatggcagacacctactccacccccgaagagattcatgggcttctcggctattgtcagcatatgaaagacttaatggcccacataattaaaaatcgataggaaacttgtatggtctcttagaacttgactggatacgacttcttttttgaaaaaaaatgagttggt

SEQ ID NO: 187611 - DNA, 377 bp, Glycine max
  unsure (1)..(377): unsure at all n locations
atgccntgaatgaggtctgaaatttgaagtgtaattctcaaatgatcaaatttgaaaaaatgcacacacatggcctctatttatagcctaagtgtcacacaaaattggagggaaaattgaatttctattcaaatttctcttgaattttgaaatgaatttgtggagccaaattttggagccaaaatttcactaattatgattagtgaattttttttatggttcagcccactaatccaagatcaagtccaagattctccagtaagtgtgcttaagtgtcatgaggcatgtaaagcatgcacgacatgcacaaagtgtgactatatgatgtggcaatggngtgtagcaagcaaatgctcacaccccccccctctaaatta

SEQ ID NO: 187612 - DNA, 263 bp, Glycine max
aacctgtgatgtacctaagcaggcgagctcctggcagtcaacagataaaaggaaaacaagaccacaaagcaaggaggcttgtggtggctggccagctgtgaattttgtgtaatatgtggattgtggcctctggtaatcgattaccaaaggtgagtaatcgattacaaggcttaaaattgaggacaggaggctaagatggtctcttgtaatcgattaccaaggggttgtatcgattaccaggcttgaaaacgaagtcatgaaac

SEQ ID NO: 187613 - DNA, 384 bp, Glycine max
  unsure (1)..(384): unsure at all n locations
cgatgtgggtccgaaaagaggcaaatttgatcatcctactaggacgactgagaaaactggggcaaatgaagagggtgagaaagaaggagaaacccatgctgtgactgtcattcctatacggccaagtttcccaccaaacccaacaatgtcattactcagtcaataacaaacctcttccttacccaccacctagttatccacaaaggccatccctaaatcaaccacaaagcctgtctatcgcacttccaatgacgaagaccacctttagcacaaaccanaaaacaccaacaaaaaggaattttgcagcaaaaagcctgtagggttcaccccaaattccgttgtcatatgctaaacttgatcccatgtccactcaataaatcaatg

SEQ ID NO: 187614 - DNA, 383 bp, Glycine max
acataaattacatagactttttgtttcattagcatcaactagtatgccattttgtatactgaagtacaaatattcaatctttttcaaatcaagaaaaattggtcacaccgcctgtttgtggagcacatggtgggctaggctgtcacgaaacacttcattcgctaaatctgagggagcatgtgcgagggcaagctcatagcaattgtttgactgtagctaaggagggagcactaaatccatacttagtaaccaagtcataaatcatgtttcaattttctttgccaatgaccctaattattatattttttttttgggatgctgtaatctaatcaagcatataagtagcatggaaattgaatctgatcgtaaataatttatatgct

SEQ ID NO: 187615 - DNA, 445 bp, Glycine max
aaactaacgcttcacacgtttgggtaccaatactgcatatcaacatttattattcttatttctcaatctacacctgttttgggtcctcaatccacttggatcttagcaacttgagcagcattcttgcctttgttttaggtttggtgccacactgactttgcagaagaaacagcaactgagtcaaaactccagctccaattgcttcctctcttgcacgcccaaagtcacaacaaacaattgcaagtatcccaacagcactctcactacactcttgattacacaccctgaaaaccatcttcaccagagtctcaaccccattaggatgattcaccaaagcctctttagcactatccagcaccaaaagcttctttattatcgccatcgccaatggagccgcgttcttctgccttggttcacaacctgaaatgtatgttatggccccatc

SEQ ID NO: 187616 - DNA, 436 bp, Glycine max
  unsure (1)..(436): unsure at all n locations
agctttggttgctatacatgcctccttctttagccttctcccattgtattctctaaactgcgtttcgtcatttcctcaccttctcccgttttctttttttcttcatttttgtggtccgtttcttccagcttcacttgccgttgagttttccccttgttgaggttttccattttctgtttgctacacgaggttttctccgtgctttctttcttctccatttttgtgatccatctcttccatcttcacttccagtatntgctttggttttctgttgagtttttgttgttatgcatgtcttcttcttaattgatagttatttttttcttgctgatttttctactttgtatttggatccttttttatctgtccgcttaccaggctatcgacgaagaagcatcttgcaagataagtntctttccttttcctggtgtgcatg

SEQ ID NO: 187617 - DNA, 443 bp, Glycine max
  unsure (1)..(443): unsure at all n locations
tacanagtaacaaaacaaaagnnacttctatctaacaacttaattgttcatccacccatcataaatgcaaagcttaacacttgtactttaatttgaaaatacattaactactgccataagcataaaataaatgcacgtacacatcataaatcactatagtacattagaaatttcataacattctgtacggttacaagcccaaagataaattgtgtttaatgtacacggggaattaagtttttattactaagggttacgttcgttaaaattaaatagatgaagattatttgaatggatgcattgaatgtntgtttaatttcaactttcaagagaacttatttatcatagttggtggcaatccttcctataaatagagaaaataattagtgaaaaagatgcacatgaagagagtatgtgagaagagagattgtgacacagttact

SEQ ID NO: 187618 - DNA, 443 bp, Glycine max
  unsure (1)..(443): unsure at all n locations
cacctgangcatgcaagcttagngatatagggaggttttcaatctcttgtactattggtatcttacaaaaagagagagctttatgtgacttgggtgctagcattaatctgatgccttattttctctataaaaagttagggttacaagaaccccaacccactaacatttatcttttgctcgaagataaaactcttacttatctacaaggaatagtacataatttgctggttaaagttgaaaaaaaatcatttttgcaattgattttgtgattcttgacatgagggaggatgaagaaatcctaattattctgggattaacgttgctctacataagaagagttctgattgatcttccataagagacaataatctggacgttgggtgataaggaggaaatgtgtcaaaatattgatctggcaattaattactcctcctcctctacat

SEQ ID NO: 187619 - DNA, 428 bp, Glycine max
  unsure (1)..(428): unsure at all n locations
ntgcacgtatcagtcaagtgtatggaccatatcgtagcctttgtgctcatcgataatgggtccagnttaaacgtgatgcctaagagcacttttgagaaattaccattcaatgcttcccacttaaagccgagttcaatggtggttcgtgccttcgacggcacccgccgagaggttaggggagagatcgatctcccagtagagataggccctcacacctatcaagttaccttccaaataatggatattaacccccctacagctgtctgttggggcgtccgtggatccactcaatgggagttgttccctctacactccaccaaaagttgaaattcgtagtggaagggcatctggtcatcgtatcacgtgaggaagacatcttggtgagttgcccatcctctatgccttatgtggaagccgcagcggagtca

SEQ ID NO: 187620 - DNA, 388 bp, Glycine max
agtcactgctagggctagcataaataagaagattcgttagtttgataaaatgactaacactttatcatcttacaaacggataaacaatttcaacacttagtcttttctctcaagatgagcaaagtattttgaaaacttttatgaactttacaagaatttacacaaagaaatttttacaaaaagaatttgaataatgagcacttcaatttgtacttcatgtcttcaaaacttctggtatatataggccttcttcaatcaagtatttggtgtctctaaatggacatatttcctctcttatacttgcgtatgaagaaaatgattggtggagtattaaatgcatgtacttcttcatgctatgaaaccactctttgttgttacatgttgacac

SEQ ID NO: 187621 - DNA, 418 bp, Glycine max
  unsure (1)..(418): unsure at all n locations
tctagtacaccaaggattntgatgaatggtggaacaaattttattcaaaaagggcaatttctcttgaagattgctttaagaatcttacttcatctccatctttcttgccagaaacatcaaataagaagaaaggtaaactcaaacactgtcgacaaattaccaaattcaagaatttttacaaggagttttctagccctattgatatacactactaaaaaaatgtgttatttacataagttattttcaacatacgacgtcggttaagagacatcgtggtagccggagtcataaaaagtatttagatctacgacgacggttccaaagaaccgtcttagaatgtggtacattctaagatggtctcganggcaagactgtcttagaatgtagtacattctaagacggtcctagatattctaag

SEQ ID NO: 187622 - DNA, 433 bp, Glycine max
  unsure (1)..(433): unsure at all n locations
agcttatcctgataccttatttctatctattcaagacagatctaactgtaaaaatatgaagatattattttctgtgttaaacatcaaaggcagagaaagaaaagagctagagagtaaagactataccttctgttctgatataaagttatataatggactctgagacaagataaaaatggttaatatcataaaggctatgatagcatttcacaaaatgacattgaaaaagcataataaaaaaataaccttgggagtacaattaaaatccccacagataactacaggggtgtcattccagagtttataaacagctttagccttatcaagcagcactcgaacctgcttgaaataaatataaaggaaaaagaatatacaagaagaatttgaaagcatattntggcactacagtatcagatgctcagatggcttgatc

SEQ ID NO: 187623 - DNA, 433 bp, Glycine max
  unsure (1)..(433): unsure at all n locations
cgaccttgaactcacttatgatcagtttccttaaacctcttgtttattttcgtaatgngttttggtgctcatttggtattttataaggattgttaaagattccaacaagtggtatcagaaccaccattacttttagattattgggatttaaaaatgtttgatatgtattatatctggatcattttagttatataaaccctaattttattatggggagaaactatttcaatcaataaaattgtaaaacccgtaaatttctatgttatggtcgtaaagttttttttttcaaatgaataaaagacctctgcatttgatttacgagtttatacacagcttttatttgtgtcgcatgtgcttacatattattctatttaggataaaggttntacgtattcggcattggttttcttgaacaattaatatatatttcgtg

SEQ ID NO: 187624 - DNA, 463 bp, Glycine max
  unsure (1)..(463): unsure at all n locations
ctcgtcccgggatcctctaatcacctgagctgcaactgcttgggagctttatgaaagcttgatctttgagctncaatgaggtctttcaatggtgattttccaccatggagatgcagcagaagacaaaggagaagaggtgagaggaggcgccatacaccagggaataagccatggaagaaggagtttcaccatcaagaatgttccttggataagaagcttggagagaatgattcaatggaggaaaagaaagagagaaagagagacgggggagcacaaaattgaaggagtaaaagaaggagataagttgaactttgagttatgcctcataagactctcattcatcaaagctacaacaagtgttacacatacttctatttatagcctaggtagctttcttgataagctctcttgaaaaacttccttgagaagcttatntgagtagcttccttgagaagctagagct

SEQ ID NO: 187625 - DNA, 441 bp, Glycine max
  unsure (1)..(441): unsure at all n locations
tttgtgctgcttttcaagtgagaattcaaagcttcttgtgtatgagtacatggagaaccagagcttggacaagtggcttcatggaaggaacagagtttcagcaaatgggttgagttcacctagcaaaaattgtttgctcctgaagtggccaactaagttgcggattgcggttggagctgcacaagggttgtgttacatgcaccatgactgttctcctnctattatccatagagatgtgaaatctaacaatatattgatggactcggagttcagggccagcattgcagattttggactagctaagatgttggtaaagccaggggagccacgtacaatgtccaacattgcagggtctcttggctacattccaccaggttaatgatcaattcatttcttcacagcaataatgaaaaagttacacccctatatgtgtntacatta

SEQ ID NO: 187626 - DNA, 439 bp, Glycine max
  unsure (1)..(439): unsure at all n locations
agctggtaaaatgctcccctttatttaattatatttcagaccaatgtctaaacaagatgcaaactccattctccacctttgggtttatttctcagttaataattatcatcaagttcaaatgataataaggtcaagaatcaagacctgatttgatgagttgcgagcaactatacaatgcaaatagtccatgtgccccttgaataccattttcactttaccagtttcctagaaacattaacacaagttagtccagtatcaacacaaatatagttataaatcaagttatccaagaattatattcaccttccgtgaatacataattacataccacatcccaacaatatgcacaagaatcaccagatgcggcaaaaacagatcccccctacaattaaacaaaaaaatatcgacacanactgaatcttgaataacacacaaatta

SEQ ID NO: 187627 - DNA, 459 bp, Glycine max
  unsure (1)..(459): unsure at all n locations
ctatatattaaatngaaatttgaaaacgaattctgtatagtgtgtgcattgnggnttatctgttatgctcaattccttttctactgcatttgttatcctcttgaatattatcaaaaatcaaatgccaaatcgaaaaatatataaattattgctaaattatttagagtgagagatttttgctaatattgaaaatgagaaaattataattatttttaaaatataaaaacatagacaacaagtataatgtatatttatacttttaaaaataatatgaaatatttttaaaatatcacgatccgtcactgcatggaaaatattatggtatggttgggtggaacacgagatccgttggaatagtctgatgcatcatgcccctacctacctttaatgatcagttctgaaacggnagtattccttaattctcttctccatcattctttgtatagcatatacataatg

SEQ ID NO: 187628 - DNA, 391 bp, Glycine max
  unsure (1)..(391): unsure at all n locations
catcacatgnggnactaggggggggtcgggcgatggtgcataacaattctccacatccacaaatcacatataaacccaccatcccctgttgcccaccttcaactgagctcacgtactcccacgtagcccttattctcgtttctctcaacaccgggtccccatcaaccctcccaagcttccacaacatccaagtaattcaacattcaatcatcacaaactaacacagccaagaaaacagggcaaaggcagaatactctgcccaaaacacaaaccaatatcacagcttttcacattcaaaaaccccagtaacattctcttcgttccagttcgttaaccgttggatcgactcgaaaatttactggaagtctctagtacataagtctacattttg

SEQ ID NO: 187629 - DNA, 451 bp, Glycine max
  unsure (1)..(451): unsure at all n locations
ntaatggaggcatttggatgtngatcttcttctcctacttgacctgtggaggttggatttccataaatggatccattttgcttcagtcaaaagttgagagtgggatatggtcctgagttctcttcttcttccctttcttctttagttnttctcttgttgtttttgcacttttgtctgaggctggacacatacattgctatgttccaaggatcaatcaatgagattgcatcctgactaggtttgtatgtgttggccgcgtccacacaagagtgtccaaggccattatagcgtcaaaagaaagagccttgtaagcttgagaaggaatgtgttcataatcatacctcatccattctggtgtagtaacagtgttgacttcatgtggttgaatgggaccatgaagatngatctctaacactggaatcattctatgaacattctngcctgttggagt

SEQ ID NO: 187630 - DNA, 356 bp, Glycine max
  unsure (1)..(356): unsure at all n locations
tggattaaccttccgggaaaataaatccttctattattggcttgtttaaacgtgtcaattaatctccaaaataacatggataatatctatttcaacaaagacaaatcgattacttctacactctattttattttttaccagctatatacttcacatgttaatcatgttttttgatagtgacggaccaatcaaaagatgaatggatttatgggagacgaatttaatattcaaacgattcatcgtagggcagatcaaacacgagaaacacagtactatcttttggttctccgccacagcttgcttgaataattaatacatatacagtaacctcttatgttgccttgtatntaaaatac

SEQ ID NO: 187631 - DNA, 373 bp, Glycine max
  unsure (1)..(373): unsure at all n locations
ttggccaatggtccccaaattgggaagggacgtttaaacatattcagatttattccaatggggcttatgaggtggaggagttaacccctcagaaacgtactttgagtataaatggtaaatatttgaaaaaatataaaccaacactgctcgaagttaaaataagcatagaataagagaaatactggaaacataaaaatggcgataacagtaaattgccacaaaagggcatttgtcaatattacatcaaaaagtagaatcgaaatacagaattcgaaataaagaaatcacaagttctactaattcatgaccaaatccncatacagctttttcaagtggccatctctttattaagacctgtcagcactctcataac

SEQ ID NO: 187632 - DNA, 309 bp, Glycine max
ccactggcctaacgagcgtacgcttagcttaacaattatgggctaagcgcgagggagactctggaagaagatgagttgttaggtctgctaatcgcgccgcttcatctcactaagtgcaccacttcactccatcccttaagcgagaaaggcgtgcgctaagccgaaataactgatgtgcgctcagcggttcagaattgcgctaagcacacgatcacgaacaaggccacctatttaagtctgaaatcagatcttgtgaatggagtttgggctcaaaactaaagcttaacatgtctagtgattctaaaagag

SEQ ID NO: 187633 - DNA, 174 bp, Glycine max
ttgctttaactgccaatgtaaatgactaatgcttatatgtaggactaacaaattataaatcagctaaaagatcccctattacgctaaaaaaaacctgatttatgaatcattcatataaactttgccattaaattgataaaaaatatttatttaattatatagaataaattaatt

SEQ ID NO: 187634 - DNA, 255 bp, Glycine max
tttttatatatccacgagcgatctgtaaggtaatttcttctttaaatgatgcatgcaaactcactaactatcggatcaagtggactgacaataattatgaatgggggggggatgtattacatattactaaacccttaccaaatagaagtaactattgcttagcatctactgagatttcaataaaatgatgagtggacaagacaaatttcataaagtgcactcgagaaatgaattgaactacgaaataccttttac

SEQ ID NO: 187635 - DNA, 440 bp, Glycine max
agcttcaactctcttcgggtttgaaaattgtagactttgtctaagtttagttgtgcgctaagcctattctgtagaataaatgttttctgtgtcttcgagctaagcgccaacttgctacgcttagcgcctgagtaaaatttcataagacacgctaagctcaacctgttgcgctaagcgcccagtcaaaatttcaattttatttttttgtttttgtgaaaataacctatactaatcttttgtgtttgtcttatattttgcatattgcatctaagaagaggaaagcttcatctgcacctacccaagccatatttgatagatccaggttcacatcctaagaggcttgggagaggtacactgacattgtggtgcctcgaaagctattaccagagaggaatgtggtagtctataacacatagtttgacgagttcaaggaggaactc

SEQ ID NO: 187636 - DNA, 458 bp, Glycine max
  unsure (1)..(458): unsure at all n locations
tgttctcatcacagcatgccccaccttggatcagccacaagtgggtgattcaaaaatgcccccacataccaatacaacaggcccatctgattatccaaagaatgtctagactaatctgtctgtccctcctcacagaaaacatgttctggttacaaatcatgttcctgtccttcaaaattcttatgacctcaaagaaacaaggaacactgagttggatgatcctatagaagaggggtttgttcaggtgaaaacaaaacaccagaaaaaaggtaaaaaagtgcaactcataaagacaacctgtattgtggatatgaaagctgatgtccaaagaggaagaaatcataaagctgtaactagggtcgaggaggcttccttctgtccgaatccatgatcattgcctcttggaacattagaggctntaatttgcctctgaagcatcatgcgatgcagaagcttct

SEQ ID NO: 187637 - DNA, 439 bp, Glycine max
  unsure (1)..(439): unsure at all n locations
ttgaactctaatatcaatttttaagtggtgtgtgttagtctcaaccaatttcaagcccttgaaaagtgctccacaacttcctatgcatgccttggaatgtgctattcaatttcccatgtatttgaatttgcatgtttacttgaatgtgaaccaaccttaattatggaggaatttccaacaaatctcctctttctgacataattggtgtgcaccactatatcagcaccttgacagtagtcttcaaccttcttagatggtattgtcttggtcatcatatcagaataattaaagtctgtatggattttctctaactccagattcttctcatccaacacctctcgtatccaataataacagatgtcaatgtgtttggagcgtgaatggaacacggngttcttggctaagtgtatggcactttgattatcacagtttatcacat

SEQ ID NO: 187638 - DNA, 450 bp, Glycine max
  unsure (1)..(450): unsure at all n locations
tctatggatgactgtttggttacctctcactcacaaatctcattatatcangtataaatccattcgagcacagcttcttctttcatagttattaccttattactctgtaacttctgcttctaatttgtgatgtaaggtttccgagtcagttaagtcattgtcattagtattggaaaggcctgttgattccatgaagctagaagatgttgttttacatcaaaatgaagttctagttttttcaaagacacatcacttgcttgaaaacagtgttgagaagattgatgatcatctttatgttggtggacttggtgacaaatttctttgggaatgtccagaaacattaccggatagaataacacagacaaatcttgctgccaagaggaagcttccatcaatggatggtcctgtaatgcgagctagaagagaaaagtttcacgctgatatgtcttc

SEQ ID NO: 187639 - DNA, 367 bp, Glycine max
tctgggatatttctcccgtaaaggttcctgttccatgagccagtaatcccatttaacccatgccatgcttcttctgatcaaggccaccaccccataggaacctcctctagattagccccgattggtattcccaaataagagaaaggcagaggcctgaatcctcaatttcagataactggcagcccgcaatttccattgttcagattggcccaacaccccaaagttgctcttcccataatttattttaaaaccctttctgcagctgagatcttgctgctttttcaacattcacactcacacacacacacacacacacacacacgttcacagcctcacatccccttcaacactcagctcattctcacac

SEQ ID NO: 187640 - DNA, 394 bp, Glycine max
  unsure (1)..(394): unsure at all n locations
tattttaaggttattgtctcttctcaaaagtgtattatgtaagaattgaatttagatcttttcacgtatgttgtcaatagatacactcatcggatcttagtaattctaataattttgtagttcttaacaaaatttagccaataaaagtagtatattcaaaagaatttatttctaatgcttctcttcttaaaatgttcaattttttctttgtctacttccacttatgacttatgtttagagctatgcatttggacgtccacaaccttaatacatgggcatcaatttctagtccattaaattgggggttnttttaagctttaacctttgtgttaaacgggattaaccgcgaactctgcaanaatagaactagactaataaaagaatcgtgggagtg

SEQ ID NO: 187641 - DNA, 439 bp, Glycine max
  unsure (1)..(439): unsure at all n locations
agctggtgagcacaatcagactctattctttttattactacgacagncgncaaacacatgaattaactcacgaattaccaccatgttgacgtcggcttgaattcgtacataattgctgcacacttttacctgagagtgggacaaagtgacaaacacaccataacaggaggaaatgaatactagccaattgcaaactttatcatccaaccagtgtaaaagcattgatcaaaatactaattcaaccagaaaaacaaggaagcaatattagaattgagagcttattttcttcatgaaacaaaagttcaatcagcttctcaattgtacatgaagaagcataattctaacataacaggaggctgaacataattaacacataatattcccatagaaaaacataattcaaaatttactcgaataaagagacaaaacatgagaagtt

SEQ ID NO: 187642 - DNA, 366 bp, Glycine max
  unsure (1)..(366): unsure at all n locations
ctagcacactttcatgttatgcaagaagttgtcacaaaagtaaaggccttacttcaagcaactattttcttgggatattttagacttggaggaagctattaaagttagaaaaaaaagaagacctagttgtcataatggctactttggtctgtgggtcctatgaattgataaagcataggtgcaaaacttgagagagaaggtacgagaatacctacactgtgtagaaaccatattcatcttctttccgtactacatatgtgctatgtagcttaaaatgggtgtggcaagagtgcatatagctcagagctntaaagaagattaccctaattagtggtgacagctataaaaaccctcaacacattctcc

SEQ ID NO: 187643 - DNA, 432 bp, Glycine max
agctttaatagtatgattttgcttgctctttctacatagctagttggtatttgtatgttttgatacacatcaaaactccgttttttgtacaaaattttagcataaattacgaaggacacttgtgttgtgtttcccaaggcagctaatccaaatcaggttagtcttaatatatgtttgtcacaataacttatcaccaatggtgagtagtatgatcaagtcaatggccaagatttattatgttaagtgcactgttgaaatggatttagctaggagagacctttaactcaatgggatgatgtctcattattaaccaaacaccatgccaattaacttcatttgattgtgttgatataatgatactacgatatcaagatcaacccattttaacccttcaatctcatagcataattatagtaagttgttattgtgtgt

SEQ ID NO: 187644 - DNA, 427 bp, Glycine max
tgacctagtggatcattatcagttgtcaggataatgtgaactgcctaaaaaaacaaagagagggaagcaaactactaagcagttcacttctgtgttagaaagatccaattgaatgggaagaaaccaaatgtgtgtaccttatccaagtactctttccagttccacaggtatcaaaatgcagtgtcctgacttcatagagacaagctcacacaaattaacatattataaaagctagagtaacataaacagaatttatacataacggcaatataacacattttcaaataataagcaagctatatttggacaattttgctataaaggaaatttgctatgattagtagggtaaaggaaaaaacagaaatccatttagatagattcttcgttccaaaattaagaattataacttataatggttcttagaatg

SEQ ID NO: 187645 - DNA, 323 bp, Glycine max
agcttcatgaacaacatcgagttctataatgacctttgttaatatgagcgacatatgactctctgttttataaatcttaatatataacactagctatttacataatcgatgctgtaattgtatggtaatatcgattatagaaaaccgatgttaattgtattactttcaacatcgaataatcaccgatgttgaagcccttagtaaccgatattaaaatcctatctcttagtaggggtaattaacatattgggtatgttgttaaaaatggatagttatcattaaaaaatcagtcgattgttataatctaaaaatggacgagttta

SEQ ID NO: 187646 - DNA, 372 bp, Glycine max
  unsure (1)..(372): unsure at all n locations
tcagcacttctgtanggtatcagggctatacatcagctctgattaatctgccatatacttagccggtattatgcctcatgagctttctcatattcaacagcctactggatttagcttgggtgacttcccttttagatacttgggtgttccccttttatcatctagattaaatgtatgtcattatgctcccctgctttccaagattactggcctgatccaaggatggagcaagatgtctttatcttatgccggtaatgtagagttgatcagagcagttattcaacgaattgtgaatttctggatggggatttntcctttgccgcaatctgttctggaccggatcaatgtctcctgcccgtaattttctgtggg

SEQ ID NO: 187647 - DNA, 426 bp, Glycine max
  unsure (1)..(426): unsure at all n locations
agctntatatttgtttctttngagcaagtttatgcccaaaaacttattagatatgaactaatatatatttaaaatctgccttcgttgtatcaaactgattgttgaaggtttatctaacctttctttggtgtcacctcttcctatttgatgtttttatagaagaaacactatgattaaaactcactaattcagtagcagtaaattttcactaacttgaatgtctcctatgaactagaatttttttcattaacttgaatgtctactatttatagaagtactgctgttaattgatttcttgagtgtctactatgaactaaaatttttttcagtactttataatgtgaaaatttcacataacttcatatatatgagagagaaactctcacgacaactctggttaagaactattgctatttcattgaacac

SEQ ID NO: 187648 - DNA, 397 bp, Glycine max
  unsure (1)..(397): unsure at all n locations
tcactagtaacaccttgtacgcagtgaactgtgtgttataatcatgaacagatcctatttgtgacaatttgaataactgagatctagtacattcatatggagatggaccaaattccagttctaaagcacgaagtaaatcaatccatgactgaaatatagtagattgattagtcatttgaaaccagggaactacctctttttccatgtgaattgcagcaatggtaagacgttgagtatctggagtgttgtagtagtcaaaaaattgctcagccttgaaaatccattgaagaacttcagattcgtcgaaacgagggaagtcaagcttcacattgcgtacctgaaacggtggaggagacgacgaacctncaatggagttgttcctgctacgttcatgtgc

SEQ ID NO: 187649 - DNA, 407 bp, Glycine max
  unsure (1)..(407): unsure at all n locations
agcttcatcaaagcccattntctttcatctattcctccctccaactttatgggacaataaccccgtggttgaacctttgaccatactcgaccataagtgggacagtcacacgccacctctcctatccgtcctggtccaatggtctggcttgcaaccaaaagattcgacttgggagaactggtctgaactccaagacatctatcaccttgaggacaaggttttcctcgatggagtagggaatgatagcaacaatccaaggccaagaagaatcacgaaaaggccctcacgatggaggagttcattcactaagcaattaccagcanaggacagtataggaatttaccgcgtagtgcttgatctccctgagtatcgttagtgcctattcttgctagtgcttgttccccatg

SEQ ID NO: 187650 - DNA, 423 bp, Glycine max
  unsure (1)..(423): unsure at all n locations
agcttattggattgtcattaactgaaccttatactntaaatgattatctcctaataccttgtttagattctaggagagcatatggttccagacaaatttactctaaatttgggggagaaaagttgaaaagaatgaaaagaaaaaggttaagcatcaacacacacaacaaataagttgtatgttaaaaaaaaagaaaaaaaaataagttatgttgttacaataaggtcaaaagcaaattaagaaaagggaatagtgagaaggctatttgtacaaaacaagaaaagatcaacgggaatagtctaggacttgtgctctcttagaatctaaacctttgaatccttgaaaaaccaatgaatntttgtagccaagccttactacaagcctgagtaagtccttctgattntgtttatgcatttctgactt

SEQ ID NO: 187651 - DNA, 420 bp, Glycine max
  unsure (1)..(420): unsure at all n locations
tctctctcaacacgacaaatagcatgaattgagaaagctataacaacgcagttgaaagatcaaagaagaagcacacatttcacatagttacatagttacataccctatccatgttacatagaagaaaagctgagaagcagagaaccacaatgacccatcttttgggaaacacttgccaccacctcgcttcctcttccacgttatccaaaccacgcttcttcttcttctgaaccacgacatcatcctcgtacttgggggattcggataagttcttctcggacttcacattcacccacaccctccttccgccggcaacgaggtggctccgccgcgagaggaggtgtancgaaggtggaggagttgcatggaggaaggtggttctgcgccagagtggaatggtggcagagcatggagttgttg

SEQ ID NO: 187652 - DNA, 380 bp, Glycine max
  unsure (1)..(380): unsure at all n locations
tcccctaatgactatggcattcattttggcgcctaaactgtgggagttggaagccatcttctcaattaaatttctggcttcagcaggagtcatgtctccaagggctccaccactggcaacatctatcatacttctctccatattactgagtccttcataaaaatattggagaagaagctattctgaaatctgatggtgggggcaactggcacatagtttcttaaatctctcccagtactcatacaggctctctccattgagttgtctaatacctgagatatccttcctgatggctgtggtcctggaagcanggaaaanttttctaagaatactctcttaaggtcattccagctcgtgatggacctttgagcaaggtatac

SEQ ID NO: 187653 - DNA, 375 bp, Glycine max
  unsure (1)..(375): unsure at all n locations
ttccctttccttggtttgaagctcactacaagccttaagtgaaaaaccctgatatcaccatatccttaaagaattttggagctttggaattgttttgggaataagcatggggggtttttgtttcattggacaacttgttttgttggctatgcttcatgatgtattttgggccatacttgatgtacattgtatattggttaaatgttaaacatgctgaatgaaatgttgtttctcaaaggctatagagtaaaaaaaaaaaaaaatcgaaaaaagaanaagaaaagcaataaagttgagtgaataagatcttaaatggcacaagaatgatgaaactcttggttctactcttcatgttaaaatttatctttacttctt

SEQ ID NO: 187654 - DNA, 362 bp, Glycine max
  unsure (1)..(362): unsure at all n locations
ctggaaggcccaagtgggcctgattgctatntgcacccccttgtttactaaatacacccccttgccttttttgtcgattctttttctgtaacgttacggaacttcacgaattccgtaacgatacttgttttttccttccgtaatgttacggaaccttacgaattacgtaatcatcccttttttgacttcacggatcgtgcaacaatgttttcttttgacttctggcacgttatgaaactttacgtattgtgcaacaatgggtaccaagtacctcgaagcagtcaagcaaaggttgcatgctatcaaacaatggttcccgaacgaaattagggtatgatagttggaaataaaattaattgaat

SEQ ID NO: 187655 - DNA, 457 bp, Glycine max
  unsure (1)..(457): unsure at all n locations
actagcttgcattatgtcgcacaaaggggaagggttctgatttttttaactnnngatgncttgctctgacaagtaaaaagtctagggcaaatggagagaatgagaacgaggaatgaaaccatgttcgggctgccattcctacatggccaaatttccctcctgctcaacaatgtcattattcagccgatgtcagcccttctcattacccaccacccaatcatccacaaagaccatcactaagtcagccacaaagcctgcctaccacacaaccaatgccaaacaccacctttagcacaaaccanaacaccaaccaaggaagggaatttacagcaaaaaagcctgtagaattcaccccaattctggtgtcatatgctgactngctcccatatctacttgataattccatggtagctataaccctagccacagttcctcaacctccattntttcgatcata

SEQ ID NO: 187656 - DNA, 373 bp, Glycine max
attacggaccttagatactcactctcataaggaaactaaaccacagtaaatcactctttttgaaaatcatgtaaccgacatgttacatgatttttaaaactcgatgttaacattgctaccttaacatcgggtttttaataaccgatgttaatatttgccacgttaacattcggctttcttttacaaaatcagattatttacaaatatgtcacccgtcatttgataccactctttttatcacaaaccgatgttaacaaacaatgtcgaaaggcaatctttggaggggtggccccacccactttcttcgattaaaataagcataaaaccctaataatacataactggctaggtttcccaatattaaccctccaaa

SEQ ID NO: 187657 - DNA, 358 bp, Glycine max
tttttttctccgacaggcccgttctcatgatgaaacacaacatgcatcccatgggacatacctgatgggccacgcctcgttatgatgcttattatgtttgagaagaacaaccgaatgcgacgagaaagggggctaagaaccatgcagaagagtctattccaatgcctcacggctctacaatgatcgtgatcgccatcatacaccattatgccataaatgctactaatactcaatttggaaacgaaagagtcgctaacttttggtagatgaaaacgataaaactccacatctataccccgtatatggacctgccattaccatcgtccgagctatttcagatctgtattactaggtcaga

SEQ ID NO: 187658 - DNA, 425 bp, Glycine max
  unsure (1)..(425): unsure at all n locations
agaatatacgctatctatatccgncacacgggaggtgactgaaggaaaatgcttgacaaatggaccccaccaatgacacagccatctaacatgggattgtgattgggatataattgggcttggcctatctaacccacaaccagaaagcctcttcttactaacactatcgaatgtaacgatagtggagtgccatcatagtttgattatagaagggaaagaaagcgagagatatccaagcactggtctatcccgaaacgattacaatgttgttagcactgcttgtcttgggacccatcaactacaagacacaattttcatttttaataacaggacccatcgacgaatatgaattctttctttaagtctcttccaaattggtntgtaaacggtcctattcaactcacttttcattcattagcttcatg

SEQ ID NO: 187659 - DNA, 438 bp, Glycine max
aagccacctgaggctgcagctgcccaacccacagcggaagtgttataattatttattacattacatgagggaagaactcttcataataatctatatttacaaccctttctaatgcaccttgaaaaatactcatgaacaaagatatttttaatgaagatattattattggaataaaaaaacatgctagataagcacaatcggcatacacataagttcagaatggcaagggacaaagtataatcttcacctgtttgtgacctcaaactaaaactcataagtgataggaaatcagatggaagattatataacttgccaaatactgctgaagttgcttctttgattgttggtgatgagcctacacgtgataaaagagatattatcattgaaaagcaatcaggaaggctcacaagaattaatgaattacatcctacatatttg

SEQ ID NO: 187660 - DNA, 391 bp, Glycine max
  unsure (1)..(391): unsure at all n locations
actctcgagtatagatcgacttatctatgtggcttccgngnnccccggcctcagagttctagatgcatactccggtcacaaccagattcccatgctcaaccaagacgaggagaaaatgactttcatgacagacacaacatattattactactctatcaggtcatttggcctcaagaatgcaagagccacttaccagaggctgatggataaaatattcaaggatcagctcgggaggaacctagaagtatacatggacgatatagtggtctagagtgcaagcaccataacacacgcgaaagacctagaggagattttcgcacaaatccaaaagcacaacatgaggctcaacctagaaaaatgtgtgtttggagtgcaaggagggaaantactt

SEQ ID NO: 187661 - DNA, 340 bp, Glycine max
acgcgcaatacaatagaatagagtatttcatggctaggtctacttttccttattatatattttgtgtgaaaataaaagatgccttctttatttatgccctgttttgttattcccaaatataaaattatttttgcgttaactctggcttattttaaccacgtaatcaaatgcaatcttaaaaccactaaccaaagaatatctaaaagcaaatgaaatgtgagagaaaaggataaaaattgaggaatctacatatatattgttaagtcattggagtttcacatgatgggatatttgaagaatcagagccgctaatatctatctatctctctctctctctctc

SEQ ID NO: 187662 - DNA, 463 bp, Glycine max
  unsure (1)..(463): unsure at all n locations
tattaagatattcaataaattattaacagggtactttttgtcagtctaattgagatgatggcaaatattccaaggaagacaatgctttagaatttcccataggagtactcttgcaccaaagaggaaactgccccctttcaactatctagccttttttataatcttctatgcaatagtatctctaatagaaacaacttgttgcaaaaaaatcttcatatttcaaggccctctctaaggaatagtcttcaatttggaatgttaattgtggttttgtgcaaatggcctttcttccacctttttcctgcttgcctcctttgccattggtcttctctggcaaccttctcattgccagtgatagtttcagccaactntctaccaatctttccaacctcacttaacaaccatttaaccaactttctaacttattttcagcaatctttccagtatctttctagtgatcttt

SEQ ID NO: 187663 - DNA, 443 bp, Glycine max
  unsure (1)..(443): unsure at all n locations
tgcaagcttatgaaccatnacatactgttatatttatattatatgcccaaagcttatgaaaagtgaaccttctcaaacgctgccttcaaaggtgagttgaaaacacttggcaataataaacaacattcaagttatgtaaaacacttagcaagatcacctaacataatagagtcttttaattaatatccaaataataggtcaactaacataatagagtatggctaataagtgtcacagaaaaatatacaaaaaattattaaaaaaaatacaattctacacatctcaataaaaaaattattcttagtttcttaactagtgatcttaggaaactaattaacatttttcaacagaatataatatagtaattagtttgttcttaccagtttgagagtctataatttcttcatcaataagccttatggactcaaaagaggccaatgaag

SEQ ID NO: 187664 - DNA, 384 bp, Glycine max
  unsure (1)..(384): unsure at all n locations
ttaatggccatcaaatttattttgtgataatatggtcaacccgtgacagatcatgcattcatgattagtataaattatatgcaggatatatgccttctgatctttacaacttgaattcatcctatggttctgtggaagagcttaaatactgtatagaggaaatgcattctcaagatctgctggtaagttgtgctgctaattntgaacagttgactacctgaagatgtataggagccaacttatctaagtggtaggaagatgttaagtcattactcatttcatttgagatctcacgtgccttcttacgatannatgtgtgggaatgataatacatcatgattattttaaatgaaataaccttgtttataaacttaatggaacagt

SEQ ID NO: 187665 - DNA, 427 bp, Glycine max
  unsure (1)..(427): unsure at all n locations
agcttaactaaagataacatttgctgaattgtattaatgncggcncggncgcgttgaaatgtgcagacgacgcagtgatcaatggggattttgaagagggtccatggatgttcacgaacacttcactgggtgtgttgcttcccacaaatttggatgaagaagcggtctcactacccggttggatagtcgaatccaaccgtgccgtccggtacattgattctgatcattactctgttccacaaggcatgagagccattgagttgctctcatgaaaggaaggaatcatatctcaaatggttgagaccaaaccagacaagctctacagcttgaccttctcattgagtcatgctgatgacaagtgcaaagagcctcttgctgttatggcctttgctggtgaccaagctcaaaacattcactacacttccaa

SEQ ID NO: 187666 - DNA, 431 bp, Glycine max
  unsure (1)..(431): unsure at all n locations
tctacacttgantnntcttcttaacagttagcatattatcttcgntatttacttactgatattattttgttctttgacctccaagcatgatttccaatctttcaacacacaaaggttgagtgagctggatgaaaaggaagtacgctatctcatggtatgtgtaagcaaaaaagaatttgctaccgttcatgtttttagctttttagatttagctttagctcaacaaactggtatattgtttggtgcttattattttataaaattgcagcaaacacaccagaggaatcagataaaggattcaatagatgttgatgaaccacaaggtatgtgggtactctccagactagtactttgactcctcctctctacatgtattgtaatttaattgtgatgaaatgaatgtttagatgtgggagatccattgacagctg

SEQ ID NO: 187667 - DNA, 336 bp, Glycine max
tgcaaatcacctcttccacatccacaaatcaaacatgaacccaccattcccaaattgccacctttaactgagctcacgtactcctatgtagcccttattctctgtccttttaacaccgggatcccatcaacccttcccaagcttcacaatatccaaacattcaatgtcaactattatgaactaccctaaaccaatacaacagggcagaggcagaaaaactctgcccataacacattcacatattgcagctttccttactgaataaccctagtaaactgttggatcaacttgaaaaatttactggaggttcctaagacataaatctacattatgacc

SEQ ID NO: 187668 - DNA, 418 bp, Glycine max
tctcaagggaagtttctcaagagagcttctcaaggaagctacctagtctattaatagaagcatgtgtaacacttattgtaactttgatgaatgaaagtcttatgagatacacttcaaagttccacttctttccttcttttattgcttcaatttcgtgctccccccttctatctttcttttcctccattgaagcattctctccaagcttcttattcaaggctcatcttggtggtgaagctccttcttgcatggcttatatcttaatggatggcgcctcctctcacctattttcctttgtcttctgctgcatctccatggtgaaaaatcaccattgaaggacctcattggagctcatagattcagcctccatagaagccccacaagcgagtttccatcaggtggtatcagagcacaagag

SEQ ID NO: 187669 - DNA, 383 bp, Glycine max
agcttatgagaccaaaacatgtatttatatctttttcaacaatctaattctcatgctaatataatgaatcttgtcatattcttcatatagatttatgattattcaagaacaaaatgcaaccctgtacatttgcatggtatcatggagtattatataaaaatcttttcgatcatcatcaataagcaaaatacagaggtttttagcagttaattgaacaataatatattaaaatcaaatagatatcttgtgatacaaatatactgaaagcgcactcaattcacaataataaagcaatcggacatacaatttataggtacgagaaacacgagaaagacactgataactgctaattatgagtatattttggggttaaattatatagt

SEQ ID NO: 187670 - DNA, 429 bp, Glycine max
  unsure (1)..(429): unsure at all n locations
atgttactcatgttgntgcttcttctatctctaacatagtgcatttgaaaagctttgtaaaaactttatttattagcattacacaacaatccttgttttgtttaaatgagttctttttcacttattagacgatacactccgagtccaatgtttcaacatattgatggatgtttggcaagcataccatgtttttgtagtatatagaggtaagtgggttgtcgtatccgcatggattggtagatattacgataatttctactattctaattagaactcctaaacaaactaattactaatgtacataatgttattttgcaattttcataatggaaaccattggtagcaatattcaagaatatgtacacaaaatgaacaagcttcacaagtgatgaaatcagtggaaagaagtgttgggatcgaattcacata

SEQ ID NO: 187671 - DNA, 312 bp, Glycine max
tctactacttttcacatgattgttttatggcgtccctgaactgaataattatatgatgcactagggatgcaacgatacccattcgcgagttgagattggaggaacagtggcaaacatgaacgcgcggtcttcgattcagtcaagtacacaattctcgtcatacccgagttctgtaccattctaccacgctagcccaacctcttacttgtctcaagccccacgcgcattgacggaaaccacccttcgtgcttactcatcccattcatccgcaacataacgttcataccacgccaccttccttctcttatgata

SEQ ID NO: 187672 - DNA, 461 bp, Glycine max
  unsure (1)..(461): unsure at all n locations
ntatgaaacactagctctagaaatgactctttttcgttttgtatagacaccattcttaatttcttatcaaattaacatcttgaaaaaaaaatcgtataccgaccaaaaaataataccaagaattaggcttctttctgttagatatatttaatgttaaaatgagctaatgattccatacaccaattgataaatcattaacggaaggtttattgattntatatatgctacgtcgaggctgtttataatgggtttgaatattataactagcgtaccccattgcccagaggttcttcgctatgcgaaggtatgagggaaggatattgtatgcggtcttacccttaaatattataaataaatcaaaagtaaaataaaagatttcactaaaaatatccagtcatgtttataaaactgatgataaatctacaaaatacaaaataaaaggtttagacaaaaatcatatt

SEQ ID NO: 187673 - DNA, 395 bp, Glycine max
  unsure (1)..(395): unsure at all n locations
agcttcgnttcgcagatgtgaaatcccgtactaagcacaacccaaccaacaccatcacacattctttccgttatccaagtcactacctttctcaagcaacggatccattattaccctttctcaaaccaagtactagcgtctcattgtcttgatcgagtcgataaccagatcaatttatacaacattctccgcattcgtttcaatcgccacattgttcaaattctgaaacgcactttttcccatcactagttcggaactgccgagactgagagagtgacattaaaaaaaaaaaaaacagaaacgcgattcgcggaaaccaaacggggacagtgcaaatgagaattttcccaaacacgttcttcaccaaagcccgcaatctcataggcctcgggttc

SEQ ID NO: 187674 - DNA, 389 bp, Glycine max
  unsure (1)..(389): unsure at all n locations
caacttttcaccgccccatacgcacaatgcttaatctccaccgaaaggtggctcccttggtcactgataatggctctaggcacactaaacccacaaaaaatgttagttccataaaatacacaacaactntatcattagttctggtggccttagcttcaacccacctggaagcataatcaacaagtgagatatataaaaaaccatgagaaacaggaaaatgacccatgaaatcaataccctaaacataaaaaatctcaaaaaaataatgggtaaattaggcatctcatgcgtatgtgtaatggtccctctcgctctctgacactactcacaggtggtggaaaaatgatgagcatctctgaaaatggtgggccaatagaacccatagtcta

SEQ ID NO: 187675 - DNA, 303 bp, Glycine max
  unsure (1)..(303): unsure at all n locations
tctttctcggcgtcatgcattactttctatgcttgaaacaaaatttgatggtcttgaattgttgaaaagcatgtatgaaaatgatgaaacttttggagaannattttaaatttgtgaaactttttcagaaatgggttctttagacatgaaggctttcttttcaaagaaaacaaattgtgtgtgcctaaatgttctactagaaattngcttgtttgtgatgcacatgatggagggttaatggggcattntggggtccaaaagactctagaaacattacaagaacatttntattggcctcatatg

SEQ ID NO: 187676 - DNA, 397 bp, Glycine max
ttctccgaaccctcacttgacgacaccctcacgtcaaccctatgcagagaactcacggaaccggtggaagaaaaaacggttgtgaagggaaaacgccacgagaacgaagaagtggaattggaatcggatccttggagaaacacttgaaccttgggaacggagagggaagtgctgttgagcaagataagagtgaggaaaaggagagaaactccaacgcccaaactgaacccagaaatcacctttcttccctgtgacataaagggttccgaaaatgtaagtctcttagaagagtccatggtgaacaaagcccaggcatagaaacaaacgtgctttgtggttcacacttcacagatcagtgtttgttttgaatgacaactgagctgagatgtgataaggg

SEQ ID NO: 187677 - DNA, 400 bp, Glycine max
  unsure (1)..(400): unsure at all n locations
tttcaattctgcgttaaattctgcttttaaattttccgtcgactctttaatgtagactatgatgtttgaatatgattatctagtgtctatgtttgtgatgttgattgagcactatttcacttttgatggattggatgaatgagctaagtgttggaatgcaagttgatgaatctgattgaatatgtttcaaaatgcatatgagtttttggtagaactttagtgcaggtgattgcatgcgtggttaatgaatttgagcctttgagcctttttgcaaatttgtagtgtggaatgacagttgtgttaagagaagtgtggttgattttgattgantctcaccattcacttggnttggattcatgaattaagatgatcaaggcactctctgttttgtctatccact

SEQ ID NO: 187678 - DNA, 432 bp, Glycine max
agcttgaatgtggtcatccaaacactcttatgatttgcctagtttacatttcttgcttacattcataatagcttattttctttaccttccattgtcaaaccgcctagatagctttgcttttaccaattagttttttaccttatctttcacacctcttttagtgtttatttggctagtttcaaccatagtttcttttaccttttgttttctaacctcctacaagaaagaaccacatcttacgaaccaatatgagtcatcattcatctagtgttaatggcaagggtactagtcataaagaccctttatctagaatcttagatgagttgagttccctcaagttatggaaagaaaaacatgagagaaaagaaataggaacaaaaagagtggaagatattacttagatgaatgaaagaatatggagaggaagaaaga

SEQ ID NO: 187679 - DNA, 452 bp, Glycine max
  unsure (1)..(452): unsure at all n locations
ngaaatagatttcttctctgctcagccactctttcagccaactatagtacccttgactaaaggacataagcctgcggaagatcatctcatagttctttctgattttgatctaacatgcactgtagttgattcgtccgccatcttggctgaaattgctatagtgacggcaccaaaatctgatcagaatcagcctgaagatcaaattgttcggatgttatcttctgacctcaggaatacatggggttttctatctaaacagtatacggaggagtatgagcaatgtatagaaagcattatgccttccgatagatgtatggtgttttcctgttttctttacagtagtcttaaatgattangaagagtctgttttgctcacactttgttaattggctttgatcttgtgtnttgcagtgaacaatattcgatataaagaattgtctatggctcttgag

SEQ ID NO: 187680 - DNA, 444 bp, Glycine max
  unsure (1)..(444): unsure at all n locations
acctgaggcatgcaagctngaaggatgcaacatcttgctatctttctgatatggatctgattctccacagatttgcttctattttggtagcgtacttgcacaaatcatcctgttggtgactgaaagccatggtgttgatgaaagtttaccaaccattctgtatcactgaaggtttgagttctggttaaaagagtattgtcagtgggtgttctgctactgcttggaaacatgtcgcatgtcggctatatacatatatatatatataacaattctagaggtgcctgacaaagtgagagagaactagggagcttaaacatgttcttgtgttctcccccttgttgtttagaatatatgaacatttgggtttgatggttattgaacgatatccgttgaccaaggcagcttttgtgggattgtaagtgctgatgatgaactcagaacaac

SEQ ID NO: 187681 - DNA, 380 bp, Glycine max
  unsure (1)..(380): unsure at all n locations
actagccagcaattttgagaaaaccattggtctcataaatttggtaccttcaagagtgaagtttgatgacacaactgcatttttaatatataagaaattctggcagagaaaggttctcaatgatgcttctgcctttggtgactatgaagtgctctatgttcattatccaggtcttacattaacataagtttcttaagaccattttgtgtgtactaatatgaagtcaataaacgtggtatatttggtttcgtntatcctttcggataactcatgcaggccttccaccatctccaccttcaaatgttcacggtatagatgttgaaccataccctgttcgcaagaacgatggaacaatagtgaaacctttaggagtagatgtc

SEQ ID NO: 187682 - DNA, 259 bp, Glycine max
gcttgtattaagaatgaattggaaaagatacctgtttattatgattgattggatgaataatggaatgccaaatgtaacattccaatttttataatctatattaaaaaggattggtatttataaataaatggaggtttagaaaaatgatgagattttataaattaaccaaataattatgggaccttatcattaattaaaattataatttgagagaaaatataaaaagggatttcatttatttatttgatagaaaataaaa

SEQ ID NO: 187683 - DNA, 408 bp, Glycine max
  unsure (1)..(408): unsure at all n locations
gtacatgcctcttatcccttctatgtgttggcaattttcacactcctatgtctcaacaatagaatgtcatatctaccatcatcatccaccctcttttcttagaaaaaacaacaaccttattgattgaaaacacatttattgagactcttattatgcatgtaatcatcaaccaacaaaagctcgttcctttttctacaatactattggatttggaccaagtttttttgttgtaacctctccatgatcgatatctccaccatgaattgttgtaacacttgcttctaatcgtggttcgcacatttcacacgaattngagtgttattcagtaatgtgcttctacactctcacaaaccctccagaacctgacaacatctcttttctaaattcccttgtcacttaacttaaatc

SEQ ID NO: 187684 - DNA, 436 bp, Glycine max
tgagggcatgcagcttacattacattgggtatttattttttttataagatactacatcaactaacataaatcatccttaattataataattcacttatttacccgatcgtgcgggtttatatctagtttcaactcaaatccatctagtactagtatgtgtttggtaatccgtctattacgcccgtttctgctaattattttcacgtcaatattgagagaaacgtccaagctacatattactagtcaattacgcgcatttgattgtgtgggacgttcatccaaacaagccataattggttcgacattgttttttcaggttcaacttaatgatacttcgtcacttgtagttcgaattaattatgaattcatataattggttcaaacccaactacttgaaactcgatcataaatgtataatacttgcagtataacattt

SEQ ID NO: 187685 - DNA, 419 bp, Glycine max
  unsure (1)..(419): unsure at all n locations
gacttcgaaaatgtagtatanttataaacatggccaaagcaaatcatagttcatatttggatcaggaaattcaaagactatttccacgtcaggcttgaaagcttcagctttggaaaaagctctccagccggatccaatttgtgttgtctttcgttagtcattggaaataatgtgatattcgacacaatgttctataatcaaatgggtgaacctttcgtctttcataaagtaatatatactacttggaacatcctgacatacacaataacttaatgtgagatatgagatgataaaaaaaattgacagataaaggtggttttgaattacttaagtatatagctaagtaacttaccaagttgctacacgtgaacttgtattcattcggaagcacctctgaagtgatagaattcaacacttga

SEQ ID NO: 187686 - DNA, 372 bp, Glycine max
cgctgcactgaagaaaattttttttttaatttccactacaaggcgcatctctttgttttcaacggtattatattttctcaaaaaccaagtccacttacttccaaaggatcttaaacttgtgaacaaggcatatggaatacattatgcattccatctcatatgggaaagaattctaattcacctcataatgttcctcttagatgtctgaagattttgaaaaaccatcttgccatagtgatagtgagtgatctaaacaaagttcacaataaattttgaatgatcgattgcgtcttaatgcctttatagatgttgttagatgattggcatgttaagcttgtgcttttataaaacatgatgaaagtgtgggatcta

SEQ ID NO: 187687 - DNA, 417 bp, Glycine max
agctttgggccctagccatgttgttatttgttagctcaagttctggacgaatctatgcttgctcaggtagctcatgctgtggcttattataaccctatattatgtaacaaaatgtcaatttcaagttggcattgatcaataatacatcttgccatgtaatgaactactctgtcaaaccatcaagctattctctacccttatactatgcttttgacaagtgcggagcctaatgagctcatgctgtgaaacactaaaaacttgtgagtttatggatataatgattgaatggaacgataatgaacacatagtcacgcaactaattaacagaattaattggtgctgttatcctgtacaatggaaaggttgggccaatgctgcaaagaaagatcttgtactggagattatttgctcaagtat

SEQ ID NO: 187688 - DNA, 450 bp, Glycine max
actaagcttcgttcccagacatctcttattaagcatttaactctttgtctttcttgagcttaggaaaaatgtcatttttttcttctttctttcctccaaatccatttctaaagttccaagtactttctccatcacccacatccaccattagccaccacaaaccatcattgttctccattgaaaacccacactgagaagaacccttcaactgaagcagaatttccaacttggcttgcggtttcggtagagaacgaaaaccctaatctgatctttcattttcttttgagagacttgtgtggaatcgacaagcaaggacaaaaaggaatcttcaagtgacgcgacgaggaatccgtggggtagctcactataggtaaggggagtttattataataattaccattttaacaccatagttagggtcagggaacctagctatgagaatatctgtct

SEQ ID NO: 187689 - DNA, 431 bp, Glycine max
  unsure (1)..(431): unsure at all n locations
agctnttcctgcaacctctttcttctaaaactntttctttgcatttntggtctcattntgcatccttcaccgaatcttcacgaagcatcttcgatccaagtaagcttctaacttcatttatgcttcctcttttgttaataccttaggatagaagacattaagttagcaatttgatttttaggtttaaattgtaaatagaatagataaaaattaggactttgttaaggattgtgttgtgtaggtaatattgatggttttgcatgtttgataggtgccttctagaggcctaaaaaaggaagaaaacgaagttcgttttctgcattttttctggaaaacgcgacaaactcgctaagcgcgtctgatgcgctaagcgagttcaactagggtgttgaatgtcattttcattatgaacatcgcggcttagcgattgc

SEQ ID NO: 187690 - DNA, 446 bp, Glycine max
  unsure (1)..(446): unsure at all n locations
gacactatgaaactaagctttaagccactcgtagttcttggggcttcagttatatgtccaattgcataatttgtgtaacagcttgagtagtgcactaaatgtctaagtagtaaaaactcgaaagtctgagtgtcaaatttcacaagaactttgttttgttaatgtatcgtataatttttaatttataagaaaagaaataaagagagataaatgataaataacaagaataagaattaataacagataattgtagaaaaagaaaataatatgaagcaaaataatcagtagagaattcaatgggatcagaatgttaggacctagcatgtcttgtttgcctaagatatatggtttttagatcnttctttatcaatcaagtaaatntatcctatccacatctattagattacttgccactgatgtctcacgaatgcctatttacctatcta

SEQ ID NO: 187691 - DNA, 425 bp, Glycine max
  unsure (1)..(425): unsure at all n locations
agctnnttggagtagaaacatgggaccatctcattttatttcaaaaaaggaagtcatatctagtcaaggtctaagagaccatacaagtttcctaacgatttctaattatgtgggccattaagtctatcatatgctgacaatagccgagaagcccatgaatctcttcgggggtggagtaggtgtctgccatcgccttggccttggctaacaatcggggaagttcttgactcctgttcaaggtaagagcaaaccgatccatccacatggttgcctcttggtgtaaagagtcgatcacccttcctctagcctctttttccgcatatacttgagcatactcatccgcgattctatgctcgtgggccgtggctagacctaactcttcttcgtacttggcgatgatagctaacatgttggtctctgtctcg

SEQ ID NO: 187692 - DNA, 472 bp, Glycine max
  unsure (1)..(472): unsure at all n locations
tgagaatggaggatntccttgagggtcctctcttangctatcatggaacacaactccaaactcaaaaatggaggacacatgaatgacaacgccattcattcatggggctccgaaaaagggtaagaatggaggatttgcttgagggtcctctcttatgcaatcatggaacacaactccatactcgaaagtggaggacccacgaacaggcctaagcaatagcattcatgtggctccgaaaaaggatgagaatggaggattgccttgagggtcctctcttatgcaatcatggaacacagctccaaactcgaaaatggaggacacatgaatgacaacgcaattcattcatggtgcttccgaaaagggtgagaatggaggattgccttgagggtcctctcttangcaatcatgaaacacagctccgaactcaaaagtggaggacacatgaacagcccctattaataacattcatgtg

SEQ ID NO: 187693 - DNA, 427 bp, Glycine max
  unsure (1)..(427): unsure at all n locations
agctngcaataagcttgagaatatgagaactcttatatgatactatgagagcgagagaatggaggttttgtatggtaatatgttatttgagaacgcggaccagttggcaattgactaatatgtcctttgcaaaaagattttttattttaatatttttcatttttgggtgttgttgattattgcaagagttttcttaggagagaagagtcaagaggagtggggcagataagaggaaccgagtcttcaacgcggttggcgtgtgaagttttgaaggaagatgaatagcgcgcggcttctcagttgccaccttctcagaaaacacgtgaatgataaatgagaggattaaaggaagaaattattacgtggtttacgatcatcaagttatccataatcctgacctattatcaatcatacggcagttaacaat

SEQ ID NO: 187694 - DNA, 174 bp, Glycine max
  unsure (1)..(174): unsure at all n locations
tctagccaaatggacttaccttgaattaattctttgatatccctttngagccttgtttccctttccttgttttgaagctcactacaagccttaagtganaaaccatgatatcaccatatccttaagggaatttggagctttggaattgttttgggaataagtgtggaggggggg

SEQ ID NO: 187695 - DNA, 399 bp, Glycine max
  unsure (1)..(399): unsure at all n locations
agctntaaaatttgaattaaaacgttcattaactgctggtaatcgattaccatatatgtgtaatcgattacacattgcaaattttgaattcaaattttaatagctgttgtaaatcattnttggccactggtaatcgattacatcctctggtaatcgattaccagagagtaaatctcttgaaaaagactntttaacttaaatttcttggccaaaccttttgctacttcaattaggaattcccttcctattttatatacccttcttaagactctagagactgtcttgatcatccatcttgaatatctttaatttctttgtcttgaataaagctttgagaaacatgtgatcctttggcatcatcaaaacatataccagaccatatagtcggagttaaagctc

SEQ ID NO: 187696 - DNA, 408 bp, Glycine max
  unsure (1)..(408): unsure at all n locations
tagactaaggttagcttaccatccttagactgatggctatactgagcggaccatttagtcattggaggaccttctgagggcgtgtgtcttataacaaaagggaagctgggagagttttcttccattgatagagttcacttataataacagatttcactctaccattggcatggctccctatgaagctttgtatggtagaaggtgtaggacacccctatgttggttagagcccggagaaggccttaccttangatcgaaagtggtacaacaaaccaccgagaaagttaagttaatccacgacaggatgaggactgctcagagtangcagaanagttatcatgataagagaaggaaagatctggaattcgagggtagtgatcatgtattcttgaaagtcactccgtggac

SEQ ID NO: 187697 - DNA, 379 bp, Glycine max
  unsure (1)..(379): unsure at all n locations
ttaacaaatatgctaaaggcgactgaagccaaaagaaacaatagctctccatatttacaaggaaggcatataaatgtaatgaggattaatgtataagacaaatggagtatagcccagcccaaaaagttgaaatgaattaagtacaactatgctctcaaggttcttactcaatataacccttaaacactctatgagcctttctgatcctttctttcataaccttgttacccctgaccacgttacaagcccaacaaagcccatgtggatcaaggaaggactaattttgcttttgagtttggattctggaatacaacccccacacacttgtgattactataaagagnacaaaatgaatcctccaggttgcacttgcacattg

SEQ ID NO: 187698 - DNA, 445 bp, Glycine max
  unsure (1)..(445): unsure at all n locations
cttgatctcagcttggccaaataaaaaaagtcaagagatcaatgttgttatgattgttgattaacgattgaaaagaaaatcaagccttgcttttataactcttatgttggcccagagaccatttanaaagagttattacctttagaaaaacttaaaaccaatttgaaaaagtcaaaaaccttttgaagaagtacatcttttgatttattcagaaacaatcactggtaatcgattaccaaatcagtgtaatcgattacacaaggcttttatgtgaaaggatgtgactcttcacatttgaatttgaatttcaacgttcaaaggcactggtnatcgattccaaaacacttgaatcgattgcagattttgaaattaattggacgttgtaaatccaattgaaactttntcnaaacatttgctgctggtatcgatacaacatctggtatca

SEQ ID NO: 187699 - DNA, 355 bp, Glycine max
  unsure (1)..(355): unsure at all n locations
aaagccaccaatgaaggaagaaatagatactttgattcgaagcatatttttttattgaagataatccggacaaaacctttgcacttttcctcaccttnttaaattaattactattagaattactattttttattatctaatattatacgagattacgagcttataattactattggctcaaactattgtcaagttatttttttaatccacattcgatattatcttatatatatggctcaactcttaaaaaaaaaattgtgtgtactcaactcttgcatatagagatttagtatctcacagggaacaaaaattctatattaatataaaaatatatgacaaacataaaatattccaa

SEQ ID NO: 187700 - DNA, 399 bp, Glycine max
  unsure (1)..(399): unsure at all n locations
tgctgcacaaagctgtcatgcattcaatgaccccttccatcttgactcctccttaataccacttatctgtcaatgtatagtgacacaacacaagcacctcatccaattggagttagggtttcagacttttcactatttagtatttagtcacacctcaatcacttcaattcgtttttacatatgtacataacgttggaggaagaccccacttcaattctaatgagatagaatacaggataatatgcagaaactgcaaactaaataaccctttcagacttttactcacatatagtaaacttgtatatttattttatgacattaatcatcttatcttatactcctctttntatatataatctgtattggctaatatttgtatttttataccacacaatcgtc

SEQ ID NO: 187701 - DNA, 314 bp, Glycine max
aagtctcacaaatctcacgcttagcatagaacttaattcttgggcacaatgtacggagtcttaattttggccacttaaccacttctatacatcataaaagacccatgaatgatccatcaagcattacaacacccaactaacatcttataacatcataatcatgctacccacataaaacccccaaattatcaagaaaaggccaaacccaactttcccaaatcaaagaatataatccatcgtctagagaaagataaaataggacaggacatgaatatgaaatactcacctgcgtatgtctacagcatgggtcttcc

SEQ ID NO: 187702 - DNA, 216 bp, Glycine max
atatgcaatgctaagtttgtaaagtacagatcatattacgaagatttcggaaaattatccggatcaaatattaaataacttaacataacagcatggaaataactctatacattttgatactgcttaaaggcaatgttagattaaaactaattatttaatgctactgaagacctgaaggtggtaagattacatttgcttgcaatagtatgactaatt

SEQ ID NO: 187703 - DNA, 420 bp, Glycine max
  unsure (1)..(420): unsure at all n locations
agcttgttggaagggacgtgcaagagagttttgactnttgttttacaataatcgcgcacatcacggtatgtaatacatgtaataacacacatagagttgttggactatacgtaaattcgtatgaataatattgaaccactactgtggccagaatatgtgaatctttttcgttctattggtgtcgcgagaggaagataccgaagaaagaaatggttattcaaaactaaggtcaaggctaatggttttcggtttgagagaaatagaaaaacaaacgaatatctactctcttttttttttcaaaataatcggatgtgtgaatatttccttccttctctatatacactagccatccattatgttcaaatacattttgattatgagtgaacaacattagtattgtgtaaaaatatacttatatat

SEQ ID NO: 187704 - DNA, 423 bp, Glycine max
  unsure (1)..(423): unsure at all n locations
gaaactcaagctggtgcaaaacaaccagccctgaacttaatctcaaacgatatttttgtcaatatagncagagtatttgaacattcaaactctgaaatcaagcaaagcaaggtacaatttaaacaagcatattatatgtgtatgatacatgaaaatntagaaacatcatgaggcataaaattgactacggcactaattattcatcatccncatggtgacggctccttctctttcctgatttattgacatccctacccttccttgaatcattatatccacttgaatcattgtcagatgatgatgaggccctcttgttctttcgcttgtgccttctaatgaaatcttcagaggaatcaggatctgatagacggcttctccttctnctcttctncttcctactctttctatgcctgcgcttatact

SEQ ID NO: 187705 - DNA, 390 bp, Glycine max
  unsure (1)..(390): unsure at all n locations
ttcgcccaggcgagctgtagcttcctcatgcgagttttctgctcagggtcgacgttacattttatcccaagccagctggatgctaccctatgcaaatttagggtctgaaagcttaaggagaagaccatattgccctttcttttggctttgtttctagatctatcaaacaagcttcaaaacctataaaatcattgatgaatctttcatatttaaacacaaatattagtaaatgtacaatatatataaacaactacatttaaaggtagtntataagacagctattacaatcaaaggataagtgcttacaatttaataccaaataatcattgaaatgtgatgatataaacactcacattcccttctggattgataatataaaccactacaata

SEQ ID NO: 187706 - DNA, 406 bp, Glycine max
  unsure (1)..(406): unsure at all n locations
tatacaatggagggtacaaactacatgaactggatggtatatcaattccaagaacacggaacactacccatatgaagatctactttagttgacctaatgccagattggatgttgtactctttttcctacttaattcttttgtccctgtcagaccctatatttgtccggggactatcatttgctaacgttttgattcttgctaaccgaattgagctgcttgacaccagttgctacgcaatatgaaaggtttttcgatgtttcggtaaagaatgtagaaaatactcaaatgggagggcaaaaggggtcatttggagtttttctgacccctggctcgcccaggatagcccttggctcgcctgnngccccaaatagcttaggggtgaagtaaccagctcacctaaccgag

SEQ ID NO: 187707 - DNA, 431 bp, Glycine max
  unsure (1)..(431): unsure at all n locations
agcttagatgatagaactgttgtttcattatttcaattccataaaggcatttcattacacagggaaaagaatgaaaatctaaccaaaagcacacaaaacttcaaatataggaaatattgtagtagaattaagataaatagatactattttggaattttaagtctgaccatactgtcaatatagcaaactattaatactcttcaattccagcaagaaagtaatctatctaggaatctgagagattctttcagcaaagtctggaatccgtgagcaaacagcttatcagtggcacttcatcctttttcaaacaactcatagtaatgatctaaacacaaaaactagaatcttcaatgaacagtctgcagtgagtcatgaaaaatgacatttcaattctctccacaatntcaataaagctactgtaaaatataatc

SEQ ID NO: 187708 - DNA, 456 bp, Glycine max
tgtagatgtggattaaggatccatcaatttttttcataaattttgtttcttgaattatttgggtgcaattttggtctcaatctttggatttataaaattggatgtaaagtggccaacacaaatcttattttagcacctatttcccctaaaggggtgaaatcatggttccataaaatagaacacttatattagcatctcttttcccttgactaagtaaatggtgataattatagttccaagaaccactccataattggcaagtaaatctagagaagaagtcgatactcccttttggaaattaagcaacaattctgaaaagctcataattttttatacaaataggtaaaaattggagctgagttgtgttggaccactggagttaagaactcttctttatctaccaagttcaatgcaattaaaggcaatacatcagtgatttaagtgaaagtctattac

SEQ ID NO: 187709 - DNA, 431 bp, Glycine max
  unsure (1)..(431): unsure at all n locations
tgatctgcctctatattttcaactttcccatcctncctccagataatgagtttctggtggagagtagatggcacaaccccaactccatggatccattcccttcctaatagcaagttaaaaatagccttggactgtatcaccaggaatagagttggtcgaactatactgcctacagcaacatctacttgaatggctcccaaagaatagccagttttgccctcataattagaaagcacaatgttgtgggcagatagatcagtgtcatgtttcccgatcttgtagagcataaatcgaggcattaagttgacagccgctcctccatctatgagcactttgttgattccaacattctcaacttttgccctgatgaaaagaggtttgagataanctttcatctgaaaatctggcttttcgaaataagctaattgttc

SEQ ID NO: 187710 - DNA, 405 bp, Glycine max
attcatttaaatcggaatatatattcaaatctagcaacaaaattactgttcatttgcatccaaacctggtcgatagagtgtttgtcctctgtaagatgcccaccgtcgaatgaactcctccttatcttcttcaagatcttcactttttagtcgttcatcgaaattggcccattcatctacagtacattaatggcatacagtaaatgagtgcaataaagatgggtagaaatgtaagtaagcatataaaatactcaccaggatatatcttggttaggtagaataaaattgatattccatcttcattttccttattgagttcctcatcagaagtataaacatcttctttgaaatatggtgtcagaacactgaagcaacactcagaatagttacaaatcaaagtagcat

SEQ ID NO: 187711 - DNA, 431 bp, Glycine max
  unsure (1)..(431): unsure at all n locations
gctttaagccgtgtcattgacgagccattttttctttagntctcttctctcggggccaccaattttactgctctgtgaggtctgacttctttgattatgaacgaccctaaacacttggattttaacttacctgggaatagccttaatcttgagttaaagagtagtacctactgccctggctggaaatttatcctttgtagcttcttatcatgatatgccttcgtcttttgcttctaaattctggatgactcgtaggcatttaatctcatctcttctaggtccagcaactgtagcttcctcttatttccgcatgcgttgttatcaaagttgacaacttgagagcccaatatgcttcgggctccaactctactggtaaatgacatgccttcccatacacttactgaaatggtgataagcccatgggagtcttg

SEQ ID NO: 187712 - DNA, 430 bp, Glycine max
  unsure (1)..(430): unsure at all n locations
agaagaagagagcttanatggagaagaagagatcccatcttttgggcttgcatctcatatattttaaaatggtagttcaacatcggttttcaataaaaaaaatcgatgttcacaaaatgatgtttacgttaacatcggttttctagaagaaaacgatgttaacttatcatacataaacatcggttttcaaggatttattttgggttttatttttatttgtagtttcaaatactttatatttaatatttatgaaggtgacacgataaacagaaaacatgccaccacaataagaatcataagtgacatgttgggacaagtgtcaaaaaagaaaaagaacaacacttataatgttcaaatagtatagaactactgaaatatatatctcatattaagatttttaaggcagatggttgtgattgcaagtaaagga

SEQ ID NO: 187713 - DNA, 408 bp, Glycine max
  unsure (1)..(408): unsure at all n locations
agcttaagtgaagtgaagaataaaagggtggtgctatgaatcaatgcatcctanaaacttctttaagttagaagcacctaatagatcaaaggagagactagaagtgatatatcctgatgtgtgtgggccatttgaggtaaaatccttacgaggaaatagttattgtgtttcctttattgatgagtttactagaaagacttggatttaccttatcaaacagaaaagtaaagtgttcttcaggtttaagaaattcaaactgctatgtgaaaagcaaagtggtagatgatcaaggttctgtgaatcgatggaggtggagagtataattccaatgagtttcaagtaatatgtgacaaagagttaataatgcatgtgactattgcaccatacgcaccataacacaatggtgtt

SEQ ID NO: 187714 - DNA, 413 bp, Glycine max
  unsure (1)..(413): unsure at all n locations
catgatacatgtcagggtttggtttggtttaatgataaaacggatgccccacattattttcatgacacaaatgccaaaatgatgatttggaaatattatgccaaactggtcatgcatgcacctatatggacgctcaagtgtcaaatttttatggtcatgtgatgctanggctcacgattcattccctctattttaaatcaacccaatgtttccaaaatatgttcttttatcaatatgtgcattcatcctagtccatttcaggcgtccggcgaaatttcacagcattcacccttcacgtgtagacacatttttcaaaaattggttatgatcaatgaatttttttcaaagaaaagatggaaatcatctcttttcacaagcatgtcggcttttagctagacaacttagtttctctt

SEQ ID NO: 187715 - DNA, 427 bp, Glycine max
  unsure (1)..(427): unsure at all n locations
agcttaggctaaattatgctaaactgttgtaagctgcttgagctgagtatagtcttacaagagggatctactgacgaaactcaatttaagttagtctaaacctaagagggccatctaaattgggcctagtccaataagagggatttgaggatgaagcttggattgattctgtcggacgagggatcaaggtttactaatatatgctacaacatagaacacaagagcatgattgattagagaaatatatttatatgcatcagcttgtttgttagaaagaccaacatttctacctactgctgtcactnttacttaccttgcattttatagtttctagcataaagggttagtttaaattctatttgaaattatcaatcatacatgttctctataaaatgctttatgtttgaacttaactcacgcanacatt

SEQ ID NO: 187716 - DNA, 396 bp, Glycine max
actaagctttacaaaagggtcatccagtcaagtggaatatggaagttaccattctgccaaattggggccaaagatgaatcgagtcacatcactggttcgtctactgccaaacatatttaagaatgttgatgtccttggtactttcagtttcaccttgacaaagatgtcatggaccatgttgaaaatctaaattgattcaaccccatatcctgcgtaaaaattcgcaatacttcgactgtacatcattcgcatgcatccatgcttttcattggttgcattgctcattgcattctttccttgaaaaataaaataaaataaaataaaatgaacttatcaaaaagaaaaggacacgctttacggcgcccttaccaaactcgtactagagctagagtaatg

SEQ ID NO: 187717 - DNA, 371 bp, Glycine max
tcaagggttgagaagtgaaaatgagaatggggaaactttggagcaaactctcatctcaaacaagtctataacattaatctaaacttgctcaaactggttttacgatgaaaactctaccgaatcaaaatttgactcctcaacacccaatctaccctagaaatggctcttgccttcactttgggtcactcatttttctcctttgcacaacccaatctttcccacaatcctaaatgacatttcaaactaggattacctcactctaacctccatgtcataccctaatttcgtccgggaaatattatttgatgatatacaacctttgattggccgcttcgagatacttggcaccctatgttgtataatatgtgaag

SEQ ID NO: 187718 - DNA, 473 bp, Glycine max
  unsure (1)..(473): unsure at all n locations
aaactaagcttagtgactgggcaccacaatgtacatagagtgttctcaattgatatgcnccatagcngattgtgcatgaatntctaattgtcataacatatgtttcatgtatatgatcgacgcattctttctttctttacattttaagccactggccaaacaactatcccaatgtatattattttatcatttgcaagtcctttgagccaaacacttgatattttgttggaacactaacctaggataaaagtttcctaccttaccttacgttacgagagttacggtgttttgatgggtatttctatcatttggtggctaatgtgatgtaaatactctatttntatgggtattaaaggaaattaaatatttatcacaacagaaaagaacaacaattgtaaagtttaataagagatcagaaaactatagaaaaccaattcttgtggataataaatgtctgatcatgtacaggtttt

SEQ ID NO: 187719 - DNA, 348 bp, Glycine max
  unsure (1)..(348): unsure at all n locations
ctaatgaagcaccactacacatcaatgttgcctcataagcctctctccattttccatcagatgagcttcttacttttcactcactgacccggcttgcgctcaaagtgtgaaccgaggctgagtaacatgaataaaagcgagcttcgtgctcacttgtntctgcacatcgttgagtctctcaatcactgctaaacctatcccaagtgggtcagagtcaaagccatcattgtaatcaatggctggagaaattctgagaccaactctttccgctccattgcagatacaatatcttcaaccacctgcgttagaacctgcaccgtctttagtgaccacatattcatcgtctat

SEQ ID NO: 187720 - DNA, 380 bp, Glycine max
cgatgcgccaaaaattattgataggacgcacacacatccacaaatcttctcttgcataccacgtacatatttgcaaagtcttgtatctcgggtctccaatctattaaccaagataaaacaagtaaatgaaatttacaaatccagatccttctttttctttatgatataaatctatgtccaaccccatctattaccaccaattaaatatacctatccaacgttttgccaagaacccatgggtccttgcatccacaattaccttgagataaccttgtgtagcaatatcaagctgctacacttgtggatgtagctgaacaatgtatcttacacaatcaatcccatgtctccgatctgtggctgtattatgccattttgtggag

SEQ ID NO: 187721 - DNA, 292 bp, Glycine max
atcatctctggacaatgaaaaactgggcaatgaaaggtgagatgaggaaaaccatgtgtgactgcattcctatacgcagttcccacacccacaattattacttaccataacacctttcttactacatcattatcacaaagcctcctaataaccacaaaccactccacacacagctaacccactttaccaacaaacaccaccagaagatctgcgcaaacctatgaatacctaattgggtctatgctgctgctccattcatcatattatggaccatacccccagttctaactca

SEQ ID NO: 187722 - DNA, 435 bp, Glycine max
  unsure (1)..(435): unsure at all n locations
agcttattcaaaatgaagaggaattcattattaaaagttngagaagcgaccaccgaagagaatttcaaaatgactctgaattgttttgtgaacaaaatggcattaatcgtaacttttccgctccaagaacaccacaacaaaatgggattgtggggaggaaaaaaaagtcccttgacgaacttgttagtgtttagctctactgagctttaaaagattggctaagattttgttaaaacataagcacttacacaatgaaggaaagctggagttgctgcacatgatgtccaacgctatgtcaaggaataagatcgggctgcacaatgcacaatgcaagaataaatgtcaaatgaagaattgaagttgcaggatccacgatgttcgatacaatgtcctgacatcctgcccgagaatactggagtagctgtacaatgcaag

SEQ ID NO: 187723 - DNA, 399 bp, Glycine max
tcttatccaaggctcatcttggtggtgaagcttcttctttcatggcttattccctagcggatggtgccgcctcttacctcttctcctttgtcttctgctgcatctccatggtggaaaatcactattaaaggacctcattgaagctcaaagatccagcctccatagaagctccacaagcaagcttccatcacttcatcaaaaggttcgctctgtaatgtagacttgttctgatggaagaagtgattctctgctaaagtgttggacacgacaacctataagcatgggctctgcatagacaagagttgtgcatttaatgtaggaaataaatgcctcaacgaccataattcatcagacaaagaagtagaataaagaatccatttgttgtgagattacaaacac

SEQ ID NO: 187724 - DNA, 357 bp, Glycine max
agctagactcacatgtactgctgcactctttgctttataattgcaaacaaagaagagttagagagtgtagtcaagttaaatttctgacaataacatgtttcgatcgactcctttctgacacatactagaaagattgtatgaaacaaacacattgtgtttgttgagtctgaaacttgtggtgtctacgaaaaacatcacaagaggggaagaaagaaacattataaacacaattagcaaacatgcgaatcatgaatgctgttcctacttgaaatcccaatacattacaaaggcatgtcctacaatactgacacgccataaccatggacttgtttgagaattgttagtaaagaatactta

SEQ ID NO: 187725 - DNA, 409 bp, Glycine max
agccacacagggcaaaggcagaaaactctgctcaaacaccaaccaaaatcacagcttttctcacttaaagaccccaataacaattccttcgatctaattcgttaaccggtggatcgactccaaaaatttactggaagtctatagtgcataagcctacattttgaccgttgggatctgctagcaaacattcagaactcattctacattactctttccacaaccagcaaatacatagcatttttctgcacttgtgcaaaatcctgctgcacaatatcacagcaaaaatctgcacaaagtgcagaattcgaaaatcacacttcctctcatccaatcttgctcagatcaattcctacaagtctcacatcatgtatcaatcatgtctaactcacaatcaagctttacagcacag

SEQ ID NO: 187726 - DNA, 341 bp, Glycine max
agacactaaacgactatactcgaccttaaaacacgcttgaatcacatggtgcccaaatattgagtggcatgaaacggtgtctaaagacattatacacgcccctaaattatatggagcctatatggttaccgaatacaatggtacatttagaagggtgtaatcagtggaaacacaaaaaaaaactatgtaactcactcataatatatgaacagcttaaataataacatctttcatatcgaatattacggtactattatatacttattgatttgcttacagaattaatcctactagtctacaagacttatctatagatctttaacatactccaatcaactcat

SEQ ID NO: 187727 - DNA, 275 bp, Glycine max
gtatgttatagttaatgcagcccaaacccttttcaatatatatattgaacacactcttgatggactaaatttttctacacctaccgagattccgggaatgaaacggagctatgatgtctatcatagacaaacgttatgtcttaatcaaaagttaagttaaccctctctctccttctcatcatgaactaattgatgtggaacaatgaaatgaagttttaagttaaacaacgccgaattaataacttgagaccgttaactataaaagcctttagatg

SEQ ID NO: 187728 - DNA, 381 bp, Glycine max
ttaaaaatctggctgttggacaatccttcccataaagatctcatgatgtacggaggctaattgaataaaattgtttataggttacatctgtataataatcttttgggtgagcttttgttgatgtttagaagctagttgaataattatgattaagtaaaattatttgggtttgaagttaatttgtgtaataattttttagataaatctttgttaaatgtcgtaaaatgtcattgacatccaactcagtaatcagtggtgttgataatgttttcctattccgccacttttcttattttattaagaaaaaaaatagtgagtgaactttgtgtcgtttttcgtccatatatatagccccaagcaaactttttaacttttattctt

SEQ ID NO: 187729 - DNA, 439 bp, Glycine max
  unsure (1)..(439): unsure at all n locations
ntggtacctttttggtaaggtcaagagagcttcattgtatcaaaacaccttccttagatgttgaaggttgaggtttccttctaaggtaaaaacatcttccttatcatcaagggtaagtccattagtggatacttctttttaataatttcatatgttttgctcccaaaagttttgtgcaatatcttgcttcaattcttcctttttgtgctacttgatcatttaaggcataatgagatcttaatgagcatgaaagtcaagcttggatggaaaattgtgatatgctttttcctttcttttacttccatatataattcacttangaggaagcttanagtaactaaataaatcgcttttattcttcttttttatgaatattaacgtagaggaagggaaaacgaattttattctatgaatactcggataaaggtcatggattgga

SEQ ID NO: 187730 - DNA, 420 bp, Glycine max
  unsure (1)..(420): unsure at all n locations
agcttgccaacccatggaagctcctaatttctcccacactntttggggtgggccattcttggatggccttgattttctcagggtccacttggaccccatntctaccaactataaaccctaagaaaactatattatctacacaaaaagtacacttctctatatttgcatagagggtgtttttcctaaggactgaaagaacttgcctgagatgtcctaagtgatcatctangctcctactgtacactaaaatatcatcaacataaacaactacaaatctacctatgaaatcccttaagacatgatgcataagcctcataaaggtgcttggtgcattagtgagcccaaaaggcatcactatccattcatacaaccagacatggtcttgaaagcagtgttccactcaatacccttttcatcctg

SEQ ID NO: 187731 - DNA, 439 bp, Glycine max
  unsure (1)..(439): unsure at all n locations
tatattattacgctcgaaatttaacatcacaagctctcgagaaattcaaatggtcataacttttcacccggatgtccgattatggcgaatcacatatcgagacgctcaaaattgaacaacggaagctcttgagaaattctaatggtcataacttttaactcggatgtccgattcaggcgcatcacatattgaggcgctcgaaaaggaacaacggaagctctcgagaaattcaaatggtcataacttttcacactgaggtccgattcaggattataatatatcaagacgctcgaaattaaacatcggaagctctcgagaaattcaattggtcatcacttttcacacggatgtncgatttgggtgcataatatgtcgacacgctcgcnattgaacaacggaagctctngagaaattcaaatggtcataacttttgatactg

SEQ ID NO: 187732 - DNA, 311 bp, Glycine max
ctgggaacaaaaggcgaccatttgatttttttatatcttccggagaggcgctaacctgccggggccactgcatccttggtcattttttttcaactattaagattgtgaacagatagctttgttacctaaaggcggaatcattggttaatgatctgaaattcttaatctggggacccatgtcgttccagaatgctcgaaattacgccttcacaacatgccgaatatatgtgtggccctttgaacacattaaccagtcaattaccctagaaaattgttacccagtttgagcaccctacctactttgggggctc

SEQ ID NO: 187733 - DNA, 281 bp, Glycine max
  unsure (1)..(281): unsure at all n locations
catagagaaaaaactttctagaggaaaaggggataccactctgttcataaagaaaaaggatgatgatattctattagttcaaatatatgttgatgatataatctttggatctactaatgaatctatgtgcaaagagttctctattgacatgccaagtgagtctgagatgtccatgatgggtgagttaaattacttacttggactatatatcaaacacacaaatgatgggatggaaaactcataacacatggctacntctatgagcactggttgctaccttg

SEQ ID NO: 187734 - DNA, 341 bp, Glycine max
atatctcttacccatctggttggttgtttaagcgataagtatacctgctatcggcttgcatgttctgcttgcttgtctgcgagtgtgtgctaagcggttaatgagtgaattatgaaagaacaaatctatcggcatgtaatattaaactatatttgtaactgttgctaatttaatgcacaatccttccaagaactccaaacatgtttcaaatgcaatgagtgggtgtctgcatcagtctgtcatgtacctatgttctatcgcgctgtattatgcctgaaaaaatatatactaatatactattattcgccctcttcactatgtcagacctcaataaataattc

SEQ ID NO: 187735 - DNA, 427 bp, Glycine max
cacctgagctgcagctacatttcccgtactagagcatgacttattcttttatcatacgaacaggcctattccacaacacattgaatgttgaagccttctcgagccactcaaacaaccatcacttaccacacattggaaacataactcatcatcatttcaatacatgctgtctcaattcttcccgctaggcaaaaaatctgcttttcacatacctctttacttacgttgcacgcttccaataaacctgactttgccacttcccgtactatgaatcatgacttaagcttcatattttcccgtactttgaatcatgacttaagctctacattgtacgaacagtcacataccactacacaatgaatgctgaagccttctcgagccactacaacagccgtcacttaccacgcatttgaaacacaactcaata

SEQ ID NO: 187736 - DNA, 355 bp, Glycine max
taaccactgctgattaaccaagttccctgttttgatataaatatgcgtgaaagggctgaacgaaggggtcaagaggtccagcattatgagaaattgagagatatcctagagaagaagaagaaagaagagaataacaaggcctaggcgctaccgaattgcgacctaattgttctatgttcattctttggtcttcatctggttagtgttttgctataaggatatgaacatgatttatggacccttaccggtcctctctattgatttgtgctatttcatctccttctactatcatcagaaattgcttttctttttaaagtaagattaaccgatcgctttgccgctgttatctttataa

SEQ ID NO: 187737 - DNA, 356 bp, Glycine max
ctcatagaatcgctagatctgcaagttcttatgctgcgccccatctcattcctgagatacatacttgtattgccaccaattatgatttagcaataatataactccctattaaaaaatgtcaattcataagaatattattttctaaatacacacttatcgcaataatttataatatgagtgaatgaacaatatctaaatatatactaatatctataatttactatttatattttaacaattgtatatacttagttataacacacatatctatgaacagattcagcatattattgataaaatatactataaaactcctatacttaacatattacaactacaaagttctacctaatact

SEQ ID NO: 187738 - DNA, 382 bp, Glycine max
  unsure (1)..(382): unsure at all n locations
actaagcttgtacatgattgacattttcgttctactaggggaagctattttcagatnttgaatcaatacaagtgagagcttatgcaacagtgcttcttaagccgttggatttttcggtttgtacttcttttttaaaaaaatagaagtgttattttatcccatgttttctgttataaaaaatcaatgagatagggttttatttattattattattatcatcaaatgaaagagaagattaatatagtgctaatttaaatttgagcatttcaatatttcagtcaaaagtgattatttttgcttattataaaggctatttaatagctttctcttaattctagttctagcacatttaccttatacaaggattgttcacaaagtcttg

SEQ ID NO: 187739 - DNA, 422 bp, Glycine max
  unsure (1)..(422): unsure at all n locations
agcttganatgaggaagtgttgaagggtgttactttttgtnttattgnngaccacagagtggtacctggagatatgtcgcgggggtcaagaaaccttggggacgtcaggtggggtgctattgcccaaaaccaagcttgaccaatcccgacccaacccgggcatagtcggtcagtgagaacctgtgatgtacctaagcaggcgagctcctggcagtcaacagataaaaggaaaacaagaccacaaagcaaggaggcttgtggtggctggccagctgtgaattttgtgtaatatgtggattgtggcctctggtaatcgattactaagggtgggtaatcgattacaacgcttaaaattgaagacaggaggctaagatggtctctggtaatcgattaccacggggtgtaatcgattaccatgcttg

SEQ ID NO: 187740 - DNA, 409 bp, Glycine max
  unsure (1)..(409): unsure at all n locations
actaagcttgtgcacctcaaatcactcctacatctgatgtctagcatgcattntttttctttacccactcctcacgtttggtgttttagggaaaaacaccataactaaacgcgccgcaagggatccctatcgcaccagatccaaatctataacgatgggtgatcaagaggagacacacgaatagatgaaagccgacatgtcggctctgaaagaacaaatggcctccatgatggaggccatgttaggtatgaagcacatcatggagaagaacgcggccaccgccgccgctgtcagttcggctgccgaagcagacccgactctcttggcaaccacgcaccagcctccctcaaacatagtangacagggaagggacacactgtggcacgatggcagtcctcacctgtgatac

SEQ ID NO: 187741 - DNA, 401 bp, Glycine max
  unsure (1)..(401): unsure at all n locations
agctagagctaccagaacagtatctnaataaattatagatcggnnaatggacgataccccttagtgactctccaaaattctattgattgagaattcctcactatacgctcatcgatgatctccactgtgagaagagtgaagaaacgagatgttaacactcagataattgtctactggtgctcacccatgctcaatgtacctgctactatgttgtatgaacacggattgctgttacttgaaccaaccaggacgttattccaaagaatagggactaaatgcttttctgagcagatttggcagacaaattctaattacatgtgaaatccaatccaaatcaaatataaataacacaatggaatctgtggagttaaagctgaaatcccactacctacctacacttg

SEQ ID NO: 187742 - DNA, 388 bp, Glycine max
aactggttcttacttagacataaatcttaagagtgccataaatgaacatgcacaaattatggaaaagataatatattctgctcaatatttaaaacatgaatttgaaatcaatgaacagaggcatttgctttcactaccagtttgacaacatttaggaatacaaattcctaatcctatcaaactggacaaaaaattaaggaaacataaatgcacatcggatcatatttgtcgaataagatccaatcatcattcttacctttgacttactaaacctctttaaatatgaaaaatgttctccaaactgttcatgtgtcttcaccaaattatataaatgagtgacttacaggtgagatgtgtttacctcatccataacaagcatagcgcaatc

SEQ ID NO: 187743 - DNA, 423 bp, Glycine max
agctttgtataatgtagagagactaaggcttctctcaccggaggagcccaatcaagaaagatccaacaacaaaattttgtagaaggcacttgaaccaaaccacatgaagactaattttcatgcagaagttaggaaaggagttaccacaagacctaaagtcatattcagatatcttgaaggccaaattttggctgcaagtactcatttccttccacattcttacaatatccacgttgaggccctatcactgagatggagtactgagatggtggctactttggaaaaaaattgctcatatttatgtatctcatgtccatgtatctcatatttatattagtcaagcaagttgaccgtcacatccattctattttctcttgtagcaatatccatgtatctgatatttatattgggtagatgatgata

SEQ ID NO: 187744 - DNA, 403 bp, Glycine max
  unsure (1)..(403): unsure at all n locations
aaacatgtcttgtgctatgtaaatattactattggatgatgtgtatatgactcacgagccatgataacatggtttgggattatgatattgtgattgagaatatgtatatgtgacaaattgaatatgcgttgagtcgtgatatacatgtgtacagagatgttgttgtatgcattgatttatgagctatgagctgtacaatcacacaactgtatgatcctttaagggacgatgagttaatgcatgacaagtttgtgatgggttccactgtgaaaacccaacgagtttaatcacttgaggcatgacgagttaaaataattctgcaaacaatcgagtagttatgtgtaatgcatagntcataggtagagtctatgttgtacaatgttttgagttgggataactgcta

SEQ ID NO: 187745 - DNA, 413 bp, Glycine max
agctggccaacccatggaagcttctaatatctcccacactcctgggggcgggccattcttggatggccttgaatttctcagggtccacttggaccccatttctaccaactacaaaccctaagaaaactatattttctacacaaaaagtacacttctctatatttgcataaagggtgtttttcctaaagactgaaagaacttgtctgagattttataagtgatcaattaggcttctactgtacactaaaatatcatcaaaataaacaactacaaatctacctatgaaatcccttaagacatgatgcataagcctcataaaggtgcttggtgcattagtgagcccaaaaggcatcactagccattcataccaaccacacttggtattgagagcggctttccactcatcacccttt

SEQ ID NO: 187746 - DNA, 450 bp, Glycine max
  unsure (1)..(450): unsure at all n locations
tcttnctctcttcacgtagcttattctactcttcttcttctccattgngcctccattgaagctncaaaattcctctttctttttaccccaaattgagaggagaagccattttccgagtcttggagcacacctctacttcgtggggcttcaaatatcaggtaaaggtggacttcttcttacatgaaattcgtgggtgttgggtttttgggagctatgatgggtagttctactacgttattgccttatggtagttatttgtgaaggaatttgttgaaatcatgctaaacttgacatgtntgatgtgagtaaaactacccattctgacttaaggtttataatgattctctgtgatatatgtatgcctaacatgttgatggaaaactggtagagatgatggggagagttaacggactaaatgtgagaatggtagtcgtgagagtggaaaagtgt

SEQ ID NO: 187747 - DNA, 428 bp, Glycine max
agcttcaacattcaatgtcgatcgtctctatatattacgggactcaatcagacatccgagagaaaagttattgtcgtttgaattggctcagaggttcaacattcaatttccagcgtctcgatatattacgggactcaatcagacatccgagaaaaaagttattgtcgtttgaattggctcagagcttcaacattcaatatttagcgtctcgatatgttacgggactcaatcagacatccgagaaaaaagttattgtcgtttgaattggctcagaggttcaacattcaatttcgagcgtctcgatatgttacgggactcaatcagacattcgagaaaaaagttattgtcgtttgaattagctcagaggttcaacattcaatttcgagccgcttgatatgttaccggactcaatcagacattcgagaaaa

SEQ ID NO: 187748 - DNA, 423 bp, Glycine max
  unsure (1)..(423): unsure at all n locations
tggagccaatacaaacgaccataactttntactcggatgtttgattgaggctcgtaatatatcgagacgctcgaaattgaatgttgaagctctgagccaatataaacgacaatgaccttttactcggatgtttgattgagtcccgtaacatatcgagacagctcgaaatgaatgttgaacctctgtgcatattcaaacgacaataaatttttactcagatgtctgattgagtcccgtaacttatcgagacgctcgaaattgaacgttgaagctctgagccaatacaaacgaccataactttttactcggatgtctgattgaggctcgtaatatatcgagacgctcgaaattgaatgttgaacctctgtgccaattcaaacgacaataactgtttactcggatgtctgattgagtcccgtaaca

SEQ ID NO: 187749 - DNA, 405 bp, Glycine max
  unsure (1)..(405): unsure at all n locations
agcttgaatggtgttattcatttcagtctcaaaacnngaattatgcccctcgtgttgtaaccataaccttctggtcaactatatatcatattatgcttnttgtgttcattttgttgttgctggaatgtaaacaaagttctctgactaataattcatgcctttcttcataaaatacatgttattatattgacttgtgttctatatcttaacttcatgtacgtgtcacattgtcaattgataaaccatttatgnatatggcgcagtgaataaatatcttgataaaatttattaatggtgtaattttctctgcaaaatgatttgaatgaactgtggtcgcttttaaatttacttcttccagaggtttttgacaataagaaagcctttaatgattggttctcaaagcca

SEQ ID NO: 187750 - DNA, 438 bp, Glycine max
  unsure (1)..(438): unsure at all n locations
cagcttttcaacatatcttggtaaaggcctgtgtatagatgtctacacatataatgtcatgattggtgggctttgtacagagggcatgttggatgaagctttggccatgaagtcaaaaatggaagacaatggttgcatccctgatgctgtaacttttgaaatcattattcgttctctttttgagaaggatgagaatgataaggcggagaaacttctccatgaaatgattgctaaaggcctattacattttangaattttcatggtgagcgatctccggttacaaataaagttattgtgaattttcatggtgagtgaccaatactatggacatttcatttgattaacaatcgtatgctggttaatttaatttggtattgtacaataactntcattngattttttaattatttattgggttaggggtntcataactgata

SEQ ID NO: 187751 - DNA, 429 bp, Glycine max
  unsure (1)..(429): unsure at all n locations
agctntacacaatgggttgctacatctgttgtgacgcaaccactcttaatattatttgttctagatcctcacactcggttatatataatggacgttgctctatagtatttatggtctcaaaagataaaatgttcttattagggcgtgagccccgtttgttataaaaaaagttatctaagtggcattaatattataatgtctccctcagatgtcaactattataatactatataattgttcacgcgggttgggggatcaaaaagagaatcaccacctaacctacgtaacttctcttgcactttggatattggaatctctatttttcttctgcgtcccacacgtatctttcgtcgaatgaaacctacatcgacagttctaactaattaaactcatggattttcattccacattaacaatatgagagctgct

SEQ ID NO: 187752 - DNA, 368 bp, Glycine max
  unsure (1)..(368): unsure at all n locations
gatctagtccatattntgtaacaacatcctgcgtttgttggccctcagtgttagcaaacacaaatttgctagtcaaggtggacttaaattgtcgccatctcgttgcaaccgttgacataaccttcgtcttcacctttgcgggttctgggatatcaaactttgcctacatacatacattagttactttgtgttctatcaatgtaaagatagactttccaaatataacatgaaaataaataaaacacaaagatgaggacttactagaatgtcattccacactatctccttaagcgtttcaggtacatctttccaatttttatggataatgggaaccttttctcgtgcgactacgcctagatagctatgga

SEQ ID NO: 187753 - DNA, 440 bp, Glycine max
  unsure (1)..(440): unsure at all n locations
agcttgtaattgattacactaatactgttatcgatttctatagcagattntcagaaaatattctcaacagtcacatctttttatgtggttcttgaatggctatcaaaggcctatatatatgtgacttgagacacgaatttgctaagagtttttcagaacaaaaaggtcttatcctcttataaagcaaaatcgttttatcctcttacaaattccttggccaaattacttgtgattcaataaggaattatttgagtgctcaaattgttcaatctatctctttcaagaaagatttcttcttttcttcttcttcattctgaaaagggattaagagaccgagggtctcttgttgtgaaagaattctaaacacaaaggaagggttgtccttgtgtgtntagaacttgtaaaaggaatttacaagatagtggaactctcaagcgggt

SEQ ID NO: 187754 - DNA, 430 bp, Glycine max
  unsure (1)..(430): unsure at all n locations
ctttgaatatggttatgaagataacactctgtccaaaatggatcatgggcacttgatgatttcctgtgagtccatataaatctccgagttttgtccatccagccagtatagttgggttcaccagatctttggtgcatattacatagggcatgctgtcattactatctaacagatgccatgtatcttctagttaatccttccatcttacagcaaaggacctacttacttcaccataaggctacatttaaagtaaactaatataagcaatactgatgtgttatatcatgtcatgtttatttgagaatagtcttgaaattcctaacctgatccttaatatgaattgtgttgaatatttcctctggttgtttgtaatccttatcattgtcataacccattcattccaatattnttttttatcttcattcatcat

SEQ ID NO: 187755 - DNA, 340 bp, Glycine max
tgtattttatcataccttgggaaatgtatatccatcatgttccctcctgcggcggagccgtgtcattgcaagcatggactgtcttctgcgcatcgtaatcataagcatcattgttaattattgagaatccaccttgaagtacctggtaatttttatgccaactcaattgcctactcaaaccccccacactaaaaaggacaccaacacagcccgtgaacaaggtcatttcgttccacaaagattcaccatgtctaataacgagttaaaaatctttttctgtgttaaaaccattgaataacagtcacatatctttctaacggttttacatgcgacgctcctc

SEQ ID NO: 187756 - DNA, 416 bp, Glycine max
  unsure (1)..(416): unsure at all n locations
ttaactagctttatatctgtaacaccttaaataggtttcgttggnggtttgcacaaaatgattctataactaaaaattatcatgataaggatttttaattggatgacctagtaaagaattaaagtctagtggacttcttactaacatgaatatattcagagtatgtgagttgtgcaaatatcctcattatattgtgatgataaccatttcttggaagataactgatgtgattaattgaagtggttggtttttataatgtaactaaagcattatgcacattgcacaaagaattacataacgtaataaagtgggatattggctcccaaacttagatatttgacctctagccagacttgggtgtggaagggttttaatgattgatttcgttgaagcttccatcaatttcttaacgatgc

SEQ ID NO: 187757 - DNA, 429 bp, Glycine max
  unsure (1)..(429): unsure at all n locations
agcttcggtaacgaaagagactngaattgtattaagtactacgcgggtggctttttgccaagagaaaatatggatattattacgtaacaatggatcagaagaactttttgaagctgaaaggaacgtctagaatagaataacgcgttacttatttattgcatatgaatattatgatggtgtcccaagacaaataaacaatatgcaataaataactacttaatttcttttcttttccaaaatgcgttttcttacatttgaagtaaaaagtgtaatcaaaagttattggtacattgatttggcatttgaattctttaactatggtttaaggcttgttatgaaaccccttcgggcttgtcacgtgactcatgatccacaattatacaactggttaacctcttaaatctctgatttgatatcgaagtgttgtgt

SEQ ID NO: 187758 - DNA, 475 bp, Glycine max
  unsure (1)..(475): unsure at all n locations
tctacaacaggctagaaatataaaacataacaaacaacatctgtaacgataacaaaaaaaaactctcatagcaaagagaaagaaagagttctacaatagagcaagatgtgttctattagggactaatgatataaatagtacatctgtgaatgcctgtctttcaaaatcttttgtctaagttcaacttacagaggacagattctaaaaaaaagaatcagttcattataatcatccagcctcaatgagaccaataattattgagtaattacttttatgtgtttgatgtctttacattattataagaattgtgatagatgacctaatactatcttttccacaacaagggatagatgtgagctagaacacncgtatttctggttcacatcattntacaatgtgcaaaacagcattntacattttcctgtttcacctcaagcaagagaaaaacagtgtcagtgtcagatttgatttgtgg

SEQ ID NO: 187759 - DNA, 446 bp, Glycine max
agcttgaatctgaagctgaactatcgggtctgaaaatcaattttgctaacagtacattcggagctttcgggatttctgatcaatggaagcatgatgcagcaaagtacttgaactgcagctgcttaactcttctttttgtgtatcttggcatacctataggggctattaatgcaacaaaatggtgagctgtggaccagagttttgaattccaaatatggtggatggaggaaccttaaagaaacaggaaattcagcaaaacaatgtgtatggtggagggatgtaaaacaagctttcaatcaatctcaacagggactggttattcaaaataacatgacgtggaacgtgggggatggagagaaagttatattctggacagataagtggattaatcaagaggagtcgctagcagaaaggtaccccaagcttgatattatattcttacagca

SEQ ID NO: 187760 - DNA, 404 bp, Glycine max
  unsure (1)..(404): unsure at all n locations
cacaaaattccatagcacaccacagtgcctactttgggaaatcaactctggaggcaataaaaggagcagcttttgcagagatacctaggttttgtaagcttataattgttagggtttcttctgtattggctgactaaacaccctatttggggatttctaatgaacagctgatgtaaatacttaatatctaattgattatgttttctatgttcaatgcttccttcaatgcttaatgtttgtatgctttttgtctgatcatcccattgtgtgcatagttaggtgactntagcattgggaaatgtactgttgccttagaactttattgaagcangatcgaaacttagtcttacaagagtgatctgcggattaanngtttggtttaattatgttgnacaataatgcta

SEQ ID NO: 187761 - DNA, 300 bp, Glycine max
  unsure (1)..(300): unsure at all n locations
tgacccatgccggtgttgaaaagacagcactggctatttcttcgctgctttatgcaccggatgccccgattctcttggcgatcacttttgtggaggaaacaaaagaaagttttctctcttcaatccaacctccantcttttcgcggcaaataccacatccgcaaagctggacggcatgtaacccactagcttctcatantanaacactggcagagagactgccatcatggtgatcatctctctctcaaccatgggaggagctgcttgtgccggcaaatcccttcatcgctgcacatattc

SEQ ID NO: 187762 - DNA, 314 bp, Glycine max
  unsure (1)..(314): unsure at all n locations
ccttggagggcggcgagagcttcgtgatttctgcttctgtatanaaaggattggcggtggtggccactgcgcccagcatggaggacgccatgaagaagaacacgaactccggtgagttcgggaggagaatcatgatgacgtcttccttctggatgcccagcttcgacatgccggcggccacccttcgcgatgtcacgtgagtttcgccgtaggtgtattatctgctgtcggcgatgatgcatggccggtcggcgacttctgcgagcttaaggaaacagtatttgtggagggggaggttgttggtgaggggtatg

SEQ ID NO: 187763 - DNA, 430 bp, Glycine max
agcttctaaaccccgtttctctcctcctttggcaacatcaaaaagccaaagtacgtggtaagcaacacaaggcagaagaataataatcaaatataactaaagttcacataatcattcataaaccaaatataatccagtcataaaatactaaatgccaaataccgaaatataactaaagttcagagaatgataacttaaaaagtatagccaaatacacgacttaaaataaaagataatagtaatctaaaactaagaaggtggtggaaggtcgaagcacctacgaagataactcacatcctcttcaagctgagtgatgcatgtatccattccttcaaagcgaccatccaaggaatcaaagcgttagccaacatatgtgcggaggcctcgtaattccgaaataacttcattcataagggttgaggaatcatct

SEQ ID NO: 187764 - DNA, 403 bp, Glycine max
cacatgcagtcccaacctttgcatatgcaggtccattacacagaatggaaagatgctccaagaaaaactcgtgtgacctcatgcatgacataagaaacagcatttatatgggtatatgtacaactcaggcccctagccaccagtctacgaagtaaggcccggctttcaaactttggtcgtgagtctaccaccacaacacggaactgtttcccaagatcatgggcatataaaagaatcatctcaacaacacatgatgatccatatgtaagaagaacgtctccatccctaactttcgaagcagcatgtccaacaatcaccttatcagcaagaattattttttcgttgatgaattgattaatatctgaacaaagagctgcttttgcttcagattcagtatgactta

SEQ ID NO: 187765 - DNA, 382 bp, Glycine max
agcttatgggctcataccggtttcacctttacttcagcacccgtgcagcctaaggcacccacccagagggaagctccccaagttccaactccgaacacgactcgcctggtcggtaattccaacacgacaaggaacttccctccgaggccatttcaagaattcaccccactcccaatgacgtacgaagacctcttgccgtccctcatcgccaaccatttggccgtggtaactctcggaagggtcctccaaccccttttcccaaagtggtatgaccctaatgcaacttgcaagtaccatgggtgggtctcgggacattccgttgaaaaatgcttggcccttaaatacaaggtccaacatttgatggatgctgggtggctgacct

SEQ ID NO: 187766 - DNA, 412 bp, Glycine max
  unsure (1)..(412): unsure at all n locations
tncttagacaatcaaaactttgcacactaatacttagctagatctagtttgaccaccataggatcattgtgaaacaactctatcccctcaaaattcttatttgtgcaagtgatagggataggctctttatgatggttttttttttgtcccgatcgagttcataagcttaaggctacaaatataacactttcatgttaagtttgggcttccacctcctgcaaaccctccttccattatgttaatcacacctcgtagccaagttttgagtgggaaagtctcactctagcacaatgattntgttgtctcttgagtctagttgcactctcggctctattgcattccctctctcgctctcatgaaggttccttatccttaatgaatctctgcagctaccccttctaaatcaattttc

SEQ ID NO: 187767 - DNA, 392 bp, Glycine max
  unsure (1)..(392): unsure at all n locations
agcttctaaggaagtatctcaaagaatcttctttatgtagtnttctcaagaaagctacctagtctataaatagaagcatgtgtaacacttgttgtaactttgatgaatgagagtcttgtgagacataactcaaagttcaactgctctccctttatcttccttcaatttcgtgctgccccctctctctttctctcctttcttttcctccattgaagcctcctctccaagcttcttatccaaggctcatcttggtggtgaagctccttcttccatgacttattccctagggatggcgcctcctctcacctctttttctttgtcttccgctgcatctccatgggggaaaaccaccattaaaggacctcattgaagctcaaagatccaacctttat

SEQ ID NO: 187768 - DNA, 353 bp, Glycine max
  unsure (1)..(353): unsure at all n locations
tttatgggtgattgtggttttacatggagttcaaagaagccaggccttgggacactttctacttgggaagccgagtatgtagctgcaacttcttgcacatgtcatgccatttggctaagaaattgttggaggaacttcagtcgttgcaaaaggaaagcacaaagatctatgttgataatagatctgcacaagagcttgccaagaatccggtgttccatgaacgaagtaagcatatagatacaaggtatcactctcttagagaatgcattatacagaaagaagtagaattgactcatgtgagaactcaagatcaagtngcggatattntcaccaagcctctcacatttgaagat

SEQ ID NO: 187769 - DNA, 434 bp, Glycine max
  unsure (1)..(434): unsure at all n locations
agcttctctcactaagctccctttcttttgaaantttngaagagttgatgccgctatgcgcagcctttaaggagcttagcgtatatcttgtggcagatattcagcttagcgggcactgtctagctaagtcaattctgcagaagctaaatttctgcaacttccgctaagcggctcctcatgtcgctaagcggtagtgttttttttaaggccagctaagcggaccatgtctcgctaagcggccagtgtctttttcagttttatttttcagttttgattnttaataaattgagtcctgatcaactgcttggtttctttatttgcagatggcttctangaaacgtaaaagtattggcttaagacccacaacgcagtatgacacaaggagattctctttcttatatgcttggaccagatacacagataatgttctgggg

SEQ ID NO: 187770 - DNA, 454 bp, Glycine max
  unsure (1)..(454): unsure at all n locations
ggtgattagnngaannncttcctttcctttntcttttcttttcttttgaagcacatttataacccaaggtaaaaaaagtttttttttgggaagatccttcttttccaatggtaaggttggaaatttccatcctaggtcaaggttatggccaaaacgttgaggtttggctcaaaaggcctacggatggcgggacatgacatatgtcaagatatttgtttagcaagtggtttaagaataagggaatgccccagatcatttccatgacacgcatatgacgatgatgattagaaattcatgcaaaactaatcatagcacacatccatgtggacactcatacataaagctntgtggccatgtaaacgctaaggcttaaggtttggttttccccattcanatcaacccagtgtttccaaacaatgcntttttatcaagttacgcacacattcgagtccat

SEQ ID NO: 187771 - DNA, 424 bp, Glycine max
agctctcttcctttagcttcccaataaatttaccttccttgcttctcaaggaagtttctcatgtgctaagctataaatagaaaatgtgtcacacttgtcataactttgatgagtgagaaatttatgagacacacttccaaattcaacttctcttcctaatctccttcaattcccacgaccccccccccgccctccctccctctcattcttctcctccattgaagcatcctctctaagcttcttatccaaggcactctcttagaggtgaagctcctccttccatagcttattctctagtggatggcgcctcccctcacctcttcttctttatcttccgctgcaactccattgttgaaaaatcagcattgaaagaccttattgaagcccaaagatctaacctccatagaagcttctcaagcaagct

SEQ ID NO: 187772 - DNA, 427 bp, Glycine max
  unsure (1)..(427): unsure at all n locations
gtgtgttcccttttataaaagagaagntctgaaactcatcacgttatctaaaaaaggccttgaggtggatccaagtgctctgatcattcattaacataatcatgttttggtggcatactcaccactgtttgtttctttaaggaactcaccataacaaaaaagcacaaaggcacccctataacactcgatccaaaaataagatggataatgaagatggagtgcaagaacagatgaaggccgacctatcgaccttaaaagatcaaatggcttctatcacggaggccatgctaaagcttcaaaaaactatagaagataatgctacggcggccgctttcaatacagctagggaagcggaaccggtgctacaacccgcaataaacttaagccaagatagaaacatgacgggttcaatccgaggatattcctc

SEQ ID NO: 187773 - DNA, 425 bp, Glycine max
  unsure (1)..(425): unsure at all n locations
agctangatctaggtcccacangattaatgaccattttgataaggatttttctttaattttatttatttgtctttatttatttngttttggtttcattttttgttcattttaatttcttgcatttaggacaatttaattttagcaatttaaattcagtcatttaattttaattatgatagagaagtatgaagttattaattggttgcatcacattntgagtgaatcgattgcatgagtgagactaactgcatactaatgagtatttttgtgaattgttaattctcttgtaagtaggtgtcagtgtaagtgatggagtgtgaacaaacagtacaagagtgaaaaggtttagtatttttgtttaaaagcatataatgagaacctgaatacttcaatgaaaacccgttagttgtgcgaacctttaact

SEQ ID NO: 187774 - DNA, 311 bp, Glycine max
tctaaaggcaacatttttttagttctttttaaccagaccgtgcttgtagaaaatgttgcaaggtgccattttgttgatggccttttggataatgatcttctgtaacaactttacagtgtgtccttgcagaaatggctccaaaaactccaccaaaggtcagaagatgccctaaaaagtccaggcgcctgcggcaatatgacttgaggacaagtttggaggaaacacaacacgttgagcattaaagtggcttctcaaagaggatcactaggacagagatgtattcaaagaaagccgagaatggccactgatac

SEQ ID NO: 187775 - DNA, 330 bp, Glycine max
  unsure (1)..(330): unsure at all n locations
agcttatcatttcatcaaccatggagaattgcgagaggcacatgaggagcctgttgtaggaagtgagggagagcttgaacgcgagctggtgttggtgatcagcggcggcggcggcggtgttcattctgcggaggaggttgaggaggaaggtggcgtcntgcggggaggtgcaggacttgatcatggagttgcggacattctcagcggcgcggagggttctgtgacggacgaggaggaggaataaagagtggtgggtggcgagggagtgggggaagttgtggtggcggcggatccatctgaagaagttgagggcggtgagggggtctgggt

SEQ ID NO: 187776 - DNA, 190 bp, Glycine max
  unsure (1)..(190): unsure at all n locations
gcctaccttcacgaactgtctatggcagttggcanaagaatcttccttgccattctgcggtggtgccgccatttaacaacattgctctaggttaattgtctgatctgaggtggatattcttggatcttaatttagttatgtgatttgcatgattttagtacctgtactgctaaatgggagtcgacaatac

SEQ ID NO: 187777 - DNA, 340 bp, Glycine max
  unsure (1)..(340): unsure at all n locations
ttaaacgctcaatcatttttattctcaccgaatattagaagattctggtggggggatcgagactctatttttctatccctttttaaacaaatcgaaaatcgtacaatcttataataattcgtgagcaaccnactttatttttttattttttaagataaaccaatatgcctaaatcattattttatctatctgaaaacttcgattcccatcctctgatattggataaatgatgcctctttcttttatttaatagttgttttactccanaacaaactgatctttatttttttttcaaaacaggatttaacatcttcttcgccccatacaattatatgtatgt

SEQ ID NO: 187778 - DNA, 140 bp, Glycine max
cactgttctgcatatttacttatccgtatgatataagagaggtaagagggatttagaatatttaaacccaaaaattctaagtctcgtatgtcaacaaagctcaacttaatctgaactttttgaagggaaaaaggggatga

SEQ ID NO: 187779 - DNA, 453 bp, Glycine max
  unsure (1)..(453): unsure at all n locations
agccttgaattctagtaaanaaaactccacaaacatattctaatactcatgcaccttttacattcaaaaccggaaagttagattcctaggcatgagtcatccttttggcactttagtctagcttctacaaactacccacacactcacaatgcgcacaatttatttcgcaagctaagttcctcaaaatcatgcgcaaatgcaattgaggcatttcaccgaacacttggtgggcgcatgtttaagcatgaaaatcaagggaatgggggcaatgtggcatgccccattatctcataacgcaccctaggccgaaggccatcccctacaacccctcaattcaacaaaaacaagcaataattcaaggataaatccctcacgttttgagcaaatacatgtaacttatagcaccaaaatatatcaatggaatgccagagagcccaagaatgaggtacttac

SEQ ID NO: 187780 - DNA, 321 bp, Glycine max
  unsure (1)..(321): unsure at all n locations
ctggcattgatcacaggcctctgccagtcattctggggtcccgtcacacctagtaaagtgatccgaccaccgatcacccgaggtttcattgataagtattgcacgcctaagcaggcgcanggtgatgcacctctggccacagacgcaccactaccacctcatcaggttgatcccgctgtgtcattaggcatggagcgttatctacagcacttggttcgccagcaggcggccaaccaccggtggcaggtgcagatacatgagtgtctttaccaagctagcctcagtcagcaggggcagggttttgctccttttgcatgccct

SEQ ID NO: 187781 - DNA, 429 bp, Glycine max
gctaaacattcaacttcgagcgtctcttttatgacgagtctcaatcaaacatccgagttataaagtattcgtttgaatttgctcatagcttcaacgctcaattttgagcgcctcgttatattacgggactcaatctgacatccgagtaaaaagttgttgtcttttggattggctcagaaattcaacattcaatttcgagcgtgtcgttatatcacgggactcaatcatacatccgagtaaaatgatattgtcgcctgaattggctcaaagcttcacattcaatttcgagcgtgttgatatatgacgggactcaatcacacatccgtgtcaaaagttattgtcgttggaattggctcaaaacttcaacattcactttcgagcggtctgatatattacgggcctccatcagacatccgagtaaaagttatt

SEQ ID NO: 187782 - DNA, 155 bp, Glycine max
gacacgccaaaaaccgctaagcataacacaaaacttgaccaagcttatgatcccaaacggacccgaatgagggaacttggccaacaacaaatactttactcgagtcgagagcccgaaaaacagacgccaaatgaagtgaactaaccatcaacgcc

SEQ ID NO: 187783 - DNA, 386 bp, Glycine max
ataaattcaaatttctaattattgttataaaacgtttaaaacttctggtaatcaattacaagccttgtgtaattgattacaggcttaaaatttaaattcaaattttgtaagagcatttccaaaattattttggccattggtaatcgattacagcctctggtaatcgattaccagagagtaaatatcatatttaagaaatcttagaaatttttttggaaaatatcctttggccaaacctgtgcatcatcaattaagaaactctttcttagattctaggaactaagttcatcaattatcttgaatttctggattcttgacttgaattaaacttgagaagcgcttatctttggcatcatcaaaacttcatagcatacatgctactacat

SEQ ID NO: 187784 - DNA, 320 bp, Glycine max
tggagttcatctcttaaatgactatctaacactaatatatagagtgttagtaactacctacctagctaactaactaactaactaccttactaactaactaactaaactaattacacaaaacaatagcccaattcttcaagtgcagaggctctatcttccaagcttaatttgacccttgaaatggcagaattgtgcaaagtttatatgtaacaacaatgaatatctttttcttatctttccagggactactcacacattccatttggagttttgtagtggcctttaggccctacacaagacagatagctcaagtaagcaca

SEQ ID NO: 187785 - DNA, 428 bp, Glycine max
  unsure (1)..(428): unsure at all n locations
agcttgggcttatttctctaggatatatgtgcttacttgnaccaagtaactggtttatctttgtaatgtctatataaggcaccttgcctaacatgaataagatgaggaaacacccttacactaacaattttttaattagcaacttcggcttatgactgtcagtttggcctgcatatgttagttaaccctcctgtgggtgctttcttgtatttgattaaggatgcctatagcctatgaggctctctttgcctcctaccattcggtctagtttttcttggcttttagccctcctcaatacaaaaaaaataggtttttttttatttgagaagaaaaataaataatgtatatatatctttaaattttgacaaacattaaactaaatttaaagtgaattactttttctattttcaagtaattagctcaattaa

SEQ ID NO: 187786 - DNA, 345 bp, Glycine max
  unsure (1)..(345): unsure at all n locations
cttatccctatgtgagcttggttatgaatgaaacccattggccttgtcttcgaccttgactttcttctgcaaattgtagaagaaaaaaatggacatggtgagaatattgataaaagaaagagaaaaggtaatattaatcaaactaatttcattcataaatatgatggaacataccttttgctaagttggtttcccatattgagttactgattggcaaaaatggaaaacaggaattttcagacacaaaagcgattttgaatgaagagtcactgtcgcggtgattnttggatatcaagctattgattagcgctgactcgcnaatttaagatcaccaccgatctttta

SEQ ID NO: 187787 - DNA, 314 bp, Glycine max
gacttaatcactgagcatgagctgatttttatgccctttgctgggtactggcatactgtctggtaaatgtatccgtacattccccacatacaccgagcatagtgtaacctggggcctaagatgactactccataattggtgcgccctgccctttcagcgggaactgcgtgcgctgcataatgaatcgccaaccgaaccttggggcgccggcgttaccaatgtatgtgacagtttactcgaattggcatctgcgatttatactatcagcgagcaccagcgtacggcccatactgcttaaaatagcccgcctgcct

SEQ ID NO: 187788 - DNA, 440 bp, Glycine max
agcttatccagaccagagacacttctatgagaagaaaataagtttaatagaatgagcttttccataaactaaaattagcttatgcataagttaaaaattatcttttagagaagctatacgagaataaactaattttagcttatggagaagttcatttcatttttttctttttattttcttctctaagaagtgcttttatccaaattgtgaaacagacccttactaagtttattaactggtagtcagagttttaagaaaggacttctactaatcataaatctgaagaaagtacaggattgtgtttgtggcctctatctatttgtgattatgggtgctgcactacatgagtgagagtgagtgaatcatgtgataaaagtaagtcaaaatgaatgtctctgcattaaagttggagtcacacctgtagagaatatacaaaattt

SEQ ID NO: 187789 - DNA, 413 bp, Glycine max
  unsure (1)..(413): unsure at all n locations
gctgtaataatcgagggtcggaatatactgcgccatggcaccggtcacaatcacgtccagatactttgtgtttggccagattcttgtgattatgcggtcccagttttctcccgagcattctttcacaatgaaatcaacgagttctggatttggtgtgaggaattgggtcatgcgttgtttgatggcaaggtcggaaattttggggtttagggttccggcggagatgtcttgggctatttcagcccaattgagctggaggaagcggatggctcggagaaagcccgaggcgataacagctccgactctgatgacttggtggcgcatgatgaggccgcacagcatttgngtgtacatgctttggaatgaatcgggcagaagattgcttgtctggcttgttacacgtaaatggatcg

SEQ ID NO: 187790 - DNA, 426 bp, Glycine max
agctttgacttgtttcatcaacagcattttttctgtgaccatggcatgaatttgaaatgatcataaaaatattaggaatctatctttcaatcttctctcaacatcattcaatatctttcaactctttctacaaaattttctgatccatttctcttcatctttctaaaagtttttgttcaaacactttcttttccaagaaaagttctttgttcaaaaacttgtgctattcatatttttcattcttcttcttccttttccaaaagaacgaaggactaaccgcctgaattcttttgtgtctctcttcttccttacaaaagattcaaaggactaaccgcctgagaatactttaggtcttcctttcccttaacaaaaatttcaaggactacccctgaatatctttgttccccttacaagatcaaagataac

SEQ ID NO: 187791 - DNA, 435 bp, Glycine max
  unsure (1)..(435): unsure at all n locations
agcttcattcanaatgcaactggttgtataaagaattaagtatcatgaatttaaacagaggtatattctattgtgatcaaagaaatagtaaacatgaacaattgagtttgaaaacaaataagtaaaagtgttgggtccttccaccgagatagttgatgcaattagggtttttctctatttgaaattattcatgtgttctatgctgaggacaaaaataccaacaccgatgtctcgtgagtttggactaatttaaactaagctttgttcgcagatgtctcttgttgaacttagcctaatttaaacagcattataagcacaacataataaaaactagaaccctacacactatgtctagcactacagttatctagccctgctctatcaagttccaaggaaacaggacatttgtcaatgctaaagttcctaacaccatac

SEQ ID NO: 187792 - DNA, 427 bp, Glycine max
  unsure (1)..(427): unsure at all n locations
agcttatagatggttatttggcagaggttttcccagatattaatttaaaacttcccaagtttcaagcccttgccgctgctgttccaaagtatgccaggcctttggatgatggtttatatcgtgccatagatatttatttgaaggtatgaatcttgagcaaattggtttatgtcattcaataattagtgtttaatatgctatcaatggcgtgttataatgttatgcatcatgccacatgtgggccatttcttcgcctgaatgaatactatatatgtttgtcaaataatattttttattctgctatgcttcttggnggtttaaatattttttataaatgggatttatggctcatttttaatccccatcctttgctcatgtntataaaccagatatgtgtcatatttctagatgggttctatacacatta

SEQ ID NO: 187793 - DNA, 246 bp, Glycine max
cctttaatttaaataacgtttaacctcacaaagtgactactggtggatcattctcctcagagattttatcgattccttggaataaaataattcaagctatatacagcttatgtgtcatactaatatttgtataaataaggttattttcagggaaacataaaaatggtgaatacataatatttcaatattcttttttattacaaactttaagagaaaaagtaaaataagagtaaactttacaaaaaa

SEQ ID NO: 187794 - DNA, 358 bp, Glycine max
  unsure (1)..(358): unsure at all n locations
caaaacgaagctgtactagatgcaccanctgtagctgactcagttttttcttatatttgcactaggaaattattgctttacacaaggatgcttcatagttatttgtaacatctacgatcaaactctatggttagcataaacttgaacgctgaacaacagtaggtgttggcttttggttcatgctttctgatagaacagagtcttttgaagacatgctccaataatatctatcataagtttgaaactggtttattaaacctcaacagttgttgcttgctagacatcatgctatgtaggatactctctagtctactnactactaatgttggagcgttttccaaatatgctctctatatcc

SEQ ID NO: 187795 - DNA, 380 bp, Glycine max
catcaagtctttgagctctacacagtcgatcgatcataatatttacggtcatgattttatggaataagccaccctctttcatggagtcctgaactctcagagcagcttcaagttctcctgccttacaaagcatgtcaattaaaaaattgtaagatgtaaaattgggagctgcatccattttcattgcttcaaggattctcaatgcttcctcaacttttccctttcttccaaggcaagtcaggatgcaattatatgcaattacactgggtatacatccctttctcttttgcctctcaagtaagctgcatgctttattaaatttcccaactgaaccataacccattatcatggtattataagcgtaaacacaaggaacactc

SEQ ID NO: 187796 - DNA, 427 bp, Glycine max
  unsure (1)..(427): unsure at all n locations
actaagcttccagatgttgtccaaagagcaaccggaactggttgctttttgagaatcnacaagctgagatgcaaatttatttggaattgttggatattctatgtattacatacacgtacctaatttgctgcgcaatctaatgaggcctcattatttgctgaatctctttagtcaagtattatatcccgtaatgattatgatagtttctgctttctcccccgttcttggctgtgcaatcagatctctgcttgtattatatatatagctactacggatgattcacatgacaataacacttatctaattgcatctggttcggtttcaagctctttgaaagactaaaagttgcaaacgcctttctttggagtagctagtgccatttttctaaacacgtatttggacacaaagtgccacaatattttaacat

SEQ ID NO: 187797 - DNA, 456 bp, Glycine max
agcttgcttgtggagcttctatggaggctggatctttgagcttcaatgaggtccttcaatggtgatttttcaccatggagatgcagcggaaggcaaaggagaagaggagaagggaggtgccatccactagggaataagccatggaagaaagagcttcaccaccaagatgagccttggataagaagctgggaaggatgcttcaatggaggaaaagaaagagggagagaaagagagaggggggagcacgaaattgaaggaataaaagagggggagaagtagaactttgaagtgtgtctcataagactttcattcatcaaagttacaacaagtgttacacatgcttctatttatagactaagtagcttccttgggaagctctcttaagaaaacttccttgagaagtttctttgagaaaacttccttgagaagctagagtttagctacacacacccatct

SEQ ID NO: 187798 - DNA, 375 bp, Glycine max
  unsure (1)..(375): unsure at all n locations
aacaatgttttataatttgaaaagtggagagaatcgttaaggcgttgggccttggaacgatctcaagtgatatttgatgatatngaagtagttatgagttggttttaccttggttttgtttattaactntcaatcctttntaaagacaattttactgcactagtgatcggttaagaatgaactttacaaagaaaaagagattgtcgatgatagatggagaagatgaatgtgcacaaaacaacaaagggcccncctaagggtacatagatcacattcaatccctaaaaataaaactaactgactggtgcgaagaataccgaacaagaaacgacgttgggacgatcacagtcgcgattcgatagcgcctcactttca

SEQ ID NO: 187799 - DNA, 444 bp, Glycine max
cacgcctaataccttatgtatatcacctgttattatatctaacaaacctatcaaaaatcatgtatctaaaaatcaacatctcgtagagttaacacaaagcaaaatagctaaaatatcttacctttctgttaaatgaaagatatacactgaattatcacaggtctaaacttacacctctggttttttcgagaacactattctttcagaagatcatttaagagagaagaaaaaggaatgaaatataagatttcatggtccattgtgataaatgatacaagggaccacggaactcagcattaataaaaatgcaataattagttaactgcagtcaattacatatcttgggcctcactatagtacatagcagaattcaccacaaagaaataaaaaaactagcgtacatagcagaatttcttgtttgttttgctaatagctctatgaaac

SEQ ID NO: 187800 - DNA, 424 bp, Glycine max
actacactaaattaattagaaaacattctaattttttttattataaacaaacagctgtatcaaaacattattttaattaaacaaacctaatctatataaataatcataaaaattcactcacatataatttttttatggtgcatactattgtcacgtacaatatttaaaagtgatcttaagtcacgggtgggcgggacgctaattaaactactgaaatataagaataaatgtctttgaataataatatttaaaatggataatcctgaaatattgaaatcatttattattggcaaaaaaataattttaatataaaccaatgcagatcattaaaaaggaaggggtcacccctctctctcttcttttgacattgctgaattatcattgggacacttatatcacctaacgacaaacagcggaggccgaa

SEQ ID NO: 187801 - DNA, 382 bp, Glycine max
  unsure (1)..(382): unsure at all n locations
agcttgtaagattatggggtacccttcatatgtggtactaggtggcgatcgggcgatggtgcaagtcgactctccacatccacaatcacacataaatccaccatccccagttgcccacctttaactgagctcacgtactcccacgtagcccttatcctcgttcttctcaacaccgggtccccatcaattcctccaagcttccacaacatccaagcaattcaacatccaaacatcatgaactatcaaaaccaagaaaacagggtagaggcagaaaactctgcccaaaacataaaccaataccacaactttggttactcaaataccccagtaacattctncttcttccaattcgttcaccggtggatcgattcaaaattttact

SEQ ID NO: 187802 - DNA, 355 bp, Glycine max
  unsure (1)..(355): unsure at all n locations
aatgacattncaaactagtattaactctctntaacctccanataccactaaatccagatttggccttccaactctcaaaacctcactctttttccactcataacaccatattctcactttctaaccctaggttaactctacccttcatctctaacagttttccataagcanattcagcacaccaacatcaaaagcatcatcatataaaccctaaaactgaatgggtaagcttaactcactcaaacataacaagtttagcatgctttcgtcaaatctcttcacaaataactatcacagagcattaaccaagcaaaactgcccatcatatcttccaaagcctcatacccacgaaaat

SEQ ID NO: 187803 - DNA, 316 bp, Glycine max
  unsure (1)..(316): unsure at all n locations
aaagagactagttctgataagcataaccataagccacacatcaccaaggtttacacctcgtaacagcgagcaatagaaaaaataaccatggaccaccatcagcagggctcacaacacccaaggggtgcaaaccacccaacagttactacccacccaaagggtgaagggtcaaaaaatgtgaatcaatgggacatgacacaacaccaaggggtgcaaaccacccaatagttacaacccacccaaagggtgcagggtcagaagatatgaatcaaggggacatgacctttgngaacagtcccaaccaaccattatgatc

SEQ ID NO: 187804 - DNA, 296 bp, Glycine max
  unsure (1)..(296): unsure at all n locations
acatttgctcaactagaatgcttgttcagaggtaaaagatggaggagaggaaatggttttgaaggtgggaaccaaatntgatccagacccataaagtaagatgcgtcaagctaatgacgttaaacgagcgcttattgggaggcaacccaatcctttataattgttgaatgattaatcaacatngtttgcattgaaaatagggttgatcaagcttctctaacagttgtggatgaaaaacacttagaaatttttttcagtcatccactcgctcagcgcgccctgtgcattaagcgaat

SEQ ID NO: 187805 - DNA, 440 bp, Glycine max
  unsure (1)..(440): unsure at all n locations
agcttgatgtcatataaaagacactatgtttatcaaaatgaatactaaacatgcattgtttatgtaattgtattcattatgcaatataatttgctgtaagccattaataaccaattaatattattaagtactcgtttcgttaagcaaaacaatagttggtccaacaaaaatcatttacgcgtgtacgatacatcattgtcataatcgacaatgcataatgacatgcatgcgtattaaagtttgagtgcgacaccacattgactaacttgactacacattctgaaggaaacataaacacgaaacatgttcacgcgtgcctatntttttgtaaacaaagtgaagcaatctgccggtgacaaccatgtatatatatgagacacggctaatatatcacacattatcttgctttacataatctcccaatgatacacaaagtatgg

SEQ ID NO: 187806 - DNA, 457 bp, Glycine max
  unsure (1)..(457): unsure at all n locations
tcgtagttgccaccgncggtagcactccaataacagtcactttttctgcagagattaaccaaactccagctnttgtgtatgttttcaattattatatacatatgtatgattgtatgttaatttccttttgtttgtacctgaaatttaattaactttaactgaaatgttacgcatatcctgacatgcatatattactggtgggatgatatgtangttctttgtgatagccaatggacatgccagtctgcataacttggtgatgatagtaatggaagtattatgaccccgatatgatacaaaggactccggcttgcactaattgcaatattagatatggtactgaatgatattatttttattgatgacaataatctacttattgtatactaattttatctacttattactttatttataactttcttatacacattttatcatgagtctgttagtaatc

SEQ ID NO: 187807 - DNA, 331 bp, Glycine max
  unsure (1)..(331): unsure at all n locations
cttgcgctagngataacaagttcagcagcatctagggaaagctcttctgcttctattctcctcattatcttatatgttgaattgatatcctccttcgattgacgcccttgcttaaaaagctgttctagcttgtttcttccaagtgaatgaccagtgagcaccattggcacactcaaggcacctgaaagaagagcagcactatctccagcatcagcataatgtccatgaataacgtgtggccacactggtttccccccgctaacttgttcacccaatactttngacatattgagattgtgagcttaagccccctctacaaattcttgaatat

SEQ ID NO: 187808 - DNA, 233 bp, Glycine max
  unsure (1)..(233): unsure at all n locations
taatataatgaaatgtaaaagttattagaacttaggtataattttgaacaaaaaatcataatttattacttccctcacactcttntataggatccaaattagaaattgtgtttggttattttataaaaataatctaaaatatgtttatattatttatgtttcacaaaaaaccttatatatgaaatatttaactggctatgtagatattaagtgaaatacatcatatcttaagt

SEQ ID NO: 187809 - DNA, 378 bp, Glycine max
  unsure (1)..(378): unsure at all n locations
agacgaatattaatatataaactatatccgcacaacaaacatgtgcaataattcatgacaaatgactacttcaacaaanaatttctttcacatttcataaagaatagagaaaagtgatagatgtcataaatatttgatgtgataaagcatagaacaatgagacaaatctgaaagggttcaaatcttggatgttcaagtatcattaataaaaaaatcgtcaaaattattcttagttggaaaaagagacaaaagaatattgtggattgttgaaattagggtgtcaaaataagccttgtaaaattctatcaatagttcaataaacatactatagagtatatagaatgtagatgcgtttatatgaggatctcatttgtgaaa

SEQ ID NO: 187810 - DNA, 388 bp, Glycine max
  unsure (1)..(388): unsure at all n locations
ttctttgagaagctttctcaagaggcttctttgagaagctagatccttatctatccacacccctctattaactaaattaacttccttaaaaataattacggataaaaataacacaacaaataatcaaaaatcaaacataattactaataatatatagatatatatatcagggtgttacaattcaccctttaggtgtatacacatttttttcaaaaactagttgtgatcaatgaattttttcaaagaaaagatggaagttatcttctttcacaagcatgttggcttttcagctgaaagatatattttttgttcttgtcttttttttcatgaggtattntgctacctaaacatgtgtatattcttgtgaggtatttttgctatgcatatc

SEQ ID NO: 187811 - DNA, 331 bp, Glycine max
  unsure (1)..(331): unsure at all n locations
tgtagccattanaagagaatgagcatgtgattggaagcatgtctgaaaatgttagtcagtttgtcggattgattgtgaaggaatgcattaaccatatcccggtgagagtgtgatccttataatttgagagaaatgactatcatttaatattgatttttgcatgaatctctgaagtatggattgaatgcatgaaattgaggatgatgaaagccatgtttgattgtgatagccatttatccaaaaagctgaccatgtgcttgaataaattatcccttgtacccagtttgagctgaatgaattattgatngattgaaccctgagcctatacaat

SEQ ID NO: 187812 - DNA, 411 bp, Glycine max
agagagaccgatcttgatcgcatagcatggttttaaaagaagagtagttctttgctcaaggtccaaaagaaacttgttttattgtttatgcgagacagagaccaacatgttagctatcatcaccaagtaccaagaagaactaagtctagccacgacccacgagcatagggtggcggacgagtatgcccaagtgtacgcgaaaaaggaggctagaggaagagtgatcgactcgttacaccaagaggcaaccatgtggatggaccgatttgctcttaccttgaacgggagtcaagaacttccccgattgctagccaaggccaaagcaatggcggaaacctactccgcccctgaagagatccacggacttctcgactattgtcaacatatgatagatttaatggccatataatt

SEQ ID NO: 187813 - DNA, 364 bp, Glycine max
  unsure (1)..(364): unsure at all n locations
ttatacaacttttaaactcttatntttaagtcacttgcttatttactatttaatacattttctttggctgtgtagctaaattcccaattggcaaaagctagctataaatatctaaagctttatttgtagggcattcaattgtcaacgtaaatgaagtgtctatgagaaagtaatttgctttttttaaagtcaataatcaattccaaatctttcttataattatcttttagttatttatctcaatgttaaagattatattgagaaaaggaataggtttgagcataaaagattgcatgacttggtaaacaacccttaagcaaaccattaggatgaagttgatgcaattaaccataggatgagtgac

SEQ ID NO: 187814 - DNA, 455 bp, Glycine max
  unsure (1)..(455): unsure at all n locations
agctggatagaaatacattggctatcattttttgcctagagagagcactctgtctgagaaatatgataaaaatgatcctattctgagagaccctacaagcattaacaagaaggggtgggaatacacaaagaagatctatcttgacagccaaaatgtcatgttagacctcaaaagattcagaaaaaggttgcatcgagcgtatgagtatacactctccaaatcaaaactgagtctccaacatcaaccaatgtgaatttcaatggtttcttttggttctccgtattcattgatgtgaaaaaaaattaaaattttcttaaaatctaaaacattcttatatgcatataaaggcgcacctganaagttcttattgcgatatgttgttgtatagcacgggtatagaaatgtatactaggatgtgtaagtaaaagctacaacttgtgattctctctctcttt

SEQ ID NO: 187815 - DNA, 420 bp, Glycine max
agcttcttagtttcagatgatgcagctgattatgtagctacctcatgcactcctctaatgactataacatcatttctggcgctaaactgctgggagttggaagccatcttctcaattaaatttctggcttcagcaggagtcatgtctccaagggctccaccactggcagcatctatcatacttctctccatattactgagtccttcataaaaatattggagaagcaactgctctgaaatctgatggtgagggaaactgacacatagttttttaaatctctcccagtattcatacaggatctctccactgagttgtctaatacctgagatatccttcctgatggctatggtcttggaagcagggaaacttttttctaagaatactctcttcaagtcatcccagctcgtgatggaccttgga

SEQ ID NO: 187816 - DNA, 383 bp, Glycine max
  unsure (1)..(383): unsure at all n locations
actaagctttaatgctctattcaatggagtngacaagaatatcttcagacttatcaacacatgcacagnggccaaggatgcatgggagatcctgaataccactcatgaaggaacctccaaagtgaagatgtccagattgcaactattggctacaaaattcgaaaatctgaagatgaaggaggaagagtgtattcatgacttccacatgaacattcttgaaattgccaatgcttgcactgccttgggagaaaggatgacaaacgaaaagctggtaagaaagatcctcagatctttgcctaagagatttgacatgaaagtcactgcaatagaggaggcccaagacatttgcaacatgagaatagatgaactcatttgttcccttc

SEQ ID NO: 187817 - DNA, 327 bp, Glycine max
  unsure (1)..(327): unsure at all n locations
tcaataacatgcgtttcattccgccccttataatatcaccggctaaagattttagtctaacagtatgtacatcatctaaaatatccccattctcattttgtgaacattggacatccaaacctacagaagttttatcttcaccatgaatcaaagacataatgtattctttcaactcatgaacaatatcattatttngcgctaaattacctctgacgataaaaaatgtgcttaacgctttccccaagcgacgaatatgtgttctgacaatctctacaacaaaatcccttgaagtgccaataagaatatccaatgatttgccactggcgg

SEQ ID NO: 187818 - DNA, 377 bp, Glycine max
atagggggagaagcgaagaataaaagggttcagccccttaggcacttctctctctctcgaaatagctgaggaaaattagttccgtgaagaaaatccaagccgaggcgcttccgtaacatttccgtgagtaattacgcgaagattctcgaccgttcttcaagattcatcgttcgttcttcgttttcttcggtcttcaacgggtaagtacttcaaatcaagcttttcaattcattctatgtacccgtggtggtccacattttgtttcatgtatttttattctcattttcatctgctgtttatacccccttttgacgtgcttaagccatttatttaagtcatttctcgcttaatctaaaaataaaataaatttccaccga

SEQ ID NO: 187819 - DNA, 474 bp, Glycine max
  unsure (1)..(474): unsure at all n locations
ctataaatatatgtacacatatcagagatatgtaacatcaccctatacaaatacatgtgagacgaaatatatatatatatatatatatatatatatatatatatatatatatatatatatatataactatacataacaaccataataaatatattattagataaatattatatatataagcacaaaaaaataagtaaacgcattatatatatatgtgagtaagtacaattattataaatattaatatatatatatatatatatatatatatatatatagagaattacacgcactanaagcattaagataaatatatntatatatatttacacacactacatatatatatatataagaacaaagaacatgtgatatatatgtatatattaacaaataacagagagatatatatgtgtcgtggatagaaaatatattatatatagatacaaccaaaagttatatacatatatacga

SEQ ID NO: 187820 - DNA, 220 bp, Glycine max
atcaaattgtagagcactacttaagggccttcgtccaccgcaagcaaacgttgtggggacgattcctgttatgggctgagaggtcatataacacctcatgccactctggtacggtgataacaccgtttgagatcatttacggccggaaaccaccaactattcctgaatatttgggtggaacatcgtcaatagacacaggtgatgagatgcttcaccaaca

SEQ ID NO: 187821 - DNA, 396 bp, Glycine max
ctgattcaatcctgaacatcttatacatcttgaacatcttgaactcattctttgattatcatgaattgacccctgatcattttgtcatcacctttgttatcatcaaaacatctgtgaatcaatcttgattcatcatgaagctttgttttacacatcccaaatataatgcttagcatcactgttaatttatcattttgagccttatatgctaatggaggacaaacacaagcaaccaaataattcacaatattatgaaaccaaggagtgcggaaggaatcataaatctcatcagaatgcacaacggtcatccggagaatacttcaatgggtgatccttaaccatgctcattctactacgtgtcagcacaagtttatgaccactctacatgatttcaat

SEQ ID NO: 187822 - DNA, 409 bp, Glycine max
taagctgggaatggctctgttataaggccagagtttatttgatatccagaacataaagtttttctgaggggaaattctttttgcaccattttcttttctggttccaccctatcacttgttttacattccataaattagtttctagaatactagaaactaatttccgaaatgtagaaaaagagaaaaaaagaagggggtgtgaagagaataaagagggtgcaaatagaattactttttagtgagtcttgtattaaagaaactgattagagtgatccaaatattttcctagcaggattactgggctgttgatgtaatatgaaaaatccttaggctggctgggttattgatttccaggtgattgagtctgaccttggaagtcattctgatatagctcaattccaaacctaca

SEQ ID NO: 187823 - DNA, 449 bp, Glycine max
  unsure (1)..(449): unsure at all n locations
tgtcctctgtggcctgtgatccttggatctggctctccttggagcatgggctttggtggatcttgctgagggacttcgtgtggtaaagtttctttttctccctcacatcaaatcttggtatgctggttgtgttcattggttttggtattgaataaactattttataaaatcctattttaaaagggtatagttaaattttggtcaaaagatgattttgtgtcttctataaattggtaactcttattttgacccttgtatacttggtgaatttagtcattctntgttgaactttaaatactaagttgagggatcaaattcatcaattataatannaaaaagatcatagcttttaaagaactatcttcaaaatactgggattaaaatgcctttactatttgatggaagtactatctagagtctatgagagagattttgatggttattgttta

SEQ ID NO: 187824 - DNA, 342 bp, Glycine max
tagctaagcacacctccttgagatgagaagctagaacttatctacacaccctcaataatagctgagttcacccgcatgacgaaatacgtgacaatccatagaagagatccttactaccaagactactcagaattgcctcgaaatacaaggctaaaacctatactactaaatgggcaaatcaaagcctaacgaaggaagaaacctatctaatattacaaagaaagcgggctctacttacccgtggctcaaatttctctaaggctatgaaacctaggacgtcctggattctggccatctactggaggtttatcaatgcctgcgggaggatgcaattcctcacct

SEQ ID NO: 187825 - DNA, 420 bp, Glycine max
agcttagctgttgatcaaccatctactgtttatggccttatcttcccttactagaactaagctctctttcaagccctctcaccagagtttcagacccaagaatttcaggtgaacaaattgaactgtgattattgattactctacaagagatttaattaaatcaatatgcatgcataataatgttcttcttttttgttttatatgttttctaaaaaccaaaaaaggcctttataggttctaaatgtacgaggaagtttaatattaattataggagtggtgttgtggtagcaaagtatggtgacaagagtatgtactttgatttgaaggatctaggcaacactactagtcagtgggacttgtacggctccgatgcaccttcaccctataacactcttcaagttcatttttcctctgtgcacc

SEQ ID NO: 187826 - DNA, 308 bp, Glycine max
cactctggtgaagctctgccttaatctatagttaatctaggatctctatcagatactatgcttgatggcacaccatgttacctgacaacctcacttatatacaatgtggtcaacttcttcaaggataatatgatattaatgggaatgaagtgagcacacttattcaatctgtctacaataacccagatagaatctaaacctctatgggtcctaggtagtcctaccacaaaatccatggaaatactgtcccacttccactggggtatttttaaggggtgtaactttcttgaaggtcttgatgttctatc

SEQ ID NO: 187827 - DNA, 326 bp, Glycine max
tatctttctatctatttaatggcgctctgtgtgttcactgtgctatcataacttcattctaccatgcctttaccttgatcacgtatacgcatgtgtccttaggatcattcaacaggggaaactggcctgattcttataacttgataagacggcgctagcttgttttatcttcataaggaatcggggtaaggtaccctagttgtcgtatgctagtcttaatgcggtcatggctgaagttcctccaccaagaggaatctgcggacaatgcttgatcaggattacgctccactatcatgaggaatcggcgttaaccgttcaagagacac

SEQ ID NO: 187828 - DNA, 448 bp, Glycine max
  unsure (1)..(448): unsure at all n locations
aactaagctaagcagcttgcctgagagacnagaattttaactatctatttatttccaanacgcaagnttaagctatctcatctaatatgcccatgattgaaaaacctaatngatataaaaggcaacttttaaccacgttcaaaggatactattattgcatnttgagggcaccaacgccaataaaagagcttgtggcaacatccatgcttanggttctctcttaatcattagttcttgttttccccatggctatgagtatctaagttaatcatttgttgaggtgtaatctaattgaatctatcttatgtaaatatgctttttataattcaacaaaggattgatattacttatcttctatgcttaatgctatctgttggactgataaacacgatgtatgactctctatattcaattattaatgggaaaattgattaaatgatcgtgacta

SEQ ID NO: 187829 - DNA, 416 bp, Glycine max
taccctggatcctcttagtctatctgccgtatgcaagctcgaaggtgtgtagtcgaccatcttttcctagtagaatactagtaatgcgtctactatcattatcattttttctccgccattgaggagccacttgaactgccaggtctctccacctttgggcatattctttgaaagatctgtgcccctttttgcacatgttctgttgttgcatcctatccggaaccatatcaaaattgtactgatactgcctaatgaaggcaaccattaggtccttccaagagtggactcgagaaggttccagattattgtaccaagtaacagctaccccagtaagattttcttggaaggaatgtatcagcagttcctcatcttttgtgcatgcccccatcttccgaaaatacatctttagatggttc

SEQ ID NO: 187830 - DNA, 484 bp, Glycine max
  unsure (1)..(484): unsure at all n locations
cttaaaactcagcttaggctgctcaatgctcaggttgctgcatggaaaggctattgtctgtttgnggtcaacaaatgaacacaaaccacaaacccttgcgacaggtacagatttctgattcaaggccagcttggttaccacagtgaccaacgcatccagtttgccttcaagcttctttatttcaaatgatgcagatgggtttgtagctacctcatgcactcctctaatgactatggcatcatttctggcgctaaactgctgggagttggaggccatcttctcaattaaatttctggcttcagcaggagtcatgtctccattggctccaccactggcagcatctatcatactactcttcatattactgaagccttcataaaaatattggagaagaatgttgtcttaaatctgatggtggggcaactggcacatagtttttaaatctctcccagactcatacggctctctcactgagttgtctata

SEQ ID NO: 187831 - DNA, 148 bp, Glycine max
ggggagaaaggaaagacgaggttgtttttaccacgacagacgccgccctgcgagggagatgaccctacaaaatcccaataagaaaggccacaccaccaaagggacaaaaaactgctatgaaaaagagacacaccgatccaaacaacag

SEQ ID NO: 187832 - DNA, 296 bp, Glycine max
gtactaatctacacaaaatgagctaaatgcatctgagcctgcatcatcacctgcattttcctctatagtttcatatccccactacgtactacacatccaatttaagcaattgattcatccataactcaatcggattatgcaaaattgtttatctctatattaaatgaaccattaatctttttaaaactgctcagtgaccagtttatatgaacttcacaattctgtaggctaaattattacatggctgttagtccatgcactctactcatatgatcactaatacacgtacatatctt

SEQ ID NO: 187833 - DNA, 369 bp, Glycine max
  unsure (1)..(369): unsure at all n locations
acctgctgcatgtatgccttatactcaggagtacccactngttttaaagctatagcaagcgcagcaatgtggttattgtgtggccccccttgcatcgatggaaaaacaacaaaatttatcttttcttcaaaggcatattgatcactttcatgtccctgacttacaagaatccctctgttccttggctttgtacctttccgataaaaaattatgcctccccttggacctctaacactcttgtgagttgttgaagtaacaatgtcacaataatcaaaaggattcacaccttcctgcaagacaacaacaccatactattaaagcaaatgatgagcatntcttcaaattgaagacaattggttatggatattt

SEQ ID NO: 187834 - DNA, 208 bp, Glycine max
ccccgaaagaatctactagccccctttcccgaggtggtacaaccccgacgcgacctatgcataatacggaggtaccctggggcattcgatcgagcagagcatggcccctcaagataaaagccaaaccttgagtgacgccggatgactaccattccaagacaagggctcaaatgtgaagacatattcgcccgctaatcataggggaccg

SEQ ID NO: 187835 - DNA, 292 bp, Glycine max
ggccaaatctgactcccataaccgtgtccaggttatatttctacccaccctggagcggaagaataaaggaaatttcttctagaaatgacaaaagaaattcccatcaagagaagccaacacgaaacaaagataatccccatcaaagaggggagaagccaaagaaaataagaaattcccatccacgatgggaaaagtcatatgataagataagatgaaagctctgaccggatcaagaaaacaataatgtgcagaaggctttgaccaacatattgacatacaaatggcccaatga

SEQ ID NO: 187836 - DNA, 231 bp, Glycine max
gagcacttgggtgttttaagctctggggaacaaatatggtgaagaaatggcttcaacccccccccttacccccccattttatgcttttggactatactcgcctctccttgcataaaaaaaatggggtgaaacaatggcttctcccagtccttagatgaccacatgcaaatgcctgcttatgatttggatgttaaagtgcagcaatcaaacaagtgtttattgtgttcaatg

SEQ ID NO: 187837 - DNA, 423 bp, Glycine max
tgtctcagcatctatgcgagacagaaaccaacatgttaactattatcgccaagtaccaagaagaagtgggtctagccacggtccacgagcatagaatcgcggatgagtatgcccaagtatatgctgaaaaagaggctagaggaagggtgatcgactctttacaccaagaggcaaccatgtggatggatcggtttgctcttaccttgaacgggagtcaagaacttccccgattgttagccaaagccaaggcgatggcagacacctacatcgcccctgaagagattcatgggcttctcggctattgtcagcatatgatagacttaatggcccacattattatatatcggtaggaaacttgtatggtctctcacaccttgactagatatgatatcttttttttgaaataaaatgagttggtctcat

SEQ ID NO: 187838 - DNA, 382 bp, Glycine max
gacctgaagcatgaagcttgtacttgtaccttgacgtttataatttaaaagtttactcttgttaggcataagagcctgaaatatttatggaacaatattacaagggtgtgaaatatctgttttaagccattggggatactatgttttcattaaagaaattgaaaataaatgaacacaactttgacggctttgaaagaatatgaatgatttgatattgaaccaaattcataccttatggaaaggctcgtaggctaatgattttgtgtgccctatccaagaccataactcctcagccatatgtggggcatatggtgaaagcatcaagcaaatgcctcataaccgccttggatgttatcccactgaaatatatgcacgaaaatta

SEQ ID NO: 187839 - DNA, 345 bp, Glycine max
  unsure (1)..(345): unsure at all n locations
tcccacttggcttcctaatctcaccttacctctctgcatgtgaaatcgcggcaataaggtgccacatttccatcatgaattcaggcacaaaacacacttcaagatattggactgtctaacacggggatttcatatcctattcccatacggatgtgagaagcactntctcaggttttggatttaaacctctcttacaatcatatccatggtgagcttgcgactaccttaaagaatacattatctattcatactattgacctaagctcaaatcacttatgtggagaatatcctatccttcngtgatgtgcttcgggtagatcttntcagcaattcattctctgaacc

SEQ ID NO: 187840 - DNA, 411 bp, Glycine max
gatcttaagcacctgagttgcaactttgaggtgtgtaaaaaatccttgtttgtcatcatcaaaaagggggagaatgtgaatgtatgtatacatgattttgatgatgtaacatcctggaaatttctacccggaattttcgaaaaaagatgtattttgaatgattatatatataagtattattcagtgtatatgcatatatgttcttggttagagtaagaatagcgggggcaagatatgcgggtcggactaattaagggagagaaatccataactgggaggttatgggttaattcctaattaattagttaaaaatcatcgttttgcgtgcgacttaaaatttaacgaaaccaacctcttgtcataccctaatttcgtccggagacctttgcttgatgacgtgcgaccattctt

SEQ ID NO: 187841 - DNA, 320 bp, Glycine max
  unsure (1)..(320): unsure at all n locations
ccctataaaacacgtgagaganaaaacatgtattgccattgattattgcttgacaacttccagccactaaccttggaacganagccaaccacaattttccactcaagcacagacttggtgtaaaatcagatatgggacaacaggccaggctcctgcgataaagaaaaatctatcatttaattaccacaagaagacaccaacaccacaaacttgcaacaaaatcccgattacaataatcctattcacacaaacaccacgcaatcctctttcttttcatttacaattccaacatcactactgtgcaagatcaggcaaaaatc

SEQ ID NO: 187842 - DNA, 451 bp, Glycine max
  unsure (1)..(451): unsure at all n locations
agctntgaagatatgaggtggttcgtgaagcaaggtcacaggttccataaaatttttttaacgttgatgtttgctaatggtggttgcagggaaaacatgtgtagctcgtcaatgagttgttgttgaagaagctggatccttgtttactgggctgcaaacaggtcagtggccatttctgatttttctatggttcatgcttgtttgaattcttttttattagtaaattatatgtatattgatatattagttagaatgttagctttagatgctaaatgttaacttcaaatgcttgttttaagctttcgtatgtaattaagggcatttgtgggctaatttgcttgtcaaaaccttattaagccaatcaatttgtctagcagaaacaaaggatgtgaagtgtgaacagttattttgaattcaattaatggcttcacacccttttttgttcttttta

SEQ ID NO: 187843 - DNA, 352 bp, Glycine max
  unsure (1)..(352): unsure at all n locations
taccttctcctccattgggtgttcttcattttttttctccatgtatttcctcacatgtcttgtgttgaatgttgttaacatgattctttagagtttccaccaattaaactntctatagaagctagatttgattttctatggttcanatttcttgttcttgttcttgaaccatgaattgtgttgagtttaggttcctttgagttttgtcttgctatttttgtggcggaaacctaaaccataaaattctaacaaaaacattaaagtagaagaaaacattaaaaatctagagtgagatattcactcatttgtagtttgtcatagaagtcatgtctagtcatgaaacttgtcacat

SEQ ID NO: 187844 - DNA, 434 bp, Glycine max
agcttcctcggagccatttcctgcgaatgcaaacatttggaatgttatttttaccaaggaatgctactcttaaaacaaaaatggcatacaacctcctccaataaatacaaacatcaatgtaaatttagagcaagcttatgcgcatacttctttacaaacgttcacttgcacaagacattcttataactaagaaaaatgcacccatatacactcaaggcaccttcgttacctaaattatttatatgtacttccaaggtgtatttgttacctacatctcatgcacttccttggctaaatttacatacatgcgtactcaaagcatttggggtaccaaaatttgcacatatgcacattccggtatttctaatacttatgcatatacaaactttgtgatgaatcttggctatctacacaataaggagatacatttcatg

SEQ ID NO: 187845 - DNA, 317 bp, Glycine max
atgtaggccaagtcatatgaccctgtaggccggcctagcctattcccacccttagccgacggattcgatgaggaagccatcgcccaattgttgtgcacaccggggcaggaattcgcccggaccgctacagggaggcgggtgcggatcatgcacactagcatgaccaccttgacctagacatggatgacattgctgctcagcaatgtcttgcctagtgatcacaactctgatctccctctgcctaagtgccagttggtgtatgccatcctgacacgaatgagcatcgacgtggcccgggtgattgctgacgccattta

SEQ ID NO: 187846 - DNA, 453 bp, Glycine max
agcttgcccactgaaacatttatgctttttatattgcagacattgtttctatcaaattgcgaatttcttattcaattgccacagcagataggaaatctggttaatttgcgtcaccttgacctcagtggcactaatttgccagagatgccagcacaaatctgcagactacaagatcttcgtactttgacagtttttattgttggaagacaagatggactaagtgttagagatttaaggaattttccttatctgcagggtcggctttccattttgaacttgcacaatgttgttaatcctgtggatgcatctcgtgccaatttaaagaacaaagagaagaatgaggagcttatgctggaatggggcagtgaactacaaaatcagcagattgaaaaagatgtacttgacaacttgcaaccatcaacttaattaaagaaactcgacatcaaatattat

SEQ ID NO: 187847 - DNA, 459 bp, Glycine max
  unsure (1)..(459): unsure at all n locations
ctaagcttatattctttttgagtgactcatgatagtctcgagtgaacttcaattgtttntatttacagaacttgtctttttttaatacacttaagaaaactcatcaatacgcattaactcaaaaggcttatgaattgtgttcaaaaggtttgtcataattaaaataccacgagttttagactcaacacagtctgggaatggctgaatatttgtttggaaaaggctgcaagattgcattacatgattccatgggagaacggagaattcttctaaagttttgtgaattccattggtaaagaatctatttttttgtaagttagccttttttcaatcctaatttgtgattttaatgtattacctttcatttaggtttcactataattaagtaattttgttgcatgtgtacgaagagtgataactctgcttctagttgagaaaaccgtgccgcacaatggtttc

SEQ ID NO: 187848 - DNA, 459 bp, Glycine max
tgcaagcttgtaatggttggtgccagagaagattctgtagcttccagtcttttctttaattatgggtaagcatatgatttagtgtaaactactacatcgagaaattggggagttttgaatgagatcagctagctactctgatcaactactccgctcacacacatcaactccatcataatataattatggtgtttgaacttgcttctattaattgggtatttataccactccggcctcataactctttcattatcatctcaacacatacatcttccatccaactatatagcaaaacactctatggcgcggtgtgaatctctttccacgaccatgcccctgaatgcaaatatattaatagcacttatattccttgcatttgcaatcacggctaccacttcaactcgaatcttgatgaaatcgaaacaccagaagaacccaacactgctgcccgaatccctg

SEQ ID NO: 187849 - DNA, 419 bp, Glycine max
  unsure (1)..(419): unsure at all n locations
aactaagctaacttatntgctgacctaactgtcttcattacaatgttcatcttaacttgttgcagaagatagaatgttcacaacatttatgattaaacaggtttggcatatcnttatacattttcaggacgttcaataatacacaaggacgtgaaatcaaacaatatacttctagatcatagcatgtgtgctaaggttgccgattttggtttctcaaaatatgctcctcacgaaggagacagtaatgtttcccttgaaataagaagaactgcagggtacctggatcctgagtaagtgaacatcttggatcatgtctttaccagagcttctcatactgctttactctcccttgagcaaaagttaatacacttcccacatataggttctaggaatcaatcatcatcttcaatttgaaaacc

SEQ ID NO: 187850 - DNA, 441 bp, Glycine max
  unsure (1)..(441): unsure at all n locations
agcttcttgaaataggcatactgatatttgtgtgacctttgatattaattctttcggaaagaaaagatactttatgacctttattgatgactattcacattacggttatgtctacttattgcatgagaaatctcaggtaatggatgccttaaaaatttacttaaatgaagtagaaagacaattagaaagaaagttaaaagttattagatctgatagaggtgatgagtattatggaaaatacgatgaaactgggtaacacccaggtccatttgctaaacttcagaaacatggcatctgtgtgcaatacacaatgtctagtacaccacaaaaaaatggtgtatcagaaaggcgtaatanaactttaatggatatggttaggaagtatgtaantcaatcaactttacccatatctttgtggatgtatgccttgaaactgtcatg

SEQ ID NO: 187851 - DNA, 343 bp, Glycine max
  unsure (1)..(343): unsure at all n locations
gaagctgtcatatacgtgcattngtgttttatacacaattcccggtacaccacaccaaaatggtgtatcataaaggcggaataaaactttaatggatatagttaggagtatgttaatcaattagactctatccgtatccttgtggatgtataccttgaaaactgccttgtagttgttgaacagggttcctaataaggtagttccaaagacaccttttgaactgtggacaaataggatacctaatataaggcacctgcatgtttggggttgccaggctaaaataaggatttataatccgcaagatagacaatgggatgcaagaacaatcagtggatattctatt

SEQ ID NO: 187852 - DNA, 289 bp, Glycine max
tggctcatcccctagaggatggcgcctcctctcacttcatctcctttgtcttccgctgcatctccatggaggaaaatcaccattaaaggacctcactgaaactcaaagatccaccctccatagaaactcaacaagcaagcttccatcaagtggtatcagagcacaagaacttcaagtaagggctcctaaacctccattaacttttttgctttaccttcccttccatagagagtgcttcaattttctccatgtatctcctcacaagtctcgcgataaatgctgctaacac

SEQ ID NO: 187853 - DNA, 308 bp, Glycine max
aaggataaaagggatgccccacattatttccatgacacaaatgccaaaatgatgatttggaaattttatgccaaactggttatgcatgcacctatgcggacactcaaatgtcaaatttttatggtcatgtgatgctagggctcaagattcatttcctctattttaaatcaacccaatgtttccaaaatatgttcttttatcaatttgtgcattcatccgagtccatttcgggcgtccggggaaatatcatagcattcacccttcaggtgacacattttttcaaaaactagttatgatcagtgatattt

SEQ ID NO: 187854 - DNA, 454 bp, Glycine max
  unsure (1)..(454): unsure at all n locations
aaagaaggcctcagcanactccttattttcagaaatgtattctatcaanaggcctccaatctttaatggagagggttaccattactggaaaacccgaatgcaaattnttattgaggcaatagatctaaatatttgggaagccatataaatagggccttatatacccaccacagtggaaagagnttcaatagatggtagttcatcaagtgaaagcataactatagaaaaacctacagatagatggtctgaagaggatagaacacgagtacaatacaacttanaagccaaaaatataataacatctgccctgngaatggattgaatattcacggtttcaaaatgtaagagtgcttacggaatgtgggacactcttctattacacatgatgaactacggatgttaaagatctacgattaatgactaactatgagtntgattatttaaatgatgcaat

SEQ ID NO: 187855 - DNA, 251 bp, Glycine max
  unsure (1)..(251): unsure at all n locations
gaacatggtgcagttgatgtgccatantcttcactatatcttagacccttgtacaccattttaattactgattaatcttatttgtcaaattaattaagcaggtgtaatatttgtgctcattcacctaatttgacgattttaatctaatttctggaattaatgaagcattgagcctaatcccgattttggttgtgcactctaagagggcaaatatacgcacgcgtaccttacttaatctcttatacgagatc

SEQ ID NO: 187856 - DNA, 423 bp, Glycine max
  unsure (1)..(423): unsure at all n locations
ctgtaagcatgcaagctctgagtatatcagtcagttatatatttagttctgaaattttttatcatttgtcagggataaaaccgttttatctccacaacctctagctgattattctaccccatatgaaattcctcctgtagattcagctaaacaaccttcactagataatagcccttctgatggctcagctgaatacattgagttatattcaacgctattagaatatttcgatctaactcgttatggagcagaggctgatgggaggacaaattctaactctataagctcttgacttgcatctaaaaacttaatggtggaggataactatgcatgatttgtcacttcctttgactatttatgcattntaccaattgtaaataaaactattgtagctagaaacacagtaacatcatgttctatgtt

SEQ ID NO: 187857 - DNA, 439 bp, Glycine max
tggcatcagcaaacttcttatttctagaaggttattcaatcaatagacctccaatctttaatggagaggattaccactactggaaaacccgaatgataatttttattgaggcaatagacttaaatatttgggaagccatggaaatagagccttatatacccaccacagtagaaagaattacaatagatggaagcacatctagtgaaagcataacaatagaaaaacctacagatagatggtctgaagaggatagaagacgagtacaatacaatttataagccaaaaacataataacatctgccctgggaatggatgaatattttagggtttcaaaatgtaagagtgctaaggaaatgtgggacactctacaattaacacatgaaggaactacagatgttaaaagatctatgatgaacacattaactcatgaatatgaact

SEQ ID NO: 187858 - DNA, 420 bp, Glycine max
  unsure (1)..(420): unsure at all n locations
agcttccatcaatagtactcgcttagcgtacatccgcgcttagtgagttcaacaaataactcaacagagaagatgaacgcgcttaatcttcaacagaagcgatgaactcgcttagcacagcaaggcacatagcgagttcatcgtgatttccagaaaactaggggtttctcaccccttctcataggcccctattgggccatcaaatcctaatcaaaacaagcacattgtgactacagtacaaccctaaagctattctaagtaacaactaacctaacactaagcataaatagaaattctacctaacgatcactaagttatctatcctaaggttgaaaacttagaacgaaaatgaagtatagtaaagaaacttactgtgatngtgtagatgaatgcaaagaacagcanagtgttggatcaagt

SEQ ID NO: 187859 - DNA, 408 bp, Glycine max
  unsure (1)..(408): unsure at all n locations
tgaataccctttcaagaataaggataccatatagatgggtgtttagtgggtaactgtgttagctgtgtgactggttagtcattattgtctctctctgggttcctaacattatattattttgcttttgggaaaatattgtttccatacattcaaatgctatcttaagcttcattgagccatgaagtactcttttggtaaaatgtatatgtatattgttgagctattagtgcttaacatgtgtgtgtacacaacttgattgtttatatgacattttttccccctgcaaataagaaatacaatcagttgcgaaaacatttaccacacaaaatgatatnttgtaaatggattactataccataattcatttntaaaaanaaatatatctattcagcaaaccttcaatgactt

SEQ ID NO: 187860 - DNA, 336 bp, Glycine max
  unsure (1)..(336): unsure at all n locations
agctntcaccccataattccnccaaattttgtaaaatctgctgggaaccaaaatttccttttatgaatgatgctctcctacaacctaagacaaggtagaaggagataaactgtacaggctcaaggtttaatcaaacaatcatactttcagctcaaaatgggtgtaagggataaatcaatcatgcacaaggtaagctttttaactaagtggctatcttcaatcaaaatattgccttcatcatcttcaatttcatgcattcattccatactcagagattcatgcaaaaatcattactcaatgttagtcgttctctcaacaataaagaacacactctca

SEQ ID NO: 187861 - DNA, 351 bp, Glycine max
  unsure (1)..(351): unsure at all n locations
tttggagtagaaacatgggaccaactcattntatttcaaaatttgtgtcatatctagncaaggtctgagagaccatacaagtttcctaacgatttctaattatgtgggccattaagtctatcatatgctgacaatagccgagaagcccatgaatctcttcgggggcggagtaggtgtctgccatcgccttggccttggctaacaatcggggaagttcttgactcccgttcaaggtaagagcaaaccgatccatccacatggttgcctcttggtgtaaagagtcgatcacccttcctctagcctctttttccgcgtatacttgggcatactcatncgcgaatctatgctcgt

SEQ ID NO: 187862 - DNA, 418 bp, Glycine max
  unsure (1)..(418): unsure at all n locations
gtctcatatcggtttaatcgattacggnagtactttaatcgattacactgttatttgagacaatgactgatttttttcagcagtctctgctttaatcgtatactaaatggataaattgattacttctatcttgtttaagttgtttaaaggtgaacaaaaacactttaattgattacttaggtcatctaatctattacattgttcttgagtggttttccagatgttggatgaacactttaatcgattacttaaataatataatcaattacttcattgaaataattgattaccttatagatttaatcgattacagacggttatgtcgcaacctacccttcggcgggagggcgaggcaagataaagatgtgcgtcttctcatgaagaaaatgcgtggagtcgccaccaacatttatttgag

SEQ ID NO: 187863 - DNA, 397 bp, Glycine max
  unsure (1)..(397): unsure at all n locations
taagctngatgatcgcctatggcatatagaacaaccttcaaaacacccattggcctctccccatttcatatggggtatggaaaaacatgcgacctaccagtggagttagaaataaaagctcattgggctatngaagtcctcaactttaactctacagcatccagagagaggagaaaggtacaaatataagaacttcaagagatgtgcctcaacgcatattaatcatccaagctctacaaagaaagagccaagaggtgccataacaaaacaatcctccacaaagaatttatgcccaaacaacaagtattgctctacaactcaagattaaacgtttttcccggaaaaattaaaatgagatggagtggaccctctactatcatagacattaagccttatg

SEQ ID NO: 187864 - DNA, 395 bp, Glycine max
ataaatagaactcccatctttaatggagtgggttaccactactggaaaacccgcatgcaaatctttatagaggcaatagatttaaatatttgggaagccatagaacaaggaccttatgttccctctatagtggccggaagtgcaacaatagaaaaacctatagcagattggaatgaggaagaaacaagattaatacaatataatttaaaggccaaaaatattattacatctgccctaggaatagatgaatactttagggtttcaaattgtaaaagtgctaaggatatgtgggatacactacaagtaacacatgaaggcacaacagatgttaaaagatctaggataaatacattaactcgtgaatatgaactgtttatgatgaatgtaaatgaaag

SEQ ID NO: 187865 - DNA, 399 bp, Glycine max
  unsure (1)..(399): unsure at all n locations
ttaactaattcanggataacagngcaatggtatgacatgaattgtatgatatctaagttctgaaatgcttgaatgcaatcaaaactttcagcagaaaagaattccatatctatgaatttanggtcgataatggaacgagatgagaanaggtttgagtaccgcttctgctgttcctcggaagaaaacagtttggaagaggataatgagggtggaattggtgttgtggatgcgctggtggctccggaaggatgagctcttgaagccgaagcggaggcggatgaacccttatgcttctntgatgattcttccatatgatggagtctttgcagattgcaatnggtgaaatcaaaagataattgaaaaagaagaggattgcaagttacgggagtcgatttgatg

SEQ ID NO: 187866 - DNA, 383 bp, Glycine max
  unsure (1)..(383): unsure at all n locations
atccttaagctcctgcggtcatgcaagctnggggacagcaacctcgtgcctcatatgcacgtgggtgtggtgaagtttgggtttttgaggcacaccaaggttttgaatggggttatggatggttatgtgaagtgtgggcttgtgggtgaggctagaagggtgttcgaggagattgaggagcctantgttgtgtcttggactgtggtgttggaaggtgtggttaaatgtgagggtgtggagagtgggaaagtattgtttgatgaaatgcctgagagaaatgaggttgcttggactgtattaataaaagggtatgttggaagtgggtttacaaaggaggctcttttgcttcttaaagagatggtttttggtaaccaacagggatt

SEQ ID NO: 187867 - DNA, 335 bp, Glycine max
  unsure (1)..(335): unsure at all n locations
tttatatctcgttcccgtcatgttaacctcattgaattggcatttactataaaccaccagacagacctatagctctggaaagtgcttgtacttttcaaacttttgaaagatagtttattacacccatgtagccgttgatttgagtatttacagtaaattttagtcttactaagaatctttcagctacacataaaggaatttattgttttaactcttcctcttcataaaacgattagcaaccaagcacaatgcaggttcacataagacaatgcgtgataggtntacaaaattcagaagtaaaaaaataatacaattgtccgaatgattattaatta

SEQ ID NO: 187868 - DNA, 331 bp, Glycine max
atagctttttagtatcagcaatttgcagaacatcttatttttttcatcaacccacactaaccattatgaaaaccgagctatctgcttacctaagccaagggaaccccttataatcatcacactactattttatttttcaagctaataatggtaagaactactactgatgtataatatagtatatattgtggtatatatatctacaattatgtccgggactgattaaaatcttaactaattttaacaagatattcaattgaccttatgagtgaatgattgattaaaccagtacaattcggacaaaatgaaaaattaaactaattatcattac

SEQ ID NO: 187869 - DNA, 431 bp, Glycine max
  unsure (1)..(431): unsure at all n locations
taatatttttttactcggatgtctcttttaatcccgttttatatccagacanccaaaattgaaaccaaaagctttgagcaaatccaaatgacaataactctttactcagatgtttgattgtggccagtggtatatcgagacggtggaaatttagaatagaacgcctgagctaaatcaaacgacacttaatttttactgggatgtccgactgtgtcccatattatatcaagacgctcaaaattcaaaacaaaagctctgagcaaattcaaacgacaataacctttttactcggatgtgcgaattaatcccgtaatatattgagacactcgtaattgaaaatggaagctctgagcaaatgctaacgataataactttttactctgatgtccgattgagtcctgttatatatcgagaccctcaatgtgaaaaca

SEQ ID NO: 187870 - DNA, 436 bp, Glycine max
  unsure (1)..(436): unsure at all n locations
acacttagctactatacaatcacgagcgtctcgnatactacgggacatatttggactcntctttanaagtatcgnaattgaatttgctcataactgttgttttcaattacgatcgcctcgatatattatgggattcattcggacatccgagttaaaaaatatcgccgcttgagtttgctacgtggctcctgggttcaactacgagtggctcgatatactaccggaaacgattggacatacgagtaataaataatagctgtttgaattgcccagacatttgttctatttacatgcgcctcctttttaccggattcttccgacattctgttaaaaagtaatggcgtagattttctcacactcttgtctaatttcaacgctgaatctcggattcatccgaatctattaaagtgtttcttgaattgtatacctttgttca

SEQ ID NO: 187871 - DNA, 437 bp, Glycine max
taagcttgagctttgagcacccacgtctgttccaagagtagtgtagggttttcttcgacccacaattccaacaacatggtagggttttctttgacttttcttcgataggaggttctgtgggttccagcgaacggtttccgacaatattgaaatcaacgtggggcaatgtgggtgtcgaccgagcggtttccagcagatttcaggtgggaggagaaagagaagagagagtgcaccagggttttcgagcgcgcgagttgtgaaatttcaacacgttttaacttattaacataacaacatcaacatcggttttttaaggataaccgatgttaggatgaatctgttaacaaaggttttctaaaaaccgatgttaacatcaacaaggtaacatctgtttctcaaaaaccaatgtcagttaactccttacatcggttttataa

SEQ ID NO: 187872 - DNA, 412 bp, Glycine max
  unsure (1)..(412): unsure at all n locations
gtgtaatcgactacacctaatttggaatcgatttccagtgtctatctctgaataaatcanaagatgtaactcttcaaaaaggttcttgactttttcatattgcgtttaagtttttctaaaagttataactcttctaaatgggtgtcttgaccagacatgaagagtctataaaagcaaggctntgttttgcatttcaagaatcttgaatacttttacattcattcaatcaatcctttagaagccttgaatctctttgaacttcttcttcttctttgtaccaaaagctttctgaagttttctggttntccaaaccttgaaaacttgtgctattcatcttttcattctcttctccctttgccaaaaagaatacgccaaggactaaccgcctgaattctttctgtgtctctcttct

SEQ ID NO: 187873 - DNA, 250 bp, Glycine max
attgcgactaaacttaaagagcgcaatcctaatattatttgagttgtaatgcatctttagttttgacctatgttataaacacatttacaagtgtcatggcctgaaatattgaattgtttctacctatttaaaaaactacttaatttgaaaaaattttttgtaaacctattatttcgttaccaagataagtggcatctgattacctgtaagccacgttatgcagaaaaaatgcaatacacctgtactgcat

SEQ ID NO: 187874 - DNA, 275 bp, Glycine max
ctattcatttctgggcattactgttattcctgggaattctatcgggagagaactagttgcaacttgttttcgaatgcagagttcctatgctagccatatataagtgaagctactgttctagctctcttgctcacttatcttctcccttgactgtatcttcaacactcacttttggttcttggtgtgagggtgctagaagcatatgccctatcagtggtatcaaagcttctgggcttaacaatcctatgagagacttgcttggtcccagtgcggga

SEQ ID NO: 187875 - DNA, 392 bp, Glycine max
agctctgtctagttaagtgaggaaataattaattcgacaatcttgaagggacaaggaagaagctgtggcttcgaatttttcattaataaaaactaacatttattgataaaaaaaagaaagttgacaataataattcaaggttatgttgcgtcaatagggttacctgagttaagatggtaccggtagatgtatcatgtatgaaatacgatactttttgtaacgcaagcatgtgaaacatgaaacaaaacaacatgtactgaaaatttagaattacagcggtttgagctaaatattcaaaattacataaagtctgcttgtgaaagaaacaaacataaatgataccatacatacaatcaaatcaacagacacttattgtgtacaaaaaagaaaaa

SEQ ID NO: 187876 - DNA, 283 bp, Glycine max
gatgaaactacatttgcactgatggggtgatagctccccccaaccttaaaattacacatttcacttctgttttattggatttcgcattaaaacaaatttaatccttttttatcaaaaaaatctttttaattttgtttccaccccagaagttctgtcctagttcctactccaaccagcgtgctagctattgtttgaccgtatttgaacaatatatacaattgctatctgtgccaacaacatacatgttgcaagaaaggatatagaatcaaaagatgtgctttta

SEQ ID NO: 187877 - DNA, 413 bp, Glycine max
  unsure (1)..(413): unsure at all n locations
agctntagccttaggatggtccatgttgttgctccctctactttttaaaactgtcaacacaaacggttgcaaagtgcttcaactccaaagattaaactttgtgcttgtgttgaaacaaagccatgtagtctcttttataacgatgtattgagcatatggtcaaccatgtttatacttttctaaaatgatgccttaagttcaatataagtatgttatccattgcatcccaacaagtacataaatctttcatgctatcacaaagcagtttagtgtggtgtcaacataagatacataacaaacaaaatgtgaaacaagcacttacaaaaatgaacctattagttgttgtgtttcaaagatgcatatagccatgcataataaacatactcctgaaatagccatgcaataataaacat

SEQ ID NO: 187878 - DNA, 398 bp, Glycine max
  unsure (1)..(398): unsure at all n locations
tcttatccaaggctcatcttggtggtgaagctccttcttctatggcttattccctagtggatggcgcctcctctcacctattctcctttgtcttccgctgcatctccatggtggaaaatcaacattaaaggacctcattgaagctcaaagatccagcctccatagaagccccacaagcaagcttccatcatgtaggattttggtgggtgttctgaattaaaaaaattacaaaaaggtcctcagttatggtggctgttctctctttggtgattcactcaatttggagtgcttcttagtccaatagctcttaaggtggttggcccctcgcttcttgactcanattcttcaaaggatggcaccaatccttctttccaattccctatattggaactcacaaa

SEQ ID NO: 187879 - DNA, 263 bp, Glycine max
  unsure (1)..(263): unsure at all n locations
agcttnttataaatgtataatagccactttctaccaccctcatgggcattaaacaaaatccttgttcaagaagaaatgctgcagcaacgatgagtatctagtcaacggaagctgccagtgtgctacaccatctacatgtgtcactgcgcttgcactgaatctacaggaggccgaaaaagaaggctattatatggtcaaccagaaccgccggaggaacaatcagggcaacaatgagagaccgcatctggaatgaattggagagg

SEQ ID NO: 187880 - DNA, 392 bp, Glycine max
  unsure (1)..(392): unsure at all n locations
agctngngtattgttgcattctactaatattggaattgcccactgctttacctgagaataacaattgtgtgaccacaacaacgctggaggtggcaaaggacaatggtctttcaaataaacctgttgtacatgaattatgattgattagcataattgattgattagcatgaattatgattatgattgattgattagcatgattgattgattctgaaaattgctaactctgaaattatttatatcctcttttagggaattatgattgattagcatgattgattgactagcatgaattatgattatgattgattaccattaattatttataataaactcatatttataaatttattataattaataaaataaataaattatatttattatattat

SEQ ID NO: 187881 - DNA, 356 bp, Glycine max
  unsure (1)..(356): unsure at all n locations
ngaagccattgtcatcagngaatnatgttgtgtgatatccattgtctaactataaagcatgatacgtcgcaggttcatagcacgctcatcaccttgggatgagataaatgtaaatatttctgtaagtacttttggagctcgaaggttttccctgccttggactatggtgccatctcctccccatcaattttattcattaaacaaaaactatgaagcatgatagcagttaagctgataatagggtgattctattaagttctagttgtatgttctgaactgtgtttagtaatgaaaaatatagtttattccccgcattcatcactagagagacttctctctcgnttctctttagttat

SEQ ID NO: 187882 - DNA, 420 bp, Glycine max
  unsure (1)..(420): unsure at all n locations
gcggcttgcaggtagcggttatctgtgatatgaactttgttatgtagttcaaactccccaagaaaccgtggacctacttctctattcgtggctcaagcatgtcaaggatggctttcaccttgtcggcatccatttctatccctctttgacttacaatgaaactgagtagctntcctgacttgaccccgaaagtgcacctagcggggttcaatcttagctggtacttacgcaaccattcaaacaactttcgcacgttgatgaggtgttccccctctgttctagatttggcaatcatatcatccatgtagacttcaatttccttatgcatcatgtcatggaataatgccactgtgtagaagcaagcttcatgattgaatcaagattgagtcatgaatcaagattgattcatgatgatgaatc

SEQ ID NO: 187883 - DNA, 332 bp, Glycine max
  unsure (1)..(332): unsure at all n locations
ccgctccggagtacgacagtcaccgctttatgagcgctgtacaccagcagcgcttcgaagccatcaagggatggtcgtttctccgggagcgacgcgtccagctcatggacgacgagtatactgattttcangaggaaatagggcgccggcgatgggcaccactggttactcctatggccaagtttgatccagaaatagtccttgagttntatgccaatgcttggccaacagaggagggcgtgcgtgacatgagatcctgcgttaggggtcagtggatcccgttcgatgctgacgctatcagccagctcctgngatatccgatggtgttggaa

SEQ ID NO: 187884 - DNA, 447 bp, Glycine max
  unsure (1)..(447): unsure at all n locations
gctttcttgagaaaacttccttgagattctttttgagaaaactttcttgagaagctagagcttagctacacacacccctctcataactaagctcacctccttgagaagcttccttaagaagattcgtaaagaagctagagcttagctacacatacctttctaatagctaagctcacctccttgagatgagaagctagagcttagctacacaccccctataatagctaagctcacccccatgacaaaaaacatgaaaataaaaaaaagtccttattataaagacaactcaaaatgccccgaaatacaaggctaaaaccctatactactagaatggccaaaatacaaggccttgacgaagganaaacctattctaatatttacaaagataagcaggctcatacttagcccatgggctcgaaatctaccctaaggctcatgagaacccta

SEQ ID NO: 187885 - DNA, 478 bp, Glycine max
  unsure (1)..(478): unsure at all n locations
ngatcaaaacaattatctaatcattccaatccactcaaatcatacaattgctcattcaaataattatcaaacactcatntcataccaaacaatccattgcatatcattttcaatcaattcattgttcaaacacgcttttggtacaagcaaacaactcaaagtgctgaaatttaaaataactaagatataaagcatactaaatactaataaactaaaatgttcatgctttgcagaaattaaactaaacacaatttaaacatcctgctcatcttgtggctgatcttcattatgatctagtgttggagctgctgatgaatcctggataggctgctctggctccgtgactggtgtagatggctgggtctcctcacgaactggtgcatgagatggcttaagtatttgatctatggaaagtcccttctctgagcatgtgtgatctgcatcaaataaatggctatgagtgtgagctcatctccct

SEQ ID NO: 187886 - DNA, 450 bp, Glycine max
  unsure (1)..(450): unsure at all n locations
agcttctcaacagcatagcagaaataacatctgccaacgagttgcaaccgagtccagtatcggttcttgactcgtcattttacaaggatgactggtcttcaccatccccgataacaaaacgctacattgattacaaaggtgagtgagactgtttttttttttaccaaacttattagcttctgtgtaataattggaattgaattttgtggtgacgtattatctgtgcaatagccaaagttggggtgcgtcatctattgtcttagactctaatgttatgcaagtaaatctgtaggcgttttatttatttttaagctgcatgttttgttngcaactacaagtatgagaacagcggatggtttgttctcttaaaatccccaccaatgtggaccaatcatttgatcccagagatgtngacatggcatgactcagttgggctcattcactcttacc

SEQ ID NO: 187887 - DNA, 272 bp, Glycine max
aaaaaaactatgggggtgactatgttatcaaataagtgtaaagtcaactacggaatcttaaattcaaaacatgatatttcactcaaaggataactccttccctttgttattaggtatttttcaaaggatacaacttttctaaattgcatgaattatttagtaattaatattttttctcaaaacataaccgatgagcggaattaaaaaatatatattttaagggtataatatttgtttgacaaagacaaatgacctaattagaggctcacaac

SEQ ID NO: 187888 - DNA, 426 bp, Glycine max
  unsure (1)..(426): unsure at all n locations
agcttaacatgtacaacccaaattttcactccaattcaagttctatatgcatattggaaactgaatntattatttactattgtaattgaaggtgaatatatcttaactcaaaaactcttccgcaattgaaaattctaaatctttagaatttctcaattaaggtaatcattaggttcaagaatatctaagggggtgtttggtttgactgttttctgttttcatttttactaaagcggaaaatggtgatgaaaatatgtttggttggattttgaaaacgttttcntaaaaatgaaaacagaaaaaacccaaaatgaaacaatataattcatttcagtgtttcagtgaaacaggaacctctttgggaaaatgaaatgcgagacaagnatgtattttaagcaatctaaaataccaaatgacagacgtcat

SEQ ID NO: 187889 - DNA, 403 bp, Glycine max
  unsure (1)..(403): unsure at all n locations
tactaagcttgtcttggggacgtcacaggttgacanatggatttttatttcctaaatcttgtgcaactgtgttagcgcaactccaggttgactaatgatgcattgaggtcactaaaaaatatgccaaggttgttgttcctcattttaagagacaatgcttatgaaggtgaaactttgcattttcaatgtggagggtttcagaaactaaagcaactgaacctaggaagtttggatcaattgaagtgcatccttatcgacagaggagcactgtgttctgtggaagaaattgttttagaggcctctcccaactcanaacagttccctctggaattcaacacctggagaaacttaaagatctctatatcaactgcatgccaactgaaattgagcagcgcattgctcc

SEQ ID NO: 187890 - DNA, 416 bp, Glycine max
  unsure (1)..(416): unsure at all n locations
gctttaacatgatcctatccaactacaatcaggtacagaaacttttcatacgatttactccgcagtcagggcgtaattcaatagctgctgagacaaattcttttccatacttagatgtgatttgcttcttcacatccacgagctctggtatgtctgaacatcttggagatgcanatattacacttgaaactgcttccttcaagtcaatggggcagtttctgaaaaagtttaataaggagaaatgataatgacatcaatgcaatgagaatgtacaatcataatgaacaaacttataaactacaacaacaacaacaacatttacatgaatgactgatatagaatacaaattcaaacatgattttaagtttttaacaacanaacaccacacaatccttaagtcattcctaaaatcattg

SEQ ID NO: 187891 - DNA, 263 bp, Glycine max
  unsure (1)..(263): unsure at all n locations
accatcaccatgtctatccgtgacaatcacattattacagggtgaggtcaggtaagggtgcatccaaatccactctcaaatagtatatatatattattaatttagggtagagagaaaaaaaaacaatgttcaagttgaaggagattgagaagcaagaaaattgttgaagtggcagcgtggcgctatggaatggagcagcaaccttgcagtgtgatcctgtttgatgaccgccccnttcttcttcaccaacaccgccgcaacaa

SEQ ID NO: 187892 - DNA, 443 bp, Glycine max
  unsure (1)..(443): unsure at all n locations
agcttgtaacttattacagctcaaatgtgtggttggatggngatcagaatcagaatctgcctgatcccaaagatatcaaatgcttggaaaggataggcagtgtaaatgttgaagctgattccatctacgaactttacaaggatcccagccctataatggaacctggttctgtttggaaagacattgttctttcaccttcaaggtataataatgatcagaaggaattgaaggaattcattcagaaaatagaaacatccatcagaaaacggtaaccattgatattgctgcatgatattttcctcccaaagccaagttttggagtatctaacaaagtttgagttaccaagttttgtatctgctattccctatggtttaaataacgaccgaagaaacaaagggagaaggtcgagttctgcatggaagtcagtttctttgcatcaata

SEQ ID NO: 187893 - DNA, 431 bp, Glycine max
  unsure (1)..(431): unsure at all n locations
tgattttgtacagtcataccattggatgatatggttgttttgacaaaaagnttgaacaactctcagaaccctctacacacaaccaattgagttggtacaaaattgcaataaaattggttaacgagcataggaatcactgctatgtagaatgatgtaaataacatccaaaaggaaaggaatataatctgagatttaaatgttagctagtctaggataaaatacttcaaagtataaagtgcaccaaagcaataaccgaaaataattggttattctcgatcttgtcatcatttatgcatgtctttaatatagatatattgattatgtttgaagctacaagctaacgtaattaatagctaaaagttaaaaagataaattattaaattataaatgtcgggtaaaggtaatagttgaaaagaaacaatgataaaata

SEQ ID NO: 187894 - DNA, 437 bp, Glycine max
  unsure (1)..(437): unsure at all n locations
agctttagctttgtccccaaagcttcatgtatactagtccaaaatcgcgaagtgaacctcggatccctgtctgatacaatactagaaggaattccatgcaaccttactacttccttgatgtacaactccactagcttctccattctatacttcatatttaccggaataaaatgagcagatttggtgagtcggtctactataacccacacagcatcatgcccacgactagtcttgggtaaactagatacaaaatccatagatatgctctcccatttccattccgggatttccaatggcttcaattctcctgatggtcactggtgctcagccttagcctttngacatgtcaaacatctcgctacatattcagctacatctttcttcatgccatgccaccaaaaacttctcttcaaatcttggtacatcttagtcattcc

SEQ ID NO: 187895 - DNA, 336 bp, Glycine max
  unsure (1)..(336): unsure at all n locations
tagtgtaccacactaccgcagctccggccaagctattctgtaagaagtgtatcaacacgctttcatctntagaatgggcgcccatcttacggcagtacattttgagatggtttttgggacaaagtcgtcctttatacttgtcgaagtccggcactttgaacttcgggggaataacaacatcgggtactaagcaaagatccgtcatgtctgcaaatggatagtccccaaatccttccacagccctcaatctttcctcaaggagatcgagctttctcctttcttcagtgccgggggcggcccttccatagacaaaactattggcgatgctgtgatgtt

SEQ ID NO: 187896 - DNA, 277 bp, Glycine max
tgtccatgactgtggtgaaatcctcccgttaataatcacttacattattcctcccatgctctaaagtcaagtgatctgcagctacatctttctgggaagacaccaccctatttttatttaaatgctgctactggattttcattttcttttttgtggatgaagcaatgagctgatgaaagcttcttatataccctctagggaattactgtccattctctctgaaaataaatattagtgtgcaagtcctgcggggcataggattttcctatctggattt

SEQ ID NO: 187897 - DNA, 427 bp, Glycine max
  unsure (1)..(427): unsure at all n locations
agcttgggaaagatctaacagactctatttattgttcacaaaaatgattgtcacaatgttatccccaagaccaaaagtgataaagaatttatgaggtcagtagaaaagcactcctaaatagttgataagtctcttgttgggacattaatgagtatgctggccaccatgaagtttgatggttcacatactatgcatgagcatgtcattatgatgaaaaacttgtagcaagacttaagaccttgggaatgactgtgaatgagaacttctttgtacagtttattcttaaatcattaccatctgagtatgtcctattttaaatgaactatnataccatgaaagacaaatggaatgtgaatgagttgcacaatatgttgggttcaagaggaaactatgcttaagaataaggaagtcacgttgtccatcacgt

SEQ ID NO: 187898 - DNA, 265 bp, Glycine max
cacagcctttgaagcttcttttgtaagtgccatgatgaagctaggacggattggggtcaaaacgggaaaccacggtgaaattacgcatgattgcacaatgattaactgagacactaaccatgtttatgttcagatcattgtccaatacttctttcaatatctttccttttggaggctaataaatactaatgtctaagaccagtgtaggaatggtgataacaataaaatgcaatgcatgccaaatcactctagtaaaatttgattc

SEQ ID NO: 187899 - DNA, 332 bp, Glycine max
aacgctcattttctgctggtaagcgattaccatatatgcgtaatccattacacagtgccaaatttgaattcaaattttaatagctgttgtaaatcagttttggccactagtaatcgattacatcctatggtaatcgattaccagagaggaaatctcttgaacaatactttttaacttaaatgtcttagccaaaccttttgctgcttcaaatggaattcccttcctatataataaactcttcctaacactctaaaaactgtcctgatcatccatctgaatatctatgatttcttgcctgaataagctttgaaacaagtaacccttggcaagct

SEQ ID NO: 187900 - DNA, 410 bp, Glycine max
  unsure (1)..(410): unsure at all n locations
gtccatcaattcctcctcctcttctgagcatttcacactctctctctactcaagaanccttctcaaacgacaaaacctatgctgtaatgcacaagctgctcccctattatgcttctagggctcttttccccacataggcctgtggctgttctggaattctgtgccctgccctttctatacgagtgtgtacaaactatcatcaaaggtgtactctaattcaacacaagacaggctttaaataggctctgaaattgtgacgctgcacttagcgccaccctcgcgcttagcacgagtaagttaaattgggcttagcgccagactcgcgcttatcctggctgaggcacctgctcgcttattcattgatctccccttacggccgactttatctgcgctctgaaatcttcatgtct

SEQ ID NO: 187901 - DNA, 409 bp, Glycine max
agctagtgctcatctttctctatcgctttattcaagcttattaaagcatatactcggtttatctcctaactcatatacttacttgagcatcagaatcttttattgtacaagacttccctcagggtctcttaacaaaagtgcttcctactcgacgtgagaagtataggagcccacttaagtcacatccatcttgatatgtcctagctctgaattttagaaagtggcaacacattatcgacctgcgaaaaatcaaaatgaatttataaaggttaatggagcaagaaagaaaaattcttgaaaggaaaaaaaaaaacttttggagatttggattggagaaagagtttagaacaatttcttatatcttctttcatggcgaattcttgtacaatttgccacaacccggacaaca

SEQ ID NO: 187902 - DNA, 266 bp, Glycine max
ccgccgaaagaaccgagaagctccaccttataaggaacaccctaaactcttgcggcccacaaagcaaaagagggcacacacaaaggccactcgccaaacacaacaaagccccgcactcaaccaacgaagggactgagaggaacaacaactgagggaacacagcgcccaaccaagcgtaggggggtaaatcctaaagaagaactgacagggaagccacggccggagacaaaccaacaaccaacgggacggaagacacccccgaccgc

SEQ ID NO: 187903 - DNA, 436 bp, Glycine max
  unsure (1)..(436): unsure at all n locations
ggatcttaagtcaccgcngtttgcactttgcaggttattacaacttctttttctagcacttcaaacagtacgtgtgattggatgtcccaatataaggactctctgccatggaaatttagtcactccaagcctctcgaaagtgcgttatggatatgaccatcgagaactagactgttaggatggtgaccttaataccacactggaaatggaattaattaacattgcagccaaatgtcatgaatctcaattttcagggggtgatattaatgctctcaatttgatgggtattcagactagcaaaaggaatttgagtttgtcatcaaaatctgaagaaaagaagctattatttgctcacttgagatatctagggtaggtattttatgttttgattttatacccttgaaatttttttttcaataatttttcgttgattcta

SEQ ID NO: 187904 - DNA, 374 bp, Glycine max
agcttattctgctaacacacttcacactgttgtacatactgttatcttctttttcaacccctcccagaaaaacagccttgctaattctttgtaagttttgaagtacccagaatggcccacgcagcagaatcgtggaattccctaagaattaagggcatcttagaggagtttttggaaactgttaggccccgaaaggaatcacgcacaccaggggaacaattggcccatgagttatctcgtgactagggtctggaaagtttacatgagaagaaataaggggaaaatgggtgagagtagtgagctggcctacaaagaaaaaggaggagagagagaattagtttctgatcatgggaaaagggttcaaatagctgatg

SEQ ID NO: 187905 - DNA, 329 bp, Glycine max
tctcaagaaaatcttctcaaggaagcgaccttgtctatatatagaagcatgggaacacttggtggcactttgatgaatgaaagtcttatgagatacacttcaaagttccacttctttccctcctatattccttcaatatcgagctccccccttctctctatacttttctccattaaagcatcctcttcaagcttcttatccaagacaattcttggtggtgaaactacatcttccttggcttattccctagcggatggtgccgtcgctcttctcttctgctttgctttcgctgcatctcctggtgaaaaatcaccattgaatgacctcat

SEQ ID NO: 187906 - DNA, 328 bp, Glycine max
ttaaactctaactcatacaattagtcatcttcataattttattctccaccatcagctacaaaagataactggccatgtgggggagaaaacaaaaacacaccaaaaagcacacaaattgacacccccataaacaaattaactaaccccctaaaggaaaaaaaacatgaatcagcaactaaacacacactgaaagagagcaattgaaaagagggtatttaaattcgtacttgtatttggggccaagtatttagtgaaaagcttgaagcgttccccagaagaggtttgcatcacgaacaatgtcctgttacctaaccgttggtgcaaggta

SEQ ID NO: 187907 - DNA, 454 bp, Glycine max
  unsure (1)..(454): unsure at all n locations
actaagctctattgataangctttaagtcctctcattgcactataaatatttaagaagtttgactctttgactngatcttaagcgatgcttatactaatatattatttcatttggcttcattttccttaatgataataaattggtgtcaccaatgatgggctagtttgtatcttcaatgaataacatgcacaataattttgactaaagactaagtaatataactctgttattagttaagatttaagtatattctctattttggataattactttggctatttctctttattattacagcttctctttattgtcgattgttgatggatgacatattaacctacacttcttcttanggatgctatgtgtgcattgtatacgttatgtgaggctgagacatgaagtctctttctcagctttgactatnaactcttatggtctaatccttacttggta

SEQ ID NO: 187908 - DNA, 451 bp, Glycine max
  unsure (1)..(451): unsure at all n locations
agcttgattntgaatgcaagaaggcatgttttatgagagcatgttgttgaggactccccttttggccagcgctttattgggctgcaccataatgttttctttgcacctagatgtttgaaaatgttgttcatcatgtacatgtagatgtagaataggtagcaagaggcaataccttccaaatgaagtgtatgtatgttgaataggtagccaaggttttgcaagatgtgtatctatgttgagtgtagcacgaaactgcatctcaaatatgaacatatgacatgaaatggctttgcaaagtgtgaatgagtagtaaattttctacctttcccatgaatgtgtgatgtgaaattgctttccaaataaatgtaaatatgtgtatagcatgaaattggctctcaagtgtgcatgtatgtatgaataaaatgaaaaaatgccacccacatgtgttaat

SEQ ID NO: 187909 - DNA, 241 bp, Glycine max
ttctgaagctcacaggtgattctgaaagaattcttaccacaggaacaccccaggtctgtagacccaatacaccaacaccacactagacattgattcatggacccaggctgtgtgggggctgaaatttacggctgaaaaaatatgatcttgtgggcaagttccataaagaaagaggcgtagattatgtatgtcaagtatctgaaagccttctcaaactctctcgtgtacccgcgtccaacat

SEQ ID NO: 187910 - DNA, 368 bp, Glycine max
tcaccttggggatagagaatttcgctgaatatcctatttttctagacttgacttaagacctaaacttattgtgctaactttctagggaacatccattttaccattttataggagaaaacatttcttcatctcacaacacatgagtaacattgtctaccaccacacatgaaaaattggaatggtaccattatcccaaccttttaggaattgtgccccgaaattcacttaggataaaggggtgccacagtacactctactttgtctatccttagatcaatctagtactttttactaacttcttacctcctctttatacatagaagatgtcccataatctagactctacttaccctccattagggccatac

SEQ ID NO: 187911 - DNA, 434 bp, Glycine max
  unsure (1)..(434): unsure at all n locations
aaaagacaatttactttattttanttttcagctatgatcctaatccttacgatgcttctgacgtaaatataatgatattgatcttatcatctaaacttaaggatgttatcacgttggtttaagactacaatcttgctagtatttgaattttctcgtacactctagttctatttaacttatagagtccaacaacaaaagcttaagtgatcctccacgtaactattttttttctttgttctcagatcaacgtttctaaaacaacacttaagataaagggtgactaaaatggcagacacatatgatacataatgaatgccaacacatgatacttgactcataggcacacacatccattcacataaataaagaagtgcaattggaacaatactattcacaaccttacagaacatcataatcaaatcaatacttctatc

SEQ ID NO: 187912 - DNA, 409 bp, Glycine max
agcttgtaggattatggggtacccgttatatgtggtactaggtggcgatcgggcgatggtgcaagtcgactctccacatccacaaatcacacataaatccaccatccccagttgcccaccttcaactgagctcacgtactgccacgtagcccttatcctcgttcttctcaacaccgggtccccattaatccctccaagcttccacaacatccaagcaattcaacatccaaacatcatgaactatcaaaaccaagaaaatagggcagaggcagaaaactttgcccaaaacacaaaccaataccacaactttccttactcaaataccccagtaacattctctttgttccaattcgttcaccattggaatcgactcgaaaatttactggaggtccctagtacataagtttac

SEQ ID NO: 187913 - DNA, 306 bp, Glycine max
  unsure (1)..(306): unsure at all n locations
ttccgctcctgagtatgacagccaccgntntatgagcgcggtacaccagcagcgctttgatgccatcaagggatggtcgtttctccgggagcgacgcgtccagctcatggacgacgagtatactgatttccaggatgaaatagggcgccggcgatggacatcactggttactcccgtggccaagttcgatccagaaatagtccttgagttntatgccaatgcttggccaacagaagagggcgtgcgtgacatgaggtcctgngtaaggggtcagtggatcccgttcgatgcagatgctatcggtca

SEQ ID NO: 187914 - DNA, 356 bp, Glycine max
agctagaatctggtagctaaaaaaatatttattctcatatcaaattctacgtgctcaataaagctagttattgaagtacctgacaaatatcaaatgataaacctataattactttcaaacattaataacgaaaatgaatcattatattgaggataaaagtgacaaaatatcaaaagttaacagtcataaactaacatttcaaaaaagactagaaactactaaaaaaatttatccaccaaacacttaaataagttcttcaactaataaaaaaaattacaagctgactgaaatgtcttgtcaaacacaatcgtacttatctccaataaataatgtgacggattttatcacaactctta

SEQ ID NO: 187915 - DNA, 265 bp, Glycine max
taatactcccaacaactgatgcatacaaaattgcttccatttgtttccgttccaaatcatttttaggacattgtgcgaaactaaatttgtctcatttctgaattggaacgggagatgctgagcacttttccatcctaaatcttttctagactttattgatatatgctttctgagacaagcctaacaatccttgtgatctatttcggaatatttctatccttatcacataacttgcctcacccatatccttcatttcaaagttact

SEQ ID NO: 187916 - DNA, 328 bp, Glycine max
ttataatcgcgctcagcacgatacctcgcgcttagcgcgttcagatcaatacctacttggcctggctggaaatttctcctctatagcttcttatcatgatatgccttcggtttttccttgtgaattctggacgaattatacgcattcagtctcatctcctctaactcctgaagctgaaatttcctctttcccccatgcattgttgcatagttaaccaccggagagctcaaatgctattgcttcagttcactagtaatggatgacttccatcactactgaaagggaaagccatggggtctgaacctggctatagccaagagatatcagc

SEQ ID NO: 187917 - DNA, 320 bp, Glycine max
  unsure (1)..(320): unsure at all n locations
gaagagggtcagaaactaatgcatgacaataatgggacaattttcgctggagttttatgggatggatctcacatagctgtccacaagttaaagtgtgagaagaatgacttaatccaagtcctgtcacaaatcgaggttctatcttctgttgtgcatagaaacatggcccgaattcttggatgctgtattgaatctggcaacactctagtaatttatgagtatacctccaatggtactctggagggaacattacatcaaagcaaaggaccacaacttcgtttaagatggtatagtagatngactattgctgcacaaacagc

SEQ ID NO: 187918 - DNA, 411 bp, Glycine max
  unsure (1)..(411): unsure at all n locations
aatccatggagtaaatgcttaccacctcgaaagactggaaagcggtttctaatgactcctctgcggcctccacataaggcatagaggatgggcagctcaccaagatgtcttcctcgcctgatacgatgaccagatgcccttccactacgaatttcaacttttggtggagtgtagagggaacaactcccactaagtggatccacggacgccccgacagacagctgtagggggggttaatatccattatttggaaggtaacttggcatgtgtgagggcctatttgtactgggaggtcgatctctcccctaacctttcggcgggtgccgtcgaaggcacgaaccaccattgaacttggctttatgtgggaggcatngaatggtaatttctccaaagtgctcttaggcatcacgt

SEQ ID NO: 187919 - DNA, 155 bp, Glycine max
taaagacatactggcatgcttaatgttctctccttccaaagaatccaagaattctaattggccaacgccttaaatgacctttattcaataaaacatatctgcaaaaagataaaacaactaaagctttgctcttaaaaacacgtggccgatttctt

SEQ ID NO: 187920 - DNA, 413 bp, Glycine max
  unsure (1)..(413): unsure at all n locations
agcttttcgatttattctatgtgcccgtagtggtccacattgagtttcgtgcattntgattctcgttttgtttactttttataccccctgttgacgtgcttaagccattttacttaagtcgtttctcgcttaacttaaaaataaaataaatttccaccgaacgtttgaattgtattatccattaacttcggttaaaataaattccgaccgttcggtcatgccgtaaccacgttggaaatcaaaaagaggtaaaaaataatataataatcaaaaagacatcttttagtaaaataaagcggaaaatcaatcggacgttttcttctttgggatttctcattcttaatcgaattgattaataactaaagtgaaattaaggctaaaatcaactcgcctagtcaagctcgtccacaaaa

SEQ ID NO: 187921 - DNA, 434 bp, Glycine max
  unsure (1)..(434): unsure at all n locations
tataagaacaaaattgcctcaatcatatctaaatatgcatgttaattangaagcatcaacaagaatcaagccaaggctattgtgcaagcaatcaatggggcaaaacacaccaaatgcttatgatgatggatggctcaaattctcacaaaggtaaactcatcactttcaaattgagctttcaaaactatcatgacatgtagaggagaatcaaagattccaagtcacaaaatgtcaaaaacttttattttcaaaacaattacccatnttttgaacatatcctatgattcaaagaaaagcatgcaaagtcgtacatgcccacaaaattgacccaaaatattaaactaaaaatcccgcgaaactaacanattaatcaataacacactaacaattaactaaacccacaaactaacaataccaatgacactccccccccc

SEQ ID NO: 187922 - DNA, 402 bp, Glycine max
ataaatgccatgctgatacccatattgcctgacgtgggctcaatcagagttgtctgcaacatcaaataaagtaattatgagcatctacatgtgaataactgagcaaaatagctgcaatatatcaaatcagctaacctttccaggagttatcagattcttttcctcagcatctgtgatcattgcatatgctggtctgtaaaatcaaaaaaaattttcttctgtgttaatttgaattttgattaccattaagaatagtatgaagcttaatcaaattcaaaagtaggaacaaaaagaaaatcaaataggaatggaaatagggaggaattgacctgtctttgatgctggcagtaggttgcatcatctcttgcttgacagcaacataagctccacatccttcagtga

SEQ ID NO: 187923 - DNA, 455 bp, Glycine max
  unsure (1)..(455): unsure at all n locations
gcgggctgaagtgaattttatgagatgggccatgggccaacctattacacggcttcgatcacttattagaaacttctattcaatgctttggatatatttgtaaataatttcaatatagatggttgaacaaaacgtttttttaatgcattngtttatatatatcgagtctttatcattaatatatgaagcatatgcttagttgtttagtttatagtgtgtttagatggagtaattaagcggngaaattcattttttaaaaaaattaaaatgattcatgataaaataattagtttagatagaatattngaaaaggaatngaaatngtagtatttttatgaatcattnntgataataaaacagtgagtntaatttctttanaaaataaaaaaataaatttttttccagacgcgcagtaggaatttattttannattatgaccattaagatatatatat

SEQ ID NO: 187924 - DNA, 226 bp, Glycine max
  unsure (1)..(226): unsure at all n locations
tacgattgaatggataaaaataactatggttgcttacttggttgtgtcttatatatgcagggttgctcattgagccttaaagagactactacagaatagccttggagacctatgtagtgtttgggaagccatgaacaacatgatcacactacaacacactgaaattaaggcatcttttgagacaagtacacatgtggttgaacatgnttttaaagttatcttatac

SEQ ID NO: 187925 - DNA, 411 bp, Glycine max
ttttaatttccataagcaagatgaggacataaatcgagactttattatcttcaaagagctaagtacggaagaggctaaaaagaagattcaatcttgaagtaccaatgaacaattgtttgttggcacagtctatgaatacattagaggtgtcaagccttagttggtgttctgttatatggaatccaacaatcaatcccccactaagatgtctttcattatgtggtcggctgcttactcttgacaaagttgctttttttgaacaaaggttccctctgccttttatgttcaaatgagactgagtcaaatgctcatttgttcttttcttgcaggaaatctctctaagtttggattcacatttgtaatatggctcctttccgcaggcgtttcacttccttacagcgcattactgac

SEQ ID NO: 187926 - DNA, 462 bp, Glycine max
tgtagtgacaaatcttctcttctttgtacatctagcatgctctttccattatttatgctgctataatcaattgaatcaagtgagctctgaggagatgtggagttattcatggaagtgaaacaaaaatggattgaatggttgtctgataacattgtctgaccaatgattgtccatgttcctggactccatctagttctggtctagttgtgccttcatttgcattacttgtgcctgcaagcatgctacctacataaaaaacaaaagacaaaaatcatgagctgtaagacaagagaatccatgaccaattaaaatgactgcttataaaacttaattatatgatgattgggaaacttgcttctatattcataatgagatgattcactagtagtcaataaagaatcatattattggaccagttgctgaatattcttagaagaataacatatgtacatatgaagtata

SEQ ID NO: 187927 - DNA, 396 bp, Glycine max
  unsure (1)..(396): unsure at all n locations
atgaactttgattcttctctctgactgaatgaagtgatatctaacatctatatgcttggttctatcatgatgaacctgatccttggccaagcatatagcactaaggctgtcacagtagatgttagcatattcttgattaattccgagatcatttatcaaacctctcagcaaaattccttcctttgcagcttcagtaagagccatatattcaatctcagtagttgagagggcaacagaaggttgaagtgttgccttctaactcaccaagcagccaccaagggtgtaagcataccctgtaaagaccttctcttgactagatcaacagcaaaatctgcatcataatatccagngaggccacaatctgagtgagactcataaatcaaatctacatctgcc

SEQ ID NO: 187928 - DNA, 226 bp, Glycine max
  unsure (1)..(226): unsure at all n locations
atagccatcaaagtctgaaaagagtatgatgaactaanggacgtcaatatggccaccgctgatgccttggaacgagaaaccaaaaaggcccaaaggaagaacacgtgccagcaaaagtttgaggggctttatatggcagcaatagtaagctcaagcttccaagaggtgaaaggaatcatcacgggtcaaaggcatgatcttgaaggacgagctaaaggcttacctt

SEQ ID NO: 187929 - DNA, 439 bp, Glycine max
  unsure (1)..(439): unsure at all n locations
gcttctaaggaagtttcatattaaagcttttttttaaagctacctagnctataaatagaagcatgtgtaacacttgttgtaactttgatgaatgagagtcttgtgagacataactcaaagntcaacttctctccctttttcttccttcaattttttgctcccccctctctctttctctccctctttcttttcctccattgaagcatcctctccaagcttcttatccaaggctcatcttggtggtgaagctccttcttccatggcttattccctagtggatggcgcctcctctcacctcttctcctttgtctcccgctgcatctccatggtggaaaatcaccattaaaggacctcatagaagctcaaagattcagcctncatagaagccccacaagcaagctttcatcaagtggtaatcagagcacaagagcttcaagta

SEQ ID NO: 187930 - DNA, 447 bp, Glycine max
  unsure (1)..(447): unsure at all n locations
actcagcttctccctatttgctataataggcggagaaggtataaattatgtgttagccccttaggcacttctctctctctcaaaattgctgaggaaaattatttccgtgaagaaaatccaagccgaggcgcttccgtaacgtttttgtaaggtttctgtgagtaattacgtgaagattctcgaccgttcttcaagattcatcgttcgttcttcgttttcttcaatcttcaacgggtaagtacctcaaaccaagcttttcaattcattctatgtacccgtggtggtccacattttgtttcatgtatttttattctcattttcatttgctttttataccccctttntgacgtgcttaagccatttatttaagtcatttctcgcttaatctaanaataaaataaatttccaccgatcatttanatngtatcatccgttaatttcgggtaa

SEQ ID NO: 187931 - DNA, 421 bp, Glycine max
  unsure (1)..(421): unsure at all n locations
ctaaactcaccctccttgacaaaatacatgaaaatacaaataaatgttcctactacaaagactactcaaaatgccctgaaatacaaggctaaaaccctatacttctagaatggccaaaatacaaggcccaaaagaaggaaaaacctattctaatatttacaaagaagagtggatccaaccttgacccatgggctcaaaaatctaccttaaggttcatgagaaccctagggccttctttagtagctctagctcaagcctcttggagtcttctatccaatacccttggggggtaggatngcatcatcccctccaccttggaaagggattgacctcaaatcccgaggttcatcatactctgggctccttccctcgacaccttgaaaaaagntaaacacatatgtattagtggtgttgggtatgt

SEQ ID NO: 187932 - DNA, 481 bp, Glycine max
  unsure (1)..(481): unsure at all n locations
tataaaactaagcttgccgaaacttggatttgcagacaaaaatattgcttttataatttannnnnnaaaataattattgctattggcatataaattttttaaatattggattttttttaaaaaaaaatttatgtaccatacggatcactaatccgtatgttttttttttaaaaaaaaattgtttaaatttaaaaaaatgcttaaattgaattttgaaactgttttgtgccatacggatcagtgtatggttcatacggattaaaaatctaatcttacttatgatgttgaggattttccaggcggatcccatgacacataagttctgagtgattttgaaaatcacattgctttgagagtgtggaatggagaggtatgtantttttaaaanaacataaagaacgtagtttactagttaattatttnttttacatcatccctaatatttgttgcaggaacgtcctgagttgagtcatcttccatg

SEQ ID NO: 187933 - DNA, 322 bp, Glycine max
ccattgacaaatattttgaccaaaaagaggaaaaatgtaattatttcccccaacaaagactataaaaattaatttgtctaataagaaaaagaaatgtcattatttaaaaaaaaatgtaactggggatttttgataataattaccttataaatcatgttaaacatcatttttattggatagataatgtaaaattataaactaacaatgcatgttccttaaacttatataaaaaagaggaaaataattttatccaaaatgaaaaactaaaatataatacgaagttacggccaaggccctttaaatgtacaagtgcattcatcct

SEQ ID NO: 187934 - DNA, 373 bp, Glycine max
ctcaagcttcttaacgtccgtggcggctatgcccgatgcctgttatcaatttttatctaaggggatcatcaaaaaacacgacaagaggttttttttttttctgccctacaatgatagtgggcgtcaattcgatggagaaaagtggtatcgaggaaattggattaaatggggagggagaaatgatgaaaaagaaagcgtttctgaagaaaagaagtgaagggtgggtgtcgaagattaaacctgaagttgctcgacgggtaaagggccaggttgtatctcttcggcttcgtcttgttgttggggcgctttttggtggcgttgctgctcccatggtgccgacattctgattctgacccctcacagattcaatatt

SEQ ID NO: 187935 - DNA, 372 bp, Glycine max
cgggactcaatcaaacatccgagtaaaaagctattgtcgtttgaatttgctcagagcttcaacattcaatatcgagcgtgtcgatatatgacgggactcaatcacgcatccgagtaaaaagttattgtcgtttgaattggctgagagcttcaacattcaatatcaagcgtctcgatatgttacgggactcaatcagacatccgagtaaaaagttattgtcgttagagttggctcagagcattaacattcaatttcaagcgtctctatatttgacgggactcaatcagacatccgagtaaaaagttattgtcgtttgaatttgctgaaagcttcaacattcaatttcaagcgtgtcgatatatgacgggactc

SEQ ID NO: 187936 - DNA, 346 bp, Glycine max
  unsure (1)..(346): unsure at all n locations
actcagcttgagcaattcaacgaaataaattttactcggatntcggttatattcccgcaatataacgagacgctcgaagttgaatgttgaagctctgagcaaattcaaacgacaataacattntactcggatgtctgattgagtcccgtaatatatggacatgctcgaaattgaatgttgaagctctgagcaaattcaaacgacaataactatttactcggatgtctgattgagtcccgtaacatatcgagacgctcgtaattgaatgttgaagctctcagccaattcaaacgacaataactttttactcggatgtctgattgagtcccgtcatatatcgagactc

SEQ ID NO: 187937 - DNA, 336 bp, Glycine max
atgtgaccttctgttgaccacctcaaagtgtttaacacccatcgttgtggaatccgtaaagatctgagatgtttcgggaagaaattgatcattaacacgataacgggagtgtattttcaaagtggggtgtgtgtaaataaactgttacactctaatttcattcgaggaccattgttgatcgcttcataaggcttaacactcatgtggatggaaaccctaaagcttcttgagatttcggaaagaaaacagcctataacacaatatggggggtgaacttatgaaaaatgggtgatattaaaattcaatataggccttcaaacatttcggagtgggttg

SEQ ID NO: 187938 - DNA, 358 bp, Glycine max
  unsure (1)..(358): unsure at all n locations
tttaannccaaacccaccaaatgggtatctagagcttcgattgaagaacaatgctgcctttgattaaagatgggtctacgtcatcagagatcaaccatcatggttgttatttttttagactatatcttcaagattcaattaagaagatggtcaacactgtcactattgagaaactcacaggacataatattgtccacctctggcgcatcaagatgcgtgccttgttgaaagaacaatgaatttacgcacctctctatggccaaccatcgaaggatgataaaagtgtccttgatttgcatgatgagaaagcacactctttgattttctcgtatttgcctgatgacatccaataccactc

SEQ ID NO: 187939 - DNA, 366 bp, Glycine max
ctcatctttccatgaataaaaaatctacacctgttgcaagtgtctgtggtctatgttcttttgcagatcaccatacagatctctgtccttctttacagcaatctggagtcaatgagcaacctgaagcttatgctgcaaacatttataatagacctcctcagcagggaaaccaacaacagcagaataattatgacttttcgagcaatagatacaatccaggttggaggaatcatcaaaatctgagatggacaagtcctccacaacaacaacagcctgtccctcctttccagaatgctgctggtccaagcaagccatatgttcctcctccgatgcagcagcagtcacaacaaagacaacaagaaactg

SEQ ID NO: 187940 - DNA, 222 bp, Glycine max
catcctgaactcattctttgaatcttgagaacatcatctttcgtatcatgaaatgtacttgacctttgagctttttgccatcacctttgttatcttccaaacttctttgaatcaatctggattcatcatgaagcctgcttctacaatctctccctttgtgatgatgacaacttttgtaatcaagaaacacacacacacacactttttcctagccgatcactc

SEQ ID NO: 187941 - DNA, 390 bp, Glycine max
aaaataaaatccatgaccattcacatttaaagcgggcacatgacagacttgcaaggtggtgagtaactttctacttgttatgaacaaaactttccaacatcttcaaatggggtagtgaccctcggcttgggactgaaatcgcctaaatgtctcttatcccataagataccaatggaggccggatgaaatctcaatattcgcgattcttgtatcgctgacaaacatatatacacgagttcgtgaaattaatattaatcattataggacaaagcaaaacaaatgatgtgatcatatcgatgagtagatgatttcaatgctaaatattctaccatgttatatgcacaataaatcaagaaagtcatttgtattttatactctaaaacaatgttt

SEQ ID NO: 187942 - DNA, 369 bp, Glycine max
  unsure (1)..(369): unsure at all n locations
taccctgatattaacacatctctggttaaacataaaanaacattatgctgaaaccttttatgagttacatgaactcttgtaattatttaaaaaatattataccatgtatccttataaaaagattgtgtataaatattaaaaagcttgagaattgtgtgtacagtctcaataaatcacaagaattgacaatataatttattctattatttatcatatctatattttgttgccttgtatctattttcttctcctagctagatgccaaattatgggtggtcaaaaaccatgttttctaaccctgtccatatatataaagcatacaatctcacatatggtgtangttttcattaatgatgtgaatatacataa

SEQ ID NO: 187943 - DNA, 363 bp, Glycine max
  unsure (1)..(363): unsure at all n locations
agctaagatgaaattgtgagatttcaaatttttgccaaaacctattttagtaaaatcaccatcccataatcgttaactcttggatcgtcttcacgttgggtctggggaagttctaagacaattatacacattctgaccgttgggatttgtagtataacatcttgagtatgatatttntttttttactgaagcagaaaatttgagctgtggatcagttcgccacagcgagctgtggatctgttccttagaaaatttcaaatacgtgcagcagcataaaacaaccattntcttcctccttctctttccctaaaccttcccccaacaccacaagctccttctccaccaccaccactgaccatcgat

SEQ ID NO: 187944 - DNA, 496 bp, Glycine max
  unsure (1)..(496): unsure at all n locations
tgcaaccattagaagagaatgagcattngattggaagtatatctgataatgttagtcaatngncagattgattgtgaaggaatgcattaaccgtatcctggtgagagtgtgatccttaaattttgagagaaacgactatcatttagtactgatttttgtgtgaatctctaaagtgtggactgaatgcatgaaattgaggatgatgaagaccatgtttgattgtgatagccacttagccaaaaagctgaccacgtgcttgaatgatttatcccttgcacccagtttgagctgaatgaattattgattgattgaacactgagcccatacagtgttatctcttgctaccttgtcttaagttgtaggagagcatcatccacataagcttggttcacagcanatttgtccaaaacattggggagtaattttcaanggtaaattgttccanaattgggggaggcactgggtaagaattgaaatggtctaagtaaatagcata

SEQ ID NO: 187945 - DNA, 385 bp, Glycine max
  unsure (1)..(385): unsure at all n locations
tatttagaggttaaaactctaacctatagctgatgctgatcagatgcaaaagcccataaccatctacccaacaaagctaagttgaatatggagatatcctttatccccagtcccccatcagacttaggcaaacaaatatcatcccatttcacccaagggatttttttatgatcaatgtctccaccccacagaaaattcctttgaagggatatcagcttatcgacaaccttttgaggtattntaaagaaagaaaggagataaattgggagggcattgaggacagaaattatcagagtaatcctccccgccatggatatatttttctgagcccattnggctaatcttgatttgaattagtgacaataggatcccacaccagctgact

SEQ ID NO: 187946 - DNA, 384 bp, Glycine max
aattgaatcaaattataatcaaatcaaaattgaattgggtttttttttctaattagctcaagaaaaaaaataagtatattattttataaaactaattcggttaactaaattattttgacaaaaccaatttgattaatccaactcattcttatttaaatattcttttatttgaaaaaattagttccaaaaatagcttgaaattaattctactcttagaactagtcaaaattagtttaaaattgattaaaaattaattcaattaacaattcaatgtttaaaattaatctaattctagattagattttaaatcaatcttaattatttaaatataaaattgaactaattaaaacaattccaaattaacttacattcggatttcatatc

SEQ ID NO: 187947 - DNA, 107 bp, Glycine max
ttaattattttaaaacaatacaaataaaaacttttaatgaacactctaatatatatatatatatatatctataaaattcatatatttaataaacaaatattttattt

SEQ ID NO: 187948 - DNA, 393 bp, Glycine max
taggtaataaatacttagtacttctattttgtgtgtttaataatcattttctctcaatttcaggttaattaggcaagctttgaaaaatgttgtttttcaccttctcgctaagccaatctgccttggtgtgggcggcccaccgtctaaagaaatacatgctgagccatactacctggttggtgtccaagatggatccggttaagtatatcttcgagaagctttccctcacgggacggatcgctcgatgccaagtgttgttatccgaatttcactaatgtgcgctaagcagttcataagtgcgctaagtgcacgagcacgaacaaggccacctatttaagcctgaaatcagatcttagagagggagtttggactggaatcaaagctttcatgtct

SEQ ID NO: 187949 - DNA, 452 bp, Glycine max
  unsure (1)..(452): unsure at all n locations
actaagcttcacctttggtcctcctcataggtggggcaagagataacattcttctatttcatctcccactccaagtaagcctccggatcattctttcctttaaatggaggaatgttgagtttaataccatcaattcggtcttgtctaagaacaccatcattccctcttctcctcctttcttcgtcattatgatctctattctccatttgatccaacctctcatggagcgcatcatctcgttgtttcattaacctctccaaatgttgcatcaaagcttgcatntggaattgcgaaagccccacttcatcattaggattagtacctgacatctcaaacaaacaaatcaaacgtaacaagacaattatagttgttgttgaatacctcacccactcaagtgtatcacacaattatggcttttctctaatgaaacactncttgcttttaccactcta

SEQ ID NO: 187950 - DNA, 420 bp, Glycine max
attatgctgagatggaagataaagaggaacaagaggatgagatcttgttaatgaccttcgtagactacaaagaagggaagaaggatgagtggtttctaaactcaggatgcagcaaccacatgagtagtaacaaggagaggttctcagaattagatgagaactttcggcacaaagtaaggctcggtaatgatactcacatacttgtgaaggggaaaggtagtgttcaaatggttgtgaatgggattatacatgtaatcacacatgtatattatgttcctgaactcaaaaagtgcaatgttgttcatcctaagagaggcctgatcatggaagtaaacatgagtggaaacataatgtttgtgccgaccgcaactatgggagcggaactacaacatgtcttcacgtggatttagaggataattc

SEQ ID NO: 187951 - DNA, 445 bp, Glycine max
  unsure (1)..(445): unsure at all n locations
tcttgctggagatcggagaatcgcacaagaaccctctgtgattatcctgatttcatggcgcaccaaatttcctcagctttgtccatccaaagtatactttgccgtatggaggtagccactgagtgaactatccacgaaacaaccatattgttgcaccggcgccacgctccatgcattctatccgtcttcagtggtttaggcgcgcttccatctatgaactccactttgttcttggtacttaatgcagtgaccatggacctacntcatgagtggtagttagttgagtctaagactggngaaacaagggcaatggtcgggttctcgctcggatggaggtatacgtaactctccgtgtattgattgatgcttcattcatggtgggatattganggtagtggaagacngaatgtcagcgcaacagaactcttcaccagaagagctctga

SEQ ID NO: 187952 - DNA, 364 bp, Glycine max
  unsure (1)..(364): unsure at all n locations
aattgtatctgtacaccatcttcttcttcgtattagcattattatcattaattctcaaaaaggttttttatgtggcaactttagtgatgcgtttcccattgaacgaaacaactttgtgtgtcatatgccaagaatataatngtttggcttagctttgagactccaccacaaaaggaaagaccttttccacatagttcaacacttaccaggttttggtaggccacaaaatgtaaacatgtatggaactttaaatccatcccttgaagctcagaactgcacactacaccggaggtaacaacatatattgatgttaggtgattttttaacaaggtttcatattttactttttacttttacgccatgt

SEQ ID NO: 187953 - DNA, 383 bp, Glycine max
  unsure (1)..(383): unsure at all n locations
taagtttgctatcaaaggagaagatggtaagaggactaccctatattaatcaccctgatcaactctgttaaggatgtttacttggcaagaaatttagaatganttttccaaaggagtcaaactcaagagctaagaagccacccgagctaatacatgttaacgtctgtgggccaatcaagccccaagctcactacgtaaaaataaatatttcctctttttcattgattatttttcaagaaaaacatgggtctatttcttaaagcaaaaatcataagtcttttccaccttcaagaagttcaaagctgcagtaaaaaaagaaagtggttgagagatcaaagccataatgactgatcgaggaggagaattcacttgcaaaaagtttc

SEQ ID NO: 187954 - DNA, 419 bp, Glycine max
  unsure (1)..(419): unsure at all n locations
caaaaattaaatggtctctctaaattctgaaactttctttctttctctctctctctctggagaacaaaacctaagctaagcanaagctagaaaaattaatataagcaagcaatgatgcacaatgagtttgagtatttaaattttgagtgttgaatacatactcaattaaatcatacataaacagagacagttaatacaaaacanagtttagaaaaagactttgtagtagagatataagccattagtagagaacaaattttgactgtaactaccaataaaatattaaatgtaataacccataatgcttgaaagcaacatgtaaatctgtcaagtgaccccattcttgttcatgcaacagacctagaataacaaggttcatcgagtataatacattcaccctaaataattctaaaatatat

SEQ ID NO: 187955 - DNA, 432 bp, Glycine max
  unsure (1)..(432): unsure at all n locations
tgcggcatgcaagcttcntgagaaaacttccttgtgaagctagagcttanctacacacacccctttcataactaagctcacctccttgagaagcttccttaagaagattcctaaagaagctagagcttagttacacaaacctctctaatagctaagctcacctccttgagatgagaagctagagcttagctacacacccgctataatagctaagctcacccccatgacaaaatacatgaaaatacaaaaaaaatccctactacaatgctactcaaaatgcctcgaaatacaaggctaaaaccctatactactagaatggccaaaatacaaggccccaatgaaggaaaaacctattctaatatttacaaagataagcaggctcatacttagcccatgggctcgaaatctaccctaaggctcatgagaacccta

SEQ ID NO: 187956 - DNA, 418 bp, Glycine max
  unsure (1)..(418): unsure at all n locations
tganagagcccgggtagtcaaagagaagttcaagtctcatagccatcaaagtctgaagagagtatgatgaactaagggacgtcaatatggccaccgctgaagccttggaacgagaaaccaagaaggcccgaanagaagaacaagaccaaagcaaagttttgaggggttntatagggcagcaatagtgagctcaagctccgaagatgtgaaaggaatcatcatgggtcanaggcatgatcttgaaggacgagctaaaagcttgcctcaggtcgaaaagaaatttgtcccaacagttaagcgagactgaagggaatatgtgggccatcatcgatgagtgcaaagagaagctaaatctagcggcgactcacgagcaaaggctagagggatgagtacgccagatatcaacagaaaggaaagc

SEQ ID NO: 187957 - DNA, 399 bp, Glycine max
  unsure (1)..(399): unsure at all n locations
cttgcatcgcttattctccatggttgaaagtcaccattgaaggaccttattgatgctcaaagatccaacctccatagaagcttctcaagaaagctttcatcaagtgatatcagagcaccagagcttcaagtaggtgctccttaaacctctatntattgttagctttacctttccatccattggtgtttcttcattnttctccgagtatctcctcacatgtcttgggctgaatgttgttaacatgatttntttgaatttccaccgattgaacttgctatagaagctagatttgattttctatgggtcaaatatcttggtcttggtcttgaaccatgaatcgtgttgagattaggggtccttgagtattgattgcttattttggggctgaacctgaccata

SEQ ID NO: 187958 - DNA, 420 bp, Glycine max
  unsure (1)..(420): unsure at all n locations
ctgtgttnggacgaatggacgcgaacctaagatatctctgatcttcgccgcaaggaactaacggagaaatatagataggtgaggggagtttattcgttgtttacagcttttgataccatacttggggtcaaggaacccaattatggggatgtatttttgtccttgtgcatgctagttttcaagaaaaactgtgtttttaactaatgggatgtgatatatttgttattgatgtgtatgttaggtttcaagaaaacctttgtttttaactaatgggatgtgacatatttcttattgatgattgaaattgtgaatgatgttaacgctgtaatgattggaattattgggaagagtcttaattagatatgacactctgcttaaaatgttattatttttcttctggttacttaattattaaaattt

SEQ ID NO: 187959 - DNA, 374 bp, Glycine max
tatctttttgttcggcgaattctctttaattcctagttcttcatcttattctccatgtatatcctccattgtcttggggtttggtgctgtttaaagtatattaaaaaaaatgaattaattaaatcttagatctacacttcttcttgcatttctatggttcaaattttgtagatctactcttgaatcatgttgttgtgttgattttaggttctatcattttcgattcataatattctggtgctgaacctcagatctaaattttcttccaaaatattgattagaaaaaaaacacataaattcaagtgtaaatcacttaatccatgttgtcttacagtcatgtttagtcatagtaattcgcacattatgttctaagt

SEQ ID NO: 187960 - DNA, 122 bp, Glycine max
ctaagaaaatggatcattttcaaggtccaacgccttaaaatgatcacctcttaaagtagaaaagaatcacttgataagaaagaactacgtaggtctgatcttcttatcgcaattgaggaata

SEQ ID NO: 187961 - DNA, 467 bp, Glycine max
gcttcatggattgctcatggaaacatcttgtgatcgttactgaagcacctcagcttggaatttcttcatgcacgctttttcaaccaaaacaactgaaatgcatagcataggggtcagggacccttgaaactcagcctcctccccctatttataggagaaatgtggaggtgcttgccgcccagaggcttcttgaggaagatttctgagtgcaccccaattactatgttcacccccccttttcatactttatggaaaagtacggaagccttacgggagcgtttcggacttgattttcctcttttttctcttccctttcaccaatattaagtgaaatatgctaacccaaggttttttggaaattttacaaaagcattatagaagccccggatgccccggatgccattttttaacaaaatggaggtggttgccttccacaggcttcttgaggaagattttgaatgccccca

SEQ ID NO: 187962 - DNA, 386 bp, Glycine max
  unsure (1)..(386): unsure at all n locations
tctttaatggagagggttaccactactggaaaacccgaatgcaaatttttattgaggcaatagatctaaatatttgggaagccatagaaatagggccttatatacccaccacagtagaaagagtttcaatagatggtagttcatcaagtgaaagcataaccatagaanaacctagagatagatggtctgaagaggataaaaaacgagtacaatacaacttataagccaaaaacataataacatctgccctangaatggatgaatatttcanggtttcaaattgtaagagtngctaagaaatgtgggacactcttcgattaacacatgaaggaactacagatgtaaaagatctaggataaatgcactaactcatgagtatgaaatat

SEQ ID NO: 187963 - DNA, 401 bp, Glycine max
  unsure (1)..(401): unsure at all n locations
gagcaatactataaaagtaagtaatgcaatgactagcaacaaattttgttagccagagggaatgattatttatgccaataacgaattgtctagtttgtatgcattgaacttggcttattcacttgtttattccattctagttcataggttcctatgattggaaaatttgatgtttttgtcttatctatatgtgagtcatttctatagaaacatactgaacccttatttgctacagcataagcttggagacccttatcanttttgttgttgcctcatcgttgacggtattcattgttggagactattgatattgagcattatcacaagtacaaatgccaaacatacttttcttggcctaagttatgatagagtcctttcttacgttgtttatgttattaatg

SEQ ID NO: 187964 - DNA, 338 bp, Glycine max
  unsure (1)..(338): unsure at all n locations
tgcttaccacctcataagactttatagcnggttctaangnnncctctgcggcttccacataaggcatagaggatgggcagctcaccaagatgtcttcctcgcctgatacgatgaccagatgcccttccactacgaatttcaacttttggtggagtgttgagggaacaactcctaccgagtggatccacgggcgccccaacagacagctgtagggggggttaatatccattattnggaagggggcttgacaggtgtgagggcctatctgtactgggagatcgatctctcccctaacctctcggcgggtgtcgtcgaaggcacgaaccaccattgaactc

SEQ ID NO: 187965 - DNA, 373 bp, Glycine max
caaaattaaaatctcttgttttttatttttaaaattgaatggagcacgaggttcttgcatttaagttgtgtccatctctacatgatgaaaactgatgataagatgacttcaagagagggttgttgtttatggaccattctaaaagctagttctagagttctttcaattcctaggatcgataagctatatatctaagatatgtatatatcattcatttcatcaaaatctccgctagctggacacaggttcatgaaacttctagtgctccaacttctgccacgagttacctttatcatcagcaactatatacttagacgtatctctcccactctcacacaattgatgtgaatcactctatgcttacatcaataat

SEQ ID NO: 187966 - DNA, 430 bp, Glycine max
  unsure (1)..(430): unsure at all n locations
cctcattgtctctacagtctttaattgggagcctatctcatccttgtgtttgaactctcaaccacttatgatagccgccgatgatcccattactacttcccctaagctctctgtcctttcttcacgccgcatcccatgccttgcgaactccttggagtaccctcgcgttgtggtcactgaaacccagtgcgatgaaaggcgtgatgctntcgtctgatggcactcctctcatggggtagccaagctgtcttatggcgaggacgggattataattaatacaaccccttgttcccatcaagggaacatttggacatccttcgcatgaagatagaatcctgattcttccttccttctagcgagggaaccaattaacagacgcccctccatgctagccaagagttggtcccaattcgcctttcctttttgagca

SEQ ID NO: 187967 - DNA, 437 bp, Glycine max
  unsure (1)..(437): unsure at all n locations
gcaacttttacctccccaacaaacttnttacctttactagnatctcttttaccaccaccagccttgttcaccggcctgaaatgtgcatcactctgtacttcacttggtagggttaaagtttcctttaagttgaagtaatcataaaatacttcaattaattcaacatgtacacattggttgttagctatgtcaccatctttatgaacaaaaacactaacaccaacatcatcacttgaatcaccttcctccctcatattacacacctnttttaaagttgtcctctttgtagaagcaaagcttcatgatgaatcaagattgattcaaagatgttttgatgataacaaaagatgatgacaaaggtgatgacnaaaagctcaatgagttcaagatgttcaagatagaatcaagaacacttcangaattaagagaaaagttga

SEQ ID NO: 187968 - DNA, 272 bp, Glycine max
  unsure (1)..(272): unsure at all n locations
agatcaatcaaagaactactcangtgaatcaagaacaattcacgagttcaagataagaatcaagaagaattcacggctcaagaagaaagtttagagtcaagaatcaagaatcaaggctcaagatctcaagaatcaagattcaagactcacgactcaagaatcaagagaaggcttaatccagataagtatgaacagttntcctccaaaactgagtagcacatgatttcctcaacacatcgttaccaaagatctttactctctggaatcgatac

SEQ ID NO: 187969 - DNA, 321 bp, Glycine max
  unsure (1)..(321): unsure at all n locations
aaatgttctaaattcagtaaaaaaatcaaaattcatcacaaacttagaacataatgtgacaattattatgactaaacatgactctaaaacaacatggattaagtaattcacactaagatttgtgtgttctttttctaatcaatattttggaagaaaatttggatctaaaggttcagcacaagaagattataactgaaaaatgatagaacctaatatcaacacacaaacctgattcaagagtagatctataaaatttaaaccatagaaatgcaaacacacgtgtagatctaagatttaatcggtttatttntttgaatctac

SEQ ID NO: 187970 - DNA, 276 bp, Glycine max
ccgggcaggaaaaaggggaacccttacccgaacagaggcaaccacactccgacaaaatggccagccgtctacagccctgagccaaaacccaactcaccataaaccctgaccaaagggaaacgccaccccgccccgagaaacaacaaaagaagccccgacaagacggagaagaaagaaaaaacccaccagatggagaagccaggaaaatcccgacacgacgaaaaacaaaaaatgcgaaggcttgccgacaatcgaaaacaaaggcaccgaacaaaa

SEQ ID NO: 187971 - DNA, 373 bp, Glycine max
tttttctccggaggacactacaaatcttgcatctattatgcaactgccaagggataacactcggattctcaaaagctaactcaacaaggatggaatcacactccaactataaaaacctacatccatgctcatgagcaatctcaattgctggcatagagagattcccagagagagaaacaaccgctacaatccctcgaattgatgtaatttaaagaaaagtgacccttcctaaatctacaattgttactgctagatccaaacgaactacatagtgttaatcacctcatcacaaaatatgtctctcatcttagagctgccaccctccacattattattaatcaatcctataggctcaaattgcgaaagatttaca

SEQ ID NO: 187972 - DNA, 291 bp, Glycine max
gggcgatggtgcacaacatgttttccacatccacaaatcgcgcataaacccaccatcccctgttgcccacctccaactgagctcacgtactcccacgtagcccatatcctcgtttctctcaacaccgggtccccatcaatcctcccaagcttccccaacatccaagtaactcaacattcaaacaacacagaccatcacagccaagaaaacagggcaaaggctgaaaactttgtccaaaacaccaaccaaaatcacagttgttctcacttaaagaccccagtaacaattcct

SEQ ID NO: 187973 - DNA, 316 bp, Glycine max
  unsure (1)..(316): unsure at all n locations
gcagtctaaatctgatttgacgaggaaatggacactcgcacccaacaaggacggtgtggaggacactgtctctgaaaaatacgacatttgcaaggagaaatgggcccagttntgtcagacctgcagtgacccctcgtgggaggtatgttctttgtcattttaattgttttccacaaaaaattctcttcttataattcattgtagtaatgattttcattaatgtttgatttttgcaggatgtgcggaaaaaggcacaggccatccagaagcaaaatactgccccccacatgttgtctcatgggggttatgattattt

SEQ ID NO: 187974 - DNA, 472 bp, Glycine max
  unsure (1)..(472): unsure at all n locations
actaagcttagcctggccgctaagcgacaccttatccttggtttagcgctactcagtgtcgccaagcgcaattccatacggccataactgaggttcataaagctaagcgccagtcatggcagctaagctaaattccttgcagcaatgtgagcgctaagcgaggccttatcaactaagtgcatgctcctctgtacttaagatgcattattttagctaagccagccatagcctggcttagcgagagttgcagctnttcggatttgcaaacctcgctaagcggtcttatcctcgcgctaagccaagcccatgcgtaaaaataaaaaactaattttgaatgtgaagcttgactaagagcggtgtccgctaagcgatgggtcttgaaaaccaaacgtctctctcgcttagcgaggcnattcgctaagcgagaacgtcgaaatagcttgttaagtgtacatcagtacattgacaatgc

SEQ ID NO: 187975 - DNA, 391 bp, Glycine max
tactttatataccccctgttgacatgcttaagaccatttgctcaagtcatttctcgcttaacttaaaaataaaataaaattccaccgaacgtttgaattatattatccggtaacttcggttaaaatcaattccgaccgctcggtcgtgccgtaaccacgttggaaatcaaaaagaggtaaaaaaacattataataatcaaaaaatatctttctagtgaaataaagtggaaaatcaatcggacgttttctctttgggagttctcattcttaatccaattgattaataactaaagtgaaactaaggctaaaatcaactcgcctagtcaagctcgtccacaaaaataggcttttgaagtctgcatttcagtttctcactaagtaaaatggatca

SEQ ID NO: 187976 - DNA, 381 bp, Glycine max
  unsure (1)..(381): unsure at all n locations
tgggaaagatctaacacactcagnttaatgttcatgagaatgattgttgcatatagtattaagacaacactccctaagatcgataatgctaaagagttaatggggttagtgggagagtgctctcaaaaaattgataagtctattattgggacattaatgaatacactgaccaccatgaagtttgatgattcacgtattatgcatgaacatgtcattgagatgacaaacattacagaaagacttaagaccttgggaatggttgtgaatgagaacttccttattcaatttattctgaactcattaccgtctaagtatggcccattccaaatgagctataataccataaaagacaaatggagtgtgcatgaattgcacatcatg

SEQ ID NO: 187977 - DNA, 318 bp, Glycine max
agatgtacctgcttcagcaccttgaaaaatcataatttagacgattccacgctcttcttcgaccttctcttcttcttctctcccgcgctggcttccttaggaaccttcttctcacgctttggcttgttttccgccggagccttctaggccgcaggctttttctccgcagccttcgccattctcaggaaatttactttgaagaaatggagggagtgaatagaataaagaagaaatgtcaatagttgcgtttggagatgaaacgaattgagtgtattgatttattggctgttggatagagatagaatggacaaaaggata

SEQ ID NO: 187978 - DNA, 265 bp, Glycine max
  unsure (1)..(265): unsure at all n locations
tgcctggtactgaatctcacgattggctaacccatcgccaatagcaaaaccctgcttatatatgggatcaacggaatcaatacaatgaagaanaaaaacaattaacctttcatagctatactaagagttatgagatcagaaagacctctagatntatatgaattccttcttttgctctgtttccttggtgaaccctggatgcaagagctggaatgtagtgtccaccatatgactctccagcaatataaaagacattcttagtgag

SEQ ID NO: 187979 - DNA, 367 bp, Glycine max
gagattattaagagataggctgccgacaagaaaaaacttgcagagaagacagattcaactcacagattcactttgtcctctctgcagaacccaacaagaggatgcatcccatcttttctttcactgcagcaaagttcaacccatatggtgggaaaccatgtcatggctacaagttaagggtgcttttccattaagcccacaacaacacttccatcatcatttgggtgttcaacctactggtgtaagaaataatagatggcattgttggtggctagctttaacctggtccatttggaaacttaggaatagtatagtcttctctaatgcgaattttgatgcctaataacctgttaaagaagccatattc

SEQ ID NO: 187980 - DNA, 345 bp, Glycine max
atattttagagtattcctgggaaccttcacccgacgaagacactgacataagcctatcttctccttcctggacaaagtatggcacgctgggggcacagaaattttcttcccatcacaccttggaatgccactgggatcgtataccccatatcacgctaggatctctgacggcgtacttcaacgcccatccctcttgtcttcgcccttgaatgtcaaaggagtgttccattcacactgtcacaaacatttttcttcacatgcataacatcaatacaatgtctaacgtcaagatcacaccaatacggaagatcaaagacaatggacctcttcttccatatgcacctc

SEQ ID NO: 187981 - DNA, 396 bp, Glycine max
aatatctgctgggtgatcattggaactaatgaactcaatgacaatctccttggacaatagtttctcccgaatgaaatgacaatcaatctctatgtgtttagttctctcatgaaaaacaagatttgaagcaatgtgaagagcagcctgattatcacaatataacttcatttgtccaatttcacaaaatctcaactcttggagaagttgcttaacccacataagctcacatgtaaccatagccatagatcgatattcagcttctgcactggatcgagcaacaaccgtttgcttctttgcttttcaagaaataatattccctctaatgaagacataataatttgatgtggctctcctatccatgggacagtcagtccaatctgcatcacaatatcctga

SEQ ID NO: 187982 - DNA, 352 bp, Glycine max
tgtatagttccccaatttatggttattttggagtaatatttgtaaataaatcttcttttatggttaatgctatctctagaatatttccattaaatttagtgttgaaatttgtgcattttcaggtgaaaaagaggctaagttttgaattgcaaaaagtagcagttgggctaagctcagtagttgggctaagcgcaacttcagcgcgcttagcacaaaggagaatttggcagagtgtcaacatctaagccgcacgctaagcgtgagatcagtgtgctaagcgcagcaagtgccttcagccatgctcagcgcacggctggcgctaagcccgaatccacttacttgcgctaagtgc

SEQ ID NO: 187983 - DNA, 405 bp, Glycine max
  unsure (1)..(405): unsure at all n locations
ctagggttttcaatnnnaaaaggaatgttagttttagggggaatgtattttaggtaaaatatgtaataacaacttttgtagtaggaagtggctgatattgtaattgttgttttgcttttgtaatagcagcttttgtaataggaagtggctgatatggtagtggctgatatttgaattgttgttttgctgaagaatttgtagtaggaagtaatttgttgctactgtcaattacccatttcaattaaatataatttgttggtgaaatttgttgatgaaatttgttgctgaaatttgcagtttattaaatataatttgttgttgtataacttttttgaagtattgaagtagcactaaactaggtggtccttactccaactccaatccaacacagtgtataattttata

SEQ ID NO: 187984 - DNA, 517 bp, Glycine max
  unsure (1)..(517): unsure at all n locations
tataaaactaagcttcctttaaagaaaataattggaggggaaaatggntgatctttaatattgttgggtgcaccagcaatgttgttgggtgcacctagcaacacccatggaagcattgtcccctctaaaagcctaaaatgtacaatacccaagaaaatacccttttggggcctctatgataacattaatgaaaaaaataaaaaaatcctcttcatggcatgaaccatttttttggcttaaatattttttttactctaaaataggaattcttcattntagtattntaaagatttttgttaacaaaaaattatccataaaaatcgaaggcaaatatcanaaatgtataataatgcatgtatcatgatcaatcaagtgaattaggcaccctcaattnntttatttcaactntaatccctcgaggattttaatttattttcacatttattgtcaagtaagaaccagtacacgataaatgatgacacatcaatgacatttgtagtcaattgactcgacatgt

SEQ ID NO: 187985 - DNA, 413 bp, Glycine max
catgcaagcttatactaaagttagatcttatgacaggtttgattttactctgaccaactaactggcttctatacctagactatgttctctatttataacaacctaactaattaactactctcacgtcttataagatctactcttcaatggcttgtccttatcttttctgttgataaccttcctaattggtggttgggagctacattaatttgcccacaatgattgggctttaacccttgttgtatgatattaagctcatgcacatgagaagaaatgaattccggcttgtggcatcgtagttacatcttgtagtttgcttgcagcaggtctgataacaatgttaacttcttttgagaagatacacagccatatgattctaaatcttctttttgaatcaccacttgatcattgac

SEQ ID NO: 187986 - DNA, 443 bp, Glycine max
  unsure (1)..(443): unsure at all n locations
ctcagctgtgaaatcatggaatccaagattccgcttgacacaagttgttctattttgttcttagaaatgtgacctaagcacttatgccataatgctcctgagtttgtattatcaattctacgcatagtactatgcaattctgcattaaaggattcaccatatgaagctacaatatcaagtaaatatagattatcattagccaatagtgtaaccagtccaacaatatctgaattgaaagacaacctatacacattggcttcaaatgaacacaaataacccaatttgtccaaataagaaattgaaaccgaatgttgtctaaatgatgggacaacaaaagtgtctttcagaatccaataaaaaccaatacataataataatctanaatgccctatagcttctacctctactaatttaccatctncaacatagatccatctttcaaa

SEQ ID NO: 187987 - DNA, 469 bp, Glycine max
  unsure (1)..(469): unsure at all n locations
cttttcgcaaagcttacggaaaaactgggatttagccatggtagatttttccacagaggccattgcctccctcgcccagtattatgatcagccgttgaggtgcttcacctttggggacttccagctattacccatggtggatgaatttaagagatcctaggatgccctctaggggggaggaaaccatacctcttcacagggttctatccctcattagctagaatttccaagatagtccaaatctcggcgcaggaattagaccacagcaagcaagtcgaaaatggggtggtcggaataccgagaaaatatttggaggcaaaagcaagaatcttggcaggtaaaggcgagtgggccccgttcatagatattctcgcactgttgattntcgggggagtcttctttctgaatgtggatgggttggggacctggcagcgatcgacgcttttctccctataataccacatggaac

SEQ ID NO: 187988 - DNA, 405 bp, Glycine max
actcagctgccaggctgagctaagccaaattcaattcgatctgaattcttctaagcttccacctgatttctaatcgacaccttatccttggctaagcatgactcagtgtcgccaagcgctattccttacggccataactgaggttcatgaagctaagcgccattcatggcagctaagcgagattccttgcggaaatgtgagcgctaagcgagtccttatcagctaagtgcatactcctctatacttgagatgcatcattgtagctaagctggccagagcctggcttaacgagagttgcaactcttcggatctgccaacctcgctaagcgatcttatcctcgcgctaagccaagcctgtgttaaaaaaaacttactttgaatttaaacattggctaatcgcgggtc

SEQ ID NO: 187989 - DNA, 313 bp, Glycine max
  unsure (1)..(313): unsure at all n locations
tgtatgataagctgacatatatacgttgggatggttgttagctaattactgaacatattaatcaggagaaaagcattaataggataattaactaatatttgaatgatcagattatgattttaaggatatgtacgtttccaaataatcgagctagactatgaataggccttgaggatatcatgttgggttttcaaaacttagtttgcacagtagaaaaatgatgaagatggggaactnttgactaaatcaaagaacaagaggcaattatgtaattgcccttaaattntagggatatcatttgtttgttgtggat

SEQ ID NO: 187990 - DNA, 346 bp, Glycine max
  unsure (1)..(346): unsure at all n locations
tcccttcaacaggacgtnngtagggatcactatgatacatgtttatgttttataatcattaagggctcgagtttgaggaagtaattatgatagtctcaagcatgaaatgcatcctatttctagcactcttcattatttctgaactatgttttatctaatgagtaatgactaatgccctgtgctcaattaattctttctactaagactgattatntgaccaagggtaccttttacaactttgcagctggtaggaactgatcggtgcgcctttaattccacccagaaagctcttggatttgatgacctccagaaaattcctaatggtgtcaatgcgtatcacatgatg

SEQ ID NO: 187991 - DNA, 396 bp, Glycine max
aattgagtagcaatagtaaattgaatggaatgcttatattgctcactcttcaatatttgttgttcaacataagcttgtagttccttccttgtttcctctctttgttgagccatgacatgagttaccaacatttgagtttcttcattccgccttgtcagggcttgatcaagcattgcttggatgtgatctttagttaaggaactagaggcagataagttaattagtgcaacatcaaagttgctagagaagacaacaatagcatcacgaacctccttttccactaaagaggcttcatttgaggtgttagcctacttggatgcaggttcgggttgatgtgttcaaacaacctcattagcttttgttgcattagactttataggggatgctgcttgttct

SEQ ID NO: 187992 - DNA, 488 bp, Glycine max
  unsure (1)..(488): unsure at all n locations
actcagctttaatttcataccaggaagcatgacttacgcctatgaatctaagtnttggntntaaatgaaaaaaggcatgaatattatgacatgtttgagaggttgttattataattcaaatttggcggccccatgaggaataccttgcacctaggtagcatggaaaatacctttcaacggtatgtatatatgtgaatatatatagcatggaaatgccttgcaaaatgttgaataaaatgccttgcaaaatgttgaataaaatgccttgcacaatatgaatagcatgaaaatgccttgcataatatgaatatatatagcatgaagtgccttacaaagtgttggatgggtagcgtaaaagtgttcttaaaatatgtgtatttgtgagtaggtaacaaaagacgcctttcgaaaaaatgtgtgtatatatataggatgtagcattgaacagggttgtcananaaatatatacatggataggtgttgtaaat

SEQ ID NO: 187993 - DNA, 308 bp, Glycine max
agcaaccacactgagccacggattataaatcaagcttaaatatatttttgaaaaatccaattgcattaataacaacattaacggggtaataattggtaaacaaacgtattaaacatttgattcaatacgatgtttgaagagaaatattatatctttgtacattgtgatattaatatcataatcaataaaaaaataatggttaaattagttttttagtcactcaatttattatttagatataatttttcttttaattttttaggttcaattcgattttctggttttaaaggtgatacaaattggcatta

SEQ ID NO: 187994 - DNA, 320 bp, Glycine max
  unsure (1)..(320): unsure at all n locations
cccacatactccattgacattgcggtatcagatctcaacacattggtggaattggagaaatccaacatgtcaaatacgaaagcctctctttgaagtgaattggcccggatctttgcctttcattattacagggaatagatggaagaggtactgaactatatctggctataacccttctgatagcttaaacatacacaagcacaaatgttaaaatttgcttggatgatcacattgaanataaccattgaacacataatgaaaaaaccagatgggaaacgaatttagttggatcatgagagatattctcactgaaatatata

SEQ ID NO: 187995 - DNA, 429 bp, Glycine max
  unsure (1)..(429): unsure at all n locations
ttattataaaaagagaggcttagtagacttataataaggcatcttctaaacgactgacacttgacacacaatgacgaagatatgattatccttatcctgaagataaaatttctttacagcgcacccatatacaacatatacaagatttcttcagcagtcactagtctgatctggtggataatgacaagttgtaatgttgtacttctgatctggtgagacttccgtacactgggtggtgataaggatatctctttttgtgtaacaattcctccatcaattgagcattgtagtcttccgagtcttgntctaatgcagaatggtcatcaaccacatcttccaccttttgaaactcaagttccagaacattaatctctgttcggatctgagcatcattagtattctgaagtattatcctatctgtaggaggat

SEQ ID NO: 187996 - DNA, 307 bp, Glycine max
gttatccctttatccttacgagagtgatcctcccaaaaccttgagtgactcaagaacaccctgcctgtatcataggactttcacaacctttgtgtgttgccctccctggaaagaatgattctttccttcctttcatcttcacccttggtctttcaaaccacaactccaacaaatccacctctgcccagaattatctcgtggccataactcccattttacgcactcacattaagtgattcttgagcctaaactgaaattcaaaacgagaactctcacctccgtttggaatcaccttatttggagccct

SEQ ID NO: 187997 - DNA, 262 bp, Glycine max
cgctcactaaaagcgggttttaattttttcagacaagctacgggacagtgggacagtaccaatgtgcctaaaggggcaacggtgcttaggaacactgagcgacttaacaggcttcccaagaaagactatatcctgctcctttgaaacaggtaactccttttctactcaatctattttacaaccatcattgtacccaattataatccctcatacagaatgctacgttaactaatcgagatctatgcgccatgtagttttgaat

SEQ ID NO: 187998 - DNA, 420 bp, Glycine max
  unsure (1)..(420): unsure at all n locations
ttatgaatgtaccttgaagcgcagtgtcacatgaagaaaaacacacaatgttatattgtatatacacaatattatataatgaatttggggtgaagatgtggttcaaaaatagagtttaaaaaataattaagattacatgaaaataagattttggattgagtttaaagaacaataatgatagtattaaaataagactaataaaaatggggtgtaacaataatggtagaaaaaacataaaaatggtaacagtgcatacgttcaaggatcaaatcaataaagttggtctaatgtcttctccttcagtcttgcaatcatatatttatctggaggatttagagggccttctctattcactggttttcctcatcatatgngacatttatatatatatattatatatatattatatctatatatata

SEQ ID NO: 187999 - DNA, 403 bp, Glycine max
  unsure (1)..(403): unsure at all n locations
atgcaagcttaaaaatttacagaattagttcgaatacatataggaacagaagaattcgaaattcgtntttgcgtattagtttgatcctgaattttccttgcttgaattgttggtggctgtgataggtaccatgtgctaccattttaatgtttttatgcaataattgagaatttggccaaatgagaatgagaaaatgaatgaaattaggaactatcatcagtatcatgcacaattctttctgctttgagattgtttgacctgtaatttgagctttgttnttatctgaaactcgattgatgagaggtgttcctttgttgtatganaaatnaagcctttgaactgactgaacctttgtaatttgttgcatttacttgagataagttctgtccttgcatacttttga

SEQ ID NO: 188000 - DNA, 390 bp, Glycine max
  unsure (1)..(390): unsure at all n locations
tgtnnttgaaacttcccttcaccctatgccttagaaactaatatcgttgagtgagaatggggagctagttgtaaataaatagattttgatatgcttctccattggaaaatatgttgtagtccctatagaggcttgtcatctcttacttggaaggccttggtagtatgatagggatgttgtccacaatggtgtcacaaacaaatttctatttgtacataaagggcaaaaggttacccttaaacctttgtctccaagtgaggtttgttaggatcaaataaaaattggagtgaanagagaacaagagagaaaaggagaataacacaattgatgaaaagagagagacgcatgaaaggagagaaaagaaagacacaagtggagataacaaagagt

SEQ ID NO: 188001 - DNA, 412 bp, Glycine max
  unsure (1)..(412): unsure at all n locations
tttttgatatcttctcaaatgtatctccatccactgattgataaatgagaaagagagctttcttgtctctctttcttgactccttcaacgtctcctttacacctcggcttagagaggcttcatcttgctcctcgaagccattctctacgatatcccacacatcttgagctcctagtagcgccttcatcttgatactccaattatcatagttgttctttgtgagcatcgtcatttggaaaggaaaacctccattcgccatcttttgaggatcttgaagctctgataccactttgttggaaataaggctttttatgtttaggaaaagtgtttangaatattggagactttgaataaaaacttgatacgaaggagaattctttatggaagagagaactttgtatttttgcttgat

SEQ ID NO: 188002 - DNA, 342 bp, Glycine max
cgcgacactatagagatctgaagcttactagctgacaacagctaatggacatgtcataagctactatctgctgtacgacgatacacgtactctaatgcatacgctcctgcatacatttgcatacctcaatcataagcgcactctaacggtgaaataacatgctgactgtactgtatacacactcgagcgggtacctaatggtggaactactcatgctatactataggtgagggacgaacacttgtgaaaagtgtgctgcaatctaagcgtggaacaccatggatgcgcttgcgtatatgtaaggccatcattgatgaacagagatatcgttcattggattaa

SEQ ID NO: 188003 - DNA, 459 bp, Glycine max
  unsure (1)..(459): unsure at all n locations
agcttaataagcttcagtgtgagcttgaccttttatctaaaaagatcttttaaaaagtttgagtttgacctttatagtaaacaaatcgagccgagccgagccttacatagaccgagtcaaaggccatcgacaaattactcggctcattntcacccctatctctaatgtagtaatattccatcaataccacaaaaataattataggctcaactattctatagatgatgtttgcaattgaaaattaattaaatggaagaactatagaaaaaaaatactaataaacactcttcatttttttaattaccataatggtaataaagttagaaattggaaccttttacaatatactcaaaactttccactattgagccaaccttaatagttcataggcactccttngttataggcactccttgtttaactgaaataatgatatataacacatcgagtaaggagaga

SEQ ID NO: 188004 - DNA, 433 bp, Glycine max
  unsure (1)..(433): unsure at all n locations
gcttcatgcaaagaaacatgcttatggctaggaatccataatctggttttagaaatagaaaaacatgaaaattacgatttgcttgtgaaagtttttgctcgaatatgggctgccccatgtttgatactttacatagaggtagcgtggaaaacaccttgcaatagtgtgtatacatacgtaaatataaggagcatgaaattcctagcaaagtatgaataattgttttcttaaatgaatgtatgatagtgtggaatgccctctctgaatgcaaatatgtgcaggatgtaattagctttccaatatgcatataaataaataggagtganacagcaacaaattgtatggtgtacttcaaatgtatgtaagtagcttgtgatagcaaatgtctangatataaattacgtgtaaagcttgactcaacactctgagcata

SEQ ID NO: 188005 - DNA, 444 bp, Glycine max
  unsure (1)..(444): unsure at all n locations
cctgaggcatgcaagctntataagcgcgggtctgggagacanatgttatgtgttctttatatgcgaagatgatgttccgagtactttggatttagtacgaccatgccctcctgatttccagctgggaaattggcgagtggaggaacgccccgacatttacgcaacgagcataatgtaaacctttacggttttaaaagctctatagttgggcctaggctttagagtttttcctcttgttaaggctttgtgtcttttgtttttgaatttataatacaaggatctttcttcatctgttcctggtctctacccattctcattcatttgcatgtttaacttcttttctgaaacggcagatccgatgacgagtcccccgaagtactaatacctgggacccgcctatcgacttcgagcaagaaatgaatcaaccgtgagatgaaggaaatg

SEQ ID NO: 188006 - DNA, 427 bp, Glycine max
  unsure (1)..(427): unsure at all n locations
tanggatgaagtaatcagctcgcctgcgtgagctgggttacttctggttgaagcaagtgagcttgcccaacgtgagctgctgtgcaacctccaccccttatttccaataaataggcatgagggggatgaggagaagagtccaacaccttgaatcaagaggttttcagtgaaactagtatgaaagaggagaaagaagaagaaaaatcaaggtcgaggcgattgcataacgtttccgtgatcgattccgtgattgttattcgttcatcgacgagtaagtttttatttttgaagttgtgaattcattctatgcacncttanggggccactcttgcttttgcatcttctcttcattcttctcccatcgtattttatttcttttgtaagagagattgaccattatgcggcatatctctttttatcatgtaaa

SEQ ID NO: 188007 - DNA, 487 bp, Glycine max
  unsure (1)..(487): unsure at all n locations
ngtcaaagggttagaggcctcttctttaatagcacactatatttctatatatcngtattttnccttgacgattctccttcttcatagttaatacactactaacgagtttcttacccacaaatagtcatggtatggacatggggtgaatctatctagcaaccaaatgataacactgcagtaaccattgatgttaacccactgtcgttgaattggtggagtaaaagcaggataaggtatcagagatgcacgcactaagccgcggaactaaaatatacgatgctctcagtctcggatatgtacatgcgtacgaagataatactggttttgatttgactggccgttatcgatcttactctagcatttgttattaactggcgttctctctagtcagcacctgaacatccatgactctaacatgtactatctatacacctagaaattcattttgagcaagtctttacaataagggttatattggttctaacct

SEQ ID NO: 188008 - DNA, 420 bp, Glycine max
  unsure (1)..(420): unsure at all n locations
tatgactcttgaaagaatcctcaaaaacaagtcacttgaagaattgtgacttttggaaatgtatttttcaaaatcagccactggtaatcgattaccattaaggtgtaatcgattacacatcaacagatgtgacttcattttgaattttgaaaatcttaacattttaaaacactggtaatcgattacatgattatggtaactgattacagctttgtaaatcagtttgaaaaaaatgctggctactggtaatcgattactaccttctggtaatcattaccagagagtnaaacactttgtaaaaaattcggtgacacttcatgcctactcaatgttttgaacaagtnttagtacttatcttgattgagtctctcttgattcttgaatctagagccttgaatcttgatcttgattcttgaatct

SEQ ID NO: 188009 - DNA, 320 bp, Glycine max
tgttcgcacatcgttcgcgtgtatgatatccactccacaaggtttgaagtataggagagcttcaaccctataacgcaacgtggcggacaaaagtgggcagcaaacttgaatggtcgtcattggcaatgcggagggtattctgcgcttcactatccatgttcacacattattgcagcttgtggctacgtgagcatgaactactaccaatatatagatgttgtttacacaaacgaacacatcttaaaagcttactccgcacaatggtggcctcttgggaatgaagcggctattcctccttctaatgacgcatggacacttat

SEQ ID NO: 188010 - DNA, 407 bp, Glycine max
gctttaacaagagtcttacttttaactactatgatgccgaaaactaacaaaactacccattatatcttccaaaaccccatacccacgataatcaaaggagaaagaagtccacccaaacctgaaatttcgaagtcccactcgtagacacgcactttacgaccccgaaaatgccctcctttcgcgatttggagcataaatgatggccaaaggttagagctttgttgggcaacataatgtgattatgaccaaagtaaccaatatcaccaggctgagcagcataacccgaagcgatcgcgtgttcgcaccctctggcctgccgatatagcttgcaaacactaaagggaaagcaaaggtaatcgaaggacaaaatgtcaaggtgatcccgacatcggacgaggatattccaa

SEQ ID NO: 188011 - DNA, 370 bp, Glycine max
  unsure (1)..(370): unsure at all n locations
agcttgtggagcggatatcatacatgcgaactttttgttatcaagctagancctgattttttctaagttctcttacaagctgtgaacaatatacttgtccttcatttaattgtctttgggcttggcggccaccctcaacaaagtactttctacacctactgtacgttgatttgaccaatgctgttatgagaatgttgcgacaatccttcaaaaccttattgatacattctgagaggttggttgtcatgtggccatatcgacatccttctctatcataagccatcgtccatttttcctttgaaatccaatcaatccatgttgctatggctggacttatttgacaaaatttttctaaattttgaaaaaaaat

SEQ ID NO: 188012 - DNA, 395 bp, Glycine max
gacttagatggttaccttgcggtgtggaatttaaccatagaagatgaatctcaacatattcatttcgacacatgaggtggaatatttttcaattgaatcttaacattcgtaatcagataatgcaataagtactgctaaaactcagccttggcttttgctagcatttctacttctttgggctattcttctttcttcctattgaggtcaatgatgggaaaccttggtcaaattctatcacggtagaatttgaactcaattgactccttaacatgcaaaattggtggatatgcaacaacctgcttcttacccatgggtgtgcttgacatctaaccattaaaattctcattatgacgataaagccctctctcctgttcttctactgctatttctaatga

SEQ ID NO: 188013 - DNA, 373 bp, Glycine max
  unsure (1)..(373): unsure at all n locations
ttcatgcactcctctaatgacaatagcatcatatttggcactaaatngctgggagttggaagccatcttctcaattataattctggcttcaacaggggtcatgtctccaagggctccaccactggcagcatctatcatacttctctccatgttactgagtccttcataaaaatattggaaaagaaaatgctaataaatctagtggtgagggcaactggcatatnagtttttaaatctctcccagtattcatataggctctctccactgagttgcctaatgcctgaaatatcctttctgatggccatggtcctggaagcaaggaaaatattttctaagaaaactctctggaggtcatcccacctcgtgatggac

SEQ ID NO: 188014 - DNA, 321 bp, Glycine max
ctaagctgaagggacccccatgttataggaattttggtttgtgtttcaccagacagcactcctttcatcatgggggccactggctgccaactttcacctttggtggatctttaaagatatggcccctttttgacatgttctgaggtgcatcctatccgggccatatcagaatgtactgatactgtctaacaaagcaccattatgtccttccagaatggctctggaaggttcaaagtagcgtccaggaacaacaccccagtagaccttttggaaaaatgtataacagttctatctttgcgatgccccatcttcgacatacat

SEQ ID NO: 188015 - DNA, 416 bp, Glycine max
  unsure (1)..(416): unsure at all n locations
agagatcgncacaatactcacttccacaaatatgttcactaaattatctttttatctagaacactaaagtttagctcactaaattattcttatatacaacactaaagtttaatgactttattcgtctatagaacaaatacagcggacaaacatactctctctttatattctcaattataaacatttttcaactaattcatacctcttaagaaaagtaattagtttttatttaatcacattaaattcgtcaattaaatgttaaatcatttcaaaattactttttttttttagagaaaaaaatacattcatcttatctttatccacttaataatttatcattaatatctggagaaagaataattaagaaagggtatgtacgaaaatatattaatgctctagaaataaaaatagttata

SEQ ID NO: 188016 - DNA, 418 bp, Glycine max
  unsure (1)..(418): unsure at all n locations
ttacggaactatgaaactaagcttctatcaacgctcatcttgggggtgaagctctttcttccatggcttattccctagaggatggcgccttctctcacctcttctactttgtcttccgctgcatctccatggtggaaaatcaccattaaaggacctcattgaagctcaaagattcaacctccatagaagccccacaagaaagcttctatcactaaagctagaaatcctaacttaacaacctacaactaagaaaaagcgaaatcatctatcctatggtttgagaaataacaatgcaaatgaacgatgcaagagaacttacttggattatgtctgtgcaaggaaatgaagcaagcagatgcaatgtatgattnggaagcaagattatgcagtatcagaggtagaggtaactttgtgtatc

SEQ ID NO: 188017 - DNA, 349 bp, Glycine max
  unsure (1)..(349): unsure at all n locations
gacacaatcggacatccgagtaaaaagttaatgccgtttaaatttgctgagagcttttgttttcaatttctagcgtctcgatatattacgggactaaatcggacatccgagttaaaagttattgtcgtttgaatttgctacgagcaatctttttcaattacgagcgtctcgatatactatgggacacaatcgcacatccgagtaaaaagatatcgtcatcagaatnttctcagagcttttgttaccaattatgaacatctcgatatgttacgggacacaatcggacattttgcttagagcttctcttctgaattttgagcgtctcgatatattacggacacaatcggca

SEQ ID NO: 188018 - DNA, 386 bp, Glycine max
tgtctcagcgtttatgcgagacggagaccaacatgctagctatcatcgccaagtaccgagaagagttaggtctagccacggcccacgagcataggattgcggacgaatatgcccaagtatacgcggaaaaagaggctagaggaagggtgatcgactctttacaccaagaggcaaccatgtggatggatcggtttgctcttaccttgaacgggagtcaagaacttccccgattgttagccaaggccaaggcgatggcagacacctactccgcccccgaagagattcatgggtttctcggctattgtcagcatatgatagacttaatggcccacataattatgaaatcgtaggaaacttgtatggtctctcagaccttgactagatac

SEQ ID NO: 188019 - DNA, 450 bp, Glycine max
agcttttttagaaaacttccttgagaagctagagcttagctacacacacccatctaaaaactaagctcacctccttgagaagcttccttgagaagctagagcttagctacacacacccctctaataactaagctcacctcttaagaagaaaagctagagcttagctacacacacctataatagctaagctcacccgcatgacaaaatacatgaaaatacaacaaaaatcctactacaaagactactcaaaatgtcctgaaatacaaggctaaaaccctatactgctagaatgaccaaaatacaaggcccaaaagaagaaaaaaaaacctattctaatatttacaaagaagagtggacccaaccttgacccatgggctcaaaaatctaccctaaggttcattagaaccctaaggccttctttatcagctctagcccattcctcttggagcc

SEQ ID NO: 188020 - DNA, 407 bp, Glycine max
  unsure (1)..(407): unsure at all n locations
ngtctacaatgtgctctcttgatgaacacgcaaggacgtgtgctattagttaactataattcattanaaaaaaaaaacaattgctcttgcacgtatactatggggaaaatactatttagccatatcgatcccacgaattatatggcatctcaggttaatttacatgtggtacgacaaaatttaaatatatgaagctgacaataaaattttctccaatttatggctactgtatntattgaataactgcgtaccggtagcatccagggaatntacatgaattttatcgaggtttgtctaattgaccccaagtgcaaataagattaaatagctcatcttcaattatgaaatatagaacttagactatgatcttatattttaaattttatcatcaatatataatatgacta

SEQ ID NO: 188021 - DNA, 398 bp, Glycine max
  unsure (1)..(398): unsure at all n locations
catgcaagctttgaaccacttgttagacaaggggcagtgtatatcttattatgggggggncgaancaagatattacaaactatttccccaattaaaaattctactttgattttaatgcaagttccaagttcctctaaggatagacttctaatagatgattcaaaataaccaatctgaatgtaaatgttaagcaattataaataaaagaggttaagggaagagaaagtgcaaactcagtttatactggttcggcccaccattgtgcctacgtccagtccccaagcaacccgcttgagagttccacgatcttgtgaaaaccctttacaagttttgagccacacaaggacagcctttcctttgtgttcaaattgcttacaacaagagaccctcggtttctt

SEQ ID NO: 188022 - DNA, 391 bp, Glycine max
  unsure (1)..(391): unsure at all n locations
atgcagatgcttacctctctctttctgtgggctacttattcatatgcagacgtgtaccttgttgttgcctcaactcggattcaattgtacctcctttcccctacgtgaggcctcagctagatagtcttacgtaaatttggcattactaaaattntaaaaaaaaggaagaaaatgataggatcatctatgctcttttattggctatttctttttagagaatacacatattcttcattgctaatttgaataaaattattaatattgtcttaatatttaacttaattatatcttatgatttaaatttgaaactatccttangaatgatcatacgttacgtttggatcaacttgataatttcataaatttgaactaatctaaactagacaatcta

SEQ ID NO: 188023 - DNA, 365 bp, Glycine max
aataccaaacaccgattcctcccatgaatggactaattcttattaaacctcgttctcggatgtttcgtcgaacttagcctaaccgaacaacattacaatcacaacatataaaaaactaaaaccctgcactctatgtctagcaatgcaattatctagccatgctctatccaattctaaggattaatacattttccaatgctaaaaatcctaactttacacaccaatgggtgatcaaacctaaagcatgcaataattaagtgcagataaaagcaatgaacacataaaacaactttttatagatagtaagaatttacatcaagtttcagcagaatttccccacagagatacttagccttccatcacaa

SEQ ID NO: 188024 - DNA, 347 bp, Glycine max
  unsure (1)..(347): unsure at all n locations
atcctgactcaccatanaccttgacccagggtgagaatgtcaatccttaccctcggaagccaaaaaataaaagagagagagagagaagagaaggaatatttccaatcaaaagaaaaaggagaaggaaaattttaaatcaaaggaaaaaggaaaggaaattcccaatcaaagagtgggagaaagcaaaaagaaaagaaagaaaattcccaatcaaagaatgggagaaagaaataaagagagaagttaaaaaagaagaatgctcctggtcagagaaaccagaagaaatgtgccgagaggtccttggaccagacaatatctaaacaatacagaattgtcaccaaatgaat

SEQ ID NO: 188025 - DNA, 385 bp, Glycine max
  unsure (1)..(385): unsure at all n locations
catgcaagctttgacatcctttcatgtacaagaggaagttatgcttgttttttgataanaaggctgnctattggaagaatctgcttcttgtctntataggagaaattacttggtcttccttgattgctcatgtagttgacctccttctcttggagagaaccatgaccatttggatgatcacctccacaaaaatctcatctaagactttgagtttgaacctacatgagcaaaatgtaattgttgtggaagtttggccattngctttgtcaaagactcaatctattgtgttaaaatttattttatgccaagatagcatcatgagttgtgagatccaacactcttattttctgtattgactgcctaatatgttgagcttggtgatcag

SEQ ID NO: 188026 - DNA, 380 bp, Glycine max
cctgaggcatgcaagcttggacaaggcattgcgtgcaccagattctgtaaatttttcctctccactacaacacgcaatacctaaaccctttttgtctgttcatcttcgtttggagccacacatggttgcttacagccagtgcgagtatccagaccttgttcctgcttccatgatagccatagaagcatcacaagtggacagaaaaccatggactggagagataccccgcgtttggagactacgggggaaatggccacttacgcctaatgagacagctttaatacttcaatctctttccatcccaccaaccacaaatatatacctgtgccctggaaatggttcgatggaaatggaggtctgacatatactctacaccaaca

SEQ ID NO: 188027 - DNA, 201 bp, Glycine max
aaacaaccccaaccgggaacacgaacacaccccaccagcacattaactccaacaaaaaccctccagactgacaagcaaaagcacacgcccacaaaaaaccgggacgcacagagcacccaccgcgggcgacactatccatgtaaacgaacgaaacacaaaagggaacaaggcaccaagacgggaaacatactcccaaacccc

SEQ ID NO: 188028 - DNA, 311 bp, Glycine max
  unsure (1)..(311): unsure at all n locations
tcgaaacttatgtgcttctagtgacaagaaatgcttcctctttcacttgtgaagatcgccaaagataggctatgaagatggttcacactgagaaacattcggtatttccattggtttatcaacctattgagctagcttcgatattgccggtgtcgacagcatgcgttgaaagagccttttcagcaatgaagattatcaagtctaaattgcgcaataagatcaacgatgcgcgggtcaatgacttgatggtatgttacaccccgcgcgagatatntcagtcacttgatgagattgataatactcgaacattt

SEQ ID NO: 188029 - DNA, 361 bp, Glycine max
acattcctccataactacagaataaaagccagagaataaaaaaggctaaccggatatttgaacgcataatttccacttgaacgttatcttcacgaaatgatatagtgaatcacgagataaaacgagagagagttgaagtgtgttcacgtctcaaaggatgcaatcgatttcgacaggaggagctataaatgaaaggagagccaagagaaagtgtatcgcaacaacacgacggcgatgaaaaacatcagaaatgttcaatgttggtgattgggtttcacttgtttgcgcggaagacaccttataatcggaacaaggaacaaaagtggttggacgatatgcagagacgccaccaaccatggtc

SEQ ID NO: 188030 - DNA, 456 bp, Glycine max
  unsure (1)..(456): unsure at all n locations
gggaccctaagagactgcggcagcagcttaggtggtcgaccctttctgnnaatttccttctacttcataaaggagtgcgggtagactaataatggtagtcagtgccaacaattactcttaagtgagtagtgattaaatgttagattttggtgggataatgtaatccgattattagatcacattttaaatccgatcaattaggaaaattaaatttactagtatagtattttaattgatggatgcactacagcaaaatcgtaaatatagcgacagcttaaattgcttctaatcattgaatcaaaaaacaaaaactgcttctaatcaagggttaagtgtcggctaagtgatctaaagatgctgaactccgtcatgtttttcgtaacaccgttgtccctttaacactttttcttacaccactcctctgtctcaatcatgccctttttctaactttattct

SEQ ID NO: 188031 - DNA, 435 bp, Glycine max
  unsure (1)..(435): unsure at all n locations
tatatttagattagttcacatgatacaaaatatattatgtctgttacataacagctataaatatgattaataaaatgcatgaagaatgtctgtcatgtgcaattaaaaaaaattatatcctaaatttcaaaagttttactttggtatttttaaatggtnttattcaaaagaaatatattatattacgtttaatttactctttttcactttaaactcttattttaagacaagagataaagaaatatattatataagataaatatttaataaaaataaaagatttaaattaaaagataatcaagataaacaatgataagataaaataattgaaattaaagattaagataataaaagataagtgataacatgctanagatcttccttcttgatactttgtctatctttctctctcttaacctatcttcttttttatat

SEQ ID NO: 188032 - DNA, 329 bp, Glycine max
aactactgaaacaaggcacaatttacaccatgagattattttcaataggtaaaataaattttttaacacatatataagatatacaataaatagggtatgataaattaaatctcgtagaaagcttgacgcattcctgacgttttttcaacataaatggaagagacgtttgacagagccaagtgtgccctctccaactctagattacaacagaacaaagaaccccctgtctgacaaaaaaaccccatcaagaaagccccttcagttatccgaaaaaaaccccgactattgagtaggcattacactcaactggtacgctcttttcgtatatt

SEQ ID NO: 188033 - DNA, 301 bp, Glycine max
tggcattgcaacattcgcatcagaacacggcaaaactggttctatcgtttgagcgatccgacgcaccagactttcatcaaattgtcttgcattgcaacactgtcacactgccatccgcctagccaaagtggatcattctccaatagccacctctcaggatagtacaccgagattgcaacacttcaaactaaagcatcctaaacttcacgggttcacacattgttgagagttagtgactccaacacttcatatcgaactctgcaagagtcgaacactacactatgactgcagcactacaaca

SEQ ID NO: 188034 - DNA, 402 bp, Glycine max
  unsure (1)..(402): unsure at all n locations
ccaagcaggggtagttgtngctcaagctgccatccacatcaactctttcatgcgtgcttttggatactttttcttccaattaccatacaaatgtttgacacacaatctatgttctacgttatcgccaagctccttgattacctcaaccaacccctgaaaataacagtgaataaattaaattatagtaacaattagatgtccaacataattttaatatttaccttttgttggtcagaaatgaaagcccaacatccttcctgaataccatgtaagtcagctatcaagatatcaacaaaccacttccaagacgaatatattttaaattccactacagcataagcaatgggaaacatttgattgtttccatctttacctactccagacaagcaattggcaccatat

SEQ ID NO: 188035 - DNA, 480 bp, Glycine max
  unsure (1)..(480): unsure at all n locations
tggaacatgagtngaagcatctcaagcttgccctccaaactggtaaggattgcctcctgatggagtctatgcttccaaatacaaaatttgattgaactgtggcaggttgctgacttgtgtggaggtagaggcttgtgttgccggagtgaatgagaattgaggagtggatgcactggaggttgattaaaaacattgagggaggactggcagaagtaacagacacagtggatgacaatgatgtactagatgtggaaccaaatatagacttggtgggctgcctattagatccaaattaagtagaacttggaccacattggagcttacagagtataccgtcgaagaggaatcagaggtgccaagttcataagatgtgacatgacttgaagaacgatacaatgaattcccagatacacaagctacactttgttgcanggctagacttcaaaatgattagtagacacacactcccctcacgagatg

SEQ ID NO: 188036 - DNA, 258 bp, Glycine max
  unsure (1)..(258): unsure at all n locations
tattctcaacagtcacatctttttatttggttcttgaatggctatcaaaggcctatatatatgtgacttgagacacaaatttaaagagttttttntttttagaaaaaaaaggtcttatcctctgaaaaagaaaaatcattttatcctcttacaaattccttggccaaaacacttgtgattcaataaggaattatttgagtgctcaaattgttcaatctatctctttcaagagagattacttcttctcttcttctttat

SEQ ID NO: 188037 - DNA, 411 bp, Glycine max
  unsure (1)..(411): unsure at all n locations
actcagcttgtaaccaatgctagccaaaaaaacttcgatcgttattngttaaaaataaaagcatcggactatgttggtagaaaacaaactcggccgatatttgccaaaaaatgtacttttggccgaggttgacgaaggttatttttagaggaatgctctgaaatcttaaaatttaataaagtattcaatccatattcaaataattggattggatttaaaatccaaaaatctgaatttgaatataaaaccaatccattaaaatggactaaaagtggtttcgatatgatcaatggattatgtattggntctatantaactggtttttttttggaanaaatataaattatattaaacccaaaatggtacaacaatanacggggcataccccgcagctagagaaaaatanagtct

SEQ ID NO: 188038 - DNA, 381 bp, Glycine max
agcttgccgccacggagttttccgactatgctcttatgtggtgtaacaagctacaaaaggagagagcaagaaatgaagagccaatggttgatacatggacggagatgaaaaagatcatgaggaagcggtatgtgccggctagttactcaagggacttgaaattcaagctccaaaaactaacccaaggcaacaagggggttgaggagtatttcaaggaaatggatgtgctcatgattcaagcaaatattgaagaagatgaggaggtaactatggctcgatttcttaatggtttgactaatgatatccgtgatattgttgagctgcaggagtttgttgaaatggatgatttgcttcacaaagcaatccaagtggagcaacaat

SEQ ID NO: 188039 - DNA, 214 bp, Glycine max
gtgctcgcgacaggcccctatcgtcccttcgcaaccggagataattattgctacaccatatagcacccccaaattagatccggccatactcttacttgcgagccctcttgggctgttgaacaacgactcttgcggtaattgcagtctcttaccggaacccggcgcactccttccgaaagcgtgtaaacaccaacatagacttctccttggcgag

SEQ ID NO: 188040 - DNA, 267 bp, Glycine max
caccaatggctttctttatgagaaagacatgaaagaccggatggaatttactgtgagatggaaaatcaaacttaagctacaacacccaccttgtttaacacctctaaaggaccattaaaccgaggggagaggttttcattaatccttttagccaaggatcttctcctgtaaggttgcatcttcaagaacacccaatcacagacttgatattttatgtcctaacgacattatgtggcatttgcttgcttgatatcttgagacttcaac

SEQ ID NO: 188041 - DNA, 292 bp, Glycine max
gtccaactccaaggttcttgggaaaagccatcatatctatgggcaagtgtgccctctacaatctggactcatgccatttaataagcaaccacagccatgggccgcctgagctccttagttggctcaatggccaaacccgcctccatacccatatactgcttccttttgggcacgtaaaaatgatagtgctcctactgaagggcgacgccaatttgggccggggatcttgggtaccggtacacaggcatacgatgtcctagcaccatgcactacctaccacatactgacattg

SEQ ID NO: 188042 - DNA, 466 bp, Glycine max
  unsure (1)..(466): unsure at all n locations
gcacctgagctgcagctttatgaagggttggcctaatttcttactatggcatcacctctcaatgagctggngaagaagaatgtggcatttacctgnggtgaaaaacaagagcaagccttntctttgctcgaagaaaagcttactaaggcacctgttctagctnttcctgacttttctaaaacttttgagctagaatgtgatgcctttggagtgggagttggagctgtattgttacaaggtgggcaccctattgcttattttagtgaaaaactttatagtgccaccctcaactaccccacctatgataaagagctttatgccttaataagagccctccaaacttgggaacattaccttgtttccaaggaattttcattcataggatcataatcactaagtacatagagggcaagcaagttaacaaaagcatgcanatgggtgagacctaagaaattcctatgtataa

SEQ ID NO: 188043 - DNA, 348 bp, Glycine max
ctaagcttgcctccagaggtccaggaaggacacggcagtcgaaggaactatttcctctccggagtatgacagacaccgctctatgaacgctgtacaccagctgcgcttcgagaccatcaagggatggtcgtttctccgggagcgacgcgtccagctcacggatgacgagtatactgatttccaggacgaaatagggcgcctgcggtgggcatcactggctactcccatggccaagttcgatccagaaatagtccttgagttttatgccaatgctcggccaacagaggagggcgtgcgtgacatgagatcctgcgtaacggtccagtggatcccgtttgatgccgacgc

SEQ ID NO: 188044 - DNA, 188 bp, Glycine max
ggggttgaattaagatattccaaactgtttcccctaattaaaatatctatgtcactttttactcaagttattaattcccttattgacaaccgttttacatttaattaaatgacgcccttttatttgattataaccaatatctaataaaggagattaacggaagagaaaatgccaactcaattctatac

SEQ ID NO: 188045 - DNA, 431 bp, Glycine max
  unsure (1)..(431): unsure at all n locations
ctaagcttgaagtcgttactgcttaagcgccaaaagagagaatgcggttttagatatatcaattggncacgaggcattcaacatttttgtttgtgcgcttaagcgccactctaggtgctcttaagcatcagtctgcatgtgatgactcttttctttggtacatgttgaaccttatttaatggatttttgtgcaatcgctatgggactctttcgattatcaccattcccacaatatctcttctctataatagctttgatagcgacctataaagctctgtcatggcttcttcttctcaattcttcattcctatatggatgtatcacaacttaatggctaggagtagctaaatctagagctattggggttggatctagtgagacctgcaagctccttgagagatgatattcttcagatactctgatatttgcac

SEQ ID NO: 188046 - DNA, 479 bp, Glycine max
  unsure (1)..(479): unsure at all n locations
ctaagctnttatgattnnttgggganatggngtgaatctgatttcatttctcccctntttattnttttgtcagcctatgctcgcctaggcgagttaatttttattttttgcaaatttttttcacagttttttttttggtattattattattatttatatttcccttttaagctttataattatgtataaactctaggcaaatttcggagataaatcaagaaaaggaaaaagtctagctcgcaatggaaagcataaaacataacattaaagagcaaagtttagagataccaggttgcctcctaggagcgcttctttaacgcctttagctggacacggngttgtagtcgaggcttcgccatctcatcattcctaactcctttccttgattgtgagaaaatctaatcatggacctagcacctgttggcaactgctctaatggctttgacaagaanatgttaacatgcanatgttaaaaaaat

SEQ ID NO: 188047 - DNA, 341 bp, Glycine max
  unsure (1)..(341): unsure at all n locations
atgagtcccatcaagaggtcagaggggtctctccaattcttgaatgttatgtttgtagttaaacttccttgaacatgttgtcttgaaaattttgagcttcgtgccctgtcctgaatctatgtgttaaagctatcttccttaagttttttatgccaaaaaatgatttatttgcatgttgaaacatagcacttgcttttctttattatgtttttatatttgaaaacctttataatctaaaaaattcttaaagtcctttaaatcttatgatattgatccattaaaatctaaactaataatatttntttaaaaaatatgatcattgataacatttttatttaatc

SEQ ID NO: 188048 - DNA, 427 bp, Glycine max
  unsure (1)..(427): unsure at all n locations
ttagaaaaatcacatagtactactcacatttcaagtacccattttatagtttcatcagcntctggatcatctttcatttgcaaggaaatattcacccatgtgggagctatttcctccagcaaggactgatgataaagaataaccaaagcctcaatggaaggctattatgctttataataactatataacagttagaatattagtaataaaatcaatctggcaacatgtgtaaacctggagttgagaattcaccttctgaatgattacaggagaattgccaatgggatcaatatcagtaataggaccgttcgccttgnggtagaatttcctaattatttttccatgtctaactggttttatataaaacaatggataccctgctggttggtttccattagtcaaattangcaaaggatttacaaatatg

SEQ ID NO: 188049 - DNA, 107 bp, Glycine max
atccccaaaacctcctagaagatccaattcaaaaactcctgggacctgaactcatggcaatgacccaagactaattatccatctgcagaaggcgcgaacgatgtagg

SEQ ID NO: 188050 - DNA, 373 bp, Glycine max
  unsure (1)..(373): unsure at all n locations
gggcatctatatngactttcctatgccgtctctacatacataaaacagccccaccatcccaattttgcaaaaatcatattcatatatcattggggcatttcaccgagcacttggtgggcgcacgtttggacacaaattgcaagagaatggggacaatgtggcatgccctattgcttcagaatacagcataggcctaaggccttctcattcaaatcctcaactcaagaaaacaagcataaaaacaaaccaaaactgccccacaaatataagtgcattctcacaatttggagcaccaacagatgaagaanatataccaatgggaagctaanaacatcaaggattgaatacttacttgttggagtgaatttataca

SEQ ID NO: 188051 - DNA, 385 bp, Glycine max
  unsure (1)..(385): unsure at all n locations
ntattcaatcaatcaataatagattctctctgactcgagtatataattcatcataaaaaaaggacaccataaaaaataccaagcaaagcataattgagaaacaatgacactaaacaagtgtgaacggagtttggctttgtctagagaggcagcaaccctgagcttctttgaggaacaacatagatatacacaaacaatgtcaaaattccaacccacaaggccaaagtgataatagcaacagtgaatgagatgatgatcaaagccagaaatgaagcagcacctccaacaataagcatggcacaagttatcaaaggaagaagatttatgttatgtntctgaagtattggttcaatgatcaccaagaaggagtatacgacaatgctca

SEQ ID NO: 188052 - DNA, 401 bp, Glycine max
  unsure (1)..(401): unsure at all n locations
actcataacctccatgagacaacacgtgaggggcaacgttttgattctgaatggcttatgcctttntttgcacatcctttaaaaattaaacataatccaaagttattattactgacaataataagtaatattaatttttaaaacaatgaaaatgacaaagttaccttccgtgaagggtctctgcggctctgacaaaattgggtccacttttccttgctaatatcgtacttttcgcaaacagtgtcatcaacaacgtccttgtcggctgcaagtgcccatttcaaagtcaaattagacttaaactgtctccaccgctcccccacagtttgaagtatttatctttttgtcctcaaatcagatgcttcagggatatcaaattcaacctgacaaacgaaaataca

SEQ ID NO: 188053 - DNA, 146 bp, Glycine max
gcttgaacaattatacacttactcttagatcaggttaacttgttacaaatacaactttaaaatgaaaattggtactttaacttttttatactttcaatgtgttagggttacaaacttttccccaaattttcttaaattaatcatca

SEQ ID NO: 188054 - DNA, 339 bp, Glycine max
  unsure (1)..(339): unsure at all n locations
aaaatgcatctgcacccccattctatcatccatggattgtcaaagatacatttnggtgctgttgagcacaatatcctttccaagataatatcttttctccttttttttaaagcaatatatcctttctcattagtccctacaaataatatctttgtattcaccatgtgttaaaatactttatatcttctaaatttaataaatagatattcttaaatatatatatatatatatatatatatatatatatatatatatatatatatatatatatataaattacatttacaacaaaccattcaatttttgacgattttgtaaatgttgaaaaaaatattattg

SEQ ID NO: 188055 - DNA, 371 bp, Glycine max
  unsure (1)..(371): unsure at all n locations
tcaaaactctgattnttgtaattatatgtcatcctagagagaatcacataaattagatttcctttgtaaagaacaaaaacaatatgcttggtttgtattaccctaaagtagatcaatgcgtttttccttaagttatttgtttgaattcaacataaactaaaaagtagaagtccacaataacttattttacaagcaagcacctaacgtgttcttaagttgggttaatattcactccaaaaataaatgaatgaccaacttgaagtcatggcttttagaaagtgaaatctatcaatgtcttcaatatgtgtagcccaaatatcatgaggctatcatgcttaattccattgggtacaccccgtctagcatctaaa

SEQ ID NO: 188056 - DNA, 445 bp, Glycine max
  unsure (1)..(445): unsure at all n locations
ctaagcttagaaatgattctatacaaaagtagtcgtatagagcgactaacatttcctccaaacttatagntttgcttggccttaagcaaagaaaaaaccgttcacttgtccacaagttacaaagagagtggccaatcaaaagataatggggtttcattcatcaaggacatcaaccatataaattgattaccatgaaatgcttaaatcaattagttctcacaagctgcagttttttcgaagataagaacacaagtattagagtcacaactgaaataagctagtaagcatgactgaaatcaaggaaagatcatcaaccaaaacctcacagtcattgtttcactcaaactcaagtgtttaagcttattccatcataaacaaccagcacaagttccaacctttgcatttcatctcctatcatacagtantgaacacaccaaaatgaatc

SEQ ID NO: 188057 - DNA, 396 bp, Glycine max
  unsure (1)..(396): unsure at all n locations
aaaacgaaaatgcaactgaggtcaactgacacacccttttctaaaagccacaactatngctacatgatagtcattcgtagtgtgaataccgaagtaactagctatacactaacaacttacatcttaactctaatattgtcattcattttgaaaacccaccgtcattaaggaagaatttatcagtttaatatattagtcatagaaaattgattagattgatcttttacanagcaagatcctcatccctaattaatcaattatattaataatcgtaaataacgtttgaaaagaatattagtctcatgtaaatgttctgaacatgacaatggaacgatccatgtgtggcatggcatgaccaaatctntatgatccctgtatctcattattttgattatt

SEQ ID NO: 188058 - DNA, 399 bp, Glycine max
  unsure (1)..(399): unsure at all n locations
acctgcggcatgcaagcttcctctagaactgtagtacgattagtcatctaaggggcttttctcttgtacctaggcccttntggaagagggtgacgattggctggcttgtgccttttgtccgacttgtgntaagttggcttggggttttcttgtcgctttccatacttctattcggcttgtctaacttcattcttgaatctggacatttcttcgtgcaactcatccattctatcagaggnngttttgcacaaattgtttgcgaacttgtcgggttgtagggcaaggagcatggaatgcaacactaccatacggtgagatccgttggttgcataatgcgcactaaagcattcgacaggggtgttgaagttgtctatggatctaggtgggagtccaccatac

SEQ ID NO: 188059 - DNA, 493 bp, Glycine max
  unsure (1)..(493): unsure at all n locations
actaagctgctcccatcgtgtaccttatcacccggcccggcatttagaactcttatttagnttcaactccttacctgaatgtagttaatattttaattcactggcttcatcattcatgtggattggtttagaaacttagccaaaatagcaggctttaatatcaacttttggaattccactaggaataacaccagtaatgctttgtgcaggaaaccaaaaacaaaggccatcttctataaacaactaanaaaataaaggagagaattgaaaataaatatttggaaatggaaggaaggggtatttgnggtgtcataacagaaatgttgagactcattntggaattccaattcaagtggagttattagatagagattctntataacttaatntaagctgctttcttcangtaagtttctaggctcgatggcagctttgttcataatagtagaattctatcctttttcgtatttgagcgngtaataaagggactaat

SEQ ID NO: 188060 - DNA, 460 bp, Glycine max
  unsure (1)..(460): unsure at all n locations
tgcggctgcagctgtccctcatatttttcaaatattgttattcatatacacggntaggattttcaagaagcctatgttctttatctgtacatccactcaataaaacatcacattatcttctttcctaattctttttatttattttctgattagaaaacacataagaaactattggagaacaaagctctcctaataataattataataataatcatcataataattataataataataaaacacatcacacaaaaagaaacttgatcgttgaatgtaatcaaatgttattatgacaaaaatatgatacaatgattcaacaattaattacgtgtatattaatacttaatgaattgttatatatagcgatcaaatatcatatgttaaaaaatgtantgaaagccataatttcttgatgttgaatcattgtatgttacgatgattcgttggataacaataaaat

SEQ ID NO: 188061 - DNA, 480 bp, Glycine max
  unsure (1)..(480): unsure at all n locations
tgtggatggcctcttccagtcgctcaatggaggtttggcgcgtattatgttctggcataatggcaggtcggaccagaaatgttaggggtgcaactaactaaagacactaatatgctactggtaaaattctttcttgctgattntatttccttatatggcatttataagaaaggataacacgctgtaaaaccacatgtgggccagctaggctgtaacaaactanaaaggaaataacagaaggataattctcataacagaatgaaaacagaatgatgattgaatattcagcaagaatccttggtgcgcttcagacgtagtcttcgtaatgggctggcctcttggtaagtctcttgggccttccatcagcttgtgtcctggtgctatcatataacctctacgagtgtgaatgaactgtatgcaattgctntatataatcaaagtaaaangcttgtcacctacaatatangagtctcttgtata

SEQ ID NO: 188062 - DNA, 466 bp, Glycine max
  unsure (1)..(466): unsure at all n locations
tgcggcatgcagcttggcttaacactntttttattgaattatttgaaagatcgaatgttgaggacttggaataggataaaatctaagtatctgaatagcatcaccacattaacaaataatataaatgtcatgttatggagagcccgataaaaacaaaacaaattaatgaagcctacactaaaaaaaaagtcatgcatgattgcatgttataactattntgttataattatcttgataccatctaccaactgtcgctgttgtgcctaacaaccaagtgtcaattagtggctgtgaagatcaaccacacaacgaattaatgactaagaccttgcaacaagaaaaccaactgaaatgtttaaaaatgtgctcatttgatcttttaattagcgtttacaatttccattttcctacattatgaaatctgactntagaagaacaattacaccaatacaaagaaaaggtaatc

SEQ ID NO: 188063 - DNA, 437 bp, Glycine max
  unsure (1)..(437): unsure at all n locations
tcaatggaagaaaanaangagagagaggcggagggcaataattttgttgagaaaaaagggagagaatttgaactttgaagtgtgtctcaagactctcattcatcaaagttgtgacaagtgttacacatgtttctatttatagcttaggtcactaacaaaatgaaattcatcattttatgtgaatctaagagaaatattccaaggatatgccaaaggcatcttagtgttgaacaagtagcctcgaaaattctaagaaagggggggggggggtgaattaagaattcattgactattcctaattganaatttccctctcttagatattgtctagattcacattattttttaattggtaggtactcgaataacaaataaggagcagcaaacttaaagagatataaacacaactgaaagtagaaagattagtgaaagagaga

SEQ ID NO: 188064 - DNA, 482 bp, Glycine max
  unsure (1)..(482): unsure at all n locations
tatgcacggaanatgtaattatgaaattgagatgcccgaagatatttcatttcctagntaaccatgcattaggtaccatgttcaattattttgtttttaagtgaaacgggtttatgatcccaacatggttggctcgtggtgcctaacacatgaaactaagaatgtagtgtgaagtttcacgcttccccctttttgtttttgttttgtagaggaaaacgcaaggatgagcaaacatganaacaaatggtatgcaattntgcagatcaaaaagtttgttgaacgcatatgcatgatgatgccatgactcatgcaaaatgtgaggctggaatatgataacggaaaaatgcaggatatgtccattatgatgttatgaagagatgcttatgcgatgcatgatatgaatgcattttacggacacgagagcccggaaaattatctcttcttactttgcgcatttggggcgcagtgccccatgtgtacat

SEQ ID NO: 188065 - DNA, 320 bp, Glycine max
actttcaaaaatattgtttcaaacgaaaactcataattgaaaaattcattaacggtatttcttccccacaactcttcttttttagagataactaatgctgtgaaagactaattcttggattgactacattctgtcggacaaattgctatttggagcacgtcacaatattaacattaaccaccgtttttggactatcactctaaattttgaatgactaaacgataaattatgtattgtttaaagaaataaatccaaaatagtttagaccaaattaacatgtattttcaatattcatccacaagaaatttctctgtgataaa

SEQ ID NO: 188066 - DNA, 415 bp, Glycine max
  unsure (1)..(415): unsure at all n locations
aacataaaactaagccttagtgttgcatgaagaaactgctagcgattgtcntttacagctcccgcccagactgggagatccctgcattgaaagaaaaaaaaatccttcgagcatcttaacaaaattctttttctatatacatcattccagcgaaattgactaaaatacaacacgatatatataggactcggcctacgtacaccttggtttgtggtcctacagcaagacaatagattattttctcccgaacctatcgagagaatgtaaagacatgcccatattacatcaccaacagtaattcctccttgcataagtgaccgccgtgaacatatcattgcagctcatgtggaaccatacatataacctcatgtatacttttaaccagtactgtgccattattattgtagactgcagc

SEQ ID NO: 188067 - DNA, 286 bp, Glycine max
  unsure (1)..(286): unsure at all n locations
aacaaaagctctgagcaaattcaaacgaaaattactttttactcgtatgtcccgatgtttcccgcagtatatcgagaccctcgtaatagaaaccagaaagcccgtgcaaactcaaacgggcataaaatataactccggatgccgaatgaaatccatgatatatcgaggcgatcgtaattgaaaacagaagccatgagcaaattcgaatgaacataacgttttactcggatggnngattgagcccgtaaatatctggacgctcgttattgataacagagcttctagc

SEQ ID NO: 188068 - DNA, 426 bp, Glycine max
  unsure (1)..(426): unsure at all n locations
tctcatatcaattacgagcgtctcgatatactactgtacattatctgacatccgagnaaaaagctattggtatttgaatttgctcatagcttttgttttcaattacgatcgcctcgatatattatgggattcattcggacatccgagttaaaaattattgccgtttgagtttgctacgggcttctggtttcaattacgagtgtctcgatatactacgggaaacaattggacatacgagtaaaaatttattgtcgtttgaatttgctcagaagctttgttttcagttaccagcgtctcgatatattacgggattcattcggacatctgtctaaaaagttattgtcgtttgattttgctcagagcntttgttctgaatttcgagcgtctcgatatactaccggaattcattctgacatctgagttaaa

SEQ ID NO: 188069 - DNA, 362 bp, Glycine max
agcttgtaggattattgtgtacccatcttatgtggtactagggggcgggcgggcgatggtgcacaacatgttttccacattcacaaatcgcgcataaacccaccatcccctgttgtccacctccaactgagctcacgtactcccacgtagcccatatcctcgtttctctcaacaccgggtccccatcaatcctcccaagcttccccaacatccaggtaattcaacattcaaacagaacaaactatcacaaccaagaaaacagggcaaaggcagaaaactctgcccaaaacaccaaccaaaatcacagcttttcttacttaaagactccagtaacaattccttctttccagttccgtaaccgg

SEQ ID NO: 188070 - DNA, 255 bp, Glycine max
ttagcctagacagaataagaggaagctcttctaggataaatgctctcttataaccctaatatttgaaataccattaaaaccataatgtctctaactagccaagccaaattacacgccaataaaattacttagtgatccaccaaatgatagcatgataactataactgagatgaatgcagaattgggaacattaatagtaggttgtagaaactgtcaacactcatacaagacacttgtgcacagagagaaacacta

SEQ ID NO: 188071 - DNA, 390 bp, Glycine max
  unsure (1)..(390): unsure at all n locations
ttgataatataggacatctcttatcctcgaatgaaatttcatctttatattaaaaaactggacttatccccttggtgtccctcacaattaaactttcttcatgaaaaaataccaaaaacaaaaaaataccttgaaccaagcatatttgaagctatcatttgttgggacaatgccccttttgtgcaaagctgaggtagcatcggcatccatgacaatggcaccaccagcttgctgacaacaaaaaaagaaaaatgagaaagaagcagagaaaaagactggatgtcttaaaaatacataaaaaacttaggcacagaaaagagacattcancacataagatacctttgttngagcacttctggatctctctcttgcagctccatagcactatc

SEQ ID NO: 188072 - DNA, 323 bp, Glycine max
  unsure (1)..(323): unsure at all n locations
atggagngngcgaagggactgagatataattaagttttaaatatatttgtaagtcattttatatttgaatttattttatgagtgtcttaaggaaatttttaacctgtataaaggtttttatgtgggaaaaaaaagacaattttgtctctagatctagtttaaattaactatagncttcataacttgtttaaattaagtttaaaatgatttttttttcaagtccgactcgagtagtgagttattgttttaattatggaattaatttaatttggaaaaattatactctacccttctttaattatntttcactataatacttataa

SEQ ID NO: 188073 - DNA, 407 bp, Glycine max
  unsure (1)..(407): unsure at all n locations
gttctcatacatggaaaactntaaggccacaagacaaccactggaaggtatgaaattccactacagaaaaaggttcttccgagaaaccaccaagtatgtttgggatgaccctactctttttcgtattggtattgaaaatttgttaggcaatgtgtaacaaaaggagaacaagcaagcatactttggcattgccacaactcattatatggagaccacttcaacgcagaaagaacaactgcaaagatccttcaagccaaattctattggcctacactctgcaaaggtgctcataaccatgcactatcatgcgataattgtcaattaaccaacaacatatctagacatgaaatgccattacagaacacgcaagaggtagaagtctttgattgttgggggaattgatttat

SEQ ID NO: 188074 - DNA, 480 bp, Glycine max
  unsure (1)..(480): unsure at all n locations
acctatacatactcagcttatattgtcgttaatctaggtctactataggtgattccatagtataattttatacaatatcattttcttcttgtaccctcaagtgtcctctagctttcatcaaggaatttcaagaatcgtgggtaaaggaagctccaacctatgctaaattgtgttgtgatggtgaaatattgagtaatgagacggttgtgtgttggcttttccttttcccatcttgaaaatttacggattttcaaaattaagatcgattgacgatgatattgggcatatatgctgtttataaagcataaggaattattattgaggcatttatatcgagtttgaatgcttgggtatgctatacatggcatttagagcttgaatatgtgatcacaaaataaaatgaaatgcttgttgtctagtacattnttgaaacaacacatgtcgctaattatattaaaacttttgttgtagtgaatggaa

SEQ ID NO: 188075 - DNA, 422 bp, Glycine max
agcttgccaaaagccagaacagacacgtctttattgctaggctaaacacactcattgttcacgccatgagagcccttcccgtcgagaagctacatctccacaagacatctaagtacgctaggtctgccattggtgatctttaacatacctaacttggatgtgtcaccaaacgcctctatcaaacccccggtgacatgcttcgcacaaaaactccctgaccgcccttggtaggcactactccaaaacccaatgatcccctcggcacgcactcctacaaacccaaggcacccccttggtcctgtcaatcacagcatctaccacaaccatggtccatggctcactgctaacatgcctgaactaccgccatgctgtccggctataccttcaataaagtgctgacatgctgactctcatgacctaca

SEQ ID NO: 188076 - DNA, 254 bp, Glycine max
  unsure (1)..(254): unsure at all n locations
ngagatgaggagatgtataagggagagtcttcctgctgttcttcgttaaccactgacaggtccctcggagatatgtcgcgggggtcaagagacctcgaggacaatgcgtgaggagctatagcacaactcccagcttgacctatcccaactcatcccgcgcgtcatcgatccgagataacctggtatgtatcttacccggtgacctcctgtgactcaactactatgcagaacaacgacctcaccctaaagacgct

SEQ ID NO: 188077 - DNA, 438 bp, Glycine max
agctttatcccataatggataccttcactttattctatataatgagcaaaaaagcacgacacttagtatgagactaagaagcccattaacaaagtgttgttgaaactatgctggatttgtttaatgatctatacaagtgcttagagagctaccctttgttttgcaaagttattgtattttattcgagcttaatttgtatatcctctcttggagagatttgaatatttgtattcattaaaattgttgtttggaatgtcaagcgtgacttagtgatgaagaatacttgagtgttctttaatttcatggggagattaaaggcatgtcataattaagtggccaaaagaatacttgttgtagctatgagtgataggaaaaaatactttgtgtaatcaattattgattagtgaaatccttcacagggttaaagaagaactggat

SEQ ID NO: 188078 - DNA, 450 bp, Glycine max
  unsure (1)..(450): unsure at all n locations
gacattccaatggtggaatgcatggacgagttgtaccaaatctatgatatgtgaaggaagagaaaccagtgtttcgaaaagtcactaacgaaacacttcaagtaggcaaccaaagtttgcttaacctcttctgtttgcctatctatttgggtgtggtacacagtgtaaactggaaggggttatgaagacttcataattcatagtatttttttgctgatgatgagttgtaaaatttataaacattagttgattaggatggttgttattgctttaatacattgtgtatgatatcatacatacatccatcctacactaggagatgtaattgctntgattcatggttgttagccttgaagagttgaaactcttgtaacttagtttaaaatcactaagtttcaactccgcatcaatataatcaactagatgctgatatagtagactagatcaatc

SEQ ID NO: 188079 - DNA, 379 bp, Glycine max
  unsure (1)..(379): unsure at all n locations
nnagcttgtttttgaaccanatattgactttagttcaacactttgattaaaccaaatattgacttaatgctgtagactttntattcaacaagcttttttttttgtttgtgtgtaaatctattagctaacttctatggaaaaaatagatgttaaccacccacacgtaacaacagcaaatcaatttcaaactcaataaacattcattatttaccaagtggtagggaccaataacaaatgtgatagggatcagtatgaactccaacaagttacttgtttttaaagagttatgatgatgctgataggttgcaggttatagtttcaactaactggacctactagtgcttaccaaggcacattgtccatcttatcgatcatgtat

SEQ ID NO: 188080 - DNA, 456 bp, Glycine max
cgctcttataggaagaatttctcattggcatgttctcttatctgagtatgacattgtgtatgtgactaaaaatgcagtcaaaggtagtgctcttgtaaattacttagcacaccaacctgtgaatgattatcgatcaatgcaatgtgaattctttgatgaaaacataatggcattgcttcattcatggtgaggttatgctttgactatacaaataatgtggtagagtatgaaacatgcatcttggggttacaagcacctgtagaatctaaagtaagaaagctcgaggtctatgatgactcggccttggtcatttaccaaataaagggtgaatgggaaactcgagaagcaaaactaattccttaccaggcatatattaagtgtatgtatggatggagtattttaaaacttcagggagtctaaaattcatggaaattaaaatgctcaattaaaattctt

SEQ ID NO: 188081 - DNA, 421 bp, Glycine max
agcttgcccatgtgagcttcttgctaatgtttgtagtcatcagctcgcctaggcaagtagcttgcttagggcttaagctttttcttggcccaggcgagctatatgctagcctgggcaagtttagggtaaaaaaactatagaaaatgaccattctgcaatgattaaaacatcatatccgaatgataaaagtattatacccggatgaatgctcattggacagagtgttgaacgctacattaaaataaagcatattttctataatatgatactaactgttgtaaatttctttaacataatgttcctattcacttgtcaaaactcattagaatatcaataatttatacttgttatacatcaaaatccaacgtggatgagatgtgtggttgtcttgacctaatagacttttcctttaagagatcgt

SEQ ID NO: 188082 - DNA, 441 bp, Glycine max
  unsure (1)..(441): unsure at all n locations
tcaacatcagaccacttccagggagctggaactacttacttggacttgatggggcccacgcaagttgaaagccttggaggaaagaggtatgcctatgttgctgtggatgatttctccacatatacctgcgtcaactttatcagagacaaattagacacctttgacgtattcaaggagttgagtctaagacttctaagagaaaaagactgtgtcatcagagaatcaggagtgaccatggctcagagtttgaaaacagcaagtttactgaattctgcacatctgaaggcatcactcatgagttctctgctgccattacaccacaacagaatggcatatttgaaaggaaaaacaggactatgtcagaggctgctatggtcatgcttcatgccanagaagcttcctatattctctgggctgaagccatgaacacagcatgctaca

SEQ ID NO: 188083 - DNA, 454 bp, Glycine max
  unsure (1)..(454): unsure at all n locations
cccggatccttaagtcacctgcggcatgcagcncagtctgcaacaattattttttcctgtgtaaaaacncaacctctgtggtgggaattcctatcctgggtgaaggaacacagaaccatctcattgtataccaatggataagtttgtccaacatgctcctactgtatgaacacatgctgttggtagaagatggaaaatctggtggctggcagccacaaactcaatctggaaagtcaggaatgatataatttttcaaaatcaatcctttgatatctctaaattggtagacaccactcttttacttatgtggacctggctaaaagggtgggaaaaggacttcactgtctcttttacatagtggtcctcagccatgtctttagtatttatttaacactattaggaacggctggncttatatgcttgattttagtgggagcctatatggctattttct

SEQ ID NO: 188084 - DNA, 367 bp, Glycine max
atatccacacagcgacattcactacactatttgaacgaaagtgcttatactgtctcagatatgttagactacgccttgatcttaatcaaatttcactctgccatggcgtaacaggtacaatcatattagctttagaacagaacattacatccactagaaaattccccatgatattatatataattgaacttgaaactattggcaaccgtccctcctccaaaaatattgaatattcatatcattattgaactatgaatgtcgatgtcataagtttaacatcggaatattatatcaatattatgtaatgttagtctattgtaatctcttatcaatagacctctcatggcttaacatcctataatcctca

SEQ ID NO: 188085 - DNA, 433 bp, Glycine max
  unsure (1)..(433): unsure at all n locations
agcttaccttagtagttgctcgtattcgtatatctttagttgagacaaaagaaaaagaatgtttataaagaaaatgaatattcaataagctttaatctgaaggatatagccaaatgggcagaaattgattattcacagcatactctagctagcatgatttttaaatgggtatgattcataatcattcaaacacaatgtagatagaaccaacaaaagtgtttcacgatctgtgaattttgtatacagccaacaacagctgctagaaatctctgtctgtcctagtattaggcctcgccagattatttgtctgatggctaatatttaccagagccagcttgatggctntaaatcaccccttttcacttgcgaatatttatttggcttctttcatataattaatgtgcacatattatggccgagtttcatataaagc

SEQ ID NO: 188086 - DNA, 449 bp, Glycine max
tgagtgtgtctagtaggaggaatctttctttttccatcctttctcttccatcagtttctaaaccccttttcaagtgtaagatcccttgtggctatgagaggctaaacccttacttagggcctgacagacctaaaaatccaaaagatgtattgtacacttcatatttatcaatgcaaacaggtattttctttcctattatcctttcttacttttaatttcatgcatcattcatccttacatcatctttgggggttaggtgttcgacagagggtaatccttaatagaaaaacaagaaaggtttgcatacatctgttttacgaattagtcgctcgacagaggtagggaatttctaataaaactaaaaggaatgagtatcttaataaaattattgctagacatagagtgatttcattaacaaagcacacatctagaattagaactttatacat

SEQ ID NO: 188087 - DNA, 421 bp, Glycine max
agcgagagtaatgatattagttatttttattacaccagctaaacgtatgtattcttattcctttctatcgcaacacgagatatataaataaaaatagttactagatatatagttaaaaatatttaatttcatcaatatcaagcattatgtttagttttatttataagatctaattgtttaaacttgtttgtttgtttacataatacctaattcatattatgtcacgcattaattatttttagactaaaaatactcctaattaaataagaagaaagttatattaacatacatttagaaaagacataagcattaatgataatagtgattctgaaagaatatataaatttaggataaatttattggtatcaactaaaataactacttttattaaatctgatgaattacggaaatgagttatatt

SEQ ID NO: 188088 - DNA, 432 bp, Glycine max
aatctagaaacaccatttatgccgtcttctgttggatatacaggagagttgcttaaatgtaagaggtgaatttattgcaattggggttagagtaaacatgtgcatggatccttataggatcaaattggggttaattttgatgtgttttatacgtcttaattattcctgtacactgattcctatgaatttttcatgtttgacgggtcaattgaagcactgatgcacactatatggtttaattgaaaattataaatatgaaaattcttgattcttgcatgttttcttgaaattgatcgaaggctttgttccccatgatatgatcacatgttttgtgctattctctttgaatatggggtgcttagatgtttgaattgtgcatcttttgattcatgacatgaatgtatgtaacatagcatgaccgcgctcgatgag

SEQ ID NO: 188089 - DNA, 365 bp, Glycine max
  unsure (1)..(365): unsure at all n locations
agcagatagagaacgatattttcctctgtttcttgagcgctngaagaagaaatcaacgtatgcatgtatctactatatgctatacaacaaggattattgattgctacatatcctagtagacctctaatataatattctttgcgcgtaacatagatgcttatagctctatttctccaaagcatttgtaaaaattatgaagaggtccgttgacaccaaaagatacggcaccttgtactagcaagtcttggttgtaaacggaaaacttacacttacttggctggatctcatatttatgggggaaactcaagaatggaaccctttaccgcctctattccatgtgatcacaaagaaaccctgcttacata

SEQ ID NO: 188090 - DNA, 388 bp, Glycine max
tatcaatatacacacatacacattcactctcacccatacaatatatctcatctatctctatctcgataaataagaaaacaccattactgctcgagcatctcttaaaaatattctaccattctgcatcagagagcgctcatatatgtattcaccatatataatcatcacgatgactgatctcctatgcctttcgcatacttatacattatccgctgaataaatgctccctcgattgcccatattcatcatttagacctggtcgagctgtactactaaacttcccacctactattcgccagccatttctagacttactcccactgtactctcgtctgacacaacacttcatcacacactgttgacaaattgcccttctaacaacacatac

SEQ ID NO: 188091 - DNA, 241 bp, Glycine max
cgagcgggcgccaagcgcaacactcccgcgataagcacgaggaagactctggaagaagaagagccgtatacgtgcgccaagcgcaccgccatgagacatccgccaagcgcaaaaggcacgcgccaagccaaaatacactaacgggcgccaagcgcgccacaagtgcgccaagcgcacgagcatgaacaaggccacccattcaagcccgaaatcagaaattagaacgggagaccggaccggg

SEQ ID NO: 188092 - DNA, 435 bp, Glycine max
  unsure (1)..(435): unsure at all n locations
agctntacagcagattgtagtaatgaccttttttttataattaaaataacttaatgccattaacctagggaattaaaaaaaacttaatggctgagtgtaactgaaattgtggcatccaaaagtcacccccaacagccaacaagtcagccaccatttggtctcccaaaaggctgatgcctaagttgccaattgggcccttattacaacttgaactaaacctaactaaagcccttttaattgattaacccaaaacatatttttggtcagccaactatacaaggattgggccattatttagacaaactaaacactctaaaaattgagacaaagtggtgtcatttagtcctcctccatttgggccatgatacaactcacaaccttggacttttctccttgaaacttgngcttgtattcaaatagtatggacaacacttg

SEQ ID NO: 188093 - DNA, 443 bp, Glycine max
  unsure (1)..(443): unsure at all n locations
agcttggacgaatcataaaatagtctctatatttctatttcaagacatcattgaagactgcaaaattntgtgttgaggaacccgaggtttcaaacttcattntgtaaaaaagacaaggtaatagagtggcccacaatttggcccaactagctttttctcatcacaatcatgtttggagtaagcaaatgcaacctcatattgatgctcttatcctatctaatgtaaatatggattgtttggttgaatcaaattcagtctttgcatataaaacaacatattatgaaaatcaaagaaatattgaatggacttatacggatgttttgagaagatctaaagcctagaagcactatagttttgagccttttttttatcttatttcaattatgtcattatntttttttaaaggagcctcgttatgattgaatttgaaatggaaaatgttt

SEQ ID NO: 188094 - DNA, 469 bp, Glycine max
  unsure (1)..(469): unsure at all n locations
gtaaacatgaaggaaaatgaagagtccagcacactacacatttgtatcactcgcaaatgtcaatgtagtgtaacacatgcatgcanacgaacataaaggccataacgaacacatgcatgcaaacctgctaaaaataaacaaaatataaacagttgtaagcatcataacgaacagaaaggcataaacagtagcaatgtaaatcataatcaggcaaagctcacgcatgttttcaacacttcagtccaaaggaaactgaaaaaggtaaactgacaatgaacacataaccgaaaaaataagcaaatgcaacacataccagaagttcacaaagcaagcgcaaaggagagaaatagtgaacggaatgagcacagaaaatgcgaaaagaagatatgggaaaaaaatggacagcatagaatggaagaagcaaaaaggggcatgacaaacatagacaaatggacaacacacgtggact

SEQ ID NO: 188095 - DNA, 441 bp, Glycine max
agcttatcatagggtgagatgtgatagaattattgtgttaaaccacctaatacagtcgggtgcataacttattatctcttaaaaattacaccaaaaatgatttctgattatttgagagtgtaataacttttacagaaaaactgcatctcgattaaactcacaaaatccaacagctaaaaacaggaatgtagcagagtcaattcatcaaacacttggtgtgcgagaacctgaacgattacggcgaaggcgcggcttcacccgttggcgagggacagcggcacgatggccaccgacatgacgacacgatcggcgttgcatatagcgagagcaagagccagcatggccaccactttgactctctcggacgtgatgaactcatcaaaactcgacgactggtgttgctggctcttctctggacccgaattgatgtgagcgtctttg

SEQ ID NO: 188096 - DNA, 455 bp, Glycine max
  unsure (1)..(455): unsure at all n locations
ctgcatttatcagtgcattaacaacacactattatcaagaactatttttggtatcaatnnttagcattattcacaaaacaaaagttatgaaaaactcatcacatacacaaggatgaatgaagctacaatcttcattgaaatactctcaagcttacactaaatacatggacgcacacaaactatacactaacattggctgatatataaaacactatataacatggacacacaataagtgatccctaatgacagagagttaacaaacatttacttcaaataattctcaagactgtttctcattcatgacaatcaaaacctccccaccatgggccaaggttgaatccaagaactccctaactttatcagtatcaaataaaggttgatgggcagtaatgtcactgttcaatgtataccaatacccatcaatctttctcaatgaatccagtgcctacttc

SEQ ID NO: 188097 - DNA, 306 bp, Glycine max
  unsure (1)..(306): unsure at all n locations
agcggctcgatatattatgcgccttaatcggacctccgagngaaaagctatgaccatatgaattactcaagagctttcattgttcaatttcgagcgtctcgatatcttatctgcctgaatctgaccttcgagtgaaaagtgatgaccatttgaatttctcgaaagcttacgttgttcaattacgagcgtgtcgatatcttatgcgcctgaatcggacctcggagagaaagtgatgaccatttgaataactcatgagcttccattgttcaattacgagcgtgtcatatataatgtgcctgaatcgga

SEQ ID NO: 188098 - DNA, 453 bp, Glycine max
  unsure (1)..(453): unsure at all n locations
tctntgaganaacctccttgagaagcgagtgtctatctctttcacccctctcataactaagctcacctgcttgagaagcttccttatgaagattcctaaagaagctagagcttanctacacatacctctctaatagctaagctcacctccttgagatgagaagctagaacttagctacacacccctaataatagctaagctcacccccatgacataaaacatgagaatacaaaataaaaagtccttactacaaagactactcaaaatgccccgaaatacaaggctaaaaccctatactactagaatggccaaaatacaaggcccaaccgaaggaaaaacctattctaataattacaaagataagcgggctcatacttatgccatgggctcgaaatctaccctaaggctcatgagaacactagggccttcccttggatctctagcccaatctac

SEQ ID NO: 188099 - DNA, 436 bp, Glycine max
  unsure (1)..(436): unsure at all n locations
ctgcagcttcacaagctgtcgtgcatcttatttctgtgttgttntcaataaatatccatgcatggttgaagtgaaaaaaaagccagcagccttaatacaccagagaatgcacagatgaagaaggagaagagggaatgtggagccgaggcatcgctaagttatgaccgcggatcacttccttcatttctcttgttagttttgtgttctgcgcaatgatcgattagttttccttaaggattagatgtaatctatgtatccttatgtatcccttttgatattatatatgtattaatattttctactcattattggtaatttcattctactcgtaatgcttgattctatttgatcactagtgtcatgaaaatagatttaagtgagactccgaagtcatcttagaatttgaactaaatgatattactctctacattatggt

SEQ ID NO: 188100 - DNA, 385 bp, Glycine max
ctgaacccaaaacaaaccaaggctcaatcatattctactctcactctctattctgctatttgagtctatttgcaataggccacttttataggatacacctctattttaataactatagtctcttgggcagatttttgttctgttgacttccatggacccaactacttgtcctatttctctaggcacataattatacatatcaaatcatgtctaattattatactaacttaaataattagactaataattttaaataaattacatcaacatgctaatttaattaatttcaaacatcacactaaaaaataccaagataagtaattcactcaaataataatccaattgaagcttgaaatatttaatctccacgtacaaaatcatttca

SEQ ID NO: 188101 - DNA, 429 bp, Glycine max
  unsure (1)..(429): unsure at all n locations
agctntntgagtaactagataagttttctttatttatataggctaccatcaacggtgcaaagtcaatgaagggcacaccacattggatgtctcctgaagttattttacagacaggacatacaatgtaagtatgtgactaacagtaataaaaattgatcataatggcacaatcaagtatttttgaaggtttatttgtcataataaatgtttctataaaaatatttttgtatgatatggagagaaaggaaagatttatctgttgtgacatggagttatagggaaattctcatattgtacaattcatattgaggtgcactgttttgtcacaggaattacaaactttaattcagttatcacgaaactagaaaggttatcaatttttaagagataagcttgcattntttacttcattgaataattgctgaacct

SEQ ID NO: 188102 - DNA, 445 bp, Glycine max
tcaccaatctccccagcgtgattactcatgcctcatttgaattcttcacttactcggagtaattggttaatagtgagagtgatgctattcaaaactttgaaaattgatggcctgattggagcttttctccaaaagtccaaactccaaagagattctgcttcgtataaaaagaaaactaacacaattatgaccctttctattactccattcaccacccaatagtcaagcacatgcttgccaactctgcttagcgatttgggtctccataaattgttcaaaagccagaagcaactcaagcaagtactatctgctaacaacaggacaagtgtttgtttctcaccatatgataaagtcccacctctaagagacgggccacgattatttgccttttcattattttagtgggaatagaaacaataatctttcattctcatgattccattca

SEQ ID NO: 188103 - DNA, 357 bp, Glycine max
  unsure (1)..(357): unsure at all n locations
tcatatactcttcctgcaaggttcaactatctactttgagaagttagctcattaccatttctaatctaggctaagaatctaagatcattatttacaaagggactgtgatttacttcgatattntaatatcggtgatatagcgaactacaatcccttttgcttttacacttttacttgagtctctttctcccccaactaagctagttataagagtttggatcatggactcttccactattntctcctgtgaagctttctatcaatttcatacacacgcctaacctaaggttctacttgattaatccattttaaaactcaaacatctctttcaaagcccaattcttgggtaggacagtg

SEQ ID NO: 188104 - DNA, 453 bp, Glycine max
tgaacgatattgtgacattgtacaaagcagtatttgactgtttaaaccctcacagaacgaccgactcaataaatagaacacgtgacatttattgaagttgtccacttttatataactaaacatgaaggaactatataacgataatgaatatataacataaaaactaaaatgggcaatttcgattattagagacttaaagacaaaaactttaatatattaagaataaaactatatgtaaccatctttttaattaagaacagaaactttatctttctataatactcctaaaaaaacatgtgagtacattacactcacttattggctcagaaagaatattttaattaataagtcgctagtacaaatttctctctcttcatttctatctatatttaataaagtgtatgttattatttctgcatatttcatatctatggaccgattatgctgatacat

SEQ ID NO: 188105 - DNA, 414 bp, Glycine max
agcttgtctcagcgtctatgcgagatagttttcacatgttagctatcatcgccaagtaccaagaagagttgggtctagccacggcccacgagcatagaatcgcggatgagtatgcccaagtatatgcggaaaaagaggctagaggaagggtgatcgactctttacaccaagaggcaaccatgtggatggatcggtttgctcttaccttgaacgggagtcaagaacttccccgattgttagccaaggccaaggcgatggcagacacctactccgcccccgaagagattcatgggcttctcggctattgtcagcatatgatagacttaatggcccacataattagaaatcgttaggaaacttgtatggtctctcagaccctgactagatatgattcctctttttgaaaaaatgagt

SEQ ID NO: 188106 - DNA, 470 bp, Glycine max
gacactatgaaactaagcttatagaaccaattgccttaatcatttcctatattgaatgtgaattacgacgcatcaacaagaatcaagacatggctattgtgcaagcaatcaatggggcaaaacacaccaaatgattataatgatggatggctcaaattctcacaaaggttaaatcatcactttcaaattgagctttcaaaactatcatgacatgtagagaagaatcaaggatttcaagtcacaaaatgtcaagaacttttattttcaaaacaattacccatttcttgaacatatcctataattcaaggaaaaacatgcaaagtcgtacgtgcacacgaaatcgacccaaaatattaaactgaaaattcgacgatactaacaacattaacaaattaacacaactaacaaattaacataaccaacataactagcaaaaccaatgaacactctcccccatacttaacaacaca

SEQ ID NO: 188107 - DNA, 324 bp, Glycine max
  unsure (1)..(324): unsure at all n locations
agctcgagacatcgatttatattttgtaatttgggancncactgacgaactagaatattcaaagcggtaaagtaattcccaatggctgacatgatccatagacccgcaattgtctgaattttcaatgacatgatgttatctaacaattattaagaaaataatctgacaagaaatgtgagagtaattgaaaatggtttctcaataccacaaaaaatagtgtgaggtctttcccagttgaaatgtcataaaatctcctcaagaacgagttgaatttttggaacaagaatctaaaggtgggttcggggatttgaaaatcatatattt

SEQ ID NO: 188108 - DNA, 417 bp, Glycine max
  unsure (1)..(417): unsure at all n locations
gtgtaataaacaatccccatcattgtttcttaaccatgcctttgctattcgctatacaactgtcatcataatttaaacaccacatttattttctatcatcatgtaagattgcctttttctcgtgattcgtaaacctcaatttattgataattgatgcccaagaggcacaatatgcataagctatgctactttgttaccataattaagcccttcatttttgtaaatattactacacgggtacgtttgttattttttttatgaatcttacatggtctcgctcaatggatccaataaaatttcttcagtgggacaaacaatcatattcttttttcagatgacgaaattctaaatttcataatatacataattggatgataaataatcancaatacttatgtcaactcttataaattacaa

SEQ ID NO: 188109 - DNA, 424 bp, Glycine max
agctgttgaaatatactactcatatatgatcattgacttgtttaaagattctgaaagagaatcttataaaacctttttaagagtagatatttataaagaaaaattagtatgagaccaagtaaaaatgataaggtgagacaagtcaaaataaatatctactttaataagcatcatcccaacatgtttgggggaacaaaactagatagcaagaatttttcttggtatgaacttataagctctaagagaaaaaaaaaaaagcaaaaacaaaaaaaatgtgagaaaaagtgagtcttaaaaaaactttttcaagagttgatataaaagaaagggcaacatgcacttttggtccccactttagctccactctcgcatttggtcccccgggaatttaatgtacaaatatgctccccctgtatataaaatt

SEQ ID NO: 188110 - DNA, 441 bp, Glycine max
tcgatataattgtgattatgatgaaagacaagtgctttctattcacctaaatgaagagcaacctaccgcacgtgaatgagcaaagtaataccctatcagcacccaccttctcttcaaagattcctttgtgttcacacacacacacatgagaactttttatgtcttgatattcctaacttggcccttttcacacctgaaaggctaaaacccccaacttccaccttcatatacctgctaccttggagataaactctagccacacactctttgcatattatttatggtctgaattaatttgtgtataagacttgtataaatagtaactaattggcatcttatgaatgaatgtgtttacacatataagatttacgtatgtaccctctcagagatatatgttggcatgctcatatcgaacatgtgtgactaggtcttctagttgat

SEQ ID NO: 188111 - DNA, 462 bp, Glycine max
  unsure (1)..(462): unsure at all n locations
ggatccttaagtcacctgcggcatgcaagcttccctccattccattcagtattatttggtgtgattntcaaacgttaaaaaccagaatacacaatacccttaagctaaccgacaaacaatttttggatgaaatttactaccgacagcctttcacgtatgcaggtaatcaatttcggtttcaatgtatgcaactgaaagatgatgctgatgttaacacaatgttattgtgtaatcatgaattttcgtttgttggtccgattgagttattatgtagcattgttagaaccccagatggtattttaaacttacttgaaactactatgacccctactcatgatgccctgttatattacaatgggaggtggaacatgtcacgccaaaatgagtttgttggttactcgttcacaggaaaaaatcccaaaaactttgacattcccatcggatgtaccatggatgaactaa

SEQ ID NO: 188112 - DNA, 482 bp, Glycine max
  unsure (1)..(482): unsure at all n locations
gacacttaaatctcagcttccttagcctctttncatagactgtatgacattagagcattcttnatgtttgtcatattatntttaattgtgtatatgcctttggtttctggtcagtggtcatgaagttgttgcttgagagttgttagtttaagacatctaatctacaatgtccaatgtaatttgtagacacttttcattttcttgtttgcatcgtgatcacgacattcgttgttggacattatagtcatcatcatcacaggtacaaatttttttcataaagttttgatgctcttttttgttaccaatgcttttataacttgttaactgtgattaataagtattgctttatatacaagttatgttcatgatgagtaaaccttagattcccatttgagattgaatacaataattcttgcagaaaatttgcattaaccattgtattgaatattgaattgtcggtttggatagcttgcgaagagtca

SEQ ID NO: 188113 - DNA, 341 bp, Glycine max
cacatatataccctatagggctatgtgtaacgacctgtgtgattttattccaccgtatctgagtcgagaatgatttcatcacatacaacagattattttcaattctccctgaatgcataattttcttaagccactgacaagtatatactgcgagtaatactattatctagtctactcgactggacgacactcctaatctttgacctatgatcaccaatacatctaactaaaaattacttttctcattcttcttcctctttagtaccactacatagaaagaactccctgcattctcaatgcttacgcggttctatagtcaaagtaccatgtcatatatttca

SEQ ID NO: 188114 - DNA, 447 bp, Glycine max
  unsure (1)..(447): unsure at all n locations
cttaagcaccgcggctgcagctcgaaagggaaggaatatcattgtttttgcatgatcctgaaggacgagctaaaggcttaccttatgtcgaaaagaaatttgtcccaacagttaagcgagactgaagggaatatgtgggccgtcatcgatgagtgcaaagagaagctaaatctagcggcgactcacgagcaaaggctagaggatgagtacgccaagatatcagcagaaagcgaagcaagggagagggtaattgattcatggcaccaagaggcaacaatgtggacggaccgatttgctcttactttgaacaggagtcaagaacttccccgattgctagccaaggccaaagcaatggcggacacctactccgcccccaagaagatccacggacttctcagctattgtcaacatatgatagacttaatggaccatatgnatagaaaccgc

SEQ ID NO: 188115 - DNA, 452 bp, Glycine max
tggccatcgctcctcgaaattgtgctaggcatcgcacctctattacagtgtccacattcatcaacaacgccctggccaaccactacttcttgaaaacacccactcaaaaaatctgctcacccacttccatatggagcatggcgttagcctcatactaatgtgaatgtcagctcatgaatggatgaatgatgcgagcggtttataataccataaaaatcacctataattctctgacattggaacaattgaactacaggctatcgctgacaattaaagcattgaggactacatatctgtccaaaattgaacgccataagaacctctttactcactttgaggtgaatatggacattgactcagcatcgaaccaattgcataaatacacaattgcgacacataagatactctcattggagaatctccattcgcaaagggctaaggatgtctatacc

SEQ ID NO: 188116 - DNA, 412 bp, Glycine max
agcttggaactaaacttcttttctctaccatcttttcattcacaaacagaaggggaaacaaaggtagtgaataggtctttatccacccttttaaggggtcttctgcaaggaaaccataagtcttggaatgagtatcttcctcatgtagaatttgcccacaacatgggggttcatagaaccaccaagcaatccccttttaaggttgtctatgggttcaatcccctaacaccattagacctcattcccctcccactagacacttcttttatacataaagaaggggaatctaggtcagagtttgtaaagaagttgcatgagagggttaagaaccaaataatgaaccaaacaaaggtgtattcaacttaaggcaatagaggaagaaaagagctatttcttaatgagggtcactggg

SEQ ID NO: 188117 - DNA, 462 bp, Glycine max
  unsure (1)..(462): unsure at all n locations
gcacagcaacacanaatctaggtgtccaacaccgcgttcattcaatgtttattctaggttagaaaggggaaatttagaatgaggtgaatntgaggcaaactctcatcttacaccagtccataacgtcaatctaaacttgcccaaactggaattacacctaaaattccaccagatcaaaatatgactcttcaacacccaatattgccctagaaatggctcttgggtcactctggtcatttattattctctctagctcagcctaacctttctcacatgttctaaatgacatttcaagctagtattgactcactctaacctccatttaccacagaatttcgacttagccttccaactctcaaagtctcactctttatccactcataacatcacattctcactatctaaccttgagttagttctacacttcgtctctaacagatttccattagctaatttaacata

SEQ ID NO: 188118 - DNA, 276 bp, Glycine max
acaaccgaaaaaatcctcagaaacaaggcacccgaacaacagcgactataggaaatgtaattctcgaaaccactcattggcaagcgacaaccaccaaggtgtcagcgatcacacatcaacagatgcgacactccatcttgaacactgaaaatcaaaacgtatagaagctccggcaaccgaccacaagaatcgtagaaccgaccacacaagaggaaaacactttaaaactggcgacacacaacgccgaagaccagaaatatgaaatcccaacacacc

SEQ ID NO: 188119 - DNA, 269 bp, Glycine max
gcaatcaaataatacaactcatcgagtggcacttctatttacttcatttttttcgccctacatgagatcgcacagtcgcccctatcatctgtacccccacacaactcatgacgttaaggatctccacaacatctacaagagtgagtaattcatttcggttaaattaaaacaagacatttaatatcatttatctgaatgaaaaaaactttcttaccgtcagtaggtaatcaccactctggcttaaaatcactatattaatcaaccacttt

SEQ ID NO: 188120 - DNA, 427 bp, Glycine max
ctgcagcttactctgtgtgtatacatattttctccagagtagcataaatctaccagtctaaacacctattagacaaaaacttgaatgatattaaaattctaattattcacacaaaaagaagcaataacagaggggaaattcaacaattttatatgacttaatcacaaaatatacctatgtacaacagttatcaaaccaccccaaatttaaagctttgtttgtcctcaagaaaaagtaaactaactattaaattggatcgatgaaaaagttcaaaatgtaccaaccacaatacatgaaataactacataactgataactgctatatataggtatattttgggaataaattatatacgaatatgtaatttttctctcctatttctttcttgttgcgcaaatatgtgttattttaacaacatttaatgtt

SEQ ID NO: 188121 - DNA, 468 bp, Glycine max
aaactcaagcttggcgctccaataagttcttgatatcattgacagtcctccctatcaactgagaagctataattgaccacctactatgtcataaacaaaaattgatttacaaatgaatgcttcatttacccaacaacatctatgagtactccatgttgtggttagatctaaagttggcatccaggttgaagaccagttcaccacatctagatagattctagatgactacaaagttttctcaaagggtcaaatcctttgttttgttttgtgtgtgtgtgtgtgtgtgtagcattatttcctattttactttttcttttttacccctcttagataaatggacagactattgacattccacatgagtgttgtatttctgattgaagttaaaagaaggcaaaaaaagaatgtccttatctttgaatgtaaaactaacatgcctcttctttaaatacgtgtgcagatacatgt

SEQ ID NO: 188122 - DNA, 342 bp, Glycine max
agcacataattagtgtaatgctaatgtgactacattttctagcatattatcctattgcaatgccttgtatggcttcacaccacccattctcattcgacaagccaaaagcacatatcacaagtcctggattaagtatgaagtccataatacatataaaatctaaacctaaagtagtggcctgaatttgctacaccaactctttctcatatcaggatatcattatcaaaaactgatatccgatcgtctgaagataacatattataatgtacagactaattagaaccaactctaatgatatttcattctgtctacgtgaagaatggctccattatgcttgatgct

SEQ ID NO: 188123 - DNA, 336 bp, Glycine max
  unsure (1)..(336): unsure at all n locations
cggcaacttatcagacctatgcaagacgagtttaatgctttatttctngaacatatcgcttctgttctactatttcaactaatcgatactaaccactatttgtaaacatatcgctgatgactacatatcacattctcatcgcgttggcggagcgatgcatgtctgaccctnntgaaactagcgatgaagacaactttagttgcgatatagacaaagatctctgaccctctttgttgctatctgaactcgtgagtctggtgtatagtgcatgctttgtcacatatcataatcccatcctttaatgattagcacggctgaagaacactttcaaattcg

SEQ ID NO: 188124 - DNA, 432 bp, Glycine max
agcttcatacaggcggcgtaaacgccggatgtggatgtattcgcgccccattgtccaccagaacccgcagaaaccgggaaactggaatcgccgaggtgaaccgcaacctgctccagcggtacgccaagcatttccgctgccgtctgggccagaatggtgtagctgccggtgccaatgtcggtcatgtccgtttctacggtaacggtgccgttttgttcgaggtgaacccgagcacccgatttttccagcagattattgcgaaagcccgccgcaacaccgtggccgactagccactccccgtcgcgcacctgtccgggtgtggcgttgcgctgcttccagccaaatttatccgctccggtgcgcaagcactcgattagctgacggcgagagaagcagcgcgttcggtcggcggtgtcaacctgagtgtcattc

SEQ ID NO: 188125 - DNA, 441 bp, Glycine max
  unsure (1)..(441): unsure at all n locations
taccctctggacctcanatcagatgaatgactggtgccgtttctatctggcaanaacgctgaatgttcccgtggagaatgtgcgtattatctccccgtatatcggcggagggtttggcggcaagctgttcctgagaagcgatgcgctgctggcggccctcgccgcccgagcggtgaaacgtccggataaagtgatgctcccccgcccctctattcccaataacaccacgcaccgccccgccacccttcagcacttgcgtatcggtgccgaccagagcgggaaaatcaccgctatctcacatgaaagctggtctggaaacctgccctgcggcacgccggaaacggcggtacagcaaagcgaattactctacgccggggcgaatcgtcataccggcctgcggctcgccacgctggatttgccggaagggaacgccatgcgtgc

SEQ ID NO: 188126 - DNA, 437 bp, Glycine max
  unsure (1)..(437): unsure at all n locations
gcttctcttgcccaggtactttttgtttatatcctttcattatctaaaacatgtgttatcctgtataatcaataattctaacaagaatgaataatgatatgttaattttagctcaggccactattctggtggcaacaacaatgatactgcttctcgtcttccatttgatgcaggatttgaggtatagatatatccccatgtgtagatatcttgatatgaagcctaccacctgatgcagaagacctttacttacacgcgtacatgtttttaatgtttatattttacgctgtagggataattgcagcagttgggggttctgtcactgacttgaaaattggtatgccttgtgcattcatgacttttggaggctatgctgaattcataaatgggggcagcgcttaacataatgtngatactttctttcatattaatggctt

SEQ ID NO: 188127 - DNA, 387 bp, Glycine max
acctatgaaactaagcttgctagcctacattctatggcttagcgagttcatgagtttctataagtttcgcgatgaactcgctaagcctgcatctatgcgcttaacgaattcatacgatctgggttttcctatgcctttctgggtttgtagggatgaattcgctaagccggcatgtcgcgcttagcgagttcatgagtttaagtttgatactcttactcttctgagtttttgtttcatgaatctttgttcttcgccatgtagcaaagctgagtttttcccataatctgttgctcgctaagcgcctgtacgcgctaagcgagcatcttgatttctctatttgttttctatacttgggcgtagtgctatttgcatgcgtcacccacgtgt

SEQ ID NO: 188128 - DNA, 392 bp, Glycine max
ttaaaactcgaagtaaaacgttcaattactgcatgttatctattaccatgtgtaatcgactacacagtgcaaattttgaattcaaattttaatagctgttgcaaatcatctttggccactgttcatcgattacattctctggtaattgatctaccagatagttaatatctcgaaaaagactttttaacttaaatttgctggccaaacctttcgctacttcaattatgaatttcctttctatttaatatgcccttcctaagactctagagactgtcttgatcatccatcttgaatatctttaattccttatgcttgaataaagcttagaataacatgtgagtctttgggataatctatactttcagctcgaatctttgtctacacaatggaga

SEQ ID NO: 188129 - DNA, 444 bp, Glycine max
agcttggttccaactgctctgttcaggctctcctataatcaagaggtaaacctaggatctctatcagacactatgctagatggcacaccatgtaacctgacaatctcactaatatacagggaggtcaacttctccaaggaaaatatgatattaatgggaataaagtgagaagacttggtcaacctgtcaacaataacccagatagaatcaaaacctttgggggttctaggtagtcctacgacaaaatccatggaaatactgtcccatttccactagggtatctccaagggttgtaacatcccggaaggtctctggtgttctatcttagccttctgacagactaaacatgcatacaaaaactcactaacctctctcttcatgttgggccaccaaaacatcatcttcaaatcctgatacatattggtagcaccaggatgtatgctc

SEQ ID NO: 188130 - DNA, 453 bp, Glycine max
  unsure (1)..(453): unsure at all n locations
cccatcacatgtggtactaggtgtttgtcgggcgatggtgcacaacaagttttccacatccacaaatcgcgcataagcccaccatccnctgttgcccacctccaactgagctcacgtactcccacgtagcccatatcctcgtttctctcaacaccgggtccccatcaatcctcccaagcttccccaacatccaggtaattcaacattcaaacagcacaaactatcacagccaagaaaatagggcaaaggcagaaaactctgcctaaaacaccaaccaaaatcacagcttttctcacttaaagaccccagtaacaattccttcgttccagttcgttaaccgttggatcgactcgaaaattttactggaagtctctagtacataagcctacattttgaccgttgggatctactagcagacatccagaactcattctgcactactctttccacaac

SEQ ID NO: 188131 - DNA, 424 bp, Glycine max
  unsure (1)..(424): unsure at all n locations
agctcgtaacatggtcgggttaacaaggttatcttggttnntctcagattcaagcacttaggttctaggagatcattcacccattccccatctacttaaagaaccactttttctttgacctcgcaacctttattgacatgccacaattaacagcacacataggtttttctttttatatatatttgcttttaactcatatttccatattttttaaacaataatatgtactacaaaagaatgtagctctggttctctgtgtgcctgttactcacatccctataatagaatttacccaaaacgctcccccaaatttggaacaaatttttcttgacccataataatgcttttctatagcctaagataaggtgcacaaggatagcatatgcatttagctcagggttcaatgacacattcattcacattt

SEQ ID NO: 188132 - DNA, 382 bp, Glycine max
acattgtgtatgacttgtccttgcgactcatttacggtaatcgcaatactcagtttcataggaacttgctttgctataatcaccaatgaaagtcctgcactcttcgttgtcttacgtttaaatctaggtatgaaagctcttcttacacatggtggcctgttacgatttcacatccaatatattcatgaacaatccacaacataattaccttgtgtcgttacatacgccaaacttaagggccatgtttcactacaacattaatcgggcacctttttaaccttagaatatgcggtggcaaaactcccagcacacatgagttcagtattcttgctggataagtcggtgtgtctccacacctatcaaataatagagacatgctctc

SEQ ID NO: 188133 - DNA, 439 bp, Glycine max
  unsure (1)..(439): unsure at all n locations
agcattagnaattgaattaagacgaacaataacttctggttatcgattaccatatatgtgtaatcgatgacacattgcaaattttgaattcaaattataatagctgttgtaaatcattattggccactggtaatcgattacatcctctggtaatcgattaccagagagtaaatctcttgaaaaagactttttaacttaaatttcttggccaaaccttttgctacttcaattaggaattcccttcctatttaatatacccttcctaagactctagagactgtcttgatcatccatcttgaatatctttaatttcttatgtgatcctttggcatcatcaaaacattcagcttgatcctttgtctacaattttctatttaccacaagaataatttaactggtaatactaatcataccttaatttatagagatgacttagatg

SEQ ID NO: 188134 - DNA, 448 bp, Glycine max
  unsure (1)..(448): unsure at all n locations
agaagatgagtggagggagggagagagaggtgtactattatttcagatagagaagaggcagaatgaggtatgaactctgaagtctaatttctcaaaatcaaagttgaaaaaatgcacacacaatgccgttatntatagcgtaagtgtcacacaaaattggagggaaattcgaatttctattcagattcacttgaatgtgaatttgaatttaaatttgcggaaccaaatttggagcccaaatttcactaattatgattagtgaattttagctatgggttatcccactaatccaagatcaaatccaagattctccactaagtgtacttaggtgtcatgaggcatgtcaagcatgaacgacatgcacaaagtacgactatttgatgtgacaatagggtgtagcacgcaaatgctcacctcccccttacgctgttctgaaattaattggatt

SEQ ID NO: 188135 - DNA, 443 bp, Glycine max
  unsure (1)..(443): unsure at all n locations
agcttgcaaaatggaagcaaagatgtctttctattgtggcagaataactctcattaattcggacttaacaactttacccatctatttgctatcttttttaggaaccctaaaaaagtggtgcaaaagattgtctctattcaaacaaattttctatggggaggtcaccttgaggccaacaagatcccttgggtgaagtgggacacagttttccttcctaaaatagtggttataggtgaaaaccaaatcagcaatcatcctttcaaacacacagtcctaaaatcattaatactaagtaagctcatgttttaaccagtaaccaacaagtcacatgtaccaaacacactcaaagcatgcatggaacatgctctgttgtccacatctgaactcaagataaagactgaatngcanggctcagatgtaccanacacacattaacaacattt

SEQ ID NO: 188136 - DNA, 455 bp, Glycine max
  unsure (1)..(455): unsure at all n locations
ntagtcanacagaataatttgaacatgtcaaagaattgcgcgttgaaaaatcataacaaaactttctgtgattggtttaaagatacaatctttgcagatgagaatgcttcagaaacattaagaaaactagcagatgggcctaaaagaaatgttataacctgtcaaggatacgacataaacaggtattcattttacacaaaagcacaagatgacaaatgtacaatgcagaacaacggggtcaccctaagggctgaatctcaacactttgcaagtgtcaatgacgccaatccctgtgtagcttccatccctctacttgggttcattgatgaaatttgggagcttaattatgtcgaaattacagtatgtgtttccaaatgtaaatgggttgacagcaacaccggtgtgcgcaccgatgatataggatttaccctgttagatctaaagaaacttggtta

SEQ ID NO: 188137 - DNA, 365 bp, Glycine max
  unsure (1)..(365): unsure at all n locations
agcttatatttaataactattttgtttccatgtgccctnggtctattgntcattttcattccacttgtattagtttggatgttctntttttcttatgacatttaaattatatccacttgtgcttcttaaaaggattttaacaatgaattgtcatccttcacgtctcgctctattaattttatttgcacattttctgctggttctcctaactttgttttttaaatggacttttcatattcttagtctgtcaacatcactgagtttctgaagccagctgaaggggaaaggtactactctggtgggcgcggtcggagacatgggcgtggttctataggaggttacagtggaaatgcatacagcaatgt

SEQ ID NO: 188138 - DNA, 412 bp, Glycine max
  unsure (1)..(412): unsure at all n locations
cgtagggttaaagtctcacgaatgtcacgtgctcatgcatcaattgttagtcgcggctataggagacatctngccaaacaaagtcatgttaacgataactcgcctgtgctttttcttccatgctatatgtagcaaagtcattgatccaataatgtatgatgagttggaaaatgaggccgcaattatactgtgccagttggagatatattttccccctgctttctttgacatcatgattcacttgattgtgcatctggtcagagaaatcaaatgttgtggtcctgtatatctacagtggatgtacccggttgagcgatacatgaagatcttaaaagggtatacaaagaatctatatcggccagaagcatttattgttgagaggtacattgaagaagaagccattgatatttgt

SEQ ID NO: 188139 - DNA, 441 bp, Glycine max
  unsure (1)..(441): unsure at all n locations
agctnttatgtgaaaggatgtgactcttatatttgaatttgaatttcaacgttcaaagacacaggtaatcgattaccaaaacattgtaatcgattaaagctttttgaaatcaattggaacgttgtaaattcatttgaaagctttttgaaaaacatttttgctactggaaatcgattacaataatctggtaattgattaccagagagtaaaaactctttggtaaacatgttttgagaaaaatccatgtgatattcagtttttgaaaaaactttttcatacttatcttgattaagtcttttcttgattcttgaattttgagtcttgaatcttgatcttgattcttggaagcttgaaccttgaatcttgattcttgattcttgaaatcaaatttcctcttgcaccttgaagtgttcttgattcaatcttgaacatctggaacat

SEQ ID NO: 188140 - DNA, 444 bp, Glycine max
  unsure (1)..(444): unsure at all n locations
tatgcgcctatntccttacagacgtgcccttgttaagacatttaaccgaaaaacatgcgcccatttacaatcaaggcagcttcgttacctatattatttacacgtacctccaaggtgtatttgttacttacatcacacacattcccttggctaaactcacatacatgcatactcaagcattttggggcaccaaaaattgcacatgtgcacatcttggcatttctaatacctacatacgcaaacttcatgatgaatcttgactatctacacaataaggtgctacatttcatgctcttttttcaagtttttgctacctaaagccgtatgcaaattcaagcantattttctttgctgactaaaatggcattcaaatttaaaattttagtttctatgcctaggacacatgcggtgcagatactctagctctctcgaaaatgaatgcat

SEQ ID NO: 188141 - DNA, 441 bp, Glycine max
  unsure (1)..(441): unsure at all n locations
agctnttcctctggttgttctactatgattttcaagtgttagagagaagtaaaatggattggagccttcatttcactatctttatgcgagggaaatttctctcaccatacacactatttcacaaatcccaatggtgagtatgtgtgaaaaggagttcctaccttggtgtttaaatttaacaatgatccaacggttaaccagtctgagatcacaattttactaggataggtttgtgcatttgcaggaaaaagaaagctttatgcaagggacatttctctcaccaaagagattatttcgccaatcccaacagcggggatgtgcaagaatgagttccaaacctgatttttaaattttatgacgatccaatgattaacgagttcgagaatcatagtttattgggatgtgtttgagtgtatgcgggaaaagaaaggattttgggag

SEQ ID NO: 188142 - DNA, 423 bp, Glycine max
  unsure (1)..(423): unsure at all n locations
tctaaactntatacaagaatgaagctctgataccacttgttatacaagtggcctcagatatcttaagaagggaggttgaattaagatatcacaaacttttcctaattaaaaaaattctatattgattttaacccaaatcccatgattcctttcaaaatgaactcctaaataattatgcaaattaaacttactgaatagaagcaataagcaataaaaagataaaggagtttaatggaagagaaaatgcaaactcagatttatactggttcggccacacctttgtgcctacgtccagtccccaagaaacccgcttgagagtttcactatcttacaaaagccctttacaaattctaaaccatacaaggacaacccttcctttgtgttagattgtttacacaaagaccctagtctttaatccttcta

SEQ ID NO: 188143 - DNA, 398 bp, Glycine max
  unsure (1)..(398): unsure at all n locations
agctngntctggatatgactagtctttcattactatgatgttaaaaaagaatgcgagaaacatttgcaaaagcctcgctttattgccatcggatctcctttccttaggactgtcttaaagatacatattgaacctgagctactgcataaggattctgtccttaaagtggaaagcacacaagatcttattttctataagggtgggaaactanttcttaataatagtgctctggctaaattcatcagcggttacaagaaatatgggaggattggtgaactttcaaaacttttacttattattcaacgggaacttaattcagtggcacggtccaatttgtgttctgatgtaattggcgcttgtattcacttaagatggcttgagtgtgctcatgacaattt

SEQ ID NO: 188144 - DNA, 438 bp, Glycine max
gggccactaatagcacctcagtcttaaatgttgtttctccttgtctagaatctcttgacaacttattaactgcaatcatctgcccattagagagcctaccctgataatggatcttggtcagctatggcaaatattttgcttactggtggcatagcatatttcgaattttgatgatgtgtatctaaattggacagagttacttaccctgtagacaactccaaatccaccttgtccaagtctattagaatcaaagaagctatctgtaccaacttgtatcgtgtcgaagtctaactgtaatgactcggcaattataatttcatcctcaacttcttcttctttaactacacataggaagcaaatttaaactatttagtactgcaaatatgatataacttgattccttcactaactcggatgcttggccagtgattgttgact

SEQ ID NO: 188145 - DNA, 429 bp, Glycine max
  unsure (1)..(429): unsure at all n locations
agctaataaatctatgtatgattttaataatccttacgtcagnggcaccttaagtttcatgggataatttcttcatttggttttgatgaaaaccacatggatcaatgcatataccacaaggtcagtgggagtaaaatatgttttcttgttttatatgtagatgatattttacttgcaaccaatgatcaaggtttgctacatgaggagaaacaatttctctctaagaatttggacatgaatgatatgggtgatgcatcttatgtcatcggcattaagattcatagagatagacctcgaggtattttacgtctatcataggaaacctatattaacanaatcttatagtgattttggatgaacattgttcaccaagtgttgctcccatcgtgaagggtgatagaattaatttgaacccatgctcacaaaatg

SEQ ID NO: 188146 - DNA, 419 bp, Glycine max
gttgatgcataatgcaatacaatacttgcagttgcctgaagtggttttattatggcgctctctcatctggatactatatagctatcgtggactcttatgcattgcttgcttgtctctgggtaagcactactataaaaagcccaatttacgacgcgcattctacatctattgtgcgagcccgttataatttcttgcacggtggcatttttgtaatattaacttcttcatcaacgacggtgctacaaaagcaccgtcgttgaatagtcctttcccgtttttccactgcattctttgggaagcaccgtcgttgactatcccatcatttagtcacatgaaattaagctttccctccctgaacttggtgtgctcactcagttctgaacttcgcgcgcgtcacaacctatccttcttgagctcaa

SEQ ID NO: 188147 - DNA, 408 bp, Glycine max
ccaagcaccgcagctgcagctagggcagacgaacaggtgcattgcctattatctatcaaacaacaccccgggcctggcttaagacgctatataagagctcctacgacgcatcctattatctctaactttgctctttaattacctatctcatacttgtccattttcttgaactatatcctgaatacgcctaagtttatatgctactataggattttaagaaagataatataacaatgaataacaccacttcgcaaaggatttttctgccaaaaaaaaattaaagtacaaaattatctcgcctgcgagagcatgaatgtcgtgaaaaacataagaggggagggatgaaagccttttcaccccattcttccccaaaatcaatacctccaccaagagcttacgggagtcacc

SEQ ID NO: 188148 - DNA, 426 bp, Glycine max
  unsure (1)..(426): unsure at all n locations
gcttgtagaatggctagacatgatacatgtcatggctaggntcggttcaaggataaaatggatgccccacattatttccatgacacaaatgcaaaaatgacgatttggaaattttatgcaaaactggttatgcatgcacctatgcggacactcaaatgtcaaatttttatggtcatgtgatgctatggctcaagattcatttactctattttagtcaacccaacgtgtccaaaatatgttcttttatcaatatgcgcattcatccgagtccattatgggcgtttgggaaaatcttcacagcattcacccttcaggtgtatacacattttttcaaaaactagttatgatcagtgaatattccaaagaaaggtggaggcatctcactcaaaacatggtgggtttcagcttgacaactatttttgtttt

SEQ ID NO: 188149 - DNA, 435 bp, Glycine max
  unsure (1)..(435): unsure at all n locations
tataagaacataattgccttagtcatttccaaatatgcatgtgaattaggacgcatcaacaagaatcaagccaaggctattgtgctagcaatcaatgtggcaaaacacaccaaatgattataatgatggatggctcaaattctcacaaaggtgaaatcatcactttcaaatagagctntcaaaactatcatgacatgtagagaagaatcaaagatttcaagtcacaaaatgtcaagaacttttattttcaaaacaattacccatttcttgaacatatcctataattcaaagaaaaacatgcaaagtcgtacgtgcacacaaaattgacccaaaatattaaactgaaaatccgacgaaactaacaacattaacatattaacacaactaacatattaacaaaaccaacaaaactagcataaccaaagaacactcccc

SEQ ID NO: 188150 - DNA, 208 bp, Glycine max
cgcagacttttattatggctctgtctcttacatcgggactggcacctcacaagcctttaagatagtcctacccggcccctctttaatactctatcttcttcccacttattaacgaatcagctctcttttataattatgcactctcactagcgattcattgacgggggagcttgcaaaagcggcaaaaatataattttgcctataccgg

SEQ ID NO: 188151 - DNA, 377 bp, Glycine max
aacttagacgagagctgctataaattggcacatgcatacatccatttaacttaacagagatgctcacggttctgtctgaaaaaacttctcgtgaagtacttcataaagaagaaaataattggtatgtaaataaatagaacttctattgtaagctacaatcaacataggcacttaagttcgataaagaaatatatctattttttaagcaaaataggcatgcaaagacctcacagtctagacaagcatcccaacaacattgtcacccccgcctaactcaaataggagcgtctctcatctaacttcaccgaatgccgaagtacattagagctttctaaactatgacagaagctcacgacagttaatctcgcatatgcatc

SEQ ID NO: 188152 - DNA, 428 bp, Glycine max
  unsure (1)..(428): unsure at all n locations
agctttntcatgtttagagatttctagatggtgttaggtcctagttctaaagagttttgagagcttttgttgtgcgaagattggcagagaacggagcgtgaagaggaagtcatcttgagagcatgagatgagtctgtgagtgattgtgaggttctagaggtggaggagacatcctcactacttgtatttcttcaatcctctcattttctcttctctttgttgtaaaggaagcttcctagatatggagagctaaatcctctgttggttctttcctttaggtacttgatgtaaatacctgtatatctatttgatgatgatntatgtgttctttgtgctatcagtacgtcattttagtgtgcttttgccttgatcatgtatatgcatgctttgttaggatcattcaataatggaaactggtctgattctta

SEQ ID NO: 188153 - DNA, 419 bp, Glycine max
  unsure (1)..(419): unsure at all n locations
tgtatggaccatatcgtagccattgtgctcatctataatggttccagntnaaacgtgatgcctaagagcactttggagaaattaccattcaatgcctcccacctaaagccgagttcaatggtggttcgtgccttcaacggcacccgccgagaggttaggggagagatcgacctcccagtacagataggccctcacacatgccaagttaccttccaaataatggatattaacccccctacagctgtctgttggggcgtccgtggatccactcactgggagttgttccctctacactccaccaaaagttgaaattcgtagtggaagggcatctgtgcattgtatcacgcgaggaagacatcttggtgagctgcccatcctctatgccttatgtggaggccgcagatgagtcattaaaaacc

SEQ ID NO: 188154 - DNA, 441 bp, Glycine max
agcttctatagaaggttagatcctaatatttctatctttgcatcacctctcaatgagctggtgaagaagaatgtggcatttacctgcggtgaaaaacaagagcaagcctttgctttgctcaaagaaaagcttactaaggcacctgttctagctcttcctgacttttctaaaacttttgagctagaatgtgatgcctctagagtgggagttggagctgtattgttacaaggtgggcaccctattgcttattttagtgaaaaacttcatagtgccaccctcaactaccccacctatgataaagagctttatgccttaataagagccctccaaacttgggaacattaccttgtttccaaggaatttgtcattcatagtgatcatcaatcacttaagtacattagagggcaaagcaagttaaacaagaggcatgcaaaatgggta

SEQ ID NO: 188155 - DNA, 417 bp, Glycine max
agcttgaagcatggacaaccttattgagtatttttctcacgtggatgcagagaaatgtaattatatgatggatcgggaatgaattctttgtacgataaaataatattttaactcatgtaatcatgataaaatttgattttaatctgtgaaaaaattctgtaaaaaattatcttggttccagttctcataaacttcataactttgaaatgtatttaatgaagtaatatgtatttaaacgtgcgaggtacattgtttccgatacattgtatgttattttataatggtgattaacataacttgattgtatgtaatgctgctattaaagttatgatagagattatttcttaaaaaatacaatttattaaagctatcattgatcacacatgtgactagcactagaatatttaatttaactat

SEQ ID NO: 188156 - DNA, 406 bp, Glycine max
  unsure (1)..(406): unsure at all n locations
ccgctgaggaaggcncacacaaaatgcctgaggagtgttctattatcggatccaccccatactccattctacatgatccatgcactaataccatcccactcgtcgtccaagactttcaaccaagcgttgcggatgatctaagacacaccctatccataccccctctctatacctgtcgcttctgcacatcaactgtgaaaagcaaactagatatgtccacgaaatccaacacatcttttcctcaccattcttgacgcttcgagtcaacttggatactcccgcagataaactccctaaccttacacgtacatccgaccatgttgacaaggttagatccatttctcgttatcataaccacacttgcccctcctctgaactctcacaaagtctcaatcaacacgaccct

SEQ ID NO: 188157 - DNA, 409 bp, Glycine max
ttcttgaaagagcctgagtagacgatgagaagttcaagtccatagccatcaaagtctgaatagagtatgatgaactaagggatgtcaatatggccaccgatgaaaccttggaatgagaaaccaagaatgcccgaaaggaagaacacgaccaaaacaagttttgaggggctttatagggcagcaatagtgagctcaagctccgaagaggtgaaaggaatcatcacgggtcaaaggcatgatcttgaagaacgagctaaaggctttccttaggtcgaaaagaaatttgtcccaacagttaaacgagactgaagggaatatgtgggccatcatcgatgagtgcaaagagaagctaaatctaacggcgactcactagcaaaggctagaggatgagtacgccaagatatcagca

SEQ ID NO: 188158 - DNA, 456 bp, Glycine max
  unsure (1)..(456): unsure at all n locations
nttgtcatcacctanaacaccattnttaaggtccaacgccttgaaatggtttttttcgcttttattggttaaacgtggattcttaaaagcctaaaatcaacacgtagctttgtcacctctttcaaaaaaacaaagagatcattaatggtccaatgccttagtgttttctctccttccaaaaagaatcaaaagatcgtttaatggtccaacgccttaaatgaaccttttattcaatcaaaaatatatcttgcaaaaaaggatataaacaacttaaccaatgtttagttctcaaagaactacgtaggtctgatttccttatcacaattgaggaatacgtaggagcataggaaacacccttgttgattacaaaaagattatatatacacaaaggcataaaaagacatataaacgttaagcggaaatataacaatgtaagtcatgtttgacacttaatta

SEQ ID NO: 188159 - DNA, 114 bp, Glycine max
gcaccagcaacacgcacgcaaagagcacgcgacggcacgagaagaggggcagagaaagacaggcaacaaccaaaaagacggggagacaaggaacacaagacggaaagggcacac

SEQ ID NO: 188160 - DNA, 347 bp, Glycine max
ctccaaaagctacagccttctggtaggcctcaatgggcctggtttctatttacaccccctttatactaaatgcaccccccctatctatttgatttaaatgttttttgcggaacattacaaaacttaatgaatttcgtaacgatacttattttccttccgcaaggatacgaatccttacggattatgtgattactcttttttggctgtcaaagaaattacagaaactcacggatagtgcaaaaacacctcttttcgatttccgccacattaccgaatttcacggattacgcaagcctgcttcactttggatttttgaaacgacacgggacttcaattattgcatgtca

SEQ ID NO: 188161 - DNA, 438 bp, Glycine max
gcttagccagatagcaagcgatttttattcttgtttaagcgtgacctattgccgccaagcgcaattccttatggtcataactgaggtcgatgaatctaagtgagattcattacgacaatatgcacgctaagtgagtacttatcagctaagcgcatgctcctgtttacttaagatgcatcattttagctaagccagccagagtctggcttagcgagagttgcaactttttggatttgcaaacctcgctaagtggtctgatccttatgctaagccaagctcgtgtgttacaacaaaaaaacaactgattttgaatttgaaatgtctgctaagcgcacgtattcgctaagcgagccttgttgagaaaccatacatttttctaactcgcttaatgcagcgatccactaagctagagtatcgaacaactgcttgagtgtaaca

SEQ ID NO: 188162 - DNA, 398 bp, Glycine max
  unsure (1)..(398): unsure at all n locations
actcaccttttatccaggcaattcttgcgggagaaactcctcccttcttggtttattcccnagcggatggagcctcccctatcctcttctcctttgccttccgctgcatctccatggtgaaaaatcaccattgaaggacctcattgaagctcaaagatccagccttcatatgaagctccacaagcaagcctccatcaagtggtatcagagcacaagagcttcaagtacgtgctccttaaacctccattaatttattatctttaacttctcttccattgatgtttcttcattattctccatgtatctccccacacgtcttgctctaaatgtcgttcacatgattctttagaggtttcaccgattaaacctgctgtagaagttagatttgactctctatg

SEQ ID NO: 188163 - DNA, 406 bp, Glycine max
agcgtgacaccttacctcgtatagcgaacttttctaagaaacagaagaaccatagtcgtcgttggtcggcattctcaggctcggaatgtatttctgaaacatatccgccacggccttgaaccttctcagatatagcagacacctcgctcttagctccagcgcttcatccagccgcggatagatcgccagagccgcgtagagaaagatcagcgccgaaccgatctcgctctgttcctgcgtcgctatcagactccgagcgtctctcatgtatttctctacgatctacacagaaaacggtgcgtgtggagcaatccacataaaaacaaacaaagatgtccttaaaaggtctggaacgtctttaccttcggtaggggaaccacaaggttcttttctgggcttgaactag

SEQ ID NO: 188164 - DNA, 409 bp, Glycine max
  unsure (1)..(409): unsure at all n locations
acacatagaatctcacgcttgatgcaaagtgctcacaagcgttgttctctttgacttttcagcgnagggacctataataagggcatgtttggttgcggcggacgaatcttgaaaaagtacgcttgtaaaagacactccttcattacatttattatctcatcttgtctttaagaggtctggatccgcactgtcgcgctcatattctcaaacgcattttctttcttgaagaatagtttatcaaccttgtccattatactcgatgaaccacgacctttttaaaggaaaataaaaatcgtacatatatacatcgtaattttctttcataattcaatttatttaactaaacaaaattgaagaagataaaaaatacacttttttgctatgacaccaccaattgctgccgttaaca

SEQ ID NO: 188165 - DNA, 367 bp, Glycine max
  unsure (1)..(367): unsure at all n locations
agctgcatgatgaatctatattgattcttttatttncgangataacaacgatgacgacaaaaagctcaaaagtcaagaacacttaatgataacaaagatgatgatctcaagaataaaagaatgagttcaagattggagcacatacacttcaaggatcaagaggaaagttgaattcaagaatcaagtttcaagattcaagttccaagaattaagatcaagattcatgagtcaagagaagactcaatcaagataagtattaaaaagttcttttaaaaattgagtagcacatgaattttgtctcaaaaccttttaccaaagaggtattactctctggtaatcgatcaccagattatctgaatcaattacc

SEQ ID NO: 188166 - DNA, 379 bp, Glycine max
  unsure (1)..(379): unsure at all n locations
tncatcatagtgaganaggcgttcttcccttctgttactttttaatcacttaaaaccagtgacgaaagttgtctccgtgatgaatatacatgccgaggcgctctcgtaacgtatccgtgagtgacttcacgaagatttctaatcgttcatatgtagtttgttttccatcgctctgcagtcattaaccggtaagttcccgaatgtgaacctttgcattcattctatgtacccttggtggtccccacttgcttctcgtactttcattcctgcttacattatactttgcgttacccccttttggtcgtgctcctagtcaatttgacttaagtctttgttctcgcctcataaacaaatgtaattatatttccgtcgtccattc

SEQ ID NO: 188167 - DNA, 440 bp, Glycine max
  unsure (1)..(440): unsure at all n locations
agctttggattcaattatgagcgtctctttttattaaatgtctcaatcggatatccgagtcaaaagctattgtcgnttgaatttgctcagagcttctgtttgaaattcgagtgtctcgatttattacgggactctatcgatcatccgagttaaaagttattgtcttttgaatttgcttagagttactgttttcaatttcgtgcatctcgatatactgcaggactcactcaaactttccagtaaaaagttattgtcatttgaatattgtgagagcttctatattcaatttcgagcgtcttgaattattaaatgactcaatcggacatctgagtcaaaagttacattcgtttgaatttcctaagagcttttgttttcatttttagcgtctagataaattactggacacaatcagacatctgagtaaaaagatttagtcattt

SEQ ID NO: 188168 - DNA, 475 bp, Glycine max
  unsure (1)..(475): unsure at all n locations
acatgaaactcagctgaaataanaacaaaggctctaagcatattcgaataacattatttttgtctcggatatccgatggagtcatttaataattcgaaacgctcgaaatcgaatacagaagctctaagcanattcaaatgacaataacttttgactcagatattcgattgagtcattttataatttgagacgctcaaaattgaatgcaagagctctcaccaaattcaaatgacaatatacttttactcagatgtccgattgagtcccgtaatatatcttgacactcaaaatggaaaacagaagctctgagcaaattcaagcgaaagtaacttttgactcaaatgtccgattgagtcatttaataattaaagacgctcggaattgaatatagaagctctcacaaaattcaaatgacaataactntatactcggatgtctaattgagtcccggaatatatcgagacgctcataattg

SEQ ID NO: 188169 - DNA, 460 bp, Glycine max
  unsure (1)..(460): unsure at all n locations
agtcacctgccgcatgcaagcttatcatagttntcatcaagttcaatttatattccgaagaacctacaaagctttcaacttcaccaattgccataagatagagatattcctctttatttgttgaatcactcgaagtgctggaagcattttcttcccatgcaatgtaagccttcttcttattattatgaacattcaccttgttttctcctccttgttttttctttagaaagatggagcatttagattttatgtggcccaatttgcaacactcaaaacaagtaaaattaaaggacgttgactcattaaaggtactttttgattcaaaagacattttattttttttgggggaacaaaagatattttatttaaaataaattaaaaatatatttactttgtcatcttatatatttgttcaaatcaaataggttaaaattgtgacaaaaacttattacatgcaaca

SEQ ID NO: 188170 - DNA, 469 bp, Glycine max
  unsure (1)..(469): unsure at all n locations
actaagcttctaaggacgtgagcttagttatgagaggagggcgagtatttaatctcttatcttctcaggaagcctnctcaaagaagcttctcaaggaagttttctcaacaaatcttctcaaggaagctacctagtctataaatagaagcatgtgtaacacttgttgtaactttgatgaatgagagtcttgtgagacacaactcaaagttcaacctctctccctttttcttccttcaatttcgtgctcccccctctctctttctctccctctttctttttctccattgaagcatcctccttaagcttcttatccaaagctcattttggtggcaaagctccttcttccatggcttattccctagaggatggcgcctcctctcacctcttctcctttgtcttccgctgcatctccatggaggaaaatcaccattgaaggacctcattgaagctcaaagatccagcctccata

SEQ ID NO: 188171 - DNA, 418 bp, Glycine max
actcaagcttgggactctagccaatcctttaaactagcactaagatgttgtgactttcgataaatcgccagaaacaagtcacttgaagaattgcgactctcggaaatgtatttctcgatacaatcactgcgaatcgattaccattaaggtgtaattcgattacacatcaacacatgtgactcttcattttgaatcttgaaaattaaaatgtttagaagctctggcaatcgattacaagtgttgtgtaatcgattacactacgttacaatgatttacaaccgtctaaacctcagttgtacctcttgagatttaaaatcttaacactctaaaacacttggaatcaactactaccttctggaatcgacaccacagagtaaactctttggtatgattttggaaaacttcttgcgaactcaat

SEQ ID NO: 188172 - DNA, 448 bp, Glycine max
  unsure (1)..(448): unsure at all n locations
agcttccttanatatatatcacacaagacatgattttttgtcgtgcataaatccaaaagaacaaaatacaatcgaaaccaaataccggatatcacaatatctgaatttacggacaattaatttgtattgtcctaaaataaaattagggttcatataacaaattaaaagatccaactataaaaagaatcaaacaactntaaatctcaataatctaactgtaatgatgactttgataccacatgttagaattttaacaaatcatataaaataccaaatgagcataaaacacattacattatattattgaaagaaaggtttaaggtatacatggattcatggagtttgatcaaacaaacgtagcggaacaagaatgatcacgaaaagttgaatttatgacctacttcaatcaaatcactttattccttacaggaatcgtcgtttctcttaa

SEQ ID NO: 188173 - DNA, 465 bp, Glycine max
  unsure (1)..(465): unsure at all n locations
ttgctgaaacanagtnngaattcacactgtctcttccaatacttctagtaattactaaaacaaaatgtcaaagaaaggagaagtaacaatgaccacctttttatagagaatagagggcccattggccaagggttaaaggcccatcagggaagaaatctaatggtcttgaaagggcatgatgaaacaatctaacggctagggaaggcacacacaacatgaataatacccatcattgctatttcaaaaaccatcatgatatacatagatagtgaagcaaagtgccacacaacttgccgtcaacccaaatcgtgagccaacacaattaaagttgagtaacgattcacctttaagcatttgcgccaataggctcaatgcttgaggggttgtacaccatccataatgggtatcccggttatgtcaactctagagacaagggtgactcactataaagcatttacgccatca

SEQ ID NO: 188174 - DNA, 331 bp, Glycine max
  unsure (1)..(331): unsure at all n locations
agctcagcnatcaggagatacatgcagcctatctttgatatatgccngcnancactgaaggaccgcggtcgagacactctgggaaccaaagccacaaacgaagcatcggtgcctctaggacagggaccatgaacatagaactcgactacaaatcgactaaacaccggaatcagcacaccccagaactccttaataaaaatgaagctaaggccatcaagcccaggacatataacccctaccaactccacacagctactttgatctctcaatcaaagaaaggggcaatcagcacaaacgttctgcctccgacaaataaatctaaagagaacac

SEQ ID NO: 188175 - DNA, 433 bp, Glycine max
  unsure (1)..(433): unsure at all n locations
actaagctntgagcacacataagacccagaatagcatggggcgtagagttatttatatttctaaatcaacccacaaaatagaattgacagaacactctccacagatgccggccgcaaaatccctcattacatcaaacaatccttacctcaagttagattaacctatagctcacttaactcacaagttaaacttaggaactggcgttaacctcttcctttaattaatctttgtccacccttctttcacaaaagagagagcgcgggaccttcaacgattgagcatttatcgtttaccagcaacattgaaggggaattcttccactacaaaacgttgtctttttagacttggtgctcaagcagcaatgtcacaccatgtcttatcagataccatctcaatacggctagcgtgctagttaacatctattggacctag

SEQ ID NO: 188176 - DNA, 451 bp, Glycine max
ccggatcttaagcaccgcggctgcagccgacgcactgatgacgttttatgttttggcccacacgcatgtatctgctcccttgtgcaaaatctgattcttttaggctgacccaagtatattttattccaaaatgaatgtttttattcttaactaaaaaaaaatcacacgtgaatattcctcctcaactatttattttatatttaataatcaattaagattcaaatcttgaactactttattgagagacacaaattttccacttatgtcaatcgttattaaattcccaagtgctgcgtatcaatccacataaacctacatggactacgggttaggtgaactgcaggagtataccaacttaatggagtaaggacctcaccaatatctattaagtttaggaaagctttcaccgtacaccctatttggtgagagaaagttaatagatttatgatta

SEQ ID NO: 188177 - DNA, 431 bp, Glycine max
agcttgaagtctgaagggaaaattcatatttcattgcatgtcctcaagggattgatggagttaaacattttgtataagaaaagtgatggatgcattgctgatatcaaaacaagtagcaaggactagcaacactcaaaaagatgccttatcaaagatagatgagagccatgggttaaattatgagaagagaaccaaggttggcaagttacttaaccacatcccatatatgtactaaggtattagaagttcaaaagaaccttggtttctagggttttccctcattgctcatttgctcgttcaggtttacagaatccagcatgagctggttgacatggatctgtggcttaatgtattcttgttacattcattagaaggtgggtttttttagggttaccaaagaaaggactcctacttttggtcctttgtacata

SEQ ID NO: 188178 - DNA, 449 bp, Glycine max
  unsure (1)..(449): unsure at all n locations
agctcncttngattgaaccttctagctgattctgtgccaatctcaatatctccaagctctggcactcactgatttcagcaggtattggccctgagagagcatttatacctgaccttataactctaagctgtttcaactttcctatcgatgatggaattcttccagtcaaattattgctatatatgaccagctcctctagagataccaaattcccaagctccgctggcacttcaccatacatgtaattttcacacaggtaaagctttctaagtgttgtgattttccaaattgggttcagaaggggtccatgaagcctatttgtgcaaaggtccaaaacctccaaaccaccacagtcaacaaaaccatcaggaatggggccagagatgaaatattttgacaattcaactcaagaagctttggaagattacagatggcaggagccaaagtac

SEQ ID NO: 188179 - DNA, 410 bp, Glycine max
  unsure (1)..(410): unsure at all n locations
agctntgcatttatggagtccacttaattttatcttaaaaaatcaaataaaatgggaaggaagccaacaatccaataaacaccatatgcaagaatgagttcacaaaggtatctctcttatactgcatgtaatgtaattcaagtagttttaaatagatgaaagttaggtaaattgagtaacagaaaacatcatttgacaaatatctcaatgccactgaccattgctgaccttaatttataactgaatgttatccacaatcacactaatcctttccaataaacatttacagcttttcaaagctcgggtcctagcaacttatataagagcaatgtcagtgccttgcattacctacgtttatatagtcatgtagaaaactctcagcaaagaaactatccacacacttttttcta

SEQ ID NO: 188180 - DNA, 393 bp, Glycine max
tgaggcgacaaaagagaggcaccgctctattgtatcattgtctgacacgggagaagagagggataatcctaaaaatataaagtcaatgctagattcattcatagaagaacacaactcaagcatatatagaggtagcgagccattatccaaagtgtgtttcattgcggagagcgacccctctgactctgttgcgtctatgtcgagaattatcagggcacatctgacctaatacctcgaccggactgtaagataagactaaccctacactaccacaactcttggatttgggggaccctaccctcttggctctatcccttggcccaacattttccaactatatatgtctatcacacaacaggagatatgaacaaagcgcccgcttataaattcaat

SEQ ID NO: 188181 - DNA, 442 bp, Glycine max
  unsure (1)..(442): unsure at all n locations
agctntagttgattgtggaaattgattattatttgtgatacgaatctcataggaacttagattgtggaaaattggtaccagtgaatcataattcccgattgcttttaatatcattcaaatatctcttgtggattttactttggtttcttttaaaaccaaaaccacanaaatactgcaattcctcttttgattaatccaactgtttaatttaataattttaactaactgagaacacaattgatccttatggttcaatatccaaacttttaaaccattgtgtatgatacatttgtccttgtgcgagtattattttttatgcatcatgcttactacccggttcttcttgctcttcatcattatcattcattttttaagataaagaagagaaagatacgacagaaaaactataatgttgataatcaaatatatttaagagacatga

SEQ ID NO: 188182 - DNA, 368 bp, Glycine max
  unsure (1)..(368): unsure at all n locations
cgacactctngaatactaagctagaacttgcctgctaagcgagagtgcgcactgagctcgttttacactccgagcgagctgtccaattcgtccaactcttcttcaattcttgcatcaattttcctctaaagcacttgaaatcctcttcttttgacttctgctaagaaaaaattgcctagatgttaatgtcttcgttatttcattcaagacaatagtaaagtgaagaaactgcaatcattattagtcatacttgactatcacgttaacgtagatttcgcagctatcaactcctccaaagtagcacatttgtttgtgctcatgcaaaagacacacatcttagtgtgtcaacacatgatataactatgaat

SEQ ID NO: 188183 - DNA, 431 bp, Glycine max
agcttctccttcctttttttatatatagtgtgtaatgagggaagaacaaaaatgttcaacccttcctggtatctgagattcactgaaaattagtgagaaaaattattttcgtgaagaaaatccaagccgaggcgcttccgtaacgctttcgtgacgtttccgtgggtgatttcgcgaagattttcaaccgttcttcgtcgttcttcggtcttcaatcggtaagttcccgaaatcaaattcaattcattctatgtactcttagtggtcctcatttgtttcgcgtgctcttattttcatttcatttactttccgtactcccttttcacgtgctttagtcatttatgtaagtcattttctctcctaataaaaaataaaataaatttgcaccgatcattcgtattgaacatcctttatttttgtaaaatgaattc

SEQ ID NO: 188184 - DNA, 437 bp, Glycine max
  unsure (1)..(437): unsure at all n locations
nggctaatcccgacccaacccgtcttagtcagtcagtattattctgcgacgtacctaagcaggtgagctcctggcagccaaccaataaaagaacaaagtccacgaagcaaggaggcttgtgtggcggctggccagctatgtatcttgggtggtatctgacaattactctctggtaatcgattaccattcatggtgttgcaacgtgccctcttgcgagcgagtgagagcgaggctcacgggtgtgttttccaaaggaggaaagatgcgcggagtcgccaccaacgtttatttgtggaaaacgtcggaaaaaccgaaggaaaccggtcaaaatgaaaattctaagttcgggagttgtatntacgcttgaggaaggtattagcaactcttacatttgtctcgaatgacaacaacctatttttagaattgtggaaattgtg

SEQ ID NO: 188185 - DNA, 382 bp, Glycine max
agcttatgttgcaaacatttataatagaccccatcagcaggaaaaccaacaatagcagaataattatgatctttcaagcaacagatataatccaggttggagaaatcatccaaatctgagatgggcaagtcctccacaacaacaacagcctgtccctcctttccagaatgctgctggtccaagcaagccatatgttcctcctctaataccgcagcagcaacaacatcaatcacaacaaatacaacaagcaactaaggctcctcctcaaccttccttagaagagttagtgaggaaaatgaccatctagaatatgcaatttcagcaagagacaagagcctccattcataagttgacaaatcagatggggcagatggctactcag

SEQ ID NO: 188186 - DNA, 442 bp, Glycine max
  unsure (1)..(442): unsure at all n locations
tganatatgctgctaataagtattggaagaagatgagtgtttgatttgactacaaatgactggggaaaaatggactgcaattttcatgtgaagacaggagacggaagaatgctttaacaggagcccacatcagtgttntagcctaaagcttgttacctctcctgtctttgacactgacaatgacctttaattttgtagtttcaaattgccttagtaggatccagtgcgccttttaattggatacacattggctagtagtgtttaaaagatgaaaacaatttattttgttgcaatgccatagttgcaagttttttgttcatcatgctttgcctgagagtagcctattctgatgttgctactctggtggtgctggtgagccacttgattggatcccaccttcctctgcacctagactgaccactgctntgacaacattggatta

SEQ ID NO: 188187 - DNA, 441 bp, Glycine max
agcttcaagccaaggccagactctcatgcatgcttatgcttctcaagaaaaaatgccaaactcctgcaaaaaatctgatttcaagcttaaataggtgggttggttcgtgctcgcgcgcttagcgtaaatctgaatcgcttagcacgcataagtggaatttggcttagcgcatttctctcgcttagcggatgagctgaagcggtgcgcttgatgacctggagcggtgcgctcaacgaacctaacagctcatcttcttctggcttcttcctcacacttagccactgagtgtcacgcttagcaaatgctcactaagccagcagattggcttatcgagaaggtgaaaacaacacttttgccaatttgcctaattaacctgaaattaagagaaattgattattaaacacacaaaacaaaagtataaattatctattacctatattt

SEQ ID NO: 188188 - DNA, 461 bp, Glycine max
actcagcttccatcagtggtatcagagcacaagagctcaagtaggttctattaaacctccatttatattttggctataccttctcttccattgttgcttcttcatttttttctccatgtatctcctcacatgtcttgtgctaaatgtttttaacatgattctttacatgattctttagagtttccaccgattaaacttgctatagaagctagatgtgattttctatggctcaaatttcttgttcctgttcttgaaccatgaattgtgttgagcttaggttcctttgagttttgtcttgttattttttttggctgaaacctaaatcatagaattcttacaaaaatattaaagtcgaagataacctctaaaatctaaagtgacttgttcacctattgtagttttgtcatagaagtcatgtctagtcatgaaacttgtcacataagatctcttatgttgtgctg

SEQ ID NO: 188189 - DNA, 128 bp, Glycine max
atccaaaaccgcccctccacagcagcggtgacacatttgacttttttgagaccccgaagcccactcccttccctttataccctgtactataacctgctttttgcagattttcccactacgacttacaa

SEQ ID NO: 188190 - DNA, 426 bp, Glycine max
  unsure (1)..(426): unsure at all n locations
agcccnacnanacaaagaagagaccaagatgatatcttcatctgacttagcatcaaactttcccaagttatcttttccatatgtcaatacaaaacacttgcaaccaaaaacatgaagattcgagatgtttggtttcctaccattgatcagatcatatggagtgttctgcatattgggtcttattaaaaccctattcatgatatatcatgcaatattaacgacttcggcccaaaaatattttggaagtggagtatcatttaataacgttctagcaacttcttccaaagacccattattcctttcaacaaaaccattatgctgaggcgttctaggagcacaatagttatgttcactgccaagcctatcacaaagaaaaacaaattctttattattaaactcacctccatgatcactcttaaaagatat

SEQ ID NO: 188191 - DNA, 283 bp, Glycine max
cctttacaccaacgaaagaaggaagtgatccttcaagtactgaaacaactcccatttgactatatgatgatatatacgtgtaattcacaaaatatcactcttagctactatattttgtccgtcccatttcaatatcgctgtgattaataactaaaacatttccaaaaaaaattaggatggataagcctcacaatgtatcacattagaccaattgtcactgattggtataaatcacacggcaattctggaatactccttacgaagacttgggaccttttacacc

SEQ ID NO: 188192 - DNA, 389 bp, Glycine max
  unsure (1)..(389): unsure at all n locations
aacgatagattaagaaatccaactcaaagtaactggaaactaacaattcaataaaagttaaaggtattccactagtagcttttcttgtcccctttacacaatttcaaatgaaaatttacatttaactatgtccagttcaaaattgcttgtcatataaaaattagtgacaagtttaaaatagaataattgaggtggcaaaattatttacaactggacagtttgagacagagataatttcatcaaagacttgacagataatttaattcaacttgctgtttctttcgtaaaatatcttttgtgaggaagagagnttaaacaagaagaacaaatatcaatttggataagatgagtcttacttgacaatttcatatgcatcttctactgtataa

SEQ ID NO: 188193 - DNA, 444 bp, Glycine max
tatccaatactcaagcatacgggcaaagacagagagaggaacctatatggaatagtgtactatatcttctgaacgatcaagcacgacataaaagtcatagaggagcggcattatattagtaagtatccttcacaaggtagcacaacataatgtgtattgtctcaaaatgcaccaaattgtaccctctgactgagtctgaccagtcctgaaagtgcatctaactaatatatccctgcgttacttaacaaatttacattattaacccattatgtatatatgacagtaagtcagcgacacaatggaagcaaacaaaaataagacgtttaagaaataccattcatacatgtaaagaataaaataatacattatgtgccatgatgaaagtcatcatctacgttaaaactcattaagcaactcttgggcctaactactgtgttatgtatg

SEQ ID NO: 188194 - DNA, 435 bp, Glycine max
agcttgactatggatgagacatgtttgtatatgattcgggacttgtcggattggatttgggctagattggatgacaggaagcgtgattttcgaaatctgcactttatgcagaattttgctgtgaaattgtgtagcataattttgcataagtgcagaaaaatgctatgttttgctggttgtggaaagagtagtgcagaatgagttctggatgtttgctattatatcccaacggtcaaaatgtatgtgtatgtactagagacttccagtaatattttcgagtcgatccaacggttaacgaattggaatgaacgaaatgtctctggggtctctaagtgagaaatagtgtgattttggttggtgttttgggcagagtctcctgtacttgctcttgtttgcttcgctgtgatagtctgtgatggttgaatgtcgtttact

SEQ ID NO: 188195 - DNA, 403 bp, Glycine max
  unsure (1)..(403): unsure at all n locations
agcttctacttgagacatagacttgcttttatacatnctacactnctccttaagaaacctttcaaatgcaaaagctgctctcacagctgcaagaacagctgcaaatgctatttatggtcctccagctcaacaaggtgccatagatctacagaatgggattcttcacgcagaggagaaggattacaaaactgcatatagttaattttttgaagcttttgagtctttcaatgctcttgatgaccccaaggctgtatttagcctgaaatacatgttgttatgcaagattatggtgagtcaagctgatgatgtggctggaatcatatattctaaagctggcgtgcaatatcttgggcctgatttggatgctatgaaagccattgcagatgctcattctaagcgatct

SEQ ID NO: 188196 - DNA, 470 bp, Glycine max
  unsure (1)..(470): unsure at all n locations
acatcaatactaatcttgaaaatngtcaacatacgccttgtctaataccatttcttctatttaaaaagagtcactcanagacactgtgccctattacaatactctgtgccctaacgaaattaacactattccacataaaataataattgccaaattttctaattagaaattaactaatgtacacgctgctttatttgccttgatcaagtccacaaccaaaatccggattaagcccaatgtttcattaattcctgaaattatattaaaaacatcaaattatctaaatgagcccaaataataaaactgcctaactaattgacaattaagaccaatcagtaattaaaatggtgccaaaaacggtttataaaatagaagagaatgatggcacatcagaactcaccatacttatccttttgcactcctgggcaatatgaaacaaataacaaaatccaatgatatcatagagagac

SEQ ID NO: 188197 - DNA, 418 bp, Glycine max
  unsure (1)..(418): unsure at all n locations
gcnngcaaagagcgagcatgggaaggttgctttttatctttgagcccaatgaagacctttaatggtgactttccaccatggagatgcagcggaagacaattgagaatatgtgagatgaggcgtcattcactatggaactagccattggagaaggagcttcaccaccaagatgagccttggataataagcttggagaggatgcttcaatggagataaagaaagagggatagaaagagagaggggggagcaccaaattgaatgaacaaaaagggagagaagttgaactttgagtcgtgtgtcacaagactcttattcgtcaaagtgacaactagtgttacacatgctttctaattatagactaggtagctctcttgagaagcgttcttgagaaagcttccttgacaagcttcttgagaaa

SEQ ID NO: 188198 - DNA, 430 bp, Glycine max
  unsure (1)..(430): unsure at all n locations
cgcttagctgcanacagcctagccctcggctgatctttgctcttttctatgaaagccccaccctctagatcctggaccttgatcaaggcagcaggtcttactccacataaccgatgctatcgtctatatgtcaacaatcggtatttcgaaaaccagcgatatcatgtttatgttcacatcggctctgaaaaaccaatgttaacaataattcattcaacatcgtgactatccaaatcggttctaaaaccgatgtataatacctgtatttaccgttgttgaaagcgtatttactacatatgtgactacaatggcgagttgtgaatggatcgcttacttggatcaatctcgatgctgataatctctacctcaatatttcttgttcctatcctaatactgatggcatactaatgcttctagatagactctttca

SEQ ID NO: 188199 - DNA, 439 bp, Glycine max
agctcctggtgggacatctagacttgcttttctttctgacattcaccacagattctgccttcttctattttcagattgggaatgcctctaacagcacctttgtcaatgattttcttcatgcctcttaagtgcagatgtccaaatctttgatgccatattttgacttcatcttctttggagaatagacatgtggaggagtaactggtttcttgaggtgtccataagtaacagttgtcctttgatctgctgtccttcattagaacttcactcttctcatttgtcaccaagcattctgactttgtgaagtttacattgaattcttcatcacacaactgactgatgctgatcaagtttgcactcagtcccttcaccagcagtactttgctcatactaggaagtccatcttggactagctttcccattccagtgatctttcctt

SEQ ID NO: 188200 - DNA, 434 bp, Glycine max
  unsure (1)..(434): unsure at all n locations
gcgtctcgaatatggtgcgcctgactcgaacatccgagtgagaagctatgacctattataatttctncgagagcgttccgctgtgtaactttgagcgtgaacgacagtgatgcgccagaatctgacctgcgagcgacaagttacgaccatttcaatatctcgatagcctccgtcgttcaatttctagcgcctcgatatgtgatgcgcctgaacatgccctccgagcgaaaagttctgagcatatgaaggtggtgaaagctctcgttgcatagtttagagcgtatgcacctgtgatgagcatgaatcggacatccgattgaaatgtcatgaccattataatttccggagagcaaccgtggtccaattcaagcggatgatatgaatgtgcctgatcggacctctttgaaatgtatgacctttgaactctcgtgagc

SEQ ID NO: 188201 - DNA, 382 bp, Glycine max
  unsure (1)..(382): unsure at all n locations
cacantgatcaagttgttaactgcctagcttttttccctcctctgtctaaatatcttacaatgtctcacgagctcagaatcccgatagatatgaagttaacaattgagaggttcgacagcatatatctcatttggcattcattgccttcaaaagaataatcaaaggaaggatgatgttataattaatattagaatcaggatcagttcaaaacgataatgtggatttcgtataccaatggtatcttatagttgacataataacaatttatgctgctaaggctgagtgctcgggtttttgcaccagtatagcaaatttctgtagacaaacttagaagcacattgctactgtatactaaccttctgacttttaacttctttattt

SEQ ID NO: 188202 - DNA, 384 bp, Glycine max
actcacgctgacataagagccacgtaaataaaattatgtttatttaaacacgacatatatcattcgtaatctactgctcagattgatactctaataccgtcgagcatgataccttagtgctataactgtataatcttataatcccaactgctcatctttttggtccactactaataataatcatactaatcattatcatacgaataataatacattatattacttatatgaacaattctacatttgttgaaacacttttagtctctctttttacatttctaacattcgatgacacgctccattttataatgatagaaacacaaacaatgataattagggatataatgtgattcactgtaacaagaatgcattataccgtgagcg

SEQ ID NO: 188203 - DNA, 388 bp, Glycine max
gcttgctttaagattgtgttcggtctctacatctgcttctggaaatggtaataagggagtgagtattacatcccttctggaaccacatatacgaaagttaagtctcacacataacctaacaaccaccacatgcgatcgactaccagacaacactcatgacatcctattccactttctactctcataatgttcttactttggtcccaacactgccactaagcctctcaacccttcatagtcttacgcaacatatggatgacgattgggaggacatgtcacatggcggtacaggacatcggtacaggacatgacactgtcacatggcctgtgagtcctccgcactaacaaggaataagacccttagtttggttatcaccactcaacattt

SEQ ID NO: 188204 - DNA, 429 bp, Glycine max
  unsure (1)..(429): unsure at all n locations
cttgtgtaattgattacactaattctataattgattaccagttactgtttctgaataaatcaaaagatgtaacccttcaaatggtttttgactttttcaaattggttttaagtttctctaaatgttataactcttctaaatggtcttcttgaccatacatgaagagtctttaaaagcaagactntgttttgcattttcaaattcattcttttcaatcttgaacacttttccaatcaattttatacaatcctttacaagccttgaatctctttgaacttcttcttcttctttatgctaaaagctttccaaagttttctggttttctaaaccttgaaaacttgtgctattcattcttttcatctcttctccctttgccaaaaagaattcgccaaggactaaccgcctcgattctttttgtgtctctcttct

SEQ ID NO: 188205 - DNA, 426 bp, Glycine max
  unsure (1)..(426): unsure at all n locations
agctataaaagnatgatttttcttgctcttgcaccacagctaggttggatttgtatgttttgatacacatcaaaactccaattgtcgtacgaaatattggcataaattacgaaggacacttgtgttgtgtttcccaaggcagctaatccaaatcaagttagtcttaacatatgtttgtcacaataacttatcaccaatggtaagtagcatgatcaagtcaatggccatgatttattatgttaagtgcactgttgaaatggatttagctaggagagacctttaactcaatgggatgatgtctcattattaaccaaacaccatgccaattagcttcatttgattntgttgatataataatactaggatatcaagatcaacccgttttaacccttcaatctcatagcataattatagtagggtaatatt

SEQ ID NO: 188206 - DNA, 444 bp, Glycine max
  unsure (1)..(444): unsure at all n locations
cttgcgcacgttagttaactaactctccatctttttatgacttactaattaactatgtatgccttttctttgcaaaattgattgatataagaatactttgaatattctttgtaaaaaataaaaaatattttaatattcttctctaattctattgatcttcttacatattaaataaaaagtatcacattgttattttaaataataaatatataatttttatttcatatctttataaaatattaaaaaaaataaaaaagacaatgaaaagacaacatttctcttatggctaccgtttaacgttttatgagatagataattaatttttcttcttatatattttctgntgaaatgtcttatctagttttaattatacacttcaataatctaaccagcttgtcttgcacgcaataaattacgaacaatatgatcaagtttttctttgtc

SEQ ID NO: 188207 - DNA, 434 bp, Glycine max
  unsure (1)..(434): unsure at all n locations
agcttcatgatgatgaacctagcaatntttactatgccaatagaccaagtgattgattcaagacttcaagatcaagcatcaagaatctaatccaagattcaagattcaagagaagaaatcaagaagcaataagtcaagacttcatataggataagtattaaaagattttttcaaaaacaaaatagcacagttttgttatacaaaagaattttctcaaattttttaagttaccagagtgattactctctggtaatcgattacctgttatcagtaatcgattaccagttgtcataccctaatttcgtccggggacctttgctcgatgacgtgcgaccattctttggtcctcgtgaggtgcttggcacccatcattaggcagattgtgaaattccaggacatgccgaanaaaaccaaaaaaatattgatgcacaatc

SEQ ID NO: 188208 - DNA, 384 bp, Glycine max
  unsure (1)..(384): unsure at all n locations
tgcttctacagtctagtgattctagagagagagaggtgcattttttatacagtcnttatagaacctgctgggggaagatctgcagagaccacatcttgaagaggaagccgcnttgagagcttgagatgagtttgtgagtggttatgagatcctttatgtgaaagagacattctcaccacttgagtttttggaatttttcatcttgttcttctattgttgataaagacgctctctgtttatggatagctaatatcctctgggggatcttgcttgaagtactttgatgaaatatctttctatctatttaatgatgtgttgtgtgttctctgtgctattagcttttcattttagtatgactttaccttgaacatgttgatgcatgct

SEQ ID NO: 188209 - DNA, 461 bp, Glycine max
  unsure (1)..(461): unsure at all n locations
ccttatagtgacctgccgcatgcaagcttacacggcaaggtgtcatctatttctanttacagatatggcaaaaagacattgcaagttatttcccatcaaatcaaggataatgcgcataatcattatggatcaatangactctttaatgatggacttgtaggaaattttggccttggtctgctctggtctttattttttttggtgtgagttggacaacacgcataatgatttggttaattacttaaacgggcaatcacttcctattccctcatgtattgaccatgttactatcattccccttcctttttactctttagaataactctatacatgggttagacattgtttgatccaaagaacttggttatctttactattttccttttcctcctctccatcttagattgagtattctttttccttcctttaatattttcttttcccttcttattttaatatac

SEQ ID NO: 188210 - DNA, 422 bp, Glycine max
  unsure (1)..(422): unsure at all n locations
acactattacatactcaagctggggggtggaggacgcatgaacganaacacaacacatgggtctccttatataggctgacgacggagaatagcactaagcaatcactactgcactgttccaagctccatggtggaggacgcatgcaccacaaagccattcatggggctcctaaaaagggttgaggatggaaaatatgtcctatcaatcactacaaacggttccaaacttgtgggcggaggaccaatgaacgaaaacgcaattcatggggctccttataaggaatgataatggagaattgcactaaccaatcactacggacgactccaaactcgtgggtcaaggacgcatgaacgatatcgcaattcatggtgctccaaaataagatgaaaatggataattgtactaagcaatcactacggac

SEQ ID NO: 188211 - DNA, 440 bp, Glycine max
  unsure (1)..(440): unsure at all n locations
agctttagcttataaagaagtttctctttgattctcctcatggaagtttctcaagaaagcttctcaagaaagctacctagtctataaatagaagcatgtgtaacacttgttgtaactttgatgaatgagagtcttgtgagacacaactcanagttcaacttctctccctttttctttcttcaatttcgtgctcccccctccctctttctctccctctttcttttcctccattgaagcatcctctccaagcttcttatccaaggctcatcttgatggtgaagctccttcttccatggcttattccctagtggatggcgcctcctctcacctcttctcctttgtcttccgctgcatctccatggtggaaaaccaccattaaaggacctcattgaagctcanagatccagcctccatagaagctccacaagcaagcttccatc

SEQ ID NO: 188212 - DNA, 456 bp, Glycine max
  unsure (1)..(456): unsure at all n locations
tacgcacatcgttcgcgtgtatgatatccactccacaatgtttgatgtttatgatatcttcnaccctataacgcaacgtggcagacaaaagtgggcagtaaacttgattggtctgcattgtccatgcggatggaatcttgcgcttctctatccatgttcacacattattgcagcttgtgtgtacgtgagcatgaactactaccaatatatagatgttgtttataaaaacgagctcatcttacaagcttactcctcacaatggtggcctcttgggaatgaagcagctattccttcttctgatgacgcatggacacttatacctgacccaactacaattcctgcgataggtctgtcaaaatcaaccaggataataaatgatatgtgatgggtcgaaccatctgagcaccgaacaaaatgtattatatgtggagccgatggcattacaggcgtctctgt

SEQ ID NO: 188213 - DNA, 437 bp, Glycine max
  unsure (1)..(437): unsure at all n locations
agcttaaggtctgtttccatgtacaaatctattattgttntgaaagctgntcttttatcaattctatgctaaaacatctgaattcatttggcattggggaaatccattcattgttttcattctcaatgtttccaaaaatctttatgttgtgttctgatccaatcganaaagaagtttcaaaaacactgattgctgattctttccaaagcttgttatgtccaatttttttttctataagtcccaaaaagaattatatataatctacaactacactaacataacaaaatatatttgtcgcaacctacccttcgacgggagggcgaggcgagactcaagggtgtatcttccaaagaaggaagacgcgcgggagtcgccaccaacgtttattcaaggaaaacgttataaaaaccaaaaaggcgtctatgatatttaataat

SEQ ID NO: 188214 - DNA, 407 bp, Glycine max
  unsure (1)..(407): unsure at all n locations
ctgctctcaattacattgatgntngtatgtatgggaggaggttatatgctatttattctctaacaagaataggcccactggtaaacataactatccaaacgtttgccttcacaagaatggcccctacgaatcttgcctcaaagatgtccattaaggacaatgcgttctatggaactacttccgctccggagtacgactttcacctctttaagatcgcttatcaccatcagcgcttctaagccatcaatggatggtcgattctccgggagcgacgcgtccatctcatggacgactagtattctgattttcatgaggaaatatggcgcccgcggtgggcaccactggttactcctatggccaatgtcgatccagatatagtccttgagttttacgcccatgcttggtca

SEQ ID NO: 188215 - DNA, 415 bp, Glycine max
  unsure (1)..(415): unsure at all n locations
nagctgtctcaagagacttatttttattatctataatgcccacaggcaacacacattatgagtatttgactcatatgctacattttctcttcgttgtagcaaacacaaaacatatttgtactatgagtatttgactcatagactacattatcttttcattgtaacgtatttgactcataggctacattttctcttcgctgtagcaaacacaaaacatatttgtactatgagtatttgactcatagactacattatcttttcgttgtaacgaatgaaaattaatcataaactcacaataaataaaataaaaatataatccaatatccgcttttaaataccttatcaaaaatcttaaagaataaatgtcaatcaagcgaagataaacatttttacttcattgtcaagtactcctaga

SEQ ID NO: 188216 - DNA, 338 bp, Glycine max
  unsure (1)..(338): unsure at all n locations
tacgcttatcggagccccgngaatgacgttttcgttcatgtgtcctccatctccgagattgtagccatgcgtagtgattgcttatggcaattctccattctcaaccctttttcggagccccatgaattgcgttctcgttcatgtggattccaccttcgagtttggagccatgcgcaaagatagcttagtgcaattctccactctcatcccttttctcggagccctaacaatggcgcttccgttcatgtgtgctccattttcgagtttggacacatgcatagtgattgctttgtgcatttctacattttcaaccccttttttcgagccccatgaattgt

SEQ ID NO: 188217 - DNA, 192 bp, Glycine max
caaaacgcccgaaccaagggaggcaagcaagcccgagcgaaacccacaccacgcgaccgaaaggaaaacgagacaaggagcaaacccaaaagaccagggcagcaaaaggaaaaaacaggacaggagcaaccgaagcaaaaaccaagaagcaccggcaacaaggaggcccgggaagacccggacgcaaaaaac

SEQ ID NO: 188218 - DNA, 433 bp, Glycine max
  unsure (1)..(433): unsure at all n locations
agcttngaaattagtgttgcgatcatttgatctatttagtctgagaagaggtagaattgattatgctgctctgatgaataagaagcctgtggcaaatggatcgaataaaaaagagggagaaacccatgttgtgattgtcgttcctacataggccaaattcccactagctcaacaatatcaatgcacaatttctttcatttcttcttgctacaaggtcatgacaaacgacaacaacatatacctccaaaccctacaccagggcaatgacagacatcatgcatgagcttcaaacaaacctatgggcagacaagaagtcctatggcctaggcaagttaaagaaataaaaaaaaaaacaatcaatggcgtgttatgaaaggttttgtcccaaaatccaaactgtaaaagtctctggtcaagatttgaaatgacaaat

SEQ ID NO: 188219 - DNA, 447 bp, Glycine max
  unsure (1)..(447): unsure at all n locations
ttgttatacccaagtgatagccatggacaactaccccctatgataaccctcanagtggacttaaccctgagtgctttccttataaaggcctcccaaaacagcatcatacagaaactatatatgcacaaaggcattagcgtatccttaccccaaaagcttaaggactaaaaatcatgacaaatacattaccttaagcaagttgctcagaaaattaaagcaatataccagtcaaatacaatgaaaaaaatataacttaactttgaatagcttgcagcaagttcattgttgttacttcataatatacctacttaccaatgaaatatttaaattgcaagcactatttatctagttctttgcatcgtgatcacaacattcatctctggacactatactgatcatcatcacaggtacgaaagtttgcaatcaactttgacgcctaaatttgct

SEQ ID NO: 188220 - DNA, 444 bp, Glycine max
agcttgaagtctgttgggaaaattcttatttcattgcatgtcctcaagggattgatggagttaaacattttgtataagaaaagtgatggatgcattgctgatatcaaaacaagtagcaaggactagcaacactcaaaaagatgccttatcaaagatagatgagagccatgggttaaattatgagaagagaaccaaggttggcaagttacttaaccacatcccatatatgtactaaggtattagaagttcaaaagaaccttggtttctaggtttttccctcattgctcatttgctcgttcaggtttacagaatccagcatgagctggttgacatggatctgtggcttagtgtattcttgttacattcattagaaggtgggtttctttatggttaccaaggaaaggactcctacttttggtcctttgtacatacagctaataaaaa

SEQ ID NO: 188221 - DNA, 463 bp, Glycine max
ctattacggacctatgaaactcaagctttaagctctctagagattgaaccttctatctgattctgtgccaaccccaatatctccaagctctggcactcactgatttcagcaggtattggccctgagagagcatttacacctgaccttataactttaagctgtttcaactttcctattgatgatggaattcttccagtcaaattattgctatatatgaccagttcctctagagataccaaattcccaagctccgctggcacttcaccatacatgtaattttcacacaggtaaagctttctaagtgttgtgatttttcaaattgggttcataaggggtccatgaagcctatttgtgcataggtccaaaaccttctaaccaccacagtcaacaaaaccatcatgaatggtgccagagatgaaattttttgacaattcaactcaagaagctttggaagattacagat

SEQ ID NO: 188222 - DNA, 429 bp, Glycine max
  unsure (1)..(429): unsure at all n locations
agcttgctacattgatgcatcctgtctattgcatcttcgattntggcacttaaattttggaggcttaagttttctatcaaagaagaagatggtgagagtactaccctctattaaccaccctaatcaactttgtgaaggatgtttacttagcaagaaattcataatgagttttccaaaggagtcaaactcgagctaagaaaccactcgagctaatacatgctgacgtctatgggccaatcaagccaagctcactaggtaaaaaaattatttcctccttttcattgatgatttttcaagaaaaacatgggtctatctcgtaaagcaaaaatcagaagtcttttctgccttcaagaagttcatagctacagtggagaaagaaaatagtcgaaaaatcaaagccatgaggattgaccgaggaggagaattcac

SEQ ID NO: 188223 - DNA, 446 bp, Glycine max
ctggcgctgcaaaactatatcacagcaccatggttctagtttactctcctctcctctctctcctctctctcttctatgttatcgctcttaggttcggtctctcttctctctctcttttatttttgcgctctacaatcccagttcagactttcagttgtactcaatcaaattttgttctctatatgatcaaaggaaggctaagtccgcagcgttattttctcttgaggatccagcacaattctccttgaggttctattattagagttaaattctgtccagtcttccctcttcactaattactctacattagcttctattaattcatgcatgcttagtactagatcaatcgtatccgcacttaatgttacgttcatgctcaatgatcgatcatgagcaattggcgtgctgatgctcaatcacataatgaatgccttatcgtcactctc

SEQ ID NO: 188224 - DNA, 254 bp, Glycine max
  unsure (1)..(254): unsure at all n locations
gcacttttcaagtcttttcaatactctaatagaggattcccatgaatccttctttccttaacaagggaagtccaccaataaagggcatacccttgaaagctaaaggtagccaaaggaaccttccttttctcacttgtatggtgacaaactgtcacaacgtgccctattcgggcgaacgaaggcgaggctcacgggtgcgattntcaaaggaggaaagatgctcggagttgccaccaacgtttatttgtggaaaa

SEQ ID NO: 188225 - DNA, 445 bp, Glycine max
tatctaacattaagggttatttaatttgaatgaaaatatttgttataactctatagactatagagtgtttgattaccgaaccttaactactactgaaaattatattacaacaacctaaatttgtaaacattatcttggttattttttatgaggacacatgtattttatacggaagaaaatattgtgagttacataaaaaattattattataagagataaaagtttctctttgaatatttagcatataaatgtacactcaaagctcaaatttggaatcacatatgaatttacactagtcatgagtaaattaatttatacattccatgttaaaacaaattatcatcataatatgaattatttaatgtcatattataaatatattaaatactattgcacgacttacccttgaactaatgtttacagattaaccgattaatatacaata

SEQ ID NO: 188226 - DNA, 325 bp, Glycine max
aaaaaatcgacgcgaatgacgtaaattattagtaacacctaccactgcatgttttggctcagccacatcggaccttgcagatgtctacggcgctgctggctttcagatcggacagatatctgagtcaggatcctgagcggcaactctgggctgcgtatcatgaccatttgtcccatgatctgatggctcactgccctggcacaacgcgaaagagccagtccatgtgttcgctgaacactgtcctgcacaacgcagctgcacctgctgcagcctatggcctaataaacatccacctgtactgttatcatcaaccacacccataatc

SEQ ID NO: 188227 - DNA, 392 bp, Glycine max
tgtagagcctaatgaagcaaaattgagtatctgaagctgctctcttatcaacgccttaagcgctcaatgtgactcattcacttagtgggtaaagcacgcttatcaccaggaagtatggagatctctggtacgtgatagtgcacttagcgcatgtcatgcgctaaactcgagattaccggcatactctctatactcggtattcacgcttacggcaaacgttgcgtaaaaaccaagctgaattgcacctatcacagaatgagacacacataggaaaaacactctgaaatttcagagaatatattctccttataaggcaccgaccaaaaaacgagaaccagcataggagtatatcttcctcattctcttctcattactgcttattaaaattatac

SEQ ID NO: 188228 - DNA, 364 bp, Glycine max
aagcttgaagaacatgggaagggacgttgtgtcttaggactccataccagtggcaacagttggtatgattatgattccaagaccaaagcctatttgaaggatctatgagattattcttaatcttcaaaagtgtctcatgctcacttgggatacacacactctctctgcatggtaagctgaacaaccagagctggactaagacgggaatattaatggaggaattcatgatcacacaaggatatatctcacaacctaattggataagtgcgttcttgcttctgcatattaaacttacttctttttttattatactgagcaagcgtaattctttctgtatccgtattacgaggccccctttttaata

SEQ ID NO: 188229 - DNA, 405 bp, Glycine max
acctatgaaactcagcggaagagtatcagcacaggacaattcactttatttgggcccaacggcttcctatttgagcttatctctttgatggagatctggctgcatgtgccatctccatctggattcagtccaaacaaacttatgatatggactgcctacacggagatcttagattctattcccatacggagtgagaagcactttctcacgatttgctttaacctccctacaatcatatacatgggagctgggactacataaaaatccattatctatccatactattgagctaagctaaatctcttatgggaaatttcctatcttcagcgagtggtgcggtagatcttttaagcattcattctctgaccctagaatataattttgatctgctcaaatattgctgga

SEQ ID NO: 188230 - DNA, 255 bp, Glycine max
tctcccccaattttctataaatatttttgagaagcgaagtacaaaagggtttagcccctaaggcacttctctctctttcgaatttgcttaggaaaattgttttcgtgaagaaaatccaagccgaggcgctttcgtaacgtttccgtgagtgatttcgcgaaggttttcgaccgttcttcgacattcttcattcgttcttcatcgttcttcaatcttcaacgggtaagtacctcaaaccaagcttttcaattcatt

SEQ ID NO: 188231 - DNA, 254 bp, Glycine max
tcatgaacgagtgcagaatgagctttttttgtcaatacagaagttaatgtacacataccagaatgagcacaagctttgaagatattccaagcttgaaactctttattctgaaccataccagaaatcacagcattccacatattcaatccagggttcttcaccccttgaaaaacacacatgggctcatacacaaacccgtaatccatataccctgaaatcatcgccccataagtaacctcgtccttctcacgcat

SEQ ID NO: 188232 - DNA, 247 bp, Glycine max
tgccacccagctcgcccaagcgagcatggtttcttcctccagaagcaacaaccttctggaggaatcttctggagggcccaagtaggcctggttgctatttgcacccccatttttactaagtacaccccctaccttttttttggggattcttttttcgtaaagttacggaaacttacgaatttcgtaacgatacttgttttctttccgtaatgttacggaaccttgcggattacataatcatcccctt

SEQ ID NO: 188233 - DNA, 245 bp, Glycine max
cgactaagcgaggagatatcagccttttttttaccatagctaatacccaaatcggttaagaatgagacaccccaaagagaaaatgtccggctgaacttccgctttatattactaaaaggtatattttggtgattacatgatcatgatatctcttaaagagagccaacgtggttaccgcacgaccgaatggacggaatttattaaaaccaaagtgatggaccatacaattcaaacgctcggtggaa

SEQ ID NO: 188234 - DNA, 265 bp, Glycine max
gccgcttggattagttataccttctctttttttttgactcccaccccatggttgtcgctccaaagataatgtcgaaccagcatctctcgttgcattctagtctctagcatgcccttccttatatttttacccactgctcacgtttggctttttaggaaaaagcacttaacaaaacgtgccccaagggatccatatcgcaccccatcctaatctacaacgaagggcgatcaagaggagacacaggaactgatgaaagccgacatgt

SEQ ID NO: 188235 - DNA, 252 bp, Glycine max
tggttaggtgaaggtcctcctgttttttgccctatttactattaggattagacaagttctacgataattgcattctttattttccgttttggaccttagttagcaactaattctgttagcttaattgctaactttctgtttttggctaggtttatagttagttacaactaactctagttagcttatgttctaaccataatttagcttgtggatatagctaatcttgtaaacattcagttgaattgataagaa

SEQ ID NO: 188236 - DNA, 294 bp, Glycine max
tgccgcctagattgtacaagcgatctttttttctctccccccgacaaaacatctcgcactttctgagtagaatacctcaagtggaactcccacaaacatcacacgatctgcttcatctcaatcacgacttatttttttggatccacaaatccccatctcttttaatttacgaaggtgacgcggctctaaataaaatactcgagatgcctctttacgttggttgaccaagacaacgtgggattttctttatccaagcctgataccgtaaaggcacctctaagagatattatatct

SEQ ID NO: 188237 - DNA, 243 bp, Glycine max
tgttcttgattttttctaagttcttttcaagctttgaacaatatacttggccttcatttaactatctctgggcttggtggccacgctcaacaaagtacttttgacacctactgtacgttgatttgaccaaggctgttatgggaatgttgcgacaatccttcaaaaccttattgatacattctaataggttggttgtcatgtggtcatatcaacgtccttctctatcataagccatcgtccatt

SEQ ID NO: 188238 - DNA, 257 bp, Glycine max
tccaccatatacaccatatactattttttaaacagtccccgtttgaagttttctttgcgaggggccacaatatatgtatcaaaattgcgccaactattagtctatagccttttcggacttgcagttgtaattacgtatagggtaagcacataagataaggctcatgatctttcaaaaaggacgcgtgggtaccttccaacaaattaatttatgtcatttttggtaatggaattggattaagttgaaggaagagaaat

SEQ ID NO: 188239 - DNA, 254 bp, Glycine max
tatctatgttcctttccgtccttgaacaatatgcttgatttcttagtaagtcacagcctccactagcatggagattaattcactaccaccgtttggttagaagtaaattgaagatcgaggagaatttcaccaaaaaaaaatagaggagaaaatttagaaggaaaaataggaaaaatcgaaaaaaagataaatatggaaaaaaaaaattataattttagataaatagaataagaaaaaaagaagtagaaactctt

SEQ ID NO: 188240 - DNA, 252 bp, Glycine max
tttgtgtgaaaggatgtgactctttttatttgaatttgaatttcaacgttcaaaggcactggtaatcgattaccaaaacattgtaatcgattacaactttttgaaaataattggaacgttgtaaattcaatttgaaaactttttcaaaacaattttgctactggtaattgattacaaaaatctggtaatcgattaccatagagtaaaaactctttggtaaaaggttttgtcaaaaactcatgtgctattcaa

SEQ ID NO: 188241 - DNA, 251 bp, Glycine max
ctcccgcttttagaacttgagcattttaagaatttttttttctctatgaatattttttcttcttggttttggggtaacttattgtaattatatttttttttgatatttgtattagcttttgaatcttagctaacctctttggccttaagagaaatccaatatttctcctacaaattctcattctcactattatttctattttactctttttttgttttttaaatttgattttgctttgtttggcaagattt

SEQ ID NO: 188242 - DNA, 261 bp, Glycine max
tattacaaaaagaaaatatttcattcttctcatttactctcatccgagaaaacatcattggagaagcttaaaactatggggctatgtaaaaaatggagctattttcttcttcctttagagatttttgtttgttcttaggtgaggtaatcccccctcttactttctttgagttcattttcattttcccttatgaatacactcaaaactccatgaaagtgttcatttgcaaggttttaaggtgttttctattggttttggggt

SEQ ID NO: 188243 - DNA, 268 bp, Glycine max
tataatactctgactcatatagtgaaaggaccacagcattttttttatgctagcctaacccaaagggtatcagcctgccctaccatggaccctaactgcccacccacggtgagttagaagacaattgaagggcccggataaattcggcattgaaatatgtaagaaaaaactttgaacgaaaaatacctaaactgcaacactcgatgcctatgcaaaaaaaaaattatcattttagcaaaatagaaattcaaacaaagaagtaaaactc

SEQ ID NO: 188244 - DNA, 251 bp, Glycine max
ttttctacaaccaaccttttctcttcaaccaaccatttctccccctttggcaacctaaaaaagccaaagaactaacagatagaacaaaggagtagaaagatataaagatcagagtataaagcataaccatccaaactcacaaacgagaaataatcaaatcagaatccaaagaacttaaaatgtcatcaaacacacaatgtcaaagcagaaaaagtctgaaatcttaataccacaagataaataaacaaagt

SEQ ID NO: 188245 - DNA, 247 bp, Glycine max
tggagaggatgcttcaatggatgttttataaagagggagagaaagagagaggggggagcacgaaattgaaggaagaaaaaaggagagaagttgaactttgagttgtgtctcacaagactctcattcatcaaagttacaaaagtgttacacatgcttttatttatagactaggtggcttccttgagaagctttcttgagaaaacttccttgagaagtttctttgagaaaacttccttgagaaactaga

SEQ ID NO: 188246 - DNA, 247 bp, Glycine max
tctacttatgtggcagggcgggctttcttcactttcttgtctccaacgcgagctttgaccaccgctcttccttcccgcgatgcttctcttcatatccgcctgagtgggcttatagcctaaaccatacttcccacgatttcctttggcatttatcaggctagttatgccgccgttgtctttgcctaaacccattccgggttcataaccgtttcccaacataactcgggccatcattactgctgcatcg

SEQ ID NO: 188247 - DNA, 280 bp, Glycine max
agacactcacaacacacgcgcttctatataagctgaaccattttatttttaaagacaagttgagttttattcagaaaattagagcttatctcttttatcttagagagagtgattctcctaaattcttgagtgattcaagaacaccctggctgtatcaaaggactttcacaacctttgtgtgttgccctcgctggaaagagtgattctttccttcctttcatcttcacccttgatctttcaaaccacaattccagaaaatccacctctgcccagaattatc

SEQ ID NO: 188248 - DNA, 276 bp, Glycine max
agacgctattaaacactacagcagcttatataatgtaccacacctttttttccacccatgcctaccccttcggcttacttggagcccacttaaactggcatttaacacggaatatactaaaagatgcatagaacagagtattaatgctaaccatacgaaatcccaacttaaaaattaccctttccttgatgccacacactgttgggtcgttcaactcacaatgttccactctgaatgctactcacatacctaaatcacgttaaaaatccaccaaga

SEQ ID NO: 188249 - DNA, 253 bp, Glycine max
tagccacacaactcaagaggctattttcacactaacgggaatatatcttggtataatcataatcacacatagtacagaaaatcaaagcaattttcagagtcctacatcttccaaaacaataacagctcaaacatacaaatctaaaaccaaatacaagggaaacagaacatcgaaaaatacgatagctctacctctaattcaaccccaagcactactaatccagaaaacaatgaacaaaaacaggagaacgatc

SEQ ID NO: 188250 - DNA, 252 bp, Glycine max
tgcctcaaagaggtccaggaaggttttttgtggccgaaggaactagttccgccccggagtacgacagtcaccgctttaggagcgttgtacaccagcagcgctttgaagccatcaagggatggtcgtttctccgggagcgacgcgtccagctcagggacgacgagtatactgattttcaggaggaaatagggcgccggcggtgggcaccactggttactcctatggccaagattgatccagaaatagtccttg

SEQ ID NO: 188251 - DNA, 283 bp, Glycine max
  unsure (1)..(283): unsure at all n locations
tatgttaatagtgtgttagaagttctgtttcatatgccagactaacgaatatttccttcaaatccttcaatnttgatagctctcacaataagatgcttgctcattggataaacttcattaattcaacaaacacttgcctctatcttatgtaagctaagctctatccttatctgatggtgtccttcaagtgattattggcaaccatatggatgggctgaagaacttattagcacttttagactggttgacatgtatttcaaagtgaatgcatcttgagtctttt

SEQ ID NO: 188252 - DNA, 250 bp, Glycine max
  unsure (1)..(250): unsure at all n locations
gcagcaggaagagaaggagaaacttnggattatttaaccaacacgaagaaaaagacaggaaaaagaaagaaattgcaaccaaagcctcatcaactatccaagaagaaagagacagaaaaaaaccgaaggaaacataaaaaaatgatgaacttaagcaccacggaaagaaatacaacaagtttcgaaggaacaaaggaaatcaaagaagaacaaaattcaatccaaagaaaaaaggaaaaaactgtccaac

SEQ ID NO: 188253 - DNA, 284 bp, Glycine max
gtgacgctataccacactcaagcttctatgcaatatagagctttgtttttttttttgctgcaaatttctggttattataacagctactattttctaaaccaaaaaaactatattatacactatcaaattcaaacaattttacatccaatatgttaatcaagttggtaataaaaaaataatatggggcttacgcatgggtcttcgcatttggatgtatacgcttgtgatcctcaaccatcatgccaagtaactcatcatcatcttgtactctataagccacacag

SEQ ID NO: 188254 - DNA, 276 bp, Glycine max
gcgtcttgactacgcgagttgaagccttttcttttttccacttgtaactattcacccactctcgattacagaatgacgaaagtcccaaagaagaaaacgtcccgattcgattcccccgccattattcttacgtaaaaaaacgatgttcccctgatatatatatattatctctttatccactttttgcctttccatccgtggttacgggacgtaccgaacggtcacgaattcattttaaccgaagttaccggataatacaattcaaaccatcggtgc

SEQ ID NO: 188255 - DNA, 248 bp, Glycine max
tgcaactttaaaattaaaaaattttatttaccaaccaataataaaaatgcaaagataatggagggagcagggggatgggaaaaagatgaactcttttgccaaacaaaacatatggctcaccatctcatggtcaaggataaaaaactcacatgtatgtttcatacttaaagattagagtttaattttcatataccttcagtataaaagattttaaactttcagctaactgaaaaacacgttagatatga

SEQ ID NO: 188256 - DNA, 247 bp, Glycine max
tttatccatggcttcctatggtggttagcttgttcttgactcatcttctccttgaagtggtgtctctaatcatctttcttctttctccattttgttgtcattgatcttcaagaagcaaaggactccattgatgaataagatccaaggcctacaagctctagatggaactacatcatgtggtatcaagagcatcttcgtctaagtgatgttcttttgcttcctctatctttttgtttggtcaattccc

SEQ ID NO: 188257 - DNA, 248 bp, Glycine max
tggcgtattgaagaaaattttcattttttaagtattagaaattgagataaaggttggttgaaggttgtttgtgctaaagattatcaactggatgtaggctaataatgtttacttttgcatattagtcattaatgatttatgctttgcacaatcaaggccttttatagcatttgtatttaagcaactcgttgtaacacttatttgtgtgcataattgaaatacaacatatcagtttttgctcctttctc

SEQ ID NO: 188258 - DNA, 260 bp, Glycine max
tccatcaagtgatatcagagctctttagcttcaagtaggtgctccttaaacctccattaattttttgctttaccttctcttccattgttgtttcttcatttttctccatgtatctcctcacatgtcttgtgataaatgtttttaacatgattctttagagtttccaccgattaaacttgctatagaagctagatttgattttctatggttcaaatttcttgttcttgttcttaaaccatgaattgtgttgagtttaggtt

SEQ ID NO: 188259 - DNA, 246 bp, Glycine max
tcggaagaaagtgatgaggtgcatttgctaaaggcagagcttgaaagagcccgggtagtcgaagagaagttcaagtccatagccatcaaagtctgaaaagagtatgatgaactaagggacgtcaatatggccaccgatgaagccttggaatgagaaaccaataaggcccgaaaggaagaacacgaccaaaacaagttttgaggggctttatagggcagcaatagtgagctcaaactccgaagaggt

SEQ ID NO: 188260 - DNA, 250 bp, Glycine max
tgcttctacaatctccccctttttgatgatgacaactttgaaatcaagaaatacacacacacaatttttcctagtcgatcactcacataaatttccattctccccctttgtttttgagtttatgcttcatttgaaattaagttagataattacttatgtgtgttcttgatttaatctctatttctctccccctttggcatcaacaaaaagccaaagtgcgtaacaagtatgaaacatacatatactacta

SEQ ID NO: 188261 - DNA, 250 bp, Glycine max
tctcaagcaagcttccatcaagttttttcagagtacaagagcttcaagtaggtgctccttaaaattccattaattttcagctttaccttctcctccattgttgtttcttcatttttttctccatgcatctcagatcaaggccgtacccgaatcaaataaacattaaaatgtagtaactaggaagtgatcctaggtcgtttcccaacgagcaatgataaaccaaatgttcataatagatagtaggaaatag

SEQ ID NO: 188262 - DNA, 249 bp, Glycine max
tataattaagaataaataaatcctttttgtgtttgcgagcctttttgtgctatcataatgtcctttatcctttttattttcattttcataacttcagtaaattgcctttccaatccaaccattaatttttttttccttataataagtacaaaaggttgaaagttgactagcgattggaagtgtactccgtgctcaatggttaaacatcattggacgaataatacattacactaattttaaaattttcga

SEQ ID NO: 188263 - DNA, 246 bp, Glycine max
cttttgggaggatcaacaagtgctctttgaatcctcccatgctcatgccaccaaatcctgaaaggcctctcattttgtacatgacaatcttacacgagtccattgggtgtatgctggggcgacataattaaaatcactataaagaaatccctgtacttatcattaccaataacttccactgtcgctcacagaattactccttgctcgaaagaacgtgatgggctttagtattgccatgccaataca

SEQ ID NO: 188264 - DNA, 249 bp, Glycine max
tgaaaaaatcattctacttatatctttttattcatatgaggaagcaaaagtgatggttcggaattgataatagtggttacagctaaggtactactttgtccaaaggaaccttccctttgtgtggatatgtttgaggttataggaaactgttgttgaatattaaagcaacatgattaattaacaattccagcactagaggggatgtactcttgcatgccagcctgtgatatatcatgtataactactcaa

SEQ ID NO: 188265 - DNA, 248 bp, Glycine max
tcacaaagaaaatcatattgatttttttttctttggaagtcctcttacgaggctatgctttttaagctttgagattaaccttaagctagcatgaccaagcttcttatgccatatgcaatgactctctttgactgagagtaagcacgacaccttttgactagacagatcaccaagtttaatcttatagaaatttccttgtctcttagcatagaataatgaagattggttcttattatggacgatacaca

SEQ ID NO: 188266 - DNA, 245 bp, Glycine max
taaggatgaaaatagtagcgatttttattgtggaggcagtgtgtggttttgtggggtggggcgaatcaaagggaaactttttggggagatctatgagaatcagggcaattatagatgttacaaaactgttacgaaggagcacggtgattaagaatgggaataaggatcccattagggttgctttcaaatatgaaagactatgtaacttatgttatgattgtgggagccttaaccaccaactaaag

SEQ ID NO: 188267 - DNA, 246 bp, Glycine max
tgtgttgcttccaagagtgagatttttttttggaagaacaaacggctgcattttgctttatatcaaactctgaaaaaggctttgtacaaacctgctgcattctttaagggcatactgttttcactatgcgaggtattttgcttgtttctatgttagtttttgacattccaaattaataattggtggatattttcttaggttctatttgtggcattatattaattcttcaattatggtatattttgc

SEQ ID NO: 188268 - DNA, 258 bp, Glycine max
tcctcggggccattcctgcgaatgtttacatttggaaagttagttcacaagaaatataacaatcattacaaacaagggccaaacaacacttctcatggcacgagtgtcaacatgcactttataaaataatcatattggggtcatgctattttatgacacatacgtatttgcacacataaaaattttgtatgaagcattttacgacacctatccatgtacatatttttttgacaaaccttttcatgctacatcctatat

SEQ ID NO: 188269 - DNA, 244 bp, Glycine max
tgtgtcaggcgtctacttgaacttttacaaaaagacataactcattatgaataatagtggaaaatcaaactagaggctgaagagaggaagaaagttggatcaagatagaaagctaaagaggatgttgccaaggttcatcaagtctgagttgatcttgagcaatctagcacaagagaaacataacaggaaatggatgcatccattcttgatactactattaaaaaacctatccatgagtccactc

SEQ ID NO: 188270 - DNA, 248 bp, Glycine max
tcattaagaggtttcctccagaatctttttttttaggctactaacacactccaaacatcttctcaaagatcccaacggtcagatcatggaaaattgtcttgtgaagttgcagaccaaatttctagaaaatccaatggttaacgaacgctgggcatcgtttttaccgaggcagcttcatgtagctttctctagaagcttcattaacaggcttcctccaaaagcttcctaacggcttcttgaataaactt

SEQ ID NO: 188271 - DNA, 245 bp, Glycine max
tatagtatttttagaagctcagttttttttttctcagaggaaactattgcggaatctgaggctgctgtggaatctaagacactattattgcctgacttgcctccacaaattttctcgggaacaggcacagggtacgaaattgtatgccaagggtttaattgggaatctcataaatctggaagatggtatatggagcttaaagagaaagctgcataactggcatcatttggctttactgtgatatg

SEQ ID NO: 188272 - DNA, 279 bp, Glycine max
  unsure (1)..(279): unsure at all n locations
nctatggaggaagggggaacgggctaaatattttaaaaatgtagcaacaaacgaacgcgtcaatattatgggcttaattgactcctcaacgtgtcaaggacttctagangagttctcttgtccatcctattgtaaacaattggaggaagcggctaaaatgtgctaccgttgtatttggctaaggaatatcttcaaagaaaaacgtcataatcatatcatatatataataatatactatactatataatagtaatatataatactataaaccaaattata

SEQ ID NO: 188273 - DNA, 249 bp, Glycine max
tcagttttcaattatgagcgtcttattttttacgggacacaatcggacatccgagtgaaattttattgtcatttgaattcgctcagtgtaacagttttcaattacgagggtctcgatatatcacgggactgaatcggacatccgattcaaaagttattgccgcttgaatttgctcacagctttaatttacaattacgagcgtctcgatatatttcgagactatatcggacattccagttaaaagttatt

SEQ ID NO: 188274 - DNA, 259 bp, Glycine max
tccaattctatatgcttgctaatttgtattccagaacaaatgacaaatcggtttcttattagctataatacctatcattgttatttcttaatagtgttgtttccctatgatgtcgttatcataattgacaaatagcatgcaggttacacgtatgaaaagtgttgcatcaagtggcctcaaaataattaagaaggggggggttgaaataattattcctaaacctttactaattaaaaattactcttttaaggcttttact

SEQ ID NO: 188275 - DNA, 249 bp, Glycine max
  unsure (1)..(249): unsure at all n locations
cttaagtatgaaactaattgaaattttcttnnnnnnatttatatgaaggtaataagccacttctatgagtctaaataagctaatcagaattccctccaagtgtatccaattatactaaaaagaatgaccagataactagaatttgtctacatctgaaatatgactgtcgaactattgttttccaataatctgaagtaaagttgtcgtaatagtaagatattaaacaggaaaggagccaaattctatttg

SEQ ID NO: 188276 - DNA, 249 bp, Glycine max
tgatcaaaaaaacatctaatcattttagtccactcaattcatacatgatgtaagctccattggagcatgtaggcctaggatcttcttcatcaatggattcctttgctacttggaagatgaatagcagcagaatggagaaggaagagatagaggagatgccacttcaaggagaagacgagtctagaagaagctcaccaccataggaggtcatggataagagcttggaggaaaaaggagatgagtgaaggg

SEQ ID NO: 188277 - DNA, 248 bp, Glycine max
taaacaaattcaaagttatcctgggtaatcaggattgccaattggaattgggcttgaggctcatttctctggtccgggtattaactttccttatttgagagcttccatcgattatcttgctgctactcgtttgccaatttggattacagaactagatgttgcaagccagcctaggcaggtaaagttcaattatttttcatgcaacaatttgatgatgttgttggcagaatagcttattcaccgcaagt

SEQ ID NO: 188278 - DNA, 258 bp, Glycine max
tgaggttattccttaagtaaaggattttttggatgagggtttggttcataagagcttaaatccttgtgctttgttagtgcctaaaatatgtattatgaggcaccaaatccctatgataggtggtatgatgaatgtgttgagtggtggaacccttttttgtaaaatcacctatgcatccaacatcttcatgatccacatacatagggactcattaggtaggtttgttcttatttttagtttcaatacaaacttaggtgc

SEQ ID NO: 188279 - DNA, 241 bp, Glycine max
  unsure (1)..(241): unsure at all n locations
tctacttatgtggcagggcttgtctttctnnattttcttgtctccaacgctagctctgaccactgtccttncttcccgcgaagcttcttttcatgtccgcctgagtgggcttataacctaaaccatacttcccacgaattccttgggtttttatcaggctagtcatgccgccattgtctttgcctaaacccatcccgggttcataaccgttccccaacataactcgggccatcattaccgc

SEQ ID NO: 188280 - DNA, 247 bp, Glycine max
tggtgttttgaagaaaatttttatggttaagaataagaaatcgagataaaggttggttgaaggttgtttgtgctaaaaattaacaactggatgtacgctaataatgtatacttttgcatattagtcattaatgatttatgctttgcacaataaaagccttttatagcatttgtatttaaacaaatcgttgtaacacttatttgagtgcataattgaaatacaacatataagtttttgctgctttctc

SEQ ID NO: 188281 - DNA, 247 bp, Glycine max
tgaatcggacctcagtgtgaaaagttatgaccattttaatttcacgagagcttccgttgttcattttcgagcgtctctatatgtgaggcaccttaatctaacatcagtgtgaaaagttatgaccatttgaatttctctagagctttcgttgttcaattacgagcctctcgacatattatgcgcccgattcggacatccgtgtgaaacgttatggccatttgaattgctcgagagtttccgatgttga

SEQ ID NO: 188282 - DNA, 248 bp, Glycine max
tcaacattcttctattagcatgttttgcgtcttacgccaccaatttcaaaagtactctctcaattgccaacttttaataaagaacagtttccaacttatattaaagaataaaatctcaaaggataggattcgtatgcatccaatataaagagatactcttaatttgtaatcactacatgtgtatttaaagttatttttcagtataatttatactgaattagaaaaatattaaattgaaccgaactaaa

SEQ ID NO: 188283 - DNA, 250 bp, Glycine max
tgacacactgactgctactatatttttttatgacacttaattcacaaccattggtctttctcatcatcttccaaatgccccatataatatatttcttttcagcctcaaacttatcttaacttgttcaataaatggggcgcatgattagggcacttaaccctgaatctgaacgatagatacatggctaatgaacatggattttattggtttgaatggatttctttccattatacagcatcaactaatcttt

SEQ ID NO: 188284 - DNA, 250 bp, Glycine max
tcatctggagaaaaaactgtccttttttgttgccatagcctttcatcagacaacgaaaggtttcattcaggttgtgatactcactcatcaataagtgaaacagaaacattgcgtctctctcctacaaattcaatctcttcaacaaatgaatttccttgcccccctcagaattcaactacaaaggtaaaactaaaacctaaccaatcgcaatcaccatgcattccgcaacaagataaacacaagaagattc

SEQ ID NO: 188285 - DNA, 261 bp, Glycine max
tcagaattgagaaggaaaaaggatttttttttcaaccatatttttagccggttaaaataaataacatagtttaatgttttttaaaaatctgatggaatacatcacttaattattaacttttcttatatatgtatgaatttatatttatataaaatattaaattaggagaatttacttttttcatatttaaaaaatgaaatatatatatatatatatatatatatatatatatatatatatatatataaattttaaaatcac

SEQ ID NO: 188286 - DNA, 243 bp, Glycine max
tcaaattactttgaaaacattttatattttacttgcctactagttaatggttataatactaattcaatgcgaatatggttcactaaaaccatattaacaagtttacttttatttgtttaatctaattaaacaaacttcaatgccaattgatgatataaaagaacaccataccttgaataagtttaagatatgtagagataattaaaatggtagttatgtcctcaaatactacatctaatgatt

SEQ ID NO: 188287 - DNA, 246 bp, Glycine max
tgaaatttgcaccttttttgctgcattttctggtcacacaacctcacccttgcttatttctggttgagtgatcttctataacctgattacacgagcatctttcactcggaagaccaaatgacaatattttttgggttttatggttttcattcactatttgcttatatacaatttatcactttgcctatgttctctctaagattccatggtattgcacctcatctctagtgtagaatccatatctgg

SEQ ID NO: 188288 - DNA, 250 bp, Glycine max
tcacatacttcctgcacttaaaatttttaaagcaacagcctactttcatttcgaaaagggtaatttcggtaatgaaaagaggtgttccttgagttttttggaatacaagaagaaataccttaaaattccctcaaccaaaagggcatttggacattccttttgggttttgatgatgtacttggcctgctaacaaaaacccacctcaattgttataaggcaattgcttgctgcacctgttttaggcttcccg

SEQ ID NO: 188289 - DNA, 250 bp, Glycine max
tctagccaaatggacttaccttgttttaatttctttgatagcccctttgagcctatgttcccctttgtttgttttgaagctcattacaagccttaagtgaaaaaccatgatctcaccttaaccttaaggaattttggagctttggaattgttttgggaataagtgtggggggggttttgttggataacatatttcgttggctatgcttcatgatgtattttgggccatacttgatgtacattgtatactg

SEQ ID NO: 188290 - DNA, 263 bp, Glycine max
  unsure (1)..(263): unsure at all n locations
ctcgaaaagaattatctcgacgntttgtatttttggaaacaggaccaacacatgaataagagaatgtggccacgtggcacaagcacattgatgccttgttgacaatatcgtaagttccactcgcttcccatgactaacctgccaaaataatgaatcttcaaacttcctaagaaggaacatgcatgccggtgagataaacaactccttgcttgaacagcttgctgagctaagaatagggaatcccatcgcctaaggcatcacat

SEQ ID NO: 188291 - DNA, 242 bp, Glycine max
ttgcggatttggtcttcgtttgttttaggatcgatgtgggtccgaaaagaggcaaatttgatcatcctactaggacgactgagaaaactggggcaaatgaagagggtgagaaagagggagaaacccatgctgtgactgtcattcctatacggccaagtttcccaccaaacccaacaatgtcattactcagtcaataacaaacctcttccttacccaccacctagttatccacaaaggccatc

SEQ ID NO: 188292 - DNA, 246 bp, Glycine max
ttggcaaatcaaggacaattgtttttattcattgatatattactgctgctggtgtttacgatcatactctttccaaatatggacagactattggatatagcagcgattgacacttttcttgcttatcaccacagcaaggaaagcccggtcgttgcttttttacccgatgactatgacacattcaacctgagatgcgaaaaaagcagtgcgggaattgtttgttgtacacccgctctttatgtatgg

SEQ ID NO: 188293 - DNA, 247 bp, Glycine max
tgtcgctggagctgacccattaattgccctgactcctttaaactggtggtccctaggctcttgaccttgacttgatagaactctttttaagttaaggcatttgacttgatcccatgttttactaaagtgaacaaaaatcggtgcgaatcaaaactctgacatctatcatgggtggaatggatgaatgcatgaagaaatgcatatggcacaaatgcaatttatgaatacgggagcccgggaaattgtc

SEQ ID NO: 188294 - DNA, 248 bp, Glycine max
ttttctcatatgaatgccacatacatgcattatatatgcatgcactttactaacggcggaaatcagaaaaaagaaaaaataaaggaaaaggcagcagaactactaatgaaactaaaattgggaccccaaccccccagttatcatcaaccaaaatttaatgtgttgtaaagtgtcattcataacattttgtgagtgattggagattgcgtttaatttttttctagacctacatatgtgctactgtactc

SEQ ID NO: 188295 - DNA, 256 bp, Glycine max
tatcgcctacgttaaaacagcccatattttctatggcataccaggtcatatactgcctcgaaacaaatcaggacacttggcaacgaaaagattcccagttactagacaaaccgtcgtaaagacaactatacaaacttaaacactaagtacatcccctcaagaaatacaaagcgtcatgagagctcccagaagccccgcaactcgaaaaacacaggggagagcttgaaagagcgagggaaacaaaaaaccatataaa

SEQ ID NO: 188296 - DNA, 279 bp, Glycine max
  unsure (1)..(279): unsure at all n locations
tgacgacactcaatactacagcttccacccggattggccgcaaaanttttttttcatgcgggatactgggggtcaaattatccgcttgcgtatccctcggtgagacacacccttcttgcgacgggaagaccaaatcaactcctaaggcccctttgctgtcttgagacttaaacactcctgattgctgacagagaaatgccatttttctttcctagttagagcagtgttttctttaatcaaatctttcttatattttgggttcatgaaggaaaaccctat

SEQ ID NO: 188297 - DNA, 261 bp, Glycine max
tcgatctcaggtgacatggctagtctcattctggattgaggataaaattatggctcatatgtagtggaaacttgagcatttaagatccttataaagaaggttgagatggactatagagcaatggtgccggataggatgagatctttgcctagtttgtggactaatatagccagaaagataaggtggagggttcgatggtctaattgagcttcttaatggaggagaagacaatgtaaatgatgcaccaatggtattatcaac

SEQ ID NO: 188298 - DNA, 251 bp, Glycine max
tgtcccttgagcagacccacaaacttgttttgactccccgcaaacagggggctccttaggcgtcttgaccttgacctgatacaactctttttaagttaaggcattcgacttgatcccatgttttactaaagtgaacaaaaatcggtgcgaatgcaaaactctgacatctatcatgggtggaatggatgaatgcatgaagaaatgcatatggcacaaatgcaatttatgaatacgggagcccgggaaattgc

SEQ ID NO: 188299 - DNA, 246 bp, Glycine max
taaaagaatttgaggaaaaaaaatgtttatttatctcttgccaggatctccttttaccaatttgactcaacacgaaaacatccctttgagctcttaatctaatttaactccaaatattttaggattgttggatccaaataggtcaaagtcttgtccacaccattcgatttcaaatcaatgggccaccatcaatcgccaaagtttacaaatagaattaactatgtttttatgaattttttactttta

SEQ ID NO: 188300 - DNA, 251 bp, Glycine max
tcccatatgcttcacagtatcatgtatctattgcatagttggcaatttactcaaacgcctggctctagacttttggaaccagcaaatttcctgttcagctagaacctactcataatcaccctatattctcttatattcaacatccatctcattattaaaggagaaatttcattttctatccaagttgtccaatttcttttttagcaagcttttccttttccttttccttatacatctaaaaacctttttat

SEQ ID NO: 188301 - DNA, 256 bp, Glycine max
tatctcctccacctagccagttttactcttttactaacaagagtgcaacacatgttcatgtggtgcatcttgaggcttttcgcgacctgggtcagagtgggggctatgcctggggagctgttgtgctggttcatatgtatgactagttagatgaagcttctaggaccacgacacggcagattggggggtacctcactttattacaggtaaattttgtgttcgtgttacattggattattatgtaaacatgttttta

SEQ ID NO: 188302 - DNA, 244 bp, Glycine max
tgaggatacactgaatcattttttgtcttatgtccatgtccaattataggagaatagagttatccatcaagaacctggagatacaaatgggacaattagccaaacaagtggttgaaagacccattaatagctttggagccaacacagagaagaacccgaaggaggaatgcagggcagtgttaactagaagctagaggagagcgcaagaagaagaagagaaagctgaagaagaccagtctgagga

SEQ ID NO: 188303 - DNA, 251 bp, Glycine max
ttggagcttgaagaagttttttttttttacatgcccaactctttgagtggaacttgtattgattgttgcatcttagtttctatcttttcatatgtacatcatgcatcatcatgtacaggtggggatattgtttagtgcataaaactatttattttaatcgattatacaagtgtttggagcttgtagagattctagtttcggtttaatcgattaccaattaaccgtaatcgattacatagtttagatcaaac

SEQ ID NO: 188304 - DNA, 247 bp, Glycine max
taaggctgtcaactacgaaaattgttgataatcgactaaagcaaaattcataggacttttgtctgaaaaaatattttcagtattcatttcttacttttataaataattacaaaaattatcattttattttattttgtttttgtttttatagatttatatgagaaatgtttgcaagcaataaaatgatgttttcatcgtttcttgtaaaaatctttttaaaaaaaatagaaataggaaacattttatc

SEQ ID NO: 188305 - DNA, 247 bp, Glycine max
tcggccctttcatcaatgttcagtctctaacaatcttcatcgcaaattggctaaacatttttttaggccttttcagataattgaacgtgtaggtcaggtggcttaccgccttcacctaccaaccgcaacccaacttcataatgtttttcattgccccctcctctgggcccatcatggtccattacccactgaaccaaatccttggccactcacgaccatcaacaatcagctggtgccacagcccctc

SEQ ID NO: 188306 - DNA, 253 bp, Glycine max
cgctgcattggttaattagatcttattattggaccggatagagtattaattattgtatttattaaatataatatatttattaaatgtattaattttaaaataatatgtatttattaaaaatctatttttcgaatctcatcaatcattttttcctcaattaatgcaattttgcatcatctatacttcagtttccaaaatttcatgtggtttcaagaagaccgattatttgcttttatattgataaataaaatat

SEQ ID NO: 188307 - DNA, 259 bp, Glycine max
tattagctttgtcctctgtgagggccgttttttaagaaccatgtcatcgccaaggagtctggtacatatgttataccctaactcccatgatacgcacttctccgtcatctccaaagacatatacttcttcagtctaccaacccatgccccattgcaccagaaatcacgaccttcatgaggtgtgatggtaatacgtggagtgactcctacaccactcatgtttcctcccgaacctcctctctttgtcaccacctctgca

SEQ ID NO: 188308 - DNA, 257 bp, Glycine max
tttggaaggatcaagaagtgttttatgaatcctcccatgcttatgccaccagtacctggaaggcctctcattttgtacatgacaatcttagacgagtcaatggggtgtatgctggggcaacatgacgaatccgggaagaaagagcgcgctgtttactacctaagtaagaagttcacgacctgtgaaatgaattactccttgctcgaaagaacgtgttgtgctttagtatgggcatcccatcgcctaaggcagtacat

SEQ ID NO: 188309 - DNA, 244 bp, Glycine max
  unsure (1)..(244): unsure at all n locations
tgacaatattgaatatattngttttttttgcacctagtgccaagccataaacagtacaaaaccatagaatgaatggataatgtaataattgatcccatgttgtacatcatctgggattcaacttttcatccaatgatatgtgcaggatttttataaaaagaaatgttttatatatttttgttccagaaacaatttttttttatatatttatcatttatgactccactcatgtaacatacacttt

SEQ ID NO: 188310 - DNA, 280 bp, Glycine max
acgctagctacgggacactatataacaccgacgcatgatagtgtgggccccactatcttttcttagtcaaaaactgtgaatgtgtctactattattgtgctcatatgtttcaccgtcatcgaggcgccacttgatccgcctgaattctccacctttgggcatattgatgcgaaagaatctagcccacatcttgcacatgttatgtagaggcatcctatccgatgccagcatactgacactgtctaacgaaagcaaccatgaggtccttccaagaatggac

SEQ ID NO: 188311 - DNA, 254 bp, Glycine max
taggtatcagattttcattactttttttcgtgctggcttatgaatcctcgtgattgttttggtttttggtagatggtggaaacagaagcaggttaattatcagtaagatggtattgatatgaataagtatcttaacttttgcagtaattatcataaaaatcatactatcatgatttttaattagttaatgacataagactttttatattaacagtgtattaccaccattaaatactttattcaataaacttggt

SEQ ID NO: 188312 - DNA, 255 bp, Glycine max
ttgagccaattcaaacgacaattattttttactcggatgtctgattgagtcccgtcatatatcgagacgctcgaaattgaatgttgaagctctgagccaattcaggcgacaatatctttttactcggatgtctcattgagtcctttaatataacgagacgctcaaaattgaatgttgaacctctgagcaaattcaaacgacaataatttttttctcggatgtttgattgagtcctgtaatatatcgagacgctcg

SEQ ID NO: 188313 - DNA, 256 bp, Glycine max
tatctaacattaaggcctattttttttgaatgaaaataaatgtaataactctatacactatagagtgtttgattaccgaaccttaactactactgaaaattatattacaacaacctaaatttgtaaacattatcttgggtattttttatgaggacacatgtattttatacggaagaaaatattgtgagttacataaaaaattattattataagagataaaagcttctctttgaatatttagcatataaatgtacac

SEQ ID NO: 188314 - DNA, 243 bp, Glycine max
tgttgtttcctcaaagatgaagttttgtattatttccttgtttctgtttttgctttcttccgggttttggggtatggtattctggaaaattgtaaaaggtaattaaattcctatactttatgcttatgctgtagaatgattagttttgaaaatataagaggtttttgtttttgctgtcttctgggttcagggtatatatagcattctgaaaaaagttagtagacatgttgccaagatgtatag

SEQ ID NO: 188315 - DNA, 254 bp, Glycine max
ttaattacgtctgactctttttttttttccaactcagattccctcattaagttcaacacttgcatgccttgagtcaactcatcccctgcaaacttttccttcaaatagttccaaatcaattttgttgttttgtgggtcatgattttagtaaagaagaatgtttgtgaaacacaacaaataggcatgatgtaacattctatttttcataaaataaattaaaaatgattttatttaaaataaatagaattttagga

SEQ ID NO: 188316 - DNA, 367 bp, Glycine max
tcagtgcgtctcttatctttgcaatcttacagaggaggagtctggaagcacggtttcatcgacatggcactgttacaatgaggatctggagctgttccattctcgggcttgtcaggatccacggttacaaccctccaagcccctgagctacgtagccgaaagtataccatgagctcttgacaacaagtcggtcaagctcaaaggtacattaggcccaacattatggttggcatgatttttctgtagaaatgccctcatggcttggctggaaatgccaaaactatcctgaacagatgatgtccaaaaacattttctaccatgtcaaataaccatactcaacgaagcgtcaccacactttgacttctgc

SEQ ID NO: 188317 - DNA, 439 bp, Glycine max
  unsure (1)..(439): unsure at all n locations
gcttgaatcgataccatatactgtatctttcttctacgatnttagaaaaattctcacagtcacatttttatgggttctggatggctatcaaggcctatatatatgtgacttgagacatgaatttgcaagagtttttcagaacaaaaaggtcttatcctcttataaagcaaaatcatttattctcttacaaattccttggccaaattacttgtgattcaataaggaattatttgagtgctcaaattgttcaatctatctctttcaagagagatttcttcttttcttcttcttcattctgaaaaagggattaagagaccgagggtctcttgttctgaaagaattctaaacacaaaggaagggttgtccttgtgtgtttagaacttgtaaaagggaattacaagatagtggaactctcaagcgggttgcttgnggactggac

SEQ ID NO: 188318 - DNA, 353 bp, Glycine max
  unsure (1)..(353): unsure at all n locations
ataataggaggagaagcgacgtgtttgttgtgtttnccccttaagcacttctctctctttcgaatttgcttggaaaaatcgcttccgtgaagaatatctaagccgaggcgcttcgaaaatgtttacgtaacgttatcataaggaatttctcgaaagtttccaccgttcttcgacgttcttgattcgatcttcatcgttcttcgatcttcaacgggtgagtacctcgaaccaagctcttcaattcattctatgtacccatggtggtccacattgtgtgtcgtgtatttttattctcgggacatccactttgtatacccccttgtgacgtgcttacgccatcttattttagtcat

SEQ ID NO: 188319 - DNA, 377 bp, Glycine max
  unsure (1)..(377): unsure at all n locations
aaaaaggaaaaaaaagaaagacctcggagggcggcatgttatgatcctaggaagcataaattattcatagagagccaacatattttttggaaacaagggactgacgctaagaagttattttccaaaataaccgaaatgaaaaccgatggattcgttgaaccaatgaaagaacataatttggaaatattgggtctacttgtgtaaatcccaagccttagtatcacaatgccataaactggatgcttgagtacccacctagctgtagccatgactaatnttgcacgttgtcccaaatcatcattgacgcatacctcgtggaaaaatatggaaattaacccgggaccgacacctgacacacgatgatgcaagctcattga

SEQ ID NO: 188320 - DNA, 486 bp, Glycine max
  unsure (1)..(486): unsure at all n locations
tactaagcttgtgcctcttgataacccttttactngtggaatctttctcttatcttctagtcaggacaatgtgcaacacatggagntccaaaatattttggtctcgtgacttctaaaatnttacctataaagatcaaaatcaataaactcgtatgagtagtgtaacaattaaaagttataactataaaaaaaaaaccttcattaagcatgattgaattctcacccgccaacacataattacttccattgtccgtcaccacttgaataacattcttttcttcaatctcctcaacaaagctatccaaaagctcaaagatcttctgaccagtcttcatgtattcagaagcatccacactcctcacaaactgtgttcccaatgaacaatttaccaaaaagttatatcaaggtctattctgtctatccatccaaccatctgacataattgaacatccatatttgattcgctcctcctcatgacccctcaat

SEQ ID NO: 188321 - DNA, 391 bp, Glycine max
  unsure (1)..(391): unsure at all n locations
accttggctttgagactgaggataattacactgtgtgccttttgcagtagtgctttcttatccccatcagccatcatcttttcaagtttggcttctccatcaagtgcttccaccaagccctgctgaacaagaagagctctcatcttcaatcgccataacccaaaatcattttgccctgtgaatttttcaacctcatacttggccgagtccatttcttgaatcgaactcaaaaatcgctccacgctcaccgcaccaatttgttgtgccaagatcagattttagttcacaaaagaatgagtttcttgtatgaacaagaataagcaaaatgcagaaaagaanaacaaaatgaaccaacactgcactgtgctcacagcagccactttattcaatc

SEQ ID NO: 188322 - DNA, 411 bp, Glycine max
  unsure (1)..(411): unsure at all n locations
accctaattcgtccgagacctttgcttgattacatgcgacctttctttggtccttgtgagggtgctggcacccatcattaggcaatttgtgaaattccaggacatgccggaaaaccaaaaaatattgatgcacaatccgtaagtttccgtgacacaccgaatatcaaatggaagcatcgttgcataattaagtgagattctgtaacattccgtaagtcaaaaagggggtgaatatgtaatccgcaaggttccgtaacattacggaaagaaaacaagtatcgttacgagactcgtaagtttccgtaactttacgaanaaagaatcaccaaanaagggtaggggggtgaacttatcaagataggggtggtaatagcaattcaaatctaggcccttncagaacattttggaagt

SEQ ID NO: 188323 - DNA, 414 bp, Glycine max
  unsure (1)..(414): unsure at all n locations
cttcaaagttctaacaacacgatgcaatgatgcttttttcatgattcatatgccttataactagtcaaacacgatttggaatactactatttatcaactgtactgtacacttaaatttctataaatagcacacacattgtttccctatctgcacagacaaactaaatctaacatagttttactcggaggaacaagagaatttcaaagagtgagagatggagaacttccctgtgatcaacttggagaatatcaatggtgaggagagaaagactatgttggaccaaattcaacatgcttgtcagaattggggaatttttgaggtaacccacaaccacaaacttctttacaaacctttgtatactcactcaagttattatatctatacacttgccctaaaatnttttaatcttgtca

SEQ ID NO: 188324 - DNA, 472 bp, Glycine max
  unsure (1)..(472): unsure at all n locations
gcttcatctgtcttctcttttgtaagaaagcttcttcatatggtaagctaaatcctctggtggatcttccctgtaggtacctgatgtaaatatatttgtatctatttaatgatgttntgtgtgttctttgtgctatctgttgttcattccaatatgcctttaccttgatcacgtaaatgcatgctttgttagggtcattcaatagtggaaactggtctgactctaaagtccttgatagtacagggctaagttgtcgtactatcacgaggaattggggtgcgaataactgagtttgtatgtttgctntaatgcggtcctggttgagttaatcttacaagaggaatctgcggacgatgcttgattaggaatangctaaactatcatgangaatcanggtttagtatctcacgagacaccataagaacatatgagtattgatagatagagaatatcttttagcatcaggaaccta

SEQ ID NO: 188325 - DNA, 402 bp, Glycine max
  unsure (1)..(402): unsure at all n locations
ttttttttcncncaaganccttgagtgcaccaagcaatgttttcattatctcatgggagaagcaaaaagggtgttgatatatgtttacgcgtcaacaagacaagattctcttggattgaggatgattagtggtcagtcttgtggactttaattttgtgccacaagacagacattntgatgtcaggattgtttgcattactcaagctagtgaccttatctattggtcttgtacttctgaatgcttttatattactttctgagggtaatggaagcctcaaatatgagggttatgtattgctggtcatcactttcattataaagtataattatctccctataacaaaggcaggggtatcttcgcactaggctagttaggataaaagttatgcactacttacagca

SEQ ID NO: 188326 - DNA, 153 bp, Glycine max
caatatctctaccaaaatgtctccttttaaagctttgtatggacaggaaccccctcttttatgttaaggagctgacatttcttgcatattggaagaggtaaatcaattgagtaacgacatggaagaattattgcaggaactgaggaacaatct

SEQ ID NO: 188327 - DNA, 260 bp, Glycine max
ctaaaattttttgaaaaatccttcctagcgcaccccctgctgacctgttacagcctaaccatgtatggcgctacgcataccctgcatttagattgactcctaacggcatggcactaccaatcaattgatctgatggctagcgaaacagcctagccatatgttagggtaccatccctgccttgccatattgcgcaaaaggctacggcctatcctaaggggacgggcctttgggggctgcgaaaacgaccgatgcctctctt

SEQ ID NO: 188328 - DNA, 333 bp, Glycine max
agatacaatccttgcatatgacaatgctttataaacattaagaaagctagcagatgggcctaaaagacatgttattacttggcaaggatacgacataaacaagtattcattttacactatagcacatgatgacaaaagtacaatgtagaacagcggggtcaccctaagagctgaatctcaacacttcgcaagtgtgcatgacaccaatccctgtgtagctaccatcccttactttgcgttcattgatgaaatttgggagctcaactatgtgaaatttactgtctgtgttccaaatgtaaatgagttgacagcaacaccgatgtgtgcaccgat

SEQ ID NO: 188329 - DNA, 403 bp, Glycine max
  unsure (1)..(403): unsure at all n locations
agcccttttgagccttgtttccctttcctttgtttgaagctcactacaagccttaaatgaaaaaccatgatatcaccatatccttaaggaattttggagctttggaattgttttgggaataagtgtggggggttttttgtttcattggataacttgttttgttggctatgcttcgtgatgtattttgggccatacttgatgtacattgtatattggttaaatgttggacatgctgaatgaaatggtgattcttaaaggctatagagctaaaaaaaaaaaattcgaaaaaaaagaagaagaanatgaaaagcaataaagttgagtgaataagatcttaaatggcacaagaatgatgaaactcttggttctactctttatgtttaattnttatctttacttcttt

SEQ ID NO: 188330 - DNA, 341 bp, Glycine max
  unsure (1)..(341): unsure at all n locations
gctcattcctagntcataatggattcactagaggaataatggacactacactattcagaaaggccgagaaaggaaaacttcttattgttcaaatctatatagatgacataatctttggtgcaacctcaaaaaggatgtgcaaggatttttctgagctaatgaaaggtgaatntgaaatgagtatgatgggtgagctaaatntattccaagggctttaaattatttataaagaagattggagactcatccaccaagagaagtacacacaggacctattgaagaggtcagaatggangaaccagacctatggctacccttatgcatcctttcacaatcattga

SEQ ID NO: 188331 - DNA, 293 bp, Glycine max
  unsure (1)..(293): unsure at all n locations
atgagcttcaaaacaaagaaaggggaacataggctcaaaggggctttcaaaggaattaaatcaaggtaggctcatgtggcttgaggcttataaaaacaaaatgcctaaatcatcttctaacatgcatgtgaacaaagaagtatcaacaagagtcaagccaaggctattgtgcaagcaatcaatggggcaaaacacaccgaataaaacagatgatgatggctcanattctcatcaagggtaaatctatcactttcaattcgaactttcaaaactcactggacatgtagagaaaa

SEQ ID NO: 188332 - DNA, 324 bp, Glycine max
  unsure (1)..(324): unsure at all n locations
agagagctcgtgtatgtaaaatcatggccttcatcatgtactcatttatacatttcattctanaattcagagattcatgcaaagatcattactcacagttagtcgttcactcacagtctaaggtcacactctcaccgggtctggttcaagcttttctttcacaatcaatcgggctactgactaacaaatctaattgcaggttcacattcttgttctttctttgtctaacatacacacttgctcaaactcatgaaaggaaacacaaattccatcgaaatcatgcattcagttcagaatgaaagcatacaacccattttacaaaaa

SEQ ID NO: 188333 - DNA, 431 bp, Glycine max
cttgtggggcttctatggaggctgtgtatctttgagcttcaatgggggcctttaatggtgattttccaccatggagatgcagcggaagacaaaggaaaggaggtgagaggaggccccatccattaaggaataagccatggaaaaaagagcttcaccaccaagatgagccttggataagaagcttggagggatgcttcaatggaggaaaagaaagagggagagaaagagagaggggggagcacgaaattgaaggaagaaaaagggagagaagttgaactttgagttgtgtctcacaagactctcattcatcaaagttacaacaagtgttacacatgcttctatttatagactaggtagcttccttgagaagctttcttgagaaaacttccttgagaagcttctttgagaaaacttccttgagaagctagagc

SEQ ID NO: 188334 - DNA, 354 bp, Glycine max
  unsure (1)..(354): unsure at all n locations
ctcagctttactatgtggcgggcgggctacttactttcttgttccaacgcgagctntgaccaccgctcttccttcccgcgatgcttctcttcatatccgcctgagtgggcttatagcctcaaccatacttcccacgatttcctttggcatttatcaggctagttatgccgccgttgtctttgcctaaacccattccgggttcataaccgtttcccaacataactcgggccatcattactgctgcatcgggcaggcaaggctgcccagagaaggagtccactgaggaaatgctgaccacctcacaagactggaaagtaggttctaacgattcttcttgcggttccacataatgca

SEQ ID NO: 188335 - DNA, 393 bp, Glycine max
agatgtaccacaaggcaaagaaccttaggagaggggaggcaccatccacaagggaataagccatggaagaaggagctttaccaccaagaatgtgccttggataaaaagcttgaagaggatgcttttatggaggaaaaaaaagaaagaaggggggagcacgaaattgaagaaataaatagggagagaagtggaactttgaagtgtgtctcataagactttcattcatcaaagttacaacaagtgttacacatgcttctatttatagactaggtagcttccttgagaagctttcttgagaaaacttccatgagaagcttctttgagaaaacttccttaagaagctagagcttatctacacacacccctttaataactaagctcacctccttgaga

SEQ ID NO: 188336 - DNA, 308 bp, Glycine max
  unsure (1)..(308): unsure at all n locations
nntagccttaggttgttcaccatgtttctcatgtttctctctttatctctaacaattagtagcccattatgacttggagctacatcagatggatgtgaaaactacctttcttaatggagaattagaggagaatgtttattaggaccaaccaatggtgttcttattttaaggaaaggaacacgtggtgtgcaaattaaagaatctaatatatggtcttaagcaagcttcccgacaatggtatttgaagttaatgataccaatgttttctttagattctaagaaaatactattgatctatgtatgtatat

SEQ ID NO: 188337 - DNA, 203 bp, Glycine max
aggaagaaatcaaaattaggattcagaagaaccgaagccattgaatccttaagcttatggccgtggcttctaatgttgcggatttgttcatagcaatagcggaaattgagccaaaccctttctgcaaccacactgttacccttggtattaatggcttggtttctgcttgggctggttggtatagaaattggccttcataaacc

SEQ ID NO: 188338 - DNA, 272 bp, Glycine max
ggatggtggataacatgtgcgatcctattgacagccatttgatttgactatatcaaattgtttcccgattatggcaaccggtatgaaaaaagcttgcctttctttaaaagattgaggctcattgaacggtatttgatggaatgggcatcataagtgctagatgtaaaatatcattgagtcaaataagctctcgagatatttgatttctaacacaaacagtttcaatattcgtcactctcgtttttaaatttaataaaaattgaattcttaag

SEQ ID NO: 188339 - DNA, 456 bp, Glycine max
  unsure (1)..(456): unsure at all n locations
agcttcttatccaaggctcatcttggtggtgaagttctttcttccatggcttattccctagtggatggcgcctcctctcacctcttctcctttgtcttccgctgcatctccatggtggaaaatcaccattaaaggacctcattgaagctcaaagatctagcctccatagaagctctacaagcaagcttccatcactcgaaacattgaaaatctacaggaggtagggcagaaggagctattgttatacatgctggaggaggagctgctgatgtaaaagctggatgaggagctgttgatgtancaagaacctcagctggccttgcccttagtcttctggcccccctaataataactgttggatcatccgagttccaacagtttttccttatgtaggccaaattaatgaccgggcttaaacgttcaaaggctaagctatcggaaacgactcatttggac

SEQ ID NO: 188340 - DNA, 360 bp, Glycine max
  unsure (1)..(360): unsure at all n locations
gaaagacngggcaactgccttcattttgcttctcttattcaacacggatatggctcctgatcggaaccaacttcatagcatgaccaaatggaaacatgagtccattaaggaatatgctcagaggtggagagacctagcatcccaagtcatcccacctatgacggagagggaaatgatcacgattatggtagatacgttgcctacgttctactacgagaagctgataggatatatgccggctaactttgcagacctcatcttcgccggagaaagaatcgagtccggactgaggaaagacaagtgtgaatatgcctccaacgcttgccncaacaacaatagaagagccccactggtggcaca

SEQ ID NO: 188341 - DNA, 390 bp, Glycine max
tgcagctctcaaagcaatggaccctgggctgtttatttttgcctgaaacagagcgtcaaaggctgagttatcatcatcctgaaaatagagataagaaaatttctaacatatgctgttactgatatatttgatcttcatgattaaaagaaaaatattctattatcctctctcacttcccacttgctcaggaaccatgacgctgaaaccaaaaaccatatccggggctgcacgtttatccacgtggttacataaccagatgaagactcggctgccatacatgaacaacttaaaggatgctaattgactaaaaagaagttataagggagcagcataccatgaaatagcaggtaggataggatacactctgtggtctgacggatgggatacaaa

SEQ ID NO: 188342 - DNA, 330 bp, Glycine max
acacttaattattatgccaacaattgaattaatcttgcatgcctcttttctgtgtagttgggaaaactagcttataagctataagctaggaattgaaagccaaaagttataaactaactaattgacttgaaattgtgtgcttatattatctaataagctaactgatagatatataacgacataacagaacatatttagttatttgtggcagacagggatttcacatatataaatggagataaaaaggatagaagaacaactaatagcttataaggtagcttatttcataagccacttcaactagcttatgaagaatacttagaagctact

SEQ ID NO: 188343 - DNA, 342 bp, Glycine max
gccccctgggaagctcggcagggggcgttttttttatcctggtaccgaacagggaacctagctttttcgatcacttgaccacaaaagcttcaatcactgaccctaacttctcaagctacgataagggaaccgaagcctttccgatcaagtgatcagaacagtccaacttatttacacatgtcaatattgatgatacatggagtttttttaattgtgaatctgttgtttgattaacaggtgagccctttgagtcagaggtggatacagacctctgagtattacattttatatgtttcattattcagattggttgacccatgataattgggttattatttatag

SEQ ID NO: 188344 - DNA, 320 bp, Glycine max
gcgcgttcgaagtccttgcctcttggatcctcgtccagctcgagcacggttgggttcacacccatgccgcagatgagcctcttgatggcgtgtcacatgcatcacgtgctcacgctgtatatcaccaccgtgctcttcgacgccagcctttatatgcgctccagctgggtccccactaccgccgccgacgcgttccgaggggccgtcacgtagctactccaccacgccagcggcgttgcttggtaatgcattctcagacaaattttatgtgatgaaagaatgacacgcgtaatgtatgataacgagagcgataatgtctc

SEQ ID NO: 188345 - DNA, 398 bp, Glycine max
  unsure (1)..(398): unsure at all n locations
ttttttggacccaanttctcttcgccatgagccccttctatcaccctttcacccccaaacctatggttattaccattttcagcaaaacccctctcccttacattaactcaccctaatggaaatgtgaagtaggcgaaagcgagggcctctgtttaacagtgatgagaaatttactagggggcattgatgttcctctcgggtcttccttcccatcgcaaatgaagaacaagaagatgacgctacggaccctaaaatagcattttcagccccaagcttggatgacccgtcccaacccgaattgccccaagcccaaatacagttttacacgctatcgaatcagtctgttccacaaaccctacgtctgttgggccggatatcgaatcagaacatggtcattc

SEQ ID NO: 188346 - DNA, 395 bp, Glycine max
tggaaagctcaagaactgccaaagatgttgggggaaactcaacattggttctgaaacttaactttgtggtgattgtcaacttttgaacattgtgcataagaagcatattcatgaccctatttaggagtttgggctcaaccaaaccatggcgcttgaaatcaagactaagaagggaaatcgagtcatctcgactgaacagaacccaagatacaaattttctaaatttgttcagcttactaaagtgtgaagaattgaatgcaaaattagtgagacgtttccaaaggtctttctcctctttactatctcttactcttcatcttcatcaccaactgtccctctctgtcttttcctacctatatatagcccaacatagtttctaacatatgtcatctata

SEQ ID NO: 188347 - DNA, 162 bp, Glycine max
tgaaacctcttcactttccccttgtaaatataggagttctcataagcttgtaagaggatctcctcaagatcttgctatagaagctaccttatcatactcgcttcatcaaatgacatgttagaaccattcaccgcccaataaaaacaaagttcaatattcatc

SEQ ID NO: 188348 - DNA, 287 bp, Glycine max
  unsure (1)..(287): unsure at all n locations
tctaaggacaatcacatcatntcttgcactgaattgttgggagttggaaaccatcttctcaatcaaattcctagcctcagcaggggtcatatgaccaagagctccaccactggcagcatcaatcatactcctcttcatgttgcaaagtccttcatagaaatattgaagaatgagttactcagaaatctggtggtgaggacagcttgcacacaatttcttgaatctttcccagtattcgtacaagctctctccactaagtcgcctgatgcatgaaatgtcttttctga

SEQ ID NO: 188349 - DNA, 367 bp, Glycine max
  unsure (1)..(367): unsure at all n locations
tgcaagctncggatccagcttcgggaacgccttttatttattcttttaaaaacgctctccgacaattgctttacttacagcagaacgtggcgtagtgtgtaataaaaaccgcaaaagggaaaaggcattgcttaatcgggtttgggtcggagaaccgggtcaaaaaattgatttttgggggggtgtgaaaatggaaaaacagcgggtgtggatgggggttgttgcggcaaaattacttgccggactgtgccgtgagggaggaggaataaggtacttgtggcacgagcgagtgggagttagttaagttttagcgggagaacggagatagcttcggattataggctgccacaactcaaaagtcaagatt

SEQ ID NO: 188350 - DNA, 349 bp, Glycine max
  unsure (1)..(349): unsure at all n locations
gcacatgtaattcagcctacacgcacatgtatcgaacatacataataagcacaacgataggaggtggtcctgtgtctgtaagcgccatcgatatgtgtattgaaatgtgaacacacactatccataattggtgtctcgttaaagtcatgcataatatagactagctcagagtttataagtgtatccatacactgcggccagtgtttatatgcacactcgaatgaagattatgaataccatgaccgttgacatatatcatgcgatgtctcattacagagtagagcgtataatccactggccttcgaatagaaaacgtggcaggaattnacaatcaactaatcaagagtct

SEQ ID NO: 188351 - DNA, 433 bp, Glycine max
  unsure (1)..(433): unsure at all n locations
gcttagggagtcctatgggaaacactatttggttatctacaagaaaatctatggtggaaggtgggttctggactccctatagccctcatggtcgtatctattatataattgtttaggctcttcgttctacgtaaagatggaagctaaaggcaatgtgatcaactctggaacacatgttgttataggctctcacaagaacaaataactcaacttaccattacatgtcttaaatggcatgtactattgtgaaaaggattcaacaatgcatatgtcaagtgataaactaaggcacaaacaggaaaaaggaaaattagaatntgacattgttttacccgagtttacaattctcttacatgtatgtctaactcttttacctatatatcatattatcataattacacagacgacaagcaatcaacatatacacacaatt

SEQ ID NO: 188352 - DNA, 351 bp, Glycine max
tattccctagtggatggcgcctcctctcacttcttctcctttgtcttctgctgcatctccatggtggaaaatcaccattaaaggacctcattgaagctcatagatccagcctccatagaagtcccacaagcaagcttccatcaagtggtgatcagagcaccaaagcttcaagtaggtgctccttaaacctccattaattctatgctttaccttctctgccattgatgatgcttcaatttatctccttgtatctgctcacatgtcttgtgctacatggtgttaacacgattcttataggttccactgataaacttgctataaagctgagttgatttctatggtcaaattctt

SEQ ID NO: 188353 - DNA, 367 bp, Glycine max
cttcttttaattgtttatgggcttggcgaccacgaacaacaaagtactttcggcacctactatatgttgacttgaccaacgctgttattggaatgctgcgacaatctttcaacaccttattcacacattctgataggttggttgtcatgtgaccatatcgtcggccagatgtatcgtaagccatgctccatttttcctttgaaatgcgatcaatccatcttgctatggctggactcagttgacgaatattttctaagttttgatcaaacacatgctggcaaggagtgtacgctacatcaaatatgttatcatgagaagttgtacgtagacatcaaagtcataataaattaatgtataataaaacctt

SEQ ID NO: 188354 - DNA, 356 bp, Glycine max
  unsure (1)..(356): unsure at all n locations
gaaactttgatcacttaagatgagaaaactcagatgaaaagagcactgtcttaaaaacaagaacattgatagtcatctcaccggatgccatgattcatcattctcagcatgaccatgatgttggtgatgagtcctatgactgattctcctgtataaaatatcagtttcaaacatgaattcaaaactacataaaagagtaaaatgtggttttatccctacgaatatctcanaatttgattctagtctctaccaaaaataatatattgttagtctctacatctatcataattaatgtggttgtagccatacatcaagactaaaagaacgtattcgttaaatgtagagactaaaatcgt

SEQ ID NO: 188355 - DNA, 289 bp, Glycine max
ggaatgtaattgttgtattgtaaaaaaaaaaaaacttccattaattcaagcaatgtgatgctgatttcatgccgtgcttaaaatgaagaccaaattggaatatactacattacacataagagagctaccttaaacaaacaatatcgtacatttttctttcttaagctaagtgggagagtagaagcgatcagacgatattaatgaaggaacatccaattattgcggactgccagatgaaaattagggttacttttgtcccaaaggggatgtgataaaaacggttatagaa

SEQ ID NO: 188356 - DNA, 441 bp, Glycine max
  unsure (1)..(441): unsure at all n locations
ctaagcttcttggcctctagggttatcttgacagtgaaacacatgcnctttggtacacctacatatcttgttgtcttaaaaagtgtcatttgtaaggcacgtagtatttcagacacttcctttgcattttttcccttcatgccaaagctcgtgtatgcaatgatttctccggccgtttctacaacctctctttcgacatcgattntgtggttgccggagttgatttgtgcaatccacctatctatcatttgatttgtagactctgtcatcatgcttgccattgcctatatcatgttacacaataaaatcatacgtaagtgttagaagaataaaaacataattgtaatatcttctcttgtcaattggtgacactcatgataacttcacaaaacaaaattgtcccttgaatttttaattgaatgacaaacgaaaatttgtgat

SEQ ID NO: 188357 - DNA, 285 bp, Glycine max
  unsure (1)..(285): unsure at all n locations
gagatagagcgagagattgctggtaccactcacatctcattaaaaatttttccaaagctatttctcaatcatggcaaagattatgacgcccatttctcaataaaaactgaaatgttnttgtctttttgaacacgtccctccttctgtctatacactctcacaaacattagtccccactgattaatgaaaataaagttagatgatgctatcgtctaaaaagacatctctttaatccggataactagtcatatttaaatgttcccttatatagacgaaccctttttc

SEQ ID NO: 188358 - DNA, 357 bp, Glycine max
  unsure (1)..(357): unsure at all n locations
gagctccgtgttaattacagcgtctcgtatatgatgcgcctgaatcggacatccgagtgatatagtatgaccatntcaatttctcgagagcttctgttgttgaatttcgagcgtctcgatatgtgatgtgcctgaatcggacctccgagtgaaaagttatgaccatttgaatttctcgagagcttacgttgttcaatttcgagcgtctctgatatgtgatgtgcctgaatcggacctccgagtgaaagttatgaccatttgaatttcttgagagctctcgttgatcaatatccagcggctccatatgtgatgcgcctgaatcggacatccgagtgagaagttatgaccattttaatt

SEQ ID NO: 188359 - DNA, 216 bp, Glycine max
aaagttacaacaagtgttacacatgcttctatttatagactaggtagcttccttgaaaagctttcttgagaaaactctcttgagaagcttctttgagaaaacttccttgagaagcttgagcttagctacacacacccctctcataactaagctcaacctcttgagaaaccttcttaagaagaatcctaaagaagctagagcctagctacacatacc

SEQ ID NO: 188360 - DNA, 342 bp, Glycine max
  unsure (1)..(342): unsure at all n locations
ntcttgagaaaacttccgtgagaagctgctttgagtataatctttgagaagcgagagcttagctacacacacccctcttataactaagctcacctccttgagaagctcccttaagaagagtcctaaagaagctagagcttagcttcacatacctctctaatagctaagctcacctccctgagatgagaagctggaacttatctactcaccccctataatagctaagctcacccccatgacagagaacagaaaatactaagaaaagtccttactactaagactactctaaatgccccgaaatacaaggcgtaaaccctatactactagaatggccataataca

SEQ ID NO: 188361 - DNA, 393 bp, Glycine max
cccaaacgcacccttcttcaaacattcggtcataggacttgctatagggctaaaattctggataaagcgtcgataaaatgatgccagaccaaggaaagatctcacctccgaaactgttgtagggctcggccaagtcttgatagcatccacttttgtttgatcaacggatactccatctttagacaccacatatccaagaaacaccacactttcaaccaagaaatcacacttttcccttttcccatagaagttttgtgctcttagggtcttaaatatttgtgtcacatgagtgaaatgctcctctatagatttgctatacaccaatatgtcatcaagataaacaacaacaaacttacccaaaaaaggcttgagtacttcgttcatgagcctcat

SEQ ID NO: 188362 - DNA, 344 bp, Glycine max
  unsure (1)..(344): unsure at all n locations
aataggctcagagcctctgctctgaattctgagagtctcgatatactacggaacacaatcggacatttcagtgtaaagttattgtgcgttgaatatgctcacagcttctgttcttaattacgagagtctcgatatattacgggattcattcggacatacaaactaaaagttattgccgttggaatttgctcatagcattctgtgtcaactacgagcgtctagatatattacgggattcattcngacatccgagtaatacgtattgctcttgattttgtcatagctcctgtttcaatttcgagcatcttgatatattacaggactcaatcggacatacgagtcaa

SEQ ID NO: 188363 - DNA, 438 bp, Glycine max
  unsure (1)..(438): unsure at all n locations
tgcaagcttgaacatatagagctactgcacaattgcttatcttattaaccaactaagngggatacatgtacaattttgtataacagattttattattaggggtgttcatggttatgcactctgcttgttgcttgtcttacccacgtgactaaatgtagtcattgagatgggttggtttcctaatgcacctattgggcctgttagtagatgttggactggtgttgctaacatcaccttctcctgataagtttggcttaatgaaatagattcagtcagcttctatgtggctttacctgctggtgtattttttgttcgtgaaatgattacttttgttattcaaattaccgtctngaaatggattcacttagctttagtataccttatttgcttgcttggataattggaattgtattcgttaggtatacctgtatctcctaa

SEQ ID NO: 188364 - DNA, 427 bp, Glycine max
  unsure (1)..(427): unsure at all n locations
tctaagcttttcaacaccaggtcgttcaggaaaccaacaaaacttttcaatcatctatggtggngtgagcgtcacggcgatcacaacggcctgagcgtggctatgcgagactcagcatcggggtcagggacaatgccagtgacgacgacggcctaagggtgcctctgcgagagtgagagtgggaggtcagggagaagcaagagtgtgatctgattaataatctagtcttaattacaagtatgcaaccgcgttggtgttagcattcggtttgccgaaaaccgatgttaacctatgttaaatgtatacattttagtagtgtttatatcttatcgattaagtgatctgatatgatacatatattctgaaaatgtattaacaaaatatgtcaacactgttatggactcagtaaccgcgtatcaagaactac

SEQ ID NO: 188365 - DNA, 398 bp, Glycine max
  unsure (1)..(398): unsure at all n locations
atcattcttgcccgggaacttttcgacattgaactttgcagatcctatcgtcctcatacttcaagagacaaacccaaagtcgttgagagcggaaactaccagaaaacgaacaacctaagctactaataccaatctgttatgaacagatctgcaactatttgataaaagccactcaaaactaaaagaactaaaaaatagaagtttgtgtagaaatccctatttttttattgaattaaaaatgtactgcaatgaattaacttataactcngtgtacccttntatatacatcaatcatagtttgggtacaacaaactatgacttatgctaatgaaacacctgtaacaataattgtggcctaaagttaaaaccacttatctaatagtagcagttaaaactat

SEQ ID NO: 188366 - DNA, 442 bp, Glycine max
  unsure (1)..(442): unsure at all n locations
gcttagaataagaaacctttatcgntggtcaatgcttcacactttttattcatgctntntgactaagtctngattctttggaagcactcaatgaaaaccattagtagcataggtctaaagaacttagaantttcttcttaaaagtttgttgttattaaaacattttgcttataaagggtcctgcttcaacattgttaactattttggtcttatgaatagtaaataggtgggcactattaagctngagacaaggttacattatatggaccctctctctgtatctcttgatcacttttgcataaggtctatcatctatgattaaaaaagatgaaggtggataggatatacatggagctaaaaaatattaaggagcaccttatcatctatgattgtnctttctttgatanggcttcaatcaaagaacgcgccactattaangata

SEQ ID NO: 188367 - DNA, 387 bp, Glycine max
ataaacatgtcatcgaatttttgtaagttaatattcttttcgatcaagcatcatacataacattaatattgtgctctttaaattaaaccaacttcaataaatcttttaaattcccatacttaaaaatatttaacttgaccactaacacaaactggaagcataatttaacctaccatcgtcaaccataacaaaattctacagtaaacaaaaatgtttactaaaatgggacgaaatgacttcaatttgttgatgggtatccattcttgtaaatgcaacctatcgaaatggaatgtagaggacaatatagtcatcttgctattgggatcgttgagaaaattttaaacgctacaaagttgtagaacaaggatgaaagttcgaaaaaaagtt

SEQ ID NO: 188368 - DNA, 284 bp, Glycine max
tgagagaccatacaagtttcctaacgatttctaattatgtgggccattaagtctatcatatgctgacaatagccgagaagcccatgaatctcttctggggtggagtatgtgtctgccatcaccttggccttggctaacaagcggggaagttccttgactcccgttcaaggtaagagcaaaccggtccatccacatggttgcctcttggtgtaaagagtcaatcacccttactctaacctctttttccgcatatacttgagcatactcatccacgattctatgct

SEQ ID NO: 188369 - DNA, 447 bp, Glycine max
  unsure (1)..(447): unsure at all n locations
tataccctttgttcattagtaaacatgcttgttttaatcacaatcacaagcaagatatcctaactacatgcaagagataagaatgaaaagtagaaaagggaaagagaagctgggttgcctcccagtaagccctcttttaacgtcactaacttgacaagtcaggtgccttcaaggtggcatgaaggtcacaaagaacacatcctccttacagttccaccttttagctaggaattccatgaacttcatgtattttggaagtgcatgcaaactcattgcaaaagagaggttggtgatcccagagagaaaaacacttaattctctcttttgctctccttgcctttgcttcttgacaatcaattgatggagtagctctttgccacatcaatttcttgattgttcattacattttgatnttcattagagctagcattatatgccatgaattct

SEQ ID NO: 188370 - DNA, 488 bp, Glycine max
  unsure (1)..(488): unsure at all n locations
tactcagcttctaaggaggtgagcttagttatgagaggggtgtgtgtttcttatctctagcttctcaaggaagttttctcanagaagcttttcaaggaagttntctcaagaaagcttctcaaggaagctacctagtctataaatagaagcatgtgtaacacttgttgtaactttgatgaatgagagtcttgtgagacatacttcaaagttccacttctctccctcttttattccttcaatttagtgctcccncctctctctttctctccctctttcttttcctccattgaagcatccttccaagcttcttatccaaggctcatcttggtggagaagctctttcttccatggcttattccctagtggatggcgcctgctcttacctcttccctttgtcttcgctgcatctcatgggggaaatcaccataaggacctcattgagctcaagatctacctccttaaacctacaaccaacctccttatttata

SEQ ID NO: 188371 - DNA, 380 bp, Glycine max
aaaacgatatgtacttcttgtgttacatatttgcttgattgttggataactattggcattgtgctccttcaacattaataaaatatttcttggcttcaccattgactttgtcatatcagcaataattatcttttctaccttagtcaatcgaccagcgtatggatgtccaactaatgactttgtcatttcatgattgtgactcacacacattaacttcaccatccatccttggcctctagccactggtttcccacgtaacttaaagggacacccacatttcctactgccagtatctcttcttaccaaatctttcttcctgaccctatactgatcactcctttcacgaccaattaagacaaatgatgtccttccctctcata

SEQ ID NO: 188372 - DNA, 480 bp, Glycine max
  unsure (1)..(480): unsure at all n locations
tggaagagtcagactcctatttntgtttgctgaccacagagtggtacctggagatatgtcgctggggtcatgagacctcggggacgtcatgtggggtgctattgcccaaaaccaagcttgaccaatcccgacccaaccccggcatagtcagtcagtgagaacctttgatgtacctaaacaggcaagctcctggcagtcaactaataaaagaacaaagtccacaaaacaaggaggcttgtgtggcggctggccaactacnaatcttgagtggtatctggaaactggcctctggtaatcgatcaccaaaggtgtgttatcgattacatggcttaacaatggagacaggatgtatagatggcctctggtaatcgattaccaaaggttatgtatcgattacagggcttaaacatggagacaggatgttaaacggccttggtatcgattaccacgggtgaatcattaccagagttcaggcactgt

SEQ ID NO: 188373 - DNA, 188 bp, Glycine max
caacataaaaaaacggagctaaaaatgcaaccacatcatattaatcacaagcaaaaaggcaaaaacacgcataaacaataatcggacccacaaaaaaaacagccaaggccttgaattaatcccgcaaaaaaaaaaaggaacgaagccgatatataactggcaacagaacaaaaaaaggcgatatacag

SEQ ID NO: 188374 - DNA, 236 bp, Glycine max
actcacgctcggtggaaattatcattggaggaggaggagggagtgggagagacgaacaggaagatgagaataatctgtagaagaaacggagagtccattgctatgctcagagagagagagagagatgtgtctatctgcggaattgagaggaagggaattgacgtgcttgcagagtgaatgcaattataatattcatgacgaagggaagaatgtgtcacacatgatacaaaaaataa

SEQ ID NO: 188375 - DNA, 340 bp, Glycine max
  unsure (1)..(340): unsure at all n locations
tcagccccttaggcacttctctctctttcgaatttgtttagaaaaattgtttccgtgaaaaaaatccaagccgaggggcttccgtaacgtttccgtaacgtttccgtgagtgatttcgcgaaggttttcgaccggtcttcaaccttcttcattcgttcttcatcggtcttcagtcttcaacgggtaagtacctcgaaccaagcttttcgattcattctatgtacccgtggtggtccacatttggtttcatgtatttttattctcgtttcatttactttttatacccccttttgacgtgcttaagccattnttattaagtcatttctcgcttaacctaaaa

SEQ ID NO: 188376 - DNA, 408 bp, Glycine max
  unsure (1)..(408): unsure at all n locations
actatgaaactaagcttctagcctcattctctcccctgtggaagcattttnagtcatatgtctgtggaatcaacataaggcagataataataatcaaatataactaaagttcacattaccattcacaagtcaaaatcaaatataattcagtcataaaatacaaagtgccaaatactgaaatataactaaagttcggagaataatgacttaaaaaacatagcaaaatacacggtgtaaaatcaaatacaataataatctaaatctatgaaaatggtggtggaaggtcgaagcactgacgaagataactcacatcctcctcaagctgagtgatgcgggtatccattccttcanagtgagcatcaatggcattaatacgaccattcaaggaatcaaagctgtcaccaacat

SEQ ID NO: 188377 - DNA, 454 bp, Glycine max
  unsure (1)..(454): unsure at all n locations
gcagcttctagccaaatggacttaccttgacttaatttctttgatagcccttttgagccttgtttccctttcctcgttttgaagctcactacaagccttaagtgaaaaaccatgatatcaccatatccttaaggaattttggagctttggaattgttttaagaataagtgtggggggtttttgtttcattggataacatgttttgttggccatgcttcatgatatattttgagccatacctgatgtacattgcatattggttaaatgttggacatgctgaatgagatgttgcttctcaaaggctgcagagtaattaccaaaaaaaattcggaaaagaaaaagaaaagcagtaaagttgagtgaataagatcttataaatgacaaaagaatgatgagaactcttggtctactctntacgttaaaaatttatctttacttctttttattttcttat

SEQ ID NO: 188378 - DNA, 417 bp, Glycine max
ctacacggacgaagcatgtaatggtgtcataaacaacacaagattggttgccacgggttactcacaacaaaaaggtgtggactatacaaaaacctttgctcttgttgcttgtctagaggcaatatacattttactctcatttgcatgtcatacaaaaatgagactatatcaaatggacgtgaaatatgcattcctcaatggagtaatataataagaagtctatgtagaacaacccactgcgtatgaaagtaacacttttccacacatgtgttcaaactctataaaacattgtgtggacttaagaaagctccttgagcttggtatgaacataatagatcatttcatgttaacattggctttgaaagaggaaaagtggatacaactctgtctcgcaagaactatgacttccaaattatg

SEQ ID NO: 188379 - DNA, 392 bp, Glycine max
  unsure (1)..(392): unsure at all n locations
catggaaacttagaagtgactatttgccaataggaattggagtcactctaaatatggaggaatttcgttaaactcatgaagtgagagagtacataactagagtatcatatgctagcatagtaggagctattgtatatgacacgatnttcacatgttctaatatcatttatgcactaggtgtaacaagttgatatcaagaaagtcttggaggagggcattgaaagtgggtaagactattcttaatacttaagaagaactaaagactatgcctcatttatggagacacaaaattaaaaactaaaagtagtttgatgagcataagttggaattagtaatggaatacatgagtgattggctctagcgcaagtggaagattgttgggaataaatatg

SEQ ID NO: 188380 - DNA, 137 bp, Glycine max
tcaagctccagcacggcagcaatgacgaggaccaccatgatgcgagtagctcaacacccataccaaacttgaacaaggaagagtgagacagagtcgcgagaatcattttcggtgggatggtgtttcgattctttttt

SEQ ID NO: 188381 - DNA, 299 bp, Glycine max
aatgattatgatctacagtgggtaaaaattatgaaccacatataacttaacgaactacaaaatctaaaaattacttttatctacttatattccttatatattgagaaccatttatcatatttagaaataaattaatgataatgtaaggctacttgtgtaaaaatactatttcatccattaataattattattttcctgacccgggtaaaaaacaacaattattctacgacgttaagagttcagagtattgtattacataccatggtcaaggagtcttatatcttatgaaatcccaccct

SEQ ID NO: 188382 - DNA, 402 bp, Glycine max
  unsure (1)..(402): unsure at all n locations
ctgaaaatatttacaacagtcattagaaaattgaattaaaatcttacaatgtgtaatcggctacacatgtatggtaatcgattaccagcagttacagaacgttttaattcaaattttaaagcctgtaatcgattacacaagtcgtgtaatcgattaccataggagcttttcaaaaaatattttcaagagtcacatctgtccaaaaggtttttgaatgaccatcaaaggtctatttatatgtgacttgaaacacgaatntgcttagagtttntcagaacaaaaaggtcttatcctctcaaaagtaaaattatcttatcctcttaaaaattccttggtcaatacacttgcaattcaataaggaattattttgagtgctccattgttcaatctatctctttcaag

SEQ ID NO: 188383 - DNA, 372 bp, Glycine max
  unsure (1)..(372): unsure at all n locations
aagaacttataacactacaaaataaccataaattggatgagttagatacaattcacacatagtttatacacaagatgttatgttgtatttcatctgactatacaaaggaccataattaatggtaccctaagggaatcaaagagaggatgctccttcctttcatattatgtgtggcaatgacttgtgaaggctgtgactcaataagggtggcatatcgaacaaggacaaaggaaaggaaaggctaacgaaacgagaatcggatgtgagtctgtgacaaatgtgatgcanggctggagagatggaaatggttgatgaagaggatggttctaactcacgaatgcataatcttncacgctcatctacatgtccatg

SEQ ID NO: 188384 - DNA, 413 bp, Glycine max
  unsure (1)..(413): unsure at all n locations
tttttacataatncattttgcattctcgccacaattgtgtgccgcggaaagaatgttacttctcagaaataaactaggcatttgctgcaaattactacaataaactagaatttgtccactgaatagacttgccattttcactaatacaacaattactaataaggaagataaactttgaggaatacatgacagcttggttaactattntggactgacccaactattctcaaactggtatttactcaaatatagcaagatattaggaatgcacaagaggcagaggtatagacagcctagtggaaacggtctatgttaatagatttgcttaaaaggtaactttngtcacagctatcatttcctgtgagctaattgtntgatcaagtcttgcagagagtgctctngccttacacttc

SEQ ID NO: 188385 - DNA, 439 bp, Glycine max
  unsure (1)..(439): unsure at all n locations
cgctgatggattgatagattgacatttgttttaaatgctctcataattctataaggttataattatgcaagattaaatntttttttgaaatcagattcatgcacagatttaacgtaaaacaaaatcatntaatgaataattatattgctcactttagtggctatgaatatataatttataattnatgcataaatttaaaatataatttaagatcagattaaatcaaaatttgacgttaatgaagagttaaattgctaatgttaatgttatttattatacaatattgataattataattaagttaatactatatttttaaaaaataaaattcatgcataaatttaaagaaaagaaatattaatgttaatatgtattaaattgagacagaaacataaacgtaccctctcattcttgtagtcttggctgaccttattgatcg

SEQ ID NO: 188386 - DNA, 489 bp, Glycine max
ttaagggaaaagaatccatgctacgtcttgagaatgagacatttgtttaataataatatactctattggagaactttcaggagttggaagacaaattgaaaggtctacaaaaggatctaaaggaactaaatgaacttcacaatcatcaaagtgaagatagatatggaatgttcacaagcacacaaagattatgaggaccttaaaataattaaacataatctttgggtggaatgtgaagaacataaaagatttttgaattcttaaatgaaaagatcttgaagaatgaagaatttaagggtcaactcaagatgttgtaaaacttcatgagagatttgaaaccttaaaatctacattatccgaatgtgtcaatggaacataaaatcttgacaaactgttaagatacaataaatgtcactcatgaaaaatttgctaatggatatgaaggatagattatgttcatgatgaaggactattgtttgttattttgtg

SEQ ID NO: 188387 - DNA, 389 bp, Glycine max
  unsure (1)..(389): unsure at all n locations
actcaacgctgaaagtcagcaaaataagagcttttaaattgtgcaagacgtttcctggaaattctccatgcggaatcattttcagttcattttcaccgagtgtcaagggctgcaaattgggtgtaagcttacaagagaaacccatataaccaagcctaagcaggttagggaatatatagatccaactcttctatataaaactganataatgaactctcatgctaaaagaagtctgataattaatgaccaattaacttattcaattacataggtgcaaacaagtcaatttaaaggaaaataaaagttttcttaaaacccaaagaaaaagaagataaccaggtagctaatataaggtggaaggatttgataatgatgtgctaacaaattat

SEQ ID NO: 188388 - DNA, 308 bp, Glycine max
  unsure (1)..(308): unsure at all n locations
gaagagcaatgggagatatcgtatgcaatcagcgcatgacaactttctgatggaacacccatgactgagttaactaaaaaatatagcacaccattgcatatcacactctcattaccacctctccaccccatcaaaacctctgttgaattngtcatcctggcctcattctttgaatcgtatatatgaattgagataccccactggacaaaatcctcacggatttgctttgatgtcacaattgccactctgtaattgtgggatttttattcattgacattgcaatgcattgagtcacgagattcaaacct

SEQ ID NO: 188389 - DNA, 352 bp, Glycine max
  unsure (1)..(352): unsure at all n locations
ctgaaatttaaagaactaaaacctaaagactgaaattcaatgactgaacataaatcataaaataactgaaataaactaaattgttcaaattgcacaaatttaaatgtcctgctcctgtgattgctcccgtgcatgctcattgagaaccaacacctgagcagctggtgaatcctgaggaataggctgctctagctcagatgctgttgcaaatggcatggaatcatcacgtatgggtactggagatggctctggaatctggtctatggaaatctcctcctcctaagccatgtgcacacttgcagaaaaataaaagggctaaggaggaatgagctcatcctcnccctctgctgct

SEQ ID NO: 188390 - DNA, 414 bp, Glycine max
  unsure (1)..(414): unsure at all n locations
catcatatctcccagaacctcatacccacgagatttaagagagaaagatgtccacccaaacctgaattctcgaagtcccactcgtagccacgcactttacgactccgaatatgctcttctntctcgacttggagcagaaatgatcaccacatgttgaagctttcgtgggcaacaatggtggatgggagaaaagaagaagaaggctgcgtgagagagagggagagctgtctgacatcttgtggggctgagtgaggagagagaaaagctctgtggtcttaaataaaaagggttttcccttttccattatttattcaagctctgcacatgtcctatatgattgagcaaaagggccacttttctgttgctgtgaccctctcagcacaaaggagaaactgacttaaacctaaatcgctc

SEQ ID NO: 188391 - DNA, 339 bp, Glycine max
tataactctacttcagcattatgtttttttttagcaataaaaatggccgtgtatgattttagatattatataaagtcataatttacagcatgagattgtgatggataaattgtaacactttccatcaaaggtggcttgtcaactagctatgtcatgtatacatcgcagctcacaaatgacctaacctaactattgtggggcttttttaaaatcggcaatcatattagctttttatctgaattaacctactctttaaattaatgggagccactatggactctcaatgcaacttatttaagtaaaattatttcgtgacaaaaatatatattattaagtata

SEQ ID NO: 188392 - DNA, 405 bp, Glycine max
tatattgaataacaagaaaatttattatgggatcttcttatcctctaattatgacaatgtaatggtaagataaactcttagatgccgtataagatttatactgaaaatatatatattataaatcgaatccattgttatcgatcaataacttattgtgccaaattaatattgattaaatcattttaaataaaatctcgagtttcaagaggaataaatttaaaaaatataccacaaggtcattgaattcttttaccttatacattagttaaatatgtaatttctaatagacaattatttaatagatattatctactacgtgtcgttgttgctggctgttaccactttgagtgtctgaattattaaatggacgacttagtctctacctgattgaagtattaattaaat

SEQ ID NO: 188393 - DNA, 386 bp, Glycine max
  unsure (1)..(386): unsure at all n locations
tctcaagctcaagccattacttttctagttagagacttcttctngtggctaatgtaggatctgctcaaggacctacaggtttatgtaaatatctaatgcgttccccgacaggagaagttatttttgggggagaaactatgcgtttttgggatttgcgtgctccttggttagaacctctaaggggtccgaatggtttatacttgagtagactgaaaaaagatatacagccttggcaagaacgccgttctgcggaatatatgactcatgctcctttaggttccttaaattccgtgggtggcgtagctacagagattaatgcagtcaattatgtttctcctataagttggttagctacttctcattctgttctaggattcttcctattt

SEQ ID NO: 188394 - DNA, 397 bp, Glycine max
  unsure (1)..(397): unsure at all n locations
tctggccatcgattacacagttatatttctaaagagtcatgacttttcaaaggttttttgaaatctcttcactggtaatcgattataagaatttggtaatccattacctagatcaaaattcaaacaattttgtgtcattagtcaaaaatatcttcacaaactctctggtaatcgattacacagtctggtaatcgattaccagttcaaaaatgcctttttgaactaatttagcctttggtgaaagagtgtttgatactaaatatgttaaggccaaactaaagcaatcacattgagattctttaaaccaacatactaagttcttatcttagatntacttgatcctgttcttttgactcgattcaatccgtgctcatcaagtaacctctgtggcatcatc

SEQ ID NO: 188395 - DNA, 419 bp, Glycine max
  unsure (1)..(419): unsure at all n locations
gctcgagaaaaagcttaaagatgtttttacttttagatgcctaactcctttgagtggcatttatattggttgntatcttggatgttggattnggattgcataattcatcatcatggttagtgtgaaaaaaagttcttagttagaaaagaaattctagaggaaaaaactccgtgttttaattgattacatgtctatcgtaatcaattacaacaagttgtttgaaacttgaagagttgagtcttgtataagtttaattgattactgatatctcgtaattgattacaccattgtttgagacagtgactgatttattcaggagtctctactttaatcgattaccaagtgatttaatcgattacttctctctcgcttagttgttcagaagtgaataagaacactctaatcgattactttgagta

SEQ ID NO: 188396 - DNA, 444 bp, Glycine max
  unsure (1)..(444): unsure at all n locations
ctcagctggaagaaagtgcattagagatgtgcgtcgggttatattatgagattcttgataaaatcaattgaaacatcaagatcccatgaatctacgtcaactctcgagtttgataaccataatatgaagtatcttatcttgtgaaaaactagaactaattcttcaaaagactggaattcacttaaatgtcttatttcgcatttctcttaatatatattatttcatacaaatataaaattgaaccacatacctatattccattcctagtttcgtacacctttgcaacctatatagcaagcatatgtgctagaagacaagagcaagttttanaattagagggaaaatctgataatatttattattaaataaataataaataatgcgtgattagaactagaaaaattgagttatattttatagaaaacgtgtncaagcaagtcgcgt

SEQ ID NO: 188397 - DNA, 362 bp, Glycine max
  unsure (1)..(362): unsure at all n locations
ttcttccatggcttattccctagaggatggggcctnctttcaccttttctcctttggcttccgctgcatctccatggtggaaaatcaccattaaaggaccttattgaagctcaaagatccagccctcatagaagccccacaagcaagcttccatcaagtggtaatcagagcacaagagcttcatgtaggtgctccttaaacctccattaatttttttctttaccttctcttccattgttgtttcttcattttgctccatgtatctcctcacatgtcttgttctaaatgttgttaacatgattctttataagttccaccaattaaacttgctatagaaactagatntgattttctatggttca

SEQ ID NO: 188398 - DNA, 313 bp, Glycine max
  unsure (1)..(313): unsure at all n locations
cactaagagttnttgaaagaagagataagagaatagctttttaaattctcaaatgatgattttgcataagcataaatacttttgagttaaaaaattttaggaaattctccaagtgcccgttttccctcttatagtttttcaagaacaaaaagaggagaaagagtttgatgtaacgactgaaatctcattaaatgtattttaaaaatgtttatcaatcatggcaagaattgcggcggacatttctgaataaaactgagactgtgttgtctctgtgaacacgtttcctctttcatctatgcacttcaacaaacat

SEQ ID NO: 188399 - DNA, 340 bp, Glycine max
aacttattaaccctctgaggcattacgcatttttatttttggaccattatgatcatgtaggacactaagtgggctgatagatttgcttgattctcatatatattttaaaaatcttcaaaaacagtattctcatttgattttgcctctttacagggtttccccatggaagtgctgccacttattagcagtactttacaagtaagtctgttataagacttgaagcttgaatatgtgagaaataaaaactggtcactcactcacttgctttattacattgcaataatacatatttatatacatcaaaaagggatagagacagcttgacaagacaagccatact

SEQ ID NO: 188400 - DNA, 469 bp, Glycine max
  unsure (1)..(469): unsure at all n locations
ctcagcttggggatttggatagtgatttgcctttatgttgatgtttaaaaagaccaccggatttgtatttctatgggtgatcgtgtctttacatggagttctaagaagcaaggcattgtgacactttctacttgtgaagccgagtatgtatctgcaactttttgcacatgtcatgccatctgtctaagaaaattgttggaggaactttagttgttgccaaaggaaagcacaaagatctatcactactaaaaaaaaggacttttacatcggttctaatggcctttctacatcggttatgacgcgtggtggtaacccgggatcattgaatcaaacatcggttttatgatcgagtttgaaaggtggcttttctacatcgggtgtctagcttcaaccgacgttgaatgattangtgtctacatcgggtgtctagctacacacgaagttgatgggtaggttctacatcgatatc

SEQ ID NO: 188401 - DNA, 384 bp, Glycine max
aaatacttaatgccattaacctagggaaataaaaaaacttaatggctgggtgtaactgaaattggggcaaccaaaaatcacccccaacagccaacaagtcaaccaccatttggtctcccaaaaagatgatgcctagggtgccaattgggcccttattacaacttgaactaaacctaactaaagcccttttagttgattaacccaaaacatatttttggtcagccaactttacaaggatggggccattatttaaacaaactaaacactctaaaattgaaacagagtggtgtcatttagtcctcctccatttgggccatgatacaactcacaaccttggactttttctccttgaaactgggcttgtattcaacagtatgacagcac

SEQ ID NO: 188402 - DNA, 389 bp, Glycine max
tttttcattaaccagcgccggaaatctagggagaaccccccaatcgtgagagttcagaccccctgctgttcaaggactaccacttggggaagcctcacgaagaggaactttctacttcatcttcaccttggccttcagatcacaattccagaaaatccatcttctgcccagaattatctcgtggtcgtaactcaccgttttacacactcaaattaagcgattcttgagcctaaattgaattccatgacgagacctatcacctcgttttggaatcacttcatatggagccctgtagcgtgagatattgtcacttttatattccttcccaggcaccacttaacctactgtgtaccatcctgttgctccattttatgcctaaaccaccttat

SEQ ID NO: 188403 - DNA, 362 bp, Glycine max
  unsure (1)..(362): unsure at all n locations
aaccataggcgagacgatctatagaggtatgatagggacctttctgtatttgaccttaagtagacctgatattatgcatagtatatggttgtgtgttaaatttcagtttgaacctcgagaatcacatctaaaggctattaaaaggaacttacgttatctagtaggtaccactaaccaatgtttgttttataagaaaaatcaagatttcatgttagttggctacctcttggctgaccaagggagtgcacanatttccatatgtttatgtatcttaattctagttttaattaggtataatgacaccatcaactgttgttatcaattctagttttaattaggtttaatgacaccatcaattgttg

SEQ ID NO: 188404 - DNA, 407 bp, Glycine max
  unsure (1)..(407): unsure at all n locations
tacacagataacanaatgcgctcttaccccactctagatctcactcagatacataacagggtcagaatctatcctagatccacaaaagaacgtaacctaccatattatccatgctctgaacccacaagtgatgggcatgatgagtgtattgggaataacccaagacccatatcggctagagatagtgccaagatatatagtataaggggcagacnacccttgccctatgatctaactcttaagggtaagctagaccataaccttgtgaactatattgccgcagatgattgcagatcatatctaagaacacaaatatatggctttggtgaccatggcagactaatgcttcattttacaccgccccattatggtcatctctccatgactccatacccccacatatattc

SEQ ID NO: 188405 - DNA, 447 bp, Glycine max
  unsure (1)..(447): unsure at all n locations
atctgtgatatgctgctgaagaggcatattcactgtatttgttctcctaaaagtggaagtggatattctcattcatcacatcccatgcaatcagttctcctttgtatctcgaaaccacagatatcatactttcagctgctgcttctcctgatttctcagatgatagggtcttaacccattctggctgctgttttggattgtcctagaaaatgttatggcccctcacaganatgccattctctttggtaaattncatcatggcatctgggatagtgtagttttcctctgtactataccacttcatctcattggtgaaggatgtcatggntaaatatatttttattccttgaaaaatatcatggctcttattctagtctctacaacacatctctagaaggtataaatctataatgtatttcacgtcaaatagaatctcaactggacttg

SEQ ID NO: 188406 - DNA, 363 bp, Glycine max
  unsure (1)..(363): unsure at all n locations
actgggccattggaggacacatgtgaaatgaacaactcccagtaataccccaatctggatggactggtccctatagttctttattctctagaactcaagaaaactttcttgaagtgttctttcacttcacaaatgaaacatctcatctttctgccttctttcgatctggatcttgtatcttcttgcccttgaattctttctctttaggcctctcttaagtgaacaatccacctgcatatagatcaccctttctttttgacttctctctcnaatcttttgaaacaacgttgctgtactccttatatgagaaagtattcctgcatataaagtgtatagagagctgtacactcctcggtatgatct

SEQ ID NO: 188407 - DNA, 269 bp, Glycine max
tgtctgtgtttcaacctttaagtccactccactctctaatctgcgtcaccgcattccaagttatcgtttcactacaaatattgtactcggcagcgtacaagggacgtatgaaaatgcaccatgtatatattataataatcattctcactcatcacaaatgcttctttttcgaaaggatgtccatacactatgactacagtcaagagttcaaagaactaaaataatcattcttaaaattgtgatagcatcatgcattccttatatttaat

SEQ ID NO: 188408 - DNA, 370 bp, Glycine max
ccttaaaacaaaaatggcacacaaccctctccaataaatataaacatcaatgtaaatttagagcaagcttaatgcgcatacttctatacaaacgttcactggcacaagacattcttataactaagaaaaatgcacccatatacaatcaaggcaccttcgttacctagaatatttacatgtactaccaaggtgtattcgttacctacatcacacgcatatccttggctaaattacatacatgcatacttcaagcactttggctatcaaaaattgcatacgtgcacattctggtatatctaatacctatacatacacaaacttcatgatgaatcttgactatctacacaataaggtgctacatctcatgctc

SEQ ID NO: 188409 - DNA, 422 bp, Glycine max
  unsure (1)..(422): unsure at all n locations
agaatacacaagctnctanacccnaggcaagagagaagcggtgaactgtctttttcttattcggccggagataattactcgatgacatgcaatctgtggttagcgcgctatgagatacttggcatactttgtcgcataatatatgaagtcccgagacgtctcaaaaatctaaaggaagcaagcttgcgcgacccgtgaaattccataatgtggcggaagtcgataagaggcgtttttgcgcaatccacaagtttccataacttcttcgagagctaataaagagtaaatacataattcgtaaggcgtgcgaaccttgcggaagaacaaaaacgactggtcgagattcgacgggtcataaccttcggaagagaaataatatcgtacggaatcgacagtgccgaccgaaccgaaaatattacaaa

SEQ ID NO: 188410 - DNA, 405 bp, Glycine max
caagacaatttttatttttatctacgcatgcacagcggccaaggatgcatgggagatcctgaaaaccactcatgaaggaacctccaaagagaagatgtccagattgcgactattggctacaaaattcgaaaatctgaagatgaaggaagaagagtgtattcatgacttccacatgaacattcttgagattgccaatgcttgcactgccctgtgagaaaggatgacaaacgataagctggtgagaaagatcctcagatctttgcctaagagaattgacatgacaagcactgcaacttaggaggcccaagacatttgccacatgagagtatatgaactcattggttcccttcaaacctttgagctatgactctctgatatgacttgaaagaaagcaagaattggcgt

SEQ ID NO: 188411 - DNA, 385 bp, Glycine max
  unsure (1)..(385): unsure at all n locations
ctttgatgaatgagagtcttgtgatacatacttcaaagttccacttctctccctctnttattccttcaatttcgggctcccccctctttctccctctccctttttcttttcctccattgaagcatccttccaagcttcttatccaaggctcatcttggtggtgaagctccttcttccatggcttattccctagtggatggtgcctcctctcacctcttctcctttgtcttccgctgcatctccatgggggaaaatcaccattaaaggatatcattgaagctcaaagatccatcctccatagaagccccacaagcaagcttccatcaagtggtaatcagagcacaagaacatcaagtaggtgctccttaaacctccatntaatttt

SEQ ID NO: 188412 - DNA, 382 bp, Glycine max
ggttttgtgatgatgtttgtgatgtttatatgctgaaattgctgatggacaactgttagagatgaagggtagaactaacctatggttagaaagtgagaatgtgatgttatgagtggaaaaagagtgaggctttgatggttggaaggttaagtctgaattctgtggttaatggaggttaaagtgagttaatactagctcgaaatgtcatttaggacttgggagaaagcttggactgtgcttgagagatatacatattatcttagtgaacaaagagccatttctatggcaaaattgtgtgttgaggagtcaaattttgattcggtggaatattatgtgtaaattcagtttgagcaagtttatattgatgttatggacttgtgtg

SEQ ID NO: 188413 - DNA, 426 bp, Glycine max
  unsure (1)..(426): unsure at all n locations
ttctgattgctctgcagggtgtttcttttctttttanaaaaggagaagaaatcgaagcctcaattttattgtctctgtgcgaggggcatttctctctctatagaaaatcccaatggtggggatatgtgaaaatgagtttcgaatgccgtgttcaaattttaggtcgatccaaaggttaacaagtctaggatcgtagttttactatgacaggtttgggtgtaaaagtggacctaatatgtctctatttatagctagggtactctgagcctattatttactttatttcgcgatttcattattttataaaaaagaactgtattttactctttcatcaaataaataaccaatgtatacatcccctgtatttctaaacatcattttactctatttattttctaatactatgaaacatctattgtaattaac

SEQ ID NO: 188414 - DNA, 452 bp, Glycine max
gatgaacacggcagagtggccataaacaaagctaggttagtagcttaatgctatagccaacaagaaagtgtatattctaatgaaacctttgctcttgtggctagacttgaagctataataatcatgcgtgcctcttctgctcatgataacacagagcttttcaaatggacattaaaagtgtttgtctaaatggctttattgaagacgaagtgtatgtcaaacaacctcttggctttgatgatcacactcttccagactatgttttcaaacttaaaaaggttatgtatgttctgaacatgcaccccatgcgtggtatgacagaactaattcctttatgttagaaatttctttatgagtcgcgaagtagacatacttctttttaaagagagtggcaggaattcttatattcgaatatatgacatgatatatcttggatcaataagacctctgtc

SEQ ID NO: 188415 - DNA, 385 bp, Glycine max
  unsure (1)..(385): unsure at all n locations
gagtggaccaaaattgattcaactccacactcgcactcgaactcgcactgaccggaggcagagtaagccatttgtcctcccacggccttgtcaccgccacccagaactgacgctgcccactccttaacgctcttaacatcatggattgtgccgccctcatctcacccaattcaatttaccacccccattgcgtgttttttttttctcttttaaaatattactaacatttaactaacttctttaatataaattctcagatgcttaacaatttaagaaaattaatctttcaaattggtttacaataagagtttcatgtgctgactcacaatatactatcattcttngatatcttttaaaataattttggcacaaaattatcatacat

SEQ ID NO: 188416 - DNA, 292 bp, Glycine max
tactgccggattaaacgtcaacataataagttatgcgagtctgtcttgcaagagggattctatgcacctatgtgaattacgttaatggtaaattattagaaagtaaaaaaaggaagtgtcaagtatgcccatcgggtctattactgtgttattatcgctttgaggcaataatataaagctagagttggttactgaatgaattcatcccttttaagagatacatgtaccattatgaaattagtgtcacatactagatagtaactcttttccattattttgtgacagaattgga

SEQ ID NO: 188417 - DNA, 310 bp, Glycine max
gtcttccaacccggcaaatgggtttgggtgtaccttataaaaaaaaggtttcccgaacaaagaaaatcaaagctttcacccaagggagatggaccatttcaagtgcttgaaagaatcaattgacaatgcttacaaagttgaactgcccgatgagtataatgttaattcaacctttaatgtctctgacttatctctttttgatgcagatggagaatcctgattgaggacaaatccttctctgagggagagaatgataagacattaccaagagcaagggcatggatccacttgaaggactctgaggacctat

SEQ ID NO: 188418 - DNA, 416 bp, Glycine max
  unsure (1)..(416): unsure at all n locations
catttaaatatgatatgtatgttatgttatgcttctctatgtcatgataattggtggaaagaatattatttatttgtcaaggcttcatgatatcaattatcgatacgtgaaaatggtaatgttcaacagtgtgtgattagtgttattttgagatgaagcatgaacacaaagtgaatctgtcccctacgtgaatngaccttggtgaataggatctaccatcagcagatgcaaaccaaatttgccacaatctctccaactggtgtcaaatctataatggagaagacccttcaacagatggcttggtaaggatgaataccctctaataagtttatagtaccaattcatacaaaagcaaatataattgtgtttaagtatatatgcgtagtgagtacatatctacactttacactgatttg

SEQ ID NO: 188419 - DNA, 367 bp, Glycine max
aacaatctttcctaacttttacattgatgatgccatgatgcacattgaggatagaattaggaactaacacaccaattatcaatacataactgtcactcaaaggagttgcgcaatgtaataaagaacaaaacttcttcaacctttaaagtttactctttatgttgctccctctatctctagcaaaacagaccgtggtatcttgagaagcatggggataccatcttttccactcttatcacctcgagctatctgtatggagaataataattattacaggagaaacaacatcatgtatgaggccaacatcaatctctgtgaaaaatggtagaggtggcggaattgttctttaaacactcactactatcat

SEQ ID NO: 188420 - DNA, 365 bp, Glycine max
  unsure (1)..(365): unsure at all n locations
gaaaagaatattctcttcataatggatgcgtagatatcttgcagattataatatatcataatagtacaattacaattatagtaaatagtaaacacgtatgatgaaatatatcttatcatacaacacaagattacaagttctaacacccatggtaaactcaacacctcataaaacattaacaatttaagaaccaaatgttaagcatgatctctttctctacattgaagaatgcaacttanggacaaggtttactgctcaaatgcatcgatataatatacataggtgttacatcaaagatgtttggcagtgcaaactactatgaatactacacngaataacactttaggatctagcacacccacatg

SEQ ID NO: 188421 - DNA, 392 bp, Glycine max
tttattttcgatctctcataaaaaatgttgttggtctaaatcatcgctgtattaaaattgttgtttaaatcttcggcggtagttatatgatggcgtaacaccatcataatcgattaatgatatctaaagaattagtttctaagatgatagttatcactcacttaactaatgttagatactcacaacataatttttcgatatatcaaaaatttataacaccacaaaaatttttaaccatccacaataaatctatcattataggactttcatatattaacccgatctaataatattgacaagcatcatgctgaatatattctcacgttgccataatggccctctggtctctgagcatcttgcaggctatcccttgttgtgactctcactccttg

SEQ ID NO: 188422 - DNA, 396 bp, Glycine max
taagcttctgagaagctggcttgagaagaatcctagagaagctagtttctttctacacacacccctctaatagctatgctcacctcattgagatgagaagctagagcttatctacacacacaccctataatagctaagctcgcccctatgccaaaatacatgaaaatacgaaaaagtccgtactacatagactactcaaaatgccctgacatacaaggctaaagccttatactactataatggtcaaaatacaaggccccaaagaaagaaagacctattctattatctacatagaataatggacccaaccttggcccatgggctcagaaatctacccagatgttcatgagaaccctaaggcctgtcttagcagctctaactcaatcctcttggagt

SEQ ID NO: 188423 - DNA, 161 bp, Glycine max
agaactgatatgctacccgggacccctctgtatcctcaccgaaaattgcagcttaccccgacttaacaaagttaactaggccagctgtacccggtcaaccgcaaggtaccttaccgtgggagcaaacaaggagcgcatgtagtgaccaagtctaacatcag

SEQ ID NO: 188424 - DNA, 345 bp, Glycine max
catcaattttcagcttttccttctcctccattggtgattcttcatatttctccaaggatatcctcacatgtcttatgctaagtgtggttaacatgattctttagaatttccaccgattaaacttgccatagaagctagatttgattctctatggttcaaatttcttgttcttgttcttgaaccatgaattgtgttgagtttaggttcctttgagttttgtcttgctattatttgtggctgaaacctaaaacataaatttctttaaaaacatttaagtcgaagagaacctcacaaatctaaagtgactctgtcacctattgtagttttgcatagaagtcatgtcta

SEQ ID NO: 188425 - DNA, 436 bp, Glycine max
tgcacttatcgctatctgcaacaccaaatatctttctataatatacgcttagcctgagatgcgaggcttagcgtaacatcaagcttcaacttacagtgagtgattcatgcttagcgccaccacatgcgctaagcgtacttccagagaattataaatagaatgatgttggcgctttgcgcatcctttcccgctgagcttatcttgaaagcttaacttacagaatgaatctgtggcttagcgtaggatggcgcacttagtgcagctataataaagtttcacaaataggaagtggcacttagcacatcatccacgataagcccactgcttaatgtgcaacttacagagaagatgtccgcttagcgtacaatgtgcgcttacttaaccattctgcaatcatcagggtcatgccttatgcgagtgaccttccactgaatac

SEQ ID NO: 188426 - DNA, 262 bp, Glycine max
  unsure (1)..(262): unsure at all n locations
cctgaacnacgagaaggggcgactcgaggctttttttttcgaagggcaaattaaagatgtattagctgagttatgccaaccgaagagagaaaatgacgacagggcagtacaaagcagcttcgtgacaagtgcaaaaatagccaaatctattggctgtattggtagactcagccgaaatggaccaacacaaaggaccggcgtgctttcagcgtgatcttcaaattagctagatcaacgagcgctacatactatacaatcatat

SEQ ID NO: 188427 - DNA, 237 bp, Glycine max
cattgacctcactctgggcgaagttttaatagtaaagatcactcatgccttggccatgaatggcactgcctgttgtaaatcactaaccttaagcatataaggaaaaaaaaataatgtcttcttgtcataactactgcttgaaatggaaacagtaaaatatttatcttgttaacctgcgtgaataaaatacaaatgtgccaattaatcccaattatatctagaatgggaactaaaaaa

SEQ ID NO: 188428 - DNA, 353 bp, Glycine max
aatccaattaagaatgagatatcccatagagaaaacgtccgattgatttttcgcctttattttactaaaaggtattctgagattattatattattattgtacctctttttttatttccaacgtggttactgcacgaccgaacggtcggtattcattttaacctaaattaacggatgatacaacctcatcgatcgggggaaatttattctatttttagagttagcgagaaatgacttaaattaatggcttaagcacgtcacaatgacgtataaagagttagtgaaaacgagatatataaatccatgaaacaagatgtggaccaccacgggtacatagaatgaattgacaagctt

SEQ ID NO: 188429 - DNA, 327 bp, Glycine max
tggagcgaaaatgtgaaacccttattttgcaaagtccttggaatttaccggtgatgacaaaaatccgcgattggagtacattctgaagatgctttttgcctgatgctgagaaagatgttccaacatctttcaccccaagtgtttctgtgcctgatgctgaaaaagatgttccaacattctttgtctcaaatgctgaagcccttccttcacccagtgaagaggaatcaacagaataagaggatcaagccttagaggagacttctgcccatgggcaccaaaacctgctccaggtaacctcattgacttagaagaagtggaatctgatga

SEQ ID NO: 188430 - DNA, 286 bp, Glycine max
aagacctacggtctgaaaggcttgaatgcaatcaataagttcagcagaattaaattccatattcatgaacttatggtcgataatggaatgagatgagaaatgatttgagtacctgttttgctgttcttcggtagaaaatattgtggacgaagataagagggtggaattgtgttgggatgcactgttggctccggaacaatgaactcttgataccgaaacggaggtggatgaacccttacatttcttagatgaatctgccatatgattgagttattgcagatatcaa

SEQ ID NO: 188431 - DNA, 320 bp, Glycine max
  unsure (1)..(320): unsure at all n locations
caaccacctaattaaaaaaattgactttggacaaatgggaattaatgaccgaaggattccagcttgaagatgacaaaccaaatcagaatattcaagaaattcttcctcaactatgtgcattagcattgagtaacttgagagatttgacttgtgtctgtaacaaggagcctcaagttccatttttccccaaattagccgcaacttttattggccactgtgaaagactcaaaagtttatcctcactttcttctgctaaaattcctggaaaactcanactactcaaattgtgtggttggagaaaataggagaggtgatatcta

SEQ ID NO: 188432 - DNA, 442 bp, Glycine max
  unsure (1)..(442): unsure at all n locations
tattcttttttgcacttctccctaccccttaatcacgtctctcaccttattgcaagagttaggggaggtccattcctaaatttgtttctctttcttttttctgtgtgggtagatccatataagacaagacctctncgattacgcttgtctctctaaaggaagggtacaccttttcttgagcatttatatcctgcattcccaccattgcattaaataccttccattgcattttagaaagtctattccataatataaattcacatnttagaacaaatttctcgaaatgtaatgaaagatgcatgatgcaataatgggagtacaagatacaatatccctttttttttcttatgataacatcacatttgacacctattttttccaaagtaaaagtattatatcaaataatgtctttcttatacttccttcacaacataggaaatgc

SEQ ID NO: 188433 - DNA, 446 bp, Glycine max
  unsure (1)..(446): unsure at all n locations
tactaagcttctcgatatatatgctcctgaatcggactgtcgtgtgaattgnnattatccatggaatttctcgagagcttgcgatgttctatntcgagcctctcgatatattatgctcctgaatcggacttccgtgtgacaagttatgaccatttgaattgctcgacaccatacgttgttcaatatcgagcgtctcgatatattatgcgcctgaatcggacgtccgcgtgataagatatgaccatttgagtttctcgagaggcttcgttgttcaatgtcgagcttctcgatatattatgctcctgaatcggacatccgtgtgacaattatgaccattggaatttctcgagagctcttgatgttcaatctcgagcagctcgatatattattcacctgaattggacattctggtgacatgttatgaccattttagttattcgtgagct

SEQ ID NO: 188434 - DNA, 200 bp, Glycine max
acatgcttatccgataaccacgtgttatatactatgatccttcctcacttattataactaacttttatgcttggaactattgccattgtatccacgttaaatatatatataattatttatatatttatactatcttagactttattataatgagctaagccccactaagaggtgtaaatataggaaacctcatgaattag

SEQ ID NO: 188435 - DNA, 360 bp, Glycine max
tacatgatttcgatgatgcccacaaataatcaaataatgctgctacaaatgataatcatctgcttcaagattaatacaagattgcttcaacaaacaaagccttgcttcagagttctttaagatgatatcttgcctcataacagagtgttcccaagacatgcaatgctctggtaatcgattaccatgaaatgtaatcgattaccaaaagacagggttgacaaatatctgttgaaaagagttatgaatttgaattttcaacatgtaatcaattaccatatgtctgtaatcgataccaactacgaaactcttgaaattcaattctcagtcattaccctctcaatattactattgtatgaatac

SEQ ID NO: 188436 - DNA, 465 bp, Glycine max
  unsure (1)..(465): unsure at all n locations
cccatcacatgtggtactaggtgtgtggtctttcgatggngcacaacaagttttccacatccacaatgcgcgcataaacccaccatcccctgttgcccacctccaactaagctcacgtactcccacgtagcccatatcctcgtttctctcaacaccgggtccccatcaatcctcccaagcttgcacaacatccaagcaaaacaatattcaaacagtacaagctatcacagccaagcaaaacagagcaaaggcagaaaactctgccaaaacaccaaccaaatcacagcttttctcacttaaagaccccagtaacaattccttcgatccaattcgttaaccgttggatcgactccaataatttactggaagtctatagtacataagcctacattgtgaccgttgggatctactagataacatccagaactcattntacattactctttccacaaccagcatatacat

SEQ ID NO: 188437 - DNA, 353 bp, Glycine max
cttcgcgaaatccaaatgggcataactattccgccggatgtccgattccggcgcataatatgtctagagtctcgaaattgaacaacggaagctcttgagaaattcaaatggttataacttcttacactgatgttcgattcaggcaaatcacatatcgagacgctcagaattgaacaacggatgctcttgggaaatttaaatggtcataacattcaactcgaagtccaattaggcgcatacatatagtgatttcaaattgaacaacggaagctctgaaaattaaatggataactttcacactgaggtccattacggtataatttttgaacgctcgaattaacatcggaactctt

SEQ ID NO: 188438 - DNA, 92 bp, Glycine max
cgacaatttccagcgtctagacataagatgcgcccgaatcggacatcccggtgaagagctatgacgcgatggatatcaccagagcattctat

SEQ ID NO: 188439 - DNA, 416 bp, Glycine max
  unsure (1)..(416): unsure at all n locations
gcaagcnnaaangctcatatgggacaccttattttttgtctttcccnnngacaggaattatcagcatgtanatacaaaaaaaaaaaaggtatgttttattgcattactttccttaatattttaaaataaagattaaggggttctcacagaccctgagagaataaaggtcatttctaagtagcccattcccctaagtataaagaaaatttggggcttccacaacttatcaaacttttacaaaagatttgtctcatacttttctatacttgtagcaccacctcattgagttggtgaggaaccatgttccctcatgggaagatgtcccagaaaggcgttttctaacctttccctacttcaacatactaaacaccacttatatttatgtttttatttttttacaaatgttatgggaaaag

SEQ ID NO: 188440 - DNA, 312 bp, Glycine max
atatggggaaagctggctctagaacatttccatttgatttaatgatgaaatctgtgcattttcacgcgaaatagatgctaagtgttgaattgcaaaaagtagcacgtttggctaatgcacttatacaccgctaaacgcagcttctacgcgcttatcgcgaatgagaatctatcatatcatcagcatcaaagccgcacgctaagcacgagatcagtgcgctaagcatatcatgtgccttcagccaggctcagtgcaagactggcacttaacccaattccacttactcaagctaatcgcgatggtggcgctaat

SEQ ID NO: 188441 - DNA, 224 bp, Glycine max
gcaagcacgcctgtgaacatctgtatggacctatatcaagctaagcgtgagctaaccggcaagcgaggagacacgtgggacgacgtgttttatgcgctgagcgaattgtgcctcatacattgacaaattattaggacaaaaataagtatgaatgataaggataatctaatatatatatctgtatatatctatatatatatatatatgtatcaatataagagaaa

SEQ ID NO: 188442 - DNA, 413 bp, Glycine max
ttttatctgaaaagaggcaaatttaatcattctgcttatacgaatgacaaaactggggcaaataaagagggtgaggattagggagaaacccatgctgagactgccattcctatacggccaagtttcccaccaaacccaacaatgtcattactcagtcaataacaaaccacctccttacccaccacccagttatccacaaaggccatccctaaatcaaccacaaagcctgtttaccgcacttccaatgacgaagaccacttttagcacaaaccaaaaaataaataaacctctcaccaacaaggaatttggcatcacaatagcttgaggtgtcaccccaaattcgttgtcatatgctaacttgctcccatatctacttgataacgcgatggtagccataacctctgctaggttcc

SEQ ID NO: 188443 - DNA, 326 bp, Glycine max
tgagaaagaaggagaaacctctgctgtgactgatatttctatacggccaagtttcccaccaacccataaatgtcattactcatcctataacaaacctccttacccaccacccagttatccacaaaggccatccctatatcaaccacaaagcctgtctaccgcacttacaatgacgaagaccacctttagcacataccataaaatacaccaaccaagatatgaattttgcagcgaatagcctgtatgagtcaccccaaattccggtgtcatatgctaacttgctcccatatctacttgataacgcaatggtagccataacccctgct

SEQ ID NO: 188444 - DNA, 285 bp, Glycine max
ggaagtggaaatgaggtgttgatgtttaccttgaaaaaaattggaaattagcaacattgagaatggttatcttgcatgaaataaaaaagtgagttagatctgttcatactgcttggaaatgtcttggacctatattggatttatgctcttttggggggttggatgtctgggccatttctgtgttatatattgtaaatttgtcctgttcaagatgaatgaatgaattttttatccttatggatggttttactagcttgtgtttgaggctcttacactacttgataa

SEQ ID NO: 188445 - DNA, 212 bp, Glycine max
aaacttccaaaatcctaccagctcttacagcaaagcctttatgaacttctgagataccaacaatctcaattgcaaaaaacccatgcgaatgatgatgactgatgatggtgagaggatgatgaacaattagacacctattggcatctggcaatagcttttatgcgagtagtgtgaatgacctccacatgacttccctcctgagtggttctaat

SEQ ID NO: 188446 - DNA, 346 bp, Glycine max
  unsure (1)..(346): unsure at all n locations
gacctccaatcctataacgcaacgagacggacaacagcgggtagcttacttgaatggccattattattaatgcggaaggtattctgcactccactatccatgttcacacattattgcagcttgtggtgacgtgagcatgaactactaccaacatatagatgctgcttacacaaatgaacacatcttgaaaacatactccgcacagaggaggcctctcgggaatgaatcancaattcctccttctgatgatccatggacacttatccctgacccaagtacaattcgtgcgataggcggtcaaaatcaacaacgataagagatgagaatgatttgctcgacaatctga

SEQ ID NO: 188447 - DNA, 386 bp, Glycine max
  unsure (1)..(386): unsure at all n locations
ttaccacggggacactactcttaaaacaaaaatgacatacaacctcctcccataaatacaaacatcaatgtaaatttagagcaagcttatgcgcatatctccctacgaacgtttacttgcacaagacatcctattaactaagaaaaatgcacccatatacaatcaaggtagcttcattacctagattatttacatgtacttccaaggtgtatttgttatttacatcacacacgcctccttggctaaatttacatacatgcatactcaaagcatttcggggtaccaaaaatagcacatgcgctcatcttggtatntctaatacctatacatatacaaacttcatgatgaatcttgactacctatgcaataaggtgctacatttcatg

SEQ ID NO: 188448 - DNA, 396 bp, Glycine max
  unsure (1)..(396): unsure at all n locations
tacagagaaacaacatgttctatgtttacgaacaagtgtgaagaataatgtttaccgtaagcactggttggcttatcagccgctgtcaaaagtaggctatcatagcaatctctcatgtcttgcatgccctgctaaacagtgaaatggaaacccttattgtcactataattagtaagcccatttaatagcaaattgccaaattgggcatgagatcgttcaacattttccacaaaatcaccctcatcaaacacatgttttacctcatttataaccagtttgtagtgttaatcttgaagctaagaattcaattttttactttagcttanacaaaanaatttgaatttaggttattggtacttactgcgtaatgcctagaggcaactggaagcaatagag

SEQ ID NO: 188449 - DNA, 400 bp, Glycine max
acaaaacaacgaaaacagtacatgttggccatatcacgttattcgcacaccaaaatttataagcagtgttggattacttctgtttgttttccatgagctccaacaatattatggcaataaccattatttctaccaaaatcacttttaatttatccaatcataaattgtgttactttaaacttttgtaatcaccataaacttcgtaaataaaaaatgtccatatcaagtttgtaaattttcaatcaaatatacgtgcacactgaaagacaatgtaagaagggtccattaaaagtccgacattagtactgcgtggactgtaataattcctttccaacttcttttttgtgcgttcatacctgcggtagccagtatggggaattcctactctaaaaatatgaaa

SEQ ID NO: 188450 - DNA, 321 bp, Glycine max
  unsure (1)..(321): unsure at all n locations
ctctccnggccaaaataaatgtcattctatgttgtttcacaatttatactaataaatagaagagagtagtatgccaaactaaaattattattaattacattgaaaaactaaagtgatatttattaggggtattattggaaagaacccaaataatattacattgaaaagctaacatgacacttattttgtttcaaatgtgacacttaatttgagacggagggagtataacataccaaacatataaggggaatggagtcatttttcattccatccacaccaaacacaacatgagaatgaatatttcattctcaatttcccact

SEQ ID NO: 188451 - DNA, 232 bp, Glycine max
  unsure (1)..(232): unsure at all n locations
aaaaacttggtaacaggtgttataccanttgagctaggagggctagctgaattgcaagttatattggacttgagtaaaaatctcttcactggtgaaattccaccttctctaggaaaccttatgaagctagagagactgaacctttctttcaaccaacttgagggaaaagttccttcttcacttggcaaactcacaagcctgcacgtgttgaatttatcaaacaaccaccttg

SEQ ID NO: 188452 - DNA, 456 bp, Glycine max
  unsure (1)..(456): unsure at all n locations
cctacggtatgtgttcaagtnttctattcgtgaaacttccttttctttccagtactcgaatactcctttaaggaatgtccatcttcacccacagattgaggaataacaagaacgggcaaagataattccaatactggatgtccaatatcttatgcaaaccgaacttattaaccaatttgagaggtaatttgggtttgttgtatttagcccaatgatatcttaatactagacccaaaactgaaggctattgctntgtgcactangcatattgcttgtgcacccaacaatattacgatattccaaaaataccattgngtgttcttccctttaactntttctttcacattgttgactcattcattcattctgttagtttcgtcgggtgtattcattctcgtaagaggagaggccattgtgtccattttgtcgacgtgaaagcctacggactacatcgac

SEQ ID NO: 188453 - DNA, 323 bp, Glycine max
tatatatttcgataatattaaattaccacttggttatgtttaagaactttcactataacacaacttgtgttgtaatacctgtgtcgcaaatgatctatgcaattaattgttgcccttcctggactttcctgaccatataatcaaatgctcaataaccgtgatattgtatttcaatgctttcattacttacaccttgctggatattattgaaacgcttatgtatttcactgatttgattacttagtaaaaaaaagtgctgttggattattataacataaatgtccttatagaagtggacacatacgtgggtcttctcatataat

SEQ ID NO: 188454 - DNA, 203 bp, Glycine max
ctaccgatgccgatatagtgtttctattcaagcctagataaatttggatgagtcttatagaaatgttcaacggtttttttagtgatgcttatttttaaaccttgatcggtatttcttcttaccaacgatcgcttcattttttcaacgcgattgggaataatgatgttcccgcgggctatgatttcttgtgagtaatgaaacat

SEQ ID NO: 188455 - DNA, 290 bp, Glycine max
  unsure (1)..(290): unsure at all n locations
acacacgntcatgtggagcatcatgaggcttttcgcgacctgtgtcagagtgtgggctatgcctggggagctgntgtgctggntcatatgtgtgactagttagatgaaacttctacgaccactacacggctgattgtggggtacctcactttattacaagttaattttgtggtcgggttacattcgattattatgtaaacatgttcttatgttatatttacctcatatttgtagtgctggatctacgagcactttccgagcgtgcatcagtgctgtactgataatgcgta

SEQ ID NO: 188456 - DNA, 287 bp, Glycine max
aagtaaaatagcctaatttgaggcacttttaatgaattaatttaaaaagaagaaatatatgtaaggacaataagtacctactgtgataaaaacttgaccagatgtgtccgccaagcaaggaaggtgtgaagtgcctgccccacaaggagtgtatgaacaacagtggatccctcataaacttctcccatggcaaccaggcgggcaggatctgcttctatgcacaagtcgcacctgtcagagtcacccgtctcaggatccgttcctgaaggatcaacacaactcccctt

SEQ ID NO: 188457 - DNA, 431 bp, Glycine max
ttacccaagcttgacacaacacattattctttatcttatcatgacattgctgactctatacaagtcaaatagatttgttgtttgtttgcacaatgactaactctataagcgtcttatagacaaatatacaatctttgcacttagtctattctctcaaagagttcaagttgttttgagggcttctctaaactttacaagaatttacagatagcttttattagaaagaatttgaaaatgaacacttatgtttgtaacccatttcttcatagactttggtatatataggcttttatctttaagtgcctgttgtctcacaacagatggattcacttaagcatgtgtttgatgcttatggttcgttgagcatttaatgtttgcattaaatgaatgtccttcttcgtgtagtgaaaatcacttgatcagctttctat

SEQ ID NO: 188458 - DNA, 487 bp, Glycine max
  unsure (1)..(487): unsure at all n locations
agctgattatcatccttggattatgccaatgttcttctttattttccacanagngagcatccctgcttacaactacactntttcagtttgcggctggaaaatattataggctttgctgactatgttgtagcctattaaaactactgctaatgcttttatatttagcttgtctcgcttgctcttccgtacatgattgaagcacaaacaaccaaatatcttaagaaattttatagattgtttgtaaccataccacacctcaaatggtgtttgatccttcaatgctttggtgggaagtctattttgaagaacaacgacagtacttggtgcctttacccaatatttgcttggcaaattcttctcatacaacatgcatctcatcatctccatatatatctattcttctctcctcaccctattcttgtggctatacgactagtatatatgtggagccgaatcctccaattgattatttgctattgtctcgggc

SEQ ID NO: 188459 - DNA, 336 bp, Glycine max
  unsure (1)..(336): unsure at all n locations
catctgttcttgcactcccttctcattatccatcttacttctggatcgggtgttataggggtgcctttgtgcttttttagttatggtgagttccctaaagaaacaaacagtggtgagtatgccaccaaaacatgaatatgctaatgaatgatcagagcacttggatccacctcaaggcctttnttagataacgtgatgagtttcagaacttctctttttataaaaaggaacaaaagcttttatctagccaagatcataccaaagtgttacaacagaacctaacggtttctaattatatgggccatcaaatctatcatgtgttgacagtaattgatc

SEQ ID NO: 188460 - DNA, 358 bp, Glycine max
  unsure (1)..(358): unsure at all n locations
caccctcattntgagtgtnttgctcatttccttctaaaatgtcgtgaaaccttacggatcgcgtgacaattggctttaagcagctcaacgtgactgggaggaatctatatgtcgacaaacaattgtccccaaacgaaaataggctatgacagttgcccttctttactntatctttattggagataaaagagaagtaaagataagacattaattttggtcaagccaattttcactcggccgaccattagctcaatcagtaaaagccttggtgccttgaaatcgataaaaaatggataaccgtgacggtctccgcatgctattggactcactcgtctcaggataataggggagacttctg

SEQ ID NO: 188461 - DNA, 378 bp, Glycine max
  unsure (1)..(378): unsure at all n locations
acgttatcacaggttcatatttntgtgtgcgtgtgcgtgtgtgtgtgtgaattaactcatccagtaaaaaaaatgagttctgataaaaaaagtgttaccatccactaattatgtaaaataaggttctagaatggtattcaagcgaacatttggttagaaaacattgacagaaagcactgagggaatgtttagtataatcgttaagaagacacttctaacacttgattaattataaggttactcaacaaactttgtcaattctttttaccaatctaaggggctctaacaaacttgttacaagcagtttttgcctgcactttgctatacagatttttaccactctacactaactagactttttgatttttaaaaggtttg

SEQ ID NO: 188462 - DNA, 341 bp, Glycine max
  unsure (1)..(341): unsure at all n locations
taaagtctcacgattgtcactgtgttcatgcaacaatngttagacgtggctatacgagacatcttgccaaacaaagtcaggttaacgataactcgcatgtgctttttcttccattctatatgtagcaaagtcattgatccagtcatgtttgatgagttggaaaatgaggccgcaattatactgtgccagttggagatgtattttccccctgctttctttgacatcatgattcacttgattgtgcatctggtcaaagaaatcaaatgttgtggtcctgtttatctacggtggatgtactcggttgagcgatacatgaagatcttaaaagggtatacagagaa

SEQ ID NO: 188463 - DNA, 334 bp, Glycine max
acaagctctgcattatcatatagtaattctttggaacacgctatgcaatttagtatgaagatgactgatcataaaaaagaagaaactcacacaagctgtgtaggcaaaaatatatgagtttaactctcctcctactgtaaatatcttacactatcaagcggaaaacaacttgataataatcccagagtaaatgctccttgttccccattacaagaacacagtggcatatcatgtaattcccactattgctatatgcatggctcaagagaggagggaaaagtacagtactctcaagaaatgattgcatgtgttgtacatgcaactaaggaacatc

SEQ ID NO: 188464 - DNA, 378 bp, Glycine max
  unsure (1)..(378): unsure at all n locations
gacatgtagaggaaaaacaaggacttcaaatcacaaaatgtcaagagactctatttcaaaacaattacccatttcttgaacatatcctataattcaaagaanaacatgcaaagttgtacatgcaaacaaaattgacctaaaatattaaactaggaacccaacaaaactaacaaaatcaacacatctaacaaaattaacaaaaccaacaaaactagcaagaccaaagaacactccccccatacttaaacaacacattgtcctcaatgtagcacaattaatagattaaaagcaattaaaccatcaaatagaattggacaaatgtaataaatggtaagaaggagataggacaagaaaaaaaactccctaagtcatggtgga

SEQ ID NO: 188465 - DNA, 412 bp, Glycine max
  unsure (1)..(412): unsure at all n locations
atcttaagtcacctgcggcatgcagcttctaaggaggtgagcttagtttttaattgtgtgtgtganctaagctctagcttctcaatgaagttttctcaaagaagcttctcaaggaagtnttctcaagaaatcttctcaaggaagctacctagtctataaatagaagcatgtgtaacactngttgtaactttgatgaatgagagtcttgtgagacaaaactcaaagttcaagttctctgcctttttcttccttcaatttcgtgctcccccccccctctcgttttctctccctctttcttttcctgcattgaagcatcctttccaagcttcttatccaaggctcatcttggtggtgaagctccttcttccatggcttattcccttgtggatggcgcctcctctcacctcttctc

SEQ ID NO: 188466 - DNA, 291 bp, Glycine max
caggtagggggatgtcacatatgtggaggaacacatgagtcaggcttatgcatggtccaagatgaaacatccaatgaatttaactacatgggcagtcataatcatcaaggattccatcaaagaggaccaccatgattctattagagggatatatttttgcaggaccacgattggagatattatccaagtaataacttcaaccaagggggttcaccctatcagcatcctagccaaggtccaagtcagcaagagaagccacctatcagtatagaggaaatgctattaagcttc

SEQ ID NO: 188467 - DNA, 185 bp, Glycine max
ccagagacaaacaagaaagacaaaatagacccgggaaccaggacacggcagaaacagagcccgaggaagccacaagcgcccaacagccgcaagggacagagaggactcgaccggcccaaaccaaaacaaccaggcacagccttaccaaacacccacacgaaacacaaaagtaccaaaacaaccga

SEQ ID NO: 188468 - DNA, 367 bp, Glycine max
  unsure (1)..(367): unsure at all n locations
actctngatacacttgtgatgttaaagaacacagtttgtgcaaaaaatatatttttcaaaaagtgattatactaaacttcatattcaaatggagtacaaattgataaataccatttagttatggaaggaaagactcttagaagtggaattcaaaggagacgaggctctccaaaatttgttgaaacaaaagtttacatattgtacggaaaccagctagaggaatggattaagagaagcaaaacataaaattaacaaataaatgtcattatttagagtattgacaaagctccaagttgggttgtttctgttgcaccaccaataacacaaaatcaatactcgaaccactacttaacataaacaacataat

SEQ ID NO: 188469 - DNA, 342 bp, Glycine max
atccttgaaggggaacctccttgacaatcggacgaaggtccacaggatcatcgagagcttgcccaaggagacatcgattcccactccccgttccccgccaaggggccggcacccaacgcactaccttatcccaacttcatgggaaaacctcgaaacccctcatcacaaccaatattcttttccgcagacgggccacccccggcagttgaagaatagaggaagctcgatctcaacgaagagagattgaaggttattgaaggctttggcgactatccgtttacagacatgactgatctttgcttagtaccagacgtcatcattcccccaaaatttaaggtaccc

SEQ ID NO: 188470 - DNA, 339 bp, Glycine max
  unsure (1)..(339): unsure at all n locations
gaggaagagaangagggatagagagagagagagagagaaacgcccatggaaagcngaaggaagacagggagataagttaaccttngaagtgtgtctcacaagactctcattcatcaaagttgcaacaagtgttatacatgcttttatttatagcctaggtagcttccttgagaagcttccttaagaagctagtgctacacctctcttggtgcttcttttcctcttgtactagggttgagctgacgactttgtcaactactgagagatacaagagcaggggtgctctcatcctgtgtcgactcacaactggaggtgtggctatgatcttcttgaaagcca

SEQ ID NO: 188471 - DNA, 335 bp, Glycine max
  unsure (1)..(335): unsure at all n locations
ttgtttaagagtagtgtcccactggtaaaactaactttccaaatgttcgccttcgcaggaaatggccccaaggaagcttgcctcaaagaggtctaggaaggacaaggcagccgaaggaactatttccgctccggagtatgacagtcaccgctntaagagcgccgtacaccagcagcgcttcgaggccatcaagggatggtcgtntctccgggagcgacgcgtccagctcaagacgttaaagaagcgctactaggaggcaacctagtaccttttaaatttctgcctgctatttgatcactttttatagtaagacgcacctagttgctcatgatcct

SEQ ID NO: 188472 - DNA, 220 bp, Glycine max
cattttttggagtcctgaccctctccaatgtgctcatttgctcctatgccctgcttttgtgtttcagcctttttggttgcgaatggtcaaatatttttggcttttgatgcgagaagtggaaaacacattaactgcattttatctaaaactcatgatacagttcgaacacaaagctaacttttggggtttgcttatttttccctactctccaaacaaaata

SEQ ID NO: 188473 - DNA, 190 bp, Glycine max
  unsure (1)..(190): unsure at all n locations
taatatttaactttatttactatagtgtttatttaataaaagcaaaatgatgaaagttatatatacgctggccaacatatgtatgcacctcttgtctgcaacttttaaatnntctatatgatacanaggaaactattctagaccaaatttgcaaccatcaatcttcgtatggtaatgtatattatgcatg

SEQ ID NO: 188474 - DNA, 389 bp, Glycine max
  unsure (1)..(389): unsure at all n locations
tcaagaatcaatattcattcgatcaagaatcaagattcaagtgaagattcaagagaagactcaagatatgcaagaacctcaagaaaagcattaagataactataaaaagaatttttcaaagaaaagattgaatatcccaatttgtccaaaataatntttcatagaaaaatcttttaccagagtttttactctctggtaatcgattaccataaggcagtaatcgattaccagaagcccaaaatagttttataactgttttacaaagtagcaatcgattatcatgggcatgtaatcaattaccaatggttttgaacattgaatttcaaatctcaagtgtcacaacttgtgacaaaatactttcaaaatagtgtaatcgattacaaaatatt

SEQ ID NO: 188475 - DNA, 279 bp, Glycine max
  unsure (1)..(279): unsure at all n locations
atactcttgttatgtgtatctattaaagaccgaacgagagggcaatttatcactcttagtagccatgagttatatgaaactggttcgggaaatggggtttcacatgtgaagtaagtttctgcaaggggttgtcaaaattgggttcaggttggattttgccctggtgttcttaatgtcatagatcgaggttngtgtgtgcttctattctgggcgtctgtgactgtgtctccattcactgagcctaatgtngcatgcttctttttggaggggacaacgtgg

SEQ ID NO: 188476 - DNA, 444 bp, Glycine max
  unsure (1)..(444): unsure at all n locations
ccggatccttaagtcacctgcggcatgcaagcttcctcggggccattcctgtgaaggcaaatatttggaaagnntaatttaccagggggacactattcttaaagcaaaaatggcatataacctcctctcataaatacaaacatcaatgtaaatttagagcaagcttatgcgcatatttccttacgaacgttctcttgcacaagacattctattaactaagaaaaatgcacccatatacaatcaagacagcttcgttacctagattatttacacgtacttccaaggtgtatttgttacttacatcacacacatctccttggctaaatntacatacatgcatactcaaagcantttggggtaccaaaaatngcacatgtgcacatctnggtatntctaatgcctatacatacacaaacttcatgatgaatcttgactatctacaca

SEQ ID NO: 188477 - DNA, 343 bp, Glycine max
  unsure (1)..(343): unsure at all n locations
tccccccttctagaagaacatgtttataatcctgtgatttaacaagacagaaagatgagtgaaactcaaagaagacattattatctttataaaactgactgacacanatgagattcttagtaatagaaggaacaaacaatctaaggacaagagagaatctacaattaagaggagaagaaaaagaggaaacacttgaagaattaatattgagaccttgaccattgccaatagtgatctgatcaagaccctcaaaaggtgtcacttgctgtatattttgtgacatatttgtcacatggtgagaaacacctgaatcagagtaccaactctgcccttgagttggagt

SEQ ID NO: 188478 - DNA, 286 bp, Glycine max
  unsure (1)..(286): unsure at all n locations
tgattaaatattgatcactttcaattcatatatttgtttgtgatatgattcatacaaaagtttgtttgtaactgtttttaaaagtacatatttgtttgaaaccaattcacccncatcttggtttattgagctccattattcttttttcaaatatttgttttgttctgttgcgtcaatatggagatagttgttctctcaactctcttttgtngagtatttgtctctatgtgtacttagaactagttagaatgtcaatacattttattgagtntgatggtttgtgtct

SEQ ID NO: 188479 - DNA, 377 bp, Glycine max
  unsure (1)..(377): unsure at all n locations
tgcaagcttcatgtgcaatanagatgcccgcaatgttttcattatcttctccatagngacccatgccagaagtgtcaccacccttctatagaagagggtcggactcctcgctaggcaaactactgtagaaaagcctctggcatcatcagtggaggctccatataaaggtgaatggatagttgatgcaagttctatatgacaaggcgatggccatgatggaggctctacatcatctggactacatgctcctgctgggaaaaggaggaaaaaggctcgtcatcactataagaggttgttggaggagggattatcgaaggtggagctagtggaacatctgaagtggtttgggccttgactcgctgctcaaactcccacac

SEQ ID NO: 188480 - DNA, 437 bp, Glycine max
  unsure (1)..(437): unsure at all n locations
gagtggaatccctcttgtggggaaaaaatcggtattctatgaaataaatcacaaatccattttctataaagttcaatagtgactagtaaagggttaagtggtctatcatgggctaggattgaagtctgttgaggaactataaaggttgtgaaacccagtggttattggtccaattgtaaactggttgtgttagtgaaatctcatctttaagggtgaggactagacataatccaagattggggtgaaccattattaaaacctcttgcactttccccccttctcttctttactttgattngatagagctttatcaaagggtttattaaaaactattntttatanaaaaaacttcactgtcaagactttttcataacttttgatttcatttaactcaaatagtttctaattgagctgtcctctgactatataaaaccttt

SEQ ID NO: 188481 - DNA, 267 bp, Glycine max
  unsure (1)..(267): unsure at all n locations
catggaacatgttgtntatatataatacaaataagactattatgtaacttaattcgagttttatttggatgctaagtctgtcgttcatatattactattattgtccattaaaaatatgtgcatttaagagaaccctagtttcccatttgagattccatacgatgattactatggatagtttggattagttatcgtatggaatcttgaattgtccgtatggacagtttgggaactctctnntttttntttactttattcgcacttata

SEQ ID NO: 188482 - DNA, 427 bp, Glycine max
  unsure (1)..(427): unsure at all n locations
gatccttnagtcacctgcggcatgcaagcttctcgattcattctatgtacccgtgtggtctatattgtgnttcgnggtattttattctcgtttcatttactgtttataccccctcttgacgtgcttaagccattttatttaagtcatttctcgcttaacctaaaaataaaataaatttccaccgaacgtttgaattgtattatccgttaacttcgtttaaaatgaattccgaccgttcggtcgtgccgtaaccacgttggaaatcaaaaagagataaaataataatataataacaaanaatataccttttagtaaaataaagcggaaaatcaatcgggcattttctctttgggatttctcattcttaattgaattgactaataactaaggtgaaactaaggcttaaatcaactcgcctagtcaagct

SEQ ID NO: 188483 - DNA, 383 bp, Glycine max
  unsure (1)..(383): unsure at all n locations
gagataggagaggccgtttgaacaatagtactaccttgtggtacaatcaaagaaggccagaattgcataacatgtggaaggcctgactctggctatctatactggagatggaaaccaagtcaatgtagtcttccaaggtttgagcctcaaactattctccaactcattagcaacaagaaagtacctnttgtgaggactcaatgcctgtgaaccaattagagtccctcctttgcatgttaaccactgtgtcaacaccgaatcttgtctaccggaacggagacgacaacattactgtgctacaattggcactcgttttgctcctgaatgtctatagggtggtaatttaaggggactactgcttgcctaatcacctaaatggttta

SEQ ID NO: 188484 - DNA, 158 bp, Glycine max
cactggacatttcttaagctccatttttacggcttctttttttcctccgctaatccggaatctcacatgccaaaggaaaaatctttttaaacaaaaattcaaggacaaattcaaatcccacaaagatagccaaagatataacctttttatttaatttt

SEQ ID NO: 188485 - DNA, 381 bp, Glycine max
ttcttgaatagacagccatggtgatggcttcttgttcaagtttcaacaaactggaatcagcagcccttgtgaccaagactgcttcctatgtgacatcatctgaggttggtggtccatgcagatctacaagagaaggcattcttgcagagggtgactcattcaagatcccatacagatcatagaaaccatctgagatttgtcatcataaccaagagcgttgttttctgtgaagcatggataaatctacgatatgagataagtcagaaaggaatttaaagtcggatatattacagttaagtaactctaaagttagctttcatgcattaacattctaatacattcagcatcattaactcttaaaattagtttccaaatctcata

SEQ ID NO: 188486 - DNA, 311 bp, Glycine max
  unsure (1)..(311): unsure at all n locations
caatttccatgggatgtgagtgttttgtgggaaccttaaatgtggtcatccaaacacttttatgatcccgcctaattatatttcttgcactntaatttctttcttactttcatagcttatgttctttactagtcacgcctagnttatcttgttattgcaaaatactttcttcttgcttatcacacttatcttgagttcttttggaaccctagcttttactctttgcaaacccccaacaagaaagaaccataacttaggaaccaacatgagtcatcattcatctagtgttaatgctgagggtactagtcata

SEQ ID NO: 188487 - DNA, 367 bp, Glycine max
  unsure (1)..(367): unsure at all n locations
agcataccaaactgagcataccttcagaagatcaaaatgcaatcagaccaaaaactatgtgtgatcataaatatgatcgggatgaatttgactaaaaggtagcaagccaagaatctgcatatgattaaaagctccatcagaatatgttaattgaacaagaactaatatgaatgtatctacattgttttgaagcaataaattgctatatcagaagcagcatgcttaaaactgaagtgaaatgtcttcaagaagtaagaatctatcctagaatnttcaagtactgattgaaacaaagcgaaacaaaaaagacaaaaagactgatgtacaagcactacaacagctattcagaagcagtttgagaatcatg

SEQ ID NO: 188488 - DNA, 336 bp, Glycine max
  unsure (1)..(336): unsure at all n locations
tcgagacactcgtaattgagaacggaagttctgagaaaaataaaacgacaataagttttaactcggatgtcctattgagccctgtaatatatcgagacgctcgaatatgataacggaaggtcgaagaaaagttaaacgacaantaactttaactcggatatccgattgagtcccgtaatatatcgagacgctcgtaatttaatatagaagctctgagcacattcaaacgacaataacttttcactcggatatctaattgtgtcccggaggatatcgagatgctcgtaattgaaaacagaagctcttgacaaaatcaaaggacaataatttttaact

SEQ ID NO: 188489 - DNA, 423 bp, Glycine max
  unsure (1)..(423): unsure at all n locations
ctgcagctttaacctggtgtcacatttacaatgttccatgtattaacgagtcgggaatgtagttntactaagacaaatttgggtgtatccgggaaaaataaagctacgtgtgaggaacattcctctcaccatataccttatttcacaaatcccaacggtgaggatgtgcctaaatgagttttaaacctagtgcacctatttcacgatgatccaatggttaacgagtctggggtcatagttttactaggacaccttgtagaagcaaagcttcctgaaattctgatactggggacagatgtcgtacaggatgtcacgacatcgcgcttcagaacatgcagatngtatatgaccgtatgaacagattaaacacagtaataacacaagagaattgttaacccagttcggtgcaacgtcacctacatc

SEQ ID NO: 188490 - DNA, 315 bp, Glycine max
agcttatcctctaaggcttgagcacttgacaatttctatagtaatatatcctcatggcagataacaacaacagtcagttcattgttgagggagcatccctcacgaggtcaccaggcttcacaagagaggactatccttattggaaagaccaaattgaaatgtacatcaagttcaacccctacaaactctggctaatcatcacaaatggagatatacccattcccagaccttgccttaatggagctaaacacaaaagttcattttactctaccatgtgtcctatcagggaatgagtccaacattttatgcagaatt

SEQ ID NO: 188491 - DNA, 354 bp, Glycine max
aatctgtacatgttgcaagggtctgtggtttgtgctcctctgctgaccaccatacagacctttgcccttccatgcagcaacctggagcaattgagcagcccgaagcttatgctgctaatatttacaatagacctcctcaacctcagcagcaaaatcaaccacatcagaacaattatgacctctccagcaacagatacaaccctggatggaggaatcaccctaatctcagatggtctagccctcagcaacaacaacagcagcctgctcgttccttccaaaatgctgctggcccaagcagaccatacattcctccaccatatcaacaacgggaacagccccagaaacaaccaacag

SEQ ID NO: 188492 - DNA, 347 bp, Glycine max
  unsure (1)..(347): unsure at all n locations
aaaaagcagcggattcagtagcacgggctgcaataagagctcggtgtcattatgttaataaaaagtggctcggcggtatgttaacgaattggtatactacaaaaacacgaacttcaaagttcagggacttgagaatgcaacaaaagacggggagactcaatagttttccataaagagatgccgctatattgaagagacatttagctcattnggaaacatatcttggcggcattaaatatatgacggggttacctgatattgtaataatcgtcgatcaacaagaagaatatacggctcttcgagaatgtataactttgaaatntccaacaattgttaatcgatcaaat

SEQ ID NO: 188493 - DNA, 272 bp, Glycine max
attacaggactcaatcacacatccgagtcaaaagttattgtccgttgaatttgctcagagcttcaacattcaattccgagcttttcgatttattacgggactcaatcagacatccgagtaaaaagttatttgtcctttgaattggctcagcggttcggtattcaatttcgagcgtctcgatatattacaggactcaataagacatccgagtaaaaagttattgtcgttagaatttgctcaaactttcacattcaattcgagcttccgattat

SEQ ID NO: 188494 - DNA, 380 bp, Glycine max
gcaagctttagcaaattcaaacgaacatatctttttatttttgatgtctgatgagtcccggaatatatcgagacgctctaaattgaataccgaagctcttgacaaactcaaacgacgataactttttactcgaatgtccgattgagtcccgtaatatatcgaaacgctcgaaattgaatgttgaagctctgagcaaattcaaacgacaataactctttactcggatgtctgattgagtctcgtaatatatcgagacgctcaatatggaataccgaagctctcagaaaatcaaacgacaacatcgttctactcggatgtccgattgagtcaccgaatatatcgaaacgctcgaaattgaatgtctaagctctgagcaaatt

SEQ ID NO: 188495 - DNA, 211 bp, Glycine max
  unsure (1)..(211): unsure at all n locations
ctagttccgccccggagtacgacagtcaccgctttatgagcgttgtacatcancagcgcttctaagccatcaagggatggtcgtttctccgggagcgacgcgtccagctcagggacgacgagtatactgatttccaggaggaaatagggcgccggcggtgggcaccactggttactcccatggccaatgttgatccagaaatagtccttga

SEQ ID NO: 188496 - DNA, 495 bp, Glycine max
  unsure (1)..(495): unsure at all n locations
gtcacctgcggctgcaagctanaaaatngctctgtatctgagacctgttggtcntgttgaagnngggctaggttacgtagggcaatacagccccaacgagagatggatgcttcttggttatgtgggagagactgatgcagggcttntggaattctctaagggctgccccagtcttcagaaacttgaaatgagaggatgctcctttttcagtgagtatgcactagctattgctgcaactcaactgaattctctcaggtacctatgggtgcaagggtatagtgcatctgcatctggacgcgatcttctggcaatggctcgcccctattggaacattgagctgattccttctataagcgtggttgtagcaatcagcaagataagcctgttgttgtcgagcacctggctcatattcttgcatattactctcttgctgcccaagatcagattctccacataccgtaataccttnggatcctggaacatatgttgacacct

SEQ ID NO: 188497 - DNA, 410 bp, Glycine max
  unsure (1)..(410): unsure at all n locations
tcacctgcggcatgcaagcttgctctaaattacatngatgtttgtatttatgggaggaggtggtatgtcatcnttggtttaagagtagtgtcccactggtaaaactaactntccaaatgtttgtcttcgcaggaaatggccccgaggaagcttgcctcaaagaggtccaggaaggacaaggcacccgaaggaactatttccgctccggagtatgatagtcaccgctttaggagtgctgtacaccagcagcgcttcgaggccatcaagggatggtcgtttctccgggagcgacgcgtccagctcaaggacgacgagtatactgatttccaggatgaaatagggcgccggcggtgggcatcactggttactcccatggccaagtttgatccagaaatagtccttgagtttat

SEQ ID NO: 188498 - DNA, 256 bp, Glycine max
tttcaatgtttgaattgctttttggccttctggggtctccctgcctccaattaggactcgatccgggttgaaaagatcttggatcgcagttccctcagcaaggaattcatggtttgaaaggatttggaactttattccctttccattgtgagtcaaaatcttctctatggcctcagcagttttcacagggacagtggatttcttcaccacaatcttgtcactctaggagacatcagcaatcatgcgtgctgcactc

SEQ ID NO: 188499 - DNA, 156 bp, Glycine max
accctaaaaatctagagcttcaggtaaagtctcttaccctagagtttagacatgaaaaagatgaaagattctaggaacttacttggatggtgtatgattgttgcttcaaagccgaatatgcacaacgagagtacagatgccaaatgtgcaaatttt

SEQ ID NO: 188500 - DNA, 438 bp, Glycine max
  unsure (1)..(438): unsure at all n locations
tcctaattgtggtggaccaacctctataagagaaacgtcatacaatgaacatcacttgaagcttgaaaacgcaaggctaagagaaaaggtacatcaattaattaagtagagctaacattttatgtgtgtgacacactatgngtttcaataattctatggctactattcgttggtccaagtatggaccttaattaaaataaatattaaaagagcatgcattgtcctttttaatgagtgcatgcacccaattcaactcatattatatatatgagcaatgacctaacatgcccaacagttgcataccccaaagggatagnttgtttctttcttcgttatctctatctacttaagtcaatttgtcgaattgggtggacatttattatttcatgacatctttgacttttgattattatttcagatgatccatctaacattgtg

SEQ ID NO: 188501 - DNA, 359 bp, Glycine max
  unsure (1)..(359): unsure at all n locations
ctctctcaaaagcagaggaaantatttcgggagaaaatccaagccgggcgcttctgtaacgtttcgtgttaattactcaagattctcgaccgttcttaaaatcatgcgtcgacttcgtttcttcaatcttaacgggtaagacctctaccgagctttaattatttatgtacccgtggggtccacatttgtcattattttatctcgtttcttacttttatcccctttgcggctaagcattattaagtcatttcgctatctaaataaataatttcccgacgttgatgatcatcgtattcggtaaagattccaccgtcggcggccgaccactggaataaaaaaggtaatatatctattcaaat

SEQ ID NO: 188502 - DNA, 198 bp, Glycine max
  unsure (1)..(198): unsure at all n locations
attttcatatcctccttattttagaaatattaataagaattaaaatgttgaagtattgtttctttgaccaaaaaaggagtattttagttctccgcgaacaactaaaagatgggtncaacacaactgtcctatagaatgctctcttgtattaatggatatagtagaaactagaataatggggttaagtacttcagacaa

SEQ ID NO: 188503 - DNA, 364 bp, Glycine max
  unsure (1)..(364): unsure at all n locations
ttaagtcacctgcggcatgcagctgagataggaagtgngaagggttttcttcctgctnttatngttgaccacagagtggtacctgtagatatgtcgcggaggtcaggagaccttggggacgtcaggaggggtgctattgcccaaaaccaagctagaccaatcccgacccaacccgggcatattcggtcagtgagaacctgtgatgtacctaagcacgcgagctccttgcagtcaacagataaaaggaaaacaagaccacaaagcatggaggctngtggtggctggccagctgagaattttgagtaatatgtggattgcggcctctggtaatcgattactaagaggcgggtaatcgattacaagg

SEQ ID NO: 188504 - DNA, 372 bp, Glycine max
  unsure (1)..(372): unsure at all n locations
gactcaatcaaacatccgagtaaaaatttattgcgagttgaatcggctcacaaattcaactntcaatttcaagcgtatcgatatattacgggactcaatcaaacatccgagtaaaaagttattgtcgtttgaactagttcagagattcaacattcaatttcgagcatctcgttatattacgggactcaatcagacatccgagtaaaaagttattgtcgtgtgaattggcaaagaggttcaacattcaatttcgagcgtctcgatatgttacgggactcaatcagacatccgagtaaaaagttatttgcanttgaattgcaaagaggttaaacattcaatttcgagcgtctcgatatatgacgggactcaatc

SEQ ID NO: 188505 - DNA, 422 bp, Glycine max
  unsure (1)..(422): unsure at all n locations
ttaggcaattcaatgtagaaagagaaatcccaaagagaaacgcccgattgattttttttcgctttattatactaaaaggagacttnttgattattatattattatcttacctcttttttgatttccaacgtgtgtacggcacgaccgaacggtcatgatttcattttaacagatattaacggatattacaaatcaaatgatcggtataatttattctatttttttattacgcgagaaattacttaaataaatgactgaagcacgttaaaaggaggtacggatagttaaatgaaacgagaataaaagtccacaatacaaatggggaccaccaccggtacatagaatgaattgaaagggtcgattgggtactactggtgaaaccaatacaatgagacgatgatgatgtcaagacggtgaaatct

SEQ ID NO: 188506 - DNA, 416 bp, Glycine max
  unsure (1)..(416): unsure at all n locations
cagggctgaataacacccctaaattgatcagctcacccccattttgagtttttntggcttatttcctttcgaaacatcgcgaaaccttacggatcgcatgacaattgtctttaagcagctcaactgacctggcgaaaatctgcatgtcgaaaaacaattatccctggacgaaattagggtatgaaagttgcccttctttacttatctttcattggagataaaagggaagtaaagataagacactaatttcgttcaagctgaattctctcctaaccgacgatctgcttaattagcgaaacctgtcaaaagagagagcataaaaacatcaggtgcatcagcaaaagcctntggtgcctcgaaagtgataaaaatggatggccgtgatggtctccgcatgctatcagactcacttgtct

SEQ ID NO: 188507 - DNA, 397 bp, Glycine max
  unsure (1)..(397): unsure at all n locations
caacaacacaaaatctttcgaccctactattgtngattcaccaatgttgtatgggtatgttgcgacaatccttcaaaaccttatttatacattctaagagataggttgtcatgtggccatatcgacgtccttctttatcataagccatggtccatttttcctttgaaatgcgatcaatccatgttgctacggctggactcagctaacgaaatctttctaaattttgataaaaaatatgctcgtaaggagtgtaccctgcatgaatatanttaacaaaaaaatttgtagtatatatgaaactaaattncatgacctgataaataaatctacccattcttcaacattcttttgttggcatggaattgcgatgaatcgttgtatggtcgaccaataacat

SEQ ID NO: 188508 - DNA, 343 bp, Glycine max
  unsure (1)..(343): unsure at all n locations
aaaagacacttgcattatatgaccggttaaacttatttacattctggaaagagatacgcgacacacgacatttgaatttatttaaaatgataaagtgggatacaacacaaactatcagttgaaattttatttacaatgataaagtgagatacaacacanacgatcaattgaaacttgcttacacaaagaaatanttcactgatggtagaagaatgaagatgaagatgtgaaaagcaagaggggacccctaagggtgcatagaacgaaatcaaaacttcaaaataaaaactaaccagttgatgaacgaagaacaacaaagaacgatgtatgaaccggtcacgga

SEQ ID NO: 188509 - DNA, 320 bp, Glycine max
tttttatttaaaaaggaagtcgtatccagtcaaggtctgagagaccatacaagtttcctaacgatttctgattatgtgggccattaagtctatcatatgctgacaatagccgagaagcccatgaatctcttcggtggtggagtaggtgtctgccatcgccttggccttggctaacaagcggggaagttcttgactcccattcaaggtaagagcaaaccggtccatccacatggttgcctcttggtgaaagagtcgatcacccttcctctagcctctttttccgcatatacttgagcatactcatccacgattctatgctc

SEQ ID NO: 188510 - DNA, 290 bp, Glycine max
  unsure (1)..(290): unsure at all n locations
aacgcgagctttgaccactgctcttccttcccgcgatgcattttttcatgcccgcctgagtgggcttatagcctataccatacttcccacgatttccttgggcattaatcaagctagttatgccgccgttgtctttgcctatacccattttnggttcataaccgctcccctcataactcgggccatcattactgctgcatcagacagacaaggctgcctagagaaggagtccacggaggaaatgctgaccacctcataagactggaaagcgggtctaacaattcttctgc

SEQ ID NO: 188511 - DNA, 413 bp, Glycine max
  unsure (1)..(413): unsure at all n locations
agtcacctgcggcatgcaagctnnataaggatatatacgagctttgagtccttctcacgaaggaaactacacgctctaccttattcatggctaatgcatgactaaagaggcaaatatccattgatagtgtcgaggaacgcccatgtgcataaggatttgatgcatataatgtggcttcaggaacaacaacgccaatataaatgaatgtgagagactacttgtcaagaagctaagcaagataacaaggtgactttcgagttttaaaaaataaagtaacgcctaagacacaatatcaccatgcttgtggtgatatccgacnactcttaaccacacttgaacttgtaaaaaatttatttgaaattgtaaatttgaattaaatgaaaagatattgttcgactatatacagtttcttt

SEQ ID NO: 188512 - DNA, 439 bp, Glycine max
  unsure (1)..(439): unsure at all n locations
agtcacctgcgggcatgcaagcttgaatcaagtntcaaagaatcaagaatttatattagtcaagtttcaagattcaagaacaatcaagatcaagattcaagactcaagattcaagaatcaagagaagacttaatcaagataagtactaaaaaagtttttcaaaacattgaatagcataagaatttttcacaaaatcttttaccaaagagttttactctctggtaatcgattaccataaggtagtaatcgattaccaatagccaacattgttttcaaaacttatttacaaagctgtaattgattaccatgagtatgtaatcgattaccaatgttttaaaacgttagatttcaaatttcacgagtcanaactagtgataaaacattntcaaatcattttaaacttgtggtaatcgatacactaaacattttggatttcaaa

SEQ ID NO: 188513 - DNA, 235 bp, Glycine max
ggatgaaacttggaacagccttcttagcttgaagaagaccattgccacatcgccagtcctgagtcgacccaggctaggagtaccccttactctatatctttcagtagctgacaaagtcgttagcttagcccttgacaagagagatggaagcaccagttccctatctatttcaccagccgcatacttcatgacgccaagatgtgctatcaaatgataataaagatggcgctagcac

SEQ ID NO: 188514 - DNA, 421 bp, Glycine max
  unsure (1)..(421): unsure at all n locations
gcggtcgggcgatggtgcacaacaatgtttccacatccacaatgcgcgcataaacccaccatccnctgttgcccacctccatctgagctcacgtactcccacgtagcccatatcctcgtttctctcaacaccgggtccccatcaatcctcccaagcttccacaacatccaagcaaaacaacattcaaacagcacaagctatcacagccaagcaaaacagggcaaaggcagataactctgctcaacacaccaaccaaaatcacagcttttctcacttaaagaccccagtaacaattccttcaatccaattcgttaaccgttggatcgactccaaaaatttactggaagtctatagtacataagcctacattgtgaccgttgggatctactagcaaacatccagaactcattctgcactataa

SEQ ID NO: 188515 - DNA, 375 bp, Glycine max
  unsure (1)..(375): unsure at all n locations
ctgcagctatgcacgaaatgttatttgaaattttatttctctttaacaccatttcctagttaccatgcattatgtaccatgttcaattatttnnngtttgttgtgtgtgtttttttttttaaaaatgggtttatgatcccaacatggttggcttatggtgcctaacacatgcaactaagaatgtagtgtgaagtttcacgcttccccttttttgtttttgttttgtttaggaaaacgcaaggatgagcaacatgaaaacaattggtatgcaattttgcagatcaaaaagtttgttgaacgcatatgcatgatgatgccatgaatcatgcaaaatatgaggctggaatatgataacggacaaatgcaagaatgatt

SEQ ID NO: 188516 - DNA, 441 bp, Glycine max
  unsure (1)..(441): unsure at all n locations
gcttgtacctccaaagtctccataatcgcatttctttttgattgagaggnngtntggctaaagaaaactctanaatttttgtattttagagcccggccaaatgcagcttcctaatcacaaaggatattcttcanaataacattatcttgcaaattttctctagataacaatcatccacgaataataaatgcaaaatcccaggtgctttcccacaaatcttaatgccatgaatatccctctctatttcaacccttctcaataaagatgtaagaccttgagctaaaattataaatataaaaaagggagaagggatctccttgccagagatctcccaggggagataggatcaaccttgtcatgattcactaccactacatactaaacagtttngacacacatcatcatccactctgtccattgattgcaaatcacaacttgaca

SEQ ID NO: 188517 - DNA, 450 bp, Glycine max
  unsure (1)..(450): unsure at all n locations
tgcagctttagctcgtccttaagatcatgcctnttacctgttatgattcctttcacctcttcggagctggagctcactattgttgccctataaagcccctcaaaactntgctttggtcatgttcttcctttcgggccttcttggtttcgcgttccaaggcttcagcggtggccatattgacgtcccttagttcatcatactcttttcagactttgatggctatggacttgaacttctcttcgactactcgggctctttcaagctctgcctttagggctagtacctcatcactntgttccgaagctttaacctcatcgtctctcacagtctttagaattgggagccaatccaatccttgtgttcggattctcagtcacttatgatagccgctgatgatcccattactgcttcccctaagctctcttgtctttcttcacgccgcatcccatg

SEQ ID NO: 188518 - DNA, 269 bp, Glycine max
  unsure (1)..(269): unsure at all n locations
atcaaccccctggatttgaaaactcanacaagactaatcatgattttagattaaaaaaagctttatatggctcaaagcaatataaatactactcttttcataaagagaaaattacatgatattttattggttcaaatntatgttgatgatattatttttggatctactaatgaattattgtgcatggaattctctcatgacatgcaaagtgagtttgaaatgttaatgatgggagaacttaatttctttcttggattacaaattaaaca

SEQ ID NO: 188519 - DNA, 440 bp, Glycine max
  unsure (1)..(440): unsure at all n locations
ataaattccattcttcatcccagacttaatttctcttcattttcttatgttatctctctccagaacttaaaagtgtcatttttactcatgaagggaaatctttgaaaattgaacattcttcattcttccttcaaatntctttcattttcatcaataggtaaggaggtctctccaactcttgaaccctatgctgtgtgttaaacttccttaaacatgttgtcttgaaatttttgtgcttactgccatgttctagattcgtgaactgagctatntcccttgatgtttttatgccaaaaatgagtttctttgttactaatacataggattagccttaaattncacttaaatcggagtttcctagtaaaattacgaatataacatgttaacgagcacttataaatagaatctgcacgaattgactactgtataaagatgactat

SEQ ID NO: 188520 - DNA, 350 bp, Glycine max
cccaatgtttgcctttggtgagctctgacaaccctctaaggcttgtcaatcccaaggtctacccttggtgagcctcgttgactatccaaggctcgtcaaacccaaggtgctcccttggtgagcctcgacgaatctcaaaggctcgtcaaacccaaggtttactcttggtgagtctcgatgaatctccaaggctcctcaaacccaaagtcctcccttggtgagccttaactcgacatacccaaggtcggcccttggtaagcttttcgccctcgaaaaaaaactcaagtaattccctacggccatgggtaagaagctctgtcaagagaaaatggataataccaagttgattg

SEQ ID NO: 188521 - DNA, 388 bp, Glycine max
aatcaaaaatctgcacctgtcgccagactttgtgtgttatgctcctctgtcgaccaccacacagacctttgcccttctatgcaacaatctgaagcaattgaacagcctgaagcttatgctgcaaacatctacaacagacctcctcaacctcagcagcaaaatcagccacaacagaacaattatgacctctctagcaacaggtacaatcccgggtggaggaatcatcccaaccttagatggtcgaatccttcacaacagcagcaacaacaacaaccttatttcagaatgttgtggcccaagcaaccatacgttcctccaccaatccagcaacaacaacatcaacagccctagaaacaacaaacagtagaggctccttcgtaaccttccc

SEQ ID NO: 188522 - DNA, 121 bp, Glycine max
ctgtggagaacatccataatacggcagtttttaggcgtcctcagggtctatatatccagtttgaaggagaaagtaagcttttttcatggcactgctctatttgttttttctcttggctttg

SEQ ID NO: 188523 - DNA, 527 bp, Glycine max
  unsure (1)..(527): unsure at all n locations
cttaagtcacctgcggcatgcagcttacacaatgggtgctacatctttagttactcaaccactctnaatnnnattnngncnagatcttcacactcggttttatctaatggacagtgctatatagtatttatgtcctcaaaagataaaatgttcttattagggcgtgagccccgtttgttaaaaaaaaagttatttaagtgttataaatattataatgtatccctcaaatgtcaattattattatactataaaattgttcacgcggtttgggggatcaaaaagagaatcaccacctaacctacgtaacttctcttgcactttggaaattggaatctctatttttcttctgtgtcccacacgtatcttttgtagaatgaaatctagattgaaaatactaattaattaaactaatggatttcattcacattacaatatgagtgctgctattagcacgaacaacctctacacgaatagcacgaaaggtncattcaatggttggaatctttaaaacaatatcgattaatatt

SEQ ID NO: 188524 - DNA, 376 bp, Glycine max
  unsure (1)..(376): unsure at all n locations
tttttttttaatcctaaaattaaaagcagatgtaagaaatttataataactcactcattagaaattagtntcaagtgaataatttaacaaataaaaaacatacatgaattntattcaatgggtatagtagaatttgaattttattaaaaaacagtcttgggtggtgggtggaatatgaagcaatnggagggtaagcctaagccatgcaggggactcacaagaaaaatctgttgtaaatccaacaaatgaggaaacatatcagtattagacagtccagaagaataacggccagagagtggaacctttcatctgaagtggtttatagcattagtggtacaacagagagagagatagaaagatgaggcattttcttaat

SEQ ID NO: 188525 - DNA, 407 bp, Glycine max
  unsure (1)..(407): unsure at all n locations
ggaaccttctggaaccttatggaagagtatggaagggaagttaatactgttcagactcctagaatgtgtggagcattctagagaattaatatccaccctaggatacaagtaatctccatcattcattgtggaggtggagtaatataaataaggggaggagtcttcattcctaaccatccaagacaaagagtgaattcacttcttagagtaagaaaaagcctctttgatagagaagataaatagcttgtaaagtctctatcctcaagcttgagtgagccaccatagagtgagtcaacttttgtaacacatccttgtaacccctctatcatntngtatagtggaagaatctccatataggagaatataatcgnggctcccatactacctctaatactaagtgttatctt

SEQ ID NO: 188526 - DNA, 398 bp, Glycine max
  unsure (1)..(398): unsure at all n locations
ccgttcgaaaagagatccacaactgtcaatatcatagtagcactctagtaatcgggcaccccggtaaagaagtccaatttcatatcctcccatggactaaacgaaggaaaaattggttgaagcatgcctaaaggtgttcgaggaacatacttggtatgttggcaatcaatacatcgcaggatgtattctcggacatcttgcttcataccaacctataagaagttgcgttgaagacaacttgaggtcttagccaggctcacgtggccactcaaaggatattgtngggattcttccaatagaagtggaataaaggaatatctcttactcacccaaatgtggccttgtaaaaaatagctccacctatatctgaatcaaagagtcctatggttatcgtggca

SEQ ID NO: 188527 - DNA, 219 bp, Glycine max
  unsure (1)..(219): unsure at all n locations
tccacccatttgaataacgtattgagaacatccagtgaagatttatgttaacaagatgttgctgtgctatcctaccggtttcctgttgtgagtatagttcaaactacctgaaagcctttctgttttatatcattattaaccggagaaggcttgcaaaccaagaaatagacctcattaacttgcgtatggatatgccgcgggaacaaaantgcccatgca

SEQ ID NO: 188528 - DNA, 306 bp, Glycine max
  unsure (1)..(306): unsure at all n locations
atcaatgcttcgngtcctaatgggggtggaccaaccgctataggagaaatgtctttcgatgaacatcacttgaggcttgaaaacgcaaggctaagagaagaggtacatcaattaattaagtagagctaacattttatgtgtgtgacacactatgtgttcaataattctatggctactattcgttggtccaagtatggaccttaattaaaataaatattaaaagagcatgcattgtcctttttaatgagtgcatgcacccaattcaactcatatttatatatatagcaatgacctaacatgcccaac

SEQ ID NO: 188529 - DNA, 335 bp, Glycine max
ctcactttaacctccatttaccacagatatcagacttagccttcccactctcaaagcctcactctttttccactcataacaccacattctcactttctaaccctaagttagttctacccttcgtctctaacagatttccatcagcaatttcagcatataaacatcacaaacatcatcacgaaaaccctaaaatagaatgggtatgtttaactcatccaaacatggcaatttcaacaagttttcagcaaatgccttcacaaataatcatcatacagcagaaacctagcaagactgcccatcatatctcccaaaaccccatacccacgaaaatcaaa

SEQ ID NO: 188530 - DNA, 287 bp, Glycine max
  unsure (1)..(287): unsure at all n locations
ggagtttcattaggtcccatgtcaaccctataacatggcaactaaaaaataggagttacgtaaggataggtccttcaagtcttttttctaattgaatctagctagtatcactttcgtacagtatccttcttatcacggtaatacgaagtgatgaataaattaagaggtntttgttttcttacaagggcgattaaattgaatgagtttataataaactaaatattattattttaattnntatttgtgagttgtacgtcgtacatacaacttaactnttatcataaaaa

SEQ ID NO: 188531 - DNA, 384 bp, Glycine max
  unsure (1)..(384): unsure at all n locations
gtcacctgcggcatgcaagcttctaaggaagttatctcaaagaagcttttctttgaagtnttctcaagaaagctacctagtctataaatagaagcatgtgtaacacttgttgtaactntgatgaatgagagtcttgtgagacataactcaaagttcaactgctctccctttttcttccttcaatttcgtgctcccccctctctctttctctcctttcttttcctccattgaagcctcctctccaagcttcttatccaaggctcatcttggtggtgaagctccttcttccatgacttattccctagggatggcgcctcctctcacctcttttcctttgtcttccgctgcatctccatggtggaaaaccaccattaaaggagctca

SEQ ID NO: 188532 - DNA, 445 bp, Glycine max
  unsure (1)..(445): unsure at all n locations
agctnggtgcaagacgaagttaatagtttggcttatgtgtcataccctaatttcgtttggggattatcacttgatgacatgcaaccttntggttagccgcttgagatacttggcgtcctttgttgcacaataaatgaagtctcgagacgtgtcaaaaatcaaaaggaagcaggcttgcgcgatccgtgaaattccgtaatgtggcggaaattgaaaagagggtgttttgcgcaatccgtgagtttccgtaacttcttcgaaagctaaaaaagagtaaatacataatccgtaaggcccattttaaggaattgtggatttggaaaccttgtggtgcttttgttgaatggtgaaaatataaataactggttgctatttcgcattctttacactgcattctaagcacccacaggtttgagtaaaaaagggccctatacccggggttcat

SEQ ID NO: 188533 - DNA, 340 bp, Glycine max
  unsure (1)..(340): unsure at all n locations
atcagggcatccaaagcactgatctcaggctcgaaatagccaatagtgggcagatgtgcaaacacccaaaactataaaaaaaaaacatggtcaaaaaaattaattacggtaataaagaanaaacatagataatcacaattaacaattatttacttaccatgactaatgacatgtaacctccaaatgtcatgtaacctccaacatgtttgctggtgtactagctcgcatatgagagatggtcgtatgggtatgccaatgcaaagactccccaagcataccaatgacaaccatccaagttgttgaggtagtggaggtaggcaacatggatgtgagtcgagga

SEQ ID NO: 188534 - DNA, 476 bp, Glycine max
agcttaccttgaaggatgagactaagaattagtctctatagtatcaatttaagggtgtccaatagcattcataccatagagagggtagaaaaaaacaagactaagaatctgttccaagaaaaaactactaaactaaaatttcaaattgcttaagaatgtaaaggaatagacattggaggaagatgcagccataacttcaattttgcattgattgttcccataataattaataagtcgccccggcaacctgtttgccacaatgaagaaagtgtaactaaaatggtaatattctaagaagacatcttaaacaaaataacagaattctgtcaacatacctatacctatacagacaagatgtctgcaccagatttacacaatcttctgcttgtataatactctcacattaaggggaatcattcattagcttcgaattgcacttgcccttgactgcatgagatatccctctatcatcatca

SEQ ID NO: 188535 - DNA, 427 bp, Glycine max
  unsure (1)..(427): unsure at all n locations
tgcaagcttctcgatatattatgcacctgaatcggacttccgtttgaattgttatgaccattcgaattgctcgagagctttcgatattcaatttcgagcgtctcgatatattatgtgcctgaatcaccatccatgtgacacgttatgaccatttgaatttctcgagagcttccggttttaaattcagagcatctcgataagtgatgcgccagaatcggacttccgtgtganaagttatgaccatttcaatttctcgagagctttcgttattcaatttcgagcgtctcgatatattatgcacctgaatcagacatccatgtgagacgttatgaccacttaaatttctcgagagcattcgttgttcaatattcagcgtctcgatatattatgcgcctgaatcggacttccgcgtgacaagtatgaccat

SEQ ID NO: 188536 - DNA, 393 bp, Glycine max
aatactcaagcttcaattgaacaacggaagctctcagaaactagatggttacacttattcacagacgtccgagtcaggcgcataatatatcgagaccctcgaaattgaacaacgtatagtctcgagaaattctaatggtttaacttatacaggatgtccgattccggcacataatatattcagatgcttgaaattgaacaacgaaagctcttgagaaactaaaatggtcataacatatcacacagacgtccgattcaggtgcataatatattgacaccctcgaaattgaacaacgtatggtctcgagaaatataaatgttcataacttggcacacgaaagcccgattcaagggcataatacatcgagaaactcgaaattgaacattggaaact

SEQ ID NO: 188537 - DNA, 435 bp, Glycine max
  unsure (1)..(435): unsure at all n locations
gctgctgtttacaatggtacccaccgtgtcttatcatgtcttgacagatataggccgcaataaaaaatttgcagaattcattaattagtttctttctctaacatttcttccggattnacactcccaacattcttgtcttttggatgtaatccaagcaatttctgaaacattcaattcaatttaaccatctctcacattacacgcacttaaaaacaatcaccaatctctaacaaaacaagtgctgcaatgcaacctcaactcaaggcttgattgaaaagaataaatccaaacaccataaataaataaacttatccagttatcataagtccagcaccttcatcagtcaaaatctcaagcaacaaagaatgcggaaccctaccatcaataatactcgctgttataacccctngcgccaaggacctaacgcaacaatta

SEQ ID NO: 188538 - DNA, 366 bp, Glycine max
aagagggcaagcacggattgggcttggatgccaaagagcaaaccatgtctagcatattatgggctttacgcaaatgatatgttcatgcacaacgtccgggaaaaaaactaattttagagatacgtttgggatacgaacaacccaaataatatttttaccatagtaacaatacaacaaaatgaatatgaatgaaaggtgaaaaggaaaacaacatctattgaaaaattttgaagattaagtttgaaggatgatacttcttctgggaaaagaaacatggtagaaaaatcacaaagcttcaacatgtgttaaatgggcaatgaaacggatattctttttaaaattggctacctctgatatcaaattttt

SEQ ID NO: 188539 - DNA, 469 bp, Glycine max
  unsure (1)..(469): unsure at all n locations
agcttctttactcaacatttaagactacggatggttcactaaatagcctacattatgagcaaagaagagactaaatcttcataaagcatgtaaaacaagtattaacgcagaaaagaaaaactagcccatcacgcaacagtatttttccacaatcaatgtaaagcaacataaaatggggaaagagacaagaaccatagaaaactatgacaaattgacaaagatccagtggatctttgctgcattgcccaactacaagggtaaaaatattctgcatcataaacaaataagtaaaggtgaagaagaaaagcaaaatgactcgatgtcatgggttattgatgatgattctaagccagccaaacggaagaggtacaattcaaagatgaaagaaggattgactagtgatgatatctttngtgcatagcccgactacaaaaagggtataaaaattctgcatcataatattttttat

SEQ ID NO: 188540 - DNA, 376 bp, Glycine max
gcttcacgctcggctacgaagattttcggatatatactggaaaaagagcatggggattttctttacgaaacggagctgcgcaagatatgttgtccctgaccttgaaaggtctatgcttgaccttaagaatgtacattgtctaaaattggaaaatctaattttctggcaagagagtctttggagaccaccttctcactaacttgctaataaacttcacacgattacttacctcttgacaagatcattgggctatgcttgatcagtgaaaacccattccttgttaacaacaaccaacatttccaaagcgtacctaccccaccaacatgttttctctataatacacagtcgcacgctagtgactggaccaattagaaat

SEQ ID NO: 188541 - DNA, 417 bp, Glycine max
  unsure (1)..(417): unsure at all n locations
accttttattcggcgatagagagatcataatattgtttggatgacacatgcgtttgatataattactttnccctcgcagctcacctacttttgttcacttattaattatgagtgtatagaaaaactctatcttttgtcccttnctttctggtcttcgataggaagtgttgccttgaatatctgctgctgatataataaaaatatttttaagatggactttgtataaactcacatatattttggtgattctttttaccagttacataacttgttacctctctgtattgtataacgcttcattgctacttgtatatttcataaatattcgtcttttttacactctcttgtatctagttgttaaagaccttgacattggaatcatgttggttgttttcttctatccattatatataatat

SEQ ID NO: 188542 - DNA, 410 bp, Glycine max
  unsure (1)..(410): unsure at all n locations
tggaatgagatggagtgaaaaattgggaattgactactagttgtttggatgaattgactttttcctacacacttatgtgcttaagagaaacactggtttgtgaggaaaaaagcttagtcaatcttccttcatgcttgtcatgcttgctaactgattttatctctttagctcaattgcacatgcttctatcttgaaatgtgacaaatgcntaattgggggagatattgattgataatgtgcaattatcttagttactgtagttgatacattctgaacaggccattaacctaacttagcatagttggtttcttttgcttgaggacaagcaaagctttaaatttgggggagtttgataattgatgtgcataagtagattattggtagtcgttatttaggaggtagttttatgt

SEQ ID NO: 188543 - DNA, 379 bp, Glycine max
tttgggttactttgtattttcttatgatctcaccgctttctattgtgtgaatgtgggagttcgattgaaaggtttactggagtagtctttggaagacatatgtaggccagtgttgaaaaaacggcatggaccttatggtggaagtggtgtggtggatttttttgctaaccaccacgacaatttgtgaagggaggcccaccaaggcggtgcaatagggcgcaatgacatgtttatatggtggagttttggccttttgccattggtaatggtgatgttggctggaggttgcatgtgggtaatggtggtcaaagccttggtgggggaatgagattatggcattgtgggatgctcactggtctaaactcctaaaaatgtgtga

SEQ ID NO: 188544 - DNA, 447 bp, Glycine max
  unsure (1)..(447): unsure at all n locations
agcttcatcctcagatccctcttggtggactattctccatttagacagccctcctaggtttagactaacttaaactaagcttcatcctcagacccctcttgttggaatagactagcttacatagcttatgaaagtttagactaatttagcctaagctttgtcctcagatccctattgttgaactagacttagaccaaacaacattattgtaacaacctatttaaaaccaaaacttaatccgcagatccctcttgtaagactaagttccaattctgcttcattcaagttccaaggtaacaatacatttcccaatgccaaagtcacctaactaagcacacaaatgggtgatcagaccaagagcatacganatttaagcactgaaagaagcattgaacacaagaaacacaatcaattagatattaaaataattacaccaactgttcttta

SEQ ID NO: 188545 - DNA, 380 bp, Glycine max
  unsure (1)..(380): unsure at all n locations
tctatngatgtggcagggcggggccctcttggctngctatcccaaccacgggccttggcctttgttcttcctttctaagatatttttccttatgtcagcttgcgtaggtttatagcctaacccaacttccacggttcctaagtgcttacaagctggttctgccgccgttgtttttgcccgggctcatagccgtaccccaacatcacccgggccaccatcattgccatatcagacaggcgagactgctcagagagggaatctacagaggcaatgcttactacctcaaaagattggaaagccgtttccaacgactcctccgcggcttccacatatggaatagaggaagggcaacttaccaggacgtcttcctcacccgatac

SEQ ID NO: 188546 - DNA, 457 bp, Glycine max
  unsure (1)..(457): unsure at all n locations
agctttatacaacgtgtntatgttggttacaatgatctaacaatactaacggcctcaacgggttgcaactacttatgctaactaactaacgaactcgtaaccatgcatgcaatnactgtttggttctcatgcgtagtcttccaagtacctgngtcgcgtggtgcttcttcatggtcgtcctttgtacgcagcangtgatgaaggtgatgaatcttcatctctgcgcttgctgctgctaacataaagtgtaaacacatgactttgaactntgcaggattaaccacgttaattcattataaaattcatctgatagttttttgacttttgtacctttgacctgcatatttagatgcacacaagatgtcatttagtaaatatatggtgcatataatgcaaatntgaaacacaataatatatatatatatatatatatatatatataaaantaaacacaatt

SEQ ID NO: 188547 - DNA, 385 bp, Glycine max
  unsure (1)..(385): unsure at all n locations
tcacagctganagtatagaatggtcagtaacaatatccttgtttaagatcatactaaaaccaaactgcacaccctactcacacgcctaagatcactggcgactagaccagttggggtagagagaccctggtcatgtggatcctgctaccgggaaagcagatggtccctacaaaaagaagttaagaacctatttggggatcgtcgctcgtgataaggtgaatgtcacatacgagaattggaagcaagtccctgctgcttagaaggatttgatatgggaggatattcaggtattttagttttcatgttgcatattgtttattaaccaaaaattcaaatttagtaacaataaaacgtaatttttcgtttgtcaagctgaatgtgatat

SEQ ID NO: 188548 - DNA, 451 bp, Glycine max
  unsure (1)..(451): unsure at all n locations
actggatgtattggttaacttgtttacccagctggccttgaaccagaaatctgtatctgtcacaagggtctgtggtttgagctcctctactgaccaccatancacctttgcccttccatgcagcaacctggagtaattgaacagcccgaagcttatgctgcaaacatttacaatagacctcctcaacctcagcagcaaaatcaaccacaacagaacaattatgacctctctagcaacagataaaccctggatggaggaatcaccctaatctcagatggtctagccctcaacaacaacaacagcagcctgctccttccttacaaaatgctgctggcccaagtagaccatacattcctccaccaatccaacaacaacaatagccccagaaatagccaacaggtgaggctcctctgcaaccttccctcgaagaacttgtgaggaattgaccatg

SEQ ID NO: 188549 - DNA, 371 bp, Glycine max
  unsure (1)..(371): unsure at all n locations
gaccttcaaactcagcttctaagnctctggttctaacctgaaactgtgctttcattttcatcncnctcctttgccaaaaagaattcgcaagactaacccctgaattttttgtgttttcttttttcaaagaacaaggactaccgcctgaattcttttgtgtctcccttctcccttgtcaaagaattcaaaacgacacagtctgagaattcttttgattcttcccattcccttatacaaaagttttcaaaggactaaccgcctgagaattcttttgtatccccattcacaaagtatcaaaggtttaacagcctgagatctttgtcttaacacattggagggtacatcctttggggtacaagtagagggtacat

SEQ ID NO: 188550 - DNA, 430 bp, Glycine max
  unsure (1)..(430): unsure at all n locations
agcttctaaactntgtacaagaatgaagctcttataccacttgttagacaagtggcctcagatatcttaagaaggggggggggggttgaattaaaatattccaatctngtttcctaatcaaaaatctatttcgctttttactcaagttatgaattcccttaatgacaatcttcttaaatattaattcaaacgaagcaacttgaatatgaatataaagcaataataaataaatgagattaagggaagagaaaatgcaaactcatgtttatactggttcggccacacccttgtgcctacatccagtccccaagcaacccgcttgagagttccactatcttgtaaattccttttacaagttctaaacacacaatgtacattcctcctttgtgtttagagatcctttacaacaagagactcacagtctcttaat

SEQ ID NO: 188551 - DNA, 385 bp, Glycine max
  unsure (1)..(385): unsure at all n locations
tctntcatctccttttctaatttgatagggcttgattctgtatagaaccaatttatgggtttaatttattttttattttggattttttttactgcattcactgttatgaagtatcatgggaagccagtaaacttcagggtgaattacttaattataatataactgctattctctttgattttatggtttatgtttttagggtgtgaaaaaaaaattgtctgtttgcttgttaatctcccgaatagtctgtttctatcgagcttgatttaaggtgtttgatttttttatttttataaactgattttagttttcaaaagacaactacacgaggttgctaagctagttggttgagggtgtaaggcatacagtaagtcagtagggtgta

SEQ ID NO: 188552 - DNA, 286 bp, Glycine max
  unsure (1)..(286): unsure at all n locations
aatcattagcagagttgtccatttctgagacatcccagacaactgagaacttataaaagcaagcgacgatgaccttggntaatcttgaacctgtagtccaaagcattgtcaatgatctaatatgcctacattcattttgaagagttcgatacgtatctatacagacacatttaactacatcatgagtgaacatattttgggtcttgcattataaccatgatatattgggaaaatattgtgttttcatgacaatgttattaccactgcaggtatcatctaattctaa

SEQ ID NO: 188553 - DNA, 288 bp, Glycine max
  unsure (1)..(288): unsure at all n locations
caccgacagaacaactgtatatgatgagtaggataagcaaggcatgactaagatgcagcacgactgntgncccaattaaccgtatcagggtgcagtcaaaattctagcctttggaggggatcaaactagtttttgttgaaggaggtgtatttcttctttagcagatccaggtcatgctgtactgtcatgattctagaacaacacgtgttgttggagatattaggggtgaagatgggttcgcagctgttggcatagattgactaattgttccggagaaagcaacatatg

SEQ ID NO: 188554 - DNA, 374 bp, Glycine max
  unsure (1)..(374): unsure at all n locations
atatcatcttgttcacatctcttatcaataatcaagaatctatcgttcaatcgctctctcaacatcattcaactatttctacagaattgtttgatactttattattcatgtttactaaaaggtttaggtcaaaactttcttttcaagaaaatttctatgttcaaaaacttgagttattcatctttattatagctcttctctcctttgccagaaagaacaaaaggactaagccgccttgaattctttagtggctctcttctccctttccaagagaatttataggactctgcctgagaattcttntgaattcttccttttccttaaacaaaagatctcaaaggactaaccgcctgagatatcttttgtgttccctt

SEQ ID NO: 188555 - DNA, 362 bp, Glycine max
  unsure (1)..(362): unsure at all n locations
nttaagaaattaactagctataaagaaaagtgattcctgttccacaatacaagaaactcaaggctgcatattatatgaaatacctgaacatttgacattactcaagttatgcctcgtatgtttctgcactgtcatgcctaagtgggtcgaacagaggcaaaagaccaataaactgccatgggccacctgtactctctttccttccatcaggaacatcctgtgtataaaatgcaaaagaccaagtaaatatctttagcataaagtttagatatataaattcatcaaatgattgtgcaagagaatatgaaacaaatcaattacctggaatgctactgcaagggatcgtaaaccacgctctgcaa

SEQ ID NO: 188556 - DNA, 471 bp, Glycine max
  unsure (1)..(471): unsure at all n locations
tgcacgcatgcaagcttgatttgtgagtngattntagccttagtttcattttggttattagtcaaatcaattaagagaaatcccaaagaaaaacgtccgattgattttttttattattttatttaaagatatttnctattattatattattattttgcctctttttggttttaaacgtggttacggcgtgaaagatcggtcggattttattctaacagagaataaaagatattacaactcaaatgatcggtacaaatttattttatttntgattaggctagaaaatgacttatataaatagttaaagcacgtcaaaagggggtacggaaagcaaacgaaataaaaataaaagcacgcaaaacaagtgggtaccactaagggcacatagaatgaattgaaaggttcgatttcgggaacttaccggttgaaaaccttcacgaaatcacccacggaaacgtcttggaagcgtta

SEQ ID NO: 188557 - DNA, 390 bp, Glycine max
  unsure (1)..(390): unsure at all n locations
acgactctgactgggcaggctatcgngantctagacgttccatcataggttnttccatctaccttggacactctcttatctcttggcggtcgaagaaacaatctactatgtctcgcagctcctccnaactgaatataaagttcaggttcaacaacatgcgaacttcaatggctcaccttaccttcttcaagatcttcatatctcgtttgcccaaccagccatcctttattgcgataaccaatcaacaatccagatagcctctaatcaggtgtttcatgaacgcaccaagcatattgacatagattgtcatatcgttcgagagaaagtaaacaatggtcttatcaagcttcttcctgtctcgtcttccatgcaactcggcgacatttttac

SEQ ID NO: 188558 - DNA, 450 bp, Glycine max
agctggtacaaattctcctttagaaatgacatttctgttacatatttatgcatatatacacaatagaaacattaaattaacataaacgtgctgataaaaaaataacatttatatcataatacttactatttcccggtcctcttcttttactatggaatagaggtgtgaaagtattgcagaaaagaaatgattaagagtatgtatctaacaaaagaaatgattaagagtatgaaaatatctgggttaaaaaaaaaagagtacgacaatatcaaagtcagcaaggaattcttagacaacaataatgaaattcttgaatgtaaaattacctttctcgcacttatattggcaaattaccccttcaacgaaagggctgttgagagagtcaaagaagcatcagagacatggggtttctttcagattgtgaatcatggcatccctgtgagtactctt

SEQ ID NO: 188559 - DNA, 333 bp, Glycine max
  unsure (1)..(333): unsure at all n locations
tacttgtttatgcatatactatagnnaaactattatacagatgatgggataaactattgaagcctaaagataaagagttctggtcctggggggagtgctagcttaaagcacggaatttggtacccttggccaagttgttttagtttacttaacctgggtgtacagtgcaaatacaagtctttactcatttaagaaattattacaatgtgtatatgctagttaatatcttgaggttttcgggcttcccaatacaagaataaagaatcagctgtaaaacttgattaagaatcagctgaagaccttggagctcactaaaaataatgggattagaaa

SEQ ID NO: 188560 - DNA, 343 bp, Glycine max
tttcgcttttttaaaaagaaagcacggatcgggttgtatttaaagagcataccatgtctatgcatataatggcttatggagaagccccctgattaacagaatgcccgaaacaattttataaagatcggttcgaattctaaaacaaaattatatttttacataataaaatacccgaaaatgaatttgaaatgaaggtgaaaggaaaaaacattatcgaaaaatttgataatatatttgagcagattttctctgggaaaaaaactgttatataaataaagtcttaaattgttaaaatgggctgaaaagaatttttattgaaatggctcctttaataacaattttt

SEQ ID NO: 188561 - DNA, 517 bp, Glycine max
  unsure (1)..(517): unsure at all n locations
agcttataatatatcgatacgctcgaaantaaactattgtaaactctctgtggtaaatcannatagncataaacttttcacacgtgatgtctcgagttcggcgcgcatatactatgtctgagaagggctctgaaattgaacaacgcgacagctctctgagaaaattagacttggtataacattttcacacacgaagtctctcgtgaaagtcatattggtcataacattttcacacatgaggtccagattgaagtttatatatatattcgatacacgtcgtaactaatacattcggaaagctctctattaaattcaatatggtcataacagtttcacacaggatgtaccgattcttggcgcatcaatatgttcgagagggctctaaattgataaacggaagctctcgagaaattcaaatggccataacttttcacacggatttccgattcaggcgcataatatgttgagaggctataaattgaacaacggatgctcttgagagagttacatggtcata

SEQ ID NO: 188562 - DNA, 387 bp, Glycine max
  unsure (1)..(387): unsure at all n locations
ctatacacaactcaagcttgaatcggacatccgngnngaaagttatgaccattagaatttctcagattcttcgtgccaatttcgatcctctcgactattatgccccgaatcggacatcgtgtgaaagtctgactttaatctaagagtccgatgtcaatttcagcgtattgatatattataaccctgaatcggacctcagtctgaaaagttatgaccatttgaatttgacgagagcttccgctgttcaatttcgaatatcactgtatgtgatgcgcctaaattggacattcgagttaaatgttatgaccatttgaatttttcaagagctttcgttgttcaattttgagcgtttccatatgtgatttggctgaattggacatccgtgtg

SEQ ID NO: 188563 - DNA, 388 bp, Glycine max
  unsure (1)..(388): unsure at all n locations
ttaatcacctgangctgcagcttacagcagaatttagtaatgacccactatcttataataatttaacttaatgccattaacctaaggaattaaaacaaacttaatggctgagtgtaactgaaattgttggccacccccaccacccccaacagccaacaagtcatccaccatttggtcttccaaaaggctgatgcctaagttgccaattgggcccttattacaacttgaactaaagcccttttagatgattaacccaaaacatatttttggtcagccaactttacaaggattgggccattatttagacaaactacacactctaaaattgaaataaagtggtgtgatttaattctccatttgggccatgatacaactacaccttggactt

SEQ ID NO: 188564 - DNA, 409 bp, Glycine max
  unsure (1)..(409): unsure at all n locations
ctaagctttgagcaaacatcaacgacaatcactggttactcggatgtccgaatgattaccgcattatattgagacactcgaaagtgacaacggaggctctgagtaaatccaaacgacaataactttttaatctgatgttngttgtggtgcggcgctatatcgagaccgctcctacatttgaaaccaaaaagctcgtagccaaattcataacgacaataaacttttaactcaggatttcccgaatgaattccgtagtatatcgagacgctcgaaattcagaacaaaagctctgagcaaaatcagaagacaataactttttactcggatgcccgaatgaatcccgaatatatctagactcttgtaattgaaaatagaagatctgggcaaattttaaagagaataacttttt

SEQ ID NO: 188565 - DNA, 363 bp, Glycine max
ccatgtagaaccgccgacctggtgctctacaatgctgagtactctggaatacaatgggaatgaagatggatttacctaatttcaaaccacaacaagcatcatacacccgatgtaaatgaggtggaactattggcacaaccctattagagtagtcttactccttaagtgactgtagctcttttgtttatgccaagccttcgttctaactctagtccgttagtaaccactgaagttagtgtattatagactctctatacatacagtgctctattcttgtaatagttgaaaaaattcattctctgattaatgagaaataaagttccctttctctctcaaaattctctcaagcccaaaagtatatca

SEQ ID NO: 188566 - DNA, 354 bp, Glycine max
  unsure (1)..(354): unsure at all n locations
tgggggttaggagtataatactcaaaaatataaaatgggaattaatccgacaacaagatcttatagcctaaacgacgaatagtattgacgttccaagaaagaaagaaaaagagtgtgtatttctcattggattttcttataaagaagctgctgaattgacttttgctcctatgcctctcttctcttgatagatttacatcgttaccgtttggctaacgctattgccatngatatatgacatctatttaatcatagagctgtaagaatgatgtctaatatagtattagggcagtttataatgaagcaagcttcatgagttaaaatattataggatatagggcgctacgtatttga

SEQ ID NO: 188567 - DNA, 318 bp, Glycine max
  unsure (1)..(318): unsure at all n locations
ctctgggggaagaggagagttgcaaatgtccttatgacctcggaaattcggaaatgggaaatantctaagttcatcttgtccaacgcttgattcttgcggaagatggattagctctaggtttcgaagggacgtaaatgcttgcaaagtctacatggagacgtgcatatagagagagagagagagagatgaccctcccttaattgcacgttatttagagttggaaaaccacctaacttcactacttgatcatgaagagcagttttggaagcaaaaggccaaagcatactggttacatgaaggtgaatccaaacactaac

SEQ ID NO: 188568 - DNA, 299 bp, Glycine max
  unsure (1)..(299): unsure at all n locations
gaaataactaggaaataccggtatctactttagcaaaaaaaacctgggatnttacgttttcttttaaaccaacggctaactagttagaaaatatggaaaaaagaaggataacctccccataggtagcatgaccgcaaccaatgtctctttcccattttcaaaaaattatttgacatctgcataaaaaacaaatttagaatcactaagcttgagaccaaggcaatgctaagctgatacctgcataaaactgaacacctagaaaaattgggatcctttttttagcttgccacacaaaataa

SEQ ID NO: 188569 - DNA, 452 bp, Glycine max
  unsure (1)..(452): unsure at all n locations
agcttaaagcgtcctaattagttttggtttgattattntgcaatgtctaacatattttaatagatgaggcatttgtattgaatgttctagactatgcatgtgtgatattcaattcgaactagatggagatttctttctctaagtttcttaagaacttactttgaattaatcgattgccttatttgctaatcgaatgcctaagccagtttcagaagaaggaaggttcatcagctcaggataatcaattaccccatatgataatcgattacccaactcctgaacacaaagagaagttctctgtgtaaatatataatcgattactacacatgataattgattatccagtcaacacaaaaggaactgaacttttcagattgaaacaaattaatcgattacccattatgataatcgattaactagtttctggaatggagaacaaatgcgattttgac

SEQ ID NO: 188570 - DNA, 371 bp, Glycine max
  unsure (1)..(371): unsure at all n locations
ntnngattgtccaacttatctccacccgtaatgttatatatcaaaataaagaatctttatcaaaaaaaaaacatattcatttcatcaaaatgtaaaggctttatttcttttatcataaaaccttctattttgcattctaacaaaaaaagaatattaaagagaaaaacctatgatgtatttttttatgagactattatgtatttttatatctgcgttttggaaatacaaaattaattttggagtgacatggaccccaaagttatatactaatataattgtttttttttctaatatacttttagagttaatctcataatattgtcatttcaaaaatgtgatctcccccgttctttcggcgtgaatcaatgttt

SEQ ID NO: 188571 - DNA, 445 bp, Glycine max
  unsure (1)..(445): unsure at all n locations
agcttaataggctatgacttatataacanaacttttatcaagtggcatctactaacacaacattatctgcatcaatgaagcaactcgaattcaatttgactagcaaaactantctcttgcctcactgttcaaagaactttttacccacaaggtttctgttttctttattggaaaaattcagcaacaaaatcatatattggcatatccttcaactatacttatgactttctctaaactcaatccaaattgtgcttcttttntgcaacatacttaatagagtgggaaccaacaatacacactttgcattcaagccaataaaaaaaggtagctttatcaacaatcacacacaaaaatgaaacacccccaaaacaagatacctttgatttatatagatggaatctttcgactacactacacttcctagtaagaaaaaatagaccaaaaa

SEQ ID NO: 188572 - DNA, 366 bp, Glycine max
ttaaaactaccttgacatgtccaactaatcattttttcctgtttagctatcacagactaaaagatatacattagcttggtacttgctataattcctttaattggttttattgtatgccctttgtactcttcaaggtctaccattgatccaagtaagctcctttttcccttattcatcttatcagtagtggtagcagttacatgcatgcatgtgagaaccacttttctactgcattattttaaaaagctctaaagaaggacacttacagatttttgattaagcttgggttacaactttaaaaccaaaaaagaaaactaattttgcataaagcaacttttttgtattaaaaccttctggttgtaattg

SEQ ID NO: 188573 - DNA, 396 bp, Glycine max
  unsure (1)..(396): unsure at all n locations
agcttactcgtaatgctcaagtttttgtgtggtttgtccagngngagagtagtttccgtacccttaatgaaaggttgaccactgcaccagttttagtgttaccttacccacagtgaaccattatgtggtgtactatgatacgttcaagatgggtttgggtgaagtgcttatgcaacgaggacaggtagtggcctatgcttctcgacagcttaagatacatgaaaggaattatcccacacacgatctttagttatcagccggtagttatgctcttaagctttggaggcattacctttatggatctaaatttgaggtggttagtgaccataagagccttagatatctgtttgaccacaaagagctttacatgatgcagacgagatggtcatagtcttt

SEQ ID NO: 188574 - DNA, 363 bp, Glycine max
tatagtgaggctcggctactaaaataattgtgttttctatgattcacaagcttagattataagagagcacaatcctaacttatcaaatattcttccatacaatactatactggcttactttatttgtctttgaccttattacaacaacacacattttctttgattgctcttttttttttaaaacacaacttatttgttgtgtgtgttgatgctttaccttttactttacatcccaatcaactcccccaaatttggggtaatttgccttgaactatctgctctcctagaatctaaacaaggtatctggagatattcattcaagtttagggttcaattttgaaaatgtaattcagctcacaaagg

SEQ ID NO: 188575 - DNA, 441 bp, Glycine max
  unsure (1)..(441): unsure at all n locations
tagcttctaaactttgtacaagaatgtaactctgattccacttgtnagacaagnggcctcagatatcttgagaagggggggttgaattaagatatctccaactgnntccctaattcaaaatctatttcactttttactcaatttatgaattcccttaatgacaatcttcttaaatattaattcaaatgaagcaacttgaatatgaatataaagcaataataaataaaggagattaatggaagagaaaatgcaaactctgttttatactggttcggccacacccttgtgcctacgttcagtccccaagcaacccgcttgagagttccactatcttgtaaattccttttacaagttctaaacacacaaggacaatccttcctttgtgtttagagatcctttacaacaagagactcacagtctcttactcccttatagaatgag

SEQ ID NO: 188576 - DNA, 325 bp, Glycine max
  unsure (1)..(325): unsure at all n locations
gattacaaattggaatcanacacaatcaaatcaatatttgtgtgtatgtactattcaaatttaaagcctctcatggcttctggcatccattacacacttggtacttcgattactaatttaaaaatatcttacttttgaactgattaaacttttataaagacattttgataaaagactttgaggccaaactattgcaaataaaaatgagattcttttaacaatttgactaagtctttatctgcgattttcttgatcttgtttgttgacttgaaacaatttgtgctttcatctagtaaattcttttggcatcaccaaaacctgcatg

SEQ ID NO: 188577 - DNA, 398 bp, Glycine max
  unsure (1)..(398): unsure at all n locations
tccatcttctctgatcctctcttgtgtcttaaaaatcaaagaagcaacctacttctctagatcataatcacagacagagtatcaggccttgacaatcactgcttgtgaactccaatggttaagctatttgctcattgatatgcatcaacaaacttctctgttgcatacaaaaactaaagccctctcttctcctattttatcttccctcgtgtccaagctgaacatcatgatattcatggtccaacttgagggggcctgttaatatatatcattcaccggaatgtgttgttagtatgtttagtacaactggtagtaagtttcaagtacaatttttagcatagctgtcaaatgacttgtatattatngaggaattcattttccaattcattatattcaaa

SEQ ID NO: 188578 - DNA, 397 bp, Glycine max
  unsure (1)..(397): unsure at all n locations
ttttataaatgagaaattctggactcagtactttatctaatatatttggggtggatccaagtgctccgatcatccatttgtatactcatgttttggtggcatactcaccgctgnttatntttttggaatttnttcataactaagaaaaaacaccaagggcactctcctattaacacttttgatctcagaaaaataggataatgaaaagggcgtgccaggaaccagatgaaaggcccgatctattcgaccttaaaagatcaaatggcttccatctcggaggtcatgttaaaactccagaaaaccatagaggataaagccaccgcaaccgccttccatacagttagggaagcggagcccgtgctgcaacccgccttgaattcgagcctagacagaaaca

SEQ ID NO: 188579 - DNA, 463 bp, Glycine max
  unsure (1)..(463): unsure at all n locations
gctattgggtatgggttatttattggttgcttagttaagaggtttttgttacggtttaagtcgnagataatcgagggtttatggtttatggatggtggtctacgtcttagggtttanttattcacacaatcgggtttatgttgtagtctttatttttagggtttagggtctattgatttangtttgagggattaattaatcttgtttaaggtttaacatattctacttaggttaataagataatattcatatactacataaacacaaattaaaagcgcttgtcgtaacatacttgtttatcaaataatatatatttaacagtgttcaaccatattacatacataattcctataatacttaatcaatcctaagtttgttgccttcgtcttgaccgaacataaatattctgttgctcagtgacacccctagcgattctcatgcactccttgatcacgatgtatgc

SEQ ID NO: 188580 - DNA, 430 bp, Glycine max
  unsure (1)..(430): unsure at all n locations
aagcttataaaaaaatcatagnnttacaccctctggatgcaccattggaaatattgtttgatacaaanaacataataattggtaattatagcacatcaattaaaaattaattgtaaatttaacaactcatcctttttcccccataacaccatttgactacacgggtggctgatgaagctaccaacgatgtgtaatgatattggaagaagaatgggggtgtttcaaggtttgagaaataggatctttttcctatggatgattactccccacggaaacgggaaagaccttgggagaaaggactctacagtttgtgatgggatctaccactagtacaatttagaaaggccactaaatttaagttagtgggacactattatttaaattaatttcgttaacttttcctccttctcactttgggatatattccctt

SEQ ID NO: 188581 - DNA, 56 bp, Glycine max
  unsure (1)..(56): unsure at all n locations
taaaacncgagatgaaagnaccttgtgaaaaaaattgtttttttttattctaaaaa

SEQ ID NO: 188582 - DNA, 316 bp, Glycine max
ttttgcttaccaggataaaaaactaaggtgggtacgaatgggcaccaaagtaccccaaaccaaaagcaacaccatttggtctctcaaaaggctgatgcctaggttgccaattgggcccttattacaacttgaactaaacctaactaaagcccttttatttgattaacccaaaacatatttttggtcatccaactttagagggattgggccattatttaaacaaactaaacactctaaaattgaaacaaagtggggtcatttagtcctccttcatttgggccatgatacaactcacaaccttggacttttcttcttg

SEQ ID NO: 188583 - DNA, 436 bp, Glycine max
  unsure (1)..(436): unsure at all n locations
ctgcacgcatgcaanncttntttgtttaaaaagtagaaataaaggattatgttgcgatgtttctatgctaaagaaanacacatattttaaagttgaaattcatgctattcctgctaaacaaatatactaattataccgcgctatcacggattactaatatgtgataatgatggctaattaagttgtactggcataaaatgtatactataaggttgggcataacgagtttttctttaaaaaaaattaataatttagcattggtagttgatattgtaacttggcttaatgtataaactttaaacatgcggattttgacattttctatcgtactttgttcaacattcttggcttggttattattgaatttattattgtattacctagacatttgatgtgtcaaaaaccatgaagcagctactataactcgacacagact

SEQ ID NO: 188584 - DNA, 461 bp, Glycine max
  unsure (1)..(461): unsure at all n locations
agcttccttgagaagctagagcttatctacacactcttataatagctaagctcacccncatgactaanaaacatgaaaatacatataaaaatcctactacaaagactactcaaaatctctgaaatacaaagctaaaaccctatactactagaatggccaaaatacaaggcccaaaagaagaaaacaacctattctactatttacaaagaagagtggacccaaccttggcccatgggctcaaaaatctaccctaaggttcatgagaaccctaaagccttctttatcaactctagcccaatcctcttggagcctcttgctcatggctctggtaactggtcctttcctatggaggatngcatcagtacatcctttgtggtacaaatagagggtacatctactctggtttgactgagaacaagagagggtacatctcttgtggatcagttctagtggatggtaca

SEQ ID NO: 188585 - DNA, 345 bp, Glycine max
actaactatcaattgctttaccttatatggttttcaagacagaaggggtacttatgcttattggactttttgttttgtttggaaatgcaagatgagaatattgtcagatcattctgagtgaacataacatgcggatgatgaaaatagaatgtatgcaattggaagaacaaaaacatgctaaatgaagatcagagatgcccaaagagtgtaacgtggtcaggggtaagaagactatgaaagaaaagatcagagaggcccaaagagtgtttaagggttatattgagtaagatccttgagagcgttgcttgcacttttattcatttcaactcttgggttgggttctac

SEQ ID NO: 188586 - DNA, 340 bp, Glycine max
aactaagctgctagggcgcgaaggggaacttctgcttttttttttacaaggcgactggcccatggagagcgctaaaaacatgagacacgtggatggagctttttctagaatatgccggaccaaagcccttcccctcctagatgagccttggaaaacatattattgatgctccagggagcgtactgaaagatcgcgaaataaagaaacgggggctcccacatttgaggaagataagggtgaaagctatattttatggtatatacaaaatgtcctcttgaatttataacaaatgtgcgcatcttttatttgtttcaggctacttctttagatcttttttctc

SEQ ID NO: 188587 - DNA, 446 bp, Glycine max
  unsure (1)..(446): unsure at all n locations
agcttgtgtgtcgataccactagtccaacactctctcaagccttgcaaatataacatcatatgaaacctagaaaacaatttcagcaggtacattgcaaaaatgcaggtgaaatggaattctataggagcaagttataccagacacaacaggacctgaagtaatatagtcaatcagcttagggaaaaatgacttttgttttaggtccttctaatgctcctggaaccataaacagtcacaataagcctaataaatataataagtacattaaaaaacacaatagaaacaacaatactgcaaacacaagatgtaaatccacatcatatggttcaataatcaataatttaagcatggatacactagattttgtaattggatgggtggaatcagttattcaagccattcatattgtngcactttatgcaactacaatcatatgntatttttt

SEQ ID NO: 188588 - DNA, 341 bp, Glycine max
  unsure (1)..(341): unsure at all n locations
ttctctagctttattattggcaagcgactatgtcattgtgttgcttttatcgtctcacagcaccggtcatctctttatgtggatctggactctatgaaatatatactgtttnttcgctattgcctttggacatggcctcagtgctctctttgtgtaagaataatggatcggggtgttgtataaggggtatgtgcatttaaaaatacaaaactattatttgttgttgaatgctcttatatgttttaaaaatttgaaaataaaaatttttttcttataatttttacgaatatattttctgcccccaatgcttacattacttatttctaatacattatgtttta

SEQ ID NO: 188589 - DNA, 355 bp, Glycine max
  unsure (1)..(355): unsure at all n locations
atagattcatatgcgatcagntctagatctcttccttngatcactcttcttgtgaagtgatggacttcatatccatttcggaccacactctgctantctacaccgctcagttggtggttcccaaaggtaattctccctttaagtataataatggtgttgtggatcacccagaatttttaggcattgttgcagagggctagagccatcaaatgaatggcagtggcatattcaaggtctgcaagagataaaatctctcaaagcttctttgaagcttctgtacaagcaagagttcagtcatatctctaacagagtggagctagctgaagctaattatagtagtctactttgctccctc

SEQ ID NO: 188590 - DNA, 450 bp, Glycine max
  unsure (1)..(450): unsure at all n locations
agcttaagagtgaaacacttattgtgaggacattttgttatgccatctaaattgattgtcattcttggtgcatatttctaaccttgcatttgttctggttgagcttaacgttgaatgtgggcaccttacttacttgattgaagcacatgaacaaaaagaaaattgaataaaagggaatgcaagaaaagtgtgtatgtaacttgtcattgtgtatccttagtctttagttttaatttgtcttgtttttaagtcttaagttaattnttgttttgagtccttaattctttaagtagtttttactattttagttagtgttggttgaggagaaacaagtttctaagtttggagtgttaataaacgttaaatttaccagaatttcatattgcatttgtgacattcagttggcatttttagtaactttaaggctcgttttgaatcaaattagcttta

SEQ ID NO: 188591 - DNA, 284 bp, Glycine max
aagctttggtatggctggataaacttccacttgaatatatcagttgtagcttgaacacctacatgaagaaagaaatatgtctgagcttagtcctaacaaattagagtcattaattgtagttattattcaattgataccattgtttttgttttcatatagtgactcagaatttatttttaacatatcatcataaaaatcttgtactttgtagcttcataaatttaaagaaaataaatagtaatgtgcttaacaacaaacaattaaatattgttttatgattgggg

SEQ ID NO: 188592 - DNA, 386 bp, Glycine max
  unsure (1)..(386): unsure at all n locations
ctgagactctgagagttatttttgaaatggaagactcgtggattgtgcatatggttnnaacttatttcgggggtgtttgtaaatgatattaataaatttattagtgtaatttaaataaatgggtgctaaaaaaatttggggtgacagataatagcacatgatgtaattttggagatatagaacgcaacagttttaaattgttgagtcatatttgaattttgatacttataaaattaattaaaatacatgttttttattatgattggaattggatctaatatttattcaatgaaaatatattaaattgagcaaaattcactattttttaagtatttatataagttgtataatatatagaggtattgaattatgaaatgaaaaatatt

SEQ ID NO: 188593 - DNA, 337 bp, Glycine max
  unsure (1)..(337): unsure at all n locations
tttttatccattaccaaaagaatatttgttttattactgtgggcgatatatactttaggggatatactttggatgagcttntatgtgtttgcttccaatccacttttctattaattaacttctttattattgcttctttaacattttcaccatctttggaattaatgctttttagaattacataattttaattttgagaaattctattgagataagggcgtagttaatatattaatgtaaacttttattacgaccaatgtatactatttgcgtacctaaaccttttattctagaaaaggatagagcttgctttcatttttttataaaaacatttaaa

SEQ ID NO: 188594 - DNA, 427 bp, Glycine max
taatggtgttatcattacaagaaggagaccgattaccagtgtatctgaacattgaaattccaaatcaattatgaagagtcacatccttcatcaaatgctctgtgtaatcgattacatggatttggtaatcgattaccactgacaagttttgaataaaaatcaagagatgtaattgttccaatggttctcaggtttgttaaaggttataactcttccaatggttttcttgaccagacatgaagagtctataaaagcaagaccttgacttgcatttcaactacaattattaaaacttctacacacaactgtttgataaacacttgatatctttcttcttcttcctttgccaaaagctttctaaagttttctagattgtaaaccttgttctatcacagaaaacaaaagatgtgtatatcttttcattctc

SEQ ID NO: 188595 - DNA, 316 bp, Glycine max
cacactttatggggttcggagctatttaggcatgactatttacactcaaactaaaacattatacacaaaagacactttctatatttgcatagaaggtgtttttcctaaggactgaaaaaacttgtctgagatgtcctaagtgatcatctaggctcccattgtgtgacatcctggaatttctacccggaattttgtaagtgttacatttaaataattatatatatatatatatatatgtatatatattattcagcgtatatatatattcttggtagaaatatgtacattgtgggaaagatatgcgggttacactaat

SEQ ID NO: 188596 - DNA, 409 bp, Glycine max
  unsure (1)..(409): unsure at all n locations
atattttgataattttatatanactacgtataaagtaatatgaaacttaacattgacgattcattttaaatgcttaccaannaacacactaatcgcaaacatctgtgtacaatatatatataatttaggttgcatattttttctctattataaaagttgacaaaaattataaaacaacgaaactacaaatggtaccgagtacgttaaccatataaaaatattgcatgattggataattgcgttccagaagagacaatttaatgtctcttatttcataatttgatcaattcaaattgaaatatatgtttaaatcatatttaatacaaatcttgctttcaaaacaaaatttagtgctaaccaaattaacaatcgcctgaacattaaaacttaatgaatatatggtctagtc

SEQ ID NO: 188597 - DNA, 370 bp, Glycine max
  unsure (1)..(370): unsure at all n locations
catngaaataaagctagacagatcttataagaaagtcacttaccacttctattaacccttgttagcacttctaaatgccctccagatctgagatattgcaggggatttgttttaaaatntttgcctatttaactattaaatctcctcttgccttgctttagaatgtcgaattcaaacagttattaatgaattagtatctaaaatggtattattttctgcacacatgggcgttgaattgcattgatgtcaggcatgtaactttaaagggttttaatgagagaaccaaggtcatctccatttatagtactctaattttgtagcagtataagtgaatctttttgcattggaattgacactaccaatagagaac

SEQ ID NO: 188598 - DNA, 500 bp, Glycine max
gatcctctgactcacctgcggcatgcaagcttaagctccttcaactgcacaaggctcttaatatttgaagagtatccttgtggaaccttcacccgacgaagacactgacaaaaacttatcttctccttcttggacaaagtatggcaggctggggcaagtaaattttcttcccatcagaccttggatgcaactgtgatcgtatacccatatcagctagatcttgacgagtattcaagccatccttcatcttgccttgaatgttaaggagcgtcccaatcacactgtcacaaacatttctccacatgcatgacatcaatacaatgtctaacgtcaagatcacaccagtacggaagatcaaagaaaattgacctcttcttccatatgcaactctgacttttatccttcttttgggtcttcccaaatatagtattcaggtgttgaacccgctgatatacctgctcaccagtcaacggtatcgatgcaatatcatgctcttgtct

SEQ ID NO: 188599 - DNA, 355 bp, Glycine max
aactagctgagaagggatatacatgggctagggcggcgcagggcccaagttcaatcacaagcgcgcataaccacatcctgtgccactcaatgagctatactcagtccccattcctcgtttctctcaataccgggtccccatcaatcctcccaagcttccacaacatccaagcaaaacaacatacaaacagcacaagctatcacagccaagcaaaacagagcaaggcagagaactctgctcaacacaccaactaaaatcatagcttttctcacttaaagacccgagtaacaattccttcgatccaattcactaaccgttggatcgactccaaaattttactggaagtctatagtgc

SEQ ID NO: 188600 - DNA, 458 bp, Glycine max
  unsure (1)..(458): unsure at all n locations
agctngatntgtgagttgatttaaccttagtttctctttggttattagtcaattcattcaaggaaacttccaaagaaaaacgtccgattgatttttcttgattattttattcaaagatattcgattattattttttttaagatattttaattattttattattattattattattttatgtttaaccgaggttacaacgtaaacgatcggttagattttgttttaacagtgattaaacgagattacaatgcaaatgatcggttgaaattcattttatcatttattaggtgagataacggcttaaacgatcggttaaagctcgttaaaaatggaagaaaataaaaccgaanatgaacgatatgaagatgaaagctaacaaacaagacatgaattgaaagtctcggattcgaaaacttacccantgaagaacgaagaacgaacgaagaacgaatgaagaa

SEQ ID NO: 188601 - DNA, 341 bp, Glycine max
tggacttttgttcatgccacctgactaaggaactcctcaatgctcagcattggctactgctggcctgatctctgaaaacctgaagtaaaatctttaagactctggtgtttgaatacaaataaagattctgagctgaatgtgtagggtcttaaagaaattggggctgtagctatacttcatgatgtattttgggccatacttgatgtacattgtatattggttaaatgttggacatgctgaatgaaatgttgtttctcaaaggctaaagagtaaaaaaaaaaaaaaaaattcgaaaaaaaaaaaaaaaaaaaaattcgaaaaaaaattcgaaaaaaaaaaaa

SEQ ID NO: 188602 - DNA, 456 bp, Glycine max
  unsure (1)..(456): unsure at all n locations
agcttatgcgcatacttctttactaacgttcacttgcacaagacattcttataactaagaaaaatgcacccatatacaatcaaggcaccttcgttacctagattatttatatgtcttccaacgtgtatttgttacctacatctcatgaacttccttggctaaatttacatacatgcgtactcaaagcatttggggtaccaaaaattgcacatgtgcacattccggtatttctaatacttatgcatatacaaactntgtgatgaatcttggctatctacacaataaggtgatacatttcatgctttactcaagtgtttttgctacctaaagccgcatgcaaattcaagtacattttcttttgctgactaaaatngtattcaaattaaaaggtatttttgtaagggatttcctttacaaaacatgcaacatatttatatntttttgcgagaacatttg

SEQ ID NO: 188603 - DNA, 320 bp, Glycine max
ggttgaagagcaattgtatttgttgataagcaaaaaaaaactgggcaataaaaggtgaggataagagaaccggctgtattgccattcctatacagccaagttttccaccaacccaacaatgtcattactcagccaataaccaaccttctccttacctaccgcccagttatccacaaaggccatccctaaaacaaccacaaagtctacctaccgcacttccaatgacaaacaccacctttagcataaaccaaaacaccaaccaagaaatgaattttgcagcgagaaagcctgtagaattcaccccaattccagtgtcctat

SEQ ID NO: 188604 - DNA, 448 bp, Glycine max
  unsure (1)..(448): unsure at all n locations
agcttcttatccaaagctcatcttggtggtgaatctccttcttccatggcttattccccagaggatggcgcctcttctcacttcttctcctttgtcttccgctgcatctncgtgtgaaaaatcaccattaaaggacctcattgaagctcaaagatccagcctccataaaagctccacaagcaagcttccatcaccggggcttccgtggcttccgtaatgcttccgtaaaaattttgaaaaccttgggggtgataagggaagataaaaaagatgaaaatcaaatccagcctccatattccacttaatattggtgaaagggaagataaaaaagatgaaaatcaaatccgaaacacttccgtaaggcttccgtaactttttcgtaaaatacgaaaatgggggtgaacttagtaattcgggtgcgcttagaaatcttcttcatttagtctct

SEQ ID NO: 188605 - DNA, 379 bp, Glycine max
  unsure (1)..(379): unsure at all n locations
ngttaagtcttggaagccccaattgtttcttacacttggtggagcgggccactcangaatgacctttattctcttagggttcatgggaaccccttgatcacaatttaaaaaattaaaaagaagcaataaaataccttttctgtattttcatgttgattattcctaccaaaaagtatgacaaacctaaggtgtcccatatgagtgcctaagtttgtattgaaactaaaaataagaacaaacctacctaatgagtccctatgtacacaaatcatgaagatgttgggtgcacgagtgattttacaaaagagtgttgcaccacccaaaacattcatcacaccacctattttagggatttggtgcctaataatacctattttgg

SEQ ID NO: 188606 - DNA, 424 bp, Glycine max
  unsure (1)..(424): unsure at all n locations
tactgatgatacacacaagtaccagaatagctcttattattacttggttggtattatccaactaatattatnttnnggcacacccaaatctgtcagaaagataaagttaataattgtagacatatcaactgttgtttttattactagtattgtttagtataattaactaacctagtaattgagatttgttatcattattttttcacggaaatcgggagacaaatactttttttttctggttgaaggacattctattacaccatattaccaatctgtaatacgcatttccatgctcatttatgaagtgaaaaagagtataactttattacttctgctacctcgaagatatcacacagattgtacaagtaagcaaaataatattaaggaataacaacgaaataacatatgagtgcgcaagcatgat

SEQ ID NO: 188607 - DNA, 238 bp, Glycine max
atggggagctataatttggtgtagacaaaattgtttttttttaagttgacccttaaatgttgattggagtcatgctatcaagggatgaacaagaatagtttggtttgcacagtactatttaaacaatgcagacaatcgagaagatcctgattattacattatttatttataaacttatatttgaaactttagactttttattccattaaaaataaaagttttttatatccttcggatt

SEQ ID NO: 188608 - DNA, 459 bp, Glycine max
  unsure (1)..(459): unsure at all n locations
agcttagcagcagtcatgcgctgagcctggctgaagacaatcgctgcgcttagcgcactgatctcgcgcttagcgcgcggccttgatattgatgcactgccagattcttctgtcggctaagcgcacaacgcactgaagttgcgcttggatgcgtgctcagcccaaatggtgagctgagcgcaactaccatttttagcacttcaagatttagcctcatttaacctggaatttaacaaattacatcattaaatccaatggaaagtattctagagacaactttaacaataaaacaagatttatttacaaattaccacaaaataaccataaattggggaactatacaaattttggaaaatattttctacacaaaagttagtcgtataagatgactaatagtcatccgcacccttnttcctatctagagacaatcaagtccgatggcacgcgaagacaaaacat

SEQ ID NO: 188609 - DNA, 379 bp, Glycine max
  unsure (1)..(379): unsure at all n locations
tgagatgaggaagtgttgaagggtgaaacttcctgcttttattgttgaccacagagnggtacctggagatatgtcacggnggtcgggagaccttggggacgtcaggtggggtgtattgtcaaaccaagttaccaatccgacccaacccgggcatagtcggtcagtgagaacctgtgatgtacctaagcaggcgagctcctggcagtcaacagataaaaggaacaaagaccacaaagcaaggaggcttgtggtggctggccagctgtgaaacttggctgatatgtgagatatggtctctggtaatcgattaccaagggtggttaatcgattacaaggcttaaaaataaagacaggaggctaagatggtctctggtaatcg

SEQ ID NO: 188610 - DNA, 399 bp, Glycine max
  unsure (1)..(399): unsure at all n locations
aaaaataggcctcctttttttctaatggagagggttaccacttctggagaacccgaatgccctcctcaatgaggcaatatacttaaatatttgtgaagccatagaaataggaacttatgtacccaccatggtggctggaaatactacaacagaaaatcctacggaaattgaagtgaggaagaaagaagacaagtacaatataacttaaaatctattcatggaagaatctattcatgtttcatttgatgagtctaatgctattcctcgaagaaaggatattntaaatgatatcgcagaatctttataacacatgcatattcatggaccatattctaatggaaaaggaaaaggaagcaatgagaattcataagttgatgaaccaaaacaaatgatgatctt

SEQ ID NO: 188611 - DNA, 361 bp, Glycine max
ggaccttgatctcgcttgagggtgaaaaatacatgttgcatatttttaggagaaagtgatgatgatacatgatttgatgatgcaagagatcaacaagctaaaaataaaagctattgccgagataatacaagattgtttcaacaaacaaagccttgattgaagatttcttcaagatcaagccttgcctcaaaatgaaaggtttcaagtcattcaaggcacatgtaatcaattaccaatacatgtaatcgattaccaatggtttaaaagtgtgtaatcgattacacatcatatgtaatcgattacacatcatatgtaaccatgcccccctccccctcttatgggttagcgattggaacctact

SEQ ID NO: 188612 - DNA, 449 bp, Glycine max
  unsure (1)..(449): unsure at all n locations
agcttattggtgtcattacttgtcaacccatgttacgtggcagaatgcacatagagccggttcggttgggtcgaagcgggaaccgaagcgaaccaacagttacaacccgcatattccttaactaactctntataaaccggaattaaatccggtttgaacccattcattaccgtctccatcatcgtcgccgtcgcattctttggcactgcttgcctcccggcattttgggcaaagccttgcatggtcgggggcaatttctttgccgttgaggcttcgctccaaggctctccgaagatttgctcgtaaatgtcttggatcgagtgacctgngtccgggtcaacatagaccgactggtccgagatatgaaccaaattctagttgggattggatgtggaaatcgggttagactctgaaccggtgataccgnntgatttctgatcgagggactt

SEQ ID NO: 188613 - DNA, 368 bp, Glycine max
ctatatagacttcaaagtttctattcattgagagatctttaccagtcggtgtctaatagcttgggcgctgtacacaaggtcgttactatgcagagagagagtgtagaaccaaacattttgagatatattcagagaagacaacttgccaatgtcgtcttttgctcatagttgactttcattgtaccaatcgaatataacgttaacgacataagacaaaaaaaaaaattaagaatgtcaagacaagacaatttgaatcttcccttttgtgggctatggcatgaactgtttactaaacctatggatgttactttctgatgattacttttagtacttgaggatcgagtaactgttccatttcctttgtacta

SEQ ID NO: 188614 - DNA, 287 bp, Glycine max
atctcgttccaactaatcacagttgttgtacacaactacactttatcaaattcctctttattaatcttggcatttacaaacgagtcttgagcttcagcaagatctttcccagcttcggccagctggagttacatatgagctaattgttttgacagagtacctaaaacttttttaatcttttcaatttcttccacaccactaccatatgactaccattaactaggctatttctactctgcgcgacagcgttatcaaaaccttgcagcttggtcacacaattgagaaac

SEQ ID NO: 188615 - DNA, 372 bp, Glycine max
  unsure (1)..(372): unsure at all n locations
tatttctgacaaagaggaatctctcttcttatcttttttggactacgcacatgctgcatttggagttatgtagtgcctgatataccttgcacaagatagataggtcaagtnttaaaaaaaacccagaatacgccacaattatcaattaagctcaatcatttgcctaagaccaaaactgagttaagataggaaaataggagtcaaagagagaggtaatgtcatatgagtagaagtatttggtcctaggtcctttaagctaagtgctatcggtaggtcttgattttgaacttttggaagttgcatttctctaatataccctttttgcattcaaaatcaattttgattgaaagtattaaacaaaattgatgaaaa

SEQ ID NO: 188616 - DNA, 476 bp, Glycine max
ctgcagcttcataccaccccattactgctcccctgtggttacatcaaaaattcttagtgcgtggcaatcaacacaagatgatataactaaagtttacataaccaatcataagtcacaatcaaatttaaaaaatcatccataagttaaaaccaaatataatccaagcataaataagtcataaccaaatataatccaagcataaaagactaagtgccaattatcgaaagataacgaaagttcagaaattgataacgtaaaaagcatagccaaatacatggcttataataaaagataataacatcctaaaaactaagacggtggtggaaggtcgaagctctgacgaagataagttacatcctcttcaagctgggtgatgcgggtatccatgccttcaaagcgaccatccaaagaattgaatcgttcaccaacataggtacatcctcttcaatctaggtgatgcgggtatccatgccttc

SEQ ID NO: 188617 - DNA, 385 bp, Glycine max
  unsure (1)..(385): unsure at all n locations
ntgaagatcttggaagcaagatacgcacaatgagataatgaatgatgcggctntcaaaagccaatgaaccggcaagaagccttccggtcatattcgcttggttggtgcaaccaaccgggggctatgcagaaagtaaatttccatcatcattcgtgtaccttcaaatggtacaccttcactagataattgggtcaagtcatagaatagggattggtcaatgaccatttttatcccataaacttcagaaatcaaagtgccttcttgaattttaagattagaatagaaggctttaactaattcataataaacaggcaattttaaagacatgaaaggaatgagattggagttctcaaatgcctgaatgcattcaaaactctcattggaa

SEQ ID NO: 188618 - DNA, 393 bp, Glycine max
cttcacagactatcatgttagagatgcaccactatcacatgatcttaatattacgccacgcctataatgctctctaattatgttatattgttttataatatatatatatatatatatatatatatatatatatatatataatattttaataaaactttagttgtatttttaatcaatacatttttatgttatagtttaattaaaaacacgtaacatatataagtctagggatttgatcgtgactcccatataagcacacacgcatcaaagatactacaaatgtggatctaatctaaccttatgttcaagtgtttttaaaaaaaaaatacaaatatggagacaaatatattatatctatctattaagactttaccgataataattatcatccct

SEQ ID NO: 188619 - DNA, 270 bp, Glycine max
tctaaatgaaatcattatccttcctacgtgacaagtggaaaacacgtttaattatattagaagttccttggtcatttttcctattttgaagaaatgttttttccacgaatacaatgtttcgctatgcttttttgttttactcttgattcttcatttgaccatggaaacttaatagtagttgttcaagtgctttgggtcccccggggtctcgaagtatatgtaatgatttttcgcattctacgccttcatatatagctggcattattttta

SEQ ID NO: 188620 - DNA, 309 bp, Glycine max
aaaacacagacctgcataaatatgctataaccttatagacagggtttgtttaaagctcgacaagcgagtttatttaatttaaataaaaatttctttatacaacagattaaattttctttaaattattatattatataatatagatactcgtgtagaaattaattgtttatttgtttcaaaaagctggttatataatgatttactatacttcatttaataattctaggttatattgaagtttacaccccaatgatgaactgtaatttgttattactttaatttacttaacgaagaatatttatctattaa

SEQ ID NO: 188621 - DNA, 195 bp, Glycine max
tattagtgataattattgcattatacatataaccaaaagtagtacactacccataaaacaaaggatgggtcaattaatataaatgggatcttcgttgtaagataatttattctccataatacatttacgaatttgaagttattagggttccaaaattcatgcttactacaagctgcctttaaattatctaactca

SEQ ID NO: 188622 - DNA, 470 bp, Glycine max
  unsure (1)..(470): unsure at all n locations
agctntgtcttctttggatgctgacttgtggcattaagccattaatttgatatggattcnttagaatctaacaagacatggcatttactagacttgcctcatggttgcaaaccaattggttgtnctcgatcttgaaaaagaaactaaaacctgatggtactgtggataaatacaaggctcgccttgtatgcaagggttttatgcaaagagagaatgtggatttcttctacaccttttcaccagtcactagaataacatctatttgggtgctaatatctcttgctgctattcacagtctagtggtacaccaaatggatgttaaaactgtntttttaaatggtgaattggaagaggaaatctatatggaacaacctgaagggtttgtgattcatggacaagaagataaagtctgcaatttagataaatctttgtatggtctaaaacaagcacctaagcagtggcatgaaaag

SEQ ID NO: 188623 - DNA, 386 bp, Glycine max
tctagggaaggacctcaccacactggcccatacttggagcgtcctgagttacttcaacctcgctcctacctcttacacctctaacctgaacatggactaggctcgactcatctatggtctggtgtcacagataccatgaattcgcaactgatatcaagacaaattacatagatcacccagtccagcacctcctggcttggattccctgcattgatcacgacactatgcgatgttcagggggccactttagacaccttgaccttcaagtcgttaagtcccatgatcaacttggcgtacatccagaaaatctgctggaatacagtagacctttccattactttcctaggatcgaggtgggttagaaccatagttgctctaaatgcacc

SEQ ID NO: 188624 - DNA, 328 bp, Glycine max
  unsure (1)..(328): unsure at all n locations
gagagatggataccatctttctcaatcaatttntccgctccaccacacgtcatgtcttcaatggcttcattactgtcagcatatatcatacttctctccatattactgagtcctttatatatatattggagaagaagcttctcctatatatgatggtgagggcgactggtacataaatttttaaattgtcccagttttatacaggctcttttcactgagatgtctaatacctgagatattttttctgatggttgtggtcctggaaacatggaatattctatctaacaatactcttttaacgtcattctatctcgtgatggaccttata

SEQ ID NO: 188625 - DNA, 411 bp, Glycine max
  unsure (1)..(411): unsure at all n locations
actcaagctggactnctatagtagnnngaactcttgcgagagccgaagtgttaactctggtctattacgaaggaaggcataggtcacatcttaaacctcactcccatcgaagagagaagggaagatagctttaatagggtacgattaattccctgtacttcagggcgaaggaccaatctataaaggctaaccttattttttggaaatatatggtagagcgaccaccttaaaaagaagtccacgtcaaaatcttatgggtctcactcttatccaaagaaataccacagtcaaggcatcttaggggggacacccttctaagcccaaagatgggaaggggaataccatataaaagccagcccttaagctaaaatgcaagaaaatgctagctctattaaatgctttaaatggttt

SEQ ID NO: 188626 - DNA, 305 bp, Glycine max
  unsure (1)..(305): unsure at all n locations
gcagctttactttacgggttgtggaaatttttctctgcggccgccactaaagagctgtctcaacgcaccgaagaacatattataggcatggtattgcctggnnactcgctcgaagagctgggctttaactacatcngcccggtggacgggcacgatgtgctggggcttatcaccacgctaaagaacatgcgcgacctgaaaggcccgcagttcctgcatatcatgaccaaataaggtcgtggttatgaaccggcagaaaaagacccgatcactttccacgccgtgcctaaatttgatcccttcag

SEQ ID NO: 188627 - DNA, 457 bp, Glycine max
  unsure (1)..(457): unsure at all n locations
agcttaaagtatgcccgagtcattcatccctatgatatgntgntgaagtatnggcgatcagaattgccattccttggattatagggttgaaccaagctcatgcttttcaaaaacgtcatcaagtcaagttgaaatatggaagtaaccatcttgcaaaattggggcaaaagatgaatcgagtcacatcactgcttcgtctactgccaaacatatttaggattgttgatgtccttgttacttctagtttcaccttgacaaagatgtcatggaccatgttgaaaatctaaatngattcaaccccatatcctgcgtaaaaattcgcaatacttcaactgtacatcattcgcatgcatccatgcttttctttggttgcattgctcattgcattctttccttgaaaaataaaatanaataaaataaaatgaacttaatcattgttataataaagaaaaggaca

SEQ ID NO: 188628 - DNA, 380 bp, Glycine max
tataagaacaaaattgccttaatcatttccaaatatgcatgtgaattatgacgcatcaacaagaatcaagccaaggctattgtgcaagcaatcaatggggcaaaacacaccaaatgattataagatggatgctaaatttcacaaaggtaaaatcatcactttcaaattgagctttcaaaactatcatgacatgtagagaagaatcaaggatttcaagtcacaaaatgtcaagaacttttattttcaaaacaattacccatttcttgaacatatcctataattcaaagaaaaacatgcaaagtcgtacgtgcacacaaaattgacccaaaatattaaactgaaaatccgacgaaactaacaacattaacaaattaacacaa

SEQ ID NO: 188629 - DNA, 405 bp, Glycine max
  unsure (1)..(405): unsure at all n locations
acagagacggaagcatatgatatagaacctcattggatcgcgtcttattattacatgttgtnnnnccacgcactctctaactcattaaaccctatttgtctattagtcttgaggatataaggcacgaactacaacattgcccactaaactaattgagggcattaatatatctcattcacttgctcacccactcacataagattaagagttagagatatatagacacactcatagtatttatcttaccntatggagaccctttagtagtagaattaagatatattcttcttttcttttaagagaacaaatatccttcattgaagatattttatttcattaaattaaaataaattcacattggttcatgtatgtgttgttggtaatccataaatggatatataaaac

SEQ ID NO: 188630 - DNA, 460 bp, Glycine max
  unsure (1)..(460): unsure at all n locations
agcttccttggaaatgttattgttttgaaggctatgcttanaggctntgagatggcctctggtctgaanatcaactatgctaagagtcaattcggaatttttggagattatgttactggtctcaagaagctgctcactttctgaactgtaggcagatgaggattcccttccactacttgggcatccccattagggtcagatcctcaaatcaggtggtatgggagcctttgatcagcaaatttgaagctaaactcactatatggaaccagaaaagcttatctatggctggcagggttaatctgataaattctgttttgaacgctttaccaatctatctattatccttctttaagttaccccaaagaatagttgatagactggtttctctgcaaaggaattntatgtggggtggggggcatgatcaaaagaagattccttgggtcaaatgggatgaaatttg

SEQ ID NO: 188631 - DNA, 392 bp, Glycine max
  unsure (1)..(392): unsure at all n locations
ctatgaaactaagctngaagatgaatttattaacttgagtgtcaaaatatctttaaaagtactccaccaccaacagaggaaggacacgcacacacgaggagggaaacctatgccaattgcaatcacaatattttcattattatattccttaaataaaaaatgaaatagaaaatatagatgtttttaaaaattttaaaaattgaaaataaaaattagttttaaaaagtgaaaataaaaaacattttttagaagagtcttaagtttttagctcgagcaacttatttagctaaaaataccttaaccccttttttaaggtcaccttaacccctttttaggggtcgtctctattctctaacgtctttcacttgtttttttattattaatttgtgaat

SEQ ID NO: 188632 - DNA, 452 bp, Glycine max
  unsure (1)..(452): unsure at all n locations
agcttgtgtcgctccacccatatcgtgcctgcaatttcttcatatcaaatactgctgacaaccttgtgaaacctgtgcacccaggatacaaaggcatcttggaatcattgtctccctcgccataaaaaggggcatgtgctctactaaatccgtcttggcctagaacgcgaatcatatcttctatacgatttcccatctctacatccacagtctgagagtcaccaactggtggtggcttgtctggaaattccccatgccatatccatttagtgtaagttataatgatcccgcgacaaataagatgtgatcttatctcacttattggctggtgatctccattttcacatttgacacaaggacataaatanttttcccgcacagatgaaacattgagttcaaaaaatcgaagaattgtcaactttattctatactcctcactgtgcgtaatgttg

SEQ ID NO: 188633 - DNA, 373 bp, Glycine max
gacctataaaactacgcttaaggctagtcttatgtgctcctctattcattttaacctaccttcggagccatagtccgaaattgagcacccgcgaagagagaggcaatactaataacctatagcccactatctaagtagcacttaaatgctattccaccattctccaacactttgggaagagagttgtcatatttcaagaacccctttatacctagcatcatggaggtgacttttccttccaactggaagaactttactattaagaggtacaataacaccatagaaccaaacaagcacctggatgtgtatattacccaggtaagcatgtacaccaccgatgaagcaatcctctgctaagtaatctcgacatcac

SEQ ID NO: 188634 - DNA, 449 bp, Glycine max
  unsure (1)..(449): unsure at all n locations
tgcaagcttcaccatgatacttaaagaagggcacatttctcatatactaaccaaacacttgattaagcttttgtacgataagctcaagtcaacttcaaagaatctttccagatgcccaactcaatctctaaatgttcagattttttcttctagtgcagtgcatattatgataagcacttcaattctcttgactagcatgttgtttataaataattggatgtgataagaaacaaggcttcattatcaatagaaaaaatatgaacaccattaatattatttatttattaactattaatcagataagataatttagacttcaaaatttaacagtctgcacaaaatttaagaatagtttgcttaattctctgatgaaaancacacccagacttttttcctataaagcaagaacgtggattaatgatacgccacggtgagatgggaacgaacta

SEQ ID NO: 188635 - DNA, 361 bp, Glycine max
  unsure (1)..(361): unsure at all n locations
ctgaaggcattcattcgtctctctgaccctntaacatattttatgctgtctctaaatcatacaaagcattcttagcaaacttcaaaccttcctgaataataaggttaaagtacgcaaaactcggaatgaaaatatttcccaccacataacaaaccattattgctatttaaaagtctatctttcaacagccttgagtgtgtttcatttgaggatgcattatccaaagttaaggaaaaaaattttgctcaatctcccaatcttccaaaaattcatatatggccttagccatttcagccccaaagtgtggaggagggagatgacaaaaattaagaattttgctttgaagcttccaattttcatc

SEQ ID NO: 188636 - DNA, 467 bp, Glycine max
  unsure (1)..(467): unsure at all n locations
gcagcttatttgtannggttcatctganatggctggcataatactcttgttggggatttctaataaacagttgatgtaattatttttatatctaattgattttgtttcttgtgttcaatgcttctcaccgcttaaattttgtatgctcttggtctaatcaaccatttgtatgctcttgggaaatgtattgttgccttanaacttcaatgaagcagaattaaaacttagtcttacaagagggatctgcggattaagttttggttntaagtatgctgttacaataatgtttgttggtctaagtctagtccaacaagagggatctgagaacaaagcttatgctaaattatgctaaactctcataagctatttaagctaagtctagtccaacaaaagggatctgaggacgaagcttagtttaagttagtctaaacctangagggttgtctaaatcgaacctagtccaacaa

SEQ ID NO: 188637 - DNA, 374 bp, Glycine max
  unsure (1)..(374): unsure at all n locations
cccatcacatggtggactaggtggcggtcgagcaatggtgcaagacaattctccacatccacaaatcacgtataaacccaccatcccctgttgcccacctccaattgagctcangactcccacgtagccttatcctcgttcctctcaacgccgggtccccatcaatcctctcaagctcccacaacatccaagaaattcaacatcccatcatcacaaactaacaaaaccaagcaaaacagggcaaaggcagaaaactctgcccagaacacaaaccaaaaatcacagcttttcacatacaaatactccagtaacattttcttcgttccaattcgttaaccgttggatcgactcgaaaattttactggaagtctcta

SEQ ID NO: 188638 - DNA, 481 bp, Glycine max
  unsure (1)..(481): unsure at all n locations
tgcacgccatgcaagctggntngaggtacttacctcgtgaagactgtatataacgattttctaacgatgaatcttgaagaacgaacgagaatcttcgcgtaattactcacggaaacattacggaagcgcctcggnttgattctcttcacggacataattttcctcaacaatttcgagagagagagaagtgcctaagaggctgacccttttctacttcacttctgcccctatttatagaaaattgggggagaagcttgccactcagctcgcccaagcgagctcagctcgcccaggcgagcaaggttgcttcctccagaagcaacagcctcttggaggaatcttctggagggcccaagtgggcctggatgctatctgtacccacatttttactaaatacacccccctacactttttggtgattctcttntcgtaaagttacagaaacttacgagatttgtaacgatacttggtttctttccgt

SEQ ID NO: 188639 - DNA, 409 bp, Glycine max
  unsure (1)..(409): unsure at all n locations
ttacgtttactatcaaactaagctgtgcanataagtcactcccgcattttatctctagcatgcattgtatgttggtctcgtcctttggcacgggaagccggaaggtccatatcaccttcttaattgtacacatggggactggccccaaatgccaagtaaagagataatttccgagctctcgtgtccgtaaaatgcattcatatcatgcatcgcataagcatctcttcataacatcataatggacatatcctgcatttgtccgttatcatattccggcctcacattttgcatgagtcatggcatcatcatgcatatgcgttcaacaaactttttgatctgcaaaattgcataccatttgttttcatgtttgctcatccttgcgttttcctctacaaaacaaaaacaaaaa

SEQ ID NO: 188640 - DNA, 372 bp, Glycine max
  unsure (1)..(372): unsure at all n locations
ctgcactatcattgggagtaaatttttgttttttctagatgaatatgcatgctacattaaaactggactcttattaagattanttaacgcgagaaaccggaggatgttgtattttttaagggatataaactcggctgtaagattgattctactaaatccatttcttaaattttacttttcaaaaaaaataaacattttattatataccaattggtcttctgttgacaacagtagagcaattctatgcatgtactaaatattctacaacgcatatattttgtcagtgtcacgtgtaccatataatagataaaatgattgttatctttcctctggagatggacacaaaaagagaccttactatcacatttagtt

SEQ ID NO: 188641 - DNA, 299 bp, Glycine max
tagaaggggaacaatcatacaatcaataaaacttacaataagattgatacgatgtaaaactttgttttcacaaaactgccaaggaataaacccatttaaacaatgcaatggaatcaaatatggtatgtcatactggcatatataacatgtaagaaaagttttaggtcaaaatacttaccgattgctacctttatcgggtttcccaagctggtgcaatacctcaatttttattatggctgcctctcgatacttctttatcccaccgacaaattttatggcaaccaatttcttcctttctt

SEQ ID NO: 188642 - DNA, 440 bp, Glycine max
  unsure (1)..(440): unsure at all n locations
agcttctagagaaagctacatgaaactgcctcggtttaacgctgtcctttctttgttaaccggtggatcttctcgaaatttggtctgaaacttcaaaagacacttgtccacgatatgaccgntcgcgatcttctacgagatatctggcgtattctataagcttccgttcccaagagcattccttatttaagcacttcagcctttgctttggcgtagcttacgaaaaatgccattacttcttctttccttcttccaaagccatttctaatgtcccaagcactttcttcattacccacagccaccattagccactcgataacgttgttgtttttcgttgaaactccacaatgagaggaacccgtcgagtggagcggaatcttccaacttggctcgtggttgcggtagagaatgaaccctaatctgacctctcattttttttc

SEQ ID NO: 188643 - DNA, 410 bp, Glycine max
  unsure (1)..(410): unsure at all n locations
ctcaagcttcaacttacagngagtgattcaggcttagcgccactacctgcactaatttctcttccaatgacttcaaaacagaatgatgttggcgcttatcgcatccttttccgctaagctcaacttgaaagctcaatttacaaatgaatatggcgttagcgcagcgaatggcgcgccttatgcgcagctatatataaattttcacagagaggaagtggtgcttagcgcatcatccacgctaaccccactgcttaaggtgcaacttacagtgaagatgttaggcttagtgcagcgatgtgcacttagctgaaccattcaaccaatcaatcaagagtctttgcgcttagcgcgagcaagctcggcttaacgcatcaagagatggcacttagcgcaaggtgcgcttatcggat

SEQ ID NO: 188644 - DNA, 389 bp, Glycine max
  unsure (1)..(389): unsure at all n locations
ttagcatacttgaccattgtcgcagtatgcntcttctttctcttcaacantgtcgtccacacctgcttgccaaatcatttctctctttcaacaagtctttacaacgttcaaatacctcatcaccatccagccttatgcgtaacagcataggcagaacatcttgaacctgtagacataactggtggttactccagacgactcggnctctncatacagtccaagcagtggccctacatttggcaacctcgggctctaaagatgcaactttgtttagagacttctggtttctttgtccattctcctccaaagtttacatactcctctgaagaaagaccttcacagcatcaggtgaatattgctccccaactgatctaatgagggtttgatta

SEQ ID NO: 188645 - DNA, 400 bp, Glycine max
  unsure (1)..(400): unsure at all n locations
ctcaagctttacttatgtggcaaggcgggcttccttcatcttcttgtctccaacgtgaactttgaccactggtcttccttcctgcgatgcttcttttcatgtccgcctgagtgggcttatagcctaaaaatacnttcaccgatttccttggggtagtttatcaaggcctagttattgccgcccgttgttttttgcctaaacaccatcccgggttgcatataccgttccccaacataactcgggccattcattaccgccgcatcggacagacaaagttgcccaaagagggagtccacggaggaaatgctgaccacctcaaaagactggaaagcggtttctaacgattcttttgcggctttcacataaggcatggaggatgggcagcttacccagatatctt

SEQ ID NO: 188646 - DNA, 454 bp, Glycine max
  unsure (1)..(454): unsure at all n locations
agcttgcagatgctctagggagaatggctgataattttgttcagcaaggagggaccgaatagaatagtgttcataacaanttggagtcaacaatagtgattcccataatttatttccgatagctcttagaagatgaacatcatactagttacccttntttttttaatcttctgtctgcattttgccacttttttgtggtttactactgcactaaggcattttatacacaaatttggaggttactgcattttatttatcttcttctttcagtgaggttatatgaatctttcctccgtcaataatagcgggtgtacagataaagttactattactaattaaggtacatttttattagaggtatctctttgcgggctcatgcaatattttgcttctcttgtattagtcatctttccacaaatatataatgtttcttgttgagtttaccttactatta

SEQ ID NO: 188647 - DNA, 382 bp, Glycine max
  unsure (1)..(382): unsure at all n locations
ctaagctgggtctctnttattgggcccaacactcatttcttggttctcttgtatcacttgggccaactggcctatagtgataagacatatttgttatgttcgtaacacccagtttctattanaatgctgtacttggatgctagaaggaattggagtgaaaaaatcttactgaaagcagcaatggcattgcttttgatgatcttttggtagtttctatgtcaaaattcttttttatttctttttctttctttccttaccatttgtatccttttataatatatttttttcactccatttaacatttgttacataaaagacatggcagtaccaatatattacattatcagatgtttgatagtggattatcaacttaagaaagaac

SEQ ID NO: 188648 - DNA, 296 bp, Glycine max
acctatttatttttcgtgttggggccttcctttgtacgatctcctatttgttgataatgtcatgattatttgtaaagcatatggtgatcaagcttaagatgttgtaacgatacttgataagttcaatgaggtgtctagattaaaagactatttggacaagtccaacttcatttgctcgataggggttctatccgttggttaacgatgagattgaagaatttatggaatgagatgcacccctattctgtgaaatatttgggggtaacataatttctaatagagcgacatctgtggat

SEQ ID NO: 188649 - DNA, 379 bp, Glycine max
  unsure (1)..(379): unsure at all n locations
tactcaagcttaacacatttaagggttggcagcatactgagtttcctctcagctttctgccacccactgccnattcgctcgtttgtgccacttctcgcgcaactatgggtatgctaaatgtttttctgaaaaaactctaattcattctttgcccaatacatttcccaatcacaaaatgccttcttgcattttgccctaaccctctggttatcattcttttttcacttgaactccctgcccatcaatatgctatactccctcaaggcacattttaattcatctataggaccaaacttcatccctaattccaacttctgttcaccaactccactacttcgactatattgaggattaacttcaacatcctcatcttcatcat

SEQ ID NO: 188650 - DNA, 365 bp, Glycine max
atcataatgcattctccgattttgagaaaatggcattcatcatggcagatgccagcttatgctatacgaacgtggcactggacctcaaaaacataggcgcgatatatatggacttctgaccgagtgttcaaagaacagatcagacgaaaaattgaagtgtatgtggacgacatggttgtgaagtttaaaagcataccctaacatctggtggacctggaagaagtatttgggaactatgcaaatacgacatgtgcctgaaccctgaaatatacttttggggtaggtggcgacaagttactctgcttcgtgactccacatcgggggattgaagcaaaccccaacaaatgcactgtcatatggagata

SEQ ID NO: 188651 - DNA, 380 bp, Glycine max
  unsure (1)..(380): unsure at all n locations
aatcaacctttataaaggatagacatattcttcatggaattctttgcannngatctccatgtggggggggggagcatgatgaaaagaagatcccttgggttaaatgggatgaaatatgtcttcacaaccaggaagggaatcaagaatctttctaagatttatgccgttctcacgggaagatggattncggatttatactataaacagaattatgtcttggtcagggttctaaattcaagtatggatgatggccaggcttgaagaatggaaaagttcattgtggggattgtaattggggagggacctcangaaaatatttcagcacattgtattctagattattcatcataacatggcttggaatgcaagttgtggtgata

SEQ ID NO: 188652 - DNA, 343 bp, Glycine max
accttaacagctacctgacctactcatgccgaatgtcctaggaagtcctaacgacaaaaacatgtctaccatcaagtcctcaggacacatcgcaattttgaccaaaaccagaaaagtccttagcttaaccacgagttccagaaatagacctagcatggtcacggtcttcagttcaatagaacaacataggtagacaaaacgtacctatcacggtcttcagtgcaatggagaacaacaagctttgatgttaacagtgcaatggagaaaagagcgcgaaagggtacacagagaataagagagcgcgagagggtaaacggagaagaaaggagcgcgaacgaaatat

SEQ ID NO: 188653 - DNA, 435 bp, Glycine max
  unsure (1)..(435): unsure at all n locations
tgcagctttgttgggatagctaaagctttttgtaatatgtcttctttgggtaataatgctactggtaagtactccctaaaagaataacgaatntatttgcgtcctagcatttgccatgtgagtagccaattaagtctggcatgagatggatatctatagattattgtgcttatgacatctcttaatatcttcgcagtattttagaatgtcttagcttatcctcaacatatcttaaaagatcattataatttactggagtgaatttgtgatctaactgagaaaacaatcttatgagttgcttcctaatttcttatgtcattatgggtagtagtcttattggatgagtgaggaaataatcttggtgttgttggtgatgatgatgtggtttgagtgataccattctgttacctacctatgagtctgcttggaaacaaa

SEQ ID NO: 188654 - DNA, 391 bp, Glycine max
  unsure (1)..(391): unsure at all n locations
gacctataaaactcaagcttggtacattntgatagtctntactagaatcttgaattagcaaatcaaaaccatttcctttcaggccctgatcaattcttgcaaatgcaccatttgtaagctntgcttcttttgtgcttgaattcttccatttttccttgagcattcttgaacggcatgcacaatctcgtgacgagaagtataggctacgcaaatcaaaagaactctctggttgttgtgagcagtaactctcattgctttttccacagaagccctgacaggctcagtcaatagttgcaagtctccaatgaaatgtaatcgaacaccgtattcattgataagactttcttgttgaagtaactcttcaatcttttcccgcatcaattccatcaag

SEQ ID NO: 188655 - DNA, 413 bp, Glycine max
  unsure (1)..(413): unsure at all n locations
aacaatgttaactgtagcattcaactcctcgttgagccaagaattctgtctctcaacaatctncttctnnnnaactccacattatccggttaccgngaaangnnnattcnngttttcactccagataaagcaagataaagtctagtccacaataagagcaataaatgttcagacacattttgccatttcagaaaacagcaaatcataccagcccacttgaaaatgtccaagccatttacgttatataatatataatatgccccaactatgatccattcataaatgagtcatataaaacagtcactcactgaaggaatccagnaccactagnaatntgcttaggcataaaaacaaaaaggaaaattgaaggacagaagttacataaaagctaaccataaatataagacctgttc

SEQ ID NO: 188656 - DNA, 367 bp, Glycine max
actaagctcaataaaaaaaaatagtcttatcaaattggcctgatctcatgagattcattagcttgggtgggggacgggtatcttaggaaaacagtcttgatttgacttaagaaaaagttggtcaacttccatactttgacgttcagcaattgcctagttcatcaaaggaaaatcgcaattagattcaagagaaagaataattaatgatggcagtcttctttattatcctatccacaagtcaatccctcctttttgctttttgtggtgagatacggtgttcaattgattcggtacatgtttgggttaaatttaaaaaacttattctagggtactttgcgttttgttaagtgaatttgtaaaacaaaat

SEQ ID NO: 188657 - DNA, 241 bp, Glycine max
ttccctatacgatttgcccacggaacccgttttacatatttcagcatgtgaccaacccggtatatggctcttctgggtctaaagagaaactttatttcactttcatgattaactgcattgagagagggcgtggatggcattgatagtggcggcgccggatccgaacctttggccgagggggtcggggacggcgagggtgaaggtggaggcccagatccgacccatgcgcttggcccgcttc

SEQ ID NO: 188658 - DNA, 245 bp, Glycine max
taagttcaatcaagtgctttacaatgggaaccataaagagtatagagttggttgggcggaaaagaagaaaagaagaaaattactgctcaattttccgctaaccattaactactaataaaattaatattaccgataagttggggaaacaacaaggtatcaagttggggaacaaggaggtataaggtgcggaaactttcactgctggaaacaatcaaaatgcaaaatttatatatatattgaagtat

SEQ ID NO: 188659 - DNA, 481 bp, Glycine max
  unsure (1)..(481): unsure at all n locations
acctgcngcatgcaagctcgtagttaaaaggagaagatagtcaaggtttatctttttatcttctgcataactttgattgccaactcaactttcctttcctgtgaccatctacgaggagctttgntctttggttcattntccctggacagtgatgtttccagaactctgtgtagaagcaaagcttcatggtgaatcaaaggtgattcaaagatgttttgatgataacaaaagatgatgacaaaggtgatgacaaaaagctcaaagatcaatcaaagaatgagtcaagatattcaagatagaatcaagaatacttcaagattcaagaggaaagttgatttcaagaatcaagaatcaagattcaagagatcaagatttctagaatcaagattcaagactcaagattcaagaatcaagagaaggcttaatcaagataagtatgaaaagggttttctcaaaaaattgagtagcacatggtattttc

SEQ ID NO: 188660 - DNA, 372 bp, Glycine max
  unsure (1)..(372): unsure at all n locations
tcatgcacagatgctgttactgaggagaagcannttatttgttatctctttatataacgatcatgcagggattcctgttatgggtcaacatttggtatgtaggcttctattgttgctggtatggtngttgatggaacaaaggatggatgggttgaaacttgaaagttaagcttcttgacagtagggattccagtgatattttgtgactgctccaagaaagtggctattgaaactgatctataaatgtattttaatgccaatgctcttgtggcgtaatggcaatggtgttgtatttgaatcctgtatattaaagattttctggtgaaaaaatgggaaaatattttggttatagcctactcagtgccatttttt

SEQ ID NO: 188661 - DNA, 441 bp, Glycine max
  unsure (1)..(441): unsure at all n locations
catgcaagccttttattcaaggctcatctntggggagaatctccttcttctatggcttattccctaggggatggagtctcctctcacctcttctcctttgacttccgctgcatctccatggtggaaaataccattcaaggacctcattgaagctcaaagatccagtctccatagaagtttcacaagcaagcttccatcaagtggtaatcagagcacaaaagcttcaagtaggtgctccttaaacctccattaatntatttttctttaccttctcttccattgttgattcttcatttttctccatgtatctcctcacatgtcttgttctaaatgttgttaacatgattctttatagattccaccgattaaacttgctatagaagctagatttgattntcgatgcttcaaatatctcgttcttgntcttgaaccatgaattgt

SEQ ID NO: 188662 - DNA, 372 bp, Glycine max
tccatcattaacactaccatgtacatggtattgccatttataatgtaagtgacaattacctggaccccccatataaggtgacctaggacttgtgaaatatgaatggcaatcgctaaagccgtgggaaggacaaagcccccgagtggagaaggaagaaggcccaagtggagaaggatgaaggctcaaaggcagagacactatcaagactattaattgttgttgaaggcccaaactaatttgaaggcccaagttaaatatgttttttagttataattattatttattgtaattttggcccaaactgtttagaagactcatctctatttttatctttttgttcagatacactataagtattggttgttgttttca

SEQ ID NO: 188663 - DNA, 277 bp, Glycine max
caccaatcacatctatggacttattaactgtctttaggattctttattgagcgtctatcaatcgaactattccatacttcatcattaaaattaccccactcctagctgctagcctttcctttcatacattaataactgatagaataacatagacagaatacttcatcttaattatcttatttttccctatcttgcttatcaaagaaacactgaacagtgatttggtttgatctacttatttctatacttctaattataaaactatctattttcattc

SEQ ID NO: 188664 - DNA, 375 bp, Glycine max
  unsure (1)..(375): unsure at all n locations
ntcatgttgtgacctcagaagataatgataagagaccctgtttcccattagcttcttaaatagatgatctccaaagattgaactactctcgaccagagaaaatcaaatcaatatacttgcgcctggaaagcagctcttctgacttgaatgaagtaagtggacctgaatgttctcaagctcaaaagaatttactgattgatggtcttgatttccacccatgcaccccccctcatttcattgtctttatgggcaacaaactttgcttgtagataatatacttcaatattctttgatataatttattgatgacatgtaaaagtattcttaattgaatggcaatgatcactcactgggatcagcatgactccgcatcta

SEQ ID NO: 188665 - DNA, 366 bp, Glycine max
  unsure (1)..(366): unsure at all n locations
ttattgtcgaccacagagtggtacctggagagtatgtccggtggtcaagagaccttgggacaacagtgggcgctattgcccaaaaccaagcttgaccaattccgacccaacccgggcatagtcggtcagtgagaacctgtgatgtacctaagcaggcgagctcctggcagtctacagataaaaggaacanagaccactaagcacggaggcttgtggtggctggccagctgtgaaacttgattgatatgtgagatatggtctctggtaatcgattaccaagggtgggtaatcgattacaaggcttataaatgaagacaggaggctaatatggtctctggtaatcgattaccaatgggtgtaatcgat

SEQ ID NO: 188666 - DNA, 380 bp, Glycine max
  unsure (1)..(380): unsure at all n locations
tgttgtgcaccatcgcccgaccgccacctagtaccatatttgatgggtaccccataattctacaagcttgagatgaagaagtgttgaagggtgaaacttcctgcttttattgttgaccaanaggtattgagcatgtccgggggtcagaaaccttggggaccttaggtggggtgctattgcccaaaaccaagcttgaccaatcccgacccaacccgggcatagtcggtcagtgagaacctgtgatgtacctaagcaagcgagctcctggcagtcaacagataaaaggaaaacaagaccacaaagcaaggaggcttgtggtggctggccacctgtgaattttgtgtaatatgtggatgggggcctctggtaatcgattacaa

SEQ ID NO: 188667 - DNA, 255 bp, Glycine max
acatgaacttattttatactggaatagattgtgatggagtttgtatttgtgttctaagattatgtacggtaacttattaatgtgtgctttttactattagagagtgaaggatattgtatggcagagctggttacatatgatttgtgaattgattcatttgtgaaaatttgaggagatttgtatatatgatggactttttttttttttaattgtgtggtacgcttttttataaaacatatttttgtttatatgttt

SEQ ID NO: 188668 - DNA, 328 bp, Glycine max
  unsure (1)..(328): unsure at all n locations
agctngcaatctagcattatccattacttgactcgccggcaagacgagcctatgtcccctctcttcaacaaaagcatacagggtgttgtgccaaaggtgctgaacgagataaggctcttcaagaattatgcccatcatgttgctattagtgatagttgtggtgagatgctgagggatgtgtaccaaattcctaacagaagagtccatgtaatactaaatggtgttgatgaggatgactttggagaagatgttgaattgtgaagggaattcataaccaaaattggcattccaaggaatgcaagtttggtactccgtgtagcttggaaat

SEQ ID NO: 188669 - DNA, 378 bp, Glycine max
ggctaggtgacacgtactatctttcccttgtctccatttatgttatcatatcattgattgtattgatcagctaatgatgttaatgataatgaaatgataaaaatatttccataaaaactggattctaatattctatcaatatattgtatgtttcaaacccgcaaagtacatttacttttttttttaatattgtttacgaagtattgagagtttgatacataaagttcaccaaaacaaatagtttaatacataacctctcgccccaatatctatctttttaaaacagtactgcaaagaaaggtcgataaagtgaaagaaaagagaaaatgaataaaaaatatatattaagcttaaattaacatgttattttttttctaa

SEQ ID NO: 188670 - DNA, 252 bp, Glycine max
  unsure (1)..(252): unsure at all n locations
cttgttctaaagtgcagaataggattttnggatatgttgactgcaccgtattgccacaacggataggaatatgatcaagcatctaaccataatcagagagttgttgtctcatccataatatgtgtgcacaacaactttcagcagaaatattatacgcttctatagttgataaggcacactattttctttttgatattcaagatactatgttgaaccaataagtggaaagttcactaatctttattctttgac

SEQ ID NO: 188671 - DNA, 379 bp, Glycine max
gacctataaaactcaactcgtaattgctccccttgattaagactatatcatccgctaatagcatgcaatacgggataatcttttggatgtccttgataagtacatccagatagggaaacaagtatgattaagttagcttgatgaatccaatacaattggaaagtccttatttcacctcaaggagttctcacattagtagccaccccatcatacatgtcttgtatagcttggatataagccatgtgtacgtcttttttctccaaagacttccacaacgtatctcttgggacacgatcataagctttttccaagtcaagagaaaccatgcgttaggatataagtagaagggaaaatcaattagcatagttagactattaat

SEQ ID NO: 188672 - DNA, 443 bp, Glycine max
  unsure (1)..(443): unsure at all n locations
agncttgatggtgcgcagctcatcatcntttcatagtggagtaccgataatgtgtctaccatcacgattatcgtctccctttccattattggggaccacctgaccgccagatccctccaccatttgggcgtgttctttgaaagatccgtccccctttntgcacatgttctgtagttgcatcctattcagaaccatatcaaaattgttctgatactgcctaacacaggcaaccattaggtccttccaagaatggactctggaaggttccaagttagtgtaccaagtaacagctaccccagtaagactttcttggaatgaatgtatcagcaattccccatcttatgcgtattcccacatcttctgacaatacatctttatatggttcttgagacaagtagttccgcttgtacttgttacagttcagcaccttgaacttgggaggg

SEQ ID NO: 188673 - DNA, 373 bp, Glycine max
  unsure (1)..(373): unsure at all n locations
ntcaacaagttccttcacaaataattatcatgaagcatattactgcaagactacccatcatatctcccaaaaccccacacccacgaaatttaagagagaaagaagttcacccaaactgaaatntgacgtcccactcgtagacacgcacttcacgactccggaaatgccctccttttgcgatttggggcagaaatgatggccaaaggttgaagctttgtttggagcttcaatggagaatgaagaagaagaaaatggcaacgtgagggagagagagagctgtctgtaaagtgtgggggctgagtgaacagagagaaaagcttttttttttttggtttaaataaaggggtttcttttttctattatttattataaa

SEQ ID NO: 188674 - DNA, 120 bp, Glycine max
taatttaatttataattgtttattatatttaaaaattgattaatgattatttttagatttattattaaaattaatatatatatttatattttattatattttaataagatatattattat

SEQ ID NO: 188675 - DNA, 477 bp, Glycine max
  unsure (1)..(477): unsure at all n locations
catgcaagcctctatgatgatatccctatataccaacaattataagaaatgttgttccattttgcgagagataatgaaaggaattatctaaattttctcttgagaatgaataaaaaatacaccgtgcnntccgcgctggctgtcagaaaatcaatttctaatgttagacacatctcaatttaatcattctctctaaacatattgaacaacattttatgtcaaaacacaatgatcacaacaatcgaagaattgtgacagagatttacctcaatgacagtgactgagagtgaatggaaagacacacagnctcaattttaattacctgaattagataacatcgattagttaaataatcgatgttaatatcaagtccttaacaatcttaatatcggttatctaaataaactaactcaacttatttacaaaaatgttatcatattcttcttaacatcgattctgtacaaaatcgatattaat

SEQ ID NO: 188676 - DNA, 340 bp, Glycine max
  unsure (1)..(340): unsure at all n locations
tgtttttgaccacacataacataatttatttgagggcttnttcttcagaaaataattctaaaagacgaggaaatgtatatttnnacatattattttatacctctagtttataggctttttatatagatcttaagtgtaacagaaaattaaaaactaccaataccctaattactcttaaaaacaatttgataataagcgatataatattaatatgcctatcttcatttgaacaacatctaaaaaaaatgaaatacgattaacaaattaatttctaaaaactaaaatattcattttcaaactgcacgcagaaatttaggcatatatctttaacggtatattt

SEQ ID NO: 188677 - DNA, 442 bp, Glycine max
  unsure (1)..(442): unsure at all n locations
tcatatcggnttaattttattactgttattctcataatctattacactgttgtttgagatgatgactgacttattcatgagtctttgctttaatcaattacttcttccacttagttgttcagaggtgaacaagaacactttaatcgattacctagagcctctaatcaattaaattgttcttgagttatttccaggtgttgggaataacactttaatcgattacttagataatctaattcattatttcatcgaattaatcgattacagtatagatttaatcaattataggcacgtataattttttctctataaataaccagcttgtgttcacatctacagatcaagagatcaatagaggatactcgacacatctcataaataacatcttatcctcagaatgatcaagatttcatgttgtcattagtgaataagagaagagaag

SEQ ID NO: 188678 - DNA, 335 bp, Glycine max
ctagaattatttgagaatttttcattttgaaaacaacgaacaataactgtaactaattgtatgattgcaaaattaaacaaacagaattaacatttatcttcgtggctgatctcatttaaatccagcgctggagtaactggtgcatcctgaaaaaagggttggaggggatggctttggcatgggatattgtgaagatacctcttcttgagccatagatgtatctgcagcaattaaagaaggctaaagaagagtgagctcatcctctgctataactggcttctctgttgcctgctcaggctcttgggttacggagataccaccccctccagaaggag

SEQ ID NO: 188679 - DNA, 450 bp, Glycine max
  unsure (1)..(450): unsure at all n locations
catgcaagcttatcctaantcactctaagcttatgtacttctgattccagatatccttcttgggtaatggaggtttggatgtctgtgaacaatttatggatatcagtgatgtaataagagatgaagatntatgcgcatccaaatcagactcacatctgaatgggatagatcgtagactttntacatcttgttcttcacataacatccagaaaatggtttcaaacatggttcctagtgtcaaatctaagtggccaagtgcaagagaattgaatcttttaaagcgtaaagcaaaaataaactctaaggaccaaacaaaaagctggtgtgaagatggaagtacagaggtatcaggtggtcaaaatttgacttcgaaaggcacatgtcccgattcaatatattatagtaagggaacattctattttgcttgtttgtaaatggtacatttttcac

SEQ ID NO: 188680 - DNA, 403 bp, Glycine max
  unsure (1)..(403): unsure at all n locations
ctaagctttatacacattaaatcaaagattcatatctaagagaatgaaataatcttttttgactctagnggaattgcatgaggataatacttctttgtgtgaatctcttaatcttatatgtgggcacacagttttacctaaaatgaacccagagacactgcagggaccactgaattgaagaggtttcaacatgaatgttttcccgggaggcaccttgagggttgcagcaccatttttcattgcacaaaccatactccaagcttttagaaaagccttgtattatagtaacaagcaaaatttgatgatggatacgataaactagtgcactttgccaaaaaagtaattattcaattttaaacaaaaaagtctaacaaaatgatttacttgagaatcatctgtgagg

SEQ ID NO: 188681 - DNA, 424 bp, Glycine max
atcttaagtcactcagctgcactgctataagtcgaagaagtctcaagaactattcgctccgagttgacatcccgcttatgacactgtcaccacatcctctccacgccatcaacggatggtcgtttctccaggagcgacgcgttcagctcatggacgacgagtatactaatttccaagaggaaatatggcgccggcggtgggcatcactggttactcccatggccaagtttgatccacaaataatccttgagttttatgccaatgcttggccaacagaggagggcgtgcgtgacatgagatcctgtgtaaggggtcagtggatcccgtttgatgccgacgctatcggccaactcctatgatattcgttggtgttggaagagggccacgaatgtgagtattggcagaggaggaacccgtctgatgg

SEQ ID NO: 188682 - DNA, 391 bp, Glycine max
  unsure (1)..(391): unsure at all n locations
tccatcacctcacccnctcccaaaggagaaggctggacttctggtcatgccacctgactaaggaactcctcaatgctcagcattggctactgctggcctgagctctgcaagctctgcctgattatatctggccttctgcaagtgtgtagcnagacaaataaagtctcggagctgaatgtggagggtccgaaagaaactggggctgaagctggagctggtaaagatgaagctggcgtagatggagctgcattataagtagaaagagctgaggtagggaaagtagaagatggtggagcctcagacctcttgcccttagccttacggggccctcgaaaaatgaccgaggagtcatcgaggttccagcaagttttcttcacataagccaaattaa

SEQ ID NO: 188683 - DNA, 340 bp, Glycine max
  unsure (1)..(340): unsure at all n locations
tctcgttaatcattgtaaaacaagactaatnnaagcaccacgctataatcacggtgtaaacaaaataagaagaataattataaaatattcaatatatcttgagaaatataataatattataatcaagaaagattaatcgaacgttcttctttgaaagattccttgaatgaattgactaataaccaaagtgaaactaaagctatatataacttacaaatcaagctttgttcgcaaaaattactatagaccattttaaggtccaatgcctttaacgatcgtctttgcttttatcggtaacaaggaccattcaaagcataaaatcaacatgtgactttaccgc

SEQ ID NO: 188684 - DNA, 323 bp, Glycine max
cacaaagaaaaaatgtgatgtaatcagcgagagagctcctcaccttaaactccaatactcacaaacttactcagctctcagacgaatcgtctaactcattcttgcaggtcttgcacaacaaaatttttgaaaactctctggatttggacccttctctctttagaatctctcacatggagaaactcttcgagaaaatggccaatatccctctccatttctgatttcaggcttaaataagtggccttgttggtgcttgcgcgcttagcgcaactttggctcgcttatcgcacattatagaattttggctcaaacgcttcgcttct

SEQ ID NO: 188685 - DNA, 459 bp, Glycine max
  unsure (1)..(459): unsure at all n locations
agcttatcgaattcatcaaaactcttcagtntcttgtcacctatttcacttcacaactattgacatatgcactaaacttaatacgtcaaaaataataatgaaatctaccggganttcaacaccgggaacaaccattacttaaatgctacacctactacaagagcaccctgcaacacgcgaaaacctatcttctcctgaaaaatctatttcactttctttacataaaaattcaagttcatgccatcaccaaaatgaccaccgcatcttcaacaacattaagtcaagtaagtcattccttatcttctcttttccacaaaactacattttctccttttcttcaacctcaacacttcaaacactaaaattacaatggttgtgacactgcagatgaaatatctgatcataggaccactattgatcatgcaatntaacgctgctnttcacaacgacaaagtcatg

SEQ ID NO: 188686 - DNA, 367 bp, Glycine max
  unsure (1)..(367): unsure at all n locations
nntcattctgcagagctatntgcacaagttcctcatccttctcatcagtttcacttacgtctttcaacctttgtggcaccaatttcttctatagacacaangagggatcattattgccagtctttttgtttgtgctcccttgcaataatctcttcttcttcctcctcctctctcagagattgnttctttcttcttctttttctcttgctcaagcataatcttctgtattttcttggcaatgccaaagctgttgtgacctctgtcttcgaaggtgatagccttggcaagcctcttctgcttcatcgtatttatggcgtctaagtccacttgaggagcttcctttaagttttgttctaaagcaacattc

SEQ ID NO: 188687 - DNA, 475 bp, Glycine max
  unsure (1)..(475): unsure at all n locations
agtcacctgaggcatgcaagcttcttacctcactaatagttttggnggttgtgccattcttgaatggctctcaccttttcttgatcaacctgtactccctgtgagataacaacaaaaccaaggaaaactacccgtccacatagaacacacatttatccatgttagtatacaagctgtcacgcctaagggcctctaaaactctcctcaaatgcacaagatgttcatcatggaatttgatgtaaatcaagatatcatcaaaataaaccacanaaaattttcctaaaaattcccttaacacatggttcattaatctcatgaaagtgctaggagcattggtcagcccaaagggcataaccagccattcatatagcccatatntagttntgaaagttgttttccattcatccccctctttaatcctatattgatgatacccacttttcaaatcaantttagagaatacacaagctccatg

SEQ ID NO: 188688 - DNA, 365 bp, Glycine max
actcagcttctagattcggcatggaagacttggaactgctttttatgagaccaatacaacacgatatggtctatcgaccacttaagctgacacggaacagatcttagaaagtccggggagagacctaccagcccaagtcgtcccacctttgacggagagggaaatgatcacgattatggtagatacgttgcctacgttctactacgagaagctgataggatatatgccggctaactttgcagacctcgtcttcgccggagaaagaatcgagtccggactgaggaaaggcaagtttgaatatgcctccaacgctgcccccaacaacaatagaagagccccagtggtgggcatatggaaaaaggaag

SEQ ID NO: 188689 - DNA, 300 bp, Glycine max
ttataattgtttgtgtcagtatatctacaaattgaactggacaaaattccggctaacactacatacacatgagtggtggttaaattgatagcgtggaggtgataatttataaattatggatcaattttgacaatatatgtgctaacaaactgtgcacacagttgacatacgtggtattgagattatcctggtggctgctgctataaatagcacttcctttccattccctggagtgcagtttaaatcggatttgattaacagtagcaaggttgatcaaagatgacttgttggtctggaata

SEQ ID NO: 188690 - DNA, 271 bp, Glycine max
  unsure (1)..(271): unsure at all n locations
atataggagctagcctttggaggtcatttgggtaagaatgtgcccccantttgcggagaacgctaccacttcacacaactggcagttgaagttttaacagctgaatcaatttagagcatgttcatgtttcaataagtatgtaattaatataccctgaactttgaagatgaactctagatcaatctttttttataacagcgttctaactttaagggactgattaatataaaaataacagttattatacaaaacatataagaatactgtaata

SEQ ID NO: 188691 - DNA, 287 bp, Glycine max
catcttcatcatcattatttttcttctgcagagttctaaggaaggaggttcttggggtaacaatatttgcttctgaaacattcttgttggaagaaaaccttgaagataaaaaggaacttgtgatatgagccttatgtagacaaaggttgcgtttttaggacatggtggctacactaatctggactttggcttctaaatttcgaccgaccataaatctttttgtagtgtcaaatatttgaggaaacatgaatcttgatcttatattataagctctgtgagttatcatg

SEQ ID NO: 188692 - DNA, 257 bp, Glycine max
acgacatgcgttgccttacataaattccaattgcgctcatcctaaattggaggatgtgaaaccccgcttgattgaatatatgatattctgtcaaggttgtttgtttgacggccaaaaagattaaatatgaggttattcatgtatacgctgctggctataccattgctgaaaatactcgtaaaggcgagcccacatggtaatgccaacctctctttataagagtttcttttcctcattattattatattcttgaatta

SEQ ID NO: 188693 - DNA, 56 bp, Glycine max
gtattttatgagtatagtatatttaattgattaacaacttgaataatggttttttt

SEQ ID NO: 188694 - DNA, 355 bp, Glycine max
cggaccttaaaactagcttgagaatcaaggtattatttactcgggtccattagcgataaaatcagacgctcaaatgaaaatggaactataacaattcaaggtatacatttatggagtccatttaggccatcacatatatagacgctcgcaattgaacaacggaagctctcgagaaattcaaatggtcataacttttaactcggaagtccgattcaagcacataatatatcgagacgcccgaaattgaacagcggaagctcttgagaaattcaaatggtcatttcttttaactcggcggtccgatttaagcgcatcacatatagagacgctccaaattgaacaacggaagctcttg

SEQ ID NO: 188695 - DNA, 440 bp, Glycine max
  unsure (1)..(440): unsure at all n locations
agctngcttctacagtagatcatggagcgaccctagatttccgtgtcaaatccaatgtaatcaagtagtttgaaccctattgttgggcctangctntanggtctggttggatttcccatgtgattactttttgtaccactttttcttcgtacaaatatatttaagggaaatctggtttgtcggaaagcgcactacatcgtcatgtatttaaaaattaaaatgaatggatccgagtatcgaacacagggaactaatgttagcttgagttaaattcagaaatgaagcattgttgagagaacatgtatgtatggataattcaaacagaatttaaactatacctttatgctaaaaactataaaatacaacgtaagtaaaagtgacagcagtaggtagaaatgttgggtctttctaacagacaagctgatgtatataaatatatt

SEQ ID NO: 188696 - DNA, 377 bp, Glycine max
  unsure (1)..(377): unsure at all n locations
tgaccgaatgtaagagacatcttcttcaacctttgncattcttgactccatttcattgaagcgcatatgcacttgcaattccaaggtatcaaacctctcaccaacaaagttgaaaccataacctcccatactcttccaaagaagagatgaatcttctccttcatgtccttcttcaccaacatttctagcacctttcttcacccaagagccatcatgctcctttatgtaaccaaaggatgctatgactgaagcgcctgtaaggaatgatctcatgattggaacataaggttcagaatcaagagggatgttgaagtgttgaaggaaaagggtaacaagatgaggataaggcaatggggcattcaatcgcaatgccttat

SEQ ID NO: 188697 - DNA, 422 bp, Glycine max
agcttctcaaggaagctacctagtctataaatagaaacatgtgtaacacttgttgtaactttgatgaatgagagtcttgtgagacacaactcaaagttcaacttctctccctttttcttccttcaatttcgtgctcccccctctctctttccctccctctttcttttcctccattgaagcatcctctccaagcttcttatccaaggctcatcttggtggtgaagctccttcttccatggcttattccctagtggatggagcctcctctcacctcttctcctttgtcttccactgcatctccatggtggaaaatcaccattaaaggacctcattgaagctcaaagatccagcctccatagaagctccataagcaagcttccatcacacactcatgcatttcattctaaaattcagagattgat

SEQ ID NO: 188698 - DNA, 397 bp, Glycine max
  unsure (1)..(397): unsure at all n locations
gcgtaccctaccattntccataatagaacactattaattatgttactaccatgggtattatttctttcttcatcattgagggaaacacttaggctgccaaatccctccgcctttgggcgtattctttgaaagatccgtgccccctttttgcacatgtattgtagttgcatcctatccgaagccattatactaacactgcctaacgaaggcaaccattatgtccttccaagaatggactcgggaaggatccaagttagtgtaccaggtaacagctacccctgtaagactttcttggaaggaatgtattagcaattcctcatcttttacgtatgcccgcatatttccgacatacatctttagatggttcttggggtaagtagtccccattgtacttgtc

SEQ ID NO: 188699 - DNA, 418 bp, Glycine max
  unsure (1)..(418): unsure at all n locations
agcttcactactagaaaatgtagatctaacatcttcagattaacatcgattntttaacaaaaccaatgttaagttaaacgtggtggcctaattgtaaataatgtgtattccttaacatcggcttttcgaaaaaccgatgttaatttattgacattaacatcggttgttgaaaaaccaatgttaagtttcattctttagcatcggtttttgaagaaccgatgttaacgtcttttaattaacatcaattttttataaaactgatgttaacgtatgatatgttaacatcggtttctctcagaaaaccgatgttaatattaacatcattgggttaacatcggtttatttttattgaaaaccgatgctggacttatattttaaaatatcagaacgcgagccctaatatgctcgcgctctgttc

SEQ ID NO: 188700 - DNA, 472 bp, Glycine max
  unsure (1)..(472): unsure at all n locations
nttcttctggtttctctgctagggtttccaagcgttagatagtattgatatggattgaagccttcatttcactatctccatatgagggatatttctctcatcatagtatttatttttcaaatcccaactgtggggattttcgaaaatgagttccaaacctgttatttaaatttcatgacaatccaacggtcaacaagtccgaaatcataatttttctgaaataggtttaagtgtatgcgggaaaagagaagatattgggggagggagaagggaaaacaaatttgagaggaaaagagagtagagacatgtggtaaatgtaaaaaatgacctaatatgtctctatttatatctagggtactctcatcctattatatactctatttttctgtatttatcaaaaggaactctattgtactctatcaaatgacagttatttttattttctaacaaatacatattgattttattacct

SEQ ID NO: 188701 - DNA, 414 bp, Glycine max
  unsure (1)..(414): unsure at all n locations
agctagngattgttggactattttatatgtatatggactacatgaaggatttaaaatgagtgcccgaatgtgattctaggcctatgaacccaagcttttaatttcaatacaaggaagcatgacttacacctaggaatctaagtttggttctgaatgtaaaaaggcatgaatattatgacatgtttgagaggtttttattagaatttaaatttggctgccccatgtggaatacctttcacctaggtagcatggaaaatacctcctttcaacggtatgtatacatgtaaatatatatagcatggaaatgccttgcaaagtgtgtgaatatatggcataaaaataccttgcaaagtgtgaacatatagcaaataatgcatttcaaaaaatctgtgtatgtaggataggtagcgtaaa

SEQ ID NO: 188702 - DNA, 419 bp, Glycine max
agaaaataataccgaacgtaacaatatgtttttgtatgcgaacaaaacaagaatgaattgtgagcttcggattcggaaacttaattgttgaagaccgaagaaaaaatgaagaacgaatgaagaaagaacaaagaatgacgataaacggcgaagaacttccatataatcgctcatagaaacgtctcggaagcgttacagaaacacctcgacttggattttgtccttttttctcttctcctcaccaatttcaagtgaaagcttaatgcaaaaattggtggatccttaaactcagcccccttcccctatttataggagaacagggaggtacttgccgcccagaggcttcttgaggaagacttatgatgcacccccaaaattactatattgacctcccctcttcataccttacataataggta

SEQ ID NO: 188703 - DNA, 421 bp, Glycine max
  unsure (1)..(421): unsure at all n locations
agctntgtgttatgagacttccatatggaacacttcattacaccaattttcattcttaagaccaacaacaaattaaacagaaactcacgaaaattgtcaacatcattcctagagctctcaatgatgtgtcacaaattcgcagctagccatatatgtcttgcatgctgataggctaagaacaaatgctaatcattctcaacgtttgattcacaacacacacattgcaaaggacaaaggacatgcttggttgaaggtttgcacaagttgggagacaccctcaaagaagcctccaaagaaaatgcttgatgttttgcggggcttataacttccaaattatcatccaatctctttccaatttcaagtgtgattgatcaagcatattttccatgatattatggtaagagctatgagcaatagtctc

SEQ ID NO: 188704 - DNA, 356 bp, Glycine max
caaaaactaagcttgagttatagcctactaacacttgctgagattcgatctttatattttcagcatgccgcgaagggaaactggtttcgcttggctcaaagatgcaaggacagatatcctagggctctggctacctacattactaaccgtcaagttctgtgatgaagattgccccaactatgctaaaagtagtgcacgatttttctggtataactgagacttgtgaatcgaatgcccgttacatatatattaactagaatagtccgatatgagtgctgacaaatgccagcttctactagcctcttgccccttacttaattgcacctttaaacacttatttgctaatgactggaact

SEQ ID NO: 188705 - DNA, 423 bp, Glycine max
  unsure (1)..(423): unsure at all n locations
agcttattgtgtaaacactctntgagtgattataatacatattctatcaaacatttattatttgtgaaagccaagagtggctttgtgaaaaaaaatacttgggtcttaatctcaggggaaataagggtagtgacaaaagtggctttgacagtatttgttgtagccaaaagtgacatgaagaatacttggttgtaatcaaagttttgattagtggaacccttcaagttttgaagaagaaatgggcatagcccaattgttagggtgaaccaatataaaacctctatgttttctttactgcttttatataactagttcttttctataacttacttctacactattgtgtctaggttttgagagttctatctaccctcatcatgttttcaaacataacaaggcctcgtatggtttaaaacaagcttc

SEQ ID NO: 188706 - DNA, 415 bp, Glycine max
  unsure (1)..(415): unsure at all n locations
tgttgaatgctntcctgccaatcaaagcataatacgatgtatctgcgtcaacaagtaaatatctttttgtgaagctcctagagagctggccttaaccgaaagtggttattatgtcaacatagcctctagtctctactttttcgcctgtgaagctaaggaatggaccaacgtgagggtggacaatggcaggcaagacttcaagcctctggaaagttttctaatgtatgatgttagcggagcttccttgttcaatgaggaccttggacaccatgacgctggcgatgacaatgaagacaaccatggggttgtcctggttgatggggttgatacccttgaagtctctatccatganagtgataggagggagacttcgttgtgatggtgcttcgacaaagctgtgtcgatgtgttgaatg

SEQ ID NO: 188707 - DNA, 414 bp, Glycine max
agcttcataatcaataactaactggttgattatcgacgaatgaagaacggtgaagaacgtccacaaaattgatcatggaaactttatggaagcgcctcagcttcgatctttcccttctttcttcttctcctcactaattttaagtgaaaattgaatatccaaagtgttgaaccccttcccctcagccccaaacgccattttatagaaaaactgagggaggtggttgccgcctagctctcccaggaaagctcagcttgcccaggcgatctaggtagcttccacctaaagcaacctccctccagaatattccagatgggcccagggctaggtacacccccctatatggttgccgcctagtctcggtcaatagacattaagtcttcgatgaagaggtgcagacgaccacattggtct

SEQ ID NO: 188708 - DNA, 420 bp, Glycine max
ttcctttctgggttgatgacccggaagatgatgtatctgtcttcttggttattggctctggtagagccaatataacatcttttcctttagtactggatcttcctcctctgccggaggagctagacaccttatgaggcatcgggaattttctgtaaaaattcacgggtgaggtagtcatgtagagagtttgaagagcccttgatatattctatgttaaaatcaaagacgcttaagattgcctgccgtcttgcaaaaatttgttttgagtcaaggattcttacatcctttagtaaaatgtctatggctgatttgcagtcaacccttactaaaaattgctgattcaataaatcagattgaaatttggaaatgcacagaacaattgctaaaacttcctttttaacagttgaatattttaattgt

SEQ ID NO: 188709 - DNA, 418 bp, Glycine max
  unsure (1)..(418): unsure at all n locations
agctntaagtgacaggttatgcaagtggtccaatggcatacaaaaattattgtggtatctgattggttccaaataaaacctcttaagaacctgtctttgacaaatttatacaaaatcgtgagttttgtcaaataaagtatatcaaaatgcatgaataaggcattaaaactcacatcaaaatacagtcaaatatgggtttatcaacctcctccacttgagcattgcttgcccacaagcaattattctaatttataaattcaacttaattctctctagtcatgaaacttgtaacaaaatctcaattaaaagtaaataaattaaaacaaagaacaataacaacaagcagcaaggatgcaacaaaagtttcgaaggaatccactaggctntaaattacattcgcatataattctccaagagt

SEQ ID NO: 188710 - DNA, 344 bp, Glycine max
catggcttatactgtagaggacggtgcctactctcacactttcgactttatcttacgctgcaactgcatggccgaaaaccaccatagagcgactatatcgaagctcatgtatccttcatcttgcgtcaagcggtatcagagcacaagagcgctcggagggtgctccttaaacctccattaagtggtcaactaacaccgttctctctctatgtggtgtatcatccctatcactccgtgtagatactcacatgtctggcgtagaatgtagctcacatgacattgttagaatgaacaccagaggaactggttatgcaagctggatgcgaatatctatggatcaactt

SEQ ID NO: 188711 - DNA, 417 bp, Glycine max
agctttgagaaacatgttatcttttttgtgtatcatgtgatcctttggcatcatcaaaacattcagcttgatcctttgtctacaatgtttaccaaagagtttttactctctagtaatcgattactagattattgtaatcgattaccagtagcaaaatggatttgaaaaagttttcaaactgaatttacaacgttccaattaatttcaaaaagttgtaatcgattacaatgttttggtaatcgattaccaatgcctttgaatgttgaaattcaaattcaaatgtgaagagtcacatccttcaacataaaagccttgtgtaatcgattacactaatttggtaatcgattaccagtgattgtttccgaataaatcaaaagatgtaactcttcaaaaggtttttgactttttcatattggt

SEQ ID NO: 188712 - DNA, 431 bp, Glycine max
  unsure (1)..(431): unsure at all n locations
nttatcctagagaatcaatgtttcccatagacgacacctttgttatggtgtaggacacggaatgaaattttggttcgagtagcgtaagagaggttgagagaaataatagagagataatgaattttagagtactcgtggtaacaaattttgttcagagattcccccgccatatgtttatagtgtacatatttatagtgttttcctctatggaattattgtccacatggcttgttacaagtattttgcgttaagtatcctatttgaagggttacatcggatatatctaagtttggcttgccactaaggcatttattgcttaagtcagtcctttggtccagtggtcaacttataatcttttattcgtccttctcatgattatgtttttgtgccatgtgtctgtgacaagtgaagttgatatttatcacagaaca

SEQ ID NO: 188713 - DNA, 416 bp, Glycine max
  unsure (1)..(416): unsure at all n locations
agctntaggctgctcaattgctccatgttgctgcatggaagggcaaaggtctgtatggtggtcagcagaggagcacaaaccacaaacccttgcgacaggtacagatttctgattcaaggccagctgggttaccaagttgaccaacgcatccagtttgccttcaagcttcttagtttcagatgatgcagatgggtttgtagctacctcatgcactcctctaatgactatggcatcatttctggcactaaactgctgggagttggaggccatcttctcaattaaatttctggcttcagcaggagtcatgtctccaagggctccaccactggcagcatctatcatacttctctccatattactgagtccttcataaaagtattggagaagaagctgttctgaaatctgatggtgggggc

SEQ ID NO: 188714 - DNA, 387 bp, Glycine max
  unsure (1)..(387): unsure at all n locations
tgtagaacggctggtcatgatatatgtcagggtttggtcttcggttcggggataatggggatgtcctacattatttccatgatacacatgcaacaatgatgattaggaaattttatgcaaaactggtcatgcatgcacccatgtggacactcaagcatcaagtttttatggtcatgtgacactagggctcaggattcattttccctatttaagtcaacccagtgtttccaaaatatgctcttttatcaatttatgcattcatccgagtcccttttgggcgttcgggaaaatattcacagtattcaccctttaggtgtatacacattntttttttcaaagaaactggctatgatagtgaaatcattntcaaagataagctggaagtta

SEQ ID NO: 188715 - DNA, 426 bp, Glycine max
agcttcaatgaaggaagagaatgagttttagagagagagagagagaaagagagagagtggcgtgagaatgaaggaaagatagggagagaagttgaactttgaagtgtgtctcagaagactctcatttatcaaagttatcacaagtgttacacatgcttctatttatagcctaggtagctttcttgagaagcttccttgatggaagcttccttaagaagctagtgttatacgcctccaatagctaagctcacccccatgacaaaatacatgaaggaagaaagcttccttgagaagcttccttggggagcaagtgttacacccctccaatagctaagctcacccccctaaaatacatgaaaataaaaaaagtccctactacaaagactacttaaaatgccttgtgtcgcaacgtgccctttgcgggcg

SEQ ID NO: 188716 - DNA, 445 bp, Glycine max
  unsure (1)..(445): unsure at all n locations
tgtccactctttaatggaggactatcacaacatattatgtcctgtttggatgctgctacagggggaaaccttatgcataagatgaataatgcaacaatgcacattattgaggccatggcttcccatggatataatgttactagcgacaagaggatcctaatgaggcctatggagttcaccaggtggaggtcaattcatccagctcatcttttgaccaaaagttggatattttcattgagcagataaagacattgatgaaagctcaaactcagaggatgacacatattcccccctatttatgaccagtgtggggagacaagatacatgattntcaattgccccttttcccaagctttggaagaggtgaactatgctagtggaaggaacaataactatgagccttacaccaaccccttcaaccaaggttagagagatcacccaaact

SEQ ID NO: 188717 - DNA, 415 bp, Glycine max
agcttctaattggaatcaaatcacacttaattattgaagtgactttatataaatactcttattttttgctagttgcactaaaaaatgaagtattgtaagagagaaattcttacgggttattcaaaagtaaggtaaataaaaaagagagatgctatttatactaaaaaaaatgtagcatattttgcaacacaaagagatagaaggaggagtgttaaaataatataagtgatgtaatggaaaaaaaggataaagaaaaataaatatgtttttggatcatatctcacaacggtttcttgctaagattttcaatacttgacatggcctagcaattgatcaagattcatccatacattgacataattcttggatagaggcccgacatgcgccaagcaaataacgaagccaacatcatatt

SEQ ID NO: 188718 - DNA, 287 bp, Glycine max
gtatgcttcatgatcattaggtgcatctatgcttaattctgactgcgggtggaaaaccatattgtgtcaaggagtaactcttataaatgtgacgcatattgtgttcttgagctagaggatgacataaatataatagtacctcagaaataataattatgtttcattgagcgacccattattttatgtaatcatgtaatctacgtagcctattaatttattgcagcagtatttaacgtctccatctcttatgtacacatactagttatatattatcaatttccagcaaa

SEQ ID NO: 188719 - DNA, 403 bp, Glycine max
aagcacctgcggctgctgcttcgtcatttatgctaacgtttcttttatgcatgctcaacaattttatgatcaagctactaatccattcttgtaaactgctaaaacttacagcgttctgttaagcggatggggtgatattgatgatccatagaatgcccatgagctgtttcaagcaatgctcgaacatggatgtccaacggattcgctagcatataataacttgtcacaagctctttgcagaggaggatgtgtggatgaagctcaaactatttttcatgatatgctgtcaaaaagagttgacccacaagctcttacttattcaatattcacttcctcatactgtgatgcgcatgatgttcaatcagctcttacggttcttgatgaaatgagaacgtacaacatt

SEQ ID NO: 188720 - DNA, 424 bp, Glycine max
actcagcctgtacaatttgattccggctagttggtggtctagtttattatacattctcttcctaagaatgaataaaatgtttctcgaccaaagagagagattggatgaatagaaaaggagcaattgtgctaattcacgttcaacgaatatcacttcattcacaccacaaacccggagttagacaattcttctggtttatgaactttatacaggaccatacaaatacaatgcaatgaacatttcggtgatggattagaaatgacagtcacaacatttttttttttgttacaagtcttgattatgtcaggcagattgctatctgtacaatgtaagcttgcagaatgcagggtttggcattatattacggtgctcgttcggcaccaagtggtatgaaagacttctgtttcacaattgcatttggaat

SEQ ID NO: 188721 - DNA, 444 bp, Glycine max
cccgcgacctcagagtcacctgcggcatgcaacttattaattatatgtgcttcttttctcttgacttgtggaagaactcttccagtgcagatactgctagacaggttctcttttttgccctacttcccaccccttcttccttgtttattgaacgtttgctgatatcagcaatatgatactggggaatcttaaggcaatctatttttattcatccattttctagtacttagtaaaattttctaatttctagtgaagctaaccctgatttttgcaaaataggtggtcaagttgaaagcattttctaaatttgagaacacttcataagctctagaggcagctactttacttattgatggaaaagctagcaaaggtctccgcaagttcctgcgtcgtcattgtgaaaatgaaacactacgtgtggcagaatcaaagcttgggaatgtg

SEQ ID NO: 188722 - DNA, 426 bp, Glycine max
  unsure (1)..(426): unsure at all n locations
gggcgtgggttaagtttgattggaaaaatgttagcccattttatattagatctacctaaatccatttgatgagcctatctggtgagattaaacttaagaaatataggttgaaattcaatcaagcctattttcaccatttttttaatagtttatatttttcattctcctatatttgtataaatttaaagtaaaaaagcatttcacaaaaaaaagactacaaaaataaaattgaccaatataggatgatctaattggccctaagcctagtagttggacttcaaatgaatatggtctctataaaatatggattggtccaccccaatccattttcacactnggctccatggatcaagctaggccgagtcgactcacccattttacctgctttacttaacatttacacgataaaatataatttggttatat

SEQ ID NO: 188723 - DNA, 440 bp, Glycine max
tcctctaagtcacctgcggcatcaagcttttatccaggctcatgttggcggtgtttctccttcttccatggattattccctagtggatggcgccgcctcttacctcttttcctttgtcttccgctgcatctccatggtggaaaatcaccattaaaggacctcattgaagctcacagatccagcctccattgaagctccacaagcaagcttccatcaaaactggtatctttaacgtatgcacaaagaatccctttggcattctttactggtaactctcaaaatcaaccatcatctacttcttctggtaaagtacaaggaaaacccctccccagtaaatccattcccatctttactccaaaatggacaagatatgactatgagcacacactatctgaagcttacaaagctctctccttagatgttatagttcatctcgagtc

SEQ ID NO: 188724 - DNA, 461 bp, Glycine max
  unsure (1)..(461): unsure at all n locations
ntatacaagggaacataagatacaattcaaggtaagctatttggtcaaaagagcttgtgtctatacaattcatggccttcatcatgttctgagttatacaaatcattctagaattcatagatttatgcaaagatcattattcacaattagtcgttcactcacagagtaaggtcacactctcaccggtttttggtttaagctnttctttcacaatcagtctgtctagtgactaaccattctattataagttcgcactcttgttctttctttgttcaacatgcacatttgctcaaattcatgagaggaaacacacatttcatcataagcatgcattcaatttaaaacaaggcatacaaccattttcacaaaataaataaactacttcattgccataccatcaaaagttaagttaaactgttcacgatgcttcangatgagccactatactactcatgcacaag

SEQ ID NO: 188725 - DNA, 427 bp, Glycine max
agcttgcttctacagtttacaccacattcttatttatcttgtgttgggtaccatgatgatagctataaacaaaccatgttgggattgcactcatttcttttaaaaaatgattgaaaatcatgtgaacatggtacctaatgcattgataaccaggaaatgatggttcttcgagcgtctcatgtcgatctcataattacatttgtcatgcataacataagtatgccctagtcgttcatctctatgatatgttgtcgaagtattgacaatcaaaatttctattccttggattatggggtcgaaccaagcacatgcttttaagaaaaggttttcatcaagttaatgtcaagtatggacgtaactagtttgcaaaagttacggcaaaagatggatcgagctttacatagcttctttggctactggcaacaca

SEQ ID NO: 188726 - DNA, 404 bp, Glycine max
tcacgtcctattgtctcgtcatgagttgcttcaccgaggttatgaccgcgacatacttatgatgcaccaccaaatcaccttgaataatagagatcacgtgaaaagagtttgaaacacataaaacttgtctgaaatccctatcctaggctatagataaaccacaatacatagatggggtaaagacaacacatattgcaccagcctggggccaatggtagaagaaccaccctgcacattaaaggctgtggaaacgatctcagacaaattgcagaactacctctgaatccactaaggagagaaaaatatgttggtgaaaaatgagtttctagctttcaaatctcccaaagagttatgggaaacttattcccacaccatactatcaaccaagccgactaaaagccatc

SEQ ID NO: 188727 - DNA, 308 bp, Glycine max
ataaatcaccgaccaaacggaaggtggctaacttttttcatcacccctggagaaaaacctgctccacctagattttgaagaaagataaacaagactgataatgcctgattggcatacctcacctttgaccaaagctaccttgaatacaattgatcatttaccctttggagctgatgactctgcataattgacactgacctgaggattattacatatcctcgctagattcaggaagcattggccaaggaaattacccaacatgcggagggaatgacggatgcagaaaagataacatacacacacaaaaa

SEQ ID NO: 188728 - DNA, 393 bp, Glycine max
agcttgttaaaaatagaagagaagatatcttgattatgacggaaatgaagatgaaagcaaacaaacaagaaatgaattgaaagtcttagattcaaaaacttacccgttgaagaacgaagaacggatgaaaaacggtgaagaacgacggaaaaaccttcacggatttgctcacggaaacgtttcggaagcgttacggaagcaccttgacttggattttcttcacgagaataaatttttcacccaaaacagttgaaatgcatagccaagggggttagggatattttgaaacaccctcccttcgcctatttataggaaaacggggaggaggttgccgtctagctcgcccatgcgaggtggtttgttcctccataagcaaccccactttcaaaatat

SEQ ID NO: 188729 - DNA, 438 bp, Glycine max
  unsure (1)..(438): unsure at all n locations
tcaacatcagaccacttncaggtgctggaactactttatatgttcttgatggggcctatgcaagttgaaagccttggaggaaagaggtatgcctatgttgttgtggatgatttctccagatatacctgggtcaactttatcagagagaaatcagacacctttgaagtattcaaggagttgagtctaagacttctatgagaaaaagactgtgtcctcaagagaatcaggagtgaccatggcagagagtttgaaaacagcaagtctactgtattctgcacatctgaaggcatcactcatgagttctctgcagtcattacaccacaccacaatgggatagttgaaaggaaaaacatgactnttgcagaagctgctatgtgcatgcatcatgccaaagaaccttcctataatctctgggctgaagccatgaacacagcgtgc

SEQ ID NO: 188730 - DNA, 413 bp, Glycine max
gctttgcttattaatagttgatggttgttgctgtaccaatggtgcaaattccaaggtagtgtccaaactaaatctggaggaagccatacagactttagtggcttagtgaagatgaagaggtaaaagtgactcagcatgttgaggtgtgtttcactattggaagatacaatgataaggtgatgtgtgatgtggttccaatggaggtgactcatatactgttgggaagaccatggcagtatgacaccaaagcagtgcatgatggcttcaccaacatgatttctttccagtaccatgaccaaaaaattattcttaaacctctatcccttagagaagcgtgtgatgaccaaatctaaatgagagacaagagtgaggcactaaagatgaataggagaaagaagagcgatactcatgag

SEQ ID NO: 188731 - DNA, 331 bp, Glycine max
tttaacctgtgatgtacctaagcaggcgatctcctgacagtcaacagataaaaggaacaaagaccacatagcaaggaggcttgtgtggtggctggccatctgtgaatcttgtgtgatatatgggttatggcctctggtaatcgattaccaagggtgggtaatcgattacaatgcttaaaaatgaagactagacgctaagatggtctctggtaatcaattaccaaggggtgtaattgattaccaggcttgaaaacgaggtcaggaagctaggagagcttctgtgtatcgattaccatggggtgcaacgattaccacgctttaacagggaact

SEQ ID NO: 188732 - DNA, 415 bp, Glycine max
gagctttctagtgaaatttatataaggagtttattttttttttacacagtcttatagaagtgaaaagtgatttgttttgcttattcatatagtattagagttgaaccgttacgatttcttgaagcatgacttatgagtcaagtatacgaaagtgagaatgatcatgttgaatgaagaggcttagactcgagggtaggcaaatcatgtattctcaatagtcattgtgaattgggattggtagagcatgagagactcgaaactcattatttttcttgaaccgtccgatgttcataaaagagtcgaccatgtaatcagtctcgtctccttgtgtttgattgtttgtttcaaaatgtcattagcgtctcctatagtattattatactccacattgtatgtattcacattctattatatt

SEQ ID NO: 188733 - DNA, 286 bp, Glycine max
  unsure (1)..(286): unsure at all n locations
nggcacaatgatgataacaatacacactacaattgttttatgttgttgacatctctatcttcatccaagtgactttcttcgcctgataacgtataaaatgggaacacaatcattttcatgagaaataacttcacgacacaatatatgttcaactaacctcagacaatagtgaccaaaaattctgccaaatgattataaagtgatatgacaatatttataaataatgatgagaaaatacggtttgaggacaacaaaggaacaataactatgaaaaatagacccttgt

SEQ ID NO: 188734 - DNA, 423 bp, Glycine max
agcttataagaacaaaattgccttaattatttccaaatatgcatgtgaattaggacgcatcaacaagaatcaagccaaggctattgtgcaagcaatcaatggggcaaaacacaccaaatgattataatgatggatggctcaaattctcacaaaggtaaaatcatcactttcaaattgagctttcaaaactatcatgacatgtagagaagaatcaaggatttcaagtcacaaaatgtcaagaacttttattttcaaaacaattacccatttcttgaacatatcctatagttcaaagaaaaacatgcaaagtcgtacgtgcacacgaaattgacccaaaatattaaactgaaaatccgacgaaactaacaacattaacaaattaacacaactaacaaattaacaaaaccaacaaaacttagcaaa

SEQ ID NO: 188735 - DNA, 462 bp, Glycine max
  unsure (1)..(462): unsure at all n locations
ntaacctcatcgtctctcacagtatttagatttgggagccaatccaatccttgtgttcggactctcagccacttatgatagccgccgatgatcccattactgcttcccctaagctctctgtcctttcttcacgccgcatcccatgccttgcgaactccttggagtaccctcgcgttgtggtcactgaaaccccgtgcgatgaaaggcgtgatgctttcgtctgatggcactcctttcatgggacatccttcgcatgaagatagaattctgattcttccttccttctagcgagggaaccaattaacagacgcccttccatgctagccaagagttggtcccaattcgcctttccttggttgacgcgcgagcggtgacgttgtagcggatagacgggcctacctctgtggagaaaaatgtgtgaaaccagccacacatagagagccagtgcacaacatacaattc

SEQ ID NO: 188736 - DNA, 343 bp, Glycine max
  unsure (1)..(343): unsure at all n locations
agctaaaatcaataatacttctcttgtattngctnatggagaagttattcaaacaaaccctaattcacatttctcttgcattatcatagtaggtgatattttatctcaatgtcagtgacacactagggtttccaccacatgcctaaatcaaggaagagcttctgaaacaaacttgtgcatgcttgtcatcattctgtaaaacaatctggatttgaatcatgtgactagcatacaactcaattgattctctagcactgggtcttcgtcttcccaattttggccacgctgggaaaatgatcaaacaataattaaaatggataactcttcatataagttgcctttc

SEQ ID NO: 188737 - DNA, 332 bp, Glycine max
atgtacgctacaggggtaatgattggccgttctatagattattgtgatccaaaaaggactagtagatttgtgtttttcatggggaacacaaccttcattaggatgtaaaaaagtattcgatagacactgtttcgacttgtgaggcagaatatgtaacaactacttcatgtgcctgccgagctgtctgtctcaagaattacttaaaaaagttggtgcatgtcacgagaagagttaaccaacatctttgtggataataagacagtcattgctctagcgaaaaatacagtgtttcatgatcgaatataacatattgatacccattcccactacat

SEQ ID NO: 188738 - DNA, 407 bp, Glycine max
agcttgtagcaaattcgaacgacaataatttttcactcggaagtccgattgagtcccgtaatatatcgagacgctcaaaatttaaaactgaagctcgcagcaaattctaacgacaataacttttcactcggaagtccgattgagtcctgtaatatatcgagacgctccaaatttaaaaccaaagctcgtagcaaattcgaacgacaataacattttactcggaagtcccattgagtcccgtaatatatcgagacactcaaaatttaaaaccgaagctcgcagcaaattctaacgacaataacatttcactctgaagtccgattgagtcccgtaatatatcgacacgctcgaaatttaaaaccgaagctcgtagcaaatactaacgacaataacctttcattcggaag

SEQ ID NO: 188739 - DNA, 342 bp, Glycine max
  unsure (1)..(342): unsure at all n locations
nttgtnttcaatcttgagcgtctcaatatgttacgggactctatctgacttccaagtgaaatgttaatgtcattcgaatttgctatgaacttcggattgaaatttcgagcatctcaatatattacaggactcaatcggacttccgagtgaaaagttattgtcgttcaaatattctacgagcttcggttttaaatatcgagcgtctcgatatattacgggactcaatcggacttccgagtgaaaagttatggtcgttcgaatttgctacgagcttcgattttaaatctcgaacgtctaaaaatattaagcgactcaatcggacttccgagtgaaaagttattg

SEQ ID NO: 188740 - DNA, 422 bp, Glycine max
  unsure (1)..(422): unsure at all n locations
agcttgatgcanaacagtggtgtgattgttgatgccaattcatatcacttttgcagtgcatcagacaacaatcccattcgagcatccatgcattacttcggtgtcattcaacaaatctgggatgttgattatactaaatttagagtgcttgtgtttaagtgtaagtgggtcaatgccaataccggtgtctgacaagatgaaatgggatttaccttagtagaccttaacaaggtgggttacatggacaaacctttcattatggtacaacatgcaagacaggtcttttacgttgaagatccttgcgattaaagatatttagtggttttacagggaagaccaagtggtttaaatgacgcgcatgatccaaccatgcttgacattatggagactgttagtgcttagcgctactgtagtttaaaaga

SEQ ID NO: 188741 - DNA, 479 bp, Glycine max
  unsure (1)..(479): unsure at all n locations
ntgtcctcagatccctcttgttggactagacttagaccaaacaacattattgtaacagcatatttaaaaccaaaacttaatccgcagatccctcttgtaggactaagtttcaattctgcttcattcaagttctaaggcaacaacacatttcccaatgctaaagtcacctaaccaggcacacaaatggatgatcagaccaagagcatacagaatttaagcattgaaagaagcattgaacacaagacacacaatcaattagatattaaaataattacatcagttgttcattagaaatccccaacaagagtatttagccaaccattacaaaacaaaccctaacaataatgagattaaaaaacctaggtatctctgcaaaagctgctcctcttgctgcttccagagctcttttcccgtaataggcaatgtggtgtgctctagaatngtataaaaatctgttgtaaaagttctttaccctaatt

SEQ ID NO: 188742 - DNA, 341 bp, Glycine max
cgcatgcaagctaagccgacaaacagtacggagctgttttgttcttactacgtccaagaagaagcggattcgattctgctcgcttcatgaataagaaccctgcggcaaatcgtaggaatcaagagggagaaacccgtatatgacttccattctgacatggacctcacacccactggctcaacaatatcaatactcagacaatatcacgtccttctcattacccaaccaccctaccagccaaaaacacccaaccatccacaaaggtcgcccctacatcagccacaaaacttgcctactgcacaatataggccaaacaccacccttaatatgaaccacaacac

SEQ ID NO: 188743 - DNA, 339 bp, Glycine max
acatattgttggggtaatataaatagttatcttattcaaataataggttctattcatataatagaattcttgatctctttccgctacatcaaccattttatctcacactcctttgtctattctttctattcctctctgtgttatacatactagctgtacatacacaattattatactaaatgcaaattctccatacattaacagacttgaactaccatcaataataccgtactggctcattctccctggatatagaaatcctgacgcctgacgatctttatacaatagacttcccacacccaggaccgaataatttgaataagtattgagctatctatg

SEQ ID NO: 188744 - DNA, 163 bp, Glycine max
gaatatagctgaagtgcatagtgctaacgatgctggctacacatatctcttattgttgacaagggaacctgggaggaccaccttctgcgaacattcaatttaaatgttgcaagatgtcgcaagcttggcctttggcaagagtgcacacaagcagtacccatga

SEQ ID NO: 188745 - DNA, 418 bp, Glycine max
agcttgtcatcactgtgaatgtgtacgttcttttatatttctccaagaacatccaacaaggtggagtgaagatccgagccacctacactaccctttaggaggtctaagtgccttaaaaggaactttaatttcaatggaaattttgaaacaccctttacccaaatactcttccagtcttcctaaaattttgggatctactggttcttagtttctatgattattattaattattattattcctttacattgctggccttaattaattcataaaatatttgcaagtaatgagccatacgtgtatcggaaatgtgtttctatctaagaataaaaaagtgcgtttctttttatgggttcgattctatatatcaaccaagaacataatgttgttcatcaacagaggaaatgtatttactttttt

SEQ ID NO: 188746 - DNA, 465 bp, Glycine max
  unsure (1)..(465): unsure at all n locations
tgttgganacccattctcaacctaatgacaattaagtttgtcttgccagttaaaagagaacgacagcaaagagggcctacttaagacaaatcttaaaaaaataatttgaggaaaaattaacaaaggctcacatagatgaaccacacatagacaaaagaataagtccaggttacaccagtatcattaaaatcttaagaaataggttagaacatcatccacctgacaataccaaattggccttcgagagaacatattcagtgttggatataaatcaaaaccatttcaaggcattttccttaatgtttaagatttaaacatcaaagatagtcagctacttgatacaatatcaaagaatgcttgagcacgtgcacagggctntgatctttactgcctcttacttacgttaattaaatcttagcanggttaaattggtctgtgctttgtcaatactatggtattcacatg

SEQ ID NO: 188747 - DNA, 431 bp, Glycine max
tgcaagctttaagccttgagctgatgaactcatttctctcttatatcttctccacctgcaaaagccaggaaaatacaaataaaacttcacttgccacattcccggactattaatgagaaactaaaggcaaaatattttttttttgcatcttacggtgataattggaagtacagggccaaagatttctcaaccatgattgctgaatcaagtggcggatccagcaatattgtcggttcaataaatctgtacaaaatttataaggtgatagtaatgtgaaagacaattggtctgtcccattaaggtgggaagtgaactgcacacgatcatatgcgacatatggaaaaacttggaagctagcaactaatataagagagtacttggtagcaaaaaaaggaaagagagtaatactcacaagtcattctcatccattg

SEQ ID NO: 188748 - DNA, 371 bp, Glycine max
actcagcttgaccaaggaacgcagatgacttactcagccagattttgtttactcttcagcttttggagatggacttcagcgtttggctcattactttgccaatggccttcagataaggttggctgctgggactccatcatacacgcccctagaaggaacaacttccgccgatatgttgaaagcttacaaactttatgttacatcctctcctttgcagaggttgacaaattattgggcaaccaagacaattgttagtcttgtgggaaatgagggcagcgttcatattattgattttggcatttgctatggatttcagcggtcttgccttatcaagaagctgtcacataggcatggtggtccttcgaggcttc

SEQ ID NO: 188749 - DNA, 467 bp, Glycine max
  unsure (1)..(467): unsure at all n locations
acggaacatgaaactcagctcgctgcaatccttgtagactggccttttctttcaacattattgtaacaacatatntaaaaccaaaacttaatctgtacatccctcttgtaagactaagtttcaatcctgcttcaatcaagttctaaggctgctagatggaagctcttgatggaagcttgcttgtggagctactatgaaggctggatctttgagcttcaatgaggtcctttaatggaggttttccaccatggagatgcatcggaagacaaatgagaagaggggagaggaggcgccatccactacggaataagccatggaagaaggagcttcaccaccaagatgagccttggatatgaagctcggacggatgcttcaatggatgaatagaaatatggagagaaagagagaggcgggagcacgaaattgaaggatgaataatagggagagaagtcaactctgatctgtgt

SEQ ID NO: 188750 - DNA, 418 bp, Glycine max
  unsure (1)..(418): unsure at all n locations
agctngcctatccgatgcagccgnaatgatggctttagttatgttggggaacggttacgaacccgggatgggtttaggcaaagacaacggcggcataactagcctgataaacgccaaaggaaatcgtgggatgtatgggttaggctataagcccactcaggcagatataaagagaagcatcgcgggaaggaagagcggtagtcaaaactcgcggttgagacaagaaggtgaaggaagcccaccctgccacataagtaggagctttataagcgcgggtctgggggacgaaggtcaagtggtcgcgatatacgaagatggtgttctgagtacattggatttggtatgaccatgccctcctgatttccagctgggaaaatggcgagtggaagaacgcctcggcatttacgcgacgagcata

SEQ ID NO: 188751 - DNA, 436 bp, Glycine max
  unsure (1)..(436): unsure at all n locations
gcgcgtaaagatngagtgcttagcgcattgtctgcacttagcggatagacaatttcaaaaaaaaaattctaagtctttttctgtctatctcttcacacaagctcagaaccccttgttcattactaaacaagctgaaattaatcataatcacaagcatgatatcctaattacatgcaagaggtaagaatgaaagtagaaaagggaaagaaaagctgggttgcctcccagtaagcgctcttttaacatcattagcttaacgcatcgtcctgttatccaggatccaagagagttcctacttcaaggaccttcttctcaagtctcttttcctccaccacatgcactttcagacaaacattttgtcgaggtggatctttntcctcatggaacanatcaaagctgatcttctatgcccatttgcagtatcttctttcctatg

SEQ ID NO: 188752 - DNA, 378 bp, Glycine max
tattcgctggattgatacctcttcatcaattagaaaagttcggaacaccaggtagtgtggaaaaagacgcaaaatatctatctttccaaaatcttggagggcaaataaggcatttgttcccggatttattcacgaacctgacatgtaagtgtatcgcggttgagctcccataattagctccacaagttttgctgtaacattcattagaaaaacagatcagacgcctacagtaatttatgaacctcgaatgatgatgaccagaacggaacgcactaaaagggagacaaataagtattaagcctacctgtgaaaatcctatgacaggataggctccaaaacttctccgcgccttcagctttgcctaaacattatcgatat

SEQ ID NO: 188753 - DNA, 382 bp, Glycine max
acagaacatacgagtcttctattactataacggggatctcaaagagaaaaaggaccctgtaagacacaaacccacaaaaaaatatgacgacatgattcccggggcctacaaaaaagaaacgaccacatggcaaggaccaaatacacatgaccacagaaacaaaaacagcagcacgacgataataacacatatttctcctgcccaaacacaatgagcaagcgtgacacaacaactaatgtggaaaaggcatcaaaaccagtatgcgcaccttaaggggtgggcaaaaacggaagcaaacaatatacatgaacggaaacgcaatcaaataccgatgaccgaaaacaagagcagtacacacatggggaacaaacacccacaccca

SEQ ID NO: 188754 - DNA, 411 bp, Glycine max
  unsure (1)..(411): unsure at all n locations
agcttanaggatgttattggtgtggctcttattaataattataagcgcctttcaactcggtattagagtacccaatcttgggagctctgttttcactgcccgctcctccacaatcagttttcactggatggagttgttcgtcccaatctcttgagatgaattaactggtgtctagtattgcctttctcactattaattaatgtgtgttaagtataacacgtaatactttatcacattattttggctaatttgacgtgaatctatacaagaatgtggatccttaacgtggattcacacatgttcttctttctttttcctttcgaatcatgttaaagctaatatctattagattgcgtgaagattgtaatatctattaaatttatcctctttaacatgtgccatgcccttaca

SEQ ID NO: 188755 - DNA, 327 bp, Glycine max
aagacctccacacggcactagagatactcttacttgcatacataaaacgacggccacaagagtggaacaccacgcctaatcaaacggagaaaggagagacaaagaacaagatgatacacacacatgacactaacaacaatgtctaaaacttcactaatgacgaacaacggataaacactatcaaatatgggaaccacccagtactcacggaaaagcaaacactaccaatcatgaaaacaaacctccgaagaaatagacgacggaacaatggaaagacaagtaatggaaaaatacgacccagcacaacatacttgtacaaagagacaa

SEQ ID NO: 188756 - DNA, 428 bp, Glycine max
agcttgcattcggaattgcgagagccccactccatcattaggattagtacctgacatctcaaacaaacaaatcaaacgtaataagacaattatagttgttgtttgaatacctcacccactcaagtgtatcacacaattatggcttttctctaatgaaacactcttgccttttaccactctaattccccttgagttcttaggcaattcaagagattatggccacaacaaagaacaattcaccaatatgtgtaaggtaaggctagagagacaaggaaaaggttaaccaagaaaaaggctaacaatgtttttaggcacaaatgaaggaaataaaattcagaatttaggaattcaagtaacaatccttcatgcaaccaatatattaccttaaagagattttttttaaagttcttcaagcatgaaccattcag

SEQ ID NO: 188757 - DNA, 415 bp, Glycine max
actctaactctataatactatattctatcacacattcttttctcctcctacaccgagtagtcttcactgtccttactccttcgccacgttttgtctttctctctttgatgattacgcactcactcacatgcatgtgtaacaactaagataatcaatataacgtagtttaaaatacattactaatgctatttttcataatagacgttgtagcacttgtattaagacaaccctaacactacaaactatctaccgtgcatgacataccatatgaggctagaggattgatagcgtagggtcaaggatgctaaccactcatgttcctgaaaaacactgccattccacaggtgccctttagaaatttggaaatagaccaaggtgctacccactaaataagtgaaatattattcatgctggt

SEQ ID NO: 188758 - DNA, 409 bp, Glycine max
  unsure (1)..(409): unsure at all n locations
agcttcatgatgaatcaagatgattcattatgttttgatgataacaaagatgataacaaaagatgatgacaaaggtgatgacaaaaagctcaaaggtcaatcaaagaatgagttcaagatgttcaagatagaatcaagaacacttcaagattcaagaggaaagttgatttcaagaatcaagaatcaagattcaagagatcaagattcaagactcaagattcaagaatcaagagaaggcttaatcaagataagtatgaaaaggttttttcaaaaactgagtagcacatggattnttctcaaaacatgtttaccaaagagtttttactctctgataatcgattaccagattgttgtaatcgattactagtagcaaaattgttttgacaaagttttcaattaaatttacaac

SEQ ID NO: 188759 - DNA, 329 bp, Glycine max
aataagcctaaaaatttttttttttgaaatcaagctattaagaagcaattgagaataatgactaatgagaaattcagctattaagaaaaaattattgagaagaaggtatttgaggaaaataggccattaggaaaaagataattacaaacaagtaattatgaaaaaaatcatgaaaaaacatgattattaagactaagacagactaggcaaagccactatctgccctataagaaagagaaaatgaaaaccaaattcaccgatcattctttgaagcaagctcacaagaaacagcagaagattatcctctctctttatttctcctaaatatt

SEQ ID NO: 188760 - DNA, 310 bp, Glycine max
cccatgataatcctttaaatcttggagggcattctttgttttcaataaagtatagcttcctgaactctgatgatcaacatgagaagtggactgaggggcaaatgaacttttttgggatctcccacatgaatttaacctcaaacactttctcaacaagtacagttcatccctcctaccatgacttattgctaatttcacaaacttataacaatactattcttcttcaaccttgctttatagatccagcatatctagatgctattactattagtactcattgtgcaacaaagagaatataacactccacctc

SEQ ID NO: 188761 - DNA, 418 bp, Glycine max
  unsure (1)..(418): unsure at all n locations
tggtagaattttctaaaagcttacaagctttcctacttataccaganagaaacattttaaagagtgtgtgcatgacatttttgctaaataaactagggtaggccataccttaagtagaataagcattataccttaaatgaacaacctaacaacttaattatatttgaagccctagctcatacaagcatgattgtgtataaaggaattgaatccaatgtaatgattcgtatcttatgtgtgtgtacgtataaatagatggatagagaatggataatataatatgacaatgcttgtgaggagaaaaaaaaatcgagattaaaagactcgcttgaaaattcacttaagtaatggtggcgatgaaatattattcttattaagacaactgtgtcactactattaacattacataactttttta

SEQ ID NO: 188762 - DNA, 463 bp, Glycine max
acacatcactctttaagacatttcgttacaaatgtggcacacagatagtgtcacatatccaacattactatactgatcttaaaaaggtggttctctcaatgctaatgacttgaacctacagaattccaacaactcttctggacactatcatttcttgacatgtataacgtagctatatatcgttaaccagtttatacgctacataacatactgtttgttatgtgagagactatatactgcttctagatccagtgaatagataaacttgctgtagtgcgaattaagcgaccatcctgtgcgtgctatggtgtgcactacagactgtacgcaccacggaagctcacatcctatatataactgacctatgtgcgatccacctgtactgctcacttggaggagacaactgtgattatagttgacaacaacgagaaaaagatgggttcacataattgccatgtaacat

SEQ ID NO: 188763 - DNA, 341 bp, Glycine max
gctttaagacgaatatgcccacatcgctaaggacattcacacagtatcctcttgttttaaattggcacaatttgtgtcacttcccaatatactaacaataaacaaaatatcctctaatctaatactgaattatgaatccatttcctttttcccttcattcttcactgcgtccgtacgaagatgttaaccgaagaaagctgttaaatatgttctttttgtggcctttaactagtcggtggtgtggcagaaaattgctgtgtggattttttgcctctttgtggctattagtgcctacaactgttggagttggtaatcaaatctatatatccaagtctctgtgt

SEQ ID NO: 188764 - DNA, 394 bp, Glycine max
cgcattgtgtaatcgatacactgatctgtttgtctattactagtgatgggttctgaataaattaaaagatggaactcttcagatggaccgttgactgttgcaaattggttgtaagtttttctaaaagtgcataactcttctaaatgagcctctcggccagacatgaagattctataaaagcacgactttgagttgcttttaaataacacttttacaatagatcttattcaatcctttacaagccttgaatctctttgaacttgttcttcttctttgtgcaggaagctattcaaagttttctggttttctaaaccttgaaaacttgtgctattcattatattcatcatttctcccttaggcaagaagaattcagcaaggactaaccgcctgaatt

SEQ ID NO: 188765 - DNA, 442 bp, Glycine max
  unsure (1)..(442): unsure at all n locations
tctaaaggcacatagatgcacataaaaatacaaaaccacaatgttntcaccaggttgggagtaattttttaaaatcaggattgacccgaccggtttgaccgtgacttggtgggttggatttgctgtcaagtcagtcatgcaattggtctgggatgaccaagtgcaatccaaccaattttgcaattaaatcgacaacccattgattcaagttggatcatgtcccaagagagaaaatgacaaattggctaatgtggcgggcttgttggacaagtggcctcaataccttaagagggggtgaattaagttttaaaaatttcctactaaacttcttttggtcccttttaaatgatatatgatagacttagaatgcanganaagaagaagtaatcaatctaataaatgttcttttaaatgcacaagacaaagtatactgcaataaaat

SEQ ID NO: 188766 - DNA, 283 bp, Glycine max
gagcagcacggcgcaagagcccaagacatattgctggcccaagcacaagaacaaaaacgaacctaaccagaacaccaaaaaacaagagagcccaacatatcaaacagcaagacagaatcaagacgtcgatcaaggcggagctgcctgcaagaatcagtggatccaacccaagaagggagacctaaggacacactcaataagaactaaagttgcatcaaaccaaaggacattaatgacatgctacaacacacagaaacaatcaatacaagaataagcatcaaaa

SEQ ID NO: 188767 - DNA, 432 bp, Glycine max
tcagaataaaatataaatacttaatttatattggttcattccttatcttgaactacgtccaattttccttcaattacttgaaggattctctatgacacttttaaattacacaagtattttctatgacacttctaacacatccttaatctcccctagagattgataaatgcctgtgtattctttgatcaataagtagttttggctttccaaacaacaatttgaatgaaattacaatttcaaatccatttctcacatagaggatgtacaatgtagaacaaatgataaaacaactttgctaagcaaaaaaatgacacactaaacactcgatcgtgtttaattgtccagagcaagaatgtattggagcacattcacaacacttgaaaatcaccgattgcagagatgttctcatgtactaaagtgtggtgttgtctg

SEQ ID NO: 188768 - DNA, 420 bp, Glycine max
agctctacgtaagatgtctggaaatgcatcttaagctggttgtactcttatatttttgaatcaaataagatataaggtacttgttcttgattagtctaactttcctttttagaagattgcatacatttaattatgagtgctgtaaattagaactgcatacacaatcatacgagttcaatatttatatgtgatttgttaaatctctagcttgtgtcaatatgatttatttattttatttgctctgtagattggtgtctattatggaaatccagaagtgactagtggtggaattgcattgaagttctttgcgtcacttcggctagaagttcgtcctacagggaagataaagtctgtaagctcaataacactgtcacaacataatcttttatatcatcttcaaccttgctagttcccagtatc

SEQ ID NO: 188769 - DNA, 417 bp, Glycine max
ggggttcctagggcctagaatgcattcgggcactcattttatattcttcatgctgtccctatacatataaaacagtcccacaacccaaagctcacaaaaccatgctcatatgtcgttgaggcatttcaccgagcacttggtgggcgcatgtttaggcacgaatatcaagagaatggggacaatgtggcatgcgccattacttcagaatacaccctaggccaaggccatcccttacaacccctcaattcaacaaaaacaagcaacaatttgaggataaatccctcatgtttcttagcaaacacatgcaatttagagcaccaaaatacatcaatggaaagctagatagcccaagaatgaggtacttacttgttggagacgaataatagagcaaaacggaatcaaaaacgcaacaaatgg

SEQ ID NO: 188770 - DNA, 425 bp, Glycine max
  unsure (1)..(425): unsure at all n locations
agctngtaggattatggggtacccgtcatatgtggtactatgtggcggtcgggcgatggtgcaagtcgactctccatatccacaaatcacacataaaaccaccatccctagttgcccaccttcaattgagctcacgtactcccacggagcccttatcctcgttcttctcaacaccggatccccatcaatcccgccaagcttccacaacatccaagaaattcaacatccaaacatcatgaactatcaaaaccaagaaaatagggcagaggcagaaaactctgcccataacacaaaccaataccacagctttccttactcaaataccccagtaacattctcttcgttgcaatttgttcaccgttggatcgactccgaaattttactggagggccctagtacataagtctacattttgaccggtggga

SEQ ID NO: 188771 - DNA, 414 bp, Glycine max
  unsure (1)..(414): unsure at all n locations
tacatagaaggttcgttcctaatttctctacaatcgcatcttctctcaatgagctggtgaagaagaatgtggcatttacctgtggtgaaaaacaagagcaagcctttactttgctcaaagaaaagcttactaaggcacctgttctagctcttcctgacttttctaaaacttttgagctagaatgtgatgcctctggagtgggagttggagctgtattgttacaaggtgggcaccctattgcttattttagtgaaaaacttcatagtgccaccctcaactaccccacctatgataaagagncttacgccttaataagagccctccaaacttgggaacattaccttgtttccaagggaattgtcattcatagtgatcatcaatcacttaagtacattagagggcaaagcaagttaa

SEQ ID NO: 188772 - DNA, 410 bp, Glycine max
agcttcttgaaaacaagctatgctattgttaatctattacaataaacgtggtaagcgattactagagagtaaaaactctttgagtaaaggtaaggttaaaaattcatctgctactcaatgttctgaaaaactttctaggacttatcttgattgattcgtttcttgattcttgaatcatcaacttgattattcttgattcttgaatcttgaattcaaacttctcttgattcttgaggtgttctttactcaatcttgaactcagaatcttgagcttttcgtcatgatctctgttattatcaaaactccttgaatcaatcttgattcatcatcatgaagcttgcttctacatagaggagggtcatgggcagcaaacttctttggctcgcatgaagaccacagccagacgtcat

SEQ ID NO: 188773 - DNA, 407 bp, Glycine max
  unsure (1)..(407): unsure at all n locations
ggtgatattcttcactattcacttttgttccttctattttctcagcttcaaattcacgagtactcttgatgttttcctctttattcactccttccacttcaacctttttgtcagcaatagtgcatgtttccaatttctctggctccccagatccacgatattcttttgtctcttcctgtggttgctcaatcttttcttcatcctttctcagaaaaacttcagagacctcaattcctttgtccttttcaataggtacctcaacattttctccagctttagcttctccagaatgagtggatttgttgacatctgtatcttccacactcttgacatcttgatttccattacaacatcctgnttcttctctatatcattatcatccttagggtgtaatcagcttcttgcat

SEQ ID NO: 188774 - DNA, 410 bp, Glycine max
  unsure (1)..(410): unsure at all n locations
agctntgaatcctcctcttgtgacttatgaatcccgacgacaaatacaaccatggttatcaaaatctcgagttaactcgttaactcttacgagtttacgagtccacttgtcttttgcgagttaaaacttgagtaaactctttttttagtagactctgggcaaactctataaattctaagtaaactcggtagaatctcgagtttaccaccgaatcaacaagttagcaagttaaaaaaattagaccaaaatttaagttattttttattgttttttgtctgtttaacattcaacataccttcatttagtgtgttattctaaaatacaaaattctcacctttaataatatcaaacccttgttttctaataacatcaaaccctcgatgagaatgatctaccactacgataacgtc

SEQ ID NO: 188775 - DNA, 464 bp, Glycine max
  unsure (1)..(464): unsure at all n locations
acgtgacactatgatactaagctttgttccttttataaaaagagaagttctgaaactcatcacgttgtctaaaaaaggccttgaggtggatccaagtgctctgatcattcattagcatattcatgttttggtggcatactcaccactgtttgtttctttatggaactcaccataactaaaaaagcgcaaaggcacccttataacactcgatccagaagtaagatggataacgaagagggagtgcaagaacagatgaaggccgacctatcggccttaaaagatcaaatggcttctatcacagaggccatgctaaaacttcaaaaaactatagaagataatgctacggaggccgcttccaatacagctagggaagtggaaccggtgctacagcccgcaataaacttgggccgagacaaanacgcgacagggtttaatcggaggtatagtcctcaagcctaccttat

SEQ ID NO: 188776 - DNA, 412 bp, Glycine max
agcttcaagggaagagagagaccttcttatcactttgcatggtcttgaaagaggagttagctgcttgctcaaggtccaaaaaaaacttgtctcagcgtttatgcgagacaaagaccaccatgttagctatcattagcaagtaccaaagaagaactaaatctagccacggcccacgagcacaaagtggtggacgagtatgcccaagtgtacgcggaaaaggaggctagaggaagggtgatcgactcgttacatcaagaggcaataatgtggatggaccaatttgctcttaccttgaacgggagtcaagaacttccccattactagccaaggccaaagcaatggcggacacctactcctcccccgaggagatccacggacttctcggctattgtcagcatatgatagacttaat

SEQ ID NO: 188777 - DNA, 452 bp, Glycine max
tacaggcgcgtacaaataggtgctacgcccatgatagatcatctgacccgcatccggctaaagacattaaagaagcactcctagagggtagcctaccatgtctaattgtgctctatgaaaatcctccttctacttgtgtgcgcacttgaatgatgtattgaattcacctaggtgtatatgcaactatcgaagtttatgaaatgtatacattacgcggaataatccacatttttgcaaagggttttgcaaaaaaaataaaattagttagctcgactacgcgagcgtgtctgacgagaattttaaaagatggggggtgaagccattcttggccctatttctatcccaacattgaagatcacccaagatggtaccggagttctcgaatccagcagacccaagcctccattagtgcatttctgcttgcatgtttgcatttgtgttcatctcccaca

SEQ ID NO: 188778 - DNA, 412 bp, Glycine max
agcttgaagcctgtaaaatatttttttttttttttattcctcttttgtctatgtcaaaaaattgcatttggatttgttacttcaaggcaccaactttgtaagaatgggaacatgataaaatttactataacacttcattgccaagaaaaattttactgacattatgctccttccttttcgcgtcttaaaaaattcccttttcagattggtcctttcctactctaattgctcgtctagatcttgtgcagttactattggatatttacagtgcaacaaacttatattaatcacgataagttaatgttgaactgtaatgttgcaaatgcttgatgattctgaggatgtttccaaagatgaataacaactcatgcatctctggaactcttttatgatgaactaacgtgtctcatac

SEQ ID NO: 188779 - DNA, 310 bp, Glycine max
tcacctgatctcaagcaactgcaatgatgtggactaacctatctttgttaaggaaatacagatgggatgatggtaagagccaactctcgaatacaattgcgaccgagtataatacgcggcagagactgcaatctgtgacactatttcttcgatcaattactcataagagaagtttccaagcagagacaagcagccttgttgaacacctctcatatgcatgagctcgactgacacgccccaatgcagaccaagacgagcttgtcactaaagagtagcaccccgagaaactaacatccagcaacgaaggtag

SEQ ID NO: 188780 - DNA, 414 bp, Glycine max
agcttaggctaaattaggctaaacttttgttttctgcttgagctgagtctagtcttacaagagggatatgaggacgaagcttggattgattcggtctgatgagggatcgaggtttagtaatttaggctacaacatagaacacaagagcatgattgattagagaaatatatttatatgcatcagcttgtttgttagaaagacccaacatttctacctactgttgtcacttttacttactttgcattttatagtttttagcataaaagttagtttaaattctgtttgaaattatcaatcatacatgttctctcaacattgcttcatttctgaacttaattcaggctaacattagtttcctatgttcgatactcggattcatccatttttaattttaaatacttgatgatccgatgc

SEQ ID NO: 188781 - DNA, 395 bp, Glycine max
  unsure (1)..(395): unsure at all n locations
nttcgcanagcttacggtataatctgggacctagctctggcagaagtctccacagaggccattgcctccctcgcccagtattatgactagccgatgaggtgcttcacctttggggacttccagctatcacccatggtggaagaatttgaagagaccctatgatgccctctagggggaaggaatccataccccttctcaggattctatccctctctagctagaatttctaagatagtccaaatctcggggcaggaattataccactgaaagcaagtcaaaaatggggtggttggagtaccgagaaaatgtttggaggcaaaaacaagaatcttggcaggtaaaggcgaatgggccccgttcatagacatcctcacacttttgatcttcggaggagt

SEQ ID NO: 188782 - DNA, 414 bp, Glycine max
agctttcttgagagaattcctatataagctagagcttagctacatacacctctctaatagctaagctcacctccttgagatgagaagctagagcttagctacgcatcccctataatatctatgctcacccccatgccaaaatacatgaaaatacaaaaaaagtccctactacaaagactactcaaaatgccttgaaatacaaggctaaaaccctatactactagaatggccaaaataaaaggcccaaaagaaggaaaaacctattataatatttacaaagataagcaggctcatacttagccaatgggcccgaaatctaccccaaggctcatgagaaccctagggccttcccttggatctctggcccaatctacttggagtcttctctatccaatgcccttgtagggtaggatt

SEQ ID NO: 188783 - DNA, 392 bp, Glycine max
tctaggctcagcaacagtttttctaagtgtgtttcttgtctagcgggtaaaaaattctgaggtgtcaaaaccaaggcaagaggaagttggaagataccaattacgaaagataaaatccagcaaaccaagaggtttcattgatattttaattcatatttttgacaaaaagaaagccaaattcccacccaggtatatatttttttttgatcagcaaaaataagtaattatattaatgaagtaccagaggtactctaaagtacagatataggggtcagatatttggttccatggcagacttaatgtagtctaacatagaaccaatctctgggtacaaaaatataataaactctagtaacagtcttacattacaccctgagctcctactaaaacac

SEQ ID NO: 188784 - DNA, 365 bp, Glycine max
agcaaacaacaaaacttttttatcggagccgatgagcccgcatatacgagacgctcaaatggacaccaaactctgagcaaaacaaacgacaataactcttactcggatgcagaaagagtcccgaaattggcggacgctcgaaaagaagactgaagctctgagcgaattcaaacgacaataactttctactcggaagggcgaccgagacccggaatatatcgagacgctcggaatcgactatcgaagctctgagcaaatacaaacgacacaaaggatttactcggatgtctgaatgagccccgaagcatatcgagacactagaaattgaataccgaagctccgagaaaattctaacgacaataact

SEQ ID NO: 188785 - DNA, 344 bp, Glycine max
gggttcaaggtacttacccgttgaagatctaagaacgatgtttaacgaatgaagaacgtcgaagaacggttgaaacctttgcgaatatcttcacggaaaacgttacggaaacgtttcggaagcacctcggcttagattttcttcacggaaacaatttttccaagcaaattctaaagagagagaagtgcctaaggggctgaaccctcttcttcttcacttcctcccctatttatagcaaaataggggaggtggttgccgcccagctcgcccaggcgagctcagctcgcccaggtgagccaggttgcttccttcagaagcaacagccttctcgaggaatattctgg

SEQ ID NO: 188786 - DNA, 398 bp, Glycine max
  unsure (1)..(398): unsure at all n locations
agctntcactcgaatgttcgattcggtgattatctcatctagacgctcgaaatcgagcaacggatgctctcgagaaaattcaatggtcatacgttttcacacagatgtccgattcggggtcatataaaatcgagacgctcgaaattgaacaacggaagctttcgagaaattcgaatggtcataacttttcacacagatgtccgattctgggacataacttatctacacgctcgaaattgaacaacggaaactctcgagaaattcgaatggtcataagctttcacactgatgtccgatctggggacataatatattgagacgctcgatattgaacaacggatgctctcgtgaaaatcgaatggtcctaactttccacaagaatgtacgattctgggaca

SEQ ID NO: 188787 - DNA, 428 bp, Glycine max
  unsure (1)..(428): unsure at all n locations
ttacagcagaatttagtaatgacccactaacctagaacttctattacttaatgccattaacctagggaattaaaaaaaacttaatggctgagtgtaactgaaattgtggcaaccaaaagtcacccccaacagccaacaagtcagccaccatttggtctcccaaaaggctgatgcctaagttgccaattgggcccttattacaacttgaactaaacctaactaaagcccttttaattgattaacccaaaacatatttttggtcagccaactttacaaggattgggccattatttagacaaactaaacactctaaaaattgagacaaagtggtgtcatctagtcctcctccatttgggccatgatacaactcacaaccttggacttttctccttgaaacttgngcttgtattcaaatagtatggacagca

SEQ ID NO: 188788 - DNA, 419 bp, Glycine max
  unsure (1)..(419): unsure at all n locations
agctntaaatntgcgggagtgtgataattttgttacataggtatatttaatggttaaatcatacaaaaattgttagatttcctttattttattgcttatttttatgtgaataatgagaattctaacatccttcaaattataggccaacaggtgtttaattcgggaaatttatagtactttggtgttatatttgctgcagaaacatagaataaagcttggaagagaagttgaagatctgaagattctcgcttagtgcagagcactctctcatcgcacaaaagtcacatggagaaaccagttatcaagtgaaggtggcttatcgcgagtcgtgcgctaagtgcgtgaccaccgactcactcactaagtgcgacagtcgcacttaacgcaaggttgcgtaaattctaagatgatttcactta

SEQ ID NO: 188789 - DNA, 453 bp, Glycine max
  unsure (1)..(453): unsure at all n locations
tctgtccctgaganactggttcccagaagacaacagggttcgtttattgctgaaaaccctagccttgcaacaagtcctagggaagtagacacggagatggacaagaaaatccgcagtatggtgagtagcattttgaaagaagcctctgtgcctgaagctgatgaagatgttccaacatcttccaccccgaatgtttctatgcctgatgttgagaaagatgttccaacatcttccggcccaaatgatgaagtactctcttcccccagcaaagagagatcaacagaggaagatgatcaagccgcagaggagacccctgcaccaagggcaccagaacctgctccaggtgacctcattgacttagaagaagtcgaatctgatgaagaacccattgtcaacaggttggcacctggcattgcagaaaggttacaaagccgaaagggaaaaacttccatc

SEQ ID NO: 188790 - DNA, 411 bp, Glycine max
agcttaagaaatttcttgcagatcgatggttgttttatacccgttgacccttggggttgcaagttcctcttacggaaaattaactatactccctcaagattatcaacaagtacctgtgttaatgttatttcaaatgctgtgtcgtacaccatcttggggatgatggatttcttattcttttttaatttatccaagttttgtggaagttaattttttagcagtgtgtgatggtggaattgcagccacacactgcatcatttctagactctacccttgtctgtaacttatcaccctggaacttatacaagatgtatctggatcattttgctaacaccataacttttttactacgacatgaattaattgtgatggactggtctaagatcctatgatcggtgaaagaaatgattc

SEQ ID NO: 188791 - DNA, 373 bp, Glycine max
tgagacttaattgctttgttcttcccataagcagtagtcatttgtgcactctcacccatctccattacaagcctttcttcttcctgaatacacatggtcattaattcattgatagaccatttatctttatgtgtgttgtaggaaatcttaaacggcccatattcatgcgaaagggtgttcaaaatgaaatgcactatgaaagactcagacatatcaacctctagtttcttaagttgagctgaaatatctcgcattttcatgatgtactcacacacacctttcacactggtgagccgaagagaagaaaacttcatgatcaaggtgcttgctaaagtcttatctgtagtgatgaacatggtatcaatggccttaa

SEQ ID NO: 188792 - DNA, 438 bp, Glycine max
agcttaccatctatgctaccggaagtagttttttttacttaaacattcaacactaacaattaacaacttgtgagagttaaaatcacagtaaatacttcaaagatatcaggccactgaaagaaaggtcatgtatagaggcattcgcataacgttacaacatatgcccacgttattgcagtacaaacatcacatttcataattatgtttttgaatcaaagatataaatacctgagctcgaggcttcagcacaattgactttccatcaatgaccgtacgaccacattgaatgtcgaaacagcaatgaccacgggatcaacaatggctaatatcgctcgcaatggaatttgaaaatagcatggcagcataatttagagtttagcaaattacataataaggctaaatgacattataaataatatatgtgattgccccaaaata

SEQ ID NO: 188793 - DNA, 404 bp, Glycine max
  unsure (1)..(404): unsure at all n locations
atactcaagctatctagggaagctcatatagtgcttcgcaaagtacagtttgttgcttcttgacgctctgaacatattggatgcctccaccataataaatattctggcactcccttatctaatgaagcattgcccacaatgtgtttgaactttcatgagctcgcccagcatcataggcttaaaacgtgagggactctaatcaatatctacgtgacgactggacgcagactactaatgaggactgcacctaattcatatcaaccgttgaccactgtgaactgcagtgtgcgctatgaatggacaaagcataggataatcaccagatgcctataacgcatcatgaactgcgtntgctcgaaataccttttttaacataaaaatacacttgtacccttgtacctgta

SEQ ID NO: 188794 - DNA, 345 bp, Glycine max
ataatctcaaatgggtcatgaattcatggaacttaattattaaagcgaaaaatgtctctaataagggttttatatatacgattgcgtgcggtgatatttccttttggtatgacaagtagattcctaatggacttctttgtcatgaggttcttgatgcatacaaggagagagagctagtataaatatcagaacctcgcaaggaagtttcccaaatctctgcctcccttattgctcaaccaacaattacatatatagggagcaaaaacttattatcatactaatacatggatcccctcatccactactaacagataggataagctagcactagtccactacagcaag

SEQ ID NO: 188795 - DNA, 240 bp, Glycine max
cgcgcaaacagaaaaaggcaacacgcgggcaaaaagcacaagaaaggatgaagcagaggccagcggacgggaaatggcagcaaaatgcacagcgaaaccacaaagatacccctcgcaccaccgagagagagcgccagaggaggaccgcaagacacaggcggcaaaagagaggtgaaaacacacagacagacggccgaagaaccgaaaggaagaaaggacacaaacgcacaaatggaagac

SEQ ID NO: 188796 - DNA, 403 bp, Glycine max
  unsure (1)..(403): unsure at all n locations
agctntganaaggactatttnttaccttctcgctaagccaatttgctggcttagcgagcgttcgctaagcgtaacactcatggactatgtgcgaggaagactctggaagaagatgagttgtacatgttcgctaagcgcactgcttcatctcactaagcgcaccacttcagttcatccgctaagcgagaaggcacgcactaagccgaaattcactaatgtgtgctaagcagtccataagtgtgcttagcgcacgagcacgaacaaggccacctatttaagcctgaaatcagattttagagggagagtttggactgggattcatagctttgcatgtttagggtttctagagagagaaaggttcaagttccagggagttttgagatattttgctgtgtgaagatct

SEQ ID NO: 188797 - DNA, 453 bp, Glycine max
ctttatgatgaaacatagcatgtacaacacaaaatttgtatgaatgagagagactcttgttgtttgtatgtctgaaatgtttaacggcttttggactgtaccaagtagattttatctaactattaaattgtgaggtcatcttatcaagtgcattatgttattcaagtaagcagaacaatttctctttatccaatttcaattcaactcacccaaatatgacagcattccacaacattatgttgttatcctgaggtgccccactgattcttgcaggcgggtcttgttgcaacctcttgaaatctctcatgagccttttcctagcaggagttgacattgatatcacctataaaaaccaacagccacaaagagaaaacagaaataacttcatatttctattcaaacacgattaataaaaggagaaatctagttcattatatgcataagatgcataac

SEQ ID NO: 188798 - DNA, 400 bp, Glycine max
agcttgtaaataataatggttcatggttgtatgatgataggtaaggattcaaacgtaacagtaacaaaataaaaaataaaaaagacagagataatatttatcccattgttatttgtacaaatatggattgttaaaatatgtggttacatgatacggagacagtgagactgagtaaagaaatgatatttgggcaatgcattatttgaaacgaaatctcctcatatgacattgataccacaagtgccagtaaaacttgtggcctcttattctaccaaaaatacaaaacccttaatggtttcgtggcaatcacgtgatgacaatatcgtacccgttcccaaccacttttgtaacgtctataattacagctcgaaaattaagatggaattaatataccaaatga

SEQ ID NO: 188799 - DNA, 388 bp, Glycine max
tccatgataagatacaatgcaatgaacatgtcttatcttttattttaatcgataaggacactattaaaacacgttggtagataatttgcgcactatctttactcattattggtcatgttcttcaattatgttaggacaaagatatacaagacaggtgtaatatttgtgatatggtttctgaatttttcattacttattatgacaatttttttagtttgtgtccataacaaaaatcacatttatttccggctatacaacatcaaattcatgtttcaatatctagacaaagtacaataaattgtatgatatttgaatataattgcatcgccttattactcttacctttttaatatcctgacatgggttaacaacattaccttgatgagtt

SEQ ID NO: 188800 - DNA, 412 bp, Glycine max
agcttttcttcttgctgaacacacatggtcattaattcatttatagaccatttttccttatgtgtattgtatgaaatcttaaatatcccatattccagtggaagggtgttcaaaatgaagtgcaccaagaaggactgaaacatatcaacttccagtttcttaagttgagttaaaatatcttgcatctgcattatgtactaatgcacacctttctcactagtgagctagagagaggagaacttcatgatcagggtgctttccttgctaaagccttatctgaagtgatgaactggttatcaatatccttaagcaagtcttacactttttatgctggtcaatagaaccacatatcctaaccgagattcttgtcttaatgaacatcacgcttagaccggtggatcgctcccaccac

SEQ ID NO: 188801 - DNA, 331 bp, Glycine max
  unsure (1)..(331): unsure at all n locations
ttcagaaaaggtaataaaactcaatggattctttatattttcttttgancaagacaactatatgataactttatgttacataggtcgttcctgaaaatcattccaattttttgtagacaatctttgaaattgacattatggaaacagaactctggcatgaacctcagaaatattatagtcgttttgagaggtactctacctaatccttccttttactttcagtttccataactcctaatagcatgtcgacaagtgtgtattttcatgttccaccatcattgaaaagcttatagtaataacttgaacatccgtgacatgatttcttacttct

SEQ ID NO: 188802 - DNA, 342 bp, Glycine max
  unsure (1)..(342): unsure at all n locations
tattgctctcttctcgagaccgttcatcatttctgcttctgaatctcttggagatggagaccccctgttctgcattgttattaacactaatgctagacatgtggctactgtctttaacaactgtcagcatctataataacttaactccaagatcttgagaacgatctgaaagaactggataagctacatatccatcatctgatagtaagggcatgagcctcgtagagagagcgctcactcacacaactattatgatgatctcacactgagtagactcaatcctgggtggtatgagaagaacgctgnagatctgcaagctttctaaattaatgatcttattac

SEQ ID NO: 188803 - DNA, 456 bp, Glycine max
  unsure (1)..(456): unsure at all n locations
tcttagtttcagatgatgcagatgggcttgtagctacctcatgcactcctctaatgactatggcatcatttctggcgctaaattgttgggagttggaagccatcttctcaattaaatttctagcttcagtaggagtcatgtctccaagggctccaccactggcagcatctatcatacttctctccatattgctgagtccttcataaaaatattggagaagaagttgctccgaaatctgatggtgagggcaactgacacatagtttcttaaatcgctcccagtactcatacaggctctctccactgagttgtctaatacctgagatatctntcctgatggctgtggtcctggaagcagggaaaatttttttaagaaactctcttaagtcatcccagctcgtgatggaccatggagcaaggtaatacagctagttcctttgccactcctctaatgaat

SEQ ID NO: 188804 - DNA, 432 bp, Glycine max
  unsure (1)..(432): unsure at all n locations
cctgcgagcgtgcaagctatgcgaaggcaggtcgatgctttatattaaatgatgcaatcctaccccccaagggtattggatagaagactcctataggattatgctcaagctgctaaagaaggccttggggttctcatgaacctaacggttgattttttgagcccatgggccaaggatgggtccactcttctttgtaaatattagaataggttttcttcttcttttgggccttgtattctggccattctaatagtatagggttttagccatgtatttcatggcattnagagtagtctttgtagtagggactttttttgtatgttcatgtatttcgtcatacgggtgagcttagctattatacggggtgtgtagctaagctctacgttatcatctcaaggacgtgagcttagctatgatacaggtgtgtgtact

SEQ ID NO: 188805 - DNA, 439 bp, Glycine max
tgaaggcaaactggatgcattggttaacttggtaacccttctatccttgaaccagaaatttgtacctgtcgcaagggtctgaggtttgtgctcctctgctgaccaccatacagacctttgcccttccatgcagcaacctggagcaattgagcagcccgaagcttatgctgcaaacatttacaatagaactcctcaacctcagcaacaaaatcagccacaacagaacaattatgacctctccagcaacagatacaaccttggatggaggaatcaccctaatctcagatggtctagccctcagcaacaacaacagcagcctgctccttccttccaaaatgctgctggcccaagcagaccatacattcctccaccaatccaacaacagcaacagtcccagaaacaaccaacagttgatgctcctccgctacctttcctctaa

SEQ ID NO: 188806 - DNA, 413 bp, Glycine max
ttaagtcacctgctgcatgcatgctaagctcttaactgcaaaacttttttatttgattagtatcctcgtggaaccttcactctacaaagacactgacaaaaacttatctactcctttatggacaaagtatgacaagctgggggcaagcaaactttatttccatcataccttggatgcaactgtgatcgtattcccatatcaactagatctcgacggtattcaagccatccttcgtcttgccttgaatgctaatgagccgtccaatcacactgtcacaaacattgttctccacatgcataacatcaatacaatgtctaatgttcatatcagaccagttccgaatatcaaagaagatgttccttttattacattgcaactcttactttattcttctttagagattcccattaaag

SEQ ID NO: 188807 - DNA, 390 bp, Glycine max
atatatatatgtgtgacctatgtgatgttggcgatgctgttgatacctagggagtggagcatgttgagagtttccttgtcgacctcgatgtggtcggcgtttatggcatagacatcggggcgaagatcgacgcccaagctcatactcgatgcaacacttcttgctatgtgaggggacagtgaatgacaaagagaacggaatggaagaaaatttttatgatttagggctgcccaacctcgcccaattataacatgccaccgtaacaacagaaagtggaaatacaattttttgtagaccgtttctaaatagcgatcttgtaagcattataaagtatttattatgagattgccttaaaaaggacaacttttaaaaaatggcatcacttactta

SEQ ID NO: 188808 - DNA, 419 bp, Glycine max
agcttctatttaagctgaaccattttatctatatagacaagttgagtgttattcagaaaattagagtttatctcttttatcttagtgagagtgattctcctaaattcttgagtgattcaagaacaccctggctgtatcaaaggactttcacaacctttgtgtgttgccctcgctggaaagagtgattctttccttcctttcatcttcacccttgttctttcaaaccacaattccataaaatccacctctgcccagaattatctcgcggccataactcccgttttacgcactcaaattaagtgattcttgagcctaaattaaatttcaaaacgagaactttcacctcgttttggaatcacctcatttggagccctgtagcttcagttattgccatttctatatttctgtccagccaccac

SEQ ID NO: 188809 - DNA, 399 bp, Glycine max
cttgatgccaacattggagaggttaatgaaacaacgagatgatgcgctccatgagaggttggatcaaatggagaatagagatcataatgaagaagaaaggaggagaagagggaatgatggtgttcctagacaaaaccgaattgatggtattaaactcaacattcctccatttaaaggaaagaatgatccagaggcctacttggagtgggagatgaaaatagagcatgttttctcatgcaaaaactatgaggaggaccaaaaggtgaagcttgccgccacggagttttccgactatgctcttgtgtggtggaacaagctacaaaaggagagagcaagatatgaagagccaatggttgatacatggacggagatgaaaaagatcacgaggaagcggtatgt

SEQ ID NO: 188810 - DNA, 419 bp, Glycine max
agcttgcttctacactttatggtccaatttttttctttattcaaatatgttcaaggcaaatctgatttgccagaaagcacatcagatcgtcaagtatttaaaattaaaacggatgaatccgagtatcgaactcagggaactagtattagacagggttgaattcagaaataagacattgttgaaagagacattgataattgatggtttagaacaaagttaaactaagtctaggctcaaaacaataaaaaatgctagtaagattgacagcagtacgtaaaagtgttgggtctttctaacaaacaagttgatgtatataaagatgtctttatattcaatcatgcttttatgttctatgttgtaacctaaattactaaacctcgatccctagtaggctgaatcaatccaagcttcgtcctcag

SEQ ID NO: 188811 - DNA, 430 bp, Glycine max
cttctacatgaggtatctgagtgagatagaggatgtttacttctctagttatcccaaaaaagcgtaagcaagacatctaacaagaacattttgtcaacaagaagcccaagtttttcatggaacccaagagcaaagaacccaccttcatagttgaagttccaagacggaggaagacaagggctactcgcctaaatatagccctaactaaaaaaagaggtagacccaccttaacaattagatggatccaacacctctaaaagtgatgtcaaccccccttgctcctcaacaccaaataactccaccattcttgtaaacaacaagcgtccaccttcatctcccatcaacctctccaagttcaaacctctaggttccacctggaaggctacgtggagaccatggaaaaagccctcacctaaggaagttacaatac

SEQ ID NO: 188812 - DNA, 415 bp, Glycine max
agcttctataagtcggaggtcgattatgtttctgcacaaacctttgacaaaaagttggctaacatagcaccttgtggtgacaaggaggctgttgtctaattatgtgacaatgttatccactctgtcaaactccatccgacctatgggtttatatgggagagggaggaaatcgatgctgttccctctgaagatggagtcattccaccaactgggtggaatatgtatgaagattaatatgactgaggccactgcatgggccaaaattacggcttatatggccgaaaatagactaaatacggcctttgaggctgagtctcaacaaaatatggcagtcgaagccaaaatcgaagatcatgataacaaagaaacaaaggatcgaagactggattgcatttatgatgatgagccgctgggt

SEQ ID NO: 188813 - DNA, 403 bp, Glycine max
  unsure (1)..(403): unsure at all n locations
tanatggctaatgtaataaatttttgcccaccatttattctaccaattaagtcttctttttccctcgggaaaataatttgtctaataaatgataaagtttttatgatttacttactgcttcatacatgaataactntaccctcaattccaggttattgaagagcacttatcataagaaacatggtactgatcgtatatgttttactcatcatccaagctctgttatatgctcttcaaagtacactttggagtctactggaggttgacttctttatatgacaattttattttacagctaatcagtggttactggctacatattatgattgcaattattcacttcttattccttgtgtgccagaatcatcgcggtatttatcaatgtatgataatcgctgcctac

SEQ ID NO: 188814 - DNA, 413 bp, Glycine max
agctgttgtcaaagcggagtatttttttgatatatgtggaaagccctacgcgaggcggttcacgacctcctccaagcggttggtggtcgtctagcgggtggtgtgttctggcatgacaagggcaaaggtagaggcatggtgtgatggctgtgtggagaggttggaaccgtaagaggtggtacacatccatggggggcaggtcggatcaaattgttatgaactgaacgtaggtgagggccttgtattctaaaacaaagcgaacatctataataagctattgatattggtgaaaaattcatcttgatatcattcatcatacccgaacgatatatatagtatacttgaggtgctaaatgataaaggttcatacaccctattacagaaaacactactattatatcagaatatcatac

SEQ ID NO: 188815 - DNA, 391 bp, Glycine max
  unsure (1)..(391): unsure at all n locations
ggtttctaaaagaccagttgcaagaacccatattttttctaggaattaattngatagtagtgtatgtgactttctgacggcttatagctccaacaaaatgtgtaaattctttatcccaatgactgatgtaaattaaactaagaatacaattgtggcggtttatagtcgctagtaattgtctatacatgttctagcaatctttaaatggtcaataccaacgactatttaaaatctgtcaaaagctgtttctgacttgtgtattcctaacaactattttagccgtaagaattgtcatttgtggtagctctttgcagtcacaaattgcattnttagccaccacanatcataacttttttttgtagtgtgagttgcttttcaagattcttctgtt

SEQ ID NO: 188816 - DNA, 417 bp, Glycine max
agcttgtctcagcgtctatgcgagttatataccaacatgttagctatcatcgacaagtaccaagaagagttgggtctagccacggaccacgagcatagaattgcggatgaatatgcccaagtatatgcggaaaaagaggctagaggaagggtgatctactctttacaccaagaggcaaccatgtggatggatcggtttgctcttaccttgatcgggagtcaagaactttcccgattgttagccaaggccaaagcgatggcagacacctactccacccccgaagagattcatgggcttctcggctattgtcagcatatgatagactgaatggcccacataattagaaatcgtttagaaacttgtgtggtctcttagaccttgactagatatgacttccttttggaaataaaatgagtt

SEQ ID NO: 188817 - DNA, 438 bp, Glycine max
  unsure (1)..(438): unsure at all n locations
tagcccatatgcatatgtttgcaattcaaaacttatcctcttttttacctgaatatgcacagatttcatcattaaatctaatggaaatgttctagagacaacgttaaccataaaacaagatttatttacagaatttactccaaaataaccataaattggggaactatacatgctttggaaaatgatttctatacaaaagttagtcgtataaagagactaacagacggtcagctcccttttccgacatcagagattcaatntatgaggcaggccgttgggacattcgttgggtggctgacacatcgtgtgaaacctataactaatgaggtatagtggtttccctctcaatattaattgcgacgaacattttcttgaaagctatcacaatttgaaattcattaaacattgtcgaatcacaaatgcttatgcttaaagggt

SEQ ID NO: 188818 - DNA, 405 bp, Glycine max
agctactatccacggatcaagttatctttcttcttggtgtccagcctgactaaaaccacattatggaaatgtagaagagatcttcgcactcaccctagccagatgcgttcttgcacatgtaatgctctaagacacacaatagactgatcttgacgtataatggagaaaagcgcaacgggtaatatggtttgctcatgaagctgggttaggcttcttggtaaggataactgatgtgatgagatttggcttactgtaactttcttcactttcactcagtctgccctgcaagacaaaagtacgagtgcttaattataatgactattatggcggagggtgacctatcacttcggcctgcatgctctatgggagtctcgtcctcttgtttaacgtacgatgatacctgta

SEQ ID NO: 188819 - DNA, 425 bp, Glycine max
agcttggacaaaggcagtgcattcttgtttatatccgcgatagatctcttataaaaacctacatgtccaagaaaagaacgaacttccagctcataaacggggtaaggaggagaattaataacatcaatcttggccttatcgacctcaatacctctactagagaccaaattccccaagactataccctcacgtaccataaaatgacatttctcatagttaagaacaaggttagtctcataagaggaaccataaatagtgaaatcatccataaacacctccatgcaactctcgaataaataaaaaaatatgctcaccatgcacctttgaaaggtgccaaaagtgttgtataggccaaagggcattctaatgtacgcaaatgtgccaaatatgttttggcattatcatcaattatggcattagcattt

SEQ ID NO: 188820 - DNA, 406 bp, Glycine max
agcttgtagctataatcaacccatcactttcacattgcatataatttctctcataatgttgccgaaataagacaacaattatataggcattacaacttaaacgtgaaaaataaataatacaaatgtttatctagaagtagctttaatcaacccatcaccctcacctgtcaaatcatcatcatcatcatcatcatcttcaccaccactgccaccacctttattgctttcaatatccaactatttgggctaggccagagcactctcaagcccattcacagactattggtaaagaatccctccaacaatagtaaaaagaaaacaaaccaacccaatggtaaagaatccccaaataagcacattgatcgccacggtgagaaacttgttgatgtagctccatgtggagctt

SEQ ID NO: 188821 - DNA, 370 bp, Glycine max
tgtgtggattcatgtgtaggaattatacatcctatttgctctgtaaatgtgtgggtatcacttgtatctgtttaataaaattcttttcttttgcttaataaataaataaatatgcgaatattatatgacaattttatattattccattctagttatcatatatatatatatgatctaatcataatcttagcatactcccatttataaaaagacatattcttaatatatatatataaatgtaaattttaattccaaatttatttacattaattatgctttttcttttataatattaacacttttctctacatgattgaaatttttatttttaatattctcctaaatttgaaagcgcatgatgtatgtaaca

SEQ ID NO: 188822 - DNA, 339 bp, Glycine max
agcttcaagctgctcaattgctctatgtttctgcatggaacggcacaagtctgcattgtggtcatcttaagaacacaaacctcaaatccttgcgacaagtacagaattttgaatcaatgccaacttggtctccatactaaccaatgcatccagtttttcttcaactttttaatttcacatgatccagataggttttgatctacctcatgcactcctctaatgactatggcatcatttcttgcccttaactgttgggagtttgatgccatcttcatatttaaatttctggcttaacaggagtcattttttcaaggctcaccactgcagcattttatactt

SEQ ID NO: 188823 - DNA, 418 bp, Glycine max
  unsure (1)..(418): unsure at all n locations
gttgatcaaatgactaaaattaattggcatttattatatttatcagatagccaaaccaacttcactattcctagttagaaattccaatattctatattacctgctcattagctgtaggaggaaggcctccaacatacacccgcctagcatgtcatgtagcctgtaaattcagtacatcaaagataggccataatcagggaaagtcatgctaaacttaaaatgaaacttaaataagactgtagtcagtctcagcaagccttcatactcggaaagactaaacttaaaatgttgtgttgacgaagatagtgtgtgtctacatcttttctataatgactctatttcttctcaatgaaagagaatatnttctccagcagcacagtgatactaaacaaacataagcgcaataaaaagatacaca

SEQ ID NO: 188824 - DNA, 421 bp, Glycine max
agcttcccgcatccacacttggaaggatctgattactgttcttccttaggcaatatcagtacaacttcgatatggctcccgatcggactcagatgcagaacatggttaaaaaggaaaatgagtcctttaaagagtacactcagccttggagggacctggcagcgcaggtggcccctcccatggttgaaagggaaatgattaccatgatggtagacaccttgccgatgttttactatgagaaattagtgggctacatgccctccagcttcgtagacttggtattcaccgaggaaagaatcgaagtgggcctgaagagaggaaagttcgattatgtctcctccacaagtaccaacgctagaaggatcgaagcaactggggcaaaaaggagggaaggagatacccatgtcgtcacctcagcgcc

SEQ ID NO: 188825 - DNA, 471 bp, Glycine max
  unsure (1)..(471): unsure at all n locations
tgtctcagcgtttatgcgagacggagaccaacatgctatctatcatcgccaagtaccaagaagagttaggtctagccgcggcccacgagcatatgatggcggacgaatatgcccaagtatacgcggaaaaagaggctagaggaagggtgatcgactctttacaccaagaggcaaccatgtggatggatcggtttgctcttaccttgaacgggagtcaagaacttccccgattgttagccaaggccaaggcgatggcagacacctactccgcccccgaagagattcatgggcttctcggctattgtcagcatatgatagacttaatggcccacataattagaaatcgttaggaaacttgtatggtctctaagaacttgactagatacgactntccttttgaaataaaatgangtggtcccatgtttctactccanaaagctngtgcaaatcaaatcactcccgcattttatc

SEQ ID NO: 188826 - DNA, 418 bp, Glycine max
agcttttgcattgtggctctagctgtactttttttaccacttacctggatgcatatcttagtaggttggatctcactatcatcattgttgttgtgggcctacatccaggccagagtaagaataagataaggccaagaggaggagatgtcacttcaacagcaaaacaatatctatttacatactatgagatgaggattcagaagtgattaaattaatttcttttcacgtatgaaaataattaatgaatgtgttgcacgtgctttgtcatctattaagattaagattaggatcaggatgtctggatataagaattttacatgataaaatatattttttcagttctttctaatataattaaattcaattttggttcataattgttctctattgtttttcattcttaaattttaatatttga

SEQ ID NO: 188827 - DNA, 473 bp, Glycine max
  unsure (1)..(473): unsure at all n locations
tgttattctcctgagatgaatctaaagatcattagagattcttattgaaatatgcattaaaaatggattgagtctaatttagcccaaattttattttaactattttttgtaaagatatttcagtataagtttgtttgtgggtcactcaacataaaaattgaataaattttaatgatactgccatgttaaactaggaaaaatatatgcactaatgtaattntttttatattatcatctaactacaaatgatcatatataattaatttattgattttaataataatcaccttaaaagttttacaaaattgatttctaattaattgtttatataagtattcgttacactgataatatatatctattaaattctagaaatatattggattaatcaaactattaatctcatattttaattcaaaagatagaaacatcgtctcaagtcttatagaatactttagtcatattcctgaacg

SEQ ID NO: 188828 - DNA, 303 bp, Glycine max
taactacacttatattcgcacactcctgtataccaaaaaaaacacttagcaccgctagatctaatactcatcaatcaagaatcatgaaatgggcggcatttctcaaatccatgtaaacatcttgataatcatcatactattactaaaatctgcagattacatcgggataacctcgtacgtgaacggaagaacaccattttacattgtgtaaatgtccaaccgcgatcaaacaggtttaaactaatatttcactagttgaacccatctcatagctactcttcggctcaattggggataatgcta

SEQ ID NO: 188829 - DNA, 313 bp, Glycine max
atgattgtacgcgctctgctcatcctgttatctgggctatacgagacatcttgccatacatagacaggataacgataactcgcctgtgctttttcttccatgctatatgtatcaaagtcatcgatccagtcatgtttgatgacttggaaaatgaggccgcaattatactgtgccagttggagatgtatataccccctgctttctttgacatcatgattcacttgattgtgcatctagtcagagaaatcatatggtgcggacctgtttatctaccgtggatgtacccggttgagcgatacatgcagatcttaaa

SEQ ID NO: 188830 - DNA, 417 bp, Glycine max
agcttctttcctcttagaaacctctaagctttccttttcttcctagaattcatttcaagtttacactgatctcccatggccacatcttccatctcaactaatagtacactcctcattgttgtttctgctaccaaactcatagagttcgatatgcattccgttccctctcttggtttggaggatgagaccaagaagttatgggaaactcaagtcatgatctcgtattctcttactgaaaaatccttttgtaggtccgtaccaccctaccaacaaagtctttccatttttttccaagtactgcggaagaaatccctattatccatgatgatatcattaaaatggatttcatgaacgatggaaaaaagatttttgtttgaactcctcttctgattgaacccaccatgtagcatggttata

SEQ ID NO: 188831 - DNA, 346 bp, Glycine max
tgtccttggttagacatgattggtacatgatttgagacttgtttgtattaatttgggcaaaattggatgagggaaagagtggttttcgaaatctgcactttatgcagaattttgctgttgaaatgtgcagcagaattttgtataagtgcagaaaaatgcttgtatatggctgattgtaaaaagggtagtacatatggggttccggacattatctagcagatcccaacggtcaaaatgtagacttatgtactatagactctcagtaaaattttcgagtcgatccaacggttaacgaattggaacaaaggaaatgttactggggtatttgtatgtgaaaagctgtgat

SEQ ID NO: 188832 - DNA, 435 bp, Glycine max
  unsure (1)..(435): unsure at all n locations
cgtgaccttagaaactangctggaattgacaacggaagctgtcgatatattcaaatggtcattacttatcacacggatgatcgattcatgcgcataatatattgagacgctcgaaattgaacaacggaagctctcgagaaattcaaatggtcataacttttcatacgtgagtccgattaaggtgcataatatatcgagaagattgaaattgaacaacggaagctgttgagaaattcaaatggacataacttatcacacagaagtccgattcaggggcataatatactgagactttcgaaattgaacaacagaagctctcgagaacttcaaatggtcatatactgtcacatggaggtccgattccggtgggtagtatatacaaaaggtccgaattgaacaacggaagctctctagaaattcaaatggtcataactt

SEQ ID NO: 188833 - DNA, 415 bp, Glycine max
  unsure (1)..(415): unsure at all n locations
agcttgtgctagtattatttaagttctttttatcattancaactaggtgtgtcctactatgacttgagaaacataaggtgatcaaataacaagcataaacttaaaagttactaggttgcctcctagtagcgattctttaacatcttgagctggacgcatgatgacttgtcggtcacagacctagtactttgcttacctctggctatggaattggtcacctattggtcggccatgtgtcgtaggcaacgttctaacctttttgtggatgagctgtggggctttggaggtggcgacgacgcgtctggtgcccgctgccgtccatctccaggctgctgtggtgtctcgccttgcgcctgcctgggggcgcagtacttcttgatgaaagccctatttataggggcttgatgaccttgtt

SEQ ID NO: 188834 - DNA, 452 bp, Glycine max
ttaacctcattgtctctcacagtctttagagatgtgatctcttccaatccatgtgaccggattctgatccacttatgatagcctccgatgatcccattactacttcccctaagctctctgtcctttcttcacgccgcatcccatgccttgcgaactccttggagtaccctcgcgttgtgggcactgaaaccccgtgcgatgaaaggcgtgatgctttcatctgatggcactcctactatgggacatccttcgcatgaagatagaatcctgattcttacttccttctagcgagggaaccaattaacagacgcccctccatgctagccaagagttgtgcccaattctgctttcctttatcgacgcttgagcggtgaccttgtaactgatacactggcctaccttcatggagaataaggtgtgaaaccagccacacttagagagccctgtgccaa

SEQ ID NO: 188835 - DNA, 418 bp, Glycine max
  unsure (1)..(418): unsure at all n locations
agcttctnttcccatacatggatggttacttagtttgcaccatttgctttgaggctttgctgcccgctttgtcctgtttccccaggtgatcaacctgaattaataattttttaagaaatcttatattcactaaccataaactcaagaatctggaagaacagaaaacaataaaaagttgaattgtacaataaataaattgattttaaatacagtgtgattgtcagcatgtcttaccaattgattctcatccttctctttagattgcttgacaagagcttggaagtactttgaattccgaatcttctcaatgtcaatatctcctgttgtgccaaaaatgcgtcctggagatttcttagcttgttcaaaagcttggctaagaaaataaagaggaaccaaaatgttgagaagcataaagaca

SEQ ID NO: 188836 - DNA, 442 bp, Glycine max
ctatgatactaagcttgtacacaccttgatctacaataaaatgacacttttatatattagaagcaccaatcagattgtcacaaacaaaaaggcaccgaacagattaaggaaaaaccacaaatgcataaaccaggttgtgacacaacaacttcaagggattaaagacacgtacaaaatataaataggatcagcaaccaaacttgacgcaaccaattcaaaaggcacaaacaacacaaggatacgcaaacgcaagaaattaagatctggattaataccaattgctccaagcataattgaaagtgaataagctctcaaagttgaaatgaattccaagtttattggaggcaccgatcgccaaatctgaataagttcaagacaactcagattattattattattattatttaacccacaattccaaattttgatggtcattcacata

SEQ ID NO: 188837 - DNA, 425 bp, Glycine max
agcttgtaagattatggcgtacccattacatgtggtactaggtggcggtcgggcgatggtgcacaaagtattccacatccacaatgcgcgcataaacccaccatccgctgttgcccacctgcatctgagctcacgtactcccacgtagcccatatccttcgttctctcaacaccggggtccctcatcaattcctctcaagcttccacaacatccaagcaaaacaacattctaacagcacaagctatcacagccaaacaaaacaaggcagaggcagaatactttgccaaaacaccaaccaaatcacagctgttctcacttaaagaccccagtaacaattccttcgatccaattcgttaaccgttggatcgactccaaaattctactgtatgtctataatgcttaagcctacattttgaaccgtggg

SEQ ID NO: 188838 - DNA, 366 bp, Glycine max
  unsure (1)..(366): unsure at all n locations
ntcttgagaaaacttccttgagaagcttctttgatatatctttcttgggaagctagagcttagctacacacatccctcttataactaagctcacctccttgagaagattcctaaagaagctaaagcttagctacacacacctgtctaatagctaagctcacccccatgacaaaatacatgaaaatacaaaaagtccctactacaaaaactactcaaaatgcctcgaaatacaagactaaaaccctatactactagaatggccaaaatacaaggcccaaacaaaggaaaaacctattctaatatttacaaatataagcaggctcatacttagcccatgggctcgaaatctaccctaaggctcatgag

SEQ ID NO: 188839 - DNA, 348 bp, Glycine max
aatcaccgagctcaactgacgatagggccctttcattttcttgcggcgcctgcatggaccattattttcacatcccaatgtccataacccacattcctgtgcccactcaactgactcactactccacgagccatagctcttctctgacacagggccatcatcttccaagcttcccaacatatagtatcaccttcacacagacagctatccagcttacaaacaggaacagcagattacttgccaaaacacacccaaatacatcttttacacacaatctccgaaactttcttcttcaagcggaaccgagatcgattcgaaactttctggaatctctactcttaacctctt

SEQ ID NO: 188840 - DNA, 354 bp, Glycine max
  unsure (1)..(354): unsure at all n locations
ntgtgaagctcctgttttagctatacccgattgtactcatccatttgaagtngaatgggatgctagtggagttggcattggggctgttttgatacaaaacaaaaggcctatagcttatttctcggagaaattgggaggagccagattgaactattgcacctatgacaaagagttctatgccattgtgagagctcttgatcattggaatcattatttgcgttctaatcactctatattgcattcagatcatgagccattgaagtatatccatgggcagcataagttgagtccaaggcatgctaaatgggttgaatatcttcaatctcttaatttctcttccaaatacaaggatgg

SEQ ID NO: 188841 - DNA, 402 bp, Glycine max
agctttatatataaacaatattatctctatttatacaaacacgatttcctcatatcattaattatttatcgctgatgcatctatatatgtacagacttttataaaaaagagaaggtcaaagtatcgttcataaatcatcactcgaaacattaaagtctcattacacaatatgaacgacataatgtaatgtatggtcagaaattttgaaagctaactacatgttgtacaacatctgaattgacagaatttttcgtataacaatgttaaaatgaggtatattgagtttcaaatgttaacttgcactcaacatgtgctgattataagaactacatatagcttaaactacacgttgtaatccgaattcgtgacatcatgatttatcaacttaattctgatgaccta

SEQ ID NO: 188842 - DNA, 380 bp, Glycine max
ttcaacgacaataaatgatcaaggatcgaatgtacatcctctgttggggctagattcatataagaatattcaaacttataaaatttaaaacactcgcattcatattttaaatttattcggatgtgataaggcacaactgtatgaatattgccctgtaaatcattatattgtagatatcacaatgaatcttgcaattgtaatattcttatcacggatgttaatggctttgaaacattaaaggttttccacaataaagaaggggaaaatatgctcttcattgtttatttctttaaaaagtgccatgtgaactgtatagcggtcgttaacaacacttgattaataatcaaatccacaaatcttacgccaaataatatgtttgc

SEQ ID NO: 188843 - DNA, 397 bp, Glycine max
tcagtcttgagccaattcaaacaacaataactttttactccaatgtctgattgagtcccgtaacatattcagacgctcgaaatcgaatgttgaacctttgagctaatttaaacgacaataacatttttctcggatgtctggttgagtcccctatcatatccgagacgctcgaaattgaatgttgaaactcttagctaattcaaacgacaataacttttttcacggatgtctgatagagtcccgtaacatatcgagaagctcgaaattgaatgttgaagctctgagccaattcaaacaacaataacatttttcttcggatgttgaatgagtcccgttatatatcgagacgctcgaaattgaatgttgaactctgagccaatcaaaccaccataacttt

SEQ ID NO: 188844 - DNA, 421 bp, Glycine max
  unsure (1)..(421): unsure at all n locations
taaacattcaacttcgagcatctcgatatattacgggtctcaatcagacatccgagtaaaaagttattgtggtttgaattcgctctgaggttcaacattcaatttcgagcgtctcgatatatgacgggactcaatcagacatccgagttaaaagntattgtcgttagaatttgctcagaggttcaacattcaatttcgagcatctcgatatattacgggactcaatcagacatccgagtaaaaagttattgtcgtttgaattggctcagagattcaacattcaatttcgagcgtatcgatatattacggaactcaatcagacatccgagtaaaaagttattgtcgtttgaactagttcagagattcaacattcaatttcgagcgtctcgatatataacgggactcaatcagacatccgagt

SEQ ID NO: 188845 - DNA, 345 bp, Glycine max
  unsure (1)..(345): unsure at all n locations
cactcttagagtcttagagaggtttgagaactggctgtggatggattggaagacatggattagatgaactgacaacaatacctaccgatccaaagttggaatggctccttatgaatgctaatatagacaagcgttcagaactgctatgctgaggcttgatgatggagaaacggacttcttggacctgaaatgcttcatcggattactgaacagacgtagttgattcgttagaatatgctagcatgtcatgataggcaccagagctactctgatacaatgaggaagccactantatttgatgaaggagaacatgtgtatttgaaggattcttccttagccagactc

SEQ ID NO: 188846 - DNA, 51 bp, Glycine max
tagttcagcttatcatcctcaaacagatggtcagactgttctaaccattca

SEQ ID NO: 188847 - DNA, 416 bp, Glycine max
agcttcactttctcaggcttatcagatagtgctactgaacatttatgactaacatatggtgggcctttctatctaataagtacattaccgttgtcatcatccgccatagacacaacatgatcatcaaggacacttacactgagaatcttgatgagcaaatatgtatgcattatttaaatgcttgtaatggtgcacaataaaatacgttcgtataggacataatcattatacaatatgtatgaattatataaattcttttaagacaatatggcgaaaggtataatataacttatataaatcaaatgagttttatttctagcttggaactgactactaacagaatgacaccaccatagaaaaatgttacaatgcaactaaatactcgatttcgcagaatttgatcgataggaaaaaat

SEQ ID NO: 188848 - DNA, 372 bp, Glycine max
  unsure (1)..(372): unsure at all n locations
ntcaaccaanataaaaactataaactgaaatntaaaatgtgaatcataaacataaatctaaattataaaatgtactaaagacatgataataataaaactgttcaaaaagcagggaattcaaaatcctgatcttgtcaatgatccagtgcagagtccatggcatgctcattcagctccagtgcagtagtgcttgatggtgaatcctgagaaagaggtaggtttggcactggtgcagatgactcaagttgagaagaagatatgtccaacactgcagtggaaggctctggtgtcacctgtggggtagctgctactggatcagtctaaaaaatgaaaggctcaagtggagtggactttgaggcctctagaatgtca

SEQ ID NO: 188849 - DNA, 411 bp, Glycine max
  unsure (1)..(411): unsure at all n locations
tagcttctagccaaatggacttaccttgtattaattcctttgatagccctgttgagccttgtttccctttccttgttatgaagctcactacaagccttaagtgaaaaaccatgatattaccatatgcttaaggaattttggagctttggaattgttttgggaataagagtggggggtttttgtttcattggacaacttgttttgatggctatgcttcatgatgtattttgggccatacttgatgtacattgtatattggctaaatgttggacatgctgaatgaaatgtttctcagaggctaaagagtaaaaaaataaaaaattcgtaaaaagaaaaagaaaggcaatatagtngagtgaataagaacttgattggctcaaacatgatgacacttcttggtctactcttcat

SEQ ID NO: 188850 - DNA, 424 bp, Glycine max
  unsure (1)..(424): unsure at all n locations
ntatcatcattgtctntacgagccccactgcacatttgaccatgctattggtgaagctgggatatgagatttgccttctccaagaaaatgaagggcataagggtgccatttcgatcctgggaattgtggacagggacttctccatctctctcgttgatctcaacccccaagttattagttttgaagtttgtaaagggcgtttgtaatggtgctactcctccgtgtatgggagtcctcatcttgggagcaactatggtcccaccttaagcagcttgaggctatcatctccttcccgtggttaatgtgtggggattttagtgaagttgtccttccttcggaggatagcggnggctatttctcgacatctacggcagagaagtttcttgatgtcatcaatacactgggaataattgggattgaagct

SEQ ID NO: 188851 - DNA, 415 bp, Glycine max
agcttgcttgtgttgcttctatggacgctagatctttgagcttcaatggggtcctttaatggtgattttccaccatggagatgcagcggaagacaaaggaaaagaggtgagaggaggcgccatccattaaggaataagccatggaagaaggagcttcaccaccaagatgagccttggatacaagcttggagaggatgcttcaatggaggaaaagaaagagggagagaaagagataggggaagcacgaaattgaaggaataaaagagggagagaagtggaactttgaagtatgtctcacaatactctcattcatcaaagttacaacaagtgttgttacacatgcttctatttatagactatgtagcttccttgagaagatttcttgagaaaacttccttgagaagcttatttgaaa

SEQ ID NO: 188852 - DNA, 426 bp, Glycine max
taggctcttgtgttgtgaaggcctcaccctctcccgatggagaaggctggactcctagccaagccacctggctaaggaactcctccatgctcatcataggctgcagacctgagctctgtaagctctgcatgatgatcacttgtcctctgtgcagactctgcaagatagcatataatgtctttgaagtaaaggaagatggtcctgtagaaagagctgtaataagagctggtaagggtgcacatgcagatgcggtagaagaatgtagaactgtagtggaaggagctgctgatggggtaatgtcagaagatgggagaggctctgacctcttccccttggccttgcgaggccctctaaaagtgatggaggggtcatcgaggttccggtagtttttcttcatgtagacccaattaatggtgggactgagac

SEQ ID NO: 188853 - DNA, 416 bp, Glycine max
agcttcttctccaccacccacaaccactgtttgccgccacggaccgccgatgttctccgttgaaacctcacaccgagaggaacccttcaatcggagcggaatcttccaagcttgtctcgcggtttcgatagagaacgaagcccaatctgaccttcgcgattttcatcaaggtaaccgtgattctacgcttgttccttgttagattcagcttgtctttgcatcttttcttactttagaaccaccattgtatgtttttgcgcttcctttgaaaaaccctagagaaagagactttataaaagttatctttttatgaaatgggtgttattttcgtgaccttcgctgaacctcgatcacattggcgtgatcggaattttaaaatgatgttccttttgtagaatctgaaacgcccttagcct

SEQ ID NO: 188854 - DNA, 382 bp, Glycine max
tgtacaagaaagtgtcattcatcggttcgaatcgtcttatatcttgaaactggtaattaagctgatcgcatgaaaatgctgtctgttgaaaagagtgctcaggcaatcccccacatacacttgaactgctagaatgatctttatcatgcacagatggtgcaagctcaatttgattactgaatctctcttcagagaaatccatgataaaaagatgtttaggtgaattaaaaccttcagttgcacttattccccagtttgaccaatagtctggtgaaggatgcctgtccaataaattctgatctctggtgaccagataatcattaatgcacgtcccatagtaccaatccatgatcgagtatctgcacattacatatgatccaag

SEQ ID NO: 188855 - DNA, 417 bp, Glycine max
agcttggaagtgtaaattgaatttataagttaaaaggaaaaaaggtggggctccaatttaaaaagagagggtgaagttgaagtatctggtgggcggtgaagggggcatgagtggctatgaggtttactcgtgaaggccctaacaatcaatgacctaaccttaaaaagttatcaactctcgccacgtgttgctttagagtcccatccaatcaaatgccatccacgtggcatcttttttttcttctatgttcattgccagcaaccaaaatgctcacacgtgcacccctaacgtaattgtctcctttttgttttggtaaataataactgttctacctacctctaaattctaccatggataaatggatatacatgattccaacacagtatgtgattttagtcaattgacttgttgaagaca

SEQ ID NO: 188856 - DNA, 440 bp, Glycine max
  unsure (1)..(440): unsure at all n locations
tgaaggataatgctntgagagttgccaatgacatctctctaagacgccaccactgcaccctagagatatgatccataacaattaagtttaaagaatccctggctagacttcttcccctttccaaacttatcatgatcagtcatgatatcatcattgagaagcaaattttggacttccttgcttctctaaatatcatgaagaagagctctaacattagcagcagtcacctccatggatacccatttttgccagaaaaccatctcattcctcctccaccaaattttgtctaaaacaacaccttgtttcttttaaacaggcctatagagaatgaatgcctgacaaattggctggccagtatggtctatgcaagaagaccattctttgttggttcactaccttatcaatactctgtgatttagtgataatacgagtgtcattta

SEQ ID NO: 188857 - DNA, 325 bp, Glycine max
agctaaagtaggattactacgtacgttactcattcctctgacggcgagccgtatttgcaggccccctctgccattgataaagcccctctcaaagttgacatgcaaaatccaggaggccacttcgggcatgtgcaccatgacgtgtcctagcttcaaattttggggagtacacccatggaaaaagaacataagaaatagtaaatgaatatagaggctggattctcaatcttgatcctcagtcttggcacaactcattagatggtgattggagcaatagaccttttatctttctcccaaaagatcctcgtggagtaaacaaacatgt

SEQ ID NO: 188858 - DNA, 367 bp, Glycine max
  unsure (1)..(367): unsure at all n locations
tgatggctattcancgctctcagtcagaccctgtgtttattttatgcatgctaggctataaaaaagggctatcagcccgcctttacgtgctaagcgcgagtaactgatatttggcttatcaccaatctcgagcttagcacataagagacaatcgtctcgcttagcgagttgcatacatgctgggtgcgagctggcgtggaaaaacactcttcacgcatgatctcagacgctaagccactgttgtctcgcttaacggtttggactcgataagcgcatggatcacgcttaatgaaacaacaaatattgcaccttcataatttcctttctatacctggagtacggtgaaataacattacattcgtaagaa

SEQ ID NO: 188859 - DNA, 417 bp, Glycine max
agcttgaggcttgccatgtaacattctttgtcttttctttggtcgacatgcacgattatgatggctttggtgtctgaagggaacttcatggcgaggtgaggggcggagacaattgcccctaaaacgctcaacgaggggcgactgagtaagatgttatatgacgtatgggtgtgtattataagaaaacgtatctttaagtctttttataatgatccttgatggtcaaacttggtatacaaccaaatacttcctttcgtcccaaccctttctccgacacagccaaataggggtcatcgtgtgggaggatcttgaactcagtaatccccattcttttgaaggtattccataataagatgtcaacagagcttccttggtcgactagtgttgttctgactatgcagttagttgatttgacac

SEQ ID NO: 188860 - DNA, 368 bp, Glycine max
  unsure (1)..(368): unsure at all n locations
ngcctcgaagacgtccatgaaggacactgcatcctaatgaacttgttccgctccggagtatgatagtcaccgctttacgagtgctcgtcaccaacagcgcttcgaggccatcaagggatggtcgtttctcccggagcgacgcgtccagctcacggacgaccagtatactgatttccacgaggaaatagggcgccggcggtgggcatcactggttactcccatggccaagtttgatacaaaaatagtccttgagttttatgccaatgcttgtgccacagacgagggcgcgcgtgacatgagatcctgtgtaaggggtcacaggatcccgtttgatgccgacctatccgccaactcctacgatattcatt

SEQ ID NO: 188861 - DNA, 408 bp, Glycine max
tctgttggagatacctctattgagggatattcttattgttgagtgctaggtgcaagccaatatggaggcatcttaataatatttggttgcattggatgtgagtcatttttgggagaggaagatggactatggcattttttggtagagccttaaaggcctcaggtggcatgtgctcatgtcatacttttgccatgtagatacttgaacattgttggtttccctttcaacaagtggacaaaaataattttaaaatatgggggttcatgtgtaagattaccattaagggttccttggagcatccttcttaacagtctaaaggatgaagatgggatgacatgtactgtaattgacatgtttgcgagaggaagatatagaatgctgtgactcctattatgatgagagctgatc

SEQ ID NO: 188862 - DNA, 383 bp, Glycine max
agcttcttatccaaggctcatcttggtggtgaagctccttcttccctggcttattccctagtggatggcgcctcctctcacctcttttcctttgtctttcactgcatctccatggtggaaaatcaccattaaaggacctcattgaagctcaaagatccaacctccatagaagccccacaatcaagcttccatcagttgtagacccctaagaccaagaaaagacagctttcacatgtccctttggtgttgttgcttattgccgaatgccattcgggttatgtaatgctcctgctacgttccaaagatgtatgatggctatctttgctgacatggtagagaagtgcattgaagtctttatggatgaattttcagactttggtgca

SEQ ID NO: 188863 - DNA, 341 bp, Glycine max
tcttatccaaggctcatcttggaggtgaagcttcttcttccatggctaattccctagaggatggcgcctcctctcacctcttctcctttgtcttccgctgcatctacatggtggaaaaccaccattaaaggacctcattgaagctcaaagatccagcctccatagaagccccacaagcaagcttccatcaagtggtaatcagagcacaagagcttcaagtatgtgctccttaaacctccattaatctttttgctttaccttctcttccattgatgtttcttcatttatctccatgtatctcctcacatatcttgttctaaatagttttaacatgattattt

SEQ ID NO: 188864 - DNA, 417 bp, Glycine max
agcttatcataatcgattacatatttgtttttgagacaacaactaatttattcaggagtctctactttaatcaatatcgattgctcctctttctataagtgtttaagaagtatacaagaagactttaatcgattactttgaggatctaattgattacattgttcttgagttgtttccaatttttgggaagaatactttaatcaattgaaaagataatctaattgattagttcattgaaataatcaattacattgtagatttaatcgattacaggcagttataattattttctttataaatagttaccttttgttctcttcaaaatacaatgaaatgaacttctgagtgagcttgagtcacgtgttgatattatttaaagaaataagagaagaaaaatgcttagaaataatgactcac

SEQ ID NO: 188865 - DNA, 462 bp, Glycine max
gtgacctgtcaggcttagtgctgaacaaaaatttcaaaaatcttaatgtctgaaacattagtcccgcttagcgcataaacgcgcttaacaggttcatcattttcgttcatcagtagggatgaacgcgcttagcgcgacatggtccgcttagtgcgatcatctggaaatccaaaaattaacagttgcaatgaacatgctaagcacagcaagcgcgcttagcacgttcatcgcgatttccaaacagaaacacatgggtcttcacccctttcagccacattgcccctaatgggcttctaagttacctaaaatcctaaaatgactaaccctaaagctaaaaaccttaacctaaacagcaatgcaagctaacaaagtaagaaatcatctatcctatggtttgaaggatgaaaatgaaaatgaagaatgaagcaagaacaaagtaggtagttagtttaaacacacaac

SEQ ID NO: 188866 - DNA, 470 bp, Glycine max
  unsure (1)..(470): unsure at all n locations
aagtcacctgacgcatgcaagcnttnggaaaattcatcctcataatcttcttttgattgacaactatacccttcacatagaccttatgagtccaacgttcagggcaacacttgctgtcttgtgaaattatgaaaattgaggagcagcgcccgaaaacgaaattagaaacttagaaagctgtcggagtattatacataaccaaaattattttttatgaaggatatttgcgctccacacaaaaaattaaaaccaaatatttttcaaaatggaatatataaaagagaaagatgtttgcgcaccattggtgtaaaaggctntacacaaacaaccaatcacaatttgccatatcatacaatagttctttaattaaatcaaataataaataatgttaaaaagataacaaaacatgattcagaaacacttatataatccacatagctctataatcccccattgattatataaaatat

SEQ ID NO: 188867 - DNA, 379 bp, Glycine max
  unsure (1)..(379): unsure at all n locations
catcatttcaaaccatgggaaaaatggaaacgagaagcatttcactattttcgtatgggtggaacatcatgatcgaatggcactgcagagcctaaaagttacacaaactctgctgcatcatttctacattacactacacaaactctgctgcatcaagcgtttattcaaaaagccaaaaactatgattatgcttcttgagtaacgctccctaaatttcaaagctgaataacaagccaacttggcttgtgtctttggatgtggccacacgcactgctactaaatatcactccattctctcaacaaatatacatanngagaaacaagacatcccactaatgatttataattaatttaagttactccatgattagttgcctgt

SEQ ID NO: 188868 - DNA, 398 bp, Glycine max
  unsure (1)..(398): unsure at all n locations
actcttcaccacatacacatttattatatcattcatnnnaaaatatngaagatacaaaatgcatcctttctattccacggtggaggttctgaatacctactttcttccgtctctatctctatctgcgggttggggattgctcatgcgcacatatcctcgaacttgtgtttaaattggaatcccgactctgtgattttcttggaagaaaatctcactggctcgttctaaaacctaaaaatccaatgtgtactattagcccaacaatagttctattcttaatgccggctgtcgatacgatttagaagagtttttaaaaattcttttttattgaaaatataaaacttttttctaatagaaaaggctcttttaactttgtatcaaaatgtaatgctttcatt

SEQ ID NO: 188869 - DNA, 385 bp, Glycine max
  unsure (1)..(385): unsure at all n locations
gagagaagtggaactttgaagtgtgtctcataagactttcattcatcaaagttacaacaagtgttacacatgcttctatttatagactaggtagcttccttgagaagctttcttgagaaaacttccttgagaagcttctttgagaaaacttccttgagaagctagagcttagctacacacactcctctaataactgagctcacctccttgagaagcttccttgagaagattcctaaagaagctagagcttagctacacacacctctctaatagctaagctcacctccttgagatgagaagctagagcttagctacacaccccttataatagctaagctcacgcccatcccanaaatacaagaagatgcnaaaaaaaaagtcccta

SEQ ID NO: 188870 - DNA, 217 bp, Glycine max
ctctgaagtctgaaatctcaacttctaagaccaaaaacaactactacccccgttaagtaccctctgaaaaataactactcccacgcttgctactatcccgcaaactgaacatttctataagcactaagcctgagcagaaacctaacaaggaacagcaaaagaactttaatcagaataccctgcaggtaattccagttaaccagatttcattgtatct

SEQ ID NO: 188871 - DNA, 265 bp, Glycine max
  unsure (1)..(265): unsure at all n locations
tggggcttgcgagaaaaaggngcgcagacgaaacgcaaaacccattaatgcagcattcgataaagctttccaaatctagctaaacacctacaaatagaggcatgtcgaacataaactaatatacattcatcggtacatatatatatatatatataagtaagtgcatgagcaaagctcacaaacatgtgggaacatacattcacttatttttgtggtggaagtacatcaacaaattaaaacttaggtatatcttacgataatattc

SEQ ID NO: 188872 - DNA, 468 bp, Glycine max
  unsure (1)..(468): unsure at all n locations
actagctgacaattaacccactatcttaagactgttatttatatccatcggtattatattatatttaaatgatacacattgaataaaagtgagttattnttattcggtgcaagtgtaattntttatattgtcaagtactagaaatcatgtagatttattttagatcatttataaaattcagagacttattaatctataatgaataatttgtaaactaaattacactntaaaagtaattataaacattcaatagataatttaacttcaaaccataattatgaatggcctcttttcataactataagatngtntagctntatttcttatcttanaataattgatatttagaaattcaaaattaattaaaatctttccattatatccttattattatctcatattaatgatgtagcgctaagactaagatattatataaacacgttctagtttnacatagtactacatcta

SEQ ID NO: 188873 - DNA, 316 bp, Glycine max
  unsure (1)..(316): unsure at all n locations
ctcgcccagtattatgatcagtcgttgaggtgcttcacttttggggacttccagctatcacccatggtggaagaattcgaagaaatcctangatgtcctctaaggggaaggaaaccatacctattctcanggttctatccctcattagctagcatttctaaaatagtccaaatctcggcgcaggaattagaccgccaaaagcaagtcgaaaatggggtggtcgggataccgagaaaatgtgtggaggcaaaagcaagaatcttggcatgtagaagcgaatggacccccgtcatagtccgtctcgcactgttgatct

SEQ ID NO: 188874 - DNA, 396 bp, Glycine max
  unsure (1)..(396): unsure at all n locations
agctntgttctttgtataaaatgataagttctggactcatgttaaaacttcagataaccatagaggataaagccaccgcaaccgcttccagtacagttagggaagcggagccggtgctgcagcccgccttgaatccgggcctagatagaaacacggccgtgttcggtcgaaggtatagtctgcaagcttatccttatggcctacctccgaacttcaccccccgtgccaccccggaagagttaagccaagcccctacttttgaggggcaactcccaccttatgaagactatcccgggcaagacgatggggaaggagatacccatcttggccccctgctccacctcaaagatccgtccccgcatgaactaccccaaccgaacatagtccgtcataccc

SEQ ID NO: 188875 - DNA, 385 bp, Glycine max
  unsure (1)..(385): unsure at all n locations
ttctctctctagaaccctagacattgcaagcttcgaataccagtccaaactctccctctaaaatctgattttaggctttaataggtggccctgttcgtgctcatgcgcttagcgcacttatggaccgcttagcacacattagtgatttttggcttagcgcctttctcgcttagcggatgaactgaagtggtgcgcttagtgagatgaagcggtgcacttagcgaacctgtacaactcatcttcttaggggtcccgtctggtnttaagaattgaatgcgatctatgcacccttagaggtccnnctctgtggtttgtgcatgttcatctcttccttctatcatcgggaatctcttttggtttgtaaagttaatcttaatcgatcatt

SEQ ID NO: 188876 - DNA, 228 bp, Glycine max
agcttctcatccgtagagtgcgcgctcattatattttgtacatcttgagaagggggttgggacaagtcgtccctttatacttgtcgaagtccggcactttgaacttcggaggaataacaacatcgggtactaagcaaagatccgtcatgtctgcgaacggatagtccccaaatccttccacggccctcaatctttcctcaaggagatcgagcttcctcctttcttcag

SEQ ID NO: 188877 - DNA, 450 bp, Glycine max
  unsure (1)..(450): unsure at all n locations
agctngcacaaattatataatcctttcattaattaatttttggtgggttctagtccaaaaaacgtaataaaactaaggtcatgctatcacttaatgtccaaattagatggaaataactaaagcatatgaaaggaaaatggttcaaaaatgttgatcggttctcgaaaagtttaggaaccaaaaccataattgccgaaaaattcaaggatgaaaatcataatttacccctatattattactattaattaaattaaaatataaaatgttattattagttagaatatttaaattatgattaattactataattaaatatttcataattaattggtaaataaactaaagagtgattttttcacatacacatntttttccccaacacatatgcctattaacatgtanacatttacaatgcaacanatatgcaacattctgtggagacaaatgtgc

SEQ ID NO: 188878 - DNA, 433 bp, Glycine max
  unsure (1)..(433): unsure at all n locations
acgaagatgatgatctcagnctttttgttaattgattcaacaaatctctaagagttagaggaaatcaaagaagaacaaatttcaaatcanagaaaagggcanaagattcatcctctactccaaaatgttatgaatgcaatcaaccaggacatctgagggtnttgatgtccaatttcaagaaaagaatggagaaatctgaaaagaaagctnttaatgataagaaagctaagaaggcctacattacatgggataaaaatgatatggatgtagaagcaagcttcatgatgaatcaagattgattcanagaaatttttatgataacaaaggtgatgacaaaaagctcaaagatcaagaacaattcatgataacaaagatgatgatctcaagaatcanagaatgagtttcagaatgtcaagattgaattaagaacact

SEQ ID NO: 188879 - DNA, 446 bp, Glycine max
  unsure (1)..(446): unsure at all n locations
agctttacagcccaagcacctcattacatgatctttagccaganaacaaccaatcctctgcagccaccatccctggagttgttgatttttcggaaggaagattagagacaagattcgatgaggttgcttatcctgngccagtgccagttctaacttatccaccatctccagtggtggatccatcttctccagcaccagaagcagctctcccacttgccctgttattattataattatattgtttttagtaccttttaatgattatgcttgcatagtatagcaattatatggtttttagtacatatgaattagtatgttttgcattacactttttgttgtgagaaattttgaaaatcctgaagcatatggaacagtttgacttgtatttgatgataatgcagtgaaacacttttatctttttgtgaaaattggtgtatgaattgatt

SEQ ID NO: 188880 - DNA, 353 bp, Glycine max
  unsure (1)..(353): unsure at all n locations
atataggnggcccttgtcgcgctcgtgcgcttagcgcaattctggaccgcttagtgcacattaatgaaatttggcttagcgtgtgcctttctcgcttagcagatggacagaagcggtgcgcttaatgagatgaagcggtgcacttagcgaacctatacagctcatcttcttccagattcttccttgcgcttagccaatgagtgttgcgcttagcggacgctcgctaagccagcggattggcttaaccagaaggtgataaacacctacttttaaagctatgcctattaacctgcaattgagaggaaatgagtatttaacacacacaatagaattactatgattgtgtacctatc

SEQ ID NO: 188881 - DNA, 439 bp, Glycine max
agcttgctctaaatgtacattgatgtttttatttatgggaggaggtctgttgccatttttgttttaagagtaatgtcccactggtaaaactaactttccaaatgtttgccttcgcaggaaatggccccgaggaagcttgcctcaaagaggtccaggaaggacaagacagccgaaggaactagttccgctccggagtatgacagtcaccgctttaggagcgctgtacaccaacagcgcttctaggccatcaagggatggtcgtttttccgggagcgacgcgtccagctcagggacgacgagtatactgatttccaagaggaaatagggcgccgacggtgggcatcactggttactcccatggccaagtttgatccacaaataatccttgagttttatgccaatgctctgccaacagaggatggcgtgcgtgacatgagat

SEQ ID NO: 188882 - DNA, 318 bp, Glycine max
  unsure (1)..(318): unsure at all n locations
gattatgtcanaagaacaatcaaactatgctcatttngcttcatgattaatacaagattgttcacaaacaagccttgattcaagattcttcaaaacaacctttcctacaagaaaggatacaagtcattcatggcacatgtaatcgattaccaattggttgaaagtgtgtaatcaattacacatcctatgttatctattaccagagactctgaactttgcgaattcaaattttatatgaagggncacaactgttcaagaatataactgtgtatcgattcactaattctgtaatcattaccaagagattttaaggaatat

SEQ ID NO: 188883 - DNA, 339 bp, Glycine max
accgataacactccttacataaaataacacagaactctagataacaaaaaagtcaagacaaattacctaaagtgtcgtttgtgtcttacaattagagataatgagtaatgattttgtttccatttgaacggcaaacaacactgtttgaacctacaattaactgagtttgaggtgaggaaaaaacaacagctctttgtatgtttaccatgaaaaacacaacttaccaaacccatcacaatcacaatctaagttgtgtaattaccgacacaacaatgtgtaaacaatgccctctaacgccccgtgtttacacccttgttactttctttttatatttttatt

SEQ ID NO: 188884 - DNA, 440 bp, Glycine max
  unsure (1)..(440): unsure at all n locations
agcttgcatgtctagtgattctatagattataaggtccaagttctagagagttttgagagatttttctgtgtgaagatctgcagagaccagagctggaagcggaagccattctgagagcttgagatgagtttgtgagtggttgtgagatcctaaaggtgaaggagacatcctcaccacttgtatttttgcaatctttcatcttgttcttctctttgttgtaaaggaggcttcccggttatggaatgctaaaatcctctgttggatcttccttgtaggtacttgatgtaaatatctttctatctatttaatgatgtnttgtgtgttctttgtgctatcagcttttcattctagtatgtctttacctcgatcacgtagatgcatgctttgttagggtcattcaacagtggaaactggtctgattctgatgaccttgatagga

SEQ ID NO: 188885 - DNA, 429 bp, Glycine max
  unsure (1)..(429): unsure at all n locations
tataagaaacatcttcttcgatcttggtgattcttgactccatctcattgaagcgcatgtncacttggtattccaaagtatcaaacctttcaccaacaaaagtttgaagacgatcgaacctatcaaaatcttttgaagaagagaggaatcttctccaccatgtccttcttcatcaataggtcgagcaccctttntcacccaagagccatcatgctctttttgataatcaaaggatgcaatgacagccgcgcctattagaaaggatctcttgnatggaacataaggttcataatcaagagggatgttaaagtgttgaaggaagagggtgactagatgtggatatggcaatggagaattaattgcaatgccttatgcatgcgatatcnaactaagtgtggccaatcaatttgttggccttatgataagcca

SEQ ID NO: 188886 - DNA, 315 bp, Glycine max
  unsure (1)..(315): unsure at all n locations
actaagctgtatcgttaccacatttgtatcggtactgaggatttttttgaaacattctcaacagtcacatctntttgtgtggttcttgaatggctatcataggcctatatatatgtgacttgagacacgaatntcataagaagtttttcagaacaaaaagatcttatcctcttataaagcaaaatcggtttatcctcttaccaattccttggccaaattacttgtgattcaataaggaattatttnttcttcttcttcattctgaaaaggggttaagagaccgagggtctctggttgtgaaagaattctaaacac

SEQ ID NO: 188887 - DNA, 351 bp, Glycine max
caaccaccaccataacaaactggcgaatcaagtataacatctgccgatcacattacaacacatgcggataaaatagcatcagttgaatacacactaattactttaaatgctcacggggtattttcgtcttttcgctatgggtgatggtgtcccagcaatcatgctcggtgcacaggtcgctcctctttccattcgaaatcatgttggaacccaagatacttgatgtgctgatcaactgcgccgaaaacacacaccaaggttttgtgggccatctttataaatatcttacagaattccgattctccgtgaaggtagtctcaagagaccatcggtatcttaaggaagaggaaa

SEQ ID NO: 188888 - DNA, 309 bp, Glycine max
cattcctgcttcttattttcaatctatatgagatataatttcgtcgaatgattgtcgttatggattatactaatacttattggtggatttcttctgtttatttcaattttacgatagattacattctatttaatcttatatgacatgatatggtgttgtcccagacttatttctttgacttataatgaagggcttttggtgtgaccatctatgaatgcttcttttgagtatacttggcttgaataaaaatgtaactcttatgcaatagagtttagacagtcaggctgtttcttgtgtatatatctatac

SEQ ID NO: 188889 - DNA, 341 bp, Glycine max
  unsure (1)..(341): unsure at all n locations
agcnggcaaaagctcacaanagagagaatatattaaaatacttacctcgcgntgatgacagactccaacagaggatgctcaaccccgcggcccagataaaccccaacgacaggcacgaaccccagcggcgacgatgatgaggagaagacggcggtcacaggtcgcaaacaatggagaaaggtcctgcaggtgagggagaggagaaaggacctgatagcgagactgaacgcgcggcggggagtaccaaggcaaaaataaggcggacgccaatccacccccaaaggaaaccaagaaatctgaaccaacgaagaaaaaaacaccaagggcccgaaaaaaaaaac

SEQ ID NO: 188890 - DNA, 469 bp, Glycine max
  unsure (1)..(469): unsure at all n locations
tcaagcttccttaagaagattcctaaagaagctagagactagctacacttactctctctaatagctaagctcacctncttgagatgagaagctagagcttatctacacaccccctataatagctaagctcacccccatgacanataacatgaaaataaataagagagaccttattacaaagacaactcanaatgccccgaaatacaaggctaataccctatactactagaatggccaaaatacaaggcctagacgaaggaaaaacctattctaatatttacaaagataagcgggctcatacttagcccatgggctcgaaatctaccctaaggctcatgagaaccctanggccttttcttggatctctagcccaatctacttggagtcttctagccaatgcccttgcggggaggattgcatcactaagtccttatcaatcaaccaaaaacaagtctccatatggatatac

SEQ ID NO: 188891 - DNA, 375 bp, Glycine max
  unsure (1)..(375): unsure at all n locations
aagtaacctgcggcatgcaagcttgcggtggggctatatggaggttgnatttatagcttcaacgagggccttcaatggtgattttccaccatggagatgccgccgacgacaaacgagaatatgtgagaagaggcgccatccactagggaataagccatggaagaaggagcttcaccaccataatgagccttggataagaagcttggagaggatgcttcaatggaggaaaagaaagagggagagaaagagagagtggggagcacgaacttgaacgaatgaaaaagggatagaacttgaactttgagttgtgtccgaccatactctcatttgtcaaagttacaacaagtgttacatatgcttctatttatagactat

SEQ ID NO: 188892 - DNA, 386 bp, Glycine max
  unsure (1)..(386): unsure at all n locations
tatagagctacagacgtcttggaattgatacatacagacctttgtgggccaattcatacaccctcatggaatgggtaacaatatnttatatcattcatagacaattactccagatatgcatacttgtttcttatacatgaaaagtcacaatctctggatgtgtcaaaacattaaagttgaagttaaaataactcacaaaagaaaaagtgtgtcaaccgtggtggtaatactatgacnatatgacggttaggtaacaacgtccgggccttttctatgacctaaagatgtggatcgcccacagacatatgcaggtcactacataatgtgggctgaagacaacanactctatgattgtgagaacatattgcatttactaccaagcatct

SEQ ID NO: 188893 - DNA, 449 bp, Glycine max
  unsure (1)..(449): unsure at all n locations
agcttctctgggcgcgatgcagtgttaattattatttttggcatnnncaaaacaaaggaccgtggcttgccagtgagaatatgaggacgtgttctacaatatttagatgtgcctacaagtgctgagaacttgagattagtttttgcatgaccaagagccacagcaaatactgttttcccacccctactgtgacctgatagaaccagtttgtccatattggcttcaacgttctctggaagcaaatgttgaagctcctcagctatccaatccgcaacttttcctgcatgttccacttcagtgggtccatacataggaagcccatcggaaaactacaatatctggaagacaaaagtcttgttagagaacccagaaaggaatatgttataaacattgtgttagcctaatttattcctcacaatttcatatcaattaaataattaagataaata

SEQ ID NO: 188894 - DNA, 391 bp, Glycine max
  unsure (1)..(391): unsure at all n locations
gccattgaagtctatcaagttcaacgaattgagagacacgttacgagtggcatccttgacaaatctgaattaacgagagatgttgatgtatgctcgaattcagatagttagttagttgattaagagttagttagtttgacagctatgaaggttgttagctacatgtgcagtgtgtataaaaatagtagtgattatgaatgagaagtatatgagagtgcagaagtttaattcagaattctaagttccctctattttttaaatcaantctgtcatcttctcttaatctctaacataaagtgagagagcgcatngtgtgagtgtgtgtgaagagctttccttgctcaacaagatcctctactgcctctgcagctagcatctattctgagcggaa

SEQ ID NO: 188895 - DNA, 454 bp, Glycine max
  unsure (1)..(454): unsure at all n locations
agctntananacatattaatataatagatttctatttgnaatcaacanaaaagatcatttgtaaaacgcttttagttaattgcatttctcctaaagttttctaattgagccattttattcttttagatttcagttatattaattgggttcttcaaaaaaaaaaaagtctagatcatcatattctatatttttcttaaatgagataatttatggtgtccacttgaggagtgtcctctatccatctaatttgatactttcttccgcttatcgcttactcttaactgtgcatttaatttatctgctaaatataatataaatctaactaggaggctttaccacatttgctgatctatattatattattgtactactattnttcaccttttacttttattgtacaactatttttactttttcgttgnttaaaatacaagcgactcggtacctatttggt

SEQ ID NO: 188896 - DNA, 444 bp, Glycine max
agcttgtctcaacatttatgcgagtaatttaccaacatgttagccatcatcagcaagtaccaagaagaattaaatctagccacggcccacgagcacaaagtggtggacgagtatgcctgagtgtaagcgtaaaaggaggctagaggaagggtgatcgactcgttacatcaagaagcaacaatgtggatggaccgatttgctcttaccttgaacgggagtcaagaacttccccgattgctagccaaggccatagcaatggcggacacctactccgccccccgaggagatccacggacttctcaactattgtcagcatatgatagacttaatggcccatataattagaaaccgctaggaaagtttctattgtcactcagatcttgactagttataaactttctgaataaaatgagtttatcccgcgtttctactccaaagatcagt

SEQ ID NO: 188897 - DNA, 375 bp, Glycine max
  unsure (1)..(375): unsure at all n locations
ctcaaggatcactttctttaaggacaaggagcacatgctactatctantttgttcctttcttctagaattagagaatgccatgtagcccgatctcctaatgtgagacaacggtcatgtcaagtactcagtactaatcccataacagatccttcattaaagtttataatatgcagaatctactcacaaagcaagacgacaaatatatcatagagcaaataagaatatctttgaagcaaaactctgcagaaattgttggatgattaatttaagcttacattggttaacctttgctaagaaaaactacttttgacttgaactttactggttatccactacttgagtgtantgaatacttgattcattcaactactttt

SEQ ID NO: 188898 - DNA, 466 bp, Glycine max
atcctctgagtcacctgcggcatcaagcttgagacatgatgagattctttttcttttggaacccaaatgctaagggacaagtgtttgtgctcttattgcaggattggcgtgaatggttgacacgtgtctcatagtgccatgttggatgtcacatgtattttgtgggtcttggacagtacataagctccctaagctctgagccggcttgcaagagaaagagatggtccaatgcccaaggagattgtcccctgtcgagggagtctgtctgatgtccgaggtagtattcttaacaagtagaggatgacgagtctgtcgagcccccaagtgtggatgaatattgtccagtgtcaagtgtggtaacctcaacaagtgtgagagaattgcaggtcaatgtagcttgccaagccctcgagcttggacaagtgttgtctgggctggtattgtcaagttgtccgtgatgggcatg

SEQ ID NO: 188899 - DNA, 343 bp, Glycine max
  unsure (1)..(343): unsure at all n locations
tcattcgcagagattcatttcatacaaagcaatgcactgcatatcattttcaatcaattcactgttcaaacacgcttttggtacaagcaaacaactcaaagtgctgaagatttaaataactgaaacataanaactaaaattaaaataactgaacataaatcataaaataactgaaagtaaactaaaatgttcaagatgtacaaatntaaatgtcctgctcatcctgtggttgctcctgtgcatcattaaggtccaacacctgagcaagtggtgaatcctgagagataggatgctctaagtctggtgctagtgcaaatggtgtggcatcatcangtatgggtgt

SEQ ID NO: 188900 - DNA, 462 bp, Glycine max
  unsure (1)..(462): unsure at all n locations
agctntacagttaatcaacccaattgaatttattcatccaagtttcaacacgtaaaaaattatcattcatgctcatcccaccacaggaatctactgaagatttacaaactgagatgagagtcttcatgcatcaaggagcaaaaatgaaagtatagagcacatcaaggagcgaatttcacataaaatcatgtaaaaccacatctcttgaatggagaactaaattccacgaaagttcatgctccataacatagataactaccatccaaataggcattagaaaagcacatttaatcttttacatctcagaaaaatattgaattaatttgtagaattaaataattgaacaaactaactatagtgtttacacaaaatgacctcacaatggcttgaccaaatataaaaatgaatgcaacgtgcattgtttatgcacagaaataactagcaacaattgtgaacatgcta

SEQ ID NO: 188901 - DNA, 359 bp, Glycine max
  unsure (1)..(359): unsure at all n locations
ttggttntagatgtgtgctntaatgcataggcatattgttattatcctatatctagcaatgatttcattatgatatcttttctttntagttctattaaaagttatcctctgtcgagcgcctaacccctaaaactgatgcatgcatattttctttatatttttataagagttaccctctgtcgagcatctaacccctaatataatgtaaagatgagtaatgcatgaaaatatttacttttactttactntgtaccccattgcccggaggctcttcactatgcgaaggtatgggggagggatgttgtacgcagccttacccttgcatatgcaaagaggctgtttccggattcgaacccatg

SEQ ID NO: 188902 - DNA, 449 bp, Glycine max
  unsure (1)..(449): unsure at all n locations
agcttgcagcgcagattttgtgtgttgtgtaagcggacaacaggaaaattgcttgggttaattggaaaactgtttgcttgccgaaagcaaagggtggtcttggtatcaaggatctcaaaaccttcaacacagcactgttaggcaaatggcgatgggatctgttctacagccaacaggaaccatgggctaaagttctgcaatctaagtacggagggtggagagcattggaggaagggagtagtggaagcaaagattctgcatggtggaaggatctaatcaaatctcagcaactgcagcgaaatttacctctcaaaagggaaacaatctggaaggtgggagggggtgataagatcaagttttgggaggatctttggacaaacactgacctatcattaagggatanatttcctaggctataccagatctcatgccatcaacacgcaaccatt

SEQ ID NO: 188903 - DNA, 287 bp, Glycine max
gaagatacctctatagattggcaacagtatatatatccgtggatacttgcattaacgattatcagcaacaatggagatcattgttgaaagtgataaaggtatgattagtgttaacgtcaacaattttattctttcattgttatatgtgaatcaaataaataacttgaactactagtcctctctttatgaggaataattcagttgatcttcacacaagaccacattttccatagatggcgatctcttacattacccaagacacttcaaggcattctctacttcctgaa

SEQ ID NO: 188904 - DNA, 285 bp, Glycine max
ttctcaggaaaattgtgagctactatagctttcctcgtattaaaacccgcataatagtagaccgtagaccctctgtttgagcaaatcttcgcaaaagcaggggcatgaaagtattatgtaacgacatttagttaccgactgtatgttaaaatttttattacaaaaagaaaggaaaagataacgtgtaaggccccgccgaaacatgcagaaaaatgaactatgctcttatagagaacccgcatgctcacttacagccttgataatggttcagttacagttgatagc

SEQ ID NO: 188905 - DNA, 399 bp, Glycine max
  unsure (1)..(399): unsure at all n locations
gtctcctgacncccgcgacatatctccaggtaccactctgtggtcaacgaataaaagcatgaagtntgacccttctacacttcctcatctcaagctggtaagattatggtgtacccatcatctgtggtactatgtggcggtcgggcgatggtgcacaacaagttcttcacatcctcaaacaacattcaaacagcacaagctatcacaggctagcaaaacatggcaaatgcataaaactcttgctatacaccaaccaatattatatctctgtctcacttatagaccccagtacaattccttcgatcaattcgtaaccgtggaccgattcaaatttactggaagttaattacatagcctcatttgaccgttgatctatagaaacatcagaactattctgac

SEQ ID NO: 188906 - DNA, 450 bp, Glycine max
  unsure (1)..(450): unsure at all n locations
agctntgagacaattcaaacgacaatattcttttactcgtatgtctgattgagtcccgtaatatatcgagacgctcaaaattgaatgttgaaggtctgagccaattcaaacgacaataactttttactcggatgtcctattcagtgacgtattatattgggacgcttgaaattgaatgttgagcctctgagcaaattcaaacgacaataactttttactcggatgtctaattgattcccgaaatatatcgagacactcgaaattgaatgttgaacctctgagccaattcaaacgacaataactttttactaggatgtttgaatgagtcccgtaatatatccagacgctcgaagttgaatgtttaagctttgagccaattcaaacgacatttactttttactcggatgtctgattgagtcccgttatatattgagaccctcgaaattttat

SEQ ID NO: 188907 - DNA, 390 bp, Glycine max
  unsure (1)..(390): unsure at all n locations
cttctagcgtctcgtatatataggactcttttagacatcccgattaaaatatattgtcgtttgaatttgctcagagcttcaacattcaatttcgagcgtgttgatatattacgggactcaatcagacatccgagtaaaaagntattgtcgtttgaatttgctcaaagcttcaacattcaacttcgagcgtctcgttatattataggactcaattagacatccgagtaanaagttatnggcgtttgaatttgctcagagcttcaacattcaatttcgagcgtctccatatattacaggactcaatcagacatccgagttaaacgttattgttgttgaatttgctaaagcttcaaattcactttcgagcgtctcatatatacnggactaatt

SEQ ID NO: 188908 - DNA, 416 bp, Glycine max
  unsure (1)..(416): unsure at all n locations
agcttgtagctgaagttcttgagaggtgctgttattggttaggcaataacaaaagacacattcccctgctttcatttactggaagatcaaaggtacttcatctctctcttattttgattaaacattgtaatctttatttttatgtgtttacaacgtacattaaattttcatgatagtatttttatgttacgacctctactagttagctatcaagtgtaatttattataattttttgtaattcattgttttgttggttccattggtttttattctaaatacctattcttattttataacatatatggtagtagttgtaacataaaaattagtattgaatcttaggttatgcttcttcccccaccaattattccttttagttagaataatcattatagntcttcttcttaatttatat

SEQ ID NO: 188909 - DNA, 423 bp, Glycine max
  unsure (1)..(423): unsure at all n locations
atatctggtcgagtgcaggtctgagcatacataatactctttcaactgatacatacnagaatgcttccattngcttccgttccagatcattnttaggacattgtgcgagactaaatttgtctcctttctgaattggaacgggagatgctgagcacttttccatcctaaatctctctagtactttatggatatatgncttttgagacaagcctaacaatccttgtgatctatttcggaatatttctatccctatcacatagcttgcctcacccatatccttcatttcaaagttactagaaagaaacttcttagtctcatgaagaagaccaagatcattagttgcaagcaatatatcatcaacatacaggactagagacataaccttactcccactgaccttcagatatacacaccgatcaatag

SEQ ID NO: 188910 - DNA, 452 bp, Glycine max
  unsure (1)..(452): unsure at all n locations
gtcacctgaggcatgcaagcttttcttagaaaaaaatggctcttatttttttttggcttccaaagatattggcttctgggataggcgggggggaataactgatntcagctctcctaaaaggttgatattaaaagtcgtcaaagctcttctttataaaaaaaaactttcattataaacacaatatttagttattagacattgctgaggtggcattacctgtaatgtaggtatatttgtttagaaattaattatcgcaattngccaggaaaagactaaattatgcacgattttgttccttagtgtgctgctcgaccggaataaattcattattgatcagaacagctacctattgttcctggaattctaacttagaatgtgcatctctcttgccctaacactttcaaaattttgtatagacttgtattctctagatcctcctaaaatctaatctt

SEQ ID NO: 188911 - DNA, 419 bp, Glycine max
  unsure (1)..(419): unsure at all n locations
agcgcttattagttggtcgattttccttctatgcaaattatggaatatatttccttacttactcctggggcatgatttcagacaaaggattgccaacctgaatgtgaataattttgcatgaaatgggttggtttaccaagttgcttaaaggctctgatcataaaattttacgaggacaataccatggcanatatggagaggacagaatttgggataatcatcatagctcaatggtaaacaaagtatttccttctctagtaaaattaaaagcattggcacaagtcacaactacggtattgagctagccttttatctgaatttagctttgagattagcatgaagctaacaaaagactacttcctctgagacatnaacngattatctgcatttgtatagtatcaactgaatgcagatatttg

SEQ ID NO: 188912 - DNA, 432 bp, Glycine max
  unsure (1)..(432): unsure at all n locations
agctngtatgttggaggtttggatagtgttatgtancttatgcacgagaatttattacaactagggttgaagagagaacactgctctgatatgacatggatgacattagcatntgttagatatacaaaaccaagtatgtgaatgcacctaacaactaaaatctgtagccaagttggtgcttggcatggtatcatagcttctatgatcaagtggctaacattgcaattaaaagtcatactatttcttgatattaaacatctaatcagttccaaaattgatcatccatataataatgtagcagaagtatctacaaatcttgcaaagtaatttaattaattacatgtttcaaagaaaatatagatgaacaggagcttatgcttaccaatgatctggagccatctctgtgttggtgtgttggctacatacccagta

SEQ ID NO: 188913 - DNA, 353 bp, Glycine max
  unsure (1)..(353): unsure at all n locations
catgcaagctnatttagaggatggatctgtgagcttcatttgngttctctcaattatgaaattcagccatggaggtgcatctgaagataaaggagaagaggtgagaggaggtgtcatccactataaaataagccatggaaggagaagcttcaccaccaagaaagtgtcttggattataagcttatagaggaagcgaatcatatagagagggggggcgtgggaattgaaggaaatctgggagagaagttgaactttgaagggtgtctcacaagtttcacattcatcaaagttatgacaagggtcacacatgtttctatctatagcctaccacatgggaagcctccttgaaaagc

SEQ ID NO: 188914 - DNA, 457 bp, Glycine max
  unsure (1)..(457): unsure at all n locations
tgcttgtggaacttctatggaggctgaatctttgagcttcaatgaggttctntaatggnganntttcaccatggagatgtagcggaagacaaaggagaagaggtgagaggaggcgccatccactagggaataagccatggaataaggagcttcaccaccaagatgagccttggataaaaagcttggagaggatgcttcatggaggaaaagacagaggaagagaaagagagagggggggagcacgaaattcaaggaagaaaaagggagagaatttgaactctgagttgtgtctcacaagactctcattcatcaatgttacaacaagtgttacacatgcttctatttatagactatgtagctctcttgagaagctctcttgagaaaactttctttgagagcttctttgagataacttccttgagaagctagagcttagctacacacaccctctcataac

SEQ ID NO: 188915 - DNA, 395 bp, Glycine max
  unsure (1)..(395): unsure at all n locations
gcagcacnctgagagagggccttattttatagacccaaataccgaagctaataatcaaaaaaaaactaataacttagccacgcaatgaagtagaaaatttaaaactctcaaaatcttgcaggaaggttatcacatactaactaaaataattcaaactcagaaaaaagctttaaacgtcaataaagtatattgtcccacattttgccttacaagcccttaaaaaataatcaaccttaagaaataaaatcactgatgtagattcaaaaacatagacgcaaaacaataacaatcaatcatcacaactcatcagaatgtaacaatcccagaataaaactagaattaaaagataataaacagaggcttaagtctctccgtcaacctctcatgaccttgaa

SEQ ID NO: 188916 - DNA, 425 bp, Glycine max
  unsure (1)..(425): unsure at all n locations
agctntgaggattaagctattcaatgtcttgtattaatatcatgtngagtgtcagattccttaaccacaaatgaattttctggccaattgattgattgaacttgtatgttatttcgcatttctatggttttacactgttctgcgactcagttatgtatgatggtcatacgatattattttgtaggtatgttttagattctcggacagctgctcctctcattctttctatgcttgaggtgatgcataaataaagtactttctctctgttatgccatctgtaatatttttgggtactaatttatttcaaatgcatatttcaggatatgcttagttcttctaaacagcatgcagggttcgtgcttttgattaattctaaaccttgcggttcatgcacatctcctagaaccgatagttgctgatgatgc

SEQ ID NO: 188917 - DNA, 175 bp, Glycine max
acaaaccctgcgggtcaacgaaaaaacaagacacttagcactctacggctctatacaacaaaaaacggcttaattaacgggaacacttagacgaaaacagaacaataaagccctcatataaacataagaacaccacgaaaccaccaccgtgagcaaacacaacacgtgtgaactg

SEQ ID NO: 188918 - DNA, 404 bp, Glycine max
  unsure (1)..(404): unsure at all n locations
agctntcttcctgttgacaattcctttttgtattatttctggtatcaatgctgctagacatgcagacggtaagccagttattgttcttgagagggagagcagttatataggaacattaattgatgatctattaaccaaggacctgcgagagccttaccgcgtgttaaccaggtaaactaaccaagataacatttctgctcatagatgcatatatgctgcttcatcctgttactccttattcctttcttgttatttaaatagaaatttgtcttcctcatgttagccgctcagagcatcggttactcttgagatctgacaatgctgatagccgtctcacacctttaggtcgtgaaattggattgattgatgatagacgctggaaactgtaccaggataagcaagct

SEQ ID NO: 188919 - DNA, 380 bp, Glycine max
  unsure (1)..(380): unsure at all n locations
agtctctggagcagcttaagtagcacttgcatagtctgattggaatcataacctttctcatgaggatagggatcatctatttatacttggtcatgcaacaaatactaagttgaaggaatgaatggtcttaaattattgaaacggcaattatatataactcctacgccaacacatagttttggatcctttgatacgatttacccatgcaacgtttcgcggttaggaaacaaattatatcatgtcaagatatatatatatgcttcgtaatgattagagtcgaacattttncttcaaatggtccaagacaaatatatcacatnctgtgcacatgataagattcatntatatctctttccacacacacatattntcctctacta

SEQ ID NO: 188920 - DNA, 395 bp, Glycine max
  unsure (1)..(395): unsure at all n locations
agctggagggattgatggngactttgttttgataagaacgaggataagggctacgtgtgagtacgtgagctcagttgaaggtgggcaactagggatggtgaatttatgtgtgatttgtggatgtggatagtcgacttgcaccatcgcccgaccgccacctagtaccacatgtgacgggtaccccataatcctacaagcttgaagtgaggaagtgtagaagggtgagacttcctacttttattcgttgaccacagactggtacctggagatatgtcgccggggtcaagagaccttggggacgtcaggtggggtgctattgcccaaaaccaagcttgaccaatcccgacccaacccgggcatattcagtcagtgagaacctgtgatgtacctaaaca

SEQ ID NO: 188921 - DNA, 307 bp, Glycine max
agcccctacttgtgaggggcaactcccgccttatgacgactatcccgggcaagacgatgaggaaggagatacccatcttggccccctgctccacctcaaagatccgtccccacatgaactaccccacccgaacatggtcctgcatatgcccggctcactcacacccgttaaagaatctgttcccttcactgaagataaaggaaagattgatgcgcttgaagagaggttaagagtagtcaatggcctatgcaattacacattctcggacttagcggatatatgtctcgtgcccaatatcgtcattcct

SEQ ID NO: 188922 - DNA, 162 bp, Glycine max
gcaccgcggctgcagcttatgatgaggaattttttttttttgataccaacagcccaagtgattgattcaagacttcaagatcaagctttaataattcaatccaagattcatgattcaagagaagaaatcaagatgcctctaattaatgctggatcaagtggt

SEQ ID NO: 188923 - DNA, 450 bp, Glycine max
  unsure (1)..(450): unsure at all n locations
agcttattgtatagtgtgaaaaaagtatgtatataaaaatgattaggtatatatcacagatattcaaccaattaaataatcagtaataataattaatataaaatgaaaacaaatatatagaaatgataaaagaatagttattaataaagcaaaagagataaagatagaagatactgacaaaaattaggaaacatgaaaactactattttacgtatttgttgcaattgataccatttctatttgtttaactatattgttgcataatattaatatgttttacatgtacaggacatgctctgctgcttcaagccaactgtggacatgaatcttacatttgaggagatataagtttgtgcatatgtgttcaaccctaatgtcgacccgaggtacgtagctaacagtatagtgatacttgtagataagttntcgttcatatatattcatgggtac

SEQ ID NO: 188924 - DNA, 433 bp, Glycine max
  unsure (1)..(433): unsure at all n locations
cactagccattcccatctattaacatgtgctaattaagaaggcaccaagttattggagagtaaaataatgatgattttgagcaagctaacatgtgagaaataattgatgaaaaagacagacttaatcgtactgagctataataagaagaataattgggctgttnggcccatcagacataagtgtgaaatggctattaatcaaataaaaccctctgggctgcnaatttngtgacctggaccagacttgtgtaaggctagcgggccaacaagtcaaatcattcctaattaagaataaccataacacataaaattaatcatacttaatatacaaaatgctcagaaatgtatattaattatacaaaacaattaacttaaatgggtaattgagttgggtcataaaagccaggtctgttaagcttaaatttatgagtct

SEQ ID NO: 188925 - DNA, 448 bp, Glycine max
agcttgtctccctcaaacataatgcatgttatcatatgataatgcacaacgtgtagtatttaaaggattcgttttggcataatataatgcttttaatcattaattatgctatcaataaaggaattccgatgctctaaagtttatgccatagttgcatagatctgattaattcattcaatttattttattatataaaatatatcgtatttgtaaattaaatttaatgaatttcaaggacaagattgacttgtgttttaatttatgataaaattcaacggcgaatttttatttttattactcttaattataaaaacaccatctaactcaaactcactcgttcacacaaataactagggatacgatatgatgatactcccttaatttttaattataaatatttaactaattgatgttccttttaagaaaaataagtaacttaataaccaca

SEQ ID NO: 188926 - DNA, 474 bp, Glycine max
  unsure (1)..(474): unsure at all n locations
cagctaatggagagaattgataatgagtgtgctagcaagcgacttctcatattgtcgtaaatgggtcatcaatggctttcaacagatctctgaccttatcatgctggtcaactgaaccccggatactagcggatatgttggttgttatgaacataacggagagacgattagatctctcccacttttcataaaggtcaacagcatcaggttcgctagtttcagtaatagccggtggctcatccttccttatagcatagtcaatatccatccagcccaaatgaaggagaactctttcctttcaaaccttataattatcacctttcanaatggaaaggtcacaagaaatattcatagattgtgaaactgcaaacaaacacacatgctcaattagaaaatntgagactaaacatatgtcatgttttgccaatgcaaatcatgtctcaatatatgaatctagtgacacanaacttatct

SEQ ID NO: 188927 - DNA, 360 bp, Glycine max
ctacacacacccctctaataactaagctcacctctctgagaagcttccttgaaaagacacccaaagaagctagagcttagctacacacacctctctaatagctaagctcacctccttgagatgagaagctagaacttagccacacaccccctataatagctaagctcacccccatgacaaaatacatgaaaatacaacaaacggccctactacaaagactactcaaaatgcctcgaaaacaaggctaaaaccctatactactagaatggccacaatacaaggcctaaatgaaggaaaaacctattctaacattacaaagaaagcgggctcaacttagcccagggctcaaaaccaccctaa

SEQ ID NO: 188928 - DNA, 361 bp, Glycine max
  unsure (1)..(361): unsure at all n locations
tatgctgtttctacatatataaaacagccncaccatcccaattgtgcaaaatcatattcatatatcattggggtgtttcaccgaacacttggtgggcgcacgtctggacacaaatctgaagataatggggacaatgtggcatgcnccattgctctcaaatacaacatatggctaaggccttctcattcaaattcttaattcatgaaaacaagcataataaacaaaccatatcttgcccactaatacaagcacattcacacaatttggagcactcaaaggtgaagaaaatataccaatgggaagctgataacatcaatgattgaatacttactcgttggagtgaacaattacaccaacaatg

SEQ ID NO: 188929 - DNA, 438 bp, Glycine max
  unsure (1)..(438): unsure at all n locations
cctgcggcatgcaagctngaagagnncctctctcgcttagatgaatttcgtgtcaagattgatgccttcaagcgcgagcttcctctctgcatgcaactcctcaccaacggtacaagtttcaatcaatcatcatcatggtttcaccaaagaaacatatcaaacgtagttgatgatattccaaattccaatgaaccaattaaaacatggaatgtcctaaaccctaaagtttcatcaataccccatgatgaaaatattatatatacttttataaaaaaaactcagcatattcatcttttttttcttctgttcttccaaataatataaatggctttcgtattaaggtcatttttntaacctcttgctctctttctagtaggcttcttcttttgctttccttctcatataaaagtgagagaattacatcttttttattgtatt

SEQ ID NO: 188930 - DNA, 357 bp, Glycine max
  unsure (1)..(357): unsure at all n locations
acaggtttcatatatgtttcccctatatcttanctcgcctggagtagactctggtgatgatagttcttgatcttgttgttgtggtggaggtgaacgtggttcacctgggtcttcttcctcaacttcttcttgaggtaggtgagcgggtataagaacgttcttctctactttttcttaatcccaattccaagaagcatattcatcaacttcaacatctcgactgatgacgagtttcttaatttgcaaagtgtagacacggtagcccttatagatattgttatacccaacgaagatacctcgtatagtctttgctttcatgcttgagcctcctcatgtcttgaatatgaatacatctta

SEQ ID NO: 188931 - DNA, 396 bp, Glycine max
ctacacacacctctctaatagctaactgcacctccttaagatgagaagctagagcttagcttcacaccctctataatagctaagctcaccccatgacaaaatacatgaaaatacaaaaaaagtccctactacaaagactactcaaaatgccctgaaatacaaggctaaaaccctatactactaggatggccaaaatacaaggcccaaaagaaggaaaaacctattcaaatatttacaaagaaaagtggatccaaccttggcccatgggctcataaatctaccctgaggatcatgagaacactaaggccttctttagtagctctagcccaattcctctgggattttctatccaatacccttgggggggaagattgcatcactagacaacctctttcg

SEQ ID NO: 188932 - DNA, 455 bp, Glycine max
  unsure (1)..(455): unsure at all n locations
actcaagctggcttctacagataacacatacacggttactctaaccaaattttcttttgaggttgtattgngtttgngtttcatgctgtcaatatctaggttgcccttgtaatataatagtttgtgaattggagtttgtgtttatagcaagagaatggatgagtcaacaaacaggcataatgataatttgggtgtgaacaaaatggngaaaaacattatgaagaccaaaagagaccagcccaattatggcaagaacaacaacagcaacatgaatgggggtagatagcaacagcaacacaaacagcctcagctttacaaccataaccaaaatgatntcagggatattgttcagcagaaaaaaaaagttgattaggatcactcctaattttaacaaacataaattatttatatttcaatattaacacatgtatgcatcaacgtgtatggattaacat

SEQ ID NO: 188933 - DNA, 314 bp, Glycine max
acttcccaagttacaagcccttgccgctgctgttccaaagtatgccaggcctttggatgatggattatatcgcgccatagatatttatttgaaggtatgaatcttgagcaaattggcctatgtcattcaataattagtgtttaatatgctatcaatggcgtggtataatgttatgcatcatgccacatgtgggccatttcttcgcctgaatgaatactatatatgctggccaaataatattttttattctgctatgctccttgtggttaaaactatattttataaagggaattgattggctcatattaatcccc

SEQ ID NO: 188934 - DNA, 306 bp, Glycine max
  unsure (1)..(306): unsure at all n locations
acattgccaccatcaccttcaccttgaagatgctcatcctcatcattatatccctctttagctattcattcatcactagactcaatctcatcaaatggaagagcaatactttntctatcttgtttacttttcaacttcacagtatacatcacataaaccaagtcatttgaattcagagctctgagttgagcaaattgtgccctcttgacattctcttctattgtaaataaatcaatctttgtagtgattttctctctcaaattgatggcggtgttctattaggtattgttgatatgttgcatgttc

SEQ ID NO: 188935 - DNA, 430 bp, Glycine max
  unsure (1)..(430): unsure at all n locations
agcttctcccccattttcttatattagggggagtagtgaagagaaatttcgttcagccctcctggtaattcagaatcacttaaaattagtgagaaaaattggttccgtgaagaaaatccaagccgaggcgcttccgtaacgtttccgtgggtgatttcgcgaaggttttcgaccattcttcgacgttcttcattcgttcttcggtcttcaaccggtaagttccctagatcgaacttttcaattcattctatgcacccttagtggttctcattgtttttacgtgctttcatttacattnttcgtttactttccgtacccccttttgacgtgcttaagccatttatttaagtcatttctcgcttaaatctaaaaataaaataaatttccatcgatcgtttgaattgatcatcccgtaatttcggtaaaatga

SEQ ID NO: 188936 - DNA, 417 bp, Glycine max
  unsure (1)..(417): unsure at all n locations
ctcctcttttataactatgctatgngctcgcgactggtccctttcttccctttgcaacttgagttcactattgctaccccatagagctccacgaaatttgttccggccatactcttccttgcgagccctcttggtctcttgttcaagggctcttgcggttattgcattctcttcccgtaacccggcacactccttccgaacgtgtgtagcggccaacttgaacttctccttggcaagttttgcctttcctaactcgcttntgagagcttggacttcttcgtcctcttccggtgcttcaaaactctcttctgtgatgacttttaacttggcgagccaatctaaacctcgtatatgaactttcagccattcgtggtacccaccaatgatgccattacgaatgcctctaagctcttgatc

SEQ ID NO: 188937 - DNA, 442 bp, Glycine max
  unsure (1)..(442): unsure at all n locations
cctgcggcatgcagcttgatgattggtctcacttcgtattgatccacgngggtctaanaagaggcaaattattcatcctgcttggacgaatgagaaaactggggcaaatgaacagggtgaggatgatggagaagcccgtgctgtgactgccattccaatacagtcaagtttcccaccaacacaacaatgtcattactcaggcaataacaaaccttctccttacccaccgcccagttatccacaaaggccatccctaaaatcaaccacaaagcctacctaccgcacttccaatgacaaacaccacctttagcgtaaaccataacacctaccaagaaatgaattttgcagcgagaaagcctgagaattcaccccaattccagtgtcctatgctgacttgctcacatatctacttaataaattaatggtagccataaccctaacc

SEQ ID NO: 188938 - DNA, 316 bp, Glycine max
  unsure (1)..(316): unsure at all n locations
cgcttcaatccatagagagcctgttgagcctgtatactttatctgtgtgagncggaaccgctaaacccttgggctgctacacactaacttcttcatgcatagcagttgtatccagaactcattcaatcagatgcctctttcacattcttgggctcaattctggagacaaagcatgatttggagacaatttcaatctccttgatcttgcactgacctctctgtttggatccccttataatcagcctccttggggtgcatcttctggattctaatggacggtctcttgtctagtggttgatgtttgaatcatctgtag

SEQ ID NO: 188939 - DNA, 72 bp, Glycine max
gagcttgcacttgaggggggaaggatttttgctttataagaacaaccctcttaactactggttcttcacact

SEQ ID NO: 188940 - DNA, 431 bp, Glycine max
agctttggagaaggagttctatactttattttgtcgtacaaaataacaaagacatcccgatttcagagcctatttaagcctgatatgtcagaattagggtacacacagacacaactgaatttctagagtacaatactgggctcataattcgagagagactttggagcagctatgcagagaagcctacggttctacattttttgagagattaatgagtgttagagtgattgtgaggtgccaagaagaggaggagggatcccccttcttgtgtaagcaacaattattctgtactctctatctcattcgtgttaaggttactatgtatggctgactatacaccctagttagggatctctaaggaacagctaatggaattatctctgatatcttattaattgggttttgtgtgttcattgcttctttcaatgctt

SEQ ID NO: 188941 - DNA, 412 bp, Glycine max
  unsure (1)..(412): unsure at all n locations
tgtacctgcgtgtgccgggtcgaggcgagggtgtgttactatttatccttctcagaaccactctctggacgatgatgatcatgctgctagatcattttctcgccagaatactccgaacagcgggtggctcctgcctcatttgcagccgacaccggatacttctaattggagccaatatgtctcaagttcttctactcgatatggcaccaatcgcacagttctatatctctgaattctccgcagcaattgctacaatacctgaaaaaaagataaatggaactttaagtttaatatactgctaaagcatcatcaacgttgaaaagtacagaattcagataaaagaatcatacatgtgttatgaagctacacgtatatgaacataaaaggtagcatanatatggccatgatcatg

SEQ ID NO: 188942 - DNA, 461 bp, Glycine max
  unsure (1)..(461): unsure at all n locations
ggatccttnagtcacctgcagctgcaactggattgagagttatttactttgagcgtaacttctaacttgtttaagttagcaaaacttagtgaattgttaaaaattggatgtagctttagtggtacacacaaattaatataaaattccttatgtatgtgtgtaaaacacatttgaatttgacttagggtccaaatatgattttgttctaaaaaaacacattcttgcaaaaatctgctaaacattgtctaatcatatctgtgtgaaaatctattatctaccttcaaagatgttttaaacgatagctttatttttacgaaaaaggtttacaaattttctataatcataattcaaccttctttcctataatattcctctttaccaattatatgctacttataaacgctattcatagatttgaaggtagaaaaggtcatttgtcataattctttcttatcactttt

SEQ ID NO: 188943 - DNA, 408 bp, Glycine max
ctaaccgaatatgggcggcaatcttgtcgagatcgttgatgcgatgactcaccttgatctgacggtggagggtgttactgatgaaacggtgcgcttatgtggcattggttgtggtgagagtgcagtcgcacttactttggaatcaagtgtcccagctcctctattgcgaaatgactcttatgccctataatggaaattgcaatctcacactcggatgggcttgtatgggaactgtagcgtgcgaagatggttaagtggatgtgacgcgcgtaaaatcgcgtggagatatacgtgtgagatggcaatggagttattcggtatatgggagctatggctggaatacggtggggacctgtatgcgtcgattaataaagtgtgacaagcaacatcatctttctattttgttta

SEQ ID NO: 188944 - DNA, 399 bp, Glycine max
agcttaacccatctcctcttattttatattaacgaggcaattacagtgaaagggaatccctggaggaaaccaagaagaacaaaaacttagaagtaaaagaacatgcaacggtcctctcgattgccccagacttcaagcgtagtatcgcttaataatatcggagttcacgggcgagggtagctcctcgccatccatgttggtgagtatcaaagcacccccagaaaaagctcttttcaccacgaaaggcccttcataatttggggcccacttgccccgattgtccttaacagcgtgggacattttcttcagcacaaggtccccctcgttaaacttgcgcggacgtaccttcttgtcaaacgcgttttttatccttcgttgatacagacgcccatggctcat

SEQ ID NO: 188945 - DNA, 446 bp, Glycine max
  unsure (1)..(446): unsure at all n locations
ggcatggcaccccacctgacatccccaaggtctcctatcccccgcgacatatctccaagtaccactctgtggtcaacaaacaaaagtacgaagactgactcttccacgctttctcacatcaagcttagtggattatggggcacctgtcatatgtggtactaggtggcgatcaagtgatggtgcanatcaactctcccacttacacaaatcatacattaacgtaccatccccagtagcccaccttcaaattgaggtcacgcactcccacgtagcccgtattctcgttcctctcaacaacgggtccccattaacccctccaagcttncacaatatcgaagcaattcaatttcaaaatatcatgaactattctataccaagaaaacagagtagaggcagaatacttctgccacacacattcaaatatcacagctntccttactcatata

SEQ ID NO: 188946 - DNA, 311 bp, Glycine max
  unsure (1)..(311): unsure at all n locations
aaaagacgagaacaagagacccaganncctaatacaatggactccaattaggggtggtgaaaactagggcgtacaatacgaggcccacatgtgggggaaaaaggttgaggacaatctactttaatggacataacttgcagagctaggcaactaacaggttgtgtgctagtacagttttgatataaatatccaacctacatgcgtgagttgattttacaacattagatgtatggatgcactgccgacatgcaattacacaataaagtacataggaggaaagctagagacatgcgtataagtggctgcaataa

SEQ ID NO: 188947 - DNA, 426 bp, Glycine max
agctttgggttggatggccccaatgacattttattccccacatggaaaaaggccaagggatggacatgacattcagaggatgtggcagaacattgacattgtccgcgtatgcttgacatttgaggcatttctttacatgggcgcaacaatcgctttccatagtgagccagtaatagcctactctaaggatcttcctggccatagcatgcccattggcatgtgtcccaaatgaacccccgtgggtttcctcaatcatgtagttcgcctctttggcatctacacatcgcaggagggccatgtcgtggtttcgtttgtacaggatggtaccactcacaaagaaaccagtagccaatctccttaacgttcttttatcattgccggaaatccctggtggatatactttgttctcgacatactggttgatat

SEQ ID NO: 188948 - DNA, 326 bp, Glycine max
atgtttgccttcataatttttggttcacggtctttgttgcgtattgcatggtattcattatgtatgattcacttttgtgatattcctaaaccttttcggttcttggggtttttgcccctcatatcggaatgattcccttacatttttttttggttttttaatcccttacacaaatgtatgattcgcttttgcatgttcttcattttgtatgataggcttttgcatcgtgtttggtttggatcattcgattctgggtgtttccaaaagcgtctgatattctaactttgtatttgacattatattatggggtgactattatctaattt

SEQ ID NO: 188949 - DNA, 380 bp, Glycine max
  unsure (1)..(380): unsure at all n locations
cactcagatgctncttgttttatgcaattccatttctctttgctggttccacaacactgatcagtgatatatagtccttaagttaagctacaagacacatcacaaatcatacagatggtccatgcagctaactaacatgtgcgataaggtgatgctacatgctactttaatatcccattgcatgtaataatggtatctagtctctaataaaaaaatgattagttggctgctgtgaccttatatggacaaattaatatatagcgagttcaaaatagttgaatttctgaatccttcagtacacatcaatagaatttacattttagtactgaatntacgagatactggatgttgatacgctcttcaagcatatgatactatac

SEQ ID NO: 188950 - DNA, 433 bp, Glycine max
  unsure (1)..(433): unsure at all n locations
agcttaatacatattctgcacgctanttgtngtaggatccgancgacgaggaacaacatcacttttaataatggtaggccgagctatctgaaactcatttcatctattaaaacttgttcatgaaagtggttattttacaaagtttggacttaaagggaaaccttctattcctcatggtacacctgttctagagcatgtcttccctgatgacttatgaatgttgttttttgttttgaaaaccaatactatatttttatctttcttttaaaaatcattgtgaaaaacaacttccaataatgaaaacctaatttaccagcttcaattattaagtcgatatgatttactgtgcttaacagttgaatccaataggatacataatatagtcacctgactcactcattatttcttcatggaaaactcagggtattgaaag

SEQ ID NO: 188951 - DNA, 363 bp, Glycine max
  unsure (1)..(363): unsure at all n locations
accgcagcatgcaagcccgngaagaaaagagacggtgtatatcttgtctaaannaaacgggtccgctaaagccagctcaacaagtagaacgcgaacttggatttcgggaactttgcgtctgtgcccttattttaatattaactggaaatgcaaatcttatataactctttgacagtgaatgcttcaaatcttatgaattgggccaccatataaatataaggaggttaagcttatacattgatagtgaataaaaacgatcagtttaaagttcttgacaccatcatgctataattatcaaaacgcatgataaatggtgatagcgtataactcagcggatgaaaattcaatcgcattcgcagataa

SEQ ID NO: 188952 - DNA, 260 bp, Glycine max
  unsure (1)..(260): unsure at all n locations
ttataacattcttaagcccagtaccccatacaattggatgtataaatctcacaacataaatcatatacctatggatagttcatccatatcagaacctgctagaatgtattctggctttaaatttaaccactttacactacaatcactanggtccgcattggagctgaggacttttaaacaattccctcggctcttaaatatgaaaacataaatgcatacatgagacctacacctattagaggcaatgtaggaggacgaat

SEQ ID NO: 188953 - DNA, 450 bp, Glycine max
  unsure (1)..(450): unsure at all n locations
agcttgagacgcatgtgaaactttgttattatcaaaacattcagcttgatcctttgtctacaatctccccctttttgatgatgacaatccttgaaatcaagacaagctatatacaagatgatagcacgttcacacaacccttactccccctatcttttggcatgtatgcctaactttacttaatgataaatttctatttgataattgatttctaacccaagttctctccccctttggcaacatcaaaaagaactaagcaacataatcaatatccaaacagagccaaacaataaaccaaaataaatccatacattgtcataaccaaacaaatcaaagacaagaaatataatataagtgcaagattatgatatctaagcaataaaaaaccaaattcacggcgataaaccaaagtactaataatactnaattactaataatacttagtcataa

SEQ ID NO: 188954 - DNA, 508 bp, Glycine max
  unsure (1)..(508): unsure at all n locations
gattactaagctagttctaacaattgagactaatctcacttcaagattcttgagaatttacccatctatnttatcttggattcaactgcaaagatcctcacaatgtatcaaactaacggttatctctcccaaaatattatggtgaacaccatggttacctactctaaatcacgcatacggtaaatcttttcataagtcttaagttgtgaagaaaacattgaacactatttgtcctcctacaagcactcctctaaacttaaaaattatttcaaatattttactactccaataaggacctacacggctaagatatcactcaacggtttatagtgacaaacttttctaggaacttatggcttactccttacaatgatctcnacctggaaattaaacttacttgagtcatctccaacaagaactaanggttagtcaatgaaatcctaaataaatttctggttccactactagttaagggaagttcatcttaatcttatgtttcctctcatct

SEQ ID NO: 188955 - DNA, 417 bp, Glycine max
  unsure (1)..(417): unsure at all n locations
agcttctccacgcaagtgtgtataatatatgttggttatacgaagnggaaaagggctcagcctcttaggcacttctctcttcttcgaatttgctcggaaaaattgtttccgtgaagaaaatttaagtcgaggcgcttccgaaacatttccgttacgttattgagaggaatttcgcaaaggtttcgaccgttctttgacgttcttcattcgttcttcatcgttcttcgatcttcaatgggtgagtacctcgaaccaagcttttcgattcattctatgtacccgtggtggtccacattgtgtttcgtgtatttttattctcggttcattcactctatataccccctattgacgtgcttaggctattttattatgtcattacccgcttaacctacaaataaaatatatttccaccgatcg

SEQ ID NO: 188956 - DNA, 400 bp, Glycine max
  unsure (1)..(400): unsure at all n locations
cgctaacccatggaagctcctaatatctccacactttttttgtgggccattcttggatggccttgattntctcagggtccacttggaccccatntctaccaactactaaacctaagaaaactatattatctacacaaaaggtacacttctctatatttgcatagagggtgttttttctaaggactgaaagaacttgtctgagatgtcctaagcgatcatctagggtcctactatacactaaaatatcatcaaaataaacagcttccaatctacctatgaaatcccttaagacatgatgcataagcctcataaaggtgcttggtgcattagtaagctccaaaggcatcactaaccattcatacaaaccataactggtcttgaaagcaattgtcactcatca

SEQ ID NO: 188957 - DNA, 241 bp, Glycine max
  unsure (1)..(241): unsure at all n locations
acccacagccaagaaaacagggcaaaggcanaaaactccgctcaaacaccaaccaaaaacgcagctcggcgcactgaaagacccaaaaacacgcctccatccaagaagcaatcgcgggaacaaccgcgcaaacccacgggaaggctacagaccataagccaacatggcgaccgcagggaacacaaccaaacatccagaactaaaacggcacaacacgggccacagccaaccacacacaaac

SEQ ID NO: 188958 - DNA, 401 bp, Glycine max
  unsure (1)..(401): unsure at all n locations
tatntctcgaaactatnntgctaagcagaagccactgatactttatagtctggaancaaccctcatacaatatggctacaatctgcaagtatcacggattcattttctatgttggtcctacttcatgattgttccatctactgcctttgaacaatgaccgctataagtaaaatccaaagatatataattagtgaccaagaagcccaacactagctagtgagtgcgtgatcatagaaacatttcctttccttcgagggaatggaacacggacgagttattaacacttaagataaaataatgtctatttaaacaacttataagtcggtatttctatccaaggttgaactcctcattatcttttccccgcgcagcttgaacaattactattatcagcaatactc

SEQ ID NO: 188959 - DNA, 387 bp, Glycine max
  unsure (1)..(387): unsure at all n locations
ccttatagaagaggttacttatcttttgttnggaatctacaaagcgtgtgttaacaacattggttattattacaagtaaatgggatgaatgactttgtgcttaaatattcaccccccttacgtatacatatgtcgcatgccccacggtggtctattgctaattaattacatattaacctagtattgcgtgtcatatatatatctccacgacattacatgcatcatgcgggctttctaggtatattagcaaaattacatgtatcttgtcatttgagtcggtaaggcaattaaaacattaaggcaagttatccacgtatgcaatggaaaacattgtttatatttatttccaactatatattgcatataaatagttgtgcccggcatgaa

SEQ ID NO: 188960 - DNA, 511 bp, Glycine max
  unsure (1)..(511): unsure at all n locations
tactaagcctacaagaaatcacatcagatgcatcattatattctggcagtgtgtccatgctgtgcaaacgcctctaatcatgaacgtgatcttgatggcatatatggtggagcccttctctgcagctatgtccaagattgatggaagcataataccttttgcgcattatctgatgcagctgattagaaataccctccaccatgtctgatagtgcatcaacctttgcaagctnttgctccatgtgaacaaatctttcttccatttcacacatcatcatcatctatgatcttgcttttgtgtccatgggtgaaaagattctgatctattgaacgtgaacagccagctctgaataccactcttatagaatgtatgtgggaaagagagaagaaacagaattgataggatagaatggaagagaagaccaacagagagggtcaggagatgtgcactgcactctgtgattatcatcagtctgtctacaatacaacanacctgccttattatagacaac

SEQ ID NO: 188961 - DNA, 418 bp, Glycine max
  unsure (1)..(418): unsure at all n locations
agcttaaggtactagaatgggcatagattatcttatctatattaatngcccttctaattgtcttccttatcaagggaagcttcccaatgtcttcaagcctcaaatcaatacaatgggatgcacaaggagtctaataaatatgtttccttttgtcttctaacaacttacccgctaaaacatagttgctcccattatcagttacaacttaaacaacgttctcttctccaacttcctccacaatagcatcaagcaactcaaaaagcttttcacctgtcttcacaaaatcagagccatcaatagacttcaaaaacattgtaccagcttgagagttaagcaaaaaattaatgatgcatctttgtttccgatcagtccatgcattagacataatagtacaattatacttgactcattgctccct

SEQ ID NO: 188962 - DNA, 272 bp, Glycine max
  unsure (1)..(272): unsure at all n locations
tctttggaaaggaaagaaagaatattaaccccgttacaagggaggggaccacangtggaaagggtccctatttgtcacaataacgagagctttgttagcgcgggatggatgcacgaagaatcaagtgttgtgttggatgaagaaaccaatcaagatcagcccaattaggtgcagtcgtgttccccaggctttgaattgaagaactggcagatcatggagcgacctgagatttctgtgtccaatccaatgtaatctagctagtttggacccta

SEQ ID NO: 188963 - DNA, 397 bp, Glycine max
agcttctatccaagcaattcttggtgttgattctccttcttccttggcttattccctaggggatggtgcctcccctctcctctattcctttgccttttgctgcatctccatggtgtaaaatcaccattgaaggacctcattgaagctcaaagatccagcctccatagaagcctcacaagcaagcttctatcagacctggcggcataagtggcccctcccatggtcgaaagggagatgattaccatgatggtagacaccttgccagtgttttactatgagaagttggtaggctacatgccttccagctttgtggacttggtatttggaggggaatgaatctaagtattgttgaaaagagggaagttcgattacatttcttccaccagtaccaatgcta

SEQ ID NO: 188964 - DNA, 191 bp, Glycine max
  unsure (1)..(191): unsure at all n locations
actgctggcacttttacttactttgcattttatagttctttgcatagaagttaggttaaattttgtttgaaattatcaatcatacatgttctctcaacaatgcttcattttttgaaataattcaggctaacattanttccctgagttcgatgctcggattcatcattttaatttttaatacttgacgatct

SEQ ID NO: 188965 - DNA, 286 bp, Glycine max
  unsure (1)..(286): unsure at all n locations
cataccgtcctaggaatgataagccagagaacacgttccggaaactcaataagacggacattctaattgcatcaacctgttgacccggtgttaacgctacaatcatcattccatacaacgtgaagtacataaagcacatttatatatagtattaaaaccaaaagaagcttgttgccttccgatcaaacccaatccttgagtaaaggataagagagcaaactgctgtntgaattgcattataaattgcctttattgccacctgcataatcaatgaagcgtctatagt

SEQ ID NO: 188966 - DNA, 426 bp, Glycine max
agcttacacaaactttcactagtctaactcattcttaacaaatagtcatcatcagtccatagttccaatcaatcatgctcagtatgatgcatgcacctgacctcaactctcacatgcaatgtggtaccatccccaaggaaatagcctaagcgtgtccacacaacactctcacttaggaaaactatgcagtaagtgttgaagttaccttgtcgtgcacaggcaactacccccccacggtgatcagcctaagtctcaagggagttccaaaacgagtgacatgcccccaagtacaagtattcctccttatgagaaactacaagtacttactgacaaagactatactatttccatgtcatatgacatatgaaacatgggcaccatcaatgtactgaccgcggataattaaagattctaagccatccccct

SEQ ID NO: 188967 - DNA, 372 bp, Glycine max
cccgaggatggccggcatctggcaacatactcaccggcttctcctctagagtacacctcagctcaaacactacaaggttagagtgttgcttacgacccatggccgaccaataagcgaccaagtccaaagccaaatgttatcaaagtactaagtccgtgaccgacaagccatcaatcgtccaactcaagacgttaaagaagcgctactaggaggcaacctagtgcctcttaaagctctgcttggtatttgatcactttagcttatcgagtcatagcatgacacaccctagtactcaagagcctatgtatctgaataaaacaagctcacagctcggaggcattaatacttcacaaatatatatatgtatgtata

SEQ ID NO: 188968 - DNA, 443 bp, Glycine max
  unsure (1)..(443): unsure at all n locations
agcttttaagtcccactcggtagttccttggtgtgtttnaganagangggccaatggtcataatttgtgttaacagcttgagtagtgcactaaatgtctaagtagtaaaaactcgaaagtctgagtgtcaaatttcacaagaactctgttttgttaatgtatcgcataatttttaatttataagaaaagaaataaagagagataaatgataaataacaagaataagaattattaacagataattgtagaaaaagaaaataatatgaagcaaaataatcagtagagaattcaatgggatcagaatgttaggacctagcatgtcttgtttgcctaagatataatggttttagatttttctttatcaatcaagtaaatttatcctatccacatctattagattacttgccactgatgtctcacgatgcctattttacctatctatc

SEQ ID NO: 188969 - DNA, 311 bp, Glycine max
  unsure (1)..(311): unsure at all n locations
ctgaatcaatttgtgtatttctgactttatggcatgagttgaagtacaaatattggaccacttggtagttggtattgctaaatagcctaaacacttgtgcgtgagtgatacaatggccatganaaattggttaagtatctctcatgaaatttgctcctgcctactttattaactattgttgtaactaacatgatccttttcttaaaaactgcatgtcttgtgaaacgcaatagataanaggcatttttgtttatattgtatcattgcactcatattttgggaggtacacaacatggtacataatcactaca

SEQ ID NO: 188970 - DNA, 440 bp, Glycine max
  unsure (1)..(440): unsure at all n locations
agcttgacataataagtaaggtatttattacttggctagacttgngagaggtcattgacaacaagtaggtatagactatattcaaaattttcctcatgttgctcgtccagaggaaatacgcattctactatcctttgttgctcatcatggtatgatgttatatcaaacgcatgtagtatatcgaacgttatgcaaacatctgcatggtaacatccaatcaattttaatttttatcaaaccatttatgtcaatggtacacaatggttccatggtaacatctgcatccagcttctgactcatatgtacatttcacgattacaagaaaccccacttatcagcttaaagaaaatttacatatggtacagaattagacacttatcttcctcagcaaagtcattgaaaagacctcaagaacaataatacaatgatgcatatacctt

SEQ ID NO: 188971 - DNA, 117 bp, Glycine max
  unsure (1)..(117): unsure at all n locations
ccccnccccccccccccccccgggncnccncagggccccccccccaaaaaaaaaaaaaaaaaaaaaaaaaaccacccaaaaaaaaaaaaaaacacngaaaggcccccccccccctcc

SEQ ID NO: 188972 - DNA, 355 bp, Glycine max
  unsure (1)..(355): unsure at all n locations
aaatcatgttaagtngntgaatttgcgttgaccaacaaaaagttattgaatttactttcttgtcaattgttataaagctcaaaaaaatatttcaattaaaaatattttttaagttttttattaatatacatgatttatatgctttcaacatgtaattttattttcattaataaatgtttaattccttgattttatcttaatttatttaaattgtaaattcataacacattgaacatgtgtgtaatgcattcacatttctattgcatatatttattttccatcccatacattataacatgagtatctatttgttgtacatatgtacaataaaagcacactcttgttaaaaaatata

SEQ ID NO: 188973 - DNA, 433 bp, Glycine max
  unsure (1)..(433): unsure at all n locations
acctgcggcatgcanctcttatccaagccatcttgtgttatatcttttcttccatggcttattccctagtggatggcgcctcctatcacctcttctcctttgtcttccgctgcatctccatggtggaaaaccaccattaaaggacttcattgaagctcaaagatccagcctccatataagccccacaagcaagcttccatcaagtggtaatcagagcacaagagcttcaagtaggtgctccttaaacctccattaatttttttgctttaccttctcttccattgttgtttcttcatttttctccatgtatctcttcacatgtcttgttctaaatgttttaacatgattctttagagtttccaccgattaaacttgctatagaagctagatttgattntctatggttcaaaattctttgttcttgtccttgacc

SEQ ID NO: 188974 - DNA, 452 bp, Glycine max
  unsure (1)..(452): unsure at all n locations
actcagcttagagagaagaaaaacctggctatatgggtttactcttactgatctacanccaantctccttcacaaattgtaaagggtttcattcatcagactgattacaaaaccagcatctaacctgccactcctggctacacaagtattctcaaggctacttgtagcacacttcttagactcctcttgaatctaagaacatcccaatattgttttgtcactaagccattcttgactttcacaaaatggttatttgatggaatacaaagatttgcataaagaataaacaataagctcaaatacacaagataactttgctaagaaaatgatagaactatttctagtgcagaatatttaatccaatgactacntatagaattgctttcacttttgtacctatttcttgtatttcacttctctacttcacttcatcatttgagtcattatatata

SEQ ID NO: 188975 - DNA, 341 bp, Glycine max
  unsure (1)..(341): unsure at all n locations
agcttgctccagaaccattattgttaattcattangctaacgacgtnaaacgagcgcttactgggaggcaacccaactctctctttatattttcttaatcattgcacatagtaaggattaacttgtttgtgattgcttgagcgagttatcatcatgttttgcatcttgatatggggttgattaaacttctttgaagatgtggatgagatataacttaggaattttttcactcatccactcgctcaatgtgccctgtgccctaagcaaatcattgtgcatgcgctgagtgagtcactactcgcactaagcgcaccaacccttacttattggctgatggggcc

SEQ ID NO: 188976 - DNA, 475 bp, Glycine max
actcagctctttcaatccatttgaacagagactatctcttctttattatcgaccaatagttttatttaaagtttgaattgctctatgccctttagggtccctttagtgattctacatcatcatctttatcttctaccattactggtctcatttctttgtgtaaagcgatgtttgaccgatcgattgtgccataatctcactttatcattgtcaaatacaatatcgaccgatcgtttgtgccgtaatctctgtttgtcaatgtataataaaatttcaaccggtcatttactttgcatagtgtcttctgatgagattgaaagtcaataagtgaaaccaaagttaaaatctacacgtaaccaagcttttacccacaataattacttgattcggctcaaggtcgaactgtttaacgggtctctttactattattgcttaacatgaacttttcataagttaaaatcacactatgcgtaac

SEQ ID NO: 188977 - DNA, 401 bp, Glycine max
  unsure (1)..(401): unsure at all n locations
agcttgccaanaagaattcctttctatatttgctcaagaaaaccgagcccttcctatggcacaaaacctacgaacaaaccttcttagccttcaagaataccattgcaacaccgccagtcctgagtcgacccaggccaggagtccctctactcctatatatctgagtagctgacgaagccattagctcaacccttgtacaagaggaagggaagcatcaactccctatctacttcaccagccgcatactgcatgacgccgagaagtgctaccaaatgatagaaaaggtggcgctaacactctntacctcggctcgacatcttagaccctactttcagagtcatcaagtggtagtcaagatgaactaccccatcaaacaagttttgcgaaagcctgaactagca

SEQ ID NO: 188978 - DNA, 410 bp, Glycine max
  unsure (1)..(410): unsure at all n locations
gcttgggattggtcttcgctggcaaatgttcaattgggtataaaagagcaaatctgatcatcatgctttgattaatgcaaaataaataaaaaaactggggcaagtgaagagggttagaatgatggagaaacccatgttgtgactgtcattcctatacagccaagtttcccaccaacccaacaatgtcattactcagcgaataacaaaccttctccttactcaccacccagttatccacaaagcctgtctaccgcacttccaatgacgaacaccacctttagcacaaaccanaacaccaaccaagatatgaattttgtcaacgaaaagcctgtagagttcaccccaatttcggtgtcctatgctgacttgctcccatatctacttgataattcaatggtagccataaccct

SEQ ID NO: 188979 - DNA, 134 bp, Glycine max
tgattttaggactcaattttatctgacatgatcatcgatctatcactattactaaggattatttattgatctgtaccaattcacagatgtcaccaagtatagatgaacgttcatcagagttgtgaaccaagcat

SEQ ID NO: 188980 - DNA, 433 bp, Glycine max
agcttatcattcttaatgttactagattttttttgcttttactactaagttatgaaagtaagaaacaaaaacaaaaacttaaccaaaagtaaaattgataattaaaagtacacaacagaaattaaagagtgtagggaagaagaagacaaacacaagatttatactggttcgaccacaaactgtgcctacatccagtccccaagcaacctgcggttcttgagatttctttcaaccttgtaaaatcctttacaagccaaagatccacaagggatgtaccctcccttgttctctttgaataaccaagtggatgtacccttcacttgaactgatccacaagagatgtactctctcttgttctcagtataacaatccccaagtaaatgtaccctctacttgtaccacaaaggatgtaccctccaatgtgttgggacaa

SEQ ID NO: 188981 - DNA, 410 bp, Glycine max
  unsure (1)..(410): unsure at all n locations
tcctgactcaccatataccttgacccagtgttgtaatgtcaatccttaccctcggaagcaaaaaagaatagaagggaaatttccaatcaaagaaaaagagaaggaaaatttccaatgaaagcaaaaaaaagaaaagaaggaaaattccccaatcaaagagtgggagaaagcaaaaagaaaagaaaggaaattcccaatcaaagaatgggagaaagtaaaaaaggaagaagaagaaggaaagaaagctcctgatcagggatcgaaggataaacagaagatatgtgcagaaaggtctttggaccggacaatatctgaacaatacagaattgtcaccaaatgaacaanaaagaaggaaaggaaaccacgacctanaatggtcttctccctttgataccaaccaaaatcccgtg

SEQ ID NO: 188982 - DNA, 417 bp, Glycine max
agcttgagcatgctttccatcccgagttttatttctttttcatttcgagagacatcatcttgtgcattgattgcaggactaataaatttatcatccctaatgtcctcatttctagatactgaaattttagttaggtgtccctgtccaagaaattgagtgcaaatgcatatcagaaaatcagagtgcttgaggtaatgctaaatgaattacacattgcgtataaatcagtccatgatcaaaaataaatttacaaaactcataaccagctcttacaaattaactgtgagccaccagtcttcactgaaacacctacagagacttcttttgcaattcactcatgttcgtgtagtgcaaccaggttcttacatatctatgagacactgacagggtactataccaaagctctcaagaataaaa

SEQ ID NO: 188983 - DNA, 371 bp, Glycine max
  unsure (1)..(371): unsure at all n locations
tagtggtggaatttcactttaacatatacttgatacgtattgagagagatgggaatcgactgtactggtattaagtattatttattatgaaaaatggggcaacttttgcccacttttattggcttccagcactgccacaatcaacatgccatatnttgaaacacacgtggcaactgaagttgataaacttaanattcatgcaggtgacccacatgctgttgccgtggttcctggaagaatggatgtcaattatctggacaattggactaatcaagacaatntgcagcttctgaatttgttgtaagctctatatatgtcatttgtatgaacaaaccccacaaaatagattgacttgatctttttattttttt

SEQ ID NO: 188984 - DNA, 351 bp, Glycine max
  unsure (1)..(351): unsure at all n locations
cgcagagcacngaaaacggagacagacatgttgaccagacaaaaacccgggaagaaagcccaaaagggatggcccgccattgacttagaaggcgaattgcaaaactaaagttggcaggaactgtgaccaaagaaggccgcgacaccactatcgactcatgcccaagacaacgcaagagaactattcggtcagcctggtaggatttcaacatcaacatgtgcataaaattgaccacgactagaaacacgccgaggaagataagtctcaccacacggctagactcacgggctatgctccacaacaacataacggagcacattggttaacctctaaaacatgcgaaggcgaacc

SEQ ID NO: 188985 - DNA, 296 bp, Glycine max
  unsure (1)..(296): unsure at all n locations
taccatttgaaggtacactgaatgatgattggaaatttgatttgtctgtgcatgatatccgccagttggtttgcaccaaccaagcggatatgaccggaaggcttcttgttggatcattggcttttgaaagccgcatccttcactatctcattatgcgtattttacttccaagatcttcaaacgttgcacaggtntctgaataagatcttatcgttatgtgggctctccatactgggcagacaatggattacgcacacttagtccgatatctcatgcttaatgcatagcgataaatg

SEQ ID NO: 188986 - DNA, 406 bp, Glycine max
agcttccttaagaagattcctaattaagtatagcttagctacacatacctctctaatagctaagctcacctccttgagatgagaagctagagcttagctacacaccccctataatagctaagctcacccccatgacaaaaaacatgaaaataataaaaaaaaagtccttattacaaagacaactcaaaatgccccgaaatacaaggctaaaaccctatactactagaatggccaaaatacaaggcctagacgaaggaaaaacctattctaatatttacaaagataagcgggctcatacttagcccatgggctcgaaatctaccctaaggctcatgagaaccctagggcctttccttggatctctagcccaatctacttggagtcttctagccaatgcccttgcggg

SEQ ID NO: 188987 - DNA, 415 bp, Glycine max
  unsure (1)..(415): unsure at all n locations
tctcgagagctgtcggtgttttatttttatcgtctcganatgtgatggtcctgaatcgaaccttcatgtgataacttatgaccatntgaatttctcgagagcttcccgtgttcaatttcgagagtctcgatatatgatgcgcctgaatcggaccttcgtgtgaaaaggtatgaccatttgaatttctcgagatcttccgttggtcaatttcgggcgtccccatatgtgatgtgcttgaatcggacctccgagcgaaaacgtatgaccatttgaatttctcgagaggacccgctttttaatttctagccgctcgatatctgatgcgcctgaatcagacatccgagtgaaaaggtatgaccactttgatttgttgagagctctcattgttcaatttcgagcgtctcatatatgatgc

SEQ ID NO: 188988 - DNA, 435 bp, Glycine max
agcttccaaatggaatgaaaaatgttgtttctgttatgacccaccaatttggagtgactgttagaagaaaagctgacctattcttgatacctattacttcccgtcctatcctggaaagaaaactaccttaaaagcaaagactataatatcctttgaatttgttactatccatttacaactaaaataatgcttggttcatctttcttgattttcaactgaagattttatgacacatccatagtcatcagtgtaaattatgttaagaacctccatggtaacaagggaaatttagctgcaacaaattgccatggcgcattgtgtgcttaaatgaggaaccaactgtaaagtaatgtgccctgccaaaggataaataatatttttgtgagggttgagagaacgatgtgctggagcctgagaatgactcttcttattcct

SEQ ID NO: 188989 - DNA, 397 bp, Glycine max
agctatctatggtgagagtggtgtattttatatagcaccaacgccttctatattgacctccactagcttgaaacacctcctatcgttctctagggtatatgattgcttcataaaggttaaaggctaccttttgtgtgccaacactcatttctagatattcattccctatatctaccactcagttggcaatcaacatgaagggtttgcctaagataaaaggaatctccatatcttcttctatgtccacgatgacaaaatccaccataaaagtaaagtgacggactttgacgaggacatcttttactaccccgtatggtcttatgattgatttattggtgagctacagcctcatcttggtagggtctatcttcagattttcaattcttccacacattga

SEQ ID NO: 188990 - DNA, 406 bp, Glycine max
  unsure (1)..(406): unsure at all n locations
ctcagccttgagccaanagcctgactcaccatagacactgactatgttttattatgtccaaccttaccctcggaagcgaaaaaggagagaagaaaatttccaacaagcaatagagaggaaagaaattccaatcaagaggggaaaagcaaaagaaagaaaaaaattccaatccaagagcgggagaaagaaaaaagagaaggagaagaatgaaagaaagctcctgatcaaggatcgaaagaaaaaaaagaagaaatgtgctgaaaggtctttggaccggacaatatctgaacaatacagaattgtcaccatatgaacaaaaagaatgaaaggaaaccacgacctacaatggtcttctccctttaattgccaacgcaaatcttgtgcgctagcgactttntcggcccac

SEQ ID NO: 188991 - DNA, 335 bp, Glycine max
cctcccaagagaactgatttattataattggtgacaatcttcactataaatacaaaagaaaattagtggagaagatgcacatgaagagagagcatgtgagatgagagattgtgaaacaaagtaactttgttgagagaaaagtgtctttgtgtgagagtattatcatttcttgtaaccattgagtgggatattcggattggtagagtgatacactatttagggtgagttataatcttataatcattttgtgatagcgaaatactttttagagggttcagtggacataggcaagaggtgtcaaaccatgttaaattctcgcggttggtattaccttt

SEQ ID NO: 188992 - DNA, 423 bp, Glycine max
agcttgatgcaacaactttttctttctattgcaaaaacgtcagtcaacaacgattaaaaatgtctttcaacgacggtttaaaatcgtttttgtagataatgtcgttgaaagtcttaactttcaacaacagatccattaaaaaccatcttagaaaaaagaattcttctaagacggttgttacataagaatcatcttggaatgcagtcattccaagacggttgttatataaaaaccgttttagaatgaaactcttttaagatgttttttatataatataaataaaatacaatctagatcacccaaatttaataaaacaaacaaacatctttggttgataggatatataggccaaatcataaactctcatcacatcaacagaagtggtataactaatcaactttaatcaatactctagacaactta

SEQ ID NO: 188993 - DNA, 302 bp, Glycine max
  unsure (1)..(302): unsure at all n locations
cttttcttttcacattcaagaaacatgatttcaacatttctttcatatatntctctctctttcagcatgctattagagcctatcttagaatcattgtttggtcacttgtattgccacgctccaagctagtagccctgggcgtntgcgagagtgttgaaaagttgccttaattgtgctcacccctcttagttgcgacccttttggtgctgctttaatngcagccttaagggtgggtttagtccccaactgactagagatatgacttanatagatctattaatcttgggcattcctcatgttac

SEQ ID NO: 188994 - DNA, 379 bp, Glycine max
  unsure (1)..(379): unsure at all n locations
agctagaaacagaacatcttttgtgcgttcaccgcctcagcaccntaattaatgatcactatctccacggcactctacaataaccaaagagagaattcaccacgcatacagattccgaactcggaataaaaaaaatggaaaacacggacaattgaaacaaacaaaacattgcaggatcaaaccatgaaagcttacgcagaaatggacccctaaatatatatctacatcaaaaaggtgtttcctattaatagctgacagttcttgcatatatacaacccttaagaaaattaaaaatatatatattgaagcataacgaccgtctaacacatcatacttatgacagggaaaattggacaagtaacccacggatgaaaaaacc

SEQ ID NO: 188995 - DNA, 214 bp, Glycine max
acacaataatcaaaaacaaagtgggtggaattcacgctgaaggtgagcgctaagcctgacaactcccaacttgctcttagggtggaattgggtcaagccaaataagtcacaagaagcccgacaggtcgcgctaagcgccaacgctaagctagacaactctcgctaagcccaagttcatcctagataggaattgggcggagcaagacagctcaca

SEQ ID NO: 188996 - DNA, 358 bp, Glycine max
  unsure (1)..(358): unsure at all n locations
agacttgaggagtcggtctttgctattgttttgatcaacgcgggtctganaaaaggcttatttagtcatcctgcttggacgaatgatataactggggcaaatgaagagggtgagaaagagggagaaacccatgctgtgactgatattcctatacggccaagtttcccacctacccaaaaatgttattactcagccaataacaaacctccttacccaccacccagttatccacaaaggccatcccggttaagggaccagtagtttcctttaacggtttctgtgccactccctgatattggaggatggccacatgtgcgatcccaaccagagtaggaggcttatacacaactactatgca

SEQ ID NO: 188997 - DNA, 338 bp, Glycine max
  unsure (1)..(338): unsure at all n locations
agctggtgaagaagaatgtggcatttacctggggtgaaaaacaagagcaagcctttgctatgcttaaagaaaagcttgctaaggcacctgttctagctcttcctaacttttctaaaacttctgagctagaatgtgatgcctctagagtgggagttggagtngtattgttacaaggtgggcaccctattgcttattatagtgaacaacttcatagtgccaccctcaactaccccacctatgataaaagagcttatgccttattaagagccctccaaacttgggaacattaccttgtgtcaaggaattntcattcatagtgatcataatcacttagtaca

SEQ ID NO: 188998 - DNA, 369 bp, Glycine max
  unsure (1)..(369): unsure at all n locations
agcttctcaaggaatttttctcaagaattcttctcatgtatgctacctagtctataaatagaagcatgtgcaacacttgttgtaactttgatgaatgagagtcttgtgagacacaactcanagttcaacttctctcctttttcttccttcaatttcgtgctcccccccccccccccctctttctttctctccctctttcttttcctccattgaagcatcctctctaaactttttatccaaggctcatcttggtggtgaagctccttcttccatggcttattccctagtggatggcacctcctctaacctcttctcctttgtcttccgctgcatcttcatggtgagaaatccccattaaaggacctcatt

SEQ ID NO: 188999 - DNA, 397 bp, Glycine max
  unsure (1)..(397): unsure at all n locations
ctttaccattggttaatacaaagcatttgccacaaaaaacatgaagatgtgaaatgttgggttttctaccattcaacagttcatatggagttttctttaaaatgggtcttattaaagccctattcatgatataacatgcagtattaacggcttcagcccaaaaatattttggaagaggagtatcattcaataagggtctagcaatctcttccaaagacctatttttcctttcacaactncattttgtgaggggtctanggtagaaaatatgtcaatgcctgcttttacaaaaaatcaattcttatttcaactcacccatgatcactctaaagatatatttgaattttctatttgataacttgcagttctaatgctgaagctatctatgatgtaatat

SEQ ID NO: 189000 - DNA, 420 bp, Glycine max
agcttgctctaaatatacattgatggttttatttatggtaggaggttgtatgtcatttttgttttaagagtagtgtcccactggtaaaactaacttttcaaatgtttgccttcgcaggaaatggccccgaggaagcttgcctcaaataggtccaggaaggacaaggctgccgaaggaactaattccgctccggagtatgatagccaccgttttaagagtgcttgtcaccatcagcgcttcaaggccatcaagggatggtcatttctccgggagcgacccgtccagctcagggacgacgagtatactgattcccaggaggaaatagggcgccagcggagggcataactggttactcccatggccgaattgatccacaaaaatccatgagtatatccaatgcttgccaacataaggggcgtg

SEQ ID NO: 189001 - DNA, 287 bp, Glycine max
  unsure (1)..(287): unsure at all n locations
tctggagaaagagagctcaccaaagcaagtaagtgatagctacaccttttctgattggttaaaaatatatctttacctatttgcaaaattatttataactttgtcttgttatttatgggtgngttactaaagaggaagtgaaatcacgaataattcaccactcctatattatagtgggctgggatagtcaaagtattgagtgtatntaacacaaaaatcacgtagggttatgacgataatatgattcctgtgagagggagaaagaagtatggattccatggcgggtg

SEQ ID NO: 189002 - DNA, 328 bp, Glycine max
  unsure (1)..(328): unsure at all n locations
ccctaagaaccgagcatcaagcngaaaaatagggcccatttattctttatgggccaataagcagaccccatcccattaacaaggatatcatcatcattggggtttaccaagcactggaggccaaatggaccaaatgcaagaaaaggggacccgtggcttgccccatgtaaaaatacaacaaggccaatgccttctcaccaaaccctcactaaaaaacaagcatggatcgaagcgatcgcttacaatttgcaaaaatgagcactaagcaccaaacacataaggaagccaataccaagaaatgccttacctgggggaggataaagcggaa

SEQ ID NO: 189003 - DNA, 324 bp, Glycine max
  unsure (1)..(324): unsure at all n locations
tcttagtttcagatgatgcagctgagttcgagctacctcattctcttctctaatgactatagcatcatttcttgcgctaaactgctgggagttggaagccatcttctcaattaaatatctggcttcagcaggagtcatgtctccaagggctccaccactggcagcatctatcatacttctctccatattactgagtccctcataaaaatattggagaagcagctgctctaaaatctgatggtgagggcaactggcacatagntatttaaatctctcccagtattcatacaggctctctccactgagttgtctaatacctgagat

SEQ ID NO: 189004 - DNA, 249 bp, Glycine max
aggggagagggggaaagaaatgaaaaaaaaaaagaagaaggggaaaggagaaaagggaataaagaaaagaaggaaaaaaggaaaaggaaaaaaaaaaaagagagtgaggaaaaaaaggagggaaaaaaaaaaagggagagaaggaggaaaaaaagaaaaaggaagaaaagaagggaaaaaaaggaaggaaaaagggggagaaagaagaaggggaagtaaaagggaaaaaagaagaaaaggaaaaagaga

SEQ ID NO: 189005 - DNA, 427 bp, Glycine max
acctttatagctaagaggttgttttttatctaaacatggaattcatcatcttcaattgcatgcattcattccacactcggagattcatgcaaaaaccattacttaacggttgtcattctctcacaattaaagatcacactctcactgggttgcggctaatgcgttccttcataatcaacctgacaaaccaactaacattttcagccatgaacctaattccattttctttctcttctaatgaatggatgctcattcaaggcatatgatccatgcatttcaattcactcacatcatacaattgatcaattcaaaccaatcataaacactgaattccaaaatcaaatgtcaaccactggataatataaatgcactgttcaatcaaactttgtacgagctatctaccagaatgaaaactatacactaaaat

SEQ ID NO: 189006 - DNA, 443 bp, Glycine max
  unsure (1)..(443): unsure at all n locations
gacctataaaactaagcttgaaccaaccnaccctgacatgatatgtcttccattcacaagctttgagccaaaatcctgactcaccacaaaccttgacccagggtgagaatgccaatccttaccctcggaagcaaaaaaaagaagagaaggaaaatttccaatcaaaggaaaaaggagaaggaaaatttccaatcaaagaggaagcaaaaaaggagagaaggaaaatttccaatcaaaggaaaaaagagaggaaaggaaattcccaatcaaagagtgggagaaagcaaaaagaaaagaaagaaaattcccaatcaaagaatgggagaaagaaataagagaagtttataagaagaaagttcctgatcaaagaaactagaagaaatgtgcagaaagatcttttgaccacatgatatctgaacaatacagaattgtcaccaaatgaa

SEQ ID NO: 189007 - DNA, 438 bp, Glycine max
  unsure (1)..(438): unsure at all n locations
agctnttgtacttatcattggtcatgattcagatatgataattaaataatgatgttactcctaacattattaaaagataagacaacactaagattccctctcaagcaccacctaaagttcaaactcaataacctcaagaagtatcattaagaagatccactagagaaagaaaaaaatgtaatttgatatgattatgtcatatttctttaagaacatgaatatgacattaggttgactaagaaggtctaattgaccttagtcaagtcatgttatgctctaactctcaagtggattgatgtcataaatgatgtaataaaatcgatggttgaacatgacatttgagatattnttcaaatgcttgaaagtgtgaaacccataagttataaataaatatttatagttgaaagagattcaatgggtaattntgagatatacaaa

SEQ ID NO: 189008 - DNA, 452 bp, Glycine max
  unsure (1)..(452): unsure at all n locations
cccttccttatttctctaattntttttattgcattggtggtcacatttttggtattttctctttataaataccttgctaaataactaataagtatcattttcctaatagttatagtactatntaatatggtgatttattttgttttatttttgtgcaactagatcaggaagcagacaaataaaatattgttaatttaaattntataaacaatgttaaaatataaatattcatataaataacacccacttgcaaagcatatccatgcaattcttgttagtagacctatcaacatgtcagaagtttggcatttttaaaacacaagcttcgaaataataccccgtgtcatgcgtagatgtngatcatttcccaaagaacccagctttatgaatatnttgatacaatgtgctaacagcaactacatgcccgggttactctaaactggtatatatta

SEQ ID NO: 189009 - DNA, 426 bp, Glycine max
  unsure (1)..(426): unsure at all n locations
agcnttgaaatatttatgggataattttctgtttcttaggctcttgatgtctttagaggttacttcctcgttgacatcttttggcttgaatggaattgccatgacaggtttattgttactgtctttgatatttggtagttgatattgtgttgcgggaggtaattccgattggattaactcaccatctttaacttgccaatttgttatgacatttgttgttggatcacttatgatgtcttgtttccaagggtaatctatatcatttctgatggcataagcatgaaaccaataaaagaaaaggacattaatcttgattctttcgacaaattcgtagaacttggtcttgaatttgtttttgtttgtacccttgtaaagttggaaaaaccatctcctctgaggctcattctctggagaataaaaatcttt

SEQ ID NO: 189010 - DNA, 321 bp, Glycine max
cagcttttcttagcttttctacaccttttctcccctttggtttatcttatagcccaagaactcgggaatcaacacagatataacaatggagtaggaagatattgatatcagagtataaaacacaattagcccaactcacaaagaagaagtaatcaaaccagaatccaaataacttaaaatgtcaacaaccacaaaacatccaagacttgaagttaaaaaaaaaacacaagataaataagcaaagtacttatcaaaatagtgtaaattctaagaaactaaaagccaaaatacacggcttataaaagacatattatcagaaac

SEQ ID NO: 189011 - DNA, 428 bp, Glycine max
agcttgacaacagtgctaaccatgttcttgtttataatgtaattagtagaactcgagtgcttttactcccgagttaacaaattctacattcttcattttgtgcattaaaattcacaaaagtactttgtcaactttaatctaaacatagcagtatatgtcaaccccagctaattcttgaatgtgaataagtcttattttgccacgtaatgtttcagaatagtaatgttagttgccaactcacaagcatatgcaaatagatgcataactggttaaggaaagtcccacaaagaaaacgataggttaagaatgatcaacttcactaaccacctttttcccctttctgtcaccctcttgttttgttgtatagagaaagggtaagcaaaggaatttgtcattttgtattctcaaatctatatggatataaacat

SEQ ID NO: 189012 - DNA, 511 bp, Glycine max
  unsure (1)..(511): unsure at all n locations
ctcagcttaagaaaaatatggcctcagcagagtccttatnctataatgtaatnctatcaatagacctccaatctntaatggagagggttaccactactggaaaacccgaatgcaattttttattgaggcaatagatctagaatattgggaagccatagaaatagggccttatatacccaccacagtagaaagagtttcaatagatggtagttcatcaagtgaaagcataactatagaaaaacctagagatagatggtctaaagaggatagaaaacgagtacaatacaacttataagccaaaaacataataacatctgccctgtgaatggatgaatatttcagggtttcaaatagtaagagtgctaacgaaatgtgggacactcttcgattaacacatgaaggaactacagatgttaaaagatctatgacaaatgcactaactcatgagcatgaattatttagaatgaatgccnatcgaaatattcatagcatgcaaaagagattacacata

SEQ ID NO: 189013 - DNA, 370 bp, Glycine max
  unsure (1)..(370): unsure at all n locations
agcttgccacccagctcgcccatgtgagttaggtttcttcctctagaagcacacgccttatggaggaattntctggaaggcccaagtgggtatgatttgctattgcacccccatttttactaaatgcacccccttgctcttttttggtgaatccttctccgtaacgttacgaaactttacgaatttcgtaacgatgctggttttctttctgtaatgttacgaaaccttacggattacgtaatcatcccttttttgccttacggaacgttacagaactttacggattgcgcactaacactgtctttcaatttccggcatgtcacggaacttcacggattatgctacaatgctttcttttgacttccgacat

SEQ ID NO: 189014 - DNA, 430 bp, Glycine max
  unsure (1)..(430): unsure at all n locations
gcttatcaagtaaactgttctttttcactttttcatcagcaacaacacagnttatacaaagccaaacattatttggcaaaaggtacgcaagttaaaaataaaaacattagtgtaacaataaccaaaccaaatatctattcctgtaaataatcgtaccatattttatcaaggcatttacattcacaagttgcaagttataaaaaaggatactggttttcacaaagtcctcatctaatagtaatttcaataacaagttgctttgtgcgggtatttaaaatttcaagcacttctggcaaggggataaaacaagaatataaaataaggcacgttcaaagatgcaacaacctattactggatagaaatctcaaacctctaaagaaaaaaagaagaaaaagggcaggtccatttaaaacaacctggtgtgggtttc

SEQ ID NO: 189015 - DNA, 440 bp, Glycine max
  unsure (1)..(440): unsure at all n locations
ctctaagtcacctgcggcatcaagcttaactncncnntatatttttgttatgttnccaccaaacaaaaaccactaaaacaatataaatttaacagtttaggcatctattgcacaaaaactgtagctgattataaatgaaaaccaccaaaacattaacatgcaacaattgactttccatggttgtatgtcttggtgtttgcaattgaaatgtacacatggaacctcacttatgtaggaatatggtatattatgcagagtgtggtcatcacatcccaggatcattatgagctgtggctgatttggagcctcaactctcaagaggaaaaggaatgcttctcgtactcctaatgagattcatggtgagggtttggtgattacttattttaatatttngtagccttcaataattttggactattgtataattngatattcctttt

SEQ ID NO: 189016 - DNA, 338 bp, Glycine max
  unsure (1)..(338): unsure at all n locations
tccttaccctcggacgcaaaanaagaatagaagggaaatttccaatcatagaanaagagaaggaatatttccaatgaaagcaaaaaagaatagaagggaaatttccaatcaaagaatataaagaaggaaaattccccaatcgaagagtgggagaaagcataaagaaaagaaaggaaattcccaatcaaagagtgggagaaagcaaaaagaatagagagataattcccaaccaaagaatgggagaaagaacaaggaaaagaaaagaatgatagaaagctcctgatcaaggatcgaaagaaaacagaagaagtgtgcagagaggtctttggaccggacaa

SEQ ID NO: 189017 - DNA, 329 bp, Glycine max
ccaaccatggtgcctcaacaacctccaaatcatctatccaaccattgaactctttgatgttgttattccttgagtccctctggcatatgccaaatctttcaactgggtacctgatgctgtcgaaatcacccaaaatgcagcaaagatccccacacagtgagtgtttcaactactttacatgatcccacaatgtcctcttattttgaatgtcacatggggagtagattgtaactatattgatttgctgcgccgccctaatccatttccctaccaggacaataaagccattttcaatgactttcctttgtagctcgaatgtggtttcactc

SEQ ID NO: 189018 - DNA, 398 bp, Glycine max
ggatcattctttcctttaaatggaggaatgatgagcataataccatcaattcggatatgtctaggaacaccatcattaccatcgtctcttccttcttcttcattatgatctctatcctccatttgaatcaacctcttatggaacgcatcatcgtcgtggttcatcaaccctctcctatgatgcatcagagcttgcagttggaattgcgaaagctccactccatcattaggattatgacctgacatctcatacacacacatcgaacgtaacaagacaattatatgtgctggtagatacctcacccactcaagtgatcacacaattatggcttatctctaatggacactctgatcttctccactctatgtcccttgaggtctacgcaatcaagagatatg

SEQ ID NO: 189019 - DNA, 386 bp, Glycine max
ttaacctcggttattcaataaggatgacttttaatctaaaaaattgtgaatgttcatcaaattgcaacatctctaagtataagactcatcttaaatttccgaaatacataacatgcattaaatatgacaacatttacttttaaaagataaattatgggatagaacatgatgttcctcttttactaatacattgtacagaaacataaatgagtatcatactttcaaaaggctcaatgagtcaaggtgaacaaaatctttttgtggctgcagactgatcataaaatagaattattgtctcacatcctattttactagctcgacatggaaaaatttcaatggtctttacgcaagtacaccataacaggaccgtcaatatgaatgtaact

SEQ ID NO: 189020 - DNA, 465 bp, Glycine max
actctgttagtgggcaaaatatgtatttcatttataggatatccccttattttacttataattaattaacttattgtttcaataaaataatatagaaatgtataatttaatataaaattatgattaaatcaatcaaatgtatataatagtataattatatatatatatatatatatattagaaaataaatttatttatttaaaattactttaatgtataatagacctaattatttaataaattttaatttatgtaataataaaaaaatctcctcgaaatttatccatacatcgcacgggtactgaatgctacaatttaaattaaatgattgaaataagaagcaaacgttttgtcaaaagaaacatatttacaatcttattattaatacatctggtgtttgctcatcatttttgtcatatgaataatatcagtaattagtgaaacaaaatttgcaaataaatctaa

SEQ ID NO: 189021 - DNA, 477 bp, Glycine max
  unsure (1)..(477): unsure at all n locations
tataaaactcaagctccatcagcgtccatgttccaacttacccgacatggagatttgtcgtacatcgaattcagatgtcgcggcaagccttcacattgctacttgatagaagaaaagcaagatggtaaaccttggtacttcgatatcaaacggtacatcgaagacaaggaatacccacgggaagcctctaacaatgacaaaagaacgttacagaggttggcaattggcttttntgtaagtgggaatatactgtacaagaggaaccatgatatggttttgcttcggtgtgtggatgctagagaggctaagcaaatgttggtagaagtgcataagggatcctttggaacatatgccaatggacatgccatggcctgtaagattctgagagcagggtattactagctcactatggagaacaattgttgcatncatgtgaggaaatgccacaagtgtcaggccttcaccgataatgtcaat

SEQ ID NO: 189022 - DNA, 376 bp, Glycine max
acccaaaactagcttatccccgtcaacgacattcttagttttttcatctcaaacaattatccatctacactctaggcggagtatgcacctgataaggatataaatgttgaaagtccttattatatgaagattgaaagcttttgtgtttagctttaattcatccccacgatttatacttatatttttctatgacactctctgctcaaggctgctattttccaaaaatgacgacatttcaatgatttcaaatggaccaaactactgcaacccacatgagcataagttcaccttgagactttacaccttttaccacaccataatgactttcaaaatggtggactcatgcatgctctttatacttttaccacaaagcttc

SEQ ID NO: 189023 - DNA, 477 bp, Glycine max
  unsure (1)..(477): unsure at all n locations
tcatgatgaatcaagattgattcaaggagtgttgattattactaagatgatgacaaaaagctcaaaagtcatgatcacttcatgataacaaagatgatgacattcaagaatgagttcaagattgagtaatgaacacttcaaagatcaagaggaaatttgatttcaataatcaagaatcaagattcaagattcaagattcaagattcaagaataatcaagatcaagaatcaagactcacagattcaagaatcaagagaagacttaatcaagataagtattaaattgtttttcaaaacattgagtagcacaagaagttctcataaaatcattaccaaagagttttactctctggtaattgattaccagattatagtaatcaattaccagcggtttaaaatgttaaagatttccaaaattcacaatgaagagtcacatcttttaatgtgtaatcgantacacctttatggtaatcgatta

SEQ ID NO: 189024 - DNA, 453 bp, Glycine max
  unsure (1)..(453): unsure at all n locations
ctcaagcttagagagaatacttcaatggaagaaaagagagagatggttacgatatttaaggaagaanagagggagagaagtcgaacacactctcttttcatatgttgtttctccacaaaatctcttctctatttataatgaagattaccaccaactataataaataagttttcttaaaagttgaaagaaagacaactttcaatacattcatttaactaaggtttatctagtaaaatgtaatcttttactttgcatttaagttgcttaaaccttagtaataaaaattcaattcccaataccttatcttttgacttgaaactctagacttgtgacatcccaatttttttttaagtcttagcacaactttgttgctctgttttaattctcattctataatatcaacaaatcatcgttaaatattttctttggtatatatccttaaccatctattat

SEQ ID NO: 189025 - DNA, 434 bp, Glycine max
  unsure (1)..(434): unsure at all n locations
taaaactcaacttgggagcggccgacnaaagcgaggctctagcaaatacgtattctctaatgaggaactcataccttcgctgttctagataacttgcgagacttgaaaaagtctccaccggaagatgctgacatctccggaaagggtgcagatgaccacattggcctttgctcatcaatcacacttggggtcactgaatgacgaggtgcggataaccgcaaggtgtctccacgggctaccagctcttgggtcatggtaacaaaaagcggtgcggtcgacaaaagcaaggctcttgctcctacgtatcctccaatgaggaactcaaacctacgtagttctggataacttgagagactcgaaaacgctcggagtttctccacttaaatgcaacatgctttagcaaaagacaaaattccaactgatagaacagctat

SEQ ID NO: 189026 - DNA, 331 bp, Glycine max
aagaaactcaccctaaaaatcatatatggctagaacgggaaaaagaaattgtgtttctaagtcacatggcgacagtacctcattcggtgtcgatgaaaacctcatggatcagagcatatactccagggctggtgggagtaaaagatgctaccttgtactatgagtacatgataaattcactgcagccgatgaacagagtttgctacaggaggagaaacaatttctctctacgaatatagacatgaaagataggggcgaggcatcatatgtcatcggcgagaggattcataaaggaagatctcgaggtatgttgaggctctcacaggaaacc

SEQ ID NO: 189027 - DNA, 305 bp, Glycine max
tagctgaattcaattcgaatagattgtggcatagcttatctcttggctagcttagcggaaataatcaacctcaggtaccaaggttgtgcgctaaacgcttgaaactccgggcttaacacatgaatgattatgcgcttatcgagaagcatgcgcttatcaaaaggattaattttcacaaagattttcgaagttttaaacttagtcatttcccaagaaaattgaaacccttaattttaccattccaaagaaggttgaaatgctcccaaagttagaatatacagtaagttccaaatgattaaatgcct

SEQ ID NO: 189028 - DNA, 461 bp, Glycine max
  unsure (1)..(461): unsure at all n locations
tgagtccagactgatcaagaacagaagcctgagcattattttgcttgggtncttcaactgagacctctccagacagatgaagaaactgtgatgactcactctcatcaacgacactttcagtgcccagtatgttggaagaagaccatttatggaaggaagttatcctgacagttccaccatacctccacaccccaactccacctgacagcttccattcataataccgcttcaaacagagaatgcagtccacaactttgctcgatgaacccccctacaaaaaacactcaacccctatgatgtgcatatatgatacatgtatccaatatgatacaattatacatatacaagatacaatacgtgtacgatacatgtatagatatgtataaaaattcataaaacctaataaatatatagtcgcaatttctcagatccacattacacacatacttctcatatactac

SEQ ID NO: 189029 - DNA, 285 bp, Glycine max
aacgagaaacacaacggtgggacagtacaaattggacttctgacttgagaatgaaatctatagactcgcatgagaacgaaaaagaaaaataaggaaagaacgagagagaacagtggcgggaaatatgctttcacgacggtagcggcgcaatttaagatacaatctaatgatacaatgatcactgttattaaccaaatcagataactaattgagaatagttcttcatgatgacatatgaatcctcactcgtcacggtaacatatatgttacaatgcacgcattaaa

SEQ ID NO: 189030 - DNA, 414 bp, Glycine max
  unsure (1)..(414): unsure at all n locations
aaccagcnccacatgcgaaaggcccaagatacctcgatacatatttgttgagagataagcgggggtaagctctctacgaacgccatgttctgcacacaaaatttcaaattctctacagcaatatgcaccacctcaatctttgcaaagagtcgttatagactatcctacttccaacactcgctttgaagctttcaaatgtagaacacacttgcgattcttcctgtaaaaaataaccctaagtttttcttgaaaaatcatcaatgaagcaaattaagtatctgtcacctccattacaagatgggctcattggaccacatatatcagaatgcaccagntccaagacatcctttgctctccatgactttcctttgggaaattgagatcgatgtctgttgccaacaacacattcttcac

SEQ ID NO: 189031 - DNA, 473 bp, Glycine max
catgggcaggatgatgatcgctgatcaagatatcctacactcaatcgccaacaacgaaggccacatatcaatgcttctgtcagcctatactttacttgaatttttcagtggaagctatcaattgtgcatgagtttgttcgtgcacctgacgaatttatgagatgaactcctcaatggtggcataggaacacacttgactatggaaacttatcaagtctaagggggccacgagtaatcatgcactaaataacgtggaaaggactagccgtggactatgattatcgacattattgtgagaaaatatatcttgacagagtctaacatcccactactttaaatgatcgccaaccataatgcatagcaagttaccaagggaacgactaagcacttcaatgtcactgttagtttgtgtattgtaagcactgctgaagatgatgctggtgttaactaaacgccacatacttcttcaaata

SEQ ID NO: 189032 - DNA, 484 bp, Glycine max
  unsure (1)..(484): unsure at all n locations
ctcagcttaggcttttaattgcttcagattgttgcccagaagggttaatgtctgtgtggtggtcggcagagcagcataaaccacagagtctggcgacaggtgcagattttttattcatggccagttgggttaccaggttaaccaagacatctagtttaccttcaagattcttagtctcacctgatgaagatgaatttgtggctacttcatgcactcctctaatgacaatagcatcatttttgacactgaattgctgggatttagaagccatcttctcaattaaatttctggcttcagcaggggtcatgtctccaagggctccaccactggcagcatctatcctacttctctccatgttgttgagtccttcataaaaatattggaggagaagctgctctgaaatctggtggtgagggcaactagcacantaatttttaaatctctcccagtattcatataggctctctccactaagttggctaat

SEQ ID NO: 189033 - DNA, 404 bp, Glycine max
  unsure (1)..(404): unsure at all n locations
tcttagtttcagatgatgcagatgggtttgtagctaccttatgttctcctctaatgactatggcatcatttctggcactaaactgctgggagttggaggccatcttctcaattagaattctggcttcagcaagagtcatgtctccaagggctccaccactggcagcatctatcatacttctctccatattactgagtccttcattaaagtattggagaagaaactgttctgaaatctgatggtgggggcaactggcacatagtatcttaaatctctcccagtactcatacaggctctctccactgagttgtctaatacctgagatatccttcctgatggctgtggtcctggagcagggaaatttttntctaataatactctcttaacgtcatccaactcgtgat

SEQ ID NO: 189034 - DNA, 465 bp, Glycine max
  unsure (1)..(465): unsure at all n locations
tatgcgcatatttccttacgaacgttcacttgcactttattttctattaactaagaaaaangcacccatatacaatcaaggcaccttcgttacctagattatttatatgtacttccaaggtgtatttgctacctacatcacatgcacttccttggctaaatttacatacatgcatactcaaagcatttggggtaccaaaaattgcacatgtggacattccggtatttctaatatttatgcatatacaaacttcatgatgaatcttgactatctacacaataaggtgctacatttcatgctcttttcaagtttttgctacctaaagccgcatgcaaattcaagtatattttcttgtgctgactaacattgtattcaaattaagaggtatatatcttcttgtaatggtatttctttacataacatgtaatatgtatattatctttttttgtgagacattctgactac

SEQ ID NO: 189035 - DNA, 447 bp, Glycine max
  unsure (1)..(447): unsure at all n locations
tcttctagactcatcttctccttgaagtggcgtcttctctctctcttccttctccattccgttgccattcatcttccaagaagcaaaggaattcattgatgaagaagatcctatgcctacaagctccaatggagcttacatcatgtggtatcaagagcatcttcgtctaggtgatgttcttttgctacctctatctttntgtttggtgaattctctttaattccttgatcttcatcttattatccatgtatatcctccattgtcttgtggtttggtgctgtttagagtagattcaaaaaaataaaccaattaaatcttagatctaaacttgttcttgcatttctatagttcaaattttgtagatctactcttgaatcatgtttntgtgttgaatttaggttctatcatctttcattcataatattcttctgctgaaccttagatata

SEQ ID NO: 189036 - DNA, 465 bp, Glycine max
  unsure (1)..(465): unsure at all n locations
tgganatattaaagcccagtgtctgtggaaccactatgttctttatttacactacgattggagttaaagcatgaaaatattaaagctcaatgtctttatgaccactacgtggatggttgacactaggatttgagctgaggcataataatgttaaagcttggtgtcatttggatcattgtggtgccaatgatcgacagcaaagttggagccgaaacattattgaagtttggtgtttgatgtgccatcattttcttctattttctaaaccctttttgcaccattttaattactgattggtcttaattatcaattaattaggcagttttattatttgggctcatttagctaatttgatgtttttaatctaatttcaggaattaatgaaacattgcgcttaatccggattttggttgtggacttgaagagggcaaataaagcagcgcttaccttagttatattctaatt

SEQ ID NO: 189037 - DNA, 299 bp, Glycine max
  unsure (1)..(299): unsure at all n locations
ggacctataaaactcagctntataagtgaagtcaggtgcatccatctccctatgagttctctcatgaagtggagattgagccatgttctcaatatgaaaattagtagtcgaatgctcaaaatcagaatgttcagaatctctagcaatagaatgctcagaatgctcaaaatgcacagaatgatcaggatgcacactatgcctaactaatctatgaaaggttctatctattttaagatcaaagggttgtaaatcacctggattgcccctaatcatgcactatatgcagcaaatcatgtatt

SEQ ID NO: 189038 - DNA, 456 bp, Glycine max
  unsure (1)..(456): unsure at all n locations
ntagatagcttgttgtaatcgattaccataactctgtaatctattacaacagagagtttttttctctgaagaaaattntctaacttagaatattttcttcactcacactatgatgatgcacaatgcaaaacaaatatcagatgtactaagatgcaataatcaagttaacaaccaatacaaatgtcactcaaaagagttgggcatgtaaaagccaaaacttcttcaaaccttagccttgagcttcaaattttagccttaggttgttccatgttgctgctcccttatcttgaatatgctccaaacttgtcccctcagtaagcagttgtggccactcatgctgcatttgctcaagctgttccccccagtctcggagggaactttgtaaagttgatatgggatatccttgagaacatatacaagaatgtggacccaatgttggctacctggtactggaag

SEQ ID NO: 189039 - DNA, 469 bp, Glycine max
  unsure (1)..(469): unsure at all n locations
tgacgttgntgttggtggtgcttttctctactgttcctgtttttgctcttatgcgtntcanagttttggacttcatttgaacctttgcgcttacgaattctagctagagacgatgaaattcctgttaatgctcagtttttggtatgatagaattggtaaattgaaaaggaaaagcctttcagaagtataaattgtcatttattttccttgtggttntaatctggacaaaacttagattttggtgatactgttctctgataaaaacatgacatacgagttatttttcatggttgatgcttaaaaaataatttgcatgctatatatttatcggacaagagcactacaaacacttaagttcagatccaacgaanaaaaaactcctgtttcgttaaaaggagagtatattgattgtgaaaatgcacacatttggattcatgtgacatcctcttannacgttaaggtgactact

SEQ ID NO: 189040 - DNA, 453 bp, Glycine max
tgcacttatcacacatgtgatcattagcaacattagcaaaaagttcctttgatcttttgacaacatttaaaaaatgttgccaaatatgaataaatgttactaatatgtttttgcaacattttatcgaatgttgtatataactcacgtcactaaaggttttggtgacatgaactatacacaacatttgataaaatgtttcaaaaatatattagtaacatttattcatatttggtgatattttttaaatgttgtcaaaagcttttagcaacattttcctaagtgttagggaaaaaaatgtttataaaggtcatatgtgtagtagtgttgaaagctcaaaagaagactcgaagtgtccttggttgtactgcaatgaagaagtcaacatactcactggatgaagagaagatatttaagcccttataagtattcaataactaaaggacaagaagaatg

SEQ ID NO: 189041 - DNA, 438 bp, Glycine max
  unsure (1)..(438): unsure at all n locations
tgatgcattgatatatatatatatatatatatgctccagtttcatgggtatagctcacatatgttgagatattatcttactgatatcctatactatttccctactatattttagctatccttaaatagcttgatcatattatttaatttctttaaacagcttgaccatgatctctaaacttagggactgatttagattttgtaatccctttctatccaacgtggtatcaaaacattggtattcatcacgataagagattttcgcttcctttttcttctcttccctactacatataaagatcttaaaccttgctcttacaccactttttgattttggccttagagtttaactcactttcacataaccacctagtaatgtgttgactgcctaacccttataaggactgtattggntatatctcttgtcaatgtggcatct

SEQ ID NO: 189042 - DNA, 172 bp, Glycine max
ctgatggtgttgagaagaatcacatgtttgcatcatctatttgtgtgatgaagcgaatgtacgtatacatgaatttgacgatggcccaataagaattatacacggctgcacttgcttctagactaatactagactggttcgaccaacaaagcctttattcaagaattcttct

SEQ ID NO: 189043 - DNA, 439 bp, Glycine max
  unsure (1)..(439): unsure at all n locations
cgctaacccatggaaactcctaatatctcccacactttgtgtcgtgggccattcttggatggccttgattntctcagggtccacttggacccgatttctaccaacttaaaaccctaaattgtcaattacaaaatagtcctcaattttggcggttgtgctctctttggtgattcactcaatttggagtgcttcttagtcaaatagctcttaaggtggttggcccatttcttcttgactcanattcttcaagggatgacaccaatcctcctttccaattccctacatggcaattcacacacaaggaaacaaagaggcaagcaataaccaaagaccaaaataaaatacaatgaaagctaaaccaatagagttttaaaaagacaatttcaaggattattcaacaattaaagcaatgagaaacacataaaagcagctacgactc

SEQ ID NO: 189044 - DNA, 470 bp, Glycine max
  unsure (1)..(470): unsure at all n locations
ttaaccgtntatttaaatcgtttctcacctaatatatgattaaatgaatttcaaccgatcatttgtgttgtaacgtcgtttaatcactgataaagcaaaatctaaccggtcattcacgatgtaacctcggttaaaccaaaaaaaaaagaaaaataataataaaataatcaaaatacatttgaataaaataatcaaaaaaatcaatcggacattttttctttggaaatttccttgaatgaattgactaataaccaaaatgaaactgaggctaaaatcaattcacgaatcaagctttatccgcaaaaatcacaaaaaccgttttaaggtccaacgccttaaacagccctctttgcttttatcggttaacatggaccgttcanaagcataaaatcaacatgtaactttaccatttttgcaagaactacgcaggtctgattttctcatcgcaattgaggatacataggagcaaa

SEQ ID NO: 189045 - DNA, 428 bp, Glycine max
tataagaacacaattgccttaatcatttccaaatattcatgtgaattacgacgcatcaacaagaatcaagccaatgctattgtgcaagcaatcaatggggcaaaacacaccacatgattataatgatggatggctcaaattcttacaaaggttaaatcatcactttcaaattgagctttcataactatcatgacatgttgagaagaatcaaggatttcaagtcacaaaatgtcaataacttttattttcaaaacaattacccatttcttgaacatatcctataattcaaagaaaaacatgcatagtcgtacgtgcacatgaaattgacccaaaatattaaacttgaaatccgacgaaactaacaacattaacaaatttacacaacttacaaattaacaaaatcaacataactagtaaaacccaataac

SEQ ID NO: 189046 - DNA, 350 bp, Glycine max
  unsure (1)..(350): unsure at all n locations
tgcttcattcctcccctctcttctcatcagagagaggtatacattttcgtaaggagccagctcttgcgntaactgaggtttaatactgaagctcaattcttgctctagagctntggattctacatgcatgcaagaaatcactctcctctcttgttcacttttgcagactaacctagctaagttaaaaaagctcatgcatgtcaacttcacaagatatggaagcgaccaaagtgacctttaggaaaaagagcattcatttcttcgtttgagcacacaaagaacaacctaccaaaggtaggttaacaacctattctagtgaggctgaataactactctacctgtatatcgct

SEQ ID NO: 189047 - DNA, 435 bp, Glycine max
tggaaagatgcttcaatggaggaaaagaaagagggtgtgtatgagagagggggagcacgaaattgaaggaataaaagaaggagagaagtggaactttgaagtatgtctcacaagactctcattcatcaaagttacaacaagtgttacacatgcttctatttatagactatggagcttccttgagaagcttccttgagaagattccctaagaagctagagcttagctacacacaccccccataatagcttaaaaacatgaaaatacaaaaaaaagtccttacttcaaagactactcaaaatgcgctgaaataccaggctatagccctatactactagaaatggccaacatacaaggcgccaaacgaagaaaaacctattctgatatttacaaagattagcaggctcatacttagcccatgggctcaaaatctattc

SEQ ID NO: 189048 - DNA, 411 bp, Glycine max
  unsure (1)..(411): unsure at all n locations
tcctcggtgccattcctgcgaaggcaaacatttttaaagttagtttacaagaaatataacaatcattacaaacaagggccaaacaacacttctcatggcccgagtgtcaacatgcactttataaaataatcatattggggtcgtgctattttatgacacatacgtatttgcacacataaaaattttgtgtgaagcattttgcgacacctatccatgtacatatttttttgacaaaccttttcatgctacatcctatatatatacacattttcttggaaggcttcttttgttacctactcacaaatacacatattgtgaaaaacactnttacgctacccatccaacactttgtaaggcacttcatgctatatatattcatatttatgcaaggcattttcatgctattcatat

SEQ ID NO: 189049 - DNA, 380 bp, Glycine max
cttcaaaagccatagttgtaacataaactaaccacgttttcctgtctaacttttattatattgaacaattctgagtaaactacgtccacgacttgaggaaaatgtctaaaagtatcttctgtttactacaaataagcttttttatctactaaatatttataacaaaaaaatttattttgttaattatttgagatcacattagcgcgttaacaaaattgttattaatgtggtgttcaaatcataactcgtgtgttgacatcaatatatgataaccctagttaaccttcatgggtcctaaattgctgactgcactgattctgccaacattgtactattccaaatcccgaatgctctcattgtccaacgctacagtccactat

SEQ ID NO: 189050 - DNA, 473 bp, Glycine max
  unsure (1)..(473): unsure at all n locations
ntacacaggaaccctatcttcatgatctatgaccatntttctgacagtctggtctccgcgttgatgttctcgttctttatcattttctaccttctccctatccttcacaacttctttctgtctttcacgtctttccttttcaacttctttctccttttcacgtctatccttttcaacttctttctccctttctcgtctatccttttcaacttctttctccctttctcgtctatccttttcaacttctttatccctttcacgtctatccttttcaacttctatctccctttcacgcctatccttttctcttacccgtacacgttcaccttcatgctccttttcaaataccttctttctttccttgtgtagattttttcttctttcacttatcatttgcctaagttcatgcacatctttcgtgataagatccaaaggttgtaagaatgacaaatcttcttccacgtctgcatcac

SEQ ID NO: 189051 - DNA, 411 bp, Glycine max
  unsure (1)..(411): unsure at all n locations
tcttagtttcagctaatgaagatgaattcgtggctactttatgtactcctctaatgacaatagcatcctttttggcactaaactgttgggagttggaagccatcttctcaattaaattcctggtttcagtaggggtcatgtctccaagggctccacccctggcagcatctatcatacttctctccatgttactgagtccttcataaaaatattggagaagaagctgctcaaacatctggtggtgagggcaactggcgcatactcttttaaatctctcctactattcatataggctctctccactgaggtgcctaatgcctgaaatatactttctgataactgtggccctgcaaccaggaaacatattttntcagaatactctcttgaggtcatcccatctcctgatggacc

SEQ ID NO: 189052 - DNA, 127 bp, Glycine max
taagatccttcaactgcgcaaggatcttaattcttgaatattattcttatggaaccatcacccgatcaagacactggaataaacctacgtatacctttttggacgtcgccttaccagctgggggcaa

SEQ ID NO: 189053 - DNA, 323 bp, Glycine max
  unsure (1)..(323): unsure at all n locations
actttcctcnttgacaaatacccctcagccaaatagtatctatcttgggcctttntcccacaactcttgtaaatgggagagaaatgttcatctaaatcatacaaatccctaatgttatcaaatcctaaaatttgagctcctagtgagcaaaacaatgtgtgtctcctagaaagggcatcaactaccacatttgtttttccctttttgtatttgataacatatggaaattgctctaagtactctacccattttgcatgccttttgtttaacttgctttgcactctaatgaacttaagtgattgatgatcactatgaatgacaaa

SEQ ID NO: 189054 - DNA, 363 bp, Glycine max
aatattatgcgcctgaatcagacttacgtttcttatgttatgaccatatgaatttctccactgtattccgtgtgacaagttatgaccacttgaatttcttgattgcattcgctgatcaatttcgagcgtctctatctattatacgcccgaatcgaacttccgtgtgacatgtcttgaccatttgaatttgctgagagcatccgtcgttatatatcgagtatctcgatatattatgcgcctgaatcggacatccgtgtgacaagttatggccatatgaatgtctcgagagcattcgttgttcaatatccagcgtctcgatataattgcgctttaatctgactttcttgtgacaagttatgacca

SEQ ID NO: 189055 - DNA, 468 bp, Glycine max
  unsure (1)..(468): unsure at all n locations
ctntggtactgtggtcaaaggaaataaaatcaaggaaatggatacatttgctgtggcattgtgcctgctggaatttatggaagatgagaaacaacattgcttttcagaatcaggcttatgatgggagaaaattacttgaagattctaagattatagcatgacagtggttcttgtataagaagagaggtcaagaccagatattcatcgatctcttcatggctacaagaaccaatcctatgcttgaattcttttgcttggatatgttatatatgtaactaggatcattcattccatcatgtaaacagacaactgtacattttatacatgattgtncttttgattatatataatacaaatatttgccttccaaaaaaaatatcacatttcttcataatacttatgtatatagggaggactattaataatattaaactcacctgcatctgggagcccatcttttcgtagtac

SEQ ID NO: 189056 - DNA, 428 bp, Glycine max
cgtcttgatctggacaacgtagaacaggaaatagttttatctgctacagccatggcactgcactctcctttggaaaaagcattgattaattatgtacaatgtcttactaaagaggaggaacatgaagtgcagacttgtattaaagagttggatggtgcatgataaaattatgagggacatactgcatttgaagaattgaaaaatggtgggcaaatagaaaaaccaaaagttgaattgaagactttgcttgcccatttgaagtatgtatttttggaagacaataactccaaaccagttattattagcaacttgttgaagaaaacagacgaagatcagctggtgcagattttgaagaggcacaaagctgccattggttggcacatatctgacttgaaaagaattagtccatcttattgcatgcacaaaat

SEQ ID NO: 189057 - DNA, 418 bp, Glycine max
  unsure (1)..(418): unsure at all n locations
ntcctacaagtcctaattgacattctaaactagaatttactcactttatactccaatttccactaaccccgaatttggcttttcaaaccctcaaaatctcacactgttgcactcacaacactaccattctcacatttaaccctaagttaactgtccccatcatctctaccagttttccatcaacattttaagcatacataaatcacaaagcatcattataaaaccctaacatagaatgggtagctttactcacatcatacatgtcaaggttagcatgatttcaacaaattccttcacaaataactatcgtaagggattaacctagtagaactaccgcatatagctcccaaatacccaacacccacgaatgtcaagtgagaagaagtccacccatacatgaaattcgaagccccacaac

SEQ ID NO: 189058 - DNA, 147 bp, Glycine max
tacaaccaagctccgccgtggccccacagtgtgactcgtgcattacggacacaaaaactagcttactttccttgccttgctatttggcatcacttcttgatcaactccggcataaattccagatctaaagatcataactacacccac

SEQ ID NO: 189059 - DNA, 460 bp, Glycine max
  unsure (1)..(460): unsure at all n locations
ttganatcaaactctgccaatggtaatcgattacaggttattggtaatcgattaccagagagtaaaaactctggtagcttagaaaattttgagaaaaactcttttgaaaaacaaaactgtgctatgtttggtttttgaaaaatcttttcaatacttcccttgtgaagtcttcttgatttcttctcttgaatcttgaatcttcttgatttcttctcatgaaacttganattaatcttgatcttgaacttgttgactcaatcttgaaatcattctctggggctttttgtcatcatcaaaactacttgattcatcatcatgaagcttgtttctacaggtataacgtaatctgtgtatcattatcccgacaacaaagcatgacattntttcctctgagaagtcaaccaccaccaaattcttctgtgcccacatgatatgtgtcgtcacatgttggaaatcattt

SEQ ID NO: 189060 - DNA, 478 bp, Glycine max
cgcttgatgatatggtcttcaccgacgaaaggatcaaagtgtgttctaaaaagaggcaaatctgatcatcatgctttgataaatgccaaaaaaaactagggcaaatgaagagggtgaggatgaaggagaagctcgtgctgtgactgtcattccaatacagccaagtttcccaccaacccaacaatgttattactcagccaataacaaaccttctccttacccaccgcccagttatccacaaaggccatccctaaaatcaaccacaaagcctacctaccgcacttccaatgacaaacatcacctttagcgtaaaccaaaacaccaaccaagaaatgtaatttgcagcgagaaagccttagaattcaccccaattccagtgtcctatgctgacttgctcccatatctacttgataattcaatggtagccataaccctaaccaaggttcatcaaccttcatttcttcgagaatacgactcg

SEQ ID NO: 189061 - DNA, 467 bp, Glycine max
  unsure (1)..(467): unsure at all n locations
tgcttgtggagcttctatggaggctggatctttgagctttatgttgtcctttaatggtgattttccaccatggagatgcagcggaagacaaacgagaagaggtaagaggcgacgccatctactagggaataagccatggaagaaggagcttcaccaccaagatgagccttggataagatgcttggagagaatgcttcaatggaggaaaagatagagggagagaaagagagaggggggagcacgaaattgaaggaagaaaaagggagagaagttgaactttgagttgtgtctcacaagactctcattcatcaaagttacaacaagtgttacacatgcttctattcatagactaggtagcttccttgagaagctttcttgagaaaacttncttgagaagcttctttgagaagctagagcttagctacacacacncctctcataactaagctcacctccttgagaagctt

SEQ ID NO: 189062 - DNA, 399 bp, Glycine max
ctcaagcttgcctgtccgatgcagcaataatgatggcccgagctatgttgtttagttgttacgaacccggaatgggtttaggcagagacaacggcggcataactagcctgataaatgcccaaggaaaccgtgggaagtatgggttaggctataagcccactcaggcaaatataaagaggatcgttgccgcgaagaagagcggaagtcaaggctcgcggttgatacaagaatgtgaaggaaacccaccctgccaaataagtaagagctttataagcgcgggtctgggggacgaaggtcaagtcgtcactatatatgatgatgatgttccgagtacgctggatttggtgcgaacatgccctcctgaatttcaacatgtgaaataggcgagtggaggaacgc

SEQ ID NO: 189063 - DNA, 472 bp, Glycine max
  unsure (1)..(472): unsure at all n locations
tatanaaactcaagctcgatctagccgccttntcaacccatattccagatacaaaattatacttgtttgtctctctcctttcaccacaatcttcatattggatatattagcaatgctagcaaaaatataataatattccacattttttaaatcaattaatcattttatcatattaaattctctaatttaattaatcatcacatattaaaattatttctttaatagagattagaacacttgtttggtataaccccgtaggttcaatactaaacggatgatatattaatcaaattcatatactaatcaacgaaggcgtctagcaacactccttaacgtccggatagcatgaaagtacattttactctcaagaaccattagaagaagaatgtaataatttcttccatctttacaagcttacgttaactctagagtatgataatactgtcaaacctctttgagctaactcataatg

SEQ ID NO: 189064 - DNA, 136 bp, Glycine max
actcagcttaacattcaatattgagcgtctcgaatattgcgggactaatcatacatccgagtaaaattattgtcgttcggattggctcagagattcaacattcaatttcgagcgtctcaatatattaccggactca

SEQ ID NO: 189065 - DNA, 482 bp, Glycine max
  unsure (1)..(482): unsure at all n locations
actcagcttaacaatggctgacattactcatccacctatggaacagtttctggaccttgagtactgcatagactcgaatcctccatggggtaccttattcctgtttctctctcatttgggtttgtttatttggtttgatttccactttccataatctacactcatgcacaacacaaacaaaggcttaggagtctcactcttctttcaaacttacttttttcactcctcattntacattttcttattcttatttttagtttctaatgtgcttttccatactctcctctaatatagaaaaaagagcgtgcccatgttaactattttaagttttctattttggaacacatgaccatttatttggcttttatctttcctaatggcaagttacttccctttagtatataaaaaaacagatactcaaatggactgaagagataatagaagttctttgctttacttgaattaaagctccttnctgtgtt

SEQ ID NO: 189066 - DNA, 293 bp, Glycine max
  unsure (1)..(293): unsure at all n locations
ntgataagnttagttaccgacgggaagcggtggaccaactctatcatatgtccaacataactatcacttgatgtcactttctaaaatcattggaagccaagatgtaaactttatattagacgcattatcaatgaaaaacacataacgaaaggggtcaagttattaatatacctgatgaacaagcacttgattattatggatggtaagaggaggggtccaaatgagatataaagcgaggaaagaacatggtagaataagcaactgatgaaagtcgcaaccaaaagacctccgaa

SEQ ID NO: 189067 - DNA, 457 bp, Glycine max
tcctcggggccatttcctgcgagaacaaacttttataagttagatttacaagataatgcttatcttaacgcaaaaaatgtcatgctaacctctctgattttagaatgaactgacccctcacccagaaacagctgaaacacgtatgtgtggaatatcctactatttatatcaacatagaggccatccaacacattctaattgtcatacatatatgcatttgaaaagaacatacattctcacgctcaaggcattgcgtcaaaactcacacttaatttatatcctaaacatttgctatttacaaactacctacatatgtttgaaatatatatcatacaaacttttattgtttcactcacatttattcatattggcaagctatttacattatgcacacacttgcattcaaaagggaattccgtgctatcatacattcatttaagaagacaatcattcacac

SEQ ID NO: 189068 - DNA, 452 bp, Glycine max
  unsure (1)..(452): unsure at all n locations
actcagcttataatatgaacttagaggaacaggtttgttaattttttgctnccgntttgcgacttgaagatcagggaaaattatgaacaccgcctcatcttggggtggattggaatgaaacataaaatattatgaatgaaaaaaacatagttgggggaaagcaacatatatgatggaaaagaaattaaaatattggaaaaaaaagaggagaaaatgagatataaagaatgacatgacgagaaaataatgagtgcgtataaatactatttgtagggtttgaaaataattatttgtttatatatttttaataactccaacattattattaaatacagagaataatgtttattagattaatgtattaaataaatagaaagtgtcctattattatagattcaaattaagggggcctgcattaaaatttttaaatattttgcgtaacagcatgtgat

SEQ ID NO: 189069 - DNA, 475 bp, Glycine max
  unsure (1)..(475): unsure at all n locations
tccatcaagtggtatcagagcacaagagcttcaagtatgttcttcttatacctcgattaatttttttttctttaccttctcttccatagttttttcttcatttttctccatgtatgtcctcacatgtcttgttctaaatgctgttaacatgattctttagagtttccaccgattaaacttgctatagaaactagatttgattntctatggttcaaatttcttgttcttgttcttgaaccatgaattgtgttgagtttaagttcctttgagttttgtcttgttattttttgtggctgaaacctaaaccataaaattcttacaaaaatattaaagtagaagagaacctcacaaatctagagtgacttgttcacctattgtagttttgtcgtagaagtcatgtctagtcatgaaacttgtcacataagatttcttatgttgtgctgaatattatnttcttgtttctttgtctaactca

SEQ ID NO: 189070 - DNA, 393 bp, Glycine max
  unsure (1)..(393): unsure at all n locations
agctttcccacagncctaaatgacatatcagactaggactaacttactttgttctctaattaccactaaatccacacttagcttttcaaatcctcagagcgtcacacttgaccactcatatcactacattctgactttttaacactaggtataactctacccttcatgactatcagagtgcgatcaccaatttcagcacactaacatcgtaatagaaagctcactcagaacgggttagctggactcacaccgaacgtgactaggatagcactctttcaacaaatttcatcactaataacgataataatgcatacacctaataaaactacctgatcatatctcccatacacccattacccacgagattatgcgagacagatgtctacccacacc

SEQ ID NO: 189071 - DNA, 235 bp, Glycine max
atctgcagaagaacatagactacagactcttgcaacatgtgcaaattctttattcatgagaagctgagttactatgttgaccatagcctcaagttttcccttaagctttatattttcaatagatgaagatgaatctgtgggctcctcatggactcctctaaagacaataacatcatttcttgctctgaattgttgagagttccaaatccatcttttcaatcaaattcctagccta

SEQ ID NO: 189072 - DNA, 338 bp, Glycine max
tcatctatgtttcttggttcaatcagagaaacaaaagtcttgttattgcataaaaccctgagtctagagcgagtagaaactccctttgatatttcaccaataatgttgtccattgagaggtctctttgagttctccatgagaaataattggttttcttcttttgtaaagttcattaagggttttccttataataagtcctataatctccctgcttcaagtattacagatagtatttacaacattcttccaaaagtactttggtagccttgtttcatttaaaagagtttcggctccttcttcagaggatctatttttcctctccacaacacttatttgt

SEQ ID NO: 189073 - DNA, 149 bp, Glycine max
caaagtgctctccacacatgcaaggctttgtgaatcgattaccaggaagtgtcatcgattaccagaagacaagggggagaaatagctgttgaaagggatttgaatttgaatttcaacatgccatcgataccatatgtctgtatcgattc

SEQ ID NO: 189074 - DNA, 291 bp, Glycine max
gttagccattgttattccgatgaagaaatcggtgttattatatgacgccgcacaatcagttgccggaagccccatcctctacgtcagttatccgacaccacatccacaaaattttcctcaactgctcatacattagtgcctcacttttgcagggatatgggaaaacagaaagaaaaaagaaacacgcaaaattcctaatttataaaaccagacaatgaggcaggcactctttcacattcattccatcactccactcaatttgaatagatataaagaaaatgtagatcccaa

SEQ ID NO: 189075 - DNA, 214 bp, Glycine max
tctagagaaagctacatgaagctgcctcggtaaaatctctttcttctcttcattaaccggtggatcttctcgaaacttggtctgcaacttcacaagacacttgtccataatctaaccgttgggagctttgagaagaaatctaaaacgtgcgtaaaacctcttaatgaagcttctagaggaagcttcttaattgagcttctaaaaaaaccacatg

SEQ ID NO: 189076 - DNA, 337 bp, Glycine max
actcagcttcacatcagaccacttccagggtgctggaactacttcttatggacttgatggggcctatgcaagttgaaagccttggaggaaagaggtatgcctatgttgttgtggatgatttctccagatttacctgggtcaactttatcagagagaaatcagacacctttgaagtattcaaagagttgagtctaagacttctaagagaaataaactgtgtcattcagagaattatgagtgaccatggcagagagtttgaaaacagcaagttactgaattctgcacatctgaaagcatcactcatgagttctctgcagccatcacaccacaacaaaat

SEQ ID NO: 189077 - DNA, 369 bp, Glycine max
  unsure (1)..(369): unsure at all n locations
cgcttggttacattatgatagtctatactcgaatcttgtaatttcaaatcagaaccatttcctttcaggccctgatcaatacttgcaaatgcaccatttgtaagcgttgcttcttttgatgcgtgaacttcattccatttttccttgcagcattcttgaacggcgtgcacaatctcgtgacgagaagtatatgctacgcaaatcaaaagaactctctggatgttgtgagcaagaactctcattgctttttccacagaagccctgacaggctcagacatagtttgcagtctccaatgaaaagtaatcgaacaccgtattcatngataagactttcttgttgaataactattaatatanttccgatcaatt

SEQ ID NO: 189078 - DNA, 403 bp, Glycine max
ctataaatagggggagatgtgaagcttaattttggttcactcctcccggtaatcaaaatcactcatattagtgagaaaaatcggttccccgaagaatattcaagctgacgcgcttacgtaacgtttcctggggtgatatcgctaacgttttcgaccgttcttcgacgatcttcattcagtctacgtcggtcttaacgaatcaaccggtaagctccctacaacgaactatacaatttattctatgcacccttactgatcctcatttgtctatatgtgccttcatttacattacatgtactttccgaacccttttatgacgtgcttcactcatttgctctaagatttctctcgcctactaaaaaaatttaatcatatcgtcaccgatcatttgaatttcataata

SEQ ID NO: 189079 - DNA, 300 bp, Glycine max
aaaaactaactgatggcaagcgccacccacgatacaacccagtgatttatagtagagggatgtcgcataaggctgggatagttacaaggttaagttgctcatgctcaaatatcttgaataacacaattcaaaagaagcctaagacattagttgactcacatattctgccaaactaagtaccccttggaaacacactcaactaatataagatctgtaggaacttaaaaccccccaagagttaaacagacacttcagaatggttatacagtgtaacaatgactgctgaacgactcaaatcaa

SEQ ID NO: 189080 - DNA, 466 bp, Glycine max
  unsure (1)..(466): unsure at all n locations
ctcaagcttgcaacctttanaagagaaagagcatgtgattggatgtatttctaatatatgtcacctgcttcgcagattgattttgaaagaatgcattgactatatcctcgtgagagtgtgatccttaaattctgagagaaatgactatcatatactactgacttgtgcatgaatctttgacgtatggactgaatgcatgaaatcgaagatgatgaacgccatgtttgattgtgatatccacttagccaaaaaagcggaccacgtgtctgaatgatttatcccttgcacctagttngagctgaatgaattattgattgattgaaccccgagcctatatagtgatatctcctgctaccttgtctaggcattcctcggcagcagccttctcatggtggaacttatccttgatgttgcggttaaagacctcaacggcatcgtcctcatctgggatgaaaagcatgtacct

SEQ ID NO: 189081 - DNA, 444 bp, Glycine max
tagcctgggtgaaggcacctgctacaattagcgcactgattttgctctcagcgcgcgactttgatgctgatgctctgccagatactcctttgagctaagcgcgctgaagatgtgcttagcggaggatatgaccttagcccaattgctacactttgcaattaaaaaattagcctctttttcacctgaaaatgcacaaatttcatcattaaatccaatggaaatgttctataaatagagttaaccataaaataagacttattttaaaaaatcactaccaaataaccataaattggggaactatacaagctttggaaaatgatttctatacaaaggttagtcgtatgaagcgactaacaaacgtccacaattgtatatgtttacttggcctcaagcaaagaaagaacatttaacttgtcctgaagtggcagagacaggggccaatca

SEQ ID NO: 189082 - DNA, 179 bp, Glycine max
  unsure (1)..(179): unsure at all n locations
ccatgaagaagaancaaggcgacncaagtatctctgttgatgacaaacacgatgacaaaaagcccacagaatgaatccccgattgagtcaacaaccctcaagatcaagagtaatattccgtgtcacgagaagaaatcaagaagattcaagaatccagagaaggtcgactcaaaattcac

SEQ ID NO: 189083 - DNA, 470 bp, Glycine max
actcagcttcttataagctgaaccattttatcaataaacacaagttgagttttattcagaaaattacagtttatctctgttatcttagtgagagtgattctcctaaattcttgagtgattcaagaacaccctggctgtatcaaaggactttcacaacctttgtgtgttgccctcgctggaaagagtgattctttccttcctatcatctccacccttgttctttcaaaccacaattccagaaaatccacctctgcccaaaattatctcgtgaccataactcccatttcacacactcaaattaagtgattcttgagcctaaattgaatctcaaaacgagacctttcacctcgttttggaatcacctcatttggagctctgtagcttccgttattgccatttctatatttctgtccagccaccacttaacctacgttgtaccatcccattcatccattttatgccagaaacca

SEQ ID NO: 189084 - DNA, 401 bp, Glycine max
  unsure (1)..(401): unsure at all n locations
tcttacatagtccgcacttgcttgaccttctttatgcttatatattagaaacattaggcatacgcaaaagatcaagaggagttagcgggttaaaaccataaacaacttcaaaatcatcaaaagtgttagtggtcaaaatctgatttttgcaaaacaagatatatagtgactgtttagcacgatacaacctcttgacctcactttntgtggctaaatagctcttcctcacttcaagtgtttcactttttgtggctaaatagctctccgattaaggtgcataatatatcgcgacattggttattgaaaaatggaagctcccgagaaattaaaattgtcattacttttaactcggatgtccgactcatgcacatcagatatcgagacgcccgaatatgaacaac

SEQ ID NO: 189085 - DNA, 354 bp, Glycine max
  unsure (1)..(354): unsure at all n locations
ctcagctttttgacttgaacaacctcaactcctctntcattatctgctctgtgctcgcgacttggccctttcttccttccaacatgaggcattttgctcccccatagctcccgaaatattgttccggtcgtactcttccttgcgagacctcttggtctcttgttcaagggcttttgtggtaatatgaatctatttccgagaccccgcgcactcttttttatatgtggtacacacaaaattaacactttcttgggaagattgcctttctcaatcacttttagagataggcattttcttcctttcggggtttaaaattttttttgaaaattttaactgggggccatttaaccctct

SEQ ID NO: 189086 - DNA, 468 bp, Glycine max
  unsure (1)..(468): unsure at all n locations
ngaaaggaaacaccattatcattgtgaacaatggatccatttgtaaaaataaaacctaatgtggagttcacaactgtctgacttcttgtctctcccaagaatgccatatgtttttgtaagacttgggttgagactaaaacttgtgctttcttacagtgttaggctgtgtcatatatatagatgacttttaatatcagtgctgcattntttaaagattaaaaatgaatacacatgctttctgtatgtgttgtcaactacaccaatgacgtgacatgctntagcttgcatcagatctgcatgtgtagtcatgttgtgcagggtcctttcacgcgctttatgttaatgcagacaacaatntatcatacacgatttttcacaatgtgttgtcaactcacgcaacgatatatcatacatngctttttagaactaagtcatacatttattgtggatgtacaaataaattacatg

SEQ ID NO: 189087 - DNA, 412 bp, Glycine max
tgacagtcgaattagctaaccataagctgctcatattgtatgctataggctacccaagtcctatgtatgcttccgtcccctgattacaaaatccctctcttagattacttaaccattgattaaaatgcattacaaaacccttttccatattcctaaaccatgacatacacaagaagattgcattatccatcagattgctaccattaaagctatcatttgagaaaactatccgattcctatgctgccaaatagtccaggttaatgctatccaccaacactgccatctgtgagcccttataccagcatatcccccataagcatgttggagaaaatgatgtctcgggttttgcaggacagcacccacaatgtttacccaagacatagattcccaccagatagggagggttttact

SEQ ID NO: 189088 - DNA, 104 bp, Glycine max
aactcattaaaagaagacttgcgaagtatatgatcgggtcacaccttattttaccttgattaaccgagattacgacacacaccatcgattgaaattttattttt

SEQ ID NO: 189089 - DNA, 434 bp, Glycine max
  unsure (1)..(434): unsure at all n locations
tatgagaatgactaaacttgcgtagtaaaactattatgttgtctgattctgtttctgaggctatcaaaaactctagaacctgtccaaagatttagaggaaattgtgactgtaatcctatagccaacatatgtcaaaatgtatggacaatggccttgtaatccttaatgtgattaacttgggatcaacatgtttgtctctagtgcacgacccacttaagtctcggccactattntatttttaggcacaattttgtgtttttttatagtggccacagaaaaagggcaaccttacattacactttacgtatgtggtcctatcttttgcttttgcttgcgtagctgtcaaatggatggcttaaatgtctttgtacattgtttttagtagcattacttgtatatgtgtagaactatttgatttattaccagcagctaat

SEQ ID NO: 189090 - DNA, 341 bp, Glycine max
ttatacatctacatatatgtggccctatttaaccatatacactcgagagcgcgcatcgactatgatcactattggtatcaatctttaattatgacacctcgcacatcggctggtggccctctcctgcatatgttgagatgggaaaatgttgacagtcggtggcggcctcattcctgatgatgagttctctgccgaggcacatacatgaagaaaattcagcatcatcaactatatgttaaactatatgaacttcaaattacttatatacatcacacatgtgatcaaagacaaattgtgggaaatcgaaaataatagatgtcttacacgagacacaatgatta

SEQ ID NO: 189091 - DNA, 387 bp, Glycine max
  unsure (1)..(387): unsure at all n locations
gtcacctgcggcatgctagcttgaaagagcccgggtagtgaaagagtatttttatttcatacccatcaaagnctgaagagagtatgatgaactaatggacgtctatatggccaccgatgaagccttggaatgagaaaccaagaaagcccgaaaggaagaacacgaccaaaacaagttttgaggggctttatagggcagcaatagtgagctcaaactctgaagaggtgaaaggaagcatcacgggtcaaaggcatgatctggaaggacgagctaaaggcttgccttaagtcgaaaagaaacttgtcccatcatttaatgtgagactgaaaggaatatgtgggccatcatctatgactgcacagaaaagctaaatttagtggcgactca

SEQ ID NO: 189092 - DNA, 437 bp, Glycine max
  unsure (1)..(437): unsure at all n locations
actaagcttgtaatgcattcttacaactaataagtgcatgtgcggttattattttaatgtagaaagggagaaggaaaaaatttatatatgtaaacaaattaattattatataaaaaaaagaggcaaacagatgactgattgttccattcagtagtgctttatctttaatgagtaaaaatgtagaaagggagaaggaaaaagaggcaaacacagtttgaatccatatatacatacaaggtgtctttaagtcaatttctattgacatcaatattanttccacagatgactgattgtctaaaggacgaagaggagaagggtacctatccaatgaccacatcctgattgtttcttggaaatccacgntgttcaagtgaactgagatcaccaaactgaaatagagattgcactgaaaaagttaaaacaaaagtcacatatgt

SEQ ID NO: 189093 - DNA, 261 bp, Glycine max
cctgctcggctttacattacagagtcgctaagtgcccccagcacttaagcggagataacatatatatcccttcctaacttattcacaaaatgcgcacccagtagcgcccacctctctcccgcacctattgatttgcctcttccttcgaccatgcacctagcaactcacgcgaccttactgcttctttctcttgctccttctacgcaaccttcgatggcagcgagggccgattcttcatctttctcctcctccgtctgtgcc

SEQ ID NO: 189094 - DNA, 444 bp, Glycine max
  unsure (1)..(444): unsure at all n locations
ataacataatgagaaagtgaagttgcctaattgttttcatgtttctaangcncaaggcactcatttctaactatagtttgtttcatgaacaatttccaacaggtacctgtccatgttaagaaaagcttccaaggagaatattgtggttgatctcaccaacttgtacgatcatttctttgtatcttctggtgaatgtagggctaaggttacagcagcaaggctcccatattttgatggtgactactggcctgcggctgcagaggatttgatttatcagcttcctcaagaggaagatggaagataacataataagaaaggaacaactaagaagactataacaaaaagggctctgaaagcatctggtcagtcagatctttctggaaatgcctcacaagaccttctcctaatgcacacagtaatttgctattttgatctttgaacatg

SEQ ID NO: 189095 - DNA, 293 bp, Glycine max
ccgcacaaactcgcccgagccgcataattaacactccggccttttcagccacttcccgcccaccctcacatcccctcccccggcaggcgccaaggggcatccactctccaaattcggttttggacgtctgaggccgccaccgcccgcagcactgaaccctcaacctctgatgggctctcacgggccaaggaattctggtcaataatcggaacattctcaacgcaaacgaacgcgatcggaataggcatgccagcgccatagctcaatctattcacttgaccaacagcgctcac

SEQ ID NO: 189096 - DNA, 445 bp, Glycine max
  unsure (1)..(445): unsure at all n locations
tctacatatgaacattaattacctactactatntggaatttatctcgttttataannaannaanacacgcttttaacaaatagtaactatatgctaatgttggttccagggaaatatttgcactggattagcgtattgcctcatgtcgtggaccattgagagaaaaggtcctctttatgtctctgtatttacccctttgcagcttgtcctcactgccattttaagctgggctttacttcgtgagaaattatacgttggaacgtaagaaatcacgtgcattttatttacttataacttatctataactagtaaataaactatacatgttgtcttttacaataaatatatatatatatatataaaattaaatttgagtcatacatattntgatttggtttatatatcgtgccgtacggctctcttgatagttntgggtctctattct

SEQ ID NO: 189097 - DNA, 274 bp, Glycine max
  unsure (1)..(274): unsure at all n locations
ttgatactcttgcactngacaccatcgtccctcctaagtaacctacgatggacgtcggttgaggtccaatataagccactcaagcactttatcaatcttgctaatccagatggaccatccattttaatgttcacatgtattctgtcttgcatttaccaattattgtacattatacaatcttattcttcaatacccgaccctttctgtattgatacataataactgattccttgtttcttgtgacaccacagctattggttctaaaaccttaact

SEQ ID NO: 189098 - DNA, 409 bp, Glycine max
  unsure (1)..(409): unsure at all n locations
caagcttggccctgtgctgtaagcactgtctttgtatccctaccaccccattcctgatttgcttcactcggtctaactcttgtgccaagatcttgaccacttttgctactctttccatggaggggtagaattcacaaaataaatacggcttccttcctcctagcgagcatcctaagatcccttcaaacttttctatggttggtaccaactgaaagtccccaaatgtgaagcaccttagcgactggtcataatattgagcgagggatgcgatggcttcaatagtaacttctatcatggccaaatcccagattattccatatgccatgcggaaggcttgacattgaacttgatccatccgctgccctaactctcgcaagccggctagttctaagctcttaactntgacatg

SEQ ID NO: 189099 - DNA, 464 bp, Glycine max
  unsure (1)..(464): unsure at all n locations
tgaatgtttctntgctatcatcaatagctccaatcatatttaatctatgagacatctcgtacaacaaactntaatgaataagcataataagaaatgcaaacaatatgatcgcaaaatgtcacctaaaacacaacaatagtaacagacattcttcattcaacttgtcatatggaccatgaaagaacaacaaattcatttaataatcaagtcacactaaacattacaaaacaacaaaagccaatctaaaatcctagaaagcaaacctaaaacccagtctctgaactgactaaccaaatctccaaaaattacacctcagtatagggaatcaaacaccaaaaattaataagaatcaatagacaccatcagaccctaaatgtaacatctcaattntcataaactagattaaaaaaattggtatttataaataaatagaatttaaaaaataatgatgagaatttataaat

SEQ ID NO: 189100 - DNA, 371 bp, Glycine max
agctcatgagaggagatggaccattaatttttttgacatcagctaaacaaaggttatgagagtcttgagccactttggtcagcccaaataatctctctcgttggaggttctctctaatgcttgcaaaacctactaatagtgatgtgtgcaatagctgagtctatgctattcaattcgcaacgaaagttggcatagaaaagaaatcaagtgtgagattatgagactaacaatataagattacttccaatttaaaacagtaacatggctgatgatcatttcaacctaattactttggtagtatagcatagagtgcttagagaaagttgctgaaacaattcatctgctcgacaacctggagagtctttttgctt

SEQ ID NO: 189101 - DNA, 437 bp, Glycine max
  unsure (1)..(437): unsure at all n locations
gacacatacatactaagctttcctgagctcaagcttagcctgagttttttaccttgttgctcatgtngctccccttatctctaacatattatcgaaaaaaggttgctaacatacaatcttgacacttaagctagaaattaagcaacatgatttgtttgtcatcgcataaaactcagtaactcaccacggtttaaattctactgagaagcgatctacaacgagataaaatcaaatgaagcttagtatgaccgtgagtatttatgtcccaagaaaccattaaccactgaatttccatctaactcaatacttatattattgaaaccaagctccaacaaccaattgaaagcctccaagagcctccaagcttcgataagacttgatttgngaacttcatacatggaattcttaatatgttgaaatggttggcacacaagata

SEQ ID NO: 189102 - DNA, 379 bp, Glycine max
  unsure (1)..(379): unsure at all n locations
agctnngaaggttaaagactcacgatgggtangtgctcatgcaacaatttagccgcggctatactagactatctgccaaacaaagtcaggttcacgataactcgcctgtgcttcttctttcatgctatatgtagcaaagctattgatccagtaatgtttgatgagttggaaaataaagccgcaattatactctgccagttggagatgtattttccccctgctttctttgacatcatgattcacttgattgtgcatttggtcagagaaatcaaatgctgtggtcctatttatctaccgtggatgtacccggttgagcgatacatgaagatcttataatggtataccaagaatctatattgtccacaaacatctattggtg

SEQ ID NO: 189103 - DNA, 346 bp, Glycine max
catggattggtgaaatagtatgggcgtccccttgatcactatttaaaaaattgatgaaagtaatgaaatctaatatacttttttctggattttcatgttgattatttctaccaaaaagtacaacaaacctaaggtgtcccatataagtacctaagtttgtattgaaactacaaataagaacaaacctacctaatgagtccctaatgacataaatcttgaagatgttgggtgcatgagtgattttataaaagaggaatgcaccactctaaacattcatcataccacctattttagggatttggtgcctataatacctattttggcaccaacaaatacacagattaac

SEQ ID NO: 189104 - DNA, 449 bp, Glycine max
  unsure (1)..(449): unsure at all n locations
agctcgaaagtctacgacacaatctttagtttattggcagnnggccggnagaacttaaagacgcgatcaacacgatcaggagcacngctctggaaatatgactcctcaaattttttcttcacaaacctgaaaaaaataaatatccaagtcaattagttgtgttgattatgaacaattaatcaagtactaggaatcttctattttcccgttttagtagtggctctttgaagatagctagggccgtttagttcaaaaatatgttctctcgcctcacttctaataacaaaaacatctctttatttcctgtagttcgtacatgaaataatgtgaacagaaaacaatanaaagttggttctagtcattcctataaaacattgagcttaatttctatacactgtctctgtcaaaaaaaaaaattatcttatcaaccactcacaaatcatgggaag

SEQ ID NO: 189105 - DNA, 434 bp, Glycine max
tagagtcataagaagaacgtaatactgcgatgcaatggatgattttatatctctcttcaatatgtagggagtgtaaacaatgcaaaatatgcttatgtaattcaaacaagtacaattttgctgagatgatacaggatattaaacttttatgcaaattttatgaaagaaaaagtattttgactttgaatgtgtctacaaaagcagattccccccactaattgctgggtctcactctcttcaattttatactttgtttacgccttgcagttctcttgatatatcatgatacccatgagaaattaacaattgattatacaaatctccctaaagtagaattgcttatggaaagcacaaacaccactgctacagttgtaattcaaataacagaccattgaacaacaagatgttgaagtgttgaacttttttaaataata

SEQ ID NO: 189106 - DNA, 438 bp, Glycine max
agcgttatgattgtatcttattgagtcatgaatcaatattgattcatgatgatgaatcaagattgattcacggtgttttgctgataacaaagatgatgacaaaaagcccaagagaatgacttcaagattgagtcaaaaacaattcaagaatcaagaatcaagaatcaagttccaagtttcaagaatcaagaatcaagaataatcaagatcaagattctagaatcaagataagactcaatcaagataagtactaaaaagttttcaaaacattgagtagcacatgagagtttcacaaaagctgttaccaaagagtatttcacaaaagctgttaccaaagagtctttagcaaacgttgctttctaaagctttcaaattgaatttacaacgttccaattaatttcaaaatggtgtaatcgattacaagaatttggtaatcaa

SEQ ID NO: 189107 - DNA, 302 bp, Glycine max
  unsure (1)..(302): unsure at all n locations
cttgtctctctctcgaaattgctgaggaaaattatttccgcgaagaaaatccaagccgagacgcttccgtaacgtttccgtgagtaattacgcgaagattctcgaccgttcttcaagattcatcgttcgctcttcgttttcttcagtcttcaacgggtaagtacctcaaaccaagcttttcaattcattctatgtacctgcggtggtccacattttgtctcatgtatctttatacctcgtctcatttgctctntatacccgcctttgacgtgcttaagccatttatttaaggcatctttcgc

SEQ ID NO: 189108 - DNA, 435 bp, Glycine max
agcttatccgaacaaagttcttgttctgcttcctttgcattgccttgtgagaatctgcagcattctaacattgctttcacttctatgcctgtctataggtggagtcggcatatcaaacatgatcttgaagattcaaaggaatgaatacatgggatttgataatttttgcaggaatgatacatagagcttttcaagtatctttttatttgcacacattttctgtttgttgtttgccaccaccaaaccacctgagaggggatgatatgttttgtttttatttcaaatgtcaaaaagaaagtttgtgctaattgaagcattttttggatacatatgctaatagaagcattaaatcttgtatgttcagaagagatgtatcatgccattatgcacgacatattaaatggctattacatttcgttgattcgctatacatca

SEQ ID NO: 189109 - DNA, 414 bp, Glycine max
  unsure (1)..(414): unsure at all n locations
tctaaggaggtgagcttagatattagaggggtgtgtgtatctaagctctagcttctcaaggaagttntctcacagaaacttctcaaggaagttttctcaagaaagcttctcaaggaagctacctagtctataaatagaagcatgtgtaacacttattgtaactttgatgaatgaaagtcttatgagacacacttcaaagttccacttctctccctcttttattccttcaatttcgtgctcccctcttttgtctttcttttcctccattaaatcatcctcttcaagcttcttattcaaggcacattcttggtgatgaagctccttcttccatggcttattccctagtgcatggtgcctccactctcctcttcntctttgccttccactgcatctccatggtggaaaatcaccatt

SEQ ID NO: 189110 - DNA, 399 bp, Glycine max
  unsure (1)..(399): unsure at all n locations
aaggaatatgtgggccatcatcgatgagtgcaaagagaagctaaatcttgcagcgactcacgagcaaaggctagaggatgagtacgccaaaatatcagcagaaagggaagcaagggaaagggtaattgattcattgcaccaagaggcaacaatgtggatggaccaatttgctcttactttgaacaggagtcaagaacttccccgattgctagccaaagccaaagcaatgtctgacacctactatgcccccgaggagatccacggacttctcagctattgtcagcatatgatagacttaatggaccatatgattagaaaccgctaggaagtttgtattgtcgctcagatcttgactagatataacctcttgaataaaatgagtttatcccacatntttac

SEQ ID NO: 189111 - DNA, 461 bp, Glycine max
  unsure (1)..(461): unsure at all n locations
agatagcttggtgtaatcgattaccataactctgtaatcaattacaacagagagtttttttctctgaagaaaatcttctaacttagaatattttcttcactcacactatgatgatgcacaatgcaaaacaaatatcagatgtactaagatgcaataatcaagttaacaaccaatacaaatgtcactcaaaagagttgggcatgtaaaagccaaaacttcttcaaaccttagccttgagcttcaaattttagccttaggttgttccatgttgctgctcccttatcttgaatatgctccaaacttgtcccctcagtaagcagttgtggccactcatgctgcatttgctcaagctgttccccccagtctcggagggaactttgtaaagtngatatgggatatccttgagaacatatacaagatgttggacccaatgttggctacctggtactggaagtcaattc

SEQ ID NO: 189112 - DNA, 290 bp, Glycine max
cacaccggcgcccaggcaattctgcgtttctcacccccccgacacaactcgaactctggagagagtgttgtatgtgaggaatgaactgcatgacagatcttccgtgtacatataaagaggagccgtgaacaacttgcgtgaatgaagagacaaattaaagaaacggtgacaagaatagctgcaattgagcccttttagatctatttttacacagaagaaacggctgccatgtatctctcgcggggctcggagctttcaatatcactatagcgatgaagaacctatcacta

SEQ ID NO: 189113 - DNA, 274 bp, Glycine max
cggaaaatcagaagacagccggggtctagttgacacatggaaaaaacgcgttgaagctgaaatgatcataaatgatgctaggccctgtcaattcagactgcccctggccagccagacaacgactatttgaagttgctcacagtgggaataaacactcaagtgggtcagctgatgttgccatgaagagcgtcagtacacagcttgctgcatccaaaactgccctctcgaagattgccccacgagagcaaactactagatctacatttgcatctcc

SEQ ID NO: 189114 - DNA, 299 bp, Glycine max
  unsure (1)..(299): unsure at all n locations
tctagnacctatatcgacggacgttttaacttttattctttgtgaaaacggaagaattcgcattttatactataactcattaataatgtagaactaccaatgaaaatagccacaaatatatcgttgattttaaattttgataaaactaattgggtaaaattaactctaaagaaatattttcataaagttaatttgcatttgaatataaaatcttaaaaaataactcgagaagcgtaaagaaaatgtgcttgaaacataaataagatatatgtaaaataaacttctatatccactgcaat

SEQ ID NO: 189115 - DNA, 381 bp, Glycine max
  unsure (1)..(381): unsure at all n locations
gcaagcttctaacgcttctaagcgctgctaaaccacttttgttctctncccctttggcaacataaaaaagccaaagtgcgtgataaacaacataagaacattcatataatccaatataactaaagttcatagaatcattcataagtcaaaaccaaatataatccaaccaaatataatccaatcataaagtactaagtgccaaataccaaaatataacgaaagttcagaaaatgataacttaaaaagcatagccaaatacacggcttaacataaaagataataataatctaaacactaggaaggtgatgaaaggtcaaagcaccgacgaagataagtcacatcctcttcaagatggatgatgcgggtatccatgccttcaaa

SEQ ID NO: 189116 - DNA, 466 bp, Glycine max
atagccagcagattgaagtaaatcctaatattcatcttttattaagcattgcacaacaattttcaattaatttaaataaagatatagatatactcactgaaacaataatacgatcatattttccgaatgcaacttctcctatagttgggtagctagtgattccttccctgctttcaaagcagtatctatctcataagggtggctgtataacagcaaatgattgcataaagaatcatcaacaccatgctcatccacccagcttctttcaatgcataaggtgtagacagaatgccaactccagtcatcacattagttgctgcaaaattaaaacattatcatctcataaattaaccttgggtagtaatagaaattgaggaagtgtggttaggcatttttagatagaatattactttcataacaagggtaaaaaaaatcataatcttcttaaaagtcctttcaatatgct

SEQ ID NO: 189117 - DNA, 262 bp, Glycine max
  unsure (1)..(262): unsure at all n locations
aagagagcatgacgaactaagggacgtcaatatggccaccgctgaagccttggaacgacaaaccaataaagtctgacaggaagaacaccaccaaaacaaatctttgagggctgtatacggcagtaatagtgagctcacacttccaataggtgacacgaatcattaccggtcaaacgcatgatccggaaagacgagctcaatgcttgccttangtctacaagaaaattgtcttcaacacgtaaagtgagactgaaggggatat

SEQ ID NO: 189118 - DNA, 380 bp, Glycine max
aaagggagctttgaaagaactacaaaaaaaacgcacttgctgggataaaaatcagtgctcttcttgagataaaaatcaaagctttagtgtgttcttcgggctcgtatgctaaacaaagtctgagaaggatcaagatcacccaaacaattaaccaaaaaaattaagctctgaaagaactacaaacaaaacacactcattgtgataaaaagccgctatttttgttgacataaaaatcaaagctttagtgcgttgtttgaccttctctgccaaacaaatgagacatgccagatatagtttagccaagcatcatcatacagctttgaaggagatcaatataaatgcaaccgcacttataaaaactccaaaatcgaagctttact

SEQ ID NO: 189119 - DNA, 320 bp, Glycine max
tatatgctctgatggtcaatctatatgtacgaattacagtctcttctaaataaattaaaaaaatcatttacaaattaatggctcatgcatgattcaaacatatgactctcatagttattaccacaacgctttaaccaactgagataataagacaattatgttataaaataattaatgtcattatatataacactaaaatttctaatgtatatttaatgcacacgtaaatttatataataaattttgtgacaattgactttgttatatatataatttgctgacaattaactttgatctaataattaattagagtaagctta

SEQ ID NO: 189120 - DNA, 460 bp, Glycine max
  unsure (1)..(460): unsure at all n locations
tctatggaggctggatctttgagcataaattatgtnctttaatgattatncncaaccatggagttgcagtggaagataaaggagaagaggtgaaaggatgcctcatctactacggaataagtcatggaaggaggagcttcaccaccaagagagtgtcttggataagaagcttatagagaaagcttcaatggaggaagacaatgagagaggggggtacgaaattgaaggagaaaaagagggagagaagttaaactttgtagtgtatatcataagtttcacattcatcaaagttatgacaaatgttacacatgtttctatttatagcatacgttttatgaatntcattttcatttcatgtgaatctaagaggaatatttcaaggatatgccaaaggcatcttaacatatttcctttagatgtcacaagaataggtgtaactctagtacatgagaaagtaata

SEQ ID NO: 189121 - DNA, 428 bp, Glycine max
agcttagacgaccttgtgtgagtcgagaatctttattatttatttggacaagtttgaatatgatgtagaagaaaatgaatgtgagcctttttcccctttgaaagacttgtaaaaaaaatgttttaaaaatacttttaattaatatttgaattttttttccttattagtatatatgtgaggggtagagggtgtcacaagatccacttgagtgaattatgcacttgatagattaaacttaatggtgcaagatgacacatcgaatgaggcatatgatgatgatgatgatcccataagctatgaagaggctatgtgaagcttggattgtaagacattgcaagaagttatggaatcaatgaagatcaacagagtatggattttagttaaagctccaaaggatataaaaccaattgcatgtaaatggatttaca

SEQ ID NO: 189122 - DNA, 450 bp, Glycine max
  unsure (1)..(450): unsure at all n locations
ggttgcagttcttctagacttggagtgatgaaatgcagttttcttgaacccttaccttccactctctcgttataccgagacactagaaccccaacaggttttgccttttccatgtactcggaacaaaactcaatagcttcttctgtaatgtatctttcaacaataaatgcttcaagacgatgtagatttttgtatacccttttaagatcttcatgtatcgctcaaccagatacatccactgcaaataaacaggaccacaacatttaatttccctcaccagatgaacaattaggtgaaccaagatgtctaaaaacgaatgaggaaaatacatttccaactgatacaagataataatagtctcattttccagctcatctaacttgagaggatcaatgactntgctacatatggcattgaagacaaacacatgcgagttatggcatgtttgac

SEQ ID NO: 189123 - DNA, 393 bp, Glycine max
  unsure (1)..(393): unsure at all n locations
agctntanggatgtgcgggcaagttattgatcatattatttattctaaaaaattaattaattaattgatgtgagttaaatttgaaataaaataaagaaacaggacatccatttaccagaacgtgttccaattaatttttgttactatttttaattacataaatgatatatatatatatatatatatatatatatatatatatatatatatatatatatataattggcatgaatcgaaaatattctttttttcttttttatcgcaattttaaactttataaaagtaagacattgtttgtctatagcgggatacatacaaaagtaacagataacaatcgtgttctatatgatatatcggtttctctgattaacaatatatattacttctaaaaaa

SEQ ID NO: 189124 - DNA, 435 bp, Glycine max
  unsure (1)..(435): unsure at all n locations
tctcccgcaattntctataaatagggggagtattgatgttgttttggttcagccccttaggcacttctctctctgtcgaatntgcttagaaaaattgttttcgtgaagaagatccaagccgaggcgcttccgtaatgtttccgtaacgtttccgtgagtgatttcgcgaaggttttcgaccgttcttcgacgttcttaattcgttcttcatcgttcttcggtcttcaacgggtaagtacctcgaaccaagcttttcgattcattctatgtacccgtggtggtccacattgtgtttcgtgcattttccttctcgttttcatttactttccgtaccccttttgacgtgccttaagccatttatttaagtcatttctcgcttaacctaaaaataaaatagatttccaccgatcatttgaatcgtttatccgtaacttc

SEQ ID NO: 189125 - DNA, 446 bp, Glycine max
  unsure (1)..(446): unsure at all n locations
tcaagccgcatatacagcggacatgttgtgctttcatgcacattcaacatttgctatgggcaatgatctggatggtgatgtcacctattacagaggatataattaaataaatagtatcaagggaagggaatagatcaatcttccaatgtaacttttccggattgctttgatttgcaccatcatcaccgagtgctaattaatcattattcatcgtangttgccatggttgatgtaacaaatttactattttggattcattatcagtttaacaagtagtggtttagtatcaattaagaattaagaaagttggctaatatcatctaattttattaattaaattaaaaagtgtctgtgattaaaacttaatataagaaataaaacagatttataaatacaatcttcatcaattgaagaatattctcacactaatacaatgagagtaagat

SEQ ID NO: 189126 - DNA, 463 bp, Glycine max
  unsure (1)..(463): unsure at all n locations
cactatacaaactcaagcttcctactgacaataacctntggngcagaggatgctnggttgnttccatgtgcaaccngngnggntattcttaagaaaccattgatcacctctttttgaattgtgtttttgctaaaaggctctggagttggctgagtaatgttagcaaatctattgactgctattcatttgttaatatcatttctctttgcaatagcagttgggctcttcaagtcaatgatattatcttgtcttcaattataatcattgtttgggctatttggaattcttagaatcagttgcaatttcataattccaactgaagctntgaatctgttatcatttctgttcgtgctaacgttaaaatttcaaggattatctctaaaaattgcatgtcttctagcatgagcgactgagcatcttgaagttattttcagttgatggaatactcccaagcatcctatca

SEQ ID NO: 189127 - DNA, 446 bp, Glycine max
  unsure (1)..(446): unsure at all n locations
caagcttccagataaggagagctaaatcctctgttggnnctttcttgtacgcactcgatgtaaatacttgtatatctatttaatgatgttttatgtgttctctgtgctatcagtacgtcatttcaatgtgcttttgccttgataacgtaaatgcatgctctgttatgatcattcaacagtgaaaacaggtttgattcttagaacttgataggacgacgctagcttatccgattttcacaagacatcggggtacgataacttagtttttggtatgttatgtcttaatgtggttctggttaagagtactccaacaagagacatctgaagatgatacttgattaagattaggctaaacatgcgccagacatcangggttagtagtctaggagacacctanaacacatgaacattgtaggtagagaatatcctgtaacatcagcacctat

SEQ ID NO: 189128 - DNA, 461 bp, Glycine max
  unsure (1)..(461): unsure at all n locations
gttgatctaccaccgccaccatcatcgagagttttctatcttgtttaatattatcagnactgtgatttctagccgtgtatttggctatattattatgacatttgaacaatttagtatttcttttatttgcataatatgattgaacaattatgaattatgctttatgactatgtggtttttatatatttgatatattcatgtttcttgcttcatgattggattagatttttccaatgaatgtcttgtgaatgattagtaatatatgtatgttttatatttgttgcacactttggctttttgttgatgccaaagggggagagaaataggattaaatcaagaactcacataagaaattaacttaatttcaagtgaagcttatactaaaaaacaaagggggaaaatatggagaattaagtgagtgatcgactatgaaaaagtatgtgtatgtgtctcttgatttc

SEQ ID NO: 189129 - DNA, 454 bp, Glycine max
  unsure (1)..(454): unsure at all n locations
ctaggtttatgagacgcanttcactagangatatcttatcttcncaccccgtaagaatataggactttactttatatttgtattttaacaatctttctcataagtgagtctcttccatataataatctcctcttgagtggaagacattatcatccacaagtattccatgatggttattagaacccacatgctccggttacttgtagtgtcactccacccatgagacatatgatctgaatccactgacaggaagactttcaatacaagagatcccttggttaagaatccactattgtcatctaactcgttcaagttggtcatcaagtcgaatcatcgatactaattgatgggacggaanaactcactcatatccttattacggaaaaaccacacaaccaaaaataaaaggggaacggctaggggcacctaggcattttgctggtacacccaacaa

SEQ ID NO: 189130 - DNA, 404 bp, Glycine max
  unsure (1)..(404): unsure at all n locations
tcaacttgcaccagcgcctaatggagacagtgcctgcaacgtggattcacctctttgcgttataatatttgctcggtcttgaatcccaacacaataaagacattntgtcagtttcttcataaacttaagtgtcaattcagattgttattataattttgtgcctgcaattcctctgtttactgtcctaaaagttaaatgttacccgttagcccaacacaatgatcatcaaccttcacaggcctttatcttttatgtcaataatcaattcttggtagttatccctagtctaaagtattaaattagaatttccttttcgataaaaaaatntattttattactaaaacatcatatgaagtgcaacatanggactaaaaggtacaacttactgtgggtctcatctcata

SEQ ID NO: 189131 - DNA, 456 bp, Glycine max
  unsure (1)..(456): unsure at all n locations
ttgatgatatggtcttcatcgacgaaaggatcaaagtgggtctaaaaataggcaaatctgatcatcatgctttgataaatgccaaaaaaaactagggcaaatgaaaagggtgagaatgagggagaagcccatgctgtgactgccattcctatacaaccaagtttcccaccaacccaacaatgtcattactcagccaataaccaaccttctccttacccaccgcccagttatccacaaaggccatccctaaaacaaccacaaagtctgtctaccgcacttccaatgacgaacatcacctttagcacaatccaaaaacaccaaccaagaaatngaatttgcagcaagaaagcctatagaattcaccccaattccggtgtcctatgctgacttgctcccatatctacttgataattcaatggtagccataaccccaacccaagggtcatcaacctcatt

SEQ ID NO: 189132 - DNA, 299 bp, Glycine max
  unsure (1)..(299): unsure at all n locations
caacaaacagtttgtgctcctcctttatggcattgcaaatcattaatgatgcctcacgaatctcagtaactcgacaatccattgcgcttctagttccanacattaattaaagaacacatcatcgatggccttcctcactaaagggcgatgcgccctgaatgtcccatacatgcggtgcatccggaatctcagtactcgcgctccctggatctgatgagggaacaaattcagcacctaatattaagactgaccctgatctcttggcaatactcatcagcttggagacccccaactcttaa

SEQ ID NO: 189133 - DNA, 411 bp, Glycine max
tataatatatcgagatgctcttatgatatagatcaagctcttcgtatttactaactgttattacattgcctccggatcttcgaataacgaaagtaacctatcgcgacgctcaaaatttaacatggaaaactcgggtgaattccgacgggctaaagttttgactcggatgtccaattgaggcccataatatatcatcgcccttgaaagtagtaatggactgaccacgcaaattcggacagccataacgtttgactcggattcccgattgaagctcataatatatcgagaagctcttaggataaaaatgaagcccatcggaaatacaaacggccataacttttcctctggaactccgaataaggaaagtaacctatcgcgacgctcataattaacatggaagactccggtgaa

SEQ ID NO: 189134 - DNA, 392 bp, Glycine max
  unsure (1)..(392): unsure at all n locations
attaccacagcccagaaaacagggccaagggagaaaactctggccaaaacaccaaccaaaatcacaggttttctcacttaaagaccccagtaacaattccttcgatccaattcggtaaccgttggatcgactccaaaattttactggaagtctatagtacataagcctacattttgaccgttgggatctactagtaaacatccagaactcattctgcactactctttccacagccaaccacacacaagcatttttctgcacaaagccaaaatcctgctgcacctattttgacagcaaaattctgcataagtgcagatttcgaaaatcacccttcctctcatccaatcttgcccaaaccaaatcctacaagtnccaaatcatgtatcaatcat

SEQ ID NO: 189135 - DNA, 456 bp, Glycine max
  unsure (1)..(456): unsure at all n locations
ngaatccacttacccgcgctaagcgcaagggtggcgctaagcgcaacgtcgcgaattcagagcctacttaaagcctgtcttgtgcaaaattagggtacactttgacacacacttttacagacttttagacaaattgtaggcagaagaaagggcatagattctagagcacaccacaatgcctattatgggaaaaaagccctagaagcatcaagaggagcaacttgtgcattgaaacctaggttttgtaagattattattgtttgggtttctttgtaatggctagctaagcaccctagttggggatttctaatgaacatctgatgtaaatacctaatatctaattgattatgttttctgtgttcaatgcttccttcaattcttaatgtttgtatgcttttggtctgatcatccattcgtgtgcatagttaggtgactttagcattgggaaatgtacta

SEQ ID NO: 189136 - DNA, 480 bp, Glycine max
  unsure (1)..(480): unsure at all n locations
agcttggagaggatgcttcaatggaggattatatatatggagagattgagaaacgggggagcacgaaattgaaggaagaaaaagggagagaagtttaactntgagttgtgtctcacaagactctcattcatcaaagttacaacaagtgttacacatgtttctatttatagactaagtagcttccttgagaagttttcttgagaaaacttccttgagaagcttctttgagaaaacttccttgaaaagctagagcttagctacacacacccctctaataactatgctcacctccttaaaaagcttccttgaaaagattcctaaagaagctagagcttagctacacacacctctctaatagctaagctcacctccttgagatgagaagctagaacttagctacacaccccctataatagctaagctcacccccatgacaaaatacatganaatacaaaanaagtccctactacaaagactact

SEQ ID NO: 189137 - DNA, 412 bp, Glycine max
  unsure (1)..(412): unsure at all n locations
tgggaaagatacaccgacattgtggtgcctcgtaagctgttaccagagatgaatgtggtggtctactatacagagtttgatgagttcaaggaggaactcgagagacgccaatgggatgaggagttgactgattttgctgacagcaacatcgatgttgccattatgaaggaattctgtgcaagcctctatgacccagaggacaaatcacctaagtaggtgagggtgaaaggtcatctgattaagcttgatgaggatactctcaacacattcttgaagacccttgttgttgtggaagagggggaaacactntgtgcatattccagatntgcactcctgaggtctgaccctcaggagttagctgctaagctctgtatccccgggagggattcgagcttaatgttgatggttatct

SEQ ID NO: 189138 - DNA, 455 bp, Glycine max
  unsure (1)..(455): unsure at all n locations
ctctacaagcgagctgcaagcatgcaagcccaagacagaggagagacaatatattttcacaacctcagcagcaaaatcaaccacagcagagcaattatgacctttccagcaccagatacaaccctggatggaggaatcaccctaacctcaaaaggtccagccctcaacaacaacaacagcagcctgctccntccttccaaaatgctgctggcccaagcagaccatacattcctccaccaatccaacaacagcaacaaccccagaaatagccaacaagtgaagcccctccacaaccttccctcgaaaaacttgtgaggcaaatgactatgcagaacatgcagtctcagcaagagaccacagcctccattcagagcttaaccaatcagataagacaatnggctacccaattgaatcaacaacacgtccagaattctgacaagctgccttctcaagct

SEQ ID NO: 189139 - DNA, 435 bp, Glycine max
ttaactgaaacactaagtgagttgccaactttattcatatctttcaacctttaccttcatctggtttgcaggttacaggttgaacactttgtggtggagctcatgggtcaggcttgtgtattcccactaaagaaacatctcatgaagttaattacatgggaaaccagcctagacaaaattctaatgcaggtggattttctggatttcaacatggaaaccagcctagcttttgaacacttatacaatagtctttaagctacttaagattttcaaatgtgaaaaattggaatttcctaatctctaacaacattcttctgataacaaaagagcattctgagcagtcaatgggaacaaagtttaacgtttgcaccttatgcgatagtactcaagcttcacaagcatattctattgtgactctccaatccaccttccgta

SEQ ID NO: 189140 - DNA, 413 bp, Glycine max
  unsure (1)..(413): unsure at all n locations
nntagctatgtatgctgatatgggctacatatatagagttgctgaaatattttatgaaangaacagcnctgggacttgccagcctgacagttggacatttgcatccttgattgctatttatttccgcagtgggaaagtttcacaggcggaagggatgttgaatgaaatgatccaatctggatttcaacctactatttttgttctgacatcacttgtccattgctatggaaaagctaaccgaactgatgatgttgtgaaggtatttaagcaacttctggaattgggcattgttccaaatgatcacttctgctgttctcttctaaatgttctgactcaagcaccaatagaagagcttggtatgctaacacattgcattgaaaggctacaccaagcttggttctgtggaaaatatt

SEQ ID NO: 189141 - DNA, 434 bp, Glycine max
  unsure (1)..(434): unsure at all n locations
gctggagaggggctcaatggttgaataatttagagagagaaagagagaggggggagcacgaaattgaaggaaaaaaaagaggaagagaagttgaactttgaagtttgtctcacaagactctcattcatcaaagttacagcaagtgatacacacgcttctatttccttgagaagcttctttgagaaaacttccttgaaagcttagctacacacacccctctaaaaactaaactcacctcctttagaagcttccttgagaagattcctaaagaagctagagcttagctacacatacctctctaatagctaagctcacctccttgagatgagaaactagagcttagctacacaccacctataatagctaagctcacccccattccgaaaatgcatgannatacaaaaaaaaataagtctctactacanagactactc

SEQ ID NO: 189142 - DNA, 460 bp, Glycine max
tgacaggttcaggtgcaggtgctgctactgttgttgcttcttcaattggttgccagacctcaaggtgatggcactcacatttttcggattctacacagtctgtgaaggcaatttgttagaattttgggactgagattggttcaactgagtagccatctgccccatctgatttgtcagactctgaatggaggttcttgtctcttgctgaaattgcatattctggatggtcatttgcctcactaactcttctaaggaaggttgaggaggggcctcagttgcttgttgtctttgttgtgactgctgctgctgttgctccattagaggaggaacatgtggcttgcttggaccagcggcattctggataggatggacaggctgttgttgttgtggacgacttgtccatctcacatttggatgattcctctaacctggattgatctgttgcttgacagatcatatt

SEQ ID NO: 189143 - DNA, 391 bp, Glycine max
  unsure (1)..(391): unsure at all n locations
aacgtcaaccaaataataatttacacaaacgtcaatggtaataacattttatgttcatggttcacctaaatcaacaaattcgattntcagcctacaaaaacttgtgtaacgctgcattctatctatgtacggagtgggctttgcctgagaatgataatgtgtactccacaacaacgctactagcactaaaggacattggtctcataacaaaacttgttacataacgacaaacttattcaacgttagataccaaactacagtgttagcagtttactaacgtcatgatatgcaattacctgtacataatgatcttcatacacatgaccactgcatattacacgatgcacagaataatctggcggcggctgacttctaatacgaaaaatatcat

SEQ ID NO: 189144 - DNA, 411 bp, Glycine max
  unsure (1)..(411): unsure at all n locations
cgcctggttcgatccatatatagatcatggcaacttgcaaactttattacaacttgccaatgatgtgaatccttcaggttgagtcatgtacacctccttcttcaactcataattaacgaaagctatcttcacatccatttgccatatctcataatcatagtatgctgctacggcaagtacaatccgaattgatttgagcattgccacaggagaaaatgtttcgtcataatctattccttcctattgacgatatcctttagcaacaaggccagctntataggtctcgacctttccatctgctccaatctttttcttgttaacccatctacaaccaattggttctatatcctctgaagcttcaactaaagtccatactttgttgatcttcattgattctatttcacaatccat

SEQ ID NO: 189145 - DNA, 461 bp, Glycine max
  unsure (1)..(461): unsure at all n locations
agcttaagctagatatatttaattttatatatttttaaaaaagtatgaacctaacattttaattaaataagtcagttcaagtcatgttttatgtaggccagattgtaagctctgtaagccggtctggcctattcccaccccagttgagagagtaatacaaataatgaaatattatatttttaaattttcttgcattaatgtccattaaatctataacattagataaaggatatgttttttttgttaatcactttttttactattttttaagataattaagcccttaattattaaaaaattacacaaattcaataaatttaccctgttattcttaacttattatttggtgtccactctttntaaaattatgttacaaatttatttttttagtattattctcccaagtagagcaatgtaaacatnttttcatttaactgcgcacaatattttgtcacttcacc

SEQ ID NO: 189146 - DNA, 464 bp, Glycine max
  unsure (1)..(464): unsure at all n locations
tcaggctctnttgaacattgcaatggcatgtgtttctctatttccggagaacaggcctacaatgagagaagttttaaagatgataagagatgcaagaggggaggctcatgtctcatctaacagtagtgatcactcccctggtagatggtcagatactgttcaaagctttccaagggaagaacaccagagcatatgattggtaactttttgacagcttattagttgaaactatgcattctgatttttcctgaattggttattgatacgattcatgcataaactaggtgatacgtgaggacctacatttttaatctctagctgtgtgagtaaatgcattctacagggtaattaacgattcttttatagagtcatcacaggttgcatagagtgggagatcatcagttcctgctttgtcttgtattttctttctaaaataaaacacacattcccaaataaaacatggg

SEQ ID NO: 189147 - DNA, 432 bp, Glycine max
  unsure (1)..(432): unsure at all n locations
agcttatgctgcanatgtttacaacagatcttctcaacctcagcagcaaaatcaaccacaacagaacaattatgacctctccagcaatagatacaatcccggatggaggaatcaccctaatctcagatgttctagccctcaacaacaataacaacagcctgctccttccttccaaaatgttgttggcccaagcagaccatacattcctccaccaatccaacaacagcaacatccctagaaacagcaaacaattaagactcctctgcaaccttccctcgaagaacttgtgaggcaaatgactatgtagaacatgcagtttcaacaagagaccagagcctccattcagagcttaactaaccagatgggaacaatggccacacagntaaataaacaacagtcattgaattctgacaagctgccttctcaatctgt

SEQ ID NO: 189148 - DNA, 428 bp, Glycine max
  unsure (1)..(428): unsure at all n locations
tcttatccaaggcaattcttggtggcgaagctccttctttcttggcttattccctagcggatgatgcctnccctctcctcttttcctttgccttccgctgcatctccatggtgtaaaatcaccattgaaggacctcattaaagctcaaagatccagcctccatagaagctccagaagcaagcttccatcaagtggtaatcggagcacaagagcttcaagtaggtgctccttaaacctccattaatttttagctntaccttctcttccattgttgtttcttcatttnttctccatgtatctcctcacatgttgagtttaagttcctttgagtcttgtcttgttattctttgtgatcgaaacatacaccataaaattcttacaaaatattaagtagaataaacctcaaaatctgagtgacttgtcaccta

SEQ ID NO: 189149 - DNA, 351 bp, Glycine max
  unsure (1)..(351): unsure at all n locations
agctntctcaagaagcttctttgagaagatatattcttatctacccacacccctctattaactaaattaacctccttgaaaataattacggataaaataacacaacaaatacaatcaaacatcaaacataattattaatatatagatatatataatagggtgttacaaccctctccagaaactgctcaacagaaagaatggatcctggaggcgccaccacctgtaaactctgaagtaaaataatttgtccctgatgaatgctctgaagcatggcttcaaagcgttgagaatcactctgagctgggactgaaagagctgttgaaatggatgctggagtagtagctgcaaatg

SEQ ID NO: 189150 - DNA, 459 bp, Glycine max
  unsure (1)..(459): unsure at all n locations
tatgagaacaaaaatgcctcaatcatttccaaatatgcatgtgaattangaagccaaggctattgtgcaagcaatcaatggagaaaaacacaccaaatgattatgatgatggatggctcaaattctcacaaaggtaaactcatcactttcaaattgagctttcaaaactatcatgacatgtagaggagaatcaaggatttcaagtcacagaatttcaagaacttttattttcaaaacaattacccatttcttgaacatatcctataattcaaagaaaaacatgcaaagtcgtacatgcacacaaaattggcccaaaatattaaactagatatccaacaaaactaacaacattaaaaaattaacacaactaacaaattaacaaaaccaacaaaactagcaaaaccaaagaacactccacccncatacttaaacaacacattgtcctcaatgtagcacaat

SEQ ID NO: 189151 - DNA, 454 bp, Glycine max
  unsure (1)..(454): unsure at all n locations
agcttagtgantaactttactgtaagaggcatatgtgatagtgacaaatacttgtaactcattgaagttagtaaaacttggttggtaactaagaattanatgtagtgttagtggaagagatgaccaatataaatctttgtatcttatattaattctatttatcttctgtgctaaactgacctaggtttaaatttgattntgttttgcaaaatttgttatatcatttgaatcatttttgcaaaaatctcttgtctattttataaagttatccttcagacgataactntgttttccaaggaaaatgctttaaaatttataaaataacagttcaattctccttcttgtggtgcttgcttttgtaaacaaaaaatggacaaatttttttacaatgacaaanaacatatnttgagccttaaattatttaagtagctctcataatacctcaccatattta

SEQ ID NO: 189152 - DNA, 473 bp, Glycine max
  unsure (1)..(473): unsure at all n locations
nttcggcccgcgccagaatctcctccaactcggcacccgtctctcatatgacatctgctccaccacanagagcccccactcaagccccggctcctgcaaggccttgtcctgccggcaatttcaatcctggcacaaattccaacccggggaggaaccctttagtgaagaagctttcggagttcacctcgattccgatgtcatacggngacttgttgccatccttaatcgccaaccagttggcaatggtgacccccagaagaattcaccagtctcctttcccgaggtggtacaacctcgatgcgacctgtgtgtatcacggaggtactccaaggcattcgatcgagcagtgtgtggacctcaagcataaagtgcaaagcttgattgacacggngtggctaaccttccaagaagatggcccgaatgtgaaatcaaattcactcgccaaccatagggaaccagcggtaaatgcgata

SEQ ID NO: 189153 - DNA, 385 bp, Glycine max
  unsure (1)..(385): unsure at all n locations
gaccctgtggacttcttctggtccactgagtgttttgcaagcgcgatccctacaaacaatagatgaaatcagaaatcagttgagcgaggtgcatacttacctatgatgatgtgaccttgccggggggaacgggcaccctgtaagactacagaggcccgtaaccagagctagaaactccagggccctgttggacttctccgggtccactgggtgtcttgtgggcgcgatccctgcaaaaaatagatgacgtcataaatcaattgaaccatgtgcatacttacctatgtcatgacggcacagaccaaccgatacatctgcaaggggagaatggcattgggcnctgggcagaatgttgtaaaancaacgtctacatattatgtagagt

SEQ ID NO: 189154 - DNA, 448 bp, Glycine max
  unsure (1)..(448): unsure at all n locations
tgtattgtcgctcagatcttgactagatataactgtctgtataaaatgagtttgtcccatgtttttattccaaaagtcagtgcgaatcaaatcactcccgcattttatctctagcatgcattcatcattctttacctactcctcacatttggttttttaggaaaaacaccataactaaacgcgccccaaggcatccctatcgcaccagatccaaatctagaacgatgggtgatcaagaggagacacaggaacagatgaaagctgacatgtcggctntgaaagagcaaatggcttccatgatgaaggccatgttaggaatgaggcaactcatggagaaaaacgtggccaccgctgccgctgttagttcggctgccgaagtagacccaactcttctagctaccgcgcaccattctcccccaaatgcgataggacgagaaaggagcacact

SEQ ID NO: 189155 - DNA, 421 bp, Glycine max
  unsure (1)..(421): unsure at all n locations
agctngaacacacatgtttcactaagatttcttgcttagtgaaagttttacaacattaacaagaaagcaagcacaaaaattaatatgttaatgagacagtgaaaaagttaaggtggaaaactaaattcatatttatataaaccacacatacagaaatagaaacttctatccaaattattaaggaccaaaaccatactcaagatatagcacacaacaagactttgtccaaaaaaattcaagatgcaaaattatgtctctggtgaaacacaaatattaccaggaaagctttaaagcttataacggaccaacctagaaacacgttaatataaaatatcctcatgttccacaccaataaaatattacaccatatacatgacaacaatatgagtttntgtgtgtaagtggatgggcatgcagttgc

SEQ ID NO: 189156 - DNA, 464 bp, Glycine max
  unsure (1)..(464): unsure at all n locations
catgtgatccttnggcatcatcaaaacattcttcttgatctctttgtctacatctagcagnatggcgtgaaaacctcgacctcttcgaggaagaggattcgtcgtcggaggcaccacaatgaatatctaccgaggaggaattgccaatcaaaatgacctctcagtccatcaagggttgctaaatcaaatccccataatcgctgccacccatgtcgatggccgagtcagacaaaaaggaagacattatcaaagcagaaataccttgaaggatcgaaggagatgaaggaagaagaaaaggaattgcacagtcgcgagtgcaagagcaaagaacattcaaaaaggcaagacagaaatttcgaagtgacgtggctacaaatgaaatgtccactccatttaaatggactctntggtaactggcgggagctgaatcggtgccctaattntttgcaccatgacacaaccct

SEQ ID NO: 189157 - DNA, 371 bp, Glycine max
gcttttattattgacattaaggttgaagcttatttatttctatttggttggagaagggtatatgggttcacctttgaacatgatgtatttatttttttaacttggtggtatttttttaagtttactatggtagcaagtttttgtgttcttgattgatgcccctttgtcaccttatgaattcttgtattataattgtcacaacctacctcacgacaggatggcgaagaccaaatagataagccaaagcgttcgtctccaaaggagaaaatgagcggagtcgccaccaacgtttattcgagaaaaaaatgttagaaaaaccaaaaagacatctatgaattttgaaaataaaggtttgggagtttgttacacac

SEQ ID NO: 189158 - DNA, 469 bp, Glycine max
  unsure (1)..(469): unsure at all n locations
tctgatttattntctataactgaagaatcaatataaaagctcttttatcttaagtactagctacaagtacaatttaattgtgtcttgatatttttgtttagaagagttatagtcataatacttaattttttttatttgtgccttgagctagttcatgtaaactttgcagaactaaaaattcaaaagaacaatgactttgttttgatttgtcaacaatttttaggcctgtcactttagatccaacactactgcggtctgagcgattggaccgtaaagttgagtttggccttcctaacttagagagtatgacgcagatattcaagatacagacaagaaccatgaactgcgaaagggatattcgagttgaacttctggcttccattggcaccaacatnttttttttaaactgggaaaatttataattatcctgtacttttgatcnatcaattattaaggatttcaacattct

SEQ ID NO: 189159 - DNA, 410 bp, Glycine max
  unsure (1)..(410): unsure at all n locations
agcttctaaactntatacaagaattaagtttagataccacttgttatacaagtggcctcagatatcttaagaatggnggttgaattaatatatcacaaactattccgtaattaaaaattctcatttgattttaacccaaatcccaagattccatttaaaatgaattcctaaataattattcaaattaaacttactgaaaagaagcaataagcaataaataaaagagtttaagggaagagcaagtgcaaactcagttttatactggttcggccatacccttgtgcctatgttcagtccccaagcaatccgcttgagagttgcactaactagcaaaaaccctttgcaagttctgaaccataccaagaaaacccttctttagtgntcanattgctttacaacaagagaccctc

SEQ ID NO: 189160 - DNA, 436 bp, Glycine max
  unsure (1)..(436): unsure at all n locations
acatgtggtactacgtggtggtctggcgatggtttatcaaaagttgtacacatgcacaatgcgcgcataaacccaccatcccctgatgcccacctgcaactgagctcacgtactcccacgtagcccatattctcgattgtctcaacaccgggtgcccatcaatcctcccaagcttncacaacatccaagcaaaacaacattcaaacagcacaagctatcacagccaagcgaaacagagcagaggcagaagactttgccaaaacaccaaccaaatcacaactgttctcacttaaagaccccagaaacaattccttcgatccaattcgttaaccggtggatcgactccaaaattgtactggaagtctatagtacatgaacctacattgtgaccgttgggatctactagcaaacatccagaactcattctgtactactc

SEQ ID NO: 189161 - DNA, 445 bp, Glycine max
  unsure (1)..(445): unsure at all n locations
agcttcatgatgaagtaacaatgattcattgtgttntgatgacaacaaaagattatgacaaaggtgatgaacantaagctcataagatcaaagaacaactcaagtgaatcaaagaacatctcaagtgaatcaagaacaagtcaagagttcaagaatcaagaaaaattcaagactcaagaagaaagcctacaatcaagaatcaagattcaagattcaagatctcaagaatcaagatcaagattcaagactcaagattcaagaataaagaaaggactcaatcaagataagtattaaaaagttttttcaaaactttgaatagcacatgagtttttgacaaagcctttaccaaagagtntttactctctggtaatcgattaccatattggtgtaatcgattgccagtagcaaaatgaagttgaaaagttttcaaactgaatttacaacg

SEQ ID NO: 189162 - DNA, 397 bp, Glycine max
tggcatgtcccttgatatattagagggacttttgtgtctctatgaatgacaaactccttgggataaaggtagtgttgccatgtattcaccgcccgcactaatgaatacaactccttatcataagttgaatagtctagagtaggaccaattaacttttcactaaaataagcaattggatggccttcttgcaacaacacagccctaatcacaacatttgaagcatcacactcaattttaaaagattattgaaagtttggcaacacaagtatggggggcattagttagcttgtgcttaagaacattgaaagctatttcttgtttctctccccatttgaaaccaacatttttcttgagcacttcattgagaggtgctgccaatgtgctagaatccttcaca

SEQ ID NO: 189163 - DNA, 448 bp, Glycine max
  unsure (1)..(448): unsure at all n locations
agctngtgcatccaatgtgaaaggaataactttagataaatatgttatataaaaagttagagtaaaatcacaatgtttatagtggttcactcaaacttgtgagttacatccaattctccttaaaatctttgaagggttccattagtcacaaattgattacaaacaagtattttactctctcacttttgactacttttgactacaagtattctctagaccactcttgagacactcttagtctccccttgagattaagaaaacaccaaagtattcttttgttaataaaacactcgtgtttttctaattaacagtttggttgaataaaatatccaaagcttgcaaagagagaatgcccaaataagcttgaataaaacaaaataattttggtattggtttccacaaatagttnggatgctagtttatntacaacatnatggatgctacatat

SEQ ID NO: 189164 - DNA, 333 bp, Glycine max
tcaccaccaagagagtgtcttggataaaaagtttatagagaatacttctatggagcaacaaaatgagagagagaaagagagaaagtggtgtgcgaatgaaggaaagagagggagagaagttgaactttgaagtttgtctcataagactctcattcatcaaagttgctacaagtgttacacatgcttctatttatagcctaggtagcttccttaagaagctagtgttacacccttccaatagctaagctcacccccatgccaaaataaagcttccttgagaagcttcgttacacccctccaatagctaagctcacccccaagggaacacacaca

SEQ ID NO: 189165 - DNA, 422 bp, Glycine max
  unsure (1)..(422): unsure at all n locations
agcttatgagaccaanatatgacaaagaattttttaacaatctaattctcacgctaatctagtaaatcttgttcataaatcaaacgaattatacaaaaatgtttctcacaacatggggagtaaaacccctaaaacaatttcacatactcatatcaaaattaaaggaatcaaaatcataggttcaaaatacaaaaacaccaagagcactcaattttatcaaccaatttgcatcagggcatcaattggcctgtcaaacataagaatctcatgattataatagtaaaggaagaattacaatatagtaaaaatccaaaaataaaccccaatttgatcctttaaagatccatatacatgttcattttaaccacaattgtgataagctcatcccttacctctaagcangctcactgtgtagttggcaa

SEQ ID NO: 189166 - DNA, 468 bp, Glycine max
  unsure (1)..(468): unsure at all n locations
ctcagcttaaaaagattgatcttttggacatagggttttatttggaacaaacaatatggaactccttaagatgcttatgaggatcttcacctgcaagaccatgaaacttgggcagcaaatgtattagtccagtcttgagaacatatggaacatcctcatcaggatattgaatgcacaagttttcataagtgaaatcaggtgcagccatcttcctaagagtcctctcacgaggtggaggttgagccatcttctcactatgaaaattagtagtcgaaagatcaaatcagaatgttcagaatcaccagcaacagaatactcagaatgctcaaaatgctcaaaatgcacaaaatgatcaggatgcacactatgcctaactaatctatgaaaggttctatctatntcangatcaaagggttgtaaatcatgtgtttctcanacaagcaccaagggagggttaaaactacaact

SEQ ID NO: 189167 - DNA, 395 bp, Glycine max
  unsure (1)..(395): unsure at all n locations
agctngaagaaatatcttcaaatttcatgatcaagttatgatttcatacaacctgtatcatggacaaaattaagcctaaatttgcagatgctgatctacctacataacttgatttgtgtgcaataatctaaagactacttgtgctagataagtgcatttgagattatctaagtgtttgttgaaagctaagagaaatatatacatatttcatgaagaattcatgagctaatatagattttatctttgatgaaattgatgatcaagataaaaatgtcattttgtcctcacaatataacacaattgcaaagctttgtagatttcctatattctagtggtccaaatgacatgaaagcagtgcgtgaatgtcaaagatagaattatctacaactctcatg

SEQ ID NO: 189168 - DNA, 461 bp, Glycine max
  unsure (1)..(461): unsure at all n locations
ntgcataccccgaggatccattaggaaatttcttgtgaattagagccacgagggtgggctcatgggccactctgggatagacaagactcttgtcttactcaaagaaaagttttattggccccatatgaagaaagataggtttagcaagatggcacaatttataccctgccacaaggtggatgatgcttcccacatctcanaactctttttcagggaagttgtgagactccatggtttgcctaggaccattgtgtcagatagagatgctaagttccttagccacttatggaaaaccttatgggctaagctaggaactaaacttcttttctctactacttgtcatccacaaactgattgtcaaacagaggtagtgaataggtctttatccatctttntaaggggttctctgaaaggcaaccttggaatgagtatcttccttatgtaggaatctgcctacacat

SEQ ID NO: 189169 - DNA, 469 bp, Glycine max
agctagtaaatcaaattccccttctatcttcctcagtcatctgcaagtactcggccgcgcatcgcgcggccacgatgttgtaagcactgagagtgattgttatgccatagcagaacttggcacaaagctcaaatgtttccaccccgccaggaaaatcaggtagttggactatttggtgctgtggagaatcagaactctctgagcatagcctttgcaggcgaaaacatttggacagtagtggaaactgaacaacatcaacaattcaacatgaaccaatatgtgacaaaacaataatgaatgaacaataaaaaaaaaaaagatacaaaaagtttcttaaaatataaaaatggactgagatagaacttgaagaagttctatcattggtagattggtattctcaagtgtaaaaagttcaagaagcataccttgtgaagaaaggatctagttcctttcacttgaattatgaagt

SEQ ID NO: 189170 - DNA, 444 bp, Glycine max
tcaccaccaagagagttcattgaagagaagctatctttttcttatatggaggaagagaatgagagagagagaggcatggaaattgaaggagaatatgcagagaagttgaactttgaagtgtgtctcacaagtttctcattcatcaaagttatgataggtgttacacatgtttctatttatagcctaggtaactaacacatccggaacttccttgagaagcaaggaaggtagcttccttgggaagcaaggaagaaagcttccttgagaagctagagggtagcttccttgggaagctagagggggggaacacacactcctccgatagctaaactcacccccatgccaacagacccctccaatagctaagctcactcgatgccaaaatacatgaaaatacaagaaagtccctactacaaagactactaaaaatgccctgaaatacat

SEQ ID NO: 189171 - DNA, 380 bp, Glycine max
  unsure (1)..(380): unsure at all n locations
agctntgaattattattttaaacctacttttcttattataagtactcaccatttgtatctatattatttatcaaaagaaaaagataaggtaatctacacctgaccaatctatcagattatacgtatcacccattttgttcttactgaacgcggtctcaaatattatgtctattctttgttattactttataaacaaatactcctatctgtcattttaaaattatagaacatgtaagctatttcaatttttcagtttatttattaatataagcatgcacataagttatttattcgctttgttatacaatgatcagatggattgtaactctaatagatgatcaaaaatctacaatctaatacttcgtatcataagaatgata

SEQ ID NO: 189172 - DNA, 232 bp, Glycine max
tcttcacacacttctataataactaagctcacctgctcgagaagcgtgccttgagaagattcctaaagatgctagagcttagcttcacgcacctatcctatagctaagctcacctccttgagatgaaaagctagagcctaccttcacaccccctataatagcctagcgtaccccccattccacaaattctctgaaaataccccaaaacaaatcccgtctacaaagactactc

SEQ ID NO: 189173 - DNA, 405 bp, Glycine max
  unsure (1)..(405): unsure at all n locations
agcttgcagaggtcggtggcagactcattatttatggaatgtgtagtggctntgtctcatacctccactacacttcatttgtacctgagcttgctttcctatttttattaattttgttcatgtttatgtgtgagttgaatcttccccgcgaggaccaaaagataaaaaaaaattgttaatataagaaccaaaatgaatgtcttaaactatagggactaaaaaaaattatcacaactataaggactaaaagtgtaattaaatcaaaataaaataaactagagcaaaataatggtggtgtggattcaacctttttcgttttccttcttcttcatggcagtgctatatgcaactcatgttcttctcttgatattgtccactgcaacaactcttcacttcagtgcaagc

SEQ ID NO: 189174 - DNA, 452 bp, Glycine max
tagagagattcccaatctgaggaggaatcttcccatagtatccagtataaagagagggtgaggtgagtcaaggaagtcattgtcccaaggaaagaaggaattgacataccttctccaagaaaataattgccgctcaagtccaagtaattcaaatgctttaaatcagccaaacaaggacttatctctccaccaaagctccatctcctataagcttcctcatccaatccacggacgactccataccagtgttgaggtgaagctgaagaagatgggaagtaaggttgtggcagaggactccataccagtggcaacagttggaattattatgattccaagaccaaagcctatttgaaggatcattcagattattcttaaacttcaaaagtgtctcacgctcacttgggatgcacacactctctctgcatggtaagctcaacaaccaaagctggaca

SEQ ID NO: 189175 - DNA, 203 bp, Glycine max
ccggccaggcaggctttttttttaacttttcccggcacgaaaaacttgggaaaccttcaaagatgaaaaagaaaaatatgcgtaatgaactgcatttgtaccttggctgattgttctaagaataaaattaacttttgatacgagtgaatgtatgacatttaaacctgtgcttataatctgcaccaaacaaaacaaaaaaatgc

SEQ ID NO: 189176 - DNA, 450 bp, Glycine max
  unsure (1)..(450): unsure at all n locations
agctntaagccaattcatacgagaagaacttttttctctgatgnnctgatgagtcccgtaatataacgaaacgctccaaattgaatgtttaagctctgagccaattcttacgataataactttttactcggatgtccgattgagtctcgtaatatatcgacacgctcgaatatgaatgttgaagctctaagcctattcaaacaacaataacgttttactcggatgttcgattcagtgacgtaatatatcgagacggtcgaaattgattgttgaacctatgtgccaatntaaacgacaataactttctactcggatgtctgatagagtcccatcatatatcgagacgcttagaaatgaatgtggatcctctgatccaattcaaacgacaataactgtttactcggatgtctgattgagtctcctaatatatcgagacgctcataattgaat

SEQ ID NO: 189177 - DNA, 401 bp, Glycine max
  unsure (1)..(401): unsure at all n locations
actcaagcttaaacatctcactntgagcgtctcgatatattacgggacttaatcattcttccgagctaaaagnnattggcgcctgaattggctcacaggttcaaaattcaatttcgagcgtctcgatatattacaggactcaatcagacatccgagtaaaaagttattgtcgtttgagttggcttagaggttcaacattcaatttcgagcgtcccgatatattacgtcactgaattggacatccgagtgaaaagttattgtcgcttgaatttgctctgagcttcaacattcaatttcgagcgcctcgatatattacgggactcaatcagacatccgagtaaaaaggtattgtcgttggaattggctcatangttcaacattcatattctaccgcgtcgata

SEQ ID NO: 189178 - DNA, 366 bp, Glycine max
  unsure (1)..(366): unsure at all n locations
gaaaatgttcattttttattatggttgatgaatcatggattctaatggttgttgcgcatttgaaatgtatgggtgaatctgctcattggtatttgggatgccatgaacaacatgataacgctgctacacactgaagttaaagcatcctttgagacaaatacacatgtggttgtacatgnttttaaagttaccttatacaaaaggctacttggcatggtatcaacgtatgctttaaatcagattgctgctgagtatggtcgtgcacattatgctggataaaacccttctattgtggatgtgtgaaagaactcccacggtcttcccattgatgtgaactattgagtatctcttggtacatccacttaa

SEQ ID NO: 189179 - DNA, 441 bp, Glycine max
  unsure (1)..(441): unsure at all n locations
actaagctttatggaggctgngatcttgagatacacaaaggtcctatccatggattttcagcggaagataaaggagaaaaggagagaggaggtgccatccactacggaataagccttggaaggagaagattcaccaccaagtgagtgccatggataagaagcttagagaggaagcttcaatggaggaagagaatgagggagagagaaagtggcatggaaaattgtacgaagaaaggaagagaagttgaactctgaagtgtgtcttacaagactctcattcatcaaagttgtgacaagggttacatatgtttctatttatagcctaggtcactaactaaatgaaattcacaaataaatctactttgtgaatattattttcattccatgtgagtctaaaaagaatattccaaggatatgcgaaaagcatcttagcatataccc

SEQ ID NO: 189180 - DNA, 249 bp, Glycine max
  unsure (1)..(249): unsure at all n locations
acgcgactataccggccggtaattccaaaaccacaacgaacttccctccgaggccgttgtcggaattcaccccgctcccaatgacgtacgaagatcttctaccatcctttatcgncaatcatttggccccggtaactcccggaagggtcctcgaacccactttctctaagtggtatgaccctaatgcaaccttcaagcaccatgggggtgccccggggcatccgcttgacaaagctcgccccttcaata

SEQ ID NO: 189181 - DNA, 445 bp, Glycine max
  unsure (1)..(445): unsure at all n locations
gctntaaatgagataagattattgtttttggccgctantatatatgcgccagtttattgagagcgttgggggtgagggtttaatcttggatatatacagcggcattattattggctaaaatatatttgtcttttctattttcaatttgtactgaaactatttatatttaatttgtctctttttcttaaatctttgaaaacaggaaacaaaataaaaataatgcattaaaagtgaaaatagaaaatgtgaagagaaaataaaattgccagtaaatgctctgaagtttgggttaatgttgcctctttcttttaaggtggaatcaaagtgaaaaatccccggatctaaaaactattagtcgcgaggaacagcaacataaccacaaaaattcttaactgtccatctaacagaataactaatattaagaaattacatcagctttacaata

SEQ ID NO: 189182 - DNA, 475 bp, Glycine max
  unsure (1)..(475): unsure at all n locations
gacactatacaanactcaacctntgagttctaagctcaagaccacttgtattttattatgttttgaaaanccgaaaccttatactaatctgttattgtcctttacctagtcttttttaaagggttagcgggttaaaagagcgagccaaaatagtatagcaggttgaatactcttaagtcttatagttccacacgctatacaataatagatccacatctataaagtgggtgtttagttccatgttttaccatagtagattcgcgtctaaccaaaagctactatgcataagttcacgtttttttagttaatttgacgtaaaaaacaagatatatgtgcgttcataactttactccaaacacacagaaatttgtactaatatcaagaacaatatcttacatctctttggtggtaacgtgttctaaggagaatcttttttcctattgataatgccattgtaacaggaaacttggcagtg

SEQ ID NO: 189183 - DNA, 449 bp, Glycine max
  unsure (1)..(449): unsure at all n locations
agctntctattcctcagaagcgttttgctctccctctaactcttagtattctcacacaaagacaaggtaatcacatcagtaattaatacttactactaataaaaaacaatgagtcatttaacaaggtagcattcaagagagaagacaaccaatttctttttaacaagggagcattcaagagagaagacaaccagcttctttttaatgtgtcaacaactaatattatcattaatagtgagtcaatgacaaacaaaaaccccgtttcaaaatattaaaaacagaaagaccccgtaaccattggattagactaacacccataacaattagattagaataatactaanaatcaacagacaaagaggcctatcttanatggacatgtagggtcttntcnctaattactgcagcttaaacaaaaatggaaacggcacagtcagtcaaacaacatc

SEQ ID NO: 189184 - DNA, 461 bp, Glycine max
tctagtatatataggcctcatattcaagtgtctattgtctcacaacgtgtataattcttcacttgttcttagtcctatgaatgtggtcgttggagcatttattgcttgcattaaatgaacctcctttcttcatgttgagagtccactctttgttgttggcatgttgaacactacaacaggaaattacttcattttttgtcatagcaagtttttgcaacaaagctctttttttatggcaattgaggaatttcatatttgacttcatttattctccataagattcgatatcctacgagaatgtttctgccaaataaatctcagacacataatattaaataaagtcttaaatatcatctctaatgttgtatcatatcatacttatatatgactatcgtttgaaacatcattataattataaatataaattaatataacaaactatctactataatatataatta

SEQ ID NO: 189185 - DNA, 410 bp, Glycine max
  unsure (1)..(410): unsure at all n locations
gatccttaagtcacctgcngcatgcaagctngcgtaataataagaccatattgtttatactcccatcngacataagcgagtattcctttcaagttagctaattgcccactcaaattaattaatgactcacatgaagaatgtgaaatttcgatttccacactaattggcaccaaaatcacatagagtatatgctcaaaactcacatcatgaagaacaaacgttatatattttgatttacatttaagtttaacacaaagcttacctttggtgaacgagcagagactggctgcggctggagttctactgacggtggcggcgtaactggggttgcaagctcacttggttgttcttctctgccagaataaacaaaccgaactatggctacctatattgctctaaacgttgaagaa

SEQ ID NO: 189186 - DNA, 348 bp, Glycine max
  unsure (1)..(348): unsure at all n locations
aacagcncccggcacttggccattgcttgagagtactaacctatcatagcatccaaccagtaccttccaaccaccagggcacataaatccatcaggagggctttctttgctccttgccagtgtgcgcatctgtaaaatgcaagtaacctctgttaacatactacaaatatgtaataacatactcacactattatcataatgaacaccattatgtcacacctacaacatactcgtgttcttttataacaaatacctaacgtgccatctcttttattcatgggaattgaacttggataaaataacttatacattttgttcaacctacttagttagacatccttgatgcct

SEQ ID NO: 189187 - DNA, 445 bp, Glycine max
  unsure (1)..(445): unsure at all n locations
agcttataacttcaagagctggccttcatttcttgtcntgatcttcacatctcttgtgctattaatcatgtcctcgaatttttgtaagtttatattcttttcgatcaagccttcaacataacattaatattgtgctctttaaattaaaccaacttcaataaatcttttaaattcccatacttaaaaagttttacttgtaccactaacacacactggaagcataatttaacctaccatcgtcaaccataacaaaattctacagtaaacaaaaatgtttactaaaatgggacgaaatgactctcaattggtgatgggtatccattcttgtaaatgcaacctatcgaaatggaatgtagaggacaataagttcatcttgctattgggatcgttgagaaaattttcaagcatagaaagtgttggacaaaggtgaaagttcgtaaaaaaa

SEQ ID NO: 189188 - DNA, 410 bp, Glycine max
  unsure (1)..(410): unsure at all n locations
actaagctgaataaatncagtgaacaacagcatgatgactctttctccattttacancaagcctaaagggatatctggtaggaagcaagtcgacattgtacgaaacccactttaactgcagtcacccttagcccgccttaattgcagcctcttttggggcatgccttaattacagcctcaagggtagtggtttagtcccacatcaactagaaatatgtcttaagtagagcttatatagcttaccaatcctcaccttacaagctaactttgtggagctgagttangttccaagtccaacatctcagtgatatacatcaaatagaagcctgtcttgcttatttactactaacatgtactcgtaactacaagttcccgtcttatttgaatgaccaacatgatgaaacaaaata

SEQ ID NO: 189189 - DNA, 367 bp, Glycine max
cagcttcatgcttgatagtggattttgtgtatttcacgatatttttaggcacgagcgaatctatgtgaggatcatgcatgagtgaacatggtatgcgaatgatgacgacataatgtatgaagattgtctgatcaacatgctaaatggatatgtataaaaatgccatgacttatgcgaatgtagtgcatgaatatgataaatgatgaatgtggaaatgatatgcccatctcgatgctataaagaggcaaatgaagtgatcgatgaaacaaggtggggtgagtctgctctgtgtccctaattcaagaacctagcggaaatggtctaaaatttcactattcagctgacaagttcaacgatagcttcatgt

SEQ ID NO: 189190 - DNA, 432 bp, Glycine max
  unsure (1)..(432): unsure at all n locations
tgacactatccacaactcaagcttctacttatgtggcagggcgggcaaacttattcttttttctctaacgcgaactntgaccattgttcttccttcccgcaatgcttcttttcatgtctgcctgagtgggcttatagcctaaaccatactttccacgattcccttgagtatttatcaggctacttatgccgccgttgttttttcctaaacccatcccgggttcaaaaccgttcccaacataactcgcgccatcattaccgctgcatcggacagacaaagtggcccaaagagggagttcaccgaggaaatgctgaccacctcaaaagactggaaagcagtttctaacgattcttctgcggctttcacataaagcatggaggatgggcagcttaccaagatatctttctcgtctgacacgatgaccaagtgccc

SEQ ID NO: 189191 - DNA, 256 bp, Glycine max
  unsure (1)..(256): unsure at all n locations
agcattgcggaaagcttgtctttgacccattaattgccccaactttcgtaaactggtgacctctaagctctcgattntgacttgataaaacctctttttaagcgaacgcttttgacttgatcccatgttttactaaagtgaaataaaatctagtgcgaatcaaaactccgacatctatcatgggtggaatggatgaatgcattaaggaatgcatatgacacagatgccatttatgaataccggaacttcggaaaat

SEQ ID NO: 189192 - DNA, 359 bp, Glycine max
  unsure (1)..(359): unsure at all n locations
tcccgcatccgcactnggaatgaactgattaccgcctnccttatgcagtatcagtacgattctgatatggctcccgactggactcagttgtagaacatggttaagagggaaagtgagtcccttaaagactacgctcggcgttggagggacctggtagcacaagtagcccctcccatggtcgaaagggaaatgattaccatgatggtagacaccttgccgatgttttactatgagaaattagtgggctacatgccctccagcttcgtagacttggtattcgccagggaaagaatcgaagtgggcttgaagagagaggaagttgattacgtctcctccacaggtaccaatgctaggaggat

SEQ ID NO: 189193 - DNA, 290 bp, Glycine max
  unsure (1)..(290): unsure at all n locations
agctggggaatgtatttatgatcaccctttattctagccgngcgcacaatcgttcgtgtgtatgacatccactccacaaagtttgcaatagaagagacctccaatcctattacgcaacttgggggacacacgtggacagttaacttgaatgggcattattgccaatgcggaacgtattctgcgctccactatccatgttcacatattattgcagctcgtggctacctgagcctgaactattaccaacatatacatgttgtttatacacatgagcacattttaaaagctta

SEQ ID NO: 189194 - DNA, 240 bp, Glycine max
gtcacggatggtccacttggttggcgctgtctctaattacatgatatatgcattcaaatgttcctatcatcatatttttccctgcagtgtgtgttttttttgggcgactatgacgagaccaccgtcgcaccatcatgttccccctcctctatggaggtgtctcctgcaaagtgctgctatgcacgcccgattctatcgtcaaacttaattatattattttatccattcataaatacctca

SEQ ID NO: 189195 - DNA, 255 bp, Glycine max
  unsure (1)..(255): unsure at all n locations
gcaagaaaaatgaaagctatgctcagcaagccaacaagaaaaggaaggaagtggcacttgaactcggtgatgatcctggacatttgagggcaaatgttttccaagaaggagggaatgatgagaatcctaaaactggccaaatacaggctaaaggcccaagtggagaaagacaaagcccctgagtggagaaagatgaaagcccaagtggagaaagatgaaagcctatangcagagacactatcaagactactaatt

SEQ ID NO: 189196 - DNA, 446 bp, Glycine max
  unsure (1)..(446): unsure at all n locations
tctccctctnnttcctataaatagggggaggagggaagatctttaaggttcaacccttctggtatctgaggatcacttaaaattagtgagaaaaattgtttctgtgaagaaaatccaagccaagacgcttccgtatcgcttccgagacgtttccgtgggtgatttcgcaaagattttccaccattcttcgttgctcttcggtcttcaactgataagttcccgaaattgaacttttcaattcattctatgtacctttagtggtccccatttgtttcacatgcttttattttcatttcatttactttccgtacccccttttgacgtgctttagtcatttatttaagtcatcttctcgcctaataaaaaaaataaaataaatttccaccgatcatttgaattgaacatcttttaatttctgttaaatgaaatccgaccgttcagtcatg

SEQ ID NO: 189197 - DNA, 384 bp, Glycine max
ccttggagcttttccttaaaaagcccccaatacaggcatcatactcaaactatatatgcatggatatctatatcttaaatatgcacagagggcattagtgtatcataaccccaaagcttccgactgaaatgatgagaaatacattaccttaagcatgttgctcagaaaaataaagcaatagaccagtcaaatacaataaaaaaatatataccttaactttgagtagcttgcagcaagtgcatttgtgttacatgatgatttacctacttaccaatgaaatatgtaaattgtacgcactatttatcaagatcacgacattggttcctggacactatactgatcatcatcacaggtacaacaagttgcaatcaattttgatgctta

SEQ ID NO: 189198 - DNA, 371 bp, Glycine max
atatcaacccaccactcctagtgcttgctcttaagttacaattgcgtcaccgcaacaagcatatgcacaataatggctaagaaacaaaagcatgcataagctaatccacaattaattccgcaagaaggattactcacagcacgatgaagaaagaaaatatgggttaacgttttggtcacggcaattaaataaaatataagctgttctataataattttatgctaattctgtagttttactataattgtggtctacaatttttatactcttgtcttatcatggagtcttaatttattatattgaattccaccgcgttcatgatgtatacatgaatttatgttaaactgctgtgattatgtgacagaaacatt

SEQ ID NO: 189199 - DNA, 410 bp, Glycine max
taagtcacctgaagctgcaagcttgaaaccaagagggagagatttatttttccaatgtaacaaaaaggaagtagtacttactgatgctgacacagagcacaatggtagcctagtgagtatagtgcaaggagtgcaacaatgcatatgatgaggaaagatatataatttgtacaagagaaactgcccagagcagttaagttctatgttttgcaattccgattgcctcacatagcgcgggtcactcgctaagtgagcacttaatgactcttgaattctcagaattcaaactcacgcacttagagggacatctcccttatctcaattctaaaattataaaaccccaaaggaatttggctatcacgacaatacgtgcttacgagatctgcactttatgggctgcacttttgtta

SEQ ID NO: 189200 - DNA, 467 bp, Glycine max
  unsure (1)..(467): unsure at all n locations
tacttatgtggcagggcgggctcccttcacttacttgatactattgtgagctctgactaccactcgncttcccgcaatgcttctctctatatctgcctgagtgggcttatagtctaaaccatacttcccacgatntcctctggcatttatcaggctagttatgccgccgttgtctttgcctaaacccattccgggttcgtaaccgttccccaacataactcgggccatcattactgctgcatcggacaggcaatgctgctcacagaaggagtccacggaggaaatgcttaccacctccaaagactggaaagcggtttctaatgactcctctgcggcttccacataaagcatagacgatgggcagctcaccaagatgtcttcctcgcctgatacgatgaccacatgccctttcactacgaatctcaacttttggcggagtggagaaggaacaactcccactgagtgga

SEQ ID NO: 189201 - DNA, 384 bp, Glycine max
  unsure (1)..(384): unsure at all n locations
ggcgatggtgcacaacacagtttccacattcacaatgcgcgcataaacacaccattctcttgtgcccaccttcaactgagctcacgtactcccacgtagcccatatcctcgtttctctcaacaccgggtctccatcaatcctctaaagcttccacaacatccaagaaaagcgacattcaaacagcacaagctatcacagccaagcaaaatagggcaaatgcagaaaactctgctcaacacaccaaccaaaatcacagcttttctcacttagagaccccagtaacaattccttcgatccaattcgttaacccgtggatcgactgcaaaatttactggaagtctatagtacataagcctacattgtgacccgtgngatctactagc

SEQ ID NO: 189202 - DNA, 467 bp, Glycine max
  unsure (1)..(467): unsure at all n locations
gttgaattcattcttgctgtgtatgtagtcatcttcatcacttattctttcggtattctttatcttcattntaagcgagtttcaaccgatcgtttaagccgtaaccttacttaatcaatgttaaaatgaaattcgaccaatcgcttacattgtaatctcatttaatcgcctttaaaataaaattcaaccgatcgtttatgttgtaacctcgattaatcatcaaaaaggtaagtttcaaccggacatttacttcgaaagttctctctaaaagagttgagaaataaccaagtgaaactaagactaaaatcaactcacaaataaagtttttgcccgtaaaaaggtcattcgaaaccgtttcaaggtccaacgccttaatggtccttcttacttttatcggttaaaacgaacagcttanaagtctaaaatctacaccccacataactctcttgctttccaaagaagtacat

SEQ ID NO: 189203 - DNA, 456 bp, Glycine max
  unsure (1)..(456): unsure at all n locations
agcttcattaagaggcttctaacacactctctatatcttctcaaagatctcaacggtcagattatggacaagtgtcttgtgaagttgaagaccaaagttcgagaagatccaacggttaacgaaggctgggcagcgttnttaccgaggcagcttgatgtagctttctctagaagcttcattaagaggcttcctccagaagcttcctcgtggcttctttgagaagctttctcaagaagcttctttgagaagctagatccttatctatccacacccctctattaactaaattaacttccttaaaaataattacggatgaaaataacgcaacaaataatcaaacatcaaacataattactaataatatatagatatatatatcacggtgttacatgtgtgatatagtataagtctattccatgcttagtgttgatcaaatatgaagcgaatgaagtattc

SEQ ID NO: 189204 - DNA, 433 bp, Glycine max
actaagcttaaggagaactgcccatattttagttactacatttttttattttctttttcatccattctctaaaattatgcaagagataataatttcctacctcatttagtgagtggatcagggcatcctcacctagagaagcataaatagtaacgactgttacattctgcctgaagcagccctgaagtttagcaaaaaaaattcatcaaaatttctgaatacaaaatagttaagccaaaaggtaatggaatgacttgaggatataatgcaaataaagcaaatttacctgaagggcaatgagccactcagcccgggtatcagagaaaatggcaacacggctatcttcattatggcccaatttaagaagaccagatgcaaaattggacacgcgagcaaatacctctccatagggtttccattcatagtctcctaa

SEQ ID NO: 189205 - DNA, 314 bp, Glycine max
  unsure (1)..(314): unsure at all n locations
agctngtatagttccgcgagnatggttatttctgtattaannnnngcaataaataatgctttatgggtatcgctgtctctacaatatttccattggatttaatgatgaaatctgtgcatttttatgtgaaaaagacgctaagttctgaattgcaaaaaagtgcagtttggctaagctcagtagtngggctaagcgcataaccaccactaaacgcagcttcagcgcgcttagcacaaaggagaatttggcaaaacatcaacatcaaagtcccgcgctaaacgccatattaatgccctaagcacaacaagatcctt

SEQ ID NO: 189206 - DNA, 460 bp, Glycine max
  unsure (1)..(460): unsure at all n locations
tgggagctcttcgtcccagaggctcctcattatattctctttaaacncatcgaactctatgcggcacattaccacatttcgttctggtaacagcttcctaggtacaattatatcagtatacccctcccaagctctttgagaggtgaacctagaccagtcatatctgacttgggaaggtgtagaaggagccttccttttcttaaattccatctgcaaaataattagaatgaaacacaagattaaacaaggcttattcttaacaaaacaaaaaataaaactgaaatcttgactgggcgcttagcgcaacaggctgtgtttagcgcgccttataaaattttactcataagctaagtgcagtagactctcgcttagcctaaagacacagaaaatatttttctacagattatgcttaccgcagcatgctgggcttagcctatgtctataattttcaaaacagaag

SEQ ID NO: 189207 - DNA, 448 bp, Glycine max
  unsure (1)..(448): unsure at all n locations
agcttctcggctcatgctgggaacgccnttatttcttctattctgcagcctaaggcacccacccagagggaagctccccaagttccaactccgaacacggctcgaccggccggtaattccaacacgacaaggaacttccctccaaggccattgccggaattcaccccgctcccgatgacgtacgaagatcttctaccatccctcatcgccaatcatttggccgtggtaactcccggaagggtcctcgaaccccctttcccgaagtggtatgaccctaatgcaacttgcaagtaccatgggggtgccccggagcattccgtcgaaaaatgcttggcccttaaatacaaggtccaacatctaatggatgccggatggctgactttccaagaggatcggcccaatgtgaggaccaacccgctcgccaatcatggagggggagcaggtaatg

SEQ ID NO: 189208 - DNA, 427 bp, Glycine max
  unsure (1)..(427): unsure at all n locations
tgctctanattacattgatgtttggatntatgggaggatgnttatgctcatttttgctntaagagtaatgtcccactaaaactaactttccaaatgtttgccttcgcaggaatggcaccgaggaagcttgcctcaaagaggtccaggaaggacaaggcggccgaaggaactagttccgccccggagtacgacagtcaccgctttaggagcgttgtacaccagcagcgtttcgaagccatcaagggatggtcgtttctccgggagcgacgcgtccagctcagggacgacgagtatactgatttccaggaggaaatagggcgccggcggtgggcaccactggttactcccatnggccaagttgatccagaaatagtccttgagttntacgccaatgcttggccaacagaggaaggcgtgcgtgacatga

SEQ ID NO: 189209 - DNA, 451 bp, Glycine max
  unsure (1)..(451): unsure at all n locations
agctagtacagatggaaacctttctcttttntagactacgtacataaagaaatggcggtgaacttaaagattaattgagacaaattgaaattgggatgcctatgtacacacacaaaaaaaaaaagatttaatttaagaaattattataacgaaattaaagttatagatatttatttgtaaaagaataaagtttgagcatcttttttaacaagtacacttccgtatactgctccttagacaaatcaatacataaggataataattatgagtcatttccgaaaactgtgagtattttcgttatttatattggattaaggggattcacatggtacaaatcagatacgtattctctttgtaaaacaccaacaagtttcctagcatctaatatgcatacactgtgtattatgttattgtttacatggtgacacacagcaaagtaatatattaactc

SEQ ID NO: 189210 - DNA, 459 bp, Glycine max
  unsure (1)..(459): unsure at all n locations
taagggcaagataaaaaaatgtctaaganagttgattattgtattgtcaagagacattgaggctccctgacagatttctagaaaatattatcatgaagctattgatttagctgattttgataaataatttagtggtcttttgaggaaaacaaattcaaaatgattattttttatataatatttaccatcgatgagaaagaactatacggacaacttcaaacttctttttattagatatcattgtacacacgtgaattaaatgttccaaggagagcacacaccttacatatcaagacatttgaggtcaatttctattaaaatcatagatttcgtgtaaaaagttggatgaattttaaaaaatgttgcatgataagtttgattaatttattttaatctctctttattattataaatacttattaagatatttattagatactgaccaggaattattatttg

SEQ ID NO: 189211 - DNA, 381 bp, Glycine max
agcttattccaaggacatgttattattattcttagcctacagatgggagctcctccagggtccattctgtcagtagagcagttccttgagcaagtggccttgcctagagctcaacccttgattatgagaactggtggaaggtttgcagcccaggcacctcaacaagagagatccaacgaggctactgctcctcctgagcctacacctgcacaggttgaaccaatgctagctgatccacattcttcaatggcaaatccatcttctcccaaacttgaagtagctccctcatcttcacctattattatcatctctgaagactctacaaagtcatcgtctggagaagatggtactctctctgatcccctattttcctctaataat

SEQ ID NO: 189212 - DNA, 412 bp, Glycine max
  unsure (1)..(412): unsure at all n locations
ntggcgaatcaaggggagtggacctcattctttttttattagcattgttggtgttngggactatactatttcttaatatacatgggctactggatctagcagcgatcgacgcctttcttgcttatcaccacagcaaggaaagcctcatcatcgctattttggcggatgcatatgatacattcaacttgaggtgcaagaagagaaatgagagaatcgtctattgtacgttcgttctttatatatggcaggtatcccacattttttatcatgaagttagatttgttngccccctacaaagtcatcgcatgcgctcctaaaagggtaaagcacactgggaagaactcttggcaggcatgacgggagcatccattagttgctttatatgcaaatacatgagtcacatgaatgctta

SEQ ID NO: 189213 - DNA, 439 bp, Glycine max
  unsure (1)..(439): unsure at all n locations
agcttcacgtgccaatatgcactctttggtaacttaaatgtttattagttaacggttggactaaattgtcggtacatttggatatttgtggactaaattgttcatttccatggtacaggaatgaaattgtcaccaagcaaaaattataagaacgaaattgattatttatccattttaaaaatatccttactatttttgagtttgaggattttttaaactttnttacaagatttaaaaaggtgaggttnttttaatgacctaatctgataaccaactcaattcaatccacattaagtttgattcgagttggattaaattggaaaataaaaaagtaaactcaactcaatctaatccaattaaagtttaattagaataggttaaaaaataaacgaagtttaattaaaccccaaccacttacacccacaactttataggagta

SEQ ID NO: 189214 - DNA, 462 bp, Glycine max
  unsure (1)..(462): unsure at all n locations
actgagcttaacaattggcttggatccataaggtgttttcttgttgtcttactgctcttcacacacacacgaagatgaagagagagagagagagtttgctacaactgaataacagaaaaattgaatcagtgtgcgcccatttattcattacttatatactcagtacatgtgtcactcatgtatgagtctgcaatagggaaagtcaaaaaatacaattggagaaaaaagcaaactagcttatacacctttatttaacatttttgtatagcaaagtgggtgttgtcaactttgttatatctaggcatgatgaagaacctgaattcatgagcacttactcgaacctatctcaactttaatgagaaatatcttttttgatcatgtacacgtattatgtcaaattcttaaacgagaacgcgaacagggatgagtatcanagtatctcatacctataaaattatattt

SEQ ID NO: 189215 - DNA, 427 bp, Glycine max
  unsure (1)..(427): unsure at all n locations
agcttctaaaatgaatatgaaatttgttatctaaatgagaagcttgcaccgaattggttaggaaaagaagataaggaagattaagagccccttaccaaagcttttatggaagaaacctcaagagcacttgtatgaagcttgtaagaagaaagaaatagactcatctctcctttggttgagcttgtgcaaaatggagaagaaagagctccaatttgttttttaaagagacatgatgatgaggtttaaagcttaagttgacaagcttaattgacaacatgaatgactaataaccagcccatggttaacgtgccaagccatgcaattttagtgcattatgcctntttgaaatttaagcanaaatggctaaagtaggtttaaaccaaaaaatgganatttctgcttttgtaanactagtaaaccctatcct

SEQ ID NO: 189216 - DNA, 440 bp, Glycine max
  unsure (1)..(440): unsure at all n locations
gggaaggatgctncaanggattgtaagaatgatggagtgtaatagagaggggggagcacgaaattgaaggaataaaagagggggagaagtagaactttgaagtgtgtctcataagactttcattcatcaaagttacaacaagtgttacacatgcttctatttatagactaggtagcttccttgggaagctttcttaagaaaacttccttgagaagtttctttgagaaaacttccttgagaagctagagtttagctacacacacccatctaaaaactaagctcacctccttgagaagcttccttgagaagctagagcttatctacacacacccatctaanaactaagctcaccttcttgagaagcattcttgagaagctagagcttagctacacacccctataatagctaagctcacccccatgacagaaaacatgaaata

SEQ ID NO: 189217 - DNA, 371 bp, Glycine max
  unsure (1)..(371): unsure at all n locations
gagctgctgcaatctatgtgttgtgaaccttcttcagaacttaagaacctcaacgggcatggccaacccactacccnccanataagttacgagcttggactcatcaacgatgacgatgaacttcttgcatgcgccttcgaccattatttctctgaggagggagccgccacggcccttgactacgttgaggaaggggtcgacctcctcggcgccgtcgatggcgagatcgatggcggggtgggcgtccagatcggagagggggatccccaaggagagggcttgttcgtgggtttttgtggaggtggagattccgacgatgtccttgagcttgccctgccggaggagctcgctgtgcggtcgacagcatgctt

SEQ ID NO: 189218 - DNA, 418 bp, Glycine max
  unsure (1)..(418): unsure at all n locations
tgtcacactcacaggagacttttatttaatatctacattttttgttcggcggagcatagatcttaacattattggccataactgcttattaaaaaatatacaatatttagagaaaaagttatgtttatgttattattctaatcataaatcacacaatgataaatttattagctttcataataaatatcttaaaaatttattggcttttataataaatatcttaaaaattaatttacactgttatgattatttaactctaatatttatgtatattctttaaataaaaaaacatgcttaaatatcttttgagaaaattgtctatacttacaaggtctttctttgttatttgactataaattataattaatttcattaaaaatcatgcctaccatcattatntctaattggttgagaattg

SEQ ID NO: 189219 - DNA, 374 bp, Glycine max
aatcttcctataatatatatgcaccgaaattattttcaatggaaactaatttgaatatggaatcttgctaaatatatatgcacgaaaattattttctatgaaaactaataggatcacaccgtattatattatatatacaaaaacgtgtctctcaagcaaaataattaatcatatatattattataatatcatttatatataaatattatgttattagtgtaaattatattgcaatgaaaatatatctatactatataatacaactcatcactattatatattcttaggtatacatatcccgcataataaaaaatagtattaatatatttttattagctagatagtctattatctgctattctcttattatatta

SEQ ID NO: 189220 - DNA, 403 bp, Glycine max
  unsure (1)..(403): unsure at all n locations
catagngcaaacccaagatgaagcagttgaggaggaacgtccgggtaaggccaacaacgcagttagcaagtcgttcgaactccgctaggtaatcattgaaggtgcaatgctggtggaccttgaagagggcatcgtgggggtcatagtaggaggtggcaaagcatgactctaatgcctgaagcatggcangccacgtggagaggaacccgttgtgtgtcatccactgataccaacaaagtgtgggtccttccatatagaaggaaacgacagtgaggcgctcatgttccgacacgccctgataatcaaagaagtgagatatcttaaatatccagcccaaaggatcctgaccgtcaaaccgacgcacctcacagtttagttgaggatgttggttacggatggtggc

SEQ ID NO: 189221 - DNA, 436 bp, Glycine max
  unsure (1)..(436): unsure at all n locations
actaagcttnccttggttgcttgctcggtttccagcgcagtttattgtcttcatacgaagccttcattacattatcttcatgcgagacgcagttaactctctaaanatattatttcataaatttcaacagtggaaatgtgagaaaatgagctccaaagttggcgtccaaatttcacgacgatccaacgattaacgagtccgggatcgtaattttactagggcaaacttggtgtattcngaaaaggagagctctatacaagggacatttctcttaccacaaacattatttcgtaaatctcaatggttgggatgtgcaaaaatggattccgaacatgatgttcatatttcacaacgatccaacagttaatgagtcccggatcatagttctactgaacaataaaaatatctgagtgtatgtgacaataacagagttttg

SEQ ID NO: 189222 - DNA, 412 bp, Glycine max
  unsure (1)..(412): unsure at all n locations
gaccaccacatcgancaaaactcaaaagcttgcctgcaccatatgttgtaaggcttgtgtatgttaatcaccgcatcgaatatcgcattcttcataccaaagctcgcagtgcctaacaaataccacattgcaattcaacgatattcccactgtcttagatatgatatttgtttcttccctcttcaactgatcgatgcatatggcttcaggaattaggattaggaagatttgaaaacttactatatatagtctttgtgaccaattatatctaagtcattggctgcattcaactaaataaatcatgagattaattaatgatcttttaataaaaagtataacaattaactaattaaaagaaacgactaacatcattttaatcataattatcaaatataataaatatctaactttg

SEQ ID NO: 189223 - DNA, 470 bp, Glycine max
  unsure (1)..(470): unsure at all n locations
ggcgtctatggtcccaatccttgccaaccaaagaaagtgttctatgtttatttcaccattnccccggcatttgcgagcaccgctagtagcctaagagaaagggtggagcctgtgtttctgcgaagaacgttgaagccgctgaggaaccttccagttctgaaggcttttctgctgagccctgaggccacttcccattgcttgaacctcctcgatatgtccgcctgcgtgccttccacgtgccagtttacgagctttgacacgtactggaacgtcttcaccaccttgtctatgccatctctctttgctaggaagattaccagtttgtccactgagtcattcatgcttctgcttctggggatgtcaactntgtcccagctttagaaatctttaacttacttggctcacagatgctgctttcttggataagagaagnttgtggttagacttttattacttcataccaccattca

SEQ ID NO: 189224 - DNA, 456 bp, Glycine max
  unsure (1)..(456): unsure at all n locations
gctagaacaatactngccttcattaactggccgggttttatttttactatcaacaaagnactntcgacacctactgtatgttgatntgaccaacactgttatgggtatgttgtgacaatccttcaaaaccttattgatacattctgagaggttggttgtcatgtggccatatcgacgtgcttctctatcataagtcatcgtccatttttcctttgaaatgtgatcaattcatgttgctatggctagactcagttgacgaaatttttctaaattttgataaaaaaatgtgcttgcaaggagtgtagcgtgcataaaattagttagcaacaacaattctaagtatatatgaaacttatattaacgtgaccatcatatatgaaatcttaccccaattcttcaacatttctttttatttggcattatcgaatttgcgactgaaattgctcgctatgtgtc

SEQ ID NO: 189225 - DNA, 416 bp, Glycine max
  unsure (1)..(416): unsure at all n locations
actctcgaaaaaatcttcagaaacaaagtcacttgcacaattgtgacgttttggaaatgtatttttcgaaatcagccactagtcatccattaccattaacgtgtaatcaattacacatcaacagatgtgactcttcattctgaattttgaaaattaaaacgtttagaagctctggtaatcgattacaagtattatgtaattgattacacaagtttaaaatacttcaaactgtataaacatcagttgtaactctcgaaatttgaaatcttaatgttttaaaacactggtaatcgattaccacagagagtcaaactctttggttatganttagtgaaaactttttgtgctactcaatactttgaaaaacttctataggacttatctcgagtgagtcttctcctgattcttggatcttg

SEQ ID NO: 189226 - DNA, 380 bp, Glycine max
aaagtgcactgaaaccattagttggaaaagaagtttatgattgggtcaatgacaccataactatctttgggaagacccaagagaacgcatcatttgacccataaaagtcaatattctttgatcttccatactggtccgatcttgatgttagacattgtatagaagttatgcatgtggagaaaaatgtttgtgatagtttaattggcacccttcttaacattaaaggcaagacaaaggatggtttgaagtatcatcaagaccctgttgaaatggcgatatgagagcagttgcattcaatatcacacgatcgacgaacgtacttgccaccaacatgtcatacaatgtcaacaacagagaagagaagcttttgcaatgtctat

SEQ ID NO: 189227 - DNA, 302 bp, Glycine max
  unsure (1)..(302): unsure at all n locations
atgtgctgaaaagcatgttcgtctctgggtcatgatgtccttaataatagttgtggcaattgaattcaaagactggcccatgccatttgattaactggatatgtggcatgaatcttgtcccttgcagatttgtgagtattgagtatttactacagtacacctccaatgtgtgctccagaagtgtatgagtgattatgttaagacttttaagtactaaccgtcacgtatgagtggaaaaccatccttctcatttgaaaaggacagtcaactaactttaggatccaattgtactntaggttttg

SEQ ID NO: 189228 - DNA, 327 bp, Glycine max
  unsure (1)..(327): unsure at all n locations
acacaggggaactataagagctaacaaaacatcggcaacccacntgctctaaatagaattcaacaattaattattttattaaagagtttacctgtcaacaacaatgatacttaaatattatttatctgctttatcttgctttttacaatatatctatttcctttaatagcatttactgtgaaaataatgacactttatctctcttttaagacaaatatactattttttaataaatatttctttataatcttcattgcagaaataactatattcttttttcaaacaaaacatttgactgttatttatcttcctttataatatatctaa

SEQ ID NO: 189229 - DNA, 469 bp, Glycine max
  unsure (1)..(469): unsure at all n locations
aacatcaaactcaagcttgaaggaccccaatttgcacgccggtatctttttttctaaanctnncctccaagagctatactgaccactccttccacaaccaattaacacaaataaagtcattcctttactactagtgttcgtgtcagacctcacaatgatcgccacaaatccattttcatgaacaacggatcgagcccactacaaaacatcatctcgggtaccaaacacctacaacgcaacccacacaattttaatcttctaagggacattgattttatgaaattaataacaataatgaacattattacctgagaagtattgaatgcatccgaacaatcaacatgttattcatccacaccatattcttgttcattttgatcattcatatcaactttctcagacattatattgtcatatatccaaagatcttcgtccatcttaacaacaaataacaaatgtcaacatgaca

SEQ ID NO: 189230 - DNA, 421 bp, Glycine max
  unsure (1)..(421): unsure at all n locations
agctnacagcagattgtagaattaacctcatatctagaattaaaataacttaatgccattaacctagggaattaaaacaaacttaatggctgagtgtaactgaaattgtggcaaccaaaagtcacccccaacagccaacaagtcagccaccatttggtctcccaaaaggctgatgcctangttgccaattgggcccttattacaacttgaactaaagcccttttagttgattaacccaaaacatatttttggtcagccaactttacaaagattgggccattatttagacaaactaaacactctaaaattgaaataaagtggtgtcatttagtcctcctccatttgggccatgatacaactcacaaccttggacttttctccttgaaacttgtgttgtattcaatagtatggacagcacttg

SEQ ID NO: 189231 - DNA, 466 bp, Glycine max
  unsure (1)..(466): unsure at all n locations
gaccttagaaactcagcttataaaacattacaagctatttacgagattttttagtttattaaaagnaaaaatnngcctttctataattgaatgtgtaattccattcaataaattaaaatttaaacaagcaaaaaataaatatttcataatttttttcttcagttctaatttttttaattcctatagtttctacaaaaatgttttaatgaagaatgaaaaattatcgtatcaaacattgcttaataacaatatcaaacaaatataatttcagatgataaaattaaatgaatttataaaattttcttaccctatcaaccattcccatatttttatcatttaaaactattaatttttatgataactagcaattttgtttatgtattaaatgagatgagtattttgtaataataaaaatttatacctaaattttcttgcattttctaatattcaaattataggtatatat

SEQ ID NO: 189232 - DNA, 396 bp, Glycine max
  unsure (1)..(396): unsure at all n locations
agcttcanatgtccagactccttatggggtaagcttgtgttataaaaagcacacacatccttatttaagtctgccctccttgcagacccaaaaagatgttgggccaagttacaacttgggcccatttcgggagaatgaggggagtaataaggatggacactcacccacagcccattcttttaaagaaatttctgatatgtattccaaagtctatgttagacaaaagcatgctaaatctaaagccccatctctcgagcctgtggaagaggaagctcacataataaaagatgataatggaatggatgtcatgcatgaaatacaagacaaaagcccaaatcagagacatttccgattataaaggtgtctagaaatcacaattgagtgtaatacaacagt

SEQ ID NO: 189233 - DNA, 78 bp, Glycine max
  unsure (1)..(78): unsure at all n locations
agctctaacttaaacaagaagaagccggattcacttttantaaagttgtctagacacctaagggggggggggggggtt

SEQ ID NO: 189234 - DNA, 343 bp, Glycine max
  unsure (1)..(343): unsure at all n locations
gggcgatggtgcacaacaagtttttcacatccacaaatcgcgcataaacccaccatcccctgtttgccacctccaactgagctcacgtactcccacgtagcccatattctcgcttctctcaacaccgggtccccatcaatccttccaagcttccccaacatccaagtaactcaacattcaaacagcacaaactatcacagccaagaaaacagagcaaaggcagaataatctgccaaaacaccaaccgaaatcacagcttttctcacttaaagaccctagtaacacatccttcgttccaattcgntaaccgttggatcgactccaaattttactggaagtctct

SEQ ID NO: 189235 - DNA, 449 bp, Glycine max
  unsure (1)..(449): unsure at all n locations
tggccatttgtctctgaggtcgaagatctatttgatattttttcttgnatggatgcaggtagtggtgcttatgttcgagaatttatatgaatggggagaaggtaagatgggctatcagtttgttgcatgaagaattgaaaacaccatagactgattaggtagtacttttcagttttaatgagctgtgcataaaagcttgtaagtgaaatgtgacaaaaattctaaaggccttgggctgggttccttagaggctgagtttgtaaggagtgaacaatatttagagattttataaattttttatactacacgttttcaaaattggaactgaaaatgataagttcatgaaatctaacctgttaatataccttaatatactctggctataggctntatcgttaaggagaagtaatagcaaggcctaagggtgaatgccaatgccaggaattaaa

SEQ ID NO: 189236 - DNA, 394 bp, Glycine max
taattggtggaacttcgtaaatattatgttatcaacattcatcacaagacacgtgaggagatacatggagagaaacgaagaaacaacaatggaggagaaagtaaagctgaaaatttagtggaggtttaaggagcacctacttgaagctcttgtgctctgataccacttgttggaagcttgcttatgaagcttctatggaggctggatctttgagcttcaataaggtccttcaatggtgatttttagtcatggaattacagcaaaagataaaggagaagaggttagaggagacgtcatccactatagaataagtcatggaaggagaagcttcaccaccaagagagtggcttggataagaagcttatagaggaagcttcaatggaggaagagaata

SEQ ID NO: 189237 - DNA, 404 bp, Glycine max
  unsure (1)..(404): unsure at all n locations
agctagagtattgctgtatttactaatatatggaatagcccactgctttgcctgagaataacaattgcttgaccacaacagcgctggaggcggcaagggacaatggtctttcaaataaacctgttgtacatgaacaaacattatatcatgcgctgaccgtgccaaacgaaccagtgaagtcattgcataattgttatactaactatattcaatatacctgaacaaaatgatttccaaacacatgaccgaaacatatgatgcggtggccagaagagtcangtggtggttgacttctaagagggaaaaatgtcatgcntttgttgtgggacaacgatacaagaattacgttataccgtgaagcatcacatatcccaatgtcgtatatccatcacttgtctacacta

SEQ ID NO: 189238 - DNA, 368 bp, Glycine max
ctactccgataccgcaccatgatacacatctcttcagttatattaccgcctagacaccacgaccactatattatccttctagctgctaccaatattgtgaatgtcaggccctacacgtatccgtacttttagaagacgattatcgagaagctcgtatccgagttgttgacatccgacctcatacagccaaattgaagccccttatcatctacggtcttactggtgaatatcatagatggatcgtggcgcatgtgtgatgactacctagctatcaatgcacttacagtgaacgatcgttctcccactctgaccattgaagagcctctcgacgaactgaggaatgcttcatggatctcgaagctggactt

SEQ ID NO: 189239 - DNA, 301 bp, Glycine max
aaacctagtgctctggtggactttttcgggtccactatgtgtctgggaggtgcgatccctgcaaattggtaagttttgtctgagattagctaagccacatgaatactaacttgagtaaaaacggtgtagaccagctggcatttcggcaggggaagatcgaaattatgatcgttggggaggatattactgagaagcagcgtcatccagatctgtgtcatggtggtcatgctagtgttcatgatccgcacccgtcttcccgccacacttcgtgcaacgtccttgtctggaatgcacagtagct

SEQ ID NO: 189240 - DNA, 473 bp, Glycine max
  unsure (1)..(473): unsure at all n locations
tatgcgcatatttccttacgaacgttcactngcacaagacattctattaaccaanaaatgcacccatatacaatcaaggcagctntgttacctagattatttacatgcactcccaaggtgtacttgttacttacatcacacacatctccttggctgaatttacatacatgcacactcaaagcatttcagggtacccaaaaattgcacatgcgctcatcttggtatctctaatacctatacatatacaaacttcatgatgaatcttgactacctacacaataaggtgctacatttcatgcctttttttttcaagtttttactacctaaagccgtgtcataccctaatttcgtccggggaccttngctcgatgacgtgcgaccattctttggtcctcgtgaggtgcttggcacccatcattaggcgaattgtgaaatttcaggacattgccgaaaaaccaaaaaatattgatgca

SEQ ID NO: 189241 - DNA, 294 bp, Glycine max
  unsure (1)..(294): unsure at all n locations
accctactctaacatacccaacaccatagatatatatggttttattctttttataggcgttgaggaaaaaagcccaaagtttcaagaacctctagatntgaggtcaaatctttttcaagggggaggggatgatccaatcccactccccaagggcattgtatataagattccaagaagaatgggccacagatgcangagaaggccctanggttcttatgagccttaagatagaatttgtgcgcatgacctaagtatgagtccacttatctctgtatatattagaataaggtttca

SEQ ID NO: 189242 - DNA, 403 bp, Glycine max
  unsure (1)..(403): unsure at all n locations
actaagcttctcnttggaaactatctattctctcttcagtgttttatgttctngcaggttccgtgcggtgctgctactggtggggcacttgaatttggttgccaaacctcaggtgatggcactcacatttttcagatttgcacagttgtgaagcaatttgcagaatttgggactggcttggttcaactgagtagccatctgccccatctgatttgtagactttgaatggggctcttgctcttgctaaattgctatctggataatcttgcctactaactttgcctgatattggagtggaaccattttaatcaattctggctcacagggtcatatcaccagctcaccatggagatcatatactcttctgtgtagtcctctaaaaattgaaagagtgtcaaaattg

SEQ ID NO: 189243 - DNA, 464 bp, Glycine max
  unsure (1)..(464): unsure at all n locations
gcttgaacaaaggaagaggcatcatgcttaatatttgaaacaattttacaaaacgcctgcattaccttcacttacccttgtctcaatatggtgtggtattgaccatcactcaaaatgactctttattcatcctccgattcacaggatgacaagatgcgaatgcatgcaagcttatgattggattttaagtgcaacaattaaataggtgttatcgtgttcaattttacttaaacacttactgcaccccgttgatcgagccaaatggctccggattcagtgggcaagatcgagagtgtatgttcttgaanagtaaaagacacaacacacgaggttaagatgcaaatcatccatatttattagtgctacgatcatggcttgcaaaggaatttaagactctggagatcccaatgagtccctggagaataatcatgtatntaaccttctagcttccctangcgttatgc

SEQ ID NO: 189244 - DNA, 469 bp, Glycine max
atccgcctctatattttccacaatcccatcctccctccagataatgagcttcttgtttatggtagatggcacagccccaactccatgaatccactcccttcctaatagcaagttaaaattagccttagactgtatcaccaggaaaagagttggtcgaactatactgcctacagcaacatctacttgaatggctcccaaagaatagccagttttaccctcataattcgaaagcacaatgttgtgagcagatagatcagtgtcatgtttcccgatcttatagagcatagatcgaggcattaagttgacagccgctcctccatcaatgagcactttgttgattccaacattctcaacttttgctctgatgaaaagaggtttgagatgacttttcatctgaaaatctggcttttcgaaataagctaattgctcttccacacagccattattcataacatagtaacatactggg

SEQ ID NO: 189245 - DNA, 399 bp, Glycine max
  unsure (1)..(399): unsure at all n locations
tattaacaacttccgtttgccatcgggttgtgggtgacaagtggttgaaaataacaatttagtgcccaacttgctccacaaagtcctccaaaaatggcttaggaacttagagtccctatcactaacaatgctccttggcaaaccatggagtctcacaatctccttgaaaaacaaatcagccacatgggaagcatcatcaacttttttacatggaataaaatgagccattttagaaaacctatcaacaaccacaaaaatggaatctctaccattgcttgtttntggcagccccaaaaccaaaatcatggataaatcaatccaaagatactccggaattggcaatggagtatacaatccatgaagctntaccttagactntgcctttttacatacaatgca

SEQ ID NO: 189246 - DNA, 451 bp, Glycine max
  unsure (1)..(451): unsure at all n locations
tctgccncattntcttataaatagggggagaagtgaagaggaatttctttcatccctcctggtaattcagaatcacttaaaattagtgaaaaaaattggttccgtgaagaaaatccaagccgaggcgcttccgtaacgtttccgtgggtgatttcgcgaaggttttcggccgttcttcgacgttcttcattcgttcttcgtcgttcttcggtcttcaaccggtaagttccctaaatcgaacttttcaattcattctatgtacccttagtggtcctcatttgcttttacgtgctttcatttacatttcctttacttttcgtacccccttttgacgtgctttagtcatttgcttaagttattctctcgcctaatcaaaaaataaaataaatttgcaccgatcatatgaattgtaatatcccgtaatttctgtgtaaatgaatttcgaccgttc

SEQ ID NO: 189247 - DNA, 435 bp, Glycine max
  unsure (1)..(435): unsure at all n locations
tgcatcatttcttgcttgaactccttaactagccttgcatcatctccaattactaaaagatcatcaacatagagagaaactatgagaaagttatttcccttatttttcacataaagagtggactcaaataagctttttgcaaagcttatgctcaataggtgatcatttatcttgctatactaggcccttgccgcttgttttaggccatagatggccttttttagaagataaactttatcttcttcactttgcttcatgaatccttctggttgctctacatatatntcttcttgtagttctctgtttaaaaaagctgatttaacatttgtggaagcaatgcctttcaagattattttgatgatggccaagaatcaagaagtaagcaagttccacagactcaagagtcaacgcagttcaagaatcaagatcaagatt

SEQ ID NO: 189248 - DNA, 378 bp, Glycine max
ttcactaacacaaatttgtttaatttgtacgctcaaatctattaacttatgtgttcaacttgaaatatgacatttctattttacatcttttatttggcattatgtaaccttgtccagcacatcacaaatttttctttgatttctcttggccatagattagacctgttttatatagttctactttgttgtagttaaaatcaagattatagttgcgtaagccatcaatgaagttaaaaattgcaactgaaatatcgaacacatgtatttagcaaagcagtgatagctcaaaaaatggagtgataacattcatggaaaacacatttcacatgaagaaatatgatgtcaggatagaaaccttgattaatttaaagagcacct

SEQ ID NO: 189249 - DNA, 477 bp, Glycine max
  unsure (1)..(477): unsure at all n locations
acacttgaaactaagcttcttgagaaacttcttggaagctgttttatcttttccacccctctcataactgagctcacctgcttgagaagcttccttaagaagattcctaaagaagctagagcttagctacacgtacctctctaatagctaagctcacctccttgagatgagaagctagagcttagctacacaccccctataatagctaagctcacccccatgacaaaaaacatgaaaatacaaaaaaaaagtccttactacaaagactactcaaaatgccccaaaatacaaggctaaaaccctatactactagaatggccaaaatacaaggcccagacgaaggacaaacctattctaatatttacaaagataagcgggctcatacttagcccatgggcttgaaatctaccctaaggcttatgagaaccctagggccttnccttggatctctagcccaatctacttggagtctttacc

SEQ ID NO: 189250 - DNA, 406 bp, Glycine max
  unsure (1)..(406): unsure at all n locations
ctgcagcttctcaggaagtgagcttattattatatgggtgtatgtanctaagctctagcttctcaaagaagttttctcaaaaagcttctcaaggaagttttctcaaagaagctacctaatctataaatagaaacatgtgtaacactctctgtaactttgatgaatgagagtcttgtgagacacaactcaaagttcaacttctctccctcttttattccttcaatttcgtgctcgccccttctttctttattttcctccattaaagcatccccttcaagcttcttatccaaagcaattcttggtggtgaagctccttcctccttggcttattccctagtgaatggtgcctcccctctcctcttctcctttgccttctgctgcatctccatggtgtaaaatcaccatt

SEQ ID NO: 189251 - DNA, 465 bp, Glycine max
  unsure (1)..(465): unsure at all n locations
tgtaaacttgtttttattaaacactactatatattcttgtattgaaaactaaacattgctagttgactaaaaagaactcaagtaattctttattttaatatctcaaaatacacattatttgttagaatcaaaagtggaaagtcatatcaaaatttaagattaacttaaatcaaaattccactagatcgaaataattttccccgtcaacataaaccttgatcgaaataatctctattttctctttacatttctttcttaattntttctttaaaaattatccactatcatttcctcttccaattgtcatgtcacatcctcttttctcacttttcgtaccttctttccttttgtcattggtggccatcatgtccctattcctatagttttttgtgagtgtgagtaatgttgttttattaatattttctattcgtttgtatgcaattcaatcttaaatatactgtaata

SEQ ID NO: 189252 - DNA, 401 bp, Glycine max
  unsure (1)..(401): unsure at all n locations
agctntataagcatgggtctggaggactaatgtcaagtggtcgcgatatacgaagatgatgttccgagtacattggatttggtacgaccatgccctcctgatttccagctgggaaattggcgagtggaggaacgccccaacatttacgcaacgagcataatgtaaacctttacgggtttaaaagctctacacgtgggcctaggctttagattttttattntgttaaggctttgtgtctcttgtttttgaatttataatacaaagatctttcttcatctgttcctacgtctctacccattctcatccatttgcatggttacttctttatttctgaaacggcagatcccatgacgagtcccccgaggtactaatacctgtgacccgctgtcgcaacctacctt

SEQ ID NO: 189253 - DNA, 461 bp, Glycine max
  unsure (1)..(461): unsure at all n locations
tcagcccagagttaacaaaactgttaaagaggattaaaatgatcaataagtccctaataatatttggggatttccaataaggtacttatactttgaaagttggtaattaggtccctaaaatttcaaaaatttctaattgggtcccttctgtagttctgttaaagaactgttaacagtaagcagaatccaaggagccattataaatttactggatcccccatacttttaagtgatttctaattgggtcatcaaatctatcttaccattagaaatttctaatgatagcaataaggaacttgtcaaggaccaactttcccagaagtttaaactgttaagaccaatgattntacaactcaaacgaccctcaccttatgaccaatttgggctagaagtgtgaactatgcacaggccaggccaacctgantaaatttacctttctattagaatgatgaggcatgttg

SEQ ID NO: 189254 - DNA, 428 bp, Glycine max
agcttatgcacagaaaatgtaattattattttgagatgcctctaagaaacaccatttcctagttaaacatgcattatgcaccatgtttaatcatttttgttttaagtgaaatgggtttatgatcccaacatggctggctcatggtaccgaatatatgcaactaagaatgcagcgtgaatgttcgtacttccctttgttttatagttttttgctttgtagaggaaaatacaaagatcatgtatgagcaaacaaaaagtatgttgaacgcatatgatgatgcaatgactcatgcataatgggaatgtgataacggacaaatgcaagaacgatatgttcattatgatgctgaagagatgtctatgcggtgcatgatatgaatgcattttacggacactagagcccggagaatatctcttctacttgcgcat

SEQ ID NO: 189255 - DNA, 421 bp, Glycine max
tcagaatcatgagagtaatatgcggttaacatgatctgatttgtgtgctgggagttaaagcatatctaagccaatgcaactgaaagaggaggtgttttatacggttgagttgtaatcctagaaagctcttctgccataaaacttatctgcaagagggacgttggtttcttaaggatttgttatatttgtttctaggttcttggatatatagcatacaaaatatgccctatggattactagtatcaaggaaaattatgaaagtaaagtgtgttatgagatgttgattgacaagaatgctaaattcaagatcttatgaaagacaagtggaatcttttggatgtcgcagttgcagtttcgtcatgattgacaagaacgttaaattgctgacaaatgccactgatgtggctgccattgcattcat

SEQ ID NO: 189256 - DNA, 458 bp, Glycine max
  unsure (1)..(458): unsure at all n locations
agctgtgcggattatgtcttcgctggcattatgatcgaagngggtctaaaaagaggcaaatctgatcatcatgctntgataaatgcaaaaaaaactggggcaaatgaagagggtgagaatgagggagaaacccatgctgtgactgccattcctatacagccaagtttcccaccaacccaacaatgtcattactcagccaataacaaaccttctccttacccaccacccagttatccacaaaggccatccctaaatcaaccacaaagcttgtctaccgcacttccaatgacgaacaccacctttagcacaaaccanaacaccaaccaagaaatgaattntgcagcgaaaaagcctgtagaattcaccccaattccggtgtcctatgctgacttgctcccatatctacttgataattcaatggtagccataaccncagccaaggttcatcaacctncatt

SEQ ID NO: 189257 - DNA, 452 bp, Glycine max
  unsure (1)..(452): unsure at all n locations
ctgcatcagacaaagatgatagcaaatcctatttatgatatgtnttcactttaaatggtggtgcagtaagttggaaaagtttcaagcaagctacggtagcagattcaactacagaagcagaatatatagcggcaagtgaagccgctaaagaagttgtttggatgaaaaagttcatatttgaacttggtgtggttccttcaatagaagagtcagtcccactattgtgcgacaataatggggctattgctcaagcaaaggaaccaagatcacaccagaagtccaaacatattttgcgaaggtatcacttgattagagagataatagaacgtggtgacgttaagattgaaaaggtagatggaaaggagaatgcagcagatcccttcaccaaagcgcttggcataaaagagtttgacaagcacaaatgggaattaggaatgaagttcatgaatgat

SEQ ID NO: 189258 - DNA, 351 bp, Glycine max
  unsure (1)..(351): unsure at all n locations
tggaagctcctaaagaaagacctcaccaccttggcgcagacctggagtgtcctatcttattctaacctcgcccccacatttcacacatctgatctgaatatggatcgggcgagggtagtttatggactcgtcatgaagatggatatggacgtgggctcgcttatttctggacagatctccgaaatggcctagtccaaatcctctaagcttggctttcctacactcattactgcactgtgcatagccagaggagtggtattagattctctgactttcgagtctctcagccctacccattaattgacatatataaagaagaatngttggaacctggatgacccttccgtcaca

SEQ ID NO: 189259 - DNA, 357 bp, Glycine max
  unsure (1)..(357): unsure at all n locations
agcttgctaacccatggtagctcctaatatctcccacactntttggggtgggccattcttggatggccttgattttctcaaggtccacttggaccccatttctaccaactacaaaacctaagaaaactatattatttgcatagagggtgtttttcctaaagactgaaagaacttgtctgagatgtcctaagtgatcatctatgctcctactatacactaaaatatcatcaaaataaacaactacaaatctacctatgaaatcccttaagacatgatgcataagcctcataaaggtgcttggtgcattagtgagcccaaaaggcatcactagccattcatacaaaccaaacttggtct

SEQ ID NO: 189260 - DNA, 415 bp, Glycine max
  unsure (1)..(415): unsure at all n locations
gttgatgatatggtcttcacctacgaaaggatcaaagtgagtctaaaaagaggcaaatttgatcatcatactttgataaatgccaaaaaaaactagggcaagtgaagaggatgagaaggagggagaaacctatgctgctactgccattcttatacgaccaagtttcacaccaacccaacaatgtcattactcagccaataacgacccttctcattacctaccacccagtcatgcacaaaggccatccctaaaatcaaccacaaagcctacctaccgcacttncaatgacaaacaccacctttagcataaaccaaaacaccaaccaagaaatgaattttgcagtgaaaaagcctgtagaattcaccccaattccaatgtcctattctaacttgctcccatatctacttgataattc

SEQ ID NO: 189261 - DNA, 318 bp, Glycine max
agcttctcgtaatgaactatgaacactgattgcactttataggcatcacaatctattgtttaaaagtgtttatacaaataaactataagtgagggggtataagtaatccttactcggatttctcagagcgctgcatggaacatatagaccttcatttcttcaacgaaagaatttgagatcatgagcatgatgcgttaaacacattgaatatgactaatcttatcattatcctcgcgcacttagctctgatgcatctaggcactttttttggtattgtgagctaagaggaaacacaaaaacggagaaattacatcctta

SEQ ID NO: 189262 - DNA, 294 bp, Glycine max
  unsure (1)..(294): unsure at all n locations
ctactattacccaccaagctaagagggtgtttacataggtctatatgcttaaggnataggcattaatcttactacaacatcatagatctcatcaaagttaacctaattgatcattgttgaaattcaaaaatattctcaacgcttcacgcggatctaatagatatgaagtcttcacgcgcggttncatatacattgaataattatatttggcgatatgagaaaatttggaacaaataaacatttctctaattttaatggacgggaactatgattattgcaatgtttaaacataat

SEQ ID NO: 189263 - DNA, 468 bp, Glycine max
  unsure (1)..(468): unsure at all n locations
ttaagtcacctgcggcatgcaagcttccatccatttagacacgtaatcaactacctttttaatgtactcattacctgcagatgaaaggaaaggacccatgaagtcaataccccttcaattaaaaacttcaacttccataatgttttgaaaaggcatttcattccttagggaaacccccccccccccaattctttggcattaatcacacttcaagacatggtgattggcatctttgaagagtgttggccagaaaaatcctgactgtaaaaccttagctgttgttttgtcttcgccataatgccctccacatggtgaattgtgacagtgccacaatatacccttggcctcctcactttntacacaccttctatgtagattatctacacctaccttgaacaagtgtggatcatcccatatataatgtcgggcgtcatggaagaattctttctctgctgcaactgangtctt

SEQ ID NO: 189264 - DNA, 470 bp, Glycine max
caagaaactaagctctttacagttcattaaactccaaagctcacaaaacttgtctttcttcctttctttcacgagctggtcatgagggaaggagacgccattccaagcttttccaagtgttcttgaacccttcttccatcaagcttaggtaaatgacctccattttcaattctaagcttgattttcacttcattttcttgctctattctcacttgtagtttcaaaatcttatttttgcactcttgaaagttggaaatttaaactccttcattctgatttctaaattttgtggaggattatcaaggtaagggggggtctctccaacacttgaaccctattcttgttgttaaacttcctaaaatatgttattatctataaatatttgaattataacaactaacagagatcttcaactcaaattcaaaccagtctatcttttcttcaattattattctcacaatttgcattat

SEQ ID NO: 189265 - DNA, 434 bp, Glycine max
  unsure (1)..(434): unsure at all n locations
acctgaggcatgcaagcttcgttcgcanacgtcactcataactgtttttttgtccatcgccctaaatggccctctttgctattatcggttaacatggaccgttcaaaagcagaaaatgaacatgttactctaccacttttacaagaactatgtaggtctgatattctcatcgcaactgaggatatgtaggagcaaaagccccgctcttgtcgatcaccccaagagatcattaatggtccaacgccttaacagttgtctcctttcaaaaacaaagagatcgctaattgatgcaagctggattgcatcattaatggtccaacaccttaatgtttctctactttcccaagaattcaaagatcgagtaaatggttcaacgccttaaacaactattgtgcggattaaatgattctgcatagaaagacataacaacataa

SEQ ID NO: 189266 - DNA, 470 bp, Glycine max
tgaagagttgagtttcatatcgatataattgatcacagttgttcttatattttattacactgctgttcgagacagtgactgatttatttatgagtctctgctttaatcgattacttctctctcgtttagttgttcagaaatgaacaataacactttaatcgattacttagagcatctaatcgattacatcattcttgagttatttccagatgttgggaagaacactttaatcggttacttagataatctaatcgattacttcagtgaaataatcgattactttgtagatttaatcgatcacagacggttataaccgttttctctataaataaccatcttgtgttctctccaaaacacatcaagagaatactcaatatctcagaaataacccattagcctctgaatgagaaagatctcgagctgtcattattgaaaacaaaagtgaagaacaagagctatatagcaactca

SEQ ID NO: 189267 - DNA, 338 bp, Glycine max
tgagagcaatctatgagctcaatgtgtatacacatatgttttattattcttcgcaagcgataccttacttaaaaatgtgttgatctataggaaggatcttgatctaaaacccatatttttttttttctaaatgatataaatcaaataattatgtattcaccaaatacatccaaaaagttatttacatggatgataaaataactattttgttgggtcaaactggaatttataaggggagattgaatacattctttcaaatactttaccaattcattcttaacacataataaaaatacccctttaaatcaatcaaagtttcttcacaagatcgttatata

SEQ ID NO: 189268 - DNA, 435 bp, Glycine max
  unsure (1)..(435): unsure at all n locations
agcttgtacccaccagtactatgatagcttatgcattttcatntgttcaccctttctgtccagttttcttcttaattgatttggaacatgcttgaagcacaagcatccaaacacccttaggtgcttgagacaaggcttacttccactccaagtttcttcaggtgtcacattctctagcctctttgttgaacatctgttgagcagataggctgctgttgacactgcctcaccccaaaactcctttggcaagtgaaaattccttagcatacacctggtcatgttgactatggttctattgagtatctcacatacaccattgtggtgtggagcatatggaggtgtgatcttatgaatattaccctcatcctcatagaatttcttgaattcatgtgatgtgtattcactaccaccatctgatctgagtctttgaatcct

SEQ ID NO: 189269 - DNA, 441 bp, Glycine max
  unsure (1)..(441): unsure at all n locations
tggacaatggtagggaaatcttgctaaaacctagatgaatctcttgttttaacctacatttccaagaaaaaaatgtacttcccgcacataagtggggtaaagaaaagaagtgataacattgatcttggccttaccgatctcaatacctctactatagaccaaatgccctacaacaatacctttatggaccataaaatgacattcttgaaagttaagaacaaggttagtctcaatgcatcggtcaagaactctagagaggttatccaaacatgcataaaaggaagaaccataaacagtgaaatcatccataaacacctccatgcaactctctaataaattagaaaagatactcactatgcacctttggaaggtgtcaggtgcattgcataggccaaatggcaccctcgtgtaagcaaatgtgttgaatggatangtgaatat

SEQ ID NO: 189270 - DNA, 313 bp, Glycine max
acaatgctactaaagttgaaacaaacctaaaagacttaaaaactctctataaaaatgaaaacacacaaacgcaacgtaatttcatatacacttagtagagacacactaaaaatgaagagctcaaacgctcatcacacaaattttctcctttggcagcccgtgctcttgttcaagggtactggatgccaccacgccactgtctaaatgtagatccacccttgttcttggtctagttacaaccacgttaaagattcgagctgcagaacacctttacttggtgcttacctggtaaattttctttcttgtactgact

SEQ ID NO: 189271 - DNA, 424 bp, Glycine max
tggagaggatgcttcaatggaggagaagagagagggagagtaatatagaggggggggggggggcccgatactcaaggaatcaaagagcgataccaccggaacttttaagtgcttctcatacaacttcctctcctcaaagttacacccagcgtcccacacgcttctattcacagcactacgtagcttacttgagacacttcttttagaaaactcacttgataagcttctttcagaaaactcccttgagaagctacagcttatctccacacactctctaatgactagactcacctccttgagagactggcttaaccaacattctcacgaacctagagcttatctacacacccctctctaatacctaacctcaccctcttggaaagagatgcttgagcctagtcacacatccccgacaataactaag

SEQ ID NO: 189272 - DNA, 378 bp, Glycine max
agcttcagctcattaaggaccctcttcattgtggctgcgctgatccagatgagggactgcgaaatcatacgttcgcgtctgaagaagtcaacatgatcactaccttctgagaagatctaaactcttctcaactccaagccgctcaatatgaactatcaagggcttcgcaggaccaccattgctatatgacacaagattaagaatgagatgaacacccattagacatcattgggcacatgataatggcaaatggtctgcgcctcacccttaatctcattccatgggactcgaatcgtggatggaaactttcacaatcaacacccttgttacagagactaatgttggtcgatggacatctaccgtggaatagagtcacac

SEQ ID NO: 189273 - DNA, 433 bp, Glycine max
tcccttacccgcactcgtatggatgcgatgtccggcattttattgtaggagaagatcttgagctcaatgagatgatgacctgtacttattagctctaccacatcaaactcatgggaaacatcccaaaagcaacacctcatatgaatatggaatcagaacgccatatgggtcactccatggaagagagagaaaagataacattgatcgaagacactatacgaggaatgaagaatgaggagagcctacccactccatggcactcatagaagctattgggaggaagaagtagaccacccagagtgggaacttagacctaaactcgataacaaagacatggaacgaacaacgagaagaataaatgaacacggacgggaagctgagctatatcgcttgacagtgttattatacgtcctatttaaaatatataccttta

SEQ ID NO: 189274 - DNA, 415 bp, Glycine max
  unsure (1)..(415): unsure at all n locations
agcttctccctcttctccctcttttcctgtgatctgagaatcacttaaaattagtgagaaaaattgtttccgtgaagaaaatccaagccgaagcgcttccgtaacgcttccgagacgtttccatgggtgatttcgcgaagattttccgccgttcttcgtcgttcttcagtctccaaccgataagttcccaaaatcgaacttttcaattcattctatgtacccttagtggtcctcatttgtttcgcgtgcttttatttttatttcatttgctttccgtacccccttttgacgtgctttagtcatttatttaagtcattttcacgcctaatcaaaaataaaataaatttccaccgatcattcgtattgtaacatcttnntaattatgttaaaatgagatccgaccgttcggtcatgc

SEQ ID NO: 189275 - DNA, 469 bp, Glycine max
  unsure (1)..(469): unsure at all n locations
tangggtaggtacggactggtgctaggcccatgatttatttatcatcatcccgcgtccggctaaagacgttagagaagcgctcttatgaggcagcctagtatctctaattttgctctttaaaattcttgcttttttacttgtttgttttcttgaattatatcttgaattcacctaagtttatatgcaactataggattttagaaaaatatacataacaatgaacaaacacaattttgcaaaggcttttgcaaaaaaaaaaaaaaaattagctcacctgtgcgagcgtgtctgacgtgaattttaaaaaggggggagggttgaagccattttcaccccatttcttctccaaaactcaaagccttcaactagcttatgggagtcctatttggtagtagcccacagcttccattgcacacttntgctttcattntttgcattttcattcatctcctacaagtaagtaccatc

SEQ ID NO: 189276 - DNA, 432 bp, Glycine max
  unsure (1)..(432): unsure at all n locations
agcttgaggtaacgtgcacgtttataagttatggctcgaagtctccactgggctaccacaatgagagcagagagaagccaaactcttgaattaagtgtaatttgatttataaactaatttgattctctctctaagaacaaaaaaggctaagaaatacataaatatattttctttatattgaggaatgcctaaaggcacaagaacaacaaacttgggtgaagaaaacctatagcatcccataaacataacaaagaaaccttatgggaaatggggaatggatgtgaaatcaaagaggtaaatcatgcacttgattagccaatgagtctccaactgtgtttgcatctctataaacatgagagaacattgttgttcaccgccctgacatccactcgggactntcaaatgttggatgcataaaactaatttgattag

SEQ ID NO: 189277 - DNA, 429 bp, Glycine max
ctcaatctttattttttggtttctgaaaaatgttttgttgtggtggcggcgtgctggtggcggttttctgaggcaaagggtatcttcaatcggtagtgttagccatggttatggggaaaagcttcatcctttggaccctcctttgttgggtttgacgggcgttgttgaagtgatgtgtggtggaagaaggacacctttatctgttgtgttgaaccaaatcaagaggggtgtatcaacttccactgggaatggtggtgtcagcaatggcaataatggaacaacagaagattctatatcattctctgaagccaagaagcttatgaggctggtgaatgtggagtcattgaacatgaagctcggtatggaagggaaggaagtcatttgctattctgagctctttgaggcctgtgagagtgtgtggattgcaag

SEQ ID NO: 189278 - DNA, 375 bp, Glycine max
agcttgcaaggcttctagactctatatcatgtatacactgagttcaggagcaccattgctatcaggattcatcatatagaaagcttcggagtctctggacccaacaattctctcaaacttggccctcatgtacatgatttcaccctctgaccctgcttcaactccactattattattgttatcattatttcctggtaagacacctgcacccattgaaattggttccactgctatgagaatatcccaatgctttgggccacactctcttctggtggcaaagccacacttcttgccattgcagtaagtcctccacacaggctcttcaagcaacctcacatgtagatatttctctgctcctttctctcttcacagtca

SEQ ID NO: 189279 - DNA, 431 bp, Glycine max
gctgcctgtaaactttctatggtgagctacttttttacagataactttaaagatagatatggaagtatgaccctgactgttgaaaatattcttttttcccggtacagtcttcaggcctggtttgaaattttaacaaggatgaaagcctgcaaatacttgatgccctgaccaaccatttgaacggtgtaattttaagcaagatatagaatgagttggcaaagcagatactgcagcttttaataaaacttctttcttgtgtgtggacatcttaattgttcgttaattattaattatatttgaaggaaatgttattaaaactcctttcgtaaatagttcatggaaccaatgatgtagtatttaattttcttgtgccaataaatgcacgttctttagttggtttagtgactgtgagcacaacaatgatgtggatg

SEQ ID NO: 189280 - DNA, 279 bp, Glycine max
  unsure (1)..(279): unsure at all n locations
agctagcatatgcatactaagcgcacattctaagnacaattgacttaagtgatcatgcgctaagcctataaacgggcatttagcgctaatgcttgattcaattggtttccaacttgacttcacaagctgatcatgcactggtgcgctgatctaaatcttcatacatcttacattcttctattcatgcatccaaaaactctacataatagaatataacactataaacttactaattctatcagtcttaagacaaaaacttcaaagaatctaaattcttat

SEQ ID NO: 189281 - DNA, 467 bp, Glycine max
  unsure (1)..(467): unsure at all n locations
acacatagaatactaagctggagacactctntcataggggactaagaggatatgtgtattttacattcaaggctggatgatgaagaggcagttcgactttgtaaagacagaaagaagttcatcaaacaagctgttgaacaaagaactcggttcgccactggacacatagcctacatagaatctctgaaaagggtttcagcagcacttcgcgattacattgaacgcgatgagcctcgcgagttttcattagacacggtcatcaccccacctttcacacctgtgaagaagaaaactggcccaggattcattcccatatcagcaaaaccctttgctacaacagggtcaattgagtttggaattggaccaaactctactttcaaagtgaattaccttaggcctggtggtaacccagcaatttcagttgaagagaggcctcaatccccagaaagggttcgggtcgagacata

SEQ ID NO: 189282 - DNA, 463 bp, Glycine max
  unsure (1)..(463): unsure at all n locations
agcttctcttaatgaactatgaacactgataacactgaacaggcatcacaatcaattgtttaaaagtctttatacaaataagctataagttaggggttataagtaatccttactcggatttctcagagttttgcatggaacatttgtaccttcatttcttcaaggaaataatttgagatcatgagcatgatgcgtttagcactttgaatttcactaatcttatcattttcctcgcaccttcagctttgttgcatctaggcattttttttggtattgtgtgctaagaggaaacacaaaaacggngaaattacatccttaagaaaggcgtagtagccaaagtgttagcaacaagacacagattagcagagaagcacccaccaaggacaagcccaagagaaatgtcaagaagccagcccactntcaggattacattngaattacacagaatattcttgctgagtag

SEQ ID NO: 189283 - DNA, 177 bp, Glycine max
  unsure (1)..(177): unsure at all n locations
ntactattacaaaccaagcttagtgtgtgtttcacataagtctaaatgcctaaaaaataagcataaatcttaataaaaatcattttttcataaaatataacctaattgataatttttaaaattcaaaaatattctcaacgcttcacgcggatctagttgatatgaagtcttcacgcg

SEQ ID NO: 189284 - DNA, 441 bp, Glycine max
  unsure (1)..(441): unsure at all n locations
agcttattgatatataatattgacggattcttattatatggaggagagaggagaaagttctggaattaatggaaattaaatggtgcggcgaaatccgacaattagacagcgacacgtatgactnggtggtactaaaaaaaattttagcatgtgaggaaggtgtgagcactgatcaaaataaataaataaataaataaaattaaaaaaatgacattgtatgacatgtgggttgaagtgagaaaagaaggattggagaatttattattnttttattggacaaaattaattgacaaaaattaattggcaagaacctatcaatgaaaaggttctttcccaaatattacactaagtaacataatattatcatcatcttcatatcctaatggaatagtctcactaatttgaagatcatgaccattttcatactccaacaaaatattt

SEQ ID NO: 189285 - DNA, 483 bp, Glycine max
  unsure (1)..(483): unsure at all n locations
ctatgaaactaagcttactctgagacccaaggggatgcttgcttccttgacatcttnttacctccatggccggcgttttgatgtttgtttcccctttttctctttgatacctaagtgtagttttgagagattcggaggtttatttacgttgcttgaaggttgagttttgtaatagaagggttatgtgagtgaatgatttgcttgggttgaatttgggaggccatggatggccataggaagcaaatttacaagaattcaaaaattttcaatttgcaacatgaggcttagcctacgattttcaaggcttantctcaatggtgcaaaatatagtttagctcttgtggacttgaggcttatcctgagaagtatacgtttgaggttttagtcctaaggatgctaggctaactgtggaaacacactatgctaagcttgagacctccaaatggggtttaaaactatgggtcgaagagacaaaaataccac

SEQ ID NO: 189286 - DNA, 436 bp, Glycine max
agcttggaaggatgcttcaatggaggaaattatatatgtagagaaagaaagaggggggagcacgatattgaaggaataaaagagggagagaagtagaactttgaagtatgtctcacaagactctcattcatcaatgttacaacaagtgttacacatgcttctatttatagactaagtagcttccttgagaaaacttccttgagaagcttctttgagaaaactttcttaagaagctagagcttagctacacacacccctgtcataactaagctcacctccttaagaagattcctaaagaagctagagcttagctacacacacctctctattagctaaactcacctccttgagatgagaagctagagcttagctacacaccctctataatagctgagctcacccccatgacaaaatacataaatatacaaagaaaagt

SEQ ID NO: 189287 - DNA, 480 bp, Glycine max
  unsure (1)..(480): unsure at all n locations
acacacgaaactaagcttagtcctgagnactggtcccaaagacaacagggagtgatattttttaaaccctagccttgaacacgtcctagggaagtagacacggagatggacaagaaaatccgcagtattgtgagtagcattctgaaagatgcttctgtgcctgaagctgatgaagatgtcccaacatcgtccaccccaaatgtttctgtgcctgatgtcaataaagatgttccaacatcctccgctccaaatgctgaagccctcccttcaccccgtgaagaggaatcaacagaagaagaggatcaagcctcagaggagacccctgcaccaagggcaccagaacctgctccaggtaacctcattgacttggaagaagtcgaatctgatgaagaacccattgccaacaggttggcacctggcattgcagaaaggttacaacgcagaaagggaaatacccccattaagaggtctggacgaatc

SEQ ID NO: 189288 - DNA, 446 bp, Glycine max
agctttaagctgctcaatggctccaggttgctgtatggaagggcaaaggtctgtatggtggtcagcaaatgagcacaaaccacaaacccttgcgacaggtacagatttctgattcaaggccagctgggttaccaagttgaccaacgcatccagtttgccttcaagctttttagtatcagatgatgcaaatgggtttgtagctacctcatgcactcctctaatgactatggcatcatttctggcgctaaactgttgggagttggaggccatcttctcaattaaatttctggcttcagcaagaggtatgtctccaagggctccaccactggcagcatctatcatacttctctccatattactgagtccttcataaaaatattggagaagaagttgttctgacatctgatggtgtgggcaactggcacatagcttcttaaatctcttcc

SEQ ID NO: 189289 - DNA, 476 bp, Glycine max
  unsure (1)..(476): unsure at all n locations
gacacttgaaactaagctcattcactgagcaggtcgaacgnactacctactattttttggngaccagacaggagttgctattatgtttttttttatataaaaaaaaactagatcatgatgatgaatttatattgaacttgaaatgtgaataaaaaaggtattcattctactttgtgcaataatttttttaatttatatagaaattaaattgttgttataagcagttttttattattttaaattttaaatgaaaataggaatactcattttttaacatgaataatataaaattataacccattcattgcagtgacttaccaaatggtagaatgaaaatcacattctgttctatcataaaaatattcaagcaagataactctgctcaatgtatttctcttctctgatctgttttgacaacgacaaacctctatttatatagagtaattatagataacttcgcagataagaagttcata

SEQ ID NO: 189290 - DNA, 460 bp, Glycine max
  unsure (1)..(460): unsure at all n locations
catgcaagcttgtgattactgctgaccanacanggttacaattttgtttcctcgcgaacccttaccttgaatcatggagtcatgacgactatgatgaatcccaatnggtgtacctgtatttagatactcagaacaaaattaatagctatttcagcaacgtatctttaaacaatgcttgctttacgtcgatattgatactgtgtgtaacctttcaacacctttatgtagcgctcaaccagatacatgcaatgtaaaaacatgggcccacataaccggatcttccccacaagatgaacaactaagtgaatcataatgtcaaaaaatgtcaagggaacatacatctncaatgtacgtaagaagatgacaaccttattctccatattatccaactgttgaaggtcgataaccttgctacagataacattatagataaagcacaatcgagttatggagagcctaa

SEQ ID NO: 189291 - DNA, 415 bp, Glycine max
tcaacgctacagggcatgcatgctaccagttgatggcaataaaccacacacgccaaatgccattaatggtgcatttccgacattctgataatagccaccctacaaaaataaagaagagatccaatttatgtgataacaaatatccaaatactcacatgaacctcttgaaccacaaataacacacaatgtctttcacaaaatcatttatactgaaaccaatgttttgagaatattgactcgcggcctatatatttttatcagtggaaccaatatcgaatctacattgtcaatcatctattgcttcttatttatattgaataaatttagaacacatttatcacataactaacaatgcagctcaagtataataccttacatattagcatagtcactcgctcacaaggtatattacacc

SEQ ID NO: 189292 - DNA, 445 bp, Glycine max
  unsure (1)..(445): unsure at all n locations
agctttcttaataatacnacttttttattttttagtctatctgcacatacctcggtaatagctaatctcacctcctcgatatgataatggagaacttatgctaccacccccgatattagctaagctctacctgaagactagaacatgaatatactaatagaaaggtccttactatcatagacttctaataatgccccgaagtacaaggctcaaaccctatactactataatggtcataatacatggcccatcctaatgaaagacctattctagtatttactaagataagcgggctcatacttagcccatgggctcgaaatctagcctaatgctcatgataaccctacggcctcaccttggatctctacgccatctatttggagtctctacccatgcccttgcggaaagaatgcttaaccgtatcctgggagaggcgatcttatat

SEQ ID NO: 189293 - DNA, 57 bp, Glycine max
  unsure (1)..(57): unsure at all n locations
caccccgccccttcccccccaccctcccccccccggggnntgacacagcgccaaaaa

SEQ ID NO: 189294 - DNA, 443 bp, Glycine max
  unsure (1)..(443): unsure at all n locations
agctntataagcgcgggcctgtgttagaatgtcaagtggtcgcgatatacgaagatgatgttccgagtacattggatttggtacgaccatgccctcctgatttccaactaggaaattggcgagtggaggaacgcccgacatttacgcaacgagcataatgtaaacctttacggttttaaaagctctatagttgggccttggctttagattatttccttttggtaaggctctgtgtcttttggttttgaatttataatacaaggacctttcttcatctgttcctacgtctctacccattctcattcatttgcatctttacttctttttctgaaacggcagatccgatgacgagtcccccgaaggtactaatacctgggacccgcttatcaacttcgaacaagaaacgaatcaaacggaatatgaagggaatgaggatgtgggac

SEQ ID NO: 189295 - DNA, 462 bp, Glycine max
tcggtcacacaagtatgattgaagagaacaaccaattatatggataaacaacaaaaattgattaaagagctcaaatttgagcatgttaaggctaatagaggtagatctcatctaaaacgacgagattacaaggacaatggtgattcttcgatggattagagtctttatacaccaaaaaagttactacaagtggaggagccaaccgaggatgaggccattcaattcaatttactatttgttggaaatattctaagggtttgcataccaaaacaattgcaacaactttcgatgatggaacactatgacagatcaacttatcttaatgatcatctatctaaatttgagtctaccctatcatatcgagagcaaatagtttgcaaatatgcatagcattcccattatacctcagacaagtatcactaaagtgcctccaatcacttccaagaggctccataagcttat

SEQ ID NO: 189296 - DNA, 445 bp, Glycine max
  unsure (1)..(445): unsure at all n locations
agcttatcaataacaagtccagtatcaaatttggcatccaaattacaaaaaagacaaagtcagtaacaatacatttgcagttttattatatggtatttaataacatggttttgagtggatacctcaatgaagaaattcacaatcatcccagccgcagagcaatcaatgacgtaaattgatggggtcttcagccaggaatcaagttcactgataggtaagggaatatactgtgtataactctgaacatgatatgatgaagaatgagaataagaatgtcatgaagctattttcatcatgatattgtaaatgagggcattatactctattggaacccatatctagtagccagagataagctaatcaggcttctctgataaataaagatttaagttcagtctagttnttaacttcttattagttactaacttatttctataactattat

SEQ ID NO: 189297 - DNA, 424 bp, Glycine max
  unsure (1)..(424): unsure at all n locations
actaagctgtaaattgngatgctcgaaattcataaaaatttttatctatacattctagcaatatatttctatttatttctactgtaagcgcataaaataattaagaataattgaataatatataaatataattaaaataatcaaagattaatattatcttaaattttcaatgcaataaaacaaatatgagcatttcttaaatatgtcaattgataactgctaaataaatgtgcttttgataatgagaaataaagcgaaattgtatttaaaaataattatttagcaattatttatgcttaattgttaacaattaatgtttttctaaattatggttgtagatataaaaattggacggattaacaacaaaaagttaccgatattacgaagaaagattgaagatttagcatcagacccagcccaagac

SEQ ID NO: 189298 - DNA, 322 bp, Glycine max
  unsure (1)..(322): unsure at all n locations
agcttgtcaatatccacgcggagctcatgatcagaattgggagcaaccggaggnggagcacgagcagaaacacaaaatggcgatggaacaagcggaggacgacaatgtgaagggaacgtgggcggtcctaggcgccgatgctgccgaacaacaacatgacgcgggggaggggcaagagggcgcaatcgacgaagaggctgaagctagcgccggtgccgccgctgcacggcacgacgataacggaactgctgcataagtgggggtgcacgaccacaaccagcaccaagacctgagggataaaaggacgaccgcgcactgacga

SEQ ID NO: 189299 - DNA, 434 bp, Glycine max
  unsure (1)..(434): unsure at all n locations
agctttgtagaacagaatctcccacaatattgctttagtatggaagttctacatgttacaattttatataattattataaatttttctatagtaaataatttaaattatgatacaagattattcataattattacaattttcctttaaaaaatattgaattataatttataaaaaaagtagatcaaaagggatattcaattagtaaaattatatatacaagtaaagataataatagtatttatctctcatttataaagttaaacatcatattaattattcttttatcagttatatttttacttttttaatatttaattattntacacgtgtatntattgtaaaataagaaaaaatgaataaaaaaatcccataactattttattagaattgaatcaagaaaatttattatatttcttgatttctacttgacaac

SEQ ID NO: 189300 - DNA, 464 bp, Glycine max
ccttaatccatcaaagtggctttccttataattaatatgaatcttataaatcataaacttttcatatttccatcaggaaatgagaaaataattattaaaagcaatttaatgcgtgtttggggtgacgatatgggggaaaaaatggtgaccaatcgcacggtgaagccatgtaaacacataattgcttgtcaaaatttatagtgatagcgtgatttttttggccgaaaatgggttatgtttagaatccaaacacacacgcacacttattgtttctcttgaaagctgagaagtagggtggaagcaggtgaatttgtgtaaaattttaatttgaaaggtaaagtgttgacgtgtctggctcttcaccaaccgagtctttgctttgcaaattatccatgtcctataagctgctgtcacatcactgtgccaaatatgaacacgcactaccgacccgctcaaactcaatt

SEQ ID NO: 189301 - DNA, 422 bp, Glycine max
  unsure (1)..(422): unsure at all n locations
agnctttattatcatatatcttatttatttctgatgatttagacatgttgctttgagttcagttatctgtatcactattatttgaaatgcctgtagacagatgcagaggacctgacaatttctgtcaactttntacttaagttgcttgattcgcactttacctctcaactctcggagatatgaatctaaatatcattagatgcttgagtttgtcttatacttgttgtgttaaacaaactgccaaatagtgcatatgtatttttaaccacactgtgatgatgtcatgcttgttgtactgtggcatgcaatgatttcatctcatcaaccacaaagggtacttaatttctttaactctagaagagtcaaatctcatctcacgcatgtaaataaacctggatccaacagtgctgtgtttagagtcg

SEQ ID NO: 189302 - DNA, 465 bp, Glycine max
  unsure (1)..(465): unsure at all n locations
nttagagcatttaatgaagatccaatacaactacatctatcacattagtgtatgtataatatagaaacatagaaacattgtccttaatgaaccaaaaatagaaattgttctctttatgaatgatttcaagaatagatataaatcataataatccctatcttctaaatagataactcctattatgaaaagcacaaaataaataaataaataaacagagatgtaatacacatacaacaattcatacaacaatttgtgcaacattttttatgtccatctctcttcatgacatcatttcttacaagaagcagattttttatgtccatttctcttcatcacagccaattaattcctacacatagaagcaaattatcactacaataattgtaaacggatgcatgacttccattgatgcatgtttctaaattcaattataagacctatttacacttgcattcatattgtatt

SEQ ID NO: 189303 - DNA, 433 bp, Glycine max
  unsure (1)..(433): unsure at all n locations
agcttagaacaatatacttgtccttcattttattatctttaggcttggcggccacgatcaacaaagtacttttggcacctactatatgttgatttgaccaacgctgttatcggtatgttgcggcaatccttcaataccttatttatacattctgagaggttcgttgtcatgtggtcatatcgacgtccttctttatcataagccatggtccacttttcctttgaaatgcgatcaatccatgttgctatggctggactcagttgacagaatttatctaaattttgatcaaaaatatgtttgcaaggagtatagcctgcatgaaattagttagcaacaataatttgaagtatacatgaaagttaaattaaggtgaccatgatanatgaaatcttacccaatttcttcaacattttcttttgtttgcattattgaa

SEQ ID NO: 189304 - DNA, 489 bp, Glycine max
  unsure (1)..(489): unsure at all n locations
ctattacgcgacctatgaatactaagcttacatagtntatctntatcaaacttaagttttgaagaccaattaccaagtctttcgtaactagatgatgtaaatgatgcatattaatgtgtgtagttgatgtgtcattattttctcctatttcttaaccctttttatcaccactttaattactaattagccttaattgtcaaattaattatgtagttttatcatttgggcctacttgactaattttgtgtttttaatttaattttaggataattataagcaattgggcttggatccgaaattgggctgaaccggcttggacttgaagagaatagacaattctatttttttcatttttgggcttggacttaaaacatattcttaagctttggggctgaggacctttataacaacacgagggttctagtagaaggagactgttgagataggagaaaaattttacggttttgcaatttcagttcagtgttacta

SEQ ID NO: 189305 - DNA, 450 bp, Glycine max
  unsure (1)..(450): unsure at all n locations
agctngcctacacctaaactnnttttntgaaaaggttgcctacacctaagtattttactgattacttgtaattaggatttcctgttacactaaatcttttgcctttgttgtgatgtgtgctagacacatttgagggcaaaccttggtgtactagtaatatgtgaacaagagtcttatgctatctaaacaattgaagatgagatttatggaattctgccaaattgaagtagtcaaattaagcaaagttaggcttaaattcacaatatacaccagagaatcaatggtgataggtatagagattgggtttacttgcacttgattgtttaactccttgtttctctacaattatgaaatttcctttcaatatccaattacgcctcttgtctattaatgattaatgccaattggtcaagtttattaacaatctttntcctaatcaaattctctatt

SEQ ID NO: 189306 - DNA, 458 bp, Glycine max
  unsure (1)..(458): unsure at all n locations
ntaaccatnggtcgaccaatattcgattagctcttaggagttatatgttgagtatcatgttacagttgtgttcaaattatgtaattctgatttcaggcttgggttcctatcaagactgcagcaagtctgatctggaacctagtgcttgatatcaatatttgtaagcttagtacctctggtactcatttaatactacttatacttttgctgagcaaaaaaaaaactaaacagtagcttacactaggagctagatctagatcctaactaactcaagcttgtcataacagaatgacaactgataaataattatgctgagtcagaatgctggctcagcttatactctatttaaatggggtctgttaacacaaatgtccaatcctcaatatgttttaggaaaaccccttaaaagtgcacacattacattagataggatgaaatgcctaatcttattccatgtg

SEQ ID NO: 189307 - DNA, 456 bp, Glycine max
  unsure (1)..(456): unsure at all n locations
agcttctagaagatacaagtgcagctcctatctaacttgcatgcgcacgtgaatgattatgcaactaatacgtaatccttcaaatgactaggagtgtggctttgcctcttgggccttgctgtttgcaactccttgctgttactcacattgggctttgctgcttgtagctctttgttgttactcatcagttggttaattgttttcgttctgatcaagagagtcatgcacatattttgtttacacaaaatgcacttgagatagagtcatcacaagtttgatattagagcaatcgaaactcgagttcaattcaaattacccttgtgttgtaagatccgcaaaacccacacttgtggtatagccaatgaaatggtgcagtacccttctcatggcagtcattgcaaagtatatcctgtgatataaaaaatcaggtatcacaattaagtntagatcttcaaa

SEQ ID NO: 189308 - DNA, 472 bp, Glycine max
  unsure (1)..(472): unsure at all n locations
tgtacacgccatattagcatgattatctactatgtgagttttttattttctattttccatttttcttgtcaacactcatgaattgatatccttaggaccccactaattatcccttttcttttgccttgcaaagcaatttgaacgccttttccagtttacccgaaggattgaggacttgatgttcactgttgcacctgaagaggtttgtgtgtataatgctgtatttttaatcttccaaaggttcctgctatacagcatctagtcatgtctagaattctacttatcaaacaatatggttgcaatgtttcttagtttctctggttgaaattatgaggttctagatatagatggggtgagggataaaagagaatgaaacattgaattgatattagttgagatgtattacaatgtattgatatgttcataanacagagcactgaccccttatttataataatcataatcctgacca

SEQ ID NO: 189309 - DNA, 432 bp, Glycine max
agcttattctatgtgatttaccaagcacatcttggttacaaatttctaagtcatctagtccatcaccacctaacaaattttgtttctcaagttcatgtaatcctctttcactaacatgacctaatctcaaatgctagagttttgttttgtcaattaatgtattactagctaccaatgcatgtccaacaatagtggaaccttcaagaataaacaagtcattacttttattcttgttacccttagctatgattaaagatccatttgaaatcttaagaacaccatttaaaattctagttgaatatcctagatcatcaaacatgtctatggaaataagatttcttttgagttctggaatgtaccttacatttctcagtagatactctctattatcaaacatcttcaatctcacagttccaatgccttgtaccttgc

SEQ ID NO: 189310 - DNA, 464 bp, Glycine max
  unsure (1)..(464): unsure at all n locations
atacctttctgttgctctcactagttattccagcatttgtctatcgtgtttacaactgagcccggtgccctttatatagagaaactggaaagaacatgatataggccccttcactcaaaaatagtaaagttactattcatttactttgtcacatggctctttttacaataaaattttatagatagacttagtatcacagtctctgcaaaagtagagactcccgcctttaatttacagttgtatttcggcaggatgcttctgtcttcacctctatgntgatattgtgataataacattttcttcttcatcttggatactcaccaattcggaaaagtctgatgagtcttccaatgagagatcagtggatgaaaaaggaggattctgttgtcatgacatacactggcttctgcaagctcttcatctttatcctctcttcgaagaattgaaccaatctatcattatga

SEQ ID NO: 189311 - DNA, 449 bp, Glycine max
  unsure (1)..(449): unsure at all n locations
agctggtacaagcgttgnggtctgttgttgaacgtggtggtgcgagaagtagcagtacccaaaccttcaggtcataccgccacttgaaaaccacaaccatctttcaaaaccctgtgttgtgcgtcaagttctcccactatgaaatcctctaagccaccccaacccttcgcatctaggatgacaccatgtcaagatccacacctaggatgatgatgttttatgcatcaacttcaagatcctcattatatttgctaattatntttaaaataaaaagtccatttattacgtgaaaccctaactcagacttggagaacaagtggcattacaagtggttggttgacatgtaaagttaacagtcacatcaacacctaatggaacccttctaacaacagagatctattacaaaagttcttatatgttagtgacatatcgcaaagcaaatatttatt

SEQ ID NO: 189312 - DNA, 476 bp, Glycine max
  unsure (1)..(476): unsure at all n locations
ntggaaaaggctgttttcaccttctcgctaagctaatctgttggcttattgagcatccgctaagcgcaacactcctgggctaagcataaggaagaatccagaagaagatgagttgtaatggttcgctaaacgcaccgcttcatctctctaagcgaactgcttcagttcatctgctaagcgagaaaggcgcgctaagccaaaaatcactaacgtgcactaagcggtccatacgtgcgctaagcgcacgagcacgaacaaggccacctatttaagcctgaaatcagattttgtgaagatagtttggactgggattcagagctttgcatgtctagggtttctagagagagaaaggtccaagttcaagaaagttctgagagattntgctgtgtgaagatctgcagagaccaaagctcgaagcatgagcctgtttgagagctgaagatgagtntgtgagtgattgtgagatcctagtggcg

SEQ ID NO: 189313 - DNA, 460 bp, Glycine max
agcttgtatataagctgaacctttttatcaataaacacaagttgagctctattcggaagattagagtttatctcttttatcttagtgagagagattctcctaaattcttgagtgattcaagaacaccctggctgtatcaaaggactttcacaacctttgtgtgttgcccttgcaggaaagagtgaatgtttccttcctttcatcttcacccttggtatttgaaaccacaattccagaaaatccacctatgcccataattatctcgtggccataactcctgtcttacgcactcaaattaagtgattcttgagcctaaattgaatatcataacaagacctcttcacctcgtattagaatcacctcatttggagccctgaagctgcagctattgccatttctatattgctgtccagccaccacttagcctacgttataccatgccactcatccattgtatgtc

SEQ ID NO: 189314 - DNA, 459 bp, Glycine max
tgagatagaacaacggatgccctccagaaataccaatggatatatcttttcacacagatgtccgattcaggcgcataatatatcgagacgctcgaaattgaacaacggaaccagtcgagaaattcatatggtcataacttatcgctagaatgtacgattgtgggacataatatatcgagacgctcgaaattgaacaacggatgcgctcgagaaattccaatggtcataacttttcacatggatgtccgagtaaggcgcataatatatcgagacgctcgaaatttaacaacagaagctctcgagaaattcaaatggtcataagtcttcacatggatgtacgattcgggcgcatgatatattgagacgctcgaaattgaacaaagaaagctctcgataaatttaaatggtcataacttgtcacacgaatgtgcgattcaacgacttaatatatcgagacgc

SEQ ID NO: 189315 - DNA, 458 bp, Glycine max
tgaacttagacgcagcatgcgcatgcaagctagtgtaaaactaaatatttatcagttatagttagcatcaccataggaggtgagaacacctctaattgccatacttaaacgactagcacataaagatcaaacggactgtatgataataataatgtgggcacatgaccaggcagggtataaaaagagacactgagctatataacttgacagaacagatgatacttatagaataagcattaaataacctagagaatcaaatagcaaaaaatacaattcaacttacctttgtatttcccaaaataacttaagatgtgttaccttattattgtccatcatagatactctattgtggactctactgctttattccattatgatggttccttattgactgcacctttccaatactcttaccaagtttgccgaagcgaccaactaacttatgtaaacaacatatt

SEQ ID NO: 189316 - DNA, 258 bp, Glycine max
agcataacaaaaaatactaatgcagtacgcttacactagtgagctatgatcatacatccgaactaacatgaaacttgtcatagcacattgacgactgataacaaattgtgctgagtcagaatgctggctcaactgatactctatgtgcatggggtgtgattacacaaatgttcaatcctcaatgtgtttgaggacaaccccgtgatagtgcacacattgcatgttatgggatgaaatgctgaatcttattccatgtga

SEQ ID NO: 189317 - DNA, 434 bp, Glycine max
  unsure (1)..(434): unsure at all n locations
agctttaacctcatcgtccctctctagtctttattattgggagccaatccaatccttgtgttcggactctcagccacttatgatagccgccgatgatcccattactgcttcccctaagctctctgtcctttcttcacgccgcatcccatgccttgcgaactccttggagtaccctcgcgttgtggtcactaaaaccccgtgcgatgataggcgtgatgctttcgtctaatggcgctcctctcatggggtagccaagctgtcttatggtgagaacgggattataattaatacaaccccttgttcccatcaagggaacatatggacattcttcgcatgaagatagaatcttgattcttccttccttctagcgagggaaccaattaacagacgccnccccatgctatccaagagttggtccaattcacctttctttt

SEQ ID NO: 189318 - DNA, 456 bp, Glycine max
tgtccgaagggcatggctatctacaggatccggaatattttaataatcccgccaaatgaccgtccttctccttcttggaaggtaccacaggatatggtacttctgcagcttcattcacagctctttcactactactcttcttttcactctcattctttgcatctttcacaatttcttattccctttctatttctctacttctttctctctttcttggccattcacaacttctttattgaccattattggactctctctttcctgagtatttttacctctcacatcatttttccttccatcaatacctttttcttcaacaactctcttcttgagtgcaacactcttctcttcctcattctccacaaaccttttacttcctgtcattaccaacctgccaagctgagtttcagtccttttaacagcttgtgcatagcatctacaacatctatgaattgc

SEQ ID NO: 189319 - DNA, 407 bp, Glycine max
  unsure (1)..(407): unsure at all n locations
agcttgtgcctcttcacgtntggaatatgtttgtagcatatagatccaaagacccttaggtgctttgatgacggtttcttcccgttccaagcttcaattggagtcttgtcttttacagacttagttggacatctattgagtatgtaaatagccagtgtagactgcttcagccacaaatgtgttaggaagtcccttctccttgagcatcgatctagccatctccataattgtgcgattctttctctcggacactccattttgttgaggagaatatgcgaatgtaagttgtcgctcaatgccttcatcctcacaaaatctttcaaactcgcgagaggtgtactctntttcgcgatcacttcttacgacttctatccgctttctatttgaatgtagcaaaggccttgaac

SEQ ID NO: 189320 - DNA, 410 bp, Glycine max
  unsure (1)..(410): unsure at all n locations
agcttgaaactntgcgttccgaaatctcttacaaggaaaggagagaggctttcttccgccggtgctcccttcatggtgtaccctaactgtcttatagcaagtgcgggattgtagttaatacaacccctcatccctatcaacgggatgtttgggtagtccccacatgagaagagaactccctcatttccttccttccatcgaggaaaccagttgattattctgcctcctatgccagccaagtgttggtccctatctactcttctcttttcgacacacgagcgatggcttcggagcggacatgggtgtcttatgtcttgttggaataggtgtgaaaccaaccatacacaaagagcaggtaagtagcagatgatctgtgcgctactcttctcgcaccttcggtcaaatgtatc

SEQ ID NO: 189321 - DNA, 447 bp, Glycine max
  unsure (1)..(447): unsure at all n locations
tcatttctaagctctntatccaaggcattctcttgtttgtgtttcttatccttccatgacttatttcctagtggatggcacctcctctcccctcttctcctttatcttttgatgcgtctccatggttgaaaatcaccattgaaggacctcattgaagctcaaagatcttgcctccatagaagcttctcaagcaagcttccgtcaagtggtaataaaagcataagagcttcaagtaagtgctccttaaacctccattaattttcaaatttaccttctcctacaatgttgtttcttcattgttgtacatgtatttccttgcctgtcttgtgctaaatgttgttaacatgattctctacaatttccaccgattaagactgctatagaagctagatttgatttcctatggttcanatttcttgttcttgttcttgaaccacgaattgtgtt

SEQ ID NO: 189322 - DNA, 436 bp, Glycine max
gcaagcttcattggtggagttgttttcatcatagagtcgacatctttatggtaatgaatttcttttagtttattgggatctttggacaatatctcaaacttttttgcaagttcttgtaagcttttgaaataatggacaagcttaaaaatagtttatgataggttttctttaaggacgcatggtaatcgagatttatctcattctgttttgattctgattcttcatatgttgtataagccatcaaacacaatttagcttcctcttctccttcttcgtcaaatgtggtgtcatccaaattctcccagtgctcatgaggcctttcttgtccttggacatgtaatgcttgtacttgtccttagattctccaatttaggcactttgacttgaagtgtcttgcttcttacactcatagcatataatggagctcttttatcta

SEQ ID NO: 189323 - DNA, 387 bp, Glycine max
acctataaaactcagctttaatggaagccaggagaatgaaatgcgttttttccttatttggaaatgaagtttatgatctggtgaaggacatcataactatctttgggaagacccaaaagaagtcatcatctgagatgaacatatggaagaaaaggtcaatattctttgatcttccatactagtccgatctacatgtgtgtcattgtgtagacataatgcatgtcgagaaaaatgcctctgatagtttaattggcacctttcttaacatcaaaggcaagacaaagaatggtttgaaatgccgccaagacctgattgacatgggaataccagaggggttgcatccgatatcacaaggtcgacaaacgtattttgccccaacatgtcaca

SEQ ID NO: 189324 - DNA, 436 bp, Glycine max
  unsure (1)..(436): unsure at all n locations
agcttcgcattaatgcataaattcatctataattctatagacaacacataagtaattattagttgtgcgacacaagtccatacacacggaaacttttatttaaccacaactttctattttttactatcttccattcctaagaatccaatgcaaaagcccgtcctgtcattttcaaccccaagcatttattttgtatttagcttgaggtggaggaattattatgaattcataattgattgctcttacatgtttaatnttacgtttaacaaaacttagaattaatgttaaattgatataattttgagtaatttatatgttaaatttacaaaaatatcattcaaattatttttgctaatgttcatctaaacacatttntaattgagtctaaatgaatgaattgagatattagtacaatcttcaattaatttattgtttt

SEQ ID NO: 189325 - DNA, 458 bp, Glycine max
  unsure (1)..(458): unsure at all n locations
aactcagctaccagtcatttcagtaatcccacaagaggtacngtantccacgaagagtcactggattttttgatttgtttctcgcttttactggacaatgtcaacgtcggattaaccctcttgcactaatatctgcaccatgaaagaatcttttagctactagttcacttcatagtaatcaacataatgttccccgtagcaaacatccatccaggaaatttatgtaactagttagtacaaataaatatggagaacaacaagttgactacagaagatatcagcatgaggtcattcataagcttatattttgttaattcgggtacaagcttattttttgagtttctcaaacacaagaatcaaaacacataagaagaaaatttgaacaaaaaaaanaatagaagtagtaattcagtggctgcacgaagattagattacagcagacaaanataaccataata

SEQ ID NO: 189326 - DNA, 470 bp, Glycine max
  unsure (1)..(470): unsure at all n locations
ctttaattgctggtctgaagtgagatgtacgtgtgtattaatctatatgatagatggaggcgttgacgccaaaagggtgctggcagaagaggaggtggagacggcggtgtcacggcttcattactatggtttaatcaatgttcttgtttcttgtaggaagggtttgaactttggatattgcttacacagagagaaggagtggtgcggcagatttagaatcaggtaaatgacttgaatctaacttttattattaatgatcatgagttaaagattatgaatttcttaacagagtctaggactatcttnagcttttatactgtattctcaagctatatttngttctttttatatatgaccatggggagacttagaagtgtcaaatgcttacgaacggagaagaacctgttgaattgagaagatcacgtaaacttttctcacgtatacacaacacacatctataatttttaact

SEQ ID NO: 189327 - DNA, 342 bp, Glycine max
  unsure (1)..(342): unsure at all n locations
agctgccacttttcttatcatcatagatttgttttctagctggtngcaaattcaaaagatgcatttgcatgctcttgtgagagtgaacatcgtgtcaagaaacgggcacttcataagccaataaggggggagaaacttgaatggtatctgcacatttgaatgaccctatatatctcacccctaagatcatattttcttcacacttcacatggatggatataccgagattgatggattacgtacttgcgcttcattgaaaccaagtttgcactataggtgaaaaatatcccactttatcaaattcttatacttattctgcggcctctatgactactgtatata

SEQ ID NO: 189328 - DNA, 411 bp, Glycine max
  unsure (1)..(411): unsure at all n locations
agatactaagctgtgatttattgcagcctggagtgtgccaagtgttatttctctgtcaccatctaaagtactgtctcagaagacaactatggcggtatggggttgcgtcttttcctgatgatacaactgcatgtgtttctttttgccctattatgatatatgactgtcatatttaattttacagtcacactagtattgatcaatggattaaaaggacttggcatggaaattcttcttctttcatgtggccctacgtcatttaagagatttacatgaagttctccgccaacgtcattgggtggggagaagaccatcagcactactagctttatccaagattgaccggtaaatatttactncaggcgtgacttgttcaactcttgcaataaattaaatctacactatttatgt

SEQ ID NO: 189329 - DNA, 441 bp, Glycine max
  unsure (1)..(441): unsure at all n locations
agctttcataagatgatgggcaaaacanatttaatgctacactatatagaagcctagccggttcgctaatctacttaaccaacttaggctagacatcgaacatgcagttagcatcgagtctagattcatgagtaacccaagcaaagcacactctggagaagccaacagaatcctaatatatgtcaaagacacaaagaattttggcattttgtacgaggcagatagagactttaacttgacaggttatatagatagcgattgggcatgaagcacacatgatagaaacagcacaagtggatatgtgtttcttctacgcgacaaagcattattatgggcggtaaagatgcaaacgacagtcgctctatcatcagcagaagcacaatacatggctgcaacaagcactgcgtgtgaagcgacatggctcacaaaaaatctgcaaga

SEQ ID NO: 189330 - DNA, 461 bp, Glycine max
  unsure (1)..(461): unsure at all n locations
cagagaaggagtccacggaggagatgctcaccacctcttatacngtganttcggcnnccaangacgcctctgcagcctccacataaggcatagacgatgggcagctcaccacgatgtcttcctcgcctgatacgatgaccagatgcccttccactacgaatttcaacctttggcggagcgtatagggaacaactcccactgagtggatccacggacgccccaacagacagctgcagggggggttaatatccattatctgtaaagatacttgacaggtgtgagggcctatctgtactgggagatcgatctctctcctaacctctcggccggtgccatcgaatgcactaaccaccattgaactccgctttaagtgggacgcattgaatggcaatttctccaaagagctcttacgcatcacgtcttacactggaaccattatcgatgagcactttggctatgat

SEQ ID NO: 189331 - DNA, 438 bp, Glycine max
  unsure (1)..(438): unsure at all n locations
gcttgtccgcgacatgcagaccaacatctttaactattgtcacctcgacgatctcgctgccggtcacaacaaacgcatgatcatccaacaagtactttttatcgtttctcaattaataaataataaaattgtgatatgtttggtattattgcttatgcatgccctctggattattctattctatttgtaggctgtgtttaacgaactctgcanaatactggaccctgngaagccctctttcactcncaaatagggcaaaacaagtgttgtcatgtttgttggtttgcaacgtctgttaccatgtttggattctctcatattctttatgctccggtgtgttatggactcaacctttatgcattatccttagtaatatgtagcaattctcagctgttgntctgttctgttaacacacataaaaaatagttattattattg

SEQ ID NO: 189332 - DNA, 456 bp, Glycine max
  unsure (1)..(456): unsure at all n locations
acctatgaaactaagctttacatatagaagtggcgacagcttcaattcttccaactatttttctatatctggttcacctacttgagtaagaagctgtgaccattcatgcatgatgattgtacagatggctgaccatgattatatataatccttctcaatccgtgaatgaattcaactcagcaattgataatgaccagtcattattggtaagtggtaacacgaaccatatatatatatacacacatgttgagcaaaagggctaaccactggcaatttacaagtcatattataaaaggcaatgccacgatgttggtgctaagattctggacataaattataatttagtcagaactgcatgtatgttatgcttctccncaagcaaatcaatatcatgcgtatatgaatggttatctagctaggttcccatcacataatgacaagcatataacactaata

SEQ ID NO: 189333 - DNA, 450 bp, Glycine max
  unsure (1)..(450): unsure at all n locations
gctnacatatgagctccatcaatgatatgtaaataaaaaactaaaaaagctcaaccagtgatcggagactctctgtttctagactttggtggaatttgtgatttcaatttgctcaaatcattctctatatgctttttctttaccagcgagtctccctcatcttccactgcctttgaatgttcattttgtgcatcatccttttttgttcacaaatttgcagtcaattttttatgttctttaagcactcttttttgttgtttaagagtttctttgcacgctcatgaatgctattctatcctccatccttggagaggtcgtgtcttccatcacaagtgaagaatgcattactactactgtaagctttatgttttgcgtgttcaccataacaaagatccacgaaatgtggatcttttcatcctagagaatcaacattccccatagatggcacca

SEQ ID NO: 189334 - DNA, 463 bp, Glycine max
  unsure (1)..(463): unsure at all n locations
ggaaggtgtgtaacccatcattttccataatagaacacagttatatgtttactatcattgctattatttctttcttcgtcattgagggaaacacttgggctgccaagtccctccacctttgggcatattctttgaaagattcgtgccccctttttgcacatgttctgtagttgcatcctatccgaagacattatactgacactgcctaacgaaggcaaccattaggtccttccaagaatggacttgggaaggttccaagttagtgtaccaggtaacagctaccccagtaagactttcttggaagaaatgtatcagcagttcctcatcttttgtgtatgcccccatcttccaacaatacatctttagatggttcttggcgcaaatagtccctttgtacttgtcaaagtccagcaccttgaacttaggaggggtgatgatattgngtactaggaacaactcttct

SEQ ID NO: 189335 - DNA, 438 bp, Glycine max
agcttccttgagaagttttctttattagcttcttgagaagctagaggttagctacacacacccctctaatagttatgctcacctccttgagaagtttccttgagaaacttcgttgagaagctttcttgagaagctagagctcaccttcttgagatgagaagctagagcttagctacacatacccctctaatatctaagctcacccccatgccaaaatacatgaaattacaaaaaaaagtctctactacaaagactactcaaaatgccctgaaatactaggctaaaaccctatactactagaatagccaaaatacaaggccccaaagaaggaaaacatattctagtatttacaaagacaagtggacccaaccttggcccatgggctcagaaatctaccctgaggttcgtgagaaccctatggccttctttagtagcttt

SEQ ID NO: 189336 - DNA, 466 bp, Glycine max
  unsure (1)..(466): unsure at all n locations
ggagctnggttcaaccccgtaatccaaggaatggtttttctgatcgccaatactttaacaacatctcatagggatgaatgactcgggcatactttaagcttatgcacggaaaatgtaattatgaaattgagatgcccgaagaaacaccatttcctagttaaccatgcattaggtaccatgttcaattattttgtttttaagtgaaacgggtttatgatcccaacatggttggctcctaacacatgaaactaagaatgtagtgtgaagtttcacgcttcccccttctttgtttttgttttgtagaggaaaacgcatggatgagcaaacatgaaaacaaatggtatgcaattttgcagatcaaaaagtttgttgaacgcatatgcatgatgatgccatgactcatgcaaaatgtgaggctggaatatgataacggacaaatgcaggatatgtctattatgatgttatg

SEQ ID NO: 189337 - DNA, 435 bp, Glycine max
  unsure (1)..(435): unsure at all n locations
agcttgctcgatttagtttcacttacgataggatcaaagtangtatgaaaagaggcaaatttaatcatcttgcttggatgaatgagaaaaaaaactggggcaaatgaggagggtgagaatgagggagaaacccatgctgcgactgccattcctatacaaccaagtttcccaccaacccaacaatgtcattacttagccaataacaaaccttcttcttccccaccacccagttatccacaaaggccgtccctaaatcaatcacaaagcctgtctaccacacaaccaatgctaaacaccacctttagaacgaaccaaaacaccaaccaaaaaggaattntgcagcaaaaatcttgtaggattcaccccaaattccggtgtcatatgctaaacttgctctcatatctactcgataattcaatggtagccataacccct

SEQ ID NO: 189338 - DNA, 469 bp, Glycine max
  unsure (1)..(469): unsure at all n locations
nggcttttgcaattccaagacactagagagcttccaagtatatgacatgtcccattgtacttttttctatctaatttgcatcctacaaaattagaatttgaaaaacctgctaagtttaaggaggtacctttgggataccacaaacctacattggttgtgcccttaagatacttatgctctttttaatagcagttaagtgagattccttaggattggactggtatcttacacataagcaaacacttagcatgatatccgatctacttgcaattaggtagaaaagtgatccaatcatacctttgtatcttgattcatccactgtttttcctttctcaactaagtcaaggtaggttgatgttgtcataagagtaaatgcttctttgcatttttccacaccaaatttctttatcagttctatatagtatttggtttgactgaggaaggttccatgtttcatttgcttgacttg

SEQ ID NO: 189339 - DNA, 443 bp, Glycine max
agcttccacaacatccaagcaattcttatcctaacatcatgaactatccaaaaccaagaaaatagggcaaaggcagaaaactctgcccaaaacacattccaataccacagctttccttactcaaataccccagtaacattctctttgttccgattcgttcaccgttggatcgactcaaaacttttactggaggtccctagtacataagtctacattttgaccgttgggatctactagaaaacgtccagaaccccatatgtactaccctttccacaaccagcaatacacaagcattttctgcacaagagccaaattctgctgcacaaaatttgacagctctttgctacacaaattgggcagatttcgaaatctctcttgccctcatccaactttacccgaattggattctacacagtctaaatcatgcataaatcacatctaaa

SEQ ID NO: 189340 - DNA, 470 bp, Glycine max
actcagctgacaagtaagctatcaagcaagtagaaacttattttttttgacacaaaatcaattgtgcaaaaggtatttgaaatggtaacatcttttaatattttatattcattttcttaaaagtaatataataataactcattttctattttgtgattgtttttatatgatatatgaaaacaatctgtgaaatttatataaaggcatcatgcattagattatattatttttatattattaaatttgtcttttactatatttaattttaatacaaagaagattcaatatcagataaatgacccgatactatcataattttcttagtgttacatgctagattaaataaaacattattgataaattcaatatcattatttaaaaatgtctaaatctaaattatacaaaatatattaaatcaaacattattgataaaatacatattgacaaaaattcgcaattcaaataacaat

SEQ ID NO: 189341 - DNA, 449 bp, Glycine max
agcttatgcatataaatatatttctctaatcaatcatgctcttgggttctatgttgtagcctaaattactaaacctcgatccctcatcagactgaatcaatccaagcttcatccgcaaatcccttttgttggactaggcccaattgagaaaaccctcttaggtttagactaacttaaactgagttttgtccgcagatccctcttgtaagactagactcagcttaagcaacttatgaaagtttagcctaatttagcctaagcttcgtccgcagatccctcttgttagactaggcctagactaaacaacattattgtaacataattagaaccaaaacttaatccatagatccctcttgtaagactaagtttcgatcctacttcaatcaagttctaaggcaacaatacatttcccaatgctaaagtcacataactatgcacacaaatggatg

SEQ ID NO: 189342 - DNA, 459 bp, Glycine max
  unsure (1)..(459): unsure at all n locations
tcttagtctcatatgatgcagctgagtttgtagctaccttatgcactcctctaatgactatggcatcatttttggcgctaaactgctgggagttggaagtcatcttctcaattaaatttctggcttcagtaggagtcatgtctccaagggctccaccactagcagcatctatcatacttctttccatattactgagtccttcataaaaatattggagaagaagctgctccgaaatctgatggtgagggcaactggcacatagttttttaaatcgctccaatactcacacaggctctctccactgagttgtctaatacctgagatatctttcctgatggctgtggtcctggaagcanggaaaatgttttctaagaatactctcttaaggtcatcccagctcgtgatagaccttggagcaaggtaatacagccagtcctttgccactccctctaatgaatg

SEQ ID NO: 189343 - DNA, 446 bp, Glycine max
  unsure (1)..(446): unsure at all n locations
gaacgcttacaggagggggagtcctacgaagagaatgtttgttttgtcgcagncnccacggagcactactacaacctattgacttaacatcgcaagcataacatccgattttctgagaaattgatgttaacaaaagcgcgccaaaaatccacgttaacaaaaatgcggcgacatcatcgtccataagtcgacccaattaacatccgttctaaaaaaatgatgttaacatcatatacccaacatcggttattccaaaaccgatgtcaacttgggaaagttaacatcggggatctaaaaaactgatgttaacatcggtactgctctacaaaccgatgatgcctcattcataaattaaaacccccaagaccatttatcccaacgcatcccgataccaaaacgcttactatacctttctgtctcatggctcaattgcgagagacctaggc

SEQ ID NO: 189344 - DNA, 420 bp, Glycine max
  unsure (1)..(420): unsure at all n locations
agctngtcaaaggtgtgagtgaaagcttatgaaaattttatagctntcgatcaagtgcataaaggtagctatcaattgttttccaaaagatagcacaaagcacatgtgtcaacatctaagctaagtagttcaaataagttatacacttgtataaattttataaatcgatcgttaagtcgaattagactataaatagacataatggtatttatttttttcttgattacaaagataacacaaattcacttacaccaacaggctgcacaagagaaaagaaatgattattagttactaagaaaatgtatatgtataaacctatataatttaatggagtctataattnttgtctttcgtttcattgatggatttatatttcatgtaaatctctccttctacatttcttttctaaacttttaactc

SEQ ID NO: 189345 - DNA, 459 bp, Glycine max
  unsure (1)..(459): unsure at all n locations
tcaccagtcgtttattaattagttattgtgtgtaataangtaactttaaataccttaagagtgatggggtaagaacaagacaataaaggagagaggtcacgcgattcttgaggggtgtgtttgggatgaggattggtgttagaagagtctccattatgagtttctacaccagcaaacgctgtcgttgatgttggtgttggcattattgtttttgctttagtttggtgttattttccacacgggtaggacaaaaagagaggagggagtttggaaaagaggggtatggggtgaaaggtagaagtagaaggtaagtgtgttaggagtgaatgaatgaagtgagaggaacaagggataggaatacaatggggtatttatggagggatcagaaccaatggcactgccacgttaaagtagaactactcaattggaattgctacgtggcaatcatatacatgcagt

SEQ ID NO: 189346 - DNA, 451 bp, Glycine max
  unsure (1)..(451): unsure at all n locations
agcttgggtaaggacctaaaaaaaaatcaggaccaggctggttcacccattcgtcgcgtgttgaaattcactcacaaggttgaagataaagaaacctttaattctattaccccacgtggcaaaccaaagtgggaaggtaacttggatgaacattattggccatgccggaagtattctgcacttcgctatccatggtcacacattaatggcacttgtgggtacctgagcatgaactactacccatatattgatggtggttacacaaatgagcacatcttaaaagcttactccgcacaaaggggcctcttgggaatgaagcaataattccctcttctgaagacgcatagacacttatccctgacccaactacaattcgtgcgaaaggtcggcaaanatcagcaggataagaaatgagatggattggctcgaaccatcttaacacccgacaaaa

SEQ ID NO: 189347 - DNA, 459 bp, Glycine max
  unsure (1)..(459): unsure at all n locations
tcggaagaaagtgatgaggtacaagccctaaaggcagagcttgtttgagcccgggtagtcgaagagaagttcaagtccatagccatcaaagtctgaagagagtatgatgaactaagggacgtcaatatggccacagctgaagccttggaacgagaaaccaagaaggcccgaaaggaagaacacgaccaaagcaaagttttgaggggctttatagggcagcaatagtgagctcaagctccgaagaggtgaaaggaatcatcacgggtcaaaggcatgatcttgaaggacgagctaaaggcttgccttangtcgaaaagaaatttgtcccaacagttaagcgagactgaagggaatatgtgggccatcatcgatgagtgcaaagagaagctaaatctagcgacgactcacgagcaaaggctagaggatgagtacgccaagatatcactagaaagggaagca

SEQ ID NO: 189348 - DNA, 447 bp, Glycine max
  unsure (1)..(447): unsure at all n locations
agcttgtcaagtcccccagcctggacaagttttgttctgtctgcttctgtcaagctgtccaaggtggacatgctcttggttttgcatgtgaggtctaacatgtcaggtgagggaagcctgtatatttggcaactctgtccttttctaacagttggagaatgcattgaagacaaactntatgttttgtctgttaatgcagttgcgtgtagtgcacacgtagtactcttgcacacgtgtcactcgtggagtgggcacgtactaaatacgtgttgcgtgggatatgaagttgttttgtggtctcctcttgccagtgaccaccgtcacttcaaatttctatcttctttctctcgaagtatacagtttccctcacctacacagcatgtgtcgttgcagacgccaggtgaagctagcaaatcctgatgaatcctgcaagataactgtctaagc

SEQ ID NO: 189349 - DNA, 421 bp, Glycine max
  unsure (1)..(421): unsure at all n locations
aagaacaagcgggggcgcactattttcgcgngnacgacacccactccacaaggtttgaagcataggagacctccaatcctcacacacaacgaggcggacaaaagtgggcagctaactagaacgggcatcatcatcaacgcggaaggtatactgcgctacactgtccacgtccacatatcatcacagcctgtggttacccgagcctgaactaccaccaacacacagatgcgggctacacaaatgagcacatcctataagcttactccccacaatggtggcccctctggaatgaagggcgcactccgtcgtcaacgacgcatggacacagatccccgacccaactacaacccgtgcgaagggtcggcccacaacacacaggataacgaatgagacggactgggccgaaccacttgagcaccga

SEQ ID NO: 189350 - DNA, 290 bp, Glycine max
  unsure (1)..(290): unsure at all n locations
agcttctccctcaattntctatanataggtgtgtgatgtgaagtgaaaaagggttcagccccttatgcacttctctctctttcgaatttgcttggaaaaattgtttccgtgaagaaaatctaacccgaggcgcttccgaaacgtttccgcgaggaatttcgcaaaggtctcgaccgttcttcgacattcttcattcgttcttcatcgtccttcgatcttcaacgggtaagtacctcgaaccaagccatttgattcattctatgtacccgtggtggaccacattgtgtttc

SEQ ID NO: 189351 - DNA, 466 bp, Glycine max
  unsure (1)..(466): unsure at all n locations
actcaagcncttaagnncagaagaagcacgagggcaagcagccacctcatgcactcttctaatgactatggcaacagagcgggcgctaaactggcgggagtaggaagccaccttctcaataaaatttctggcttcagcaggagtcatgtctccaagggctccaccactggcagcagctatcatactactctccatattgccgagtccttcataaaaatattggagaagaagctgctccgaaatctgatggtgagggcaactggcgcatagattcttaaattgcttccagaactcatacaggctctctccactgagatgtctaatacctgagatatctctcccgatggacgcggtcccggaagcacggaaaaacatttctaagaatactctcttaaggtcatcccagctcgtgatggaccttggagcaagggaatacagccagtcctttgccactccctccaacgaa

SEQ ID NO: 189352 - DNA, 377 bp, Glycine max
ggagtagaaacatgggacctatttatttttttccaagaggaagtcctatctagcacacgtctgagagaccatacatattccttacgatttctaattatgtgggccattaagtttatcatatgctgacaatagccgagaagcccatgaatctcttcgggggcggagtaagtgtctgccatcgccttggccttgtgtaacaattcgggaagttcttgactctcgttcaaggtaagagcaaaccgatccatccacatggttgccttttggtgtaagagtcgatcaccctatctgagcctaattttccgcgtatacttggcattatatacgtgatctatgctcggggctgggcatgaacaaattttttggtactggcgatg

SEQ ID NO: 189353 - DNA, 464 bp, Glycine max
  unsure (1)..(464): unsure at all n locations
ncaaaggcacctattggaaggctgagataaaagagacgagtcttttctaatgccanccgaccaacaatnagctccaaaaaaaaccatgccatagccaaaacatcatcatacacaggtccaacacgataccctatggcctgcaaaaagaaccctctctatttactaacctgagggatgaaaagaagcatacatccgagaaatcctgccaacgggaattaactcgaatttgtttgttaatatcactcaatagcctgcagaatcaggaagcacatcttgaatatttcttatcggcaaaaataaatatctaattacataaataggattgaagcaccagaggtactctgtacatagacaggactccatagacatcgttcctcagcgaaactaatatagccggactaggaaccacactatggctacatatgtattatacagctaccaaaaatcaaacgaaagccaccctc

SEQ ID NO: 189354 - DNA, 314 bp, Glycine max
ccgagctgcagcttaaggctaggctaaactttttttttcatcaacctaagcaagagataaacgtgttaaaccttgtcactcgaaacattattacttaaaagtttgctctacatcaggagaggattatcctttattaggcatcgtgcctccatatattgatactgtcacctactctggccatacatatataacatgcggaaaattctattctaaagaagaggtctcatgtcacccatagagcctatttaactattcctcactgactgtgcagccttaaattctctgggtgatagtaaacttcagttgctttaatt

SEQ ID NO: 189355 - DNA, 436 bp, Glycine max
agcttctaatagccaacttcattatatatttcatgtattccacctggctcaccaactttgtcatggtcaaaaaggctaacgataaatgatgaatgtgcaccaactacaccgatttgaatagggcgtgtcccaaggatgcataccctttgcccagcatcgacaagctagtcgatggagcgtctgggttccaagtactaagcttcctagacgcctactccagatacaatcagatccgaatgcacgctctatatgaggagaaaacgacattcatcattgaagatgccaacttttgctatatggtcatgccctttggccttaaaaatgcaggcgctacataccagagatcgatgaaccagatgttttaaccatacattggactaaatgttaaggactacaatctacgacatggtcatcaaattccaaagcatagtccaac

SEQ ID NO: 189356 - DNA, 369 bp, Glycine max
cactctcccctggggattaggatcttccttgacgtgccctagcgctacacctgctcacatcttgcgaaattcgggaagcaatcacatggaatccatgctgtttcgcaaataaagggctgaagggagggacttacgcctatgctgcattctggagtaatggggcatgccacattgcccgcattctcttgcacctaggtagcatggaaaatacccttcaatggtatgtatatatgcgaatatatatagcatgaaaatgccttgcaaagcgcgtgaacatatggcataaaaataccttgcaaagcgcgaatgtatacaatataaatgcattccaaaacaaatctgtatatatcgtgtacgtcgcataaagag

SEQ ID NO: 189357 - DNA, 393 bp, Glycine max
tagctcgtgatccatgacgaccgttctaatcatattctccaccccaatcaggggattcgaattcatgtggaattcgtttctcacaaaccgattcataagctgatactttcccaccccagagtccccaaccatcacaatgtcgaacatgtagtcgataccctcatcagcatcaccctgccactgaaccattcttcaacaaacaaaacaaccctttggaaaaatgcactcaacaaggccaaccctgcataaaaacgaaaccttttcatgtgcacacgctttgtttgtgtgctccaactccaaggaaggttgtttatacgaaagagaaaaggcgtggttggctctggtaaaatggcatttgggtaacacaaaaggcatgacatcagcctactttca

SEQ ID NO: 189358 - DNA, 418 bp, Glycine max
  unsure (1)..(418): unsure at all n locations
acctcagagtcacctgcggcatgcaaactacnaaaagccgtgatgtgtaannattgtaagaccaaaccatcggagacattgataaagtatagaagtatacactcaatgaagacaatggtgnggctgatattgaaccaattcagtcgcctattcataatttgaatactgaatgtcataatgatgttggtgtccaacaacctgcagatgaggtagatgttcctgctgctgatgatgaagaagagcatgaaatgtcacaagatgaaaattttggtgatgctatccaaccacctcaagttcaacttatgagggtcaacagggagagacnaccttctacgaggtattctactaatgagtatgtgatcctaacatatcatggggaacctaattgcctttaaaaagccatgaaaagtgaagaaat

SEQ ID NO: 189359 - DNA, 341 bp, Glycine max
  unsure (1)..(341): unsure at all n locations
acaagaactctaaatttccatcgtcgcagtaaactcagaacctatcgcctccacagtccacgctagcgccgagtgggtatgggactacacagcctccacaactcgaacaagcactaaaggtcgatgcattgaccactagaccaagaccacgtcctagaaagagtacaaaggctctcatccttgtctgaatatggaactacctacgaagattcatctctgatcgcgaatgtaacgatcaatgcacaagcatgcgacctattcatactaccaaaagacacatttctctcttgggctcaacagcacttatgacccanatcaaacactcatacaaacggactctc

SEQ ID NO: 189360 - DNA, 349 bp, Glycine max
agcttcaacatcagaccactttctggtgttggaactacttcacatggacttgatggggcctatgcaagttgaaagccttggaggaaagaggtatgcctatgttgctgtggatgatttctccaaatttacctgggtcaactttatcagagagaaatcagacacctttgaagtattcaaggagttgagtctaagacttcaaagagaaaaagactgtgtcatcaagagaatcacgagtgaccatggcagagagtttgaaaacagcaagtttactgaattctgcacatctgaaggcatcactcatgagttctctgcagccattacaccacaacataatggtatagttgaaaag

SEQ ID NO: 189361 - DNA, 451 bp, Glycine max
  unsure (1)..(451): unsure at all n locations
tgaagaggaagccgtcctgagagctcgagatgtattttgtttgtgattgtgaggtcctagaggtggaggagacatccccactacttgtatttttgaaatctttcatctttcttttctctttgttgtaaaggaagcttcccagttatggaaagctaaatcctctgttggatcttccttgtaggtacttgatgtaaatacctgtatatttatttaatgatgttttgtgtgttcactgtgctatcagaacttcattctaccatgcttttgccttgatcacgtagatgcatgtgtttttaggatcattcaacagtggaaagtggtctgattcttagaacttcataggatagggctagtttgttgtactatcatgagggatcggngtacgataacctagttgttgtatgtttgtcttaatgcgcgcctggccaagtttagtctaacaagaggaatc

SEQ ID NO: 189362 - DNA, 373 bp, Glycine max
  unsure (1)..(373): unsure at all n locations
atcttttcaaagtaatataatgtaattaaacattttggttcttggctttctatctattntataaattagcttctatctttttgaaatgtaaacaataatttctatctttgcataaatgttgtaaaataatctttgtcattaaatttgaaagtaacaccattaataagatgttttgttgacaattttagaagtttttaacgatggattcgcttgatcaaagcttctaacaatggttcgtttctcttacatttctctcgcaggctttcttcttccttgccgtgacttgcttcaacctctatgctgtgactgtcactgctatagcaacaaacctcatgcgtgttgctataagtaccattacctatttctccattct

SEQ ID NO: 189363 - DNA, 454 bp, Glycine max
  unsure (1)..(454): unsure at all n locations
ctaagcttcaacagaagttccatttatatgcaggatgactggttcnatttttatgcataataaaaaaacataccttcatttgtttgcatatttgcacaaatttataatacacactacacagaccgaaagagagatcataacccaaagtccttcccaaggcccaaggggaaaaccaaaaaaattaaattgcttttttcttttcttttgaagagggcaatgagattctacacttacgctttaacctattaatctagcatattaaattaaaagtaaaccacatagtccaattaattactcatcaaaacagtaccatattgtgaaaattaaagcgggggatgatacgtttaataatcatgacttgagagcaagtggacaaaattaacaattaacatgtctggaaagtaaatccaaaaatggatatgggttcttatcaattaggaatgaactatattat

SEQ ID NO: 189364 - DNA, 419 bp, Glycine max
  unsure (1)..(419): unsure at all n locations
agctngtaacgtggctatgctaacaaagatttatgtgttttctaggattcacagcttaggatctacgagaacattcattcccctaaattaataacaaaccacaacttagacatgtttacaacaccaaccttattactatgctactcttttcagcacaactattttctttgatgatggcttaccccaactgttattcttttaaagtattttttcttttacatttatactgagttggagtaaaaccatatttagtgactcaatttaacttgcgttggttattcattntcctgcaaaagaaaatcacccaaaaacattgccccaaatttgggacaaatttgtctggatccatgagtactctcctacaacctaagaaagggtaggtagtaaatattgcatttttgggtgtgagttccaatgac

SEQ ID NO: 189365 - DNA, 192 bp, Glycine max
  unsure (1)..(192): unsure at all n locations
tgtcggtctcggatcttctatatcaatgtagacatcggcttcnataatatcaatgatagnggaatgaagaatgaggaaaggtaaaaatgatcaaagttgcaaaatgtacacacaagacctctatttatagcctaagtgtcacacaaaatgggggggggggggggggggcttaacactttaccctttccatcc

SEQ ID NO: 189366 - DNA, 438 bp, Glycine max
acctgccgcatagcaagcttgcggagaccatgcataaaggcaatcaactctgtcttgttgctggcggacacactcacagtgtccttagccaagataaaaacaatgaataaataaaacatttgtgaaagaatatatcagaaataaaagaaatgtgattgatgttaaactgaacaaaataattaatttgtaacaaattaaatatacttattagatataaatagtgaaacagcacggggagaacgtaacatttatgctcgttgctcaacgtaattgaggtacgttttcaaaaaatgtggctaaattataaaagtaattgaaaggggagcacgtaatatatttatgctcattactcattacttttaattaacattaaaaattatatgattgagttcattatatgtttcacacttttttgttttttacacaacgtgttgacac

SEQ ID NO: 189367 - DNA, 448 bp, Glycine max
taccctactaatccaatggaattttttctgtgcctatctattctatatgtttccaaaatatacaccatcattgccaacttagtaaaagaaagaaaaaaagacactcaaatcgccctgaaccaaaaatacataataaaaggaacaatgtaccaacatgaagagccaaaatacaaggtttgttttttttggtagaaagtttttttatgggaacaacacctattctaagatcaagataagccaaatgactcagcaaagtcttatattatagtacttacaagttacaaattacctctcaatgcaagacaaccaaaaaggatgaacccaagaccatgtagtggactgtgggcattgttcaatatcaacattataatcggaatatagctcaaaatatcatacaaaaaaatgatccctgcttaaactgataccatgtgattgtgacacaattaca

SEQ ID NO: 189368 - DNA, 426 bp, Glycine max
agcttatccttaaacaagtattagcaacatcacccttacttgttaatcttcttctcaccatgacattggtgggagtatccaccgggattgttgatggctaatctccaccgaaaacattggatggtcatctatagtggaattttcccttcaaccacggttggtccatccacaaagctatacactcaagaccttgcttactctgaccaacgacatgttagtaatacttgtttaatctaatattatgtgtacttaccaaggacgatgaaagttatccttgaaagcatgctttctgcaaacaatataattcttgagtaagagattaattctaaatctaagaattggagttcaaaattagaaccatacgatcttttcatgtagaagaacagtatatgctttgcagtttaagcaagaaacaagaggataatg

SEQ ID NO: 189369 - DNA, 388 bp, Glycine max
acagagtggaggcagaaaactctgcacaaaactcattcaaattccacagctttccctactcacataccccagtaacattctcttctctacgattcgctaaccattggattgccttgaaaattttgctggaggttcctagtacataaatatacattttgaccgttgggatctgctaaaaaatgcctggaacacgagatgtactacccttcccgtgactagcaatgcacaaccatttctctgcacatttggtaaaaatctgttgacaattaacaacatttttctgataatatggcagatttcgaaatccaacttgcccacatccaattttactcaaattggatcctacaagtcctaaatcatgtataaatcatatttatatcaaaaacaa

SEQ ID NO: 189370 - DNA, 474 bp, Glycine max
gaccttaagcaccgcggctgcagctctattaagctgaaccttatatctatatttattttgagatttattcagaacattagagtttatctcttttatcttagtgagagtgattctcctaaattcttgagtgatacacgaacaccctggctgtatcaaaggactttcacaacctttgtgtgttgcccttgcaggaaagagtgattgtttccttcctttcatcttcacccttgttatttgaaaccacaattacagaaaatccacctctgcccagaattatctcgtggccataactcctgtgttacgcactcaaattaagtgattcttgagcctaaattgaatttcaaaacaagaccttttcacctcgttttagaatcacctcatttggagccctgtaacttcagttattgccatgtctatatttctggtcagccaccacttaacctacgttttaccatcccactcatccactttatg

SEQ ID NO: 189371 - DNA, 461 bp, Glycine max
  unsure (1)..(461): unsure at all n locations
acaacggatgccctccagatatgccaatggtcttaatantttcacacagatgtccgattcaggcgcataatatatcgagacgctcgaaattgaacaacggaaccagtcgagaaattcaaatggtcataacttttcgctagaatgtacgattctgggacataatatattgagacgcttgaaattgaacaacggatgcgctcgagaaattccaatggtcataacttttcacatggatgtccgattaaggtgcataatatatcgagacgctcgaaatttaacaacagaagctctcgagaaattcaaatggtcataagttntcacatggatgtccgattcgggcgcatgatatattgagacgctcganattgaacaaagaaagctctcgataaatntaaatggtcataacttttcacacgaatgtccgattcaaggacttaatatatcgagacgctcaaaattga

SEQ ID NO: 189372 - DNA, 443 bp, Glycine max
  unsure (1)..(443): unsure at all n locations
agcttgactcatnntattaacatgctcatctttaaactcaagagtctaactcatctggtccacaaaccaagttcaacaagtcacttgtcaaattaagtctcaaattatgttcaagttggttcggttcatttctagtcctaacatgatcatgatttacttcattgacttgaattgcttacataatttctacttgtcagttgtcaaatcaagtatcaaattatgttcaagttggctcggttcatttcgagccctaacatgatcatgatttacttcattgacctgaattgtttacataattgctacttctttttcaaggtatatgaatcctagccggctctaccctatcaaaaattctnaaagaaaaagaaaaatgaggaanatgtatgtaacaaatatacattcgccatgaagattgacataagagaatgtgattttagtttata

SEQ ID NO: 189373 - DNA, 466 bp, Glycine max
  unsure (1)..(466): unsure at all n locations
tgaactntntagttggtttactcttgcgttcaccatcagttttattatatagttctccaaatactctttcagattaaggattttagaacataaaattttgtggtgctttcaaaaatgcaaatccagaattatttggaaaaacatttacatattgcttaatccatgattataaaaattaatttcaaattttcattttcagaattatgctaacataattccatattacattttctaaaaaacagcatgcattccagacaatccataaatatgttatcataattttggaaatgcttatctgtaggataaaaaattgtaaatcttatgttcgtgcagcacaaaaatgctgaaggtcccagagcacctggtagagggtcacaatgccaaagacaattccatacatgccttctttnttgtgtttcacaacaccaaagttgtcgacacctctgatagatctagtggtgtatga

SEQ ID NO: 189374 - DNA, 420 bp, Glycine max
agcttgtcatcaatgaagcccttatgctctggtccgaaacctccttctccgagaaagttactcgaagagaaaccctgcgttatgatcttgagctcagcgagtgaaaacacatgcaggttagaccccactagagaaacggagagatcctccgaaagcgttgagccaggaaaactcaagtccgttatagagaccctgttggaagaagaaccacccttcgtagccaccactttggttggctttggagaaggagacacagattcaccctcataacaactagagaagcttgatcccatgtcaattatccttgtggtgtgaattaacaagaatcaaataagtcctatgctataaaaatatttatgtttctctatgaagagagttatgcttgatgaacgtttataagttgatgggaaaaggagagag

SEQ ID NO: 189375 - DNA, 455 bp, Glycine max
gctgctctgcgactcgagagagatgaatattcgattttttgagcttcttctcagaggctctcccactgagattcggataaaagactgttcttggctgacggaggaacagtttgccaaatctttccaaacgtgtgacactacaagattggacgtgtgtttgttgtcaaatcaatttggtacctgtttagtgtttcatacacgacacatgatacttctattactatgacatgacagatttatattttgctgttgaatgttgaattccattgagcatcacagtgcagggcacgttatgtttttcgttatgaatagctaacttctttcgggttttattttaaaaaatcttgtcaatctgacttcatgttatgtgtttacttgctaagtacgtgctgcagcttgaccactgtggaaggtgtatacctgattatgcattactttgtactctgagacagtca

SEQ ID NO: 189376 - DNA, 452 bp, Glycine max
agcttcaatgccctctccagcctgtattttatcatgctcacgcgcatgccaatgttactatcattgacgataatggcacgggcttggggttgcgagtgaatatgtttgaggcatcgcacagtaaagcatggaacaaacagaatggtggaggtggcacagagagttgcaacatctcaaaaggaggcttttgtgtgtgtctattaatgtgggagagaaataacataacggaaagtttgtgaagaatgaatgggatatgagttcaacactctattttcctattctagattggtaatataatacaagcatcgtattttgaaataactatttacgaatatgattgtttgattatacaatacctattataggataggtcttccaattatttatcctattatggaatagtcatttctaaatacttattctagaatatgataacgaatcgatagaccttt

SEQ ID NO: 189377 - DNA, 462 bp, Glycine max
  unsure (1)..(462): unsure at all n locations
taattatgcaggcaccttcagcaatagctataccgnctaacattactgtatggcgangcacnccnctnctttggctttctatatttttttttgcttctaaatagtatgttggatggattaaattctcacgacatttaaaattaatgcatggtggcgattatctatggcggcataaattactaaacatgtaatggaaatctaactagatatggtatttaacaagtgaaaaattactacagtaagaaaaaattaatagcagctaatgggcctgagtagctcaaattttgttcaaactttgttagaattaagtcacggtcattcaccacactctaaaattatggacaatgaaaaacaacaagaagaccccaagcgaggaagctgatgacgccattatatatttgaagcgacatgccactacatagcccacaatatatgccttatgctcacgaattaacctaatat

SEQ ID NO: 189378 - DNA, 434 bp, Glycine max
agcttgtatgtgtaacctgaaaagatattgcttgagggtgggtaatgtacagcaagccatttaatggaagaaatgcctaccttgaagaactcaacatttaccacttccaatttctgcataagccttgcatatttatccatagaccttacattttaagacatacagtatctcattaaatccagtaataataatactgataaaagctatatggtggaaggtaattagttctccaaatccataatgtaaagcaactcactttaaaagacaaagagaagatccagtttgagttgtattctcttcgtcatttccatgtgaagagagagttcttgaatgatggggttgaaaacttccacttaggagttgactggctctatcaataaagccagcaagaagatcctcattttcatcttctgaaacagaatcggctccattca

SEQ ID NO: 189379 - DNA, 475 bp, Glycine max
  unsure (1)..(475): unsure at all n locations
acactatcaatactaagctntataggctngagtttatcttgatacataattactaatttttaactntnttntttgttacaagctaatttttaaggcatatgctaccatgctcaatggtatagtacaatgctaagttacaattgtaatgacaaagaaaagttgccttgatttttctttgtttgagaatttgttttcttctaatggagttgtgtatgatctaactgtgaggtcaaatatatgtttacactgtttgcttaaatttgtttgacttatttaaagaatgggactccgcatggcgtcagcaacaatgggcacgattgtgaattgggactccgcaacttcgcaccgacacagtgttttttatgcacgcgacgcgattgttgggcgcttgaaaacacanatactcgaactccaatattagtttttcaatcattataaattataatctagaagtcaatatatattctgtaatcta

SEQ ID NO: 189380 - DNA, 437 bp, Glycine max
  unsure (1)..(437): unsure at all n locations
agcttgctctanatttacattgatgtttgtatttatgggaggaggttgtatgccatttttgttttaagagtagtgtcccactggtaaaactaactttccaaatttttgccttcgcaggaaatggccccgaggaagcttgcctcaaagaggtccaggaaggacaaggcagccgaaggagctagttccgctctggagtatgacagtcaccgctttaggagcgctgtacaccagcagcgcttcgaggccatcaagggatggtcgtttctccgggagtggcgcgtccagctcanggacgacgagtatactgatttctangaggaaatagggcgccggcggtgggcatcactggttactcccatggccaagtttgatccagaaatagtccttgagttttatgccaatgcttggccaacagaggagggcgtgcgtgacatgag

SEQ ID NO: 189381 - DNA, 457 bp, Glycine max
  unsure (1)..(457): unsure at all n locations
nngcttctacagtgggtgctaataccttccttgttcttttaaactcccgtaccctctnttttcaaaattcgtagacctcttttggttgtttttctaactttttcctcaaataaacgttggtggctactcccactcattttatccttaggagacaaacatgcttttatttattttctttcgccgtcccgtcgtaaggtaggttgcgaaagatggcgactccattggggagttgttagagagttaagtcatttgatcgagtgtgcaattttatcgcgaccttttatttatttattttccctttctctttaatccctgcgttgtgctcatgtttgttgaagtttcattccgttatcattcgtttttcaatttaacttcaaactccgttcctttaattcgttgtttgctcatgtctgtatataacctttactacattgntacttcttggcggtatctttta

SEQ ID NO: 189382 - DNA, 450 bp, Glycine max
  unsure (1)..(450): unsure at all n locations
ctgcaagcttgcacataatttagtacttggcaaaaaaaattcatcaaccataatagtgcagcaattgattctgaaattccttgtatttgtaaacagaaacaataaaagatgtcatatgttaactaagcacactcaatagtcaaagaaaacaggaaaagatacagaatatagtacaaaatgtgaatatatctttccttctctcaacccttccctgattttcttttaaattagggcttgaatccattatctacaaagggaaatagcagtttcactacatgtctaatttaaggggtagaaaatcttcaccatacagaaacagcttaacaggtaccagctaacttaggtgttgtcatgtgtgaatgtgttcaagaggcattcaactggacatgcccaaattgctgccctctctccttgtataaaccagtttacatgatggagaanattaaaata

SEQ ID NO: 189383 - DNA, 473 bp, Glycine max
  unsure (1)..(473): unsure at all n locations
tcaggctgttcaattgctntagattgttgcacagaaagataaatgtctgtgtggtggtcggcagaggagcataaaccacagagtctggcgacaggtgcagattttttattcatggccagttgggttaccaggttaaccaaggcatctagtttaccttcaagcttcttagtctcagctgatgaagatgaattcgtggctacttcatgcactcctctaatgacaataacatcacttctgacactaaattgctgggagtttgaagccatcttcgcaattaaatttatggcttcagcaggggtcatgtctccaagggctccaccactagcagcatctatcatacttctctccatgttactgagtccttcataaaaatattggagaagaagctgctcagaaatctggtggtgagggcaactggcacatagtttcttaaatctctcccagtattcatataagctctctccactgagttg

SEQ ID NO: 189384 - DNA, 445 bp, Glycine max
  unsure (1)..(445): unsure at all n locations
agcttgattgcttctggaggaagcttcccagctcactgcgagttgggcggcaacctcctccccctttttcctataaaaaggctaaaagggttgttctaagggtcccatatccccctggctatgcatttcagctgttttgggagaaaaaaaattgtttccgtgaagaaaatccaagtcgaggtgcttccgtaatgcttccgagatgtttccgtaagcaaatccttgaaggttttcctctgttcttcaccgttcttcgttcttcaatgggtaagtttccaaatccgagacttttaattcatttcttgttttttggctttcatctttatttcgttcactttcggtttcttttcttccgtttttaaagaattataaccaatcttttaagtcgttttctcgcctaataaatgataaaatngaattcaaccgatcatttgcgtgtaatctc

SEQ ID NO: 189385 - DNA, 466 bp, Glycine max
  unsure (1)..(466): unsure at all n locations
tctgtccctgaganactggttcccagaagacaacagggagtgattattgctgacaaccctactcttgcaacaagtcctacggaagtatacactgagatggacaagaaaatccgcagtattgtgagtagcattctgaaagatgcttctgtgcctgatgctgagaaagatgttccaacatcttccaccccagatgttcctgtgcctgatgtcaataaagatgttccaacattctccgctccaaatgctgaagccctcccttcacccagtgaagaggaatcaacagaagaagaggatcaagccttataggagacccctgcaccaagggcaccagaacctgctccaggtaacctcattgacttggaagaagtcgaatctgatgaagaacccattgtcaacaggttggcacctgtcattgcggaaagacttcataacagacagggaaaaaccccccttaagaggtctggac

SEQ ID NO: 189386 - DNA, 279 bp, Glycine max
agctttgagtagggaactctacatccatttcttgtgcggttttgtttatgacaccattttttttatatataggtgagtgatcattatttattctaaagtgtccacttgataactaatactgtctcaaatattattttacctttttattggatgcgaattcaaactccataggcatctgaaaaatcgacaaaattatggctgttgtcgcaaaacatgattcattaaacacttatcttggcggctcggtggctgtcatgagatgatggggttgtttctgag

SEQ ID NO: 189387 - DNA, 473 bp, Glycine max
  unsure (1)..(473): unsure at all n locations
tattaaatataacaaactaatttaattnttataaaaaatattctttgataatctttattccaacctaacaaaataacttacaaaaaatgtgtgatactacagaaattttgaaaaccacctaacaaaatagcttacaaaaactatgtgatcttccaaaaccacctaacaaaataacttacaaaaaaaattgatatcccagaaattatcaaacccacgaatgcaaaaatgaaagcaactgcaacagccaaaacagctgaaaaaaatggtgaaggagggctgtatttaaagaccctaaaacgtcaaccccatttgcgccatattctaccctaaaatgccaacatcatttgcgcttcctccctgctcctgctgcaaaagctgctcctggtctgccaaagctgttgtgcttgctgcaaacctaaaatgccattttgactggcgcctctagtctccatgcacaacgcgctagtgcacct

SEQ ID NO: 189388 - DNA, 436 bp, Glycine max
  unsure (1)..(436): unsure at all n locations
agcttctcccacaaagacagtatcatctgtatattgcagaatgtttactggcaccttctgctttcctactaaataactgttgtacagacctttggacagagctgtcctcatcatgccagtcaagccttcagccacaatattgaaaaggaaaggggctaaagggtccccttgcctcaaacctctagtgggggcaaattcatttgaggggctgccatttatgataatggatatagaagctgattgattgcaagcattgatccatttcctccatataggacagaaccccattctgaccatcatataatccagaaagttccatgaaacagagtcataagcctttgcaaagtccaccttanacaccaaagctggtttcttactctttttagcttcctctattgcttcattgagaatcaaagttccatgaaggatgtgtcta

SEQ ID NO: 189389 - DNA, 480 bp, Glycine max
  unsure (1)..(480): unsure at all n locations
ggacctataaaactaagcttgtagaagttagcaatataggagaagtttttggtgattgtttttacttanattctaatcatgggttaaggagttgtacaactgatggagatatattacacttagttagggatgcttttgaaaatgagaatgagataaatgtttattttcatcatgaagtagatccaattttagaagaagtcccacagatgttgtacttggaatgtgatccaattccaaaagctgttgagaatgaggatgatttagatgatgtacctgttgctggccatgaggaaggtaagttataattcatctgtacttggtccgacatggttaccatgattaatgaatatgattaatttttacttgatcaccattgatgcanatgttggtgctggtgagcatgttggtgctggagagcagagagatgctggtgagcacagggatgctgatgctggtgagcacagagatggtggtgagcat

SEQ ID NO: 189390 - DNA, 458 bp, Glycine max
  unsure (1)..(458): unsure at all n locations
agctntctttggaccttgaacaagcaatcaactcctctttcagaaccatgctatgtgctcgcgactggtccctttcttcccttcgcaacttgagttcattattgctaccccatagagctccgcgaaatttgttccggccatactcttccttgcgagccctcttggtctctcgttcaagggctcttgcggtaattgcattctcttcccgtaacccggcacactccttccgaacgtgtgtggcagccaacttgaacttctccttggcgagttttgcctttcctaactcgcttttgagagcttggacttcttcgtcctctttcggtgcttcaaaattctcttcgctgacgacttttaacttggcgagccaatctaaacctcgtatgcgaactttcagccattcgtggtacccaccaatgatgccattacgaatgcctctaagctcttgatctttccttaac

SEQ ID NO: 189391 - DNA, 463 bp, Glycine max
gagggtgcgtagcccaccatctcttcatagtagagtacctattatgtgtctaccatcacgattatcgtctcactttttgcacatgttctgtagttgcatcctatccggaaccatatcagaatagtactgatactgcctaacaaaggcaaccattaggtccttcccagtatggactcgggaaggttccaagttagtgtaccaggtaacagctaccctagtaagactttcttggaagaaatgtattagcagttcctcatctttgcgtatgcccttatcttccgacaatacatctttggatggttcttggggcaagtagtccccttgtacttgtcaaagtccagcaccttgaacttgggaggggtgatgatattgtgtactaggaacaactcttctaggttaggaaaggcataatctttacctccttcaatggccctgagcctttcctctatcccatttctgccat

SEQ ID NO: 189392 - DNA, 423 bp, Glycine max
tgcaagcttgtcagttataataataccttgttgttatcatctagacaaacaatataccataataacaagggtttctttccaaacatcagtcacttggaggatatttctagcgcaatcaaatagggtcaaaagtcacaacaacaattatctctctaccaaaacatcaagataaaacaataggataatgcataataattttaagataaaagcttctcataaactacatacttaagtcaagagtggatcccgtcatgcagtatgtagtaaattccaattaacactaggtggatttattaaacatcatcatacattctgtttaaaagccacctaagtactttcttccagaagttgagtcttcacagttggcaatcctactgcgacataaaagacaaaacgatgcctcataatgacatatctattaat

SEQ ID NO: 189393 - DNA, 463 bp, Glycine max
  unsure (1)..(463): unsure at all n locations
nctataccacctcattactctacacgcaaggcaacatcttatattctaagngcacggtaatcaatacaagaaaatatagtgaaggggacaaaatcaagcataaaccataaccaaatataagcgaaacataaataagttataaccaaaataattaaagcattcggaagtgaaagatataatccaaacagtcataattgaaaaaccacataaaatccaatcataaaagactaaagtctaaataccaaaagataactaaagtgcacaaaatgatagcctaaagatcatagccaaatgcacagctcataagaacagggaattataaactaaacactaagaaggtggcggtggtggtggaagaccgaagctgcgacgaatatatcccacatcttctccaagctgcgagagatggatatccattcctgcacagcgagtatccaaagaatcaaaacgttcaccaacataa

SEQ ID NO: 189394 - DNA, 394 bp, Glycine max
gacccggatctcatagtcactgccgctgcagcttatagccaccctattttcttttttgtcttatataaaaggcctttatgaactaagtctttataacttgtttctataaaattcagataaaaaatatgacaaaatggcttgtgagacaacaacataataaaaggtgatgttattaattaaacccttctaatactgttcttaattaagaaccatattagaatgccactcttctaagacggttcataattaagaaccgtcttagaatgtatcattctaagacaactgtcttataaggatggtttttctaagacggatcttataaaaccgtcgttgaaagcgaagacttatcatgatgttgccttcaaagatggattctgatggcagctagcttgtg

SEQ ID NO: 189395 - DNA, 447 bp, Glycine max
  unsure (1)..(447): unsure at all n locations
agcttaccttgaattacaattgtatcctttgcactctttgtgagctgaattacattntcaaaattgaaccctaaacttgaatgaatatctctagataccttgtttagattctatgagagcagatagttcaaggcaaattaccccaaaatttgagggagttgattgggatgtaaagtataaggtaaagcatcagcacacataacaaataaattgtgttaaaaaagataagcaatcaaagaaaatgtgtgttgttgtaataaggtcaaatgtaaattaaagtgaaaggctggtgagaaagctaactgtattgaaagaaatatttggatgagtctacgacttgtgctctcttagaatctaagctttcgaatcctagataaaccacttattgttgtagccaaacctcactacaagcctatataagtccttttgattctatctatgcatttc

SEQ ID NO: 189396 - DNA, 437 bp, Glycine max
acttatccaaggcactctgatggtggcgaagcctctctttttttggctcacacactactggatgatgcctcctctaacctcttctcctttatcttccgctacaacttcatgactgataatcactattgaaggaccttattaaagctcaaagatccagcctccatagaagcttctcaagcaagcttccatcacatctcaactcatctcaaatcctatacaaggggtccgcacgagtagaaccctcaccattaacactatatgaagaaccaagactcatgttggttcttaagctgcggtcctttcttgttgggggtctgaaaacaaaaggtaaaagaaactacggttgaaactaccccaaatacacactataagaggtgtgacagataacgctaaaactaattggtcaaaagcacttatctaagtggtttacaatggaa

SEQ ID NO: 189397 - DNA, 407 bp, Glycine max
  unsure (1)..(407): unsure at all n locations
agctngagatgaggaattgttgtttggtttaacttcctgcttttattgttgaccacagagtggtacctgaagatatgtcgcgggggtcaggagaccttggggacgtcaggtggggtgctattgcccaaaaccaagcttgaccaatcccgacccaacccgggcatagtcggtcagtgagaacctgtgatgtacctaagcaggcgagctcctggcagtcaacagataaaaggaacaaagaccacaaagcacggaggcttgtggtggctggccagctgtgaactttgattgatatgtgggttatggcctctggtaatcgattaccaatggtgggtaatcgattacaatgcttaaacatgaagacaggnggctaacatggtctctggtaatcgattaccacgggatgtaat

SEQ ID NO: 189398 - DNA, 400 bp, Glycine max
  unsure (1)..(400): unsure at all n locations
gtatacacgcaaatcgagactctcataaaggtcctttctctatctcgggntgctaactccacaccttcataccttgtgataggtgtggatgcgcccatgcttcacgagaataaataatggaacgcgagctggctcaagccacggatgagctcaaatatgcaggacgtatgtgctggatcaagcggcctcacaataactaagaacgaggggttgaattaactactcccaaaccctcactaattaaaaatttactcttctaacgcttatactacgctgctaagtaaacgaacacaacaaaagaaacttatccaaaactcaaagcgagaatctcagcgctcaacgcacattacaagagtacacaacaaggagactaacacacacgaagttttatactgggtcg

SEQ ID NO: 189399 - DNA, 414 bp, Glycine max
  unsure (1)..(414): unsure at all n locations
agcttgaaggcaaactgtatgcattggttaactnggtaacccagctggccttgaatcagaaatttgtacctgttgcaagggtttgtggtttgtgctcctctgctgaccaccatacagacctttgcccttacatgcagcaacctggagcaattgagcaacctgaagcttatgctgcaaatatttacaatagacctcctcaacctgaacagcaaaatcaaccacagcagaacaattatgacctctccagcaacagatacaaccctggatggaggaatcaccctaacctcagatggttcagccctcagcaacaacagcagcctgctccttacttccaaaatgttgctggcccaagcataccatacattcctccaccaatccaacaacaacaacaaccccatagacagccaatagttg

SEQ ID NO: 189400 - DNA, 479 bp, Glycine max
tacggaccttaaaactcagctgcttgggagcttctatggggctggtctttgtctttttgaggtcctttaatggtggttttccaccatggagatgcagcggaagacaaaagagaagaggtgagaggaggcgccatccattaaggaataagccatggaagaaggagcttcaccaccaagatgagccttggataagaagcttggagaggatacttcaatggaggaaaagaaagagggagagaaagagagagggggggagcacgaaattgaaagaagaaaaagggagagaagttgaactttgagttgtgtctcacaagactctcattcatcaaagttacaacaagtgttacacatgcttctatttatagactaggtagcttccttgagaagctttcttgaaaaaacttccttgagaagcttctttgagaaaacttccttgagaagctagagcttagttacactcacccctctcataactaagc

SEQ ID NO: 189401 - DNA, 437 bp, Glycine max
  unsure (1)..(437): unsure at all n locations
agcttgtcccgcaagtctctccaacatcttgtccatgaaaggcaaaggaaaatgatctttccttgtggcttcattgagcttgcggtaattgacgcatattctccaaccagtgatagtcttcgttgggattaggtcattcttgtcattccgaatgattgccataccccctttatttggtaccacctggactaggcttacctaagcactgttggaaatggggtagataagcccaacctctagaagcttgagcacctctttcctcacctcttccttcattgatgggttaagccttctctggggctgcctgactggtctatagtcttcttccatcattatcttgtgtatacagtangcagggttgattcctttaagatctgatatgtgccatccaattgcttccctatgtctctngaggacctcttccaacatgttctctt

SEQ ID NO: 189402 - DNA, 463 bp, Glycine max
tctgtagggcttcattgcagcgctcagtacctatctatcttaataagagtatgaaacattgtgaagaaaaaagctctgaatggataccatataataagcaactagtttgcttaccatttctgcaagattctgatgtcattataacatcagctccaaattgtcgacagcaatcagcaatcttttcatcatcagttgccacaactagaaccagagaaaattaccagtcagaaatcaaagaagctagctagatgtgcacatgctcgtacacatctaccaaattgtaaaactgtttattacttgattttcttgaatttgaagcaccagatgacatgtatgcagagttcactaaaatctccctatattacaatccatccaaatcatgatgttcttgagttagtttacctagaaattcagaaaggaaagcaatgcacaattggcagatcttcaaaagaccaacaagacg

SEQ ID NO: 189403 - DNA, 448 bp, Glycine max
  unsure (1)..(448): unsure at all n locations
agcttatcttcctccattgatatagnttctatgatctccactcattngagtagnttcttctaaagaattatcaccttcaacttcacatatcttttcaagttcattatgatctttaggaaatttttgaaatattttcttaaagacttgtaagattgtgaaagaatgggagagtttgaaagaatttcatgataagcttgttttaaagactcaaggttgtcaaaatctacctctttgtcttgtttttgattttgactcttctgatgttatgttatttattagacacaaatttgattactccttatcctcttcatctgaggtggagtcatccaagtcttattaagtgctcatcaatcctttcttgctctttgactagaagtgtttaggctctntgcactcataatagatgactagaatcttctcattatcccttctttccttgaaaacattt

SEQ ID NO: 189404 - DNA, 459 bp, Glycine max
  unsure (1)..(459): unsure at all n locations
aatggtaaaataccacctcaagctgatattattattgtggcaaagtgtttcttttgcaagaggaagggacacatgaaaaagaattgccccgggttccagaaatggcttgagaagaaaggtaaatcaatctcattagtatgttatgaatctaatatggttagtgttaatattaacacctggtggattgattctggatctactattcatattgcaaattctttacagggtatgcaaaacctaaggaaaccagtgggaagtgagcaaagcattttatcaggcaataagctaggctcacatgtggaggccattggaacttgcattttgactttaagtagtggctttattttaaaattagaaaggactttntatgtaccaagttttttccgaaactcgatttctatttcaaggcttgtaccgtttagatattcctttaatctcaaagacacatcatntgagtta

SEQ ID NO: 189405 - DNA, 445 bp, Glycine max
  unsure (1)..(445): unsure at all n locations
agcttatccttatggctngcctccggatcttatttcccgtgccaccccggaagatataagccaagcccctactttcgaggggcaactcccaccttatgaagactatcccgggcaagacaatgaggaaggagatacccatcttagccccctgctccacctcaaagatccgtccccccatgaactaccccaaccaaacatagtccgccatatcccgacttcacccacacccgtaaaagaatctgttcccttcgtggaagataagggaaagattgaggtgcttgaagagaggttgagagcagtcgagggcctcggcaattacccattctcggatttagcggatttatgtctcgttcccaacatcgtcatccctcccaagttcaaagtaccggactgtgataagtacaaagggacgacatgtccgaaggggcatcttctgatgtattta

SEQ ID NO: 189406 - DNA, 452 bp, Glycine max
  unsure (1)..(452): unsure at all n locations
agcttgtagaatggctagacatgatacatttttggtttggtttggttcaaggataaaagggatgccccacattatttccatgacacaaatgcaaaaatgatgatttggaaactttacgcaaaactggtcatgcatgcacctatgcggacactcaagtgtcaaatttttatggtcatgtgatgctagggctcaggattcgtttcctctattttaatcaacccaatgtttccaaaatatgttcttttatcaatttgtgcattcatccgagtccatttcgggcgtccggngaaatttcacagcattcacccttcaggtgtagacacattttccaaaaattggttatgatcaatgaactctctcaaagaaaagttggaaatcgtctcttttcaaaagcatgttggttnttcagcttaacaacttaatttttcttttgtttctacctctttccttac

SEQ ID NO: 189407 - DNA, 452 bp, Glycine max
  unsure (1)..(452): unsure at all n locations
tactcaagctgagagaggaatgtngaacggcgaaacttcctgctcttattttgaccacatagnggcacctgcagatatgtcaccgcggtcatgagaccttggcgacgccaagtggggtgctattgcccaaaaccaagctcgaccaatcccgactcaccccgagcatagtcggtcagtgagaacctgtgatgtacctaaacaggcgagctcctgtctttcaacagatgaaaggaaccaagaccacataccaaggaggtctgcggtggctggccacccctaaactagatcgatatgtgagatatggtctctggtaatcgatttccaatggtgggtcatcgattacaacgcttacaaatgaatataggaggcttatatggtctctggctatcgattaccaccgggtgtaatccattaccaggcttgaaaacgaaggcaggaaggcacgagggctc

SEQ ID NO: 189408 - DNA, 450 bp, Glycine max
agcttgatactttcttaaagctacgcagtgttattttgagtgtgttcagagtctgatataaactaattgcatatagcattcagtttaagggaggatttgttagtgagcttatggttccatatttttaggagcagttatgttttagaatatgtctagcacattattaggaaatagtgggtcatgtatgcgtgagaagttttatttttcagatttctttattctgatgtaaggctatatattacccaggtttgcttttcaataactgtgaatgaattccttcctttacattttatcttttacgtaagttctgtgagactccaacatagcaacacaaacaaaatacctcactccccacatgactgttacaagcttttcaacttctctagttggttgcaaaataacccagtcatttgtctttaatcttacaacgggaaactgtagtgaatatgg

SEQ ID NO: 189409 - DNA, 470 bp, Glycine max
  unsure (1)..(470): unsure at all n locations
ttatgaaanacattngtacatgtgatgatgatcactataatgtctatcaacgaatgtcgtgatcacaatgcatacaggaaaacaaaaagtgcctacaaattacattgaacattgaagattacacatctttaactaataattgttaagcaacaacttcatgaccattgacgcagggtctaagatccaatggcttcatttccctaaaacaatattcaaccaatcaaaatgatatagaataccactcactacctctacaccaaacaagtacgcgacatggaatgaagacatgctaattcacagatagattttcctcagttcatattcatctcattacaactagaagttacaacatcctagcattaagttaattacctcttctccttagagtgagggtgtatggatagaaacttctccggcgcagtcagcatagtctaaaaacaaagcagcaatctaagaaacaactcaatcac

SEQ ID NO: 189410 - DNA, 424 bp, Glycine max
  unsure (1)..(424): unsure at all n locations
agcttcgnatggtccctgttattnttgccctttttttctcaatcaatttatctaggtgccttttttttattcgattaaacgtttgagctaccttagggtatattaatctgcgtttagctgttgatttcgatttcgggtttggatattgctaattacaatgctgtctaattcagctgaaatggtttattgatgatgccgttcgtntgcatgcgaatttgaattctcanactggattgcgattggcagcaaaaccgtatttttgtttgattccgcagtgtgatttcagatncacaatgggtaaataatacagctatctgcagcaggtttgtaaaaccgatctcttctggtgaccactgcgtgtctgtggaggacaatctaatccactctaaataaggagcattcatactgcgatcagtaattaaag

SEQ ID NO: 189411 - DNA, 455 bp, Glycine max
  unsure (1)..(455): unsure at all n locations
nttggggccttgatatattaatgtagcgtgcttattatttatatttgataaatatgatagaaattacgtctaaattaatatcaaacttaacattgccgattcattttaaatgtttaccaaacaagcacataatcgtcaaacatctgtgtacaaaatatataaaatttagtttgcatattttttctctattataaaatttgacaaaaattaaaaaacaacgaaactacaaatggtaccgagtacgttaaccatataaaaatattgcatgattgtataattgtgttccagaagtgacaatctaatgtctcttatttcataatttgatcaattcacattgaaatatatgtctaaatcaaatttaattacaaatcttccttttcaaacaaaatttagtgctaaccaaattaacaatcgcctgaacattaaaacttaatgaatatatggtctagtctttc

SEQ ID NO: 189412 - DNA, 422 bp, Glycine max
  unsure (1)..(422): unsure at all n locations
agcttttnaggatttgagcttggcctatttaataattagactcntcaaaaagcttgagctgtcggtttatagtaaataagtcaaccccaccccatccttacatatgtcgagctgaaggccctctacaagctgctcgactcattttcacccctaattacgagcatcagtctttcaaatgattaagtataacttgtaaaaaaaaaggtgcataacaaaagccatgtgtgacaaacctggcaaataaattttgtcattcctacacccattctttttgataatgtccacaattgcttcctgatagctgcaaaattaatcattgccaacatttaatttgttggtcatagaatgcacatccataactctaattacatatataaatcttaatgatagcactagtatttggtagagcaattaaatacact

SEQ ID NO: 189413 - DNA, 437 bp, Glycine max
  unsure (1)..(437): unsure at all n locations
agctttagcttctcaggaagcttctcttgaggtgagcttagntnttagatgggtgtgtgtagctaagctctagcttctcaaggaagttttctcaaagaagcttctcaaggaagttttctcaagaaagcttctcaacgaagctacctagtctataaatagaagcatgtgtaacacttgttgtaactctaatgaataagagtcttgtgagacacaactcaaagatcaacttctctccctttttcttccttcaatttcgggctcccccctctctctttgactccctctgtcttttcctccaatgaagcattctctcccagcttcttatccaaggctcatcttggtggtaaagctccttcttccatggcttattcccctagtggatggcgcctcctctcacctcttctcctttgtcttacgctgcatctacatgctagaaa

SEQ ID NO: 189414 - DNA, 462 bp, Glycine max
  unsure (1)..(462): unsure at all n locations
tcccgtatccgtacttggaaggatctgattaccgccttcctattgtcttatcagtacaattctgatatggctcctgaccgtactcaactgcagaatatgttcaaaaaagagggtgaaacctttaaagaatatgcgcagcgatggagggatttggcggcacaagtagctcctcccatggttgagagagagatgatcaccatgatggtggacactctgccagtgttctactatgagaagctagtaggttacatgccgtccagctntgcggatctggtgtttgccggggaaagaatcgaggttggattgaaaagaggaaagtttgattacgtttcctccacaaacgcgaatgccaaaagaatcggggcaacaggggcaaaaaggaaggagggagatgcccatgccgtctcttcaacacctgcgtgggtcaaaacccagcaaacacctcatggtacccatcagtac

SEQ ID NO: 189415 - DNA, 357 bp, Glycine max
  unsure (1)..(357): unsure at all n locations
agctttgtaaccngcagagcgttttattatatatgtatagcacaacatggggaatgcgattaacaatatttagcggagtaagcaccataaagactggcacaactgaaggttcattatgggatagtagagcccatctctttcactttaccaacgagtcctctgtgaaagtaaacacagctgaacacattacagttttggctaagcataaataaactaatcagaaagaagctaggacgcaatatgaacgaatataaagatacctacgaatactcaccagctgtgatacgacagcagctatnttcgcacctangcacaatgactatatgccatctaaaccttgcactgcctttgtaaagc

SEQ ID NO: 189416 - DNA, 188 bp, Glycine max
  unsure (1)..(188): unsure at all n locations
acacaaaaaacacccgagctccgccacaaaatgagagacagagaacttccnacaccggccagcagatcgaagggatgcccaaacgcgccgaaaggaccagcngactcgcacgacacgcgccacccacccaaaatatagacggaccggaaaacccgcaacaccctgcgggataaggaacacaatgccaa

SEQ ID NO: 189417 - DNA, 437 bp, Glycine max
  unsure (1)..(437): unsure at all n locations
agctntngaccttaattntagaagtttttaacattattgcattattttctcatttgttgtattaagttatttatactagccgtgtcttttacctatccatgagcatgaaagacgagattntgcggaagatcagggtctgtcatgattgttgattctgaaagcattatatttacatgagttaatattgttgagacttgtgaaagcaaagttcttggggtggttggttggtgatcctttgagccatttatgttccttcattaatgtgtgtttgagttagagccaaagtatgtgattgtttgtttgaagtttgaagagcaagctacaattgtttgctttcttagttacttgaaaggttggttagtcattgattttttctaattattatcttcgacgttttgcaatgacttgatttcctacttctggaaagaaaaattcat

SEQ ID NO: 189418 - DNA, 364 bp, Glycine max
catcacctgcacttgcggccgaataccgggacttaacctccacatgaaacaactaagcacaaaccgcgccagaaatcctatgacgcggttggccaaagcttctaactctgaaagacacaccgtcactgatgagtgttgagataacttacacaacatactaccgcgactttcgtatgttgaatatcaaaatcgtgtgtggagcgcatgaaggaatgcgggccaccactacaacttccaactgcgagacatccaccggaaccaggctaacgtccacccttccatgtagaatgacgcgattgcgaggcgttcatgatcacgtgttgcgcgatattcaaagaattgtgagatctcgaatatccaccct

SEQ ID NO: 189419 - DNA, 403 bp, Glycine max
  unsure (1)..(403): unsure at all n locations
agcttgagtgatattgtcacagaatacacttgaggcacctcctccatttcatccaccccacttgaattctagtcgcgcattagttaaaaaggtgtatatttttacagcattgaggagaaataataatcaagggaataatcattctattttcaaaataataattgttacagctgtcatgaattactagtagttagttagagggggtaagaaaataaatatgaaagactgacagagggaggagaataataaatgtaagaagagttggcctctcaaagagctaagttaggattgatgcagctcttgctacttcatgtantttgataaagaactatccaaggaagaaaagttcgacttangtgagctcaaattggatggactaatcactagagccaggagtaaaaga

SEQ ID NO: 189420 - DNA, 432 bp, Glycine max
  unsure (1)..(432): unsure at all n locations
ggctctaaatntacattgatgtctcgatcttttcgtatgttgtcgtatgccacccaagnntgaagagtagcgtcccactggtaaaactaactctccaaatgtttgccttcgcaggaaatggccccgaggaagcttgcctcaaagaggtccaggaaggacaacgcagccgaacgaactagttcctccccggagtaccacagtcaccgctatatgagcgttgtacaccagcagcgcttcgaagccatcaagggatggtcgtttctccgggagcgacgcgtccagctcatggacgacgagtatactgatctccacgaggaaatatggcgcctgccgtgggcaccactggttactcccatggccaagtttgatccacaaataatccttgagttttacgcccatgcttggccaacacaagagggcgtgcgtgacatg

SEQ ID NO: 189421 - DNA, 371 bp, Glycine max
  unsure (1)..(371): unsure at all n locations
agctngtacaacgattgttctcagcagattcatttaatcaactcaatgggtagtcttagtggataatatgatgggagaagggaagtnttctaatgtgagagaagacaactctctatctgaaccgatgaatgtatgataatggtcagtaaactgatatactggcacgacatctgttgagttatacacattcgtatcacgcattgcgtggtgaccttttatagagtatgggaggcctttgtgacgaggaggaccataattcacaaatgcgtcttatatcttcttgaaagatggcgaccgccacgttactgaagatagcgactttaagtcaatctggagagcaaaatttccctatagcaagtgctgttctggag

SEQ ID NO: 189422 - DNA, 430 bp, Glycine max
  unsure (1)..(430): unsure at all n locations
ntaggagggaaaaganattgtccgaacattgtgttntttatcttatcacaaatacatatgtcatgatgaataataagtgaatctggttgagattttgatgacttcatctgcttgcaataaaatgaacgaattcatctttttgctcgtttcaattttaattttctcattctattttcgcatgaactaatcctgtttgttttcttcgcactatgtctcttaaaatccgtaacaacctccgcacatagttcttccactcttcaattgtaattgataaaaaaaaagttctattctaacttgaacgcttgtactaaaggagaagaattgtgtcttaacattaccagtttgatcagccaatagaaagttatccacaattttaccaagcgctttttgaatactctgaagcaacgaacttgtatttgttgtatccata

SEQ ID NO: 189423 - DNA, 445 bp, Glycine max
  unsure (1)..(445): unsure at all n locations
agcttccattaatgtatcccacaaagatgctgcaaataaggcaggccagagatgaccgcgattaaggcggctttccaacaaagaaccagtacgtttaaccccagaccagtccataacctggtgtaattaagtggaaaaaaaatagtcccataatccatagccattagccacttgcagtgatgcccaaccatgcaacccattcacatagcaagaggttntcttgaatgtggaatgcattctcaccatgccatgatgatatgggttgcatggctggcctcctgctatggagatcacacacttttatgagcctagaccaacgagcatcccacaatgccataatctcattaccccaccaaggccttgaccaacactacccacatgcaacctccagccaacatcaccattaccaatggcaaaagggccaaacttcaccatatatacatgt

SEQ ID NO: 189424 - DNA, 458 bp, Glycine max
  unsure (1)..(458): unsure at all n locations
tgaggatagagacttcccaaactatttatattctctctcttatcggctctctaactntctagctttctcactctaagaagtggattcactcttgtcttggatggttaggaatgaaggctcctacctttatttatactactccacctccacaatgaatggtggatattacttgtatcctagggtggagattaattctctagaatgctccacacattctagcagtctctacactcttctactccctttcatactcttccataaggttccacacatctccagaatattctagaggttttcacaagcttcaagagagttctacactactttagagttctacaggacgttctaganacttctacacttttctagaaagctctagaattttctagaacctctccaattaacgagggatcccaacaaatatgtatcgccaatttctggatgcacagagatctgtt

SEQ ID NO: 189425 - DNA, 439 bp, Glycine max
  unsure (1)..(439): unsure at all n locations
cccatcacatgtggtactaggtggttgtctggcgatggtgcacaacanagtttccatatccacaatgtgcgcataaacccaccatcccctgttgcccacctccatctgagctcacgtattcccacgtagcccatatcctcgtttctctcaacaccgggtccccatcaatcctcccaagcttccacaacatccaatcaaaacaacattcaaacagcacaagctatcacagccaagcaaaacagggcaaaggcagaaaactctgctcaacacaccaaccaaaatcacagcttttctcactcaaagaccccagtaacaattccttcgatccaatttgttaaccgttggatcgacgtccaaaatttactggaagtctatagtacataagcctacattgggacgcgtgggatctactagcanacatctagaactcattctgcac

SEQ ID NO: 189426 - DNA, 352 bp, Glycine max
  unsure (1)..(352): unsure at all n locations
tgtgtttcgagcatttttattctcgttttggtttactttttataccccctgttgacgtgcttaagccattntacttaagtcatttctcgcttaacttaaaaataaaataaatttccaccgaacatttgaattgtattatccattaacttcggttaaaatcaattccgaccgttcggtcgtgccgtaaccacgttggaaatcaaaaagaggtaaaaaaaataatataataatcaaaaagacatcttttagtaaaataaagcggaaaatcaatcggacgttttctctttgggatttctcattcttaatcgaattgattaaataactaaagtgaaactaaggctaaaatcaactc

SEQ ID NO: 189427 - DNA, 394 bp, Glycine max
  unsure (1)..(394): unsure at all n locations
tcctgctgtattcttatagatgttatgacttttcccttactctacaacaagaactaaacgagntattgttttctttttttgtaattataggaaacaaaatatgatgatttaaagtataagaattattttatctatcttattatcatattcatataatgataataattataattgttgtataagagaaaaatttgttaaaaaataataattatcttaattttttaatataacattaattatttcttatttttattctttataacattaatgatgaacaataaaatttgtaataaattaataatatataagattaatttataaataactattctgtttggtgaatgaaataaataaattgttaccggttcacaacaccaaagataaatgaaataaa

SEQ ID NO: 189428 - DNA, 405 bp, Glycine max
  unsure (1)..(405): unsure at all n locations
aagaacgtctaacaacggttgaaacctttgcgaaattcttcacggaaaacgttaccgaaacgttncggaagcgccttggcttatattttttttcacggaaacaatttttccaagcaaattcgaaagagagagaagtgcctaaggggctgaacccttttcttcttcacttcctcccctatttatagcataataggggagattgntgccgcccagctcgcccaggcgagccaggttgcttcctctataagcaacagccttctggagggccaaagtgggcctgtttgctatttgcacccccatttttactaagtacacccccttctgctttttttggtgattctttattctaaaagtaccgaaacataccaaattctgaacgatacttgttttctttctgaatggtac

SEQ ID NO: 189429 - DNA, 444 bp, Glycine max
ctgaggattatggcgtacccatcacatgtgggactaggtggttgtcgggcgatgtttgctcaacaagttttccacatccacaaatcgcgcataaacccaccatcctctgttgcccacctccaactgagctgacgtactcccacgtagcccatatccttgtttctctcaacaccgggtcctcatcaatcctcccaagcttccccaacatccaattaattcaacatccaaatcatcacaaactaacaaaccaagcataacaaggcaaaggcagaaaactctgcccaaaactcaaaccaaaatcacagctgtttctcacttaaagaccccagtaacatttccttcgttccaattcggtaaaccggtggatcgacccgagaattttactggaagtctctagtacataagtatacattttgacccgtgggatctactagcaaacataca

SEQ ID NO: 189430 - DNA, 419 bp, Glycine max
  unsure (1)..(419): unsure at all n locations
tacatatgaagcagcatatgaatagtctgactcaagcaaatattaaatgccaagctgatgctggatttgtgtctgggccgtaggtttaggttctaactgagaaaagagtgtgttttgtttaatgaccaacaaaatatatgggtcttttggttttcacttcctctgttagttccttgaagtatcaaaatattctgctgtatcttgtatgtcccccagctntattcaaatcttattctgcattcctctcattgataattagttagattttaatttatatgtgttctgacaggctttgaaagggaatgccaaattattatgatgcccgtcattatgtgtactgggtaaactatgtttggcaatcttatgccttattgtcttttcctgaattacgggatatattgattctatttggataattg

SEQ ID NO: 189431 - DNA, 454 bp, Glycine max
  unsure (1)..(454): unsure at all n locations
gcttctntccctgtgctgtgctctntattntgaaccccataaaatgttttccaaatgcttctggctagcacgacctgctgcacttgcacatacatcgtcatcgtattcatccccttgcttttcctttgcaaatgctgctcaattgttcatacaaaaatatgctcctcacggaataaagaaagaataaataattgttataataagtcttttcctgtctataatctttttttttttttaagtttataaggagttntgcctgtggaagtaaaccatcatttgacatttaaatgtcacattttgctatatagaaaaatgtcatntttaaattaattatgtagaaaatatgaagccgttttggtaaaacattcatcgataacatttgaattataaacagatntttctttacagatatttaccccctgttcgattaaatataataaacatatttttttat

SEQ ID NO: 189432 - DNA, 278 bp, Glycine max
acagacatccgagtaaaaagctattgtcgtttgaatttggtcacagattcaacattcaatttcaaacgtctcgatatatgacgggactcaatctaacatccgagaaaaaagatattgtcttttgaatttgctcaaaggttcaacattcaatttcgagcgtctcgttatattacgggactcaatcagatatccgagtaaaactttattgtctgttgaattggctcagaggttcaacattcaatttcgagcgtctcgatatgttatgggactcaatcaga

SEQ ID NO: 189433 - DNA, 457 bp, Glycine max
  unsure (1)..(457): unsure at all n locations
actcggatgtcttattgagtcccgtaatatatcgagactcgtcgaaattgaatgttgaagctctaagccaattcaaacgacaataacgttttactcggatgtctgattgagtcccgtcatataccgagacgctcgaaattgaatgttgaatctccgagccaattcaaacgacaantaacttttactcggatgtctgattgagtcccgcaatatatcgagacactcgaaattgaatgttgaagctctgagccaatacaaacgacaataactttttactcggatgtctgattgagtcccgtaatataacgagacgctcgatattgaatggtgaacctctgagccaattcaaacgacaacaactctttactcggatgtctgattgagtcccgcatatatcgagaccctcaaattgaatgttgagctctaaccaatcaaacgacatacttttactggatgc

SEQ ID NO: 189434 - DNA, 263 bp, Glycine max
  unsure (1)..(263): unsure at all n locations
gtacgacaggttaaacactcatgcagttgttgagccattcgtgatagcaacaaacaggcatcttagtgttgtgcaccctattcacaaacttcttcttccacactatcacgacacaatgaacatcaatgcctctgctaggaatgtcctgctgaatgctgagggtattatanaatcaacattcttctggggaaaatatgcttngganatgtctgcttgtgtatacaaagattgggtttaccctgagcacgcactacctgctgatc

SEQ ID NO: 189435 - DNA, 464 bp, Glycine max
  unsure (1)..(464): unsure at all n locations
ttaaatgtaagttaaatggtgggtgcatttgtattaataagcttttatgtttcatcaatgatcgtgtttactattattgctgagttattgatcattnttgttctgtaaataccttttaatgcttcaaaattaatattttattatgtgctctaaatctctggcttgtatatagggtagagggggtgatgagttgagagcaaaactgtcaaatgctctccaatgctgtctcttgggtggtaaaagtggagctggcctattttccccctatagtgaagattatgctttcccttccatgtagcgtctttgtaatctctaaatatttaactcttagctctttttttccncttcactgctggaattgatctcttgtcgcttattgttgtcgaaggacaaatttgttggatctttacatanatggcttgttgttagttcagatggaaattgtttctgttaatatatgacat

SEQ ID NO: 189436 - DNA, 424 bp, Glycine max
  unsure (1)..(424): unsure at all n locations
ttgacaagataatgataatagactattattgcttaaacagaagaaaaaagctttcattaattggtatcatgatcaaacaatttaaacaacttggcccgtcctgcccaagaaggaaaattatcttatgttaggagaaaagagtattntatttttgtacgtgtaattaaacaactgattgggctatgcttttctaccgttgcanaacagtgatttccaaaagtggataataataataataataataataataaaagtttaaacatggtttgcttctagttctttaaattcgattaattggttntctaatccttcacaacacatttattttattaatctctcaagttttgaaaagtattttaatggctggttgttattatgtcaaaaattacactggttgtgattttaatatcaaaattggttttta

SEQ ID NO: 189437 - DNA, 450 bp, Glycine max
  unsure (1)..(450): unsure at all n locations
tgaagatgttcatgatgaagttgtcatatctctagagaatctatgtcaacacgaacaaagtgctataacgctgtcagatatgttggacaaaaaaaacttgagtgaatcaagtgaaccttatagcaagtttccattgtatatgaacctactgtgtaaacattctttgagtgattagaatacatattctatcaaacacttattgttgtgaaagccaggagtggcttcgtgacaaaaaatacttgtgtcttaatctcagagggatattaagggtagtgccagaagtggcctatagagtacttgttgtatcaaagagtggcatagaggatacttgtttgtaatcaaaattttgattagtggaaccctgcatgttntgaaggagaactgaacgtagcccaagagttgggtgaaccagtataaaacctctgtgttgtctttactgcttctatataa

SEQ ID NO: 189438 - DNA, 336 bp, Glycine max
  unsure (1)..(336): unsure at all n locations
acattggggtacgtataatgtaccataggctctaatatattntgccccgataaatcatttgacagttttctcttatcaaggcattttaatcaaggtacttcaattactgatttgaatcttctgtcaaggctggtgttgattacatggagtgaagtgtacaatcaatgtttgtgcatcgaaatagagctttaaacagttgcatccaacacgggctatgtttgagactaaccttaatagtttgagtcctctggctctggttgacaaaaagccacatcactattttaagcctgcaggtttcatattgctatcgcaacgtaaaagtatttagcactcttg

SEQ ID NO: 189439 - DNA, 417 bp, Glycine max
  unsure (1)..(417): unsure at all n locations
ccataaaactcagctgcccagaactaggtggcacctatattgtagccgnngtattctaaccgccgagccgacggagaaccanctatnggagagagattatggtgtcctcacagccaattatgatgctcttaagcttaacttnggcaccctcaatcacgacaacgaagccttacgaaagcaggtagaataataatacaacatagtataatatttagaagaattgattttgagtctaattaatcttaaattaaaaagtatacgtgaattttgagtgagaaaacacacttcatgctgaatgttcctattaattttttttctggggcgtgcctttcaatctacaaactatgctcgatggagttaacctcatgcttgaaatgatcataagtttctaataagagctttcttttctaatctaat

SEQ ID NO: 189440 - DNA, 386 bp, Glycine max
  unsure (1)..(386): unsure at all n locations
tttgtggggtggagttagaccctaaacccgaaatctaagatggtattaaagcctatcctaaatacattgttggggcaccaacattgccacgctccaggcccatagccctaggcattagggggtgtgttggacagcttccttaattgcagtcactgctaacctgctttaattgcagcagcatatgagagttggttgccaatgtctcacaaaaggctacctatgaagggactgaccanaacggctgagtgaagcgtcgtantgtgcaatcaatgagtctgaaacatcaactcttagggggttgagatcccacattaactatagataaggccttagtattgcttataaagtttgggcaattctcaccatacaaattcggtttgtgaggt

SEQ ID NO: 189441 - DNA, 496 bp, Glycine max
  unsure (1)..(496): unsure at all n locations
ctataacactcagcttttagaaatatcctagtcttgccctctgtgtgggtggaatttaacaaactctaccagatgatataaatgttgccctgaaaaatgatctgaaacttcatccttattttgaacatggagaagaaaaagaaaaacctgtatgtgatttgtccccaaggttgggggatcctatccaatatcttgatggcacacgaatttacatacaaggatcattatgggatgggtttgcagatgggaagggggacttcactgatggaccttatgaaattcaaaatcccgaagatgtctttacagatagtgtttataattatggattcaatcccgaggttggttctgtgggaatgccacatgctgccaccataagagcaacaatgccttcagaatgatggcaaataccacttgttaacaaactnttccatggttatgttaagaaatntccaaaccatatggaataccataatacattcatattcaatccaccacg

SEQ ID NO: 189442 - DNA, 379 bp, Glycine max
taacacttcatatctaatgtggatcattccctatttacgtcattaagcataggccactaggttgaacccaaggaagacctaacatgcaccatgtcgccctttgggcatatcattccttccctcttagagaaaattcaccctcaaacctcgagataattggaatcatgtcaaacctatttcgaacttcattgactctaaaataagttatatgctcaaagggttctaaggattcatgctgggtctgtggattgagttcaacctagtggcccatgcatcatggcttaaatagggatgagcttgcgttatatgtcaatagtagattctctgctaacaacttaaactcttaacgttgtggtaagcgttctttctcattgtcaag

SEQ ID NO: 189443 - DNA, 408 bp, Glycine max
  unsure (1)..(408): unsure at all n locations
ngnacaggaaattatgaagatttcgactgttgtatgcattgttgtccgtgtgtcttattctattataattaatatataaattttgttattaacctcatctattattctattagaattttcttcttttgtattattttattagaatttttaattcttttaaaaaaacatagacattctaagatggttctttgaaaaaccatcttagaaagtatacattctaaaataatctttgaaaaaactatctcagaattcttaatatttttaatgtaaaaaagaacgttctagccatcttaaaaaatataccttttaagacggttctctgaaatattgccttagaatccttaaattcttttgttttctataaaagaacatgattctttacagttttgagaaactgcttaaaagtta

SEQ ID NO: 189444 - DNA, 404 bp, Glycine max
  unsure (1)..(404): unsure at all n locations
tctactatcattgttatcatttctttctccggcattgagggaaccacttgggctgccaaatccctccacctttgggcatattctttgaatgattcatgccccctcttgcatatgctttgtagttgcatcctatccggagctatatcagaattgtaccgatactgcctaacaaatgcaacaattaggtcctcccaagaatggactcgggaaggttccaagatagtatactaggtgacagttgccctagtaagactttcttgggagaaatgtatcaacagtttctcatcttgcgtatgcccnccatcttccgacaatacatctttagatggttcttggngcaagtagtccccttgtacttgtcaaagtccagcacctttgaacttgggaatgaccatgttggatac

SEQ ID NO: 189445 - DNA, 379 bp, Glycine max
  unsure (1)..(379): unsure at all n locations
caaagtatgcccgatatattcatccctatgagatgntgntgaagtatnggcgatcagaattgccattccttggattatagggatgaaccaagctcatgcttgtacaaaaaggttcatcaagtcaagttgaaatctggaagtaaccgtcttgctaaattggggcaaaagatgaattgagtcacatcactgcttcgtctactgccaaacatatttaggattattgatgtgcttgttacttacacgttcaccttgacaaagatgtcatggaccatgttgaaaatctaaattgattcaactccatatgctacgtaaaaattcgcaatacttcaactgtacatcattcgcatacatccatgctttgcattgggtgcattgctca

SEQ ID NO: 189446 - DNA, 451 bp, Glycine max
  unsure (1)..(451): unsure at all n locations
gacatgcatctgttttcactccgaagaagtcatcgcccttcgacgtgaaaatgcacatctacaagaatgtaataggtcacaacaacccaaagttcaggaagagacattaagtcaaggactttcagtgtgtccaagaccactaacttaagtgtatgtcaagaaactatttccccatcacttaatactttggggagacagttgctacaattcaagaacccttttatgcccgacatcatggaagcgactcttccttcaaactgaaaattttgaccattaagaagtatgatggtactaatgatccaaatgaacaccttgacgtatacattacccaggtaagcttgtacaccacagatgatgcaatcttctgtagagtattcccgtcgtcgctgaagggacatgctctncattcgttcactcgcttaccccccaactttgtggactcgttatacct

SEQ ID NO: 189447 - DNA, 441 bp, Glycine max
  unsure (1)..(441): unsure at all n locations
ntctcanaacctgatggatagggtagttcatcttgactacctctggatgactttggaagtaaggcctaagtcgtcgtgccaaggtgatgagtgcttagccaccttttcaatcatttggtagcgcttctcggcgtcatggagcatgcagctggtaaagtagatagggagctggtgcttcccttcctcttgtatgaaggttaagctgacgattntgtcagctattgagagacacatgagcaagggtgctcctggccagtgtcgacttaaaactggcggtgtggctatggtctnnttgaaagctaggaagacttgttcatatgtcttgtcccatgagaagggctcagtctttttgagtagtttgtaatatggctttgctttttcggtgagctttgggaggaactnggacagggatgctagtctaccattgagcttctgcacttc

SEQ ID NO: 189448 - DNA, 428 bp, Glycine max
  unsure (1)..(428): unsure at all n locations
ggaggttacatgccatttttgctttaagagtaatgtcccactaaaactaactttccaaatgtttgccttcgcaggaatggccccgaggaagcttgcctcaaagaggtccaggaaggacaaggcggccgaaggaactatttccgccccggagtacgacagtcaccgctttaggagcgttgtacaccagcagcgtttcgaagccatcaagggatggtcgtttctccgagagcgacgcgtccagctcagggaggacgagtatactgatttccaggaggaaatagggcgccggcggtgggcaccactggttactcccatggccaagtttgatccagaaataagtcttgagttttacgccaatgcttggccaacagaggaaggcgtgcgtgacatgagatcctgngttaggggtcagtggatcccgttcgatg

SEQ ID NO: 189449 - DNA, 401 bp, Glycine max
  unsure (1)..(401): unsure at all n locations
agctgctccnnattacattgatgtttgtatttatgggaggaggttgtatgtcattnttgttntaagagtagtgtcccgctggtaaaactaactttccaaatgtttgccttcgcaggaaatggccttgaggaagcttgcctcaaagaggtccaggaaggacaaggcagccgaaggaactagttccgctccggagtatgatagtcaccgctttangagtgttgtacaccagcagcgcttctaggccatcaagggatggtcgtttctccgggagcgacgcgttcagctcagggacgacgagtatactgatttccatgaggaaatatggcgcccgcggtgggcaccactggttactcctatggccatagttgatccagaaatagtccttgattttatgccatgct

SEQ ID NO: 189450 - DNA, 350 bp, Glycine max
  unsure (1)..(350): unsure at all n locations
atgatgagtgaacggtagaacaaaacttgtatgtatcatcttcatttcaggattgacatcatcaaaaagggggagattggggaagcaatgacttccaagattatnttgatgatgccaaagaatcaagagttaagcaagttcccaagaatcaggagtcaaaaagattcaagaatcacgtttcaagattcaagattcaagaacaatcaagtttcaagaatcaagattcaagaacaatcaagatcaagattcaagactcaagattcaagaattaagagaagactcaatcaagataagaactaaaaaagtttttcaaaacattgagtagcacaagaatctttcacaaaatcttt

SEQ ID NO: 189451 - DNA, 408 bp, Glycine max
  unsure (1)..(408): unsure at all n locations
tttcctttttgtcctctcacggggtggaggttgtgccatgttctcagaatgttcaaaactattatgctcaaaatcaccaataacagaattctcaggatgctcaaaaggtactaaatgatgtctaactaatccatgaaatgtcctatctatctcaggatcaaagggttgcaagtcagatggattgcctctagtcatacactatatttagcatgcacaactagttgccttcttatgcaagtaacagtgtaggtttgaactacagctacccgcaaatgatatccaaatgacttgaaattttgtgaataaccttataaaatgatgagaaatagcacacaanaattcacacagaaattcaaagtctaactatagaagctaaaaatgacaagttaagaaaaataagagaataat

SEQ ID NO: 189452 - DNA, 448 bp, Glycine max
  unsure (1)..(448): unsure at all n locations
ctcatgggttcattgatcttccatgctgtagctaccaatgtggagctactctttctctaaacatgacaatgataattgtttcgtgctttagttctgaaaagactcatttcaccttgtgcatttgagacccatgctgtgatagaggagccaaaagcatacatganagtgttgcgatccttgtggttaatatggtggcattatattgaaatgaatcattttaggccaaccatgttccatacactattactgacggcttgaatggtagatgttggggaccttgaaatacagtgttttatcaaatcaaccgttggtatagattcatccaaattaactgcgcgctcagtccaaggaagacaagaacataattcctgactcactcacatagcatggggtaatggcttttgacacttcttcgagaaaggtcttacaatatcaactaacaatgtga

SEQ ID NO: 189453 - DNA, 261 bp, Glycine max
tctagacatgtttgattgtattctcgctatacaaatgaaggtgatttgattttacgatgaaaactctccttaaaaaatagagacattgagttgcatcttttgctcctaagcatgaaagtataaatcactgggtcttgaatattacagggctgtgtgaatgttataaatagcttttgttgggtggacttctaaatttttaacagatttattgaatatatatatctgccggatgttgttgaacattgttctaatattggttga

SEQ ID NO: 189454 - DNA, 452 bp, Glycine max
  unsure (1)..(452): unsure at all n locations
atgggtgatttcatganatgtctatcacaganttgtcttgtaatatttgccaaggattcgtggaataaaagttttatgtaacttaaattatctgtggtacagattgagatggcatctttgttcgagcaccatctgaagtagtcagtgttataaccaatctcatagagcttttgttggaacggcatgaattcccaattttcatctccagactgctcttggttgtaggtcgaaatatattcttgtatgttctcaaactattaaggctatgtttgaatatttaatggtgagtggaatataatggagtggatggtggcataattgaatggaataaatcataaataataagtctcgtctatatagatatgttatgatggtacagactaatttccattctataacttattgtataatgataattatattattcttatgccttgtcatgaataagtatg

SEQ ID NO: 189455 - DNA, 300 bp, Glycine max
atggcataagtgaaaaagtttgactaaattcacacactcgtttcatgcatacatgttgttggcactcaaaaaaactattgatgggtgattaacgtataattgatattagctcatttacgattagttgaaatgattacctaagataataagtggctgaactcagctactgagtttaacgtcgactgatgaaacattgaattctttatgtaatattatcttaagaataagttgtgcttagacgtatctactaacgatgtacagaatgggtgtcactagttgcacttgactattaaggattac

SEQ ID NO: 189456 - DNA, 459 bp, Glycine max
  unsure (1)..(459): unsure at all n locations
gaagaatgactcttatgcagagagtgttggctaacatgatattgtccagnancattcctcacacgtgagtgccacaattgtttatatttgtgtttccgtaagctccataaaatcaaagcaaacaaactgaactcctcctcatttactataacagacantttaaacaccaattctatgaatgactcagtngtattcttcagcacgccatcaatttaattcctaaaattacttttgctaccacacattacagcttcttggacaggtaataaaactatatatgccagcaattctcaatggcatccgagcaaaacacacagagcttgataagtacctctagttttagaacagatgttacagttaacaatactaatagaaaatatattcttttgcttgttctacacacaataatgtaacacagaatatactttttatataaatgattatggaactctattgact

SEQ ID NO: 189457 - DNA, 420 bp, Glycine max
cagaaagattgttggtgttgcagaaagcgctaaatgtgcctacacgctaagccccgaatgcttactggaagttacaacttcaagttgggcttaacgtgaggctaggctaaaagccagtggtttaaaatcaaacgtcacattggcacgctaagcgcgccatacgaatttcagtttttaaaaagtagaggtagaggcacttgggttgctaccttggcactcaaacctctgcattctctcatccttaagcatttttgtttctgctatgtgcttatctggtctctgcatccctcgcttcttcacactctgcattacacaatccaagaaagtgttttgatttcatttttgcgttgcattcatgcttacaccttatgaataggattatgtttttttagttacattgctatagtacgtactagttta

SEQ ID NO: 189458 - DNA, 423 bp, Glycine max
  unsure (1)..(423): unsure at all n locations
ngctaacccatggaagctcctaatatctcccacactntntattgtgtgccattcttggatggtcttgattttctcagggtccacttggaccccatctctaccaactacaaaccctaagagaactatattatctacacaaaaggtacacttctctatatttgcatagagagtgtttttcctaaggactgaaagaacttgcctgagatgtcctaagtgatcatctaggctcctactgtacactaaaatatcatcaaaatgaacaactacaaatctacctatgaaatcccttaagacatgatgcataagcctcatataggtgattggtgcattagtgagcccaataggcatcactagccattcatacaaaccacacttggtcttgaaagcggtntccactcatcacccttttcatctatttgggat

SEQ ID NO: 189459 - DNA, 369 bp, Glycine max
gcacacttgtgtgagcaccgtgagaagtaaattctcatgctgagaacagccaaaacattaaagctggaacatctagaaaattattagcatttaagcatggccaggctatagattcccaatttagggatgtcacctaacatgagtgaactgaaattacagtagtgtgctgcttatagaattttgaatctgttaaagggggaaagcatatctcggccagaatttttcctctaccttaattataggattgtatttatgtggtttctcagatccccatttcagattcttcttaaggttcaaggacaacttttattctaaccggtgttatgaatataaagtatctcctaattatatcgatgattaatttctatc

SEQ ID NO: 189460 - DNA, 260 bp, Glycine max
  unsure (1)..(260): unsure at all n locations
agtcatgacattattgatgtttgagctttgacaattatagagcctatgtccaagtggataaccatgcttctagcaacactctacaacaatgtggttatcaacaccataatgtgtacaaatcttcgttgtatttcctccggagttccctctaccagaattgccttgatagacttattctcctctataagtataatttagagggaaaccatctttcctataacatctatcactggtgtgattgactctgncccagtaagtgc

SEQ ID NO: 189461 - DNA, 313 bp, Glycine max
gccgtcatattataagatctgctagaattgcatcagagaaattactgagggaaatgattttattctttatgcatgttattttaatcccgaaacgattttgtacggattttaccttgaaccttttgtataactatagtagcaaatctcttgatatctcttggcctgtgctctatttagtcaaagcttaagttgcgataaataaataaaatattttgtagtttgatgttgccttgtaggtagtgctcataagtagaagggtattattggtctttgacctgttctatcgggagatagaaaatactgaaaggccatg

SEQ ID NO: 189462 - DNA, 331 bp, Glycine max
  unsure (1)..(331): unsure at all n locations
acattcctgcctatccttggttgtgttggttgctgcaaggtgttgatgacatcattgaacaaaatgttaacttgattaacaatttgccatgttgtccatcgcttgttcgggaaaataagagaatttctactcttccaaattgtccaacatgtcactgcaaagaggattcctctaacgctgttgatgttgttcacgatccaatccatataatttgcaacgtaaaaatttgaatcatggtctagttgaagaaattgccacacctgacgagagtaatggcagtcacgaagtaagtgtaaaatnatctcctgtccatgcatgcacctattacaag

SEQ ID NO: 189463 - DNA, 492 bp, Glycine max
  unsure (1)..(492): unsure at all n locations
ctgaagctctctcaatcagaaatatttatatggaaaagaattgtcattnttcggataacaggttccagctgtacatgtagcaagataatgtgatccccatcaaactactcaattcatatgcatgcactttgaaagtttaattatctaccgatgaacaaatccgataaattatgttattacctgaagtttttgtttgcctttgtctgaggacacataaacctattggctaaggtatttaatttcagtggaatttattgtaatagttacttattattattacaacaccgccctctctagtatggacttgcattctagttcaatataaaacaccaaaatattcacttccatagaaccattggaatgatatgcagttcatgataggaagtagtatataggaagtagcacccacttactctctatcaagagnataagtctcacttagtctattaagaatatatatatatatatatatatatatagatgctctgaata

SEQ ID NO: 189464 - DNA, 324 bp, Glycine max
  unsure (1)..(324): unsure at all n locations
ttcaatccttgtcaccaccattattcataattaaagtaaactctaagacacagtaaattgggtttgtacattgtctacacttcaaacttgagattctcttgcttacagggtgcattanatataaaaccatccatggcctttcacccaagagagcttatctgtaaggagaattagttcttgacaagcttgtttgggtgaatgcaatggctatgaaggggaacagaacagacactaacagaaggaaccactaaatccatcttttggatgcattatatataaagccaaatggaatgaagtgttccctgtaacatctgtcaacttgac

SEQ ID NO: 189465 - DNA, 405 bp, Glycine max
  unsure (1)..(405): unsure at all n locations
caaccatagaattcaaactgatgaccgcattggatttggatcattangtcaataattatattaatggattactaattaattcacatgatcttatctacatttataagatatgaaaatcttatatttgtcttataagccgaccaaaaaatcactactcattattagaattccaatgtcaactacataaagcattttagcataaaacactccttatacacaagaggtttaacataaatcatatgaaccaaatccacaatcacattacatcactatagcaaacatgttctaccgaagaggggacatagaatgaataatacatgattggctacatattactaataaaacattctaattactactcatgtatataaatcgagatggacattgacaatcgtctatgtccgc

SEQ ID NO: 189466 - DNA, 352 bp, Glycine max
  unsure (1)..(352): unsure at all n locations
agaccacagtaacaattccttcgatccaattcgttaaccgttggatcgactccaaaattttactggaagtctatagtgcataagcctacattttgaccgttgggatctactagaaaacatcaagaactcattctgtactactctttccacagccaaccacacacaagcattttctgcaccaagctaaaatcctgctgcacctattttgacagcaaaattctgcataagtgcagatttcgaaaatcacacttcccctcatccaatcttgcccaaattaaatcctacgagtcccaaatcatgtatcaaacatgtctaaaccanagctaagcttcaaaccacagcaacacaaaat

SEQ ID NO: 189467 - DNA, 472 bp, Glycine max
  unsure (1)..(472): unsure at all n locations
tntataaaatcatttgtgaaatcaagttttgaggccaaacctttttaaccaataagagattcttttaacaaaaataaactaagtcttatatttctcttgatcttgttttcttgatcttngaatttgattgaagtaatcttgtgtggcttacattttggcatcatcaaaaccttcatacacatacattcacaggttgaaggatccatatgcgcgtgttacatacatcgtgagacaactcatttttctctcattatttcaacaattntatattgtcgctacgcaatattaggaatcaaattgcaattgaaacttataggtgtccaccaatgttatcagtgtttgaccagcaaggtcgtccttttgggaatgaattaattcactggttaacagatgaacataaagactcaacccatgttcatgtgtagaataactgtgccgaagtaagccataccttgagtagttggaccatcta

SEQ ID NO: 189468 - DNA, 410 bp, Glycine max
  unsure (1)..(410): unsure at all n locations
aacatgaaacatggatctaatggatgaagaagctgaagctgaagctacgcaagagcctgcacatcaattgagtccttttgaatctctcatgattcagaagatggatgctatgtttcacctccatcaagagcactcaactaatgttcacagtacattggataacatcactactcggttggaaaacatagaaactaggctaacccttagtaacctccttaaccccgatgagtatgaagcttagtcatgtttcaatgcttgtttttggtgtttaatggtttattctacctatgttatgtttgtttctgtttggctttgtttgattaanaaattaagatatcatttaatagttntatgaataaagtgtaatgtttttatgataatgaaatgtatggctcttcttttagattcta

SEQ ID NO: 189469 - DNA, 478 bp, Glycine max
  unsure (1)..(478): unsure at all n locations
ttataaatgtgcttcanaagaaaaggatttaatagagaaatgaanatcaaccaatcaaagattgaaggaaagcaaaagaaaaatngaaaaagaaagaaaggaaaatacagaaaggttctttggactagacaatgtctgaacaatatgcagaattatcaaaaaaagaatagcaacataaaagtttgtttgaaacctgagggaggcctgaagcagtcaccttcctagttaccaaccaaatctttgtgtccgcgctcgttccgcatcgaaccaaagagaaaagaaagaacagacaagggaaaggccagaacacccaaaagccaaattcccccaccaaaatcacccttcttaaaagtcctattgatccatgattacgcatgttatctttgatttggtggaaatgattgcanagcaagtcatgacatatttgcgggtcgaattanggtgaacacttgctatgtagattatcacttgagcaatt

SEQ ID NO: 189470 - DNA, 398 bp, Glycine max
atgattgtcaacatttggttgaacaatcaaaaaaattgatcattgccagttctgttcacgtgtcaggtcaaaaggatgccatgtgatcaatgatcattttctttttgcatttaaaaatacaaaaagttgaatgctgtaaaatttaaatttcattacttctagttaacaaaattctaaattattgtttgactaggagtttgagagagtttgatgattttgtatcaaactgcacaataattaaactttttctcttattaattcattttaatgagatgtctcgagccagtgattatttcctcacaacattatgacaaatgaatcattatattaaggaggaaaggatgtgtcatttgccttaaacgtcaatttgtctaattccaactattaataaaatacac

SEQ ID NO: 189471 - DNA, 373 bp, Glycine max
  unsure (1)..(373): unsure at all n locations
ctctcactctttctccatgaccactggagagtccanaaaggtgttgagggaatcggcatcaaatcttatcaagagccctcgaaccctaacttgctttggttctttgtccttacggacatataagttcgcatagaactctttaacaattgccacatcaatgcttcccttagtcaagttggtcagtttgtaatgacagtttcttctaatcaatactcctttgacatcatcacactcattgatatacaacttgacatttctttctggtaaaatgtacctggcaagagtagaagcaaagcttcatgcatgaacaagattgatacacagatgtcttgatgataaccaatacgatgactcatgtgatgacaaaaagctc

SEQ ID NO: 189472 - DNA, 302 bp, Glycine max
aaccaagaaacattctgctgactctaaaagagcacaatgccaatagttgtacgacaattaaacaaatatacaatgcaaaaagtgcatatcgttcttccataagaggaaatgataccgaaatgcaacatctaatgaagcttcttgaacgggatcaatatattcattggcacagattaaaggacaaagacgtggttcgtgatatcttttggtgtcaccctgatgcagtgaagttagtcaacgcatgtaatttggtgttattgatatacagaacctacaaaacaaacagggtactccactgcttg

SEQ ID NO: 189473 - DNA, 423 bp, Glycine max
  unsure (1)..(423): unsure at all n locations
ccagctaccttgaatataattgatcctttgcaccctttggaacttattgattnttntctaaaatngaacttttcacttaaatgactatctccttataccttgcttagattcttggagagcaaatggttcacggcaatttaccccaaatttgggggagttaactgggatgcaaagtgaaaggtaaagcacatcatcacacacaacaaataagttatgttaaaaaaaaaaaaataagaaatcaaagaaagtgtgtgctgttgtaataaggtcaaatgcaaatttaagtgatagggtagtgagtaagctaattgtattgaaaagactacttggataagtctagggtttgtgctctcttagaatctaagcctttgattcctacaaaaaccatatgattctgtagccaagcctcactacaagcctata

SEQ ID NO: 189474 - DNA, 330 bp, Glycine max
  unsure (1)..(330): unsure at all n locations
ggaacagaaatactttgaaacatgctatacatgctaaaaataaaaacagaaaatgaaaaaaaaaattaaaaaaacagatgacaagtaaacaccccttagaattgcatgtttctagaaaagcagcaaatgacatactctgaagtctgaagttcaattatatntaatngtgacttgcgtctaagcaaagcaatttcaatggttgacattgaagtatccttcaagctaggaatngaggcatactcaccacgcattcacaaagaattacatcagtgacgtgccaaacatcatagaaatatatattttctattaagaacttctggtagttatgca

SEQ ID NO: 189475 - DNA, 501 bp, Glycine max
  unsure (1)..(501): unsure at all n locations
taaaactcagctagtgtttaggttcctttaattaaactactagtttttntatttatgcgatgccttgtaaatagattgtttgagaatctttattttgattatattttgtatattatttgacaacaaataacaatctatagagaactattgtattttgagaacaaataacacatgaaaatgctggaaaaataaggttacatgacactattcaaaacaaataacattctcttcggttaattntaccttttttctcagtttcatacatgaataacaaatactggaaacaaattactcaaataatgattacaacagttaaatgtcgaatcattcaatcatatacacatttgcaaagcaacctgatgaaagaaaaagttgaaaanatatttcaatgaatatgctctaaattgacttataatattaatatttcttattgtagataaaatggatcataatatcttcaaaattatcatagtataataaataaaaataatgaatgtagta

SEQ ID NO: 189476 - DNA, 368 bp, Glycine max
aaatgccatgaaatacaaggctaaaaccctatactactagaatgaccaaaataagagacccaaaaatagaaaacctattctaatatttacaaagaagagtggaccaaaccttggcccatgggcttagaaatctaccctgaggttcatgagaaccctagggccttctttagtcgctctagcccaatcctcttggagtcttctatccaatacccttgggggtaggattgcattagaaagaaaagataaattccatggaacataatggtgtttgagacctcatagaattgcctctacattgtccttcccttggaagtatgggaggttaatgttagcctcttgaggctttctttccttttctctcatatggg

SEQ ID NO: 189477 - DNA, 422 bp, Glycine max
actcagcttctatccaggcactctcttggtggtaaagctcctccttccttggcttattccctagtggatggcgcctcctctcacctcttctcctttatcttccgttgcatctccatggttgaaaatcaccattgaaggaactcattgaatcttaaagatccaacctccatagaagcttctcaagcaagcttccatcactctagaattagaattctatgtaacaacatggcttttgtttctcaagttgaaccaagaaacattgatgaagctttatgtgatgaacattggttaatggaaatgcatgaagagatgaatcagtttaagagaaatgatgtatgtaatttagttcctaaaccaacctctcacaagtcaatcgaaaccaaatgggtgctttgaaataaacttgatgaatccgacattat

SEQ ID NO: 189478 - DNA, 399 bp, Glycine max
aaaatagcctcgaccaatgtcaaacgataaaaactctagccaatattgtttgtcgactaacatcgactgataaacgtcatccattaacgaccaacattggccaaaaaatgtgaggcgatgtctgtcaaaagaataatctcgaccgatgacaaccgaaaaaaactatggtcgatgttggtgaaaaattgccctcaaatccttttattatttagttggatcaattttgatccattaaatattgattaaaggatccattagattttaaaaaatagcaaaggaatcattaaccatccataaaattaaatagatggatttggattcatgcatttcttttataataaatggatagataaattattgacatgaattgatgaatggtggtaaatggattcactgcat

SEQ ID NO: 189479 - DNA, 488 bp, Glycine max
  unsure (1)..(488): unsure at all n locations
tactcagcttagttgggttgaaaagtaaacatatattaaaagttatgntaaaatatgttggggactccttataaatatttagattttatgtttgtttcactaaaaaaatcatttgtgctctcttataaaatcaaaaaattgtttttttgtccttaacatttttttagttcctaataaaatatagaatttatatttattccttaataaaaaatctcatttattattatctctttgaaaaagactaataacaaatatatattttttatcagaaaataaatacaaaagatgtactaatttatcatacattataaacatgataaagaatcaaattatattttattatgaactcattgcaaagaataaatctaatgaagaacaaacacaacattcaattatgtattaaggattaaaagtatatgttagtgagaacatcataactaattttgctttagcatttttttaatttaatatattcttaactaaatgtg

SEQ ID NO: 189480 - DNA, 384 bp, Glycine max
ccaaccaacaataggtagaataggattaccatgcgggtagtactttatgacctcattcaactccttgaatccaaaatcctatagagttgaaaccacagagatttatacatgaaacccaatttctaaacaaataaaattaatcaaggttcaggtaatcaaatttaattgtcttacatggatcacctccataattgtatctgtaccatattcttttctccattggatcattttggcccatatgtgctttgctttctcaatatcaaactttcttgctttcaagaatctgtctgaaatttgttcaattccagttttaatctatacttacaataggcagatatacttatccatatgtaatgtactactataaatattaggaaggttgta

SEQ ID NO: 189481 - DNA, 390 bp, Glycine max
  unsure (1)..(390): unsure at all n locations
tgaagccccatggtgataacattgaagacgttggtgaantgtgtcgtgagagtgacaaacatatctattattaaaaatcgacaaattctagtattagtccatgtacattatccaatcactcctttactggttccttgctttctgactatgaatataaaattgatactctgggtcccttgatactataggaatgctatagataatgaccggtgagttctaatgatgcctatgcctgtactgattggtctatattcactcaattctaaagtacatattgtatagaattttctatctcctggacatgttgctaacatgctcgcaattagactctaacttctgctttgcctgtatgatgttttgccacctggaactccattaatacttatgctt

SEQ ID NO: 189482 - DNA, 443 bp, Glycine max
  unsure (1)..(443): unsure at all n locations
cccatggtggtccacattgtgttttgtgcattnttattctcgttttgtttactttttataccccctcttgacgtgcttaagccattttacttaagtcatttctcgcttaacttaaaaataaaataagtttccaccgaacgtttgaattgtattatccgttaacttcggttaaaatgaattccgaccgttcggtcgtgccataaccacgttggaaataaaaaagaaggtgaaaaataatataataataaaaaaaaacatcttttagtaaaataaagcgggaaatcaatcggacgtttntctctttgggatttctcattcttaatcgaatggattaataactaaagtgaaactaaggctaaaatcaactcgcctagtcaagctcgtccacaaaaataggcttttgaagttggcatttcaattctcactaagtaaatggatcattt

SEQ ID NO: 189483 - DNA, 334 bp, Glycine max
  unsure (1)..(334): unsure at all n locations
actcttatattattattataaatataaattcattttaaatttgacatgcatgatcattatcaagaatatatcacataattgaagttagatttatcaaatttgaattatagaaaaagttagtaaggtgagaaaatatgcaagacttactcctatggtaagtgaatttcctaaaactgaagttcaatggctacaatgattgtaataaggaattcaattctttaaccactaacttgtatatgtntcanaatagttntcaacctaacattaatgtggaatttcgaatggttttcacctatatttgacatgctgatcatatgaagatatatcacatatt

SEQ ID NO: 189484 - DNA, 311 bp, Glycine max
  unsure (1)..(311): unsure at all n locations
tttattatcctccaggattaaaccctattacttcttttacttacgggacaacgngagtatttggtaaacaacacctaactcacacctctatgatttatatcatcacattgtcttcaacctcaatcctatactataattaaaattgacgtacaacccaaatattattttaacaagccttcaagagcattgatcaattattgtttcaacaagcctgttcaggctctaacccaagtatcatttcaacaagctatgactaacatatattcagtcataagactatccagagtatattgcaaaatcgtgtctctcat

SEQ ID NO: 189485 - DNA, 374 bp, Glycine max
  unsure (1)..(374): unsure at all n locations
tttttttattcttggagatncttgactccatttcattgaatcgcatgtccacttgtaactccaaagtatcaaacctttcaccaacaaaggtttgaagaccatcgaacctatccaaaatcttttgaagaagagaggaatcttctccaccatgtaaatgtccttcttcatcaacgggtcgagcaccctttttcacccaagagccatcatgctctttttgataaccaaaggatgcaaccacaacagtgcctattagaaaggatctcttgattggaacataagggtcanaatcaagaaggatgttgaagtgttgaaggaagagggtgattaggtgtggatatggcaatgaagcatttaatcgaaaagccttatgcatg

SEQ ID NO: 189486 - DNA, 405 bp, Glycine max
ctgccacttcggatgaaaaaagccaagcccctactttcgaggggcaactcccaccttatgaagactatcccgggcaagacgatggggaaggagatacccatcttggccccctgctccacctcaaagatccgtccccacatgaactaccccaaccgaacatagtccgccatatcccggcctcacccacacccgtaaaagaatctgttcccttcgcggaagataagggaaagattgaggcgcttgaagagaggttaagagcagtcgagggccctggcaattacccattctcggatgtagtggatttatgtctcgtgcccaatatcgtcattcctcccaagttcagagtaccggactttgataagtacaaagggacgacatgttcgaagaggcatcttctgatgtatt

SEQ ID NO: 189487 - DNA, 399 bp, Glycine max
  unsure (1)..(399): unsure at all n locations
aaccgttcacatccatctacggtcaaagaggtcaaattctgaaagtaagaaagttggtgattccatatcttatggatattgattgagtacagcttcaaggtctccaagtttggaaattcaacctgtcaacattatcctggttagattatcactaacaagtaactaaagaaggcctttcattacttttctaactaactcaagtaaaaaatgcccattaaaggcaaatgatttaattgccttgttggtaactggtaagtaaactctcctgttacatgatcaccatgtctaagagacaanttttatttcctaatcaattcaattgtggttttttaatagctttgttcttctcttcttcaaattaatggtattcatatcagcacaaaataacagaaaaataaa

SEQ ID NO: 189488 - DNA, 471 bp, Glycine max
  unsure (1)..(471): unsure at all n locations
ctgtggttggcatgtactcataaatcaacattttntcttctctcttaatgcagcaaccaagaagctgtacaagattacgatgctgaagttttgcaatcaatgccacttcatttttgaactcatccaacccttgtacagatttctttgaaagccttttcacagctatctctttcccatctatcagtgtgccctgaaagatattctgcaatagttagcaagttcttaaggataacagaaattctaaatatcattttttttatcaccttgtatactggtccaaagccaccttctccaagcttgtnttcagaagaaaagtttcgagtggccttagttaagactgacaaattgaaagtnggcaaatccaagtcttgcattctctttatattggtgtaatggctgctgtaaacatntcttacagcccctggatagttggaaaataacagtatatatacatggacacataatattcac

SEQ ID NO: 189489 - DNA, 509 bp, Glycine max
  unsure (1)..(509): unsure at all n locations
tggggagctaaatcctttgttggttcttccttggaggtacttgatgtaaatacctgtatatctatttaatgatgttttatgtgttctttgtgctatcagtacgccatttcagtgtgtttttgccttgatcacgtagatgcatgctttgttaggatcattcaatagtgcaaactggtctgattcttagaacttggtaggacaaggctagtttatcgtattatcacgagggatcgaggtacnggaaactagttgttgtatgtttgtcttaatgcggttctggtcgagtntagtccaacaagaggaatctgaggatgatgcttgatcaggattaggctagactatcatgaggaatcanggtttagcatttcaggagacaccatagaacacatgagcattgttnagtagagaatatccttataacattaggcacctaataggaagacccaacatgtngctacttgtcttacacatcattacttacgtgatttcctttttatagtagttacata

SEQ ID NO: 189490 - DNA, 474 bp, Glycine max
  unsure (1)..(474): unsure at all n locations
tcaacatcagaccacttccaggtgctggtactacatcacatggatttgatggggcctatgcacgttgaaagccttggaggaaagaggtatgcctatgttggtgtggatgatttctccagatttacctgggtcaactntatcagagagaaatcatacacctctgcaactgtcaagcacttccacatctttggaagtccatgttacattttggcagatagagagcaaaggagaaagatggatcccaagagtgatgcaggaatattcctgtgatactctacaaacagcagagcatatagagtattcaattccagaaccagaacagtgatggaatccatcaatatggttggtgatgatctgtctccagcaagaaagaaggatgtcgaagaagatgtcagaacatcgggagacaatgtagcagatgcagcttaaagtggagaatatgcataaaactctgattctgctacagatgaatca

SEQ ID NO: 189491 - DNA, 341 bp, Glycine max
  unsure (1)..(341): unsure at all n locations
acccctgntataactaagctcacctccttgagaagcttccttaagaagattcctaaagaagctagagcttagctacacacacctttctaatagctaagctcacccccatgacaaaaaaacatgaaaatacaaaaaaaagtctttactacaaagactactcaaaatgccccgaaatacaaggctaaaaccctatactactagaatggccaaaatacaaggcccagacgaaggaaaaacctattctaatatttacaaagataagcgggttcatacttagcccatgggctcgaaatctaccctaaggctcatgagaaccctaaggccttcccttggatctctag

SEQ ID NO: 189492 - DNA, 421 bp, Glycine max
  unsure (1)..(421): unsure at all n locations
agaaagagggagagaattagagaggggggagcacganattgaatgaagaaaaagggagagaagttgaactttgagttgtgtctcacaagactctcattcatcaaagttaccacaagtgttacacatgcttctatttatagactaggtagcttccttgagaagttttcttgagaaaacttccttgagaagcttctttgagaaaacttccttgagaagctagagcttagctacacacacccctctcataactaagctcacctccttgagaagcttccttaagaagattcctaaagaagctagagcttagctacacatacctctctaatagctaagctcacctccttgagatgagaagctagaacttagctacacaccccctataatagctaagctcacccncatgancaaaaacatgaaaata

SEQ ID NO: 189493 - DNA, 296 bp, Glycine max
ggtgaaggtggatttgatcgcgtggaacatgttggtggaaggatattgcaggttggggttggtggaagaggcgaacaaagtggttcaaaagatgaaggagagtggatttcaccctgatgtgggcacttatggcagtttagccaacggaattgcattggcaaggaaacccggagaggcacttcttgtttggaacaaattgaatgagaggtgtgaggtgggaaaggaaggggggaaatctgattcttctgttcctccgttgaaaccggatggagcgcttttaatactattgctgatat

SEQ ID NO: 189494 - DNA, 282 bp, Glycine max
  unsure (1)..(282): unsure at all n locations
tagtggtcttcattatcgctattctgaaaaaatataattggaatgttttaagtaatcgcattttgtttggtatcaaatttaacgatcgactcatgaattctgcttgtctgttgtgaatgttgtttctgaccattccatcttgttgatgtgaatgtttaggataatattcttaatttgttccatgcattttttatttgagtttatggcaatccatgtntagatgctaacatggatatagagcacacaaaggttattgctgtgttcaaacaacgaatgcacact

SEQ ID NO: 189495 - DNA, 371 bp, Glycine max
ttattgctatttgtggttgttacgtcgcatcaactacttccaatatgtagatgttatttacacaaatgaacacatcttaaaagcgtactccgcacaatggtggcccttgtgaatgaagcgacaattcctccttctgatgactcatggacacttatacctgatccaagtacaattcgtgtgaaaggtcgcctaacatcaataaggataaggaatgacatatattgggtcgaaccatcttcagaacacgacaaaatgtagtagatgtggaacgttgtaataaatcgactatgtatttgttgtctactcacagaaatgtactatcatgacaattgtttctattattatactaattgtgacttgaataacacatt

SEQ ID NO: 189496 - DNA, 376 bp, Glycine max
  unsure (1)..(376): unsure at all n locations
ctcagcttcatcagtctgatggaactgcttgtggagctcatgtatgctggatctttgagcttcaatggggtcctttaatggtgattntccaccatggagatgcagcggaagacaaaggaaaagaggtgagaggaggcgccatccattaaggaataagccatgaaagaaggagcttcaccaccaagatgagccttggataagaagcttggaaaggatgcttcaatggaggaaaagaaagagggagagaaagagagagggggggagcacgaaattgaacgaagaataagggagagaagttgaactttgagttgtgtctcacaagactctcattcatcaaagttacaacaagtgttacacatgcttctatttatagact

SEQ ID NO: 189497 - DNA, 414 bp, Glycine max
  unsure (1)..(414): unsure at all n locations
gcggncgggcgatggtgcacaacaagtttttccacatccacaaagcgcgcataaacccaccatcccctgttgcccacctccaactgagctcacgtgctcccacgtagcccatatcctcatatctctcaacaccaggtccccatcaatcctcccaagcttccacaacatccacgcaaaacaacattcaaacagcacaagctatcacagccaagcaaaacagggcaaaggcagaaaactctgccaaaacaccaaccaaatcacagcttttctcacttaaagaccccagtaacaattccttcgatccaattcgttaaccgttggatcgactccaaaattttactgcgagtctatagtgcataagcctacattgtgaccgttgggatctactagcaaacatccataactcattttaca

SEQ ID NO: 189498 - DNA, 417 bp, Glycine max
  unsure (1)..(417): unsure at all n locations
ctaagctatggtnntttttttgaaggcaagctatagttattattttataaaaaataaaacttatagtttgtttcatttaaagaaaaaacaaacctagccgctctttcatttactaaagtatctaaattgcatattagtcactctatttttaatacagtcccctcatgtattgatgtcattatctttgatgaaataatataaatacttttgagtaaaaaaaagttaaatcaatttgtaggtctttgaattatttgataatttttaattaagttttttaattgagtctctaaaattatattttttttccaattagattcctatagttaactatttttaattggcattaatgataataaataaatgttcaaggatctaactaacaaaatatttatgaatttaattattattttttaaaat

SEQ ID NO: 189499 - DNA, 380 bp, Glycine max
aacattcattgatttctgtaacactgtaaagattgcaggcatgccaaatgaagccatcaaactcaacctattttcattttccttggcaggagaagccaagaggtggctccattcattttagggtaacagtctatgagtgattacaggtagtgatcacaccattctaggtgataaattgcatcaacccactaagaagagtttactagagttatcatcacaagacgctgtgttggcaaaaaataagttgctctctaagcaacttgagatctttgcagaaaccctgagtaagttgccaattaacttgtctaatggtcaacctttacagccttctattttgcaggttacaggttgtaccatatgtgggggtactcatgaatctg

SEQ ID NO: 189500 - DNA, 339 bp, Glycine max
cctcttagtaggggaattgtccttcctaagatggagccaaacctagtccccctcattaagaactagctcatttcttcctctattgcctttagttgcatacacctttgtttggttctctatttggttcctaaccctctcatgcaatttctttacaaactttgacctagattccccttctttatgtataaaagaagtgccaagtgggaggggaattaagtctaagggtgttaaaggattgaacccatagacaacctcaaaaggggattgcttggtggttttatgaaccccccctgttgtaggcaaattctacatgaggaagatactcattccaagacttat

SEQ ID NO: 189501 - DNA, 374 bp, Glycine max
gttgttcctaacactatgttgttcctaacaatggtatcaattgaataataactacaattaatgactctaattcgctaggactaagctcagacatatttctttctcaaagttctattccagccatgacccaagagcatttcttttagacttttccaaaacctagtgccaaataattatccaactcgaatagcagttggtggactctaagtttcagttcaagcttaacaatcagtgtcatactattgatcaaaacaaagcacgtataaatatgcaatactagactcaaaatatgcaacaaacactagacctaaatcagtgccacagatattggaagaaatatttatccagcacacacttaagccttattcttgatt

SEQ ID NO: 189502 - DNA, 487 bp, Glycine max
accttgaatctcagctgtgctccgatgctctaatttgttgtttcctgctcgtttattctgaacatttgaataaccaatctgataaatgcatttttgcatgtgtgtgtgaaggatatataatattctgaagaatctaccacatgaagtaaaagctcaaagtcccaccatattacatctgattctcaatgaatcatttgctgatggtttacactatgggctaaatttggcttgttccttcacttccttgaaatgagggaagccaatacaaaccaactaaattgttgactactatcatgatgcttagttctggtgctgattctccttacaatccaatttagtgagaataacattatactactccagctgaagaaaaaaatagatctccctcttgtagatgtaattctacgaccctttcattactttcgttgttatccacaatttattaaaatggattgtctactttgttcttgtgatttgcatattacac

SEQ ID NO: 189503 - DNA, 312 bp, Glycine max
gaatgacattcatgcctattacctattatgggttaactcataaaaaggagaaaaacgaggggaaaaggacttaccatccaacagtgggtcacaaactcaagaaaagaaaggagaacaactcgtcacaaagggaaatcaagccctattcttaagagtgagagatgaatctccttgtaggtagaggagaaattagagaataagagagctctgagagaagagaaggacatttgcatatcgtggttttatgagcttgaagagaacatatatatatgtgtgcgtgtgtgtgtgcgtgtgcgcgtgtgtgtgtgtgtg

SEQ ID NO: 189504 - DNA, 322 bp, Glycine max
caatgattatcaagattttctaaaacctatcagatcctctctagagaaatcatcattgtgcctacttgtacgtgccataaaaatagatacaaattttaagcgtcaaaattgggaagaatccaaaatttactattacattaaaattccttccacattgttgagggcccttactgctcacttaaactttagagttacatccttatcggatttcacaatatactcctttatgaaaaactcaaggccttgcctaaaactttcaagctcaggggtcactgctgcacgtgtgaagatattccataccaagtgttcatgatacctctaa

SEQ ID NO: 189505 - DNA, 527 bp, Glycine max
  unsure (1)..(527): unsure at all n locations
ccctttctcacttaagcaccacctccatttgaagagaaatttgaattcatgataagatgatgggctattttacttgctatgttatttgaaatgaaaactacatacaaaaaataattggagataataaatggtcaaagccaccactgccaaataactttgtcctcgtcgcttgtgtctttattgggcatcaatcccatagatgatgttgatcttgagaaacttccattgttgactatgacaaacaaattgaattacataaatgggattcaatttcacatgtacaacccaaaataanaaactntgggaaataaaagaaaaagaataattagaaaaactccccaaaacccttgcttgtattccccacaatttcactccttccctatgtaaatctaccctgcgtgctagtaacaattgatgataaaaactgttaattaattaagaatagggcataatttaaaataggatcgtctattcagttagatgactaaatagtttacaactacttgtaatagaaaatgtttattaca

SEQ ID NO: 189506 - DNA, 469 bp, Glycine max
ctcagcttcatgatgatgaatcaagcgatttcgagtttgtcaaagccctaatgatcggatcaagacttcgagataaagcattaagaatccaccccaagactccagagaagaaatcaagaagctacatgtcacgacttcatataggataagtattaaaagatctttctcaaaaaccaaatagcacagttttgttttacaaaagaattttcttaaattttctaagataccagagtgattactctctggtaatcgattaccagctgcagtaatcgattaccagtgaccagtttggttttcataatactttcaaatggttcgcgacgttcccaaacgattttcaaatagggtatcaatacactatatagtaatcgattcacggaatctaacgttggattcaaatcaattggaagagcacattctcataatacttgtgtatcgatacaccttgtgaatcgatacagtgaaagtt

SEQ ID NO: 189507 - DNA, 274 bp, Glycine max
caagtactcttcattgtttcaacccccgacaaacttacctccatcacgatctacagatcactccataactttgcttccaaacacaacccctgtcaatgttaaaccctacagatacccctattttcagaaacaagaaatagaggaacaggttaatgccatgtaagaaaaaggattcattcacccgagctcaagtccattctcatccccagtggtattggtgaagaaaaaggatggaggatgagcgctctgtgtggattatagagcactgaatgcg

SEQ ID NO: 189508 - DNA, 349 bp, Glycine max
agagctttataagcgcttgtctgagggactaacgtccacccgtcctgatatactaagatgacgttccaagtacattggatatggtacgaccatgccctcctgatttccagctgggaaatcggcgagtggaggaacgccccacattacgcacagcatatgtaaccttacgggtttaaatctctatagatacgcctaagctttagagtcccttttgataacgctatcgtgtcttatggttttatacttataatacaaggattctctcttcatctggtcctacatctttacccattctcatccatttgcatgtttacttcattatttctgaaacggcacattcgttgactag

SEQ ID NO: 189509 - DNA, 288 bp, Glycine max
acttttgaaaaatcttcagaaacaagtcacttgaagaattgtgacttttgaaaatttatttttcgaaatcagtcactggtaatcgattaccattaaggtataatcgattacacatcaacagatgtgactcttcattttaaattttgaaaattaaatcgatcataagctttggtaatcgattacaagtattgcgtgatctagtacacaagttgaaaatgttaaactcaagtttaactcttgaaattgaaatcttaacgtgtaaaacactggtaatcgattctaccttct

SEQ ID NO: 189510 - DNA, 498 bp, Glycine max
  unsure (1)..(498): unsure at all n locations
tctggtgtagatntggttttaattaatttatctatgagaagtattgtgtctntattccttcttaaattccatacgaagaaacaagataaagctaacaagagagacttttgtgtaaactaataaaaatatagaaaagaagaagaaattaacttttctatatgggtgtaaatcaagctgtaaaggtagatgttgcgaaggaaatcaatgaattattatatgattatcatggctctaaaatcaaaatatttagaggacaataagttttaatgtataaataactttgattcttatatttttatattatttattattatttctcttttttgtttaaggtttatttctattatctcttcatttgtttcacttcccatnaaagcatgagagaatcattatagtcttataaaagatagacaggactaaaaaggagattaaatgtacaatgggactatgggagaggagtatntaatttatgcatgtgtgcncatatatacacacacg

SEQ ID NO: 189511 - DNA, 356 bp, Glycine max
  unsure (1)..(356): unsure at all n locations
ttcttataaaagtataaagatttgtatttatattttttatcaaaagaaaaagaaaaggtaatctacacctgaccaatttatcagattatacgtatacacccatttgtacttactgaaggcggtttcaaatattatttctattctttgntattactttataaacaaatatttttatctgttattttaaaattttagaacatgtaagttatttcaatttttcagtttatttattaatataagcatgcaattaagttatttatttgctttgttatacaatgatcagatggattttaactttaatagatgatcaaaaatctaaaatttaataattcgtagcataagaaatgatatttttt

SEQ ID NO: 189512 - DNA, 443 bp, Glycine max
  unsure (1)..(443): unsure at all n locations
ctcttgagaaaacttttttgagaagcttctttgagaaaacattcttgagaagctagagcttagctacacacactcctataataactaagctcatcttcttgagaagctcccttgagaagattcctaaagaagctagagcttagctacacacacctctctcatagctaagctcacctccttgagatgaatagctagagcttatctacacaccccctataatagctaagctcacccccattccaaaaatacatgaaaataccaaaaaaaaaattcctactacaaagactactcaaaatgccctgaaatacaaggctaaaatcctatactactatcatggccaaaatacaaggcccaaaagaaggagtaacctattctatatattacaaagaatagtgaacccaaccttggcccatgggatcaanaaatctacccttaggttcata

SEQ ID NO: 189513 - DNA, 504 bp, Glycine max
  unsure (1)..(504): unsure at all n locations
acttacagaatgaatagtggtcttagcgcaggatggcgagcttagcgcagctatataaattttcacagagaggaagtggcacttagcgcatcattcacgctaagcccactgcttaaggtgcaacttacagtgaagatgttgggcttagcgcagcgatgtgcgcttagctgaaccattcaaccaatcaatcaggggtctttgcgcttagtgtgagcaaactcggcttagcacgtgaagagacgacgcttaacgcaagggtttgtgcttagcggataagcaattgaaaattttctaagacattttctacttatctcttcacacatnaatttaagaacccttntttgtcatgactaaacaagctgaaatcaatcacaatcacaagcaagatgtccaaactaccagcaagaaaaaaaatgaagatagagaagggaagtaaagatgggttgctcctanaagtgcttctttaacatattacttgacgctcatctgtatcaggatcaatat

SEQ ID NO: 189514 - DNA, 486 bp, Glycine max
  unsure (1)..(486): unsure at all n locations
gacctatgaaactaagctttagccaatggtcttatccttgaataattcctttgatattcctgtngagccttgattccctttccttgttttatagctcactacaagccttatatgaaaaaccatgatatcaccacatccttaaggaattttggagcattggaattgttttgggaataagtatggagggttttgtttcattggataacttgttttgttggctatgcttcatgatgtattttgggccatacttgatgtacattgcatattggttaaatgttggacatgctgaatatgatgttgtttctcacaggctacagagtacaaaaaaaaattattaataaaaaatcgaaaaagaaaaagaacagcagtaaagttgtgtgaataagataataaatgacacaagaatgatgagactctnggttctactctntatgtncaaaatntatctatacttctctttattttcttatgtattcttaatatgca

SEQ ID NO: 189515 - DNA, 337 bp, Glycine max
aagaagagagtgagagaagagaaggtgctcctcatctcaccgctctttagttcttcttccttcaaaactcgaatgacccatttccttgtttttcgttctcttgcaggtcctgaggtaaagatacaagctttgctcttctgctcactggatcgggttccaggaattcaagggtaggttcaaaaggggttgtgttgatctgcaccaagatgcttaatttgcgttgaaaaatccattcatttgcgagacttagcttcggagatgaaccagttagttgaaagctcaatgaatactcaaagggtctctagagttcaagctccactggtaagtccaattcact

SEQ ID NO: 189516 - DNA, 320 bp, Glycine max
  unsure (1)..(320): unsure at all n locations
gacatgatattgatattgatcttctgcgagttctggaatattatctcatataggatattgcatggtgtatcaggagcaccatgtgacggagaagaacgaacagcagccaacagcaatgaatgcatttgagttaacttctatgtccaaagggctgaaccttgaaaacttgtttgatacagagcacgtatcaagctgatatcattgaattgcggaggaaaataacacatgacatggacttgtttcatttagtgaactaaatgaaacagtcaattggatgaaaaaggtatacagtnttattatatggagttgttcttcttacc

SEQ ID NO: 189517 - DNA, 370 bp, Glycine max
gttgaagtattggcgaccagaattgccattccttggattatagggttgaaccaagctcatgtttatacaaaaaggttcatcaagtctagttgaaatatggaagttaccgtcttgcaaaattggggcaaaagatgaatcgagtcacatcactgcttcgtctactgccaaacatatttaggattggtgatgtccttgttacttccagatacaccttgacaaagatgtcatggaccatgttgaaaatctaaattgattcaaccgcatatcctgcgtaaaaattcgcaatactgtgactgtacatcattcgcatgcatccatgcctttcattggttgcattgctcattgcattctttccttgagaaatagaata

SEQ ID NO: 189518 - DNA, 350 bp, Glycine max
  unsure (1)..(350): unsure at all n locations
tcagcttctatccacgcaattcttggtggtgaagcaccacntccttgcttattccctagtggatggggcctcccctatcctcttctccttagcctttcgctgcatctccatggcgaaaaatcaccattgaaggacctcattgaagctcaaagatccagcctccatagaagctccacaagcaagcttccatcaaagtatgctcgagatcttccgtggttcaatttcgggcgtctccatatgtgatgtgcttgaatcggacctccgtgtgaaaagttatgaccatttgaatttctcgagaacttccgcggttcaattacaggcgtctccatatgtgactcgcttgaatcaga

SEQ ID NO: 189519 - DNA, 398 bp, Glycine max
  unsure (1)..(398): unsure at all n locations
aaccacaacctatgagatcattgattgctggggatgattcaagggtcaagtatcgctccttgctggtttcaaaagaaataatggttccctggctgctgctattatcatggcatgaattgctttgcaatatttggtaatgagtgtaaggatcaatatcttgtgcaggctgcaggtataaatggataccacctgaagntgggagctncttagacgtttgcatctaaaaagaaattattactcagtgataaaccaatgagtggcacaatttgtaattgaaaaatgttcctagctgtcctgacacatgcatactaaagcctcaacaccgtttgttgatggtagtctcatttgataacgctaatgcttcagtgcagcaaattgtcgttaaaagccaaatatct

SEQ ID NO: 189520 - DNA, 420 bp, Glycine max
  unsure (1)..(420): unsure at all n locations
gtgtgctgatgttggctacacagatagagcanctgatatttnttatgaaangaaaagatcttggacttgccagcctgacagttggacattntcatccatgattaccatgtattcccgcaatggttaagtttcagaggcagaagggatgttgaatgaaatgatccaatctggatttcaacctactatttttgttatgacatcactcatctgctgctatggaaaagcaaagcgaactgatgatgttgtgaagaatattaaacagctcctggaattgggcattggtccaaatgatcacttctgctgttctcttctaaatgttctgactcanacaccaaaagaagagcttggtaagctaacagattgcattgagaaggctaatacaaagcttgggactgtggtaagatatttgatggaagagct

SEQ ID NO: 189521 - DNA, 207 bp, Glycine max
ttctgtaacacttccatgatgttttcatgatcaattccgctaacgttcttcgccggtcttcgttcgttcttcatccgttgtcgatctttgaccggttagttttcgatttcaaagctttcaattcattctatacacccttaggggttcattctcgctttgtacaatttcatcttcatctcgtctacttttggtattctttttcttcat

SEQ ID NO: 189522 - DNA, 472 bp, Glycine max
  unsure (1)..(472): unsure at all n locations
gtggtaatcagagtacaagagcttcaagtaggttctccttaaacctctcttannatttttctttaccttctcttccaatgttgtttcttcatataaatccatgtatctcctcacatgtcttgtgataaatgtttntaacatgattctttagagtttccaccgattaaacttgctatagaagctagatttgattttctatggttcaaatttcttgttcttgttcttgaaccatgaattgtgttgagtttaggttcctatgagttttgtcttgttattttttttcagctganacctaaaccatataattattacaaaaatattaaagtatgagaacctcananatctagactgacttgttcacctattgtagntttgtcatagaagtcatgtctagtcatgaaacttgtcacataagaattcttatgtngngctgaattnntatttcttgtttctttgctaactcatttgtcat

SEQ ID NO: 189523 - DNA, 342 bp, Glycine max
caccttagatggtcgagtccttcacaatagcagcaacaacaacaaccttatttcataatgctggtggcccaagcaaatcatatgttcctccaccaatccagcaacaacaacaaacaacagccctcagaaatatgcaaacaagttgagggctcctctgcaagcttcccttgaagaacttgtgaggcatatgactatgcaaaacatgcagtttcaacaagagactaaagcctccattcagagcttaactaataagatgggacaattggctacacagttaaatcaacaactgtcccaaaatctgatagataccctctaatctgctagaatccaaaatggagtgta

SEQ ID NO: 189524 - DNA, 475 bp, Glycine max
  unsure (1)..(475): unsure at all n locations
tctacttatgtggcagggcgggcttccctcactttcttgtcttcaacgcgagctttgaccactgctcttccttcccgcgatgcttcttttcatatccgcctgagtgggcttatagcctaaaccatacttcccacgatttcctttggcatttatcaggctagttatgccgccgttgtctttgcctaaacccattccgggttcgtaaccgttccccaacataactcgggccatcattactgctgcatcggacaggcaaggctgcccagagaaggggtccacagaggaaatgcttaccacctcanaagactggaaagcagtttctaacgattcctctgcggcttccacataaggcatagaggatgggcagctcaccaagatgtcttcctcgcttgacacgatgaccacatgcccctncactacgaattntaacttttggtggagtgtagagggcacaactcccactgagtggatccac

SEQ ID NO: 189525 - DNA, 293 bp, Glycine max
caaataccttattaacattcacctattattctctttattctcgtaggatatcgcattatctatcatatatatatttttaaaaaaaacctttctctttctctaagtgtcaagttaatagtttaatcgatgagtttcattttaaataaactaaaccaagaatacaagttatacttaattgtagaaagtttcacatttgaaactcttgttgtaaatagaagtgtgggtacgtgtttaagaacaattcatagagccaaagacgaaaagggaggattatagacaaaaagtgtaattca

SEQ ID NO: 189526 - DNA, 357 bp, Glycine max
gagctgagtatagatatccagagaatcactcagttatattcgcgatatatgcttatacaataattgaatgcactgaagtgttagtgtttatttactacaatattttttcattctatgaatatttgcgtggttgtcttataaagaatgcatatgatttttaatttaattatgtgaataccgcggttgaatcttctcaaatatcgtgccatctaagaacaacataatttatgaactctctataacttattttatcgatcaaaatcattatctcattaacagcgttgccttcatactttaagggataaactcttgagacaagaaagattgacaacttattgtattattaatcaaacatta

SEQ ID NO: 189527 - DNA, 425 bp, Glycine max
  unsure (1)..(425): unsure at all n locations
attcttgcggagtccttcccggtataagtacaatttataccatcccacaagtattctataggggcgcatggattcattgcatatgaaagacacataaatcatagtagatccattgccgataattctttgcattgatcaagaaaaatttccaaccgaccaatcaagaaccaaaaatngaaaattggccccacaaactaacaagggtcatctcagtgcttcaaacaaatcttcacaagagatntaatgcctaaatcctacttatgcttaaagcaaatttgggggttttttttactttgattcctggtcccacctttgtgccgtaacacatttccatctcctgaggtatccaatggacttcttttcaagaccagctcctcacaaattcacttgattatgcatcctccattcaaaaggattccacatgt
